United States Patent Application Publication US 2014/0141044 A1 - sequence listing, part 9

SEQ ID NO: 7835 - DNA, 714 bp, BradyrhizobiumColbertium
gtggacaaccggcgcgcccgcattagactggcgggcatgaccgacaccctccccgataccatccgtcgcctctacaccgatcccggcgaatacatcgacagcgatcatcccgcggtgcagcgtttcgccgaaaccagcgtacgcccggaggcggacgcacgcgagaaggcgagcgtgctctacaaggcggtgcgcgacggtatccgctacaatccctatgtcagcatgcgcgtcgccgagacgtttcgcgcatcgagcgtcctcgctgcggggcagggctattgcgtcggcaaggccgcgctctatgccgccgcctgccgcgtccacggcattccggcccgcgtcggctttgccgacgtgaagaaccatctcaccaccgagaagctccgcgccagcatgggcaccgacatcttcacctggcacggtttcaccgaggtgcatgtcgacggcgcctggcgcaaggcgacgccgacgttcaacgatacgctctgtgcgaaggtcggcgtggcgccgctcgatttcgacggccacagcgatgcgttgctgcatccgttcgacggcgaaggccgcgcctacatgcagtatgtcaacgaccgcggcacctatcacgacgtgcccgcgaagttcttgatgcgcgagatggcgcgcgtctacgccgacatgcagggcgaggatctcacgggacgcgatatggagcgcgaagcggagcagtga

SEQ ID NO: 7836 - DNA, 786 bp, BradyrhizobiumColbertium
atgcccaagctgaagcgagacgagcgcgaggaacgagccacggatttcgtcgagagcctcgatcgcgggctgcgcctgctgcaatgcttcggcaccacggcaggtcccacgacgctgagcgatctcgcccgcgccgcggagcttccgcgcgccaccgcgcggcgcatgctgttcacgctgcagcgtggcggcttcgtcattggcgatggaaaactgttctcgctgacgccgcatgtgctgaccttggcggcctcatatctgcgatccaaccagctcgtcgcggttcttcaacccgtgctcgatcgcatcgcgaccgcggcgcaggaaatctcctcgctcgcggtgctcgatggcgatgaggtcgtgttcatcgctcgcggcagtccggcgcgggtgttttccggcgggctcgaaatcggctaccggctgccggccttctgcacttcggtcggccgcgccatgctcggccagttcgatgatgctgagctcaccgcgcgcctgaagatgatgaaacgcgagcccctgacgccgcagacggtgacggacccgagggcgctgctcgcgcgcatcgcagccgatcgcgcgcaaggctactcgctcgtcgaccgcgaggctgaaccccatttccgctcgatctcggtcccggtccgccgctatgacggcgtgatcgtcgccgccatcaacatgggcgcgcatatcgaccgggtgccggcgcaggaattggtcgatcgcttcctgccgctgctgcgggagggggcaggctctgtgcgctcgctattgttgtga

SEQ ID NO: 7837 - DNA, 1359 bp, BradyrhizobiumColbertium
atgatgagccaggagcagaacgacctgatcacccgcaccgggcccaaggatccctgcggcaagctgatgcgaagctactggcagccggcggcgctggtggacgagctggagggcgcgcggccgatccgccccgtcaggctgctcggcgagaacctggtgctgtttcgcgacgagaccggacgctacggcctgatcgaccgccattgcgcgcatcgcggcgccgacctcgccttcgggcggctcgagcatggcggcctgcgctgctccttccatggctggctgttcgacgcgaccgggcagtgcatcgagaccccggcagagccgaaggattcgaagctctgccagaacatccgccagcgctcctatcccgtcgtggagaagagcggcatcctctgggcctatctcggcgagggcgagccgccggcatttccggagatcgactgcttcgttgcgccgggcacgcatacgttcgctttcaaggggcacatggcctgcaactggctgcaggcgctcgaagtcggcatcgatcccgcgcacgcttcctatctgcaccgcttcttcgaggacgaggacacctcgaccgcctacggcaagcaattccgcggcgcctccgccggctccgatctgccgatgacgaagatcctgcgggaatacgaccgcccgatcatcaacgtcgagcacaccgaatacggcctgcgcctcatcgccctgcgcgagatcgacgaggagcgcacgcatgtgcgcgtcaccaaccagctcttcccgcacggcttcgtcatccccatgagcacggagatgacgatcacgcagtggcacgtgccggtcgacgacgagaactgctactggtacgcgatcttcaccagctacacgaacccggtcgacaagcagaaaatgcgcgaccagcggctcgagctctacgagctgcccgattacatctcgcgcaagaaccgcagcaacgattacggcttcgatccgcacgagcagcagaccgcgacctataccggcatgggcaacgacatcaacgttcacgaccagtgggcggtggaatcgatgggggcgatccaggaccgcaccaaggagcatctcggccagagcgacaaggcgatcgtgcaatatcgccgcctgctgcggcaggagatcgagaaggtctcgggcggcgagaagccgatgctgttcctggacgaggccaacgcgcgcagcatccagggtcccgcgaccatggacggaatcgggccgacgcggggctgggagacctactggatggaggtcgacgtcaagcgccgccgcggcgcgccatggacggcaccggtgccgaaggagatcgccgccaaggtgcatcggctgacggcggctgaatag

SEQ ID NO: 7838 - DNA, 1437 bp, BradyrhizobiumColbertium
gtgactttcgtcgcgcgtcatgcgctgtggtcggatgagcaaagggacgccgcctcgcgcatgcgtcgtctcgccgaggagaagaacctcgaagtcatccgcctcgccttccccgaccagcacggcatcctgcgcggcaagaccatcatcgcagcggaggcgctcgcctcgctcgagagcggctgctccatcaccacgaccatgctcgccaaggacacctcgcaccgcacggtgtttccggtgttcaccgcgggcggcggcttcggcatgaaggagatggagggcgccgcggacgtgctgatggtcgccgatcccaccacgtttcgcgtcttgccgtgggcgccgacgacggggtgggtgctgtgcgatctgtatttcaacgacggccgtcccgtgccgttcgcgacgcgcgggctctacaggcgcgtgctcgatgaactcggcacgcgcggttacgatttcgtcgcgggcctcgaagtggaattccacatcttcaggctcgaggatgcgcatatgcgcgccgaagatgccggccagcccggcacgccgccatcggtcagcctgctcagccacggctatcaatatctcaccgagcagcgcttcgatcagatggagccggtgctcgagatcctgcgccgcgacatcgtcgcgctcggcctgcccctgcgctcggtcgaggtcgaattcgggccgagccagtgcgagttcaccttcgcgccgaagaaaggcctcgcgcccgccgacaacatggtgctgttccgcagcgccgtgaagcagatcgcgcgccgccacggctatcacgccaccttcatgtgccggccgaaactgccgaacgtgttcgcaagcggctggcacctgcatcaatcggtcgtctcgcgcgcgagcggcgacaatctgttcatggcgaaagacggcgccgaaccgctcagcgcgttcggccaggcctatctcgccggactgcttgatcacgcccgggcgtccaccgtgttcaccaccccgaccctcaacggctacaagcgctaccgctcctattcgctggcgccggaccgtgcgatctggggccgcgacaatcgcggcgtgatgatccgcgtgcttggcggcgcgggcgatgccgccacgcggctggagaaccggatcggcgagcctgccgccaatccctatctctacatggcctcgcagatcctctccggcctcgacggcgtcgagcgcaagctcgatcccggcccgtcggcggacacgccctacgagaccaaggcgccgctgctgccgaagagcctccgcgatgccgtcgccgcgctgaaggacgatccgttcttccgcgagaagctcggagccgagttcgtcgactactacacccacatcaaggacgccgagatcgaccgcttcctgtccgaagtgaccgactgggagcaccgcgaatatttcgagatgttttga

SEQ ID NO: 7839 - DNA, 282 bp, BradyrhizobiumColbertium
atgctcgccatcggccgtgcgctgatgaccaacccgaagctgctcattctggacgaagccaccgagggcctcgcgccgctgatccgcgaggagatctggagctgcctgtcgctgctcaagagccgcggacaatcgatcctggtcgtcgacaagaacgtcgatcacctcgcccgcatctgcgaccgccactacatcatcgagcgcggcaagacggtgtggagcggcagctccgacgagctgatggccgagccggatctgcagcataagtatctggggatctag

SEQ ID NO: 7840 - DNA, 768 bp, BradyrhizobiumColbertium
gtggctgaacccctgctccgcgtcgagaagctggtgcgccgcttcggcggcatcatcgcgacggacaacatatcgctcgacgtcgccagcggcgagctgcatgccatcatcggtccgaacggcgccggcaagaccacgctgatcagccagctcaccggacatctcgcgccgcattccggcagcgtctcgctggcgggacgcgacatcacctttctgccggcctatcgccgctgcgcgctgggccttgcgcgttcgttccagatcacctcgctgctgctcgatttcaccgctgccgacaacgtggcgctggcggcgcaggcgcatgcgggcacctcgttccgcttctttgccaatgcccgcaaggagaagggcctgcgggatgccgcgcatgccgcgctcgatcgtgtcggcctgttgcatcgcgccgacgtcgtggtgtccaggctgagccatggcgaacgccgggagctcgagctcgcggttgcgctcgcaagcaagccgaagctgttgctgctcgacgagccgatggcgggcctcggggtcaccgaatcccagcgcatggtgaagctgctccaggagctacgcaaggaagtctcgatcgtgctggtcgagcacgacatgccggcggtgttcgcgctcgccgaccgcatcacggtgctggtctatggccgcgtcattgcctcgggcgatcctgccgcgatccgccagaatgaggacgtcaagcgcgcctatctcggcgatcagcatgtggtgacgcaccatggctga

SEQ ID NO: 7841 - DNA, 945 bp, BradyrhizobiumColbertium
atgaaggctttcacggtgagcaaggccgtcacggccctgatgctggcgggcctcgtgctgctgccgctctattcgcacttgtccggcaacatcttcatcctgacgctgttcacccgcatcatcatcctggcgctggcggcggcgagcctcaacctcatcatgggatttgccggcctgatgagctttggccacgccgcctatctcggcatcggcggctacgccgtcggcatgctcgcgcaggaaggcgtgggaagcgggttcatccagtttccggtcgccctcgccgcttccgcgattttcgcgctggtgatcggcgcgctgtcgctgcgcacccgcggcgtctacttcatcatgatcacgctcgccttcgcccagatggcctattatgtcgcctcggggctggcccgctacggcggcgatgacggcctcacgatctacaagcgcagcgacttctccggcctgatcgatctcggcaaccgcacccagttctactatctctgcctcgcctgcctgttcggcgtcatcttcctgatctggcgcatcgtcaactcccgcttcggcctcgtcgtgcagggcctgcgctccaacgagcagcgcatgcaggcgatcggcttcccggccaagcgctaccagctggtctgcttcgtcatctcgggcacgatgtgcggcctcgcaggcgcgctgctcgccaacaacaccgatttcgtcagcccggccgtgatgtactggacgcgttccggcgacctcatggtgatggtgatcctgggcggcatgggcacgctgttcggcccggtcatgggcgcggtggtgttcctgctgctggaagagctgctgtcgcagatcaccgaatactgggcgctgatcctgggcccgctgctgctgctgatcgtgctgttcggccgcggcggcatcatgggtgcgctggggagggccaaccgtggctga

SEQ ID NO: 7842 - DNA, 918 bp, BradyrhizobiumColbertium
atgctgctcgtcgtcgaacaattcttgaatgggttgcagttcggcctgctgctgttcctgctcgccgccggcctgacgctggtgttcgggatcatggatctcgtcaatctcgcgcacggctcgctctacatgatgggtgcctatttcgccgcgacgttcgcggcctggaccggcagcttcctgctcggcgcgctgatggcgttaggggccacgctggtgctcggcatcgtgctggaggtgacggcgctgcggcacctctatggccgcgaccatctcgaccatgtgctcgcaaccttcggcctgatcctgttcttcaacgaagcggtgcggctgatctggggcccggcgggccttgcgctgccgctgccagcctggctcaccgtgccggtgccgatcctgcccggcattcactatcccgcctaccgcctcgccatcatcgctgtggcgctgctggtcgcgctgttgctctatctcggcgtgatgcgtacccgcatcggcatgctgatccgggccggcgcctccaatcgcgagatgatcggtgcgctcggaatcaacatcaagttgctctacacgctggtgttcggtttgggcgccgcgctcgccggccttgccggcctgatgcaggcgccgatcctcaccgtgcagatcggcatgggcgagaacatcctgatcctcgccttcgtcatcatcgtgatcggcggcatcggatcgatccgcggcgcgttcctcgccgcgatcttcgtcggcatgatcgatacgctcggtcgtgccttcctgccgaacctgctccggcaggtgctgagcggcgccgccgcctccaccgccgcgcccgcgctgtcgtccatgcttatctatctcgtgatggcgatcgtgctggtggtgcggccggaggggctgtttccggccaatcgtcgatga

SEQ ID NO: 7843 - DNA, 114 bp, BradyrhizobiumColbertium
atgcgggtgcatgcggtcgaaacggccctgcaagaaggctgccggaacggctggggcaacctgccgcagccaagggatcaccctcccgcgcttgcccaagcggatctcatgtga

SEQ ID NO: 7844 - DNA, 219 bp, BradyrhizobiumColbertium
atgtcgaacatgatgcgggacagccagctcatggtgcaaatcaaggacgagaatctcggctacatgtccgacatggcattggagcttgctcagatggcggaggattccggactgatgacgctcgcttatctgttccggatggccgcgctggaggcctcgacggccagcagcgtgctcgccgagccggaccagcttccccggcaggtgacgtcgcactag

SEQ ID NO: 7845 - DNA, 660 bp, BradyrhizobiumColbertium
atgattcacgcaatttccgcgatcaaccgccacctttacgaagacgtgatcgagcagcatttccggctgcgtcacgacatcttcgtcgaggagcgtcgctgggagactctgcgcaggccggatggccgcgagatcgattcctatgacgacgaggacaccgtctatctgctggcgctggaagggcgccgcgtcgtcggcggtcaccggctctacccgacgaccaagccgtcgatgatgagcgaggtgttcccgcatctggcgtcgatgcgcgggtgccccgccgatccgctgatttgggaatggtcgcgcttcttcgtcgttcgtgatcgccgcgacggcgcactcaacgcgcaactgatggcggcggtgcaggagttctgcctcaatcaggggatcgcgcaggtcagcgcgatcatggaaacctggtggttgccgcgctttcacgaagccgggttcgtcgtgacgccgcttggcctgccggctctggtggagaacgcatggaccatggcggcgaccatcgacattcgtcggcagacgctcgatgccctgcgtgatcggatcggcatggcctcggtcgttcgccaggacggcccgcgtctggatgccgtcgcccgtgccaacctctgcggcctcgctgccgcgcaacgaaagagtgcctga

SEQ ID NO: 7846 - DNA, 732 bp, BradyrhizobiumColbertium
atgtctgccgtcgtggattatggccgggaggcgctcgacttcatcgaaggcctggagacctatcgcaaggtacctgacgccatgaatgcgctcgaaacagcgttcggtcgcttcggcttcgaaaccatcatcgtgacgggattgccaaaccctgaccagcagtttgcacaaatggtgctcgccaagcgctggccggctggatggttcagcctctacacccagaacaattacgaccgcttcgatccggtggtgcggctgtgccggcaatcgatcaacccgttcgaatggtcggaagcgccgtatgatgccgaactcgagccgtacgcggccgaggtgatgaatcgcgccagcgagtttcgcatgtcgcgcggcttcatcgtgccaatccacgggctcaccggctatgaggccgcagtgtcgctcggcggcgtccacctcgacctcaatccccgcagcaagccagcgctgcacctgatggcgatgtatggcttcgaccacattcgccgtctgctccagccggtgccgcattcgccggcgcgcctcaccccacgcgagcgcgaggtgatcgcctgggcctcgcaggggaagtcagcctgggaaatcggcgagatcctgcatatcacgcagcgcacagccgaagagcatcttgctagtgctgcgcgcaagctcggtgccgtcaaccgtacgcatgcggtggcgctggcgattcggaacaagatcatcaatccctaa

SEQ ID NO: 7847 - DNA, 177 bp, BradyrhizobiumColbertium
atgcaagacgaggacatcgccctcaacagcgtgctcggcctggaattgaaccgcgtgttttttgctgtccacgcaacggcaaacaagcagaagatcatcgagtttgcgcgcgaggtgctgcgaggcgagcgcgcagagctggccgaaagcatattgcccgaggggccggcaagttaa

SEQ ID NO: 7848 - DNA, 213 bp, BradyrhizobiumColbertium
atgagcgagttcgaaggccgcatgcaaaccatgctggatgcggcactcgatgcggccttcagtcacgtcaggcatggcggcgatcatgagagcaggaagctgattgccgcgcggctgatggaagcagcccgttccgggacgacggctttggaggaactgacgtcagtcggccgccgtgcgctgatcgatctcacaaacagttcgtctgattga

SEQ ID NO: 7849 - DNA, 1698 bp, BradyrhizobiumColbertium
atgactgaaggcatcacgaaatctgcaaccggcatcgaaggcttcgacgatctcacacttggaggccttcccaccggacggccaactctggtctgcggttcggccggctgcggcaagacattgttcgcgtcgacattcctcttcaacggcgcgcggctccacgacgagcctggggtcttcgtaaccttcgaggagcgccccgtcgacatcgtggccaacgttgactcgcttggctttgatctacagggactgatcgatcagtcgcggattcacatcgagcacatcgagatcgatccagcggaagtcgcggagatcggcgactatgatctcgaggcccttttcctgcggcttgaattcgccgtcgaccagatcggcgccaagcgcatcgtgctcgacacgatcgaaagcctgttctccgcattttccaacccagcgatcctgcgtgccgagatccgccgcctgttcgactggctcaagcagaagggcctgaccgcggtcatcaccggcgagcgcggcgacggcagcctgacacgtcagggcctggaggaatatgtgtccgactgcgtgatcctgctcgatcaccgtgtcgacaaccagatctcgacgcgccgcctgcgcatcgtcaaatatcgcgggaccgcccacggcaccaacgaatatccgttcctgatcgacgaggacggtttcagcgtgctgccggtttcctcgctcggcctcggccacaaggtattcgacgatcgcatctcgaccggcgtgcctgacctcgacgccatgctgaccggcggcggcttctatcgcggcagcagcatcctgctcaccggcgtcgccggctcgggcaagagctcgctggcctgcatgatggccaacgctgcctgcgaacgtggcgagcgcgcactctatttgtcgttcgaggagtccgaggctcagaccgttcgcaacatgaagtcgatcggcaccgacctcggcaaatggctgaaggacgggcagttgcgttacatcgcgacacgcccgacgttctattctctcgagatgcatctcgcgatcatgttgcgcgagatcggcaggttcaagccgcagctcgtcgtgctcgatccgatctccgcatttaccgggtcggctgacatcagcgaggttcagacgatgcttttgcgcatcgtcgactacctcaaatccaatggcgtcacggccgtcttcacccatcttgccaacgtccagcaggcggaaaccgatgccggcctgtcgtcactgatggacggatggatcctgttgctaaaccgcgaggcgaacggcgagttcaacagagagctctatctgctgaaggcgcgaggcatcgcccattccaaccaggttcgcgagttcgtgatgtcgagcagcggcattcacctgctggagccctacctcggcgaaggcggcgcattgaccggttcggcccgccgaaacgaggaagcgcgggcccggcggacagaagcgacgaggcggtccgaggtcgcgcgcctgcaggaccaggtgacgcagcggcggcggcgtgccctcgcgcagatcgaggccctcaaggccgatattgatgccgacgaggctgaactcaaccgcctcgtttcggccgagacgcattaccttcagcagagccgggacgacgccgcagcacttgcgcggggacggggaatggaagccccctccggcaagacaagacaggactga

SEQ ID NO: 7850 - DNA, 264 bp, BradyrhizobiumColbertium
gtgaagctcgtcctctacgtcgccggcgagacacccaaatcgctcgccgcgatccgcaatctcgaaaagatctgctccgaacatctggcaggcaagtacaaggtcgaggtggtcgatctcaagaagcagccgcagctggcgcgcgagcacggcatcgtcgccatcccgaccctggtgaaggagcttccggtccccattcgcaagatcatcggggacctttcggacacccagaaggttctagttcatctgtcggttgagggatga

SEQ ID NO: 7851 - DNA, 1485 bp, BradyrhizobiumColbertium
atgacggtggtgtcgctcgtatccgcgttgacccgggatgagctcgaagctcggctttatgaagccgaggagacgctccgggccatccgcgagggcgagatcgatgccgtggtcatcaagggcggagccaccgaacaggtcttcacgctcgaaggcggcagccagtcctaccgcaccttcatggaggcgatggacatcggcgccgcggccttcgacgccgagggccagctgctctatgccaaccaggcgctgtgcaaattgctggaccggccggccggcgcattgtcggggcaggcgctgctggacatcctcgatgccgtcaatcagaccacgttccgccgcctgctgacacaggcgttgaaggaacgccaatccgccgaaatccacgttcgcgtgggtgacagcgagcgcagctttctcctcacgggagccccgatcgatttcggcatcgtgagcggggtcgcgattaccttcacagacatcagcgaacgggagcagatcgccgccgccaaggaatcggagcggttggcacggtcggtgctcgcctcagccaacgaggccgtcatcgtttgcgaccgctccggcagggtcactcacatcaatgctgccgccgagcggatctgcgccgaggctccgatcggaaagccgttcgaggaggcgatcgagctgaccttcgccgatgcgtccgagctgatgtcaggcgccgatatcgtcgcgatggcgaccagcggcacgccggttcagggactcgaagccgccgtgaagacatcggcgatcgacgtcacggacgtcatgatcagcgcagcgccgctcatcgtatccggcgaccggacacagggctgcgtggtcacgctgatcaacctgtcgcagcgcaaggccgccgagcgccgccaggctcttctgatgggcgagctcgaccaccgcgtcaagaacacgcttgccatggtgctggcgatctcggcccgcaccgcagctcacgaacgtacgatcgaggacttccagaaatccttttccggccgcatccaggccttggcggccacccacacgctgctgtccaacgcgtcctgggagaacctgcagatcaaggatgtgcttcgcgtcgagcttgcgccctatgcaacgctatccagcggacgcatcaccatggaaggactggacatttccgtggattccaagacggccgtctcccttgggctcgtcttccacgagctgacgaccaacgcggtgaaatacggcgcgctttcgacccgatccggcaagctgtcggttcggcgccttggcctgctcgaggacggcgccctgcagatcgaatgggaagaacgcgatggccccctggtgacgccgccgacgacctcaggcttcggacagaccttgatctcgcgcagcctgggtagcggtcccaacggcggcacgaagctcgaataccgtccgagcggcgtggtttgccagatcgtgattccgaaatacggccacttcctttcctga

SEQ ID NO: 7852 - DNA, 411 bp, BradyrhizobiumColbertium
gtgaaggacgccctgcctgacgatcccgagacgctgaaggcgatgctgctcgccgagcgatgcgagagcgaacggctgcgtcagatcatcaaggaaatgcagcgacaccggtttggccggcgggcggagacgctgcccgaacatcaaatgctgctgggcctggaagacgttgagcaggtcgcagcgtacggcgagacggcgcaggacgtcagcgcaactgaaggccgtgaggcgcgggctcgcaagcgccgcggtaaccgtggcgccttgccggtgcacctgccgcggatcgaggtcgtcgtcgacatcgaggaaagacctgtccctgctgccaaggcgagttacaccggatcggcgaggatagaagcgagcggctggacttggtcccggcgcagttccggatcctcgtga

SEQ ID NO: 7853 - DNA, 297 bp, BradyrhizobiumColbertium
atggctcagattggcaccttcacccgcgccgaagatggatcctacagcggcaccatcaagacgctctcgctcaacatcaaggcgcgcttccttccggccgaaccgtccgagaacgagaaggctccgagcctgcgcgtgatggccggcaacgtcgagataggtgccgcgtggcagcggacctccaaggagaacaccgtctatcattcggtgaagctcgacgacccgtccttctcagcgccgatctacgccaacctcgtcgcggtcgatgacggctacgcgctggtctggtcgcgctga

SEQ ID NO: 7854 - DNA, 1053 bp, BradyrhizobiumColbertium
atgcatgcggcgggttttgcgctcgacaatgttttggacgggctcactgcatccgcggctgccttcaaagggaagaagagcatccgcgcctacgccggcgcaggtcggctgttcatccgctatcttcaagatcgagaaacccttcccagatcggcaccaccgccatcgccgacagagatctggccgctccttgcggcattccggcgctggatgcgcgaccagcgtggtgtggtcaactcaacgctcgatacctatcagtcgaccctggtcgatcttctcgaagcgctcggcgacaatccaacagcctttaccgcccatgcaatccgagcctttgtccttgaacgtgccaagccgcacagccgcgggcgcgctaaatcgattgccgctgcaacacgggcgttcctccgcttcctggtggcgactggacaaagcccggtaggacgcgattatgccgtccccggcttcgccaactggcaattggcgtcggttccgagattccttgccgcagacgatatcgcccgcgccatcgcagcttgcgagggcgaagggcggttgcgcgacaaggcgatcgttctgctgcttgcccgtctcgggttacgggccagcgaggtggccgatctgaaattggccgacgtcgactggcggaatgggcgcattaccgtcgccggcaaatccagacgcgaggagtggcttccgctgacccaggaggtcggcgatgcgatgattgcctacatcgagcgagtcaggccaccgttgtcgacgccccgtttgttcatcaccgaagccgccccggttcgaccgctgacccgcatcgccatcaaatgcatcgtgcgtcgcacgctgctccgagccgggatcaaaagtgcccatcaaggagcccatgtgttgcgccattccgcagccacgacgatgcttcggcatggcgtcagtttgacaggcgtcggcgccgtcctgcgtcaccgatcgccggcaatgacgatgcactacgccaaggtggacttcgccctcttgtcggagatcacgcagccctggatcgggaggctgccatgctga

SEQ ID NO: 7855 - DNA, 915 bp, BradyrhizobiumColbertium
atgctgagcgatgacgcggaacgttacatcgagcttcgccggactcttggcttcaagctccgaaagccgtcgcgacaccttcaatcctttgcgcgctttgcgacggaaaagggcgagagttatgtcagcgccgccacagcgctggaatgggcgacgatggcgccaactcggtgcacccggcatcgccgcctcggtgacgtggtgcggttcgcgcgctttttgcgggccgagaataccgctcatgaggtgccggtcattctctttgccgaacgcgcatcgcggcccgttccctatatctacacgccggatgaattgactcggatccttgagggcgccggccaactccgccggcaaaagcccaaccccttacgtcggcagctctatgtgatgctgttcggattgatcgccgccacggggctgcgcgtatccgaggcgctcgaccttcggttcgacgacttactggccgacggtgtcttgcatatccgcgacaccaagttcggcaaaagccggctcgtgccgttgcacccgaccgtggtggaggctctcgaccgctatctcgacaggcgccgccttgtcgcgggatcggacgatcacctgttcccctcggcgaagggcaagagactcgcctccagcacggtgaactatacattccgctgtgtcctgcggtttgcgaatattgctccggagcggccccggcggccgcgcattcatgaccttcgccatagcttcgcgacgcatgttctggagcaatgcaacaccgagcgcgacgcggtcgcccgacacttcgtcgcgctggcgacctatctgggccacgtcgatatcaagcacacttactggtacctacaggcgacaccggaactgatgaccgacatcgccgccgcggccgaaacgttgatcatgggggagcccatatga

SEQ ID NO: 7856 - DNA, 1008 bp, BradyrhizobiumColbertium
atgaccctccttgctcctctgatcaccggcttcctgcgcgactacatgccccgtcagcggggctatagtccgcatagctgcgaggcttatgcctacagcttccggctcttgttcgccttcgcggcgaagcgcatccagacaaaaccctcgcagcttcttatcgaacagctcgacgcggcattgatcctggactttcttggtcacatcgagcgcgagcgcggcaatggagccgccacccgcaatctgcgccttgcctcgatcaagacgttcatgcgctacgttgaataccaggtgccttcggctctggagcagatcggtcagatccacgccatccccgtcaagcgccacgatcagaagcttatccgtcacctggtcatggtggaggtgcgcgcgatcctgaatgcgccggacctcacgacacgtctgggcgtacgcgatcgggcgatgatgcatctttgcttcgcggccggactgcgtgtctcggaactggttggggccatgatggcgaatctatccctgcagcggccgccgagccttctggtcctgggcaaaggtcgcaaggagcgatgtcttccgctttggaaagaaaccgcagccgatctgcgggcgtggttgaccctgcggggctcggttcgtgtgcccgagctcttcgtcaatgccgaaggagcgccgatgacgcgggccggcttcgagtacgtgctggagaagcatgctcgggcggcggccgagacgtgtccgtccctatgcaaccgttcgatatcgcctcatcagctgcgccacagttgcgcggtgatcatgttgcaggccacacacgacatccgaaaggtcgccttgtggctgggccatgccgatatccgcaccacggaggtctacctgcggatggatccctccgaaaagctggaggcggttgaagcggtcgttccgccggagctgcggcgcggacggttcagagcgccggatgcgttgatcgcctctctgttagcggacacatcgccgccgccggcgtga

SEQ ID NO: 7857 - DNA, 297 bp, BradyrhizobiumColbertium
atggcccagatcggtaccttcacccgcggcgaagacggcgtgttcgccggcaccatcaagaccctctcgctcaacgtcaaagcgcgcctcgtcccagccgacgaatccaccaacgacaaggccccggacctgcgggtgctggtgggcaacgtcgagataggtgccgcgtggcaccgcacctcgaaggagaacaccgagtaccactcggtcaagctcgacgatccgtccttcccggcgccgatctacgccaacctcttcaagggcgagaccgactacaccctcgtctggtcacgctga

SEQ ID NO: 7858 - DNA, 246 bp, BradyrhizobiumColbertium
gtgatgccgattgaaccgcccgagattccaccctcgacaccaggcacgccgaccgagccgccactcggagtcccgcccggcaatccgcagcccgaaatcacaccgccggtccgcgagccgggcgaatcaccgagccccgacgaattgccgggccgcgtgcccgaagagattccatcgcgcggtccgaatggaccgctgacgccgaaccctgcgacggacgcgagttcgtcgcgcggttacgcttga

SEQ ID NO: 7859 - DNA, 486 bp, BradyrhizobiumColbertium
atggccaacgacaatgcccgcgacgtcgatcgcgtctgggacctgatgaagacaatcggattcgcaatgcttgtcacacgcgacggcggcaagctccgtgcccggcccatgagcgcctatctcgatcgcgccgcgaacacgattttcttcctgaccgatgcgcgcaatcacaaggacgaggaaatcgcgcgcgatccgtcgatcaacctgtcgttcgccgaggccggcagccagaagtacgtttccctgacgggcaccgccgtcatctccaacgaccgtgccaagatcaaggagctgttctcgacacccgccaaggcatggtgggactccgcggaagatcccaacatccgcgtgctcaagatcacgcctgatgacgccgaattctgggactcgccggggacggtgatctcctatgtgaagatggcggccgctgcagtcacgaatacgcgccccgatctcggcgagaaccgcaaggtctcgatgtga

SEQ ID NO: 7860 - DNA, 294 bp, BradyrhizobiumColbertium
atggaagtgacggcggagcagaccggtcacgccgcagccgcaggtttcggagcggacggcaagccggacttctggttcggcggcgacggcgccatgaacaagccggtgcatatcgcgctccgcgccaaggaccgcgctacggtggatgcgttctacaacgcggccatcgcggccggcggccgcgacaatggtccgcccggcatccgcccacattaccatgcggactattatggcgcattcgtgctcgaccctgatggccacaacatcgaggccgtctgccacgcgccggaatag

SEQ ID NO: 7861 - DNA, 825 bp, BradyrhizobiumColbertium
ttgacgaccgacaacaattcttcgtccgcgccgttcggcacgtttgcgccgaatgcggcgcaggcggcgatcatccgcctcgctcaacgatcgcgactgaagcgcggcgccttccggccctggatgtcgcggctggtgaacctcgtgcgcagcggccctgtggacgtgcaatatcagggcgcctctttccggttctatcatcagggcagcgcgaccgagcgcggcgcgctattcaatcccgagtacaatctcgacgagctggatttcctgcgccagcacacgtccggcggcggcgtgttcgtcgatgtcggcgccaatgtcggcacctttgcgctggtgatggcgcggcaggtcgggcccacgggtaaggtggtcgcgatcgagccgcacccgctgacgttcgcacggctctcgttcaaccagtccgcatcgaaagcggcgcaggtgcgcctgttgcaggcggccgcgggcgacaaagatggcgagctgatgatcgagagcggcggcggcaatctcggcgccacgcatgtcgttaccggcaccgcgagcaccgacgcgatcaaagtcccgtcgctgcggctgacgcgcatcctcggcgaggccggcgttacgcaggtcgattcgctcaagatcgacgtcgagggattcgaggaccgcgtgctgatcggattcttccgcgacgcgccgccatcgctgtggccacgcgctgtcgtgatcgagcatctgtcacaaaacgaatggcagcaggattgtattgccgacatggtcgcgcgcggctttacgatcgcgcgcaagacacgaagcaatacgttcctgtcgcgctga

SEQ ID NO: 7862 - DNA, 2154 bp, BradyrhizobiumColbertium
gtgcagggcgcgcaacgcaaatcgctcagactgctgcagtggatgatggctgcatccctggcgcttccggttgcgctgttcgcgatcacttccgcgatttcctacacctcgaccacagacatcgccgaccgcgagatcgagcgcacgctcgacgtcgcgcatgagcacgcactcaaggtgttcgagacgatcgaccgcagcctcgccgaactcaacgaggtcgtgcgcggcctttccgacgacgtcatccgcgcgcgcgagccgacgctgcatcttcgcctgaagcgcctggccgattcgctgccgcagctcaaatcggcatggattttcgacgcggatggaaaggcgctggtcaacagcctcgcctcgccgccgccggacctgggctttgccgaccgtgactatttctatgcccatgtcgaccagagcatcggcacgttcatcggcacggccctggcgccgcgtccaccctatcagggcgcgcgcttcttcggggtgagccgccgccgcgattccgacgacggcaatttcatcggcgtgatccaggcctctgtcctgccggaatacttcgagagcttctacgccaggatcggctccgaccccggcagcttcttcgcaatgggacgcgccgacggcgccgtgcttgcgcatttcccgcggctcgaccgcgacctgcggcttgatccgggcggcccggtcggccaaaagattgcgtcgagccccgagcatgggctgatgacgatcgtttggccgccggacgggatcgaacgccgcatcggctaccgacgcatcaccgattatccgatctatgtcagtgccgggctcgagacctcggcgatccgcgcgcgctggctcgccaccatcggccagcatctggtgttcggcattcccgccaccgcgctgctgttcctgctgctcgccttcgccttccgccgcacccagcatcttcatgccgaagccgccgcgcgccgcgaggccgaggaggcgctcaagcacagccagcgcctggaggcgctcgggcagctcaccggcggtgtcgcgcacgacttcaacaatctcctgacggtgatccgcgcttcggtcgatctcttgaaccggccgcaactgacggaggagcggcgacagcgctacatcacggccattgcggactcggtcgcgcgcgcggccaagctgacctcgcagctgctcgcctttgcgcggcgccagaccctcaaaccggaggtgttcgacgtcggggcgcgcgtgcactcgctgcacgacatgctcgccacgctgctaggttctgcgatcgaaatcgtgatgcggctgccggcggagccttgcctcgtcaatgccgatgccggccaattcgagaccgcgctgatcaacatggcgaccaatgcgcgcgatgccatgcagggcaagggcagaatcgtcttcagggtcgagccaacgacaaccgttccgcagacgctgccgcagctttcggcgaaccaggccttggcggaccatggcttcgtctgcgtgaccgtgagcgacaccggcgtcggcattcccgcagccaggctcgggcgcatcttcgagccgttcttcaccaccaagcaggtcggccacggcaccggtctcggcctgtcccaggtgttcggcttcgcccggcagtccggcggcgaagtgaccgtggcgagcgaggtggggcgcggcagcgccttctcgctgtatctgccgcgcgtgtcgcctgacctgctgccgcaacagcaggcgccccacacagcgccggcggtagccggcagcggcatgtccgtactggtggtggaggacaatatcgagctcgccaatttcgccgccgatggccttaccgaactcggctacagcattacgctggtcgacaatgcaaacgacgcactcgccgagctcgtcatggacgcggaccgctttgacgtcgtgttctcggacgtggcgctgcccgggatgaccggactcgacctagcgaaggcagttcgcgaccgcggcatcggcgtccccgtcgtgctgaccaccggctacagtcaggccctttcacaagagggcactgccggctgcgacctcgtgcaaaagccctattcgatcgaggaattgtcgcgcgttctgcaccacgcggcgcggctggggcgcgtgcgcgacggcgccgccgaatag

SEQ ID NO: 7863 - DNA, 1614 bp, BradyrhizobiumColbertium
atgaacgacttcctgccctccgacctgccggaattcgcggaccgcgttgccgccaaccagcgccggctcaacgaagattctcgcggcagctacgatttcatcgtctgtggcgccggcagctccggctcggtcgtcgcacgccgccttgccgaaaatccggcggtcacggtcctgctgatcgaagcggggggcagcgacgacgtgccgaccgtcatggacccggcggcgtggcccggcaatctcggcagcgcgatggactggggctttgtcgcagagcccaacccgcacttgaacgggcgagcgctagcgatgtcgatgggcaaggttctcggcggcggatcgagtatcaacgtgatgctgtgggcgcgcggccatcgcagcgactgggatttcttcgccgacgaaaccggcgatcaatcctggggctacgatgcggtctcgacaatcttccgggacatcgagaactggcaaggaccgcctgatccgcgccaccgcggcaccggcgggcccgtcttcgtgcagccgtcaccggatcccgggccggccgcgttggccatgctcgccgcggcgagggagatcggtattccgactttcgaaagccccaacggcgagatgatggagggcgaaggcggctgcgcagtcacggacatccttgtccgtaacggcaggcgcaactccatcttccgcgcctatacttatccatttctcgatcggcccaatctcactctgctcaccggcacgcacgtctcacgcatcctgctcgagcgcgggagggccgtcggcgtcgaggcgatacgtcacggccgtcccttgcggatcaatgcgagccgggaagtcgtgctcgcgctcggggcgatccagacgccgtcagtgctgatgcgctccggcatcggcgatgagaaggagcttggaagacttgacatatctttggtccagcatctgcccggtgtcggacagaacctgcaggatcacgtgtcgttcggatgcatttgggagtatcgagagccgatcgcgccgcgcaacaccggcaatgcggcgaccctgtactggaaatcccgttccacgctcaagactcccgacctgctgttctgccaagtcgagtttccggtgccgagccgtgagacggcagggcgggcgccggcccatggctggacgatgttcgccggccttgccttgccgaagagccgaggcagggtgaggcttcgaagcgccgagccgcttgcactgccgcagatcgaagccaacatgctgtcgcatcctgacgatgtgacgacggcagtcgcctgcgtcgatctttgccgtacgctcggcaatacccgcgccttcgagccgctggtcgcgcgcgaaagtctgcccggccctctcggcgctgccgggatggagcgtttcgtgcgcgactccgccgtaacctactggcaccagacatgcacggcaaagatgggacgcgatgccatgtccgtggtcgacagcaggctgaaggtctacggcatcgaccgcttgcgcatcgccgacggctccgtgatgccgcggatcaccaccgggaacacgatggcgccttgcgtcatcattggcgagaaggctgcccgtgcgatgcgcagcgagcacggcatctga

SEQ ID NO: 7864 - DNA, 1329 bp, BradyrhizobiumColbertium
atgccaagcggctcgaagacagtttatcagatctatcaaatctatcataatcatcgaatttatcaaaatagcactgaagtccccttgtcaacacaggcgggagcacgacattgtgaggtctggggcaaggccggccggcacgcggccgggggcaagatggacagcatggccaaggaaattctgacaacggcgggcgctgccaagatcctgggcgtctcgatccgcacggcgcagcttctgatcgaaggcggatcgatcccgtcctggaaaacgccgggaggccatcgccgggtctaccgccgcgacgttctggggctgatctccggtcccggcgcgttaccgccccttgcctccgcgcgggtggtcgtcattgcgcgcccggaacgcatcgttgattacgaagcagcgctggccaacgtgaaggcctgtgtcgtcgaaagctactcggatccctacgcggcgctgctcgcgataggcacccggttgccggccgcagtcgtggtcgaagccgaggcatcgggcgcgagcagacgggccatgctggagagcctgcgcggcgatcctgcgctgggacgcaccaaaatcctggttgtcggggcttcggcggcagatcggacggtcgacgggatcggacctgacatcagaacgacagtgttcgtcgacggattgccggcgttgcccgaagcgatcgacaccattttcagagccgccatcgagcacccggctccgttcgagacgccgccctcgtttccctttccggacaatgagggcgagcggcttctcgcgctcgaacgctccggtctgatcgacacgccgccggaggattcgttcgaccgcctgacctggctggcggcgcgcagcctcgacgctcccgtcgcgctcttgacgctgctgactccaaaccggcaatggttcaagtcgcgctatggactcgacatgtccgatacgccgcgcgactgggcgttctgcaactacaccatcttgcagaagggcgtcatggtcgccgagaacctcgcgactgacccgcgcttctcggaaaatcccgccgtgttgggcgaactgggatttcggttctacgctggctgcccggtgagcgatcccgacggcttcacactgggctcactctgcgtgatcgacacccggccacgcacgctggacgatacccagaagcagacacttgccaatctcgccgcgctcgcctcggacgagatcaagctgcgcgcaacggaccgccaattgcgctgggcaatcgatcaaggagtttcaaaagcgggcgtggcagtagcgcagcccccgcttggtaccaagcgtctcgcggagcatcactag

SEQ ID NO: 7865 - DNA, 783 bp, BradyrhizobiumColbertium
atggttgaattcgcacttccaaagaattccaagatttcaggcggcaagacctggccgaagcccgcgggcgcggccgagcttcgcgagttcaaggtctatcggtggaatcccgatgacggcaagaatccgagcgtcgacacctattacgtggacaccaacgattgcggcccgatggtgctggacggcctcatctggatcaagaaccatatcgatccgtcgctgaccttccgccgctcctgccgtgaaggcgtctgcggctcctgcgccatgaacatcgacggccagaacacgctggcctgcaccaagtcgatgcacgaggtgaaggacggcgcggtgaaggtcaacccgctgccgcaccagccggtggtgaaggacctcgtccccgacctcaccaacttctacgcccagtacgcctcggtcgagccctggctgaagacgacctcgccgacgccgcagaaggaatggcgccagagccacgaggatcgcgagaagctcgacgggctctacgagtgcatcctctgcgcctgctgctcgacttcctgcccgagctattggtggaacagcgagcgctatctcggccctgccgcgctgctgcaggccaaccgctgggtgtcggattcgcgcgatgaggccaccggcgagcggctcgataatctggaggacccgttccgcctctaccgctgccacaccatcatgaactgcgccaaggcctgcccgaaggggctgaacccggccgaagccatcgccgagctcaagctcaagatggtcgagcggcagatctga

SEQ ID NO: 7866 - DNA, 1836 bp, BradyrhizobiumColbertium
atggccgctgagatcaatggcaagggcaacggcgctcccgccaccaacggcaaagcctacccgatcgaagaccacacctacgacgtcgtcgtggtgggcgccggcggtgcgggcctgcgcgccgtggtcggctgcagcgaggccggcctgcgcaccgcctgcatcaccaaggtgtttccgacccgctcacacaccgttgcggcgcagggcggcatctccgcctcgctcggcaacatgcacaaggacgactggcgctggcacatgtacgacaccgtgaaggggtcggactggctcggcgaccaggacgcgatcgaatacatggtgcgcaacgcgcccgaggcggtctacgagctcgagcattggggcgtgccgttctcgcgcactgaggacggcaagatctaccagcgtccgttcggcggcatgaccaccgagttcggcaaggcccaggcacagcgcacctgcgccgccgccgaccgcaccggccacgccatgctgcatacgatgtacggccagtcgctgcgccatgcggccgagttcttcatcgagttcttcgccatcgacctgatcatggacgaccagggcacctgccgcggcgtcatcgcgctcaagctcgacgacgggacgctgcaccgcttccgcgcccagaccgtcattctcgcgaccggcggctatggccgcgcctatgcgtcctgcacctcggcgcacacctgcaccggcgacggcggcggcatggtgctgcgcgcgggcctgcctttgcaggacatggagttcgtgcagttccacccgaccggcatctacggttcgggctgtctcgttaccgaaggcgcgcgcggcgaaggcggctatctcgtcaactccgagggcgagcgcttcatggagcgctacgcgccgtcggcgaaggacctcgcctcccgcgacgtcgtctcgcgcgcgatgaccatcgagatccgcgagggccgcggcgtcggcaagaagaaggaccacatcttcctgcatctcgaccatctcgatcccgccgtgctggccgagcgcctgccgggcatctcggaatcggcaaagatcttcgccaatgtcgacgtgacgcgcgagccgatcccgatcgtgccgaccgtgcactacaacatgggcggcattccaacgaactatcacggcgaagtcctgaccaagaaggacggcgacgacaacgcggtgatcccgggcctgatggcgatcggcgaagccgcctgcgtctccgtgcacggcgccaaccgcctcggttccaactcgctgatcgacctcgtcgtgttcggccgcgccgccgcgcttcgtctcgccgagaagctcacgccgaacggcaagcagccggagctgccggcgaactcggccgagatggcgctcggccgcctcgaccatttccgctacgcctccggcggcacgccgaccgcgaagctgcgcgagggcatgcagcacgtcatgcagaacaattgcgcggtgttccgcaccggcgatgtcctgagcgagggccagaatctgatcgcgaaggtccacagcggcatcaccgacatcggcgtgtcggaccgctcgctggtgtggaattcggacctcgtcgagacgctcgaattcgacaatctgatctcgcaggcggtggtgacgatgaactcggccgccaaccgcaccgagagccgcggcgcccatgcccgcgaggacttttccgaacgcgacgacaagaactggatgaagcacacgctggcctggctggacgatgccggcaaggtcaggatcgagtaccgcccggttcacaactacaccatgaccaacgacgtgcagtacatcccgccgaaggcgcgcgtgtattga

SEQ ID NO: 7867 - DNA, 417 bp, BradyrhizobiumColbertium
atgagtttcgacgaatcccacggctctccgaagcgcccctcgatgcgcacgccgctcggccgcgtccgcaatctcggcgccgcgcattccggcacgtccgatttctggcgccagcgcatcaccggcgttgcgatgacgctgctgatcatcccggcgctggtgatcatcgtcatgctgctcggccgcaaccaagtctacgctgcgcagaccctgagttccattcccgttgcggtgatcctgctcctcttcatcttcgccagcgcctggcacatgaagatcggcatgcaggtggtgatcgaggactatgtccataacgagaagctgaagctcaccgcgatcatgctcaacaatttcttctcggtcgccgtggcgctcgcctcgacctacgcgatcctgaaactttcctccggagtgtaa

SEQ ID NO: 7868 - DNA, 336 bp, BradyrhizobiumColbertium
atggcgctctccatcgttcaccgtgccaccggcatcgccctctatgtcggcacgctgctgctggtctggtggctggttgccgcggcctccggcccgaccgcctacgcccacgtgcaggcctttgccggcagcatcatcggccggctgatcgtgttcggctacacctgggccctgatgcaccacatgctcagcggcatccggcatttcgtctgggacctcggctacggcttcaaacccaacgagcgcgaagcactgacctggggcgccctgatcggcggcatcgcgctgacggtgctgatctggatcatcgcctatgcgaacggaggcggccgatga

SEQ ID NO: 7869 - DNA, 861 bp, BradyrhizobiumColbertium
ttgattcctgctcttgatctcaaggaaatcgtcgagctgaccctgctgctgatcgcaacgggcgcggcctcgggctttctggcaggcgtgttcggcatcggcggcggcgccattctggttccggtgttctacgaatgctttcgcatcgccggcgtgccgctggaggtgcggatgccgctctgcgtcggcacctcgctcgccgtgatcatcccgacctcgatccgttcgttgcgagctcactacaagcggggcgcggtcgacatgacgatcctgcgcgtctggtggctgccgatcctgatcggtgtcgtcatcggtagcgtggtcgcacgctatgcgccggagcggctgttcaagatcgtgttcgtcgcggtcgcctggtcggccgcggtccggctgatcttcgcgcgcgagacctggaaactcggcgacgatctgccgaagggtccattgatgcgcgtctacggcctctgcgtcggtctgctctcgaccttgatgggcatcggcggcggcctgttctcgaacctgctgatgacgttctacagccgtcccattcatcaggccgtcgcaacctcctccgcgctcgcggtgctgatctcgattcccggcgcgctcggctacatctatgcgggctggccggcggcggcgacctatcccggtgtcgcagcgctgcaagtgccgttcgcgctcggttatgtctcgctgatcggtgccgtgctggtgatgccgatgagcctcgtcaccgcgccgctcggcgtgaaagcggcgcatgcgatgtcgaagcgcacgctggaagtggcgttcgggtgttatctgttgatcgtcggcggccggtttgtgctgagcctgctgggcgggctgtag

SEQ ID NO: 7870 - DNA, 201 bp, BradyrhizobiumColbertium
gtgctttccggctccgatcgcatcgaaggcatcggcaatctccgggattggttgggtagcgaagtgcgactgaaggatcagtccgccttgcgatttctgggctcttctctcttccccgtcattgcgaggagcacttgcggcgaagcaatccagaatcgttccccggagacagcctggattgcttcgcttcgctcgcaatga

SEQ ID NO: 7871 - DNA, 1530 bp, BradyrhizobiumColbertium
atgaaccaagctgccaacgccaacctgttttcccgcctgttcgacggcctggacgatccgaaacggctcgcgatcgagacgtatgacggcgcccatatcagctatggcgatctgatcgcacgcgccgggcagatggcgaacgtgctggccgcccgcggcgtgaaacccggggaccgcgttgcggtgcaggtggagaagtccgtcgccaacatcgtgctgtatctcggcacagtgcgcgccggcgcggtctatctaccgctgaacacggcctatacgctcaacgaactcgactatttcatcggcgatgccgagccgtcgctcgtggtctgcgatccatcgaaggcggaagggctcgcgccgatcgcaggcaaggtgaaggccaaggtcgagacgctcggggctgacggcaagggttcgctgacggaggccgcagacaaggcgggcagcgagttcacgaccgtgccgcgcgcgagcgacgacctcgctgccattctctacacctccggcaccaccggccgctccaaaggcgcgatgctcagccacgacaatctcgcctcgaactcgctctcgctggtcgattactggcgcttcaccgacaaggacgtgctgatccacgcgctgccgatttatcacacgcacggattgttcgtggcgacgaatgtgacgctgttcgcgcgggcctcgatgatcttcctgccgaagctcgatccggacctgatcatcaagctgatggcacgcgcgacggtgctgatgggcgtaccgaccttctacacgcgtcttctgcagaacccggccctgtcgcacgagacgaccaagcacatgcgcctgttcatctcgggctcggcgccgctgctcgcagatacccatcgcgaatggtcggcgcgcacgggacatgccgtgctcgagcgctacggtatgaccgaaacgaacatgaacacgtcaaacccctacgacggcgagcgcgtgccgggcgcagtcggcttcccgctgccgggcgtctccgtgcgcgtgaccgatcccgaaacggggaaagagctgccgcgcgacgagatcggcatgatcgaggtgaagggcccgaacgtcttcaagggctattggcgcatgccggagaagaccaaggccgaattccggcccgacggcttcttcatcaccggcgacctcggcaagatcgatgcaaagggctacgtccacatcctcggccgcggcaaggatctcgtcatttccggcggcttcaatgtctaccccaaggagatcgagagcgagatcgacgccatgcccggcgttgtcgaatccgcggtgatcggcgtgccccatgccgatttcggcgagggcgtcaccgcggtgctggtgcgccagcccggcgcgagcatcgatgaagcgactgtcctgaagggactggacgggcgcctcgcgaaattcaagatgcccaagcgggtcttcgtcgtggacgagctgccgcgcaacaccatgggcaaggtgcagaagaacattctgcgcgagacgtacaaggacatttacgcgaagaagtag

SEQ ID NO: 7872 - DNA, 762 bp, BradyrhizobiumColbertium
atgtcaaaaagcgggaaacgcgtggcctgggtcacgggtggcggcagcgggatcggggaggcgggcgcagaggcgctcgccgccgatggctggacggtggtggtgtccggccgtcgcaaggatgcgctggatgcagtggttgcgaagatcacgaaagcgggcggcgcggccgaggcgatcgcgctggacgtgtccaacgccgccgaggcgcagaaggcggcggatcagatcgtcgcccgacacggccggatcgatctgctggtgaacaacgccggcatcaacatccccaagcgcagctggagggacatggaactggaaggctgggacaagctcgtccaggtcaatctcaacggcgtgctctactgcatgcgcgcggtgctgccgacgatgcgcaagcagcaggacggctcgatcatcaacgtctcgtcctgggcgggccgtcatgtctcgaagatgccgggcccggcctacaccacgaccaagcatgcggtgctggctttgacccattccttcaacatggacgaatgcgtcaacggcctgcgcgcctgctgcctgatgccgggcgaggtggcgacgccgatcctgaagctgcggccggtggtgccgagcgaggaggagcaggcgaagatgctgcaacccgaggacttgggacgcaccatcgctttcatcgcgagcatgccggcgcgcgtctgcatcaacgagctgctgatcagcccgacacacaatcgcggcttcatccagacgccgaacagcagggattga

SEQ ID NO: 7873 - DNA, 555 bp, BradyrhizobiumColbertium
atgtccaagcgcattgcctatcttgctgccgccgccttcagcgccctcgccatcaccgcgaccgtcgtcgcgcctgttagcgccgaggaaaagaccgtcatggtcggcggcgccgcgatgtacccgtccaagaacatcgtccagaacgcggtcaactcgaaggatcacaccacgctggtggcggcggtgaaggcggccggcctggtgccgacgctggaaggcaagggcccgttcacggtgttcgcgcccaccaacgcggctttcggcaagctgccggccggcaccgtcgacaacctcgtcaagcccgagaacaaggcgacgctgaccaagatcctcacctatcacgtcgtgcccggcaagctcgcggccgccgacctctccgacggcaagaagctgaagaccgccgagggcgaggagctgacggtcaagaagcaggacggcaaggtctggatcgtcgacgccaaaggcggcacctcgatggtgacgatctccaacgtcaaccagtcgaacggcgtgatccatgtggtcgacactgtgctgatgccggcgacgtaa

SEQ ID NO: 7874 - DNA, 630 bp, BradyrhizobiumColbertium
atggcgagcctcacagtcaccgacgagcaggtcggagccaccccggccaaagtcatccagccggcctgggtccggatcatgcactggatcaacgcgcttgccatgatcctgatgatcctgtcgggctggcagatctacaacgcctcgccgctgttcgacttccgcttcccgcgcgaatacacgctcggcggctggctcggcggcggcctgctctggcattttgccgcgatgtggctgctgatgatcaacggactcgcctatctcatcaccggtctcgccaccggacgcttccgaaaaaagctgctgccgatcacggcgtccggcgtgcttcacgacgtcagggccgcgctgaccttcaagctcggccatgacgatctcaccgtctacaattacgtgcagcgcctgctctatgccggcatcatcgtggttggtgtgctgatcgtgctctccggccttggaatgtggaagccggtgcagctctattatctcgtgatgctgttcggcgattatccgaccgcccgctatgtgcacttcttctgcatggccgcgatctgtgtgttccttgtcatccacgttctgcttgcgctgctggtgccgaagagcctgcgcgccatgatcatcggccgctga

SEQ ID NO: 7875 - DNA, 783 bp, BradyrhizobiumColbertium
atggcgaagcgtccgttcctgattcccggcgtcgacaggcggctcctgatcaaggattccctcaagacgatgccagatgtcacccgccgccgcttcattgcgggcggcgccagcctgggcgcgctgacgctgctcaccggctgcgacgtcatcgactcctcctcggccgaaaccatgctcgccaaggtctcgaagttcaacgacgccgtgcaggcgtggatgttcaatcccgacgcgctggcgccgaccttcccggagagcgcgatcacgaagccgttcccgttcaacgcctactacgatctcgacgacgcgccggacatcgacggcaaagactggaagctcgaagtgcgcggcctcgtcgacaacaagaagtcctggacgctggatgaactctatcaattgccgcaggtcacgcagatcacccgccacatctgcgtggagggctggagcgcgatcggcagctggaccggcacgcccttgcgcgatttcctgaaactgatcggcgcagacacgcgcgctcaatatgtctggttccagtgcgccgacaaggatggctacaactcgccgctcgacatgcgcagcgcgctgcatccgcagacccagatgacgttcaaatatgcgaacgatatcttgccgcgcgcctacggtttcccgatgaagatccgcgtgcccaccaagctcggcttcaagaatccgaaatacgtggtctcgatggaagtcaccaacgactacaagggcggttattgggaagaccagggctacaattcgttcagcgggagctga

SEQ ID NO: 7876 - DNA, 1197 bp, BradyrhizobiumColbertium
ttgcacgcccctgaccgcccgccctacgcgcatcccgcgcggctgatcctgacactgtcgctggcggcgacggtcgggctcggcatcggccgcttcgcctatgctttggtgctgcccgacatgcgggagaacctcggctggtcctactcggctgccggtttcatgaacaccatcaacgcggtcggctatctcgcgggcgcgctgatggcgtcccggctgatccagcgcgtcggctggtcggcggcgatccgcggcggaactttggcctgcgtcgccgcgctcgccacgtgcgccctgacgggaaatttcgtcgcgctgagcctcgcgcgcctcgtgctgggcctcggcgccgcggccggcttcgtcgccggcggcgcgctggctgcgaccatcgcgcagtcgcgccccgagcgggccaatttcctgctgagcctgttctatgccggacccggcatcggcattctggcctcggggctgatctccccgttcacgctgcaatatttcggctccggctcgtggtggatcgtgtggtgggcgctgacgctgctgtccatcgcgatgacgattcccctttttctgatccgcatcgagagcggcgtgcgtttctcggaaggcggccacgcctccttcgcgatccgacccgtgctgatctacctcgccggctacttcctgttcggcgccggctacatcgcctacatgaccttcatgatcgcctatgtgcgggacggcggcggcggggccgcggcgcaggccgcgttctggggcctgatcggtctgagcgcgttcgtgaccccctgggcctggcgcggtgtgctggcgctcgatcggggtggactcgccaccgccatcatcctcggcaccaacgcgctgggagcagcgctgccgatgctcgggcattcgccggcatggcttgcggtgtcggcggtcgtgttcggtgtcgctttcttcgccgtggtcggctcaaccacggccttcgtgcgcttcaactatccgccagaggtgtggccgaccgcgatcgcggcgatgacgatctcgttcggcgtcggccagacgctcggtccgatcgcagtcggcgcgatcacggatgcgctgggcagcctgagctacgcgctgaacgtgtcggcggcgctgctggcgctgggtgccgtggcggcgctgtgccagaggaaggtggggccgaaggcgaacagtgagtag

SEQ ID NO: 7877 - DNA, 156 bp, BradyrhizobiumColbertium
gtgggtcgccatggtcgtgtcctcttcgatcctctctcgtcattccggggcgcgcgcaaagcgagcgagcccggaatccatcaggccacagcgcaggcggggaaatggattctcaggtgcgcaattgcgcaccatagctcgcgcgccccggaatga

SEQ ID NO: 7878 - DNA, 1113 bp, BradyrhizobiumColbertium
atggcgacccacaaactgctgctgctccccggcgacggtatcggccccgaagtgatgggcgaggtgaagcggctgatcgactggctcaattcggccgggatcgccaggttcgagaccgacaccggcctcgtcggcggctccgcctatgacgcgcacaaggtctcgatctccgagggcgacatggccaaggccaaggaggccgacgccgtgatcttcggcgcggtcggcggtccgaaatgggatgccgttccttacgaggtgcgccccgaagccggcctgctgcgcctgcgcaaggacctcgcgctgttcgccaacctccgccccgccgtgtgctacccggcgctggcggacgcttcgagcctgaagcgtgaggcggtcgaggggctcgacatcatgatcgtgcgcgagctcaccggcggcgtctatttcggcgagcccaagaccatcaccgatctcggcaacggccagaagcgcgcgatcgacacccaggtttacgacacctatgagatcgagcgcatcggccgcgtcgccttcgagcttgccaggaagcgcaagaacaaggtgacctcgatggagaagcgcaacgtcatgaagtcgggcgtgctctggaacgaggtcatgacccaggtccacaagcgcgaatatcctgatgtcacgctcgagcatcagctggccgattccggcggcatgatgctggtgaagtggccgaagcagttcgacgtcatcgtcaccgacaacctgttcggcgacatgctgtccgacatcgcggcgatgctgacgggctcgctcggcatgctgccgtcggcctcgctcggcgaggtcgacgtcaagagcaagaagcgcaaggcgctgtacgagccggtgcacggctcggcgcccgacatcgcaggcaagggactcgccaatccgatcgcgatgatctcgtccttcggcatggcgctgcgctattccttcgacatgggcgatctcgccgacaaggtcgatgctgcgatcgccgcggtgctcgccagtggtctgcgcaccgccgacatcaagtcggaaggcaccacgtccgcttccaccacgcagatgggcgaagcgatcctgaaggaattgcagaagctgcacgcgtaa

SEQ ID NO: 7879 - DNA, 387 bp, BradyrhizobiumColbertium
atgagctcgaaattttctgccgcgaacaaactggcgacattgcttgcggcgggcgccgcaattgccatcgcgttcgcgactccggcctcggccgacaccaagaccaagcgctattatgacgagcggggccgcccctattacggcccgagcggtcccaatgccgtctatcagcagggccgcacccgcatctacgtgagcaagcgctcctggctcgacggcggcaccgaggttaatccgggcgaccgcaagttcaccgactacgccttcccgccggcggtgggctatccgtccttcgcccgcgagaacctgaaccgtccgatcgatcgccagccgctctcgccgccgcaggatgtcggcggctacccgcagaccttcccgctgtactga

SEQ ID NO: 7880 - DNA, 789 bp, BradyrhizobiumColbertium
atgcagtcgcctgaggccagcacggccgtaagccccactcagatccatctgacgcttctagctttcgccgacgaggtcgtcggcacgctggcgcacctgattgcctatgtgggggcgctcgccctgtttgccatcctgggcgttgccgcactcggccatctgcccgagcttcggggcgatcagccggctccgaggccgggctggggcgtcgccggccgctcgcatccggccttcaccctcagccgattcgattcggctgacaaaacaatgtcttataccatcctgcggcaccccgaaggcggccgcaaggatgtgctgcgctgggccgacgcggcgggcaagcccgtggccgagctcgaggtttaccgggaaggcgccgaattcgacgtggcgcgtccggcaacggcggatctggccgtccagatgggcgcggaggcgtccactccgttcgagctggccggcttgatcgacaccaagttcggcccggtcgccctgttccggccaaccggaacgatggagggtgagcgggcgtgcctcggctacctcaagcgcagcgaagaacctgccctgcagatctccggcttctcctgccggggcgacaccctgcccgcccggcgcgcggccatcgcctgcacgctgaaccggctgacgctgctcacgtccggcaatgagccgaagctggcggaattgttcgcccgtgccgagctcaagcgccgcggctgtgaccccgcggctgcggcggactggctgctcggtcatgcgaacgcgcaattgcgcgggacgctttga

SEQ ID NO: 7881 - DNA, 1035 bp, BradyrhizobiumColbertium
atgggttacaaagtcgcagtcgtcggcgcgaccggcaatgtcggtcgggaaatgctcaacatcctggacgagcgcaaattccccgcggacgaggtcgtggccctggcgtcgcgccgcagcgtcggcgtcgaggtgtcctatggcgaccgcaccctgaaggtcaaagcgctcgagcattacgacttctccgacgtcgacatctgcctgatgtcggccggcggcgcggtgtcgaaggaatggtcgccgaagatcggcgccgccggcgccgtcgtgatcgacaattcctccgcctggcgcatggatccggatgtgccgctgatcgtgccggaggtgaacgcaggcgcgaccgagggcttcaagaagaagaacatcatcgccaacccgaactgctcgaccgcccagctcgtggtcgcgctcaagccgctgcacgacaaggcgacgatcaagcgcgtcgtggtctcgacctatcagtcggtgtcgggcgccggcaaggacgccatggacgaattgttctcgcagaccaaggccgtctacaccaatgacgagctggtcgcgaagaagtttcccaagcgcatcgccttcaacgtcatcccccacatcgacgtcttcatggaggacggctacaccaaggaagagtggaagatgatggcggagaccaagaagatccttgatcccaagatcaagctctccgcgacctgcgtgcgcgtgcccgtgttcgtcggccactccgaggccgtcaacatcgagttcgagaatccgatcagcgcggacgaagcccgcgagatcctgcgcaaggcgcccggctgcctcgtcatcgacaagcaggagcccggcggctacgcgacgccgtacgaggcggccggcgaggacgccacctatatcagccgcatccgcgaggacgcgacggtggagaatggcctcgtgctctggtgcgtgtccgacaatctgcgcaaaggcgccgcgctcaacgcgatccagatcgcggaagtgctgatcaaccgcaagctgatcagcgcgaagcagaaggcggcgtga

SEQ ID NO: 7882 - DNA, 642 bp, BradyrhizobiumColbertium
atgatgacattcccgaagcatttgctggaaggctacaaggccttcgccacccagcggctgccgaccgagcagacccgctatcgcgaactgtcggtgaagggacaggccccggaagtgatggtgatcggctgctgcgacagccgcgtctcgcccgaggtgatcttcgacgtcggcccgggcgaattgttcgtcgtgcgcaacatcgccaatctggtgccggtgtatcagcccgacggcaacgcccatggtgtctcggctgcgctggaatatgcggtgacggtgctgaaggtgaagcacatcgtcatcctcggccacgcgcaatgcggcggcatccgcgccttcgtcgacaagatcgagccgctgacgcccggcgacttcatcggccgctggatgcagatgttcatcaagccgggcgaagtggtcgagcagcgcgatcacgagaccatggcgcagttcgtcgagcgcatcgagaaggccgcggtgttccgcagcctggaaaacctgatgacctttccgttcgtgcgcaaggccgtggagagcggccatatgcagacccacggcgcctatttcggcgtcgcggaggggtcgctgttcgtgctggacaaggcgtcgaaggaattcaagaaggcaaacggcgaatag

SEQ ID NO: 7883 - DNA, 882 bp, BradyrhizobiumColbertium
atgacccgcccgcgccgcagccatctgttcatgcccggctccaacccccgggcgctggaaaaggcgcgcaatctcgccgccgacggcttgatcctcgatctggaagactcggtcgcccccgaggccaaggcagcggcccgcgacggcatcgccgctgcgatcgcggccaagggctttggcaagcgcgagattttgatccggaccaacgcactcgacacgccctggtgggtcgatgacgtcgcgatggccgccaaggcttcgcccgacggaatcctggttccaaaagtttcaagcattgaagatctcgggacgatcggccgcaagctggccgagctgggcgccgcgccgaccgtgaaggtctgggccatgatcgagaccgcgcgcgccgtgctgcatgccgaggagctggctgccgctgggcgcgatccatcgtgccgcctctccggcttcgtgttcggcccgaacgacatctcgcgcgagacgcggatcaagatgctgccgggccgcgccgcgatgatcccgatgatcacccactgcatcctggcgacgcgcgcccacggcctcgagatcctcgatggcccctacagcgacatcgccaatcccgacggcttcgctaccgaatgcgcgcaaggccgcgatctcggcttcgacggcaagaccctgatccacccttcgcagattgatgcctgcaacgcgatcttcacgccacccgaagaagagatcgcgcgcgcccgaaagatcatcgccgcgttcgagctgcccgagaacgcatcgcgcggcgcgatccgtcttgacggcgcgatggtcgagcgcctgcacgccgacatggcccggcgcacgatcgatatcgcggacgcgatcgcggcgatggggaagggctga

SEQ ID NO: 7884 - DNA, 969 bp, BradyrhizobiumColbertium
ttgggcgccgtctcttatcttgaccgctatcctttacttcgttcgcgcgacagcgagttcgcgcgcgaccgcctgttcgcggtgtatggcgccgaccgcttcgacacgcatgacaacgcgttcggcatccaggccaatcttgcccgcttgaattcgatgggcctcgccttctgcgcctacgacggagcggcatcgctttcctttcctgaatcgcagatcctccgccagttcttctccatccagggaggagcgcggttcagcaccaatggaaatagccagccgatcgaagcctggagcccaatcatctccggagacgccaggctcgatctcgacttcgcgccgggctaccggcagctggtggtgaggatagatgccgccgcgctggagcgcttgctgaagatcatgatcggcgacggcagcgacatgaagctgcgcttcgtcggggacgaaggcgatcctgcggtcatgacgcatgtgcggcaggaagtcttcaggttggcggaggagctggaaagattcggacaggactactcacccatcgctatcgccgagctcgagcgggcgctgatggtccgaattctcctggcgcaccggcacaatttttccgatcggcttcagcgctccgccccgagcgccaaccggaccgtgatcgacctcgtcgagtcctacatcgaggcgcattggaacgaacccctcgatctggaaaggatcgcggagatcgccaacgtgagcgtgcggactgtcttccgggagttctcagataccgggcgaggatcgcccggccagttcgcgcggcgcgtccggcttcagcacgcggcagagctgctgcgccggcccgacgagcagaccagcgtgctcgccgtggccttcaaatgcggcttccgaaatctcggccgcttcgcatccgagtatcggcgggcgatcggcgagctgccgtcggagactctgaagaacgcgaggcgaaagtag

SEQ ID NO: 7885 - DNA, 264 bp, BradyrhizobiumColbertium
gtggtcgcatccgaggtgaagggccttgccaaccaggccaagcaggccaccgacaagatcgctcaggagatcggcagcctgaaccagatctcgggggatgttgtcggctccctgaatgcgatcaagcaggcgatcaacaatgtcagcgagtacgtgacgtcgacggccgcggcgatcgaggaacagagcactgtgacgaacgagatgtcgaccagcatgcagcgtgctgcggcagaggccgctgccatggcgaaccgggcctga

SEQ ID NO: 7886 - DNA, 1482 bp, BradyrhizobiumColbertium
atgcttcgcaaattcatctattgccttgcactccttgttctcgctggtcccgctgccgctattgaccgcgtcagaggcgacgcgaacccggcgattgctgctgcgtcggatgccatacggcgagatcccagggacgcgaacgcctattacaatcgcgggaatgcctatgccgcgagcggcgataacgagcgcgccatagccgattacaccgcggcgatccgactcgatccggcgcacgcgaacgcctactacaaccgaggcaacggctacagcaacaagggcgacaacgatcgcgccatcgccgactacacggccacgatccggctcgatccggcctatgcgaatgcctactacaaccgaggcaacgccttcagcaacaagggcgacagggatcgcgccattgccgattatgccgaagtgatccgcctgcagcccgcgaatgcgaacgcgtatttcaaccgagggaacgcctacgccagcaagggcgatacggaccgagccattgccgactacacggacgtgatacgcgtcgatcccgcttatgccaacgcctacgtcaatcgcgggctggcttatgagaagcgcggcgatttcgccaaagccagggctgacttcaatgccacgctgggattgcggcatggtgtcaccaaatgggcccaggacaaggcgcgcgagcggcttgccgtcctgccttcaccgcggccgtcgacaatactggtcgagaaacccagcgccgccccggccgtcgtaacgtccgacgcgtcgacgggagaccgtcgcatcgctctcgtcatcggcaattcggcttacgagaacgtcgccgcgcttccgaaccccgtccgcgacgcaagcctcgtcgccgatgtcttgaagctcaccgggttcgaatctgtgacgctcgtgaccaatctccgcaaggatgccttggtgagcgccttgcgcgagttcgcggctcgtgcggaaacggcggattgggccgtcgtgtattatgccggacatggcatggaggtcgggggcgtcaattatctcattccgatcgatgccaggatcgcggccgatcgcgaaatcggattcgaagccgtcccggttgatcaggtcctcaatgcggcagagcgcgccaggaagctgcgcctcgtcatcctcgatgcctgccgcgacaacccgttcgcggcccagatgaagcgcacgatgacggtggcgtcgcgttcggtgtcgcgaggtcttgcgccggtcgagccggaggcgggcacgctggtggtttacgccgccaaggacggcgagaccgcgctcgacggtgacgggagcaacagtccgttcgcggcagcgttcgtcaagaatcttccgacgccgggcctcgaagtccgcaggctgttcgacttcgttcgcgacgacgtcatggaagcgaccggccgcaggcaaaagccgttcagctacggctcgatctccggccggcaggacttctatttcgtggccggcaaatga

SEQ ID NO: 7887 - DNA, 420 bp, BradyrhizobiumColbertium
atgagcaccgcaagcaagccctatcccatcgttcaggacctcatcgactcctttgccggctggctgaagcatcgccgcgaggtgaacgagatgcggcagctcgatcgcgccgatttcgatcggatcgcgaatgacctcaggatcgcgcctgacgatctggaggagctggtccgtcacggcaagcatgccgccgacgagttgccgaagatgctcgagcaactcggcatcaatgccgaagggcttggccgcgcgcagccgctgctgctccgcgacatggagcgggtctgttcgctctgcgagcacaagggccagtgcgaccgcgatctcgccgacggcaccgctgcggagaattaccacggctattgcgcaaatgcctcgacgctggattcgctcaatcgcgccgatctcgcgccgcgctga

SEQ ID NO: 7888 - DNA, 786 bp, BradyrhizobiumColbertium
atgctgcccgagatcgtcaccttctggcatggcccgatggacgcgctgcgccagacctgcctgcgttcgcaattggctgccgggcacaaggtcacggtctacagcttcgacaccattcccggcctgcctgccggcgtcgagaatgccgatgccgaggcgatcctgccccatgcgttctccgaacggttgcgcccgccggagccggacggtagctggcgcgactggaccattctgcagttcagcgacttcttccgcatgaggctgatggcgaaaggactgggcttgtggctcgatgccgacgtgctgctgctgaggccgatcgagatcgattcggcaaaaccctatttcgcgtgggagcggccacgccagctcggcaattccgtgatctacctgccggcggagcacggcatcgtgcgcgcgttcgaggagctgatggagcaggaggagctgacgccgaactggttgtcggtgcgccaccgcgtcaccttcatgatgcgccgcctgcgcggcggctcgaaccggctctccgacatccgcgttgcgatctacggccccgcggcgctcaccgcgctcgcgcgccgcaccggtgaattgcagaacgcgctgccgaagcagtcgttctacgccgtgcatgccgagccgaaactgttcttcgatccttcgagctatctcggcctcgtgaccgatcccgccatcatcggcctgcacatctcgcccaagggccgcggcggcgaaaagccaattccgggcagcctgtatgcgtgggcgacggagcggtttgggtag

SEQ ID NO: 7889 - DNA, 606 bp, BradyrhizobiumColbertium
atggacaagttcaccacgctggaaggcgtcgcggcgccgctgaagatcatcaatgtcgacaccgacatgatcatcccgaagcagtacctcaagaccatcaagcgcaccggcctgggcaagggtctcttctccgagcagcgctacaaggacgacggcagcgagaatccggacttcgtgctcaaccagcccgcctatcgcaacgccaagattctggtcgccggcgacaatttcggctgcggctcgagccgcgagcacgcgccctgggcgctgctcgatttcggcatccgctgtgtgatttcgacctcgttcggcgacatcttctacaacaactgcttcaagaacggcattctgccgatccgcgttgcccaggaagacctcgacaagctgtttgacgacgccgagcgcggcgccaacgcgacgctgacgatcgacctgccgaaccaggagatccgcggcccggacggcggcaaggtgaagttcgagatcgatccgttccgcaagcactgcctgatcaacggcctcgacgacatcggtctcaccatggagaagaaggcctcgatcgacacttatgaggagaagctcaagcgcgaacgcgcctgggcctga

SEQ ID NO: 7890 - DNA, 399 bp, BradyrhizobiumColbertium
atgtggacggaattgaaagcaccctcgctcgccgagatggaagcgatggctcacgatgtgttcgagcgcctgccgacggagttccgcaagctctgcgagggggtcatcatccgcgtcgacgacttcccgaccgaggaggtcctgaacgagatggaatgcgagagcgagttcgacctgctcggcctgttccagggtgtcggcctgccccagcagagtcttggcgacgtggcgcggctgcccaacatggtctggctctaccggcggccgatcctggactattgggccgagcacgacgaaagcctcggccacatcgtccgccatgtcctgattcacgagatcggccaccatttcggcctgtctgacgacgacatggaggcgatcgaggccaacgcggagtag

SEQ ID NO: 7891 - DNA, 327 bp, BradyrhizobiumColbertium
gtgggcggaaaaatgcgagcgaaaacggcggtgattctactgtgcatggggttgttttcgcagctttgcgttggcgccgaggcgcagaccgccagttccgggatccaggtggcccaggtggtctcgcctaacgaagttcccccgccacgcaagcggtccccggcgcgactgcgcgtgacgccctattacagccccgacggcgtctatccccgctacaatcccggccccgacgcggtccgcgtctgcaacgccacctatgtgcaggagtaccggccgagcggcacggtgatcgtgccgcgcgtcagctgccactggcgccgcggctga

SEQ ID NO: 7892 - DNA, 300 bp, BradyrhizobiumColbertium
atgagtgtctacgccattgcgcaattgaagatgacggaccgcgcggcctatgaccgctatcaggcgcggttcttcgaggtgttcaggaagtacaacggacggctgctcgccgccgatgaacgtccgcgcgtgctcgagggcgtatggccgcacgacaagctcgtcatgatgtcgtttcccgacgaggccgcgttcctcgccttctcgacctcgcccgaatacgaagagatttcgcgtgatcgcaaggccggcgcagaggcgaccgtgctgctggtcaagggatttgcacccgcaggatag

SEQ ID NO: 7893 - DNA, 618 bp, BradyrhizobiumColbertium
atgctgcggccgaaaggcatcgcagccctgctgtccggactcagggagaattccatgctgaggatatttggccgtcgggccgggccgatgcgcctgctcgggctcgccgccgctgcgacactgatgctgtcggccggtaccgcgcgtcgcgctgaagcgctgaccttgatcaatccggcgacgtcgcccgccgccaaggccgcgacggacgatctcgtcacgcaggttcgccaaggacccggcggacatcgctttcacggcggaggattccatggaggaggcttccatcgcggcggaggacatgtcggcggcttccatggccgcggattccgcggcggccatatcggcggcttccgcgccgcacccgcgtttcatcacaggcacgtcggctatcgacatcacggcttccgctacggcggatatggcggctatcaccgtcactggggccatcatcgcccgcacttccgccatcgtcacgtctaccggccctattatgtcggcggctactatccgtcctaccactatccccgccgctgccgaatcatctggacttattacggcccgcgccgcgtctgccactggccgcgctggcgctatccgtaccggtactattggtga

SEQ ID NO: 7894 - DNA, 210 bp, BradyrhizobiumColbertium
atggccaccaagccggaatatgtcgatctgatcagcgaggccacgcgccagcaccgccggcgcgcaacgccgctacgcatcgtcgccaagccggaggtggaggagacctcaaggctcagccgctggccgccggcgttgttccggcaatggaagctcgagaacttgatgcgctggaaggcgtcgtcgtggaagctgagggactggctttag

SEQ ID NO: 7895 - DNA, 1407 bp, BradyrhizobiumColbertium
atgtccaagccgaccaccctgtacgacaagatctggaacgaccatctggtgcacgaagccgaggacggcacctgcctgctctatatcgaccgccacctggtgcacgaagtgacctcgccgcaggcgttcgaaggcctgcgcgccacgggccgcaaggtgcatgcgcccgagaagacgctcgccgtcgtcgaccacaacgtgccgaccaccgaccgcaccaagccgaatcccgatcccgagagcatcgagcagatcaaggcgctggctgagaacgccaaggaattcggcatcgaatattacaacgagttcgacaagcgccagggcatcgtccacgtcatcggcccggagcagggttttacgctgccgggcaccaccatcgtctgcggtgacagccacacctcgacgcatggcgcgttcggcgcgctcgcccacggcatcggcacgagcgaggtcgagcacgtgctggcgacgcagacgctgatccagaagaaggccaagaacatgcgcgtcaccgtcgacggcaaattgccggacggcgtgaccggcaaggacatcatcctcgccatcatcggcgagatcggtaccgcgggcggcaccggctacgtgctggaatatgccggcgaggcgatccgcgcgctttcgatggaaggccgcatgacggtctgcaacatgtcgatcgaaggcggcgcgcgcgccggcctggttgcgcccgaccagaaggcctacgatttcctgcgcgaccggccgaaggccccgaagggcgcggcctgggatgcggcgatgcgttattgggagacactgcgctccgacgagggcgcgcatttcgaccacgagctgcgcctcgatgcggcaaagctgccgccgatcgtgacctggggcacgagccctgaagacgtcatctccgtgaccggcatcgtgcccgatcccgacaagatcgcggacgaggccaagcgtatctccaagcatcgcgcactgaaatatatgggcctgacggcggggacgaagatcaccgacatcaagctcgaccgcgtcttcatcggctcctgcaccaacggccgcatcgaagatttgcgcgcggcagccaagattgccgaaggcaagaccgtctccggcaacgtcagcgccatggtcgtgccgggctccggcatcgtgaaggagcaggcggaagccgaaggtctcgacaagatcttcatcaaggccggcttcgaatggcgcgagccgggctgctcgatgtgccttgccatgaacccggacaagctgaagccggaagagcgttgcgcctcgacctcgaatcgcaacttcgagggccgtcagggcttcaagggccgcacgcatctggtgtcgccggcgatggccgcggcggcggcgattgccggtcacttcgtcgatgtcagggagtggcggtaa

SEQ ID NO: 7896 - DNA, 129 bp, BradyrhizobiumColbertium
atgtttccagatccgaccagcctcgcacccgtcaagcgcatcgtcatcgacgatcgctcgcggctgcctgggcggttcttcggacgcttcgcgacctcggcaacgtcagagcttattcgcgcagcctga

SEQ ID NO: 7897 - DNA, 384 bp, BradyrhizobiumColbertium
atgaacctgatcaagcagctcgagcaagagcaattcgacaagctgtccgccggcaagaccattccggaattcggccccggcgacaccgtgatcgtcaacgtgaaggtggttgaaggcgaccgcacccgcgtgcaggcctatgaaggcgtctgcatcggccgttccggcggcggtctcaacgagagcttcaccgtccgcaagatctcctacggcgaaggcgtcgagcgcgtgttcccggtgatgtcgccgatgatcgactcgatcaaggtggtgcgccgcggcaaggtgcgtcgcgccaagctctattacctccgcaatctccgcggcaagtccgcccgcatcgtcgagaagaccgagcacgccaaggctgccgtcaacgagtaa

SEQ ID NO: 7898 - DNA, 756 bp, BradyrhizobiumColbertium
atggcaaatccctcaccctggcgagcgaccgtgctggcgctgtttccggagatgtttccggggccgctcggcgtgagcttggccggccgggcgcttgcggccggcatatgggagatcgaggcgcgcgacatccgtgcttccgccaccgaccgccaccgcagcgtcgacgacaccccggccggcggcgggccgggcatggtgctgcgggcggatgtgctggccgcggccatcgatgccgccgagatcggtccggaccgcccccgcctgctgatgagcccgcgcggtcggccattgacccaggcccgggttgcggaacttgcccgcggccccggccccctgatcgtctgcgggcggttcgagggggtcgaccagcgggtgatcgacgggcggggcctgcaggaggtctcgatcggcgattacgtgctctcggggggcgaaatcgccgctttggccctgatcgacgcctgcgtccggctgctgccgggggtgatgggcaaggaagcctcgggaactgaggagagcttctccgatggcctgctcgaatacccacaatatacccggccgcagctgttcgagggggtcccgatcccggagatcctgacctccggcgaccacgccaaggtcgcggcctggcggcgggcgcaatccgaggccctgacggcggcccggcggccggatttgtgggctcaaatcccaagcaagcccccgaatcgagccggtcgccaaaaaacgccaaaaagcaagacagacgggtga

SEQ ID NO: 7899 - DNA, 552 bp, BradyrhizobiumColbertium
atgtcggcgctggtctgcgtcgcgcggatcggcgccgcgcatggggtgcgcggtgcggtcaagttgtggaccttcaccgaagatccgtttgccgtgaagcgctatggcccgctgctgtccaaggacggccggcgccagttcgaggtcgcaacggcgcgcgaggcgaaagatcatctggtcgccacgttcaagggcgtcacgacccgcgatgaggccgagcgcctcaacggcatcgagctctacgtcccgcgcgaaaagctgcccgcgaccgacgaggacgaatattaccacaccgacctgatcgggctcgccgccgtcaccactgatggtgatgcgctcggtcgtgtcgtagcgatccagaatttcggcgccggcgacatcatcgaaatcgccccgcccaagggcccgacgctgctgctgccgttctcgaatgccgtggtgccggaggtcgatctctccggcggccgcgtcgtgatcgcgctcccgcaggagatcgagggtgaggacgaagatgcctcgccaagtccccctcgcgaagaggggggcccataa

SEQ ID NO: 7900 - DNA, 333 bp, BradyrhizobiumColbertium
atgtccgtcgttatccgcctcgcccgcgcaggcaccaagaagcgtcccgtctatcacgtcgtcgtcgccgactcgcgctttccgcgcgacggccgattcattgagcgtctcggccatttcaacccgctgctgccgaaggacaacgagacccgcctcaagctcgacatggacaaggtgaaggcctggctcgccaagggcgcgcagccgtccgaccgcgttgcgcgcttcctcgatgctgccggcgtcaagaagcgcgaagcgcgcaacaatccggagaaggccgtgccgcgcaaggagcgcaaggcgcaggccgaagccgccgcgaagagctaa

SEQ ID NO: 7901 - DNA, 1548 bp, BradyrhizobiumColbertium
ttgttcgacaatctgtcggaacggcttggtggcattctcgatcgtctgacggggcgcggtgcgctgaccgaaaaggacgtcgacgccgcgatgcgcgaggtgcgccgcgcgctgctcgaggccgacgttgcgctcgaagtcgtgcgcagcttcaccgagcgggtccgcgagcaggcgatcggcgccaccgtggtcaagtcggtcacgccgggccagatggtggtcaagatcgtccatgacgagctggtcaacacgctcggcgccgaaggccagaccatcgacgtcaattccgtgccgccggtgccgatcatgatggtcggcctgcagggctccggcaagaccaccaccaccgcaaagctcgcccgccgcctggtccagcgcgacaagcgcaaggttctgatggcctcgctcgacgtctaccgcccggccgcgatggaacagctggccgtgctcggccgcgacctcgacattccgaccctgccgatcgtggcgggacagcaaccgccgcagatcgccaagcgcgcactggaagccggcaagctcggcggctacgacgtcgtgctgctcgacaccgccggccgcaccacgctcgacgaagagatgatggcggaggcagccgcgatcaaagctgcggcgaatccgcacgaagtgctgctggtcgccgacagcctcaccggccaggacgccgtgaacctcgcgcgttcgttcgatcagcgcgtcggcctcaccggcatcgtgctgacccgcgtcgacggcgacggccgcggcggcgctgccctgtcgatgcgcgcggtcaccggcaagccgatcaagctgctcggcaccggcgaaaagaccgacgcgctggaagatttccatcccgatcgtatcgccgggcgcatcctcggcatgggcgacgtggtgtcgctggtcgagcgcgccgccgccaacatcgacgccgaaaaggccgcgcgcactgccgagcgcatgcgcaagggtcagttcgacctcaacgacatgcgcgagcagctgctgcagatggcgaacatgggcggcatcagcgggctgatgggcatgatgcccggcatctccaagatgaagaaccagatcgcggcagccggcatcgacgacaagatcctgaagcgccaggtcgcaatcatcgattccatgacgcgcgaggagcgccgtcatccggatctcttgaaagcgagccgcaagaagcgcatcgctgcaggcagcggccagagtgtcgagcacgtcaacaagctgctcaagatgcaccggaacatggccgacgtgatgaaggccatgggctcgggcaagcgcggcccgctcgccggcatcgcccaggcgatgggctttggcggcggcatgaagcctccctctccggaagagatgaaagcgcttcaggagaagatgcagagcggcggcggacagggcctgccgaacctgccgaaggatctgccggctggtcttcgccagggtctgcccaaccttcctggactgaccgggctgagcggcaagccgacgctgccgggcctcggcggtttcccgggcaagaagaaatga

SEQ ID NO: 7902 - DNA, 174 bp, BradyrhizobiumColbertium
ttgtcctgctcgctaaagaagcgatcttccaaacacctttgcgcccgagggcgcacagcgctgtcgggcgttgacctccggcctccagggccagtcggcgggtcgaaaagaaagcctttccgagaaagtgtcggggttaaacgccgctcacgtccaaaagtcaaggaaagttag

SEQ ID NO: 7903 - DNA, 228 bp, BradyrhizobiumColbertium
atgatcggaggcggggccgtcataggttttcatgcgggacatccagagggagcagtccaaaagccggagggcgggtgggcggcaaagcaggcgtcctggggcagcccggacggtaagacatcaccggctatatgggccggcccggcagaaaaggaacccatcgccaaagcctcacattttcagcatcttgccttggcaccggcgccccgcccccctaactttccttga

SEQ ID NO: 7904 - DNA, 981 bp, BradyrhizobiumColbertium
atgaaaacctatgacggccccgcctccgatcatttcaatggtcggcacttcttcgaccccgacggcgcgccgccgaaatcgcttcgtgaggtgctgcgctggcagttcggcggaaagaggcagcgcgcgaagtggcccgcatgggcgccgagcccccatgcggacacgccgccggcgcgcgtcgagggggacaaggtgcgtctctccttcgtgggccacgccagctggctgatccaggccggcggtctcaacatcctcgtcgatcctgtctggtcgatgcgggtttcgccggtcagcttcgccggaccgaggcggcacaacgatcccggcatcgccttcgagaagctgccgcaaatccatgtcgtgctggtctctcacggacattacgatcatctggatatcgcgacgctgtcgcggctggccaagaattttgccccgcgcgtggtcaccccgctcggcaacgacgtcacgatgcgcggcgccgatcccaccatccaggtcgaagccttcgactggcacgaccgcatcgagctcggcggcggcatcgccgtgcatctggtgccgacgcggcactggaccgcgcgcggcctgttcgaccgcaacaaggcgctgtgggcgagcttcgtcctggagacgccggccggaaaaatctacgtcgtctgcgattccggctatggcgacggcaggcatttccgtcgcgtcgccgagcggcacgggaagctgcgtctggcgatcctcccgatcggggcctacgagccgcgctggttcatgcgcgaccagcacatgaatccggaagacgccgtgaaggcgttgctcgattgcggcgctgaagccgcgctcgggcatcatcacggcacgttccagctgacggacgaggcgatcgacgcgccggccaaggcgctgctcgaggcgctggatgcggcagagattccgcagcagcggttcgtcgcgatgaagcctgggcaggtggtggagatctag

SEQ ID NO: 7905 - DNA, 684 bp, BradyrhizobiumColbertium
atgaaaaagcctgccctgcttgccaccgtcttcgccactgtccttctgacggcgcccgcacgcgccgacgattttccatccgccattacggtgagcggcgaggccatgatttccgcggcccccgatctcgcgcaaatcgatgccggcgtcgccaacgacgccaagacggcgaaggaagcctccgatgccaacaacgccgcgatgggcaaggtgctgctggcgctgaagggggccggcatcgccgagaaggactaccagacctcgcggctgtcgcttcagccgcagtacggccagaacaaagccaccggcgcctcgcccgtggttggcttccgcgcgagcaaccgcgtcaccgtgaagattcgcgatgtggccaaggtcgcagccatcatcgatacgctggtcggcgccggcgccaacgacatcggcaacatctcgttcgaggtaacacaggcctcgaagctgctcgacgacgcgcgcgagcaggcagttgcggacgctcgccgcaaggccgatatctacgccagggctaccggcgtcacgctgggcgcgccgctcagcgtctcggaaggcggcgccccggtgccgctgttcaagacgcggatggccgaacggatggccgcagcaccgcaggccgcagtcgcacccggcgaggagacgctgtcggtgactgtcaatgtgagctga

SEQ ID NO: 7906 - DNA, 471 bp, BradyrhizobiumColbertium
gtgcagaccgccgatcccttcgggctggaaaccacgctcgaatccaggaaggtcgtgatggtcaagggcacggccaattgggactcggccttcgatacgctgatcgacgccttcaaggcgctgaacacgctgctggacaagcagggcatcaagcccgcagggaattcgatgatcgtctacacctcgaccgacgacaccggtttcaccttcctcgcccagatcccggtcgaccaggatcccaagaatctgcccaaggacatgagcatcggcaagtcgcccgaaggcaaggcgctgaaattcgtccatcgcggctcctacgacaacatggacaacacctatgaggcgatcaccaatcacctcgacgacaagaggctggaagccaaggacacgttcatcgaggagtacctcaccgatcccctgaagacggccgaggacaagctcgtgatcaatgttttcgtaccgctgaagtga

SEQ ID NO: 7907 - DNA, 876 bp, BradyrhizobiumColbertium
atgagcgcgctggccaaccacgcatttgccaagatgaatggcatcggcaacgagatcgtcgttgtcgatatgcgcgattccgctggcggggtgacgccggaggacgcccgcgcggtggcatctgcgcgaggtggcatcgcctatgaccagctcatggtgctgcagaagccacggctggacggcaccgaagccttcatccgcatctacaacaacgacggctcggaggccggcgcctgcggcaacggcatgcgttgcgtggtgcgccgcatcttcgagaagaccgggcagaccaccgcgaccttcgagacggccgccggcctgctcaatgcctggcagggtccggcggccgatctctacaccgtggacatgggcgtgccgaaattcggctggcaggatattccgctggcggaagaatttcgcgacacgcgctacatcgaactgcagatcgggccgatcgacaatccgatcctgcattcgccctccgtggtgaacatgggcaatccgcatgcgatcttctgggtcgaggacgtcaacgcctacgatctcagccgcttcggcccgctcctggaaaaccatccgatcttcccggagcgcgccaacatcacgctcgctcatatcgtcgatcgcgagcacatcacgatccgcacctgggagcgcggtgcgggcctgaccaaggcttgcgggtcggcagcttgcgctacggcggtcgctgcggcgcggctgaagcgcgcagagcgcaaggtcgagatcacgctgccaggcggcaagctcggcatcgaatggcgcgagcgcgacgaccacgtgttgatgacggggaccgcgaccttcgaatatgagggcaatttcgatccggcgctgtttgcgccggtcggatga

SEQ ID NO: 7908 - DNA, 1257 bp, BradyrhizobiumColbertium
atgatgggcgtcgaggtcgtcaccttcggctgccgcctcaatgcgttcgaggccgaggtgatccgccgcaaggcggaaggtgcaggcctttccgacacgatcgtcatcaacagctgcgctgtcaccaacgaggctgtggcgcaggcgcgccagtcgatccgcagattgaagcgcgagcggccaggcgcgcgcatcgtcgtcaccggttgcgcggcacagacgcaaagccggatgttcgccgacatggctgaggtcgatcgcgtcgtcggcaatgacgacaagatgcgcggcgaagcctggcgcgaggcccgcgacgccttcgatctcgacgccagcgagaagatcgccgtcagcgacatcatgtcggtgaaggagatggcgccgcatctcgtcgacggttatgcgagcggcctgccccgcgtgttcgtgcaggtgcaaaacggctgtgaccatcgctgcaccttctgcatcattccgttcggccgcggcaattcgcgctcggtcccgatgggcgccgtggtggagcaggtgcggacgctcgcccagcgcggccatgccgagatcgtgctgacgggcgtcgatctcaccagctacggtgcagaccttccgggagcgccgaagctcggcatgctgacgaagcagatcctgcggcacgtgccggagctgaagcgcctgcgcatctcctcgatcgattcgatcgaggccgacaacgacctgctcgatgccatcgccggcgatgcgcggttgatgccgcatctgcatctgtcgctgcagtcgggcgacgacatgatcctgaagcgcatgaagcggcggcattcgcgcaatgacgccatcgcgttctgcgagacggtccgccggctgcgcccggacatcgccctcggcgccgacatcatcgcgggcttcccgaccgagacagaggagatgttcgcgcgctcgctagccctcgtcgaagaatgcggcctgaccttcctccacgtttttccctattcgccgcggcccggtacgccggccgcgcgcatgccgcaggttgccggcggtgcgatcaaggaacgagccaaacggctgcgtgcagcgggtgaagccgcactgcggcagcggctgcgggccgaggtcggcgcaacgcgcgatgtgctgatcgagagcgccgggcagggacgcacggagcattatctgccggtggccgtggctggcgagcgggtcggaagcatcgtgccgctgagaattgccagcactgacggcgagcgcctcaccacatag

SEQ ID NO: 7909 - DNA, 1113 bp, BradyrhizobiumColbertium
gtgacgaccaaggccgggctatcgatcatcgacgaggtcgaatccgcgatacgcgccggctcggcagagaagggcctggcaacggcccgccgcgtcaccgacctgttcctgtcttccgccggcagcttcgacgacgagcagatcgcgctgttcgatgacgtgctcgaacgcctgatcggcaccatcgagctgcgcgccatcgccgacatcggcgcgcgcgtggcgctcgccgagatcagcgcgcagctggcgccgatcgctcaggcgccgccgtccgtgatccgccgcctcgccaacaatgacgagatccgcatcgccggtcccgtgctgcaggaatccgcccgcctcgacgacgccgaactcgtgaagatcgcctcgagcaagggcgaggcgcatctgctcgcggtcgccggccggtggtggctgaaggagatcgtcacggacgcgctgctggcccgccgctaccccagcgtcagccggcggctcgccgccaatccgggcgcgcgcgtctcgggcaacggatttgccgtcatcgtcggacaggccgaaagcgatccggagctcgccgtcagcgtcggcgttcgcgtcgatctgccgtcggatctgcgccgccaattgctgcgctcggcaaccgatgccgtgcgcacccgcttgttgtcgcgcgccccgccgcatctgttcgaggaaatccagagcgcgatcgccgccgtcaccatcggtgtcgcgcgcgaaatgtcgggcgtccgcgatttggaaggcgccaagcgcgccgttgcaaatctcaaggccgccggccagctcgatgagccgacgctgctcggatttgccagacagcggcgctacgaggagacgatggcggcgctggcggcattgtcaggatcgacggtcgaggtgatccgtccgttgatgcagagtctgcgcgaagacggcctgctggtgccttgcaaggccgcgcagctccgctgggagacgaccgtggccgtgctcgaaagccgttttgcaacgggtgcgatgaagccggcggatcttgcaagagcgcaggggctctacgcaagaatgacgacggagaatgccaagcggacgctgcggttctggcaggtaagggcgtcgtag

SEQ ID NO: 7910 - DNA, 702 bp, BradyrhizobiumColbertium
gtgctcgatgttcccgaattgaccgctgacgagattttgtcgcgcgtactccatcgcgacggtttgatgctggtcatcaacaagccggccggcctgccggtgcatcgcggccccaagggaggccccaacctggagcattccttcgacgcgctgcggttcggcctgccgcggccgccggtgctggcccaccggctcgacaaggacacgtccggctgcctcgtgctcggccgccaccgcaaagccacggcgtccctcggactgctgttcaagcatggcaagatcggcaagacctactggaccgtggtcgagggcggtcccgcggaagacgaaggcacgatcgacatgccgctcggccggctcaatgccgaacgcggctggtggcagaagccggacccggaggggcagagggccatcaccaactggaaggtgttgggccgcggcggcggcctgacctggctcgccatggaacccgtgaccggccggacgcatcaattgcgggtgcattcagccgagagcggttggccaatcttcggcgataacatttacggcaacggaccccgcttcggcgagccgcgcctgcacctgcattcccgcgagatcgtggtcccgatctcccggaacaaggagccggtccgcgtcgtggccccggccccgccgcacatgcacgagaagctcatggcctgcggctggaacggggagtag

SEQ ID NO: 7911 - DNA, 945 bp, BradyrhizobiumColbertium
atgaacgatacctccgaaacccccaagctgagctggtggcgccgcctgtccaacgggttgaagcgcacctcgtcctcgctcgggactgcggtcgccgaccttgtcaccaagcgcaagctcgatcgcgccatgctcgacgagatcgaggacgtgctgctgcgcgccgatctcggcaccgcggtctcggtacggattgccgatgcggtcggcgccggacggtacgacaaggcgatctcggccgacgaggtcaaggacgtggtcgcgaccgaggtcgagagggtgctggcaccggtggcgaagccgctcgaggtcgacaaggccaagaagccgttcgtgatcctcgtggttggcgtcaacggctccggcaagaccaccacgataggaaagctctcacagaaattcgcctccgaaggccgcaaggtgatgctcgccgccggcgatacgtttcgcgcagccgccatcgagcagctcaaggtctggggtgagcgcacaaggacacccgtgatcgcgggggcgcagggctcggattcggccagccttgccttcaacgcactgaccgcggcgaaggagcagaacatcgacgtgctcctgatcgacaccgccggacgcttgcagaacaaggccgagctgatgaacgagctcgaaaaggtcgtgcgcgtgatccgcaaggtggatgccaccgcgccgcacgcggtgctgctggtgctcgacgccaccgtcggccaaaacgcgctgtcgcaggtcgaggcgttccatcgcaccgcaggggtcaccggcctcgtgatgaccaagctcgacggcaccgcccgcggcggcatcctggtggcgctcgcggagaagttcaagctgccggtgcattttatcggcgtcggcgagggcgtcgacgatctcgcgccgttcaccgcgcgcgatttcgccaaggctatcgcgggaatcgaaagctga

SEQ ID NO: 7912 - DNA, 603 bp, BradyrhizobiumColbertium
atggacaagactcagccgcacccgatgttcaagctcgcgaccgaactcggtccgctgctcgtgttcttcttcgtgaacgcgaagttcaatctgttcgccgcgaccggcgcctttatggtggcgatcgcggtcgcgatgaccgcgtcctatatggtgacgcgccacattccgatcatggcgatcgtgacgggcgtcgtcgtgctggtgttcggtacgctgaccctggtgctgcacgacgagaccttcatcaaggtcaagcccaccatcatctacggcctgttcgccgcgatcctcggtggcggcctgttgttcggccgttccttcatcgcggtgatgtttgaccaggtgttcaatctgaccccgcagggctggcgcattctcacgctgcgttgggcgctgttcttcgccggaatggcggtgctgaacgagatcgtgtggcgcacccagagcacggacttctgggtgaacttcaaggtgttcggcgtcacgacgctgaccatgatcttcgcggtcgcccagctgccgttgaccaagcggcatcacctcgagccggtctcgctggagaccagcgaagccgaggcgggggatgtgagtaaggggtga

SEQ ID NO: 7913 - DNA, 594 bp, BradyrhizobiumColbertium
atgagcgatcagccgagctccgctccgccgcggcgccgcaccttcctgatggtgctgccgctgattgcattcctcgcattggcgctgctgttctggttccggctcggcagcggcgatccctcgcggattccgtccgatcagcgcggacggccggcgccgcagacggtactgccgccgctcgagggattgcaggctggcaatgcgcaggtgcccggcctcgaccccgccgcgttcaagggcaaggtgagcctggtcaacgtgtgggcgtcctggtgcgtgccgtgtcatgacgaggcgccgctcctgaccgagctcgccaaggacaaacgcattcagctggtcgggatcaattacaaggacgccgccgacaacgcgcgccgcttcctcggccgctacggcaaccccttcagccatgtcggggtggacggcaacggccgcgcctcgattgaatggggcgtctacggcgtgccggaaaccttcgtcgtcgggcgcgagggcaacatcgtctacaagctggtcggaccgatcacggcgcaaaacctgaagaccgtgctgatgccggagctggagaaggcgctgaaggcagggtcttaa

SEQ ID NO: 7914 - DNA, 180 bp, BradyrhizobiumColbertium
atgtcgctgggtccctacgcgtctttcatcgtgacgtcttacgcggctgccgccctcgtggtcgccatcctgatcggctgggtcatgctcgattaccgcagccagacgcagcgcctgcgcgagctggaggagcgcggcatcacccgccgttcgggccgcagcgcgacggagctgcgatga

SEQ ID NO: 7915 - DNA, 732 bp, BradyrhizobiumColbertium
atgacgctgatcgatctcgccaatcccacacggttcctcgcgctgacggcgcggctgttgccgtggctcgcggccgcgaccgtcatcctgctcgcgattggcctctatcaatccgcgtccgcaccggacgactaccagcaaggcgcgaccgtgaagatcatgttcattcacgtgcccaatgcctggctggcgatgttcgtgtggggcgtgatgagcattgcctcgctgggcacgctggtatggcggcatccgctcgccgacgtcgcagccaaagcggcagcgccgatcggcgccgccttcaccttccttgcgctgctcacgggctcgctgtggggccgaccgatgtggggcacctattgggaatgggacgcccgtctgacctcggtcctgattctcttcttgatgtatctcggcctgatggcgctgtggcgcgcggtcgacgatccctcgcgcgcggcgcgggcggctgcggtgctgaccctggtcggcgcgatcaacctgcccatcatcaagttctcggtcgactggtggaacacgctgcaccagccggcctcggtgatgcgcatgggcggctcggcgctggacaagtctttcctgatcccgctgctggtgatggcgatcgccttcacgctgctgttcgtcacgctgcatttggccgcgatgcgcaacgagatcctgcgccgccgggtccgctcgctgcagatgatgcaggccagtcagaaagccgcatga

SEQ ID NO: 7916 - DNA, 669 bp, BradyrhizobiumColbertium
atgaccgccctctcagccctcgtccgccgggacatcaggatcgcgctgcgcgttggcggcggggcgctgatcggcgtgctgttcttcctgaccgtggtgttgctgatgccgttcgcggtggggccggatctggcgctgctgtcgcgcctggggccggcgatcctgtggctcggcgcgctgctggcgagcctgctcacgctggaccggctgttcatggccgaccacgaggacggctcgctcgacctgatcacgatgagccggacgccgctggaactcgcctgcgctgccaaggcgctggcgcattggctggcggccggcctgccgctgattgtcgcaacccccgtgctcggcctcctgctcaacctcgacatggtcgcgaccggagctgtggcgctgacgctgctggcgggcacgccggccctgaccttcaccggcatgatcggcgcagcgctggccgtgacgctgcaccgcggcgggctgctgatggcggtcctcgtactgccgctgtccatcccggtgctgattttcggggttgcggcttcgcaggccgtgatcgtcggccccatgacgttcggcgcgcccttctcgatcctctgcgcgctgtcgctggtcagcctcgtcatcggccccttcgcggccgcggcaagcctgcggcatggcctcgactga

SEQ ID NO: 7917 - DNA, 627 bp, BradyrhizobiumColbertium
gtgagcggaacgacacaaggcaagatgcagctgtccggacgcgggctcatttgcgtccgcggcggccgcgaggtgttctccgggcttgatttcgccgcggctgccggcgaggccgtgtcggtggtgggccgcaatggcgcgggcaagacctcgctgctgcggctgatcgctggcctgctcgtcccggcggccgggaccatcgtgctggacggcggcgacggcgagctgacgctgcccgagcagtgccattacctcggccatcgcgatgccctgaagccggcgctgagcgtgactgaaaatctgacattctgggccgatttcctcggcggcgagcgcgctgaccccgccgagaccctcgcgaccgtcggcctcgaccacgccacccatttgcccgccggcttcctgtccgccggccagcgccgccggctgtcgctggcccggctgctgacggtgcgccgcccggtctggctgctggacgagccgaccaatgcgctggatgtcgccggccaggacatgttcggcggcctgatgcgccagcacctttcgcgcggcgggatgatcgtcgcggcgacccatgcgccgctggggatcgaatcgcgggagctgcggatcgggggtgtggcgtga

SEQ ID NO: 7918 - DNA, 2721 bp, BradyrhizobiumColbertium
atgacctcgctcgacagcttcaaatgcaaaaagaccctcaaggtcggcgccaagacctatgtctattacagcctgcctacggccgagaagaatggtctgaaggggatttcgaaacttccctattcgatgaaggtcctgctcgagaacctgctgcgcaacgaggacggccgctcggtgaagaaggacgacatcgtggcggtgtcgaaatggctgcgcaagaagtcgctggagcatgagatcgccttccgcccggcgcgcgtgctgatgcaggacttcaccggcgtcccggcggtggtcgaccttgccgcgatgcgcaacgcgatgcagaagctcggcggcgatgccgagaagatcaatccgctggttccggtcgatctcgtcatcgaccactccgtgatcgtgaacttcttcggcgacaacaaggccttcggcaagaacgttgccgaagaatacaagcagaaccaggaacgctacgagttcctgaagtggggccagaaggcattctcgaacttctccgtcgtgccccccggcacgggcatctgccaccaggtcaatctggaatatctggcccagacggtctggacgaagaaggagaagatgacggtcggcaagaagaccggcacgttcgaggtcgcctatcccgattcgctcgtcggcaccgattcccacaccaccatggtcaacggccttgcggtgctcggctggggcgtcggcggcatcgaggcggaggcctgcatgctcggccagccgctgtcgatgttgctgcccaacgtcgtcggcttcaagctgaagggcgcgctgaaggaaggcgtcaccgcgaccgacctcgtgctgaccgtgacgcagatgctgcgcaagctcggcgtggtcggcaagttcgtcgagttcttcggccccggcctcgaccacctttccgttgccgacaaggccaccatcgccaacatggcgcccgaatacggtgcgacctgcggcttcttccccgtcgatgccgcagcgctcgactatctcaagacctccggccgttcttccgcgcgcgtcgcgctggtacaggcctatgccaaggcacagggcctgttccgtaccgcgaagtcgcccgatccggtgttcacggaaacgctgacgctcgacctcggtgacgtcgtgccgtccatggccggcccgaagcgtcccgaaggccgcatcgcgctgcccaccgtcgcggacggcttctcgctcgcgctcgccagcgagtacaagaaggccgaggagcctgccaagcgcttccctgtcgaaggcaagaatttcgacatcggccatggcgacgtcgtgatcgcagcgatcacctcctgcaccaacacctcgaacccgagcgtcctgatcggtgccggcctgctcgcgcgtaacgcggctgcgaagggcctcaaggccaagccgtgggtgaagacctcgctcgccccgggcagccaggtggtcgccgaatatctcgccaattccggtctccagccgtatctcgacaaggtcggcttcaacctggtcggcttcggctgcaccacctgcatcggcaattccggtccgctgcccgaggagatctccaaggcgatcaacgacaacggcgtcgtcgcggccgccgtgctctccggcaaccgcaacttcgagggccgcgtctcgccggacgtgcaggcgaactatctggcttcgccgccgctggtcgtcgcctacgcgcttgccggcagcgtcaccaagaacctcgccaccgagccgctcggcgagggcaaggacggcaagccggtgtacctgaaggacatctggccgacgacgaaagagatcaacgccttcatgaagaagttcgtgaccgcgtcgatcttcaagaagaagtacgccgacgtgttcaagggcgacaccaactggcgcaagatcaagacggtcgagagcgagacctatcgctggaacatgtcttcgacctatgtgcagaacccgccctatttcgaaggcatgaagaaggagccggagccggtcaccgacatcgtcgaggcgcgtatcctcgccctgttcggcgacaagatcaccaccgaccacatctcgccggccgtttcgatcaagctcccctcgcccgccggcaaatatctcagcgagcaccaggtgcgccccgccgacttcaaccagtacggcacgcgccgcggcaaccatgaagtgatgatgcgcggcaccttcgccaacatccgcatcaagaacttcatgctgaagggcgccgacggcaacattccggagggcgggctcaccaagcactggcccgacggcgagcagatgtcgatctacgacgccgccatgaagtaccaggaagagaaggtgccgctggtggtgttcgccggtgccgaatacggcaacggctcctcgcgcgactgggccgcgaagggcacgcgcctgctcggcgttcgcgccgtgatctgccagagcttcgaacgcatccaccgctccaacctggtcggcatgggcgtgctgccgctgaccttcgaggaaggcacctcctggcagtcgcttggtctgaaaggcgacgagaaggtcacgctgcgcggcctcgtcggcgacctcaagccgcgccagaagctgactgcggagatcgtctccggcgacggctctttgcagcgtgtttcgctgctctgccgcatcgatacgctggacgagctcgactactatcgcaacggcggcatcctgcactacgtgctgcgcaagcttgcggcgtaa

SEQ ID NO: 7919 - DNA, 777 bp, BradyrhizobiumColbertium
atgacgacaatgacggcttctcatctgattccacgttggtccggtgccctctggtcgggagctctcggcatctgtgcgatcatcgccgtcatccgtcccgcccacgctgatccgcgtgctgttgtcgagttgtttacctcgcagggctgctcgtcctgcccgcccgccgatcagatcatcggcgatctctccaaggacccatcgatcatcgcgctaagcatgccgatcgactattgggactatctcggctggaaggacacgctggcggactcgcgcttctctgcacggcagcgtgcctactcgcgcatgcgcggcgaccgcgaagtctacaccccgcaggtcatcgtcaacggctcgacgcacgtcattggcagcgaccgcgccgggatcgagcgtgcgatcggcaaggcagacaagggcactggcgtgatgagcgtgccggtgacgatgtcgctttccggcaagcagatcaacgtttcggtggcggcgagcaaagagcccgcggtctcgcgcggcgaggtctggatctgctcgatcgcgaagtcggtgccgatcgccatcacccgtggcgagaatcgcggacagcaggtcacttaccacaacgtggtgcgcaacctgctcaaggtcggcgactggaccggccgtccggaaagttggacggtgccgatcgagaacctcacccgcgacggcgtcgacggcgcggtggtctatgtccaggacggcagccgcgaaaagcccggcccgatgctgggcgcggcgtacacctcgctgcattga

SEQ ID NO: 7920 - DNA, 372 bp, BradyrhizobiumColbertium
atgagcctgatgtcggaggatgccgatccgagcgagcagcgcgcggcggcgcgccccgccgccctgaatgcgcaggcaaaccgggtgacgttcaaccggctcgagctgcaccggattctcaatctctacggtcgcatggtcgcggatggcgaatggcgcgactacgcgatcgacttcctgaaggatcgcgccgtgttctcggtctatcgccgtgcctcggaagtgccgatctaccgcatcgagaaggacccgcgcctcgcgcgcaagcagggcatgtacagcgtgatctcggcgaccgggctcatcctgcgccgcggccatgagctggagcgcgtgctgctggtgatcgatcgcaagctcgcggtggtgtga

SEQ ID NO: 7921 - DNA, 531 bp, BradyrhizobiumColbertium
atgtccgcacccgaaatcaggcccacggccgaggccgacctccccgccatcaccgcgatctaccagcaagccgtccgcgagggcacggcgacgttcgagctggagcctcctgaccttgccgagatgacgcgccgctatcgtgcgctggtggacggcggctacccctatctggtcgccatgctcgatggacgcgtcgccggctatgcctatgcgggcgcctaccggccgcggccggcctaccgtttcacggtggagaactcgatctatctcgatccctccttccaccgccggggcgtcggctcgttgctgctggagcggctgatcagcgagtgcgaggcgcgcggcttccgccagatgatcgcggtcatcggcgattccgccaatgccggctcgatcggcgttcacaccaagagcggcttcaagatgatcggcacccatccaaatgtcgggctgaaattcggccgttggctggataccgtgatgatgcagcgcgacctcggcgagggggcaagcaccgtgccggtgacgtaa

SEQ ID NO: 7922 - DNA, 612 bp, BradyrhizobiumColbertium
atgctcgaactcgcagcgctcttgtgctcacgggtctgccacgatctcatcagccccgtcggggccatcgtcaatgggctcgaagtgctcgacgacgatcccaagcccgaggaccgcgagtttgccctcgacctgatccgcaagagcgccaagaccgcctcggcccggctccagttctgccgccttgcattcggcgcggccggctcatccggcgcacagatcgatctcggtgatgcccagaccatggcgcgcggccatatcgaggacggcaagtgctcgatcacctggaatttgccgcggctcctgctgccgaagaatcgcgtcaagctgctgctcaacatgctggtcgtcgctcaacatacgatcccgcgcggcggcatgctgacggtcgacccgatcggcgagggtgagacgatgagcttccggatcactgcgagcgggcataatgcgcgcctgccgcagaacatctccgagctcctgagcggcgagcgcgggcctgccgcggatgcgcatgcgatccagccttattatacgcggttgttggcagaggcttgcggactcaccgtgaagctcgcgcctgaaggcgaagccatcaccgttaccgcttcgtga

SEQ ID NO: 7923 - DNA, 825 bp, BradyrhizobiumColbertium
gtgaatcggatcgttgacgagtcagccgcctttggcctgatggagccgctgacggcgctggtggtgaaggcgggcgaggcgatccttgccgtcaaccgcgccgccatgcagatcgaaggcaagcaggatggctcgccggtaacggaggccgaccttgccgctgaccgcatcatcgcagacggcctcgagcagctcgcgggcgaccttccgacgctgtcggaagagcggacccagctcgcctcgccgccgtttcagggcagcttcttcctgatcgatccgctcgacggcaccaaggagttcgtcgccggtcgcgacgagttcaccgtcaaccttgccctggtgacggaaggcgtgccgctgctcggcatcgtcagtgcgcctgctctcggactgctctggcgcggcatcgtcggccgcggcgcggagcgggtagatttcaacggcgcgaccatcagtaccgccaagcccatcaacacccgcaagctgccggcgcgcggtgagccctggatcgcggcggtgagccgctcgcatggcgaccccaagagcgaggcgttcatcgacagcagacccaatgcggtcagacggaccgtcggctcggccgtgaaattcggccgaatcgcggaaggcagcgccgacgtctatccccgcttcggaccgacctcggaatgggacgtcggagccggcgctgctgtcgtggccgcggcgggcggcagggtgaccgatggcaagggcggcgagctccgcttcggtcagcgcagcgatacaggcttcatcattccggacttcatcgcctggggcgatccgcaggcggtaggctgctactga

SEQ ID NO: 7924 - DNA, 486 bp, BradyrhizobiumColbertium
ttgcgccccggaattgccttgatcggccgcctcgtgtgtctgctggcgggcctctggatcgccggcgcggtggtgccggccaaggctgccaccaccgagcggatcgtcgtcaatcgcttcaccggcactgccatcgaggggttcgaccccgtggcctatttcgtcgatggggtggccatgcaggggacggcggagttcgaggcgaacctctggggcgcggtctggcgctttcgcaacgagggcaaccgggcctcgttcctggcccatcccgagatctacgggccgcaattcggcggctatgatccggccgatatcgcccgcggtgtcaccattgccggcaatccctatttcttcgcgatcgtggcgcagcggctctatctgttcagccgggaagccaatcgcgacgccttcgtcgccaatccggagcgcttcctctatgaggtacgcaagcgctggccggcgcttcgggaacagctcggtcagtag

SEQ ID NO: 7925 - DNA, 606 bp, BradyrhizobiumColbertium
atgactttcgcatcacgccttgcagcgctcgcgcttgccgcgatggtaggctggatcgtgccggcctcggcccagaatgcgccgccgcctgaccttccgccgccgcagcgaacccctacgcccaatacctacggcccggacgaactcgtcggcgccggacaccgcttcttcggcaacgtctcgcgcgggctggcctcgatcatcgagaaggcagtcagccaatggggcctccccaacggctacatcctgggcgaggaaggctccggcgccttcgtcgccggccttcgctacggcgaaggcacgctctacaccaagaacgccggcgacctcagagtctactggcaggggccctcgctcggcttcgattggggcggcgatggcgcgcgcaccatgacgctcgtctataatctgcctgcgaccaatgcgatctatcagcgctttgccggcatcgacggctcggcttacatcatcggcggcttcggcatgacggccctcactgccaacgacatcgtgctggtgccgatccgctccggcctcggcctgcggctgggcgccaacatcggctatctcaagtacaccccgcgcgcgacctggaacccattctag

SEQ ID NO: 7926 - DNA, 1299 bp, BradyrhizobiumColbertium
atggtcgagccgatcatgtacctggcgatcggtttcctgctctcgatgctgtgcgggctcgcgatcgtgccgctggtgcataaccgcgcggtgcgcctgaccacgcgccggctcgaggccgccacgccgctgtcgatggccgagatccaggccgacaaggaccagcttcgcgccgaattcgccatgtcggcccggcgcctcgagatgagcgtcgagcagctcaagaacaagacaacgagccagctcgccgagctcggcaagaagagcgacgccatcaaccgcatgaagatcgagctcggcgagaagaatgccacgatcttcgcgctggaggcgcgcgagaaggcggtcaaggagcagcttcgcgccaccgaagaggagttcaacgccaagaccgcagccttgcgcgaggccgagatcgcgctggccgacaagcaggccgagcttgccaagatcaacaccgagctgtccgaccgctcgatgatggcggagagccggcaggtcgagctgatcgccgtgcgcacgcagatcgaggaactgaagagccgcgtcggggatgccgagaaggaatttgccgccacgcaagcacgcctcgcgcaggagcggattgaatccgagactgcctcgcgcgagctcggcgaggcgcgcggccgcgtcgagaatctgagccagcgcgtcaccgagctcgatcgccagctcatcatacaggtcaaggaagccgagatgctgtcggcgcgtgtcgccgatctcgaggggcgccttgccacgcaaggcaagctgctcgccgagcgcgactatgagaacaaccagctgcgccaggccaatgacagcaacgagcgcaccataaaggagctgcgcgttgagatcgccgcgctcagcggcggcagatcgtccgctgcgatggaacagctacgcgcggaaaagtccgcgctggaggagcagctacgcaccgcgcgcgacgagcgcgccaagctccagcgcgacatcaacgcaattcagcagcaggcggagagctcctgggcgaccgagcgcatggagaacgcgcttctgcgcgagcgcatcaacgacatcgcggcggaagtcgccaagctcgcgatgcagctcgaaggcccgaactcgccgatcgaggcgctgctcgcggccgaggccggccagccggcgaaaccggcaccgcgcccggccaatgatgccgcgaccaacggcgcccccgcggcccgcctgcccgaaggcggcggaacgctcgccgagcgcatccgcgcgctccaggcccacgcctcccgcgcccgccagcagggcgcgtaa

SEQ ID NO: 7927 - DNA, 72 bp, BradyrhizobiumColbertium
gggcgcatagctcagcgggagagcgttcccttcacacgggagaggtccaaggttcgatcccttgtgcgccca

SEQ ID NO: 7928 - DNA, 774 bp, BradyrhizobiumColbertium
atggcgatcgtattcatcaccggcagcacggacggtctcggccgcgcggcggcacaatcgctcctcgatcaaggtcaccgcgtcgtattgcacgcgcgttcggctgatcgtgccgcagcactcggcgggctcgcctcgcgtgccgcggggctggtagccggagatctcggaagcgcagcagagacgaagagcatcgcggatcaggtcaacgcgatcggacggatggacgcggtcatccacaatgccggcgtctatacgcggccaagtcgcggctcgacgccggaaggtcatgccgaaaccctggccatcaacacgcttgcgccgtacatgctgacggcgctgatcgagcggcccggccgattggtgtatctcagcagcggattgcaccgcggtggcgaaggctcgctcgacgacctcgattggacgaagcgggcctgggacccggccaaagcctatgccgagagcaagctgcacgtcgtcgcacttgccttcgcgctggcgcgacgctggcccgacgtcctgagcaacgcggtcgatccgggttgggtgcgcacgaagatgggcggtgcgggcgcgccggtcgatatcgacaccggacagcggactcaggcctggctcgcagtgagtgaggactcccgtgccaaggtgagcggccgctactggcatcatctcgagcagcagcagccggccggcgaggcaaccgatgaagaatttcaggaccggctgatcgagaaattgagcaagctgacgggcgttgagctgccggcggtctga

SEQ ID NO: 7929 - DNA, 618 bp, BradyrhizobiumColbertium
atgtacctcgtcctgtacaagacgaacctcttcgacttgaacgccatcgtccagggggcgaacggttcgtggtggtttccggccttcatgttcgtctgcgtgctcctggagtcggtcttcccgtatttcggctattttcccggcacggccctcatcctgatgtccgtggcgctcaatccgaagtccgcggatgtctccgtctttgccgtggcgtggctcgccatcatcctgggtgccgtcttgagctacggacaggcgcgtttcttcaggccgctcttgcagcgggttgcctcgaaagcggcgctgcgccgatgtgagtcactcctccacgcctacggtccttacgcgcgcattgccctgttcgttcaccccaacgcctgcgcgatgtatttcaccgcgctcggacttctcggcggcaacctgatgcgagagctcgtctatctctgcgtaggtgctacggcagccgtgggagttctgttcgtcatcgtgacgcgactcgtgtcggcggtgggccccaccgatgatgggcagttgcagctgctgctggcagcagcgctggtcgcgatcgggacgctcgtcggtctctatgcggccttgcgagcgcagcgggttgcctga

SEQ ID NO: 7930 - DNA, 483 bp, BradyrhizobiumColbertium
ttgagcgttgccttcaccaaggaagagagcgccgaaaccgcgtccgagacgctgttgccggaccgtccgatctcgccgcatccaaacctcgtgacggaggcaggcttcaaggcgctgcaggcgcagcttgccgacgcgcgcgcggcctatgaagccgcgcaagccatcgaggacgtcaacgaaaaacgccggcagtcggcggtgcccttgcgtgacgcccgctatcttgccgaacgcttacgcaccgcgcaggttgttcccacctcagtctcgaccgacgtcgtcgcgttcggcagcaccgtgaccttcagccgcgctgacggtcgcgtgcagacctatcgcatcgtcggcgaggatgaggccgatccgaaagcgggatcgatctcgttcgtctcgccggtcgcgaggtcgctgatgggaagggcggttggcgatgtcgtgggcgcgggtgcgcaggagatcgagattctgtcgatcgcgtag

SEQ ID NO: 7931 - DNA, 483 bp, BradyrhizobiumColbertium
atgacgagcgacgacgggaaggatgctggcctggtcgccatgatcagcagcatcctgggaggcaacaagcgcgcagacaatatcactccgccgctgctcaccgaggttccaccgacagcaccggcggacgaggcggtcgagccatccccagccgatcctgcgcccgccagctccgagcctgcgcccgatgccgcgccggctgcaacgaatgcggtcgaagcgccatcgaaaattgcgaccacgcgtgacggcaagcaattgctgccggccgaagcgatcgccgatctcgtgcttggcgaactgcgcaagctggaggattttccggcctccggcgtgtcggtcacggtctatggctaccggaattggaacgcgatgctcaccttcgcgccgttctcgaccactttccagaacgcgacccggttccgccaggccctgccggacgtgtttttcaagctccgccgtttcgtcgaacttgagatataa

SEQ ID NO: 7932 - DNA, 339 bp, BradyrhizobiumColbertium
atgcagaagtcatacttgctggctgcgacggcagcgctggtgctcgtgatgcaaacgccgcttgccctggcgcagggcgcaccggccgccggtggaacctccacgcctgcggcgacaaccgctccgccggccagggcgacgacggcgccaaccgcgaccaccgacagcgccagccagcccaccgacaccaagaagagcgcgtcgaagaagccggcgaagaagaagatgacgcggcagcaggagatcgatcattcggtcgagaccggcaccgtgcctgcgcgctaccgcagctcggtcccgaagcagtaccatcagtatattccgttcgataagcggtag

SEQ ID NO: 7933 - DNA, 393 bp, BradyrhizobiumColbertium
gtggtggagatcacattgtctgtcgcgggctgcgtcacgatgtacctcacctcgaacgcatccggcgtcgcggacaccaacactggcatgaccgtgcatcagacagtccactgggaacgccacggcacggccgttccaccccaatcgaaggagattgaaatgcgtcgcaccatcctcacgcttgcatcgtttgcaaccttgatcgccgcgtcattgtcggcggcaccggcccaggccgcgaacgacagatactgcctgcaaggccgcagctggggctatcccgggaactgccagttcgccacataccagcaatgtgccgccacggcttccggcacgtcggccttttgcggcatcaacccgcgctacgcctattcgcagccttactactactga

SEQ ID NO: 7934 - DNA, 246 bp, BradyrhizobiumColbertium
gtgagagctttcgacacgcactactttaccttcgggaccgagccctctcgcggctacggccacggcttccagctcgagacggtgatgtcctatgccgttacgcccaacgcgaatgtgggaatcggcgcccggtactggcacacggggatcaacgacttcaccgagcccccgggcggagcggggcaggcgcagacctatcaggtcgaccgatacggcacattcatccagagcagcttcaagttctga

SEQ ID NO: 7935 - DNA, 519 bp, BradyrhizobiumColbertium
atgcagaccgagctgaacaaggtgatcgcagcgctccgggacttctatgcccacgagggctttctgttcgagaaggacgtcggcgagcgcgcgatcacacaccgctttgccgtgcatctggagaagcatttttcaggctggtcggtcgactgcaattacgaccgtctcggcgagcgcacgctgcacctgccgcacggcagcatcatctcgaccgacgaccatctcggcaagtcgatctaccccgacgtcgtcgtgcatcagcgcgagatcccgaacaatctgctcgcgatcgagatccgcaaggcaagcaatcatacgccgctggagcacgacgagcacaagctgagggcgctcaccgacccgcatgtctggttcgcctacacgatcggcgtgctgctggtgctggataaacccggcgtcacgctgtcggacgtctatttcggcggggcccccgacccggcattggcggtgtggttcgccaagcagctgggcgaggcggaccttgccggggccacgtga

SEQ ID NO: 7936 - DNA, 1467 bp, BradyrhizobiumColbertium
atgcattttgtcgcagcgctcgaccgcgtgcccggtatgcgctgcgtgctcggcctgttcgaaggcgtggtgacgggggccgccgacggctacttccgcatgaagggaacgccggcctcgacgctgctgcatctcggtccgggcctcgccaacggcctcgccaatctgcacaacgccaagaaggccaattccggcatcgtcaacatcgtcggccagcacgccacctatcacatcggctacaatgcgccgctgacctccgacatcgagggcctggcccggccgatgtcgtcctgggtccgcacctcgccggatgccaaatcggtcgccgctgacggcgccgccgcgattgccgccgccaagagcgcgccgccgcagattgcgaccctgatcctgcccgccgacaccgcctggaacgaggccgacggcatcgccgaggttccggccgagcagcagcgcgccagctattcgccgcaggcggtcgagcaggccgccaagatcctgcatggcgacggcgaaggcacgctcctgctgatgaccggcagcgcgctcagcgagcaaggcctggcactcgccgagcgcatcgccggcaagaccggctgcaccgtgatggggccgaccttccgcccgaagatggcgcgcggccgcgggcgcttctcgatcgaccgcatccactatgtcatcgaccaggcgctgccgatgctggcgaagttccgccatatcgtgctggtcgagtccgacgatcccgtggcgttctttgcgtatccgaacaagccgagcgtgctgcggcccgaaggctgcgacgtgcatcgcatgacctcgtggggcgagaactcggtcgccgcgctcgaggccctcgccgacgccgtgaaggccagcgccaaggatgtcaagccgcaggctttgcaggagttgctcaagccgaccggcgcgctgacccacgcctcgattgcgcagtcgattgcctacgcgattccggagaatgcgatcctggtcgacgaatccctcaccaccggccgcgccttcttcccgccgacggcggccgccgcgccgcacgactggctgcagaacatgggcggttcgatcggcttctcgacgccgctgtcgatcggtgccgcgatcgcctgtccggatcgcaaggtgatcaccatggtcggcgacggcagcgcgatgtacaccatccagtcgctgtggacgcaggcgcgcgagaacctcgacgtcgtcaccatcgtgttcgccaaccgcatctatcagatcctgcgtggcgagttcgacaatgtcggcgccggcgagcccggccagcgcgccaacgacatgctcaggctcgaccgcccgacgctggatttcgtggcaatggcgaagggcatgggcgtgccgggccgcgccgtcaccaatgccgacgagttcaacaaggcgctggccgaagccgtcgccgaacccgggccgcgcctgatcgaagtccagatatag

SEQ ID NO: 7937 - DNA, 246 bp, BradyrhizobiumColbertium
atgcatctcggaggtgcctgggttggtgaagcagacgtccaccccacccttgaccatcgttcgcaccaggctttccgcaccgttcatcccaagctcctgcaaccggccataaccagatatccgtcgggatcaatcattgttcgcgcgttccgtcaaagcaatagccgccatcgcggccctgccccgcgcgacggtgcgccggtttggctaatggtttccggcaaattgtggttgccgattcggtaa

SEQ ID NO: 7938 - DNA, 579 bp, BradyrhizobiumColbertium
atgatccggttttttgccgcgccgattgccgccatcgcacttctgtcggccacggcagccggcgcgctcgccgaggagttcgacacgcgcgacatcatgggcggcggcccgaacttcttccgttccggcgccaatcccgttccccgcacgaccgtcatgtacaatggcaactacgcccccggcacgatcgtggtgaacacgagcgagcgccggctctacctggtgctccccaacgggcaggcgctgcgttacggcatcggcgtcggccgcgacggcttccgctggggcggggtgcacaagatcaccgccaagagggaatggccggactggaccccgccggcgcagatgctggcgcggcgccccgacctgccgcgccacatgaagggtggtgtcgacaatccgctcggggcgcgcgccatgtatcttggctcgaccctctaccgcatccacggctccaacgagcccgagacgatcggtcaggccgtgtcctcgggctgcttccgcatgaccaatgacgatgtgaccgacctctatagccgcgtcgccgtcggcaccaccgtcgtggtgctgaacaactag

SEQ ID NO: 7939 - DNA, 837 bp, BradyrhizobiumColbertium
atgcggcagcgtcgcgatacgatgagcgcaatgaatccgccctcgcctcgccttcgcatcgccttcctcgcgctcgccgcgttcacattggtgcctgacaccgcacccagggccgccgcgggcgaattgcccgcgatctcctcgcgccagcgaaccgagaagaagactttcaccgaccgcgagatcgtcgagggcttcctgaagacggcgttcggcgccgaatatcacctcgccggccgtgtcgaccgcattcgcaagttcgacgggccggtgcgcgtgttcgccgagagtgaccgcgccgatcgcaagacgcagctcgccaaagtcgtgtctgacatcggcacacgcgtgcagcatctcgacatcgccatgaccgagaccagggaggctgcgaatgtgcgggtgaagctggtgcgcgaccgcgacctcttccgcaccctcaccagcttctacggcgccgaaaaggcgcgtgagatccgctcctcgctcgatccgcaatgcctgtccggcttccgcaagaacgacagcttcgagatcgagcattccgatgtcatcctcaccgtcgacaacggcgacttcgtcttcctcgactgcgcttatgaggagctgctgcaatcgctcgggcccatcaacgacaccgcgagcgtgccctggaccatgttcaacgacaacgtctcgatgggctatttcgacgtctacgaccagtacatcctcaatctgctctacgatccccgcgtcaaggcgggcatgacggtcgcggaggtcaaggcggtgctgcccgcggtgctcaaggacgtgcgcgcctgggtgaagcgggtaaatgatctgaaggagtga

SEQ ID NO: 7940 - DNA, 1128 bp, BradyrhizobiumColbertium
atgcccgccgccagctatgtcgatccccgcaacggacggctctatcgcctcgaccagccgcgctggtgctcggacgagcgcacgccgctgctggtgacgccgggcgccggaatttcgcgcgaggacatcgagcgccgcacgcgctcattgtggcgctaccgggcggcgctgccggtcgagatcaagagcccggtctcgctcggcgaaggctgcacgccgctgctgcagcaggcctggggcgatctgcgcccgttgttcaagctcgaatggttcaacccgaccggcagcttcaaggatcgcggctcggcggtgatgctgtccttcctgcgccagatcggcatctcggccattctcgaggattcttccggcaatggcggctcgtcgatggctgggctgggcgccgccggcggcatgcgcgtgaagatcctcgcgcccgcctcgacctcgcccgccaagatcgcacaggtgcgtgcctacggggcggaggtgcaactcgtcgaaggaccgcgcgaggaatcggaagccgaggccatccgccagtccagccagacattttacgccagccacaattggcagcccttcttcctcgaaggcacgaagtcgctggcctatgaaatgtgggaagatctcggcttccgttcgcccgacaacgtcatcgtcccggtaggcgccggcagcagcctcttggggtgcgccttcggcttccgcgagctgctgaaggctggccagatcgcaaagctgccgcgcctgttcgcggcgcagccgctcaattgttcgccgatcgatgcgagcttcaaggccggtgtcgatacgcccgtcgcgcgcgaggtgcacaagaccatcgccgagggcacggcgatcaagaatccgctgcgcctgcgcgagatcatcggcgccttgcgcgagagcggcggtggcaccattgcgctcaccgaggacgagatcgtcgccgccttgcgccgtctcgcccgccagggcctgttcgccgagccgaccagcgccagcgcggcggccgcgctggacaagctcgctgccgcaggtgcgatcaagccgaccgagaccacggtggcggtcctcaccggcactgggctgaaggctgcaacgaccgtcgccgatctcgtgcaatag

SEQ ID NO: 7941 - DNA, 279 bp, BradyrhizobiumColbertium
gtgcaggatgcacgcttccagcaactgatgccggatacgatccactggctggggctcaagcggatcgaccgcttcctgtcgatgagcgacatgaaatacgacgcaatgacctcgcagggcatcgacatcgtcgagcgcgtgccgatcccgctggagctcattcccgccgacgcccatgtcgagatcgccgcgaaaaaggccgccggctattactcgaccgacatcgcgccggagaaggacgtgaatggcgtggtcgggcgttcgctggaaaagtactga

SEQ ID NO: 7942 - DNA, 1236 bp, BradyrhizobiumColbertium
atggacgctttggaaatgcaggcacgctcgctgctcaccgcacacgcggtgcgcgcgcgggcgggccagatgctcgaactcggcctcgccggcaggctcacacatttcgcgatcgatctcgaccgtatggacggcgtcgcggaggccgtgctcacggtcacccgaaaagcctatccgacgctggacgttccctttcatgcgcgctggcggcacttcgtgcttggcggcgccgatcgctgggcgcggctggccgacgctgcgtcctggccggatcgcgcggcgcgggcgcgctcagaattcgatcttgccatcgtcagcgtcctgctcgatgccggcgcgggcgctgcgtggcgctaccgcgatgcggtgacgggacaagccatcggccgctccgaggggctcgcgatcgcaagtctcgacatgttcgcaggcgggctcttctcgcatgatgccggctctccgttcagggccgatgcggatgtgctcgcaatgctgcaggccgcggcactcgcatccgcctttcaggcgagcgatgccaatccgctgctcgggctcgaaggacgtaccgatctgttgcggcgccttggaaagctggccgcggatcgtccagaggtcttcggtctgcgcgatacgccgcggccgggcgggctgttcgattacatcgccgcgcaggcctcaggcggggtcatcacggcgcccgccatcctgtcggcggtgctgaaccagctcggtccgatctggccctcgcggctcgaaatcgcaggcattccgctcggcgattgctggcggcatccagcgatcacggcggatgacgcgaccgcaggtctcgtgccgctgcacaagctgtcgcaatggctgagctactcgctgatcgagcccctccagcgcgccggcttcgatgtgaccgacatcgacggcttgaccggacttgccgaataccgcaatggcggcctgttcgtcgatcatgaggtgctgcgcctgcgcgatgccgccgacgcccagcgcgcgcatgcggtggattcgctgctcgtcgtggagtggcgcgcgctgacggtcgcgctgctggatcgtcttgccgaactcattcgcgccaagctcggccgcacgcccgagaggttgccgctcgccagcatcctcgaaggcggcacctgggccgccggccgcacgattgcctttttgcgacgccccgatggttcgccgccgctgagggtgatcagcgacggcacggtgttctag

SEQ ID NO: 7943 - DNA, 630 bp, BradyrhizobiumColbertium
atggaaggcgtcacgatcgtcgatcatcccctggtgcagcacaagctgacgctggtgcgggacaaatccatctcgaccaagtcgttccgcgagctcatcaaggagatcggcatgctcctgtgctacgaggtgacgcgcgacctgccactcaccgacaccgtgatcgagacgccgctggcgacgatgcactcggccaagatcgccggcaagaagctggtgttcgtgcccatgctgcgggccggcaccaccttcgtcgacggcatgatggacctggtgccgaccgcgcgggtggcgcatatcgggctctaccgcgagccgcacagctttgccgcggtggagtatttcttcaaatcgccgtccgatctcggcgagcggctggcgatcgtggtgacgccggtcgtggccaccgccaacaccgccgtcgccgccatcgaccgcctgaaggagcgcggcgccagggacatccgtctcgcctgcctgatcgccgcgccggaaggccttgaacggctgcgcggtttccacccggacgtgccgatctggacagctgcggtggacgaaggcctcgacgagaccgggttcatcctgccgggcctgggcgatgcgggcgaccgcgcctacggaacacggtag

SEQ ID NO: 7944 - DNA, 114 bp, BradyrhizobiumColbertium
atgctctccattgcacagggggagaacctcgcgcactgcaagctgttccacgagcgcactgcgacagaacgaattagccgcggctgcgccgggaagcgctaccgtgttccgtag

SEQ ID NO: 7945 - DNA, 213 bp, BradyrhizobiumColbertium
atgactcatcagaatgacgaccccaggactgaccgtgcgcgccgcaacagcccggtgggctgggcagtcggcgccatcttcgtgatggccgtggtcgccgtcgtcttcttctacaatgggcgcgagatcggtccgcagaccacgacctcgaacccgaatacggcgccgaacgtcaccaccggatcgaatccgcccgctgcgcctgcgaaatga

SEQ ID NO: 7946 - DNA, 492 bp, BradyrhizobiumColbertium
atgagctatggtcgcttcgccgcgatgatcgcgacttctacggtcatcatgttcggcctgatgtacctcaacacgtttgccctggatcacgtctggtacagccagacccgaacctggatggcgctgctgatgggcgccgtcatggccgcactgatgctgggcttcatgtggagcatgtacaggaaccggaccgcgaacatcgccattctcgcgggcagcgccgcggtgttcctgacgtcgctctggctggtccgcagccaacagacggtgaccgatgtcgcctatatggaggcaatgatcccgcatcactcgatcgcggtgctcacgagcgagcgtgcgcgcatcagggatccccgcgttcgcaagctggctgacgatatcatcgaggcgcaggtgcgggagatcgacgaaatgaaacgcctgatcgccgatctcaaagagaagccgccgtcggccgacgcaaaggacctgcctccgaggccgccgacatga

SEQ ID NO: 7947 - DNA, 1098 bp, BradyrhizobiumColbertium
ttgaccgaggctccggcgcagccggtcaggccgaccatcttcttcgacggcacctcgagccgcaggcgcgaggtgacgctgacgctcggtgatgcgctcgaaatcctcgaggatggcgcagcgcccgtccgttgggcctatgcggatatccgccgcgccgacagtccggccggggtcttgcgcctggcttcgacctccgcgccgtccttggcgcggctggagattagagatgccgcgctggccgcggatctgaccacgcgatgcttgcggctcgacgaacaccggacgacgcgcggcggtgtcgccaagatcgtgggctggtcggtggccgccgccgtctccatcgtgtgcgtcgtcctgttcggcgtgccgctcgccgccgaccggctcgccccgctggtgcccaagccggtcgaacggcgcatcggcgatgcggccgaggttcagatgaaggcgcttttcggccgcaaggtgtgcgaggatcccgcgggcaaggcggcgttcacgaagctcgtcaaccggttgcgcgatgctgccggcctcgacgacagcatgacggcgggcgtgctgccaacctcggtgccgaatgcgtttgcgctgcccggcggcaaggtgttcgtgctgaagggcctgctagacaaggccgagactcccgacgagctcgccggcatcctcgcccacgagctcggccatctcaagcatcacgacaacatgcgcggcctgatctacaacggcggcacctcgttcctgatcgggctcttgttcggcgacgtcaccggctcctccgccgtgatcttcacctcgcgcagcctggtcgaggcttcctattcgcgcgaagccgagaccggtgccgacacgtttgcgatcgagatcatgcatgcgctcggccgctcgcccaagcccgcagccgaattgatgttccgcatcacgggcaaggaaggcggctctggtctgacaaatatccttgccagccacccgctcaccgaggatcgcctcgcgcggatgaccaaggaagatcgtcccgccagcggcgcgccgctcttgaccgacaaggaatggcaggccctgaaggggatctgcggcagcggcaaggtgtga

SEQ ID NO: 7948 - DNA, 1155 bp, BradyrhizobiumColbertium
gtgaacgatatgcaatgggcccccgtcggttccgaacccctgcccccgccgctgccgccggcgcgggtcgatttcaccggcaaccgctccgagttccgcaaactggtcaccaagggtgccctgctcgagctcgtcaccttcggcttctaccggttctggctcgtcaccgacatccgccgacatctgtgggcgcacacagcgctcgacggcgattccgctgaatataccggtcgcgccagggagctcctggtcggcttcctggtggcgctcgcgatcctggtgccgatctatcttgcctatttccttgttggcatcgagttcgagcgctggcaggccttcgcctcggtgccgttgttcctagccttttacgctttcggccagttcgcgatctttcgcgcgcgacgctatcgcctgacgcgcacgatctggcgcggtgtccgcttctggatggacggctcgggctgggcctactccctccgcgccatgctgtggggcctgctggtgctcctgacgctcggcctggcattgccttggcgggatgccgcgctcgagcgctacaagatgcagcatacccattacggcaatctcaccggtgatttcgaaggcgacggctggacgttcttcaagcgcgcctggtggctgtggctgctgagcccgattgcactcgtcgtctttccgctcgcgccgttcttcttcgccgagttcaaggcgcggcaatggcgctggtggctcgacggcattcgcatcggcgacgtcagcctgtcctcgcgattgccgcacgatgcgttctacggcctgtactggaaggtggtggggtggtggacgctgctcacgatcgccttcatcgcttatattgcgggtggcgcctttctgctcgtcgcgctgagcggcgttccggccgaggaggtctttgggggcgacaatgctgccaagagcatcccgatggtggtgataatggtgcttggctattttgcgctcgcccttgccatcaacatcgtcatgcgcgtctatctccagcgcgatctctgggccaaggtgctggagacgatcgaggtgcacaacatcgcggccgccgcggatgtgcgtggcagcgcccagctcgcgggcgcgctcggcgagggctttgccgatggactggatgttgcagggttctaa

SEQ ID NO: 7949 - DNA, 1266 bp, BradyrhizobiumColbertium
atgcatgggaccatcgagagcgcggccaagcttgacgtgcttcgcgcgcgcgccacgtcactgccgctggagcagttcgatccgggcgatcctgaactgttcaggaccgatacgttctggccctatttcgatcgcctgcgccgggaagaccccgtgcactattgcaaggactcgatgttcgggccgtattggtcggtgacgcgctacaacgacatcatggagatcgagaccaaccatgcggtcttctcctcggcctccgcgctcggcggcatcaccatccgcgacatcgatccggacctgcgccgcgagagcttcatctcgatggatccgccgcgccacgcggcccagcgcaagaccgtggccccgatgttcaccccgacgcatctggacaatctcgcgatcaacatccgcaagcgctcggccgagtgcctggacaacctgccccgcggcgaggtgttcgactgggtcgatcgcgtctcgatcgagctgaccacgcagatgctggcggtactgttcgacttcccctgggaggaccgccgcaagctgacgcgctggtcggacgtcgccaccaccatacccgggcccggcggccttgtggccaccgaggacgagcggatggccgagctgacggaatgcgcggcttatttctcgcggctctggaaggagcgcgccgagcagccgccgaagagcgacctgttgtcgatgatggcgcatggcgccgcgacgcgcgacatggacgcgaagaacttcctcggcaatctgatcctcttgatcgtcggcggcaacgacaccacccgcaacaccatgtcggggtcgcttctcgccctgagccagcatccggagcaatatcgcaagctgcgcgacaacccggatctgctcgacagcttcgtgcccgaggtgatccgctggcagacgccgctggcgcatatgcggcgcactgcgctgtccgatttcgagttccgcggcaagcaaatcaagaagggtgacaaggtcgtgatgtggtacgtctcgggaaatcgcgacgaggaggtgatcgaaaggccctacgatttcatcatcgaccgcgctcgcccgcgcacgcacctctccttcggcttcggcatccaccgctgcgtgggcatgcgcctcgccgagctgcagctccgcatcgtctgggaggagatgctgcagcggttcgaccgcatcgaggtggtcggcgaaccgaagcggatctattccagcttcatcaagggatatgaatcgctcccggtgcggattgcggggtag

SEQ ID NO: 7950 - DNA, 921 bp, BradyrhizobiumColbertium
atggatttccggcagctcaggacgttcagttgcgtggcggagctcggcagcctctccaaggcgtcggacacgttgcgcgtggcgcagccggcgctgagccggcagatcaagcttctcgagcatgagctgcgcaccgagctgttcacccgcaacggccgcggcatggtgctgaccgaggccggccggctcctgctggcgcgcacctccggcatcgtgcggcagatcgatcagatccgcgacgacatccagtcggccaagggcccgccctcgggccaggtcgtgctgggccttgttccgacggtgagctgcgtgctctcggcgcgctttgcgcggcgctgcgtcgagaaatttccaggcatttcgctgcgtatcgtcgagagctacagcggccacctcgtcgagtggctgcaccgcggcgagatggatctcgccatcctctacggccgctcggccgatctgcatctcaatgtgcagagcctggggcgcgacaacatcgttgcggttggcccgcgcggctgtgggctggcgcgcaagagcagcgtcgacatcggctggctgttgcgccagcgcctggtgttgccctctcattcccacggcctccgcgcactgatcgagcacgcggccgcccagcgcaagatcaagctcaacgtccagctcgaggcggattcgttccgcgtgctgaccagcctggtcgaggagggcctcggcttcgcgctgctgccgccgtcgtcggttcatggcgaggtcgccgacgggcggctggagacgacggcagtgtcgaagccgatgtcgcgcgagctcattttcgcttctccgatcgaccggccggtctcgacggcctctctcgcgatcaccgcgctcctgcgcgaagaggtcgccgcctgccgcaaggaaggcgtgtgggacatcaaactgagttag

SEQ ID NO: 7951 - DNA, 1170 bp, BradyrhizobiumColbertium
atgagtcaagaacaccacaccgaagactacgccgacatccgcgacgccgtcgcaaagctgtgcgcgcagttccccggcgaatattggcgcaagctcgatcgcgagatggcctatccgaaggcgttcgtggatgcgttgactgaagccggctatctctcggtgttgatccccgaggaatttggcggcgcgggcctgaagctttccgcagctgcggcgatcctggaagagatccagcgcgcgggctgcaacggcggcggctgccacgcccagatgtacacgatgggcacggtgctgcggcacggcaatgccgagcagaaggcaaaatacttgccgaagatcgcgagcggcgaactgcggctgcaggccttcggcgtgaccgagccgaccagcggcaccgacacgtcctcgctgaagacattcgcgcgcaaggacggcaacgacagctacatcgtcaacggccaaaagatctggaccagccgcgccgagcattccgacctcatgatcctgctcgcgcggaccacgcccaaggagcaggtcaagaagcgcacggacggcctgtcggtgttcatcgtcgacatgcgtgaggccaagaacaatggcctcgagatccgcccgatccgcaccatgatgaaccacgccacgacggaagtgttctttacggacatgaaggtgccggcggagaatctgatcggcgaggaaggcaagggctttcgctacatcctctccggcatgaatgccgaacgcatccttatcgccgccgaatgcgtcggcgacgccaaatggttcatcgccaaggcgacgaactatgccaaggagcgcagcgttttcggccggccgattggacagaaccagggcattcagttcccgattgccaaggcctatgcttcgatgcgggcggccgagctgatggtgaaggaagccacgcgcaaatacgaggccgggctcgactgcggcgccgaggccaacatggccaagatgctggctgccgatgcctcctgggaagcggccaatgcctgcatccagacccatggcggctttggattcgccgaggaatacgacgtcgagcgcaaattccgcgagacgcggctctaccaggtagcgccgatctcgaccaacctcgtgctctccttcgtcgccgagcacgtgctcggcatgccgcgctcgtactga

SEQ ID NO: 7952 - DNA, 1104 bp, BradyrhizobiumColbertium
atgggagcacttgacgggatcagggtgatcgcggtcgagcaggcggtggcggcgccgttctgctcctcacgcctggccgatgccggcgcggaggtgatcaagatcgagcggcccgagggcgatttcgcccgcggctatgacgcggcggccaagggccagagcagctacttcgtgtggctcaaccgcggcaaacaatccgccgtggtcgatctcaccacgaaggaaggccgtgccgagctggagaagctgatctcaagcgcggacgtgctgatccagaacctcaagcccggctcgatggacaagctcggcttctcccgcgaacggttgctgaaggattatccaaagctgatctcgtgcaccatcaccggttatggcgatgagggcccctacgcgcaccgcaaggcctatgacctgctgatccaggccgagagcggcctcgcctcgatcaccggcaaccccgacggcgcctcgcgggtcggcatgtcgatcgtcgatgtggcgaccggcgccaccgcgcacgcggcgatcctggaggcgctgatcgcacgcgggcgcaccggcaagggcgccgacatccgcatctccatgttcgacgtaatggcggactggtgcaccgtgccgctgctcaactcggaagccggcaatccgcccaagcgcatgggcctgcgccatccctcgatcgcgccctacggcgtgttcacctccaaggacggcaaggacatcttgatatcgatccagagcgagcgcgagtggaagacgctctgcgcgaaggtgctggaccagccggatctgcctgccgatccgcgcgtcgccaacatggtcgagcgcgtgcgcaaccgcgatttcaccgacaagacggttgcggacgctttcgccaggatgacgcgcgacgagctgctgaagcggctgtcggacgccgacatcgcctttgccgaggtcaacaccatggaagacctcaccaagcatccgcatctgcgccgcatcgaggtcgatacgccgaacgggcgcgtcagctatcccgcgcccgcaccgatcatcgtcggcgagacgcgcagctatggcccggtacccgccatcggcgaaaatccaaagtccaagaagtaa

SEQ ID NO: 7953 - DNA, 852 bp, BradyrhizobiumColbertium
atgaccgagaagctcgacatcgatcatctcaggcaatggatcggccgcagcacggaggcgaccgatatcgtcaccgcgcagctcgtgaagggtctccgcgcgacgttgttccaggaggtcggcgagcccaaggcgggcgacgccgcgccgttcacggtgcattggtgcctggcgcaaccggtgtttccgatgtcgatgctcggtcctgacggccacccgacccgcggcggcttcctgccgccggtgccgctgccgcgccggatgtgggctggcggcgagatcgaattcctgcagccgctctgcgtcggcgatgaatcgacccggacctcgcgaatcgccgatgtgcaggtcaaatcaggctcgaccggcacgttgtgcttcgtctcggtcgagcacagcatctcctcgccgcgtggcaccgcgatccgcgaacggcaggacatcgtttaccgcgaaatgacgggtacgcaggcggctcccgcaaaggccccgcctccggcgccgaaggcgcagcaccgcgagacccatgtgtcggaccccgtgttgctgttccgctactcggcgctgacgttcaacggccaccgcatccattacgaccgcgactacgtcaccaaggtcgaaggctatccgggactgatcttccacgggccgctgcaggcggcgctgatcatcgagatggcggccaaacttcacggcggcaaggcgccgaagaagttcacctaccgcggactccagccgctgttcgagggcacggagttctccgtcaacgccaacgagatcgaggcgggcatggagctgtggacggccaacgcggaggggcagccgacgatgaagggcacggcggtgtggtga

SEQ ID NO: 7954 - DNA, 1623 bp, BradyrhizobiumColbertium
atggccaagaacggcaagagcggcagcaagtccgtcaccgtcaagcaggcgacgctcgacctgctgcgctccttccgcatcgacaaggtgttcggcaatcccggttcgaccgaactgccgttcctgagcgactggcctgatgacatcgactatgtgctggcgctgcaggaggccagcgcggtcggcatggccgacggatacgcgcaggcgacgcgcaatgccggcttcgtgaacctgcattcggcggccggcgtcggcaatgcgctcggcaacatctacaccgcgcaccgcaaccagacgccgctcgtgatcaccgcgggccagcaggcgcgctcgatcctgcctttgcaggcgttcctctatgccgagcgcgcctcggagtttccgcggccctatgtcaaatacagcgtcgaaccggcgcggcccgaggacgtgccggccgcgatcgcgcgggcctattacaccgcgatgcagccgccgtgcgggccgaccttcgtgtcgatcccggtcgacgactgggcgcatgcctgcgcaccggtcgaggtgcgcaaggtcagccgcgagatcgggcccgagccggaggcgatgcaggcgctggtgaaggcactgacgtcaagcaagcatcctgccctcgtcgtcggccccggcgtcgaccgcgcgggcgcggtcgatctgatggtgcgcgtggctgagaaggccaaggcgagcgtctgggtcagcccgttctcggcgcgctgctcgttccccgagcggcatccgcagtttgcgggcttcctgcacgcgtcccccgcgcagctgtccgatgcgctgcgcgagcacgatctcgtcgtcgtcatcggcgcgccggtgttcaccttccatgtcgagggccatgccgcgatcttcgatggcggcgcagccatcttccagatcaccgacgattccgacgccgcggcggtgacgcccgtcggcaccagcatcatcgcgacgatgaagccggcgctttcgatgctgctcgaccttttgccggagagcaagcgcgccatgccgaagggccgcgcgctgcctgcggcgccacaggccgccgatccgctgccggtggaattcctgctgcattcgctatcgcatgcgatgccggatggcgcttcactcgtcgaggaagtgccctcgcaccggccggcgatgcaaaaattcatgccgatgcccggccaggacagtttctacaccatggcaagcggcggcctcggctactccctgcccgccgcggtcggcatggcgctcggcaagccgaagcaacgcacggtgtgcctgatcggcgacggctcggcgatgtattcgatccaggcactgtggaccgcggcgcagcgcaagctgccgctgaccgtcgtcgtcatcaacaattccggctacggcgcgatgcgctccttcagccaggtgatgcaggtgcgcaacgtgcccgggctggaattaccgggaatcgacttcgtgcggctcgcggagggcgtggggtgccacgcggtgcgggtgaccaaggcggcggaactgggcgaagccctgaagcgcagcttggcgcatgagggcacgagccttgtcgaggtcgtcgtggattcggcggtgcctgtgctgtacgggcagaagcattga

SEQ ID NO: 7955 - DNA, 777 bp, BradyrhizobiumColbertium
atgagcgaagctttgccgaccgggatgcggatgagaggcaaggtctgcctgatcactggcggcggaagcggcatcggccgtgccaccgcgctgcggatggcatccgaaggcgccgaggcgatcctggtcgccggccggcgcgcggccgagatcgaggccaccgcgacttcgtgccgtgagctcggcacggacgcgatcgcgcttcagaccgacatcacgcgcgaggacgaggtcgcgcgactcgtcggcacagccatcgagcgctgcggtcggctcgacgtcgccttcaacaatgccggcttccaggagcgccgcgcgccgctggaagagcagggcaccgagatttacgataacgtgttcgacaccaatgtccgcgcgctgttcctgtgcctgcgtcaccagctgcccgcgatgctggcgcagggccgcggcagcatcgtcgtcaacgcctccgtcagcggcatgcgcaatcccaatcccggcttctcgctctactcggcctcgaaggccgccgcgatctcgctgacgcgctcggccgcgctggagaacgccccgcgcggcatccgcatcaacgccatcgcgccgggccgcgtcgtcaccgacatgatgctgcgcgccggtgtcggcgacatcgcgaccgtcagcgccggccttccgctgcggcggatggggagcccggaggaagttgcggaggccgtggtgtggctgtcgtcggatgcgtcgtcgtacgtcgtcgggcacgtgctggcggcggacgggggattcttggcgtcgtag

SEQ ID NO: 7956 - DNA, 456 bp, BradyrhizobiumColbertium
atggccgagctttccttgatcgacgacatccgtgccgcctcgcgcctgatggtgcgcgagctcggcttcatggatgcgacggtcgcggcgtcggattatccgccctcggcggtccacacgatcctggagatcggcatccgcggtccgatgacatcgggcgagctcggcgatttcctgcggctggagaaatccagcgtcagccgtctggtacgcaagctgatcgactgcggcgaattgcgggagacgccggatgagacggatgcccgcagcaagaagttgtcgctgacggcaaagggccgccgcacgctcgaggcgctgcatgcgttcggccgccagcaggtgcgcggcgcgctggcggcgctgacgccggccgagcagcgcacggtgcgcgagggcatgatgctctatgcgcgggcactgcgggcgagtcgggtggagagcgagtcggctgcttga

SEQ ID NO: 7957 - DNA, 795 bp, BradyrhizobiumColbertium
atgcaggtgaccggcaaggtcgtggtcgtcacgggtggcgcaaacgggatcggcaaggcgctgtgcgaggcctttcacaatgcgggcgccgccaaggtcgtcgtcgcggacttggacgccgccaatgcgagagccgtcgcggccatggtcgatggcgctgccttcaaatgcgacgtctcgcaggagaatgatatcgtccacgtcatcgaggagacggaacggcagttcggccccatcgacctgttctgctccaatgccggcatcggcggcggcttcgacccgatgtcggagaatgccggcggcgcctcggacgagccctggcagcgcagctgggcgatccacgtcatggcccatgtctacgcggcgcggcatctcatcccccgcatgagggcgcgcggcggcggctattttctcaacaccatctcggccgccggtctgctgtcccaggttggcagccccgcttattccaccaccaagcacgccgcggtcggctttgccgaaaatctcgcaatctcgcacaaggcccacaacatcaaggtctcgatcctgtgtccgcagggcgtcgacaccaacatgctgcgctcgatccccaagggaccgcaatccggcgacggcgacctgacgccggaacaggtggcgaaagacgtgctcgccggcctcgagcaggaaaccttcctgatcctgccgcacccgcaggtgctcggctacatgcgcaagaagaccgagaattatgaccgctggatcggcggcatggccaagatccaggccaagatgcgggaggagttcgggaagtga

SEQ ID NO: 7958 - DNA, 696 bp, BradyrhizobiumColbertium
atgaccgtcttccagctgaaacaattcgcatccagctccgtccacgccgccgcggacgtgatcggctggaactacgatcgcgccgaactcattgccgacggagtcatccatgcgatcggtgtcctcgccggcatcatcgccgcgaccgtgctggtcgtgctggcggcagtctatgccgatgcagccgacgtcgtcggcgtatcgatctacgttgccggcctgctctcgatgctggtgttttcggcgacctataatctctggccggtctcgcccgccaagtggctgctacggcgcttcgaccattccgcgatctatctgctgatcgctgcgacctatacccccttcatcctggaggtgaaggacagcgggttcgcgctggtgctgctcgcgggtgtctggtgtgtcgccatcctcggcatcgtgctgaagctgttctatcccggccggttcgatcgcgtctcggtcggcatctacctcgcgatgggctggagcggtgtcatgatctacggcccggtcgtcaaggcgctgccgtcgctggtgcttggcttcatcctggcgggcggcctgctctacagtttcggcgtgatcttccacgcctggcgccggctgcgtttccagaatgcaatctggcacggctttgtcttggccggcgcggcatgccattataccgcggtgctcgacctcgtgttgagctga

SEQ ID NO: 7959 - DNA, 1470 bp, BradyrhizobiumColbertium
atggcattcagtttccaggatatcgtcgaagaagcgcggctgtcggcgagggccttgatcgactatggcgagcacttcttcaacccgacggtgcggttaggcgttaccggcctgtcgcgggccggcaagaccgtgttcatcaccgccctgatcaacggtctcacgcggggcggccggtttccggtgttcgaggcctatgcctcgggccggatcgcgcgggtgcatctggcgccgcagcctgatgatgccgtgccgcgcttcgcctatgagagccatctgcacgcgctgatcgaggagcggcgctggccgagctcgacggtggatatcagcgagctcaggctcgtcatcgactaccagcgtccgaacggcgccgaccgcacgctgacgctggacatcgtcgattatcccggcgaatggctgctcgacctgccgttgctgcagaagagctacgaacaatggtcggcggagagtcttgcgctgtcgcgcgaggcaccgcgcgcgcatctcgcgaccgagtggcacgcccatctcgcgacgctcaagcctgaagcgcgcgaggatgaacacgcgacgctgaccgccgcaaagctcttcaccgattatctgcgcgcctgccgcgacgagcgatttgcgatgagcctgttgccgcccggccgtttcctgatgcccggcaatctcgcaggctcacccgcgctgacctttgcgccgctcgatttgcccgctggcggacaggcactggacggatcgctgtgggccatgatggtgcggcgcttcgaggcctacaaggacgtcgtggtgcggccgttcttccgcgaccatttcgcgcgcctcgatcgccagatcgtgctggccgatgccctcgccgccttcaattccgggcccgaggcgctgcacgatctcgaagctgcactcgccggcattctcgattgcttcaacatcggccgcagcaccttgctcaccagcctgttccgaccgcgcatcgaccgcatcctgttcgcggcaaccaaggcggaccacctccatcactcaagccatgaccggctcgaggccgtgctacgccgcgccgtctctcgcgccgttgcgcgcgcggaagataccggggcggagatcgacgtcgtcgcgctcgctgccgtccgcgccacccgcgaggcgcaggtggcgcatggccgcgacagactgccgtcgatcctgggaacgccggctgcgggcgagagcgcgggcggcgagttcttcgacggcaacaccgaggttgcgacgtttcccggcgatctgcccgtcgatcccgagccgctgttcaacggcacggacgcgttccgcggcctctcgacgcaggccgccggcaagagcgacttccgcttcctgcgcttccgcccgcccaagctcgcacgcgaaggcactagcgagccgacgctgccacacatccgcctcgaccgtgccttgcagttcctgatcggagacaagctcgcatga

SEQ ID NO: 7960 - DNA, 1029 bp, BradyrhizobiumColbertium
atgaatgatcgatcccagcagcggcggccggcgacattccggctcgacgatcccgccgtcgtcgtcgccgaagccgacgagacgggacggctcggtcgcggcacgatccagatcacgccggagcatgatccggcgatgctaccggtgccgatcgaggccgcgctgaccgcgcgacgccgttttccctggggaaccctgttctggtccggtctcgccgggctgacgctgcttggcgtggggctgggcgtggtccatctgatcgaggatttgtttgcgcgcagcgaaacgctcggcttcgtcggcctcgccttcgctttcgtcaccgcgcttgcacttgccgtcgtgatcggacgcgaggcatttgggctggcacggcttgcgacgatcgagaagttgcatcagcgcgcagcggccgtgctcgccagcgacgaccgcaaggagagccgagtcatcgtgcaggacctgctccagatcgcgcatcagaatccgcaactcgcgcgcgcccgcgccacgctggagagccacgccggcgagatcatcgatggcgccgacatgatccgccttgccgagcgcgagttgatgtcgccgctggatgccgaggcacggcggctggtgtcgtcggccgcgcagaaagtgtcgatcgtcactgcggtaagcccgcgcgccgcgatcgacgtgctgttcgtgttcgtcgccgcgctgcgcctgatccgccagctcgcctacctctatggcggccgccccggcgcgctcggcatgatccgcctgctccgccacgtcatcgcccatctcgccatcaccggcggcatggccgcgagcgacagcctggtgcagcagatgctcggccacggcatcgcggcaaagctgtcgcaacggctgggagaaggcgtgctcaacggactgctgacggcccggctgggcctcgccgcgatcgacgtcacgaggccgctgccgtttgcggcattgccggcgccgaagctgtcggatctggcgacggatctgctgcgcaagaaggacggggaggagtag

SEQ ID NO: 7961 - DNA, 1614 bp, BradyrhizobiumColbertium
gtgacgatcgcgcccgacatctctgagaagcccgacggcgccgaacgccggcttatccttgttgcgacgttcgtcatcgccgcgatgaccgtgctgcgcatcgtctacgcctccgcgatcgagctgcgcaccgacgaggcttattactggacctggtccaaggagacggcgctcagcttcctcgatcatccacccggcatcgcctggctcattcgcttcggcacagcaatcttcggcgacaccacgctcggcgtccgcttcggcggcatcgtcgcgatgctggtgacgcagcttctgctcgccgacatcgtccgccgcctcacgcatgatgcgcgcgcgatcatgttcgcggtgctgatgccggaagctgcgctctattatggcctgctgatggccaaggtcgcgcccgatgtcgcgatgatcccttttgcggtcgcgatgatgtggtcgctggtgcggctgacgcaaggcggcgacggccgctggtggctcgccgccgggctgtttgcgggcctggcgatgttgtcgaaattcaccgcgatcatgtttgcgccagcggtggccgcctttctgctggtgccggagtggcgctggcgttggctgcgcagcccttacccttatcttgccgtgctggtcgcgatagcggtgttctcgccggtgctgatctggaacgcgcagcatgactgggcctcgttccggttccagggcgtgcgcgccaccgccaattacggcatctcgccgcgcaccatcggcgattacatcggcctgcaattcggcctcgtcggtttcgtcatgctgccggtggtgctgacgggattggtcatgacggcatggcgcggctatcgcaagcgcgagcctgtcgccatcctgctctcgaccgcggtgctggtgccgtttctttatttcttcttcaagtcgctgacgcttcgtgttggcgacacctggccgatgttcatgtggccggtcggctttgccgcggcggccgtgaaccttgtgctgatgaggaaggagggatggtcggcccggatgctccactcgtcgctgttctgggtcaagaccgcaatcgtctcgggcatcgccttcgtcgtcatcgtgttcctctattatgtcgccgcgccctggaatctcctcggcaagatcgatccgatcggagcggaggccggctacgagcaggtcgctgcacgcgcgcaggccgcactcgacgaaatgggtgcccgctggatcgccaccacggactaccgcacctacgccatgatgcgctggctgttccgcggtcgcgtgccggtgatcgagctcaacgagcgcggccgtttccaggatttccgcgatcccggcatggacaagatcagaggcgaggcgggaatttacgtagggcgcgagccggatgatcgatcgtcggtgtgggaacatatcccggcgaagcgccagctgctcggcagggtcgaacgccgctggcgcggcctcgtgatggatacctatgtgatcgaaaagctgaccggctggaccccggagctgtccccgccgaaggactcgccgttgttccggtggaaggtattggcaggcaattcggcgcgagatctgcgcggctcttcgtccccctccaggggagcgtaa

SEQ ID NO: 7962 - DNA, 1731 bp, BradyrhizobiumColbertium
atggccaccgctgctgcacccatgtccgaactcgtccgcgccaccggcgcgcggcaggtgcggctcgtctgcggtgtcatcctgttcgcatacgtggtcagccacttcctcaaccatgcgctcggcaacatctccgtcgaagccatggaggccggggtctactatcatacgctcttttggcagttcctccccgtctcgatcatcttttacacggccgcactcagccatatggggctcggcatctatgcgctgtaccagcgtcgacagtttcgctggcgaacgatcgagccgctccagctggtcctggggttgagcatccccgctttggtcatggggcatgtgatcggggtgcggctcggctacacgctgtacgatcatcagaagctctatccgcaggagctttatctgttcttcgttgccgcgcccggccggctctggcagatgaccatcctgcttctcatcgcttgggtgcacggctgcatcggaatctatttctggctccgcctcaagccgttcttcccacgcgcagcgccctatcttcttgcgactgccgtgctgatcccgacgctgtcgctgctcggcatctatcagggtggccgcagcatcgagatcgagagcgacgatcgagactggcgcgcgcaaaatctcggccgccgtcaggtcggcaccgtcgcggaaaacaacgcgctcgaccgtatcgccggtggtctcaacgcaggctatttcggactgctgggactcgtgctggtggcgcgcggcgtgcgcgcctggcgcgaacggcgtggcggcatgatcgcgttgtcctacggcaacggcaagacagtgcgcgttcccaagggtctctccgtgctggaagcaagcctgcgccacaacgtgccgcatgccagcgtctgcggcggacgcgcccgctgctcgacctgccgcatccgcgtcatcggcgatcacgacgccctgcctacaccgtcacagcgcgaagccttcgtgctcacccgcgtcggcacggcagatccctcgatcaggctggcctgccagttgcggccgacgtccgacctctccttcttccagctcttcgcacctcacactcattcgaccgacgaggcctcgacatcagccagtatcggccaggagcgctatctcgtcagcctgttcgtggacatgcgcggctcgacccagcttgcggaaaagcgactgccgttcgacaccgtcttcatcgtcaaccgcttcctcggcgcggtgtcgcaggccgtgatcgaaaacggcggccagccgaaccagttcgtcggcgacggcatgctggcgctgttcgggctctcggccgatccgcaaacggcctgccgacaggcgctgaaggcggcgtccggcattggagtgcatatcgacgagctcaacgacctcctgagccacgatctgcgagagccgatccgcttcggcatcggcattcacggcggcgaggtcatcatcggagacatcgggtatcgcgatcacgtcgtcttcacggcgctcggcgatgccgtcaacgtcgccgcccgcctgcaggagatgaccaaggggctggcttgtgaggccgttgtctcggaagaagtgcgcgacaacgccggccttgccgaagacgccctgccacagcaggaggtcgcgatccgcggccgcgacgagccgcttgccgtgcgcgtggtggcgaatgcgagacagttggccgcgctggtcgatcgaagcgagcgcgttgctgcttaa

SEQ ID NO: 7963 - DNA, 117 bp, BradyrhizobiumColbertium
atggtcgtcaccacgatccctgcgcgcatctgtcgcaaccatttgcgtgaagtcaattcgcgctttcgcagcgagcccatgccgctgcgttacagcaggccggtgttacgcctgtag

SEQ ID NO: 7964 - DNA, 1200 bp, BradyrhizobiumColbertium
atgttcgatcgacgcgacctgctcaagggagcaggtcttgccgcgatggcggccgcactgaattccaccaaagcgttggcgctcgacaccgtcacgctgcccttcgccaatggcgagcggccgctggtgaagtatccgcagaagcggccgatgatcggcctcaccagccgtccgccgcagctcgagacgccgtttgcggtgtttaacgagggtccgatcacgcccaacaatgcgttcttcgtgcgctatcacctctccgacctgccctacaatctcgatcccgacaagttcacgctcgaggtcaagggcaaggtcaacaagccgctgaaattgtcgctgaaagacatcaggaagatgaaggcgaccgagatcgtcgccgtcaatcagtgctccggcaacagccgcggcttcgtcgagccgagggtcgctggtgggcaactcgccaacggcgccatgggctgtgcgcgctggcgcggcgtaccgttgaaggcggtgctggaaatggcgggcgtgcaggccggtgccaggcaggtcaccttcaacggcatggacggcccggtcagcgacaagacgcccgacttcgtcaaggcgctcgatctcgatcatgccaccgacggcgaggtgatgctggcctatggcatgaacggcgaggatctgccgttcctcaacggcttcccgctgcgcctgatcgtgcccggctattacggcacctactgggtcaagcacctcaacgagatcacggtcatcgacaacatctatgacggcttctggatgaagtcggcctatcgcattcccgatacgcccaacaacgcgatcgagcccggcaccgcgccgaaggcgacgattccgatcaaccgtttcaccatccgctccttcatcaccagcgtccccgacggtgccaagctgaaggccggccgcacgaccctgcgcggcatcgccttcgacggcggcaagggcatcaaggaggtccaggtctccaccgacggcggcaagacctgggccggcgccaagctcggcaaggatctcggcaaatacgcgttccgcgaatggaagctgccggtgaagctcacggccggcagccacgagttcaaggtccgcgccaccggcactggcggcgagacccagccggatatgccccgatggaacccggcgggttatctgcgcaacgtcgtcgaaaccgtccgcgtcaccgtagcctga

SEQ ID NO: 7965 - DNA, 315 bp, BradyrhizobiumColbertium
atgatcatgcagcccgccgttctcctgaccattcccctcgcgcttgccctcgcggtgggggcggcacttgcagcgccgatcaattacaagaccccggacgaggtcgcggccttcaagcccggccccagtctcgaagtcgtgcagggcaattgcagcgcctgccattcgtccgactacatcgccacgcaaccgccgatgaaggacaagaaggccttctggcaggccgaggtgaccaagatgatcaagatctacggcgcgccgatcgacgatgccgacgtcggcaagatcgtcgactacctggccacgacctattga

SEQ ID NO: 7966 - DNA, 201 bp, BradyrhizobiumColbertium
atggctaaaggtacggtcaagtggttcaacccgacgaagggttatggatttatccagcctgcgtcgggtggcaaggatgtgttcgtgcatatctcggcagtgcagaaggccggtttgtccacgcttaacgaagggcagacggtggaatacgaagaaatcgcaaaccggggcaagacctccgcagagaacctcaaagtataa

SEQ ID NO: 7967 - DNA, 423 bp, BradyrhizobiumColbertium
ttgcaggaggatggacgcattgccaatgtcgagctggccgagcgcatcgggctgtcgccgacgtcgatcggcgagcggctgaagcgtttgcagcgcgagggctttgtcgaaggctatggcgcccggctgaacccgcaccggcttggcctcggtcttctggtgttcgtcgaggtgctgctggacaagaccacgcccgacaatttcgagcggtttgcccgcgccgtgaagctcgcacctgaagttctggagtgtcacatggttgccggcggcttcgactatcttgtgaaggcgcggctggcggacatggccgcctatcgacgctttcttggcgagaccctgctgtcgatgccgggcgtgcgcgagacgcggacttatgcggtgatggaggagatcaagcgcgacgcaccgttgccggtgggctga

SEQ ID NO: 7968 - DNA, 3000 bp, BradyrhizobiumColbertium
atgccgaatacccccccgcccttctccgctccctacgcccccgatgacgccgagatcgcagcaaagctcctgccggcctcgcagccagcccccgcgctggaggcgcggatcgaccgcaccgcgacgcggctgatcgaggcgatccgcaagcgcgacgatcggctcggcggggtggaggacatgctgcgggagttcgcgctctcgaccaaggaggggcttgcgctgatggtgctggcggaagcgctgctgcgcgtgccggatgcgcagaccgcggaccagttcatcgaggacaagctcggcgagggcgatttcatccatcacgaaaccaagtccacggcgttcctggtcaacgcctcggcctgggcgctcggactgtcggcgcgggtgatccagccgggcgagacgcccgacggcaccatcggccgcctcgtcaagcggctcggtgcgcccgcggtgcgcaccgccacgcggcaggcgatgcggctgatggggaatcatttcgtgctcggcgagaccatcgagcaggcgctggagcggggccgtccgcgctccgggcagaagccgcgctattccttcgacatgctcggcgaaggcgcgcgcacggctgccgacgcaacgcgctatttcgatgcctacgccagcgcgatcgacacgatcggcaaggccgccggcaaccatcccctgcccgaccggcccggcatctcggtcaagctctcggcgttgcatccgcgcttcgaggcgatcagccggaaccgcgtgatgatcgagctggtgcccctgctgctggacctcgcccggcgggccaaggcgcacgacctcaacttcaccgtcgatgccgaggaggccgaccggctggagctgtcgctcgacgtgatcgcggtgacgctcgccgatccgtcgctcgccggctgggacggatttggcctcgccatccaagcctatcagaaacgcgccggtgcggtgatcgactatgtcgacgaactcgcgcgcgcgcatgaccgcaagctgatggtgcggctcgtcaagggcgcctattgggacaccgagatcaagcgcgcgcaggagcgcgggctcgacggctatcccgtgttcacgcgcaaggcgatgaccgatctcaactacgtcgcctgcgcgacgaagctgctggccctgcggccgcgcatcttcccgcaattcgccacccacaacgcgctgacggttgcgaccgtgctcgagctcgccgcgggcagcggcggcttcgagttccaacgcctgcacggcatgggcgaagccctctacgagcaactggcaacagattatcctgacatcgcctaccgcacctatgcgcctgtcggtagccatcgcgatctgctcgcttatctcgtgcggcgtctcctggaaaatggcgcgaactcgtcctttgtggcccaggccgccgattatcgcgtcccggtctcggtgctgctgcagcgcccggcggacgcgatcggccggccgcaggcggcggcccatcccaagattccgctgcccggcgatctcttcgcgccggagcggcgcaattcgcgcggtgtcgaatttggtgagcgcgccgccctcgatcggctgctggccgatgtgaaggccgaggtcgccgacctcgagcccgtcgtggacgcaacgccggaccaggccaatgcggcggtggccgcagcgcgcgccggctttgccgcctggagccgaaccccggcagccgcgcgtgcggcggcgctgcagcgggccgcgcatctgctggaaagccgtggcggtcatttcatcgcgttgctccaatgcgagggcggcaagacgctcgacgatgcgctctcggaactgcgcgaaaccgtggacttctgccgctattatgctgcgcagggccgcaagctgttcggcggcgaaatcgccatgccgggtccgaccggcgagagcaacacgctcgcaatgcgtgggcgcggcgtgttcgttgcaatctcgccgtggaattttccgctggcgattttcctggggcaggtcagcgcggcgctgatggccggcaacagcgtcgtggcaaaaccggccgagcagacgccgcgcatcgcgcgcgaggcggtggcgctgctgcacgaggccggcattcccgagagcgcactgcatctcgtccccggtgacggccgcatcggaggcctgctcaccgcacaccccgaggtcgccggtgtcgtcttcaccggctcgaccgaggtggcccgcagcatcaaccggacgctcgccgcgaagaacgggccgatcgttccgctaatcgccgagaccggcggcatcaacgccatgatcgcggatgcgaccgcactgccggagcaggtcgccgacgacgtcgtgacgtccgccttccgctccgccggccagcgctgctcggcgctgcggctcctgttcgtgcaggaggatgtcgccgatcgcatgatcgagatgatcgcgggcgccgcgcgcgagttgaagatcggcgatccctccgacgtcgcaacccatgtcggcccggtgatcgacgaggacgccaagcagcgcctcgatgcgcacatcgcgcggatgaagcgcgaggcgcggctgcacttcgcaggcgaggcaccggacggctgcttcgtcgcgccgcacattttcgagctggaggacgccggccaactcaccgaggaggtcttcggcccgatcctgcatgtcgtccgctatcgcgccgagaacctcgaccgtgccttgcaggcggtcgagcgcaccggctacgggctcacgctcggcatccattcgcgcatcgacgacacgatcgagggcatcatcgaccgcgtccaggtcggcaacgtctacgtcaaccgcaacatgatcggcgcggtggtcggcgtgcagccgttcgggggccacggcctgtccggaaccggcccgaaggcgggaggcccgcattacctcgcacgctttgccaccgagcagaccgtaaccatcaataccgcggcggccggcggcaatgccgcgttgcttgcgggagaggagtga

SEQ ID NO: 7969 - DNA, 1206 bp, BradyrhizobiumColbertium
atggacaagggcatttttgcggggctgaaggttctggactgcgcgagcttcatagcagcgccggcggccgcgaccgtgctgtcggatttcggtgccgacgtcatcaagatcgagccgcccggcgccggcgacccctaccgcaacctgccgaacctgcccggctatcccaccggcgagcataatttcgcctggctgctggaggcccgcaacaagaagagcatcgcgctcgatctatccaagcctgaagcgcaggccgtgctgtacaagctggtggaagaggccgacgtcttcatcaccaacatgccgccgcccgtgcgcgccaagctcggcatcacctatgaccacctcgcccatctcaacgaccggctgatctacgcctccttcaccggctatggcgaaaagggcgaggaagccaacaagcccggcttcgacagcaacgcctattgggcgcgctccggcctgatggacctcgtccgtgccgacaccgacacgacgccggcgcgctcggtcgccggcatgggcgaccacccctgcgccatggcgttctacggcgccatcgtcaccgcgctctatcagcgcgagaagaccggcaagggctcgcatgtcgcctccaatctgatggcgaacggggtgtgggcggcgagcgtgctggcgcaggcaaagctgtgcggcgccaagttcggcgagcggcgcccgcgcgaacgcgcgctgaacgcggtcgccaatcactaccagtgcaaggacggccgctggctgatcctgtcgctgctgaacgaggagaagcagtttccgacgctggccaaatgcctggggcgcgaggatctgatcaatgatccccgtttcgtcaccaaggccgaccgtcacgcccgctcggtcgagctgatcaagatcctggacgaaaccttcgctacgaaagatctcgccgaatggcgaaaaatcctcgatggtagtggcctggtgttcggggtcgtcgccattctggacgacatccccaacgacaagcagatgctcgacaacgaggtgctggtgccgttcgagaatgacaccatgctcaccatcaacagcccgatctggatcgatggcgcgaagaaggtgcagccgcgcaagccgcccgctgtcggcgagcacagtgacgagatcttgcgcgctgcgggatacgacgaggcggcgatcaggcagcttcggtcgaacggagcggtgggatag

SEQ ID NO: 7970 - DNA, 597 bp, BradyrhizobiumColbertium
atgagcagggattcaaagacggagtcgggcgagcgcgagcggtccctgatgcaggcgacgctgcgcatcatcgggcgacatgggctggacggcgtgacccaccgggcggtcgcggccgaagccggggtttcactcggtgcggtcacgcatcatttcggaccccgtgatgcgctggtagaggcggcgctgcagttcgctctggcgcgcgaggtcggccggctgcgtgcgttggccctcggccttcaggataaggcattcgaggtcgaggcctggatcgatgcgctggtcgacttctatgtccgggaactcggcacagaagccgagacgcatatcgcctgctatgaggctttcctggctgccgcgaggcaaccctgctatcggcccgtggtcgccgagtggtttgacacgtggcggcagagtgcggagcttgcgctgaaggccgcgaagtcgccaaacccacgccctcacgccgagttgttcgtctcggcgttgatcggcttgctgtttcgtcaactcgccacgcccagggccggcttccgccgtgaggcgaaggcggagctgttggagctggtgggcggcttgatcgcgcggaagtaa

SEQ ID NO: 7971 - DNA, 648 bp, BradyrhizobiumColbertium
atgcccagctaccgcctccactatttccccgagtcaggcaacagctacaagctggcgctgatgctgacgatgtgcggcgagacattcgagccgctgtggactgattttgccggcggcgtcacgcgtagtgcggaatggcgcaaagccgtgaacgagatgggcgagatcccggtgctcgaggtcgacggggtgaagatgacccagaccgcgcctcttctgctcaagctcgccgaacagtacgggcgtttcggcgccgagacggagaacgagaagttcgagctgctgcggtggctgttctgggacaaccacaagctcaccggctacatggcgacctaccgcttcatgcgcgcgttcaccgagaagaacgacccgcaggtgctgaaacatttccgccggcggctggaggatttcctcggcattctcgacggccatctccagcacaatgctttcgcgatcggaccacggccgacaatcgccgacatctcgatgatggcctatctgcactatccgagcgacgagcacggcttcgatttcgcggtgagccatccggccatccatgcctggctcggccgcatggcggcgctgtccggctggaagccggcctatgagctgctgccgggaaagcggatgacgaattacgcgaggtga

SEQ ID NO: 7972 - DNA, 162 bp, BradyrhizobiumColbertium
atgaataccagcgaggccaataaggagcgtaatcgcaagatcgcgcgcaatgaggaagccaagcaggtcatcggcagcgcgcgcgtcagcatctgggcgatcgcgatggccgccatcgtatgcgggatcttgtttgcgctgggctggctcgcattgcgctag

SEQ ID NO: 7973 - DNA, 1551 bp, BradyrhizobiumColbertium
atgagccggatattgcgaattctcgttgctgctgccgcattgctgggcggtggcgtttcgcttccagcggccgagaccccgcaattgacgcgcggcaccgcgatcaccgaccccgctctgctgcgtcagctggatcagggcgacacgttgacgatctcgcgcctcttgtcgccggaacggaattcggacgtcccgctctcgaccgagctgatgttcgcgtcgctgccgcagctgagagacattccgcccgcgatcgatgcggaatttgaccgctacatcgcctggtacaaggcgacttatccgggcgagaccatcggtgccggcgaaggctttgacgtccagctgttcgatcgggccagcctgaaatcccgcgacacgcggtttgtgctggccggcatcgtcaatcgcatggaccgcgcttttgtctcggaggagtcctgcggcgagatccggctgatctatcgtctggcgcgtttcgacagcagcccggaaggcggcaagaccacaacgcgcctgccgatgacgttgaacctcgcgatgaaggcacgcgatccgcgccagaccgatgcgagcggcaaaccaatcacctgcgccgagctcgcgcggcgctggctcgacaatggcgactggcaaggcttgatcggcagtcgcgccccgccttacgacgccatgctcgaccgcatcgagaccaacatccagatctcggtcgcgccgaaatcggccctgcacgatttccgctccgactatctgctcaaggtgttcaagtacgacggcgccacgaagacgttctgggaatcgacgctggagaaccagatcgaccgcgaccgcattcttgccgacgatgcgctccggcgtgagttcaaggattggctgctcgcgcccgatcatctgcgcgaattcgatcgcggcacggtgatgatcccggagaagttcctggccaagggcgcggtggtgccgacccccgccggcctcgatgcctcagcgttgcagccggagttcggaatgatgcagggggaaggaaaccgggaagctaaaggcgatcccgtctttaccgacaatgacgtggtcagcgcactgaagcaggtggcggcacgcggcgtcgacatgcagaacgtccgctcggtcgcaggcttccagcgccgcctcaatgacgtcacctgcgccggctgccaccagacccgcggcatcggcggcttccatttcccgggcgtcgactggctcgccgacaagccgtcgcattccacgatcgtcccggcctcgccgcatttcttcggcgaccagctccgccggcgcgacatcctggccgcctttgccgcagggaaacgccctgatttttcacgcggattcgccagtaggccacagacccgcggcagccgcgagcttgccggcacccaatatcaggacggctggggcgcgcattgttccctccaaaatcagggaccgggagcgccggacaagagttttacgtcgtggagctgtgctaaaggtctcacctgtcaggctgcctcggcctccggccgtatcggcatgtgcttcatcaagacgcgctaa

SEQ ID NO: 7974 - DNA, 999 bp, BradyrhizobiumColbertium
gtgagcgaaccactgtccgagcaggatgcccgggaaaccggtgttgtcgacgccgcagcaccgcaggccgtcgcggctgcccccggcattgacgccccctcgatcgcccctgatcacgaggcgccgccgaagccggatccggtcaaggcggaagccccgaaggtggagccgcctcggctcgaggtgtcgaagttcgacgcaaaggcggaggcccgaaccgagtccaaggctgaagccaagcccgagccgaagctaggcaagctcatcgtcatgtcgccttccgaccgcggctgggagcgcgaggagttcgccccgcatgtgaaggcggacgagccgcgcgaaaccggcagcaaacgccgcctgtcggcgatggccgcggtggtggctattgccgccggcgtcggcgcgatcagcggtgcgctcgcgaccgcgggcatgatgcgtttcgccgcgccggcccaggctccggtgcaggtcgccgacacaagcgcgttggatgcgtccgtggcgcggatcgatgccgacctcgccgcactgaaggccaatgtcgagcacggctcgaagaccggcctcagccagttcaaccggaccaacgatcgcctcgacaagctcgagaaggcgcaggccgagccgctggccaagatcgcaaaattgtcggagaccctggacaagctccgcgccgcgcctgcccaggccgcggccgccgcgcccgccagggagaccaccggctcgatcgcgccgacccaggttgcgaccgccgcagctgctccggctccggtagctgccgcgcccaagaccgaggtcggccggttgccgacgatcgaaggctggaggctgcgcaacgccggcaatggcggtgcgctgatcgaaggtcgcgacggcctctacgaggtctatcccggcgaccccatccccggcgtcggccgcgtcgatgcgatccgccgtcaggacggccgctgggtggtcgttaccagcaggggcctgatcgtcggtcgctga

SEQ ID NO: 7975 - DNA, 498 bp, BradyrhizobiumColbertium
atgagcatcaagcgtatcgcccggcatctcgtgcagcatcattggcgagccaagcagatctttccgccagccgtgctcgatcgcatcgagcaggcgatcaagcgcggcgaagccacccattccggccaggtccgcttcgtggtcgaaggcgcgctcgacggcgcgccactgttccgcaaccagccggcgcgcgagcgcgcgctcgacgtgttcgcgcacttgcgcatctgggataccgcgcacaacaacggcgtgctgatctatctcctgctcgccgatcgagacgtcgagatcgtcgccgatcgcggcatcgactcgaaggtcggcgccgcaggctgggagaccatctgccgcgcgatggaggccgagttcagatcgggccgtttcgagcgcggcgtgatcgccggcatcgaggcggtgtcgcgcgagctggcgcggcatttccctccgcacggtccgcatgcgaacgaactgccggatgcgccggtggtgatgtga

SEQ ID NO: 7976 - DNA, 888 bp, BradyrhizobiumColbertium
gtggccgcctcgtgcgtgctcgcccttgtgctgctcctcaagctcggcctcgctttctcggcctccgccgacgttgccgtcccccaactcaccggccgcgtcgtcgatcagaccggcacgctttccagcgccgacatcgccgcgctgtcgcaaaagctgcaagatttcgagaatcgcaagggcacccagatcgccgtgctgatcgtgccgaccacccagccggagacgatcgagcagttctcgatccgcgtggccgaggcctggaagatcgggcgcaagaaggtcgacgacggcgcgatccttgtggtcgccaagaacgaccggcgcttgcgcatcgaggtcggctatggcctcgaaggcgcgctgaccgacgtgacctcacggcgcatcatcgacgaagatatcacgcccaagttcaggagcggcgacttcgccgcgggcatcggcgcaggcgtcgaccgcatgatgcgggtgatagatggcgagccgctgccgtctccttcgcgcagcgcgaacttcgcccacaatctggaggacctcgcgccggtatttgccgcggcgctgtttgcctccatcggcgtcggcggattctttcgtgcggtcttgggacggctgctcggatcgttggtgaccgggggcatcatcgcggcggtgacctggctgattctcggctccgccgcgctcgccatggccgtgggcgtcctcggcttcatcatcggatttgtcgcggatctgttttcggcgataccgccgggcaccggccgctcgcgcggcggcgggtggtcgagcggctcctcgggcggctggagcagcggatcgtcgggcagcggcggcttcagcggcggcggaggcagcttcggcggcggcggcgcctcggggaactggtag

SEQ ID NO: 7977 - DNA, 609 bp, BradyrhizobiumColbertium
atgcgcaagatcctgaccgtgctggcggcgctggcctcgctgagcctgaccaattgcggctacaatgcgatccagagcgaggacgagcagatcaaggccgcctggtccgaggtcgtgaaccaatatcagcgccgcgccgatctcgtgcccaacctcgtcaattcggtgaagggttttgcccagcaggagaaggacgtgctgctcggcgtcaccaatgcccgggccaaggtcggcagcatccaggcgacgcccgaggtgttgaacgatcccgccgcgttccagaaattccaggccgcccagggcgaactctccagcgccctgtcgcggctgctggtcgtcaccgagaactatccgcagctgaagtcggatgccttgttcaaggacctgatgtcgcagctcgaggggaccgagaaccggatcactgtggcgcgtaaccgctacatcaagtcggtgcaggactataatgtcaccatccgctcgttcccgagcaacctcaccgcaatgatgttcggctacaaggagaagccgaacttttcggtcgagaacgagaaggcaatctcgaccgcgccgaaggtggacttcaaccctgcaccagcgccgtcgaagtaa

SEQ ID NO: 7978 - DNA, 855 bp, BradyrhizobiumColbertium
atgagttcgttcgagaccatcctcgtggaacggccggacccggcgatcgcacggatcgtgatgaaccggcccgaggcgcgcaatgcgcagaacctgcaaatgacctacgacctcaacgccgccttcgacgcggcggtgcaggacgatgcggtcaaggtgatcatcctcgccggagccggtccgcacttttcgtcgggccatgacctgcgtgcgggcggcaagaacgaagcaggcaccgattttccgccggtaggaaattggggcggctttgccgaacccaatgcgcacggccgctttgcgcgcgagcaggagatatatctccagatcacgcgacgctggcgcaaccttgccaagccgaccattgccgaggtccacggcaagtgcatcgccggcggactgatgctggcctgggcctgcgacctcatcgtcgccagcgacgatgcgcagttctgcgatcccgtcgtcaccatgggcgtctgcggcgtcgaatggttcgtgcatccctgggaactcggtccgcgcaaggccaaggagttcctgttcacggccgacagctggagcgcgcaggaggctcaccagctcggcatggtcaatcaagtcgtgccgcgcgccgagctgtcctcgcgcgtgctcgagctggcgcgccggatcgcgacaaaaccgtccttcgcactgaagctgaccaaggaagccgtcaaccgctcggtcgacgtgatgggccagcccgccgcgatcgatcaggcctttgctctgcatcagctctgccacgcccacaatctccaggaattcggcatgatcgtcgatccttccggcctgcatccctccgtgcgcaagccgccggcggccgcggagtag

SEQ ID NO: 7979 - DNA, 1149 bp, BradyrhizobiumColbertium
atggacctcaatctcagcgacgaacaaaagctgctgcgagaaagcgcggaacgcttcgtggccgagagctacgatgccgctcaccgccgcaagatggcgaacgacccgctcggcttcagtcctgccgtctggaagcagttcgccgagctcggctggctggcgctgccgttgcccgaagagtttggcgggctcggcggcggcgcggtcgatgtcggcatcctgatggaagccttcggccgcggcctggtatccgagccctatgtcgcaacggtcgtgctgggagccgcgctgatcgacagatgcggcaccacggagcagaagcaggcgagcctgcccaaggttgcggacgggtcgctgaagctcgcccttgcccattccgagcgcgcagcccggttcgatcttgccaaggtcgcgaccagtgccaacaagacggcgcagggctggcgcctcgccggcagcaagatcgccgtgcttgatggccacgccgccgacgagatcatcgtctccgcactgatgcacgaccatcacggcccttcggggcgaatcggcctgttcgccgtcccggcaacggcgccgggccttgcgatctccgactatgcgcgcctcggcggggggcgcgcctgcaatatcgagctgtctgacgtcaatctgccccaggacgccttgcttggagacggcagcgactcgctgcccgcgatcgaatgggcggtcgaccgcgctatggccgcgctcggcgcggaggccgtcggcatcatgcagacgttgctcgacacgacgctcgaatacaccaagatccgcaagcagttcggccggacgctgtccgccaaccaggtgatccgccaccgtctggccgacatggcgatgcaggtcgatgaatcccgctcgatggcgctgcgggctgcgttgaaggccgacagcccgccggtcgagcgcgcgcgggccgcctcgggggcgaaggcgaagatcggcagatgcgcgcgcttcgtcggcgaacagtcgatccagctgcatggcggcatgggcgtcaccgaggaactcgaggtcggcgcctatttcaagcggctcgtcgccttcgacacgctgttcggcggcagcgcgcatcattatggccgccacgccgagctgagccgccgggccgcctcggcctga

SEQ ID NO: 7980 - DNA, 1197 bp, BradyrhizobiumColbertium
atggatctgtcgttcaatgccgaagagcgtgccttccaggacgaggtgcgcaacttcattgcgaagaacctcaccgacgagatgaagcgcgcgaccgcgctgacgccgtcggtgttctccgatcccgacgtcggcatggcctggcagcgcgcgctgcacaagcagggctggggcgcaccgggctggccggtggaacatggcggacccgactggacgccggcgcagcgctggatcttcgagacggaatgtgcacgcgcgggcgtacccaacgtcaacgtgatgggcgtgaagatggtcgggcccgtcatcatcggcttcggcagccctgaacagaagaacttctacctgccgcggattctctccggcgaggactattggtgccagggctattccgagccgggctccggctccgatctctcttcgttgaagacgcgcgcggtgcgcgatggtgatgattacatcatcaacggcaccaagatctggaccacgcacgcccatcacgccaaccgcatgttcgcgctggtgcgcaccagcgacgggccgcggcagcaggatggcatcagcttcatcctgatcgacatgaagacgccgggcatcaccacccgcccgatcctgaccatcggcggcgaccacgaggtcaatcaggtgttcttcgacgacgtgcgcgtgccggtcgccaaccgcgtcggcgaggaaggcaaggggtggacctacggcaaatatttgctcgagttcgaacgcggcgccggcatcgcctcggccaagctgcgcgaggggctgagggcgatcgcggatctcgccgagtcggacctcacgggccgggccatcgatagccccgatatcgcaacacgtatctccgaggtcgaagtcgatatcgacgcgctggagatgaccgagcttagggtgctttcggcgctccagaccggacaaaatccgggcgcggtgtcgtcgatcctgaaattgcgcaacagcgagatccgccaggccgtgacgcggctgggcgccgacgtgattggccatgacgccctcgccgtcgaaccgatgcgcccgctctacaagctcaatcacgagccggcgacgcctgaggagatgctgaccgtgatgccggaatatctcaacggccgcgcctacacgatcttcggcggcacgtcggagatccagcgcgacatcattgcgaagatgatgctggggatttag

SEQ ID NO: 7981 - DNA, 2325 bp, BradyrhizobiumColbertium
atgaacattcttcccggcaatttgcgtttcggggcggggcagcccgtcaagcgtttggaagatcagcggctgctcaccgggaaggggcaattcatcgacgacaagccggaggacggcgcgctgtggttgcacgtgctgcgctcgccgcacgcccacgcgaagatcgtctcgatcgacaccagcgccgcggcatcgatgcccggcgtcaccgcaatctacaccggggccgacctggtcaaggacgacatcggtaccatcccgacgctgaacatcttcaagcgcccggacggcaagccgatgacggtgccgccgcgccggctgctcgcccatgaggtcgtgcgctatgctggcgaggctgtggccgccgtggtggcgtcgtcgcgcgtggaggcgcagagcgcggccgaggcgatcgtggtcgagtacgacgtgcagcccgcggtggtcgatcccgtcgaagcggtcaagcccggcgcgcccgtggtgtggccggaggcgcccgacaacatcgtcggcgccatgagctatggcgatgccgccaaggtcgacgaggccttcgccaaggcggcgcacacggtcgagctcgacatcgtcagccagcgcctcgttccctccgcgatggagccgcgctcgacgatcgcagagatcgacaagaagaccggacgcctcctcctgcacgtgcagtcccagacgccggcctcgacccgggacgtgctggcggaagccgtgctcaaacgcccgaaggacagcgtacgcgtgctcgtcggagacatcggcggcggcttcggccagaagaccaacctttatcccgaggacggcatcgtcgcctatgccgcgaccaagctgaacaagaagatccgctggcgcggcgaccgcaccgacgagttcgtcggcggcacccacggccgcgatctcacctcgaccgcgtccttcgcgctggatgaaaaaggcaaggtgctggcctatcgcgtcaagtcgatcggatgcaccggcgcctattcttccggagcggccaacatcatcccgctcgtgctcgggcccttcgtgcagaccggcgtctacgatctgccgctggtgcatttcgaggtcaagtcggtgatgacccataccgcgccggtcggtgcctatcgcggcgccggccgccccgaggcggtgttcatcgtggagcgcctgttcgacgctgccgcgcgaaagatcggcatggacccgcgtgcgatccgcaaggccaattacatcaagccggcacagctgccctacaccaatgccgccggccaggtctacgattccggcgccttcgcccacatgctcgaccgcgccgtgaagctcgccgactgggacggctttgccgcgcgcaagaaggcggcgaaaaagaagggcctgctctacggtcgcggcctgacttcctatatcgagtggaccggcggccgcgcgcacaccgagaaggtcagcctgcacgcgacctcgcaagggcgcgtcgtgctgcattccggcaccatggcaatggggcagggcctgcagaccacctacacccagatgatctccgatacactcggcatccccatggataagatcgacgtcgtccagggcgacaccgatttggccatgggcttcggcagcgtcggctcgcgttcgctgttcgtcggcggcacggccgtcgcggtctcctcgaacgacttggtccagaaggcgcgcgagaaggcggcgaacgtgctcgagacctcggtcgaggacatcgaatatcagggcggcatgctcaccgtggtcggcaccgaccgccgcatcagcctgttcgatctcgccgagaaggaaagcggcgcaaagctcagtgtcgattccgaaggcgaggtcgacggtccgagctggccgaacggcacgcacatctgcgaggtcgagatcgatcccgagaccggtgtctcccgcgtcgttcgctacaccaccgtcgacgatgtcggcgtcgccgtgaatccgatgctggtcaccggccagatccacggcggcgtggcgcagggcatcggccaggccctgtatgagggcgtgtcttacgatgccgacggccagctcctcaccgcgagctaccaggattactgtatcccgcgcgccgacgacatcccgccgatcgtggtgacgctggatgattccgcaccatgccgcaccaatccactcggcgccaaaggctgcggcgaatccggcgccatcggcggcccgccttgcgtcaccaacggtgtgatggacgcgctcgccgagctcggcatcacccagctcaacacgcccctgacgccgcagaaggtctggcaggcgatccgggacgcaaaggcggcgggttaa

SEQ ID NO: 7982 - DNA, 1107 bp, BradyrhizobiumColbertium
atgaatcgtcgctatgcgatcgccgcggcagtcttcgccgccctgctgctcgccgtcacgagctcgaagatcctgcatgtcccgatctcgtatgtcccatgggcggctccaaccgcgcgcgccgtcgagcaacgcgggccgctatccgatggcgaaaaggctaccatcgatatcttcgagcgcgtgtcgccctcggtcgtccaggttgcggtccggtcggcggccaatcctctcatgggcgaggaagggcagagcggcgccggcgcttccggcacggggttcgtctgggaccgggacgggcacctcgtgacgaacaaccacgtcgtggccaatagcaacgagattgcggtgcgcttcgcgtcgggagaggtggccgaggtcgacctggtcggcagggcgcccaactacgatctcgcggtgctgcggatccgcagcgtccgccagcttccggctccgattgcactcggcagttcgaacgacctgaaggttgggcagtcggccttcgcgatcggcaatccctttgggctggatcagtcgatgaccagcggcatcatcagtgcgctcaagcgcaggcttccgacccatggcggtcgggagatcgccaacgtcatccagaccgatgctgcgatcaatccgggcaattctggcgggccattgctggattctgccggccggctgatcggcgtgaccaccgcgatcatctcgccctccggttcgaacgccggcatcgggttcgcggtcccggttgacgtcgtgaaccggattgtccccgaactgatccgcaacggccgggtgccgactcccggcatcggcatcgtggccgccggcgaggatgtttcgacccggcttggtgtcgagggggtgatcgtggtgcggacggcccccggaagtcctgccgagcgggcgggcattcgcggcgtcaacttttcgactggagcggtcggagacgtcattaccgccgtcgaaggcaagccggtgcggcgcctcgccgatctgaccgatgcgctggagcaggccggggccgggaagaccgtccgcctcaccctcaagcggggctccgacacccgcgacgtgaatgtgggcatcatcgacatcgagcgttcctga

SEQ ID NO: 7983 - DNA, 876 bp, BradyrhizobiumColbertium
atgtccgattttcgcggtgtcttcccctacctcgtttcgcctctcgatgccgacggcacggtgcgtaccgaagtcctcggcaggctctgcgacgatctggtcggcgccggcgttcacggcctgacgccgcttggttcgaccggcgagtttgcctatctcaatgccgcgcaacgcaccgcaatcgtgcagaccacgatcgaggccgcgcagggccgcgtgccggtgatcgcaggcgttgcctccacctcgacggcagacgcggtcgcgcaagccaaggcctaccagacgctcggtgccgacggcatcctggcgatcctggaagcgtattttccgcttcccgatgcccaggtcgagtcctatttccgcgccattgcggatgccgtggacatccccgtcgtcatctacaccaacccgcaattccagcgctccgacctgacgctcgacgtcatcgcgcggctcgccgagcatccgcgcatcggctatatcaaggacgcctcgaccaacaccggccggctgctctcgatcatgaaccgctgcggcgattctttgcgcgtgttttcggcctcggctcatattcccgccgcagtgatgctgatcggcggccgcggctggatggcggggcccgcctgcatcatcccgcgtcagagcgttgcgctctacgagctctgcaaggctggccgctgggacgaggccatggcattgcagcgcggtctgtggcgcatcaacgaagccttcgcgcgtttcaatctggccgcctgcatcaaggccggcctttcggtccagggctacgacgtcggcgatcccgtcccgccgcaggtaccgctgacggccgacgcacgcaagatcgtggaggcggcgttgcgcgagctggcctag

SEQ ID NO: 7984 - DNA, 1161 bp, BradyrhizobiumColbertium
atgccgctgacaatgctgtccaggttcctgcatcccgatccgcgcatcaggcgcgagctcgtcgacctcctgtacacgtcgttgccgcaggtgttcgcgatcggcgtgacttcggtgacgggggccgtggcgttggccgtcatgagcggggacaccggctacgccgtgatctcgatcttcatattcatcacggccacagcccgcatcatctcgctgttccgctacaagtcgcgcgccgcgcaattcaccgatgccgacgtgatccgctgggagcggctttacggtgcgggcgcatctgccttcggcctctcgctcggcatgctgtcgtatcgggcgctccagctcgacgacgcgcccggcgcctggatcgcgttcgggctctcgatgtccttctgcgtcggtatggtctcgcgagctgcgatccgtccctggatcatcctcaccaccgcggcggtcctgctgacgccgaccatcttggccggcctgctccgccccgagctcgcctacaagctcggcgcagtcatgctggtgttcttctggctgaccttgcgggaggcctcaaagcatctcagcgccgccttcgtcgaacgactggaggccaagcatcgtttggcccggcaggcgacccacgacttcctcaccggcctgccgaaccgcgccgcgtttctccaggcgttggcggagacacagggcgacttcgccatcatcgccatcgatctcgacggcttcaaaccggtcaacgaccgtcatggtcatcacgccggcgacgatctgctccgccaggtggcggagcgattgtcgtcgtgcgtcggagaaggcggcctcgcggcacggttcggcggagacgagttcatgatgctgaagcccgttgccgcaggggctggcggccgcgacgaagcgctcgcactggcgcgccaagccatccgcgacctatcgatgccgttcctgctgacagatattccagtccgcatcggcgcaagcgccggcatcctggtcagcaccgggacggcggccgcaggcaaaacctctcagcttctggagcaggtcgatcgtgccctttacacggccaagcgcgccggcggcggacgatggaattggtccgaagaggaaaccgcctcaaacgtgcggcaagctgaaacggccgcacttgtcacgtcctga

SEQ ID NO: 7985 - DNA, 966 bp, BradyrhizobiumColbertium
atgaccgtcgacctcacccgccgcaccctgttgcagcttgccggcgcgacctcgcttgcgatggcagccgcagctgcggcgcgcgccgagggtgatcggcaaggcggcgggccgacctatgccagtcgcacgccgatgcggatcggcatggtgacgctacgggtgaagaatctcgacgaggtcacagactactaccgcgacgtgatcggtctcagcgtcatggagcgctcgggcaccgccgcgaagctcggaacggctggcatcacgctgctggtgctggaggcccgccccagtgctgcaatcgagcctcgcaatgccgccggcctctaccacactgccttcctgatgccgacacgcaaggacctcgctcgctggctggtcgcggccgccacgcaccgcgtgccgctgacgggctttgccgatcatctcgtctccgaatccgtctatctcgacgaccccgaaggcaacggcatcgagatctatgccgatcgcgatccctccctatggcagtggagcgagggcagcgtgaagatggcgacggacgagctcgacatccccgatttgctgtcgctgaccaacacgcgggtgcccgactatgccaaggcgccggacggtctgcgcatcggccacatgcatctgcgcgtcggcgatctcgccgaggcccagagattctatcatggtgtgatcgggctcgatccgacccgcagccgcgccggcgccgcattcctgtcgtcgggccgctatcaccatcatctgggcctgaacgtctggcagagccagggtgccggccggcgcgaccatcaggcgacgggcctcgcctggttctcgctggtgatggcaaggcaggaactgctcgccgcgcaggaagagcggttgcgccagagtggtgcgcaggtcacggggctcgcggatggctttgaggcggtcgatccctggggcacgcgggtccggttgctcaggacgtga

SEQ ID NO: 7986 - DNA, 867 bp, BradyrhizobiumColbertium
atgaccgacccaaccgctctgacttcgctgtcgtccgcgctcgcggatattgtggggcgcaccgcgccgtccgtcgtctccgtgcactcccatcgctcctacgccaccggcttcgcctggaagcccggcctcatcgttacggccgacgagacgctggccgacgagggggaggtggggatcggccttgccgacggcggccgagcgaccgccacgattgccggccgcgaccatacgaccgatatcgcgctgctgcgcgtcgatgccgccaccgcgccggtcaggctgacggcgactgtgccgccgctgggcgccctgtcggttgtggtggccaccaatcgcgacacgccgagcgccgcgctcgggatggtctcggcgtctggcaagagctggcgctccctgcgcggcggcgacatcgatgcgcggatcgagctcgacgtgcgcctgcgcgagagccagcagggcgggctcgcgctcgatgcaacgggtgaagcctacggcatggtcgtgctcgggccgcgtcgggttctggtgatcccgaccgcgacgattgagcgggtcgcaacgcagctcgaaacccggggtcgcatcgcgcggggttatctcggccttgggctccagccggtgcggctcgaggacggcatcggcgccatggtgatgaatgtcgacacggccggaccttcggctgcggccggcatccgccagggtgacgtgatcgtggcggtcaacgaccagaagctctccggcgtgcgcgcgctagccggcacgcttggaccttcaagcgtcggcgccgtggtcgatgtcgccgcgctccgcggcggcgagccggtcggcttcaaggtcacggtcggcgagaggccggaggcgtga

SEQ ID NO: 7987 - DNA, 372 bp, BradyrhizobiumColbertium
gtgagcgaggacacgtcgcctgagatcgtgctgtccctggagatagacgatccagctttggccgaccgcctggccgccctgctcggtaatatcgccggacttcgcctcgccgcgccgggcgagcaggcggccgcggcgatcgtcggccgcgaccctcgcatcatgcctgaggacatcgcgctgacgcagcgcgagctcgacgtgctggcgctgatggcggaaggagcctccaacaagatgatcgcccgccagctcggcatctccgtgcacacggtgaaattccacgtcgcctcgctgctcgacaagctcgatgccaccggccgcaccgatgcggtcacgcacgcggcgcgccgcggcgtgatcgagctgtaa

SEQ ID NO: 7988 - DNA, 1509 bp, BradyrhizobiumColbertium
gtgcgctgggcctggcgtaccaagatccaggtgcatctcaacatcgacctgcgcatgcggttgtggaattcggccgagaccgaggccgtgcgggtgttcgcctccaatctgcgcgacctgctgctggcggcgccggcgggcacccgtgtcaccatggggctcgatcccggctaccgcaccggtgtgaaggtcgcggtcgtggacgccaccggcaaggtggtcgacaccactgcgatctatccgcacgagccgcagaggcagtggaacgagtcgctggcgacgctcggcaggctcgcgctgaagcatcgcgtcgagctgatcgcgatcggcaatggcacggcttcgcgcgagaccgataagctcgcgaccgagctggtcaagggtctccccgagctgaagatgaacaagatcgtggtgtcggaagccggtgcgtcggtctattcggcctcggccttcgcctcggaagagctgccgggactcgatgtcaccctgcgcggcgcggtgtcgatcgcgcgtcgtctccaggatccgctcgccgagctcgtcaagatcgagcccaaggcgatcggcgtcggccagtaccagcacgatctcggccaggccaagctcgcaaaatcgctcgacgccgtagtcgaagactgcgtgaacgcggtcggcgtcgacgtcaacaccgcctcggcaccgctgctggcgcgcgtgtcgggcgtcggcgcgggtcttgcgcagagcatcgtggcgcaccgcgacgccaacggtccgttcaagtcgcgcaaggcgctcaaggacgtgccgcggctcgggccaaaggcgttcgagcagtgcgcgggctttttgcgtatcctgggtggcgaggatccgctcgacgcctccggggtgcatccggaggcctatccggtggtgcgccggatactggcggcgaccaagagcgacatcaaggctctgatcggcaacagcgagatcgtgcgcaccttgaagccgaaggatttcgtcgacgagacttttggtctgccgaccgtcaccgacatcctgcgcgagctcgaaaagcccggtcgcgacccgcgcccggcgttcaaggccgcggtgttcaaggaaggcgtcgaggagatcaaggatctcaagaagggcatgatcctcgagggtaccgtgaccaacgtcgccgcgttcggcgccttcgtcgacatcggcgtgcatcaggacggcctcgtgcacatctcggcgatgtccaagaactacatcaaggatccgcgcgaggtggtgaagcccggcgacatcgtcagggtgaaggtgctggacttcgaggtcgcgcgcaagcgcatctcgctcacgctgcggctcgacgacgaggtcggtgccaagaaggaggcacccggcatgcagcgcgacaacaattcacgcaatcccgcccgcatgacctcctcgccaccccgcaagcaggagccggccggcggcggcgcccttgcagaggcgctgcgccgcgcggccgagaagagcggcggcaagcgggcgtga

SEQ ID NO: 7989 - DNA, 789 bp, BradyrhizobiumColbertium
ttgcagatcgaggatttcctccttctcgccgcggaacatggcgaggatgcgatgcgagggcagcttggtcagcggctcggagaaatcgaaatagtcggcgaacttctcgccttcggtcttcttgccgtcgcgtaccttggaggccatacgcgcgttggtccacatctcctcgcgaagggcgccgatcaggtcggcgtcctcgtcgaagcgctcgaccagaatggcgcgggcgccgtccagcgcggcggccgcatccgcaacgcccttctcggcattgacgaagccttcggccacgaccttgggatcgttcgcgggttccgccagcagctgattggcgagcggctcgaggccggcctccttggcgatctccgccttggtgcggcgcttcggcttgaacggcagataaatatcttcgaggcgggccttgctgtcggcggccatgatcgtcgcttcgagggcggcatcgagcttgccctgctcgcgaaccgattcgaggatggccttgcggcggtcctcaagctcgcgcaggtacaccaagcgctcctccagggtacgcaattgcgcgtcgtcgagcgcaccggtggcttccttgcggtacctggcgatgaagggaacggtggcaccgccgtcgagcagcgtcactgccgcctcgacctgttcggcgcgaaccccaagctcctgcgcaattttctggttgatgctggccacgcgagattccctctatcaaagcacgctgcgcagggcgaaccaccggccgcgggacgccgcttatggaccaaccggggttga

SEQ ID NO: 7990 - DNA, 276 bp, BradyrhizobiumColbertium
gtgcagcgaaacctttttcgcaagggaccgcgtgaatcaaccgagccggcgcggggggcagggttgcgcgggacggaggggtcgcagggcggaaggatcaagggcgtcgcatccattagtcgtgggatcgccgcaactgagggctgcctggcctttgaccttgtccgcaggccgcgtggagaccgcctcctgttccccactgcgagcgaagcaaagcgatccagagtctcttcgaggagggatcctggattgcttcgtcgcaagcgctggcaatga

SEQ ID NO: 7991 - DNA, 1479 bp, BradyrhizobiumColbertium
atggacgtcatgactttgccgatgagctggaatgaatgggcgcagcacgatggcatcgcgctggcggggcgcgtccgcaagggcgagctgacggcgaaggaattggcgcggcaggccgctgccggggtcgccaaggtcgaccccgcgctgtcgggcgtggtcgagctgttcgaggacgtgatcgcggacccggccaaggatggcgccaacctcgccggccccttcgccggcctgcccttcctgatgaaggatctggggccgaccatgaagggacggctgcaggaaatgggctcgctgctgatgcgcggcaaccgtgcgagcgcagacacgttcctgaccggcaaattccgccaagccgggctcaatctcatcggacggacgacgacgccggaattcggcgtgtgcagctccgcggacaatcccgccgtttacgtcacacgcaatccctggaacaccgactacaccacgtgcggctcgtccgccggcagcgcggcgatggtcgccgccggtgtggtgccgatcgcgcatgccaccgatgggggcggctcgattcgtattcccgccggcgtcaacggcaatatcggactgaaggtctcgcgcggcgtgttctcgctcgcgccgcacatgtcggatctcaccggcctcgtctcgatccagggctgccagtcgcgctcggtgcgcgacacggcggccttcctcgaccatgcccgcgggccggcccccggcgagttcatgcccttctggaacacggcgcagccctattccgagatgatcaagcgcgacccggccaagcttcgcatcgcgctctcgcacacctggggcgattacaccgcgacgcccgagatcgccgccgagttggagaaggcgggccgcttcctcgaaggcctcggccatcacgtcgactacgccctgcccgagatcgacttccgcgccgcgttcgcggcgcagaccacctgctacatttcgaacttcgcagtcgtgatctccaacatgctcgctgcgcgcgggttggaaaaaccgccggaagatctgatcgaacccatgaatattcgcatctgggaagctggccggcacaccagcttcgcggagcgggcgaagatgcaggccgtgttcaacacgacctcgcgcggcttcggcaccttcttcgagcagtgggacgtgattctgacgccgatcaccgcgctgccgacgccgaaggtcggtaccagggaatacctcaccatctccgacaatcccgacgtgctcgactggttcggcaatctctggcgcaatttcgcctttacgccgctcgccaatctctgcggcataccggcgatctcgatgccgatggcatctcagaaccacggcctgccgctcggcatccaggccattgccaagcaggccaatgacggcctcttgctgcaactcgccgcccagatcgaacgcgcgctcgacggcaagtggaacggcggcaagaagccgaaggtgcatgtagcctga

SEQ ID NO: 7992 - DNA, 318 bp, BradyrhizobiumColbertium
atggccgaccccgaaacgccctcgaccgcccaggggcccgtcactatttcgacgtccagcgccgagcgcgcgccgatcatctatttcgacggcgcctcctgctttggccatcacaacggcgcgatccagatcgagctcgccgccaacctcctgatgcctgtcggcgccgccgtcagggtggacgtggttcagacagcgcacttgcgctgtagcgtggccgcggcgctggcgctgcgtgaagcgctcgacaaggcgctggcgatgtacaagcaaggtcagcagcagccgaacgaggaaattccagcggtgaagaactaa

SEQ ID NO: 7993 - DNA, 909 bp, BradyrhizobiumColbertium
atgtccacttcaccgaccaccctcccattcgaggaactcgccgaggcgatcaagggccgccgctccgattatggccatatcagcgggcttcagctcgaccgcttcgcgcccgccgaagcctggtccagcctgccctaccgtcccgttttcgtcggcgataccgagaccggcgttattcatggcggtgtcgtcactgcgatgctggacgagagctgcggcatggcggtgcagctcgcgctggacggcacacgcgccatcgccacgctcgacctgcggatcgattaccagaagccggcgacgccgggcctcgacatcaaggcgcactcggtctgctatcgcaccacgcgctcgatcgccttcgtgcgctcaaccgcctatcaggaatccgaggacgatccggtcgcaaccgcgaccgcctgcttcatgatcggcgccaaccgcaccaacatgcttgccgaccgccgcatggatgcacgcaacattccgacgctggaggcgccggagaatccggatggcccgttcgcgaacagcccgttcgcgcgcgcgcttggcatccgcgtcaacgacgacggcacgctgaccatgccgttctcgccgcagattgtcggcaacccgatcctgccggcgatccacggcggcatgaccggcgccttcctggagaccaccgccatcatcggcgtcgcgcgcgagctcggcgctgcggcgccgccgaagccgatcggcctcaccatcaactatctgcgctccggccgcgccctcgacacgttcgccaatgtctcgattgtgaaacagggccggcgcatcgtcgcattcgaggcgcgggcctggcaggacgatgcggagaagcccatcgccaccgctttcggtcatttcatgctgcgcccgacgccggggagtgacgaggaatga

SEQ ID NO: 7994 - DNA, 393 bp, BradyrhizobiumColbertium
ttgcggcatccgctcgacatcgtcgccatgttcgccgcgctctggctgctggcctcgatggtgctcgacgcgctgacgccgaaggagctgacggcgatcacgattgccgtcgcgatcggtcccgccatcatcatcactgcagtgttctaccatctgcgctctccgcgcgcggattttgcggtgatgtttgcggcactctggctgatctccgacatcgccatcgctttcgcctcgccgaaggcgctgccgcatttcctgatcgcgctcggcttcttgccggcgctactgattggggccgtgctgcattggcggaccttcacctctccccggcgtggagaggtcggattgcgcagcaatcccggtgaggggccgcagccctctgcgagaccgtga

SEQ ID NO: 7995 - DNA, 1737 bp, BradyrhizobiumColbertium
atggcgatcaacaacgtggccgatctgttcgtggcaacgctcgaacaggccggcgtcaagcgcatctacggcatcgttggagacagcctgaatgcgctgaccgaagcgctgcgccgacgcggcaccatcgagtgggtccatgtccggcacgaggaggtcgcggcgttcgccgcggccggcgaagccgaaatgacgggtagtcttgcggtttgcgccggctcttgcggccctggcaatctgcatctgatcaacggcctgttcgacgcgcatcgcagccgcgttccggtgctggcgattgccgcgcagatcccctcggccgagataggcggcggctatttccaggagacgcatccgcagaaccttttccgcgaatgcagccactattgcgagctggtgtcggatccgagccagctgccttatgtgctggagaatgccattcgcgccgcggtcggcctgcgcggcgtcgccgtcgtcgccatgcccggcgacgtcgcgttccgcagtcccccgaaacgcgcgctgtcgacgacgcgcggcctgacgctggctgccccaaaggtggtgccgcaggcggatgagctgaaggccctcgcggatctcctcaacggcgccgggcgcatcaccctgttttgcggccgcggctgcgccggtgcgcatgcgccgctgatgcagctcgccgaggccctgaagagcccgatcgtgcatgcgctcggcggcaaggagcatgtcgagtacgataacccttacgacgtcggcatgaccggcttcatcggcttctcctcgggctatgccgcgatgcatgcctgcgacgcgctggtgatgctcggcaccgattttccctacaagcagttttttccgactgactgccaggtcgcgcagatcgacatccgcccggaaaacctcggccgccgctgcaagatcgatctcggcctcgtcggcgatgtcaagctcaccatcgaggcgctgctgccgctgctcgagacaaagacgcaacgcaagcatctggacgacgccatcgcgcactacaagagagcacgcgagggcctcgactcgctcgccaagggcacgccgggaagtaagccgattcatccgcaatacctcgccaaggtgatcagcgatcatgcatcggacgatgccgtgttcaccgccgatgtcggcacgccgacggtgtgggccgcgcgctatctcgacatgaacggtcgccgccggctgatcgggtccttcgtgcacggctcgatggccaatgctatgccgcaggcgatcggcgcgcaggccacccagcctggccgtcaggtgatctcgctgtcgggcgacggcggcttcaccatgctgatgggcgatctgatcacactgacgcagatgaagctgccggtgaaggtggtcgtcttcaataatggcgtgctcggcttcgtcgcgctggagatgaaggcggccggcttcgtcgataccaatgtcgacctggagaatcccgatttcgccgcgatggcccgtgcgatggggatcttcgcgaagcgcgtcgaggaccccggcgacctacccggcgcggtcaagcagatgctggcgcatgacgggccggcgctgctcgacgtcgtcaccgccaagcaggagctgtcgatgccgccgaccatcacggccgagcaggtcaaggggttcagcctctgggttctgcgtgcggtgatgaacggtcgcggcgacgaggtgctcgatcttgcgaaaacgaacttgctgtcgcgctga

SEQ ID NO: 7996 - DNA, 645 bp, BradyrhizobiumColbertium
atgagcgttgcctttccgccgatgaagcgaccgctggtcgcgatcttgcgcggcgtcaagcccgaggagaccgaggccatcgtcgaggtgctgatcgatgccggcatgaccgcgatcgagattcccctgaactcgcccgatccgttccggtccatcgccatcgcggtgaagcgggcgccggccggcgtgttgatcggcgccggcacggtgctgaccgtcgccgacgtcgatcgtctccatgacgttggcggcaggctgatggtctccccgaatgtggataccggggtattggcgcaggcgcatcggcacggcatggtgacgatgcccggggtcttctcgccgaccgaggcgctgctcgccgcgcgctcgggggcatcgagtctgaagttctttccggccagcgtgctcggcgcccccggcatcgccgcgatcgccgccgtgctgccgccgggcgtgatgattgccgcggtcggcggcgtctccgaccagaattttgcggagtacgtcaagggcggtgtaaccgccttcgggctcggctccagcctctacaagcccggcatgacggcggccgatgtcgccgcgcgcgcgaaagcgacgattacggcttacgatcgggcaactgtgaaagaaatgaaggcgcattga

SEQ ID NO: 7997 - DNA, 915 bp, BradyrhizobiumColbertium
atgatcgaacccgcttatgtcgcggtggattggggcaccagcagcttccggctctggctggtcgaccgcactggcgacgtcctggccgagcgccgcagcggcgaaggcatgctggccgcggcgaaggccggcttcccggcggtgctgcgatcgcatcttgcggctgtcgaggcgccggatcatttgccggtgctcgtctgcggcatggccggggcgcgcaccggatgggtcgaggccggctatgtcgatacgccggcgccgctctctgccgttctgaaacaggccgtgcgcgtgccgagcgaggtgcgagacgtccggatcctgccgggaatcgcgcagcgcgacgccggcgcgccggacgtcatgcgcggcgaggagacgcaattgctcggcgcgctcggcgtcgatgccgcaggcgaggcgctggtctgcatgcccggcacgcattcgaaatgggtttgcgtgaagaacggcattgtcgaacggtttgccacgttcatgaccggcgagctcttcagcgcgatctcgcgcgagacgatcctgtcgctcgccgtcgccggcgcagacgacgccgaggatgtcgcgagcttcaaggcggccgtgaaagcagcgtacgaggcgccggccttcgcggccaatctcctgttcggcgcacggtcgcgacagcttctgttcggtggcgcgccggccgcggcgcgcgagacgatgtcgggcacgttgatcggtatcgaggtggccgcagggctctccggatctgtgccgcaagcgggcgtcaagctgatcgcctccggccggcttgcgatgctgtaccggctggccttcgatacactgtcggttgcagtgcagccggtcgatgcggacgaggccgtccgccacggcctctcgatggcggccgccgcgatctggacgaagtag

SEQ ID NO: 7998 - DNA, 1098 bp, BradyrhizobiumColbertium
atggagatcggctatttcacgatgccttcgcatccgccggagtgcgggctgaaggaggggcatgactgggacctgcaggtcctgcgctggctcgacgagctcggctaccaagaggcctggatcggtgagcaccacaccgcgccttgggaaccaaatcccaccccggatctcttgatcgcgcaagccctgctgcagaccaaacgtctgcgcatcggtcccggtggtttcctgctgccctatcaccatccggccgagctcgccaaccgcgtcgcgatgctggaccatctttccgagggccggctcaatttcggcgtcgcggcctcgggcctgccaagcgactgggcgatgttcaacgtcgacggcatgagcggacagaaccgcgacatgacgcgcgaggcgctggagatcatcctgaagctgtggacagagccggcgcccttcacccacaagggcaagttctggacggtgaccaagccggacacgatgttcgacttcctcaagccccacatcaagccgctgcaggcgccgcatccgccgatcggcgtcgccggtctctccaagaactcggacacgctgaagctcgcaggcgaacgcggcttcattccgatgagcctcaacctcaacccggcctatgtctccagccattgggattcggtcgagatcggtgccgcaaagacagggcggaagccgaaccggcaggactggcgactggtgcgtgaggtgttcgtggccgacaccgacgaagaggcctggaagctctcgaccggcgacatgatgggccggatgatgagcgagtacttcctgccgctccttggtcatttcggcttcaaggactatctcaaacacgcgcccgacgtgcccgatagcgatgtgacggtcgaatattgcgccaagcggaactggatcgtcggctcaccctcgacggtcgccgaaaagattgagaagatctacgacgaggtcggcggcttcggcgtgctctgtgtgttcggcttcgactacaagcacaagccggaagcctggcaccactcgctcgcgctgctcaagaacgaggtcatgccgcgcctgaagcatctcggctccgcgaagaaggcggcttga

SEQ ID NO: 7999 - DNA, 555 bp, BradyrhizobiumColbertium
gtgaccgtcgatgccaaggatttcaagcaggcgatgcgccaatgcgccggcgcggttgccctggtgacagtcggtgccgagcacggcaggcgcaccggactgaccgtaacgtcagcttgctcgctctccgataatcctccatcgctcatcgtctgcgtcaaccgtaacgccagcgcccacgcgcgcatccgcgaggaaggcgccttcgcgatcaacttcctgcacgaggatcacgcgctgctcgcgctcaccttcagcggccagaagggcgtcaacggcgacgatcgctttgcgttcgggcaatggaggcgcggtgtgacgggcgcaccggtgctggcggacgcggtcgccgcgttcgactgtgtgctggcgcaggagttcgagaccaggacgcattcgatcttcgtcggggaggtccgcggcgcgacgcattcagccacggcgacgccactcgtatacctgcgcagcagcttccacataccggaggaaatccgtgaaacggtttcagtcggcgacctcgattcgcggcatctgagctggacggatttttcctga

SEQ ID NO: 8000 - DNA, 1431 bp, BradyrhizobiumColbertium
atgacccccaatcgacgcacgctcttgaatgcaagtgtcagcgccaccgcgatgctggcttccaccgctcttgccggacaatcgcacggtccgtccagcggatcgccggccggcgccgaattgaactgcagcccggaagcttgcgcggccgcgagcgaggatttcggtcacatcattcacaagcggccacgtgcggtgttcaggccgacgacgtctgccggaatcgcggagattctgcgatgggccgggcagcaagggctgacggttgccgcgcgcggacagggccacggcatctatggtcggtccatgaccgagggcggcatcgtgatcgacctcggcgcgctggccacgatccatcgggtagagccggaccgtgtcgtggtcgatgcaggtgcgacctggcacgcagtgctggaagcgaccctggccaaggggctcgttccgccggtcctgaccaactatctcggcctgtccgtgggtggcactctcgccgtcggcggaatcggcggatcgtcgtcgcgacacggcctgcagacggaccaggttctcgaactcgatgtggtgacgggcgagggccggcaattgacctgctcgccaacctccagcgccgggctctacgatgccgttcgggcggggctcgcccaatgcgcgatcatcgcgagggcgacgctccgcctggtgcgtgcgccggaacgggtccgccgctttcagctctcatatccggatctcccgtcgctgacggccgatcagcggcgcgttctggacgcggcgcgcttcgatcagttgcaaggagccgtcgtgcccgacggagccggtggctggcgatacctgctggaggcaggcgtattccatgacggtcagtctcctgtcgatgacgaggcgctgcttgccggcttatcggatcgccgcgagagcgccgtcatcaccgacctcaccttccgcgacgacgccaatgcatttgcgaagctcgaaacgctcctgaggtcgaacggccagtggttcaatccgcatccctggctcctcaccttcttgcccggcagcaacgcgatggagatcgcgagcgaggtcattgccgggatcaacagtgaggatatcggtccgttcgggcggattacctactatcccatggtcacggatgaatgccgcacgccgctggtccggttgcccggcgagcggatcgtgttcccgttcaatctcatccgtatccccgcatcggcggacaaggcgaatgcggagcggctgatcgcgcgaaatcgcgaattgtatgatcgcattcgcggcgcgggcggcgtgctgtacccggtgagcgcatttccgatgtcgtcccgggattgggcagatcatttcggcgcgcaatggccgctgttgcgtgaagccaaggcgcagcatgatcgcggcagccatctcactccgggctataagctgttctag

SEQ ID NO: 8001 - DNA, 156 bp, BradyrhizobiumColbertium
gtgttcccacgcattggccatgccgcgccggcgaggcgtttcgtccgcattctaccggtttgcggcaatgtctatcccgcgacgcgccggttgttcgccggctcgggcgaccgcagcttgagggccacgggcacatacccgcccggctcggcgtga

SEQ ID NO: 8002 - DNA, 888 bp, BradyrhizobiumColbertium
atggaggagatcgaagtctttctggctgtcgtcgaggccggcagccagaccgcggctgcgcggcggttggggcggtcgctgcaatcggtcaaccgggcactggcggcgctggaacgcggcatcggtgtcgaactggtgcggcgaaccacgcggcagtcgctggcgacggaagcggggctggcgttctatcgtcgtgtcaagcccgcctttgccgaaatcagcgaggcgcgcctggaagcggccaatcgccgcgtcgagccgtcgggcctgctccgcctcgccgcgcccgtgctgttcgggtcgacccacgtcgtgccggcgatcgctgatttcatggcgcgctttccgcggatcgagaccgatctcaatgtcaccgatcggcccgtcgacgtcgtcggcgacggtttcgatctggccgtgcggatcagggagttgccggattcgtcgctgaaggcgcggcgcctcggtgaactgcgtacggtcgtgtacggcgcaccggcctatttcgcgcgccacggtcgtccgcgtcatcccgacgatcttgcggatcatcaatgcatcctgcgcaagaccggcccgggtgacacggaggtgtggcggtttcagatcggcggcaaggcgaagctgctgcaggtgtacggccgcttccggaccgacaataccaatgccgcgcaggcggccgcctgccacggcgtcggaatcggctatgcgccgttctggcagatacgcgatcgcgtcgatcagggggcgctggagatcgtgctggcggatttcgaggcgccgcgcatgccggtgtatgccgtggttccgccgagctcggcaccgccagccaagacgcgcctgtttctcgatctgctggcggagcggctgaagcgcgagcggctctga

SEQ ID NO: 8003 - DNA, 1872 bp, BradyrhizobiumColbertium
atggccagcctttcggcctcgaaccatgtcgcccgtgtcatgtcggtggccaaccacgtggccgacgtcgacgcctcttcgcggattgccaattcgtggcggcgctgcctgatcagccacaagctcgatcccgcccgacagggcccgccgcagacgctgaccgaggccgagatccggcacgtcgtcgcgccgatggaagagacgatcaggcttgtaacgcccgaactcgacgaccttgcccgcgtgctgcgcgacgccggctattgcgtcaatctcgctgacacaaatgcgatcatgctgttcagccgcctgccgggcgaagccgatgcgaggatgtttctggactggaagatctacaccggctccaatttcgccgagacgttcgagggcaccaatgggctcggcaccgcgctggccgatcagaagccgatcctggtgcatcgcgacgagcattttcgcgcgcaatggcacatgttctcctgcgccgtggcgccgctgttcgaccacgccgggcggcttgccggtgccgtcaacatcacctcctgccgcgcggatctcgagcgtaccgcgcatcagctcgcgctggcggtcacgttggaagcgacgcggcggatggagggagcgatcttccgcggtcatttccgcgacgcctggatcgcgaccgtaccgggcgacggcggcagcggcctgctcgcctacaacgacgaccgccgcatcgtcggcgcctgccgttcggcgcgcgccctgctgggcctcaccgacggcatgatcgcatccggcatcgatctgtcgcgctacgtcagattcgaccagcacgccgcgcgtggctccgaggagatcgtcgagctgcgtcgcgccgatggcgcggcattgggccggggccatgtcgcgccgccgctgcgcgcgagatcctccgcgcgcccgcttgcgccgcgccgtgacgtgcctgtcgatcgcttcaatgcgctgcatcggctcgccggtcgcgatcccgggttgatcaagagcgtgaagcggctcggcagcgtcagtgatcatgatctaccggtgctgctgcagggcgagaccggcgtcggcaaggatttgttcgcgcgcgccattcacgcggcgagcaagcgggcgctcaacaattatgtcgcgctgaattgcgcggcgatgccggaaagcctgatcgacgccgagctgttcggctacgaggccggcgccttcaccggcgcgcgccgcgacggctcgaagggcctgatcgtgcaggccgacggcggcacgctgttcctcgacgagatcggcgacatgccgatcgcgctgcagacgcgcctcttgcgcgtgctggaaaaccgcgaggtctggccgctcggcgcgctcaaacctgtcgccgtcgacatccgcctgatcagcgccagccatcgcgatctcggccgcatggccgagcagggcgccttccgcgccgatctctattttcgcctgcgcggcatggaggtgcggctgccggcgttgcgcgagcgtacggacagggacgatatcatccgccagattgcgcgcgaggaagcgcccaactgcaggctttcggacgaggcatggtcgcagcttgcagcctatccgttccccggcaacatgcgccagctccgccacgtgctccggctcgccggctgcacggcggaaaacggcgtcatcaccgacgcggatctcgatctgccaccgttcggcggacgggcggcggagccggatcttggagcggccgaacgcgccacgatcgtcgaggcgctacgcaggcacggcggccgcgtcaccgaagcggcgcgtgccttgaaactcagccgcgccacgctgtatcggaagatcaagcaactgaagatcgacccgggttcatactag

SEQ ID NO: 8004 - DNA, 3306 bp, BradyrhizobiumColbertium
atgccgttcaagaagctcctgatcgccaaccgcggcgagatcgccatccgcattgcccgcgcggccgccgacgccggcatcgcgacggtcgcgattcatcctgcggatgatgcgctgtcgctgcatgtgcgcgttgcggacgaagcgatcgaaattcctggccgcggcgcgcgggcctatctcgacattgacgccgtggtgaaggcggccaaggcgatgggctgtgacgccgtgcatcccggctatggctttctcagcgagaacgcgaccttcgccaaagcctgctccgacgcaaatatcaccttcgtcggtcctcaggcgacagcgctcgagctgttcggtgacaaggtcgcggcgcgtcagctggcaaaacgctgcggcgtgccgatcatcgccggcaccaccgggccatcgagtcttgaggagatcacggcctttttcgcatcactcggcagcaacgcagccatcgtcatcaaagcaatggcgggcggcggcggccgcggcatgcgtgtcgtcgagaacgcgtccgatctttcggaagcctatgcgcgctgccagtccgaggccagggcggcgtttggattcgacggcgtctatgccgagcggctgatccggcaggcgcgccacatcgaggtgcagatcatcggcgaccgccacggtgcgatctcccatctctgggaacgcgaatgcaccatccagcgccgccaccagaagctgatcgaggtggcaccgagcccctcgctaagcgatgcgttgcgcggccgcatcatcgaggcggcgaagcaactggcggcggctgcatcctacgacaatctcggcacgttcgagttcctcgtcgatggcggcgccgaggacagctttgccttcatcgaggccaacccgcggctccaggtcgagcacaccgtcacggaagaggtgcttggtgtcgacctggtgcgcgcccagctcgcggtggccgggggcagcccgctagccgctctgggtcttgcgcaggaatcgatcccgaagccgcgcggctatgccatgcagctccgcgtcaacatggaaacgctcgacgagacgggcgcaacccatccgactggcggcgtgctcgcggtgtttgagccgccatcgggccccggcgtccgcgtcgacagctttggctatgccggctacaagaccagtgctgcgttcgattcgctgctcgccaaggtcatcgtgcatacgccgggcgaatcctggcatgacgtggtcgccaaggcttcgcgtgccttgcgcgaattccgcatcgacggcgtcgtcaccaatatcgccttcctccaggcggtgctcgcgcattccgatttcaggatcaaccgcatcgcgaccgacttcatcgatcgcaatatcggcaagctggtcgaggcggccgatggcgcggccaagccgctctactttgccgcggccgagcgtggcggtgtccaaggcgctgaagctctcgttgcgcaaacggtgcccgaaggtgcggtgatggtcgcggcgcccttgcagggcaccatcgtcaccatccaggtgaaggaaggcgagatcgtgcgccccggccagcagctcgccgtgatcgagtcgatgaagatggagcatctggtcatgaccgagcagggtggccgggtcatgaagctcgtcgccggcgatggcgttacgctgatgcatggcgagccgatcctctatctcgagccgctcgacgtcgcggccgacagcacggcggcggaagccgagatcgatctcgatcacattcgcccagatctcgctgaactgatcgcgcgccaggccaatacgctggacgagaaccgccccgccgcgctcgagcgccgccgcaacaccaaccagcgcaccgcgcgcgagaatgtcgcgcagctcgtcgacgacggctcgttcatggagtacggcagccttgcgatcgcggcgcagcggcggcggcgcaagctcgacgacctcatcaagaacacgccggcagacggcctcgtcatgggcgtcgccacggtgaacgccgagcaattcggccccgagggcgcgcgctgcatcgtcgtggcctatgactacaccgtgctcgcgggcacgcagggtcacatgaaccacaagaagatcgaccgcatgctgacgctggcggaagactggcgcgtgccgctggtgttctatgccgaaggcggcggcggccggccgggcgacaccgaccggctcggcatgaccgggctcgacggaccgtccttcgtgcagttcgctcggctctccgggctcgtgccggtcgtcggcgtcgtctccggctattgcttcgccggcaacgccgcgatgctcggctgctgcgacgtcatcattgccaccaagaatgcctcgatcggcatgggtggcccggccatgatcgagggcggcgggctcggcgtctatcatcctgccgaggtcggccctgtgacgttccaggcgccgaacggcgtcatcgacatcctcgtcgaggacgaggaagaggcgacgcgcgtcgcgcaaaaatatctgtcgtacttccagggcgcggtgacggaatgggaaaccgcggaccagcgcctcttgcgccgtgccatccccgagaaccgcctgcgcgtctacgacatccgcagcgtgatcaacctcatcgccgacaaggattccgtgctggagctgcgtcgcgattacggcgtcggcatgatcaccgcactgatccgcatcgaaggcaaaccgttcggcctgatcgccaacaatccgcgccatctcggcggcgcgatcgatgccgatgccggcgacaaggccgcgcgcttcctccagctctgcgacgccttcgatctgccgatcgtctcgctctgcgacacgcctggcttcatggtcgggccggaagccgagaagaccgcgatcgtgcgccacgtctcgcggatgttcgtcaccggcgcgagcctcaccgtgcccttgttcggcatcgtgctgcgcaagggttatgggctcggcgcgcagtcgatgatcggcggcggcttccatgcctcattcttcaccgcggcctggccgaccggcgagttcgggggcatgggtctcgaaggctacgtccgcctcggcttccggaaggagatggaggcgatcgcggatcccgaggagcgcgagacctattaccgcaacaaggttgccgagctctacgccaacggcaaggccgtctcgatcgcctcggtgttcgagattgacaacgtcatcgatcccgccgagacgcggcgctggatcatggcgggcctgcgctccgtgccgaaaccgccggcgcggacggcgaagaaacgaccatgcatcgatacgtggtga

SEQ ID NO: 8005 - DNA, 1722 bp, BradyrhizobiumColbertium
gtgagcgtaagcctcaacgaacaggattacctcgccaccttgcacgagctatggaacaaggcttggccgaaagggacgccgcgctcgccgaactatctgcacggcgaagttcccctgacggaatatctgcgcgcctgggcgaagcgaagtccggagaggcccgcggtgatcttctatggccacgtcacgacatacgcggacctcgaccggcagagcgaccggtttgccgcgctgttgcaggccaagggcataagcaaaggcgaccgcgtcgccgtctttctgccgaactgcccgcaattccacattgtgttcttcggcatcctgaagctcggcgcggtccatgttcccgtcagcccgttgtcgcgcgcgttcgagctgtcctacgagttgaacgacacccaggccgaggtgatcgtcgcgctggaccagctcatgccggttgtcgagcaggtcagggacgaggtgcggctgcgcgagatcatcgtcacgagttttgccgatgtcgtaccggcaaagccggcaattccggcgccagactcgatccgtgtgccgcgcgccgcagtcaccggcgcgaccgatctgttgccggcgcttgctgcgatgccgattcctgtgccgctgccgcctgccggcctcgatgacgtcgccgcgctcaattacaccggcggcacgaccggcatgcccaagggctgcgtccacacccatcgcgacatggtctacacggccgccgccaattacggcatctcggtgctgtccgacgagagcagcgtcttcctgtcgttctttcctgagttctggatcgcgggcgagaactttggcctgatcttcccgctgttctcgggcgcgacgctggtcctgctcgcgcgctgggatgccgtcggcgcgatggccgcgatcgacaaatacaaggtcacaatcacggcgatgccggtggacggtgcggtcgagctgatggatcatccgcgctggaacgagttcgacctgtcgtcgctgcagcaggtgcgcgtggtctccttcgtcaagaagctcaacgccgactatcgcaagcgctggaaggatctcaccggcacgatcctgatggaagcggcctggggcatgacggagacccacacctccaacaccttcacggctggctttcaggacgacgatttcgatctcaacaaccagccgatcttcgtcgggctgccggtccccggtgccgagttcaagatcaccgatttcgaaaccggcgcactcttgccgctgggtgccgaaggcgagatccgcgtgcgcacgccgtcactgctcaagagctactggaacaagccggaggcgaccgcggagtccctgatcgacggctggcttcgcaccggcgacatcggcgccatcgacaaggatggcttcctgcacttcctcggccgccgcaaggagatgctgaaggtcaaaggcatgagcgtgtttccgccggagatcgaggcgttgctggggcaacatccaaaggtgctgggttcgggcgtggtcgggcgcgaggaccccgagagggggcaggtgccggtggccttcatccagctcaagccggaggcggtcggcagcgtctctgcggaggatctgcgtgcctggtgcgccgagcgcatggccgtctacaaggtccccgagatacgcatcatcgaagccctgcccctgaccgcaacgggcaaagtgaagaagcaggacctcaatccaattctgcctgctgctgtctga

SEQ ID NO: 8006 - DNA, 657 bp, BradyrhizobiumColbertium
atggcgggccgccgcatcctcctgatcaatccgaacagcctcgaggcgaccactacgatgatggtggcgattgccaagtctgcagccgcggatggcttcgacattgccggcgtcacggcagcgcgtgcgcccacaatgatcgtctcggcggatgcgctggaggcagcggcgcctgaggtcgaggagatcgcgcgtgcccgctctggcgattgcgacggcatcatcgtcgcggcatttggcgatcccggtctcgcaaggatcaagctgaccatgagattgcctgccgtcggcattggtgagtcctcgatgctggaagccgcggagaacggccgacgcttcggcgtggcgaccacgacgccgctgctgaaagcgaagatcgacgcactgccggatgtgctgggattgcgatcgcactacaccggtacacgcttcaccgtaggcgatccgcatgagttgatgcgtgatccatcgcttttgcgcactgcgcttgcgggcgcggtcgaggcctgcattgcgcaggacggagcggaagcggtgatcgtcggcggcggcccgctgggtgaagcggcacgcgagcttgaggcgatctttaccgtgccggtcatcgcgccggtcccgtcagccgtgcggcggatcattcgtctcgtcgcggtgtaa

SEQ ID NO: 8007 - DNA, 771 bp, BradyrhizobiumColbertium
atgaagcgaacccgtcccttcaagcgcaagccgaaacgctccgagccgaagcacagggagccggaggtcgtcgatccgcgcaacattgacgacgatccggtggtccagggcatcctgaccgcgattagccagaagcggctcaagccaggcgccaagctcggcgaggacaagcttgccgcagctttcggtaccacgcggattcacatccgccaggccttgtcccatctcgcctcgcgcaaggcggttatgcagatccccaaccggggcgccttcgtgtaccggccgagttgggaggaggcgcaggacatctttgccgcgcgtcggatcatcgagaccgcagctgtgagcgccgcggtcgaccggctggacaaggccggcaaggcggagctgaaggcgcatatggagcgcgaggcgcgtcacgatcgcaatgaccgctgggcctcgctgtcgctgacggccgagttccacatcctggtggccaagcttgccggcaaccgcgtgttgctggaaatatcgcgcgagctgatgctgcggacgtcgctggcgatcgcgaccttcgagcagccaggcgagccggattgctcgcccgacgcccaccccgacatcggcgcattgatccttgcccgcaacaaggctggtgcgatccatgccatgcatcatcacatcgaggagatggagcagcggatccggccgaagaaaggcgaggacgaggtcgacgagctgaccgcgatcttccaggagattggcgcgcgggcgcgggcgggcggatag

SEQ ID NO: 8008 - DNA, 1122 bp, BradyrhizobiumColbertium
atggagctggcgttgagcgatgtacgcggactttcgctggatctgaagggcatcggtcacgcgttcggcgcgacggttgcgctcgacgagatcgatctctccgttgcagccggtgagttgatcgccctcctcggcccgtccggctgcggcaagaccacgatgctccagatcatcgcgggcttcctgcgtccctcccgcggcgaggtgcgcttcgacggcgcgcgggtcgagcatgttccggccaatcgccgccgcatcggcatggtgtttcagaactatgcgctgtttccgcacctgactgtgttcgaaaacgtcgcctacggcctgcgggcgcgcaaaaccgcgaagaatgttgtggccgcgaaagtcgaacagatgctcggcctcgcccagatggcgccgtttgcgcgaaggctgcccggagaactctccggcgggcagcagcagcgcgtcgcgctggcgcgggcgctcgcgatcgatcctggcctcgtcctgctcgacgagccgttctcggcgctcgacaagaacctgcggctcgacatgcagatcgagatcaaaagcctgctgaagacctttggcgtcacctccatcatcgtcacgcatgatcaagaggaggcactgtcgatggccgaccgcatcgtcgtgctgaacaagggacgcatcgagcagatcgacagcccggacgcgctttacgaccggccggccagcctgttcatctcgaactttatcggccacaccaacctcctgcgcggcaccgtcaccgacgcggaccgcgtgcagctggacgccgggcctgagctcgatctcggccgttcggcccagcgcaggcgcggcacgccggtgacgatctctgtccggcctgaaaacatcttgttcggcgcagaacggcccggcgccatccccgtcacgatccgcgccaccctgccgctcggtgccgtcagcgtgacggagggcgtcaccgcgagcggcgaagccgtgaaggtcagccaggcccgcgctgccggcagcgcgaagacgcaggccggggagacggcttggctcacgatctccgacgtctcgcgcgtcagcatcttcagcacgccggtcgacgagctttccctgcatcacccaaggagtatttga

SEQ ID NO: 8009 - DNA, 1050 bp, BradyrhizobiumColbertium
atgagcctatcccggagatcgctgctcacctcaggttcggccgcgcttgccgcggctggtctcgggtggcggacgtcatcacgcgccgctccctcgatcgtggcaacgacctatcccggcagcttcgacgaagccttccgctcggtggtcgggccggccttcaagaagtccagcgacggcagcgtcacctttacgcccctgctcggtgtcgaccagatcggcaagatccaggcctcgcgcaacacgccacccttcgacgtcgtgctgttcgacgagggaccgctgatcccggcgatcgcgagcggcgtgctggagaagtttccggtcgatcactcgaagtcatatgccgacatcccaagcgtattccggcatcccgacggctacgcccctgtcatcaccgtgcaattgatcggcatcgcctacaatccgaagaagatcaccaagccgccgacctcatgggaggatctctggaagccggaacacaaggggcgcgtcggcatcaccgggctcggctccagcctcggcaccgccttcatggtcgagatcgccaagctaaacggcggctccgagaccaatatcgaaccggcgttcgaggccatcaagaagctgctgccgaacgtcggtgcgatcgcggcctcgcccggcgcgctggctgcgctgttccagcagggcgagatcgatatcgccttcaacttctggaacaacgtggcgctgctcgccgccaagggcgtcgacatcgccttcgccaagccgaaatccggcgccgtcgtgatccgcaccagcgcacagatcgtcaggaacaaccaggatccgaaggcggtgctggattatctcgacaccgtgatgtcggccgaaacgcagaaaggcctggaggcggcgccatggatgatgatgccgaccaacagcaaggtgaagctgaccggcgccaatctcaccgtcgccaagagcctcgacgacctcgtttccaacaatgtgctgcttgactggaccaagttccagccgctgcgcggcgagtggatcacccgcttcaacaaagaagtgaggatctaa

SEQ ID NO: 8010 - DNA, 825 bp, BradyrhizobiumColbertium
atgctgccggcggtcccgctggcggcgttgttcctcgccgccttcgtgctgccactgattgcccttgtcgcgatcagcctgttccgcacgtcacagttcgaagaactgtcgctggcgcaatacgtgcgcttcttctcggacccgttcagcatcaaggtgctgacggacaccatctggctgggggcggaggtcgcactggtgacgctgatcatcgcctatccgatcgcacttgtttacgtcgcgagcggtcagctcatgcgcaccttgatcacgtttctgatcatgctgccgctcctgaccagcacggtggtgcgcaccttcgcctggatcgtgctccttggccgcgacggcatcatcaacacggcgatgctgtcgctcgggctgtggcaggccccggctcgcctgctttacacctgggagggcatggtactggcgctaatccagatccagcttcctctgatggcactgcctgtcatcaacagcctgctgcggctcgacggcaatctgacgcgcgcggcagaagggctgggtgcaagccgcgcccgcatcttcgtcaccgtcatcctgccgctgacgctgccgggcgccattgccggctggctgctcgtcttcgcagccgctgcgaccgccttcatcacccagacactggtcggcggcggccgcatcatcctgatggcatcccatatttaccaacaggccgtcggcgtgcaggactggccgttctcggcagcgctttcgctgatcttcacgctggccgtgaccggcatcgtctttgccaccggcgccctgtcgcgccgctacgtgcgaggcgtcgatgcagcgtag

SEQ ID NO: 8011 - DNA, 810 bp, BradyrhizobiumColbertium
atgcagcgtagcctcattgatcgcgtctactcgggcatcattggtgccatcaccggcttcgggttgctgctgctgttggcaccgacgctggtcgtgctgatcatttccttcaccggcggcgtcacgctgaaattcccgccgccgagctggtcactgcgctggtatgtcgatctgctgcaatcccaggaaatcgtggagcccgcgttaacgagtctcaaggtcgcaacggcggcgacgattctctccgcagtgctgggcggcgcggcggcactcggactggcacggagccggttgaagatcgcgcgcgtccttgacgctctgttcatgtcgccgatggtgctgccggcgatggcgttcggcctgtcgctgctgctggtctttaacctgctcggcatccgcctgtcggcggcaacgctggtgctcggccacacgatcatctgcgtgcccttcgtgatccggatggtcggcgcctcggtgcagcaactcgatccggtgctgatcacttgctcgctcagtctgggtgccggccgctggtacaccttccggcgcgtcacgctgccgctgatccgccgcggcatcgttgcgagctgcttcgtcgcgttcctcacctccttcgacaatgttcccgtatcgctgttcctcgccgacgcgcgcaccgaggtcctgccgatcaagctctgggcaatcctggaaggcagcctcgacgtgcgtgtcgcagccgtctccggcgtgatcgtgctgctgactttggccggcctcgtctgcgctgaaatcttcggcggcttcagtcgccagatcgggagccgctga

SEQ ID NO: 8012 - DNA, 900 bp, BradyrhizobiumColbertium
atgccgatcgaacgcgatcttcgcggatatggaaggacccggcccgatatcgtttggcccaacggcgcccgcgtcgcggtgtcattggtggtgaatttcgaggagggcgccgagctcgcgatcgagcaaggcgatgcggagacggaacactatggcgaggtcgcctcgacagcgccgccgggcgtacgggatttcgtgcaggagcaggtgttcgactatggcatgcgcgcgggcctgtggcgattcctggacgcctttaacgaggccaaaatccgttccaccttcatgatgtgcggccgcgccgtcgagcgcgtgccggaccttgcgcgtgccgtggtcgaagccggccacgaaccggcggtgcatggttggcgctggctgccgcatgcactctatggccgtcccgagacggaacgtcgtgacatcgaaaggacgcgcgacgccatcgccggcgcgacgggtctcacccccgtcggcttcatgtcacgcgggagccagagcgcgtggacgcgcgatatcctgatcgggctcggcttcgcctacgattccaacgcactcgatgacgatctgccctattggagcccgtcgtcccagggagcgatgctggtcctgccctatggcttcgatacaaacgacatgaagttcttccatccgaacggctttgtgcagccggaggacttttcgaactacgtcagcgccgcactcacgacgctggtcgaggaggcagagcgcggccgctccgcgatgctgtcggtcggatttcatctgcgcatttgcggccggcccgcgcgtttccgagcggtgaagaccattctggccgagctggcgcggctggagggccgggtctgggtcgcaacacgcgccgacattgcggcgcattttcgtaaagtcacgcgctag

SEQ ID NO: 8013 - DNA, 261 bp, BradyrhizobiumColbertium
gtgatcatacacctccttgatatcagcggcggtcggaacggcgcctccgctgcgggccttcgccctgaagccccaaatgaagagccgctccgctgcgctcagcgccggaagatcgacgggtctggtatgtgtcgaatgatgcatgagcctctggcctttggctgctctcgcaccatggctggcgcggatgatccgcgccgatcgttctgccagagacctcttcaagtcaacgctcggaggggcgttgtcgagatgttctag

SEQ ID NO: 8014 - DNA, 369 bp, BradyrhizobiumColbertium
gtgtatgatcacttccgcgtaggcgacgccgtgccctcgctggactccatcatcgagatcttcgcctgtacggcccacacggccatcgaagtgcactgcccgacctgcccgcgcatgtcggacagcgagcgcggaattctgcgcgccatcgccgcagcacagcaggatcgcgtcgacatcgcccgcgaacaattcgagcgctggctgccgccggtcggcgccgattgggcgctcgcgccggtcgaggggcttgcaacgatcttccgtagggccggtctcatccttcccgaccggcatgtgcggtctgtcggccatgaccggatcatggcgatgaagagctggctggtcggaacccccacgctgcactga

SEQ ID NO: 8015 - DNA, 468 bp, BradyrhizobiumColbertium
atgcaggatgcacgcgattgcgtggcggtcgcggacgccggccagtcgcagctttgtccgctccgggccgcgcttgcggcgccgccatgcgtcgaaagctacgacgagttctgccgcgtcgcactgtcgctgttccgcttcatcggagcggcctatgcgaccggcgcctcggattgctgggaagctgcttatcgctttgccgacgaggcgcccggcattgccgacagtccgctgctggttgcgcgggcggcccttgtcaggatcctccgcggcggccggccatgcgagctgtgcttcatgccgccgtcctgccggcgcctctccaaggacgaggcggagctgatgcgcctgctggccgtcgcacgccgcaagcaaccgggcgagctcgaatccatgatttgccaattcgtcggctcggacaaggaggatgcggcgacacgggcggtcaacgcgcttgcgttgtgctga

SEQ ID NO: 8016 - DNA, 927 bp, BradyrhizobiumColbertium
atgccggtccccattctcctggtgacgggctttctgggggcgggcaagaccacggtcgtgaaccatctgctggcgcatgccgaggggcggcggatcgccgccgtggtcaatgatttcggcgcgatcaacatcgatgcggaactgctcgcgggcgccagcgacggcgtcgtcagcctcgccaatggctgcatctgctgctcgctggagggcgatctgctccgcacgctctcggcgctgctgcggcgcgatcccaagcccgagtacatcgtcatcgaaaccagcggcgtcgccgatcccgccgacatcgtgcgcaatctgatggacccggtgattctgcgcgaggcgccgctggagacggtggtctgcgtgctggatgccacggcgccgcccgcggccttcgaggacgcgctccagcggtcgcagttgcgcgtcgccgatatcgtggcgctcagcaagctggatctggcggacgagggggcaggcgtgcgaattcgcgacgctcttcgcgcactacgcctgcctgccctggtggtggatgctaaccgcggcgagatacccgcggcactgttattccccgcgaacctcgatcgcgcgccggcacgtgatccgggtccgcgccggccgaccgaggagcgcttcgaaacgctgagctggacttcggacaagccggtgtcgctgccccgtttgcagcaggccatcaaccggctggcaccgaagctcgcgcgcgccaaaggcctgatcgagagcatcgagcagcccggacgtccgatggtgcttcagttcgccgccggccgcgccacgctcgcaccgggcgttgcatcggcacccggcgtgccgcggacgcggatcgtcttcatcgcggagcttggggtgctctccaaggcggagctcgatgaaatcatggaagcctgcgctgcagccgtgtga

SEQ ID NO: 8017 - DNA, 1491 bp, BradyrhizobiumColbertium
atgagcgggttggtgatctctggcggccgggtggtggatcccgcgagcgggatggatgccatcggcgatgtagcggtggtggacggcaggatcgccgccgtcggcactggcctcggcggcgccgagcgggtgatcgatgcgaccgggctcgtggtcgcgccgggcttcatcgacctgcacgcgcatggccagtcgattccggccgaccgcatgcaggcgttcgacggcattacgaccaccctcgacctcgaagccggcgtgctgcccgtcgggtcctggtatgagagccaggccaggaaggggcgcgtgctgaactacggcgctgccaccaattgggcctttgcccgcatcggcgcgatgaccggctcaaacgcggagagttcgctggaggcgttcggcaatgccatgcgggatcgccgctggatcgacaatgttgcaacggatgcggaggtctcaggcatcctggagcgtctcgcacgcggcctgaacgaaggcggcatcggcatcggcattctgaacgcttacgcgccgggagccggcgtgcaggagctgaccgcggtgtgccagctcgcagccgcgcagaacgtgccgaccttcacgcacgtggccttcatgtcgcgcatcgatcccgaaagcgcggtggaagcctatatccgcctgatcggctatgccggcgctaccggcgcccacatgcacatctgccatttcaattcgtcgagcaagaccgacgtcgaacgctgccgcgtgctgatcgcgaaagcacaggcgcaggggctgccgatcaccgtcgaggcctacccctacggcaccggctcgaccgtgctggcggccgccttcttcagcgatcccgagttcgtcgagcgcaacggcaccggctatgattccgtgcagcgcgtcaccgatggctatcgcttccacgatcgcgaggagctgctcaaggcgcaggccgaggagccgtcctcgctggtgctctggcacatcctcgacaccgagaacaatgcgcatcaccgcgacctgctcgacatgtcggtgctgtatcccggcggagcgattgcctccgacgcgatgccctggacgctctccgatggcaccacctacaccggcgatgcctggccgctgcccgacgacgccacctcgcatccgcgctcggccggctgcttcacgaagttcatccgcgaatgggtgcgcgagcgcaagaccctgtcgctgctggaaggcgtgcgcaaatgcgcgctgatcccggcggaaatcctgtcgcagagcacgccggcgatgcgcgccaagggccggctcgcgaaaaacgcggatgccgacatcgtcgtgttcgactacgagaagctctcggaccgcgcgaccttcaccgcgatgaaccgtccctcggagggcgtgcggcatctggtcgtcagcggccagccgctgatcagcgacggcgtgctggatgtgaacgcgcggcctggaaaaccggtgcgccgtcccgtcatcgggagctga

SEQ ID NO: 8018 - DNA, 1209 bp, BradyrhizobiumColbertium
atggcattgctcccgcgcttcttccttctcgttctgcttcacgtcatcaccatttggccggcggcggcacaggatggtgagcccgtcagattgtctgctgcgatacagtatcagttcattgcgcgctgggatgtcgatcggctgaacaggattttgcaagccgatacgcccgccttcgccggtatcaccgtaacctacagtccggcgcgcaatcccgtccggctctatcgcgtgacctattcgtcggtggtgcccgagcgcggcaacaagccgacggtcgcatccggactgattgcgatcccggaaggacaggccacgtcgtttccgctgttgtcctacgagcacggcacggtctacggcaagcagcaggtgccttcatttcccgaccagtcacccgaaacccagctgatgatcgcgcagttcgcggggcagggatatgtcgtgatcggagccgactatttcgggatgggcacgtcggcagagacggaaggctacatggtgaagggaagccaccagcaggcgacctacgacatgctcgtggccagccgcgccgtgttggatcatctcaaactcgccacgaccaagctgtttctcgccggctggtcgcagggcggattcgtcaccatggcgatgctggagaagctcgagcaagccggcatcaaggttgacgccgcggcgaccgccagcgcgccggtcgacgtattcgtggcgctgaacggctttctcaattttccccgcaagaacgatgcgagctgggtcaactcgctgttcatcctgtcggcgttctcgttcgaaaactattatggcgtgcccgggctggcccgctcgctgatcgcggatgcctattacgacgtggcacgcaaggcttatttgcgtgaaccctacgacgccgccgccgtgccgacggacctgcacaagctgctccgtcccgactatttcgatccgcagttcttcgcagcttcggcctacggccggctcgtcgcgcagacacaggcctatcgctggatcatcaagagcccagtgcgcaattattacggcgagaccgacgaggccatcagtgtcggcctcggccggctcgccatgacctatcagcaggcgatcggcaacggcaatcccgcggtcgaagccgtctccaccggtccgaccacccatcgcggcacttttgcgacggctgtgccgaagtggaaggcatggttcgacgggctttga

SEQ ID NO: 8019 - DNA, 2205 bp, BradyrhizobiumColbertium
atggtttcgaccgatggctgggcacaatccgcaggcccggcccagacgctcgatccggtcgtggtggcaccatcggcgaagccaccgaatgtcaggagtacccgacgcagcgaggctgcgcgtctcgcgcgctcacgacaacagcgaaacctggctgccgccgaaacgcgtgctccgacagccagcccggcgggatcggcattcgccgcaccgacgctcaatctcaccggcgcgagcacggccggcagccggctgggcctgacgcgattgcagacgccggccagcgtggaggtgatttcggccgagacgctttccgaacgcggccagcagaacgttctcgacgcggtgacgcagaacgccaccggcttcactgcgagcccggcaccgggcaatggcggcgtctccttcaacacccgcggcttcacgggccttggctccgtcatgacgctctatgacggcacacagctctatatcggcgcgggaacggtgacctttccgttcgacacatggtcgaccgagcgcatcgaggtgctacgcggccctgcgtcggtgatgtacggcgcaggtgcggtcggcggcgccatcaacattgtttcgaaactgcccttgtgggtccctcgcaacgaggcggaggtctcgctggacagcaacatgacgcggcggattgccgtggacagcggcggtcccgtgagcaagaacgtcgcctatcggatcaccgccatcggcaacatgtcggacggctgggtcgatcgcgacaacacatcaaacgttgcacttcatgccgcggtccaggtccggcagaacgaagacgtcacctggacgctgtccacggactacggtgatcgccatccatcgcggtacttcggcacgccgttgatcaacggcaagctcgaagaagcgcttcgcttcaagaactacaacgtcagcgacagccacatccgctaccaggatagctggaaccaggtgaagaccgactggcaagccgccgacggcatctcgatccagaacactctctactacttgaactccaagcggcactggaaggacgtcgaaagctacgcctacaaccctgccaccggcctgatcgaccgagccagctatatcgagatctttcacgatcagcagcaggtcggcaatcgcatggatacgaaattccgcgggcatgtgcttggcatggccaacgaattcctggcgggcttcgacgtcaacagcatcaatttcacgcacaccaacaactctccttatggcggcgcttcgtccgtcaacccctacgtctttagcccaggctcgttcagcagtccgaacgccacgattcccggttacggcagcgtgacgaaccaatatgcgctgtttgccgaaaacaggctgtcggtgaccgagcagttctccttgattgccggcgtccgccaggatcaaccgaccatcacgcgcaccgactatgtcgtgcccgcaaacagcttcgagaagtcgttctcctcgacgacatggcgcgccggtgcggtctacactccggtgaaggacctcgctttctatgggcagtatgccacggccgtcgatccggtcggagggatcatctcgctgtcctcggccaacaagaatttcgatctggccaccggcagacagatcgagatcggcgtcaagcaatcgttctggggaggccgcggcgaatggaccctggccggctacgagatcgtcaagaacaacctgctggcgcgcgatccgaacattccttccctgaccgttcaggtcggtcggcaatcatcgcgcggcgtcgaagcatcggtcggtttcctgctcgactacggctggcgaatcgatgccaacaccgctttcctgcgcgcgaagtatgacgacttcgtgcagtcggttggcggcgtagccgtgaactatgccggcaacgtgccggtcaacataccgcagaacgtatccaatatctgggcgacgtgggcctttgcacccaactggtcggccaacgcgggcgtgcagatcgtcggaaagacctatgcggacaatgccaacacggtgacgcgcccggcctacaacatcgtcaatgccggtgtgcagtggaagcccgatctccacaccaccgtgtcgttccgcatctacaatctcttcgacgaggtgtacacgacctcgggcggcacgacccagtggctgctcagcatgccccgaacggcgcaactgggtgtcaacgtgaagttttga

SEQ ID NO: 8020 - DNA, 1446 bp, BradyrhizobiumColbertium
gtggcacggcccctgaaacgcacgctccggcggtggctgtatatcgtccaccggtggatcggcatcaccacctgcctgtttttcgccatgtggttcatttccggcgtggtgatgatgtatgtcgcctttcccggcctttccgacaaggaaaggctggcagcgcttcccgacattcaatgggagaagctggcgctgtcgccggacgacgtgatgaagacggcaggcgccacccgctatccgcgcgatctccgcctttccatgctggccgacgagccggtgtatcggatcaccggctgggatggcaggcggcagacgatctccgcagccgacggccgcgtcatcgcgggcgtttccgaacagcaggcgctcgcggtcgcgcaacatcatcccgcgagcagatcaccgcaactcgaagccatcatcgatcgcgatcaatggagcgtaacggcccggtacgatccgctgcgaccgctttacctcatcgggctcggcgataatgccggcaccaggctctatgtctcctcgcgctccggcgagatcgcgctcgacaccaatcaaaccgaacgcgtctggaactggctcggctcgatcccgcactggatctacccgaccgtgctgcgcaaggacgggccgttgtggcggctcgtcgtgctttggatctccggtatctgcctgatcgtcggcgccagcggcatctggatcggcatccttcgcgtgcggctgaagcggcgctatgcgagcggcaggatcacgccgtatcgtggctggatggcgtggcaccacgtcaccggcctgatcgcgggcatcttcgtgctgacgtggacgttctccggttggctttcgctcaatcccggcgaatacttcgcaagccgcagcacgacgcgcgaggtgctgcagcgctacgccggccatgaggcgcctacgattgcgacgaagctgccagcgccgcaatccggcgcggtcgaagcgcgctttatctggcttgatggcagcccgatgattgtcgtcgcatcgcgtgatggcacgcagaggccgctggatgtgacgtcgggccggactacggcaatcccgcaacatcgcctttggactgccgcagagaagctgctgccgcaagcccgcgtggcggaacggatggtcctcgaagaatacgactcctactggtatgcgcatcatcacgaccgcgagttgccggtgctgcgcgctgtgttcgatgatgacgcgaagacatggtttcacatcagccctgtcaccggcgacatccttggccacgtagacggcagccgacgcacctatcgatggctgttcaacgcgctgcacagtttcgatttctgcctgctgctgatgcatcgcccggcctgggacatcgtggtgtggctgctgtcgatccttggcgtcatcgtctcggtgagcggcgtcgtcgtcggctggcgctatctgcgccgttga

SEQ ID NO: 8021 - DNA, 1026 bp, BradyrhizobiumColbertium
ttgatcgtccgacattttctgcaacgcgactccaatcatcctgtttcgcgccgcgcgttcctcggcggatttctgtcggccggaagtgccctcgcgctcggcggatgtgccggcttgggggcgaccggtgcgcgcttcgacgcctcatcgctctccgttgagcccacattgctcgtcacgaccacgcgcaagcccgtcaacggcggtcgcacgaaaacctggttcggtccggagcgcgcgaccagcatgactgtcgcgcaggtgaagctgtcggcgccggacgagagccgcctttctctcgcctcggtcggacttggcacctggcgtctcgatcgggtcgaaccggtgccggcggacgtgggcgatctcgccgcgcaggcgggcggaggggacgtgctgatctatgtgcacggcttcaagcagacattcgagactgcggtgctggatgccgcccagctctccgacgggatcaggttccgcggtcggaccatggcgttttcctggccttcaagggcaggattgttcgactacgcttatgaccgcgacagcgcgatgtggtcccgcgatgctttcgaacgcgtgctctcgtcgctcgtgtcgtcgccaggcggcggccgcgtgcacatcgttgctcacagcatgggaaccatgctgacgctggagagcctgcgtcagctttatgggcgatacggcgatacggtcacgagcaagatcggcgccgttgtgtttgccgcgccggacatcgacatggacgtgttctcgtctgcggttcagcgcattgggccgctggccggcaagatcaccgtgatcgcctcgacgaacgatcgcgccctggcattgtcggggcagctcgcaggcggaatgacgcgggtcggcgcggccgagaaagccgtgatcgcgcggctcggcgtgcgcgtggtcgatgcctcccaggaaggctggggcatcatcaaccacgatctgttcctgtctaactcggaggtacagaaggtgatccgccgctcgatcgacggcacgatggcgtga

SEQ ID NO: 8022 - DNA, 186 bp, BradyrhizobiumColbertium
atgcacaatccgaaagggctggagtttccctgcgtcgccatcgccggcttgggcttgctcggccgccacggcaagacgatcgaggaatgtgtccggctgacgtatgctggagtgacacgggcaactcacgaggcgctcctgacctactcgagtgagtccgccttggtgcaacgcttgatcgcctag

SEQ ID NO: 8023 - DNA, 162 bp, BradyrhizobiumColbertium
ttgggtgcggcctggcagaagaccgccaaggacaccgagcgtgactacctctcggtcaagctggacgacccgagcttccccgctccgatctacgccaccctgaccgaggtcgagggtgcggaaggcctccaactgatctggtcccggccgaaccgggactga

SEQ ID NO: 8024 - DNA, 177 bp, BradyrhizobiumColbertium
atgacggtcgacgttatcgaggaactgcgcgccgagctgcgcgactgcctgttcagccccgcggagcgcaaggcgctcgaagcgcaactcgccgagctgatccggcaacgcacccagccaaccacgttcggcgacgcatcgcccgccgatcagcggttttgcaccgccggggcatag

SEQ ID NO: 8025 - DNA, 258 bp, BradyrhizobiumColbertium
atgcctcagcttccgccggaccctgtccatcttcgtcgtgtcgacgcagcccgcaatatgcggcggttctaccttctgtccttgcagccaaccctgttcggcggcgtggcggtggtccgcaactggggccggatcggcacgagcggtcagacgatgatgcaaaccttcgacgacagcgcgagagccgacgaggcgtttgactggctcgagcgaacaaagcgacgccggggctatgccccggcggtgcaaaaccgctga

SEQ ID NO: 8026 - DNA, 141 bp, BradyrhizobiumColbertium
atgccagagaacgggccagaatgggagctgaatctggccggaccgacacgccaaatggctgatgctcgtcgtcggcgccgctacaacagcccccatcgagggatcgcgcgtgcacctgcaatcgacctatcaggaaaatga

SEQ ID NO: 8027 - DNA, 414 bp, BradyrhizobiumColbertium
atgccgagccggattccactcgacccgaaactgcccaaggcctttgacgcgacgccgaacgaagcgcggagcaaggcacagctcgatcagtggtgggatcgtccctacggcctcacccgtccggatggtcgcatcgaggttcggtgcctgaacggcggagcatgggaccgctcgacccatcttggcattgcggatgactatgatgctgcctgcgcgttggccgaagccaagcaggccgaatggctgcggttccgcgagcacccccgtacctgtcttgacgaaggccgggtcacggtgatccggcagccgcagcggcccgacgaggagatgctggaactcgcttcgttcgcgacggcggaggcggcgaccgagtacctgcgcgccaatttcccggaaccatcttcctcgcgataa

SEQ ID NO: 8028 - DNA, 162 bp, BradyrhizobiumColbertium
atgccgcacgaagctgcgcatgcgaaccgacgaacagatcatcttcacggccggcaagccgccgctgcgatgcggccgctgttttcaccgacgcacgcctgcatgtcggcgcgtcagaaccagatggcgaggttctaccggaaacaaggctccgggacttga

SEQ ID NO: 8029 - DNA, 174 bp, BradyrhizobiumColbertium
atggcggccgcggtgcgacgagcaaatggttcgaaagcggcgtcctggatctcgttctcggcgatcaacgatcccgagacagcggcctatatcgatgcccgcggcgacgcgaccttggaggtcgatcggctcacccagtcctcgcaaatgtcaggttcgtcgcggacacgatag

SEQ ID NO: 8030 - DNA, 807 bp, BradyrhizobiumColbertium
atggatgaaacgggcgcagatggttgcaccaaggtcgacccggtgaacacgatcgtcatcaacaaccagaagggcggcgtcggcaagacgacgcttgccgtgcatctggcctggtttatggcggaagcgggccgccgggttctgatgatcgatgttgatgcgcagggcaacgcgaccgacacgctcaagcagcatagagggtcaatttcggcggcggacctcttcaagccggcgacccggtttgtcgctggcgaaaacaacggcatcacactggcgccggccgacagctcattgacggatatcgatcgcggcaatgctgcagctgtcttgaccctgcagcagaatctcgccgatgccgccgcccggttcgatgtttgcgtgatcgacaccccgccatcgcttggccttcgcagtgtcgcttgcctggtcgccgcctcgcacgtgttggcgccgatttacctggaagattattccgtaaagggcgtcaaagccctgatgcagaccgtgatcggtgtgcaacgacgctacggtcgtcaggacacgcgattcctcggcctgctgccgtcgaactttaataccaagtcgccgcgtcaacgaacacacttggagcagttgttgcgcgaagcgggcaagtacgtgttcccaggccagatcgttgcacgggacggctatgccgaagccgttgcggaacgggtgccggtgtggagcttgaagcgtcgctcggcgcaagaagccggtcgggaaatccgtgcggttctcgctaagatcgtagaacggctcgatcaggagacgacgaatgacgcttga

SEQ ID NO: 8031 - DNA, 984 bp, BradyrhizobiumColbertium
atgacgcttgatttcagcttcaaggagctcgtcgacgtcgcggcaaaccctagcgcagcagccgggcggccgctcttggtcgcgattgattgcattgacgaggatcccgatcaaccacgccacaccttcagcgaacaggaactggaggagctctcccaatcggttgccgaacatggcgtgctgcaacccgtcgtgcttcgccgttgtagtgaagatggacgctacgtcatcgccatgggcgcgcgccggtaccgcgctgcgcggcgcgcagggctgcgtgaaattcccgccttcgttcaagacgtcgcttcacccgaccgatacgctcagatgatcgagaatatccagcgcgatgatttgcgtgcgcctgagatcgccaggttcatcgcagaccgattgaacgccggagatacccaggcggagatctcgcgcaagctcggcaagccaagagactgggtatcgcgttacgcgtcggttcaagccatgccggacttccttcgggcgcgccttgagggcagctcgatccgtgctctttatgaactctaccaggcctggcgcacgcatcctgacgagatcgaacggcgatgcgcgacgcaggacagctttaccgacgcacaggctcgacaactggcccggggcgttcgcggggagggcggccgcgccaatccccggatcgaatttccggttgggcgacctcgatccgaaaactccgatcccctcccggaagcggtgcttccgcgcaacgctgtgaaagaccgcgaagcggcaacggaggatcagccaaaaactcgcgtcgtttcacaatcgagatcggcagcatcgctggcgatcagggttcggtaccagaaccggctcggacagcttgttgtcgatcggctcgcgacgcaaggctcacgtcacgctgtggtgttggtcgacggcgcggaccacgaacaagaagttccagcatcggcgcttacaatcgaggagatcctgtcgagatga

SEQ ID NO: 8032 - DNA, 528 bp, BradyrhizobiumColbertium
ttggagcgcatggctctgatctcgcttcgcgtctccgacgaagtcgcggcgcagttctccgcttttgcggctacccagggcggcaaatccgcgctgctgcggcgtctcattgctgatgcactagctgcaccagagccgcgcatcttcgcgttgccggtcggacggccggaaaaggtgacggtgcgatttcgcgagagcgagatgcggcagctcgcggaagtttcacatcagcgtggcatgacccgcaccggctggattgccgcgttggtgcgctcgcggttgggatcgcctgtgcagcattccccggacgagcattccgcgctccgcgcggtcgttcgcgagctcaaccagatcgggggaaacatcaaccagatcgcgcgtgccgcaaacatcagtgtactgcagggcagggcggttgagcccgatctgtccgcaattcaagaggccaaatgggtcattgaaagagagctcgcgcaattgcgtaacgcgttgaatggcaacgcggattattgggatgggcggcgatga

SEQ ID NO: 8033 - DNA, 1077 bp, BradyrhizobiumColbertium
atgagccgacgcgccgcgccgcggccggccgacctgacctccgaacttccgccgatctcgtatgtctgggaaacgcccaatcggcgcccacgacgggccgagtgggatatccccgatccggccggtcctagccgccttacgccggcgatgcgtgcaaagctcgaacgcatcgtgcgccgagcaccagaggtgatggtcaagatcaccggtcgcaccaagggcgtggcgcatctcaagtcgcacctctcgtacatcacgagaaacggcgagctcgatgcggaaacagagcagggcgcgacactggcggatcgttccggattgaaagatctgcagcaacgctgggaggatgatgccggtctcgacgacaagcgccgccgcgatgggtcactctcggtcaacatcattctgtcgatgccggctggcaccgatgccgtcgcagtcaaggattcagcccgggcatttgctaccgagacgttcggctacaatcacgactacgtcttcgtccagcacctcgacgacaagcatccccacgtgcacttgaccgttcggtccctgggtcatgacggcaagcgcctcaacccgcgcaaggcggatctgcaagcctggcgagaacggtttgccggcgaactccggcttcgcgggatcgcggcggaggcaacgccgcggcgtacccgcgggcgggttcgaaaggccgatcgcggcgcggtgctcgctttacgcaagcgaaaaatcacgcccgatgtcgatcggctcgctcgtaaggaggtgatttcggaggttaggggcggcagtactgccaaacatccttgggacgagcagaccaagtcacgtcaggacgcgatccggcggcgatatctcgactatgctgctgagctgcagcgctccggcgtggcagcggatcacgagttagctcgccaagttcggcaattcgtcaacgacatgcctgccgtcgaaacccgccgtcatgcgctgaagaatgagctttcggagcttgccagcagccggcgtcgcggggcagagcaggcgggccacgttgaccggcgcgattacaaacgagacggtgaacgaacaagataa

SEQ ID NO: 8034 - DNA, 300 bp, BradyrhizobiumColbertium
atgtcccgccgccaccaattctcgaaaccccacggcttttcgttgatgcgcgtctttcggcgaaggcatgcgggcaagcggtcttccgcgctccaacctcatctcaccaccaagctcgccgccgaatccaagtcctatgcggaggcttggggtcgcatcgacggatcgctgaagacgcttggcatggatcacattgacctgatgctgatccacagcccacaaccttgtaccgaattcagcgacggcggtcacttcgacggatgcaacctggacgtttcgcctcccgctgcgcatcggtga

SEQ ID NO: 8035 - DNA, 912 bp, BradyrhizobiumColbertium
atgccgtttagcgaccagtatcgcagacaggtcactctgctaatccgcgtcgtcccgctggtcgcgcaggaagactgctttgcgctcaagggcgggaccgcgatcaatctcttcgtccgcgacctgccccgcctgtccgtcgatatcgacctcacctatctgccggtgcagccgcgcgaccaatcgctcaaggagatcgaagccgcgctcaggcgcatcgccggccgcatcaaggcgcaaatcgccgggtgccaggtcacggaaggctcggccgaacgccgcgtcaacaagctgttcgtccagctcggcgccgcgaccgtcaagatcgaggtgacgccggtccttcgcggctgcgtctattccgcgaaaacgcaatccgtgaccgcgaccgtcgaggacgaattcggcttcgctgaaatccaagtcgtctcgcacgccgacctctatgccggaaagctggtcgcggcgctcgatcggcagcatccgcgcgactttttcgacgtgcgcgctttgctcgccaacgagggcatcaccgacgatctgcgaaaggccttcgtcgtgtacatgctcagccatcaccgaccgatggcggaagtcctcgatccaccgcgccgggacatgaaggacgactacgaacacggcttcgtcgggatgaccgaagtgcccgtccccctcgccgaactggaagagacgcgcgaggtgatgatcaaggctatcgtgggcgacatgccggacgcgcaccggaaatttctggtcagcttcgaacagggcatgccggagtgggatctgctagggctgcccggggtgcccaatcttccggccgtcaaatggcgccagctcaatctcgacaagctctccaaggaaaaacgtgaggcgctcgtagccgcgctggaaaaagcgctcggcgtatag

SEQ ID NO: 8036 - DNA, 735 bp, BradyrhizobiumColbertium
ttggtcagcaagtatgtcgcggccggctatctcgaacggccggccggccgtgtgtaccggaagccgcgcggcgccttgagctgggagcaggccgtcatatcccttcagacacttctttaccgcacgccgctggccgtcggcgggcgaacggcgctggcgcttcaaggctacgagcattacctgcctcgcgtcacgcaacaggtgcacctctacggaccatccgcgccacccggttggctctcgaagcttcccctctccgtccacttcgtcttccacaacagcaccaggttcttctcgccggaagcgagcctgccgccccaaggcgatctcaaccgcgcaaacgtcgcggccgagaaggaagcggccgaaaagggcttcgtcatccagtcatgggggcaatggcgctggccgctggtgatctcttcgccggagcgggcgctcctcgaagtgctcgacgagcttcccgatcacgagagcttcgaggccgtggacaagctggtcgagagcctctcgactctaagccccaggcgcatgcagacattgctgaaggcgtgccaaagcgtgaaggccaagcggctgttcttcttctttgccgatcgccattcgcatgcctggaaaaacaagataaacaaggatcacgtcgatctcggaagcggcaagcgcatgctggtcaaaggtggcgtgttcgaccgcacctatcaaatcaccgtgccgaaagggctcgatgccgtttag

SEQ ID NO: 8037 - DNA, 483 bp, BradyrhizobiumColbertium
gtgctgtacacgccgaccgaggtgcgcgagctcactccagtccgcgaggccgttgagaagcaagcgacccttgaccttcgagatatgtttctttgccatgcgtgggacgaccggcagggcgcagccaaacaattgcacgatctgcttgaggcacgaggcgtcaaagtatggttcagcgaaaaggacgttggccttggcgttccattgatgcgcgccatcgacaagggcctggcgaactcgcggattgggatcgtattggtgacccctgcgttgctgcaacgcctcccaaaagagagcatcgccgacaaggagctttcggtactgctcgccggtgcgcgcatcgttcccgttgtccaccagacgacgtatgaagctctcaggaacatcagccctatgcttgcctctcggaccggtctcgacactgcagaagagtcgatggcggacgtcgccaccaaactcgccgagctagttgccctcccttag

SEQ ID NO: 8038 - DNA, 210 bp, BradyrhizobiumColbertium
atgactaagcactgcaatagcggcctggatgatcgctgccgcgaccaggatggcgagattcgccagaagcgtggcgacaccctcgtgggcactctgcgcaagacctacgggcccgacttcgcgcccagcgtccgcagcgacatgcgcctcgacatgctgcgtgaacgcatgggcggcgcatcgctgtcgcagattgtcaaaggcaagtag

SEQ ID NO: 8039 - DNA, 327 bp, BradyrhizobiumColbertium
atggcgctggcttcaaaaatcaaagaattaagactcaaaaaaaagaagtcacttcaagatgttgctgatgaggtcggcgcgtcgaaggcgcacatttgggacctcgagaccggcaagagcagcaatccgtccatcgagcttctgaccaggctggcgaaatgcttcgacgtcagcgtcgccgacttgatcggcgagaatccgacaggcgagggggccgatccgcaggtcgtggccatgtatcgtgagttgaacgagctgagtcctgccgaccgccaggccattcaggccatgatggatcacctgaagagccgcaagcccaaggggtag

SEQ ID NO: 8040 - DNA, 873 bp, BradyrhizobiumColbertium
atggacttggccgacacgggctcaccgatgggcctcgtcaccaagatactgtccgtcgagaagggcctgccgataccggtgccgattgaagagctggccaagcagctcgatatcgagaagatcgcgccgcttgagaccgagggctttgaaggcggccttgtgaccgacgacgcccgttcgactggcttcatcctcgtcaaccgcgcggcgccttctgggcgccgcagattcaccatcgggcatgagctggggcacttcttaattgtgtctcacaagccggtagagcccggcaaattcctttgctcacgggccgacatggcaaaatggtcggccgaccagggcgaccgctatgctcgcatggaggccgaggcgaacgagttctccggccttctcctgatcccgccgccgtcgctgcggaaattcatcccgaagggtgatccgacgcttgcacacatccctctggtcgcgaaacatttcgacgtcagcaaagaggcggccgcccgcgcctacgcccgctatcaccccgaacaactggccatcgtggtgatcaaggacggcatcgtccgacgcgcccacaagggaccgacattcccatggatttcggcagcctacggcaagcccgtgccgcgggcatctagcttctacgcgaaggatgtgcgccagcgcgtcgccagcgaattgtcatcgatcattcccgagctttgggtcgacctcaagcaagggcaacgggcggagctcttcgagcaggtgtatcctcagcaggacggatatgcgctgttgatgctctggctcgaaatcgaggaggccgaagaggcggatgatgaccggacgtcgacgcagcgcttcagagatcagcaggcgcgctggcgctag

SEQ ID NO: 8041 - DNA, 1029 bp, BradyrhizobiumColbertium
atggccggcttcgaggacactcggctttttccgtactacctcaacagccggcgccttggcttgctcgctgacgtcaatttcgcagtcgaagcgcaaaaccccctcgtcgaaaattcgggcgaacgggtactggcaatgagagacgttaccgccacggctcaagagctgctgcgacacggtaggtttccaaatctcaccgaagttgttgccatgaaggacgtcgaaggcaaacgcgtcctgggtttcgtgtggggcgtattttcgttttccggcgcagccgaggcaagcaggcgggcgcaaaaaggaaagctgcccaagaacgcgaccctaagaggaaacatacctctggcgacaaccgaatacgaaatgtttggcgaaatgagcaacgagcatttcttctcggacacctcggtcggggtattgaagggcaagaagcgcatgcttgttgccggccacttcgaattcaatggtcaaaaggccgaagtctttccttacatcatcggcgaagagattgaaggcgctgtccttcccatgcccatcgccacatcgatccgcatctatccgcagcaaattgaccaattctcacgagttgagcagaggccgcagccaacagccgctgacctcagagcaatcgagagcatgcccgaagcagcggtcaaacaggccttcgccgacatcattggggagccttacgtgtcgaaggattggggtggcgagaaatccgacctgcagaccgcgcgcttgacgatcgacgacaagccgacgtcggcagcctttatctttaaaggaccgtccgtacctggcccactccatcccggcaacatgggcaaacgcggcgatcagctcatccgtgcgttcgaagagccggtcgatctaatcgtggtgcagcactgcaacaaaattgagaacacagtggttcgagtcacggagagccttgcttacgatccgcgccggccacgacggtactgcatcatcgacggtgccgagacagcgcaaattttgtctgcctacggcaagctgaacggataa

SEQ ID NO: 8042 - DNA, 969 bp, BradyrhizobiumColbertium
gtgagcaagcgcgccttactcgtcggcatcaacgagtacgacaacgtcacgccgcttggtgcctgcgttgcggacgtgcaggctatggacgagctcatcagctttcatgcagatcagtcgaggaacttcgacacccgtctgctgacgagcccgggcaaacagcgcgtaactcgggcgacgttgaggacggcatgggacgatctctttgccgggttcaacggtgatgtcctgttctatttctccggccacggcgcgaccacgtcgacgggcgcttacctagtcacccaggagggtagcgagggcgatcccggtctggccatggatgacctggtcaatctcgccaacaaatccaaggcgagtactgttcttctcatcatcgactgctgcttcagcggttcgaccggcaatatcaatccctttcagaacggcgggatggaaaaggtcctgctgcgagagggcgtaacggttcttgcggcgtcccggtccgacgaaccttctatggaggtcaacggtcacggcgttttcacgaacctcgtgttgggcgcgttgcgtggcggtgctgcggacgtccgcggccgggtttccgcggcctcgatctatgcctacgctgaggccgcgctgggagcttgggatcagcgtccgctgtacaagtctcacgcggcgcatcttgagcccgtgcggctttgcgaacctaaggtcgaccatcggacgctgcgcgagctggcgaggtatttttcagggccggagcacgagtatcaactcgatccgaccttcgaagagaccaacgtcggggcggcaaagcccgagaacgtcgccatcttcaagaagctgaagcagtatcagatcgcgggcttggtccggccgaaagtcggaacggatctgtattggagtgctgagcggtcgggctttgtgcttctcaccgacctcggaaagttctacctgcagcttgttcagcggggtcgactgtag

SEQ ID NO: 8043 - DNA, 387 bp, BradyrhizobiumColbertium
atggcaacaaagaacagaattttcatcgctttcgccgtcgaggacaaatgggcccgggactacctggtaggccaagccaagaacgagaagagcccattcgaattcgtcgacatgtcagtgaaagagccctgggacgaacaatggaaaacaaagtgccggtcgcgcatcaagggctgcgacggcacgattgcgttggttagcaagaacaccaagaacgcggccggccagctctgggagatcaagacgtcgaaagaagaaaaagttgccgttcgcggcatctacacaacgtcagatgagcgcccgacctccctccccgccgagctttccggcgtgtcggttgttgggtggtcctgggccaacatcaaagcctttctcgacaaactgtga

SEQ ID NO: 8044 - DNA, 540 bp, BradyrhizobiumColbertium
gtgacgcgcctgttctcgcatgcgctcttgcgcgagctggatgtcggttctgagctgtgggccgtttcgcgcgggctggcgcgactcgtcgccgattacaaggccaacctacaggcggctgacgaaccgcgacgcggcgatctcgatgggcgcggcaatctcacgatggccgggctcattgatttctgcaaattcttcctgacgacctgcgtcgatcaggttgacttcatggccgggcttctggagccagaagaactcctcaggcgtatggagatttggacagaagaggaaacccgcgcaaaacggctgccaaagggctcctggcctttactgcgtgaagccgtcatggctggtgagtacgcgcgaggccacgcgccggcactcacgggctatgaagagcgacaggctcggaccgtcctcaatgcacttattgaaaagggctacctggtctcgccgaccacgcgctcacctgtgaagctcgggtttccgacagccctcgtcgatcgatggtttccaagactgtatcaacctgccgtctaa

SEQ ID NO: 8045 - DNA, 327 bp, BradyrhizobiumColbertium
atgaacatgatcggtcaaaagagcctgctggtagccttcgccttggctcttgctctgagctactcggcagcggcttccgcgcaacacgccccggatgcgcacgcgcagcaaaatgcgcccgctcagcagacgatgccggcgcagcaaggccagggtatgggccatgatgcaatggaccacggtaaaatgggcgccaagggaatggagggcgaacacggccggatggggtccggaatgaagcaaggcggtgccagcgatacaaccgccacgaaaggagccaacccgccggcaaactcgaacgcggcgccgcccagcggcttcaagtaa

SEQ ID NO: 8046 - DNA, 144 bp, BradyrhizobiumColbertium
ttgatcggcgaaatcaattttgggtggagtgatcgccttttcacattcgttaattgcttgctccaggatgccgacgacatcggaaaaacgatgcaaccttcttcgaacgaatcgccccacatcgcgaattcgatgtcgatctga

SEQ ID NO: 8047 - DNA, 654 bp, BradyrhizobiumColbertium
gtgagcgacgaggttatgagtcaatatcgcgactttgtgcaatactggccgtatgcagtgctcatgatcttgttggtgtcgtgggctctctaccatttcgttgccccggccgatcgacgcgaatgggtgggtgcaggtctgctgcaggccttcattattgcactctacggcgaaatgtacggctttcctctgacaatctacctgcttacgggttttttcggtttggacattccgctggcccacgttagcgggcatctctgggcaacgctactcggctacgggagcgttggcgcactggtggaaatggcgcttggcgtcagtgtgatgctggtgggcgcgcttttgattgtgaagggatgggtgaagatctacttcgccgctggtcgccttgtcaccgatggcgtttacgggctgatgcggcatccgcagtacacgggcatcttcctggtcatccttgggcagctcattcactggccaaccattgtgacgctgctgctctcgccggccatcctcgccgtttatgtacgtttggcgcaccgggaagaagaacagctcgttgaacggctcggcaatgcataccggcagtatcgccaaagcgtgccaatgttcgtaccgagaggtgttgcgctcaagtcaatgttcaccgccggctaa

SEQ ID NO: 8048 - DNA, 483 bp, BradyrhizobiumColbertium
atggagccgatgacgatcgggcaggccgcccagcgttccggggtgccgccaaagaccatccgctattatgagagcgtcggcttggtcggcccggcggctcggggagagaacaagtaccgcgcatacagcgacaaggaagtcgaggtcctgcgcttcatcaaccgggcgcgaggcctgggtttttcccttagcgagatcgagcagctgcttgctctctatcgcgatcgcaatcgaccgagccgcgaggtaaagcgcctcgcgctgctccacatcgacgatctcgaccgcaagattgtcgagctcgagaccatcaagcaggcgttgcagcacctggcggagaaatgccgcggcgatgacaggcctgactgtccgattcttgatgatcttgggtcaggaacttcggcaccagtcacggcatcggcacgagaccgccttctatcttcgcacagtgcaaccatcagacgcccagggaagagaccatag

SEQ ID NO: 8049 - DNA, 1890 bp, BradyrhizobiumColbertium
atgctgccgggctggctgcaacttctgctcgcaacgccagttcagttcgttatcggctggcgcttctatgtgggcgcttggaaggcgttgcgcgcccgcaccggcaacatggatctgctggtctcgctcggcacgtcggccgcctacttcgacagcctttacctgatgctcgccgggcctgccggcacacacctctacttcgaagccgcagcggcggttatcgccctgatcatggtgggacgctggctggaagcgcgcgccaagcgctccacaaccgccgccatccaggcgctgatgtcgctgcggcccgagcgggcgcgcatcgaacgcgagggcggcgacatcgaaatgccggttgcggacgtggcagtcggcgacgtcatcatcgtgcgtcccggcgaacgcatcccggtcgatgcggttgtgctgtccgggcggagcgaagtcgacgagagcttgttggctggagaaagcctgccggtggcgaagcagactgacgacaagatcaccggcggctcgatcaacggcagcgggttgttgcgggcggagacgaaggccgtcggtgaacaatcgatgctgtcgcgtatcatcgccctggtcgagcatgcccaggcgaagaagccgccaatccaacgtctggtcgaccgcgtctccgcggtgttcgttccgatcgtgcttgccgtcgcgcttacgtccttcctcggctggtggctgatagccggcgacgtgaccgctggggtcgtcgcggcggtatcggtcatggtgatcgcctgtccatgctcgcttggccttgccactccgacggcgctgatggtcggcactggcgcagccgccagagctggcatcctgattcgggatgccgaggcgctcgaacgagcgtacaggctcgaaaccattattctcgacaagacgggaacggtgaccgaaggcaggcctgccgtgaccgagatggtcgcctgcgacggagacgaggaccagttgctcgggctcgccgccgccgcgcagaccggcagcgagcacccgctggccaaggcggtgctgacgaaggcaaaagatcgcgagctgccgaagctgatcgatttccagagccacgccggcctggggctgacggccaacgttgatggtcgggtgattgtcatcggcaatcgccggctcatggccaatcaccatgtgagccttgagccgctcgcaacgcgggctgtcgagctcgaggagcgcggtcgcaccgtgatgtgggttgccgagcttgcgccggcagtgcggctgcgcggaatcatcgccgttgccgaccccgtgaagccgaccgcgcgcgaggcggtgcgccatctgcgcgaaatcggcgtcgacaccctgctgctgaccggcgacaacgaacggacggctgcggcggtagccgctcagcttgggatcgaccgcgtgctcgccggcgtgctgccgtcagaaaaggccgccgaagtgcagcgccagcaagcgcaaggcaagcgcgtcggcatggccggcgacggcgtcaacgatgcgccggcgctcgccgccgccgatgtcgggatcgcaatgggcaccggcgccgatgtcgcgatggagaccgcgggcatcacgctgatgcgcggcgatccgctgctgatcggtgatgccatcgcggtaagccgcgccacctataacaaaatccggcaaggcctgttttgggcgttcatctacaatgtcatcggcctgccgcttgctgccttcgggctcctgagcccggtcgttgccggcgcggcgatggcgctctcgtcggttagcgtggtcacagatgccttgttgctaagacgctggcgaccggctgcgaccggtcgacatgcaatgcgctcggatcaatcgctcgcaccagccccgcaaattggaggatcgtga

SEQ ID NO: 8050 - DNA, 276 bp, BradyrhizobiumColbertium
atgggcaaaccaatgagcatcgctgaagcggctgctgctgatcgcacgcacgtcactcttccgatcgagggaatgagctgtgcaacctgcgtggggcgcgtcgaaaaggccctttcggcgctcccgggtgtgcaggccaccgtcaatatttcgaccgagcgtgccgacattgagttcgatcgcaggcaattgacgccggttgcccttgcccaagcggtcgagcaggcgggctacgagttccccgcgagacgcgcgaactcgccatttccgggatga

SEQ ID NO: 8051 - DNA, 834 bp, BradyrhizobiumColbertium
atgccgcccctggacacggtgatgatcacgggaagcagcggcttcatcgggtcagccctcgtaaacaagcttgcggggcgtttcagactcgtcggattcgacaagatcgcaagtcgaacaccaccgcctgctgccgagtgtgtctgcatcgatctgacgaataaggatgcaattgaggccgcattcgagcgcgtgcgcatcgcctacggcgatcgaatctgctccgtgatccatctggccgcgtactacgacctctccggcgagcacagtccgttatatgagcagatcaccgtacggggcactgaacgacttctggagcagctcaagaattttcaggtcgaacagttcgtcttttcgagcacgatgctcgtgcacgcgccgaccgatcctggccagcggatcagcgaggaatccccgatcgatccgcgctggccatatccgcagtcgaaggtcgaaaccgaggctctcatccgagagcagcacggcaacattcctgttgtcctgctgcggctcgctggggtctacgacgaccgctgccactcggcgttcctgtcgcaacagattgcgcgcatctacgagcggcaatggctcagccacctgtttccaggtgacatccgccgtggtcaagcttccgtccatttggatgacgtcacggacgcgcttgctgcattgatcgccaagcgaggcgaactgccaaaggaatcgaccctgctggtcggcgagccagagacgctgagctacgacgaagtgcagcgcctcgttgggcgcctcctccgctggcgtcaccctgatgtcggcgcccccctcccattgggacgaaatgatgatgggtaa

SEQ ID NO: 8052 - DNA, 276 bp, BradyrhizobiumColbertium
atgggtaacggctggctcgaatgcctcgtatccattccgatcatcgcggtcgtgcccttcgcgattgtaatgtgggcggttcgaatggccgcgccgaccaatctgacgaggaccggcgctttggccggtctggtggcgggtagcatcagtgccgtcgcgtacgcgctgcactgcaccgacgacagttttccctttgttgccctctggtacgggcgaacaatcatactctgcaccctggccggcggcgcgcttggacctcggatattgcgttggtag

SEQ ID NO: 8053 - DNA, 132 bp, BradyrhizobiumColbertium
atgggtgctaccgcgtatgcgcttcatggcaccggcgaccagtttccttacattgcgctttggtacagtggaacgctggcgctatgcgccctcgccggcgcagtcctcgggccgaagatgctgcgatggtaa

SEQ ID NO: 8054 - DNA, 231 bp, BradyrhizobiumColbertium
atgttttcaatcgccgatctcttcgaagccgttcccatgcccgaaatctttgaagaggaagaatggatcatcctgactattggcctgtggatcgcgatctgcccgtggatcctcggcttccatggggacgtcagcgcgagtaatgtgcactttgccattgggctaatcattgctggcctcgcggctgtggagctatggtcgctgcgccacaccccgcattcaaaggtgtga

SEQ ID NO: 8055 - DNA, 1881 bp, BradyrhizobiumColbertium
atgctggtcgctctggtgttctgcggcgcagcgagggccacgacgagcgatgtcgaaaccacgtggcgactgttggattacatcgcggtggattacgccggcgccgtgtcgcatgggtcggtctcaagtccttccgaatatgccgagcagaacgagttcgcggcgacgattgccgcaaaggtccgtgcgctcccgccgaagccggaacggcaagcgcttgcgacggaggccgcccgcctgcagcgcgccatcgcagacaaggctgatgccgagcaagtcgcaggtatagcgcgcggcctggcggcggcgttgctggcggcctacccagtgccgctggcgccgaacaaggttccggacttcacacgcggtgcgacgttattcggccagaactgcgccgcctgccatggcgaggccggggacggccatggaccagatgccgtcaagcttgatacgccgcccatcgcgttcacggacgccgagcgcgctcgccagcgcagcgtgttcgcgctctaccaggtgattacccaaggtctcgacggagccgcgatgccgagcttcgagggtcttccgaccgatgatcgttgggctttggcgttctacgccggtcatttcgccttccccgatcccgctgtggccgaaggcgagcggctgtggaagcaggacgcctcgcttcgccggctcgttcccgatctgaagacgcttgtcggcacgacgcccgcagcgctcgcgagcaagatcggacaggacaaggccgacgctctcatggtttatttgcgtcgtcatcccgaggcgatcacgcagcagcaggccggatcgctgtccctggtgcgcagccgcctgaccgagagccttgccgcctatcgtgcgggagaccgccagcatgcgggcgaactggccttgtctgcctatctcgatggattcgagacggtcgaaccgacgctgggcgcgcgtgatcgtacgcttatggagcggatcgagggcgcgatgggcgactaccgcgccgctatccagagcggagaaaatgccgatgcgctcgccgatcgcgtgcaggtcctcgacgaactttttgacgatgcggaggcatcgctttccccggacgccgcgagcggcctgtcaacgtttctcggggcggcgacgatcctgctgcgcgagggactggaagcgctgctgatcgtggttgcgatgatcgccttcctccgcaaggccgaacggacggaggtcatgccctacgtccatgcgggttgggtgggtgcgctcgtcgccggcttcgtgacctgggtcgtcgcgacctgggtgatcgggatcagcggcgcgagccgggagctgacggaggggttcgggtcggtcttcgccgctgtcgtcctgctctcggttggcatctggatgcacggcaaggcacaagccgaccaatggcagcgctacattcgcgaaaagatggcgaaggcgttgtccggcagttcggcctggttgctgtttgggcttgctttcatcgtcgtctatcgagaagtgttcgagacgatcctcttctacgcggcgctgtggagccagggaaacggcgctacggtactcgccggagcactgagcgcgtgcgcggcgctggcggtcatcgcgtgggccatgctgcgctatagccgccggctgccagtcggcaagttcttcagttacagttcgtggctcatggcggttctgacggtcgtgctggccggcaagggtatcgccgccctgcaggaggccggcatcgtcagcatcgcgccgctacgctcggtgccacgcatctcgttggttggtctattcccaaccatgcaaacgatcgcggcgcaggtactcatgacggcggctgtagctattggcttcgccctcaatcggcgaagggccgcatag

SEQ ID NO: 8056 - DNA, 219 bp, BradyrhizobiumColbertium
atgctgttccaaataggtgactatgtggcgggcgcggtgatcggcatggcaaccgcgctgctcgttcgccttgtgatctggcctggaacggacatggtggtcgcaatgctgctcgggatgggccttggcacgatcgtctcgctgctcctgagctacttgctcgcgccgatgcttggtattgttgagactatggtgccgggatcactgacagggatgtga

SEQ ID NO: 8057 - DNA, 606 bp, BradyrhizobiumColbertium
atggatgttcaaacgcaggagaaatgggatcgcgccagccggacctacgacttctttggcgcggtcgacaacaagcgtctcgggttggaaaagcaaaggctgcttgccaaggcgcagggcaagacgctgcatgtcgcggccggaaccggcaacgatttcaagttctttccgcctggcatgcacatcgtctcgatcgacatcagccccaagatgctagcgcgggccaaaatcaaagctgcgacctacaacgggacaatcgagcttcgtgaagctgacgttcacagcctcgattatccggactcgactttcgacaccgtcgccacagtttttacgttctgttcagtacctcagccgatcacgggtttgcgggagctttaccgcgttctgaaatcgggcgggcgaattttgatgctcgaacacgtccgcagcacggccattggcccgctcggcatcatgatggacctcatgtcgcaactgacgcgacggttcgggccggagctcaatcgggataccgtcgcgaatgtgcaaagggcaggcttccgactgcgtcgcgttgaaaacatttaccccgacatcgtgagaagcatcgaggctgtaaaggattag

SEQ ID NO: 8058 - DNA, 564 bp, BradyrhizobiumColbertium
atgtccatttccgcatggattattctcgccgtcgtcgtggtcatcgtgctgttcgggtttgtgagctacaatcggctcgttgcgatgcgacagcagtgcaatcaggctttcgccgacatcgatgtgcagctcaggcaacgccacgaccttatcccgaatctcgttgagaccgtgaagggctatgccagccatgagcgtgacacgctcgacgcggtggtgcaggcgaggaacgccgcggtggcggcacaggactcagcgacaggggcagaggccgaatccatgttgggcggtgcgttgcgccaattgttcgcgttggcggaggcttatccgagcctcaaggcgaacagcaatttccagcaactccagagcgacctgaccaaaatagaaaacaggcttgccgcagcgcgccgctcattcaatgccatggtgcagagatataacagtatgatccagcaatttccggtcgtgctgttcgcgcgcgctctcggctttgcaccgcacgagttctttggccttggcgatcaacgccgagcggtcgacgaggcggcacaagtgaagccttga

SEQ ID NO: 8059 - DNA, 1161 bp, BradyrhizobiumColbertium
atgaacgacaggcatgacgcgagcgaggaattcagcctggagcggcaacgtcgcgcggggcgcgtttccgcccgagaaaagggggaagacgagatagcaacagcccccaagaagccttcatccccggaggtaacagatagtgcatttccggaccgtatccggcggaaatattacgtagtggccagtgaatccgaaaaggatggttctgatgcgcggctctatgccgatgagcggaaagagtacctcgcgttcaaggccactgatgatcgcttggttacccgcatagcagccgcggaagtgatccgggacatggtcagcgtggcacagcatcgccagtgggaggcagttcacgtccgtggctcagtagagttccggcgggaggcgtggctcgaggctagcgcgcgcggaatagaggtgcagggctatcagccaaacgagcttgatcgtcaggcgcttgctgaccgacgaacggcatgggatcgagcccacgcccggaccaacgacgtaaagactcgctcggactccggcaagtcatctctaggggataggctcgattacgacaagggcgtttccgggcgtctgatggaggtcggttttggcccgtatcgcaaccgcgccgacgcggagccgtccacctatgtagccatcgaactggatgatggtcggcgacatcaggtgtggggcgtcggcgttgtaactgatgtcgcagacagtggcgccaggcctggcgaccgcatctctctgcgaagggatggcgtcgcacccatcatcaggtcgatcaagtccatagacgccgccacaggagccgctggcattgaacggcgccagatgtggcgcaacatgtggaaggtgacggtggaggaacgccgtgcagaccgaacggcggccgcgcatgattctgacctgctcgcggcccaatcccagattgtcgtcatcaacaagcttgtcgaacgcgctctgccgaacgacgagaatgctcgccagagcattatggccttcgccaaggagcgcatcgctcagcacctcgagaaggggcattcgtttgcgcgggcgacagtcatggagcctgttcgagagcgtcatcaagcaggccgcggcggggaaatggtcgctgaaagtcagagtggcgaacgcatgagaatgcaagagcgtgagcgttga

SEQ ID NO: 8060 - DNA, 1947 bp, BradyrhizobiumColbertium
atgaccccgttcgcaaacgcgaccacgcccgttaaggcggcccagggcacggcgctcgcgctcggggccgccgcagtctttctgttggtcgcctcgaacgttctgctgcttgggcttagacttcacgatggcggctttcactggtcggagatcgccacaggctggccccgttacggggaggacccgcgcttcgaccgttggctgacgctgtcgaccctcgccggcctgatcgtggtctttggcctgctcggcgccgtcctccggcaccggccgcctccacttcacggcaaggcccgtttcgcctccgagcgcgagatcggggccgccggcctgcgatccaaagaaggcctactgctcggccgaaaagatggaaaaatgctttgtttcggcggatcggaacacgtcctcctttatgccccgacgcgcgccgggaagggtgtcggctatgttattccaaacctgctcaattggccggattcggttgttgccctcgacgtcaagaaagagaactgggatcgttcggcaggctttcgcgccgcccacgggcaggaagtccatctgttcgacccactcgacgagaccggtcgcaccgcacgttacaatcccctgggctatgtgcgcagcgaccccgccgatctctacgacgatctgcagcgcattgcagtgatgctgtttccagctgaaagccgcggtgatcccttctggttcgaggcagctcgttcatcctttgtggcgatcggcggctacgtcgcggaaacgccgggcttaccattgacgatcggcgagatcctgcgccagctctcggcaacccagaatctcaaagcccacttcgacaagatcatcgccgaccgcaaggccggtccttccccgctgtcccggcactgcatcacggcgctgaacgacttcctcgcagcctccgagaacacgttgaactcggtccgcaagaccgtaacggcacggctcggcctctggctcaatcctcgcatcgatgccgcaacctcgagcaatgatttcgatctgcggcagctgaggcagcagcccatgtcgatctatctcggggtcacgcctgataatcttgaccgcatggcgccgctattgaacctgtttttccagcaggtggtcgatctcaacacccgggagttacccgaacaaaaccccaaactggctcgcaaactcctgctcttgctcgacgaatttccggcgttgggcaatgtgaatgtattggcaaaatcggttgccttcgtcgccgggtacggcatccgtcttctcacggtggtccagagcccggcgcagctccgcgcgatctacggggtcgatgctgcgcgcaacttcatgaccaaccacgccgtggaggtcgtgtttgccccgaaggagcaggacgtagcgaatgagctctcggagcgcatcggctacgagactgtgaacgcccgcagccgcagcggaccaaaagggctggcgatgcgcgcgatcagcgagaccgtttccgagcatcgtcgcgccctgatgctgccgcaagagctcaagcttcttccgaaatccaaggccttcattctcggcaccggcattccgccaatcatcgccgacaagatcatctattacgaagacaagtcttttctggagcgattgctgccggcgcccgtcccagaactgcccaaggggcgttcaaatgcgctgctggacgctgaactcaaggagctgcgctctgagattgccgagctacgagcagtattccgaaaacggccaatgaccgacgaggaggtggctgatccctccacgattcctgccgaggctagtttcgatttcggggacgtggatgtcgatctcgaaggcctatccgaagacgacctcaaagcctggaccctgaaatacatcgacgctcaggtcattccgccggcgcggcggacaggccgcaagcagacgagtgagcagcatgaacgacaggcatga

SEQ ID NO: 8061 - DNA, 1032 bp, BradyrhizobiumColbertium
atgagtcaggtcgcatccatcggacatgatggcgggcgtctggtgctggcgcgctatctcgagccgctggctccttacctcacggacgacaccctgaccgaaattgtcgtcaaccgtcccggcgagatcttcgtggaagggcctgacggttggacccggcatcaatcggaagcccttacgcaaacttacctctctcatcttgcaaccgcagccgcaagtcacacccgccaggacatcgggccggaatatccggtgctctcgaccagcctaatcggcgaggagcgctgtcagatcgttgtgccacccgccgtccctggtggcatgatcagcctcacgatccgcaaaccgtcaacgctgacgatgaacctggacgctctggagcgggtaagactgttcgatgaggtccgctccgccagtgacgagctggacgctgacgagcatcgactgctcgccctgaaagaggccggccaatggcgggagttccttgagcttgcggttcgcacccgccgcaatatcctgatctcgggggcgacgggttccggcaagaccactctgtccaaggcactgattgccgcgatcccggcgcatgagcggctgatcaccatcgaagacaccgccgagttggttatcccgcatcagaattgcgtccggctgctctatgctaaggatgggcagggagtagccaagatcggcccgcgcgaactgctggaatcgtccttgcggatgcggcccgaccgcatcttgctgcaagagctgcgcgacggcaccgccttcttctatctcaggaacgtgaattcggggcacccgggatcgatcacgaccgttcacgcggacagcgcccgccttgccttcgaacagatgacactgctggtcaaagagagcgcggagggacgggacctccaccgcgacgatatccgctccctcttgctgcacctggtcgatgtcgtcgtccagatgcagaagcggaacggacgttatcgtatatcggaaatctactatgaccccgttcgcaaacgcgaccacgcccgttaa

SEQ ID NO: 8062 - DNA, 1146 bp, BradyrhizobiumColbertium
atgaccgagcttgaacatgagacgcttgccggcgaacgcggaattactccggtgggaggaggggacaatggtcgaacggcgatgctcaagcgcggcttcggcgcgctcgcgctcaccgcattcgccttcctgattatctggggaacctggaaaagcgataagccggtcagcgagtccgcccgcaagctcatgatccgccaggcggcggcgttcgagccggccgcggaagcgcctgccgcgcccatcaccacggcatccattccggtcgcacctatctcagccacgccggcggccccggcgccggctcccgaccagatgctcgaaagcgcgcggcgcgcgccggtgctggcctacaatcggccggtcgcatcgggacgttcggcccgtgacgtcccgagtgcaggtgtccccgttgatccctatgattttggacgggccgagccacgcaatgagcttgcagacaagctgaaacctactccgatcgaaggcgtccgtgcagcgcggcttcccaatcgcaatcttctggtcacccagggcacgtcgatcccttgcgtgctggagaccgcgatgtcgtcggatgtggccggcttcgtctcctgtgtcgtgctgcgcgacgtgatgtccgattcgggcaacgttgtgctcatggaaaagggcacacaagtggtcggcgaatatcggggcaatgtccggcgcggctccaagcggatgttcgtgctatgggctcgcgccaagacgccgacgggtgtcatcgtggcgctggcctcacccgccacagatgcgctcggccgcgcggggttcgacggcgacatcgacacgcacttctgggagcgcttcggctcggcgctgttgttgtcaatcgtcggcgatgcctcttcgatcggacgccagcagctgcaagacggctcgatccagatcaacaacacggctggcgcgaccaacacggccgccggcatcgccgtcgagcagtccatcaacatcccgccaacgctgagtaagaatcagggcgagctggtcaatatctttgtcgcgcgcgacctcgatttctcgtcggtctaccaactcaagcggatcgaaagccgcacccagattctcgaccgcaccctccccggaggcatcgtcgggccggctacggtgacaaaatga

SEQ ID NO: 8063 - DNA, 852 bp, BradyrhizobiumColbertium
atgaaacgtttcgcgattttgatgactttagctctcggacttgccggacccgtgctggccctgcaacagccgacgccgggccaacacgatgcgcgcgtacgcaccgtgacctatgatccagccaatgtggtccgcctcaacggcgtcattcgcgcctctacccaggtggtctttgccgatgacgaggagattgcgcatgttgccatcggcgacgccatcgcatgggaggtcgcgcccgcgggttcgattctcttcctcaagccgcgcgaaaaacatccatcgaccaatctgcaggtcgtcaccacccgggccgacgggcgaaagcgttcctatcagttcgagttgtcgatcgccgagacgacgctcgcggacagctacttcgtcgtccgctttgcctatcccggcgacgagatcgagcgccggcgcgtcgaagcggctgcccggggcgccgagcgggaaggcgcactgatcgatcagacgtttgacctgcatcatgcctatggtgcgcgcaattggcgattttcggcccagggctcgatcgacctcgaacccgaagccgtcttcgacgacggcaaagagacgaccttccgcttcgctggcaatcgcgagatcccggcgatctacctgattaactcggacggctctgaaagtctggtgcctaaggatgttcgcggcgagctcgtggtggtccacgccacggctcgcgagtttcggctgcgcaagggcgagaccgtgctctgcatcttcaacgaagccttcgatgctgtcggcgtcaatcccggcaccaacaccacgagcccctcagtcgagcggcgggcgaagaggtcatctccaacccttaaggcgcgatga

SEQ ID NO: 8064 - DNA, 162 bp, BradyrhizobiumColbertium
atgaaagagacccgcaagggcgaggaaacccacattactcactgggtctcgaccctgaccttctcttacgccaacgcaccgatgtcgtccgccgaccgtctgatcaatccgctcggctttctggtttcggagtatcgcgccgatccggaggtcgtgccatga

SEQ ID NO: 8065 - DNA, 975 bp, BradyrhizobiumColbertium
gtgaagttctggacacggaaaaagttcaaagacaccgcgcagctcaagaagaagatcaacccgacccgcgttcccatcgagaagaaggaaagcgttcgctggctcgacaatctcaggcaatcgatcgagcggctcggacagccggcgcgttgcattcatattggcgaccgcgaaagcgacatctacgaattgtattgcctgacgcaagagcttggcgctcacttccttgtccgcgcctgcgtcgatcggctggcaggcgacggcggtcatacgattgcaaccgagatggaagagaccagcgtcaaaggcttgcattacatagacgtgcgcaacgacaagggtgagacgacgaaggccgcgctggaaatcaagttcaagcggatcgcagtcttgcctcccatcgggaagcagaaacgttatccagccctcgacctgacgataatccatgccaccgagcgcggtacgccaaagggccgtaaaccaattgaatggaagctcatcacggacctagccgtccgcagtcgctccgaagcaatcgagaagatcaactggtacgccatgcgatggaaaatcgaggtgttccataagatcctgaaatcgggttgcaaggcggaagactcaaaactccggacggcggagcgacttgccaatctaatggcggtcttctgcattcttagctggcgcgtcctctggctcaccatgctcaatcgcatcgccccagacgcgtcaccgaaactcgcgttgacggacaccgagatcgcgttgctcgatcgactcatcagcggcgccagccatcgacgatgtcgccctggaacccttgcattctacttgaccaaacttgcacgattgggtggctacctggccagggccgccgatccgccacccggaaatgttgtcatctggcgcggactctccagactcactgatatcgaactcggcgccgaaatcggagcggccggaaatgtgggtaattga

SEQ ID NO: 8066 - DNA, 843 bp, BradyrhizobiumColbertium
atgacgctcgcacccgatgtcctcgacatcgtcaacgacatgaaagcccgcggcgagccgttcgcgctggccactgtggtgcgcacggtatcgctgaccgcagcgaaggcgggcgcgaaggccgtcatcctcagagacggcaccatgaccgccggatggatcggtgggggttgcgcacgtgccaatgtgctgaaggcggcgcggcagtcgctctcggacggccagccgcgcctcatcagcgtgcagccgaaggatgtgctggaagaacacggactgaaagccggtgaatcacacgacggcgtcctctacgccaacaacatgtgtccgagccacggcaccatggatatttttgtcgaaccgatcctgccgcgtccgcagctttatgtctgcggcgcatcgcctgtggcggtggcgatcgcggccatcgcccagcgcatgggattcttcgtatcagtgtgcgccccagccgcggatcatgcgctgttcggcgataccgatcggcttgtggatggttatgagatccctgcggacagcggcggcaaccgatatgtcgttgtgtcgactcaggggcgtggtgatacggcagcgttgaaatcggctttggccgctcagtcaacctatgtcgccttcgtcggatcgcgcaagaaggcggccgtgctgaaggacgaactggctgccgcgggcgtgccgcccttgcaactggagactctgcgggccccggccggactcgatctcggcgcgatcacgccggatgaaattgcattgtcgatcgttgcggagatggtcgaggtgcgccgccgtggacaacggcgggcggaacaacaggaagaaggacatgtctga

SEQ ID NO: 8067 - DNA, 129 bp, BradyrhizobiumColbertium
ttggaggagcgtcagactccggcgatcaagcttgagatcgcgatcggtgatgtcgtgctgcggacggacacggccattgatggtgagcagctgtcccgggtgatccgtgcggtgcgagcgtcacgatga

SEQ ID NO: 8068 - DNA, 306 bp, BradyrhizobiumColbertium
atgatcgcggccggtgctgatctgaagatttacgttgcaatgcggccgatcgacttccgctgtggccaggatgggcttgcggcaaaggtgcaggagatgctccgtctcgatccgttcagcggcgcagccttcgtgttccgatcgaaacgagcggaccggatcaagattttggtctgggatcgaacgggcccggtgttggtgcacaagcgcctcgaaggttgcaagtttgtttggccaaggatcgcggacggcgtgatgcgaatgtcgcccgcgatgttcgctgccttgctcgagggcgcttgttga

SEQ ID NO: 8069 - DNA, 1521 bp, BradyrhizobiumColbertium
atgggctcagaactcgtcaaaccggatcacctggaccgcaaagcggtggtgtatgtccggcagtcgacgccacaccaagtgatcaccaatcaagaaagcctgaagctccagtacgccctctcgcagcgcgctcgcgatctcggatggcgcgaggcggacatcgatgtgattgacagcgatcttgggcagagtggtgctgccgcagcccacaggaaagggtttaaggacttggttgcgcgcgtcactcttggcgagattggccttatcttgtcgatggacgtgacgcgcctggcgcgcaattgttcggattggtacccgctgcttgatgtctgcgggcaccgccgttgtttgatcgccgaccgtgatggcatctacgatcccggaacgcccaatggccgcctgctcctcggtttgaagggaacgatctcagagctagaattgcacacgattaaaagccggatgaccactgggcttatggcaaaagccgaacgcggtgacttggccttgcaactgccggcgggccttgtccgcgatccttctggggtggtcaccaaggaccccaatctcgaggtgcaggggcgcctgttgctgctcttcgagaccttcctgaaggtgcggaccgccgcgcaagtgatgcgggcctttgttgcacgcggcttggcactgcctcgccgcgaccgccatggcgatttgcgctggcaaccggccactgtctcggccgtgacggcgatcctcaagaatccggcctatgcaggcgcctttgtctatggaaggacttggcagaagccatcccaaagaccgggagagcgtccacaaaaatctccgcgtcgtggaacggactggaggatcgtggtgagggaaaagtacccgacctatatcgattgggagaccttcgagaagatccaggcgatgctgcgcgacaatcgggcagagtaccagcacatcgagagccgtggcatccctcgtgatggagcagcattgctccacggcatcacctattgcggcgaatgcggacacaagatggctgtgcgttacaagggcggcagtcaatatgtctgcaatcatctcaaaatccagcgcggcgctccggaatgtcagaacctgcgggccgcaccgatcgacgcacaggttacagcggcattcttggaggcggtggcgccggcggaaatcgatgcgttgtccaaagcgcgcaagacccatctgcagtccgaaagagccctacggcacgccgaggagcagcagattgagaggcttcgctatcaagcagcccttgctgagcgccagttcaatcgcgctgaccctgacaaccggttggtcaccggcgagctggagcggcgctgggaagcggccctgttggagctgcgtcgagccgaggaggcgttggcccagcgcaaggtgcccaaggcaaacgaccccataggcgttgctcatgatctgcgtgccaaggtgatcggaagggcatcactcgcaatgggaagcggacaaagtcctgccggtcacggtccagcgcattcggcttaa

SEQ ID NO: 8070 - DNA, 1590 bp, BradyrhizobiumColbertium
atgagcatcgcggcgctgcgcgacgaaaatgaacaactgaaagcgcttttggcgcaaacccaggcggcgttgagcgagcatcagggggcgctggcggcctcggaagaagcgcggcgtcggctggagatcatcctcggcgaattgcgacgcgagaagttcggcgcgaagtccgagaagctgcggccagatcaatatcatttgccactcgaagacgtggagatcgcgcaaggcgtcctggatgcggcacaggagaaggctgcggcggtcatcaggggccgatctcgcaccggatcggatcaggaccgtcatcgtaatcggggctgcttgcctgcccatttgccgcaggtggagcggatcctcgagcctgcgagcacgctttgtccgtgcggttgcggggccatgacgaagatcggcgaggacgttagcaaacggctcgacgtgatcccggcgcaatggcgcgtgctggtcacacgccgcccgaaatacatctgccgccgctgctcgggccctgtcgtgcaggcgcacgcaccggagcatgtcgtgcctggtggactaccgaccgaagcggcgattgcgcacgtgatcgtctccaagtttggcgaccatacgccgttttaccgtcaggccgagatctatgcgcgccaggggatccggcttgatcgggcgaccctgggcaattggtccggccgcgcctgcttccatctccaacccgttgccgaccacatgcgccgccatctggcagcggcggatcgcctgttcatggacgaaaccacggcgccggtgctcgatcccgggcgtggtcaaacgaagaagggctacttctgggcgatcgtctccgacgaccgcggccatagcggcccaagtccgccgatcgtgctgttccgatatgcccccggtcgcagcggcgccttcgctgaacagttcctggacggctttaacggacgcttcctgcaatgcgatgcctatgacggttatgaccggctcagcgaagtcgctcgacggcaagggccgtggacgctcgtgcattgttggagccatttgcgccggcgcttcgtcaaattggcccgcaacagcaaatcgccgatcgccgaggccgccgtccggcagatcgcacagctttacgccatcgaagccatggtacgcggttcatcgccggacatcaggctggccgcgcgcaaggagcactcgctgcccatcgtcgaggcgttgaagccgtggttcgagaaacagctgtcgatgatctccagcggctcgacgctcgccgatgacatccgccacgcgctcaatcattggcaagggctgacccgcttcctcgatgatgggcgtctcgagctcgacaccaatccggtcgagaacgccatccggccagtctgcttgaccagaaaaaatgcgctcttcgccgggcatgaggtcggggctgaaaattgggccttgcttgcgtcgatcgttgccacctgcaagctcagcgacgtcaacccggccgcctacatcgccgaaacactcgaggccattatcgacggccatccccatcgcagaatcgaagacctcatgccgtggcgattccgcaaagcgtcaagcctgcgtccatag

SEQ ID NO: 8071 - DNA, 525 bp, BradyrhizobiumColbertium
atgggcttttattcgcaatggctcttcccccgcatcctcgacctcgcgatgaagcagaagcagatagtgcgatttcgcgagcggatcggagaaaccgccgagggcagcgtgctcgatctcggcatcgggtcgggcgtgaacttgccattctacggttctcgggtcagacgcgtgtacggcatcgatccctcgccagagctcttgaagttcgcgcgcgaacgggcccgcgatgctgaggctcccgtcgagctcgtgtgcggcagcggcgaggctatgccgcttgaaagcaagagcatcgataccgttgccgtgacgttcacgctgtgcagcgtcagcgatcccatcacgacgttggccgaggcgcggcgtgtgctgaaaccggcggccgtttgctcttcgctgatcgcaagcccgacgatctcttgcgatccgccggcttcgtcatcgataccgctggaaaccggctatttgagggggccgcgtcccatggtcttcgtctactccggcagcgcgcgtcccctgtga

SEQ ID NO: 8072 - DNA, 123 bp, BradyrhizobiumColbertium
atgatgatggatatgagcggcatgtcgacagcgatgatgcttgggatgggagtgatctggctcctgatccttgcgttcctggtgctcgggatcgctgcattcgtcaagtacctccgttcctga

SEQ ID NO: 8073 - DNA, 240 bp, BradyrhizobiumColbertium
ttgcgcgatgccttgagcgactatctcgctcgacatcgtctgattctctaccattcgctggctggtgttgttgccggaggtatcgctttcaactggcactggctcacggtctccgagactattcgcctgctgacggcgctgccctgcatgctgatgatgttcaaatgcttcaattgcggtacccaccgatcaacggacgaggcggtgtcggcggaaagccgcacagcccagacaggctga

SEQ ID NO: 8074 - DNA, 135 bp, BradyrhizobiumColbertium
atggcgtccgtctcgtttgctgaccagcgggcgcgcgtgctgttcgatccgcaatccattcgggaagaccgccttgtgaacttgatccaaaagcccggatttcgcgtcgtggcccgcgaaacggcaggtagctga

SEQ ID NO: 8075 - DNA, 168 bp, BradyrhizobiumColbertium
atggtgccggtgcagagggagcaatgcaggccgccgatacgcgcgcgaatcttgcggcgattgggtctcgccgagggctcctcgctccatggcgtgaaggtggaagcagttcctgtcgcgatagtcattgcgttctctccattccgctccggcaacagcatggcttag

SEQ ID NO: 8076 - DNA, 2286 bp, BradyrhizobiumColbertium
gtgagcttgacccatgagcaggccctggtcgaatacgatccctctattgcccgccctgagctgttcctgcaaacgctgcgcgacatcgggtataccatctctgatcccagcaagctcaggccgtacgaggaggaagagcgtgatcttgtgaacgaggcacggcgcttcgtcgttgccgtggtgctgagcgttgcagccatcccgatcatcgccgatccgggcgtgggctggattggatttctgccggcccttgtttgtctcagctttggggcattcgtattcctggtgctgcggtcgaccggattctggatcgcggtcgcgagtgccaccgggcttgcggcgatgtcgctgacgctgctgtttctgaatttgcagggctacctgacgaaggctgctccatggctgaccggcgcgttggcattgttgctcgtctttggcgtcggccggcatatcctacacatggccatccaggccttacggaggggcatcctcaaccagcatgtcctgctggaaatcggagcattcgcagggattgcgggcggcatcatcgggctcgtcctcggccggcctgactatcccaccgcaccattctttgccgtctcggtgatggtcggcacctaccatatcttttccgaatggctgtcgctgatcgtgaagacccgcagctcacaggcggtgaaacggctattggacctgcagcctgagactgcccgagtggtgcgtggcggcaccgagttggaattacccctcgaagcggtcaggatcggtgatctcgtccgggtccgccctggcgatcgtatccccgccgacggcgttgtggtcagcgggcattccggggtcgaccagtcgcttgtgaccggcgagtcgattccgatcgaaaaaacggaaggcgctaccgtcgtcggcggctccatcaacggcacggggacgctgctggtgaggatcacggcgctcggcgaaggcagttttctcagtcaagtgatccggcaggtcgaggacgcgcgagcgctcaaacctggcatcctgcatctcgtcgaccgggtgctgcgcgtctatacgcccacggttctcgtggtagcggcgctcgcggtgatcggctggcttgtgggctcctcgctgagcagcggccagcctgacatcgagcgggcggtcttcgccggtctgagcgtgctggtgatgggctatccctgcgcggtcggcatttccgccccgctctcgatcgtgcgcggcgcgggccaggctgcggaacgcggcatcctgatgcgcacaggcgaagcgtttcagggcttccgtctcgtggagcagatcgtcctcgacaagactggcacattgacggaaggacgcccggtcgtgcgggagatcatgccccttggcacgaccgaatccgagctgctcgccctggcggctgctgccgaagcctcttcagagcatccgctagcgcaggcgatcgtaacggctgcttttgagcggggcgtgacgcccccggacgttgaaagcttcgaggccttgccgggtaaaggcatcaccgcccgaatcagcggtcgcgaggttgtggtgggcaacccgctttttctagcggggcagaccatcgacctcagaccggtcactgtaaaggtcgaggctcttgagacgaacgggctgacggttattggcgtagcgcgagacgggcgcgccttgggcatcattgcgctcggtgacacgctccgaaccgatgccgccgaggcagtccgcaacctgcatcgtgcgggcctcaggaccgcgctcgtgaccggcgacaatgagcgcgcggctcaatgggtcgctcgtgaggtcggcatcgacgaagtccatgccggcatattgccgcaggacaaggccgcgatcgtgcgcgggcttcaagccgcaggccgggtcgcgatggtcggcgacggcattaacgatgctccggcgctcatgcaggccgacgtcggcatcgccatgggcggcggaaccgacatcgcaatcgagtcggccgacatcatcatcctgtctaatcgcttgaatgcgctcccggaggcccgcgagatcagcagccgcagttaccgcaagatggtccagaacgtcacgctcgcgttcctgttcaatggcattgggatcccgatcgcggcgaccggactgatctaccccgtgtgggccatggtggcgatggcggtcagcgtcacggcgatcttcttcaattcgctttggggaacgccgcgcctgttcttcgatgcaatccgcagcgtcggtcagccgatcgtgaacgctccggcacgccaatcggcctaa

SEQ ID NO: 8077 - DNA, 420 bp, BradyrhizobiumColbertium
atgatcacgatcggcaaattggctggcctgaccagcgtcagcaacgacacccttcgctattacgagcaggaaggcctgatcagcccggcggggaaaagtcctgcgggctaccggctgtacgaccgcgattccgcccggcgcatccactttatcaaacatgcccagcagtgcggcttcacgctggccgagatccgcgatcttctcgagttgcgcagccgtgacaaggcctgttgtggggacgttcgcgcacgagccatcgagaagaagctgcagatcgaaagcaagatccgggcgatgaaagcgatgtccaaggcgctcgatcaattgattgccgagtgcgcaaaggaagaacaacccgtccaggagtgcacgatcatcgccgcactggagcgggccaacggttctaagaaggtgcaatga

SEQ ID NO: 8078 - DNA, 255 bp, BradyrhizobiumColbertium
gtggagatgttctatagccccggctgcgccgcctgcgaggatcggcaggccgagcttcgcgcggcggcacgggacactgtgagcggcgtcgaatggtgtgacgtcaatgtgctcgagaacatggatgccgccgtcgccttgggagtgatcacgctgccatcaatcgtgatcgacggcgaggtagcctttacctccctgccgaccaaagcccagctttgcaaagagctcatcgagcgaagaggatcgaggaagtga

SEQ ID NO: 8079 - DNA, 669 bp, BradyrhizobiumColbertium
gtggaacatgccggcttcgcggcggccggggtggctttcgctgccgggttcttgttcagcttcaatcccgttgcgctggcttccattcccgtctcacttgcatacgtgaccaagggccgggacaagcgccaagcttttgtcttcggatcgctgttcatccttggcatggtcgtgacccatgtctttctcggcttcgtggccggcctgggaggaaagtgggccgccgacctcaccggaagggaatggggtctcgttctggggcctctcttgattgtgctcggcctcatgtgggctggttggctccgcattccgctgccttcgttcggcttccgggcgacccgtccgactgccgcatggggcgcctttcttctcgggatcccgttcgcgctcgccgtttgtccggcatgcactcccgcgctggtcgtgctgcttggagttacagccggggtcggctcggccgtgctaggcagcgtcctgctattggcgttcgctgttggccgagctatccccatcgcgcttggcgcgttcgccgtaggctggcttgaaaacctgaagatcctttcgcgatatcgacgcggcttcgaaattgccggcggggtcacgctaatcgtgatgggactctacatgctgaacgcggtttacgtctggataccggaactagcggtatga

SEQ ID NO: 8080 - DNA, 234 bp, BradyrhizobiumColbertium
atgcccaaactcacaattctcagtgcggcgaccattctgttgatgatggcggcaacgccggtattcgcacagtcctcgcagttcgcccaacaggagccgggtgcattcgcagcgatgtatccgaatgcaggtatccggcatgcagtcgtgcgcgcgccggcacacagcctggccgcgctcgcgtacctgccgcccggcaagagccacgcaaagggtcatgtaacgcggcgctaa

SEQ ID NO: 8081 - DNA, 126 bp, BradyrhizobiumColbertium
gtgcagcggcacgagggtggccgcttctccgacattccctacgacgtcacgtttgcgtttgcattctacgccttcaggcctgacagcccaattcacaagcggacaatggctggcccaggcaattga

SEQ ID NO: 8082 - DNA, 555 bp, BradyrhizobiumColbertium
gtggacaccgagccggtgatttcgcttgctatccgcgacgatgcgcgagcctatccgctgagcgttctgatctggcacgaaatcgtgaacgatctcatcggcggcacgccggtcgccgtgacctattgcccgctctgcaacgcctcgctcgtttttgaccgcgcgctggagaatcgcgtcctcgatttcggcacaacaggaaaactccgaaactcggatcttgtgatgtacgaccgtcagaccgagagctggtggcaacaattcgcgggcgatgcaattgtgggcgtcttgagcggaaaacaccttcgtttgattgcgtcgcgtgtagaagccttcagtcgttttcgccagcgtttccccaatgggcaagtgctgatcccaaacgatccccgcgcgcgcaactacggcaggaatccctatgttggatacgacgcaaacggccaaaagccgttcctctatgacggctcgttgcccgacgcatcgatccgatggaacgcgtcatcgccgtcgaaaccaggccggggcatcgcgaggcctggtcgctttcgctgctga

SEQ ID NO: 8083 - DNA, 402 bp, BradyrhizobiumColbertium
atgcagcgggcggaactcgctcaaagaaccggctgcaaccttgagacggttcgctattacgagaaggtgggccttctgccggcgccgccgcgtacgcccgccgggtatcggagctacgacgcgacgcacgaacgtcgcgtgcggttcattttgcgggcgcgcgaactagggttcgccctcgatgaaatccgtgagctgttgcatcttgccgacgagcgcgaccagccctgcgccgatgtccgcgctgtcgccgcggcacatcttaatgacgtgcgggccaagctcgccgacctgaggcggatggagcgggtgttgaaagacgttattgcgcaatgcggcaatggtacccaaccggaatgccccctgatggagacgttattccgggaacgggcgagccgttga

SEQ ID NO: 8084 - DNA, 306 bp, BradyrhizobiumColbertium
ttggccgcctcctcctgctgcatcgtgccgctcgtcctgttcagcctgggcattggcggcgcctggatcagcaggctgacggtgcttgctccctataagccactgttcatcgcagcaacagccggcatgctcgggtacggcttctacgtggtttactggaaatccggccaggcctgcgcggacggcacggcctgcacgcgcccggtatccacccgcatcgtccgtttgtcgctctggatggcgacgctcatcgtcttggccgcctttggcttcgactatgtcgccccattattgctcggcacctga

SEQ ID NO: 8085 - DNA, 135 bp, BradyrhizobiumColbertium
gtgaccgttcgctcgccggcaacggcggccgtggccgacatgaccaaggcgatcaacgcaataacggatgagcttctcttcatgggaaagctcctttccttctatcaggtgccgagcaataatggggcgacatag

SEQ ID NO: 8086 - DNA, 153 bp, BradyrhizobiumColbertium
atggccgcggttcgcggcgtcgccaatgtcacggtgtcgttcgaagccaaaaccgcaaccgtgactttcgacgatgtgcagacaactccggaagcgatcgcggccgcaagctcgaatgcggggtatccggcgcatctaaagcaaggcagctga

SEQ ID NO: 8087 - DNA, 2319 bp, BradyrhizobiumColbertium
atgagcgaatgctgcaaatctgcttcggttcgggatcaagaaacgctttccggtcctgccacactgccgcagttctcactgcgacccggcgtgacatttcccgattggtcgctggttacgtcgcaggcagccagagatgcgctgctggccatcaaggatgttcttcaagtcatggcgggatcgaagaacgcgcttgatgattggagcgagagcgatcgcctgatcgaccgtatccgcgtgatactgatccagttctacatggagcagcgccgggctcccatggtgtgcgagctcgcggagcgcgcggcgctaagcgagtcaaccgtccgccggctgcttgaacagcttcgtgagcgcgatctggttgtgctcgagaacgggaaaatcgtcggcgcgtacccattcactgaccggaacaccggccatcatgtcaccctaagcagtggcaccattaacgcgatgtgtgcgattgacgcgctcggcgttggcgcgatgacgaggcgcgatgtcaccgtcgcttcaagctgcagttattgcagtgcgccgatccggatcacgacgcgcggtctcggacgggagctcgcccgtgtcgacccagagatagccgtcgtgtggcaaagcgtccggtatcacggcgcatgtgcggcggagtctctgtgccgcgacacctcgttcttctgttccgtggaccacctcgcgaagtggcggcgtgagcgctgcgccgacgagcccggaattcagcttcggatggacgaagcgttacagatggcgcgagcactgtttgatccgattctcgccaatctcgatgctgaatccagcgccgaccgcgaaagcgtatcgcgcgacaagccgcattcgatcccaccgttctcgaaagccgctcccgaaacgcatcgctatgaccgccccctggggcgcatcgacggcggctatgatctcgtcgcggtcggcgccggttcggccggattttcagccgcgatcaccgccgccgaacagggcgcacgcgttgctcttgtcggtagcggaacgatcggcggcacctgtgtcaatgtgggctgcgtcccgtcgaagacactgatccgtgcggcggagcagctacacaatacacgcgcggccgcccgctttgccgggatcagtgcacaagccgccgtgatcgattggcgggcaacggttcaccagaaggacacgctcgtcgccgaattgcgtcaggccaaatacgtggacctgcttccggcttaccccaacatcgactttcgccagggtcgggcacgcctcgtggaggatggggtggaggtcgacggaatgcatcttcctgccagcaagatcatcattgcaaccggcgcgcgtccggcgatccccgcaatctccggccttgaggccgtgccatacctgaccagtacgacggcactcgatctcgaaagcttgccgcgctcgctgctcgtggtcggcggcggttatgtcggggccgagctcgcccagatgttcgcgcgtgccggcgtgaaagtgacactggtgtgccgatcccacctgctcccggaagcagagcccgagataggcgctgcgctctcgcgctatttcgaggttgagggaattagcgtgatcgccggcgtcggttaccgcgagatccggaacatcggagaaggcatttctctcaaggccacgcgcgacgggcgagacatgacaattgaagccgaccaggtgctgattgcgaccggtcgcacccccaatatcgaagggctcgggttgcctgagtgcgggatcgctaccgccccaaagggaggaatcgccgttgatgagcacatgcgcacgacccgggccggcgtctacgccgccggtgacgtgactggtcgcgaccagttcgtctacatggccgcctatggcgccaggcttgctgcaatcaatgctctaagaggcgatcgcctgagctacgacagtcgcgcgatgccggccatcgtgttcaccgacccgcaggtggcaagcgttggtctcaccgaaaaagcggcgcgtgatgcagggtacgatgtgcgcgttgccacgatcggtcttgaccaggtgccgcgcgcactggccgcccgcgacacccgcgggctattcaagttggtatcggatgcaaggaccgaccgactaataggcgcacatatcctggcgccggagggcgccgacagcattcagaccgctacgctggcaatccgccagggtctcaccgtcgcagatctcgttgacaccatctttccttacctgacgaccgtcgaaggtctcaaactggcagcgctgtcgttcaccaaggaagtttccaaattgtcttgctgcgccacgtaa

SEQ ID NO: 8088 - DNA, 327 bp, BradyrhizobiumColbertium
atgtccaatcgcaccctatccgcactcgtcgccggagcctttgccgcagccgtaggatcgctcgcggcaacgcccgcgcccgcggccgatccaaaaatggaaaagatgatgaaggatgccgatgcgtcaattaaggccggcaagatggagaagtgctacggcgtcgcgctcaaagctcagaacgactgtgcagcaggggcgggcaccacctgcgccgcgaccggcacggtggattatcagggcaacgcgttcaagctcgtagccaagggcacgtgcacgaccatgcagacgccaaagggcccagggagcctgacgccgaaggcttga

SEQ ID NO: 8089 - DNA, 888 bp, BradyrhizobiumColbertium
gtgctgctttcatcttctcccgcaaaggaccgcattccgccgcgcggaggcgtgggactcaaggccgagcactgccgcacgatcgtcgagacctggccggacatcggcttcttcgaggttcatgcagaaaattacatgggggcgggcggcccgccgcaccgctatttgtctgctattcgggaacactatccgctctcgctccacggtgtcggattgtcgatcggtgccgatcgaccgcttgataaggaccaccttcaacgcctcaagcaactcatcgaacgttacgaaccaggcctgttctcagagcatctggcctggtcatcccatgatgtcgggtttttcaacgatttgctgcctgtgccgtacaccgccgagacgctcgcgcgcgtcgtcgaacatgtcgaacaggtgcaggactgccttggacggcagatgctgctggagaatccatcgacgtatatcgcctttgccgaaagcacctactctgaaatcgacttcatcgccgaggtggtccggcgcactggctgcggcctgctgctcgacgtcaacaacgtctacgtcgcctcgaccaaccagcaatgggatccgtacgcctatgtcgacgcgtatccgctcacgcagattcgggaaattcacctcgccggccacacaaaagacgccgacggcaagggccggccactcctgattgacacccataatcgccctgtcgacgagatcgtgtgggatctctatgaccatacggtccggcttacgggtccccttcccacgttgatcgaatgggacgcggacgtgccggcttggcccgtgctccagcaagaggccgagcgcgccgaggcgatcatgctcgcaaccaaatcggaggccgtgcgtcgtgcggcagctcgctga

SEQ ID NO: 8090 - DNA, 786 bp, BradyrhizobiumColbertium
gtgcggcagctcgctgagagacaacgcgatttcgcggcggctctgctggatccagggcttccgacgccccatggtcttgtcgatccagacggtgaaccggatccgaagcggttcgccatctatcgcaacaatgtcgtggtcagcctgatcgaggcgctggcagacgcattcccggctgtgcaccgcatagtcggcgccgagttctttcgcgccatggcacgagtgtatgtcagggtccagccgccgcgctcgccaatcatgctggattatggcgcaggattgccggatttcatccggagcttcgagccggctgccgtgctgccctacctggaagacgttgcacgcatcgagcgcgcctggacggaggcttatcacgcgcccgaggcttcgccgatcgaccccagtgtgttcaacgccgtcgcccccgaccagctgcccgcgatccagcttgagcgtcacccttcgcttcgcgtggtccgctcgcaatttccggcgctgacgatctggcagatgaacgttgccgacggcgtcccggctccggtcgatctggccgccggcggcgaggatgcgctgatcgttcgccccgcggccgtcgttgaggttcgcctgatccccaagggcagcctggaattcatccgggcactgagcggcggaagacccgtgctcgccgcactgggggcagcgttgatcgcaaatccccgcttcgatctctcggcaaacctctccgatcttatgcgcgcgggcgccatcgtcagctacagccttgcgcaagagaacccaacatga

SEQ ID NO: 8091 - DNA, 465 bp, BradyrhizobiumColbertium
atgatcccgcacgcgaccatcgcaacgatcgagaacgccgtccgcgagcttgcggactggctcgctcgcgccgctcaggtggcggctccgccgatgctgaggatcgcactcgccgtgcccttcttcaaatccggattgacaaagtgggacggatttctctcgctttcaccggctgccgagtttctgttcgaggacgaattcaagctgcatattcttggccaggcttacgacttgcccttcccgactgcagtcgcctacctcgacggtcgcagagatcgtgctgcccgttctgcttgttatcggtcttgcgacccgcttttcggcgctggctctcctggtcatgaccggagtgatccagctcgtggtgccagaggggtgggcgaattttcaccttccctgggcgggcctggcgctggccattattgcgctcggccccggagcgctctccctcgaccatttgcttga

SEQ ID NO: 8092 - DNA, 510 bp, BradyrhizobiumColbertium
atgacgatctcgatctacgaggcctcggtgggcctgttcgtgccgtacctgcacaacctgtcggttctgctcgacaagggtgtcgcgtatgccgagacccggaagttcgaccccacggttctgctcggcatgcgccttgcgccgaacatgtacgatctggcgcagcagatcggcgaggcctgccgccacgctacggttgcgccagccttgctggccgaacgcgagccggtcacgttgcccgtgctcgagcacgatatggccggccttcaggcgcgcatcgcgacgtcggttgagttcatccaaagcctgccgcgcgcgaagatcgatggggcggcggaacgggatgttgtcttcaggctgaagaacggcagcgagctgcccttcaccgggcgaacgctgctgctgacgttcagcctcccacagttcttctttcacgtgacgacggcttacgacatcttgcggcacgccggcgtcgagctggtgaagaaggactatcttgggaggaagtag

SEQ ID NO: 8093 - DNA, 360 bp, BradyrhizobiumColbertium
gtgggcgagcagccgtccgtcgaagagcataatgttctcgacgagcatccggtggtcgaggagcagccgctggcgcccgagcatacggatgccgacggctacagcaaggtcggtccggggcccatggtagcgatccgtctcaagtggacggtccatcgtggcgatgacggccagtactatgtccacgagaccatcggcgaacaatccgcccccgtggtcagcggccccatgacgagcgaggccgcggtccgcttcgtcgatgggcagcaggacgaggcgaacaagcgcttcgagttgctgcgcagcgagatcgccggccgcagctcgcttgcagattacgagcgcaagggcgaagcgtaa

SEQ ID NO: 8094 - DNA, 147 bp, BradyrhizobiumColbertium
atgctcttcgacggacggctgctcgcccacgaggacgatttcagtctctcgaataatctcggtttcccggacaacgagcgccggctcgggattttccagaatgctcgcgatggtcgcaagcgcatggtcggtcgggtcgatctctga

SEQ ID NO: 8095 - DNA, 990 bp, BradyrhizobiumColbertium
atggcgaccaacaagaagaagattttcgttacacaaactttgtcgcgaggggcacgcgccctcctcacccagcgggacgatatcgagctcgtcgagtttccgaacctgatctccgcaaaggacttcgaggccctgctgaagagccacgcccccgtccacggcgtggcgctgggtgcaaccgctttcggcgagaccgaactcgaagcgtcgaaagacatgaaggtggtgacccgcatcggcgtcggctacgacgccgtcgacgtgcccgctctctcccgccgcaaggtgccgctgatggtcgccggcagcgcgaactcgccctcggtcgccgaagccgcgctgttcatgatgctgacgctggccaagcgcgcgcaggaattgcacgcctgcgtcaaggacggcaaatgggccgaccggctcggcatgctgccgttcgacctttacggcaagaccgtgctgatcgtcggtttcggccgcatcggcagccgcaccgccaagcgctgcctggcattcgaaatgaacgtccaggtctacgatccctacaaggaagccgccgagatcaaggcagccggctgcgagcccgtcactgacctggacgccgcgctgccgggcgccgacttcgtcaccatccactgccccaagacaccggagaccgtcggcctgttcgacgcggcgcggatcggccggatgaagcccaaagcctacctcatcaataccgcgcgcggcggcatcgtgaaggagtccgcactgtacgacgcgctcacgtccggcaggctcgccggcgcggggatcgacgtcttcgaggtggagccaccgccggtcggcaacgcgctgttcgcgttgcccaacgtcatcatcgctccacacgtcgccggcgtcacggtcgaagccgtcgagcgcatgagcgaacagaccgcacgcaacatcctgagtgttctggacggcgaccccatccggcagaacgtgatcaaccaggacgtgctgggctga

SEQ ID NO: 8096 - DNA, 834 bp, BradyrhizobiumColbertium
atgacggtcgcggagaacatgtcgttcggcctgcgcctgaagcattatcccaaggccgagatcaaggcgcgggtgaccgaggccgcccgcctcctcgacatcaccgatcttatcgaccgcaagccgaagcagctctccggcggccagcgccagcgtgtcgcgatgggccgggccatcgtgcgcaatccgaaggtcttcctgttcgacgagccgctgtccaatctcgacgcgaaactccgcgtgcagatgcggatcgagatcaagaaggtgcaccagaaggtgcggaccaccacggtctacgtcacccacgatcaggtcgaggcgatgacgctggccgaccgcgtcgtggtgatgaacaagggacggatcgagcagatcggcacgccgaacgagctctaccacaagccggcgacgcgcttcgtcgctggcttcatcggctcgccggcgatgaacttcatcccgtgccggctcgaggatgtcggcggcacgctccagatccgcctcaccgaccgccttgccttcccgctgccgcccgcccgtgcggcccgctacaacgcgctgccgcgcaccgaaaagctgctgctcggcctgcgccccgagcatctgaccgagtcgcacgcgcatctcgagcccggcgtcgagaccttcgacacggtgctcgacgtcaccgagccgatgggaatggagacgctggtctatttcggcctcgaaggcacgccggtctgcggccgcgtcaatcccaatgccggcgccaaggacgggggacccatgcgtttggcgatggacctcaacaacatgcacctgctaaacgaagagaccggcgtcgtgttgtga

SEQ ID NO: 8097 - DNA, 912 bp, BradyrhizobiumColbertium
atgagcacgctcgcaatcgacaaaggcggccccacgcgcaagatcaagtaccggagcatgagccgggaccgcgcctgggcgctgcgctggtcctacttcttcctggtggtgttcgcgatcttctcgctcactccgccgatctacatgctgattacctctctcaagagcagcgcggagatttcggcggcgaccaatccctggtgggtgtttcatccgaccctggcgaactatgtcgagcttctgacctcgaaccagtttctgcgcttcttctggaattccgccatcgtgtccatcgtggtcgtgatcgtcaccatgctgatcagcattccggcggcgttcgcactggcgcgaatgaagttctggggctcgacgacgctcgcgaccggcgtgttcctcacctacctggttcccgacagcctgctgttcattccgctcttcaagatgctggcggtggtccaggatctgaccgggatcacgctgctcaaccgatggtacgtgctgctgttcatctatccgacgctgaccgtgccgttctgcacctggatcatgatcggctatttcgcctcgatcccgaaggagctggatgaggccgccctcatcgacggcgcctcctggctgcagaccctgacgcggatcttcatccccgtcgcgctgcccgggctgatcgccgcgaccatcttcgcgttcacggtgtcctgggcgcagttcctctatccgctggtgttcacgacgtcggttgatcaactcgtgctgccggtcggcatcaccaccacgttgatcaagggcgacgtgttcaactgggggcagatcatgaccggcgcgctgctgggcgccgcgccgccgctgatcatctacgccttcctgatggactactacattgccggcctgaccgccggcgcgacaaagggttga

SEQ ID NO: 8098 - DNA, 939 bp, BradyrhizobiumColbertium
atggccgatgtcgtcgttgagcaaggtcgctccgtccacgctgcgagcccgcgcaaacgcaccagcctgcgcaatgccctcaggcggaagtcgacgatggcgttcttcctgacgctgccgctgattttgctgatcgcgttgctcgtgctctatcctgccttctactccatgcaccttgcgacgctgaacaagtcgatgcagaaattcgtcggcttcgccaacttcaccttcctgttcaagcgcgacacgttctggatggtggtgaggcagtcctgcatcttcgccatcaccgccgttttcttcaaggcgttgctcggcttcatcgtcgctcatttcgtgcacaaccttccggccaagggccagcgcaaatggcgcggcatgctgctggtcccgtgggtgatcccgccggcgatgagcacgctggcgtggctatggctgttcgatccttcctacagcgccttcaactatacgctttcattcttcggcgtcggcccggtcccctggctcggcgacaccttctgggcgcgcttctccgtcattctcgtcaacgtctggtatggcgcacctttcttcatgatcatgtatctcgcggcgctgaaatccgtgccggaccagctctatgaggcggccgccatcgacggcgccaattggtggcagcggatctggtacgtgacattgccgatgatgcgcaacatcatcgccatcacgacgctgttctcgctgatcgtgaccttcgccaatttcgacatcgtgcgcatcctgacctcgggcggcccgctggattccacccatatcttcgccacatgggcattccaggtcggaatccagagcagcgacattccgctcggcgcctgcgtctcgctgttcatggtgccgatcctcgcagtcgcggcgatcttcatactgcgcgatgtcagcaaacgtgggaacgaagcctga

SEQ ID NO: 8099 - DNA, 1341 bp, BradyrhizobiumColbertium
atgtcacgcaagacactgacgcgacgtcaatttgtggctgccactgcaatgtcctccgcggcgctgatcaccgcgccctatgtccggggcgcttatgccgccggcaagctctccatcggcttctgggaccattgggtgccaggcgccaacaaggcctcgaccgacctcgtcaacgaatgggcggcgaaggagaaggtcgaagtctcgatcgactacatcaccagcaacaacaagaagctcgaactgacggtcgccgccgaagcacaagcgaaatccggtcacgacattctccagatgccgacctggtggccgcacgcctacgccgaccagcttgagccggtcaacgacatcatggagccgatcatcaagcagaacggcgacgtcaacggcaccgtcaagtatctgggccagggcggcggcaaatggcttgccgtgcccgcgaccgtcggcagccagatcaaggggccctgctcccgcatcgacctgatgaagaagcatgccggcatcgacgttcaggcgatgtatccggccggcagcgcgcccaaggccgacaattggacgatggatactttcctgaaggcggcggaggcctgtcagaaggccggcgttgcgttcggcatcgggcttggcgagaccaccgacagcgtcgacacggccggcgcgatcttccagtcgttcggcgccgagctcgtcaatgccaagggcgatgtcacggtgaagacggacgcggtccggcaggcgctcgagttctacaagaagttgattgccgtcctgccgcctgacgcagcgtcctgggacgatgcgtccaacaacaaatggctgatctcgggccgtggtgcgctgatcctgaatccgccgagcgcctgggcagtggccaagcgcgatgccccgcagattgcagagcaatgctggacccacagcatgccggccggtccgaagggccgcttcgcgcccttcctgccgtatttctggggcgtatgggccttcggcaagaacaagccggcggccaagagcctgctcgcccacctctcgcagccgtcctcgatcgaaaaattcgttgcagcgagcggcggctatgacctgccggccttcgcaaacctgacgaagctcaagacctgggccgaggaagggccgccaaagggcacgctctaccactatcccgatccgcacggcagccagacgatgtcgatcgcggcatcgcccgctccgccaaagatcgcacagcagatctactcccaggcgacgctgaccaagctggcgctgcgttatgccaggggcgagacgatggaccaggcgctcgcctgggccgagggcgagtgcgaaggcttcatgcggagctga

SEQ ID NO: 8100 - DNA, 786 bp, BradyrhizobiumColbertium
atgatcaacccggcgcacacagcgctgcttcacctgcggcgatggttcgcgctcgggaccgtgctcgcgctgctgctcggcgccgccgcgccggcaaacgctcaaggcttggtcaaaggcgttcaggaaggcgcggaagccgggaacaaggctgccggtccggtcggcggcgtgctcggcggtgcgatcggcggcgtggttggcgtcttcaccggcgtgctcggtgtcggcggcaacaatcagccgccagcccccaaggagtctggcaaagacgccaagcagcagggggtggccaaggacaaggatgccaagagcgccaagacgggtaagaacgccaaggcgagcaaggaggcgaagaacgcgccccgggacaagagcagcaaggagaacaagggtgtcacggttctcacccagcccggcgcaccccagcagagcgcggaacaaatcgtcgccaacagcgacgcctatatcgagcggatcaagtccgagctgaacctcacgccggatcaggagaagcactggtacggcttctccagcgcgatgcactacctcgggcacaatggtgcagagcggctcaaccttcggattgcgcgcgccaagcgggatccgcctgacgacatcatcgagcagatgcgcaacgaggcccagttcctgatcgatcgagccgccgaccagcgcaacgttgccgacgccgccgagccgctctactcgagcctcgacgacaagcagaagcaggtcttcattcaggagatggtgcgcctcagtcatgagcgcggattggattga

SEQ ID NO: 8101 - DNA, 378 bp, BradyrhizobiumColbertium
atggcggacggactctccgttttcctcgtcgaagacgaggcgttgatccggatgatgattgccgacatggtggaggaactcggccaccacgtcgtcgcggaggcggacaatgtgcgggacgccagcgcgtttgccatgaccgcgcaatacgacctcgccatcctcgacatcaatctcatgggtgtctacgtcgatcccgtcgccgacctgatcgaacgccgcgggaagccctttctgttcgcgacaggctacggtccggaattgctgccatccttgctcagacgcaggcccatcctgcgcaagccgatcgcaatggatcagctcaaggcgatgattgattcgatgttccccgagcggccagccacaaacccgaactga

SEQ ID NO: 8102 - DNA, 204 bp, BradyrhizobiumColbertium
atgcgtaagcaggatctgggtttcgactatcaccgctaccaccgcctgctaagcgaggcggacaacgaagacaagcggctggcgctgatcgaactcctgatcgcggaacgggcgcgcgagcggctggcggcccagcgcgcttcggaccgcgcggccatgacggcccacacgatcgcaagggtgctgagaaacgggcgcgactga

SEQ ID NO: 8103 - DNA, 987 bp, BradyrhizobiumColbertium
atgggcatcggcaagtcaggaaagattcttctcgccgatatcggcggcaccaatgcgcgcttcgcgctgagctcatccgaatccaatgacggcagtcagaccggaccgatcgattatgtgaaagttgcagacttcccgaccgtcggggaagccatcgcggacgtcctggcgcgccggtcgggcgacgagccgccgcaaagagcggtgctggccgtggcggggcccgtcaccaacaatcgctgcgtcatgaccaacagcccatgggtcatcgacggcaacgagctgcaacccgcgctcggcctggacagcgtgcacgtgctgaacgacttcgaggtggtggcctggtccctgcccgccctgcagcctgccgacctgatcccgcttggcggcggcgatggcctgcccggagagcctttgctggtcgccggccccggaaccggttttggtgtctcctgtctgatcgaacgccacggtgcgcggctggcggtcgtcaccgaggcggggcacgccacgctaccggccgagaacgagcgcgaggaacgcgtgatcgcctgcctgcgcaagcgcctaggccatgtctccatcgaacgtggcgcgctctcgggttccgggctgcagaacctgtacgaagcgctcgcggaagtcgagagcgcccaggtaccgcatcgcgatgccgcctccatcaccaaagccgcgttggaaggaagttgtcccatcagccaagccacattgcagatgttctgcgccatcctcggctcggtggccggcaatctcgccgtgacgttcggagcccgcggcggcgtctatatcgccggcgggatcgtgccgcgctttcgcgacttcctcgcggcctcggcgttccgcgcacgtttcgaagcgaagggacgcttccaggattatctgcgcaacattccgaccaggctcgtgatcaagccggatgcaagcttcgtcgggctgaagatgttcgccgaccacaccgctgactga

SEQ ID NO: 8104 - DNA, 627 bp, BradyrhizobiumColbertium
atgaagatttccgaccgtgacgtgttgctggtgatcgacgtgcagaacgacttctgtaccggcggggccctcgccgttcccggaggcgagaaggtcgtcccggccgtcaacaggatcgcccagaaattcgccaatgtggtgctgacccaggactggcatccgcgcgaccacatctcgttcgcgccgaatcatgagggcaagcagcccttccagaccatcgaactcgactacggcacccaggtgctatggccgccgcactgcctgcagggcacggccggggccgaattccatcgcgatctcgacgtgacgcgggcaacccttgtggtgcgcaagggctttcgccgtggcatcgattcctactcggcgctgttcgagaacgaccatcggacaccgaccggtctgctcggctatttgcgcgagcgcgacctgaagtccgtctttgtcgccgacctggcgctggatttctgcgtacgcttctcggcggaagatgcgcgtaaggcagggttggaggtagccgtcatcgaggatgcctgccgcggcatcgatctcgacggctcggtggccgcgacccacaagagttttcgggagttcgggatctctgtcgtcagcctcgaggcgttcctgtga

SEQ ID NO: 8105 - DNA, 1059 bp, BradyrhizobiumColbertium
atgctgtggccgttcgcggcggcccggctcgccatggacgcctgcttctggtggatggagcgcgggccgaccgagccggcccagagcagcctgccatggacgacgccgagcacggtggcgcttgagctagcgaccatgcgcctgcgcgattgctcgcagggtcactccggccaggcggctctgatctgtgcaccctatgcgttgcatcgggccttgatcgccgacttcgcaccggggcacagcgtggtgcagtccctgcaaggtggcggcattggccgggtctatctcaccgattggcggtcggccacgcccgagatgcggtacctctcgatcgacaactatctcggcgatctcaacgttgccgtcgacgagatcggcgcgccggttgacctcatcgggctttgccagggtggatggctgtcgctgctctacgcggcgcgctttccaacgaaggtgcggcggttggtcctggtcggtgctcccgtggacgtgtcgatcgcttcctcgctttcccggctcgcccgggacgcgcccgagctggtttatgaccagctcgtcgcgcgcggcggcggcaatgtcagcggcgaggagatgctgcgcctctggtccaaggcgccgagccgcgacgatatcgtggcggccctgcagcgggatctctcggacgagcagggggcggcgctgctcgcgcggttcgaccgctggaacgcggagacgctcaatctgccgggcagatactatctcgagatcgtcaacgggatatttcgggagaaccggatcgctagcggcaatttcgttgctctcggccgcactgttgatctgaaggacgtgagggtgccggtcttcctcctggcaggcctcgatgacgatgtggtgcctgcggcgcaggcgttcgccactgccggcctcctcggcacgccgccagccttcattgccgccgcttccgagcagagcaatcatctcggcctgttcatgggcgcgcggacccacgcgcatgcctggccccggatcgctgcgtggctgcgtgatgacctgccgggcgccttggctcgcagcgcctga

SEQ ID NO: 8106 - DNA, 1995 bp, BradyrhizobiumColbertium
gtggcagcctgcgtcaccacgtcccatgtcgccgatcccacggccaacgcgaaggctgtcctggcggcggccgaggcctgccatgagcagtcggcggcggtcgcggtgttccccgagctgtgcctgtccggctatgcgatcgaggatctcgtcaagcaggacccgctgctcgatgcggtcgagcgaggactcgccagcattgttgaggcttccgttggactgatgacggtcctgatcgtcggcgcgccgttgcgctttggcaatcgcatctacaattgcgccgtcgtcattcaccgtggcaatgtcctcggagtcgtaccgaagtcttatctgccgacctaccgcgaattctacgagggccggcatttcgcttccggcgcgggcatctcgggcgagacgatcgcctttggcggcctgcatgctccgttcggcgtcgatctcttgttctcggccgaggacgtcccgggcctcaccatcggcgtcgagatctgcgaggacatgtggatcccggtgacgcccgcctccgagctcgcgctcgcgggcgccagcgtgctcatcaacctttcgggcagcccgatcacgatcggccgggcccgctcgcgcgctctcctgtgccaatcgacgtcggcgcgttgccttgcggcttacgtctatgccgccgcgggagccggggaatcgaccacggatctcgcctgggacggccagacctcgatctacgagaacggcgtgctgctggccgagggtgaacggttccgccagggcggccagatcacgctggccgacatcgacctcgacctgctcaggcaggagcgcgcgctgatgggaacgttcgacgacaatcgccggcagcgcgaggccttttaccgcaaggtgacgttcgccatgaagccgccggccgccgacatcggcttcctgcgaaagatcgagcgttttccgttcgtgccgagcgacgaaagcctgctcgagcaggattgctacgaggcctacaacatccaggtcgccggcctcgtgcagcgcatgcgcgcaaccggcaccaagcgcgtcgtgatcggcgtatccggaggcctcgattccacccacgcgctgatcgtcgcggccaaggcggtcgatctgctcggcctgccgcgcgagaacatcctggcctataccatgccgggctttgccaccggcagcgagagcaagacccgcgcgctggcgctgatgcaggcattgcacacgagctggcaggagctcgacatcaggaccaccgcgacgcagatgctgaaggacatcggccatcccttcggcaagggcgagaaggtctacgacgtcaccttcgagaacgtgcaggcgggccttcgcaccgactatctgttccggttggccaaccatcatggcggcatcgtcataggaaccggcgatctctccgagctcgcactcggctggtgcacttatggcgttggcgaccagatggcgcattacaacgtcaatgccggcgtgccgaagacgttgatccagcacctcatccgctgggtgatctcatccaggcaattcagtgacgacgtcaacaggacgctagggtcgatccttgttgccgagatatcaccggagctcgtgccggtggaggccggcgagaagccgcagagcacggaagcggccgtcgggccttacgagctgcaggatttcaacctgttctacacgctacgcttcggcatgcggccttcgaagattgccttcatggcgcagcatgcctggaaagacgttgccaagggcgaatggccgccggcattccccaacgatcgacgcagggcctatgatctgcccgaaatccgccgctggctggaagtattcctgcgccgcttcttcgcgttcagccagttcaagcgctcggccatgccgaatggacccaaggtctcggctggcggttcgctttcgccgcgcggcgactggcgcgcgccgtcggattcgagtgcgtccgcttggctcgaggatcttgaacggaacgtgccgggctga

SEQ ID NO: 8107 - DNA, 384 bp, BradyrhizobiumColbertium
atgtcggccggggacggcgcgggtacgggtgaggaggccaaggtcacgaacggcctctacatcttcgacatcgaaatgcgggacggcaagcgcgggcaggccagaggcgtggtcgtgctctgcgacggccgcatcatgggcggcgacagctacttctgctacaccggcagctactcgttccggaacggcaaatggcgcggcgacatgatcgtcaatcagcacaccgaagccgtcggcaggatgcttgcctttggcggtcgggaggtcacctgcggcttttccggcgactatttccccggtggcgcggaagtcgaaggcatggcgctggtcggcaagaccagcgtgacgttcacggcgcggctgacgctcaaggatgcaatgtga

SEQ ID NO: 8108 - DNA, 555 bp, BradyrhizobiumColbertium
gtgacgaccgagaagcaggtgcggatctccgaaaccgcgagacgcgcgcgcctggccccgccggtacgcaatctgaacgtctcgatccgggtgggtgagacgatcccgtcacgcgtacgattgcataggcttccgccagagatcattgcgatcgagccgcaataccggggctacgagtatttctccaccgaagaggacatcgtcatcgtggagccgcgcacgcagcgcatcgtcagccaggtgccgcgcgatccctcgcgagcccgtgcgcagatgggtggctccggcacatcgaacgtggcagctgcaggcagcaacacgagcagcaacttgaattgtcggatcatgcggcgtgatgcctccggcaatgtcgccgaggcagagccgacgacggtcggctcgaccgcgcgcatggattcgatgaacgtgacggttcagatgccgggcggcggcacctccgcgccgattgctctcgacgctgccgccggcagcatcctggtcgccacgcaggggcagggcgactgcaccgtcacgatcgaaccgcaagcgcgctga

SEQ ID NO: 8109 - DNA, 876 bp, BradyrhizobiumColbertium
atgttgaggacgcagatcgcggccgcgatcggctgcgcgcgcgcaagcgcgcttgatgagatcatgcgggaggtatggacgcgctacagcgccggccagctcaccgaggaagacgccgggcagctctccacgctcgcccatgagcgccgcgaggcgtggcggggatcgggacaggccgggcttggcctggtcatgcccccggccgagcgatgcccgacgccagttcgccggcatagtcatatccggggccgatcggagggccggatatggcggtcgacgacgcgcaaggacgttcaggcaatcttgaaggcggccgaaatctacaatgaggccggcttgcacgagaagggcgagcgaagcggcccgctaggatcggtggcgctcgacgtgctgcggctgttcgtcaatctcatagacttccgcaccggccggttagagccgtcaatcaccacgatcatggatcggctaggccggtcgcgcgatacgatcgtgcgggcgctgaagaacctgcgggcgcatggtttcatcgactggctgcggcgctacgagccgaccggcaacgaggggcgcggcccacaggtccagcagacgagcaacgcctatcgcctgtccttgccggaaaaggcccgtcagtttctcggcaggttcggcaaggccccgcccccgcctgctgatcatggacaggatcagcaggcatggagcgaggcaatcgacgcctacaagaccaccctgcccctcgatgagcggacgcagctcgacaccggcgatagcccgctcggtaaggccctcgtgatgctggcaaagagtgtgatgaaacgtgagtccgataaccagactgaatccccatctgatctttatctaagagggcaaacataa

SEQ ID NO: 8110 - DNA, 366 bp, BradyrhizobiumColbertium
atgcgctggttggcgcgcaagatgcgacaggacatctgggacgaggcgatcgaagggccgctcggcgacatcgaagccgccgcgcgcattcgcgccatctgcgattccgcttcagcgattgcggcacaggccggcgagcgccagcgctatgaacgcgccgcccgggtcgccatggaagtcgcgatgaagatgtccgacgatctgatgcgcgatgacgccgtgcgccggatcgtcaatctctgcatgaaggccgatgatctcaagaccgcgcagatcctgtctcgcgcgatccaggccggctggatccgggaagcagtccagcgggaccacccgacgctgtcgcaggaagcaccggctcgggcctga

SEQ ID NO: 8111 - DNA, 1425 bp, BradyrhizobiumColbertium
gtgggcacccccatcaccaataatccgccgcggccggagccgaaagcccttgcgagcgcgctggagcagcttgccgcacgcttcggcaaccgcctcatcacctcgcaggccgtgcgcgagcagcacggccataccacaacatggctacccaaccagccgccggatggcgtggtgatggcgcaggagacagccgacatccaggacgtggtgcggatttgtgccagaaaccgcgtgcccgtcatcgccttcggcaccggcacctcgctcgaaggccaggtcaacgcgccggccggcggcatctcgatcgacttgcgcgacatgaacaaggtgctcgcggtgcatgccgaggacctcgactgcgtgatccagcccggcgtcacccgcaaggcgctcaacgagcatctgcgcgaccagggcctgttcttcccgattgatcccggcgcggatgcctcgctcggcggcatggcctcgacccgagcctccggcaccaacgcggtacgttacggcaccatgcgcgacagcgtgctggcgctgaaggtggtgcgcggcgacggcgagatcatcaccaccggcacgcgcgccaagaagtcatccgccggctacgacctgacgcatctgttcgtcggcgccgagggcacgctcggcatcatctccgagctgaccatccgcctgcgcggcattcccgagaccatcgccgccggcgcggtgtcgttcgggaccgtgcacggtgcctgccaggccgttatccttgcgatccagaccggcattcccgtggcgcgcatcgaactgctcaacgccgcgcaggtgaaggcctgcaacgcctattcgaagctgacgctgccggagacgccgctcctgctgatggaattccacggcagcgaaatcgaggtcgccgagcagtccaaggccttcggcgagatcgccaaggagtgtggcggcggcgatttctcctggaccaccaagccggaggaccgtaccaagctatggcaggcgcggcacgacgcctattggtccgtgaaggcgttgcggcccggcgacagcatcggcgtggtcgcgaccgacgtctgcgtgccgatctcgcggctcgccgattgcgtcggcgagaccgaggaggatctcaagcgcctcaatctgctgtcgccgatcgtcggccatgtcggcgacggcaatttccactgctcgctggtctgcgacatcaacgaccccgacgagatggcgcgtggcgaggagttcatgcatcgcctggtcgagcgtgcacagtccatggacggcacctgcaccggcgagcacggcatcggccagggcaagcagaaatatctcaaggccgagctcggccccgaggcgatcgaagcgatgcgggcgctgaagaaggcgctcgatccgctcaacattctgaaccccggcaagatcgtcccggaagcatag

SEQ ID NO: 8112 - DNA, 507 bp, BradyrhizobiumColbertium
atgccggacaccgccgcctcagcgcccaaagccggaccgttccgcgcctcgatcatgcaaatcgagccgcattggatcgactataatggccacctcaacatggcctattacaacgtgatgttcgaccgcgcgatcgaccagctctggctcgagctcgggatcgggcccggctacatgaaggagcgcggcggctcgaccttcaccgccgaatgccacgtgcggtacttgcgcgagatccatctcggcgatcccgtgcagatcttcgtctggctgctggaagcggacgacaagcggctgcacacgttcgaggagatgcggcacgcgagcgaaggctggctgtcggcgacctcggagaacatgtcactgcacatggacatgagcgcgcggcgcgtcgcgccgtttccgcccgatatccgcgagcgtatcgctgtggtcaccaaggcccacagcgccgtggcgcgaccggagggcatcggccggaacgtggcgatgccctcgaagcggtga

SEQ ID NO: 8113 - DNA, 228 bp, BradyrhizobiumColbertium
atgtggcgcggcaagccgcgtcgacgcagacaacatcaggacgagggattgaccatgctaggctgggttgtgacgtttctggttattgcactgatcgccggcatccttggcttcggcggcatcgccggcgcttcgatcgagatcgccaagatcatcttcttcatcgccgtggtgctgttcctggtctcggccgtggtcggcttggcgcgcggccgcaacaggatatag

SEQ ID NO: 8114 - DNA, 2568 bp, BradyrhizobiumColbertium
atgattcgcatgaccgagccaagcaagatcacagccgttcccgaccaccaacccgcagccggcggcatcgccgcgcgtgcgcgcgcctcggtgggcccgaaatacctctccgggctcaatccggagcagcgcgaggccgtggagacgctggacggcccggttctggtgctggccggcgccggcaccggcaagacgcgcgtgctgaccacgcgcatcgcccacatcctcagccagggccgcgcccgccccgccgagatcctgtcggtgaccttcaccaacaaggccgcccgcgagatgaagcaccggctcggccagatgctcggccatgccgtggaaggcatgccttggctcggtaccttccactccatcggcgggcgcatcctgcgcatccatgccgagctggcgcagctcaagtcgaacttcaccgtgctcgatgtcgacgaccaggtacggctgctgaagcagctgctgcaggccgagaacatcgacgacaagcgctggccggcacgcatgctggcaggcctcatcgacggctggaagaaccgcggcctgatgccctcgcaagtgccttcgggcgaagctgcgatgttcgccaacggcaaaggcggcaagctctatgcgagctaccaggagcggctgaagatcttgaacgcggccgatttcggcgatctgctgctggagaacatccgcatcttccgcgagcatcccgatatcctcaggcagtaccagcagcgcttcaaattcatcctggtggacgagtatcaggatacgaacgtcgcgcaatatctgtggctgcggctgctgtcgcaggcgccgtcctccagttcgtcattgccgggcttgacccggcaatccatcgcttcgtcacaagatggatcaccgggtctcgacgctgcgcgtcggcctgatgacgagagacatgatgcgaggcttgtttccgcgagcgaaaagggccccaccaggaacatctgctgcgtcggcgacgacgaccagtcgatctatggctggcgcggcgccgaggtcgacaacatcctgcgcttcgagcacgatttccccggcgccaaggtcattcgtctggaacgcaactaccgctcgaccgggcatatcctcgccgccgcctcgcatctgatcgcacacaacgaaggccggctgggcaagacgttgcgcaccgaggaccaggacggcgagaaggtaaccgtcacgggctcctgggattcggaagaggaagcccgcggcatcggcgaggagatcgagcagctgcagcgccagggcgagaagctcaacgagatcgccattctcgtgcgcgcctcctaccagatgcgcgagttcgaagaccgcttcgtcacgctcggcctgtcctatcgcgtcatcggcggcccgcgcttctacgagcgcgccgagatccgcgacgcgctggcctatttgcgcgtcatcaattcgccggccgacgatctcgccttcgagcgcatcgtcaatacgcccaagcgcggcctcggcgacgccaccgtgcagatgctgcacgaccatgcccgcaagcgccgcattccgctgttcgaggccgcgcgcgccgtggtcgagaccgacgagctgaagccgaaggcgcgcggctccttgcgcgatctcatcgcacagttcgaccgctggcgcgcccagcgcgaggtcaccgcgcacaccgatctcgcccagatcgtgctcgacgagagcggctataccgagatgtggcagaaggaccgttcggcggatgctgcaggccggctggagaacctcaaagagctggtgcgctcgatggaggagttcgagaacctgcaaggatttctcgagcacatctcgctggtgatggaccgcgagggcggcgccgaggacgacgcggtgtcgctgatgacgctgcattcggccaagggcctcgaattcgataacgtgttcctgcccggctgggaggaaggcctgttcccgagccagcgcacgctggacgaacagggccgcgctggcctggaagaagagcgccggctcggccatgtcggcctgacccgcgcgcgccgccgcgcgaagatctattttgcgaccaaccggcgcatccacggcacctggtcgaccacgatcccctcgcgcttcctcgacgaattgccggcggccaatgtcgagatcacggaatccaagggcggctccggctggggcggcagcggcggctacggcgcctcgcgcttcgacgacatggaggcgttcggctccagctactcgacgccgggctggcagcgcgcgcaggccaatcgcaatcgcggtggcggcagaagcggcttcgaggaagagacggcgacgttctcctcggcctcgtcatccggaccggatttcggcagcttctcctcgcgccgtcgcgggccgatgaccatcgaaggcgagttggtcgccaaatccaccggcacgacctcggaatttgcgctggacgaccgcgtcttccaccagaaattcggctatggccgcgtcaccaggatcgacggcaacaagctcaccatcgccttcgacaaggccggcgagaagaaggtcgtggacagcttcgtgcagagggcgtga

SEQ ID NO: 8115 - DNA, 285 bp, BradyrhizobiumColbertium
atggctcagtacgttgccatcatcgaggacgcagccccggacgcggtcagcctctggtttcccgacctgcccggctgcatctccggcggcgacgacgtcgacgaggcgctggagaatgcgcccgaggcaatcgcgttctacgcgcaggagctgatcgcggaggggcgcgagcttcctccgccgcggacgctggacgagctcagggccgcccctgaatttgccgacgacctcaggaaccacacggccgtcctggtcgaatggccgcccctcccggctgcggattga

SEQ ID NO: 8116 - DNA, 390 bp, BradyrhizobiumColbertium
gtgcttgcattggggatgccgtcgcttgcggcggcggagaccatgagctttggtgattcgatcggcaagctggcggcgagctgcggtgcagagatcatcgccaattgccgcggcgtcaacccggattcgaaccggctgaaggagtgcctgtcgcgcaaccgtgacgtcctctcgccgcaatgcgcgagcgattacctcggcgctttcgaggccattcagaagcgcgtcgccgcgcgcgtgaccgtggcgaatgcctgtcagcgcgagatcgtcaaagtctgcgggggctcgaccaaggagacaagcaagtcgattccctgcctggtctcgacgcccaagggcatcagcaacaactgcctgaaggccgttgacgacgcggggtatcgctga

SEQ ID NO: 8117 - DNA, 666 bp, BradyrhizobiumColbertium
atgcgcgcgcccaggcacatcatgactggagcggccgttgcgctggggctcgccttgctgccgggcaccgcgggcgcgcagacgtcagcgccgacccgcgacgagatcgtgagcaagctgaaccggttcgaagaagcggccgagctcgatctgccgacgctgaagcagcaggtgatggagcgcgccaagaccaggatcaagaacgatccaggacccgtgaaccggccgctgatagcgcccgatctggccaagctgcccgccttcaatgcgcagatccagttcgacacggacacgccgatcattcagccggcttcctaccagaccgtcggccgcatcgcggacgcgctggtgcattcctcgctgctgccctacacgttcctgatcgtcggccatgtcgaatccaattcgaagacgcgcgaggccaatgcgatcctgagccagcgccgcgcagatgcaatccgcgatgtgctggtgaacacgttcaagatctcgaccaagcgactgcatccgatcggcctcggcgaggagcagcttctcgaccgggccaagccgacctcgcccgtcaacggccagttgcagatcctgacctatgccaagctgccggaggaggcgccgcgtccggctgctcctgcgcctgcggcgaaaaaacccgccaggaagcactga

SEQ ID NO: 8118 - DNA, 519 bp, BradyrhizobiumColbertium
atgggtggctttttccagcgccaacttgccgtctacgtcgagtatcatcgcgatccccggaacacggcgatgcatgtgatcggtattctcttgctcttcaccggcgcagtgctgccgttgacgctggtcaagtttccgctgttcggtttcgacgtcagcttggcagtgatcctggccctgccggtattgatttattggctgctgctcgacgtggcgctcgggctcggcattctggccgtctccatcgtgctgttttcggtggcgacgacgatcacggcccaagtcagcatcgcgacgatgtgggcgattttcgccgcgctggtggtgctcggcctcgccgcgcaaaccatcggccacaaggtttttgagggccgcgaggcctcgttgttcacttttccctcgcatcttttgcttggaccgatgttcgtgatggcaaaattattcattgccttgggcttccgtcgcgaccttgccgcgattctggcgcctcttccgaccaattccctttccgcccgataa

SEQ ID NO: 8119 - DNA, 1032 bp, BradyrhizobiumColbertium
atggctctcgtcctggttaccggtggcagtggcttcatcggacatcatctcgtagaagcgctccgcgcccgtgggcagcgggtgcgggttctcgatgtccgtccaccggccgccgcgaacgcggacgttgaatatgcccatgcctcggtgctggaccgcgatgcggtggatgcggcgctcgccggtgtcgatcgggtctatcacctcgccgccctgcccggcatgtgggtcgccaacaagcaggacttccacgaggtcaattgccgcggcaccgagatcgtgctcgcggcggcgatgaagcgcggcgtctcgcggttcctgcattgctcgaccgaatcgatcctgttcccttattccgacctcaagggtgttcccgccgaggaagcgctgcaggcggccgaggcaatgcccggcgcctatacgcggtcgaaggcgctcgccgagcatcatgtcgcaaaggctgcagccgcgggcttccctcttgtgatcggcacgccgaccatgccgatcggcgctgccgaccacaatctgacgccgccgactgcgatgctctggtacttcctccagaagaaggtgcagccgcatctcgacttcctggtcaatctcgtcgacgtccgcgacgtcgccatgggcctcctgctgaccatggagcgcggccgcgccggccagcgctacatcctcggcggcgactgcgtcacgctcgggagtgtcctgcggatgatgtcggcgatgagcggccgccggcagcttccggtcgtcgtgcccggaaagctcgctgagctatcagccatcatgctcgaatacatcgccgatcacgtgacccgccggccgcccaacggcaccgccgagggcgtgcgcatcgcgcttgccgcgagcgatctgtcgatcggcaaggctcgcaccgagctcggctattcgccgcgtccgatcgagccggtgttgcgcgaaaccattacccatctgctcgcccgcaacggcgagcagccctccggcgccctcaagcatcacgcgctctcctcgcgcgcgagctag

SEQ ID NO: 8120 - DNA, 627 bp, BradyrhizobiumColbertium
atgtccttcgatttcagcaaacttctgtctgtcgcctggggtggctggaccacgacctggccgacgcaactcctcgccttgatctggcttgcctggctcgccagctggatcggcgcctcgttctggcagggccgcacgcagaagcaggtgatgacgctggagtccggccgctatcgcatcccgattctcgtcggtggcatcctgttcacgccgtggactgcggaagtgctgaacgagaagccgctctgggtgttcagcaacacggctgtctatgtcaccgcgctgatcgtgctcgccggcatctcgttcacctggtggggccggctgcatctcggcaagttctggtccaacaccatcacccacaaggaagaccatcgcgtcatcgacaccggcccctacggcatcgtgcgtcatccgatctacaccggcctgatcgcgggcatgctggcgaccggcatcgccgtcggcacggtgactgctatcctcggcgccatcctgatctcgctcggcatgtggcaaaagggccggatggaagaggtgttcctgtcgaaggaactcggtgaagatgcctatggtgcttattgccgccgcgtgccgatgatcattccgttcctgtcgccacggtag

SEQ ID NO: 8121 - DNA, 210 bp, BradyrhizobiumColbertium
atgtcggacgcctacgattattttcgcgagcacgccattgccgccgtccgcaaggcgcgggcgcttccgcgtggccgggcgaagcagaagcagcgcacggtggcccgggtctaccatctgttgtccagagaagccgcgctggcccccaacatccaccacctggaagattttcgcgcggcgcggcggctggagcggcagatcggccgctga

SEQ ID NO: 8122 - DNA, 1305 bp, BradyrhizobiumColbertium
atgacgttttccagcatcttcgcgcagttcgtcgctctcatcggcggcatcgcgctgcaatggcgaaagatgtcgggcactgagcccgcgccggcctggggcgagacgccggcgattcccgaggcgaagccgcaaggcgcgattccgacgttgaagatgccgaccgcgcgcggctggcgcgagggtcagaagccgactgttgcacccggcctcaaggccaatgcgttcgcgaccggtctcgaccatccgcgctggatcgaagtgctgcccaatggcgatgtgctgatcgcggaagcaacgcagatcgcaggtcccccgcgcacggtgtttcactttgcgatgcaggcgaccatgcggcgtgccgcggcgcttggcgtttccgctaaccgcatcacgctgctgcgcgacaacgacggcgacggcgtcgccgaagttcgcggcgccttcatggagaacctgagccagcccttcggcatggccctggtcggtgacaccttctatgtcggcaacaccgacggcgtgatggccttcccttacgttgccgatgccgatcgcatcaccgcgccgggcaagcggctcacgacgttcaagccgggcgggcactggacgcgcagtcttctggcaagccccgacggcaagaagctctatgccggcgtcggctcgctcagcaacatcgccgagatgggcatggaggtcgaggaaggccgcgccgcggtctacgagctcgacctcgcggccggcacgcatcgcatcttcgcaagcggcctgcgcaatcccgtgggcctcgcctgggagccgaacacgggcgtgctgtggacggtcgtcaacgagcgcgacggcctcggcgacgaaaccccgccggattatctcacctcggtgcgcgacggcggcttctacggctggccctattgctattggggcaggaccgtcgacgaccgcgtgccgcaggatccggcgatggtcgccaaggcgcttcagccggactatgcgctcggcggccacaccgcttcgctcggcctgtgctggatgcccgccggcaccctgcccggcttcggagacggcatggtgatcggccagcacggctcgtggaatcgcagcaagctgtccggctacaggctggtgttcatcccattcgaaaacggcaagccgtccggccccggtcgcgacatcctgtcgggcttcctgtcgccggacgagaaggaatcctatggacgtccggtgggcgtcgcgatcggccccgacaagacgtcgctgctgatggccgacgacgtcggcaacgtgatctggcgcgtgacgggcgcgtaa

SEQ ID NO: 8123 - DNA, 825 bp, BradyrhizobiumColbertium
atgactggacagagagcggcgggcgaactgaaagttgccattgcaggactgggctcgatcggcaccaagatcgcggctgctctggatcggggtatcgagggactgacgctgtccgcagtcgccgtacgcgatcccgccaagcatcacgctttcatcggcggcctgcggcgcccgccgcagatcatgccgatcgaccagctcggcggtgccgccgacatcgtgatcgaatgcgcgccgagccggcatctgcgcgagatcgtcgagcccgccgtgaagcggggcaagaccgcactcgtcgtcagcgtcggcgggctgctcgacaatttcgatctggtcgatctcgcccgcgccaatggcgggcgcatcctcgtgccgaccggcgcgctgatcgggctcgatgcggtgaacgccgctgcaatcggcaccattcattccgtgaagatggtgacgcgcaagccgatcgacggcctgaagggcgcgccgttcatcgtcgagaacaacatcgacatcgacaagctgcgcgagccgctgaagctgttcgagggtacggcgcgcgaggccgcgaagggctttccggccaatctcaacgtcgcggtcgcgctgtcgctcgccggcgtcgggcccgatcgcacggaggtgcagatctgggccgacccgactgtgacgcgcaacgttcaccgcatcgaggtcgaggcggattcggcccgcttctcgatgtcgatcgagaacatcccgtccgagaatcccaagaccgggatcatcaccgcgctgtccgtgatcgcgctgctgcgcaagcagcgcgccacgctctgcgtcgggacgtaa

SEQ ID NO: 8124 - DNA, 921 bp, BradyrhizobiumColbertium
gtgctggcagcggttgggctgctcgccctcggcaccggcgcgaccggtgcctcacaggccagaacgaagccggccgcggccacgcctgttgcgccgccgcctccgccgttcgagccgttgccgccgccgaaggtctacctcttccgcggtgccatgggtccgatcttctcgaccgggatggaccggctcggcgagaagctgacgcaggccggcttctccgccgacgtctatgaattcaccttgtgccggttcatcggcaaccgcgtcatcgccagctacaaggaaaaggcggcgccgatcgtcttgatcggccactccatgggcgggctgtgctcgatcgtcatctccgagatggcggccgaggagaacgtcccgatcagcctcgtcattgccatcgaccccgcgcatgcgaccggcgacgtgccgctcaacgtcgagcgcttcatcaacatcttcctgtccgacagcgtgctcggcggcggcgatgtcgtcgccgtgcccggctttcgcggccattacgcgagctacgacctcaaggaaaatgcgcgcgtcagccacatcaacatcgagaagtcggacgacatccatcgtcagatcgtcgagatggtgacgcagctgccgcgcataccgccgcagacccaggccgatgccgtgccgctgcgctacctggtcccggcggacacgctggtcgaattgtgggcctccggcgtccgggtgccggtgcggcgcggcgacaccatggaaagcatcgccgctgccaatcgtgtgccgctgtggacgctcgcgcagagcaattcactgcccgagaacgcgccgctgaccccgggccagaccatcatcgtcccgcgccatctcacgccgcccgagccggccgccgcgatggcggctcctcccgtggctccggcgacatcgcggaagtaa

SEQ ID NO: 8125 - DNA, 729 bp, BradyrhizobiumColbertium
atgagtccgaacggccgtcacaccgctggcgccagccaatcgtccacccttcgcatgtgggcgatgggcctgctcctgctgtcagctgttgccatcagcccgaccgccgccaaggcggcgccgagccaggccgcggtcgcgaccacgcacgtctatttgctccgcggcgtgctcaacatcttctcgctcgggctcgacaccatcggtgcccggctccaggcgcggggcgttccggtgaccgtcgccaacttcgtctcctggtcctcgctcgccgatgaagccgccgccgcctaccgggccggccggctcaaaaccatcatcctcgtcgggcattcctcgggtgccaccgcgctgccggacatgatcgccaagctcaatcagctcggcgtccccgtgaagctcgcgatcggcctcgattccgtcttcaagaccaagctctcgaccggcgccgaccgctacatcaacatctatatcggcgatggtcccggcgagccggtgcgggccgcagcgggttttcgcggcaagctcgacaacgtcgatgtgcgtggcaccggcgtcggccatatctcgatcgacaagaacgaagcgatccagcgtcgcgtcatcgccgagatcgatgccgcgatcatgcgctcgcgcgcgcccgcggcgccggccgccccggtcgccgaccagggcacgccgcggcaggcgcgctcggcagcagcggcggctccggcgaggaactga

SEQ ID NO: 8126 - DNA, 924 bp, BradyrhizobiumColbertium
atgccttccatcatttccgtcgccaatctgtcgaagacctatgggtccggcttcaaggcgctcaagaacgtcaacctcgacatcaagcgtggcgagatttttgcgctgctcggccccaatggtgccggcaagaccacgctgatctcgatcatctgcggcatcgccaatccaagtgaaggccgggttctggtcggcggcgaggacatccagacctcctaccgcaaggcacgttcgctgatcggcctcgtgccgcaggaattgcacactgacgccttcgaaagcgtgtgggcgacggtgagcttctcccggggcctgttcggcaagccgaagaaccccgcccatatcgagaaggtgctgaaggatctctcgctgtgggacaagaaggacaacaagatcatcacgctctccggcggcatgaagcgccgcgtgatgatcgccaaggcactgtcgcacgagccgcagatcctgttcctggacgagcccacggccggcgtcgacgtcgagctgcgcaaaggcatgtgggaggtggtccgcggccttcagcagtccggcgtcaccatcatcctcaccacgcactacatcgaggaagccgaggagatggccgaccgcatcggcgtcatcaacaagggcgagatcgtgctggtcgaggacaagacgaccttgatgcagaagctcggcaggaagcggctgacgctgcatctgcagaacaaggtcacctcgttgcccgaaagcctcgcgcattacgagctcgagctctgcgatgagggcgccacgctggtctacgattacgacacccagggcgagcgcaccggcatcaccagcctgctcggcgatctgcgcaccgccggcatccgcttcaacgacctcgacacgacgcaatcgtcgctcgaggacatcttcgtcgacctcgtgaggacgtcatga

SEQ ID NO: 8127 - DNA, 129 bp, BradyrhizobiumColbertium
gtgggcgcaggtcagtttttcagccggtacccggtgcggaaaatccaccagatcacgacgaggcagatcaccaggaacgccagcgtcatgccaacgctgacggcgatgctgacgtcggcgatctcgtag

SEQ ID NO: 8128 - DNA, 573 bp, BradyrhizobiumColbertium
gtgcaatatgcctgcaatccggctttcgttccagcgacctggccgcccatcgttaacgcgacgcctgatgtaagcaagcccgccttgtggcgtgagagtgcggcggcgctgacattttcgcgatccgggcctgcgctcacgacgccgacaattcgtcacaaaagccgcaaccattccaccgcgtcgaacgttgatcgtgttcaccctgcaccggcgcatgccgccaagcacctcacagaccctggaatgaacatgaacaaagcccatgtcgccgcgctgccggccggttcgcccgtccgcctgctgttcgcagccgtcgctctcgtgctcgcgctgttgtcgctgccgcaggcgggccatgcccagggcatcgtgcgcggcgcccgggagggcgcctatgagggtaatcgcattgggggtcccgtgggcggcgcagtcggtggcgtcgtcggggcaggcgtcggcggcgcagtcggcgcagtcgagggggtgctcggtattccccaccgtcattcccgccgcggctgtcgtggatattacgaccgacatcaccgcttccattgttatcggtga

SEQ ID NO: 8129 - DNA, 795 bp, BradyrhizobiumColbertium
atgcgtttccagatgcgtacctttttcatcgctttctccacagtgctggttttgggcacgggcaccgcgcaggccaaggtcgagatcaccgtcgacaaggacaatcagcagatgatcgtcgcggtcgacggcgtcgcgcgttatcgctggccggtctcaaccggcgtcccctcgcgcgagacgccgaacggatcgttccgcgcctttcgtatggaagaggatcactactccaaggaattcgacgacgccccgatgccgcacgcgatcttcttcaccaaggtcgggcacgccatccatggcaccgactcggtcgggcggctcggctcgccggcctcccatggctgcgttaggctgtcgcgccagaatgcctcggcgctctatgcgctggttcagcagcagggtgtgctcaacaccacggtgacgttgacgggctcggcgcaggtggcgatggcgcgcaatccgcgtggccgcaatgccacgacaatggcccgcgcaccgcaacccgctgaagagcagtacgcaaccaccggcgatcccgtgaatctgacgccgccggcgcagcccgcgcgccgctacatgccgcaggacgataattacatctatccggcagacggcagcgacaccggcgcgcgatatccggcgccgcgctcggccggccggccgctctatgacgcgcaagtctatcagcagcagccgcgaccctattacgatcagggctacggccagcaaggttactattatcaacctcagccccggcagtactatcagccgcgcggctattactatcagaattga

SEQ ID NO: 8130 - DNA, 996 bp, BradyrhizobiumColbertium
atgccgtcgcgtgccacgaccattctgattgcgctctgggtgttgatggcgggaccggccatgggatctgatgcgaccttcgacatcgaggcgcatcgcggcggtcgggcgctgttgccggaaaattccctgcccgccttcgccaacgcattgtcgatgggcgtggacacgctggagctcgacgtcggcgtgactgccgatggcgaggtcatcgtctcgcatgagcgcgggctcaatcccgatctctcacggaggcccgacgggacctacatcactccgcccgggacgcccttcgtgaaattgcggctcgacgaggtcaggacctatgacgtcggccagattcggccggacagtgcctacgctaaacaattcccgagccagcgggccgtgccggggacgcgcattcccaccttgcgcgagctgttcgcgctggtgcgcaagtccggcaacacaaaggtgcgcttcaacatcgagaccaagatcgatccgaaccgtccggatgaaacgcttggtccgcaagatttcgtcgcgaagctgcttggcgtgatcgagagcgagggattctccgagcgcgtcatgatccagtcgttcgactggcgaaccctgcttgtcgtccagcagcaggcgccgaacatcccgaccgcatacctgacgatccagcgcggctcgagccagaccgtgacacgcgacagggcgacgaactggacggcggacttcaatccgtccgatcacggcggctcgctcccacggacgatcaaggctgcgggcggcgcgatctggtcgcctcatttcggcgatgtcaccgccgcgctgatctcagaggcgcacgaactcggattgcgcgtcgtggtctggacggtgaacaagcgcgaggacatgacgcgcatgatcgagctcggcgtcgacgggatcatctcggacagcccggacctgttgcgccaagtcgccggcgcgaggggcattgcgctgccggcggggacgcctgtggagccgtag

SEQ ID NO: 8131 - DNA, 2283 bp, BradyrhizobiumColbertium
atggattccatcgtgcaacccgccgccacggagctgccgtcctcgtcgcgcaaccggctgttgctggcggtctacacggccgcgatcttcgtcagcgcgctgctgctgttttcggtgcagccgctgttcacgaagatggtgctgccgcggctcggcggctcgccggcggtgtggtcggtggcgatggtgttcttccagtcgctgctgctcgcgggctatgcctatgcgcatctgctgatgcaggtcagaaaccgcgtcgttcctgtggcggtgcatctggtgctgctgatcgcggctttcgtcatgctgccgctcggcatcgcatccgcctatggcgagccgcccgctacgggctatgcgttctggctgctcggcctgttcgtggtctcgatcgggttgccgttcttcgcgctcgccgccaacaatccgctgctgcaggcctggttcgtccgcaccggccaccccgccgcgcacgacccctatttcctctatgcctcctccaacatcggcagcttcctcgcgctgctgtcctatcccttcctgctggagccgatgttcacgttgcagatgcagaaccggttctggaccgcgggttacggcctcctgatcctgctgatcggtgcctgcggcgtgctgctcttgcgttccccgaagctggcattggcggtggatgcgcgggccgaggacgtggacgcgccggcgcccagcctttcgacgcgactgcgctggatcttcctcgcggcggtaccctccggcctgctcatcgcggtgaccgcgcacatctccaccgacgtcgccgcggcgccgctgctctgggtgctgccgctgtcactgtatctgctgacatgggtcgtcgtgttccagtcgcggccgttgttgccgcacaaatggatgctgatgctccagccggtcgcgatcgccggcgtggtgcttctgctggcctatggcggcgagcagaatctgctgctgacgctcggcgggcaccaactctgcttcttcgtgatcgcgatggcctgccatggcgaactggcacggaccaggccggcggccagatatctcaccggcttctatgtcgcgctgtcgtttggcggcatggtcggcggcttgtttgccgggctcgttgcgccctacaccttctcgtggatcgccgaatacccgatcctgatcgcgctcgccgcgctgtgccgtccgtccgcgaacgaacgccttgcgggcatcgccagatggtactggctggcgctcgccgtgctcgcggtggcgctcgtggctccctcctatacgacaggcgacctcacgacctggttcgaagatcatcgcgtctgggtcgccggagccatcggcgttctggccgcgctgctcgcgctggtcctcaacgccgaccgctggaagatcttcgccaccgtcgcgctcgcgctggtgttgatccgcgtttatcccgcagacgaaggccgcgtcacgacggtgcgcagcttcttcggcgtgcacaagatcgtggtgacgcccggcggctatttccatgtgctgatgcacggcaccaccatccacggtgccgagcgcttccgcaacaatgacggcacgccggtcgtcggccggcccgagccgatcacctattatcaccaagacggcggcatcggtcaggccgtcagcgcgatccgcgagcgcaagggcgcgccgctcaaggtcgccgcgatcggcgtcggctcgggcacgctcgcctgcgcggccgagccgggagagagctggaccttcttcgagatcgaccagtccatggtcgatgcggcgcgcgaccccaggaatttccgctacataccgagctgcatgccggacatgaagcccgtgatcggcgatgcgcggctcaccttcgccaaggagccggacggcgcctacgacctcgtcatcgtcgatgcctattcatccgacgcgatccccattcacctcgcgaccgaggaggcgatgaagatctacaaggacaagctcgcaccgcatggggcggtggtgatgcacgtctccaaccggcatctcgatctcgagaccgtcgtggtcggcattgccgacgccaatgacctcaagagctgggtcttcaacgaggattcgggtcgcgattccgactacatcttctcgaccgacgtcgtcatctccgcccgcgaggaggccgacatcggcaagctcgcgtcctccaagcaatgggaacagaccgaagccgacgacagggctcgggtctggacggatgactattccaacatcctgggcgcgttgtatcggcgttggaagaacggggagtag

SEQ ID NO: 8132 - DNA, 1611 bp, BradyrhizobiumColbertium
atgacagaaaccgacgtcgtcatcatcggcgcgggccataacggcctcacctgcgcggcctatctcgccaaggcgggcctgcgggtgcgcgtggtcgagcgccgcaaagtggtcggcggcgccgccgtcacggaggagtttcatccgggataccgcaattcggttgcggcctacaccgtgagcctgctcaatccgcaggtgatccgcgacctcaggcttgccgagcacggcctgcgcatcgtcgagcggcgcgcccagaatttccttccggcgcccgacggcagctatctcatcaccggcgaggggcggacgaaggcttcggtcgcgcggctcagcgcacatgatgcagaggccctcgacggcttctcgcgcgagctggaaggcatcgccgacgtgctcaggcagttcgtgctgcgcgcgccgccgaacctgcccgagggtttcggcacgagtgcgatccgcgagtccgtgaacgcgttgaagacggccaatatcctgcgcggcctgacgctggaacagagccggagcctgctggatctcttcacccgttcggccggcgaaatgctggacgagcgtttcgaacatgatctcgtgaaggcgctgttcggcttcgatgccatcgtcggcaactatgccagcccctatgccgccggttcggcctacgtcatgctgcatcacgccttcggcgaggtgaacggcaagaagggcgtctggggccacgccatcggcggcatgggcgcgatcgcccaggcgatggcgcgcgcggcacgcgagtgcggcgctgtgatcgacaccgatgccggcgtccgcgaggtcatcgtcgagcgcgaccgcgccgtcggcgtcgtgctggagaacggctccgccatccgcgccaaatatgtcgccgccaacgtcaatccaaagctgctctacacgcacctagtcgcgaccaacgcgctgcctgcggacttccttgctcgcatccggcactggaagaacggctccggcaccttccgcatgaacgtggcgctggaccacctgccttcctttacggcgttgccgggcgaaggcgatcatctctcttccggcatcatcctggcgccgagcctaggctacatggaccgcgcctggctcgatgcccgtgcgcaaggctggagccgtgagcccgtggtcgagatgctgatcccgtccacgctcgacgatacgctggcgcccgaaggcaagcacgtcgcgagcctgttctgccagcacgtcgcgccgcagctgccggatggaacgtcctgggacgaccgtcgcgaagaggtcgccgacctcatgatcgcgacggtggacaaatacgcgccgggttttgcggcgagcgtgctgggtcgccagatcctgtccccgctcgatctcgaacggcagtttggcctgctcggaggcgacatcttccacggcgcgctgacgttgaaccagctgttctcggcgcgaccgatgctgggccacgccgactatcgcgggccgttgaagggcctctaccattgcggctccggcgcccatcccggcggcggcgtcaccggcgcgcccggccataacgcggcgcgggcgatcctgcgagatcaccggtcgctgttcggacgccgtggatag

SEQ ID NO: 8133 - DNA, 165 bp, BradyrhizobiumColbertium
ttgaagcgcatggttcaaaagttctggtcggacgagtccggtgcaaccgcgatcgaatacggcctgattgccgcaggtatcgctctggcgatcatcaccgtggtgaacagcctgggcaccaccatgaacgagaagttcacttcgattagcacctccttgaagtaa

SEQ ID NO: 8134 - DNA, 888 bp, BradyrhizobiumColbertium
atgcagtcttctcctacccatcgcgccagcttttcgatcggcagcgaggccgacgcgaagcgcgtcgtcgacgtgctcaccgaggtgtttttcgacggcgatgcggcggttgccgccttcgaacggccggacggacaatgggacgtcacgctccatttcgccgagccgccggatcaggcgcggctgcgcgaactcgttgaaaattcagcaggaaatgcaatcgccgcgacgctcgccttggacacgatcgaggccagggactgggtcaaggccagcctggaagatctcgtcccggtcccggccgggcgcttcgtcgtgcacgggagccatgaccgcgatcgcgtggcgccgaacaagcttgccatcgagatcgaagcggccctcgccttcggcaccggccaccacggcacgacgcgcggctgtttacttctgcttgaccatgtcctgaagagttccaggccgcggaacgtgctggaccttggcaccggaaccggcgtgctggcgatcgccgcggccaaggcgctgcatcgtgccgtgctggcctccgacatcgatcccccctcggtacgggtcgcggccgagaacgcggcgctgaacgaagttggcagccttgtgcgggtgatccgcgccaccgggtttgcggcgccggattttgcgcgggccggtccgttcgacctggtgctcgccaacatccttgccaatccgctgcggcaattggcgagcccgatggtgcggcacctctcgcccggcgcccgcgtcatcctctccggcctgctgacgcaccaggctcccgccgtgatcgcagcctaccgcgcgcgcggcctcgtcccgttgaggcatctgcggattgaggagtggagcagcctgttgctgaggaaggtgtcttag

SEQ ID NO: 8135 - DNA, 189 bp, BradyrhizobiumColbertium
atgccagcgttttcgtttgagaagatttcaccgccgttgcgcggcgccccggctgcggcggcaccgcggaagccacgcggcctcatcagccagatgatcgaccgtgtcgccgagcgccgcgcaaggcgcgccttgcaggacgagcgtgcaaagcgccgcgacgagacgccggagcaaggcggcggctga

SEQ ID NO: 8136 - DNA, 1827 bp, BradyrhizobiumColbertium
atgttcgaagcacacttccagacattcgaggagccggaggcgggcgtcgcattgacggcccggctcgccgcgctacgcgaagagctcgcccggcgcaagctgaccggcttcgtcgttccgcgtgcagatcagcagcagaacgaatacgtgccgccgtctgaagagcggctcgcctggctgaccggctttacaggctcggccgggctagcggtggtgctgccgcaggaagctgtagtgttcgtcgacggccgctacacgcttcaggccgccaagcaggtcgatgcaacggcctggactgtcgaatctttgatcgacccgccgccggaaagctgggtcgcggcgcgtatgaaggccggtgaccgccttggatttgatccgtggctgcacacttttgcggcagccgagcgcctggccgctgcgtgcgccaaggccggcgccgagctggtcgccgtcgacagcaatcccatcgacgcgatctggccggaccggccgcagccgcctctcgcccccgtcgccatacacgggattgaacatgccggcgtcaccgaagcggagaagctgacgcagatcaggggcgagatcgccaggctcggcgccgatgcgctggtgctgtcggacagccacgcggtggcctggacgttcaacatccgcggcgccgacgtcgcccatacgccgctgccgctgtcctacgcactggtgccgaaggacggccgtcccaccatcttcatcgaccaccgcaagctctccaacctgacgcgcgaccatctcgagcaatccgccgacgtgcgcgagccggacgcgatggcgccgacgctgatggcgctggccaagggcggtggatcgatcgcgctcgacaacgccaccgcggccgacgcgctgagccggttgatcgcgggcgccggcggcaagccgctgcgcggcagcgatccggttgctcttctcaaggctgtcaagaacgcgaccgagatcaagggaaccaagacggctcacgtgcgcgacgccgtggcgctggcgcgcttcctcgcatggattgatcgcgaggccccaagcggcaagctcacggagatcgacgccgtcgaggcactggaaacgttccgccgcgataccggcgcgctcaaggacgtatcgtttccgaccatctccggcaccggcccgaacggcgcgatcgtgcactaccgcgtcacccgcaagagcaaccggcggatcgcgtccggcgacctgctgctgatcgattccggcgcgcaatacgaagacggcacgaccgacgtcacgcgcaccatggcggtcggcgagcccacggacgagatgcgcgaccgcttcacccgcgtgctgcgcggccatatcgcgattgcgcgcgcggtcttcccggacggcaccacgggcgcgcagctcgacacgctggcgcggcaatatctctgggctgtcggcctcgatttcgagcacggcaccggccacggcgtcggcagctatctctcggtgcatgaaggaccggcgcggatctcgaaactgggcaccacgccgctgaaacgcggcatgatcctctccaacgagcccggctattacaagaccgacggcttcggcattcgcatcgagaatctcgagctggtcgttgccgccgacatcgagggcgccgagaagccgatgaacgcgttcgagacgctgaccctggcgccgatcgatcgccgtctgatcgatgtggcaatgctgagccgcgatgagctcgactggctcaatggctaccacgcacgcgtccgggccgaggtgcggccggcgctggacggggcgacgaaggcctggctcgatcaggccacggcggagctgacgtag

SEQ ID NO: 8137 - DNA, 1281 bp, BradyrhizobiumColbertium
atgcacggcatgaccagcaagccgccggaagcggcgcccgacaggagtgtggcgacgtcgcgcgtggtgctgttgctgctggtcgtcatgaccgggatcgcgccgatctcgctctacatgctggttccggcgctgccggtgttggcgacgaatttcggcagcgacatctcgatcgcgcagatgactgtgtcgctctacatggtcggcatcgcgctgtcgcagttgatcatggggccgctgtccgaccggttcggccggcggccggtgctgctcggaggcctggcgctgatggtggcggccagcgtcgcgtgcatcttcgcgcaagacctgcctcaattgatcgccgcacgcttcttccaggcgctgggcggcgccgccggcatggtggtgagccgcgccatcatccgcgacatctacgagcgggatcgcgtcgcctcgatgatcagcctcgtggtcgcagcgctgatgatcgggcagatggtctcgccgctcaccggcggcctgatcgagaccgccttcggctggcgcgcgatcttctacgccatcaccatcgccgcgatcgtcgtcgccgtcgggatcgcggtggcgctgcccgagacccgccgcagccgcgctgccggcagcggcttccgtggcgacgtcggcgtcctgatcaagagccgcgccttcgtcggctatgtgatgtgccaggtgctggcgtctcagatcatctttaccttcgccggcggcggcccctatatcgtcgtgactcagatggaccggagcagcgccgaatatggcgcctggttcgcgaccaccggacttgcctatctcgtcggcaatctgctctgcgtgcgctttgcgccgcggcattcgctggagaggctgatctggctggggcttgggctccaactctgtggcagcctcttgaatctgctctggagcttcatcggctggaacgaagcgcccgcctggctgttcggcacgcagatgatcgtgatggtcggaaatgccttcgtgatggcgaactccgcggccggcgcgatcagcatccgcccggaagcggccggcaccgcctcgggtgcgatgggattcctgcagcagggcatcggcgcgctgatgtcgcaattcggcgcctatctcggcggccactccgcaacgacgctgccgctcacctcggcagttctggcgatctcgctgctctgcgcctgcgtgatgatcttcgtcgttccccgccgcgacatggtggtgagcgagaagctgatcgagcaggcggaggaggaagagcgcggcatgatttga

SEQ ID NO: 8138 - DNA, 132 bp, BradyrhizobiumColbertium
ttgagggggacgccggctccggcagcttcgatccaacatcccgctaccgcaaccattacgcatgatcgtcggtcgacgctcgccgcggttgacgaggatcaatgcaagctggccgaccttcgccgagcctga

SEQ ID NO: 8139 - DNA, 444 bp, BradyrhizobiumColbertium
atgaccgaacgccgcgccggctacgacagcaaaagcgcaatcgatcctcaagacgtagccaacatgctcgaggcgatgaagcaaatcggtctcgatatctccgtccccgccgtcaacgaagaagcccggatcggtaacgtcctgtacgccagcggcggctgcgacccgcacgattgctccggcttcaagccgggaagctgcagcggcgtcacgtgccccaccaagtccagcgcctgtccgactgaatcgtgctcgacgaaagtctgcgccaaccatacgtgtcaaagtgtgagttgcgaaaaagtctcctgcaacaactaccaccattgggaatcgcgggcatcgacgcacggcgccttggtcgaagcaatgtccagcctgccggacggatcctggtcgcaactgtcgtcccgttcgctctcagcacccgatcgcgcgacctga

SEQ ID NO: 8140 - DNA, 1359 bp, BradyrhizobiumColbertium
atgaagatctcggcctacaattgtctgacctcatctttcgttccgggcaagcatctcgcgttcaacgcgctgactggtgcattcctgtcgctggatgacgaacggctcgacgactacgccactctgcttcggtcgatcgacgccacggggtgcccacccgaccccgtcaggccatttcagaagaccttgatcgagaacggcttcgtcattccggacgaatgcgacgaacaggccgagatcagcaaccgctaccatcgcggcaaggccgcctcgcgcggccttggcctcaccatcgcgccgaccatcacatgcaacttcggatgcagctattgcttccagagccattcgaacacccgcatggacgacgaacgaatcgacgatctgctgacgttcgtggaagcccggctggaggccgggacgtcgctcagcgtcacctggttcggtggcgagccgcttggtgcgttcgacgtgatcgaaaaactggcgccccgacttcacgcgctcgcggtggagcgcgactgcacgttcgggcacagcatcatcacgaatggctacctcctgacggagccgcgcgctgccttcctggcaagcatcccgggattcggggatgcgcaggtcacgctcgatggcgcaaggaagcaccacgatgctcgtcgaccgacccttgccggcaacggcacgttcgatcgaatcctggagaatctggttgccgcggcccggcatatcccgatcctggtgcgcgtgaatgtcgatcgtcgcaatatcgacggagtggaagatctgctggatgcgctcatcgagcgtggattgcgcaacgtcggcgtctatctcggccatgtctggcgctacactgacgaggtcggcgcgacggatctccttaccaaggaggagttcgcggccatcgagacgcgattcaagtttctcaagttccgcaagggattcgcaatcgggtcttcgttgccgcaacccaaactcggggcgctctgctcggcggacagcagcaacagtttcgtgcttggcccgggcggcggcatcttcaactgctggaatgaggcccaccgggacgtgcatcaggcgcccggccgctatagtccggcgacggagccgcaccccggcgatgtcaagcagcaatgggcagggtatgaaccgtcggccaagcccgcatgccggagctgtcacgtcgcgccgctgtgcatgacgggctgtccctgggaggcggcgaaactgaacgacagaggcgactgtatttcggcgcgcttcaatctcgccgaccaattgcggttgtacgatctcgagcagtccattgcgctcgccgaaaaggcgaggcaaccgccagcgcgacgcaccgagatcgtctga

SEQ ID NO: 8141 - DNA, 2157 bp, BradyrhizobiumColbertium
atgatggccagagcagcaaaatccaaagcagcaccgccgcgcgatgtcgccgatctcaccaaggcgcaggccaaggtcgagcacatgcggctcgcgctcgagatcgaggggcacaacgagcgctactatcaagaggacgcgcccaccgtcaccgacgccgagtacgacgcgctgcggcagcgcttcaatgcgatcgagaagcgctttcccgaattcgtcaccgcggactccccctcgcagaaggtcggcgcggcgccatcaggccgcttcaggaaagtccggcatgccgtgcccatgctgtcgctcgacaacgcctttgcggaagaggacgtgcgcgacttcgtcggccgtatcgttcgcttcctgaagctcgatgacgacaagatcaacttctcggccgaaccgaagatcgatggcctgtcgatgtcgctgcgctacgagggcggcgagctcgttaccgccgcgacgcgcggcgacggcgcggtcggcgaggacgtcaccgccaacatccgcacgctcgaagacgtgccgcagaagctgaagggccgcaacgtccccgacatctgcgaggtgcggggcgaggtctacatgaccaagaaggccttcctcgcgctcaacgagcggcagaaggcggagggcggcaccatcttcgccaacccgcgcaactcggccgcaggctccttgcggcaaaaggacccgaccatcaccgcctcgcgcccgctcggctttttcgcctatgcgtggggcgagatgagtgcgatgccggaagatacgcagagcggcatgatccactggttcgagcgctgcggcttcaggaccaatccgctgaccaagctgtgccattccgtcgaggggctgctggcctttcatcatgcgatcgaggagcagcgcgcccggctcgactacgacatcgacggtgtcgtctacaaggtcgatcgcatcgactggcaggagcggctcggcttcgtctcgcgcacgccgcgttggggcatcgcgcacaaattccccgccgagcgcgccatgacggtgctgcgcgacatcgagatccaggtcggccgcaccggctcgttcacgccggtcggcaagctcgagccggtcggcgtcggcggcgtcatcgtgcagaacgtcacgctgcacaacgaggactacatcaagggcatcggcaacaagggcgaggtgttgcgcgaaggccgcgacatccggatcggcgacaccgtggtgatccagcgcgccggcgacgtcatcccgcaggtggtcgacgtcgtcctcgacaagcggccgaagaccgccaaggaattccacttcccgaagaagtgcccgtgtcccctccacaccgacgtcgtgcgtgaggagacggcaacgggcgaggagggctcgcgcgcccgctgcaccggcgagttcgcctgtccctatcagaagatcgagcacctcaagctgttcgtctcgcggcgagccttcgacatcgacggcctgggtgaaaagcagctccaatatttcttcgatgaaggctgggtgaaggagcccgccgacatcttcaccctggagaagcgcaacgccaagctcaagctcgaggaggtcgaaggctacggcgcaacctcggtgcgcaacctgttcggcgcgatcgagagccggcgcaggatcgcgctggagcgcttcatctacgcgctcggcatgcgccatgtcggcgagaccacggcgctggccctggcacgcggctacggctcgtgggatgccttccacgatgcctgcctcaaggtcgccaagggcgacgaggaggcgatcgcggagatggacgcgctcgaccagatcggcgacaccgtgatcaagagcatcgccgattatttcggcgagagccacaaccgcggcatcgtcgagcggctgaccagggaggtcgagatcgtcgacgccgagaagccgaagagcaattcggcggtcgccggcaagaccgtggtgttcacgggatcgctggagaagatgacgcgggacgaagccaaggccacggcagaacgtctgggggcaaaggtgtcgggctcggtctcgaagaagacggatctcgtcgtcgccggccccggagcgggctccaagctggcggacgccaacaagcacggcgtcaaggtgctgaccgaagacgagtggctgaagctgatcggggagtga

SEQ ID NO: 8142 - DNA, 1674 bp, BradyrhizobiumColbertium
atgctggcgcgtctgtcgatccgtgacatcgtcctgatcgaacggctcgatatcgaattcgcctccggcctcgcggttctgaccggcgagaccggtgcgggcaagtccatcctgctcgatgcctttgcgctggcgctcggcggccgcggcgacgccggcctcgtgcgccacggcgcggagcaggggcaggtcaccgccgtgttcgatgtccccaagaatcaccccgcagcaaagatcctggccgagaacggcctcgacgataccggcgagatgatcttgcgccgggtgcaactcgccgacggccgcacccgcgccttcatcaacgaccagtcgatcagcgtgcagacgctgaaggcggtcggcgccgcgctggtcgagatccacggccagcatgacgagcgcgcgctggtcgatgcggccactcaccgccgcctgctcgatgccttcgccggcctcgagaaggacgttgccgcggtcgaatcgctttgggaggcgcgccgcaccgccaacaccgctttggaggagcatcgcgccgccatggagcatgccgcgcgcgaggccgattatctgcgccacgcctccgacgagctgaagcagctggcgcccaaggacggcgaggagacggcgctggcctcgcgccgcaccaccatgatgcagggcgagaagatcgcctccgatctgcgcgaggcgcaggaggcggtcggcggcaatcattcgccggttgcggcgctgtcggccgcggtgcggcggctggagcggcgcgggatcaactcgccggcgctggtcgagccagcggtcaaggcgatcgacgctgcgatcaacgcgctggaggaggccgaccagcatctccaggcggcgctcgccgcaaccgatttcgatccggcggagctcgaacgcatcgaggagcggctgttcgccttgcgagcggcctcgcgcaaatattcgacgccggtcgacggccttgccgcgcttgccgccaaatacgccgccgatgtcgtgctgatcgatgccggcgcctcgcgtttgaagaagctggagcaggtcgcgatcgaggcagacagccgctatgcggccgccgccaagaagctgtcgctggtgcggcagaaatcggcggagaaactcaacaaggccgtcaatgccgagctcgcgccgctcaagctcgaacgcgccaaattcatgacccaggtggagaccgacgaggccgccccagggccgcaaggcttcgatcgcgtcgagttctgggtgcagaccaatccgggcaccaagccggggccgctgatgaaggtcgcctccggcggcgagctgtcgcgcttcctgctcgcgctcaaggtcgtgctgtccgaccgcggctcggcaccgacccttgtcttcgacgagatcgacaccggcgtcggcggtgccgtcgccgacgcgatcggcggccgcctggcgcggcttgccggcaaggtacaggtgatggccgtgacccatgccccgcaggtcgccgcccgcgccgaccagcacctgctcatctccaaggacgccctcgacaagggcaagcgcgtcgccacccgcgtcaacgcgctggccgccgaccaccgccgcgaggagatcgcccgcatgctggccggcgccgagatcacggctgaggcgcgggcggcggcggagcggctgctcaaggcggcgacggcctag

SEQ ID NO: 8143 - DNA, 990 bp, BradyrhizobiumColbertium
atggatcggcgtggtcgcatggcaggcaccacggtcacatttcgcgcccatggcggagttcatgggctggcgggcaccgcatcacagggcgtcaaggcagaactcatgtcggcacagcgtatgacgcgcggatatctctcggtcggagccggtcgactggtccaggcggccatcctcttcatgctggcgctgccgctggccggctgcggcaccggctctctctgggacaagttcaccgccaaggacgacaccttcgtcgaggagcccgccgacaagatctataatgagggcctgtacctcatgaacgagaagaaggacatgaaggcggcgaacaagaagttcgaagaggtcgaccgccagcatccctattccgactgggcccgcaaatcgctgctgatgtcggcctacgcgtcctaccaaggcggtgactatgacggctgtatcggtgccgccacccgctacgtcacgctgcatcccggcagcccggacgccgcctatgcgcagtacctgatcgctgcctcccactacgaccagatcccggacatcagccgcgaccaggcgcgcaccgagaaagcgatcgccgccctggaagaggtggtgcgcaaatatccgacctccgaatatgcgacctcggccaaggccaagatcgagggcgcgcgcgaccagctcgccggcaaggaaatgaatgtcggccgctactacgcccagaagcgcgactacacggccgcgatcaaccgctacaagactgtcgtcacgcaataccagaccacccgccatgtcgaggaggcgctgttccggctgaccgaggcctatatggcgatcggcatcgtcggcgaggcgcagaccgcggcggccgtgcttggacacaattttcctgacagccgctggtacaaggacgcctataatcttgtaaaatccggcggtctcgagccgagcgagaatcaggggtcctggatcagccggaccttcaagaagatgggtctcggctag

SEQ ID NO: 8144 - DNA, 963 bp, BradyrhizobiumColbertium
atgaaattcaaccggcaaacaacgcttcgtgcgcaagcctcggtggcaggcgtgggcgttcattccggtctcccagtcactctcacgcttgggccggcgcctgtcgacgcgggtttcatttttgtccggacgggacttgagggaagtgaccgcgaagtccaggcgacggcggagcaggtgattgcgaccgacttcgccaccgtcctcggtgatcgcaacggtccgctggtatccaccgccgagcacgtccttgctgcactgcgaggcatgggcgtcgacaacgccaccatcgaggtcgatgggcccgaagtaccgatcatggatggcagcgccgctgccttcatcgcggcgatcgatcaagccggcatcgttacccagccggcgcagcgccgcctcattcaggtcttgaagccgatctcagtcaagattggcgactccttcggcgagatcaggcctcacgccagcgggttccgcgtcgaggtcgagatcgacttcagcaatcccgtcatcggccagcagagctacgccttcgacctcaatccggaaggtttccgccgcgaagtcggcagggcccggactttcggtctgatgtgcgatgtcgcgcggctctggagcgcgggctatgccctcggcgcctcgttcgacaacaccgtcgtgttcgacgacgagcggctgctcaatgccgagggcctgcgctacgccgatgaatgcgcccgccacaaggtgctggacgtgatcggcgatctctcgctggctggcctgccgctgctcggcgcctaccgctcggttcgtggcggccacaagctcaatcacgccgtcctgaccgcgctgctcgccgaccgtaccgcctggcgggtggtcgagggcgaggctgcccgccgcaccgcccgtcccgtcggcgaagtcggtcgcgggatcgtcggcggtcggatcgctgcggcgttcggaccggatgtctcctag

SEQ ID NO: 8145 - DNA, 1791 bp, BradyrhizobiumColbertium
atgaccatcagcatcaatgttcctgatattcacgaactgaagccccggatcaccgtgttcggcgtcggcggcgccggcggcaacgccgtcaacaacatgatcacggcgggcctccagggtgtcgacttcgtggtcgccaacaccgacgcgcaggcgctgacgatgtcgaaggcgcagcgcatcgtgcagatgggcacggcggtcacgcaaggcctcggcgccggctcgcagccgaacgtcggcgccgcggcggcggaagaggtgatcgacgagctgcgcgatcatctctcgggcgccaacatggtgttcgtcaccgccggcatgggcggcggcactggcacgggtgctgcgcccgtgatcgccaagaccgcgcgcgacatgggcatcctcaccgtcggcgtcgtcaccaagcctttccatttcgaaggcggccgccgcatgcgcacggctgaagccggcatcgccgagctgcacaaggtcgtggatacgctcctgatcatcccgaaccagaacctgttcagggtcgccaacgagaagaccaccttcgccgatgccttcgcaatggccgaccaggtgctctattcgggcgttgcctgcatcaccgacctgatggtcaaggaaggcctgatcaacctcgacttcgccgacgtgagggcggtgatgagggagatgggcaaggcgatgatgggcaccggcgaagcctccggcgacaagcgcgcgctgactgccgcggaagccgcgatcgccaacccgctgatcgacgacagctcgatgaagggcgccaagggcctccttatctccatcaccggcggcaaggatctcactctgttcgaggtcgacgaggccgcgacccgcatccgcgaggaagtcgaccaggacgccaacatcatcgtgggtgcgaccttcgacgaagcgctcgacggcctgatccgcgtctcggtggtcgccaccggcatcgagcaggccgcgatcgcccgcaacagccaggcgacctccgctccggtcgcgaacccggcaccgcaggtgcagcaggctgccgcaccggccgccgctgccgagagccgtctcgccgacctgaccgcccggctccgggccgacaaccagcgtctggccgagcgcgcccagaagctggaagcgcagcccccggctgccgcgccggctccggcccctggtccggcccgtccgaacgtcgagcgcgctgcgctcgccgccatcgccgctgccgttgccgaggtcccgcagaaccctgcgccgcaaacctatggcgatgtcaccgtgcggccgatcgcgcagaagccgacccttttccccgagcctgagatggccccggttgcgatgcaggagccgatgacgcccgagaacttcatccccccgcaggccgagcgtccgccggtccgtacgccgcggatgccgcgcatcgaggagctgccgatgccggcccaggccgagattcgtcaggcccgcggcgaagtcgaagatgagactccccagaagagccgcctgtcgctgctgcagcgcctcgccaatgtcggcctcggccgccgcgacgaggaaagcgagccgccggtggctgctcgcaccgctggtcctgccatgccgccgctgcccgaacgccggccgcagaagaccgtggcgcagcagatcgcatccaacgagccggtgtccgagtacgctcgccgtcccgcgccgcagggtctcgatatgcacggccgccccgcacctgttgcgccggcaccacagggtgacgaccatcttgatatcccggccttcctgcggcggcaggcgacctga

SEQ ID NO: 8146 - DNA, 1323 bp, BradyrhizobiumColbertium
atgaccggtctcgatcgcacccagacgccgaagacgcgcccgatgccgcacaagcgcggcggcctcgtcgcatgtctcgacatcggcaccagcaagattgcctgcatgatcgcacggctgaagccgtcgccgccgagcgatgcgctgcgcggccgcacccacgcggtggaattgatcggctacagccagatccagtcgcgcggcatgaaggccggcgcggtgatcgatctcaatgaatgcgagcaggcagtgcgccaggccgtcgggctcgcggagaagatggccaaggtgcgggtcgactcggtgctgctctcggtctcgggcggccggctctccggccagctggtcgaagccgccgccgacatccgtggcggcgcggtgaccccggccgacgtcagccgcgtcacctcaaccggcatgcgccacgccaccggcgaaggccgcacggtgctgcatgcgctgccggtcggctacacgctcgacggcgtcaagggcatccgcgatccccgcggcatggtcgcgcatcagttcggcgtcgacatgaacgtggtcacctgcgacgccacggtggcgcgcaacctgatgctggcggtggagcgctgccacatcaatgtcgaagccatggcggcgagtccctatgtggccggcctgtcggtgctgaccgacgacgaggccgatctcggtgctgcggtcgtcgagatgggcgcgggcaccaccacgattgccgtttattcaggcgggcgcttcgtgcacgcggccggctttgcggtcggcgggcaacacatcacgatggatctcgcgcgcggactctcggcgaccattgccgatgccgagcgaatcaagacgttatatgggaccgtcatcaccggcggatcggactcgcgtgagctgatgtctgtgccgacagccggtgacgagcaggatctgccgcagatcgtctcccgcgccaccatcgccaacatcgtcaagcaccgtgccgaggaagtcttcgaaatggttcgggacaagctgaaggattcgcccttcgccgcggagcccaagggccgcgtcgtgctctcgggcggcgcctcccagttgaccggcctcgtcgagctcggcacccagattctcggccggcccgtccgggtcggccgtccgctcggtttcggccggctgcccaacgaggcgaagaacgctgcgttcgcggtgccggccgggctcctcgtctacccgcaatatgttcacctcgaacatgtcgaaccgcggcatacgcggcagcaggccaagacagggaccggcggatatttcggaaaggtcggacgatggctacgcgagggcttctaa

SEQ ID NO: 8147 - DNA, 1029 bp, BradyrhizobiumColbertium
atggatggagcaggaagcctcacccggtcgcttttcagatcgctgaggccccaagctgacctgaaggcggccgcgatcggagcggtcgtgctgttgcgcgagtgggtgcaggacaagcgcgccgcggcgcgcactgccgccgaggacaaagcgaaatccaggagccgcgccaaggcggtcgtcgagcgcgagccgccgccgcgaatggttgcgctggtcgagcgctatctgccgcaccgggtcggcctcagcatgaccgtgctgctcctgatcggaagctgcggcttcggcatcgtcaagggcggccatctccaggacttcaccaccgcggtcggcgacgcgcgcaacgcgctggccaattccgccggcttccgcatcacctccgtcgtgatcaacggccgcaagcagctcacccaggacgagatccttgcgatcggcggcatcagcggccgttcctcgctgctgtttctcgatgccgacgcggtgcgcgacaagctcaaggccaatccctggatcgctgatgcgaccgtgctgaagctctatccgggccggctcatgatcgagctcaccgagcgcaaggcattcgcgctgtggcaggaggccggccgcctctccgtcatcgccgatgacggcgccgtgctcgagccctacgtctcgcgccgcttcctgacgttgcccctcgtggtcggcaagggcgccgaaacgcaggcccgcgatttcctggcgctgctggcgcgctatccgcaagtcaattcgatcaccaaagccgcgatcttcgttggcgagcggcgctggaatctgcggctcaaggatggcctggacattcgcctgccggagcaggacgtcggcaacgcgcttgcgatgctctcgaagctcgaccgggaagacaggctgttctcccgcgacatcgtcgccgtcgacatgcgcctgcccgatcggctggtggtgcagctgtccgaggacgccgccaaggcgcgcgaggagctgttcaaggacaagaagaaaaagaaggccggggattccgcatga

SEQ ID NO: 8148 - DNA, 147 bp, BradyrhizobiumColbertium
atgccgggccgggtgctggtcttcagcagaagaaaacctctccccttcaaagcgtacgctggaggtgacatcacccgcgacagctcacgcgccggcagccaaagcgccatatgcgccgccagcgttaaccttcggacgtcctggtaa

SEQ ID NO: 8149 - DNA, 993 bp, BradyrhizobiumColbertium
atgaccatgcgcatcaccatcctgttcggcggctccaaccgggagcgtctggtttcggtcgcctcagcccaggcgctgcatcaggcgttgcccgaggccgacctttggtggtgggacgtcgaggacaaggtgcatgtcgtgcattcgaagcagctgctcgaacatgcccgtccattcgaggacgagttcaagccgggcacatcaggcatcccgctggaacaggcgctcgatagggccaagtcggaagggcgcgtactggtgctcggcctgcacggcgggcgtgcggagaacggcgaattgcaggtgatgtgcgaggcgcgcggcgtgcccttcacgggctcgggttcggcatcttcgcatctcgccttcgacaagatcgcggccaagcggtttgccgcgctcggcggcgtgacgccgccggcgaacattgcgctcgcgaacatcgacgaggcgttcgccgaatacggaagattgatcgcgaagccggcgcgcgacggatcgagctacggcctgatcttcgtcaacgccaagcaggatcttgtcgccgtgcgcaatgcagccaagcacgaagagtatgtcatcgagccctacatcgccggcgtggaggcgacctgcggcgtgctggagcggcccgatgggtcgatcatctcgctgccgccgatcgagatcattccgggcgagggcagcttcgactatgcggcgaaatatctcctgaagtcgacccaggagatctgcccgggccgcttcgcacccgagatcaccgccgcgctgaaggagcaggcgatgctggcccatcgtgcgatgtcctgcgccggctattcccggtcggacttcatcgtctcgaacaaggggctcgtctatctcgaaacgaacacgctgcccgggctgaccaagtcttcgctctaccccaaggcgctgaaagccgaaggtatcgaattcgtcgacttcctgcgcggcctggtcgagctcgccgggcagcgcgtgcggaaatag

SEQ ID NO: 8150 - DNA, 918 bp, BradyrhizobiumColbertium
atgagcttccccgacatcaccccctcgctgaaagccgcgatgccaaatttgcgcggccgcttgctcgccaaccagccgctggccgatctcacctggtttcgtgtcggggggccggcgcaggtgctgttcacgccggcggacgaggacgatctcgcctatttcctcgcgcatctcgctcccgacattccggtccatgtcgtcggcgtcggctccaacctgatcgtgcgcgacggcggcattgcgggcgtcgtgatccgcctgtcgccgcgcgccttcggagaggcgagtgcgagcggagacgtcgtcaccgccggcgcggcagcgctcgacaagcgcgtggcggaagtggcggcgtccgcgaatatcggcgggctcgagttctatttcggcattcccgggaccatcggcggcgcattgcgcatgaatgcgggcgccaatggcggcgagaccaaggacgtgctgatcgaggcgaggggcgtggggcgcgacggcacgaagcatgtcttctccaacgtcgacatgaagttcgtctaccgcaacagcggcgtcgatccctccatcatcttcacctccgcccgttttcgcggcgagctcagggatgcggaagcaatccgcgcgcgcatggcggaggtgcagacgcatcgcgagacggcgcagccgatccgggagaagaccggcggctcgaccttcaagaatccgccgggacactccgcatggaaactgatcgacgccgccgggtgccgcggcttgcgcgtcggcggcgcgcaggtctccgagatgcactgcaatttcctgatcaacacgggcgaggccacggcgcacgacatcgagacgctgggcgagacggtgcgcgagcgcgtgaaggcgaattccggaattgagctgcaatgggaaatcaagcggatcggggtttcatga

SEQ ID NO: 8151 - DNA, 1404 bp, BradyrhizobiumColbertium
atgagactgccgcgcgagatcggacccattcacttcgtcgggatcggcgggatcggcatgagcggcatcgccgaggtgctggtcaatctcggctatgtcgtgcagggctcggatgcgtccgacaattacaatctcgaccgcttgcgcaagaagggggcgacggtttcggtcggccacaaggccgagaatatcggcggtgccgaggtcgtggtcgtgtcgtcggcgatcaagcgcgacaatccggaattggtggccgcgcggcagaagcgcattcccgtggtgcgccgcgccgagatgctggccgagctgatgcggatgaagagctgcgtcgccatcgccggcacccacggcaagaccacgacgaccacgatggtcgccacgctgctcgacgcaggcgggctcgatcccaccgtcatcaacggcggcatcatcaacgcctatggctccaatgcgcgccttggggccggcgactggatggtggtcgaagccgacgagagcgacggcacgttcctgaagctgccgacggatgtggcgatcgtcaccaatgtcgaccccgagcatctcgatcatttcaagaccttcgaggccgtgcaggacgcgttccggcacttcgtcgagaacctgccgttctacggctttgccgtgatgtgcatcgatcatcccgtggtgcagagcctcgtcggcaagatcgaggaccgccgcatcatcacctacggcgaaaacccgcaggccgatgcgcgcctggtcgatctcaccgcgggcggcggcggctcgaaattcaacgtcgtgatccgtgaccgcaagagcggggctgtgcatgagatcgccgacctcgcgctgccgatgccgggacggcacaacgcctcgaatgcgacggctgcaattgcggtcgcgcacgagctcggcgtctccgacgatgcgatccgcaaggcgctcgcgggcttcggcggcgtcaagcgccgcttcaccaagaccggcgagtggaacggcgtcacaatcatcgacgattacgggcatcatcccgtcgagatcgcggcggtgctgaaggcggcacgcgattcctacaccggcaaggtgatcgccgtggtgcagccgcatcgctacacgcgcctgcaatcgctgttcgaggagttctgcacctgtttcagcgatgcagacgcggtggtcgttgccgaggtctacgccgcaggcgaagcgccgatcgagggcatcgatcgcgaccatttcgtcgcgggcctgcacgcccacggccaccgcgaggtgatcccgttgccggcggcctcggagctcgcggggatcgtcaaggggcttgcgaagcccggcgatctcgtcgtgtgccttggggccggcaacatcacgcaatgggcgtatgcattgcccggtgaattgaaggcgctggggtag

SEQ ID NO: 8152 - DNA, 831 bp, BradyrhizobiumColbertium
gtggcaggcctgctgattcattccctctcggagttctccgaccttatcctcgaggcgctcgcgctggcggatgcacgagagatcgtcgagatcggttcggaatacggcgggatgtcgcccttcctcgccgagcattgccgcgcgcgcggtgggcggctcaccaccatcgatccgtcgccgaagcgcgaattcatggagtggctgaagatcagcccggacgttcgccatctcgcaaaagcgagcctggaggcgctcgtcgatgtcgacgaggccgatgcctgggtcgtcgatggcgatcacaactggtacacggtctacaacgagctcggccacatcgatgcgatcagccgtcgcgccggcaggccgctgctggtgttcttgcacgacatcggctggccgtgggcgcggcgcgacctctactacgcgcccgagaaaatccccggggaatatcgccatgcccatagcttcgaggccggcgtagttctgggccaggaccggctggtcgacgggcgcggattccgcggcatgggtcagttcgcgatcgccaaggtttcgggcggcccgcgcaatggcgtgatgacggcgatcgacgactttctcgccgaggcgctcagggatggaagagagttcggctttgccgagatcccggcggtgttcgggctcggcgtgatcttcgatctcgacgcgccctggagcgcggcgctcgccgatctcttgttgccgtatcaccagaacaggctcgtgagcgcgctcgaggccaatcgccttcgcaactatcttcgcgtgctggagttccaggacgaagcggccgcgcgcatcggcgccatctga

SEQ ID NO: 8153 - DNA, 1101 bp, BradyrhizobiumColbertium
atggacacgtcccccctgattcttctcgccgcgggcggcaccggcggccatctgtttccggccgaggcactcggggtcgagttgatccggcgcggctttcacgtccgtctcgtcaccgacgagcgcgcgctgcgctacagcggcctgttcagcaaggacatgatcgacgtcgtcagaagcgagaccgcgcgcggccgcaatccgtttcagctcgcttttgccggtctcacgctcgcggccggcacgctctctgcctatgccctgatcaagcgattgaaaccggttgctgtcgtcggcttcggcggctatccgacgctgccgccgctcgtcgcggcgaaattcgccggcgtgcccagcatcatccacgacgccaacgccgtgctcggccgcgccaaccggttcctgtcgagccacgtccgcgccatcgcgacgtcattgcccggcgtgctcgaccgtgatccggcactgtcggcgaaaaccacgatggtcggcacgccgatgcgtcccgcgatcctagctgcggccgccgtgccctacgtcgcgcctgaagcgaacggtccgctgcgcctgctcgtcgtcggcggcagccagggcgcgcgtatcatggccgacatcgtgccgggcgcgatcgagcggctcgagcccgccttatggagccgcctcgtcctcacccagcaggtgcgcgaagaggacatgagccgcgtgcgtgcggtctacgacaagctcaagatcaaggccgagctcgcgccattcttcaccgaccttccggcacggctcgcctccaaccatctcgtcgtgtcgcgctccggcgccggcaccgtcgccgagcttgcggcgatcggccggccctccatcctggtgccgctgccgggttcgatcgaccaggaccagttcgccaatgccggcgtgctggccaaggtcgacggtgcgatccgcatcccgcagaccgaattcacctccgaccggctggcgtccgaaatctccgccttcgccgcagagcccgcgcgccttgccgccatggccgcggccgccaagggggcggggcggctcgacgccgccgaaaggctcgccgacctcgtggtgaagaccgccggaatttag

SEQ ID NO: 8154 - DNA, 1152 bp, BradyrhizobiumColbertium
atgctctcccgtgaagaacgcacccccttttccgagtggtggtggaccgtcgacaagccgctgatgggcgctatcctggggctgatgctgaccggggtgatcctgtcgctggcggcgagcccgccggttgcgacccgcatcgggctcgatcccttccatttcttcagccgtcacgtgctgttcctggtgccgtcctgcatcgtgctgctcggggtgtccttcctctcgccgcgcgcgatccgccgctcggccctgatcatcttcgcggcgagcatcgtcctcatcgtgctcacgctcgcgatcggcccggaggtgaagggctcgcggcgctggatcacgctgctcggcgtcaatatccaggcctccgaaatcgccaagccgtccttcgtcgtcatcgccgcctggctgttcgcggaatcgaccaggcggccggagatgccggcgacctcgatggcggtagtgctgctcctgatgctggtcgcgctgctggtgatggagccggatttcggccagaccatgctggtcctgatggtatggggctcgctgttcttcatcgctggcatgcgcatgatctgggtgttcggcctcgcaggcctcggcgcggccgggctgttcagcgcctatctcttcgtccctcacgtcgccggccgcatcaggcgcttcatgaacccggcctccggcgacacgttccaggtcgatacggccatggaggcgttctacaacggcggctggttcggacttggacccggcgaaggcgtcgccaagcgcagcctgccggacagccataccgacttcgtgttcgcggtcgcggcggaggagttcggcatcatcctgtgccttgccatgctggcgctgttcgccttcgtcgtcatgcgtacgctgtcgcgcgcctatgccaatgaggacatgttctcacgcttcgccgcgtccggcctcgcaatcctgttcggcgtgcaggcggcgatcaacatgtcggtcaacctccagctcatccccgccaagggcatgacgctgccgttcatctcctatggcggctcctcgatggtgtcgctggcttacggcgtcggcatgatgctggcgctgacgcggcagcgcccgcgcaccgaggtcgaggcgagcggtcacgccgaagcgatgcggagttacgcctga

SEQ ID NO: 8155 - DNA, 1401 bp, BradyrhizobiumColbertium
atgatccccgttacatccttcgccggcaagaccgtcgcggtgttcggcctcggcgggtccggcatggcgtcctgtcatgcgctgaaagcgggtggagccgaggtgatcgccgccgacgacaatgcggagaacatcgccaaggccgtgcaggccggtttcatcaccgccgatctgcgcagcgtctcgtgggcgaattttgccgcgctggtgctcgcaccgggcgtgccgctcacccatccggtgccgcactggagcgtgctgaaggcgcgcgaggcgggctgcgaggtgatcggcgacatcgagttgttctgccgcgaacggcggcggcatgcaccagacgcgccgttcgtcgcgatcaccggcaccaacggcaagtcgaccacgacggcgctgatcgcgcatctgacgaaagtcgccggctacgacacccagatgggcggcaatatcggcaccgcgatcctgtcgctggagccgccgcgcatgggccgcgtccacgtcatcgagatgtcgtcgtaccagatcgacctcacgccctcgctcgacccctccgtcggcatcctgctcaacgtcagcgaagaccatatcgaccgccacggcacgattgaacattacgccgcggtgaaggagcgcctcgtcgccggtgtgaaggccggcggaacagccatcgtcggcgtcgatgacggcttttgccgcgacatcgccgaccggctcgaccgggccggcaagaatgtcgtgcgcatctccgtcaagaacccgctggcgagcggaatctatgtcgagcatgggaatatcgttctagcctcgggcggggccagcagcgaggtcgcggcgctcggcggcatcggctcgctgcgcggcctgcacaacgcgcagaacgccgcctgtgccgccgccgccgcgcttgccatgggcatcagcctcgatgtgctgcagggcggcctccgcagctttcccggccttgcgcaccgcatggagcaggtcggccgccgcggcaacgtgctgttcgtcaacgattccaagggcaccaacgcagacgccaccgcgcatgcgctgtcgtccttcgccgacatcttctggatcgccggcggcaagcccaaggcgggcggcatcaccactctgacgggcttcttcccgcgcatccgcaaggcctatctgatcggcgaggccgcgcaggagttttcgggcacgctgggcagcgaggtgccgcacgagatcagccagaccctcgatgtcgcggtcgagcatgccgcgcgcgatgcggaggccgcgggtctcacagacgcggtcgtgctgctgtcccccgcctgcgcctccttcgaccagtaccgcaacttcgagatccgcggcaccaagttccgcgagctggtgcaggcgctgccgggtgttaagccggtggtgtag

SEQ ID NO: 8156 - DNA, 120 bp, BradyrhizobiumColbertium
gtgaagatagtggctgcccaggatcgtcattccggacgacgcgaaggggcgatcgggaatcccgaggttccgggttcgcgctgcgcgcgccccggaacgacggaggtgaattcatcatga

SEQ ID NO: 8157 - DNA, 1104 bp, BradyrhizobiumColbertium
atgttttactggctgatcgagctctccaacacatttccgggcttcggtgccgttcgcaccttcctgaacgtcttccgctacatcaccttccgcaccggcggcgccgtcgtcaccggcgcgctgttcgtattcttgttcgggccctggatcatcgatcatctgcgcatccgccagggcaagggccagccgatccgcaccgacggtccgcaatcgcatctcgccaagaagggcacgcccaccatgggcgggctgatgatcctgtccggcctcacggtcggcaccgtgctgtgggccaatccgctcaacccctatgtctggatcgtgctggcggtgacgctcggcttcggcttcgtcggcttctacgacgattacctcaaggtgaccaagcagaccacgaccggattcggcagcaagctccgcctgctgatcgaggcggtgatcgcgctggtcgcctgctacgccctggtgcggctgaaccgagatcccgcctcgacagcgctgacgattccgttcctcaaggacaccgtgctgcatttcggctggttcttcgtggtgttcggcgccttcgtcatcgtcggtgccggcaatgcggtgaatctcaccgacggtctggacggcctcgccatcgtgcccgtgatgatcgcgaccgcgagctttgcgatgatcgcctatctcgccggcaacgcggtgttcgccgattatctgcagatcaaatatgtcgccggtaccggcgagctcgcggtgctgtgcggcgcgctactcggcgccgggctcggcttcctctggttcaacgcgccgccagcctcgatcttcatgggcgacaccggctcgctcgcgctcggcggcatgctcggcgccatcgcggtcgcggtgaagcacgagatcgtgctcgcggtgatcggcggcctgttcgtgctggaggcggtctccgtcatcgtccaggtcgtgtcgttcaagctcaccggcaaacgcatcttccgcatggcgccgatccatcaccacttcgagcagctcggctggaccgagccgcagatcgtgatccgcttctggatcatctctgtgatgctggcacttgccggcttgtcgacgctgaagctgcggtga

SEQ ID NO: 8158 - DNA, 1383 bp, BradyrhizobiumColbertium
atgagcgcgccaatatggacgattgccgaagtcgcgcgggcgcttggcgctaccggatcgtttccggacgtgcccattgacttcgtcacgcaggacagccgcctggtgaagccgggcagcctgttcgtcgcgctgagcgggacgccgagcggcggcttcgtctccgccttcgccagcgcgcgcgatggctgggagttcgccgacaaggccgaagccgcaggcgcggtcgcgatgatcgtgccgcacgagatcccaggcatccgcgttccgcagatcgtcgtggaggatacgctgatcgatggcctgtggcgccttgcacgtgccgcacgcgcgcgcttcaaagggccggtgatcggcctcaccggcagcgccggcaagaccagcaccaaggagttcctggcggcctatccgaacgcctatgccagcccgtcgagcttcaacaatttctggggcgtgccgctgacgctgtgcaacgccaggcgagacgccagcctttgggtcgtcgagatgggcatgaatcagcaaggcgagatcgcgcggctcagcgaattgacgcagccgacggtcgcgctggtcgtcaacgtccagccggtgcatctggaaaagctcggctcgctcgaggccatcaggcgcgagaaggtgtcgatctcgctcggcctgcccgagaacggtgtgctggtgctgcccgccgggctcaaggcgcccgagtggaagggcaaggtcgtgcgcttcggcggcgagcatgccgaggtgcacgaggtcgcgcacgcgccccacggcgagagctggcaggtcgtcgcggcgatcggcaagaaggagatcgccttcagcctcacccctggcgcgccgcaccgggtccacaatgcgctggccgcgctcgccgccgttcatgctgcgcatctcgacgttgcgacgctggcgatcaagctcgaccgcgtcggcatcatgaccggccgaggcgtcgagcagaccgtcggtgatatcaccgtgatcgacgatagcttcaacggcaatccggccagcgtggcggctgcgctgcaaagtctccaggcccgccacatgggcgagggccgccgcgtcgcggttctcggcgacatgctggagctgggcgaggacgcaccaagctaccacaccggcctcgccaaatatctcgacggcatcgacgccgtctactgcgtcggcgctctgatgcgccacctctatgatgtgctcccggccggcaagggcctcggctggcatgacgatcccgccacgctgaagcccagcgaggtcgcgagcctgctgaaggcaggcgacgtcgtggttgtcaagggcagcaagaagatgttctgggtcaacaagtttgtgccggggctggtggccgccttgcaggcaaaggcgtaa

SEQ ID NO: 8159 - DNA, 1473 bp, BradyrhizobiumColbertium
atgaagctgcgcgacctcttaggccaggatgttcttggccatgatgccgccatcgagcccgctgttgcggggctcgaggtgggcgggcttgcgctcgacagccgcgtggtcaagccgggtgatctgtttttcgcgcttgcgggcagcaagaccgacggcgcgcgcttcatcgacgccgcaattgccgctggcgcgatcgcaatcgttggcgatcatgcgcctgcggcgacgaaggtgccgttcatcgcggcggccaatccgcgccgcgcgctggcgctggctgcggcaaggttcttcccggcgcagcccgccacgattgccgcggtgaccggaaccagcggcaagacctcggtcgcagcgttcacacgtcagatctgggagcggctggggcatgcctccgccagcatcggcaccatcggcctcgtctcgtccaaacgcaccgtctacggctcgctgacgacgcccgatccgatcgggctgcaccggcagatcgatgagatcgcgcgcgagggcgtcacgcatctcgccttcgaggcgtcgtcgcacgggctcgaccagtaccgcctcgacggcgtccgcgtctccgccggcggtttcaccaacctctcgcgcgaccacatggattaccatccgaccgttgcgcattatctcgcggccaaactccgcttgttccgcgagttggtgccgccgggtggcgccgcggtgatttcggccgatcatgattgctcgaccgaagcgatcgaggcggcgaaggcgcgcggcctgcgcgtgatggcggtgggccgcaacggcgatgcggcaggcgagggcatccgtctcaccgaggccgtggtcgaaggtttctcgcaagagctcacgctcgagcatcgcggcaagcgctttgccgtccggctgccgctggtcggcgaattccagatcgagaacgcgctggtctcggccggccttgcgatcggcaccggcagcgatgccgcaaacgtgtttgcgtgcctcgaacatctcgaaggcgccaagggccggctcgaacgcgtcggtgagcgcaacggcgcgccgatcttcgtcgactacgcgcacaagccggatgcgctcgcgaaggcgctgcaggcgctgcgtccctatgccaagcgcaggctggtcgtcgtgttcggcgccggcggggaccgcgatgccggcaagcgtccgatcatgggcgagatcgcggccgaaaacgccgacggcgtcatcatcaccgacgacaatccgcgcagcgagaagccggaagccatccgcgccgcgatcctcgccaccgcgaagggcgcccgcgagatcggcgaccgcactgctgcgatccgcgctgcgatcgaggacttgcaggagggcgatgcattgctgattgccggcaagggccacgagaccggacagatcgtcggcacggaggttctgcccttcagtgatcacgaggcggttgccgccgcattagcgtcgagggttgcatga

SEQ ID NO: 8160 - DNA, 1755 bp, BradyrhizobiumColbertium
atgagccctgcaacgcctgcaagatcgaccgagaagtcgaatgaaccctggcggcagcggctgatccgcagcgtgctgtacgggcgcaatgtcgatcgcaccgccaaggcgcgcgcgcgcgtgggacttgcgatggtcgccttcgcctcgatctacgccttgatcggaggccggctcgtgatgttcgcgatcggcgccgacgcccacggggcgcgccgcgccgcggcgcaggaggtggttgcgaccgctcggcccgacatcgtcgaccgcaacggtgccattctggcgacggacgtcaaggcggcgagcctcttcggcgagccgcgtcgcatcatcgacaaggatgaggcgatcgagctcctgaccgcgaccattcccgacctcgacgaggccgaggtgcgcgagcgcctgaagacgcgcaagggcttcgtctggctgaagcgcgaggtgacgccggcgcagcagcaggccgtccacaagctcggcattccaggcatcggcttcctgcgtgagaacaagcgcgtctatccgaccggcaacgaggtcgcccacctcatcggtctcgtgaatatcgacaaccagggcattgccggcctggagaagtggctcgacaaccagggattggccgatctccaccgcgccggctttgccaccgaccgcctgcagaagccgatcgagctttcggtcgatttgcgcgtcgagcacgcgctgcgcgacgaactgctcaaggccaaggacaagttccacgccaaggccgcttccggcctcgtctccaacgtcaagacgggagaaatcgtggcgatggtgtccctgccggatttcgatcccaacaatccgaaggaagcgcacgacccggatcgcatcaaccgcctgaccaccggcgtgtacgagatgggctccaccttcaaggcgttcacgctggcgatgggcctcgattccgggaagatcaatctgaactcgatgtgggatgcgcgcgggaacctgcactacggcaagttcacgattcacgacagtcatccgctcgggcgcttcatcaacaccaaggaagtgttcacctactcgtccaatatcggcgcggcgcgcatcgcgctcaaccagggcgtcgaggcgcacaaggcgttcctcgccaagatgggccagacgacgcggctgcgtaccgaattgcccgagagcgcggcgccgctgctgccgcgacgctggagcgagctgaacaccgtcaccgccgcgttcggccaggggctctcggtggcaccgctgcaggccgtgatgggcatcaacgcgctggtgaacggcggctatttgattccgccgacattcttgaagcgcagcgaagccgaagccatggcgatggccaagcgcgtgatcaagccggacaccagcgacaagatgcggtttctgatgaggctcaatgccgaagtcggctctgcgagaaaggcagatgtcaaaggttattacgttggcggcaagaccggcacgtcggagaaggtcgtgaacgggcgctatgccaagaagcgcgtgctcaattcctttcccgccgtcctgccctgcgacgatcctaaatatcacgtcctgatcatgctggacgagccgcaggcgctgcccgaaacgcatggtttcatcacctcgggctggaacgcggtgccgaccggcggaaaggtgatcgagcggatcgcgccgcttctgggcatcgagccgcggtttgagctgcctccggccgaacgccttattcttgcagcatccaggacaacccagtaa

SEQ ID NO: 8161 - DNA, 393 bp, BradyrhizobiumColbertium
atgcgcatcatccacctcctcgtcatcggcgcgctgatcttcgcggcggcccatgtctaccggatcaagatggactccaccgcgcgcaccgaaaaggtactgcgtctgcgtgcggagatccgcgaggagcgcgacgcgatcgcggcactgcgggccgagtgggccaagctcgatgccccgcatcgcctgcagggcctgtccgaccggcatctgcacctcaagccggtcaatggcacgcaatacgactcgctgaagaatctgccggagcgcccgctacggatgttcaggccgggcgagcccgatccgatcggggccatgctcaacgccatcgaagccgctagcgaccctgacacggtgaccggctccgtgcctcaacccgaggacaggcaatga

SEQ ID NO: 8162 - DNA, 990 bp, BradyrhizobiumColbertium
atgagctcgactcctcatgttcccgttcttggccgtgaggccgtcgcgtatctcgccccgcgcgagggcggcgtctacgtcgacgccacttttggtgccggcggctatagccgtgcgattctggacgtgccgggaacccgactcatcgccatcgatcgcgaccgcaccgcgattgccggtggtgccgagctggtcaagagttccgccggaaggctgacgctggtcgaggaccgtttctcccaccttgccgacgtctgcgcttcgctcggcttcgagaccatcgacggtgtcgtgatggatgtcggcgtgtcctcgatgcagctcgaccaggccggccgcggcttctcgttccgtctcgacggtccgctcgacatgcggatggggcagacagggccgactgcggcggacgtcgtcgcgcgcgcctccgaaagcgatcttgccgacatcatctatctcttcggcgaggagcggcattcgcgccgcatcgcccgcgccatcgtcgcggaccgtcaggagaccccgttcacgaccacgcgcgcgcttgctgatctcgtcggcagggtcgtgcggtcgaagcccggggacattcacccggcgacgcggacgttccaggcactgcgcatcttcgtcaacgaggagctcgaggaactccagacggcgctcgccgcggccgagcgcgtcctcaagcccggtggtcgcctcgtcgtcgtctcgttccattcgctggaagaccgcatcgtcaagaatttcctcggcgagcgttccaagacgggcggcggttcgcggcatctgccggaagttgcccagatcgcgccgagcttccagctgctgacgcggcggccggtcgtcgccggcgaggacgaggtggcgcaaaatccgcgcgcacgctccgcaaagctgcgcgccgccgagcgcacttcggcgccggcgcacgcgaccgacggggcatcgtcctggccgaaactctcggacgtgatgaggggcggctag

SEQ ID NO: 8163 - DNA, 279 bp, BradyrhizobiumColbertium
atgaggagtcgagctcatgcgcgtgacctgaggatcgccaagcctgacacccaagcgagatcggcgtggaacaagcccataacgcctcgaatgattgcgcgtcgcggcggttccacgacaaaccccttgtccagcatggttaccgagcccgatcgtcccgggccgcaaacccagtgttcccagcagaatttgtcgggcagccatgggatttcgagccaaatacgctttggccgcctccggacgcgggtcggctcttcatccctcagtaacggtccttag

SEQ ID NO: 8164 - DNA, 792 bp, BradyrhizobiumColbertium
gtggcgaacgtgcggacgttcgaacccgactcctcgatcgtctcggacatcattccgtcgcccaattacggcgagcgcaacaagggacggcagcccgatatgatcgtgctgcattacaccggcatgcccgatgtcgaaggcgcgctggcgcggctgtgcacggcgggcactgaagtgtcggcgcattacgtcgtgctggaggacggccgtatcgtgcaatgcgtacccgaggccaagcgcgcctggcacgcaggcgtctcctcctgggccggcgaggacgacatcaactcgtgctcgatcggcgtcgagatcatcaatcgcggacatgattggggctatccggagtttccgctgcgccagatcgcggccgtgatcgcgctgtgccgcggcatcatgctccgccgcaaggtgccggcccaccgggtgctcggccattccgacgtcgcgcccgcccgcaagaaggaccccggcgaaaagtttccgtggcattcgctggccaattccggcgtcggccactgggtcacgccagcgccgatcgtccggggcgaaactctgatgctcggcaccatcagcgacgccgtgctgagcctgcagcaggcgctggccagatatggctatggcgtgccgctgaacggcaaatacgacgccgcgacgatggaagtcgtcaccgcctttcagcgccatttccgtccggcgcggctcgatggcgtcgcggatcattcaacgctgtcgacgttgcaggccctgctggcaagtctgccgcaagacgcgacaagtgtcgcgtcgaagtga

SEQ ID NO: 8165 - DNA, 714 bp, BradyrhizobiumColbertium
atggccgcacgcgcgaagaccttcctgctctgtcatggcgcgtggtccggcggatgggcctggaagaagatgcatccgctggtggcacaagccgggcaccgcctggtggcgccgacctacaccgggctcggcgagcgcgcccatctcgcaagtcccgcgatagacctggatacgcacatccaggacatcctcaacgtcatcgccttcgaggatttgagcgacatcgttctgcttggccacagctatggcggcatggtcgcgaccggcgtcgctgatcgcatgcgcgagcgcgtgactcagctgatctatctcgacgccttcgtgccgcgcgacggccagtcgctgttcgatctcaacgaaagcgggcgcgagccgatgcgcaaggcggttgcagacggcgacggctatcgcattgcgccgaacccgccgcctcgggacacaccgcaagccgatctcgactggctcaacgcgcgccgtgtcccgatgccgatcaagtgcttcgaggcgcgcttgcggctcgaacacggcgagccggcgatgccgcgcagctacatctattgcacgcgcattccgccgggcgacgtgttcggacagtttgcgaggcggacgaagaacgagcacggctggcgctatttcgagctcgacgccagccatgcgccgaatgttaccgcgccgcaggcgctgatggcggtattggagaagatcgtcgcttag

SEQ ID NO: 8166 - DNA, 354 bp, BradyrhizobiumColbertium
atgttcggccgcttcctgaaagtggctcacgcctgcgatcattgcggcgaggagctgtttcaccagcgcgcagacgactttccggcctatctcgtgatggtcgtggtcggccatctcgtggtgccggggatcctcgcggtcgagaccgcctacgcgccgccggaatggctccagctcgcggtgtggctcccggtgacgctgatcgcctcgctcgcacttctgcagccgaccaagggcgccatcgtcgggttgcaatggcagctcggaatgcacggtttcgaggcgggcaagctgcggcgcgagggcggcgagcttgcaccggtgctggtcaaagcggatacgcgcgcggcctga

SEQ ID NO: 8167 - DNA, 1386 bp, BradyrhizobiumColbertium
atgggcctgatttgcatgggctggatccctacaatctccgaactctcgggtccgcgctaccagcgcatcgtcgaggccatggaggccgacatcgctgccggccggctggtacggggccagcagctcccgacgcagcgcgcgctcgcaaaagcactcggcatcgacctcaccacggtgacgcgcgcctacaccgaggcgcggcgccgcggcatcatggaagcccgtgtcggccagggctcgttcgtttcggagaccagcgcgcgccgctcggtcgacctgccgcatccggtctcgatcgacctctcgatgaacgtaccgccgcatccgctcgaggcgcagctcgacgagcgcatcaccgcgggcatggaagccatccgcgcacaatcgggcctgaccgcctatctcaattatcaaccgcccggcggcagcctccatgaacgcgaggtcgcggcgcgctggctgcgcacccgcgttccgcacgcgcaggccgacaggctcgtgatctttcccggcgcacagacgatcctcttcagcctgctcgcccagctcgcgcggcccggcgaaaccgtactgaccgaagccctgacctttcccggcgtcaaggcggccgccgcgcggctcggcatcaagctggtcggcgtcgccatggatgaagccggcatccttcccgacgcgctggccaaggcgtgccgcacgcaccggccgaaggccgtctatctgattccgacgctgcacaatccaaccaccgcaacgctttccgacgaacgccgtggtgccattgcaaggatcgttcgcgacaccggtacgatcctgatcgaggacgacgcctacggcctgctcgaccgctcggcctcgccgatcgcaagcctcattccggagcggacataccttgcgaccacactatcaaaatgcatcgcgcccgcgctgcgcgttgcctaccttctgacgcccgacagcggcgcgcagcgggacatgcgcatgtccttgcaggcgaccgtgcagatgcctgcgccgctgatggtggcgctggtgacgcattggatcgaaagcgggattgccgatcgcatcatcagcgccattcgcagcgaggcgatcggccgtcagcagctcgcgcaacgcacgctgaagggttttcaattgctggccaagcctgccgcacatcatctgtggctgcggctgcccgagggccggctggacatcgcggcagatctcctgcgaaacggtcttgccgtcgtcgcaggcgatgccttcaccgtcgacggggcaccgccgcatgcggcacgtgtctcgctgggcgcggcacggaacagatcggaattgacggaggcgctgcgcatcctgatcggcgcgctgcagaagccggccgacacgaggcagatcgtctag

SEQ ID NO: 8168 - DNA, 264 bp, BradyrhizobiumColbertium
atgacccttaccaggattgccgctgcagccgcgctgctcgcggtggcgttggcgccgaccttggccctggctcagttttccgagcctgcggcctatcaggccgctcatcctgaccgcgatgtcctgaatggcggccagctcacgccggcggcgcgtgcggctcttggccagcgggggatgcctgccgatgcgtatgcatcgcaggcccatccgtcatcgatgacaccggaggtgcgctccggccaccgccgtcatcgtcgatga

SEQ ID NO: 8169 - DNA, 744 bp, BradyrhizobiumColbertium
ttggaaacgctcacctacatcctgctgctgttcggcgctctcgccggcggcttcgtgtcgggacttgccgggttcggcaccgcgctgatggcgctcggcatctggctctacgtcctgccgccctcgctggcggtaccgctggtgctgatctgctcggtgattgcgcagacctcgacgctgccctcgatgtggaagagcttcgatctctcgctggtctggccgttcctgatcgggggcctgatcggcgtaccgctgggcaccatgatggtcgcctcggccgatccgaaagtgttcaagctcagcgtcggtgtgctgctcctgctgttttcgagcgcgctgtacctcaacaagcggccgctcgccttcaagttcggcggccggatcgcggatggtgcgatcggctttgccggcggcatcctgggcggactcgccggcctgtcggggccgttgccgatcctgtgggccaacatccgcggctggaacaagcacgaacgacgcggcatcttccagctcttcaatttcacggtgctcgccaccgcgctggtgctgcagacggcatcgggcctggtcgaactgaaagtggtctggctcgccctggtcgcctttccgggcaccctgatcggcacatggaccggcgcgcgcgtctatcacgccctgagcgacaagcacttcggcgacgtcgtgcttggcctgttgttcctctcggggctcggtctcgtctggaacagcctgggcacgcagtaa

SEQ ID NO: 8170 - DNA, 1800 bp, BradyrhizobiumColbertium
atgaccgctctgtcaaaaaagcctgccgccattcgcgtggtgctgcccttcgtattccggcactggctgaagcagcccgggcgcggcctcgtggtggccggcggcctgttgggtgcgaccattgccgacctgttcatgccggtattctccgggcatctggtggatgcgctgacgcgaggcccgtccgaccccgatgcgcggcacgccgcgctggtcgcgttcggcgccatcgtggcgttgggcgcggcctcgatggtgctgcggctcgtcggtcttcaagccatcgtgccgttcacgctgaagatcatgtccgatgttgcgcaggacgcgttcacgcgcgtgcagcgcttctcgaccgactggcacgccaactccttcgccggatccaccgtgcgcaaaatcacccgcggcatgtgggcgctcgacctgctcaacgacaccattctgatggcgctggcgccctcgctgctggtgctggtcggctcgatgatcctggtcggcatgcactggacctcgctcggcgtcgtgatcgcggtcggggcgatcgtctacgtcgcgatcactgtggtgttctcgacccgctacattgcgccggccgcacgcgtctccaatgcctgggacaccaaggtgggtggtacgcttgcggatgcgctgacctgcaatgccgtggtgaagtccttcggcgcggagctgcgcgaggacacgcggctcgcccgcgtcatcaaccgctggcgcgtgcgcgtgcggcggacctggtatcgctacaattacacggcgatggcgcagctgtccctgctgctgtgcctgcgcgcgtccgtgatcggcgggtcggtgctgctgtggatgtcgggtcacgcctcgcccggcgacgtcacctatgtgctgacgagctactacgtcatccacgcgtacttgcgcgacgtcggcatgcacatcaacaacctccagcgctcggtcaacgacatggacgagctggtggcgatccatgacgagccgatcggaattgccgatgcgcccgacgcgcggccgatctcgatcgaaggcggcgagatcgcgttcgacgacgtcacgttccactatggcggccatcgcgcgccgctctatgacgggctgtcgttgacgatccgcgccggcgagcgggtcgggctcgtcggccgctccggctccggcaagaccactttcgtcaagctggtgcagcggctctacgacgtcaccggcggccgcgtgctgatcgacgggcaggacatcgcgctggccacgcagcagtcgctgcgcagccagatcgcgatcgtgcagcaggagccgatcctgttccatcgttcgctcgccgagaacatcgcctatggccggcccggcgccagcctcgaggcgatcgagcaggcggcgcggctagccaacgcgcacgacttcatcctgcgcctgccgaagggctatggcacgctggtcggcgagcgcggcgtgaagctgtcgggcggcgaacgtcagcgtgtcgcgctggcgcgcgccttccttgcggatgcgccggtgcttatcctggacgaggcgacttcaagcctggattcggaatcggaggcgctgatccaggaggcgatggagcggctgatgaacggccgcacctcgatcgtgatcgcccatcgcctgtcgaccgtgaagagtctcgatcgcatcctggtgttcgaccgcggcgagatcgtcgagcaaggcacgcatgcgatgctcgcagccaggccgggcggcatctatcgcggcctgttcgagcgccaggtggtggagctcggacggatcgcggcagcggaatga

SEQ ID NO: 8171 - DNA, 1587 bp, BradyrhizobiumColbertium
atggccgacgccgccaccgcttcatctgccgtgatagcgcatcccgcctcggaccgcatcgcgccgaagcggctgttcgcgttcatcatcatggtgttcgggatgttcatgtcgatcctggacatccagatcgtgtcggcctccctcagcgagattcaggccggattgtcggcgagctccagcgaggtctcctgggttcagaccgcctatctgatcgccgaggtgatcgcgatcccgctctcgggtttcctgtcgcgggccttcggcacacgactgctgttcgcgatctcggcggccggcttcaccgccgcaagcctgctctgcggcctcgccacgacgatcgaggagatgatcctctggcgcgcgctccagggctttctcggcgccggcatgatcccgaccgtattcgcctcggcctacaccgtgttcccgcgcaccaagttccacatcgtcgggcccatcatcggactggtcgcgacgctggccccgaccatcggcccgacggtcggcggctacatcaccgacctgatgtcgtggaactggctgttcttcatcaatgtcgtgcccggtatcggcatcaccatcggcgtgctggctctggtcgatttcgacgagccgcatttcgaactgctcgaccgcttcgactggtgggggctgttgttcatggccggcttcctcggcacgctggaatatgtgctggaggaaggaccgcaatatgaatggatgcaggatacctcggtcgcgatctgcgcctggatctgcgggctctccgcggtcgccttcttctggcgcgtgttcacggcggccgagccgatcgtcaatctgcgcaccttctccgatcgcaatttcgccgtcggatgcacgctgcaattctgcatcggcatcggcctctacggcctgacctacatctatccgcgctatctcgccgaggtgcggggctacagcgcgctgatgatcggcgagaccatgttcgtctccggcatcaccatgttcctggtcgcaccgctggtcggccgcctcatggcgaaggtcgacatgcgctacatgatcgccttcggcctcatcgtgttcgcgatcggctcctaccagatgacgtggatgacccgggattacgacttctacgagctgctggtgcctcagatcctgcgcggcatcggcatgatgttcgcgatggtgccgaccaacaacgtcgcgctcggcacgctgccgcccgagaaagtgaagaacgcgagcggcctgttcaacctgatgcgcaatcttggcggcgcggtcggcctcgccgtcatcaacaccgtgctcaatgatcgtaccgacctgcacatcgcgcgcctccaggagcgcgtgacctggggcaatgccaccgcgaccgaaaccctgaccatgttcatgcagaagttccaggggctcggcgattccgcgctgatggcgatgaagcagctcagccagatcgtgcatcgccaggccgtggtgatgagcttcggcgacgcgttcctcatcctggcggtgttctatctcggcctcagcctgctggtcgcgctgctggacagaccggcttcgccgttcggcgccggcggcgacgcgcattag

SEQ ID NO: 8172 - DNA, 1143 bp, BradyrhizobiumColbertium
gtgaccgacaagccggctgcatccgcgccagatgcgcccgccgccggcgctccgagatccggcaagcgcaaattcgtcctgatgggcgtcggcctcctccttgcgctcgctgttgcgggctatgccggctattacacgctggtcggacgtttctatatctccaccgacgatgcctatgtccgcgccaacaacaccatgcttggcgcgcgcgtttccggccacattgcctcgatcctccccggcgacaacacgtcggtccgcgccggcgacatcgtcttccgcatcgacgacggcgactacaagatcgcggtcgaagccgccgcgagcaagatcgccactcagcaagccaccatcgatcgcatcggccgccaggtcgccgcgctcgacagccaggttgcgcaggcgaaggcccagctcgtctcggcgcaggcaggcctcaagcgcgccgacctcgactacgagcgccagcaagcgctgagcagcaagggcttcgcctcgcgcgccaccttcgagagctcggaagccggacgcgatcagggcgccgccgctgtcaaggccgcgcaggctgcctacgacgtcgccgtcagcaatgtcgatgtcgccaaggcgcagcaggccgaagcccaggctcagctcgccgagctcaagaccacgctcgccaaggccgagcgcgacctcggcttcaccgcggtgcgcgcgccggtcaacggcacgttctccaatcgcctcgtcaacacgggcgatttcgtcgcggtcggccagcgcctcggcaacatcgtgccgctcgacgacgtttacatcgacgccaacttcaaggagacgcagctcaagcgcatccggcccggtcaaccggtgacgatcaaggtcgatgcctacggcatgcgcaagttctccggcgtcgtcgacagcatcgccgcgggcgcgggctcggtgttcacgctgctgccgcccgataacgccaccggcaacttcaccaagatagtgcagcgcgtgccggtccgcatccgtgtgccgaaatcggtggcgaagcagaacctgctccgcgccggcatgtcggtgtatgcgatcgtcgacaccaacaagggcgccgccgacgccgacagtgaggtcgatctcgacgatcccacggttcatccgcagtag

SEQ ID NO: 8173 - DNA, 246 bp, BradyrhizobiumColbertium
atgagtgcgcaactgctcggcagggggtgcggatgcctccgacgcgacatcaccgctcgactgctcctccgccacttcctggcgaaggacgcgcgccgtctggtctctcgatacggccataacggcctcccccaaaatatacgcaaccgaggtcgaccgtgcttgcggccggttcctcgctcattccaaatatcattgaccgaacggttcggtcaatatacatatcaaactcggactggaccctag

SEQ ID NO: 8174 - DNA, 636 bp, BradyrhizobiumColbertium
atggttgtagccagcgacgaacatctgcacgtcgtccaagatgaggacaattccaagcgccgccagatcctggacggtgcccgcaaggtgttcatggacctgggtttcgacggcgccagcatgggcgagatcgcccgtgccgcgcaggtctccaagggcacgctttacgtctacttcgccgacaaatccgcgctgttcgaagccatcctcgaacaggaggcactccggcacggccaggtcgtgttcaatttcgatcctgcgcgagatgccgagacgacgctgaaggagttcggcctcgcctaccttcagctggtctgccggcccggcggcggatcggcgatccgcaccgtgatggcgatcgccgagcgcatgcccgatgtcggccgccgctattatgcgcgcgtgctggacaagtccatcaaccgcctctccggttatctcaaggcccgcgtcgccgccggcgagcttgagatcggcgaatgcgatctcgccgcctcgcagttcatggagctgtccaaggcttcgctcttcctgcccttcgtgttccaggccgcacccgcgccgtcggaacagcgcatgaccgaggtggtcgagagcgcgacgcggatgttcctggccgcataccgggccagatag

SEQ ID NO: 8175 - DNA, 342 bp, BradyrhizobiumColbertium
atgtctcgtgatcttcgcccgccggtcgatatcctccactacgagatcgtccaggaacaggcctccgcgcttggacggatgggccgcacactcgaacaggcgctgacgcgtttgcgtgagttcgacgccgtgcacgcagccaccgagttgccgccctcaatgcaatcggccaggcgcaagctggtggtggaagctggccaggccctgtggatgttcgtggtgcaacgcgaggcgtccggcctgcgcgacagccgccatatcatgcgcacctacaacgtcccaagcgaagtgcagcggtgcatggggctggcgcccacgccatcgaagccggcctcgacgtga

SEQ ID NO: 8176 - DNA, 648 bp, BradyrhizobiumColbertium
gtgctgaatacgctggataagcccgatctggatctggtgatgcggaccggcaggttggccagctaccggaaccgccaatacctgctgcgagagggggagcccgcgagcggcatccacatcatcctgagcggcatcgtcgaaagcacccattccgggacgcagggccgcgaattgatgctgtcgacctgggaggccggcgatttcgtgggcgcaccctacatccttggcgatcaccgccatagctggtcggcgcgcgcgctcggccgggtcgaagcgttgcatctcgaccaggatgcgatccgtcggctgatcgcgcagtcgccatcgttcgccgtggcgttgatcgagtgtctcggcttcaagggcgagacctattccatgctggcccagacgctggcggggcagaaagccgcggaacgactggtgctcctgctggtgaagatgtgcgagaatgccgcgcaggacgagagtggccccatttcgctcggccgcatcacgcaggccaatctcgcgcgcatgatcggggcaacgcggcagtcgatcagcctgattctcaaccgtctgcaggacgacggcatcatctcgaccggtccgaccaagatggtggtcaacgatctcgcggcgttgaggaagcagatcaccgactga

SEQ ID NO: 8177 - DNA, 1356 bp, BradyrhizobiumColbertium
atggatgtctcgccaggctcactccgcgccgcctatcgaagcggcgcgctcaagccttccgatgtcgcggcgcatgtgctgtcgcgcctgagcggcgccgatcagagcggggtatggatatcgaccgcccatcccgacaatgtcatgaccgcggcgcgcgcgctcgatgcgcgtatcgacgagatcgacaggctgcctctctacggactcatcttctcggtgaaggactgcatcgatgtcgcaggcgagcagacgacttcggcgtgtccggagtttgcctacctcgcgaaggatacgagtcctgtcgtcgctgacgcgattgccgccggggcgatctatgtcggaaagaccaacatggaccagttcgcgaccggcctcgtcggcgtgcgctcgccctacggtatcgcccgcaacccgcataatccggattacattccgggcggctccagctcgggggccgcggtgtcggtcgcaaccggcacatcgtcctttgccttcggcaccgacaccggcggatcgggcagggtgccggcgtcttattgcggcgttacgggcttcaagccggcgcccggagccttcagccagcgcgggatggtctatgcttgccgaagcttcgacacgatctcgctttacacgcgcgagccgcgcgacggctacgagatctatcgcgttctggcgcggcgcgatgccgacgactgcttctcgccgctcgactttccaggctgggcggagcagcggccgcccgcgcggcggtttcgcatcgcgatgccgcgcctcgatcagctcagattctttggcaatcccgagaccgaaagtctgttcggcgatggacttcgccggttgcggcagatcgacatgccggccgcaccggttgatttctcgccgttcacctcgatcaacgatctgatgttcttcgggccgttcctggccgagcgggatgtctcggtcggcgcgttcctcgacgcaaatcccggtgtgggcgtcaagatcgtgcgcgatctcgtcctcggcagccggacgttgtccgcagccgatgcctaccgcgctctctacaaggtcaaggaggtccaacacgcgttgagggacttctggcaagaccacgatgcgctgatcgtgccaacggtcggaaccgtgctcagcatcgatgatgtcgcgcgtgatccgctgacggccaacttcaacaatggctactacaccaactacgccaatccgctcgggctcgcggcagtcgcggtcccgcacgcggtgaccggggccggcgtgccctacggcgtgacgtttctggcgccggcggggagggagcgtctgctcaccgacctcgcctgcgcgttcatgggagcggcagcccaggcttga

SEQ ID NO: 8178 - DNA, 1008 bp, BradyrhizobiumColbertium
atgaagagacttgttgccgcgcttgcacttgctacgttgcctttcaccgccacggctcgcgccgaggacaagccgcccaaggtgacggtcggctacctgaatttggtgaatgcgcagcttgtcaccaagcatctcggcctgctcgccaaggagatgcccggcgtcgacatcaaatacgtcaaggtcggcggcggcggcgacatgctgcgcgcaatcgcgggcaacgacgtcgacttcggtggtctcggcaatccgccgaccgctatcggcgcgacccgcgggctcccgatcaagggcatcctggtgatcaacatgctcgactatgtcgagtcgatggtggttcgcgcagacaagaacatcacttcgctcaaggacctgaagggcaagaccgtggctgcccccttcggttcgaccacacattacctgctgctccaggcgctgaagaacgaaggcgtcgaccctgcctcgatgaagatcatcgaccttgccccgtccgacattgccgccgcctggcttcgcggcgacatcgacgccgcatggttctgggagccgaacctggacaaggccgtgaagaacggcggcaagatcctcgtcacctcgggcgacatggcgaggcgcggctacccgacctgggacatcggggtcgtcatgaacgcgttcgcggagaagtatccgtcctacgtcgagaagttcgtcaaggctgaatgcgatggcatcgatttctggctgaagaatccggagaaaacggccgagatcattgcggaggagctctcgctgccgctcgaggacgcaacccgcatgatgaagggcaccggaatggtgccctgcgacaagcagcttacggagcagtatctcggtacatccgcgaagaaaggcgagttcgtcgataccctggtcgcgaccgcggatttcctggtcaagcaggagcgcctgcccaagctgttgccgcgcgccggcttcgaggccttcatccagccggcctatctcgagaaggtgatcggccgctga

SEQ ID NO: 8179 - DNA, 840 bp, BradyrhizobiumColbertium
atgagcgtcgaggcagctcccatggccatgccgatctcggccgatcgcacgcggcgaggcagcctgaggatgccgaacgtctcgcggtcggtgctgctctcgacgctcaccgtcgccgtgttgctgaccacatggatcatcgtcacagagatccgctgggccaacgagctattcctgccgaagccgcaggcggtatgggccgcgttcgtcaagaccatgacgaagggctatcaggggaccacgctgctccagcatctcggcgccagcctctatcgcatcctcgtggccttcgcattggcctgtctggtcggcattccgctcggcgttctcatgggggtctcgaggaatgcacgtgggttgctcaatccgttgatcgagttctatcgcccgttgccgccactagggctctacacgctccttgtgatgtggctcggcatcggcgaaagctccaagctgtcgctgctgttccttgcaggtttgccgggcatcgtgatctcgacgatccaggccgtcaccagcgtcgatccggtctacgtgcgtgccgcgcaatcgctcggcgccacacgccgccatctgctcttccacgtctatctaccggcagcggggccactgatcctggccggcatgcgcatctcactcggcttcacctacaccgtcctcgtcgccgccgagatcgtcgcggcctcggccggtatcggctggatgatctgggatgccgcaaaattcctgctgtccgacgtcgtgatcatgggcctgatcgtgcttggcctgaccggtgtcgtgctcgacctgatgatgcgcgcgatcgccaaattactgatgccgtgggcccgaacctga

SEQ ID NO: 8180 - DNA, 1299 bp, BradyrhizobiumColbertium
atgcagatgcctgtcacaccgccttactccgatctcgagcagcgtgtgctgtcgcgcatcacggaggagcgctggctcgaactcgcatcggagttgatccgcaccgggcagccgcgctcgggaaatccgctcgatcccgatctgccgcccgccgaggaagaggcgatctcaatgctggttgcgggcaagctcgaagccctcggcatggtcgtcaccaagcacagcgcgcagccgcaccggccgaacgtgctcggcgtgctgaaggggcgggagggcgcgccctcgctgatcttgaacgatcatctcgatacttatcccgtcgtcgagccggagaaatggcacatgacggatttcgatccgttcaaggcgacgcggcatggcgaccgactctatgcgcgcggcacctccgatacccgcggcaatcttgcggcatcactgctcgcggtgcaggccctgatcgaagaaggcgtgaagttcgatggcacgctgatgtgctgctacaccgtcgacgaggaacgcaacggcaccgagggctcgatttatatgctggagaaggtcggcctcaccgccgactacgagatcaccgcagagccgacggcttggggtgatgtcggcaaggactggggcatgaacctctcggtggccaactccggccattgcctggtcgaggtgacggtccgagggatcaagtcgcatatctggcggcccgacatcagcgtcaacgccatcatggaagcggggaagctgctgccgaggctgaaggagatggccttcacgcatgtgccgagcaagttcatggggcacacgccgccatgttgctccgtggtgcgcatccgtggtggtcttcccggagagatgcaattctcccccgatgcctgcacgatcacgctcgcggtggtcggcattgtgccgggcatgaccctcggcagcgtcatttccgacatcgagcgcctggggcaacagacgtttgctggtgtcaacgacgtcgaggtcgaggtccgccaagtgcccggctcgctgttcgtcaacgcgaccgaaccggtgcccgtcgaagaggagccttgccgctctcttcgcgcggtctaccggcgcctgatggggcgtgagcccggtgtcaatcgcaagaacgccttcaacgacaccatccgcttccgcgaagccgggatcaacgcggtgacctttggtcccggcgaggatggttgggccgtcgacaacgagaacatctcggttaccaagtcggtgatggcgacccgaatctacgcgctgaccatcatgcagatcctgggagtgcgcgcatga

SEQ ID NO: 8181 - DNA, 114 bp, BradyrhizobiumColbertium
atgccttggatgaaaattgcgactgtgcaaatttttgcgcggcagccgcgctttgccaaagacacagcgccggctgagcagaccagccgcatccgggcggttggtctccgctga

SEQ ID NO: 8182 - DNA, 1188 bp, BradyrhizobiumColbertium
ttgtatctcgtcggctccatcgtccttgtttcgctagcgggttgcggacgcggtttctttcaggccgaacgtgaaccatggcgggccgaggcggaggccgcatgcctgaaatcgggggcggtcaaggagagtgcggacatcgtccgcatcgagccgatctccggccccggccagtgcggcgccgaatttccactcaaggtcgcagccatcggagaaacctccggcacctacggcttcgccgacgagcaactgcgtccgccggggaacatcggcagccagccgcgctggcccgtggcgcagccgcgatcgaactatccgcagagccagaactatccagcctcctcctatccgccgcgcccgaactatcccgacagcgaggtgcgccagccctccggctacggcggctcgaccggaccgatctcgctgaacgcgcccggcgtggcgccgcaggaagacgagatcgatctgccgcccgagggcatcgatgccgcgggtgcctcgcgctacatgaatgcgccgagctatccggcgcggccggcgccttattcgcaggcccccgcgcagcagccgctgccgcgtcttggtccggcgcagggcaatcccgtcaccgccgttggtcccgtggcgatcaagccgacggcgacgctggcctgtccgatcgtgtccgagctcgaccgctggctcgccgacaccgtgcagccctcggccatgcgctggttcggcgtgcgcgtcgccgagatcaagcagatctcggcctattcctgccgcggcatgaacggcaactcgcgcgcccacatctccgagcacgccttcggcaatgcgctcgacatctcggccttcgtgctcgccgacggacgccgcgtgaccgtgaaggacggctggcgcggcgtgccggaagagcagggcttcttgcgcgacgtgcaggcaggcgcctgcgcgcatttcaccaccgtgctcgcgccgggttccaacgtcttccactacgatcatatccacgtcgatctgatgcgccgccccagccgtcgcctgatctgccagcccgccgccgtctccggcgaacaggtcgccgcgcgggcgcaatcgcgcagcccttatgccaatgcgcgcgaaccgtcagtcactggctcgctgggtgcgcgtaagagcaccgcgcgcaagcgcgaagacgacgactacatcgacgaatag

SEQ ID NO: 8183 - DNA, 126 bp, BradyrhizobiumColbertium
atgacggccgcggcaaagcgcgcgaccagcgggagcgacctcatgacgttcaccggcagactgagcgttatcaccgcctacttcgccatagccttcgtcggcgccatcgtgctcgggatgatctag

SEQ ID NO: 8184 - DNA, 390 bp, BradyrhizobiumColbertium
atgcacaccgcaacggttgcaccgccgattgaagaccgggcttacacgccgcttggcgagtgggagagcgcgggtgccaatgggacggtccgcatcgagcgctgtgggcctgcactgtgcggctacgccctgacggattccttgcgcaggggcgagagcgtgctcgtcaacatgaagccgaagaagcacgacgtctggaccggcagcatctacagccgggccagcggcaacacctatcgtgcgacgatgacgctgaagggctcgggcaagctccacgtcgaagcctgcgcgctcggccgcttctggtgctccggcaacgactggacgcgcgtcgatgcgccgcgcgagcaaatgatcacgacgtcgcggcaatggagtgcacggtcgtga

SEQ ID NO: 8185 - DNA, 384 bp, BradyrhizobiumColbertium
gtgaccggcggctcgctgcgctccagttcaatccgcggcgggttggagctcagcgcctccgatcttggcgtcgtctccagttttggcgtctccaatcttgaagccgccgacggcacaacggactgcgacgccgtcgcggcaagggcgggaggcgccggcggcgatggcacgacctcgcttgcttgtggcggtccgaccggcaccgtcggacaagcaggctgcggcgcttggacgaccggcgcgggcgcctgcggcaaggcccgtgctgggccggcatcttcggtcggccgcaagctgcgattcgacactgtgacacaggacgcggaccggcaatggcgcggcgcctcgacatggaatcggtggccgccaatcgagaaggtgtag

SEQ ID NO: 8186 - DNA, 780 bp, BradyrhizobiumColbertium
atgaacaggcttaccatcgctgccgccgccctcttcctcgcctcgactgctgccgcgcatgcgggcaattcgatctcgttccagatcgaggggcagcgcatccgcatcgagacgccgcgcaattgcgcctcgctcgattgcgtgactatcgtggcgccgggcctttcggacaagccgatcaagctgaacaacatcaacctcaagggcctcggcggctccaaggacgatgacgtcgacaccacgcccgcgccggcgcccaccacggcgcagcccgccccggctccggtgcagcagcagccggtgcagtcgaccgcgcccgccgcaccggccgtaaccacgcccgctgccccggccggagccgtcgccgccgctcccccagccgccgtcgtcaacacgcagcctgcgcccgttgctgcgcctgcccccgtcgccgcgcccgctcccgtggccgcggctcccgctccggccccggtggccgccgcgcccgtggcagcagcgaactccccggtcggcctgtgggcgaccgaagagaacaagggcaacgtccgcgtcgaacagtgcggccccaatctctgcggttacgccgagaagaccaatgagcgcatcctgatcaacatgaggcctgcgggctcgaagtggagcggccgcattcgcgatcccaattccggccgcaactacgactcgacgatctcgatgaagggcccgaacgcgatgcgcgtgcagggctgcgccttcggcggcatgttctgcggcggccagacctggaagcgcgtgagctga

SEQ ID NO: 8187 - DNA, 561 bp, BradyrhizobiumColbertium
atggcacgggcgccggtcatggcggcgggcggtattgtgttgcggcggggccctcagccgctgatcgcgatcgtgcgccagcgcaagcgcaacgaatgggtcctgcccaagggcaagctcgacgacggcgagacgccgaaggaagccgcgcaccgcgaggtgctggaggaaacgggccacgacgttgccgtgcacgaatttctgggcacgctcgcctatcaatccggcgggcgctccaaggtcgtgcatttctggcggatggaggctggcgatgggccggtccgcaagctgatgaacgacatcaaggcggtcgactggctgggattggacgatgcgatcgcgcggctgtcgcgggaatacgaacgcgcgttcctctaccaggttggcccgatcgcgctcgcggcggcggggctggcatcgccgctccccgacgcggcgcaagcggccgacgacattggtacggccttgcagacgctgacgccggctgaagtcgcgtcggtcgatcagctacgacacggtctgcttcaaaaggtgaaggcgtggttgcgcggcgaggcgtga

SEQ ID NO: 8188 - DNA, 864 bp, BradyrhizobiumColbertium
atgacagtcaaagccctcatcgcctctttcacccagcaggaagacctcaacttcctgttgaccaaccgcatcccgcgcgcggccctgacccgcttcatgggctggttctccaagatcgagaatcccctggtgagggatttctcgatcgcgctgtggaagctgttctccgacctcgatctgtcggaggcgcgcaagacgcatttcaggagtctgcacgactgcttcacccgggagctcaagccgggcctgcgcccgttcgatccggatcctgccgttgttgccagcccctcggacggcatcgtcggcgctcacgggaggatcgcggatgccgagctgttccaggtcaagggcgcgccgtattcgctgctggatctgctcggcgattccgctctggtcgaccagcatcgcaacggctcgttcgtcacgctgcggctgacctccagcatgtatcatcgtttccatgcgccctatgacgcgcacatcgaacgcgtcacgctgattcatggcgacgtctggaacgtcaatccgatcgcgctcaagcgcgtcgagcggctgttctgcaagaacgagcgcgcggtgatccgcacgcgtctgtcgaccggcgaagccgtgacgctggtgccggtcgcggcgatcctggtcgcgagcatccgcctgcattttcttgacgtggtcctgaacgcgcagacgcgcggcccggtcaattttccctgcgacgtgaacgtgaccaaaggcgaggagctcggctggttcgagcacggctcgaccatcatcatcctggcgcccggcgatttcgccttctgcgacgggatcgcagaaggaacgcgcatccgcgcaggccaggcgctgctcagaagaaagtag

SEQ ID NO: 8189 - DNA, 1638 bp, BradyrhizobiumColbertium
atgtccgtggccgccgcagcgtccgctgccgccgtcctcccgaagctcaaggcgcgggtcgaattgtcccgcgccaagcaccgctcgcttgccggccattccaagatgtcgcgccgggtggcgcggctgcttccattctacgaattcgcggatgccgactatttctcctgcgacggcgcgccggcgaacatcgccgcgcagcgcaaggacggcttcttccgtctcgccgccctctacgccgagcgctacccgaagggtcgcgcgatgacgagggacgccgcggaaaaaatctccgatctgaacttcaccgagagctaccgcgtgccgttccagttctcgcgcctcgtccgcgagcatctgggcacctcgaccttcgtggaatcgtcgagcggcgtcaccgtcaccgatgtcgacggcaacagcttctacgacctcaccggctcctacggcgtcaacatcttcggaaacgacttctacaaggagtgcatcgagggtgccgagaagcgcgcgcacgcgctcggtcccgtgctcggcccctaccaccccgtcatcctcgacaacgtgtcccggctctgccggatctcgggcctcgacgaagtctcgttccacatgtccggcaccgaggccgtgatgcaggcggtacggctcgcgcgctaccacaccagacggacgcatctggtacgcttcgccggcgcctatcacggctggtggggcgacgtgcagcccggcgtcggaaatccgattcccgcacacgagacctacaccctcgccgagatgtcggagaagacgctgcacgtcctgcgcacacgcaaggatatcgcctgcgtgctggtcaatccgctgcaggggctgcatccgaacgccaacgcacccggcgattcctcgctggtcgattcctcccgcggcggccacttcgatcgtgccgcctacaccgagtggctcaagaagctgcgcgaggtctgcaccgaacgcggcatcgtgctgatcttcgacgaggtcttcgtcggcttccgcctcgccgccggcggcgcccaggactatttcggcgtgcgcgccgacatcgtgacctacggcaagagccttgccggcggcctgccggtcggcgtggtctgcggcaagcgcgagctgatgcgccgcttccgcgacgatcggcccgccgatatctgcttcgcccgcggcaccttcaactcgcacccctatgtcatgacggcgatggacgagttcctgagccgtctcgccagcccgaacttccgcgccgtctacgaccggcttgacgaaacctggaacggccgagtccagaagctgaaccggatgatggagagcgccggcctgccggtgcgcttcgccaacctctcgtcgatctggacggtgaagtacaccacgccgtcccgctacaactggatgctgcagtactatctgcgcgccgagggcctggcgctgagctgggtcggcaccggacggctgatcttcagcctcaactacaccgacgcggacttcaacgaggtggccgaacggttcgtgcgcgccgccgagaagatgaaggccgacggcttctggtggcacgacggtgtgctcaccaacaagaacatcaagcggcagattctgaaagagatgctggccaaacgcttcgggcgctga

SEQ ID NO: 8190 - DNA, 660 bp, BradyrhizobiumColbertium
atgatcaagaattatctcgagcagctgcgaatccagcgctgggacgaccatcgctactatcaccacagccgcatcaatcagagcctgcacttcatcagcgccttgagctttctcttcgcctatgtctggctgttcatcgatcccgtggtgtcggcgctggtcggctggctggtctcgatgacctcacgccaggccggtcacttcttcttcgagccgcacacctacgaccacgtcaaccaggcgacacacgagtacaaggaagagatcaaggtcggctacaacttgcagcgcaaggtggtgctgatggcgatctgggcgctctcgcccctggtgctggtggttgatccgacgctgttcggcctgttcaccccgtgggcgagtgcgaccgacttcatgcgccaggtggccaagatctggctggtggtcggcggcggcggcctgttgttccgcacggtgcacctgttcttcattcgcgacgtcgagaccggtctcgtctggatgaccaagatcctgaccgacccgttccacgacctgatgctctatcacaaggccccgctcgcgctgttgcggggcgagctgatggaccccggactgcacctcaaccccgagcacacgctgggcctcgccggcgagccggtgctcgaagagcagcacgcctga

SEQ ID NO: 8191 - DNA, 690 bp, BradyrhizobiumColbertium
atggctaagatcatgaaccttgacggcacgcagcagctcgacctcacccgcggcacggtcgagcaggcctacgaccgctgggcgcccgtctatgatctcgtgttcggcggcgtgttcgccaagggccggcaggcggcaatcgcggccaccaacaagatcggcggccgcgtgctcgaggtcggcgtcggtaccggcatctcgctgccgctctacgcgcagaacctgcgcatcttcggcaccgacatttcggaagcgatgctggacaaggcgcgccgccgcgtgaaggagcagaagctgaagaacgtcgagggtctcgcggtgatggacgccgagaagctcgaattcccggacaattccttcgacgtcgtgatggcgcaatatgtcgtcaccgccgtgccgaacccggagaaggcgctggacgaattcgcccgcgttctgcgccccggcggcgagctgatcatcctcacccgcgtcagcgcggacaccggcatgcgccgcttcatcgagcagaagctgcagccggtggtgcgtccgctcggcttccgcaccgccgaattcgcctggtcgcgctatgccaaatggctcgccggtgcgaagggcatcgagctcgccgagcgccgcctgattccgccgctcggtcatttctcgctggtgcgcttccgcaagatagacgtcgccaaggcggcgtga

SEQ ID NO: 8192 - DNA, 1053 bp, BradyrhizobiumColbertium
atgcgggtattaatcgcgaccgacgcctggcatccgcaggtcaacggcgtggtgcggacgctgacctcgctggcgaatgcggccaagggcctcgacgtcgagatcgacttcctcaccccggacggctttccgtcctggccgctgccgacctatcccggcctgcgcttcgcgctgccgggcggaaaggagatcgcgcggcggatcgagaaggccgcgccggacgcgctgcacatcgcgaccgagggcccgatcggctgggcggcgcgggcctattgccggcgcaaccggctcgccttcaccacctcttatacgacgcgctttccggaatacgtcgcggtgcggaccggcatcccggccgcggtcggctatgccgtgctgcgtcacttccacgacgccgccgccatgacgatggtggcgacgccttcgctgcggcaggagctgtccgagcgcggcttcaagcggctcggcttctggacgcgcggcgtcgacaccgagctgtttcatcccgacgctccggctcagctcgaccttccgcgtccgatcttcatgacgatggggcgcgtggcggtggagaagaatctggaagcgttcctatcgcttgacctgcccggcaccaaggtggtcgtcggcgatggcccgcagaaagctgcgctggaaaagaagcaccctgatgccgtcttcctcggcgagaagaaaggagcggatctcaccgcccatctcgccgcggccgacgtgttcgtgttccccagcctgaccgacacgttcggcgttgtgcagctggaggcgctggcctgcggcacgccggttgcggcgtttccggtcacaggtccgaaggacgtcatcgccgatcatccgatcggggcgatcgaccatgatctgcgcgccgcgtgcctgcgcgcgctcaccatgtcccgcgagacctgccgcaatttcgcgctggagcgctcgtgggagaacagcgcgcgccagttcgtcggcaatctcacctcacttcagcccagccgcgccttgcgcgcctcgccccgcatggcgaggcggccggtgcgcggttga

SEQ ID NO: 8193 - DNA, 717 bp, BradyrhizobiumColbertium
atgttcaatctggacaccttcaagacctattcgcgcgccgtcgcgctcggtgcagccacgatctccgcaatcgcgttcgcaggcgcggccaacgccgcgccaatgcaaatcttcccgttcttccagccgctgccgcagctggccgcgccgcagccgttcgaaccctatcagcctaaccaggcaacgccttaccaggccgcgccgtccgaggatcaggacgcagtcgaactgccggcccgtttccgccgccagaccgttgcctacgcaacgcgcgaagcgccgggcaccatcatcatcgatacgcccaacacctatctctattatgtgctcggcaacgggcaggcgctgcgctacggcattggcgtcgggcgcgaaggcttcacctggtccggcatccagtcggtcagccgcaaggccgaatggccggcctggaccccgccgccggaaatgattgctcgccagccgtatctgccgcgtcacatggcaggcggccccggcaatccgctcggcgcacgcgccatgtatctcggcggcaccatctaccgtatccacggcacgaacgcccccgagaccatcggcaagcgtgtctcctccggctgcatccgcatgaccaacgaagacgtcaccgacctctattcccgcgtcaacgtcggcaccaaggtgatcgtgcttccgatgacggagcgccgcgcagacctcggcaccgcaacgcggtaa

SEQ ID NO: 8194 - DNA, 432 bp, BradyrhizobiumColbertium
atggaggcgcaaatgcaatcatgcctgcaatcctcgccgaacccgtggctgcacgtcctcgtcggtgctggagccctgatgctgctgctgtccgcgccgtcctcgctcgcgcagcaatccgccaatgaagacgcaggcaagcaggccttcaacaattcctgccgcacctgccattccataagggagggcgacaatcgcctcggtcccaatctcaacaagatcgtcggacgcaaggccggctcgctgccggactacaattactcctcgtccatgaaagaagccggcttcgtctgggaccaggacaggctcacccgcttcatggtcaagccggacgaggtcgtgtccggccacaagatgcagccctatggcggtatctcggccgatgaggcggcgaaggtggtggcgtatttgcaggaggcgggctcgcaataa

SEQ ID NO: 8195 - DNA, 273 bp, BradyrhizobiumColbertium
atgaccggttcggtcagcgcggccgccggcaccggccacgacggcatgcgggccgcgcgccacctcgccaggtggctcgggctggcggccaccccgaccttcgcgatcatggccgcgtcgacggctgtgcttggcgacggagcggcggacatgctgtgcgccgggcagggctccgtgctcggcgggatggtgccgatgtatctcttgatgagcgcgtttcattcaggggcgtggctgaagctgattgcggagcggaggcttcggccgtcgtga

SEQ ID NO: 8196 - DNA, 750 bp, BradyrhizobiumColbertium
atgcagaccccgcctgtggtgtcgccgcaggactgggaggcggctcgtctgaagctgctcgtgaaggaaaaggcgcatactcgtgcccgcgatgccctggcggccgagcgccggcgcatgccgtggatggcagtggacaaaacctatgcgttcgaggggcccggcggcaagctcagtctgctcgacctgttccagcggcggcggcagctgatcgtctaccgcgccttcttcgagcccggtgtgttcggctggcccgatcatgcctgccgcggctgctccatggtggcggatcaggtcgcgcatgtcgcgcatctgaacgcccgcgacaccacgctggtgttcgcctcgcgcgcgccgcaggccgagatcaccaggctgaagcagcggatgggctggaccatgccgtgggtcaccatcaccgacaatttcgatgccgatttcggcgtcggcgaatggcacggcaccaacgtgttctaccgtgacgggacgcgcatcttccgcacctatttcgtcaagagccggggcgacgagcagatgggcggcacatggaactatctcgacatcacgccgctcggccgccaggaggtgtgggaggattcgccgaagggctatccgcagacgccgacctataaatggtggaactggcacgacagctacacgaagggcgcggcgcccgacaagagatgggtggagatctcggacgccggcgagaaggcctttcgcgaggaggccgcgggggaaaggaaatga

SEQ ID NO: 8197 - DNA, 1221 bp, BradyrhizobiumColbertium
atggagtcgctgatcaccgccgcggcgcgcgcgctggaggccggcgatccgctcggcgcgctcaaccgcgttgcattgcgcaacgatgcgccgtcgcttgcgctgcgcggcatcgcgatggcgcaactcggcgatctcgccagggccaaggcgctgctgcgaagcgcagcgcgcgccttcggtccgcgcgaggcggtcgcgcgcgcaagatgcgtcgtggccgaagccgagatcgcgctggtctcgcgcgatctgagctggcccgtgacggccctccgggcagcacgcgcgacgctcgaaatgcatggcgatctcgccaatgccgcccatgcgggtcacgtcgaagcgcgccgcttgcttctggtcgggcgccttgatgaggccgagcgcacgctggccgaaatccgacccacgccgctcccgccggcatcacaagtcacccgcgagcttgtggtcgcaggcattgcaatcaggcgcctcaggacgaaggaagcacgcacggcactcagccgcgcagctcacgcagcacggatggcgagaatcccggcgctcgcggccgaggtcgatggcgcgaagctcatcctcgatgcgcccgcagcgcgcctgatctgtcgcggcagcgaacatacgctgttgctcggcgaggtcgaacgactgacgacctcggccgcgctcctcgtggacacctttcatcacgtcgtgcgcaggcaaggcgtcgtcgtgtcgctcggaacgcgcccggtgctgttcgcgctcgctcgtctgctggcgcaggcatggcccgcggatgtctcgcgcgagatgctgatatcgggcgcttttcgagccaggcacgccgacgagtcgcaccgcgcgcgattgcgcgtcgaaatcggacggcttcgcaccaagctcaaacctctggccgacatcagcgcgaccagggagggcttcgtgcttgcgccgcggaagacgcgcgacgtcctcgtgttggcgcggcccgtcgaggagaagcacgccgccgttcttgccttccttgccgatggcgaaccatggtcgagctcggcgctcgcgcttgcgctcgggatcagtccgcgcaccgtgcagcgcgccctcgaggagctggcgcgatccggcaaggtgcagtcattcggacacggccgggcgcgccgctggatgacgccgcccgttccaggtttcccgacaggcttgttactccccggaccgtttctgaaaacgtag

SEQ ID NO: 8198 - DNA, 639 bp, BradyrhizobiumColbertium
atgaaacgttcagccgccgagatcatcacggagtatgggccttttccaggcgtcgagaccgtgcatggcgtcacctatgacggcaggcatgtctggttcgcatccggcgacaagttgaacgcggtcgatccggccgacggcagcatcgcgcggtccatcgacgtcgccgcgcatgcgggaacggcgttcgacggccggcacctgttccagatcgccgaggatcgcatccagaaaatcgatgcagcctcaggcagggtgctcggtaccatcccggcgcccggcggcggcggcgattccggtcttgcctgggccgagggctcgctctgggtcggacaatatcgcgagcgcaagatccatcaggtcgatcccgaaactggagaggtcctccgcaccatcgagagcaagcgcttcgtgaccggcgtgacctgggtcgacggcgagctctggcatggcacctgggagaacgagcagagcgacttgcggcgcatcgaccccgaaaccggcaaggtgatggagcagctagatctgcccgccggaacggtcgtgtcggggctcgagtctgatggcggcgatcgcttcttctgcggcggcggcgatcgcggcaacgtgagagccatccgccgtccgaagcgcagctag

SEQ ID NO: 8199 - DNA, 1590 bp, BradyrhizobiumColbertium
atggggcggcttgggggattgatgcgaccgacattgaatctgaagactatcctggtcggcgtcgctgtgctcgcggcgtcgttcttcatcagcctgaaggcaatggatttgctgtcgccgcgggcgacgaattcggcacccccggtcgcgcaactgccgccgcttccgcccgcctcgaagagctccatcgtgatcgcgccggtggccatcgcgctgtctgcgatccgcgagcaggccgagaaggccgcgccgcgcaattttgccggcaaggccgacaacccgatctcgcagatcctggagaacgccgatatcggctggtccgccgtgcgcgggccaatggcgaccagcggcgacaaggacgtgctgacgatctcgacgccgctcaccggcaggctgaacgtcacgggctcgctatcgtcgaaagccaccggcgcactcggcgacgcgctcggcagcgtgcttggcggtgacgcagcaaaacggatcggcgcggtcaacatcaagaacctgaacgccaacgccgagatcaagggcaacgtggtcgtcacctcgcgtcccaagctcgcggccgcctggcatctggagcccaatctcggcgcccaggtcaatctcggcgacaccaacctcaacgtcgccggcgccagggtcaacgtgccggcgcaggtgaagccgctgatcgacaagaccgtcggcgagcagatcaacgcggtctccgagcgcatccgcaacgatccctcgctgcgcgacaatgcaagggcacaatgggtcaaggcgtgccgctcgattccgctgcaaggctcgggctcgtcagccgcactgccgccgctctggctcgagatgaagccggtccgcgccatcgcagcgcagccgcgcgtcgacgcgcaggccgtgacgctgctgctcggcctcgaagccgagacacgcgtgacctcgacaccgaccaaacccgactgccccttccccgacaagatctcgatcgtgccgccgaccggcacgggcgtgaacatcggcgtgccgatcgacgtgcccttcaccgagatcaacaagctgatcgcagcccagatggtgggccggacctatcccgaggacggctccggcccggtcgacgtcaccgtcaggagcgccaacgtgacaccctcgggtgaccggctgctgatctcgcttttggtgcaagcgaaggagaagaagagctggctcggcctgggcgccgaggcgacggtgcacatctggggccggcccgtgctcgaccaggcgcggcaaacgctgcgcctgacggacatcgagctcgcggtggaatccgaggcggcgttcggtctgctcggcgccgccgcgcgcgcggtggtgccgcagatgcagcaggcgctgctgcagagagcaacgctcgatctgaagccgatcgccgccaatgcgcgcgagaagatcgccgccgtgatcgcggactatcagaagatcgaggatggccttagggtcgaggccaagatcgacagcctgactctcgccgacatcgccttcgattcgaagacgcttcgcgtggtcgcggaagccggcggcacgctgaacgttttcgtgacgaagctgtcggggatgtag

SEQ ID NO: 8200 - DNA, 549 bp, BradyrhizobiumColbertium
atgatgaagtcgatcgttgccggcctcgccggtactgcactgctcaccaccgtcgcgtttgcgcaatcgccgaccgccaccggcgacaaggctgcgccttcggccacggccccgacgacctccacatccacgacggcgtcgaccacggcgtccggccagtggcgcacgtccaagatggacggcctgaaggtctacaacgaggccaacgagaacattggcacgatcaatgatctcttgatggacaagaacggtgacatcaagatcgcggtgatcggcgtcggcggcttcctcggcctgggcgagcatctcgtggccgtgccctatgagaagctgaagttcgtcaacgagcccgttgcctcgaccacggcgaacatgggcaccaagcccgccgggaccgccggtactacgaccggcgctgcgaccggcaccgacaggcccgcggcgaccgcgacgacgtcgtccacgtcgaaatggtatccggaccacgccgtgttcaatgcgagcaaggacgagctgaagaacatgccggagttcaagttctcggaataa

SEQ ID NO: 8201 - DNA, 570 bp, BradyrhizobiumColbertium
atgacctcgatctcggcggcttccgccggcagctatcaatcgccgctccagcggcttcagcaggaactgcaatcgcaagtctccgccggcacgatctcgtcgacggaccagtccgcgctctcgacggccctgacggatatcgacacggcgctgcagcagagccgatcgagcggccagtcgagcggtacgcgtccgtcgaaggaggcgatgcagtcgaagatcgacgatctcatctcgaacgaagtgtcgaacgggacgctgacctccgatcaggcggaggagctgaaaagcgtgtttcaatccgccttcgcgagcggtcccgccagcgcgggtggacccggtggcgcaggtggcccgccgcccggaccgccgccggacgacagctcttcggattcggcgacgacggattcgacgagcagcagctcgaccgagcagaccacggccgagatcctccagcagttcctgcaggcgctgcaacagtcgcaatcgtcggcatcgtcctacggcgccaacggcaattcatcgagcagctcgaatttctccgcgctgctgatcgacttcacgagctga

SEQ ID NO: 8202 - DNA, 741 bp, BradyrhizobiumColbertium
atggccatttccaatcccaacatcctggtcgtcgaggacgaccgcgaaacgcggacgctgatcgcgaagtacctgcgcaacaacgcgtgcaacgtcaccgccgtgagcgacggccgcgagatgtcccgcgccatgaccgatcaccgcgtcgacctcatcattctcgatgtcatgctgcccggcgaggacggcctcagcctttgccgcaaggtccgcgccgaatcgcagacgccgatcatcatgctgaccgcacgcggcgaggacgtcgatcgcatcgtcggcctcgagatgggcgcggacgactatctgccgaagccgttcaacccgcgcgagctgctcgcccgcatcaacgcggtgctgcgccgccaggctgccgcgcaggcggcgagcgcgatcgagggcgcctcgacgctcgccttcgacggctggcgcatcgatcttcgcctgcgcgagttgcgcaatccggaaggcgcacgcgtggcggtgaccagcgccgagttcgatctcctgcgcaccttttgcgaacggccgggccgcgtgctgtcgcgcgacagcctgctcgacctcacgcagggccgcaacaccggcgcgttcgagcgctccatcgacgtgctggtcagccgcatccgccgcaagatcgagccgaacccggccgatcccaccatgatcaagacggtgcgctcaggcggctatctgttcacgccgaggactgaagcggtcacggtttccctgagcagctga

SEQ ID NO: 8203 - DNA, 1332 bp, BradyrhizobiumColbertium
atgccgacgatgaagccgttcggattcttccacctcaaggggatcggcgggcagatcgccgcactggtgctggcctcgaccgtcgcgctccatctcgtcgtcacgaccgctttcctgatcaaccggtcggaccgccacgacgcgccgccggacggggcgcatcaactcgccgatgcagcgctgctgctcggcgcggccgagcccggcgagcggccgcgcctgcttgcggatctggcgcgcgcctttccgaggctcggcatcgagatgctggcacccggcaccgcgaccgtcgagaccagcgacagtccgcacctgcacgggatgcgccgccatctcggcccgggcttcaaggcaatgcagcttgccccgaacgggactccggagcgcgtgggcgtcgaactgcccgacggcaccatgatcgtagctcgtgtcgatggcggcccccggccgtggttctggggggcgccctggctgatggcgctgatgaccgccttcatctgcgtcaccgtgctcggcctttgggcggcgcgcgcgctgactaggccgctgtcctcctttgccgaggccgccgagaatttcagtctcgacggcaccgccgagccgctgcccgagcgcggccccgaggagatccgctcggtggcgcgcgcgctcaaccgcatgcacgagcgcattgcgcggctgatgtcggatcgcacgcggatgctggccgcgatcagccacgatctgcgcacgccgatcacgcggctgcgcctgcgcgccgagttcatcgaggacgagggcaaccgcaagcgcatgctggtcgatctcgatcagatgcgcgcgatgctggaatcggtgctgtcgctgctgcgaaacgaccgcaagatcgaggccgtgacgctggtcgacatcgccagcacgctgcagctcatcgccgaccagttcggcgacatgggccacgtggtgcgttacgaaggcccggcgtcggcgaccgccgccgcgcggcccgacgacctgcatcgcggcatcaccaatctcgtcgagaacgcggcgcgcttcggcgccgaggtgacgatccggctcgccgtctcggacacggcgctcgtcgtcgacgtcgaggacgacggccccggcatttcggatgcgcgcaagcaggagatgctggagccgttcgtgcgcggcgacgacgcgcgcaccatggacgattccaccggcttcgggctcggcctctcgatcgcgcgcgcgatcgcactcgcccatggcggcgagctgtcgctgcatgaccgcaagccgcacgggctcatcgtgcggatgcaattgccgcgatcgcaggcgacccggctggcggcttga

SEQ ID NO: 8204 - DNA, 216 bp, BradyrhizobiumColbertium
atgacaaaagccggtctcgtcactgcacacgccgccgtcatccccagacacaatccctgcgcccaatgcggcacgccgatccccgcacccgattggatcgagccgggcgaggggcgcgtctcctacctctggacctgccacgcctgcaattatcgtttcgaggcggtggcgatcttcggggaggttgccgccgagcatccgccgctggcggcctga

SEQ ID NO: 8205 - DNA, 549 bp, BradyrhizobiumColbertium
atgaaaattttacgcgttgtcgcgctgctcgcggccggattgacgttgccgcaggccgccttcgccggcgaagccgaatatgccgagatggtcgcagcccatgcccgcgccaatggcgtgccggaagcgctggtgcaccgcgtgatcatgcgcgagagccgctaccagccccacctcgtcggccgtggcggcaccatcgggctgatgcagatcaagctcgcgaccgcccgcggcgtcggctacaccggcgatgccgccggcctgcgcgatcccaacaccaacctcacctatgcggtgaagtacctcgccggcgcctatcgcgccgccaatggcgaccacgcccgagccgtgcgttatttcgcgggcggctattactacgctgcaaagcgccagcgtcagcagtccgtgcagctcgccggcatgggcgaaggcaattttggccagccctggctcgagccgaacggcaatccgcagccgatgttcggcacggcgccgcctcgcaagctggctcagcgcgtccgcaacgcgcgggcgcaggttccgcactaa

SEQ ID NO: 8206 - DNA, 1026 bp, BradyrhizobiumColbertium
atgttgcagaccaccaagcgaccggattccccggtatccatcatcggcgcaggcattgcaggcgcatggcaggcgctgctgttcgcgcaggccggccacgccgtcaccttgcacgagcgcggcgacgaggcgatgacggaggccaccagccattgggccggcggcatgctggcgccctattgcgaggccgaggtcgcagaacccatcatcagccgcctgggcttgcgctcgctcgatctatggcggcgcgagctgcccgacacgcccttcaacggctcgctcgtcgtcgctcatccgcgcgagcgcaacgacttcgagcgcttcgcgcgcatgaccgaggaccaccgccggctcgatgccgcgggcctcgccgagctcgagccctcgctggagggccgcttccgcgacgcgctgttcttcccggccgagggccatgtcgagccgcgccgcgtgctgccgaagctgcacgcgcgcatccgcgccgccggcggcaccatcaggttctgcagcgacgtcaccgcaagcgatctcgccaactcggatcccgagggcatcgtgatcgactgccgcggcctcggtgcccgcgacgagcacagcgagcttcgcggcgtcaagggcgagatgatcctgatcgagaccgacgaggtgcagctagcgcgcccggtgcggctgatccatccgcgctggccgctctacgtgatcccgcgcgaggccggccggttcatgctgggcgcgacctcgatcgaggccgaggacaccggcgtcagcgtgcgctcggcgctggagctcctgggcgcggcctacaccgtgcatccggccttcggcgaggcccgcatcgtcgaattcggctcgggcctgcgccccgcttatcccgacaatttgccgcgcatcggcatccgcggcggcaggatcagcgtcaacgggctctaccgccacggcttcctgatcgcgcccgcgctcgccgagctgaccctcgcctatgtcgagcgcggccagatcgacaacgaggtgatgcgatgcgcgtga

SEQ ID NO: 8207 - DNA, 198 bp, BradyrhizobiumColbertium
atgcgcgtgatcgtcaacggcgagcagcgcgaggtgaacgcggccagcgtcgacgcgctgctcaccgagctcgactacgagggcacccatttcgccatcgcgctgaactacgacgtcgtgccgaaaagccgctgggccgaaacgcggctgaaggccggcgacgagatcgagatcatcacgccgcggcagggagggtga

SEQ ID NO: 8208 - DNA, 783 bp, BradyrhizobiumColbertium
atggtgaccttctacggcaagaccttcgcctcgcgcctcctgatcggcagcgcgctctatccctcgcccgcgatcatgcaggacgcgatccgcgcgtccggcgccaacatcgtcacggtgtcgctgcggcgcgaatccgccggcggcaagaccggcgacgccttctggaagctgatccgcgagctcgacgtgtcagtgctgccgaacaccgccggctgccgcaccgtgcgcgaggcggtgaccacggcaaagctcgcgcgcgaattgttcggcacggcctggatcaagctggaggtcatcgccgacaacgacacgctgcagcccgacgtcgtcggcctggtcgaggccgcgaccatcctgaccaaggacggcttcgaggtgttcccctattgcaccgaggatctctcggtcgcgaaccgcctggtcgatgccggctgcagggtggtgatgccatgggccgcgccgatcggcagcgccaagggcatcaccaaccgcgatgccttgaggctgctgcgcgagcggctgcccgacatcacgctggtggtcgacgccggtctcggcgcgccctcccacgccgcgcaggcgctggagctcggctacgatgccgtgctgctcaacaccgcgatcgccaaggccgccgatcccgtcgcgatggcgaccgccttccgcctcggctgcgaggccgggcgcaccgcctacgaggccgggctgatgaacgcccgcgacttcgcctctccttccacccctgtcgttgggaccccgttctggcatgccgtatcctga

SEQ ID NO: 8209 - DNA, 609 bp, BradyrhizobiumColbertium
atgccgtatcctgatcgcttctatcccgtcgtcgacagcctccaatgggtcgaacgcctgaccaggctcggcgtcggcaccatccagctgcgcgcgaaggagctgaacgacgccgccgctctgcagatcgtcaccgacgcgctggcgatcaccaagggcacggagacgaagctcgtcgtcaacgactattggcgcgcggcgatcgtcgccggcgcgcaatatctgcatctcggccaggaggacctcgccgaggccgacctcgcggcgatccgcgaagccggcctcaagctcggcatctccacccatgacgacgccgagctcgccaccgcgctcgaagccaagcccgactacgtcgcgctgggcccgatcttcttcaccacgctcaaatcgatgcgcttcgagccgcagggcattcccaaaatcacggaatggaagaagcgcatcggcgatatcccgctggtcgccatcggcggcatcaagttcgagcacgccgcggagatctttgccgcgggcgcggattcgatcgccgtcgtctcggacgtcatccagaaccccgatccggatgcccgcgtgcggcagtggctcggcgtgaccaaggagacggcatga

SEQ ID NO: 8210 - DNA, 153 bp, BradyrhizobiumColbertium
gtgtgcgtgcgttggagcgacggcgttgaattctcgctccgtcattgcgaggaggccgcgacaaaattgcgtagcaattttgcgctggtgcgacgaagcaatccagactgtctccgcggaggagcctggattgcttcgcttcgctcgcaatga

SEQ ID NO: 8211 - DNA, 1899 bp, BradyrhizobiumColbertium
atgaacatccgctccaaccctgacaagaccgtgccggccgtcaccaccggtcccctgccctcctcccgaaaaatcttcgccacgccggacgccgcgccggacctgcgcgtgccgctgcgggagatcatcctgtccgaaggcgcgggcgaaccaaacctgccggtctacgacacctccggtccctacaccgacccgagcgtgacaatcgacgtcaacgccggcctgccgcgcaatcgcaaggcctgggtgctggagcgcggcggcgtcgaggaatatgagggccgccagatcaagccggaggacaatggcagcgtctccacggacaacgccgcgcgtgccttctcggcctatcacaagccgctgcgcggcctcgacggccacaagatcacccagctcgaattcgcccgcgccggcatcatcaccaaggagatgatctacgtcgccgagcgcgagaacctcggtcgcaagaagcagctcgaacgtgcggaggctgcgcttgccgacggcgagagcttcggcgcctcggtgcccgccttcctcaccccggagttcgtgcgctcggagatcgcgcgcggccgcgccatcatcccctgcaacatcaaccacagcgaactcgagccgatgatcatcggccgcaacttcctgaccaagatcaacgccaatatcggcaactctgcggtgacctcgtcggtcgaggaggaggtcgagaagatggtgtgggcgatccgctggggcgccgacaccgtgatggacctctcgacgggccgcaacatccacaccacgcgtgaatggatcctgcgcaactcgccggtgccgatcggcacggtgccgatctaccaggcgctggagaagtgcaacggcgatccggtcaagctgacctgggagctctacaaggacaccttgatcgagcagtgcgagcagggcgtcgactatttcaccatccatgccggcgtgcgcctgcaatacatccacctcaccgccagccgcgtcaccggcatcgtctcccgcggcggctcgatcatggcgaagtggtgcttggcgcatcacaaggagagtttcctttacacccacttcgacgagatctgcgacctcatgcgcaagtatgacgtctcgttctcgctcggcgacggcctgcgcccgggctcgatcgccgacgccaacgaccgcgcgcagtttgccgagctggagacgctcggcgaactgaccaagatcgcgtgggacaagggctgccaggtcatgatcgaaggccccggccacgtgccgatgcacaagatcaagatcaacatggacaagcagctcaaggaatgcggcgaggcgccgttctacacgcttgggccgctgaccaccgacattgcgccgggctacgaccacatcacctcaggcatcggcgccgccatgatcggctggttcggctgcgccatgctctgctacgtcacgccgaaggagcatctcggcctgcccgaccgcaacgacgtcaagaccggcgtcatcacctacaagatcgccgcccacgccgccgacctcgccaagggccaccccgccgcgcaactgcgcgacgacgccctctcccgcgcgcggttcgaattccgctggaccgaccagttcaacctcggcctcgaccccgagaccgccaagaacttccacgacgagaccctgccgaaggaagcccacaaggtcgcgcatttctgctcgatgtgcggcccgaaattctgctcgatgaagatcacgcaggacgtgcgggactacgcggcgacgctgaacgatccgaacagcgtggggatgtcgatgagcggcacggccgaggacggcatggccaggatgagcgccaagttcaaggagatgggcagcagcgtttatctggatgcggagaaggtgaaggagagtaaccgggtgttgtga

SEQ ID NO: 8212 - DNA, 1332 bp, BradyrhizobiumColbertium
ttggcgaagtacaaaagactaaaagaaatcggaaaaggctcctttggcgtcgtcgatttagtcgaggactccaaaggtcatcggtgggcgatgaagaccttcacaccgcccacattgcccggggtgaccgccgaggaattgagagctcgatttgagcgggaagttcgctaccagcttcaaatcgaccatccaaatgttgtgaacatccacgatttcgatctggatgcaaatccgccgtggttcgttatggagcttgcgagctgcagtctagcagatgagctgaaagcggatcgcacgctgggcggcgaccccagaaaaccattgtttgatattcttgcggggctagaagccattcacgaaaaagggtacaagcatcgtgacctcaagccagcgaatgtcttgaaatttaactcttcgaagaaagatagtcgctacgcgatctcggattttggcttgatgtcccctgaggccggcctgacttcaacgttgacggcgagcaacatgggcggcgggacaccactgtatcgagcgccagaatgcgcacttaatttcaagcgcgccacgattcaatccgacatttactctgtgggcgcgatcttacatgacatcttcggcggtggcgtaaatcggcttccgcacgtggaactaaatgtttctggtagcctgtcacccatcgttcaacgatgcacaaagcagaacgttcgacgacgatacccgaatgtcgccaagcttcgagaggacctttacgaatccctgagcaaggagaaaatatcctttacctccaaagaagaagaggaggttgtcaatctacttcactcgaaagaggaacttacgcccgacgaatgggatcgcgtctttcaacagatcgatgataacgacgaaaagggcaacacaaaccatgcactatttcgctcgctcagcatttctcagctcgagaagctcgcgcaggatgcgccggatctcttcgcctcactcggtaaagactatgcaaaatacgcaaccagcggcggatttgattttgactattgcgatgtaatcgccaatcgggcggaggtcttttatagggagggcgaattcgatctaaaggcgaacattgctcttgcccttctggacttgggcattagccacaatcgatggtttgttgaaagaaccttcgtccgaatggtgggaacgggcatatccgacgatctggcaaagcgaatcgcaactgagatcgacgttcaaggaatagattttagcaacgagatggatcgactcgaacggtcaataggagctcaaagaggaaatcttcatccaattcttcgcgagaaatctgaagcggcagacacatga

SEQ ID NO: 8213 - protein, 129 aa, BradyrhizobiumColbertium
MKTCLVVDDSSIVRKVARRIVEALGFQVIEAEDGVEALVHCKKAMPEAILLDWNMPVMDGFQFLSTLRRMPGGEEPMVVFCTTETGIDHITKAMGGGANEYIMKPFDKDIVMAKFQEVGLIPLGEETAA

SEQ ID NO: 8214 - protein, 126 aa, BradyrhizobiumColbertium
MLVKYFKQTGETWQVNPELRAMIQHRQLNLLHDFSQLGTFDVIFCRNVLIYFDQETKVNIFNRLARQVEPDGFLVLGAAETVVGLTDVFRPIPERRGLYKPNDLRAASAKPALAGAPPRMAAMAGR

SEQ ID NO: 8215 - protein, 105 aa, BradyrhizobiumColbertium
MAEDGKGAERVTFSRGYDVCIMAIDGTWRRDCKLNAISDTDAILTVEGSIQGLNLKEFFLLLSSTGLAYRRCELVRVNGAEMDIQFLRGKNRKKRGAAGGHDAAA

SEQ ID NO: 8216 - protein, 167 aa, BradyrhizobiumColbertium
MPRSSLSPISSNLPDAAERRALQLLVVDDDATQRHLITVAARQAGHEVTVAPSVADAIEKLRAARFDCVTLDLVLEDGDGIDVLREMASAKFAGSVIVISGMDGKRRSGARSFARSVGIELQSLPKPLDLAALRICLANLGKAAMGLPAIHTWGGVATDAIVERHRA

SEQ ID NO: 8217 - protein, 44 aa, BradyrhizobiumColbertium
MAYTSLLVVDIESREVIAAHLPLLIARIETSMRRIAAAQRTRQR

SEQ ID NO: 8218 - protein, 211 aa, BradyrhizobiumColbertium
MAEQSSPGEIFVVDDDPAVRDTLSMVLKAAGYEVICFADGAALLSVARSRTPAAILLDVHIPGKSGLDILKELHGEDYPAPIFMISGQGDIAMAVGAIKSGALDFIEKPFRGSEIVARLDEAIGAYARRQAENASPKFGSLHFPGREPLTRREREVLEQFASGASNKEAGRTLGISPRTIEDHRANIMKKLGARNAADLIRIVMTAAQRAS

SEQ ID NO: 8219 - protein, 1172 aa, BradyrhizobiumColbertium
MRLATTLATRLAVAMILLVAITVAAVGWLGYRNTTQAVIPRVLERVEAQARLLASNLQSYADGVRGDLIGYRAAAAIKGLIRAHAAGGIDPSDGVSEQTWRERIATRLVAEIEAKPIYGQFRIIGIDNGQRELVRVDRSGPNGAARIAPDDELERKGDRAYFQETIRLRPGEIYVSSVDLATRRGGTTTPHVPTLRVAMPLFTDDDRPFGIIVANIDMRPALDHVRSTVRSGGEIYVVNSRGGYLLHPDRTRELGASHDRPTDWRKDFPYFAALAGTLDVSTRLLTDESGRPSGAAIAPALLAGKEWVAIIETIPAPVFGLVPAAIQRTSLLVGVLAVLAAAALAVLLARSLTRPIGRLTAAVQAIGSGRPADIPVDAGGETGVLARAFAQMVEETRAKAAALEREIEEHRRTEAARSHHAARESLFSAAVESSDDAIVMQTLEAVITGWNPAAERLYGYTAEEAIGKPTSIIVPPDRREQGKDYLRRIARGEPIERFETVRLRKDGTPVEISLGLSPIKGPSGEIIGASGSARSLTEARRAERALQHQLEERRQIFETSQDLIMIMDARGHIAQISPSSEAILGYRPEEMTGRSGADFIHPDHLETSRDEMRALRRGERPKLADTRCFHKNGHEVWLSWLGSWSEPAHRFFFVGRDMTEARLAQESLRESERLARNIVETSLDAFVQTDETSSILNWNSRAEQLFGWHRDEVLGKRTIDLIVAESERERVRSGLKRFLENADGGTLNRRHELMCRRRDGKEFKAELSVTALKRREGLLFNVFYRDLTDKIAAEERIRHVEKMEAIGQLTGGVAHDFNNILTVITGTIEILAEAVEKEPQLAAITKMIDEAAARGADLTQHLLAFARKQPLQPREIDINSLIVDTAKLLRPTLGEQVQIESVFEDENCVAIVDPNQLTTAILNLALNARDAMPGGGKLILETGVAYLDEVYASANDMPPGHYVLIAVSDTGTGIPANMLTRVFDPFFTSKGPGKGTGLGLSMVYGFIKQSAGHIKIYSEEGHGTTIKMYLPPGKTPTAAGEGVAPATIEGGHETILVVEDDQLVRDYVLAQLHSLGYVTLQAANAAEALAIVAAGKPFDLLFTDVIMPGKMNGRQLADEVMKTRPDLKVVYTSGYTENAIIHHGRLDTGVLLLAKPYRKSDLARIIRKALQS

SEQ ID NO: 8220 - protein, 57 aa, BradyrhizobiumColbertium
MANILIVDDDPAVEITIRRRLERAGHHLTVAGEPLAAIDGCLEAEEPEDAHVRTGCR

SEQ ID NO: 8221 - protein, 53 aa, BradyrhizobiumColbertium
MTGKKKTPDQLRSARWFAPDDLRSFGHRSRAMQMGYAPEEWKDRPIIAILNTW

SEQ ID NO: 8222 - protein, 519 aa, BradyrhizobiumColbertium
MHFKSRVDDVKRGILMAGGLPLELPALSLSESLLKPTTMLYRNLLAMDAEELLRGHPVDGVVLMGGCDKTTPALLLGATSMNIPAIYLPAGPMLRGNWKGKTLGSGSDGWKYWDERRAGKISDKDWLDIEAGIARSYGTCMTMGTASTMTAIAEAIGMTLPGASSIPAADANHIRMASECGRRIVEMVWEDLTPKTIQTRKAFENAIAVAMAMGCSTNAIIHLIAQARRAGQDIGLDDFEIASRKVPVIANVRPSGDTYLMEDFFYAGGLPALMNQIKPHLHLDCITVTGRTIGENIEGAEVHNADVIRGIDNPIYKEGALAVLKGNLAPDGCVIKPSACAPRFLKHTGPALVFDDYPSMKKAVDDPDLDVTEDHILILRNAGPQGGPGMPEWGMLPIPTKLVKQGVRDMVRISDARMSGTSYGACILHVSPESYIGGPLALVQNGDFITLDVAARTINLDVSEDELAKRRAAWKQPERRFERGYGWMFTRHIKQANDGCDFDFLETDFGAPIGEPSIY

SEQ ID NO: 8223 - protein, 254 aa, BradyrhizobiumColbertium
MLTHRPGTTTRESTPMTKLSEATRNKLKSVSTATVATALFKRGLRIQMIQDVRPLSPDQPTMVGEAFTLRYMPAREDLNTIDVFKDRSHPQRKAVEDCPPGAVLVMDSRKDARAASAGAILVTRLMKRGVAGVVTDGGFRDSAEIARLGFPAFHHRPSAPTNLTLHQAIEINVPIGCGDAPVFPGDVILGDADGVIVIPAHLAEEIADETFEMTAFEDFVTEEVGKGRGIFGLYPATDPKTLTDFAEWRKKNGR

SEQ ID NO: 8224 - protein, 699 aa, BradyrhizobiumColbertium
MTQAKTPSQPPVAPRRPYSFTRHGIAVTDDYAWLKDANWQEVLRNPAVLDPDIRKYLDEENVYTESLLGHTAALQKTLVREMRGRIKEDDSSVPSPDGPFAYFRRFREGGQHELFGRMPRDGGEGQIVLDGDALAKGHKYFKFGGSRHSYDHKLQAWSADTKGSEYFSIRVRDWATGTDLDDLVEETDGGVVWTADCRSFFYVKLDDNHRPMQVWRHRLGTKQADDALVYEEQDAGWFTHLHESTSGRFCVIAGGDHETSEQRLIDLANPEAPPRLVAARQEGVQYSLADRGDELFILTNADDAIDFKIVTAPLASPERKNWRDLIPHRTGLYIIDIDLYAGHLVRLERSHALPAIVIRDLATNEEHEISFEEAAYSLDTMGSYEFETTNLRFAYSSMTTPSEVYDYDMVKRTRVLRKRQEIPSGHDAADYVTTRIMAKSHDGAEVPVSILYRRGLPLEGSAPLLLYGYGSYGMAMPASFNANRLSLVDRGFVYAIAHIRGGADKGWGWYLDGKREKKTNSFDDFAASARALIDAKYTSAKRIIGHGGSAGGMLMGAVANRAGELFAGIVAEVPFVDVLNTMLDDTLPLTPPEWPEWGNPIESEKDFRTILSYSPYDNVAAKEYPAILAMGGLTDPRVTYWEPAKWIARLRATMTGGGPVLLRTNMGAGHGGASGRFDRLDEVAIVYAFALWAVGMAAA

SEQ ID NO: 8225 - protein, 478 aa, BradyrhizobiumColbertium
MLFNSYPFILLFLPIVLAGYFWLGRRGNLAPVIWLALASLAFYAIGSWQFLALLLISIAFNYGVGHLLIVAKLTPVQRKAALILGVAGDLLVLGIFKYAGFAAENINALLGTHLVVHILLPVGISFYTFTQIAFLVDAYRGRVAAYALPHYALFVTYFPHLIAGPILHHKDMIPQFERQESKHPDAHLILCGIIIFAIGLFKKTCLADGIQPLVALAFEARSPSFDQAWLGALAYTFQLYFDFSGYSDMAIGISLMFGIFLPVNFNSPYKATSIVEFWRRWHMTLSQFLRDYLYIPLGGNRRGRVLRYVNLMMTMLLGGLWHGAAWTFVAWGALHGAYLCINHAFNAVVPSIPSPLARPARIAGAALTFLAVVVAWVFFRAESVAGALRILRAMVDPSEVVFGRQEIAALVLISIYAPLVWLAPNTQAVMGYDHGSRKVGEALRAGRMRPLFLYGASLVLAFGILGIQSHSEFIYFRF

SEQ ID NO: 8226 - protein, 367 aa, BradyrhizobiumColbertium
MGAPFTNVRRLLLASIVCVLGAAALTYVVDPLQLLRPSRLTAFYSEDTRVQNAGLIRSQSFDTAFMGTSLAIHFRQSEIDRALGTRSLKLAMTGSNSRQQSFVLEQAIDRGARRVVWEMDDFIFVDAADIEADPYLSVDLYRATVTGIASYLFSAAMAKESLFALLRSVPPLRDPLTRAAPSLPVKFALADVDDIYALPRDFDVARDYNAKKTLAAFTYITDPARSRFLGEGYGYDAMVGHFERDALGLISRHPDVTFDVYFPPYSILQFVAMRDASPETLKIVTDLTAVIAQRLTRLPNVRLHDFRAISQVTHDLDNYSDVIHHSPVVDAKVLKWLRSGEYRVDPKAPLKSLNELKTQIEVYRLEH

SEQ ID NO: 8227 - protein, 395 aa, BradyrhizobiumColbertium
MTVRAGREFLAIPGPTTMPDEVLRAMHRPAIDIYSKEMLDLTESLLGDISKLFATKGKSYIYIANGHGAWEAALSNVLSRGDKVLVLESGRFAIGWGNAAALMGAEVEVLKGDWRRAVRPHEVEDRLRRDKEHAIKAVVVVQVDTASGVQNDIEAIGKAIKASGHPALYMVDTVASLGCMPFKMDEWGIDVAMSGSQKGLMTPPGLGFVAANARALEVHKKANMATPYWSWSEREGTENYRKYAGTAPVHLLFALRRAIDLLHEEGLENAFRRHSLLGEAARRAVAVWSEGQVLGFNVAEASERSNTVTTVTMSNGHDPAVLQRYCKDKCGVVLGTGIGDLSGQAFRIAHMGHVNAPMLLGTLGVIEIGLNALKIPHGKGGLEAAVAYLGEEVAA

SEQ ID NO: 8228 - protein, 241 aa, BradyrhizobiumColbertium
MLRKFLLALSLLALPSLAYAAEIAGTAKVRAGDAVVIGNTRIRLGGIDAPAIDQLCLNTKAERWTCGVAARDELAKHADGKNWVCHTRSIDRRGRTVARCEVGGEDIQKWLVRSGWALAYTRMSRDYEADEKAAREAKVGMWQGAFIAPWDWRVRNKKTTILGATKPPDGAHAVLLASASGPVAPSPDCTIKGNVNSAGECIYHRPTSRWYTQIRMKVSKGTRWFCSVEEAEAAGCRETKR

SEQ ID NO: 8229 - protein, 575 aa, BradyrhizobiumColbertium
MSFHYFAGAACRALTARKDGPSLYDVCDPVLSVTAGGDPHLAQFYKTALGNPALRILLRRAGLPELRDETKLARLREALARARDEAEPDWAAIGQPIADLVDSIALDHPMPPPAPFAADMPQSAQIDGAIRDCAQHLLGSHRRNGFLPTYAAFNLIGDPDFRGRELIMALTGLNARGYKNSSLLFNLARVFIARSPARAVVNPPWKGIAEPMWEPVQIRHRSAYYDAFFIEALLSYVETGLASPADKTAAERAIADMVDFCVNISREEVEGLGGARFNVVTALAPAPHPRFSRYFAQIKQDLGFGIYVPDCDTTACSISAATQAGCTDPIIEQPLLDFYAGYQVRAGVNAPRVTVPLNDNIDYEGGVATWIDNLAGERPYGNDLDPTLNLDILEVSFRNLGRWKVLETPARLATVHRIIGFQKRLAASGAFANPRSHIYYLPELYSAYFGRCYAAFLSLPLAAQAAIDPAGDFDFIRHRVLAYVKGELMAAEMNVFDAALALIALGHLGADPRAFAPALNVIISSLGEGGRRGPFRAYEWNKMKTPTRILVGGPEVTSAFVLMGLAVAKRAMARG

SEQ ID NO: 8230 - protein, 282 aa, BradyrhizobiumColbertium
MNVKQLDLSRRTIAVAAALIGTVSLAIGAHAALNMRAIDAAKAVTTDQITGSIGQSARLALVIGNGHYPDASAPLTQSINDARALSSSLRKNGFDVDMVEDATKDDMVRAVNRLKSRIKRDSVVMLFFGGYGVQAGRESYMLPVDAVIWKERDVRRHGVSIDGVLDMMKEQGAKAKLVVVDASRRNPYERRFRSYSHGLAPISASDNALILTSASPGKVVDDGRGEHSVLVSEFLNNLGQPGSAESVFNKTRLAISRASEGEQVPTVSSSLLEDVRLSEAGG

SEQ ID NO: 8231 - protein, 296 aa, BradyrhizobiumColbertium
MRHLSRAVVRNLCPAALAGLLVVSPYPAAADDDAPKGPAVTVLKVAKSCFSDIVEATGTIIAREETSVRPERPGLKVTDVLAEAGDTTTAGQVLARLALPEGGTLQVTAPVAGVIANSTAQIGNFASAKGEALFTIVARSEYDLVGLVATADVRKLAVNQQATVRIAGAGDISGKVRRIGATVEPNIQQGMVYIGISSQKRLLLNGSGRALIKTGQSCNVAVPLTAVQYSSAGTVVQVIRRNRVETKRIEVGLMSGGNIEVRDGLNEGDVVVARAGALLREGDPVRPVMASAEAAK

SEQ ID NO: 8232 - protein, 41 aa, BradyrhizobiumColbertium
MQHRLTDEPADRTHVSVSCPACTRLHLIERSSGKLLGERRS

SEQ ID NO: 8233 - protein, 58 aa, BradyrhizobiumColbertium
MPRENDLEGKPDMGGKHGGQAGQPKLPPRPQEGERDGDVVAKRHTGQTDRAPSPTRPK

SEQ ID NO: 8234 - protein, 40 aa, BradyrhizobiumColbertium
MFWICWNTAWSLIISGIMVATIVSHPDAEFAEVRAARRLM

SEQ ID NO: 8235 - protein, 324 aa, BradyrhizobiumColbertium
MDRRAFLSSSIFLALASRNVARAAGKVFRIGWLTAQREASLAPFLEVFRTGLRELGYRENENLEVTYCYGDDDLARVAPLAASLVRKPVDLMVVQGAAVAVVSELKLSTPTVYVFSGDPVVAGFASSLARPRANMTGLTFMAAELNAKRLEILRDTVPGLQRVAIVGNPEHPGSQIERAYAEDTAKKLRLATDFFATANQDQLAAAFAAMDSKPPQAISLFADGFAIQYRSRIIEHAMKHRAPVISGWPVFARSGALCTYGPKLSDSYLRLASYVDRVLRGTAPSELPIERPTKFETVVNLKTAKRLGLSLPDSIIASADEVIE

SEQ ID NO: 8236 - protein, 344 aa, BradyrhizobiumColbertium
MFAECDPSIIYGVFDTLWGAGRIWDGVKGGTPDGLFEPRLVGAEPGPITLVTGVSIMPQDIADHVASTDIVFVPNVIVTAKTGTAGLDRRLIAWIRKMHEAGAQMYGSCGGSLVLAEAGLLDGCEATTHWVYEPVFRKHFPEVKLRMDRVLVQNGPGHNLVCGGGASSWQDLALLIVAKYGGTEEAIRISKLFLYQWHREGQLPFASMVQNVDHGDGVITRCQDYIAQNYQRQDLIAALAHHSGLPKRSFDRRFRAATGYSPLAYVQTLRIEEAKQLLETTEAGIEDICREVGYEDVASFRRLFRKQAGVSPKDYRRKFQLPDYVAEARPPASGKPVRARRAAG

SEQ ID NO: 8237 - protein, 348 aa, BradyrhizobiumColbertium
MNLDETKLEQLLGLVVNELGAASNAALVVLGDRLGLFRALAERPMTSGELADRTGTHERYVREWLSAQAASGFVSYDATNDTFSMTPEQKAVFADENSPVAMVGGFSLLPAVYHDEPRLAEAFRTGKGLRWSDHCNCMSCGVDRFFRPGYRAHLIAEWLPALGGVVEKLERGAKVADVGCGHGYSTRLMAEAFPNSDFIGIDYDEASIGCARSETSGVRNLRYEVAKAQDFAGSGFDLVTMFDALHDMGDPVGAARHIRSALKDDGTLMLVEPAAGDSLADNLNPVGRVYYAGSTHICLPTSLSQDVGLGLGAQAGEKRIAQVLRQGGFSQIAKAAGSPFNMILEARP

SEQ ID NO: 8238 - protein, 45 aa, BradyrhizobiumColbertium
MIDIIFHLLLARASLVAGLSRWSWRRLAALGRRRWREFWTVTAGA

SEQ ID NO: 8239 - protein, 357 aa, BradyrhizobiumColbertium
MITASKAFIAFCLLALVGTALVVGPTELRRLLPGGTKTVVAVAPEAKIEPSVEAKIEPKIEPKTELKAEAKPEPRPDPKPELAAAAPPAPAAAPPPAAEPKAGVLAETQKQVAALGDLAPRKPPAAADAGPRFDVARIDDRGEAAVIAGRAAPGARVELLRDGKPLDTVVADASGQFVMTPPQLPAGSYELTLRAKAPDGTVTESGRTMPVTVAEAPPPPARPAMVAKQDTRQAEKPDDKSDIVAALPSASPRLASVPDGQAARPKPIGAPKPKVLARAPAATTVASASSADVLTAASAEAGGNRVIAKGDSLWALSRLAYGDGSRYAVIFKANRDKIQNPNLIYPGQTFVMPPKAE

SEQ ID NO: 8240 - protein, 432 aa, BradyrhizobiumColbertium
MARSAVKSAFMSGRVGLALAGAALVIVAVLLPSRAEAQFGLRGGPLGVARFAVGHMMGLSRLRHSRMGVRGGRHRSAALRSQDPRGAGRGQRSNPYVLRAALTAQAALSGWHGGRRPQGWGRHPDGSYGWVGPVFWPFAHDDLTNAIILGDSTSLSLYGYGDIYAAIFAPYAATELAAYTKSQGRRSRRVPSAEALCEASDSGGLPVDRVASTVQANELQRTALDELASAWTAARDTISNACPSQAPANASERLGLMRERIEAMIKAIDAIEAPLSKFFDLLNDDQKRRLNALANERRAALAAVQRKDSQAAAACKPDYDPRYDEKAQRQYEQLVQQQWPAADIASTLQLDEVARARFEVLQDTTLRTMQKLSACPTEAAATPQARLAAVKARLQTMLQEVGGVSDALDDFQADLSDEQKAGFEAIGPKRGA

SEQ ID NO: 8241 - protein, 347 aa, BradyrhizobiumColbertium
MPMPTHILPTTVVGSYPQPEWLVNRAMLSKVVPRTRLHDMWRLPPEHLEEAQDDATIVAIRDMERAGIDIVTDGEIRRESYSNRFATALDGIDADNPAMIVARTGNTQTPVPRVVGPVRRKGPVELHDMQFLRKNTERAAKITLPGPFTMSQQAKNEFYKDEEELAMALAEAVNAEALDLQKAGADVIQLDEPWVRNNPELAKRYAVKAINRALQGITVPTVVHLCFGYAAVVPGSNKPAGYSFLAELDDTIADQISIEAAQPKLDLGVLKDLSSKKIMLGVLDLADPAIESVDTVADRIRNGLKYVSPERLIPAPDCGMKYMPRATAFGKLKAMCDAAAKVRREVG

SEQ ID NO: 8242 - protein, 289 aa, BradyrhizobiumColbertium
MKVASFTIAGTPSYGIVTDKGVIDAGKRLKAYPTLKTLLAKGSMDELKKLAGEKPDYALEDVALLPTIPDPDKIFCIGVNYATHLAESGHPTPAHPMIFTRFANSQVGHGQPMIRPLESERFDYEGEMAVIIGKGGRRISREAALSHVAGYACYNDGSIRDWQRHTSQFAPGKNFAGTGGFGPWMVTTEELTDITKQTLITRLNGVEVQKAPISDLVFDVPALIAYCSTFTELAPGDVIVTGTTGGVGAYRTPPLWMKGGDVVEVEISGIGILRNPVKDEGSAAATRAA

SEQ ID NO: 8243 - protein, 219 aa, BradyrhizobiumColbertium
MHDLTLTFDNGPDPDVTPRVLDILGGRGIKTTFFVIGEKLADGERRGLAERAHREGHWIGNHTFTHSVPLGEQSGRDTAENEIGRTQDAIGNLAHPQRWFRPFGGGGNLDKRLLKPSVVDYLTREKHSCVLWNSIPRDWDDPEGWTERALGQCSRQPWTLMVLHDLPTGAMDHLERFLDRAAAAGARFRQDFPPPCVPIRNGEIALPIDDYVSSIEESV

SEQ ID NO: 8244 - protein, 273 aa, BradyrhizobiumColbertium
MSARISARISARTLRYLIVIGLIALWELLPRSGLIAELFLPSLSSTLMAGWTDAGEYGHALAVTLYEVVVSMAFACGGGILLGAIVGSLPGPRVLIMPMVSSLYAVPLVILYPVFTVWLGIGSESKIAFASIYGFLPTMLATAAGIQTIDPQLLLAARSMGATLSQRLVRVIIPAAIPTVLSGLRVGGALVIVGVVVSEMLISSAGIGYLISRYRTILDSAHVFAGVLLVLFLAIGFNAIIRWIERKAAIWQTGTRGGQANDEIASGAMQPAT

SEQ ID NO: 8245 - protein, 268 aa, BradyrhizobiumColbertium
MQPLANVTPLKPAARAGAIEVKNVGQVFKTRSQDVVALEDVSLEVKPGRFVVLVGPSGCGKSTLLMMMAGLRQQTAGTITISGAPIPQPDPDRVGVVFQEASLFPWLTAEDNVEFPLALRGVPKAERRAKAQDALKLVGLEGFGRRHPHELSGGMKQRVSIARGLVQDPPVLLMDEPFAALDEQTRMTMGDELLRIWAATGKTVVFVTHSLTEAVYLADEVIVMSARPGRIVDHLQVQLPRPRTYEMLSGDAFGSLRDRIWRHIRKSA

SEQ ID NO: 8246 - protein, 251 aa, BradyrhizobiumColbertium
MQGKLAINLARIAIIVAILALWEMLSRTGIVNPRLLPSASDTFATLGELLQRAAVQKDLMVTATEVLTAFALAVPVGALIGFLVAENRYFADVAKPLLFFAFSIPKSIFLPMFILVFGVGFAQKVGFGFFSTIFIVIMSTTTAVESVKVEHLTVARSYGATPMQTAFRVYLPSMLPVLLEALRISMIFNLTGVILAEMYASRDGIGHQIAIWGENFQMKQLLAGVVMVAAIAMTFNELVRWVETRCSHWRT

SEQ ID NO: 8247 - protein, 320 aa, BradyrhizobiumColbertium
MKINRRHAFMSLVAAAIFAGPANAAETIRVGLPTKTYWPTTIAETAVRQKLFEKEGIKAELTIYRSGAETFEGMAAGAADIILDPPSLVSAGRKKGVMSRIVANAAMGNFGWQLMVPAKSTLQVKDLNGKKVAITAAGSGSDLLALWTIQDKKIDFTRVPVGGGGLVPNLLAGNVDAAVVYSPLSFQISKSGEAKSILDYATAVPPNLTAGWIVLDKFAETKPELVQKAVNALYGAVAFMRANRDVTVKLIAELYEMPPEIAALEYDNTIMKLETSGDMGAANVGAAVQLSLDLAKLGGLKDIVPAAEVISTKFKPVPTK

SEQ ID NO: 8248 - protein, 242 aa, BradyrhizobiumColbertium
MGPLQFDMSGSPGDGPRSLTSALHERLRADILATRLLPGQKLHIAGLAKQFSVSLAAVREALSRLVADGLVQASDQRGFRVSPVSLADLADVTQTRIDIEGLALRRSIERGDDAWLVSVQSTWADLKAVPYHYPDDPTVHYEEWVVRHRIFHRALVNACGSPWLLGFRDVLHEQSERYRRLSIRRELGGKPRDVEAEHEAIVAAVVERDADAAVRALSTHFGITRDFVELAASRIAEVSRTT

SEQ ID NO: 8249 - protein, 45 aa, BradyrhizobiumColbertium
MIAALHPRVNKNRKSIFRRAQVSLGPCRTLAATGTRFVFASRNDL

SEQ ID NO: 8250 - protein, 288 aa, BradyrhizobiumColbertium
MAFALPSRAYDLQMLDRPADRARDHGWVFGLPPGISSEQWPFDPVTGYPLMHGFTLLLPEDYRVHGEDIVAVSFFATAPDHNDGGAPDDPEIRDAVMARPSHPRLSRMADVLNYEYAALLLTQAEYDGAFAAPPAPLALTAAERPRWLDVGGARAYLEAAPPYAKKMFAAPPRSDLGENRAIALTPRANDPNAGKGPQDKHVREKPPTGYQPYYYYVGDRPGRDNFRLHDWAKDHAHNHLGGTMRPCQAVPEMSPFYIEFEEYFGGYNFGGGNAQLDFKEMKFDWACG

SEQ ID NO: 8251 - protein, 815 aa, BradyrhizobiumColbertium
MAGANDKTRSLRGGLFAKYVVSLVGLVVFVLAVNGAMETWISYRATRTQLTDGLEDKAQAAARRIEQSISELDRQISWVTRASQDTLEKRRADYAQLLHQVSVVNQLFQLNGDGREVLRVSRQSTTTGSNADLSRDVRFTDAVARGVSYAPAWFADRTPLMSISVAHSGFNAGVTVAEIDLSFLSDFLSDAQVGKAAFAYVVDPRGRVLATSSKGPEVGKDLSKLPQVAAAIAPGHEPDTSGTDFNGHAVMSAASIVPKLGWSVLFEQPTTQALMPIRDQLVRIALLIGMGLMVAILAGTLLARRMIIPITALRDGAHKLGEGDFSHRIDVHTSDELEDLAGQFNRMADQIQETYSNLESKVEERTRDLAQSIHELKVLEEVGRAVASSLDLNAVLATIAARAIEITRADAVLIYGFDAETRRFNLVEANGIDKSADGAHVTIAQGENILSDAADSGEPIALAELGDAAEQPLREVALAAGFSSVLVVPLIDQQGTLGSLVVLRRAGGAFAPSIIGLMRTFANQAVLAMRNAQLFSEVDHKSHALEAANTTVRAQADKLREQTEQLKDWNKSLEERVRTQLGEIERIRKLERFLAPQVAQLIASSDSPEGLLTSQRREVTVVFCDLRGFTAFTEATEPEEAMNVLREYHAALGQLIFKYEGTLDKYAGDGVMILFNAPIQFEDHTRRAVKMAVEMRDTIGPLTERWRNRGHSLGFGIGIALGYATLGQVGFEQRLEYAAIGSVTNLASRLCGEAKPNQIVVSRRVYGMVEPWVEARALDDLQLKGFNHPVLAMEILSWREEVENVVDATAVRRRG

SEQ ID NO: 8252 - protein, 691 aa, BradyrhizobiumColbertium
MRALKFAGAALAAVIVVIALLLVVGIPSGFLTSTIASRVERATGYRLSIDGTTKISLWPTLNVTLNDLTLASPKDRSGITRLTVDSVQADISLASVWSGRPEISELVVTHPVLYQPLLRERLPNAGGASKPPALDTNGATIDRIKIVDGEVAFSRLRDRVDGRISAINADAIVDRDRKVNISGTARVGEHPTKFDIKAAMPASAAERPTVPVDFAIDMPDVLKSQLTGHAEMRLNGDVVMINGVNGRLGEGVFNGWASVDIASKPLVKVDLDFQRLAMPLAKSPEGTAGQPWSNAPIDVSGLNYVDAQVRISANEAVIGDARIAPLALDAKLAGGVLKAGIANLGAYGGQVSGEVILDATTGAPSFAMHSDLVGVRALPLLQGLAEFDRIDGKLQAKLALRSAGNSQRALMANMQGTAFVNFQDGAIRGINVAQMIRSLTTSTLSGWQGNQDPSPEQSTDLSQLSASFRIDKGQAVTTDLNLIGPLVRVTGAGTIALDTKMMGFRVEPKLVMTTEGQGRTSEPVGFGIPVMIQGSWSQPRIYPDMAGMLDNPDAAYAKLREMGKGLFGPDGAGLGNILGSLGSNLGLGGTAAPGGNAAGSANPQAQQPGQNNLLGGPLGEAIGNLIQQGLSGGAGSSTGSAPGSGRSRSLPAAPSTPAPQASPAAPALEDPPLAQQDSQPMNDVLRQLFNR

SEQ ID NO: 8253 - protein, 224 aa, BradyrhizobiumColbertium
MSKQAEFAVILKMNPMFADLGADELQRLSNLCHTQHLGNGEVLFQKGDPGDALFGVRRGQVRIETGASDGSRLTLNFMGPGDLFGEVAVLDGQNRTADATAGEASELFVLRREDFLSFLEREPKVAIKIIALLCQRIRWQSERMEESMLQPLPVRLARRLCALAADFGSEVHISQEQLGVFVGAARESVNRQLQAWRKEAILDLQRGRILLRNMTKLTAIARNE

SEQ ID NO: 8254 - protein, 1044 aa, BradyrhizobiumColbertium
MALNISAWSIRNPLPSVVFSIILLVLGWVSFTKLAVTRLPSADIPVISVAVSQFGAAPAELESQVTKTVEDAVSGVEGVRHITSSITDGLSVTTIQFALETNTDRALNDVKDAVTRVRSNLPQNVTEPLIQRVDVIGLPIVTYAAISPGKTPEQLSYFVDDVVKRALQGVRGVAQVERIGGVEREILVSLDPDRLQAMGLTAVNVSQSLRGTNVDVAGGRAEIGKNDQAIRTLAGAKTLGDLAGTMIPLFGGGEVRLDDLGTVTDTIADRRTFARFNGEPVVALGIKRSKGASDVKVAEAVQKRIDALKAAYPDVDLKLIDTSVEYTKGNYHAAISTLFEGAILAVVIVLLFLRDLRATIIAAISLPLSIFPAFWAMDLLGFSLNLVSFLAITLSTGILVDDAIVEIENIVRHMNMGKSPYRAALEAADEIGLAVIAISLTIIAIFAPASFMSGIAGQFFKQFGITVSVQVFFSLLAARFVTPVLAAYFLKHHAHEEPPPGPILRSYHRIVAWSVKHYFITVLIGLGVFAASIWSITLLPQGFLPAQDSARSLLALELPPGTQLAYTEKVTEDIVARLRKRPEVKSIFVDGGRVPPGTQEVRRAALIINYTPKDSRDITQRELEFSISQELENVPDIRFWFLDENGLRAISLVVTGVDANIVNNVASELATQMKRIPTISNVISETSLERPELRIQPHADLAARLGVSTESLSQTIRVATIGDVGPALAKFDVGDRLVPIRVQLEDAARGNLKTLEQLRVPLGERGEKGGVPLSVIADVKLDQGPTSINRYDRERQATVAADLVGSAALGDATKKIYDLPVMKTLPKGVKVSPSGDAESLNELSVGFATAITAGLMMVYAVLVLLFGTFLQPITILFSLPLSIGGAIAALLLTGKQLTTPVWIGILMLMGIVTKNAIMLVEFAIEAIKAGKPREEAMIDAGMKRARPIVMTTIAMAAGMIPSALAFGAGGEFRSPMALAVIGGLIFSTILSLVFVPAMFMVMDDFGALIWRFSKRLIVHSEDAETDGHHETAPAPKNVAHRAAE

SEQ ID NO: 8255 - protein, 309 aa, BradyrhizobiumColbertium
MNLTQYLKPAGTVVFVLAIGVGYYLFERRHRPEPKETPSEALVIVTKSTNACFSDLVRVTGFFVPRREAVVVADQEGSRVTDLLVTEGAVVADNQELARLTAPPQIPGQPQRPGPQGPISLKAPAPGLVTEVRTIVGAPASPQAGPMFRIAVNNEIELEAQVPAVHMSKLSAGATVRISRDDAPDLIGRVRLVAPEIDRATQLGRVRISVANNPSLKVGVFARASIDAKRSCGVSIPKTAIDHLTVQVVKGNIVETRKVRVGLSSDSATEILEGLEVGEIVVADAGSSLHDGDQIKTMFADELDRTRVR

SEQ ID NO: 8256 - protein, 223 aa, BradyrhizobiumColbertium
MKSAAKGLTAILSIITVGAALLLPTSATYAGDESNSKNVTEDEIVRALAPPAKKPLTRGLSIAPPTEAAPNAAETKLLQSVRGRSTRSLSSTEREEIASVAKDKPNIDLEITFDYNSANISAKSLPSVQALGRALTSPDLKGSTFVVAGHTDAAGGEAYNQDLSERRADSIKRYLVEKYNISATDLVTVGYGKSKLKNPAQPLAEANRRVQVVNMENKTTASK

SEQ ID NO: 8257 - protein, 511 aa, BradyrhizobiumColbertium
MKIRFFFLLSLLISLVPTAPSLAAGERFALVIGNAKYPDADAPLKEPINDARDIADELKRDGFSVEIGENLTGDGMRRAFDKLYGKIKPGSVALVFFSGFGIQSARQSYLLPVDAQIWTESDVRRDGFSLETVLGELNTRGAGVKIALIDASRRNPFERRFRSFSAGLTPVIAPNGTLVMYSAALASVVSDGGGDRSLFVQELLKEIRVPDLMAEETLNRTKMGVTRASRGEQVPWISSSLAEDFSFMPGTAGSRPTTTPPPAPPAAPAVVANNPPPAPPTPPPPPKPADTAAAPAPPAPPAPAPAPAPKPQIEAALPPPPPPPPVKPIDPGPAPSTETGPSAAVLADDPTIKGLTAKIAANPDDVNALYRRGQVYASKGAYNLAIKDFDDTLRINSKDVEALNNRCWTRTVVGDLQGALKDCNEALRLRPNFVDALDSRGLVNLKSGAVKNAIADFDAALKINPRLTSSLYGRGLAKQRNGSAQEGALDIANAKAMDPNIVQEFASYGVR

SEQ ID NO: 8258 - protein, 294 aa, BradyrhizobiumColbertium
MFDLCGGQWLGALDRPARSNPEKAKTMGNAYEIYALRYATMSPRTPSMNFLLPDPHDSAAQDLDYFVWLIRGGGREILVDTGFNAEEASARARKLTLNPVDALERFGVAATSIRDVIVTHLHYDHAGNLDRFPNARFHLQEREMAYATGRCMCNGLLRHPFSVEHVTLMVRHVYGERVTFYSGDGEVAPGVTVHRVGGHSDGLQVVKVETARGPVVLASDAAHYFANLQRRSPFPIVYNVGDMAMGWETIERLAGHPDRFIPGHDPIVTEIYPSASDKVEAWALHLPPTRSFAK

SEQ ID NO: 8259 - protein, 180 aa, BradyrhizobiumColbertium
MARTSSDIALKAREAVETSARSKPRLDLFKFVPFRLNRLAAEVSSALAEEYQERHGLDIPAWRVIATLGFRNDACSAQFISQCTRTHKSTISRAVTALLHQELIERAENEADRREFRLQLTRKGRALYEELFPQLLRREDEILACLSAQERKQLSSLLGKIEQSLDLIQTSKEADAKQAY

SEQ ID NO: 8260 - protein, 190 aa, BradyrhizobiumColbertium
MRIQAIGALRRFDRQQSGIVALFECRHLVAPAQVDIWQIADAIDQIGLCVILLEIDEGRPLVAILRQQIELIELRLAVEDATDAPHHALLDHAVADAEPVPIFQRAFREADRARAFADAIGIVEKHDALAALGEIDRQRQADRARTDDHDRMRRRALGRTILIGMTSIAELGFGLRHALTSALVRGGLIC

SEQ ID NO: 8261 - protein, 301 aa, BradyrhizobiumColbertium
MHRQPDDVWRIDLQLNRYADPVVERKPENVRPRIARMLGHDKFEFEWISLYKFQCRRMDRFIHGRVIFAGDSAHQVSPFGARGANSGLEDAENLSWKLDRVLRGKSPASLLESYHIERSMAADENIRESTRSTDFMAPNSHQEARLRKAVLSLAKETEFGKRMVNGGRLSVPCSYDSPLSSRDADAWSGGPPPGCSMLDAPVAAREGEQTYLTDVFRQGGTHFALLSFGNGAPIELPDGVKDIRVGGEAGLADPAGLAAKRYDAQPATAYLLRPDGYVAARFRHPTGAMIAAALSRAQGLN

SEQ ID NO: 8262 - protein, 74 aa, BradyrhizobiumColbertium
MALSTSSNFVRPDDAFRAIVEAHRGLTEEQSADFDAALVLILANHIGDIDVLREAIGLARRRMIDGQQQQQQQQ

SEQ ID NO: 8263 - protein, 318 aa, BradyrhizobiumColbertium
MAKNFASTGDLSEKKITFSEIGTDLYAFTAEGDPNTAVIVGDDGCLVFDAQATPAMANKVIERVRAVTDKPIKYVVLSHYHAVRVLGASAYKAQGIVASQETYRLIEERGKQDWDSEYGRFPRLFQDAQSIPGLTWPTLTFEGEMTIYLGKREVRLMQLGAGHTSGDIVAWVPDAEVMFSGDLIEYHSACYCGDAHLREWPMTLNEIRNFNPKAIAPGRGDALKGVSTVREAIAMTRDFVTSLYGAAEISVAKGRTLKESMAATREVMDPKFSSFAIYEHCLPFNVSRAYDEASGIDDPVIWTDKRDQEMWAALQGGG

SEQ ID NO: 8264 - protein, 218 aa, BradyrhizobiumColbertium
MAGLTLHPIVGALPPGTPAISGDLLAVIVSVVAFLVSGVFMLALVPDQRESAADPVIVPEANEPDPIPAPITADSVTPVSGSVAELTVADAPTQATSDAPIYEATLPVEKYRGSQTINTADIFSVHANAHYTYVFNGREDIFCPLSIGEIIARLPPDIFFRVHRSYIVNIQRVARLKRAGDNGIADLDSPVRRSVPVSRSRLPQLREQLTEYLRTRDN

SEQ ID NO: 8265 - protein, 288 aa, BradyrhizobiumColbertium
MIPGSFDYHRPKSVADAVALLVKLGEDARPLAGGHSLIPMMKTRLATPEHLVDLRAIGDLKGIREEGGDIVIGAMTTQHTLIGSDLLAAKLPIIRETSLLIADPQIRYMGTIGGNAANGDPGNDMPALMQCLGASYELTGPNGVRRVAAREFYQAAYFTALETGEILTAIRIPVPPVGHGYAYEKLKRKIGDYATAAAAVVLTMSGGKCTSASIGLTNVADTPLWAEEAANALVGTALDKAALDKAVALAEAITSPAADGRGPAEYRTKMAGVMLRRAAERAKSRAKN

SEQ ID NO: 8266 - protein, 166 aa, BradyrhizobiumColbertium
MAKAHIELTINGQPVEALVEPRTLLIHFIREQQNLTGAHIGCDTSHCGACTVDLDGMSVKSCTTFAIQANGSSITTVEGMAAADGTLSALQEGFRMMHGLQCGYCTPGMIMRSHRLLQENPNPTEEEIRFGIAGNLCRCTGYQNIVKAIQYAAAKINGVPFQEAAE

SEQ ID NO: 8267 - protein, 246 aa, BradyrhizobiumColbertium
MPVARAFRWSNLASLAASAALALGGCVQTTGPVAVMQPRPDLDSMAYGQPYNAPQPVVVANNGGGAIAALSNSFAASPAPMPVGYSAPMTVRQGASYHLDAGDKLRVVVYGQEGLTNSYAIDAGGSITMPLIGAVPARGRTTAGLAGEIAARLRNGYIREPSVAVEIETYRPFFILGEVLAPGQYPYVPNMTVESAVAIAGGFSPRAKRDMVTVTHSENGASMRAVVPLGTPLAPGDTVFVGERWF

SEQ ID NO: 8268 - protein, 223 aa, BradyrhizobiumColbertium
MGQDIKLTASDNFQLGAYRADPAGSAKGAVVVIQEIFGVNHHIRSVCDRLAKEGYVAIAPSIFDRTSPNFQSGYSPDEIAEARKFVANPDWAAMLRDTQAAIDAARSVGPVGIIGFCLGGSIAFLAATRLSGLKAAIGYYGGAVVRFADETPKAPTQLHFGEKDAGIPLTDVETIKSKRPDVEVFVYPGAQHGFHCDERASYDKASADVAWPRSMAFFAKHLR

SEQ ID NO: 8269 - protein, 87 aa, BradyrhizobiumColbertium
MPPRQPFVTTLSNNTPLAFGMDAGETARALGQPLQYVRGRPGNEIYLALRNIGGSGLLPHRHRLFLQFRHGRLAGWKEDYGENWMWE

SEQ ID NO: 8270 - protein, 50 aa, BradyrhizobiumColbertium
MPKASGVLFDKVVTKGWRGGMAPNGSACADIDSNVAPAASIARFIANALA

SEQ ID NO: 8271 - protein, 254 aa, BradyrhizobiumColbertium
MPRIDRDGVGIHYEVHGEGPPLLLTHGYSSTSAMWHEQIEALAKDHRLILWDMRGHGQSDYPDDPGAYSEALTVGDMAAILDAVGAERAIIGGLSLGGYMSLAFYRAHPERTRALLIIDTGPGFKKDDARETWNARALATADRLDREGLDVLKAATRERATASHRDAKGLALAARGMLTQRDARVIELLPDIKVPSLIVVGADDTPFLAASDYMAAKIPGAQKVVIPAAGHAVNIDQPQAFVDAVVPFLKNLPA

SEQ ID NO: 8272 - protein, 97 aa, BradyrhizobiumColbertium
MDSDAVPIDPRHCFRPSFLAATPLDLLPQGEKGRARGGGCTLTRQVTSKKLPRYDGTHVRQRSLLRPVAASSPALAMHNLSAPRCFRLVPICICLRA

SEQ ID NO: 8273 - protein, 151 aa, BradyrhizobiumColbertium
MDAANDTPLLWAIREQLQMTGTKFGCGAGLCGACTVHVNGEAVRSCQTMVGDVAGKKITTIEGLSAKGDHPLQKAWIAEQVPQCGYCQSGQIMQAASLLARNPNPTKEEVVAHMDGNLCRCMTYSRIQKAIMRAASEMRTASATSGERRPT

SEQ ID NO: 8274 - protein, 761 aa, BradyrhizobiumColbertium
MNEHVKNVVPATTDLSRRSFLVGTAATALVLGYAALPGIDAAAAAAPASFEPSVWYAISPDGLVTVTCGKADMGQHIASTMAQLVCEELGAKWSDMRVSLASNDPKFNDPVLGAQITGGSWSTMMNFDAMSRAGAAGRMALTEGAAAAMGVPASELVVRDSMIVHPKSKKQMSFAEIVKSGKATKTFTPDELKAIKLKTPDQYTMIGVSVPQLDIPSKTNGTAKYGIDVMLPGMAYGALVTPPVRFGATVKSVDDSAAKKVPGFIKAVTLDDKTGTTSGWVVAVASTYANARKAAQALKIAYDAGPNAKVSSQSLLDEAKRLQKLEDSGQFFVKDGDPNAAFGSAAKVVEAEYTTSINIHAPLEPMNATAEFRGDILHVYSGNQFATRSGAIAAGAAGIDPKFVVMHQHWLGGGFGRRLDADMMIPAVQAANAVGKPVKVIYSRENDMTMDFSRPLTYQKVKAGVDGDGKLIAISHDVVSAWPTARWGIPDFLTPSVDKKGPLDSFTVNGADFFYTVPNHYVRAIKNELAHNATPSGQLRSVAPGWTFWAVESMIDEIAAATGKDPAQFRISLLDGAGKNDGGAQRLRNTLLAAMGLSGYGTRQLPKGEGMGVACVSSQERASASWTACVAHVAVAPSGAVTVKKLTVATDVGTQVHPDNIRAQVEGAALWGLSLAMYEKATLKDGGIEQTNFDGYTPLRMSQTPEIAVAVIANGEKATGVGEPAVTVVAPAIGNAIFNASGARTRALPITAEAVKASMRA

SEQ ID NO: 8275 - protein, 364 aa, BradyrhizobiumColbertium
MNAAAKPAAKRRLLLASDRSDGSSELASILTAVGDVSTVKTEDIPAQPARDLSGLVVDINLRSPDSVQRVRNKLRGDAYRSMPRLFVLADALHHGTMQAWALGATDTISRPLQAEAILQRIRAAFPDTAAYDATDRGKTLNRGVEAAHAVLTKMFEKLPLGVPLTFDDVIAAESKILKAIKHSSLREWLTTVGCHHVGSYRHCLFVTGFAVAFAQHLGMREDDQRRLTRAALLHDVGKAFVPAWLLDKPGKLTDEEMAEVRQHPRRGYEALAEQGGFPPEMLDVVLHHHEFLDGSGYPNGLSSNQISDIVRLTTIVDIYAALVEKRAYRMPFTHSRAFTMMEGMGGKLDQQLLQAFRPVALGSF

SEQ ID NO: 8276 - protein, 526 aa, BradyrhizobiumColbertium
MPVQQTAAGIVSPFDGLDVPWLLKLRAEVRRDHPFLIWAPFDAPARRWSYGEFHERVGALAAGLARRGVNPGQYVLIHLDNCIEAMLAWFACVELGAIAVTTNTRSAPAEIEYFADHCGAVAAITQPSYADLVAQNCRNIRWMAVIAHDAGAAPAQAVSRGDSFESLFADSADRPRRATDPLAPCSVQYTSGTTSRPKAVLWTHANALWGAKINAAHEDLHASDVHQTYLPLFHTNALAYSMLATLWVGATCVIQPRFSASRFWSVAREHGATWTSTIPFCMKALLEQEIPNDHKFRLWGTAINEPPAFAAFGIKMIGWWGMTETITHGIVGEIDQPNIPMSIGRAAPEYQIRITDDDGRPTEVGGTGNLAIKGIPGLSLFAEYLHNEKATRESFDEHGFFLTGDRVERLQNGFIKFGDRAKDMLKVGGENVAASEIEQVIAVVPGVREAAVVAKTHPMLDEVPVVFIIPQGGVAGAAPDLHDRVMAACRAGLADFKVPREIRLVDDMPRSTLEKVAKAELRKMLG

SEQ ID NO: 8277 - protein, 136 aa, BradyrhizobiumColbertium
MPIKVHALDHLVINVSDVAVTAEWYRKILGMEVKLFDPGGGKAPRTFLEFGNQRINVRQRDADKVDWFTAGHPTAGSEDLCFLTSATPDEVVAHLQAHGVAIEAGPGPRQGARGTLRSVYCRDPDGSLIEISSYEG

SEQ ID NO: 8278 - protein, 324 aa, BradyrhizobiumColbertium
MITRRTALGLLAASPLAATPLSKALAADYPARPVKWVVGYPPGGATDILARLIGQRLSERLGQQFVVENKPGAGNNIATESVINAEPDGYTLQLVNPANYINASLYKNLKFNFVQDMAPVASFQRVPNVMTVNKDVPAKTVAEFIEYVKANPGKVNMASSGNGTSVHLSGEMFMAMTGCKMQHVPYRGAAPALTDMLAGQVQVIFDNMPSVIQHVRSGALRAIGVTTTERSPQLPDVQPIADTVKGYEASALFGMGAPKNTPKEIIAKLNAEVNAVIKEPDMAKRLVELGGEPRAQTPEAFGAEIKAETEKWRKVVEFAGLKVE

SEQ ID NO: 8279 - protein, 89 aa, BradyrhizobiumColbertium
MRKAMLAMIALAGLGVGSLAGTDPAAAYDYPWCAQGRGYGYPGECAYRTLQQCQASVSGRLLTCGINPRAAYNQQRPVRRHRHDYYAPY

SEQ ID NO: 8280 - protein, 92 aa, BradyrhizobiumColbertium
MSRIQCALAALAAICLPAFAGLTPTAARDYPWCAQGGEYDYPGECAYSTYEQCQASVSGRLLFCGRNPRFAYGLNRPPQPRPHRHVRAVAPY

SEQ ID NO: 8281 - protein, 407 aa, BradyrhizobiumColbertium
MVAFVLQVSVSAANAAGPFGTVNVGNWIGGAFSNDETGAFSHCAATAPYANGVSLVVAQNAAGSWLLSFASPSFRFNKGDTAPIDFIFDGQEQARLFATSNAPNMVTTILPPSVARTFQKASLMVVTTNGSKPLQFVLTSTAPLVAALANCVTRVKADGLNKAGDFAKGSAKPAATADKAASPPASKSGKSRSGTGFVVSGNGHVVTNHHVIDGCSDLKGNLTGEAAVALRVVSIDAINDLALLQAPSTATFRDFARIRDRSIRSGDSVVAIGFPYRGLLSSDFTVTTGIVSSLSGMRNDSRFLQISAPVQPGNSGGPLFDTTGQIVGVVTGKLDNLRIAVATGNIPENINFAIKTGALRDFLDNSVVPYQTAEPKGELKTTEIAANARAYTMLISCNGTGQADAKR

SEQ ID NO: 8282 - protein, 205 aa, BradyrhizobiumColbertium
MRDLDKALSDIVAIRSQIAAGTAFRGYGPATMAATGAVALITAVLQFWLLDDPTGEPLGFFLGWFVAAALSALMIGIEMRARSRRHHSGLADAMIHQAVEQFLPAGVAGVLLAVVTWKFASETLWLLPGLWQILVSLGIFASIRSLPRTVALAGAWYFLSGFAVVVLASQTHTLSPWTMGLPFVIGQAVMAAILHVASGDDDAED

SEQ ID NO: 8283 - protein, 124 aa, BradyrhizobiumColbertium
MPKTDSAPFSYEGLDRVIHEKARLGLLTSLMAHPKGLAFGDLKQLCGLTDGNLSRHLAVLQEAGLVEVTKGYEGNRPHTTCRLTKAGRRRFLDYLAVLERLVRDAAKAAGREAPPLGRLGIAST

SEQ ID NO: 8284 - protein, 246 aa, BradyrhizobiumColbertium
MQSETTSRHEKLHVGIIMDGNGRWATRRGLSRVRGHEAGVETIRRIVEAAPKQGIGALTLYAFSTDNWRRPKAEVAALMTLLRFYLANEVQSLVKNGVRLTVIGRRDRLPEGIATAITRAEEATADGGTLHLRIAVDYSARDAILNAAAKAAALTSLTREAFSQLVTGEAGLRDVDLIIRTSGEKRLSDFLLWEGAYAELHFTERMWPEFDAGDLAEALAAFHGRERRFGGLRAIVPEEVPSLSRV

SEQ ID NO: 8285 - protein, 275 aa, BradyrhizobiumColbertium
MRCLVVADLHYSLPQLDWLVSAAPQFDLVIFAGDALDIGSIVDFRAQILVVKKYLALLAATTRVILCSGNHDLDGRNAEGEKVSRWISEMRELGIACDGDSFSIGDTSFTVCPWWDGPLVKQRLVEQLRDAAAGRKQRWIWAHHAPPAGSPTSWGGKRFFGDVELVQWIKQYQPSMVISGHVHQSPFIGDGSWFDRLGQTWVFNTGLQPGRPPTYIVLDLDADKAFWLAAGEAQWIDLNAPLQRPAAAIEAPPAWLTFLDRIADPSLARPQAAAG

SEQ ID NO: 8286 - protein, 298 aa, BradyrhizobiumColbertium
MENRPRAIENVREFQTTQSKKQTNTTARFLIPPRDSMLGRVAQARLRQCEGWTGSPNSDVLAYPQPLVPPMTPFKTIRARAEKRKGGPKALEKLLPAKPDLKRLARLGDDRILAEMTKRVFCAGFAWSVIDSRWDGFEDAFLHFQPATLTFQPEDYWEGLLADARIVRNGAKIMSVRDNAAFVQDIAKEHGSFGKFLAKWPSSDEIGLLDLLTRRGSRLGGNTGQMLLRFVGWDGFVTSKDVVACLRNAGLDIAEEVKSKGDLAKVQAQFNAWAEETGLPYTYLSRICALSVGEVKGK

SEQ ID NO: 8287 - protein, 97 aa, BradyrhizobiumColbertium
MAKAYWVATYRAIKDPESMAAYAKLSRPAIEAAGGRVLARGMPAAAFELGQMERVVLIEFDSVESAKAAYASPAYQKAHDLLGDGADRDIRVVEAAE

SEQ ID NO: 8288 - protein, 97 aa, BradyrhizobiumColbertium
MKLTSEQVKQTVNQLGAQVLPDEHPAMPQLNSMFGEHTFFVDEMGLKVLEPTGSPDTERHSGEVVSLADWGDSDLTRLMAHEPEPTGVIVVFEHVRH

SEQ ID NO: 8289 - protein, 466 aa, BradyrhizobiumColbertium
MIRLGLRFEDRIEERRFVDQYVRGSLGWTQIAMLLGAATYAGYTLWDWVLYPEVVPTTLAIRGGTALFVLLPLTALLSRRWMKPWAETIFLVYCVIPGCILPSIYLVLPSGFTFAAPGMMMIILFVSTMLPLRIGSLAIFCLLSWVALLVAESFALTMPAGLRFINHTLVGNAYALSLYAVAAREYRARKQFQTSEALQREKERSEKSLRDLRATQEQLVQTEKLASLGQLVAGVAHEVSTPLGLALTTSTTMQTDLQTMADALGGASVRRSDLTKGIDRLRQGLDLTFENLHRASEMVHSFRQVAVHQADEDRREFELKDWLSELMSRLGPLLSHNGLAVEVQCPAGIRLNSYPGALAQVISNLALNTAGHAYPGKRGGRFILTVSQPDPKSVRLVCSDDGVGIPDELQARIFDPFVTTSRDSGHSGLGLHIAFNLVASSLNGRLRLERTKHPGTRIAIEIPLQA

SEQ ID NO: 8290 - protein, 248 aa, BradyrhizobiumColbertium
MEAVVVLFTIVAIVGLATAAATAARGGRTKPAERSNGRSLTALCGLVAQGTQRVLALLQACSGSSADTCRDPAMIDWSSILIPQNSIAEVVLRGTLIYFLLFFILRLFLNRQSGAVGIPDLLVVVLIVEATTDALGRNESVTEAAILISTVMFWSYGLQWLAYHVPALEILTTSPKVKLVERGRMLRRNMRKELVTEDELKSLLRTQGVEDLNMVKLACLESSGDISVITYDKAEPASGRSSKAKELA

SEQ ID NO: 8291 - protein, 366 aa, BradyrhizobiumColbertium
MSESDRVTGKASRVRKIIHIDMDAFYASVEQRDNPELRGKPVAVGGSAQRGVVAAASYEARRFGVRSAMPSVTAKRQCPDLIFVKPRFEVYKAISRQIRDIFAEHTPLIEPLSLDEAYLDVTENLQGIPLARDIALRIREKIKAETGLNASAGISYNKFLAKLASDHRKPNGQFVISPEMGPAFVETLPVGKFHGIGPATAAKMNALGMFTGLDMRNQTLEFMNATFGKSGAYYYWISRGVDERPVRANRIRKSIGAENTFSVDLAELDALVGELRPLVDKVWRHCEATGNRGRTVTLKIKFADFEIITRSRSVAAAVAGRDELERLACGLLEAEMPLPKRVRLLGVSLSSLKAGDAPEPQLTLGI

SEQ ID NO: 8292 - protein, 143 aa, BradyrhizobiumColbertium
MVFVAGVVGIGWLIGATNLPGEWYAGLAKPGFVPPNWVFPITWTILYVLIAIAGWRTFRREPRGKAMLAWAAQMALNFVWSPVMFTMHQIGAALVILICLLVAIVTYISLELSRDRLAAALFVPYAAWVAFAGVLNAAILRLN

SEQ ID NO: 8293 - protein, 69 aa, BradyrhizobiumColbertium
MQYSSELIHTMRQALETVMASVPAHQSVFGLKAAVAEYILHAAAHGQTSYDGLVTAASDQLHVIIAMLT

SEQ ID NO: 8294 - protein, 423 aa, BradyrhizobiumColbertium
MPKLTKRVVDAAHTTGKDLVIWDNELRGFGLRVKKSGAKSFLVQYRNANNRSRRLTLGRYGVLTPEEARRDAKLALADVVRGADPVESKKLARGAMTVEELCREYLDKAERGLILTRRGEVKSKTTLYSDKGRIERHIIKLVGKKTVKGFTSTDAKGLQRDIIAGKSAADVKTKTRGRAIVTGGRGTAARTMGLLGGIFSYAVDEGYRPDNPVSGIRRPKDQTREWRLDDAGYRRLGKCLATAEANGEHWQRVLASRTSAMTGCRLDEVEGLLKTEVDTVGMALRLGDSKTGKSIRPVGPAVIAVLKVAMSKSKSKYVFPAITTDAKHHTGLTRWLQKVSAKDVPGITSHGLRHSFSSTAEDLGYTLPTIKALIGHSKKGNVTMGYIHKIDSALLAAADRIARHIDDAMNGKKQSKVVQLRKA

SEQ ID NO: 8295 - protein, 50 aa, BradyrhizobiumColbertium
MLSVGEAAWSAAHQAFASDENPLEGVAADPEVRRIIGSQLTQVEPIANAL

SEQ ID NO: 8296 - protein, 63 aa, BradyrhizobiumColbertium
MTDTYNVPCSPKTLAKLACISSEGPPFRLAGRFPLYPVSGLDAWAQRKIGPLVRSTSEVRRVA

SEQ ID NO: 8297 - protein, 63 aa, BradyrhizobiumColbertium
MKKHSKRIRQSQSVSDLPLFSWRVTVLQPSSQAGLFVARRYRVHPAFADLIANLAGLGSEVRQ

SEQ ID NO: 8298 - protein, 103 aa, BradyrhizobiumColbertium
MSYPDSPGFKAVGPSSEAAQKLTQRATTVRERVLQFLRSQHPASFTPDQIADRLNINFLTVRPRISELHLQGEVEPDGTRGKNTSGMSAQCWRAAKISAGEPR

SEQ ID NO: 8299 - protein, 39 aa, BradyrhizobiumColbertium
MITQQIKAARSLLGWEQFELALQSRIRKIPAFGLKTDVA

SEQ ID NO: 8300 - protein, 132 aa, BradyrhizobiumColbertium
MKRSTVTTVLAIAAWGVISLIGYATLTKVQFIYTVYGKIKPFLFGVDMATWAHLEHAIAFLTLGCLFAATYPRRTALVCLIVVGSALTFEVLQTLTPDRHGTLFDAFEKVVAGCAGIAAVKVVQFIRARKRA

SEQ ID NO: 8301 - protein, 105 aa, BradyrhizobiumColbertium
MSRLADAAIVAIAIASFRSMFRWVRGYDGLGFGDVKFLAAATLWIGLRSLPVVLLVAVVSALASAFLLASQRYEVDGRHAIPFGPHLAVGLWLAWVFDPMGLLSG

SEQ ID NO: 8302 - protein, 49 aa, BradyrhizobiumColbertium
MTSSDNPVGAWVALNEQWSGWRLSEIKPNEIVLEADGERQTLHLSVLAK

SEQ ID NO: 8303 - protein, 39 aa, BradyrhizobiumColbertium
MARSPFMKTPRSATLESSIILFGGGDAPNIAGAAAIAGA

SEQ ID NO: 8304 - protein, 199 aa, BradyrhizobiumColbertium
MTGELLRRRLIFYGLNGAIVLAVCFAIFEPIVSHFGLRNDEILDSAAQLAQVRRVAHDTFRLAKASTPEADPYLAGAEERIASADLQANLQALAGAKGLAVQAVRGLPGRQAAQWRAVPVGLEVEGTAAAVRELVAAIETQTPFLFITDLSLRTLADGDDSRMRVSLTVEGALRTPKPSPGGPLLSEIRPGGEGKATSR

SEQ ID NO: 8305 - protein, 216 aa, BradyrhizobiumColbertium
MRNRSLCSVASGIIAPSKVAPVKRRESSRTRTSRAASEDNPDRATAPPEIRSSVRKVWSGMTRDSSSHVARLPGRALRASRGTGDPAACCPCWTPRRASWSSSSSAAARLDCHHSNPSKPAVVATSRAAARTRIVWITHGGSSCRISRSGTTATGTSVADLIPMESTSPTCKPNRTILASARSFGIIQWRKVASPLLGWPSGVTPCHISAGWNGVR

SEQ ID NO: 8306 - protein, 189 aa, BradyrhizobiumColbertium
MIELLVSLAILMILTSFTVGGLSAAVRAFEADSRNGLEMATTAAGENLRGLIASAINLPQAGNISFDGQREELRLVILSEGRALRGGLQDVRIRRRNDELIVEVFGSPRENGDHKLPVSSTTIVRGLSDIRFRYFGNAATKSEAAWRNDWIKLGGLPALVEISLNFKDAARNGPAMVVALRNEGPSGGS

SEQ ID NO: 8307 - protein, 52 aa, BradyrhizobiumColbertium
MTPVQLGKAAVQDRAAPLGAMLVPSWVEIVVQDEAGLETKVAVLKLAPGTAQ

SEQ ID NO: 8308 - protein, 127 aa, BradyrhizobiumColbertium
MLSIMALVSAAVLVARPRTAAARVSAEARAIAANLQLVRSRARAGNDEIIVSVDTRNRRIGVARAMRQLPTGMEVSLTVATSERHGAVGGVRFYPDGRSSGGEIVLTYHGRSERIVVNWFTGTARIE

SEQ ID NO: 8309 - protein, 399 aa, BradyrhizobiumColbertium
MTSGTIVAEELDAAVEALYGSGLTPIETVLSSDSASASRPIGRNAPGLRWQSSQHLGLKELSAFTTELAALVNSGVSLDASFRVLAGAGASPRRLALATGLLKDILAGQQLSEAMSRRPDAFPPDYIAILAGGEAGGQTAQALTLLGEMLARRVDIRNKIRGALVYPAILLAMSAVSIVVIVFVLIPNLTPIFSDAGLPLPGVLAALADLPDHWPRYLFWFSFGTIVCWLAYRRIAGHELTMRKLDRLICRLPVMGPIVQRREAGQFARSAGTLLEAGVPLMTALQTARSLVTNRYLSARYSEVITRVPEGRALSQVLEGMELLPPAMIRLIAVGEETGQLAKMLVRIASSLEGEVQSRIEQLVGLLTPLLTVGIGGLVGALILQVMSAVLSINNLAYQ

SEQ ID NO: 8310 - protein, 593 aa, BradyrhizobiumColbertium
MSADAETLMREEPPTTGGAKVLSPRQAGFVDAFSALLLREGLVDAAAVTRAKRASEATFERLDAVMVKLGLLSEADLCGAYAAYCGLKIVRSSDLPLQPLLADRLKLTFLKGSRTLPISVSDGVLLLATVDPFDEEAHKAISYMLGWRVDLAVIAPADIERAFRKLYQDDGAELVGGDQGLITVGSGDGNEIDVERLRDIANEAPIIRLVNQIIASAVERGASDIHIEPGRDAVMVRFRLDGFLQQERVVPSTFRAALTTRIKIMAKLDIAERRLPQDGRIKTAVRGTEIDVRVSTLPTAFGESLVLRILDRTRVELEFSKLGLDPAIQAGLHGLMELPSGIILVTGPTGSGKTTTLYTALKELNRPELKLFTVEDPIEYQLGGVNQIQVQPQIGLDFPAALRSILRQDPDIIMIGEIRDLETARIAVQASLTGHLVFSTLHTNSAVAAITRLIDIGIERYLLASTLTGIMAQRLVRRLCSHCARGAAYRAEAPSRMRWPVPDDLVIDWSGAREAVGCDSCHGTGYLGRTSVAELLVIDDDMREAVGRRSDDQRTMISLARDAGFRTLYEAGLIKVSKGETTIEEVLRVSRSS

SEQ ID NO: 8311 - protein, 47 aa, BradyrhizobiumColbertium
MSPAEAHAEHHGHVAFRVGQAQSTWIVLARGCLFRRIRFELVNENGK

SEQ ID NO: 8312 - protein, 275 aa, BradyrhizobiumColbertium
MITVIWSLGLLTLLCATVIVGARYRARTALTDGSVLAAAAAAESAVNLALASILSPTREASFPKQCRMPGGEQAEIVVEEEIGKIDINAASLSTLERFFSALAQDKALGSKIALNAVNFRTALQRTESGNQTGPGGTAPLNASDGAKGLGFSTILELDQIDGMSPALLRAAMRFTTTLSGRSEPMPEAMSPALRLLMGFGPNREERRRPPPSGHFTIRTDIRTNNGSRYIREALVSFGASSGQPYTIREWRRGDIARETAASFSSPSPVQACFKM

SEQ ID NO: 8313 - protein, 455 aa, BradyrhizobiumColbertium
MRFIANTRLGAILVVTSNPSYLPRAQSWIRRLDARAAGTEPQLHIYQVQNRTAAELAGILQSMFAQEMKVVRSTRNVSPKSKQVSFGSESTKAQATGGGFSDPAMQAGVAKAADPFGASRSTNNDPDASAMDTADSGNVVPNSGAEPMMKIVADDTKNSLLIMANDRDYQRVLRVVQGLDVVASQVLIEAVIAEVSLNDDLQFGLQWQFAKNGTPTATFSNALTGGVAASFPGFNYAVNTANIAATLSALNALTRVNIISTPSLMVLDNKTARLQIGDQVPITTQTATSTITTQPAIVNSISMQDTGVILSVTPRINESGRVQLDIEQEVSSVVKTTTSNINSPTIQQRRVKTTVVVSDGEVLALGGMIQDSANKSSNQLPILGDIPGIGAVFANRKDAVQKTELVILITPKVVRDGTESRLITEEYRRKMNVYMPHTSARQRAPLNTAQRLVTP

SEQ ID NO: 8314 - protein, 328 aa, BradyrhizobiumColbertium
MAVNVFDSFLKEFEQPITAFVSTSVSNLATYIDGPLRTAVMLYVVLYGFAVMRGAISEPIMEFAWRAMRIVVVVLLATNSSAFQQYVTTLFFDSLPKEIGNALAGSGLNTSSGAPFDQLLSKGIDVANKIYDQAGITDVAPALIAGILLVFVAVGSFLQFAILLYAKVGLGVVIALGPLFIALGLFEATRPFTEAWLRQLANFVILLVLVVALVGLMLTTVSGFIDRFAANAGTAGEMVVAAVAISAVLGLSGYISLQLPTIAGGLAGGGASLASRLVTSPMIANATAAAGGAYAGARWSAGRGLAALRASRQGGSMRRAQSRGATAA

SEQ ID NO: 8315 - protein, 81 aa, BradyrhizobiumColbertium
MKTSLAIVLLTVAATLAGCNDVNKGQEAKTVGWFLDHRDELAIALKACRDNPGERRNTPDCINANEARKKAFVKEMKDALK

SEQ ID NO: 8316 - protein, 240 aa, BradyrhizobiumColbertium
MMVQRRPTALACLSVVTLLTASPAGAEIVFDPSVYARQFEQLTELKKQVDTLTSQLKVAQDQLSQAKQLYDSFNKRTNANDIGALLNTPQFRKVLPQQFSDIERLVTGQGGGNFADAIDHYLSQNRAYAGNSGNSYYQSELDRIARQAGAKHSMGQAVYDTASQRIDALEELRARISSASDAKEILDLSARLQAEQALLQNDVLRMQGLAMIQQARMDMDAQRERERRRQLVDEMRAALQ

SEQ ID NO: 8317 - protein, 788 aa, BradyrhizobiumColbertium
MRNRALKTREIEPNVYLPFGRHVTDTAIGLTTRALLTVIRIDGTSFETAETSDLNDLHAKLNLTLRNVADPQLALWSHLVRRRTSVYPDGAFRSTFATALDAQYRQRLCKEALFRNDLYLTLVCHPGRTATDTAAAFFRRVGRSVGNSAEVDSAALKRLDDATRDIVAALDRYGARAVGLFERDGITFSEPMELLHALASGEWMSMPLPQGPIGPALYSNRVIFGREALEIRGAGGSRFAGMFGLKEYPASTRPGLLNALLSAPFELIVTQSFAFLAKADAKTVLTRKQNQLVSAQDPAASQIDELSDALDDLESNRFVLGDHHLSLLVYADTPLQLQDHMSVARRALADAGAVIAREDLGLEAAYWAQLPGLFKYRARTGAINSRNFAAFSPFHTYPTGQPAGNHWGPAVAMLKTASGSPFYFSFHYGDLGNTFICGPSGSGKTVVQNFLLSQAERLGASYVFFDKDRGAEIFVRAAGGTYLTLHNGTPTGCAPLKALELTPANLSFLGELIRKLVTPDDRPLTVIEEERIDSGLRALGQLRQSERSFGTLRAFLGQQDREGIGARLERWCRGAPFGWVLDGDHDAIGLDARFIGFDMTDLLDHPTVRTPLMMYLFHRVERLIDGRRLIIDIDEFWKALGDEAFRDLANNKLKTIRKQNGVMVFGTQSPRDALASPIAHTIVEQCPTQIFLPNARGTRADYVDGFHLTDTEFRLIKEELAPESRRFLVKQGHNSVVAELDLGGFDDALAVLSGRTETVELLDRIRKQVGDDPARWLPVFHGERRKTQ

SEQ ID NO: 8318 - protein, 113 aa, BradyrhizobiumColbertium
MVEAARLTEDTLFLACTRPAMVAGVTMEAMALNVMFSCILFLVAGSIVYGFVAIPIHGLCRIICRHDPNMFRILIAWIETRGRARNAAFWGGSSCTPLKLVRRYRTRDVGYAQ

SEQ ID NO: 8319 - protein, 85 aa, BradyrhizobiumColbertium
MGAVLSIALVEPALAQTANIEGVLQNIVNMLTGNVARLLATLAVIIVGIAWMFGYLDLRKAAYVVLGVAITFGASEVVSTLTGGH

SEQ ID NO: 8320 - protein, 189 aa, BradyrhizobiumColbertium
MDPAAFAALVEQCAPTAMVRPLTAIVRQASSFEPLLITSEGRKPIPIQATDRDEAIQLATEAIAAGQQVRTGLAQLDAEETKKAGLTATTTFDACQHIAGLGRLFDARLQAAGIKSANRDEAIAHVVASFSAKAPSQAPEPRTQPMPSADGDRPTGDTTINRPAASTSERPRWDVYRSGLGTSAFVYER

SEQ ID NO: 8321 - protein, 191 aa, BradyrhizobiumColbertium
MHRLRGRVFKDRLDWDVSVSNGLEIDQYDTFKPTYLLALERTEVVGCVRLLPTTGRNMLADTFPVLLDGNPAPKATTVWESSRFCVDTKTVAATAENGLRKATFLLFAAMIEWGQQRDLQAIATVTDLRMERILRRAGWHLDRLGTPRQIGPTKAVAGLLPVTDKALDAIRAAGQISGHAIDAPSSLAIAA

SEQ ID NO: 8322 - protein, 40 aa, BradyrhizobiumColbertium
MRSSFRDTPKIIFRMGSVQTIDKFIACSFDIFHCATSVAS

SEQ ID NO: 8323 - protein, 159 aa, BradyrhizobiumColbertium
MFLWDGREARSAKSAKERRLFDDALSFKIRTGLTVRIPSSQNQFAAFTLAVDERSLGLDRFIESSQDMLERLGLTYHAHVSASRVERTSPNGKQVSPLTQRERQCLALISDGKTMQDIADLLGVSSRGVKFHLDNARGNLAASTLPHAVALAFRQGLLP

SEQ ID NO: 8324 - protein, 66 aa, BradyrhizobiumColbertium
MARFYVLTIEPTLFGDTALVREWGRLGKRGRRRMDLFAGKVQAVEALEAWLVRKRRRGYVPKNPAP

SEQ ID NO: 8325 - protein, 366 aa, BradyrhizobiumColbertium
MAEAAFKLTPSEAPPYRQPPHNIEAEQALLGAMLINNDAFHRVADFLKANHFFEPLHGSIFEVISELIRSNKVANPITLKTFFPATLDVAGISMAQYLARLAAEATTIINAVDYGRTVYDLAVRRELIRIAEDMLNGAFEAPIDCAPADQIQHAEQLLYEIAETGRYGGGFETFETALDSAIDRAVQAYQSDGRLSGLATGLKDLDAKMGGLQPTDLIIIAGRPGMGKTSLATNIAFNVASAYDAAQQVGVSTKPAAGGVVAFFSLEMSSEQLATRVISEQTEIPSSNIRRGDIDEAAFGKLLDCRQRMRRLPLLIDQTGAVSIAQLAARARRLKRQRGLHLIIVLYPAHAGQVTACGAEPRAGDH

SEQ ID NO: 8326 - protein, 97 aa, BradyrhizobiumColbertium
MVENRDEKRPQLSDLRESGSIEQEFREEYYLKNKEPKPGTDEYLAWETEMSDARGKAEIIIAKQRHGPTGTVAMTFQGEFTRFFDLAEHNRLPRRSD

SEQ ID NO: 8327 - protein, 47 aa, BradyrhizobiumColbertium
MIVEGRTRTKESPFESGAGPSPKASCAALHIFHPRALADQIATREQV

SEQ ID NO: 8328 - protein, 59 aa, BradyrhizobiumColbertium
MSHNLALAQNHAFDLARTLMVPVILFQAENEFGVMVSSEYEGDQDAIVHDYDPWEIMDS

SEQ ID NO: 8329 - protein, 410 aa, BradyrhizobiumColbertium
MPISRRLLRTEDPDNVLWPIMGLYTDYLARGRYGAKRRRRYTACALHFGDWLHSEDAGPSNIDEARIGRFLTGHLAICSCEPPVPRGLILNRAAINNLLRVLRMHCIVASPAPNAIEVELAQFDAKMNEIWGLTQGTRDHRRRIIRRLLREQFSTQPIDLSVITPNAVRAFVLGDAGWSTSTIRVMGGAVRCYLRYRALLGDDVAHLLKAVPRPAFWRDAELPEALSAADVEQLFSAFDRPCPSRRRGYAIVRCLADLGLRSSEVIRLTLDDIDWEEGIVRVPAGKARRSDVLPLSLATGEAIVDYVLHERPATAQREVFVRHVAPLGEPVGRRVVQKTLHADYARLGWDRSRVHILRHTLASRLVNSGVPMKQIADVLRHRSIVTSAGYARVDITRLSAVALPWPGAAA

SEQ ID NO: 8330 - protein, 315 aa, BradyrhizobiumColbertium
MLARAKAYLAERRRLGFVLDRSGNLTLAFARFADASGHQGPLTSALVLRWAKEEAMHADPFTWAQRLNVLRPFARHLAGAESGTTFPEGSPFGRSKRRLAPHIFTPDEVNAIIGAARALPPVFGAGPATFPTLLGLLAAAGLRISEALCLRCGELDEAATQITVKQSKFGRTRMVPLHPTASAALRDYLRTRARLGATDHSAPFFLDERSGEALGYGAVRRAWLRLTADLGIVPRGGHRFIRIHDLRHTFICRRLMLWQAEGADIDNTMLALSTYVGHVNLGDTYWYLQAVPELMALAGDRFEALVPQCGEAGRD

SEQ ID NO: 8331 - protein, 284 aa, BradyrhizobiumColbertium
MQSVPARSRPTATRSKLLLAFAEKAISKAPTDLALADLNATLILAFLDHLERERKNSVRSRNARLSAIRTFLKYAAHEDLTVLAVIERSLAVPQKRHDKPVLGFLSRAEMDAIIAAPDCATWAGRRDQALFTFLYNTGARISEAINLRAGDVVLDVSPVAHLHGKGRKRRSVPLWKATAATLRQWRRHLQDAGPQGYLFPSKAGGRLSRSRAAQRLALAVAQAARQIPPLAERAISPHTIRHTTAMHLLQSGVEITVIALWLGHEDPSTTHIYLEADLAMKRPL

SEQ ID NO: 8332 - protein, 144 aa, BradyrhizobiumColbertium
MDKREIEELREKVGCAALLEKDGWKVDVKESTRRAIKYRRDSNIIIVIHQGRGWFDPLSPAKGDVFSLAEHLGADGFVEACDRVADVVGFVPSAPAWQHPERPKALASIIERWGHRFRPRPGSPAWRYLTGERGLPADIVIFPR

SEQ ID NO: 8333 - protein, 194 aa, BradyrhizobiumColbertium
MGEMMGRPRKEFYPSLMDMPTLSAEQRQCIEAQARARISKGADEIQSAQDALRHANAAGDTASAEQAASRLRDGLDQVKSSTTTPETPTELREEQSRLGTLRSAYDRTTIALAQRARLEDLAAAEVGAPALQGATVLQLVEGIADLEYAIGSREVIKKIFTRWIVAHVVAAILMYFLLALHIGGEIYYGLRWLA

SEQ ID NO: 8334 - protein, 258 aa, BradyrhizobiumColbertium
MKKLGVFYTVLIAIAVVASLTTVATLYRSGSGSVPAWSKSFQPGQLSVKHAFLTDKCESCHTPTLGVEAKSCIACHATAAADLAKQSTAFHAKVQDCRGCHVEHQGAGRPTRINHAALLRIGSHLAVGAEGHPGVPTEMVNDIADFLGVAASRSAEKNALDCASCHSNRDPHKQLFGRECAGCHETTTWRIAGFLHPSPTSKECAQCHQAPPSHYMEHFKMVSMRVAGKEHAQVNQCYLCHRTNSFNDIKDVGWYKHH

SEQ ID NO: 8335 - protein, 46 aa, BradyrhizobiumColbertium
MNGPFHFDLYHGGALHDCITLFGPLPRTSCKAPVDTAARLRLTIPW

SEQ ID NO: 8336 - protein, 54 aa, BradyrhizobiumColbertium
MYVLHVIDQAMGLPRKCLLPTLSSSPQECSGAFVQQSHVDELRFIASALPHPPQ

SEQ ID NO: 8337 - protein, 602 aa, BradyrhizobiumColbertium
MRSLIEDYAPIGDCQTAALVGHDGSIDWLCWPRFDAGACFAALLGSPGNGRWRIAPEDPSPRVSRRYRNSTLILETEFESAGGWITVIDFMALRGGVSDLVRLVVGRRGRVRIRSELVIRFDYGAVVPWVTRLEDGTGIQAVAGPSMVVLRTTAPFHGENLSTVAELSVEAGDTVPFVLSYSPSHVAPPATLDPEAALAETEAFWQNWSSRCRHTGPWHEAVLRSHITLKALTYAPTGGIVAAPTTSLPERIGGARNWDYRYCWLRDATFTLMSLMDGGYFDEAKAWSDWLLRAVAGRPSEIQIMYGLAGERRLTEWEVPWLTGYHGSRPVRVGNAAHGQLQLDVYGEVMDALYQARRGGLVMRDASWALQRAIVEHLETIWQEPDEGIWEVRGERRHFTHSKVMAWVAFDRAIRSIEEFGLKGPLDRWRAVRQQIHEDVCRKGYDPDLGSFVQSYGAPHLDASLLMLALVGFLPASDPRIRGTVSAIEQRLLVENTFVLRYDTEEVADGLPAGEGAFLACSFWLADNLILLGRHEEAGRLFERLLALRNDVGLLAEEYDPVARRQLGNFPQAFSHIALATTARNLTQAAKPAQARAATAAK

SEQ ID NO: 8338 - protein, 383 aa, BradyrhizobiumColbertium
MDASSIKIRRSLGAWKPEGCERIALVLQGGGALGAYQAGAYQALHEAGLEPDWVAGVSIGGINGALIAGNAPEHRLDRLREFWETITRPTWPFTADGDEARGARNNWSSLEAMMFGQPGFFSPNVPNPWMSPRGADTATSFYDSAPLRETLRRLVDFDLLNQTSTHYAAGAVNVLNGNFYYFDNAQIEITAEHVMASGALPPALPMVQIDSSWYWDGGLVSNTPLQHLLDNAQCRSMLVFQVDLFSAKGVLPRDMFDVLAREKDIRYSSRTRLITDTYAKRHQQNLILRRLLDKLGDANLDDEERALKDKLCRLPKITILHLIYQQTAYEGQAKDYDFSAQSMHEHWNRGYQDTQRTLRHTEWLAMPAQDGGIVVHDIHRTDD

SEQ ID NO: 8339 - protein, 244 aa, BradyrhizobiumColbertium
MGGKSPNIFFADVMDENDAFLDKALEGFALFAFNKGEVCTCPSRALVQDSIFDKFVERAVARVARIKVGDPLDPSTQMGAQCSKGQLEKILSYIEIGKREGATCLTGGGRAELGGRLKHGFFVQPTVFVGSNKMRIFQEEIFGPVLSVTAFKDLDEAIAIGNETPYGLGAGVWSRNVNNLYRVGRGIEAGRVWTNCYHVYPAHAAFGGYKGSGFGRETHKMVLDHYQQTKNVLVSYDTKALGLF

SEQ ID NO: 8340 - protein, 112 aa, BradyrhizobiumColbertium
MLNKIADRIEENLTLLAKVETRDNGKPIRETMNADVPLAADHFRYFAACIRAEEGTIGEIDHDTIAYHFREPIGQSSRCAGWVARSCTMLPRPSFRRPWNWAASRPTSSSPT

SEQ ID NO: 8341 - protein, 341 aa, BradyrhizobiumColbertium
MAKTMKAAVVHEFGKPLSIEEVPIPAPGRGEVLVKIVASGVCHTDLHAAAGDWPVKPKPPFIPGHEGAGIVAAVGPGVVGLKEGDAVGTAWLHDACGRCEFCGTGWETLCEAQHMSGYTVNGSFAEYAIGAADYVARLPKNGDFAALAPILCAGVTTYKGIKETEARPGEWIAISGIGGLGHIAVQYAKAMGLHVAALDVTEEKLALARQLGAEVTVNSKSPDAAAQVVKATGGGAHGVLVTAVSVPAFAQALKLVRRKGTIALNGLPPGDFPTPIFDVVLKRITIRGSIVGTRKDLAEAVQFATEGKVKAHIHKAKLEDINTIFSDLGSGKVDGRMVMTL

SEQ ID NO: 8342 - protein, 88 aa, BradyrhizobiumColbertium
MPAKSMASKPAAAAAETTTMPPESAAVASKATAVPSAAMLRRSRLHIAHERSAHQESCKRHQLRSSSEISHHRSFHNVTFSPRTRLLL

SEQ ID NO: 8343 - protein, 41 aa, BradyrhizobiumColbertium
MSANHSRRELHYELGRVPVAKSGQLVGKLCAAIADFIPLVA

SEQ ID NO: 8344 - protein, 68 aa, BradyrhizobiumColbertium
MGPGAASVAIMTEEMKSADGSIRMLAMEMPFHVTNRRMLKGLRPGDLVEFEAARLKNAVMITNIRKAR

SEQ ID NO: 8345 - protein, 150 aa, BradyrhizobiumColbertium
MPSVDPMDPDFKRLRYCRYADDFLIGIIGSKREACEIMACVEQFLTETLKLTVSPEKSGVYAASKGVTFLSYRISTYTSYGAGRKSNRTGPDRRTWRVVRRPATGNVFGAPVSFDQPESRLSFDVEFLKLPTIRSERALREFLRRGAVPP

SEQ ID NO: 8346 - protein, 92 aa, BradyrhizobiumColbertium
MVPVDWPDFDALANELRLPAPTLRRRLRMEGMTYRNIKEEIRRGLAMESLLRDRRDVGGISADLGFSEPSAFHRAFRKWTGKSPGAFRRDQG

SEQ ID NO: 8347 - protein, 115 aa, BradyrhizobiumColbertium
MIPIPSGFRVWIATGHTDMRRGMQSLALTVQESLKRDPHAGDLYIFRGRRGDLVKILWHDGLGMSLYAKRLDRGKFIWPSASAGAVSISAAQMAYMLEGIDWRNPQLSWRPQSAG

SEQ ID NO: 8348 - protein, 551 aa, BradyrhizobiumColbertium
MDADRDAVPDDIAALKEALAVERAKALEVVAELAVARAKASEDGALIAQQKLRIAKLERQIYGQRSERSSRLMDQLALTFEELEADATEDELAAERAVARTTTVRGFIRKRAERQTFPEHLPRERVVIDPPPVCGCCGGTRLRKLGEDVTRTLEAIPRQWKVVETVREKFTCRDCEKISQAPAPFHVIARGWAGPSLLAMILYEKFGQHQPLNRQAERYALEGVPISLSTMADAVGACCTVLEPLLRLLEAHVMAAERLHGDDTTVPVLALGKCDVARCWVYVKDDRPFGGSDPPAAMFYYSRDRSGEHPQAHLANYTGILQADAFGGYIKLYEPERSPGLIREAACWVHARRPFFAMADLEENARRKAAGKKEIVISPVAMEIVRRIDALFEIERSINGQNADQRKVVRQTQSAPLVADLEAYMREQCAKLSRGHDLAKAMNYMFKRWASFTHFLDDGRVCLSNNAAERALRGIALGRKSWLFCGSDRGGCRAAAMYSLIVSAKMNDVDPQAWLADVLARIATQPAHRLDELLPCNWKTAQQQGLAAQAA

SEQ ID NO: 8349 - protein, 97 aa, BradyrhizobiumColbertium
MGHVNKVSHVFTLSHVAEMLGEDEEWLFEVAEEMDTEDGQLWVVGVGEDGVMAFTDDGIENLKELIAIHKDTPSIIENRRQALAAMMKPRTEESDEI

SEQ ID NO: 8350 - protein, 261 aa, BradyrhizobiumColbertium
MIGSLLMRGMLVGFIAAILSFGFLKLTGEPSIDRAIAFEAAMDETRSKAKAEEATAKGLTAPVERVEPELVSRPVQAGVGLFTGIAVYSTAFGGLFALGFAFAYRRMGNFSPRATSALLALVGFVSIYLVPMLKYPANPPAVGFPETIDMRTSLYFAMIMVSLAAMIAAGMLRNRFNARFGVWNSALIAAGAYGVAMVGVSMALPSVDEVPEGFPAALLWNFRLASLGGQAILWATLGLLFGAWAEKVVAERRPEPRRFAS

SEQ ID NO: 8351 - protein, 659 aa, BradyrhizobiumColbertium
MKAPAAEVYDWTGFYVGGHVGLAAGRERFMADALGRSVPAAGSFGLYRSPNGFTEGGSWLEGVQFGYNYMVQNRVVFGIEADGSFPAFPDPDGLTIGGISNFASPTLGLVSLSETVLSSGTLRARIGYAPGNWLLYATAGLAWTYNQQTIPQLLTANKEDRFLWRFGWTAGAGVEVPIAPSWTVRGEYLFTGFPTKTLIYPVSTERTATDFSLHQLRLGLNYRFDDPSRPAALAPSRFVPAADIFAIHGQATFANQAYSAFRSPYEGTNSLSGGAQSKQTFDLTLSTGVKLWQGAEFWANPEIDQGFGFNNTHGVAGFPSAESYKLGSSTPYARLQRAFLRQTISLGGDIEKVDDDFYQFKGTRSTDRLVLTTGRFGIVDIFDTNRYANNPKSDFLNWSMINAGTFDYAGDGWGYSYGAAAEWYIGRWTFRAGIFDLSNTPAGGTSPMAYALDPTFRNFQAVGEIEERHELWGQPGKIKVTGYLSRGVMGAYSAAVALARATGEPADINAVRTYTSRPGISANFEQQINDTFGMFGRAGWADGKHEPWDFTDIDRTMQLGVSIGGKSWGRPDDTIGIAGVLNGISKQHVAFLNAGGLGILIGDGQLTNYSVEKSFEAYYSYALTPATRLTVDYQFIANPAYNTDRGPVSILAGRVHWQF

SEQ ID NO: 8352 - protein, 249 aa, BradyrhizobiumColbertium
MTADEVCQAINEVAVGVCAPAASRLVSRDDPREAVSADALLDEAMREAIWRRFAQRFVTFDVRAAYSIWMQWYLNTLIPPVLLADVLLGQSVSVGLPTLRFVMSDDARVDAIRIEGASDGSGDDPFQRFGSLVHDHLAPLIEMWSSRTDVVARVFWSNAGHTFEAMLGRIESLSGPLPRLAEARRLFVERNWRGAPNPLFDAVRYVPERGAIARIRRVCCLQYLLPDRRFCRACPIDEARASRVDGPIS

SEQ ID NO: 8353 - protein, 69 aa, BradyrhizobiumColbertium
MVLATSLPVAGPIAIPVRDILPWAVFAGLLLSLGVYFVGVEQGAAALFNGAYVHEFVHDGRHLLGFPCH

SEQ ID NO: 8354 - protein, 507 aa, BradyrhizobiumColbertium
MSVKRPTTKEMSEICETLGMNMSIAEIEAFIDQMEGAVAGYNALDALPDELPLIKYPRTTGYQPSGEENVYNAWYRKSKVKGASSGKLQGKTVVLKDNVLLAGVPMMNGASSLEGYIPDIDATIVTRMLDAGATIVGKAHCEYFCFSGGSHTGALGPVINPRKAGYSAGGSSSGSAALVAAGEVDMAIGGDQGGSIRIPSAYCGTYGMKPTHGLVPYTGVMPIETTLDHTGPITGSVADNALLLEVLAGPDGLDPRQVNISTAEYTAALGKNVKELRIGVVKEGFGHPNSEEDVDTLVRKAADRFRRLGADVREVSIPMHLVGGAIWSAIAHEGATVQMMHGNGFGFNWKGLYVTSLMRAHDAWRTRADSLSDTLKITVMMGQYMLQKHRGVYYAKAQNLARRLRAAYDEALADCDLLLMPTLPLKATKLPGPSAQLSEVLQRAFEMLGNTSPFDVTGHPAMSVPCGMSQGLPVGMMLIGKHCAETTIYRAAHAFEQSEDWKSAKSS

SEQ ID NO: 8355 - protein, 328 aa, BradyrhizobiumColbertium
MLTAREKVPVTILTGFLGAGKTTLLNRILRERHGERIAVIENEFGEAGVDNDLLVVGEQEQIIEVNNGCICCTVRGDLVRILGDLRKRREANHDSFDRVVIETTGLADPAPVAQTFFVEDDVASYYLLDAIVTVVDAKHAADQLDEFHEAQEQVGFADRILLSKADLVSDQELARLSERLARINPRAPIKPARFGDAPIAELLDVRGFSLDSILQIEPDFLGEDHHTHDDSVQSFVFSSSKPFDQDRLQEFFRGAVARVGRDLMRYKGIVAFDGLDHRVILQGIHMLMNSDLGAPWSPDEERSSKLVFIGRGLPKTEMIADLTACLAQ

SEQ ID NO: 8356 - protein, 114 aa, BradyrhizobiumColbertium
MQVDAQSPLLCKGIPIGPDSDTKFDEPWEAKVFAIIVRLAQDGFFEWSEWVDCFSKEVAINTAIESSGGVPRSYYEQWLDAAEKLLISKGVTNKAQLRARGFAAGSAGPNNVMK

SEQ ID NO: 8357 - protein, 104 aa, BradyrhizobiumColbertium
MNGVHDLGGMHGLGPIVREENEPIFHAEWERRVFGMFAGTFVFAGYSVDEFRHAIENIDPAHYFESTYYEHWLHAFEDILIRRGFVTREEYDARIAEFVKKGGK

SEQ ID NO: 8358 - protein, 203 aa, BradyrhizobiumColbertium
MSKTVSKPESDPAVRTRALESILVEKGLLDPKALDALVDIYEHKVGPRNGAKVVARAWVDPEYKNRLLTDATSAIKEFGFSGLQGEDMVVVENTPEVHNLVVCTLCSCYPWPTLGLPPVWYKSAPYRARAAGDPRGVLKEFGTELSDNVEVRVWDTTAELRYLVLPERPAGTEKLTEQQLADLVTRDSMIGVTKLGSSAASEH

SEQ ID NO: 8359 - protein, 484 aa, BradyrhizobiumColbertium
MDLDGPVDHPAGGQRRKALDHGRLLARIHAAIEHPGCLVDHQARLLEIHLGFGEHPLNGLPLGKRLAEGLALARPFRRLALRPASRTGQSRADHRAVAIELVHHVAESHAFLTEHVPRRHHAILVLVVAASPQIRAWRHGLVFTQHGDAGVGIVDEEEADPLVPLPGVGYRVAQEIFRRDARMVRRRRPTLDAVDDIAVAYANGRRLDTGRVRTCSRLRDVDVIELVFLEDRVEVGLSLPFRGDVQCGMWIEESRPGRKQAVHDGRSDDFLINQALRDGPEPLAAGLLRDCDAPEPVLAKLAHHVHEDVVGNGVVVRSPSILQWPAHLVHERGGTRLDILLLPRKFKIHCDLQPLLSEASLRPLSRGRYGAVGQSGWPIGSSGRLPVRRRRMPASATKEDLQGCSPRVNRLNQFRFGRRSGEVRAADPIPKSAHGRCSLAAVRHWLNIPMFSREPVRPGTMRIAAFQGDPFRIPGVSRSGSTAT

SEQ ID NO: 8360 - protein, 680 aa, BradyrhizobiumColbertium
MFTIGIDVGGTYTDLVAVDRDGNTVFAKSPTTPADQSVGVMNGLEELASRLKMPRAEMLARTDRLVHGTTVATNALLERKGAKVALLTTEGHRDVIEMREGLKEDRYNLRIPPPAPLVPRQLRFGVRERVRPNGEVLIPLDQDSLGKAISAIRAAGASSVAVCFLHAYRNPAHEIATVERLKRELPELNVSRSSDVLPQIKEYERASTTIVNAYVAPLVRRYLTNLEARLRDAGLTSSLFVILSHGGMAPLEEAARLAAGTVLSGPAGGISGSRRCAEQLGIPNLVPFDMGGTSTDISLITDGRASLSAEGGLAGQRIALRSLDIASIAAGGGSIATLDAGGTLRVGPESAGSVPGPACYGNGGVEPTVTDANVILGYLDASAFMGGKRPLDRAAAEAAVDRIAKALELSRDDAAAGIYRMVNLRMADGIRLMTLRRGVDPRRFALLSFGGAAGLHAAEVARELEIKRIIVPTAASVLSAWGMLTSDLRYEVSHTHYSAGQRITAQEVRAIFANLEREATGRLKSWFGGDVAIERSAEMRYGEQIFQIDVPLNNLDWASDDIVDRIEDQFHRRHEELYTYSSPDQEVVFVNARVSALGAVPSVGQVARGQETEAPCKPRERRKAFFGQWREVDVFAADQLRPGNRIEGPAIVEAETTTVVIGEGDQIEVNDLGWLDIRLR

SEQ ID NO: 8361 - protein, 552 aa, BradyrhizobiumColbertium
MTSKIDPITRSVVQHRLSSIVNEMGEAMLRTSYSQILNSSRDFSLGICDVNGRLIAQADHIPVHVGALSWATLAIEERFKDIKPGDVLLLNDPYHGGSHLPDLTAFVPIFDGERRLYWTIVRAHQSDIGGATHGGYNPGATDIWQEGLRVPPIRLYEAGRLRDDLLDMLALNVRNSRDFRGDLAAMIGAAHLGERRVRRLLDEFGGQVVEAAVEAILDAAEQQTRAVLATWQDGTFYGEAYLDDDGHGRSDIRIAAKVTKKGSDIEIDLSESDPQSTSFVNSSHANMQAAVVMAFAYLIDADIPKNAGALRPLKVVAKQGTIVWADPGRPVTMCTSHPSNEIVEAIVKALSQSCPDRAMAGWSRRFRIAIQGENPRTGRNFIWHLFQARPGGGASSAGDGWSSIGEWHTVGGIKFGSIEVDEARFPLYFRHHEFRPDSGGDGKFRGGLGVSLDLVVETAKPARANTAGEGTKHGACGMLGGSDGLPHQYTLVSQGRAPRVLRTKEVGIEVLPGDCFEVRSSGGGGWGPPGQRSAEAREGDLMQGLTTKLTTI

SEQ ID NO: 8362 - protein, 438 aa, BradyrhizobiumColbertium
MYPANHSQSRDLYQRALKSLPGGNTRTTVYMKPFPIYAASGAGCRVRDVDGNEYIDCINNFTSLIHGHAHPALIEAATKQLALGSAFGMPTESEVELAELLAARLPSVDHVRFCNSGTEAVMMALKAARAYTGRPKIAKCEGAYHGSYDYAEVSLDPTPAAWGGNAPVSVAYAKGTPDNVLADVVTIPFNDVEAAVSLIREHGPELACVLVDPMPNRAGLVPADRAYVEALRQVTREVGALLVFDEVITFRLGYEGAQGLWGIDPDLTTLGKIIGGGFPVGAVAGGKTFMAVFDPSSGKPALPHGGTFSANPVTMRAGLAAMMLLDAAAYSRLDRIGTAVRDGINAAFRKTGVAGTAVGLGSLLKVHFTDRNVRDYRSAYSSEVEAKRQAVFTAGLLNRGIFVASYGLMALSLPMTDADVDTIVKAAAESLEEVAAFG

SEQ ID NO: 8363 - protein, 235 aa, BradyrhizobiumColbertium
MLSCNDLVVAHGDIVALQGVTLQVEAGETVALIGANGAGKTTLLHAISGLNRVSSGDIRFERRSIAGWPTDARVSAGIAQAPEGRRIFPGLSVEENLTLATVSWRRWRQSIAADLDRVFGLFPRLKERRRQLGWSLSGGEQQMLAIGRALMARPKLLLLDEPSLGLAPRLAEEVYEQVRCIGETGLTILVVEQNTVLALSVADRAYVLETGRIVLEGPADELKHNARVREAYLGR

SEQ ID NO: 8364 - protein, 200 aa, BradyrhizobiumColbertium
MNVLTGLAMPDEGQVLLAGQAITRMATNKRIRAGLGRTFQHGRVFARLSVLENVMTGAAIRGRLSESDLRDFSMEIIEQMGLADVAHEAIMSLSYGRRRMVELSRALACRPHVLLLDEPAAGLNSGEVDQLIDRLAELRAMHGLAVVLIEHNMGMVMRLAERIFVLNFGCKIAEGTPAEIQADPAVLSAYLGEGYAHAVV

SEQ ID NO: 8365 - protein, 324 aa, BradyrhizobiumColbertium
MRIPLQIATAIIVLGGISGMVLPEYHLRLLNLSLISAVAVIGLNFAFGYAGLISLGHAAFVGMGGYGLAILTTTCGWSPWLAAPVAIAATAISAGLIGYPLLRLRGHYLALATLGLNVSFYIVTSNWIAMTGGTNGIARIPGLALGSFSFSGEHQFLWLALMVLALIAAAAAALHKSRLGREMIAVRDDEIASEMTGIDTTRIKIEAFVLSAICAAVAGCLFALHMRFVAPEDFTYAHSITYLAMLIVGGEGTIVGAVLGAVLLTFLPEWLRFLGTAYLFFFGLLVLGILVFLPTGLVGLGQRLSRRSAKTPLLASARAPEATS

SEQ ID NO: 8366 - protein, 291 aa, BradyrhizobiumColbertium
MADFVQLIINGLAIGSVYALAAIGFVIVYSATGVVNFAAGQFVMFGTFAGVATLVNAQLPWPFAYGAALLIMALFGALFFVSVYLPLRRGSIVTIIIGTVAVSITMQNAALLSFGSWPFRLPSPVEDSAVSLGGAIISLHALAVVAVTAVMVAGLWLLFNRTSVGVGMRAVAQDVQAARLMGLKVNRLLAFSWILAAVLAGVAGLMLGPMWFADVNMGDPIALKAFAATIIGGFGSLPGAIVGGLFVGLSEVLGASYVSSAYKDLISFGIMIAFLLVRPQGVFGEKIQDRG

SEQ ID NO: 8367 - protein, 383 aa, BradyrhizobiumColbertium
MKITRKAGLGVTIGAAMLSFVSVAQAQQGSPILIGATVPMTGPLSLTGKQYQNSLSMAEEDINKAGGINGRHIKIVFEDTQASNGTAVNAFVKLAQETKPAFFFLSSYSTQNLATAPELSKVQVPAMYAGGADVVADKGNEWMFRIRPADSVSAEGMVKAAVDVIKAKKPGILYIQNDFGQGGAQTAAKRFEAAGIAVAGMEAYGQNDKDFSAQLLSLRNKGADAILIFNYPQDGALVLRQAKQLGFKMPLVTSSAALVPAATQLLSPSDLEGVWGVVDAFMDVSVGGRMKDYVERFKSKFGVDPDPYGLAYYDGAMLMADGMRKAGTDPKALREWLSSVKGWQGIGHVYSYDNKGNGVRDLAVVKAKPGTKTLELVQPVSLN

SEQ ID NO: 8368 - protein, 259 aa, BradyrhizobiumColbertium
MDDNSPGPLARYIDVLEVIAAFPGAITLADVSSILELPKTTAHRLLKGLVRSGLAVEAEAGRTYSVGDRLTRLLHASADDGWYASLAGPHIHALTEATSETCYLARLVGSRVLVAVSYSPDVRWRGYVQPGIEMPVNAAATGKAIMAFQSKELIAEALSNELPKPTVNSHTSRKWIDQEFAKVRRSGYATCIGEIDEGLAALAVPVTLSDGTVLQSVGMTGPLERIMNKQMEERLSALRKTAAALSKALSRGMAVNRRR

SEQ ID NO: 8369 - protein, 467 aa, BradyrhizobiumColbertium
MSADPIHYKSITELSGLFRRGELLPSKVTEAMLGRIEKLDGRFHSYALVLADRAMAHAKRHDAEFAKGIWRGPLHGVPIGLKDLCYTTFAPTAGGTTIHAKFIPSFNATIVDRLELAGAVALGKLKMTEGAYTSHHPNDQAPLNPWNIEYWVGSSSSGSGVATSAGLCFGSIGSDTGGSIRFPSATCGLTGIKPTWGRVSRHGVFPLADSLDHVGPMCRSAADAAAMLGAIAGADVNDPTALQEPVPDYLTGIGGGVRGLRIGVDRSYTQDGIDPQVVAALLEAERTLAELGADIREIKFPAYEKLVSMWIPMCSIETAEAHLETYPSRKSEYGPDLAQLIEQGRSMSGVEIAQIHHERLKFCGSLAALFGEVDLLLIPTMPVPIPTLTKMGEYGADPTVLLSILRFTAVFDFSGSPTITLPNGMASDGLPLSMQLVGPHLSEDVLARAGHAFQSVTDWHTRRAPID

SEQ ID NO: 8370 - protein, 253 aa, BradyrhizobiumColbertium
MDLGLKGAKVLVTGGTKGIGRAIAETFAAEGANVGICARNQADVDNAVTAIKAKGVAAFGSSVDVSNGPALKAWVEDMASKLGGIDIVVANVSALSIGQDEESWEKEFSTDMMGTVRLVNAAMPYLEKSKAAAIVTISSVSGREVDFASGPYGTFKAAIIHYTQGLAFQLAGKGIRANSVSPGNTYFEGGVWNQIKDGNPELYKTALALNPTGRMGTPQEMANGAVFLASKAASFITGTNLVIDGALTRGVQF

SEQ ID NO: 8371 - protein, 210 aa, BradyrhizobiumColbertium
MSVSRGEIVGVIGRNGVGKSTLMRCLIGLLQTWRGTISFMEEDVTALEADARARAGFGYIPQGRDVFPQMTVDENLLVGELIGGPRSKKLPELVYEYFPRLKERRRQAAGTMSGGEQQQLAIGRALIGNPSLMILDEPSEGIQPSIVQHICEALRSFRNELGTTIIFVEQNLDTILAIAERCYIMEKGRITKSLAGGEVNEDNVREQLLL

SEQ ID NO: 8372 - protein, 239 aa, BradyrhizobiumColbertium
MALVEVKGVSKRFGGLTAVSGVDLTVNAGEVHCLIGPNGAGKSTLFKLIVGLYPPTEGNILFDTVDITTERPYARVQRGMSIKMQAPSVFKELPVRQNIQTALQERLSGAERIAEEDRLLTLLNLAPDSGKLAGALSHGQQQWLEIGMALALKPQLLLLDEPTAGMSPEETYKTGELIKSFNAEGMTVLVVEHDMAFVRQVAQRVTVLHLGKIFARGNLESILQDEKVAEIYLGKTHAH

SEQ ID NO: 8373 - protein, 356 aa, BradyrhizobiumColbertium
MFKLLEGPQTLGRGRMFWTCFLVVLGGALAYPLFADSYDVGNFAYFLIWIFMALGLCLMWGYGGMLSFGQTLFFGIAGYGYGVLAINMGGGTATIAALVLSVALAMIAAGILGYFMIWGGINGIFFGIVTLSATLVLAFFLGQTAGPEWHIGPARLNGFNGMKGMDPLTVGDFYIEGSALYYVLVALIVIVYLALRMLLNSGVGNVIVATRENPQRAEMLGYDVRKYQLLTFVIGSGLAGLSGALYTSWGQFITPSSIGLPAAAMPIVWVAFSGRSDLTATLVGSFLLLFGFQTITVYSQQAALVLMGALLLATVMLAPQGFVLGIGKLVADWWRDRRRGDDAVVTEAGRLQSEEA

SEQ ID NO: 8374 - protein, 288 aa, BradyrhizobiumColbertium
MSAEVFSVFYQFADVFAFLILSAAGLAIVFGMMGVINMAHGEFIMCGAYVTVGLVNLGVPLALAQILAAVTAGLIGVIVEFLVVRRFYKRPLDSLLATWGLSLIVTQSMLLIVGSAVRGIGTPEGSFAIGGYTFSTYRLVLFGCAVAVLVGLYIIFMRTRFGVIARATMQNAAMAKALGARTGRIYAISFGIGTGLAGLCGALYAPTMTLIPTMGATFVVESFVTVVIGGANVLLGTAPAAVLLAMIRMTLNASYGQIIGQIGMLVAVILIIRVLPEGLSSVLVRRGR

SEQ ID NO: 8375 - protein, 405 aa, BradyrhizobiumColbertium
MVLLGAMLGAAASTSLAQAAEPPLKVGLLEDVSGDLAFMGMPKLHGSQLAVEEINKSGGILGRQIELIHLDPQGDNARYQEFGRRLLNRDKVDVLIGGITSASREALRPIVNRTSTPYFYTNQYEGGVCDASMISMGAVPEQQFSTLIPWMVEKFGKKVYVIAADYNFGQISAEWNRKIIKDLGGQVVGEEFIPLGVSQFAQTIQNIQKAKPDWLLTINVGAAQDSFFEQAAAANLNLPMGSSIKVMLGFEHKRFKPPALNNMHATANWFEEIDTPEATEFKKRWRAKFPDELYINDMGYNAYNALYMYKSLVEKAKSIKLEDMRKVIASGDACIDAPEGKVCIDPKSQHTSHRMRLISVGPKHEVKVEKDYGTIQPYWLGEIGCDLTKKNDKDQYTPSHLPKKS

SEQ ID NO: 8376 - protein, 331 aa, BradyrhizobiumColbertium
MSEDWLKTSIMAKRAVAKGAAGATHSLTIEQQGGFHYVYGPYAKPTLSIDPGEVVVVETEDAFGGVLTKETDSPTAKLNFPYLNPQCGPIAVKGAKKGDCLAIYIRDVETRGEQPAGTTCIIPEFGGLVGTGSTALLNPPLPERVKKLHVDRNGIRWNDKLTLPYEPFIGTIGVSPEIEAISSLQPDYHGGNMDLPDVAPGAIIYFPVHTDGGMLYVGDCHATQGDGELSGVALEQRATVTLQVDLIKNWSFAWPRLETEDFIMTIGSARPLEDAARIAYRELVRWMAADYGFDEIDAYMLLSQAGRMRLGNMVDPKYTMGASILKNYLKP

SEQ ID NO: 8377 - protein, 466 aa, BradyrhizobiumColbertium
MTATDLHYLGLVEVGQKIQAKALSPVEATKAMLQRIEKLDGQLKSFAYVMADSALADATTAEQEIASGKIKGVLHGVPVAVKDLCWAKGAPAAHGMTIHRDFRPTEDATVVARLKDAGAIILGKLQQTEGAYADHHPKIDPPKNPWNADLWPGASSSGSGVATAAGLCFGSLGTDTGGSIRFPSAANGVTGLKPTWGRVSRYGAFELAATLDHIGPMARSAVDCGAILGVIAGQDPKDTTSVPLTVPDYLAGLTGDLRGVTIGVDRRWTSEGTDADSAKVLAEALRVAADLGAKIKEIAFPDPAAVIDDWFPLCGIEVAVAHEETYPARKDEYGPALAGLLELGRQQSGMDYQKIVLRREAFRGAVRLLFETVDLIAVPAQAFAAPTLSKMAALGEDASLIGGLLRFTCPFDMTGSPTVTLPGGFAANGGPVGFQFVGRHFDEAGLVRAGDAFQRVTDWHKRHPAI

SEQ ID NO: 8378 - protein, 390 aa, BradyrhizobiumColbertium
MTKPSVPVGIICSQSGPYQAMGREILKSAMMAVDEINNHAEFEFAIAPHIRDPRGIVSEYHTVCDDLIRNVGVKHIIGCYTSASRKQVLPIVERTDRLLWYPARYEGFECSDNVMYVGASPNHNVLPLVRYVLDNLSREIFCVGSNYVWTWETNRVTRELVSAADGHILAERLLELGESAVGHIVEEIVRRKPPIVFNTLVGSSSYDFIRAFHAGTKAAGLQIPMLSCSLCEPELAIVGPASAGCITSSAYFESIRLPENRAFVARWKARYGEESSPSVDGQSAYVAVYLLARALQRAGTSDIAEVRRAAAGYRYNSPQGPVWIDGGNNHCVLTPRLAVSNPQGQFDIFWEADAPVKPDPYLTQLDVAVSPLREASAGVLPNAPHLRVVK

SEQ ID NO: 8379 - protein, 195 aa, BradyrhizobiumColbertium
MSRPSSFSLRGRKALVAIKDERDATIVRRQFERLGIEGVAWTPAEPVGFTPDLSLIDDEFLPLLQPAQRASLARSPVIALLGTETPSRLKLVFELDPASFLIKPLRSAGIYAALVMAFERSERTSELKQQILKLEHRLKSRRVVLAAVLKVMHLHALAEPAAFALIRKAAMEQRKTIEELSAEITAKGMLPRAAG

SEQ ID NO: 8380 - protein, 246 aa, BradyrhizobiumColbertium
MMDSSIKSAKRIFEVLEYFEDVKRPISLKEVATKCGYPTSSAAALLKSMAMLGYLFYDSYNRTYMPTMRIAQMGRWLDTGLFGDSAILALVDFVHGRLDELVSISTQSDLHAQYIHALQTSKRLRFEVKPGDVRPLAISGIGRTLLSGHTDVEIERLLRRINAVCPREEHFELNALMKIVNGIRRDGYMFSKHIIVQDAGVIAVLLPKRDFGRNLVLGVGGPVSRLEERQDEILACIREGIGRFLP

SEQ ID NO: 8381 - protein, 281 aa, BradyrhizobiumColbertium
MDYRLPEGSCDCHFHIYGPFDRFPPGNEGRFTAAKPFTIEDAFAIWDELGITRGVIVHAVGSGEDNAVTYDALHRYPDRLRAVAILRPDVSDHRLDELTDAGFRAVRVTMIRQDGKPVSTLGTSYDDLVKLAPRIAERGWHAQLWIESSDLAAAATELEKLPLNYVIDHMSRTMADKGHDHPDFRAFTDRLKTGRYWTKISGADRNTRIGRPYADTAPFMRAIVQAAPDQVVWGSDWPHVGHSAETMPDLQDLLRLLHECVPDEATRRKILIANPARLYNF

SEQ ID NO: 8382 - protein, 403 aa, BradyrhizobiumColbertium
MDNSKKLPLEGVIVIDLGQVYQGPYAGFLMAQAGATVIKVEPPNGEPVRHRARISKGNAVPFAMLNANKRNISLNLKSPDGARVLKELASKADVLIENYAPGVLDRLGVGYAALSAVNPRLIYGSASGYGLSGPSRDNLAMDLTIQAVSGIMSVTGFADGPPVKAGPAITDFISGVHLYAGILTALYDREKSGRGRLVEIAMVEAVYPAMASNLADVFNRKAAAPRTGNRHGGLAEAPYNVYPASDGYVAIISVNESHWTGLTRAMGQPELADDARFKTVLDRLKHIDLTDQIVSDWSSQLTRDEITELCRVNRVPCAAVRDLREVIEDKHLHVRGMLREIAHPEYGDILVHRSPLVLHDTAAPDYVPSARLGQHNGEVLSQYLGLSDGEIDALRRAGAIAQA

SEQ ID NO: 8383 - protein, 390 aa, BradyrhizobiumColbertium
MVKLFESIAFRGVELSNRIVVSPMGMYSAENGYVTPFHLVHYGKFAMGGAGLVFVEQTSVTRKGRITNGDPGLWEDGQIDGMRQIVQVIKSHGAKAAIQINHGGRKSSQQRAFRGNSHLTDRDIEMGEETWVPTGPSDVPFSEGFQTPIPLSKEGLVGVRDAFVAAARRAMLAGFDVIELHMAHGYLLQSFLSPLANFRADEYGGSLENRMRFPLEVTRAVRAALPSSTPLFVRISATDWIDGGWEIEDSIVFSRKLKELGVDLVDCSTGGNLRAGSTNANLGRGPGYQVPFAERIRREADIATGAVGMIRTPDFAEKILQDDRADLIFMARQMLFNPFWALHAAEHFGLTGNFEKWPEQYGWWLAKWGGALRANGESLDGLERYREAAE

SEQ ID NO: 8384 - protein, 400 aa, BradyrhizobiumColbertium
MLAASMVLLGLASAHAQAPASKPVKLGVLNDQSGQYADAAGPAAVEVAKMAIADFGGKLLGQPIELTFADHQNKTDIASGIARRWIDTENVDVILDIGNSAVALALADLVRDKNKMMIVSSAGASTITNEKCSPNTFQWTYNTNTLARSTAKALMGQGGNEWFFLTADYAFGHAFEADASAVVKANGGRVVGSVRHPFNTSDFSSFLLQAQSSGANVLALANASGDTSNSLMQAHEFGLLGLKSKMKVAALLFQITDAKSVGLKNMQGLYTSEAFYWDRNDASRAFGKRFFDKVGRMPTMVQAGMYSATMHYLKAVEAAGTLDTAAVLAKFRSMPVNDFFSEKGYVREDGMHIHDYYLLRAKTVEQSKGPWDFYDVVATTPAEDANIPREQSKCSLMKKS

SEQ ID NO: 8385 - protein, 45 aa, BradyrhizobiumColbertium
MHRRRLVGDLKARPGFDCRSSIAQVEQDIATIEAGLERISGSSDA

SEQ ID NO: 8386 - protein, 99 aa, BradyrhizobiumColbertium
MQLLLKNRQSDNRQSYLVRGRRYEQLSADDLSRLWAEQMSRWADDSTAFDQRALNDLGVEMGLRQMAPPLEQIAAAREKILAKSGKALAAIFAGYPETK

SEQ ID NO: 8387 - protein, 151 aa, BradyrhizobiumColbertium
MSYSELIRQIQARRPPAWELLGVGGVSYDQLLNRVTIEWHAEQRHCHSVEGHPKGGIVQGGIVTGWLDAAMATASLLHGEYQIAVASLEIKVAFLLPAHPGLYRTHGKVLRQGRSIGFMEAELRDANDVLIATASSTAALRAKNPAGTSPA

SEQ ID NO: 8388 - protein, 345 aa, BradyrhizobiumColbertium
MRTIGKNRGLARLADADGHFRMVALDQRPPLFDAIAKAKGITRDQVEYSDVTAAKRLLVENLAPHCSSMLFDPNFAVPAAIDLLPPRCGLIMTLEEHRVEETAGGRKSRAISNWSVEKIRAMGGDAVKVLAWYRPDADAAVNEHQKRFVREIGRDCARYDIPYVLELLVYPFLGSANHTVDYVESPGKLPGLVIDSVREFAKPEYGVDLLKLESPLAANSLPARDGSPEAKAAQKEFDAIGAICRERSIPWVLLSGGAAPEKFERVLDYSYAAGASGFLAGRTIWLDAVLKNFPDSAAVSASLRKDGLGVLERLNKLTTAKGTPWKPRFPVFTDIKQEGDFARAY

SEQ ID NO: 8389 - protein, 313 aa, BradyrhizobiumColbertium
MGDFSALAEVASRAKPVHVICLGLSALDQVWRVEQPFAGGSEKIKAVAYGTLGGGMAANASVAVAKLGASVAFWGRAGNDAAGHEMASAFTAEGVDVENFRLFPDGRSSVSGIIVDSLGERQIVNFRGLYPEAADWLPLDAVAQASSVLADPRWVEGAATLFGEARARGIPTVLDGDMADAEVFERLLPLTDHAIFSEPALTAYAGSADDRSLAGLARFGCRVVAVTRGEGGVSWYEQGRLHRQAAYAVDVVDTTGAGDVFHGAYALAIGAGLDVRAAMAFSAATAAMKCRHAGGRNGIPDINECLAFMRTKP

SEQ ID NO: 8390 - protein, 357 aa, BradyrhizobiumColbertium
MASISIRNLTKRYGNFTVIPDLNLEIADHEFVVFVGPSGCGKSTLLRIIAGLEPISSGDLYIGDKRVNGVQAAQRDIAMVFQDYALYPHMKVYDNMSFALELRGTPKAEIDARVKRAAALLHIEPYLDRKPKELSGGQRQRVAMGRAIVRNPKAFLFDEPLSNLDAKLRGQVRAEIKALSQELQTTMVFVTHDQIEAMTMADRIVVLQSGTIQQYDTPEGVYERPANQFVAGFIGSPAMNFFPVEWSGEGAILSQGGAAVPLDGETAGRLRQAGSAVLGIRPEHFAVAADAADGMAVNIKLVEPLGSDTLIHFDLAGGPAIARVDPALRPKVGDRITLRPQPGKMHLFDAAGGQVLR

SEQ ID NO: 8391 - protein, 334 aa, BradyrhizobiumColbertium
MNLSLHPNSIMQAAVFHGNDRITIERVAMPDVGAGEVLVRVSRTALCGSDFKLWHKGAEFTAGHEIFGVVEQPGHRLHGRRCAVYIPLHCDRCAACKRGDTQMCLEVSSLIGWNRPGGYAEYVSVPENCLLPVPDDIEDSLAPLLLDTIGTSGHAVRFVSRVVPPREAGPVLVMGAGPVGLGVVLALRALGFDDVHVVDPNAARLTIAQSFGAKAHPVGDTSKRFALIMECSGAHAARNLGIELVLPRGALVLVGENAAPWIIEEGKVFRRKDFYMIRTFYFPVSDFEPNIELLREYKDEYRVLVDGEFGLSALPENFARFAKGELIKPVLALD

SEQ ID NO: 8392 - protein, 275 aa, BradyrhizobiumColbertium
MSDAANTDRWIRWLNTLQLVLAGLLIMAPTVWMVLSSFKPSFEVTAYPPTLIFSPTLENYDELTRTTPFLSYALNSLIVTVGSTALGLLFGIPAAFAVSWTRISWPAILTLAARMAPGTLFLLPWYVMFRQIGMIGSYTALILSHAVITLPIVIWVLLPSFDAIPRSVFEAAQVDGCSVTRILWRIAMPLVASGIAVSAILAFVFSWNYFLFALVLSNGDTKTLIAAAFNFIGEGSTQWGALMAAATLIALPPLVLAALVQRWLVSGLTLGAVKG

SEQ ID NO: 8393 - protein, 295 aa, BradyrhizobiumColbertium
MSDTAATFTQDRQKLEMAALSAPAVLFTVAMIAFPVVYTIWLGFQTFASTGKQSFEGIANYSKLISDVEFWHGLWITIALFVLSLALQLVFGVWLALVLFHAKRLPGIVRSLFISPFMMPPVVAGMMWLVILDPSLGAANYILQSLGLPPSDWLASPTWVIPTVALIDSWQWTPYVALIVLGGLQSLPPSVYEAAQIDGASPFKTFQRITLPLLLPTIVTAAILRSVDLLRFFDIIYITTQGGPGNASNTLNIYGFRVGFEFFNIGYASALMLTLTAIVFGAVLAFNRLRGAVAW

SEQ ID NO: 8394 - protein, 432 aa, BradyrhizobiumColbertium
MKARMLATHVALPVLVIAASAQAQAADFDWMKFKGKTITFLANNNPVSQALLTYKADFEKLTGMTLKVDGYQEQQMRQRLVTVMNANSDEVDVFMTLPSREGEQFAAAGWYGDLTAMVKNEVAKEYDPSGLSQALLKSATFGGKLTSMPMNIEGPIFYYRTDIFKKCGLEAPKTIKDVEAAAEKIKTCDSTVTPFVSRGLKPAVAYTFSNMLHNIGGTYIANGKSNLCSAKGKEALDTYSRLLRDFGPPGVVNYSFQQISALYRSGRAAMAFESSNELRTVMDGGARLKDTGLLPFPAGEAGQVPTTIGWGLAVSSHSKQPEAAWYFVQWATSPEVQKKMALQGIAPPRPSVAKDPEYRKWIDEEPVRKEWQAALDVLATKGSSEVGYPIVANPESREFIGQAVQDLILKQKPVDQACADADKALDALIAQK

SEQ ID NO: 8395 - protein, 338 aa, BradyrhizobiumColbertium
MKQGIRAVAARAGVSTASVSRALNNPDAVSPSLRARIEQAIDALGYIPHAPARILSSRRSRTLGAIVPTIDNTMFARGIASLQHYLSSVGYMLFLTTSGYDLDVELQQARNLISRGVDGLVLRGDCHHDGLRKLLADNAVPFINVGIYQPDRPYPCVGTDNEAAAHRAAAHVIELGHRRIGIVSALQRNNDRASARVAGFRRALAENGLELPPQWHVEVPYTLDDAREAARYLLNLKDRPTAVVCGNDVIAYGVLLEAERDGFSVPRDLSVVGFDDLDWSRHLRPSLTTIHVPTGETWQRAGEYLVRSLAGEQTIMHREVDFSLVVRESTAPPPKSPK

SEQ ID NO: 8396 - protein, 244 aa, BradyrhizobiumColbertium
MTSNFSLAPGFHAVVIGGAGDIGAAISNQFCDLGATVTATGANEADLARTLLKPRAGLTLATLDVTNDAAVTSFAGKHTRVDALVNCAGILARDKEFEIETFMKVLDVNLTGTFRTCMAFHPLLAEARGSIVNIASMNATLALPRIPAYCASKGGVVMLTKALALKWAEDSIRVNAVAPGYIETAINAAGRADLAHYQRIADRTAFKRWGKPEDIAGAVAFLCMPASQYATGTVIAVDGGFLAG

SEQ ID NO: 8397 - protein, 47 aa, BradyrhizobiumColbertium
MRGGSFLCHESCCNRYRVTARSSNTPDSSSSNIGFRVVRIEPLRDPS

SEQ ID NO: 8398 - protein, 596 aa, BradyrhizobiumColbertium
MEPAPHPARPPAAPGIRLLPLFLRNFVRNRETGLVLVAIVVGLLSGVLVAAISNLSQVSHALLFDIPFDAHLSATGVISWQRTLLVPVLGGLVLALIGLYFARRVKGQQLADAIEANALYGGRVSFRGSLLISIQTLLSNGFGGSVGLEAGYTQICSMFGSHVGQRLAARRNDMRLLVACGAAGAISAAFSAPLAGAFYAFEVVLGAYTSAALVPVIASAVTAWLVARQLTHQSFLMVPGFPSPVSVEMIGQTVLIGIICAFVSILVMLAVAFSERCFQRITVLKGLLRPILGGFLLGCLALLTPTVLGAGHGAMQILLVSNPTWLLLTTTIVFKILASAISLGSGFRGGLFFASLLLGALIGQLYSVVLTGLLPTIALQPGTAAIAALAALGTGVLGAPFSMVCLALEITGDFSVTVGAVVASSVCALIVRELFGYSFATWRFHLRGEAIRGPQDIGWVRQMSAASLMRTDFENALTTMPIGEAQRQFSPALVRQIVLRDPNGIYAGIVPAAALHSVSNQDDELLGSLAQQQDEYLLPTTPVREILKAFERSEADVLAVVDRPDHRATIGTLSEAHVLRTYGEELERRNQELFSR

SEQ ID NO: 8399 - protein, 240 aa, BradyrhizobiumColbertium
MELSSDSHIPKYAQIADIFRQRIARGVWTQGFRLPANEELAAEFGVSRVTIRQAVELLARDGVIEAQQGRGTFVTGTVRQDRWLKVETTLSDLADMYRDTSPEIINISESRSDAPLLPGDGKPAEKYVFMRRLHSREKQPYCVISIYLDERIFRRSPKRFRNETVIPILNDLRDPTIASARQTLTIGTADIEAARLLHVPLNSPVAEVRRIFTTQDRTVIYLGEVTYRGDFVRIDMDLRP

SEQ ID NO: 8400 - protein, 508 aa, BradyrhizobiumColbertium
MSADPSCRVLLLEAGGSDRNFWLKLPVGYYRTIYNQRYSRLFRTEPSEGSGGRAIVWPRGRVLGGSSSINGLIFIRGQHEDFDDWERLGADGWSYRELLPYFRRHERYRGGESQFHGGLGEFEVSDLRNDNPASKAWVEAGVQFGLPRNPDFNGATTLGVGTYQLGIGRHWRTSSASAFLRPIAGRPNLTIITHAQVSRVVFNGRVATAVEWISKGQVHRATADREIILSGGALQSPQILQLSGVGPADLLRKLGIPIVADSPEVGANLQDHYQARLIVRLKQRISLNDQVRNPVGLAKMGLQWMVAGSGPLTVGAGQVGGAACTEYAVGGRPDVQFNVMPLSVDKPGEPLHSYSGFTASVWQCHGKSRGQLAISSTDPFEQPRIVPNYFAEEIDRKTIVAGLKILREIYQQKAFRTLWDVEMVPGEAAKDDAGLWEFARNTGGTVFHCVGTCRMGRDAGAVLDPQLRVRGVERLRVIDASVMPRITSANTNATSLMIGERGAALVTA

SEQ ID NO: 8401 - protein, 55 aa, BradyrhizobiumColbertium
MEADLSSPAPIVDAGLRLADLKKKLREGLEKQVTTLGPEGPSFCSRERLFPASGR

SEQ ID NO: 8402 - protein, 45 aa, BradyrhizobiumColbertium
MKALSDVAHQICTVVAAFTMGPISQSENARSIEGLGLVNAERTLL

SEQ ID NO: 8403 - protein, 53 aa, BradyrhizobiumColbertium
MMRSLLLIFTVFTFLDRPVHAQAPENCDTALAKIAKKAAEMAIADHGTTRVRA

SEQ ID NO: 8404 - protein, 97 aa, BradyrhizobiumColbertium
MARKQAGKKRPTNKEFRKRFPARESAAIRALAANVRRLRKAREWSQDQLAGELKIEQNAVSLLENGRSNPTILMVEQIARVFGVQLSELLKTSAKDE

SEQ ID NO: 8405 - protein, 153 aa, BradyrhizobiumColbertium
MNLFELEGTLTAIGQNVFSNDGTVYAYLEITDATGRRTLVEKVGVCNDVGSQLMVGLSGRFYVDRFFRTGSLRCQLWGLKTERVSIVDSTDLRKTIAAVQILKGIPTIVVLGLGLILIASGVGLLLQCSRYDRRMFFGASAVPPALPTAAARI

SEQ ID NO: 8406 - protein, 165 aa, BradyrhizobiumColbertium
MKPQVVAICAIMSAAPAAAFDRTIYTATRGSGCVDRSTAHLSRSVSAGPMCFSVELLDEGNLAAIAIPQPGRITPSAYVWRGSDNVFGDRLERSLMAGTPRAVVLRIWRAENDATFQELGVLKVMPGGARRSASIGAKGPDANVLAREEAGLASRRTSIDIADRM

SEQ ID NO: 8407 - protein, 160 aa, BradyrhizobiumColbertium
MLFGQTVATWVHVEDQMIQVLQDLLGSRSAPARQIFHSVVSNKARQSLMLACLQKSEINRRKSDLYEEIILQFSKLNAQRNKLVHGLWYTHETGRVFLSESAVDDFHHMDAREATIEELETMNKGMGVLSQAIHMRKSPSIARIILAHAPERQRARVGRK

SEQ ID NO: 8408 - protein, 759 aa, BradyrhizobiumColbertium
MDRMAKRPKKIVRCFVSFCIQDGNAEELTVLIRELKKITAGNVEYLSSHELELGETISSHESALESADALIIVGTPEYKRRVDLRELQSGVGREFEIYLRRNDDWSRRNPVVAIPIVWKGTFETALPKQFESSERSIDLSNFYTFNADGGRRLAASSAKNVAGPIRTIAHRLLSLQQVAVDEDRRRQSYRDFDIDYFKRQKQEREGYESFREDLFVKTRQYLRVEEQEDYLLIGRKGVGKTTLISIMEKHQSFAAPIELVVDRWDVHGVGLTEYRKKASGDFLYLHRNKYEAFSLLWAAFIYLELLRAQRKLDADDFPVVVRREAEELLQMPPTEGKAAEFTAASELVSEFIRQMVELAPSGSRARFDAFLQRNLDIDSLLEWISGGSGPLQNNLSAIASRRHLLCLDGFDSDFQRARNDARRAGEATQAAVVKTEVDWLTAFIEVVESIKRPSGRAGRRTLGKLKSLTIVAAVPKDRFLEVQLDRRDSVLAAPTRELRWSGIELVSLLRKRIEVAGGFDTEASKMKGASPPERLKEGMQKFAPELDVSATVTVNGKSFEFDVFLEVLRHTLWRPRDILIHYAELLAVLKDNRRLKRTTAPSVLGIVIARTNNLIIEHEWLGEMRDHITNIDAVIKLFQNGPQQLEYDAVIERLSHLPFLFMHRQTEMSGQAKLAMLYELGFFGVRRKRMDVGNRHKMRDLFYHIYPEALDFGEKVLGNSDWIVIHPLFIEKLNLLPNVDEPVMNFSWLDIDEHDAAGG

SEQ ID NO: 8409 - protein, 418 aa, BradyrhizobiumColbertium
MQTDILHRFLDNRLINIGPDDERLARLRASAGAIAESIGTRPERVPRLAMVAFDPKVPADDPVMDEVAEAVSASWTTYTSAFADRPIVLFRAVLLEALRLSQEEDPGIAGSIALTARNLLPLVDLGREGAIWRDLTDRSERALAEGAAIRWSTAMKDAPAAAVLPTPAKPSKSDRKQLLSKVEAAVGPQNEKGETLTNPNTHWPNAGNPWSYMFAPRMANAIGEALDSAVEAVLASRSATDQAMQKAMQSFVGDALPGFLRAGQAMERKIDLLWWRQTMYSNTAQRSYRAMKPEAAAVQMAIDVFRATPPFSPASVEYFLREAVADALGEGKGRTASLTLKQIASSRFIKSEVVTGSIPFALAEGPGRRPMISVLLGAGEVEEALGLAGTTKLTLDDLAVWLLREAQAAALATGAKQS

SEQ ID NO: 8410 - protein, 320 aa, BradyrhizobiumColbertium
MIGQCPFSDCFAPDTSCVLGELHHDDCPEFKKSVPSGEQAASRIGADAMVLPWSGNTLGAADRSFVAARTNPRIIGIVGPARAGKTTMLAAWYLVTGRGASPEARRFCGSYTLTGWENIARSMRWSSGGAPSFPAHTSSGAGRVPGLLHMAFRNLRDGSIEDLFFVDAPGEWFRSWAVNRESGEAEGARWIAEHADAFLVVADCDALAGAERGGARNGLTQIIQRVGDERDGRPVCLVWAKSDVDVPAPIRASIETAADRHIGNHSTFSWSVKPASTGEGSKAFTELLSWTIASRGERYLRRAAGQERPSDHFMAFGHGR

SEQ ID NO: 8411 - protein, 276 aa, BradyrhizobiumColbertium
MLIGESNVGKSHYGGQLLMRLNQRTYALRMTAQPTNIDAFNDVTKALHEGKSAPHTSANTYIESLWPVVDDEGRAVDLEWPDYGGEQVRRLIDDRRIPVDWRERLLKAEGWILMIRIQRSAVEDDVFSKPLAEAASSDPTRTDAKASLQARMVELLQMLLYVRSAGTSRAIRDPALLVLLSCWDELGDEGEKSAPIDVLNRRMPLLASFVESNWRKGRYDVLGLSALGRPLDANRSDLDYVDSGPESFGYIVERNGRRNPDLSIPISRLASIVSEG

SEQ ID NO: 8412 - protein, 771 aa, BradyrhizobiumColbertium
MLIWIEPDGSAGRAGMVRSHAVFIPFDALDRSLDLERVFAALRQMPDRDVALQPFEATFRRERANDRPSAISVGLAEALVAAKKIPIVHLGQEGFDGAVLELLGRLPVPMRRQFSFRLSFGPQDIENDQQTVVATPPSLERRWHDYRIARVPSSIQGTPAVGMLLGLPEGAGLANFADALGTPVSDVRTLSLLSRAYELSRSPEASPTALLRLIDVLSPSAGRGIAIKARLLAAGAVAVGSMSIPQIRGLKNLPLAAFGATEDYWSAVRRRIPYFLKEDVVDRSIFATLKEALAGDAVEAWSEAVAEGFRDGASPLSVAAARAMWDEIVESASFGPAVLDLLPRDSATESTIASSLPSTLAEETASRLVPAVRRRKWLFLHGLLLAASRPPAEAVRMQLEVDADPRFESGVKAAISRAEDAEILAIALEMTEERLARLAAKACVRTPSLMAGFDTSGPAWLDIVLAEPGLVETIDRKRDLFDALIRKESRDAARWLPLWKALGTSAAADLSDLPARREIWHRIPYDVRPSFLAATADGWLASWQDGRNPEPATESELANFITDRSRIVPYLLRCIPDRLGSAVALFRQFERLSESLFVEWIGEIGSRMRFGGVAEADSQAIGDLVSMRFWRSAAYAVLDMARHRGDMMPALTRCQWRLDIFDTMSVWRLPSMRKPNDDDLWRILENIVADLYPGGPLENEIWSRAGGAMDVLDLAGNGRTRWRSALRRLRAGGGGTSGSRLVAEMRSEYPANRDLESIVAFDVFKPEEREH

SEQ ID NO: 8413 - protein, 358 aa, BradyrhizobiumColbertium
MSGRFEWGRALLVGVAGYSRLKALPEVVLNDVADFADVLRSENYCGYPPHQVRTLCDSEATNLALRNALADLASACRPEDTAVFVFSGHGERIEAGAGTGSYLCPVEFDPARPQETGISREELSAMLTAVPARRLLVVLDACHAAGSIVFKSGTQAITLKAGFSGADFERLASGTGRVLFASSREDETSMILEGDRNSLFTGHVLAGLRGAAPRGPDGTIGVLDLFKYASDSMREPSQHPVMKAELESNFPVALAAGAGATFKSTAGRAKEDSWWQRLERIAVDLYPSGPQEQLIWSRAGCQVSVLQPALHGRAAWHAALLTLKRGGSDADAPNRLVSTMIEEFPGSEALLKLQAEAR

SEQ ID NO: 8414 - protein, 637 aa, BradyrhizobiumColbertium
MDEPVGMTETTDARADNSGAMDADHAALAALSGADYVRDKLLSTLTMGAFDFSRRVYALKCRVKSKSKLVEKVRKKQQEKDPEYHAAKVTDIVGLRLICLFSMDLPNTVSEFLDYISLMQDPRLGLFRGDKLEDAVTEAIVYASPGDPAVYRSIYENLSTRLRKGAEGGVNCEMVPPSEDHRYSSIHLICMTNSYSDPPRQIPIEVQIRTAFEDVWSEIDHPRRYKGPDFAKVYENDPRLQGLADGIGRRLKDLKGQLESCSSSAEQIRKDFDLLSPMPAQLQAASEANPRILAKSWADAKAPEAVRRKLREIEESLTETYGKLYQHDRVNPGADFVELRRELEVAIEAIDKVGADYQKKAAAVFERDKTYKYYSNMEKGLAYYWLGRIDRDQGMSGWSGLNETALTTYFDLQASLAAPDPLLSYRIANALKVTDQLDLATEKLQEAVGALGSDQRLATDSVYRAIIPRTLGYMLWQRGQRHLKLGTTLGHPGTFGKEARQLFLQAILVTLNGQKNIGTLKKEDADSETVKFQGNLLAYSVDYLSAGGSSEDLKANGIDPETLFEQIEQFERAADGNAARLDTCTRVYHLLGRREAALRTVKALEELLRDEKSIKVSYSSDSIAYMKDTVALIRGMS

SEQ ID NO: 8415 - protein, 441 aa, BradyrhizobiumColbertium
MNETMRTFRDHFLSVYQSAAADYASKLEEEESVAPGGPSTSRKFVEAVEEVASSRSQDLSEVAVVEEGIADIPKICASLGFRYLEALAMRDFARAERIKEQMTGGTCDPKWASTLAEYVKYFGVRGTRAEIPYVRPATIGSRTIPIPAGARIALFGDWGTGAAPARRILGLIKQQNPDVLLHLGDIYYSGTGEECEANFSGVIRDVFEDAVPTFTLAGNHDMYSGGGGYYDLIGKMNGGRMKQESSFFCLRSEDSAWQLLAMDTGLHDYSPLSVTDALTYVEDDEQAWLEERVREFKGRTILASHHQLFSAFSQIGKPSPGGKLLAHNPSLLALLRKLQAVGDIAAWYWGHEHNLCIYGSYLGLDRGRCVGHGAIPIFAEEKPYKVLKGLSDHPELIKSTKLRVNDGAYEHGFAILSLGKIDGKTRAEYFTEGGVMYAEEF

SEQ ID NO: 8416 - protein, 709 aa, BradyrhizobiumColbertium
MSNLSATLDASIDASRESQGPHMSKEGRLLRLRQFNSSVRLADPKLAEESADLGRMMLPEPGPETAEVKEGVQRLPEGGDVDIAIAEESIVMRRFRPVLAIKDNQSELIFKDREEGTLWEERLKKATPVLEPAIRAVGRIDLVRADLEWVGTGWLVGENMIVTNRHVANLFASRSGDGFTFKMGNGGRIGAAVDFLQEIDSDRQLVFKLVRPLHIEPASGPDISLFEIEMVAGDAKLAQPIRLARAPKETNGIAVIGYPAYDSRIPDLDLMESIYGKIYNKKRLAPGAITRLEATRLFHNCTTLGGNSGSVLIDLDSGEAFGLHFSGTFMTTNYAVRSDVVAKVIDDVAKGRPRWEAVKPENRSRSTRSAPRVPAPPSRSVSLTVPLTITVSIGEPGAAERTVEPPPTAIVSTIDDEIEGTEAVAADYSDRQGYVPGFLGPHNVVDLPVVERDADDVLALTDGSGSELKYEHYSVVMSRKRRMCFFSAVNIDGKKSLKSARVGWKWDPRIPRSQQIMNECYGNPPKFSRGHMTRREDPGWGDPETAKRGNEDSMHVTNTTPQMQAFNSPIWLALEDYALQHAREDDMKISVFTGPYFARRDPTMYGVRIPVAFWKIIAFIHDETGKLCATGYEMSQKSKLPEEEFVFGAFTSPQLHVATQVSIRSIEAKAGITFGRLAQVDPLETDDEGIADISDREPLQAFEQIRFVR

SEQ ID NO: 8417 - protein, 112 aa, BradyrhizobiumColbertium
MALLCCPHIAATAKHADGRPIAVERVVESSDRKMIALSDIGPGDLWRPIEQSCSKSGSVDTERFHVAVTIATDRDETSIEIAFVAREVFQSTTGIDVPPTEGSGGYDGRLLP

SEQ ID NO: 8418 - protein, 474 aa, BradyrhizobiumColbertium
MSQSNTLTVSTGPLAEISVLDGSMNTVAQAVGDLSSQLAPGIYKVRVRNGPGVAERLVSLDRDVSVDIPPPPIFTPIPLAGTARTDALAMHRAMTASTQPTHEFGSGAGLFVFCRDWNAERRSVAANPAAGLSLADDDGRILVDLGSLYDEKADDPCVAMCATAAPGPYRLRLKYADGTVGERALFASPGCQTQIFLVLAPERPGSDVRLPDIAGGAVVISRSFGFDGHDRRTELGETARYALTQKRKVVSDQLRDEIVNEKFGDPMLGLLGAHLLLRDEPGNVLLFETVTGNLLRLLGPDHPDLRALCLRRVTPLPQVPRSLDTPPMLRASWDIAVAESLRDASSFPEAAKVTAIADKVLPTGSWLIWKWEAVVESATGTASGLSSALAQSLESFVSARARLEAARRANDRGVFGKLSNSAIEAISHSFDRLRGRPAPKPPMPTLDVEDRAELSRVLGVPGPLLDSILKKIFD

SEQ ID NO: 8419 - protein, 353 aa, BradyrhizobiumColbertium
MALADYALVVGINVYPGLTSLKGAENDARDFYAWVTSPSGGKVDRANAVLLVSSDFGAFAGAEDARPAAKEIEDFFTRIDNAAIANNRNSLGLKAGNRIWLFFSGHGFAPTLDRSAVLLANATSSRIHNVAALLWAERLHEGGWFDDVFLFQDACRSPMTDVDLTPPFLKKKIAPLAQVRRRFYAFSAKNRQISKELPLGGARMQGVFTTTLLQGLQGKARDPGTGALTAAQLKAYLQDNMIKLLPPEDLADDEIAKMPEVVNPDPFDILPPEAGQVSTFPVMVRFSNPGPPARVENSAFVAVASIAASTPEWSVSLPRGLYRLVVEGVGDKLFQVTGAVASDDSGKVVDVAI

SEQ ID NO: 8420 - protein, 231 aa, BradyrhizobiumColbertium
MSDADRAANEQWCFAWFEAAPPKSGTERAALVKDSKWAPGATITIAFLDGTDRQKELVKKYAPGWTDGLANLNLSWVAGTTADIRISFRFKGSWSVIGTTCKHVPANRPTMNFGWLTPAVGEDEARRVILHEFGHALGLIHEHQNPDQPIQWNEPAVIADLSGPPNNWDMETIRHNMFEAYPRNEINGTTLDTRSIMMYPIPSSWTLDGTSAGMNSDLSSKDRSFIRQQYP

SEQ ID NO: 8421 - protein, 53 aa, BradyrhizobiumColbertium
MTSVTIAAFSNRARAAHEDPSGLAYRAALGIFFTRKGVVIRRRIGLIYTWKPT

SEQ ID NO: 8422 - protein, 349 aa, BradyrhizobiumColbertium
MNILDSFPFPTDQPAAQELMRVLASLYRTEREAVLFTQPFGVDPLKVTPNLSPLLLWDELLKALAAQGTLRAVVEAAHDQFPKNPRARLFKELLANRKTESSAEPIDKLGPSFDDAVSEPEALLFFDDLTMPIGNVPKLVATLEKMFRTAPAVCLLRVENEIGEFFGTGFRISADTVLTNHHVLFPKNVVAKRLFADFGYEADSDGAMAAVSSLSGDVGTITGEQADDWATIKVANLRPEWPIVQPDTAAVPANGDLAYILQHPGGRQKRLGFVRNTITEVNDRVVRYLTDTEPGSSGAPVFDALGRIIAIHHAGGRPQEVLGRPPVTKNEGIRASRVFDRLRSVGVLP

SEQ ID NO: 8423 - protein, 339 aa, BradyrhizobiumColbertium
MLAQEHRDLLIQTVSAVFPVEGHFRVLVNATRANSYNKIVPTNTAPYFAIGMVVEAAEAQGWLRDLVRRLRDANPNRPEFARILEELNRLVPFSSAASPFDEVLLHSGRPFVNRRSLRNHLLNLTDPKGPSILLIDGPRQTGKTFSYYLINHVAPCRGYAVSRFLLGRLPRPDELASEILGRIGVEKALPPIGLESAERWAEKLADVVARAIEDRKTPRIFVFDEFSDTPLPAGTLSLILRLTTYSDEELRHLLRIVLMRFPSELSPEMDEVALRETVEPFSSRDMTVAVSQVAKANGWAVSDQAISEKVDEFCGVPGRTLKDRFGFLRRLLQELGAAA

SEQ ID NO: 8424 - protein, 1888 aa, BradyrhizobiumColbertium
MERLQGAILDGFDSTSLRTALHPVVRWENLSPHKPLAIQIHEILRQADAEGRIAELVERALRSNPNNPALSEVAHELGVKSVASREIVKSVRAYSSRLDSEIARRRLIEIERQVCLVETESGATGTGFLVGPDQILTHATVFAAGNVMPEPGQTASIAFSDASPSNQFPRISCRSTFASRNLVILQADRDIGRERSSFDTTSVSARARGWVAPSEGRLSVEDTVVVALWDEVERIRFSQGHVVRIDGNKLSHTANMTPGSAGAPIFDDEFGLRGISSGLHPLVSHNEAFSIEGILEELASAGFRWSLSGGITGTPEAPHSQEGGGLDEVVRNLQIAKAAVQDPEDDVWNNEDGETDADRWEWAEAAAVTAYFDPDKLVPLGEPSINGRVSLLLESSPARSRTGKQLWILPEQLRVRALERLSNRGELKLLRSKNSNHSDDFTDLLLGAFIAGDGARAFDPQDPDHLRSAVQVVQWLRKTDIVLPSLDELRSSLERATLLGPFRHLTSGFFAGRDTELKELTSYVDGPDSLADGTPRRPILLYAPGGMGKSSLLAHFILKNSERDVLDPERWRPFVYLDFDRPELDARDRSTVLLAIVRYLAPQIPEIATLGNSLVQTWSSRRREGRSSSGAAGAIAGGRLPRLTEAQLMKLMADTAEFLKVAHEAKPAPLLLVLDTIEEIQYASPDAVEPLARMITQLRSMVPWLRPILSGRVEIHSIAELEHRKIEPLEEAAARDLLKYYLPEALSRKADLVSRLVGTVGGNPLSLRLAAEVLSHETEESLGAVGEVDLWKRVGDAIVQGQLYERVVSHLHQGPVKKIAVPGLVLRYVTPELIKDVLAGPCGVEVEDHATAESLFAELAREIALVRQGDEPGRLVLRPELRRTVLENFRSDTRSAATRELIHAEAIRYFSAKPGAENRAEEIYHRLWLGHDFETIDARWLRGIELSLRSAAEELTGEAKIYLTNRIGGLDEGAIALSAPLSEWEIYAAKRASDLLQLGDASSALEVLAHRQERLPGSRLYLIESVAQRSLPTPDLTAAEVAAEKAVLAARTNKDLGEVHKALEELIEIKRLRDDPAGVLRTLVELGNLGEQLGDDLILLQAEVETLESASARGRPDRRLSEAAIRVFSRLPDELISRGPELCRRVAAQVGGTSPEILKRVVRLVGFGALGPEASGELHEILKDWGKTDPEVDNVVRGVMDQKSIAAVAQHLVVAKQLDGEVASRLSDWLQGIAVPDAIRVAARRTADKEENKARGQQAILSRYNESLLEFDPALLQEAAEIRGYGSVSSVAVNDEIELESIVLRRSRPVLALKNNLPQLVFHDEADSEIWRDRLIRATPAIERAAKSVGRIDLIGGELDWVGAGWLVAENVIVTNRHVAQVFTQRQQVGLTFTRGPAGPVGAQIDFLQEADNPNTAAFRLIKPIHVEPHGGPDVAFFEIESSGRRAPDPLTLAKRIEQNPSVGLIGYPSYDSRVAETDLMERIYGRIYDKKRIAVGAITAVEEQNVVHNCATLGGNSGSAIIDLETGEALGLHFSGKFLGNGYGVRADIVGRLLESIRSGTGRRGQGNRSDRSFKAERPDRPSSDMALPKDLDRTEGETEDASEYSDREGYDPAFLARRQIRLPEVVRSRDDLLWFGFDGTAVSELKYTHFSVAMSRSRRMCLFSAVNIDGDQSRKTARFGWRWDPRIPRSAQIMNECYGDPPKFGRGHMTRREDATWGDRRSAVQGNRDAMHVTNVVPQMQALTSPIWLGLEDYALEHAQQDDMKMSVFTGPYFGEDDPVMFGVRIPLAFWKVIAFLHDETGELCATGYQMEQHQILGHEETVFAPFDPPRLQVVSQVSIKSIELRAGLQFDSLSSFDPLKDEIEEPDESQARPILLQTLERIRFV

SEQ ID NO: 8425 - protein, 90 aa, BradyrhizobiumColbertium
MTLQEAAWLFWPMGPLTTTSLRTAVRDRRLDVAEIAGKILTNKDSIQKMCRCSARTKDTAPEASAVPAESGAGMPRSVAEYRRMVAEGRL

SEQ ID NO: 8426 - protein, 311 aa, BradyrhizobiumColbertium
MWYETVREELKKARQTGQPWHALAEIMRRILEAVGADKHGQVWRIAARETGLSEVMLRRYLGALDRLQAIEKEAGLAAGSLLSATFAPAELALRLHSRDPVAGLKALKDLTLRKVTVRDIRKELGEGGSPDSDAATRGRSIRDRGVLVARCERLVASEAAVLFGDGATSRRRPSARYFRRLGFEFRDPACALLGGADLYLAESGGRDPLDGLAQSVVLAGFLPAFYVVVGPDLDAVDADRLADALEALDARFVGVLLLRDDGPAHVVRKAEVDPRRAPPEKYPALLKLFASGRSPTALVTTTLGDRMPTSG

SEQ ID NO: 8427 - protein, 165 aa, BradyrhizobiumColbertium
MTKQIPTFSNLQDLPILPDALHSLSAAPSPHPEPPLRHGILEIPVPGGAETGIATVLAAPIRLRASSTSALPPVPTFERRPIARGVAIATEPALAYLAWARGRSNEKPAFVSRAPFAKPRAAAHGVEHTGILELSHRPTGSSTASPSPAAGTRRPARPSQRGDVR

SEQ ID NO: 8428 - protein, 541 aa, BradyrhizobiumColbertium
MGMHFSPVPGFVPLGYIQPKAPPDDPELTVSQMALVTPYATASHGKHELPAEAPKGLIPASGIIVTGGEIDWVEATTRFLVWSGHKIESARSIADVAIALSKMKRGRGRKRLAPHLFPRGDYIHMTDGWDRRTTGCPLIEGKDYRDDVGANAALAEMVEKRVRKILGRVLKKDVKVKEAFAAYLMHFKPGARPDALDEISHGRIVNDLAHLESFMGENTLQDIGYSTGVQYVEYETAQAIVNRTSAQEDLSEVRYVARSTARRRVVTLVKVLDWYCGGENRIEPIKIKIPKVPRTSVDFLTVEEIVRLISAARGRIYDRHGNVVGHHDKRADYECVVRFILVYLYGGTRHANILFLTWGQDARAGWIDPNLGIIARQGPLAPITNKGRDTSPLIGSLVELAARWYAEDEALRRQHPGRYVHIIHDAEGFPIAKKNPKHAMDAGKRMNALFQEVRELAALPHARPHMLKHSGVTYCVRAGMPVNDVENAFSTTFITLWTYYKSLQPWLRKGPSQPYDPSRLKLLALRRFSSKSKDKLLAKAA

SEQ ID NO: 8429 - protein, 771 aa, BradyrhizobiumColbertium
MLLRASFWPAARFATDLDGEAIAAACALMGLLGIPERAIPSIEFDAALPEDAPATIVVPAGGRLEAVRLPAAAKLLVARWKEKRPTGIASSRLFVTCVGKELTIRDFATHLMQAGEALGLADHLGTCLRRFFVDNFYRHGDHVAADAVVLERHLLRFDGRASARTQTAAERRMVALRTDCFPDAGPRFLSDARAIEDARRLGGELPDSYEGCFRPKVDKSKLRLPHDHPLLADLAATELARSKKARGEQLLEIYRRHRPDLDRRADDGTLPRRLAAPIFGLNYNNYLALVAKAKRVSGELKPNPGPRPPPPQRPALSEKEAERVRRIEEIKDPGEARLPDFRFSLLRRHASFVFDLQRSGKITAERGAELLRTYKRTFLRMKSDHDDGIFDHWLRPRPTGAEARKWVALVREHHARREKGLSDADFIRWLRKTHRLPLSDQSAHAAMYPRRREKTVRAAYAKPAPTTPAASETAQLEAIAARARASRQAGKGDRNVRLGGDAPFVFGLVRAGRLQGKDAARILGIQKELSGELYRLYLEDDLALALKTHSRAEQNRHRELLLDEMARRGADKGVAALLRDIRRRHRIYIQRNTATAILQRYEREHGRKPPGFAKGARGIRPDVHPSAQERRRLKDIAATHWEGAADIDTLRRRVMKQHGAFLVDMVSERKLSCASAARLTKLYPSQFSEVRRDFARGQTARHCEAQPVGQERRRQEDIVVREAVASAEGERYGDFVARLGADITLGHGRIRILRQAALQARLVAGARHPEA

SEQ ID NO: 8430 - protein, 56 aa, BradyrhizobiumColbertium
MARRRQETHTEVTITAKGMRIILPKTDDLSPLYSRRQVKGIIADLQSALDNDLFCA

SEQ ID NO: 8431 - protein, 956 aa, BradyrhizobiumColbertium
MVGSVHADLGLVEFWRKRNAPGWAEKTLALARKHDDVPELKLAAAIAVLELALGPDAFIGTPGTFTRAELEGAAGEMLAMAESCLSNGFADRHDLLAFVNNAAVLLRLTGRQTECESLLVRALPSLPDQPQLRRLLALAQVAQGRFDEAEVTLRGDPDPESRLFAAEIVARRDDKEAIKLVEAVEPTGRDHVAELKWRILGDLALRVRDYDRVELAIANLADLPGAKVAVELLRLRRDVRLGIDADERHARLKELGSTEFTLGHNLLRYLVADEMRNQRLPAEAADLIEPIVELQTRNVATHLYLACLVESRRDEAFPAALAKASPEVRNDPETLWLWAIHSWNIGDLPESRRAVDALLVYRPDGAAARLLKIEILIRSNEIDELLPELDRPVERLGFNRLSDKLRVASLLGHFGRMSRALAYAYRLLLENREVSQAWLCFQGLILCEGTKLATSGDSWDTEVVCENAAVDIEYDDGEKQFVIVESDAALRRLDEDSWEPDHPLIRRIMGSSVDARFTNPTTGKSGTIRQIRHKYIAKHHFVFANHEARFPDVPAFRTVSLDVSSPEGLAPVLEQLKARHDFAAQEQDNYRNGPWPLAIFAHRVGCDSIEAADGLAAQGLQMKVAVGSEAERRTAIAAIVSNGAVGCVMDLLAYWMCWRLGALGAISETCGTIHIAQSTMDQLLARRERIAYSVRAGMKSMRYDEGKMAVIEVAPEVVKSWLTDVEAAIEWAKTNAFICPLIVPEKIPEVLREFLRDGPWEIFDSLVVAIQKDILLVTDDAPTREFARRFGFDRSTWLQPAFMVAANRNKIGFENYVKWTAHLIGAGHNYICVSGRALIRAALIDFEAGECPGYYFRRTARMIGGASADPTSHIRVVIEFLRHAWNDSSALRYREKTTGFLLEQLVRERTSDHGRILRTIVRAAAGVPDLIEYLTAWLRGHFIDLGRTGTHDARRK

SEQ ID NO: 8432 - protein, 165 aa, BradyrhizobiumColbertium
MPERQDPNGSTKATDAVLDIESELRAEGHDLKVILYSWSDLELKICQHPAALSFFFPAAVASTAAQSLRLDPGSISAIAEAVERMRLSNNAVIPADVKAPADNSEDPVLHAKIDLWRDLFRKGNSLAVARDGLLELHGEPLEQAMGQIPHRDQSRRHRHQIGQAG

SEQ ID NO: 8433 - protein, 232 aa, BradyrhizobiumColbertium
MSEDQLIDGEWIRSRLRSHRRTQRDLAAALGVDASAVSRILDGHRKLRADEASRIRSFFDPGAEPPVAPPPAFRLGPLAGSAGPRRGPPPRQRGTGDIPVFAAPSGRGEPFFEFPSGPPMEYRPRPEQLLGVEDAFAIYAPGDILAPRYRAAETLYVHPRKPPTVGLDCFVRMRVPDRAVAMLRYLGSDRTVLGFSAVSSPYPAAAVPQAEIVTLKEHEVLLIGRIVLVAAG

SEQ ID NO: 8434 - protein, 350 aa, BradyrhizobiumColbertium
MFLTDVGGRVPFTRDDPFFQTTPDRIDAHVDAFVNKLGCRSVSFVRVKPFAGAETGFCQRNVAECVALYGGHHAYGYALWKNPLFLMAEVHSVWATPDGELIDPTPTAEGETRVCFALDPSLSTAFDGARPPPNRAMNIVDKADPAEVAQAVAGLSPARLDYERRRADRAGLDLETYLATKLGRTELSSAVDAFIAASEARDLLATPTPTRFLSHDPQAFRSAQLKVCQLEDRIRRLLATRGGETSKTTAAPPARAAAAADGRPTVASGFDGLIAALLDPGFDMVAVDLAPSGPKVLYAGRLERDPSPGSVTGHRSDQEPFAAVAQIVKTRLGGEGRDRDAATSAEKSSS

SEQ ID NO: 8435 - protein, 224 aa, BradyrhizobiumColbertium
MLPQKSLEGYVPVFSGLRSPVWAPLLSEPRERAAEARALLQVHDEFDTYDFLNFFAASSDPARHCAALANSFCDIFSVHLALKFGIPHGARFGRYEEESDRIVGLVPLGFVRWLLGRCAQKRHRPLDGIKPAEFEALWDFRFEAGDRHSEEVSRALERMDPVAVGKLLPAFSSPGIEKKAIRSIATDAAAHAFFVSIDVDKYRAAKERRRREKHAFAFARLGYA

SEQ ID NO: 8436 - protein, 143 aa, BradyrhizobiumColbertium
MDNTSTIDHAPPAPDGWRSVDIASPRPLGGPSYTMMARRNGGEERVARYVSLAQALIVALEHRGGCEAAMVYRDRGDLREYVIGRRLTGANTFEPVLRGVVPRTARIATDHIRALEFFEEVLEHDARVFFDGRLVRDPPARPV

SEQ ID NO: 8437 - protein, 200 aa, BradyrhizobiumColbertium
MQPETERAPGGLSKDEIAEIFSGTVGASLLCTGLARSFCERSDEEMSDRLGFRLGLKSVELDSPSEYNFTTDRILATMPLRSEKKLFSASMGERHRRLNDAIIDWFTPYPGFAPYYSDYIGEWIAKLIAEWDRNELCVLLDSFVDTDIDEEIYHAFAEGDAYGAFEEFVDWKRFDEEAAALRRAKTEAFLKDLEFDGESS

SEQ ID NO: 8438 - protein, 75 aa, BradyrhizobiumColbertium
MALLDRSFDMVAVDLAPSGPKVLYAGCLQRDLSPENVADFSAQEPFAEIGQILKTRLGDGSRDQEAATAADNSSS

SEQ ID NO: 8439 - protein, 158 aa, BradyrhizobiumColbertium
MAQDVGTGLGATRLGFLGGTALVAAGTLFGNMLPDGIAVPAAHAQAAGGAAPAPAAPKGPQYLKFPGKKLSVSIRAVPGTTLRKIGLEDASDEPSAIDGVFAQDTPLAMQRGGTAPAPCRGSLGVEHREPCGLIILELPIGEPHGDQLEELSAAVAAS

SEQ ID NO: 8440 - protein, 459 aa, BradyrhizobiumColbertium
MNASEIPTIKQASQEIRSRSMSSVELTQACLGRISAYDAALHSYILVAAESALEAARRADAELASGHYRGPLHGIPIGIKDIILTGGVATTAQSGVAPRYDSNASADVVTRLVDRGCILLGKQATHEYAIGGPSDDLPWPTPRNPWDTKRYAGGSSSGTGVAIAAGLALGGIGTDTVGSIRFPSAMCGIAGLKPTYGRISREGVLPLAWSLDHVGPMAWTVEDCAILLQAIDPLDDATPNGSGDFLSGLDKGIKGFRIGVIRHFFDTDNPVDTPTLEAIESTLDLLRRLGADVRDVKLSPLHDYAACANVIMLSEAYAIHRRTMQDRLDDYGEFFRDRVSMGAFISATDYIQAMRVRAQLLAEMRSLFDRFDVLVSATVPFKAPPIEDISKYAPFERPFLTMPFSVTGLPALAVCAGYSREGLPLSVQFIGRPFDEVAVLRTGHACEKATAWRDRRPSL

SEQ ID NO: 8441 - protein, 67 aa, BradyrhizobiumColbertium
MKPESKQPFSIEAWRLAALQSNLHLTGAQQAELARGLELLQAMTGRLHGRDCHSLEPINIWHGEERP

SEQ ID NO: 8442 - protein, 410 aa, BradyrhizobiumColbertium
MSSTTKFMAQRAASAALLICLTATLPYSAVATEFSNGKVKIGVLNDQSGPYSDFGGKGSVLAAELAVEDFNGKVAGIPVELIAADHQNKPDVASAIARRWIDTEAVDVIADLPVSSVALAVQEVARQKRVITMTQATSSDLSGKACTPFASQWADDTYSLSVASVSSLVGEGIKTWFFITADFAFGHALQRDASAAIVRNGATVVGSVRHPLNASDFSSEILRAQQSGSQIVVFANGGSDLVNALKQSADFGVARSGQKVMGFLIYLTDVHSLGLAAAQNLLISSSFYWDRDDASRAFAKRFMAKHGKMPTREQAAVYASVVHYLRAIQQARTDDSEAVRKTMGELPVSYFGRSAELRADGRVVYGSALYRVKSPAESRYAWDYYDLVKEIPAEQVFRPLNDNDCALVAK

SEQ ID NO: 8443 - protein, 305 aa, BradyrhizobiumColbertium
MRSLLPSLSAIRAFETASRYESFSRAAEELNLTQSAISQQIRQLEGFLGVSLFERTGKRVVLTEAGAQYLAEVLPALDRVESATARLLTSGQVDGIINFGVMPTIGARWLLPRLPKFLGRHPGVVVNFTSRIYPFDFETTNLDAAMHYGEGVWPGAYAELLMNEDLVAVCSPQLITKPAARPIEHLERCTLLQHTTRPLGWQQWLEQAGFHHIDGRRGPKLDQFSMAIEAAKAGLGATILPRFLIEDELASGTLVMPVDITVRSKSAYWLVYPESKSQSPALRAYRAWLLAEARRVLHAGAEAVG

SEQ ID NO: 8444 - protein, 184 aa, BradyrhizobiumColbertium
MPFCGRADWPKDGSKPGSDLAMVQRGAFDQLGASHAICNVIYGAQAVFDPYMATGFCKAINDWIAAEWLDKDRRLRASIVVPIQAPDLALEEIERRAADNRFVFILVLAQGETLLGRRHYWLIYQLAEKYRLPIAIHAGSASHGAEFGRLGVLPLRILHLGGAGVSGAGSEHDLRGCIRQIPRA

SEQ ID NO: 8445 - protein, 132 aa, BradyrhizobiumColbertium
MIYEGVFGKFPALKVVLMESGVSWLPAFMWRAYKTWRGVRVEVPWVEREPASIIRENFRVTMQPFDAPADATAVEDILHQIGSDKMFLFASDYPHWQFEGDDPVPPALPKSLVAPTCADNPLETFSRLKLDA

SEQ ID NO: 8446 - protein, 45 aa, BradyrhizobiumColbertium
MAARLRPCAVIFREALEHDPRVFFDGLERAKDRTRRRANIVGGAT

SEQ ID NO: 8447 - protein, 57 aa, BradyrhizobiumColbertium
MDAAAFERVRTSVNRLRQSGSAAAPLPGHDPFDFASNNSSGGLGGVEPHPGGDPFDF

SEQ ID NO: 8448 - protein, 56 aa, BradyrhizobiumColbertium
MRALADAPLVRLFAADVPRLRPGDLVRFAAAACRDFFGRDFLGDIRLSYVRVRPAA

SEQ ID NO: 8449 - protein, 325 aa, BradyrhizobiumColbertium
MRQIRCETRDAVKATLLDFLRFIGSGLFAGLPEGVRDPVADRLVALYEEKPELMDKFNSSYFPGPRYVRERAAIDLLMKAGVAYTFDFDIFEDNDIGATVNLLRDINPSFTAGIEGHAKRRRQNERKFTVTDTFGFLLANLNAAEVRGIRYCSGQIVGPNYVYPIAGRVGVDRSVKDFARMLLFENLGGKDGAAGAAPTMTDDLIFTTTLTLEGTPKLVFAPVGTLLRVANASLDLNVGRSDKHQVTIGLAVDIGGVDSVRGFLFSAGRGSSTALIAGARVSPRRPASVVYAGQRVTGGGTPSEVLAVIAIDQQKSKEFKLQVAP

SEQ ID NO: 8450 - protein, 133 aa, BradyrhizobiumColbertium
MMWLSEAAVRDLGADMTARFPARHRKWGKALRPAPWSNGRFVPSEFVACVAVGPAPKSQDPNIVDPMFKIQTGPPEHAAAIAEAVSGGTRAPQKAAEKRVVDPRQWHDDVDRGDRIALVWEIYGCLLKPHPAG

SEQ ID NO: 8451 - protein, 141 aa, BradyrhizobiumColbertium
MASGPNERLEGEKMARSHRIFISFAIEDEWARIRLGGQAKNERTPFDFVDMSVKKPWDEAWKTQCRSRIKGCDGLIALVSSNTARAAGELWEIKTAREEGVPVMGMYITEDNRPLWLPPELSGVLVVDWTWDNIKNFLNRI

SEQ ID NO: 8452 - protein, 319 aa, BradyrhizobiumColbertium
MAKRALIVGIDDYQNVTPLHGCGADAKAMAEILRKNDDESPNFDCRVLTSSDSEPITRPVLRRSWTELFRDFDGDVLFYFSGHGYPTELGGYLVTLEGTPDDPGLAMNDVVQLANISKARSVLIVLDCCHSGAVGNYGNLQSGNQAQLREGVTILAASRPSQVAFELEGHGVFTNLLLGALRGGAADVRGRVSAASIYAYVEAALGGLDQRPMYKSHAARLEPVRICDAKVEDALLRQLLVFFPEPEFEYRLDMTYEETNGAAKPEHVAIFKKFKLLQIAGLLKPKVGFDLYWTAERSGYVQLTTLGAFYRHLASAGRI

SEQ ID NO: 8453 - protein, 158 aa, BradyrhizobiumColbertium
MKVFISHQRADSTLAGNIAHRLRIYHQIDSYLDLIDPEASTVGDKLGEHLREQLGLCTQLLAVVSQNTKSSWWVPWEIGISTEKDQPIATYAGDNTVLPEYLRKWPYLRSNAELDEYAQASKAAERTFTRERPFKVEAGARRTATQQFYRDLRARLGQ

SEQ ID NO: 8454 - protein, 255 aa, BradyrhizobiumColbertium
MLDVETTGLDPSTDEILELAMLAFDYSTDGDFIASVARFDRLRDPHRPIPPTVTALTGITDDMVSGRSIEEADVEAFVAPASLVVAHNASFDRPFCERLFPRFAEMAWACSLKEVDWAGEGFDSARLSHLAYGYGLFFDGHRALNDCEAALELLSRPLPRSGISGLSALLRSARQPRWRLRAVAAPFACRETLKQRGYRWDPGDGGRRGAWCTEVSEDMIQSERDFLCSDIYRRDAVIDAKRLTAFERYSERSHE

SEQ ID NO: 8455 - protein, 726 aa, BradyrhizobiumColbertium
MREVEAVPKSTESTPAASPPAKSERPNGVIPLEIAASTGSSRDEANAPPKKTGGGGFAGLAVSPKSRSSGEDDAGPEFDLPIDDADRDPGQAELVSSSHGDPRKAMVAAVMGASVSAQMLEALQSSSPLAVVVAVPSADWIAAVNRFFEDAPHGRRWTCFARDGSERTRHKTTVGNAEVASALAKGRSVVGIAVSPDQVLPSTLLAAADFRLTATLGRHVLERIIRDMFGEAPLDVDDAELARLGLDDLVAAMRPSSDAETVASRIAAAAEVRAGRRGPEEVPELATAVEYGAAREWGLALARDMSDYRSGVLPWSAVDRGAIFFSGPGMGKSVLARSLARACKASLVIGSIGEIFATSSGNLDGVIKSMRELFTRAVAAAPSILFLDEIDGLPSRESLDSRNRDWWMPVIEDFMLLLDDATSGRREGVVVIGATNRIGAVDAAILRPGRLERAIEIKPPNADGILNILRFHARGALPEEDLMAAIGVMEGFTPAEIMETVRSARRKARHAGRDLSIDDLTAAALPELEVGPDALRRIAVHEAGHVVVAEASCPGQVMSVRIGGRGGIAGLTRLDPLSDDLATREAIERAVVGVLGGRAAELVVLGAASIGAGGSENSDLAIATRMLAAMIFSFGLSDEELIYLGDAEDAGRDIRRDPAARRRVDEMLKRLQMRALEIVDRHRAEVVRLAEVLSRRRFLSGTEIRSILSGGQPAAEHAPTDGIRVG

SEQ ID NO: 8456 - protein, 260 aa, BradyrhizobiumColbertium
MNFQIMSDLHLDVQGSAGAPPLAAGVDAVIVAGDTCEGLVQAVERLRHAYPPPAAIVMVAGNHELWSKRLSFEEHFEEGLAAADACGVLLLENGVEVVGGVRLLGCTLWTDYELYGASSRQAAMRSAADQMLDHRRIKWSRDPWARFRPAEARMLHQRSRSFLERELARAHDGPTVCVCHHAMTLDAVAPSAQRNVLSAAYASEMLPMIDRFQPDLIVTGHTHHAIDVRRGKARMVSNPVGYPGEATGFRPSFVVRLPAT

SEQ ID NO: 8457 - protein, 147 aa, BradyrhizobiumColbertium
MRTKTRSRWRAASPSLIGTRSSPLRWWRTVAAQNFHPPALGVMKAAAAKMEIFGEARWRTAIDGDANCAIAIVLSMGPAESSLHRFDLAMTALVICACGGNAAACLVLSHVIRRLPGARRREARLATSWLVRASRPLLDRAVSGAAP

SEQ ID NO: 8458 - protein, 190 aa, BradyrhizobiumColbertium
MHAETVRFRIVGTKRLLMSSSRLADPLDPIAKDLARLTSKRRKTESDHKEISRVEWNGCLWLHAGKPCIPAEALSATFVAAAKSRRRGKEAAAGLVVDENALLRYDGPEDLDELWEDARFRLRVGVKVKTARTMRTRPCFPDWRAEFEAKFLPTLLNRDEVIETFTLAGFTRGLGDWRPQNGTFAVEVLD

SEQ ID NO: 8459 - protein, 105 aa, BradyrhizobiumColbertium
MNYRTYIASTRWRTNPARLAELAGAGGRCRICFAGTADGARMEVHHATYERCGREVDGDLLTLCSDCHLEVTSFLARRRYENRTPRRADVVAVHDLRRPLFDPTR

SEQ ID NO: 8460 - protein, 164 aa, BradyrhizobiumColbertium
MKVGITGHQKRKGVDWDWVGETLKLELARLTGVTRAFSSLAVGSDQVFARAALSVGIPVMAVIPMDGYERFFAPHARADYRSLLALCDVTNLRWTGDEQEGFFAAGKFIVEKSDLLFAVWDGENSKGVGGTADVVAFALAKFRRVIHLDPISQRVTNIGVGRHG

SEQ ID NO: 8461 - protein, 106 aa, BradyrhizobiumColbertium
MENDAACLEQGDIAFLVGRDFAERMARPVRRLLQLIEREEANVVGLSDFLERPTDTHVARMSMALVRRPFECGNGRDHCRAPSESEELHSCKLDVVSLASLRQGEE

SEQ ID NO: 8462 - protein, 201 aa, BradyrhizobiumColbertium
MDYQDKEALWKIMASHPDLKDSVGEQKCLGTEPPKDAPQLKGQRGVNIEGLAARKGSLYFGFRGPALGSTAPILSVDAKALFDSSDPKADVTFLKVGTGRGVRDLVPIKDGILVLAGPDDDKANENVRWRLGVWDGVPGDNPDYKELAELVLDGVELRKCDDELKPEAMAVLEDSKDVLDLVIMSDGMCDGGPLRFKIPRR

SEQ ID NO: 8463 - protein, 70 aa, BradyrhizobiumColbertium
MGAVSDLSKARDTIHKKSVIAAPSPWSKKSIDADIALAVALSWPVVFAKLKDSALRSRKPPSPSNVKVRF

SEQ ID NO: 8464 - protein, 204 aa, BradyrhizobiumColbertium
MLARDAHHSDPSDGLQLLLDGTEKFGKDLPSHARLDRLVDAHSGDLEDPGGRRESTVRDEVWPIGLQHVRTNRREQPRQPTDDPCFVSPHEILRCRRIEFVELEPVVARMIQAPPHHEHIMSQSRLRSEGIVEQMRRSDGKGFYHLPLLRSLRWLKHRAEPSATRGNPCFALRLRERESGTRCYGYRNVNVAIVSANVIVCSFG

SEQ ID NO: 8465 - protein, 71 aa, BradyrhizobiumColbertium
MGVTREHLLSHFIRYGIDWLGAADEIEGEIERAFFVPTAFIRPEHHCLKYGIGPKVLTSPSQIADYVTRAA

SEQ ID NO: 8466 - protein, 446 aa, BradyrhizobiumColbertium
MHIDVFEQNESAVRYYCRKLPNLFVSAKGALMKDSEGDEFIDFMSACGTLNYGHNHPRLKSAALDYLSQDGMIAGLDFHTAAKLRFVETFKRTVLDPRRLDYKFQFPGPTGANCVEAALKLARKVTGRSTVVAFTNAFHGMSAGALSVTGSSISRSGQPLCAVHRLPFEGYRGAGIEDLERFETMAVDPSGGIDPIAAIIVETVQGEGGLNVASNRWLRALSTIAKRLGALLIVDDIQAGCGRTGTFFSFERAEIKPDIVCLAKSIGGIGLPMSLLLLNPDNDVWRPGEHNGTFRGNALAFATAAEALLLWEDGSMADASMNAEILSEWCASMAERSRGAIKEKGIGMMRGLEFEEPSMSEVCASLARRRRVLVECCGPRDEVLKIMPPLNIEPHLLRHGLARIADAVWRALHAPTDASKRYEPSLDPDYDRGDPIARAELAHSVA

SEQ ID NO: 8467 - protein, 82 aa, BradyrhizobiumColbertium
MVANALAGRGVDQVEAVASVPRPIAVVQGRKDPFLRLDYFERIGFRNLWKGRPQFIEAGHAAHWEAAKPFNAAMMEFLMQSG

SEQ ID NO: 8468 - protein, 60 aa, BradyrhizobiumColbertium
MPWQIRHNDAEFRLLKISKLADEYFLARRIAVDEKDPGASRASMPETQLFAAYNAGTRKH

SEQ ID NO: 8469 - protein, 301 aa, BradyrhizobiumColbertium
MALRDRPEVRGLALGLLAASIWGSYLAMARAGVSAGLHATDIAAIRYGVAGLIMLPWLLRRGVMDMAGMGMMKGATLTLLVGPLFVITGVSGYSFAPLAHGAVIQPAALTLGSIGLAFLVLGDRPTIARVVGVAIILAGLAVIAGPGLMTGTALTPIGDLLFAAAGLMWAVFTVLSRRWGVSPVAGTAVVSVLSAVVYIPGYVLVIGADRLLAAPLPMVAAQILVQGVLSGVVAVIAFSKAVQILGAGRAAVFPALVPAIAILMGAPITGEIPNSLQLAGLALVSTGLLVAIGVLRKPRSH

SEQ ID NO: 8470 - protein, 216 aa, BradyrhizobiumColbertium
MSLQTELDTFKTSWRERVGAETAKLVDDDNAALQSLADRALKTGAQFPKRQLPNQIGGTTDLGALIASGPLVVTYYRGGWCPYCNLELRAYQKALPEITALSARLVAISPETPDNTLTTAEKNALSFDVLSDTDGALADALGIRFQLSPAIKALYRKFGHDLPTRNGDGQWSLPIPASYVIERGGRIALASVDPDYRNRMDPAVALSALRKIAILA

SEQ ID NO: 8471 - protein, 262 aa, BradyrhizobiumColbertium
MSAENNSVPAYFSRYAHLRMSRDADGILLVEMHTSGGPIKFDARDHEGFTDAFYEISRDRGNKVVILTGVGDYMAEIDFGSFGNVGDANVWSKVHDEGTQILENIANIRVPMIAAIEGKAHIHTEYALLANVIVAAKTATFHDLPHFAGGIVPGDGVYTTWAYRAGAGRTEAFLLSPRPVTAEEAAAWGVVNYLTDAGSAVAVARDLAQQYLKQPEVTRRNTRIHFIQPLKERIVREVGYGLALEGASASALVQQMMAASKT

SEQ ID NO: 8472 - protein, 309 aa, BradyrhizobiumColbertium
MNDMDLLSPMRTFVRVVEAGSFTAVAMEQNSTQPTISRQIAALEEHLGSRLLTRTTRALTLTDDGRAFYEHALRALEAVGEAENAVGRRQAKPTGTLRLAVPVVLGRRHIVPRLASFLSRYSDLSIDLTMSDSFVDLVEQGIDLALRVGEITDQSLVARKIGMVRRVTVASPAYLKAHGIPRAPADLARHQCIVYTRLATGNRWHFESKDGPQMVTVSGRYRVDNSEAVREGVLAGLGVAVIPAFAFSNEVAHKQVQVLLRSYEPKPLPLNAVYPSRRFVPLKVRAMIDFLANELEIDPVLSRYGISAD

SEQ ID NO: 8473 - protein, 52 aa, BradyrhizobiumColbertium
MRARKCVALGRETRGSSRSRTLKRAHPADDLISALVAIEAEGDRLSGEEFKP

SEQ ID NO: 8474 - protein, 138 aa, BradyrhizobiumColbertium
MTNQDLAVQVGMSTSPCWRRVRRLEDAGIIKGYQAIIDRRKLGLGVLAFIRVQIDSHSETEAQRFEEDVLKLDEVVACYSIAGNADFLLQVVARDLDTFADFAMTVVRRLPRIKEMQTTFVLKEIKPLRMLPVSQLGT

SEQ ID NO: 8475 - protein, 108 aa, BradyrhizobiumColbertium
MKDHRLAEAAATLTGAEADPVGFLALPTFGAVGEPTLIGKPSPGRCTLVRAAVPSKVSGPVLGAEATLRLFPSPRDELDTLAPVRVSGATFSTFGLTVVGAVPAGAAP

SEQ ID NO: 8476 - protein, 366 aa, BradyrhizobiumColbertium
MALADLGDLLGPDEHAFDLGGLVRAAHPTLDPHICAPAWTGAGKGRGEVAEREPDPGMVGVERCHHDLADIARRHRISGTWLDDLQDQVLVHDHALARLGFEGDQAKIGGPEGLVGVDTARLDLGLERGRECGAGNQRALDRGDVTAGTCRGIEQDLQEIRRAAVAHRTIGFDQLELLLGVAGARWDHGAAKRACRRIEDESSGGEVVTEGVEDDIVGAEPGREQRPCASPGIGLPPFGLEDRTGGGEETCERAGRARHEASEGRRGLVQGGQFRLAQHRQARQSRSGGHGGRIQTLEPLGIGRGGHRRSQHLRKAGEQVGFPRCWLPRLAGVEMSDHGYCFRVGIRCAPPPAWLSDRHRLGLKRA

SEQ ID NO: 8477 - protein, 384 aa, BradyrhizobiumColbertium
MADEGLTAADEATDVVARLKRRMIDEALPLWSTVGWDHAAGGFIDRLHRDGTADAAAPRRVFVQARQIWCYAKAAQMGWYPEGRAIALKGLAHLLAKAKSPDGRPGYVHRLTPEGAVLDARRDAYDHAFILFALASVYALDQDAQVRAEIEALLAFLDGHLRSPHGGVHEGLPVSLPRRQNPHMHLFEAMIACFEATHDLSFQNRAGEFFALFLANLYDKQKRILTEYFEEDWSKIEPVSVEPGHQAEWVWLLKGFERITGCPTGQRRAELLATALRYRDEATGCLIDEGDDVGNIRRSTRRLWPQTEIAKAWIAQAESGEAGAADEARRALVRLERHYLSHPVKGGWFDQFDRDGKSLIDTIPASSFYHVLCAVTEAEQVLEN

SEQ ID NO: 8478 - protein, 279 aa, BradyrhizobiumColbertium
MTEITEATRPSASIVPAPPLLAVRNIEVVYDDVILVLRGLSLDVPKGAIVALLGANGAGKSTTLKAISGLLKTEDGEVTRGEILFEGERINGIDPDKIVRRGIFQVMEGRRIVADMTSLENLKLGAFTRRDREVEADLDMVFNYFPRLRERTGLAGYLSGGEQQMLAIGRALMARPKMILMDEPSMGLSPLLVKEVFSIIQKINRDLGVTILLVEQNARAALSVASHGYIMEQGKVVLDGSADELRDNEDVKEFYLGGAGDQRKSFKNLKSFKRRKRWL

SEQ ID NO: 8479 - protein, 427 aa, BradyrhizobiumColbertium
MKTKSLLSTASLALAIAAFSAGAQAQIAIGHLADYSGGTSDVGTPYGQAVADTFAWVNKNGGVGGKQLNVDTNDYGYQVPRAIALYKKWSAPDTKVAAIMGWGTADTEALTGFLAQDKIPDMSGSYAAALTDPEGISGKAKPAPYNFFYGPSYSDALRAMLMWAAEDWKAKGKSGKPKFVHMGANHPYPNAPKAAGEAMAQELGFEVLPPLVFALAPGDYSAQCLSLKSSGANYAYLGNTAASNISVMKACKTAGVEIQFLGNVWGMDENAAKTAGDAANGVIFPLRTAVSWGGDAPGMKMVMEISKMSDPTGKVYRPVHYVAAVCSSLYMKEAIEWAAKNGGATGENVAKGFHQKKDWVPAGMEGVCNPSTWTEKDHRGTLKVDLYRTKVSGATDGDLNDLMTKGTIKLEKVKTVELPRKPELLGW

SEQ ID NO: 8480 - protein, 357 aa, BradyrhizobiumColbertium
MAGPALIPAGDFRTTYAADTTIFPTTTSRNFAIAGIALLCLAPQLFSGYWLSILIQIGIFSIAALGLNILVGFTGQISIGHAAFFLLGAFTSAYISNNAPIPVFFAIPLAGLVTALVGLIFGIPAARLKGLYLVIATLAAQYILLDFFSRAEWFSGGSVPASAEPFSIFGYTLRGDRQYFYVVLAYVLASYVLVTNLMRTRDGRALVAIRDHYLSAEIMGINLTKYRTLSFGLAAFFAGIAGALYAHYQLVVSQEGFGIERSILFLAMIIIGGTGSIMGTLMGTAFVVLLPEAMEFASHYLKGGAIDKALSLNNNITFLREIAIGVIIIAFLMFEPDGLAHRWRQIKAYWKLYPFSH

SEQ ID NO: 8481 - protein, 297 aa, BradyrhizobiumColbertium
MNTAFLIQLLVNGLVVGTLYGVVAMSFVLIYKATQVVNFAQGELLLVGAWVCWALLAKYQVPFWIGMPITLVFMFMFGIAVQVLILRPMIGEPIISVIMVTIGLSTVLQATLKWMFGVNPQPFPRVFESQSVSLFGLQIQTVYVMSLVVSVAMMIGMAWFFRASKYGLAMRATAFNQQVAQSLGISVKSVFAMAWAISATVSAVAGVVVAVVNGVSSGLAAYGIKVFPAAILGGLDSIGGAVLGGIIIGLLENVAQYVDSEYLHWGNLYEIAPFYVLIIVLMIKPYGLFGTHDIERI

SEQ ID NO: 8482 - protein, 41 aa, BradyrhizobiumColbertium
MTQGIAKRRLDPRIHPLPNTLSSASMGCRAKPGNDELGQLA

SEQ ID NO: 8483 - protein, 643 aa, BradyrhizobiumColbertium
MMDYASRVAQADTYPKMLRLNAREHGNEIALREKDLGLWRIFTWSDYQTRVRDFALGLVELGLGRGDVIGIIGDNRPDWVAAEVATHAIGGLSLGLYRDVLDEEASYLLNYGEAQLVFAEDEEQVDKLLTLADRAPKLKHIIYSDPRGMRKYDDPRLMSADKFAELGRARAAREPELYDKLVDATKGEDVAILCTTSGTTSHPKLAMLAAGRVLGHCATYLAFDPKGPDDEYVSVLPLPWIMEQVYVLGKGLLCRMKINFVEEPDTMMNDLREIAPTFVLFAPRVWESIAADVRAKVMDATPFKQRLFDIGMKSGLAALEQGKRSGFADAILFRALRDRLGFTRLRSAATGGAALGPETFKFFQAMGVPLRTLYGQTELLGAYTLHPEGKVDPDTTGVPMADSVEIRIDNADVHGVGEIVVRHPNMFLGYYKNPEASVADLKDGWLCSGDAGYFNDKGQLVVIDRIKDLAETSRGERFSPQFIENKLKFSPYIAEAVVLGAGRDALAAMICIRYSIISKWAEKNRLSFTTYSDLASRPEVYALLRKEVETVNATLPPAQRISRFLLLYKELDADDGELTRTRKVRRSVINEKYEGIIDAIYRGVSDIPVDTAIRFQDGTTQRVRTTLRVVDLGGHGHMAEAAE

SEQ ID NO: 8484 - protein, 273 aa, BradyrhizobiumColbertium
MATSLEVRGVSLRFGGVRALTDVSFAIGEGELFSIIGPNGAGKTSIVNCISGRYKPTEGQLFYQDRDITGLTPNARASLGIGRTFQNLALFHHMSVLDNIMVGRHHLLKNNFLTGSLYWLTGARKEELEHRRKVEEIIDFLDLQSVRKATAGTLSYGLRKRVELARAMALEPRLILLDEPMAGMNFEEKEDMARYIVDLNEEFGMTVVMIEHDMGVVMDISHRVMVLDFGKKIAEGDPAAVLADPHVKRAYLGEEDEVLVDPDDARPAQESAA

SEQ ID NO: 8485 - protein, 224 aa, BradyrhizobiumColbertium
MISEDHLKRVAAWSRELAPAEIEVARAGITERSYGTGETVFMRGDIFGYWAGMVSGLARMGGVSRDGKETSLAGLTAGAWFGEGSVLKNEPRRYDVVALRDSRVALMERSAFMWLFENSVGFNRFLVRQLNERLGQFIGMLEVNRTLDATARLARSIASLFNPILYPESTAHLEITQEEIGALSGMSRQNANRALNRLEKEGLLRLEYGGVTILDIERLRGYGD

SEQ ID NO: 8486 - protein, 419 aa, BradyrhizobiumColbertium
MSTARSSALAPFRIRNYRFQWPSDLLTSWAFEIETLVLGWYILVETGSVLLLTVLASLQFVGTLVAPVFGMIGDRIGHRDLLVAMRLAYTALSSTIMVLALTGHLSPLSVMIIVAIMGVIRPSDLGVRGALLAEIMPAEQLVAAISVGRTTQDSARIAGALTGAGLFAVLGIGLVYVVIACLYLAAALLMLCLTRPKRTLTTTDLPANSHFVSRLFGDLKEGIVYAWNGPGMRAALCVAFLANLTAFPFTGGLLPYIARDIFHTDQAGLGYLSASFAIGSLIGSITLSLVSGVRIARLLIGATLAWYAMLLVFVEAGTLPVAMACLVLAGIAQSMSMISAAVILMRAASAHLRGRVMGVRMMVIYGLPIGLLAAGSLIDIIGYSATGALYTVAGFVAMLAIAVRWRADLWPVHAPANAR

SEQ ID NO: 8487 - protein, 279 aa, BradyrhizobiumColbertium
MADRLNGYRILILETREEAQFSKLLVEQGAEVVQCPMFTIHDAADPAPVEAWIHRAIDQPFDDLVLMTGEGLRRIMKLARTRGLDSALVSALAKTRKFTRGPKPGKALREIGLEAQQTTEKPTTEGVIDMLAKLDLNGRRVGLQLYPDKDHSALTGALAAQGAEVDTVLPYVYDSKAADANIVAAIDDMAAGRIDSIALTNLGQVRRLIEAAKAHGIEARLRAGLERTLIASVGPAVSGELAAHALRTDISPPEDAYFMRPLISAMATTLAERKPATDR

SEQ ID NO: 8488 - protein, 287 aa, BradyrhizobiumColbertium
MPDHQYVLTLSCPDRPGIVSAVSTFLAHNGQNILDAQQFDDVETRKFFMRVVFTAADLAVELSALQTGFAAIAERFGMEWQMRDRATHRKVMLLVSKSDHCLVDILYRWRTGELPMIPTAIVSNHPREVYAGLDFGGIPFHHLPVTKETKREQEGQIMDLVGKTKTDLVVLARYMQILSDDLSGKLSGRCINIHHSFLPGFKGAKPYHQAHERGVKLIGATAHYVTRDLDEGPIIDQDVERISHRDTPEDLVRKGRDIERRVLARAIRYHLDDRVILNGRKTVVFVD

SEQ ID NO: 8489 - protein, 63 aa, BradyrhizobiumColbertium
MGDYVPQWAGGLPADAPPRPGTPQYDAYMRERERKRLLPAAEREKEEQSQKGATGTTSGNEMR

SEQ ID NO: 8490 - protein, 37 aa, BradyrhizobiumColbertium
MRQLFAFEHQMSLPFIPDSCAWTECPVLCLNRWLCAE

SEQ ID NO: 8491 - protein, 400 aa, BradyrhizobiumColbertium
MFERKQLSHRAIGKATWAAAVTAIAGLAGLAPVKAADSVKIGLILPMTGGQASTGKQIENAIKLYMQQKGDTVAGKKIEIIVKDDAAIPDKTKTAAQELIVNDKVSFIAGFGVTPAALAAAPLATQAKIPEIVMAAGTSIITERSPYIVRTSFTLAQSSTIIGDWAAKNGIKKVATLTSDYAPGNDALNFFKQHFTAGGGEVVEEVKVPLQNPDFAPFLQRMKDAKPDAIFVFVPAGQGGNFMKQYAERGLDKAGIKVIGPGDVTDDDLLNNMGDAVLGTVTAHLYSAAHPSQMNKDFVAAYKKAFGNRPGFMAVGGYDGIHLIYEALKKTGGDTNGDKLIEAMKGQKWESPRGPISIDPETRDIVQNIYIRKVEKVDGELYNVEFATFEAVKDLGKTKK

SEQ ID NO: 8492 - protein, 289 aa, BradyrhizobiumColbertium
MTAILTNLFDGVAYGMLLFVLACGLAVTLGLMNFVNLAHGAFAMAGGYVCMVLVNRMGWPFFAALPLAFVSSAAIGIALERTLYRHLYARSHLDQVLFTIGLTFMSVAAVDYIQGSSRVFINLPAALQGQFDLFGVGIGRYRLMIIVICGLLTIALQLVLAKTRFGSRLRAAVDDPRAASGLGINVPQVFALTFAFGCGLAGLGGALSAEILGLDPYFPLKFMIYFLIVVTVGGSSSITGPFLASLLLGIGDVAGKYYVPKMGPFVIYTIMIVILIWRPNGLFGRTAAR

SEQ ID NO: 8493 - protein, 342 aa, BradyrhizobiumColbertium
MSAASDVGYNAQRQARWHYGEIAFWLIVLSCGFLFPSRYLIMTDILRLALFTMSLDLILGYAGIVSLGHAAFFGVGAYAAGLLALHGIINEPVLALIAAGLAAMVLGFATSFLVIRGVDLTRLMVTLGIALLLEALAERFSNITGGTDGLQGIEMQPIFGQIPFDMFGKAGFFYSLAVLFLLFLFARRVVHSPFGLSLRAIKNNPLRAAAIGIPVNCRLIAVYTLAAFYAGIAGALFTQTTAIASLDVFAFERSADLMLVLVIGGTGYLYGGLIGAVVFRLLQELFSTITPQYWQFWIGLVLVVIVLVGRQRMHRWVLYVPNLILRMVAGRKAVVAVPEGDA

SEQ ID NO: 8494 - protein, 251 aa, BradyrhizobiumColbertium
MTIALETKNLEKQFGGLRVTRDLSLKVEQGARHALIGPNGAGKTTVINQLTGVLKPNSGRILLEGQDITDLPVHRRVLRGLSRTFQINQLYPDLTPLETIGLAVSERLGHGGDWWRRMGTRNDVNDEIADLLTRFHLLDAMNEQTVTLPYGKQRLLEIAVAIATKPRVLLLDEPAAGVPESERHDILAVVGALPRDVTVLLIEHDMDLVFSFADRISVLVSGALLTEGPPEQVARDPQVKAVYLGEEAVDV

SEQ ID NO: 8495 - protein, 238 aa, BradyrhizobiumColbertium
MSDLLAIDSLRAGYGEAVVLPNMSLGLAEGQVLALLGRNGTGKTTLINSIVGVTRCFSGSIALAGTDLTLLRPDQRARAGIGWVPQERNIFRSLTVEENMTAVAQPGPWTFEKVYEMFPRLKERRSNFGNQLSGGEQQMLAIGRALTLNPKVLLLDEPTEGLAPIIVEELLKAIGSITRAGGICSIIVEQNAQKILGLADRVVILERGTIVHDAPSAALKADPSVLERHLGVTGTAAH

SEQ ID NO: 8496 - protein, 372 aa, BradyrhizobiumColbertium
MQRTRAPFRADEVGSLLRPAKIKEARTRLEKGEISADDLRKIEDMEIEKVVHKQASIGLKLATDGEFRRSWWHFDFLAKLTGCELFHPDTGIQFAGVQTRHDAVRVIGKLDFPDDHPMLDHFRFLKKCADQAHVTAKMTIPSPAVLHFRGGRKSISKDVYPDLDAFYEDLGKTYRKAVKAFYDAGCRYLQFDDTVWAYLCSQDELQKARERGDNPDGLQQIYARIINYALAEKPADMVVTTHVCRGNFRSTWISSGGYEPVAETMLAGTNYDGYFLEYDSDRAGGFEPLRFLPKGNKVVVVGVITSKFGELEKKDDIKRRLEEAAKFAPLEQLALSPQCGFASTEEGNILSEEEQWAKLSLAVEIAKEVWGN

SEQ ID NO: 8497 - protein, 451 aa, BradyrhizobiumColbertium
MKNDEILSQITEFCRKADMAESTFGRRAVNDGKLVHRLREGKRITIDTLERIQAYMAASMAGGAPPPRGLQVPPEKRDPRGNFRFFENRQKYLLFVHTCSEKRVIADRVALELASIHPRPPALRLFDAGVGDGTVLARVLRATHQRFPHMPFYVAGKELSLEDLRLTLEKVPDRIFEHPASVFVFTNMFYAEAPWLTPASPAAAAATVWHEVPLRGASSGEFEQQIAELRPFLEQNWRAAISPRTAMPLYERPVVLVLYREDHRFLLDSTIPRPGQAEANFDLVIASQPYRALSSVNFRAKRIIAPLARALRPGGRLIGIHSHGQDPGMEMIQAIWPGENPFSVSRHELLRAVKYELGSVGRDLNFNAYADNRSIFRYDMEALPNEVTGTIGTSTAFAAWNAAVYVAQIEDDRLTEMTQNGRTLDAARDVLRKYNGLWFLDESYVISRRRD

SEQ ID NO: 8498 - protein, 398 aa, BradyrhizobiumColbertium
MRASYLFTSESVSEGHPDKVCDRISDEIVDLFYREGPKAGIDPWQIRAACETLATTNKVVIAGETRGPKSVTNEQIESVVRNAIKDIGYEQEGFHWKTCDIEILLHPQSADIAQGVDALQPGEVKEEGAGDQGIMFGYATNETPDLMPAPIFYAHKILRLISEARHSGKEKVLGPDSKSQVTVQYENGKPVGVREIVVSHQHLIEDISSKQIRDIVEPYVREALPKDWITPKTIWHINPTGKFFIGGPDGDTGLTGRKIIVDTYGGAAPHGGGAFSGKDPTKVDRSAAYAARYVAKNIVAAGLADRCTLQLAYAIGVARPLSIYIDTHGTGKVSEDKLEKAVAQAMDLTPRGIRTHLDLNRPIYARTSAYGHFGRTPDNEGGFSWEKTDLVEQLKRAL

SEQ ID NO: 8499 - protein, 473 aa, BradyrhizobiumColbertium
MNAKPGFTDYIVKDISLADFGRKEISLAETEMPGLMATREEYGPKQPLKGARIAGSLHMTIQTAVLIETLAALGADIRWVSCNIYSTQDHAAAAIAAAGIPVFAVKGETLTDYWDYTAKLFDWHGGGHPNMILDDGGDATMYVHLGLRAENGDTAFLDKPGSEEEEVFFALLKKQLKEKPKGYFAGIAKSIKGVSEETTTGVHRLYDMQKAGTLLWPAINVNDSVTKSKFDNLYGCRESLVDGIRRGTDVMLSGKVAMVAGFGDVGKGSAASLRQAGCRVMVSEIDPICALQAAMEGYEVVTMEDAAPRADIFVTATGNKDIITIEHMRAMKDRAIVCNIGHFDNEIQIAALRNLKWTNIKPQVDEIEFPDKHRIIMLSEGRLVNLGNAMGHPSFVMSASFTNQTLAQIELFANNKDGKYEKKVYVLPKTLDEKVARLHLAKIGVKLTELRKDQADYIGVKQEGPYKSDHYRY

SEQ ID NO: 8500 - protein, 486 aa, BradyrhizobiumColbertium
MQQEHFDVLIVGAGLSGIGAGYHLQTKCPGKSFVILEGRDCIGGTWDLFRYPGIRSDSDMFTLGYSFKPWTDPKAIADGPQILNYVRETAVENGIDKHIRFRHRVKRACWSTADARWTVEAERISGEGAAELVRFTCNFLFMCSGYYKYEAGYTPEFTGVTDFAGRVVHPQKWTDDIDYAGKRVVVIGSGATAVTLVPELAKTAAHVTMLQRSPTYVVSRPAQDPVANKLRRNLPPRLAYHLIRWRNVMWGMFFFQLSRRRPAKVKDLILKGVQMALGPDYDVATHFTPRYNPWDQRLCLVPDGDLFKALREQRASVVTSEIDTFTRDGIRLRDGRELAADIIVTATGLVLQVVGGLEVSVDGRAVDFASRLTYKGMMYADVPNMASAFGYTNASWTLKCDLTCEYVCRLINYMDRHNFRQCMPHNDDPNVTLQPSLDFTSGYVQRSIAKMPKQGSKRPWRLYQNYALDIVSLRFGRIDDGVMRYS

SEQ ID NO: 8501 - protein, 51 aa, BradyrhizobiumColbertium
MEAQKIAVDAVVALTDCDREAVIAFIRRLYLAGVTDPKRLTFKGLQALSRA

SEQ ID NO: 8502 - protein, 309 aa, BradyrhizobiumColbertium
MLKQLFAPQLVVLYVLAASTIYVHFRGKQRLRFARQLGDHSTYLAPYNVLMYAGSAVPNKPVISVEQFPELKPLSENWETIRDEAVRLFDEGFIRAAAKNNDWGFYSFFKSGWKRFYLKWYDDFLPSARTLCPKTVELLNAIPSVHGAMFAVLPPGGKLGAHRDPFAGSLRYHLGLVTPNSNKCRILVDGVECVWRDGEAFMFDETFIHSAENATDVNRIILFCDVERPMKYGFMTAINRWVSHHIVKASATQNVEGENVGVLNKVFGKLYEIHLASRKVKEWNRNVYYTLKYSLTVLILGLIVWSALR

SEQ ID NO: 8503 - protein, 233 aa, BradyrhizobiumColbertium
MNAASYVIPLPPQASLPVVGESGRYPVRRIWCVGRNYLEHIREMGNDERAPPFFFAKHADMLVPDGATIPYPPLTKDLHHEVELIVAMKSGGLNIPPDKALDHVYGYAVGIDLTRRDLQIASRKKERPWEIGKSFDYSAPCSAVQPASKIGHPSKGKIWLTVNGKEAQKGDLTELIWNVPEIIWQLSQQVKLAAGDIIMTGTPAGVSQLQPGDKLECGVDGVGTLKVSIGQPE

SEQ ID NO: 8504 - protein, 600 aa, BradyrhizobiumColbertium
MAQFPKRITDDPYAAVVLIRRLITEQGIVYWRRYLVAFALMALAAGATAGATYVLGQVINQAYVDKNVPGIAMFSGITVILLFIKGVATYGHMVILTKISNAILATNQRQLFAKLMRESVGFFSERHSSEFLARLTAGAKSITDVLNMLVNAVGRDLLMLLAMIGVMVWQDPLMSFIGLVAVPPAMLVLRKLVKRIKGLAFNQFTGTADIMETMQESLQGIRTVKAFTLEETMQKRIDENIAVVERNANKMARVANRSNPLMEMLGGFAVAGCLMYGGYAVVALNATPGAFFSFMTAFLMATEPAKRLARLNIDLNSQLVGARMLLEIIDSPASEYADDDKPALKLSDARIELRDVSFSYRDGETVLNRMSFVAEPGKVTALVGPSGGGKSTVLALLLRFYEVTQGDIVIDGQSIGAVSRKSLRAQTAYVGQDVYLFRDTIRNNIAFGRPGAGEDEIIGAAKAACAHDFIMGFPLGYDTPVGEHGTQLSGGQRQRIAVARALIKNAPIILLDEATAALDSESERQVQEAIEHLCQNRTTIVIAHRLHTIMHADAILVVEGGEIVEQGRHDELLRRGGRYASFFRLQHHDSGALAPISATA

SEQ ID NO: 8505 - protein, 335 aa, BradyrhizobiumColbertium
MLVTGGAGYIGSHTVLALAEAGEDVVVIDDLSTGFSTYLPEGVPLFIGDAGDENLLEGVIAQHDIESIIHFAGSVVVPDSMRDPLGYYRNNFTTARNLLNVAVKRGIGRFIFSSTAAVYGNPDQVPVPEHAPTRPLSPYGSSKLMTEIMLHDVAAAYGMQYVTLRYFNVAGADPQARIGLATVGATHLLKIAVEAATGQRAKIDVFGTDYPTPDGSCIRDFIHVTDLSQAHRSALAYLRNGGASMTLNCGYGRGYSVLETIDAVRRVSGRSFAVQYAPRRPGDIMTMVADTSRIRGLLDWKPQYEDLETIAAHALAWEDKLFRERHGDLRHAVSA

SEQ ID NO: 8506 - protein, 363 aa, BradyrhizobiumColbertium
MANSPGDLDVIVPNLHRRYSGVTATNRMVAPRLAKLYRAAWFGSDTPEGIGRLGIADLLKLWRRRRPLIWHARRNNEMIAGVVLRAFGWPLKVVFTSAAQRHHSWITRWLIRRMDAIIATSDVSASFLKVAATVIPHGVDTEVYAPPMDRAAAFAESGLPGRHAIGCFGRVRAQKGTDLFVEAMCRLLPHYPDFTAVIVGQVTPEQMPFANDLKTRIEAANLQSRIVITGELPIEAVQRWYQRLTIYAFTSRNEGFGLTLIEAMAAGSALVAARAGAAELVVEDGVTGVLIPTGDADALAAALEPLMRDVAAATAMGERGRARVLASFSLDAEAARIAEVYRPLLSGDFRGAQTKTRKQPHAP

SEQ ID NO: 8507 - protein, 356 aa, BradyrhizobiumColbertium
MNQDSELSGNADRSDTRPILIIPYMWIGDFVRNHTVVRVLKERWPNRPVDLLTTSLCAPLVDYMPGVREGVVWDLPRGRLAIARQFRLAKLLRERNYGTALVLPRTWKAAIAPALAGIPERVGFVGEFRFGLINRWRWGEKKLPRFIDKNAALAQPNGAPLPPEWPVPQLRVPVEEIASWRQANGLSAGAAVALAPGSVGVSKRWTYYPEAARLLVERGLEVWVVGGPAEKGLAQEIVAAGGPGVRDLTGTDLRNGVLAMAAAGVAISNDSGLMHIAAALGTPTMGIFGPTSPYLWAPLNGLAATVVQDREVLSCQPCQSTICKMNDHRCMGNIAASEVVKIAERVLGEAGARVTS

SEQ ID NO: 8508 - protein, 326 aa, BradyrhizobiumColbertium
MLLVTGGAGFIGSNVVAALNDAGRSDVVVCDWLGTEGKWRNLAKRQLVDIVPPAELMDWLKGRKLDAMVHLGAISATTATDGDLVIETNFRLSMRLLEWCTMNAVPFIYASSAATYGDGMEGFDDDGSLPALKKLRPMNLYGWSKHLFDLAVGGRVANGEPLPPQWAGLKFFNVFGPNEYHKGSMMSVLARRFDDVKAGRVVQLFRSHREGIEDGDQRRDFIYVDDVVRVLMWLLATPSVSGVFNVGTGKARSFKDLMLSAYAALGTRPNIEYIDMPESIRDSYQYFTESKVDRLCRAGYNGGFTTLEDAVKAYVGDYLDRPDRFR

SEQ ID NO: 8509 - protein, 494 aa, BradyrhizobiumColbertium
MPTPILDFDALAQAISGRTVLCIGDVMLDEFVYGEVSRISPEAPAPVIAAQRSEIHIGGAGNVAGNVASLGARCIFVGLIGEDDAGARLAAALKEQAGIESVLVCDPSRPTTRKVRFVSEHFSTHMLRADWEQALPASDDIETKLIDAILPQIALADIVLLSDYAKGVLTARVIRHTIDEARKLGKPVIVDPKSLNWAIYRGATLLTPNRKEFSEATRSRADTPQSIVEASEDVMRLADCEAILVTQGEHGMTLVPRNGEAVHVPAFPVKVRDVSGAGDTVAAALAVSLAAGADWDTALRVANAAAAVAVGKQGTANVSTTELRRKILPHATLAAEEKIVLDPAALDAQLAEWRRQGQRVGFTNGCFDILHPGHVKVLTAARAACDRLIVGLNSDASVRRLKGADRPVQDERARAEVLAALEAVDLVVIFEQDTPIELITRIKPGVLVKGGDYTREQVVGHEVVEAAGGVVVLVDILQGFSTTALVHRARGGSK

SEQ ID NO: 8510 - protein, 47 aa, BradyrhizobiumColbertium
MQLEHRYPVNLIVDGVNGEVRSCFNGDNRAPGVRVLRARRGESILTS

SEQ ID NO: 8511 - protein, 365 aa, BradyrhizobiumColbertium
MQPVFLRVRQAHGAPARVHILSDTTAKLAELHAMVGDCCPVTTELLGRPTIDHREHDALLVAVDLRRMDSICALKASLETAAGHVSKRVFIVGADSRLSIVQAYALGATTVLTAPVNRLRLISELVGASAPAQPVNETTAGVDGAAADAAGCFTSIFRAALSGASIDVNEAAQMSSAIADNISEFGLAAWLDSVRHHHEGTYQHCLLVTGIAVDFGLSLCLGKQDVNRLGLAAMFHDIGKATIPLSILDKAGRLDDAERELIKTHPVAGYDVLKAHPGISPEVLDAVRHHHEYLDGSGYPDGLGAESIRDLTRMLTIADVFAALVERRSYKPTMPREKAYEILQSMQDKLERPLVSAFRDVALTR

SEQ ID NO: 8512 - protein, 40 aa, BradyrhizobiumColbertium
MLTHPTLDRLNVLGLHGMAKAFADIEAAGEARGRSASNPI

SEQ ID NO: 8513 - protein, 40 aa, BradyrhizobiumColbertium
MQAEPVALEPAQMAHMIVYPVPTEPLAIGVLLTSAPWTMR

SEQ ID NO: 8514 - protein, 228 aa, BradyrhizobiumColbertium
MSAWAYTLIPAVASVLGAAVTAVRQPGPSLASAIQHLAAGVLFAAVAGEILPDLKHQQSPIAVIVGGALGVALMLLVKRLGETAKGSTGLIVTVGIDILVDGLVLGIGFAAGAKQGLLLTGALTLEVLFLGLALASELKQTSGSAARVIGIVAGLAVLLPVGALLGTPVGALPGPYLAGFFAFALVALLYLVTEELLVEAHAVPEKPWTTAMFFVGFLGMLVIEEIVA

SEQ ID NO: 8515 - protein, 42 aa, BradyrhizobiumColbertium
MKPLAARFSDTLRLPYLESCSESIHRARRVAARPVSARNARL

SEQ ID NO: 8516 - protein, 46 aa, BradyrhizobiumColbertium
MEGPNVNAVHEMSSLVAATRAYDQVANTILREDDKNELRKLAGEDL

SEQ ID NO: 8517 - protein, 83 aa, BradyrhizobiumColbertium
MDVVNRYGSSSAIVLMDGKDSQSPEWGLVADHHCHGCFSVSVPAPAQQAELALDLKIAELPKSAAPLYGNVSGLDPPPPKSLT

SEQ ID NO: 8518 - protein, 123 aa, BradyrhizobiumColbertium
MAISHLAGDEGVRVHVVSEKLAVDASFVTAQSQLLESKGLIYRKPSAIDRRVVLLALSSKAQWQIEELSGSMNAVNAYVANNASGKAHRLLTELGELKSVLKRAELLTASDALRHWPRGRDTA

SEQ ID NO: 8519 - protein, 207 aa, BradyrhizobiumColbertium
MALLKPLYYRFAAAMLRDTTWQEPLFELVSPKSGERLLAFGPGSASSATSLAERFTELDIVVAEPSARAVRNAKRAVASGGIRNITFVDAVSMINLPFHASCFDCAICIMSFHLRPPEEKVALAKEALRILRRGGVLYVADYDRPANREERIVLNLAAQVSSRSAVQSHVDGTWTQCLKKAGFAGARSQSSQSVKIGRVAIMLFRKP

SEQ ID NO: 8520 - protein, 112 aa, BradyrhizobiumColbertium
MRRIPALRGVVSVFLILTYLLSGVLHRCLDLDVSNPTGSPVFWMVDTKVDSGPESGAIVDHHCHGCFAVSVAAPPQQVMSVMEPKLADLIRSTDPLTDTVRRLDPPPPKSLT

SEQ ID NO: 8521 - protein, 289 aa, BradyrhizobiumColbertium
MGDENGAHHIGSGEQTTSLLVFRAGSSQPKAVPLGLVTRLEELPADKIEFSNGRYMVQYREQLMPLVAMEGVTIASQGAQPILVFADDGRSMGLVVDEIIDIVEERLNIEVGGSGSGILGSAVIKGQATEVIDVGHFLPMAFSDWFTRKEMTPSLHSQSVLLVDDSAFFRNMLAPVLKAAGYRVRTAPTAQEGLAALRAQSFDVILTDIEMPDMNGFEFAEVVRSDNNLAATPIIGLSALVSPAAIERGRQAGFHDYVAKFDRPGLIAALKEQTAGAAGASELSRAAAA

SEQ ID NO: 8522 - protein, 390 aa, BradyrhizobiumColbertium
MRTAFWLAGAAALVLANQAFAGDTIKIGFVSTFSGPTAVIGNDMRNSFELALDHLGRKMDGKPVEVIYEDDGQKPDVGKQKTEKLVQSDKVDFIVGYIWSNVLLASLKTAVDSQTFLISANAGPSQLAGELCSPYVFSTSWQNDQTPAAMGLYMNQKGVKSVFLIGPNYAAGKDMLAGLKSTFKGEVKGEEYTVWPSQLDFSAELSKARASGAESIFVFYPGAAGVQFLNQYAQAGLKSTMPLYTAFTIDELSLPLQKENALGVPGAQEWVNDLPNEQNKRFVADYRKKYPGLRPTYYGAQSYDAAQLINSAVVAVKGDTSKKDAMKAEMEKANFKSLRGAFKFGNNHIPIQSFYLQDVVKDAEGQLALKTVATIVENNQDRFHEKCKMK

SEQ ID NO: 8523 - protein, 420 aa, BradyrhizobiumColbertium
MAATPHRVVIVGAGFGGLEATYRLAGAPVQITLIDRRNHHLFQPLLYQVATASLATSEIAWPIRHLMRDRRDVTTLFATVSGVDTARRCVLIDDGSEVPYDTLVLATGARHAYFGHDEWEQFAPGLKTLEDATTLRRHILVAFERAEREIDPAKRAAQLTFVIVGGGPTGVELAGTIAEMAHHTLPGDFRSIDTRKARVVLIEAGPRVLAGFPDDLSAYAQASLEKIGVEVVLGQAVTEINRDGVVFGGKLLEARTRIWAAGVRASPAAEWLGAPSDRAGRVQVEADLTIPGHPEIFAIGDTVSINAWNGKPVPGIAPAAKQQGRHVAETIRARLRRAATGPFRYKHAGSLAQIGKRLAVIDFGRVKLRGAIAWWIWGIAHIYFLIGLRHRLSVALSWLWIYARDQRAARLITQGSSKVV

SEQ ID NO: 8524 - protein, 246 aa, BradyrhizobiumColbertium
MMSRGGKDWYFLTVDYALGKGIEAEAQKYIEGHGGKVVGSSKHPLGTSDFASFLLQAQGSKAQVIGLANAGGDTINAVKQAAEFGIQQNGQKLVAFLLFINDIHGMGIKVAQGLQLMEAFYWDMNEDTRAFARRFAARPGMNGKMPSGNQAGVYASTLAYLNAVAATGSDNARNVVPEMKKFKGRDKLFGDTTIRQDGRVVHPMYLFEVKKPEESKYPYDYYKLVSTIPAEQAFRPLAEGGCELVK

SEQ ID NO: 8525 - protein, 107 aa, BradyrhizobiumColbertium
MPAITFIHPDGKSDRVETAGGESVMQAATRHGLDGILAECGGNAMCATCHVYVDESWLARLPAMAGDEDALLDGTAAQRRPTSRLSCQITITPDLDWLVVKLPERQV

SEQ ID NO: 8526 - protein, 402 aa, BradyrhizobiumColbertium
MTASGAAGSGVPHLDVDPFDMRFLADPYPAHELLREAGPVVYLDKWNVYGVARYAEVHAVLNDPATFCSGRGVGLSDFKKETPWRPPSLILEADPPAHTRTRAVLSKVLSPTVMKQVRDRFAEAAEARVDALLQMRNFDAIADLAEAYPLSIFPDALGLKPEGREHLIPYASVVFNAFGPPNRLRQEAIERSAPHQAYVAEQCQRENLAPGGFGACIHAQVDEGAITANEAPLLVRSLLSAGLDTTVNGIGAAVYCLARFPDQWSRLRDDPSLARGAFEEAVRFESPVQTFFRTTTREVELSGAKIGEGEKVLMFLAAANRDPRRWDRPDSYDITRRTSGHVGFGSGIHMCVGQLVARLEGEVMLTALARRIAKVEITGEPKRRFNNTLRGLDSLPVTITPA

SEQ ID NO: 8527 - protein, 168 aa, BradyrhizobiumColbertium
MPPSSTRARHKPTPTDAGPTLDLDRYVPAFITFIANKLSNSATAFYQKQFGVNVTEWRIMSLLAIEPGIPASRICHVIGFDKGPVSRTLTGLEKRGLVSIRTDPNDGRTHSISLTAKGRTTHDRVIVAALERERRLLSCLSKDEREVLIDLLRRLHENLGAVTGGTGP

SEQ ID NO: 8528 - protein, 617 aa, BradyrhizobiumColbertium
MTVVPDGDVAGLFATPRTVAEHRADGSIVLRSPEPLRAIARCIGDWLEQWARQTPDTIFLAERGGVEAPWTTVTYAQALRQVRAAASWMLAQGLSAERPLVILSDNSIDHALLALAAQHVGVPSAAISPAYSLMSKDFDKLKSMIALLEPGAIYVSATKPFAAALAAIRPLHTAQIISGHDKDADSLPFRTIVESPETSEVAKALAAVTPDTIAKFLFTSGSTGTPKAVINTQRMLTSSQQAKAQTWTFLEESRGNLVILDWLPWSHTFGANHNFNLVLRNGGSLYIDGGKPAPGLFAMSLANLKSVMPTVYFNVPRGFDMLIASLRSDEELRRRFFGEVKFAFYAGAALPQNLWDALEQLSIETVGRALPMVSAWGSTETSPLATDCHFLAERSGNIGVPIPGTELKLVTSGDKLEVRVRGPNVTPGYWKAPELTKQAFDDEGFYLIGDAVKLADSARPERGLFFDGRVAEDFKLNSGTWVSVGTLRIAGIAALAPLAQDIVVSGHGGDEVRFLVFPNIAACRAHAGLPETADVSDVLAHDRVRDAVAQGLAKLQQRGPNSSGHATRALLLAEPPSVDGGEITDKGYINQRAVLTRRADAVVRLNDDASGEWIGCS

SEQ ID NO: 8529 - protein, 168 aa, BradyrhizobiumColbertium
MTASVARADNRPSPRKRAGNGAAARDAADGVGLDALAGHAGYAVRRFQIWIFQDFIKTLGEVDIRPTQYSVLTIIGANPGLSQMAVAKRLGIERARLVHLLDSLEQRKLVKRIKSKTNRRSHALHLTAQGETALAKFKRLAAEHERHVEAKIGRENRQHLLRILADFT

SEQ ID NO: 8530 - protein, 601 aa, BradyrhizobiumColbertium
MGAEQPETIAAIVAAHRAGTRTPAETVARTYQRIRDHGDPAIFISLRDEKDAIADAERLATADAARLPLYGVPVAVKDNIDALGFPTTAACPAFSYSPARDSTAVARLRAAGAIIIGKTNLDQFATGLVGVRSPYGIPRNPIRDDLVPGGSSSGSAVAVGAGLVPLSLGTDTAGSGRVPAMLNNIVGLKPSLGMISNAGLVPACRTLDCISVFALTVDDAALALSVMAGPDPADPFSRDRPLGALTPLPASLRLGVPRNGQLIFFGDKESEAAYADALKRCTALGATLVEFDLEPFYETARLLYEGPWVAERYLVIKDLLASAPDAIHPVTREITAAGARLTAAETFSALYRLQGLRKIAERTFAGIDALVLPTAPTAYTTAQVLANPIELNSRLGTYTNFVNLLDLCGLAVPAAMRADGIPFGVTLLAPAGRDAMLASIGRVFHADTKLTIGAKGTAQPPLAALATSTGDDIPIAVVGAHLSGMALNGELTALNGRLIEATKTAPDYKLYALKTTPPKPGMLRVAAGKGAAIELEIWSLSPSAFGRFVSAIPAPMAIGTVRLADGRPVKGFLVEPEALGDAREITAYGGWRAYMAEAATA

SEQ ID NO: 8531 - protein, 71 aa, BradyrhizobiumColbertium
MASSEKDPRHHTQKMKQRLQETVTHLREDIRKVDEPQLTAMFETSAEVLSGLVKAFDDYEKKNEAAWRKSA

SEQ ID NO: 8532 - protein, 224 aa, BradyrhizobiumColbertium
MPRVDRALSSLQKVTRAEELRLQLADEIVRGTLAPGAPLDETDIARRFNVSRTPVREALRQLVASGLVEARPHRGAVVARPSIARLKSMFEAMAELEALCAGLAAERMSAAERHGLEAIHEELRVLSYAGNPDRFHEVNERFHNAIYAGSQNGYIAEITLATRVRVQPFRRAQFRNLGRLAKSQAEHDRVVVAIMRGDKQGAAAAMRAHIELVRGEYEIYAVSV

SEQ ID NO: 8533 - protein, 131 aa, BradyrhizobiumColbertium
MEIDLPDVIAEVKAAFERYEQALVSNDVAVLGELFRNDPRTLRYGIGENLYGYEAISGFRAARSPVGLNRRTAKTVISSYGRDTAVASTLFYRDTAPGKVGRQMQTWIRFPEGWRVVAAHVSMIDEPKETA

SEQ ID NO: 8534 - protein, 464 aa, BradyrhizobiumColbertium
MTTKPEMTASEIASAVAGGKMSALDATEAALARIKQHDGVLNSFTDVTADRARAKARAIDADLAAGKEVGPLAGVPFAVKNLFDVAGLPTRAGSKINRDLAPAKRDATLIERMEAAGAVLVGALNMGEYAYDFTGENIHDGPSRNPHDTTRMSGGSSGGSGSAVGGALVPIALGSDTNGSIRVPSSFCGIFGLKPTYGRLSRARSFPFVASLDHLGPFARSAADLALAYDAMQGPDAEDSACTTRGLEPTLPLIANPISDLRIAIAGGHFQKNVFPEAVEAIGRVAKALGATQVVDIPEASRARAAAYVITTTEGASLHLDRLRKRPNDFDPAVRDRLIAGAMVPAPMVDRAQKFRRWYRAQLAEIFKSVDVLLAPATPCTAPKLGQVNFNLDGVELPVRANIGIHTQPISFVGLPVVAVPVPLEPLPIGVQIIAAPWREDIALRVAHTLEKMGVAAAPAPRGL

SEQ ID NO: 8535 - protein, 59 aa, BradyrhizobiumColbertium
MAEPLDDYIDAVSKALALPIEEAWRPSVRANLDVSLRLARLVDEFALPDETEPAPIFTA

SEQ ID NO: 8536 - protein, 588 aa, BradyrhizobiumColbertium
MTAPPLLDVQDLTVEFSTRRGIVKAVQHVNISVAKGETLAIVGESGSGKSVTSYAVMRILDRAGRIAEGSVMFSGIDVKAATEDQMRDLRGREVSMIFQNPRAALNPIRKVGDQIEDVLRTHVQQAMVSDRGEKAIEALEQVKIARPRERYHAYPFELSGGMCQRVVIALALACNPQLLIADEPTTGLDVTTQKAVMDLIVELTKRRAMSTILITHDLGLAAAYCDRVVVMEKGRVVETAKAVDIFANPQHPYTRKLMRATPRLGVSLRDLLPEEEGVAAQSPSVMAGPEPAIDRTSKDASPSMGGDESARPLLFVDKLVKEYPRQGATAVLGKLFSRRPPVEPDVFRAVDGISFAVGHGESVGLVGESGCGKSTTSMMVMRLLDQTSGLIQFDGEDISAIAPSAFARMPQRSRIQMVFQDPTDSLNPRFTAARAIADPIMQLGDIKGRDALRARCEELATMVGLPHNLLDRFPHQLSGGQKARVGIARAIALHPKLVILDEPTAALDVSVQAVVLNLLQDLKQRLGMSYLFVSHDLNVVRLLCDRVIVMRTGRIVEEGSSEQVLSDPKDDYTKELLTAIPHPPLPVH

SEQ ID NO: 8537 - protein, 299 aa, BradyrhizobiumColbertium
MSTVSPAVEPVGPARTSGWVAILDQTRYVLSENKVTGFAFALLVLILAAAILGPYVVPYDPLASDTAAALKPPSAAHWFGTDQLGRDIFSRVIVATRLDLFIAVASVALVFLMGGLAGIAAGYFGGWTDRIVGRIADTIMAFPLFVLAMGIVAALGNTVQNIILATAIVNFPLYARVARAEANVRRNAGFVQAARLSGNGEFRILLVHILPNIMPIMIVQMSLTMGYAILNAAGLSFIGLGVRPPTAEWGIMVAEGAGFMVSGEWWIALFPGLALMIAVFCFNLLGDGLRDIVDPQRRT

SEQ ID NO: 8538 - protein, 337 aa, BradyrhizobiumColbertium
MLTMIAKRLMFAIPSLIGVVIVTFLLTRALPGDPAAYFAGPAATKEAVEQIRKKLGLDKPLIEQFFRYTNDLAHGDFGNSLTTGQPVAAEIRNRLPASAELTLLGLFVSVAIAIPLGVLAATRPGSWIDHLCRVTTTAGVSLPVFFTGLVLVYVFYFRLGWSPAPLGRLDVFYSAPPTVTGFYLIDTLVARDVEAFRSALSQLILPATTLAIFSLAPIARMTRASMLAVLASEFVRTARASGLSPSTVIVTYAFRNAMLPVITTLSMVFSFLLGANVLVEKVFAWPGIGSYAVEALISSDFAPVQGFVLTMAVMYVLLNLVIDILYGVIDPRVRLEG

SEQ ID NO: 8539 - protein, 705 aa, BradyrhizobiumColbertium
MGQRRCVVDPVAHHADLLALGLELLQPFRLLAGQHFGKHRIDAELPSDALGGFPVVAGDHGHIDTALAQLPDCGGRSGARGIGDRDEPDKLAVPRHVDHRLTSALQPPDLRCQRRQIDVAFVHEAAVAEQHDAAANLGSRSSSFEHLETLRMLDGQALRPAQDRLRQRVIRSLLHGSGQCQNLVLARAGRGDHLHHLGLTERQRSGLVEHDHVELGRLLQRRGVLEQDAVHGAEPRADHYGHRRGKPERIRAGDDEHRDGERQGEQQGLANPPEPDREGREPDHHGDQHEPLRGLVGQKLGRRLRVLRFLHQLHDLSERGVRADLGRAVFEGAALVDGGADHSIAGPLLHRHRLAGQHRLIDLRLALDDLAVDRDLVARADNDDVTDQHLSGGQLDLALSPQHGGHRRGEIKQGPDRLRSAGAGSHLEPMAEQDKDEEDGDRLVELYAGEEEGRSDAEHVAGADRQHDQHRHVEDAVPQRPPGGDQERPARIHDGGGGEQEQPPIEAKPEGRRRRREHPAHRRVDEDRDGEDQGDPEAIAHVAHHRLHVHARPVAHLVGHGFPLPGSRRLLAGHRRCLVGLVGRVAGVGAVRVGRRRYRQRLARRVVGLADVLRQHLAGAVVTALAYPALDRLETGEGLVIGDRRAAGGVVDLSLLHARQTSELLLHTERAERREHAGDFDCGCLHRAILLADAPLALMRQSCRS

SEQ ID NO: 8540 - protein, 53 aa, BradyrhizobiumColbertium
MRADDKRLARLDLIKDLLSRLHYDDKDEAALAVNPDIIFEYQEAYLKNGMIAS

SEQ ID NO: 8541 - protein, 64 aa, BradyrhizobiumColbertium
MWYWVATRDVIGSIQSRCNVAPGLRSSTRLAATVFRYAFGTIRSGSHLAAADRYQLARSEPMPA

SEQ ID NO: 8542 - protein, 203 aa, BradyrhizobiumColbertium
MRRPGSRAGDFLADCNYSLNIIINTAGTGEYRQLGHESVVGVQEAVLISSAEEVSCVYPCALRSLLIGLPRQSVSAMVRNPETMLCRPLPSSGALRLLLSYVQSTDKMSLDTPGLAPAFATHVQDLVALGIVATRDGKQLARGSGLRAARLAAINLDIGKSLGDSEFSIGALALRHGVTPRYIQRLFENDGTTFTHPSPSSDC

SEQ ID NO: 8543 - protein, 159 aa, BradyrhizobiumColbertium
MDIDPKTLRGHVNRLKANRVASPIGKVKTGATEIIRKHFDELERLHHEDGASWTEIASGLAAQGVTQGEGQPLTGRRLTALMHNIRTRAEKLKGKAIPRDRTKMPAERPQQDGRTARKTLALSAEMMGPSGGSLMDETISEDEIRRTELARHAHLLRKR

SEQ ID NO: 8544 - protein, 247 aa, BradyrhizobiumColbertium
MPRLLLIAQETGGVGKSTLTRGVAEAVPDAPIIELESTPRILEYDHGKAKGLKRVSHFPVRADRASIDRTGGQAARAEFDGPINAMVGAALPTIIDVGANTASSLLASFDDEYVAGIADSGIEMALVVVVTADAAALSDGAKLLASAKRWAKARFVVENKLRGDVDPAMLKRVADGALVTVLPKFEFEPRTLGFLQATGLCAIPQLKTSDFQKEYGFSEARRMVSDLKAFRLAVMEAVRPAAVWLAS

SEQ ID NO: 8545 - protein, 194 aa, BradyrhizobiumColbertium
MSQRLATLRKRFASAKADADAANREMRQASAVKLAELRALPDPAARLAGLKDPALLPYDREMLERTVADLLPRRRIQLPRRVGGFARSVLRHARYHWRGLVMVTMISIPVMMIGGFAANNTGYTTVHFDRDLDLIWTLPDGHTELHRLTTGTAVVVMGRTAAGDVRLRIWSPAEGHLDAIMLANAYARLAIPKE

SEQ ID NO: 8546 - protein, 544 aa, BradyrhizobiumColbertium
MFWKIFVPLTILAFLFGFPVAEFMVHGFDASLWPNTIQPPSVWFTAMRDSWGWDSLLAYRDMTFGQTKALGSYGRTALAWILAGPLLAFVACFVPNYGPRRDPRGTYGDARWASRKQRARMRIGLELGLDPDSRRPIRVSTESHLVTIAPPRTGKTSGLLIPNLAVPDNKGWCGPAIVIDPKGEAYRAVVARRKTLGRTVRCLDPIGIVGGTDSWNPLATMDPADILHLQRVARALLPEHATGEAVYFQNRAVDVIVGAFLAAHAIKRPMPKCAAWLLSDVSRFEKALAPLKGAAAAAAKGVLAMDPKGRDSILSTAAQAFSWCADERLQRLTDKSTFSMSDVTSGNMDLFITLPAEDMKTLTPLMRWLLCELFTAVRRRRAREPIMCFIDEAATLGRFEELLIAAGELPGQNLRLWTFWQSRSQIIDINGADGARTLLNTAEFTTYSDLPLIDPDEREFLSRSIGDYTLMDMVETTDEKTGNTSRAFQPKAVRLMSEDAIGQVSTTDLIVFPNSKRYTKRPMILRKTAHSDSRLTSLVVSEPR

SEQ ID NO: 8547 - protein, 44 aa, BradyrhizobiumColbertium
MYENRIDREADDYLTVQVAGVERSQSIDNFIWGPGPLPPPAALN

SEQ ID NO: 8548 - protein, 86 aa, BradyrhizobiumColbertium
MPESKKELANKLMRDIVLIDEHRYPDWMAAGRDWAKKLGASHPYNVVHFRPGEDLSTFGAKLTEADHAKLEAQGALLLRPMVQGRA

SEQ ID NO: 8549 - protein, 399 aa, BradyrhizobiumColbertium
MTVMTLTRNEQPVTSGFRVDISRGERVGRVSSEWFSRPDDERYLSLTDLHDAVRRRADCAQTRTVESRAVRVEASRDDAERLALMVPGRSEPVLPTHWSFGQLCSLVGAPTSYMRQLPAPLAGINLQHGLLSHRGELLKTLEADDGRVELRAVTGPDYGRIWDHELAAAVMKIAGNGTGDTRWKVPGVLDWATMTHNPFVDITKDTTTLYASDRDVFLFLVDDTNPIEAGRLPDGSPDLFFRGFYCWNSEVGSKTLGIASFYLRAVCMNRNLWGVDNFEQITIRHSKFAAQRFAHEAAPALTSFANSSATPFVAGIRAARERIVARTEEDRDSFLRNRGFSKSETAKIIETVLHEEGRPPESVFDFVQGITALARGKAHQDARLEIEGKAKRLLEQAAA

SEQ ID NO: 8550 - protein, 37 aa, BradyrhizobiumColbertium
MFPWLDALQEELKTFGKSLVHAFLGRSLRAPPSRAQG

SEQ ID NO: 8551 - protein, 122 aa, BradyrhizobiumColbertium
MIERQLTVAALAREARVGRNAIYANHRDILAELTRVRQQRRAPSRVAAITEKVAEQRIAVDTMQGQLRQLATENAGLLRRAIEAERRADRAEHRVAQLTKELDHHRRPRLLRSSVGEHGDDS

SEQ ID NO: 8552 - protein, 630 aa, BradyrhizobiumColbertium
MTMRPHADSTRDIDLRQKISVRSLWSDPQWHLDGRRSDLRRSQFQIDWDFKLPDGSRFTDPCWAGWLEDARIFLWSLRIDPPPGRRHARARTLVAAAVKLRILIRWMAGEAMQSFGELDRDAAARFMHDIAERRRHNGALIRPGTRHAYANLLLALYQQRRKLAYPPSERPFDEGRASAYSGFSRHTVQRLPFTPDAIAVPLISAAIRLIGQPADDVIALRDQAVPFRMDDRGRSFFVHRQAVRTLVSSFRFYTIEGENTPWHPPLTRTRHLRALINRIQEACFVTVAYLVGARVSEILTLDADCVEEHLSADKTEAFAYLRGRIFKTAANEAGTPHLWPAPPPVLRAIDVLRRLSEPLRARTGRSDLWLSIAGNGIIDRRVPEVATGSSLVIRLNERFAAFIDMPRNDDGTPWRLTTHQGRKTFARFVGKRDRTGLHALQHHFGHVTRIMTDGAYVGTDFDLGELVDAQTLEETRSALEELLTASRLGGKAARMLSSRSRFRGRTHDGELTAYVDFLIEESGMRLGVCDWGYCVYRAESAACMGDDRGPNPQWRTESTCMSCANFAVTERHRPVWQARLDRNLALLADDRLDGSSIALAKTRIAECERVLSDLSATGEARAEDDGRKPT

SEQ ID NO: 8553 - protein, 608 aa, BradyrhizobiumColbertium
MAVRKRKPINRRITVATPKNAATDLVADTVIFSDAGGRPIQRFDPEQLSGLPADLRGLMVQAFREHGVGQMPATRRTTWAAIHRFARYVVDDGTIKTAGDVNTAALGRYVLWLRTQAASRAPRGAHATAFDVLRPLLLWCQRNRPGALARDLEIPWNPFPGRRMHQQPRRRLPPDQIKAILSACYEEIDEVWARFQHGQDVIRRTELPPKILRGQGLDRWIWRISRIEGGRMPDRAVLEEHGIKSAMLVKSWGGYRTIAQYLHITTDTLVPFFLAIAIQTAANPEPLRHIRRDCLVPHPLDEHRVIIDWNKAKTGARLQKAQRRSFDRRRRYAAPNLIEMMLALTEPLLVDAPPSQQDRVFLTRSIYSGPTRRSLRNRTEVIEHSVLRRAILRFTKRANHRIDEWNAAHSDSPRLRIASFAPALFRGTVATEHYRASGGDILVAQSILNHANAATTETYLKSEETTRFQRQTIARLQDLMVAWVRGFKPIVPSPEPDQLRGTVSFGHDCLAPVAADRDGAERLCPHFGGCLACPGLVIPIDRERLARVLAAIDRFEQARSRLDPRRWNLLYAPSWRILTQDILPDFPAAMHEAARALANGMPALPELE

SEQ ID NO: 8554 - protein, 386 aa, BradyrhizobiumColbertium
MVSIVRAVPGVEGIPAGFPILLDAQMSIVEPAFGYLIELATIPGRSHAMETLRTYSEHLHDWFDSLEQSELDWRLADEETIATYRNRMLATPSPHTGRPYARSTVNDRVRTICRFYSWAHRRGLIEALPFDYVDISLRSVHRQGMLAHLDHRPATVMANILTVSEVERLPRPLRVDQLQSLFRHLSSPYDLIAEWALATGMRRKELCGLQLHQVPDVAHLDIDVDPLVGVPLTVTKGDRPRTVYPPLRLIDRTHWYAGEQRAALVKLRRRTRPGYRPSSALFLNSNGDPVSRARFSAAFGAAFQAAGLTGSGHWLRHTFAMTMLVRLQKQAATTPDLNPLKIVQVLLGHASIQSTAIYLRCVELHADTLAESLAYLYGELVPHGRA

SEQ ID NO: 8555 - protein, 63 aa, BradyrhizobiumColbertium
MREGDRGTCRPSGLFRPFEVAEDAAHQRTDRNIMAAIIRPSQGNGLTEDKDVRWRINDDKAPR

SEQ ID NO: 8556 - protein, 659 aa, BradyrhizobiumColbertium
MSAKKFQTLAASGAEVLIPLNKLKKSPKNARKTPHSEASIEAYAASIAVKGILQNLVVEPELDSEGAATGFYFVTIGEGRRLAQLLRLRRKEIKKTEPIRCVIDTANDPHEISLDENVTRESMHPADQFEAFKKLADERGFGAEEIAARFGVTPHLVRQRLRLSSVSPRLIDAYRNGDMGFEQLVAFALIDDHDRQEEIYSRLTYSRDPATIRRMLTETNVAAADRRAIFVGHEAYIEAGGTILRDLFTEDRGGYFEDAVLLDRLALEKLQQVAATLQTNEGWKWVEANLDFPHGHGLRRVYPREAELSPENQAAYEAAQTEFDLLTKQHESFEELPDDVDIRFGELEAEIERFEVLRKAYNADDIACSGAFVVLNHDGGVRIERGFIRPEDDIRQKATARGAAQDDEEDAAECEDDMETGLSDNLVADLTAHRTLGLRLALSGQPDVALIAVTHAMVAQTFYRGAEANVLDIRPGSLFLGSHANGIGDTAAGRSWLDRHARWAAQLPRDVADLWAFVVALDYDSRMAIFAHCVALTANAVKLPRGHRPRALATADRLAEAVALDMTGYWRPTVRTYLGRITKARILEAVREAVGAEAADRMADMKKPDMADAAEQLLAATDWLPALLRTPQAGQQDVTASAVDAPTDGSANACANAAE

SEQ ID NO: 8557 - protein, 181 aa, BradyrhizobiumColbertium
MLARYPHCYLVKADYPSLPRIELAEYRTCRFDDVPLIRVSERAAGGLIGGRQAYMTTFLEHGATLVEGDGEMPFATGRDVIRSLVNNGWHFLTVDDARHVLDGREIANTVGAYLTTNGDWLSDVEKDADAIGIAGSLFPFCEQVIASRAAILVIYTPGLPRPLRLWRLSLKWIMPPLPPVA

SEQ ID NO: 8558 - protein, 515 aa, BradyrhizobiumColbertium
MRQKIKFYSKLRSAFRRPVMSARLIRIVTLVGRGSNMLFGRPDIFGHRDSARIYLDADHLANMGEERPDVAIHVIHDRFGLSRVPIVYYNAKFGVPPIPSNPGVLAEWRAKDFQAVTEFQLHARGVRLEIAQGQGFQRGDWIAIVPAHDDEGVVGNPDQGLITEILRTALHAQCVRANRVLQMAQFRAARERDPHTQFNTTDRDQLKNSELAEVESVFRGISDLYDTPELREDRERNVTMGHVETQGRDHVKTWFKQIPTGIRAQANVEILCYEQIYGPFSYQAVADRELPVISVLRRAHLRALTVHRIARETAEFQVANGAAVSAGIKARLDYGEEFDLNLWGCFIAALYGGINPTALYGEFESLTDLFDLAAWLGYFARGDYDELPPEIAVTLINCLSSKPRFAVIEDDIEHLEKIYTEIHYLADLLVGEESLREAAQQALATRTSVPVRPLFYNVVITPRTAKPDHPDTRIDPRFKVGKGHEGINLSVDYENFPQMTKGEKLRVRCFRPLLW

SEQ ID NO: 8559 - protein, 888 aa, BradyrhizobiumColbertium
MVATIAAGTTARYYSKQSEYYLGGGEPAGRWISSTNDFGVRHGAEVDNALFERLHASLDVDGQPLLSNSGDTAKRVGGIDLTLSAPKSVSVAFALADAETRRAIEKAQHEACEATIAFLERNAAFCRRGKDGHRLERATLTVAAFQHGEARPVEHDDGKVYADPNLHTHAVLLNFSRRQDGTVGALDARHLFAHKMAAGAIYHLALSSNLQRIGFAIGEIGRNGVFELIVPQAGDQSAALAKSFAALQRHYSGRRKEIEEAIAAEGLSTAEAPTLAAAIALGTRSTKQEARTADRFELWAEEAAPFLDVERLVTNLRIPRTLSQAEQEKLIAERVAAVPTELTEHESVFERRHLYAAVATALVGTGAAAKRVEHEVDRLVEAGRIVELGRDALQQPVYSTPEQIAIERELVAVADRLTRERRAAPDPEYVLRLCRERGLSAEQTHAAQMATSSAAIVVIEGAAGSGKSTTLAAIVAAYARDNGTGLPFAGAARRIIGTSQSWKVARELQKLGIEAMATDAWLARTKEPFLDANTVLVVDEAGLLSSRQMLAIVKRAEEAGAKIIATGDREQLVALGAGPGLSILASVTGATRVDTIVRQREAWMRTAVTDFAKGRAAQGLAAFEERGLLQFASGEKATVTRVVDAWENAQRAGPNASVLLIAKTNVQVRAINDEVRVRLKRDGRIIGEDIEVAAVTPSGHGQTLAFAIGDEIRFLDRHDRLAVINGTTATIRGIDDRDTQDPAVHVDISGRRASFRVSELADEHGRARLGHAYSTTIYGSQGLTTDRAFVWAGPSMTRNEAYVAFSRARDHLEIFADVREIDAQIRLDLPLSERLQATIAPERRIEWLSARLSRRQVKACTLDPMLDQAVRAYERLTERGLAAGYERS

SEQ ID NO: 8560 - protein, 319 aa, BradyrhizobiumColbertium
MIRINPVSDLHVDIERNGLDSMPQIDADVTVVAGDAAAPGTLALRRVRELYPDRDRPLIYVPGNHDFYSFHDKHNAELKTTWEEQRARMPEVAEDLGIILLDDASVEIGGVVFIGATLWTDFMTRSPYVMFGDAVRAATKQMNDYRLIKTGAGRSKDRLRPGQTIDAHKVSVTYIEKALAKRPAGQDAVVITHMAPSPRSLLHWPTITDLDWCYASDVERLMTCDAAPALWLHGHVHGNRDYCVGETRVVCNPRGYPAPGGKRENPDFDAGMVVEVDGRPSLQTEVVNGSQHVADIAAKRTAGNVWQARAQKISAAAEM

SEQ ID NO: 8561 - protein, 156 aa, BradyrhizobiumColbertium
MNEAMAASWRAVVRPDDEIIVVGDFAHRADPAALRNLFDSLPGRKHLVAGNHDGEATKSLGWESIRDVAYETIESTKCVICHYRWASWPASRKPTTLMLYGHHHGKMPGNQQSADIGVDVMGIAPVRLATIKAYMARLPPRVDPEHGVIENNGVTP

SEQ ID NO: 8562 - protein, 380 aa, BradyrhizobiumColbertium
MAPNQRLDISYQTLYSELVQRSLDESFTSEFSANGRFVAVEVKGKKYWYFDMPKPEGGAQDRRYVGPVDDPEITKRVEAFKDLKADLKGRRRLVSTLTREAYLPRPLPMAGQVVEELAKAGFFRMRGVLVGTVAYQCYPAVLGRRLDAVAMQTGDADFAHFHEISVAIKDSMPPILEVLRHVDPTFREVPSQADGRVSTQFVSRDNFKVEFLTPNLWSDDQAGKPVPMPALGGAAALPLCFLDYLIYQPIRAVLLHGAGVSVLIPSPERYAIHKLIIGSRRREDRDATAKSSKDRLQARSITEAMIANRQHADLASAFMEAWDRGDKWRAAIRTKIATYDDDFPKLLKAELAKGVSELGSDPADYDLVDKLTDELAPPPK

SEQ ID NO: 8563 - protein, 45 aa, BradyrhizobiumColbertium
MLTLNSGRFALIERSHEFVRVPWRPVLERARGQLVTGQVGVEGIS

SEQ ID NO: 8564 - protein, 47 aa, BradyrhizobiumColbertium
MPFARNMLDTLEARELARTAADISARTGLDHVGAEAGDKIEGSTGAC

SEQ ID NO: 8565 - protein, 91 aa, BradyrhizobiumColbertium
MPPAIGASTTAQVRVGSARLRPSDPEFWTVINEIADPAPIAPAELDAIERFFSAVLDDVFASSGRDLPRSRENPDGSEDVSLTQREDYDDD

SEQ ID NO: 8566 - protein, 107 aa, BradyrhizobiumColbertium
MDAERFAEFAIEAALWLVRESMDAIAKKTDFDPDPANCFRVLGRLPAIRELKDLTEEQRHDLFVEGFRRVHNGAQEAFELLLTQSKELLWEAFRKRWNVVANEVPLP

SEQ ID NO: 8567 - protein, 179 aa, BradyrhizobiumColbertium
MTTQSAAIPAFKPASAGPALTASLLVTLIAAAALAGAWFFQLVLEILPCPLCLEQRYAYYLAIPLGALTVLAARSGAPRPLLLGGLAILALATLANAGLGAYHSGVEWGFWKGPTDCSGPVVNLGSAADLLSKLDTVKVVRCDEVQWRFLGLSLAGYNVLISLLMAAIAAWGFVRTAKR

SEQ ID NO: 8568 - protein, 361 aa, BradyrhizobiumColbertium
MKQITASLTFGWPSRAVILSTLETLVIGTAGGLVFLAANLPGGLISGSMIAVGMAAIAGRQLTLPPILTQTVLVLLGISLGSVVSRHLLQQVGAYPLTIGLLALATFCSTFGSSYYLQRIHGWDRTSAFLAGSPGALSQITILAVERGADLPGIAVVQTMRVIILTAALPMVLAIADVAPSASPLLTTTIASPLDLLELAAASLAAALVLRLIKFPASWMFGAMIASSVLHGAGWVEGGLPDWVRGVALIGIGALIGSRFARMRVKTLAGHLGAALGSFAVAIVVSAIFVGIVALTTQVKLSDVVVAFAPGAMDAMLALALTLHIDPIFVGAHHLSRFVFVTIATPGIVHLFGRTQDDVDD

SEQ ID NO: 8569 - protein, 93 aa, BradyrhizobiumColbertium
MIFSFRLAVIALASLLITGAASAQTAAPAAKTDAAVTTEKKTAMERSAESLECSKQADTKGLKGKERKKFRRECKKEAKARTVAPAAPAADKK

SEQ ID NO: 8570 - protein, 156 aa, BradyrhizobiumColbertium
MTIQTKLLCAIAASGVATLLAGAPAQALTAQECSAKYQAAKKDGSLGTMKWNDFRKAQCGADATSAAATPAAPAEPKQAKKDGEPAAAPTLPAGPAIYPNAVDPKYAKETPGKARLHTCVDQYNANKANNGNGGLKWIQKGGGYYSECTKKLKGAA

SEQ ID NO: 8571 - protein, 182 aa, BradyrhizobiumColbertium
MRDGKGDVWVEAGFAELARSGVEGVRVEVLAKNLGVTKGGFYRRFADRAALLNAMLEVWREGRVAAIAQQTSLDGQAPRERLSAIIQLYSERLNPEGMAIELAIRQWARSDENAAAAVASVDAARLKHVAELYCATGLAAEQAEAQAFLFYCFIFGQSLLFVEHGPRRRSQLVARSAEKLLD

SEQ ID NO: 8572 - protein, 152 aa, BradyrhizobiumColbertium
MEEMAAFEPKNPECLTAATAMFAAQPAMRTLGLSIVDLSPGRVELAMPYATAFTQQNGFVHAGIITAGLDNACGVAAFTLMPREADILTVEFKTTLLAPARGERFVFRAEVIKPGRTLTFCEAKAFAQHDGKTKLIAAMTGTLMAIMPRPAA

SEQ ID NO: 8573 - protein, 209 aa, BradyrhizobiumColbertium
MPTRRAALTLIGAGSLAAGGITLARAASDDEVLTEAKVLRDPDTPVAGNPNGNVTIVEWSDYNCPYCRKLEPELRQVVQDDGKVRLVMKDWPILGPVSVTAARTALAAKFQDKYHQAHDAMMGVSSRLTEARINELLAAAGVDMDRLKRDLAGHAKDIDAILKRNNEQAEAFGFRGTPSFIVGKYRVPGVLTMAQFEQVIADARKAKMN

SEQ ID NO: 8574 - protein, 68 aa, BradyrhizobiumColbertium
MQTFFGMILGALLLAGGVYVYDSMQTSSVANGEVATTNRTIVNWDVAKADFDALRDRAHKDWVRISSK

SEQ ID NO: 8575 - protein, 356 aa, BradyrhizobiumColbertium
MTEAVVDDIVAVLPPLLNALEALGFLQRHLHPPAFASVMNAIGTPDEALRAARAAIGDWPEQFAGIRERLDAACNETLAAFAGIREVERGNGDLVAVFRALRHVPRAQEALYPLAVQFPPVSSFFLNDANRENHDVLSRLEVGAGEHTGIFHDHNEPGSRGGFSVYVPEYYVPDRAMPLVMALHGGSGNGRGFLWSWLRDARSLGAILVAPTATGPTWALMGDDTDTPNLMRVLETVRGRWSIDPTRMLLTGMSDGGTFCYVSGLESASPFTHLAPVAATFHPLLAEMADATRLQGLPVFITHGKLDWMFPVQTARQTQATLSAAGADVTYREIGDLSHTYPREINAELMAWLNRT

SEQ ID NO: 8576 - protein, 323 aa, BradyrhizobiumColbertium
MPALTEWRVPPANQPRASDYGFDLDRALASVVGLHAIIPPDAFSAETLGTERAGNGVVIDDGLVLTIGYLITEAESVWLHRADGRVVEGHVLGFDSETGFGLVQALGRLDVDPLPLGNSAETRIGDRVVVGGAGGRTRSVASQIVAKQEFAGYWEYLLDEAIFTYPAHPNWGGTALLNERGELIGIGSLQLERERDGKAEHVNMIVPIDLLKPILEDLRKFGRVNKPARPWLGLFSTEIDNRVVVIGISANGPAARAELKTGDVILAVDGEKVTSQSAFYRKMWALGPAGVDVPLTVHHEGVTFDVAVTSTDRFKLLKAPKLH

SEQ ID NO: 8577 - protein, 472 aa, BradyrhizobiumColbertium
MDNRSDIWRGIDTIKGRFIDLSDRVWGMPEVCYTEARSAAEHLAELRHQGFRITENVAGIPTALMGEWGEGGPVIAFMGEYDALPGLSQEAGVAEHRPVETGGHGHGCGHNLLGSAALLAATAVKDWLAENKVPGRVRYYGCPAEEGGAAKAFMVRSGAFEGADIAITWHPHSFWEVAVTPSLANTRADFIFTGRTSHAAASPHLGRSALDAVELMNVGVNYMREHMPSDARVHYALLDTGGIAPNVVQAHARVRYSIRARDLPGMNELVERVSKIAQGAALMTETKVEMKIISAVSNILPNAPLERALHQVMEELGPPHFDDADKRFAGQIRATLSDKDIDSVYYAIGMEPTDRPLADFLVPLDAKRNPLVGSTDVGDVSWVVPTVQVHAPTVAIGTPFHTWQVVAQGKSPHAHKAMVQAAKAMAGLGIRALTEPELIKAAKADLQKRTAKTPYVCPLPDHVAPPLDMSKI

SEQ ID NO: 8578 - protein, 596 aa, BradyrhizobiumColbertium
MLDKELRSMIGQVKDGRMDRRAFIQRMAAVGLTAPLANQILALGGVAMAQSPAVYKPTKRGGGGPLKLLWWQGPTLLNPHFATGTKDQDGSRLFYEPLASWDADGNLNPILAAEIPSVANGGLAADAKSVVWKIKPGVKWHDGKPLTADDFVFTWQYASDPATAAVSISTYGQITVEKVSDLSIRILFKTPTPFWANAFVGAYGCVLPKHLFADYKGSKSREAPNNLAPVGTGPYKFVEFKPGDVVRGQLNPDYHMPNRPHFDTIEMKGGGDAVSAARAVIQTGEFDFAWNMQVEDDVLLRLEKGGKGKTVYATGGDIEFIAINFTDPHTEVDGERSSMKTKHPILSDPNVRKALALLVDRESVKKAIYGRAGRTTANYLNGPEKFVSKNTSWEFNIEKASKMLDDAGWKVGSDGIREKDGKKFKLLYQTSTNGPRQKTQAIVKQACQKAGIDVELKSVVASVFFSSDVANPDTYPKFYADIEEFQIPMTQPDPALHMRRYISANVATKENKWQGQNFPRYVNKDYDAAIAAAETETDPVKRAALYIKCNDLLWQDTVFIPVMHRLKVEAAANTLRPALSGWANETDNIQDWYREA

SEQ ID NO: 8579 - protein, 310 aa, BradyrhizobiumColbertium
MIAIPSLLAISLVLFVVLALAPGDPFSELATNPNVPPEVQAALRAKFGLDDPIYLRYLHWLNAMLHGDWGFSFVSRMDVDTLILQRLPATLYVIGSAQILALLIAIPVGVYAATKPYSLFDQIANTLAFVGFSLPTFFTGILFILIFSVTLDWLPFVYTTDIKATGIHWVLEMIRQAIMPVAVLGLFQAASMTRFVRSAMLDVIRLDYVTTARAKGLGQATVIVKHVMRNAMIPVVTLIALQMPAVFGGAIVTEQIFRIPGIGSLLITSILSNDTPVVMAVTFVFACLVVLFNLIADVLYGLLDPRISLR

SEQ ID NO: 8580 - protein, 305 aa, BradyrhizobiumColbertium
MACLTLASPSAERRVYSPWRETWRRYSRHKLAVVSAFLLLVLVLAVVFGPFVWRVKIDEIDIVAGLQGPSLAHPFGTDDLGQDILARMIYGGRISLAVGLAAMLVSVFIGVLIGALAGMSRGALGHGLMWLTDLFLSLPQLPLLLLLIYLFRDGLKQVFGPEGGIFILIVLVIGGLRWMPVARLVRAQFLSIREKEFVEAARALGASPLRQVIKHILPNALGPVIIAGTIDVAAAIIAESTLSFLGLGFPPDTPTWGRLLYDAKDFLDIGPHWALFPGGAIFIAVVAINFIGDGLRDALDARRVI

SEQ ID NO: 8581 - protein, 86 aa, BradyrhizobiumColbertium
MIWPAAIRPGGIAISFRIDIAVTVLPQPDSPTTQSVSPLLMVMSTPSTAWRMPSSVEKWVLRPLISSSGAIRSPAAHRARHAGRRR

SEQ ID NO: 8582 - protein, 164 aa, BradyrhizobiumColbertium
MALACKPKLIIADEPTTALDVTIQAQILDLLQDMKDRFGMAVMLITHAMGVVAETAQRVVVMYAGKGVEEALVDDLFGDPRHPYTQGLIRSIPRIDLDAEHKTRLEAIGGSVPILINPPVGCRFAPRCKFAMNVCTEREPLLREIAPGHRMACHLGDTGLGGAA

SEQ ID NO: 8583 - protein, 322 aa, BradyrhizobiumColbertium
MSDQLLTPIEIGLTAAIVAIENHEPLILTARGADGLAGLPFGPFDAVSHRTFEIGLRAWVEEQTGLRLGYVEQLYNFGDRGRHAEAGDTGAHMVSIGYLALTRPVDGELAANAAGFAPWYRFFPWEDWRDEPPGIISRDIIPALTKWAEEETPETTRALPRKDRVRFYFGLDGAPWDEERVLDRYELLYEAGLIEEARRDGRPAALARKAIPPLGTSMRFDHRRILATAIARLRAKLKYRPVVFELLPAEFTLTELQYTVEAISGRHLHKQNFRRLVEMEALVEPTGVMSTQTGGRPAALYRFRREVLQERPAPGLRVRSRR

SEQ ID NO: 8584 - protein, 168 aa, BradyrhizobiumColbertium
MIHVCSLAALPETVRITGASHVLTVMANVEQVARPVSVLPANHLKVSMDDITEEMDGFVAPSETHIEQVLNFVRGWDRCAPLVVHCYAGISRSTASAFAAVCALNPDRDEVEIARKIRAASPIASPNRRIVSLADRALGRNGRMLRALDEMGPGAMMVEGRPFVIELE

SEQ ID NO: 8585 - protein, 204 aa, BradyrhizobiumColbertium
MTAKKTARDAPSRAWQRMLSGRRLDLLDPSPLDIEIADIAHGLARVARWNGQTIGAHIFSVAQHTLLVETVLRHEMPRADQRMRLAALLHDAPEYVIGDMISPFKAVLDGHYKAVEKRLLGAIHIRFGLPAELPEEITLAIKAADRGAAYLEATELAGFGESEAKRLFGKDPGLSDSVRRDYLTPWTAARAEKQFLERFGAVFA

SEQ ID NO: 8586 - protein, 208 aa, BradyrhizobiumColbertium
MSRAARLHPDGKTRCPWPGEDPLYVAYHDTEWGVPEYDDRALYEKLMLDGFQAGLSWITILRKRDNFREAFDDFQPEKIARYNAKKVHALMNDVGIVRNKAKIDGAILSAKSYLDIMEKGPGFSKLLWDFMDGKPLVNHFKTTASVPASTPLSVQISKELSSRGFKFVGPTIVYAFMQATGMVNDHLVDCHCHAICGKTRRKPRLKAK

SEQ ID NO: 8587 - protein, 293 aa, BradyrhizobiumColbertium
MKSAFLPDRGVVKVAGEDARNFLNGLITTDLDRLKPGLGRFGALLTPQGKIIVDFLITEVPAGHGGGFLIDCPKALADTLVTKLKFYKLRAKATVDNLSGDLGVLAAWDGQPTAQPDLAFADPRNDGLGYRILIPEDLKTKLSDLIGAELVDPAEYEAHRIALGVPRGGLDFMYSDAFPHETNMDRLAGVDFDKGCYVGQEVVSRMQHRGTARTRSVKVLLDGASPEPGATILAGDKPVGTIGSSAGGKGIALVRIDRVAEALDAGQPLTAGGLPLTLAEPDVVRIPAKQPIT

SEQ ID NO: 8588 - protein, 444 aa, BradyrhizobiumColbertium
MSQRFDVILRGGTVVNQDGEGVRDIGIKEGRIAELGPLSQGSAAEVIDCKGLHILPGVMDTQVHFREPGLTHKEDLETGSRSAVMGGVTAVFEMPNTAPLTVTDAEFTDKVNRAHHRMHCDFAFFIGGTRENVQDLPVLERAPGCAGVKVFIGSSTGALLVEDDESLRRIFQVIQRRAAFHAEDEYRLNDRKSQRIEGDARSHPVWRDETAALIATQRLVKLAHETGKRIHVLHISTKEEIEFLRDHKDVASCEATPHHLTLVAPECYEQLGTLAQMNPPVRGADHRAGIWRGIEQGIIDVLGSDHAPHTLEEKQKTYPASPSGMTGVQTLVPLMLDHVNAGRLSLARFVDLTSAGPARIYNMACKGRIAAGYDADFTIVDLKRSETITNKWVASKAGWTPYDGVRVTGWPVGTFIRGRRVMWQGELVTPSQGEAVRFLETLKP

SEQ ID NO: 8589 - protein, 488 aa, BradyrhizobiumColbertium
MGGAQAADLPVKAKAVEYVKICSLYGAGFYYIPGTDTCIKLGGYLRAEVALGTNSVYNGAFNGAAGAHNRLSNYYTMRARQDLNIDTRTATEYGVVRTFFDATFSWTTGGYTGGGTTAYDSAPAGTSGNGSVAGGSLGVYYAFIQFAGFTMGKAVSQFSAPWTNYPGNNFDGLVGGGGTVTGVNQFTYTADFGQGITASFSAQDQVQYYQAGINNLAVPGTFGYGTNNTAGSRSPDLVAMVRVDQAWGLFQASVAAHENHAGYYGATEPTGHPGDKWGWAAQLALSIKNIPTGAGDTINIQGVYTDGATRYNIQDLAGGTGAWTSYGSTGLAGAYQSIGIGFAPDAVHVTGGGLELVQTWGMRGAYTHNWDPYWNTALYGAYAGVRYTGAAKTAMCGVGGTVSVALGIASAACNPDYNIAQLGLITRWTPVKNLTFSADFNWTHLDQKYAAGTVTAAGASAALAKPVAAYELKDQDSFTLLLRAQRNW

SEQ ID NO: 8590 - protein, 802 aa, BradyrhizobiumColbertium
MAGLSVGCAALAKSNDTTAEASKNSVKPAGKDSSKGTGKETPKDTAKGASKGAAKDATKNAGREAAKGKSKPAAALTPAAATKPAAAANPAAASKPAAPKPAAAPKTHPAASSSAPKAAAAPASTATIRPTAPAAVAKPLAAPVLAPATRQHAAPRKPAMPAAVAATSSTSQADKDTLENVIELVRKRKAADATNHAASIADPVARKLAEWIILRSDDNGATVERYRAFLSANPSWPSQTFLRRRLEAAMWDDRRDASVAWSWFENESPISAKGRFMLAKAMLLRGDRANAERLVRDAWRSDPMSEDTENNALDQFGALLTPGDQKARMDTLLYGSETEAALRAAKRLGAGYVALARARIAAVKKAPNARALLDAVPRELHNDTGYIFSKIQLLRREEKFTEAAQLMLSAPKDPGRLRNLDEWWIERRLLARKMIDTEEFRSAYLIARDAALPSRDIYKTEQEFTAGWIALRFLNDPATAAQHFARIGVGSVNPTALARAGYWQGRAAEAMGRHQEARNAYARAAEQSTSYYGQLARAKLGLPQIELNSQPRGRGAERLEIVRAAQLLYELDERELAVPMLADMGENGDPEALAGLGELAQRYSDARGMLLLGKAALNRGLPFDFYAYPVNGIPQFTPIGPEVERSIIYAIARQESAFNPRVVSPAQAYGLMQVTPDAARYVCKRHGATYDLGRLKNDSVYNATLGSAELGGLLEDYRGSYIMTFAAYNAGRGSVKKWVERYGDPRNPKVDAVDWVELIPFSETRNYVQRIMENLQVYRARFGGGTRLQIEADLRRGAVSLE

SEQ ID NO: 8591 - protein, 296 aa, BradyrhizobiumColbertium
MAAKTKFRGSFTALVTPFKNGSLDEAAFRSLVNWQISEGTNGLVPVGTTGESPTLSHDEHKKVVEWCIAEAKGRVPVIAGAGSNSTQEAIELSQHAEKAGADAVLIVTPYYNKPTQEGMYQHFKAINDAIGIPIIIYNIPPRSVIDMSVDTMKRLWELKNIAGVKDATASMVRVSQQRAAMGEDFNQLSGEDATIIGYMAHGGHGCISVTSNVAPRLCSEFHAAWQKGDTKAALAIHDKLMPLHNNLFIESNPAPVKYAMSLLGKLEETLRLPMVPVSEPTRVAVRSAMVHAGLIN

SEQ ID NO: 8592 - protein, 137 aa, BradyrhizobiumColbertium
MLKEFREFAMKGNVVDLAVGVIIGAAFGAIVNSLVGDVIMPIIGAVTGGLDFSNYFTPLSKAVTATNLADAKKQGAVLAWGSFLTLTLNFVIVAFVLFLVIRAVNTLKRNEEAAPAAPPKPTAEVELLTEIRDLLKK

SEQ ID NO: 8593 - protein, 157 aa, BradyrhizobiumColbertium
MADKNERPIKVMAENRKARFNYAIEDTIEAGIALTGTEVKSIRNGKSTIAESYADSKNGEIWLINATIPEYLQGNRFNHEPKRPRKLLLHRRQINKLMGAVDREGMTLIPLKLYFNERGRAKLQLAVAKGKKLHDKRESEKKRDWSREKGRLMRARG

SEQ ID NO: 8594 - protein, 196 aa, BradyrhizobiumColbertium
MNQRNLLEVDWSQIPAPSDDGGAAHLKGMPLPPIDLLATDDTSVSLSALRGRTVVFAYPRTGEPGKIALVDDWDMIPGARGCTPQTCAFRDLYAELKAAGAAHVFGLSTQSNQYQTEMASRLHLPFPVLSDEKLALTRALNLPTMEVAGLTLIKRLALIIDDARITHVFYPVFPPDRNAADVLDWLRANPADGIKA

SEQ ID NO: 8595 - protein, 224 aa, BradyrhizobiumColbertium
MTTSRSEAARSAPQPLEVVPDRDCPLCPRLLAFREANRAREPSWHNAPVAPFGDIKARLLIVGLAPGMQGANRTGRPFTGDYAGDLLYATLLEYGFARGTYRARPDDGLKLVDCRIANAVHCVPPQNKPLPIEINTCRRFLVANLASMPNLRAIIALGRIAHDSVLKPLNLKGSQAPFGHGAVHQAGGLRLYDSYHCSRYNTNTGVLTPDMFRRVFAKVKADLD

SEQ ID NO: 8596 - protein, 214 aa, BradyrhizobiumColbertium
MSPSSTNKIALFIDGANLYATAKTLGFDIDYKRLLKEFQSRGTLLRAFYYTAIIEDQEYSSIRPLIDWLDYNGYTVVTKATKEFIDASGRRKVKGNMDIELAVDAMELAEHIDQMVLFSGDGDFRSLVEAVQRRGVRVTVVSTIASQPPMIADELRRQADVFTDLVELQSKLGRDPSERPAPRDRGERGERHHAPQFLQRATTMAPRGDDDFEE

SEQ ID NO: 8597 - protein, 130 aa, BradyrhizobiumColbertium
MARVTVEDCIDKVDNRFDLVLLAAHRARMISSGSQLTVDRDNDKNPVVSLREIAETTISPEDLREELVHSLQKFVEVDEPEPDAVPLIGSAGASVDADDTEVAVERMTEEELLKGLEGLAPPEEQPEEDE

SEQ ID NO: 8598 - protein, 66 aa, BradyrhizobiumColbertium
MTHHARAGPGRARDRRSRGHCNRFGCGLHLRGSAAPIYHPILPSTDRAPTRCTHPSSDRPRVRSIQ

SEQ ID NO: 8599 - protein, 724 aa, BradyrhizobiumColbertium
MRQYDLVERVRSYNPNTDEDLLNRAYVYAMKAHGSQTRASGDPYFSHPLEVAAILTDMKLDDATIVAALLHDTIEDTEATRAEIDQIFGPEIGALVEGLTKLKRLELVSREAKQAENLRKLLLAIADDVRVLLVKLADRLHNMRTLDFVPTESRRRIAEETLDIYAPLAGRMGMQEMREELEDLSFRTLDPEAYSVVMQRLDALAERNRNLIGEIEDQLSNNLRHRGLGARVYGRRKKPFSIWTKMERKSVGFEQLSDIFGFRLVVNDVEACYRALGIVHTTWPVVPGRFKDYISTPKQNDYRSIHTTVIGPGNQRVELQIRTEAMDQIAERGIAAHVFYKEGVGSPTEYLKRESNAFAWLRHTIGILSESANPEEFLEHTKLELFHDQVFCFTPKGKLIALPRHANVIDFAYAVHTDVGNSAVGCKINGKFAPLSSELQNGDEVEVLTSEAQSAPPSAWETLAVTGKARAAIRRATRTAVRDQYVGLGRRIVERLFERAKIEYADDKLKGALPRLARTSIEDVMAAVGRGEIKASHVARAMYPDYKEERIARYGVKKGLAAKLKEKSSEPRSPVAIPIRGINSDLPVKFAPNGGAVPGDRIVGIVTPGEGITIYPIQAPALKDFEEEPERWLDVRWDIEDSAPQRFPARIRVENVNEPGALAQIATVIAEHDGNIDNISMQRRSPDFTETTIDLEVYDLKHLSAILAQLRAKAVVARVERVNG

SEQ ID NO: 8600 - protein, 254 aa, BradyrhizobiumColbertium
MSPEMPAAPLRLGVNVDHVATLRNARGGRNPDPVRAALLAIEAGADGITAHLREDRRHIRDEDMARLKAEISGPLNFEMAATEDMLRISLATKPHAVCLVPERRQEVTTEGGLDVVGQHNALAPYIARLTDAGIRVSLFIAADPAQIEMAARLRAPVIEIHTGAWCDAVAESRTDKAEAEWRRIVAGARLAKSAGLEVHAGHGLDYATAETIAALPEIMELNIGHYMMGEALFVGLAETVRSMRAAMDRGRSRA

SEQ ID NO: 8601 - protein, 139 aa, BradyrhizobiumColbertium
MIIGIGSDLIDITRVAGVIERHGERFLDRIFTAAERAKAERRAKNEKMVVATYAKRFAAKEACSKALGTGIRRGVWWRDMGVVNLPGGRPTMQLTGGALARLQALTPEGFEARIDLSITDDWPLAQAFVIISAVPLAKP

SEQ ID NO: 8602 - protein, 254 aa, BradyrhizobiumColbertium
MSVTSGTKTESGVGETIRVVIHALLIALVIRTFLFQPFNIPSGSMKATLLVGDYLFVSKYSYGYSHYSIPFSPNLFSGRIWGSDPNRGDIVVFRLPKDDSTDYIKRVIGLPGDRIQMRDGLLYINDAPVERQRMSEYVGEDPCGSEGGGISRVKRWKETLPNGVSYETLDCADNGYMDNTNVYNVPPGHFFMMGDNRDNSTDSRFLGQVGYVPQENLIGRAQMIFFSIAEGEHAWMFWRWPWAVRWNRFFKIVR

SEQ ID NO: 8603 - protein, 278 aa, BradyrhizobiumColbertium
MKDEAKDIVSQPVEAQAGPEGEAATRTAANKTPAKKKRARSSKAKSTDASALLEARIGHSFTDPNLLMQAITHVSALKSGRKRGDSYQRLEFLGDHVLGLVVSDMLYHAFPNADEGELSKRLAELVRKESCAEVAKSLGLLDDIKLGSVGSSADARLRKSILGDICEAVIGAIFLDGGHAAAAEFVRRNWTERMHKPRRPLRDPKTVLQEWAQGKGLPTPVYREVERTGPHHDPQFRVAVDLPGLAPAEGIGGSKRAAEKVAASVMIEREGVGGSNDG

SEQ ID NO: 8604 - protein, 308 aa, BradyrhizobiumColbertium
MTAEASGEAPTATRCGFVALIGAPNVGKSTLVNALVGAKVTIVSRKVQTTRALIRGIVIENNAQIILVDTPGIFLPKRRLDRAMVSTAWSGAHDADLVCVLLDAKTGIDEEAEAILAKASSVNHEKILVINKVDLVQREKLLALAQAANERMKFVRTFMISAISGDGVDDIRKTLAEMVPPGPFLYPEDQMSDAPMRQLAAEITREKIYQKLHQELPYQSTVETDKWEERKDKSVRIEQTIFVERESQRKIVLGKGGATIKSIGADSRKELMQILDVPVHLFLFVKVRENWGDDPDRYREMGLDFPRE

SEQ ID NO: 8605 - protein, 126 aa, BradyrhizobiumColbertium
MSVPSNVRRFEALLYASLMLDALSVAVHDRTPNAGMTEQMIMTETLLAGGMILLLVYFVRLAAHGRKNWPRWVLTAALVLSVISLGQIIGEKGLALDSAIEIVSCALTTMGLYFSFTGDAQGWFNA

SEQ ID NO: 8606 - protein, 250 aa, BradyrhizobiumColbertium
MEWTDEGIVLGVRRHGESSAIVELLTRGHGRHLGLVRGGASSRMRPLLQPGNSVSAVWRARLDEHLGTYTIEGLKLRAANLLTTSHGVYGITHLASIARLLPERDPHEEIFALLEHSLDDFDDIGGAAVHVIHFELAMLAELGFGLALENCAVTGETTDLIYVSPKSGGAVSRGAGEPWRDRLLRLPPFLRQGEAASDLTEQDLQDGFRLTGLFLLRHVLEPRGQGHSDARAGFINALIRQQARASLPAP

SEQ ID NO: 8607 - protein, 752 aa, BradyrhizobiumColbertium
MGKRIVPPEEPAEIHEVPLREALEERYLAYALSTIMHRALPDARDGLKPVHRRILYGMRLLRLDPGTAFKKSAKIVGDVMGSFHPHGDQAIYDAMVRLAQDFSSRYPLVDGQGNFGNIDGDNPAAYRYTEARMTDVARLLLDGIDEDGVEFRANYDGQSKEPVVLPGGFPNLLANGAQGIAVGMATSIPPHNAAELCDAALHLIEKPDAKSKALLKWVKGPDFPTGGIIVDSKQAIAEAYTTGRGSFRVRARWQQEEGARGTWVVVVTEIPFLVQKSRMVEKIAELLDQKKLPLVGEVRDESAEDVRLVIEPKSKNVDPALMMESLFRLTELENKIPLNLNVLIKGRIPKVVGLAEALREWLDHLRDVLIRRTNYRKGEIEHRLEILGGLLIAYLNIDEVIRIIRNEDEPKPALIKAFKLTELQADSILNMRLRNLRKLEEMEIRTEDKDLRKELKGIQALLASEPEQWKKVSEQVGKVREMFGPKTPLGKRRTTFADAPEHDLAAIEEAFVEREPVTVVVSDKGWIRTMKGHVEDLSGLAFKQDDRLGFAFFAETTSKLLLFATNGKFYSLDVAKLPGGRGHGEPIRLFIDLEQEAAPVALFVHKGGRKFLVASHEGQGFVVNEDDCVGTTKKGKQVLNVDMPNEARAITEVTGDTVAVIGENRKMLVFPLDQVPEMARGRGVRLQKYKDGGLSDVAVFDSKTGLTWKDSAGREFSATMKELAEWQGTRADAGRLPPKGFPKSNKFGRGIG

SEQ ID NO: 8608 - protein, 530 aa, BradyrhizobiumColbertium
MLATVTVSREGKKKPMFRLKSLIPALLALALAAPAHAAGNLVAVLEAEIVTLDPHFSTAYISRTFGYMVFDTLFAKDSKGDVRPQMVQDWKVSPDGLTYSFTLRDGLKWHDGQPVTSADCVASLRRWGTRSALGRRIFAITVSLEPIDAKTFVLTLKEPSGLVIDALGNPVSPVAFMMPERIAKTPGDQRITEIIGSGPFVYSKADHRTGDRMILKKFADYVPRPEPADFLAGGKRVNVDSLEIRVIPDGATAASALQAGEVDFMQYAPFDLLPQLEKNSRVKLLNFTGGNMFAGAYRLNAASKPFDDPEIRRVLWKLVDQREVLDALGLDAKYATPCATFFTCGTTYESKAGTEAAAKPSIDAAKAALKATKYAGEPVVVMQANDLEAPRVSAQVLAERLKAAGFNVDLQVMDWASVLARRAKKEGWSVYGVHAGGFDLGSPLTNVMVAFNCADFTGWQCDARITPLLEAFAKAPAEEDRKKIAAEIQAVMYEQAPGIPWGQFAQPAAYRATLRGLIPSAIPVFWNVEK

SEQ ID NO: 8609 - protein, 514 aa, BradyrhizobiumColbertium
MYDVIVVGGGSAGAAVAARLSEDPARRVLLLEAGLDWRADEAPWEVRTPNPIPIIHKREYQEKWQWPDLLTRRVAGQEPRFYWRGKGLGGSSMMNGQIAIRGVADAFDEWAANGCTGWSAKEVMPLFSVIEDDLEFGDAAGHGRGGPLPVYRAPTEKWGPIDRGLRDAALASGYPWCADVNGPDGEGVACYPINSRDGRRITTNEGYLEPARGRANLEIRGHALVERVLISDGRATGVRVRIEGQGTSDISARQIVLCAGAIHSPAILLRSGIGPAGELKAMGIAVARDLPVGKHFFDHPLFRATIQLREELRPTDPDTRHTNCCVTYSSGLADGGKRDMILIAFNHRGIGNAGAIGAGLFNAYSRGTLKLASTDPSIDPVVEENMLADPRDMLRMIDAVRRLAVITSQPALSGIAEWIRLADTDLTLPQAAALPDHELDAVLRRETGDIQHAAGSCRMSGVGDADGVVNPDGTVKGLSGLRVADASIMPSDCRANTHFTTVVIGEAIARMMMR

SEQ ID NO: 8610 - protein, 404 aa, BradyrhizobiumColbertium
MTDLSIDARLLAPDNDRHRANLPIAAIAAAILFGGAMALSGTISWQQGLLFLLGGGLGLTLYHALFGFTSAWRVFIVSRRGAGLRAQMVMLALATALFFPALAHGSLFGNAVRGELGAVGVGMLSGAFLFGLGMQLGGGCASGTLYTAGGGNTRMLVTLAAFIAGSTIGAMHLPWWSELPNVGSVSLIDQLGWLPALLLCWAAMAAIHLFTVRAELRRHGELEPGARTKLRGARRFLQGPWPLLWGAVLLAIGNFATLYLAGRPWGITSAFALWGSKILMGLGIDAASWPYWQGARAASLNQSIFADITSVMDFGIILGALLAAGLAGKFSPTWRISPRSLLAAVVGGLLLGYGARLAYGCNIGAYFSGIASGSLHGWCWLVAAFVGNILGTQLRPLFGLAVER

SEQ ID NO: 8611 - protein, 251 aa, BradyrhizobiumColbertium
MAKIAIVTGASRGLGRNMAVNIARKGSDVIITYRSRADLAESAVSEIKALGRRAVAFQLDSANVAKFPDFARALSQTLKETFGRETFDYLVHNAGDGLFATLGETTVAQFDQQMNLHVKGVFFLTQALLPLMADGGSIVTIGSGLTRVTYPGFAVYTIAKAAADMMAVCMAKELGPRGIRVNSVAPGAIETDFGGGLVRDNPDVNKQFAGMTALGRVGVPDDIGPMVASLLSEDNRWVTGQRIEVSGGQMI

SEQ ID NO: 8612 - protein, 314 aa, BradyrhizobiumColbertium
MLDVVRRYAHLHSDQNGAAKTPIPGLTAIRATTQGQLQHAINRPLVALVLQGRKRVTMGSHTFDFGAGESLLISADVPTVSQITRASAKAPYFSLIVELEPAVIANLIVEMNLAPEQRGAPVSVDPTESEVADAALRLMRLLDRPSSLPVLQSQFVREIHYWLLAGRHGASIRALGVADSHAQRIARAVAIIRSEYARPLRIERLADAAAMSPSSFHQHFRAITSLSPLQFQKQLRLIEARRMMLEEGSEVSSAAFAVGYESVPQFTREYGRMFGLPPARDIKAALGQMDTAPEAMPVCARNVRARTAQCAALP

SEQ ID NO: 8613 - protein, 461 aa, BradyrhizobiumColbertium
MDIRNVQAEADAGHGVSFGEAFRVWLRVASLSFGGPAGQIAVMHRILVEEKRWISEGRFLHALNYCMLLPGPEAQQLATYVGWLMHRTAGGLMAGGLFILPGVVAIMGLSYIYAAFGNVSFVEALFFGLKAAVLAIVVEAVVRVGKRALKNRIMVALAAAAFIAIFFFAVPFPIIIIAAGIIGYVGARSGRSEFAPAGHGHGDSSAAVDSMLGEAMPDHVKPDTARAIRLSALWLALWLVPVIGLLLAFGQGNVFSQIALFFSKMALVTFGGAYAVLAYVAQQAVEHYHWLKPHEMLDGLGMAETTPGPLIMVLQFVGFMAAYRDPSGLSPMLAATLGGLLATWVTFTPCFLWIFLGAPYIERLRGNTGLAGALSAITAAVVGVILNLSIWFALHTLFRETVPVHACPLDFDMPVPRSVDLPALLLAVAAATAIFRFKLGMLTVLAGSCAAGLALRLAAVI

SEQ ID NO: 8614 - protein, 272 aa, BradyrhizobiumColbertium
MSTFTTISSDKLARLIGTANAPALIDVRTEEDFAADRRLIPGSIKFGHDNVTDWGGAFAGRRAVVSCLRGEKLAQGTAAWLRQLGVQAETLEGGFEGWKAARLPLVDVRKLPPRDARGRTVWVTRARPKVDRIACPWLIRRFVDPDAVFLYVAPSEVVGVGERFNAAPFDIENVFWSHRGELCTFDVMIEEFGIAFPPLLRLATLVRGADTARPDLAPEAPGLLAASLGLSRMYDDDLDQLEAGMLLYDAFFRWCRDATAETHNWPTNKVKA

SEQ ID NO: 8615 - protein, 321 aa, BradyrhizobiumColbertium
MHSHSIEQWTHDHAFLGEKHEDNERRTWLVVVLTLVMMVGEIVAGSVFGSMALLADGWHMGTHAAALGIAAFAYRFARRHLGNAHFTFGTGKFGDLAAFASAVILGLVAVEIAYESVLRLITPVPIVYGEAMAVAALGLCVNLVSAWLLRDGHDHHHHGHDHGHAHDDHDDRDRDHRGHHHHDNNLRAAYVHVMTDAATSVLAIAALAVAMYSGWVWADPAVGLIGSAVIASWAFGLIKSSGAVLLDARADEKLERVIRARMEVGDDRVTDLHLWQVGPGHCAVLLSVVSDKPNEPSVYKRRLAGLKGLSHVTVEVETCPH

SEQ ID NO: 8616 - protein, 425 aa, BradyrhizobiumColbertium
MSARSQVSRPQQGEYAADAVDALSRQAANARDDKDQKHKDMSQRRLPIILALGTTQTLAWASSYYLPALLADPMAHELGISSNWIFGAFSTALVLSAMLGPRIGRQIDLFGGRQVLSASNLIMAAGLVLLGLSQSVAVMAIAWLVLGIGMAMGLYDAAFAALGRIYGTEARGPITGITLMAGFASTVGWPLTAWGLSHIGWRETCFAWAAANVLIGLPLNFFMLPVIKGAKQAAATAEKPHVPLDRTMLLLAFVFAAVWTVTGAMAAHFPRILETTGATPAEAIAAGALIGPAQVGARMLEAGFLSRFHPLWSTRLASLTHPIGAVIVAIFGGAAASAFALFHGSGNGILTIARGTLPLSIFGPKDFGYRLGIIGAPARMAQAVAPLAFGLLIDLMGAKVLIVSSALSLSALAALFLIRTGPRPD

SEQ ID NO: 8617 - protein, 419 aa, BradyrhizobiumColbertium
MQLTSRLALMNWLAGQGLTGLPESELLRGFCERCCAEGLELSRGLVVIDTLHPIYEGRGFRWSDRSSNESDAFEYGSTADGDAAKNWRRSVFFHMLENGHDEMVIDLAEAPSLDFSQIGELADKGHKHYLAFVHRFGENGALGLMDCLYSCWTTRREGGFSGLELEALRDLVPVLGLAIKSAQQVDIVRTLGRVYLGRDASEQVLRGRISRGVTERINAVLWYSDLRGSTGISESIGPDEIIPFLNDYAQAVIDAIHDAGGDVLKLIGDGVLAMFWGEDMADARRAALRAEHLFRKNLAALNERRAAEGRPITSAYIGLHVGEVFYGNIGSEDRLDFTVVGPTVNEVSRIASMSRSVDRELLASSEFYKGLDAAGRRYLVSTGRYALRGIGRAQDLYTLDPEVDANEPVMGSYERYLAG

SEQ ID NO: 8618 - protein, 414 aa, BradyrhizobiumColbertium
MSMPARLPDTFNRLAWSNLAAQSAEQIALAAAPIVAVLTLGVAEGRTGLLQTALTLPFVIFAIPAGLLADRISRRALMAAAEALRAAALAAIVLLLALGALNLPLLALLGFAAVCGTVVYSVAAPALVPSLVSSDLLPAANARIELARTIAFASGPALGGALVGWWGASPAFGFAAALSAIAVVLLSGIYEPARAPAPRRHPLQDIREGAAFVFRHPLLRPVFITQFIFNTGWFLQIAVFVPYAVRHLGLTALGVGTVLTMYGVGMVIGALVATRVMRRLSFGTVVGLGPVTGFVAALVMALTVPLPSPWLAAFSFFLLGVGPILWVISTTTLRQSVTPSRLLGRVSAINIMSYGARPLGSALGAGVGGLWSAEACLYLAAAVFGVQALVILLSPAVSLDRQPDMVGDEAAVRC

SEQ ID NO: 8619 - protein, 454 aa, BradyrhizobiumColbertium
MDARSPDLTEALSQPASGWRSDAPTTKSLAEVNSTVSIPVAGHWSRRLLAFVGPGYLVSVGYMDPGNWATDLAGGSKFGYTLLSVILLSNLMAILLQSLAARLGIVTDRDLAQACRASYPPAVNFLLWLACEAAIIACDLAEVIGTAIALKLLFGIPLIGGALLAALDAFLLLLLMNRGFRFLEAFVIALLVVIAVCFAVQIAAAAPPVAEVLRGFVPTSEIFTNSDMLYIAIGIIGATVMPHNLYLHSSIVQTRAYERNDTGRREAIKWATTDSTIALMLALFINAAILVVAAATFHKSGHSDVAEIGQAFELLSPLLGLGIASTLFAVALLASGLNSTVTATLAGQIVMEGFLDLRLPSWARRLLTRGIAIIPVIVVTAIYGERGTADLLVFSQVVLSMQLPFAVIPLVRFVSDRRKMGKFAIPMSVAAVAWIVASVIVILNVKLLADTLFG

SEQ ID NO: 8620 - protein, 42 aa, BradyrhizobiumColbertium
MIACAIIERRQVYCLYQGYPRAICPAQQCVKDVDLDVNPLGP

SEQ ID NO: 8621 - protein, 229 aa, BradyrhizobiumColbertium
MFTHLVGDRAGDLNDLLTHGGFRRSQSIAYRPACDQCRACVSVRVIANEFRPSRNFRKVMTRNADIIGEQRSAVPTSEQYSVFRAYLDARHRHGGMADMTVLDYAMMVEDSHVETRIIEYRKRGPDSGLTGRGEELIAVALTDVLSDGLSMVYSFFEPSQVSRSMGTFMILDHIARARRQGLPYVYLGYWIEGSKKMDYKARFLPQQRLAPSGWLRIDAQGDVASEPQD

SEQ ID NO: 8622 - protein, 180 aa, BradyrhizobiumColbertium
MSYDPGNSGAWRNDGGVQPHAYDPDLHPELFRGVATRRVFAFFIDMGVISVPVILGYIFIALFGVVTLGIGWALFWIAWPASVVWAIVYYGASIGGPSSATVGMRLMDLELRTWYGAPGYFVLGATHAVLFWVTVSFLTPFVVLVGLFNGRRRLLHDFLLGTVVINNSVRVPAPQTARTW

SEQ ID NO: 8623 - protein, 353 aa, BradyrhizobiumColbertium
MAIKYGRPIELREVSRRDSTAVPHALDLTVRPRRNRKAEWARRMVRENVLTTDDLIWPLFLIDGHNKREQVASMPGVDRLSVDQAVREAERAMKLTIPCLALFPYTDPSLRDEAGSEATNPDNLVCQAVRAIKKEFPEIGILCDVALDPFTSHGHDGLISDGKILNDETVAVLVRQALVQAEAGCDIIAPSDMMDGRVAAIRQGLDRAGLLDVQIMAYAAKYASAFYGPFRDAIGSAKTLTGDKRTYQMDSANTDEALREVELDIAEGADMVMVKPGMPYLDVVRRVKDTFTMPTFAYQVSGEYAMIAAAANNGWLDGERAMMESLLAFKRAGADGVLSYFAPKAAEKLRAQT

SEQ ID NO: 8624 - protein, 166 aa, BradyrhizobiumColbertium
MSEISTRDAARDSAHARDARDNARESALSVAAISSERAESDDSVWTRRLVLFLRVMALLSILKGLYHWAQVTGFVGGEDEAFENQSMAWQAATVYFAVIELVAAVGLWLATPWGAVVWLTTVVSMAVIELMFPGIYGGSLVVVGVEVFMLAAYLALAWMAARERPP

SEQ ID NO: 8625 - protein, 172 aa, BradyrhizobiumColbertium
MMKAVATAADTAERVSGQQGSVQALYLEALTLVERLHRRLLDVIKDEFDRRGRADINSVQALLLYNIGDKELTAGELRTRGYYLGSNVSYNLKKLVELGFLDHQRSRVDRRSVRIRLTPQGQEVRRIVDALYQKHVKTVEQVGGISGDEFATLNKSLHRLERFWTDQILYRL

SEQ ID NO: 8626 - protein, 336 aa, BradyrhizobiumColbertium
MSTPIPVLHFDTSNFPETERFDIWRSGIATHQITRAGPADGPFEAVVDAWTLGDMVVTHSRFGPVRMVRTAEMARADGIDMIQVVFVKAGAVTFTTEDEPSPRTMRQGELAAFDTRRTLVTEGTALDCITCTIARRAFERAGYDPSTHGVIIDGAWGRLVADFLLSFVQQLEEMTVQDAASLSAAFVGLLATVLGARPPGSEPASRSPVATLRERAEAYIDQNLSSDRLDIAAMSRALATSKSNLYRAFANAGGVTAYVRKRRLETIHARLNAGEGLAIGDVAREYGFPSAAHFSRAFRKQFGFSPRRARLGGLSDPVVVADDEVALFRHWEERLR

SEQ ID NO: 8627 - protein, 873 aa, BradyrhizobiumColbertium
MIASDLTLKAHAMPTSDLSRVASRLSSRAFGIRSALPAGFGSRGWISPVRCLAMVAAASAAMTLLSAPAQATCTPVAANDASATCTGVTTDQNGTNGYGSGAIDNLSVTVVQGASVTGTSYGIRFNTGTVVNSGTITGINDRGIFGATSANVTNFGTISGYLGVDTGGNGVVTNFGAISGTTSDGVRGTTITVVNSGTITAAYDGVFAIGTSTVVNSGSITGNSHGVYALADISVDNSGSIASVGGAIYAPNGSATVVNSGTIAMTDTFGSVMYALTNLTLINSGIVTSTSVGPSSSGTIDVTNSGSILNNGFGPAISGTVAKVTNSGIIIAVDGAAVSASNVTVTNSGLIRGYWEGIGSQYATVTNSGTIIGEHSAGVQASFDVIVTNSGAITGSGAGIRTFNGSINTVNFGTITGKGPSGIGILSGTTGTVVNSGTIIGEGGTAIQFGATTPAQSDSLTVLPGARFGGVVDFTGGADTVTFGLGSWILNTANFDKTLSTVTTAGNPYVVTSNQIIVADLSSFGAQNRAIMDITGWIGSVLPDAPVFATGAATASAFAAPEPAASPFDAFASFPSGALGYAPTPAFKGASTNYGDGNVVWAKAFGGQRLQDNSGALIGGTTTGYGGAVGYERLISSDLRLGMLAGGSSNKTNLYFNAGSTSTDAVFGGAYGRKTWGGTFLDLSVIGGSLDNSSVRNIGGGLAFATATASYGGWFVNPALMFGRRLGVDGRGFTVTPAVKVRYVAAHFGGYAETGAGAANLSAAGRDFQAWEERAEITFANTRTLANGNRVTTRVAAGALAQQRSAGGLLDVVLLGQNFIVATPERSSVAGGYSSAGVDWQMGRLTLFAAGEATYTNDVSRTYSGKAGARVSW

SEQ ID NO: 8628 - protein, 78 aa, BradyrhizobiumColbertium
MLVERGLQAMNVELVSEAYAIAANYLRRSGAIPDSLVTDERLLGIVVKLIQHGEFNKIRLANKAITWFETQSEARAVA

SEQ ID NO: 8629 - protein, 73 aa, BradyrhizobiumColbertium
MEAAIDRIMQTYDLLANRTAAASVEARAKVTNYLNILMEAGETDTHRLTVCGLTYLRQLDGSVDPVKAGYTGL

SEQ ID NO: 8630 - protein, 47 aa, BradyrhizobiumColbertium
MAIGSGERDLPHCPPPAKHLRVGPDIYARYGGIGGLSLRSGPMEPLV

SEQ ID NO: 8631 - protein, 432 aa, BradyrhizobiumColbertium
MTAPKTASAPDSFFSASLEQADPEIAAAIRGELGRQRHEVELIASENIVSRAVLEAQGSVMTNKYAEGYPGARYYGGCEWVDVAENLAIDRAKKLFGANFANVQPNSGSQMNQAVFLALLQPGDTFMGLDLAAGGHLTHGSPVNMSGKWFKAAHYTVRREDQIIDMDAVAKQAEQVKPKLIIAGGSAYSRAWDFKRFREIADSVGAYLLVDMAHFAGLVAGGVHASPVPYAHVTTTTTHKSLRGPRGGLMLWNDETLTKKLNSAIFPGLQGGPLMHVIAAKAVAFGEALRPDFKVYAKNVVENAKALAETLKGHGLDIVSGGTDNHLMLVDLRPKGLKGNVSEKALVRAAITCNKNGIPFDPESPFVTSGIRLGTPAATSRGFGVAEFQQVGGMIAEVLNAIAQSSDGKAPLVEAAIKERVKALTDRFPIYQ

SEQ ID NO: 8632 - protein, 131 aa, BradyrhizobiumColbertium
MCVACNFRFTTFERVQLRELTVIKRNGRRVPFDRDKLMRSVQISLRKRQVEPERVEKMVSTIVRELETGGEAEISSEVIGETVMEHLRTLDDVAYVRFASVYRNFREAKDFADVLGELSGEEEARLAAIRK

SEQ ID NO: 8633 - protein, 382 aa, BradyrhizobiumColbertium
MIFRILEDQFAQKAREAKDADRRFMELALSLGKRGQGRTWPNPAVGAVIVKDGVIVGRGWTQPGGRPHGEPEALRRAGESARGATLYVTLEPCSHFGKSPPCADAVIAAGIKRVVAAIEDPNPEVAGQGHARLRAAGINVDVGLCAAEAAFDHAGHFRRIRDKRPHVILKLAVSPDGKIGAAGGKPVAITGEAARDRVHLLRAQSDAILVGIGTVLADDPLLNCRLPGMAARSPVRVVLDQSLRIPASSRLVRTARETPLWVIGSELAEAAAATRLGAAGAQIMRMPSGSASGLGLPAVLNALAEKGITRLMVEGGSRVASSFIAADLVDEIWLFRGAEEVGPGGVDALDALPLSKITQSQAYKVHASETFGKDILTIYERA

SEQ ID NO: 8634 - protein, 202 aa, BradyrhizobiumColbertium
MFTGIVTDIGEIIRFTPTAQGQLHRLRIACRYDRTTIADGASIACNGVCLTVVASGVADGRTWFDVDAAAETLALTTAKHWKVGTKLNLERALKIGDELGGHIVAGHADGIATIVSRQDLPDMARFELSTTRELARFIATKGSITLDGVSLTINTVADVTFSVLIIPHTLTVTTIGAWKAGDEVNIEVDLMARYAARLTEMK

SEQ ID NO: 8635 - protein, 163 aa, BradyrhizobiumColbertium
MADARRAPLKDQTDISGARALIVEARFYDDLQDALLDGAVAELKAAGLTHDVITVPGALEIPAAIAIAVDAAAASGRAYDAVIALGCVIRGDTIHFEIVSQESSRALMDLAVARKLPLGNGILTVNTEAQAWARARASELNKGGDAARAALAMLRIKRRLAQA

SEQ ID NO: 8636 - protein, 165 aa, BradyrhizobiumColbertium
MADNSKKPAGTQEKKANRRGAARLAAVQALYQMDIAGAGINDIFAEFESHWLGNEVEGDTYLPAEAAFFRDVVSGVVRDQKKLDPLIDEALSKGWPLKRIEAILRAVLRAGAYELQNRKDVPARVVVSEYVDVANAFVDREETGMVNAVLDQIGRQFRGDEFGRG

SEQ ID NO: 8637 - protein, 332 aa, BradyrhizobiumColbertium
MTTPQSPSAEDSLIARYFKPIATDPGALGLVDDAAVLSSSGEDIVVTTDAVVEGVHYLADDPPETIARKALRVNLSDLAAKGARPAGFVLTLALRSQEDAWLRPFADALGEDARNFVCPLLGGDTVSTPGPQMISITAFGRVPRGRMVGRTGARPGDRILVTGTIGDAALGLDVLKSGAAAAVLTSDAAAREALVSRYRVPQPRNLLAQAVLDFATAAMDVSDGLAGDLTKLCAASGVSASVDVASVPLSAAAVGLLARNIICVETLLAGGDDYEVLCTVPSAQSDALIAAGRAVGVAVTAIGTIIEGHERPRFLDEQGQELSLARLSYSHF

SEQ ID NO: 8638 - protein, 695 aa, BradyrhizobiumColbertium
MLSVAYAVWATSSVLSADAGSPRMQEIAGAVREGAQAYLRRQYTTIGLVGIVIFVLLAYFLGLYVAIGFAIGAILSGAAGFIGMNVSVRANVRTAQAATTSLAGGLELAFKAGAITGLLVAGLALLGVTIYFAFLVHWLKLAPDSRLVVDALVALGFGASLISIFARLGGGIFTKGADVGGDLVGKVEAGIPEDDPRNPATIADNVGDNVGDCAGMAADLFETYAVTAVATMVLAAIFFAKTPILASMMTLPLAIGGICIITSIIGTFFVKLGPSQSIMGALYKGLIATGILSLIGIALVIYYLIGFGKLEGVDYTGMALFECGVVGLIVTALIIWITEYYTGTDYRPVKSIAQASVTGHGTNVIQGLAISMEATALPAIVIIAGILVTYSLAGLFGIAIATATMLALAGMIVALDAFGPVTDNAGGIAEMAGLPKEVRKSTDALDAVGNTTKAVTKGYAIGSAGLGALVLFAAYNEDLKYFVAGSAQHPYFAGVNPDFSLNNPYVVVGLLFGGLLPYLFGAMGMTAVGRAASAIVEEVRRQFREKPGIMQGTDKPDYGKAVDLLTKAAIKEMIIPSLLPVLSPIVVYFVIYAIAGGGAAGKSAAFSAVGAMLLGVIVTGLFVAISMTSGGGAWDNAKKYIEDGHFGGKGSDAHKSAVTGDTVGDPYKDTAGPAVNPMIKITNIVALLLLAILAH

SEQ ID NO: 8639 - protein, 337 aa, BradyrhizobiumColbertium
MPKKRQNTLLSRRRVLTGAAGLAAAAILPRSSLADWKPTENVRLIVPAAAGGSTDVMGRLLAAHLQTAWGQSAVVENRSGGGGTIGTAEAVRAKPDGHTILIGNPGPNAIAYSIFKNLSYKPDQLQPVSNMIRIPNIVSAHPKTGIKSIPELIAYLKANPDKLSYASSGVGQSPHLTGAWFLQLTGLKMTHIPFRGAGPALQAALAGDIQILFDNLYPSLPQVQNGTLNGLCVTTPERSELAKDLPTMRESAPELANFDVSSWFSVFLPKGVSPEVLNALNLQVKAMLERDDVKKQIAAMGARADYGTPQQFAAFLDAETKKFAGIIQKEGLQMDVQ

SEQ ID NO: 8640 - protein, 46 aa, BradyrhizobiumColbertium
MRPQVARERKRCAESGRTPQACVIYLAVELGRLLSLFSDAHPFAKR

SEQ ID NO: 8641 - protein, 161 aa, BradyrhizobiumColbertium
MTTMNQTSLRANKRHGLHACSRGLRIFAAAALVGVALAGCTGEQFQKGYILPPGALEQIPIGASQDQVLIVMGTPSTVATLDGEVFYYISQRSERPVAFMNQKVVDQRVIAIYFDKNRRVRRLANYGLQDGKIFDFISRTTPTSGQEMSYLTPLFKLLSFN

SEQ ID NO: 8642 - protein, 183 aa, BradyrhizobiumColbertium
MLWPFNHFRKPRLTPPGTIEAIYGMIVTQAREPIFYRDLGVPDTVNGRFDLLLLHLWLLLRRLRTAQGGTELSQALFDRFCEDMDDNLREMGVGDQTVPKRMRAFGEAFYGRVQAYDTAMESGGEALASAICKNILNGTGMDRAHRLSAYAQATEADLGRTDEAALLRASFKFPPALPEDVTP

SEQ ID NO: 8643 - protein, 189 aa, BradyrhizobiumColbertium
MSRPNAGSPPDPWRSPVIVAQIPDGGLHRELVASAAERQAMAELAGLREILSAHASFDVVPKSGGRVQVTGLVRGRIGQTCVVSLEPIESEIEEEVDLMFAPEAEARRLADLIEEGQDDRQAPEVADPPEPITGGIIDLGRLATDALFLTIDPYPRKEGAVFEAEVSAPDPEDHPFAALKALQDKKKGK

SEQ ID NO: 8644 - protein, 353 aa, BradyrhizobiumColbertium
MPSKVRIALDAMGGDVGPAVVVPGAAISLGRHPDIEFLLVGNRAKIEPELDRHPKLKAASKVIHTDVAISMEDKPSQALRRGRKTSSMWLAIDAVKKGEADVAISAGNTGALMAMARFHLRTLPGIDRPAISAIWPTKRGASVVLDLGATLGGDAHHLVSMAVMGAAKASVLFNKKRPTVGLLNIGAEEIKGHEEIREASEILRARNLPELDYIGFVEGDGIGKGLADVIVTEGFSGNIALKAAEGTARQMAELLRNEMQRSWLSKLGYLFARSAFQALRDKMDPNKSNGGVLLGLRGVVVKSHGGTNAEGFAYAIDVGYEMAHYDLLNKINQMLNREGGALSSVQAAQEAVS

SEQ ID NO: 8645 - protein, 326 aa, BradyrhizobiumColbertium
MTQIRSVVLGCGSYLPEQVVTNAQLAARIDTSDEWIVQRTGIRERHIAAEGEFTSHLALKAAQAALSDAGLDAQSIELIVLATSTPDNTFPATAVAVQHGLGINHGAAFDLQAVCSGFVFALATADNFLRTGAYKRALVIGAETFSRILDWNDRGTCVLFGDGAGAVVLEAQEQPGDPATDRGVVTTHLRSDGRHKSKLFVDGGPSSTQTVGHLRMEGREVFKHAVGMITDVIVDAFEATGLNADSIDWFVPHQANKRIIDASAHKLHIAPEKVVLTVDRHGNTSAASIPLALSVARKDGRIKKGDMVLLEAMGGGFTWGSALVRW

SEQ ID NO: 8646 - protein, 113 aa, BradyrhizobiumColbertium
MTETSKTVTRVDLCEAVYQKVGLSRTESSAFVELVLKEITDCLEKGETVKLSSFGSFMVRKKGQRIGRNPKTGTEVPISPRRVMVFKPSAILKQRINNQHRTNGDASKAKEEA

SEQ ID NO: 8647 - protein, 192 aa, BradyrhizobiumColbertium
MDKAPDAFRTISEVAQELDIPQHVLRFWETRFSQIKPMKRSGGRRYYRPDDVDLLKGIRRLLYGEGYTIRGVQRILKEHGVKSVQGLADSAAAVSFGAIEDAIGASLMEPDDEAPIKGITDTDDDDFQGDEEEGIDFRFSEIDDEEILTTFRKGGATAAAAGPSALDRERLGRALADLVACREMLDQALKDG

SEQ ID NO: 8648 - protein, 40 aa, BradyrhizobiumColbertium
MGFVSVWWLTAEALALLIAHASGSGGSTPHADRPSTRQML

SEQ ID NO: 8649 - protein, 79 aa, BradyrhizobiumColbertium
MFVTVVAVLCRLGAASSGSCVEEIVTDSNMTPEISMMQCAVGAQAPLAKWMGEHPIYRANWRLERYKCVPGHYEIKGHA

SEQ ID NO: 8650 - protein, 323 aa, BradyrhizobiumColbertium
MKDFAGKIAVITGGGTGMGRELARQLVAEGCNVAMCDVSEAAMAETKRLCEAEKLPQGLRVTTHVADVAIEDHLKRFRDELAEQQQTDRVHLLFNNAGIGGGGSLFTNTREQWERTFNICWGGVYLGVRTFLPMLVAADEAHIVNTASVNGFWASIGMNQAHTAYSSAKFAVKGFTEALINDLRLHAPHVKCSVVMPGHIGTSIVSNSRKVQSADGSERLNADEVALTRKRMVAAGVPDADKMSDEDIQAVFAERARSFLEDAPTTAAEAAKIILDGVKAERWRILVGEDAKRLDERVRATPEQAYDRAFYESFTQEVGWRLG

SEQ ID NO: 8651 - protein, 369 aa, BradyrhizobiumColbertium
MPACLSDDWTFCPEREDVSAEFTRLLTAAQEGGATIAECLMIARQLKRGDDRSWHREWKKLAQTNRQRAETAFAEGHLASAQRNWLRAMNYYGAAAMPLDPADERRWVAVLAMQECARRYLAARSPAGEVVTIPWLEGHSLQGYFLPAPSADGSAPTVICIGEPGHRKEEFLFKLVPHARERGFSMLALDLFGDQRDDYLDALLQRRDLESAIPGVMDYLETRADVDFARIGIIADGWGSSFVARAVLQEPRLAAAVCDGGLWDLHERAFFASRFAVSDVSIVPVPHAPLMASSADCPVLITPSEDGWLKADRARQIVQSARLGSADVMLKVFTAAETGAAQAHADNPSLANEYIFDWLESRLGAARRI

SEQ ID NO: 8652 - protein, 168 aa, BradyrhizobiumColbertium
MSATRKEGARLRTIGNLDIIRRFTWEISSINMYLEELRQFWARTLGISGPQWLILMAISDLDKDEGIPVNVVSKLLHVDPSFVTTQSKLLEKKGLLRRRPSPTDARVVRLSLTEKTQKHLASLHEQYKTIREFVFQEFDEAELTEFTAKLATLKTRLEKACVRLSLDF

SEQ ID NO: 8653 - protein, 415 aa, BradyrhizobiumColbertium
MRSRADLNIDTRTATEYGVVRTYFDAVFTWTSGSYSGTGTGLTGGSTAYDSAPSGTSGSGSVAGGALGVYYAFIQFAGFTMGKAVSQFDAPWTNYPGNNFDQLVGGGGTVTGVNQFTYTADFGQGITASISAQDQTAYYQTNIWNTSGATAAGILGGAYGLNDIGGSRSPDIVGMVRVDQAWGLFQASVAAHNNHAGYYGGNETTGGPSDKWGGAAALALSIKNIPTGAGDVVNIQGVYTEGASRYNFQSLAATSYSMFSGSGNGAYQSVGFAGVSDAVFGAGTGLELTKTYGMRGAFTHNWNPYWNTALYGAYGAVRYGSTAKGLICGSAGMAALALTGTCNPDFDIAQVGVITRWTPVKNLTFSGDFNWSRIDQKYSGTVAYGGNAATAKPAAVYELKDQDSFTLLLRAQRNW

SEQ ID NO: 8654 - protein, 171 aa, BradyrhizobiumColbertium
MADISNLGPLHMPALSPTWTDERIELLKRHFEAGLSCREIAADIGVSRNAVIGKLSRLNLTRGRTADDRKVQDRGFGPQRAPRAVPRLQYEMLATIYGETDAAAVAGPIDEANRCSLLELSENRCRWPISTPGEDDFCFCGNSAPDGQPYCAGHSRLAYRPHARARMMMRG

SEQ ID NO: 8655 - protein, 65 aa, BradyrhizobiumColbertium
MATEKAETDRIPVTLALSTIAYLEKLVRQGTHGTSVPGVARTLIEEGIRLAIKDGLLSIRDNGRT

SEQ ID NO: 8656 - protein, 313 aa, BradyrhizobiumColbertium
MTHHHLHSSPETCHWGFFEAALRPVLTVKSGDEVTVDTISGGPDMLPDQSKFHIPPEMHEVHAKNERMLPGHILTGPIAVEGAEPGDVLAVEILEVQIRQDWGWNMIKPLAGTLPDDFHETRILNIPLDRTRMVGRMPWGLDLPLKPFFGVMGVSPPPAWGRISSLIPRAMGGNLDNKELGAGATLYLPVFVPGAMFSCGDGHGVQGDGEVCVTAIETALQGRFRLTLRKDLKLDYPRAETATHYMTMAMDPDLDQCVVRALRDMIALLGERRNLSREDAYMLCSLAADLRVTQTVNGAKGIHCMIEKAIVHG

SEQ ID NO: 8657 - protein, 42 aa, BradyrhizobiumColbertium
MGHLPRPVGFIGRGLDPAIDPLSRRFLKMAGPVKPAPAGRVN

SEQ ID NO: 8658 - protein, 272 aa, BradyrhizobiumColbertium
MSEAPLFFVLSKTLGTALLPINLLVELGILSVVLMATRFATLGRRLAVTTLVLLALAAFSPLGNLLIYPLESRFPSWDPSRGAPDGIIVLGGSVDTDLSAAHRTPVVAHAADRLFAPAELARRYPNARIVFTGGTANLVSTEAREADYSAPILENLGIAKERLILERDSRNTWENAIFTRKLVSPMPGERWLLVTSAFHMPRSMGIFRKAGFDVEAYPVDWRMGGRDDLLSFTNMGTDGLRRTDVAVREWIGLVAYRLMGRTGELLPGPGKD

SEQ ID NO: 8659 - protein, 260 aa, BradyrhizobiumColbertium
MQQQSADSIDLAGLVADLNSLLRLKTNVIGMKLFATVAEMEAIPKIRRPSAIHTTDQIVSMAARLGWTVGITADDLVGAQCRAVIGLAPQDEKWLAGENYVGVWHGTAEDARRRQEALDVVPFGQYQALAVSPLAGGRLDPPDICLVYATPGQMIILINGLQYTGYKKFEWGVVGETACADSWGRALKTGEPSLSLPCYAERRYGGVPDEEMLMALKPSHLAKAIEGMKALAKNGLRYPIPPYGIQSDVRAGMGVSYAKK

SEQ ID NO: 8660 - protein, 392 aa, BradyrhizobiumColbertium
MSSAKFDIVVYGATGFTGQLVAEYLATHYKDDKALKWAMAGRSLDKLKSVRDAIGAPADTPLLVADASDATSLKAMVAQTRSVITTVGPYQFYGEDLLAACVAAGVDYFDLCGEPVWMRQMIDKYEAAAKASGARIVFSCGYDSVPFELGTFFVQEEAKRVFGAPAARVKGRVRDMRGTLSGGTAASAKATFDAVAKDLSLVAILNDHFALTPGFTGPKQPKGNRAAYEEDLQSWAAPFMMALINTRNVHRSNMLMGFPYGKDFVYDEMVLTGPGEKGEANAKRVMAANAEKTGPNAPKPGEGPSKEERENGLFDLLYLAIAPDGRQVRAGVTGDRDPGYGSTSKMISECAICLLRDSTDVPGGFWTPGAAMQHKLIKRLQDHAGLTFKVEK

SEQ ID NO: 8661 - protein, 422 aa, BradyrhizobiumColbertium
MMAYAATAGEMNTAVRAAPGVLALQRAMVWLVGASGAIVFIEPSPYEIATLLAAVVFFATGLRLKLVLMPLVLMLVLLNVGYTISAIPLFDKPAVVTWIATSWYMAVTVLFFAMVISEDTTARLDMLRRGLVVGALVASLLAIAGYFHLIPGGNDLLTLYGRARGTFKDPNVLGAFLILPALFALQSVVSDKFGKAFRNVIAFGIMSLAILLAFSRAAWGGLVLTSGFMLALMVLTSRTNAQRSRIIIMAIVAAVLGLALIAVLLSFDATAEMFKQRASFDQSYDEGRFGRFGRHILGAEMALDLPFGIGPLQFHRFFPEDTHNSYLNAFMSGGWLSGVCYPALVFTTVIMGFRHIFVRVPWQRAYLAVFAAFLGTVGENFVIDTDHWRHFWMMLGAMWGMIAAAQAYKIRAVEDACPISPP

SEQ ID NO: 8662 - protein, 516 aa, BradyrhizobiumColbertium
MEPLNARSMLDAATSAAAKPADQPFVERRRRLSPAALEVVNQKVARAYSPIVIAGFVRLADFALLSLVGIALYVGYVMPLAGAFSWVYPAQVIAVAVAAVVCFQAADIYQVQLFRGQLRQMTRMISSWSFVFLLFIGISFFAKFGNDVSRLWLAAFYFLGLAALIAERLVLRSLVRRWARQGRLDRRTIIVGSDSNGEQLVEALKAQEDSDIHVLGVFDDRNDSRALDTCAGARKLGKVDDIVEFARRTRVDLVLFALPISAETRILEMLKKLWVLPVDIRLSAHTNKLRFRPRSYSYLGEVPTLDVFEAPITDWDLVMKWLFDRVVGSLALLAALPVMGLVALAVKLDSPGPVLFRQKRFGFNNERIDVYKFRSMYHHQADPTAAKVVTKNDPRVTRVGRFIRKTSLDELPQLFNVVFAGNLSLVGPRPHAVQGKLQSRLFDEAVDGYFARHRVKPGITGWAQINGWRGEIDNEEKIQKRVEFDLYYIENWSVLFDLYILLKTPISLLTKNENAY

SEQ ID NO: 8663 - protein, 379 aa, BradyrhizobiumColbertium
MIMPPSPDRPLRILHAVRAPVGGIFRHILDVANGQVDRGHHVGILADSLTGGERADKALAELAPRLKLGVHRLAIRREPSPDDLLVWLRMRRLIAKLKPDVMHGHGAKAGAFIRMRRRSDDTIRIYTPHGGSLHYPLNTIKGEFYARLERALMDSTDLFLFESAFARDTYQRIVGTPKGVVRCVFNGVTPEEFEPVVTADDATDLCYVGEFRHIKGADLLVDALARLHEGGKKVTLTLGGDGEETAALKAQVERLGLTNAIRFIGHVKARYGFSKGRLLVVPSRGDSMPYVVIEAGAAGIPMIASRIGGIPEIFGADSPALFAPSNPDAMAEAIAAALDDPQTTAQRALSLRERISMHFSQQAMVEGVLAGYRDAFINH

SEQ ID NO: 8664 - protein, 769 aa, BradyrhizobiumColbertium
MRLAFWRAGKDKAVIARAVSKSKPAAAPKIEAEIEAEIEADKVEANPAPFVVKQAQVESGDIDLHALGAVLARKRGWIVVPTVVALVASLGVVNLITPRYKSEARILIDGRENVFLRPNSDRAEERQALDAEAVTSQVQLVLSRDLAREIIKKNKLAERPEFDPVLQGISPLKSLAALIGIGRDPFAMTPEERVLDAYYERLQAYAVDKSRVIVVEFQSADPELAARVANSIADGYLVLQQAVRQEQAKNASQWLAGEIESLRKKVSEAEAKVEDFRSKSSLFVGTNNTTLSNQQMGEVNTQLNNARSMKADAESKARLIKEMLQSGKPIEASEVVNSELMRRLSEQRVTLRAQLAEQSSTLLGNHPRIKELKAQLGDLDNQIRDEAAKISRSLENDARIASGRVDGLTTSLEQLKKQAASTNGQDVQLRALEREAKAQRDLLETYLAKYREANTRETIDTAPTDGRIISRAIVSNTPAYPKKLPIVLIATIATLLLSSGTVVTGELLRQTAPRTLAAIAPARAPVRREPSVQPPVAAAVDAAIDPIVEPALPEPAPLQPEIGSDKDVSEFDEIERLADKLRRAGAEARKVTVLGTAPGAAITLSTLTLARHLSRDARVVVVDLAASSPSLAAASVDASAPGLAELMQGEASFAQIITRDKLSRLHLVMAGRPGFDRSLLQSPRVALAIDALLRAYDHVLIDAGSASDLPAELLTAHARAVVVPDASMVPDARALMCEQLRAVGFSDVTMLSKPVQPSDAVETPRVVAA

SEQ ID NO: 8665 - protein, 393 aa, BradyrhizobiumColbertium
MTMAAAMQSRTAEAPSRSKARRIAHVDIVIDLAEAEAVWRAFEEPGHLFTPYQRFDLLSAWQRLVGEREGARPFIVIARDAEHRPLLLLPLCLRQSHGVRTACFMGGKHTTFNMGLWDAELAAQAGVADLDALLAALRERVDVLVLTQQPQRWHDRTNPFALLPRQSAINGCPLLTMEPGGPAASRISNSFRRRLKSKEKKLQALTGYRYHLATSDADVTRLLDWFFRVKPARMAEQKLPNVFAEPGVEQFIRSACLAPRGEGRVIDIHALECDDEVIAIFAGVADGQRFSMMFNTYTMSEHARYSPGLILMRYIIDRYAERGYRSLDLGIGSDDYKRMFCKDDEDIFDSFVPLTSRGRLAAMAMSSLSHGKRLVKQNQMLFDLARRLRQAFG

SEQ ID NO: 8666 - protein, 349 aa, BradyrhizobiumColbertium
MVSDDRWLERLRLELAWFTGQAVLRSRGAGAILRFQHVRPRRRGGFQPSRASEITPQFLDRAIRALKRWRYDFLGMDEVCHRAVTLPEKGRFVALTFDGASKDLINFAYPVLVRHAVPFTIYVPTAFPDGVGEAWWSGLEQVIARESRISLMMGEKEQRFTVTDNAEKQALFSHLESWLRSLPPADLSAAIADLCTRYRVDLAALSRAASMDWEDLTKLAADPLVTIGSATVNYPVLANMKDAAALREMMMGKAVAEAAFRREVTHFAFPFGDRASFRRSHVVMAEEAGFASAVTAIPGVVEAEGRTNLRALPRISWDGRVRSLRMLRVLASGVAFATVKPTRSARSQT

SEQ ID NO: 8667 - protein, 73 aa, BradyrhizobiumColbertium
MTIRTRKFLGAILLLVLATVWALLGMALAQMPWIAESGWRQAIYYVVVGLGWVLPAMPIVSWMQRPDRIKSGS

SEQ ID NO: 8668 - protein, 358 aa, BradyrhizobiumColbertium
MMSAPSEPHRAVRAWLIAVAGLIALMVLVGGATRLTESGLSIVEWKPVTGSVPPLTETQWIEAFEAYKKIPQYRELNAGMSLSEFKEIFWWEWSHRLLGRFIGVAYLLPFLFFLWRGGLSGELKRRLWLLFALGGLQGAVGWWMVASGLTERTEVSQYRLATHLVLALVIFAGIVWTVRRLNERPRAAAPARLRFTSALLLVVTFVQIYFGALVAGLRAGRAYNTWPEIDGAFIPSAERLWFETPWWRNMFDNVLTVQFEHRMTAYLLFALAALHAIDAVRSRAGAAASGALWLFAAVTLQAVLGILTLLHQVPIGLALAHQAVAIVVLALSVIQLERLAWRQSAEAQPRAVPIGQPG

SEQ ID NO: 8669 - protein, 114 aa, BradyrhizobiumColbertium
MLRWMVPALATMLTVSSALAADLPATPKRRAAMPPQDPPQVYVETDPDALISPAYGIGSYIRNLPGTPLLPGSHTLPGYYGRPWSYDYQGSYYGGKQVDYFWRLPYACGVYGYC

SEQ ID NO: 8670 - protein, 449 aa, BradyrhizobiumColbertium
MTAGAAPISMPPDFQATKNRTPSMSDRLPGFSTLAVHAGAQPDPTTGARATPIYQTTSFVFNDADHAASLFGLQAFGNIYTRIGNPTNAVLEERVAALEGGTAALAVASGHAAQVVVLQQLLQPGDEFIAARKLYGGSINQFTHAFKSFGWNVVWADPDDISSFERAVTPRTKAIFIESIANPAGSITDIEAISTVARKAGVPLIVDNTLASPYLIRPIDHGADIVVHSLTKFLGGHGNSLGGIIVDAGTFDWSTGGKYPMLSEPRPEYHGIRLQETFGNFAFAIACRVLGLRDLGPALSPFNAFMILTGIETLPLRMQKHCDNAKAVAEFLAGHPAVASVNYAGLPSDKYHQLARKYAPRGAGAVFTFSLKGGYDAGVNLVSKLQLFSHLANVGDPRSLVIHPASTTHSQLDDAAKIKSGAGPDVVRLSVGIEDKEDLIADLEQALAA

SEQ ID NO: 8671 - protein, 194 aa, BradyrhizobiumColbertium
MNHDAYPDNYIRGILNSVKSIAMVGASPVNVRPSYFAFKYLAQRGYDMIPVNPGHVGKELLGKPFVASLSDFGRPIDMIDIFRNSSHIMPVVEEALTLDPLPKVIWMQLGARDDAAAAKAESVGIKVVMNRCPKIEYGRLSSEISWMGVNSRTLSSKRPPAPTQGMRLSLNRMSVGGGDTAASDRAAKNKSEQS

SEQ ID NO: 8672 - protein, 274 aa, BradyrhizobiumColbertium
MSVQVARAPSPQPQILLRETIGSIAVLTLNRPAARNSLSEAMIAGLHAELNEIGNDKAIRGVVIAANGPAFSAGHDMKELTAHRADPDRGRAFFAEMMNACSAMMQAIVHLPKPVVAAVQGIATAAGCQLVASCDLAIASDAATFATPGVDIGLFCSTPMVALSRNVPRKQAMEMLLTGEPIPAARAREIGLINRIVDVGSERDAAIALAQKVALKSAYTIKLGKEAFYRQAEMSLADAYRYAAEVMTENMMARDAEEGIGAFIEKRTPTWRDE

SEQ ID NO: 8673 - protein, 135 aa, BradyrhizobiumColbertium
MAELERFLRDEFPQAFSGDDITIESADGQTSLLRQRYSERMLRPGGTVSGPTLMALADFAMYVVLLSAIGPIGLAVTTNLNINFLRKGQPGQDVLAEARLLKLGKRLAVGEVNLLSGTSPDPIAHVTSTYSIPNV

SEQ ID NO: 8674 - protein, 154 aa, BradyrhizobiumColbertium
MKTFSAKPAEVTKKWVLIDAKGLVVGRLATIVAMRLRGKHLPTYTPHVDCGDNVIIINAQHAVLTGRKREQKTYYKHTGYVGHVKERTARQILEGRHPERVLEKAVERMIPRGPLGRVQMGNLRVYGGADHPHEAQQPEKIDIAKLNRKNTRAA

SEQ ID NO: 8675 - protein, 159 aa, BradyrhizobiumColbertium
MAESIQSLDQLSQLKTAAAPEAPKHEKKVDKFNRAYATGKRKDAVARVWIKPGAGKVTVNSREVEVYFARPVLRMMIEQPFSVAQRSGQYDVICTVAGGGLSGQAGAVRHGISKALTYFEPELRSVLKKGGFLTRDSRVVERKKYGKAKARRSFQFSKR

SEQ ID NO: 8676 - protein, 406 aa, BradyrhizobiumColbertium
MMSLDSITLYLVATMVAALLGAMMVFFGRQENSPALRWWGTAYLLGAAAVALWTAAGDRLGPHIYLALNAVGFVACGMVWNAARVFHGRKPNWPGLVLGALAWVAAATLLDPAASMLRMLVGAGIVSVYAALTASELWTERRKSVQRRWPALVMPVMHGCVLMLPILIGSFLRPHDASFSQSIWVTVFAVELILYAVGTVFVIFMLVSERPVTAHRTAASTDPLTGMLNRRGFSEACARVIEREAKAGRPVTVMIFDIDHFKSINDRFGHPAGDEMLKLFSTVVVSSLRISDLSGRIGGEEFAALLPCSLEEGVLVAERVREAFENSGVVVDEGPVDTTVSIGVAGGPAGTELEVLLASADTALYQAKRGGRNRVEAAEELPLSLENWRRQSAARTGASQPRPATA

SEQ ID NO: 8677 - protein, 98 aa, BradyrhizobiumColbertium
MITEIAQIDVKPGSEKDFEAAVAKAKAAFGRSKGFHGFELHKSIEKPQRYRLMVKWATLENHTVDFRGSENFTEWRGLVGQYFAAPPEVEHTEVVLTT

SEQ ID NO: 8678 - protein, 398 aa, BradyrhizobiumColbertium
MSKECRTQACAKGHDVTILRDERPPTRSDLARDQAWAIAVGGIGVVLFTALLAFSWYFAATLLLIFTGMLLGLGLNALVNALGRRVRLPHTVRLAIVCVALALVLAGIAYLGGATIAEQASLLSKTIKSQIANVRSFLETHGIDTSFFDFGNATSDASATTSSEATAAPAAPSRAPLPSAGALASGGGAIVSQTFKLLLGTIHGVGNVFIVLFLGLAFAAQPRVYHDGLLFLAPVRHRTRVALVIDRIAETLERWLTAQFIVMIAVGVVTWIGLAIIGIPGAFILGIQAGLLAFIPTVGAIIGGVIVVLASLASGWIPALSAFLLFMGVHAMESYLLTPIMQRQALDIPPATLFAFQILLGVVFGIWGLALALPLVAIAKVIIDHFKTYEAPALAEAA

SEQ ID NO: 8679 - protein, 234 aa, BradyrhizobiumColbertium
MGFISKWAGLLGLLALLVGGDQIRINRPDHKFRLTVEVTTPDGIKTGSGILAVVPDRNYNRSGRTTTRGEAVFVDLGQGKNLVALLAHQQGAKLDFDDINYLALRAYGAARGSRVSFKDMSRQTGIVPVQGELIPVLVSFGDLKDPASARLVDGRHAEAVLGDGYAIRGFSAEVVPNGFWPIDIGGALGEPVTRGLHAKLPWLAVPDAPAAVALQAAGLPAMEPSVAREAFARK

SEQ ID NO: 8680 - protein, 257 aa, BradyrhizobiumColbertium
MRKPVVGVIGNAHRVENRFQVQMVGERNLRAVAEVSGGLPLMFAGSPDITDIPALLDTVDGIILTGARANVHPTRFNVDPCEKHEPYDIHRDEVALALSVACVARSIPLFGICRGLQEMNVAFGGSLHPEIREIPGRMNHRMPRLENGEIHPDPTVVFADRHDVDLTPAGAFAKILGCEKIRVNSLHGQGILEPGKRVLIEGIAEDGTIEAIRIAEAPTFALGVQWHAEYDPQHNPVNRKLFEAFGEALVARQKAAA

SEQ ID NO: 8681 - protein, 469 aa, BradyrhizobiumColbertium
MKTAKDVLKSIKDNDVKYVDLRFTDPRGKWQHVTFDVSMIDEDIFAEGTMFDGSSIAGWKAINESDMCLMPDPVTATIDPFFAETTMVITCDVLEPTTGEPYNRDPRGIAKKAEAMVKSMGVGDSVFVGPEAEFFVFDDVRYSADPYKTGFRLDSSELPTNSDTEYEGGNLGHRIRTKGGYFPVPPQDSVQDMRSEMLGAMAKMGVKVEKHHHEVASAQHELGMKFDTLTLMADHMQIYKYCIHQVAHIYGKTATFMPKPIYGDNGSGMHVHQSIWKDGKPVFAGNKYADLSETCLHYIGGIIKHAKAINAFTNPSTNSYKRLVPGYEAPVLLAYSARNRSASCRIPYTASPKAKRVEVRFPDPMANPYLGFAAMLMAGLDGIKNKIDPGPAMDKDLYDLPKEELKQIPTVCGSLREALENLDKDRGFLKAGGVFDDDFIDAYIELKMTEVARFEMTPHPVEFEMYYSG

SEQ ID NO: 8682 - protein, 112 aa, BradyrhizobiumColbertium
MKKIEAIIKPFKLDEVKEALQEVGLQGITVTEAKGFGRQKGHAELYRGAEYIVDFLPKVKIEIVIGDDLVERAIDAIRRAAQTGRIGDGKIFVSNIEEAIRIRTGESGLDAI

SEQ ID NO: 8683 - protein, 499 aa, BradyrhizobiumColbertium
MEVLTNAEMQRADQLAIAAGTPGFELMLSAGQAVAEAAHALVEEGPILIVAGPGNNGGDGFVAAAELAAQGREVSVISMSERDQLQGDAASAARGWKHPVLPFNPQAIGRPALIVDALFGAGLSRPVEGEARAMIEAINANGAPVLAVDLPSGINGTSAAVMGAAVNATESVTFFRKKPAHLLLPGRIHCGRVRVAEIGIDAQVLNEIAPQTFENDPDFWGAAFPVPRIDGHKYARGHVLAVSGDAAATGAARLAARGALRAGAGLVTLASPRDALAINAAALTAVMVRAVDSAVEFGELLGDKRYNTCVIGPGVGIGERTCDLVHTALGAQRHLVLDADALTSFAATPERLFESIKSSQNSAVVLTPHEGEFPRLFSDLSNKHPGRSKLERVRAAAERSGAVVLLKGPDTTIAAPDGRATIAVNAPPWLATAGAGDVLSGIIAGLLAQGVPAFEAASIGVWMHGAAASEAGPGLIAEDLTETLPAVHRRIYDALGIEY

SEQ ID NO: 8684 - protein, 389 aa, BradyrhizobiumColbertium
MALRPGQSATPIWELAAASQLGDVRLKRGDRCELVFRNDLPVPLAPVWYGLNSGAASDSLRGHTPAAPNSAETSTVSIPNAGTLVADFRLFEDGLKLPARSLAIVAGETGPIAVDRDEILLIEEWRLRPDGTAVPPGQDPKDAASLYTVNGRSSFELSAVAGERLRLRFINGSQRSVIAVKLESHEVQVMALDGQPAEPFPARNGALVLAAGGRADAFVDVARSAPFLLHDGKEARQVGSLTVSGSQGRRARLGPPQPLPSNDLPEKLDLRGSLRFDVALGAADAGWTRPASFSTESSPAFRAKAGRTVVLALKNPAPITTVFHLHGHPFRLLDKLDDGWKPYWLDTLAIEPGQTQRIAFAASSPGRWLIESVMADWSAPRLVRWYAVD

SEQ ID NO: 8685 - protein, 456 aa, BradyrhizobiumColbertium
MDAMQVTETLSEGLKHEFKISVPASDLDAKAGAKLVDLKDKVRINGFRPGKVPVAHLKKVYGRSVMAETIDQTIRDTNTQLFSERGFRLATEPKITMPTEQKDVEELLSGKTDLTYTVAIEVVPAIALADFKSFQVEKPVADVTDADVDDAIKRIADSNRTYAAKGEGAKAESGDRVTINFKGSINGEVFEGGTGEGIQVVIGSNTFIPGFEEQLIGIGANETRTLKVSFPKNYMNEKLAGQPAEFETTATLIEAPQDLAIDDEFAKSLGLESLDKLKEAARERLTAEFATATRQRVKRALLDRLDEAHRFEAPPSLVDEEFNLMWNSVKAEMDSAGKTFADEDTTEDKAKEEYRKIADRRVRLGLVLSEIGEKNKITVTDDEVGRAVIERARSMPGREKEVWDFYRNNAQALAQLRAPIYEDKVVDFILELANVTEKKVSREDLYKDDDAEKTAA

SEQ ID NO: 8686 - protein, 211 aa, BradyrhizobiumColbertium
MRDPVETYMNLVPMVVEQTNRGERAYDIFSRLLKERIIFVTGPVEDGMSTLIVAQLLFLEAENPKKEISMYINSPGGVVTSGLAIYDTMQFIRPPVSTLCTGQAASMGSLLLAAGEKDMRFSLPNARIMVHQPSGGFQGQATDIMLHAQEILNLKKRLNEIYVKHTGQTYKSIEDALERDKFLTANDAKEFGLVDRVIDKRAEEPAATKSP

SEQ ID NO: 8687 - protein, 423 aa, BradyrhizobiumColbertium
MSKVGTSDSKNTLYCSFCGKSQHEVRKLIAGPTVFICDECVELCMDIIREENKSSLVKSRDGIPTPKEICKVLDDYVIGQSHAKKVLSVAVHNHYKRLNHQTKHNDVELAKSNILLIGPTGSGKTLLAQTLARILDVPFTMADATTLTEAGYVGEDVENIILKLLQAADYNVERAQRGIVYIDEIDKISRKSDNPSITRDVSGEGVQQALLKIMEGTVASVPPQGGRKHPQQEFLQVDTTNILFICGGAFAGLEKIISARGRSTSIGFGAQVLAPEDRRTGEIFRHVEPEDLLKYGLIPEFVGRLPVVATLEDLDETSLKKILTEPKNALVKQYQRLFEMENIELTFADEALGAVARKAIERKTGARGLRSILEAILLETMFDLPGLEGVEEVVISREVVEGTARPLYIYADRSDRAVENASA

SEQ ID NO: 8688 - protein, 40 aa, BradyrhizobiumColbertium
MRFAMDDGWPGFGIGHGLFLLLCPLARSPLIMRNRHKVPR

SEQ ID NO: 8689 - protein, 807 aa, BradyrhizobiumColbertium
MTNPKPRPTIVHGETHAYPVLPLRDIVVFPHMIVPLFVGREKSIRALEEVMKNDALIMLATQKNASDDDPAPDAIYETGTLASVLQLLKLPDGTVKVLVEGLERARVAKYTDRADYYEATAVALADTDAKSVEAEALARSVVSDFESYVKLNKKISAEVVGVVQAITDFAKLADTVASHLAVKIADRQGILETLSVTTRLEKVLGLMESEISVLQVEKRIRSRVKRQMEKTQREYYLNEQMKAIQKELGDDDGRDELADLEEKISKTKLSKEAREKAQHELKKLRQMSPMSAEATVVRNYLDWLLSIPWNKKSKVKKDLEQAQAILDSDHYGLEKVKERIVEYLAVQSRANKLTGPILCLVGPPGVGKTSLGKSIAKATGREFVRVSLGGVRDEAEIRGHRRTYIGSMPGKIIQSMRKAKSSNPLFLLDEIDKMGADFRGDPSSALLEVLDPEQNGTFNDHYLEVDYDLSNVMFITTANTLNIPGPLMDRMEIIRIAGYTENEKVEISRKHLIPNAVSKHGLDSKEFSIDDDALLLLIRRYTREAGVRNLERELSTLARKAVKELMISKKKSVKVTEKTLEEFLGVPKYRFGEIESEPQVGIVTGLAWTDVGGELLTIEGVMMPGKGKMTVTGNLRDVMKESISAAASYVRSRAINYGVEPPLFDKRDIHVHVPEGATPKDGPSAGVAMATAIISVMTGIPVRHDVAMTGEITLRGRVLPIGGLKEKLLAAARGGIKTVLIPEDNAKDLTEISDAIKGGMEIVPVSRLDDVVAKALVKKPTPIVWEEDTKVTVKPDGDEAAGGLTAH

SEQ ID NO: 8690 - protein, 134 aa, BradyrhizobiumColbertium
MHIDGQCHCGKITYEAEIDPEQVSVCHCTDCQALTGSPFRVTAICAKADVKLTAGTPKVYGKRGDNGRMRFQHFCGECGSPLFTSGEGDQVDDWGIRWGSIRQRDQLRPVRQIWCQSAAVWIDAVPLLPGRPQD

SEQ ID NO: 8691 - protein, 286 aa, BradyrhizobiumColbertium
MQQPSGHEQNADQIAYWNGPSGQRWADRHTAQESLLGPIADVLIERARPKPGERVLDVGCGSGATTFAFAKAVAPDGFALGLDVSEPMLAQARALTPKSLPLDFVLADATVYPFESASFDLLASRFGVMFFADPIASFTNLRRALKPSGRLAFACWREPKENPWMMAPLMAVYKHVPKMPPVGPEEPGPFAFASEERVMRILKGAGFVDVAMEPRNLPMDIAIGGGLDAAVDGSLQIGPASRALQGHPPETYEAAKASIRETLAPFLKDRSVELQGAIWIVTAKAA

SEQ ID NO: 8692 - protein, 320 aa, BradyrhizobiumColbertium
MADHDHHGHHQHNHASHSHGHGQAHGHVHTPASFGKAFAIGITLNIALVVAEATYGYIGNSTALLADAGHNLSDVLGLVVAWGASIAAKRAPSGRFTYGLRASTILAALANAVFLLVATGAIGWEAILRLQHPEPVAGITVMVVAGIGILINGFTALLFARGRKDDINIEGAYLHMAADAAVSLGVVVSAALIIWTGWLWLDPVTSLVICATILWSTTSLLRGSIDMSMAAAPRGTDLAAIRAFLLARPGVSGIHDLHVWPISTTETALTCHLVMPAGSGDAFLVETAQILKTTYRIGHTTLQVETHPENGCALAPDDVV

SEQ ID NO: 8693 - protein, 327 aa, BradyrhizobiumColbertium
MQGIVEIAVGGKSAGKLFEGDRRFEIVVRLPEHLRGNLEAIRAIPIPLPPGEDAGSGTAIRTALAASPLTQMRYVPLSSVATVDATPGPNQISRENGKRRIVLTANVRARDLGSFVAEAEAAVAEKVKLPPGYFIGWGGQFEQLVSATKRLAIVVPVALLLVFLLLFMGMGSAADAALVFSGVPLALTGGVAALLLRDIPLSISAGVGFIALSGVAVLNGLVIIVFIERLRGEGRSVVDAVREGALTRLRPVLMTALVASLGFVPMALATGAGAEVQRPLATVVIGGIISSTVLTLLVLPALYVLFRRDVAGETPTMAPDLAASAER

SEQ ID NO: 8694 - protein, 325 aa, BradyrhizobiumColbertium
MRTFSTIVVAIVAAALGAYGYSLLAPGKLAHTEPAEHSEHKQPNDRVEQDEHGADRIRISDVKLAAAGVTLAEAAGATLTDTLAFNGILRANQEAVVQVTPRFPGVVKSILKRIGDRVAKDDLLAAIESNQSLTVYELKAPIAGTIIERQISLGEYASEQKPAFVVADLSTIWVDLSIYRQDLRRVRLNDEVLIDPDDGRGEIKGTISYMAPIGSSETQTALARVVLQNPDGRLRPGLFVTARLILAERNVAVAVRRSAIQTLDNKTIVFVREDGDKIEARPVETGDSDPRHVEIKAGLAAGEHYVAENSFVVKAEMGKGEAEHD

SEQ ID NO: 8695 - protein, 419 aa, BradyrhizobiumColbertium
MAARVALAAACLIVGSALAPSHAQTLTMRSALSRALAASPRLTAAERDIGIATGQRIQAGALLNPELSYEQDDSFGSGRYRGTRSAETTLQISQAFELFGKREARIAAGVAGVEVAAIQRKAIRLEVLSETAIAFLSVLGAQRRIQILDEQIAAIDRLTPLLRRRVEAGASSPAETGRAEVASALVKADRERFKASLASARRELAVLMGDPAAKFGEVSGRLDTTGRPPAFQAVIAAIDANPQLVRWTAVYAQRNAELLLARLRPYPDVRIGAGWRHFHETGDDAARLTLSVPIPVFDQNQGNILSAQESLAKTRAEREANRNTLIVIAGRAYDSLHGSLRELAVLRETAIPKAVEASEAISQGYGQGRFTLLEVLDAQASVTQARLREQEALQNFHAGVAIIEGLVGNPFTLARESAR

SEQ ID NO: 8696 - protein, 99 aa, BradyrhizobiumColbertium
MLIAVVYLLAGALHGAHDIDVTTPGGGSEIAAVLDDATGGSDHKAIGGHHCHGCFSLAVTQPVPPTTSTLLVSATRPQHASRLAGIIPDTDSPPPKQIA

SEQ ID NO: 8697 - protein, 80 aa, BradyrhizobiumColbertium
MDRRTACLHQANAFREKAIADPEHHDQWIDEAIKWLERAMEASCRAVITVPADDGGAVAEPVATEVTDAMPSQRRVIARQ

SEQ ID NO: 8698 - protein, 296 aa, BradyrhizobiumColbertium
MTVETLMREEIMEGGLVSETPRAIQWSSVFAGALAAGAMSFILIGFGVAVGLGVSSASPTWRDASAALALLSGLYLIIQAIVSFGFGGYIAGRTTRPAPALATIEDDGERRDGLHGLTAWALAVLAGAALLALLGAAAIDRSPMRSSASNASAAEPLLSYELDKLFRAPRRAPNLDLRDARAEAGRILMTSSSHSGVSADDRTYLVQQVAAATGLAAPDAERRVDAVIADSRTAINRARRNSIIVAFSIAAATLIGAAVAWAAAVAGGRHRDGDPLPNWMASSNRFHRNPRAMPVP

SEQ ID NO: 8699 - protein, 416 aa, BradyrhizobiumColbertium
MSSLSFTHTVTERFLRYVTIDTQSDPESPTSPSTEKQKDLGRVLAAELKAMGVEDAHLDEYGYVYATIPANTDKKVPVICFCSHMDTSPDVTGKDVKPQVVKNYRGGDITLPGDSSQVIRFAEHPALKNQIGNDIITTDGTTLLGADNKAGVAEIMDAAHFFINNPDVKHGTIKILFTPDEEIGRGVDNVDLKKLGADFGYTMDGESAGCVEDETFSADGATITINGVSAHPGYAKGKMEHAIKIAAAIIERLPKEGCSPETTSGKQGFLHPIGIEGALEQATLSFIVRDFTEEGLKEKEVLLETIVKDVMKDYPRSTYKFEVKEQYRNMKQVIDRHPHVLEYAIEAIRRAGLRPMRTAIRGGTDGSRLSFMGLPCPNIFAGEHAFHSRLEWVSRQDMEKAVQTIVHLAMIWEERA

SEQ ID NO: 8700 - protein, 37 aa, BradyrhizobiumColbertium
MRKGEGGHFWSTAGSLGKLAVYQKSEPDAAGRRFDQP

SEQ ID NO: 8701 - protein, 104 aa, BradyrhizobiumColbertium
MAKKDSAKKTAAPATVTLKQLAADIAERRDLSKKHAEAVLTDMVELIVKHLKKGDRVRIVGLGIFQVRKRAARTGRNPATGEAIHIKATRKVAFRPVKELKEAI

SEQ ID NO: 8702 - protein, 77 aa, BradyrhizobiumColbertium
MIESTVYDPTTFLPPNPEAVYPLDCESRRTEDKTRQMQLTVLMACQKNGTRAGFLERQIGIVKSHRYGVAAKREVVS

SEQ ID NO: 8703 - protein, 97 aa, BradyrhizobiumColbertium
MGICDCGFTADECGTNHCMRKKIHLAGMTPGSKWPEGAPISKDFKTTGDGTGNGRTTKPELTGSPSGTPQGAGNFSERWEIGKNGWDASDEATREDI

SEQ ID NO: 8704 - protein, 110 aa, BradyrhizobiumColbertium
MIVGDNDSAGVVPYSANEALAEIDRLREELSQARALVEELKSKLAGSFTHDQYHAGLDCIRKERDRALNQVEELTATIKRIDAINDNPACFNVEIDQVCRPFTSTVGEPK

SEQ ID NO: 8705 - protein, 37 aa, BradyrhizobiumColbertium
MRVYYNEIDHFNCDWLQKLMDRGLMGPGCFASTGGTR

SEQ ID NO: 8706 - protein, 75 aa, BradyrhizobiumColbertium
MTLSGDEAYYAKQTYDRIQDRWSDCLATINSVSANPARSGQHLDIRIVGPGCSITLLSLDDLRDLIARARSAPLT

SEQ ID NO: 8707 - protein, 64 aa, BradyrhizobiumColbertium
MRKPDIRCVTSVVKDAAECQAGLPDGRWVPARSYGWNQLRFFGRFMAAWLVFTGRADAVTYPGQ

SEQ ID NO: 8708 - protein, 74 aa, BradyrhizobiumColbertium
MQKLDPEDIRDEMREMGQQADPTREMLRRMVAEFCDYHYGTCPADIGSGECNCFAGALLIQARATLSNGERDAG

SEQ ID NO: 8709 - protein, 80 aa, BradyrhizobiumColbertium
MPADHINIQHPEKRGVESRYYRDQLENEKLRVELKQLRAWYDTVSKDLESIFNRIEDGKSAELHYPDGRVFIITGTPRSS

SEQ ID NO: 8710 - protein, 78 aa, BradyrhizobiumColbertium
MAVTKEKDRMTIRQQVEITFPAEDVEHIIRCWVDHNMAAHVPKPKDLSKIEVRFSTGEDTVYSARVTYEPVEHTAAPK

SEQ ID NO: 8711 - protein, 93 aa, BradyrhizobiumColbertium
MPDKLSVKKSYRDGCVALRFSVKGGYSLKVEGGTDLTTADARALAKAMIEEADRVDARQAAKRAAEERRQKWREREIAAGRLKVMPLTSLFRQ

SEQ ID NO: 8712 - protein, 76 aa, BradyrhizobiumColbertium
MPLIYEGIDYSACRRGHEEFEMEDGETLLWPRCEITGCEAMICVGMSKSLCYPHGIEFGAFTKEQFEADRAARSTP

SEQ ID NO: 8713 - protein, 133 aa, BradyrhizobiumColbertium
MNRCKFSIVNKAIAYDCEAIDLNVDEEFVGSTAKAASFGRTTRVSAATVKQIMDEAGFERAGLVCDIEGIEIDIIDREADLLASRIEFIVAEMHPAISGEADVVRAIAKLEAVGFTLKETLGTCVYMQKPVSS

SEQ ID NO: 8714 - protein, 204 aa, BradyrhizobiumColbertium
MIIMEESYEISEPSIDGHIVKIKAANPDVLLIYTTPKFAAQTIKKTAELNWKPLQILTNVSISVGSVMKPAGFENAQGVLSAAYAKDSTDPQWANDPGMKRWHEFVDKYMPGADKSDTSMVYGYGAASTLAKVLEMCGDDLTRANLMKQAASLKDFAPDTLLPGVKINTNPTDFAPIAQLQMMRFKGERWELFGEIISGDIASQ

SEQ ID NO: 8715 - protein, 37 aa, BradyrhizobiumColbertium
MRKRIDAFWSSYQQASVSSRPTRVDMDAPHCQQFRKG

SEQ ID NO: 8716 - protein, 37 aa, BradyrhizobiumColbertium
MMSMRRRLSNLHLKLAYSIFRRIAIFFQWNGQKHYLG

SEQ ID NO: 8717 - protein, 37 aa, BradyrhizobiumColbertium
MEWRRMFSAEQPMLGATIQSRAITLGGLMAIVAPAQQ

SEQ ID NO: 8718 - protein, 582 aa, BradyrhizobiumColbertium
MIADNTTRQERPGEMGAVFDAVIVGAGFAGMYMLHRLRGLSFSARVFEAGSGVGGTWYWNRYPGARCDVESMQYSFSFSEELDQEWNWSEKYAPQAEILSYANHVADRFDLRRDIVFDTRVTAATFDEDAGCWLIETNRGDRVLARFCIMAVGCLSAPNRPNFRGMKNFRGPIYHTGEWPHEGVDFTGLRVGVIGTGSSAIQSIPIIAQQAAHLTVFQRTATWSVPARNESLTSEYLQAAKADYPALRAKARGRPTGFYFPFNMKPALEAAPEERERQYEEAWTRGGLPFLGAFGDLLFEKAANDTIADFARRKIRGIVKDPATADLLCPDNVFGCKRLCVDTSYFETYNLEHVKLVDVSKTPIERFTPDGIEVDGVAYPLDTAVCATGFAAMTGSFDKIAITGRKGLTLAEKWRAGPRAYLGIASAGFPNLFTITGPGSPSVLASMIQAIEQHVDWLADCMAHMRDVGAATIEPKREDEDAWVEHVTDVSTVSLRSTCSSWYVGTNIPGRPRVFMPYIGGFPVYVQKCNEVMSAGFDGFVLEGAPASNAAPQVRYTERWRVPIDIDVISPAAVAAKRVPVV

SEQ ID NO: 8719 - protein, 404 aa, BradyrhizobiumColbertium
MALLNVVPAAAADPVRFALCYDLSKAYTFVTPQIAQAVRDYADLLNAKGGLEGHPIEIIVQDHGNEPQRGIECYERLKREGVMVFDMLSTPVSRAVLPRIMKDGNILIQSLVGRGDAVDGNVFKWVFPIGPTYWGQAANDIEYIKQKSGGNLKGVKVAFFYIDYPFGQEPIGILKTLAQKEGFELQLVPYPLPGNDQASAWTQIRRLNPDWIVSWSLSNMHVIASREMKRNGISIEKYIAVNWLNEVDIKNIGPDVAKGLKRGTNVAGGSYQPLVQQIIKELYDRGKGNGDRKFTEDVYYNTGLAIYSIAFEGARLAIKNGGWPLTPDKIKTGLESLKNYDANGLIAPITVTAQDHGGGGKTRIEMWDGEKWVAQTDWIAGFQDEVWSVVKEQSADFAKSETQK

SEQ ID NO: 8720 - protein, 268 aa, BradyrhizobiumColbertium
MNAPIAAKILSLNNIEVVYDHVSLAIKGVSIDVPEGGMVALLGANGAGKSTTLKSISGLLTAERGEVRRGELQFRGQSLGGLMPQDRVKLGIAHVLEGRRVFEHLTPDENLIAASALHSRQDMNRNKDRVYSYFPRLHERRTVASGYLSGGEQQMLAIGRALMTQPKLLMLDEPSLGLAPFLVAEIFQILGRINRDEGLSILLVEQNAIAALEIVSHGYLIESGRIVMHDSAAALKKNPDIQEFYLGGAQNKNFRDIKHYSRRKRWLT

SEQ ID NO: 8721 - protein, 357 aa, BradyrhizobiumColbertium
MLFRQAGIFHTDYSADRALFPTPADRWMIGILLLLALAAPIYMNTLYLSSYLLPWLVWTAGALGLNLILGWAGQFHLGYAAVMGIGAYAAVHATRAGIPWEIAIVLAGITAAVIGSVFAFAALRVKGLYLALSTLALQFVMDWTISHVPAISGGTQATLQAPDIRLLGWAVTSDAGLYYVALVWCVLVTSFMLNLRRTALGRALVAVREKDYAAAVIGVNSFYFKLVAFATSSFIGGVSGAILIGTFYHAVTPEQFSVDVSIQALAMVIVGGLGSIIGSYFGAAFILLMPGVMNSFISWAATKFGFSLGIETLAHLPQAFYGALIIGFLLIEPLGLGKIYNNIRDYLLVWPFGYTKK

SEQ ID NO: 8722 - protein, 295 aa, BradyrhizobiumColbertium
MDAISLMESAANGALIGLMYSLVAMGIVLIYKSSSVPNLAQGSMTMLAAYVLLAFANSAGAPIWAAISLAIITMFIIGMAIERVALRRLAGRPIIMILMMTLGLEIFLRAGSMTIWGGTTRPMNLGISDAPLFLGPLLINRAYAFGAVVTIAMFGFFVLFFRSRMGVVLRAISDDYTAAWSVGISVERGVALSWAMSAVVATIAGVLWSSVQGVDQSLAQLLLKGVTVAVLGGLDSIGGALLAGVLLGVVEGIASSVLDPLLGGASRDLVDAAMLILTILIRPHGLFGRHDIERV

SEQ ID NO: 8723 - protein, 634 aa, BradyrhizobiumColbertium
MAWNFETDTTLIRVLAQNAEVFPDRVAMREKDKGIWNQTTWQQLLEIVLCCAAGLEELDFKAGDVMLVLGDNRPRLYAGMLAAGALGGYAMPAFPDATLDEIRHFVHEAGARFALAEDQEQVDKILDLREQGATIEHIIYDDPRGLAAYANPGLISWDTLQAKGAELVIRNPNLRNELIARAQPEGPAVFVHSSGSTGKPKGVVLSHRNLLAGVRNAYRGGAFQFGESILAYLPMAWVGDFAVTMGAGIALHFTINIPERQETVLQNLREIAPTFYLAAPRSWDNLLTTIQVRMEDSSWLKRLVYKFFMALAISAEKRKLEGGQPTLKQWLLSPIGEWLVYGPIKDQFGLTRLRGAFTGGEAMGEDTFVFYRALGIKLRQLYGQTETSAYNAIQDLNEVRLHTVGRPLPGVDIRISDAGEILVRSGSVFSGYFKQDEATRESLEDGWLHTGDAGYLEPDGHLVVLGRLSDIVHTAKGERYIPNYIENRLKFSPYIKDAAVLGSGRDTLSAIICIDKEAVGLWAELRGISYISYADLSQKPQVIALIAAAVKHVNSALPHGLQLRKFVCLHKEFDADDGEITRTRKIRRNVVEERYKPIIDAIYGHQNTVLMKAKVSYESGEVGVIERTLSVQEA

SEQ ID NO: 8724 - protein, 234 aa, BradyrhizobiumColbertium
MRIERGEIFGLVGPNGCGKTTLTNAITGFYPPQRGHILLNGRDITGLAPHYVATLGVARTFQNLALFNGMSVLDNILLGRHIHMKPSVGRTALYWWLARSDETLNRAAVEDVIDFLQLEGVRDELVDGIPIGLKKRVELARALAAEPSFLILDEPMAGMNQEEKEYMARFILDARDERNVTVLLIEHHMDVITGICDRMLALNYGEMIGSGVPADVVADPRVIEAYIGGAHVAR

SEQ ID NO: 8725 - protein, 140 aa, BradyrhizobiumColbertium
MNETGPPNEETIAEFQKALMISPFHRWLGLKAIMVAREQIEISLPWREEFVANTAIEATHGGILAALIDLTGLYAVRAAGGIVSATADLRVDYHRPATRGTVLARGMVVKLGRRISTADVRVTDTSRVLLASGRGAYLAQ

SEQ ID NO: 8726 - protein, 40 aa, BradyrhizobiumColbertium
MVEAMKMQNVLRAEQDGTVKKIHAAVGATLAVDAFILEFA

SEQ ID NO: 8727 - protein, 207 aa, BradyrhizobiumColbertium
MKSNKAEGMMIDVIEAVSKELGFKIEIQPMQFSALIPALTSDKIDIIAAAITATPERAKIVDFSEEAYSYGDGLVVPASDKRDYAGVADLKGKKVGAQIGTRYIEYLKAQSGAEDVKAYDALPDVLREVANGRLDAGVGDFPIFAYNLSQDRFPQVRLVRTYKSGLTGGINLAVKKGNVELLNKINASLSAMKQDGRLKAILNKWQL

SEQ ID NO: 8728 - protein, 201 aa, BradyrhizobiumColbertium
MMQGVSYTILVTLCAFVIATGLGLVLAFMRVSGVPPLAWTARTVIVIVRGIPGLVTLYYIYFVAPEFGLSLTSVQASIIGLGIAYAPYMAEVFRSGIEAIDRGQTEAALSIGMGWGTLMRRVLLPQAVRVALPPYGSTMVMLLKDSSLASTITVAELSLQGKLLAASTFENTTIFTLVALIYLAMSLPLTAFNAWLERKLR

SEQ ID NO: 8729 - protein, 130 aa, BradyrhizobiumColbertium
MAAKIDAYPGQLSGGQQQRVAIARALGMKPNAILFDEPTSALDPELVGEVLSVMRSLADEGMTMVVVTHEMGFARQVADRVLFLDGGVLVEQGKPDEVLVRPKNLRTQDFLRRVLTPSDPLSPIECSLRL

SEQ ID NO: 8730 - protein, 469 aa, BradyrhizobiumColbertium
MLIRRVRIQHYFTKTRCFKPMESETMPVQLDQVENSGDFPRKVDVVVIGGGIIGTCAAYELARKGVSVALVEKGVVGGEQSSRNWGYVRQQNRDLFELPLAMFSNRRWEELGSEIGADLGFRRTGMIYSTLDVQDVARWQKWGQLASEQGFRSEILNADQTKARLPGSSSKWVGGVYSPTEGRAEPSLAAPAIAEGAKRNGLSLHQNCAARGLDISGGQVSGVWTERGLIKATTVVAAGGAWNSRFCRHHGIELPILNIHGTAMRTEPVPDVLTVGNFNAGHLALRRRMDGGYTLTVPGHGTLNLAPNGMRYITKFYQMYRAKVAKKLKYRINSSFWNGPEAFGSWQNDQVSPFEKIRVLDPPADDGLVKIALENLAREFPVLKNAKLAATWGGMIDTAPDLIPVISRVDQLPGLIIASGFSGHGFGVAPGAGRLVSDLCCNDTPIVDLAPYRLCRFSDGSEIRRPEMM

SEQ ID NO: 8731 - protein, 43 aa, BradyrhizobiumColbertium
MPFAAEQDRPTSMWQSFLGRKSTNEGRTGLLLAHVIRSDQIGS

SEQ ID NO: 8732 - protein, 49 aa, BradyrhizobiumColbertium
MAPTAAAWIHKLGSPTSWHASLHIPYNGSTNFCPGIGATEISKSTKQPE

SEQ ID NO: 8733 - protein, 264 aa, BradyrhizobiumColbertium
MVLFEKFGQHQPLNRQAERYGKEGVPISLSTLADQVGGCTVALTPLFRRLEAHVLSAERLHGDDTTVPVLAKGKTDTGRIWVYVRDDKPFGGQAPLGAVFYYSRDRAGEHPQAHLAGYNGIFQADAYGGYGKLYEVGRNAGPILEAACWVHARRPFFVMADLAENARRKVQGKKPAVISPLALEAVRRIDALFEIERGINGETPERRRAVRQELSAPLIADLKVWMREQRAKLSRRNDVAKAMDCMLKRWDAFTRFLDDGRICL

SEQ ID NO: 8734 - protein, 85 aa, BradyrhizobiumColbertium
MRPDSLYLSTGGGWAPATVVAIQQLAAPRDKQLVAATDNNKQGDVYAGRLEAIALEVGCAFERLRPLADDWNEGLRAVHAECGSS

SEQ ID NO: 8735 - protein, 148 aa, BradyrhizobiumColbertium
MRPVAALGADVTIALGEDESKLEELFKEQFGSDVSVVIDYLWGKSAERRLIASVKAGAEAAPIRFVQVGSVSGADITRPSIALRSSAIALMGSGIGSITRESLVAAIASLLKAVGPAGIATKTVPLAAVEQAWDGTDRSERTMFTMGS

SEQ ID NO: 8736 - protein, 187 aa, BradyrhizobiumColbertium
MPEARLLVTWISAAAETVMHFSLEDAVPPRKSVQNTHIVDQLRQLHGAVLDIVAVMNRPQRDDLLIKAAGIPLDRAPFPLLVGVERFGPIGVVEIADHVGRDYTTVSRQVAKLESLGLVERRGSAVDGRAREAVITARGEAMTDRADAAREKIERAIFETWNPRDVDELVRLMRKFADAIVSEPPTN

SEQ ID NO: 8737 - protein, 179 aa, BradyrhizobiumColbertium
MFNRHRGDPAHSAGDASHLFAGEWFEIAESEYDYMLEILPPLWMRGETFAMREFMTDNVTSVFSALIIDGRKRFFHAYCDLSDKGSPDRMRAAIIDRESRPVKAMTREERLEHIWSSTHDDYRGYAGERWAGHLRDVRTVLSYDGSRGTVLKLLDRLTGAEIAAKLPVHLRHLPDAIAA

SEQ ID NO: 8738 - protein, 120 aa, BradyrhizobiumColbertium
MNLIANVLVALVAALHVFFLILEMFLWDRPQGLKVFRNTPEKAEITKVLAANQGLYNGFLAAGLIWGLAQGNPTFAFQIKVFFLLCVIVAGAYGAATVSTRILIVQALPAAVALVALFLA

SEQ ID NO: 8739 - protein, 176 aa, BradyrhizobiumColbertium
MPARSTNSPDRFGLDRVTTPIGTALLVTDAEGVLRALDWEDYEQRMRELLRLHYGTVDLREQPAPTAMRIALERYFDGDLGQIAGIAWRIAGTPFQQKVWTALAQIPAGTTMSYGALAAKIAMPRAIRAVGHANGSNPISVVLPCHRLIGANGSLVKYGGGLERKRWLLRHEGVEV

SEQ ID NO: 8740 - protein, 929 aa, BradyrhizobiumColbertium
MDSIATEQKAGADDRFDTARITAAVDALAEKHQGREDAFRTAMAQLLKAELIAARAAAQAILLKDRHGRRCAERLCHVQDEIIRILYSAATRHLYRSPIPSGAERMAVVATGGYGRGLMAPESDIDLLFILPYKQTAWGEQVAEAILYCLWDMGLKVGHATRSVDESIRQARGDMTIRTAILETRFLTGDKPLYDELVERFDKEVVQGTASEFVTAKLAEREERHRRGGQSRYLVEPNVKDGKGGLRDLHTLFWIAKYVYRVRDTNELVVRGVFDAQEYRSFRRCADFLWSVRCNLHFHCNRAEERLSFDLQREIAVRLGYTSHPGMQDVERFMKHYFLVAKEVGNLTAILCAKLEDQQAKPAPVLSRMMARLRPSTVKRRVPDSDDFIVDNNRINVAAPDIFKHDPVNLIRIFRLAQKNNLAFHPDAMRDVTRSLGLINAQLRENPEANRLFMEILTSDNAEIVLRRMNETGVLGHFIRAFGKIVSMMQFNMYHHYTVDEHLIRCIGFLQDIERGGIEEFALASDLFRKIRPEHRAVIYIATLLHDVAKGRPEDHSIAGAKVARRLCPRLGFSPADTELVAWLIEEHLTMSTVAQSRDLSDRKTIENFAAVVQSVEQMKLLTILTTADIRGVGPGVWNGWKAQLLRSLYYETEPVLTGGFSEVDRGKRLTAAYAEFRNAFAEWPAEELDAYIGRHYPAYWLKVELPRKIRHARFVRSSEQAGHKLAINVGFDEVRGVTELTIFAADHPWLLSIIAGACASAGANIVDAQIYTTTDGRALDTISISREYDRDEDEGRRATRIGEMIEDVLEGKLRLPEAVARRTVRSKARPFVIEPEVTINNQWSDRYTVVEVSGLDRPGLLYELTTAISKLNLNIASAHVATFGERARDVFYVTDLLGAQINAPTRQAAIKSALTHVMASDKAVQPAA

SEQ ID NO: 8741 - protein, 323 aa, BradyrhizobiumColbertium
MTRITRRILLAGAVALAVTPAARAADPLKEIRIDWATYNPVSMVLKQKGLLEKEFAKDGIKVTWVQSAGSNKALEFLNAGSIDFGSTAGSAALVARINGNPIKSIYVYSRPEWTALVTGKDSRIAAVADLKGKRVAVTRGTDPHIFLVRALLGAGLTEKDITPVLLQHADGKTALIRGDVDAWAGLDPVMAQAEVEEGARLFHRKADANTWGILNVREQFLKDYPEAVRRVLSIYEEARKYSLANYDELKRTFIAVTKLPEAVVDKQLKDRTELTHSRIGAPQRESILAAGLALQQAGVVDPKVDVKATLDALIDDQVPLPTN

SEQ ID NO: 8742 - protein, 79 aa, BradyrhizobiumColbertium
MRSAEKRRTSAAVSAVVPGKRERRPGTRNQGDSFGAEDVTPGPRNHIVLGLWASICASLVRGDGGECRAPLHSFTRHAC

SEQ ID NO: 8743 - protein, 283 aa, BradyrhizobiumColbertium
MAMISDAPVLRQSSDTAERAAATSALSRFGRPMLGVLLPASLALGWELVVWFGWSNGRLVPPPSRVLVEIAELAHSGELVRHITATLWRVGLGFLFGVVAGTLLGAISGYWSLARRLLDPTVQALRAIPSLAWVPLFILWLGILETSKNALIAVGVFFPVYLGVMGAILSVDRKIVEVGRTFRLSGFAMIRRILLPAVLPAYVVSLRVGLGLGWMFVVAAELIGAAEGLGYLLLDGQQLGKPSQILAAIVIFAVLGKLTDWLIEIGSAPFLRWQDAFSRAAGA

SEQ ID NO: 8744 - protein, 261 aa, BradyrhizobiumColbertium
MLALDRVSKTYPNGVEALARFSAEIRQGEIIAIIGGSGCGKSTLLRAIAGLDRASSGSVTLDDEVITSPHAKIGIIFQEPRLLPWLSVADNIGFGLADLPAIQRREKVARALERVGLADKAQAWPRELSGGQAQRVAIARALVPQPEVLLLDEPFSALDAFTRRDLQDHLLDLWADTRPTLILVTHDVDEAVVLADRVLVMRPRPGRLFDQIGINLGRPRDRNSPLFENFKRSVLTSLDRSLDRSVPDRDATEGPGRAMWW

SEQ ID NO: 8745 - protein, 169 aa, BradyrhizobiumColbertium
MDAVQLRQMQAPIKERYKTDPKAALITLKAKGSTASEGIACKIETGRAIAMAGLHPGTGGSGLELCSGDMLLEALVACAGVTLKSVATAIEVPLKTGNVYAEGDLDFRGTLGIDKEAPVGFAEIRLRFEVDTDAPQDKLDLLLKLTERYCVVYQTIKNGPKVSVSMQRM

SEQ ID NO: 8746 - protein, 259 aa, BradyrhizobiumColbertium
MSLDLHFLLFLLLRMAVAAAFVVTASVVAERFGPVIGALVATLPVSAGPSYVFLALDHDAAFIAQSALASLPVNAATIVLALTYVVLAQRHGLLVSCGCAVAVWIVLASIIRQFDWSLAAGLAANLIAFGVCIPLLAGYRHVKMPLVTRRWYDVPMRAALVATLVAIVVSTSSWVGPRISGIIALYPVVFSSIMVILHPRIGGRPTAAVLANSAWGLLGFGMAIAVLHVAVVWFGSAVGLCLALATCVIWNLTLWARSR

SEQ ID NO: 8747 - protein, 360 aa, BradyrhizobiumColbertium
MFKRKSNSDALTLMATKVVSANVMVADNDLNIVYMNNAVTDLLREAETDLKKELPHFNVNTLVGTNIDVFHKNPQHQRRMLASLSTAHRAMIQIGERKFDLVATPVKNDDGSRAGIVVEWSDASIRLRNLDFGAQVAAASRSQAVIEFNMDGTIITANANFLGALGYSLAEIKGKHHSMFVEASERDGSRYREFWAALNRGEYQAAEYKRIGKGGKEVYIQASYNPILDLNGKPFKVVKYATDVTKQVLVRMGNERVRGMMESVAAGSEELNASVREISEAMTKSRETAMSAVEQVSSADAQAQRLTEAAQAMSGIVEMINNITGQINLLALNATIESARAGEAGRGFAVVASEVKSLAN

SEQ ID NO: 8748 - protein, 79 aa, BradyrhizobiumColbertium
MQGQARAAIAAASAAARCMLVDISFVTVLCSSIAAAVDVTYSLTLLIACLIEPSALTTSPEMLLRLPISSPILSVACLA

SEQ ID NO: 8749 - protein, 912 aa, BradyrhizobiumColbertium
MTIQQPISAQEAESAPAPQAEAAARVTPMMEQYLEIKAAHQGLLLFYRMGDFYELFFEDAEIASKTLGIVLTKRGKHQGADIPMCGVPVERSEDYLHRLISAGHRVAVCEQTEDPAAAKARGNKSVVRRGVVRLVTPGTLTEDTLLDARANNYLLAIARARSSAGGDRFGLAWIDISTAEFMVTECSSGELAATLARINPNEAIVTDALYNDNEIGQTLRELPAVTPLTRDVFDGATAEKRLCDYFAVATMDGLSQLTRLEATAAAAAVTYVDRTQVGKHPPLSPPAREASGATMAIDPATRANLELTRTLAGERRGSLLDAIDCTVTSAGSRLLAQRLAAPLTDAPAIARRLDAVRAFVADSAAREDIRSILRGAPDISRALARLSVGRGGPRDLAGIRDGIIAADQVLARLSELDRPPQEIAAVMAALQRPSRALASEFAGALDEQLPLIKRDGGFVRQGYEPALDEARNLRDASRLVVASMQARYADDTGVKGLKIRHNNVLGYFVEVTAQHGDKLMSAPLNATFIHRQTLAGQVRFTTSELGEIEAKIANAGDRALGLELEIFERLCGRALAISDDLRAAAQGFALLDVATSLAKLAVDENYVRPEVDGSLSFAIEAGRHPVVEQALKRNGEPFIANACDLSPAPAQKSGQLWLLTGPNMAGKSTFLRQNALIALMAQIGSFVPATRARIGIVDRLFSRVGAADDLARGRSTFMVEMVETAAILNQAGERSLVILDEIGRGTATFDGLSIAWAAIEHLHESNRCRTLFATHYHELTALAAKLPRMFNATVRVKEWQGNVVFLHEVLPGSADRSYGIQVAKLAGLPPAVITRAKSVLSKLEAQDRGQTARALVDDLPLFAVPSRAAAEAAPPSEAEQLMEAVKALHPDEMSPREALDALYALKAKLPKP

SEQ ID NO: 8750 - protein, 55 aa, BradyrhizobiumColbertium
MGGDGLLYRHERRNLQNFATCSYRFGRQGEVFHVVRIAVCAACVRVPRNMRASVN

SEQ ID NO: 8751 - protein, 402 aa, BradyrhizobiumColbertium
MRDVFICDAVRTPIGRFGGSLAKVRADDLAAAPIKALMAKHPNLDWAQVDEVFFGCANQAGEDNRNVARMALLLAGLPDSVPGQTLNRLCASGLDAVGAAGRAIRSGEIELAIAGGVESMTRAPFVMGKAQEAFSRSAEIFDTTIGWRFINPLLKAQYGVDAMPETGENVAEEFQVSRADQDAFAIRSQQRAGAAITAGYFAEEITPITIPGGKAGPITIDKDEHPRPETTLEGLAKLKPIVRNPGTVTAGNASGVNDGAAAMILASEAAVKKHGLTPRARILGLASAGVPPRIMGIGPVPATRKLMERLGKKISDFDLIELNEAFASQGIACLRQLGVKDDADFVNPHGGAIALGHPLGMSGARLALTAVHGMEKRGGKLALATMCVGVGQGVAVAIEKLN

SEQ ID NO: 8752 - protein, 233 aa, BradyrhizobiumColbertium
MTFIYPTDSNKAHPLPLSPEYKSSIKRAPNKPLIPMRHTLSELTGPVYGHETVRDGDNALPRQHAGEPLGERIIVHGHVRDEDGRGVPHSLVEIWQANSCGRYVHVRDQHPAPLDPNFTGAGRTVSDASGYYRFVTIKPGAYPWGNHHNAWRPAHIHLSVFGYSFVTRLVTQMYFPNDPLFPFDPIFNSVPDEKARARMVSSFDLENTKPEWALCYRFDIVLRGKNATPMENH

SEQ ID NO: 8753 - protein, 200 aa, BradyrhizobiumColbertium
MQESVKPDGITPSQTVGPFFKYGLTPNGEYAWNDAFTNSTLTPDVSGDRIRIEGRVFDGDAVAVPDCMLEIWQPDAQGRFADPQDKRALPNASFRGFARCGTDKDGNYAFETIKPGAVPDSDGKPQAPHILLAVFGRGMLRHLYTRIYFSDEAGNAADPVLALVPTDRRATLTAMREAGKPVYRLDLRLQGDNETVFFDV

SEQ ID NO: 8754 - protein, 562 aa, BradyrhizobiumColbertium
MKFRLSLSSAIIAFGIVLALGFAAVVSTSLYTLKELKVGGPLYSDIKLGNDLIADILPPPEYIIEAYLEATLAMREPDQLAAHGERLVQLRKDYDERKAFWVSSSLTEDLKTTLVSKSDEQVQKFWKASDQLLPALKAKDAAASERIYAQLKDAYTAHRAVIDSIVESANKRNAAMEKLAADRDSSMLYILLGVSVAVLGFIAAGLLGVALGVVRPIVRMTDTMQKLATGDLAADIPFARRQDEVGSMAGALLVFKQAAIENSRLRQEQLRQEQEAALAKRAALHQMAETVERETGRSVDTAGAATQGVERAASSLSEIAKSLSAQSQAVAAASTQALGSSQAVSAAAEELSASIREIASQVARTSTVTKSAVAGREQARSTIQALAGSVKRIAEVSDLIGGIAGQTNLLALNATIEAARAGEAGRGFAVVAAEVKSLSDQTAKSTEEIGRLIAEIQTSTQAAVDAVEAMGGHIVEIDGVATSVAAAMEEQDAATREITRSISESASAAKEVSAKIGDVSRDAASVNERAAEVRQAIAGMAANLEQLRSVVVSTVRDSTAAA

SEQ ID NO: 8755 - protein, 331 aa, BradyrhizobiumColbertium
MLDAGAVREVKVLHQRDTVVSHIIRLGLRYVGESAGAPHSLIVKIPNSAFAQTLADGGRREVDYYTRLAPRMPPGLVPRCFDGHFDEQNLAWHLLLEDLTDSHATAGQWPLPPSRDQAVAIVTTLARWHAAWWDHPDLGDTVGTFASAGDSAERMEAFAGHYDRFADLLGDRLSEERRILYRRLIDRSDGLSQRYHSRRHLSITHGDAHVWNFLLPRAGVADTVRIFDFDLWSINVPTHDLAYMIAMHWYPERRQALERPLLSLYHDTLIESGITGYTRGALDRDYRWAVLWQITRPVWQWSINIPPGIWWNNLERVFAAVDDLGCEEMLG

SEQ ID NO: 8756 - protein, 518 aa, BradyrhizobiumColbertium
MSDAKASLMVPGLRRNMVTICAMTATIMQALDTTIANVALPYMQGTLSASQDQINWVLTSYIVAAAIMTAPVGWIANRFGRKRIFIICSAGFTMASVLCGLAQDINQMVLFRLLQGVFGAALVPLSQSVMLDYYTLQERAKAMAIWGMGVMMGPIMGPSLGAWLTETYSWHWVFFVNLPFGIITVLGLIVFMDETRKDFSLKFDWFGFAALAVAIGALQLALDRGEQLGWLDSNEIVAEFIVSAAAFYFFLAHSFTTSTPFIRFALFRDRNFVTGCVFMIVMGLVLFSTMALASPYMQNVIGYPIITAGLLLASRGLGTFFAMMLVGRMMRYFEARTLIVAGLTLTAGSLFQMTGWTDLTQVPEIVTVSVIQGFGFGLVFVPLSTVAFLTLSNELRTDGTAMLTLMRNVASSVGISIVIAQLTQGTRWTYAILSEHINPFNHALQMPGVSGLINLSTDTGRAMADKMVNVQAQIIAFSHDYQLVMIFVLCTLPLALLIGSTKATLRKQAAGPEHAVIE

SEQ ID NO: 8757 - protein, 389 aa, BradyrhizobiumColbertium
MADQVLKFQTEQKTDNAKPAKKAGTDPRRRLVAGLRRYRRFLLLVVLPIVVATGGLAFYLNGGRYVGTDDAYVGAQKVLVTPDISGKVLKVVVKEGQSVKRGDELFEIDPVPFRLAVEEAKAQLAQARTTYDNLVANIKIYGDMLNLAQQGIDLKQRDVERKQALVKNNFGSQLDLDNASNALVTAGAQAQYIRQQLSNAKTQLLGNPDLPLEQFPAYAQAKAKLDDAQRNLDHTVLRAPMDGVATQVEQIQLGRYVPAGTPVFSIIDVAHPWVDANPKESDLTYVTEGQPVTLVVDAFPNHVFKGKIGSLSPGTGAQFAILPPQNATGNFVKVVQRVPIRIYFDETDRHVRKLKAGMSVYATIDTGHKRSLAGLFGLSATAGQDGDKD

SEQ ID NO: 8758 - protein, 165 aa, BradyrhizobiumColbertium
MEMKLMTRGSVDQNFLFTLGELYRLLRVYADKEASRFGITRAQWAVLAKVERSEGMKQSELADLLEMQPITLTRLIDKLCDNDWIERRSDASDRRVKRLYLKKAGRQLLGRMSGLKSELTANALDGITPADAHRLLTQLEAIKENVRTAIQTSGAEQARKEQRYG

SEQ ID NO: 8759 - protein, 164 aa, BradyrhizobiumColbertium
MTLAKPAFPAPDHDHRRCTADALAHAEAVCEQRAQKFTPIRRQVLGALLSSHRPLGAYEVIDELAKSMARPAPITVYRALDFLMANGLVHRIESRNAYLACAAHDHDTTSAVAFLICERCGLVGEISSAPFAKDLNAAARSSGFAPKLSVVEITGVCTHCQKTD

SEQ ID NO: 8760 - protein, 296 aa, BradyrhizobiumColbertium
MLMLCLTWGFNQIAVKLVLPDIPPMLQATIRSMGALPVLFIIGTLRGVNFFERDGTWKPGLIAGLMFGIEFVLIFQGLRFTSASRAVVFLYTAPFFVALGSYQVLGERLGASQWLGLAISFAGVALAIGVPQPNVDAHVLLGDLMIVGGAALWAATTLVAKGTRLRFAAPEKALGYQVATSIPILGAAAWLFGESITHTPSPLSLGLMAFQAIWVVGTTFTLWFALVKAYSASKLSAFTFITPLFGVVGSYFIMHDTLSLAFGAAALLVIAGLFLVNRPSQGAAAPRDALLNVTKT

SEQ ID NO: 8761 - protein, 427 aa, BradyrhizobiumColbertium
MNKLENPLDSDIAGPAPRHRTTQVKVGDVAVGGGAPIVVQSMTNTDTADVDSTIAQVAALARAGSEMVRITVDREEAAAAVPYIRDGLAKRGITTPLIGDFHYIGHKLLAAYPACAEALAKYRINPGNVGFKDKRDTQFADIIEIANKNSKPVRIGANWGSLDQELLTKLMDENAASPNPRDVRAVTREAMVQSALLSAARAEELGMPKDRIILSAKVSAVQDLIAVYQDLARRSDYAIHLGLTEAGMGSKGIVASSAALGILLQQGIGDTIRISLTPEPGGDRTREVQVGQELLQTMGFRTFVPLVAACPGCGRTTSTTFQELARSIQDFIRDEMPTWKTKYPGVEELNVAVMGCIVNGPGESKHANIGISLPGTGEAPAAPVFVDGKKFRTLRGPTISADFKALVIDYIDQRYGQGAKVPVSAAE

SEQ ID NO: 8762 - protein, 270 aa, BradyrhizobiumColbertium
MRHLRSFIVGLLTAIPLSSLAVVGSSEAVPARKVVGPKAKQLSPAKCEIPKFRIVVDVGHTPDSYGALSARNDPEFGFNFRLARLITTKLKSEGFAATRLLVTDGKARPSLFKRVSAANEGKADLFLSVHHDSVPDKLLETWEFDGAKSYFSDRFSGHSLFVSRQNQHFATSLMLARIIGRQLKEQGLRYASQYTLPVMGRYRRQLLDKDVGVYRYDGLVVLSRTRSAAVLLEAGSIINRDEEMEMNSPERHEAVAGAVAAAMREFCARR

SEQ ID NO: 8763 - protein, 535 aa, BradyrhizobiumColbertium
MEAKFQTFLILLTVLAGTALVARRFNIAPAILLMLSGVGLAFVPGMPPVELPPELVLLMVLPPLIYSASVAMSWREFRNNLRPIVLLAVGAVIFTAALVAAATHYMIGLPWTVAFLLGAIVAPPDVVAPLAIARRLNMPRRLLVILEGEGLANDATALILYRFALAAIMVGNFSLPLAAGEFLLIIASEIAFGVGVGWLSLRFRKWSGDPQVELTLSLITPYVSYWLPEHVGGSGVIATVACGLYVSWNGPLLISSATRLQGIFFWDLVIYLIEGMLFLLTGFQMRALYEKSKTFPLDDILIATAVVLVIVVVARFAWLYPATYLPRMLSKSLRKRDPSPPWQWPFVLAFTGVRGAVSLAAALALPFTLPDGEAFPYRDLILFVAFGVIFVTLIGVGLTLPPVVRWLGVAEAGRHEHAAEHDAEIAARRQALDAALKSLDALTEQKDVSDEVMRLLRARHEIRLNQLPDALDPNHHDISAAGTALTRELIAAERAFIHNLLRRGQITDETRRRIERDLDLEEASLANREYREALL

SEQ ID NO: 8764 - protein, 285 aa, BradyrhizobiumColbertium
MILDRRSLLASLCWMAAAPVLAADAPPELEAYERESGGRVGLYAENLATGRKLAWRADERFVMCSTFKASLAACVLARVDRGEEQLAAMIPFGQTDLLDYAPVARQNLAAGEMSVAEMCKAIVELSDNTCANLLLARIGGPSALTAFWRSIGDTISRLDHDEPELNRSPPGNPQDTTTPTAMAGNLRRLVTGAALSPGSRAQLTDWMVNCKTGANRLRGGLPASWKIGDKTGYNGKDAAGDVAVAWPKPETPILIAAYVQGGSPTAEQIAAVFARMGRMVTERLA

SEQ ID NO: 8765 - protein, 124 aa, BradyrhizobiumColbertium
MSPNRSSVEAVVQSYFDGLYEGDAEKLGAIFHPSADLRWVEKGELQVLTVPDWLDRVRKRASAKAEGKPREDFIVTIDRSDDKTAFIKVRCQLPPRYFTDYLVAMKLADGWQIVSKSYRYDLRE

SEQ ID NO: 8766 - protein, 604 aa, BradyrhizobiumColbertium
MRILLRLCPLFVALGLLVGAGPALAGKRVALVLANSAYQHAPSLANPVNDGSVMARTLKEAGFDVVDSRHDLSAQDTRRVLRDFADATRDADIAVVYYAGHGIEVEGSNYLIPVDAKLERDTDVYDEALSLDRVLVAVEPAKQLRLVILDACRDNPFGKRMKRTIASRGFGRGLAQVEPTSPNTLIAYSAKAGFTAQDGDGVNSPFTVALSKHLTTPGLDVRRAFGFVRDEVLRSTGNKQEPFVYGSLGGEDMPLVPVKVAAIAPANPQADIRRDYELALQVGSRPAWEAFLAQHPDGFYASLARLQIEKISAEQAHAAAIAKAKQAEAERDRLAALGAQKEAQAKAAADAKAAEQAQLAAQKAKEQAQQQAAAAEQQRVNLAAAAPSAAPASTASPAGTSVASLTPAIAPADLNRSVQAELGRVGCFSGQADGNWNTSAQRSLSQFNRYAGTKLDVKVASTDALDAVKSKPSRVCPLVCEHGFKADGDKCTKIVCRQGYAVNDDNECEKQRAAKPAKPASAKRDDRDERPARQRRQAGGAAAGAAGGYGAAAGIAAAAGGSRASSGGQIFCNSTGCRPVHRGCRLEYRGGGGPGNDANAEVCY

SEQ ID NO: 8767 - protein, 230 aa, BradyrhizobiumColbertium
MAAGGKEDPVLVRFRQMSRPVRLIYARPRTFVALAVGILVCLLLPGTYRLVTRLLLGWNALIAVYLVLVYAMMVCNDHQHIRRAAAMQDDGRFVILLVTATGAFASIAAIVSELGIPHRGVLELTIAITTIALSWAAVHTTFALHYAHDYYRNAKPGGLQFPSGDEKDHADYWDFVYFSFVIGMTAQVSDVGITDKTIRRTATAHGIVSFIYNTALLALTVNIAASAIPN

SEQ ID NO: 8768 - protein, 307 aa, BradyrhizobiumColbertium
MTGTSPSDFAKRLDKTADDTEALLGRLLSDDILHDEIARPKRLMDAMRYSTLNGGKRLRPFLVVESAAVFSVPREAALLVGAALECIHCYSLIHDDLPAMDNSDLRRGRPTLHKKTDDATAILAGDGLLTLAFDIITRDEVHRDANVRLLLTRALARCAGIGGMVGGQILDLAGEGRFGGNEPIDVARIQQMKTGALLRYGCIAGAILGQASQKEYQALDDYGRALGEAFQIADDLLDVEGDAAALGKPSGQDAALGKTTFVTQLGIEGAKQRVRDLLARADSAVSIFGDRAGVLQAAARFVAERKN

SEQ ID NO: 8769 - protein, 224 aa, BradyrhizobiumColbertium
MRIVKILLLVLAVAALAPYVIAPFYRTGHPVSTLMAWRALRGAPMHREWIDLANMSPYLPRAVVAAEDAHFCKHHGIDWGALREAIDDAQEDGTPFRGASTITQQVAKNLFLWQGRDFVRKALEFPLALWIDLVLPKPRILEIYLNIAELGPQGQFGVEAASAYAFGKSAGSLSPREAALLASILPNPVKRSARSPGPGVRRLAATYMARGQASSLATCWRENR

SEQ ID NO: 8770 - protein, 60 aa, BradyrhizobiumColbertium
MAVPRRKTSPSRRGMRRSADAIKKPTYVEDKDSGELRRPHHLDLKTGMYKGRQVLKKKES

SEQ ID NO: 8771 - protein, 244 aa, BradyrhizobiumColbertium
MTAAERMLRRCIALSGYLDREGISPMVGFPLLLIPLAVYNIIAFLMPTVSFTDVLFTVPMMSGEVWPVTLADLLLALGVVLLLLEVVKGARPGSKFLMDHLLSLIVFGAAAAEFVMWPKFSNSTFFLLVLLAMADFLGGIAQRTRRRVTYVAETTVPAPRKVKRKAETPADDAEAPSKFEPVIAPQPAPAPVEPPAPSAQSVAESVLMDHPAPKPAQGAPSPEIPSPHLQPGNGTPPASDTPPR

SEQ ID NO: 8772 - protein, 68 aa, BradyrhizobiumColbertium
MAVMPTLQWVHKAPLPRPDPSFITQLIANAECPPQTSRFRRASSEDARTAYGSKRPLGSVAARTRQVA

SEQ ID NO: 8773 - protein, 564 aa, BradyrhizobiumColbertium
MIPTLPQASDILAALGQAVFAWDIASDSIAWGEQVTSIFPGIPAERLATGAEFAKLIEPAQTLRSAALAQTSAVHGADGTPYRVEYGVRMNASDPVVWVEETGRWFAGPDGRPTRAIGAVRINNERHARDEELAKLARLDPLTGELNRSHLLGALAEAIEEATRFRSTAAFMLVGIDHLARVNDAFGFDVADAVILDVAKRIRARLRGGDVLGRFSGNKFGLILKNCTVDDMNVAAERFLAGIRTDVVPTKSGPVSVTASIGAVSLPRYARNTDEAVNRAHETLDAAKRRRAGSFAVWRPDAARDAQRRVNIRVTDEIVTALNERRIRLAYEPVVSAVSRERAFHECLVRMDQGNGQVLLAPDIVPVAERLGLIRLVDHRVLELVVAELAAAPDVCLSLNISPDTTMDPDWWAGIESLMLAHPGVAERLIIEITETVAIQDIDDVRAFVSRLKHFGSRIAIDDFGAGYTSFRNLRKLGVDIVKIDGAFVQNITHSADDRAFVQTLIDLARRLDIKTVAEWVQDEEAASMLRDWGCDYIQGRLIGLASADRPWGAPPDSALPAAG

SEQ ID NO: 8774 - protein, 502 aa, BradyrhizobiumColbertium
MDTLVNVAHGFGVALLPINLLYCFIGVFIGTLVGVLPGIGPISAMSLLLPVTLSGTPESGIIMMAGIYYGSMYGGSTTSILVNIPGEAASVVTCIDGHQMAKQGRAGPALGISAFGSFAAGTFALIALMLVAPKLASVAIAFGPAEYFSLMVLGLVVLTFLTQGSMPKALLMACIGVVLGLVGLDSITAQPRLTFGRMELIDGIGLVPVVMGLFGVAEVLLNTEQAIKRDIINTKITHLLPTRKDWKASAGPVGRGTVLGFFLGILPGGGAVVASFASYALEKRLSKTPERFGHGAIEGVAGPESANNAAAGGAFIPLMTLGIPPNVVMALLLGAFVIHGLQPGPLLITQNPGLFWGIVASMYIGNVMLLILNLPMIGMWVQLLKLPYNILFPLIILFTILGVYCSSNNVFDVYVMIAFGIIGYFMRKLGFEPAPLVLAFVLGPMMENNLRKSLILSQGDLWTFVQRPISGACLAFALVLLIAPLLPALRKKRELVALDEGA

SEQ ID NO: 8775 - protein, 161 aa, BradyrhizobiumColbertium
MNNDTNVKLRLSNSELWGGLIGLALGGFVIWSGLKLRLGTINDPGSGYVLFYTGILMCVFASAIIVSAITEGGPTLASRWENVRWSKPLLLIACLIAFSLALEPLGFLLSSIPLMLLLLRLIDPVRWTLAVPIAVLVPVCMWWVLKRLLLIQLPSGLFGIG

SEQ ID NO: 8776 - protein, 325 aa, BradyrhizobiumColbertium
MSGHGLKTIAFAALHAVMGALLPTAVSAQDYPTKPITLIVPWPAGGSTDISMRAIADSASKTLGQPIVIDNKAGGGGTVGPATMAAAAKPDGYTISQIPITVFRLPLMQEVSWDPAKDFTYIVHLTGYTFGVTTSAESQFKSWKDVVEFAKANPGKVTYATPGAGTSLHIGMEQIAGMAGIKLTQVPFKGGAETNAAVLGKHTMLQADSTGWRPLVDAGKLRLLMVWTGARSPNYPDVPTLKELGYPMVYDSPFGIAGPKGMDPKIVGKLHDAFKKALEDPAVIATLAKYDMVPNYKNTEDYKKFVVEVTDSERKVINTLGLAKK

SEQ ID NO: 8777 - protein, 955 aa, BradyrhizobiumColbertium
MTSTRDKELGALREQGPDALVALSQLALDHMEQGVCVYDADNRILLVNQRYLSFFNMSADIVRVGTSYREVLAHSARRGNFPESELDALYSARIARIAAGKPFRTEQRLASGLVMSLELKPLPGGGWMTICDDVTRLARLEAELRVQTERSQHALANMSHGLIMYDADSRVVVCNERFLNLYNLDPGIVKPGVSHRAVLDHWISRGNLPGMPADEFHSSRMEDVRAKREKSLLVMRYDGRMVQTISRFLPDGGWVTVHEDVTERLQYEETLRRQNFILDAALENMAHGLAFFDSDMRLRVCNTTYRKIYRLSPEETRPGTHLAELIERSMANGAFSSEYSPQQLLEAARTSIANRDSSPMRRHMADDTMISVRYCALAEGGFVATYEDITERERAIEQLSEQYRRFDAALNNMSQGLCMLDSSLRVIVCNRRYLEMYGLSPEIVKPGVSMREIMDYSCELGIHPNTTGAKLYADYVERLREGEHTLHRHLSDGRIIKLNHKRMEHGGWVVTYEDVTERHKAQARVAHMARHDSLTDLPNRTLFREKMAEGLNQVAVAGGAMAVLCFDLDNFKTVNDRLGHAAGDRLLRWVAAQLKANVGEHDTVARLGGDEFAVLQRGPQPQSAEELARRLVDIIGHPPPLESQSVHVGVSVGIAIAPDHGLDADELMKCADLALYQAKARGRGIYQLFEPEMEEEARSRHALEQDLGGALEGRQFHLVFQPQMRLDSSELTGFEALLRWKHPSRGIVSPAEFIPIAEENGLIVPIGEWVLRTACAVAASWPGVAVAVNLSPVQFRSRGLVGMVTSALAEAGLPPQRLELEVTETALLDDSEATIEILHQLRALGVRVSLDDFGVGYSSLSYLRKFPFDRIKIDRSFVGTLGESPESVAIVRTIASLGSVLGVETTAEGVETEEQLDFVRECGCTAVQGYYFGKPCLASDVGRTIETLSMVRRVA

SEQ ID NO: 8778 - protein, 317 aa, BradyrhizobiumColbertium
MLRPVLTAKAGAKQLTRLTISTGKTSVIHTKVRCREITESDVDKIADLLTRGFVGRSREYWIQGLRRQAFRAVPEGYPRFGYMLDDDGTPVGVLLLIYTARQRGEETAVQCNLSSWYVDPAYRNYAPLLTKIAQRHKDVTYFNISPAPWTWPIIETQGFRAYCRGIFFSIPALARAPRWSEIEVIPPHAKEIKGLSAAETELLRRHARYNCLSLVCRTPKGTFPFILQPVRIRRGFIAPPAMKLIYCRSMTEYAECAGRIGRLLLRLGKISVAVDSNGPIPGLVGIYTERRGRKYFKGPHQPLLGDLTDTELVLYGP

SEQ ID NO: 8779 - protein, 326 aa, BradyrhizobiumColbertium
MSIAVLPNSPDTAPQMIDPLDHLADKLFHRMGADGVYARTALYEGIVERLAALITSHREAGTEVMRFPPVMSRAQLEKSGYLKSFPNLLGCVCGLHGTEREINAAVSRFDAGGDWTSSLSPADLVLSPAACYPVYPIAASRGPLPKGGLRFDVAADCFRREPSKHLDRLQSFRMREYVCIGSPDDVADFRERWMVRAQAIARDLGLTFRVDYASDPFFGRVGQMKAVSQKQQQLKFELLIPLRSDEQPTACMSFNYHREHFGTTWGIQDANGEPAHTGCVAFGMDRLAVAMFHTHGTDLSAWPAKVQDVLGFQPHVAAGAHGEGWR

SEQ ID NO: 8780 - protein, 405 aa, BradyrhizobiumColbertium
MNVREAVLTVDEMQASFLEQGPSLTERAARTAAAAAADADGVDRDARFPHKAFDVAREQKLLGVMIPVEFGGFGASIYDVTDICYTLGRACASTAMIYAMHQTKVACVIRHGHGIPWMETMMRRVARDQWLLASSTTEGQNGGNIRASAAAVDHAGDTVSLVRDATVISYGAEADGLVTIARRATDAAASDQVLMALAKDDYSLKRTLGWETLGMRGTCSTGFELKVDCPADRVFPESYDKIHAQTMTPFAHLCWSSAWAGIAAAAVTRAQAFIRKAARSSGGQMPPAAAHFTAAKMSLAKLRALISANTDAFARAEHDERALSSLDFQSAITLLKVQASELAVETVMHAMRTAGLSGYRNDGEFTMGRHLRDVLSSPIMINNDRILSNAATSTLMSGVPTSLRD

SEQ ID NO: 8781 - protein, 90 aa, BradyrhizobiumColbertium
MQAFDTDLRNRIIKLVKDILEQNSLTADVTPEAKLVDVGLTSMDMVNLMLGVEAEFDFTIPQSEITPENFQSVETLERMVATQLQLANAA

SEQ ID NO: 8782 - protein, 291 aa, BradyrhizobiumColbertium
MTQAILGIIGGSGIYDLPGLEGAHEEVIASPWGEPSAPLRRGSIAGLPIVFLPRHDKGHRLSPSDINYRANIDVLKRAGVTDLISLSACGSFKEELPPGTFVLVDQFVDRTHKRESSFFGRGCVAHVSMAHPVSPRLRLHLAAAADAEGIAIARGGTYVCMEGPQFSTYAESMTYKALGYSVIGMTNMPEAKLAREAEICYATVAMVTDFDCWHPDHDAVTVQDIIRVLTSNADKAKALVARLARDFPREHEPCPIGSDRALDTALITAPEARDPELLKKLDAVAGRILRG

SEQ ID NO: 8783 - protein, 368 aa, BradyrhizobiumColbertium
MKVDGKHFRSIWRERDGWSVGAIDQRRLPHEFVIARLTSCEDAAVAIRDMLVRGAPLIGATAAYGMALAMREDASDAGLKRAYDTLVVARPTAINLKWALDEIRRTLAPVDPVERAEAAYARADEIAEQDVEINRGIAGNGLKLIEAIAAKKPGETVNVLTHCNAGWLATVDWGTATAPIYLAHERGINVHVWVDETRPRNQGASLTAWELGHHGVPHTVIPDNTGGHLMQHGMVDLVIVGTDRVAANGDVCNKIGTYLKALAAHDNGVPFYVALPSPTIDFAVHDGIRGIPIEQRSGTEVTDMTGRTADGRLETVRIVPEGSPVANYAFDVTPARLVTGLITERGVLKPDRASLAAAFPERVADAAE

SEQ ID NO: 8784 - protein, 211 aa, BradyrhizobiumColbertium
MAIEAVIFDFGGVLTSSPFEAFTRFEIERGLPADIIRRTNAANHLENAWAKFERAEVDIDTFDELFATESLALGAEVRGRDVLPLLQGSLRPEMVEALKRIKAQFKTGCITNNLPANAIGSMTGRSLYIAEVMVLFDHVIESAKIGLRKPDPRIYQLMVETLKVDPNNCVYLDDLGVNLKPAREMGMTTIKVTSGAQAIAELEKATGLKLG

SEQ ID NO: 8785 - protein, 252 aa, BradyrhizobiumColbertium
MTKLAMFIAAALLLATPARAIVGGGTPQADGVARAVVTIVGSRGNFCTGSLIAPRVVLTVAHCVQPGADYKIVDRGADGQPQLLNVRTVAIHPNFNMQAMQAHRATADVALLQLEIPLKGKSTVTVGMPTIPIQVGSRFVIAGIGVTVRGDGKSGGMTRVAGLVATGRPGTLQVRLVDPVTNGVRDGIGACTGDSGGPVFEDRPGGPVLVGLISWSTGPNGTAGCGGLTGVTPLTLYREWILQAARSWGAAL

SEQ ID NO: 8786 - protein, 52 aa, BradyrhizobiumColbertium
MFRNLLGRGVTANSDIHCCFYALLVFVAALDWAARFLRSGHDHPPRFRFKMT

SEQ ID NO: 8787 - protein, 500 aa, BradyrhizobiumColbertium
MNVAVRSHATAKQVSEHFDVLIVGAGISGIGSAYHLTKQLPGTSFVILETQATFGGTWTTHRYPGIRSDSDLHTFGYRFKPWVGPPIATAEEILAYMNEVIEENDLAKHIRYKHKINSASWSSEQNLWTIEAVTTDTGKPRTFTANFLWMCQGYYRHSEGYTPEWKGMDRFKGRIVHPQTWPDDIDLTNKKVVVIGSGATAATLVPNIADKCAHVTMLQRSPTYFRLGRNAIEIAEELRRLQVDEAWIHEIVRRKILFEQDAFTKLCVSKPEQVKKELIGQISAVLGPDYDVETHFTPKYRPWRQRIAFVPDADLFKGIASGKASVVTDEIECFVENGIQLKSGKLLEADVVVTATGFNLAALGDIAFEIDGKPLAFGDTVTYRGMMFTGVPNMVWVFGYFRASWTLRVDLVADFVCRLLGHMKAKGAKKVEVQLRPEDHNMPILPWIDPENFNPGYMMRNMDLLPKRGDKPEWQHSQDYWTEKDEIPKTDLDDKAFVYG

SEQ ID NO: 8788 - protein, 306 aa, BradyrhizobiumColbertium
MNIESKKRDVALVVDDSPETLRLLTDALDGAGMTVMVALDGAAAMRIIDQITPDIVLLDAVMPGIDGFETCRRLKRDAGLANVPVIFMTGLAETEHIVRGLEAGGVDYVTKPIVIEEMLARIRVHLGNARLTQSARAALDVSGRFLFAVNRQGHVLWATPQAQKLLSDHHGAQADDFVLPPALLQWLEQAKAKGSAKSPGASLPDNPQLRLYYMGETAPNEFLLRLSRESGTALPPEFTSELGLTTREGEVLAWLSKGKTNRDIAQILGLSPRTVDKHLEQIYAKLGVENRTAAAAIATNATRRNS

SEQ ID NO: 8789 - protein, 1123 aa, BradyrhizobiumColbertium
MAGRQRIDRVRRQYNQWVANQTLEDYALRFTAKSARRWSAARVANTALGAISFLAMEAIGGTITLNYGVTNATAAILVVSLIIFCCGVPIAYYAAKCGIDIDLLTRGAGFGYIGSTVTSLIYASFTFIFFAIEAVILASALEMCFGIPRPVGYLVSAVVIIPLVAYGITLISRFQLWTQPLWVILHIIPFAAIAWHNPNSFTEWRKFSGDHGDLNGHFDLLLFGVAASVVFSLVAQIGEQVDFLRFLPRDRRASRVSWWIALMSAGPGWIVLGALKLLAGSFLAFFALSHGVPPEEAAEPAHMYLEAFRYVLSQPELALALTGTFVILSQVKINVTNAYAGSIAWSNFFSRLTHSHPGRVVWLVFNVIVALLLMEIGVYKALEQTLALYSNVAIAWVGALVADLVVNKPLGLRPQQIEFKRAHLYDVNPVGVGAMTLATIVSISAFYGLFGPTAKALSAFIALAAAFFAAPLIAWATDGRYYIARKPKRSWQNIEAIQCCICEHSFEPEDMASCPAYAGPICSLCCSLDARCHDLCKPHARFQAQVSEALGKLMPQPIYARINSQVGHYIGVFVISAGLVALVLGLIYLQTSASVHGENALVSDVLWKVFFSLSIIIGVVAWLFVLAQQSRRAAEAETRRQTALLIQEIDAHKRTDAELQRAKEVAESANLAKSRYVVGLSHELRSPLNAISGYAQLLEQDTTLGAKPRDQVRVVRRSADHLSGLIDGILDISKIEAGRLYLSRDEVRLSEFLDQLVGMFRLQAAAKGIDFVFRRPPHLPRVVYADEKRLRQVLINLLSNAIKFTQSGSVQFVVHYRSPVAEFEVIDTGPGIRGDDLERIFAPFERGEIGVSQPQTGTGLGLTISRLLAGVMGGDIKVTSTVGAGSTFKVKILLSEVTNPQRIAPVEAPVSGYHGARKTILVTDDDPVHRDLLREVLTPLGFILLSAPDGAGCLALAQHCRPDLFLLDISMPTMDGWAVAEALRESGHHQARILMVSASALEAHGAPLAQPFHDGYLMKPIDIPRLLETIRQLLKIEWQYGSYEVPMPLWRAETGSKPPARHIEALIGLGQLGYVKGIQLKLDEIGTEHPEHADFVAQMRSLVDRFDLDRYMATLKTLHAHEH

SEQ ID NO: 8790 - protein, 421 aa, BradyrhizobiumColbertium
MLMSDEANKGPLSPLRRKLLMGMAAVPAITMLPRASFAQAPATSAVNTTGLAVTDTEVTVGILHSATGTMAISETGSIQAEKLAIEQINAAGGVLGRKIKFIQEDGASDWPTFAEKAKKLLVNDKVAAIMGCWTSASRKAVLPVVEQYNGMLYYPTFYEGLEQSKNVIYTGQEATQQILAGLNWIAKEKGAKSFFFIGSDYIWPRTSNKIARKHVENVLKGKVVGEEYYALGSTQFNSVINKIKLTKPDVIFTDVVGGSNVAFYKQLKAAGIDLSKQPLLTISVTEDEIDGIGGENIAGAYACMKYFQSLDNPNNKAFVSAFKKMWGEKTVIGDVTQAAYLGPWLWKLTVEKAGSFDVDKIAAASPGVEFKGAPEGYVRIHENHHLWSKTRVGRAKLDGQFELIYETADLVEPDPFPKGYQ

SEQ ID NO: 8791 - protein, 308 aa, BradyrhizobiumColbertium
MFGDYSLGDLGSIFVMQGFAGLILFSVYVLMALGLAIIFGQMGVINMAHGEFMILGAYVTWMTSNFFQSYLPSLFSGYFFLAMILAFFASGALGMLVEWVLIRHLYKRPLDTLLATWGLSLMLQQAYRSVFGAREVGVELPQWMLGSLRVTDSIEVPINGIFVMGLTVLITISVAYVLYMSRWGRQVRAVVQNRIMAGAVGINTEKVDRYTFGLGCGIAGVAGSAFTMIGSTGPTSGQLYIVDTFLVVVFGGAASLLGTIASAFSISQTQSTLEFFMSGSMAKVLTLLAVVGILMLRPQGLFALKVRK

SEQ ID NO: 8792 - protein, 380 aa, BradyrhizobiumColbertium
MIINSRFFNRSELMGFIALAVVLFVILPLTLDVFRLNLVAKYLTYAFVAIGLVLCWGYGGILSLGQGVFFGLGGYCMAMFLKLEASSVENTKIQSTPGIPDFMDWNQITALPFFWQPFHSLTFTILAIVLVPGLFALIIGTAMFKRRVGGTYFAIITQAVAAILTILIVGQQGYTGGINGMTDLRTLKGWDIRPDHAKIILYFVEVVLLFACIGIAQFIRLTKLGRILVAMREQEDRVRFSGYSVANFKIFAFCMAAVFAAIGGAMFALNVGFMSPSFVGIVPSIEMVIYTAVGGRMSIFGAIWGAILVNFAKTSLSESFPQLWLFGLGALFIAVVLAFPNGLSGLWADYVQPRIDRLFASRKAKAGWNGNSVADSAPAE

SEQ ID NO: 8793 - protein, 251 aa, BradyrhizobiumColbertium
MLVGHQPKDFLLAVSGLTVSFDGFKAVNDLSFYVEENEIRVIIGPNGAGKTTVLDLICGKTKATSGSIQFRGKELTKMKENEIVQTGVGRKFQTPSVFEDLTVFENLEISFPRGRTVFGSLTFQRDQLVKDRVEEVAEMIFLKDRLNTYADELSHGQKQWLEIGMLLIQDPDLLMLDEPVAGMSVSERAKTAELLNRIIKNRSVLVIEHDMKFVEDIAHKVTVLHQGQILSEGTMEKVKNDPKVVEVYLGH

SEQ ID NO: 8794 - protein, 229 aa, BradyrhizobiumColbertium
MLAISDLHVAYGQSEVLHGLNVKVAPNEIVAIMGRNGMGKTTLMKSLMGILPAKSGSVSMDGAELGNLKSYERVAKGLAYVPQGRMIFSTMTVKENIETGLVVSGGSEVPDDIYELFPVLLEMKGRRGGNLSGGQQQQLAIARALATKPKVLLLDEPTEGIQPSIIKEMARTLKRIRDEKGLSIVVSEQVLSFALDIADRVLVIENGEIVRDDPRDAVDAAQVSKYLSV

SEQ ID NO: 8795 - protein, 409 aa, BradyrhizobiumColbertium
MPETLIKVDLTKSAYENDMVHNRWHPDIPIVAWVNPGDDFIIETYDWTGGFIKNNDSADDVRDIDLSIVHFLSGPIGVKGAEPGDLLVVDLLDVGPLKESLWGFNGFFSKQNGGGFLTDHFPLAQKSIWDIKGLYTSSRHVPGVNFAGLIHPGLIGCLPDPKMLETWNKREAELISTNPTRVPGLANPPFAATAHGGRAKGDVKAKIGAEGARTVPPREHGGNCDIKDLSRGSKIYFPVYVPGAGLSMGDLHFSQGDGEITFCGAIEMAGWLHLKVEVIKDGMSKYGIKNPIFKPSPITPNYKDYLIFEGISVDEAGKQHYLDVHIAYRQACLNAIEYLKKFGYSGAQAYSILGTAPCQGHISGVVDVPNACATLWLPTEIFDFDVMPSAAGPIKHITGDIQMPISPDK

SEQ ID NO: 8796 - protein, 125 aa, BradyrhizobiumColbertium
MPVYEYLCDDCGPFKDLRPMAECDDPQACPHCETLAPRVILTAPNFFCMPADRRKAHAVNERSTHAPQTLAQYKASHGPGCGCCSTGKTVKDKGATDRKKPTRLVTKTRSGAKGFPTARPWMISH

SEQ ID NO: 8797 - protein, 346 aa, BradyrhizobiumColbertium
MLHGDISSSNDTVGVAVVNYKMPRLHTKAEVLENARKIADMIVGMKVGLPGMDLVIFPEYSTQGIMYDSKEMYETASMVPGEETAIFAEACRKAKVWGVFSLTGERHEEHPHKAPYNTLILMNDKGEIVQKYRKIMPWVPIEGWYPGNCTYVSEGPKGLKVSLIICDDGNYPEIWRDCAMKGAELIVRCQGYMYPAKEQQVMISKAMAWANNVYVAVANAAGFDGVYSYFGHSAIIGFDGRTLGECGEEDYGIQYAQLSKHLIRDARRNGQSQNHLYKLVHRGYTGMINSGDSPRGVAACPYDFYKNWIKDPEGTRDMVEAMTRSTPGTDECPIDGIPNGAAPSNY

SEQ ID NO: 8798 - protein, 266 aa, BradyrhizobiumColbertium
MIGTAMLAAIAVAFGGLLGVQKWRTIQSRSQLRVVFEGGSASGLRRGGPVNFDGVPVGQIQSIKLDSPRRIVALVMLDNSAPIRKDTVAGIEFQGLTGIAAISLIGGAPSAPPVPLDADGIPILTADLSDAESIVETLHNVDRTIVSNAPAIKEGLHTFESYTADLRSKGGEIDSVMAKVDSAFAGFDKAVAKIEGAVPGFVDGKADELFEKIKELHELAGTMKKKSAGYIEDIRRSLLDVSETANKMAGTPVPPRPPRRPTEQRR

SEQ ID NO: 8799 - protein, 738 aa, BradyrhizobiumColbertium
MEAQVSAASAFHPWSPPPDASDIVKGIHAMLHPRNIVLVGATDKPGNYAERIWNNLVKYGFEGGLYPVNAKREAIWGVPCYKDFASLPEKPDHVLVLVPARFAVQVIRDAAAAGARSATIVTSGFSELQDEESQKLAAELQAAVRETGLAVTGPNCLGNLSAGEKLFTNIDDRIVTMEQGAVAIAGQSGAIVMAIRQALEDRGVGVGYMVTTGNEAGLETPDLMRYFAEDPSIKVIVVYLEGVRNTKAFREACKAARAASKPVIALKLGASEGGRAAAMAHTGALAGSIETFDAIATREGVIRVAGLDELIETTECFVHATVPKGDRLAAVTLSGGKRGMLIDAFYAAGLNFAPLSAHVSSELAKMLGPGSIVGNPLDAGFAAVVDPSVYMKSIKLMIDDPDIDIVIVDAELPKAQHELRERNLRIVNDMASKAGKPVIYISAMSIGFTEFTKELRKSLPHLAVMQGLDRAVTAIKSLLDYAKLRKEVPDIVSSSKPAARAVLEKTLRSATGAALDEVASKKLLKAYGIPISKEAIAQTAAEAVKIARQIGFPVVAKVVSAEILHKSDIGGVVLNINSAAEVKKAFADITARVAKLKGKPRLDGILIAQQVKAELELVIGASLDAEMGPVVLFGTGGIDIELMKDVALAGAPLDEAEAQLLIGRTKAGIKMRGYRGKPALHEASALKALVGLSNLIADAGDRIASVDINPFLINTRTGVAVDALIVLNNAAARHAAGH

SEQ ID NO: 8800 - protein, 203 aa, BradyrhizobiumColbertium
MRSIDPGMTTKEKQMPRFIFPLVLALIGLLLLGDGAYIHAKAWLAQVLLERAFERSVATGEAVKPWSWADTWPVARIEVKRIGASAIVLEGTSGQALAFGPGHVHQTADAGERGIAVYAAHRDTHFRFLRNVAIGDVIDVTRRDGQHFRYRADASAVVRFDASGIEATTQGYELILATCWPFDAVTPGPERYILHATLIGADR

SEQ ID NO: 8801 - protein, 753 aa, BradyrhizobiumColbertium
MDTYDTADSDEHPLLSRLIKVGLFLLAQGVAVMLVAFIALLVSFGTSLSATTEQASLLQPGDARSGTLLLKEDGAYAEAVRLGTDVDITVSGPTLRARVTQVFRNTSKDWVEATYVYPLATGGAVDTLKMVVGDRVIIGNIKERQQARVIYEEARRTGRKAALTEQERPNIFTNSVANIGPGETVLVQIEYQEPVHQSGREYSLRLPLVVGPRYNPAPIVQSVDFRRDGSGWGAATSDPVPDRERISPEVLDPAKHAPVNPTSITVRLKAGFPLGDIKSHHHNVRVESPDSATRIVTLSDGAVPADRDFELTWKPAAEKAPSVGLFHERIGDADYLLAFVTPPGADQAARKPPAREVVFVIDNSGSMGGTSIVQAKASLLYALGRLQPNDRFNVIRFDDTMDVLFPASVPADAAHVGEATSFVSALQARGGTEMVPAMRAALTDKLGGTDMVRQIVFLTDGAIGNEQQLFETITAMRGRSRVFMVGIGSAPNTYLMTRAAELGRGAFTHIGSVEQVEERMRGLFAKLENPAVTGLTARFSEATADVTPAIIPDVYRDEPLVLAAKLDKLAGSLEIKGRVGDRPWTVTLPLQNAAEGKGLSKLWARRKIADAEVARTLRETSPENADKTILALALDHQIVTRLTSLVAVDKTPSRPEGAPLKLEELPINLPAGWDFEKIFGERPQVPAQLRERHADAGTPPALRRPAPAAPDAIRLPKTSTPAELRMFAGAILILLALTLFVFNRRRTLLTDSA

SEQ ID NO: 8802 - protein, 256 aa, BradyrhizobiumColbertium
MQTQDKVTDKQLTDEQSREIAETIREELARRRISRQALAEQAKLSLSTLEKVLGGRRPFTLATTVRLEQALGVSLRRSAVMVTPLAASDVAPDSLGSYAHRAVTWLEDVYVTLRPSFGDKDAIFAYRTEIVWEPKVSSLVFREGDRTDAAYEHTGEVAVPHQSGFIYLVIIKHGQHRVITVSRPTVSGEMYGIISTLRAGPGSQLTPIAAPIAYVPLRNIPNPSLGRVAPDDGNYALYRKHLRRTVEEPFALFLPA

SEQ ID NO: 8803 - protein, 407 aa, BradyrhizobiumColbertium
MKNKKIALLAAATALTLLSAQSAFAQKKYDTGASDTEIKIGNVEAYSGPASAYGIIGKTEEAYFKMINDQGGINGRKINWISYDDGYSPPKTVEQVRKLIESDEVFLVFNALGTPTQTAVQKYHNAKKVPQLFLATGASKWNDPKGFPWTMGFQPSYRVEARIFAKYILQAKPDAKVAIFYANDDFGKDYVAGIKEIFGEKASSLIVAEESYETTEPSIDSHIVKLKGTGANVFVNISTPKFAAQAIKKIAELEWRPMHVMTDVSISIGAVMKPAGLDASEGVLSASYLKDASDPQWKDDEGMKKFLAFVDKYMPGANVADTNIVYGYAAAQTLVQTLKQCGDNLTRENVMKQAASLKDFAPDTLIPGIKINTGPNDFAPIEQLKMIRFKAGQWELFGDIISAETGG

SEQ ID NO: 8804 - protein, 520 aa, BradyrhizobiumColbertium
MEEFLAVRYYDWIAHHGRRTPNKVAVIDLASDRRFTYSQLDARVSRLASFLRHRLGVSRGDRVAVLALNTTDTLEVQFACGRLGAIFVPLNTRLTVPELQFITSDCAPKVMIHDADLAETALAVAKLCNVPTSLLLGPGGAYEAGIAAANPLDRAEEVTLDDVSTVMYTSGTTGHPKGATITHGMTFWNCVNLGGPACIGPASVLLTVLPLFHTGGLNCYTNPVLHAGGTVMIMRAFDPGTALGLINDPAQGINVFFGVPAIYQFMAQHPAFATTDLSRLIVGGVGGAPMPVPLLKVWEARGVALQQGYGMTETSPAVLVLDREDAARKAGSAGKPVLHTEVRIVRPDGSDADVGELGELWVKGPNITPGYWNRPEANKTSFTDGWLHTGDATRVDEEGFYYIVDRWKDMYISGGENVYPAEVENVLHQLNAIAEAAVIGIPDAQWGEVGLAIVAVKPGQKLTEGEVFAHCAANLARFKCPRQIRFVDALPRNATGKIHKPTLRKEFSVASEIDKKVANA

SEQ ID NO: 8805 - protein, 378 aa, BradyrhizobiumColbertium
MKSPFYTAEHDAFRDVMRRFVEKEITPFAHEWDEAGEFPRALYRKAAEIGLLGLGFPEEYGGIAADQFMKIVASQELARAGAGGVSASLMSHTIGSPPIARAARPAVKARVLPQILAGEKISALAITEPGGGSDVANLSTRARRDGDHYVVSGEKTFITSGMRADYLTVAVRTGGEGAGGVSLLLIEGNTPGLSRTKLKKMGWWASDTATLHFDECRVPAENLIGEEGQGFKIIMQNFNSERMGMAASCTAFARVCLDEAIAYAKERKTFGKPLAQHQVIRHKIVDMAQKVAASQAMLEMLAWRLEQGESPVAEICMMKNQATQTMAFCASEAVQIFGGAGFMRGIKAERIYREVKVNAIGGGTEEIMKDLASRQMGL

SEQ ID NO: 8806 - protein, 388 aa, BradyrhizobiumColbertium
MLFKADHDDIRRSLQKFIANEINPHVDEWEKADIFPAHELFKKMGNLGFLGLNKPAEFGGSGLDYSYALMMAEELGAITCGGVPMAIGVQTDMATPALARFGSDEVRREFLAPSIAGDYVACIGVSEPGAGSDVASIKTQARSDGDDYVINGGKMWITNGTQADWICLLANTGDGPVHRNKSLICVPMKSKGVTVARKLDKMGMRSSDTAQIFFDNVRVPKCNRIGEEGKGFTYQMIQFQEERLWGAAACLKAHEYIINETIEYTRNRKAFGQSILDNQVVHFKLAEMQTEVELLRALIYRAGEQLVAGEDVTRLATMAKLKAGRLGRELTDACLQYWGGMGFTNETPVSRAYRDSRLTSIGGGADEVMLMVLCKMMGTLPGSKGKAS

SEQ ID NO: 8807 - protein, 218 aa, BradyrhizobiumColbertium
MITLYHCDAARSFRPLWMLEEMGLPYELKMLPFPPRVFAKEYLALNPLGTIPFMVDGETKMTESSGICHYLGIKYGPTPLMVGPEDPAYGAFLNWMYFSDATLTFPQTLVLRYTQLEPEERRNPQVAGDYAKWFLGRLRAVEAATANAETLCGGRFTAADIVIGYALRLAENIGLAKDFGPNVAAYWARLQQRDGFKRAVAAEQKAGAEQNVAPRVRA

SEQ ID NO: 8808 - protein, 266 aa, BradyrhizobiumColbertium
MEDKGRESDHLMLITPERVFYAGLLGRPRKRTPGCCHVYVAVKGSLHLTIDDLHLSDELIVTLPNQRHTIASDYRTVISVTLEPESMPDGVIEALAERLRGPDKAAYARKILAAYALLRQRRYGDITTAEFDEMCFGEALPRRVLDPRVMRAVARIERFSGEPVTADTCAAEAGLSASRFLHLFKEETGISFRSFRAWKRARHLLHFANQDLNLAHLAQDIGYPDSTHFSHSIRRFYGLKPRAIFVGSRDLAIYRSTETVRLAEAS

SEQ ID NO: 8809 - protein, 288 aa, BradyrhizobiumColbertium
MTDKAVITCALNGVLTDPKQHNVPVTPEQMAREAKAAFDAGASIMHIHLRQQAPGKGHLPSWEVAVSKEIQQAIREACPGVIINHTSGVSGPNYSGALDCIRETRPEIAACNAGSLNYLKVKADNTWAWPPMMFDNAVEKVKDYLDVMNAVGTIPEFECFDVGIVRCVGMYHQVGMYKGPLEYNFVMGVASGMPADPELLPILIKLKRPEAHFQVTAIGREEIWPLHQRCAELGGHLRTGLEDTFYLADGKKVTSNGQLIEAVAACARRAGREIASPAEARKIFGTNR

SEQ ID NO: 8810 - protein, 538 aa, BradyrhizobiumColbertium
MSILENTISPGSAAYQANRDGMLGLIDRMRALEDRTRAASAAAKDRFHTRGSSCPRERVALVLDPGAPFIELSTLAGYMFDVPDPNKSVPGGGVIAGIGFVSGVRCMVSANDAGIDAGALQPYGLDKTLRVQELALENKLPYVQLVESAGANLLRYRVEDFIRGGNIFRNLARLSAAGLPVVTVTHGSSTAGGAYQTGLSDYIVMVRGRTRAFLAGPPLLKAATGEIATEEELGGAEMHTQVSGLGDYLAEDDRDALRIAREIMAAMEWERPGRVAPQFKPPRYDQDELLGIMPMDHKRPVDMKQVIARIVDDSDFTEMAPNYGPATVCGHARIGGQAIGIITNNGPLDPAGANKATHFIQACCQTRTPLLYLNNTTGYMVGKAYEEAGMIKHGSKMIQAVTSATVPQITIYCGASFGAGNYGMCGRGFHPRFCFSWPNAKTAVMGGEQAAETMAIVTEAAAARRGKPVEKDKLDAMKAQIIGVFDGQMDVFSTSARVLDDGVIDPRDTRAVLSEVLAICREGDARTPQRMQFSVARP

SEQ ID NO: 8811 - protein, 653 aa, BradyrhizobiumColbertium
MQHRPFSRVLVANRGEIALRVMRSARKLGLGVVAVYSDADRDALHVRQADRAVRIGEALPAQSYLNIQAIIAAARASGAEAIHPGYGFLAENEEFARACKEAGLVFIGPSPQAIEAMGNKAGAKEILKKAGVPIVPGYQGADQSDEVMLAEAKKIGFPVMIKAVAGGGGRGMRLVTDATSFPDALRSARSEAKAAFGDSTVILERAIQNPRHIEIQVFGDSHGNAIHLGERDCSVQRRHQKLIEEAPSPAVTPELRAKMGEVAVAAVKALRYEGAGTLEFLLDARGEFYFMEMNTRLQVEHPVTEGITGLDLVELQLRVARGEPLPIKQQDIKFSGHAIEVRLCSEDAAQDFMPQSGRMARWQVPDGIRVEHALQSGTEIPPFYDSMIAKVISHGTTREEARGRLIVGLEQLTAFGVTTNQAFLMSCLRHPGFARGEATTAFIGAHRDELLAPDANGAFDVALAGLLLYVTNPRAPSWQVGRSLAATFPLPAKIEIAGHAHELDITRERDGGYTVASSDRQDRFEIDQLAADMIRFRHDGLMDSANFLRDGDRLYVQHRGIPLAVVDLTLAAPKAAASNGGDGKVRAAMNGRVVAVLVKPGDRVTAGQPVLTLEAMKMEHVHKAGIDGVVTAIDAAEGEQVTTGRIVAEIGAG

SEQ ID NO: 8812 - protein, 270 aa, BradyrhizobiumColbertium
MLRATDSARDAAAALPTSSSALAFAAPTMRESWLFGALFVLTLAALLAPALPPAAWHVAHFVDNRSWLGIPNAGDVLSNLAFVAMGVWGSERLRARNDAPVGASWFFVGLILTGLGSGFYHLDPYAPERLVADRLGMAVAFAGFLGIAASERISTRAGEAVLVLTMIAGLLAAWVARENLAPWVVVQFGGMALAMGLALTRPRRGAIGVRLGGVLLFYVLAKLFELGDAAVFEATGHVISGHTLKHLAAALAAWPVIRVLNPTGSVPCPR

SEQ ID NO: 8813 - protein, 328 aa, BradyrhizobiumColbertium
MTEALLEVTDLKKHYAVRAGVLRRQVGTVHAVDGVSFAVGVGETLGLVGESGCGKSTVARSVLRLVEPTSGRIRLVGEDITHLSKSDLRPHRRSMQIVFQDPFASLNPRMTAGDIVGEPLAVHGLATGKALEARVAQLFDQVGLRPDQMRNFPHQFSGGQRQRICIARALALGPRLIVCDEPVSALDVSIQAQVINLLIDLQRQHGFSYLFIAHDLAVVAHISHRVAVMYLGRIVEIAGKDELFRNPRHPYTQALLASVPIANPLAKKLAPLVDGDVPSPVNPPSGCAFHTRCRFALDRCRTERPALVDAGDGHQVACLLNEGTGRSQ

SEQ ID NO: 8814 - protein, 335 aa, BradyrhizobiumColbertium
MADTTDLVLDVKNLKTVFFTNSGLFKAVDDLSFSVKRGETLAIVGESGCGKSVTALSLMRLVPDPPGRIVGGSVSLEGTDLLALSEAEMRSVRGNRISMIFQEPMTSLNPVMRIGDQIVEAVRLHRNIPSKEAQGIAVEMLRLVRIPEPARRAREYPHQLSGGMRQRAMIAMALACRPVLLIADEPTTALDVTIQAQILALILDLQKELGTGLVLITHDLGVVAQTAQRVIVMYAGRKVEEASVEALFASPKHPYTRGLMASIPTVPASGVPAQARLNEIPGTVPSLVRLPKGCAFAPRCKLAIKRCEAEYPPLADWGGGHLAACWRAEEVAEVA

SEQ ID NO: 8815 - protein, 297 aa, BradyrhizobiumColbertium
MAAIDFDVELRRAGAHATGGWRRVLFMAQRHVLGAAGLVIMTLFVLTAIFADFIARYDPLTVDSARALARPSLAHWMGTDSFGRDVFSRIIHGARISLAVGLGSTALGGTIGVIVGLTSGYLSGWVDLVFQRVSDVLQALPLLVLALVMTAALGPSLPNVIIAIAIPLIPTVARVIRANTLALREQQFVEAAKSIGMSETRIALRHVLPNTLAPLIVLATAQLGSTILTEASLSFLGLGIPEPYPSWGRMLSESAAEYVRTAPWLVIFPGIAISLAVFGANLFGDALRDILDPRQRG

SEQ ID NO: 8816 - protein, 315 aa, BradyrhizobiumColbertium
MFAYLVRRLFLMLVTLFGISIVIFFLLRIVPGNIVDILFAAAGYVDPADKANLEKELGIDRPLIVQYWHWISGFLRGDFGYSYVSEKPALQEILPRIPITARLAGLALLFSASIGIPLGVISAVKQGTKLDYALRVVSLSGLSLPSFWLGLLILTASVAMFGQMPIFNPNPQTWLEAFATYAVPAAAVGFRSAALTMRITRSSMLEVLRQDYIRTARAKGASEATVNYQHALKNAILPVITVIGIEAAFLIGGLIVTETVFNIPGVARYLVEAIRWRDYPIVQNLVMFIAVVVVFANFAVDMLYAVFDPRIRYTD

SEQ ID NO: 8817 - protein, 532 aa, BradyrhizobiumColbertium
MRSVWALAATAALSLLTISTATLAAEPKQGGILRMYHRDSPGNASIHEGATYSLNVPFMPVFNNLVIYKQDVAQNSMDSIVPELAESWAWVNGNKTLTFKLRQGVKWHDGKPFTSADVKCTFDMLMGKAQQKFRQNPRKSWYDQVSDISTNGESEVSFNLKRPQPSLLALLASGYTPVYPCHVSPAEMRTHPIGTGPFKFVEFKANESIKLTRNPDYWRKGRPYLDGIELTIIPNRSTAILAFVAGKFDMTFPTEVTIPLVRDVKQQAPNAICEIAPTNVSTNIIVNSSSPPFDNVDIRRAMAMALDRKAFISIMFEGQGDIGGTMLPPPNGLWGMPKEMLETIPGYGPDVKANREEAKKLMQKAGYGPDKHLAVKVSTRNIPIYRDPAVILIDQLKTIYIDGEVDVVETANWFPKVARKDYMIGLNLTGNAVDDPDQSFYENYSCGSERNYTNYCNKEIEKLFDVQSQETNIEKRKKLVWDIDKKLQEDVARPIVFHSRMGSCWQPYVKGLTVMTNSSYNGYRYEDVWLDK

SEQ ID NO: 8818 - protein, 516 aa, BradyrhizobiumColbertium
MYTGHHARLRPLQPAFIMAGTGESVTYRELEARSNRLAHLFRRHGLKRLDHYSVFMENNSRYLEACGAGERSGLYYTCINSFLTPGELAYLLANSQSQILITSVAKLDIAREAIQACPDIKLCIVADGPGESERIVGLAEVTAGLPTTPISDEWLGTAMLYSSGTTGRPKGILRPLPEEPPKHNLPLFDFLTKLWHYREGMVYLSPAPLYHSAPQAAVNLTIRMGGTVIIMESFDPERYLQLVEQWGITHTQLVPTMFSRMLKLPDEVRNRYDVSSLEIAIHAAAPCPAQVKDDMIKWWGPIIHEYYGATEGLGFTACNSEEWLGHRGTVGKVLLGDLHILDENMQECPTGTPGQVWFKTATPFEYFNDPEKTREARSPDGSMSTVGDVGYVDKDRFLYLTDRATFMIISGGVNIYPQECENLLITHPKVADAAVFGVPNADLGEEVKAVVQPMPGVVPGPALAEELIAFCAKSLSRQKVPRSVDFEKELPRLPTGKLYKRLLRDRYWGNKASRIV

SEQ ID NO: 8819 - protein, 384 aa, BradyrhizobiumColbertium
MHQGRVVFGAIEEVVFGHPAAGAIVAQMDRLGASRAFLMVSGTLNRQTDEITKIRQALGPRCAGLFDAMPAHTPREAVIAATRAAREADADLIVTVGGGSITDGAKAVQLCLANGIDDIEGIERIRVHKGVAPEMIAPTVRQISVPTTIAGGEFSAIAGVTDRAAHVKQMLRHPLAVPRATILDPAITVHTPEWLFISTGIRAVDHCVEAICSHETHPYADAQSVKSLAMLADALPRVKANPADLDARMDAQIGTWLSMGALAAGVPMGASHGIGYVLGAALDVPHGYTSCIMLPAVMRWNARDNAERQTIVAAAMGYPGHDAADVLDAFIRSLGMPRSLADVRVSPEHFDSIAEQAMRTNWIPRNPRKIEGPADVREILLLAA

SEQ ID NO: 8820 - protein, 401 aa, BradyrhizobiumColbertium
MGGPDGSEQFVKRHDFVQPRRSAIAGLVAAAFAITGCDKPASQAAAPAPASVTVAQPVKRTVTDWDEFTGRFEAMEEVQVRPRVGGFVNSVNFQDGAIVRQGDLLYVIDPRPFEAVATQAEGQLADARARVELAKRELDRALSLVQTSAVSEQVVDQRRQALQAAHAAETQADGALKAAKLNIEFTHVTAPLTGRVSRHLVSPGNLVQGSDSGSSTLLTSIVTLDPIYIYFDMDEATFIKYSKLWFEGRRPSSRDTANPVQVSLVGETKQSREGTINFLDNRLDVSTGTLRSRAVVKNTDQSILPGQFGRVRLIASAPYEALLIPDAAIATDQSRKIVFVVKPDDTVEARPVVLGPLDDGLRVIRDGLKADDRVIVNGIQRARVGAKVAPQTAQAPTGGKS

SEQ ID NO: 8821 - protein, 1053 aa, BradyrhizobiumColbertium
MNLGRLSINQPILAMVLSIVLLIVGALAYTTLPVSEYPQVVPPTVVVTTQYPGASAQIVSDTVAAPIEQEINGVEDMLYLYSQATSNGQLTITVTFKLGTDLDKAQVLVQNRVAIAQPRLPEEVQRNGVTTRKNSPDILMVVFMLSPDDTFDQLYISNYALLQVRDQLLRLDGVGDIQIFGARDYSMRLWLDPDRIANLGLTSAEVLAAIRAQNVQIAGGQIAEPPIADRAFQPNLTFTGRLKDQKQFEDILIKAGSDGRIVRLRDVARIELGALSYSTNSFLLRKSAVAMLVTQRPGSNALATAKNISDTMTRLKENFPKGLDYNIGYNPTEFIAQSVHELIKTIYEAMLLVVVVVLVFLQGWRPAIIPIIAIPVSLVGTFAVMAALGFSINNLTLFGLVLAVGIVVDDAIVVVENVERHLEHGMGRRDAALKTMEEVGSALVSIALVLCAVFVPTAFLGGISGQFFQQFAVTIAVATAISCFCSLTLSPALASLILTPHEDKKPPAAWNVVARGWNAFTGVFNRVFDRLAHGYASLANFVIRHAVVMLLFYVVLIGSAGWLIVTTPQGFIPSQDRGYVIISVQLPGAASLARTTEVVREIERISLDTPGIVRVAAFAGFSGATRTQAGNAAALFPVFDEPETRLKKGLSANAITAELRKRLSAIQGAFIIVIPPPAVPGIGTGGGFTIRIQDRQGRGPEMLAAATDELVAAARKAPSLTSVFSPFTANTPQLFVDIDRTKAQKLGVPIANINDTIQTYFGSTYVNDFNLFGRTYHVTAQADFPYRKEQSDLARLRTRNASGDMVMLGSVVEFKDASGPDRVARYNLYAASELQGEPAPGISSTTALDTIKQLANDTLPSGFTFEWTDLSYQQVTGGNAGLYVFPICVLFVYLVLAAQYGSWTLPFAVILIVPMCLLAATLGVRIMGQDVNILTQIGFVVLVGLAAKNAILIVEFARDIENEGKSRLEAVIEACRLRLRPILMTSFAFILGVLPLVISSGSGSEMRQAVGVAVFFGMIGVTLFGLLFTPIFYVVVRNLAEGRRDKKPKIVAS

SEQ ID NO: 8822 - protein, 397 aa, BradyrhizobiumColbertium
MKSALLAAVATSAVLLAAPAAAQGVKIGILNDQSGVYADYGGKWSVEAARMAIEDFGGEVLGQKIELVTADHQNKPDLATSIARRWYDVENVDMITELTTSSVALAIHELSKEKKKIDIVVGAATSRLTGDACQPYGFHWAYDTRALGVGTGGALTKAGGDTWFFLTADYAFGYALEKDTSEIVTANGGKVVGSVRVPLNSSDFSSFLLQAQSSKAKIVGLANAGLDTTNSIKQASEFGIVSGGQKLAGLLMTLAEVHGLGLQAAQGLVLTEGYYWDVNDKSRNLGERFLKRTGRMPNMIQAGTYSATLSYLKAVKAAGTKDPDAVAKKLKELPVDDDFAQGGKVLENGRMVHDMYLFEVKKPSESKKPWDYYKLLATVPGDKAFFTAKESGCPLTK

SEQ ID NO: 8823 - protein, 128 aa, BradyrhizobiumColbertium
MYHLTALVTLLAIAFYFFTAINVSRSRTATGVKVPAMSGHPDFERAFRIQMNTLEWMPIFLPALWLFAVYISDAIAAGIGVVWIIGRIVYFVGYSKAAAKRGPGFAIQSIAAMALWAGALGAVVLRLV

SEQ ID NO: 8824 - protein, 360 aa, BradyrhizobiumColbertium
MSADRISRRTFAASIAALAFVRRASAQGYAGLGEAADGFAKVTPGRTFTFPADHGPHPEFRIEWWYLTANLVDGSGAACGLQWTLFRQAAQPGPQGEGWANQQVWMAHAAATRADTHRFSETFSRGGVGQAGVTAKPFDAWIDDWEMKGLERTDDRTLAPLTLKASGTDFSYALTLEADRPVVLQGDGGYSRKSERGQASYYYSQPFYRARGTLIIGDKPIDVSGQAWMDREWSSQPLDADQTGWDWLSLHLASGDKLMLYRLRQKDGRDYPFGNWISATGETQMIAGSDIQMMPKGTADIAGRKVPVEWQIAIPSRSLSIACKPLNPKAWMGTGFSYWEGPISFAGTHDGVGYLELTGY

SEQ ID NO: 8825 - protein, 820 aa, BradyrhizobiumColbertium
MRRALWILAVLLSHWRRHKMQFATLLVGLIAATALWSGVQAINQQARNAYDRAAATFGGARTAMLVAPNAATFPQELFVKLRRAGWPVSPALEGRVQINGRSLRLLGIEPVTLPTDVGNAPRLGAADLSSFVAAPGQTLLARETLSGLGESEGAAPAISNGAKLPPLRVLPQLVPDVLVVDIGVAQRLLNKPGQVSRLLIGKPRGKPAPLASVVGDQLQRVEPDAETELERLTDSFHLNLTAFGLLSFFVGLFIVNSAVGLAFEQRLPMLRTLRACGASARLVNTVLVIELVALALVAGLIGLACGYFIAAALLPDVAASLRGLYGAQIPGQLTLRPEWWLAGVGISVAGALVAAATSLIKAIRMPVLATAQPRAWQQRQRRWLLLQSLAACAVFAVALLLLHYGQSLIAGFGVLAALMLGAALILPAFLEIILFAGQRAARGPLALWFWADSRQQLSGLSLALMALLLALAVNVGVSTMVETFSRTFIGWLEGRLAADVYISASDNAQGTAIRNWLKERGDVQAVLSGGRAETQIRGQSVEVLGLPDHALYRERWPLLDSVPRAWTRLVPGNAAFVSEQLSRQLNVRIGDVIEVPAPGGAWALDVVGIYADYGNPKGQLTVNVAALIRQFPQTPQTRMGLIVAKDHIPGLIAALQKQFALDDRSVADQATVKAESIRIFNRTFAVTSALNAFTLGVAGIALFTSLLTLANSRLPQLAPLWAIGITRPRLAAIELTKTLSVALFTALLAVPLGLLVAWCLIAIVNVKAFGWRLPFHVFPLQLIELVAVALLASLVAALLPVARLARMRPASLVKVFANER

SEQ ID NO: 8826 - protein, 217 aa, BradyrhizobiumColbertium
MLSIRNLSKTFSSAGEPVHVLRGVDLDLRHGERVALTGESGSGKSTLLHLIAGLDAADGGTIRLEEIEVTRLSDAGRASLRRDRIGLVFQQFNLIPSLSVADNLAFQARIAGRHDAAWTKELVERLGLGSLLKRYPEQISGGQQQRVAIGRALATKPSLLLADEPTGNLDETTAEDVLALTRDLVARTGCGFLMVTHSLHLAATLDRHLTLHAGRIA

SEQ ID NO: 8827 - protein, 441 aa, BradyrhizobiumColbertium
MSAQGTSAVAGKSARTPRGAWTITFLLFLFMVVNFADKIVVGLAGVPIMTDMKLSAEQFGLLGSSFFFLFSISAIVVGFVVNKVPTRWVLLVMAVIWALAQFPMVGTVSFTTLLICRIVLGAGEGPAFSVAAHAIYKWFPDEKRTLPTAILSQGSAFGVILAVPALNWIIVNHSWHYAFGALGVVGLIWVAAWLALGKEGPLEDTEVLAVAEPKIPYVQLLTSRTFLGCVFATFGAYWALSLGLTWFTPFIVKGLGFSQSQAGFISVLPWVFGATIVMLTGWISQVMMARGYTTRISRGVLGSVPLIIGGLILAMMPHVQGAGLQIALLVVGSGLCGAIYVVCPPMLGEFTPASQRGAVIAIYGALYTLSGIIAPSVMGTVIQRAGSMLDGYLTGFTINAAVMMASGVIGLVLLWPNTEKTRLTRGASAQRAALKGAISPT

SEQ ID NO: 8828 - protein, 572 aa, BradyrhizobiumColbertium
MSTTPDLVIRGGNVADGSGGELFEADVAITGGKISEVGKVSARGREEIDARGKLVTPGFVDVHTHYDGQVTWSQDITPSSQNGVTTAIMGNCGVGFAPCKPDDHTRLIQLMEGVEDIPEPVLSAGIPWAWESFPDYMDWLAKRDFDIDVGAQLPHAALRVYVMGERGARRDPSTAEDNATMAKLAGEAVRSGALGFSTSRTLNHRTSTGDFTPTLKAGEDELTAIAGAMHREGRSVLQFVLDLSTIHEDLPMMLRVADSTNCPISFSITQNDKAPQRWRQTLDEINAASRRGLSVTAQIAARPVGLLLGLELSRNPFQTHPSYRAIAHLPLQERLALLRQSDVRKAILSETATATDDPLFFRPNYDKMFLLGDPPDYEQPPENALGPQARRQGRQPEELAYDAMLSDEGRGMLYVPFLNYSDGNLDATREMLLDPRSVPGLSDGGAHCGIICDASFPTYLLTHWTRDRKRGEKLTIPFVVAAQSRKTALSVGLRDRGLIAPGYKADVNVFDYDRLHLHPPKVHYDLPVGGRRLLQDVDGYEATIVSGVVTRRHGEATGRRPGKLIRGAQGVN

SEQ ID NO: 8829 - protein, 261 aa, BradyrhizobiumColbertium
MGRAFSIHTFAGFLGGAVAPAIVAALVTLSGGTGALIASGAIGIAVALLLIVMNIPDAGAHKKKPGSESAPKQAVITPVLITLTALFMLLSLSVAGINNFGVVALMSGYGASYSAANIALTAFLGASAIGVLAGGFLADRTERHGQVAAACFAANAAIVLLIALVTLPGWALTATMTAAGFLSGVIAPSRDMLVRNAAPAGAAGRAFGIVSTGFNLGGIVSPLLFGWIMDQNAPHWVFGASVIFMLATVLLSPFTERKRQG

SEQ ID NO: 8830 - protein, 59 aa, BradyrhizobiumColbertium
MAIGKLSEPPKFVDDKTAEKQQADNNPKVPPPALDDDDYEDGDIATPKRDRYGPDDEPL

SEQ ID NO: 8831 - protein, 187 aa, BradyrhizobiumColbertium
MKLPDETMVFPAHDYKGDTVSTIGEEKRYNPRLQVRSVDEYIELMANLKLPNPKMMDVAVPANMHVGLHQEELEKEGRALSATEAIRILGRPDILLVDLRETNERLKHGMLEGALHTPYPSVEESLKPGGMLREVAAATGRRVVFFCAFGERSAMAVAAAKEAGLLNTAHIAGGIDAWKKAGGPVLH

SEQ ID NO: 8832 - protein, 150 aa, BradyrhizobiumColbertium
MIFRQLFDSVSGTYSYLLASRHGGEALILDPVLEKVDRYCQLLRELDLKLVKAVDTHLHADHVTGLGELRDRTHCMTVMGDQTKADVVAMRVADGDKVTIEGLSLDVMYTPGHTDDSYSYLMGDRVFTGDTLLIRGTGRTDFQNGSARAQ

SEQ ID NO: 8833 - protein, 152 aa, BradyrhizobiumColbertium
MMRLQLKFAMMLALLVWAAVPPALAQQVPLQDKPFAEHRIVLQLSDGDAKKQSLVLSVANNLLKAYGPDKIAIEVVAFGPGIDLLLAGGERRKQVESLIAQGVRFDICLNTVDTIERETGKRPDFIQAATPVQVGVGQILFLAENGYTLVRP

SEQ ID NO: 8834 - protein, 583 aa, BradyrhizobiumColbertium
MAIRRRDVLKSAGLAAATLALPRLARGTETAGIYDLERFGNARILHITDTHAQLNPVYFREPSVNIGIGEMAGRPPHLVGRAFLERFGIRPDSADAYAFTCVEFEKSAGRFGKLGGFAYLKTLVDRLRGEVGERRSLLLDGGDLWQGTGLANVMQGRDMVEVANLLGIDAMTGHWEFTYGEQALRDNLERFKGEFLAQNVFLTEEAAFNDAPAFDKASGRVFKPSMIKEMGGHRIAIVGQAFPYVPIAHPKRFTPDWSFGIREEELQKHVDALRGADKVDAVVLLSHNGMDVDLKLAGRVTGIDVILGGHTHDAVPQPMAVRNAGGTTLVTNAGSNGKFLAVLDLALDRGKVSDVRYHLLPVYSELLKPDPAMAELIGRVRAQHVADWSEKIATPDRLLYRRGNFSGSMDELICTALRTELDAEIALSPGFRWGVTVLSGQAMTMEDLLAETAISYPETYVQEMTGAEIKDVLEDVCDNLFNADPYYQQGGDMVRAGGLSYTCTPEAAIGARISELKLGNGKPLSASHRYKVAGWASVNTRQGAPVWDVVGKYLRSGRMLQERLGSGVTLKGVEGNPGIAGRG

SEQ ID NO: 8835 - protein, 101 aa, BradyrhizobiumColbertium
MKRSLALAMLLALSLAPSARAANEADYKAAYAAAEAASREAAGMRNQWTVTVSALAAAKKAADGGDFDRAVAAAREAEALAKASIFQATSEKEAWKAMEIR

SEQ ID NO: 8836 - protein, 287 aa, BradyrhizobiumColbertium
MKVRLSLLLGSVCAALVALAAAPPRVAAADKVDPVADAKAFQNFFFQKFPNVKREDFVNGPYSMNEDMKRQWREKEEFPPYEFALEAGKEMFATPFKNGKTYADCFPNGGIGIRQNYPYFDEKEGKVVTLELALNRCREANGEAPYSYVKDEMASLTAYMAYTSRGKPMDIRIPDDPRALAAFENGKRYFYTRRGQMNFSCASCHVQSPGERIRAETLAPALGILNAMPIYRSEWSGMGTTSRRFVTCNSQTRAVPLEPQSDEYRDVEYFLSYVANGLPISGPGARP

SEQ ID NO: 8837 - protein, 103 aa, BradyrhizobiumColbertium
MASSIRVRATSNGDITEVQALIQHPMDTGLVKNPNGELVPAHFIQELKFECNGKDVFVANWGTAVSKDPYVKFSFKGAKKGDELKISWIDNKGASDTTTAKIA

SEQ ID NO: 8838 - protein, 163 aa, BradyrhizobiumColbertium
MTTTTGPHPTRRLILQGAASVALLGLGNLPFGAAPARAAANDKYPEEAFKQKNEADAIKALYGKTAEPSDKVKLDAPEIAENGGVVPISVTTSLEKVTSISFFVAENPNALAASYKIPDGTIPAVANRLKMAKTTRLTAVVEADGKLYSATKEVKVTVGGCGG

SEQ ID NO: 8839 - protein, 137 aa, BradyrhizobiumColbertium
MLLNHSANEIIDIPLQDDALTVFPRKPALLVALALFAGAAVATAEAQSTVIEGRKLAFDRSKGNCLTCHAMQGGDLPGTIGPELKDIKARYPDRNELVAIIFDETKRNPLTMMPPFGRNRILTEQEINAIVDFLQTL

SEQ ID NO: 8840 - protein, 223 aa, BradyrhizobiumColbertium
MAEYVVEFGRDGGRVEPDGRLDAPAFHRNHEPIWAALEKHLAGATGNVVELGSGTGQHVVHFARHTPGLIWWPSDLNQRHLKSIEAWRVYAALPNIRPPLRIDLIDPHWCPEMKSGQGPTSLAAVFCANVIHIAPWVVAEGLFAGAGRYLRADGKLFLYGPFKRDGKHTALSNAVFDTSLREGNPEWGVRDIGDVESLARGADLRLVDTIDMPANNLTLVFAR

SEQ ID NO: 8841 - protein, 688 aa, BradyrhizobiumColbertium
MSVDDRPTLTAPDDDPWLWLEEIEGTQALDFVERQNSLTLAAFGGKTFEHDRDILAAIYDRPDNIPYVSRRGNDLHNLWKDASHPRGLWRRTTMAEFRKASPDWETMLDIDQLAASEGEDWLLSQIATMPGSSRAMLSLSRGGSDAVTLREFDLATKRFVADGFTLPEAKGGVDWLDADTLLLSSAHGEGMTTSSGYARTVRLWRRGQPVDEAQVIIETTPDHMMIYGSVDDTGTAPRTWIIDQIDFFNHAIWLRDAAGVTTRLDLPTGIWMQAHGDWFAMKLRKDWTVEGRTYATDTVLGISLSAFLAGSRDFAILFEPAPRRALQGLFWVAGKLVLSILDELKPRFEIRTPSTTGWSREMLPGLPGIGVVDVWPLDRHPSESNGDLLANVQDPLTPPSLLLIERGVASPTVLKQAPKTFTPDGLVVTQHEAISIDGERIPYVQPAPAAEIGDAPVYMSAYGGFGLSVKPYYNASLGKLWLERGGTTVQANLRGGGEFGTRWHDAGRLAGKKLSHDDFAAVAADLVRRGVTQPKRIAAQGGSNGGILITNMLVRYPERFGALFCTIPLIDMRRYTKLLAGASWIAEYGDPDKPDEWEWLQTYSAYHNVKAGQPYPPILIATTRRDDRVHPGHARKMAAKLQAMGYEAWLYEPAAGGHGYGKDNKERAGFEVLGYRFLKERIGWRDGD

SEQ ID NO: 8842 - protein, 415 aa, BradyrhizobiumColbertium
MIDVTSTAEIADDARVRANVVRLAAAQALTGANSAVIFATGAIVGATLAPDMSFATVPISMYVVGLAAGTLPTGTISRRFGRRAAFIIGTGLGTLTGLLGSFAILRGSFALFCFATFLGGLYGAVAQSYRFAAADGASAAYRPKAVSWVMAGGVFAGVLGPQLVQWTMDVWQPYLFAFSFLVQAAVALVAMGIVAGVDMPKPAPADLHGGRPLLTIVTQPRFIAAALCGAISYPMMNLVMTSAPLAMQMCGLSVSDSNFGLQWHIVAMYGPSFFTGSLIARFGAPKIVAAGLLLEAAAAGIGLSGLTAMHFWATLVVLGVGWNFSFIGASALVLETHQPQERNKVQAFNDFLVFGMMAIGSFSSGQLLANYGWSAVNLVVFPPVVLGLVILSLVSWARRRKARLDAAMGEFPDAV

SEQ ID NO: 8843 - protein, 411 aa, BradyrhizobiumColbertium
MLDNPQQPRIDESSLRYEGWRIVAVCFLLATFGWGLGFYGQSVYVAELQRARGWPTSLISSGTTFFYLFGALLVVFVGEAVRKYGPRLCLIAGTLAMAAAAVAIGAVREPWQLYLANAVLAFGWAGTSLGMITNTISLWFDHRRGMAISLALNGASFGGIAGVPLLVMLIGHVGFASAMYAAAGAMLVLLLPVILLLVGRPPDRHGRHATAKARPQSSTQIRAWALRDVGFLTVTTAFALVLFAQVGFIVHLISFLDPVIGRERAALAVAVLTAMAVVGRVLFSLVIDRLDQRLASALSFLSQAAALLVVINLHDDYVLIAACAVFGFSVGNLITLPSLIVQQEFESAAFGVLISLNTAINQVTYAFGPGVVGALRDWSGGYSLPFYLCIVLEVMAAALIMVRGKPGARLS

SEQ ID NO: 8844 - protein, 164 aa, BradyrhizobiumColbertium
MSQSPAVPAGTRIGHVHLKVADLDRALGFYCGVLGFELMQRMGSGAAFIAAGGYHHHIGLNTWESKGGSPPPPGTTGLFHTAILYPTRPALANALHRVLSAGIALDGASDHGVSEALYLRDPDQNGVELYWDKPREQWPFGPDGKLAMFTKRLDVEALLRQREL

SEQ ID NO: 8845 - protein, 181 aa, BradyrhizobiumColbertium
MRLKLLSPGEMNESQRQTYDESIAGKRGKPPPPMMAWLNSPDMARHATRLGEVLRFDTVFPAKLSEIAILVTARHWTAHYEWYAHKRLALAGGMAPEIIEAIRDRRTPDFDDPKARMIYDLAKSLHEGHGVEKGLYDEAVKLLGERGVVEVIGLCGYYTLVSMTLNTFEFELPEGEVSELA

SEQ ID NO: 8846 - protein, 403 aa, BradyrhizobiumColbertium
METTMSDTETTDLETFRNETRAWLEANCPPEMRKPATSDADVFWGGRNAKFSSEPQRIWFERMRDKGWTVPDWPKEYGGGGLSAAEHKGLRAEMARIGARPPLSSFGIWMLGPALLKYGNEAQKKEHLPKIAAGEIRWCQGYSEPNAGSDLASLQTRAESDGDDFIINGQKIWTSYANYADWIFCLVRTDPAAKKHDGISFILFDMTSKGVSTKPILLISGYSPFCETFFDNVRVPKSHVVGTINRGWDVAKYLLQHERAMISGMGERGVGRPLGQIAADTVGTDAQGRLDDVMLRGQIARFDVDEAALAACAERAVDLAKAGQAHPAFSSAMKYYGTELNKRRHEILMSAGGVDALEWESERSKQGAKPRAWLRTKANSIEGGTSEVMLGIVAKRILDLPGA

SEQ ID NO: 8847 - protein, 53 aa, BradyrhizobiumColbertium
MFFGEDEGHVRVSRSKSIRCRHSGMALRARPGIHQTAFPRADGLRARATRAPE

SEQ ID NO: 8848 - protein, 379 aa, BradyrhizobiumColbertium
MALVLTEEQSMLRDSARGLISGKAPVSHLRHLRDSKDRVGFSKELWHAFAEMGFAGLLVPEDFGGSGLGYVEAGVVMEEIGRTLMPSPFLATSVVAASALNRGGNAAQKSEYLPKIASGSLLATLAIDEGAKHRPLQTSLQAVRAGNGFRLSGAKALVVDGHVVDLLIVAARTAGAAGEREGLTLFLVDPKAKGVAIERTIMVDAHNAARIDFANVEVDADSVLGEVDQAANLLDGVLDIGRGAVAAEMVGLSEEVFGRTVEYLKSRKQFGKLIGEFQALQHRAAELYIDIEITRAATMKALQALDADVAKAASSVAVAKARAGTTATRAVQEGVQMHGGMGMTDQFDIGFFMKRARVCEELFGDANYHTEQLARARGY

SEQ ID NO: 8849 - protein, 41 aa, BradyrhizobiumColbertium
MRQAAETRLERTSASRHGQARPGHSRSQVLQERGCPGQARA

SEQ ID NO: 8850 - protein, 52 aa, BradyrhizobiumColbertium
MTTKSVVRVYVNIVIARSACDDAIQAVAGEAFWTASRSLSPGRASRGPVGAQ

SEQ ID NO: 8851 - protein, 346 aa, BradyrhizobiumColbertium
MMRTFRGGLLIGLALAVVVAVAAIIYEFYDTRTLKRTVRRGEVLCGVNKGLPGFSYSEDNKNWTGFDVDFCRAVAAAIFDDPGKAKFIPLDANERFKELQSRKVDILSRNTTWSMARELDYDLYFPAVAYYDGAGFMLPRSRNKETSLDLTGSKVCVQANTTTALNIADYFRINNMKYEEVKFENLADVVKAYDTGKCDTFSADVSQLYALRLNLSKPGDHMILPDMISKEPLAPVVRQRDDDWMMIVKWTLYAMINAEELGVTSENIDEALKSKKPEVMRLVGTEGNYGEKLGLTKDWAARIIRHVGNYGEMYDRNIGEKSKLKIPRGMNQLWNAGGVQYAPPMR

SEQ ID NO: 8852 - protein, 197 aa, BradyrhizobiumColbertium
MTDFRRLTGVFMAAMGLILSAPQALAQQPDRGDEPGLIADDGYQLEPEWQKQVVYFRTTEPPGTIIVSTAERHLYLVQPGGRAIRYGIGVGRDGFQWQGLVTITNKKEWPDWTPPPEMIQRQPYLPRFMAGGPGNPLGARAMYLGTTVYRIHGTNRPDTIGTKVSSGCFRLVNADVADLYDRVPIGTKVVIRQKPEL

SEQ ID NO: 8853 - protein, 324 aa, BradyrhizobiumColbertium
MDDSTTSTDIRLREGSSIAQRLIMAGCAAAVALCFTPGLLTHDTLEIIVSAVALLVGAGFVVGIMMAPAVVWIITPNEILIGQQRPFGKLRTRVVPKHDISGLQVPGSKRVKARFQLVFTLASGERLTSPPISDVTHVRDTVDRIVTQFEVPNVEAPSNPLDARNPEMHLGEPAEPFPVRDVRIVALIAIALCAGPYAYKLWRGLPPSHVDILLLPLGVIAGLAVYRYANLAIGAFWIIRQDHIRVERLWGDGTPRADHIEGPDVKTITVERRGRSEDEHCIVVIRLHSGRRFRSPRIGSRVEARAVGTEIVRRLGIAAESNKI

SEQ ID NO: 8854 - protein, 187 aa, BradyrhizobiumColbertium
MTFKLLAMAAALTGFTVTGAVIPGVCDEVSGAAPLRVAAASQENAPDFTGITNWFNSKPLTMADLRGKVVMVDFWTYGCVNCVNTLPHVNDLYAKYKDKGLVVVGVHTPEFPFERSASNVQAALKRHGIAYPVAQDNNSKTWNAYRNQYWPAQYIIDQSGKIVFRHAGEGSYDQIERTVAKLLNVAS

SEQ ID NO: 8855 - protein, 232 aa, BradyrhizobiumColbertium
MLELSLAVLAGIFTVAAPCTLPMLPILLGASIGRAGHLRPAMIALGFVMSFSATALLLGAITQLFDFDPTVLREAASILLLGFGLLMLWPAPFEWLSIRLNGWLDLGASSGVQREGALGGLVLGTTLGLVWTPCAGPVLGSILTLVASSKNLAWASTLLVAYAMGAAIPLLAIAYGGQAATTRVRSLARISPRLQQGFGVVVIGFALSAYFQYDTLIVAWLTSFYPTGQIGL

SEQ ID NO: 8856 - protein, 203 aa, BradyrhizobiumColbertium
MPNVIAINAQASQSIVAAQATSDDMLLESIADGNRTAMHILYCRHNVRVYRFILRIVRDATTAEDLVSQVFLDVWRTAGQFQGRSQVSTWLLSIARFKALTAMRQRRFEDIDQEDVRQIPDGNDTPETSLDRSDTSAILRACVQKLSPAHREIINLVYYHEKSVEEVGQIIGIPQSTVKTRMFYARKQLADLLKGAGVDRFAA

SEQ ID NO: 8857 - protein, 245 aa, BradyrhizobiumColbertium
MTQSQHIMIVDDEAPAREMVGDYLKMHGFTVTLCDGGKSLRAAIQGSMPDLVVLDLNMPEEDGLSIIRDLKSRINVPVIMLTATASPIDRVVGLELGADDYVAKPCELRELMARIRSVLRRSVPAKAAAPDAAAAKSDKEQLVRFGTKWLDLEAQALRDDEGNEHPLTASEFGLLKVFAANPKRVLSRERLLELANARDAEAFDRAVDLRIMRIRRKIEPDPAKPAVIRTIRGGGYLFSPQGEKA

SEQ ID NO: 8858 - protein, 581 aa, BradyrhizobiumColbertium
MAEQDDVLHLIDDTGIAPEDANARKWKIAVIDDDPAVHDGTRFALSDYSLNGQSLEILSAYSAAEGRKLMAEHSDIAAVLLDVIMETDVAGLELVEYIRNEIRNETVRIILRTGQPGQAPERRVIVQYDINDYKAKTELTADKLFTSLTAALRSYQQLERMVQTRRGLEIIIDAASTLYDFKSMQRLAEGVLTQLASLLNVDCAGILVLRDNGGIDPELSVLAGSGCYSRFIGFTSSKALDPELREMVEAAFQRRKNEFADHRSVIYLRTGSGREVVVLLQAERELSETDRSLVEIFSSRLSIAFDNVILYQQLQDANAQLEDRVAQRTRALMQANRRLSAQWLRLQRANGFKNEILGTVAHDLKNPLGVILGRTEMLKELISTGASEAGVVAQVDHIRDATKRLTTMVDHLISDAMADAFDITIRREPVDVATLVKEVAEANQPLAVNKQQTISVTAPPNIVTMCDIDRIREAIDNLISNAIKYSPIGGRIDVTVTHEGSDTIVRVSDEGAGLSPEDLGRLFGRFQRLSAKPTAGESSTGLGLSIVKRIIDMHGGEVTADSDGPGKGSTFTMTLPATEMP

SEQ ID NO: 8859 - protein, 692 aa, BradyrhizobiumColbertium
MPGLGHSEHADRPPGSIGQLRARLVGVLRAVPIRWRILSIAGLNSAVVVVLVAMIWNGAQVLGSAWDDVRQVRESDRILALLESETGRLQNLIHRYINQPSPDLFAEILLLREAVLGTLTNRAAKDPMLAGSVEELERTTDRFLNGFGELRSVQATIAKTYEEQVQGPARDMAGLYSIIEGATGHRDALIWPSLGKSREAFTAMLVAANSYYLSLSSGAADDARRNTETIEKTIPVMIDLADNDLQRMALRRLASRTAALREGFAKLSEQLASRTELLRNTIDASQAEAIGAIDDLSTKMRQREQKAQETFDRTLADISRRVLSIAVIFLGIILTAGVLIALSIRLPLQQIMAAMRAITLGDLDREVQGTKARDEVGAMARAVEVFRENAIAKRQTEDELRASKEKAESALLELNAAQQNLIDAERLAALGGLVAGVAHEVNNPIGISLTVASSLARRTEIFEAQLKGEGGLRRSQLEEFVQSSRDASQQLVANLQRAGELIQSFKQVAVDRSHAERRQFSLSEATDQIIASLRPVLKRSPITLEVDVPEGLLLDGYPGSYGQILTNLFLNAANHAFADGRAGTITISARPRGTEDIEIIFSDDGAGMTPDVQRQAFDPFFTTRRNEGGTGLGLHIVYNLVTQQLGGRMMLESKLGQGTTFRIIMPRIAKGGAQSTETDGTSQWPNRTMSST

SEQ ID NO: 8860 - protein, 331 aa, BradyrhizobiumColbertium
MPVLSRAELSRTGVIFVALVLAVWTTGAVAREFRAADTQAEDYPTVQALRYMGALIAERSSGRHEIKVFHSRQLGEEKETIEQTRAGAIDLNRTNVALIGNFVPAMNVLAMPFLFRSIEHMQKVLDGPIGSEILNSFEPYGFVGLTFYDSGARSIYNGVRPVKTVADLKGLRIRVQQSELMSQMMRALGAEPVELPYGQVLTGLANQLIDGAENNWPSFVTTDHYKHAGHYTLTEHTMSPEVLVISLKAWKSLSAEEQTIFKEAAQRSSRFMREKWRDLEEQSQRKAQDAGVTIIKEIDRRPFEEAMTAIYDKAGRDPAAAALIERIRKVE

SEQ ID NO: 8861 - protein, 440 aa, BradyrhizobiumColbertium
MSALRLLQLVAVLAALSLAAPARAATEIAWWHAMSGELGRQLEKLASDFNASQSDYRIVPVYKGNYTETVTAAIFAFRSRSQPAIVQVNEVATATMTAAKGAIYPVFSLMRDQGEPFSLGDYLPAVSGYYTDAAGNLLSFPFNSSTPILYYNKTMFRDAGLDPDKPPKTWPDLGAAAKRLRDRGAACGFTTSWPSWIHVENFSAFHNLPLATRANGFAGLDAGLTIDNPVLVHHVAALSEWQKTKVFDYSGRGQSAEPRFQKGECGIFIGSSATRADIKANSKFEIGYGMMPYWPDVKGAPQNSIIGGATLWVLRDRPREEYKGVARFFAYLSQPGVQAAWHQNTGYLPVTRAAFELTRSQGFYERNPGSAISFEQITLNPPTENSKGIRLGSFVLIRGAIEDELERAFAGQKSAQEALSSAVERGNKILRQFERASPER

SEQ ID NO: 8862 - protein, 313 aa, BradyrhizobiumColbertium
MRLPDLTDAESFRAFRSDAARWLPVALDIARSHGLDASAPHVFPTGTNLVVGLGDGLILKIFPPLLRAQFVSERASLAQLKGRLDLPIPEIVAEGVRDGWRYLIMTRLAGTLGSEVWPQLPEDQKERLLRQIGETIASVQRAPLGALAHLEPRWDEFMRAQMQGCEARHTRLGLAPKFLRGLDDLLRDAAELIPMDAPPVILIGEYIPENFLLACDDGQWSLAGLFDFGDVLAGWRDYDLLGPSASMAAGRPGRVKSLLEGFGYEKLDFVLKRRLMALMLLHRASDLNAHICVEGWQGRAKDLVELQELIWAG

SEQ ID NO: 8863 - protein, 45 aa, BradyrhizobiumColbertium
MEPDSQGSCQSLTRRYIAHKPLTLLISSRQSRKLRRGEGSLDCIQ

SEQ ID NO: 8864 - protein, 540 aa, BradyrhizobiumColbertium
MKRRDFLKSVSGLAAGAALPAMPSVISSAKADARSETLLIVSEGGPNNLDIHGVGTNVPGYEVSWNCYDRLISHEMKSGPGGVPYYDRDKFKGELADDMKIDDMSVTFKLKKNAKFHDGTPVTARDVKWSLDRAVSVGGFPTFQMSAGSLTKAEQFVVIDDHTVRVDFLKKDRLTIPDLAVIVPCIVNSELVKKNASEKDPWGLEFTKQQTAGSGAYKVVKWTAGTEVVMERNDAWVGGPLPKIKRVIWRMVPQAGNRRALLERGDADISYELPFKDFQEMKANGKLNVVSLPFSNGIQYIGMNVTKPPFDNPKVRQAMAYAMPYQKIMDAVLFGLGNPMFGAAKDKPTEVAWPQPHRFNTDMEKAKALLAEAGYANGFETTISFDLNFAGVNEPLCVLVQESLAQLGIKTTINKVPGANWRTELNKKEMPLFTNVFSGWLDYPEYFFYWCYHGNNSVFNTMSYKSAAMDKLIDGARTAAAAGDKAAYDADVKGFVDLAYADMPRIPLYQPYVNVAMQKNISGYQYWFHRRLDYRAMAKG

SEQ ID NO: 8865 - protein, 121 aa, BradyrhizobiumColbertium
MRTCLVVDDSSVIRKVARRILEGLDFQILEAEDGEKALEACKRGLPDAVLLDWNMPVMDGYEFLGHLRRMPGGDQPKVVFCTTENDVAHIARALHAGANEYIMKPFDKDIVTAKFQEVGLI

SEQ ID NO: 8866 - protein, 375 aa, BradyrhizobiumColbertium
MIVDDSVVIRGLISRWVGAEHDMEVAASLRTGLEAVNQLERINPDVAVLDIEMPELDGISALPKLLAKKRDLVIIMASTLTRRNAEISFKALSLGAADYIPKPESTREASAADIFHHDLIQKIRHLGARLRRKPAVASPPLAPASPAPAMRAPSVARSAAPAPAPAAPSSGALTTRAFSTQVPKVLLIGSSTGGPQALMALVADLGPVIDRVPVLVTQHMPPTFTTILAEHLARSSRRPAAEAVDGELVKPGRIYLAPGGKHMRVARSGGDTVIALDDGPAVNFCKPAVDPLFTSAIDVWHGNILSVILTGMGSDGMRGGKDIVAAGGSVIAQDEASSVVWGMPGAAANAGICAAILPLNQIGAKVNRLFAGDRS

SEQ ID NO: 8867 - protein, 290 aa, BradyrhizobiumColbertium
MTPVDYDYLRKFLKERSGLDLSADKQYLVESRLLPLARRASLEGIPDLVLKIRNGDGRLATDVVEAMTTNETFFYRDKIPFDHLRDTILPSLIQARAARKSIRIWSAASSTGQEPYSIAMCVKEIGAALAGWRIEIVATDLSQEVLEKSRAGVYSQFEVQRGLPIQHLMKYFTQVGELWQLNADIRAMVQFRQLNLLQDFSHLGTFDVIFCRNVLIYFDQDTKAVIFERLAKAMEADGTLLLGAAESVVGITDAFRPVTERRGLYQLNPARSGRPMGGLMPPSLKIAAAR

SEQ ID NO: 8868 - protein, 386 aa, BradyrhizobiumColbertium
MQRISCLERDDWRETAAQCGFTFHTIGGERYWDERAYYGFTLDEIERGIEAPTSDIDAMCLELVGRVIGDERHLRRLKIPEAFWSLIAESWKRDDRSLYGRLDLKFDGKGPAKLLEYNADTPTSIFEAAVFQWTWLEQAIERRIVPPRADQFNSIHERLIAAWREIAGSRHIHLTGVTDNEEDAGTLAYLEDTARQAGLSTKLLDIEQIGWRDEPGGFVEIDDRDIALAFKLYPWEWMFHDTFGAKLASAPTRWIEPPWKAVLSNKGILPLLWEMFPNHPNLLPAFFEDDPRAAELGSSFVRKPLLSREGANVTLVSGGMPLDEQAGPYGAEGFVRQALSPLPNFSGFYPVIGSWLVNHEPCGLSIREDESPITGNGSRFLPHAIL

SEQ ID NO: 8869 - protein, 127 aa, BradyrhizobiumColbertium
MADKPAKKQFGKRRPVAEPPPSRPPTKRSGHVALLVMGTIAVGTTAYTLMPRQNCEPTPGAVPEQTTTTCSSSSSSGGSSSRWSSRSSFFNSDSSSHSSSGTSSVSGHGSVSRGGFGSFGHGFSGGG

SEQ ID NO: 8870 - protein, 134 aa, BradyrhizobiumColbertium
MILQSLAGLPAFLVYFCTGLIAIVAYLFVYTRITAHNEFQLIRDNQPAAAIALGLSLLGFVAPLVSAIAHSANVLDCLIWATIALVVQVIVFYLVKVPVPNLSARIDAGELAPAIWLGLSSLAAGLLNAASMIY

SEQ ID NO: 8871 - protein, 233 aa, BradyrhizobiumColbertium
MRVLLIEDDSAVAQSIELMLKSESFNVYTTDLGEEGVDLGKLYDYDIILLDLNLPDMSGYDVLKQLRVSKIKTPILILSGLAGIEDKVKGLGVGADDYMTKPFHKDELVARIHAIVRRSKGHAQSVIQTGDLVVNLDTKTVEVGGQRVHLTGKEYQMLELLSLRKGTTLTKEMFLNHLYGGMDEPELKIIDVFICKLRKKLANASEGRNFIETVWGRGYVLREPHEADERIPA

SEQ ID NO: 8872 - protein, 441 aa, BradyrhizobiumColbertium
MKALAEQIGDIDGINIYGRVVGVRGLMVEVAGPIHAMSVGARLVIETGANRTIPCEVIGFSGNNAVVMPFAGLDGVRRGCKAVIANAANQVRPSAAWLGRVVNALGEPIDGKGPLPQGSSPMPFRNTPPPAHSRKRVGAPLDLGVRAMNTFLTCCRGQRMGIFAGSGVGKSVLLSMLARNVDADVSVIGLIGERGREVQEFLQDDLGEEGLARSVVVVATSDEPALMRRQAAYLTLAVAEYFRDEDKDVLCLMDSVTRFAMAQREIGLSAGEPPTAKGYTPTVFTELPKLLERAGPGLGIGAITAIFTVLVDGDDHNEPIADAVRGILDGHIVMQRAIAERGRYPAINILKSVSRTMPKSADPQFWPVIQRARQVMATYADMEELIRLGAYRAGSSPEVDEAIRLHEPLEAFLRQRKDEKASLADGYRQLAQILGNLETER

SEQ ID NO: 8873 - protein, 139 aa, BradyrhizobiumColbertium
MKSRDTLIRLKKFQVDEKRRRVTQIETMIADFQRMSVDLEREIQTEQERAGINDPSHFAYPTYAKAAIQRRENLTRSADELKGQLDEAKAALAEAFEELKKVELLDERDQARERAEENAREQADLDSIGLMRARIGAVA

SEQ ID NO: 8874 - protein, 181 aa, BradyrhizobiumColbertium
MLTPAELVGLIEAVAKRDQAAFERLYAATRAKLYGVVLRILRRQDLAEEVIQETYVKIWNGAGQFNPALSSPITWMASIARNRAIDIVRKKSEASIEDEPQAMEVAAESPDPLARREMTEELKRLLECIGRLEPDRQRLVLLAYYNGWSREQLAEKFAAPVNTVKTWLRRSMLDIRECLGL

SEQ ID NO: 8875 - protein, 352 aa, BradyrhizobiumColbertium
MMDYTEDHIALAAEYALGTLDADERAQVETMMAVDEAFAGIVLSWSYRLSALNQMVGSVEPRPIVWENIRSEIARTALAQQPSAPAEATPPPPLPEPPSPDTGELSTESSSSADVQRPQVEPPARPSDEPDAIPDIAPQFIPQVHAPDLNVVRAPQTPVADDGNVIRLENRVKRWRSIASAVGALAAVLLVTLSLQIFLPEALPGALRPAPRIQTVEVKTPAAPLAPSAQYVALLQGQGGGPAFILTIDGATRNFTVRKVGATPEPGKSFELWLISDKLPRPRSLGVIGASDFTARPLLASYDAEVVNGATYAVTVEPAGGSPNGQPTSAPVFSGKLIETVPPTQAQAPAKK

SEQ ID NO: 8876 - protein, 319 aa, BradyrhizobiumColbertium
MDAARTPGIFRHQYAGLPHGAAFEHWRERAVGSCGLDIGPSHGESIDCRLQISVVDNIALAIPEGASAQYSRTQSHLADGSDDLVLIAAHAGLVSVGQNGHTVELSPAQMVLVDMSVTGTVGHTDENRFTSIRMPRRALLDISPRAEDKLSQVLSDGAVAETIFRYHALAANHAPHLDAVGQRLTAQHMVDLVGLLLGTDAEHASRARGRGQAAARLDLMRADVMAALGRNDLCLSEVATRSGLSPRQAQRLFEQAGTTFTEFVLEQRLLHARKLLGDPRARARKISDIAHSSGFSDLSYFNRAFRKRFGATPSELREA

SEQ ID NO: 8877 - protein, 67 aa, BradyrhizobiumColbertium
MNHSIYSADRSTHLKIVVVALVAGIAVAGLGITARATSSDEGLTQTARVMKAGKPVTITSANTSLVR

SEQ ID NO: 8878 - protein, 713 aa, BradyrhizobiumColbertium
MVDVTAGQGVGSAKPGIPSLSEIVTILKRGDIALALGVLTILVVLILPLPAIVLDLFLAISITLSILILMTSLFIQAPLEFSAFPTVLLISTMLRLSLNMASTRLILSHGHEGTAAAGHVIEAFGNFVMGGNFVIGIIVFAILIIVNFVVITKGSGRIAEVAARFHLDAMPGKQMAIDADLSAGLIDEKVAKERRKELEDESGFFGAMDGASKFVRGDAIAGLLVVFINVVGGIIIGVAQQGMSFADAGRTYTLLTVGDGLVTQVPALIVSTAAGLLVSKAGVSGAADKALMKQFSGYPQALAMSSAVMLVLAALPGIPTLPFLALGLGAGALAWNSRNRNRVTAKAEEAAKAAPAAGQPGVPGAAATEEPISAALKIDDLKIELGYALLPLVNGPDGTDRLTEQIKALRRSLAIEMGFVMPAVRILDNVQLEANTYIIKIKEVDAGTGKIWPNQFMVMDPGGGQVQVPGIHTTEPTFGLPATWVDASLKEEASLKGYTVVDAATVLSTHLTELLKANMSDLLSYGEVQKLLKELPKEQSELVKDIVPGQVTVSGIQRVLQLLLAERISIRDLSTILEGIADSLAFSRNPATMVEHVRARLARQICAQNTSYAGYLPLIALSAKWEQAFAESIIGQGEERSLAMQPSKLSEFMTAVREAFERAAREGEAPVLVTSAAIRPFVRSLVERFRAQTTVLSQAEIHPRARLKTVGSI

SEQ ID NO: 8879 - protein, 100 aa, BradyrhizobiumColbertium
MNRIIGITAALALSMGLATATLAAEGAAISGEVKKIDEGAGKITLRHGPAKSLGMEEPMTMVYRVKDPAMLKQVKVGDKVTFEAEEGTSGYTVTRMQKAK

SEQ ID NO: 8880 - protein, 151 aa, BradyrhizobiumColbertium
MKTAIKLGLALAALSTAPALAHEKHGHATFSAGEPGNPKKPARTIEILMNEMDYTPARIEVKRGEQIRFVLRNVGKEDHEFLLATTKENLAHAQEMKKHPHMEHDEPNAVRLAPSKTAEILWKFSKAGTFEFSCLIPDHRDYGMIGHVTVK

SEQ ID NO: 8881 - protein, 444 aa, BradyrhizobiumColbertium
MFSRRGFLGSAALAGASAISGRVQAASIPEAPTMDKAVMQPPLHPISGPDYRPVVTLNGWSLPYRMNGDWKEFHLVAEPVVREFAEGMKVNLWGYNGQSPGPTIEAVEGDKLRIFVTNRLPEYTTVHWHGMIIPSGMDGVGGLTQPHIQPGKTFVYEFEMKKSGTFMYHPHSDEMVQMAMGMMGMVVVHPRDQSFRPVDRDFVFVMSTYRVDPGTYLPHVNEMTDFNMWTWNARVFPGIDPLPVRLGDKVRVRIGNLTMTNHPIHLHGHSFAVTSTDGGWIPESAQYPETTTDVPVGAVRVFDVLADNPGDWAFHCHKSHHTMNAMGHDVRNLIGVSRKDLAKAVGKLAPDGMAMGSTGMAMGNMEMPAPDNTLPMMTGTGQFGPIEMGGMFTVMKIREDLARDDYRDPGPYKFPQGTVAYEVTAPAAEPARQKPGAPMKNMKM

SEQ ID NO: 8882 - protein, 474 aa, BradyrhizobiumColbertium
MAHHLARGLLVLTAFSVSGCVAFSPDSGMTAVAELTGQTINKDVAFVRTAESAAAVDARVRQLLSRTLTADTAVQIALLNNKGLQAAYNELALAETDLVEQSLPPNPVFAVSRITGNGASEIERQVVGDILALATLPFRSDIARERFREAQLRAALATLRLAADVRRAYARAVAGNEMVGLLTDAKATAESTAQLAVKLGETGSLNKLDQAREQVFYAETTADLATARQVAASARERLARLMGLWDAGLDFRLPDQLPPLPRRPQALPTIEADAVAHRIDLQIARLELNALAKALNLTEATRFVTLFDLAGMTRRTQEPEGAPFRERGFDVQFQIPIFDGGEVRVRQAVESYNFAFNRLTERAVNVRSEARDAYRVYRSTYDIASHYQREIIPLRKIITEEMQLRFSSMQVDIFALLTEARQRLASLRGAIDARQRFFLAQADLQSVVNGGYAPVAGADSPTTVAAAAPAAGGH

SEQ ID NO: 8883 - protein, 69 aa, BradyrhizobiumColbertium
MLALATLVLSGCMPATPQVASADPADPAVKVAPVGYRSTIAPYTSLRPATPASWRERNENVTPQPKRER

SEQ ID NO: 8884 - protein, 147 aa, BradyrhizobiumColbertium
MLLRLTRPLRIRVGRIIALAYLFCVLAPAASLAWGNGAAPCLDDVRLADPVPVHHQMQAGHNHDGSSDDHAEPHAHHQTAEKDAPAQHRHGGDGTVGPCCAMMCVSALPADLPIVTTPVQPMSACAPEIVASLHSAAPPLHYRPPIA

SEQ ID NO: 8885 - protein, 395 aa, BradyrhizobiumColbertium
MRLVIALLIGSIGAVGMWAVVVVIPIVQAEFGATRGAVSLAFTLMMFGFGLGGVIAGKITDRFGIVPAMAISIAFLGVANVLAGLSSQLWQFVAAYFLIGLGTAATFAPLMAEASHWFERYRGLAVTIVASGNYVAGTMWPPLVSWGTQEIGWRYTHIGIGIVCVSLMTVLVLVLRAQMGRDTVHDHANAPPPRVDLKLSTNTLTVLLSIAAIACCVAMAMPQVHIVAYCGDLGYGVARGAEMLSLMMACGIISRIGSGYLADKIGGIRTLLVGSLAQGFALVFYLFFDSLTSLYLISAMFGLFQGGIVPSYAIIVREAMPASEAATRVGIVIFASVFGMSFGGWVSGVIFDATGSYGAAFANGVAWNALNIGIVVLLLIRSRMSAMKTGPGFAT

SEQ ID NO: 8886 - protein, 138 aa, BradyrhizobiumColbertium
MRPHLALGAAIVLGTPAAAIAQSHEAHGIAKPHVALQQVVEGLPRDDKQSVRVMTASFRPGDKTVYHTHRYPVTVYVQEGAFTLELAGKPPLTIKAGEALVEPPGVPMTGYNRTERETKVVIFYVSAVDTPFLDLLAH

SEQ ID NO: 8887 - protein, 296 aa, BradyrhizobiumColbertium
MFDWNDLKYFLAVARHGSTIAAGKALGLSQSTVHRRLDELERRLGRTLVTRQQSGYRLTEFGQAMLPYAERVEAAIIDFTRRTSDVEQDMKGVIRVTCPEPIVARLTQSGLLDVFRAQHPSLRVEFVMSDRYLDLSKGEVDVAFRSGDTDDQLVGRKIAESIWAVYASRDYVERHGKPERIEDLERHLLVGLDDSLANHRAVKWLKEVAPDGRMSARINSVLGLVSAIKSGVGIGPLPIALGDAEPGLVRVLGPIAELTRSWRILTHPDLRRVPRIAAFFDFIVLQREALKPILTG

SEQ ID NO: 8888 - protein, 218 aa, BradyrhizobiumColbertium
MIYIAGMDDHTNRTRKPRADAMRNRERVLEAAKAVFSAGGPEASLEAVAKRAGVGIGTLYRHFPAREDLFEAVYRREVEQLSELAEELKNAKDPVDALRRWLRSNVEFVATKKGMSAALALTFQSSSELAAFSMDRLTKAIGSLLDRAVAAGQIRGDLGPEDLLRALVGMCYMHDQPGWQSSVLRMLDVFVDGLRVRPGAKSKTRVAKPARAAAKRKR

SEQ ID NO: 8889 - protein, 165 aa, BradyrhizobiumColbertium
MNHSISLTVNGARRDFVLDDPRVTLLDLLRERLHLTGTKKGCDRGQCGACTILVDGKRINSCLALAISHDGADILTIEGVARGDQLHPVQAAFIAHDGFQCGFCTPGQIMSAIGMMQEAQAGNDPERIRECMSGNLCRCGAYAGIVDAVLDAQGQMDESSQRRSA

SEQ ID NO: 8890 - protein, 351 aa, BradyrhizobiumColbertium
MKPFDYVRPASVAAAVAAAAQPGAVFLAAGTNLLDLMKGGVSRPDRLVDVTHLDGLDQIETLGDGSLRIGALVSNADLAHDAEFARSYPAVAEALLSGASAQLRNAATVGGNLLQRTRCAYFYDTASRCNKREPGSGCDARDGENRGHAVLGWTESCIATHPSDFCVPLVALDAMVEIEGRGGRREVALDQLHRLPGDTPERDSVLEPGDLIVAVRLPPAARGFAAHARYLKVRERTSYAFAVVSAAAALRIESGMIVEARLALGGVAAKPWRARAAEDVLKNVSPTADAFQEAAWRALTDAKPSGDNAFKIELARRIVVRALTLAAAGTPARIPALPASPFAATSGADHA

SEQ ID NO: 8891 - protein, 753 aa, BradyrhizobiumColbertium
MPELNLTSTPAHLRHGSNIGQPLTRRDGILKVTGRATYAADNHPPGMLFAVMAVSSISRGRVVSLDVAAAKRHPGVVDVMTHDHKPRLAIDPEVKTNPFVFRMEVLQSNEVRYANQPIAVVIAETLEAATEGAVLLAPRYEVQSARVGLDAGESFVPPVVGVGNPAEHRHGDIEAGLASAEKQIDAIYETPPQYHNAMEPHAIVASWDGDNLSVDMPTQGLMLSLARIAELFGIAHDKIHIRSPFLGGGFGSKGLMAGPQVLGVMAAKLVGKPVKLVLRREQMYGPVGHRAPTRQRLRIGADGEGRLTALDHHARTVSSTFDDFYEPAADASHTLYAAPAIRTSHDAVRVNSGTPLFMRAPGEATGSIALESAIDEMAWACGMDPLAFRLKNYAEVEPITGKPFSSKALRACYEQGAARFGWTKRPLRPRQMRDDAGLLVGWGMGTATFPALMFQAEARAVLRRDGSGAMEIGAHDMGQGAWTALAQIAADELGLDIDRVEFKAGSSDLPDAGIAGGSAHTATAGAAIRSAGAAVIAKLADLATSDERSPLFGAGNAGVIARDGRLLRRDDESRGESYSDILARAGVAEVEARGTGAPNPAAMEEYAMHAHGAVFAEVKVDPVLGQVRVTRMAGAFAAGRIVNPRMVQSQLFGGMIWGLSFALHEEAITDRRTGRIMNANLGEYHIPVNADVPPLDVITVEEHDPHVNALGIKGVGEIGITGSAGAVANAVWHATGVRVRRFPIRIEELLTRR

SEQ ID NO: 8892 - protein, 50 aa, BradyrhizobiumColbertium
MKTTLANAEAAREEVPRGSDEFHSQELRKAIAEYIELQREALKALRRKLN

SEQ ID NO: 8893 - protein, 182 aa, BradyrhizobiumColbertium
MSVDIGGRLRFLRARHKLSQRELAKRAGVTNSTISLIESNQMNPSVGALKRILDGIPMGLAEFFALEPESRRKIFYRAEELTEVGKKPISYRQVGDNLFGRSLQILKERYEPGSDTGRVHLVHDGEEGGIVISGKLEVTVEDERRILNPGDAYYFESRRPHRFRCVGGKPCEVISACTPPTF

SEQ ID NO: 8894 - protein, 442 aa, BradyrhizobiumColbertium
MTLHQIPNTIKTDSYWMPFTANRQFKKSPRLFSSAEGMYYTSVDGRQVIDGSAGLWCVNAGHGRKQIAAAVERQLMTLDFAPSFQMGHPLAFDFAERLAEIAPKGLDRVFFTNSGSESVDTALKIALAYHRANGQASRTRLIGRERGYHGVGFGGTSVGGMVANRRAFTTLLPGVDHIRHTHDLTRNAFAKDLPEHGAELADDLERLVALHGAETIAAVIVEPVPGSTAVLPPPKGYLKRLREICDKHGILLIFDEVITGFGRLGTPFAANFFGFTPDLMTTAKGITNGTVPCGAVFASRKVYDGMMTGPENQIELFHGYTYSAHPVACAAGIATLDIYKDEGLLTRGASLAEYWRDALHSLKGLPNVVDIRNCGLMGAVELAPRDGVVGARGYDMLVECFNSGLYLRTGGDSVAMSPPLIVEKSHIDKMVSILGDAIKKVA

SEQ ID NO: 8895 - protein, 421 aa, BradyrhizobiumColbertium
MKILILGSGVIGVTSAYYLARAGHEVTVVDRQPEPALETSFANAGEVSPGYSSPWAGPGVPVKAVKWLLMKHGPLVIRPKLDPVMWVWLLKMLRNCTSARYAVNKSRMIPIAEYSRDALRDLRRDIGIQYDERSQGTLQLFRYQAQLDGTAEDIAVLKQYGVPFEVLSREGCIAVEPALAGVKEKFVGGLRLPQDETGDCHMFTQSLARHAQALGVRFLFNTGIDRIVTEGARVSGVATSAGLLQADAYVLALGSWSSRLVAPLGISLPVYPVKGYSITVPIKDASGAPESTVMDESYKVAITRLGDRIRVGGTAEISGYSDKLYDARRATLDHSLTDLFPRGGDLAKATFWSGLRPMTPDGPPVIGRTHYANLHLNTGHGTLGWTMSCGSGRVLADMLSGRKPDIDVSALSVERYKHRFG

SEQ ID NO: 8896 - protein, 54 aa, BradyrhizobiumColbertium
MGELRDGGGVAAFNARGGWKKSAPCLRRHCERSDAIQSLAAEAFWIASLLRSSQ

SEQ ID NO: 8897 - protein, 214 aa, BradyrhizobiumColbertium
MRKLAAAKPARKVKAKAIARPAEPAMDVTVGRRIRDLRRVRRFSLETVAARTDLSIGFLSQIERGLSSPSLRVLATLADVLGVGIAALFGASPSADAASDQVVTRGLQRPELKLWRTGVSKQLLSPAGADNKLNLFLVHLEPGGSTGDELYTHDGEEAGLVLEGEMMLTVDSETWSLKTGDSFRFASRRPHRFSNPAEDAKAVVLWVNCVTAAG

SEQ ID NO: 8898 - protein, 265 aa, BradyrhizobiumColbertium
MRGRRRPDPKGDAMKRYVQAAVAALAIAATVPASAQQVLKVGSTPTGIPFTFLDTKTNTIQGIMVDLITEVGKDAGFNVQIEPMQFSALIPSLTSSKIDIIAAAMFITPPRKEVVDFSDPIYTYGEGLVVPKSDTKAYATQEDLKGETVGAQVGTAFVDALKKTGLFADVKAYDTIPDILRDVNTGRLKAGYADYPILAYNLKQGGFPEVRLVDGYKPVTVGSVGIGVRKGEAALLGKINASLTKLKANGTIDKILGKWGLKAQG

SEQ ID NO: 8899 - protein, 217 aa, BradyrhizobiumColbertium
MKGFWRDAVEFFPILLNGVALTIIVTIGSLLLSTVLGLVWAMMRVSGIKALSMLSASLINVIRGIPIIVLLFYLYFVMPDLGVTLSALQAAILGLGIAYSAYQAENFRAGIEAIDKGQIEAAQSIGMGWWLTMRRVVLPQAVRIVLPPYGNVMIMMLKDSSQASTITVAELALQGKLIASSTFKNTSVFTLVALMYLTMSIPLILLVRHFEKRAGKR

SEQ ID NO: 8900 - protein, 243 aa, BradyrhizobiumColbertium
MIELNDVHKSFGRVEVLKGITASVEKGEVVCIIGPSGSGKSTILRCINGLESYDRGEISVEGLKVDRDAPSIVNIRTQVSMVFQRFNLFPHRTALENVVEGPLYVKKESRAQAFDRGRALLAQVGLAEKADAHPPQLSGGQQQRVAIARALAMQPKAILFDEPTSALDPELVGDVLGVMRKLADDGMTMVVVTHEMGFARDVADRVLFIDGGVIVEQGPARALLNQPQHPRTQDFLRRVLHPL

SEQ ID NO: 8901 - protein, 427 aa, BradyrhizobiumColbertium
MTRLPLPPSLYADTAVAPVATPPLDVDKNVSVAIVGGGYSGLSTALHLAEQGVDALVLEAQEPGWGASGNNGGHTNPGLKHDPDQIEADFGADLGRRMIDFSYGTTNFTHDLIRRYQIPCEARQNGTLRAAYNEASAAAIEKTAQQCIRRGMPVSYLNRDQLRDMTGTDRYIGAMLDTRGGDLHPLSYARGLARAAISAGAKVHGETPALSLRRDGTRWRIETPRAVVHADKVLLATNGFTDDLWPALRRTIVPVFSSIAATAPLSDAVARSIMPTRPVLYESGHITVYYRIDQQNRLLMGGRGPMRWIKSPYDVAYLIRYAERLWPQLKGFAWTHGWNSRLAITADHYPHVHEPAESILISLGCNGRGVALSTAMGAQLARRLIGGAKAEIDMPITGIKPIPMHAFWPVGVTTAVIAGRVRDRLGI

SEQ ID NO: 8902 - protein, 74 aa, BradyrhizobiumColbertium
MKKLALAASLIIAAGFTLTSPALAKGGHGGGHGHGHGHKMGHHHHGKSFGWHHGRKVGWRGVGCPPGLWKQGRC

SEQ ID NO: 8903 - protein, 529 aa, BradyrhizobiumColbertium
MPHQFSLNQTIRKPAVSSKGGIVASQSRRAAEVGAEVLAAGGDCVDAIVATTMALNVLEPWNSGIGGGGAMVLYRAKENRYEVIDYGMSAPQSLRAADYPLSGEGAASDLFPWPRVKDDRNIHGPGSIAVPGVVAGMEEAHRRYAKMPWKDLVAPAARLAGEGLLVDWWTTVTISGSAADLRRYPASAAAFLKDGLPPTAPWGIKAETRLPQDTLKATLSHLAEAGPRDFYQGDLARSIASDIKADGGSLSVEDLAAFRAHLREPLAIPYRGGKVYATPELTAGPTMAHALRLLQQNLQPGSAPDAAAYVEYALALQTAFGERLKDMGDADGKRSLGAEYLAPACTTHFSVVDRQGNLAAVTQTLLSSFGSRYVTPHTGIAMNNGIMWFDPTPGTTNSLAPGKRCLCNYTPVIAETKDSKRLAVGASGGRRILPSVMQLVSFAMDFGMDLDAAIHQPRIDASEGAVVIGDARLPAEVRDALATRFDYEESRVQILPQKFACPSVVMRDGDVNSGAVEIFQPWAEAVEEG

SEQ ID NO: 8904 - protein, 257 aa, BradyrhizobiumColbertium
MAGVMQARDGAVGILTLDEPASLNAMTPDLLGALAVAVADMTKDPDVRALILTGEGRGFCSGQNLKASEALGEDIAAGVMRFYWPAFKALRECRVPVVVAVNGVAAGGGFSLAMAGDIIVAARSASFIQVFSRIALVPDLGSTWLLPRLVGRQRALELMLLNEPLTAERAQEIGLVRQVVDDAKLMEEALGLARRLAEGPTRALVATRALIEDSEHATYEAQFRREIELQATIRKSADAIEGRNAFIEKRKARFTGK

SEQ ID NO: 8905 - protein, 58 aa, BradyrhizobiumColbertium
MLIASVSLLRQPLSFVATKWQTLIRVAGNPYRPELHYMRGPGPKWRAKYQASRLNRSL

SEQ ID NO: 8906 - protein, 77 aa, BradyrhizobiumColbertium
MVQVYFHCSNTEGTLIDHNGAAVANLTEARDRAAQIMTSMIQTPGAEDWRDWVIHVSDHDGEEIFDLPFTAMLGKPH

SEQ ID NO: 8907 - protein, 691 aa, BradyrhizobiumColbertium
MNHLTFWRDCRRLYLFAAVVIGALFGPDTAASSEPVRKSGYAVGSETCGSGDLAFPRLQIDMKAGYCAGLVASDEDRLKFPRSIVQVPGRDLFVVADMGGWGRSDGRLLLLDPHAPQGQRFKELLTELEYPFGLVIGPDRKLYASTAETIFRFDPLADSPRSTVETIIRHMPGRRITLPDGTRIDESAHPLKQFVFDKHGRLFVNVGSHSDDCMTRARAAKPCAAAEGASALAAIWLFTPPAGGVFPALRPDDPDPQHMVYARGLRNSMALALHPNFPDAGYAFLQGENGQDLPDIFKPNEEINAIEQGRHYGWPYCYDLSTPSPEFRRVLQSGPYKSLCTANALYKAPHSLMPPHGAPLAMLYYRGTKFPELEGKLLVGLHGYRPTGSRILIYEVDDRGFPKPKPAPVRYHVSCAADPTRSFQTDGGEVAAAPFEELISGWHRVNGARPQGAPVGMTVAEDGAIWLVEDKNRTVIRIDRAAGDVPVPLPCEIRSQAMIDQLAAFVARDAQNGVRLTTLRKGLVERHCVGCHSGFGLKPGQSEADKDVAVLRFMLSQDGWIYPGDPDAGKLRTRLRGRGAEKLMPPGGESLPKTEPGYTQLLDTADLLVAKMVPGTRMRIKPGPPQRKFFGRTNRECGEIPAAKVVVVTQRSAVDKPGFSRFFRPADPYLNGECTDDDGYYIRQDFLVPVQ

SEQ ID NO: 8908 - protein, 296 aa, BradyrhizobiumColbertium
MLAATLPAAAETKLFESVQVTQAGEYTFGIEGPAADLDGNLFVVNFGKPGTIGRLPPGGTASQLFTVLPEGSVGNAIRFDRNGNMFIADYKKHNVFTIPKGATEPVAWFHSDQMNQPNDITIARDGTIYASDPNWKGREGHIWRIAKAADGTVQGQVMSAPRAMGTTNGIDLSPDGKTLYVGESSSGQIWSYGIRGNELVDAKLVKSFQPDTIDGLRTDATGRLYVARILKGVIALMKPNGMVEREIALKAKEPTNLAFGGSDGKTVFVTQRQGGFIESFRTDQPGREHCLQRGRC

SEQ ID NO: 8909 - protein, 341 aa, BradyrhizobiumColbertium
MKAVYTELHRSHDPQFFLVRGVVKRTTEQPERADRLLKGLKDGKHQLIEPTTFGQGPRARIHSPEYLSFLSEAWEAWTALGDSGPEMIGNIHPVRHAATYPTHIVGKLGWHTADTAAPIGPGTWAAACAAADVAVTAAQMVMDGEDATYALCRPPGHHAYRDMAGGFCFLNNSAIAAAHLRQKHERVVILDVDVHHGNGTQGIFYARPDVYTISIHADPVAYYPYVWGYAHERGEGPGLGTNLNIPLAIGTGDDGYMQALDLARKAIESFAPGALVVALGLDASEHDPLKGLAVTTPGFRRIGQAIAKMGLPTVLVQEGGYLSDILGANLTSVLSGFEEAR

SEQ ID NO: 8910 - protein, 326 aa, BradyrhizobiumColbertium
MTPRRLRIFPAISRNRNPNTYVGELMRVAQFADRNGFEGILLFEGNDVFVEPWAMAQHILAETTRSSPLIAVNPVYMHPFTAAKFVSSFAQLHGRKVYLNMITGTAISDLHGLGDDQSHADRYVRLGEFVVLMRQLLESPRPLNFDGRFYRASNLQLRPRLPAELMPEFLIAGQSEAAQRVAKETGCIKMQMLPPDLDHGLDVSGLNFGILARERRDEARQAAKARFRDNPDDRELLALTVENSDSVWKRRLYEGQSGELADNGYWLLPFLNFQADCPYLVGSYEEIGAKLKTFAAGGLTTIMLDMVADETEMQHVCRALAASGMF

SEQ ID NO: 8911 - protein, 243 aa, BradyrhizobiumColbertium
MADDRIELFVGLIETFDAPGAIDACRRLLSADERARADRFKFERHRRQYIFAHAMLRLALSQVATNVAPSDWAFGAGRYGRPFVAAPVTSTALHFSLSHADGCVACVVSRHEAIGVDVETVSRRVAPLSTALRFFAPEEVEALRGLPEPAAIERFFDFWTLKEAYLKARGFGLNLPLDGFAMQVSREAIEISFKPDIADDPDGWHFSLCSPSPSHRLAIADGSRANGGLPISRNAWPLREAAE

SEQ ID NO: 8912 - protein, 56 aa, BradyrhizobiumColbertium
MGFIKFTKKTSLNEEDRKALQDLLNFEKQKLQKELKEIEQSLKALSGSKKKSKKKK

SEQ ID NO: 8913 - protein, 2145 aa, BradyrhizobiumColbertium
MALSDIASGADERSAGTTAETRIFAHIGGLLEFYARKTPGAPALLAPGRPALSYGALGVSIRQLVGTLRDLGIAPADRVAVALPRGADSALALIAVASGCACVPVNPELTSDELQRYFSELKLAALLTRADINSASRDAARALDIAVIDFVPGPVGDLGGCAFVGPAIGAANPSGAPRGDDDAFILLTSGTAARPKMVPLTHHNVCLSAYNAGHVLSLTSHDRLLNVLPLFHAHGLISGLLTALAAGSSVICTDGFDASSFFGWMRELQPTWYTAVPAIHRALLTAAEADPDRARSSSLRVIRSASASLAPALLRGLEATFGVPVLETYGMTEAASQVAANPFELRKAGSVGRAAGPEIAIMDQAGRTLASGAHGEIMLRGPNMSRGYYNDDAATQAAFRKGWFRTGDLGYLDEDGYLFIVGRIKDIINRGGQKVSPLEVEEVLLSHPAVLEAGVFAVPHEKLGENVAAVVVLRPNAEVTSDQLRRFARKRLAPYKVPSLIRSVAALPKGASGKVKRNALAELIATAHSRDEIRLPRNAMETELAEIWAGLLELPQVGADQDVFALGADSLAVTQMRSRLRERYNVDFSFEDIFDCPTVAALAARIDTAANRRETALPAWQRAADADAPLSFQQQRMYLLSRLDSTRCNYNVVEVALLKGPVDVAALSASLTAICKRHEALRTVFIERQGEPAQLVLSSPPRFERIKLRPCPAQKRAAVIRHEALKLAQYPFDLAREPLLKLTLLSFDRTNHALVVNIHHLVTDGWSQRLFWEELAVHYAASRKKDRAALPAPAFQYRDFALWQQGWAQAPAAREQLDYWRTQLDGVTTLPLRTDRPRPEVWSGHGARHYLELSKNLSGELRALSQDHGVTPFMTLLAAFQCLLFRHTGHEDVATGSLIANRNQIESESLIGLFANTLILRNHFGGDPGFSEMLRRVRQVTLDAYRNQDLPIEEVLRALQIARRSDGNPLFRIMFILQNASIEAARFPGLSMRRLEVDPKVARFDITLELVEADGRFTGFFEYATDLFDAATIEGMAGQFKTLLKAVIADPEQRISRLPLLTGTERQQLLAQGRGLPANFTARGNFIERFDRQMKKTPDAIAVSDGSTSLSYRELARRSQAAARWLSREGIGAESVVALLAERGADLLAAMMAVQRVGAAFVNLDPDQPAARLTTILGSSCARILLTGRPQSTLADALLAPLVERIEVAELEDVIAPAATRPARAAQRDASSLAYLVYTSGSSGAPKGVMIEQRGLSNHLASLISELDLSARDVIAQTAPQSFVISVWQFLAGPMVGARVHVCANAIVRDPILLAREIAREDITVLEIVPSLLRVILDRMDEAPVLRAFSKLRLLISTGEPLPVELCRAWFARCPEVPLINAYGASECSDDVSLHRLTKAPAIAIGTVPVGAPLPNTQLYVLDANLQPQPVGVTGELCIGGAGVGRGYVNDPAQTRQRFLPDPFSRQAGRLYRTGDLARRRSDGTIECLGRADHQVKIRGYRIELKEIESALAEHPNVRTGIVEPRREASGDIKLIAHIVAEPHSRSSASELRGFLKGRLSDHAIPSAFLFLDRMPLNAHGKIDRSALLAPPHEPSAADAAVPARRFTEKVLSDIWIDLLKVERVGVTDNFFDLGGHSLLAGQAMARIARALGVSLPLKTIFEASTIEQLARQVDEAAAAKPHEPAATLPRSAAGGLPAPSIAQDQMLRIERNLPGLPLFNLPFAFRLQGPLDSAALAKAIDDVVRRHESLRTAFAWNGDEPESRIVAPRTLGHVMTVETIGDGHPHTNKRRKALELRKIDLLIKQETYTPIDAARAPLLRARLLRLHDEDHVLLLTLHHAIVDGWSIGVLFEDLSSRYAALAGYSSVPLPKPPPAFSEVARWQRWWCGTDAARRQAADWTENLRGAGPVFEGESTPGASTGHHPVSLDRELIGRISALGAQHNGTLFMCLLTGLKALLLARTGRTDIVVATAMANRAQPDTDRIVGPFENTVLIRTTVTPELSFTQALARVRQGVLDAHARQELPFNVLADHLEQEGLDPASLLQVYFTLQNPLRQPLDLPDLATASIGDIAREGQPVLPIDQSWLSLMLKERPTGVTGTCNYKRELLEGRMVGEWMENLVALLTAAAAQPDAPLSRLLASKAA

SEQ ID NO: 8914 - protein, 1153 aa, BradyrhizobiumColbertium
MLENEPGTGEGELKRWLEGIGLGRYSDLFAQHRLDLDVMGDLTEPDLIELGLPLGDRKRLQRAMAALFQAETAESPTAAVRPQARAEVGAERRQLTTMFCDMVDSTLLSTQFDPEDVRDMIAGFRETCVRVVKHYEGFAARFVGDGILVYFGYPSAHEDDAERAVRAGLEIVRALSSARAVEPRGAPSHSPAVRIGIATGLVVVGDLVGQGTEERDSAVGETVNLAARLQALAPPNGVVISASTQSLLKGKFDYRNLGVHDLKGISEKTQVWHVVRASRVETRFAAAMGTRLTPLVNREEEIALLMGRWQQAKDGDGQVVVKFGEPGIGKSRIIQEIFERISGDRHGQVSLQCSPYYTSTAFHPFVEQLKFSLGLDRDDTSALSLASLEKAIAAAHGDIEQVTPLFAALLSIPTGDRYPPLELSPQQQKDATVVALVNHFLGLARDMPLVIAFEDLHWIDPTSREVIDLLVERVQNRPILVVITARVEFQPSWNAHSHITTLVLNRLSRQLRTTLVERVAGRELPKEVVEEIIVKTDGVPLFLEELTKTVLESNLLTERHGRYVLSGPWRQLAIPATLTDSLMARLDRMGPFKRIAQIGATIGREFSYETLHAVANTPAEQIEAALNHLEQAGLIIRRGHPPDALYSFKHVMIQNAAHDSLLHSERRKLHSRIAQVLVEMYPEKTDREPELLAHHLTESGQSEGAASFWLKAGKQAAKSGANLEAIGHLHRGLAVVQANARMQGADEMELELRIALGNALIAAKGYAVQEVEENYTRALELGYQLDDDEKAFAATRGLWVCHFIRADLTRAHELSVELLRFAKRARLNERAQPAQQTGYLIEAHRSIAMTMLYRGRFAASQHHLHRCINLYSPDLHSDLMERHGTDPGVVSLSYLGYLLWFLGRPDAARQHSEQAIANAEKIRHPFTLAFALVFGAYLCQHLRDVEGTRDHANRAMIIATEHNFLHWKQQAAILRGWALAQLGDADEGLRQMRLGLDEYEAMDSWLAGCWFRCLLAEAYAKVGLREAALRALDGALATARRTGDHSYLAEVHRLQGEITLSDGDPVSVQEAEGLFELSLEIARKQGALSWELRTAVSLARLSLETGKREHARLLLVPIVAKFSEGLYTADLKQAMQLVNELGADAPAREQADL

SEQ ID NO: 8915 - protein, 264 aa, BradyrhizobiumColbertium
MRDIAAARARYVGLIARRELISSKRLLDALAAVPREDFLPRGPWRIKDEAARSYRLTPDADPVHLYDNVLVAIDARRKLDTGLPSLWAHLIDILDVKQGERVVQIGCGLGYFSAVLSRMVGPKGHVHAIECDERLAARAGNYLRGYGNVTVVHGDGCKDVVEPADVIIVHAGFSHPHPLWLRSLRPRGRLLVPLTQRDREGAAIKITRKAKRFEAEAIQQIRIFPGQGRGVTALDDRVADWWQRASAPAPLRFRGLAQGLPSDG

SEQ ID NO: 8916 - protein, 315 aa, BradyrhizobiumColbertium
MHSVALLTASYAKDIERFSLLSESIDTWLSGFTRHYVLVNDEDVPLFAPFVSDRRVIVPASRYLPKWLLALPPALQFGNRRIWLSLLSSPVHGWHIQQILKIAGVLNAPEQRVCILDSDNLFFREFDVRQYAGAEKTPLFVAPKAIGADHPLHGLWLRTVDQLLGIEQRSFPADDYVGNALVWDKDTVRAMVGAIKSATGLSWALALCRKKKFSEYLLYGNFVANSPDHLARHRVTEDSIAVSHWDDTPLDRPAIEAMMHAASPEQVALCIQSYSSTSVEDIRDVFRLSSRDRRSPGLAPDHVGDAPAFETPKMR

SEQ ID NO: 8917 - protein, 373 aa, BradyrhizobiumColbertium
MHGAAWYEGALVAKGTPNVVRLDRREFLLGSAAALAAGASASAVPASKRAQRRPGFGAAATLWDLQADPRLGEAISTYCTQIVPVLELKWPMLRPDAHTFAFERADAILDFARDNDLSMRGHALAWYHDIPDWTKQIKDTKGVERAYRDHIGTVVSYYKDKLTSWDVVNEPIPDNPRSPKDRRDTFWTQHLGQSWIPLAFRTAAAADPFVKLAINEYDIESAKDSFIAKRAAYRNLIMDLLDRGVPLHAVGLQSHLHAELEIDTHGLAEFVTELRSWGLDVLVTELDVDDQKLAGSPAERDAIVAKRVDDLLTAISVSGPVRSILTWGLSDRYSWINGTFARKDKQPNRPLPLDGEFKPKPFMDVISKFTNEA

SEQ ID NO: 8918 - protein, 478 aa, BradyrhizobiumColbertium
MLNRHFSIYLVAYILPAAVGFFAVTAYTRLLSPAEYGVYVVGISLAGILGAIFFAWIKLSVSRYQAMSADVDFRGTAIVAFALTAAVLCATTPLVFLFRSDVSVGLLLASMFVAIMANAVDVGQEFERAKLRPYRFAAISIVRSVSSVGFGLLGIWLGWGGLGLLAAFGLGSLAGIIMNLVGDRTRIARFQRSQFMQLARYGLPLTLAGLSVAVYSASDRLIVAYLLGKDAAGIFGVAADLPRQFMVMIASSVAAATVPLVFRSLSENNSETTRERLTESLELLLVVVAPVAVWLALAADQVAGTLVGVDFRAGVSALLPILVLARLFGIANQFYVQISFQLAERPFMLAAQSFLTLLISVVLMFALIAGYGLHGAALATLATEAIGLLVAVVLMHRAHPVPFELNRLAGVAVSAAAMAAAILMARSQAGGTGLVPLVMVSLAGGLAYAAAAWLLNVANVRTLSLRFLRTLNRKALGV

SEQ ID NO: 8919 - protein, 79 aa, BradyrhizobiumColbertium
MSLTCRLESLLKKSQPPYVPSVAGFGTFERQISHIRGLAQAEGGLRPRPARSWARSLRQNVRITFWCSRPGRAGRMVPR

SEQ ID NO: 8920 - protein, 514 aa, BradyrhizobiumColbertium
MKNQLATAQFTKAMRRLRPAGMVALATLATFVGAAPATAAKQQRQAAEAVAPRQAGEPIMAIVSIKSQQITFYDAEGWIVRAPVSTGTTGRETPAGVFAILEKNREHRSSMYDDAWMPHMQRITWNGIALHGGPLPGYAASHGCVRMPFGFAENVFDRTYIGMRVIVSPHDTVPTDISHPSLFVPKPEAIAAVPGRADKLSAEAEEATRAADEAKKAASAAAKEATALPATLRKLGQQKTRADAELAFADKTLANAKTDQARARAEERKQKAEAKAADAATQLEAAMAAAQPKRDAVAATKEAAKAAAARKADAVKAATDAKLAGEPVSVYISRATQKLYVRRNTHKPAPDGGGEVFDASIEVPVTIRNPEQPIGTHIFTAMAKTDTGLRWSVVTIENGDEARSALDRVTIPQDVWDRIGPTALPRSSIVISDEPLSNETNYRTEFVAVLSNEPQGGFITRKPTAPAMVASDDGWDNGFGFFYPRDPYVQQGNPRRRSQYQYYQPAQPFQRGFW

SEQ ID NO: 8921 - protein, 178 aa, BradyrhizobiumColbertium
MSRIFGAVRQNGYVVRDIHAAMKHWIEVMGVGPWYYMDRVKTDWFRHRGQDSAVEMSIALANSGDLQIELIQQRNDAPSLYKEFLDAGQEGLQHMSYWSHDYQALYDTALGLGYRIGHEGQIGGDRGRFAYFDTQAHPGTVIEISDISGAKGPFFEKVRLAAMNWDGTRPVREVGGRS

SEQ ID NO: 8922 - protein, 322 aa, BradyrhizobiumColbertium
MKLSTVTLSLFASLIMAAPARAEDPASYPTRKIRMLLPYAAGGGGDVVGRLLADSMGKALGQSIYVENHTGAAGTLGTKMVATAANDGYTITLGGMTTHVLAPAIYPKLPYDPIKDFTTIGRVGTSSIMLVATRNFAANDVKGLVALAKKGEPIQYGSWGVGSTGQFCAEILMQQTGIKMDHVPFNGIAKLAGDLLGGHISLATLDMATATPLVKDGSIKALAACGERSPSLPDVASYKEQGVPFDRNLSWAMYAPAGIAPPIAQKLSAALKEALGDEVVKQKLLALGITPQFVPGEEQRDINARDIAAWKQVAKGAGIEVK

SEQ ID NO: 8923 - protein, 297 aa, BradyrhizobiumColbertium
MRQVRIGSMRIDLVSEIPSLAFDKSWLFANVTDAVIAENRSWLDHRYIEPETGRFILSHHSYLVRTPSWTAIVDTCCGNHKHRPRVPAWNGLDRPYLENMRALGVAPEEVDFVMCTHLHVDHVGWNTRLCDGRWVPTFPNARYLMGRDEYRHFEAAHNAAPATPVNHGSFEDSVLPVVAAGLAEFVATDHCVFSDRDAAVRFAPAPGHTAGNMQIHLNGGHEHAVMSGDVIHHPIQCAAPWLSNAADVDPAAALATRMALLEELADTPSYLLTGHFPAPTAGRVVRHGDAYRFRFED

SEQ ID NO: 8924 - protein, 403 aa, BradyrhizobiumColbertium
MARLARLRLASACILVPLLAAGTASAQSAKHDPGADDKTIKIGTTAPLSGPVSAFAQIAKSAEAYFRKVNDEGGVNGRRIQMIIADDAYSPPKTVEQTRRLVESEEVLLIFGGVGTPTNSAVHKYLNERKVPQLFLGSGAAKWDDPKNFPWTVGWQPTYRDEAIAYAKYIKASHANAKVGVLYQNDDLGKDYLKALEEGLDGGEAIVARAAYETSAPTVDTQILQLKTAGADVVLVAATPKFAAQAIRKIGEIGWKPVTIISNVSASISGVLEPAGKDNSTGVISSKYLKDATDPALKDDAGYKEWLAFMDKYMPDGNKSDWLNVYGYTIAQTLVTVLKASGNDLTRANVMKQATSMKDVRLPMLINGTAVSNSPERFTPMTSLQLIRFDGTRWVPFGGLLKN

SEQ ID NO: 8925 - protein, 232 aa, BradyrhizobiumColbertium
MAVPTSSAADAAAPTTRERILSEALDLFAQSGYGGASMRELARRVGIRESSLYNHFAGKAAILEAIVAEHGPASSASRLEEPRYKQLARQPAAFCRQFALDLVEQWSDPREHQFQKVITAERNRVPGIRAKFADQFYAREQSLMTDYFRGFALAGLISTTDPRETARLFAAGLIYIRLEHYVMGAAPSPRAKVIEAIDRYLAFFLSLIAAGNDADNKKRKPKGENRGKAAPD

SEQ ID NO: 8926 - protein, 186 aa, BradyrhizobiumColbertium
MARLPLIDPETTSGDIRASFDRMPVKLNIFRMMAHAEANMIPAMRLGNSILHKQKLSAVNRELLILQAAQLEGGAYEWRQHVPIALGVGCTQAQIDAVERGDYGAAALSGAERALLEFGREVVENVRVPEATFAAVRTHFSDQEIVESIVALGFYMMMARLTEATETDLDPAAGMKVYDGGKRPGG

SEQ ID NO: 8927 - protein, 281 aa, BradyrhizobiumColbertium
MAETESRPERYIRPPSAESSGEAPGRGRLKGRRILIVGGGQRVFDAATDPIGNGRAMSILCAREGAKVAVADLNRPSAEQTVSCITDEGGEGFAIAADVTSEADVQRMIEEARRMMGGLDGMVLNIGTFGKVGLDAVSPEEWNRIYDVNVRGPMLCCRAALPKFNDGGAVVFISSIAALKAGSQMAVYDSSKAALGGLMRNIAHLGARRGIRANLVYPGLVDTPNGREAGAGRPNRGKGHIPFGRQATAWEIAYAVLFFLSDESVYVTAQALAVDSGLSGM

SEQ ID NO: 8928 - protein, 179 aa, BradyrhizobiumColbertium
MITDQPMSTGGSLPSPGALIAKSNRLIQALAKPSLVQLVLRIALAVPFWRSGILKWDGFLRLNETAVTLFSDEFMLHLPGGPYHFPAPTMMAFLSGSGEIMFPILLVLGLGTRFAALGLLFMTVIVELTVPDGWPIHLTWAAMALGIMAYGPGNVSLDHLICRVRSPDGANGPARSAAR

SEQ ID NO: 8929 - protein, 260 aa, BradyrhizobiumColbertium
MPPEANLSFAAAFAPALLDPVRSTPSLVTGPNGKAAGRRYDVYRNNVTVSLIDALAAIYPAVQRITGTDFFRAMARFHVRSNPPASPLLFEYGRDFPDFIAQYEHAQAMPWLADVARIERAWLDAYHAADAVPLSPARLSAVAPDRLAGLVFIPHPAARCLRSGYAAVTIFAANRDNTTVTRIDASKPEDALITRPEFDVTVRRLPPGGAVFASRLISGRPLGEAAAAALEAASDFDIAANIAGLIEAGAFTSLADGDRS

SEQ ID NO: 8930 - protein, 305 aa, BradyrhizobiumColbertium
MSTAIRPTSPTAMPLRFALPIGGVAGTSFKPEHLPAILEAGPRRGFFEVHAENYMGAGGPPHRALEAIRREHPLSLHGVCMSIGGPRPLDKAHLARFRGLVARYQPALVSEHLAWSTHETSFFNDLLPLPYTEATLACVCDHIDQVQEAIRRPLLLENPSTYVAFRESSMSETEFIRAVAERTGCGLLLDINNVFVSATNHGFSALNYLADFPLSRVGEIHLAGHAEQADDEGDLLLIDSHDGPVADAVWKLYEIVIGRRGAVPTLIEWDSRIPDWPILEAEATAAQAILDRRQSAVPAGERHAA

SEQ ID NO: 8931 - protein, 101 aa, BradyrhizobiumColbertium
MSAKHAVTSLVLAGAVSTALATLAAAGPLSKAEAEAAVAAKKEKCFGVALKGQNDCAAGPGTTCQGTSTVDYQGNAWKFVQGGTCTSIELPNGKKGSLKPV

SEQ ID NO: 8932 - protein, 695 aa, BradyrhizobiumColbertium
MKVDPERRLHAIAGVTVSIRLAVSALVLTAILLTAALSSLLWWRTAEATSRQLASTINEQIVAAVRKEVAAIVDEARAAHTAIRTLFLQNVLDTREADKREFVFLSQLQSQATISWVAFGWPDGSFFAAHKLGDRRLEMMEISLTDHPGQRRIDEYDVVPGDIEFANRRFEPTSFHVADQAWFKSGLSADDPQWFRVSEHASGERPSIAFAGPIDVYQERQGVLAVIIEYTRLARFLSQLEVGRTGTAFIVDGSGELVAAPDKDADELHPARGDTRLLPLARLALGKAGEAGRKEAWRSRLTSGGAAYEVALTPLPFPGWSLATVIPEAEFLGPVETTLQRLILGLAIGAVLAALGSAMLARSVIAAPLSRVVGELRHVEAFALEQVRRHPSRLKEIASLSSAIAEMAAGLSAFRKFIPADLVRGLLRQGVEARPGGSVQELSVMFIDIAGFTGLSERLGDRVVPLLSRYLDLTSEIIVANGGTIDKFIGDAVMAFWGAPQPQADHAARCCRAALACRRAIEQSGLVDDLGQPLQIRIGINSGRMLVGNIGSELRLNYTVIGDAVNVASRLEGANKSYGTQILIGEATERLVRGAVITREVDSIAVYGREEGLSAYELIGMVNETAADPGWIANYERGLAAYRARRFADALADFEMVLKQRGRDRPAELMRDRCRQFAATSPDSAWRPVAALTSK

SEQ ID NO: 8933 - protein, 206 aa, BradyrhizobiumColbertium
MAKPVCPAHDVDMKTTLLKSEHYTRSPWKNGGGTFTDIADAHRADARQKDWDSLVWRFASTPIVAPGPFSYMPGIDRLQMVVGGRGLVLKSPTQEFDEREPFTTVRFTGELEIVTELEAGPVEVVNLMARRGAAEIELEALREPGERPLAAGTHLVYAARGDCLVRLGREDLAIPSQGTLKVETGEPSQLVLASGLAVLGSIRIVG

SEQ ID NO: 8934 - protein, 405 aa, BradyrhizobiumColbertium
MQTAARGQDMNALPNNAATPADGVVDWLTNGTRDERFIDDIFAQMCIRLQQAGIPLKRATLHVLINHPQWLGARMMWSDGMRNAEIALVDYEVRERSEYIGSAASEIQDGAEEVRERLEQDPTLGRKHTLYDEMRAKGLTDYVAWPLLHTLGKRHLVTFATDRPGGFDGAHIAGLKKLLPVLALVSEIRIKNRLARTLLETYVGSHAGELILAGATRRGTGTTVRAAIMICDLRDFTKISDNWPRDDVIDLLNDYFDAMSEPIARHGGEILKFIGDGLLAIFPLSQPNACANLLHAVTEARQAMAALNERNNGTGRAPLNYGIGVHVGDVMYGNIGSSSRLDFTVIGPAVNMASRLEALTKTIGRKVLLSRAFADLVENEFALEHVGEHEVRGFSKPIELFAYPE

SEQ ID NO: 8935 - protein, 59 aa, BradyrhizobiumColbertium
MSRDNELKPDDFPIQADKDKLRTHKGEPVAVAESEQIADEIADRLNEHAHQEEQDRWSA

SEQ ID NO: 8936 - protein, 68 aa, BradyrhizobiumColbertium
MTKTKASDTQVASTGAQPALNPGDEAPSGTTGTGEDVCPDCNGKGRIDGAPCETCRGSGTVTRAIGGA

SEQ ID NO: 8937 - protein, 122 aa, BradyrhizobiumColbertium
MATSVKQMLEAANAEVPKIASEQAAEMINKGNTLVVDVRDAPEVAASGKIAGAVNVSRGMLEFRADPESPYHDKAFDRSKTVILYCASGGRSALAGKLLKDMGYENVYNLGGFKDWTGPVER

SEQ ID NO: 8938 - protein, 265 aa, BradyrhizobiumColbertium
MPKFLRIGVHQSNVSGYTSKAWCVRCVGSAVFLKWGAVEVQGTGAARKVYWARSPQEKTIRCRTAQRAQDYTKAAIARRRNHRYEPLTGPIANRRPSAARNPELKQALATILIVDIVGSTAKAAKLGDARWTRVMGHYYAAVRKELKTCGGREVVTTGDGVLATFRKPAAGIACANAVQKAVRTLGLEIRVGLHAGEYTISGGEMVGLAFHICTRVAAKARGGEVLVSSAVRELMTAQAAASLRDHGMHRLKGVPERWRLWRVEG

SEQ ID NO: 8939 - protein, 206 aa, BradyrhizobiumColbertium
MSERDGDDASPKREGLREQKRRETLRRIADTGLRLFLRNGYEATTLDAIAEAAGISRRTFFYYFKSKEDIILAWQGGLADAIGRAVLEQSTKQTPLEAVKNALVKLTASYEDVQARRQMMEIDRFIRANETLRAREATKYAQQEQAVFDALCTLWPQPKRQTALRMVAMVSIGAFRLAIDSWSQDEGRRSFAAYLRDRFANMKAEA

SEQ ID NO: 8940 - protein, 67 aa, BradyrhizobiumColbertium
MAGAAHALVHSGGRLQQAWLCTTGIATRGIGIPVVRRAVPVCSHLAPVRLVLDALTRSSLAGRPHMQ

SEQ ID NO: 8941 - protein, 232 aa, BradyrhizobiumColbertium
MDQRVRSSGHIELLRRRPAGYAVVTNRPGAMHRPRRAIGRPHRGLQITTPTVRDARAFHSGGHRRDGVVRASPGERDERRFAARSLARAAKAMRSPYLGNIGILLLLCAISFHPCFDLAKIVSNSFLCLGAKAAFAATVNLVVNEWTPTIQAFLAGRLLRWIGLSLLLALLPALTVIRAGMLAKLRSFAALGLVRLRGVLKASLQPNKRNVLPGRDAGAVHEKVNTPTRHEA

SEQ ID NO: 8942 - protein, 318 aa, BradyrhizobiumColbertium
MPGWNASDIPSQRGRCAVVTGTGGLGYEDALALACAGAEVIIAGRNAAKGADAVARIRSHEPNANVRFEWLDLADIHSVRAFGARLRAERDSLDLLVNNAAVMTPRTRQLTADGFELQFGTNHLGHFALTAELLPLLRKGVQPRVVTVSSVAARSGAIAFDNLQAERRYEPMPIYSQSKLANLMFAFELQRRSRAFGWGITSVAAHPGVSRTDLIPNGAGRMSLPGLARTALWFLFQPAAQGALPTLFAATSPDIVPGGYYGPDKFGETRGSPSVARVPPQADDDAVASRLWDVSARLTGASFATESHRARTKTDPCT

SEQ ID NO: 8943 - protein, 322 aa, BradyrhizobiumColbertium
MAPRANWKGFLRLSLVTCPVALYPATSESEKISFNQLNRQTGHRIKYVKVDADTGDEVPNEDIVKGYELEKGQYIEVSREELEEIALESTRTIEIDEFVDKSDIDARYLIRPYYIRPDGKVGHDAFAVIRETIREMDKVAIGRVVLTSREHIIALEPMDKGLVGTLLRYPYEVRSEQDYFDEIQDVKVTKDMLDLARHIVNQKAGRFTPEKFEDHYETALIELINEKRAGKVIRPKERPQGENVVDLMEALRRSVGKEAGKEAGKQAGQEAAPAKAGKPAKKPRKAAAGQKEMLMPIAGRKAAAARDSSAKKPAAGARRKSA

SEQ ID NO: 8944 - protein, 100 aa, BradyrhizobiumColbertium
MLMTRERRPAIRTLRGWAIQLLQEAGAICECEEHGWARDRADPHARHRALALARREPPDGVSPDQAVAEINDVLDSIGDACPECPDEGLWGFHRRPRSTK

SEQ ID NO: 8945 - protein, 158 aa, BradyrhizobiumColbertium
MAIDAFAGSTPVFLPEQFFVGRLEGWAVVESLIGGLLKRATIAAHGELDADTDTVVLTETYTFDVGHSDTLRWTIHKTGEGRYTGHENRLEGEAAGEQAGCAFHWKYTRDTPQGDGKSFMLNFDDWFYAIDDRACIVRGSAGRAGIPFATAHVTYRRL

SEQ ID NO: 8946 - protein, 328 aa, BradyrhizobiumColbertium
MPLQLNMSRRLLLAGSTAGAMTPLLGMPAALAQAPAPRTNSGHYSFRIGDIKATVVSDGTLSGNPRIYASTAQAEELGRTLSDAFLPTDSFRLNLNTLLLEKGGRRILIEAGAAQTLGPDGGHLFRNLEAIGVQPEHIDAIVITHTHPDHVGNLSRSDGSSAFPKATVYIPEDDFAFFIRGEPDLSRLPMPEDFRRAFIANIKRSVAPVARSAVLYRPGSEVLPGLTTIAAGGHTPGMSAILVHSGAQSLLITSDAAYSPLLNIDNAWRPGPDLDPDAALQSRRRLFDRAAADRIPVLGFHFPFPGIGNIRKTDVGYRWVPANWRFEG

SEQ ID NO: 8947 - protein, 331 aa, BradyrhizobiumColbertium
MDLAKVDLNLLVVLHALLEAGSVTRAAERLGSSQPAVSRALARLRRLFGDRLMVKAASGMVPTLRAEAMREPLANLLGGVEAFLHKPKFDPSATDRVFRIATTDYGALAILPNVAARFAREAPGAAIEVVGFSRDVFRMLADGQVDFVLYADNPVSGSFRARELFRESFVTLVRQGHPLLKEMRGARDVLPIKLFTAWPHIVVSIFGGQGGPIDTALAERGYKRHVALRVPYFATAAVITAASDYLVTMPSRAARQLAPRLGLVMLKPPAQVTPYGYRLLWHERSHDDPGAVWLRRLVVDGVKSRGAVAQRVNVRPGFCRSNCTTIIGIAG

SEQ ID NO: 8948 - protein, 177 aa, BradyrhizobiumColbertium
MDRLTDVLGGATAHIGAEYFHLPIHGGGPVYRERVYCYELYHQMRLRWPNEGPFRLNGEVDKAAHPILSERGASHAKPDLLVHGPGDMGLNHAIIEVKSLRASVNGIEKDLNTLSLFRRAVGYERAIYLIYGGERLDRIFAWIDRLAGRIPALPVVEVWAHQEPGRPAENLFTIGRP

SEQ ID NO: 8949 - protein, 1294 aa, BradyrhizobiumColbertium
MVAGTAQYRHKLQPDVSTRPIWIMFEITRDDIAALNDEDLRALIGRLCEAELRRKDLPVSAVTWGGDQTAKDGGLDVRVALAPGTHIQGFVPRAATGFQVKKPDMPAAEIIKEMKPKGVLRPVIEELAAACGAYVIVSSNGSTSDSALKSRGKAMADAMQGCSDAAKLHLEFYDRSRVASWVRDHAGLIPWVRSRIGRAFRGWQSYGGWSPLPAGADNTYLLDDKARIKTTGQKDDDADGVTVVDGIDRMRDALRNPGQVVRLVGLSGVGKTRLVEALFDPMIGTKALDPSLAIYADTAHEPDPQPRGLASDLLAQRTRAILVVDNCPFDTHRQLAEVARIAGSTISVITIEYDFRDDQPEGTDVFSLETSSLPLIEKLVRARFRDISQIDARTIAEFSDGNARIALALAGTLKKTETISGLTNTELFTRLFQQRHSHDANLLQIAEACSLVYSFQGEALEGENAELPILGRLIGRSAQDVFAAAAELKRRDLLQQRREWRAVLPHAIANRLAKLALENIPYPLIRAEIVEGPSERLLRSFSRRLGYLNDSKQAQDIVRGWLSKTGLLADVLELNELGRAMFENVAPVAPEATLSALENVFGNADRLTLLRGGHLIRLLHSLAYDTPLFERAVRLLIAFASVLEEGSFDGEAARATTPLFYPAFSGTHAPLAVRLPVVKRLLKSEKPVEQYLGIQALEALMTTHNFAPYGQFEFGARSRNYGYHPKSGAEAGRWFEDVLSFVEPFALGDSPITARVRKSIAHKFRWLWTHGGRHDALERIAKSIAGGGFWRDGWVATRQTHHYDGKSLTKEAAERLTRLEEFLRPKDLVNRVRAIVLGDRSGRLTLDDLGIDDQSAVKASERMRRSNIAAEKLGRDVAMDDAAFSALLPELVSAPGNLSEFGRGLALEALEPRLLWRRLVDEVSRTDNANVQVLLGILSGLEVRESAQANALLDEAVDDPILAPWLPTLQTGVTIDDKGVARLRRALDLGKAPIGQYFSLVYGGVCEPIPGPAFRDLVLAIGAKPDGNRIALEILAMRLHSNATAKRTPLPESAEAGRQLLVDHRFTRRGNAADSDDYRLGLVAAASLAGAEGASITRKLLRDLKEAVARYDVSAGEQDDLLLSIFKKQPVAALDELASGEEKDRQRSTELIQDMLRNRQSPSSVVPDDVLLSWCEADPARRYPFAAGVALLYSRPNDQSSDEWKPIAKLLLERAPDPVAVFEAMGQRIWPTSFDGSPASKFESRMQLLDILELGENAALRVAVGKFRGELADEAARWRQRDLEEDSARSGRFE

SEQ ID NO: 8950 - protein, 324 aa, BradyrhizobiumColbertium
MLRMLRRGLFGLAVLSVLFSTTPPASAAYPDRPIHWLIGFSAGGPVDIVARIMAQWLSERLGQQVIVENRTGSGGNIAAAAAVNAPPDGYTLLFVAPNNAISTSLYKKLPFDFLRDTVPVASIMQLTNMLVVSNAFPPKSVKEFIDYCLANPGKISYASSGNGTSVHMSAELFKVMTKCDMVHVPYRGSAIAFPDIISNKVQLIFDNLPSAMEQVKGGNVRALGVTSPKRWPSVPDVPAIAETVPGFESVGFYGISAPKGTPPEVIETLNKAVGEALKDPQLVAKLAATGGIPKPMTSAEFGKLVADETAKWRKVVEFAGVSVD

SEQ ID NO: 8951 - protein, 325 aa, BradyrhizobiumColbertium
MRFACPILLGAALLAGPAAAQTGGTAIPPATTSQTISLGTATPGGGFPLYGNAFAEVMNAADPLATIVPRNTKGSSENIPLLEKGELDLALVAGEPAYEAFAGIGRAPVRLKILTAIYSNPGLFVVRADSPYRTIRDLVGQPVAFGAKGSGLPILARYMLDGLGLNQDEDFKAVYLDRAGDGPAMVEDGRVAALWGAGIGWPGFAAVASSPAGARFIAPDVEEMARIRAKHGFLKPLLVPAGSYPKQTAPIASLGSWSFVLTREDLPDDVAYRLAKTLHGVEPAFCRKLAQACETTASNTIAAAPKTELIHPGAMKYFREIGVVK

SEQ ID NO: 8952 - protein, 403 aa, BradyrhizobiumColbertium
MNPTRFGLPLAAALATLLPGAASAQLSDDVVKIGVLTDMNGPASAPTGQGSVTAAQMAIDDFGGTVLGKPISVVIGDHQLKADIGASLARRWYDVEQVDLIVDVPVSAVGLAVQNIANEKKRLFITHSTGTADFHGKFCSPYAIQWVFDTRALAVGTADAVVKRGGDSWFFITDDYAFGHSLERDASAVVTANGGKVLGSVRPPLATPDLSSFVLQAQASKAKIIGIAAGPPNNMNEIKTGAEFGVFKGGQQMAALLALITDIHGLGLQAAQGLLLTTSFYWDMDDKTREWSKRYFAKMNKMPSMWQAGVYSSVMHYLNAIKAAGSDDPLKVAAKMREKPIEDFFARNGKLREDNLMVHDLWLVQVKTPEESKYPWDYYKILTTISGDKAFGPPDPACALVKK

SEQ ID NO: 8953 - protein, 297 aa, BradyrhizobiumColbertium
MEFLTTSEAADYLRLGERKLYELVTTGAIPCSKVTGKWLFPRHELDLWVLSGLSRPAGMLIAEPPPVVGGSQDELLDWSLRESGSGLGSMSEGSARGLERLQRNEVMAAAVHFHSLDASNNLAGDASVEALRAAPDLHDAVLVAFVRREEGLVLPQGNPKRLHGLTDVLALGARMAMRQQGTGAQMLLDVLLKRAGASTRDLRRIETPALTGPDLAELVRGGQADCGIGTRAVARSAGLDFVPLAWENLDLAMRQRSYFRPAMQALLRFLNERRLRQRADELTGYDPSTAGQIRFAA

SEQ ID NO: 8954 - protein, 275 aa, BradyrhizobiumColbertium
MRRLSVALALLCGLAAGVAASFAEDRGIVLASTTATQESGLLNYLLPIFRDKTGIDVTVIARRADEVLDGARRGEVDVVLMHARPQEEKFVADGFAVKRYDVMYNDYVLIGPKSDPAGVKGKDIATAMKAIEAKGAPFVTRGDRSGTHAAELALWIVAGIDITAAKGPWYREVGPGMASALDAARAAKAYVLSDRGSWIAFKDRGDLDVLVEGDRRLLNQYGVMLVNPAKFPNVKKDLAQTFIDWLTSPEGQTAIAAYKVEGQQLFFPNSDRSGG

SEQ ID NO: 8955 - protein, 368 aa, BradyrhizobiumColbertium
MTQRLPPSLTPLDTALAALLQSVDAVAPVEVPLADAIGCIAAGTPPIAAYPSHGIAAADGWALSANDLVGASSYSPLPLTMAPAWVEVGDAMPMGCDCVLDAGAIELSGPLPQVLAEGVPGQGVRRAGSDIPECTPAAAEGDPIGAADLLIASVAGLEKLGVRRPRLRIVNVPGATATMDMIAGMARAAGLEVDTCQTRARGEASIADALDVSSCDLLLTIGGSGVGRQDAAITALAQRGAVMAHGLALQPGRTAAVGRLGQVPVVALPGSPDHALAVWLALVLPLVDRLSARRRHPQVSLPLARKIASVVGIAEIALLAEEHRAWVPLAVGDWPLQAIARADAWLLIPASHEGFAAGTPVDAHLMRT

SEQ ID NO: 8956 - protein, 649 aa, BradyrhizobiumColbertium
MTMIPKSPDRSALEQEQFLTILSREEALARFEAALFPRALLSESRKLAAALGAALAEDITAPIDVPPFDRSNVDGFAVRSADLAAAGEGAPVRLAPNGETVHCGTAPTLQVAPGTATPIATGGPLPRGADAVVMVEHTQPDGPDAIEVRRAVSPGQFISYAVFCLKKKRALLRAGTIIGSREIGMLAACGIAEVGVARKPRVAVISTGDELVQPGQSLGAADIYDTNGAIVAAAIDENGGEAVFLGAIPDDEAKLEPAMRRALADCDMLVLSGGTSKGAGDLSHRIIGRLGAPGIIAHGVALKPGKPLCLAVCDGKPVVILPGFPTSAMFTFHDMIVPVLRRMAGQPPRTDAKVKATVPVRIASELGRTEFVMVSLVEGKGGLIAYPSGKGSGAITSFAQADGFLRIDALADQMSAGTETEVTLFTPHVRVPDLVIVGSHCTGLDLVTAQLAHAGLTVRSIAVGSLGGLAAAKRGECDFAPIHLFDDRSEIYNAPYLVEGLKLVPGWRRMQGIVFRKGDTRFEGLNAKEAVASALADRTCIMVNRNQGAGTRILIDRLLGGARPEGYWNQPRSHNAVAAAVAQHRADWGMTIAPVAHAVGLGFIPFAEEHYDFALVTARKDRSAVQAFLDALGSDAARAALERAGFRPA

SEQ ID NO: 8957 - protein, 99 aa, BradyrhizobiumColbertium
MSAPTPLNFRRIAALVAATGTLFWLYTFYYIANVPPGDGTGFQWLAVFPLGIVFGLFFLPAWLLVAIGRLPRFTTIVGLSGLIAFAIIWAQLLNEFAKS

SEQ ID NO: 8958 - protein, 200 aa, BradyrhizobiumColbertium
MLLAGGLARRMGGGDKPMRTIGGRTILERVIARLSPQCSGLILNANGDPARFAAFGLQVVADDVPGFPGPLAGILAALDWTAANRPETEWVLSAAGDCPFLPRDLVARLHEARARENAQLAVAASGDQSHPVIGLWRVALREELRQALVVEDLRKIDRWTARYPLATVTWPAEPLDPFFNANTVEDIADAERLAALDDAS

SEQ ID NO: 8959 - protein, 329 aa, BradyrhizobiumColbertium
MLRCARNDGKAAFRSLAAMHISASTECHANLSAMMKIDKAPVPLIVPNPDDPRLTQSVTGTDQTGATVEIKVPMERPLTLYLNAQEIVTMMTIGDYPEYLALGYLLNQNMLKYNDVVTEVEYDDDLQVVVVRTEHHTNFEAKLKKRTQTSGCAQGTAFGDLLEAVESVALPRAELRTSWLYQMTQTINTMPSLYLEAGAIHGCVLCQEGVPLCYTEDVGRHNAVDKIAGWMYRHGVDPGDKILYTTGRLTSEMVIKTVRMGIPILVSRSGFTAWGVDLARQVGLTLVGRTRGKRFIALAGEERIVYDQNLAYVEEESAKHKRKGEGGDD

SEQ ID NO: 8960 - protein, 175 aa, BradyrhizobiumColbertium
MKVIGLAGWSGAGKTTLLTRLIPLFNAQGLRVSVIKHAHHRFDVDVPGKDSWRHREAGAAEVLVASSNRWALMHELRGAAEPRLPELLGKLSAVDLVVVEGFKREPHRKIEVHRAANGKPLLFPEDTGIAGIASDVAIDTSLPTVHLDDVAGAAALMLRAAMPVEEAVAKSAAMR

SEQ ID NO: 8961 - protein, 418 aa, BradyrhizobiumColbertium
MAQLSDDCFAFGGPMMSVDDAVGLITTRVNAIADLETVALVDADGRVLARDVAAPLPLPPFTNSAVDGYAVRNADLPKSTEQSFPLDGRIQAGGRAQAPIKPGHTARIFTGAPMPPDAETVFMQEDVRVDESGKIVLPPGLKPGANVRPAGEDIAQGHVALRGGQRLRPQHVALAAAFGLTRLDVVRRIRVAVFSTGDELASPGEARAASQLFDSNRFMLVAMLRRLGCEVSDLGILRDERASLASGLKQVAGRHDLILTTGGVSTGEEDHVKAAVESIGSLVLWRMAIKPGRPVAMGIVDGTPLIGLPGNPVASFVTFVHVVRPTVLALAGSLPEPLLPIPVRAAFAYKKKAGRREYVRASLRRAQDGRLEAIKFPREGAGLLSSLVETDGLVALGEDITNVEPGQDVGFLSYADLL

SEQ ID NO: 8962 - protein, 63 aa, BradyrhizobiumColbertium
MPALKTRKALKPLQPGDQLEVHCTDPLSVIDIPNLIRETGDKVEITERNEARIVFLVEKGGAL

SEQ ID NO: 8963 - protein, 37 aa, BradyrhizobiumColbertium
MLRLRRKRPEPSLQCESAPIVAVDDLKPKFSNLRHRA

SEQ ID NO: 8964 - protein, 475 aa, BradyrhizobiumColbertium
MTFSTSRAAASPAGSREPAIKLGKTAAGPEFSALAQASILIVDDEPGMRNFLMRTLAPRCKLVDDAADTDQASRKLDSNRYDVVILDNIMPGKNGVDWLAEQRAVGFFADAILITAYADLDTAIQALRAGAADFVLKPFRSNQILNAVARCLDRVRLQRENYVLRYALRASSDRTLLRDNLIGQSAATLRVRETIARVARLPTSVLLTGESGTGKEVAARSIHSLSDRADKPFVPVNCAAIPPEMIEAELFGHIKGAFTGADSGREGLFLYAHGGTLFLDEIGELPLPMQSKLLRVLEDRRVRPVGSEREVPVDLRFIFATNAELQKEVEKGRFRADLFYRLNVMQIRLPLLKDRGDDVQELATIFMSKLSVQLGMPPVPIDASVRAALVSYDWPGNVRELRNLIERTLILGAFPDDFAGPRNDTQPAPADSLAELERRHILGVLKEVNGNREEAARRLGISRKTIDRKCALWDA

SEQ ID NO: 8965 - protein, 674 aa, BradyrhizobiumColbertium
MPEAAGRSAELVRGRSVRFRLLAIALLPMLVILPLLLGVAIYRWNAKFDATLISKVNGDLTIAHQYLARILEKTGVQIRALSLSARFHEVLASDARGPLQDLLDEARKEIGLDFLYLTNGRGDVLAASPPLQHRPRSDWPIIKSALSGEVPATGVDIFDNDELAAISPVLAERARLDIVPTPNAVPTDRSTETRGMVVHAASRAMLPDGGAAALVGGTLLNQNLEFIDTINDLVYRAASLPEGSQGTATLFLDDVRISTNVRLFEGRRALGTRVSAAVRSAVLGEGRTWLDSAFVVNDWYISAYEPLVDSYGKRVGMLYVGFLEKPFSEAKYQTLVIIVAAFVAITAATVPIFLRWASSIFMPLERVTATISEVERGNLSARTKMPVSGDEIGRVAVHLDSLLDQIQERDRQLREWNEELNVRVRERTRDLEHANLKLEATTKQLIMSEKLAAIGEVTAGVAHEINNPIAVMQGNLDVIRSVFGADADKAKVEFRLLDEQIHRISQIVTKLLQFARPEEYAGYVERHAPASVISDCLPLVQHLLNKTEIAVVRDDRASRLVLMNRNELQQVLINLIVNAIHAMPDGGTLTLRSFDAERDGHPGVAMAVADTGIGMSTEVIEKIFDPFYTTKRRQGTGLGLSISQTLIERQGGQITAESRVGLGSTFTVWLPEAS

SEQ ID NO: 8966 - protein, 40 aa, BradyrhizobiumColbertium
MPAHRFETGHACSAAAHDRSDFASKRNAQARSRHVRRASS

SEQ ID NO: 8967 - protein, 550 aa, BradyrhizobiumColbertium
MTTADTVLAPVGAPGLLDRERTIATAGFNRWLVPPAALCIHLCIGMAYGFSVFWLPLSRAIGVTAPKACPDMSLVQELFTTTCDWRVASMGWMYTLFFVLLGIAAAVWGGWLERVGPRKAGFVSALCWCGGLFLGAIGIYTHQLWLLWLGSGVIGGIGLGLGYISPVSTLVKWFPDRRGMATGMAIMGFGGGAMIGAPLANLLMNYFKSPSSVGVWETFVAMGVIYFVFMMIGAFRYRLPPAGWQPEGWTPPSKANAMISKNNVHLNDAHKTPQFWLIWWVLCLNVSAGIGVIGMASPMLQEIFGGKLIGLPDVGFNALDAGQKAQIAAIAAGFAGLLSLFNIGGRFFWASLSDKIGRKNTYYTFFILGIVLYALAPTFAAMGSKLLFVVGFGIILSMYGGGFATVPAYLADMFGTQFVGAIHGRLLTAWSTAGIIGPVVVNYIREFQLAAGVPRDQLYNTTMYILCAMLIAGLICNYLIKPVDSKWHMKDADVAKLQAASASAAAAGPHGSYGIGFGGLDAKAALFWAFVGIPLAWGVWKTLESAIKIF

SEQ ID NO: 8968 - protein, 567 aa, BradyrhizobiumColbertium
MSHDVHEVRPFEHPGEGRRRAKATPKGRQIDPTAAHEIELLLGDRPRRRDLLIEYLHLIQDKYRQISAAHLAALADEMKLSFAEVFETATFYAHFDVVKEGEPDIPPLTIRVCDSLTCAMLGGEKLLEDLQSASGPGIRVVRAPCVGRCDTAPTAEVGHNFVDHATVANVIKAAKAGDTHAHLPEYTGYEAYVAAGGYRLLDRVRSGELSKDDLLKALDDASLRGLGGAGFPTGRKWRAVLGEPGPRLMAINGDEGEPGTFKDRHYLETDPHRFIEGMLIGAHVVQASDVYIYLRDEYPASREILQREIAKLPPGGPTLHLRRGAGAYICGEESSLLESIEGKRGLPRHKPPYPFQVGLFGLPTLINNIETLWWVRDIVEKGAEWWRGHGRHERHGLRSFSVSGRVKDPGMKLAPAGITVRELIDEYCGGMADGHQFYAYLPGGASGGILPASMDDIPLDFGTLEKYGCFIGSAAIVILSQKDSVRAAALNLMKFFEDESCGQCTPCRVGTQKAALLMQKPVWNRALLEELSQAMRDASICGLGQAASNPLSSVIKYFPDEFKEAAE

SEQ ID NO: 8969 - protein, 922 aa, BradyrhizobiumColbertium
MTKITFELDGKQVEANPGETIWQVAKRQGREIPHLCYSPAPDYRPDGNCRACMVEIEGERVLAASCKRTPSVGMKVKTESARAVSAQKMVMELLVADQPARETSHDPDSKFWHWAETTGITESRFPAAERWTTDASHPAMRVNLDACIQCGLCVRACREVQVNDVIGMAYRNHGAKVVFDFDDPMGESTCVACGECVQACPTGALMPAVMLDDKQTRVTFPDRKVDSLCPFCGVGCQVTYDVKDEKVIYAEGRDGPANHNRLCVKGRFGFDYIHHPHRLTRPLVRLPNAKKDANDQVDPANPFTHFREASWEEALDIAAKGLVKIRDENGVKALAGFGSAKGSNEEAYLFQKLVRTGFGSNNVDHCTRLCHASSVAALFEGLSSGAVSAPFAAAMDAEVIIVIGANPTVNHPVAATFIKNAVKQNGAKLFVMDPRRQTLSRHATKHLQFKPGSDVAMLNAMINTIITEGLTDDQYIAGYTEGFDELKEKIKEFTPEKMEAICGIPAQTLREVARTYARAKSSIIFWGMGISQHVHGTDNARCLIALALITGQVGRPGTGLHPLRGQNNVQGASDAGLIPMFLPDYQPVGRDDMRSNFEKLWLQDLDPVRGLTVVEIMNAIHAGEIKGMYIEGENPAMSDPDLQHARQALAMLDHLVVQDLFVTETAFHADVILPASAFAEKDGSFTNTDRRVQLARQVVKPPGDARQDLWIIQEIGKRMGLPWNYSGPGDVFTEMAQLMPSLKNITWERLVREGAVTYPVDDPDKPGNEIIFTTGFPTANGRGKIVPAKVIPPDEIPDDEYPMVLSTGRVLEHWHTGSMTRRAQVLDQIEPEAVAFMSPKDMRKKRLMPGDFIRLETRRGAVEVKVRSDRDVPENMVFMPFCYAEAAANLLTNPALDPFGKIPEFKFCAARAERAEMRDAAE

SEQ ID NO: 8970 - protein, 157 aa, BradyrhizobiumColbertium
MSRVTPATRALTAAGVAFTIHAYDYDPDAESIGLQAASALGEDPARVLKTLMAQVDGKPVCVVVPSDREVSMKKLAAAMAGKSAQMMKPPEAERVTGYKVGGISPFGQRKPARTVIERSALAHDMVYLNGGQRGLQVRLKPADARGVLNAVVADVLA

SEQ ID NO: 8971 - protein, 361 aa, BradyrhizobiumColbertium
MRRLLLPWLAVLLGICVPAEAHQVNLVTARVALSPDRAVSIELGLKGSDVDRLIGLRTYDPRQDAVDPAAVEAAKSAILAYMSTHLAVTGGAKPCAAGDAAILADGDGIIYRNGFACADAAGDIVYRSTVLTDKDPAARQIVLIAQGRSEAQALLDAGNTTVTLSAAPPSLLSTMQRYVLTGIEHIFLGYDHVAFLVAVVLWARRLIPVVKIVTAFTIAHSITLSLAALDVLVIPSRIVEPAIAASIVFVAVENFFSRDVDKRWRAAFLFGLIHGFGFAGVLREIGLPPNAAATALAAFNIGVEIGQVAIVAIALPILRLADRPSLEDRSEPVRAPALVYALSAIIGVLGGYWLLARVFEA

SEQ ID NO: 8972 - protein, 146 aa, BradyrhizobiumColbertium
MESRLVRHDTDPVPFAPDAVIAAFKTIPDLLAHDADLTVRGRWLDVDCLLGPSTQPFHVAIRAGQIVDMTPAPVLMRTWRFAYRATPAALAAHWQQMPPAGWHDLLALTKRGQATLEGDLHPFMTHLQYFKDLLALPRRSGFGGAS

SEQ ID NO: 8973 - protein, 285 aa, BradyrhizobiumColbertium
MNGFIEPIVGRYVHVEINGEINRIYFEENGSGIPLVCLHTAGSDARQWRHLLTDPEFTGHFRVVAFDMPWHGKSNPPDSQYGTEYRLTTASYTATIRAFCNALKLERPVVMGCSIGGRIVLNLAIEHAREFRALIGLEAADFQQPWYDTAWLNRPDVHGGEVCAALVSGLIAPNGPEASRDETLWGYKQGGPGIFKGDLYFYRVDGDLRGRTSDIDVNQCPLYLLTGEYDFSCTPEDTLRTAAGIPGAKATVMERLGHFPMSENPEQFRRYIAPVLQDILDKQNY

SEQ ID NO: 8974 - protein, 398 aa, BradyrhizobiumColbertium
MKLRWMMAAILAAQASTAFAADNVIRIGVLNDQSGVFADNGGRGSVVAAKLAAEDFGNELLGKKIEIISADHQNKPDIASATARKWFDNEGVDMIADGAASSAGFAILEVAKQKNKIFVISGPGSSDFTGKSCSPVSFHFNYDTYALSKLTSDAITRAGGKTWYFVTADYAFGHALQRDATKFIEAAGGKVIGSAAHPLGTADFASFLLQAQGSKADVVGLATSGADVQTAIKQAGEFGIVEGGQKLAGLLVFITDVNSLGLKVTQGLQVTTSFYWDLNEQTRAWSKRYAAQMDGKVASMVQAGVYSGVHHYLSAVKAAGTTDATAVAAKMHELKVNDMYNKDVAIRPDGRVLHTMFLVQVKKPEESKYKFDYYRVVSSKPGEEVFRPMSEGGCPLVK

SEQ ID NO: 8975 - protein, 293 aa, BradyrhizobiumColbertium
MSGSIGFIGLGVMGEPICRNLLRKSGRAVLAFDLAAEPLARIVDDGATAAKSIGDLVTGAETIFLCLPSARHVMSVFEGILPVIRNGQTVIDLGTSDVGLTRSFAKQLADKGALWIDAPIARTRQAAQDGTLSVMVGATPEHFARVEPLIRHFATDVTLCGGTGAGQVTKILNNMVLFETVNALAEAVAIAKHSGVEPKLLLETLSKGSADSFALRNHGMKAIVAKDFPLRAFSTEYAMKDLSYALELGAQAGLNLRGAALMRTIFQETIDKGMGDAYFPVIAKLIDPSGFPQ

SEQ ID NO: 8976 - protein, 251 aa, BradyrhizobiumColbertium
MPSPGVAAVDRALSILAAFEDAPEPMTLAELARRTKMYKSTLLRLMTSLQEFGYLVQFADGRYHLGPTPFRLGAVYQRSNNLHDRVVPLLRQLVADGTESPSYHVRHDAKRRLCVFRVDSQHSTLDRVEAGMLLPLDRGAAGRIILAFDGEKGEAYDEIREGCIAVSFGERDPDCAGLACPVFGPGGKCVGALSLSGPKPRFTRDNIKAMASLLLRAAVRLTRALGGPTELLDSALSASAEDVRPARGARR

SEQ ID NO: 8977 - protein, 227 aa, BradyrhizobiumColbertium
MARRPAKASGSIARGGGVALGEAVFRSLCEALQAGSYRAGDRLREEEVAQRLNVSRTPVREALGRLAARGFVEPAGGRGLIVRNLDISEVLELYAMREIMEGAAARLAAEHASTPEIDALGDIEQAFVAAAKTDKAEMARLNRAFHEAICRAARNRYLDNASRELQDWIALLGPTTFTVTGRPSTSHSEHQAIIAAIAARDGDKAEQLARAHIREALRCRLKLLQKQ

SEQ ID NO: 8978 - protein, 463 aa, BradyrhizobiumColbertium
MGSKYDVLVIGGGNAALCAAISARRGGASVLVLEGAPKFYRGGNTRHTRNMRCAHDAATEILTGPYTEDEFWEDLLRVTGGQTDEMLARHMIRESKDILNWIVEQGVRWQPSLGGTLSLGRTNSFFLGGGRAMLNALYLTAERLGVDVAYDAEVTDLEIEDGMFLAARLKRPINGQTEIRATALVAAAGGFEANIEWLKQYWGEAADNFLIRGTPYNRGSILKILLDKGVQEVGDPTQCHAVAIDARAPKFDGGIITRHDSVVFGIVVNKHAQRFYDEGEDIWPKRYAIWGRLVAAQPDQIAYIIFDSTVVTSFMPTLFPPIAGQTVAELAGKLELDPAALEKTITEFNAAVRPGTFDHTILDDCVTEGITPPKTHWARKIETAPYLAYPVRPGITFTYLGTRVNKEARMLMKDGKPSANMFAAGEIMAGNVLGKGYAAGMGMTIGSVFGRIAGREAAKHARN

SEQ ID NO: 8979 - protein, 360 aa, BradyrhizobiumColbertium
MDEADRLMTVCNSCRYCEGLCAVFPAMEMRRAFSDGDLNYLANLCHACGACYVDCQFSPPHEFNVNVPKTLAVARAESYAAYAWPQALSGAFARNGLVISIVAALSMAAFILGFAALNDRSVLFGVHTGPGAFYKLMPHNMMAGLFGAAFLYAVFALFMSVRAFWRDIGPPIDGRVDGGSIFQAIRDAGELRYLHGGGVGCYNEDDKPTDRRKSYHHLTFYGFLLCFAATSVATLYHYLLGREAPYPWWDLPVVLGTLGGIGLIVGPIGLFMAKMRRDPALLDETRYGMDVGFIAMLFLTGVTGMLLLVLRETGAMGPLLALHLGAVFALFITMPYGKFVHGIYRFVALVRYAQERRTAA

SEQ ID NO: 8980 - protein, 1134 aa, BradyrhizobiumColbertium
MIRELMSSRRFAPLFWAQFFSALNDNVLKNALVIILLYSAATSHGDALVTVAGAVFIFPYFILSGLGGQLADKYVKSVVARRLKFVEIFAACFAAAGFFLHSVPLLFAALALFGTIAALFGPVKYAMLPDQLELGELATGNALVEGATFMAILLGTVAGGQFVAGSAHMGWVASAVVALALLSWAFAARIPQTTPSAPDLPVDANPWTSTMSLLRTLYADHRLWDGTVIVSWFWLVGAIVLSLLPALVKDVVGGTEGVVTLCLAIFAIGIAIGSLFAASLSHVRPNLALVPIGAIIMGFAGLDLAWAIGVAAKGHEITALGFATSFGGLRMLVDFVAFAFGGGLFVVPSFAAVQAWSQPSERARIIAAGNVLQAAFMVVGSLFVALLQAAGLHVGWIFFGLGVASFGAVWFVLTKWGKEGVRDAGGLLFRALFRTEVRGLENLPPPGTRMLIAPNHVSLIDGPLLHAVLPIDASFAVDTGIAKAWWAKPFLRAVRHYTMDPSKPLAARDLIKLVAAGEPVVIFPEGRITVSGSLMKVYDGTAMIADKADAVVVPVRIEGAQRSYLSYLNSSQIKRSWFPRVTVTILPPVKLPVDETLKGKARRNAAGAALQDVMIDALVKNAMLDHTLFEALGHAHRDRDTGKVIIEDALGARLTYRKLILGAQVLSRKLESGTAVGENVGVLLPNSAGVAVVFMALQNIGRVPAMLNFSAGPVNVLAAMKAAQVRTVLTSKAFIEKGKLDKLMTAISAEARVVYLEDVRDTIGVADKIKGLLAGTTPRVARQANDPAVVLFTSGSEGTPKGVVLSHRNILANAAQALARVDANANDKVFNVLPVFHSFGLTGGMMMPMLAGIPIYMYPSPLHYRIVPELIYQTGATILFGTDTFLTGYARSAHPYDFRTLRLVIAGAEAVKDRTRQVFMERYGIRILEGYGVTETAPVLAMNTPMANRPGTVGRLSPLMESRLDPVRGIDDGGRLSVRGPNVMLGYLRAENPGVIEVLPEGWHDTGDIVSIDAAGFITIKGRAKRFAKIAGEMVSLSAVESIGATLWPHAATVAVSIPDARKGERIVLLTTEKNAERSAMLARAKTIGASELTVPATIMVVDKVPLLGTGKTDYVTATTMAREQASAPDREVA

SEQ ID NO: 8981 - protein, 88 aa, BradyrhizobiumColbertium
MQTLAVDIAVTFVDDAKALVTGLCRAALNAATAPINRVANTCDVAGVLEQRRATFRMWRASRARARRERRRFSLLGRFSPFRRLAHLT

SEQ ID NO: 8982 - protein, 185 aa, BradyrhizobiumColbertium
MEIARGIISAKGLRSLKVRDVAEAAGCSVGSVYNEFGDFDGVILTVNRETVQALTAQLRGVPAEDPVRQLYGLAATYLDFFAEHANLLRSLFEHRMEDDRPYPDDILQMVMDAFALMHPPLVRLLPDADDVKIALLSRTLFSAVHGIISLGLEERMVAVPPQMLRQQIEQFVDTHLTGLGILPRS

SEQ ID NO: 8983 - protein, 434 aa, BradyrhizobiumColbertium
MFRRTATSAERHSFLHVIKLVSPFVMVVVLQAAIAGFSLEVMSSVRAYVAGEALWSRSQKNAVYFLNRYLHSGEASLFAQYQASLAVPIGDEFARWALERDPVDVEAARIGFLQGGNHPDDVPGLIWLFRYFNRVSFLQEAISEWAATDPMLLELSVFGELIRSELENGPIADDRLQFLASRLSELNSQFTVHAKRFSTVLGEGSRAIKLTLTCINFLTAATLILLLIWHTRRLVLQRQAFEHALHAEKERLAWQASHDGLTGLFNRRAFEARLQSELDDAAAGAFGLILLDLDQFKSVNDNCGHLAGDRLLCEVSRLLQQDRHAHDLVARLGGDEFCLILPRCPPYEAVDIAERLRRSLEMFNFAWGDRCFSVTASIGVACITDRNTTLEDAMRRADAACYRAKEKGRNSVQVEGGRPDVVVVAARLREPARA

SEQ ID NO: 8984 - protein, 49 aa, BradyrhizobiumColbertium
MKRFACACFTTASPSDGVFRTFQIELSNHLVYFVLQAQRFAAIVDRLGE

SEQ ID NO: 8985 - protein, 434 aa, BradyrhizobiumColbertium
MTVTDIASRTYNHSWRLDPIIRSLLDTDFYKLLMLQMIREDYPDQQVTFSVINRSRHVRLAEIIDEGELRAQLDHARTIRFTKKELIWLAGNTFYGKTHMFSADFIRWLAEFRLPEYELRKVEGQYELHFHGPWTHTTMWEIPALAIINELRSRAAMKGRGRFELDVLYARAKAKLWTKVERLRKLENLRLSDFGTRRRHGFLWQRWCVEAVKEGLGPSFIGTSNVLLAMDNDLEAIGTNAHELPMVAAALARDDEELRWAPYRILDQWRQTYGGNLLIALPDAFGTKAFLRDAPEWVADWTGFRPDSAPPIQAGEEIIAWWQRKGRNPKDKLLVFSDAMDVGSIEETYHHFAGRVRLSFGWGTNLTNDFVGCTPDGSFNLDPISLVCKVSSVDGHPAVKLSDNPEKATGLPSEIERYLRVFGDAGRVRKPVMV

SEQ ID NO: 8986 - protein, 263 aa, BradyrhizobiumColbertium
MNAQAPAALRDPRLNSPEPFTPPLGDGGFFQRDRSIHPPAHAPGYKSSVLRSPRQSLLSLENSVSEITGPVFGHNDLGPLDNDLIRNYAKDGDPIGERIIVHGRVLDETGRGVPNTLVEFWQANAGGRYRHKKDTYLAPIDPNFGGCGRALTDETGYYYFRTVKPGPYPWRNYVNSWRPAHIHFSVFGSGFAQRLITQMYFEGDPLIPICPILTTIPDKDALGRLVAPLDLNASSPFDSLAYRFDIVLRGQRSTYFENRTAGN

SEQ ID NO: 8987 - protein, 208 aa, BradyrhizobiumColbertium
MPQPLNYLKETASQTAGPYVHIGLIPAMAGFDIFERNFSNVLVTPNSKGERITLEGKVLDGTGTPLRDVLLEIWQANAAGRYNHPADRSAGALDEGFRGWGRAGSDFDSGLVTFETIKPGAITDKAGRKCAPHINVWIVARGINIGLNTRLYFSDEEAANAADPVLNLIEQPVRRKTLIATRSERAGKVVYAFTINLQGPEETVFFDV

SEQ ID NO: 8988 - protein, 278 aa, BradyrhizobiumColbertium
MYNLFGESGDLPDVVHCETIASRSVLHDWTLAVHRHARLHQVLLIERGGGEATLDGRVVPLRPMQIVNVPVGHVHGFRFVPDTQGWVLTIAAEILDEALLAAEGLRGALSRSAVVRGTPQIRATMKQIFAEHAARDFGRAHVLRALSSAMIGLVARALSGESGGNGTAESSLFRRFEALLEQHHLERWSVADYAKALSVTSTHLNRITRRATGDTASHLILNRLIREARRNLVYTNLPISTIAYALGFEDPAYFSRVYAAATGLSPRAFRAQLHGEEA

SEQ ID NO: 8989 - protein, 390 aa, BradyrhizobiumColbertium
MKVQVCIIGGGPSGLLLSQLLHLKGIDTIVLEKYSRDHVLARIRAGVLEHGFAKLMREARCGERMDREGEIHRGFEIAHDGVLSKIDLHKHSGGNSVLVYGQTELTRDLYEARDRLGGKVVHNAEDVTPHHLTSDRPYVTYRSNGETIRIDCDYIVGADGFHGVSRKSIPKDVLREYEKVYPFGWLGVLSRTKPVSPELIYVKHERGFALCSLRSQVLSRYYIQVPLTDKVEDWSDDAFWAELKRRLPEEVAGRLITGPSIEKSIAPLRSFVAEPMSYGRLFLAGDAAHIVPPTGARGLNSAASDIYYLYHALLAHYQGGDDSGLKGYSAKALARIWKAQRFSWWMTMLLHSFPDRLDYEDRLQQTELDYLLSSETAQRLLAENYVGLPF

SEQ ID NO: 8990 - protein, 716 aa, BradyrhizobiumColbertium
MRRIGRRDIVAAYLTALIAGAVFTSPPLQALQGLSLDLLTALRGKTIGDRRDPAASPVVVVAIDGETYATPPFKGSPTQTWTREIGRVLGSISEGGAKVIGYDVIFPSSIELSEIPFGDGPLGSRMRGFDRDYLIALRQISDSGKLVLGEVLSNDHPERPYQAQRVAVRNNIRALNVHTDADDVIRRMPLTFSIDGKPVPAMAVELAARALGAKVEVAPSGKAELAGYAIPGVVPNTLTLNFRSLSRDVPTYSFADLRACVEKGDHDFFRRAFEGKVVLLGTVLNFEDRKLTSMRLSGGYDGTPAPRCAIPSPAGAAQKARSDVAGVFVHAAAVRNLIERDAVTELGFPGRSLLTIAFAAVVAIAACMLAPGAALMAWFGLTLVYGAVTVSAFVHALALPLAEPALAGLAALAIMIGYRFVLADRDERFLRKSFALYLAPEVIETMVASGKMPALSGEMRNVTMFFSDLSGFSSIAETMTPGELVTLMNEYLSAMTDIIENHGGYVDKYIGDSIVAMFGAPADDPAHARNAVRAALKCHEKLAELNAAHPAFAGHDISHRIGLNSGEAVVGNIGSRRRFNYTVMSDTVNVASRLEGANKYYGTAIMASESTKAQTGDTFAWRELDAIRVQGRGEAIRVFEPLAESGAESTEQTKAAAAYAEGLACWRAREFAKAVNTFERLAESDPASAMFAKRAKALAETPPPPDWTPVNTLEGK

SEQ ID NO: 8991 - protein, 222 aa, BradyrhizobiumColbertium
MRSLIGAVLGAFCLAAPALAETPAAIVEDVQGKVDGIAFMDYVAAGKIIKLGPKASITLSYLKSCERETISEGVVLVGTEQSTVQLGEVKREKVPCDTNAAKLSERQANQSAATTFRNVRSDAKGPPSKLPTLYGVAPLVQAKSGSTLVIERTDGKEPTITVPLRSETMVRGKFYDFAKAGKSLTPGGSYLAILGAKRYAFQIDASATSSPTPIVGRLLRLE

SEQ ID NO: 8992 - protein, 377 aa, BradyrhizobiumColbertium
MLTQALLVDDSRSVLNFLKRHIEAEGLVEATAFLDPVEALACARGRVFDLVLVDYEMPHMDGISFIRSFRRLPGCADIPIAMVTSRQTDDIKMEALQAGATDFLPKKPQSLEMTVRLRNLIQLGAAVRKLNDRAAHLASEVAAATRKLGEREEEIILRLALAVEYRDNDTGEHTLRVARYSRVIAEQLGLPARLCRDIYLAAPLHDVGKVAIPDNILLKPGRLTEDEMAVIRTHAAIGERILADSSCELIRLGAQIAASHHERWDGAGYPNGLKAEAIPVAARVVAVADVFDALTTRRPYKEPMAIEMARNYLIENQGKQFDPACVQAFLSRWDEVVGIAAGETPLQKSGAPLVPDIESAAESRPVEDHSAEAAPTA

SEQ ID NO: 8993 - protein, 50 aa, BradyrhizobiumColbertium
MGQHWWRGLSSLPKTRDPAITRANLTRSKCAETVPARRRRLKFRQVVPAA

SEQ ID NO: 8994 - protein, 107 aa, BradyrhizobiumColbertium
MSLNSTEPKWSLRLPADCSIAAIRSVYDLIREAFGRQERLEIDCSNVDKADVTSIQLLLSTAKTGEAQGRPVVLTSFSQSLRNTLRRAGFASEAMIDQHFPQKKDGT

SEQ ID NO: 8995 - protein, 121 aa, BradyrhizobiumColbertium
MATILTVDDSPSIRQMIKVVLEPAGHNVIEAGDGAQGLAKAQAGKLDLVITDLNMPVMNGLELIRALRKLPNAVGMPIVFLTTESNDTVKQEAKSAGATGWITKPFKPEQLLAVVGKLVRA

SEQ ID NO: 8996 - protein, 698 aa, BradyrhizobiumColbertium
MDPTEIFRQEASELFEVLEGSLLDLGLRPDDRELVDSAFRALHTIKGSGAMFGFEKVASFTHEFETAFDRVRKGEIKPTQELISVALAAKDYIRALIEDPQSTDDIIGEAILDDLKRFVSADTPAVPVVEIAGAPPLAPVESKRAGWHLYLEFESHILRNGSNPLDLLEDLCKLGPCFVVPVTDGVPFLDEMEPEDCYLKWDVKLHAACDKDAIDDVFMFVQDEMRLTLSPLEQVEAPAPAPLLQLLDEEPAPPAETAAVVAEAAPAPVAEQPAKAEHKAEAATEPKAEIKREAPPARREDAKQERGIATVRVQAERLDELMDRVGELVIAQARLTQLAASGSDLSIKLIAEEIERLASSLRDTTMGARMVPIGSLFGRFRRLVHDLSRDLSKPVEFVTSGEDTELDKTMIECLADPLVHLIRNAIDHGIEDTATRAANGKTEQGRIELAAVHSGAQVLVTVKDNGGGLNTARIRAKAEEQGLIAAGAVLSDHEIHQFLFHPGFSTAQTISALSGRGVGMDVVKRTIENMRGSIDLSTRPGQGTTVTLRLPLTLAIIEGLLIRVGEGRYIIPLSAVEECVELTAEDERSRGRNFLNVRGNLVPFLRLREIMSSSGAPDRHQKTIIISTGETRVGLVVDQIIGNHQTVIKSLSKLHSDVTIFSGATILGDGTAALILDVAQLVTLAQSQVEKQHISEAA

SEQ ID NO: 8997 - protein, 154 aa, BradyrhizobiumColbertium
MMNEGVAGEHQSGAMQVVMIGLGEEKFALDAGLVREIIDPVPVTKVAGARAFVPSVINVRGNVIPLADLRIRFGMPQLDDSADTRIVVIELDLDGEPVLVGVTADKVYEVTEISQADVQQTPRVGMHWKPEFIRFIAKWREEFVIVPNMERILN

SEQ ID NO: 8998 - protein, 694 aa, BradyrhizobiumColbertium
MRFTIKAKLACAFGVIILLSGVTGGLAYLKLAQQVEVSADFVVRAARIDKAGELQNNVLYQTRAERDIILAASDAEMLKLVDEIKKHRSEATRLLSEIKATASDAGKHMLDKFSAAYDKMNAGEDAMLSLALKNSNYRGAQLWTSDGAPVLKQWNDVLDASLAELNRLTASPEKSNALLAIYAIRLEGVRLQRQVALSFSASSMEELNAAIKAIADEQEALKVALKQGAAPMSAVGLSSTNIVSYTDRLFNVVSRVVEIVKEGGNIKASAMAAVEGRANAAEAISTSGEYISLVKKQMAEMSAASAQEAGQAKILLVSVIGLSLLVGATSAIMMALSISRGLSRAVNLAGAVANGDLSQTISVKSNDEIGDLVRSLNAMVEKLRQVVSEALTAAQNVSAGSQELSASAEQLSQGATEQASSAEEASSSMEEMASNVKQNADNANQTEKIAAQSARDAESSGSAVGRAVHAMQTIAEKITIVQEIARQTDLLALNAAVEAARAGEHGKGFAVVASEVRKLAERSQAAAAEIGTLSTETVKVAQEAGEMLSKLVPDIKKTAELVQEITAACREQDVGSAQINQAIQQLDKVGQQNASASEQVSSTSEELASQAEQLQSTISFFRIDDAARNSKAAPQEVDRAVGQLRAKAAKMAAADRRGRAPVAKPARALKVAGGGGFAFDMDEVGDDRDAEFQR

SEQ ID NO: 8999 - protein, 639 aa, BradyrhizobiumColbertium
MRFTVKAKLASAFGLVIVLSMIAGGVAYMKFGDMMATADSMVLRAKRMEKATQIERDILLQLRAEKNAILATGADVEQFAADAAKRREHATKTRDEVHALASEAGRKLLDNFAATYAKMNAYQDETIRLARTDKAKATERSMNEGRKVVADALESMSAYVENTKTQMSDQAVHAQEEGQKAQFMLMTLIGVSLVIAIGAALWISISISRALGGAVGLANAVAMGDLSQNVEVKSNDEVGDLIKSLNAMTANLNATAAIANEVAQGNLAVEAKRLSDKDTLGLALERMIASLNASAEVANEIARGNLTVEAKRISDKDKLGVALETMVQRLRQIVSEALTAAQNVSAGSQELSASAEQLSQGATEQASSAEEASSSMEEMASNVKQNADNANQTERIAAQSAKDAEASGAAVGRAVQAMQTIAEKITIVQEIARQTDLLALNAAVEAARAGEHGKGFAVVASEVRKLAERSQAAAAEIGTLSTESVKVAQEAGGMLSKLVPDIKKTAELVQEITAACREQDVGAAQINQAIQQLDKVGQQNASASEQVSSTSEELASQAEQLQSTISFFRIEEGGKAKAAPQEIEHAVGRLRAKAAKMAAADGGARRPAVRPARALKVGGGGFAFEMDDADDDRDAEFQR

SEQ ID NO: 9000 - protein, 162 aa, BradyrhizobiumColbertium
MAATSQYLTLGLAGETFGISIRNVREILDMRPISRLPHAPSFLLGMIDVRGSGYPIVDLRTKLGLPNVAATEATRIIILDVPMKDRLVGVGFVADCVFEVTDIDEQAIEPIPEVGGKWQSDYAAGIGRKGEKFVVIFDLAKLMANDEVPEVRDTVPDAFCAA

SEQ ID NO: 9001 - protein, 722 aa, BradyrhizobiumColbertium
MRFTVKAKLASAFGAVIILSMITGGVAYKSLSTLTEQQERIVDQAYRTKLAADVMSAIQAQQRAESRMIQAVSDKDTQDNYNAMLTRREKMLKLNGELYSKASEAGRRLLDQAAGPIKRMNELEDQAAKFALLNSNHRAAQLWKSEGQVAVKNLDAMLDAALAELGGNGSESQRAAALLTARAEVARLARSIVLTYSTSTAQEADADVKETMQRLADLKASVAQASQPGATNAINAQLDRLTNVVENVTRLALEAGNLKAAAIASGEGRKAFNEALDAIEQYVQRNEKQMAEVAEEGARDAAFAKMLLISMICAALLIAIAAATWIALNISRGLARAVGLANAVAVGDLGQKISVSSNDEVGDLVSSLNAMTANLNATAAVANEIAQGNLTVEAKPLSEKDTLGLALERMIEKLRQIVSEALTAAQNVSAGSQELSASAEQLSQGATEQASSAEEASSSMEEMAANVKQNADNASQTEKIAAQSAKDAEASGAAVGRAVSAMQTIAEKITIVQEIARQTDLLALNAAVEAARAGEHGKGFAVVASEVRKLAERSQAAAAEIGTLSTDTVKVAQEAGAMLSKLVPDIKKTAELVEEITAACREQDVGSAQINQAIQQLDKVGQQNASASEQVSSTSEELASQAEQLQSTIAYFRIDHGSIKQASEPIDRAVNQLRAKAATMAAVERPARKPQAKPARAVKAAGGGFAFDLNEGEDDRDADFQR

SEQ ID NO: 9002 - protein, 284 aa, BradyrhizobiumColbertium
MMPAIQDTAVHLSDRHFRTIAELIEGQVGIKLPQGKRLMLEGRLHKRVRALNFSDLNEYVESLFEGDHFDTELTHLIDVVTTNKTDFFREPQHFTFLRDVAVPALLKSHGRKNANLKVWSSASSTGMEAYTAAMVLDDMTRNGSRFQYRILGTDISTAVLRLAKTAIYTRDVLAPVPEPFVKRYFLSSRNKASGEVRVVPELRRMTHFMRMNLMDKSYPVDRDVDIIFCRNVLIYFERETQRKVVEQLCSHLRPGGYLLVGHSESMIHSAVPGLKQVQPTIFQV

SEQ ID NO: 9003 - protein, 363 aa, BradyrhizobiumColbertium
MPKEKVRVLIVDDSASVRQILLTILSEDPEIEVMATASDPFVAAKRLEKELPDVIILDLEMPRMDGMTFLRKIMAQRPIPVIICSSLTEEGSSVMFEAFEAGAVDIVPKPKIDTRQALLECSTRLREAVKSAARARVRPRAARREIEKKLTADAIIPPPVQGKVRPTTERIVCIGASTGGTEALNDVLEMLPAHCPPIVIVQHMPAGFTAAFARRLDSVCQIRVKEAEDGEPVLPGCAYIAPGARHMLLQRIGVRYQIAIKDGPPVSRHRPSVDVLFRSAAQHAGANALGVIMTGMGDDGARGMLEMRKLGASTRAQDEESSVVFGMPKEAIAHGGVEKVVSLHQIPREIMLWYQAGHPAVAG

SEQ ID NO: 9004 - protein, 575 aa, BradyrhizobiumColbertium
MSVIPASTLTEAIAAIENVSSRIEDVFARVGHELGRGHLIFKELNQGLAALSSELSGAEIEGAATALQEIAARLSELAQALPAETALLETIGKSTAEASALLKPLFKHIQMITIIARSARIEAAALDGDREGFLAFTQEAYDLGKAVQGAIEGCARDQQRLSEAVATACGRQRDFESRYRNQLAAESVELGSAYSGLRDQRSNSGHLADLASSSTRKIAEAVGSAIISLQAGDSTRQRLEHVSHGLGLASGRAPSLVPGLMAGEDGARAICQLQAAQLRDAQREFSGDIGQIVRALTAILHDAGSVVGHGRTLIGGEDGRSSSFLARIKQTLAHASNLITTCEGAGRSVDEALAIVEDTLMKFRQAIAGLAEATVDITLIGMNAGLKASHLGSRGSAFVVIANELKATADQVSAGAGRLRPVLDAIERSAGELKILRVQGDPTQLAKLEPQILQALREVEAGNERLGKLMGRLVNEGAEFEGLITSAQNLMTTLGEGSAALPAAAARLETASAGAQKPQPQAQDEAMLDELFARYTMERERDVHRQFLQTLGLTSVATTRRVEVAETADDGIELF

SEQ ID NO: 9005 - protein, 150 aa, BradyrhizobiumColbertium
MLKEGKYAAWFRTAQAQGTGIVNLAEGRISGSDSFFTYDGSYQFDDDRRFTAVLTTRRHAEGPPTVFGLDEVEVELSGVYTGAMATCSGTARQAPGVNFEATLIYSQEDAPAAIDARSAVVKLKADKLPKRLDGRSRGRHAFVAPKTPVS

SEQ ID NO: 9006 - protein, 51 aa, BradyrhizobiumColbertium
MISVAIGLELAQLLIPDGVHAFTDVLQKTAGGIMGVLVAQTILSFLPRPPA

SEQ ID NO: 9007 - protein, 59 aa, BradyrhizobiumColbertium
MARKPWSFKEDRRLMELAKSSTTLENAAKQLGRSPDAIKRMALRLGLSLKSREAGTKKG

SEQ ID NO: 9008 - protein, 62 aa, BradyrhizobiumColbertium
MTIEETREFEGLDRAHADLSACFVEEAAIASFGLVGQRWSALYDKHESAWQNWIANGPVCAR

SEQ ID NO: 9009 - protein, 57 aa, BradyrhizobiumColbertium
MLICFDIPVGRADTKFGHSNTPKEILAAGSQEQLEHGRHFFRGQRPENIALLWLTKI

SEQ ID NO: 9010 - protein, 101 aa, BradyrhizobiumColbertium
MAAIEDALQAAERERAGLGRRVDDVLARAAVTLGNGDDEYLHREPLDSHHQDLFDAEIVNGQKRLRELGAAIAHFRFIKAAMQSRFPDYRSRPCGGDINSQ

SEQ ID NO: 9011 - protein, 38 aa, BradyrhizobiumColbertium
MARSRGSAPRAELSYRFRVSFGNRDDRASLWALDRRLA

SEQ ID NO: 9012 - protein, 406 aa, BradyrhizobiumColbertium
MVTETRKSSIPISIHFAALILVPVMTTGCAGFIPMDAPNSAAVHENAAIVTEPSAPLPYILMPINPAILNASNAITNATGMSFASIPGGHYREAPVSVGDILTVTVFEAQAGGLFIPGEAGVRAGNFVDIPRQQVDQSGSINIPYAGSIKVAGQTPRAVGNIIRERLKERAIDPQVVVAVAEQRGNQVSVLGEVNSPSRFPIDPGGLHLLAAIARAGGPKFPDYEVTVTLKRRNRTYTQYVSSVVQRPSEDVLLSPGDVVFLTRVPRVFMAFGSTPTPGSIGGTNNRRFTFENAEMSLAEALAKAGGLDGSRANSRSVFLYRFEPKRLLESVGLDVAGFPTVQVPAVYKFDMSKPDGWFQADSFRMRDHDVISVAESPSTEFIKLMNPLDAATTNAANINAIVTSR

SEQ ID NO: 9013 - protein, 479 aa, BradyrhizobiumColbertium
MLVAGVIIAVSSFDDLVVDILYWTGRLFGTARTRDLPDVEILEQLPERPIAIMIPCWKEHDVIFSMLSSNSRLLRYRQAHYFVGVYLNDPQTQDEIRKAQGLYPNIHMVLVPRDGPTSKADCLNQIVSDIFTFEAEQSIRFAGVVMHDSEDLIHPLELKLFNQLVELYDFVQLPVYSFSRPILSLIGGIYMDEFAEMHTKDLEVRQRISGVIPCAGVSACFSREAMLHLVDQNHGEAFRVASFTEDYDIAFRVSELGFKSAFIAYPAKYAIDIDIDTGNPGVLHRTLPIATREFFPSGLEAAYRQRARWLLGIVFQGTEEIGWKGKLGTKYFLARDRKGVITSPAIMLAYFSMANLVLFEVFRSYLDPTMTLSYTLLSSDWTRTLFWWTFGFLVWRLLNRMIFTGMIYNMRHAFMSAPRLIVGNFVNFFATWRAVRIYVGHRISGKPLVWDKTSHSYPVQIGELELPSESAQVSGASVS

SEQ ID NO: 9014 - protein, 410 aa, BradyrhizobiumColbertium
MRGTPTALARRFRASDMHHPHRDEFSRSIPIRAFLIVIGTRPEVIKLAPLVRRLRGTGWASVKIVTSGQQSDLLDQTLVELGLAADIAIRHRGAPHGPAQTASRLLGRLDRILENERPDCVIAQGDTTTAYAASVAAFYRKIPFVHIEAGLRTPELDAPFPEEFHRRAIAVSTALHFAPTTAAAQNLIRENVPKDKVFVSGNTVIDSLLEIAATKLPPPPEFQARRTILLTAHRRENFGARLRDALTAVRAFVDLTPDVGVYFPVHPNPNAREAAEVLTGHPRIHLVEPLNYRAMVAAIQNAWCVVTDSGGLQEEAPALAKPVLVLRDVTERPEAVASGVVKLVGTSREAVFKSLYELHKTPAEYARMARPVFPYGDGHASRRIVDVLYRHFVTDRDSNPAMIAPLQHAS

SEQ ID NO: 9015 - protein, 341 aa, BradyrhizobiumColbertium
MVYREAPKSFLVSFLFTARRLLGIATFALVLALLAPKLFLFFDNPKGASFSSALLETRDVILHKSAPLLHRYIPTNIAGADRSDWILIALAVLTTFLVGSLAQSCQQSLNRRVLRASAQEWRKNEGVKPGSALDKELESTLRVAESGNAVNRQDLLRVFAETKKKLDSFGREVAFLAVDVVGSAQMKNGEDPASVQYDFAEYRKLVERIFRARGVLKTAWTPDGVMACFAHVEDACQAGKDVIKSLKTFNRDVKISKADFSVRCGVNAGLVYFDDATPLETISDRVIDVAGHMQKHAEPNTVLIARKVIEPLRQLEEFTHTSQIIDGYEASVWRDPETSSR

SEQ ID NO: 9016 - protein, 487 aa, BradyrhizobiumColbertium
MSIGSDIREKARQVGQTQGERGTFWSSDLIPYVLSTSDALVIILASIGGGLVYHLVAGSPVPNLLPCCAVGLMAAFIHILRMSGMGYYDLPDSAKPGVEITGILVCWFSTGVLLAFFAFLLKIGGDYLRGAVFAFYLVTPIGLLAVRKATKTHLASAVDRGGIRRRDAVLVGDRNELVALAPRDRLALFGATDVKEFRLSSEIDSEHRWAADEAVFDQLGAFVRRNNCREVLLVLPWNDDARIEFARDKVKNLPVSSRLLPDRHVRSLSNFVSSARQRVLAIEIQRAPLSAIERVVKRAMDILVAGPALFALLPIFVLTAVAIKLDSSGPVIFRQRRKGFNGKEFVMLKFRTMRVQEDGPVVVQATREDPRVTSIGRFLRATSIDELPQLLNVLRGEMSLIGPRPHALAHDSYFEKILEDYAFRHHVKPGLTGWAQCNGSRGATPTVEHIAERVKLDLWYVNNWSLWLDVQILIKTIFEVARKRNAY

SEQ ID NO: 9017 - protein, 286 aa, BradyrhizobiumColbertium
MNVDIDALRKHIGTKIVEHDVATQAPLRGLAVTFDRQDQIPGPGDPIQPGWHLVYFMPLSPKATLGDDGLPISGGVLPPMPFPRRMYAGTELTFHDPIRLGDALKRETEFTDVSLRSGGTGALIFATQTRRIFTPRGLSIVEQNHTVFREEVKPGEKSVTPKRNKPPADTPWRRTITTDPVSLFRYSALTFNPHRIHYDRDYAMRVEGYPGLVVHGPYSQQCLIDLARDHAPEKTLKSFSQRARAPLFDTAPFSVVGRAVDGEKGAELWALTPEGTIAMEVTIRYA

SEQ ID NO: 9018 - protein, 141 aa, BradyrhizobiumColbertium
MIAMTAETYLKPVPEPTHESKPYWDGLQNGRLLLQKCGQCGKIRHYPRPVCDVCYSFEVKWIEASGRGTVHSWTITHHAFNPGFKLDLPYILATIDLEEGVRMQVPLRGARETDVKLGLPVRVIFEQAKPDLVTPACVTAS

SEQ ID NO: 9019 - protein, 383 aa, BradyrhizobiumColbertium
MSLKEKAAITGVGETEYTRMSGKSILALQLEASLNAIADAGLSPKEIDGIIPYSNSPVVAEDFVTNFGISDLRFSATAPLGGASCVAAIQCALLAISGGVCSNVLIPIGRNGSSAGRIGTRVQQMPQFKVVGEHEMPVGAIAPAQLYAPMARRHMELFGTTSSQLGEIAVSTRHNAILNGHGMMTKPLTLEDHQTSRMISDPLRLYDCSLESDGGAAIVVSGADRANDLRKPPVYVMGVAEGHPDSPSVITQRPDMTRLGIAKAAPKAFAMAGVSPGDIDVAEIYDCFTYIVLCQLEDLGFCKKGEGGPFVASGAIRLGGKLPINTHGGLLSQAHMVGMNHIVELVRQLRGEAGKAQVRGAEIGLVTGYGDMGDGSVAIMRKG

SEQ ID NO: 9020 - protein, 405 aa, BradyrhizobiumColbertium
MDLRYSARHRALQEEARGFVKKYGHLSPKTGGGRKRPDARALDWQKLLLERGYFARNIPREYGGFGLPVDILELAIIAEEFSNAGVSPGIMNQGISMLVPTLLEVGTKEQCIQWIGPTIRGDIIWCQGYSEPGSGSDLAAAKTSARVEDSQFIVNGQKIWTSSAHYADMMFLLCRTELDKSKHDGLSYLLVPMNAPGIEVRPLVTMTGRAEFNETFFTDVRVPTDQIVMGRGDGWHVANVTLKYERMLLGDANKLTYRLARAVELMKKTTLDGCRFIDIPEYRERLLKLQGEVMASKYHGLRLMTEQAKGEDSGVKRLIVKLNGTMIAYRLSSLVVDVLGAAGLAYEPVGEAAEDDEATTWQIDNMYDIGLIIGGGSSNIQKNIIGERGLGLPREPKSAPPTVRG

SEQ ID NO: 9021 - protein, 364 aa, BradyrhizobiumColbertium
MEFGLSEEQLMLADSLRGFLDQRLPMSKLRKIAEGGLGFDGELWSGLTEQGIMGIMVPEDFGGLGLSLLDAAVAAEALGYHATPTPFAAALVMAPLALIASGDRAQQKAWLPRIASGEVRIGVGFAGMSGQTGEAAVRLAGNMLSGCVTGVLDGGNATHFIVYLDDGRAGLFAAVGEPGVSVSTHRSLDRTRPLTALVLHDAGVEILGAANDPKAAATAVLDAGRVMLAADTLGAAQSMFDKALLYSKERVQFDRVIGSFQAVKHTLADIITMLEPCRSLVWYAAHAQDGSPEEARVAALQAKAHLGDAGREISRLATEIHGGIGFTDLLGLHYWFKRIAFNRQLLGAPERCRHQAAVAQEWVS

SEQ ID NO: 9022 - protein, 318 aa, BradyrhizobiumColbertium
MDDTNFAGPPVGGRRLTVVFSQLQHAIAAEDYGSFRQAAHALSIKQSTLSRSVQLLEHSIGVVIFERSSGGVRATPAGRHFLRMTRSILEQVEALTASTRAHGSGEAGRLVIGFCTSLTAGNLRATLLDFKKLFPHVELVTVERSRTRLTTALRNSVIDVSILTGDPQALDSKTTPLWSERILAVLPSEHPLAAREVIYWTDLRNQTVLLSHYDPGRELEDLLNAKLISPDDRPRIERHDVSRGVIKSLIAVGFGISLVLESDIGANFSGLVYRELRDGTGSSRIGFSAVWRADNENPALQNLLKLLGERYPLGPVAP

SEQ ID NO: 9023 - protein, 80 aa, BradyrhizobiumColbertium
MAKLKLGAIADDKPVKLTIELPAAVHRDLLAYAEILARESGQSAYDPVKLIAPMLARFMATDRAFARSRKTPYGATGPRG

SEQ ID NO: 9024 - protein, 396 aa, BradyrhizobiumColbertium
MSNTEQEATNRTGAPPALETETSSFRLRPERPHVTRLSRKALIGGTALVLILLTAAVFLALQTREKRAPAPDELYSTDHHNVADKLASLPKDYGSIPPDVPRLGPPLPGDLGRPIVAAQAQNGPLAVDAEQQRASQESEAARTSKVFANTVTRPSPGQAAPAETSPTGATSTDDAFAQNGQDRKLAFVNALIDRRTTSPDRLAKPASPFVIQAGTIIPAALITGIRSDLPGQIIAQVTENIFDTPTGRARLVPQGARLIGLYDSRVSFGQSRVLLVWTRLIMPNGRSIVLERQTGADTAGYSGLEDEVDNHWKELLGAAALSTLLGVGSELGSGADAGSSTAVLQALRHGAANSLNQTGQQVVRRNLNIQPTLTIRPGFPVRVIVNRDLMLEPYKG

SEQ ID NO: 9025 - protein, 123 aa, BradyrhizobiumColbertium
MPSFSWFYPEDRAARGRALPPKPFIPDPAQRRYRYTFEGDNPPWRPVSAFDDGRKVYIEFSPGIGQGEMPPLFVINSDGKPGLVNYRAFGNVLIVDRLFAAAELRLGGEEQQKVRIIRTDGRS

SEQ ID NO: 9026 - protein, 225 aa, BradyrhizobiumColbertium
MFKRSAVHYGRTPQPVTPYQKAAQVWDDRIGSARVQARNWRLMAFGCLFLSAGFAAALVWQSAQGSITPWVVEVDRLGEAKAVAPANSTYKATDPQIGFHLARFIEHVRGLPMDAIVLREDWLRAYDFTTDRGAAALNDYARNNDPFTKVGKIQVAVEVSSVIRASPDSFRIAWIERRYENGQLAATERWSAIVSVVVEPPRDIDRLRKNPLGIYVNAINWSKEF

SEQ ID NO: 9027 - protein, 409 aa, BradyrhizobiumColbertium
MGGTGIIDQFLETFTRYIDSGFGLVGNEVGHLASTLVAIDITLAGLFWVWSSDEDMIARLVKKTLFVGVFAFLIGNWNGLARIVFESFASLGLRASGTGLSSADFLRPGRIAQVGLDAGRPILESISGLMGYVSFFENFVQIVVLLFAWIVVLLTFFILAIQLFITLIEFKLTTLAGFVLIPFGLFGKTAFAAERVLGNVISSGVKVLVLAVIVGIGSTLFSQFTSGSGGNQPTIENAMALVLAALSLLGLGIFGPGIANGIVSGGPQLGAGAAVGTTMAAGGVVAAGAALAAGGAALTGSMVGGAARGGSALIGGAASAFRTGAQTGEAGATSAASPLRSLAARFGRSNAAGDEAGGADASSGGAPAWVRRMKRGQAVSHGVSATTQALRSGDRGGGGASVDLKDSER

SEQ ID NO: 9028 - protein, 245 aa, BradyrhizobiumColbertium
MNRFRRVAAAGVVALAVLVGSKPAFAQLVVFDPNNYAQNVLTAARALQQINNQITSLQNQAQMLVNQARNLASLPYSSLQQLEQSIQRTQQLLAQAQRISFDIQQIDRAFSTTYAPASPDATDQALIANAQVRWQNSVAGFQDAMRVQATVVSNLDTNRAQMSTLVTASQGATGALQASQAANQLLALQAQQLADLTATVAAQGRAQNLESAQRTAAQDQGREQLRRFLTQSRGYQPTIVQMFHQ

SEQ ID NO: 9029 - protein, 813 aa, BradyrhizobiumColbertium
MMNLAEYRSSNARLADFLPWAALVDEGIVLNKDGSFQRTAKFRGPDLDSAVPAELVAVAGRLNNALRRLGSGWALFVEAQRHAAGAYPPNTFPDVASALVDAERRAQFEEAGAHYESSYYLTLVYLPPAEGAALAERLLYEGSNRPVGADAREVLAGFVDRTNRVLQLIESFMPKCGWLDDQETLTYLHSTISTKRHRVRVPEIPMYLDALLADQPLTGGLEPMLGTAHLRVLTVVGFPTATVPGILDDLNRLAFPYRWSTRALMLDRTDAVKLVTRIRRQWFAKRKSVAAILKEVMTNEASALLDTDAHNKAIDADAALQELGTDQIGEAFVTATVTVWDGDPRAADEKLRLVEKVIQGRDFTCMIETVNAVEAWLGSLPGHVYANVRQPPISTLNLAHMIPLSAVWAGEVRDHHLKAPPLFFARTEGSTPFRFSLHVGDVGHTLVVGPTGAGKSVLLALMALQFRRYPDGQVFAFDFGRSMRAAALAMDGDWHDLGGAVAGETDGFMSLQPLADIDDVSERGWAAQWIASILSREKIDVTPETKDHVWTALTSLASAPHEERTLTGLSVLLQSNILKRALQPYCLGGPYDRLLDAENEHLGSSSVQVFETDGLIGTAVAPAVLAYLFHRIEGRFDGRPTLLIIDEGWLALDDADFAGKLREWLKTLRKKNASVVFATQSLADIDGSAIAPAIIESCPTRILLPNDRAIEPQIMTIYRRFGLNDRQIEILARAIPKRDYYCQSRRGDRLFELGLGEVALALTAASSKADQALIEQVLAEHGRENFVSGWLKARDVAWATDLIPHLAELGASK

SEQ ID NO: 9030 - protein, 87 aa, BradyrhizobiumColbertium
MDEQIPGFVAPVHRALTEPILMGGAPRAVAILNGTLAAALGLGLRLWLAGLLLWFIGHMAAVWAAKRDPEFVEVTRRHIRIPGHLST

SEQ ID NO: 9031 - protein, 108 aa, BradyrhizobiumColbertium
MNCRSPLGRRAVTTASIAAFCLFASPAWSAGSNMPWEQPLNQILQSVEGPVAKIVAVIIIIVTGLSLAFGDTSGGFRRLVQIVFGLSIAFAASSFFLSFFSFGGGVVI

SEQ ID NO: 9032 - protein, 325 aa, BradyrhizobiumColbertium
MGTVVTIHSIQSEAISRGARMLRTALGPAISRFLEDPSVVEVMLNPDGRLWIDRLSSGLTDTGEILSAPDGERIIRLVAHHVGGEVHAGAPRVSAELPETGERFEGLLPPVVAAPAFAIRKPAVAIFTLDDYVLAGIMTSEQAIALRQAVSSRKNILVAGGTSTGKTTLTNALLAEVAKTSDRIVLIEDTRELQCKAPNLVALRTRDGVVSLSDLVRSSLRLRPDRIPIGEVRGAEALDLLKAWGTGHPGGIGTIHAGSALGALRRLEQLIQEAVVTVPRALIAETVNVIAVLAGRGADRRLSELAHVAGLGTSGDYSLSASGDQ

SEQ ID NO: 9033 - protein, 363 aa, BradyrhizobiumColbertium
MLLVMAAGGATLFGTATGFSELLVARAMIGLGVAASLMAGLKAVVIWFPRERIALVNGCMIMLGSLGAVTATAPTDWVLDWIGWRGLFEVLTFATIAVAAFTYFGVPESSSNEAASTTSRLTLWSVYSDARFLRLAPLSAACIGSSWALQSLWAAPWLTDVEGLDRHSLMTQLFIMALAISFGALLLGVMADRLRRRGTTTEILIAGMAGVFIAAELALILRVPMPSLLPWCAVSVMGAATVLSYAMIADYFPQGLAARANGALNLAHFGSAFAVQYGIGLVVGQWAPQDGHYPVMAYQFAFGLSAAFQAAALLWFAVPWLRTLSRHLYASLTRPFAERDSQAEFVMVPVEGSILEAREAVEW

SEQ ID NO: 9034 - protein, 221 aa, BradyrhizobiumColbertium
MQLHGEPELEASQAAVAKSPPHKRNSAATRKVTVRITEKIHEQLEAATERPGVGKSMIVEAALAQFLNPRPPENAVHDGFDDIHARFDSLERNLRTIAETVALHARYHLAVMPPLSQQQQREACQLGDERFKVLAEQVDQRVQQDRSLIQETIDRLNATRFNGLKSIIDQDETVDLKPTDTPNGAGLRGDANIKQESSAAAQEGGSNSNFRHLPNAFCWPA

SEQ ID NO: 9035 - protein, 153 aa, BradyrhizobiumColbertium
MSMKKAQLSIYLDPETFAGLEAFAKRHSKSKSLVAEAAIASFLSPDESDRREAAIAKRLDRIVRVLERLERNDTVTLETIALFIRFWLTSTPALPEQSSPAARAKGAERYDRFVEALGRRLSSGSTMLKEVSIESHDGENAVRGNDDAGAGAS

SEQ ID NO: 9036 - protein, 369 aa, BradyrhizobiumColbertium
MLATPHLGERVHPVVASASRELLNKSENERSGVLSTTMSFLGLYRDPVVAKVTGRSDWRIRDLVDGPRPISLFLVVPPSDIARTKPLMRLVLNQIGRRLTESLDTDRRRQKLLLMLDEFAALGRLDFFESQLAFMAGYGIRSFLITQSLNQLERAYGPNHAILDNCHIRVAFSTNDERTAKRVSDALGTATEMRAMKNYAGHRLSPWLGHLMVSRQETSRPLLTPGEVMQLSPNEAIVMVSGVHPVRASKVRYYEDTQLKRRVLNPSRANPVALVAQADDWSGRPQIPPSAELLAKVTRRSRDPNGGIRREPELPQHEDVVIGAPLAENEFDAAPDDGDTDAVQARALSRSMQGIARSVTIDPEDPMDL

SEQ ID NO: 9037 - protein, 590 aa, BradyrhizobiumColbertium
MALFLLGFRHLAAGKMSRNDDFRIRPGRIRSTRAPKAKSFLAQALRAAQKAGGLSHGGVRRSGSFGRGRAASVAAARLLNNRARGAMVKARVVRRMRSPGALRAHIGYLKRDGVTRDGSPGELFDAAGDDADGRAFAERCDGDRHHFRFIVSPDDATELESLRSFTRELMDQASRDLGTRLDWVAVDHWNTEHPHIHILVRGRADDGSDLVISRDYIGTGLRARAGDLVTRELGPRSELEIRRGLEAEVTSERWTRLDRVLAREAGRAEGVVDLRPERDVARDPLREIRIGRMRTLERLGLAEPAGPARWVLAADAEQRLRALGERGDIIKRLHKSLAKDGASRAPSSWALEGEGHGGPVIGRLIARGLDDELRGTAFAVVDGIDGRVHHLKLPDIDTAGDGPIGGIVELRRFEDARGRPRIALAVRSDLNLDQQVVAEGATWLDRRLVAREPADLSRAGFGAEVRRALDRRIDALAERGLVRRDGDKVIIGRNLISTLRTRELDSAGKRLAEETGLAHMPAEAGQSVSGVYRRRLSLASGRFAMIDNGLGFQLVPWIPSLERELGRQVSGIAGPGGVDWSFGRKRDLSL

SEQ ID NO: 9038 - protein, 103 aa, BradyrhizobiumColbertium
MTGRMTTILATFGSVALVLAGSEKETPSYIWNASESVPIGLYRLQPVDRLSVTDLVAIRPPEPLGTFLDFNGYLPIGVPMLKRILALWTDRLQNRAQNCCRRR

SEQ ID NO: 9039 - protein, 102 aa, BradyrhizobiumColbertium
MNDVTTVELLWLEKRIENRIRFGHPISEKIVDLHRRVLSFAPGSIFAFVRWTSNDFGTVLSRIDILRAAAPASATQPSLGSTLAARVCCDYLAGQRSSAFCS

SEQ ID NO: 9040 - protein, 300 aa, BradyrhizobiumColbertium
MSESNFSARGRRRSERDQLDLFRALPGDLAARDAQDLMAYPFFSLAKSRRIIPIDFRVGTILIRVEAVPEHGMATIWDADVLIWAASQIVEARDAGLKTSRLMAATPYEILTFVGRGTSVRDYDRLKAALDRLQSTTVVTSIRQPTERRRHRFSWINEWKETADCHGKPRGLELILPDWFYTGVLNDALVLTIDRGYFDLTGGLERWLYRLVRKHGGRQGGGWSFDVVHLHAKSGSLSPVKHFAYDLRQIVRRQTLPGYELIITQDPNGAERLNFAPTAIDPLTERLRKRGLVPHPGEKL

SEQ ID NO: 9041 - protein, 92 aa, BradyrhizobiumColbertium
MGDPTAGLPPRYLRTAEAARFLSLSGRTLEKHRTYGTGPAYRKIGGRVVYALDDLKAWADRGTKTSTSDPGAGTVLPAKRHAPVPYAGKERR

SEQ ID NO: 9042 - protein, 133 aa, BradyrhizobiumColbertium
MQKVEHRVWFKEAPVVAGTYAVELPLDPDFEFRADAGKRLWRALNGRPPGPPLHALSTHRRRRLALALRALDARTDGSTYREIAEVLFGAGRISERDWKTHDLRNRTIRLVQSGLALMRGGYRALLRPTSRKK

SEQ ID NO: 9043 - protein, 74 aa, BradyrhizobiumColbertium
MYDEEHVITYLRMLDADAEGADWREVAQLVLKIDPELEHDRARRAFDTHLARAKWMTEKGYRHLLRGGASNPNL

SEQ ID NO: 9044 - protein, 39 aa, BradyrhizobiumColbertium
MIADTVLTPPRTIAFPMRQVAISPCCIDAGVPVTAAREY

SEQ ID NO: 9045 - protein, 375 aa, BradyrhizobiumColbertium
MILTETQISIRKTAHAFAQARLAPGAAIRDRERAFPRDELKAIAELGFLGMLVPEAYGGSEAGAIAFALVLEEVAAADGACSTIVAVHSSVGCMPILKFGTEAQKREFLPKLASGEYICGFALTEPQAGSDAAAIRTRARRDGDYYIISGAKQFITSGKNGQIVIAFAVTDPSAGKKGISAFIVPTDTPGYEVVRVEEKLGQHSSDTCQLAFNDMRIHKSLRLGAEGEGLKIALSNLEGGRIGIAMQAVGMARAAFEAARSYAKERVTFGKPIIEHQAVAFRLADMATRIEAARHMVLHAAELREAEMPCLTEASMAKLFATEMAEQVCSAAIQIHGGYGYLADFPVERIYRDVRVCQIYEGTSDVQRIVIARAL

SEQ ID NO: 9046 - protein, 396 aa, BradyrhizobiumColbertium
MTASDPIVIVGAARTPMGGLQGDFKDVNASSLGATAIRAALERAGLTADQVDEVVFGCVLPAGQGQAPARQAGLAAGLPLSAGATTVNKMCGSGMKAAMFAHDLLHAGSAHVVVAGGMESMTNAPYLLDRARAGYRMGHGRVIDHMFLDGLEDAYDKGRLMGTFAEDCAEAYRFTREAQDAFAILSLTKAQNAISDGSFSSEIVPVVAKTGKSEVAVSIDEQPPKAKFDKIQTLKPAFREGGTVTAANSSSISDGAAALVMMRRSDAEKRGLAPRAVLVGHATHAQAPNLFTTAPIGAMEKLAARTGWSLKGVDLFEINEAFAVVPMAAMRDLDLPADKVNVHGGACALGHPIGASGTRVMVTLLAALEKYGLKRGIASLCIGGGEATAVAIERLS

SEQ ID NO: 9047 - protein, 255 aa, BradyrhizobiumColbertium
MQIKDRVFLVTGAGSGLGAAVVRMLVGQSAKVVGVDINATALAESAVTFGPNFKGQKADVTSEEGGLAAVKLAKEAFGHVHGLVNCAGVAPGEKIVGRDGPHRLDSYARAIAINLIGTFNMLRLAADAIAKEEPNGEGERGVIINTASIAAFDGQIGQAAYASSKGGVAALTLPAARELARFGIRVVTIAPGIFETPMMAGLPQDVQDSLGKSVPFPPRLGRPPEYAALARHIIENTMLNGEVVRLDGALRMAPR

SEQ ID NO: 9048 - protein, 560 aa, BradyrhizobiumColbertium
MADPAYPAAFGSFDYANAARNFRLDALAAQLEGGHEAGINACIECCDRHVHKGGVILDWESADGRKASYTFTQMKELSARFANFLVAQGIQPGDVVAGLLPRTPELLITILGTWRAGAVYQPLFTAFGPKAIEHRLRTSSAKLVVTDLANRPKLDEVEERPRVTLVTKPGEATVNAADLDFHAELARQDAEFEPVLRKGSDLFLMMSTSGTTGLPKGVPVPLNALLAFYVYMRDAVDLRPDDKFWNIADPGWAYGLYYAVTGPLLLGCATTFYDGPFSAASTYDIIKRHGITNLAGAPTAYRLLIAAGPEAAEPVRGKLRVVSSAGEPLNPEVIRWFAEHLGAPIHDHYGQTELGMVVNNHHRLKHLVHPGSAGFAMPGYRVAVLNEEGQELPPNIPGILAVDIANSPLLWFTGYWQQTTPAISGGYYLTGDTVELESDGRISFVGRADDVITSSGYRIGPFDVESALIEHPDVIEAAVIGKPDPQRTELVKAFIILRKGTEPTEALAEELRQYVRHRLSAHAYPREIEFAEELPKTPSGKLQRFLLRNREAEKQKDATA

SEQ ID NO: 9049 - protein, 329 aa, BradyrhizobiumColbertium
MKERQMISPGFVDDALVGLRRRGINEVPLLARAGLPPVVLQPVSAQQYGALWLAIADAIDDEFFGEGARPMRSGSFALLCHAILSAATLEQAFRRSLRFLRVVLDDPFGELVVAQGLAHIVLKDAGAPRSAFAYRTFWIIVHGITCWTVGRRIPLRGVDFRCASPPHDADYRLFFGAPVCFDRPESRLSFDAEFLKLPTIRTERALREFLRRAPANILVRYRHDSGLAAKVRNRLRETVPVDWPDFTGLASQLRVSAPTLRRKLRMEGLSYRDVKDEIRRGLAIESLLRGQRDVGDISADLGFSEPSAFHRAFRKWTGKSPGVFRRDRG

SEQ ID NO: 9050 - protein, 92 aa, BradyrhizobiumColbertium
MMSGVWRSGKGIASSSVDAKGSLVAPHTGTLGDEATPLLKGEVDVVQTESGKEYSFQAGDVIGLRFSMHLTWTSKGQFVKKLWLVTRAALPE

SEQ ID NO: 9051 - protein, 521 aa, BradyrhizobiumColbertium
MASGAGSTANTLAGIRGRAASLTEQTRDAQTTAETFTLASEKFTRSAHDIGTEVADAGKLADQAREAAREASLKVEQLRVSSGAIGNVVDLIAAIAKQTTLLALNSTIEAARAGPAGKGFAVVATEVKALAVQTQNATEEIKRRIEALQQDSSASIDAVYRITKAIDAIRPVFEHVHGAVAEQKEITGEMAQNAASASQFIVSVAASGSEIDSATKEAEIHGESVALAGKAVKMFAEKLKMRCAIMLRHDGRDESRAERVPCRFQILIDAPPSPIKAEVFEISVSGMLLCGENAAAIAMNKVLNATVEGVGPCRIRATEYTPAGAQVEFVSLDAELKDRIEDKVWSIHDENTEFITRSLEAGDALAKIFENGIVAGDVSIEELFDESYVEIDETDPVQYRVGFLDWAERVLPSFLEAFSAQDSRVVTSVVTDRNGYVPVHSKAASQPQRRGQFAWNQANSRNRRIFNDAAGLAASRNIRSYLIQSYPRDLGNDKPVMMREIDVPIRVSGRHWGGFRAVYKL

SEQ ID NO: 9052 - protein, 575 aa, BradyrhizobiumColbertium
MSVFRQARDYLLANREDYAAATTGFCWPDLPSFNWALDWFDAELGGTAESMNNTALWLVESSTGIESKFSFVQLKDQSNRVANHWRKLGLRRGDHLLILLGNVPALWVATLAAMKLGVVVIPATTMLSSDELSDRIERGNIRAILAGVDQRQKCDGLAAKNVLRIVVGEGGDSSWHAYTDAADHSASFAPDEPTRASDPLLLYFTSGTTAKPKLVRHSHRSYPVGSLSTMYWLGVRPDDIHLNVSSPGWAKHAWSSLFAPWNAGATILVVDQAPFSAKLLLAELKRCKVTTLCAPPTVWRLLIQEDLAAHKMSLREVCSAGEPLNPEVIDRVREAWKLTIRDGYGQTETTAQVANSSGQAVKVGAMGRPLPGYDVRILDPDGAPATEGEVCIALGSSRPAGLMQGYQEADGQLKGLDGDFYRTGDVAFVDGDGYLTFVGRADDVFKSSDYRISPFELESVLIEHEGVAEAAVVPSPDAIRLSVPKAYILLTASTQASRQTALSIFQYANERLAPFKRIRRIEFVTELPKTISGKIRRVQLRRFEHEGDRTAPFRGVEFLEPELPELEVGRKRSKS

SEQ ID NO: 9053 - protein, 131 aa, BradyrhizobiumColbertium
MNEELADVAVPALADTEELLLTSGGVFPRNKSQPCSQIASLLELAPVTDGRKNCGCAQRPDFGDCHEPTGNIFSVCNRGDLSRHLIDALLQPAQVGKQVSEKSAHRRREVVRRIFENQRQVELEQTSSLPQ

SEQ ID NO: 9054 - protein, 258 aa, BradyrhizobiumColbertium
MQRIFYLAIGGMGSYAIANYLDEQKVPTFTQSPNWDHTTIDYMLRNRATYGEYQPKSFAGGNKKGIPSGPPISNYYPAVVDKATFDAAQIARQQNLALRGRKGNDLANIFGGLCWCAYCGSKVIFHRISNVQVLVCEQVLSEGACSRSAWSYSDFETTVLAFLAHPALLDCVGREERAALCDLVQEIEALSLDQDQRYSRRVNITVLLKQIVTGLNVHSAGKLTPPRHSSAQIRKDINGRFVEIQLRDGPVYRCISIG

SEQ ID NO: 9055 - protein, 508 aa, BradyrhizobiumColbertium
MKLVKSLLLGSAAGLIAVGGAQAADLPVKAKAVEYVKICSLYGAGFYYIPGTDTCIKLGGYLRAEVALNTNSVYTGNYSGVAGAHNALSNYYTMRAREDLNIDTRTATEYGVVRTFFDATFSWTSGGYSGSGTTAYDSNNPAGTGSGQVAGGALGVYYAFIQFAGFTMGKAVSQFSAPWTNYPGNNFDGLVGGGGTVTGVNQFTYTADFGQGITASFSAQDQVAYYQAGINNLGAPGGFGYGTSNIGGSRSPDLVAMLRVDQAWGLFQASVAAHENHAGYNTGAGEFSGRASDKWGWAGQLALSIKNIPTGAGDTINVQGVYTNGATRYNIQDLAGGAGAWTTYSGTGVAGAYQSLGIAFAPDAVYAPGGDLQLVETWGMRGGFTHNWDPYWNTGIYGAYAAVRYNGASKTLMCGVGGVGGTVRAALGAAGLTNCDPDYNIAQLGVITRWTPVKNLTFSADFTYTRLDQKYSGVTGAGANAAVGKPVAAYELKDQDTYQLLLRAQRNW

SEQ ID NO: 9056 - protein, 70 aa, BradyrhizobiumColbertium
MTELRRQLPISLQGIDTNNDSVFINETLKAYCEQANIVFTRCRPYRNNDQAFVEQKNGAAVRRMIGYRRF

SEQ ID NO: 9057 - protein, 104 aa, BradyrhizobiumColbertium
MGLAPEIRAKLLAMSASTVDRALVKIRQEGGRQRRRPVASALRRSNPVRTSADWKDPAPDFVEADLVAHSGPSARGSFIQTLVLTDIATGWTECAPLLVREQRS

SEQ ID NO: 9058 - protein, 48 aa, BradyrhizobiumColbertium
MSGKYLNDALIYLQARGIGASILTGNVGDFDFLNQLAPGVPIILYRPA

SEQ ID NO: 9059 - protein, 96 aa, BradyrhizobiumColbertium
MRNRPSTETEEHIALKRNRLVLEQARALGLLGEKKNTRLSGRVPAGLIEAAKKRAHVSSDTELLELALSRLALEDDFGARLVRSKGSLPADIDLAI

SEQ ID NO: 9060 - protein, 284 aa, BradyrhizobiumColbertium
MSKKTIADFERDQRNQQVRTIDAIEAALNSAGIIFIPQNGGGEGVRKRGAIPRLFRRDDVEHREWVAFAFDYKQQRFTGFVSYQALAGIALSNIAPIAAFDRDVARILITAADKVDKSDFDPEGRVLLTRNDLPPIEFDPNVVGKTIGRTRLHLIGRRRFTAITGAVVEPIDYNGFRVRLDDGSTRTYLKLRAGDGDHDALDVSAEIAAGFFIVSERNDCPFSVGDQVRLIRGQQRPEISAGDIGTVCEIEDYPIMMGPAPRIRVKFGSHITAWETPTQFEMAT

SEQ ID NO: 9061 - protein, 588 aa, BradyrhizobiumColbertium
MWADADAKVDYLNFSEVAELAAEMVGTERLLPLSLGIFGTWGTGKSTVLNLMRGELSQHKHKFLFVEFDAWLHQDYDDARAALMSVIAKALLDEAPEGLREKALSLLKRTNKLRVLGYAAEGAAAFWGVPTFGLIRKGVEGLGDILSGDANEDDVKAIEEGAKDAKTKSEGLIAPEPKKSPPEEIVAFRQEFSEVLSGLGKTLVVLIDNIDRCTPPNTIHTLEAIRLFLFLPRTAFVIAADEDMVRHAVATHFRNPSLRLVEDYLDKLIQVPIRVPKLGVQDVRAYMLLLFAEASGANGDSLEQLRAFLVDQLRQAWKPDAKFGVDEVLSILKPDDPRTLRSTLDLADRMAPLLAYSANVNGNPRIIKRMLNVVRMRASVARKRKMELDESVIAKLALFERCTDAKAVDALHTAINASAGKPHFLATLESGGTDGDQAIEGCPPEILKHVDFVRDWAALEPKLSEVDLRPAVYLARETVPLRATATKLSEAAIKAVDVLRQVRTEASPTAKAAIESITTEQPAVMEELIRRMRLNPEWSRSRDDFRGAVLLARANEDAGKMLASFVNSLGEKAPRWMTMMMSGKAKEV

SEQ ID NO: 9062 - protein, 56 aa, BradyrhizobiumColbertium
MPIHCDFDQIEEFILCFNGPSFGWRPIPSRPGIFRHLVKENSCEVIDNDFYDLIRG

SEQ ID NO: 9063 - protein, 40 aa, BradyrhizobiumColbertium
MDRQLGPKLANGVGRISKLDVEPAQLNAMQEVWREWETFE

SEQ ID NO: 9064 - protein, 436 aa, BradyrhizobiumColbertium
MTKVICHADAAGLPVTRKASDVHVILYGKGAMPPKVARIGSMLLDPVSRLKLGIRSDAFDFLTIGLAVTAADTFVLRSDADDRWCRRLELTVPLIDPRPWNAVRSMLESALNFLSGDHWTLRFKRGGPRPPSKAVRDRRRIFIDLSKAECACLFSGGLDSYVGVLDLLSEGRRPILVSHAYRGDRKYQANVATFLPTLCPRFAANAHPTWTGATEISMRSRSLNFLTFGVLTATAIAEFRGLSRVDLIVPENGHIALNPPLTPRRIGSHSTRTTHPFFLNAIQHILEGVGLPVVISNPLRHQTKGEIMARHATTTADFELAAAGTVSCGKWKRKNKQCGHCVPCLIRRAAFHAAAIADDTEYREPNLLKIANDPQIRDDLISVLTAVSRSRTFRIEPWVMQAGPLPEDEQERSACVDVFKRGISELGNFLRASGFP

SEQ ID NO: 9065 - protein, 371 aa, BradyrhizobiumColbertium
MVPGTPAAAPPPDRAQYAPPTVKPAFRAAPTISAPLPPPPRPPQRDLTPLAVGAGVVAGAVIGATIADLHNQRRETVEGGRTIYTEPDRIIIRDPGGQAYVRGNDLYRFRYGARDIRTDTVGGETRTVVIRPDGSEIITVVGADGRLLRRIRRDPRGREIVIIDNSYRDPRAVGGFYVDLPPPVVNMPYDRYIVSAEDASPDVIYATMQAPPVQRIDRRYSLDEIRYSPNVRMQMPSIDVNTINFETGSSTIPPDQAARLQVIADGLNQAIQRNPREVFLIEGHTDAVGNEVDNLSLSDRRAQSAAELLTQQFGVPAENLTSQGYGEQYLKEQTQGPSLINRRVTVRRITPLLNGGTASLPPPPPGTAPPR

SEQ ID NO: 9066 - protein, 318 aa, BradyrhizobiumColbertium
MARYRHGLPQHGGGIFLTDGGMETTLIFHHGLELPHFAAFVLLDSADGRAHLRQYYEAYLRIARQHGLGFVLDSPTWRANPDWGARLGYDAAGLEAINMRAIRFLDELRGAWESPRMPCVINGAIGPRGDGYKAGNMDAAEAEAYHSGQIAAFSEAGADMVTAFTLNSINEAVGVVRAAKRQDIPVAISFTVETDGRLVRGETLREAIEAVDDATERACEYFLINCAHPTHFESAIATGETWVQRIHGIRANASVKSHAELDESETLDSGDPADLGRRYLSLRRAFPGMRILGGCCGTDHRHVAAVCEACLPSDALTV

SEQ ID NO: 9067 - protein, 206 aa, BradyrhizobiumColbertium
MGKGEATRERILEIAEAAVLAKGFGATSIDEVIAEAGLTKSGFFYHFRDKNALAREMLRRYVETNDRLFDEIFRRGRELSDDPLQSFLISLKLLAEIMADLPNGHPGCLIASICYQERLFDREVRDLTAQSVRSWNAHFREILDGIAAVHRPREPIDLDDLAEMISCVVDGAIIMSKTLNDPKRLERQILLFRSCVKLIFAPPLSS

SEQ ID NO: 9068 - protein, 585 aa, BradyrhizobiumColbertium
MIKTSALASLIVLGWTSSLSAQTVYPIDRAEILAGAKFDFKVELPGPVDATKLKVTMNGADYATAFGRAGTFIEREDGKDQSALILRDVTLARPGNVVVDISDGTRQRSVTWTVYDTGPRKAKNVILFIGDGMSPAHRVAARILSKGISEGKSRGKLAIDDMPHMALVATAGSDSIITDSANSASAYATGHKSAVNALGVYADRTASPLDDPRVETIASLAKRRLGMAIGIVTNTEIEDATPAAMVAHTRRRAAYDDIVEQFFDAKPDVLMGGGSANFLPKSVAGSKRKDETDYIAKFRDAGYQVATTASELGASAARQETTKLLGLFATGNMDGVLDRKFLKGGGVRKFPEQPDLTEQVQAALNILSKNENGFFLMVESGMIDKYAHLLDMERAVYDTIMLDNAVRQTREWARARGDDTLIMVVADHNHPNSLVGTVNDDMGTVPNVPLRERVAVYDKAGFPNYPAPDAEGYPARIDVSRRLAIFSASLPDHYETFRPKLDGPNQPTIKAGDDGTFKANDKYKDVPGAVLRPGNLSALIGASVHSGEDVILTATGPGSERVHGSMDNTEVFRVMADALGLAAGQ

SEQ ID NO: 9069 - protein, 445 aa, BradyrhizobiumColbertium
MTTILKSLPKGEKVGIAFSGGLDTSAALLWMKQKGARCYAYTANLGQPDEADYNEIPRKAMEFGAEKARLVDCRTQLVHEGIAAIQSGAFHISTGGITYFNTTPLGRAVTGTMLVAAMKEDGVNIWGDGSTFKGNDIERFYRYGLLTNPGLKIYKPWLDQQFIDELGGRAEMSAFMTAQGFAYKMSAEKAYSTDSNLLGATHEAKDLESLDSGIKIVNPIMGVPFWRDDCNVKAEKVVVRFEEGQPTALNGQTFTDPVALFLEANAIGGRHGLGMSDQIENRIIEAKSRGIYEAPGMALLHVAYERLLTGIHNEDTIEQYRISGMRLGRLLYQGRWFDSQALMLRETAQRWVARAVTGEVTLELRRGNDYSILNTESPNLTYAPERLSMEKVEDAAFTPADRIGQLTMRNLDIADTRTKLKLYSETGLLSGSEGSQIFRLESDRG

SEQ ID NO: 9070 - protein, 258 aa, BradyrhizobiumColbertium
MNRTGLFIALALWLVIGVVFGLYPELDLKLAALFFDPATRTFPLKLNGWAGFARDAAMWIAWAFALPSIVALVVKMIRPDRPMMVRGRTVVFLLVTMTMSAGILTNLTFKTYWGRPRPVVVTEFAGDQQFVPWWDPRGGCGRNCSFFSGEGATAFWTLAPAALAPPPWRPIAYAAAVVFGALTSGLRMAFGGHFFTDVSIAGLVTFVVIWFAYALIYRWPRTRFSDEAVDAALTRLSWPGYRLRQRLFGRKTGPEPSV

SEQ ID NO: 9071 - protein, 164 aa, BradyrhizobiumColbertium
MSLIGRLVVIFIGFLAACFVGGMIIVVALLFPEFADLGAGPVDQGTIDVLLGFGFIFVSGFALVPAAVIVAITEALYIRSALAYALGGGLVGLACYLGLVPFHADTFQFEGIVRRHLEIMTGAGIVAGVVYWLIAGRNAGAWRNPPPPRKPPPPLPSNSRPDAR

SEQ ID NO: 9072 - protein, 50 aa, BradyrhizobiumColbertium
MPSTFVMAGLDPAIHVGPRLEKSWMPGSSPGMTTGGLVTLPVTNSLAPCP

SEQ ID NO: 9073 - protein, 406 aa, BradyrhizobiumColbertium
MILGALMQTSTEPRNAILVEKTPLETYVPPAKPSLIGLSRTELADRLGEIGVAPAQRKMRVQQLWHWIYFRGAQSFEEMTSISKGIRADLAQHFTVDRPEVVAEQISNDGTRKWLLRLPSGDSVQKAHEVECVYIPETDRGTLCVSSQVGCTLNCSFCHTGTQRLVRNLTAGEIVGQVMVARDRLNDWADREDGTRRVTNIVMMGMGEPLYNFDAVRDALLIVGDNEGIGISRRRITLSTSGVVPNIVRAGEEIGVMLAISLHAVRDELRNELVPLNRKYPIKELLQACRDYPGASNARRITFEYVMLKGVNDSLDDAKLLVRMLKGIPAKINLIPFNPWPGTAYECSDWDQIEKFSEYIFNAGYSSPVRTPRGRDILAACGQLKSETEKLSARERQALRAMAMTD

SEQ ID NO: 9074 - protein, 216 aa, BradyrhizobiumColbertium
MWRVLILALMTVVMAGGIADSARAQTAPKSAPRETAPKSAAPSNTTAKAAAKPESKPGGPPAGVAGGAEPTLIGQFGTWGAYSATPNGKKVCFALAKPSSSKTNPPNRPRDPAYAFVSTRPAEKVNNEVSVMIGYALKPGSESTVEVGGASYAMYTQGDGLWIKNAAEEERMVEAMRKSADLVVKGVSAKGTETTDTFSLKGLSQALDKIAQDCRR

SEQ ID NO: 9075 - protein, 279 aa, BradyrhizobiumColbertium
MFETGLLKNKRILVTGGGSGLGAAMGRRFLALGAELVICGRKLDRLEATASEMRAQIGGKVKTIACDIRDGAAVDDMMDQIWREAPLDILVNNAAATFIAQTEHLSFRAADAVLAPTLHGAMYCTLAAGRRWIEARRGGVVLSILSTSTITGRAFTVPSAMAKSAVLAMTKSLAVEWGPKGIRTVAIAPGPFPTAGATGQLRPEGRDDSWTARNPLGRTGEHSELGDLASFLVSDRAAYINGEMVVIDGGAHLRSSGAEDLLGWTEVQWTEQRAARSKA

SEQ ID NO: 9076 - protein, 324 aa, BradyrhizobiumColbertium
MKAILCSQYCQPDDLVLTEVPDPVAGPGEAVIAIKAAALNFFDLLMIQGKYQIKPPFPFSPAAEVAGVIESIGAGVTDLKVGDRVVASCGHNGAREKIALPAASIVKIPDNLDYDRAAGIIIIYGTALHALEDRASPKPGETLAVLGAAGGTGLAACELGKLMGLKVIACASSDEKLEFAKAHGAELTLNYAKEDLKEGLRKLTGGKGVDIIFDPVGGAYAEQALRSIAWEGRFLVIGFAAGDIPKMPLNLALLKGCDIRGVFWGAWTRQNPEKNRVNLEKLVKWTAEGKISSHVDRTFPLVQTADALKVLAGRQAMGKVILHP

SEQ ID NO: 9077 - protein, 130 aa, BradyrhizobiumColbertium
MAAEHSVGFEPADRLAEDRESVRRRFWRKLKRVAAQLPFAEDLLAAYYCAFDRQTPRHVQASLLGAIAYFVLPFDFVADVMPMLGFADDAAVLAAAIRMVAGHITNEHRDAARAALKRGVEEAAGTAEVA

SEQ ID NO: 9078 - protein, 96 aa, BradyrhizobiumColbertium
MAERLTADARKQALGGIPGWTDVQGRDAIGKTFVFKDFNQAFGFMTRAALVAEKMDHHPEWRNVYKTVEVVLSTHDAGGVTTLDIELAKAMNAIAT

SEQ ID NO: 9079 - protein, 444 aa, BradyrhizobiumColbertium
MSLALVLAIIGALAGAYYFAMRPVTLKIAVGPANSDDVKVVQTLTQAFTQSKGQVRLRPFQTDGATASADALKEGKVDLAIVRGDVDVPKNAQAVATLRKNVVVLWSVPGKGKKRGPKITKIAQLAGHRVGVVGRTQANVNLLRVILQQYGVDPAKVEIVQFPANEAAEAIKAQKADVYLAAGPVNSKITADAIAASTRDFGAPTFLAIDSADAIAQNHPVYEASEIPAGAYGGSPARPDDEVKTISFSHHIVARRGVPESTIAAFTRQLFAVRQQLVTEFPLAAKIETPDTDKDAVIPVHPGAAAFVDGEEKTFLDKYSDYIWWSLMALSAMGSIGAWFAGYLKKDERDNSNHQRERLLDMIAAARKCDTTEELDQMQTEADDILRDTLRCFDHGAIEEAALTAFNIALDQFHAAVADRKTVLMSLPQNLQRAGAQFRAAGNA

SEQ ID NO: 9080 - protein, 51 aa, BradyrhizobiumColbertium
MSACARNCRVTLSQYSVRYHPGRCISIEPGISILPGAQLRTQGPALRIIPD

SEQ ID NO: 9081 - protein, 59 aa, BradyrhizobiumColbertium
MNIKFSRRRFLATSAGALGTIAMPYLSRAADRPAVTHGVQSGDVTADGGMVWARTDRPA

SEQ ID NO: 9082 - protein, 453 aa, BradyrhizobiumColbertium
MLVEVATTDTFRDARALPPIAALPESDFTAKMLVENLPAGQDIFYRVRFRDLSHSAVEGAPVTGRFRTAPADRRDVSFVWGGDVAGQGWGINPDDGGMVTFSTMRQHRPDFFLHSGDTIYADGPIQSEVKLADGKIWKNLTIPEKAKVAETLDEFRAAHKYNLADDNLRAFNAEVPIFVQWDDHEVTNNWSLSKELPAAYKLRDISLLAARGARAFHEMYPMRESITEPGRVYRQISYGPHLDVFMLDERSYRGPNGANLETAYGPASNFLGPDQIAWLKRALLNSRATWKVIASDMPIGLIVRDTPKGGSEAIAQGDGPVRGREFEIAEILRFIKLAPISNTVWLTADVHYAAAHFYDPNRAQFQDFDPFWEFVSGPLHAGTFGPNTLDNTFGPEVRFVKAPGKDSQNLPPSAGMQFFGHVKIDGASGQMTVTLRDRADVALWSTTLDPKQS

SEQ ID NO: 9083 - protein, 110 aa, BradyrhizobiumColbertium
MEDDPIIAIDFEDRLLGFGVSGVRTVGSVTQALDAIAKRTPDFALLDVELIRETSFAVAQRLMTLKVPFIFVTGYGAEARIPPDLAGRPRLQKPCSSEALEAAIQAGAAD

SEQ ID NO: 9084 - protein, 254 aa, BradyrhizobiumColbertium
MDARTGKVTEVESRPANNLLRRLSPADYALLAPHVIVEDAAAGQLIYNPGDDVQVVHFPCGPSLATFLVPNEDGRDVETILVGREGAVGGIVSEGFLPAYTRICVKFGGPFARIHVGKLEAAKVRSSSLRNIFARYADCMLAQIFQSTACNAIHSIEQRTAKWILAAMERTGDETSVPLTHEQLATLLGVGRSYASRVLQSFKAERILDTRRGSILVRNRDGLKLRACLCNEAVKMHFEEVLRGVYPTEEREAG

SEQ ID NO: 9085 - protein, 238 aa, BradyrhizobiumColbertium
MGGALLHILFDIAAWLAAAAAVYWLTRQGLRFPAQSFELPYIAALVFGAGLGAYLFGSANLWLSGQSGIARSVEGALAGGIVAIELYKWFAGIAVRTGARFALPLALGIAIGRLGCYFAGLEDFTYGTPTTLPFGHDFGDGVLRHPVQLYESAAMAAFALAYVLAILNRETFTVTNGFYLVLAYYGAQRFLWEFLKPYGTLIGPLTLFHLLSLFILLYAAFMLATAPKARPVHERAAA

SEQ ID NO: 9086 - protein, 111 aa, BradyrhizobiumColbertium
MQMLELLGLTAVADKLPDELSGGQAQRVALARAVVLKPRLVLADEPTGQLDQPTARQTIETLLNSIDGSDAALVIATHDPMVAERMKVTWLMDHGTLRAPQIGCANDQAVA

SEQ ID NO: 9087 - protein, 855 aa, BradyrhizobiumColbertium
MGLLGALGAFIVASSESMARRAVAGVPVDWQVLIAPGADVAAVTKAVGEAATTTALAPVGYADSAGFAATTGDTSQMTGPGKVLGLEAGYRNHFPDQIRSILGSADGVLIASQTAANLHVAPGDTVTIDRIGAAPVDVKIAGVVALPNADSMFQAIGLPKGIAPQAPPDNVLLMPMAEWQAIFDPQKAARPDTVKTEIHVQLARNALPPDPSAAFIQAQRLANNLEARVAGSAVIANNLAARLDGVRADALYARVLFLFLGVPGIVLALLVTLAVAASGSDRRRREQALLRIRGASLLQVLGLAGTEAAAIGLLAIVLGLALAGTTAIAWWHLADLRLAIPWFALAAGVGFVLAMAAFLVPAWRDAKLLTVSAARVDANQQFPLWQRLYLDLAFIMLGAIAFWSTAKSGYEIVLAPEGVAQTSVHYEAFLAPLCLWLGLGLLSVRLYRLMLGPGRRAVAVAIASMSYDLSPLVAASLSRQRLRIARGSALVALAFAFATATAIFNTTYNAQSRVDAELTNGADVTVTGTSTHPAGTLLKELQAIPRVVTAEPMMHRFAYVGSDLQDLFGINPAHIGKATTISNAYFAGGNAAETLALLAGTPDGVLVSQETVNDFQLQPGDRLNLRLQSAADHQYHVMPFRFIGVAREFPTAPKDSFLVANANYIAEKTGSDVAEVVLIRTSANAESVAAAARQTAASLPGMKVTTLRETQALISSSLTAINLQGLTTLELGFSVLMIVGVTGLIMALGLAERRRNFTILSALGARPGQLGVFLWSEGLLVVIGGAILGIVAGFGLAEALVTILTGVFDPAPEALSIPWLYLALAVAMALACGAAAIGGAQALSRKPDLEALRGG

SEQ ID NO: 9088 - protein, 223 aa, BradyrhizobiumColbertium
MLRWHNAVMIGSIGLYLAARHYGWNFASYPAGVWYFNPLTWQLLFVFGAWLALGGAAANRGLLQFRSLYVLSICFVLFAVAITLAERIPELRQTVLDAIAETFIPNDKTNLAPYRVIHLVSLMFIVVSLIPVDWPGLKWPIFRPMIRCGQQSLPVFCVGLFLSFIAHFVLEFASVGVAAQLLVGAAGLWIMTMVAYYRAWSKEVDKGLPSGGKLPKGEARAEP

SEQ ID NO: 9089 - protein, 44 aa, BradyrhizobiumColbertium
MRYRSGFEKYRKGDGFATHPVRLDPRETQVDRAVLGRRAQIGDP

SEQ ID NO: 9090 - protein, 55 aa, BradyrhizobiumColbertium
MDLSLLRQNDAVILEVADTGPGIPASEIDRISNRSFVEVAREVMEPASAFRLCVV

SEQ ID NO: 9091 - protein, 51 aa, BradyrhizobiumColbertium
MKSLKLPFALEAFAILYVVRSRDDLLELGLSLEVGQLPNVAAVQIGEAEGY

SEQ ID NO: 9092 - protein, 89 aa, BradyrhizobiumColbertium
MGEIVQFVRLGKRSAETPVLQAPFDSIASPAARSKEALVNILRHMKLQHDRLDQVIEAVRDEPTRLRFRHTLRVLQQQIELVTVAAKLI

SEQ ID NO: 9093 - protein, 60 aa, BradyrhizobiumColbertium
MQQAAQGTHQVASSVTEVQRGASETGSASSQVLASAQSLSSESNRLKVQVAEFLESVRAA

SEQ ID NO: 9094 - protein, 47 aa, BradyrhizobiumColbertium
MSEALLKNTKDTDTAKEARKTLQQNEKDLKELQAKMKKEEKKEDKKG

SEQ ID NO: 9095 - protein, 224 aa, BradyrhizobiumColbertium
MRKVLTAAALLVIGVAIGAVLFITSGTYDIGADTPHWALTRQIMEVTRERSIAARATSLTIPNLSDEQRILKGAGQYAAMCVNCHSAPGKPDTELGEGLYPKPPNLYQMSLDAKTIFWVTKHGIKMTGMPAWGRTHDDDTIWNVVAFVMKLKGMSGPQYEDIVAKAPPDDDMQDMPNMQSQGGPEKPNKASTGEANKPTSEANKSSSEANKPMGEANKPAGHQH

SEQ ID NO: 9096 - protein, 130 aa, BradyrhizobiumColbertium
MPADAPLPFTHEAFDTIICNFALHRLMPANKIALLRGLAPLLRADGRLHVVELDRPASVREGKMLGFAALLWGTDAVAPHFDDTWRKCLPPAGLRVLAHDRSFSIVAGRVSVIVAGHKRSGAKPMRRTQR

SEQ ID NO: 9097 - protein, 369 aa, BradyrhizobiumColbertium
MRLDLFRGLANWTIFLDHIPNNAVAWLTTRNYGFSDAADLFVFISGYTAALAYSKAMRRDGFWAGAVKLMRRVWQLYVAHILLFVVYVAAIGWVAQTYRHSHLLDEFNVAGLIANPIEYLTAGLLLKFKPLNMDVLPLYIVLMAVFPVVLRAMLARPNTTLFCSLSLYVFARLLGWNLPAWPEGVWYFNPFAWQLLFVLGAWCALGGAKQLHWLLTSPAVLRFCILYLVFALIGSTAANLGMQSSALAWLSDGLAIDDKTNLAPSRLLHFIALAVLTISLVPRDRPWLRSPLLRPMMLCGRRSLEVFCVGIFLSFVAHFLLELISNSLLMQIAVSIGGIALLAAVAWLRSWPAKNNSPGPGPSSAGAIQ

SEQ ID NO: 9098 - protein, 38 aa, BradyrhizobiumColbertium
MPNLRADRGDELHDEYTGTSGAGACWQDAGWRRPGREA

SEQ ID NO: 9099 - protein, 115 aa, BradyrhizobiumColbertium
MNNASTKLMDEDLSTCVDDGLRCYRTCLDTDVKRGLAEEANRIAAKHIRLILTCAEMCRTAAHLMLLRSPHHRQLCEECAAICSECARECERVGGMDECAEACRFCADSCQAMAI

SEQ ID NO: 9100 - protein, 567 aa, BradyrhizobiumColbertium
MLADKEPRPGEHEHFTSPLWKQGIGSTIHCVAGDATGIILAAAVTASLGLPMWIDLIVEYIAGFSFGLFIFQSLFMKKMMGGTYWENVRKSFMPEFISMNAMMAGMAPTMSLLMMGRDMRAMDPLELIFWAVMSLGVMVGFATAHPFNVWMVKKKIKHGLMTERDEGGQGGPRGHEGHGEAKAPSAAGGHAGHGAGQQMTSDATTPQLAALAGVTSFLLISGMVLPGFSVNLRLSLRDVDASIMPPGMINTFDLPGEAMKDMAAVKPRKVTYVAPKDAKGDQILQPRIENGVKVFDIEASVIRWNILPDVAVDAYAYNRQVPGPRLQLTEGDHVRINLRNALPESTTIHWHGLIIPNEMDGPAKITQDPVPPGGSYTYDFEVGQSGTYFYHSHDHPDRQQALGLYGALLISPKDPSTEIKADLDYTIQLQEWLKREWLTYPAMLMEGALPNYFTINGKAYPSTDTVAMKVGQTIKLRFIGTNNNFVHPMHVHGGPFEVVAVDGVNLKDSARYQADTVNVGPGQRYDVVWTARKPGKWLVHCHIPHHTANNNVEQHGGGGLMLVLDVR

SEQ ID NO: 9101 - protein, 161 aa, BradyrhizobiumColbertium
MVCEPGGIYSFERCVVAVAGNAVVGMANAFPAGLIHNEYPVRSPTSRDVLLKPRFELNDWKSYLLNNICVGPDHRREGVGTALLKAVVRDARRQGHASLTLHVWADNHGAVAFYRRFGFRQRGRAPIPWHIDLPHEGGSLLMKLPLRTVPDVPAFQDEDHP

SEQ ID NO: 9102 - protein, 263 aa, BradyrhizobiumColbertium
MAPRELLVRLNEDALFAMPFCDAYWSRLLNCSYHYEQEIEALLRVARHDRYTFVDCGANFGYWSILASSRAFGVQQAIAIEASGPNLGQLKRNAELNGNRFRYLHAALAGRSGDFVRIHGARHEKFATVPLARAEPGCVETVSLDGLAEAGLIDASVPLVIKLDVEGVEIEALRGARGLLAGDCLVICEEHGSDKTHAVSRYLAEQTSLERFIFDEDNGVFMQLDQLKGLARMKKHSWVGYNVFATSSEHWSKRLLSASWPPK

SEQ ID NO: 9103 - protein, 101 aa, BradyrhizobiumColbertium
MKRNKLAMTALALTLAWSSTVAFAQTAMVNGEVKKIDEAAGKITLKHGPIKNLDMDDDGMTMVFRVQDSSMLKQVKVGDKVQFEAERASGGITITKLQKAK

SEQ ID NO: 9104 - protein, 96 aa, BradyrhizobiumColbertium
MRSLKIAVLLTLIVPFGSAFADNPVVKGEVKNIDAAAGKITLKHGAIKNLEMDAMTMVLRVSDPGMLKNLKVGDKVRFEAERAPEGVTITKMQKAK

SEQ ID NO: 9105 - protein, 176 aa, BradyrhizobiumColbertium
MGNKAASTNNTGNKIMKHATLTLIAFAAVTSISATAWAGEGPKGHSHDESFSAGEPGDPQKPARAVQVTMGEMDGKMMFMPTKIDVKKGEQIKFVLRNNGELEHEFVLATTAENLKHAEAMKKNPDMEHDDPNAKRLAPKKANEMVWKFTKAGEFEYSCLIPGHRDSGMVGTVTVK

SEQ ID NO: 9106 - protein, 457 aa, BradyrhizobiumColbertium
MLSRRGLLTATAAISASAVSGRVQAASIPEAPTMDKAVMQPPLRPSSGPDYNPVVTLNGWTLPWRMNGDWKEFHLVAEPVVREFAEGMKVHLWGYNGQSPGPTIEAVEGDKLRIFVTNKLPEQTTIHWHGVLLPNGMDGVGGLNQPHIPPGKTFVYEFQMKHSGTFMYHPHSDEMVQMAMGMMGMIVVHPRDPSFRPVDRDFVFIMSTYLVDPGTYLPKITEMTDFNMWTWNSRVFPGIDPLAVRLNDKVRVRIGNLTMTNHPIHLHGHSFAVSCTDGGWVPESAQWPETTIDVPVGAIRAFDVVADNPGDWAFHCHKSHHTMNAMGHDVRNLIGVSKKDLARAVGKLAPDAMVMGSTGMAMGEMEMPMPDNTLMMMTGSGQFGPIEMGGMFTVMKIREDLARDDYKDPGPYKYPAGTVSYEVDAPSQPPVRKDKPAGAPKEGDMKAMKGMKGMKGM

SEQ ID NO: 9107 - protein, 115 aa, BradyrhizobiumColbertium
MVTEKAVNVRSEAREAYRVYRSSYDIAGHYQREVLPLRKIISDEMQLRFSSMQVDIFTVLQEARQRLVAMRAAIEAKREFWLAKAELQTAVNGGGSAETRRQTRPSITQANAATN

SEQ ID NO: 9108 - protein, 305 aa, BradyrhizobiumColbertium
MTGPLLDCIVVGGGPAGLTAALYLARFRRRVCVIDAGESRAAWIPVSHNQPLFPAGISGTEILGRMREHLTSLGSEILADKAIALARIDQGFLVELAKEAAAARTLLLATGVVNHQPDMGAQIHRDAVAAGLIRYCPICDGFEAKDQKIVVLGRGPHGVREAFFLHTYSQDVTLFCDPSAIDDRSSTQLAAAGISLIKQPVACLTVDQAKILIQTASGARLRFDTLYPALGSSSNTDLFLSLGGSLSSQGCIPVDSHQMTNVEGLYAAGDVVQGLDQISVACGQAAIAATAIHNRLRDLDGFGDP

SEQ ID NO: 9109 - protein, 84 aa, BradyrhizobiumColbertium
MDEKRDEFRSRVLKAATIRFGNGGAISCVVRNMSSRGAALDVESSLDIPDKFELVIDRDGGRYQCHLVWRKATRIGARFQPGAK

SEQ ID NO: 9110 - protein, 140 aa, BradyrhizobiumColbertium
MSVFHKSSQRLAIASLFAMTIATSASAAPLAPNSPAALAFGQTAASQYAQPVHLVCDDYGRCYRSRRYVRTPYYSGGYYPGSYVYAPGFGFGGHHYDGGHGFGGHGFADHGFGGHGFGGHGFGGHGFGGGFGGHGGGHHD

SEQ ID NO: 9111 - protein, 246 aa, BradyrhizobiumColbertium
MGETTLIHLSRLIALERKLDVVAHNVANSNSTGFRARELAFREYLKPEKGVDETGKRERPLSLVDPRFQFGSSSQGALQPTGNPLDVTIQGEGYLVVRTAQGDRYTRAGALTIDSSGQIVTLAGQPILGKSGPIQIPSKDGEVSIASDGIVSTKRAILGQLRLVRFADRERLQPAGESLLRTDQPPIELGFGQVTLVSGALEQSNVATAREMSRLAEITRSYEMVGKLLKSSQDPDDLNKLSNVPE

SEQ ID NO: 9112 - protein, 418 aa, BradyrhizobiumColbertium
MSRLFAILMPFILGLLTIGPVTAQEPTLELGRAAFEAKMRGQFALAIGLFDRALLESNLSAAQRGMLYYGRGASYEQLEVRGRALSDLDSAIVLLPEFPNSYLYRALIWVAERQYDQAIEDLHYAQKLVPHDPTILMNLAGAFARLGQVDRAIETYGQAIAERPDAAKLYYSRAVAYIQKNDRARALSDLNQAIMLQPKFADAYENRGVLMSIDGEAEQALADFDTAIALSPNDVKFKENRANALSTLGRYSEALDEFDRALKIDPGHPALYLGRGKAHLFLEDFKASIEDFKVAVRLRPLNPYSVIWLHIARLHAHDRDDDEFAENAAKLKRDLWPSKVVDLYLGTSDAEQVVSAALATNDDTGKHGCEADFFVGDYEGHRGDSTRSKELLQRVVTKCRAFDAVFSAAQSELQLAGR

SEQ ID NO: 9113 - protein, 87 aa, BradyrhizobiumColbertium
MTGAEVIASAEDALFTVVLVSAPLMVVGTIVGVLVSLFQALTQIQEQTLIYVPKIVATFLTFLIALPFMADESHRQFLRVMTRILAP

SEQ ID NO: 9114 - protein, 376 aa, BradyrhizobiumColbertium
MHVGRGFLRSSGNRGRQFLGALGCSREGGGGRLQLCRSRGHRSDDLADRALKVIRKPDHVTFALLDIATLGFSLFRLQPLDLDRIGLEDLNGLGHCADLVLAFCARHHHGRVAPRKNLHLGRDVLDGASDREGHAEGARKRQQQRDEASDQHGQCCVAGSSVGSLGPHRQQRSFFLVHLLHHRAQAIHRFLAGAGCFEFAGLRLSCRILHQCDFALRDAGRPVAGECLDLLKPLLLRRVVRGQAADLGRRRLKLLLPGLIGGQKAGIARDEIAANTGFLVDHSGDKAGKLLEHLVGMNCHSRRRIHYAQGMVDRPGAAGDDQADRDEHRRNLDGNAQIIDPGHQIPPSLPAHLLLIERTIPRVAHEVRPCFYAHDV

SEQ ID NO: 9115 - protein, 74 aa, BradyrhizobiumColbertium
MEEQGAATQEIARNVQQAAQGTQQVSSNITDVQRGATETGTASSQVLSAAQMLSNDSSRLKNEVSRFLTNVRAA

SEQ ID NO: 9116 - protein, 564 aa, BradyrhizobiumColbertium
MRKNFPITEIEYPVSDETLIVSRTDLKGKLTYFNEDFVAAAGFTSAELMGQPHNIVRHPDMPPEAFDNLWDTLKAGKPWLGAVKNRRKNGDFYWVLATASPIRENGQVKGYTSIRTKLPADQRRLAEEVYAAIREKKPHGYRIDAGIIRRRSWLDRFSIFTGTLKARLVTTMALQALFMLALGIGGALSTGGSVSLMLASLAVFGAAIVGFAGLATMHAIRGPMQQLNDTLLNLVQDKLDNRIVIERDDEIGEALRNLQTVQTIIRFSRDEVQAVQRRAERQRKADMTKLADGFEAAIGEIVETVSSAATELEASASTLSSTAGRAQQLATAVAAGSEEASTNVHSVASAAEEMSSSVREIGRQVQDSSRIASEAVSQAQATTDRVSELSRAASRIGDVVELINAIAGQTNLLALNATIEAARAGEAGRGFAVVASEVKALAEQTAKATGEIGQQIGGIQAATQDSVNAIGEISGTIARLSEIASAIAAAVEQQGAATQEIARNVQQAANGTQQVSSNVGDVQRGASETGSASSQVLSAAQMLSRDSNRLKLEVGKFLNSVRAA

SEQ ID NO: 9117 - protein, 698 aa, BradyrhizobiumColbertium
MHARIGTILPLIVSALALMGVAATGFAALGAYRDRQEAHAFVELNAISQQLLHSAGQWALERGMTNAALNAPETITADRRAEIDRIRADSDRAFRDAAQRLRSLPVMKSAESRVAEAERVLQGIDSLRRKVDADLTRQKAERDPAVLGAIVPAMTELIEIAANRLRLTLETLTDSPSAAMTRLVGLRHLTAEMAENAGRERAFLAGLISGRTKLTADGIGQISGLRGHVDLAWTTISPVAQRADVSVGLGRAIKDVEQKYFDSYGSLRTDVIRDGNAGEYKISSNDYFAGATSGINAILQLGEAIAADADREAAGLASRSTSHLVVSGGVLLASIALALLSFWVAFSRILRPLSALTTAMGELAAGNFSIVLPGLGRKDEIGDMAHAVEAFKVKAEEKARLEVDEKVRQDQIAAEQRKADMHRLAGAFEAAIGEIVDTVSSASTELEASAGTLNTTAERAQELAVVVASASDEASSNVQSVASATEQLSSSVNEISRRVQDQARMANEAVGQAGQTNDRIGELSKAAARIGDVIELIDQIAGQTNLLALNATIEAARAGEAGRGFAVVASEVKALAEQTAKATGEISQHITGIQAATQDSVSAIREIGGSIAGLSEIASAIAAAVEEQGAATQEIARNVQLAAQGTQQVTANVGDVQRGATETGSASSQVLSAAQTLSRDSNRLKLEVGKFLETVRAA

SEQ ID NO: 9118 - protein, 502 aa, BradyrhizobiumColbertium
MTTVSPDRIPVIVGVGEIVDRPKEIADGLEPLDLLEQALRRAEQDAGASLLGDVQSLDVVNFLSWRYRDPEKLLAQRLGISPAHCYYGPVGGESPIRYIHEAAKRIARGECTVAAVCGAEAQSTATKAERAGVKLPWTPFAHDVEEPKRGAAFQKPLAVELGVFRPVTVYPFYEAASSAHWGQTPREAMTESGTLWSRYSEAAAQNPNAWLKRRYAPEEITTPTAENRLIAWPYNKLMVANPSVNMGGALLLTSLARARAAGIAEDKLVYPLGGASAEEPRDYLLRDQFYESHPQNAVLKAVMDLVGGNGRKFDAIELYSCFPCVPKMARRTLGLGADVQPTVTGGLTFFGAPLNTYMTHAACAMVRRVRDGAKLGLLYGQGGFVTKHHALVVSKTPPREALAQETSVQAEADRNKHAVPEFVTEATGKGKVESFTVLYGRGGDVEHGVVMLRTTDDRRTLARIPASDSATLEHLLDMERTPVGSLGDIAMAADGVPEWRVA

SEQ ID NO: 9119 - protein, 377 aa, BradyrhizobiumColbertium
MKSPICDMLGIEFPLLAFSHCRDVVAAVSRAGGFGVHGRAEHTPDTLERELKWIDDHVDGKPYGIDVLIPENISTAGEKDVTWKSLETRVPQEHRNYTRDLLKKYDIELTTTEVAADQPQPFDAKTALRLLEVSFNHPIRLIANALGVPPKAMIEMGKKHGVPVAALVGAKEHALRQVAAGVDILVVQGTEAGGHCGEVSTMVLVPEVIKAIKPIRDVPVLAAGGIMTGRQMAACMAMGAAGAWTGSVWLATVEAETTEIFREKMITASSRDAVRSKGRTGKPARQLRSVWTDAWDRAPDSPGALPMPLQSIISRDAFSSIDRAAASGNAKARDLVSYFVGQGVGLIDSVKSAGAGGQEFKEEFAEAVEHMNALVAE

SEQ ID NO: 9120 - protein, 291 aa, BradyrhizobiumColbertium
MTDAPAYVPPKVWTWNKENGGQFASINRPIAGPTHERELPVGRHPLQLYSLATPNGVKVTVMLEELLALGHEGAEYDAWLIKIGNGDQFGSGFVDINPNSKIPALMDRSGREPIRVFESGSILLYLAEKFGAFLPKDINARTETMSWLFWQMGSAPYLGGGFGHFYAYAPFKIEYAIDRFAMEVKRQLDVLDRRLADNEYLAGKEYTIADMAVWPWYGALAKGLVYGAGEFLSVQDYKNVQRWTDEIAKRPAVKRGRMVNRVSGDPASQLHERHDASDFETKTQDKIAPAT

SEQ ID NO: 9121 - protein, 241 aa, BradyrhizobiumColbertium
MPEAFRDNEERNRFELDVDGPVAFVTYRKSDGAITLVHTEVPPELGGRGIGSKLGRATLDAVRAQGRKLSVECDFIRNFMRKDPGYNDLLADDGDAQAEPQASYRAGCFCGAVEVEATGKPIFAGYCHCADCQAWSAAPINAFSLWKSDDVRITKGEAELGTFNKTEHSYRKFCKRCGGHVMTEHPRMRLIDVYANLLKGYQHRPTLHANYASKMVSVRDGLPKYADLPADFGGSGEMLPD

SEQ ID NO: 9122 - protein, 205 aa, BradyrhizobiumColbertium
MEYAASDLTPRERYKVLTSFILPRPIAWVTTLGPTGVVNAAPFSFFNAFCEDPPLCMFAANRKPNGEDKDTFLNIQRTGQFVVNIADEPLARAMHESSGDFPPEIGEPDYLGLKLAPSTKIAVPRLADTPWAMECKLWKLIDVNDDRRLIMGEGIHFHIRDELWDPEAMRVHMDRYHPIGRMFADRYCRTDDRVAFPAAEGVKSK

SEQ ID NO: 9123 - protein, 425 aa, BradyrhizobiumColbertium
MTKHTYIPRTTNYTLNPGDDLNDLRMSDQVRPLYDHVKKFIRDTVEPMSIEFAKAGEGKEDRWSFTPKQLEVLEKAKNKAKQEGLWNFFLPDDETGQGLKNLDYAYIAAELGKSPLASETMNCSAPDTGNMEVLERVGTKEQKEKWLKPLLNGEIRSAYVMTEPNVASSDAKNISTTAKLVGDEWVINGEKYYISGVGDPRCKILIVMVKTNPDAAPSKQQSQILVPRDTPGVEVLGPMYVFGQDHAPRGHMHMRFNNVRVPKENILLGEGRGFEISQLRLGPGRIHHCMRTIGKAEKALDLMVQRGLTREAFGKKIAHLGGNMQIIAQARCEIEAMRLMVLKAAKAMDVLGNKEARVWVSMVKAMVPERACKIIDQAIQMHGATGISHWTPLAEMYQDVRHLRFADGPDEVHWMVVGRHELSMA

SEQ ID NO: 9124 - protein, 126 aa, BradyrhizobiumColbertium
MFSHVMIGTNDLDKAKAFYDKLLGTLEVRPAKVDGHRIFYITKTGVFSVSKPINGEPATCANGGTIGFACNSPEQVDQWHAAGVAAGGTSIEDPPGVRQGPGGKLYLAYLRDLDGNKICAMHRMPA

SEQ ID NO: 9125 - protein, 259 aa, BradyrhizobiumColbertium
MNLFDLSGRVAVITGGNGGIGLGIAQALAAQGCNVSIWGRNADKNKAAAASLAGLPGKVDTRVCDVTDPASVNAAMKATLDTFDRIDGCFANAGIGGGGRRSFIERTEEEWRTMFATNLDGVFHAFQAAAKHMTDRANAGDPFGRLVATSSLASIFGTARNEHYAATKAAINALVRALGVELARYGVTANAILPGWIKSDMTAGLMANDKFVANVMPRIPMRRFGEASDFGGIAVYLMSKASSYHTADTFVIDGGYTAF

SEQ ID NO: 9126 - protein, 262 aa, BradyrhizobiumColbertium
MQFKHVALDFDGAVAILKLDHQEVMNAVSVDMLSGLSEALDAIEEKKDEVRCVVLTGAGRAFCTGANLQGRNNQSKKTKAGLTLETGFHPFLRRIRNLHCPIVTAVNGPAAGAGMSFALLGDMILCARSSYFLQAFRRIGLVPDCGSTWLLPRLIGRARSIELSLMGERLPAEKALEWGLVNRVYDDGVLMEEAMKLARELASGPTVALSLIRKLYWDSPENSFEGQLNLEFQCQLRAGDTQDFREGVGAFLEKRPAQFKGK

SEQ ID NO: 9127 - protein, 328 aa, BradyrhizobiumColbertium
MIEAELSRSVRRWCPGATGVTGAAKLSGGASQETWRFDILHPNGPIGAILRRSPKGYGAAPTRAAGLGAEAQLMQLAYEGGVPSPRVMHVLTPEDDLGTGFIMQRVEGETIARKILRDDEYAAARPILARQIGGILAGLHRLPKDKLPELRSRGATQEISEFERDYRSLDWPKPVFELALRWLRDHDPGPSAETTLVHGDFRNGNLIIGADGVRAVLDWELAHLGDPMEDLGWVCVNSWRFGEIDKPVGGFGSREELFAGYEAAGRKVDVARVKFWEVMGTLRWGIMCGGMMQRFREGPDHSMERAMIGRRASETEIDLLRLLAPRGS

SEQ ID NO: 9128 - protein, 125 aa, BradyrhizobiumColbertium
MQDEPTPIELTKAVADFLRNDITPLISGHQAFKLRVAINILDLVTRQLIREDEGDAREVERLRVLLGIEGSVTELNRALAGRIAKGEVDLATPGLAEHLWATTMDKLAVDQPNYASYKRELSRDS

SEQ ID NO: 9129 - protein, 259 aa, BradyrhizobiumColbertium
MELKFSRVERKGPITIVTLSRPEVYNALHTDAHFELQKVFDDFSGDPEQWIAIVTGAGDKAFCAGNDLKWQAAGGKRGWDKGGFAGLTSRFDCDKPIIAAVNGVAMGGGFEIALACDLIIASENATFALPEPRVGLAALAGGLHRLPRQIGLKRAMGMILTARHVSAKEGLELGFVNEVVPQGEALNAALRWADMIAKNSPMSIRASKQAIQKGLAVSLEQAIEEQREYPAVKAMVASQDYIEGPKAFSEKRPPKWVGK

SEQ ID NO: 9130 - protein, 424 aa, BradyrhizobiumColbertium
MDFSLPADLVAYLGELDRFIEREIKPLEQADDNIRFFDHRREWARTDFENGGLPRHEWEALLRKAKDLADAAGHLRFPVPKQYGGKDGSNLWMAVIREHFAAKGLGLHNDLQNEHSVVGNFPVVTMLDRYGRDDQKAMIDGSIRGKYRITFGLTEPHHGSDATHMETRAVPATRDNVKGWIINGEKMWTTGMHVATHCALFARTSGNDGDARGITCFLVPAKSPGVKVEEYMWTFNMPTDHPRVSFTDVFVPEDALFGEVGRGLSLAQCFVHQNRIRQAASSLGAAVYCINESVKYARERKPFGKALAENQAIQFPLVELATQAEMLRLLIRKTAWEMDQLTEEQIERTLSDRVSMCNYWANRLCCESADRAMQVHGGMGYSRHKPFEHIYRHHRRYRITEGSEEIQMRKVAGFLFGYMGPGKH

SEQ ID NO: 9131 - protein, 514 aa, BradyrhizobiumColbertium
MVRERAKSRGNAIAYEFEGRTTSFAEFDIKTNKVANALLAMGVKKGDRIAYLGKNSDTYFELLMGAMKAGVVMAPVNWRLAGPEVAFIVSDCRAPVLFVGPEFITLVRQIKDQLPGVHTIITTEGGAPEWQDFTAWRDAQSGDDPKVPIDTRDIAIQLYTSGTTGKPKGAMLSHANFLNLVQTGNAEDKPEWNRWSTGDVSLVAMPIFHIGGSGWGVMGLYHGARGVIAREFDPTKVLDFFEQSGITKLFMVPAAMQFVVRQPRAKTVDFSRLKYMLYGASPIPAALLKECIEVFKCGFVQMYGMTETTGTIVALPPEDHVEGLERMRSAGKALPGVEIAILDVDGKPLPPRQVGEIATRSGSNMAGYWNLPEATAATLRGDGWLRTGDAGYMDEDGYLYIHDRIKDMIISGGENIYPAEVESALCDHPDVAEAAVIGVPDDKWGEAVKAVVVMKPGKQATATDIINFTRERIAGYKTPKSVEFLPALPRNPSGKILRRQLREPYWAGKDRRVN

SEQ ID NO: 9132 - protein, 290 aa, BradyrhizobiumColbertium
MFKENLLAGRRILVTGGGTGLGKSMAARFLQLGAEVHICGRRKVVCDETAIELMDLYGGRVTSHGVDIRNALAVEEMVENIFREGPLTDLINNAAGNFISRTEELSPRGFDAVANIVMHGTFYVTHAIGKRWIALKQPGNVVSITVTWVRNGSPYVVPSAMSKSAIHAMTMSLATEWGRYGIRLNTIAPGEIPTEGMSKRIKPGDEAGARTKAMNPMGRVGTMEELQNLAVFLISGGCDWINGETVAMDGAQALAMGGNFYQLRDWSDDDWKTARDSIMAQNEKDRAKRG

SEQ ID NO: 9133 - protein, 269 aa, BradyrhizobiumColbertium
MEDRVSISISEGVADVRLMRADKMNALDQAMFEALVAATDRLSKEKGVRAVVLSGEGRAFCAGLDMGRFAAMKEKGGNGIPGGENRDLTKRTHGQANFPQQAVWGWRQLPVPVIAAVHGVAFGGGFQLSLGADMRFLSSDARMSIMEIKWGLVPDMAGTPILASLVRDDILRDLTYTGRIFSAQEAMTYGLATRICDDPRAAALEVAREIAGKSPDAIRAVKRMLNNLSVDPGPALLAESVEQQKLIGSPNQTEAVRANLEKRAPNFAD

SEQ ID NO: 9134 - protein, 514 aa, BradyrhizobiumColbertium
MSETSPFLGIVSGDRRRSHSEVADRADRIAAGLAKLGVKPGGCVCMLMRNDIAFLEAAYAAMRLGAYGVPINWHFKPEEISYILGDTGTSVLIGHADMLHALRDAIPNGVTVLSVPTPPEILANYKIDPGHLATPDFAIDLESWLAQHQPYDGPVVPQPMNMIYTSGTTGHPKGVRRNAPTPEQQAAGERMRAMIYGLKPGARALLPGPLYHSAPNSFGIRAGKLGGALVLMPRFEAEEFLQAIERYRIDTIFMVPTMFIRLMKLPEAVRKKYDVSSLRHVIHAAAPCPADVKRAMIEWWGPVIYEFYGSTESSAVTFATSEDALKKPGTVGKISPGAELRFIGEDGRVLGVGEIGEIYSRMGELADFTYHNKPEKRAEIERDGFITSGDVGYIDEDGYVFICDRKRDMVISGGVNIYPAEIESVLHAVPGVHDCAVFGIPDAEFGEALMAVVEPQVGVTLDAAGVRAALKAHLADYKIPKHIEIRSGLPREDSGKIFKRRLRDPYWEQAGRKI

SEQ ID NO: 9135 - protein, 266 aa, BradyrhizobiumColbertium
MIMTDAANEVLYTVADHIATITLNAPERMNTISGPMLNDLARLLTEANEDQNVRVVILTGKGRAFCAGLDLRKERDGNGLSAASSSTTINLRNTPPTVLQAMDKPTICAVNGGAAGYGMDTALGCDIRIMAESAKLAAAFVKRGVVPESGGTWLLPRMLGWAKASELIFTGRTLSARECLDWGLANEVVPDAELMSRTTAIAREIAANAPLAVQASKRMMRMGLNENFHDHVHHVYLQLLPLFKTQDMAEGMKAFMEKREPKFEGR

SEQ ID NO: 9136 - protein, 134 aa, BradyrhizobiumColbertium
MAPVSILLNLLWILFGGAWMAFGWVIAAVIMAITIIGLPWARAAFNIAVYTLLPFGSRAVNRYEVTGVEDIGTGPLGVIGNIIWFVLAGWWLALGHVLTALALAVTIIGIPFAWAHLKLAGIALWPIGKVIVPA

SEQ ID NO: 9137 - protein, 909 aa, BradyrhizobiumColbertium
MEADARLRDDIRLLGRILGDTVRDQEGADVFDLVERIRQTSIRFHRDEDRLARRELEQILDSMSISETVRIVRAFSYFSHLANIAEDQNNIRQMRARGAGKNGGSGVLAETLAHARDAGIGADALRSFFKSALVSPVLTAHPTEVRRKSTMDREMEVARLLDRRERVALTAEELDASDEQLRREVLTLWQTNLLRRTKLTVLDEVANGLSFYDYTFLREVPRLINTLEDRLEEGGEQAAGELASFLRMGSWIGGDRDGNPFVTADVMRGTLRLQSSRVMQFYLEELHVLGSELSIAAHLADVSEELRTLAERSPDTSPHRSGEPYRLAVSGIYARLTATAEKLEVEITRRPVGKAKPYESVKELQADLDVLHRSLISNNARVIARGRLRLLRRAVDCFGFHLARLDIRQNSAVHERTIAELMDAANPGMSYLALGEDARISLLTNELRSTRALVSPFVKYSDETMGELNVFHAAAEAHAKFGSDAIPQCIISMCKGMSDMLEVAVLLKEVGLVHPSGRSAINIVPLFETIEDLQASSGIMDRMLSLHDYRRLVDSRGSVQEVMLGYSDSNKDGGFVTSGWELYKAEINLVEVFERHHVRLRLFHGRGGSVGRGGGPSYDAIIAQPGGAVNGQIRITEQGEIISSKYSNAEVGRNNLEILAAATLEASLLHPRQSAPRSEYLTAMDELSNLAFKAYRSLVYETDGFVDYFWSSTVINEIATLNIGSRPASRKKTRAIEDLRAIPWVFSWAQCRLMLPGWYGFGSAVEQWIAEHPQQGMPFLKELYREWPFFRMLLSNMDMVLAKSSIAIASRYAELVPDEALREKIFGRIRREWHASIESLLDIMGQDRLLQSNPLLERSVRHRFPYLDPLNHVQVELLKEHRAQNPDEQVLRGIQLTINGISAGLRNTG

SEQ ID NO: 9138 - protein, 370 aa, BradyrhizobiumColbertium
MTRILTNPKDIRATGGLGRRDLLKGAATLAASSVLASQANARDFGAHAEPQRYPDPDIVVIDPKRFKAKVGNTAIKRLYTGCLWAEGPAWNAQGQYLVWSDIPANRQLRYLDDDGHISEQFRKPSNESNGNSFDTEGRQLTAERTRLVRFEHDGSVTPLAEQANGKPLNGPNDMVVHPNDKAIWFTDPGYGAISIYEGKLAKTGSPQPHQKEAVYRLDTQTGQVAKVADEPFKPNGIAFSHDYRKLYVCDTGVTHYPQAENVVWSYDVDGPKLSNAKKLIDMKLDGKSGFPDGLRVDTEGNIWVGAGWVGPGYDGVQVFAPTDGARIGQILLPETCANVCFGGKKRNRLFMTASQSLYAVYVETQGAHFC

SEQ ID NO: 9139 - protein, 122 aa, BradyrhizobiumColbertium
MGRFNVRSNCVSPFAWTRMIGTIPTETEAEKARVEKIKQMGPEKIAPLCGYLLGDSAKDVTGQIFGVRMNEIFLFSQNRPIRSVQRSEGWTPQSIAEHGMPALKGSFYKLDRSADIFTWDPV

SEQ ID NO: 9140 - protein, 379 aa, BradyrhizobiumColbertium
MRKNQVAVVGAAETTELGVIPNASQLQLHADAALNAIADAGLKLSDIDGFATAVETPQQVCHYLGIKPTWVDGTSVGGCSFMLHVRHAAAAIEAGLCKTVLITHAESGKSMIGKAPRSIPADSLQGQFEAPYGVYGPPSMFPIPVLRFMKTYGITHEQLASVAVVQREWAAKNPRAMMKDPITVADVLNSRMIAYPFRLLQCCLVTDGGGALILTSADRAKDFPRKPVYIMGTGESVETPMVSQMETFNSSRAFKVAGPLAFKEAGIAHKDVDHLMIYDAFAHLPLFGLGDLGFMPYEETGQFIADGNTRPGAKLPLNTNGGGLSYMHSGMYGMYALQESVRQMRGIAPAQVPNAKISVCHGVGGMFAASGTIVFTNER

SEQ ID NO: 9141 - protein, 137 aa, BradyrhizobiumColbertium
MAEPQRARPKPTPETQHFWDGTKAGELRLQRCDACAHVYFPPRPFCPSCASRKVSVFKASGKGFLYSYVINHRPAAPGFTPPYAIAVVELEEGPRMMSNIIDCPQTPEALELDMKLEVAFQELDDKITLPVFRPAKG

SEQ ID NO: 9142 - protein, 449 aa, BradyrhizobiumColbertium
MPDFPTLAKLAEDLESGRTTARKLVEACIARIADPAGEGQRTFIHVDNDAALAAADAMDALRRAKAAPSPYAGIPISIKDLFDIKGQVTRAGSRALDDSPPAEQDAATVARLRRAGFVVIGRTNMTEFAYSGIGINPHYGTPKGVWNRAEGHVPGGSSSGAAVSVLDGMAHASLGTDTGGSCRIPAAFNGIVGYKPTQRRVPLDGSVPLSFSLDSIGPLARSVSCCAILDAVLANEPISALRPRPVKGMRLAVPTTIALDDLDTEVAATFERALKSLADHGAIIERIEMAEFHDIGPMNAKGGFAASESYAWHRYLITSKGDVYDPRVSVRIMRGEAQSAADYIDLLNERRSLIARVNARVAPYDALVLPTTPNTPPKIADLADDQAFTRENIRALRNCSLINLIDGCAISLPCHRDGDVPVGLMLAGAGGSDRRIFELAAGMETVIRV

SEQ ID NO: 9143 - protein, 228 aa, BradyrhizobiumColbertium
MFDLTFTIDAQGTTTPLTLAIDQAVIAGWTGRDPVARDKHIAELEAVGIARPASTPIYYRCSARRLTQEDVIEVCGGDSSGEVEFVLIGWQGRIFVGCGSDHTDRKVEAYNVTVSKQMCDKPIASTLWEIEDVITHWDKMILRSYATINGERVLYQEGTLDAMLPVDDLIARGFDGGKLPDGCAMFGGTFAAKGGIRPADRFDFELEDPVLRRTIRHGYDVVTLPVRG

SEQ ID NO: 9144 - protein, 270 aa, BradyrhizobiumColbertium
MNGFRVRASSRRGMTEVEKVVAMAIAKRVPAADAATDITAHVDTLDWSRITGELDVQGCAVLKGLLTPDQCRAVAALYPQDTHFRSRIVMGRHGFGRGEYKYFSYPLPELIAQLRPALYAHLQGVANRWNEAMGIDIRYPVTPAAFLKRCHDAGQARPTPLLLQYEAGDYNCLHQDLYGEHVFPLQVAILLSEPGRDFTGGEFVLTEQRPRMQSRAEVVPLGQGDAVAFAVHHRPVQGTRGTYRVNLRHGVSRIRSGQRHTLGMIFHDAK

SEQ ID NO: 9145 - protein, 217 aa, BradyrhizobiumColbertium
MTGDLFDSVAEAQPSREEIADGAVLLRGFVTPIESELIEAVRAIVAQSPFRRMTTPGGHQMSVAMTNCGERGWITDHTGYRYDPVDPRTGAPWPAMPPLFRDLARRAAEQGGFADFAPDACLVNRYEPGARLSLHQDKDELDYSAPIVSVSLGLPATFLFGGPARSDKPRRFRLVHGDVVVWGGASRLSYHGVAPLADGEHSLLGRKRLNLTFRRTR

SEQ ID NO: 9146 - protein, 413 aa, BradyrhizobiumColbertium
MTTTQLSAGTGAANRTGLYLAALQLMFTLGWTTYVVYLPRLAAEVGIAPSAVILILMLDQGIFTIADTAMGIAADKLTPHVGRLGLFVGLMAAISCGAFVALPFVAGAGPAAQVWFIALIVIWSITSSALRAPPLTLLGKYRAKPQVPFLAALAMLGYGVAGAVSPYLGVVLREHDARLPFVISSFVLLLTALALSRIESDVAQDTPPPTPAEAAKPLGLVPIAFIVAMVALAFGYQLHFAMNSGPSYLRFAKPDELQWLMPVFWIGFNIAMFPASLVVKHRGGLIVMGAAGLFGAAAIAAAEFAGSLNVLIAAQFLAGAAWGCMLISAVSAALAIGSTGAEGKVTGLVFSALALGTFARMAAVAGGLQKMPEYAPLLHWAPIACWSVAGAGLLVIAAARLQGAAHIKASAGG

SEQ ID NO: 9147 - protein, 542 aa, BradyrhizobiumColbertium
MTTLTGGEAIVSGLVAHGVDTVFGLPGAQVYGLFDAFHQAELKVIGARHEQACGYMAFGYARSSGRPGVFSVVPGPGVLNASAALLTAFGCNEPVLCVTGQVPTQFLGKGRGHLHEMPDQLATLRTYVKWAERIEYPGNAPTIVARAFQEMMSGRRGPASVEMPWDVFTQRADTAAAQMLEPLPAPQPDPDLIKQAATLIKNSKAPMIFVGSGAIEAGEEILELAEMIDAPVVAFRSGRGIVSNAHELGLTMAAAYKLWPTTDLMIAIGTRAELPASGFRWPYQPTGLKSIRIDIDPAEMRRIISDAAIVADAKAGTADLVTAVKKAGYVRSSDRREKIREATASAQAEIQRIQPQMAYLKILRDVLPANAIVTDELSQVGFASWYGFPVYQPRTFITSGYQGTLGSGFPTALGAKVANPDKPVVAITGDGGFMFGVQELSTAVQFNIGVVTLVFNNNAYGNVRRDQRERFDGRVVASDLVNPDFVKLAESFGVAAARVTAPDQFKAVLEKALNHNGPSLIAVEVPRDSEVSPWAFIHPPKP

SEQ ID NO: 9148 - protein, 288 aa, BradyrhizobiumColbertium
MLPRFATYSVNGATRYGAVVDGGLVDLSARHAKDYPTLREVIAAGKLVSLAEEAGGRAPDHAFADIAWLPPVPAPEKIICIGVNYPDRNAEYKDGQDAPRYPSMFMRSPRSFVGHDTPLVRPRASAQLDYEGEIVLVIGKQGRHIPESAALDHVAALTLCNEGSVRDWLRHAKFNVTQGKNFDSSGSLGPWLVPYTQESQIADVRLTTRVNGELRQDDRTSRLMFPVRYLLNYISTFATLVPGDIIVTGTPTGAGARFDPPRYLKPGDVVEVEAEGIGLLRNGVVDEA

SEQ ID NO: 9149 - protein, 327 aa, BradyrhizobiumColbertium
MPVPQHIFEPPFNIIRSSHVVLDVTDLQLSRAFYETTVGLHVEDADDQVVYLRAAEEHQHHSLVLRKAAAPACARLGFKVGNDGDLDKAAKFLSENGLSYSFADQPFQGRTLQFTDPFGFQIELYASMDRRPHLLRRYDLYRGCHPQRLDHFNVFAAEVQDTMEFYAKLGFRLTEYAEEDGPSGRIAAAWMHRKGNVHDFAMTNGRGPRLHHFAYWTPTAMNIIHLCDVMASQGFVKNIERGPGRHGISNAFFLYVRDPDGHRLELYTSDYFTGDHDHEPLRWSLRDPRRQTLWGAPAPRSWFEQGSPFTGQAVREPKFVADVLVAD

SEQ ID NO: 9150 - protein, 512 aa, BradyrhizobiumColbertium
MDKPAPKTDVFQANRDRVAPLMKKLRADGIGHMIDGKTVASISGETFETKSPVDGTTLASVARGTAEDVDRAATAAALAFRSWRDMGPAMRKKLLHRVADAIEDNAEDIAVLECIDTGQAYRFMAKAAIRAAENFRFFADKCAEARDGLNTPSDEHWNVSTRVPIGPVGVITPWNTPFMLSTWKIAPALAAGCTVVHKPAEWSPVTASILAELVKEAGVPDGVLNTVHGFGEEAGKALTEHPAIKAIGFVGESATGSAIMMQGAPTLKRVHFELGGKNPVIVFDDADLDRALDAVVFMIYSLNGERCTSSSRLLIQQTIADKFVERLTSRVKALKVGHPLDPATEIGPLIHERHLAKVCSYFDVARQDGAVIAVGGKTHDGPGGGHYVEPTLVTGAHGKMRVAQEEVFGPFLTVLPFKEEADAIEIANDIRYGLTGYVWTNDMGRALRVGDALEAGMIWLNSENVRHLPTPFGGMKASGIGRDGGDYSFDFYMETKHVSLARGTHKIQKLGI

SEQ ID NO: 9151 - protein, 132 aa, BradyrhizobiumColbertium
MPHFTIEYSANLDGRLDIAAVCEVVRKAAVETGIFPIGGIRVRAIRCEHYAIADARHDYGFLDMVLRIGEGRDLETRQKAGRHVFQALSKHLDPVFAASKFALSFDMQINDKDTSWKRNNIHDALKAEAAHG

SEQ ID NO: 9152 - protein, 268 aa, BradyrhizobiumColbertium
MALSSDDIQACARRLHQAEKTRTQIRQLSQDFPDITIADAYAIQKAWVDVKIAEGRVVKGHKIGLTSKAMQSALDIDEPDSGVLLDDMFFTDGGIIPTERFIATRVEAELAFVMTKRLSGPSCTMFDVLNATDFVVPALEILDTRIERVDPRTKTTRKIYDTIADNAANAGIVLGGRPIRPLDTDLRWIGALCFKNGQLEETGLAAGVLNHPATAVAWLANKIAPLGLALEPGQVVLAGSFIRPIETRKGDTIQADYGAYGSVSCYFA

SEQ ID NO: 9153 - protein, 172 aa, BradyrhizobiumColbertium
MTKKLADPADGNAPAARHVPMRDFSRSLPMSLLRAREAVMRQFRPSLREHGLTEQQWRILRALAAIEAVEVTELARTAFLLGPSLSRILRDLEARNLIERKTAKADQRRSMVSISKEGVKLMAAVAPTSEAIYAEITRRFGARKLVELQEMLGELEQSLAGRGSADETIAEG

SEQ ID NO: 9154 - protein, 258 aa, BradyrhizobiumColbertium
MANKVKEIWKSGKAVVNAWLAIPSGFSAEMIAQCGFDSVTVDMQHGVQDYLSMVQCFQAMDKHPVTPMVRVPWNEPGIIGKVLDGGAYGVICPMVNTPQEARNLVSYSKYPPKGVRSNGPIRAGMYGSAGSYQKTANDEIVLLPMMETRTAVENMEAILDVEGIDGVYIGPSDLGFSYGLEPKLDRTEPEILAIYEKIIKECGKRGLNPGIHCSGAEGAARAINMGFKLVTLSNEVGLMTTYARMQVNATRKDSGGKA

SEQ ID NO: 9155 - protein, 507 aa, BradyrhizobiumColbertium
MAISPVIRLHPDDGVVIARASLPPGTVVADGVTTVDRIPSGHKVAIKPIALGEPIKRYGQIIGFATQAITPGQHVHVQNCGMGDFAKDYAYCADVKPTPNFDLPATFEGIRRPDGRVATRNYIGILTSVNCSAHVASLVADVFKKNPFSGDNPLADFPNVDGVVALTHKTGCGMTQNEPLALLRRTLGGYARHVNFSHVIVLGLGCEVNQIGGLMEEQKLAGRLRAMDIQEVGGTRKTVEAGIAFVREALADANTVKRETVPASELTVALQCGGSDGYSGVSANPALGAASDLVVRHGGTVILSETPETYGAEHLLTRRAVSREVGEKLVDLMRWWDEYTTREGAEMNANPSPGNKAGGLTTILEKSLGAMAKAGTTNLVEVLRYAEPVTKKGFVFMDTPGYDPVAATGQVAGGANLVCFTTGRGSVFGCKPAPSIKLATNTPMYKRMEEDMDVNCGTILEGEESVEQCGQRIFDLILKTASGKPTKSESFDFGGAEFAPWVLGATM

SEQ ID NO: 9156 - protein, 164 aa, BradyrhizobiumColbertium
MENLLGEEELIVSKTDLKGRITYANDVFIRMAKYSWKELMGAPHSLIRHPDMPLAVFKLLWDTLQSKQEIFAYVVNLAKDGSHYWVLAHVTPTFDERGNVVGYHSNRRKPDPAQIDRIKPIYKTLCAEEARHANAKEGMHASFEAMVGLLKQQGVGYDEFVLSL

SEQ ID NO: 9157 - protein, 368 aa, BradyrhizobiumColbertium
MCRKAARGDLEARIMTERQAGRIGAIQKSVNDMLDITDAFVREASASMDYASRGRYFRKILARGLPGSFRRSAVVINAGTDSLGRRVVEIAGLAREFGTHLDAVAGGLMCAATDLESDAGQMAAAAEKTSRQTSGVLSASDQASRNVATVASAAEQLASSIAEINRQVAGSTASTGRAVNEANRAGSEIRTLADAAMQIGDVVKLISEIASQTNLLALNATIEAARAGEAGRGFAVVASEVKSLANQTAKATEEISAKVGEMQHSTTNSVAAVEAIAQTISEINGITASIAASIEQQGAATREIARNVQEASVGTSQVSSNVTGISEAAADTGRVAGRVNSASERVYGEVETLRREVTQFLQRLTSAA

SEQ ID NO: 9158 - protein, 1089 aa, BradyrhizobiumColbertium
MSIYVALHHVTHYKYDRPIDLGPQTIRLRPAPHTRTPILSYSLKVTPSNHFVNWQQDPQGNWVARYVFPEKATELKFEVDFTARMTVVNPFDFFVEPYADSFPFEYPDDLKTELAPYLETIKPDRLFARFLDSIPHEAPNTVNFLVELNRELQKKVRYIIRMEPGVQTPEETLASGAGSCRDSAWLLIQTLRHLGLAARFVSGYLIQIRPDIDPIEGPPEVENDFTDLHAWAEVYLPGAGWIGFDATSGMLAGEGHIPVAATPHYRSAAPISGGAGFAEVEFSFDMSVKRIREAPRITKPFSDESWARLDDLGEQVDGDLASADVRLTMGGEPTFVSVDDPEAGEWNTEAVGPTKRALGDDLIRRLRTRFAPGGLLHYGQGKWYPGESLPRWAFGLYWRKDGVPIWRNADLIAKIENPRRPEVRDAEAFMEGTAARLGLDLGYIMPAYEDPAYWLQKEAELPVNVDPTDSKLSDPEARARMARVFDQGLTTPRGFVLPVQRWNAPPRWRSERWSLRRNHLFLTPGDSPLGLRLPIGSLAHVPPNQYPYIVEQDPMEPRGKLPVFTRMARPPAPPRTAPEHLNTAIPVRTALAIEIRDGVICAFMPPVERIEDYLELVSALEDTAEEMQLPVHVEGYPPPFDPRIEVIKVTPDPGVIEINIQPARSWRDAVEITSGLYEDAAKVRLGANRFLVDGRHTGTGGGNHVVVGGSSPQDSPFLRRPDLLKSLVLYWQRHPSLSYFFSGLFIGPTSQAPRIDEARHDSIYELEIALSHVPPPGTQTPLWLVDRLFRHLLVDITGNTHRAEICIDKLYSPEGPTGRLGLVEFRALEMPPDPRMSLAQQLLIRALIAKFWREPLAGKFVRWGTALHDRYMLPHFIWEDFLDVLTELKQFGYPFEPEWYLAQLEFRFPAFGRVHHGGVTLELRQALEPWHVLGEEGSAGGTVRYVDSSVERLQVKAEGFVEGRHIVTCNGRRLPMTSTGRSTEAVAGVRFKAWQPASGLHPTIPVHAPLTFDLIDTWNGRSLGGCVYHVAHPGGRNYDTKPVNTYEAEARRLARFQDHGHTPGPVQPPPEERTNEFPLTLDLRTPLLQ

SEQ ID NO: 9159 - protein, 845 aa, BradyrhizobiumColbertium
METRMGEGAAEQDDKAGRAQSQREGQRRLAQWVRDYSRLPGIPDEFLGPNGTPRAVWSRFFDAFGALAPDEIERRFGMADRHLREAGVTYRAPGDSADRPWSISHLPLLIDEADWQQLCAGITQRAELLERVLRDIYGEGRLVAEGALPAAAIAGSPEYLRPVCGVPPPGGRYLSLYAADVGRGPDGRWWVLGDRTQAPSGAGYALENRLVLSRAFSDLYKSMNVPRVAPFFEAFRDSLRARADRDEPRIGVLTPGSFSETYFEHATLARYLGFLLVEGEDLAVSDNRVHIRTVAGLKRLDVLLRRVDSNSLDPLELDASSRLGVPGLIDVLRKDGVVVANMPGSGVLEARALLGFLPALSRRLLGEDLKMPHIATWWCGQRAARDEVLARLDEVAIEGAYRRDVPGFDSNGPVLASELDAADRQRLIDAITARGMDYVGQEVVRLSTMPVWEKGQLTPRPFVLRVFAAATPDGWAIMPGGFCRIAEQPDARAVSMGDGARAADVWVVSDKQVSTATLLPATDKVRIRRIAGVLPSRAADNLFWLGRYLERAEATLRLVRALGSPSGPNKGTAASVQSAERIQRLLVAWGAISQTSRTASGRITAEALQSAERFGSALSLVRAAQRTATSLRERLSPDAWQVITEMVERLALEVEDDDSVLSAAELTLQELASFAGLAQENMNRAAGWRFLDIGRRIERAINTTRFTRQFAYDEAGDEDLDILLTLVDCQITYRSRYLLAPILAPVRDLAVLDGYNPRSVAFQVTTLNEHIAALPSLREHGLIEKPQRLAVAMQAMLATAEAEKLEVKTLFALEQDLLSLADAIGQHYFPHGPNASRPEKLTGLA

SEQ ID NO: 9160 - protein, 292 aa, BradyrhizobiumColbertium
MIYDIRHVTTYEYENPVSFARCTLRLEPRSGGGQELISHDVEIHPRPAERNQRRDFFGTLTESVTIEAAHRSLRIDSRSRVSVSRQPPARSAAGPSWESIRDIAIEATSLGPSSPVGYVFASPLVPVLRPVSAYAAESFASGTGILEGAVDLMHRIRSEFRYDPKATVITTPLEEVFDKRHGVCQDFAHVMIAGLRGLGLPAAYVSGYLRTIPPPGQRRLQGADATHAWVSLWCGAELGWVDLDPTNDLLIGNDHIVLAVGRDFSDVSPVDGIIVGSPRQKLNVAVDVLLVE

SEQ ID NO: 9161 - protein, 270 aa, BradyrhizobiumColbertium
MPIFLDRHDLSGLTAADIAEAHRKDLEVQDRYGVRFLTYWFDESRGTGFCLIDAPDIRTAMRVHDEAHGDVAKDVIEVDLSAVQAFLGRVSDPAPGGAADDIKFDSALRAIMFTDIVGSTSMTERLGDARSVEMVRAHDALVRRALKDEGGHVVKHTGDGIMASFADASASVQCARAIQRAFEAFNLASKEKLQVRIGIDVGEPIADSNDLFGATVQLAARLCQLADPDAILVSKAVQDCIRDRVQVSSLGAHHLKGFQQPIDAYRIEWR

SEQ ID NO: 9162 - protein, 72 aa, BradyrhizobiumColbertium
MTWADGDWTLGFDGCPAHTYGSILADLSGLDELTAVERYLADVIGNVSVIALRRFSGVPSDGWLTDVLPKKW

SEQ ID NO: 9163 - protein, 107 aa, BradyrhizobiumColbertium
MLVVLVGGITPVNTDLVFDKFADCLSAEEQMRKHYSDAFEAWDRWAAANIERRREYSKARELQAKRLLSNIGTCVPHGADDQKPVASPNPSAPATSPSPAPQPNPRP

SEQ ID NO: 9164 - protein, 80 aa, BradyrhizobiumColbertium
MRFILTIVSLLGVLTSPALADHWKDESGKGRWGYDRGHYRAYNYDREYKQEYRRGPCKIERKWGKHGEYKEATKCKGYRN

SEQ ID NO: 9165 - protein, 274 aa, BradyrhizobiumColbertium
MKLLHLSDIHLTAPGSTIGGRDPRINFERALAHALNDHHDAELMVITGDLSDWGDLADYQWLKQRLDAYPLPVRLCIGNHDRRTAFLSVFPDLADDNGFVQGIHDTVAGRCLFLDTAHPETHAGRYCSDRLGWLEARLSEHDGPFLLFMHHNPMPVHLVPFDQIGLLDDAPFRHLISRHRAKIRHVFFGHCHLPLAGSIAGVPVSSLRGTNHASFPLFSETSLLSACDLPQSYGVAFLGEDYVTVHMVEYGYDGPIRIQGSPDYKAWDRETMVR

SEQ ID NO: 9166 - protein, 426 aa, BradyrhizobiumColbertium
MLKTIIAAAALSLVAGSALAQTQTEIVMQYPYPELFTETHKRIAEEFAKIHPEIKVTMRAPYESYEDGTQKVLREAVTNQMPDVSFQGLNRIRVLVDKNIPAALDGYIAAEKDFDKQGFHQAMFDIGTASGKVYALPFAISLPIVYVNLDLVKQAGGDVNNLPKTWDDLIALAKKIKALGNDTNGVTYAWDITGNWLWQAPVFARGGTMLNADETKVAFDGAEGKFAINTIARLVNEAGMPNLDQPSMRATFAAGKTGFHITSTSDLNKVTQMTGGKFALKTIPFPDVASPNGRLPAGGNVVLILAKDKAKRDAAWEAVKFWTGPKGAAIMAETTGYMPPNKVANDVYLKDFYVKNPNNYTAVSQLALLTKWYAFPGDNGLKITDVIKDHLNSIISGARTKEPEAVLADMTADVQKLLPKTTGAAR

SEQ ID NO: 9167 - protein, 263 aa, BradyrhizobiumColbertium
MLLIAGAAIMLAPFIWMISTASKPQTEIFSSELHLIPHQFALAENLREAFAKANLLRFLLNGVIVTVSIFLLQVMVALPAAYALAKLRFLGRETMFALVLFGILTPPQATAVPVFLLLHKAGLLDSYAALVLPFTISVFGIFLMRQFFKTVPDDLVDAARMDGISEFGIVWRVMLPAAIPAVTAFGIFSVVAHWNDYFWPLIVLNSEHLRTPPLAVAHFRNNEAGTSYGPLMAAAMVIIAPLVIAFLFAQRRFIEGITLTGIK

SEQ ID NO: 9168 - protein, 315 aa, BradyrhizobiumColbertium
MSDGSMTMDAAIAPASAARRAVPVHGSRRTYSAYALVTPAAALMLIMLLGPLAGVIALSFTDYQLGAPHFSWIGLANYQDLFADKVFWTALRNTLTYVVIVVPGAVIAGLAIALLIQSGTSLRSLYRTIYFLPVMATLIAMAVVWEFMLHPQFGLVNGMLRGAGLPAFAWLQDRNTALYALCAIGIWQAVGFNMVLFLAGLVSIPKQLYEAAEIDGASSGWARFRLVTWPMLGPVTTFVVVISGIRSFQVFDTVHVLTKGGPSKSTEVLIHTMYTEGFEFFRSGYAAAITVVFLVFVLLLTLIKSRLADRGVHYT

SEQ ID NO: 9169 - protein, 383 aa, BradyrhizobiumColbertium
MAQIELSAIRKSFDGTDVLKGIDFRIEDGEFISLVGPSGCGKSTLLRVIAGLEPQNSGEVRIDGRPVDGIRPSARNLAMVFQSYALYPHLNTFDNIAVPLRMRRLSAIERLPLLGAVLPGRRAKERHIRNDVEAIAEQLDIAPLLRRKPGQLSGGQRQRVAVGRAMVREPRAFLFDEPLSNLDAKLRVHMRAELAELHRRLKATFVYVTHDQAEAMTMSSRIAVMMDGELIQAGTPAEIYNDPEDIRVAEFIGSPKINILPGRIRKDGGVDVLGTALKLSCRAAAGDCRVGVRPERIDLGAGPFSGTVVHLENLGAEAFVHLAIEGSGLRLIARLADVRHLPGMASSVTFGFAPDAVRIFDPAGKRIELKVEQPERVREPAHV

SEQ ID NO: 9170 - protein, 299 aa, BradyrhizobiumColbertium
MALTSSRVRAVNAVFETGSFAAAARRLGVSQPAVAQLVRDLEAEFAVALFDRHGQTLIPTPLCRRLYAATNRMQAIEADALAILQQRDELTGGELRIGLGNAMPGMALIAAFRNLYPKIQINIEIGSWSAIMAAVVDQRVDVAVLPEVPQDNRFRRESCVQQRVVAICHPVHELSRQSRVSIADLVRYPLVFRTRDSATQRAVDRAFRAVNLRASPAIIVNTREGMLEAVANRLGVGFVWEHGSSRIDRIAKVAIAEIEADSPEYIFSLAGKRGKLVELFYLARSLSRSAEGAAILSAP

SEQ ID NO: 9171 - protein, 275 aa, BradyrhizobiumColbertium
MMTLPRLAAESLEEFLGRFMRRRYDETSASIVESATRTAMECIGNSDALYHNIEHTMLVTLAAQAILRGRSLHTHLSAEDYVHVLIACLAHDIGYVRGLFEEDDAEGFIIDAADTKISLPRGASDASLMMYHVDRSKLYVTRRLRHIPGLDPDRIASAIEGTRFPAREGQEYDEEASILRAADFIGQLGDPNYLRKANALYYEFEEVGINRQLGYDSPADIVNRYPQFYWNSVAPHIQTEIGYLNKTEIGRQWIANLYSNVFRAERDISLSGPQR

SEQ ID NO: 9172 - protein, 296 aa, BradyrhizobiumColbertium
MQQKTVSTDILDIAYREYGAADGWPCILGHGFPYDVNAYAETAPIIAEAGARVLVPWLRGYGPTRFRSAGTLRSGEQAALGADLLAFMDALGIERALVGGYDWGGRAACVVSALYPERVIALVSGNSYNIQNIARAMEPASPPEEAALWYQYLFHNERGRRALERNRRGFARQLWAMWSPKWAFDDATFEASAEAFDNPDFVDVVIHSYRHRYALVDGDPAYAAIEARLAAQPPIRVPTIAIDGDSDGVNPGTAHHAHKFAGFFERRVFTNAGHNLPQERPAEWARAVLDVRKAVA

SEQ ID NO: 9173 - protein, 208 aa, BradyrhizobiumColbertium
MTSRARKLERVAVAQAPSERPDRAEVEQAIRTMIRWAGDDPARDGLRDTPDRVARAFEEYFSGYAQDPTEILQKTFEEIEGYDEMIVLRGVRFESHCEHHMAPIVGRAWVAYIPQGRVVGISKLARLVDVYAKRLQIQEKMTAQIANTINDVLEPQGVGVIIKATHHCMTTRGAHKPGTDLVTSRMLGVFRDNAVTRQELLGLANSDS

SEQ ID NO: 9174 - protein, 203 aa, BradyrhizobiumColbertium
MTTASDASHHSSLGSSISALHAKWGWIVALGVVYLIAGFVALGSMVMATVASVIVVGAMMIVAGVTEVIGAFQLKSWGKFLIWALLGVLYIIAGFLTFQNPLLAAVVLTLFLGAALLASGAVRLYLAFSMKRESPWGWVALSGAITLLLGLLIVARWPVNSVYILGLFLGIDLIMAGAGWISLGFALKRRGQASHQQLDARPS

SEQ ID NO: 9175 - protein, 403 aa, BradyrhizobiumColbertium
MKAALALAAALAAACLSTPVAAQKSYGPGVTDTEIKIGNTMPYSGPASPLSITGRVISAYFDEINEKGGVNGRKLNLISLDDAFSPPKTMEAARRLVEGEGVAFIFATMGTAPSSAIAKYLNSNKVPQIFLISSASKWNDPANMPWSIALPWAPNYTSEAAIDVAYARAKNPNARFAVLYQNDDAGKEYLRGVKEALGADADKAIAMASSFEVADPTVDSQVLTLANTKADVFLIYSVTPRACAQAIRKAHEVGWQPMRFIASGCANKATVMVPAGLDAGKGVLSLGSLKPFVAEPKSDPAMTAYIDFMKKRLPNADVNNVAGLYGYTVAEALVVLLKQCKDNLTRENIMAQAANLKNVPLSLLMPGITLNTTPQDFRPIKDGYMLQFDGNDWVVASELLRGT

SEQ ID NO: 9176 - protein, 404 aa, BradyrhizobiumColbertium
MDFHHSARSLELQDRVRRFMRTHVEPVEDLYYEQVKPEAVRYRTPPVLQDLKKLAREQGLWNLFLSGEHGPGLTNLEYAPVKEIMGRILWAPEVFNCSAPDVGNMEVLANYGTSAQQERWLKPLLDGRIRSGFSMTEPQVASSDATNIQCEIRRDGDDYVINGRKWFTSGAMNEDCEILIVMGKTAPDDPDRHRQQSMILVPRNTPGVRIVRDMLTYGYDDAPVGHPEIVYDNVRLPAENILLGEGRGFEIAQGRLGPGRIHHCMRLIGCAQRALELMCQRAVSRIAFGKPLAEQGSVREDIAHSFCEIAQARLLTLQAADKMDREGNKAARDLIAAAKIVVPSMAARVIDRAIQIHGAAGVSQDTFLARAYVYARFIRIGDGPDQVHLAAVGKELIKRGGVML

SEQ ID NO: 9177 - protein, 45 aa, BradyrhizobiumColbertium
MTIARVPGQRFTAAPLHADTVGDRSPYSRCGWFSWFGLGRPPRAW

SEQ ID NO: 9178 - protein, 87 aa, BradyrhizobiumColbertium
MVVRACHEHGAEAVACAADLTDPAAVERIRDAAVAAYGRIDVWVNCAAVLMVGRFEDMPIEAFRRVIDVNLMGCVNGSRVALSQFRT

SEQ ID NO: 9179 - protein, 184 aa, BradyrhizobiumColbertium
MTGEPLLSPYVATKFAVRGFTACLRQEFERAADIHVCLVMPWAVDTPVYSKMGNVFGRQARSIFPVIAAGRVARAIVGLSERPRREVIVGISGYMLGIALKLAPMLVERIVARVAPVLQFKPDPQPPTMGNLFTPIGPYSVGGGWKSYWAERATRLFRPASANVQTQDTPPKRPSRPEGRAEAD

SEQ ID NO: 9180 - protein, 79 aa, BradyrhizobiumColbertium
MVTIKILGSGCANCKKLETVAREAAGRANVPAEFVKITDFKDIMAYDLLSTPGLVINEKLVSSGRIPTVAEVQKLLATA

SEQ ID NO: 9181 - protein, 481 aa, BradyrhizobiumColbertium
MELAIKLLIGGTGSLASYLAAHVLLCLLPAFFIAGAMVALIPKASITRWLGRNTPAYVSYPAAAAAGSVLAVCSCTVVPLFAGIYRKGAGIGPAIAFLFFAPAGNIMALTYTGSILGLEFAVARGVMCLLFGIGIGLLMALLFWRDDIGHDTQTDALFSEQADISPAALGVLLSLIAVLIAGTIKLWPFTAIMATVHLPLPWAAAWQAALFEWMPFDVAKGEEGIGFHGSVLIALLLLIAATAWRGLENIIEGANVWTWLALGLSATTLLVAAARLTPQPGGLEVALTGRVLAVALAMWAVWYFASMLAQDDWRSWLWESWRFVTQIFVLLLVGVFVVGMVRQVIRPEWIESLAGSNTLLANALGVGFGIFMYFPTLVEVPVARMFLDLGMHRGPLLAYLMADPELSLQSVLMVAVVIGRAKTAAYVGAVALFSISAGLIYGAWVDGMSWASLALTLVSIMAAISGSLAWLRQRQRAAATA

SEQ ID NO: 9182 - protein, 39 aa, BradyrhizobiumColbertium
MIVGFARPALGDRVAQQKPENNPMHSSNRQHLQCLAGNF

SEQ ID NO: 9183 - protein, 579 aa, BradyrhizobiumColbertium
MTSDRSGNATKLAGRFTLATKLYAIFGLFALLTAAIALLSDYNSRRSADLANAIETANAAALNVERVNSLVYAVVMESRGVYMSTEPAVVKKYGDGLLKFNAQILDVVKRWETIVKADDAEQFATFRKRIEQFVEFRKELVRRGVEINAAAGREWGDNDANRAVRSALNKDLEALSKVYAERAKQIAQQTETSRELSFVLTCLGGVALALVVLGIVIIARSIARPLAAITGTIKQVADGAENVAVPYSERADEIGALARAIQVFQEAMGRNRDLASQVSQDSAAREERARHIERSVETFREAIGAVMRGLSDNASTMRETAQTITRVTADASSRAGTAANATEQASHNVTAVAGAAEELSASVVEIGRQVRQSAGAVEQTGQRTEKSISEIESLAAATQRIDGVLNLIQAIAEQTNLLALNATIEAARAGDAGRGFAVVAHEVKALAGQTAKATAEISENVSMIQASTRNAVDAVREIGGAVREINEVTSAIAGAVSQQDAATREISSNAQSAAQGNETLVANITSLRDAIGETDTAAASVLTAASSVTETAQTLSREVEKFFQNLRGGSADSRIAKAG

SEQ ID NO: 9184 - protein, 45 aa, BradyrhizobiumColbertium
MAEGRSILKAIPAAGNTPLAAGVHADVRGIPLLQPAETDDAPSTH

SEQ ID NO: 9185 - protein, 460 aa, BradyrhizobiumColbertium
MVYRHTIDATSYTFPDLRDLLAKATPPRSGDRLAAVAAETAAQMIAARMALADVPLGQFLQEAVIPYEADEVTRLVIDSHDAKAFAPVASLTVGAFRDWLLSDSATPEVLKTLAPGITPEMAAAVSKLMRNQDLILAARKCEVTTAFRNTIGLKGRMSTRLQPNHPFDDAKGITASILDGILLGAGDACIGINPASDDPAVIGQLLRLLDEIIARLQIPTQGCVLTHVTTTLSLIGKGVPVDLVFQSVAGTEAANRSFGIDLALLKEVQQAGLSLRRGTVGQNVMYFETGQGSALSAGAHHGVDQQTCEARAYAVARAFAPLLVNSVVGFIGPEYLYDGKEIIRAGLEDHFCGKLLGLPLGVDICYTNHAEADQDDMDNLLTLLAAAGVTFIMGVPGADDVMLNYQSTSFHDALYVRDVFGLRRAPEFDAWLARSGIAGADSRLASDAGLLPDFAARLIA

SEQ ID NO: 9186 - protein, 514 aa, BradyrhizobiumColbertium
MFPRYTSSFGTFEHSYPLTDGVRAFMPPQGLLLISAYLPQEWQVKFVDENLRRTTKEEFEWAEAVFVSGMHIQRQQMNDICRRAHDFDLPVALGGPSVSACPDYYPSFDYLHVGELGDATNQLIEILSRDTSRPEQQVVLTTKDRVPMTEFPIPAYELADVKKYFLGSIQYSSGCPYQCEFCDIPGLYGRNPRIKAPQQIIAELDRLRECGMTDTVYFVDDNFIGNRKAALDLLPHLIEWQKRTGYVVRLACEATLNIAKRPEILEKMREAYFVTIFCGIETPDPDALKAMQKDHNMMVPILEGVRTINSYGMEVVSGIIMGLDTDKPNTSEALLAFVEESRIPLLTINLLQALPKTPLWDRLEREGRLVHDDGRDSNVDFLLPYDEVVASWKHAMAAAYAPEKVYARYQYQCDNVYARRLKMPVPDEMKTWRNIRRGLVMLRNIFWKVGVLGDYRRVFWKFALGRIKRGDIEGLIGCTLIAHHLITFARAASSGEQNASNYSIRLREAAVPAE

SEQ ID NO: 9187 - protein, 261 aa, BradyrhizobiumColbertium
MSDPAVPRRSTLDLRTFTPARVALGRSGASLPTKALLDFTLDHARARDAVHADFDAARLIADLGPLGLAVTEVRSQALDRSDYLRRPDLGRRLEPGSAQLLARSASAPCQLAVVVADGLSAAAVHSHAADVVRRLLPSLAEDEAVAIDHVVVASGARVALGDEIGAILGARMVVMLIGERPGLSAPDSLGAYLTFAPQPGRTDAERNCVSNIHHAGLSHDEAAFKIAWLIREGLAREVTGVALKDESAERAPRRIGTFSSG

SEQ ID NO: 9188 - protein, 788 aa, BradyrhizobiumColbertium
MLEKHSENEVHVDKVEQGPTSSIAFGLERLGLIAVRAPIVSCIVLLALMVGAVFGIYRIKIDDSLSQLFRSDTREFRQYEEVTKKFPAEEFDVLVVVEGKTLLERSNLEKLRDFVTDLQLVEGTRGLVSLFSARQAPAPGKLPAALFPAELPEGDAYNKFIETVKNNEIIRGKLLSEDGTLALVVLSLDPKVVASNKLTKTVADIRDLVKEDLGDTGLNVQLSGVPVMQLEIRNAVERDGLTYNVLGILAGCIIAIIFFRKISFMIAAAFPPMIAILLALGALGWANFNLNMFLNVMTPLIMVISFSDSMQLTFAARDRLIAGQDKFTAFKNAVLVVGPACVLTHGTAGISFIALQFSDSDLIRKFGEAGLAATIIALFAVLSLVPVFGVLLVRNEKVFAVKFQGADAGVQALRNFCYWIAVRMVGRPGLFSLIAVLFVGGLGVIYANLEPRYRLADQVPDKRQAVAASDRLDAKLTGANPVNVLIAFPKGESLYSPETLQTIADVHSTVEKTAGVGNVWSLETLRRWLAEKAGSADVATLKEYVNVIPEHLVRRFIDAEQDAVVVAGRVPDKDSSQLLPIVDKLDSELDAVRKKHPGYEIAVTGLAAIAARNSANMIEKLNHGLTIEFALVAIFIGLAFRSWVVTLACILPGIFPVVMSGAVLWAMGEGLQFASVVALTVSFGLGLSATIHFLNRLRLENKPGVGSALAVERATVLVGPALILTTVVLACGLVVTVFSDLPSLRLFGWLSAFSMVMALVADLFILRPTAMWLINLHDKLQGPNKPAI

SEQ ID NO: 9189 - protein, 59 aa, BradyrhizobiumColbertium
MGRSFGVCWDGVFQKAQSEADKMALFNHTGVLYLLSLREQDYAPGDFKFDRCGIIRIEA

SEQ ID NO: 9190 - protein, 165 aa, BradyrhizobiumColbertium
MTFFGRSGLALRTAGIGAALLFSVSASHAQSSGPFAGFDGAWTGTGTVSLSDGSTERIRCKADYKVAGSGLNLKQALNCASDSYKFNLTSDVTSQGERISGNWSESSRNIFGNLQGTAGGGQIDVFVEANGFAANLSLRTNGTKQTVQISSKGEIRGVNITMTKG

SEQ ID NO: 9191 - protein, 77 aa, BradyrhizobiumColbertium
MRKLLVALTLLSASLPTAAFAQAGRGTDAEQKACTRDVQKFCRPVIDQGDFTILACLKENRSKISQACDQVLKNHNQ

SEQ ID NO: 9192 - protein, 312 aa, BradyrhizobiumColbertium
MSPRERKAFLSTIVNQPSMTSASELRSGKGDRDENFPVASWIIHPRHRALILAYYNFVRTADDIADHATLPPDQKLAYLDLLEAELLGKGDTQAEAVILRRALAERGMAPRHALDVLIAFRMDVTKLRYETWDEVIHYCRYSAMPVGRFMLDVHGESTSTWAASDALCAGLQINNHLQDCGKDFRELNRVYLPRDALAASGASVEQLGLAQSPPAMLACLQGLAARNEALLKQSKSLSTEIRDFRLGIDVAVIQAYADRIVRLLKVRDPLRERVHLNKFELLTFSLAGMIGEVGRRAIGRKAISRPGTAHDA

SEQ ID NO: 9193 - protein, 279 aa, BradyrhizobiumColbertium
MTLEATTPGANYGSTASGSSFYAAMRILPRDQREAMFQIYSFCRQVDDIADSDGPREERLAALQEWRNDIDALYRGNPPPRLKDYVASVKTFGLKRDDFLAIVDGMEMDVPQDIRAPDMATLDLYCDRVASAVGRLSVRVFGLPEEEGIQLAYHLGRALQLTNILRDIDEDAGLGRLYLPREALLHAGITSSDPNRVIAERALPKVCMPLTQRAKAHFEKADEIMNRNKRRVVRAPRIMSKYYHSILDLLIARGFTAPREPVRVSKVTRVLILLRYAFI

SEQ ID NO: 9194 - protein, 418 aa, BradyrhizobiumColbertium
MQNTAHIIGAGISGLSAAVRLANAGFKVAVHEATHQAGGRCRSYFDGATNLTIDNGNHLLLSGNNHARAYARAIGTEAGLVGPERAQFPFVDIKTGQRWQIDLGDGRLPTWVLDESRRVPDTGLTDYLKLAPLVWASEETLVGKCIPTEGVLYQRLVQPLLLAALNVDPPEGSAGLAGAIVRETLLAGGQACRPLIARDGLSAVLIEPAVKFLAERGHTVQLGHELRSFATGDGKASALNFGGDDVIQLDDGDVVVMAVPPRAASSLLPGVKTPTEFRAIVNAHFRFEPPPGAPPILGVIGGVVEWLFAFPNRLSVTISNGDRLVDRPREELAQAIWDDVCKAGGVSGELPPWQIVRERRATFAATPAQNALRPGPVTALKNLFLAGDWTATGLPATIEGSVRSGDRAADLVLAAKGS

SEQ ID NO: 9195 - protein, 676 aa, BradyrhizobiumColbertium
MNVPVNFNGLSEQSSDMDSVNATSREALNSKGLDSKVLESSIASAAEGVLGFQQPDGHWVFELEADATIPAEYVLLRHHLAEPVDPVLEARIGNYLRRIQGAHGGWPLVHDGEFDMSASVKAYFALKMIGDSIDSPHMVRAREAIRARGGAIHSNVFTRFTLAMYGVVSWRAVPVLPVEIVLLPFWSPFHLNKISYWARTTMVPLMVIAALKPRARNPKGVGIDELFLQDPRSIGMTAKAPHQSMAWFLLFRSLDAILRVVEPMFPKSLRKRAIDAALAFTEERLNGEDGMGAIYPPMANIVMMYDALGKDENYPPRAITRRGIDKLLVINGEEAYCQPCVSPVWDTTLTAHALLEAGGDKAVPAAKQGLDWLLPKQELEVKGDWAVKRPNVRPGGWAFQYNNAHYPDLDDTAVVVMSMDRMRREHGATGYDAAIARGREWIEGMQSDDGGWAAFDVNNLEYYLNNIPFSDHGALLDPPTEDVTARCISMLAQLGETEKTSKHVADGIAYLRKTQHPEGSWYGRWGMNFIYGTWSVLCALNMAGVDHKDPMIRKAANWLASIQNEDGGWGEDAVSYRLDYNGWEPAPSTASQTAWALLALMAAGEVDHPAVARGVEYLIATQNKKGLWDEQRYTATGFPRVFYLRYHGYPKFFPLWALARYRNLRNTNSRVVGVGM

SEQ ID NO: 9196 - protein, 212 aa, BradyrhizobiumColbertium
MAVICSSSSPAQLRALLTVVDPETIRGVISFGVAGGLDPSLRSGDVVLATEVLSGDTRWAAGLSLGDDLIERLTSGRRRVVRGSLAGAEEVVTGRSCKAALHSETGAFAVDMESHIAAAYAAEAGLPFAAVRVISDPAHRALPALARAAIKPNGKIDLAAVLRGVVRNPATLHALVSTGIDFNRALRSLRGCRDHLIGTELVESEVLVSKAA

SEQ ID NO: 9197 - protein, 386 aa, BradyrhizobiumColbertium
MAIPFFKEMRIGGYLLKQRLLGRKRYPLVLMLEPLFRCNLACVGCGKIDYPDAILNRRMTAQECWDAADECGAPMVAIPGGEPLIHKEIGEIVRGLVARKKFVSLCTNALLLEKKLDLFEPSPYLFFSVHLDGLRDHHDKAVSQKGVFDRAVSAIKAAKARGFTVNVNATIFDGHPAEEIAKFLDLTVELGVGVSMSPGYAYERAPDQEHFLNRTKTKKLFRDVFAMGKGKKWNFMHSGLFLDFLAGNQEYECTPWGMPARNIFGWQKPCYLLGEGYAKTFKELMETTDWDSYGTGRYEKCADCMAHCGYEPTAATAALNNPLKAMWVALRGVRTTGPMAPEIDLSKQRPAQYIFSEQVQKKLSEIRKDEAAAAQAKTAQKASTAA

SEQ ID NO: 9198 - protein, 308 aa, BradyrhizobiumColbertium
MEVYLAQPRGFCAGVVRAIEIVERALEKYGPPVYVRHEIVHNKYVVENLKNKGAIFVEELSEVPPKAVTVFSAHGVARSVEEEATARDLPVLNATCPLVTKVHNQGKRYVAKGRTLILIGHTGHPEVEGTMGQVPGPVQLVQSVEEVEALTLPADTPVAYITQTTLSVDDTKDIIAALHVRFTDIQGPDIRDICYATQNRQSAVRDLSKLVDVILVVGAANSSNSNRLREIGTEAGVASYLIADGSELNPEWLKNARTVGVTAGASAPEVLVDDVIEAMRRIGPVKVSVLPGREENIEFRLPAQLAAS

SEQ ID NO: 9199 - protein, 862 aa, BradyrhizobiumColbertium
MLQSVVVAIVRACTRFASLVVVLGLLLSVGAGYYAARHFAINTDINSLISQNLDWRKRDQQFDKAFDQNETILAVVEARTPEMASAATDALYARLKDDKTNFQSMQQLGGGEFFEKNGLLFLPTEEVAKITGQFEAAAPLIEIMAGDPSIRGLTGALETGLAGVKRGQVKLDNTARPFNLIAQTVETVLNKGNASFSWRELVSDEPLKDSDKRTFIEFKPILDYNALEPGKDATEAIRKAAADLDFPNKYQARVRLTGPVPIANEEYATVQEGAVVNGIGTILVVLLILWLALHSAKIIFAVFVNLFVGLAITTAAGLMMVGSLNLLSIAFAVLFVGLGVDFGIQYSVRYRSERYKHDDLTGALVLAAKRSAVPLSLAAMATAAGFLCFMPTDYKGISELGQIAGVGMLVAFISSITVLPALLKLLNPPGEPEPVGYAFLAPLDHFLEKHRVLIVGGTLLLALGGMPLLYFMKFDFNPMNLRNPHAESIATFLDLRKDPNTGANAINVMVTSEEQAKQVEARLEKVPEVLRVMSLNSFVPQDQGPKLKLLAQGAKVLNPALNPEQIDAPPTDQENVESLKSSVDTLRRTAGDAKGPGAVASRRLADALEKLANSDETTRNRAQDVFVTPMKIVFNQLRNAMQAEPVTLQSLPPGLVSGWKSKDGIIRVEALPKGDPNDNETLRKFAAAVLAAEPTAIGGPVSILKSGDTVVKAFIHAGIYALLVIGLLLWITLGRFVDVLMTLVPLLVAGAVTLEICVLIGLPLNFANIVALPLLLGVGVAFKIYYVVAWRSGRTNLLQTSLTRAIFFSALTTATAFGSLWLSSHPGTSSMGKLLALSLVTTLAAVLLFQPALMGKPRDLRE

SEQ ID NO: 9200 - protein, 171 aa, BradyrhizobiumColbertium
MWGAVSWEKQPGGRDENNPDASKKNRPTLGMATLIDMKKKPGIDQWEGQVYNAKDGQLYSATITPAGPDQLEIKGCVMGFLCGGETWTRVSPPIPASPANAMAKGAPKSSGAAPRAQGAQQGAQAAQATTGATAPAPATPKAAGTAKSGQKNAADPVGDICLLPEIARFAH

SEQ ID NO: 9201 - protein, 463 aa, BradyrhizobiumColbertium
MHSPNPDMSQLFADRQAQRSTLHNRYLNEQFVRVLKTIGYDVGFQKGQGQYLYDREGARYLDLLSGFGVFAIGRNHPVMREALKSVLDADLPNLVQFDVSTLAGVLAERLLKYVPYLDKAFFANSGAECVEAAIKFARGATGRPGIVYCAHGYHGLTYGALSLTGDSNFRTGFEPLLPGCTPIPFNDLAALEKALASREVAAFVVEPIQGKGVNMPTDEFLPGAAALCKKYGTLFVADEIQTGMGRTGRFLAVEHWNVEPDMVLLSKSLSGGHVPVGAVLTRKAIFDKIFNQMDRAVVHGSTFSKNDLAMAAGIATLDVMESEKLIESAAKRGAELRLALTRMVPGYELMKEVRGKGLMIGVEFGPPKSLRLRASWNVLETANKGLFCQLITVPLFKDHKILTQVAGHGSHTIKLLPPLTITEEDCSWIERAFDDVIAGSHKVPGAIWSLGKTLVDNAVRRSA

SEQ ID NO: 9202 - protein, 295 aa, BradyrhizobiumColbertium
MIHRRFSIGTAGAELAMLQWGERGKPPALLLHGTGFVADVWDEVARALASTHTVYALDRRGHGASHKPGAYQFLDYAEDVCRVVDALDLHDIYAIGHSAGATDLLLAARLLPGRFTRLFAMEPTIMDPRAARAGGLSEESQSLVAGTLRRRAEFDSADAVLERYRTAPAFADWTETSLRAYVRHGFVPLGDGRIRLCCTPEIESAILRPIFEAMEQVYIGDARGNPFAWLTEIECPVRVTTAAKSDAIYKEMAQRAVSLIPRVSTQVFDGAGHCVAQEMPERVVEAVRDYAKAGT

SEQ ID NO: 9203 - protein, 539 aa, BradyrhizobiumColbertium
MPRRLEGEFDYIVVGAGTAGCIVANRLSAMPSNRVLVLEAGGDDNWIWFHIPVGYLFAIGNPRSDWMFKTEAEPGLNGRSLAYPRGKVIGGCSAINAMISMRGQAADYDHWRQLGLTGWGYEDVLPLFKRLEDHFLGASEHHGAGGGWRIEAPRLSWAILDAVGDAAEEMGIKRIPDFNTGDNEGTSYFHVNQKRGRRWSSARGFLKPALNRPNLRLEKHVLVDRLIIEQGRAVGVRFIQNGQIIEARAKHGVILSAGSIGSVQVLHRSGIGPADWLSPLGIDIVMDKPGVGRNLQDHLQQRAIYKVEGVRTLNETYYNLLRRGLMGLDYAFRRRGPLTMAPSQLGIFTRSDATRARANIQFHVQPLSLDKFGDPLHRFPAITVSACNLQPTSRGTVRLRAATPEEKPIIAPNYLSTDDDRQVAADAIRTTRRLMQQKALARYRPSEYLPGPSVGDDDASLAKAAGDIGTTIFHPVGTAKMGAANDPMAVVDERLRFYGLDGLRIVDASIMPTITSGNTNTPTAMIAEKGATMILEDAK

SEQ ID NO: 9204 - protein, 390 aa, BradyrhizobiumColbertium
MPIVNRVADLQPDIQAWRRDIHQHPELLYDVDRTAAFVADRLREFGCDEVVTGLGQTGVVGVIKGNKPPGEGLKVIGMRADMDALPVEEQTNLPYASKIPGKMHACGHDGHTAMLLGAARYLAETRNFAGDAVVIFQPAEEGGAGGAAMVKDGLMERFGIEQVYGMHNGPGIPIGSFAIRPGPIMAATDEVDIMIEGLGGHAARPHKCVDSVLVGAQVITALQTIVARSVDPLESAVISICEFHAGNARNVIPQTATLRGTIRTLSPEVRKLVEKRVHEVVAGVAQITGAKIDLRYKRNYPIVNNHAAETEVARRIAGQVAGEANVHEMAPLMGGEDFAYMLEARPGAFIFCGNGDSAGLHHPAYNFNDEAIVYGTSYWVKLVEEQLAAS

SEQ ID NO: 9205 - protein, 480 aa, BradyrhizobiumColbertium
MQYIILDTETDFDGWRKAARSLVLHHVRPSDVTWSVQGREAELFAPPSPSPILEVNDATFTVSTKFIELAKAAILHRDAERFAVLYRLLWRLKDNHDLIEVATDPDVAQVTAMAKAVYRDEHKMHAFVRFREIGRERQAHYVAWFEPDHHIVELAAPFFAKRFADMPWSILTPDLCAHWDGHALSFTSGVSKSEAPSEDRLEETWRRYYASIFNPARLKPKAMQAEMPKKYWRNLPEASIIKPLIEDAERMTGAMIANAATDPHKPQKRPEAPMKRKTVGDDLEALREEAAHCRACHLYKDATQTVFGEGPKSANIMLVGEQPGDKEDLAGHPFVGPAGQMLDRALEEAGVDRKKVYVTNAVKHFKFVPRGKIRLHQKPNTPEIRACRQWYEREVAALQPDLIVAMGATAAQSVFGKITPIGKNRGRLIDLPDGRKALVTVHPSYLLRLPDPEAKVLEYRRFVEDLKIAAGLQRKSARAA

SEQ ID NO: 9206 - protein, 411 aa, BradyrhizobiumColbertium
MDVQRKLEILADAAKYDASCASSGTEKRDSSDRKGMGSTAPGMGICHSYAPDGRCISLLKVLLTNACNYDCLYCVNRASSNVPRARFTIDEIVKLTLDFYRRNYIEGLFLSSGIIRSPDYTMEQVVSVARKLREEHHFRGYIHLKTIPEADDALIAEAGKYADRLSINIEMPEETSLQQFAPQKNVRAIRRTMGRLRLKLDEAEDSHSAKTRAKPQRFAPAGQSTQMIVGADAASDQTILHTSANLYGAYRLRRVYYSAFSPIPDASRALPLVQPPLLREHRLYQADWLMRFYGFDVGEIVDGSAMLPLDIDPKLAWALRHRDRFPLDVNRANREELLRVPGFGTKAVERIIATRRTTTIRVADLARLHVPRNKALPFIILSDHRPSPHRLDAAGLIERFKPKATQLGFGF

SEQ ID NO: 9207 - protein, 250 aa, BradyrhizobiumColbertium
MRGQIERIETAVVHQHERVALGHSEADSALKGGLARAAIHEVFCEGRQGAAATGFVMGLAGRVSARRPLLWVRQDFSDIETGALSMSGLAELGLDPRRVVMVRAADVESALRTSADALACDALGAVVLELWGDIKQFDPVASRKLTLAAQGSGVVGLMLRMAAQPLPSTAETRWMLRAAHSPPGAAWSAWGAPRFDAELLRNRHGPCGRWIMEWNCDECQFNEPSTYSQPVAAAPAHRSDPTVLWESRSA

SEQ ID NO: 9208 - protein, 480 aa, BradyrhizobiumColbertium
MIHALDEAAERLGLYIGQPLANARAMCPDLKVFDADTVADAKTLSDIADWCDRFTPLVALDPPHGLFLDITGCAHLFGGEAALLRTLVRALGRQGFAVSAAIAGTSVCARTLTRQATGTIVADGEEAVAISSFPVSALGAGEAITTGLRRAGLKIIGDVASRAPSEITARFGARFSTLLAHALGQGDAPISPRKPLPDYIVEKRFAEPIATDTMIAMTLSRLADTLIASMEKQGKGARRLEAAFFRTDGAVRAITVETGRPVTRSAVIDRLFRERLDALADPLDPGFGFDMIRLSASRTEIVVQEQRDLDAHVHDNDELAALIDRIAARIGGKRVVVHLPQDTHIPECAVLAAQAQHHLAAAMQATWPARTESEPPLRPLRLFDKPEPIKVPFATVPDGPPHQFTWRRALHAVVRVEGPERIAMEWWRQDGKQLTRDYFRIEDAEGLRFWIFRDGLYEGEVFDGDGKPASPGWYVHGLFA

SEQ ID NO: 9209 - protein, 1152 aa, BradyrhizobiumColbertium
MISPAYAEIGITTNFSFLRGGSDPRAYVHQASILGISAIGIADHNTLAGVVRAYKELDNDEVLHKPKLLIGARIVFVDGTPDILVYPRDRAAYGRLCQLLTRGKRGDDLTRIEKGECRLTFADLLEFSEGQLLVLTLPHRFDNPQALDVLAKLRDSRAAGVWLAASLIYRGDDRRRLARLDDLAARAKVPLLATNEVLYHDPRRRPLQDVLTCIREKTTIAAVGKKLEANAERFLKTPREMARLFRDFPDAIAETMRFAGKVDFSLDQLKYQYPDEPVPPGKTAQGHLEDLTWAGVDKYFDGKIGDKLRATLNKELALIAELKYAHYFLTVHDIVQYARSQNILCQGRGSAANSAVCYVLGVTSVDPTKVDLLFERFISKERLEPPDIDVDFEHSRREEVMQYVYRRYGRHRAAIIATVIHYRPRSAIRDVGKALGLTEDVTAALADTVWGSWGKGLNDMQVRQAGLDPNNPMINLAVELATELIEFPRHLSQHVGGYVLTQDRLDTYVPIGNAAMDDRTFIEWDKDDVDALSMMKVDVLALGMLTCIRKCFDLIDQHKGKRYALADIKGEDDDEVYQMLQRGESLGVFQVESRAQMNMLPRLKPRTFYDLVIEVAIVRPGPIQGDMVHPYLRRRNGLEKVSYPSPSPEHGPADELYKVLHKTKGVPLFQEQAMRIAIEAAKFTSEEANGLRRSMATFRNVGTIGQYEEKLVGNMVARGYDPNFARSCFEQIKGFGSYGFPESHAASFAQLVYISSWLKYHHPDAFCCGLLNSQPMGFYAPAQIVSDARKNGVEVRDIDVSYSFVQNTLEQGSGRYCAVRLGFRQIDGFHWLDEDEERLKRSQSSFPGAPLGASPESIEPHLPGGLGSGLDADASARNDKRGDWADRIVAARNRRPFTSLEDFARDTGLPKRALILLADADAFRSLGLDRREALWQVRRLPDDVPLPLFEAAAAREQPDEGARPLPAMPRAEQVVADYQTIRLSLKGHPMEFLRELFTRERIVACKEISHENERRRVRCAGVVLVRQRPGSASGVVFMTLEDETGIANVVVWPKIMEQYRKEVMGARLILVEGYIQSSPEKVTHLIAQRMVDRSHDLVGLANDALSRKHPLPAGATVVEPLNEDPRALADMPAQKIRHPRNVRILPPSRDFH

SEQ ID NO: 9210 - protein, 256 aa, BradyrhizobiumColbertium
MDLGLKGKNAIVLGGTRGIGRAIAATLAGEGANVAVCARNADQVAATVSELKARGINATGSPVDVTDGAALKSWIEAAAKELGGVDLLFSNAGAMAQGGDPASWEQNFRLDVLGAVHAFDAARPFLEASGAGKGDAAFVIISSISAAQADTASSYGPIKAALIHMAKGLARQYAKKKIRVNVVSPGTVYFKGGVWEMIEKNMPERYKDAMNRNPTGRMATPQEIASAAVFLASPVSGFTTGSNLVVDGAISNRVNF

SEQ ID NO: 9211 - protein, 425 aa, BradyrhizobiumColbertium
MPRSLQTRPGFMVVEKTKRLQLLTKRRMIASVVLLALAGAGAYGLLYSSAKQKKHSEISSQSRKNAQTFTPTPSEWATLTIEPVKARSFRAEYVTEGKVAIDEDRSTPVFSPYAGRVTRLLAKPGEMLKQGQPLLTIEAADTVQAQNDFIAAMTSQNKANSALELSDIQFKRAKDLYEGHAIPLKDYQLAEAAQVQARNDMRSSATALEAARNKLRILGFTDETIKAFRDKGVINPEITIHSPISGTVVQRKIGPGQYVSAGASDPVFVIGDLSTVWLTAFVRESDAAAICIGQDIIVNVMALPGRPLTAKINYVAAAIDATTRRLLVRATIDNKDGLLKPEMFANVTIYSAGGRAAPAVPKQALIFEADKVRLWVAREDKSVELRQIKIGLINGNLVEVTSNLKPGEQIVTKGSLFIDRAASGS

SEQ ID NO: 9212 - protein, 1038 aa, BradyrhizobiumColbertium
MDRLVALAVNRRFLMVGLFAAVLIGGLIAFNRLNIEAYPDPTPPMVDIVTQSPGLSAEEIERYITIPIETQVAGLKNITTIRTISLYGLSDVKIQFSFAYTYDEALQQVLNRLAQLAPLPGNVQPQISPLSPIGEIFRYRLVGPPNYSVLDLKTVQDWILQRRFRAVPGVIDVTGWGGRSKTYEIQADFNKLVANGLTLPQLLQAVGNSNVNVGGNTIDIGQQSAVVRGVGLIRSIDDLANTMVAQTGGNPVLVKDVATVTVGQKPRLGIAGLDEADDIVQGIVLMRRGEQSSPTIKRVHKLVQQINNSSILPPGVRIERIYDRGDLIELTTHTVLHNMVVGILLIVLLQWIFLGDLRSALIVGATIPFALFFAVIILVLRGESANLLSVGAIDFGLIVDATVIMVEAIFRRLTQTTPIAESEQMSSETLFGMKSHAILSAAADVSRSIFFAAAIIIAAFLPLFTLSGVEGNIFGPMARTYAYALAGGLLATFTVTPALSAIILPAHVEETETKVMLILHRLYSPLLNWAVANRNIVLGGAVGLVLLTVALARLLGLEFLPKLEEGNLWIRATLPPTISLQEGNSYVNEMRKVIRARPEVESVVSQHGRPDDGTDAAGFFNAEFFAPLKPASQWPGTRDKEELTAQLLKQLDDSFPGVEFNFSQYLQDNVSEAVSGVKGENSIKLFGSDLQALTDTANKIKSVLATVQGVTDLAVFTSLGQPTVQIDIDRAKAARYGLAPGDINATIKVAIGGDTAGDLYEPGSDRHFPIIVRLAPEYRRSAEAIQNLRIGAPGPNGMVTQIPLSEVATISLVSGAAYIYREQQERYLPIKFSVRERDLGSAIREAQDKIADQVQLPPGSHMEWVGEFGNLQDAIRRLSIVVPISLVLIGVLLWFNFGSMTDTLLAMSVIPMAIFGGVLGLLISGTAFSVSAAIGFIALFGIAVMDGIIILSQFNQLIEEGMDRMSAVVRTGELQLRPVLMTCVVAGVGLLPAALSEGIGSQVQKPLAVVVVTGMMLAPVVILLTLPVLISFFSRRAR

SEQ ID NO: 9213 - protein, 303 aa, BradyrhizobiumColbertium
MIDQVHARAAQPATRVNFDVPAHACDCHTHIHGDVGRFPFFAGRVYTPEPASPEEMTALHKALHMERVVIVTPSVYGTDNSSTLFGMKARGATARGVAVIDDKTTEAELDTMQADGFRGIRINLATDGISDPNVGRSRFTASVERMKTRGWHVQLYTTLPVISAIKDLVLAAPVPVVFDHFGGLEAPLGLEQPGFDDLIALVKSGKAYVKVSGAYRSSKLAPDYQDMVPYARALIAANADRIVWGTDWPHPDSSHVEGRKPTDIAPFYQIDDGRLLNQLPVWAPDADVRKKILVDNPARLYGF

SEQ ID NO: 9214 - protein, 476 aa, BradyrhizobiumColbertium
MIGRTARAGRVLTRHRSGVAPVLATWTTLALSCALASPAWAEALPEALAKAYQTNPQLNAERARQRATDENVPQALAGYRPQILASLSAGLQSVRNLLPDNTIQTANLKPWIIGVTVTQTLFNGFRTANSVRAAELQVQSGREALRNVGQGVLLDAVTAYTNVLANQSLVEAQRSNVAFLRETLSVTQRRLNAGDVTPTDTAQAEARLNRGLADLNAAEVALAVSQAMYAQVIGNAPSQLRPAEAVDRYLPKSREDAMTKAIRQHPAVMAASFDVDVASTNIRIAEGTLLPSATIQGSASKSRNNDPTLGTFAEDQASIVANVTAPIYDGGQAAAQTRQAKEITAQSRLVLDQVRNQARAAAVSAWVANEGAKVAVSASESEVKAATVALQGVQREAAGGQRTTVDVLNSQADLILAKARLIGAQRDRVIASYTLLSAIGHLDVKTLNLNTPDYLPEVHYHQVRDAWHGLRTPSGQ

SEQ ID NO: 9215 - protein, 259 aa, BradyrhizobiumColbertium
MSTFEHIIVESKGAVGIIKLNRPKMLNALSFGVFREIAAAVDDLEADDAIGCILVTGNEKAFAAGADIKEMQPKSFIDMFSEDFAAIGGDRIARCRKPTIAAVAGYALGGGCELAMMCDFIIAADTAKFGQPEITLGTIPGIGGTPRLTRAIGKSKAMDLCLTGRMMDAAEAERSGLVSRIVSADKLMDEAMAAAEKIAAMSRPAAAMAKEAVNRAFETTLAEGMSVERNLFHSTFALEDRSEGMAAFIEKRKPVNRNR

SEQ ID NO: 9216 - protein, 225 aa, BradyrhizobiumColbertium
MMKASARAALIVVAGLFLLFGGVAQAAPSSAAGNKPDSAEKQADTAKHRRHDSRRTGSNKAVKNSVSKAGKKDTAARTDEAKADGKTEGVKTDGEGPASNQMPPEVANANAQLADDTPTAAAASAMTNRANDNVQAAADNTNAAAPESQVVAPDQLNDIDRAVQQENPPAQKAVLAATEAQPRPAPVMASSQQSSAWDQSSLIGKIFIGVGTLLTLASAARMFIA

SEQ ID NO: 9217 - protein, 181 aa, BradyrhizobiumColbertium
MRGREDEWTGLMRSAMAGDDAAYQRLLKAVTPVLRAAARRGLARAGQPPDQAEDIVQEILLAVHLKRHTWDSEAPFAPWLFAIGRNKLIDALRRRGRRVFVNIDDFAETLPGEAPQETASAGEVAAQLGTLPQRQRDVLQSIAVEAASIKDTAAKLSMSEGAVRVALHRGLAALTAKLRDA

SEQ ID NO: 9218 - protein, 212 aa, BradyrhizobiumColbertium
MDTDQLIRSLAADNAHRAPRVGAVLTMALLVAAPLSILIFATFFGVRADLMSAMRNPFFDMKFAVTLSLAIPAIIISLHLSRPEALLRGWGWLLLLPVGLLAVAIGGEAMMAPAMPMTMRLMGKNSRVCLVAIPAMSLPLLAGALFGLRHGAPSRPALADALAGLVSAGLAATLYASHCTDDSPLFVATWYTLATAIVTAIGALAGSKVLRY

SEQ ID NO: 9219 - protein, 367 aa, BradyrhizobiumColbertium
MKSKIAKQSENLLEELQTALAHGTVARRVETLHRVTDLFVGNAVDYSDDHIRVFDDVFQCLIEQIETSARARLADRLAPIAAAPPNIIRTLALDEVIEVSGPVLTKSERLDEATLIEIARSRGQPHLKAISLRRVLSEALTDVLVTRGNQDVVQSTVGNPGARLSEGSLTDLVTRAERDDDLAACIGLRPDLPRHHYLRLVAKASSSVRRKLASAHPELTNEVSRVVQEAAQRVRIAAMTKQTEMARALVKSLHEDGRLDELEVTAFAEQGKFDEANAGLAALAGVAVETAETMMIESRTEGVMILAKVAGMSWPCVRAIIAMREKLSGGAQADMLTLRDTYEALRSSTAQQVLRFHRMQLGTTPAA

SEQ ID NO: 9220 - protein, 385 aa, BradyrhizobiumColbertium
MSTAATSFPERNAAEVADLVLAPESAAPEVRARRARQRRQMYIGQVASYSLGASVLLLYAYDGTISMGVPSLFWLGGLLIIGTFTVLSEAGFGDRFEDHYLTVYQISAHMALQLVFLLAVPTVGVAFLAVLFLIFAFGTLRMTSSQAVLTWGLATCGLALVFLGSDLPIGLPVTTRLQRAASMLCFALVIGQCAFLGLFGATLRKILYRRSIELKAAYQRIEELAELDELTGCYNRRCIMRLLELEIEKSRQASTPFAIALIDLDWFKRINDALGHPVGDEVLRTFAITIFANIRPTDSFGRYGGEEFLLLLPGTDGEVASRMLERLRGIVADLDWSAFSPGMHVTISAGVATLRDVDTADTFLARADRALYSAKAQGRNHIATS

SEQ ID NO: 9221 - protein, 187 aa, BradyrhizobiumColbertium
MTQAASDEILIARIAQGDRLAMQVLYGRHHVRVYRFGLRLVRDEQAAEDLISEVFLDVWRQAGKFEGRSAVSTWLLAITRFKAMSALRRRKDFELDEEAANAIEDTSDDPETVVQKKDTSEALRECLTGLSPEHREIVDLVYYHEKSVEEVAEIVGIPENTVKTRLFYARKKLAELLKAAGVERGWP

SEQ ID NO: 9222 - protein, 231 aa, BradyrhizobiumColbertium
MMALSKKMLEQEPSEIELMLPWHAAGTLNPRDSRRVEEALARDPELAKQYAAIRGEYEETIHLNESLGAPSARAMQKLFAAIDAEPARAAGSLPLSARIAVFFASLSPRTLAWSASLGAVALVLQAGIIGAVLMKNQPATFQTASLSTSAPVTRELGSAAAPARALVRFTPEARVADITALLDSYQASIIGDAKGGMFRLQFDKAMNQDELASLLGRMQREKFVNLAVAAP

SEQ ID NO: 9223 - protein, 560 aa, BradyrhizobiumColbertium
MAYGSSVGAALLVAACLGFDVAQAQAIMRTPTISVPSRTPTISPSIAPRVSPNVAARAVSVDRGPRTMATIPNATTSRVRPTTPVLPHARYSPNLYPACTAPHRAADGECSGQSNAGGEGAGKSAKKSAGKGRGNNTPAVVTSRSIAGEFVAEIDGALSTTEADELARRHGLTRVASENFPLIGATFGLFRITDGRPYETVRREFAADASVRSLQPNFRYALQDQKSSRTTEGDPAQYALTKLRLPQAHTLAQGANVTIAVIDSGIDTRHPELANSIADNFDALGSAEGPHVHGTGIAGAIAAHARLMGSAPEARIIAIRAFGGANGGTESSSYIILRSLNYAAEHGAQIVNMSFAGPKDAVIERAIAATAARGLVLVAAAGNAGAKSPPLYPAANPNVIAVSATDQQDKLFSASNRGNYIAVAAPGVDIFLPAPDGKYQMTSGTSFSAAYVSGVAALLLERNHALKPEALRMTLAKTARDLGSPGRDELFGDGQTDAFAAVMAVPANSATPVAAASGTTKREDADKRRDAPGSRAIEQPSLSSSDDKSAISQMDRPATR

SEQ ID NO: 9224 - protein, 251 aa, BradyrhizobiumColbertium
MTHRQEFIRDAVAGRDIAARWCALAEQRLQHLSEMFETGRWRRYHSEIAFLENIQEAKRAVQTWRALATGGDVAEAAASVTPAFGWSPATMPRVFPRAQQGQIMQPKAVHIALETAVPVRLDPKPDILAEMAEAPIAPRVASAPAAAASFTAPPEMPPLKAPAAKPALTAPAIRSPLAPAAMAPFTAPEVRPPAAAPAAQLPKAAPAAMAALLPQFAPPAEEIVAAPERVVEFTFSLDGLEAKYPLLRNAF

SEQ ID NO: 9225 - protein, 456 aa, BradyrhizobiumColbertium
MDLNRRHLIGASTVGVAGALTMPADAARAAPLTSLLGRDATQYGVRPGSNEDQTRALQRAIDEAARTQMPLALPPGIYRSGSLRLPNGAQLIGVRGATRLVFTGGASMIQSDGSDAIGLTGITFDGGNIPLATRRGLIHVLGGRDVRIADCEITGSGGNGIWLEQVAGDISGNIFTSIAVTAVVSFDARGLSVSRNTILGTNDNGIEILRTAIGDDGTLVADNRIENIKAGPGGSGQYGNAINAFRAGNVIVRGNRIRNCDYSAVRGNSASNIHITGNSVSDVREVALYSEFAFEAAVIANNIVDGAAVGVSVCNFNEGGRIAVVQGNIIRNLIPKRPIGTAPDDDAGVGIYIEADSSVTGNVIENAPSYGIVAGWGKYLRDVAITGNVIRKALAGVGVSIVPGAGTALVNNNMISETPRGAVVGLDHARAVTPDLSADGAQRFAQVVLGGNAVRR

SEQ ID NO: 9226 - protein, 216 aa, BradyrhizobiumColbertium
MTGLRILLTGFGPFPGAPYNPTEPLVARLTRLRRPALDDVAISSHIFPVTYAAVDRQLPEVLAEVKPDALLMFGLAARTPYLRIETRARNAVTMLWPDAANTRSSKRGIAGHADAMTFGPHTARLLRAACLTGIDARASRDAGAYLCNYLSWRAIERVRAGGPQLAAFIHIPLLARGGAVRRKGAPRITLEELVDAGEAMLMETVRLARKTRSPLA

SEQ ID NO: 9227 - protein, 329 aa, BradyrhizobiumColbertium
MIEKKASLDIKTLARDLRAGSRAALARAITLVESRRGDHQALARELVQMLLPDTGKAFRVGITGSPGVGKSTTIDALGMYLIAQGHKVAVLAVDPSSARSGGSILGDKTRMARLSASADAFIRPSPSSGTLGGVAAKTREAMLLCEAAGFDVVLVETVGIGQSETAVCDMTDFFLALMLPGGGDELQGIKKGLVELADMIAINKADGDNLKRAKITAADYRSALHILAPRSEHWHPPVETYSALTGDGIATIWQKVLDHRKAMNASGDFAARRRDQQVKWMWSMLEQRMLARLRSEASVRTKVRKIEAEVADGHLTPALAAERILELLQ

SEQ ID NO: 9228 - protein, 503 aa, BradyrhizobiumColbertium
MLKTLIDAFALISTWEVIISIFAASVYGLVIGSLPGLSATMATALLVPVTFYLSPIAAIATIVAASSMAIFSGDIPGALLRIPGTPASAAYADEAYAMTRKGQAELALGAGVWFSAVGGIAGVLSLMILAPPLAEIALSFSTFEYFWLALLGLMCATLVARSSPVKAIAGMFIGLLVACIGIENPGGIPRFTFGLTDLFGGIEPIPALVGVFAVAQVMRAMLAPEPPPLPRRKFGSILAGQWRLTKLYHWQMTRGNIVGIIIGVLPGAGADMAAWVSYAMSKRFSKEPEKFGTGHVEGLVEAGASNNASIASGWVPSLLFGIPGDTIAAIAIGVLYMKGLNPGPTLFTEKASSMYAIYLMFIIANIMMIPLGIAMIRVAAYILLAPRAAIMPVIMLCCAVGSFAIGNNMFGVVTVAAFGVIGYVMETNGYPVAAMVLGIVMGTMVEQSFVTSLIKSDGSILPFFERPVAAILAAMAIGALLWPVMVWVWRKVKRPQAAAATSR

SEQ ID NO: 9229 - protein, 163 aa, BradyrhizobiumColbertium
MRLPDSVTGSFLVVLGVAAAYGGYILPPVPGQPVGPNVFPLVIGCGLALCGLAIAFGIGHSFEEEEELVPFEDGQAAAPPPQGKLYGLRALLPPALLLFYVFAADRLGFIITAAIIVYITSTALGAKWKLALPLAALSPFAIHLIFGKLLRVPLPAGLLPTPW

SEQ ID NO: 9230 - protein, 330 aa, BradyrhizobiumColbertium
MSKISRRTFAASSAAVAASAAFGFKPALAQAYPARPVTVIVPWGAGGGTDATARIVAALLEKDLGQPFNVVNRTGGSGVVGHSAIATAQPDGYTIGMLTVEISMMHWQGLTDLTPKSYTPLALMNEDPPGIQVSSSSPYKTVKELADAIKAAPPGKFKASGTGQGGIWHLALVGWMQAMGLPANQVAWVPSNGAAPAMQDLAAGGLDLTTCSVPEARAIIEAGKARSLAIMAPARNPIFKDVPTLKEAMGIDYATGAWRGIAGPKNLPPEIATKLTAALKKVYDSAEYKDFMSNRGFGTVWGDAAHFAGFMDKGDAQMGEAMKAAGLSKA

SEQ ID NO: 9231 - protein, 159 aa, BradyrhizobiumColbertium
MTQAYFSAVLDHPLDQVWSLIRDFNNYPAYIDGVSESVIEDDKRGDEVGAIRRFCYLGSWIRQRLVDHSDRQHSLTYAGLEALPYPENDGGRSPAPVRYQGTMRLRPIIAGDRTLIEWSVALDTEPADADRWQALFASWIPDWTDSLARRLARTRPRSS

SEQ ID NO: 9232 - protein, 262 aa, BradyrhizobiumColbertium
MFPAPTFMRAVAAAAVCCALSGSAHAADPKPADVVKTRSIEARVFLDDRIKADAALAANCLAEGRKWLDKSAAEAAASRKEDPQFFKDGGWDFERKYEIRSVVADRYISVLRNDHMNTRGAHPNSDVNTILWDKADNKRISIRPFFAETADNGATMKAMVKAVIASLKAEKEKRGTSETATDEWFKEVAPSLLKIGAVTLAPSTEAGKSSGLTFHYPPYAVGSYAEGEYVAFVPWETLKPYLTAEGTRIFGGRRPKGDADGR

SEQ ID NO: 9233 - protein, 722 aa, BradyrhizobiumColbertium
MVEAMSRIPNFADVAFERAATAVPIGNAEPWLTPEGILVKPAYGEADLAGLDFLETYPGIAPYLRGPYPTMYVNQPWTIRQYAGFPTAEDSNAFYRRNLAAGQKGLSVAFDLATHRGYDSDHPRVGGDVGMAGVAIDSIYDMRTLFAGIPLDQMSVSMTMNGAVLPILALYVAAAEEQGVPPEKLSGTIQNDILKEFMVRNTYIYPPAPSMRIISDIFAYTSQKMPKYNSISISGYHMQEAGATQDLELAYTLADGVEYLRAGLAAGLDVDRFAPRLSFFWAIGMNFFMEVAKLRAARLLWAKLLKPFNPKDPRSLSLRTHSQTSGWSLTAQDVFNNVMRTTVEAMAATQGHTQSLHTNALDEALALPTDFSARIARNTQLFLQQESGTTRVIDPWGGSYYVERLTRDLAAKAWGHIQEVEELGGMAKAIEAGVPKLRIEEASAKTQARIDAGRQAVIGVNKYKPTDEVPIEILKVDNTNVRRLQIDKLKRLKSERNQKDVDAALAALTRSAGEGNGNLLALAIDAARAKATVGEISDALEKVFGRHRAEIKSITGVYKREASSMGNQVEKVQALIDAFEEAEGRRPRILVAKIGQDGHDRGQKVIASAFADIGFDVDIGPLFATADEAARQAVENDVHILGVSSLAAAHLTAVPELKAALKKQGRDDIMIIVGGVVPPQDYDALYAAGAEAIFPPGTVIADAAEELIRKLNARLGHSEAAE

SEQ ID NO: 9234 - protein, 154 aa, BradyrhizobiumColbertium
MTETSKPVLTGGCQCGAVRFAVMTAPTRISICHCRMCQKAAGAPFASFADINKNDFAWTRGQPSFFRSSTIAERGFCPACGTPLSFGRIDGDRIEIMTGAFDRPDRVVPTRQFGTESRLGWVVGIANLPSQTTQQNYGPEKMATIVSHQHPDHD

SEQ ID NO: 9235 - protein, 623 aa, BradyrhizobiumColbertium
MTSVTDDLPLAADFPKATVEDWRKLVDGVLKGAPFEKLVGKTYDGIKIDPLYPRAKGVAPVVGRPAAAAWQIIQRIDHPDAALANAQALQDLENGATGLALVFAGANAARGFGLEPSAEAIAKVLKDVHLDAGIGLELEIGPQSRMAAIHVAEYVKSKGLDPAACNIRFGFDPFAAAAVWGHSPYTWDEIAPAVTDAIKGLAALGFDGPFASADGRVIHDAGGSEVQELAFVLACGVAYLRAIEGAGIPLEQAQGMVYARLAADADQFLTMAKLRALRLLWARIEQACGLTPKPLFIAADTAWRMLTQRDPYVNMLRATIATFAAGLAGANAITVLPHTLALGLPDPFARRVARNTQLLLLEESNLAKVSDPAAGAGGIETLTAQLCDAAWTLFQESETAGGAFAALQQGVFQSKVAAARKARDANIAKRRDVLTGASEFPNLQESEATILEATPVTLAPYGEQKYKFDALPPIRLAEPFEALRDKSDAALKARGARPKVFLANLGTPADFTARATFAKSLFEAGGIQAVDSEGFADPAKLAAAFKASGAQLACLCSSDKVYADQAEPAACALQTAGSRHIYLAGRPTDAEAALRAAGVTGYVFAGGDALATLQDAYQRMEQA

SEQ ID NO: 9236 - protein, 163 aa, BradyrhizobiumColbertium
MASVLIALGGNVGDVRATFQKAIAHICGMAQVALIARSSDYATPPWGDAEQESFINACIEIETGLDPHALLFVLQKVEQKFGRTRDKERRWGPRTLDLDMIAYDDVSLQKPDLTLPHPRLFERAFVLVPLAEIAADRVISGIRVRDGLASVSAQGIEQLPDTG

SEQ ID NO: 9237 - protein, 122 aa, BradyrhizobiumColbertium
MTDTIFVKGLSIHARHGVMDHETEVGQRFVIDLELHTDLSEPSRSDRLADTVSYADVVATTTAAFKNTNYKLLERAAGAVADAILSNFPRIRAVKITVHKPHAPIAAIFDDVGVMLTRARHP

SEQ ID NO: 9238 - protein, 268 aa, BradyrhizobiumColbertium
MLRTLLERPLPAVMGVLNITPDSFSDGGKFIAPEQALARARAMIDAGADIIDVGAESTRPYKGARPVTAEDELARLKPVLSGVAALGVPVSIDSMKAEVVAFALDQGAAIANDVWGLQRDAEMAPLIAARGVPVIVMHNRDSVDPAIDIVADMKTFFDRSLAIAAQAGIARDKIVLDPGIGFGKTAEQSMTALARLRELDTFGLPILVGASRKRFIASVSPSEPPERLAGSIAAHLIAAQRGAKIIRTHDVGETLQALRVAHAIESKP

SEQ ID NO: 9239 - protein, 48 aa, BradyrhizobiumColbertium
MRPALRGRAGGVKTGVEAVRPWPDVPAGCGEGTHGRWTRWDRNNPANA

SEQ ID NO: 9240 - protein, 135 aa, BradyrhizobiumColbertium
MTYPISEIEGLPAFAATKLKAQGIRTTDALLEAASTVKGRKALSAKTGISEQQLLEWANVSDYMRIPGMGKAKVGLVRAAGVTTVRELAYRNPARLAQSMREANEKKKLVRVLPSEKSVGDIIAKAKKLPPKITY

SEQ ID NO: 9241 - protein, 121 aa, BradyrhizobiumColbertium
MDELIGRLATNASIDGAVAEKTVGIILGFLRSEGPSDSVQALIDQIPGAEAAIEASRSGGGLSRLMGGGLMAVGTRLMGLGLGMSDIQKVARELFRYGRDKIGADQMGKIIAGTPGLSQFA

SEQ ID NO: 9242 - protein, 540 aa, BradyrhizobiumColbertium
MTAQDSKLGDTDDKIFVGKGDEQAWLTLALANRHGLVTGATGTGKTVSLQVMAEGFARAGVPVFAADIKGDLSGICQIGEAKDFILKRATEMGLRFQPDQFSTVFWDVFGEQGHPVRATVTEMGPLLLARMLDLNDVQEGVLNVAFRVADDNGLTLIDMKDLRALLDAIVPGSGKKGADAEEDPLEPIRKAAQGFGNVTKATVGTIQRQLLVLENQGGTKFFGEPALMLKDFMRTDRDGRGMVNILVADKLLQNPRLYATFLLWMLSELFEELPEAGDLAKPKLVFFFDEAHLLFNDAPKALLDKIEQVVRLIRSKGVGVYFVTQNPIDVPDRVLGQLGNRVQHALRAFTPRDQKAVAAAAQTFRPNPKLDTAKVITELGKGEALVSFLEGNGTPSMVERVMIRPPSARIGTITPDERQAIMAASPVKGRYDSAVDSESAYEMLQQRIAATAATANGPAGGGGGILGQIGSIVGTIFGTNVKRGRLSTGQVIARDVTRSVTNQVIGGMAANIGKSVGGQLGGSIGRTLVRGALGGLLRRS

SEQ ID NO: 9243 - protein, 464 aa, BradyrhizobiumColbertium
MSNTQLQSVLDHIDKDFDNSLERLFALLRIKSISADPAFADDCKAAAEHLAKDIASLGVAAEVRPTAGHPAVVGKTGAGGRPHVLFYGHYDVQPVDPLDLWHRPPFEPAVADHADGRKIIVARGAEDDKGQVMTFVEACRAWKKVTGSLPIDVTFLIEGEEEVGSKNFVPFIEANKDEFKADYVLVCDTGMWDPSTPAITTSLRGLLYEELKITAANRDLHSGVFGGTAMNPIRVLTKILGGLFDDDNRITIPGFYDGVKDTPADILAQWKKLEFTPDTFLKPVGLSLPAGEKGRLLIEQASTRPTCDVNGIWGGYIGEGSKTVIPSHASAKVSFRLVQGQDPQKIRKAFRDYVTSRIPGDCKVEFGDHSAAPAVALDWSMKPLAAASKALTEEWGKETVLMGSGASIPIVADFKRTLGLDSLLVGFGLDDDNIHSPNEKYDLRSFQKGIRSWARILAALAEVK

SEQ ID NO: 9244 - protein, 259 aa, BradyrhizobiumColbertium
MSPAEARLREVPSNMTEAEWQQRVNLAACYRLVALYGWDDLVDTHISARVPGPEHHFLINPYGLMFEEITASSLVKVDLHGNQLSESEYSINPAGFTIHSAIHEVREDAICVLHLHTLDGTAVSSSAEGLLPLNQTAQLVTHDLAYHDYEGIALDHDERPRLQKDLGDHNHMLLRNHGTLTVGRSVASAFERMYHLERACSMQVRTRALGTPVYPVDGTAIDKNTELLSNRDRAELRATNLVWPPLLRKLDRVNPGYRS

SEQ ID NO: 9245 - protein, 549 aa, BradyrhizobiumColbertium
MTSITTSAIETPLRRSVERTCDDLAMLVLAAVAVIAGLTFRDYGLGWDDYTHAEYADLLLRMFGSGFKDTAALSFANLYMYGGGFDMVAALLHKVIPLELFETRRLVGAIVGVIGLAVTWRLGRRIGGPLAGLASLLLLALCPIFYGHMFMNPKDAPFAVSMIILMLGLVRLAEEYPQPSPRTILIVGLGAGLSLGCRVLGGLALVYAIIGFIPLFLEELRNEGFRESVRRFAHVIYVLLPGLVLGYLVMGLIWPWSIMEPANPFEALTYFSHFFEKPWKEMFDGAIVSVPDMPWSYLPTLFALQLPEVMLVLMAGAVVGTFAMLLHRKVPARRKTILLMLTLAATLPLVIAMVKRPALYNGIRHFVFVIPPMAVLGGVAFAWTMERLRANHRTWQPVVLATFCFGLALPLAEMIRLHPYQYTHFNHIAGTVRGADNRFMLDYWGLALKQASDELREQLVERQEVPPSSRKWKVAVCGPQRPAQVALGPDFTIGWDSNAADFAMTLGEFYCKGLTAPVMVEIKRDDVVFARVYDIRGRSISSLLSIPAP

SEQ ID NO: 9246 - protein, 279 aa, BradyrhizobiumColbertium
MALLIVGICAVLAGLLAIISGLTIREFSLGGTLIIAGTIGVCSGMLLVGMHLVLLELKGIARRLAGAIAPSEVRVRPVLPGLALPDGLAPEPVAAARGEPAPPPASPPPWQSEAAARERPRAEGPQEPEAATPPAAPEAPRRRNLLFASTSRKERERAETKGTESALPPEESSGAADSPPASFDVAWPKPDRTRPPEPPGGSRRPPPRSPSTFAEAAPTPAPEPPPPVEPAPVTVLKSGVVDGMAYSLYSDGSIEAQMPEGMMRFASIDELRAHLDQRG

SEQ ID NO: 9247 - protein, 138 aa, BradyrhizobiumColbertium
MSDAGAKNFIELTASIVSAYLSNNPTPATEIPNLISQVHGALVRVSSGRTETAPLEPAKPAVSLKKSIAPDYLVCLEDGKRFKSLKRHLRTQYNMTPEQYREKWGLPADYPMVAPNYAVARSQLAKQMGLGQQQRKRK

SEQ ID NO: 9248 - protein, 142 aa, BradyrhizobiumColbertium
MTTIDEIRDNFELLDEWDDRYRYVIELGRTLEPMSEAEHSAANKVQGCVSQVWLQKLVDRSNGELTLKYRGDSDAHIVRGLVAIVLALYSGRTPQQILDTDAIAVFNEFGFRDHLTPQRSNGLRSMVERIKTDAKEALAEAS

SEQ ID NO: 9249 - protein, 144 aa, BradyrhizobiumColbertium
MRFLLRITFWLGLVLVLLPRDKTPESEKLPQIGAADAVQAATAAVSDMTQFCKRQPAACEVGGQAATIIGQRAQDGAKKIYQIINDKKEQITNEKNEKTDKKAPDHTGSIAMAGEGDIAASEAPRDTLSQDDLALEWRGPEAAN

SEQ ID NO: 9250 - protein, 43 aa, BradyrhizobiumColbertium
MVNTGFHLAAHGFELVDAGLPRQITGANVNRKFTTPPIAKNSA

SEQ ID NO: 9251 - protein, 238 aa, BradyrhizobiumColbertium
MLGAAQRKEYAQLINDSGQHLLSVVNGILDMSKMESGNFEIASEPFAPRASLLHCCNLLALKARESGIDLVTDAPQDLPIMTGDPRAFKQIVLNLVANAIKFTERGGQVHVAAAVSGSQLTLCISDTGVGIAPDDLNRIGAPFFQAGKTYQRRHEGTGLGLSIVKSLVALHLGELTVQSRLGEGTAVTVKLPLVYTPPQVKPANEKPSESKIATLTPVLRQDLQDQTQDEPAPVKKSA

SEQ ID NO: 9252 - protein, 233 aa, BradyrhizobiumColbertium
MPRKPAKDETAPRRRGAKAAVIDVETERNLVMRVLLHSPKDTLAGLVAVGAIGAIVANALFLQTGRHPAPMFGTVINLPAPSAVPLSNPLPRPRPVGADTSPLEPRATEFRIEPKHAERAAEKPPEKAVETTAATRANDPMANLVKATTSTPPSALRPPAPVPVQSPAARRIAGVQRALSEYGYGNLKITGTMSGETQSAIQKFEREHKMPVTGQLSDRLLRELAAAIGHPVE

SEQ ID NO: 9253 - protein, 70 aa, BradyrhizobiumColbertium
MFKVSILVWIMLGTTLAGISLIVVLMVPSFAADAIRNIPYAVAVGFALAMPLSYFIATQIRGGQDGTRKA

SEQ ID NO: 9254 - protein, 106 aa, BradyrhizobiumColbertium
MAAYLRRCQTEGVFGAVRRRGAEEAGAVFVKVSLLDGNAMLYAPAPQTVYDDGRPVDRFFVPVAPQPLPEQTVEERLTKEIRFDPDAWIVETEDRAGRHFLDLAKT

SEQ ID NO: 9255 - protein, 325 aa, BradyrhizobiumColbertium
MTKSLFPGFDGLMTLSRREGVDVRPTLLRVLTDLYVQTSTHSDDEQRQFVELATRLIDQVDDATRAAVKARLAVYPHTPVPVLQKLGLVATQEGRRVPLAREIPAPPAAPLPPRERTDAEQRMAANMAMQPKEAAEIHDMFFRAGASERALILHNLAQTPLKAAPRIPTVRAKRAIQILEMAAIAGDVESFAFELGDSLILPSRVAAQIVDDAGGEALAVAARALDMPSPVFQRILLFFKPEIGTSVNAVYRLSRLYDRLSDRAALVMLAAWRGSTLAVTRAKYQAGLHDGERQRARAGASQTRQSMQPGAIPPRRTGTDGSSER

SEQ ID NO: 9256 - protein, 62 aa, BradyrhizobiumColbertium
MGTIIEFPAGRRVGSSGDVAPRADKGTVLILPVIRIEREADETSGDRGPEQGTAPRRRRRRR

SEQ ID NO: 9257 - protein, 253 aa, BradyrhizobiumColbertium
MPDAIRQIRPLLSAALLALVGALLAACSGGDFGRTRESMRSDDMHRWLGAEVTSSVGLRPSQFQLTDEERQLRDLAYPMIEPPLSRPAWKSVFGDYKALPSPWRQKVVFDRTMYGRTLIDEPHRSHSSRYAQLIEDVRNDITRFEPFFGTAIRVIDLDRKRDASMARVSALSPREKADAVARMQENSLIIQWVQQCLEQRISSYRWALERLVIQAPDGMAADADRLIGELAAQTANPPVAAQPPYGRAVVSKG

SEQ ID NO: 9258 - protein, 1132 aa, BradyrhizobiumColbertium
MSLDAIGPFKSRPDVTSRQLLALAILLLSTGSAAALSREAAIENCRMTVGKPIVQACMRSGGANLEACRAKASPQVRACAMAALNAANGRANVAVELPKETAPKLEAGTALPKDFVAPPRSIADITAVLDGDKPDEKMIAELKSDADAVPTGKESRQDLAQLYFDRANARAQLGRLGEAMSDADKAVEVGRGAVNPNLLGRMLQLQSLQHAVAGDPRRSLEIMQRLLRESASMPGAKGMQFVTNRGIAAVLIQMGDLSQAEAYLRRSQTAIQEARTSGHPNWRAAYAKFGQSWEGELELARALIFEARGQFADAEAAYRNAELRKRASMKAIMDSDDPPAETILLQAIDGAVLSQARMKAKQGRLAEAEVDARRALLSRLKDTGKYNSVTPRFVMGLAGILVDQGRYEEAEKLGRVALEINKTVGVPEDSQATVQLLSQLAGILTLRRQNAEASEMFARIDKAVAGWDPQRRQVFELNPSRILSLYGSGQLDAGIAAAEQLVKKQIARVGDNHFDTASARGTLAVGLMRARRDAEAIREFKAAIPVMMASANENADDENTTVVAARSQRLQTIVESYLLLLGREGAGKDIGEETFSLADAVRGRSVQQALAASSARAAAKDPALAELVRKEQDLTKQVNAQLGTLNNVLALPAAERDEKGVQQIQASIGTLRGQRDKARQEIKQKFPTYADLVSPKPPSVAEIRATLADDEAMLSFYFGQNGSFVWAVPRSGPVVFAPVQAKSGDIETKIRKLREALEPQAAMISDIPPFDLKLGHELYELLLKPVESGWKPAKNLIVVTNGALGLLPLSLLPTAPAEVASEEDPLFVGYRNVPWLARTHAVSTVPSAAALRTLRQLPPGKPGRGDLVAFGDPYFNSEQHAEAEGGGEKIQVADAGGNITRGGPLKRRNSPKLEGVDSAELGLLPRLPDTADELKSIALALQADPSKVLFLGKSATESAVKSMNLSGFRILAFATHGLVPGELNGLTQPALALSSPAVTGEGGDGLLTMEEILGLKLDADWVILSACNTGAGAGAGAEAASGLGRAFFYAGTRALLVTNWSVHSQSARQLVTDLFKRQAEDPKLPRSEALRQAAMALVDGSGYLNSEGKTEFAYAHPLFWAPYTIIGDGGLR

SEQ ID NO: 9259 - protein, 147 aa, BradyrhizobiumColbertium
MKRNVLVGFVAACLLVPGTSHAIQLITEEEAKLPPPKGAVAADRRGILRGPKVEFVSPGASVSSPMQLMLKFESFGGTKIDPESVKMIFLRTPNVDLTPRIKPFVKPDGINMQDAELPPGEYAVRVDIKDSDGRPGTTVFTLKVAPR

SEQ ID NO: 9260 - protein, 254 aa, BradyrhizobiumColbertium
MECPFCAETIKDEAIACKHCSRDLRVVRPMLLEIEEIVADLDKLRRDLDRVNVRLERYNNPLRYYATHAVLYVGIPSLLLVIAHVLVTITFNVSPVPLRIASIVIPLLFGFLAYPLHRVSALTALVLAFLAASVSILAMLTVTGVHDGVPILPTVWIEWREVFEYGASILLAFVSGNILSVVIFQIAPRVLTQGGKPNAFAFRVARLLGQHVGEEQLRRRARLIQDLMQTLGPLAGVAATGVGSIYAGLKGLLG

SEQ ID NO: 9261 - protein, 124 aa, BradyrhizobiumColbertium
MVIEDEDAILAVVEDALAEGGFQIATAKTGKEAIALLKGGLVPYRALVTDVNLLGDRDGWEVARAAREIDPHFPVVYMTGGAADKWPVLGVPNSILLQKPFAPAQVVAAVSQLLNAGSQQAGPA

SEQ ID NO: 9262 - protein, 133 aa, BradyrhizobiumColbertium
MSVTIYHNPACGTSRNTLAMIRQSGVEPVVVEYLKTPPSRDRLVELIQAMGISPRALLREKGTPFRELGLDDPKWTDDELIDQMVAHPILINRPIVVTPKGTRLCRPSEAVIDLLDDPVGRFVKEDGEVVEAR

SEQ ID NO: 9263 - protein, 351 aa, BradyrhizobiumColbertium
MSIFERYLTLWVALCIVVGVALGHVMPGFFGAVAAAEVAKVNLPVAMLIWLMIVPMLLKIDFGSLGQVREHWRGVGVTLFINWAVKPFSMALLGSFFIGHLFAPWLPSAQIPSYIAGLILLAAAPCTAMVFVWSNLCEGEPHYTLSQVALNDVIMVFLFAPLVGLLLGVASISVPWDTLLLSVVLYIVVPVVVAQLWRKMLLREGPDGFNRVMRMLQPLSLVALLATLVLLFGFQGEQIVRQPGVIAILAVPILVQVYLNAGLAYWLSRRFGVAWCVAAPAALIGASNFFELAVAAAISLFGLESGAALATVVGVLVEVPVMLSVVRIVKATRGWYEAGAGKVPAAAEAHQ

SEQ ID NO: 9264 - protein, 175 aa, BradyrhizobiumColbertium
MPDRVYNVLFLCTGNSARSVLAESILRKDGAGRFRSFSAGSTPKGAVHPLALRTLQSMDYPIDGMRSKSWLEFAAADAPVMDFVFTVCDNAAGEACPVWPGQPMTAHWGIEDPAAVEGTEIERLAAFSRAFRYLKNRIGAFVNLPLSGIDRLSLGTKLREIGRSEGATSGKSDVA

SEQ ID NO: 9265 - protein, 120 aa, BradyrhizobiumColbertium
METEQAVLALAALSQPTRLEAFRTLVRHEPDGLAAGDLARLLEVPQNTLSAHLSIMSRARLVSSERHSRSIIYRANLGEFRDIALFMLRDCCGGRPEVCEPVVESLQSCCAPNRKEKARA

SEQ ID NO: 9266 - protein, 105 aa, BradyrhizobiumColbertium
MKIDDAAARLEALGNRTRLQIYRALVRAGHAGMPVGRLQDKLKIPASTLSHHIKALVLVGLVSQSRESTTLICRANFDAVRGLVDFLVAECCAEETGCRDAQTAA

SEQ ID NO: 9267 - protein, 454 aa, BradyrhizobiumColbertium
MDKKTVAIIGAGPVGLAAAAHVLERGISPIVLEAGPEAGHAVRQWQHVQLFSPWEYNVDKASTRLLAPTGWNSPNPSSYPTGGELIERYLAPLATRTPLRDTIRTSSRVTAISRVGFDKAKTKGREQAPFEIRYQNGKGPEVLRADAVIDVSGTWFSPNPAGSNGLPAIGESECGDRIAYGMPDVRGAARGRYAGKTVAVLGAGHSALGTLIDLAQLAEEVPGTKPVWLLRGGDPAKAFGGGSNDKLAARGELGSTFAALVAAGKIKVETGFGVTHLSDFEGRLRISAGACCGARSVVADELVVSTGFRPDLSFLSELRLRLDPAIEAPVALAPLIDPNEHSCGTVRPHGARELTHDEPGFYLAGMKSYGRAPTFLMMTGYEQVRSIVADIAGDKEAAARVELVLPETGVCTRGDVESVGAAGCCGGPAKTEPSACCAADESAKKAGGAGCGCS

SEQ ID NO: 9268 - protein, 399 aa, BradyrhizobiumColbertium
MRRGAAGSLAVVIALGTAQTIAWASSYYLPAILAAPIASDLGLAPTYVFGALSGALVISGLLGPRVGHSIDTFGGRSLLAVSNLVFVAGLLLLSAAYDVAVLVAAWILLGIGMGMGLYEAAFATLARIYGANARGTITGITLIAGFASTLGWPLTTWLASEYGWRAACQVWAAIHICVALPLNCSLPRAVPLAEDSRSTTSASRQSSGQSETFAMLLLAYMFAAASFVSSGVSAILPTMLVAFGATPAQALFAGALVGPAQVGARLLEAGWLSRFHPLLSARLAMLMNPIGVLALVAGGPWLAPAFTVLYGAGNGIITIARGTLPLALFGPVGFGRRVGVISLPSRATGAFAPLALGLLVEHVGSSALWISALASVTALFALLLLRADQNAQATAGEHS

SEQ ID NO: 9269 - protein, 140 aa, BradyrhizobiumColbertium
MLEEPAAVPRSIEKVKHILMRIVRTILAFAIAVSLAMLPAGVSASSLAISSDQMHATMQMGGGGDMSVDDCCPDMKGTGSDTGGYMCGMGFCCVGSTIALADIHPLALALLAIAAGKTAIPADQVVSFRGGSPPFRPPRI

SEQ ID NO: 9270 - protein, 130 aa, BradyrhizobiumColbertium
MLSRFSTAALAATLSLAASGAMAGAGDYAFEPVNPEMKKGDDVTLALRLTNKRTGKPVPDAVIFRTRVDMAPDGMAEMESDVTPLPSNEPGIYVFKTDLSMAGRYQVTLSAKVQGEPDTVNGKVIIKATK

SEQ ID NO: 9271 - protein, 45 aa, BradyrhizobiumColbertium
MDGPRSIDQEQGGAQGQAAGERECCEKTLRVHRQIPRAAGARPCE

SEQ ID NO: 9272 - protein, 449 aa, BradyrhizobiumColbertium
MIDGPWSVHAEVASATADGATPLYYRDPSGAPLWSAGPRKDEDGRDYLPVYDDDQAAPAEPKPQQPAGSRKILYYRNPMGLPDTSPVPKKDPMGMNYVPVYEGDDVDDGTVKLSPGKIQRSGVKSEAVERRSIRVLVKAPGTIQLDERRVSVIAMRAESFVQKVADVTTGTRVKAGQPLMEIYSSAVASAAAEYLSTINSKTTGGVEAYGRGSRQRLVNLDVPDQVIAGMERTRVAPVTIQWSAPRDGVVLERNAIEGMRANPGDVLFRIADTSLVWALVDVAERDLGNIAVGQSVAVRARSFPGRAFTGRIAVIYPQVNRETRTVRVRIELANPDAALLPDMYVDAEIDTADTTPVLAIEDSSVLDTGTRQAVLVDKGSGRFEPREVKLGRRGGGYIEVRDGLADGEAVVTSANFLIDAESNLKAALKGFAEAAPQASDAGHATGEHK

SEQ ID NO: 9273 - protein, 543 aa, BradyrhizobiumColbertium
MLRAKTPVILASLVVLAVTIWPARQLGTEFMPTLDEGTLLYMPTTLPGISVTKAAELMQTQDRIIKSFPEVASVYGKAGRAATATDPAPTEMFETVVNLKPKEQWRPGVTVDSLIAEMDKALQFPGVSNAWTMPIKARIDMLSTGIRTPVGVKVMGTDLVEIDRLARQVEQVIKTVPGTSSAYAERGIGGYYLEIVPDREALARYGILIQDVQDTIAAALGGQTVTTTVEGRQRFTVNMRYPRDLRDNPKAIASDILVPMPAGGAVPLGEVAKVEPARGPTSIRTENGQLATYVYVDIRDRDIGSYVKDAQAAVSDSIQFPAGTYVVWSGQYEYLQRAAARLKIVVPVTLTIIFLLLYLNFRAMTETLIVMLSLPFALVGGIWMMWWLGFNLSVAVAVGFIALAGVAAETGVVMLMYLEHALTELKARRSAEGSVFTRRDLNEAIMVGAVERVRPKMMTVVAIMAGLLPIMWSTGTGSEIMQRIAVPMIGGMISSTLLTLIVIPAIFGLVKGFGLPPRAEDSGQPTEMSKSIGPGLRLLEPAE

SEQ ID NO: 9274 - protein, 43 aa, BradyrhizobiumColbertium
MAHDIMSAMFGIMELIATSVVFVPILGRRRQDGRSCGGDLCRT

SEQ ID NO: 9275 - protein, 203 aa, BradyrhizobiumColbertium
MGFYNDFILPRLCDLAMRNEELAPYRQRATRAAHGRVLEIGIGSGRNLPFYGATVTQLVGLEPAAKLLEMARAAPQPETPVDLVEASAEAIPIDDRSIDTVLTTWTMCSIPNVDRAMTEARRVLKPGGKLVFVEHGRAPEPRVRWWQDRLTPAWMRISGGCHLNRDIADVLTRNGFRIDEMRTGYMNGLKPMTFMYEGQAGPR

SEQ ID NO: 9276 - protein, 160 aa, BradyrhizobiumColbertium
MKERAHVMTRRSFAGLMAAAFLAGPADAAQADETVVRVHKDPNCGCCDGWVRHLRDRGFTVQVEETADLDAIRSRLGIPPDLAACHTAEVAGYVVEGHVPATAVRRLLLERPNARGIAVPGMPIGSPGMEGGRPQRYEVVLFGAEGQRPYMRFVGSQAID

SEQ ID NO: 9277 - protein, 176 aa, BradyrhizobiumColbertium
MKLLVLIIALLVPAAVSAQTSYAGMQSRHIKALSEQQIDDLQAGRGMGLALAAELNGYPGPSHVLELADKLGLNQEQRSKVQEMFSEMKAETTPIGSKLIEKEADLDRQFASRTITAETLALAIAAIATTQGELRQAHLKYHLRTAVLLDQAQLARYAELRGYTSSDAARRHHHHR

SEQ ID NO: 9278 - protein, 135 aa, BradyrhizobiumColbertium
MSTITGGCHCGAIRYEVEGDAIVHALCHCRDCRLHAGAPVVGWTMYPDNAVKVIKGEPKVYHSSEHGRRQFCGDCGTGLFYFNASMLPGIIDVQSATYDDPEAVPATMQIQVAERLRWMEHAHELPAFDRYPPQP

SEQ ID NO: 9279 - protein, 262 aa, BradyrhizobiumColbertium
MSRTFPRLAHTLLATGLVLGSTASASAHDVWLTFSGPASARCAIVNYGHPDDRPPAFADKVVDLFMITPKGRSSLLDGLAIASDKGIQIARTKPFDDAGHTLLAARYDNGFWVRTTDGLYRNATRRLVPDAAESFWSGKFAKAITGADAPWQEVLGHDLELVPLTDPAKARPGEALKVKVLFRGKPLAGAEVERGDGKTAAAEKDIPKFKTDAEGVAAVTIVKPGPHLLVIDHRAAPSVTPDQARADLYNATLWFSTAAKQR

SEQ ID NO: 9280 - protein, 644 aa, BradyrhizobiumColbertium
MTALPAAVTVMDAPAISRLAVATYGDLFRSLPGFNVSNYGQGGIGYGLSLRGYTESEHGRDIAYYIDGVPLNEVSSLHTPNYADLNVLFPETVKSIEIVRGPFSVEYGDSNMGGSVNITTKQAELFASLGISGGTQGTARGVATYSTTQGAWLPYLAFEGYHTDGYRDNSFINRYNSFNKVTTTLPDGATVSFRAQAYGTEYGSPGYASRDAIAAGTISERSATNPTDGGNKQLENLVTNYSSGAQDQELKGTLFVSHQFSNRFADFGGGQRVQHEDRTMVGGRVSKTWSGAIGDDIPVQVLLGSNWRTDFIEAFQAPTLARAVSGPAAVNVGLTETNIAGFGQVQVKPLPWLKFTAGGRYDQYYYDINDRTTPGGTPNHSNGIASPKAGVAIAPFKWLELFANYGEGFRSIDVPAELIGNPGIQPFRIVSREGGVQFTFDRFRLLASYWTTDSANEAFQAAPGLPVTFLGKARRNGYDVDARWFVIKDPVNNVSLFANYGGVSARLVDAAPSYFVPNVPSYVANVGVDFNVATVNAQVLSGSVYVTFVGKKNLTQDGLITTSPYSRVTGKLAYSWPEGWTAFTQATWYPGDRLSEIAINFGDPVDARTSDIFVSAQPTIAVLAGVSYRFPTVIAGATPRLVTK

SEQ ID NO: 9281 - protein, 65 aa, BradyrhizobiumColbertium
MLRRCALRDGRSLRLTRGVCPCRELWAPHASERRLGRRDSDRRQRPRRRSARSRLRVNWICGRSA

SEQ ID NO: 9282 - protein, 804 aa, BradyrhizobiumColbertium
MRAELERAWPSLISDIIGRAASARPASVMRRRDRWPHIETLMSNTSTSLRRSILAATTALISPALPCATSLLPPFVTTASAQSAERLPPVTVNSPQQRKRKPRGVVAAAPPAAAQSGDISAPDQSPSSVPASASLPPRAGFDRGLSSSDSASLVTALPGGAAWGAGGVSSLPAINGFGADRLQVAINSMLISPACPNEMNPPLSFVNPAMIAKMRAYLGVGPVSVGGDYIGSRIDVTTAPPAFTPAQAGWVASTRLSSFFRSNGNAYGVDATATLANHDTSVTYTGGWVRSGNYKAGDGTTVKSTLYETQNHAISISKQALGNLFAFQIGGQFIPYQGYVNQYMDMVYNRGLYANGRYEGVFDWGKFEASAFVHQIRHTMGFIAPDKIGEMPMDTKALDAGYSMKATVALSGHDLLRIGNELAVNRLDDWWSPVAGSMMMSPNAFININGGTRDRLGTFVEWERHWDRQWTSILGLRNDVVWMNTGNVQGYNAMSYGADAAAFNALDRARADVHVDGSALLRYEPNDISQYEFGFARKTRSPNLYERYAWSTNAMAMKMIGWFGDGNGYVGNLDLKPEKAHTVSFTAGWHDPAQRVWGVKLTPYASYVHDYIDVDRCSTASCLASNPANLTANTGFVYLQFANHDATLYGINVEGRLTVWDNPIYGQGQVRGLIGYVRGQRTDGVDLYHMMPINAKFALDHLLGGWTNSIELQLVGSKDQVSQVHNELTTPAYALLNLRTGYQWQHVRLDLGIDNLFNQNYHLPLGGADLVDYKVDSMMGSSAAYGYNVKGPGRSFNARLSVNF

SEQ ID NO: 9283 - protein, 105 aa, BradyrhizobiumColbertium
MNVILSGMLVASISPLAGAAAQELCISGDNGDAARTDDADKHGKKTNVHCPLCVGHHVSGALPPPQPTLTDRIPLTASAAYWFRQRIVAYARSFDHLSRGPPALT

SEQ ID NO: 9284 - protein, 194 aa, BradyrhizobiumColbertium
MIRLAFTIVAGVVLGLVVHLVSVLALPRIATQDAYSRLTPMTKVNAVTQLPLADPSTSPMPFMDPAFALAICRYDLSSGPIKLTVPVSQAYTSLSFYTRNEIAYYAINDRSAGRKVIELDLMTEAQHSELPEDEEVTAADRLIIDSPTTTGLILMKALAPEPGLMAQAQSSLQAATCTPQTEPPAKAEAPRRRR

SEQ ID NO: 9285 - protein, 192 aa, BradyrhizobiumColbertium
MRLILITLTALLLATVVGLGATWMTTTRGTEIGALTIGPWTARPRTGTADVDPYSRATIVRNGELPIGTGDGVAFTATTDDKRKALDGRCDVIVSGVTPPARFWTLTLYDRKGHLVANSLQRYGFTSQEIVRQSDGSFEIRIASRSRAGNWLPTGGIERYALMLRLYDTPVGVATRTQRDAPMPSITTVGCS

SEQ ID NO: 9286 - protein, 717 aa, BradyrhizobiumColbertium
MDRFYVGRWKRWVFIEPLSEAATLGLGGLVVMLALAIPAFRETADEDWLKKSDLAVSFLDRYGNPIGSRGIKHNDSIPLEDFPDVLIKATLATEDRRFYEHFGIDIAGTARALVTNAQAGGVRQGGSSITQQLAKNLFLSNERTIERKVNEAFLAIWLEWRLTKNEILKLYLDRAYMGGGTFGVDGAAHFYFNKSARDVTLAEAAMLAGLFKAPTKYAPHINLPAARARANVVLDNLVDAGFMTEGQVFGARRNPAFAVDRRDEASPNYYLDYAFDEMRKLVDTFPKSYTERVFVVRTAMDSNVQKAAEDAVENQLRQFGRDYHATQAATVVADLDGGIRAMVGGRDYGASQFNRATDAYRQPGSSFKPYVYTTALLNGYTPNSVVVDGPVCIGNWCPQNYGHSYSGSVTLTQAITRSINVVPVKLSIEIGRREQPKAPNPAKVGRAKIVEVARRFGLKAPLPDTPSLPIGSDEVTVLEHAVAYATFPNRGKAVTPHAVLEVRTGAGDLVWRWDRDGPKPRQAIPASVAADMAGMMSHVVSEGTARRAALDGIPTAGKTGTTNAYRDAWFVGYTGNFTCAVWYGNDDYSPTNRMTGGSLPAQTWHDIMLAAHQGVEVREIPGVGMGQKLPPHHVSNAHANAAPKVLETKPGPPPVLTKRGADILVRVERLLDNAARTANKSTDADSNPAKPSSSTSALAFPQNYAEENANTSAPRKN

SEQ ID NO: 9287 - protein, 65 aa, BradyrhizobiumColbertium
MRWYDLAPLEPLRLASKAFKHPAGAASRRLEGMLRQTQGARPASEGLAVSSSRAGPINQWSRSRF

SEQ ID NO: 9288 - protein, 171 aa, BradyrhizobiumColbertium
MTAAPKRPSGQEGFFWKTKTLEEMSGPEWESLCDGCGRCCLNKLEDEDTGQIYFTHVGCKLLDGASCACKDYPNRSDKVPDCVRLTPANVRTLNWLPPSCGYKLVAEGRDLYWWHPLVSGDPNTVHEAGVSVRGRVEGSEEQIPDEELEDHIVQWPATLPKRARLKRRPKD

SEQ ID NO: 9289 - protein, 525 aa, BradyrhizobiumColbertium
MNKFERQSAADVQTLPDDIAEELSRLPSEVISVDDAPSIAPPVPLSQDEVRTIVISLMLTMFLAALDQTIVATALPTIGRQFQDVSNLSWVITAYLLASTAVAPVFGTLSDIYGRKAMIITSLSLFVAGSVLCAVAPNMPMLILARGLQGLGGGGIMPVVQTVISDVVSPRERGQYQAYFSSVWMVGGILGPVIGGVFAEHLHWSMIFWINLPLSAAAIALLLPKMKKIPVFHRKRKVDWLGGVLLMASAVVFMLVLTWGGTRFPWLSPTVLAMVGGAVALAVTFVWHARRADEPFLPLPLLGGSVVPFGLMAGGCALGAITGLTVQLPLYYESVYRLSASEAGLALIPLAAVSTCGAAIAGRTMARAKHYKRVAIIGTSWAALCGLGLTLTTLPLWGLLTLMAAFALGLGTTFPVCVVSVQNSVARPQVGTITGALNFFRSLMSSFTVAAFAAILLIALGADIPLGEHHAAGSVAIPAEDMRHAFRYVFGAATALMTAAALCLIAMEERPLAGPSAKQSAEMVE

SEQ ID NO: 9290 - protein, 651 aa, BradyrhizobiumColbertium
MINPPTNSADELAAESARLRSELAIARDRQSASAEILRTIAASPSDARPVFAAIASSSKRLLGGFSATVLQFIGDELHLVAFTPTSPEADKGLEASFPRKISDFPTFALVRDGKTIQFPDSEAAEVPELNRELARLRGFRSVLFMPLMNRGTPVGMISVTRAEPGAFAPDVVQLLQTFADQAVIAIENARLFNETREALERQTATADILKVMAASPSDMQPVFDAIAANANRLIDGFSTAVLRYIDGAVHLAAFTSTDPAGDRVLQASFPVQFARFPPHQLVAHGHAAQLPDTELEPAARDIARARGYRSMLFTPLMSEGEAIGIIIATRRATGSFADHHVRLLQTFADQAVIAIKNVSLFNEVATRTSELAKSLDDLRAAQDRLIQTEKLASLGQLTAGIAHEIKNPLNFVNNFASLSAELTDELNELLAPVTLADDVRSEVDELTGLLKDNLQKVVQHGRRADSIVKNMLLHSREGGGEHGLSDINALVEESLNLAYHGARAEKPGFDVRLKRELDPAAGQAEVFPQEITRMLLNLISNGFHAVTRRKADGVAGYEPEVTAATRDRGDSIEIRIRDNGTGIADEVKEKMFDPFFTTKPAGEGTGLGLSMSHDIVVKQHGGTIDVATVPGEFTEFTILLPRKSSFAGGRG

SEQ ID NO: 9291 - protein, 544 aa, BradyrhizobiumColbertium
MKLGTAIAEIMRREGIEILCGYPVNHLIEHAAKAEIRPVMVRQERVGIHMADAISRVTSGRSIGAFCMQHGPGAENAMGGVAQCFGESVPVLVLPMGYQRRLAHIEPNFNSSEAMKPFSKSSEPIILATEVANIFRRAFTRLKNGRGGPVIVEIPADMWNEEVPEPLDYTPVLRTRYGADPVHVKEAASLLVNAKRPVIYAGQGVHYAQAWPQLKRLAERLAIPVTTSLGGKSSFPETHPLSLGSGGLAVPRAVPKFLTEADVIFGIGCSFTETNFGIAMPKGKTIIHSTLDPNHLNKDVEAKIGLVGDAGLVLDALLEEIGRTVTSDRDASAVAAEIAASHKEWLAKWMPKLTSNDAPLSPYRVLWDLQHTVDIRNTIITHDAGSPRDQLSPFWKSVEPLTYLGWGKTTQLGYGLGLAMGAKLAKPDKLCINIWGDAAIGFTGMDFETAVRERIPIMSILLNNFSMAIELKVMPISTEKYRSTDISGDYAAMARAFGGYGERVTSPEDIIPAIKRGIQKTQEGVPVLLEFITSKETEVSRPGT

SEQ ID NO: 9292 - protein, 84 aa, BradyrhizobiumColbertium
MVRLIKGERIRNSLRRKAGAANSPVGQLCNELQRSIQSPSAERFWIASQQGLLAMTNVGSNAESYLGHQRCSTRFPPTRGAAFG

SEQ ID NO: 9293 - protein, 531 aa, BradyrhizobiumColbertium
MSITVRFCGAARTVTGSSYLFQTAAGRFLVDCGLFQGQKTLKELNYGPFPSRPADIDAVLLTHAHIDHSGLLPKLVRAGFEGPILATRGTIDLCSYMLPDAGSIQESEVTQLNRRNASRGRKQVAPIYTQADAIASLQSFRPVDYERWTDVIPGVRARYWNAGHLLGSASIELEIAERASTRPLRVLLSGDVGPEAKLLQPDPEAPTDFDYVISEATYGDRVREATTPALRRKHLAAEVRDAAAAGGALLLPAFAVERTQELIVDLVDLMEHGEIPTAPIFLDSPLAIRATEVFRRHAESLDPSVDVTRLLNSPHLKFTETADESKAIMRLSGFHIIIAASGMCDAGRIRHHLKRWLWNERATVLLAGFQANGTLGRFLQNGSKAVRIQGEEIKVAARIRMIDEYSGHADGAGMASWIAARRPISRGLFLVHGEEEAIAGLAERVAGRIIPAAKVYQPMLDDIYELSAPEPRVLDPDHRRRLSPEAVTRLDWHNEMSELMLDINDRIAAAADDRVRGVIIRRLRRALEENA

SEQ ID NO: 9294 - protein, 306 aa, BradyrhizobiumColbertium
MSTIALQTLSCGADAAKRLAARLGLACGEIAVHRFPDGELRVAVAPATDTTILYAPLDQPNDKLITLLFAAEALRRNGTRRLVLVAPYLCYMRQDAAFHAGEAISQRAMGRLLATTMDRVVTVDAHLHRTPDIRSVFPGIEAENLSAMPAVANALAKDSVGPSTVVIGPDVESEPWVSDVARRLRLQHTVARKTRHGDRSVALSFADPALLLGRPTLLVDDIVSSGTTLIAAAKALTAMGAISVDAVVTHALFPAAMVAAFAEAGIRSVRSTDSVPHPTNAIALDEILAAALRSELTTTHLPGRTT

SEQ ID NO: 9295 - protein, 289 aa, BradyrhizobiumColbertium
MNIGVEEMKAIVSDCNGCLIWGGHVNLSPADDVLISVERPLSLDTREQMVASIMSKKIAAGSTHLLIDIPVGPTAKVTGGVEAMRLRKLFEFVGDRFGRAVEVITTDGSQPIGNGIGPVLEANDVVAVLGNEKDAPRDLREKSLRLAAHLLEYDPKLRGGAGYARARELLDSGAALKQMQKIIEAQGPSTCSTELGPLSFDVKATHDGVVSAIDCLRMNRLARTAGAPLDKGAGIRLFKKIGDRVEQGEPLYRVYTFDSPEHDLAAAATAEETGYLINGHETPPGKTTP

SEQ ID NO: 9296 - protein, 235 aa, BradyrhizobiumColbertium
MEIQLPAAGPPMHPDLPHSRLKIRRVRLDTGRENVVVVSRHSKALRAEIFRGFSRVELRQGGKVLLATLLITDDEMLAGPDEIGLSEPAFRRFAEPIGTLVTVRPASPPESLEAVRAKIRGRTLSQAEIGAIISDLAHYRYSDMEIAAFLIGSASFITSDELLALTGAMAQAGTQLVWPTPVVVDKHCIGGIPGNRTSMVVVPIVAAHGLPIPKTSSRAITRLPAPPTRWRCWPG

SEQ ID NO: 9297 - protein, 54 aa, BradyrhizobiumColbertium
MRLIRCFLADENGATAIEYGLIAAGITLAIVTVVNSTGGALLNNKFNSISAATK

SEQ ID NO: 9298 - protein, 78 aa, BradyrhizobiumColbertium
MPWSTAFDDPVRVSNKIKLLTLQDAADYIMQLPDDVQHEAHWQTAIETLINAAETGGGWVMFARIATLRALNATGRRG

SEQ ID NO: 9299 - protein, 327 aa, BradyrhizobiumColbertium
MAPRANWKGFLRLSLVTCPVALYPATSDTEKVSFNQINRKTGHRIKYLKVDAETGDEVTSEDIVKGYKVDTDTYIEITKDELDDIALDSTHTIEIDEFVPKADIDSRYLIRPYYLVPDGKVGHDAYAVIRETIRSMDKVAIGRVVLTNREHIIALEPLDSGLMGTLLRYPYEVRSEKEYFDDIQDVKLTKDMLDLARHIVEKKSGTFEPELFEDHYETALIDLINKKRSGMPISAKAAPKTGGNVINLMDALKKSIANEKDAAPTAKAAKETGKETAKTKKPKKRVEGQREMLLPIAGKGGKDAAAKTPARKADKPVRAPARAKKAG

SEQ ID NO: 9300 - protein, 50 aa, BradyrhizobiumColbertium
MRIIATAGAESCNGVNRRLRRVARRLHGSEHRPRSRVAPPIRRREEVAAT

SEQ ID NO: 9301 - protein, 51 aa, BradyrhizobiumColbertium
MATTREQKRIVETPTEARQGEPGPSVAALLAISTGLAILILAVVWFVFFRT

SEQ ID NO: 9302 - protein, 224 aa, BradyrhizobiumColbertium
MRLLVVEDDPDLNRQLTKALTDAGYVVDRAFDGEEGHYLGDNEPYDAVVLDIGLPKKDGISVLEAWRRNGRTMPVLILTARDRWSDKVQGFDAGADDYVAKPFHLEEVLARIRALLRRSTGHAQSELSCGPVTLDTRTGRVSVSGNPIKMTSHEYRLLAYLMHHSGRVVSRTELVEHLYDQDFDRDSNTIEVFVGRIRKKLDVDIIQTVRGLGYLLTPPPAPGA

SEQ ID NO: 9303 - protein, 458 aa, BradyrhizobiumColbertium
MAASSLANRLFLSATAWLVVILAITGVVLSSVYKDATERAFDRRLNLYLRTLIAEVATPDEPPDRQFQSLGEPLFELPLSGWYWQITRIDTEKPEVRSSRSLWDKKLPKLEDQGAELTAAGIRLAYVDGPEGQNLRMVERPVDLGADGKFLVSVAGDDTEIFDETRSFDYYLGGTFTALGIVLLLTTVFQVRFGLAPLKRISEAIADIRSGRAERLEGEFPVEIAPLARETNALIDANREIVERARTHVGNLAHAIKTPLSVIVNEAGAHAADPFAAKVLEQADVMRDQVTHHLERARIAARVSVVATVTEVAPAIEALRRTMEKIHRDRGITVEAKADPSAKFRGERQDLEEMVGNLVDNACKWAASRVFIEVVVQTPHQAGASPHLRIIVDDDGRGLSEAERAQVSRRGQRLDESKPGSGLGLSIVVELAALYGGSLSLGAAPTGGLRAELVLPGL

SEQ ID NO: 9304 - protein, 466 aa, BradyrhizobiumColbertium
MSQTSIERLREYLAQLPPQSQALLMREFERALERGQDTAVATLVLEQLRKIVRKSEADEAPAPRTDDLSRLLFQVLEPFLVEAGTPIRAGQIRRSSLQPIWQWLGRDGAPAKVNEFEAALARMPADAAGQVEALAQKLQAVAADAIFELTGPGGGDKTRALARVGPPNVIEDLYSIGAVLQVREAIASLNERLPRFLRAFGDSQIASVTSALNIPVLQTPQMLPFALSMVVQRMTAPWQIIRLAIKIAASDDEIRVAATPYGVAVTIALHDLSCVAAILRMDIKRGHFDNVAGNLKTLHDGVRGLRTELDLRNDSAWGKQLTSIRADISNALQSEIDSVPGRVRRILRQRPEKDIPPGARIDSTEVEEAVALIDFVATCRNYASELAINEVTLRTYSDLQQYVERSTEQLVQSLRAADHKVRTYRQQQVQAAIRFCQVLFGDDYASLMSRAAENALTGERKSSRAS

SEQ ID NO: 9305 - protein, 89 aa, BradyrhizobiumColbertium
MKPVISSIEIENRVIVAKYRRLMVGAKVVLVEKASDRQLPETITRVASRVPVGAVRIRLPDAIKPGTYFLRAFNGHGEDAAQSADFEIG

SEQ ID NO: 9306 - protein, 370 aa, BradyrhizobiumColbertium
MTLWFVFALMTVAAIFAVLWPLGRGSRAPDQGSEVAVYKDQLAEIERDLAAGLIPAPEAEAARVEISRRLLAAAASEPAMAPKSNLKWRRAAAVLALGGLPLVAIGVYMPLGSPRLQDFPLAQRERGTGSGMAQSLETLVAQVEQHLEKNPTDGRGWNVLAPVLERLGRFDDAVRAYRNSLTYNGESAERRSDLGEAISAAAGGVVTAEAKTEFERAHALNADDPKANYFLGLAAEQDGRKDEAARIWRALLAKAPADAPWRALVQSSLARVGGGDTMPALSDETIAASKDLAEGDRNAMVRGMVDRLATRLKQNGDDVDGWLRLVRAYLVMGERDKAKGASADARQAVASDAERLRQLDEGLKTLGLGG

SEQ ID NO: 9307 - protein, 174 aa, BradyrhizobiumColbertium
MTRKQRRMTIIGGSLAVLALAAALVLNALRDSIVFFSTPTMVAEKHVEPGKRFRLGGLVQPGSLQRGDNLAVTFEVADGNAKLPVAYKGILPDLFREGQGVVAEGALDGNGVFKADTVLAKHDETYMPKEVADALKKQGHWKDDYDAKASDTKASGESKPAATTAQGNPQGAMR

SEQ ID NO: 9308 - protein, 660 aa, BradyrhizobiumColbertium
MIAESGHYALVLALALALIQSIVPLVGARLQDAALMNVARSTALAQLLFVGASFTALVMLHVNSDFSVANVYENSHSMKPLLYKITGVWGNHEGSMLLWVAILALFGGLVAAFGNNLPLSLRAHVLAVQAWVASAFYLFILVTSNPFLRIATPPIEGRDLNPVLQDIGLAVHPPMLYLGYVGFSISFSFAIAALLEGRIDAAWARWVRPWTLVAWIFLTLGIAMGSYWAYYELGWGGWWFWDPVENASLMPWLAGTALLHSALVMEKRNALKVWTILLSILTFSLSLLGTFLVRSGVITSVHAFATDPTRGVFILLILCLFIGGSLLLFAGRATSLKQGGLFAPISREGALVLNNLLLTVACAVVLFGTLYPLAMEMLADFKMSVGAPFYNLTFSPLFALLLLAVPFGPMLAWKRGDLLGVAQRLLAAGVAGLVVVAIVWGWARGGSALAPLAIGLGVFVIAGAVTDIVERTGLVRLPFASVLHRARGLPRSAWGTAFAHAGLGVALIGIVCETTWNSEYIATMKQNDVAHVAGYDLKLDGLFQRQGPNYREMIAEFKVSRDGEPLTVMAPSKRSFTTRGSSTTEAALLTSGASQLYVSLGDATAEGAIAVRIYHKPLVLLIWWGPVLMAFGGVLSLSDRRLRVGAPKPARARQRLQPAE

SEQ ID NO: 9309 - protein, 160 aa, BradyrhizobiumColbertium
MRRMMAAFVALLLLALPAAHAVQPDEIMADPAKESRARELSRELRCMVCQNQSIDDSDAPLARDLRLLVRERIAAGDSNSQVLDFLVARYGEFVLLKPRFERQTILLWLLGPLLLIGGGLALWLQIRRRSRNGVDVPAAPLTPEEEARLAALMSDDAKSS

SEQ ID NO: 9310 - protein, 132 aa, BradyrhizobiumColbertium
MVASEVKNLAHQTSKATEEITSHVASIQGITAETRGAIDGISKTLSEISSIMSGIEVDTDLQRNATQEITRSAQDAAHGTLDVSNHIVQITSTSAETGRMAAEARDSAVDLSQQAETLKREVDEFIASVRAS

SEQ ID NO: 9311 - protein, 527 aa, BradyrhizobiumColbertium
MTDRIDLSNLPSYRQPRRSVFSARRLALMASVVAGLGAAVYGFSPSTSPADLFSSPAHAQVNNEVRKVERPIGFADIVERVKPSVISVKVNMKEKTASNDDGDDSSSPFQPGSPMERFFRRFGGPDGFPGPGMRGGRGRVVQGQGSGFFISADGYAVTNNHVVDGADKVEITTDDGKTYTAKVIGTDQRTDLALIKVEGGSNFPFAKLADGKPRIGDWVLAVGNPFGLGGTVTAGIVSASGRDIGNGPYDDFIQIDAPVNKGNSGGPAFDTNGEVMGVNTAIYSPSGGSVGIAFSIPANTVKSVVAQLKDKGSVSRGWIGVQIQPVTSDIADSLGMKKAEGALVAEPQANGPAAKAGIESGDVITSVNGEPVKDARELARTIGGMAPGATVKLNVLHKGQDKVVNLTLGQLPNTVEAKADTDKDSGKGASRGTDVPKLGMTVAPANSVAGAGKEGVVVTEVDPKSAAAERGFKEGDVILEVGGKSVSTASEVREAISTARTENKNSVLMRVKSGGQSRFVAVPLAKG

SEQ ID NO: 9312 - protein, 226 aa, BradyrhizobiumColbertium
MRLLIIEDDRESADYLAKAFREVGHIADHAADGEEGLAMAENGDYDVLVVDRMLPKRDGLSLIGALRDKGNTTPVLILSALGQVDDRIKGLRAGGDDYLPKPYSFAELLARVEVLSRRRGGPAEDTLYRVGDLELDRLSHRVARGKDELTLQPREFRLLEYLMKHAGQVVTRTMLLENVWDYHFDPQTNVIDVHISRLRSKIDKGFDRPLLHTIRGAGYMIRDGIR

SEQ ID NO: 9313 - protein, 486 aa, BradyrhizobiumColbertium
MTAFGKLVRTTAFRLTLVYLLLFAMFAASLLGYFAWNTRRLITEEITQTVNAETSEINEIYGRRGLRGLVLAIEYRALRPGANLYLVTTPTGQAIAGNVGSLAPGVMATRGWSETAYRRLEDADDRDHRALVRVTELENGFRLLIGRDLAERRRLFGIVAKAAQWSVLIVVVLGLGGGIFVARRVLRRIDAMTGTTQRIMSGDLSERLPVGRSGDELDRLAENLNAMLERIEALMAGLKEVSDNIAHDLKTPLTRLRNRAEEALAKSGCEADYRAALERTIEESDGLIRTFNALLMIARAESGQARGNMDDFDAAEVAGGIHELYEPLAEEDGMTLKVKAEPTPVHANRELVSQALANLVENAIKYGKPAAQAAGTVVSMDARQITIEARREGEQVLLSVTDRGPGIPEADRKHVVERFVRLEASRTLPGSGLGLSLASAVATLHGGELRLGAAHPGLVATLVLPARTGAGDRVAPPLQDVPQKVA

SEQ ID NO: 9314 - protein, 989 aa, BradyrhizobiumColbertium
MNHSAPGNADKHGERLAARFAEAPHIAASATDERRLENWLAELEPAQSARLESLLAHPFARDILTGIAEFSPYLFDLVRADPLRLIRLLDCDPDVHLAGLMAEARDAVLAAPDEAEVMRLLRRMKAEAALLIALCDIGGVWPVMRVTAALTDVAVFSVQAALRYLLRQEAARGKLSPSDPEAPEEGCGLIVLAMGKMGAGELNYSSDIDLIVFFDPEATTLAPDIEPQPFFVRVTQGMARILQQRTYDGYVFRVDLRLRPDPSSTQVAISRDAALNYYEREGRTWERAAMIKARACAGDARAGEALLSEIAPFVWRKHLDFAALADVHDMKRQMQTYRGQSEVAVEGHNVKVGRGGIREIEFFAQTQQLIAGGRHPELRVRPTLKALDVLASSNWITHAARDELTTAYEFLRRVEHRLQMIADEQTHTLPEDRQAVERFAWFFGYPDREAFARDLLHQLQIVQGHYEKLFEGDDPTGTAKLPALDYSAGPEDPRLLQHLATLGFKKPAAVAQTVRDWITGDYRVFRVEATRNAFVEFVPALIDGLAHAEEPDRAVVAFDDFLAALQRGGRLITLLGQNRDLVALVALVLGAAPRLGEMLARQPQLMDGLIDPRFFGAMPDREELSGRLAATVQDAGSYEEFLDRLRLFGQESLFLIGTRILSGTVSAQQASTAFADVAEGIVHTVHGLVADRFAAQHGRIKGQETAIIAMGRLGSREMTASSDLDLILLYDFDGEHPDSDGPKSLHGAHYFARFTQRLISAFTTRTNYGVLYEIDMRLRPSGRAGPVASSLVSFADYQANEAWTWEHMALTRARVVSASDAFRERIERVIRDVLTRRRDPAITANDVADMRRAIAQEKGEADCWDLKHAAGGMVDIDFIAQYLQLVHAHDKPDILDVSTVQVLENACRIGVLPQSETEILRAAARLYHDLTQILRLCVSDRFKPETAGTDLQRVMARAGDAPDFSSLEARVKETQSEVRRVFRALLEGT

SEQ ID NO: 9315 - protein, 297 aa, BradyrhizobiumColbertium
MIDKLELLLALAKERHFGRAAEACGVTQPTMSTGLKQLEEILGVMLVQRGSRFQGFTPEGERALDWARRIVGDARAMRDEINGLKHQLSGEIRIAAIPTVLGMVAALTTPFRARHPEVRFRIQSTTSSEVLGLLENLEVDAGLTYIENEPIGKVRTIPLYNESYRLLTAPDAMFGDRETVTWKEVGQVPLCLLTPDMQNRRIIDRALRSVGAEATPTLTSNSLLVLFTHVKTGRWASVMPAKLAETLGLSDTVRSIPIVEPDVNYSIGMVIPQRDPMTPLIAALVNVAREVAPSLQL

SEQ ID NO: 9316 - protein, 795 aa, BradyrhizobiumColbertium
MIRKRRGAAFEARFQGAEGMARADAANACVQSDSIKGLAQSIAKPAYHRLLVAEPALRRAVPTLIIAFLITICLGAFVQVVDQTRQKRLVIRQDISALADLLAERIDRLTSVRHDRPKTIDSLPAMLPDLIPSWGMASGRHVIVTSAGIDRRVLARIPIDSDPSGNDRLLDAITTAQLLAAPTRDGNISDMTLPNGNAAMATSRQIKSLPGFVTVIQERNEPIWGSDAALSVTLSATTGFVVLILGFAFHWQSTRAREGDLINDAVRGRIDTALNRGRCGLWDWDLSRGRIFWSQSMFSMLGLDGRHELLTFGEVNALVKSDDIDLFEIADQLISEKIDHIDQTFRMQHVDGHWIWLRVRCEKTRGATDSSVHLIGIAVDITEQKSLAEKTVEADLRLRDAIETIPEAFVLWDASDRLVLCNSHFQRLHKLPDTAVIPGTSYETVLEVGRMPEVRTRHNETGVQGPGARTFEAQLDDGSWLHISERRTKDGGYVSVGTDITRIKEHEQKLVDNDLRLRATVIDLKRSQAALERQAVELADLAEKYQREKTRAEEANQTKSKFLANMSHELRTPLNAIIGFSEIMGSGMFGELGSEKYQEYCQDILTSGHYLLEVINDILDMSKIEAGRMKLDMEELDLSKTLAESLRVVTGRAQDKHLTLDADIAKSISVVADRRATKQIIVNLLSNAVKFTPDGGRVVVRSRQLDDRIVLMIADTGIGIAPHSLARLGRPFEQVESQLTKTYHGSGLGLAIARSLAQLHGGSMRLRSKLEVGTVVRVTLPRDAIKAAAGISAAA

SEQ ID NO: 9317 - protein, 457 aa, BradyrhizobiumColbertium
MTSQHSKTSVAAISIFASGGMAAAKFAVGIAIGSLALISEALHSSIDLVATIITWAVVRVSDKPADEEHHYGHGKLESISALGVTALLYVLAGGILVEAYSRLSEGTPPPTISAVPFVVLVIDIVVNLWRARALQRAARETRSQALAADALHFASDVMGSFAVIAGLILAALGFWWGDAAAAAAVAVMIAALGLRLAGSTVQTLVDRAPEGAQEKATAAIRGVPGVIDVDRLRVRMVGATTFIDTIAKVPRTYPIDRVEEIKRNAQAAVTKAFGDADLTFAAVPVARDNETVHDRIMVIAHNSGLAVHHVTVHDLGAKLIVSIDLEVDAAMQLEAAHDIANTLERKIKEEFGEDVEVDVHIEPMEPELPFGVDAAPDRVQTIAAALTEYAAGSEIHDIHNVRVRNTDAGEIVNFHCRAAPSMSVIKVHEHVDAIERALRRAFPSVKRVISHAEPPRA

SEQ ID NO: 9318 - protein, 322 aa, BradyrhizobiumColbertium
MKAYVYGPDGARISDVAQPKPKGTQVLVKVRACGLNRADTGMRKGHAHGAAGGVGTVLGMEWAGEVAELGPDAKGVKVGDRIMGSGGAAFAEYTLADHGRLFHAPSNMNFEEAATLPVALATMHNAVVTVGGMQAGQSALIQGASSGVGLMAMQIARLKGAKLVIGTSTDAYRRGRLKEYGADLAVDSSDPKWVDEVLRATNGEGVDLIVDQVSGKVASQNLAATKIKGRIVNVGRLGGTHADFNFDLHAARRIDYVGVTFRSRTIEEVREIFEEVRKDIWGAVESRKLQLPIDKVFSFDDIEKAFDHMEANKHLGKIVVAL

SEQ ID NO: 9319 - protein, 331 aa, BradyrhizobiumColbertium
MLQTRFTKLVGVEHPIVQGGMQWVGRAELVAAVANAGALGFITALTQPTPEDLTKEIARCRDLTDKPFGVNLTILPAIKPPPYAEYRAAIIESGVKVVETAGNKPQEHVEEFKKHGVKVVHKCTSVRHALSAERMGVDAISIDGFECAGHPGEDDTPGLILIPAAANKVKIPMIASGGFADARGLVAALALGAEGINMGTRFMATKESPIHQLIKEKIVANDERETELIFRTMRNTSRVAKNAVSTKVVAMEKEGAKFEDIRELVAGARGKMVYATGNSDEGIWSAGQVQGLIQDIPSCAELVSRIVREAEAIIRGRLEGMIVQPQREAAE

SEQ ID NO: 9320 - protein, 216 aa, BradyrhizobiumColbertium
MTKKADRSGSCILAGFALAAMLSCTTPSASAHEANKRVADANALATADTASRPQPQAARRSVARAEKGPYYVDFRARTAASWGHAFVWYGKTSEKAVEVAGLTPAGDTLAYVLGHITFVPSETGASYGDLDPEYLTANYRVYLNEADAKRVFAYIKELQASSPVWNAETMNCTGFIGDIAEFMGLKVPHRWQRPENFVNSLKQMNGGRQMVRLSAE

SEQ ID NO: 9321 - protein, 67 aa, BradyrhizobiumColbertium
MTVKKIVIALGATLALVTAANAADIPRRQPVPVYPAEQAPIGKMPIGKSPVGKAPIGKAPGPVAARY

SEQ ID NO: 9322 - protein, 83 aa, BradyrhizobiumColbertium
MRILIAILFALIGLVAGWSALAALVIALAGPGNDGGIAMGAVFAIGPVGGLAGLIAGIWLFRRFGPSNDQDAPLPASRGEDSA

SEQ ID NO: 9323 - protein, 141 aa, BradyrhizobiumColbertium
MLVGDILRKKTPRVVTVRMNETVGIATKLMRTNNISALVVKDVVRSEGNTAVGMFTERDVVRAVVEHGANAVNVKVSQLVSVQQLVSCTSSDTIEHVRHLMNRHHIRHLPVIDDYSLVSVISMRDIAAALDEATNSTPQAA

SEQ ID NO: 9324 - protein, 429 aa, BradyrhizobiumColbertium
MTDMVQSAAAPSATRVSDAYRWLQLSIGVAAMVMIANYQYGWTFFVPDIQKTFGWDRASIQWAFTLFVLFETWLVPIEGWFVDKYGPRIVVLVGGVLCAVGWAINAQATSLNGYYLGMIIAGIGAGGVYGTCVGNALKWFPDKRGLAAGITAAGFGAGSALTVAPIQAMIKDSGFQATFLYFGLGQGIVICILAFFLLAPKAGQVPNVVANANLLQTRRNYQPTEVLRQPIFWLMYFMFVIVGAGGLMVTANLKPIAADWKVDNVPVTLMAVTMTAVTFAATIDRVLNGLTRPFFGWISDMIGRENTMFIAFGMEGFGIWMLYLWGHDPVWFVLLSGFVLFAWGEIYSLFPSTCTDTFGAKFATTNAGLLYTAKGTAALLVPIANYMQQSSGTWDSVFIIAAGANILASLLAIAVLKPWRKIVVAKSTI

SEQ ID NO: 9325 - protein, 52 aa, BradyrhizobiumColbertium
MSVIQNPPERADHFYACAGAQLGMHYAKIQAKGGEVRRNGAAFFTCAMSAGL

SEQ ID NO: 9326 - protein, 499 aa, BradyrhizobiumColbertium
MEELANLFHGFAVALQPYNIMLMIIGITLGVIIGVLPGLGGANGVAILLPLTFSMPPTSAIIMLSCIYWGALFGGAITSILFNIPGEPWSVATTFDGYPMAQQGKPGEALTAAFTSSFVGALFAVIMITLVAPLVAGFALRFGPAEKFAVYFLAFCSFVGLSKEPPFKTIAAMMMGFALAAVGLDSITGQLRLTFGVTELLNGFDFLIAVIGLFGIGEILLTMEEGLAFRGGNASINLRVVLHTWRELPAYWMTSLRSCLIGCWRGVTPAGATPASFMSYGIAKRLARRGNNFGKGEIEGVIAPETAAHAAGTAALLPMLSLGVPGSPTAAVLLGGLLIWGLQPGPMLFVEQKEFVWGLIASMYLGNLAGLIVVLTCVPIFAAILRVPFGIIAPLILVLCAIGAYSVHNSTFDVMLMLVFGVLGYLLKKCNYPLAPLVLAIVLGDKAEESFRQSLLGSQGSLGVFFSNGLVSTIMALGLVALFWSAIQEGYSRLRTSMA

SEQ ID NO: 9327 - protein, 146 aa, BradyrhizobiumColbertium
MALLIGVFGLVVIFGSVKAGISWGAEGPRAGFFPFYVGATIVVASAINLWHAQRDDDGRLFAEWGQLRQVMSVVVPTAIYVGSMPFIGLYVASTVFIAWFMRWLGGYRWLTTVAVAIGMPVLTYLVFERWFLVPLPKGPFEEWLGL

SEQ ID NO: 9328 - protein, 335 aa, BradyrhizobiumColbertium
MKPFVLNVALAAIAMSCVGSTASHAAWEPVRPVEFIVPAGTGGGADQMARTIQGIVTKHNLMKQPLVVINKAGGAGGEGFLDVKTSSGNPHKIIITLSNLFTTPLATGIPFNWKDLTPVAMLALDEFVLWVNAEKPYKTVKDYVDAAKQAPSGSFKMGGTGSKQEDQIITVGIEKAIEAKFTYIPYKGGGEVAVQLVGNHVDSTVNNPIEAVAQWRGGKLRPLCVFDAQPMAYDEPIADGKAWKDVPTCKSQGLAMEYLMLRGVFMSPKATKDQVEYYVELFKKVRATPEWQDFMKNGAFNTTFLTGADYAKWVAAEEKRHEGLMKDAGFLASGN

SEQ ID NO: 9329 - protein, 45 aa, BradyrhizobiumColbertium
MSKTASAALAPSSSLFARLVAAIDGLLMASAEISNRNGDLPRFGL

SEQ ID NO: 9330 - protein, 434 aa, BradyrhizobiumColbertium
MSSASSAVSIGIDFGTSNTVVALAADDRRVEAIRFDHGGQRHSVYVSALCFWEDRPGAGAQAEGGPWAIEQFLEGRHVYRFLQSFKTFAASSSFNTTQVFRQRYKFEDILAAFLRTLARHGGEKFGFEAANITVGRPVRFAGGNPDEALAMQRYRAAFERLGAGHARYVYEPVGAAFSFARRLERDATVLVADFGGGTSDFSVMRFSRAGGRLRAEPLGHAGIGIAGDTFDYRIVDHIVSPRLGKGSSFRSFDKVLPVPSGHYTNLARWHQLAMMKSNGDLRELRELARTALKPELLEDFITIVDLDLGFALYRSVSDAKVALSAQDEVDFRFKGGGVEIGADITRKQFESWISDDIARLGATVDKVLAEAGITARDVEKVFLTGGTSFVPAVRRLFAERFGNERLMSGDQFESIAYGLALIGHSPDPDRWTAS

SEQ ID NO: 9331 - protein, 149 aa, BradyrhizobiumColbertium
MMRSAVEWLIITGLAVGFAASAQAEEVDIGKAEFQSSCASCHGADAKGKGPVSSQLKTPASDLTLLAKNNNGVFPANAVYEIIYGSKSVPAHGSREMPIWGERFNPIVSLPHAVDPSYWQKAGPQQSPEVVVRTRILAVIDYLNRIQQK

SEQ ID NO: 9332 - protein, 427 aa, BradyrhizobiumColbertium
MRPFQTLRMLACSALLVAATGPAWAEGTFEIPAGARFNKDKLAKIDEFFRNEVATGKIPGAILLIQQHGKPVYHQAFGVQDVVSKAPITDHTIFRLFSMTKAITSVVAVQMLDEGKFSLDDPIAKYIPSFANVKVGVEKQASDGTKTLELVPPERAPTVLDLMRHTSGITYGFYGDSLVRKAYRAADIYAGDFDLAEFAERIAKLPLHNQPGALWQYGHSTDVLARIMEIAAGKSLIEIEKDKLFEPLGMKDTGFLVTDPDKRKLLAEPMPNDSNFRVGRENDPTKPKKMMYASGGMVSTMADYARFAQMLLNGGTYEGKTILSPKAFKLLTTDYVGPDSGVERDFFYFPGDGFGFGLGLAVRTDPGNAKPPPPGNLGELKWDGASGCYFVIDRKQDMFFILLQQTPSERQRIQKTVKQLIYEAMEN

SEQ ID NO: 9333 - protein, 76 aa, BradyrhizobiumColbertium
MVRSEFSRPLDRHKGHRIAGSVCRRRGRSAADRRTLLAQRGPPTAGVPRDGHGEIAFKRDCRPRRVAERPASRITY

SEQ ID NO: 9334 - protein, 147 aa, BradyrhizobiumColbertium
MPSTVRLHRVFATSPEKVYRAFLEADAMAKWLPPNGFTCSVHHFEPKVGGTFKMSFRNFTTGNSHSFGGEYVELVPGERIRYTDKFDDPNLPGLIEVTVVLKKVSVGTEIDITQTGIPDVIPPEACYLGWQESLRNLAKLVEPEINQ

SEQ ID NO: 9335 - protein, 229 aa, BradyrhizobiumColbertium
MALLGKAAVAMWWSVRAEQRGEFGDWHSHEHFPERMSIPGFRRGSRWSSTTDAEGFFVLYELEQYEVLTSKGYLDRLNAPTPWSRKMMPHHLGMVRSQCRIVASFGGGIADSLATIRLSPRAGLAAELQAHLIDTLVALPSKPGLTGAHLLLTDTPRTSAPTTEQQIRGNDDAADWIVLLSGYDADAIEDVIAGGLSPPSLHTAGACDNSTIGHYRLAFTMTSQDAATI

SEQ ID NO: 9336 - protein, 44 aa, BradyrhizobiumColbertium
MLISMFFRRLSHLIAFPCGYPSDARFRQTPQAEDRVRGNSFNEH

SEQ ID NO: 9337 - protein, 68 aa, BradyrhizobiumColbertium
MEAEATIPLPGDPAGGKGAWRDNVFVERLWRSVKYEEVYLRSYETVGDARSSIGRCFDFYNGQRPHES

SEQ ID NO: 9338 - protein, 386 aa, BradyrhizobiumColbertium
MEIDRRAYLGGMGAVLGAGLLPDLAAAQTKSLPDLPPTMIWSVYDVGASGYVEASAIADALGKTYGTRVRLQPSGTSIGRIQPVKDRRVTHGWLATEVFFAAEGLYEYAAPNWGPQDLRCLLGRVNSLSICVTKTSGIKTLKDLKGKRYAIAKANTSVNAKIEPILDAGGISYSDMQVVEFPSYGASLKALIEGRADAAGAALTTVSLKELEASSYGIDWIELPATDKDLWSKIQRAIPLAAPYTETFGSGVSKENPRAVMGYRYPMITVYGDAKVDEVYAVTKAIVDTYDTYKAASPIMERWEVKNSGAYPMDAPFHEGAIKLLKEKNVWTPDHQKWQDGIVKRHALLRQAWADMMAKEPAAREADAAKLRELWMPRRAEVLKSL

SEQ ID NO: 9339 - protein, 649 aa, BradyrhizobiumColbertium
MTTEQAEVATPIVEDPEARSARLEGRAFWATFVLTLLGLALSVNQVFNLGIGGFRPISTAYYYLIIGIFGAIGFLAFPARKPWHGPVPWYDWICGAALLGLTIWIASRAQYVIDAGWNTTGPLEAQIVAGVVTALVLEGLRRTGETILFVFCLIFASFPLYAGHMPGFLWGVQLDLGQTLSEHVYGLESLIGIPMQVVADTLIGFLVFGVVLASTGGGAFFMDFASALLGTARGGPAKVAIISSGFFGMLSGSPTSNVLTTGTLTIPTMKRCGYPAAYAGAVEACASTGGALMPPVMGAAAFIMANFLNVPYADVVVAAFLPAVLYFFALFMQTDFYAARNGLRGTGADDVPPLTRTLIGGWYYIGALVALTLLLLVWRLEGEAPFWVSLFLVLIAIFRAPALGFTPRYFAGLVVDVGQTVAQIVGLIAGIGLIIGALSITGVANSFSRELVQYAGNNIVLLLATGALTSFILGMGMTASACYIFLAIVLAPALITTGLDPMAVHLYVFYWGLVSFITPPVALAAIAAASIAKADAIQVGLRAIRIGCLLFLLPVLFVLQPALILKGELMEILQVATTAVAAVVLLAASFEGYFYWAGRLPVWSRIIVGAGGLLMLVPEGMTDLIGFAICVGALVLTRLVSGWRTVPGT

SEQ ID NO: 9340 - protein, 425 aa, BradyrhizobiumColbertium
MTKALEGVRILDFTHVQSGPTCTQLLAWFGADVIKVERPGVGDITRGQLQDIPNVDSLYFTMLNHNKRSITLDTKNPKGKEVLTELIKKCDVLVENFGPGVLDRMGFPWEKIQEINPKMIVASIKGFGPGPYEDCKVYENVAQCTGGAASTTGFRDGVPLVTGAQIGDSGTGLHLALGIVTALFQRTHTGKGQRVTAAMQDGVLNLCRVKLRDQQRLAHGPLKEYSQFGEGVPFGDAVPRAGNDSGGGQPGRILKCKGWETDPNAYIYFITQAPVWEKICDVIGEPSWKTDPNYAKPAARLPRLNEIFARIEQWTMTKTKFEAMEILNKDDIPCGPILSMKEIAEDQSLRATGTVVEVDHPTRGKYISVGNPIKLSDSPSDVQRSPLLGEHTDEILRSVLGFSDHQVAEIHKSGALDPPQKQAAE

SEQ ID NO: 9341 - protein, 577 aa, BradyrhizobiumColbertium
MLNTATKSEAPGTEQELTDGFHLVIDALKLNGINTIYNVPGIPITDLGRMAQAAGIRVISFRHEQNAGYAAGIAGYLTKKPGVCLTVSAPGFLNGLTALAHATTNCYPMILVSGSSEREIVDLQQGDYEEMDQLAIAKPLCKAAYRVLHAQDIGIGFARAIRAAVSGRPGGVYLDLPAKLFGQVMNAEAGQKSLVKVIDAAPAQIPSPASVKRALDVLRSAKRPLIILGKGAAYAQADEEIKSFVEKSGVPFLPMSMAKGLLPDTHPQCAGAARSTVLKDSDVVMLIGARLNWLLSHGKGKSWGEAPKKFIQVDIEPKEMDSNVEIVAPVVGDIGSVVSAFNQALASGWTAPPAEWTKAISAKREENVAKMAPKLMNNKSPMDYHGALGVLKNVIKEYPEAILVNEGANTLDLARGVIDMYRPRKRLDVGTWGVMGIGMGQAIAAALETGHPVLAVEGDSAFGFSGMEIETICRYNLPICVVIFNNDGIYRGTDVNSANADPATTVFVKGARYDKMMEAFGGVGVNATSPDELKRAVNEAMKSGKPTLINAVIDPAAGSESGRIGNLNPQSVLQKKK

SEQ ID NO: 9342 - protein, 243 aa, BradyrhizobiumColbertium
MSLRKPTKALPNMAEADIAIVRIAPESSFKNKAYDALKEAILKMDIYSTPEPVMLDERALSERLGVSRTPIREAIAMLEQDGFVKTVPRRGIMVVRRTKSEIVDMIRAWAALESMAARLITTTARKKDITALRDFFKDFGKDRLPEDHVEEYSRANIAFHQALISLSESPVLVDLTNDLLLHVRGYRQLTIGRKDRTATSLPEHLGIIEALEARDTELAEKRARDHTLGLAAYVEAHGQELFT

SEQ ID NO: 9343 - protein, 709 aa, BradyrhizobiumColbertium
MSNSKDAVRKVLDQVKADNRTSLTAPEGKLVCDAYGIPVPKEGVAKSAGEAGKMASSMGFPVVMKIVSPDILHKTEAGGVIVGLKTTEEAEKAYETILSNAKKYKSDAKIEGVQVQQMLAGGTEVIVGSITDASFGKLVAFGLGGVLVEVLKDITFRLAPATREDALSMLDGIQAHEILKGVRGGEPVNRNALADVIVKVSQLVTDFPEIVELDLNPVFATPKDATAADVRIVVDFAYVPKPKPRPTEEIVAAMNRIMQPKAVAVVGASAEDGKIGNSVMKNLINGGYKGDIYPIHPKAAEILGYKAYKSVKDVPGVIDVAVFAIPAKFVAAALTECGEKKIPGAVLIPSGFAEAGAPELQAEIVEVGKKYDIRLMGPNIYGFYYTPANLCATFCTAYDVKGHAALSSQSGGIGMAIIGFSRSAKMGVSAIVGLGNKSDIDEDDLLAFFEQDPNTNLIAQHCEDLKDGRAFAEAAKRVSKKKPVVVLKAGRTSAGAKAASSHTGALAGNDRIYEDVFKQSGVIRARSLRQLLEFARGVPVLPTPKGENVLIITGAGGSGVLLSDSCVDNGLSLMSMPPDLDAAFRKFIPPFGAAGNPVDITGGEPPITYVNTVKLGLSDERIHALILGYWHTIVTPPMVFARNMVEVKKEMEAKGFVKPMVASLAGDVEVEEAAEYLYQNGIPAYAYSTELPVEVLGAKYRWARGAGLL

SEQ ID NO: 9344 - protein, 322 aa, BradyrhizobiumColbertium
MFRFPTRLLGAAVALGLAAANPAFAQQLELKLMAPAAPGGGWDQTARSMQQALVASGVARSVQVTNVPGAGGSVGIAQFVNGAKGDGNQMMVNGFVMVGALAMNKSPVTLEQVTPIARLTEEIQVIVVPANSPIKNAQDLAAAVKADIAKVTFAGGSAGGVDHVMAALFAGAVGADPKKINYIPFSGGGESLAAILGGKVTAGISGLSEYEGQIKSGKLRALGVTSEKRIAGSDIPTFREQGVDLVIANWRSVVAPPGITPEQRKTLSDAVEKMVKSDAWKEILKQKGWEDAYLGGDAFADFLKKEAVRVTDVLKSVGLVKS

SEQ ID NO: 9345 - protein, 161 aa, BradyrhizobiumColbertium
MTSGDSTQSPRRVDPAGLVIAALLAGLAAVLVWDARGLQSVAMYGMGPEAMPIVVATGLALLAIGNFINALRGNLPARESADPVPVLLILVGLALLIAVIGFGGGFILATSALFVTTSAAFGRRAILVDSIIALVMSTLIYLVFDRLLTLSLPAGPLERLL

SEQ ID NO: 9346 - protein, 500 aa, BradyrhizobiumColbertium
MIDTFAALAHGMAVAIQPMNLLYALIGVFLGTAVGVLPGIGPALTVALLLPVTYKLDPGGSLIMFAGIYYGGMYGGSTTAILINTPGESASMATALEGNKMAKAGRGGPALATSAIGSFVAGTIATIGLAFLAPWLVDVAVRFGPEDYFALMCVAFVTVSATFGDSPVRGLTSLFIGLTLGLVGIDKLTGQARLAFGVPELLDGVEVTTLAVGLFAVGEALYVASRRRHTEEKLEPVRGSLWMTKEDWKRSWKPWLRGTMFGFPIGALPAGGAEIPTFLSYSTEKRLTKHPEEFGKGAIEGVAGPEAANNASAAGTLVPLLTLGLPTSATAAMMLAGFQQYGLNPGPLLFAERPDLVWGLIASLFIANCMLLVLNLPLVGLWVRLLAVPQPWLYAGILVFATMGTIAAKPSAIELSMLAGFGVLGFLMRRFDFPIAPVVVGLILGPIAESQLRRALAISLGDPMTLAQSPISATLLAVALIALLAPFVLKGLGRFKANED

SEQ ID NO: 9347 - protein, 127 aa, BradyrhizobiumColbertium
MKTRLAISLAAASLLASSSAFAQSTTAQGAADGARAGGDIGGPIGAMVGGTVGAAVGAGLEIPNAILGGIPRSDSVVVQERVVVGEPLPSTVVLRPVPNYTEYRYAVVNDRRVIVEPRTRRVVKIID

SEQ ID NO: 9348 - protein, 125 aa, BradyrhizobiumColbertium
MSILVRSTAWLLAAAVTFATLGPPGLRPHSNLGQDGEHALAFILVGLAFGLAYRRRRLLIAAASVILIGLLELMQFWAPGRHARLEDFLVDASTACLGFALAAAVDWAMTRLRPNSTLTSEGPAE

SEQ ID NO: 9349 - protein, 198 aa, BradyrhizobiumColbertium
MSARNTKVMNRFDVTSRLITKLKHEEAVIGGIGNTNFDLWAAGHRPQNFYMLGSMGLAFPIALGVALAQPERRVFALEGDGSLLMQLGALSTIATLKPENLTMIVMDNGIYQITGAQPTPAANVADIVAIAIGSGLANSAWAADEEDFERLVEEALAAREPRLIAVRIDDKPGVGTTRRDPVQIRELFMHGLGVREPL

SEQ ID NO: 9350 - protein, 188 aa, BradyrhizobiumColbertium
MAVAEQQTSRQPTQESGGRSWHTIVLQTLKRNEISLIPYVPDRVLTPLIKNLHADPFFTTFATAREEEAVGIVSGAWMGGRRGAVLMQTSGFATLANVLASLAVPYQIPLIMFVSERGTLGEFNYGQSLVCRTMRPVLDSLALEHHTITRLDELEFIADRSIKQAVTTQAPVALILNPLLTGGKVFDK

SEQ ID NO: 9351 - protein, 349 aa, BradyrhizobiumColbertium
MSVNNKRVFYVKYLANPIYIDILKARPDVRLDRIENESPEDFYAPILSAAHVYQIGAARDELAPHFHVDAAFLKRTPNLLLVSSNGAGFDPVDVEACTDAGVVVVNQSGGNAHSVAEHALAMMLTLSKRIIQSDRRLRRERDVNRNELVGNEVEHKTVGIIGLGNVGRRIAALCKGLLGMKVLAYDPYLSAEVMAERGGEKVELDELLRRSDFVSISCPLNKGSRNMISVREFALMQPHAYFITTARGFIHDEDALLQALRDKRIAGAGLDVWSKEPPPPDHPLLQFDNVLASPHTAGVTIEARQNMGRIAAEQVLDVLDGKRPPRIINPEVWPRYAERFKQAFGVTPG

SEQ ID NO: 9352 - protein, 70 aa, BradyrhizobiumColbertium
MSLYVVRFMKDVLGEYGRQSEICQGTLEIEAADENEARERAKAKFCKDQALHHWSLHADRIHVKPADFPS

SEQ ID NO: 9353 - protein, 191 aa, BradyrhizobiumColbertium
MNETAVRASDEPVLVRSSRESDVEAMLAIYRHHVRAGVPRDVEGTGAPEPDDLRDRRKNLKQTRLPHLVATYRGDIVGYAYAVLFRKRPAYRYTAKHSIYVHHAHLGRGVGRLLLQELIDCCAAAGFRQMIGYIDADNAASLALHQKFGFTRAGLLCGVAYRHGRWSDTVMVQRSLGAGTTTPPPSATPGR

SEQ ID NO: 9354 - protein, 794 aa, BradyrhizobiumColbertium
MSSPYSGPDMDYFKRFNFLFAAPVFDSDDLEGIRFNQIIEEIQRSGFEVVRARKLEDAEMAVQTDAAIGCMVVDWGKKGLEGKTSALINLMRRRGLDFPIILLIRRKRFEDLPVEVLDFIDGYVFLSEETPPFIAKNLISRLKQYAETLKTPFFGALVDYAEEGNQLWTCPGHNGGVFYNRSPIGRVFVEHLGESVFRDDLDNSVLDLGDLLTHEGPALKAQKEAAAIFGAEKTYFVLNGTSTSNKVALGALVTDGDLVLFDRNNHKAAHHGALMINGGIPVYVPAVRNAWGLIGPMRWDMLDEKALREAIRSHPLVNDRDAWRKERPFRVAVVEQCTYDGSIHSAEMIIKRIGHLCDYILFDEAWAGFMKFHPLYAGRFAMGLANLPPEAPGIIATQSTHKQLASFSQASQIHIKDRHIRGQKRRVEHRRFNESFMQHASTSPFYPLFASLDVGAQMMKGRSGEVLWDDTIRLGIELRKKIRAMRREFEENEQKTDRRWFFEPFVPDRVAIPDVSRPGAAHNVAWETLSTDELASNPARWQLSPVSNWHGFPDLEEGFAMTDPNKLTLLTPGFDRASGAYAEHGIPAPVVAQYLRENRIVPEKNDLNSLLFLLTPGVEASKAGTLISGLVAFKRLHDDNALLAEAIPEFHQRRQARYGGVRLRDLCGDMHRFFRAADVSALQARQFMPEHMPEIAMSPRDAARHLFRNDVDYLPIEALAGRIATTPFVVYPPGIATIVPGERLTERAKPMIDYLKMFETCFNTFPGFDVEIQGVYKEVDAKGRIGLYTYVVAE

SEQ ID NO: 9355 - protein, 733 aa, BradyrhizobiumColbertium
MNAYVGTPTSRIDGRAKVTGAAKYAGEFSADGLVHGFVVEATIPRGRIVRLDATEALKVAGVLEVLTHAHRPPLADKDEAWKDEVAPEGLPFRPLYDDMIKFNGQPIALVVAEEWETAKFAATLVRIDYEQDGFATDLEAERGRASEMDKPHKPRGDAKAALAAAALRHEADYLVPTEHHNPMELYATTTVWEGGGKLTVYDKTQGVQNVQKFLCAVFDKKPEEIRVLSPYVGGAFGSGLRPQYQVVLATLAALALKRSVRVVLTRQQMYGLGYRPMTIEHVALGARPDGTLDAISHEAIAVTSRYEDFSRNDTGWAEQLYKSSNSHFSHKLVDLDVSTPCDMRAPGAASGVCALECAMDELAVALKLDPIELRLKCYSDRDQSEGLPYTSKQLRQCYARGGEAFGWARRNPAPRSMREGKELVGWGMATGVWEALQMPVAVRIVLTANGHAEVSCAASDIGTGTYTIVAQVAADALGLPIENISVRLADSTLPQAPVEGGSWMAASSAHAVLGAAEEIRRELVHLAKAIPGSPLADLDAAAVTLVDGMIAGNGKSGAAVSIPDAMRHSKLERIEKEKLNQFAEDKSHARNTHSAVFAEVKIDEELGVIRVTRVVSAVAAGRILNTKTGRSQIMGGVVWGIGMALHEETVMDHRFGRIMNANIAEYHIPVNADIRDIDVIFVDEPDDRINRLGIKGLGEIGIVGVPAAIANAVYHATGKRIRRFPITLDKLLD

SEQ ID NO: 9356 - protein, 338 aa, BradyrhizobiumColbertium
MNNFQYSRAGDVADAIRLLAADPGAKLIAGGTNLIDLMKENVERPSRLIDISRLPLRDIEETADGGLRIGALVPNSDLAYHPLINQRYPLLASAILAGASAQLRNMASVGGNLMQRTRCPYFYDTATPCNKRRPGTGCSALDGLNRNHAILGTSKSCIATNPSDMSVALAALGALVHIAGPMGARSVALTDFHRLPDDKPNLDTILGRSEIITAIELPPHSFPRNYSYLKIRDRLSYAFALVSVAAAIELEGNAISEARLALGGVAHKPWRSMEAEAALRGQAATPDHFGHAADLLLQGATPRAHNGFKIALARRAVVRALIQAASATPQSQAHKKIA

SEQ ID NO: 9357 - protein, 163 aa, BradyrhizobiumColbertium
MADITDQIPERIPINLVVNGARRTLEVMPWTTLLDALRDRLDLTGTKKGCDHGQCGACTVLVEGRRVNSCLTLAVMKDGAEVTTIEGLVKDGALHPLQQAFIDHDAFQCGYCTPGQICSAAGLLAEGRARDADEIRELMSGNLCRCGAYPNIVAAIEQAMSRS

SEQ ID NO: 9358 - protein, 159 aa, BradyrhizobiumColbertium
MALDRKDLAILAELTTNARASHTELANKIGLSSTALARRQKTLEDDGYIQGYQAALDLAQFGLTTTVLVRIALESQSDDALKAFEAEVVKCPSVVRCFLMSGTDDYILIVLARDIQDFERIHRTELSRLPRVARVQSSFALREIVNRAVPTVVFGETKR

SEQ ID NO: 9359 - protein, 384 aa, BradyrhizobiumColbertium
MKSGIKALAREIKMRVGVPKEIKVQEYRVGLTPGAVREYVAAGHQVTVETGAGNGIGAPDEVYRRAGASIAETAREIFAKSEMIVKVKEPQRSEWVQLRESQILFTYLHLAPDPEQAKGLVDSGCTAIAYETVTDASGHLPLLAPMSEVAGRLAIEAAGAALRRSAGGRGLLLGGVPGVQPARIVVLGGGVVGTQAARMAAGLGAEVTVIDRSIPRLRELDDLFAGRMRTRFSTIESVEDEVFAADVVIGAVLVPGASAPKLVTRAMLKSMRPGAVLVDVAIDQGGCFETSHPTTHADPTYEVDGVVHYCVANMPGAVPVTSSQALNNATLPFGLMLANKGFAAVLENPHLRNGLNVHRGRITNKAVAESLGLEFAPVESGLAA

SEQ ID NO: 9360 - protein, 645 aa, BradyrhizobiumColbertium
MNIVSQHKPLDLASAIAEGDIRCLLMVLVHMTGDEKWLAPLYLPKRDIRLIPDPEAGVPREIQDEIRAAVVKLFADGTPNPVINDPGEELLLRMMRACLGENVAPEYAPLMREEMGFVPREARWTTRPSDHKLADQHVLIVGAGVCAIALGVALGHLGIPYTIVEKNEELGGTWWINRYPGCGVDTPNHSYSYSFGSRNAWTRYFCQREELLGYLLKVADEYGIRNHLRVNTELTSSRWDEGKRRWISTLSTKDGEEAFESTALVSAIGQLNDPSRAHFKGEESFRGTILHSALWTDDIRLDGKHIAVIGTGATSMQLVPSIAGRAASVTVYQRSAQWARPVKGYADPISEGARWLLAHLPFYAQWYRFNMFWRYGDGLLPFLRKDPAWPHPERAVNKGNDRHRQELTDFIHSELQGRPDLIEKCVPTYPPYGKRILLDNNWFKTLRRDNVELVTDAIDHFDENGIVTADGKQRGADIIVVATGFKVTEMAARLNVTGRHGKDLREAWANDNPTAFLGLTVPGFPNFFCMLGPNSGPAHGGSVIFQSECQSRYISACLVDMIERDIAAIDVRQDVLDDYVQKVDAEHEAMIWTHPGMSTYYRNSSGRVFSAMPWRFVDYWRMTHDPDLGQYRLTKRDSSAGADRL

SEQ ID NO: 9361 - protein, 215 aa, BradyrhizobiumColbertium
MTQSSATAKVTKLKRVERNAWTKQRIFEAATKVVGKHGYAEASVARITEEAGVAQGTFYNHFENRQELLDQLLPKIGLDMVEFIRARTGTADAARQEIARFCAFFDFIREVPEFLRILNEAEFFAPIGYQKHLDNIATAYVRILRRARLAGAIEDYSDEEFEAIVHMLMGSRGYLSRRYSYSENGVTAVPDHVISAYRKLMTRGLFTALEDQDTP

SEQ ID NO: 9362 - protein, 102 aa, BradyrhizobiumColbertium
MIISGGENIASSEVERVIHELPEVREVAVIGLRDARWGERPVAVVVLADGASLELAAFTEHCRARLASFKVPKQIVIRDSLPRNPSGKILKRVLRAELEAAE

SEQ ID NO: 9363 - protein, 419 aa, BradyrhizobiumColbertium
MTKTRRPGISRRSTLALMGAGAMSVAAPWVARAQAKTIKIGMPTILSGRVAQLGTSSRNAVMLEVEKVNGAGGLAGRQIEMVIRDSKGQPQEAARVARELVNTDGCELLLDGEASSGSFAVHEVARDLGVLCIHTCSEASSLTADPKQRIPNAFRCVRQGIHDSIVGGSYAASIAKAKGLKKWATCSPDYAYGRDTTGEFTLYLKRFAPDIEIISESWPKLFQADYTEVVTKILQAKPQALYSCLWGGDLTSYIDQANIYAMFSQMEVFAVNMADYTALTVVKNLPKGIHSGNRYIKTFPTTPENAAWGDAYKAKYNEYPTNWSWQNATAVMFLAEAAKKANSADGKKIAEVLKGLTIKCPFGADGTVTMRGDDHTLVGYAIGWGTTIPQEPYVPEVKAGDWKTIFELEAEWKKSKGYT

SEQ ID NO: 9364 - protein, 300 aa, BradyrhizobiumColbertium
MDLDALAGCLSSSACLVTQTTSGLIIGMLLFLVAVGLTLIFGVLKVVNFSHGAFYMFGAYFAMTTYQLTESFALAMLAGAAGTAILGLVFERVFMSRVYGADVLMQLLVCYAFVLIFDDVVRIIWGPEFKAMGMPAAFQVMPLFIAGGVVPPYYLLLIGVALVAAIVLGLGLSRSRIGKVIRAAAHNPGMVSALGINTGLIYGGVFALGGMLAGLAGALAAPVRSLTPGMGFSVLIESFIVTVIGGMGSILGALIGALLLGLIRSFGSQGFPLFVEGLMYLFMVIVLVSKPTGLFGKEAA

SEQ ID NO: 9365 - protein, 339 aa, BradyrhizobiumColbertium
MTELEAGRAQTLVPARSGAALQRYRDVLIALIAFAVLASLPLFTGSKALLDFVIRCSAYGLFATSLNLLVGYTGLTSFGHGMFFGLGAYSFGLIMQKLGVPIPVAFVATLAITAVVAAIIGAICVRLKEIYFAFVTLAFQMLIHSTILSWASFTGGDQGLRGGIPRPVFLGIDLSDHVHLYVTSCALLILGLLAMHQIAQSPFGYTLRMIRDNAARASFLGIDVWRAKLTVFVLAALFASMGGMVMALFVSGAYPEFAYWTISGEGIFINMLGGVSTFLGPMVGTVLLLLLNDTVTRFTEYHGIVLGVVILFFALGLRKGLLDFVADWLAQRRDAGEGR

SEQ ID NO: 9366 - protein, 251 aa, BradyrhizobiumColbertium
MLEIRDLAKSFGGVKATNDVSLAFPDGSLTAVIGPNGAGKSTFFNLITGALKPDSGQVLLDGVDLAGRSPPEIVRYGIGRAFQVASIFKSLTVQETMLAAVSADQRTSAVLHKRFPLPETRDRAEHVMELLGLAGKRHRTAATLSHGDQKLLDIALALVLDPKVLLLDEPTAGMGPEERWRMIDKVRELWETQKITVVFIEHDMDIVFKIAPKIVVLCYGRILATGTPDEIRKNSAVIDAYLGTEHAGAAA

SEQ ID NO: 9367 - protein, 236 aa, BradyrhizobiumColbertium
MSAVIEVADLDVYYGTSQILFGVGLSVRQGETMALLGRNGAGKSTTMKAIMGLAPPRRGRVSLRGTVISGQKPHRIARAGLGFVPEDRQVFPEHTVEDNLVIGRKKGPEGQDEWPIKRIYEVFPLLEPLRHRIAGRLSGGEQQMLAIARTLMGNPALLLLDEPSEGLAPIIVQRIGELLRQLRQLGSTVLIAEQNMHFCLGLASHATIIDKGQIVYAAGIDELKANEAIRRRYLAL

SEQ ID NO: 9368 - protein, 72 aa, BradyrhizobiumColbertium
MERTGFEPFGEQLVSATDSQPKLSASKLLLRTGTTLFWSLVAGIVLARAAFFEPGVYDGFSRVASLAKSLIF

SEQ ID NO: 9369 - protein, 352 aa, BradyrhizobiumColbertium
MSQNQASSPADTKPASAASRIAALIPGILLCVLLAGVSALLEHAELGMFEHPYVEALVMAILLGMALRSFWKPAPRWQAGIAFSAKQLLEVAVMLLGASISFAAIAASGIALLASIAAVVVITLGVSFGLSRMLGLSTRLSILIACGNSICGNSAIAAVAPIIGANNDEIASSISFTAILGVMMVLGLPLLIPLLQLSATQYGILAGLTVYAVPQVLAATVPAGLVSTQIGTLVKLMRVLMLGPVVVGFSLIASRWQTDAKKTNVGFFRLVPWFILGFLALATLRSLEMVPATVVGPVTKITGFLTVVSMAALGLGVDVRVLANVGGRVTAAVTLSLMLLLGISIALVHWFK

SEQ ID NO: 9370 - protein, 290 aa, BradyrhizobiumColbertium
MSEVLAAKAKGHIEVKNFSLAYETIEGAVQAVTDTQIHVRPGEFVSIVGPSGCGKSTLLNAVAGFLKPTTGIVTVDGERVNGPSAERGMVFQQYSLFPWKTVRENVEFGLKMRGMPRSQRERAARTLLGLAGLEAFEKHYPERLSGGMKQRVGIVRALATGPKVLLLDEPFGALDAQTRVIMQQILTNMWQRLKISVLFVTHDIDEAIFLSDRVYCMTARPGSIKAEIPIPLERPRQQSMMMSSEFLALRRGLMSLIREESLKAMGGEINDLGMQGLNIELHGHSLADVI

SEQ ID NO: 9371 - protein, 278 aa, BradyrhizobiumColbertium
MPAVSPAAAPPSFGTLVLRWYRLNQGRLRATAIGVISLLAFLLVWHLLTTYRVVFFVRFTNVPSPLAVYASFTKAIHDPKFLMHVLLSCRRIFIGFSLAAIVGVPLGLIMGRFKLVHELVFPVAEVLRPIPAIAWVPMAIMLWPTNEQSIVYITFLGSFFPILVNTLHGMSLVDPVLVRAAQCLGARERSIFREVYFPASLPHIFTGLTVGMGVAWVSLIAAEMISGQYGIGYFTWEAYSLVQYADIALGMIAIGVLGLGSSLLIRGAGQLVMPWRST

SEQ ID NO: 9372 - protein, 473 aa, BradyrhizobiumColbertium
MVRRLPTLSIAMSVTSLALIVTQPVSAETITLGIGTQDTTTNTVTAGVVIRQLRLLEKYLPKDGRYANIKFELEWQNFTSGPPVTNAMMANKLQIGMMGDYPLIVNGFTFESNPESKSRLVGIAAYSLSGSGNGLVVHKDSPYYDLADLKGKLVSVPFGSAAHGMVLKAMQDRGYPADFFQLVSQSPEVGSTNLQEKKIDGHADFVPFAELLPFRGFARKIFDGVETNLPTFHGIVVRTDFAEKYPEVVVAYFKALIAANQWLRDNPKLAAEKIQEWTGINKEVVYIFLGPSGNMTTDPTVKPALIDAATTDVKVLQNLGRMKEFDPKKWVDDSYIRKAYAEMKLDYDAQLASTKNYEISGEDAFCKKPIADPRKAGEVWVDDAGIMPFSSATCTLGAYADYKAKGKKINVAYVFDTTRGIKLFADQAFFAVGSGEVAPFLLKKDAEAYAAKISGKVLGFDDAVKASVGGGKT

SEQ ID NO: 9373 - protein, 257 aa, BradyrhizobiumColbertium
MLQAANAVRGTVPGAVRPTGSSSLLLTENQQWIGGPPPLMDKLSPRERELVLKQGRRKVLNRGQTLFSQGGKHDGIWLIESGRIRVFYTSPLGREITLAYWHAGNFVGGPEVFEGTMHQWSGVASSNCSVVHLPGKELRSLAAEIPNLAIGLIEGLTFKGKCYSALAQMLGTRSITQRLAHLLLHLVELYGVEDADGTVIAAAFTHADIAHMVGATRQWVTISLKRMQEKGIVLTKRSQIVICRTDVLEEMRGHAAD

SEQ ID NO: 9374 - protein, 98 aa, BradyrhizobiumColbertium
MVAPTVAGYEASTDLASLLVRTTQDVALSIGAETLRISCKCAHCTRARFDGRFPEAFPGIAITEIGDLGYGLNISFSDGHNRGIYPKPYLLSLAGTAA

SEQ ID NO: 9375 - protein, 257 aa, BradyrhizobiumColbertium
MSAFQKETVLSVRHWTGSLFSFTATRDPGFRFQNGQFAMIGLEIEGKPLMRAYSMASANHEEALEFFSIKVQNGPLTSRLQKIREGDIILVGRKATGTLITGNLIPGKRLLLLSTGTGLAPFASLIKDPDVYENYETIVLAHGCRQVSELAYGEHVVDGLRNHEFFGPLIRDKLVYYPTVTREPFRNRGRITDLIASNQVFDDIGQSGLDIEADRIMLCGSPAMLEELHAMFSARGFVEGNHSQPGHFVIEKAFVER

SEQ ID NO: 9376 - protein, 580 aa, BradyrhizobiumColbertium
MALDEIVDGLSEVSCDVLVIGGGTAGPMAALKAKLKNPKANVVLLEKANVKRSGAISMGMDGLNNAVIPGYATPEQYTKEITIANDGIVDQKAVYKYAQNCYKIIEELDSFGIRFLKNENGDYAVKKVHHIGTYVLPMPNGETVKKALYRQLRRARILISNRYMATRLLKSADGRIAGAVSVNTRTAEMLVIKAKAVILCMGAAGRLGLPTSGYMFGTYENAANSGDGYAMAYHAGAALANLECFQINPLIKDYNGPACAYVAGPFGAYTANNEGSRFIECDYWSGQMMLEFYNELLSGKGPVFLQLKHLHPDTISEIESTLHKVERPTRGLFQQGRGVDYRSESIEMHISEIGFCSGHSASGVFVDDNARTTVPGLYAAGDMASVPHNYMLGAFTNGAVAGVDAMEFADSHDFAEFDATDVAMERDRVMAPTRREDGIPPNQIEYKTRRLVNDYLQPPKVTRKYELGMRRLAEAREDMQERMIARNAHELLRALEVQSIMDCADMAAHASLYREESRWGLYHWRTDFPEKDNENWFCHTLLSKRDGKMTSEKRAVEPYVVPIADDEKDLYDKQRIRASA

SEQ ID NO: 9377 - protein, 66 aa, BradyrhizobiumColbertium
MVVDDAKCIADKGCTVCVDVCPLDVLRISDMTKKAYMAYDECWYCMPCEADCPTGAVTVNIPYLLR

SEQ ID NO: 9378 - protein, 325 aa, BradyrhizobiumColbertium
MSSPFESYDDLEDADERLQAADPAERRVAIIALGHSGDPAAVAHLANMVSDPDAGVRQQVAMALGEFDGPEAAAALVKLLVDPERIVAAAAADSMAEFKDPACAEIILPLVKHAHAFVRMGALRALKELRCKDTLKPALEALQDSDAAVRVQAIGVIGFLKLEESIPALTALINDPDAHVRRAAVSALAFSHMKPAAETITRALKDSDWMVREMAAETLGLNANGSLAADQLIGSLGDEFWQVRLKAIRSLGKMKVERAVRPIGNSVNHEQANLRKEAAAALGEIAHPDGEAFLAVIADDPDPDVRKNARWALQQTAARKARAGA

SEQ ID NO: 9379 - protein, 390 aa, BradyrhizobiumColbertium
MTTLMVKDLLPEDGTKGTLVGRVWLPQVNGPAVVAVRGDGVFDVTAKFPTVSALCEEDNPAKALAAVKGERIGDLEAIVANTPPDGRDSSKPWLLAPVDLQTLKAAGVTFAISMLERVIEERAKGNPASAEAIRKEVTRLIGDDLSKLKPGSDQAMHLKQVLIDQNAWSQYLEVGIGPDAEVFTKAPTMSSVGTGMDAGLHPKSTWNNPEPELVLFVSSRGKIVGGALGNDVNLRDFEGRSALLLSKAKDNNASCSIGPLLRLFDDSFSLDDARKLDISLNVKGTDGFVLDGHSSISKISRDPTDLVEQTIGKVHQYPDGFVLFLGTMFAPVKDRDAPGQGFTHKRDDIVTISAPQLGKLVNRMRTSDECEPWTFGIGALMKNLAQRKLI

SEQ ID NO: 9380 - protein, 258 aa, BradyrhizobiumColbertium
MTSRIVVIPTRRAHSNHAEVARSIGVDIIAGRYAEGTRLPGDAEMIAMFGVSRPVLRESVKTLVAKGLLTTKARVGTVVRERGAWNMFDADVLAWHLDAGIDKRFLNDLAEIRLAVEPRAAMLAAARRSEDDMTELRRSMERMRREASDSAGFADADLALHVAVARASGNLFMRSIGHVIEAALRASFLLSAPVEPKDRDTVLLWHQKIVDAIAAGDADAASEAMVFVIHNGMHRHDGAATETVPAEVLPSGEPGGRS

SEQ ID NO: 9381 - protein, 308 aa, BradyrhizobiumColbertium
MTELRIAIVGFGKIARDQHVDAIAAVSGATLTAVASRNASLPELPHFATIEELLEQGPPIDAISLCTPPQVRRTQAAAALAAGKHLMLEKPPGATLVELDPLIAMAAEAKCTLFATWHSRHAPAVEPARQWLKARRIKSVHISWKEDVRVWHPGQRWIWEPGGLGVFDPGINALSVLTRILPKPVFVTAAELAFPANCQAPIAANLTLADISGLPVTAEFDFRQTGPQSWDIVVETDQGRMTLSSGGARMAVDGEVLAEAPDEEYRGLYRRFVELAASGASDVDLIPLRLVADAFMLGRRTIVEPFVD

SEQ ID NO: 9382 - protein, 358 aa, BradyrhizobiumColbertium
MAASRVTNDVFGTLPDGRKVRRIVLRGAGGFEARIITYGAVLQALIAPDAKGGYDDVVLGHDAFAGYLAERKFLGATVGRYANRIAKGEFCLDGETIQLAVNNGPNALHGGLDGFDRKLWEIADIDEGPRPAITLSHVSPHGEENYPGQLDVRLTYRVTGPAELSLIMEARTDRPTIVNLTNHSFFNLEGATSGTSVLDHSLTVAAGHFLAIDPTAIPLPEPPRPVAGTPFDFREPRPVGERIRESDQQLRSGRGYDHTYCLKRNGELALAARLEAPRSGRIMELLTNQPGLQVYSGNYLDGTISGKGGKLIRQSDAICLEPHIWPDAPNRPDFPSPRLDPGEVYRHHTVYRFSARSP

SEQ ID NO: 9383 - protein, 292 aa, BradyrhizobiumColbertium
MTEQVPTTVLSDHPCHLGEGPTYDASTDTAWWFDIREGLLFEARLGGSIRVHELGRMASALGRIDAERQLIVAEDGLYIRKPVDGAMTLFLPLEADNPATRSNDCRVHQSGTFWIGTMGKNAEPKAGAIYALHRGKISTLFDGISIPNSICFSPDGATGYFTDTPRAVLYAVPLNPATGLPRGEPEVLLRHSGVGGLDGSVCDADGQIWNACWGASRIDAYSPQGERLRSLSVPARQASCPAFVGADLSRLLVTSAWQDMDAAARAADPQAGCTFLLEASARGRAEPDVKLA

SEQ ID NO: 9384 - protein, 177 aa, BradyrhizobiumColbertium
MSVLKPYIDSGKLVVVSGQMGMDKVATLRWDGATAQARMDNLLSAYYGNKKINAVLSPYDGISIGIISSLKGVGYGSADQPMPIISGQDAEVPSIKAMLRGDQYSTIFKDTRDLAKVTADMVDAALGGKEVTVNDTKTYENGVKTVPSYLLKPVVVYKDNWEQVLVDSGYYKKSQFQ

SEQ ID NO: 9385 - protein, 41 aa, BradyrhizobiumColbertium
MFLETFVIRSGVIPGQCGASNPESRGSQVRKSAPWFTPRVP

SEQ ID NO: 9386 - protein, 525 aa, BradyrhizobiumColbertium
MTAMLEMRNVSKSFAGVQALRDVNFSVRAGQIHALVGENGAGKSTLMKVLSGVYPHGSYEGTIVFEGEERRFRDINDSEALGIIIIHQELALIPLMSIAENIFLSHPPSRLGVIDRDEVYRRTRELLAQVGLKESPNTLITDLGVGKQQLVEIAKALSKRVRLLILDEPTASLNEADSAALLERLMAFREQGIGSILISHKLNEVAKVADHITVLRDGRTVDSIDCHVEPIQEDRIIRSMVNRDLAHRFPERSAKIGEAVLEIANWSVYHPIHPERQVIKNVSFNVKRGEVVGLAGLMGAGRTEFAMSLFGGSWGTGIGGSLRLEGREVVLPNVAAAIDAGLAYVTEDRKQLGLILADDVRKNITLASLDQVAPRRVIDDIAELKVASDYRNRMRIRCSDVYQETGQLSGGNQQKVVLSKWLMTDPKVLILDEPTRGIDVGAKYEIYCIINELAEAGRGVVVISSEMPELLGICDRICVMNDGAFVGEFRGAEATQEKIMRAIMRNERSTGNAAPAAAEMGGSQP

SEQ ID NO: 9387 - protein, 396 aa, BradyrhizobiumColbertium
MTDKTVSLPEERRHGSFIKNNLRNYGMLMSLIAIMLFFQVVTGGTLLQPLNLTNLVLQNSYIVIMALGMLLVIVTGHIDLSVGSVAGFIGAVAAVLMVTYKVDYTLAFIACLLVGAAIGAAQGYWVAYFKIPSFIVTLAGMLVFKGLALAVLQGQSLGPFPPTFQKLSSGFIPELLPEAGTLHPTSMLIGTVLALGLVYAGAKGRSREQSHGIEVEPYAFFLGKSILLACAVLYFTYLIASHRGLPNVLVIMTALIALYGFVTRRTVIGRQIYAVGGNAKAASLSGIKTERLTFLTFVNMGVLAALAGLVFAARLNTATPKAGLGFELDVIAACFIGGASAYGGVGRVGGAVVGAMIMGVMNNGMSILGIGIDYQQVIKGLVLLGAVCIDVYNQRR

SEQ ID NO: 9388 - protein, 51 aa, BradyrhizobiumColbertium
MSDAQIGLMTATPIIIAFAIALRRMGVLSTVATVSAVSLSVAIAAVLFTTQ

SEQ ID NO: 9389 - protein, 194 aa, BradyrhizobiumColbertium
MQMSATDCEQQETGWGILGDLPGDPMIWVLIFSELAAFGLFLGAFVVARALHPAVFAAGQATLDTHLAGINTVVLVTSGWAAARGTAAARARRRPAARGWMFVAMALGALFIAIKLFEYSGEIALGNGLETSPFFTLYFLLTGFHLLHVGLGIVILAVVSRSAGAAGVETGTAFWHMVDLLWIVMFPIIYLVHQ

SEQ ID NO: 9390 - protein, 87 aa, BradyrhizobiumColbertium
MIPDRLDIAWIALIGFALATILLSSLAARPLLGNALLLTLAALKGRRVVLDFLDLRAAPALWRGLVSAWVVIVVLFAWLASAVVALI

SEQ ID NO: 9391 - protein, 150 aa, BradyrhizobiumColbertium
MAERLTKSAARNVFYGGSAFFFAIFIGLTAHSHYYMTTTSTDAATLTSSVARGKHVWEKNSCINCHTLLGEGAYFAPEVGNVWDRWGGNEDPAAARETLKAWMQSQPSGAPGRRQMPQFNLTDQELNDLADFLQWTSTIKRQEWPPNKAG

SEQ ID NO: 9392 - protein, 448 aa, BradyrhizobiumColbertium
MKYQTQKVAMLYFYGALTLFLAQVLFGLVAGTIYVLPNTLSTLLPFNVVRMIHTNALIVWSLIGFMGATYFLLPEETETELYSPLLAKVQFWMFFGAAGVAVVGYLFHYHEGREFLEQPFIIKVGIVVVCLMFLFNVTMTALKGRKTTVTNILLFGLWGVAIFFLFAFYNPINLAVDKMYWWYVVHLWVEGVWELIMASVLAYLMIKLNGIDREVVEKWLYVIIGLALFSGILGTGHHFYWIGAPGYWQWIGSLFSTLEVAPFFTMVIFTVQMTWKAGRKHPNRAALLWSVGCSVMAFLGAGVWGFLHTLSSVNYYTHGTQVTAAHGHLAFFGAYVMLNLAVMAYAIPQIKGRAPYNQWLSMASFWIMCTAMMVMTFALTFAGVVQVHLQRVLGQGYMDVQDQLAMFYWVRLGSGVFVAISALMFVWAVLVPGRVKQPVITGALQPAE

SEQ ID NO: 9393 - protein, 270 aa, BradyrhizobiumColbertium
MNAALLAVAASEPELPAYVATGNECALFEHAWRNQLPVLLKGPTGCGKTRFVAHMAARLGLPLHTVACHDDLTAADLTGRYLLRGGDTVWTDGPLTRAVRGGGICYLDEVVEARKDVTVVLHPLTDDRRILPLERTGEELVAPNSFMLVVSYNPGYQTLLKALKPSTRQRFVAIEFGFLPADQEIAVVSSESGLAPERVRPLVGLAGRLRALKGHDLEEGVSTRLVVYCATLIAAGTPIADAVLAGMIEPLTDDADVKAALLDVARAMIG

SEQ ID NO: 9394 - protein, 639 aa, BradyrhizobiumColbertium
MLDFLELEETVGRAWHRMVGGTGSYPVHDDHAVALAGMKSRLAVMFRALGGETGVQIASAGARRAGHRLGWRQRIGLGDERLEQPGRDAATIFLPDRIALFPDRALNAALYRWLAAWFAVAPIETIMETDPLRRDLLVLRRASATTVFVLTQFPGLAADYARLAAATAEARPRRPLPRTEQDIELVVLALLGASKGPAGKLWPAMMGMEPLPDKAPPGYRSILPCPLWGDCWTRELSPTHAGEDECADGAEPAGQDDRKRFATREREDNANRRDPFVLNRFEKILAMAEMVNVDRPADDSEDEDAQKAADDLEEITLSRRTGKPASRFKFDLDLPPEALDASPLSADFTYPEWDYRSGSYLPDHCRVLAGAASETGESWVPDDSMRRHVRQVRRRFEMLRPRHELMRAQADGHDLDLDALVRARCDLRAGSGGSGLDRIHVAMRPQGHDLAVTLLVDVSLSTDAWVDGYRVLDVEKEALLVLAHGLSACGDHHSILTFTSRRRSWVRVVTVKAFGEPMGGTVERRIGALKPGYYTRIGAAAWRTAAELAHQPQRKRLLLVLTDGKPNDVDHYEGRFALEDTRKSVQEARRLGIAVFGVTIDAAAQSYFPTLFGRSGYAIVGNIKRLPAALPAIYRQVAH

SEQ ID NO: 9395 - protein, 311 aa, BradyrhizobiumColbertium
MLIACGDALIDFLPTRTPDGCEAALPAVGGSCLNVAIGLARLGAPTGFVGGISTDLFGRMIADHAAASNVDLGLVTRSDDQTTLAFVRTVAGDSQYAFYDAGTATRNWTYRRGSIAFSKVEAVHVGSTTLVNDQGAAETTALIEDARASSTIAFDPNCRPNLVKDEPAYRARMSEFAARADLIKMSDADFAYLFGEESYELRANVLLGQGASLVVITRGETGAVAWHAKVGQIEVSAPKVEVADTIGAGDSFQAALLFALYKQGHLTRLRMKDIGADELHRALSFAAQCAGLTCTRAGADPPWLHELGWTL

SEQ ID NO: 9396 - protein, 125 aa, BradyrhizobiumColbertium
MGDRCAARLLISVLGLAVIGAGEAAAAGPDNFSGDARRGADLVKTYRCGGCHDIPGVAGANGNVGPPLHRIGTRTYIAGYIQNSPDNMAAWIEDPQKALPGNAMPKMGIPQKDARDIAAFLYTLK

SEQ ID NO: 9397 - protein, 211 aa, BradyrhizobiumColbertium
MSAQALRASAISLLLAVALHGPALAQQTLPQSQEAQMPTLAPRPNFGGSVGNGSPGVFMQVPVSHLHPGARPDPPQIKNPMQGDPNAEQRGMTYYINFNCVGCHAPNGGGGMGPALSNNTFIYGSQPENIFLSIYQGRPNGMPAWGGVLPDSVIWDLVTYIGRISNEPNRQWGRTFSANPLSPEVEQVPTEQVSTTDPWSATKAFNFGKKP

SEQ ID NO: 9398 - protein, 277 aa, BradyrhizobiumColbertium
MRPRNSAIALAFLLALTATPAAASDGDLRVCADPNNLPFSNSAGAGFENRLAAMIAEHLGQKVAYTWWAQRRGFIRNTLKAGRCDVVMGVPAGYDLVETTRPYYRSTYVFVTRQDRQLDLSSLLDPRLHDLAIGVHLIGDDGSNPPPAQALGEQGIVDNVHGYSIYGDYREANPPARLIEAVESGKIDVAAAWGPMGGYFAKSSPVPLTVAPIQDYEGFAPQQFQFAIAMGVRKGDHALRDRLNAFIDAHRSEIASLLRSFGVPLVEQPVTASGGHK

SEQ ID NO: 9399 - protein, 611 aa, BradyrhizobiumColbertium
MLVRVLARLLSVPCALVALLSSALAQSDLASRMKDPSQWPMAARDYANTRYSELDQINTTNVARLQLAWTFSLGADRGQEAAPLVVDGTMYVVGPYAGPYPNRVFALDATTGELKWSYAPKPEPAAAGVACCDVVNRGLAFDDGKVFLNTLDNHTVAIDAKTGKELWHTKLGEINKGETITMAPVVVKGKVLVGNSGGELGVRGWITALDENTGAIVWRAYSTGPDKDVLIGDDFKPFYEHLKGADLGVKTWPADRWQVGGGTVWGWISYDPDLNLIYYGTANPSPWNANQRSGDNLWSASIFARDPDTGRAKWGYQFIPHDLFDHDEVNENVLVDLELNGQPRKVLIHPGRNGYMYVMDRATGEVISADAYEFVNVYNGVDLKTGKIIPNEEKTPLVGKTVENICPAAPGAKDWQPSAWSPRTKLLYVPHQHLCMNFKASQVGYIAGTPYIGADVDMYAGPGGHRGEFMAWDPVARKKVWEIKEKLPVWSGALVTAGDVAFYGTMDRLFKAVDAKDGRVLWQFRAGSGFVGQPVSYRGSDGQQYIAILSGVGGWPGVVANAEVDQRVRNGALGFTGATQDLPFYTAGGSELLVFRLGGATGEDPSRAPAK

SEQ ID NO: 9400 - protein, 277 aa, BradyrhizobiumColbertium
MNVRLLTEISKGSHMGQRCVTGTAAVLAAALSMPVAVKAQDQPRPALSCPVDHDQLVDILKKSVKPGGGPSNGGLDNNEWAAVVNRQGIVCAIAYSGSKVDDQWPGSRALAAEKANTANAFSLKDKAMATANLYAGAQPGGILFGATLSNPPSPEVLYGGAPEEFGTAHDPMVGKPVGGVIVFGGGLALYDGNGIAGALGVSGDSSCADHNVAWRVRHLLGLDRVPAGVSPNMKDAIIYDIGPDGKSASGFGHPKCNGKEDQIAVDLGAGVSGNVVR

SEQ ID NO: 9401 - protein, 307 aa, BradyrhizobiumColbertium
MPALRLAALLLALLAQPASAHGLSDVDSGSLWSFDPWLMAPLYIVGIGFYVGTQRLWAHAGAGRGASFFQVGAFWSGWLVAALAVTSPLHWLGERLFTAHMAEHELLMVVAAPLMAYARLNGPLLWSLPASFRPTAGRMLNAPPVALAWGFIGHPVSATAVHGLALWAWHAPPLYAWALANPAVHRLQHVSFFATSLLFWWVLLHGRGAGRSTRMRDGIAVACLFITILHSGVLGALLTVSPRVWIPGQGALAGEFGLSPLEDQQLAGILMWVPMGILYTGAALFFAHRWLTVNDSRAPLAPTQYPG

SEQ ID NO: 9402 - protein, 117 aa, BradyrhizobiumColbertium
MTEADRNGKLLYWAGVALGPVSWGLNLQGIYVLAHFSCETTRVSGTIVSVVLAIVALAGTAISARAMRRGAGAEWVDAQGGGPRSFMAWVGVGMGALFALVIANQLAASLLISPCLR

SEQ ID NO: 9403 - protein, 199 aa, BradyrhizobiumColbertium
MRQTIVRNVSDLPTYGFGPRSGPWWGAMGFMALEGMGFAVAIGAYLYLYAVNPTWPIGAPPPDLWPGTAATVLYLLSIIPNQYTNRVAHRQDLAKTRICLIMMALIGIALLVLRGFEFAHLNTRWDNSAYGSIVWLILGLHTAHLATDLGDTVVLAVLMFTRHAKPRRFSDVTDNVFYWNFVVLAWLPLYVLLDWVPRL

SEQ ID NO: 9404 - protein, 637 aa, BradyrhizobiumColbertium
MSTAAEERNLRDDVLNGFQLTRQLERVWRTPSGFLGALMSVDHKVVGRRYILTAFVFLLLGGILAALMRIQLAGPEKTFLSADKYNQIFTMHGSTMMFLFAVPVMEAFAVYLVPLMVGTRNIAFPRLNAFSYWMFLFGGAFLWLSFLLNVGPDVGWFSYVPLSNLQFSPSKRTDVWAQMITFTEVAALAVAVEIVVTVFKQRAPGMTLDRIPLFVWAMLVTAFLVMFAMPSVMVASTSLILDRLVNTRFYDSSSGGHPLLWQHLFWFFGHPEVYIIFIPGTGMVSAILATFARRPVVGYPIVILSLIATGLLSFGLWVHHMFVTGLPQLGAGLFTASSMLIAVPSGLQIFCWLATLWDGRPIYRTPLLFVIGFIVIFVLGGLSGVMVASVPIDTQVHDTYFVVAHFHYVLIGGAVFPLVGAVYYWVPKIAGRMLSERLGQWNFWLAFISFNVAFFPMHFLGLIGMPRRVYTYTADMDWAHLNLVSSVGSFLFALSFALLLVNVIYSLRRGELAGDNPWNASTLEWATSSPPPPQNFDRIPVVKHRDPLWADSEILPVAAGLSADRREVLVTSLAEAEPQIREASPEPSIWPLLTAIATAIFFIGSIFTPWAVLWGTPPIAVALIGWFWPTGSKEDES

SEQ ID NO: 9405 - protein, 322 aa, BradyrhizobiumColbertium
MPLSACAGRQSALDPQGLQSEQIRSTLFIFLAVSAVVWIGVVVVLAAGMLRTKRAAGRPLDLHQGYEDRAGRVVLWLGTATALIVLGLSFVSYAGQRTIFAKDEKALTLKVIGHQWWWEVRYEADSPHKSFVTANEIRIPTGKPVRVELESADVIHSFWVPSLTGKMDLVTGQKNELQFTAKNAGVYRGQCAEFCGLQHAHMAFAVIALPPDEFERWREHENRSAHSPSDPLGKQGEALFRARGCALCHNISGTLAGGQLGPDLTHIASRTTIAAGTLPNTPATLGAWISDPQHIKPGNLMPKMPLQSGELIAIIHYLEQLK

SEQ ID NO: 9406 - protein, 40 aa, BradyrhizobiumColbertium
MLEDLRVLAQPGAIVAVAAVLLLMAAGGVSILVAAKGWPF

SEQ ID NO: 9407 - protein, 208 aa, BradyrhizobiumColbertium
MTDTAFIHRFEPATSAGSPPLLLLHGTGGDENDLLGLGRMIAPGAALLSPRGRVLERGMPRFFRRLAEGVFDEDDVRRRARELGDFVAEARQRYGIAAPIAVGFSNGANIAAALLLLKPELLAGAILLRAMVPLSDPPKADLGSKPILLLSGHGDPIVPATNSARLAALFTEAGARVTHKVLPAGHQLSQADVTLARDWIGNAESRAA

SEQ ID NO: 9408 - protein, 312 aa, BradyrhizobiumColbertium
MSGLHHVTAIAGDPIRNFGFYTRDLGLRFVKKTVNFDDPGTYHFYYGDETGRPGTILTFFPWAGVPSGRRGVGETHQTAFRVPQRSLGYWTQRFIEKGIAHEALEKRFGESVLPFTDPDGMALALVGVPGAENEPGWSNGDVPAEHAIRGFHGVTLLLDSAARTASILTDVFGFAETGREGSVIRFKASGDAEGSVVDIYEAKGFLRGHQGGGSVHHIAFRAADDAEQAQMAQKLVSNHGLHPTEQRDRNYFRSIYFREPGGVLFEIATDIPGFAVDEPVATLGRDLKLPVFLEQHRKQIEDVLPSLEETVS

SEQ ID NO: 9409 - protein, 303 aa, BradyrhizobiumColbertium
MDKLGSLRAFVKVVESGSFAEAGRQLRLSRSAISKYIADLEESLGVQLLNRTTRHASPTENGQRYFERAVVILSEIEAADQAVTQAQSSPRGLLRVNAPMSFGTIRLGPVLADFMARHPELQLQLVLSDDLLDPVQDGFDVTLRIAELESSSLIARKIMPVARMICASPDYLARHETPRHPQDLREHAALTYGFLLTGNQWKLTGADGDHWIQPAWSLCVNNAEVLRDVAIKGRGLALLPEFIAADALRKGELRAVLQDYAAPPLALYAVYPPTRHLSLKVRLFIDFLVERFGREDGASAQAR

SEQ ID NO: 9410 - protein, 261 aa, BradyrhizobiumColbertium
MQQITDAISSPKVKRAIELATGPLLLFALWWLAFKGQLVNKDLLPSPIDTLRDTGASIAAGKMTGDFVHTIARVGYSTLIAVVAGVPIGIVLGAKAAIYRSVEFLVDFFRSTPATALFPLFLLLFGLGDFAKIAVAAFAAWLVIVFNVAYGVMNARQTRILAARSMGASSLRIFKDVIFYETLPQTFVGLRTAVSLALVVIIVAEMFIGATDGIGHRIIDAQISYSLTDMYGSILIAGAMGYGLNLMLLVIERSFIHWSGR

SEQ ID NO: 9411 - protein, 331 aa, BradyrhizobiumColbertium
MHMKRFLAAFAASTFLLGATGADAACDKTEKVTAVWLPIMQTTAYYVALEEKLFEKACIEIVSTKMEAPNQIIDALIAERADFGPPGAAAGIAMIAEAKFPGKLKVFGLQGGGIAVDRINDGLIVKPDSPIKGFADLKGKSLGHVPGIQWRTISRHMVRSAGLDPDADVKLVDLAVAMQVPAVVGGTVDATLSLEPVGSIAVASGKAARAMTNPVAHVIADPFYSGASLMTTKFLKERPEVARKVVAVIDEATDLVNSDFKKYKPILTKYTPIKEDQLELLAQPYLRGFKDLNDTDMKSYQALVDVFIKEGVVAGPINVKDKLLAKSDLGN

SEQ ID NO: 9412 - protein, 282 aa, BradyrhizobiumColbertium
MDIPMGKVTAIRSVDRPAAESPSPAASPKSRQAYVTVRGLSKSFHGTTIYDDFSIDLPMGKFISVFGPNGCGKSTFINMISGLMPMDAGDVLYDGQTIRDTRISYVFQNYREALFPWMRAIDNIHYPLRVIGIERKERRRRVEKLLADFDVPFDLNAYPYTLSGGQQQTVSILRALVTEPEVLFLDEPFSALDYEMTLFMRERLQHIFMKLKTTMLLVSHDLEEAIQLADQVVLLTRRPTRVAEIVPVDLPWPRDLDVTTGEGFINLKRHCLDRFWREVKRD

SEQ ID NO: 9413 - protein, 562 aa, BradyrhizobiumColbertium
MMETNMTKRRFRAAAVQTLARLGDFDHNIALATQYVEDAVRQGAELVVFPECMDTGYLFDSADHCRELAETMKDGPFVTALSALAKKHRIYIASGVTEWDPDKEKIFNTGIMFGRNGETVCHYHKQFLATHDQNWFAFGERGCPVVETDLGKIGLLICFDGRIPEIFRAMAMQGAEVIVDMANFFAMDQADMWGPARSYENGLWLVAATKAGYERSIYYPGGSMIVDPKGRVLSKVPYDTHGMAIADVDLEAAHDKSIYSANDKIADRRPETYGLMAVPYEKTSVYRIAEQPLIPAKSVAKVAAVQMHVTKDCPADEVLEMVDHAAKLGIKVLTLPEYAFCPSAIPNAAEAAALADQTASLLAKTAAIASRYQCLIAFPTVERAAAGLYVTTFLIGPDGKEVGRYRKTHLTAEERKWAKAGDEYPVFETPFGRIGIMSGYDAVFPEVSRCLGIAAADIILWPASLREPFERELLAVPRAEDNRVAVVLANRVDSPYPGGSLVIPPTGFPLWDINVVAPRVFKLGAVMPKHIDLAVCRQKLMIPKVDMFANRLVETYAPIIAA

SEQ ID NO: 9414 - protein, 328 aa, BradyrhizobiumColbertium
MPKLANGHVRTAEMAKAARTLRYNWDDVIFFLEVARTRNLVRAGQKLKVDHTTVSRRVRELERSLNTTLFKRSKSGFALTEAGLRLLQFAEGMENNANAIIETVVGSEKADAAGAVRIAAMEGIGSMYLTTCMAAFSKAWPSIQVELITDTRLLDMTRREADVFISFFRPKGRRLSIKKIGEFRIFLYASSAYLQRAGRPSDLKDLDNHDFIDFIDEHIQLKENRWLSDILRPAHVVFRSTSLVSQYVAASNGLGIAMLPSYVAAHNNDLCPVLPSYFSVRDIWLSVHEDLLHIARIKAVMGFLEKRVAADVDYLMSATHHAKGKAVG

SEQ ID NO: 9415 - protein, 210 aa, BradyrhizobiumColbertium
MVEFDDTFRQHLRELFVWRRDVRRFRTDPLPAGAIDRLIETACLSPSVGLSQPWRFVVVEDEARRHAVIDDFKSCNADALKAYSGERAARYATLKLSGLERAPGHLAVFADKASDIGHGLGRATMPETTEYSVVAAITAMWLAARAEGIGIGWVSILNPDRIHAVLEVPPSWKLIAYLCMGYPEVECDRPELEQANWEHRRSADDFTLRR

SEQ ID NO: 9416 - protein, 260 aa, BradyrhizobiumColbertium
MISRAELLEDVVADLRMATSFVTILPVASSKPAGDGAVARATWALPVAGLLVGLFGALVYKIAIGFGLTPSLAALLALATTALITGALHEDGLADTADGLGGGRTRERKLEIMRDSRIGTYGVCTLILSFGLRWSALATIADPWAVMLALCAAHAAARAGVPAFMSLVPPARADGLSASAGSPPGRSVAIASVLGTLALALALGPAKALVGLVLLSLAGLLLARLAVRQIGGQTGDILGAFEQMGEILILLVAASFQMVR

SEQ ID NO: 9417 - protein, 167 aa, BradyrhizobiumColbertium
MAVILITGGARSGKSTRAEARAKAFPGRPVYVATAEALDSEMGARIARHRARRGTDWLEREVPLDLVPALVATDGGGARLVDCLTLWLSNLMHANRDWESDVNALVDALRRLQSPVVLVSNEVGLGIVPDNALARSFRDAAGIMNQAIAAAADEVEFVIAGLPMKLK

SEQ ID NO: 9418 - protein, 313 aa, BradyrhizobiumColbertium
MGFAGAMMVAMAVDALLGWPSWLFTRIGHPVTWLGRLIAAIDRSWNRASDPPALRRVAGAAGALVVIAISVALGWLVQSALPSGWIETALVGVLAWPLVALRSLHDHVAAVATPLQDGDIAAARDAVSRIVGRDPTALDEAGIARAAIESLAENASDGIVAPVFWGALFGLPGILGYKAINTLDSMIGHRSERHEAFGWAAARIDDVANFVPARVTGFLFVLLAPHRSEALSCMTRDARRHRSPNAGWPEAAMAGGLGVRLSGPRIYHGSATNEPWLNEGARDPRAADMIEALTVYRRAMLLLAGMLAILAFT

SEQ ID NO: 9419 - protein, 321 aa, BradyrhizobiumColbertium
MREHGGNLDLAQQQFGGRAEDWIDLSTGINRVPYPVGEVSARAWSALPSRAEIEALHQAARHAYRTRAPIVAVGGAQAAIQLLPQLAPRGYARILAPTYNEYAGVLSAAGWDVEEVTELSELVGASLAIVVNPNNPDGRRYAPNDLLDLLPLVDRLVVDESFVDAVPELSLASDAEQPGLLILRSFGKFYGLAGLRLGFVIGNSSDIARVVAASGPWPVSGAAIAIGCRALRDDAWAIATTARLLRDCARLDDMVQSQGWQLLGGTPLFRLYETPDARGAQEKLARNQIWSRVFAGAPTRLRLGLPGNEAEWIRLSEVLAR

SEQ ID NO: 9420 - protein, 482 aa, BradyrhizobiumColbertium
MARALMIQGAGSDVGKSLIVAGLARAFTRRGLRVLPFKPQNMSNNAAVTVDGGEIGRAQALQALAAGVEPHTDMNPVLLKPETDVGAQVVVHGKRIATARARDYAAMKPSLMGAVLESFERLKARADLVLVEGAGSPAEVNLRKADIANMGFARKAGVPVVLVGDIDRGGVIAQLVGIKTVIDSDDAAMIRGFVINKFRGDPTLFDDGYKLIEARTTWRGLGVLPWFARAGELPAEDALGLTDARKPGRCKIACLALSRIANFDDLDPLKLEAGVDLVMVRPGEAIPGDVRLVIVPGSKSTRGDLAFLRAQGWDIDLLAHHRRGGHVLGLCGGYQMLGRNVADPDGIEGPAGETPGLGLLDVTTVMSPVKTLTRVAAVHVSTNQPIEAYEIHIGRTDGPDCARPFATLNGKPEGAISREGRVQGSYLHGLFTSDAFRKAYLAKLDIPAGDEPYHARVESALDALADHIETHLDVDSLLALAR

SEQ ID NO: 9421 - protein, 211 aa, BradyrhizobiumColbertium
MTPEPETQTTEESEARHAQKMAKKKAARDKIMATKSGEKGLIIVHTGAGKGKSSSAFGMIVRCVAHGLPCAVVQFIKGAWDTGERRLLTGHFGDLCQFHAMGEGFTWETQDRARDIAAARAGWEKAKELILDESLRMVVLDEINIALRYDYLDITEVVEFLTTRKPEMTHVVLTGRNAKDELIEIADLVTEMTLVKHPFRSGIKAQAGVEF

SEQ ID NO: 9422 - protein, 124 aa, BradyrhizobiumColbertium
MTVTLHVCITCRAGQTLGEGEATPGNRLHAAILEAGVPDGVNVVPVECLSACSQGCSVALSAPGRWSYVYGRLSDVNARDVVAGAAAYAAAPDGLVPWRSRPEIFRKQSLAPIPPIPAVPEAAE

SEQ ID NO: 9423 - protein, 344 aa, BradyrhizobiumColbertium
MNSLAKVPVTVVTGFLGSGKTTLIQHLLSNAGGKKLAVLVNEFGSEGVDGEILKSCADANCPEENIVELANGCICCTVADDFIPTMEQLLARPVRPDHILIETSGLALPKPLLKAFDWPEIRSRITVDGVVALADAEAVAAGRFAPDPAAVEAQRAADDNLDHETPLSEVFEDQIACADIVLLTKADLAGKAGVEAARAAITAEMPRRVPMLAVTDGAIDARVILGLGAAAENDLAARPSHHDGEEEHEHDDFASVVIDLPEVADIDALVASVQKLAREQNVLRAKGYIAVAGKPMRLLLQAVGERVRHQFDKPWGPGARQSRLVVIGEHGDIDEAAIKAGLGV

SEQ ID NO: 9424 - protein, 1081 aa, BradyrhizobiumColbertium
MHVVFRESRGLEETATPRDIGQDPADLVVLSYSDSDLAAFAAGWRRGRNSLPSLRLANLAELRHPLSIDTYVERTLSYARGILVRLIGGESYWSYGLAALQQLAKDRDIVLAVLPADGRDDIRLDAYSTLPVSTLRRLKVLCDTGGPVAAQAAIAQLALASGLYAGPVIGEMTVPEMGFYDPVRGVIAAPASDGKPRALVTFYRSYLTAADTGSVDALIASLRDKGFDTHGAFVTSLKAPGVADWLRAHLAQNLPAAIVNATAFSAMGDDGTTPFDAATCPVFQVALSTARREDWTQSLRGLSPGDLAMHVVLPEIDGRLFAGVVSFKSAAMRDPELQFSHLAHRPDEERVSAIAARVAAWRRLAEKPAAEKRLAIVLSNYPGRPHQIAHAVGLDALASVEALISDLAEVGFDVARVDRLGELLLKRGSTWSIADYRAALSRLPQALQDDLAQAWGAPEDDPSCRDGSFRFAAIRCGRSIVAVQPERGAAASRDADYHDLARTPRHGYVAFYLWLREQALDAVVHMGAHGTLEWLPGKSVALSQACWPEALIGDLPIIYPFIVNDPGEAAQAKRRIGAVTIGHLPPPLATSAVPEGLRRLERLLDEYSTADGLDPARRQRLIAAIREEARAAGLEDDLGLDASAAAAEAIPRIDRFVCDLKESQFGDGLHVFGRGACGEAERDALRAALAGERVAPGPSGSPYRGRQDVLPTGRNLFAVDPRAVPTPSAHAQGIKLAEELLRRHLQDHGDWPKGLVVDLWGSATMRTAGEEFAMALHLAGLAPRWDHVSGRVTGYDIIAPAELGRPRIDVTLRVSGLFRDVFAGLAQLFEAASEALAAREDEGDENPYCNRASRVFAPRPGQYGVGLSAIPDAFTPETRGAAGEAWLSASSWAFSADGTMQPDRAGIAQRLASADAFVHVQDLPETDLLLAADYAAHEGGVAAAAAHLRVTGPSLYHLDTTRPDQPHARTLTEEISRVVRARAANPAWIAGMMRHGFRGAAEITATLEHMAAFAHLAGAVPPHLFDLYYDATLGNDDVRTFMAHENPSALAAMETCFTRLHEASLWRTRRNSIAAALREAS

SEQ ID NO: 9425 - protein, 387 aa, BradyrhizobiumColbertium
MSAASVKGWCPGALRPMQSGDGLVVRVRPFGGRLEAQQIVGLAELAERFGNGLIDVTRRANLQIRGVSADGHRPLLDGLARLQLLDPDADIEARRNILVTPFWGSGDETQSLAAELEEALADSDLALPTKFGFAVDDGRSRVLAGDSADIRIERDRSGRLLVRADGARLGHSVARGQAVSTALALASWFIVSGGARGGRGRMAAHIASGAALPRSLRGETEPAPVVAASRPGHYRQGALVGVAFGQMLHETLHQLAGCGHALRMTPWRMVLSEGKREMPSAAGLITEPHDPALRVIACSGAPRCGEAHADTRALAAALAPRISADTRLHVSGCGKGCAHSGAAAITLIATNTGFDLVRDGSIRDAPALRGLDGADIVSDPSVLVGGN

SEQ ID NO: 9426 - protein, 209 aa, BradyrhizobiumColbertium
MPHTYETDGAAIYRQSFATIRAEADLARFSPDEEPVVVRMIHAAGMVGLEAHIRFSPGMAATARAALQGGAPILCDARMVSEGITRARLPAANAVICTLGDESVPALAQSMHNTRSAAALELWRPHLGGAIVAIGNAPTALFHLLNMLEDRDCPRPAAIIGCPVGFVGAAESKAALMADPPVPAMTVEGRLGGSAITVAAVNALASRSE

SEQ ID NO: 9427 - protein, 243 aa, BradyrhizobiumColbertium
MGRIICCGLGPGDPDLMSVRADRTVRAAQHVAYFRKKGRAGQARRIVEGLLVAGVTEYPMEYPVTTEIAFDSAEYVQLLAGFYDEWAERLARLARAVDVVVLCEGDPYFYGSFMHLHTRLQGRTEIEVIAGIPGMVGCWNGVAQPIALGDDVTTVLMGTLPEDELERRMRDSDALVVMKTGRNLAKVRRALASAGRLDDAWLGERGTMPGERVVRLAEIDAIDCPYFAIVLVHGKGRNLDAAE

SEQ ID NO: 9428 - protein, 244 aa, BradyrhizobiumColbertium
MTGTLTIAGLGPGSDALVTPEVSAALAAATDILGYAPYVARVPPRAGLTLRPSDNREELQRASEALRLAAEGGQVVVVSSGDPGVFAMASAVFEALERAPQWQALPIRVLPGITAMLAAAARAGAPLGHDFCAINLSDNLKPWAVIEKRLRLAAEADFAIALYNPRSASRPEGFGRALAVLREAGAGARLVIFARAVSAADEKIETVTLNEATPGMADMRTLVIVGNSQTRRVGRWVYAPRRAE

SEQ ID NO: 9429 - protein, 248 aa, BradyrhizobiumColbertium
MMRALILGGTADASLLAAEIARAGIEAVYSYGGRTRAPAEQPLPTRIGGFGGVSGLADYIRREGITHVIDATHPFAAEMSRHAIEACADADTPLIALERAPWTRVSGDNWIDVEDVGAAAAALPEAPANVFLAIGRQHIAPFASKPQHSYTLRFVDPPEVDLPFAADVIVARGPFTLRSELEMMRTRGIGWIVARNSGGGGARAKIDAARSLGLPVIMIARPQLPERPRVESVTDVMQWLGHSARLGA

SEQ ID NO: 9430 - protein, 393 aa, BradyrhizobiumColbertium
MANPWLTIIGIGEDGLAGLSEASRKALAEAETVFGGERHLALADAGSRGRPWPVPFDANVVLSCRGRPTVVLASGDPFWHGAGASLAEKLGGEEWIAHPAPSTFSLVAARLGWRLDAVTCIGLHAAPFERLVPHLARGARIICLVRDGKAASDLAKWLTERGWGASAFWTLAALGGPRETVRQYCAMDFADDLAGNLVAVAVEARGAQGIPCSSGLPDDLFVHDGQITKRLVRALALSALAPRGGERLWDVGAGSGSISVEWALCGGAATAIEVREDRVANIRSNAAAFGLAHRIAVVTGAAPEALTALDPPDAVFVGGGFDNAMFDAIWPRLPIGARLVAHSVTLETEALLGELHQRHGGELMRVEIAQAAPLGRYRSWEAARPVVQWSAVR

SEQ ID NO: 9431 - protein, 122 aa, BradyrhizobiumColbertium
MKVAGLGFKQDVTLASLREALQAAGGPEGLAAVATVSDKADAEVLKQLARECGVPIRAVPADVLAKVDTPTRSKLVAEKFGTGSVAEAAALAVAGSRARLIATRVVSQDRTATAAIAEGDGA

SEQ ID NO: 9432 - protein, 260 aa, BradyrhizobiumColbertium
MTVHFIGAGPGAPDLLTLRGRDLIAASPVCLYAGSLVPEGVLAHCPPGARIVNTAPLSLDEIIGEIAAAHAAGKDVARLHSGDLSVWSAMGEQLRRLRALRIPYSVTPGVPSFSAASAALEAELTLPGLAQSVVLTRTPGRASAMPEGEKLAAFAATGAVLAIHLSIHLLDQVIAELTPHYGADCPVAIVWRASWPDQRIIRATLATLDAAVGSEMERTALILVGKTLGAADFDESRLYAADYDRRYRPVGAEPRFPEAT

SEQ ID NO: 9433 - protein, 436 aa, BradyrhizobiumColbertium
MAAGLVISAPASGVGKTTLTLALARAWRSRGLNVQCFKSGPDYIDPAFHAAATGRASVNVDSWAMDRGAIAHLVSRGVDADVVLAEGSMGLFDGVAARGVSGTGATADIAEMLGWPVVLVIDPSGQAQTAAAIAAGLRDYRAGLRLAGVVLNRVASPRHEALVRRALEEAGIAVFGALPRHAEISLPKRHLGLVQAEEQAEIGKLIDEAARFVAAHVDLDGVLRAAGNWSAQPAANGLKITPPGQRIALARDAAFSFVYPHMLEAWRAAGGEIVPFSPLADEVPDASADVCWLPGGYPELHAGKLAANARFRSGLCAFATTRPMHGECGGYMVLGTALTDADGVRHQMTGLLGLETSFAKRRMHLGYRLATLASPMPGYQAGARLRGHEFHYSTILAQPDAPLAVVHDATGAVIAETGSRRGHATGTFFHLIAEDR

SEQ ID NO: 9434 - protein, 242 aa, BradyrhizobiumColbertium
MSGFVSFVSAGPGDPELLTVRGAARLREADVVLYDDLASGAILDLARPGANLVAVGKRAGRPSTRQHHVNRLLVDYAATGARVVRLKSGDAGIFGRLEEELETLREAGIGYEIIPGVTSACVAAAQAGIPLTRRHTSRRVQFITGADVTGELPPDLNWAALADPEATTVVYMGRRTFPALAAKLIAHGLAPDTPALVAESLGRADERLVRTTIAELADQLARGGAPSTAAVILFGALAGDYR

SEQ ID NO: 9435 - protein, 225 aa, BradyrhizobiumColbertium
MHIEPGIVTGGKLVLSYATGIAAGGVALKLAVETVREQGIGSFAARTLATTALVFVFFEILPHFPVGVSEVHFILGSTLFLLFGAAPAAFGLAFGLLLQGMLFEPADLPQYGMNVTTLLVPLFAIQAIATRIIARNTAYVDLKYGQALALSTTYQAGVIAWVAFWALYGSGFAMTNLANIATFAASYALVIVIEPLADLAVLALAKSLRGVTAPGLVTPRLHNAA

SEQ ID NO: 9436 - protein, 257 aa, BradyrhizobiumColbertium
MRPSVALAMLTLSLIGIGCGDPAQLTRAAVAAINAADLVLIPRKGTAKSDLADLRRTICADVLTSGRTQIVEFDLPVRDAGEADYRKGVDDWHDAVAATWSKTIADHLEGDGKIALLIWGDPSLYDSSLRIARRLDPLPKIEVVPGITSIQALCAAHALPLNEIGEPFLVTTGRRLRDEGWPHGVDTVVVMLDGGTAFQSLDPADLHIWWGAYLGMQDQTILSGALAEAGPRIVALRQEARERHGWIMDSYILKRRH

SEQ ID NO: 9437 - protein, 350 aa, BradyrhizobiumColbertium
MLPEWVYRECPEISVRHREAAIVRQAQLTKPTGALGRLEQLAIELAGLQATEQPRASRAPIIIFAGDHGIVAQGVSAYPQEVTIAMMANFASGGAAISVLARELGSRLEVVDAGTLATEPTAGIVVDKPRHGTRDFSVEAALTSAELAFAFEAGRRAVVRAEAGQPDLLIFGEMGIGNTTTSAAIAASLLAVSAEEIAGSGTGVDAAGRARKARVIDAAIARHGLAGGSAEEILCAVGGLEIAAIAGATIAAAQARIPVLIDGFIVSVAALAAARLNPSCQPFLLPSHQSAEQGHRLVLRALNVQPLISLDLRLGEGSGAAIALPLVRSACALHNDMATFAQANVPDRPS

SEQ ID NO: 9438 - protein, 190 aa, BradyrhizobiumColbertium
MEGETFLWLIRHAVVEGLAGTIHAADARADLGDHAKLAALRHRLPRDGTSYASPSRRTVETARALGLEPALVSEFREQDFGDWTGHRHDELAASGGETYARFWRDPARGRPPNGESFADQVARVRSGLARIDAGSATLVVHSGTIRAVLCIALDLTPDAALRFVIDPLSLTRIDRLARGWRVVCVNQQVS

SEQ ID NO: 9439 - protein, 533 aa, BradyrhizobiumColbertium
MDRRTVLKGLAGAGGLALTGLSAPAIAQGASARTLRFVPQANLANFDPIWGTQYVVRNAAAMVWDTLYGIDSSLQPQRQMVESEEVTDDGTTWTFKLRPGLKFHDGEPVLSKDVVASLSRWAARDPMGLMIKALQQELTAVDDRTFKWVLKQPFPKMLYALAKNNSPCSFIMPERIAQTDPFKQITEYVGSGPMKFAKGEWVPGAKAVFEKFTDYVPRQEKASWLAGGKQILVDRVEWIVMPDPATAAAALQNGEVDWWESPIADLVPVLKKNKNISVDIGDPLGNIGSFRMNHLFAPFNDVRARRAVLMALSQEDYMRAIVGDDTALWKPLPGFFTPGTPLYSEAGGEILKGKRDFDAAKKLLAESGYSGQPVTCLVAQDQPITKAQGDVTADLLKKIGMNVDFVATDWGTVGSRRAQKTPPGQGGWNMFHTWHAGADCINPAPYTAIRANGDKAWFGWPNSPGTEKEVASWFEAKNLDEEKAAIGRLNKAALDDVVYAPTGFFLSYTAWRKNVSGIAKGPLPFFWGVSKSA

SEQ ID NO: 9440 - protein, 313 aa, BradyrhizobiumColbertium
MLSYILRRIVATLPVMAIVALFVFSLLYIAPGDPAVVIAGDQASPEDVERIRQSLGLDRPFLVQFGGWVWRILHGDLGTSIFTNLPVSAMIGQRLGPTLSLMIVTLMLTIVVAVPLGVVAAWKAGSLIDRVIMGFAVFGFSLPVFVVGYMLAYIFALELEWLPVQGYTPLTQGFWPWLENLILPAIALGCVYIALVARITRAAMLEVLQQDYIRTAKAKGLGQGGILFIHALKNAAVPIVTVIGIGIALLIGGAVVTESVFAIPGLGRLTIDAILRRDYPVIQGIVLLFSFVYVLVNLMIDVVYTLVDPRIRY

SEQ ID NO: 9441 - protein, 307 aa, BradyrhizobiumColbertium
MTDTTVNPQSLPAGLVLAPQLPDILRPVAIRRGFVGLLRGHPTVAIGGALLLTLVLIAVFAPYLGTVDPTALAPAKRTRAPSADFWFGTDVLGRDIYSRVLYGARVSLTVGLSVAIFASAVGLAIGMISGFIRWADGILMRFMDGLMSIPPILLAIALMALTRGSVGNVILAITVAEIPRVSRLVRSVVLSLREQPYVDAAVACGTRTPMIILRHILPNTVAPMLVQATYICASAMITEAILSFIGAGTPPTIPSWGNIMAEGRALWQVKPYIVFFPAAFLSVTVLAVNLLGDGLRDALDPRMAKSL

SEQ ID NO: 9442 - protein, 144 aa, BradyrhizobiumColbertium
MTIQAQILKLMLDLKRRVGAAIILITHDLGVVAEIAERVMVMYAGRKVEEAPVAELFRSPRHPYTQGLLGAVPRLGSSLVGTARRLAEIPGQVPDLRKPIVGCVFAGRCALATDLCRQYAPGLEEKGPRHIAACHYAAKGAVAA

SEQ ID NO: 9443 - protein, 329 aa, BradyrhizobiumColbertium
MSPPLLQVNDLKKHFPVKTGLFSRKSEFVYAVDGVSLEIARGETLSLVGESGCGKSTVGRAILRLFDITSGQVILDGKRIDDAAPGTMRQMRRRVQVVFQDPFSSLNPRMRVRDILAEPIRNFGLAKSAEDLEVRVTALMDTVRLPREALNRRPHEFSGGQRQRIGIARALAAEPELIVCDEAVSALDVSVKAQIVNLLQDLQSEFGLALLFISHDLAIVEHMTHRVAVMYLGKIVEVAPRRDIFAAPRHPYTKALLSAVPLPEPGAQRNPIILKGDVPSPINPPSGCRFHTRCPFVFDRCRTEEPTLRVAGAEQWVACHLEEGAPTAA

SEQ ID NO: 9444 - protein, 95 aa, BradyrhizobiumColbertium
MLFAIHALDRAGALPTRLANYDAHKTFLSDTSRFGVQIVMSGPLVSDDGQTMIGSLFLIEAPGRKEVEAFNSADPFASAGIWEKVTITGFLRRQG

SEQ ID NO: 9445 - protein, 324 aa, BradyrhizobiumColbertium
MKTKLGHLALPLLMATAFTTGARADGETIAVFTKNQTNPFFQTVRVGADNMAKTMNAKTLQYIPTKPDSIPEQLSQIEDVVVKKPSAIVFTPVDYKAMVPGVEKINEAKIPVVNITDRSAGGKFLSFIGADDYSLGLETARFLLKTLGGKGNIVIIEGVKGSLTNVDRVRGFNDALKEAPGAKLLASQPGNYQRLQALQVMENLMQSNPQIDGVLAANDAMAVGAIEALDGANRKAQVIGINGTKEAIDAIKAGKLLASGDYNGFAQGCLGTMMAIRALRSQPVIAEIVLKPTVITKDNYKPFDVPLEQRTCPTFEDAGKLSAK

SEQ ID NO: 9446 - protein, 325 aa, BradyrhizobiumColbertium
MTDITKGAIAPPRSFLSQDAIQLFYRLLAALLICAVLAVLSDSFLSLGNILNVLRQASLTFFIASGLTLVVLTAGLDLSVGANVALSACLAGTVIHTTGSPVLGILTGLASGGIVGLVNGIMVTALRIPSFIATYGMLWVLNGLTYWYMAGETLHGFPAGFRQIGSGYLFGLPIPVYLLLVFLGIGTFFAQRTVWGQEIYAIGANPVAARLSGIPVARRLLLVYAVSGTMAGLASIIFLSRLNSAEADIGESLTLPAIAAVLIGGTSLFGGVGTVFGTFIGALILTLVLNGMNLLAVSANWQPLVTGVIVILAVWLDMKTRRRAQ

SEQ ID NO: 9447 - protein, 316 aa, BradyrhizobiumColbertium
MREAAVVAQPNPLQRIPGVAMVLALLIALFSVIAPGFLSVANLSNVLVQSTILTMLALPMTLIIMTEGLDLSMGAVLTLTSLCVAIVSLATKSMLLGLGAGLLVGTVFGVANGWLVAIVGIPPFVATLGTLGMAQGLSLIVSDGQSVVGIPHSVRDIYSATFLGIPVPIVMALVTYAAFHALLYHTRFGTYIFALGGNREALRYAGLSPNRLLIAVYAIGGAMAGIAGLLMTARMNSGHPTAGLGLEFDAIAAVAVGGTSFERGNGWLLGTLLGVLSVGVLRNGLNLISLPSSVQVASVGVLVILALFLDGLRSRA

SEQ ID NO: 9448 - protein, 507 aa, BradyrhizobiumColbertium
MSDALRIEVTSPTPLLELRGISKEFPGVKALDDVSFAVYPGEVHMLLGENGAGKSSLMKVLCGAYRADAGEFYYKGETVAIESAADAQKLGIAVIFQEFSLVPHLDIAQNIFLGREPKGRIPGTIDRRKILADAKRVLDTIGFDIDPSTTVDKLGVAQQQMVEIAKAISQNARILVMDEPTAALSDRETELLFALIGRLKADGVSIVYISHRMAEVFALGDRITVLRDGRRIDGVKPADVTPEQLVRMMVGRNVDMTYPRNFADKPGEVLLEVKGLSASTGISDINIEVRRGEIVGLCGLVGSGRSEVARAIFGADPVTSGEIIFDGKVISGEPDLAARRGIALIPESRKSEGLALLRSVSDNLVVSALKKLFPSGLFDQRSAQRTADGLIRQLRIATPSARQTVGLLSGGNQQKVVIGKWLAAGSKLFIFDEPTRGIDIGAKSEIFALIDRLVAEGAAALMISSEQVEICHVCDRAYVMREGRIAGHLTRNELTEENIVRLGMHHA

SEQ ID NO: 9449 - protein, 464 aa, BradyrhizobiumColbertium
MGPPVSTGILAERLTGMIGWRASVARGVLDQHGQSESHYRSLPPDIVVFPETTQEVAEIVKLCAGAGMPIVPFGAGTSLEGNAAAVAGGVCFDFARMNKVLAVHDSDMDVVVQPGITRKRLNAELRNTGLFFPIDPGADASIGGMTSTRASGTMAVRYGTMKDNVMALEVVLADGRVIRTAKRARKSAAGYDLTRMFVGAEGTLGVITEITLKVHPVPHAISAAVCSFDTLHDAVDTAISVIQSAIPVARIELLDDVMMRGINAYAKLGYRESPTLFFEFHGSESSVAEQAEAAQAIAADHGGHGFAWAKAPEDRSRLWHARDNTLYAGLGLRPGARAVITDVCVPISRLAECLTETRRDADAHGFTAPIVGHVGDGNFHMLILIDPAKPEEVEGAKSLQARMVARAIAMDGTCTGEHGIGLGKIGYLVDELGEAVDVMRSIKTALDPNGLMNPGKIFAGGAKA

SEQ ID NO: 9450 - protein, 294 aa, BradyrhizobiumColbertium
MRNFNENTITDAVLERIAGATDPRVKQVSEALVRHLHAFVREVRPTQKEWEFGIDFLTRTGHMCNDKRQEFILLSDTLGVSMLVDAINHPVPEGATETTVLGPFFVQAAPEKDSGADISGPMEGDPMLVTGSVSTVDGKPLAGAVVDVWHSDDDGYYDVQQLDKIGDLAMRARFHTDANGRFHFWSIKPAAYPIPHDGPVGEMLEGQGRHPWRPAHVHFMISAPGFEQLVTHVFVAGDQYLDSDVVFGVKDSLIREFVRHPAGRAPDGRMVEREYFHLNYDFGLKTLASNARAA

SEQ ID NO: 9451 - protein, 300 aa, BradyrhizobiumColbertium
MTDALGNVAFIGIGKMGLPMSVLVAKAGFAVTAFDQSAVRINEARAQGIAVAASPAEAVRGKAAVVTSLPDDAALRGALLGPTGLIAAMTPGAVLIETSTVSVEASAEIAAAAQSRGIAYLRSPVSGNASIVHTGALTCFVSGPKEAFEGAKPLFAAFTRAQTYLGPAEEARYAKLSVNLMIAVSAAMMAESLALARKGGIAWQDILKVLDDSAVASPMVKYKTAPLRTRDFESTFSCRQMAKDLDLILGAGHAVGVPLQLAAQVRETYGALVAQGDGETDFIATVKHLERLSGLDEPKL

SEQ ID NO: 9452 - protein, 455 aa, BradyrhizobiumColbertium
MRRTLIRSATVISMDDAIGDLRTGDVLVEGDRIVDVLPSIDLGSGEAEIFDGTGRIVVPGLINAHMHTWQTGLRGFAANWTLLEYFRRMHAGLATVFQPDDIYIATLVGALNQINHGATTLVDWCHNNPTPDHTDAAVRGLLESGIRAAFFHGSPKPEPKPGEPHFSEVPHPRREVERLLAGALADRDGLVTLGLAILGPHYSTLDVAMHDLRLARELNLIASMHQGGGPAKTPGGWEKLIEAGFVGPGVNIVHGNDLADELLDRMVDLGVSFSVTPENEMIQGHGFPITGRLLKRGVRPTIGIDLESVLAGDLLSAARVALSMQRALDNAESRKTSGTIPVTTTIPVREALRWVTTEGARMLGREHQIGSLTPGKLADLVIIDASHLNLVPVHDPVATVVMQTSLANIEAVMIGGSWKKRNGRLLVDGLESKKQRLAQSGERLVQDIKRQGRAA

SEQ ID NO: 9453 - protein, 359 aa, BradyrhizobiumColbertium
MIGSFTFENLPSRVVFGSGTLAQAAAEIERLGGKRALILTTPQQENQGRNLGTALGPLYADIFPGATMHTPVEVTERALAVMKACAADCVVALGGGSTTGLGKALALRTGVNQLCIPTTYAGSEMTPIVGQTENGLKTTVRDAAILPETVIYDVDLTLTLPASLAATSGINAIAHAVEALYARDTNPVTSLMAEEGIRALARALPAIATNSNDREARTEALYGAWLCGVCLGTVGMALHHKLCHTLGGTFDLPHAETHTIVLPHSLAYNAPAVPDTMTRISRAIGATDASQGLFELARRLGATLALRDIGMPESGIDKAADLAVTNAYWNPRPLERNAIRDLIARAWAGEPPGAIKAAA

SEQ ID NO: 9454 - protein, 107 aa, BradyrhizobiumColbertium
MSGPIRHIVMWRLRGETPEERSAARLKVKTLFEGLMGRIDGLTHVEVGMDVSAVDYACDVVLLSEFKDQAALTAYANHPEHLRVREALGDLRIGRYQVDYPIEETGA

SEQ ID NO: 9455 - protein, 307 aa, BradyrhizobiumColbertium
MDRLLQLEVFSKTAELGSLSKAAEALRMSNAAVSRHLSALEERLAVRLIERNTRRQWLTEAGQELLQRCSTLLNELAEAEDAVSDRALSPKGMLRVTSSLSFAMIYLAPMLPAFRALYPNLSVQIISANRYPDFIEAGIDVAIRTREHEPDSNIIVRRIGQMHRVLAAAPSYLEKHGRPEHPADLARHNMLIYNLANDPYSLRLSQGSTTQTIRIAPTLDSNDGQIICGAARAGLGILIQPLYIVQGDIAAGRLGPGLMGWGLPLLTMNIAYQNRVRLPAKIRVFSDFLVSHIREHSPPGIWIDAAK

SEQ ID NO: 9456 - protein, 511 aa, BradyrhizobiumColbertium
MIIEFRCEREYARQWMDREMLSVDGRDVPVQIVWMPTAEARPAGLDALFELERMVLRKGKRSGADRLKVIPERASADGDAADVIVDFTSAARDPNCSARLYLRPLFNEAAGENAALAAILAGDLPVIDIINEIDGSVLDRGHPSAEIAAGLSGALETVMARTLTMVAAILSGRPRIVPQLARPAGNGPRRGPAGFVARGLAVSIAKEIYRLCCYAPHWHIGWRFNDGAGVWQTGDLSGPSWTVLGDPGNHFYADPFPITWQGRTFVFFEDLDHRVGKGIISAIEFNDAGPVGEVVPVLEEPWHLSYPFLIESDGALWMIPESSLNGDVTLYKCVRFPDKWERHATLLSGLELADATITQHDGLHYLFGAWRDGTGGYSDSLAIYCADRLLGPWSPHASNPVLIDRASTRPAGNFVTLNGKLWRPVQDCSDGYGAALALAEVVELSPTTFRQIVRHSLRPGPLWPGRKLHTLNRCGRLEVIDGSRVQPKTRAFASQFPSMVSSARTSPSSTV

SEQ ID NO: 9457 - protein, 364 aa, BradyrhizobiumColbertium
MHVLLAQTQAENAGAQEISRLLGAGLTARGYRVTNLFFFRKSDSFDEPPDTLYCAPRRPGNPVALLRMLWTLRHHLRTTRPDAVLTFQHFGNVIGGSVTRLVSRAPVVANQVSSALSMSWPVRTADIVMGSLGFFDRITLNSKDMEREYSRYPAAYRSRMVHVPHGFDDKALTLSKEVARQEFNLPQDCILLGCAARLHPHKRLDMAIRLLPEQPSWHLALAGQGADEARLRQLARDMKVSDRLHLLGEIPPGRMADFLACLDVFVFPTQAETFGLAAVEAANAGVPSVVTDLPVLREVLCYEGRPTALFVDASDHAQLSAAVSRLLTDKQLSVELRQNAKGLRLRYSVDAMVEEYVRILEQVT

SEQ ID NO: 9458 - protein, 448 aa, BradyrhizobiumColbertium
MIESILQFMRRDVTRGVVGTILLKVGSGVLAFALFSLAARTMSPDGFGIFATWLSVAQIAAVMGLVGQESLLVRFLNEYQVGGRPDLTKGVLLSSFKITSAAMLIVITGIAVVAGARGDGWLLIIAVSAYTAVNAGVMLGSQIARSLVSILMGEGNREFFWRAIVVLFLLVMLLGHRQLDPTELFAVMTVAMSVGLLAQIVSIARVLPDLRNTPARSETPRWRSSALHFWLASILEAANQYFDVILVYWMLDPATAGVYFAASRLANIFAMLSAALYTFGARRLPSLYFSKNHREFERTLRLMAEVTALCVVAGLAIIWIGGPYLLNLFGPHFTAQHAVLIVLAIGTAIQAAGGPAAAILQLTGHERIYVPVVAVNVALRLAGFLVLIPWLGVLGAAISATVSLSLATIALNVLCRRRSGVDPSILVLLRFSGWRRGNYAVRGAETRD

SEQ ID NO: 9459 - protein, 39 aa, BradyrhizobiumColbertium
MDDLQELARGDDVAVAPAASVWNIAVLIVPDRARSSSID

SEQ ID NO: 9460 - protein, 403 aa, BradyrhizobiumColbertium
MTTDRPVTEPADGGENAEIVIVGGGLAGSLAAAVLARAGHRVALVDKRAVYPDEFRVEKIGGHQLDLIRKLGFIDALEHVACRYDRVLNIREGKVVDVSVGQAYGFSYASLVATARSQIPDCSNLIVDEVIAISNGDDVQHVELASGRRLTARLVVLATGMAGVLGYKLGIRRRVLAERHSVSFGFTIARRDGIPFDFEALTCYGERTADGIDYLSLFPVRDGMRANLFMFRDPTHPIMRELRREPEATILRLLPGLRSYLGDFRVTDRVQNWVMDLTVVEGHLLPGVVLIGDAFQTNCPAAGTGVARLLVDVDRLCTEYAPQWLMSAGMGREKISQFYSDREKIAADQQSLKMARFRQALTSRNGVGWDVRRRLHFLRRSLTHRVDQMHPGWIGRIRGALRA

SEQ ID NO: 9461 - protein, 380 aa, BradyrhizobiumColbertium
MLMNKPGNTFDIVIEQSFDFLSPEYAELFDRSAATAFQHPIWLHCLYTRLAPEAGATPLVVVVRHRATGALAMVLPLLRIRRGPIRTVEFADLRVSDYLVPVCSPDVFSQLLDDATASSQIRRLVRPFDLLRLTKLPDGRLPIEKLLAASRRVSMDTNSYATILMAPFEQWRASAMDRSYQKELAKKYRQLQKKGSLSFSCCGDSASVLEALDVMRKFRGPRFHAQGDGDLLQRPEYYGFYSDVALRGLGSFVRLYAMKMDGEVIAAVLGLCHRGSFLIIMSAFDIAGYKSQSLGALMFEQVARDCIERGDRMLDFTIGDEPYKKLFGGQPSPVWAVTKAGSPVGAVALFALKQAPWLKLAVKRLSDLRLQPARTPAPTR

SEQ ID NO: 9462 - protein, 40 aa, BradyrhizobiumColbertium
MKAFVLGCVAALVIAVAGMVILNRVQEPVAQAFTTSAVRL

SEQ ID NO: 9463 - protein, 418 aa, BradyrhizobiumColbertium
MAVALLIIFAASSVQADLVGHGGPIRALAVSPDGNSLLSGSFDTAAIRWSLETETARQVLRYHADGINAVAFLKDGRMITAGADARIAVWTPGRPEPDRVLEGHLAPIMALAVSPDGALLASGSWDRTVRLWSLADGTSRVLEGHTQNVNGVAFLPDGRLVSVGYDLALRIWRLPDGQPDTVTLSAPLNAVAVAPDGEIVTGAVDGKLRMLTKDGKVGGEVAAGPAPVVALTVSADGMLIAAAGVNGTVAIVDRKSRNLLRTPVGPGLPVWSVAFLPDSETLLTGGADGRIRRWDARTGTPVGSTPVGSDPLAAYAGDHGADVFRACVACHTLSDKEVQRAGPTLSGLYGRRIGSLPGYRFSDALKTMDIVWTPETVARLFEIGPNAYTPGTKMPEQRIGSPEDRRALTDFLGRATSR

SEQ ID NO: 9464 - protein, 90 aa, BradyrhizobiumColbertium
MILKEEEPALCVRCGTPFGVKSTIERIAAKLEGRHWMYPAGDKRLEALRMCADCRVIVMSEQQFDPFKGVPERTPPRTTDDYLRQRNGKD

SEQ ID NO: 9465 - protein, 333 aa, BradyrhizobiumColbertium
MASFGRFIRLAVGAWALLLLVTAAPAGAQQVNPTASAVKEQQLLQELNRIQGRVSIPDQRSGVLEQPQGREWREFRDVTLRWIGGIAILGMIAAIVIFYLTVGMVRLEAGRSGRTIVRFNAFERFVHWLTASCFIVLAISGLNITFGRPLLLPLIGFEAFSEWSQWAKFAHNYLSFPFTLGVVLIFLMWIGGNIPSKVDVEWAKRGGGLIGHDHPPAYRFNAGQKMIYWIVVIGGGLVAASGYALMFPFYGTGIEGMQMAQIVHSIVAVLFVAAMIAHIYIGTIGMEGAFEAMGSGEVDVNWAREHHSLWLDEQKARTGPNDGQPQPATAAAE

SEQ ID NO: 9466 - protein, 198 aa, BradyrhizobiumColbertium
MARMKFLCDADRCIECNACVTACKNEHEVPWGINRRRVVTINDGKPGERSISMACMHCTDAPCAAVCPVNCFYTTADAVVLHSKDLCIGCGYCFYACPFGAPQYPKVGNFGSRGKMDKCTYCAGGPEADGSKAEYEKYGANRLAEGKLPLCAEMCSTKSLLAGDGEIIAQIYKERVMKRGYGSGAWGWKTAYRETIES

SEQ ID NO: 9467 - protein, 980 aa, BradyrhizobiumColbertium
MLIKRTNQRSDRRGSVAESLAGQAGGLDRRTFLRRSGLAGGALAALGAMPVGSVRKAEAAAAGPLAAGAVVKKSICTHCAVGCTVTAEVLNGVWIGQEPSWDSPINRGSHCAKGASVRELVHSDRRLRYPMKLVNGQWTRVSWDMAVNEIGDKLLQVREKSGSDSVYWLGSAKMTNEGAYLFRKLGAFWGTNNTDHQARICHSTTVTGVANTWGYGAMTNSINDMRNSKTMLFIGSNAAEAHPVSMQHLLESKELNKANFIVFDPRLTRTAAHATEYVRIRPGTDIPVLYGMMWHILKNGWEDKEFIAQRVYGFDDLRKEVEKWNPQEVERVTGVPAAQLERVAKMFATQKPATIIWCMGQTQHTVGTANVRASCISLLMTGNIGKAGAGANILRGHDNVQGATDVGLDIVTLPFYYGLAEGAWKHWSRVWEVDYDYLVSRFDEKKLMETPGIPLTRWFDAALLPKADVAQKDNVKAVFVQGHASNSITRIPESLKGLKALELLVIADPHPTTWASLAVEAGRKDGVYILPVATQFECTGSRVASNRSMQWGEQIVKPIFESKDDLEIIYLMAKKFGFADKMFKNIEVENNLPVAEDVLREINRGSWSTGYCGQSPERIKAHMKNQHKFDLVTMRAPKDDPEVGGDYYGLPWPCWGSPEVKHPGSPLLYNNNLHVMDGGGAFRPRFGIEREEKLPDGTTRKVSLLADKSFSKGSEIEDGYPEFTLASLKKLGWDKDLTEAEMATIQRVNPANPDAVSWAIDLSGGIQRVALKHGCVPFGNGKARMNAFGLPDPIPVHREPIYTPRVDLVEKYPTLPDAKQFRLPNIGFSVQKAAIEKGIAKQFPLILSSGRLVEYEGGGEETRTNPWLAELQQDMFIEISPADAADRGIKDGGWVWVSGAENSSRARMKALVTERVGKGVAWMPFHFGGWFGGNDLRKNYPAGTDPIVLGESANTITSYGYDPATGMQEPKVTLCQIVAA

SEQ ID NO: 9468 - protein, 69 aa, BradyrhizobiumColbertium
MSDETKAKVGRRDFLRQVGIGTVGAGATLATPLVGTAQADSENNDEKRKARYKESDHVKTFYRVNRYPA

SEQ ID NO: 9469 - protein, 259 aa, BradyrhizobiumColbertium
MRDEGLDRAIDAAGGIAQLARKIGISQPSVSNWTRVPAQRVIAVETATGVSRNDLRPDLYNEQAGAAQPVDPVDAARAQEYSLLATLLSAPPSKRLLEQLAALTSDATPLGRAHAALADAASSAVAAKVEREYFDLFVGLGRGELLPYASYYLTGFLNERPLSRLRGDLTRLGIERIANNSEPEDHVAILCEIMSGLADGRFGASPEAQRAFFDKHVSPWMGRLFADMESAGNARFYGAVGALGRTFIEIETEAFTFAN

SEQ ID NO: 9470 - protein, 202 aa, BradyrhizobiumColbertium
MSEEDFLARWSRRKRESRAEPTKPAAAQSMPPSEAEDGETEFDLSTLPSIDDINAATDVTAFLAKRVPQELSRAALRRAWATDPAIRDFVGLAENAWDFNDPTAMPGFGPLDCSSEELAALVDRIVGGVREAVQSLPDASIEMPVSADLHGADVTMISNSVEPSAPPEQPQISIAVQPPAVGHSDETAEPIRLRTHGGALPR

SEQ ID NO: 9471 - protein, 172 aa, BradyrhizobiumColbertium
MSSAASPSLSIAVGVVVERRRSTSPWVDFVWRGIAVLPDEPATEPWTVLREQDGSTLFYAGSATVDLYPSETARYRDNLVSGSPSIWTVLSPAEGAWPYAVTAVTADPAEGEGFTEAADNLVEAVPMPEALREAIERFVAERHVEREFVKRKRRRADPEALARRDQEGDRNE

SEQ ID NO: 9472 - protein, 335 aa, BradyrhizobiumColbertium
MNDFWIACGHHLLDRDEGGGLRVTDEFLKAYFARPELMPPDDACPVERRLHRELLAHPRQAVGKDEIAGIVDADARENWQFVLAFRDLLLRHPTLEAAYLASVRSGTNDLPPLFVNQLSHVILRNALDGCDDPFVLRAAELFFRTQRILPHEHALLLGDEEIVGGRSPTPVLSLMSMLGATTDVVVDVLSEENAEAYWQRSDQFDLALDLTAGGRGPAALAQAMTRWVSHLLGIEVVIEPLRALHEAKFTWYVGLDADATRLGDRLWHGEEPGERDTDRVLALFRLTFLDSSCALDDLRGEPVYLILSMTPDQKLRMKPQNLLIGLPVKRLEMAT

SEQ ID NO: 9473 - protein, 179 aa, BradyrhizobiumColbertium
MKLLRTIALDPSDTFVFEVAAEPGEWAVSGAFRFWDCDGSKLEGKARAAFRGGFLGVQSWGWSTLAQIVPATEDDYRSLVDLLARQLVERFGAPDMSAAKTAAEEEVAFAQSLCSHPISSLVAVHRTSSDGEVRESFRRLQLREGQGHSKAFSFMELDDDVQPDHELKLAELGRGPILR

SEQ ID NO: 9474 - protein, 246 aa, BradyrhizobiumColbertium
MSHVSLAEPVHLPPPFTLVRLRESGDAFAHACRIAPESGAGTLVYVGRFDLAEFAVVLEPFEPLRSARRAFYAGMVALTDALRAYAPPSKPITIDWPDAVRIDGGLVGGGRMGWPFAADEDAPPRWLVFAAMIRTVAMNEDEPGVHPLASALDQEGFGEAGAAQITESFARHLMLALDGWRVDGFDSVARDYLARMPRERQTVQRIDDCGDLLTRRLGTDETERSDLVQALAMPSWLDAALGGPRS

SEQ ID NO: 9475 - protein, 413 aa, BradyrhizobiumColbertium
MPCEGIDQRRAVRAVVKQQHCIRATGLAVGEQHGAKSLKLRIGGWQRVGQRAGRAGRRALAAARADIRIDCDMIADGRDRPGRAEIEAAMAAGAFRARMGAERRCNVNIFRLVEAADEIARGQHGAQHRGGIPRVGAQIAVAQVVSGKQRHIPGQVEHDVAARSDSASRRIQHEALARGGPGTRIVVDRKLEGAEMSLRGADPALDDGEGRCSRPHGVVELLQHHRDVEMVGKQAAGLDRGLIAPVDQDHALARQGDERIVRGRDGGGCEQGGHLRTCSCAVFRPSGRFADVDEADRIGPFAGLFRKLRRLLRAGDGQRAVCRGNLAEMIEFGTTEMAKALDLAAGASAPHCGHVETHRVFARADQDGLRWLLQVNPSAIRMPTTDSRRPFVSYRHYPSGRKGKRRTACRRPQ

SEQ ID NO: 9476 - protein, 37 aa, BradyrhizobiumColbertium
MIDRSKGMAELSQCLGFDSGHKPAQYVIKDLDLLVCQ

SEQ ID NO: 9477 - protein, 82 aa, BradyrhizobiumColbertium
MSSAIAAAVEEQGAATQEISRNVQQASMGTRQVSSNITDVQRGAIETGSASTQVLSAAKSLANDSTRLKVEVAQFLDSVRAA

SEQ ID NO: 9478 - protein, 89 aa, BradyrhizobiumColbertium
MGRSSSTTYPKAAIWRLTVSRWIAPSCSTETLPPVTETSTPLTPGIRETAFSIFVAQAAQSIPPTRSLIFWAASVMRGFPRQRLRHRPA

SEQ ID NO: 9479 - protein, 322 aa, BradyrhizobiumColbertium
MRDVTVACFDKTGTLTAGKPKVTDVVGFGHGEVEVLSVAASLERGSSHPLAVAILQAASDKNARPQPVEDFVNLAGEGVRANLGGRTVFLGSPAAAERIVPLAEDQRKLVEALNERGKTVSVLVVNGEIAGCIAMRDELRSDAVAALRRLADSGVRSVMLTGDNPRTAAALARDLGIDHRAQMMPEDKQRTVEAYKNQGEVVLKVGDGINDAPALAAADVGVAMGGGTDVALETADAAVLHGRVSDVPAMIELSRRTMGVIRQNISIALGLKAVFLVTTISGITGLWPAILADTGATVLVTMNALRLLSIPGSGGAGEGTSA

SEQ ID NO: 9480 - protein, 345 aa, BradyrhizobiumColbertium
MFVSGYTAAFGILGRAWQLYVAYLLLFVFYVVTIGYVAQRYGHAHLLDEFNIRLLIRDPVEFLKHGLLLEYKPLNLDVLPLYIALMIAFPPLLWVLMRWPNVALAISAGVYVAAQTWGWNLPAYPAGHWYFNPFAWQFLFVIGAWAAVGGAGAVRALINSKTTLGAAGFLLLFAAIVTLAARTGNHNLIPESVRSAFIPNDKTNLAPYRIVHFLALAILVSRLIPKEAPFLSAPWLRPLRLCGERSLEVFCAGVFLAFVAYFAIDLVSESLAFQIVVSVAGIGIMIAVAYFKTWTRDYRAATGRKTRRARHSAATTGTKGAMGWFSINTTNRRRSFRKRSAPSRG

SEQ ID NO: 9481 - protein, 82 aa, BradyrhizobiumColbertium
MIASLIEEAEAINRYEQRMSVEKDKTAKAIMANAQKEEFKHFGMNLEFLLRRKKEWREELKGILFTQGDIVKLGEKAEKAVD

SEQ ID NO: 9482 - protein, 173 aa, BradyrhizobiumColbertium
MGNPAVEAQMRKHAVFQALGSILGLIAIVGAVEARGSIASERPYAAEHIDLLPADIRHGLIRLERQCGGKAAATHYFSTTIGAGGLHFRSLHFENFACEQREAICRADQCLHEVYLERAGHSRRVFSAYVDDIKLINEAGIVGLQFAGDRPAILRWNGRTFVPVHSFGKGVER

SEQ ID NO: 9483 - protein, 286 aa, BradyrhizobiumColbertium
MTTSIISHLHFGGADISLWKRFRLFFTVGVVVLLLSAAKVAVHYFGLEFLDLNRLLTSGIGGSVFIVGFLLSSILQDYKEAEKIPADLRNSIEAIDGDLACFAQTNDAFDLQKARQLLLAVIDRLREGLGHKNGHKDVPPALDELAKLTPILGRLESMGMAANFVVRLRTNQDVIRRALLRIYTIQRVEFVPSVHVLVQTLVGSIVLLLLLLKTEGDPASALLFGFITYMFVYVLYLVRLLEQPFAKGHGSVDDVSFFLLDELERNLRRALEDPDDRAQKAATTGD

SEQ ID NO: 9484 - protein, 96 aa, BradyrhizobiumColbertium
MTHILMEGTPPNVDIGAIEKQLLAIPGTVAVHDLHVWTVTSGFDAMSCHLVVADMSAGRAALRAARNLMKSDFGIEHTTIQLEDEAMRAEETVLHV

SEQ ID NO: 9485 - protein, 334 aa, BradyrhizobiumColbertium
MSEAGDRSAGAADHDYRRHGRHDHGGEQHGHDHDHGGLGHVHAPASFGKAFAIGIGPNTALVAAEAVYGYLGNSTALLADAGHNLSDVLGLVVAWAASVAAKRAPSGRFTYGLKGASILAALANAVFLLVATGAIGWESILRLYEPEPVAGLTVMVVAAIGIVVNGATAMLFASGRKGDINIQGAFLHMAGDAAVSAGVVASAALILWTGWLWLDPGMSLTICAVILWSTWSLLRGSVAMSLSAAPAGTDMDAVRSFLLQRPGVSKIHDLHIWPISTTETALTCHLVMPAGHPGDEFLMESARLLRTEHKIGHATLQIEVDENNACALAPDDVV

SEQ ID NO: 9486 - protein, 71 aa, BradyrhizobiumColbertium
MDEAENKLERLHRLKSALDIEIGGGKERGRVACPNCPHDGDWRTEVGGWVFSCEECGVRLDGRFPARRIAN

SEQ ID NO: 9487 - protein, 442 aa, BradyrhizobiumColbertium
MTKTARNGNRSTERIDTGILAKGLRLLFAASSLLMLCLLASPSAAQTSREFAREAFAAKDRKQFPLAIQLFNEAIKQGQFTPEQRGFILYGRGVSYDALGLRDLALGDFDAAIALLPDFPNSYVYRALAWSDRREFDKARDDLMQALRLNPTSALIHNNLGSVYERKGEVDRAIESYEEAIRLDPKSAQAFYNRAHAFIARQDYRAAISDYDRAIELQRDFADAYSNRGGMYLLLGDTDKAIGDFDEAIRLKGTDPIFWSNRASAYMTMGRYKDALADFDRAQSIDPGNPATYLGRGRARLYSDEIAGAIEDLRIAARLRPTNAFPAIWMHIARIHQGNPDREELERNAARVDRSQWPGQVLDFYLGRLDMDRVRENAGGSAGAEGERRLCEADFFVGEFLSHGRQKDDGRRMLRTVVDRCRPVDIIFAAAQAELREEKTSK

SEQ ID NO: 9488 - protein, 45 aa, BradyrhizobiumColbertium
MVIGADSVVIDGDWDFLHRAFPESLSLTLIGPLGATAAVIVTLFG

SEQ ID NO: 9489 - protein, 206 aa, BradyrhizobiumColbertium
MAVPALDDDGPVAVHPHAAMHVAAMVPAHLGPRAMSTMMSLLHNHRLRRSRQGERHGQADYQKTKLLHLQFPFSSVYPSHTSSWRSLRRTTAVANAREKDRAGHLPSGNFASIRAFQTVQFIGGFPMPGTTQIKEHMDVISSDKKIVGKVDHMEGTDKIKLTKQCSPDGDHHHFIPVSWVDHVDQHVHLSKSGDEVTAHWQHEGRK

SEQ ID NO: 9490 - protein, 619 aa, BradyrhizobiumColbertium
MAWVVPSIPSPDQGQAPSSGSIDLSNSINAMKGTGSYAIGLGAGYNYMLPSRVVLGVEGDLTFPNTISGTAPVLGAQGSASLTETVLTSGTLRARLGYSPGAWLFYATGGLAWSYDRATLGPPDGTLGEKIGFTRLGTAWGVGAEVALSANWSARFDYLYTDFGSKEKAFSGTERLSFDLAVQTARLAVNYRFGQNGQKALQDGLTPFDTDQFSIHGQTTYLQQYAAPFRSPYTGTNSLIPNQTRQTWDVTLYAGFRPWAGGEFWVNPEIDQGFGLSSTLGVAGFPSGEAYKVGAAAPYARIPRAFFRQTFDLGGETKKVDADINQFAGTQTTDRVVLTVGKFAVTDVFDTNRYAHDPRKDFMNWSVIDTGTFDYAADAWGFTYGASLEWYKGDWTFRGSIFDLSIVPNSTELDPSFSQFQWIGEIEHRHEIWGKPGKVAVTGFLTRRRMGRFDDAVALAQATGTATDAALVRRYQSRAGISVNLEQEVTKDLGVFARAGLADGTKESYEFTDIDTTVAAGLSLAGSAWNRPNDTFGLAGVVNGISQARRTYLDAGGLGILVGDGRLPNSGPEKILETYYSFPMWSWRATLDYQLVVNPGYNRDRGPASIFGVRVRSQF

SEQ ID NO: 9491 - protein, 152 aa, BradyrhizobiumColbertium
MTMPAYAEELGGTRLPSASEKAAANQLRQILASHATGDAKLRVLDDAQQAAEITLSPALSSLLMELLRHIGRGDAVTLVPVHEMLTTQQAADILNVSRPFLVSLLEKDEIQHVTVGRHRRIRAEDLFAYKRTRDEKRGKALANLAEQDAEHL

SEQ ID NO: 9492 - protein, 196 aa, BradyrhizobiumColbertium
MFANRFTAFVDACALASELKRNLLLSLAEAEFFRLRWSSPVLDESETAIEEILTGKGFADAAARAERARASMEAAFEDAMVTDFDNFLPVAAGLPDPNDHHVVAAAAKTEAAMIVTENLKDFPAAILSDLNMEAKSADAFIADTIALDEARAVAAIRRMRERFKKPEMTPAELLLVMEAAGLIETVDVLRPHVESL

SEQ ID NO: 9493 - protein, 301 aa, BradyrhizobiumColbertium
MTKLVLVTGAAGLLGRFVVEELLSSGYRVRGFDRRRGKADIDWRVADVTDAVAVADALKDVEAVLHIAAVPNIWSGDGQTIMRVNVQGTYTVLEAAEAARIERFVFCSSDSVAGYTVREGRMLQPLYAPLDLDHPLLATDPYAVSKILGEDLSRAYALRGMSVVALRTVFVAYPEMAPEIVARAKDPENYHGPAAGGPSSAGGGPLHHHIDARDLARAFRLAMEMRMPKGGFEKFYLSSQVTLSPEPTLDRLRLLHGSAVEIRSPEVYRRQPFAPLYDLSHAQQRLGFVAEYDQRHLISRV

SEQ ID NO: 9494 - protein, 49 aa, BradyrhizobiumColbertium
MALRDRGPRIIREDLEHRWSVVADLLEGGGDLSERHRAGADRIMTPNLP

SEQ ID NO: 9495 - protein, 480 aa, BradyrhizobiumColbertium
MSRNHKNDHRGNDDAIIQTFDDYQLYIGDGSSNHFSGPSSDMNITFGRGGNDQLSGASMDDDLIGGAGNDVLTGGAGADHLVGGAGNDRLVGGDQADMLMGGPGNDVLNEGAGHGDLEGGPGNDMLTGGLGADAFVISPDSGNDIIKDFRAGPGMFDHIAVMNLEPEQLRFADTKAGVLISWDTGKGDGSVLLEGVYKKDLAQDDFMFTDDRHLLNPADAHSDRFSAEHLGTTGGNEAGPGPTGAPTNASFTSSFDDNNVKFGTDAQNDMLLGTAKNDFYFGLGGNDYLSGGAGDNHLDGGAGNDTLVGGSGQDDLRGGDGNDKLYGGAMGDNLMGGAGNDYLSGGAGHDMLDGGAGNDVYSGGAGADAFIVAHGSGNDVVVGGFDPGPGAFDHIAFTDIMPNEVNVADSASNHGDAHTGVLVAWGDGSIFLEGIAKGQMAQDDFMFNAVEGGAFVPDPQISTEGSRMLFQNGHPDWPMA

SEQ ID NO: 9496 - protein, 282 aa, BradyrhizobiumColbertium
MQIRNLSPHTQESYLLQVSQFARHFAKSPALLGPEDVRAYQVYLTNEKKLAPKSIHVTVSALRFLYRVTLGFEWDFDLIIPCPKVPKTLAVILSPEEVLHFLGCVESLKHQVILTTCYAAGLRISEAVRLKPGAIDRQRMVLRVDQGKGKKDRYVMLSARLLETLTDYWRAVRPSTWMFPGGIPNEPISTNAVQDACSKAHRLTGLAKPVTPHSLRHAFAVHLLEAGTDLRTIQLLLGHRSLSTTAQYLRIATNKVCAATSPLELLPRPIPKAPPPPPPEHF

SEQ ID NO: 9497 - protein, 281 aa, BradyrhizobiumColbertium
MFRTAAETLRTIAADPKHLGAEIGFFSVLHTWGQNLLHHPHLHCVVPGGGLSPDGSRWIACRPGFFLPVAVLSRLFRRLFLSALQKSFDTGELQFFSSLEPLRDPAAFQRYLNEVRRINWVIYAKPPFGSAEQVVHYVGRYTHRVAISNSRVIDIEDGKVRFRWKDYRHGSQQKVMTLDAGEFIRRFLIHVLPEGFKRIRYYGFLGNRYRKQKLARCRELLGMISADAHSEPEEPSDCPEKAEHCNAASLRQCPSCHQGHMVCVEVLQPGSFSAARSPDTS

SEQ ID NO: 9498 - protein, 469 aa, BradyrhizobiumColbertium
MDVAPSASDSVLDHVPMRNEDGEIRHEFVEEIARAIEAGNSAALRSCVAELHEADLGDLIGALEPDDRVRLVELTGRDFDFSALNEVDEAVREEILEELPPETVAEGVRELESDDAVELLETLDEAEQEEILEKLPLKERVALERSLLYPENSAGRRMQTEFIAVPQDFTVGQAIDYMRETPDLPDRFYEIYVVDKDQHWLGAVPLDVLLRTRRPVALTELTDEDRRRVSVLEDQEEVARMFGKYNLVAAPVLDTQDRLVGVITVDDVVDVIEEEADEDLKALGGVTSDEELSDTFLTIARGRFNWLLVNLATAFLASSVLGLFEGQLEKMVALAVLAPIVASQGGNAATQTMTVAVRALATRELGSSNAWRVVMREALVGLVNGLAFAVITGIAAVAWFKIPGLGIVIGLAMVCNLIAGALGGILIPMALERVRADPAVASGTFVTTVTDVVGFFSFLGIATLWFGLR

SEQ ID NO: 9499 - protein, 98 aa, BradyrhizobiumColbertium
MRLRLKADGRIVELRDGHEFPVQSAVNAAPGDTGPLAVRDLRRRACLTQMEFAAKLGVPVETIRNWEQGKRAPRGPARALLAVIAHAPDTVFQALAKV

SEQ ID NO: 9500 - protein, 272 aa, BradyrhizobiumColbertium
MLFVEANGARIPAIGLGTWELSGRPAARVIEQALRLGYRHIDTAQAYDNEREVGDGMRASGVRRDDVFLTTKVWTNHFAPNDLERSVKESLARLRLPSVDLLLLHWPNSHVPLAETLGALSHAKTMGLTRHIGVSNFTVALIEQAVALSPEPLVCNQVEYHPYLDQAKVRAACDQHGLALVAYSPIAKGRIKTDQTLAEIGRAHRKTPAQVCLRWLLQQNVAAIPRTMRVERLSENIDVFDFELSDDEMGRIASLANPGGRLTDFGFAPKWD

SEQ ID NO: 9501 - protein, 306 aa, BradyrhizobiumColbertium
MELRTIIRTDVAASAIAHLTLVGLIILISEVHPFQAGAPETVTVDIVTPEQVKQEEAKAEQKEQAKEKPPEPTPDLRLPKLDLTDKSEAAAKQQAAAPSPSPQASPEPQQRQPQPSQLPKQREADVQPQPRQPLTQQPPPQQLQSQPPPQAMPQQQTVPPPAYPLPQPDVTVKYGVMLGLPPELPVEPKGAPKDDGGDAKDSFAAKLPPEIIAELRRHLRSCAKLPAGVAPTDSVHVKLRAVFATDGTLAREPILIEAPPSAKGVAIVKSAMNALQSCQPYKMLPANLYQEWKVIDLPFSPRDFGS

SEQ ID NO: 9502 - protein, 285 aa, BradyrhizobiumColbertium
MPMLNVIFDRMAASCTDSLQPMAGTPCYFSVNGITNDRVGDIIKDYEANAVAAVLYAEQWDSRIIIMLDRDFVFTMVEAMFGSDGAEPPLDVERSFSNIELRLVQTLFEKFAKALQSAFAGTSNVTFRVERVETAMASLAIGRSGNMSICANIMLQALYRGGQMFLIIPHSALNPLRQKLAHVVVSDGRAADPRWREQMESEVQRTVVTLSAVLDEKMVTLEDVVKFKVGQVLELEATPRTLARLESNNQVLFWCQIGQLDGYYAMQVADPIDQKREFVDDILSR

SEQ ID NO: 9503 - protein, 104 aa, BradyrhizobiumColbertium
MISYLVDVVLLIALAFTSMRVTRMHRELARLRSYQGEFSTIVHETAGAFDTVITAAQDSTANLGRLANVLSTKIDQAHDVIAALDARSGPASAAPAGGADLDKH

SEQ ID NO: 9504 - protein, 124 aa, BradyrhizobiumColbertium
MAQSFDYESAPASAESETSPLERLAEIAQRTAEETGKFANVDAILRIPVTMQVVLGSATIPVANLMKLGRGAVVPLDHRVGEPVDVVVNGRIVARGEVVVVEEDNSRFGVSLTEIVGPLGQGDT

SEQ ID NO: 9505 - protein, 346 aa, BradyrhizobiumColbertium
MAAPVGIAPVKQRGVTTLGGTEKVAALLLAMGRQAAASVLQQFEPQEIRIVTKAAAELRPITAQELEGIVEEFAQQFSMGANILGTLGGLEAVLGDVLPADQVSQIMSDLLGNSSRSVWDRVSSVSENSLASYLSKEHPQTAALILSKVKPACAAKVMSQLPASLRNELMRRVLSLKPIVDDAMRIIEKTLHEDLTLNFARNLGADTYARVADIINKMERGHIEDMLKSLSEKRPKSAEVLKELLFTFDDVINLTPKARTMIFDQVPTDRIVVALKGTDKHFRELILSSVASRVRRVVEHELAIGEPSNQRDVLEARRVITDLALDLAEKGEIELNPEQEDELVFR

SEQ ID NO: 9506 - protein, 361 aa, BradyrhizobiumColbertium
MAEKSDQESKTEEPTEKKVRDALEQGKIPVSREASIFASMAALMVIQAFLIGQGVQRLTPTLKSLLDDPEGFPLSTGADAQNLLTVVGLQALRFLVPLVVILAVFGLAASLLQNTPRLVLDRIKPDLARISPVSGWGRLFGTQGMIEFAKSLFKLAAVTAVVAFVLRSSEAKAFEAMYTDPVALPEMILSIAMRIVSAICIATIVLVAIDLAWARFHWRRELRMTKQEIKDEHKQAEGDPLIKARLRSLARDRSRQRMIASASRATLVIANPTHFAIALRYKREENAAPLVVAKGMDVIALKIREVAEQNRIPVIENKALARALYEAVQVDQAIPTEFFRPVAEIIYFLQSKQAPRTEKVQ

SEQ ID NO: 9507 - protein, 133 aa, BradyrhizobiumColbertium
MNQNGAVVGPLYLFELASSQARYLELRQSTIATNVANANTPGFRARDVEPFNKVLDGMPVRLATTSPSHMQLSATETDTRKTAKRDSWEVVHSGNSVSLEQEMIKGSDVSRDYSMNSAIVRSFHRMVLSSAKA

SEQ ID NO: 9508 - protein, 138 aa, BradyrhizobiumColbertium
MLDSLQASLTVASSGLEAQSTRMRIVSENLANATSTGRTAGADPYQRKTITFDAAMDRASGAQLAKVKEIGVDTTPYRVEYDPGHPAADKAGYVKLPNVNMMIEMADMREVNRSYEANLQVVKQVRSMLGMTIDLLRS

SEQ ID NO: 9509 - protein, 109 aa, BradyrhizobiumColbertium
MLEAISSTAISAGQAASRATETQVAAPAATTAIQTGDEVGFESVMKQVTNDAIGTLKAGEAASISAMQGKESTRRVVEALMSAEQALQTAVAVRDKVVQAYQEVVRMSI

SEQ ID NO: 9510 - protein, 262 aa, BradyrhizobiumColbertium
MKSLAIAATGMNAQQTNIEVIANNIANINSTSYKRARAEFTDLFYQMDRMQGVANVNGSSPIPEGSNLGLGVKSAAIRKLHIQGALTQTGNPYDLAINGRGWFQVLGPNNEVQYTRAGSFNTNANAQLVTIDGYLLDPTITVPQGTVEVTVNATGQVFAKLDTEINPRQIGQLNLANFANEAGLEPLGGNLYRETTASGTPVVGLPGDAGYGKINQKYLEASNVDPVKEITELISAQRAYEMNAKVIQASDEMAQTVSKGMR

SEQ ID NO: 9511 - protein, 154 aa, BradyrhizobiumColbertium
MGLIMRGLAAVLLVLGATRAAAAEEKRLPVPAVSIRAGELIREEMITERAFAPTLLGVAMFIEGRQVLIGRMARRALLPGQPIPTNAVEDPWTVARGATVKVVVEDSGLSIVTYGSAMQSGAAGALIPVRNTDTGVIIRGVVQPDGTVKVVDGS

SEQ ID NO: 9512 - protein, 376 aa, BradyrhizobiumColbertium
MTRLLLALVLLVSAASAQAAVRIKDIADIKGLRENQIVGYGLVIGLNGTGDTLRNAPFTEQSLQSMLENMGINVRNEATSTNAPLRPTTLRTRNVAAVMVTADLPPSIGPGERMDVTVSSLGDATSLLGGTLVMTSLRAADGAVYAVAQGAITVAGYSVGGQAQNVSQGTPTAGRIPNGALVEREVPGSLHEMEFLVLQLKNPDFVTATRILDAINRYAGGRYRAQIAFERDYRTIVLSKPRHIGPVRFLAEIGELAVEPDTPARVVINERTGTVVIGRDVRISTVAVTHGNLTVRVTEMPVVSQPAPFSRGQTVVVPQTMVEANEAGAQVAILSGVDLQRLVRGLNQIGLKPSGIIAILQAIKTAGALQADVIVQ

SEQ ID NO: 9513 - protein, 254 aa, BradyrhizobiumColbertium
MLKLDHKAKLLLMAAASVLASASPVLALEEAKPTKPLNLLSFARARVVRSQKPQLPASTITSDNASVRATAWAAEELGPAVTGAVPETPAAAPAPAPVRPAKPGSVTAPPKPAAAQAAPAPDNDIALFCSNVADPAVDARLAWQLKELEKAENLLRERIAEVEAKRAEYEKWMALRDDFLKKAEASVIEIYSRMKPEAAATQIAGMSDETAAAVLAKLSPRNSSAIFNEMDTARAAHLADLLGGMRRVDDGKPK

SEQ ID NO: 9514 - protein, 235 aa, BradyrhizobiumColbertium
MNKPVLILLHLLASVVLAGCFHDPAEVLIGPQMSPVGSGLRTPADPIPVTPRMRTPVSYRSTWDDGTDLFRDPRARRTGDVVTVIISMQDKAKLDNKTGRSRDSQVKFGLDWLMDVAGWNDTGSANANLSTNTQIKGNGQIDRTEDIKLSIAAIVTDVLPNGNMMISGSQEFRVNTEMRVLNVGGIVRPRDISRANTITYDKIAEARVSYGGRGKLSDVQQPGWGHRIYDAVAPF

SEQ ID NO: 9515 - protein, 148 aa, BradyrhizobiumColbertium
MRLIASILVLTLIAIGAGAVAGLHLIATAERVAADAKKSAAPPPIASSYAGSARLRKLSPIVTNLAAPANNWARIEASMVTDSMSDEDAGILAAHISEDIVTYLRSTTVAQFEGSRGLQHLRDDLTERANIRSAGKVRELIIETLVIQ

SEQ ID NO: 9516 - protein, 244 aa, BradyrhizobiumColbertium
MKILLLALILVVLPEAASAQIPDLNSLLPPGNGSTSGRIIQLMALITVLSVAPGLLIMVTSFTRFAVALSFLRAGLGLQTTPANLVLISLALFMTFYVMAPTFDKAWESGVQPLMKNEISEEQAYLKITDPFREFMLAHVRDKDLQTFEALAAESFRKKFDDKRVDLRVIIPAFMISELRRSFEIGFLIILPFLVIDMIVATLTMSMGMMMMPPTILALPFKMLFFVLIDGWNLLASGLVRSFN

SEQ ID NO: 9517 - protein, 302 aa, BradyrhizobiumColbertium
MSSLLTNSTAMTALQTLRSVSSQLSTTQNRISTGQRVATASDNAAYWSIATSMRADNAALSAVSDSLGLSAATVDTEYTALTSVIGDKESGLTKLQALLVEAKTAGIDRTKIQADITQIQQDMKLKADSATFNGINWLSTTTGTTPTSFSLVSSYSRVGGTPTIGSITVTTANYTLYSTTQTGILDTVSGSASVDTINISALTDSAADQATLDGYIAQVTTAINSVSSAAANLGAVKNRISTNTNFVKSLMDSVDRGVGQLVDADMNAESTRLAALQVQQQLGVQALSIANNSSQSILSLFR

SEQ ID NO: 9518 - protein, 304 aa, BradyrhizobiumColbertium
MGSSLLTNSSAMTALQTLRSVSAQLATTQNRISTGQRVATASDNAAYWSIATSMRSDNAALSAVSDSLGLSAATVDTEYTALTSVIGDKESGLTKLQALLVEAKTAGIDRTKIQADITQIQQDMKLKADSATFNGINWLSTTTGTTPTSFNLVSSYSRVGGTPTIGSITVTTANYTLYSTTQTGILDTVSGSASVDTINISALTDSAADQTTLDAYIAQVTAAINSVSSAAADLGAVKNRISTNSEFVKTLMDSVDRGVGQLVDADMNAESTRLQALQTQQQLGVQALSIANQNSQSILSLFRG

SEQ ID NO: 9519 - protein, 44 aa, BradyrhizobiumColbertium
MIGGRSTGRASNQPPLREFMHYTAAERVMRPSAAFGCETYCVAQ

SEQ ID NO: 9520 - protein, 541 aa, BradyrhizobiumColbertium
MLSRAQVQQLLNNLLELGPRRLMALGLIGFAVLVTVVGGTYYLSRPEFETLYTGLTREDVTRIGAALREQNIAFDVNAAGDAVSVRPSQTMQARMLLAEKGLPTSANSGYELFDKIGSLGLTSFMQEVTKLRALEGEIARTVQLMKGVKAARVHIVLPVRGSFRATQQPPSASVVLRTDSAIEARTAQSIRHLVAAAVPGMSRDKVTVLDADGSMLLAEEDEASAAPSKMASLQKTVSGMVQENIRKALTPYLGLDNFEVSVAPQLSTDKRQINETVYDPENRAERSVRAVREKESSQNADRSTPTTVQQNLPDQQVNAGGGKNSSEDKTRREDVTNFEVSSKTTTTVSDGYSVKKLFIAVLVNRARLVADLGDKSNQAIVDSKLAEISQLAATAGGLDKTRGDQIQVTAVDFIEGSRELAPVPPISFVEMINKQLGSVINAVTILAVASMLVWFGLRPAVNGILTHRAEQEQVEAAEVAQLEAAAASALPEGEETELNLVEDLEGKMQRTPQKRLEQIVRLDQMQAAAILKDWMRREEAA

SEQ ID NO: 9521 - protein, 232 aa, BradyrhizobiumColbertium
MNAAIGKLLTQFDANGRVKSPPPPPPKIQDVLTRQKEARREPPPRSHAQAEPQPQPQASPAPPATEAPSVNLLDDAYRRGHAAGVAESDAKLAEERVRSAIRLGEERAKWSDQQAVAIVSGFEAACREIETNIASSVARILLPFLTDAVRDKAIGSLVEQIAALTGNSSVPAFKVTGRSDLLDLVKTQLEASRRTGIVYEAAETLEVRVVADQTVIETQISAWSERLKEARR

SEQ ID NO: 9522 - protein, 437 aa, BradyrhizobiumColbertium
MEEVKHEIVIVRRRSAFAEEAHHGGVWKIAYADFMTAMMAFFLVMWLLNALNQDQKQVVASYFNPIKLAENAPAPKGLKDLSKKEPSSFEGQDGKRQPAGPNEERRGDSPTAEKPASYEEKVLFRDPYATLAEIASSANQSSGQRRAGALTSAEEEGLKGGDAYRDPFDPGYWRLAPQASKDADRFIESEPRPNASARDVSVAAQSEPPAHRAKVDETGGSMAPNADIPSASLSPLLPPGPAPTQSSREGSAAQAGVQANTAAQARSNDTAKESEPHDAAQAQQPTLKHLQSAIADALSDIKAGAGPAAEVRQVEEGLLISLTDDASFGMFAVGSAEPRPELIRVIDKIGPLLTKRQGMVIVRGHTDNRPYRSETYDNWRLSTARAQMAYYMLVRSGVDARRIEHIEGYADRRPKLPNDPAAAQNRRIEILIREKRP

SEQ ID NO: 9523 - protein, 391 aa, BradyrhizobiumColbertium
MIRLLRHAALLLLFTAANAFAQSVPRLDEPYELVRALQAVQDGISNGDTAAHNSHIALIRQIGDKFLAADPGVWSNPQNGQAVVIYLLSGGAPQLVRKLPRDKMKVDERLLNGALAYVEGRQEEARELLKDIKPRTIPSGLGGQVALVQGALFARAEASFAIERLDEARLLLPGTLVEEAALRREILLVGQAEDFEKFEFLTLAYIRHYRNSIYAGDFWQRFSTGLTQSNLALDERRFARIAALLEQIDRASRLTLYLVIARAAMVRGRLPVTRLAGERALTLSADASVERERAHFFRGASRVLTDEYDGGLAELKALDRAKLPERDVPLLNATVQLALDVRKPFASGSAAAADKPPATPARLDLASSTGMLARAQKQLGELELLTRDRRP

SEQ ID NO: 9524 - protein, 448 aa, BradyrhizobiumColbertium
MTKLSGTSGQLFSALAESLNVRETSRSAKGSGVKSQASSSFNDLLHTVSNLAKQALGDDGGDTTASAGALRTHLAHPAEQAKKATALHERIAASERPESPEDSSEKKADGSSERPLPVDHATGTDIQGQSSTVAVLGQEVAAAPAVKTQMALQSTDKDAPARDERSGAAKRDPLTTGAAKTAPSDSTPPSTAATAARSQAAVSQTMAPQPASTQGGESSSTMPASPGFEAVTANVERAAKTSARAALPETTKLTVVQQETHLPPAQFNAPQQVANAAVTELKESSGPTMAAAPDLAASQTNAPDQPLKILTVNLEPPALGNVTLRLRLVGTEVSVQLAAERKDTSQLLDRQRDQIRDLMQSAGYVADVAPVQHGSLDAFQSGSGQSQPQLAGQHQSSPQSQGTFGGTGTSSGQSDGGAKQARQERQFSQETRHDQDVAPHLRRGPVYL

SEQ ID NO: 9525 - protein, 193 aa, BradyrhizobiumColbertium
MIRTWRRIFVAALFISNAGAAQAAAETARPCEREMARAARQHGIPLGILYAVGLTETGRRGALHPYALGAAGQTVFAKDVDDAIANFDAMRSKGIKLIDLGCMQINHYYHGDKFASVRAMFDPARNVEYAARFLKELKQREGSWTMAVARYNAGPNNQPAQKRYVCHIVAHLVSSGFGAWTDKARSLCQPRTT

SEQ ID NO: 9526 - protein, 410 aa, BradyrhizobiumColbertium
MSLYGVMRTGVSGMNAQSNKLSTVSDNIANVNTTGYKRASTEFSSLILKSGSGNYDSGAVETTIRYAISDPGHTQFTTSSTDLAVQGNGFFVVSNANNTQQFLTRAGSFVPDSQGNLVNAAGYYLLGQPGLVTNFSQNSLAGMQIVNIAQIPQVPVPSTTATLTTGNLDPEAAIIAGPPSPASYSSKSSIVAYNNIGQAVTLDVYMSHTATAAGSDTWQIEVYDSATGTSLGAATTFTFDTTAAGRGALAAASPTGLTVTVPGGAALTMDLSNMTQVGTDFSFKATVNGSVPAAIDKVDVDDAGHVTAILKNGQQLTLYTIMLADVASPDNLTPEPGNVYSTNLNSGNAQAGNAGTGGLGTIQSGALEASNVDLADELTGMIEAQRGFTANSKSFQTGADLLDVVVNLKR

SEQ ID NO: 9527 - protein, 491 aa, BradyrhizobiumColbertium
MSLTAALNSARSSLMASSIQSSVISRNIAGASATGYSRKLTELDNLPGAGVYVAAIQRAASSGLYDNVLVATSSSAKQSAIYDGLQRIAAATVDDPELEQSPTAQLNALKQALQKYANAPDNTTLAQAAVASAKDMASALNQATKTVQSVRESADADMRTSVQNINQLLSQFDAVNTAIVKGTISGDDITDYLDQRDNIVSQLSQEVGVTMSIRPNGDAALYADSGVVLFDKTARTVSFAPTNAYTAATTGNAVYIDGVPVTGANSVMPLKSGKLAGLAQLRDQDAVTYQSQLDEIARGLINTFRESDQTAAALPDVPGLFTYPGAPAMPASATVSVGLAGTISVAASVDPALGGNPNLLRDGAISGNPAYQYNTAGDGGYSARLQQLIGDMDASQPFDATTQGKPSGSLIDFASSSASWIENQRKTANDNSEYQSTLLNRSITALSNVNGVNMDDEMALMLQVERTYSASSKIISTVDEMLQSLLAAVGN

SEQ ID NO: 9528 - protein, 348 aa, BradyrhizobiumColbertium
MMSANYVSTLMLSSSLRYSITGNQAALSRASMEATTGRFYDVGLELGATTGSDLTLRADWSFADQLVDTNGLVAGRLDVTQNRITQLSETATDFLKDLIAARSTDGGGRVILPPAASNLQDLIGALNVSYNGSYLFSGINTQNAPITPYTAGSASKNQVDADFLAAFGFSQSSPGVGTITPAQMQTFLDTTFDAEFASPAWNTNWSSATDQTMQSRISTTEITDTSVSANQIGFRRLAEAYTMMADLGNVSLSQETFQVVVDKAIGLVGNAINDLAALGGAVGTVQQRITTATAKLKTQQDILNNQIVGMEKVDPTEASVRVNTLQTQIQTALALTSQLQKISLINYL

SEQ ID NO: 9529 - protein, 114 aa, BradyrhizobiumColbertium
MTFEAYEAVVDDSAYEARSRERQALSLGIGRLERIQKDRFSVEDLVESLLYVRRLWTIFIEDLAHPENALPEKLRADIISIGLWVVKEADRLREQRSNDVEQLIEINRLIRDAL

SEQ ID NO: 9530 - protein, 136 aa, BradyrhizobiumColbertium
MKISLRAGERIYVNGAVLRVDRKVSVELVNDVMFLLEGQVMQASDATTALRQLYFIVQLMLMNPTDVRDAATLYAQHLAALFAVCENREMLDGLGAVDELVTATRYFEALKRIRALFPVEQAILAGSATVSPFEAA

SEQ ID NO: 9531 - protein, 137 aa, BradyrhizobiumColbertium
MNVTSATEKSSSSNGTTSATSSNSVDYNTFLQLLIAQMKNQDPTNPMDTAQYMSQFAQLSTVEQAMQTNAKLDALLSSQSLSQANGLIGKTVSFTDSTGASFSGKVVSVSINSDGSIATLADGTKVAVGPGLTISQS

SEQ ID NO: 9532 - protein, 88 aa, BradyrhizobiumColbertium
MNERDALDIVQAAIWTIIVASGPAVGAAMLVGTVIALIQALTQIQEVTLTFVPKIIVILLVVAISGSFIGAHLSTFTELVYSRIERGF

SEQ ID NO: 9533 - protein, 693 aa, BradyrhizobiumColbertium
MADTLAASLPSPRRLGADAFFAGGIVAMLTILFLPIPPILIDLGLAFSIALSALILMVALWIQRPLDFSAFPTVLLIATILRLALNIATTRLILSRGGEGEHAAGHVVAGFSKFVMGGDFVIGLIIFAILVTVNFVVITKGATRIAEVGARFTLDAIPGKQMAIDADLSAGLIDDKEAQRRRRELEEESAFFGAMDGASKFVRGDAIAGLLITAINIFGGIVIGVTHHGLTLSRAADVYTKLSVGDGLVSQMPALIVSLSAGLLVSKGGTRGSAEQAVLRQLGGYPRAVSAAALMMFVLALMPGLPMAPFVLLGGVMAFVGYSLPKRQAALKQKEDARKADERAQAEAKESVKEQLKTAEIELALGGHLSVHLLGSRTELAHRVAKIRKKFAKQYGFVIPEIKLTDNLSIDPKCYQIRIHDTRVAHGELRLGEVLVLVDKDGKPDVPGDEVIEPAFGMKALWVTEAFTDEVKRQGCKPVDNLSVLLTHLSEVIRANLAQLLSYKDMRALLDRLDPEYKRLVEDLCPSQISYSGLLAILKILLAERVSIRNLHLILEAIAEIAPHVRRSEQVAEHVRTRLAQQICGDLSDNGVLNVLRLGNRWDLAFHQSLKRDAKGDVIEFDADPRLIEQFATEASTAIRKFTEIGTSVVLAVTPEARPYVRMILERVFPTLPILSHVEVARSAEIRALGAIS

SEQ ID NO: 9534 - protein, 151 aa, BradyrhizobiumColbertium
MGDACALNTAIVLVPCVASVMDLDRLRVAADQSSTLRTLLTRHGLAVYAQVQQTAGCNASHPVESRLSRCLLQTHDLSGDSRLLLTQETMAQMIGARRNSVSLAANSLQQANVIHYSRGHIQITNLDGLRQTACECYASVKGQYDRLVRVS

SEQ ID NO: 9535 - protein, 136 aa, BradyrhizobiumColbertium
MIKAGKPMFEATAAPAQKAPDADPAREPGAYEALVREIGEDGACEVREVFWSETCARMQLFRTLSLAQHHARIAREAHSLKSAAGTFGYVRLAALALQLEKTAGDLGEAEFRALLDLMEAAYAAARAQEPEGPIPS

SEQ ID NO: 9536 - protein, 82 aa, BradyrhizobiumColbertium
MFTYETADQKEVRRFRIAQFNGRMATVKAGESTVTGFVRSVLEQESSVPPRWTITIIPNAPKEQIKPLRPASRARPFAEDYF

SEQ ID NO: 9537 - protein, 207 aa, BradyrhizobiumColbertium
MGSRNDTATDSRSSEWHEDSAASADEPDLVRLSAVRAKAADEMAAAIARELNGPLTALLLYMGEIKHHSDQLAPVTGDRAYLQRVVENALAQTERVCGLVKQLAGPHKGGLPVASSTEEAESKVTRVLQPQRLPGAEPLGPSGQKRLTKREREVLRLISEGYSNKQGALRMQISPRTFESHRAEAMRKLGARNTADLVRAALLHSID

SEQ ID NO: 9538 - protein, 387 aa, BradyrhizobiumColbertium
MNEIDRLSEFLQRLTPLSRSCLLSELERLELCGIDMPGSAEIQSRLRAEFRNDGSTQARATNPSRNFFAPLELLLIDGAPEHANMGRISRNTLTPIWEWICRDLLPTMARDYIKAINDQVAANNPKEVQKIASTFQTKVVKVLENTLTSPESTESARAKLAQYTASRTAFDDVVKMLHVLRAGDALPKFNEKLPEKIAKFDDGQVAQITAQLDAFKKAHPEALPFALALVARRVKPFWQLARLATKAAAGKAAADVAATPYACVVHMVLDRLDDKRLALRVALRNNRVLVARDLLAEIYDTEYALKVRIDGFEHCEWGVRLQQLMDAIAALVSAEVSRFPDNVGHILGSRRLRSHDTLGGKLTYLAWKGRDAMQDGAAAFRKLIGQT

SEQ ID NO: 9539 - protein, 51 aa, BradyrhizobiumColbertium
MALAVGHAGARRHLSPSEGHRPPSDEFTHPIAHPTPLPFRDGFLNAERGFK

SEQ ID NO: 9540 - protein, 378 aa, BradyrhizobiumColbertium
MADSKRHLRAFLSEVLEDLGFVTCECASADELQTVLATELPDLILLGVAADGIEPGRFLEVLVREGFGGRVLAVGARDSIIVKAVRQVGEEYGLAMLPPLTTPFAAETLRERVAMLLPDEPAPSPAVHVGEALHAGWLELWYQPKIDARTLVRSGAEALVRMRHPTWGVVPPAYFIPEPHDPHFRELSEFVVDRAVRDWHYLLEQQSPVNLSINLPASYLREPQAVRDLCRRVPTHPAFGGLTVEIDSEEAIRELDLLTEVAREVGLHNIGLSIDNLGANWPSLMELDRIPFVKLKADRQFVTGSGGDRLKRTVCRHIVELAQGFGARAVAQGVESRADLVAANELGFDLVQGFLFGKPMPLKKFARSALTRTVMGQQ

SEQ ID NO: 9541 - protein, 286 aa, BradyrhizobiumColbertium
MHSSASGWGNGLLGVIIFSGSLPATRVAVGGFSALFLTSARAVIAALIGAAVLGLLHQARPARQDLASLVIVAIGVVVGFPLLTALALQHITSAHSIVFIGLLPLATAIFGVLRGGERPKPLFWLFAVLGSATVAGFAFSSDGSASLTGDLLMVAAIVLCGLGYAEGAALSRRLGGWQVISWALLLALPPMLALAIWTWPSDWSGVGAPAWIGLAYVSVFSMFVGFIFWYRGLAAGGIARVGQLQQLQPFFGLALAGFLLGEPVAASMVAATALVVVCVFLARRYA

SEQ ID NO: 9542 - protein, 573 aa, BradyrhizobiumColbertium
MGAKIDKQRLPSRHVTEGPARAPHRSYFYAMGLTTEQIHQPFVGVASCWNEAAPCNIALMRQAQAVKKGVASAGGTPREFCTITVTDGIAMGHDGMRSSLPSRECIADSVELTVRGHAYDALVGLAGCDKSLPGMMMAMVRLNVPSIFIYGGSILPGNFRGQQVTVQDMFEAVGKHSVGAMSDEDLDEIERVACPSAGACGAQFTANTMATVSEAIGLALPYSAGAPAPYEIRDAFCMTAGEKVMDLIASNIRPRDIVTLKALENAAAVVAASGGSTNAALHLPAIAHEAGIKFDLFDVAEIFKKTPYVADLKPGGRYVAKDMFEVGGIPLLMKTLLDNGFLHGDCLTVTGRTIAENLKSVKWNPHQDVVHPADKPITVTGGVVGLKGNLAPEGAIVKVAGMSNLRFTGPARCFDREEDAFEAVQKRTYREGEVIVIRYEGPKGGPGMREMLQTTAALTGQGMGGKIALITDGRFSGATRGFCIGHVGPEAAVGGPIGLLEDGDIIEIDAVAGTLNVKLSDAELAQRKTKWSARATNHTSGALWKYAQQVGPAVGGAVTHPGGAHEKQCYADI

SEQ ID NO: 9543 - protein, 262 aa, BradyrhizobiumColbertium
MLGAAALAAPALAFDGAPVNPKDAAIPVVTNLPGTATTLRGKVAPVTQETSLSALQYAAEGGHPIAQWKLGRMYANGDGVAQDDLRAFEYFSRIANAHAEDSPSAPQAQIVANAFVALGRYYLAGIPNSKVKADPDRAREMFSYAASYFGNADAQYDLARLYLKTPDASREDFRYGARWLGLAAQKGQHQAQALLGQMLFNGDRLPRQAARGLMWLTLARDSAGPDEVWIKESYNRAFAKASDDDRAMCLQMLEQWVQGRRE

SEQ ID NO: 9544 - protein, 265 aa, BradyrhizobiumColbertium
MSIRVATWNVNSVRQRIDLLLTWLKECQPDIVCLQEIKCVDEAFPRLEIEALGYNVVTHGQKTFNGVALLSKLRFDETKSGLAGDEEDTHARFLEGVVTLKRGVLRIACLYLPNGNPVGTEKYPYKLKWMSRLLEYSKERLKAEEPLILAGDFNVIPHARDVHNPAAWTEDALFKTETRESFQSLLGLGLTDALRAVTDEPGLYTFWDYQAGAWQKNQGLRIDHLLLSPQASDRLANVGIDSYVRGWEKPSDHVPVWADLDLEAA

SEQ ID NO: 9545 - protein, 769 aa, BradyrhizobiumColbertium
MKRIEPRDGLIGAFLYWLGGFEIEDGLIADLSERQVRRIRAKQIDAVTRLIPVTMAVTMLNVAIVLIMFWGRGWNDFLAIWGLTLAATASLAVRSWRRSHQNPPQEASTRAGRQMLRQAFFLAAIWGALPLALFSRIEPTGQLILACLMVGMMSGGAFTLSTFPRAGLVYLATMTVACAGALLLCGTGPYLVTSVFLLLFAFFMARNIVSQGNLFLGNLKAQLELERQTEIISLLLKDFQENASDWLWQTDADGHLVDVPQRFADVAQLPLPLLKGSHFADVLDMLCPEDKRAAYNVVGLMEQNEPLHEMNLTVVAGGEARLWSLTAKPAYDRDGQFLGYRGFGRDVTERWRAEKAEAESRAKSDFLAVMSHEIRTPMNGVLGLASMLLETTLDPEQREAVATIRDSGDNLQRILNDILDLSKLEAGRFTFEAIDFAPQALVEAVATVVRAGAKSRGLTVNVELDPNLPPTLRGDVARIRQVLLNLASNAVKFTDEGEVTISVTCQARRDLLATVEWTVTDSGIGIAPEKLGQLFSDFAQADASISRRFGGTGLGLAISRRIIEQMGGTIGVTSTPGEGSSFRFTLVLPWSQVPVSDQATGRDEAEELKARIATLDRPLKVLVAEDDAVNRMVVSKMLGAFEVELRVVTDGVEAVAAASESDYDVVLMDVRMPDMDGLAATRAIRAQGGSCKALPIIALTANAFSEDVKICREAGMSDFLAKPLRKPALVAALLRALDGYTMSEDAPLQPELAPIEVEWTEEERQITGA

SEQ ID NO: 9546 - protein, 109 aa, BradyrhizobiumColbertium
MTTAVTISDRAARRIGEILKGEGSGAMLRISVEGGGCSGFQYKFDIDRARTDDDLVIEQDSAVVLVDSASQPFLAGSQVDFVDDLIGASFRVNNPNATASCGCGTSFSV

SEQ ID NO: 9547 - protein, 59 aa, BradyrhizobiumColbertium
MDDPVAIPPERAAGPARGLGDQPASAAIGVAGIGRAGGCHSDGHDEFSPYPFDSAYPCT

SEQ ID NO: 9548 - protein, 346 aa, BradyrhizobiumColbertium
MFVFHEGDHYRTRLTHSLEVAQIARALARQLGLDEDLTETLALAHDLGHPPFGHAGERALDACLREFGGFDHNAQTLRVVASLEHRYPEFDGLNLTWEALEGIVKHNGPLTDRSGAPAGRYREHGIPVGIADYIKTYDLELWSFASLEAQVAAIADDIAYDAHDIDDGLRAGLFNLDDLKVMPLTAEIIAETSAHYPDLEDVRRGAELVRELISHLIGAVFTEAQRNLAALKPQSAQDVRQQSRALIAFPAEVAEEEAAIKGFLYQHMYRHERVMRVMGQAEQILFDLFARYLKEPSELPPEWLLGAEADNEGDRARRIGNFIAGMTDRFALTEHQRLFDSTPDLR

SEQ ID NO: 9549 - protein, 596 aa, BradyrhizobiumColbertium
MPQTSSSLHLFADVLARVHAACRALAAEANWPEGIDFSRVVVEPPRDASHGDMATNAAMVLAKEAKAKPRDLAENIAERLRADTLIAKVDVAGPGFINLTLKPAAWAEALRTVLREGADYGRVRGGARVNVEYVSANPTGPMHVGHCRGAVFGDALASLLQFAGHDVTREYYINDAGAQVDVLARSAFLRYREALGENIGAIPEGLYPGDYLKPVGAALAKEHGDKLLAKSEAEWLPTVRAKAIGMMMDEIKDDLAALNIRHDVFFSERSLIETGNNKVAETIDFLKAKGDIYEGRLPPPKGAPVEDWEDREQLLFKATAYGDDVDRPLIKSDNSYTYFASDIAYHKNKFDRGFAEMIDVWGADHGGYIKRMQAAVKATTSGRGALDVKIVQLVKLLRNGEPVKMSKRSGDFVTLREVVDEVGQDAVRFMMLYRKNDAVLDFDLAKVMEQSRDNPVFYVQYGHARGHSIFRNARAEVFPELPEDTGTRIAWLGESAVERLSDPVELELLKRLAIYPRVLEAAAAAHEPHRIAFYLYDLASEFHALWTKGRDLPYLRFIINNDADLTKARLAMVQGVVSVLASGLAILGVHAPDEMR

SEQ ID NO: 9550 - protein, 547 aa, BradyrhizobiumColbertium
MKALWVESRALVEGRAAFPKGRIITMAERYQDRPFPSDDYGRGGDQYGKAESDPLAELARLIGQTDPFAAQGRPAARSPAAPTQSYGEDGYRQHDDRQDYAEQASPPGPPSWMRRANVQPQPAPAPEPDYPVSVSPVHPLHRYSARSAAPEPVHQPQAYQDHGQENQSYQDQSYQDQAYQQHRPSYQEQSYQEPYAPDPSRYDDALYGRLETGEQDYQRDPSYPDDPYAFQSDYPEAELDEPKKQRGGMMTVAAILALAVVGTGAAFAYKTYIGSPRSGEPPIIRADNAPTKIVPAPSDSSAKVPDRMVSGDGTEKIVPREEAPVDVNAKAGGPRVVFPPLNQNANPPSVASVSPSAIPAPSSGAVPSNGTLPSNSPRPIRTVAVKGDQTDSAPPQSAAVKPTPAAPKPVAAPAVPATPRNPPTSANASVHQPMSLAPQPAAEPSQRMAATSPTPLAPASSGGGYIVQVSSQQSEDSAAASYRVLQSKYGNVLGSRSPVIKRVDLTDKGKGIVYRAFAGPYASAEEATQACNSLRAAGLSACFVQRN

SEQ ID NO: 9551 - protein, 342 aa, BradyrhizobiumColbertium
MSTRAFITGVSGTELTAAEREFIRDQRPWGFILFKRNVATPTQVAALVAELRFVANAPDAPVLIDQEGGRVQRLGPPHWPVYPAGATFAALYDTDSALGLTAARLSARLIAADLADLGITVDCLPLADVPVPGADAVIGNRAYGTEPGKVAAIARAVTEGLEQGGVLPVLKHIPGHGRATADTHFKLPTVDTPRAELERTDFAAFKPLADLPMAMTAHVVFSAVDPAHPATTSATMIADVIRGAIGFQGLLMSDDVSMNALSGNIAERTRAIFAAGCDVALHCNGNIEEMRDVAGQAPELSGRALERANAALAARKPPQPFDRAAARAELDALIARANTASA

SEQ ID NO: 9552 - protein, 279 aa, BradyrhizobiumColbertium
MTAEILSFETGRPAELAEGEPALVVDVEGYEGPLDLLLALARQQKVDLAKISILALADQYLHFIEAARKIRLELAADYLVMAAWLAFLKSRLLLPEPPSAEGPSAEQMATALANRLRRLEAIREAANRLMNRPQLQRDIFPRGEPEQIAEIKHPKYTAKLYDLLTAYAAQRQSRVLASVHLAKRTVWSLAEARATLERLVGSLNEQDDWGVLDDFLIRHVADPTQRATVFASSFAAALELVREGQLELNQKEAFAPIYFRKGRQKPVLDAAPAPDAPVA

SEQ ID NO: 9553 - protein, 257 aa, BradyrhizobiumColbertium
MASLAEVRVEEAEPMENESQARPEELRLLEALLFASSEPLDTATLAKRMPEGVDVKAALEQLQADYALRGVNLVRVANKWTFRTAGDLAWLMTRESTETRRLSRAAIEVLAIIAYHQPVTRAEIEEIRGVVTSKGTLDVLLETGWIKPRGRRKTPGRPLTFGTTEEFLSQFTLEQLGDLPGLEELKGTGLLDSRLPTGFSVPTPSDDPALREDEDPLEPGDLDLALAPAVEPETSQEPPASGDEGAGEGSSEGGTNE

SEQ ID NO: 9554 - protein, 77 aa, BradyrhizobiumColbertium
MGSLSIWHWILVIAVVLLLFGRGKISDLMGDVAQGIKAFKKGMQDDDKPADKPEPAKSIEHNGAPTASRSDVGSKAV

SEQ ID NO: 9555 - protein, 167 aa, BradyrhizobiumColbertium
MFDIGWSELVLVGVVALIAIGPKELPGVLRMVGQWMGKARKMAAEFQGQFQEAMREAEMADLKKSFDEVKEAATGFTSNNPLTSLQKDVSDALRVDALDKPAETSTTTAVDPPSTPTTPEAPTPATFMEAEAHAAANEPLAITREVEQAAVAQDTAPSEAIKDAKAS

SEQ ID NO: 9556 - protein, 270 aa, BradyrhizobiumColbertium
MTDADIEASKAPLMDHLIELRSRLIKALLGFGIAFIFCFFFAKQIYNVLVWPFVWVAGPENSKFIYTALLEYFITQLKLALFGAGFISFPIVATQIYKFVAPGLYKHEKQAFLPYLVATPFFFVLGAALVYFVVLPMLVRFSLGMQQTGSDETAQIQLLPKVGEYLSLMMSLIFAFGIAFQLPVILTLLGRIGIVSSTMLREKRRYFIVLAFVIAAVLTPPDVLSQCSLAFPLMALYEGSILAVAMVERKAAAAQAATGTDVSTPANPAE

SEQ ID NO: 9557 - protein, 443 aa, BradyrhizobiumColbertium
MHDIKSIRDNPQAFDAGLARRGLKPMSASLLAIDEKRRAAILASEQAQARRNAASKEIGDAKKAKDEARAAKLMAEVAELKTTMPQLEAAAKAADEELAKELSAIPNIPFDDVPDGVDEHGNVQHHVFGKKRNYSFAPKLHDDLGAALGYMDFEAAAKLSGARFVVLKKALARLERAIGQFMLDLHTTEHGYTEINPPLLVRNEVMFGTGQLPKFEDDQFWAIKGELLASPDHERLKTERLGLIPTAEVSLTNLARESILDEKQLPMRLTALTPCFRAEAGAAGRDTRGMIRQHQFTKVELVSITTPETSKDELERMLSCAEQVLQRLGLHYRVMTLCAGDMGFSSQKTYDIEVWMPGQGDGGMFREISSCSVCGDFQARRMDARSRGPDGKPRFVHTLNGSGTAVGRALIAVMETYQQEDGSIAVPDVLQPYMGGLKVVARE

SEQ ID NO: 9558 - protein, 120 aa, BradyrhizobiumColbertium
MPLHRDIFWVGRQWAVTGAGIQAIDQRLRGVLDIAIARLWDDDLVQSRRAKPGVNAADFDKALTVARERFPKAPVSGPVVAQRGTLGAIETPVVSPVVPAMSLRAEGRLARFLPQWRIRR

SEQ ID NO: 9559 - protein, 130 aa, BradyrhizobiumColbertium
MRILCTNDDGIHAPGLKVVEEIARALSDDVWVVAPELDQSGVSHSLSLNDPLRLREVGPRHFAVRGTPTDCVIMGARHILGAKLPDVVLSGVNKGSQRGRGRGLFRHHCWRAGGHHPGAAVVCVVARVQR

SEQ ID NO: 9560 - protein, 132 aa, BradyrhizobiumColbertium
MSQEFSVETRDRPPWDTARKFGPDIVRKVIAAGVPKDTVINVNFPSCAPEDVLGVRVTRQGKRNLGFLRIDERRDGRGNPYFWIGFERTAMLDTPDAGTDLAALRERYVSVTPLRLDRTNEAFSEQLSATLK

SEQ ID NO: 9561 - protein, 129 aa, BradyrhizobiumColbertium
MGKDSPMTATGLSGRSVFLVEDEVMIRMMVADMLEELGYKVAAEAGDIAEAMRLAQTTDFDLAILDVNVNGKVISPVADVIMAKGCPFIFATGYGSSGLPEQYRDRPALQKPFQLDALGKTIEAALRGG

SEQ ID NO: 9562 - protein, 205 aa, BradyrhizobiumColbertium
MFQLTLRRRGISDQAVLRTMEEVPRELFVDEADRDGAYRDSALPIACGQTISQPFVVAYMTEQLQLQKQHRVLEIGTGSGYQAAVLSRLAGQVLTVERYRKLADTARARLEKLDCHNVEVMLGDGLNLPPNIGPFDRIIVTAAMDQIPENLVERLEVGGILIAPVGPHQGVQTLTRLTRTDTGIERKELVEVRFVPALPGVAREL

SEQ ID NO: 9563 - protein, 454 aa, BradyrhizobiumColbertium
MSAVAELLYSRRVPQVAVLALISFSFAGCSADMSSRLSQSNFSNPFASESTGSVQQAPPPQRELPQYARPQTQPGYHQSQPLPAPAVAAPQSYPVSSGGGVSGGGRGVSSYAPPAQPHLETTATVPPRSVAAAQPAGGTKIIVGTSDTLDVLAKRYRVTPQAILAANGYKGPRALSPGQQLIIPHPATAPAAAPVTAAAATKPVAAVAAPSSTHFVNQGDTLASIARKNRISTAELARVNGIDPSAKLKLGTRLTVPGAKTAAVAAPAAPVAAAPVAGTLQPVAAAPAPATKMAAVAPVQSARLAQATSNVEEKPAETPAKAAEATGALPTFRWPVRGKVVTSYGAKTNGKSNDGINLAVPEGTPVKAAEDGVVAYSGNELKGYGNLVLVRHSNGYVTAYAHASELLVKRGDTIKRGQVIAKSGQSGEVASPQLHFEIRKGSSPVDPLQFLNGA

SEQ ID NO: 9564 - protein, 292 aa, BradyrhizobiumColbertium
MPKNLSKSPAGKGPRTPARKAARVAAKRPTAASKAIKAAPELAQERIVRALETIAAHLSAQGKPAVERESFERTDAYVWHPNGRLAAVPRVSRVELFLLKGVDRMRDILMENTERFANGLPANNALLWGARGMGKSSLVKAAHASINAQRKQADRLKLIEIHREDIESLPALMDQLRASPFRFIVFCDDLSFDGNDASYKSLKAVLEGGIEGRPENVILYATSNRRHLLAREMIENERSTAINPGEAVEEKVSLSDRFGLWLGFHRCSQDEYLAMVRGYCSHFGIKIDDEAL

SEQ ID NO: 9565 - protein, 125 aa, BradyrhizobiumColbertium
MLITPAYAQAAAAGDTNSMLMSLLPFALIFVIMYFLILRPQQKKVRDHAELVKNIRRGDTVVTSGGLVGKVTKVVDDDQIEFEISDGVRVRQMRQMISGVRAKGEPAKESKDSAKETAKDDAASK

SEQ ID NO: 9566 - protein, 534 aa, BradyrhizobiumColbertium
MLYFTRWRALGVILTALIVCLCAVPNFFPEEQVKTWPAWAQRRLVLGLDLQGGSYLLLEVDSAYVKKERLDQVRDEVRRTLRDAKIGFTGGVTVRNDAVEVRITKETDVQPALAKLRELSQPLGGLMGSSGQRDLEVTDAGGGVIRLTVPQPATLDRLRRTIEQSIQIVERRVNELGTVEPVIQRQGNDRILVQVPGLQDPTRLKELLGRTAKMEFRMVDTSVPPDQAQQGRVPPESELLMSASPPPTPYVVKKQVLVAGGDLTDAQASFDQRTGEPVVSFKFNTSGARKFSQATTENVGLPFAIVLDNKVISAPVIREPITGGQGQISGNFTVQSANDLAILLRAGALPAPLTVVEERTVGPGLGQDSIEKGELAAYVGSILVIIFMLLTYRLFGVFANIAVAINVAMIFGLLSLLNATLTLPGIAGIVLTVGIAVDSNVLIYERIREELRGGRNAISAIDAGFKRALATILDSNITTFIAAAVLFYIGTGPVRGFAVTLGIGIITTVFTAFTLTRLIVAWWVRWKRPQSVPI

SEQ ID NO: 9567 - protein, 339 aa, BradyrhizobiumColbertium
MTHTVLIGLGVLIAILTVVSALGLLPSLRIVPDDTHFDFTRFRRISFPISAALSILAIVLFFTHGLNFGIDFRGGTLLEVKAKSGAADIAAMRTTLDSLRLGEVQLQQFGGPENVLIRVAEQPGGDAAQQEAVQKVRTALGDSVEYRRVEVVGPRVSGELLAFGMLGLMLAILGILIYLWFRFEWQFALGAMIANVHDIVLTIGFMSISQVDFDLTSIAALLTILGYSLNDTVVIYDRIREMLRRYKKMPMPQLLNESINSTLSRSIITHVTVTLALLALLLFGGHAIHSFTAVMMFGVVLVGTYTSIFIAAPILIYLGVGEHREDAPDTAAPAKKSKA

SEQ ID NO: 9568 - protein, 127 aa, BradyrhizobiumColbertium
MAGDPNAPHFPRSAPIEAYGKGGFAFAGMSHRGSLLCLPDAIWAWDVTDPEKIDRYSLDRVFAAANSIDTLLVGTGTGLWLPPPELRHALKAARVVLDTMQTGPAVRTYNIMIGERRRVAAALIAVP

SEQ ID NO: 9569 - protein, 287 aa, BradyrhizobiumColbertium
MSRPAPPADSAAFCADLVRSHDFPHYAATLFAPAAERRALLALYAFNVEIVRVRDQVSQPLPGEIRLQWWTDMLSGHVHGSAEGNPVAAELLHAIHDFDLPVEPLSLLADEHQFDLYNDPMPTMAALEGYLAATSSALFGLAARVLAPPSEVVEHLARHAGLAQGIVQVIANLPRDAAHRQLFLPQQLLEKHNCSMEDVFAGKDTPQLHAVLTQLSGEARQHVTTASSLLTQVAPSVRPAFLPLSQVRADLKRLSHPGRNPFTLQPPSRLRTLWTLWRASRSREFTK

SEQ ID NO: 9570 - protein, 414 aa, BradyrhizobiumColbertium
MAELSQSTSSGLSGFPVAPGDIHAAAETIRGAVVETACSHSRTLSSICGCDIWLKFENLQFTSSFKERGALNRLTALAPEERARGVIAMSAGNHAQGVAYHARRLGIPATIVMPVGTPMVKIENTRHHGAEVVVTGATLEEAAAFARSHGEARSMIFVHPYDDPLVIAGQGTVGLEMLKAVPELDTLVVPIGGGGLISGIAIAAKAIKPSLRILGVEAWLYPSMYNAIHGGNLPVRGDTLAEGIAVKSPGKITTEVVRRLVDDIALVNEAELERAVATLISIEKTVVEGAGAAGLAALMSDPSRFAGQKVGLVLSGGNIDTRLIASVLTRELAREGRLTQLSLDIPDRPGQLAAVAALLAEAGANIIEVSHQRTFSDLPAKATLLQLVIETRDGAHLDDVMARLSASGLSARCT

SEQ ID NO: 9571 - protein, 392 aa, BradyrhizobiumColbertium
MIDIGRVRDDTPATARLAYLHNAGAALMPAPVVAALKGHIDLESEIGGYAAADQESERLDAVYGSVARLLNAAPDEIALMENATVAWQMAFYALPFCEGDRILTAEAEYAANYVAFLQVAKRTGATIDVVPSDASGELDAHALERMIDERVKLIAVTWVPTNGGLVNPAAAIGKIARAHGIPYLLDACQAVGQMEVDVDAIGCDMLSATGRKFLRGPRGTGFLYVRRALLQQLEPPMIDHFAAPWVARDAYRLRDDARRFETWENNYAARLGLGAAVDYALDIGMGPVEQRCRLLAGRLRDGLASIRGITIRDLGRAPGAIVSFTMEGYEADTIVRSAAASGITIGASDPSSTRIDAEHRALPPLVRASPHYYNTEAEIDRLIGHLAALASR

SEQ ID NO: 9572 - protein, 209 aa, BradyrhizobiumColbertium
MAIEKRSDNAGPAKNMGVRGIVMHRVLGGMIAGLLLLTGAPALADSPAELISNFRLTHGEVRVVRDATLDRIAMDQARAMAAKDELSHDALGPFNRRVAPAGAGRAAENIAYGYDSFEKTLRQWIDSSGHRKNLLLHKASRVGIASAKNASGKRTYWAMVIAGDYEPKGKGKGKGKKDKEPLVAVKREAAPASKPKSSSCHIKLLSLCI

SEQ ID NO: 9573 - protein, 364 aa, BradyrhizobiumColbertium
MSLPEDDAAALSARWTEGVLLKRDVFSTVERGRFRTETGEVDAVLRRLDEVPWWSFLLARHLFAREKRALVRAKGLDAGPELLWTGRRALVRGFVDGVALHLAKPHGDLAYFRSAKAVLRRLRRAGICHNDLAKEQNWLVGRDGRAYVTDFQLAACFDRRGRLYRILAYEDLRHLLKHKRSYAPEALTPRERKILAKKSFAASLWLATGKKVYRAITRGLFNFTDREGGGRRLVNDAPVLAELIRRNPAVRDTAIVAFADRRSGVGLYAFVEADQAALEGELRSELVAAKGPKPPEHIQVVHALPRDTSGKPRTEVLQLVAMNQLDLIEPMMKNDQDRAFLKDILEQRKNLRDRFNFEANLPTS

SEQ ID NO: 9574 - protein, 475 aa, BradyrhizobiumColbertium
MTGPQSNIVHVIGAGLAGSEAAWQVAKSGVPVVLHEMRPTRMTEAHRTDGLAELVCSNSFRSDDAANNAVGLLHAEMRRLDSLIMRAADANQVPAGGALAVDRDGFSAAVTKALNDHPLIEIARGEIAGLPPADWSNVIVATGPLTSAPLADAIRELTDESALAFFDAIAPIVYRESIDMSVAWFQSRYDKVGPGGTGADYINCPMTKEQYDGFIAALIAGEKTEFKEWETNTPYFDGCLPIEVMAERGPETLRHGPMKPVGLTNPNDPTTKPYAVVQLRQDNKLGTLYNIVGFQTKLKYGEQQRIFRTIPGLEKAEFARLGGLHRNTFLNSPKLLDGELRLRAQQRLRFAGQMTGCEGYVESASVGLIAGLYAAADARGETLVGPPGTTALGSLLGHITGGHIETIEPGARSFQPMNINFGLFPPLATAPTKKPDGTRLRGNEKTVAKKQALSARALADLDRWIADHLRFAAAA

SEQ ID NO: 9575 - protein, 50 aa, BradyrhizobiumColbertium
MLLSLIRMIQAFRDYQRNVAELSQLSDRELADIGLDRSDIPRVAAGQYQG

SEQ ID NO: 9576 - protein, 274 aa, BradyrhizobiumColbertium
MTSTISRLALAALALSASILSAQPALAAVACGSGNFDAWLADFRTDAAAKGISQQAINAGLAGVTLDESVLNRDRSQKVFAQSFDEFSGRMVPPRLQRGSNRMKQYGSVLSRIEQTYGVPGEILVAIWGLETDFGVNTGKFATIRSLATLAYDCRRSEMFRAELMDALRIVQRGDLAPADMKGAWAGELGQTQFMPSSWMKYAVDFDGNGKRDLLHNAPDVLASTANYLAGYGWQRGKDWQPGSPNFAVLQQWNKSEVYSRTIAYFAAQLARAP

SEQ ID NO: 9577 - protein, 302 aa, BradyrhizobiumColbertium
MATLYQGNVPTMAQPSDAAGPVIRTIQLSDLHDALRRGWEDFKAVPSHAIILCVIYPVLGLVLARVVMGYSVLPLLFPLAAGFALIGPFAALGLYELSSRRERYESASAWDAMDVLRSPSFGAMLGVGTLLLALFVTWVATAQAIYIAAFGYEGAAGISDFLTRVLTTEQGWWLIVVGCGTGFLFALAALCVSVVSFPLMLDRHAGAFEAISTSLRVVARNPVPMAAWGLIVAVLLALGTIPAFLGLAVVVPLLGHATWHLYRKVIVSEPGANPVPPPPHRPRKPAADFPANLFPWRNRIDV

SEQ ID NO: 9578 - protein, 132 aa, BradyrhizobiumColbertium
MSIFGKIMGAIFGGPSASAAPAGGAASPSAPAGTPGASAPAAAPMPAVDVAAIVDKAAAAHKGEKLEWRTSIVDLMKALDIDSSLAARKDLAKELGYSGDMNDSASMNVWLHKQVMSKLAANGGKLPPEIKH

SEQ ID NO: 9579 - protein, 91 aa, BradyrhizobiumColbertium
MTASVRDNKDRSRFELDVGGDVAFANYRLTPSAVIITHTETPRALRGRGIGSELVKGALDLIRCDGRKVIAGCSFVVDYIDRHPEDADLVA

SEQ ID NO: 9580 - protein, 114 aa, BradyrhizobiumColbertium
MLVGALIVVSPWFPVQDQAAIAGNQTAVLNTIAVGLVVFGVSQLEYVALQRWQEVATILVGLWLIASPYVIGYSGDGFLRVYHTGLGAVVVLLGLLQLWQDWDLTDQDMLKHGQ

SEQ ID NO: 9581 - protein, 122 aa, BradyrhizobiumColbertium
MHLMIKAPVILLFTLALAGCAATPQAPLVKNPAFKPARYAWDGAGQDPNRPRPAAQATRTAARSAHNRMQAGVQPYSKEWWQAQDGIEAEQDARVNRSLVICQGCLRPQPRPEDSRLAKAAD

SEQ ID NO: 9582 - protein, 134 aa, BradyrhizobiumColbertium
MQKAVRYANEECDSQEGGEVTFAANTVRKIDLTGDGRVDYIVDFQDTKCGDRETTYCGTGGCVVKILVTLPDGGVREVFEGHVLRYKIMGPPMKRGAGRIVRFDLHGSFCGGYGAQACQKTKAITATPFAFEQP

SEQ ID NO: 9583 - protein, 525 aa, BradyrhizobiumColbertium
MNLAYMLTQNARRHASRPGFVWGDKSWTWREIDAQVSALAAALAARGIAKGDRILVHSKNGEEMFVSMFAAFRLGAVWVPTNFRLMPDEVSYLAQASGAKAFLCHVDFPEHAAVVKGGALEFTWSIDGKAAFGERSVADAIASQQDAAVENVAVEHDDPCWFFFTSGTTGRSKAAVLTHGQMGFVVTNHLADLTPGVTEQDASLVVAPLSHGAGVHQLMQTARGARTVLLPTEKFDINEAFRLIEEHRVSNLFTVPTILKMMVEHPAADKHDHSSLRHVIYAGAPMYREDQKVALKKLGNVIVQYFGLGEVTGNITVLPAALHDPEDGPHAKIGTCGFERTGMQVSIQDDEGRELQANQSGEICVIGPAVFAGYYDNPEANAKAFRNGWFRTGDLGHMDEEGFVYITGRASDMYISGGSNIYPREIEEKILTHPAVGEVAVLGVPDATWGEVGVAVCVAREGAKPVSEAEMAAFLSPKVPRYKMPKRFFFWEALPKSGYGKVPKRMVRDELEARGLLDLNEKQAG

SEQ ID NO: 9584 - protein, 286 aa, BradyrhizobiumColbertium
MRSIKQPGLPSPERVQWVEARGRAFTFTLQAGLPLLEAALRGFAAEGFAGGVLNFRRGALGPFAYVMPALSKTGENAAFYSDTFRPKGVTRVRLGSMTLGMRDGAPFFHCHALWTEADGKTSGGHMMPDETVVAEPFEVEAFGIDGAMFTAEPDPETNFKLFGPVSAESTGAPTTSRAFAMRLRPNQDFAGCLEDFCRARGIARARIRGGVGSTIGARFTHGGVIEPFATELAVKAGTIAPGSAGALEAILDAALIDYTGGIAEGCLIRGDNPVLMTMELVLEVVD

SEQ ID NO: 9585 - protein, 250 aa, BradyrhizobiumColbertium
MRGRQRDIRLPAPYLRRVWLDRTLVPDWETYPYCLPIFRQEFDLSFDTAITIIVGENGTGKSTILEGIAALAGYDDAGGGKGYRAVDHSSAREIMGGELSAALRAGWVPKITNGWFFRAETFFSVARYLDEVSDMPPDFLSYSHGEGFLRFFQERCQKQGIFIFDEPESALSPARQMEFLKLLHRMDTSRNCQVIMATHSPMLMAYPNARLLQLTKHGLEPVTVEETDHYRLMREFCADPRGFVEATLAE

SEQ ID NO: 9586 - protein, 185 aa, BradyrhizobiumColbertium
MRSGAAIAGVAALVVAGMTLTAAFEPVRAHGPTRQKVREAIEINAPQEKVWAAIRNFQDMSWLPPVTKTTGEKGNEIGATRTLTLAGGATVEEELYKYEPDMLSYSYRITKVDVKVLPVTNYSSTLTVSPASDGKAKVEWAGAFYRGYPNNDPPPELNDEAAKAAVSGLYKAGLEALKKKIESGS

SEQ ID NO: 9587 - protein, 317 aa, BradyrhizobiumColbertium
MRALALAALAAGLGGLALGTAVAEEAFVTNQLSDDLMVVDLATSRSVATIPIGGKPAGVAVSTDGRFAYVTSPDAKAVTVVDAAARQVTGRIEVGGGPLGIAVAPDGRTAYVADWYAAAVRVIDTASRSVTASIAVGASPSGLAVTPDGELLLSADRDDDSVSVVDTATRQRKAIIKVGTRPFGIIIDADGRRAYTANVGSDDVSVIDIAEAREIGRVPAGMRPYAVALTQGRGFVTDQYGGTVTVFDLASLKPIKRISVGDYPEGIAATADGKRIIVACWESNTLSIIDAAELKVVGEIKTGDGPRAFGVFLRRTE

SEQ ID NO: 9588 - protein, 271 aa, BradyrhizobiumColbertium
MAAGCAAAPLERAGSLASYDNLTPSDGLLTKSQLRISKADVLAAKTARIEPTAFTAAAASRPFSQQQRTLIKNAVNRSMCLALSERFRIVATTEAADLNVRAIITHIAPTDATAAGVSKVASVVPSIVAPGVPIPVPRLPIGLGSLSVEAEARDRSGNQQAAMIWARGANSFTSSPRVSSDGDAYDLADAFGSDFGRFLVTAESPFGKVPAPPSADRLSASLGGAPKEAICETFGRAPGLAGLVGERIGLPPDWTDRGAPEDAVSEAQNVN

SEQ ID NO: 9589 - protein, 370 aa, BradyrhizobiumColbertium
MVNRSGGDTPSRHVRSARSAGEAIAPENMTRRRLGTMLLAAAVTAALTAHPAQAQSAPPAFIDFDWADPARSRPVPARLHWPTDAAPGSRVPLIVFSHGLGGSRRGYSYLGRYWSARGIASLHVQHAGSDSSLWAGNPLAVVDRLQRAAHESEALARALDLRFALDRMLSSPYGAHVDRRRVVAAGHSYGANTALVAVGARVMREGRWVEARDPRFGAAIVISAPPFYGESDLASVLSRITVPTLHVTATNDVIQIPGYYSPAADRLKVFNAIATPRKLLAVFEGGSHSVFTDRAFTGGPALNPKVKLATAELSLAFLDLVFEGNGATLARWNVTWQPLLASAPGAAPSPLPAAHSRRMAQGATDLVSSP

SEQ ID NO: 9590 - protein, 214 aa, BradyrhizobiumColbertium
MKNSPRKEEGLRERKRRETQHRIAEQGLKLFLTKGYDATTLDAIAEAAGISRRTFFYYFKSKEEILLAWQDGGFSETLRAAVLEQTTRQSPLDAVKSALLDLTARFQVDYKQTKVIERVMSANEALRIRQQAKYVEKEEAVFEALRQMWAQPHRQAALRVVAMMSVGALRLAIDNWNRDQGKRPLATHVKEAFACLDKEIGGGASRKAAGRSGE

SEQ ID NO: 9591 - protein, 75 aa, BradyrhizobiumColbertium
MDNKWVELAVAWLPFVLLIGFWFWFSRRNGMQARGSSGATLIELYEQQVAETRRMNGLLERIAVSMEKHDPPRGS

SEQ ID NO: 9592 - protein, 220 aa, BradyrhizobiumColbertium
MNKANPPYSLAIFDLDGTLADSFPWFLRTINDVADHFNFRRVAQEDIEELRHASSREILSRLKVPLWKLPAIARHARRLKAEAAGEISLFAGVEAMLRMLADNGVQMALVTSDSEANAREKLGDAAALFSHFDCAASLFGKPAKFRRVIRRAGVAPARVISIGDEVRDIDAARAVGIACGAVCWGYAAPAALQALRPDHVFEQISDIAPALIGARNPMQA

SEQ ID NO: 9593 - protein, 992 aa, BradyrhizobiumColbertium
MDEVIKAKRQQQNAGSSLRAITIRGAREHNLKNIDVEIPRDKLVVFTGLSGSGKSSLAFDTIYAEGQRRYVESLSAYARQFLEMMQKPDVDQIDGLSPAISIEQKTTSKNPRSTVGTVTEIYDYMRLLWARVGIPYSPATGLPIESQTVSQMVDRVLALPEGTRLYLLAPVVRGRKGEYRKELAEWLKKGFQRVKIDGTFHELSEAPALDKKFPHDIDVVVDRIVVRADIGQRLAESFETALKLAEGLAVIEFADAPATAPAEEKKKTAKIHDKSGPERILFSEKFACPVSGFTIPEIEPRLFSFNNPYGACPACGGLGVEQHVDEDLVIPEKDLTLRKGAIAPWAKSSSPYYVQTLTALGKHYKFTLDTKWKDLPKKTRDALLYGSGEDEIKFSYEDGVRSYDTKKPFEGVITNINRRYRETESEWAREELAKYFHDVPCEGCKGFRLKPEALCVKIGGKHIGEISELSVKKAGEWFEGVPDTLNKQQNEIAGRILKEIRERLTFLLDVGLNYLTLSRSSGTLSGGESQRIRLASQIGSGLTGVLYVLDEPSIGLHQRDNARLLDTLKRLRDLGNTVVVVEHDEDAIRLADYVLDIGPGAGMHGGNIVAEGTPAEIMRNPKSLTGKYLTGELEVEVPERRPPNHRRTIKVVNARGNNLKNVTAEIPLGLFTCVTGVSGGGKSTLLIDTLYRAIARKLNNASEGAAPHDRIEGLEHIDKIIDIDQSPIGRTPRSNPATYTGAFTPIREWFAGLPEAKARGYEPGRFSFNVKGGRCEACQGDGVIKIEMHFLPDVYVTCDVCKGKRYNRETLEVLFKGKSIADVLDMTVEEAAEFFKAVPRVRETFNTLHRVGLDYIHVGQQATTLSGGEAQRVKLAKELSKRATGRTLYILDEPTTGLHFHDVKKLLEVLHELVAQGNTVVVIEHNLEVIKTADWVIDLGPEGGDGGGEIVAWGPPEDIAKAPRSYTGKFLAPVLEKARKPKRRRAASEAAE

SEQ ID NO: 9594 - protein, 230 aa, BradyrhizobiumColbertium
MKKVLLASACLFALAAPASAADLAARPYTKAPMVPAAAVYNWTGFYLGIVGGGAWEASSGDPKMQGGFVGGTAGYNWQAGNVVFGLEADGAWADVSASAAGTVFVAGVGGVPASVSSRTDAMGTVRGRIGWAVNNVLLYGTGGYAWIDNKVTATLGAASISDSKFHSGWTVGAGVEAFFAPQWSVKGEYLYRSLGGETYFSGTVPSGTLNLHTVQVGVNYHFGGPVVAKY

SEQ ID NO: 9595 - protein, 216 aa, BradyrhizobiumColbertium
MAAPAPIYTWTGFYAGIQGGGGWGDSDETFFLLPNGPGFAGTQNYDISGGFVGGVFGYNWQSGPVVFGIEGDYHWSDISGRSAEINAGLGDTYFTKIRSFGDIKGRLGYSTGPALFFVSGGAAVGDLQHRYDVPLVGSVVRNDWRWGWTVGAGAEYMFAPNWSAKVEYNYIDFGTSTLQYTAPAVAANRSEWTDTVHTVKAGVNYHFNWGAPAPRY

SEQ ID NO: 9596 - protein, 163 aa, BradyrhizobiumColbertium
MAGSVNKVILVGNLGKDPEIRRTQDGRPIANLSIATSETWRDKNTGERKEKTEWHRVVIFNEGLCKVAEQYLKKGAKVYIEGALQTRKWTDQSGVEKYSTEVVLQGFNSTLTMLDGRGGGGGGSFGDEPGGDFGSSGPVSSAPRRPVAAGGGRNSDMDDDIPF

SEQ ID NO: 9597 - protein, 909 aa, BradyrhizobiumColbertium
MADDDDKPGDQPAQPSDIRPVSIFEEMKKSYLDYAMSVIVARALPDARDGLKPVHRRILYSMNEQGHTPDKKYVKSARVVGDVIGKYHPHGDQSIYDAMVRMAQDFSMRVPLIDGQGNFGSVDGDPAAAYRYTEARLTKAALALLADIDKDTVDFQPNYDNNETEPSVLPAKFPNLLVNGAGGIAVGMATNIPPHNLGEVIDACVALIDNPALTIDELINIVPGPDFPTGGVILGRAGIRAAYHLGRGSVVMRGKVAIETIRKEREALIITEIPYQVNKATMVERIAELVKEKKIEGIGDLRDESDREGYRVVVELKRDAVPDVVLNQLYRFTPLQTSFGVNMVALDSGRPRIMHLKDLLTIFVDFRERVVTRRTKYLLAKARDRAHILVGLAIAVANIDEMIRVIRSSPDPTAARDTLMSRDWPARDVEDMLTLIDDPRHRISADGTIRLSMEQARAILDLRLQRLTALGRDEIREELDKLAGEIADYLDILRSRERVLGIIKTELAEVKAEFATPRRTVIMEQEGEVEDEDLIQREDMVVTVSHAGYVKRVPLSAYRAQRRGGKGRSGMQTRDEDFVSRLFVASTHTPVLFFSSRGQVYKEKVWRLPMAAPNARGKALINILPLEQGERITTIMPLPEDESTWAQLDVMFATTGGNVRRNKLSDFVDVRRSGIIAMKLDDNEAIVDVQICTERDDVLLTAAGGQCIRFPVTDVRVFTGRTSMGVRGVALGEGDKVISLAILRHVETTSDERSAYLKMRRAVAGEAAVEEAPADAEAEETSGSFQLSQERYAEMSAQEQVVLTVSVNGYGKRTSSYEYRTTGRGGKGIVAMSVNNRNGNLVASFPVEEADQIMLVTDKGQLIRCPVEGIRIAGRSTQGVIVFDTAEDEHVVSVEHITEEAESNGANGE

SEQ ID NO: 9598 - protein, 85 aa, BradyrhizobiumColbertium
MLKTLSAIALSACVAAALTLLPGFAPKVEASVPQPLAKGDRLDVRAIGRDCSHQAWPNFEASCLRRAGTKANIREARLVTADRTP

SEQ ID NO: 9599 - protein, 164 aa, BradyrhizobiumColbertium
MSRIAFYPGSFDPITNGHLDVVRHSVPLCDKLVVAIGVHPGKKPLFSTEERLKMLHDVCGPVAAQAGCVLEAVTFDDLSVTAARKHGATIMIRGLRDGTDLDYEMQLAGMNEAMAPEVHTVFLPASPAVRPITATLVRQIAGMGGDVSAFVPPLVAAQLKAKFA

SEQ ID NO: 9600 - protein, 548 aa, BradyrhizobiumColbertium
MADVHPAAGKQASPDALTNIPRLVTAYFAGKPDASDPAQRVAFGTSGHRGTSFKNTFNEGHILATTQAICDYRREKGLTGPLFIGIDTHALAEPALVSAIEVFAANGVEIMIDKDGGYTPTPVISHAILTYNKGRTSGLADGVVITPSHNPPEDGGYKYNPPHGGPADTDVTGVVEKRANAYLADGLKDVKRIDYARARKSSNVHAYDFVTPYVADLGNVVDLDLVKSAGVKIGIDPLGGAAVHYWHPIIECYGLNATVVNEAIDPTFRFMTVDWDGKIRMDCSSPYAMASLIGMRDRFDVAFANDTDADRHGIVTRTGGLMNPNHYLATAISYLFTHRPNWGKDAAIGKTVVSSSIIDRVAKKLGRKLVETPVGFKWFVDGLVTGGFGFGGEESAGASFLRRDGTVWTTDKDGVILGLLAAEIMAKTGRDPSQFFADLTAEFGMPHYARIDVAATGPQKNILKSVTPEQLGLKELAGDPVRSTLSKAPGNGQPFGGIKVETDFGWFAARPSGTEDVYKIYAESFRSPEHLKRIQEEAQAGLAKVFGA

SEQ ID NO: 9601 - protein, 264 aa, BradyrhizobiumColbertium
MLWDRPHFGLGAMWRHVAVVLLLSMPIGAHASDGDIDGPRTTSTIADASTELGAGETPSSRAMIRRIIERETASTDLPAAVAEAVVFVESGYNPSVIGSGGEIGLMQVRPETAAMLGFRGSNAELAEPDVNIHYGVLALSLAWRVAGGDLCRALIKYRAGQDEEKPTARSQVYCNRARNRLVAISAMPLGTEAAATTDAAPAIAAVAPAKPATRSKTPVQPKAVYARHRQGTAAASRAYWAAHEARISQIKARIEGRRKRVASR

SEQ ID NO: 9602 - protein, 269 aa, BradyrhizobiumColbertium
MKDSSIEFLWQAGPEWPRHAPLLFPIVGRLANDELRHRGKAYRMTQHGFARDRRFIWAERGESRCALVLVDDEATRALYPFAFRLTAAYAIDQLGLDLTLTIANTGKEVLPASIGGHPAFNWPLQPGAAKESYALTFDRAEQSPIRRLNGGLLRPEAEPSPVKGASLPLSESLFTDDAIIFDRIESNSVRYGARLGASSGPWLKMSWRGFRELGIWSKPSGAPFLCIEPWHGHASPAGFDGEFTDKPGLMHIAPDAEESLSYRIEVGSS

SEQ ID NO: 9603 - protein, 367 aa, BradyrhizobiumColbertium
MKIFINGRFLSQKLTGVQRYAAEMVKAIDALLASEQTSASLRNADWQLLTPADATEHLDLDRIKIRAVGRLHGHAWDQIELARAAAGGRLISLSNSGPVFHRDHIVVIHDAQVFRRPDFFDWRYLAVHRTMGRLLSRHAAIATVSAFSRRELADVLNLSASSIPVFPNSAEHFAATKPDPGILARLGVRPQRFFLFVGSRTKNKNLSVAIRAVQLLDRPDVPLVVVGGDNSKVFQDNSGEGSAGLVLAGRLTDGEIAALYAQASAFVFPSLYEGFGVPPLEAMIFGCPVIASTADAVVETCGEAAAYFRANDAEALKQLMLERLAIGTISDQERRRQQDRLAFYSWKKSAKALLDHLATPASVASAA

SEQ ID NO: 9604 - protein, 377 aa, BradyrhizobiumColbertium
MKVLHIAETIRGGIASYLNELHPQQQASFGADNVHYVVPSDHRRDLGAIDDNQITTFERSSRSISGLFQMLRASMQALDAFRPDVVHLHSSFAGLVLRPALAARSDGPRVVYCPHGWAFARETGRLSHVVTKAAETLLARTSDRIICISGDEYSEAIRAGISADRLTVVHNGIAKSRNPQPVAADWTSKKVKVLFIGRLDRQKGFDLLIEAARSLEDVLDVRIIGASVVNKYEGPTVPSNVSLLGWLDRPAIETQLEAADLVVIPSRWEAFGLVALEAMRAAKPILAFRSGALPEIVVDGVTGVLCEPVAVQPLVDGFRRALDLDLKVLGQRGYDRFKQLYDVQKTHAQLQQVYVELLQGDGVEAKAGLQSDLSKNF

SEQ ID NO: 9605 - protein, 437 aa, BradyrhizobiumColbertium
MLRDSLRVASLIASILLPASVCAQQAQPLDARFLLGVGTHQGLGGPVSARGYVPAENIAQIKQLGLNAFRDDFPWSDFEMPGRRLGFNPRLGRLEAQVRSGVARPLLILAFGHHLIPNSSPPTTDEARQRFAEYAAAAARSVVAQDPLFELWNEWNLASKKDAAFSPENYLALAQVARPAVKRVAPNAPFLVGALGDDPGWIWTEKMLRTGILQYADGASIHLYNFCMGPSKRTSAEIIDRLTAFHRLVSQASGNPTFPIYVTETGWTTASNKCGVNEQAQADNTAQLILWASTATRWLKGMWLYELKDSGTNPSDLEHNFGLYRFDNSPKPVACAAQGAWAFIRSSLSAERRELASGVVSINASTTSGGRVAVWSEAPGRRYEIRIKDDQQGASFAMPCNATAKPASGIWIPVSSTPVLIAANDSAIPALEIRPVR

SEQ ID NO: 9606 - protein, 424 aa, BradyrhizobiumColbertium
MKVLLTSTLYPTPQAPKIVGGAEIFARRFAEGLAQRGDEVEVIRAAPAPQQARETCNGINIYSAPVRNIYLPFTEQKNVALRSIWHAIDDWQMQAPLIAERIRAFKPDVLHSNNLSGLTTAIWRVAAQLEVPVLHTLHDYYLTCPRCSRFDKGHSCGHTCTSCGILTFHRKRATHWLSAVVGVSERVLSIHTDIGMFSETPIRTVIRNASTEPPREPYPRPICTAEVTFGFIGRLTEEKGIDNLMLALALLPRDRIRMLIAGRVSDQEQGRLRALSGDARIEFMGFVAPDDFYKQVDVVVAPSIWHDPGPLVVADAKAAGRPLLGTRFGGMPEVIQHGVTGWLTEADPQSLADSMLAVAADPHKIDEISRRLIADTNKWVFADVLSSYKNLYEQLREQRMSRLHAATADAPLGRAVAKERLIPR

SEQ ID NO: 9607 - protein, 464 aa, BradyrhizobiumColbertium
MTRLFAMAGYVYQSAAAIILIFAVSHLLPAAAYTNFSLALASSQLLCVLMFEWLQLSGLRFLAAANEDEAARLRWSLFAAGLSSAGALIVGGSCASLASVLPTAIIALGLGISVLQGLTDLYFLTVRLSDRLGVASSLLALRATALLAGGALGAATSGTAEAALLGIASGHVLGLLAGMAVYRTPVERTSLQTMLADWKSFARYGMLAAGASVIHLSVPVLLRIIIIGRLGATGAGAGFSIALDLLQRPFWVLNAAIHTVSYPDVVKEFERRPVVKSVESARRMFEFMVCTTLVLLGGLVGFIPDAARMVVPRESLDGFLATAPAVAVFYFLHTHLQATAAVVPHLEKLATRLVVVAAGQLATVAAVVFAATWAGLSPRQAVGCASVATLATILAALGPTLRFDAFPRWSLVAQAVAAAVLIGSLGAIPTEPAAWLAGKIVIAAIATAIVGWRGDFLMLARRGR

SEQ ID NO: 9608 - protein, 66 aa, BradyrhizobiumColbertium
MPRDVRIVSAAWVAQFLKAPSSCHPARASHQHSAATRVDLFLHKEPHSLAICSYDFYLKFTLDNEA

SEQ ID NO: 9609 - protein, 1302 aa, BradyrhizobiumColbertium
MPDQTILSASGFINSIGVNTHAGFGWTGYNNLALMVDDLKYLGVTHLRDSMGTSPAAQPVVDGLAAAGYKFDFLVSSALPQSGTAGLQKYIASLEKFATSHPGSISAIEGLNEANHQPFSYNGSSSLTAAAQFQSALYQAVNANAALGSIPVYNLSLAYNDPQGYSQLGNMSASVDYANAHAYVSTSLNPSSSIAATLSAVMTAAPGKPVVITETGYTTQANTQYLGVNETVQAKSILNTLVDAYKAGVSQTYLYELFDRDSSASNTNPEANFGLFNSDGTPKLAATAIHNLTTILADDGKGGQQPTDPLNYTLGNMPATGNSMVLGKSNGAYELVVWAEPKLWNDATDTELTNAAQTVTVNLGAVHHTVKVYDTLTGTTAIASYTDVSTITIPVSDHPVIIEIDAPPTTTTPPDSRTSITGAAAEIVPQLSDLSDSTALQTITLTDSHVLPVASKATMDYIIAHYGSALSKIQGGYSFSVTNTAATWTNTKTYDSSGKLLSTSDTGLNASGQPTSTNVVHSDGSQDLISYTGGVKTKFVHVGTDAVRTTDTYNTAGTLLSEIVQKPDGYYSTTLYTNGVKTAAYIKNADGSQDNYSYNVVGKSFTTQVQHLDASGKITSVIRSHADGSLDSTQVYKNDGSSVITLYSASGVKLVETDYHADRSKDVWTYNIKGQNYTTQHDVYDASGFLTTLTRLHADGSLAFKLMQTPDGTKTTNWYNAVGSLTSEVVEKADGFTSTTLYSNGVKTKAYIKNADGSLDNYAYGVTGQSYTTLIQHIDPTGKVTAVTRKHADGTLDFTQVVNNDGSSVATYYDAKGVLTKQSESHADGSKDVFLFNITGQNYTTEHDIYDATGFLTTLIRKHADGSMAFKLVQSKDGIKTTDWYDAKGVLTSEVITKADGYSSTTLYTNGLKTAAYITNADRSQDNFTYNITGQSYATQHQHLDPTGKTTEVTRWHADGTLDFTQIVGSDGGSVVTNYDASGIKKMQTDYHPDGSRDVYLSNIVGQNYTTEHDTYDSTGFLTNIVRTHADNSLAFTLVQSVDGTKTSEWYDAKGVITSEVTTKTDGYSSTTVYTGGIKTAAYIKNAEGTQDNWNYNVKGQSYTTQHQHLDASGNIVEITRTHADGTLDFTQVMNDDGSKLTDIYNSAGIKTQEIASHADGSRDVFLFNFNGQAGITQHENYNTANALQFIDQTKTDGTHNVTAVGSGVTIQGGAGNDVFSAAPNSTTIAYDHGQDQILNFQAGDATTHDVIQISKLLAADYSHLQMTQSGTNALITFSENDSILLKNVYVTSLTSHDFVFV

SEQ ID NO: 9610 - protein, 65 aa, BradyrhizobiumColbertium
MHRSGGISSLMLAIMVALPYGVVAHAHLPIWQDRSQMYGATFDSRDLKGSATSGRRSTVRLFRAS

SEQ ID NO: 9611 - protein, 162 aa, BradyrhizobiumColbertium
MLFRLSSDYRKKPVAFAGIALFAVSIMVLNFFAKPDLAITLFSLAIRVTATGESAFARFPGSDWLGRLGNTSYAIYMVHEVLLILLFKPAWHYFGFQPSMFPVFALVCCIILTVVADVTYHYFENPARKLINRLAPGDARSAHIPKAEPLDPSGTRPAANAS

SEQ ID NO: 9612 - protein, 488 aa, BradyrhizobiumColbertium
MRHENIKPRSIVSGVIWSALDSAVGQALTLAIYMIMARLLSPQILGIVATGALALEFCRAVLIESIAIAVQARAEPKDEDYTASFWLIAGLSLFAALALFASSGAIERFSGLSDIAIVLKGFCIVVAVQGLSRTHEAWLMRNQLFRSLAIRSLSSISVGGAVGIGLAIQGYGVVALVGQLVSTSLISLVSLWVLTPWRPRLRVSRQAVVELLSYARYVALTGITNFANANSDLIFVTWYTGAAGAGLYSLAKRLVNAVSTVIGNALNRVFFATIAGLQHDREASRSTLVAFVLYTSLLTAPIFAGIAVLAPDLITAFFGSKWSGAAPLLAIMSVTGFLTTIGLYNHSVILAFGKPHWQTWLTLIYAVSNIAIFILAAPFGLIAIAVGYVARALLLYPLSAGASMRILSLGIRPYAAALMPALAGSAVMACAVAGASVAMPATSPWLRLAALVLLGSSVYLVVVVAIARPAVVRICQEILSRVRRSSKI

SEQ ID NO: 9613 - protein, 277 aa, BradyrhizobiumColbertium
MNFRTNLRRLMNEVGCDFIHQLPYPHVDLFFWRPDDGTINFGDYLSVVVVDHLLRHFGYTLADEVPRQTRLFAIGSVLHYARNDDVIWGSGVNGRPGQDDLNRRVQNLDVRAVRGPRTWEILRRRGIAVPEVFGDPALLLPQLFPNRFRPTAKKPWVFVPNLHDLSLIDRGADTVVSPLGSWNRRIDAILEAELVLASSLHGIIVAEAFGIPARYVRLSSGESEFKYRDYYEGTGRFAVEFASSIDEGREMGGAARLNFDHRALMSAFPIDLWSGNS

SEQ ID NO: 9614 - protein, 371 aa, BradyrhizobiumColbertium
MAKRLRVAIYAPHFAEYSYRLASGLARHCDVRLVLNRKDANQQWELADIAVTAPFETRVRDLSLRRGGAIGIPASFLDIISFRPDVIHCHEVPEIYTSGLIQLLRPLGIPLVLTVHDAIPHSEGGSGTSPREDAWRGRMRAAASVVTTHGKSCIADFRRASPDFKGEAISSMHGVLMVPPAGGAVTAPEAARILFFGRMWAYKGLDVFIDAIDMLARRGVAHEAIVAGRGPEMTRLGARMEAMPTVKTINAYIAPAETGRLFQSATVVALPYKDATQSGVLASAYGNSRPVVASATGGIPDVVTDNVNGLLVPPGDATALADALERVLTSKPLAATLTEGAWQTAVGILNWDRIAEGLLGSYHKLAGRTVS

SEQ ID NO: 9615 - protein, 362 aa, BradyrhizobiumColbertium
MIKAPHQPGAAHDGSFVPSVQGLRAIAALSVLMDHFYDMPKGGMYDIPDPGFLPPLWPWLQSVINVGGHGVELFFMISGFLIPASLVRHGSLSRFFFDRVLRIMPVFVVLHLALFAIGPIVAYKFFRGIDLTSYLGIFAANLFFVQDALGLPIAQQNAWTLTYEWAFYIWFALTFSVWRTGGRLLAAPLILLGIACLMHWPITAFFCIGMLFSATGFRISIPGRIGLLAGIACGAALYASLVLFHPFVGLIPGFLLFGMVLAPDSGLGRALSLPALQYVGKISYSLYLVHPFVLFPLQVIGLKLVAAGVDRWLLWTAFIGLGLVMSLVASAISYELIEVRLRRLLDGAISSMFSRPQIEQSV

SEQ ID NO: 9616 - protein, 369 aa, BradyrhizobiumColbertium
MMHKRLAFIDTLRGIAVLSVVVQHVFEVIVEKHPTGAYYWPIHDLFGYYMNFGRFGVVLFFFVSGFVIPFSFPDSATPVRDFTISRFFRLYPAYWTSLVVGLVAMYLLDSKVYPLGQVVANLTMFQTFVNVPNLLVFYWTLAIELLFYVGCTILFAMGLLNRRFTAVSIVVAAALVGTAAALFVENRTVSSVMEVGLNLSAMFLGKIIRDTVIGGKLRWSHVTICTLMYAIFAITLSDRRFGGVYHENFFYSYSIGSAYVCAALVFIGFAVFGERMAWRPMAFVGVISYSVYLMSPFVMGFIDRLVWFGDGPLGWSIFLAVTLVLSILVSWMTFAFIEKPSISFGQRFRSARRRPVVPEPALSIQGAAE

SEQ ID NO: 9617 - protein, 445 aa, BradyrhizobiumColbertium
MSTFALQPRRMMLISLNIEAIALAAYLVRDAFGGVMRYYTSIMHLDALWFAPDGIALLCLVQFIVHCILRNRSIMAAVVLVQIMLSLVLGYFMLGTTNAAMSSFKMMLPVFVGFCFCDTSLGSYKKLRSVIAVTFYLSLIGVLLTKFYLMPWVGYKYESFGAVREAGRLWWAYGGDDQRLTGFAAESTMAAFFILVSFAITSIRKSTTWCIVFGSIAIYVTRLTTSKTTMIVLVLYLVLLVCVRMLPERSRFAAIRTIALWSFAAILVPFFMIVLASGTAAVPHTTLFSIVDRINNSWQLPFVYLSQLMPVGLVTGCGVGCFNYPQKLFSPLAHFWVPVDNFYIGTYLMFGLPFVAFMVMVFRATFGTTDVYKLTLIFVVNMFTITVLNYGPASGLLIIALSFSEVFSRRAASARAGDAVPIVMRPPMPSLEGFRPDMPAASGGR

SEQ ID NO: 9618 - protein, 403 aa, BradyrhizobiumColbertium
MTELVHREKAHVVPLDSIRGIAATSVVIHHLLLMPTFLAAFPHNAWINCSFFRSAWLLVDLFFVLSGMVMALSYVENDFSRFSLREFMIRRLARVYPLHIVMLLANLVFRLLRIGLVMGGVVVAAPAAFEVNNAYSFGLNVVLLHSMGFIDYLSWNAPSWSISVEFYTYLVFGLIVLFALRMRSLSWFYVLSGLLAVGSLVSIIFVLEKKSIELQTDFGLLRCFVGFFLGVLMVRIVDCLPARPHPAVQGALQFVAMIASLVLVSLAETNPAATFLAPVMFAVFLGSLLAFPDALLVPRILVAKPLVWLGRRSYSIYMVHALVVLLAEYFVRGVGAGRIAALDSIWAGLPATLNLVVSLAAVLAVSHLTYLYVEIPGGRLLRNAFGSPPDFAPSPARSARLSN

SEQ ID NO: 9619 - protein, 106 aa, BradyrhizobiumColbertium
MLPSVQTLISTSASAERSAIGGALRFAEARCTSTKPAAARKIRDFAQRIGDLHVQAGYSAAGEDSSGVQAQSQGKRLAPPPRAGALLEGEWKTKLANPFKPVPLPN

SEQ ID NO: 9620 - protein, 741 aa, BradyrhizobiumColbertium
MSKAAKFQMYQPREHFQSGQRFGIEFGGAVLSFERVADVLRRQWPIIAACVGASLALVMVYLASAQPMYTANARIMMDTRQAQVLDKESNTSSALIDTGYVDSQVEIINSDDLILSVVRRLKLTEDPEFNGSNPGLLSLILGKVMSPFRSDEPASQERIEHAVVQQVQKNLRTERVLTTYVLSLSYRARTPDTAAKIANAIANAYLVGALEAKYQSTKRATEWLQQRSLELSEQATASDRAVQTFKAENNIVGTSRGLMSEQQLSDLNSQLVQARAATAEAKARLDRIEAISDQDLTQPTVTDALNNSVITRLRAQFLDLQAQYADWSRRYGKTHLATVNLANKMEELRKNIADELRRIGDAYRSDYEIAKSREASLDKSVKELVAQAGHTGQAEVKLRDLESAADTYRNLYNNFLEKLQSATQNQSFPLSEARLISTATKPDRKSSPRTVLALVGGLVGGLCLGLGVAFARELLSDVLRTPGEVEDELGVKCLGVLPDIRSPTKASLSDLSRYVVDHPFSRFAETLRNIKVSIDVARLTREIKVIGIVSSLPKEGKTTVAANFAQLVALTGHRTVLIDGDLHTRSLTRELAPDAKSGLVEALNDPASLGYHVQRSKETGLDFLPSVVASRMVNSADVIGSKAMAELLKMLREHYEYIVIDLAPVMPVADSKAVSLLIDAMVYVIEWGQTTRSALQESVSGSEVLQKKLLGAVLNRANPKMLKRIEAYKGKHHNSYYVEHA

SEQ ID NO: 9621 - protein, 95 aa, BradyrhizobiumColbertium
MLIVLTILIIWVLLNILFVVIVVPPRKPLRQPVATTLSPAPIDPSRREIDQDEPFSIRHVIVSVAMGAFFVLVPPLLALRDAIMRLFGRPPRNGT

SEQ ID NO: 9622 - protein, 476 aa, BradyrhizobiumColbertium
MAVATYGSESAHALSSARGSALQRPFQIVVIAADFLLILLSYVAGASLYGVVVGSPSDSASAGAGLFVGVVFVGIAYFRDVYSTYRLLNVVWQLRMAVFIWLTSLTILAVAAFLLKSTDNLSRGTVIVFAVIGGLGLISLRFAWQAVFGTTFARSRLVDRKVILLSLKPLDFTSSRFKDLRRNGFDVMRHFVLGADREDGQWERQIRDVIRQSRSADVDEYLLAIDWNELPMLRKLGPYLRAVPQPIRLLPDDSVADLVTRPFLPVSGTVAVEIQRPPLTILERLQKRCLDVGVALFALVMLTPLLLTVAVLIKLDSPGTVIFRQSRRGFNGRPFEIWKFRTMTVSENGETVTQATKRDARVTKIGRFLRMTSIDELPQLWNVLRGDMSLVGPRPHALAHDNYYDELISKYVYRHHMKPGLTGWAQVNGFRGETPTIDLMEKRVEYDVWYVSNWSVWLDLKIMARTASAVMFQEAY

SEQ ID NO: 9623 - protein, 226 aa, BradyrhizobiumColbertium
MRIYAISDIHGCAHLLQPMLRVIDADVERSRPRHAVEVFMGDYIDRGPDTRSTLDILVERSRRGNAVFLKGNHEAFLVRVFEDPSLFEDWIAFGGTQTLMSYGLAPPDLKRDEPASILRDLIRAMPTEHLEFLDNLRLSFSCGDFFFVHAGVRPGVPLAEQTERDLLWIREEFLQSEEQFGKYIVHGHTPVRSAEFLANRVNIDTGAYATGNLTLMSIQGSRMLAV

SEQ ID NO: 9624 - protein, 317 aa, BradyrhizobiumColbertium
MANARFELKGKSVYVAGHRGMVGSALVRRLHQEDARLVTVDRHELDLRDQAAVFDWFAKTRPQVVFLAAAKVGGIVANNTLRAEFIYDNIAIAANVIHAAHVNGAEKLMFLGSSCIYPKLALQPLREDSMLTGALEPTNEPYAIAKIAGIKMVEAYRSQYGCDFISVMPTNLYGPGDNYHPEYSHVVAALIRRFHEAKLTGAGSVLVWGTGRPRREFLYVDDLADACIHLMKIYSSAELINIGTGEEITIAEFARVVADVVGYDGEISFDTSRPDGTPRKLLDVSRLAKLGWRAQTALKDGVRLAYSAFLSSQQDPK

SEQ ID NO: 9625 - protein, 356 aa, BradyrhizobiumColbertium
MAERIALITGVTGQDGAYLVEHLLSLGYTVHGIKRRSSSFNTARVDHLYQDPHVGNVPFLMHYGDMTDSTNLIRLVQQIRPTEIYNLAAQSHVAVSFESPEYTANADAVGVLRLLEAIRILGMEKETRFYQASTSELYGLVQEIPQKETTPFYPRSPYGVAKLYGYWITVNYREAYGMFASNGILFNHESPVRGETFVTRKITRGVARIEVGLEDTLYLGNLSAKRDWGHARDYVEGMHMILQADKADDFVLATGEMRSVREMVELSFAQIERRIEWRGEGIDETGVDVKSGKIVVRIDPTYFRPTEVDLLVGDASKAREKLGWKPKRTFDQLVEEMVASDLAEAKRDAARGKRTV

SEQ ID NO: 9626 - protein, 139 aa, BradyrhizobiumColbertium
MLVNGQDDRGTALNNHTSQYGTMHNFGQVNAGDILVFYIDVKTTGHTYYSDISENSDGVNHVYSTAFDGDGKIPTGTYVGFEDLSLHQTGWTDHNYTDEQFVFTVAAVPEPSTWAMMILGFAGVGLLAYRRRNLLPTAA

SEQ ID NO: 9627 - protein, 42 aa, BradyrhizobiumColbertium
MLTRYFVWLAALEFLRRRPQEGERGSTPNSRHLEHREMQTSI

SEQ ID NO: 9628 - protein, 44 aa, BradyrhizobiumColbertium
MGPSLDFVEVARNLLKSLLKASQMRKVHRGMTHQISPHSRPDED

SEQ ID NO: 9629 - protein, 123 aa, BradyrhizobiumColbertium
MTKLTITELVAVQPPDLLAVFLDLNGYLPVGVPMLKRVLALPGQTVCRNGLAIAVDGIDVGDARDRDGHGRPLPAWHGCRVIADGDVFVMNWQSQDSLDGRYFGPLPASAVIGKAVPVWTDEE

SEQ ID NO: 9630 - protein, 576 aa, BradyrhizobiumColbertium
MSGNDDFRVRPGKIRSTRGPRTKPFLTQALQAAQKAGGLSRAAGGHGGSRFGRGRSASLAATRMLQARGRGAMVKARVVRQMRSPGALRAHIGYLKRDGVTRDGSPGKLFDAAGDEADGRSFAERCEGDRHHFRFIVSPDDAGELSSLRTFTRELMDQASRDLGTRLDWVAVDHWNTEHPHIHILVRGRADDGADLVISRDYIGSGLRARAADLVTRELGPRSELEIRRGLEAEVSAERWTKLDRVLAREAGRTEGVVDLRPQRDAAGDPLREVRIGRMRTLERLGFAEPAGPARWVLAPDTEQRLRALGERGDIIKRLHKTIAKDGAARAPSSWALEGESHGEPIVGRLMARGLDDELRGTAFAIVDGVDGRVHHLKLPAIDMAGDGPIGGIVELRRFEDASGRQRIALAVRSDLGLDQQVAAEGATWLDRRLVARDPLELSRAGFGAEVRTALDRRIDHLAGQGLARRDGDKVTIGRNLVGTLRDRELEAVGRKLASETGLAHFPAQTGEQVSGVYRQRLSLASGRFAMIDNGLGFQLVPWIPTLERELGRQVNGIAGTGGVDWSFGRKRDLSL

SEQ ID NO: 9631 - protein, 658 aa, BradyrhizobiumColbertium
MSATKILWGQLLFASLLVLAFLWTATEWTAWRLGFQPQLGPAWFMIWHWPIYQPLAFFIWWFKFDAYAPTIFLQGGCIAASGGIAAMAVAIILSVWRAKEAQHVTTYGSARWADTKEVRRAGLLGPDGVVLGRFGAIYLRHDGPEHVLCFAPTRSGKGVGLVIPTLLTWPYSTVVHDIKGENFQLTSGWRARFGSVLLFDPTNPLSAAYNPLLEIRKGDYEVRDAQNIADILVDPEGALERRNHWEKTSHSLLVGAILHVLYAEADKTLAGVANFLSDPSRAIETTLNAMLATPHLGERVHPVVASAARELLNKSENERSGVLSTTMSFLGLYRDPVVAKVTGQSDWRIRDLVDGDQPVSLYLVVPPSDIARTKPLMRLVLNQIGRRLTETLDTVRQRQKLLLMLDEFAALGRLDFFESQLAFMAGYGIRSFLITQSLNQLERAYGPNHAILDNCHIRVAFSTNDERTAKRVSDALGTATEMRAMKNYAGHRLSPWLGHLMVSRQETSRPLLTPGEVMQLSPNEAVVMISGVHPVRARKVRYYEDPQFQCRVLKPSRAVPVELVMRPDEWSGHAPIPPSAKLLASLTKKPRDHNGGIRREPEMQEHEEVVLKSPSVDSEFDSGTDESDAEAVQASALNRSMQGLARAVSLDPDDKMGL

SEQ ID NO: 9632 - protein, 144 aa, BradyrhizobiumColbertium
MKKAQLSIYLDQEIFRSLEAYAERQGKPKSLVAEAAIGSFLSPDDSDRREAAIAKRLDRITRVLERLELNHGVTLETIALFIRFWLTSTPALPEQSSPAARAKGAERYDRFVEALGRRLSSGSTVLKEVSVEFPEAGNAEQAKS

SEQ ID NO: 9633 - protein, 665 aa, BradyrhizobiumColbertium
MARRKVTVRLSERVSGRLDVASDRPGVGKSMLVEAALEQFMDPAPSVEAVLREQLDHVHARFDHLERDMRMIAETVALHARYHLTVVPPLPGSRQREAVVLGDARFKILAEQVDRRVRQCRPLMQETIDRLNSAEHEQSGPTAGEGPTDSSEPGRDNASSVSKGVNFEQRLAAPAGTANDIPNFLRHPKAATGQAKPASRAPQNLSVAESSNPASSNEKSGAAQEQPSTWRLILSVFLPFAAGYYLSFLFRTINASISPVLASDFGLGAAETGLLASVYFLVFAGAQIPIGVLLDRYGPRRVQSVLLVLAVGGTSLFGNADSFAELLVGRALIGLGVAASLMAGLKAIVMWFPRDRVALVNGGMIMLGSLGAVTATAPTDWLLTWIGWRSLFEVLTMLTLAVAALIYLVTPRAEGSSKRSTSSEKPLSLGSIFSDPRFLRIAPLSATCIGSSWAMHSLWAASWLSDVEGFDRKIVINQLFAMAIGISVGALLLGAIADRLRKRGIATEVLLVVVGVLFMLAELAIVLRLPLPSVLPWSIVSVVGAGTVLSYAIIADYFPVEIAARANGALNLLHFGCAFAVQYGIGLIVASWVPEAGHYPLVAYQAAFGLALLLQAVALVWFAVPWLGQFFRLLRSPPARPDNEVTFVQPAAEGMILEGSQGVEW

SEQ ID NO: 9634 - protein, 98 aa, BradyrhizobiumColbertium
MFSFKKSFRVAAIVTSDKLQACNQSAQFCPYQIYRINKRALGRTREYEAGDLVLVRDQGASAIPAFAKPPCVVDRYLDDDLIVKCRPPSSEIDVHDAI

SEQ ID NO: 9635 - protein, 184 aa, BradyrhizobiumColbertium
MSTTMTPEQREDAEMNAREFFDKLAPSDKLPDPRDPASIEQYTQRLGEISQTSFSDAVSTLASTVDKSTAESLQAAGDRRNLGSYVIKAFQKKICGNPEVTEEVKKALAAAEKQGGVQITTPTATGITTGVATLVSISILTAFSGPVAVVVAPLAAGVALLVMQCGLDGFCAWSAGDRTERRSG

SEQ ID NO: 9636 - protein, 561 aa, BradyrhizobiumColbertium
MLIRGLAPQFPSLAAVLINHFLLDIMASKRSRKSKKAPPRPKRRVTAAEKAAPSSENAGKTARASRRSKSFAAALWYAPGLDAHIKGNRALGKAARTLAERVVLTVAPKTVSGELIQSYRGRLHERDIEDFRPRADAVEGAVRRLKRLGFEVLRRGRFGITIAGHCELVSEVLGVQLIVQARPQRTSVRSTQNFAVSYQAPQAVDLYVAPSDSLTVSSAVSPHIDHFVFTPPPQLFVELSDTPPHCNYFTLDGAAIRRLLNVPEGVSGEGVKVAIVDTGFFKHPFYTSHNFDYRPMASATAPDPEKDRIGHGTAISFNALTVAPRATLLGFKQTEPPQDALEAASDAGADIISASWGWDKEQSFPILEATIRALVREGKIVVFASGNGLQAWPGSMPEVISVGGVFSAQDGTLEASNFASGYLSSLYPGRRVPDIAGLCGQRPAGIYITMPSAPGSILDNNLSGPSFPDRDETEADDGWLCSSGTSSAAPQVAGLIALLLEQARRDRIVLTSERIRDVLQQSAKPVERGSSAQGIPAVGHPNIAVGYGLVDAGNALERIRP

SEQ ID NO: 9637 - protein, 272 aa, BradyrhizobiumColbertium
MNRATYEFVRSQCLFSIEGQKRYAAAVNAGKKPPIQFPSDAIEVKAAWLDFEKPEAGKPPIPVEKRGTYYTAEFNGKKFGLVALHILTKDLTNWFWATFRHKDAPTEDFGGHDPDNYGPPQEVAGTVWDNYRLGGTQIDFSRPTGEPTIVSDHYVEFGFQRSSCIPCHATASISREIAGPPAGRPFTSMPNGQAKAVCSITPGTGDDLDSCKQLLGKDAFKPDGTPLVERGVPDPNWFQKDGKPFYLQTDFVWSIPFRGKSEAAPPPSRCNF

SEQ ID NO: 9638 - protein, 138 aa, BradyrhizobiumColbertium
MIAMTIGFTRLQEYLDAIARKANLDPANSRHGVFWRTTYQAFVTGNVPNKHCNGDVVPIINPANKVNSAFNQILRGSWCAMPQMPKTGPFLTDDGYFVILADGSRVDGTTILADIQGWLAAGAPENGDDQAPPPAPQV

SEQ ID NO: 9639 - protein, 479 aa, BradyrhizobiumColbertium
MNRFIEGADRAQSTLLPECLDDWVDESNPVRAVDAFVGALDLAELGFTDVEPAATGRPGYHPAPLLKLYIYGYLNRIQSSRRLEREARRNLEVIWLLQRLSPDDKTIADFRRDNGPAIKKACAKFVELCRQMGLLTKASVAIDGSKFKAVNTRDKNFTKGKVERRRQQLEESVSRYLAQLDTADLQEPSEALAAKTAHLKEKLTKLASEMKKLEAYEQAMLASPDQQISLTDPDSRSMATSGRGSGVVGYNVQVAVDTEHHLIIAHEVTNSGSDRAQLANMGKQAKAVLGVDKLEAVADRGYYTGEEIKACTDADIAVTLPKPNTTGMEAKGKFGKHDFAYLAKQDVYRCPAGQVLAYWLTTVDGERTIRRYATKACGSCPLKARCTTAKNRVISRWEHEQVMEDAQRRLDADPQAMRRRRETVEHPFGTLKMRMGATHFLTRRLPKVATEMALHVLAYNLTRVMNIMGVGALIAAMQA

SEQ ID NO: 9640 - protein, 306 aa, BradyrhizobiumColbertium
MLRTAFGPSIARFLEDPAIIEVMLNPDGRLWIDRLSSGLADTGEIVAAADGERIVRLVAHHVGAEVHAASPRVSAELPETGERFEGLLPPVVTAPAFAIRKPAVAVFTLDDYVAKGIMTFGQAGALKEAVAARHNILVAGGTSSGKTTLTNALLAEVAKTSDRVVLIEDTRELQCKAPNLVALRTKDGVISLSDLVRSSLRLRPDRIPIGEVRGAEALDLLKAWGTGHPGGIGTIHAGTALGALRRLEQLIQEAVVTVPRALIAETINVIAVLSGRGADRRLAELASVTGLGPSGDYALTKIGDKP

SEQ ID NO: 9641 - protein, 75 aa, BradyrhizobiumColbertium
MPWEQPLNQILQSVEGPVAKIIAVIIIIVTGLSLAFGDTSGGFRRLIQIVFGLSIAFAASSFFLSFFSFGGGVLI

SEQ ID NO: 9642 - protein, 87 aa, BradyrhizobiumColbertium
MDSRIPGFEAPVHRALTEPILMGGAPRSIAILNGTLAAALGIGLRLWLAGLLLWFVGHMAAVWAAKRDPDFVEVVRRHLRIPGHLNS

SEQ ID NO: 9643 - protein, 813 aa, BradyrhizobiumColbertium
MMNLAEYRRSNTRLADFLPWAALVDEGIVLNKDGSFQRTARFRGPDLDSAVPSELVAVAGRLNNALRRLESGWAIFVEAQRHSAGSYPPDTFPDETSALVDAERRAQFEEAGTHYESSYFLTFLYLPPAEGTAKAERLLYEGSNRTVDGDAREILRGFVDRTSRVLQLVEGFMPECAWLDDEETLTYLHSTVSTKRHRVRVPEVPMYLDALLADQPLTGGLEPMLGSSHLRMLTVVGFPTATTPGILDDLNRLPFAYRWSTRAIMLDKTDATKLLTRIRRQWFAKRKSVAAILKEVMTNEASALLDTDAHNKAMDADAALQELGSDEIGEAFVTTTIAVWDGDAAAADEKLRLVEKVIQGRDFTCMIETVNAVEAWLGSVPGHVYANVRQPPISTLNLAHMIPLSAVWAGEARDHHFRAPPLFLAKTEGSTPFRFSLHVGDVGHTLIVGPTGAGKSVLLALMALQFRRYPGSQIFAFDFGGSIRAAAIAMGGDWHDLGGALAGETSEFVFLQPLANIDDVAERGWAADWISSILTRERIEVTPEAKEHIWSALSSLASAPVEERTLTGLSVLLQSNVLKRALQPYCIGGPYDRLLDAENERLGASSVQVFETDGLIGTAVAPAVLAYLFHRIEARFDGRPTLLIIDEGWLALDDADFAGRLREWLKTLRKKNASVIFATQSLADIDGSAIAPAIIESCPTRVMLPNDRAIEPQIMAVYRRFGLNDRQIEILARATPKRDYYCQSRRGNRLFELGLGEVALAFTAASSKADQALIAQVLVEHGHENFAPGWLKARDIAWATDLIPQINGPEAPK

SEQ ID NO: 9644 - protein, 244 aa, BradyrhizobiumColbertium
MKRLRLLVAASIVVIAMVAGSRTVSAQLVVFDPNNYAQNVLTAARALQQINNQIVSLQNQAQMLINQARNLATLPFSSLLQLEQSILRTQQLLAQAQRIAYDIQQIDRAFSTTYAPASSSVSDQALIANAQSRWQNAMSGFQDAMRMQATVVGNLDTHRTQMSALVTSSQGATGALQASQAGNQLLALAAQQLADLTAVVAAHGRAQNLESAQRAAAQDQGREQLRRFLTQGVGYQPTTVQMFH

SEQ ID NO: 9645 - protein, 120 aa, BradyrhizobiumColbertium
MTTQKPNRFPYIVALALVGLAVAACTIPLRGGEEQAKLLEPNSPPPDPLAAKLAECRSVTYEQKDALAECRKVWAEKRHQFLGQKTPAPPGSEGSALFVAPKDESRLPSGYSPIQQPAKE

SEQ ID NO: 9646 - protein, 401 aa, BradyrhizobiumColbertium
MGGTGIIDQFLETFTRYIDSGFGLLGGEVGYLASTLAAIDITLAGLFWAWGADEDILARLIRKTIFVGVFAFLISNWNSLARAIFESFAGLGLRASGTSLSSADFLRPGKIAQVGLDAGRPLLESVWSMMGYVGIVENFAQIAILLFAWIVVLLAFFILAIQLFITLIEFKLTTLAGFVLIPFGLFGKTAFAAERVLGNVISSGVKVLVLAVIVGIGSTLFTQFTTGFGGNQPTIDQAMALVLGALSLLGLGIFGPGIANGIVSGGPQLGAGAAIGTGLTAGGAVVAGAGLAAGGVGLAGGALAAGARGTAAVASGAASAYRAGGVGGVASAGGSAVVSPLRRMAARVVSGSSTAEAAPAWARRMKRAQSVNQGVAAATHAVRSGDGAGSGSSVDLSEGGH

SEQ ID NO: 9647 - protein, 211 aa, BradyrhizobiumColbertium
MTPYQKAAQVWDDRIGSARIQARNWRLMAFGCLLLSAGLAGGLVWQSTQGTITPWVVEVDHLGQAQAIAPANAFYQPADPQIAFHLARFIEDVRGLPTDAIVLRQDWLRAYDFTTDRGAVALNDYARTNDPFAKLGTTQVAVDISSVIRASPNSFRVAWTERRYDNGQLAATERWTAIISIVIETPRDAERLRKNPLGIYINSINWSKELG

SEQ ID NO: 9648 - protein, 327 aa, BradyrhizobiumColbertium
MRNFTFRSATSSFTPKSGCFALLLTITLSGCTTFKPPQISYDDEVPPSPDLSMPADEHARPLHIPPTWTPSHGGNKGEAEAKDPTDRIEVANDVARVQPRRAGYFNAVQVFTYSPGALYQIYASPGQITDIALEPGEQLTGSGPLAAGDTVRWIVGDTESGNGDTRRVHIMVKPTRPAIETNLVVNTDRRTYLIELRSREKLYMPSIAWFYPEDRSSRSRSLPPTPIIPEMAQRRYRYAIEGDKPPWRPINAFDDGRKVYIEFSLGIEQGEMPPLFVVGQDGRPELVNYRAFKNVLIVDRLFAAAELRLGGEKQQKVRIIRADGRQS

SEQ ID NO: 9649 - protein, 399 aa, BradyrhizobiumColbertium
MTDNGADANNTGPSAPTGAPSQISPQTLRLGGERPRITRLSRKVLAGGTALALLLISGAVLWALRSNERRNPVPDELYSTDHHNLADGLTALPKDYTGIVRSPPQLVPTLPSDLGRPIGTAESQSVPIGIDAEQQRANQETEAARTSKVFASTTAPAAPSNAASQTPASSANSSSDETFTQNGQDRKLLFVNAPVDRRTTAPDRLSRPASPFVIQAGTIIPAALITGIRSDLPGQITAQVTENIFDTPTGRAKLVPQGARLIGLYDSQVAFGQSRVLLVWTRLIMPNGRSIVLERQQGADAGGYSGLEDEVDNHWKELLGAAALSTLLGVGSELGSGTDNGSNTAILQALRLGAANSVNQTGQQVVRRNLNIQPTLTIRPGFPVNVIVNRDLVLEPYRG

SEQ ID NO: 9650 - protein, 80 aa, BradyrhizobiumColbertium
MTRLKLGALSDDKPVKVTHELPASLHRDLVAYAKILARESGQPIGDPVRLIAPMLTRFMATDRLFAKLRRTSQVTKEREG

SEQ ID NO: 9651 - protein, 56 aa, BradyrhizobiumColbertium
MRAPPFNYGDFDLWKSLTEIQKRGSQIAGCERCAEANGKPASFTSASSLCDGSKGI

SEQ ID NO: 9652 - protein, 357 aa, BradyrhizobiumColbertium
MRTDLFDFDLPAERIALRPASPRDSARMLVVENGALHDQAIADLPQWLKPGDQLVVNDTKVIAAQLKGRRIGRETEPKIEATLIKRLDGSRWQALVKPAKKLTAGDRIRFGNEGKVCLLGHLDAEVEAKGSEGEVTLSFSFHGPALDQAVADLGSPPLPPYIASKRTPDDQDLADYQTMFASNEGAVAAPTAGLHFTPALEEALCARGVGINRVTLHVGAGTFLPVKVDDTEGHKMHAEWGTISAETAERLNAAKKNGNRIIAVGTTSLRLLESAAREDGTIQPFAAETSIFITPGYRFRAVDVLMTNFHLPKSTLFMLVSAFSGLATMKGAYAHAITTGYRFYSYGDACLLFRAAP

SEQ ID NO: 9653 - protein, 345 aa, BradyrhizobiumColbertium
MEDKVSNDPVVAIVGVTGAVGAEFIATMDKRGFRVGKLKALASARSAGKAVSFRGQEIVIEELTERSFEGVDVALFSAGGSISRKFAPVAVKAGAVVVDNSSAFRMDPNVPLVIPEINARRIRDHKGIIANPNCAAITALVPLWPIHQKNRIKRVIISTYQAASGAGAAAMDELVESTRANLNGQVYTPTVMLHPYAFNLFSHNTAVDPETGYNDEETKVIKETRKIFEDDKIAIGVTCVRVPVLRAHCEAITFECEKPISEDQVRTMMARAPGVKVVDDRAKNYFPMPIDASGQDDVLVGRIRKDLSDPSGHSISMFVAADQLLKGAALNAVQIAELLPQRVMA

SEQ ID NO: 9654 - protein, 199 aa, BradyrhizobiumColbertium
MTTAHPWTLSATALAALLVAAPAQAIVSAGGTPIALHGETVGNADADRLAISREIERFRSVPISISQAMAIAEGRHAGATTADVSFDGAAGVPVYRVKTVHNDRIWRHTISASTGELVDGEAALPLTELDREDRSNLAALGAIRHRLADAVRVAERAASGKAISGGLVRERGRLSFAIVVISGDDLKEVILEPPGARAR

SEQ ID NO: 9655 - protein, 248 aa, BradyrhizobiumColbertium
MGLTATRTKPAAPRREMPKSRGGRPTKSAAIERDQRLIEVATRLFLDRGFDATSLDAVAEAARVSKPTVYSRYGDKRGLFAAVLRREIARWLAPLSAAAETQLSSASDISVEQRLVEIGREMLTFTCGPDAVAFSRMMTAQAINFPDVAKLGKEEGWLKAVATTARFFDHLVTQGALDVEDTTIAAEVFLDVVVGHTHRMATFGTALELKTAEKRMRAAIKLFLAGALGPADRVQDSTRVPTRRRSSR

SEQ ID NO: 9656 - protein, 391 aa, BradyrhizobiumColbertium
MSHPSSSNDEPVSSRDRIRHRGVGLLVLTCSLALGACTSLPRTTYTAAEASTSRVLDIDGLRRYADDPVTKFSFEKDTRTAPKSYLALSGGGADGAYGVGVLHGWTAAGTRPTFSVVSGVSTGGLIAPFAFLGPQYDDTLKEVYTSGIAESLLDDPSIMRVLFGSGLFGNTRLRELVAAYVGPEIMAQVAREHAKGRKLLVVTTDLDTQRTAIWDMGKIATVGSPEALKLFRDVMAASASIPLVFPPIMIDAEGQGRKFQEMHVDGGVTAPVLTLPEALLFQSGRLPGNARMDIYILVNKKIERNFELVANGTIDVASRSLSAITQSQTRSIIFSTYDFAKRNRLGFHLSYIARDYPAPRSEGFDTAYMRALYQYGYERAASGQAWTSTLP

SEQ ID NO: 9657 - protein, 381 aa, BradyrhizobiumColbertium
MNPDNDLPNHFELLATDGAARTGRLTTPHGMVRTPAFMPVGTAGAMKGMHWREVRDAGADIVLGNTYHLMLRPSAERIAALGGLQRFTGWNGPMLTDSGGFQVMSLADLRKVSEHAVTFRSHIDGAKVELSPERSIEVQRLLGSDIAMQMDECVRLPAEPADIERAMQLSLRWAERSKRAFESAPDGYMLFGIVQGGDVPQLRHASAEGLVAIGFHGYAIGGLAVGEPQAVMLAMIDETAPLLPAERPRYLMGVGTPDDILEAVKRGIDMFDCVMPTRNGRHGVAFTRFGQVNLRNARHADDPRPLDEASSWPAARNYARAYLHHLVKAGETLGAMLLSEINIAYYQFLMQGIRDAIAQRKFDEFYQRTREDWARGDIAPR

SEQ ID NO: 9658 - protein, 72 aa, BradyrhizobiumColbertium
MSAIAEVMSTVALNRDPRCSELPTCPVCADTMVAAEASAYVSDHVISYLWTCDNCGYGFVTKHALKQSFICN

SEQ ID NO: 9659 - protein, 325 aa, BradyrhizobiumColbertium
MDTSSTTGATHQPGRGRIYDSVVEAFGNTPTVRLRRLPGMRGVNATILAKLEYFNPAASVKDRIGAAMIIAMEKAGIVKPDTVLIEPTSGNTGIALAFVAASRGYRLKLVMPESMSIERRKMLAFLGAELVLTPAAQGMKGAIAAAEELVKTTPNAVMPQQFKNLANPDVHRRTTAEEIWNDTGGNIDFFVAGVGTGGTITGVGQVLKPRKPGLRVVAVEPEESPVLSGGQHTPHKIQGIGAGFVPDILDRAVIDEIVKINSTTAIETSRALARQEGIPGGISSGAAIAAALEIGKRPEATGKTILAIVPSFSERYLSTALFEGV

SEQ ID NO: 9660 - protein, 79 aa, BradyrhizobiumColbertium
MADQPRRPRTLGDARSEAEAAFKKVTAKVAAAPPRQIAVPGIKEQVTLRIDQDVLEFFQEGGPGWQDRINEALRKAAGK

SEQ ID NO: 9661 - protein, 475 aa, BradyrhizobiumColbertium
MRYLTLLASLMCMALSISAAKADRRVAFVVGNGSYKNVAQLPNPPIDAKAMAATLRNVGFEVIEGSNLSRDQMTEKLLDFGRKAQGSDIALFYYAGHGIAVSGTNYLLPVDADIKSEMDVKLGAAINIDLTLEQTMGDAKVKLVFLDACRDNPFAAKIKSNAATRSVNVQSGLAEMKSGEGTLIAFATGPGQTALDGQEGNNSPFTRALIDNITKPGVEIQQAMTSVRAQVNEETRKSQLPWGHTNLTGSVYLNQAPTTQVANAAPTASGIVPGASSSSDGVELEYWRSVKESNKPEELNAYLSAYPNGQFKALALARLAAIKSGTSTATRTLNAGVDPATFTDEATQLTEDQIGLNKTQRRDVQRRLTSLGFDTKQTGVFSEETRAVLRRWQAARGYPSSGYLNKHQHKALLSEIMAAPATASDTSQKPARRASAPPPSSAPAPAPHRSNPGDAAGAAFVGGVVGGMMGGMFRR

SEQ ID NO: 9662 - protein, 50 aa, BradyrhizobiumColbertium
MQAATDWQRTYTKCPTSRHQNGRPLGSTRCCVANVHDGVPLQRDPNHTVT

SEQ ID NO: 9663 - protein, 310 aa, BradyrhizobiumColbertium
MSPIPAVLFGFPSSGIRPLMSTTPSKAMAALWMAGWLSLMLVMAVAGRETTRELNVFQIMEVRSLIGFVLLAPIIYRAGGLKTVKTSRLPQHIGRNLVHYFAQLGWFFALTLIPIGQVVAIEFTMPIWTAILAASFLSERMTPWKIAAIVLGLVGVIVIVRPATGEVNPGQLIALGAAMGFGISMALVKSLTRTESALSILFWMLVVQSAAGFVPTLFVWTWPSTYVWAWLGVIAVCGTFSHYCLASAMRYADATIVVPMDFLRVPLTAAAGWLLYSERLDAWTVLGAALILGGNLLNLKPTSPVPARAQ

SEQ ID NO: 9664 - protein, 132 aa, BradyrhizobiumColbertium
MHILQPAEWKKPRGFSHGIVVDGPGRWVVLAGQTGGDESGNYAPDMAAQVATALKRIINLLDEAGAGPEHIVRLTWYLTSRSEYEAAGAGIGAAWKETLGRNFPPSTLLYIPGLVDERAKVEIEVTAFVPDA

SEQ ID NO: 9665 - protein, 145 aa, BradyrhizobiumColbertium
MLAATAVSSESKAQSGPFAPMAGSWSGAGTVSLEDGSTERIRCRAKYAPIGPTMELTLTCASDAYKLAFAANVQSAGRAISGSWSEASRNISGTLQGRGSGGNFELVASAAGFNANIALKTSGNKQTVNIRADSQFRGANISMSR

SEQ ID NO: 9666 - protein, 116 aa, BradyrhizobiumColbertium
MRFGRIAAFCAASVFAGTLAAPALAQSPYDGNWQVTIVTKTGSCEPTASSMLTVAGGKITAPGANVSGTIGSGGLVKVSINGAYANGQLNGNAGSGKWNGASAGIPCSGRWEASRL

SEQ ID NO: 9667 - protein, 195 aa, BradyrhizobiumColbertium
MRITLVGSRHFGVTTLNMLREHGVSVIRVVVADAEDRLAATAKAAGIDVVVQANPKLVVASEIAPDTDLIVTAHSHARIGKDALAAAKLGGIGYHPSLLPRHRGKAAVEWTIKEGDPIAGGTIYHLADRMDAGAIAAQDWCFVKKGETARELWERALAPLGLKLLADVIDYAKVHKALPAKVQDEQFATSAPSLS

SEQ ID NO: 9668 - protein, 72 aa, BradyrhizobiumColbertium
MPSAIEQIVDAYVRLKNRRGLDELMMHRQRLAVDLKSRSGYDFSLPIGQIDEEIAIIEAGLRRLKAENSTAV

SEQ ID NO: 9669 - protein, 100 aa, BradyrhizobiumColbertium
MADLNAVLTRLNDRLLRLEGELFVLRSLARATLTAGDDHAARMRKLVEAAKVALDDEAKRPLDKPTRKYVDAATALVDELLVEPTPARPLFTVIDGGRRD

SEQ ID NO: 9670 - protein, 75 aa, BradyrhizobiumColbertium
MANSIWKIEEFTCAGCGMNYTATREEHSEAHTGSFKCGICNSVVHAWSGKHHFFGWQAVKTRPPVFGRRWADVEW

SEQ ID NO: 9671 - protein, 38 aa, BradyrhizobiumColbertium
MVLVLDVSSSHLDGGCVAGNNGQAAPEVAFMPQGKLCP

SEQ ID NO: 9672 - protein, 359 aa, BradyrhizobiumColbertium
MKSLRQLLTGEDVIQLVIRLGLLALLIIWTFLIIRPFVPILAWSGVLAVAFYPAFSWVAKILGGRPKTAAAILTLITLGIVIGPATWLGISAVDGVRELAHQLGTGDLALQSAPEQLKSWPLVGPWLYELWDQAYNNVRAVVREVAPYLQPLAGPLLSLAGDAGVGTLQFLVSVFVAGFLFPHGPRLVAAGRGFLFRIVPEQTEHFLGLAGATIRAVAQGVIGVAIVQALLAGIGFKLAEVPSAGLLAFIVLLLSIVQIGAFLVLLPVIIWIWTAKDVTTALLLTVFLVLVGFIDTMLKPLVMGRGLTTPTIVIFVGVIGGTLAHGIVGLFIGPIILSVAWEMMMAWIRTEDRAEAGER

SEQ ID NO: 9673 - protein, 134 aa, BradyrhizobiumColbertium
MTAAMAKSSKLVAAKRGKVLLVRRRSDGLWMFPGGRKRARESDKDCLRREIKEELPKLKLGRISLWKEVKARNKVSGRKMSDAIFIAKAAKGRLLIGDKKELDRAAWQKPRGIRLTPTSRYIRDRLFPRKQRRS

SEQ ID NO: 9674 - protein, 81 aa, BradyrhizobiumColbertium
MFRDRAGRLQDGYSRQCPSCEVVLFFAEDSQHPFIKRAMRSARQVRKEMRELEAARLAAPERQAPQSRRFAGRTRSAERED

SEQ ID NO: 9675 - protein, 83 aa, BradyrhizobiumColbertium
MEENLKSFIFISIIALLAMAPAHAQTLVDPNKVAPEYREAAEKRRAEQLRQRECALKADLEKVLPRDRTAFLNRCLETMAAKQ

SEQ ID NO: 9676 - protein, 133 aa, BradyrhizobiumColbertium
MNPSLILTRRQQNASRPLCRIGNSPPCIWDLPCERTPRWQRSRRRRDPLQAGRCSASKTEPTRAISASRDACGAAMGDALHMAMKKPQRLEPRWGVSFEMNWSSNVISIAAISLRACELAHTPPAGTGYLIPI

SEQ ID NO: 9677 - protein, 1067 aa, BradyrhizobiumColbertium
MRLSKKARVAKKAPKKTKGSQRATISSSSPLGMMALHLLAQWKQSGRSGIVFLAESENRAERLGSVIHALDPSCEVLVFPRLNTLPFDQLEPSHELAGRRASVLRRLAKSKKPLFLVSTAEAVMERLPPPASLVRLSLSLKVGGAFSEEDLEARLQSLGYDLDDEPDYPGGALFHGQTFEIFPAGALGPFRIEHSDRAIERIVAFDPKEHRIIFETKELLVDPMSERLGLAGKGSKRASLFDYCGGAKWIGDAGVPSHADRWLDTIEEAAPRAEREREYLGRRDWKQLSKGMKVLPRMVSFQAVPEFSKLTSSRKALRGFVEERRRAGSRLILAAAHEDDLRVMERMGGVKAERCDDWEEAACGRGGAAALLADLDAGFVAPGKKPLVVVTASDVLGSRAHHPQPMARAWSAAFDHADVPEQGTVVVHLQRGLAVLDGLQTVNTGGGAMREMIRLKFAGDNAVLVPPADLALMWPYAAELGKLSLDKADGSTWWARRGEAEREIQAAGKVLAKHISQRRRRRGEKLVPPGSAYEKFVARFPYFTTSDQAKAIDDVLDDLASGHPMDRVVCGDVGFGKTEVALRAAAAAVLSGKQVAIAVPTTVLARQHVATFQKRFAPFGIEVGNLSRATSGAELRETREGLRSGRIKVVIGTQALTGKDVRFDDLGLVIIDEEQHFGAAEKAKLAGLAKNVHVLMMSATPIPRTLAAGLAGFRDLSVIASPPVHRLPVATRIAPLSDAAIASALLREQRRHGQSFLICPRIQDLEPMLARVQAVAPDLRIVCLHGKLPADEIDDRMMSFVEGGADVLLATNIVESGLDIPRANTIVVCWPEKFGLAQLHQLRGRVGRSGIRAFAHLLTETESGQSEKRLAVLEEFSRPGAGFAISERDLDLRGAGDLFSEQQSGHVQVFGPVLYSHLLRMASEKAGEAQAALWVPDLNLPVGDMLPESYVQSEPVRLELYARAARCNDEDDLEDLEEETARRFGPLPKVARDFFAAAKLRIACKRRGIIRLDVGPEAAAATFLPGRLRKSRGKSLQRDGDRVIHHSPMGDAPFERVEELFELLDEG

SEQ ID NO: 9678 - protein, 354 aa, BradyrhizobiumColbertium
MQSYISKRASLCLVSLLLASLASTAAAQESPPDYARYREGLFLRYLNADEGDLREVPRIGLSFGERPIRAVLDSGSTGIVVAASFIPNFDRLASLGEGKLTYSSSGRVMLGQWVVTPVALVGIDGAAVQTEPMPVLAVTRVDCLQHARDCTPSDAPHGIAMVGIGYGREGDLQSQSTPEKNPLLRVTGGHGERRRGYVLTAHGVHVGLTGANTRGPFSFTKLSRQPDRPDWSATPACISLNGRTPPACGSMLVDTGVSVMFMTVPAEQAGGATASLDTGTSVSIRVGTAEKSTELYRFAVDGGSALAPDRIHLRVSPDRTFVNTSFHLLNGFDVLYDADGGYAGFRRREAGASR

SEQ ID NO: 9679 - protein, 169 aa, BradyrhizobiumColbertium
MKRPNVVASGALALAALITLSTCPARAAGQLVNSWRTPDGWLTEMRVHPNGARVCSTGKAAQAPRPFGLSIVRSGTENVLLVVDEAQPPTSAGDMSFVQAGKTVGTLRTQVAGPAFASADPFSSQTPDLIAKLTTAALTIDVAGRQYQTDMAGLPDALAQLAKCEAEPK

SEQ ID NO: 9680 - protein, 223 aa, BradyrhizobiumColbertium
MTASFETPSFAEELDAVALAAAASAHEPAVTDSPALIERPSRKTVLLLAACAVAIAINGAAAVYTLPSALPSFSVARLAELLPRKEAPAPKPDPVVATLKEIQSAQQQHTASLQENNQALQQNAALLQQDSLVLLSLRQSITEERVDVRKISSQLSTLIAKVDSLSQNVLMSDVTSSVRRANARYGLSAAMRKRMVRPSKPLGPVSVGGAPLSVPAMVAAPES

SEQ ID NO: 9681 - protein, 56 aa, BradyrhizobiumColbertium
MFEIKGFDTAGVVSLKRPSLPAALKKARELVEDGCWDVQVVEPTGRVHTSFEEQAA

SEQ ID NO: 9682 - protein, 71 aa, BradyrhizobiumColbertium
MKTESSLIVRAPPGRQLDLLRGEAARIAKANDVNWCTDRAAIGTRFCFDNDKAKTSFARICDDNGVPYQDG

SEQ ID NO: 9683 - protein, 58 aa, BradyrhizobiumColbertium
MHFVLMNADTDRYRRQAKASLDEAQRATRVQDLEAWLKLAEEWMEMAEAAQRQSSYEN

SEQ ID NO: 9684 - protein, 71 aa, BradyrhizobiumColbertium
MKDPHGEEPAAGGRPDDAPHRRATMQAQVVRRPPTVRGRRPANQVENHGLSQGFHERNPASAAIFGNHPHY

SEQ ID NO: 9685 - protein, 888 aa, BradyrhizobiumColbertium
MRVVAAVLLLVSALHAGVWGVLREKEPAPDFRGLLPSVSYAPFEGSAHPDIDNIPTVEKIRADLKTLSTMTRAIRLYSSTGGVELVPPIAAEFGLKVTVGAWIDKDTDRNQREIKAAIELARKNSNVVGVVVGNEVIYRGEQKVEDLIDMIKKVKSAVRVPVTTGEIWNIWRDNPDLASNVDFIAAHVLPYWENFRSDQAVDQAVDRYNLLRNLFPGKRIVIAEFGWPSQGYNLRNADPGPFQQALVLRNFVTRAEAIGMEYNIVEAIDQPWKFFEGGVGPYWGVLNASREPKFAWTGPVENPDYWKLMGIALLVGILLSLPILRIEKATAKQAFLLSATANGVGAWAATVFAFWNSHYFIFGSAFALTLGMILLVPLVLIAMARIDEIAAVAFGRPPQRLLSKGKPVENVPENYCPKVSIHIPAYFEPVEMLKQTLDALSRLNYPNYECVVIINNTPDPAFWQPIQDHCRALGERFKFINAEKVQGFKAGALRIAMDRTAADAEIIGILDADYVVEPDWLKDLVPAFADPRVGLVQAPQEHRDGDLSIMHYIMNGEYAGFFDIGMVQRNEANAIIVHGTMCLIRRAAMDMAGGWSSDTICEDSDLGLAIQELGWVTHYTNTRYGAGLLPDTYEAFKKQRHRWAYGGLQIVKKHWRRFLPGASRLTPDQKREYSLGWLNWLGAESLGVVVALLNLVWVPIVAFADIAIPDMILTLPIIGAFVVSLVHFLSMYRARVAIKPGQMLGAMIAAMSVQWTVSRAVAQGLITEHIAFARTSKGGLSRMSIEFQAFWEAVIGTLLLVGAGVLIATNSYKQITEIYVFAGVLVLQSLPFLAAVAIAVLELSRINSFQFWRDSAIRTAELIGLRPVALPPVGAPQAVPTEVRREAN

SEQ ID NO: 9686 - protein, 192 aa, BradyrhizobiumColbertium
MFESRNAVLRQFAAALAVSSLLVIAGLGSASAQSGTPTPDPGKAAQPADAAKDAAQNQRRTDEFAEAAHVINGPAGNPECVWLGRRVVRLMWRDDLDTAFRHLDLYDRFGCPGGHIQAAFRCLTRFGGQIDPKVAETLDSRVHACWINPAAQPQQAAAAASQPAAPAAGSSPAPQPAASPSPAASPSPAPAK

SEQ ID NO: 9687 - protein, 532 aa, BradyrhizobiumColbertium
MALLLVSLGAIAAVWWWLATPITLARAPIDPAEKVQCVSYAPFRGEQTPLEAWTHIEAEQIEQDLRQLKEITDCVRTYSMENGLDQVPAIAAKVGGLKVLQGIWLSSNRTKNYEQAGLAIRLTKQFPDIITSVIVGNEVLLRGEMTTADLVSIIRLVKTQVSVPVTYADVWEYWLKNREVYDAVDFVTIHILPYWEDFPIKAKFASAHVQAIRERMAVAFPGKEILIGETGWPSEGRMRDGALPSRTNQARVVSEILSLAKSQKFRVNLIESYDQPWKRKLEGTVGGYWGLYDAVHRTLKYPPGQPISNFPFWKWYMGAGMGLSVLVFAVALITLRRRPWTPRFAAWLGVGISATTAGILLGIGIDKMYYESYGIGGWLLWGALLLAGILSPIFCAQAMVIGRSLPTFLDLLGPREGRKWSKLTAVLGLTLAVTAVIAAATALGFVFDPRYKDFPYAALTMAVVPFALLMLNRPQIGQRPIAEAVFAGVLALSAAYVLVNEGRDNWQSLWTCAIYLLFALTLWRARAEQSRE

SEQ ID NO: 9688 - protein, 168 aa, BradyrhizobiumColbertium
MQNQPDARLFLHDAGAGRIDGNVTCRVTCPVACPRHADHIAAMTKKPFRLTPYQVQFLIVVGFASVGYALYLRYLAIELSQVALACDAGLQTLICKGRSVATVLFKNSVFGIVALVVATLNLMRPSIVLLTVGIIAAGLGIVLYNVVLSGLAIGLLILGFARPAPATA

SEQ ID NO: 9689 - protein, 48 aa, BradyrhizobiumColbertium
MDKPTQEQLSELKRLSKEARVEDWSEIVQSKDEAETRIRDLKEKARME

SEQ ID NO: 9690 - protein, 147 aa, BradyrhizobiumColbertium
MMNELDDVLRLLVAAATGLLIGIDRDMNDKPVGMRTLALVALGSALVSISVIEFQNMRDHPDAISRVIQGVVTGVLSGVGFIGAGVILHDRKSKTVHGLTTAATVWVAAGLGIACALGAWLLVGAAIAVTLLVLFVLGWVERRLGFK

SEQ ID NO: 9691 - protein, 452 aa, BradyrhizobiumColbertium
MAKDSDPLADAFGAKETGGLFSGLLAEESAFDRRLMWRLGSWGVAAVGAVVVAVMANQAQLGWRRDQVASADLARQADRLQMLSKESQNEARRLAAAIETLNTDRDRLYSRVTVLEQGLDSVTGAIAKQAAAPAQGTKPQDATPVAAAPSVAPVASTPTPPSEKPRTEAAKDAQKETLQKETAKEPASAPPQTAAAASLMQQSPANNSALPTIPLVPSKSIMAPPDPAAPKLIQHDAAEKKAEPPAAAEVVAATTKPSDAAESESPAIAVQQTRFAIDLGGANSVDGLRALWRGLTKSNPEIAALRPIIMIKEGTTGLGMQLRLGAGPLVNAAVAAKFCASLAENDRHCETTIFDGQRLSMRGGQDKGQDKAQEKTQERVQDKSAEKNPDAVPQAETAPASAKPEKQQRRRSYPSKRSKREEPAPAPAAQPAPAPPKPEASAGSTLSSFFRR

SEQ ID NO: 9692 - protein, 451 aa, BradyrhizobiumColbertium
MTARSSLTIVLAAGEGTRMRSSLPKVLHPVAHQSLLAHVLAAAPRGTGTSLAVVIGPDHQAVADEAKRIRPDAMTFVQAERLGTAHAVLAAREAIARGVDDLLVAFGDTPLISAETFARLRAPLARGAAIAALGFRAADPTGYGRFIVEGDRLVAIREQADASEAERRIDLCNAGVMAIDGRRALAILDKIGNANSKGEYYLTDAVEIVRRQGWESVVIETGEDEVRGINTKAQLAEAESVLQARLRKAAMEAGVTLIAPETVYLSADTVFGKDVTIEPFVVIGPGVSIADGAVIHSFSHIVQTTLGKKVSIGPYARLRPGTSLGDGARIGNFVETKAATLEAGVKVNHLSYIGDATVGANSNIGAGTITCNYDGFKKHKTVIGQGAFVGTNSSLVAPVTIGNGAYIGSGSVITKDVPDDAMALERNQQTIREGGAARYREMKTGGKKPEK

SEQ ID NO: 9693 - protein, 72 aa, BradyrhizobiumColbertium
MKGSSDRKGLSSMSVRASETTGTHLAHWPPPQRGKESKPVFMKHPEGEPVKRAKPRGWRLTRAIFSEFADEE

SEQ ID NO: 9694 - protein, 608 aa, BradyrhizobiumColbertium
MCGIVGILGREPVAEQLVDSLKRLEYRGYDSAGVATLEGRHLERRRAEGKLKNLEKRLEAEPLKGTTGIGHTRWATHGKPTVNNAHPHATERVAVVHNGIIENFRELREELERKGTVFHTETDTEIVLHLVDDLLARGNKPVEAVKLTLARLRGAFALGFIFAGDDDLMIGARNGPPLAIGYGDGEMYLGSDAIALGPFTDTISYLEDGDWVVLTRKSATIYDKDGYAVQRDKIRHAASTSLVDKANYRHFMAKEIHEQPEVVGHTLARYVDMATERVALPVNLPFDFNDIRRINITACGTASYAGFVAKYWFERFARLPVEVDVASEFRYREAPLRKGDLAIFISQSGETADTLAALRYAKAEGVHTVAVVNVPTSTIARESETVLQTLAGPEIGVASTKAFTCQLMVLASLAIAAGKARGELSEEDETKLVHGLVEVPRLMADALTSEPQIEKLAHRIAKSRDVLYLGRGTSFPLALEGALKLKEISYIHAEGYAAGELKHGPIALIDETMPVVVIAPHDRVFEKTVSNMQEVAARGGNIILMTDAKGAAEATVESLVTIVMPDMAAAFTPMVYAVPVQLLAYHTAVVMGTDVDQPRNLAKSVTVE

SEQ ID NO: 9695 - protein, 256 aa, BradyrhizobiumColbertium
MTPRDDAPAPLDPVPEPHTGLMGRFRNYFLTGLVVTGPIAITLYLVWWFVTWVDGVVRPFVPLAYRPETYLPYVIPGWGLIVAFFTLTLVGFLAANLIGRTLVDVGETFLGRIPAVRAIYRGLKQVFETLFSGKGSSFRKVGLVEFPSPGMWSIVLISQSPNEDIARSLPGQEEHVSVFLPCSPNPTTGFFFYVPKSKIIEVDLTAEEAATLIMSAGVVQPGSTPDSKKAAALAGVANAARIANASTLKPEPAKVE

SEQ ID NO: 9696 - protein, 289 aa, BradyrhizobiumColbertium
MSKMTSKTIAILAPGAMGSAVARRLSENGARVLTSLQGRSEATLKRAVDAGMVGAKDDAIAEADIILSIVPPSEAVALAERLAALISTRAHKPIVVDCNAVNVETVRRIGEIIASAQAPFVDGGIIGFPPQPGGKSPAFYMSGEHARDVMVLKDLGLDVRIIEGPVGAASALKMSYAGIVKGLAGIGSAMVIAATKAGAADALRDELALSQPAILARLEVALPDMIPKAYRWVAEMREISGFLGPDHPASQIYEGFARWFEHLAEDAKGEGADAELMRAFAARVAQTGA

SEQ ID NO: 9697 - protein, 702 aa, BradyrhizobiumColbertium
MRPSLLNPLFAPVTSLPGVGPKQDKLLQYLLSRSETPRLVDLLLHLPSQVIDRRARPKVRDAAVGTMVTLEVTVDRHRPPPPRNARAPYLVYASDDTGDVVLTFFRAKPGYVEKLLPVGEKRFVSGTLQMYDGIPQIVHPDRVLDEEVIAKLSGIDPVYPLTEGLALGSLRRAIGQALQKLPALPEWISPEVMRRCNFPPVAEALTRVHQPAELTDILPDQPFWSRLAFDELLAGQLALALIRAQLRRPAGVRNAGDGHLRNKIIDALPYALTPSQRSAAAAIAEDLKQPVRMLRLLQGDVGSGKTVVALLAAAAVAEAGKQAALMAPTEILARQHVKTIAPLAERAGMRVAILTGREKGKERREIITQLADGEIDLLVGTHALIQDDVIFRDLALAIVDEQHRFGVRERLALTSKGEAVDVLVLSATPIPRTLVLTYFGDMDISELREKPAGRQPVDTRAVAMSRLGEVMDGVGRALQSGKLVYWICPLVEESEAEGTEHLTNATKRFESLQKRFGERVGLVHGQMKGTEKDRVMGQFAAHEIGLLVATTVVEVGVDVPAATIMVIENAERFGLAQLHQLRGRIGRGSEASTCILLYSEPLGEMSKARLKVIRETTDGFRIAEEDLKLRGEGDVLGVRQSGLPGYRIARPEVHGQLIAQARDEALRILKDDPKLKGERGEALRCLLYLYERDEAIPLIGAG

SEQ ID NO: 9698 - protein, 210 aa, BradyrhizobiumColbertium
MIRLLLTSGRGPGECRIAVAKTAALLIAEATALGLDTDYLEGPNPDAHGPASAIVVVHGDPAAAFASPWIGVIQWTAQSPLRPHHKRKNWFIGIFELPPLPDVPKAIDAQDVRFEAFRAGGPGGQHQNKTESAVRAIHVPSGLSVVAREERSQHRNKALALDRLAGLLRLQAELTAIAARNEAHAAHDQLERGRPVKRFKSPNFQAVWQR

SEQ ID NO: 9699 - protein, 397 aa, BradyrhizobiumColbertium
MGNSANVDGRAPIHIFASSNSWIEGNATLQLEHVAGLPGVRAVAAMPDLHPGKYGPVGCAILSDRIYPQLVGSDIGCGMGLFELDIAARKLRLDHLAERMHALDRPWDGGVETELADAGIGASIFDAALGSIGGGNHFCEVQAIDEILAPEAAARAGLDRNLAYVLVHSGSRGLGFSILEQALRDGPDALPIGSDRGQAYLAAHDHAVQWARLNRRIIAERTGVAARASLRPISDLAHNMIEQQADATGEALALHRKGVAPADRGLVPVPGSRGTLSYLVEPLAEMPGDALASLAHGAGRKYDRASMHGRVRVKKSDVARLERNPFGGIVVCGDRGLLAEEAPDAYKSIERVIADLVEFGLARVVATFRPLLTFKRAQSSVAVRDARRGKRWKEDRR

SEQ ID NO: 9700 - protein, 41 aa, BradyrhizobiumColbertium
MACDFSISPLCVSPDPAPIWRDHQGEGSMTIMSRRPVEGIA

SEQ ID NO: 9701 - protein, 96 aa, BradyrhizobiumColbertium
MTGTTRSSEGLDDRRKRLLFRCWHRGTREMDLILGRFADAEIGNLSDAELDELERLLEVNDPDLYAAISGDKVLPADVTGALFARIKAFPIAERDV

SEQ ID NO: 9702 - protein, 339 aa, BradyrhizobiumColbertium
MKQGMKSPAEQLTPGRALTLANVAEGAEGLVVSDLARAIAARPKKPAVSLAVVCRDGGRMQQLERALRFFAPDLPVLTFPAWDCQPYDRVSPHGGILAQRLTTLARLASLTGSDKPLIVLTTVNAVVQRVPARELVAAQALSVAPGNVVPMDTIVAWLEHNGYNRSSTVREPGEYAVRGGILDLFPAGLEQPVRFDFFGDSLESIRSFDAETQRTLLDMRSLDLVPVSEFQLVTETIRRFRMGYVPSSARPSATMRSTRPSAKAAVILAWSTGCRCSRTGWTPCSIICKARLSRSSRRPRTPCANASSRSSTITRPGARQWSIPGAAPSTSRCRLIGFI

SEQ ID NO: 9703 - protein, 811 aa, BradyrhizobiumColbertium
MPTDGTSVVDAGARKGRDFAPERNDTKVNVFESVVAHVMALQAQRKKVVIALWTEGSRDRMTSMLRDHKLAHITSVNSWRTVQATPRNETMLAVLGLESGFETDEIALISEQDILGDRLVRPRKASRKLDNFISEVTSLTAGDIVVHVDHGIGRFIGLQTLDVAGAPHDCLELHYAAETKLFLPVENIELLSRYGSDQTSVELDKLGGSGWQTRKAKLKNRIREIAGELIKIAAERMLHEAPKLPVQQGLYDEFCARFPYDETEDQLGAIESTLKDLEKGRPMDRLICGDVGFGKTEVALRAAFAVALDGKQVAVVVPTTLLARQHYRTFSERFKGFPVNVAQASRLIPTKQLNEVKKGLADGSVDIVVGTHALLGKAIKFRDLGLLIVDEEQHFGVSHKERLKALRAEVHVLTLSATPIPRTLQLALTGVRELSIIASPPVDRLAVRTFVAPHDPLMIREALLRERYRGGQAFYVVPRIDDLAEVKDFLDKNVPEMKVAVAHGQMPPAVIEDIMTAFYDGRFDILLSTTIVESGLDIPNANTLIVHRADMFGLAQLYQLRGRVGRSKLRAYALFTLPAQQKITAQAERRLTVLQSLETLGAGFQLASHDLDIRGAGNLLGEEQSGHIKEVGFELYQSMLEEAIVNLKAGVSEPAADRWSPQITIGMPVLIPDDYVSDLSVRLSLYRRLADLDTEEEIENFGAEMRDRFGVLPDEVRYLFKVAAIKAFCRRANVEKIDAGPKGAVIVFRDNSFAYPDRLVTFIRSYGQAAKVRPDMKVVFLQDWETPEERLAGTTEIMRQLAQLAESKKAA

SEQ ID NO: 9704 - protein, 53 aa, BradyrhizobiumColbertium
MSMQLRSQRGSGVCLQCPDSDITSLADQTARGHIPLIEFRPNDLASPLTSAPD

SEQ ID NO: 9705 - protein, 103 aa, BradyrhizobiumColbertium
MFAVRIDVNRHPCHLSRFSVVSMAGQSATGMKNPQPVNRPRVKRTEALPVHPWSKLHHDDCGTYSARRFSAADLPVRRSATISKETFCPSLRVFKPARSTALI

SEQ ID NO: 9706 - protein, 391 aa, BradyrhizobiumColbertium
MARVPVNIDPDREHDDIMYPQVLPFLLIHAGCVAAIWTGVSWQAVGLCVALYWLRMFAITAGYHRYFSHRAYATSRVFQFILAFLAQSSAQKSVLWWAAKHRHHHLHSDTAQDVHSPRHKGFLYSHVGWIFYRQHDGTDLVKVADLASYPELMWLHRLELLPAAALAGLCFFVAGWSGLVVGFLWSTVLLYHATFCINSLAHVHGRKRYVTGDDSRNNWLLALLTMGEGWHNNHHAYQASARQGFYWYEIDLTYYVLVVLSWFGIVRDLKMPPAQVLRNQQRLGSRVVRQAAEQLAARFDSERIALAIRTSIHETELSVRDALTLLQQRAGERLSSMPTRDQLLAEAQRMFVKTISLDDIVDRAYELLNDSVGLLLAAPAVSIKAKAEGGV

SEQ ID NO: 9707 - protein, 78 aa, BradyrhizobiumColbertium
MRKFPDPTDQELSEGPQAVAFQIANGNTRQNCILQTNLPTKVQAQRYLLANWPAVEKMARDALALGKFENGEIRLVMP

SEQ ID NO: 9708 - protein, 407 aa, BradyrhizobiumColbertium
MSQAGPILFVSDAGRPGFVAALDEARLFPVVDTDWAGATRAVEEVQPAAVLAAMHAGHQPHIATLARKIADQSPYLPFVALDAAGMQPHNALPFSSRGGNPDRLIARLRAALRVRTLHATVLRRLPEVKVALPQGDPARDATVLLIGRGAAYPALSVAFGERVGVVGALSIEAAAKHLNTRDLDGVVLAEGFTARVTDAFLTVLAEDTRFRSLPVIVTAHQLTQTYDLPNLELIPGEPARIAANALPLIRQHAMEAQLSRTLRSIDAGGWLDPRSGLLTVEAFARDFAKAVEQTLARGGGLSVARFAFDANNSRAQLDAARILSRLMRQMDFGTAQKDGSVIVVFAETDFRTAHMIARRLSAVMRHTSNGKHEMRSDPIVSVDSLSPSDTARSLLARLSAEASRAAS

SEQ ID NO: 9709 - protein, 500 aa, BradyrhizobiumColbertium
MNQPAISPTLDTLFQRTLMRQPHALALLDPLNKARVTGHQPRRMTYAEADTAIEALSAHFVESGLPANSVIAIQLPATVEFVLTVLAAHRAGLVVAVLPLLWRHAELTAALNRTAARAIVTMSTVDGVSYADLAMHAAAEAFSIRHVYGFGSDLPEGMASLDDVLARPPGTTRAVIQDGRKAAMISFDVTAEGFRPVPRPHFSLIAGGLAMSLEADIKQGATVMAAFAPMSFAGLASSLAVWLLSGGALALHHPFENEVLEQQINAHECEVLIAPAQLALRLGVSDLAARMPSLRNVIGLWRAPEQVAASDAWIAPHAPLTDVYLFGEAGLFGARRGEDGMPVPVMPGPHGAPREQSGSSIAGEILLTPKGTLGLRGAMVPIAAYAPPQPVGETLTAQPPRDYVDTGYAARLDRPSGAICITAPPSGIMAVGGYRFLSNDLQEWARRLGQGALLTALPDRLSGHRLAGRAQDNARAREALSELGLNPLMVEAFRDRSGPA

SEQ ID NO: 9710 - protein, 620 aa, BradyrhizobiumColbertium
MPMFMFQRLVEGPRPGLCRLAQALVLALALGLSAGGARAEQSHAIAMHGKPAMAADFTHMPYANPDAPKGGRLTWGLLGTFDSLNPFIVKGLAVQPVRNYVVESLLARGQDEPFTLYGLLARSVETDDDRTFVTFRLDPRARFSDGKPVLAEDVLFSWQLLRDHGRPNHRQYYAKVAKAEALGPLTVRFDLAGANDRELPLILGLMPILPKHAIDVATFEETTLAAPVGSGPYRVTAVKPGASVTLTRNPDYWGRDLAINRGLYNFDEIRLDYFREANGQFEAFKRGLYDFRIEHEPLRWHDGYDFPAARTGEVIRDTIKPGVPQPSEFLVFNTRRPIFADIRVRQALTLLFDFELVNRNYFFGLYSRVAGYFAGSNLSAYGRPADARERELLKPFAAQIPPDILDGSYRLPATDGSGRDRTTLRAALKLLSEAGYDLEGTVLRNRATKAPFTFEIMVTTRDQERIALAFQRDLRRAGIEPTVRSVDPVQFDQRRLAYEFDMIQNRWDQSLSPGNEQYFYWGSAAADNPGTRNYMGARDPAVDAMIAALLEAREHTDFVSAVRALDRALIAGFYTIPLFNVSEQWIARWNRIERPKATSLSGYLPETWWSKGQPQAHQAK

SEQ ID NO: 9711 - protein, 266 aa, BradyrhizobiumColbertium
MAASVRPRGRLLVLLTATALVVPFAAEAQTPAPAPGAPKATPAPKAAPKAAPKAPAPAASPQAQPAPGQGGQQQGAAQPADQQIQLIYAPWTKFCLKGQDANAKQVCFTGKDGRIESGQPVIAAVIIEPEGEPKKILRVTLPLGMQLVHGTRIIVDSNAPLQQPYVICFQNGCMSDYEATPELINSMKKGQNLVVQAINANGAPLTLPLPLAGEFQKAYDGPPTDPKVFEETQKKLQEELQKKAEEQRKKLEQQGGAPGAAPTGQK

SEQ ID NO: 9712 - protein, 110 aa, BradyrhizobiumColbertium
MIKARTAKFQIGQVVRHRIFSFRGVIFDIDPEFNNTEEWWLSIPEEVRPHKDQPFYHLLAENAESEYVAYVSEQNLLPDDSGEPVRHSQVAEIFVKDKAGGYRPRNPSLN

SEQ ID NO: 9713 - protein, 317 aa, BradyrhizobiumColbertium
MADILNLALPYFGLIFVGFACGKVKALPESGLAWMNFFLLYVSLPALLFAIMSKTPFADLNNPPFLVATTLSTVAAFTLALVVGKVFGRLTLREATLAGLCGGYGNIGYMGPGLALAVLGTKASAPTALIFCCDSIFLFTIVPLLIELSDRDHPSLVHAFGVVLKQIVLNPLIMSACFGAAVAALHIEMPVALDRTITFLQNAAAPTALFVLGVTVALRPFDRVPWEVPGVIAVKLLFHPLAAFGLMLAFGPFAQPWAATAVLMASLPPALNVFVIARQNDAWIESASVAVLLGTFASVVTLISVMWIIQSGRLTFP

SEQ ID NO: 9714 - protein, 397 aa, BradyrhizobiumColbertium
MSFMTDASTLHDAAVIGGGPAGLAAAIALAQAGARTALVARRAPYADNRTTALLGASIDLLEGLDVWPRCKDKAAALEVMRLVDDTGRLFRAPEVRFSCHEIGLDAFGYNIDNRSLMLALEERAVELPNLVRFDDEAESVVIESDDVSVRTACGQFLSARLVVGADGRHSLCREAAGIEVTRRDLNQTALTFNVSHARPHRNVSTEFHTPHGPCVFVPLPGDRCSIVWVSTSADAERLRALSDEELSAAIEKQSHSILGRMTVEPGRNLFPLAIERPKSFGRDRIALVGEAAHVVPPIGAQGLNLGLRDAADIARLASDAIAAGQDPGADEVLRRYDRARRPDILSRTFAIDIANRSLLNDFLPLQPVRAVGMHLLGAVGPLRRFAMREGLTPTWRR

SEQ ID NO: 9715 - protein, 255 aa, BradyrhizobiumColbertium
MADVQTGPILIAEAMDTQQDSLKPRPAIRAAAFSVHIFTAFGAALALLAMLEAVREHWAAMFQWLGLALVIDAIDGPIARRLDVKNVQPNWSGDVLDLVVDFLTYVFVPAYAIVASGMLLPVAAPLLGIAIIVTSALYFADLRMKADDNHFRGFPALWNAAAFYLFLLHWPPLWSTLLVAALVVLTFVPFHVLHPVRVVRLRWLTMSLMAIWAVLGLYVLAMDFRVGSGVTIVLCAIALWISFSDTLIRLGRSFA

SEQ ID NO: 9716 - protein, 241 aa, BradyrhizobiumColbertium
MMELLASPEAWAALLTLTALEIVLGIDNVIFISVLVSRLPEAQAHRARQIGLALALVFRLILLSLLVWLIGLTEPVLSMKGYAFSWRDLILIGGGLFLIAKATHEIHGEVESDHGRSEKKSTGSAFFWVIFQIIVVDLVFSLDSIITAIGMAEDIRIMITAVVIACAVMYVSAGPVSRFVAEHPTTKMLALAFLVLIGVALVADGFQFHIPRGYIYFAIAFSAAVELFNVLARRNRTKAGN

SEQ ID NO: 9717 - protein, 37 aa, BradyrhizobiumColbertium
MHTDGFGHQSTSSFRGQAKAIAPALSTRGRSRRAKHD

SEQ ID NO: 9718 - protein, 324 aa, BradyrhizobiumColbertium
MTKAVRVHKVGGPEALVYESVDVPAPGPGEMRIRQHAVGLNFIDVYYRTGLYKAPGLPFIAGNEASGDVVAVGPGVTNFHPGDRVAYYHNLGAYTGERNIPWEKLVKLPDHITYEQGAVLMLKGLTVWYLLHKTFKVEPHHRVLIHAAAGGIGLLACQWARALGAHVIGTVGSREKAELAEANGCDHVILYNEEDFVARVKQISRNEGCDVVYDGVGKATFPGSLSCLKPRGMFVSFGNASGPVPPFSIAELNNHGSLFATRPKLNDYVGTRKELLEGADTLFAAVINGKLHVPINHAYALKDAAKAHIDLESRKTTGASILKP

SEQ ID NO: 9719 - protein, 398 aa, BradyrhizobiumColbertium
MTTATHPYDALMDITARPKAVFVRGAGSYLWDDSRKRYLDFVQGWAVNCLGHSPPAVAEALGAQARRLLTPSPAFYNEPGLKLAQALVENSAFDQVFFANSGGEANEGAIKLARKYGSVHKGGAFEIISFEGGFHGRTLATMSASGKKAFEPLFEPKVAGFKKAKLNDIASVEALINDNTVAVMLEPIQGESGVWPASDQFLQELRALTQAHGMLLIFDEIQTGMGRTGKLFHYEHTGIAPDIMTLGKGIGGGVPLAALLATERASCFEHGDQGGTFNGNPIMCAAGLAVLQEVSKPDFLKAVAETGLLLESELQKVSARHGLGGVRGRGLLLALDLKLPIAPGIVAQAFEAGVLLNAPQVDTLRFMPALNVTKAQIAEMVDCLDGILTKAGAARRVA

SEQ ID NO: 9720 - protein, 213 aa, BradyrhizobiumColbertium
MSRLPDMLRTQRFDDYRFYHQSTVNQTLHLISAVIFLASYALLFKDPALAGIVGWLAMLTRQTGHFFFEPNGYDAVNDVSNDYKEAIKVGYNQTRKIVLLLVWGSAPIALYLYPTLFGLFDAPATRLDFIRHVGTLWLAIGIGGGLARMLQLFVTRDVTTGLVWVFKVLTDPFHNIALYWNSPLKLMRGELIDTAIADADWGEEDAEEAARPT

SEQ ID NO: 9721 - protein, 443 aa, BradyrhizobiumColbertium
MSETFKGAPRISFHSLGCPKALVDSERIITRLRAEGYELARKHDGADIVIVNTCGFLDSAKQESLSAIGEAMAENGKVIVTGCMGAEPEAIEQAYPGVLSITGPQQYESVLDAVHRALPPTHNPHLDLVPPQGIKLTPRHYAYLKISEGCNNRCTFCIIPKLRGDLVSRPANDVLREAERLVGAGVKELLVISQDTSAYGIDLKYAESPWKERQVRAKFLDLARELGEFGAWVRLQYVYPYPHVDEVIALMNEGKVLPYLDIPFQHASPNVLKAMKRPAAQDKTLARIKRWREECPDLALRSTFIVGFPGETDADFEYLLDWLDEAEIDRLGCFKYEPVAGATANAIENPVPEEIKQARYDALMARQQKISARRLKRKVGTRQQIIIDEVGPTVAKGRSKADAPEIDGAVYLTSRRPLRVGEIVTAKIERADAYDLHGSVAGF

SEQ ID NO: 9722 - protein, 45 aa, BradyrhizobiumColbertium
MERDARRTFKSFAQSEYPEFCRDFDPSNCCDSEIQSLSNVPSVIK

SEQ ID NO: 9723 - protein, 47 aa, BradyrhizobiumColbertium
MSEVTLARELDRESTYASSIDEFESKVKQYKKRLMSNLGTSYNFEPH

SEQ ID NO: 9724 - protein, 196 aa, BradyrhizobiumColbertium
MSAEQSPKIVIVDESPIRAAILEEGLREAGFTQVVHISEMQSLLARIYAVDPDIILIDLENPSRDVLEAMFQVSRAVKRPIAMFVDQSDSASIQASVEAGVSAYIVDGLKKERIKPILDLCVSRFNAFAKLQEELERTKSQLEDRKVIERAKGILMKVKGLTEEEAYVLLRSTAMREKKKIGEIAQSIITASEMLK

SEQ ID NO: 9725 - protein, 387 aa, BradyrhizobiumColbertium
MTATLRIGFIPLVDAAALIVAVDKGFAAAEGLDVELVREVSWSNVRDKLNIGLFDAAHLLAPVAIASSLGLGHVKVPIAAPFNLGINGNAITLSPALHAALMEQIDGDRFDPMVTAKALAKVVAIRRKAGAEPLTFGMTFPFSTHNYQLRFWMAAAGVDPDEDVRLVVLPPPYMVDSLKNGHVDAFCVGAPWNSIAVDLGIGHILHFVSDILVRAAEKVLAVRQAWADKNPDVVAALVRAAVKAAEFIEHPENRTEAAQILAQPERIGVDAEVIQRTLTGRLKISPDGTFRESGRYLLVGREGAGRPEPVQAAWLYAQMVRWGQTALTPDGVKTAMAVFRPDLYDAALGSRAPTEAPAAFGAFAGPVFDPANIRGHLEAFAVGRWKA

SEQ ID NO: 9726 - protein, 593 aa, BradyrhizobiumColbertium
MKIETLSVDFTDEQKRYLEGFTTGLQISRVGRALGGGAVKASAEPTGPDAVHIKAQDRVIASGKKLADQEKFKREEHPFDAYPRLRQQALDNAAPSPADNFRWRYYGIFYVAPTQDSYMSRLRIPNGIMKHWQLSGLADLADELCGPYCHVTTRANLQLREIPPKHAIKFLEGIQELGLCSRGSGADNIRNVTGTATAGIDPQELLDTRPYAREWHYHILNDRSLYGLPRKFNVAFDGAGRIAVLEETNDIAFTAYEVKDGFGVEPGVWFRLGLGGITGHKDFAKYSGIIVRPEQATAVADAIVRVFIDHGDRTNRNKARLKYVLDAMGHDGFVKLVEERLKTPFTRVPEEAFAPRPAADRMAHVGVHRQKQEGLNWIGVSLPLGKLTSDQMRSLAKLAQDLGDGEIRLTVWQNLLISGVRDENVELAVAAIKQIGLAVEASHIRAGLIACTGNAGCRFAAANTKRHSAEIGDWCETRVAMDKPVNIHVTGCHHSCAQHYISDIGLIGARVPVSEEDTVEGYHLFTGGGFGPDADIGQEVYRDLKAEDAPKTVERLLKAYMAHRSSPDETFLHFARRHDGETLRKLADAQVSA

SEQ ID NO: 9727 - protein, 536 aa, BradyrhizobiumColbertium
MNQITPPPKLDLIPPSAPFSDAQRSWLNGFFAGLLSPEVAAPLSTEQGAAVMQGAAGDGDDGEAPWHDQTMPIAERMKLAEGRPVRRKMMAAMAQQDCGQCGYNCHDYSEAIASRSEARLNLCVPGGKETARMLKSLFEELDKTPAAKPADKPDAAAPAVTVTIAEPGRSRDNPVAATFLSRRLLNKGKSEKETYHVEFDLSESKLDYVVGDSFGVFARNDVGLVDQIIALLGASHTTKVNGKTLREVLIDDVSLSPAPDTLFELISFITGGAAREKARALAQGEDPDGDAATLDVMAALQKFSGTRPHAEAFVEALEPLQPRLYSISSSHNASPGKLSLTVDSVRYIVGKRKRLGVASTFLGERIKEGDKLKVYVQKAHGFGLPQDPKTPIIMIGPGTGIAPFRAFLLDRKATGAPGKNWLFFGHQRSDCDFFYQEELNAMKTSGLLTRLSLAWSRDGEKKFYVQDRMREVGRELWTWLAEGAHLYICGDAKRMAKDVERALVDIVAQFGARSTDEAVSFVAELKKSGRFQADVY

SEQ ID NO: 9728 - protein, 50 aa, BradyrhizobiumColbertium
MRELSAEARLHFYARSLSRRTRGTLHHVAMYSAFAVIAAIVFGTLSVHPF

SEQ ID NO: 9729 - protein, 256 aa, BradyrhizobiumColbertium
MKTVDLNCDLGEGFGAWEMGNDAAMIELASSVNVACGFHAGDPDIMRRTVELAKARGVSVGAHPGYRDLHGFGRHPIAGLKASEIENLVAYQIGALQAIATAAGHKVTHVKAHGALSNVACEDDMTAKAIAAGIKAVDPGLIFVVLANSKLVKAGEDANLPMVHEVFADRAYEDDGNLVSRKKPGAVLHDAKAIADRVVRMVQDGAVVSVTGKVIKMRTDTVCIHGDTPGAVDIARGVRQALKAAGIEVAPFRRGA

SEQ ID NO: 9730 - protein, 345 aa, BradyrhizobiumColbertium
MSRLVVASIGPASSVQDGGRLGAQRYGLTVSGAMDRLSLAAANTLVGNEPFAAAIEIGPVGASFTARDGAVRVAISGAPRNADIAGSPVAMDASVTLKDGETLTLGFARGGAFTYLAIEGGIKGEPVFGSLAVNARAGLGSPYPRPLQAGDEFSVDAASGAPELRIELPKPVSGPIRVLLGPQDDEFDDSNKALFLESEWKISATSDRMGYRLEGPAIKHLHGHNIVSDGTVNGSIQVPGNGAPIALMMDRGTSGGYPKIATVITADIGRLAQTSAGTAFRFKAVSMAEAQDEARKFAQLIRSLPDRLRSSDTVALNIEALSDANVAGYAVSAVDAGTWQVTAEP

SEQ ID NO: 9731 - protein, 243 aa, BradyrhizobiumColbertium
MAATLLPPRLLPSGDSAVTVEFSRTIDDVANQRVLALDKALAASPIEGITETVPTYRSLLVHYDPCAIAFDALGEKLLALAGQPLPPVTKARRWRIPVAYGGEHGIDLEDVAKALNTTPDDIIARHAGGDYKVAMIGFTPGWSYLSGLDKSLHMSRRQSPRLLTPAGTISIGGVQAGIQCLAAPSGWHLLGRTPVRTYQLHRNPTFLTEPGDRVTFFAIDHKTFEELDRAAEAGEIVAEQVVA

SEQ ID NO: 9732 - protein, 232 aa, BradyrhizobiumColbertium
MSLSPEARKTLAGITTATITTVLLKKGLRNVWMRGARPLRPGLPRLVGPAFTLRFVPAREDLATPESWSSPISTRTAIEAMPEGCIAVVDAMGITDAGIFGDILCARMVKRGVTALVTDGVVRDVEGVLGTNLPVWCDGYAAPPSVAGLTFVGWGEPIGCGGVAVFPNDIVVADQDGCVLIPQAMLDHVLAEGVEQERMEAWIVNEVNNGAALPGLYPMNAETKARYAASKK

SEQ ID NO: 9733 - protein, 134 aa, BradyrhizobiumColbertium
MEITVAGTRPTRRAPKENFTGTVWQDPVIMAPSPARLNCSRVAFEPGARTNWHHHPLGQTLYVISGVGRVQSKGGPIREIRPGDTVWIPPGELHWHGASPTNGMCHIAMQEALDGVYSTWLEPVTDAEYGAAVG

SEQ ID NO: 9734 - protein, 118 aa, BradyrhizobiumColbertium
MNGFRKGLFASLVAIALPFAQADAATSTFDGTWNVRISSSSETCGNGATVAIGINKGQIASSSAAVNASGHVADAGRINVTLSTGIKRAVGFGRLSGSSGSGTWRGAMCRGTWTAERM

SEQ ID NO: 9735 - protein, 55 aa, BradyrhizobiumColbertium
MKPGKDQKWTGRILDPNSGSTYDSTIAMKGTDRLRVQGCAFGGMFCGGQTWTRVN

SEQ ID NO: 9736 - protein, 237 aa, BradyrhizobiumColbertium
MERAVIDLYYAPTPNGWKISIMLEELGLPYSVKPVNIRAGEQFSPEFLAISPNNRIPAIVDHDPADGGAPFSAFETGAILIYLAEKTGRFLPADLRGRSATIQWVMWQMAGLGPMLGQHGHFALYAAEKIPYAITRYRDESARLYGVLDRQLGKTGSYVAGDYSIADIACFPWAMTHKAQGFTLDDYPNVKRWYAAVRARPQVQAGLAIGKFVKEPFDEESRKIMFGQRAKEVLGKK

SEQ ID NO: 9737 - protein, 202 aa, BradyrhizobiumColbertium
MIEFFFDCSSPWTYLAFHNIQPLAKELGAEIVWRPILVGGIFNTVNPSVYAQREKPVPLKARYMTKDLQDWARSAGLSIKMPPTVFPVNSVKAMRGCIWLGKDTVPFATAVFEAYWGEDKDISQDAVLAGICKKVGIDEVRFFAGIAEQGIKDQLKANTEEVVARGGFGSPTIFVNKTDMYFGNDRLPLIREALMRSKASAA

SEQ ID NO: 9738 - protein, 325 aa, BradyrhizobiumColbertium
MVRAVVCRELGAPETLRLEEFPSRALKPGEVRVAIRAAGLNFPDVLMAAGEYQLKPELPFTPGMEAAGDVTEVGQEATGVAVGDKVIVKMRHGAFADEAVASPAQLTPMPSTFDYAEAATYLAGHGTAYHALIDRGRLEPGEVLLVHGAGGGVGLAAVEVGKMLGATVIATASSDEKLAIAKSRGADHLVRYDREPFRDAVKRITEGRGADVVFDPVGGQVFEDSMRCIAWGARLLVIGFTGGIGSARTNLLLIKGASVLGVRAGEAVRKNPELGEIRLKALLQWAEEGKLRPNVSHRLPLADYAKAMRLLLDRKAIGRVALVMD

SEQ ID NO: 9739 - protein, 318 aa, BradyrhizobiumColbertium
MDCRVKPGNDRIDSRNDKEGNTMAYETIKYEVAEQILTITLNRPDKLNAFNAQMQAELIDAFDAADKDDDIRAIIVTGAGRGFCAGADLSSGADTFDRDARRGPVKRLPDGKVDYSDPQVRDGGGQVTLRIFKCLKPVIAAVNGPAVGIGVTMQLAMDIRIASEAARFGFVFSQRGIVPEAASSWFLPRIVGISQALEWCYSGRVFPAQEALAGRLVSKVVAPDDLLPTARALAKEFAAKTAPVSVALIRQMMWRMMGADDPMEAHKVDSRGIYARGRSDDVKEGVVSFLEKRPAQFKNKVSTDMPDYFPWWTEREYK

SEQ ID NO: 9740 - protein, 477 aa, BradyrhizobiumColbertium
MPKKSAEEAVTSLHDLSAVDLIAGYRAKQFSPSEVLEDVLAHVAAWEPHLKALYAFDPDGAREAAKASTARWSGGEPSGALDGVPVTVKDNIATKGVPVPLGAASVKLVPAEKDAPPAARLREAGAIIFAKTTMPDYGMLSSGLSSFHALARNPWDLSKNPGGSSAGAGAAAAAGYGPLHLGTDIGGSVRLPAGWCGLVGLKPSFGRVPIDPSYVGRVAGPMTRTVDDCALMMSVIAKPDRRDGMSLPAEPLNWKGLEKSPRKLRIGLMLDAGCGLPPEKAVGEVAVKAAEAFESAGSVVTEIDGILTRDMLDGLDNFWRARMWDDLSKLTPAEQAKVLPYIFKWGESGAKLSGIDVIRGFNQTMAIRAAAAKLFCELDYVISPTAPNVNYPAEWASPTNDPMKPFEHIAYTVPWNMSENPAISVNGGFDANGFPIGVQIVGRRFDDIGVLGMAKAFEGLRGPQRAWPKPPAHKTPY

SEQ ID NO: 9741 - protein, 390 aa, BradyrhizobiumColbertium
MPTIDRIDGYADELTAIRRDLHAHPEIGFEEVRTSGIVADKLKSWGIEVHRGLGGTGVIGVIRGKGSGSKRIGLRADMDALPMEENTNLKWSSKIPGRFHGCGHDGHTTMLLGTARYLAETRNFDGTVHLIFQPAEEGLGGARAMIKDGLFEKFPCDELYGLHNAPDLNHGEIAILPGPAMAGADFFDLRITGYGAHGAMPERSKDAVIIATTLAQAIQTIVSRNVDPLQAAVISITQIHAGSAYNVIPGDAHLCGTIRTFSNEVRAMISERIRTICAGIASAYQCAIDVDIRDTFGVLVNQVEQSKVVEEVARTIVDPANVITRTQPKMGSEDFADMLQTIPGAYFWVGHDGSVPVHNPGFVLDDKILPIGASMFARIVETRMPVGGNA

SEQ ID NO: 9742 - protein, 501 aa, BradyrhizobiumColbertium
MTRIAVGGFLHETNTFAPTKATFADFQHGGGWPAMTQGADVLKVMRRINVGLAGFVDSAEANGWELVPTIACGASPSAHVTEDAFERIVKAMVDGIAAAGPVDAVYLDLHGAMVTEHLDDGEGEILARVRRVIGKDVPLVTSLDLHANVTPEMMEHADALIAYRTYPHVDMAETGRACARHLALLLKTKQRFAKAFRQLPFLIPISWQCTNDQPTKGIYEKLAALEGDAVPTLSFAPGFPAADFRDCGPSVFAYGKTQADADRAADAIVKLIESHEDDFDGKIWSPDDGVRHAMELSRNASKPIIIADTQDNPGAGGDSDTTGMLRALVRNNASAATGVIYDPESAKAAHEAGAGAAVTLSLGGKSGIPGDEPYTETFVVEKLSDGRFIAPGPYYGGREMEMGPSACLRIGDVRVVVSSHKAQLADQAMYRYVGIEPTAQKILVNKSSVHFRADFEPIAEKLMICAAPGAMPADTASLPWTRLRPGIRIKPNGPVFTPPSR

SEQ ID NO: 9743 - protein, 348 aa, BradyrhizobiumColbertium
MQRDHGTAVLFITHDMGVVAEIADRVAVMRQGRLVETGPLETILRNPTMEYTRNLLASVPSLVPRAPREESRDPVVLEANELTKVYKERAFFGKGREVVAADKVTLTLRKGRTLGIVGESGSGKSTVARCIVRLIDPTSGGVRLAGREIADISRRLLQPHRQKIQIVFQDPYRSLNPRVTVGESIAEGPINYGAAHADAMKRARELLELVGLPADAVSRYPHQFSGGQRQRIAIARALALDPDVLVADEAVSALDVSVQAQVLELLDEIQKRLGIAILFITHDLRVAAQICDEVVVMQHGRVVEQGPAGEVLTHPKEAYTKALLDAAPGRNWDFANFRPVAESVVASA

SEQ ID NO: 9744 - protein, 295 aa, BradyrhizobiumColbertium
MSVDTLPQSSIPITSPLRPRFGFLTSTPIIAAATVLLTLIVVVSILAPLIAPHDPIQLAPSQRLKPSSAQFLLGTDAYGRDLLSRVIYGGRISLLIGIGAAILSIAIGLAIGLVSGFFKLVDSILMRVMDGLMAMPSILLAIAVVSLSGASLWTVLIAITIPEIPRVARLVRSVVLSAREEPYVEAAISVGSSLPKIMLRHLMPNTIAPLIVQGTYVCASAILTEAILSFLGAGISPETPTWGNIMAEGRQYFQIKPSLIFWPGLLLSIAILSINLIGDAARDALDPRMKQREAK

SEQ ID NO: 9745 - protein, 313 aa, BradyrhizobiumColbertium
MLGYLVRRVLAAVPVMGVVALFVFLLLRLTPGDPAAILAGDNATPERLERIRTSLGLNEPLIVQFVTWVNKLLHGDLGTSLISNLPVMKMIGQRVEPSISIALSTIILAVIVAVPLGVIAAWKHGTWIDRFVMGLSVLGFSVPVFVVGYVLIQVFAIELRWVPVQGFRSIFSGFGPFFERIILPTCALSFIYIALIARMTRAAMLDVLGEDYVRTARAKGINEVAVMMRHALRNAAVPVITVIGTGFALLISGVVVTESVFNIPGIGRLTVDAVLARDYPVIQAMILLTSFIYVVVNLLIDVAYTLLDPRIRY

SEQ ID NO: 9746 - protein, 433 aa, BradyrhizobiumColbertium
MTHLAIIGAGITGVTTAYALLERGYKVTVLDRHRYAAMETSFANGGQLSASNAEVWNSTATILKGLRWMFRRDAPLLMNPRPNWHKYSWMSEFVANIGNYRSNTIETTRLAIEARRHLFDIASREGIDFDLERRGILHIYRDKAGFESGLRVNALLQEGGLDRRPVTPDEIRAIEPTLRNDYYGGFYTPSDATGDIHKFTRGLAEACKRRGATFVHEANIDSIARAGSGFVIGWADLAASDAGASARGMLKADGVVVCAGVASRHFAALLDERVNVYPVKGYSITVQLDTAESRNAAPTVSLLDEAAKIVTSRLGADRFRVAGTAEFNDFNRDIRADRVQPLIDWVRINFPAVETSRVVPWAGLRPMMPNMMPVVRAGRIPGVFFNTGHGHLGWTLSAATAQMIAQTIDGWRGLNAPPTVPSLGVERELRQAS

SEQ ID NO: 9747 - protein, 376 aa, BradyrhizobiumColbertium
MNPANLPFDSEAMLEGLRGWVECESPTWDAGAVDRMLDIAARDMAIMGATIERIAGRQGFGGVIRARFPHPKQGEPGILIAGHMDTVHPVGTIEKLKWRREGNKCYGPGIYDMKGGNYLSLEAIRQLARASFTTPLPITVLFTPDEEVGTPSTRDIIEAEAARNKYVLVPEPGRADNGVTTGRYAIARFNLEATGRPSHAGATLSAGRSAIREMARQILAIDAMTTEDCTFSVGVVHGGQWVNCVATTATGEALSMAKRQADLDRGVERMLALSGTNNDVAFKVTRGVTRPVWEPDAGTMALYEKARGIAKSLGMELPHASSGGGSDGNFTGAMGIPTLDGLGVRGGNGHTLEEFIEVESLVERGRLMAGLLATLE

SEQ ID NO: 9748 - protein, 536 aa, BradyrhizobiumColbertium
MFHFMRRGPRAFASKLALSVVALSTALVSPVLAAGKTITAVMHSDLRIIDPIFTTAYITRDHGYMVYDTLLATDSSFKVQPQMADWKVSDDKLTYTFTLRDGLKWHDGAPVTAEDCVASLKRWGKNDGMGQKLMDFTASIEASDAKTIVLKLKEPYGLVLESIAKPSSLVPFMMPKRLAETPPGKQISEQIGSGPFKFVQGEFQPGVKAVYVKNTDYVPRNAPASWTAGGKVVKVDRVEWITMPDSQTAVNALQSGDIDFMENVPWDMLPVLEGNKDLKIEVLNKFGFQTLGRMNFLLPPFDNPKVRRAALLAMNQKDVLDALVGNPKFYKICGAFFVCDTPLASEIGSDTLVKGGGMAEAKKLLAESGYDGTPIAIMAPGDVTTLKAQPIVAAQLLREAGFKVDLQATDWQTVVARRAGQKPVKEGGWNMFFTNWVAADVMNPIANVSIGGRGKNGGWFGWAEDAKIEELKDAFVRASSADAQKKIAADIQKQAMEQVIYIPLGQYQAPSAWQKSLKGVLDGPATPVFWNIEKSE

SEQ ID NO: 9749 - protein, 59 aa, BradyrhizobiumColbertium
MLYRSNREDAEMEQESRPDHPAWEIERPASQQRPSPGERPDPSLPFMSEGLEQLRDSHC

SEQ ID NO: 9750 - protein, 400 aa, BradyrhizobiumColbertium
MGFPEFVIVIASIMALNPLAMDMMLPALPNIGAAFKIPVANHLQLVLSTFLIGFGAGQFVMGPLSDRFGRRPVLLGGMAVYAVASVLAVAAPSSETLLLARALQGLGTSATRVIATSIVRDCYVGRRMASVMSLAMMVFIAVPVIAPSFGQAVLLVTAWRGIFVVLMLYGLLALAWCVLRLPETLPESERRSLAPADVLSAFRQTVTNRQTIGYATAAGSVIGALFAYVFCAQQVFTGIYHLGQYFPLAFAAIAAGTAIAGFLNARLVGRLGMRAISHGALTLYTLVAGVMLLTEILGVLPLSLFMLLSALMMFSFGMMVANFTALAMEPQGHIAGTASSLYGSITTLIGIAVGMAIGQSFDGTLLPFSVGFFLSTLAALGIVLVVEKGRLFRPHHRPVN

SEQ ID NO: 9751 - protein, 194 aa, BradyrhizobiumColbertium
MSGRGDITRQQIVVAATRLFYGEGIKAVSMDAVAEKAGVTKKTLYYHFASKDELVAETIAARDQPTLELYMRWFAETDGSVADKIRGLFAKLGRSVDTPRWRGCGFLRTIAELANTPAHPAVKAGAAHKKRFEAWLQSELRDHGVADASALARQLVILLDGATTVMLIHRDLDYVEAAGQLARGLVEQAATRPD

SEQ ID NO: 9752 - protein, 259 aa, BradyrhizobiumColbertium
MSDLILIEMRGAVALLTFNRPSKLNALSYALIDRLMAVLDRIEDDANVRAVVLTGAGDRAFSAGADISEFSESVRFGPDIAVKDFVRRGQAMTARMESFPKPIIAAVNGIAFGGGCEITEAVHLAIASERASFAKPEIAFGITPTFGGTQRLPRLAGRKRALECLLTGESFSPQRAVELGLVNRVVPHGQLLDAAFGLADRIARHSHLAVARVITAATRGLNVSIAEGLAIESEQFARMAATQDTRKALDAWLAARASR

SEQ ID NO: 9753 - protein, 439 aa, BradyrhizobiumColbertium
MSDMSGAARWLEPAAATTGRRNVWLACLIALTALLVLGNLANDATLDVKFGWDVRVNCAAVDAYAEGRDPYFVKNLKGTKLSYPYLPVTLDVFRPLCAGGVLVDHCRSIFLVLGVLCGLLLPGLARARPSPRDIALRVLCAIGAFVGFEWVQASGNFAILSGVLTAFALRLLLRPLGSEAQGEQGFSSRLAGAALLGLVTSFKLVFFPVLAALYFLPLPRVRKLALIAAAILSFAVPILISKLLYPDLFASWRLAMAAQIPDQHFVDLLETNPSLLLLAQSLMDYAGLGNVKPALFAAYALAALALVLVPFGLAVLRVVGRGPAGEGGSLLIRLDLWLRDHPRTAMRVTVLAMFALYLSSPRLKEYAFFELALYAAILIVDLPAMALAAVLGVGIAFPTLISLLGGPFEGSFILLVVALICFWIVLLDFRAEPERLERG

SEQ ID NO: 9754 - protein, 139 aa, BradyrhizobiumColbertium
MVASLSSSLRGFGALLALLAAGAALSGCAGMSETIAPAFADPAKYELYDCKQLETERKQLDKRTEDLQKLMQKAETGAGGAVVSELAYRNDYIAVRGQAQLADDAWRRNRCRQTPEPVPAAEPPSPVAKPASKSGRTLR

SEQ ID NO: 9755 - protein, 400 aa, BradyrhizobiumColbertium
MALSRTIVIAGAGIGGLTAALALAARGFRIVVLEKAERLEEVGAGLQLSPNASRVLVELGLAERLEGRAVTPEAVSIMSARAGGELLRMPLGEAASARAGAPYWVVHRADLQSALAGALADHPDIDLKLGATFEDVAAHAKGLTVVHRSGTIRRSDLAGALIGADGIWSTVRQHLFPEVQPRFSGLIAWRGTLDATQLPKDYTARRVQLWMGPKAHLVAYPIAGGRQINVVAVLPGTWNRPGWSSPGDPLEVMDAFAAPRWPPPARMMLAAVDSWRKWALFGVPDGCPWSKGPVALLGDAVHAMLPFAAQGAGMAIEDAAVLARHLSVEAAENTDGIAAALTQYGRARLARVRRVQGTARQQGRIYHLGGPLAIARDLAIRALGPERMLARQDWIYSWRT

SEQ ID NO: 9756 - protein, 81 aa, BradyrhizobiumColbertium
MSDHVVPHFHNDAGVPVIEIGSHEFMCVGANPPFDHPHVFLDLGNDDEIICPYCSTLYRFAADLKPGEARPPECVLKDKVA

SEQ ID NO: 9757 - protein, 378 aa, BradyrhizobiumColbertium
MKWLRITTALAGIATCGFLLVQVAPHAREAGALLAAQDDPAVLSELKLDALLRQNEGLVQDSIEAALAAGDADLADSFVALARDRNIALPDDVLSRVSDAVKTENSTSHFAKRFVTGLVTGNADDVASLSGTVTGDLFVFGDIRDVVREGKHLAMGEDTDRLVLALAAAGLAVTAATYVSVGGAAPVRAGLSLVKDARKVGRLGEGLAAWAGRSAREVVDAPMLRNAVASGSVLRPGQTVSAIKAAFRAEKAGALVRLGKDVTRVAGKTGTRGAMDTLRIAEGPKDVARAARLAEAHGGKTRAIIKLLGRGALLLATGAFNLTLWLFGAALTLFGLLSSIKATTEGLTQAWCDRRRARRLRRAQIAAEASLANAAATA

SEQ ID NO: 9758 - protein, 251 aa, BradyrhizobiumColbertium
MPSFHNGAVEIAYLDEGEGDPIILVHGFASSKNVNWVYPTWVSELRKNGRRVIALDNRGHGESAKLYEPAQYSIPTMAGDVLALMDHLAIPQADIMGYSMGGRIAAWLSLNEPQRLRAAILGGIGIGGLIEGTGPDENVARALEAPSLDDVTDPVGRTFRAFADQTRSDHRALAACLRGTRDLMSREEAARIEVPVLIAVGTTDDVAGSASALGAIIPGSEVLDIPNRDHMRAVGDKVYKTGVLDFLSRRD

SEQ ID NO: 9759 - protein, 242 aa, BradyrhizobiumColbertium
MPGSPTAALVQKLTKTNRLDQDDILAIQQLPIQSKRVPAQHGFVRDGDRPSESCLIVDGFAFRSKLTPDGQRQILSLHIPGEIPDLQSLHLHVMDHDLTTLTECTLGFIKHEALRELNLRRPNVASALWRETLIDAAIFREWIVNVGRRPARVRTAHLLAELYERLELIGRTTNGSFELPITQIELADCLGLSVVHVNRTLQELRHDGLIATERRTFHLLDKSGVEEAGQFEKIYLHQRPAL

SEQ ID NO: 9760 - protein, 80 aa, BradyrhizobiumColbertium
MPRYYFDSRDNEKFVSDEIGVEVASLQEVKTLASTAMAELARDVLPGSVARRLAIEVRDEFGLLLSVCLRFEIEPARQIT

SEQ ID NO: 9761 - protein, 42 aa, BradyrhizobiumColbertium
MTFVCGVISGPHDRYGARMVRVATFVVPMALARRFGGDVEAR

SEQ ID NO: 9762 - protein, 77 aa, BradyrhizobiumColbertium
MPASLQESLDRIEQQIRAYEAYDLAEKARFARESWLWTAEERIEWQETQSDNGRVLRDLREQADALRQKLTPFQKPA

SEQ ID NO: 9763 - protein, 48 aa, BradyrhizobiumColbertium
MQPMLLILVASGSVELESAASRVGRFISKPYDPKQIAALIAEMLGSAP

SEQ ID NO: 9764 - protein, 120 aa, BradyrhizobiumColbertium
MIVEQDVLVRHPLAEYLRECGYRVVEAAQHDDARECLEGGKHNIDVALIDVGGPTGSGFALSAWIRSNYPAVKTMLGATVGKVLALAGDLCEGGPQAAKKLDYRPVLDHIRQLLATRKRH

SEQ ID NO: 9765 - protein, 45 aa, BradyrhizobiumColbertium
MVSQWKFIQSSATEPLAIELLRIDIDELLRRKHELHNDPKASADE

SEQ ID NO: 9766 - protein, 452 aa, BradyrhizobiumColbertium
MSITTDQLRARAADTLWLRLTAAALPLLMIAPAFWNGYPLLQWDTGGYLARWYEGYLVPSRSTVFGLYLHYGESLGFWINLAVQSLATLWLLQLTLRVLGLMQTFRFVAISLGLILSTALPWLASMLLTDIFAGLSVLSLFLLVAGASRTSTLEKIALFVFTAFAAATHSATLGVLLGLCVAGWMARPLLGNRLPLAGLTQASLTIVAGSLMLVSANYALSGKLAWTPGGYGVAFGRMMQDGIVARFLNDRCPRERFKLCPYRNELPASADEFLWGKSMFNTLGRFEGMNDEMSYIVVHSLKDYPAWQAAAALRATGQQLLHVATGEGTNGWIPHTYGIIERYIPEQVAPMRAARQQHWAIDFDYVNWLHVPVALASMLALVTLLAHALANRRLDDLTLLAGTVALALLGNAFICGVISGPHDRYGARMVWVATFAVLMALARRFGGDVEAR

SEQ ID NO: 9767 - protein, 274 aa, BradyrhizobiumColbertium
MAVHQVNPGGKLASLDPIWDRIRGEAEDIVHREPELATFIYSTVLHHSRLEDSVVHRVADRLDHSALSGDLVRQTFDEALRDDPDLGNAFRADLVAVYDRDPATSRFIDPLLYFKGFHAIQTHRLAHWLYLKGRKDFAFYLQSRSSAVFQTDINPAARIGRGIFLDHATGFVCGETAIIEDDVSILHGVTLGGTGKENEDRHPKIRHGVLIGAGAKILGNIEIGHCARIAAGSVVVKPVPHNVTVAGVPAKIVGEAGCAEPSRTMDQMINAMGL

SEQ ID NO: 9768 - protein, 72 aa, BradyrhizobiumColbertium
MDVKEVRKLDAYLKRVFGNPKIRVVPRPKKDDSAEVYIGEEFIGVLFVDDEDDDRSFQFQMAILEDDLVDQE

SEQ ID NO: 9769 - protein, 212 aa, BradyrhizobiumColbertium
MLGGAAAVGAVALVAYLLWPTWGTRAANAPDKLPVSVGGTLFNLPRAAIRMKIQRHSGPQERIDLDFLYPSLEPPGAPKHVTADTVEAVVQSIDRIFLSIAAHHDALAPEQRTATIYPRYLDRAATMPVEGLTMRMFRADTPYGSEDLYSAASPALTARCTRDAATPGMCLSERRVGGADLTFRFPRSWLSQWRDVADAMEKLTAQLRGPKG

SEQ ID NO: 9770 - protein, 109 aa, BradyrhizobiumColbertium
MTPEALNTFFAIGIGFALAGALVNGYQALAQRPAGFGLLQEGVAPKTFAAVPFLVFAAPFIIMRNTLRGIQVESRRIEFVMMATVIASFWSMMSGTFFLMTLRAAGIPV

SEQ ID NO: 9771 - protein, 176 aa, BradyrhizobiumColbertium
MAIYELDGQAPDLPADGNYFIAETATVIGRVRLKPGASVWFGAVLRGDNEWIEIGEGANVQDGSTCHTDLGFPLVIGKNCTVGHNVILHGCTIEEGALIGMGSIVMNGARIGRNSIVGAGSVITEGKEFPERSLIIGSPARVIRTLDDAQVQRMGSAARFYVANGPRFKKGLKRIG

SEQ ID NO: 9772 - protein, 55 aa, BradyrhizobiumColbertium
MTVDSDPFTEGERAARENIPAEANPYRDGSDEHALWAAGHEKVAGAIEARESEGS

SEQ ID NO: 9773 - protein, 108 aa, BradyrhizobiumColbertium
MPASFGPIKGMIVILALAAMPAAALAQAAGGSTGSSGASMGSTGGSAGSTGGVRNSPVPPPGTNSLGTAQSSGSGVTTGTGGGGGVDATVNAENRQLDKRLKSICRGC

SEQ ID NO: 9774 - protein, 122 aa, BradyrhizobiumColbertium
MLRKMMMTALAVAAVGLSAPQAAEARGGFGRGGGFHGGGFHGGGGWGHRHWHGGGFWPGVAIGAGIAGAGFYGGYYGYGYPYYGVPYYYGTGYNDGYGGCYVARKRVMTPSGWRYRRVDVCE

SEQ ID NO: 9775 - protein, 164 aa, BradyrhizobiumColbertium
MIDLAQDTPSNRLFRFGGQPIALTAAALLLLIVGVTSIAIWRAYTGAAPETDRVVAARQLQARTAQASEQLVEKTKGLEATQQESIDQLQVMQDQLLTMKRLMAAQQADTKRLSEQVAALNESIDGLRQSFASARASEVETPPVTRKKPVRQRAHDSARKRSRS

SEQ ID NO: 9776 - protein, 243 aa, BradyrhizobiumColbertium
MRLHVVNPNTTASMTAKIAAAARSVALSGTSIDARQPAMGPVSIEGFYDEAFAVPGMLGCIREADRDGADAHIIACFDDTGLDAARAAAKAPVIGIGEAGFHMASLIAARFAVVTTLGVSIAPIEHNLKKYGLAERCARVRAAEVPVLALEERNTEAVGKISAEITAAIRNDRAEAIVLGCAGMADLAAELAATHALPVVDGVAAAVTLAESLVRLRLTTSRLGPYAPPRAKSYFGPFSQFQP

SEQ ID NO: 9777 - protein, 207 aa, BradyrhizobiumColbertium
MFDFRGQGKKLALVAMLFGISATAQAGESRLLYASLGDTTRAPIGWVEFCADKAAQCQGAPLQPRDIVMSQAAWRDLVKVNRWVNETVKPLTDQEHWGVIEKWSLPSDGYGDCEDYVLLKRKMLMDAGWPRQALLITVVRDKKGEGHAVLTVKTDKGEFVLDNQNENVVAWTETGYRFVKRQSQSDPNVWVSLGDTRPAVSTASARD

SEQ ID NO: 9778 - protein, 201 aa, BradyrhizobiumColbertium
MANKKFLPAAEERRRFQRVKVHLLGRYMLPDRREFPCQVINMSPGGLALLAPGIGNVGDRVVAYLDHIGRVEGKITRIIDNGFAMTIGATPRKRDKLAAQLTWLANRDILNLPEDRRHDRIVPRNPIAVLTLEDGTKMTCRIIDLSLSGAAIAAENRPPLKSTVLLGRVQGRVVRNLEDGFALEFLHEQPIETLEESVTAR

SEQ ID NO: 9779 - protein, 37 aa, BradyrhizobiumColbertium
MLGMRAFSENTIGYGMAAGIHWWLGLSVALRRVTRAA

SEQ ID NO: 9780 - protein, 383 aa, BradyrhizobiumColbertium
MESIRVCTHAGPGSEPVIRTVPWPKVGRKAALIKVGACGVCGTDLHILKGHWPKPLPWPFTLGHELGGVIVECGDEFSEDFMSKPLKVGSKVMIPPLMPCGRCYYCIHYPQTANKCLTPVYYGRYLGFDKAPHLWGGWAEYVYVDLEMLPGTKIYKLPDDMSLRLGALSEPLTSCIRAFNRATRAGGFSWGDTVVIQGSGPIGILAVAAAKEMGAGRVICVGAPEAPRLKLAREFGAEATVNIEELKSPQERIARVRKIVGGFGADLVMDCSGHPTAGPEGIEMLRDGGTYVEMGQFTDAGSIDTSWHRICTKDLNVLGSWGFTGNDLPLGVDMLYRTRDKYPWLKMHTIYPFTEDGVAQAVKDAMAMKTVKSTIVPWPELVE

SEQ ID NO: 9781 - protein, 171 aa, BradyrhizobiumColbertium
MSEAISGAFFESGVPACRPAQAGYVPKSGMRATMTDAPDVNARSPFHAIRAIDYTVIFVRDMAAMRRFYEGVLAFSLLRELSPNWIEYGIGSNTLVLARPSRTASDAPIPAGSAALQLAFRVSADEVDQCADELQRQGVVLLALPTDQSFGHRTLFFRDPDGNLLEVYAEI

SEQ ID NO: 9782 - protein, 644 aa, BradyrhizobiumColbertium
MSFPALTPPLARALAERNYDSPTPVQLAVLADEAAGRDLLVSAQTGSGKTLAYGLTMAKDLLGDTERFEQAGAPLALIVAPTRELALQVQRELAWLYGHAGGRVVSCVGGMDPRREQRELAAGAHIVVGTPGRLCDHLRRGRLDISELAAVVLDEADEMLNLGFREDMEFILETTPETRRTLLFSATFPRGIVALARQYQRDAFRIEVAGDEGGHADIEYRAIRIAPADVEHAVVNVLRFYEAPSALVFCSTRDAVRHLQAALLERGFSVVALSGELTQNERTMALQSLRDGRARVCVATDVAARGIDLPSLDLVIHADLPNDAEVMQHRSGRTGRAGRKGTSVLLVPPARRRRAELLLNLSGIDAVWGTAPQAEEIRKLDHDRMKDVLFTEETTPDDVALAQALLAERSAEEIAAALARLYRARLPSPEDIIDPGERSGRPRDGRGRDRLEGGDDRPAKPRSKSGQASSKHGMDEGSVWFRAAIGRRKNAEARWLLPMICRRGGIKKGDIGAIKVMDTTTEFQISERVAESFAAKVKRPDKEDSIRIEPMADAPQQQARSEERSHAPRRARDDGERREDRPREAREFKPHSKPLGGRGPRFEDAPSSGMKKKHRDKMGRAEPSVRPWPVRGAPGKKTKKKHRG

SEQ ID NO: 9783 - protein, 97 aa, BradyrhizobiumColbertium
MKLTLSKVAFVACVAATAFTATSANAAQYRTYGCDIAFFEGCGFLIETPNVGRKPTTVTHRDTSPVYMKQTDPRYSSSLSDAGGGGGGGGGGGGGGR

SEQ ID NO: 9784 - protein, 174 aa, BradyrhizobiumColbertium
MERRYDMSKPHWRPAHASDLPAISTIAARIHPDLPESLEVLAEKMRLCPDGCRVLVAGDEIAGYGLGHPWKQHQIPPLDGFLERLPEDADCLYVHDVAVLPHRRGGVARTYIAGIAELARASGIGTLALVSVYGTRPLWQRLGFRPLMADTALRAKLASYGEGATYMLRDLAAT

SEQ ID NO: 9785 - protein, 138 aa, BradyrhizobiumColbertium
MQANRMKGDIMTSSIRLALALAISLAIAPAAFAAPPTKTGKTDKGTVLTDTKGMTLYTFDKDADGKSACNGPCATNWPVLKAEASDVGGDGYTIITRDDGSKQWAYKGKPLYTFAKDQKPGDVTGDGFLNGAWHLAMP

SEQ ID NO: 9786 - protein, 387 aa, BradyrhizobiumColbertium
MTQRGSGDIIMAWRILAWTCVGCVALLAAIGGTWLFLLPGPPAQGNAPAISKEETEATLAALKPPKRKRPLIAIVGINDMSETTDYLMPYGILARADVADVLTLGTEPGPVALYPALKVQPHATIAEFDAAHPDGADYVVVPAMSREDDAVALQWIKSQASKGAIVIGVCVGAKVVANTGLLDGRKATTHWYSVPDLQKHSDIRYVADRRLVVDRGVATTTGITASMPMALTLVEAIAGRAKAEAVARDIGLAEWDARHRSEAFRFTRPFALTAIANTLAFWKRDQFGIPLTPEVDEVSLALVADAWSRTYRSHALTFAATAEAQTSRGGLRILPDKVAAGWPAKQTLQAAVDLPPARALEQTLHAIDARYGERTADFVAMQLEYPR

SEQ ID NO: 9787 - protein, 184 aa, BradyrhizobiumColbertium
MKHPSSRAFFAYWDKKRGTARAPDRADIDPAAVRGLLGDIFVLSCEPNLGFPFRVAGTRVCALAGTDLKDQSFAALFTDASRGEIEEITTIVADETLGAIAGVTAAREDGSKAHLELLLLPFNARPHTPVSVTGVLAPFGNECGPLLAFTLTSWRYLHQPEKLLPRAIRKLQVARGLMVYEGLR

SEQ ID NO: 9788 - protein, 37 aa, BradyrhizobiumColbertium
MTKLFDAQITGLAENLEKAARLATAVTIAGERPAQSA

SEQ ID NO: 9789 - protein, 293 aa, BradyrhizobiumColbertium
MHLRRGGLGDYLQTVAPIAPESEAALDSPQDSSPDLPAVIEEAPREPILTLPPALTAYIVLLAVIHLRVLLPPEFENWTIDVFGFIPKRYDSSLLNLQIPGGAGAKIWTFVTYSLLHANLTHLGFNVLWLLPFGSALARRFGTVRFFVFLAVTAAAGALAHLITHEHAVAPMIGASASVSGAMAAAIRFAFVRGSFLSFSRSDADTAARVPALPLSRAVRDGRVVGFLAVWFGVNIIFGVGAIGVDSETTSVAWQAHIGGFFAGLLLFALFDPVPRARGNAAGASSQDVSDRI

SEQ ID NO: 9790 - protein, 142 aa, BradyrhizobiumColbertium
MTVRSILNTKGHHIVSVEPDARLAAAIKLLGEKKIGAVLVMNQSRLEGILSERDIVRVLGERGASVLEAPVSEVMTRKVVTCKETDTVAELMGMMTSGKFRHLPVVDNGKVVGLISIGDVVKRRVQEYESEQEALRDYIKTA

SEQ ID NO: 9791 - protein, 342 aa, BradyrhizobiumColbertium
MLDRLKGRGANGSNGEKVGLGSIRRPVIGLALGGGAARGFAHIGIIKTLLANGIVPDVVVGTSIGAVVGGLYAAGKLETLEEWGRSLQGMRTILGYLDIRLNGSGLIGGEKLATRLEEACGQTLIEDLPIKFAAVATEVRTGHEIWLTRGRVVDGMRASYALPGIFAPVLIGDRWLVDGALVNPVPVSAARALGAEIVIAANLSSDIFTHSTTIYSHGAMPDTAAPVAGESPAKRRFPRLFSPERTVKREFFGGAGRPGISSVMVDAFNIMQDRITRARLAGDPPDMLITPRVGQIGWFDFHRADELIAFGTRAAERALDSIQEAIHVLAPAPEGTAPKAQE

SEQ ID NO: 9792 - protein, 357 aa, BradyrhizobiumColbertium
MTRGGDGIIGWRRSSRLLSALIVAACLVTAGQNVAQAQLFSDRPPPVPPASVPDPGGAVSLAPPSGPGAGPPSLPPTLMQPATPSMPPPAVTTVPPAAPLNAAVPGQGVLSLTAKYGKDSPAITSGLVWRVFADRPDENGTFKLIREDRSATPNIVLPPGNYVVHVAFGLVSAVRTVSLKAETDRESFVLPAGGLRIEGRVGTSRIPQNQISFSIYKGSQFESGDRASLVPNVAAGDVVLIPEGTYYIVSNYGDANSVVRSDIRVQAGKLTDVTITHRAAVITLKLVSDKGGEALANTAWSVLTPGGDVIKESIGAFPRVVLSEGEYRAIAKNEGKVYERGFNVVNGVDGEVEVVAR

SEQ ID NO: 9793 - protein, 73 aa, BradyrhizobiumColbertium
MEQGTRPVGMFEVILTRRKRFGWRWQVCDQSGKIFADGFERTRPSAKYQSERALFFLLSQAYLRNRSAASSED

SEQ ID NO: 9794 - protein, 40 aa, BradyrhizobiumColbertium
MIADQRMGITNAFQRNRLGSSRGTSLLVSTRRVACIMISP

SEQ ID NO: 9795 - protein, 820 aa, BradyrhizobiumColbertium
MTAAKKMPGKPAAEMFDDIPVLQRKWHAALKPGERLPRYEDVMLGSLGRLADHIALLRSDGALELSRSGRYVQKWLGEERWDIPVVELSPDCATALSEAAANALATLRPHQASAHCVRDGIVRTYDVLALPTSSRWGATLVGAYVNERGAQYNLLDAIFSSTEDAVVSLVTLRDAGGSPLDLQVVHHNKSANALLKVESGPLLWRRIGEGGTLLGSPEIINFLLKAVSGDRGEQLEIESEGRYLRLSATAFADVVSLTISDVTALKRRDASFRLLFDNNPMPMWVFDAETKAFLSVNDAAVQHYGYSRATFLRMKLHEIWPEDEWDSHAAALERVGDAYHSTRNWRHLRADGSEIEVLTFGRRVAFDDRDGYLVAVVDITERRKAEARIAHMAHHDGLTDLPNREHFQERLKQALDQAEGKRVGVLYIDLDLFKNINDSFGHPVGDRLLKQVAERLTTAVRGANLAARLGGDEFAVILAADVSPNEASACASLLIDMVKTPYDIDGQEMVIGASIGIALSPGDGTTPEELMRNADMALYRAKSDGGGVHHFFEREMDLQAQRRRDMELDLRRAFANGEFELHYQPLVSIASDRISGFEALLRWRHPDKGMISPAEFIPVAEDIGLIIQLGEWVLREACAEAVKWPSDVKVAVNLSPAQFRSRNLVQVVISALAQSGLSPKRLELEITESIFLAETDANLAILHQLRELGVGISMDDFGTGYSSLSYLRSFPFDKIKIDRSFIKDLAERPDCGAIVRAISGLGRSLNITTTAEGVETEDQLDWLRAEGCNEVQGFLFSAARPATDIAKLLADFGQRTSRAA

SEQ ID NO: 9796 - protein, 422 aa, BradyrhizobiumColbertium
MRRREFLVGAAMLAGAVAPSRAVDSPAPSPEGLDRITAYFDNEVGSGRLPGAVILIQQHGEPVYLKSFGVRDTRTGLAMTPDTIFAIHSMTKPITCLGAMMLIDEGKLALTDPVSKYIPLFADTKVGLELTEPDGKLKLGLVPLVRPVTIEDLLRHTSGITYDYIGAELIEQAYKTADIFENPLDNRVFADRIAKLPLARQPGTLWRYGHSTDVLGCVIEIISGQKLYQFLKQRIFDPLGMNSTKFVLATEDELARMARPLPNDYILLAGERERLDHPDWQSGGGGLLSTITDYQRFSQMLLNGGAFAGRRYLSPAAFKAMTTDHIGPGSGVGRDYFYFPGDGFGYGYGLAVRTDPGNAKPPPPGSLGELKWDSGSGTYFGVDPKLDMVYLMMQQTQNERGRITPAFKALVYDCYPPPLRRP

SEQ ID NO: 9797 - protein, 187 aa, BradyrhizobiumColbertium
MPDAIELLKTRRSVKPREMTGPGPSPAELETILTIGARVPDHGKLAPWRFIVFEGDARQRAGEVIARVFARKNPGAPEADIETERKRLMDAPLVIGIVSFTKPHPKVPAFEQELSAGASAMNIVTAASALGYGACWLTGWFAFDRDVLDGLGLKPDEKLAGLVHIGTPTKPSEDRPRPFLSEIVTRF

SEQ ID NO: 9798 - protein, 680 aa, BradyrhizobiumColbertium
MTDQPKSESGFQYSLSNLKPVTPAPKVTLTFPDGAQRQFDKGITGLDIAKGISPSLAKRTVAMALDGALADLNDPIETDAKIELVNRDDPRALELIRHDCAHVLAEAVQTLWPGTQVTIGPVIENGFYYDFFRNEPFTPEDFAAIEKKMREIIARDKPFTKEVWDREKTKQVFRDKGEAFKVELVDAIPGSEPIKIYYQGDWFDLCRGPHMTSTGKVGNAFKLMKVAGAYWRGDSNNPMLTRIYGTAFAKQEDLDAYLKQIEEAEKRDHRKLGRELDLFHFQEEGPGVVFWHPKGWTVFQQLIAYMRRRLTGDYNEVNAPQILDKVLWETSGHWGWYRENMFAAQSAGDEAEDKRWFALKPMNCPGHVQIFKHGLKSYRDLPLRLAEFGVVHRYEPSGAMHGLMRVRGFTQDDAHIFCTEDQLAEECLKINDLILSTYADFGFTGDLTVKLSTRPEKRVGTDAMWDHAERVMATVLREIQSQNNHIKTEINPGEGAFYGPKFEYVLRDAIGRDWQCGTTQVDFNLPERFGAFYIDHDGGKKPPVMVHRAICGSMERYIGILIEHYAGNFPLWLSPVQAVVTTITSEGDEYAKVVMEQARRAGLRVEVDLRNEKINYKVREHSLAKIPALLVVGKKEAETHSVSVRRLGSDGQKVMTTAEAIAALVDEATPPDVRRARGGV

SEQ ID NO: 9799 - protein, 390 aa, BradyrhizobiumColbertium
MERAPAAGRFAPTALMLGNLVTGCSVLAPAGMLPELATGLEVSIHAAGLLITFGAVTLCIGSPLTAWLTSRIERRTLLATTLAVLAFGNLASAFAPHYASLLIIRLAMLAVGALYTPQAAGTAALIVPAERRGSTIAYIFLGWSLAAALGLPLITFIASRYGWRAAYGGIGALGCISLLLLLLRLPAGLKGAPVDLKTWAAVGRSRTILLLLAITMLQMSGQFVVFTYMGPLLNKLTGAGADAIGMVFALYGVCGFLGVVLATRIVDTSGPYRTSLLFTWLLLAGIAGWAVSAGSLVLMAVAVATWGLGFASTNSMQQVRLVAAAPPLASATVALNTSVLYIGQAVGSAVGGLLFARELLHTLGFVAVGFVVLALILVVLTRPGPVAATS

SEQ ID NO: 9800 - protein, 120 aa, BradyrhizobiumColbertium
MILAVAAVLYSASAFAQADKPPMVGDKPLVQVKPKEAAAKPAAASKGKPQSIAVRLQACLEIDDGTKDRLNCYDAVIPPAPKPKPAKAKGYADCRFFKEEDERLACFNGFAESIPKLPKN

SEQ ID NO: 9801 - protein, 445 aa, BradyrhizobiumColbertium
MFGAVSTLRADFRADRTRSGRPGRALQVGLISALLPLSLALGHCGKAPDPTALAAHSQANVQVVAKTNSQTSNSRMASGDTFEDRFPAPRFKERFPSASESFLQRQMSDFSPKRAVQQQPPEQASYKVASLEPQVPYRRPPREDLTTLVSMKSSAFPYFGNNPASDAPFLNISKGDRRGHRSYSGRVYWQDETYNDNRVLVHVPEHFDVRKPGVIVVFFHGNGATLERDVRNRQLVPKQITDSGANAVLLAPQMAVDAADSSAGKFWQPGGFKRFMAESAEHLARITGDPNGARAFANMPIVIVGYSGGFLPTAWSLQVGGISDRVRGVVLLDAVYGELDKFASWIESHRSGFFVSSYTRHTARRDRELMSMLRQKGISVSEDMDEPLQPGSVVFVETGEGITHRDYVTRAWTQDPLKDVLVKMSATPSLALARVASTNPSAAGR

SEQ ID NO: 9802 - protein, 455 aa, BradyrhizobiumColbertium
MTASDAGTAAWTGRLTGSGAGVSVPVATAIVVADMIGVGVFTSLGFQVKDIPSGFSILLLWTVGGIVALCGVFAYSELGAMFPRSSGEYNFLGRAYHPAFGFLAGWVSATVGFAAPVALAAMAFGEYAKSVVPDLSPIPLAIGVVWLVSLVQLTGVKRSATFQLISTILKVVLIVAFLVAGFIIGVPQPIAFTPQPGDLAHIVSAPFAIGLVFVMYSFSGWNAATYIIGEMNTPQQSLPRALLAGTVIVLVLYVALNAVFLYSTPVGALAGQLDVASVAGSAIFGSLGGRIVGAMICFGLISSISAMMWIGPRVMMTMGEDIPALRAFSRKSVSGAPAYAILFQLAVATLLLFTRSFEAVLDFIQFALLFCSFFTVAGVIKLRITNPDLPRPYRAWGYPFTPFVFLLVTAFMMYYLLTERPVQSLSGMLVMLSGLLIYAVFRRRPVAAAASPHRE

SEQ ID NO: 9803 - protein, 404 aa, BradyrhizobiumColbertium
MVELLRIAAVAFAFFAAAASSAHAAEVTFDDTARFLAGMQPSADSPLVPLTKDPGWQRHAKFFDGAFAQLEQRQLSKIRNWADVNLAAPRPTMFYMFSGPDFLYADAFYSKASTYVLGALEPIGAVPDLTRLSRGSIGAALYNVERSLGSILSFSFFITKQMKVDLSANQVNGTLPILYVFLARSGKTIRNVEMVALDDKGGLHVGDDNPGRSATRGVRITFAGSDGETRTLYYFSTDLSNSGARAAGFLKFCETLGPGNSLLKSASYLLHSGNFTVVRDWLLANSATIIQDDSGIPLANYNARQWRFFPFGRYLGPIDEFPGRYQERYAQLFTRAQPIDFGVGYRWRMHESNLLLAVKVPGSETAPAAETTSTAEPAPKPPRPKRLRPPESIPPSQGRFYWFR

SEQ ID NO: 9804 - protein, 42 aa, BradyrhizobiumColbertium
MDLLAIVALLALVVASSWYLADSLATPPSTTTFIVPSQSVHW

SEQ ID NO: 9805 - protein, 74 aa, BradyrhizobiumColbertium
MGYNCRHLPTCSVYGDEAIERFGLWAGGWMTLARLLRCNPFGTSGIDNVPLTAPKGARWYLPWRYGRWRGVNAS

SEQ ID NO: 9806 - protein, 294 aa, BradyrhizobiumColbertium
MKLLTSLNFRGWLLVGAAVCGVALSGAVATFGSSARAGSALEERKLPMKFNWVACEPNCRGWISAVGIITADTPREFEEFSRGRQLGGATVVLDSSGGSVNDAITLGRRFRNLGLSTTVGVSLRGGPSTRPAVAPEAYCESMCVFLLLAGKKRYVPAAAHVRVHQIWMGDRADDAKAASYSAQDLMIVERDIGRLAKYTFDMGGTGDLLSLALSVPPWEDLHELDAGELKLANLVTTDLVADVLPHMDISAPAMAGLAPKTQARFATEQEPSKSTKTAEAVVPTGGVAAPAPEK

SEQ ID NO: 9807 - protein, 151 aa, BradyrhizobiumColbertium
MLNDIYNKRIIELAGNIPRLGRLSDPDASATAHSKLCGSTVKVDLKMNGDTVTDFAHDVKACALGQASSSIMASHVVGSTASELRELRETVRKMLKENGAPPEGKWEEIKFLEPVRDYKARHASTLLTFDAVVDAIGQIEAKAKQPAAAQG

SEQ ID NO: 9808 - protein, 229 aa, BradyrhizobiumColbertium
MDAAIKSIRPNKPSDRQPESRPAELDPAEFLAAAVRADQPRPARAEAEAAVKTLLAYIGENTEREGLLDTPRRVVEAFDELYQGYHQCPAEVLDRTFGETAGYDDFVLVRDIEFTSQCEHHMMPFYGKAHIAYTPVERVVGLSKLARLTDIFARRLQTQEHLTAQIAAAIDEVLKPRGVAVLIEAEHTCMSVRGVAKHGASTFTSRFTGMFRDNPAEQARFLSLVRGTR

SEQ ID NO: 9809 - protein, 140 aa, BradyrhizobiumColbertium
MSAHSHEIEEGLAFLPKFDAAGLVTCVATDAVTGDVLMVAHMNEEALRKTVATGEAWYFSRSRNALWRKGETSGQTQRVIEMRTDCDQDAVWIRVEQIGAACHTGRRSCFYRKVEAEGGGAKLVFADAERLFDPSEIYKK

SEQ ID NO: 9810 - protein, 339 aa, BradyrhizobiumColbertium
MSVDNSSATHTAGLDPSRARVAGAIKQASNISGVSFQYMLTTAKMESDFNPTAAAPTSSAQGLYQFIDQTWLGTVKEAGAQLGYGSYADAITRTPSGTYTVDDPVKKRSIMKLRDDPEAASSMAAALTQSNSFKLTGLLGRRPSDSELYMAHFMGVGGAAKLIANAEDNPQAVGARLFPNAAAATRSIFYAKDGRARSVSEVYSVLDARYASAANSKVTRSAMAMYGGAPSTTEVASASGVLPSAPVIDNAAYLQTFPNTRAVTPVSATTSKTLAENAPSTPVFRSIYQPGDATQPVSATVQKLWGNNASLTSIASATPDVRPPQPLDLFSDRSGTFSS

SEQ ID NO: 9811 - protein, 391 aa, BradyrhizobiumColbertium
MIVRQFINWIRTAPAGERAEATRALARAWLISDLSADDRIAAEGALLMLLDDPSPLVRQAMAEAFARSLEAPAAIVRALSADQPSVALPVLEHSPLLIDADLVDIVATGNEEVQCAVARRIALPVSVCAAIAEVGCAAAALELIENPHAELAPFSWDRIVERHGHLAAIREAMLVLEDLPAATRAALVAKLSEMLAQFVVARNWLSADRADRITIEARDRSTMNIAARSRGEDMQGLVRHLRVTGQLTAGLILRALLSSNLDLFDAALAELADLPLARVSALLHDRGGNSLQALLRRAGLPETTFAAFQVALDACHEQGFVDSDDGAVRLRRRMVERVLTHCEMERGVTEPLMVLLRRFATESAREEARLFCDELVAEEAMDPAYDDLIAA

SEQ ID NO: 9812 - protein, 192 aa, BradyrhizobiumColbertium
MAKNSAKDIEVKAFATHHVITQPNPLRKVLRRVEEKDMDDPVARAEQALAGLSGEFRDWMAIEVQRLSAAWTAVQKDGFTKKLRDELFHAAHDIKGDAATFGFPSAAGIAESLCRVIEHAPDLQKVPPELFTHHINAILAIVHENTRLDTISVSAELSRRLRKVADDYLAHVNRDRPEHLEVILSPSIAPVE

SEQ ID NO: 9813 - protein, 181 aa, BradyrhizobiumColbertium
MFRIDFNKLRFLVCDDNPHMRRILRTLLHSFGAREVYEAEDGATALEMYSHYVPDIVITDWAMPIFDGLELAQMIRQPESKGNPYAPIIMLTGHSEKRRVTVARDAGVTEFLAKPISAKGLYQRILNVVANPRPFIKTKTYFGPDRRRNTNSAYMGPERRVGEKHEVLQQPSLLDKARSSI

SEQ ID NO: 9814 - protein, 259 aa, BradyrhizobiumColbertium
MTKPSRYDRIAFVASPSNEAQAAFGQLTRDYGNCDPADADVVVALGGDGLMLQTLHQNMRTGKPIYGMHRGTVGFLMNEYSTHDLRARLAAAHESEINPLLMRATDVNDRVHLHHAINEVALFRQTYQAARLRILIDERERMSELIADGIMVATPAGSTAYNLSAQGPILPINAALLALTPISAFRPRRWRGALLPNTAYVVIEVLEGDKRPVAAVADHDEVRDVRRVEVLSDKTISMRMLFDPGHSLEERILREQFGY

SEQ ID NO: 9815 - protein, 522 aa, BradyrhizobiumColbertium
MVKQLPMLRRASLVLAVSAFALAGFARADDPPQPRPEAASPGGQKGGRGGGAPNASPASPSAAEQHRLPPDSITRQTLDLPGRTLNFTATAGSIRVFDGKGEPLADIAVTSYELDGADRANRPVTFLFNGGPGASSAWLQFGAAGPWRLPLDGEALSPSASPEVKPNAETWLDFTDLVFIDPVSTGYSRFVASGEEARKSFYSVDGDVNSIALVIRRWLEKHERLTSPKFVAGESYGGIRGPKVVRQLQLQQGVGVRGLILVSPLFDFREFTGTSILQYVATLPSYVAVAREAKGPVKRADLADVEAYARGEFLTDLVKGEADKEATNRLADKVAQLTGIDQAVSRRLAGRFDVSEFRRELDRKNGKVTGRYDASVRGFDPYPDSSNSRFGDPSGDALQAPLTSAAVDVLSRKLNWRPGGSYEVLNGTVGGQWDFGRGIDPPQSISELRQILATDGKLNVLVAHGLFDLATPYFGTKRVLDQLPAFVTQRVKFVVYPGGHMFYSREGARQAFRSEVETLIRE

SEQ ID NO: 9816 - protein, 462 aa, BradyrhizobiumColbertium
MDPWLRPAIDYIGSWIEFQLATLQQPGVLVAFAYRGEIVAEHAFGLANLDTGEKLTPRHRFRIASHSKSFTSAGIMKLREQRKIRLDDTVGQYVGGLHPRVAETTIAQVLSHSAGLTRDGADSGQFIDSRPYLNASELLAELKQPAAIEAGTRFKYSNHGFGLLGLVIEAVTKEPYPTWIKREIIAPAGLRETEPDTPLPRAALFARGHTRRLPYGERCVIAGDNPAQAMASAAGFAATAADTARFFAQLAPNAKKSVLSVASRREMTRHHWRIPQSFEAYYGLGVNAGKTDGWDWFGHSGGFQGYISRTCSIPACELAISILSNSIDGAAPIWMDGAMQILRVFQTRGAPDRRLRDWTGRWWTIWGATDLVPAGNRVLLANPQFNNPFMDAAEIEVTGRDSGKLAWAAGYSSHGEPVRRVRNKRGKVSEIWIAGANVKPEAVVAREIARRYPPRKRRPTPE

SEQ ID NO: 9817 - protein, 180 aa, BradyrhizobiumColbertium
MRKLSMFFVPALLALALAAAPVLSSAYAAGSDEPSSPPKSDSSTKKGKKKSSSVSDPKFLATYRTAYAAIYDKHDYSGAIDQLKSLKRDDVADVANLIGYSYRKLGDYQSSKVYYELALKDDPNHVRTWQYYGLWQLEQGNREQAQYHLDKIASLAGTDSSEYRSLAAALDKPTGATLVY

SEQ ID NO: 9818 - protein, 119 aa, BradyrhizobiumColbertium
MLKTISAALLAASVLAAPAFAAEAGKTTTTAPAIKADQSQPKAATAVKPEAGFKADTKAADVKADAKMDGKPNAVNAHTNAAPDEHKTVGQHRHQDKQVSDKQSQKPDVTKPAATDKRN

SEQ ID NO: 9819 - protein, 140 aa, BradyrhizobiumColbertium
MRRLARCAVILALPLAVAACFGSDGDRPTLMGGTQAGGPQPFPDNFRSDTLALMRTYLNNPVGVRDASMAEPVQREVGGRQFYVSCLHFTPRETDGSYKAMRERAVVFVNGRADRVVDRTSDLCAGAVYAPFPELEKMTR

SEQ ID NO: 9820 - protein, 237 aa, BradyrhizobiumColbertium
MIMKSILLGAAALLALVAPAAAADMQPRPYAKAPAYTPPQVIYNWTGFYIGGHVGGAFAGDNSFQSSDARFMGGVQGGFDYQFAPNWVMGIEAQYSWLPTNNNGVTFPLGTQVTSNTDQIGSVTGRIGYTWGPTLLYAKGGYAWRNNNLGVNIAGVPQAFTTSGNSKDGYTVGAGLEYMFAPSWSAKAEYQYYNFGSTTFTSGPADVVGVRGREDEHTVKVGVNYRFGWGGPAASRY

SEQ ID NO: 9821 - protein, 80 aa, BradyrhizobiumColbertium
MRILVSAAMLSSFFCLPCSAQTILKSEPLMLAPYEVAFVKDVSCPSGKVLKVTGAIRGLHRRKACVAMPGEQASLAAATP

SEQ ID NO: 9822 - protein, 84 aa, BradyrhizobiumColbertium
MPYALFCNGAQISKAYPSESDVWKLAQRSGLVVDVAADDERAGPRRMLDNDYEIAPCQAAQGEDPAKNKAEADQQSRMELELKS

SEQ ID NO: 9823 - protein, 39 aa, BradyrhizobiumColbertium
MFSAMTSDLKTSCGHMLLPLTLALLGACAANLWLVWSWL

SEQ ID NO: 9824 - protein, 124 aa, BradyrhizobiumColbertium
MKWIRERDALIAQTLSFVQSVTGRKDVVLQPEAPAAGTPISMDLIAMKAVTADIDAPQEPPSPRSTPPALPWASGDLRIEMQACIANFRKHQERFEREREEYCAATLTKLRAALRDASGRPVKK

SEQ ID NO: 9825 - protein, 54 aa, BradyrhizobiumColbertium
MVAGEERSDEAAGLRLIRAFLSLPREKRAEVIAFVEELARAYGRPEEGTKASPR

SEQ ID NO: 9826 - protein, 63 aa, BradyrhizobiumColbertium
MFLLTAVALCCSAVAGTVAMFEPTPAPLPAKQVAQRMAIEASAQTPVRVVGAPFEPNVNPSER

SEQ ID NO: 9827 - protein, 236 aa, BradyrhizobiumColbertium
MISHRPPVLAHERFVADRENFAGLDLAARFERIERTNLWGAATSVSGLGSEDPATSAIREAFPPLLQRLGARSLLDAPCGDAGWIGRLELDVDYTGVDIVQSLIEANRRRVEGAGSSARFIVGDITRDALPRADVVLCRDCLVHLSFANIARAVRNFRASGARFLLATTFPEWEQNQDCEDGDWRALNMEKAPFEWQAPHASINERCEEGDGGWRDKSLGLWRLDQLPEARPESRT

SEQ ID NO: 9828 - protein, 157 aa, BradyrhizobiumColbertium
MKIKLLGATAVAATMLAGSAMAQAVVTNPGRCSAQFPNANCQNLGPGNPYTDGGYRDRRASYGQTSGGWNNDWNRRRTGFLPTDVAAGVAGAAIGTAGAIATAPFRAWDNSYAYDNSWDRGWHNRGWDNRTYAQRNGFVCTPGTYFRGEDGRRHICQ

SEQ ID NO: 9829 - protein, 161 aa, BradyrhizobiumColbertium
MRAVTLAAFLIGLPAAALAGEGFEIVVPGRPGVPIIINNIDASYSVVEGTWGLGKNQQVQPTIYGGRYIAERQPDHVGHYYPTLGLRPGYGRLEVEPPANRKLPKPAESYHQSWGASSAPLPAQMDPPVDSPPVIYAPEINERPRPPRPRPRTELPGRPPG

SEQ ID NO: 9830 - protein, 168 aa, BradyrhizobiumColbertium
MRQMISGLVAAVAVTFAATAPAAACGFTTCAPVAPVYSGCNTGCGGYGYGYGYGAYERLAEPATQYYYVNQGPTYTGPGAFAPYPTYREDAVVAPANYGYGYGYRSAAVAPPAAYPYRRPYYRPYRYGYGPRYGYLPRTHYGHAHRHGYAHRHAPHYHGGHRVLRRYY

SEQ ID NO: 9831 - protein, 308 aa, BradyrhizobiumColbertium
MRWGKVNRGKQLKSPSPTPKLPYSGTHDRSEPMKDRKFGPKGARGGTKPFNRPGKSAGRPAWRDRESHLDGPVILYGWHTVTMALANPRRRIRKLTLTENAARRLAEENIETRVAPEIVRPQEIDRLLSPDAVHQGLLAEADPLPSPDIETLEQEGMVLVLDQITDPHNVGAILRSAAAFDVKAIVTTARHSPEATGVLAKAASGALELVPIVTVQNLARALAALNERGFQTVGLDSEGSEDISDVALREPLALVLGAEGKGLRQLTRETCSVVARLDMPGEIKSLNVSNAAVLALYVGASRLGLMKR

SEQ ID NO: 9832 - protein, 377 aa, BradyrhizobiumColbertium
MAPPSKTSPQARRRKTPGKTKRQVRSAGAQTPVLELTPVERSLAAQSSSAALQTEMAALDSVLKGPPALSPDSEPVQAILTGAAPDDAERLQALLVGKEAKRARRTTSDELADDWRLGGYPYKSRMYRRDYEEQKFVLQTELLKLQNWMKESRQRLVLLFEGRDAAGKGGAIKRFMEHLNPRGARVVALEKPSDVERGQWYFQRYVQHLPTAGEIVLFDRSWYNRAGVEHVMSFCSPAEYGEFLRQVPEFERNLVRSGLHLIKFWFSVSREEQRRRFKEREGHPLKQWKLSPIDLASLDKWDDYTRAKESMFFHTDTADCPWIVIKSDDKKRARLNAMRYVLHAMPYAGKDGKRIGMIDDLLVGRANVIHEREEHAG

SEQ ID NO: 9833 - protein, 344 aa, BradyrhizobiumColbertium
MTAPLQFGLDSFGDVTKDATGTLLPHAQVIRNVVEEAVLADELGLDFIGLGEHHRADFAISSPETVLAAIASRTRRIHLGSAVTVLSSDDPIRVFQRFATLDAVSNGRAEVILGRGSFTESFPLFGFDLRKYEELFEEKLDLFAALLSQQPVTWEGKLRPPLRDQLVYPPVETGTLKTWIGVGGSPQSVVRAAHYDLPLMLAIIGGDPARFAPYVELYHRAFKEFGRPAQPIGVHSPGYVAETDAQAREELWPDYKAMRDRIGKERGWPPMGRDEFVSEIEHGSLYAGSPETVARKIAKTAKVLGISRFQLKYSAGPLPHEKLMRSIELYGRKVVPMVREMLAG

SEQ ID NO: 9834 - protein, 326 aa, BradyrhizobiumColbertium
MKAVVVEQYAPIDQIELKEVPRPVVEPGQLRIRVEAAGIGFVDGLKIEGRYQTKDPLPFIPGTEFAGVVADAPGAPGGYQPGMRVMGMTRSGALAEEIVVKPEALHPLPEGVAAEVAASFRANYLTALYALSARASLCAGEQLLVLGAAGGTGIAAIQIGKLLGARVIAAASTPEKREFAQAHGADAVIDYTQAGWRDTLKELTAGRGADVIFDPVGGEISVQAFRSIAWRGRHLVVGFAAGTIPALPFNLPLLKGGALLGVDLAQIPLREPDVQKRLMSQLTGWLTDGQLKPVVGRIFALDDFRDAFKSMRTRAALGKMVVRIAR

SEQ ID NO: 9835 - protein, 685 aa, BradyrhizobiumColbertium
MATYLDTLNAEQRRAVEHGVTEGSTVGAPLLVIAGAGSGKTNTLAHRVAHLIVAGSDPRRILLMTFSRRAAAEMAGRVERIARKVLGENNAAIMRDALTWAGTFHGIGARLLREYAERIGVDPAFTIHDREDSADLMNLVRHERGLSKTESRFPAKGTCLSIYSRCVNAEMEIEKVLGQHYPWCAGWAAELKGLFAAYVEAKQAQHVLDYDDLLLYWSQMMSDALIAGEIGGRFDHVLVDEYQDTNRLQSSILLALKPDGRGLTVVGDDAQSIYSFRAATVRNILDFPQSFSPRAEMITLDRNYRSTQAVLSAANGVIGLARERFTKNLWTDRTSGQKPQLVTVHDEADQARYIVEAVLANREQGALLKHQAVLFRTSSHSGPLEIELTRRNVPFVKFGGLKFLDAAHVKDVLALLRFAENPRDRVAGFRVLHLLPGIGPATAQRVLEQMAESTDPLAALGRLPVPARTGADWIDFVRIIENLRYSEWPVDLERVRLWYEPHLDRIYEDAETRRADLMQLEQIASGYASREKFLTELTLGPPDATSDKSGPPLRDEDYLILSTIHSAKGQEWKSVFVLNVVDGCMPSDLGAGTSAELEEERRLLYVAMTRAKDDLHLVVPQRFFVHGQAAKGDRHVYASRTRFIPEQLVYLFERTAWPRAAAGAARTAAQGPKVDIGAKMRGMWR

SEQ ID NO: 9836 - protein, 196 aa, BradyrhizobiumColbertium
MTELKPDQFEMRRLESLSNTIFGVAMTLLAYDLPKAAVFTSAPDWSDLAHVYSGKLAGFALSFIIAGVFWISHHRRLARQPVGSRGAVILNLFFLLSIVLLPVTNGLYTNFGMSGAVAVLYGLHLTAIAGLNAWLWWTILGSWRHEMLASLFPLLVFIPGTIVAAFAPHVAPFLWNIAFAGLLIQRFYGARIRPDA

SEQ ID NO: 9837 - protein, 128 aa, BradyrhizobiumColbertium
MMMLYAILAYHVEDEVMSWTPEQDAAVVAKVIEVQAPLRESGQFGPAARLDETRKARTLRGPGPGIVLDGPFAETKEQLLGFHLMQCDTEDEAIAAARKLRAVNPTAVYEIRPIKLYVPADGFGATEG

SEQ ID NO: 9838 - protein, 61 aa, BradyrhizobiumColbertium
MSGHTIKIICDARRAGQSAPADLHDQAGHHRYYGSSAENGGERIAESRGGKRPRARNICGF

SEQ ID NO: 9839 - protein, 67 aa, BradyrhizobiumColbertium
MNVLQISVAAIPFLVALMSRTGKAIAPCLLASIFTVLLGEEPHRAVVAWCIGMLIAAVALRERLRAG

SEQ ID NO: 9840 - protein, 102 aa, BradyrhizobiumColbertium
MTDKPIDWTPDLTLPTSKSTVQHFTATAGGDRLTIDTTPWGEADLRVNGQSIAHIDVAPSAGDAFRTLETFAEDFEAGNRERLNQTIDDDDVREKLGLRHAP

SEQ ID NO: 9841 - protein, 45 aa, BradyrhizobiumColbertium
MLAILPRAVHRAASSLSADPHTGKMIDPVVLGSLSALKFAPVDIA

SEQ ID NO: 9842 - protein, 495 aa, BradyrhizobiumColbertium
MACLWGFTHGGPAGTIVGRYWPNSSSNSKNIPDLGYWTSLVHEAIHDQEGYSSLQVAAFPSDRAEEILASASRLFARHSYANVTMEQVAASVRSVPGALYHYFRDKEDLIYHCYLRGLAIYRHEIETAAEAGIDGLEVVRRIIRARLRREGQRMILFSDIDALAPSYSNDVHARRWQNATLLADIVKRGVGDGSIACDEPLVVAVALISILDWVPFWLSERDYYTREQAIDAIDDIVTHGVYRRDIALPDMPEPPSLAPFLQARSRLNKRAAKLDRMLSIASDSFNRRGALGTSLESIAAEAGMTRAGIYYHFSEKESLLLACLQRGLVGEIGIREHLQDLGLGAFDHIVQRVRLLLMLHDTPCGPKATYHNINYLNDVDRKHYVEQVLATIGQDQKNHQRWIDEGHFQEGRHAFRGTCLDWYEPLVPDLVQRCAGLVTNSDRRSFFAAVPRGAQAASSFGLNSQSGPARPVEGSTSFNWIVRQKLGRAGGQKLT

SEQ ID NO: 9843 - protein, 410 aa, BradyrhizobiumColbertium
MQKLIIAAAAALTVLGGAAFAQETIKIGYIDPLSGGGASVGEGGLKTFQYLADEINAKGGILGRKIEILPLDNKTNPQESLVQAQKAIDAGARYITQGNGSSVAAALSDFITKNNTRNPGKEVLYFNYAAVDPSLTNEKCSFWHFRWDASSDIKMEALTSYMKDVPAIKKVYLINQDYSFGQSVRADARKMLGAKRPDIQIVGDELHPLLKITDFSPYIAKIKASGADSVVTGNWGQDIALLLKAAADAGLKVNWYTYYAGGAGGPTAIKQTGLDHQVFQITEGFANSGHQPAMEFEKAFRAKVNMSLWYPRAVNEMRMFKAAAEKANSLDPVKVAAALEDLKFEVLDGGEGLMRKDDHQFFQPIYISSFGKLAANEPFDEEGTGWGWHLVSKIDTSKTMVPTTCKMTRP

SEQ ID NO: 9844 - protein, 318 aa, BradyrhizobiumColbertium
MNAVLELIVISTLNGLLFGMLLFLLSSGLTVIFSMMGVLNFAHASFYMLGAFFGFQLTKWIGFWSALLLAPLLVGAIGMAVERYGLRNTHKHGHVAELLLTFGLAFAIEEIVAMMWGRSPVDYRVPALLDFPAFTIFSTNYPAYKIFMLAVSIVIFVALLIVLKRTRVGLIVQAALTHPHMVGHLGHNVGRVFMLVFGVGSALAGIAGVIAGPALVTQSDMAAALGPILFVVIVFGGLGSLPGAFIASLVIGLVQTFAVALNGSLASAFGPLDPSAGPSVLTDIWNVTIAQVAPIVPYLLLVIILIVRPMGLMGTRES

SEQ ID NO: 9845 - protein, 432 aa, BradyrhizobiumColbertium
MNATTTSASNISGKSAGDSLRFYGVWLVGIATLILLPMIFSSGGSLTSFSLIGIAIVFALSYNILLGQTGLLSFGHAVHYGLGGFAACHVMNAVVSHGWPVPLPFIPLFGGLGGLAFAMIIGWVMTKRAGTVFSMISLGIAELVASSSLILRSVFGGESGISTDRTALPKMFGWTFGPQIQVYYLIAFWLVISAIAMYALTRTPLGRISNAVRDNPERVQFIGYDPHVVRYIAFCFAGFFAGVAGGLAAINFEIANAAYLGAIQSGLVLFSTFIGGVAFFFGPILGAILVTYLQLGLTSVTGVWQLYFGIIFIGIVMLSPGGIAGLIMMHRPLARAGTLQTVIPSYVVAAVPTLALACGVILTIESIARTHSGQSSPINLFGVAFTPASPMTWASAAILIVVGFFVARLSWRRVADAWDRAATIARDRGYLA

SEQ ID NO: 9846 - protein, 249 aa, BradyrhizobiumColbertium
MTAAIELNAVEKRFGNVGIIRDLNLSVAQGERHAIIGPNGAGKSTTFNLISGHIRPSSGEVRLNGDVISGLRPFEINRRGLSRSFQVTNVFSRMSVWENVRCAVLWATGHRYAFWKNVDSLPEVRERTSQILDDIHLTHRRDVPAGLLTYAEQRELEIGITIAGGANVVLLDEPTAGMSHAETDRAVALIRRLTEGKTLVIVEHDMSVVFGLADRISVLVYGHIIASGTPEEIRRDPKVKEAYLGEEAH

SEQ ID NO: 9847 - protein, 231 aa, BradyrhizobiumColbertium
MLEVRDLHAYYGKSHILQGVDLDVASGEVVSLLGRNGVGRSTTVKAIMGEVAPQGTIRFKGKDIAGLPSYRIARLGLGYVPEHRDIFPGLTVRQNLLLGIKDTRRPGKWQLQDMLDMFPNLAARADTPAGVLSGGEKQMLTTCRTLMGDPDLIMIDEPTEGLAPLIVQQVGDLIARIAHAGVAILLVEQKLSIAMKISNRVYVMGHGRVVFEGTPEQLKSNGDVRAQWLEV

SEQ ID NO: 9848 - protein, 68 aa, BradyrhizobiumColbertium
MSVETKSPFDKEPAEGSRDIIDRELRRADDAEKNKVDHLPGVKVSGQPQGGAVDRAREEREQENTKEK

SEQ ID NO: 9849 - protein, 287 aa, BradyrhizobiumColbertium
MDQPGDGASFSPASKLDGVSRRQTKQVESQSRPSAALIHETIRAEGEQELERRWWAIVLSGLAAGLSMALSLIVQGAFHGLISDDATRRLVAPLGYTVGFLVVVLGRQQLFTENTLTPILPLLHNRDLRTLASVLKLWFLVLASNVAGTWAIGSVLAHTSIFEPRIVDAFVDISRHTVEGTFSTTFVRAIFAGWLIALMAWLLPAAKESRAHIIVIMTYVVALGGFSHIVAGSVECAFLVQSGRASLAQYASDFFMPTLLGNILGGTTLVALLNYGQVAAEIDDHRE

SEQ ID NO: 9850 - protein, 186 aa, BradyrhizobiumColbertium
MLVPIPIACFIGALPTDIAYVASAEIMWADFSAWLLVVGVIFGVLAAIAGLTDFIGNRLVRARTSRRRRHRQDRCAAGCRRQRQHVVAGERCASAADATLSPVPRWEFGTVKAQARRRTMGLAQYAIVPVQDEWGVLHDGDVRSRYATKEAAFESAVAAASLALREGHEVHVSVPGREAGDNALGV

SEQ ID NO: 9851 - protein, 56 aa, BradyrhizobiumColbertium
MTKPREPNGIEPSRSEDDMQRDQLGPRGVPGAPDPAKMTPQRDKKTPKHVDPGHTA

SEQ ID NO: 9852 - protein, 409 aa, BradyrhizobiumColbertium
MSALPLSGIKILDLTRVLAGPLSAQMLGDLGAEVIKIERPGTGDDARAFGPPYLNDPDGKANNNNSFYLCANRNKKSVTVNIAKPEGQAIVRALAKDADVFMENYKVGDLKRYGLDYETIKAINPGIIYCSVTGFGQTGPYAPRAGYDAILQAMGGLMSVTGHIDGEPGEGPMKVGPSIVDYMTGMNASIGILSALYHRDAKGGQGQHIDVCLFDTVIASLSHWLQIYLVNGKTPPRRGTWGNGGMPAGVFRCADGELMLVVGNDGQFQRTCAVLGEPELANDPRFVKNNDRVVHGKEIMAIFAGLFLKKPVAYWLEKLEEAGVPSGPINNFEQVFSDPHVQSRGMRVKVKHPFEPDLSLVRNALTLSETPIKEYRAPPLLGEHTQEVLGGKLGFDAEKIAALKQLGII

SEQ ID NO: 9853 - protein, 71 aa, BradyrhizobiumColbertium
MSYTIGFQAKDQKSILATEAATANQAVAIIAALRQSADEIKFIRSPQEGEMGIEMLLLLAKEEAEEMPQRV

SEQ ID NO: 9854 - protein, 223 aa, BradyrhizobiumColbertium
MASDHTRSAILAAAERLYADRGFGDVTLRDIVAAANVNLAAVNYHFGSKDELIAELFVTRSIATNRERLRELKAAEEQGGGRAPIEAILRALVGPTLRGCLGPETQRSTAARFMIRASIESVPPIRRIKNREIDHLRKFAGAMRRSLPDRSEVDIYWGLNFALAMAHHTIRESERLTKLSEGKCDLDDVEDVVARVVSVATMALTAGKVEAKAPARALARDAR

SEQ ID NO: 9855 - protein, 411 aa, BradyrhizobiumColbertium
MDFDMSPKQKEWLDRVRSFMAKHVRPAVPIYDQQDKSGDRWKVIPILEDLKKKAKAEGLWNMFMPPSEHEDDEFRGAGLTNLEYALLSEEMGRITWASEVFNCSAPDTGNMEVFIRYGSKEQKRKWLRPLMDGEIRSAFLMTEPAVASSDATNIETRIERDGDHYVINGRKWWSSGVGDPRCKIAILMGKTDFKAAKHQQQSQILVPLDTPGIKVEKMLPVFGFDDAPHGHAQVLLENVRVPKENILLGEGRGFEIAQGRLGPGRIHHCMRTIGKAEEALEKMVKRLTSRTAFGKKIVEHSVWEQRIGEARTKIEMTRLLCLKAADMMDKVGNKTAQAEIAMIKVAAPNMALKIIDEAIQAFGGAGVSDEAGLAKDYAHIRTLRLADGPDEVHNRAIARLEVRKYANSPGH

SEQ ID NO: 9856 - protein, 352 aa, BradyrhizobiumColbertium
MADGVRKDEEFSGTKPVEERHRFDELRLEAWMREHVEGFEGPLVVLQFKGGQSNPTYRLNTPNRSYVMRRKPFGKLLPSAHAVDREYRVIAALGKQGFPVARAYALCQDDSVIGAAFYIMSMEEGRVFWDPTLPSQAPDDRRKIFTSKIETLAKLHMFDPDAIGLGDFGKPGNYFARQIDRWTKQYRASETQHIPEFEKVAEWLPKTVPEQARVSIVHGDYRLDNMIFHATEPRVQAVLDWELSTLGDPMADFTYLLMQWIMPGLEGADLKALNIPSLEEAAQIYCNVTKMTVPDLNWYFAYNLFRLAGITQGIAGRVRDGTAANAKALESAKRTVPLSKASWEYAQKAGAV

SEQ ID NO: 9857 - protein, 390 aa, BradyrhizobiumColbertium
MPSSRPDRIRKLLADLVGFDTISDRTNLPLIAHIERYLAGFGIKGERIVDETGQKAALWVTIGPEDRPGFVLSGHTDVVPVVGQDWSHDPFKLAERDGKLYGRGTTDMKGFVAVCLAMVPEMVDARLKTPIHLAISYDEEIGCVGVRPMLREVARKKVRPLGCFVGEPTQMQVIIGHKGKHGVRATFRGLARHSSIAPEGVNAIEYAAELIVEIRRRAMALAAAHATDSLYDVPHSTLLTSIVHGGAALNIVPDTCTVEFECRGIGITESREVTDAIVAWAKAELEPAMKARNAECGIAFEEILDYPALDTEADAPIVTLAKSLAGRNDHAKVAFGTEASLFADIADIPSVVIGPGSIAQAHTPDEFVEMAELEKCGAFVERLIAHCVKS

SEQ ID NO: 9858 - protein, 261 aa, BradyrhizobiumColbertium
MGRLQGKSVIITGAGSGIGRAAALLFTKEGAKLIAVDRSEAVKETVDEVKKAGGTAEAMIADAGSETDVIAVIDKAVKTHGRLDVIWANAGISGGLVPLAEQTVEHWQEILRVNLIGPFLAVKYAMPHMVKQQSGAIVLTASVAGLKAGASGHPYAASKAGVISLVQTTAYSLTGTGVRINAVCPGLIETGMTKPIFDRAKERGTQDKIGQLNPLKRPGQPHELAAMGLFLASDEASYVNGQAFPVDGGLTASMPYTGKPV

SEQ ID NO: 9859 - protein, 232 aa, BradyrhizobiumColbertium
MAGADKPNVVVTRWWWVRHAPVRNDGGNIYGQSDIACDTSDTYVFNAVAKVLPRTAIWYSSNLMRTHQTAEAIWAAGFPRPASMKWEADLAEQNLGRWQGMNRAQFIASRPVGSSWFADINEPAPGGESFMDLYNRTRRTIERINNEAAGQDIIAVAHGGTIKAALGLALDGQPERGLSFDIDNCSVTRLDYFASPERTVWRLPMVNQQPWIADVAHAAMHQPAGPEVKKLA

SEQ ID NO: 9860 - protein, 255 aa, BradyrhizobiumColbertium
MTLFDMKGKVAVITGSTRGIGLAIAERMAEHGAKVVISSRKGDVCDQVAKGINDKYGKGTAVAIAANISSKENLQNLVDESNRAFGKIDVLVCNAASNPYYGPLAGISDDQFRKILDNNIVANNWLISMVVPQMIERKDGSIIIVSSIGGLKGSTILGAYAISKAADMQLARNLACEYGPHNIRVNCIAPGLIKTDFAKALWDNPENLKASTSRSPLLRIGIPDEIAGAAVLLGSKAGDFMTGQTMVIDGGATIS

SEQ ID NO: 9861 - protein, 372 aa, BradyrhizobiumColbertium
MSDAFKREIEKGTIPGATVLVARRGQIGWFEALGKQSPSGAAPMARDSIFRIFSMTKPIVSVGIMALVEDGHLLLSDAVAKFIPEFADQKVGVVSGGKLELVPATRPMTVQDLLRHTSGLTYEHQGDGPVHKLYQESRVRSRKITNAEHAALVASFPLVCQPGAEFNYSRSTDILGRIIEVVSGKSLGAFLTERVLAPLQMAETGFSTSEANAGRLAEPFASDPWTGDKVALFNMLEQPVMESGGGGLVSTTMDYARFCLMLRNGGTLDGNRVIGRKTLELMASDHLGPGVAINGTLLSPGHGFGLGFAVRKEAGIAPFPGSIGQYFWSGIAGTFFWIDPKEDLFAVFMSQGPGQRDYTRTLVRDLVYAAVE

SEQ ID NO: 9862 - protein, 333 aa, BradyrhizobiumColbertium
MVGQMCHLANFAANPAGRVIAIADLRPELAAAAAQKFGVSRIYGTHRELLADSEVSAVVVVTKRRATGPIVLDVLNSGRHVLSEKPMAYTTAQAETLVEAARRQDLIYSIGYMEASRCRRGTRVAELARIRADRSLGRIVAAHGWCFGGDTGRAQDNFVMTAEARPDGLELWEDGPDWMPRAMRQGYDHFLNVSSHIINVVRYLLGPSPTLLDSSIEDSGAGRITLDFDGLACTLDLTSGSAGPWREGLTVEFERGAMTLELPPPFAEQEALVVVDHDGQRMQTAGAPSWAFRRQADAFVSDVARRRTPLASGADSVTEIALAEAVWKRRVSG

SEQ ID NO: 9863 - protein, 38 aa, BradyrhizobiumColbertium
MAHLTDHTRSDDANAWCHWLDPSAFADDEEMRRLPPGR

SEQ ID NO: 9864 - protein, 221 aa, BradyrhizobiumColbertium
MLEFGPDSGENALVFAGWGGNMTLAEPNQHAHPKIQAFFARFGLTKRLRELVLADVEGFRSDRRFDIIDAEGFIYTVQPTENRLGIFRGLLNPDGYAVVSYYERYGGFSELALKAIHAAGKALTGRPALETARTLFEPKWNSIPHTRSFESWLMDVLENPFVRHRYFLDAAALCTAAHEQGFDIHSAWPAYRDSLDIYWHKKVLSGPTSCTASHAISIAAA

SEQ ID NO: 9865 - protein, 208 aa, BradyrhizobiumColbertium
MAEAQHGHSGQLSTVVGQAHRRPAAPGNDDIELACDPQARQRSIGDERQAFASEVVDHSQNPEPSGAGETFGQRAREYSARLRPILAKARASGAEIAIYGAGCRACTFTNAHELTDLVDLSVDDQKERQGLSLPGTGIPIRSPDVLAGKTGPLVCLLAVNQENEAKVNSRLRENVRRPLHVVSIFAPSDIWSELDRLEAAAGSPHGLC

SEQ ID NO: 9866 - protein, 122 aa, BradyrhizobiumColbertium
MAMLRFSQERQIEWHYIAPGKQTQNAFIESFNTRLRDELLNETLFTSLAQARAVLAAWKDDYNNARPHSALGNLTPTEYAKRNALGPQRDGTLRYAEGSAPRPVASPSPLGSYSTGTLSIAG

SEQ ID NO: 9867 - protein, 38 aa, BradyrhizobiumColbertium
MTDQCRLCHSINLRPVIDLGLMPIAHRLRHGQDEQQEQ

SEQ ID NO: 9868 - protein, 63 aa, BradyrhizobiumColbertium
MAVSPFKFLQEVRSETAKVTWPTRRETTITTIMVFVMVAVASIFFFAADQIIRYLITFLLGIH

SEQ ID NO: 9869 - protein, 184 aa, BradyrhizobiumColbertium
MATATAQVSDKRWYIVHAYSNFEKKVAESIREQAKQRGLEDLFELVLVPTEKVTEVRRGRKIDAERKFFPGYVLVKMKLTDEAFHLIKNTPKVTGFLGAENKPMPISEAEAMRILHQVQEGVERPKASVSFEIGENVRVADGPFASFSGVVEEIDEARSRVKVAVSIFGRATPVELEFGQVEKV

SEQ ID NO: 9870 - protein, 142 aa, BradyrhizobiumColbertium
MAKKVTGYLKLQVPAGAANPSPPIGPALGQRGLNIMEFCKAFNAQTQKEEKNTPIPVIITIYADRSFTFEMKTPPMSYFLKQAAKIQSGSKAPGRDKAGKVTKAQVREIAEKKMKDLNCDTIESAMKMVEGSARSMGLEVAG

SEQ ID NO: 9871 - protein, 230 aa, BradyrhizobiumColbertium
MAIGKRLNKAREGIDREKLYPLADAIKMVKERAKAKFDETIEVAINLGVDPRHADQMVRGVVTLPNGTGRTLRVGVFARGAKADEAKAAGADVVGAEDLVEKVQNGNIDFDRCIATPDMMPLVGRLGKVLGPRGLMPNPKIGTVTMDVTGAVKGAKGGSVEFRVEKAGILQAGVGKASFSEEKLVENIKALADAVSKAKPAGSKGTYIQRVAVSSTMGPGVKVEPGTILG

SEQ ID NO: 9872 - protein, 317 aa, BradyrhizobiumColbertium
MTDKVLIYSRFPKSMMVRFAERFELLDTGGKPAHEVFSADELSGIRAMLTAGGTPLGPEAMDESPKLGAIVCYGTGYDGVDLKAAASRNIAVGHSPGANAASVADIAMTLMLATTRRILVADQYVRSGDWAESKQSPMMRPQVGMPGRRIGVYGMGEIGRKIAARCAAFESEVGYFSRTRYDLPYRYFPSLEALVDWCSVLMIAVRAGGETQHVVNGDILRRLGADGYVVNISRGSVIDEKALVAALSDKTIAGAGLDVYEKEPHAPDALTALPNVVFAPHIGGHTVESHVAMQNCVLANLTAFFEGKPLPYAVKSA

SEQ ID NO: 9873 - protein, 172 aa, BradyrhizobiumColbertium
MERAAKKEAVEQLHEVFKTTGVAIVAQYSGLTVAQMQTLRKQMRQAGASVKVSKNRLAKIALEGTDVVAIGPMLKGPTVIATSSDPVAAPKVAIDFAKANEKFVIVGGSMGKTVLNVDGVKALASLPSLDELRGKIVGLIVAPATKLAQLANAPAGKLARVIQAHASKGEAA

SEQ ID NO: 9874 - protein, 125 aa, BradyrhizobiumColbertium
MADLQKIVDDLSSLTVLEAAELAKLLEEKWGVSAAAAVAVAGPAAGGAAAAPAEEKTEFTVVLASAGDKKIEVIKEVRAITGLGLKEAKDLVEGAPKPLKEGVNKEEADKIKAQLEKAGAKVELK

SEQ ID NO: 9875 - protein, 1374 aa, BradyrhizobiumColbertium
MAQQTFTGRKRVRKFFGHIKEVAEMPNLIEVQKASYDQFLMVDEPPGGRLDEGLQAVFRSVFPISDFSGTSMLEFVRYEFEQPKYDVDECRQRGMTFAAPLKVTLRLIVFDIDEETGAKSVKDIKEQDVYMGDIPLMTMNGTFIVNGTERVIVSQMHRSPGVFFDHDKGKTHSSGKLLFAARVIPYRGSWLDIEFDAKDIVYARIDRRRKIPVTSLMFALGLDGEAILSTFYKKILYKRTKEGWRVPFDANRFRGYSTVNDLIDADTGKVVLEAGKKLTVRAARQLQEKGLKALRMADEELVGNYVAEDLVNPKTGEIHAEAGEEITDKLMKALNEQGYKELPLLDIDHVNVGPYIRNTLSADKNMTREDALFDIYRVMRPGEPPTLESAQAMFQSLFFDAERYDLSAVGRVKMNMRLDLDAPDTQRTLRKEDILSVIKTLVDLRDGKGEIDDIDHLGNRRVRSVGELMENQYRIGLLRMERAIKERMSSVDIDTVMPQDLINAKPAAAAVREFFGSSQLSQFMDQTNPLSEITHKRRLSALGPGGLTRERAGFEVRDVHPTHYGRICPIETPEGPNIGLINSLATFARVNKYGFVETPYRKVKDGRVTDEVVYLSAMEEGRYSVAQANVPVDAKGRFTEDLVVCRSSGTRDVVPMTPDKVDYMDVSPKQLVSVAAALIPFLENDDANRALMGSNMQRQAVPLVRAEAPFVGTGMEGVVARDSGAAIAARRSGVIDQIDATRVVIRATEDLDPTKSGVDIYRLMKYQRSNQSTCINQRPLVKVGDVVKKGDIIADGPSTDLGELALGRNVLVAFMPWNGYNFEDSILLSERIVKEDVFTSIHIEEFEVMARDTKLGPEEITRDIPNVSEEALKNLDEAGIVYIGAEVRAGDILVGKITPKGESPMTPEEKLLRAIFGEKASDVRDTSLRVPPGVQGTIVEVRVFNRHGVDKDERALAIEREEIERLAKDRDDEQAILDRNVYNRLAELLEGRQGIAGPKGFKKDTKITRAVLEEYPKSQWWLFASPNDKLMAEIEAMRKQYDESKKGLEQRFLDKVEKLQRGDELPPGVMKMVKVFVAVKRKIQPGDKMAGRHGNKGVVSKIVPIEDMPFLEDGTHADIVLNPLGVPSRMNVGQILETHLGWACAGLGKRIGQTVDAYLSKQDIKPLKETLKKVYGEDETIKSLNDNELLELGHNLSRGVPIATPVFDGAKEADIEEMLKLAGLDASGQSTVYDGRTGDPFDRKVTVGYIYMLKLHHLVDDKIHARSIGPYSLVTQQPLGGKAQFGGQRFGEMEVWALEAYGAAYTLQEMLTVKSDDVAGRTKVYEAIVRGDDTFEAGIPESFNVLVKEMRSLGLNVDLHNSKMGPAPTSEAAE

SEQ ID NO: 9876 - protein, 1398 aa, BradyrhizobiumColbertium
MNQEIMNLFNPTTPAQVFDQIRISIASPEKILSWSYGEIKKPETINYRTFKPERDGLFCARIFGPIKDYECLCGKYKRMKYKGIICEKCSVEVTLSRVRRERMGHIELAAPVAHIWFLKSLPSRIGLLLDMTLKDLERILYFEYYVVLEPGLTALKDRQLLSEDEYLKAQDEYGQDSFTAMIGAEAIRELLKGMDLEKLEASLRVEMQETDSDIKHKKLAKRLKIVEAFRHSGNKPEWMIMTVVPVIPPDLRPLVPLDGGLFATSDLNDLYRRVINRNNRLKRLMELRAPDIIIRNEKRMLQEAVDALFDNGRRGRVITGANKRPLKSLADMLKGKQGRFRQNLLGKRVDYSGRSVIVVGPELRLHQCGLPKKMALELFKPFIYSRLDAKGLSTTVKQAKKLVEKERPEVWDILDEVIREHPVLLNRAPTLHRLGIQAFEPVLIEGKAIQLHPLVCSAFNADFDGDQMAVHVPLSLEAQLEARVLMMSTNNILHPANGQPIIVPSQDIVLGLYYVSIMREGLPGEGKVFGDMAELEHALHAKVIHLHTKIKYRWEGMDETGKVSKRWIETTAGRVMLGNLLPKNPRISYEIINKLMTKREISGVIDQVYRHCGQKETVIFCDRIMALGFYNAFKAGISFGKDDMVVPHGKWKIVDTTRTLAKDFEQQYNDGLITHGEKYNKVVDAWSKATEEIAKAMMKEISATKKTASGADADINSIYMMAHSGARGSPAQMRQLAGMRGLMAKPSGEIIETPIISNFKEGLSVLEYFNSTHGARKGLADTALKTANSGYLTRRLVDVAQDCIITQSDCGTKLGIKMRAIVDAGTVVASLGSRILGRTACEDVRDSSGKVIVKRDTLMEESHVDAIHQAGIQEVKIRSALTCELVNGICGKCYGRDLARGTPVNHGEAVGVIAAQSIGEPGTQLTMRTFHIGGAAQLNEQSFVEANFDGKIVIRNKAIARNSEGHLIAMVRNMVVAIVDADGTERATHRIQYGSRLHVDEGDMVKRGQRIVEWDPYTRPLLTEVEGTIGFEDLVEGQSISETLDEATGIAKRVVIDWRSTRGGSDLRPAIVVKGKDGKVLKLARGGDARYMLSVDAILSVDIGAKVAPGDILARVSTESAKTRDITGGLPRVAELFEARRPKDAAIIAEIAGTIRFGRDYKNKRRISIEPMDKTDEPREYLIPKGKHIHLQDGDVVEKGDFIVEGNPAPHDILAVKGIEELAAYLVNEIQEVYRLQGVLINDKHIEVIVRQMLQKVEVTDQGDTDMISGEQVDKIEFDALNAKAKEEGKKPATGTPVLLGITKASLQTRSFFSAASFQETTRVLTEAAVNGKIDPLEGLKENVIVGRLIPAGTGASMAKIREVAMKRDKLILDEREKQAAVVSPAPEAELPALPPAE

SEQ ID NO: 9877 - protein, 684 aa, BradyrhizobiumColbertium
MLDLAIVGGGPGGLMSAWYLKRKLGDLCRVTIYEASDRLGGKIVTRKFDSAPAMYEAGVAEIYDYSMTGPDPLRELIQHFGLQTIPMDAEQVHFGGELINDVPGMRRRYGAKTADAIEAFRKRCTEAMSPVEYYEGVGAHDNENPWAYKTAEQVLDEEVEDETAKRFFKVMARSDIATESHNTNGLNALKNYLMDVDGYIGLYSIQNGNEQLIECLQSEVNADIQLNHRVLTVGKAPTGRYQLKMMNGKGPEIRDFDLVLVCLPHSWLATLGWEGEQLRRSMVKHVAYFDRPAHYLRVSILFDEPFWGEKIPGAWFMSEAFGGCCVYNEGARHDVGKHGVLNWLIPGSDALAFANLSDGELIDAALKSLPASLGDARLHFMEGKIHRWLSSVNAIPGGLPVRDVMTNHRPEPKDHPGIVVVGDYLFDSTLNGLLDSSDAATDIILTEMMRLRRERTQEDKPLSNKIDRDYFENYRGLGPYHQAWRHFTDPDYLTRLISIVWGKATGAKMLVAGSASGELVGALRDRGIDAWGIENNRGIHAKTPKALKKYNKLGSITDMPFKDRAFDFVFETSLCHVAPRQVGRAIRELNRVVKTGLVFGSITSDMAPALIDRYDLLRGVKKLVTWWEWSELFFGNGFDLSMHRKDCTDALWEATLAANKGPGQWYADADSLRYSFFDKVEDED

SEQ ID NO: 9878 - protein, 41 aa, BradyrhizobiumColbertium
MLTAGMTAENAGIAATAIAPILCDQDEFGKTIGEFAPHPAG

SEQ ID NO: 9879 - protein, 666 aa, BradyrhizobiumColbertium
MASKPLPPDKQKLAAKEAVELDDKLASAAKVDLDDEDEEDGEDELELDDDEDEDLVVFTAREAAGALATIVGFVRPYLTNYKRMLSYVAFGVLVETLFNVIMPLSLKYLIDDALGEEDFRALYKILGVLAIAGIFTSIVAVWYERWDARLAACIISDVRKRLFEHVQDLPAAYFGRTKRGEILSRFSVDLSAFEGSVKTFANSAALPFLELIAGIILMLFLNWQLAVVALLVFPITLIGPRILTPKAVQANYEQKLNESALLGMVQENVAAQAVIKAFSLQRKMFGFFTLRNDETRNRIAAATFLSTMVERTVTISVLLLHLVVLAIGAYLATTGQITIGTFVTFESAFWEVSYNIAHVMHFVPVSISSAAAIRHIQELLDEPTRAADRPGAPDLPRITNDITFDHVTFRYEGSQTPVLDNLSLKLNAGKRIAIVGPSGSGKSTLLNLILRLYVPDEGRVTIDGVDVRRVTLDSLRRSMAVVFQENMLFNMSIRENIRLGKEGATDEEVEEAAKKAEIHRYIMSLPQRYDTPVGERGDTLSGGQRQRIAIARAIIRNPSVLLLDEATSALDQTTEAAINRTLLKVAKGRTMIWSTHRLTSVVEMDEIIVISGGRAIERGSHAELLARNGIYRKLWNDQIHQPHGASAHAEDSGDDDDDDLDDEDEE

SEQ ID NO: 9880 - protein, 103 aa, BradyrhizobiumColbertium
MPRPVAGTANCFRATRPTRSPQAEQSAQSEIAPTAPSPSGKRFDATEDRSLEAVQRNAAARILRSCIRIRSQESVLKRTKIALALPSYDRQRLSGIRRGWCPP

SEQ ID NO: 9881 - protein, 123 aa, BradyrhizobiumColbertium
MPTINQLIAQPREVQKSRKKVPALQQSPQKRGVCTRVYTTTPKKPNSALRKVAKVRLTNGFEVIGYIPGEGHNLQEHSVVMIRGGRVKDLPGVRYHILRGVLDTQGVKNRKQRRSKYGAKRPK

SEQ ID NO: 9882 - protein, 156 aa, BradyrhizobiumColbertium
MSRRHSAEKREVLPDPKFGNIIVTKFMNSVMYAGKKSVAEGIVYGAFGIIEAKTKQNPLGVFEQALENVMPTIEVRSRRVGGATYQVPVEVRSTRRQALGIRWLISAARERNEKTMTERLSAELLDASNNRGNAVKKREDVHRMAEANRAFSHYRW

SEQ ID NO: 9883 - protein, 690 aa, BradyrhizobiumColbertium
MPRQHAIEDYRNFGIMAHIDAGKTTTTERILYYTGKSHKIGEVHEGAATMDWMEQEQERGITITSAATTAFWNGKRLNIIDTPGHVDFTIEVERSLRVLDGAVCVLDSNQGVEPQTETVWRQGDKYKVPRIVFANKMDKIGADFFKCLSDIVDRLGAKPVAIQLPIGAENNFKGLVDLVKMKGVVWNDEALGAKFDYVDIPEDLVDQAKEYREKMVEAAVELDDDAMAAYLDGKEPDEATLKRLIRKAVLTGAFYPVLCGSAFKNKGVQPLLDAVVDYLPSPLDVPAIKGTDDKGNEVVRKADDKEPLALLAFKIMDDPFVGTITFCRIYSGILQSGTGVVNSTREKKERIGRMLLMHANNREDIKEAYAGDIVALAGLKEARTGDTLCDPDKPVILEKMEFPEPVIEIAIEPKSKADQEKLGVALAKLAAEDPSFRVSTDHESGQTILKGMGELHLDIKVDILKRTYKVDANIGAPQVAFRERVTKRVEHSYTHKKQTGGTGQFAAVSFIVEPNEPGKGYEFESKIVGGAVPKEYIPGVEKGLESVLSSGVVAGFPVVDVKVTLVDGKYHDVDSSALAFEIASRACFREALQMGKSVLLEPIMKVEVVTPEDYTGSVIGDLNSRRGQIQGQDMRGNANVINAMVPLMNMFGYVNNLRSMSQGRATFTMQFDHYAEAPANVSAEVQKKFA

SEQ ID NO: 9884 - protein, 396 aa, BradyrhizobiumColbertium
MAKAKFERTKPHCNIGTIGHVDHGKTSLTAAITKILAETGGATFTAYDQIDKAPEEKARGITISTAHVEYETQNRHYAHVDCPGHADYVKNMITGAAQMDGAILVVSAADGPMPQTREHILLARQVGVPALVVFLNKCDMVDDPELLELVELEVRELLSKYEFPGDKIPIIKGSALAALEDSDKKLGHDAILELMRNVDEYIPQPERPIDQPFLMPVEDVFSISGRGTVVTGRVERGVVKVGEEIEIVGLRATQKTTVTGVEMFRKLLDQGQAGDNIGALLRGTKREDVERGQVLAKPGSVKPHTKFKAEAYILTKEEGGRHTPFFTNYRPQFYFRTTDVTGVVHLPEGTEMVMPGDNIAMEVHLIVPIAMEEKLRFAIREGGRTVGAGVVASIIE

SEQ ID NO: 9885 - protein, 102 aa, BradyrhizobiumColbertium
MNGQNIRIRLKAFDHRILDTSTREIVNTAKRTGAQVRGPIPLPTRIEKFTVNRSPHVDKKSREQFEMRTHKRLLDIVDPTPQTVDALMKLDLAAGVDVEIKL

SEQ ID NO: 9886 - protein, 237 aa, BradyrhizobiumColbertium
MRSGVIAQKVGMTRVFTEAGEHIPVTVLKLGNCQVVGHRTEEKNGYVALQLGSGSRKTVYMPKAERGQFAVAKVEPKRRVEEFRVSADAMIPVGAEIQADHFVVGQFVDVTGTSVGKGFAGGMKRWNFGGLRATHGVSISHRSIGSTGGRQDPGKTWKNKKMPGHMGVDRITTLNLRVVQTDVERGLILVEGAVPGSKGGWIRVRDAVKKPLPKEAPKPGKFKVAGDAEAAPAAQEA

SEQ ID NO: 9887 - protein, 206 aa, BradyrhizobiumColbertium
MELKVTTLEGKEAGSVQLSDAIFGLEPREDIIARCVQWQLNKRQAGTHKAKGRAEIWRTGKKMYKQKGTGGARHGSARVPQFRGGGRAFGPVVRSHATDLPKKVRALALKHALSAKAKDGDLVVIEKAALDTAKTKALLGHFSGLGLTNALIIDGAELNNGFAAAARNIPNMDVLPIQGINVYDILRRQKLVLTKAAIDALEARFK

SEQ ID NO: 9888 - protein, 100 aa, BradyrhizobiumColbertium
MTKNIEPRHYDVILSPVVTEKATIASEHNKVLFKVAAKATKPQIKEAIEKLFDVKVKSVNTLVRKGKTKVFRGNLGSQSNSKRAIVTLEEGHRIDVTTGL

SEQ ID NO: 9889 - protein, 277 aa, BradyrhizobiumColbertium
MALKTFNPTTPGQRQLVMVDRSALYKGKPVKALTEGKKSSGGRNNTGRITVRFRGGGHKQTLRTVDFKREKIDVPATVERLEYDPNRTGFIALIKYQDGEQAYILAPQRLAVGDTIIAGNYVDVKPGNVMPLGNMPVGTIIHNIEVKIGKGGQLARSAGTYAQLVGRDQDYVIIRLNSGEQRLVHGRCRGTIGAVSNPDHMNTSIGKAGRKRWMGRRPHNRGVAMNPIDHPHGGGEGRTSGGRHPVTPWGKPTKGKKTRTNKSTNKFILLSRHKRKK

SEQ ID NO: 9890 - protein, 92 aa, BradyrhizobiumColbertium
MVRSVWKGPFVEGSLLKKADAARASGRHDVIKIWSRRSTILPQFVGLTFGVYNGQKHVPVAVNEEMVGHKFGEFSPTRTFHGHSGDKKAKKA

SEQ ID NO: 9891 - protein, 128 aa, BradyrhizobiumColbertium
MSKPKRERSLAENEAKAVARMLRVSPQKLNLVAQLIRGRKASAALADLQFSRKRIAVDVKKCLESAIANAENNHDLDVDDLVVAQAFVGNGLVMKRFAARGRGRSGRVYKPFSQLTIIVRQVEAEAAA

SEQ ID NO: 9892 - protein, 241 aa, BradyrhizobiumColbertium
MGQKINPIGLRLGINRTWDSRWFAGKQEYGKLLHEDVKIREILHKELKQAAVARIVIERPHKKCRVTIHSARPGVVIGKKGADIDKLRKKVADITSSDVVINIVEIRKPELDATLVAESIAQQLERRVAFRRAMKRAVQSAMRLGAEGIRINCSGRLGGAEIARMEWYREGRVPLHTLRADIDYGVATAFTTFGTCGVKVWIFKGEILEHDPMAQDKRMAEGETGGSGDRGGRQRRDTAAA

SEQ ID NO: 9893 - protein, 137 aa, BradyrhizobiumColbertium
MMQPKKTKFRKAHKGRIHGVASSGATLAFGQFGLKATEPERVTARQIEAARRALTRHMKRAGRVWIRVFPDVPVSKKPAEVRMGSGKGSPELWVARVKPGRVLFEIDGVNTQTAREALTLAAAKLPIKTRFVERIAE

SEQ ID NO: 9894 - protein, 68 aa, BradyrhizobiumColbertium
MAQMKIEDIRAMSPDQQDDAILNLKKERFNLRFQRATGQLENTSRLREARRDIARIKTVAAQTRAKKK

SEQ ID NO: 9895 - protein, 82 aa, BradyrhizobiumColbertium
MPKRTLQGVVVSDKQAKTIVVRVDRRFTHPIYKKTIRRSKNYHAHDESNQFKPGDMVWIEETKPISKLKRWVVIRGEHKKSA

SEQ ID NO: 9896 - protein, 122 aa, BradyrhizobiumColbertium
MIQMQTNLDVADNSGARRVMCIKVLGGSKRRYATIGDIIVVSIKEAIPRGKVKKGDVMKAVVVRVRKDIRRADGSVIRFDRNAAVLINNQSEPVGTRIFGPVPRELRAKNHMKIISLAPEVL

SEQ ID NO: 9897 - protein, 104 aa, BradyrhizobiumColbertium
MAAKIRKGDKVVVLTGRDKGRTGEVFEVRPDAGTALVRGINMVKRHQKQTQAQEGGIISKEAPIQLSNIAYVGKDGKPTRIGFKILADGKKVRIAKSSGAEIDG

SEQ ID NO: 9898 - protein, 185 aa, BradyrhizobiumColbertium
MAEAAYTPRLRAEYDANIRTALTEKFGYENVMQVPRLDKVVLNMGVGDSVNDRKKAETAAAELTQIAGQKAIVTYSRIAIATFKLRENQPIGCKVTLRKARMYEFIDRLVNVALPRVRDFRGLNPKSFDGRGNYSLGIKEHIIFPEIDFDKVTEARGMDITVCTTAKTDEEARALLTAFNFPFRQ

SEQ ID NO: 9899 - protein, 101 aa, BradyrhizobiumColbertium
MAKKSSVEKNNRRKRMVKNAAAKRERLKAIIADKTLPMEERFAATLKLAEMPRNSSATRIRLRCELSGRPRSNYRKNKLSRIALRDLGSKGMVPGLVKSSW

SEQ ID NO: 9900 - protein, 132 aa, BradyrhizobiumColbertium
MSTHDPISDLITRIRNAQMRSKTKVSTPGSKMRENVLEVLKAEGYIRGYATLEHSSGRSEIEIELKYFDGEPVIREIERVSKPGRRVYASVKNLPRVNNGLGISVLSTPKGIMADHSARDANVGGEVLFTVF

SEQ ID NO: 9901 - protein, 169 aa, BradyrhizobiumColbertium
MAVPSGVTPTVDGQNVKMKGPKGQLQFIVHDDVEVKLENGQVKVKPRTETNRARALYGTARAQVANLVEGVTKGFEKKLEITGVGYRAAMQGKNLQLALGYSHDVIYPIPEGITITVPKPTEITVAGSDVQRVGQVAAEIRAYRPPEPYKGKGVKYVGEFIFRKEGKKK

SEQ ID NO: 9902 - protein, 120 aa, BradyrhizobiumColbertium
MSKAKVTNARRKRSVRLKLRRSAGGRPRLSVFRSSKHIYAQVIDDLKGETLASASSLEKSMRDGGKTGADIDAAKAVGKLLAERAAEKGVKEVVFDRGSYLYHGRVKALADAARESGLSF

SEQ ID NO: 9903 - protein, 198 aa, BradyrhizobiumColbertium
MAAEREQRGGRDQRGGGRERREREERDSEFVDKLVHINRVAKVVKGGKRFGFAALVVIGDQKGRAGFGHGKAREVPEAIRKATESAKRNLTRVSLREGRTLHHDIAGRHGAGRVYLRAAPAGTGIIAGGPMRAVFETLGVQDVVAKSIGSSNPYNMVRATFDALKHQDSPRSVAARRNIKVSTLQSRRIGGDAEAAAD

SEQ ID NO: 9904 - protein, 64 aa, BradyrhizobiumColbertium
MAKAAKTIKLEQTGSAIRRHHSQRSTLIGLKLNKIGRTSELPDTPAVRGMIEKVHHLVRIVDEK

SEQ ID NO: 9905 - protein, 161 aa, BradyrhizobiumColbertium
MKLSDIADNAGSRKKRMRVGRGIGSGKGKQSGRGGKGQTARSGVRIKGFEGGQMPMHRRLPKRGFNNIFRVEFAEINLDRLQEAVDAKKIDAGSVVNVEALVKGGVLRRAKGGLRLLGRGELKSKLNIEVHGATKTAIAAVEKAGGSVKILAPAKEEGEAA

SEQ ID NO: 9906 - protein, 78 aa, BradyrhizobiumColbertium
MFRCRDHLGLSPAACCAVMPAAGLLRRDEIRMPRHRALGCRIKHDLPGKPLHTFPYHALADAGHYLRLAFDKSTFPHA

SEQ ID NO: 9907 - protein, 443 aa, BradyrhizobiumColbertium
MVSAAEQLAANLNFGAFAKADELKKRIWFTLGALLVYRLGTYIPLPGIDPNIWEQVFRSQAGGILGMFNMFAGGGIHRMAIFALNIMPYISASIIIQLLTTVSPQLEALKKEGEAGRKTLNQYTRYLTVILAAFQSYGIAVGLEGAGNVVSEPGLFFRLSTAITLTGGTMFLMWLGEQITSRGIGNGISLIILAGIVAELPAALASMLELGRQGAMSTGLILVVIIMAVVVIAFIVFMERAQRRLLIQYPKRQGGNKMFEGQSSHLPLKLNTSGVIPPIFASSLLLLPTTVANFNAGSGPEWFQWITTQLGHGRPLFLIMYLALIVFFAFFYTAIVFNPTETADNLKKHGGFIPGIRPGERTAEYIDYVLSRITVLGAIYLAIVCLIPEILISYASVPFYFGGTSLLIVVSVTMDTVAQVQGYLLAHQYEGLIRKSKLRGRRR

SEQ ID NO: 9908 - protein, 403 aa, BradyrhizobiumColbertium
MNRELARRIALTIGALLLFRLGTQIPIAGVSTSSLLPTSALIARLSLFALGLVPYLTAAIFVRLLSVVWPGVSSLERSGESGRRKIARATLGLTLVLAAFQAYGIASALTSIPGLVRSPDGWFVAAATASMVGGVFVLVWLSEQITRHGIGNGLALILSAGFLVSIPQDVSGIVGLVQSGAISGYLVLGHAVFWIVTVAVIVLFEEARRNIPVTFGARRVGTRYLPARNAVLPIKLNSAGFLIPVTVAPWIFFLPLTFAGLVLGGDHPAVAAVYGHLQMGQPVHLMLVSIAVFVLAFVYTAYVVDPEYTAKCLAARDGAIPGVARGEATADYLDRVVSLTTVVGAVYLTALQVIPEVFDLYGIGLPYSMVINGGAVLVVVCTALDIKAQVRDVSLTNPGGVRR

SEQ ID NO: 9909 - protein, 288 aa, BradyrhizobiumColbertium
MRIILLGPPGSGKGTQAQLLVQRYGIVQLSTGEMLRAAVAAGTPVGLKAKEIMASGGLVPDDVVVGIISDRIDQPDAKKGFILDGFPRTVPQAEALDELLKRKHLKLDAVIELRVNESALLNRVETRVAQMRERGEEVRVDDTPEVLTKRLASYRSQTEPLIHYYSERRKLSTIDGMMAIDEVTQAIHRQLLALGAVEPKTRARSAAKAAPAKKAKTTKRTAKKPTKTTKKGAKSVKTGKKAAKRVVKGPKTATRKTAKKAVVKTAGKAVKKGARKAAKKVTKKRAKR

SEQ ID NO: 9910 - protein, 122 aa, BradyrhizobiumColbertium
MARIAGVNIPTNKRVLIALQYIHGIGQKIAGEILEKVKIPVDRRVNQLSDAEVLQIREVIDRDYLVEGDLRREVGINIKRLMDLGCYRGLRHRRGLPVRGQRTHTNARTRKGPAKAIAGKKK

SEQ ID NO: 9911 - protein, 129 aa, BradyrhizobiumColbertium
MGKEATRVRRRERKNIASGVAHVNSSFNNTTITITDAQGNTIAWSSAGTMGFKGSRKSTPYAAQVAAEDVSKKAQEHGMRTLEVEVAGPGSGRESALRALQAAGFTVTSIRDVTTIPHNGCRPRKRRRV

SEQ ID NO: 9912 - protein, 343 aa, BradyrhizobiumColbertium
MGETVTIQKNWQELIRPNKLQVTPGSDPSRFATIVAEPLERGFGQTLGNALRRILLSSLQGAAVQSVHIDGVLHEFSSIAGVREDVTDIVLNIKDISIKMQGEGPKRMVVKKQGPGVVTAGDIQTVGDVVVLNPDLQICTLDEGAEIRMEFTVSTGKGYVPAERNRPEDAPIGLIPVDSLYSPVRKVSYKVENTREGQILDYDKLTMTIETNGAITPDDSVAYAARILQDQLNVFVNFEEPRKEVAQEIIPDLAFNPAFLKKVDELELSVRSANCLKNDNIVYIGDLVQKSEAEMLRTPNFGRKSLNEIKEVLAQMGLHLGMEVPGWPPENIDELAKRFEDHY

SEQ ID NO: 9913 - protein, 138 aa, BradyrhizobiumColbertium
MRHGKVHRKLNRTAEHRRAMFANMAAALIKHEQIVTTLPKAKELRPIVEKLVTLGKKGGLSMRRQAISEMRDKDQVKKLFDVLAPRYKDRQGGYTRIIKAGFRYGDNAAMAVIEFVDRDVDAKGQDSGPVQETEAEAA

SEQ ID NO: 9914 - protein, 262 aa, BradyrhizobiumColbertium
MKIDLSGKTALVTGSTAGIGFAIAKGLAGSGASIVINGRGQDKVDAAVRKLEGTGAKARGIAADVSTAAGCKALVRAVPEIDILINNAGIFEPKDFFDIPDEDWTRFFEVNVMSGVRLSRAYMKGMLDRNWGRVVFISSESGLNIPVEMIHYGMTKTAQLSVARGLAQLTRGTGVTVNSVLPGPTMSEGVETFVKDLARQNGQSVDEAAANFVKQHRPSSLLQRFASVEEIANMVVYVASKEASATNGAALRAEGGIVNTIA

SEQ ID NO: 9915 - protein, 70 aa, BradyrhizobiumColbertium
MGEGGPPAKTIIIVEFPSMARAREWYASAEYADALKLRQTALERQLLFVEGVVPAYLICLLGASIWRPAG

SEQ ID NO: 9916 - protein, 437 aa, BradyrhizobiumColbertium
MFWPLSTRHRRLFSLTSARWRRQAIFLLGGIGVGAIAVALAQVADLAQHAFALLLAKSRYAVLAVTPLGFMLSAYLTIRLFPNAQGSGIPQAIAARHLTDQGARESLVSIRVAIGKVILTLFGLLCGGSVGREGPTVQVGASIMFALGRVSPRRQPGLILAGAAAGLAAAFNTPLAGIVFGIEEMSRAFETRTSSLIIAAVIAAGLTSLALAGNYAYFGSSATTLARGADWLAVPLCGVAGGLAGGLFSRIVIAMARGFNNPLGRAIKSHPLWFAFACGLVVAICGLVSGDTIYGTGYEQVKAALEHSSPLPQDFCALKFLATTFAAISGIPGGIFSPSLAVGAGIGSNIASFFHDAPLGAIMLLGMVSYFAGVVQAPITAFVIVTEMTDNHGMVVPLMAAALIAHATSRMICEEGIYHALAKGFIERATRPQEKMQ

SEQ ID NO: 9917 - protein, 337 aa, BradyrhizobiumColbertium
MKAVGYKKSLPIEEAESLIDFETAKPEPKGRDIRVAVKAISANPVDYKVRKRAAPSEGETKILGYDAAGVVDAIGPDVTLFKPGDEVFYAGSILRQGTNAEFHLVDERIVGNKPKSLSFAQAAALPLTSITAWELLFDRLGAVPGKSVDPRTLLITGGAGGVGSILIQLARRLTGLTVLATATRPDSQKWCLDLGAHAVVDHGKPMKEQIEALKLPPVALVASLTFTDQHYKAIAEFMAPQGKFGLIDDPPEFTMSTFKGKAISVHWESMFTRSSFQTPDMIAQHHLLNDVSDLIDKGVLRTTLDQTFGTINAANLKRAHALLESGKSRGKIVLEGW

SEQ ID NO: 9918 - protein, 125 aa, BradyrhizobiumColbertium
MKRRDFARRPGCSVEATLDLIDGKWKGVILYHLQSGTQRFGELRRRMPGITQRMLTKQLRALEEDKLVIRKVYAEVPPRVEYCLSELGESLKPVIDILKAWGESHQERLSCASPPVVVKKPRRAA

SEQ ID NO: 9919 - protein, 537 aa, BradyrhizobiumColbertium
MSRTRIAATAIGLAGALAASQAQAQSASSSEQEIALLKQQLKLLEQKLDRLQSQTAANTAATARAKAEAKAEAKAEARSEAKAAVANANAAIPVKGPAPASGVVVTMPNNRPTICTADGANCVGITSRLHWDVGGYDYRPNTAATVPQKLDSGQNVRRARIGVTGKFFHDWNFALIYDFGGSSDGFGGAAPGSLPGGGLSGVENAYLSYTGLKPFGGKMAIEAGIMDLPYTLDEATSSNDIMFMERASPGVIATNIGAGDFRSAAGARWFNDQLWIGGYVTGPTTGAIHSASSVSPPGTSEQYGAVARVAGNPISAKDYSVHIGANAQWLIQPPRNLIANTQTVTLSDRPELRLDPTPLISTGAIANVSGAQVYSVEAAATYGPFIVQGEYFWYNVDRTANTSVPLAGAPSLKFQGGYAQAGYVLTGEGRTYNAANAAYHGVKPAHPFSLDGGGWGAWEIAGRFSTIDLNDQLATATGVAGGRQTVYTLALNWYVNGNVRFMLDYLHGTVSRQASPVSTADVGSKFDAVAMRTQFAF

SEQ ID NO: 9920 - protein, 84 aa, BradyrhizobiumColbertium
MEKTPEYRRVRPAIEGRRRAIFGPCPLYPACKRSVRFGNLPERSIGMMRVIQHCGVTQDSVAANWHQWEPHNRTQRRGAVIDPT

SEQ ID NO: 9921 - protein, 468 aa, BradyrhizobiumColbertium
MFRSTWSAVVTASCIVFSAHFNPAAAQDRRVPASPVELRLSYAPIVQRVQPAVVNVYAAKVVQNRNPLLDDPIFRRFFGVPGQQPEQMQRSLGSGVIVDASGLVVTNVHVIEGADQVKVSLSDRREFEAEILLKDSRTDLAVLRLKDTKEKFPTLDFTNSDELLVGDVVLAIGNPFGVGQTVTHGIISALARTQVGITDYQFFIQTDAPINPGNSGGALVDMSGRLAGINTAIYSRSGGSQGIGFAIPANMVRVVVASAKSGGKAVKRPWLGAKLQAVTPEIAESLGLRSPTGALVASVVPTGPAARAGLKSSDLIIGIDGQTVDDPNAFDYRFATRPLGGTAQIDVQRGSKPVRLTVALETAPDTGRNELVITARSPFQGAKVSTITPAVADELRLDADTEGVVITDIGGDTAAASVGFQKGDVILAVNNQKISKTADLEKAAGERPRIWRITLVRGGQQINVTLGG

SEQ ID NO: 9922 - protein, 411 aa, BradyrhizobiumColbertium
MLSEVVGQDHILGPDGALTRMLETRSLGSLIFWGPPGTGKTTVARLLADATDLHFEQISAVFSGVADLKKAFDAARARREMGKGTLLFVDEVHRFNRAQQDSFLPVMEDGTVVMVGATTENPSFELNAALLSRARVLVFRSLDAAAIEKLFAHAEAVEGKKLPLDPEARAVLVRMADGDGRASLTLAEEVWRSARAAEIFNAAQLQEILQRRAPIYDKSADGHYNLISALHKSVRGSDPDAALYYLARMLDAGEDPLFLARRVVRMAVEDIGLADPQALVVANAAKDAFDFLGHPEGELAIAQAVVYLATAPKSNAVYTAFGTAMQVAKQAGSLLPPKHILNSPTKLMKSEGYGAAYEYDHDTPDAFSGQDYFPESLGRQTFYDPPERGFEREIRKRLDYWAKLRKERGGK

SEQ ID NO: 9923 - protein, 94 aa, BradyrhizobiumColbertium
MIVSYRDKRTERFAAGQHVKDFSGFAGQAEPRLDRLGAATSLADLAALPGNRLEAFRGDRAGQFSIRINDQWRICFSWPEGSSGPTDVEIVGHQ

SEQ ID NO: 9924 - protein, 105 aa, BradyrhizobiumColbertium
MPRTPIHPGEQLAEELRELGITAAELSRQIDVPVNRITGIINGQRGITADTALRLGHWFGTSPQFWMNLQQQYELRLAEKEVGAQVASLPRRANAQSTRKLGKTA

SEQ ID NO: 9925 - protein, 404 aa, BradyrhizobiumColbertium
MSRRIKRMNPKPRSRDERDNSRPHQAHSAKRAGPRPSGKPGSKPPRFAGERAERRAPKVELERSAPAKPVEALLPTKVQTVTVTSDENNMRVDRFLEARFPGLSFSHIQRVVRKGELRVDGKRVDSKDRLEEGQSVRIPPLKLDAPKGGGELSEAAQKTLKALKEMTIWEDDDVLVLNKPAGLAVQGGSGMTRHIDQMLEVMRDAKGQKPRLVHRIDRETSGCLLIAKTRFAASHLTGAFRSRSARKVYWALVPGLPKPKQGRISTFLAKEEGEDDTIMRIAQHGDEGASHAVTYYAVVETAGNKLTWVSLKPVTGRTHQLRAHMAHIGHPIVGDPKYFNIENWQLPGGLQNRLHLLARRIVIPHPRGGVIDATAPLPPHMQQSWNLLGLDATRFDPIENAPEE

SEQ ID NO: 9926 - protein, 99 aa, BradyrhizobiumColbertium
MTRLSICFVLMAALCTEQAAHAQYVSPGASRLAPLSPQPPPPPKIEAPKVPQFDAPPRYNYQPLPRNSFGDRFTKCLDAAAAAGLGPADRGTYARSCAN

SEQ ID NO: 9927 - protein, 264 aa, BradyrhizobiumColbertium
MRELFEEAAGQPTPDPRASARASARPPQRKRFYKEAGVAEAEGGFAVTLDGKAIRTPSGRQVLIPARTLADAVAAEWAAQGESIDPVSMPLTRIANSVVEGVVDRVELVSDDLAKYFESDLLFYRAGHPERLVAREAAHWDPVLFWAAEALGAHFILSEGVMHVKQPDEALKAARAALPQDAWSVAALHMVTTLTGSALLALALAHDVRDAGQVWDAAHVDEDWNIEQWGVDEEAAARRATRLRDFEAAVTVLAAAKALAAKGP

SEQ ID NO: 9928 - protein, 522 aa, BradyrhizobiumColbertium
MPTPVTSILPVSAASSLADATTPDLVLQAGSVVNARVVGVMADNLVRIAIANLSMDVMSEVPLTPGQNLQLAVSQNNGTIRLAVLGGAGEAAADQITLTPRAASLLESPPLAPSAGASRNTLTPLEHAAVAVASADAATRQGSQATLFANLASVVTGSDLPAGLKQAVLDVLAQQTPLNTGLDGGDIESAFQKSGLFLEASLAAGAPSSGTMPDLKAALLVLRHALATIGTAVPSTQAEATTPAAGGAAQAASPSTETAQQPQVPRGANSAAALPAEIAGSASQPAALRTMSAGLAASLLQEVAQELPRLAGNVPGSSKGVPDGRLFEAATQPTPPPFRGALPAPQSIAAPSLAPDTPLAATVDRLLDDTDAAIARQTLLQIASLPDRSGATGHRIDPAVPQWNFEIPFATPQGTAMAQFEISRDGGNEAADPVAQAWRARFSLNVEPAGPVHALITLNGDKTFVRMWAERPATAQQLRAGIGELSQALTRAELKPGDILVRDGTPPQPAPAPAGHFLDRAT

SEQ ID NO: 9929 - protein, 114 aa, BradyrhizobiumColbertium
MSDSTKLAIALHYEKGTNAPVVVAKGKGTIGEKIVEIARAHDIPIEENEVLAGALSKVELGEEIPPDLYKAVAEVLVFVLRLSGRGRQGSTVIVSPRSGCMVAPVLHAHGYRFC

SEQ ID NO: 9930 - protein, 272 aa, BradyrhizobiumColbertium
MLTRRSTLGLLAAVSALPSRALAHVAPPRNEIREGIAKRFTDLGTSGTFVGYKVEDYLVVASDKERSGEGKLPASTFKIPNALIALETGVVTDPDKDVFPWDGVKRPIEAWNKDHTLRSAIAVSAVPVYQEIARRIGQERMQKYVDEFDYGNRDIGGGIDQFWLTGALRIDPVEQIDFVDRLRRRALPVSKRSQDLVCDILPVTKVGDSVIRAKSGLLGAERGEPSLGWMVGWTEKGESHTVFALNMDCKEPRLVGERMPLTQACLADIGAI

SEQ ID NO: 9931 - protein, 244 aa, BradyrhizobiumColbertium
MSLDTLIPDNPNKPYDMKELILKVVDEGDFFEIAESFAKNIVTGFGRIAGRTVGFVANQPMVLAGVLDSDASRKAARFVRFCDAFNIPIVTFVDVPGFLPGTAQEYGGLIKHGAKLLFAYSQCTVPLVTIITRKAYGGAFDVMASKEIGADMNYAWPTAQIAVMGAKGAVEIIFRSDIGDPDKIAARTKEYEDRFLSPFIAAERGYIDDVIMPHSTRKRIARALAMLKDKKTEMPAKKHDNLPL

SEQ ID NO: 9932 - protein, 115 aa, BradyrhizobiumColbertium
MTEDDPADEISDIEARIEALAEIAERCRKYILASKIAIGGGATLLLVTILGLFGFGQTAALASIALVLGGIVSLGSNVSTLRQTDEAISEAEARRSALIGSIDLRVVADAPLKLV

SEQ ID NO: 9933 - protein, 50 aa, BradyrhizobiumColbertium
MPRIEYLKQQIARAERLAKAILDRQAAERLQAFAAECRTELSELTFKRAA

SEQ ID NO: 9934 - protein, 217 aa, BradyrhizobiumColbertium
MADLTLTTFNWVPDAPRGFVRDLRVRWALEEAGLPYRVASVPFEDRGPAHLAHQPFGQVPWLTDGDISIFETGAILLHLGGLSEKLMPTDPRGRTEAMKWVFAALNSVEMASLPWAMSQFMGHPTDTPAWKFVDDFLKLRLKHLEPVLGSREWLAGSFSVADILMADVLRPADGFDGLMDHPACRAYLARATARPAFAKAHADQMAHFAMADARRGA

SEQ ID NO: 9935 - protein, 104 aa, BradyrhizobiumColbertium
MPAAFFVVRAIVTDPAKRAAFDRWYEREHLPDAVKAFGVAKAWRFWSLDDPSIHQAMYEFEDEAKLTAMLEGDVLKQLVADFNRDWPDVKRTREMLVLAQAFAR

SEQ ID NO: 9936 - protein, 102 aa, BradyrhizobiumColbertium
MERRSFLKLALGLTAGAAAFAASAAQAAPLSPHPLADPARMPQGNPDAHPAVTTGEEAAELTPEQVHWHGHRRHAHGHHRHWGWHRRHWRRHRRRWHRRHHW

SEQ ID NO: 9937 - protein, 84 aa, BradyrhizobiumColbertium
MKYLFAAVMLASAAVVGFSEAASAAEGCGRGFYRGPYGNCRPMRGAVVVRPAPVVIAPAPVVVVPRARVCPYGFRWYAGRCRPF

SEQ ID NO: 9938 - protein, 340 aa, BradyrhizobiumColbertium
MTEILMNRIFSTALAAVLFSIPLASHAADTKPREPYGIALEGFAYPYPVHFIPVVNDGEPLSMAYMDVAAAQPNGRTVVLLHGRNFPSSYWAPVIEMLSEAGYRVVVPDQIGFGKSSKPAGELHFDNLARNTMALLDHLKIDKAEIVAHSLGGMLGVRIARAYPNRVAHLVLTAPIGLEDYRLYVPPTPTEKMMETEDKLTAEGYRKQLQTNYAIKLPADAITPFIDARFNIKGSPDYPRWLRAFVSSGQMIYREPVAHEIPLIALPTLFIMGADDHNAPGRPLAPEALRAKMGQNAELAKMLAATMRNARAEVIPDTGHLVFLEAPERYRELVLGFLGR

SEQ ID NO: 9939 - protein, 262 aa, BradyrhizobiumColbertium
MAILSRVARNDDLSEDYALASLQCFAYHRTMKAGPDIAMVASLVGDPARANMLTALMNGRALTASELAQEAGITPQTASSHLSKLEAGGLVAPEKQGRHRYYRLTDDDVAGVLEGLAGLAARTGHMRVRTGPKDPALRRARICYDHLAGDLGVQMLDSLRQRQLVRQKKLDIELTTEGARFLAKHLQISPDMLSHPRRPVCKACLDWSERRHHLAGMLGATLMQRFAELKWATRDATPGSRVVNFTRIGEKQFAALFGNGRD

SEQ ID NO: 9940 - protein, 102 aa, BradyrhizobiumColbertium
MSVTVFIRYQLDPFKRAQFEEYSKRWLTIIPRCGGDLIGYFMPHEGTNNIASALISFESLAAYEAYRKRLRVDLDGMANFNFAESEKFILAEERTFLRKVVL

SEQ ID NO: 9941 - protein, 116 aa, BradyrhizobiumColbertium
MIAVIFEVWPKPEHRQDYFDLAADLKPLLQTIDGFISVERFESLSEKGKILSVSFWRDEAAVEAWRNTMEHRRTQAKGRAKIFSDYHLRIASVVRDYSMTDREQAPKDSRAVHDAH

SEQ ID NO: 9942 - protein, 269 aa, BradyrhizobiumColbertium
MHVTTADKRAAFRKMHESGCFILPNPVDVGSAKALQHLGFKAIASSSAGFAWTIGKADNHVTVEDVCQHLAALSSAVDIPVNADFEGGFAVEPDRVADNVERCVRTGVAGLSIEDSTGDKNNPLYDHSLATERIKASRKAIGDSGTLLVGRCEAYLWGVTDLTLVIDRLAAYADAGADCLYAPGLKSREDIAAVVKAVHPKPFNLLIGASGLSLQEAQDLGVRRISVGGSLARVAWGGFMRAAKEMAEKGTFTELGSGYPGGELNKMFS

SEQ ID NO: 9943 - protein, 132 aa, BradyrhizobiumColbertium
MADDRFPNDPYRPNLADDEYSRTARRDTDLQADPQLGEGPASSGKIAVFAVAIALVLGAVFYGLNNTSTTNQASNTPASQTAQQAPSNPAAPPGMRDVTPRNNTEPGVTTGAAPSRPAAPAPESQTPPDGAK

SEQ ID NO: 9944 - protein, 63 aa, BradyrhizobiumColbertium
MSAFLGHYPLVWVANPIYLALPGGAALLTILIARLVHRLHLAFIVLDAIGLVVFTMIGCNVGW

SEQ ID NO: 9945 - protein, 95 aa, BradyrhizobiumColbertium
MDASLPIVIVSGMVTGCAGGVLRDVLCNDVPLLFRSELYASVSVVTGLFYATAFGLNLNAELWTILTFVLGLSFRLLAVRYKWEMPKFVFTGDER

SEQ ID NO: 9946 - protein, 1163 aa, BradyrhizobiumColbertium
MGINQGPISLDQKYTQQTGHVFTTGIQALVRLPMAQIRRDRANGLNTAGFISGYRGSPLGGYDQQLFAARKHLEQYNIKFQPGVNEDLAATAVWGSQQLNLSPGAKYDGVVGIWYGKGPGVDRCGDVFRHGNAAGSARNGGVLCLAGDDHGAKSSTVPHQSDHAFMSALMPYLYPSSIHEMIEMGLLGIAMSRYSGCWVGMKVITETVETTAEIDLSDEMKPFIIPTDFELPPGGLNLRWPDDRFEQDRRLQDYKGFAAIAFARANKVNRITMDSPNARFGIMASGKSYEDVRQALRELGITEEVAAKIGLRLYKIGMPWPLEPEGVHQFAVGLEEILIIEERREIVENQVKQVLFNWRDDVRPRIVGKMDEHDKRFLTFAAELSVASLATSLTERLLRLDLNPEIAEMLRAKADWFNGRQASQMIPTAPVSRTPYFCSGCPHNTSTKVPEGSRALAGIGCHFMALWMDRSTETFTHMGGEGVPWVGIAPFTNENHIFANLGDGTYFHSGILAIRQAVASKANITYKILYNDAVAMTGGQRHDGDLSPQQITHQLHAEGIREIYLVSEAPDAYPADTIAPGVKKYHRDELQNVMKMCREFKGTSAILFVQTCAAEKRRRRKRGLMEDPARRVMINPAVCEGCGDCSVQSNCISVEPLETEFGRKRAINQSSCNKDYSCLKGFCPSFVTVDGGKPRHRAPAELADIGELPEPASRPTLDKPYNIAVGGVGGTGVLTIGALLGMAAHIEGKASMILDMSGLAQKGGAVLSHVRLSDHPAEVTCSRIVTGTADLVLAADEVVAVAKDTISLCDTSRTRGIINSHVIPTADFVLNRDFNFQTRKLHALLETALHKDSVFFDFTKPAEQLLGDAIATNMMMMGYAYQKGLFPLSAESIEQAIEVNGVSIKMNKEAFRLGRLAVADPKRLSDMLKGTDEVVAPKTLDAMTLDEVIEHRAKHLTAYQNSRLARRYRKLVDQVRDAAVKGGYGDALPRAVAVNYAKLLAYKDEYEVARLYTDGAFEQQLREQFEGDFTFNFNLAPPILARGVDALGRPKKRTFGPWMLNVFRVLAKFKFLRGTLFDVFGRSADRKLERDLIAGYEKDVATVLGLLSPVTIDTAVELLSLPDRIRGYGPVKEKAVADAKARYAQLAADLATPPPAPRQIAAE

SEQ ID NO: 9947 - protein, 56 aa, BradyrhizobiumColbertium
MRGFSEPRWADWQAWKYSAPREGSEWAQVERFSPASASSLRTEPPIIHSAKQPHAQ

SEQ ID NO: 9948 - protein, 385 aa, BradyrhizobiumColbertium
MTIKGKAYIAGIYEHPTRHAPDKSTAQLHAEVAKGAIEDAGISKDDIDGYFCAGDAPGGAWPMVDYLGLNTKKLRHVDSTETGGCSYIIHLGHAAEAIAAGKCSIALITLAGKPRTGAMPPRAQGAEADFETSYGATTHNAYGMCAMRHMHDYGTTSEQLAWIKVAASHHAQYNPHAMLKDVVTVEDVLNSPMISDPLHRMDCCVVSDGGGAMIVTTPEIAKSLKKPLVRLIGHGEAMKGPRGGKDLDLTYSAGVWSGPRAFEEAGITPKDIKYASIYDSFTITVLMQLEDLGFCKKGEGGKFVADGNLISGVGKLPFNTDGGGLCSNHPVNRGGMTKILEAVRQLRGEAHPKVQVKNCDLAIAHGTGGLLGVRHAASTAILERV

SEQ ID NO: 9949 - protein, 129 aa, BradyrhizobiumColbertium
MSEAKKYPAPVTNPETAAFWDAAKQGKFMIKRCTACGEAHYFPRSICPFCYSDKTVWEEASGEGTIYTYSLMRKSPTGPYAIGYVTLKEGPSVQTNFVDCDLEKLKIGQKVKVVFKPTDGAPLPFFTPA

SEQ ID NO: 9950 - protein, 286 aa, BradyrhizobiumColbertium
MSARYEELKGLKNIGQKYAYTDREVMLYAYGIGLGADPMDEKELAFVNEGAYTPRPLKVVPTFASVAAWGSGPGEMNLNRVMVVDGERDITFHQPLPVEANITADSSVLEVYDKGKDKGVVIVHQTVLKNEKGEKLATLVASRFARGDGGFGGPNLTQPDPHKIPSRSPDKTIDITTRPDQALVYRLCGDRNPLHSDPEFAKKAGFPRPILHGMCTYGITCRGVLQTYADYDASAFRQHVARFSSPVYPGETVTMDLWKDGNVISFEAKVESRGVTVIKNGKTVLG

SEQ ID NO: 9951 - protein, 292 aa, BradyrhizobiumColbertium
MGLLDGKVALITGAGGGLGEAYAKLFAREGASVVVNDLGGPRDGSGADKSMAQQVVDAITAEGGKAVANGADISTMEGGQSVFDDAIKHFGRADILVNNAGILRDQTFAKASEADWDKVIKVHLKGTFCCTLPVFRWMRENGGGVIVNTSSTSGLIGNFGQTNYGAAKGGIWGLSNVLAIEGRKYNIRIWTLAPGALTRMTADLPRYKENPGAALGPDGIAPAVLYMVSDLSGDQTGKVLGVSGPRGVREMRMMEMEGWKPPHSGWKAQDIVDHAKEIFFSEEQIKMGARRF

SEQ ID NO: 9952 - protein, 317 aa, BradyrhizobiumColbertium
MKLTAEAKGTFAIAPTPFHDDGRIDERSIDRLTDFYEEVGCDGVTVLGILGEAPKLDAAEAEQVAVRFVKRAKKMQVIVGVSAPGFATMRSLARASMDAGAAGVMIAPPPSLRTDDQIVGYFKQAAEAIGPDVPWVLQDYPLTLSVVFTPAVIRKIVMDNPNCVMLKHEDWPGLEKISALRNFQKDGSLRPLSILCGNGGLFLDFEMERGADGAMTGYAFPELLIDVVRLSKEGKRDAAHDLFDAHLPLIRYEQQPGAGLAVRKYVLQKRGVIASSAQRKPGATITAAAKAEVEYLLSRVARADKRANLGPQSSAAG

SEQ ID NO: 9953 - protein, 265 aa, BradyrhizobiumColbertium
MAETSASRPASTILLLRDGAAHEIEVFMMVRHHQIEFNSGALVFPGGSVDAGDKEIVARAGLYSGGEGLSEADRGFRIAAIRETFEESGILLARSKDTGAPIDARRAGEIADAHRVALNEHKIGFLDILADNGLQLALDTLVPYAHWITPEGLPKRFDTWFFLAAAPPDQLGAHDGLESTDSIWVSPREAVEGGESGRFKLPFPTTRNLIRLAKQPNVSAAMEHARGLSIVTVMPVMTKTETGRQLRIPAEAGYDGEVFEVGAAG

SEQ ID NO: 9954 - protein, 245 aa, BradyrhizobiumColbertium
MSAELTPSPEKRRTFSLSIGQLTFGSFLLVLAVIIVTSTASVIAIRHIDTTFAELQRLQSVGDLAEDIDRRMNELRLAARDFVTDPGAGIQFQQVGEAASTLSEILKKTRIELAPEQQDMLDGVTERLATYRTGLERISTLIDRRAQLLAGLPPLREQFDAAVAGTADRELASHLSEAQSRIALGLLARNPSAAEQAAQSMRTMGIADPRLKSAVNDYAEAIMAVAVRGGRSPTLIARSWELRAD

SEQ ID NO: 9955 - protein, 650 aa, BradyrhizobiumColbertium
MIGRVTELLREVSSRRGHVLSRDFARTLTEARWQSIVLGTVGVLIGIGASLFVVRRTVRPLAQIARSIRALAAGRKDTSIPSADLDNEIGDIARAAEVFRRALEEADTAREAAVRALTEQRLAEESYRKLFEGSVDGIYVTTPAGDLLNANPALARMMGYDSPQQLIDSINDIAHTIYVHPEARAEYQRLMARDGMVREFEYQVRQRSGNILWLSDSATAVRDEQGSIVRYEGTLRDITDQKRAEDAIAEGRRLLQQVIDTVPAVINVKDRNLRYVLMNRYMAGIFGIEPRDALGRTTADLMSRYGAAKTDENDKRVLQLRKGLGFYEEEYKDAAGNMRQWLVNKLPLLDAEGEIERIVTVALDIGERKRGEQEMRKAKEAAETALRNLRETQASLIEAEKLAALGRLVAGVAHEVNNPVGISLTVASALERKTAVFAAEVERGELRRSTLNDFLGTSRDASSQLVSNLNRAAELIQSFKQVAADRNYSDQRTFDLGDLTEQVVMSLRPGLRKHNLTLNVECQPDLTMNSYPGPYGQVLTNLFLNSVAHAFPDGRPGTIEIQVRESGKDNVEIIFSDNGCGMSLDVRRRAFDPFFTTRRDQGGTGLGLHIVYSIVTNRLGGRLDLDSEPGGGTRIQMILPRVAPLEQAAE

SEQ ID NO: 9956 - protein, 117 aa, BradyrhizobiumColbertium
MKNGLYSIHVTLLDGRVGKGSGVILFRDGKILGGDAYLYYTGSYTVKDNSTFKGEVLVQRHTTPRGDDNPLFGGPAPVGIGVTGSFTETRGEMTGTALVGKASQIFGATLHKLADVD

SEQ ID NO: 9957 - protein, 128 aa, BradyrhizobiumColbertium
MPFAVTWDHVHLRSPDPEATAAWLRDILGGEIARAPGRIDVNLGGARIFIAPLEGDSDVNPPPPHPHQGLDHFGLVVQDIDAVAAEIKAKGVTFTREPTTIRPGVRICFIQGPEGISIELLERDKKYS

SEQ ID NO: 9958 - protein, 190 aa, BradyrhizobiumColbertium
MNARLDRIGFGRLAGTGERLARAVTIASVSFGRSLLWLLAAIILGCGVWILLPFSRGNSAEPATPELASVEALPSDDASVDVRPASQAQAPARAELGRLRISSQTWRRGGLGSKALVTFTLRNDNDYAVKDVEIVCAFTRHDGSHLTNRTRVVADPVSMKSRKTFVRVLVGFVNVNADHANCSLVAARRV

SEQ ID NO: 9959 - protein, 177 aa, BradyrhizobiumColbertium
MPIFRYFIFVGGALLALLFAADFVLPPAPVTQAIATAGIDQPLIRIRSNRHLPERVVLDTSQPTIAAPAVQTAAVAAPEPPAQESLTPALAEMSAKTRVRETFAQFTPAPRTETAATRKTETRTEPRSQARQLQAAQAQTSPAQPKRKVARTPPPQPGRPMMLVAQQPHFGLFNNTW

SEQ ID NO: 9960 - protein, 349 aa, BradyrhizobiumColbertium
MAMLRHSFDCTFQRLAETMLFDNLAPSSALQLIGFSDVDSFRPIETMEDARSIPLDIPNFAPVRAVVALPACRIIVMKSFARILDTAYRMPGGMVILSMTDDVQASFKGVDIDARFFAALRGNDECHFVEPQSNHHAMIIFSPELRDRGWFDNADDLRAHVANRPALLHTRQLLLDILRTASVQPGLFESTEAAAHLQEGLLLALDDLFRIESLSDRIASVQSQRAIKLVQRIDDFLAADPTAPIYTADLAGEFGVSVRTLGGAVSKVRGMSLHQYIRLKRLWATRARLLRGGGVTVATCARAQGFHHLGEFAAAYRAIFQEAPSDTLARGRRSPPAGPHSMRTVSLDL

SEQ ID NO: 9961 - protein, 93 aa, BradyrhizobiumColbertium
MTLKTGLVAASLLVGALAASQAASAMPIAPAPATPQMSGVEQVRMVCNAWGQCWWRPNYYGYYGPRPYYRPRYYGPPRYYGPRYYGYYGYRRW

SEQ ID NO: 9962 - protein, 144 aa, BradyrhizobiumColbertium
MLPGKVSWMRIIPNLSISPEKVFFVIAKSRRSDSEAAGGGVILDSGDDDMSYGRGGRGETTDRTELAGFIRDLNVDEQIDLVALTWLGRGDGDLSNWRELHAQAAQAHNQRTASYLIGTPMLADYLEEAMAQFGKSFEEFEEHL

SEQ ID NO: 9963 - protein, 153 aa, BradyrhizobiumColbertium
MNKMRIEKGDWLVVCDGRKALILENVGDEMFPNLHTREVHEQPNPSTAAQGSDAPGRLHAAVGGSRSSVEQTDWHDEAERAFLRGLAGRLDAAVSSGETKALTMVASPRALGMIRADYSDTVRKALQGEVGKDLVKLPVYEIEKQLLLSGAAK

SEQ ID NO: 9964 - protein, 87 aa, BradyrhizobiumColbertium
MSKLTFVAAIVALTAAVLAPGLAEARGHHRYHRSYANPLPYPISYLHNYGPGLTPGTFAYYDGPSTNHCYRSAAAYIGQDGRRHPCH

SEQ ID NO: 9965 - protein, 184 aa, BradyrhizobiumColbertium
MTKEYFGKNPVAGAEDHFSGSLEVGGIPEGRRRHLAMRITLLSLLLLCLAAVTPARAELRITRDHGGYVEEYKAKYKRVREKGERVIIDGICNSACTLVLGIVPMNKICVTPRASLGFHQAYYDKAFTFGIKVTSAEGTSDLMSYYPDTVKDWIRRNGGLTTDMKKIKNGVELWRIVNPCPEEW

SEQ ID NO: 9966 - protein, 290 aa, BradyrhizobiumColbertium
MNHNQEILAARAAPILFVLLWSTGFIGTKYVVNNADPLTYLAIRMAIVVGLMAIIAGIARPKWPDRIGLAHSAVAGILVHGFYLGGTAIAIAHSIPAGLSALIPGLQPILTSTIANRWLGERVTPVQWAGLVLGLGGVVLILHNRPMTGEAGLGWLASVVSLISITLGTLYQRRYCNHIDWRAGNLVQYVAVTVFFAIGAFLFEDRVVHWTQEFVLALAWLAVALSIGSIGLLYWLIRHAAATSVASLFYLVPAVTALMAYLLFGEKLDAIAIAGMATCAAAVFVVNRRS

SEQ ID NO: 9967 - protein, 57 aa, BradyrhizobiumColbertium
MLGWSIQFHFFCQRGCINEGEACTAPSWFEPFAHRNGTKFDHPGSMKAPFTMTAGAT

SEQ ID NO: 9968 - protein, 67 aa, BradyrhizobiumColbertium
MIKKVNGQRVIKQFGSSEKRKRFNAEDRSFIAAIRNPKASTIRADGQPGGEDRAAPSPGAPAPGDLL

SEQ ID NO: 9969 - protein, 93 aa, BradyrhizobiumColbertium
MDDEKPITEQAMDTITSAVEATKDAAVTAVKQVRRAAKKVARKVAPKKTSKKKAGKSSKKAAKKTAKKAGKTSTKKAAKKTTKTKKKAKKAKR

SEQ ID NO: 9970 - protein, 479 aa, BradyrhizobiumColbertium
MPNPQPVIVWFREDLRLSDHPALHAAGKTGGPVICLYVLDESVGRAPGGAARWWLAQSLRALGTEIAARGGSLVLRRGPATKVIPEVARESGARAVYWNGIAQVPHQAVERQLETALAKLGADSQSFPGDLLAPPSAIRNKDGRGLRVFTPFWRRVLSLGTPPRPLPAPKELRPAPEIASDRLESWTLEPSKPDWAAGLREAWTPGEASARERLRDFLKHTVRGYVGDRDHPDRHGTSRLSPHLRFGEISPRQVWHAARFAAAEDPALGPGVEKFLSELGWREFCRHLLHDNPGLATENLQTNFDGFPWSRDDKALAAWQRGRTGYPIVDAGLRELWHTGVMHNRVRMVVASFLVKHLLVDWREGEAWFWDTLVDADAGSNPANWQWVAGCGADAAPYFRVFNPLLQGEKFDPDGAYVRRWVPELKGMPAKLIHRPWQATPIELAAAGITMGKTYPEPIVDHAGGRERALAAFAKIRGG

SEQ ID NO: 9971 - protein, 219 aa, BradyrhizobiumColbertium
MTLPIGATAPDFEAETTEGKIKFHDWIGNSWALLFSHPKDFTPVCTTELGALAKLKPEFDKRGVKLMGLSVDPVDNHAKWSEDIKETQGAAPNYPMIGDTDYNVSKLYGMLPAAISGDPLVRTAADNQTVRNVFIIGPDKKIKLVLVYPMTTGRNFQEILRVIDSLQLTAKHRVATPADWSQGDDVIIAGSVSNEEAKTIYPQGWKEPKPYLRIVPQPK

SEQ ID NO: 9972 - protein, 190 aa, BradyrhizobiumColbertium
MSAAAPKPTESSSLEPSCRDTAAHALSVVRDGIITGEGPTTKGRVHFSRSLDADDTAWCIRILTASAVNDQPVSRAEAEVLFEINEAATERTDGGRFDDLLAKAVAHYAASASGLKVPPRNMALSADTDIESWAPSYASKVNSEMLEWIAGQMRGKRQNNRRLMAMVATFLGATALPLAGQLPNVFDIGM

SEQ ID NO: 9973 - protein, 93 aa, BradyrhizobiumColbertium
MQNKSKLLCLITASLIAGTAAASAQGYDWNGPRMGWDRAAPSYEPVQPRAYYPDVAGPYGALNGTNHPTPSSTQGDVGPGGNNNGTLTGRYRW

SEQ ID NO: 9974 - protein, 149 aa, BradyrhizobiumColbertium
MIARSHGALFASLSAAALLLAANDSSAGPAVAAAPGVVTATAPPIGAHPPVAPGARFHRRSAPWVYWPGGGGFFNDRAGYIQPFADVSQSLSADVRYTYTYDVPWDWTHRFPPNVVPSNRPYVPSCPTEQVTVPGRGGSEHTVNITRCY

SEQ ID NO: 9975 - protein, 280 aa, BradyrhizobiumColbertium
MSDLQIRNLRPDEIAIAVEWAATEGWNPGLADADCFAIPDAQGFFVGEIDGEPVATVSCINYDDRFAFLGFYIVRERFRGSGYGLRIWNAAIAHAGARVIGLDGVVAQQDNYRKSGFRLAHGNVRYGGIVAAPSKSPVDMVALTGIPFASVEADDATVFPAARSAFLRAWIHTSEHVGRALLRDGRLTAWGVIRPCRTGHKIGPLVADDRAAAEAVAQALLASTGGGEIFLDAPAVNGEAIALAESLGLKPVFETARMYTGPTPPLRIDRLFGVTSFELG

SEQ ID NO: 9976 - protein, 234 aa, BradyrhizobiumColbertium
MAAEKVALVTAGGSGMGAEAARRLAADGFRVAILSSSGKGEALAAELGGCGVTGSNTSNDDLKRLVDAAMAKWGRIDVLVNSAGHGPRAPITEITDDQWHAGLETYLLNVIRPTRLVTPLMQAQKGGAIINISTAWAFEPSAMFPTSAVFRAGLAAFTKIFTDTYAADNVRMNNVLPGWIDSLPQQDARRDSVPMKRYGKVEEIAATISFLASDGAAYITGQNIRVDGGLTRSV

SEQ ID NO: 9977 - protein, 129 aa, BradyrhizobiumColbertium
MANQSSRLDQIFAALADPTRRAIVMRLCDGEASVGELADPFDMALPSFMKHIHVLETSGLLQSEKSGRVRTCRLSPDALLGAEDWFQRQRAIWEARLDRFEAYVMKLKEEKERAGAKRPSRTTKRKGSE

SEQ ID NO: 9978 - protein, 163 aa, BradyrhizobiumColbertium
MSSSANPTLSQWSLDREIVMSRVIDAPRDLVFEAWSDPKHLPQWFGPKGFKIETFEIDVRVGGVWRFNMIGPDGTVYPNRMRFRRIERPSLMEMDHGADQDQDPGMFRFTVTFSEQSNGKTVLMLRQLTSSTEQRDGMIGFGAVEYGYQTMDKLAAYVAGMTR

SEQ ID NO: 9979 - protein, 295 aa, BradyrhizobiumColbertium
MYYFDKRLQYPVRVEKPDPIFARQLQQAIGGVEGEIRVCLQYFFQAWGARGPAKYRDVLLNTATEEISHIEMLSTAVALNLENAPATMQESSIQGNPIVGAVMSGGERPRHVIEGMLHRHILSTGMAAFPANSDGVPFDCSHVYASGNLAADMYCNVAAEATGRTLAVRLYNSTSDPGMQDMLSYLIARDSMHQQQWLAVIEELGGDASLPIPNSFDRSKEATEFSYMFMGTERNGAPLQPGRYCEGPSLDGRGEFSFRPGFEPLGDEPVLGPARPDSAAQVEQMQEPPVTNALT

SEQ ID NO: 9980 - protein, 95 aa, BradyrhizobiumColbertium
MVVLAVVALAEPAAVRVPAPVREAEREAQVRELAQARAAAARARAPVAAVASRMWSVADKAPRAPRACATRPPHDRMARPGVEAAAITVRGPSFF

SEQ ID NO: 9981 - protein, 282 aa, BradyrhizobiumColbertium
MTQIPLSTAAEAEHPQSDLDRNDSTRQIVADVAYRQLAMVNVIFVGVEGAGDGNWVLVDTGIPGSARAIRSAAGARFGGHGRPACIVMTHAHFDHVGALETLANEWDVPVYAHHAEHPYLDGTQSYPPADPSVGGGLIARLSPLFPTRPVNVASHLYDLPSDHSVPFMQDWRCIPTPGHTPGHVSLWRERDRVLIAGDAFITTRQESVYAAMSQTPEMHGPPMYFTPDWASAKTSVRELAALAPEIVVTGHGAAMQGAEMRTALNALAERFDEVAVPPDRQA

SEQ ID NO: 9982 - protein, 188 aa, BradyrhizobiumColbertium
MIDDPTASGNLLPPRPGHGQPDNSSDAYFMQIRDDLADKGFFTATAEELITWARTGSLMWMTFGLACCAVEMMQMSMPRYDAERFGFAPRASPRQSDVIIVAGTLTNKMAPAFRKVYDQMPEPRYVISMGSCANGGGYYHYSYSVVRGCDRVVPVDIYVPGCPPTAEALLYGVMLLQQKIRRMGTIER

SEQ ID NO: 9983 - protein, 165 aa, BradyrhizobiumColbertium
MANAARDTFVVGLRNAHAMEVQARELMERQSERLDDYPEVKAKLTAHLQETNEQLRRLEQCLEACGESTSSLKDTAQSMMANMQAMAHAAAGDEILKNTFANNAFENFEIAAYKSLIALCGAAGMSEAKAPLETSLKEEQRMASWIDSNVEKVTMEYLTHQRQAA

SEQ ID NO: 9984 - protein, 87 aa, BradyrhizobiumColbertium
MTHIIFSDYRNPAAEQAYEIAWDFLARTGAIRDEFEACVFLAQRITMMVEEGQTNRIRMANRAISQYQRHVDESDDLVRSGGRRAEG

SEQ ID NO: 9985 - protein, 406 aa, BradyrhizobiumColbertium
MKNNLIKGFAASTLFLTLSIAAAQAQKKYDPGASDTAIKVGQTVPLSGPASAYAVIGKTQAAYMRMINDQGGINGRKVELIQYDDAYSPPKTVEQTRRLVESDEVLLTFQIIGTAPNVAVQKYLNAKKIPQLFAATGAARFTDPKNFPWTMGFNPSYLVEGRIYAQYLLKNHPNAKIGVLYQNDDLGKDYLAGLKAGLGDKASMVVAETSYEITEPTIDSQILRLRDAGADVLFSATTPKQAAQAIKKVAEIGWKPLHIIDINASSVSAVLKPAGLDNAKGVISVGYVKDAADPEWKDDAGMKRYFAFMAKYYPDGDKDSNLNVYGYITAQLLVRVLKQCGDDLTRENVMRQAASLKNVELDLTLPGISVTTTPTDYRVNKQFQMVQFDGQRWQKLGGIVTDDARE

SEQ ID NO: 9986 - protein, 328 aa, BradyrhizobiumColbertium
MASFKVTRRTLLGTIAGGLAAGSGMTAHAEDAWPSRLVRLISPYGPGGSNDISLRLLAEEFGRSLRQQFIVENKPGAGTRIANDMVAHAPGDGYTFLYVAAPYATAEALFGKLTYDRKELQPVAMVVIAPLFLIISTNAPFKTLPELIAYGKSKPDGLTFASPGAGSQPHLAGELLFRDAGVKGLNIPFRGDAASYTELLAGRVDATLTALPTALPYIQSGKFTVLGVASPERSALYPQAPTLREQGFPNVAAAGWYGFMAPATTPRSIVDKFQAEVLRALAEPAIKNKLTAQGLEVRAGTAAEFAQFIDNETQKWTKLIRDAGLKGE

SEQ ID NO: 9987 - protein, 398 aa, BradyrhizobiumColbertium
MAGPLEGLKVLDIATIIAAPFAATLLADYGAEVLKIEMPGQGDGVRSFPPFKDGKPLWWKAANRNKKFATLDLRTPDGLALFKQLLPRFDVLIENFRPGTLDRWGLPKEVLWSIQPRLVILRATAFGQNGPYRERPGFARIFEAMGGLTYITGESDGEPTHPGYPIGDSIGGLFGAVGVLAALWKRACDPHAPGEEIDLALTEAVFRLLDVLAIEHDQLGAVRSRIGNANGYSAPAAVFRTSDDHWVTLAGSTNTLFAANCRAIGRPDLIADPRFASNDERVKHAAELNDIFAGWCAAHPLDEVLASFNAAQGTLAPIYSIDQIAEDPQVEAREVITRVADRDFGTVAMTNVVPRFTVDPARLRHAAGDVGQDNNEIYRDWLGLSDARIEQLTQRKVI

SEQ ID NO: 9988 - protein, 295 aa, BradyrhizobiumColbertium
MVQTGSSKPRHPPSSAAAVLAVSSEDAAFATTLAKGLVVLEAFKAGSTLLGNMELSTLTGIPRPTVARLTHTLAELGYLRYDAERAKYRVGARALRMAHPLLAGMQFRQVARPMMQELAHSVRGTVSIGLLDATSMIYVETARSGDVGPHVPDIGMPIPVVLTAMGRAAASTLPPADADRLERNIAAEDSGLWSAMRDKYRAGIAQCKSRGFCTCWGEYMASIHAVAAPLFHASESKQSFSINCGIPAFRLQPGQLEGEIGPRIAALADSIRAIIGQAELTTPPRKTKKTTSVGT

SEQ ID NO: 9989 - protein, 260 aa, BradyrhizobiumColbertium
MSSANVLVWFMLYREFYPAASGSLSGGSDIGLMLLLCAGYVFGCAFRSVLPRADVQRICLFDTWLSSVFVGRSVATVAEVCFAAQWAIILHQLGTMTGAETTVNIAWVIVPVIIIAECFSWYAVVTTNYLYNAIENSLWAVTFFLAGIALCRLMPEFQGVVRWALIVGVVGIACFLAFLITVDVPMYLSRWRAGHAEGNEFLGLLEGLHDVATRWVVTHDIAHWRGELTWMFLYFSAAVWSSLALCALYAMEGHLARYLA

SEQ ID NO: 9990 - protein, 403 aa, BradyrhizobiumColbertium
MGTTRATSAATLLITLALAGSAARADIKGDAIRIGVLTDMNGVFATAMGPGSVEAARMAAEEFGGKINGRPIEILQADHQNKPDLAASLARKWFSDGVQAIADGGSSGSALAVQELVRSNGKIFLISGAGANQLTDEACAPTSVQWTQDAYSTATAVVSGIMQTSKEPWFFITGDYAFGHSIEATARDRIAALGGKVAGSVKAQLGTPDYSSFLLQAQSSGAKILAINVAGDNATAIKQAEEFGLTDQGMKIVPMSFQNVDIEAVGLKATRGDLIVTSFFEDVSPAARKFADAFYARRKAMPSQIQAGVYSAVRHYLQAVKDTDSDEGTAVMAKMKATPVSDAYTTNGRIREDQRMVHDLYLVQVKTPQESKGPWDFVKLVATIPPDQAFRPLDRSKCSLVGK

SEQ ID NO: 9991 - protein, 49 aa, BradyrhizobiumColbertium
MPGDVIVTGTPGGVGAKRTPPLWMRPGDTVDVEISGIGTLRNTVIAEPA

SEQ ID NO: 9992 - protein, 237 aa, BradyrhizobiumColbertium
MKLISFIVRGRPSFGAVKDNGVVDLGARMAGCTTLRQLLEAGRLAEAAKLTASAAPDHPLDKISFAPVIPDPGKIICVGLNYRDHVAETGRTVTEKPALFARFACSQVGHLQPIVKPKVSDDFDYEGELALVIGKGGRHIPADRALDHIAGYSCYNEGSIRDWQRHTSQFLAGKTFAESGSFGPWLVTTDEIPDPSKLTLQTRLNGKVVQDTTTDLLITAIPELIAYISTICPLRAR

SEQ ID NO: 9993 - protein, 501 aa, BradyrhizobiumColbertium
MQDKSALEEFDVVIVGRGPVGATLANLLGLCGVRTLVLEREARTYHLPRAVHFDDECMRVFQTIGLADAILPHVILSPGMLFLDADGRMLLDWSRPRTLTPMGWHLSYRFHQPDLEDVLTRGLARWPHVSLRNRCDVFALDQDEDGVRVRYEDLTNGRLCGVRAGYVVGCDGARSLVRRFIGSGMDDLGFHERWLVIDVLLKRDRDDLGDYSLQHCDPRRPATYVRGTGARRRWEITVLPDEDSNDVAQPAKVWELLSRWITPEDAELERAAVYTFHSVIAQQWRNGRLLLAGDSAHQTPPFLGQGMCAGIRDAANLAWKLDAVIRGAADSGVLDTYQSERLPHVREFIELAIRLGGVINTKATEAGLAAGEARENAPVKLEVKKPLLGPGLVSRDLPLAGHLAPQFTLSDGSPSDDRTGYSHVLLVETAAAPSSRQALSQGIRILTSDDASSLGPWLREHGIVAALVRPDRYVRGTACNEAELDRLIAAIAPPTHVPSAA

SEQ ID NO: 9994 - protein, 382 aa, BradyrhizobiumColbertium
MLKCAGVACLAIQMFMVSASAADINVGILLSTTGPAAAIGNAERNGTSFGPPEIAGHKVNYLFLDEASDSTAAVAAMRKLFQGSSIDILVGPTTTPGSFAVIDPAVEYRLPVITLAPVNALVAPVDARRRWIFKTTTNDDHEAAPLFAHMKKSGVKKLALIGFGDSYGDAWSKVSAEMCAAAGIALVADEKYARTDNSVVGQILKIVAADPDAVLIAASGAPAALPLLQLREKGFAGKVYGTLGATFGDFRKLTGAQGDGIFVPLSPAVGAASLPDEHPAKKAALDFIQRYEARFGPGSRNIFAGSAYDALLLIERAAPAALKKGAPGTADFREGLRSAIEELRGVAGSRGVYNYGPNDHTGLDQSALTLGRLEKGEWVAVR

SEQ ID NO: 9995 - protein, 394 aa, BradyrhizobiumColbertium
MPAIPGQPVYDVDLYSDEVLLDPYPHYRALRELGAVVWLPRNELHAVARFDDVRAALRNPTVFSSAQGVAANDHVNDISRGTTLASDAPLHDRLRGIIAAPLMPRALEEIAPQIRTEARRLVDDLVARGQFDAVSDLAQHLPLTIVSKLVGLEDHGRSSMLRWAAATFNVLGTMNARACTALKDVQEMRAYLGGEEIRSRLRPGSWGDRIFAAADRGEVEPERCPVLMRDYLGPSLDTTIFATANLVLLFGRHPAQWDLVRNDPALIPNAINEALRLESPVRGFTRHLAADATVADLTIPRESRLLLLYASANRDERKWHDPERFDVRRRANDHLGFGNGTHMCAGLHLARLEMTALLEVLVERVASFEIGEPVLALNNVLRGLASLPVRVKHA

SEQ ID NO: 9996 - protein, 263 aa, BradyrhizobiumColbertium
MSKERTQNGRPRQSEGVRAFKRGLDVLHEVNRSGGIRAGDVARALDLPRPTVYRLLETLEELGYIARSASDDRFRVTRRALSLGDGYDPGVVICQAAAPYLADLSKKLVWPVDLSTYENAAMVVQETTHSRSPLSIDRGMIGKRLPMLRTSAGRAYLAACPARERDLIVNHLRRIDEADDRPFLDEARLDRMMAETQARGYAIRGEGEYNPKTASIAVSIVRDGVVFGCISIIWIRSALGIEEAVATFVDPMRSAAAAIDVGV

SEQ ID NO: 9997 - protein, 327 aa, BradyrhizobiumColbertium
MEITALGYIGISSSQLDQWSRMATGLLGMQQVDRGGKMRAFRMDDRKQRLIVDGGSDAGLAVMGWEVPSTAELDRLAGRLESHGTKVVRGSRALADERHVAELIAFTDPAGNRLEAFCNPELASEPFRPGRPISGFRTGALGMGHVVLNVEDVEQLLPFYRDVLGFHVSDFGLKPYGLYFFHVNGRHHSFAMVGSGRKAMHHFMVELGSLDDVGQGYDLAQLDEGRVAYTLGRHTNDHMTSFYVNTPSGFFIEYGWGARVIDPETWQPHETFDGPSLWGHERLHMPEEQRKRLRDMRLDAAARGVRVPDPRVPPLNCAWLDSVVARE

SEQ ID NO: 9998 - protein, 64 aa, BradyrhizobiumColbertium
MKKLRTAQEKWFYLIRFVRVTDMARWERAVLQQDHCRVAMRYDAENYSNLRRFGCGCASMSPRR

SEQ ID NO: 9999 - protein, 92 aa, BradyrhizobiumColbertium
MLGVGLALLLPELGKVASPTERSAIYALILLAGGYGLLQSARLAMEFGQRVDLNEHFAPAIGGFAMMTVLALLLKMLWRAAWPALVPPRAAK

SEQ ID NO: 10000 - protein, 49 aa, BradyrhizobiumColbertium
MGYNVGHEVIRNAREGIDYLASIIIAIRIRGRRRRVEPRKMLPSLHRPH

SEQ ID NO: 10001 - protein, 215 aa, BradyrhizobiumColbertium
MSAADATILLVDDHSVVREGYRSVLQKQPGLRVVAEAADGAEAYRLYKSEAPDLVIMDLSMPGIGGIEAVRRIRQWDKAARILVFTMHENAGFAVQAIRAGARGYVTKTSPPETLVRAVKDVLAGKIAISPDIDHELALSRIGGECSAADVLTPREFEVLRLLLAENTTEEIAQMLHVSPKTVANLHSLIKDKLGVGSDIELVRLALRQGLLTEV

SEQ ID NO: 10002 - protein, 459 aa, BradyrhizobiumColbertium
MWNRPRFDLKVRLTLLVAGISAVCFAAISAYFLVSADRAAHARIDGIAAIVAKSLELQQGKVQWVANPRSDFPNLDPVSAYVMTPGLCLAFRGTRGDILQRFCSGAPAPASPPPQAFVAFYRSLFDPGREAVRPVIVRGTNLGETVVSVDPAVQTAEAWHEAGRLMIALAIALPLLCALVYAALARALRPTRLIGKGLERIATGDLTTRLPPFDLAELSAIRDVFNQLAESLDIALAERNELTRKLIALQDEERRHLARELHDEFGQSLAAIRALAASARQTAAQDCPGLLGECDSIARTATGMMETLRGALFRLRPPDVDELGLVASLEGLVSGWNGRSRGQTRFEIRFDGAFESVPGTISATLYRIVQEALTNAAKHAGATRVSLQLTMANNEIALAVEDDGRPNETAVKSGMGLLGMRERVAALRGRLSFETGPHGSTLRVFIPLAADRQALEHAA

SEQ ID NO: 10003 - protein, 47 aa, BradyrhizobiumColbertium
MPDPDLRPSHPARSVHALLSPDSLRLSPLRPFLFAGRCRERYWRSHG

SEQ ID NO: 10004 - protein, 297 aa, BradyrhizobiumColbertium
MHCSRLILSAFLLFVLSCSPADAESAIGVAMDDFSYTDTSGEPTNQTAAHERRLAAFMAALRRDIAADSRYRLVPSTRDGAAFKVIGGIQKTSTLVQWAKVAVIDVGAKKLVMDKLYSFRGDNDESWERAEIFLSREILAALATPVPVALAVFDFELEDTTGASAEASATSDASYMAEVSGSVREALGQSGRYRIVDVSGVRGEAGKGRALRDCGGCEAAIAKELGADQSLIGVVRRVSRTEYTLGFQVRDARTGAVLARGDSGLRLGADYSWKRGAVRLVRDRLIEGQQVNDAPRK

SEQ ID NO: 10005 - protein, 343 aa, BradyrhizobiumColbertium
MRAVVIHAPKDLRIDNYPDAMPGPGEVRVKIANGGICGSDLHYYHHGGFGVVRIQQPMALGHEIAGVVADVGDGATNVKPGTRVAVNPSRPCGQCLHCQEGMRNQCLDMRFLGSAMRFPHVQGGFREFITVDATQAVPIADKLSLAEAAVAEPLAVCLHAGKQAGPLLGKRVLITGCGPIGALMIVVSRFGGASEIVATDVAEAPLAVAKKLGATDAINVAANGAALDPWRAGKGVFDTLFEASGNQAALRTALDLLRPGATLVQLGLGGEMTLPIDSIVAKELQLRGTFRFDREFELAVRLMGEGLIDVKPLITAAMTFENAVAAFELASDRAQSMKVQLTF

SEQ ID NO: 10006 - protein, 255 aa, BradyrhizobiumColbertium
MSTSLFDLSGRTALVTGSSRGLGRAIAEGMAKAGARIIVNGVVPKRVEQAVAEFRSAGHKAEGAPFNVTDEPAILAAFERFDREGLAVDIVVNNAGIQHRKPLVEFTTDEWRKVIETNLTSAFVIGREAAKRMIPRKHGKIINIGSLGSELARPTIAPYTAAKGGIRNLTRSMAVEWAQHGIQANAIGPGYMLTDMNEALVNNADFNNWLMGRIPSKRWGKPDELVGAAIFLASDASTYVNGQIIYVDGGMIAAM

SEQ ID NO: 10007 - protein, 399 aa, BradyrhizobiumColbertium
MKITSIETLRTQEFSNVIWVRIHTDTGMIGLGETFYGAGAVEAQIHDTFAGRLLGRNPLHIEAIHRDMLNLPMAQSSTGVEYRAASAIDIALWDLFGKVCGQPVHQMLGGLCRDKQRIYNTCAGTQYVRSTNISPVANWNLGASKGPYEDLDAFMTRADALAESLLESGISAMKIWPFDPAAQENKGLYISAAQMKQAIEPFEKIRKAVGDKMEIMVELHSLWNLPTAKQIARALEPYKPTWYEDPIRMNSPQALAEYARSTDVWVCASETLGSRFPYKDMLDRDAMHVVMADLCWTGGLTEGRKIAAMAETYHRPFAPHDCIGPIGFIAAIHMSFSQPNTLIQESVRAFYKGWYNELVTTMPAIKDGYVYPMEGPGLGVDLLPAVFERSDLTVRRSNV

SEQ ID NO: 10008 - protein, 255 aa, BradyrhizobiumColbertium
MARRKRALQVVRNEGDTGGRPSRSNRLNFFELAYQRIEELLVHCELKPGQFMTMLELQQITGFGRTPVHHAVNRLSADTLIIIRPRHGLHIAPIDLARERMLLGLRRDMERFVVRLAADRANLSHRNQALHIERLLRERRASLTLDEFNSLDRRIDALVLEAAGEPFLVHTMRPLHTLYRRIGYIHHRFMPGQADLSGTIDHHLAILAAVASRRVEEAVKASDALIDYMGEMFTGMEAGIDPRLLDCSIEPLLGA

SEQ ID NO: 10009 - protein, 454 aa, BradyrhizobiumColbertium
MSTMAVPQPTPSEAAVRYLITNYSPKGNKVGWLMMASILVEAWDLYSIAFVLIFIKEQYNPDPLMLGLAAAGTQGGALIGALLGGWLSDKIGRRVMFLVTMVMFIVLALAQAFVPDVAWLVVIRFLLGIPLGSDISTGYTYIMESMAKGEREVMGNRWQFMFAVGEVLTIGVIVIFLLVDMNHEMLWRVTLGLGAVPALIILIMRHDVPETAVWLVQKGRYREAKQVAREMFNDNLDMLPDRDVVVPKTSTRAFLADLKKDPIRWRATLYGWIACFAQASEFSTFAFYLPVLFAMVGVSTILGNNLVTMALFSFAALSGWVGPLLTPKIGHRGIAIAGFSIVLVSLLVAAFALYTGNTMLLPFAAAGMLWGHYWDASNCMTIPTMVARPQYRGTASGFAYMFVKLPSFLAIFLFPTLFAAIGQANATLFVAIFPVIGLLAAIFILPEVYGYEND

SEQ ID NO: 10010 - protein, 78 aa, BradyrhizobiumColbertium
MQIQSKALARSSLLRRALRNLTGPPEIHIQTAHPLLVVSAMVLLTLLAIVEIDLHSAQLQAIGLLGHGTGIDPIFLSP

SEQ ID NO: 10011 - protein, 419 aa, BradyrhizobiumColbertium
MPTVPSDAIWTWSIIAIATAGVIVRPFRLPEALWAVIGAGSLLLFGLLPWLDALTGIEKGVDVYLFLIGMMLIAELARLEGLFDYLAAIAVEYARGSPQRLFLLIYLVGTVVTVLLSNDATAIVLTPAVYAATRAAGAKPLPYLFVCAFIANAASFVLPISNPANLVVFGARMPQLTEWLRLFALPSAASILLTYVVLRLTQHRALKEETIARSVPHPELGRGGKLTAIGIVAIGVVLVTASARDKQLGLPTFICGVVTAAIVLLISRQSPLPVLRGVSWSVLPLVGGLFVMVEALVKTGVIAQLSALLHQAVAQSVPQAAWSVGIATALADNIANNLPVGLVAGSVAASDHLPASVVSAILIGVDLGPNLSVTGSLATILWLVALRREKIEVGAWPFLKLGLLVTPPALIAALAAAIR

SEQ ID NO: 10012 - protein, 825 aa, BradyrhizobiumColbertium
MRFRITTADALKDSLPETVAAERLRQHLEDVARERDNAYRALQEREAELARIQRIGKVGGVEVDFREGFKNRRSPEYLIIHGLPPEAADESHEDWVNRIHPDDRDATVKHFFDALAGASEDYSAEYRIVRPSDGETRWIRVVAKIERDKDDRAIRLVGAHIDITDQALARETLRESEERFRLIADSAPVPIWVTKLDRKRSFANRAYVDFVGLPYEQAIDFDWRKVLHPDDLPRVLQQSVEGEASLKPFVLEARYRNASGEWRWLRSESQPRWDPTGKHIGFIGVAHDITVAKQAEIELRQLNETLEQRIAERTAELESNEARLRAILETSNQYQGLVNLKGELLYANKTALDGIKASSSDVIGKPLWETPWFSATEGMSALVREAFHTVLRGEAVRLEMRLRLPVGERDFEFGMRPVLDRHGNITGAVPEAVDITERRRGEEALRQSQKMEAIGQLTGGVAHDFNNLLTIIRSATDFLRRRELAEERRRRYVDAISETVERASKLTAQLLAFARRQPLKPQIFNVGSQVEGVAQLVRPLVGGRIEIAVEVQDADCFTMADIAQFETALINLAINARDAMDGEGHLTIAVRKVSGIPSLRAQPARGGDYVAISITDTGSGIAPEHLESIFEPFFTTKEVGKGTGLGLSQAFGFAKQSEGDIAVMSVPGEGATFTIYLPQAQSPATDKEVASLTHEAATTGRGYRVLVVEDNDEVGRFSTELLEDLGYVVRRVANANAALAILGENEFAVDLVFSDVIMPGMNGVELAGVIRERYPGLPVVLTSGYSNVLAESAHRGFELIQKPYSVESLSRILRKAITEKLSVAR

SEQ ID NO: 10013 - protein, 73 aa, BradyrhizobiumColbertium
MPDRYSHRRSVIAIAERTCVAGKSGFAGSAKVRLTNAGPSILFQELERTAGGCVFARRNTSFHEAPLSEEAKS

SEQ ID NO: 10014 - protein, 360 aa, BradyrhizobiumColbertium
MKLFVCQACGNVLYFENYACERCGHRVAFLPEKETMSAIEPDGEAWRILASNGESRMLCRNAEYDACNWLIDAADTTGCCRACRHNGMVPNLSDPAQLAGWRELEVAKHRLFYSLIRWRLPLRTRQDDPEHGLTFNFLADDPHSGEKVMTGHDNGLITIALTETNDIERERRRLEMGEPYRTLLGHLRHEVGHYFWDVLVRDGGKLAECRAVFGDDSTDYGQALQRHYAEGAPADWQQNYVSAYATMHPWEDFAETWAHYLHIVDTLEMAGEFGMEVRPKVDRDGELTARIRFNPYEARDVQALIDAWLPFTFAMNSVNRAMGLRDLYPFILSPAVVAKLGFIHTLVRDVAKSKSNAGMA

SEQ ID NO: 10015 - protein, 288 aa, BradyrhizobiumColbertium
MAFRSRREKLRSVLSDSNCVHPGSVYDAISIRIAEDLGFPLGMFGGSVASLAVLGDPDVTLITLTELAEQMRRMSRAATLPVLVDADHGYGNALNVRRTVQELEMAGAAGLTIEDTLLPAAFGETKTQLISLEEGVGKMKAALGGRSDPSLVIMGRTGAAAITSIDDAIRRAKAYEAAGVDALFFTGIKARTELEAIASATSLPIVLGGVPEELSALDYLASQRVRIALQGHAPIVAATQAVYDTQKALREGAAPKSLKGLASSELIARIMRESELRALSADVLGSKK

SEQ ID NO: 10016 - protein, 92 aa, BradyrhizobiumColbertium
MVICGRVQGVGYRAWVEQQARTSGLEGWVRNRRDGSVEALFAGAPRHVADMVALCRHGPPSSRVDSVTSETASADDLNLRRAGEMFSVLPTV

SEQ ID NO: 10017 - protein, 496 aa, BradyrhizobiumColbertium
MFESERSFRLLVEGVADYALYMLDPKGTITSWNIGGERIKGYSPGEILGQHFSRFYTETDRANGKPARALGIAREKGRYEEEGWRVRKDGTFFWASVVIDPIYEDGELIGFAKITRDITERRNAQLKLEAMQKQLAESQKFDALGQLTGGVAHDFNNLLMIISGSLHILKKSATSDPKLERAMSAIETATKRGAALTNQLLTFARRQSVNPQAIDFAERVGAIREVLDAGVGSSVRLAFDIHSDTWPIKADVSELETALLNLVINARDAMPDGGAVTIQARNVVLNEPPLAGDFVAIDVTDTGLGIPSDVLDKIFEPFFTTKPIGKGTGLGLSQVHGFAHQAGGTVKVASELGKGTTFTILLPRGMDAPVRDAAEAMSFRGSGTVLLVEDNPDVALVSTGLLEQLGYEVRRVADAEAALREIENDAVDFVFSDIVMPGKMDGLSLAHHLRQIRPGLPILLATGYSDVAAGVRGDFPILRKPYEIHELSEAIAKLPR

SEQ ID NO: 10018 - protein, 287 aa, BradyrhizobiumColbertium
MTMTLDIATVQAFLLVADLQSFTRAAEALGTTQAAVSLKLQRLEALLGRRLVERSPRAVRLTADGAAFLDRARALLEAHDRALSGEASVAPSLTIGISDHAAGPELVPLLERLHAMSPNLTLAVTIGFSREMQDAYDAGELDAVIVRQEGSRRGGEKLVEDEFGWFASRRFTLAKGAPLPLATLAPPCGVRAVAVRALDKAAIGWRERFVGGGVTAVVAAALAGLAIAPLARRIALPGLVDIGPAHRLPKLGSSKVMLHSKVSDPAKLAALRAIVATFRSAAALAVR

SEQ ID NO: 10019 - protein, 162 aa, BradyrhizobiumColbertium
MNPAGLASRQRRKSRDISRRTAMPLITVSYTTSRQSPSLKADIANAVSELTAEILHKDPRVTAIVVKSVNASDWFAGGRSLAEQKLASYWIDIHVTEGTNTKDEKAAYLAAMFKRMAEILGPLHPETYLHVDDVKGDAYGFGGQTQERRYIAGKLGMSFEAA

SEQ ID NO: 10020 - protein, 142 aa, BradyrhizobiumColbertium
MAYVMLDLKRRRPDVRAYVASLEELILRTLAAFNVRGERREDRVGVWVKRPDKGPGHEDKIAAIGVRLKRWVSFHGIAINVEPELSHFAGIVPCGVTDARYGVTSLVDLGQLATMADVDIALRQAFEQLFGPTTAPAPEAVV

SEQ ID NO: 10021 - protein, 72 aa, BradyrhizobiumColbertium
MDLMVVLGTTTMPIHQVLRLSRGAIIELDATEADEVKVLANNLPVASGVVLVDRNRIAVEVKQMLPRSPGTR

SEQ ID NO: 10022 - protein, 58 aa, BradyrhizobiumColbertium
MENVVRFVSKSELERERLIREARAIYDSIFPPVTSAGVQDDDQTEPRTSIHPLADREP

SEQ ID NO: 10023 - protein, 403 aa, BradyrhizobiumColbertium
MISMQKLPVTVLSGFLGAGKTTLLNHVLNNRHGLKVAVIVNDMSEVNIDADLVRDGGAKLSRTDEKLVEMTNGCICCTLRDDLLKEVRPLAANGRFDYLLIESTGISEPLPVAATFDFRNEDGDSLSDVARLDAMVTVVDAVNLLKDYSSSDFLEQRGQALENDKRTLVDLLVEQIEFADVIVLNKVDDSTPAQREAARKIIRALNPEADLIEANYGRVPFDRILDTGRFDFEKAQQHPLWFKELYGFADHMPESEEYGVKHFVYRARRPFDPARFDQFIKQPGPGVIRAKGHFWLATRPQWLGEISQAGSIIRTEALGFWWASVPTERWPDDPAWRTRLRANWSEIYGDRRQEIVFIGTNMDEDSIRSRLDACLVPGRPAMNIADWAKLPDPFPIWRRADAA

SEQ ID NO: 10024 - protein, 46 aa, BradyrhizobiumColbertium
MRLHAGLRFPTLTFSARAVLEGFAAQTCRTAQSGPSLAGSGKTWRG

SEQ ID NO: 10025 - protein, 195 aa, BradyrhizobiumColbertium
MAPIREAVHLCIDMQRIFAPGGLWATPWMERVLPTIASIVARHQDRTIFTRFITPQDPEDRRGQWQSYFRRWPQATRRHLPPSALELVPALDRFVPPAAVIDKPAYSAFSNPGLASLLVEKKVGTVVISGAETDVCVLSTVLSAVDLGFRIVIVEDALCSSSDVGHDALMTMYRTRFHGQVDLVTAEELAEFWRE

SEQ ID NO: 10026 - protein, 260 aa, BradyrhizobiumColbertium
MQAGFAFSKLADRLTSLVELTTDDLDLLADMPSSIAHFGTHQIILRHGDEATHCCLLLQGYLSWQNHESADGQITAICVPGDIANLHTLHRPRIEGNLIALGPAIVALVPHRFFREVAARSPAMSQAMLLMLLAEHAIQRNWTVNLGSRDALTRVAHLLCEITVRLQIVGLARDLRLSSPFTQSDLAAACSISPVHANRTIQELRRANLLQWQGRTLTITDWPGLVRLAGFDPAYLSIRSGTDDARLPHANSMTADVAVA

SEQ ID NO: 10027 - protein, 384 aa, BradyrhizobiumColbertium
MNAEPRPAIGSGPRPATGERRRSSWIAAAELGLISSTFSTIVSQLSAARIGRDAAVDWMTVAAIPARDWAISSEPSWSTILTGIAFHQWADFSWALVFFGVLGRWTADLRPMTILLLALPWAVFSSGMEWFVLVPLFPFWQPLFTLQQPYWIGLLVHGSSAVMYPLFARLRWRHGNAPRRDVRFTNAWITGALAAVVVLGTIAFFGSHGHELPWMGRDRDQDQTYIRHMTAHHAQGIELARVGAERAQDPHLRKLAMMMVASQSGENRIFENWWLSWFDTEMPDCSTEERAAMPGFLVPAEMRQIRTAPPDQFDALFVEIMSRHHRGAVRMADQMWRSSGDPRLRVMAHAIRHEQQGEIGLMQGVSGVAAVTTAVRNMFGDNVN

SEQ ID NO: 10028 - protein, 59 aa, BradyrhizobiumColbertium
MGKTKGLQQRIAGKTKQAVGEIIGDQDLHDEGKAQAERGRDEQDKPSELNPLKKLKQLT

SEQ ID NO: 10029 - protein, 534 aa, BradyrhizobiumColbertium
MSVASRDETAWWESAVIYEIALISFQDSNGDGKGDLAGLMSRIDYLKWLGVDAVWLTPIYKSPFRDLGYDISDYCSVDPAFGGLEEFDRLVEALHAAGIRLVLDLVPNHTANDHAWFVESSSSRNSAKADWYIWADPAENGGPPNNWLSRFGGSGWEWCEPRRQYYYHSFLVEQPDLNWRNPDVRAAIADAMRFWLDRGVDGFRVDASAVLIKDELLRDNPPNPQAEGKPPPQRQTPVFTDDRPETMDCIEFIREVIDAYPGRMLCGEVQGKTDRIGHFYGNDRPRLHLPLNFALLDSQWDAPSLQATIDAYLSAIPDHAWPVWVIGGHDKQRIASKIGEPQMRVVAMLLMTLRGTPFFFMGDEIGRKRVPIPSDRVRDPFEKLVPGYGLCRDPERAPMRWDDSRDGGFTTGHPWLPLEPPDGAANVAVQQRDERSILALFRGLMALRHEHAGLRCGAYEPLRSQNDVLAYKRIDGRNEILVALNIAAEPRKLHWQGRGRLVMSTHLDRPSGPSADASILLRGNEGVIIALEPR

SEQ ID NO: 10030 - protein, 189 aa, BradyrhizobiumColbertium
MFHFSNIVRTKGDPKIVEGGPSLKQSADQLARALGWFSIGLGAFELFAPRRVTEAVGMEGHETLVRAFGVREILAGVMSLSVDKNAGLWARVGGDGLDAAALLSGLTADNPKKGNIALALLMVGGIAVLDYRAAQDTKPRRPARDARRKLYPNRSGFPKGIENARTAARQIAAHAGRSEVKQGDERRVP

SEQ ID NO: 10031 - protein, 391 aa, BradyrhizobiumColbertium
MKALVWHGKEDIRCDTVTDPEIQDPRDAIIKVTSCAICGSDLHLFHNFIPGMLPGDIMGHETMGEVVEVGSGVNGKLKKGDRVVVPFTIICGECDQCKRGNFSVCETTNRKRHLADKVFGHTTAGLFGYTHLTGGYPGGQAEYLRVPFADATHIKVPAGIPDEQLLFLSDIFPTGWQAAVQCDIEPTDTVAIWGCGPVGQMAIRSALLLGANQVIAIDCLPERLSMAEAGGATTINFETESVVERLQELTDGKGPEKCIDCVGMESHVMPSLPDTLLDRAKQMVMAESDRPHVLREMIYVCRPGGIISVAGVYSGLSDMLPMGAFMNKGLTMRTGQTHVNRWTDDLLRRIEEGEIDPSFVITHTVPLSQGPEMYQVFRDKRDSCVKVVLKP

SEQ ID NO: 10032 - protein, 260 aa, BradyrhizobiumColbertium
MPANQLAIVTGASTGIGLELARCCAQAGFNLVVAADEPQIERVAVDLRRLGGSVEPVEADLATTEGVDKLCAAVGDRPIDALLANAGVGLGKAFLDQDFARVKHLIDTNITGTLYLIHRVGNGMLRRNAGRILITGSIAGFMPGSFQAAYNGSKAFLDSFSFALREELRDSGVTVTCLMPGPTETEFFRRAEMMDTKVGTEKKDGAYDVAKVGFDAMMRGQADVVAGMKNKIQTTVANVTPNEMLAKQHRKMAEPGTAKS

SEQ ID NO: 10033 - protein, 131 aa, BradyrhizobiumColbertium
MTAWSHRGAPLAGRRIFVVEDEYFLVDDIGKTFRAMGAEIAGPFGDFEDALRVLRDGSVLDAAVLDVNIRSEMVFPIARELRARNVPFVFTTGYDKVALGPEFQDVPLMEKPIDLPAMAQKLTGLIAEPRV

SEQ ID NO: 10034 - protein, 335 aa, BradyrhizobiumColbertium
MSNRDIIVIGGSAGATAPLKQILGRLPADLPAAVFVVLHIPAQGIGILSTVASRAGPLPVRQAQNGMKIAPGRIYLAAPDHHLLLSGDHIFLGRGPRENMVRPAIDALFRSAALYHGPRVIGVLLSGLLSDGAAGLNAIKRCGGMAVEKDPADAISEEMPRCAMEATTVDLCVPGATMGDVLSELVREPAGAALAIPPEIRLEVEIAAGERIGSDNLVAVADPVGLTCPACGGVLSKVKDARPMRFRCQVGHGFTADALAKEQEGRVDEALRVALRIIEERAELVQRMAADGRRSGRAAVAEMYEARAVEYREYADMIRRVVLKSLDRPNGEREA

SEQ ID NO: 10035 - protein, 88 aa, BradyrhizobiumColbertium
MAVSLAERTAQLEAERGLLVKADQDIEEGWRRIHDQEDRVRELMAGGHDTCQAERLVSLLKQTVVEWERHRVLIAERVEYLRQEVAAG

SEQ ID NO: 10036 - protein, 47 aa, BradyrhizobiumColbertium
MPRPNSPALAEEPAMPIWEELADLIRRADRANADASRLLAENERWRQ

SEQ ID NO: 10037 - protein, 1056 aa, BradyrhizobiumColbertium
MHDVGDQPVQGERQIKTPLIIGVGASPGALDSIERFFSRLTIGSDQAIVLALQNHEAFNERQLREIVQASNGGKLTDISDGHPIEGGSVYLCPPSMITTIQSNRFALRKAEQAPGERATIDSFLVSLAEERAEQSIGVVLAGTGGDGTLGTAALKDHGGLAIAEKVAGLDEPEHLRDGNTPAAIADYVLPPEDIPEHIQVYARHLRRLDEKQGFDEVLATAATSLFRIADILRSRTGNDFHGYKQNTFLRRVQRRMQVVRIDDIAAYADFLRNDNDEAQHLFNDLLIGVTEFFRDKREFEVLEDQIIPKIFEGKGAGQQVRVWVLGCATGEEAYSIAILLREHMARMDSVPQVQVFATDIDGRALATARVGRYRTNIEADMTGERLTRWFVREGDTYSVVKELREMCIFSQHNVIKDAPFSRLDLVSCRNLLIYLNAEFQNRVIPLFHFALLPERYLFLGNSENVTRHPKLFAPVDRRARIFKKLETGTRLPPEFPITTAAGRVPVEVPAIRSFGSDVGLERRAQRIAERYALAYVITDDNFQVQHFSGRTGRYIEPMAGAATLDLLQLVHRDLRLELRTALCSAAETNEPAHAEQVQLGVNGQRLLVDITVEPIQDGGGDQRNFVVLFKEGPVRSVEADQSGTNALVRTEQVERLENDLRATRERLQATIEELESTNEELKSSNEEYQSLNEELQSANEELETSREELQSVNEELTTVNGELAHRVQELTRATSDLKNFLESTQIATVFLDNDLRVMNFTPAITQILHLVETDTGRPVGHIKARVPIEELYDDIRRVLRTLASVERELSAPDSGTRYIVRILPYRSIDNFIAGVVLTFIDVTAITRAEERQRLLLAELQHRVRNTLGVVRSIARRSAETSSTVEEYASHLDGRLNAFARTQALVTRDPEGGVDLEYLVIEELLAYNAREGEQMRVSGPKVRFQPKAAETFALAVHELATNALKYGALSQPSGRIEVTWRVDESIEPAELLFEWRERGGPPVSPRPRKGFGTELLERTLAFELKGQTTMVFNPLGLQCTIAIPLSKRAFHTPVVAL

SEQ ID NO: 10038 - protein, 252 aa, BradyrhizobiumColbertium
MPLSTADRSVLEPVVRRLGALRTLSTEARASLELAVLDGLQRAGSGEDLVTESDPVDSVRVLLSGWLGRYKMLEDGRRQIVNFIFPGESCDAHAYLLGEMDHSIMTLTPVVYAEIKRARFESLLAKNPTLSEAFWCETLLNNAIQREWAINLGRRVALERVANLFCEIFERLRPVGMIDRNSCIMPVTQMDLADATGLSVVHLNRTLQELRGAGLIVLRERTLTIPDLDALKNAALYSPSYLRLYRGAEMTR

SEQ ID NO: 10039 - protein, 66 aa, BradyrhizobiumColbertium
MAKQIHFPLQSDEKHVEQVRDAIREARKALELPLPDTFLGRRTHEPLPNGQGDDHQESSVAKRGDV

SEQ ID NO: 10040 - protein, 60 aa, BradyrhizobiumColbertium
MPDALFARSARAIEESRSLREQHRRDADHYRETVNDLRLAIMDSAMLRSELKAHRDNEKP

SEQ ID NO: 10041 - protein, 65 aa, BradyrhizobiumColbertium
MTRHRFKQVENLETRLAAEAERLREEAKALPPGAARDATLRKARQAETGSQMSEWLRSPGLQPPH

SEQ ID NO: 10042 - protein, 57 aa, BradyrhizobiumColbertium
MSKLKQLAKGNTPTGVMSIKLQRPVAAIRSKAQREGISLRPVNRSPYNRRTKAAKRR

SEQ ID NO: 10043 - protein, 51 aa, BradyrhizobiumColbertium
MFKNDLKEDHHGKSSMETAGLTDRPQGTAQGKSRVQASGAAALDSCGREQA

SEQ ID NO: 10044 - protein, 69 aa, BradyrhizobiumColbertium
MTAKRNRRKQTQSLQERLAAFAENARERARSLPPGREREMLLRRAKQNEVTSNLTEWLSGPVSPRRGRS

SEQ ID NO: 10045 - protein, 66 aa, BradyrhizobiumColbertium
MGSIKHYRAFQIDPDGHVFGCINLVCDDDEQAKREAAALVLVHRIELWRLDQRIAKFDAPQEIARQ

SEQ ID NO: 10046 - protein, 300 aa, BradyrhizobiumColbertium
MTGAPPLECLIVGGGPAGLMAAIYLARFRRSVCVVDAGASRAALIPRSHNVPGFVHGLSGTELIERMSAQLDDLAVVRVEAEVTALQRHRCGFEATWNGRVHQAATVVLACGIVDTHPPFAEWRAAVADGLLRYCPICDAFEAAGRRIGVVGPLDRAAGKALFLRGYARDVTLLATGADDPKAATSELSEAGVGIVFAPDLRLTRREGGVGADFADGRTAQFDIVYPAMGAEVRSQLATALGADHASDGHLKVDDHQRTSIEGLYGIGDVVTDLHQISVAFGHAANAACTIHNSLPRRLA

SEQ ID NO: 10047 - protein, 62 aa, BradyrhizobiumColbertium
MLEEKLKEAIVDELKRQAADRPQSLQVQGAADAKGSEELTVNGKIDLGALAMVIAGSVAGGP

SEQ ID NO: 10048 - protein, 312 aa, BradyrhizobiumColbertium
MIGFLIFPEFQLLDAAGPISVFEIARRHTRNAPRVINVAAKAGAVRSSSGTEMLARSLRSASSVTTLFVAGGEGVEAAARCKATIAFIQRLARRGVRMASVCSGAYLLAEAGVLDGRCATTHWSCTRDFIGRYPKVRLEPDQIFTRDGGVWTSAGITAGIDLALAMIAEDHGEEISQATARQLVLYHRRSGGQSQFSSLLELKTPNGRFGSLLSWMRENLDAPLTVETLAERAGLSSRHFVRSFIAETGSTPTKAVERLRVEVARERVQSSGETIERVARSTGFRDPERMRRAFIRAFGQPPQSLRRSARML

SEQ ID NO: 10049 - protein, 227 aa, BradyrhizobiumColbertium
MSDPLQIGLLVFPRVTQLDLTGPAQVFSSLPDATVHLIWKRIEPVPSDSVIALTPTVTFADCAQLDVICVPGGYGTDELMLDEEVLAFLRRQAGRAQYVTSVCTGSLVLGAAGLLEGYRAATHWTATDALPFFGAEVSRERVCIDRNRITGGGITAGIDFALTLVSMLRGRAAAELIQLRMEYNPAPPFQAGSPETAPAAIVAAMKERVAPAQARRLELVRKAIRQE

SEQ ID NO: 10050 - protein, 421 aa, BradyrhizobiumColbertium
MVDRAGASRSWHNRLCRSAFGFILALGPVAFAERGQAADFSGGAIRIGIINDQAGPLSDLAGPGSVVAAKMAVEDFQKAAPGLKVDIIVADHQNKPDIGAQIVRKWFDVDGIDMVADVGNSAVALAIQSIARDKNKIVIYSAVGTTDIGGKQCARTGLMWLHDNYNLVAGSVRKLVSQGYDSWFFIASDYAFGRNMVDVSQRVLAATGAKSLGAVFHPLGNADYSSFLLQAQASKAKVVAFANAGEQLVTSMKQWNEFGMHTGPQKAVAELMFLTDVHAMGAETAKGLTTVTAWYWALNEATRAFAQRFYKLHNAMPTAPQAAVYSAVLQYLRAAAAAGTDETNAVLEKMRSMPVDDFYAPGARLRADNKLVHDFHLVEVRKPADVKAPWDYYDVVETIRAEDAYLPLDQSECPLLKTSQK

SEQ ID NO: 10051 - protein, 85 aa, BradyrhizobiumColbertium
MPKKGITGHDDWVLTEALATALVALEQLEPKHQPNAHMEDIRKLLANGKEPAAVSLHLAQAKCRLFPELDPLQIYREYGIGEEYG

SEQ ID NO: 10052 - protein, 124 aa, BradyrhizobiumColbertium
MVFLSFVYRFLTNFAFMAVVYFSLNFMEKYPNRAILAILVLVYAAMRSASTLRAFYFFQKIEKLEAETRRLQAPINDGSCGTMTRKQVVADVARLRRDGELKSYMDLFFLALIVLLCVAAILRQ

SEQ ID NO: 10053 - protein, 384 aa, BradyrhizobiumColbertium
MQYRETLPLKDHEVVLTFDDGPIPKYSNQVLKILADECIKATFFIVGNQAKANPEGVRKLVAAGHTVGTHSMDHPLTFDRMPIEKAEAEINGGIEWTSAAMTDPSQLAPFFRIPGLMRAEGVENHLISRGIQVWSADFPADDWRHVSSDRVYQLAIQRLEAKGKGILLLHDIQARTVAALPKIIRDLKARGYRIVHVVPATPDRPATPTTQVEWLLRPPTETTPIARWPRVPHFVFTETRMLPAPVLADLNARAEHQPLLPRRTMAQANVAATLPVPGRALFAIPEGSVEVLLSTTLSRRAATRLATAAQAFHAAKDKAAQGKPAKKPQLRRTAHAAPVATDHAAQPLDIAPKSADTKSGGPKGAASKGTAPRPTRVASLKKRA

SEQ ID NO: 10054 - protein, 38 aa, BradyrhizobiumColbertium
MLQVCGLPTVDQTKAVGYRWRDWLDMLDMGLVSFSAPI

SEQ ID NO: 10055 - protein, 330 aa, BradyrhizobiumColbertium
MITLFIDTNVLLSFYHLTSEDIEELKKLVALVKNKEIDLIVPKQVEDEFWRNRGGKISDAMKKLREARFNASFPAFSKDYDEYNELRALLKKADKLHAELVSKIMADAKDTSLKADEIVTGLFKTANKPRFDNDDYLNAMRRVRLGNPPGKNESLGDAVNWETLLATVDKGNALYFVSEDKDYRSQLSEGVFNEFLRDEWESRKKSSLIYYSKISDFFKDCFPDIKIASQVEADLAINSLSNSGSFASTHVHIGKLDTFDQFTIAQVERLIKIPGQNNQVGWIIDDTDVHRFYAKLLDKYGGGLKDDDHDLLEELVEKGKPEPDEDDPLS

SEQ ID NO: 10056 - protein, 114 aa, BradyrhizobiumColbertium
MTTSDTDVPEPTPEQAALFARVRRMMLIAGLTTALAFCAVLIAVGYRLFKSEGRAVEAGGDVTATLPKGARIVSTGVAGDRLVVTLDLGGVTEIRTFDAHTLKPAGKLKFANEP

SEQ ID NO: 10057 - protein, 326 aa, BradyrhizobiumColbertium
MEVVVVGDEGSARLDRVLAARLTELSRSRLKALILAGAVHLKASAVRDPAYHVSPGDTIIIDVPQAAPAEPRGEDIALDIVFEDDDIVVLNKPKGLVVHPAAGHETGTLVNALIAHCGASLSGIGGVRRPGIVHRLDKDTTGLMVVAKNDLAHASLSAQFADHGRTGEMRRGYMAFAWGVPNRHRGTVDAPIDRHPHAREKMAVRQGGREAVTHWEILESFAGRDGKPVASLLACELETGRTHQIRVHLAHIGHPLMGDAVYGPHFKTKANQLGPESQAALAALGRQALHAYLLVLEHPRTGELLHWEAPLPEDLLLLQRALQAAQ

SEQ ID NO: 10058 - protein, 299 aa, BradyrhizobiumColbertium
MARTAALPVLNGESGLSRYLAEIRKFPMLEPQQEYMLAKRWREHDDRDAAHQLVTSHLRLVAKIAMGYRGYGLPISEVVSEGNVGLMQAVKRFEPDKGFRLATYAMWWIKASIQEYILRSWSLVKMGTTANQKKLFFNLRKAKSKINALDEGDLRPDQVKMIAKRLGVTDQDVIDMNRRLGGDASLNAPIRDDGEAGEWQDWLVDNTPNQEAMMAEHEEYDHRRDALNGAMGVLNPRERRIFEARRLADEPMTLEDLAAEFGVSRERVRQIEVRAFEKVQSAVKGTIARQEQAALEAAH

SEQ ID NO: 10059 - protein, 206 aa, BradyrhizobiumColbertium
MMSRLAAAVFAALLVAPAAAVEAELAKLARASGTPDIPGLNIVWLAPWGDVRNAHPWRNIIVHQTEGPAGSARGGAQAQAKNPTRRGVTVWVETDGTVYWAVAENHVPTHGDGANRNDNKYIDNKPTYRQVVRDNSIGVEFAGNYPDVATGPTEAQVAAWKILVKILRARYDIPLERVYAHNWVDYKDARYCEGCWLATLARMWGE

SEQ ID NO: 10060 - protein, 403 aa, BradyrhizobiumColbertium
MLSVPTLWTVIVINFLALGLIWAYVARAYPKFEAARYWTAAAVLAASGAGISMLREVMDPRFPLIVGGGLMIFSSWLACMGVARFYQRPVSWPAAIANSLLCSASLAFFLIAVDNMPMRVLTYSLGQSTPVVLTLPLLLSRQNGRENPGARLAAIVGMLLLSIHLVRSGAALLGYGGAVTAINFNGLQSVMILLLVFLAMAWNFACLLMAIERLRNEVADLALLDDLTGVANRRHLLQRLTEECARSERSGVPFSLLVIDLDGFKAINDTHGHAAGDACLKHFTLMAQTRLRPGDMLARTGGDEFCVVLPSSSLREGALIARRVLEACRQDAAGCTGSDIPIAISIGVAQWDCSIGESPDRLMANADHALYAAKKNGKNDFAVYDPAPPPLSPEAVEALRKFA

SEQ ID NO: 10061 - protein, 203 aa, BradyrhizobiumColbertium
MTLSFLLTSLIVVASPGTGVLYTLAAALTRGSRASVAAAFGCTLGIVPHMAAAILGLAAVLHTSALAFAVLKWCGVAYLLYMSWQALRETGALAVGGEIRERSSGRVIVTGVLINILNPKLSIFFLAFLPQFIAADEAHVLARMLELSGAFMVMTFAVFVLYGLCAASVREHVISRPRVMAWLRRSFAAGFAALGAKLALAEH

SEQ ID NO: 10062 - protein, 124 aa, BradyrhizobiumColbertium
MGQAEPFRATALIVEDDVMQREMLCVLLEESGYQVIQCESAEAAERVLDKSAGALCLMLTDVQLAGRMNGVELAHVAKHRNPKLDVVVTSGRPLKQPLPDGAKFWAKPWAPLDVLREAEIAQLS

SEQ ID NO: 10063 - protein, 276 aa, BradyrhizobiumColbertium
MTTIRGAAAITGAASGIGRALAIELAQRGCDLALADRDEAGLKALAAEIGTTRKVSVHRVDVSEPADIAQFASEATTAHPALGIVVNNAGVALMGSFEEIDQAQMDWLFDINFWGVVHGTRAFLPHLKTQAEGHIVNLSSIFGMIAPPGQSAYAAAKFAVRGFSESVRHELAMAGSPIKLSVVHPGGVATAIARNARTGIGVTDNARRAQSIERFENAAKTSPKDAALRIIRGIERNEPRILIGNDARFMDLLQRFRPGTYWAPLQRRLEKMAKGT

SEQ ID NO: 10064 - protein, 267 aa, BradyrhizobiumColbertium
MSRLLLAAAFVVLAGGPAQAARCGGDFNSFIASMAQEAQAAGVSAGVTSAALSGVTVDPAVLAFDRRQRYTFNKTFEQYVSTRVGAGRINGGRAMLQRHAALLSRIEQKFGVPRYILVAIWGLESDFGKGDTGKLPVIRTLATLAHDCRRTDLFQGELLAALKIVQRGDLQLRDLIGAYAGEIGQTQFLPSSYIKYGVDFDGDGHVDLRHSIPDVLASTANLLHTSGFKMGQPYGEGTPNFEAMREWNRAVVYRKTIGYFADRLMGQ

SEQ ID NO: 10065 - protein, 175 aa, BradyrhizobiumColbertium
MTGITFTAEQIRNAPAPVRQWIEQEVIAALGLASRPPAATPPQTAHLVACSVEDMAGVLEHIRGVLPAVNVLFELGRPGINIGRPAVMTFRLLDILHHTRLADVGQVITCLEMINQALTEVKKDASVRFCGFDNEGHCLIAPQTQESIATLWQTMMERQQAAQASEAGNRVAPAA

SEQ ID NO: 10066 - protein, 114 aa, BradyrhizobiumColbertium
MSNHQPPQAPRPALLRIPLFRLLAINLAIGACAAALLVGGLLWLNPGHLRELIFADSAPGVALILLLASFLITFGSAAMGSAIMAQGRNENGDKGGGHGSRLAVQEVAQRPHTH

SEQ ID NO: 10067 - protein, 78 aa, BradyrhizobiumColbertium
MAKKPGTNPKGEFAFFNVVYEDDSQRSNRRVPAELLGGLDGDEPARGFIMEQDREIAEKSGRPPLEIKRLERVGTKKK

SEQ ID NO: 10068 - protein, 712 aa, BradyrhizobiumColbertium
MATKAKTLQAKDKEKDDKAADAPEKDSQDAPSPLLDLSDAAVKKMIKQAKKRGFVTFDQLNEVLPSDQTSPEQIEDIMSMLSDMGINVTEADDSEGEEEKDEGDDDTDNELVEVTQKAVTEVKKSEPGERTDDPVRMYLREMGTVELLSREGEIAIAKRIEAGREAMIAGLCESPLTFQAIIIWRDELNEGKIFLRDIIDLEATYAGPDAKGGMNTAMIAGPNGEASADGDAAPTAGAPAHVAPPAAPPSPTPFRAAPAGGADAVEEKDPGEAAAESDMDDDEFENQMSLAAIEAELKPKVVEIFDRIADSYKKLRKLQEQDIQNQLDSSSHGPSLSPPQERKYRKLKDEIIVEVKSLRLNQARIDSLVEQLYDINKRLVSHEGRLMRLADSHGVAREDFLRNYTGSELDPRWLNRVSKLSAKGWKNFVHHEKDRIKELRHEVHQLAALTGLEIVEFRKIVHSVQKGEREARQAKKEMVEANLRLVISIAKKYTNRGLQFLDLIQEGNIGLMKAVDKFEYRRGYKFSTYATWWIRQAITRSIADQARTIRIPVHMIETINKIVRTSRQMLNEIGREPTPEELAEKLGMPLEKVRKVLKIAKEPLSLETPVGDEEDSHLGDFIEDKNAILPIDAAIQSNLRETTTRVLASLTPREERVLRMRFGIGMNTDHTLEEVGQQFSVTRERIRQIEAKALRKLKHPSRSRKLRSFLDN

SEQ ID NO: 10069 - protein, 667 aa, BradyrhizobiumColbertium
MRFTPQFLDELRARLSVSEVVGKRVKLKKAGREWRGLSPFQQEKTPSFYVNDQKGFYHDFSSGKHGDIITFVMETDGVPFAEAVERLAGMAGLPLPAVTPDAARYEQRRKSLHDVLDLAAKFFAETLASRVGAKARGYLADRAISPATQLQFRLGYAPSDRFALKEHLGKLGISVDDMVETGLLVAGNDIPVPYDRFRDRVMFPITDLRGRVIAFGGRALEKDVPAKYLNSPETPLFHKGDNLYNHQTARKATHDGSPLIVVEGYVDVIAMVTAGFAGSVAPLGTALTESQLALLWKMADEPILCFDGDRAGQKAAYRAADLALPFLAPGKSLRFALLPEGQDPDDLVRSGGRGAIEEVIAAARPLADMIWSRELEGGNFATPERRAALEARIRELTNGIRDEVVRRYYRDEFVERLQRTFAPEGGRSGFGGRGNFRQGGGRSFQPRGGANRFGGQGFGGGRRGVSGSIPLPSGPYQAASPQLAASPIMRGQRSAISRREALILQCLINHPWLLHEHLEEVAALELAHPEAHKLRAGIIAAFANDHHHSSDPGEQAEKMRSDIEKGGFSQVLQRVENGITTAAVWGAREGAARDDVLATWHQLVALHRQWHSLLRELKDAELALGEDPSEANLAWLRDVKARISEVDGTEALIEGFGELSGRLQKSM

SEQ ID NO: 10070 - protein, 167 aa, BradyrhizobiumColbertium
MTGEPLPFMPALSVTDSEAVSLPLVPSRNAWRLVGVPSSLRYTERAEKQQLVAVQAGLGRPEATSAALIPIRKSAAWWELTQEERRRIFEDKSHHIASSMRFLPAIARQLYHCRDLGGPFDFLTWFEFAPAHASLFEELVAMLRRTEEWTYVEREVDVRAVKEVLSA

SEQ ID NO: 10071 - protein, 132 aa, BradyrhizobiumColbertium
MTSDRLFVYGTLMRGFDHPMARLLAGHADFLGEATCRGRLVLVKHYPGLLLSDAPSDVVHGELFRLRVPDELLRELDMYEACGEGFPEPTEYLRQLVDVTRADGATERAWTYVYNWPVTALPIIESGRFLEH

SEQ ID NO: 10072 - protein, 263 aa, BradyrhizobiumColbertium
MALEAAEAADQLLGEGDIPPVHEVNAEGTSPFLLTSDHYGRVLPRALGDLGVAESELVRHIAWDIGIAGVAERLARMLDAHLIAQRYSRLVIDCNRPPGVASSIPVISEATAIPRNEGISEQEREARRREIFEPYHRRIGAAISRRIHDKRPTVLISLHSFTPVYAGIARPWHIGTLYHRDPVLPRLLLKHLRAEGDIVVGDNEPYAVSDLTDYTIPVHGEARGLVNTGIEIRQDLITDQSAQQQWSERLARILAEIEAELPL

SEQ ID NO: 10073 - protein, 206 aa, BradyrhizobiumColbertium
MMSMQAYFAFVAACIALALLPGPIVTLVIANGLRHGTRAALINVAGAQAGLAIVIGIVAIGLTSLMATMGYWFDWVRFAGAAYLIWLGIKLIWAPVEGVDVDAPPPPPRGGFFLQGFLVLLSNPKVLVFFGAFIPQFMDMNQPHFPQVALLGATFMVTAVVTDALYALAAGRARKFFSARRTRMLSRISGGFMIGGGIWLALTRAK

SEQ ID NO: 10074 - protein, 104 aa, BradyrhizobiumColbertium
MDEVFKALADASRRSLLDRLHARNGQTLNELCEGLDMTRQAVTKHLVILEEANLVTTIRHGREKLHYLNPVPIHQIGERWIRKFERGKLSALSELKRQLEKRDE

SEQ ID NO: 10075 - protein, 170 aa, BradyrhizobiumColbertium
MNLDQFKPLTVYTIYIASTPEKVWEALTSAEFSREYFSGFAVEMEPKLGGTFIVREPDGSEHISGEVFEYDPPRKLTVTWNVNWPGLVEKLGITVVTYEIEPAGEAVRLTLSQRHDRPLSEDILSGGRTGWPAILSGLKSLLETGKAPKIEMSPPVRLLEALKAMGIKMP

SEQ ID NO: 10076 - protein, 258 aa, BradyrhizobiumColbertium
MSISGKVDPVVRPLAATDIAEALVEGLRDFQALPIYGVCFGGLYAAGGIAILLCLTAFGMVYLVYPLAAGFALIGPFVAIGLYEVSRRRERGEPVSFAAIWSAIRSRSEIGWMAFVTLFVFVVWMYQVRLLIALLLGLNASFSSLQEFMTVVLTTNEGLLFLGIGNAVGAVLSLILFSLTVVSFPLLLDRDVDFVTAMVTSVRAVVTSPVPMISWAAVIVMLLIVSALPYFLGLIVTLPVLGHATWHLYRRLVAPLPA

SEQ ID NO: 10077 - protein, 743 aa, BradyrhizobiumColbertium
MSLRTRLLILVIAAMLVPAILVGLRFVQNRASEIDAALANLVASADDIASDLDEKIQGTAQLHYGLARARDLDTRDKAACSAFLSDVREEYPQFTGILTIDPDGKLFCDSLRTDRTLDLNDRGYFKQVKNLQGGVAVEPVFGRLTGLSVLQIAYPVRSEAGALKFVLLASFNLNKFAEFHDKRLLAEQDILLIDAKGTVLVAPKGGSWSEPVGGSIAGSDLFRFAAAADREPFHEASDREGRTQIWSVARSPSIRKAGLYILVGRSKDGLVAAANRRLYEDVAILAVASLLLLAGLWILTTLSIGRQVGRLAAMARSLGRGDLSARIPEPHPGGELGGLMTLLNSTAESLEQQRTAIADLSHKLSQSQKMEAMGQLTGGVAHDFNNLLTVILGNAEHLADRLAGNKELQGIAGDIATAAERGADLTKSLLAFARKQPLRPRDIDIAEEVLGMEQLLRRTLGEHIECRFAFDQDLWPVSVDPGQLTTALLNLVLNARDAMPEGGKLTVELRNSSLGESDLDVNGEPRPGDYVMVAVTDTGSGMNSEVASRAFEPFFTTKEVGKGTGLGLSMVYGFAQQSGGLVQMQSEPGQGSVVRLFFPRVAAAQNENPTPTEPFNTSDGRETILLVEDDEMVRAYVESELKTLGYRVIATSNGSAALAVLRQPDEIHLLFTDVVMPGGMFGPELARQATGLRPGLKVLFTSGYSQDPVRTPDGIGDALILNKPFRRKDLAAMLRAALSEPSR

SEQ ID NO: 10078 - protein, 147 aa, BradyrhizobiumColbertium
MRLIDIVLLLNTLWFVGAFIQFSIAQTNTLKILLPREERSNPIAPTLAASVAFLGGMNLPIGLLSLYLLVARPSFFQPVEAQLALFLFFAACHFSQFAYNVPVLMRGGRVGVAYWPVLKGPMLRIFVVDAALFAANLAVALQLAIGS

SEQ ID NO: 10079 - protein, 122 aa, BradyrhizobiumColbertium
MSGQAMNRAAAERFVAAWCASWCRVDIDAVVAHFAENAQMRSPLALTLTGCPSVIGAESIRAYWRKAYGHVESADLKILSWSWDEAIARLTVWWQLGDTRASEFMDFDDAGRVVRSEAFYGK

SEQ ID NO: 10080 - protein, 155 aa, BradyrhizobiumColbertium
MAKTSHATGLHRASLAKLNELDAALELMYYGWRGMTLEADAYLAKQGLSRPHHRILYVVARRPDIAIGALIEILGISKQAVNRPLNLLLERKLLTSKRSPEQHRSKLLRLTEAGRRVEQRASDHERNVMREAFDRVGASGAAGWMGVMEAIADNN

SEQ ID NO: 10081 - protein, 536 aa, BradyrhizobiumColbertium
MLIEAKTYDELYRNFRWDVPARFNIAEACCDRHADGTGRLALIYADENGATTRTSFDEMAEMSRRFANVLKADGLHRGDRVAVFLSQSLELPIAHMAAFRSGMISIPLFALFGEDALEFRLSNSQAKAIVTDEGGWQKLARIRDRLPDLKNVYVVGGRAPPGTKSFWDALNTASPDFPRVDTSCDDPALIIYTSGTTGNPKGALHAHRVVLGHLPNVEMCHNFLPKPGDLMWTPADWAWIGGLVNGLLAFWYHGIPLVGHRARKFEPQAAMQMMADLGVRNVFLPPTALKLMRQAGVKHTGVKLRSIFTGGESLGGELLGWVRETFGIDAHEVFGQTECNLVIGSNSNLFPIRPGSMGKATPGFDVRIVNEKGEELPRGQRGIIGVRQPCPVTMLEYWRNPEATAKKYAGDFLLTGDLGVQDEDGYFWYVSREDDVITTAGYRVGPSEIEHTLMKHPSVAMAAVVGIPDPIRTESIKAWIVLRPGFAGSDALSREIQEFVKVQLAAHEYPRFVEFTETLPMTATGKVLRRELRARG

SEQ ID NO: 10082 - protein, 378 aa, BradyrhizobiumColbertium
MTAIKPFRIAISDDVLADLKSRLARTRWPEAELVDDWSQGAPLRWIQEMCSYWAKDYDWRAREAKMNRFEQFTTEIDGLDIHFIHVRSKEPSALPLIITHGWPGSIVEFQKVIAPLVDPAAHGGSPANAFHVICPSLPGFGFSAKPKTTGWGVDRIAATWAKLMARLGYARYGAQGGDWGSAVTSSLGAQDAEHCAGIHITLAFSVAPKVEGEPTAEEKRALAGLKHYADLDSGYSKQQSTRPQTLGYGLTDSPSGQAAWILEKYWAWTDCNGHPENILTRDELLDNVMLYWATATATSSARLYWESFGKRRATPVVKVPTGVAVFPKEIVTPVRRWMEPNFPNITHWSEMEKGGHFAAFEQPELFIRDVRTFFATVR

SEQ ID NO: 10083 - protein, 151 aa, BradyrhizobiumColbertium
MLRDDINNAVKEAMKAKDERKLSTLRMVNSTIKNADIDARGSGKPPLSDAEILAVLQKMIKQRQEAVELYDKGGRAELAAQEREEIAVISTYLPQQMSDDDVKKAITDAIAETGASGMKDMGKVIAALRAKYAGQMDFGKASGLVKAALSS

SEQ ID NO: 10084 - protein, 242 aa, BradyrhizobiumColbertium
MDRTTPIVLVPGLASSARIYAPVIPALWRFGPVTVANHIRDDSMAAIAGRILADAPPRFALAGHSMGGYIAFEIIRQAGERVTKLALINTQARPDTPEAPARRRGLMERARRGELRAIREESFPELVHPSRRDDADILELVHAQDDDVGVEGYLRQQTAIIARVDSRPTLSTITCPTLVLTGDADNTIPNALSKEMAEGIAGARLVILDRCGHLPQAEQPEATVRALIEWLGSEVVSGARTA

SEQ ID NO: 10085 - protein, 396 aa, BradyrhizobiumColbertium
MTQHDNDTAWPDHKPTALLVLADGTVLEGFGLGAEGHAVGEVCFNTAMTGYEEILTDPSYAGQLITFTFPHIGNVGTNDEDIETVNMAATPGARGVILRTAITDPSNYRATKHLDAWLKARGIIGLSGIDTRALTALIRSKGMPNAVIAHSRTGEFDLHGLKEEAREWPGLEGMDLVPMVTSGQRFTWDETPWLWDKGFGRQDKPEFNVVAIDYGIKRNILRLLAGVGCKVTVVPATTSSEDILAMKPDGVFLSNGPGDPAATGKYAVPVIQDVIKSGTPTFGICLGHQMLGLAVGAKTKKMHQGHHGANHPVKDETTGKVEITSMNHGFAVDETTLPKGATQTHISLFDGSNCGIQLDGKPVFSVQYHPEASPGPRDSHYLFQRFADLMRQKKSA

SEQ ID NO: 10086 - protein, 71 aa, BradyrhizobiumColbertium
MYASDVAQRHFSAAVDEAETAGLGHEAVCRALLNLVISKYLETRSVADIQAELRFIAENCDPDTDFMFMRP

SEQ ID NO: 10087 - protein, 173 aa, BradyrhizobiumColbertium
MSVVRDKAEPLAIVFEDDGLVPNNILPFLVYQRAVKLDPGRPEETIEDLFEANGWGGTWRNGVYDYLHYHATVHEALGVARGSARVRFGGDHGQELHITAGDVAILPAGTGHQCVQASDDFCVIGAYPPGAKMEITQATAENHARALKTIPEVALPPADPVTGKDGALMRLWR

SEQ ID NO: 10088 - protein, 238 aa, BradyrhizobiumColbertium
MSARSEPSGTLRVAASLPIGLHVIAPALPAFRKRHPKVTVDLRLTDRIVDIIEEGIDVAIRIGDLADSRLLSRSLAPYRLCCFASPAYLAARGAPQHPDDLAGHDLVNLRYQNTGQSFWWPFQIGGEEIELAPTAGIVIDVSDAVAVTLAAGGGIGISATFIAAPYVERGALVPVLAAFAVERHNITAVWPESRRANPAVRAFLDLLQDVFQERLTATASLSEEGRHAAGPQATANGS

SEQ ID NO: 10089 - protein, 48 aa, BradyrhizobiumColbertium
MVIHDCEEQAERLDGSRRSLFCGLLGSGVLFAKLSGDLPSHLGLVKAM

SEQ ID NO: 10090 - protein, 463 aa, BradyrhizobiumColbertium
MLGMAQTSLDREAELRRLQVELDERRRDVVARERAAERATSDEKGWAEAWAAECRGCWLGEGPETPAVGAVREVLAAITELSPTIEKRAALLDRIHKMERDQLAFSEEVAALTGLLGIEPGPDAVLELAQRVVETVRSATAARDQRSSLTQRTGEAQARQRELAESQAVHDEQKQRMTAFFAVGSLEEVSRKLSDIERRTDLMNQAREAEKDIIEALRASDIQRAEAALDQADRPALEAELTELTTRAEDQDKRCHELFAAKSAAEDRVEAIGGDARVAIIEERRRTTLLEIEDGATRYLQLRAGISATQQALASYRERHRSSMMARASEAFRTISRGAYTGLIAQPGKDGDTLIAISAEGGSKAADKLSKGTRFQLYLALRVAGYHEFARARSSVPFVADDIMETFDDFRAEEAFRLFAEMAQVGQVIYLTHHQHLCEIVQRVCPTARLHRLDEAEVRREVA

SEQ ID NO: 10091 - protein, 120 aa, BradyrhizobiumColbertium
MLASVSVGLLRAACPQACEMAGKEFRSWPELAAAAPVMRVMIGLSEAGWVDGAGRVGRYAAAAILATVLEKSARLPDQISSPGGYFRAMIDRAVEGQLHLEKSLFGLADGAFKRGAGGAQ

SEQ ID NO: 10092 - protein, 204 aa, BradyrhizobiumColbertium
MLIGYARVSKADGSQSLDLQHDDLRAAGVEQDNIYEDHASGGRDDRPGLAACLKSLRDGDVLVVWKLDRLGRSLAHLVNTVKDLSDRNIGLRVLTGKGAQIDTTTASGRMVFGIFATLAEFERDLIRERTMAGLAAARARGRKGGRKFALTKAQVRLAQAAMAQRDTSVSDLCKELGIERVTLYRYVGPKGELRDYGKRVLGLA

SEQ ID NO: 10093 - protein, 133 aa, BradyrhizobiumColbertium
MQDRPELDAIAGHEAHCALDGGEVAEGGELIQQVEDRHGRLGGVARHVGQALRDEQTQPAGIGGEAIGRQDEEHRGVAALEIGKAEIGSAEDRDHAGAVEEMGMALRGREDAGRFPVGFAEVGSFAGGGEILR

SEQ ID NO: 10094 - protein, 129 aa, BradyrhizobiumColbertium
MTDTDAPEWPDPADKAHAVEQAKQLRDQAAKGGLRFEAYLPPSLALWLLDLIEQDTFHDPSEAVFVILGEHKELAPHADLRRELLKRRIQVAADDSRPGISMEEMKALLREKREAPLPEPARWEKRSRR

SEQ ID NO: 10095 - protein, 105 aa, BradyrhizobiumColbertium
MSKTYKSEALAAVHEMMEGFYESGAIDKQTMREFDEGCLTTVEPLTPEEIRSIRERERISQPVFARYLNVSKGLVSDWERGVKKPGGPALRLLTVIQKRGLEAIA

SEQ ID NO: 10096 - protein, 129 aa, BradyrhizobiumColbertium
MRVFKNSRFHKFARKEKISDAMLCEAVERAERGQIDADLGAGLIKQRVARPGAGKSGGFRTLVFFRAETRAVFAFGFAKSDMANLDDAEEAYLKKAAKLVLGFADAQMDAEVAAGRMFEVNCDEQDLQE

SEQ ID NO: 10097 - protein, 83 aa, BradyrhizobiumColbertium
MKAVGAQTTPPVAPIAESAPAPTPDRAEGKRYHAATRAGMKRVTVVVEPEEHRRVKRLSADTDRSIEDLMREALADLLAKHSA

SEQ ID NO: 10098 - protein, 126 aa, BradyrhizobiumColbertium
MIDTAPHSEAAAMAATRSSDMVLIPCRAGILDLRAIGSTAELVKLAQKPAFVVLNAVPPRATQLLADAREAVQVHGLEVAPVAFQQRAAFGHALTAGKTAPEYEPAGKASEEVSELLTWLRGQLLI

SEQ ID NO: 10099 - protein, 925 aa, BradyrhizobiumColbertium
MPAQRSTVVGVHVGFQDRRIDREGADVRVGAEPRQRGADGRRGEHRLRRVGVDQIQILDRQRAADRKGQAGVLSDAALRRVFIAGDGRGIVGPGDRNCDVLRHHGIIVVDHRDGVDLGDGLAFGQRLQHRIVIVEREGPADRPLRTGAGTLGHCRQCERADMRGSVGEAGEMRARRRRLHDEACGVSVREIWIVERDGAVRLERDRIILGHRAGRIRLVLDDRRHVVGALDIDVGSIDGDRERRADDAAVPVIDLHHIVEDQPLVLGKEVEEIVGNTVGPGGRPVVAVSSALNHGQRHLDGRDRRELLRGQRRGDVVALRIEILERLGRRELSAHDRPVRQIDVREGDRAGDDVQSFVARAHLLDQGAARCSNSRLVVRSRDRDGDRDEPGLGVDGEVGVDADHVGQRQGFAGREEVEDLVGNRVGPDCRAVVLVGGVGNDTDLDLRRRDALLLERGERARDVLLAGVLVDVVRRLREAHRHRRPVAEVLIDESDEAADCIGLGVAGGVGAFGQRERRLHIAAEVETLCNRLAGNADGRRRRDLGSILSRRTEVDECRDCSQAGSRLEHHVLTERRDRVGKIRGQLGVGVVVRELQREHVRDQLLHLRGHQRIGDRDVAAADLDHLAGLVDRGDRQQRDLVEQDVGAGRAVRLDQHLEARLRLRIAAAGGNDEVDLGQHRRAADAHGGDRRVDLHVAMLGGLAGDEGDGARNQAEQRGVARPVGVVDHLVQHHPRIRRQAEHGAVDEGDAERRIGPGRDHVALLDIVAVVQDHRHAVADRGRAAGKFGDVTDDLRGRGAGRGLGDLDMAGEGVDDVAGEVGAVRRGDRGTLVAPEIIVNHELTAVVGQHEIEAGALELAVEDQIGVGNNERTIRHMAMRLCDEGLGRKGVEMDIGGRVGTLAVQERRGVKFASVIQPGTVKRVKI

SEQ ID NO: 10100 - protein, 242 aa, BradyrhizobiumColbertium
METAARSCTFRAILVLCGLILLGSAAELRAGTLLSPGAGVLVRKSAEPFGVFVFAISSGGLQQKWSALKDRLDDDMVQLALCDGDRDNCASPAALKLLAIVDQARAREGRARLGETNRAINLAIHAVNDGTDDLWSSPLATFARGAGDCEDYAIAKLAALRLAGVPPEDLRIVVVRDIRAGEEHAVAAARLEDHWLMLDNRRMAMVKDDATRSYQPLFVLQQAAVMKYVEPVQASVAVAETR

SEQ ID NO: 10101 - protein, 399 aa, BradyrhizobiumColbertium
MSKSFSAFGLAMSAVVLTCLPAAAQTKVTNEGISATEIVVGTHQDLSGPIKGWGVPVANGMKMATEEINAAGGIHGRKIRLVVEDSGYDPKKAVLASQKLIERDKIFAMVGPMGSPTVLAAQDILFDAGVLQLFPLTAAEFTFKFDPAKPQERLKFNNLLPYVESTRAAVKYMMEWKGFKKPCIMHQDDEYGKNVLDGFNQQLTAMKAQPASITSYKRGASDFSAQIAKMKSDGCDLVVLGTVLRETIGAMSEAKKLGWDVTFLGATPTNVMEVPALGKEAVEGLYAASGFEIPYEDTAKGKVKDWLVNYKKMFNADANTQAIIGYNAMMTFAFYANKAGKDLTGQKMLEALESGEKFLDIFNSPPTKFSKTDHLANTITQVQQVKGGRWVLVKDNLVF

SEQ ID NO: 10102 - protein, 612 aa, BradyrhizobiumColbertium
MARPAVLTVADTIAKSFLRAAETRGDKPAIREKKFGIWQPTSWREWLEISKEIAYALHAIGFAPGDVASIIANAVPEWVHADMGILCAGGVSSGIYPTDSSSQVEYLVNDSRTKVIFAEDEEQLDKILTCRARCPSLQKIIVFDMEGLSGFTDDMVMSLDEFRALGRNHMVGREALWQEMIDSRSAGDLAILVYTSGTTGPPKGAMHANRSVTHQMRHANDFIPAREDEDRLIFLPLCHVAERIGGYYISVALGSVMNFAESPETVPDNLREVQPTVFLAVPRIWEKFYSAITIALKDATPLQQWVYRRAIGIGYRMVEYRLEGETPPLSLRIANRIAYQVAFRNIRRMIGLDRCRIAFTGAAPIAPELIRWYLALGIDIHEVYGQTENCGVATMMPAERTKLGSVGTAVPWGEVALSPEGEILIRGDFLFMGYLNQPEKTAETIDSRGWLHTGDVGTIDNEGFVRITDRMKDIIITSGGKNITPSEIENQLKFSPYISDAVVIGDKRPYLTCLVMIDQENVEKFAQDHDIPFTNYASLCRAREIQDLIGREIEQVNGNFARVETIKKFYLIERQLTPEDEELTPTMKLKRGFVNKRYAAEIEAMYRERAVA

SEQ ID NO: 10103 - protein, 262 aa, BradyrhizobiumColbertium
MDAATTPDIILKLSNIESYYGPIMAIRGISLAVPRGRIVTLLGANGAGKTTVLKTISGILDPQKGTIEFLGKPIQRMEADRIVRLGLSHVPEGREVFPFLSVRENLMMGAYPRKDRDGVAEDLERVYGYFPRLRERINQPAGQLSGGEQQMLAIGRALMNRPALLLLDEPSLGLSPLLVKEIFTIIRRVNEEQGMSILLVEQNAKVALETAHYGYVLEIGRIVMNDTCDRLMHSQDIQEFYLGAKEAGARGERRWKKKKTWR

SEQ ID NO: 10104 - protein, 252 aa, BradyrhizobiumColbertium
MSYFRAENLSLHFGGLKAVDAVSFAVERGEILSIIGPNGAGKSSIFNLISRIYRPTSGRIFFEDQDITEEPPYDIAKLGIARTFQNIELFENATVLSNLLVGRHRHSTTQLWQELLFLPSVRANEKVHRRRVEQVIEFLDLEPYRDKLISGLPYGVRKVIELARALCSEPKLILLDEPSSGLNVEETGDMSFWIRDMRSELGITVLMVEHDMSLVNRVSDRVIALNYGRVLAMGSPAEVQQHPDVVAAYLGA

SEQ ID NO: 10105 - protein, 383 aa, BradyrhizobiumColbertium
MRFLFKTDYEDDIKLFPHSGYVVSYGILLALLLVAPYALSSYLMSQLVFVCIYATVGVALLILTGFTGQASLGHAAFLAIGAYTAAYLQEYNVPFPVYFLAAGLLTGIIGAMVGFPALRLTGIYLVIATISFALIVEEILARWESVTHGNEGMRVKALSLLGVTVPRDSPTFYYLCLAVLVLTIVGTLNLLRSPTGRAFVAIRDSETAARSMGVNVALYKVKSFAISAAITGLAGVLFAHKLSFISPEMFTLQLSIEFIIVILIGGTFSLHGAVLGAIFIVMIDPFLTYLKDDMPGIIAGIAAAFGAGPATAGSIQSSVAAFASLNGLKGAIYGIIIVLFVLFEPLGLYGRWLKIKLFFQLFPLYKRATFKRQKIYVKSERNR

SEQ ID NO: 10106 - protein, 291 aa, BradyrhizobiumColbertium
MLDFVQQLVSGVALGCVYGLIALGFVLVYKATEVVNFAQGDLMMLGGFFAFTFIGMMGLNYWIGFAGAVAAMALFGMVAERVVVRPILGYPQFSIIMATIGLGYFLRSVAGMIWGTDDLKIDTPFSQGVLRMGSLVLAYDKLSVIAATMILCTLLWLFFNKTVLGTAMRASSENMLAAYYMGIPVKRVVSVVWAISAAVATCAGVLLAPITFIHSNVGLVLGLKAFPAAVLGGFGSIPGAVVGGVLIGVIESMAGFYLPEGWKDVAPYVVLLTVLLLKPEGLFGLHVRKKV

SEQ ID NO: 10107 - protein, 249 aa, BradyrhizobiumColbertium
MKPDHAALEVRGLTKRFDRLAVDGLDLTIHAGEFYALVGPNGAGKTTTLRMVAGLLRPDAGAVSIFGIDALADPVAAKQAMAWVSDEPMIYDKLSPLEYLEFVAGLWGIAPSVSEPVAQELLNSLGLEAHRHERCEGFSKGMRQKVALAGALVHDPRLIILDEPLTGLDAVSARHVKGLLGERVRAGCTVIMTTHILEVAERMADRIGVIASGRLVAEGTLTELRQQNGHADTSLEDLFIALVTLQAAA

SEQ ID NO: 10108 - protein, 508 aa, BradyrhizobiumColbertium
MSSATALSWFARHELRLAWREWFAMMTGGRRKRTRAAVIGLLCFAALLHLPAWAVIGRFADLQLPLDKSALIVITATIFLAWTLMLSQAIESVTRVFYARADLDLIMSSPATLANLFSVRIAAIALTVTVLALLFSTPFIDVLVLGGGARWLAAFGVVVAMGLSAAAIAIAVTILLFRLIGPARTRLIAQILAAIIGAGFVIALQVAAIMSYGTLSRFTMLTSGSLAAYAPDIDSIWWWPARAALGDSEALLLLLALALVLLGSVMAIFSHRFADTAIDAAAYGTSGRTRGKERPFRGGSRQQALRRKEFVLLWRDPWLISQTLMQLLYLVPPALLLWRNFADSSAALTLITPVIVMAAGQLAGGLAWLTISGEDAPDLVATAPLTPSSVIRAKIEVVLIAVAAIFSPLIAALAWASPYQAAISAGAIIVSAAAATAIQLWFRVQARRSQFRRRQTSSRLATFAEAFSSIGWAASAALLLALPLAGLISGLITAGLVAITWKLSPKRD

SEQ ID NO: 10109 - protein, 270 aa, BradyrhizobiumColbertium
MRRLFSTALALFGALLSPALAQQPQRSECLAMANAAPRVMSVAYRPAAGSAGVEITYAGHSTYFIDTPGGLRIATDYSGAYQVGRLPDVVTMNRAHSTHYSLYPDKRIPHVLHGWSDDGQPAIVSQRISDTFIRNVTTDIRRYIGDDLGSDMIRDGNSIFIFEAAGLCIGHLGHLHHKLDDTHFAQIGRLDIVMVPIDGTYTMSLDGISEITKRLRASVVLPMHRFATPLEDFMRRIGQHFEIERRLERSFRMSRDTLPNKPIVIILDGV

SEQ ID NO: 10110 - protein, 183 aa, BradyrhizobiumColbertium
MLISSQQEIDMSDFARLLHADAANPEHAEALQLYGRFVGDWDAEITAHGTDGTRHTAPGEIHFGWVLEGRAVQDVWIIPRPASAPAFPIAGNWYGTTLRVYDPAISAWRICWFDPARCVFRQQIGRPRGKDIVQEGTTEAGELTRWSFTEITDQSFHWLGESKPPAAADWRLAVDVRAKRRRS

SEQ ID NO: 10111 - protein, 350 aa, BradyrhizobiumColbertium
MAASGLPSNTSGLFVEPREDWLALHREEIIDPLRPIVDPHHHLWNRGHRYLIEEMAADIASGHNVVATVYVDCRSMYRAHGPEAFRPVGEVEFANGVAAMSASGAYGNAAICAGIVSHANLLLGDSVKPVLEAEIAAGNGRFRGIRHSSAWDEDPVVAGMYANRPKGLLRDRTFREGFSCLAPLNLSFDAWLFHPQIGELTELARAFPDTRVVLDHCGGPAGIGRFAGRREEVFAQWRASIREIATCGNVVVKLGGLAMCLLGYDFHLRERPPSSEDLAAAWRPYIETCIEAFGVKRAMFESNFPPDKGQCSYQVIFNAFKRIASSLSEAEKTALFSQTAADFYRLELPS

SEQ ID NO: 10112 - protein, 149 aa, BradyrhizobiumColbertium
MALIEVGSCNVDLELRPIEPSWVIEGNPVSRSRVLSTSADGTAQTIIWQCTEGRFNWYYDIDETIMIMEGSIVLESDGMPPKRYGPGDVIFFRDGAHAKWHVEGHVKKIAFCRKTNPVMIGFLIRVVNKLKKMFASSGERRPASLMGAG

SEQ ID NO: 10113 - protein, 418 aa, BradyrhizobiumColbertium
MTDQRNTSTPIDPVKLDRLAEVAVKVGLGLRPGQDLLLTAPAVALPLVRRIAVHAYKAGAGLVTPILSDEEMTLARYRHGHDDSFDRAAGWLYEGMAKAFSENTARLAIVGDNPMLLSGEDPSKVARASKANSMAYQPALEKIVNFDTNWNIIAYPSPSWARLVFPDDPEDVAVGKLADAIFAASRVDHEDAMGNWASHNAVLRERTNWLNGQRFRALQYSGPGTDLTIGLADGHEWEGGASLSKNGISCNANIPTEEVFTTPHCRRVYGHVVSSKPLSYQGTLIDNIAVRFEDGKIVDAKASRGAEVLNKVLDTDEGARRLGEVALVPHSSPISQSGLLFYNTLFDENAASHIALGQCYSKCFVNGAQLTPQQIAAQGGNQSLIHIDWMIGSAETDIDGILADGSKVPVFRKGEWAK

SEQ ID NO: 10114 - protein, 453 aa, BradyrhizobiumColbertium
MPAFPASTTVLDSMLFRDAFGTPEMREVFSDVATVARYAEVEVALARAEARCGVIPQEAAAAIAARTDVAAFDFDLLRQETDIVGYPILPLVHQMVKQCGEAGRYVHWGATTQDIMDTAVVLQLRAGLEIVERDIGELRRILADLSKCHRDTAMAGRTHLQQALPVTFGYKTAIWLAMFDRHAERLAQLKPRVLVGQFAGAAGTLASLGDKGFEVQEALCAELKLGVPASTWHVARDGFAEAVNFLALVTGSLGKIALDIMIMASTEFAEVYEPFVKGRGASSTMPQKRNPISSELMLAASKAVRQHAGLMLDAMVQDFERATGPWHAEWMAIPESFVLTAGALHQAKFALAGLIVDEAKMNDNLAISRGLIVAEAVMMGLAPQIGRQEAHDVVYDACRQANEKGMSLADALSADSRISSRINRATIEALTSPKNYLGLAPAMVDRVLKSATR

SEQ ID NO: 10115 - protein, 106 aa, BradyrhizobiumColbertium
MRQLTQVARQSNPTFRVHHTFGAVRWFSQAFFSVTPRPVLRIAPSGRTAAIGPGAQHSSFGCIPLRKRHGSHHAISMNQGASSADTRFSTQISFCHFIRVIRVISQ

SEQ ID NO: 10116 - protein, 45 aa, BradyrhizobiumColbertium
MNDQVENLRLHGNGNLLAAQLAPVSVEKVVPEQKLHVENSGLIAK

SEQ ID NO: 10117 - protein, 481 aa, BradyrhizobiumColbertium
MQNRDRVVSKDELIDKIWHGRSVSESTLTSRINAARKAIGDDGASQTLIRTITRKGFRFVGDVQTQSAAVAPEPVRIAQPQAAFALPERPAIAVLPFTNMSGEAGQDYFSDGISEDIITALSKLRWFFVVARNSSFVYKGRAVHIQEVARELGVRYVVEGSVRRSGERVRISAQLNDVSTGSHLWAERYDRELADIFAVQDEITEAIVAAIEPQLYAAESFRAQQKPPGSLDAWDLVMRALSHYWRSPREGNAAAQRLLEQAVAIDPAYGKALGLLATSHMFGAHMGWADMAATIPVAERAALAAVEADREDAWAHHGLAYTYLFRRRFDDALAEFELALRLNPNFAMAHAFHGVTLCYAGRWQDGDAAARRALRLSPRDPLAAIYCGVAAYARFVGRDYEGAAQMARESLRQRADFVGAHRVLTAAAGMLGDPALAASALENLRRAQPEVSLEWITRELPMLRDEDRTHYLEGLRRAGMT

SEQ ID NO: 10118 - protein, 526 aa, BradyrhizobiumColbertium
MYDTIIVGAGSAGCVLANRLSADPGRKVLVLEAGRAAPPASDIPSDWPTMFNTAVDWGFHTEPQAGCRGRRIFWPRGKMVGGSGAMNAMIYIRGLPSDYDGWAQAGCAGWAWKDVLPKFIAFENNARFGDDPLHGTRGPLHVADVPFVDPNELKWLEAAQAAGLPHNPDFNGVTQEGAGFFQFVIRGGERFGTGKAYLRPALARPNLVLKTSAHVTRIIIERGRAIGVAYLDNGQPKSAFAAGEIVLASGAIGSAQQLLLSGVGPADELKLTGVEVVHDLPGVGRDLQDHINIPITFYTKERIGIGAWTEESLATSLAEWQAHRSGPRTSPWVAAGAHVRSRPDVEPDLQLYGAISPHRDYVRFLSSKPGITLHATLQRPKSRGRITLRSADPIEDPAIDPGYFASDPSGSDIATMVEGVRINRRIAAQSPLRKMIECEVTPSAEAINDGEIADYIRGHCTTLYHAASTCRMGIDDLAVVDPRRLQVRGIDGLHIADASVIPIMISGNIQTPTILIAECAAAAILG

SEQ ID NO: 10119 - protein, 230 aa, BradyrhizobiumColbertium
MRASTAYFVGAGTIVAAIAIGLGGGIVAGNIMNPVAPKQGPDTSKMAQRTEAAGPPAAPDAPSERVNYLTGSQAFGAMIATPAQAEAKPEPAKPDTQSTQANDGPPAAQPSQAAAVEPPKAAPPSAPQAARPAEQQASTEPSSSSSNNAYARARDSDVKRAASERRRAERRERWTERRHYHESREPRGSRGRTDWDDVARNIREDSDARDYADRPRSGFPQVRLFGPDDD

SEQ ID NO: 10120 - protein, 237 aa, BradyrhizobiumColbertium
MSKAITIVVLTCFLVLGAATTAILGRDSVPSVSAEMIAQTPPAKPPATNRAAKADRLIPTLALASAAIEPVQVAADKLSQAPVLAEPLRQAFAAATPSDFPMPKRSAHEAPAVTEVPAVEVPAKPKAVAKPQPQKSYSLLSDVQIAGIRDRLRLSSSQEYYWPSVETALRNVARKIQANKLSNPNAPPSAQIDPNCDEVQQLKSAAMPLLFQLRDDQKEEVRKLARLIGLEKVAQQI

SEQ ID NO: 10121 - protein, 82 aa, BradyrhizobiumColbertium
MDFDYLNSKTSATMDEIRIRVAHALARHPLCRNVRFDIVSVPRTRRGGNWTVTLQSVEPRAVWEASEIVADIQDAYELAAAA

SEQ ID NO: 10122 - protein, 322 aa, BradyrhizobiumColbertium
MPSDRLHRFGDRLALPLIAAPMFLVSGVELMAACCRNGVTGSFPTANCRNTEQLDEWLAGIAARLRQHEDQTGRKAAPLCPNLIVHRSNTRLEQDLAVLLRHQPEIVITSVGSPAPVLKPLHDAGALVLADVASIRHAERAAEAGADGLVLLSAGAGGQTGWLNPFAFVRAVRAFYDGIIVMAGGISDGHALHAAEVLGCDLAYMGTKFIATRESMADDRYKRMLVESSADDILLTTAFTGLQTSMLRPSIVAAGLDPDDLPARGAIDIAKDIDVAARENRPKRWRDIWSAGHSVSGVTDVLAVDDLIGRTLAEYRDARGGR

SEQ ID NO: 10123 - protein, 77 aa, BradyrhizobiumColbertium
MQSIRWHACLPARALSFPPAVSVLASSATLARQKPVTKQRGNICLIGSTHPLQLVRRRYGRCRAIRIVSRSPGLGDH

SEQ ID NO: 10124 - protein, 520 aa, BradyrhizobiumColbertium
MSDRLHASPPACAQTLRALSRYPDRIAFAWPGGSLSYQGTIDLIGRIQGVFMRLGLQPGARVAFLTANRADTWCAGVAAQLARLCITWLHPLGSLEDQLFQLEDSEAEMLVVDAAAFRDRGGELAARAARLKAVFTMGPAGYGADLLAAIEDAGHASPLCLAGPDDLATLNYTGGTTGKSKGALRYHRENAGAAGAILADFEIPEAARYLTVAPISHVAGTKVLPTLMRGGTVHMLKGFDPEAVLATIARERINFTLFVPTMIYVLLDQPALGRTDLSSLELVLYGASAMSPSRLLEGIERIGPVFSQLYGQTECYPVSVLRKADHDPKQPELFLSCGFPIAACEVKILDDKDEEVKTGEAGEICVRAPHVMAEYWKRPDITAETLKNGWVHTGDIARRDERGYMFILDRKKDMIVTGGFNIFPREVEDVLSQHADVAMVAVVGIPDEKWGEAVTAIVVPREGARPDPDELINLVKTRKGSAHAPKQIQFVKQLPMTGVGKVDKKVLRAGFWSGRDRMVG

SEQ ID NO: 10125 - protein, 43 aa, BradyrhizobiumColbertium
MNRQDGEHPFRGGGSLPFKSAPGGHVAHHHRFSMTRLCIARPK

SEQ ID NO: 10126 - protein, 257 aa, BradyrhizobiumColbertium
MPAIYRVDGNSVLTSPEAAGPWDRRMQHGSAPSALVTWAAERIPAPAPMDVARVTIDLMRPVPVAPLTIESEVLREGRKIQLCEIKLLAEGVQVVGATVLKIRRQTQALPDEVKDLPVTLPSPEDSLVEDGHGATSPFAGMVSMRAALGRFGKAGPGAIWFRLDHPLVEGEAVSQAMRAVVAADFSNGTASTLDFRAWTYINADLTVSLSRQPVGEWILLDGESWIGPDGAGLAMSRLADRQGYFGRAMQSLVIEKR

SEQ ID NO: 10127 - protein, 322 aa, BradyrhizobiumColbertium
MSMPALFKGRLSIPVIGSPLFIISVPDLVIAQCKAGVVGSFPALNARPPELLDEWLARITEELAAYDRAHPDRPSAPFAVNQIVHKSNNRLDHDMQLCAKYKVPMIISSLGAREELNQAVHGWGGIVFHDVINQKFAHKAIEKGADGLILVAAGAGGHAGTISPLAFVAETRRWFDGPIALSGAIGNGKAIRAARILGADFAYIGSAFIATKEANAVEKYKEMIAGSSADDIVYSNLFTGVHGNYLKPSIVAAGMDPDNLPTSDPSKMNFGTDASGERAKPKAWKEIWGSGQGIGSIDKVVPAAELIARFKKEYDEAIDPPL

SEQ ID NO: 10128 - protein, 466 aa, BradyrhizobiumColbertium
MSRTEQDFLGQREIADDIYYGVQTIRGKENFHITGIPMNQEPYFVKALGYVKKAAAMANRDLGAIDAKVADAIILGCDRVIAGDMMDQFVTDFIQGGAGTSTNMNANEVIANLALESLGFAKGDYQHVSPNDHVNYGQSTNDTYPTAFRLALILRLESYMTALRQLQEAFFAKGREFDRVLKMGRTHLQDAVPMSLGAEFRGWGTTIGEEVERISEARALLREINLGATAIGTSVTAAVGYPQLAVRHLGELTGVDFVLAGDLVEATSDTGAYVQLSGVLKRTASKLTKICNDIRLLASGPRAGFNEINLPQLQPGSSIMPGKVNPVIPEVVNQTSFLVIGLDTTVTLAASAGQLQLNVMEPVISFALFFSIRTMERAVNSLRENCVVGITANEEHTRNIVLNSLGIVTVLKPLLGYKLCAEIAREGYRSGKSLHQIVVVERKLLTQEKWDEMFSFERLINPDLIG

SEQ ID NO: 10129 - protein, 178 aa, BradyrhizobiumColbertium
MMVRSGNPAVWFGTLMSAALLLLLGGGTGQTQSAPPALGIQGQDIRAAPAPSSPAPSVSPAPGENSGLINEMGKLFEKLPSILPPIKSPSETMNDLSRLAKPSTMVSGRIACPASSNGAPDCKQAADQLCQSKGYKEGKSLNADSAEKCSAKVLIPGRPRKPDDCRTDTFVTSALCLN

SEQ ID NO: 10130 - protein, 200 aa, BradyrhizobiumColbertium
MVLHRGAMLKRIYDWCIDAAHKPYALWIMGIVSFAESSFFPVPPDVMLIPMSLARPQRAWLYAAVCTVTSVLGGIVGYAIGALLFDSVGQWLIQVYGLADKVDAFRASYAEWGAVIILLKGLTPIPYKLVTITSGFAGYNIILFILCSIVARGGRFFVVAILLNRYGDWIRVRIERHLGLWVALGAIVLVLGFVIAIKLI

SEQ ID NO: 10131 - protein, 134 aa, BradyrhizobiumColbertium
MSDSLERLYLAVLAARDLDPATSRTARLFQRGPSKMAKKLAEEAIEVVIDAVNGDSEAVIRESADLLYNLTVLWASAGVRPEDVWREMTRREDLLGIAEKLPKSPMKLPKVASPRVAARRPIVALEGRGARKRH

SEQ ID NO: 10132 - protein, 120 aa, BradyrhizobiumColbertium
MFDRFSKLAGRKAILATAAVLALSTVAPTASFAGGRHWHGGGGAALAGAAIAGAVGTGLAIAATRNAYAYDAPYYGGPVYYADGPVYYGGDSYIGPRPFHRCGGPYQSARGGQGYISTCY

SEQ ID NO: 10133 - protein, 387 aa, BradyrhizobiumColbertium
MRNDAATPLIRRSCWRAHGRRRPALQASRNHNNAGPAQLMSGLKTALHGLLALSISLAALIASDLSAAEATTPSVAIHFTFDRAPDASMAPFFLAAKDGRFGAERLNVSFNSASGSQEALARVAKGDSELALVDINELIRFRDKQDAAPVKAVFALFNRTPYAIIARRSRGIQVLPDLDGKTVGVADGDLSMRLWPALAQQNGIKASRVKFHKISAAVREPILSAGQVDAVAGLSYLSAVNLRDRGVPGADLVVLRFADYGCEAYGFAVAVNPVFAAAKPAAVKGFVRALMAGVSATVREPERAAEEAASRIDGGDRNLELERLRAVLVDNILTEEVRRNGLGGVEPARLESSIDQIAQDFKFRKRPAAGDIFDDQYLPPAAERTIN

SEQ ID NO: 10134 - protein, 598 aa, BradyrhizobiumColbertium
MSILRLYTRVLELLGSEARLGWLLAVANLLLAGSQFAEPVLFGRIVDVLSGKTVAGSNSAWPFLAAWVAFGLFTIACSALVAWQADRLSHRQRQAVLTDYFEHILQLPLTFHSGTHSGRLMKVMLNGTDALWRLWLGFFREHFAAILSVVVLLPLSLYLNWRLAILLFVLCIVFTALTTFVVRKTFGMQMEVEERYSELSARASDALGNVALVQSFVRVESEVKGLRSVADELLAAQMPVLSWWALVTVITRASTTITVLAIFTFGIALHDRGLTSVGEIVMFVSFATMLIQKLEQVVSFINSVFMEAPRLREFFNVLDAVPAVHDRPDAIDAGRLSGLVEFNDVTFSYDGKRPAIEDLTFTALPGQTIALVGPTGAGKSTAIALLHRAFDPQSGVIKVDGMDVRGVTLTSLRRNIGVVFQEALLFNRSIAENLRVGKPDATEAEMRKAAERAQALEFIERSGGFETNAGERGRMLSGGERQRLSIARALLKDPPILILDEATSALDAVTETKVNAALDEVMKGRTTFVIAHRLSTIRNATRILVFENGRVIENGTFDELVAKGGHFAALARAQFMVQESTRAGVTAAETAATASESP

SEQ ID NO: 10135 - protein, 509 aa, BradyrhizobiumColbertium
MHALRPLLRRSLFNLFAAGIACTALLAPRAASAEALLLIEADSGKVLQADNATIPWYPASVTKIMTAYVTLRAVKDGRLTLDSLLTVSPVAASQSPSKMGFPPGTQVTVDNALKMMMVKSANDMAVVLAEGVGGSVDGFSAIMNDTARKLGMTQTSYVNPNGLPADGQITSARDLGILARAFLRDLPEYEYFVHIPAIRFGKRVTGNFNKLIGRYPGADGFKTGFICASGYNLVASATRNGRRLIAVVLGASSGTARAVKAAQLLERGFTQDNLTWLRPSLGTVDNLVPVDATPPNLRDEMCGPHRKRPASDDDGALIAANGGAPGSASATGGEAQVTFFTAGLQPPLMRASELMASAPTPTEPVLVYTGPTRTGTALIAAVAADADKQAASKPRGKKSRVANKPKDGGKDGGKDAGKDTKTAATKPDTKLKPEARSEAKSEAKSGAKGDTKGDTKAAAKPAAPKHAATKQDAAAKPAEKPAASDQAAKPAKPKAATKPAAAAKPANNS

SEQ ID NO: 10136 - protein, 561 aa, BradyrhizobiumColbertium
MERIWLKQYPPGVPADIEPTQYASLVDLLEESFTKFADRKAFICMDKSISYRDLDQMSVALAAYLQGRGLQRGARVAIMMPNVLQYPVATAAVLRAGYAVVNVNPLYTPRELEHQLKDSGAEAIIVLENFAHTVEQVIAKTQVKHVIVASMGDLLGFKGVIVNLVVRRIKKMVPAWSLPGSVSFNDAVSAGRGMTFNKPKLSPGDVAFLQYTGGTTGLSKGATLLHRNIVANVLQNDAWLQPALAAPPHVDQLMVVCALPLYHIFALTACYLLAVRAGGCNLLIPNPRDIPGFIKELAKYQVNSFPAVNTLYNGLMQHPDFKKLDFTKLKISNGGGMAVQRPVADQWKAITGCFIAEGYGLSETSPTLTCNPATATEFSGSIGIPVPSTWISIRDDDGNEVPLGQPGEICAKGPQVMSGYWNRPDETAKVMTADGYFRTGDIGIMDERGYTKIVDRKKDMILVSGFNVYPNEIEEVIASHPGVLECAVIGIPDSKSGEAVKAFVVKKDPNLTAEAVIKFCHEQLTGYKVPKHIEFRNDLPKTNVGKILRRQLRDEKKAEAA

SEQ ID NO: 10137 - protein, 184 aa, BradyrhizobiumColbertium
MTDPDDVGPAGILAFWREAGRECWYARDEAFDAEIRRRFLALWHKAVAGELAAWEASDDGALALVILLDQFPRNMFRGTPQAFASDALARDVARRAIERGADRRIEPALLEFLYMPFMHSEHLADQEHCVALFERAGDAESLKYARDHADIIRRFGRFPHRNSILGRETSPDEQAFLDGGGFAG

SEQ ID NO: 10138 - protein, 161 aa, BradyrhizobiumColbertium
MAIQIGDKLPEAKFRVMTAEGPQVKTTDDIFKGKKVALFAVPGAYTGTCHKMHLPSIFLNAYAMKDKGIDTIAIVSVNDAFVMNAWKRDTDQRDEAVFLADGNADFTKAIGMELDASANGLGIRSKRYSMLVEDGVVKKLNLEAMPGKVEVSGGDTLLGQL

SEQ ID NO: 10139 - protein, 154 aa, BradyrhizobiumColbertium
MSERPNVTIYTDGACSGNPGPGGWGAILKFGDKEKELNGGERHTTNNQMELMAAISALEALKKPCTVDLYTDSQYVRQGITGWIFGWKRNGWRTADKKPVKNVELWQRLDAALKQHEVRWHWVKGHAGHPENERADQLARDGIAMARLQQRVTE

SEQ ID NO: 10140 - protein, 327 aa, BradyrhizobiumColbertium
MAVYTDVAADELADFLKQYDLGELLSYKGIAEGVENSNFLLHTGKGSFILTLYEKRVAKNDLPFFLALMTHLAEHGVNCPLPVKGRDGESLRELAGRPAAIITFLEGVWPRKPNAAHCAGVGEGLARMHLAGASFAIRRANALSVSGWRPLFDAASNRADEVQPGLRDFLAAELDHLSSGIWPTDLPEGVIHADLFNDNVFFLGDKLSGIIDFTFACNDMLAYDVAICLNAWCFEPDHSFNVTKARAFLNAYGRVRKLTSAEEAALPLLARGAAIRFLLTRLVDWLNVPPGALVKPKDPLEYVRKLRFHQSVASARDYGLMPSGLVA

SEQ ID NO: 10141 - protein, 322 aa, BradyrhizobiumColbertium
MSAKPDLKIVLCSPRGFCAGVVRAIDTVERALDKYGAPVYVRHEIVHNKYVVDGLKKKGAIFVEELAEIPENTSAPVVFSAHGVPKSVPADAQSRNLFSLDATCPLVTKVHREAAIHFKRGREIFLIGHSHHPEVVGTLGQLPPGAVTLIETAEDAKTITPKDPNNLAFVTQTTLSIDDTAEIVALLKERFPNINGPHKEDICYATTNRQLAVKKVAPVVDALIVVGAPNSSNSQRLREVAEREGCKIAVLAQRATDLDWSRFENIKSLGITAGASAPEVIVEEIMDAFAERFTLHVETVSAAEENEFFPLPRQVRPEAAAE

SEQ ID NO: 10142 - protein, 231 aa, BradyrhizobiumColbertium
MSNAPLMPKATAVWLLDNTALTFDQVADFTKMHPLEVRAIADGDAAQGIKGMDPLSNGQLTREEIEKGEKNPDYRLRLQESKVVLPPQPKRKGPRYTPVSRRHERPSAILWLLRNHPELKDAQIMRLVGTTKSTIASVRDRTHWNTSALTPIDPVTLGLCSQIELDFEVQRAAKEKPIDAAYGGATLLPASETTRKDEYEPAEKSSDDLNVDAVFAKLKTLGGKKHEDEEE

SEQ ID NO: 10143 - protein, 248 aa, BradyrhizobiumColbertium
MHRTTRNLARLATIGAMLVGTLASAQAADLPVYKKAPPPVEAFNPWMIRLRALGVLPDGGGSSVTVAGVPSLSSPNSGLSISDQVVPELDISYFFTKNIAAELILGVTRHSISGTGSLANLPIGKTTLLPPTLTLQYHFDNFGAFKPYIGAGVNYTVFFNNSAANVPAAIAGPPAIVATTTNLHVSNAWGGAVQFGFDYMIDRHWGLNVDVKKLWLRPNYSATVSGLPVTGTAHIDPWLVGAGVTYKF

SEQ ID NO: 10144 - protein, 88 aa, BradyrhizobiumColbertium
MSAKLAQYGAISLLALALAACSARYQTPVAVGGDDDDAVCQGRGYAQGSPEYVACRKDRDVQRNAAVARADRRQRDLGEYMLNNPVRP

SEQ ID NO: 10145 - protein, 636 aa, BradyrhizobiumColbertium
MNVQGESLYHKVHARSLADPEGFWSEAAKEIDWVESPKKIFDPSQGTYGRWFAGGVVNTCYNALDRHVERGRADQLALIHDSPLTNSVTKLTYAELLNEVQALAAIMHDFGVAKGDRVILYMPMVPEAVVAMLACARIGAVHSVVFGGFAAKELATRIDDAQPKLILSASCGIEPGRIVQYKPLLDEAIRLAGSKPKACIVLQRPQLTCDLTAGRDYDWASLRRKALNDGKKAPCVPVAATDPLYILYTSGTTGIPKGVVRDNGGHLVAVKWSMFNLYGVKPGEVWWCGSDIGWVVGHSYIVYGPLFHGATTIMYEGKPVGTPDAGAFWRVISEHKAVAFFTAPTAFRAIRKEDPEGKFIRQYDLTKFRTLFLAGERADPPTVEWAEQQLKVPVIDHWWQTETGWCIAGNPVGLGMLPVKHGSPTVPMPGYQVDVVDEAAKPVGPNTMGSIVIRLPMPPGCLPTLWNQDERFKEAYLSEFPGYYKTSDAGYKDDDGYVFVMGRTDDIINVAGHRLSTGGMEEILASHPDVAECAVLGVKDAIKGEVPCGFLVLKAGVKRAPAEIEKEIIALVRDKLGPVAAFKLAITVGRLPKTRSGKILRGTIKKIADGESWTMPATIEDPKALEEIGEALKGRV

SEQ ID NO: 10146 - protein, 462 aa, BradyrhizobiumColbertium
MCGIRASAQTHPPRKISLRALFLGAAMSLVLAPAAASTECVLGSKADPAELISACSVIIDQASNPTTDRSAALVVRAEANARTSGGLTRALRDLDRAIALDGKNAKAWRLRGDILREAGGDLNRAAADLTKAIELDPEDAEAYETRGVVYTSQRRLDRALADYDQAIKLRPDDAQAWSDRGVAYYLGGDNEKAIRNFDEALRLDPSRARTYTNRGAAYKKLGQLDKAVADDGEAIRLDPKVPEYYDNRGLTYAAMGEYDKAIADYDQAIRREQRANFLTNRGDSYQFKGELGAALSDYEAALKLDPNFAKAYNNRAVLYKKMGERKKALADYETALKLDPGNENAANGRRSMIAEIAKFGAATPGPIHARSADDSGPSFDCATAKREVEKAICADPQLGVLDRQIAETYERVLRTSKGRSAGDLRKTQRAFIATRNASFGRPGYDLKKIMQDRLQRLNAVGS

SEQ ID NO: 10147 - protein, 252 aa, BradyrhizobiumColbertium
MRFLNHLFGAWLLYGLSLASVDAATGGEPVAVVQVDLESCLAATAADDLDKAATACAAVIDNEKTAKADLIKALIARGALYARHDQVDRAVADDSRALLLDPTLVDVFNARGELWLKKGDKPKAVQDFGAALRIDPNHEKAKANHKAMARELERIGAQMAIAGKPSFNCARARRAVEKAICGNRELADLDREIFASNARVIREARNAGEAKALQREQDEFIARRNADFGRPGYDLKKAMQERLQRLNGVDGY

SEQ ID NO: 10148 - protein, 525 aa, BradyrhizobiumColbertium
MAPLKSGSGIIVSTFEWIIALLLGAVGLSALARRIKVPYPTFLAIGGALIAFVPSSPSWTLEPGLALALFVAPVLLDAAYDTSLRDLRNNWVPVSTLVVAAVGLTTAGVAFVAHRLMPDMPWAAAVALGAIVAPPDAAAAVAILSQVKLPHRMVKVLEGESLLNDASALLIYHIAVGAVATEHLTWGQVAPTMALVLVGSVIAGLVAGRIIPLFMERVTEAPSAIIVQFATTFMVWIAAEHLGLSGILTIVVYAITVARTAPARIPARLRVPSYAVWETMVFVLNVLAFMLIGMQMRPIWARLDADVRWEYCVAAASILLTVVLVRLFWVTFYRTTLRVLVAQGIYHPKDPKQIASAKGGLIISWCGMRGLVTLAAAFALPESFPHRDFIVFIAFAVVLGSLVIQGLTLRPLIIAFRLEDDDPVGIEVARGRAVAYRAALDAIEGDPSEEAEILRLEYRAILMQAENDPNGGIANGELPADPLRRRAIEAARRSIFDLRATEVIGDDAFHRLEEELDRAELSAGG

SEQ ID NO: 10149 - protein, 256 aa, BradyrhizobiumColbertium
MTTLIDDRRVRARDASPARYFYLNMSLACAATAFLGFAPTYWMPLARGALSASPVIHFHGFLFFTWTLYFVLQTWLVASGRVVNHRALGIAGVSLATAMTIFGFLASVSSMKNAAALGQADAGITFSIVPMSGIAFFALVFVLAIMNTRKPDIHRRLMLLAAVSILDAAIARWFLTFLAPPGPPGPPPVPVTIAPAVVASLLLVVAMVRDWRTEGRVHPVYIYGTLALLAVKVLNWPISETAVWHAFAGGILALAQ

SEQ ID NO: 10150 - protein, 268 aa, BradyrhizobiumColbertium
MDRLRGKVAMVVGAGSIGPGWGNGKATAVTFAREGAQVFCVDRNGAAAEETAKIITDEGGKAIPFTADVSRHAEIETMVAECLKAYGRIDVLDNNVGIAEMGSVVEVSEESWDRVFNVNLKSAYLAMKHVIPVMVKQGGGSIINISSIASIRHMGISYVTYGTSKAAMNQMTRTTAIEFARHHVRVNAILPGLMKTPMVEHSAGLAASYAKGDVEAMWRARDAQVPMGHMGDAFDVANAALFLASDESKYVTGIELVVDGGITCKAGA

SEQ ID NO: 10151 - protein, 115 aa, BradyrhizobiumColbertium
MKALAMSAFTLVWTHSIAKVDWQEDWRVTPAGLELVQARVKGTGPGMEPPSEARLVDGWFQWRPQRAPTPEVVLGNSGAAGEWRLCVDGQCRTLSEIVGHPIGANVTKMSICKEP

SEQ ID NO: 10152 - protein, 703 aa, BradyrhizobiumColbertium
MISQAQATEAPIKVEFDNFEHGFPEGFGPGRWGQLAYWIGIAFAVFQLYVAAFNYLPSQVVRGVHVGFLVLLTFGLIANFTARSDLGRAAGWVIGGAGFYCGLYQWIFYADLIARDGDPTRLDLVVGTLLAVLIFEGTRRLMGAALPLMCGACLVYWFFGQYLPSPLNHRGYDFDQVITHLSFGTEGFYGVPIYVSATYIFLFILFGSFLERAGMIQLFTDVSLGLFGRTRGGPAKVAVFASGMMGTISGSGVANVVTVGQFTIPLMIRFGYRRAFAAGVEATASMGGQIMPPVMGAVAFIMAETLGVQYSEIVKAAAIPAMLYFASAFWMVHLEAGKHGLVGMKRSEIPSAWKALVARWYLVLPLAALVYMLFEGFTPLYAGSMGLALTVTLILGTAVTTGASSNVIRYIFWIGLALVVAALSRDGLQIVPVATVVVGLIVITAFVRGGFAALRACRDALAESAKSAITVGMACAIVGVIIGMMSQTGVGTIFGGWVIGLGEKSLFLALVMTMLLSILLGTGIPTIPTYIITAALAAPALAKLGVPLIASHMFAFYYGIMADLSPPVALAALAAAPIAKENPDKIGWEAMRIALAGYVIPFIFVYSPALMLQAGDPMAAKLGFYGAVALASLKALVAIGLFGMVAIGFLFTRLTLIERLVALGGAFCLLGEFPFSDTAGFVLAAALVLWQWRQRPSAPVEAV

SEQ ID NO: 10153 - protein, 315 aa, BradyrhizobiumColbertium
MKRTIFGVAAAIALAASAPCAQAQSFINVLTGGTSGVYYPLGVAIGKIYGEKIPNVKTQVQATKASVENLILLQQGRGELAFTLGDSLKAAWNGEEEAGFKTKLDKLRTIGAIYPNYIQIVATAESGIKTLADLKGKSLSVGAPKSGTELNSRAILGAAGMSYKDLGKVEYLPFAESVDLMKNRQLNATLQSAGLGVASLKDLSTSSPITVVSVPKETVDKIGPPFVSAVIPANTYSGQDKDVPTAAVINYLVTNSAVSDDLAYQMTKLVYESLPELVNAHAAGKEIKLETAANGSPVPLHPGAIRYYKEKGLIK

SEQ ID NO: 10154 - protein, 159 aa, BradyrhizobiumColbertium
MRHVFKLCWAALVSLTALAPAARADDYQLSHNQRISCSRGLAPGKLNTATCKSYTYLFNTRTSEYFRCQVSLALTRDNKEVINVQTDGGCIKKPRIFETDGKYDFDATETEPPNTNSFFGPGGYAVWAADVGAQKVRGCIIISSGLGSDISKCLDMTFQ

SEQ ID NO: 10155 - protein, 104 aa, BradyrhizobiumColbertium
MAFSTSTFARVSGALLPMLGAFAAPAFAQTATPWELRPDMGYAYDRDGKTYSYKMGTSNAGELLKGAKKVPKGTLFFIGQNGQLYMRSGPYLEGDGKFKFGPDQ

SEQ ID NO: 10156 - protein, 407 aa, BradyrhizobiumColbertium
MHHSFRKPKALVPLALVQLALVLSSPAARAEADVLPPAVRNANAQLLSQFFAQGGASPAVLEYRRKLAEYQAARAAFDAEAGAYWSQIYEKRKTRNAKRRSGQQITLDDYVLEHPPLYNGPKKPVNPEPEETPERPRKPIPVTADFLRAAQELYRFTPQRPTSEVEFKRAYARYALASGLTREQAVRVYAFETGGTGTHDVQAGIEHGGKRAISTAMGYNQLLTTNSVELLAEQGHELIRALSEKVTRTPGPARHALEHKLAVLKKMVAHAKSVPDTWSEHEKMGRTPQGWAMHAMVLDIDIGPMLQTHKLLTSVLFARAKGHSRPLSAAELEMMNLTGDGTGLDMVTMPQAMREQVPTSNFFQRGGYERNPVAIRHNTVAKLLAVTDQRMDANSSKAGARELAAAF

SEQ ID NO: 10157 - protein, 207 aa, BradyrhizobiumColbertium
MRPFDDATRRNIAAACAAFARLPEDGAPAALKRAAVAVALTASDGDDTALLLTLRASHLRAHGGQWALPGGRCDPGETPVEAALREIDEELGLRLTNADVLGTLDDYPTRSGYLITPVVVWAPDAAAIKPNLDEVASVHRIALATIEREDAFDFVAIPESSRRVIRFHHQMSLIHAPTAALIYQFREVLAGRQTRVTDLEQPVFAWK

SEQ ID NO: 10158 - protein, 145 aa, BradyrhizobiumColbertium
MDDDMTNKAAARLKSDGWSILEPTGFLHLIGPLWERKVDGHHEFALAPEDKHHNRRGMVQGGVMMTFADRTCGMTARYVSGKDYLATVQLDTHFVEAGQIGDVLISRPRVVRSTRSLIFMSTEVTVDGRCIVMANGVFKILKGPG

SEQ ID NO: 10159 - protein, 340 aa, BradyrhizobiumColbertium
MQYRQLGRSGLKVSPICLGTMMFGGPTDEAASKRIIAKARDTGINFIDTADAYSKGASEEVVGRAIGDNRHSWVLATKLANPMNTGMGSDPNRGGLSRRWVLQAADESLRRLGTDHIDIYYLHKEDHATPLEETVRAMGDLIRAGKVRYFGVSNYRAWRVAEICNICDRLGIDRPAVSQPYYNAMNRMPEVEHFPACSYYGLGIVPYSPLARGVLTGKYKPDAAPDKETRAGRNDTRMMQTEWRPESLQLAQEIKTHAERKGITAGQFAVAWVLNSAFVSSVIAGPRTEEQWDGYIGALDYRFTAEDEALIDRLVAPGHPSTPGYNDPAYPIEGRRARTA

SEQ ID NO: 10160 - protein, 437 aa, BradyrhizobiumColbertium
MTLEDRYGLPLSTSSHEAASAYREGVDLMLAGWTGTAETLERAIATDPDFALPHIARGRVHAFYQQGDLARGKAALARELVAKRGTERERSHVETLALAIEGRLPDAIAAMRKHVEAWPRDALVLSLPLGAFGLFAFSGMADHDRARHELCESVARHYGEDWWFLTMSGWAMTENGDVARGRAVTERGFNLRRQNAHAAHAVLHAMFEDGSIEAADRLVDEWIPGYGRDGILHGHIRWHQALGALEHDDAARALAIYADVLQPAATKAPPLNLVTDAASLLWRLTIYGHTVPQAVWREAAAAAQELFPKSSLSFADVHMALFAAATQNHQALAARLAVIEQRLAEGKLPAGAVVPAICRALAAFAEEDYGTCVRILTPVLTEVARIGGSHAQRELIEDTYIVALMRGGELPRARALLDARLHRRPSLRDKRWQAAMA

SEQ ID NO: 10161 - protein, 272 aa, BradyrhizobiumColbertium
MTEIVALEALAARVESGQSLAVPVDRSGVAMAATAAIIAAGIDNLHLVCVPISGMQADLLIGAGAIKTLETSAVSLGEAGGAPRFGAAVRAGSLTLRDATCPAIHAGLVAAQHGVPFMPIAGIIGSDLLEVRPDWKVIDSPVGEPRKVVVVPAIKPDVALFHAPEADRAGNVRIGRFRELATMAYAARRTLVTVERIVDRNLLETEDSAAGVLPSLYVDAIAVAERGSWPLALWDEYPADEAEIARYTAMARSEDGFRAYLSTFLSHRKQVA

SEQ ID NO: 10162 - protein, 247 aa, BradyrhizobiumColbertium
MQSEHERRELLIATIADLLDGIRHVAVGASSPIPAAGAMLLRARNARDGKPPVRISILGSQRHNFFTNGGIELFDCAAQGRVDAFFLGGGQIDGEGNINLVGTGDYPRTDVRWPGSFGSAYLYHLIPRVILFREEHSPRVFVPKVDFVSARATTPEVPRRGGPYALLTNMALFDFDREAGGFALRSVHPPFTPADIRKNTGFDYAEPEVVRETPRPDGATLDLLRGQILDELAETYPAFARSMTQAA

SEQ ID NO: 10163 - protein, 192 aa, BradyrhizobiumColbertium
MRLRSVALAALLTTLASPCFAEASKPIPVNNPQAQQNAFIDLLALMSGHCKTLKVAGRTFACKTVAYAHGDKGRVNFAVAVDDPSDDSHVVSFSGENGKRADDNSYELPIDRMLLNSKDRPRVDGLPVPAEQTSTGICRQTGNFAAKKVNDVTCSATDNQGRKYELLFVSDGTPVSVRRIRQSAPSIQDPFK

SEQ ID NO: 10164 - protein, 608 aa, BradyrhizobiumColbertium
MLVPIIQPQSLADVTTLPELLRWRVQATPEAEAYRHFDVAAGRWVSRSWRQIDAEFERWRRALAAEGFAPGERLAILMPNGIAHVAMDQAALARGLVPVPMHAVDNPDSIAYILADSGALLLFVDTLARWQAIAATGQPLDHLKRIVCADGTGLTAVDARIVALDSWLAQAADAGAPLADVTVEPNDLAAIVYTSGTTGRPKGVMLSHGNIIANVKAVARRIAAVPNDVFLSFLPLSHTFERTGGYYYPIAIGACVAYARSVQQLAEDLKTVRPTVLVSVPRIYERIYALIMQRRAAAGGAERTLLDLALAVGGRRFDARQGRGSMSLFDRLAWPALKRFVANKVLAQFGGRLRVAVSGGAPIAEPVIGLFLALGLDILQGYGMTETSPVVSVNTPEDNDPRSVGRVLDGLEVRLGDLDELLVRGPSVMLGYWRKPEETRRVKEADGWLHTGDQARIENGRITITGRIKDILVTSTGEKIAPVDLETAILADPLFEQALVIGEQRPFLAALVVLNAKAWTQEKERLAASGEQGDAAERAALLARIAAAVKAYPSYATPRAVWWTLDPWTIAAGLLTPTLKNKRPALERRFAAEIEQIYARKPTPITST

SEQ ID NO: 10165 - protein, 103 aa, BradyrhizobiumColbertium
MKYLIVAMTVGAAVLAGGSAANAAGSSASGKQTAQESQTTEISAHRRHHRWHGHRHHWRHRHGYHRPHYRSYGYYPRHGYYGRGPGYYGGGPGVTFSFGGGRW

SEQ ID NO: 10166 - protein, 427 aa, BradyrhizobiumColbertium
MSDMAEHIVVVGAGAAGLMAARELARAGRKVTILEARQRCGGRIHPLPASEFGYPADGGAEFVHGEAPVTRALLRDAGLSLQEIEGEPWSFHGTTFAREDRHQAHEAELRAVLRELKDDLTVADFLRRHFAGDDYAPMRRSIERMVEGYDAADPERASTLALRAEWMDGGHALQARIDGGYGTMIDFLAAECRRHGVTIHLGCAVSAITEESGAAVVRCAGGDLHSCDRVILTVPLPLLREIALPASARTRLAATDDIGFGNVIKILLRFARPWWRERKEELANMTFLLSDETIPVWWTQYPDLRPVLTGWIGGPRVAELDSLDSQGLIDAGLGSLAGIFGMVRGDIARELMAAAATNWSHDRYARGAYSWATPRTREAQAILARTDDGPVLFSGEALYRGRDMGTVEAALASGLETAGTLLREEQK

SEQ ID NO: 10167 - protein, 249 aa, BradyrhizobiumColbertium
MAPDRRPERGMENHMKPYVVCLMHSSLDGRTHPSRWRPKGAGPDWFEKIHDELGGDAWVIGRVTGSEFAKGKPYPASEAIFPRENWFAQRGAKTYGIVLDAEGKIGWGRSDIGGDPIVVVLTESVPDSHLDGLRGEGVSYIFAGTSEIDLALTLDILARELGVKRLLVEGGGIANGAFLRAGLIDEFNLILSPAIDGAKGAPFVFDSTEADSDRRAPITAMTLESTRELGGGVLLLRYLIKNDPQAVSR

SEQ ID NO: 10168 - protein, 224 aa, BradyrhizobiumColbertium
MLPIPADIFTEPEDVSPDGLANLGPLRRLAGTWQADKGIDINPKAEGPEQRIFIERIRMDPIDPQANGPQLLYGLRYHIHINTPEEDITFHDQVGYWLWEPATGLIMQTLAIPRGQVLLASGKGGPEDRAISVTAKRGETAYGICSTDFLEQAFRTDAYRCDITFNDDGSWTYLIQTELFVRGAPFNHRDTNTLQLVTPPKPNPLAVIVNGRAGENAGGAGSAA

SEQ ID NO: 10169 - protein, 82 aa, BradyrhizobiumColbertium
MQEVSRSGAADELRLDALIADLWWRVRLINTDILEEEARAGVFDPHQPTYPLLAANLRARRDNLVATIGVLEQRARSTSQAA

SEQ ID NO: 10170 - protein, 176 aa, BradyrhizobiumColbertium
MIGRVASRQDREAFKRLFEHFAPRIKGLMQKAGCSPDEAEEITQNAMIAVWRKASLFDPATAGAAAWIFTIARNLRIDLFRRRARAGRLEDVSELPDAPDPTEPADAVISRAQDAARIESAIKQLSAEQIAVVRLSFIEEKAHPEIASQLGIPLGTVKSRIRLAMNRLRDILDEDA

SEQ ID NO: 10171 - protein, 213 aa, BradyrhizobiumColbertium
MTISHHPPEELLAEFAAGNLEEAHQLVVGVHVAGCTRCARFVRALEQLAGAALEEVEPVPTAPDAFDRIMSRIDELPEDTKAPPPASVTDNDVPPALRNYRIGKRRRVAPGLSMRPIELSGSGKARAFLLRSAPGSRMLEHTHTGTELTLVLEGSFSHEGGRFGPGDFDYGDDEVEHRPIVGDEGPCVCLVAMTGDLRMNGLLGRLIGPFVRL

SEQ ID NO: 10172 - protein, 194 aa, BradyrhizobiumColbertium
MACSSLARQVQSERLSELLARVASGETRAFAELHTLTRGRLRAIVLAAGASPHDVDDILQESFLKVWRNAGRYDSRRAPVTAWMSTIARNTAIDHLRTRRQPTFELDEAVSVPAASDASHVEDFDYARAEPIARGALARLPEDRRRLVTLAYLEGESRASLSRRFGVPVGTIKTWLHRTIVAVRKDCLAASAAA

SEQ ID NO: 10173 - protein, 100 aa, BradyrhizobiumColbertium
MAAEIIEFPERRPQERLVFSVARLEAMVREVERVAADDPEAGLDRLLAATERIGQQLVDLAGLLLDEVTRLQAQSAFESLAEKIAETRETFDQLGGRKST

SEQ ID NO: 10174 - protein, 133 aa, BradyrhizobiumColbertium
MNLLFTYLSVAVTFVAVDMIWLRIMVERLYRPVLGDMLRAEPNLGAAAVFYLLYPVGLIWFAVLPAQQDGSALRAFTSGLMLGCFTYATYDLTNQATLRNWSTGLTLADVCWGSLLAGVSSWIGYLVAQKLAH

SEQ ID NO: 10175 - protein, 263 aa, BradyrhizobiumColbertium
MVLVHVQAIGGIALALCILMGLAWVVQQRTGNSGWVDAIWSYATGLVGAVAALWPFEDGTPERRVLVATLALLWSVRLGTHIARRAAAGIDDPRYANYARQWGAAAPRRMFLFLQSQALVSVPLPFAIFLAAHAPEPGLRLQDYIGAFIILVAIAGEGLADQQLRRFKLSPCNHGLVCDMGLWRWSRHPNYFFEWLGWLAYPVIALAPGYAWGWASLAAPAIMYWILVHGTGIPPLEEQMLKSRGDLYRDYQARTNAFFPWPP

SEQ ID NO: 10176 - protein, 437 aa, BradyrhizobiumColbertium
MRLAVIGTGIAGNAAAWLLSKRHAVTVYERELQPGGHSHTVRVLYDGEPIDVDVGFIVFNEANYPQLTALFAHLGVRTVETCMSFAMSADHGRFEWRGGGETLLQAARGLFAQPRNLGSPSYFRMLAEVLRFNRQSETDLRAGRLHGLTLGDYLRKESFGPRLFADYLGPMGAAIWSSSSADILSFPAENFVAFFDNHRLLHLDRPRWRTVEGGSRRYVDKLTALFKDNIRLGCAVTSVNRAEHGVTIRDSHGGVETYDAVVMACHSDQALAALSDADAHERSILGAIKYAPNTVYLHRDRSLMPRRRQAWGSWNFLRWPRQTPTQNDVAVTYWMNRLQGIDDSKPLFVSLNPPFEPAAHLTFAKFSFAHPQYDLAAFAAQRRLPAIQGRRRTWFCGAWTGYGFHEDGLQAGISVAEALGSTVPWRHSDSLLIQAAE

SEQ ID NO: 10177 - protein, 262 aa, BradyrhizobiumColbertium
MTPTKPANAENATAPAALYWGKVMHARWRPVQHRFTYRVMSLLIDLDRLNEADRQSWLFGINRAAPFSFHECDHGDGKGGCLSQHARRLAAERGVDLSGGRVLLLCYPSVLGYVFNPLSVYFCYAASGDLALLIYEVRNTFGEMHSYVLPVQDARPGGAIRQNQAKEFYVSPFMEMGTHYRFSISPPAQNVTVRIVQTGEQGAMFAAAFSGRRRALNSRSLLAALVALPFLTFKVIAAIHWEAMRLWLKGVPYLPRLKQRET

SEQ ID NO: 10178 - protein, 405 aa, BradyrhizobiumColbertium
MDLAAARHSVQFDGVPFLARLALRLASQLRYGTVHVRLPDRRVVALRGQLPGPSATIELNNYRFARSLVLGGDIGMAEAYIRGDWTTPDLTQLLYLFCLNEDLVDSAFAGNVLVRLCRRALHRLRRNTRQGSRHNIHRHYDLGNEFFAAWLDTSMTYSSALFSTETADLPAAQRHKYEQLAKAIELQPGQSVLEIGCGWGGFAEFAAKTYGATVLALTISKEQHEFASRRIHEAGLAEKVEVRLQDYRDQDGRFDRIASIEMIEAVGEQFWPAYFSQLSQRLKPGGLAGIQAITVRDELFDSYRQRVDFIQRYIFPGGMLPSTSILRTLGERFEMPVIRERLFGQDYAKTLALWRDNFSQAWSDLTSLGFDEPFRRLWEYYLCYCEAGFRAGKIDVGQLVFARRS

SEQ ID NO: 10179 - protein, 563 aa, BradyrhizobiumColbertium
MLSKWSIRSKIIAVIVLLLAIMGGLGVIAVRSMQGINAHTVEIATNYLPSVRVLGALRADINAYRSSIRDHLLGETAEEKAAAEKKMAADIETIKKDRKSYEPVIASPEERAIYNDWTRVWEEYRKGVDEVIEASRKSVGRPADEARDLLYAKYSKLRAQSDELLQKDIDFNDTGANTETKSAADGYSTAFTVITGVIVAAMLCGALIGFLVVRDVSKGIASIIKPMQELGQGDLSAEVMHRGERTEVGAMADVLQIFKEALIAKKRADEDAARDAEAKIDRGRRVDNITREFESMIGEIVETVSSASTELEASASTLTSTAERAQEVTTMVAAASEEASTNVQSVASATEELSSSVNEISRQVQESARMAGDAVDQARKTNDRVGELSRAAGRIGDVVELINTIAGQTNLLALNATIEAARAGEAGRGFAVVASEVKALAEQTAKATGEIGQQISSIQSATQESVGAIKEIGGTIEKLSEIASTIAAAVEEQGAATQEISRNVQQAAQGTQQVSSNIVDVQRGATETGSASTQVLSAAKSLASDSTRLKVEVQKFLESVRAA

SEQ ID NO: 10180 - protein, 83 aa, BradyrhizobiumColbertium
MRSRFGTVKWTPTDKKITANCVHTDLSGMLDFGVPYFHTASLNGHATEYGVPREAYYGFVNRDFQNAIQFRTSKPLRATALGV

SEQ ID NO: 10181 - protein, 249 aa, BradyrhizobiumColbertium
MLPTVGAFQAATRQQTQASTGAHALILADPDPVVFSGRGNPENAQIGINWQHAAYREVLARIYDRDGASIFPQPRFDLRSMEGQLLHFMARGIAAGHFEEISGSPNASALISEAMLRLIIEGSNLGGDSIFERTPADASSRQVRAAIDLMNERLHEPLTLSKLAEELGISGRSLQQGFRRYQDTTPLTYLRRLRLEAVHRELSNPQNELPVNEVAAKWGFAHLGRMAKLYRASYAMSPSETLRRAKSRR

SEQ ID NO: 10182 - protein, 38 aa, BradyrhizobiumColbertium
MSPPLDQSRKDVRDRKDTNDVGNALGGKAVEPLPSRYS

SEQ ID NO: 10183 - protein, 39 aa, BradyrhizobiumColbertium
MPISTWLSIEPKRLHDVVAGYNRFDVFDYHVRRERLRPS

SEQ ID NO: 10184 - protein, 37 aa, BradyrhizobiumColbertium
MLEATPISESFFADPTGVVFGEATTDEGLVYADLDLA

SEQ ID NO: 10185 - protein, 134 aa, BradyrhizobiumColbertium
MKISHVSDNPEEWQEYHFTEPKEGPLVAGELYFIRTSGSTGTMMSGVWRSGKGIAGSSVDAKGTLVTPYTGTLGDETILLLEGEVEVVETDSGKKHSFKAGDVIGLSSGVHITWTSKGPFTKKLWVITRDVLPD

SEQ ID NO: 10186 - protein, 59 aa, BradyrhizobiumColbertium
MRSGGYGGDAALYRCVSAWRIDRRSATPRPRVHRFHRGASAGNRSDAKASGGWEVEVLR

SEQ ID NO: 10187 - protein, 523 aa, BradyrhizobiumColbertium
MAKTATKKASKKKSASKKAAKTAKKANSGRKSAVAKPARKSAPRRSAAPRLPKGPAWQWSAVETAAAIRSGAISAVATVEAHLERMRAVNPKLNAVVVDLSEEALAAAHAADKQRAKGGDLGLLHGVPITIKENVDFQSRPNFNGVPANKGLIAPSDAPVVRNLKKAGAIVIGLTNTPEFSFRGFTDNPLHGLTLNPWDPDITCGGSSGGAGSAVAAGIGTIAHGNDIGGSLRWPAHCNGVATIKPTQGRIPAFNESATAERPMLAHLMSAQGPLARHVADVRLALEVMSQRDPRDPWWVPAPLVGERPKGPIKVALAKIPEDMDVDPSVSAALRQAADHLERSGYRVSEVEVPDINGVWQTWCDIITNETVVMQEAGMLKVTSEDFHKAWGGMKAKANVLDLKGWMQATAARNGHIRAWQLFFEEYPVVLAPTTVKPTPGPRDDTISAERVREIFWGEIRFISAINVLGLPGAVVPVALHDGKPIGVQLIAGRYREDLALDAAAAIEKRAGVLARQLWEQMS

SEQ ID NO: 10188 - protein, 121 aa, BradyrhizobiumColbertium
MIGDVDEGEMQRRLTGRDRERADAAFELGDALLQHRAGRIGDTAVAKAFGLEIEQGGAVIGAVEGIGRGLVDRHGHRMRGGFGLVAGVNSNRLVAHYATSAWGGPHLLACMRHVRCPPLLC

SEQ ID NO: 10189 - protein, 166 aa, BradyrhizobiumColbertium
MGSVLSPFNAFLLLQGIETVALRMERHVENARKVAEFLRGDPRVAWVNYSGFPDSPYYPLVQKYLNGNASSLFTFGIKGGMEAGKSFYDALKLITRLVNIGDAKSLACHPASTTHRQMSAEQQRAAGVLPETIRLSIGIEHVSDIIEDIDQALERACSPARLEAAE

SEQ ID NO: 10190 - protein, 332 aa, BradyrhizobiumColbertium
MTILIDKDQVIAGPALVPAEHDLAREAGDELTIGLVNNMPDPALKATERQFMKLLQAAAGPRRIRFYCFSLPSVKRSPEAKWHIESEYSDLSDLERGKFDGLIVTGAEPIAPELDQEPYWRDLTNLIDWAKINTRSTIWSCLAAHAAVLHLDGIERRRLPAKCHGVFDCDVVTADSLTRAAPAPFKVSHSRLNEIAESDLEQAGYQVLTRSAQAGVDVFIRQYASRFVFFQGHPEYDALSLQREYLRDIGRYLARERDNYPRLPVSYFDAATEEKLARFEKRAAHQRHPALSNELPRLNLRADIGAGSAAAVLFRNWLRYLGAAADASAAVR

SEQ ID NO: 10191 - protein, 218 aa, BradyrhizobiumColbertium
MVSFTFDDAPDSAASEGAELLEKHGGRGTFYLAGSLIDQPSEHWHGLSNDAIVRLHRAGHEIACHTYSHRNSATLDEGAMAREIERNRSYFRGIDSSITLENFAYPYGVASIWRKPQLTKAFRSARGILPGVNSDVIDLQFLRASPLIDCEIDKAGVDRYFDEAVASGGWLIFYGHDVTDRPSPYGCTPDLMRHALAAAGKRNMPIVTVAEALRRIGA

SEQ ID NO: 10192 - protein, 621 aa, BradyrhizobiumColbertium
MSAPSTATVPVPANGHDALSVLHSVFGLPDFRGAQGEIIRHVTQGGNCLVLMPTGGGKSLCYQLPSLLREGCGIVVSPLIALMRDQVAGLIDAGVNAAALNSSLTPQEASDIERRLLAGDLDLLYVAPERLVTPRCLSLLAQAKVALFAIDEAHCVSQWGHDFRPEYVGLSIIADRFPDVPRIALTATADELTRKEIVERLHLTGAPQFVSSFDRPNIRYEIVDKRSPVSQLKELIRERHAGDAGVVYCLSRNRVEEVAAALQEAGIAALPYHAGLDGSVRSRNQDRFLNEDGIVIVATVAFGMGIDKPDVRFVAHLDLPKSIEAYYQETGRAGREGKPSTAWMAYGLSDIVQQRRMIDESNASDEFKRVSIGKLDALVGLAETPHCRRRRLLAYFGEIAMGESCGNCDNCLTPPKMRDGKVLAQKLLSCAYRTGQRFGAMHLIDVLVGRLTEKVTQFGHDKLSVFGIGRELNEKQWRTVLRQLVAMGHLQSDSEAFGALKLTESSRGVLRGETEVWLREEATGTRTRSSRARSRRGDLAPAAGAPQGDVDPELRARLRSWRSDVARERGVPAYVVLHDTTIDGIVRAWPTTLDELRTVPGIGDKKLEHYGDELLQIIRTR

SEQ ID NO: 10193 - protein, 338 aa, BradyrhizobiumColbertium
MMLEKFARYPLTFGPTPIEKLERLSKHLGGNVEIYAKREDCNSGLAYGGNKLRKLEYIIPDAIASNADTLVSIGGVQSNHTRMIAAVAAKIGMKCRLVQEAWVPHEDAVYDRVGNIMLSRIMGADVRLVDEGFDIGIRKSWEQAIEEVKAAGGKPYAIPAGASVHKFGGLGYVGFAEEVRKQEAELGFKFDYIIVCTVTGSTHAGMLVGFAADGRARKVIGIDASFTPAQTKAQVLEIAQNTAQLVELGKEIVADDVVLIEDYAYPAYGVPSEETKGAIRLTARLEGMITDPVYEGKSMQGLIDLAKKGHFEKGAKILYAHLGGAPALNGYAYAFRNG

SEQ ID NO: 10194 - protein, 154 aa, BradyrhizobiumColbertium
MSSRLDRIDLKMLRLLQNNGRLSNAELAETVAISPATCHRRTQRLFEDGFIAAVRAMVAPKKVAKGTLVMVGVVLDRSTPESFASFEQAITKLRCVLDCHLVAGDFDYFLKIRVGDMEDFNRIHGEQLIALPGVRQTRTFFVMKEVVDNAPLEF

SEQ ID NO: 10195 - protein, 284 aa, BradyrhizobiumColbertium
MGLACLAISASAAFGEADDDETAKPAIPNIYLDLRTNYAKIPSGTLGLGFGNTSLSAALQALAVRRGATLPHGLPATTAIAIDLPLTVDVSDRVSLYGGVSGSTTDDGRGWSSFDITSWNIGVQADLYQQNGGTIPTITLQSTLTQSVPNEQGMTNSFNNILEFDYALDEDETRGWLAGTQYTTTAIASPFANIGTNTILYAGGYYQWPSNWKFTGRLGVQSFGGAQLAGRTIAESFTQPILRLDLDRMDDNDNRLFGITALIAWAPKPSYQLTLRTPLYAVRN

SEQ ID NO: 10196 - protein, 111 aa, BradyrhizobiumColbertium
MDCIDARGYPAVIAPTLAGYSSGRTMEDEAMNTSRRILLAGMAGLIAAPTAVTATPASAADDVTVAEERFARMIAAAHAPDINCARQAERYADAHWPEYVVAARAVLDARV

SEQ ID NO: 10197 - protein, 311 aa, BradyrhizobiumColbertium
MPLDPLAKRLLTMMAAAGPQARSRPSVEARRQSLAKLMQFARAEAPDVATSDGTLTGHATELAYRLYTPASAEELAPGFVFFHGGGLVAGSIATHDRIAAALAHATGCRLVSVEYRLAPEHRFPAAVDDAIAATEWVAREAASLGIDADRLVIGGDSAGATLAAIVCQEAAQTAGLSIAAQCLICPVLDFEETSPSREAFAEGHLIDRATIEADLSDYLPDDIDTADPRVSPLRATRLTGLPTAIIHTAEYDPMRDEGNAYARKLLAAGVAVEHVCHDGMVHNFHAMGAILPQAQLVLSQIGEQVRRAVKR

SEQ ID NO: 10198 - protein, 295 aa, BradyrhizobiumColbertium
MAEIKKPIEYSPSWTFFEGKWHDGNVPIMGPRTHAAWLGSIVFDGARAFEGVAPDLDRHIARANQSALNFGLKPVVDTDTWLTLAREGIARFGPYAELYIRPMYWAQNGSGGGVLFDPETTNWCLCIYEAPMPKPVGNAITLSPFRRPTAECAPVEAKAACLYPNNSRALAEAASRGFQNALMLDMLGNVAEFGNSNVFMAKDGVVFTPVPNGTFLNGITRQRVISLLRGDGITVVERTLRYADFLAADEIFSTGNFAKVAPVIRIDERELKPGPFYARARKLYWDFAHAMKQAA

SEQ ID NO: 10199 - protein, 206 aa, BradyrhizobiumColbertium
MSDRSAHWENVYLTKGEAEVSWFQNSPATSLDLIRAATPDHGAAIIDIGGGASRLVDALLQDGYRDVSVLDLSANALDAAKKRIGGAASMVDWIVADATTWQPAKTYEVWHDRAAFHFLTDPRDRAAYVERLRSAVAPGGNVIIATFAPDGPEKCSGLPVQRHDSASLAAALGPEFELVETRSETHHTPWDSTQAFQFSRFRRRGA

SEQ ID NO: 10200 - protein, 194 aa, BradyrhizobiumColbertium
MAKSDQPTTIKKYANRRLYNTGTSTYVTLEDLAAMVKDGEDFLVYDAKTGDDITRSVLAQIIFEQENKAGQNLLPTTFLRQLIRFYGDSMQMVVPKYLEQSIATLTQEQEKFRKQIANTLSGTPFAPLEEQVRRNMELFQQTFSMFKPFAAPRSATTPEPDANAEAPKDSNIDDLRQQMKEMQERLERMSKKDE

SEQ ID NO: 10201 - protein, 392 aa, BradyrhizobiumColbertium
MSDDVVIVSAARTPVGSFNGAFATLPAHDLGAVAIKAALERAGIEPGRVSEVIMGQILTAAQGQNPARQASIAAGIPVESPAWGVNQLCGSGLRTVALGYQALLNGDSEIVVAGGQESMSMAPHAQHLRGGVKMGGLELVDTMIKDGLWDAFNGYHMGNTAENVARQWQITRAQQDEFAVASQQKAEAAQKAGRFNDEIVPVTIKTRKGDVVVSADEYPRHGATLDAMAKLKPAFEKDGTVTAGSASGINDGAAAVVLMTAKQAAKEGKKPLARIVSWAQAGVDPKIMGSGPIPASRAALKKAGWNVGDLDLIEANEAFAAQACAVNKDLGWDTSKVNVNGGAIAIGHPVGASGSRVLVTLLHEMQKRDSKKGLATLCIGGGMGIAMCLARD

SEQ ID NO: 10202 - protein, 241 aa, BradyrhizobiumColbertium
MARVALVTGGTRGIGAAISKALKAAGYKVAASYAGNDAAAEKFKAETGIAVYKWDVSSFDACAEGVKKVEADLGPIEVLVNNAGITRDTAFHKMTLEQWNAVINTNLGSLFNMTRQVIEGMRARKFGRIISISSINGQKGQFGQVNYSAAKAGDIGFTKALALENAKGGITVNAICPGYINTEMVQAVPKDVLEKNVIPQIPASRLGEPEEIARAVVFLAADDAGFITGSTLTVNGGQYMV

SEQ ID NO: 10203 - protein, 289 aa, BradyrhizobiumColbertium
MTPRTATLIGLTAILMWSLLSVMTVATGKIPAFQLAAMTFAIGGLVGLLTWIGRNGATKSLRQPLVVWVVGVGGLFGYHALYFLALRFAPPAEAGLLNYLWPLLIVLFSSFLPGERLAAHHIIGAVLGLVGTVLLFAGNTSGFAPGAVPGLIAAFIAAFVWATYSVLSRRLKAVPTDAVAGFCLATAALAALMHGLLETTVWPETRVQWLSVIALGIGPVGAAFYAWDIGMKRGDIRVLGAASYATPLLSTGFLIAAGFAKASASIALAAILIAGGGLIAAKDMVLRKR

SEQ ID NO: 10204 - protein, 140 aa, BradyrhizobiumColbertium
MPTAAEIIARLELRPHPEGGHYRETFRDQATDANGRSRSTLIYFLLARGERSHWHRVDAVETWHYYAGNSLILRIAHEGCSQHEVRLGSDLVGGERPQGIVPANAWQMAETTGEWTLVGCTVAPAFEFAGFELAPNGWEP

SEQ ID NO: 10205 - protein, 255 aa, BradyrhizobiumColbertium
MAAEIRTFTCLNDNFGYLIHDVETKATASIDAPEAGPILEALEREGWQLTDILITHHHGDHVGGVAELKQKYNCRVVAPHDKTTKIANVDLRVANADVVKIGNLLARVVETPGHTLDHISYVFDTEKAVFAADTLFSIGCGRVFEGTYPMMWDSLLKLRALPDDFKLYCGHEYTASNVRFALTIEPDNAALQARAAEVTKLRAENKPTIPTLLGEEKRANVFLRADEPSVAAKLHMKGADPASVFGELRERKNKS

SEQ ID NO: 10206 - protein, 265 aa, BradyrhizobiumColbertium
MQYSARSAGRVHDTLPVMTIDVVDLREFYSRRLGIVARQMINRGIRERWPRAEGQRVLGIGYPTPYLGLFREDAERCIAFMPAAQGVLKWPTGRPALASLVDEFSLPLPDAAVDRILLVHALEMSDDPAALLREVWRVLSPSGRVIAVIPNRRGMWTRTDNTPFGHGRPYSRSQITELFRQTWFTPTAWGEALFMPPYAGGWVLRSAQMWERAGAALSLPFAGVHIVEATKQVYRAIPAKRERARLIPSLGKPVLVPSSTTATRS

SEQ ID NO: 10207 - protein, 257 aa, BradyrhizobiumColbertium
MRNGQNKQRMRNRNNNNNNNRRGQNPMTRVYESNGPDIKIRGTASHIAEKYLQLARDARSSGDPVAAENYYQHAEHYFRLIAAAQEQFRQNQQPRGDEPISNSSDDGEDDGENFSAFGQEPGFVPQPQQQPFMRDRDGQRDHHQRDPQQRDSQPPYQRDNQQPREHRERDHRPQPQYQPPPANQPQPVIADAGGVDRLPSFITGAQPQVNVGANGGQGGFEGGGGERFPRRRRRPHGPRPEREAAPVASSDEVAPGE

SEQ ID NO: 10208 - protein, 292 aa, BradyrhizobiumColbertium
MSNPFTGQSIEGARRALAARLRSAQFDEAELDARILISAVLGLDLTGLITQAGRPLTAAEASRLAQHAERRIAGEPVARILGTREFWGLPFRLSEATLVPRPDTETVVELALEVFRERPTPHPRIADLGTGSGAILLALLHEIPDAFGVGTDLSQNALRTARDNAAALGLADRAAFVACSYAAALRGPFDLIVSNPPYIPSAEIPKLSIEVREHDPHLALDGGNDGYDAYRALIPQAAERLSPAGAVIVEAGQGQAQNIETLMRGAALSIDRPPKTDLAGIPRAVSARKMPP

SEQ ID NO: 10209 - protein, 361 aa, BradyrhizobiumColbertium
MSSLPEAKLDLLLAHHASLEAESLGQLTSERYVQITRELAEITPLVEAVKTYRSAVKELADTEALIADPATDAEMRSMAEAERGELTSRIEELVQKIRVALLPKDAMDDRNVVLEIRAGTGGDEASLFAGDLFRMYERFASLQGWKVEVISASEGTVGGFKEIIAEVQGRGAFSKLKFESGVHRVQRVPDTETQGRIHTSAATVAVLPEVEDVDVEIKNEDLRIETMRAQGAGGQHVNKTESAIRITHIPTGIVVMMQDSRSQHKNRASAMNILRSRIYDAERQRVDAARSAERKEKVGSGDRSERIRTYNFPQGRVTDHRINLTLYKLPQVIAGEALGELIDALTTEHQAAQLAAQGAAA

SEQ ID NO: 10210 - protein, 745 aa, BradyrhizobiumColbertium
MLRRLRETMAEQVSAQERLDKIVVLIAANMVAEVCSVYVLRIDNTLELYATEGLNREAVHHTVLSAHEGLVGLVASEATPLNLSDAQSHPAFSFRPETGEEIYHSFLGVPILRAGNTLGVLVVQNRAKRNYVEEELEALQTTAMVLAELIASGELSALAQPGQEPAARHSAQKVGAILSEGIALGHVVLHEPRVVIKDYIAEDLPKEIKRLDTALAKLRADLDRMLERGDVAEGGEHREVLEAYRMFANDQGWSHKLHEAVATGLTAEAAVERVQSDTRARMLRSTDPYLRDRLHDLEDLGYRLMRQLVGQDHAPSREQLPDNAIVIARAMGPAALLDYDRKRLRGIVLEEGTANSHVSIVARALGIPAVGEVPNAPGIADPGDAIIVDGTSGSIYVRPSQEVEAAFAERVRFRARRQAQYLALRDRPCVTKDGQNVELMINAGLAIDLPHIEDTGSAGIGLFRTELQFMVGQSLPRTSDQLALYRTVLDAAGSKPVTFRTLDIGGDKALPYMEAVIEENPALGWRAIRLGLDRPGLLRGQIRALLRAGGGRALRIMFPMISEVAEFDAAKALVERELTYLRQHGHTLPERIDIGTMVEVPALLYQLDELLKKVDFISVGSNDLFQFLFAVDRGNAKVSERFDTMSAPILRALRDIARKAHAAKKSLSLCGEMASKPIGALALIALGYRSLSLSATALGPVKAMVLDLDARKAEAVLGPLLDAPAGSVSIRQKLTEFAEAEGLAL

SEQ ID NO: 10211 - protein, 418 aa, BradyrhizobiumColbertium
MSRLVMKFGGTSVANIERIRNVARHVKREVDAGHEVAVVVSAMAGKTNELVAWCTEASPMHDAREYDAVVASGEQVTSGLLAIVLQGMGIQARSWQGWQIPIKTSDAHASARIEDIDGSEIIKRFQERKEVAVIAGFQGINPETNRITTLGRGGSDTSAVAIAAAVKADRCDIYTDVDGVYTTDPRIVPKAKRLDKIAFEDMLELASQGAKVLQVRSVELGMVHNMPIFVRSSFDKPEDIDPHANQPPGTLICSEEEIMESHVVTGIAFSKDEAQISVRHIEDKPGVAASIFGPLADANINVDMIVQNVSEDGKTTDLTFTVPAADYTRAKDTITAAKGKIGYARLDTATDVAKISVIGSGMRSHAGVAAQAFSALARRNINIRAITTSEIKFSVLIDTAYTELAVRTLHTLYGLDQA

SEQ ID NO: 10212 - protein, 155 aa, BradyrhizobiumColbertium
MARYIDEILQPGERVLYSTNAHWIFYFPAIMAWIVALALFILSRQVTVDWLFLLCLGGAGLVALAALYWTIKGWFHRFTTETDVTNLRVVHKTGFIQRRTFEMALDKVESVDVNQTILGRILNYGDVTINGVGEGRETIRTIASPLAFRSSITTR

SEQ ID NO: 10213 - protein, 255 aa, BradyrhizobiumColbertium
MSMQQNPSLSAQPGSTVDAAEIAKFSKLSAEWWDPKGKMAPLHRINPLRLGYIRDAACRKFERNVRSLSCLGSLRVLDIGCGAGLLCEPLSRLGAQVVGIDPSASNIAAAKLHADKSHLAIDYRCTTVEEVDPRERFDIVLAMEVVEHVTDVGVFLKRCASMLKPNGLMVVSTLNRNWKSFALAIVGAEYVLRWLPRGTHEWNKFVTPDELAKHLLDNRLVITEQTGVVYSPFADKWSLSSDMDVNYMVVAEAMV

SEQ ID NO: 10214 - protein, 299 aa, BradyrhizobiumColbertium
MLTIASLWIPFTIIAALGQVARNAMQRSLTKPLGTWGATNIRFLFGFPFSLLFLGVVLIGTGDHLGLPPTLFWPWLLLGALSQIVATGLMLLAMNDRSFVVTTAYLKTEAIQTAIFGFVFLGDHLTWLKVLAIVIATIGVVITALRPGGEKSFAELKPTITGLVAAAAFALSAVGFRGAIINVPGVSFVTAASFTLVLGLFVQTLVLTIYLLWRAPDVLRGILKLWRPSMLAGFTGAFASQFWFLAFALTAAANVRTLALIEVLFAQGVAYYSFKQSIAPRELAGIALIVIGVAVLVGV

SEQ ID NO: 10215 - protein, 161 aa, BradyrhizobiumColbertium
MIRYALRCDRNHEFESWFQSSSAYDSQVKRKLVTCPICGSAKVDKAIMAPRIVGKKGRGRATPPPEPVATAATPDAAASGSTSLLMAQERELRAKLKELRDHIVKNADNVGERFANEARAMHYGDKEHRPIYGEASPEEAKSLIEEGIEVSPLPTLPEDRN

SEQ ID NO: 10216 - protein, 292 aa, BradyrhizobiumColbertium
MSEVRTFTAAMVQMRTGLMPGPSLEQATKLIRQAAANGADYVQTPEVSNMMQLNRKALFEHLQSEEDDTSLKAYRALAAELKIHLHVGSLALRFSAEKAVNRSFLIGPEGNVLASYDKIHMFDIELPDGESYRESANYQPGETAVISDLPWGRIGLTICYDVRFPALYRALAESGAYFITVPSAFTRKTGEAHWHVLLRARAIETGCFVFAAAQAGLHENKRETYGHSLIIDPWGEILAEGDVEPGVIMARIDPAKVETARRAIPSLQHGRRFGVSDPKAGPDHLHLVRGSA

SEQ ID NO: 10217 - protein, 91 aa, BradyrhizobiumColbertium
MTAAVEIYTRPGCGYCSAAKSLLTRKKATFTEFDVAKNSAWRQEMYDRAGQGSTFPQIWIGGTHVGGCDDLYALDREGKLDGMLQSVKAVS

SEQ ID NO: 10218 - protein, 245 aa, BradyrhizobiumColbertium
MLSRAARLALDIALPTQCVSCQEPVDGEGVCASCWGRLSFIERPYCPRLGIPFVYDPGPDMLSMEAIASPPAYQRARAAVRYDDVARTLVHALKYQDRTDLAPAMGRWMARAGSELLTGADMLVPVPLHWRRAWRRRYNQSGALARVIALQSGVRVRGDVLRRVRATEQQIGLSRAQRATNVQGAFQVSPERQAEVQGRRIVLVDDVLTSGATLDACARVLLRARAAQVDVLVFARVVESSPGPI

SEQ ID NO: 10219 - protein, 290 aa, BradyrhizobiumColbertium
MEIGVTSGMAQTPQTPPALFDRALLNARQRRAQALGEVTFLLDRVAEDMSDRLAAVMREFQAPADLWTPGSGLPALRTPLPSITRIAPDATGAEELPFAPESLDLVVSALALQFVNDLPGVLAQVRRALKPDGLLLAAMIGGDSLTELRQAFAAAEAECEGGVSPRVAPFADLRDVGALLQRAGFALPVTDVDRVVVRYGNAFALMQDLRRMGAANVLIERSRTPTRRATLLRMAEIYAERFADADGRIRATFDIVWLSGWAPHASQQQPLKPGSAKASLAEAVKKAGKE

SEQ ID NO: 10220 - protein, 136 aa, BradyrhizobiumColbertium
MADLKLTLVVACALVDADKRVLIAQRPEGKALAGLWEFPGGKLEAGERPEQSLIRELHEELGITVAEPCLAPLTFASYGYETFHLLMPLYICRRWEGQVTAREGQTLAWVRANKLRDYPMPPADIPLIPHLIDLLM

SEQ ID NO: 10221 - protein, 398 aa, BradyrhizobiumColbertium
MPVIAGVRLATAEAGIRYKNRTDVLLAVMDKGTAVAGVFTKSKCPSAPVEWCRAKLKGGKARALVVNSGNANAFTGKTGRASTALTAKIAAKAVGCSESEIFLASTGVIGEPLDATKFDGVLGRLAGTAEPGDYLAAAKAIMTTDTFPKVATATVKLGKAKVTINGMAKGAGMIAPDMATMLSFIFTDAPIAPAALQALLKAGVEDTFNAVTIDGDTSTSDTLLAFATGSAAEHGAPRISRASDPRLKAFVKAFNQILANLAEQVARDGEGARKLVEITVEGAKTKASARKIAMSIANSPLVKTAIAGEDANWGRVVMAVGKAGEPADRDKLSISFNGIRVAKNGARDPSYDEAQVSEAMKAPEIAIRVSLGLGKGRDRVMTCDLTKEYVAINGDYRS

SEQ ID NO: 10222 - protein, 312 aa, BradyrhizobiumColbertium
MTTSFPVTTGQRFRHASALAGSLALALSLAFAGPLRAADDPVLAKVNGAEIKKSDVTMAEEELGPSLAQMDPATKDENVLSFLIDMKIVSKAAEDKKIADSEEFKKRLAFARNRLLMDSLLASEGKAATTPDAMKKVYEEASKQISGEQEVRARHILVETEDEAKAVKAELEKGADFAELAKKKSKDPGSADGGDLGFFTKEQMVPEFSAVAFSLEPGKISDPVKSQFGWHVIKVEEKRNRKAPDFEQVKAQIEQYVTRKAQAEYVAKLRTEAKVERLNQPAADASKDAKSDAKPADTAKPSDSKMAPPAKK

SEQ ID NO: 10223 - protein, 946 aa, BradyrhizobiumColbertium
MIGALARKFFGSANDRRVKGYQSRVNAINALEPELSKLSDEALKARTAEFKQQLANGKTLDDLLVPAFATVREAAKRTLGQRHFDVQLIGGMVLHEGDIAEMKTGEGKTLVATLAVYLNALAGKGVHVVTVNDYLARRDSGWMGQIYGFLGMTTGVIVHGLDDAERKAAYACDITYGTNNEYGFDYLRDNMKYRLEDMVQRPHYFAIVDEVDSILIDEARTPLIISGPLDDRSDFYNTIDSFLPKLDKTDYDVDEKQRTVTLTEGGMEKIETLLRDAGQLKGESLYDVENVSVVHHINQALRAHTLFTRDKDYIVRDDEVVIIDEFTGRMMPGRRYSEGLHQALEAKEHVQVQPENQTLASITFQNYFRMYEKLAGMTGTAATEADELFDIYKLEVVEIPTNLPVARLDEDDEVYRTQQEKYRAILAEIERANARLQPVLVGTASIEKSEVLAEFLKKNGYKQIDFGKENALDKLYAAARAGKPAKLFAVLNARFHEQEAYIVAEAGVPGAITIATNMAGRGTDIKLGGSLEMRIQQETAGIEDEAEKARKIEQIKADIAHFREIVLKAEETVELEPAKGSKPAKTVKKPGGLYIIGSERHESRRIDNQLRGRSGRQGDPGRSKFFLSLEDDLMRIFGSDRLDSMLQRLGLQEGEAIIHPWINKALEKAQQKVEARNFDIRKNLLKFDNVQNDQRKVIFDQRIELMKDESVAETVTDMRHAFIDDLVAKHVPEHAYAEQWDVAGLKDELKRVLDLDLPVDEWAKEEGIADEELLSRIETKADEHMAAKVAQWGPDVMRYVEKTILLQTLDHLWREHLIMLDHLRQVIGLRGYGQRDPLQEYKTEAFNLFQEMSAHLREAVTAQLMRVEIVPPEQEAPALPPMEAHKFDPNTGEDEMALASVSLGAQASDAALRDPKNPASWGKVGRNEDCPCGSGKKYKHCHGRYA

SEQ ID NO: 10224 - protein, 62 aa, BradyrhizobiumColbertium
MRLRQEVQALPRAVCLIGDLKTWRTRVAVWPASSPCVECFRCISDAAASADCRRPSSVRLRG

SEQ ID NO: 10225 - protein, 51 aa, BradyrhizobiumColbertium
MKLTNPRSGTQGGVYFHHADGNKWYLAKPVSNKAVGWTTWNGQRYALSCWR

SEQ ID NO: 10226 - protein, 147 aa, BradyrhizobiumColbertium
MAKPSKENTPITEHLAYLLAQANREINRQLELRLSKEGVPVEQWRILKVLSDGNGHSMGELADAVLLNHPTLTKMIDRMVSDTLVYRVQDPNDRRKVLMFISDRGKVLCRKLNSLAVDQEEHILESYGDKSTSELKRLLESLIDSSN

SEQ ID NO: 10227 - protein, 394 aa, BradyrhizobiumColbertium
MRATVNFPAHGGPALPPSLLFRNLSSPAADVDLSPFDAQVMKRRGARNKLRIGNFLTFTGSPGIWGPTSTNSAMLAVAEINKRGGILGRELELTIYDSGGPIEDVVRRAEHAIALDEVDLIMGSHISAVRVALRKVTGNRIPYIYTPVYEGGERTPGVMAIGETPRWQSRPSIHWLAEVKKAARWYLIGSDYVWPWQSHRAVKRYIKEAGGQVVGEEFVPVGEDNHEPHLARIRAARPDVVLISLIGTDSITFNRAFAEAGLATSTLRLAGAMDETVLLGIGADNTENLFCASGYFNCMASRANDEFLGGYQAMFGANAPPVGSVGQSNYEGLRFLESVANRAGSLAFRPLLKAARNTVYSAGRGPVTLRDGRAEMPMYLAEADGLDFKIIKAL

SEQ ID NO: 10228 - protein, 69 aa, BradyrhizobiumColbertium
MGWRGKGNCHGALLEGFLIPGVGRKPHLLAPAWHGPIGFASLLETEIFSFSSIISKTAATDQQPPLRAP

SEQ ID NO: 10229 - protein, 504 aa, BradyrhizobiumColbertium
MTVALPTPAQLRSVAEQCGLSLTDDDVASFRGLMQGSIEAYNLVATMPDELPEVKYPRTPGYRPSAEENPRNAWYRKSTVKGAASGKLKGKTVALKDNIMLAGVPMTNGSSTLEGYVPDFDATIVTRMLDAGAEIKGKVHCEHFCLSGGSHTGSYGPVHNPHKMGYSAGGSSSGSGVVVALGEVDMAIGGDQGGSIRMPSSFCGIYGMKPTWGLVPYTGIMPIEIYVDHTGPMTATVEDNALLLEVLAGDDGYDPRIKAPKVEEYTKALGQGVKGMKIGILKEGFEQPTAEAAVNESVREAAKRFKDLGASVETISVPMHLLGGAIWTPIGTEGLTQTMMFGDGYGLSRGDLYSTSLMDFHRGWRRQADSLSETTKLFMLLGTYINNNFGPRFYGKALNISRRLTAAYDKAFKDYDLLLLPTTPMKATKLPEPNASREEYVARALEMISNTAPFDITHHPAMSLPCGMVDGLPVGLMLVGRMFEESTIYRAAHAFEKIGDWKKM

SEQ ID NO: 10230 - protein, 285 aa, BradyrhizobiumColbertium
MANAFVAAFEILSFGAIIVLIVLGLGIIASMMGIFNFAQGEFVLLGAYITYLAYAKGLPIWAGMVAAPFVVGALGFVLEALIIRRFYAAPIVAMLGTYALGLIIRESVRGLIGGFYLTVPEPIGGSIDIGAMHISAWRFTIIVITLLVMGACYLLLSRTSFGLRVRATLENPSLARASGISTPLIYGATFAFGAALAGLAGALIVPVFSLFADLGLRFLIQGFVAVMVGGVGSFIGPVAGAGVIGTLSAALPWVMAPVVADVLVFVLAIVFIKFRPQGLIAGKGV

SEQ ID NO: 10231 - protein, 363 aa, BradyrhizobiumColbertium
MLKFMGAAKQAIHAAVVDEADVSVAEGVPAERPTARKVLPIVEGVVLVAALLAPLVLQDYLTVFATRVIILALFALSFDLVWGYAGIMSFGQALFFGSAGYGVALLARDLNVTNILLVLPAGTLIGLTFALLLGGFLLLGRHPSSVIFVSLGTLTGSYAADRLARGWYYLGGQNGIPSIAPMSLGSYDFTEGPAFYYLVLGILVVVYLLCRFLVRSQFGLALAGLRENEQRIAFFGYKAQHLKAIIFTIGGAVAGLAGSLYAFHEGFVWPNMVGVVVSTQVVLYVLFGGSGTLIGAVIGAIIVEGVSFWLSDNYRDIWPIILGLLLLLVILFRPLGLISFVLGERERVGSFGAKPKEKRNAAP

SEQ ID NO: 10232 - protein, 244 aa, BradyrhizobiumColbertium
MPLLEAAGVKKVFGKLTALDGASLTVGENEFHGLIGPNGSGKSTLMKCIAGAEVPTQGKVSFVNTDITEFTPTERARAGMSLKFQITSVLPSLTLYDNILLALQAQCSLLDLVFSRTRGLLHDQVMTMLTQFRLADRAFEAAAALSHGQQQWLEIAMALAGKPKLLLLDEPTGGMSLEERRVTGELLQPIKQHCSLVIVEHDLDFIRDICDRLTVLDQGKVLASGTVSEIQANKSVQEIYLRRA

SEQ ID NO: 10233 - protein, 231 aa, BradyrhizobiumColbertium
MPEFLDIKHLDAGYGRSQVLFDVNLGIPWRGGVAVLGRNGAGKTTLMKTIVGELPAWKGEVAFDGRDISRRATQERVRAGIGYVPQEHSVFARLSVRDNLAVGSLARKDASAVDRVLTIFPKLGQRLDQPAGTLSGGERKMLAIGRAMLGDPKLLLLDEPTEGVWIGVIEEITERLIDLAKEIAVIIVEQHLDLALRVADYAYVLDRGRVALQGEAGEVRSNPELMRYLAP

SEQ ID NO: 10234 - protein, 526 aa, BradyrhizobiumColbertium
MGSILISRSLARALLASVALMTAGVLLSGCNTDQVSLATNAKANQPVPPKLIAAMAEKDMDLQSPILVRLFKQEAELEIWKQTRSGQFALLKTYPICRWSGDLGPKVREGDRQAPEGFYSINPSQMNPQSAYYLSFNTGYPNAFDKALGRTGSQLMVHGDCSSRGCYAMTDEQIAEIYSLGRESFFGGQKAFQLQAYPFKMTPVNMARHRNNPNMPFWKMIKEGYDHFEVTRQEPKVDFCEKKYVFDAAKPADAKRDPVFDASAKCPAYVIPEEIASAVRQKQAKDEAEYARLVAKGTPVARLNTGIDGGMNKVFAAKIPEGSTGLSESAEGTTLQMLAMAKAPGTIPSHVNPPKPNLDAVASAPASQEEPVVAVNAPASTRVANAALANKSQEKSQGGGFFSNLGRKMGIGSSETTATTPPAQTTASVAPATTTPNPPTAASRLKAAVTRFVPGHDKSKDAAKEAPKPIVAAKPAEPAKPDTRLAQTRPALKPSVSDGASEATQIMGAAPVVQSNSFESRFGAVR

SEQ ID NO: 10235 - protein, 320 aa, BradyrhizobiumColbertium
MQDQMRSYLDFEKPVAELDSKLDELRAMAASGTDIAEEVSRIEDKAAQALADLYQNLTPWQKTLVARHPQRPHFNDFIKGLITEFTPLAGDRKFGEDEALVAGFGRFRGEPICVMGQEKGDSTESRIRHNFGMARPEGYRKCVRLMEMAERFGLPVLSLADSAGAYPGIGAEERGQAEAIARSTDACLALTVPNVAIITGEGMSGGAIAITTANKVLMLEHAIYSVISPEAASSILWRDGTKAQEAANNMKITAQDMLRFGVIDAILKEPVGGAHRDPAAMIATTGDAIAKAFDELRGLDGEAIRKQRRQKFLEIGRKLG

SEQ ID NO: 10236 - protein, 318 aa, BradyrhizobiumColbertium
MRTKPSDTKLIGLFLDMLAAEQGAGPNTLDAYRRDLADFSEFLGRAGHNFADAETQTLRDYLAHLDARGFKSTSVARRLSAMRHLYRFLLNERIRTDDPAAILSGPKRGRGLPKVLSIADVDRMLRRAKELSEAQDASPSKRMRSLRLYCLLEVLYATGLRVSELVALPRSAAKRDARMIVVRGKGNKERLVPLNEASRQAMADYLAATEAAKGDKKNSLAASKWLFPSFGESGHLTRQHFARDLKELAVASGLQARLVSPHVLRHAFASHLLHNGADLRIVQTLLGHTDISTTQIYTHVVEERLKSLVRDLHPLAEK

SEQ ID NO: 10237 - protein, 48 aa, BradyrhizobiumColbertium
MPSLFRFLTVVAVIAGIVYAAVFALANFVSPKSREMIVTIPPDKFLKK

SEQ ID NO: 10238 - protein, 207 aa, BradyrhizobiumColbertium
MSDAALPLPASPEADILSALGARSIVLVGMMGVGKSTIGRRLATRLKLPFVDADTEIEAAAGMTIPEIFEHHGEPHFRDGEARVIARLLESGPVVLATGGGAFMREETRTRIAAKAISIWLRADHDVIMRRVRRRADRPLLQTADPEGTVARLLAEREPVYADADLTIASRDVPHDKIVEECIEALHARLCGGHAAQPPADVASALR

SEQ ID NO: 10239 - protein, 380 aa, BradyrhizobiumColbertium
MTAPLKHSDPVKVDVALGDRAYDIVIGRGVLASVGERLARLRPGVRTAIVTDRTVAKHWLEPTEASLAASGIPTSRIVVEEGEISKTYAGLEKVSEALIAAKIERNDLVIALGGGVVGDLAGFAAAILRRGVDFVQVPTSLLAQVDSSVGGKTGINSPQGKNLLGAFHQPVLVIADTAVLDTLSPRQFRAGYAEVAKYGVLGDEAFFTWLEKNHSDIVKGGAAREHAIATSCRAKAGIVARDERETGERALLNLGHTFGHALEAATGFSDRLFHGEGVAIGMTLAAQFSAKLGMIGEADAARVERHLIEAGVPTRLQDIAGFAQEGLADADALMGLMAQDKKVKRGKLTFILLEAVGRAVIAKDVEPALVRDFLKSKLSQ

SEQ ID NO: 10240 - protein, 450 aa, BradyrhizobiumColbertium
MSSISINLLLAVLLLAANAFYVAAEFALVKSRGFRVKAMVEQNRFGAHLLQAMMGNIESYLACCQLGITMASLGLGWIGEPTVSALLSPVLSPLGLSEATLHFTSFVAGFLVFSSLHIIIGEQVPKTLAIREPMPVSQWIAYPLHVSYLVFYPLSWCLNTASGAILRLIGVQEFSQHEILTDSEIEGLVEESAVHGKIESGEAEYIHNVFRLGELTVSDVMVHRTAMVMINADLPPEELVREVLATEYTRIPLWREKSENIIGILHAKDLLRAIRASEGDTSRIDVTTIMLPPWFVPEMRPISQQLKAFRRRKTHFALVVDEYGEVEGLVTLEDILEEIVGDISDEHDVVVAGVRRQPDGSVVVDGSVPIRDLNRALDWHLPDEEATTVAGLVIHEARSIPDRGQSFTFHGFRFRVLRRERNRITALRISPVPRETELEEAKPRRAGTSF

SEQ ID NO: 10241 - protein, 87 aa, BradyrhizobiumColbertium
MKDTISNKLQEAFTPESLQVVDESHLHEGHAGHRAGGETHFRVYIVSDAFKGKSRVDRHRMINSALAAELSGGVHALAIQAQAPGEG

SEQ ID NO: 10242 - protein, 210 aa, BradyrhizobiumColbertium
MPIDSSKFFDSIRVKPRGKQPEVKPRDTAVNCEWAGCANKGSHRAPKGRENQREYWHFCLDHVREYNQNYNFFSGMNADAVARYQKDALTGHRPTWKMGANGGKKNAEAEIDMASDPFSMFSEINGRANWRKGPEAQPKAETRKVMNAERKALQVMGLGPSATLADVKTKYKALVKQHHPDANGGDRSTEDRLIEIIKAYNYLKTVVREA

SEQ ID NO: 10243 - protein, 78 aa, BradyrhizobiumColbertium
MKKLSYALAAGTLLALSSLAMPAHALTAHPIPGAAVSADVVNARYHYAPRRVCTVRTVVKRGYHGRRIVKRVRVCRVR

SEQ ID NO: 10244 - protein, 364 aa, BradyrhizobiumColbertium
MNIHLTKSQIGLDGVPAAETVLSHVDGERGELIIAGEHVGRLASQSSFEGVTARLWNGASKSNLSEANVRASLGTARERAFARLGDLLPATRGMGIVDGFRAGVAGLRAENGLAHEATIVGALPMIAGALVRRAKGLEPVAPDPNASHAADTLRMLRGSSPEPREVAALDAYLVTVCDHGMNASTFTTRVVASTQADLFAAITAGYCALTGPLHGGAPEPVLEMLDAIGSSDRIRPWVDAALARGERLMGFGHRVYRVRDPRADVLKAAIERLAADGADLPFAGEVEAYIRSALRKKNPDRPLETNVEFFTAILLDALAIPRQAFTPVFAVARAAGWTAHAREQQRTGRLIRPSSSYVGAMPAD

SEQ ID NO: 10245 - protein, 406 aa, BradyrhizobiumColbertium
MKNSSALYLSAREAAAELAVSPATLYAYVSRGLIRSEPTPDSRKNRYRAEDVRALKERRVPSPEPRGLRSFDADLPVMDTEISTITEEGAIYRGVNCVDLSESDTLEHTATLLWDVSGVDPFDPDNQPEISDEMRAIGQAARRAAPIDRAIAVLALAASADPRAFTRAPDGRALVGARIVRLLVATMLNAEPSAEPLHQQIAGAWVADNKHAPDLIRRALVLLADHELNASTFTARCAASTGLNLYDSVIAGLAALKGPKHGGAGVLASQLVKALVDRDVEPMVRERVALGERFAGFGHGVYKRGDPRAQSLLNALSRAGAPRKFTREVPERIAEATGEFVNIDYALAVLVHALRLPAGSELALFAMARSVGWIAHASEQLQFGKLIRPRARYVGPAPGRRAGAAG

SEQ ID NO: 10246 - protein, 219 aa, BradyrhizobiumColbertium
MTSFLDPLIAFVSAHAWLGYLTLFLAALLEAVPVVGSVIPGSTIILALSALVPGGELQLPWVLLAAAAGALLGDGSAYWIGHRRQREILSTWPLTNYPRVVAESENFFNRFGTWAVFFARFVPPIRAFVPVTAGALGMAPARFYAVNIPAILAWAPAHVLPGVLAVTALHDYAGLHHHEHVGKHIWMLTVVGVAVTASVGMWIYRRRRNGAAAVAKPGE

SEQ ID NO: 10247 - protein, 332 aa, BradyrhizobiumColbertium
MTTAALSKVEEVSGLPDMKVSVRQVFGIDSDLEVPAYSEVDPHVPEVDSDYRFDRATTLAILAGFARNRRVMVTGYHGTGKSTHIEQVAARLNWPCVRVNLDSHISRIDLVGKDSIVVRDGKQVTEFRDGILPWALQHNVALVFDEYDAGRPDVMFVIQRVLEVSGRLTLLDQNKVIKPHPAFRLFATANTVGLGDTSGLYHGTQQINQGQMDRWSIVTTLNYLSHDEEVEIVLAKAKHYRTQEGRDIVNKMVRLADLTRNAFANGDLSTVMSPRTVITWAENADIFGDIGFAFRVTFLNKCDELERPLVAEFYQRCFNAELPESAVNVALS

SEQ ID NO: 10248 - protein, 634 aa, BradyrhizobiumColbertium
MSTTSNSKFRNTKEAPTEPFKRSVASCLKAIAKAPELDVTFAAERPGLAPGKARLPEPARKMTKRDAAIVRGHADSIALKIACHDPKVHRKLMPGNPQARGVFEAVEQARVEAIGARRMAGVAKNLTAMLDDHFHRGKFDEITDRADAPLADALAMLVRERLTGMAPPAAAKKMVDLWRPILEDKIGKRLDRLDGVLEDQSKFGDAVHDLLSALELGDERSADSEDNDENDENQDGDNDQSGAEGSPDSDAAQEMSADQAQASSEEMSESAMESAQASTSDTFDDGELGDDETPGEATRPNQHGKNEPRGPEYHAFAPKFDEVIAAEDLCDHDELERLRAYLDKQLAHLQGIVARLANRLQRKLMAQQNRAWEFDLEEGILDPARLSRVVTDPYHPLSFMHEKEATFRDTVVTLLLDNSGSMRGRPITVAATCADILARTLERCGVKVEILGFTTRAWKGGQSREAWLAAGKPANPGRLNDLRHIIYKSADAPWRRARKNLGLMMREGLLKENIDGEALDWAHKRLLGRPEQRKILMMISDGAPVDDSTLSVNPGNYLERHLRHIIEEIETRSPVELIAIGIGHDVTRYYRRAVTIVDAEELGGAITEKLAELFSETNTAPTQAPGRPRRKLHS

SEQ ID NO: 10249 - protein, 365 aa, BradyrhizobiumColbertium
MSTHSSRRSFLGHAAAGLSTLAVSRIAQAQAAAEPPPRTAQRALQVEHAVAEPVSVEVNARPIPNFEPRDRSRTRFGSLDYRSGLVLTSPYRGFGGLSGLRFLDGRGERFLAISDQGGWFTGAIRYSGREMTGLADVEAAPVLGPDGRPITEKKLWYDTESLARDGNLVYVGLERVNQILRYDFAKGGTRARGEAIAIPPALRKLPYNKGLEAMVAVPKGKDQKLPLAGSLIAFSERALDADGNLIAFLIGGASPGQFSVRRTETYDISDAVLLPSGELLILERKFSWFTGVNIRIRAIPLKSIAPGALVDGPALFAADLGHEIDNMEAIDAHVTSEGETVLTLISDDNFSMLQRTLLLQFTLTE

SEQ ID NO: 10250 - protein, 370 aa, BradyrhizobiumColbertium
MSVLFSPIKLRGLTLKNRLVVSPMCQYSAEDGVANDWHFTHVNNLCLSGAAMFCIEATHVEAIGRITPGCLGLYSDACEAALKPILNSVRRYSSTAIAMQLAHAGRKASSARPWDGGQLIPVSEGGWQTVGPSAVPHKEGEAAPLALDEAGLKRIREAFVDSARRAARLGIDAIEVHGAHGYLLHQFLSPISNRRTDEYGGSLENRMRFPLEVFDAVRAAFPADKPVGMRVSSTDWVEGGWDLAQTVAFAKALKARGVDWIDASSGGVSPLQKIPLGPGYQVQFADAIKRETGLPTIAVGLITEAKQAEEIVASGKADMVALARGMLYDPRWAWHAAAELGGQVEAPPQYWRSQPSTQKELFGKTTFGAR

SEQ ID NO: 10251 - protein, 135 aa, BradyrhizobiumColbertium
MRYPVRKAAHIFERVGLAMAGAACGLFVGAHVGSAIPMLTTQGFLLLMMLLGAIGFYLGIDTPQMPFDDAHSQIDAAEFMSAAGTLFATLTAFVSVVVIVLRLDPHMTWTWLVFAGWLAGVVMQIVAGAKARMRK

SEQ ID NO: 10252 - protein, 73 aa, BradyrhizobiumColbertium
MKPAGLVSRQAKIITDPRAPVIPCTLIDYSPGGACVDLGGQVKIPDRFELLHVNTKKRCRIAWKRGTRVGVVF

SEQ ID NO: 10253 - protein, 443 aa, BradyrhizobiumColbertium
MESAATADRKTEPKHLVICCDGTGNEISENISNVLKLYRCLRKTDRTQPRQMVFYDPGVGTVTEPTTWHRFKANVNMVLGLATGYGLDDNLLSAYCFLVQHYAPGDRIYLFGFSRGAYTVRVLAGLIHKIGLISPEQANLAGSGLIAYKQYSGTGHGNDAADVEDVAFDESGPVPKDKFDLAAQFARITSTRWPTIHFVGVWDSVASVIVPRPDRLFWPSLEELAFTLRNPSIRIFRQAIAIDERRCMFRLKQYREPQEFWSNRYVPDEKKVPQDIRQVWFAGVHGDVGGGYPEAESGQSKYPLLWMIAEAAKAGLKFNPRTVNQLAWGVQRKNSPFHYVAPAFTGKTGTLHDSMNWAWRLLEYVPKRATYREWPERKVVLGFYIPDAEPRVIPEGAHVHESVLKRMAVEPDYRPVNMPKDYVTVPMPVEPGADLEAGEMAEP

SEQ ID NO: 10254 - protein, 102 aa, BradyrhizobiumColbertium
MSRRCELTAKGPLVGHKVSHSNIKTKRRFLPNLVNVTFQSEALGRNVRLRVSTNAVKSVDHNGGLDPFLLKADADNLSPRALELKRAIQKKVGDAAPAKQAS

SEQ ID NO: 10255 - protein, 107 aa, BradyrhizobiumColbertium
MRRCRHETIQSERDALLLKPKTAASNVAGPERAGNSTGLIKREYALYVMVRRDKHCRFDDGAAAAGSRLSRSLRRHAPARSGHPVRRGSSGQPRRLGVLDRPVKAGR

SEQ ID NO: 10256 - protein, 294 aa, BradyrhizobiumColbertium
MPTTPHFAQELRPVRPRFAGRLVALCALGLGSGLAFGAAPAAAQGKLEAQYEASLAGIPVGKGAWNIDIQDDVFSAAASGGTSGLLKSFTGGARTGASQGRVVGGALVATGYQASTTTQKKTEEIRITLDKGNVKDFSILPEPPVDPDRIVVTEAHRRGVWDPMTASLLRVPGTGDPVSPEACRNAAPVFDGRMRYELKLDFKRMDTVKAEKGYKGPVVVCSIYFVPIAGYIPDRPVIKYLAAQRNMEIAFAPIAGTRILVPFWLKVPTPLGPAMLEATSFVTSAQPPRVAKTQ

SEQ ID NO: 10257 - protein, 65 aa, BradyrhizobiumColbertium
MWGLGSADLGECQCWMGRCGGWQCQPCLRTPGGQPRAPLSCPGVGTPIPRTPRNCFTLRRFSRSL

SEQ ID NO: 10258 - protein, 1127 aa, BradyrhizobiumColbertium
MPGAGVTAVLGPTNTGKTHLAIERMLAHPSGMIGLPLRLLAREVYNKIAARAGEASVALVTGEEKIKPKNPRYWVSTVEAMPRDLDVSFLAVDEVQIAADLERGHVFTDRILNRRGRDETLLLGAATMRPIIERLLPGVSMITRPRLSQLEFAGDRKITRQPRRTAIVAFSADEVYAIAELIRRQHGGAAVVLGSLSPRTRNAQVAMFQNGDVDYLVATDAVGMGLNLDVDHVAFASDRKFDGYQFRRLTPSEFAQIAGRAGRATRNGTFGTTGRCAPFEPELVNALQNHTFDPVKVLQWRNARLDFSSLGALQVSLNLAPGHEALTRAPIAEDMRVLDHAARDGEVRDIAHGKVAVERLWEACQVPDYRKLSPAAHAELVTTLYGFLMQKGCIPDSWFEAQVTQADRIDGDIDTLSARIAQIRPWTFVANRPDWLRDPERWQGITREVENKLSDALHERLTERFVDRRTSVLMRRLRENTSLNTEIGKTGEVIVEGHVIGRLDGFTFAPDAAEAGSDAKALQAAAQAVLAGEINARAEKLGNAPDEQFVLTSEGIIRWTGDAVARLSAADEALHPRIRIISDERLTGPPRDKVQARLELWLKTHIEKLLGPMFELSKAEDVTGIARGIAYQLVEALGVLERPKIANELKDLDQPSRAVLRKYGVRFGAYHIYFPGLLKPAARALAALLWALKQDNVDLSALSGAQHLASSGRTSFPVDKALPRDAYRVLGYKQAGERAVRVDILERLADLIRPALAWRENSPGEKPAGAFDGRSFVVTQAMTSLTGSAGEDFASVLRALGYRMEKRPPLPPKPVVAETVAAETVATETVVAETPPVEGSAETSTETAAEAVAGLPAEMTPATEAAVEAVTVEDAPGMEPRDEPAQEEPALEATPEAPVTPEDAPGIAPPAEEAPASTEAAGLEAAAAETAAVEAAASPDAAAPEAPAAPAEPELVEVWRPAGRHEDRKPRHERHRHQRHHNQPRTQPGAETGAAPGAASAAPGEAAEGAKPGHRHGGHRKDFRKGREGGEGGDRRDDRNRSFQGKDRDNKDRDRNRDNKGKFGGDRDKGREHRGRDRDKGRDRQGGPSLRPYASSANPRERDRPADPNSPFAKLAALKEQLSGRKE

SEQ ID NO: 10259 - protein, 74 aa, BradyrhizobiumColbertium
MVKARSSAAELVVTGHVRVNGARETSPGHAIKAGDVLTIALDRTVRVLKVIAFNERRGDAASARVLYEELGTRN

SEQ ID NO: 10260 - protein, 112 aa, BradyrhizobiumColbertium
MTYVVTENCIKCKYTDCVEVCPVDCFYEGDNMLVIHPDECIDCGVCEPECPADAIKPDTEPGLEKWLGVNAEYAKSWPNITQKKESPADAKEFDGMEGKFEKYFSPNPGSGD

SEQ ID NO: 10261 - protein, 275 aa, BradyrhizobiumColbertium
MPNKTAKPAAKATAAKPAAAKPAAAKSAAAKPVTAKAPAAKPATKAPVAAAPAKAPAVTKPAAAPKVEEKKVVTQRQGFKANEFVVYPAHGVGQILAIEEQEIAGAKLELFVINFIKDKMTLRVPTAKVANVGMRKLSDPALVKKALETLKGRARVKRTMWSRRAQEYEAKINSGDIVAIAEVVRDLYRSESQPEQSYSERQLYEAALDRLSREIAVVQHSTETEAVKEIEAQLAKSPRRANAKAEAADGEGDTDAEGDADDTDGDDTTVADEAA

SEQ ID NO: 10262 - protein, 79 aa, BradyrhizobiumColbertium
MKFPRFAMSAFAATVGIGLLAVSASYSPAAAGAFGPDYSWMGNRKYMDCLKYMGAFGPNYPGRDKNIAICKREFLPGGR

SEQ ID NO: 10263 - protein, 177 aa, BradyrhizobiumColbertium
MTADRSLIVVEDDAGFARTLKRSFERRGYEVVLAASIEEVRQVLEQRSFSHAVVDLKLGGASGLACVELLHAHDPDMLIVVLTGFASISTAVEAIKLGACHYLAKPSNTDDIEAAFHKAEGNAEVALDARPTSIKTLEWERIHQTLIETEFNISETARRLGMHRRTLARKLEKRPVK

SEQ ID NO: 10264 - protein, 466 aa, BradyrhizobiumColbertium
MLERSPSPPDDGKTLSQTLARGGLVTLQSQADARSELVGTAPTDHETNRKNMALLIQLRWTAVVGQMVTIGVVHFGLGIPLPLERMGAVIGALVLLNVSSLVWVRHRAAITNNELLVALMLDVAALTAQLYLSGGATNPFTSLFLLQVTLGAVLLDSRSTWSLVALTCASFVWLTLAYRPLDLPPNPLSETYSLTVLGMLLGFVLNAVLLVVFVTRINRNLRERDANLAALRQHAAEQDHIVRMGLLASGAAHELGTPLASLSVILSDWRRMPDLAADQELAEDLAEMETSLQRCKSIVTGILVSAGEARGEGSSPTTVTAFVTALVEEWRDARSARTLYFVNTFGEDVAIVSDVALKQVIFNVLDNAYEVSRDWVELVAEREDDNLVLSISDRGPGFAPEMLAQLGKPYQSSKGRTGGGLGLFLVVNVVRKLGGTVTARNHRKRGATVRLTLPLATLAIGGNFDG

SEQ ID NO: 10265 - protein, 270 aa, BradyrhizobiumColbertium
MHSKAVRPPSLWFTVLSLTALVLLIALGVWQIERRAWKLALIDRVEQRVHAPAQPVPSAASWPIISAANDEYRHVGLSGRFLHDRETLVHAVTEEGPGYWVLTPLQRDDGTQVLINRGFVPSERRDASTRRDGNPEGLVEITGLLRITEPKGGFLRNNVPQHNRWYSRDVAAIAAARGLHEVAPFFVDADAKSQIAGGPIGGLTVIRFPNNHLIYALTWFALAFMLAGRLFVTFGGGLFRRKRFVHDKAGGPNALARRTGSDAGTIAEPT

SEQ ID NO: 10266 - protein, 126 aa, BradyrhizobiumColbertium
MSTDTNAAHAHGHHHGDGHAHGTFSSYMLGFVLSVVLTAIPFWLVMSGTLPSKQITALVIMAFAIVQIVVHMIYFLHMNAASENGWTMMALIFTIVMVVIALSGSLWVMSHLNSNMMPMHQMSGMK

SEQ ID NO: 10267 - protein, 209 aa, BradyrhizobiumColbertium
MTVAVHPSQTGEPVFYLADEHPHPEGWSTSLGFWIYLMSDCLIFAILFATYGVLGGNYAAGPAPKDLFDLNLVAVNTSMLLLSSITYGFAMLTMQQNKVAQTQAWLAITGLFGLAFIGIELFEFAHMIHEGATPQRSAFLSAFFTLVGTHGLHVSCGLIWLVTLMVQVRKFGLIEANRRRLMCLSMFWHFLDVVWIGVFTFVYLLGVLR

SEQ ID NO: 10268 - protein, 665 aa, BradyrhizobiumColbertium
MSPDLPKLIFGRLTLESLPLHEPIVVGTFVVVALGGAALLGGLTYFRLWGYLWREWFTTVDHKRIGIMYMILGIVMLLRGFADALMMRGQQMLAFGGSEGYLNAHHYDQIFTAHGVIMIFFVAMPLVTGLMNYVVPLQIGARDVSFPFLNNFSFWMTVGGAVLVMASLFIGEFARTGWLAYPPLSNIGYSPDVGVDYYIWALQIAGVGTTLSGINLICTIVKLRCPGMTMMKMPVFTWTSLCTNVLIVASFPVLTVVLVLLSLDRYVGTNFFTNDFGGSPMMYVNLIWIWGHPEVYILVLPAFGIFSEVTSTFSGKRLFGYTSMVYATVVITILSYLVWLHHFFTMGSGASVNSFFGITTMIISIPTGAKMFNWLFTMYRGRIRYELPMMWTVAFMLTFVIGGMTGVLLAVPPADFVLHNSLFLIAHFHNVIIGGVVFGAFAGINYWFPKAFGFKLDPFWGKMSFWFWVTGFYLAFMPLYVLGLMGVTRRLRVFDDPSLQIWFVIAAVGALFIFIGILSMLMQFAVSLLRREQLKDVTGDPWDGRTLEWATSSPPPDYNFAFTPVVHDNDAWWDMKRRGYQRPLTGFKPIHMPSSTGTGIIIAGLATAMGFALVWYMWWLAVVSFIAMIAVGIGHTFNYHRDFDIPAEDVIRTEDARTKLLAGVN

SEQ ID NO: 10269 - protein, 386 aa, BradyrhizobiumColbertium
MSRLKILALLPLAAALSGCDYVVLAPAGDIAAQQRDLVIISTVLMLLIVLPVMALTVLFAWRYRQSNTDARYEPDWDHSTALELVIWSAPLLIIVCLGALTWMGTHLLDPYRTLGRIHAERAVDQSKAPLEVDVVALDWKWLFIYPGYGIATVNELAAPVDRPITFRITASSVMNSFYIPALAGQIYAMPGMETKLHAVVNHAGTYKGFSANYSGAGFSGMHFNFQGLDDRGFDAWIASAKSAGGTLGRAEYLQLEKPSQNEPVRRWGTVDADLYRLILNMCVETGKMCQSEMMAIDARGGAGHQGLTNTLPLAYDKYARRGTALGPEPTFVAGTCTPDAPQGRTTASIAAPLDTAPLLGAGLKRPSFMPLKSSSFFLGQRPKSDS

SEQ ID NO: 10270 - protein, 442 aa, BradyrhizobiumColbertium
MATAQTPAMADLHTGEHGHDQASPGEIAIGVIIGRTSEFFDFFVFAIASVIVFPRLVFPFASELTGTLYSFMIFALAFMARPIGTVIFMTIDRSYGKTAKLISALFLLGTATVAIAFLPGYPEIGAAAIWLLALARIAQGLAWGGAWDGMASLLALNAPPSQRGWYAMVPQLGAPLGLIVASALFAYFAGNLSADDFFDWGWRYPFFVAFAINVVALFARLRMVTTEEYASLFESRELQPSRISETVAREGQNIMLGAFAPLASFALFHMVTVFPLSWVFLFTHESPVRFLIIEIVAAVFGVGAIVASGIIADRVGRKSLLMGSAIAIAIYSGFAPQLLDAGAFGETIYMVIGFILLGLSFGQSSGAIASNFRQTYRYTASALTSDMAWLFGAGFAPLVALLLATNLGVIASGAYLLSGAFWTLLALWLSGQREKGDMDTGR

SEQ ID NO: 10271 - protein, 463 aa, BradyrhizobiumColbertium
MGRFHTAATPAAVVMPKPKPAIAQTPATEKEHERILSSYGGTYDDPKLEALVSKTVDRLVAASDRPDQGYKVTILNSGAVNAFALPNGQLYVTRGLLALASDTSELASVLSHEMAHVLSKHAAMREDQARQAAIVTRVVTDMSNDPDLTALALAKTKLTMASFSRKQEIEADGIGVGISAKAHFDPYGAARFLSAMERNAELKAGKNSLDPRAQDFTSSHPATPERVQNAQNIARQYTAPEGAERDRESYLAAVDNLVYGEDPSEGFVRGRRFLHPKLGFTFQAPENFTLDNTAQAVIGVREGGAQAMRFDVVRVPAEQSLGEYLNSGWMEGVEKASTEDITINGFPAASATAKGDQWQFKVYALRFGSDVYRFIFATRQRSTESDRNARETVNSFRRLTLDEIQAARPLRIKVITVQPGDTVESLSHRMAGVDRPAERFRVLNGLERNAQVKVRDRVKIVAD

SEQ ID NO: 10272 - protein, 243 aa, BradyrhizobiumColbertium
MAGHCAFAAPCQFEALGEGRVAAIIDPRSVRLADGREVRLAGIEPTAATKQALVSLLAGRDVTLRSPDDMPDRYGRQGALLFIGGSDTSVQAMLLAQGDAMVSAEIVDRDCAAVLMASEAAARRQKMGSWADSSAIKNAESPDDILAEIGRFTVVEGKVLSVRQAGAMTYLNFGRNWTRSFAATISRRTLPAFESTGIALKSLENKRIRIRGWVEGNTGPRIDIRLVGQVELLGANEPIGVRP

SEQ ID NO: 10273 - protein, 40 aa, BradyrhizobiumColbertium
MSGHEQKCDDEVKPWRHVTGEVALSAEHSSSVLDCEETVV

SEQ ID NO: 10274 - protein, 58 aa, BradyrhizobiumColbertium
MFAIAAIMPHAQQRSKREGVAIAELPRMISAKRNGESAAKVSTRHCERSEAIQDLTME

SEQ ID NO: 10275 - protein, 401 aa, BradyrhizobiumColbertium
MKMILSGIFAAAFALNASAAQAQDKPPLKIGGILDMSSLYADITGPGSETAAKMAVEDFGGEVLGRKIQVLAADHLNKADLSANIARDMLDNQGVEMIYDVAASATALAAGEIAKARNKIIMFNGPGSIRLSNEACGPYTIHYVFDTYGQANVTGLAAVKSGLDSWFFLTADYAFGQDLEKDTSAVVTKTGGKVLGSVRHPLNTSDFSSFLLQAQASKAKVIGLANAGGDTINAIKQAAEFGITKGGQKVSPLLAFVTDIDSIGLETAQGLLLAEAFYWDLNDDTRAFSKRFMERTKRVPTSAQAGVYSSVTHYLKAVKAAGTTDAAAVIKVMKETPVNDFFAKNGKIREDGRMIHDMYLFEVKKPSESKGRWDDYKLIATVPGAEAFQPLEQSRCPLVKK

SEQ ID NO: 10276 - protein, 263 aa, BradyrhizobiumColbertium
MSNDMVLQKLEGGLLTITMNRPERKNALNPEMVVGLVEAARRAADDPEVRAVLFKGAGGSFCVGGDVKSMAAGRAPLPFEVKMANLRRGMEVSRILHQMPKPVVAQLDGAAAGAGLSMALACDLRIASESCKITTAFAKVGFSGDYGGTYFLTQLLGSARARELYLMSPVLTAKEAHAIGMVTKVVPDAEIDAAAHELALSLAQGPSIALGFIKRNINNAEHLALEDCFDGEAIHHTRCGDTEDHKEAAKAFVEKRKPTFKGA

SEQ ID NO: 10277 - protein, 249 aa, BradyrhizobiumColbertium
MAPYMRLRQICLVAPQLEPVISDIAEIMGLAVCYRDGNVAKYGLENALLPVDTILLEVVAPFKDGTTAGRFIEKTGGRGGYMAIFCCNDPDERGRNANAMGVRTANVIDHAPYHGVQLHPRDCRAAFIEFNHTEGSDDILGAYPPAGPDWQKFIRKDVTQALTAVEMQSPDPAGLAEHWGKIIGVAPSGDAELRLPNATFRFVKGRSEIMSALEFRVADAARVLHAARAKGLAVTGNEFLLGGATFRVA

SEQ ID NO: 10278 - protein, 270 aa, BradyrhizobiumColbertium
MSTYKDIGVEKVGHVGTIEIRRPPLNFFDISLINQIADALEEFDRDIEIRASVLSAQGKAFCAGANFGDPARQAQEAQEAEKKGDPADSLGPINHLYIQAVRIFRAKKPIVAAVQGAAIGGGLGLAVSADFRVTCPEARFSANFTKLGFHPGFGLTVTLPELIGKNNAELMFYTSRRVTGEEAVKWGLANELVPQDQVKAAAMKLAGEIAECSPLGLLSTRATMRAGLADRVMAATNHELAEQTRLRATEDFKEGVKATEERRVANFKGR

SEQ ID NO: 10279 - protein, 386 aa, BradyrhizobiumColbertium
MTAALRFDPIRLPEKCEQLRKEVRAFLAEEIAAGTFDPHQPNREDTDAPEFSRRVGAKGWLGMTWPKKYGGQERSFLERYVVTEEMRVANAPTRRFFVADRQSGPVLLKYAPEHIKMDILPRICRGEICFAIGMSEPNSGSDLFAAKTRATKTDGGYLINGTKIWTSSAHIADYMIAIFRTSPPTKENRRHGLTQFLVKMKQPGIKVNPIGQITGQYEFNEVVFTDYFIPDDHVLGEVDGAWKQATSELAYERSGPERFLETYYVLTELVRAVGPDPDTRSAEGIGRLVAQLHTMRRMSVSVAGMLEAGKEPVVEASIVKDIGTVWEQQLPHRVRDLAAFVEETATNRETLERQLDFAIKTAPKLTIQGGTTEVLRGIIARGLGLR

SEQ ID NO: 10280 - protein, 354 aa, BradyrhizobiumColbertium
MAESDNIVVETAEKIFADLADPQTINNDKKDSWQAPLWQALSEAGLPLAWVPDDLGGSGASLADGFALLNAAGRFAVAVPLAETMLAGWLLAQAKIASPEGEMTVLPASPKDRVTLDADGALSGRARGVPFAKAAKHFAVLVHSKDGVSIALVDAAKVRIEAGLNVGYDHSDTVTLDRVQPVTIKPAPKGLDQTNLMLMGGVVRSLQIAGALESMLDISVRYSNERVAFEKKISKFQAVQHNLARLAGESAAALAAATSAADAIANAKSFNDEVYLEAASAKIRCAEAAEKGGGIAHQVHGAIGFTMEHILHRYSLRALAWRDDFGSESYWAVELGKLVANRGADELWPLVASR

SEQ ID NO: 10281 - protein, 261 aa, BradyrhizobiumColbertium
MAKDGLCAIVTGSASGLGAATAEILARSGARLVINYSSSQKEAEATAELCRKAGAAEVLVAQGDVSRDDDCRKIVAAAAPWGRLDILVNNAGTTKHVAHADLDGLSAEDFQRIYGVNTIGPFQMVRAARSLLEAGAKASERPSAVVNVSSVAGISGVGSSIAYAASKGALNTMTLSLSRALAPLIRVNTVCPGYIDTPWFTKGRGEAGAKQVRDSVVAKVPLKVASTAEDIAQLVCFLAMPASSNMTGEVVRMDAGMHLVT

SEQ ID NO: 10282 - protein, 90 aa, BradyrhizobiumColbertium
MSMGGLLWIIVVGFVAGLIARWLAPGPNNPSGFILTTILGIAGAFLATWLGQAIGHYNPDQGAGFITATIGAVVVLFIWNRLVASGVIKG

SEQ ID NO: 10283 - protein, 188 aa, BradyrhizobiumColbertium
MGLLDVLNGMQNGPRGPSTASTDKSSGGMSPMTMALLGLLAWKAFKHFTGNQSGSAPQPSPAPAPPPVNAGTGGGLSDMLKGGLGGLLAGGAAGSILSGGLGDLLNQLQQSGHADTANSWVGKGENKPIAPGDLASALGADQIDSLSAQSGLSREDLLSGLSQYLPQVVDQLTPDGRLPTEDELSGRI

SEQ ID NO: 10284 - protein, 335 aa, BradyrhizobiumColbertium
MMTDRPIVVAGAGAIGCFVGGMLAAAGRRVALLVRPRVKAEIERFGLYLTDFDGSEKKLDVSRLTLAEDPVILHSAGIVLVTVKSADTAAVAEQIAQHAPQDAVIVSLQNGIGNVAVLRERLGGRRVLAGMVPFNVIAMGEGRFHRSTSGDIHVGEDPQNTAAALSVAGLAVRASGDITGVQWGKLIINLNNALSALSDMPLAAQLASRDWRRLFADQMAEGLAVLKAAGIVPVSSTPIPMNWSPTLLRLPDAIFNAILGRTMKIDPEARSSMWQDLKLGRKTEIDYLQGALIALAEQNNVSVPLMRRIVALIKEAEATGSGPLRLTPQQIRGNA

SEQ ID NO: 10285 - protein, 71 aa, BradyrhizobiumColbertium
MKRRFVIGLALTAFCGASTLAHARPPTVMNSPGYDRRLQESRSQLGSSPTVVEPASPPVVKPKRSKKKRAR

SEQ ID NO: 10286 - protein, 210 aa, BradyrhizobiumColbertium
MSTGDTSRRAALLPAAAAGFFLLMPAHAEAQWWRRAPVDFEECADAAEKAATKAEKTAALADCNAKFAGRRKPGGGYSYYDFLQDRTFDIAGPNPTPEEQKKIDEAYTAYLAKQRRSNEAAQATARQQREQQEQQVQQLQQVALRTEVERVPIPVGRPKVQQAAIGDTRARAKGACTKGSFSCEWPRLSEGLNDLKKLFNPAPSKPAKKG

SEQ ID NO: 10287 - protein, 505 aa, BradyrhizobiumColbertium
MLLPLSDVPRWYAERKPQGTIAIRHGQDTLTWDELERGANRRARAFAAKGVKPGDFVAIGLPNGNAFFETSFAVWKCGATPTSLSWRLPRGEAAAVLDILRPALVVGGEADWNAPNRLPAEFVPEGFSDEPLTPPVARYWKAMTSGGSTGRPKVILDHQPAVTDTAAAPPLNIPFGVSLLNPGPLYHNAPFIVSHYALFVGGMLTGLTKFDAEETLRQIERERVQWVNFVPTMMHRIWALPESVRNAYDLSSLQTVFHMAAPMPPWLKENWIAWLGPERIWELYGGTERQGACIISGTEWLTHKGSVGKIGDMARLRIIGEDGNDVAPGETGEIYFLNNDGKDATYHYLGAEPKRRADGWESLGDIGRLDAEGYLYLGDRLADMVLRGGANIYPAEVEAAVSEAPGVRSCVVVGLPDPELGQRVHAIIEPEPDADGQAIADGMADFLKDRLSRYKHPESFEFVNAPPRDDSGKVRRTLLRDERAAWMKEGRAFRILPARARAHAD

SEQ ID NO: 10288 - protein, 212 aa, BradyrhizobiumColbertium
MTIAIAANSVPKPPADIIAGFRDAPTSIISDNLSRLPGAVGLRPFHRGAKLVGAAFTVRTRPGDNLAIHRALELVGPGDVIVVDGGGDETRALVGEIMKNIAQWRKAEGYVIDGAIRDVAAFAADDFPCFARAVIHRGPYKNGPGEINVPVTIGGSVISPGDIVVGDEDGVVSFPAAGATALLQAVRAQMSREEETLKAIREGRYQGSYGKS

SEQ ID NO: 10289 - protein, 123 aa, BradyrhizobiumColbertium
MSQKDEFHNIDDTNDGLFRELAAGVTTRIFSGEQAMLSVVTLAPHAQGTLHHHPEEQWGVLLDGSAIRVQGDEEIAVNKGDFWRTPGNVPHTMRAGPEGARVLDIFSPPRPEYRKAGSGFGTT

SEQ ID NO: 10290 - protein, 53 aa, BradyrhizobiumColbertium
MTITRRALLAVPAILAMAPARARASKITLVVPFPPGGSTDAMARLLQSNLPPS

SEQ ID NO: 10291 - protein, 119 aa, BradyrhizobiumColbertium
MIDSISAITLGTHDMARAVHFYRSLGFELLYGGEAAAFTSFRAGTGYLNLTAQPDDRQWSWWGRVIFYVADVDATYEQARAAGWQPSTTPRDAEWGERYFHLTDPDGHELSFARPLRGA

SEQ ID NO: 10292 - protein, 241 aa, BradyrhizobiumColbertium
MSTYVLVHGAWHTGAEFEPVAAPIRAAGHQVHTPTIKGNRPGDAKTTGLKEAIQSIADHLAENNLKDVVLLGHSYGGMIITGVADLAPERIRRLVYWNAFVPNNGECLNDMVPPHYVGLFDAIAAERGDGSVVLPFPIWREAFINDADLETAQRAYDVLNPHPLATFTDKIALKANPAEMPLAKSYINCTEDTALPHSYGWHPRLSEKLGLFRLVQVPGSHELCFSDPARLARAIMEAGRD

SEQ ID NO: 10293 - protein, 326 aa, BradyrhizobiumColbertium
MQLIERAVSSRQSAWDTGGVRPAEQFAYYREAICQAFMNLTPEPAAAAGFPASVEHIRLGDAAINRVSFPEHVVRRSAADIAASERSCFYLNLKLAGRCRIQQGDREVSLSPGQVGIFDSDRQFALLHDRGPQLRVASFWVPAEALRECLPASFGVAAARVSDDPYVGHLIVETARTLSDGALRISEEEGVLLFRALIELVAVSLSRRSRAGAAESESLADATALAVKRAIHRRLREPGLAVADIAGAVGISERYVHKLLARSGSSFTDYIIDRRLDGAARDLADPAMADRAIGAIAFDWGFSDLSHFTRRFKQRFGCRPRDWRAR

SEQ ID NO: 10294 - protein, 381 aa, BradyrhizobiumColbertium
MHYRSSWMTEELDTFRDQFRKYLAKDLAPHAEKWREQKMVDRFAWRGLGEMGALLASVPEEYGGLGATFAYDAAVLDDLESTVPELTTGVSVHSAIVAHYILNYGSEEQKKRWLPKMASGEMVGAIAMTEPGTGSDLQAVKTTAKKQGNSYVINGQKTFITNGQAADLVIVVARTGDAGAKGISLIVVETAGAEGYKRGRNLDKIGLHASDTSELFFDNVTVPPENLLGKEEGQGFVQLMQQLPQERLALAVGAVASMERAVKLATDYTKERKAFGKPLMEFQNTAFTLAERKTEAMIARVFVDWCIERLIAKDLDTVTASMAKYWCSEKQVETADECLQLFGGYGYMQEYPISRIFIDSRIQKIYGGTNEIMKLLISRSL

SEQ ID NO: 10295 - protein, 275 aa, BradyrhizobiumColbertium
MAKLQGKVALVTGSGRGIGRAIALKLAREGARVVVNDLDAEPGDAVVAEIRALGGDAAAVNGSVSETGFADRFVGAALDKFGGLDIIVNNAGYTWDSTIQKMTDEQFQAMLDVHLVAPFRILRAAAEPIRVFARKEAEEGREVFRKVVNISSIAGLYGNAGQASYSSAKASLIGLTRTMCKEWGRYKVNVNCVAFGLINTRLTQPIEAQQKTIDVAGRDIKVGVQPHMLEAMSRMIPLGRGGTPEEAADAVYLFCSPESNYISGQVVVAGGGLIV

SEQ ID NO: 10296 - protein, 136 aa, BradyrhizobiumColbertium
MTAPGDIRAGDRIVHKVFPPITRHTLALYCGASGDHNPIHVDLDFAKAAGFPDVFAHGMLAMAYLGQALTDAVPPSRLRSFATRFVAITQLGAKLTCEGTVTELFAEDGERRARLALTAADDRGEVKLEGSAVVAL

SEQ ID NO: 10297 - protein, 150 aa, BradyrhizobiumColbertium
MVDQSAVGRSFTPVTARVEPGRLRYFLNTLGEENPVYRNADAARAAGFDGMPVPPTYLFCLEMMDVDDPFEMFSALGIDLARVLHGEQSFAYHAPVLVGDTLTFRPRVTSVTDKKGGAMTLIGIRCEVTNQDGVHVADTARTIVVRNEVT

SEQ ID NO: 10298 - protein, 393 aa, BradyrhizobiumColbertium
MSDVIVAGVGMIPFAKPGASAPYHEMGTEAVKLALADAGLGYDKVQQAYAGYVYGDSTCGQRALYHVGMTGIPIVNVNNNCSTGSTALFMARQMIASGALDCVLALGFEQMKPGALGSVYTDRPSAFEEFDAAADQLIDAPGIPLALRYFGGAGLSHMKKYGTPLDAFAKVRAKASRHAKNNPLALFRKEVTADDVMNDQVIWPGVMTRLMACPPTCGGAAAVLVSERFADKHGIGKEVRIAAQAMTTDTPSTFKAGDMMQLVGYDMAKEAAGRVYESAGIGPDDLDVVELHDCFAHNELITYEALGLCGEGEAGKFINDGDNTYGGRIVTNPSGGLLSKGHPLGATGLAQCYELTRQLRGTAGSTQVEGAKVALQHNLGLGGACVVTLYKRH

SEQ ID NO: 10299 - protein, 247 aa, BradyrhizobiumColbertium
MDSAPPVPPSLPSSSPWLPFESRRRARDEKREAVLRAAVQLFLEQGYHRVTLNEVAERLNITKPALYNYFRGKDEILFECWSMGAELVDSVITEINGGGGSGLAKLRKLVHAYAALMATDFGASLVRFDLRDLTERNAAVARAAKKRIDATFRRYIAAGTADGSIRPCDPKLAAFAIAGALNWIGHWYRRDGELSPSEIADEFTVRLTEGLATESRQQMTKKTPGAPQRRNSGRTTAGKKRTGGGTR

SEQ ID NO: 10300 - protein, 518 aa, BradyrhizobiumColbertium
MNITHGLRRALQINPKGLATVYGQRRRSWGELGERVARLAGGLRSRGVSDGDRVAVLSFNSDRYLELYLATGWAGGVIVPLNIRWSALENEDALRDCRASVLLVDKAFAQVGAQLAGAIPGLKLIYADDGEVPAGMESYEEMVAGSAPVADAMRKGEDLAGIFYTGGTTGRSKGVMLSHQNLMANALNALGEGLFPASTMYLHAAPMFHLANGAAMYSLLLSGGSNVIVQGFTPEGVMAAMQSERVTDVLLVPTMIQMLVDHPAIGNYDLSSLKHIIYGASPISEAVLDRAARALPHVRFTQAYGMTELSPIATLLHANEHVGEGRRKGRHRGAGRATLGCEVRIVDENDQPLPTGAVGEIVVRGDTVMMGYWERPEETARAVVDGWMHTGDGGYMDEDGFIYVVDRVKDMIISGGENVYSVEVENALAQHPSVLQCAVIGVPNEQWGEQVHAVVVKRSGVEVSPGELIEFTKTLIAGYKCPRSIEITETPLPLSGAGKVLKRELRKPFWEGRERRVS

SEQ ID NO: 10301 - protein, 224 aa, BradyrhizobiumColbertium
MVETRELKLDIERIGTVSAILTRPDHARACYVLAHGAGADMRHSFMEKVAEGLASRGIATLRFNFPYMEKKQGRPDQPAVAHAAIRTAVEEAARLCPGLKLVAGGKSFGGRMTSQAQSKAPLPGVKGLAFLGFPLHAAKKPSSERAEHLAGIAIPMLFLQGTRDELADLGHLKPVTEMLGAKATLHEVEGGDHSFAVLKKSGRSNDEALKEVLDTLAAWIDQRA

SEQ ID NO: 10302 - protein, 324 aa, BradyrhizobiumColbertium
MRICIFGAGAVGSHIAVRLARAGHEVSCVMRGAHLEAARAGGLKLRVGDSEVGAKVNATGDPAQLGPQDVVISTLKATALQGLVSSIKPLLQDDTAIVFAQNGIPWWYGIGLPPRHPAPPDISFLDPGGRLRACIPKERIIGGVVFSSNEVIAPGVVQNLTPDRNRLLIGECDDRNCERITKLRNVLNDARLESPPVAEIREAIWSKLLTNMSLSVLCLLTGQTARGVRDDPAFADVIPRMLNEANEIAQHFIPEVKRVTRSGPAPNHKPSLLQDYELGRAMEIDVLVKAPQAFARTAGLSTPTLDLIGALAIQKARDKGLYSA

SEQ ID NO: 10303 - protein, 267 aa, BradyrhizobiumColbertium
MTANPVLWTSDERGVATVTLNRPEVNNAYDGALIAGVLAAMDDLSKKPNLRVVVLRGNGKHFQAGADLKWINSVRPQSAEANEAASRATFEAVQRLNTLPIPTVALVQGGCFGGGTGVIAACDVVIAADNALFSITEVRWGLTAAIIIPQLCDAIGVRQVRRYALTGERFGAEDARRIGLVHEVVPLADLEGAGSKVVEQLLANGPDAMAETKRLALESSFGGMAVGDAAYTRLVQLHSLKRQSAEAAEGLASFAEKRAANWGGGKG

SEQ ID NO: 10304 - protein, 89 aa, BradyrhizobiumColbertium
MYRMAKKSALVALVAFVLPSGHAAALEQNCRFIREKPDREACYKRQEDELAAKRRPEPPRESTALETLREMRQNDDAVYRSINNICRGC

SEQ ID NO: 10305 - protein, 454 aa, BradyrhizobiumColbertium
MRPRMIEEPARKVPLYGEYEVVVLGGGPAGIVAAASASRAGRKTLLIERYGFLGGMGTAAGVTNFCGLHGNVHGEHRRLVQGMASELLARIDRLNGLNTPHLILGKVYAQAYDTAAYKIAADQLLAGHQVNILFHALGAGVVMGDDRRIDALLVETKAGRQAVRSEIFIDCSGDGDLAVWAGAPFELGDEHGHPLYPSMMLRLNGIDPEKAGDAWRTIPQLMDKALAAGTHTFPRKSAIVRPQKSGIEWRVNFTQVAREDGHAINGVEPDDLTRGEIEGRKQALAAFEFLRTVPGFERSYIVDLPPQLGIRETRRIKGGYQLSGEDVLGCASFEDSIGVNGWPIEAHVPGDVVFTFPPIPDSRGYNELPYRMLVPEGVDNLLVAGRCASMTHEGQSAARVSGACFAMGEAAGSAAALALAGNRIPRDIPIEKLQETLKQQGAFVGRDQALPEGL

SEQ ID NO: 10306 - protein, 334 aa, BradyrhizobiumColbertium
MIGMVRLVLAGLVAIMVMGTARAEDGLKAKIGVLRLSSSAPVFIAQDKGYFRDAGLEVELKFFDAAQPIAVATTSGDVDFGITAFTAGLYNLAGKGTLKVIGGMSREKAGYPLIGYFASNNAYAAGLKTPKDLAGKRVAMTQVGSSFHYSLGLLADKYGFKLADVRIVPLQSLSNAAAALKGETVDAALLPISTARKLMDDGGAKFLGWVGDETPWQLGAVFASPKTLTNKMLVTKLLGALAKADREYHDVILAAMKDGVAPINEQTKPLLEIIAKYTNLPVEQVVGNCAYIDPDGKLDVKNVDNQIKWLQEQGFVDKGFDVNTIIAKDYVKAD

SEQ ID NO: 10307 - protein, 257 aa, BradyrhizobiumColbertium
MDLIASHISHRFGDLAVLDDVSFTVGAGEVVAVVGPSGCGKSTLLSILGGLLQPTSGAPELRGTPPADSLNPLTFVFQDFALLPWATVEENVEFPLLHTQLTATQRRALVEDALRRTSLTDFRQTYPKQLSGGMRQRVGISRALAVRPAILLMDEPLSALDSQTRELLMEDFVRLLSDGGMGAVYVTHNLEEAARLADRIVVLSRRPGRIREVVTVPMTRTERGETAARERLLALQTQIWSLIRNEAIDAEREVQHA

SEQ ID NO: 10308 - protein, 274 aa, BradyrhizobiumColbertium
MLDRAPAEETLKDQATRRVRFRGAGFVPASSRFGGWFALALVIAIWQAASSAGLVNPLFLPAPTAIARAIYQLAISGALWQHVSASLLRIGIGWLLGTAAGVAVGFAIGLSRLARSVGITFISALFPIPKIALLPLLILWLGIGEEPKIATIALGVFFSTAISVYSGVDAVPRNLIRMAQSFNVPFATIVRKVIWPGALPAILAGFRITASVALLLVVSAEMIGAQYGIGAFVLQAGNLMQTDQLLAGVVILSVFGLAVGKVIGWLETRLLHWR

SEQ ID NO: 10309 - protein, 346 aa, BradyrhizobiumColbertium
MEAVAKTPEREAFYRKIDGENLTALWTVMSDLITPEPKSACRPHLWKFDVIRDYMTEAGKLITAKEAERRVLVLENPGLRGQSKITTSLYAGVQMVVPGDVAPAHRHSQSALRFVLEGKGAHTAVDGERTAMEPGDFIITPSMTWHDHSNETDQPMFWLDGLDIPLVQFFDCSFAEGSKEDQQKITKPAGDSFARYGHNLLPVDVKRSSKTSPIFSYPYAYTREALEKARTSQEWDACHGLKLKFSNPETGDFAMPTIGTFIQLLPKGFKTARYRSTDATVFCPIEGKGRSRIGDAVFEWGPRDLFVVPSWHWVTHEADEDAVLFSFSDRPVQQKLDLFREDRGNA

SEQ ID NO: 10310 - protein, 210 aa, BradyrhizobiumColbertium
MKLHGYFRSSAAYRVRIALNLKGLGAEHLPHHLRKGEQCAPAYLAINPQGLVPALENDGGAVLTQSVAIIEWLDETHPNPPLLPKDPLRRAKVRAFALAIACDTHPVQNLKVLARLRELGLPEEKVQDWAAWANREGLSACETLIRDEPGPFCFGDEPSLADLCLVPQLTNARRFGVDVSAYPRLLKAEAAAKALPAFADAAPEKQPDAE

SEQ ID NO: 10311 - protein, 170 aa, BradyrhizobiumColbertium
MPSKPLPPITMDAVYAAPGYLFRRMQQIAVSIFMEECKAFDLTPVQYAALIAIHTHPGIDATRLSAVVAFDRSTLGSVIERLQAKDYIERKPAPEDKRIKLLPLTRSGAAILREIIPAVERAQARMLEPLKPADRKVLMDLLGQLVDLNNEASRVPLRAEDAMEHLGKAG

SEQ ID NO: 10312 - protein, 537 aa, BradyrhizobiumColbertium
MSNEIRDQVPADSAGAREIGFVVPDTYNASRVLFDNLGKGRGERCALMGPAGTRTYAELCAEACRWGNGLASLGLKRGDRVLLFLDDTPAYPAAFFGAVRAGFVPLLINTLTPPDLLQFYLADSGASVAVADAEFCARFNAEACKDTRLHTLIAVNGAPGDHAAPRVLAAADWLAQFSTQLREADTHRNDMAFWMYSSGSTGKPKGIVHLQHDMAYSDLAFAQNILKLTPDDICFSVPKIFFAYGFGNSVTFPFSAGAATLLLPGQPKPAAIFAAIERYKPTVFFGLPTLYTSLTKAEGADKTDFSSLRMSLSAAEVLSAEVFNGWKTLTGLEIVEGLGSTEVLHIYLSNRPEQKKLGAAGLRVPGYEVALRDTDGRDVGDNEEGILWVRGDSNTPLYWNRPDKSAETIRDGGWIYTGDRFIRDADGFHFFRGRADDLIKISGQWVYPLEVELCLADHPDIRECAVFAAELPDRRMTLKAVVVMNNRAVDHGETTRRLQDYVKGKLLPYKYPREVIFIDELPKTGTGKIDRQALLRL

SEQ ID NO: 10313 - protein, 379 aa, BradyrhizobiumColbertium
MRIAVIGGGPGGLYFAYLWKKRHPEDQVDLFEQNPADATWGFGVVFSDQALEFLRADDPETVDAIAPHMESWENITLHLHGDSVAIDGVGFSSIGRLEFLRFLQQRALGVGVTPRFDTQIHTIDQLNGHDLIVAADGLNSLVRRAFEGDFGTSLSYSSNKFVWYGTSKRFDTLSQTFVKTERGAFNAHHYRYSPSMSTFLVECDHATWQAYGFAYKDVEQSKGVCEEVFADTLGGHCLVSNKSIWRNFPWVWNEHWSFKNMVLLGDALHSAHFSIGSGTRLAIEDAIALVKALESDAHLATALHRYQAARKPIVQKLVNAARTSAFWYEHFAEHMKLPLLDFAYSYITRSGRIDDARLRHMSPAFMARYEAARNAGDAA

SEQ ID NO: 10314 - protein, 318 aa, BradyrhizobiumColbertium
MQVGLKRPMISVAGTTRDDCNRITSQEADGVCRQGRESSQMFNTLKHTSARVTLLAAALLATATVAIAQTPTEAQKSAIRSSCRSDFMARCSSVTPGGAEAFQCLQKNMSSLSPGCQTAVRALEPPAAPKAEAAPAAPKTEAAPAAPAAPKAQAAPGVPPAEPAKPATAAAPKTAPAKQPSTAQVSAIKSACRGDYPKVCASVPPGGTAALECLEKNKAKVSPSCQAALGAASGTAATAAPAGAAPATAPAAAPTVLVLRPLRPREQLFVAQSACGADIRAICAGVEAGGGRIIQCLASNAASLSPACRDVLGRFAAR

SEQ ID NO: 10315 - protein, 70 aa, BradyrhizobiumColbertium
MIVVKRLTMQGFIVMDYMKESQRALADLQAWVKSGRLKVQEDIIDGLENTPKALIGLLAGENRGKRMIRL

SEQ ID NO: 10316 - protein, 278 aa, BradyrhizobiumColbertium
MNAGIDNQTIDEGMSMSSNVNRQILLVEKPSGKLGPEHFKMVEGAVPEPKDGEALLRVRYISLDAANRAWMHGATYRSAVEANSVMAGGAIAEVVSSKAPELAPGDIVFGDTGWQEYAAVPAKHLTKMPKLEPMTHLLSVFGIAGLTAYFGLLEIGKPREGETVVVSAAAGSVGSIVGQIAKIKGCRVVGIAGGAEKCNWLTSELGFDAAVDYKDGALFKALRAAAPKGIDVYFDNVGGDILEACLPQMNNYGRIACCGAISQYDGAPLHTARAACLD

SEQ ID NO: 10317 - protein, 48 aa, BradyrhizobiumColbertium
MHNGNILPTAGRRHPALRRGARDNAPLKHISPSVISMWRVPAELLAAV

SEQ ID NO: 10318 - protein, 69 aa, BradyrhizobiumColbertium
MNEAHQLALAMFVLACAAVTLVAGQLYMQQSMDAQTFTGRHVPARLLGTSPATEMRGHARPDFNVTGRP

SEQ ID NO: 10319 - protein, 66 aa, BradyrhizobiumColbertium
MNHSIYSADRATHSRIVIVALLVAAAVAGLAVSRHADVRTVSVERAAVFKPSKAVVLSGSAIVAVR

SEQ ID NO: 10320 - protein, 37 aa, BradyrhizobiumColbertium
MRMSRTEAGIANKPFDAAFWSVAAVLSGAVVYLARLI

SEQ ID NO: 10321 - protein, 267 aa, BradyrhizobiumColbertium
MASGERIFVQAIRRYCAEHGIAVDVRAGGWLIAMRQGAKRHFAFGYDIGLNSAIAHRLANDKSATAEVLTLAGVPCVPHHLFLNPSLGIHVAGTDWRREMLMLLAQNSQGVVVKPNEGTSGRAVFKATTEAELDRAVRDVFSMSAGLVISPYVAIEDEVRVVLLGDLPLVVYSKRRGTDWRHNLDAGATPILLGDGEVRAACVRLASAAASAIGIAFASIDVVRVGGEWKVLEINSGVMMEALGKLHPEMVHAAYEAALDRIFEAEH

SEQ ID NO: 10322 - protein, 284 aa, BradyrhizobiumColbertium
MAMVSAPISGPGYAFARKPQLFGISRIMSAFYREKVLSVHHWTDTLFSFRATRDTGFRFQNGQFAMIGLEVDGRPLLRAYSMASANHEEELEFFSIKVQDGPLTSRLQKIKEGDTILVGRKATGTLITDNLLPGKRLMLLSTGTGLAPFASLIKDPEVYEQFESIVLVHGCRQVSELAYGEKLVATLREDELFGELLADKLVYYPTVTREPFRNRGRITDLISSEQIFNDIGQSPLDIETDRIMMCGSPAMLEELKAMFESRDFVEGSGNKPGHFVIEKAFVER

SEQ ID NO: 10323 - protein, 43 aa, BradyrhizobiumColbertium
MIVRHVQLVVPALPLKLARDGSSVWWRLSPFHPLAAPQPGPSG

SEQ ID NO: 10324 - protein, 564 aa, BradyrhizobiumColbertium
MIVAEDNKTQQSPKRLPLAEEGIMETLLLPFSPRFIVLTICAIVTALLIGIGLADRKIFDIMLVPILIFGALTLLGVRDLLQKSHAVLRNYPISAHIRFLLEEIRPEMRQYFFESEKDGMPFSRDTRAVVYQRAKMELDKRPFGTQEDVYREGYEWMHHSVSPKPHAAEKFRVVIGGPDCAKPYSASVFNISAMSFGALSPNAVRALNAGAKKGGFAHDTGEGGVSPYHREMGGDIIWEIGSGYFGCRHLDGTFDPEAFARVASDDQIKMVELKVSQGAKPGHGGVLPAAKVSEEISKIRGVAMGEDCISPASHRAFSTPVGMMQFVAEMRRLSGGKPAGFKLCIGHPWEFLAICKAMLQTGIYPDFIVVDGNEGGTGAAPLEFMDHLGMPMREGVNFVHNALVGINARDRIKIGASGKIATAFDMARAMAIGADYCNSARGFMFSLGCIQSLSCHTDRCPTGVATQDPTRARALYVPLKIDRVYNYHHATLHSLTELIAAAGLDHPQQLRPIHFTQRSSTTDVKSFAQLYPALRPGELLEGTEDPRFRDAWRMARPETFQPAL

SEQ ID NO: 10325 - protein, 68 aa, BradyrhizobiumColbertium
MLKAGTIEFGGGAIDCTVRNLSDTGAALDVTSPVGIPERFTLFVQADGTHRACTVVWRKERRIGVKFG

SEQ ID NO: 10326 - protein, 431 aa, BradyrhizobiumColbertium
MLSLELAIVVVLIVINGLLSMSELAVVSSRPARLSLLAAKGVRGAERALTLAADPGKFLSTVQIGITLVGVLSGAFSGATLGQRLTQWLLELGLSKGIADIVGVGIVVTLITYATLIVGELVPKQVALRDPESIAVRVAPAMHVLAKISLPLVFLLDVSGKLILTLLGRGGKADEKVSEDEIHHLVSEAESAGVLEPGEKEMIAGVMRLGDRPVGAVMTPRTEVDEIDLNDDPAVIQEIIAKSPHSRFPVSDGDRDTPIGVLQAKDLLVAYMNERDPDLRALVREAPGIPVSADARDVLAILKAAPVHVGFVYDEYGSFEGMVTAADILESIVGAFHSEAGPPEPAYVRRADDSLLISGWMPADEFGELLGIELPPHRYNTVAGLVLQQFNVLPSAGDAFDAGGWRIEVVDLDGRRIDKILATRRSEQAAA

SEQ ID NO: 10327 - protein, 517 aa, BradyrhizobiumColbertium
MIIGARRLLHCLAGDARGILDLTADLVHRRGHLLGRGGDGLHVGRGLLGRGRHRRGDLFRLLGRARQRSRRRFQLRGGRRDGIDHVADHGFELARDLVHALAALELRFGFGRGGLVGGLLGEQRILEVLERARDLADLVVAARCRDLDLVPSCGEHPDHVGELRKRRHHAPAQHDRHASERPEQRRHDDSGEREHRQRAVARGGGARGCFRQRGVTHAVEHLDRRHDDFRELVRRGAVLAVAPGRRKLLVHGDRCLSEVGFRCRLQRGGDAGGISKLVDSGLDALAIGLHASLHAVHQRQFSRGERAACGERRGQRGGAAAGRDTQILSRSRQAQECGQRGIDIDDLCLETVHDRFDVADDLGNTGQEALCRRAVTRRERNAHRPIGSGGDILQSPCGPVDILGDGGPVIQHQDSAPCRLEARLGSFRSLRRSFELRLRRSAFLEDRSDVGRAKARDVLAGHQRRAKSVDGFDRVRAVREDARLGYQHLCAEDDCKYRHRQHRQCEELPNPHLSVPS

SEQ ID NO: 10328 - protein, 85 aa, BradyrhizobiumColbertium
MSEIASAIASAVEEQGAATREISRNVQQAARGTQQVSASIVDVQRGASQTGSASANVLTSAKSLSGESTRLKAEVGKFLDAIRVA

SEQ ID NO: 10329 - protein, 654 aa, BradyrhizobiumColbertium
MRTAAAIAWGALAFPAAGQAADLVLKAPALKAVYDWTGLYIGMHTGFTRGTSSATLADPTVATDNHVFNGMTGGVQAGYNWRLSSGVLLGVEGDISFPNYLPSNHVVSSAATGLSSAEERWDYVASLRARLGYTSGNWLLYATGGLAFAGERFLSTPINDVEDRRLHTRLGWAAGAGLEYGFAPHWTARLEYLYQGFDRAAVSFPSGVNYASTLNMHAIRLGLNRKVDWPGLPSYNPKSSLFDTESDRWEIHGQSTYLPQGYPSFPALYSGPNSLSPSRQAKATWSNSLFLNARLWDGGEVYYNPELLQGFGLNDTVGAAGFPNGEAQKSNFPYPHYNASRLFVRQTFGFGGEQEELASGQLQLAQKADVSRLTLQAGKFAVVDVFDGNAYAKDTRRDFMNWSIWAPGAFDYSADRVGLTYGVTAELNQRQWALRGGYFLMVAESNGNHFDTRVGERGQYLLELETRLSLFGRPGKLRTIGWLDSANMGSFRETLDNPGLNLDIARTRRGRLKYGYVLNVEQAITDDVGLFGRWSWNDGRTETLAFTDIHRSLSGGLSIRGAAWGRSDDVIGIGGAINAISRDYRDFLAAGGLGVLVGDGALNYRKERILETYYAYALNKNLTLTGDYQLIVNPAYNADRGPVSVFSGRLHGEF

SEQ ID NO: 10330 - protein, 87 aa, BradyrhizobiumColbertium
MSTRTKIAAVAFAALAVAGSIVSTTSSAEAKQPAWVWGMGAGLATAAVVGSAMAASNDPYYYGYHRCGWVAQYNAFGQYVGRVRTCY

SEQ ID NO: 10331 - protein, 268 aa, BradyrhizobiumColbertium
MTPPRDWIDIDWAHASLADVSRWIAVLPLAATEQHGPHLPVTTDVLIADAYLARVRELLPASVPACFLPVETIGISTEHIDFPGTQTLPTETALKRWTGIGEDVARRGVKKLVIVTSHGGNSAAMMLVAQDLRAHRKLFVVTTSWSRLSGADKLFPADEVRHGIHGGAVETSIMLARYPDQVRKSAIADFPASSIAMERQYRWLSTQRPAPFAWQAQDLNASGAVGNATLAVAEKGEQLIDQGATGFCELLGEVDNFDVNRLAKGPLG

SEQ ID NO: 10332 - protein, 340 aa, BradyrhizobiumColbertium
MTPSHLRLALTAGLIAALVALAPARAETLDKVTFGTNWVAEAEHGGFFQAVADGTYKKYGLDVTIVPGGPNENNRMLLIAGKIDFFMAANTLMSFDAVTNNVPVVTIAAIFQKDPQVMLTHPDAKVGKIEDLKPLTLFVSKEGMTSYFQWLKSEYGFGEKNVRPYNFNPQPFIANPKSAMQGYVTSEPFAVEKAAGFKPNVLLLADYGFNTYSTLIETRRDIVEKKPDLVQRFVDASMIGWYNYLYRDNSAGNAMIKKLNPEMTDDLLAYSVAKMKEHGIVDSGDSLKNGIGAMSDERYTSFFNKMVKAGVVKADLDFRKSYTLRFVNKGVGVELRPNKP

SEQ ID NO: 10333 - protein, 271 aa, BradyrhizobiumColbertium
MMANPTPPTVEAKLTALAVSLRGVTKAYDNGVMALGPLDLAVRKGDFISLLGPSGCGKSTALRIIAGLTAASSGTVRVARPEGEMQPGHGIGFVFQEPTLMPWTSVRENVRLPLRLGRIPKAEACARADAALASVGLADFADAYPRELSGGMKMRVSLARALVTDPDILLMDEPFAALDEITRFRLNNDLLALWRALGKTVIFVTHSVFESVYLSQRVIVMTARPGRIQADIRIETVEPRAEEFRTSAAYSDYCRRVSAALAPSYAGRSTL

SEQ ID NO: 10334 - protein, 272 aa, BradyrhizobiumColbertium
MTAQAAVTAKPSGARRAMRFVLPLIVFAAGLIAWELLVRLKGIPPYVLPAPSVIVLTLIKDWAVLSQSLATTLLTTLEGFVAASIGGIALALLFNQSKWVEYSLFPYAVVLQVTPVIAIAPLLLIYLEQQTAVVVCAFIVAFFPVLSNTTLGLNSVDRNLAGLFQLYGASPQQTLRFLKLPAALPYILGGLRIAGGLSLIGAVVAEIAAGTAGAGSGLAYRIAESGYRLNIPRMFAALLLLSLAGIVIYGVLALVSHLVLRRWHESALGKED

SEQ ID NO: 10335 - protein, 329 aa, BradyrhizobiumColbertium
MTAGSISSEKIDLLIYGPVRPILENGFSDHFVVHKAETRGDLERLTPAVRDKIRGVAVTYHTVRADRDSLSQLPKLEMVASFGVGYDHIDAKYAAEHDIIVTNTPDVLTEEVADVAMGLLIATLREFIKADRYVRSGLWQTQNYPLSVGSLRDRKVGIVGMGRIGQAIARRLDASLVPVVYHSRNPSKDVSYKHYPDLIEMAKAVDTLMVIVPGGASTNKMINAEVLKALGPRGVLINVARGSVVDEPALIQALKSGTILAAGLDVFAAEPNVPDELKSMQNVVLLPHIGSASVVTRNAMDQLVVDNLKAWFAGKAPLTPVAETPVKGR

SEQ ID NO: 10336 - protein, 213 aa, BradyrhizobiumColbertium
MGSARAQDATSLKKQMPGQWELSTTERSKTCVVTLKGDAAGQGLKLELEPACKTALPFTKDIVAWSVRGLDIVRLQDAAGEAVIDFTEVEAGIFEGLRQGEGVYILQDLAAARSMAKSMDQMIGDWSMVRGNGQPVCGLTLTNTEADPDNFQVFLKPRCDAAVAQFNPTQWRLERGQIILMSKSGEAWQFEADDHAQWRRVPDTADPLIMLRQ

SEQ ID NO: 10337 - protein, 267 aa, BradyrhizobiumColbertium
MGRRSPAKAIPVRTFLASGETKTGIAQIRSGFDMKLFALAFSCLLLFAVSASANDTRTFNAMVALANRGDSEAQYHVGMMYNNGIGTQQDRSRAFEWFQKSAAANDPLGAYKLGCYYDGQGAGIITTDADQALKYKLVAANAGYARAQHDVALTYDRRGNPEEALKWWKLAGDQGLPEALFSLSRAYSAGKGTPRDLSLSYAYFKLSKVAPAKNVNEMASMLSKPELEKAEKLAAAWKPRPTALTLKAFAGITAAEDHLKAARNQVF

SEQ ID NO: 10338 - protein, 237 aa, BradyrhizobiumColbertium
MPRKTDQPDNPSAEAPHYHGHRERLRERFYSAGADALSDYELLEMALFPALPRRDTKPLAKSLIKTFGSFAEVVHAPVARLREVHGVGEAAVNQLKLIAAAAHRIAKGGVNSRNALSSWNEVIDYCRTSMAFADKEQFRLLFLDKRNQLIADEVQQTGTVDHTPVYPREVIKRALELSATALILVHNHPSGDPSPSQADIQMTKAIIDIAKPLGIAVHDHIIVGKNGHASLRGMRLI

SEQ ID NO: 10339 - protein, 319 aa, BradyrhizobiumColbertium
MFEISRRDLVLGSTGAALVFGLNGPVSFIGAASAQRAADSLKYKVGDIEVFSLHEGSIERPVTEGMVKNAGLDEVKKALTAAGIGPDKIDNPFTVTAIRTGGKVVLFDAGFGGNGPASVGKLASNMKAAGLDPATVSTVVISHFHPDHISGLWVKETDAQVFPNAEIMMPEVEYKFWTDAALVEKVPEANRPHVKRIQATFPTWKNIKQYGDGADLAPGVKAIATPGHTIGHMSFLVASGGQQLFIQSDVTGIYQLFVKNPGWFSGFDSDGPKAEATRRAFFDRVIAEKGMIAGYHFGFPNVGTLAKDGNGYAFAAVKA

SEQ ID NO: 10340 - protein, 274 aa, BradyrhizobiumColbertium
MSYVEATDTSLRKTGQIKLHGPNAFAGMRKAGALVAKCLDELTDIVGPGVPTSKIDEFVRDFAFSHGAYPATLMYRGYRYSTCTSLNHVVCHGMPGDRPLKEGDIVNIDVTFIVDGWYGDSSRMYAIGPIARKAERLIEVTYEAMMRGIAAVKPGATTGDIGHAIQSFVEPQGMSVVRDFCGHGLGRMFHDEPNIIHVGRPGEGVQLKPGMFFTIEPMINLGKPHVKILSDGWTAVTRDRSLSAQFEHSVGVTATGVEIFTLSERHGEKPWAAA

SEQ ID NO: 10341 - protein, 436 aa, BradyrhizobiumColbertium
MDLKDFMEFVQTTARSVGAEISSPWFYLQFGLILAAAGIAYAAEAAIRSRLDMTSLAMRWPLPLRHFARVMIASASTAVFTLLVIISRVVMYHATWPSRSYLLMVAAKLGFAWLVIRLVTSVLRNAFIVKVVSVTAWLVAALSIVGQLDATVDLLDSFAIVLGGLRLTPLLAIKAGALLLIALWLTNIASNFAESRINATTDLTPSVQVLLMKIIRIGLLAVAIVIALGAVGIDLSALAVFSGAVGVGIGIGLQKIVANFISGIILLADKSVKPGDLVTIGDNTGRISAMKTRYISVAAGDGREFLVPNEDLVTQKVVNWTYTDKNTLVKIAFGTNYDADPKLVCKLATEIAAAHPRAQKGKPPNCILTEFAEAGMKFSLTLWLADPDGMDTVKSDVMLALWDAFKREGIRVPYPVREIRIRGGVLPVETTVEVPD

SEQ ID NO: 10342 - protein, 57 aa, BradyrhizobiumColbertium
MHPYRRWTLAPTHFLRLAAICQDFTALTRFTWRCIDGSAVPLVGFSGPLASIPPPLP

SEQ ID NO: 10343 - protein, 597 aa, BradyrhizobiumColbertium
MASLDSVSLAILLGSVLVMAGILSSLLALRFGAPLLLVFLAIGMLAGDSGPGQLQFDDVRTTYLVGSVALALILFDGGLRTRFASIRTVLAPSVALATIGVLLTALITAPFAKYALDLNWSESLLVGAVVASTDAAAVFLLVHTQGLRLRPRVGATLEVESGTNDPFAIFLTLMLVEYISLGSSSPGHVLMEFVLEAVLGAIVGIIGGRLVVMALNKVALPQGLHAPFVATAALVIFGGSQIMHASGFLAVYLAGIIIGNRPTRAHNSVVTFLDAATWLAQIVMFVLLGLLVSPSRLGTSILPAVAVALVLMLVARPLAVFLCLAPFRFNWRERIFIAWTGLRGAVAIFLASIPMLVGLSKAYLYFDVAFVVVIISLLLQGWTLAAAARKLHVALPRVERGPRRVELDLPGQLEQQLVGYPVRPKSLYFRRGLIPSWSKPTLVIRNEHILTPTEADPVAPGDYIYLLAPPEKAESLDRFFVDMQPSSAPDPHLLGDFVVSGEHTLAELAEIYGVMVSEDASKLTLADYFDVHLDHAPKEGAELALDTIVLVARSISGGRVNVVGLRLPEEDETPPPLTRAQALRKKLADVWASVAGV

SEQ ID NO: 10344 - protein, 220 aa, BradyrhizobiumColbertium
MLRVDIEKQLGDFSLHASFSSEGRVIGLFGASGAGKTSLVNMIAGLLRPDRGTIVIDGETVDDTAAGIHVPTYRRRIGYVFQDARLFPHLSVAQNLDYGRRMNGLAFDPAQHKRIIDLLDIGALQDRRPGKLSGGERQRVALGRALLSKPRLLLLDEPLGALDEGRKLEILPYLVRLRDEANVPMVYVSHDVAELRQLATQIVMLKQGRVTSLGGVKVLA

SEQ ID NO: 10345 - protein, 231 aa, BradyrhizobiumColbertium
MTEISPAEWTAILLSLRVAIIATLVATPFGIALAWLLARRDFWGKSLLDALVHLPLVLPPVVTGYLLLLTFGRRGLVGGFLADHLGIVFSFRWTGAALACGVMSFPLLVRPMRLSIEAIDRRLEQAAKTLGAAPWKVFLTVTLPLALPGVLAGMVLGFAKAIGEFGATITFVSNIPGETQTISSAIYSLIQAPDGDAAAGRLVIVSIVLALGALIAAEWFARRATQRLHGN

SEQ ID NO: 10346 - protein, 261 aa, BradyrhizobiumColbertium
MFRLSRLLAAFVILATAPLSPAVAEDKTITVFAAASMKNALDEIDAAYTARTGVKFSVSYAASSVLAKQIEQGAPADVFVSADTDWMDYAISKKTINEPSRVNLLGNSIVLIAPKDSRIDNVTVAQGFDLARLAGDGRIATGDVKSVPVGKYAKAALERLGAWQAAEPKFAMAESVRAALTLVARGEAALGIVYSTDAKVEPGVKVVGTFPADSHPAIIYPVAATTTAKSETSGYLTFLRSTAAKSIFEKYGFKFLISPVT

SEQ ID NO: 10347 - protein, 324 aa, BradyrhizobiumColbertium
MRQLRYKDDSMSRRGITLLLLALAFPGAGGALAQDKGSVTPKPLPPLANPNDPDLAAKELFARKLLPSKGPAHVIGSYTRGCIGGAEQIPVSGEHWQVMRLSRNRSYGHPDMIALIKRLAAKAHRDAGWPGILVGDIAQPRGGPALSGHASHQIGLDADIWLTPMPNRRLSREEREEMSAVMMVRPDRLDVDPKVFTPGHVLVLRDAAREPAVQRIFVNAAIKKAVCREAKGDRAWLSKIRPWWGHDYHFHIRMRCPAGAGACEGQPSQAEDEGCKPADLAYWFSDAVLHPKPPPEPPKPKPTMTLAQMPAACKAVLHAGDAKR

SEQ ID NO: 10348 - protein, 79 aa, BradyrhizobiumColbertium
MRSLSCSSRFQTQLHASQCARRPRVLRQVSEKKVILPGGDPREADLAACLRGAAATAGTVKMGSAPQSGIDLAQNCART

SEQ ID NO: 10349 - protein, 721 aa, BradyrhizobiumColbertium
MLASVGKRARKPRFAVASRVPSERSEVLRSRAEAEAAIAEARKSHERLRQAIDMLPQGIVFLDAEGRYVLWNKKYAEIYSKTADLFAEGARLEDTLRIGVARGDYPEAVGNEDEWISERLQKLYQPGARHEQKLSDGRVILIDERLTDDGGVVGLRVDITELKQREASFRLLFEGNPVPMIVCALDDERIIAVNDAAVAHYGYSRAEFERLKIRSLQAFDSEPPWTADVTGEEQAGRTWKHVKADGALIDLAIYSRELTYAERPAVLLALMDITERKRAEARLAFMSQHDGLTGLPNRSLLRQQVDEMLLHTRRSPEKVALLMLGLDSFKAVNDTLGHAVGDKLLRGVAKRLRSTLREEDALARLNSDEFAIVQSGLTRPEDAVMLAKRLLAAIADPYLLDGHSVVIGASIGIAMAPGDGDDSEKLLKSADMALSRAKLDARGTFAFFEAALDAKAQSRRKIEVELRDAIQNDVLRPYYQPLIDLQSGRITGFEALVRWPHAERGMVSPAEFIPVAEDTGLINPLGGQMLRRACLDAAAWPDDVRVAVNLSPLQFRSGNLLSVVTDALKHSGLPPRRLELEITETLLLEKSAQILATLHALRALGVRISMDDFGTGYSSLSYLRSFPFDKIKIDQSFVRDLGSNREAQAIIRSIVSLGKGLGVTITAEGVETEAELSCLRAEGCHEGQGFLFSKARPHAEIVSLLAAQRGIDGNEDAALVA

SEQ ID NO: 10350 - protein, 654 aa, BradyrhizobiumColbertium
MFKIKSIAARLILAIALTVAVACAILSGFSITQQRALTRMALDQQLKLQYESVIAAIDYEGRSALAVSAVIAALPPVGDAIAKGDRDSLAALLGEANKSLKAQGIPLITFQVPPAVAFYRVHAPKVFGDDVSARRETVVEAIKGGRQIVGVEPGREALGIFGMTPIVRGGKSLANVDIGAAFGKEFVDRAKKRFGIDLAVYSLDGKNLNKLSSTFGDTVVTTLDQLKNAIDGSVVRHAAELDGHPVEVYAGLIKNYAGAPVGVLEIIKDTSEYEAAFATAERNLILGTLAILAVTIVLALLLGRGLSRPLTAITAVMNRLSSGDTSVTIPGSERTDELGTMAKAVDVFRRNMLEAGALREAQEADRARAEIEKQALQRQMADRFEADVKGVVAAVAKATEGMQSVAGEITTSVNGTSQRASAAATASEEASASVNAVAAATEELASSVNEIGRQVTHSSEVASGAVRKAAETTEMVTSLATAAERIGDVLRLISEIASQTNLLALNATIEAARAGEAGRGFAVVAAEVKELASQTAKATDEIASQVTAIQAATGNCVTAISGISDTIREISGIANTIAAAVEEQGSATREIARSVQQASAGTTDVSANVAGASQSADQSRALAGDVMVATGELGQHASVLIRSVDTFLAGLRAA

SEQ ID NO: 10351 - protein, 377 aa, BradyrhizobiumColbertium
MNWNSTIPAPLKERDLRIDLFRGLSLWWIYINHIPETYLNRFTPKNFGFSDAAEILVFLSGLASGIVYGDLLRSSGFAAASLRMLRRSFEIYIAQILTVVLLLAEVSYIAAWQLDMFDHANLAVLLQQPAETLLQAALLRYTPVNLDPLLLMVILHFALVLIVPLTIGAWPLALAGSVALYVCAHLFDWYIPAYPKGQLYFNPLNWQLLFVIGIWWGANRGDWQLAILNSRTLAVLAAGYVLFSFVITLGWQIHAIEAYVPAWLSRLIYPVDKTNLDILRLLHFAALALLCWRFLPSNASILKARSLVPLIRCGEYSLAIYCVSVLLSFAAHALLSLGSNGLASQTLVTLLGLGLMSALAMSLAAIDRGVLPNLRPL

SEQ ID NO: 10352 - protein, 406 aa, BradyrhizobiumColbertium
MSRPARFDYGWVVVAAGALMTCVGFGTMLSLAVFLQPISEAMGWSRAGVSAAATLDFLCMGFAAFLWGTLSDRFGTRIVVLSGSLLLGLGLVTASQATTLWQFQLCFGVLIGIAVGSFYAPMMALASAWIEKNRSLAVALVSAGMGVSPVTIAPAASWLITAYDWRTAMLVIGIAAWALLIPACFLVRPAPAAPAPATADEAAAVELTAAQALRTPQFIALAAAHFACCAAHSGPIFHMVSYAMVCGIAPLTAVTVYSVAGVSGLGGRLLLGVLADRMGAKPVLVGGLFVQAMCIATYLAVAQLGEFYALSVVFGLAYGGVMPLYAVLVREYFGARIMGTVFGAVSAFASLGMALGPWAGGIVFDNFQRYTWLHAGSFAIGLAAVAVALSFPTRRRPSLDLGRAAV

SEQ ID NO: 10353 - protein, 433 aa, BradyrhizobiumColbertium
MRREALCRLRDCRRLFVSVIFAVAVSAPPACAQDGRSSLGEPGPVFSDSGPDAELYGAAEGYPVGTRATATQLDKLVGVYSRFGDIHRSRTVRRAAAPWHFKRAPEPSITYSFGTERLSIGDYLKRNPVTGLLIARDDTILYEHYQYSRTDRDRFLSQSMAKTLVAMLVGISVSEGRIKSIDDVVSTYVPALAGTEYGNTSLRALLNMSSGVAFSEVYDGKDDIARLRRALFAGEPRDPAEIVAQFNNRTAPPGTRWHYASVETEILGLVLRSVTGTPVADYLHDRIWDPIGTEADASWAIDGSGQEIAFCCFNATLRDYARLARLLAHDGAWEGRQLIPRQWLLDATTVRPEDRHLAPRVATPYFGYGYQVWLLPGEQRRFALRGIRGQVILVDPASKLVMVHTAVRKKPTEPGGLREPLALWSAVLQQLGQ

SEQ ID NO: 10354 - protein, 137 aa, BradyrhizobiumColbertium
MRITVETSVAAPIDQVWRAYTTPADIVKWNAASDDWHTTKATVDLREGGAFSSRMEAKDGSMGFDFAGTYTKIVEHKRIEYAFGDRKAEVEFVPGANGVLVRVVFDAETTHSEEQQRGGWQAILDNFARYVEAKQKV

SEQ ID NO: 10355 - protein, 603 aa, BradyrhizobiumColbertium
MTTVPISNIRNFSIVAHIDHGKSTLADRLIQMTGGLSDREMAGKEQVLDSMDIERERGITIKAQTVRLQYRAKDGKDYIFNLMDTPGHVDFAYEVSRSLAACEGSLLVVDASQGVEAQTLANVYQALDNNHEIVPVLNKVDLPAAEPEKVKQQIEDVIGIDASDAVMISAKTGLGVPDVLEAIVTRLPPPKGDRDATLKALLVDSWYDVYLGVVVLVRIVDGTMRKGQRVRMMGTGAAYDVERVGFFTPKMQQVEELGPGEIGFITAAIKEVADTRVGDTITDDRKPVAEMLPGFKPAIPVVFCGLFPVDADDFETLRAAMGKLRLNDASFSFEMETSAALGFGFRCGFLGLLHLEIIQERLSREFDLNLIATAPSVIYKMKLTDGQEIEIHNPVDMPDVVKIAEIDEPWIEATILTPDEYLGSVLKLCQDRRGSQKELTYVGSRAMVKYDLPLNEVVFDFYDRLKSVSKGYASFDYHLTDYKPADLVKMQILVNGEPVDALSMLVHRTRAEGRGRAMVEKMKELIPPHMFQIPIQAAIGGKVIARETVRALRKDVTAKCYGGDITRKRKLLEKQKEGKKKMRQFGKVDIPQEAFIAALKVDS

SEQ ID NO: 10356 - protein, 502 aa, BradyrhizobiumColbertium
MIQFAILHAVLWTFILINLKAAQDVHMDVAEAWGWGQKFLWGYGKPPPLSGWVAGLWFSAFPAADWATYALAMTTVSVGMVICWFVSLRVVDARRAFLVVVMIALYPIFNFKGFKYNPDLLQLVTLPLLVLAYLNAFERRSWQSGILLGLAGALALMTKYWVLTMIGAIGLAALIHPERLRFLSSPAPWVAIVTMVAAMIPHIVWLADAHFVPLTYAGDTYSLADSAQVHQLVAGYVLHNLGLLALPVALAALAMALVPPWGRLLLRAPSRIVTRAWARGGSSGVNASQALNVWIIQVIVALGPPLGALVFSIYMKTDWGISLFFLVPLALVAIPTLRVQGAVLFNIAAIWLVLSVATLAASPWIAAREMAANAGNTATYGARSELARELTQAWHARFASRWAVVAGTMESIQPMVFYSPDHPSALLPLEAWDSGLTSRDDAKTYGFIGVFDPTDGRLPKFEKWVAEVAPNAERIVMTTRRFTHGKAGPAMSWNIYIAPPAK

SEQ ID NO: 10357 - protein, 105 aa, BradyrhizobiumColbertium
MSDEASQAGTGVPAGAISKDLLIVNKRGLHARASAKFVQAVERFDAQVWVTRGGETVGGTSIMGLMMLAAGPGTTITVSAAGTDAEAALAAITELVESKFNEEGV

SEQ ID NO: 10358 - protein, 133 aa, BradyrhizobiumColbertium
MIGLVLVTHGRLADEFKAALEHVMGPQKQIEAITIGAEDDSDLCRSDIIEAVNRVDSGDGVAILTDMFGGTPSNLAISCMSRPKVEVLAGINLPMLVKLAKVREERSLPDAIAMAQEAGRKYVTIASRVLAGK

SEQ ID NO: 10359 - protein, 173 aa, BradyrhizobiumColbertium
MSDGPSVHASAVMVGTCAVLIRGPSGSGKSRLAFDLIMAGRAGLVERTVLVGDDRVHLATVGHEIEVRPAAPLVGLIEIRGLGIRSCDFVEHATVGLVVDLHAADAERLPPAESLKTSILGVEIPRIPVARDYSPLPLVVAALTTTKSSSSVNLSGDCLKGNGNHMNPSIATE

SEQ ID NO: 10360 - protein, 598 aa, BradyrhizobiumColbertium
MLDRTQPDPNPSAGDSTSNGVQELVAEDKPSGFRPLNWLKRAGQFFFALSFSSLTRRIVSLNLAGLVALVASILYLSQFRAGLIDARAQSLLVQAEIIAGAIAASATVQTNAITIDPDRLLDLKPGETYGGPDEYSPLDFPINPERVAPVLRTLISPTKTRARIYDPNGSLLLDSRNLENVLRFDLPPPAAKPGFVERGMVAVRTWLNRGDLPLYRELGPENGNGYAEVGDALQGQKRSMVRVNARGEVIVSVAVPVLRSRAIHGALMLSTQGDDIDQMVTAERLAILKVGGVAAAVMIMLSLLLASTIAGPVRRLADSAERVRRRIKARIEIPDFTRRRDEIGHLSGALRDMTSALYSRIEAIEMFAADVAHELKNPLTSLRSAVETLPLARNENSRARLLEVIEHDVKRLDRLISDISDASRLDAELQRQDAVPVDLRRLLTTLVSVANETKLGHDVAVETRFEGRSPTDTFAVSGHDSRLGQVVSNLLSNAQSFSERGSKVRLTCRRVRGEIEIVVDDDGPGIRDDALERIFERFYTDRPHQGFGQNSGLGLSISKQIVDAHGGRIWAENRAGPPDDEGVPTVSGARFVVRLPAL

SEQ ID NO: 10361 - protein, 233 aa, BradyrhizobiumColbertium
MPTIALVDDDRNILTSVSIALEAEGYRIMTYTDGASALDGFRTTQPDLAILDIKMPRMDGMETLRRLRQKSDLPVIFLTSKDEEIDELFGLKMGADDFIRKPFSQRLLVERVKAVLRRSAPKDPTVAPKENDAKALDRGLLRMDPERHTCTWKNEPVTLTVTEFLILQALATRPGVVKSRNALMDAAYDDQVYVDDRTIDSHIKRLRKKFKVVDNEFEMIETLYGVGYRFKEA

SEQ ID NO: 10362 - protein, 249 aa, BradyrhizobiumColbertium
MQPTPDFDPGKLAKSLLRRSRQGALATLMTGSGDPYCSLVNLASHPDGSPILLISRLAVHTRNILADSRVSLMLDERVAGDPLEGARIMLAGRAEEAGADKDLLQRRYLAAHPSAEGFVSFTDFSFFRIRPTGTHLVAGFGRIVDLKPEQFLTDLTGAEDLLAADEGAVEHMNADHRDAMNLYATRLLGAASGDWRCTGCDPEGLDMQHGQATLRLDFPERVTDGTGLRKMLVRLAGEARKKVEQGATP

SEQ ID NO: 10363 - protein, 822 aa, BradyrhizobiumColbertium
MSAGKYAEALPLAQAMVASLEKTNDGRELSAALNNLGQVYAGQGRDDLAEPVYKRAIALMEKSLGLDTGLIAPELNNLAALYQRQGRFTEAEPLFKRALAVSEKSLSREHPDIGRALNNLATLHVKQERFADAEPLFQRALAIYHQAAGPEHPAVATVLNNIGQLNRDLNRDANAEAPIKRSLAIREKVLGPEHPDVARSLNNLAGLYEHQKRHAEAEPLYRRALAIREHALGADHPDVATSTSNLAHFLQATGRTVDALPLAQKTLGANRAQLPVVLPILFAARQQSLLASDKALDDALAAIQRGTQSSAASAVNKLAVRLAAGTDRLAELVRKDQDLAAEAEALDKAIVAAVSKSSAQRDVGAEQRSRTRIASIANERAALQKTLAVEFPEYSSLSNPLPLAVKDIQPLLSADEAMVIYSVTKGQSYVVAITREGVDWKEINVGADLLAQKVSAFRKGLDVGKARDSSGKSGLFDLALAHELYLALLGPVEVLTKDKRNLLVVPSAALTALPFHLLVTEKPQAPIPDKLEGYRDATWLLRRQAVSVLPSVVSLKSLRAFARRDHGVKPMTGFGDPVFNPAEGPADRRAAGGKIAARSIATIAYAEFWRGAGVDRARLAQALPQLPDTADELNAVARDVGAAAADIHLGREASETTLKRAALAQYGIVYFATHGLVAGDVKGLGEPSLALSIPDQPTELDDGLLTASEVAQLKLNADWVVLSACNTIAGDKPGAEALSGLARSFFYAGARALLVSHWAVDSEAATRLTTSTFALLKNEPAIGRAEALRRAMLTFVDDTSSPQNAYPAMWAPFALIGEREVR

SEQ ID NO: 10364 - protein, 538 aa, BradyrhizobiumColbertium
MQETGVRNGAFGADKFGLKNLKQVHWNLGAPQLYQYSLAAGEAVLSSDGALCADTGEFTGRSPKDKFTVRDATTDKKMWWAGNQSITAEQFETLYQDFLKHAEGKRLFAQDLYGGADPAYRIKTRVFTELAWHSLFIRTLLIRPEAIELSTFVPELTIIDMPSFRADPKRHGVRSENVVAIDFARKIVLIGGSYYAGEMKKSVFTTLNYYLPERGVMPMHCSANVGAKGDTAIFFGLSGTGKTTLSADPNRTLIGDDEHGWGPNGVFNFEGGCYAKCIKLSKEAEPEIYAASTRFGAVLENCVLDEDTRVVDFDDGSKTENTRSAYPLDFIPNASRTGRAPQPKNVVMLAADAFGVLPPIAKLSPAQAMYHFLSGYTAKVAGTERGLGNEPQPEFSTCFGSPFLPLDPSVYGNMLRDLIAQHNVDCWLVNTGWTGGKYGVGSRMPIKVTRALLTAALDGSLRNVAFRTDKYFGFAVPTALPGVPHEILNPVNTWKDKDEFDKTARALVGMFQKNFAKFEAQVDAEVRAAAPDVKLAAE

SEQ ID NO: 10365 - protein, 271 aa, BradyrhizobiumColbertium
MHSKLPHPFDDATRIPAGDSSWQGHTSDDYWAFVGPFGGATAATILRALMEHPQRTGDPLAMTVNYCAPIAKGAFDLDVRLVKANRSSQHWSVELSQNGGEVATLATAVFAERRPSWEHRVVEVPDATPFEQTLPFPKISAAWANQYEFRFVEGEMRIGPRQADPASTYSKLWISDRTPRKLDMLSLMSMSDAFFGRVFHARRELVPFGTVSLTTYFHTTSENLAAEDTTRVLATADAKIFHRSYGDQHGELWSPNGRLLATTTQIAYFKA

SEQ ID NO: 10366 - protein, 838 aa, BradyrhizobiumColbertium
MQDSSFQPNYSAPGQPIDELALTEIKGAILAKLRLAIGKDAGMATKHDWYQAAALALRDRIVHRWLTAEKHSYDTGRKRVYYLSLEFLIGRLFTDALNNMGLLNIFELALGDLGVSLPELRKCEPDAALGNGGLGRLAACFMESMATLSIPAIGYGIRYDYGLFRQIINQGWQQEYPDEWLGFGNPWELQRPEVIYDVNFGGGVEHVDDKGRDRAIWHPAETVQAIAYDTPIVGWRGQHVNALRLWSARSPDPLKLDAFNKGDYVSASAEQARAEAICKFLYPNDESPAGRELRLRQEYFFVSASLQDLVKRHLSSDGQLRSLAGKVAVQLNDPHPSLAVTELMRILVDLHNFRWDEAWKITVATLSYTNHTLLPEALETWPVELFERLLPRHLEIIYRINVQHLALAEARCPGDIDFRASVSLIDEKSGRRVRMGQLAFVGSHRINGVSAMHSDLMRETVFHDLNHLYPGRITNKTNGITFRRWLMLANPKLTELLRETCGDAVLDDPTQLGLIEARASDVEFQKRFRNVKHHNKTALARVIGERLGIKVDPSALFDVQIKRIHEYKRQLLNIIETVALYQAIKDDPNGNWVPRVKIFAGKAAASYRYAKLIIKLINDVAEIVNNDPAIDGKLKVVFLPDYNVSLAEVIIPAADLSEQISTAGMEASGTGNMKLALNGAITIGTLDGANIEIRDHVGAENIAIFGMEAGDVMIRRKQGLDASDVIRNSPKLQRAINAIGAGEFSPGDPGRFESIAHALRYLDHYMVSADFDSYYEAQRAVDARWQVIPAWTRASILNVARMAWFSSDRTIREYAEEIWNVPVNPTTPLLPNLRDAAG

SEQ ID NO: 10367 - protein, 74 aa, BradyrhizobiumColbertium
MLIEIATALLVVCIGASSAALGAGKSGRSPDGLSCGFTVPEKASPAARCAAIKRQCGGKFYANACGDRLISAAS

SEQ ID NO: 10368 - protein, 291 aa, BradyrhizobiumColbertium
MEAAMLDLELLRSFVSVVEAGGFTRAGARVHRTQSTVSQQIKRLEEDVGQVLLHRDGKDVRPTEAGERLLSYARRLLSLAEEARDVLRQPDGEGAIRLGIPEDFAAYRLAKLLGAFSRSHPRLRLDVRAGQSKHLAHDLERGELDLALYKREAGEKGAVAVWPERVHWVTSKSHPVDVDVPSVPLIGFPLGCIYRAGAIHALESAGRAWHTAYTSSSLAGIQAAVAAGMGLSILSEMSILSDHRVLTAKEGFAPINKTELALMASPNASPATLRLADRLAQFCDAVQTKAA

SEQ ID NO: 10369 - protein, 306 aa, BradyrhizobiumColbertium
MSLAPSVSVPRSRFNTLPLAIGLFCLLWSYAFIAGKIGVTHRPPLILLAARFSLAGILILGATLIRGDDWSLSWRDAAVFAVLGIANNALYLGLGYTGLQSVSAGLGGLIVSANPVFTAALAALLLGEGMTWRKAGGLMLGVIGVTAIVWHRLSVGTDSLHGILFTLASLASIVAGTILFKLLAPKGSLWIGNGVQNLAAGIVLTPVAFTFADIHAIDYTPSLIGAFAFLVLGGSILAYWLWFHLLKVCGASAASAYHFLMPPLGMLFAFVVLGEHVEARDLLGIIPVALGIYLVTRPAKAAASAS

SEQ ID NO: 10370 - protein, 256 aa, BradyrhizobiumColbertium
MIRVLLAIALVLLLGGAARAERLIVSVSNHRVTVTPNYSGEELVLFGSVEKDATTPADRTAYDLVVTVMGPRADMVTRRKERTFGIWINTDYRQFLQVPSYLALFANRPFDAITSPEIARRQQIGLNNVLLTQRVGGDYADVVPHDVFRSAFIRLRTQRGLYREDSSAVTFLTPTLFRTGIPLPGEVPIGTYQVEIKLFANGAFIGKTDTAFEIVKVGFEQFVANSARHNGLLYGLATVAMALMTGWMASIVFRKD

SEQ ID NO: 10371 - protein, 305 aa, BradyrhizobiumColbertium
MQLYLPIADLPVNVFLVLAMGAAVGFVSGMFGIGGGFLMTPLLIFIGITPAVAVASVASHIAASSFSGALSYWRRRAIDPALATVLLCGGVTGTALGVWAFTQLRALGQLDLMIALSYVVLLTTVGGLMFYEGLRALMRTRRGALPPRRTHNWIHGLPLKMRFKRSKIYLSVIPVVVVGIAIGFIGAIMGIGGGFILVPVMIYLLRVPTSTVIGTSMVLTLVTMLFATMLHAVTNHLVDAVLALILMVGGVTGAQFGARAGQKIRGEQLRLLLGLLILSVGIRFAIELVIQPSDLFTIRELGVSG

SEQ ID NO: 10372 - protein, 48 aa, BradyrhizobiumColbertium
MVNGRDGGIDAFAPHPEEPAQQASRRARPGPRGGPAWFETRARARSSP

SEQ ID NO: 10373 - protein, 1129 aa, BradyrhizobiumColbertium
MNSRVSWSADGIDPSVRERAEAAARRAGMSLNDWLNSTLGETAPPNFRAAYDQRPQHMPSQESREVADIHQRLDAITQQIERISKPTPRQEISREQGVARQLNDAISRLDARLSQISRPQQPQAPRPAPAASPIEARQRQADAVERAAAQVYRNSPPLSPASFDVAVAEITARQSELDGFTPRQMPPRAAPPIAPTAAPYAPPVAPPGPAYAPPPPPQPGPDFSSLERHLLKITSQIESLQRPDNTEQAINAFRSELAEIRAAITEAMPRRAIESIENEIRSLHRRIDETRSNGTDGQVLSGIEHALSEIKQVLRTLTPAEQLTGYDEAIRNLGAKLDLILRANDDPSTVQQLEGAISALRAIVSNVASNEALARLSEDVQLLSSKVDQITRASGQGDSFTVLEQRIAALTAALETRERPQPSESTEHLEAAIRALSDRFDRMQVGNDSASTFAHLEQRVSYLLERIEAASDPRNGNLSRVEDGLHDILRHLERQQATYAALAESRNSAPAADPDMVDLVKRELSDIRFSQAETNRHTQDSLEAVHSALGHVVDRLSMIEGDLRGVRTAPQPAAPQPMPSAAPMEPAPMAREPRPQAQPPKYDPKPELPNPAAAQAAQAAAFVAAPREFHAAAPAAPPPVPAMPPIPPRAISEILEPHTAPPRAALAPELPPDHPLEPGTRPGGRVATPSERIAASESAISEIPAGPKEPVSSSSFIAAARRAAQAAAAQPEKTGRAAKAGTDRSKETGKDGGSTITSKIRSLLVGASVVVIVLGTFKMAMNLLDGDGPPPAPQAMQNIPSEPAAPAPPPPVETKPATPEQVTPSMTSPTPIGRQSQNNAAPAQAANPGSAASVEIPPAPAAAPLPPAAGEITGALSGTSRAKLGLVQVPPSERLPDGIGGPALRTAAMKGDATAAYEIGLRFAEGKGVATNYDEAAKWYDRAAQAGVVPAIFRLGTLYEKGLGVKKDADIARRYYTQAAERGNAKAMHNLAVLDADGGGRGANYKSAAQWFRKAADRGVADSQFNLGILYARGIGVEQNLAESYKWFSLAAAQGDADAAGKRDDVAKRLDPQSLAAAKLAIQTFSAEPQPDDAVNVATPAGGWDSAPQANAKPAPKQVATKRSASAAH

SEQ ID NO: 10374 - protein, 196 aa, BradyrhizobiumColbertium
MALGDAILACLTERPMTGYELAKTFDSSIGFFWKADHQQIYRELSKLRDRGYIQGREVVQTGKPNKLVYTLTPEGRTALRHWAARPSTPASTKDDLLVRLHALDSIDIEPLRTDLMARLEHHRDRHANYERILKKRFPDGRAEGRLDLGNLLLLRLGARHEQMVADFCEEALEALSAESGKGTVVPLEDGKREGKG

SEQ ID NO: 10375 - protein, 128 aa, BradyrhizobiumColbertium
MTGLDSWYAYMKSHDRAALRDLLHPDAVFESPVVHSPQRGRDITFKYLSSAEKVLGGPGFTYVGEWKNERGAVLEFKTQIDGIEINGVDIISFDSEGRITHFKVMVRPLKAINMLHRLMAEQLAAAQP

SEQ ID NO: 10376 - protein, 596 aa, BradyrhizobiumColbertium
MPTYKAPVEDVNFLLNDVFQIDRYDNLPGFSDASSDVREAILGEAAKLAEEVLQPLNRVGDLEGCKRAEDGSVTTPKGFKEAFKQVAEGGWLGLSAPTEYGGQGLPVTLSQAVNEFQISANMAFSMYGGLTMGATAALLVHGSPEQKKTYVPKMIAGEWTGTMNLTEPHCGTDLGMLRTKAVRQADVSFKITGTKIFISAGEHDLADNIIHLVLARIEGAPAGIKGVSLFVVPKFLVNADGSLGQRNGVVCGSIEHKMGIHGNSTCVMNYDNATGWLIGEENKGMQGMFVMMNEARLGVGVQGLAQSEVAYQNAVAYARERIQGRSLTGAKAPDKPADPIIVHPDVRRTLLSIRAFNEAARAFVIWTALKSDVAHRSEDPKDRQAADDHMGLMTPVLKGFLTDYGFANAVQAQQMYGGHGYIAEQGMEQFVRDARIAMIYEGANGIQALDLVGRKLPRDGGRAIMAFFGEVMAFAKENGGDEALKPFIAPLSTSLGHLQQATTWLMQNAMAKPDNAGAAATDYLHLFGFVALGYMWAKMAKVTNAKIAESGATPYLSTKLVTGRFFMERMLPETAANLARIQAGCATIMELPAEAF

SEQ ID NO: 10377 - protein, 402 aa, BradyrhizobiumColbertium
MPEAFIYDHVRTPRGRGKADGALHEVTALALATVPLKALKDRNNLPEDSVDDVVLGVVDPVGEAGSDIARFAALKAGLGEAVPGVQISRFCASGLDAVNFAAAQIMSGQHELVIGGGAESMSRVGIGASGGAWPMDPSIAVPAYFMPQGVSADLIATKYGFSRDDVDAYAVQSQQRAAKAWDEGRFDKSVVPVKDINGLTILAKDEHMRPSTTMQSLAQLQPSFTMMAQMGGFDGVAVQSHPEIERVNYVHHAGNSSGIVDGAGAVLLGSKEAGSKYGLKPRAKIRAFANIGSEPAMMLTGPVDVTEKLFARSGMKKTDIDLFELNEAFASVVLRYIQAFDIDNAKINVNGGAIALGHPLGATGAMILGTVLDELERTNKSTALVTLCIGGGMGTATIIERV

SEQ ID NO: 10378 - protein, 737 aa, BradyrhizobiumColbertium
MSYKNFKVETDSDGIALVTWDIPGRSMNVLDETSTNELEAIVKATTADAAVKGVVITSAKEAFCAGADLSMLEGMNQAYAKVFKEQGETAANQMLFDQSRRFSQVLRSIETSGKPWAAAINGLALGGGFEITLCCHYRVAAENPKTRLGLPEVKVGLFPGAGGTQRVPRLVPPQDAMTILLKGDPVTVEKAKALNLIHAVVPAADLVKAAKDWIKGGGKAVAPWDEKGFKLPGGPVFSKAGMMMFPAGNAIYRRETYDNYPAARAIMSCVYEGLQLPIDAALRVESRYFTSVLRSKEAAAMIRSLFLSMQELNKGARRPKDVAPTKVKKIAVIGAGFMGASVGYVSARAGLDVVLIDRDQESADKGKAHAQKVIEEQIKKGRAKPADAEALLARITPTADYAALKDVDLVIEAVFEDRKVKADTFAKAQQYLKPDVIFASNTSTLPITSLAESFKDQGKFIGIHFFSPVEKMMLVEIILGKNTGDVALATALDYVRQIGKTPIVVNDSRGFFANRCVGRYVAEGNEMFLEGVPPAMIENCAKMAGMPVGPLSLSDEVALDLGLKIMKATEADLGPNAINPDQKKLMVEMVEKQGRLGRKNGKGFYDYPEKGKGQKSLWPGLSALQPKQLDPDTLDVEELKQRFLVVQAVEAARTVEDHVITDPREADVGSILGFGFAPFTGGTLSYIDFMGTKKFVELCRKLEAKYGSRFTPPKLLEEMAAKGETFYGRFAPKKAAA

SEQ ID NO: 10379 - protein, 95 aa, BradyrhizobiumColbertium
MVASGIAGLATGLFFRVWALLLVSPATAIVAATVLQSSEFGFWAGIPIVTACLMMGQFAYLAATFHLYRGELSMQDETNGEPGKQSHNHIGGQNE

SEQ ID NO: 10380 - protein, 104 aa, BradyrhizobiumColbertium
MSGARSTEAHEARNRGDDLKLKSSDLLPALGLDNDQIVTEGPVIVQMNADRPPVTAWGTSSGHGDLMDQQLRRPTVHQDTGLKDTDLKTRVSAWRCQFDTHCPG

SEQ ID NO: 10381 - protein, 164 aa, BradyrhizobiumColbertium
MKRRPSTEATAAWIRLMRVQSRVLDCVEQDLKKAGFPPLAWYDALLELSRAPSGELRPVELERQMLIPQYSTSRLIDRLVDEGLASRRECKIDKRGQFVEITEAGRELQKRMWGAYSAAIEKYVGSKLSDADAVKLSGLLDRLGCSCGEMKLPPAGANESMPSR

SEQ ID NO: 10382 - protein, 456 aa, BradyrhizobiumColbertium
MARDQIDMTPLQSRDELVAWFEAGCKDPSEFRMGTEHEKTPFTLEGHRPVPYEGARGIGALLEGMKLLLGWEPIMEKGNIIGLYDVTGGGAISLEPGGQFELSGAPVENVHQTQSELMAHLAQVREIATPLGIGFLGLGMTPTWSRADIPVMPKGRYKIMTNYMPKVGQYGLDMMYRTCTVQTNLDFSSEADMVKKLRVSLALQPVATALFANSPFTEGKPNGFLSFRSEIWRDTDNARAGMMPWAFEDGMGFERYVDYALDVPMYFVKRGEEYIDVSGSSFRAFFEGRNNNLPGERPTLSDWANHLSTIFPEVRLKRYLEMRGSDGGPWGRLPALPAFWVGILYDDASLDAAWDLVKHWTAHERQALRDDVPRLGFKARIKDRYLFEIAKECLVLAHAGLRRRSRIDQLGRDETRHLEPLDRIVDSGKTPAEEMLEKFNGPWKGSVEPAYVEYAF

SEQ ID NO: 10383 - protein, 188 aa, BradyrhizobiumColbertium
MRKGRLSGAVMASVVASAALLSLAFAGVPALAQTAFDRPGGDYFSTPVASGDPEDCALLCERDRRCRAWSFSYPDVEGGSAVCWLKNTVPARVPGSCCISGVRGAGVIEPRIEGVETSIDRPGGDLRNFDLKDGEGVEVCKAACTADNKCRAFTYARPGYTGREARCFLKKEIKPPRRKAGFTSGVVR

SEQ ID NO: 10384 - protein, 189 aa, BradyrhizobiumColbertium
MTRDEFLALALQNPVNAAIVDELDRLALPDAWLVAGCLVQTVWNALTGRAISHGIADYDVFYFDPDTSWEAEDTVIRGLHARLAHLGAKVEIRNQARVHLWYPDKHGLPYPPLARSTDGIDRFLTENTQLGIRPSGGEFDVYAPHGFDDIAKLIVRPNRALNFSAANYAAKVARWKALWPELTVIEADA

SEQ ID NO: 10385 - protein, 259 aa, BradyrhizobiumColbertium
MSVEEKVTATPKRKSSGWAGQLAQLAGIVAAVFIAKGALAEPFYVPSGSMEPTLLIGDALLASKFPYGYGTSSLPIQISLPESGRVFAETPKLGDVVVFRWPGDRSQAWVKRVVGLPGDRIQMRQGQLFINDRPAELKPDGIGTAEDDRGRSEPAYRYVETLPNGVSHLIFKMRDSGPLDNTPEVTVPAGHLFVLGDNRDNSADSRVPLRSGGVGLLPIDNLIGRADAVVGSWDLGMRSQPVWTWLSGFRLARFFTAVH

SEQ ID NO: 10386 - protein, 475 aa, BradyrhizobiumColbertium
MTNPATTSLLDRANLDRDQVRHEIARGLSGADDGELFLEYSQTEALMFDNGRLKQATYDTSQGFGLRAVKDDAVGYAHSSDVSLPALMRAADAVSAVRGGYSGSFAAPPPHTNVRLYGDDNPLDAPGFETKVKLLAEIDAYLRDKDPRVRQVSVSLGATWQVVEILRPDGESYRDIRPLVRVNISVVAGQGDRQESGSKGYGGRAGYAEFIETKSWREAADGALREALVNLESIPAPAGEMDVVLGAGWPGVMLHEAVGHGLEGDFNRKKTSAFAGLMGQQVAAKGVTVVDDGTIASRRGSLSIDDEGTPTNRTVLIEDGILVGYMQDRQNARLMNMKPTGNGRRQGYAHVPMPRMTNTYMLAGDRDPAEILASVKNGVFAANFGGGQVDITSGKYVFQCTEAYKIENGKIGAPLKGAMLIGNGPTDLHRIRMIGNDLALDTGIGTCGKNGQGVPVGVGQPSLLMERITVGGTGA

SEQ ID NO: 10387 - protein, 170 aa, BradyrhizobiumColbertium
MARPANGLPALALLASIVLPALPGLAHAQGAVRSVHGDWQIRCDTPPGAQTEQCALIQSVVAEDRSNAGLTVIVLKTADQKSRLMRVVAPLGVLLPSGLGLKLDNQDVGRAGFVRCLPNGCVAEVVLEDKLLGQLRSAKTATFIIFETPEEGIGFPLSLNGLGEGYDKLP

SEQ ID NO: 10388 - protein, 284 aa, BradyrhizobiumColbertium
MRMSMGRVGRQLLGLATIFVAVAGIMLATGGAAFAELGQPAPWEWTLQQSGSPVMDNIIWFHNFLFVLITLITLFVLALLVIVVVKFNARANPVPSRTTHNTLIEVAWTLVPVLILVGISVPSFRLLFLELDVPKADLTIKATGKQWYWSYAYPDNGKFEFDSLMAQDKQPRLLGVDNEMVVPVNKVIRVQTTGADVIHAFAVPAFGVKIDAIPGRLNETWFKATKTGMYYGQCSELCGKDHAFMPIAVRVVSDQEFASWVEAAKKKYASGGTSTYASAAGPTQ

SEQ ID NO: 10389 - protein, 53 aa, BradyrhizobiumColbertium
MGLRVIAVCRCARCHFQILPCVPFGPLEVPPFCRFQSLKPSPDAYCVGPAAEA

SEQ ID NO: 10390 - protein, 541 aa, BradyrhizobiumColbertium
MATSAAAHGDHAQAHGHDEHAHPTGWRRYVYSTNHKDIGTMYLIFAVIAGIIGAAMSIAIRVELMYPGVQIFHEAHTYNVFVTSHGLIMIFFMVMPAMIGGFGNWFVPLMIGAPDMAFPRMNNISFWLLPASFALLLMSTFVEGEPGSNGVGAGWTMYVPLSSSGHPGPAVDFAILALHLAGASSILGAINFITTIFNMRAPGMTLHKMPLFVWSILVTVFLLLLSLPVLAGAITMLLTDRNFGTTFFAPDGGGDPVLFQHLFWFFGHPEVYILILPGFGMISQIVSTFSRKPVFGYLGMAYAMVAIGGIGFVVWAHHMYTVGMSSATQAYFVAATMVIAVPTGVKIFSWVATMWGGSIEFRAPMIWAVGFIFLFTIGGVTGVVLANAGVDRVLQDTYYVVAHFHYVLSLGAVFAIFAGWYYWFPKMSGYMYNETLAKAHFWVTFVGVNMVFFPQHFLGLSGMPRRYIDYPDAFAGWNLVSSIGSYISGFGVLIFLYCVFDAFARKVPAADNPWGAGATTLEWTLTSPPPFHQFEVLPRVQ

SEQ ID NO: 10391 - protein, 314 aa, BradyrhizobiumColbertium
MSVLDQNAIDINPRISEAEVGDYIALLKPRVMSLVIFTALVGMAMAPGHFHPVLAITSLLCIAVGAGASGALNMALEGDIDAKMSRTANRPIPRGRITRPEAMAFGTTLAFFSVMTLGILVNWVAGALLAFTIFFYVVIYTIGLKRWTAQNIVIGGAAGALPPVVAWASVTGTVDVEPLLLFAIIFFWTPPHFWALALFRSDDYARAGIPMLPNVAGPDATRLQILLYTVVLIAVAAAPWALGYFDAVYGIVSLILGAGMLVLAINVYLRRERSQSLRATRKLFAFSILYLFALFATLLAEVVYRALVPMAGGA

SEQ ID NO: 10392 - protein, 58 aa, BradyrhizobiumColbertium
MITAMADKPEPDGIVLTEAQRKSRRQRSIAIALALGVLVVLFFAVTMVKGPAVLVRPM

SEQ ID NO: 10393 - protein, 217 aa, BradyrhizobiumColbertium
MNHEPIISRDVSAKPADRKPAGSRALRRDVVVASICGGVVALMVGASYAAVPFYNWFCRATGFNGTTQVATSAPASGPIARKISVRFDSNVAPGLPWKFEPEQSEIEVNIGQVVTVFYTVTNQAARTTAAQAAYNVAPLTVGSYFQKINCFCFTEQTLAPGEKREMPVVFYVDPSIADDRENDALNTITLSYTFYPVRDPVVKPLASGEGDKRKGNL

SEQ ID NO: 10394 - protein, 298 aa, BradyrhizobiumColbertium
MATAHTKHHDYHLVDPSPWPAVGSLSAFIMAVGAVAWMHHMFSAAPIVFGVGTVGVLYTMASWWGDVMKEAQYKGDHTRVVQLHHRYGMILFIASEVMFFVAWFWAYFNAALFPADAVQATRDAVFGCGLGTQAGACSVPGTWPPKGIETFDPWHLPLLNTLILLTSGTTVTWAHHALLENDRQGLKYGLILTVVLGALFTCVQAYEYSHAAFSFAGNVYGATFFMATGFHGFHVLVGTIFLLVCLFRAYAGHFTPKQHLGFEFAAWYWHFVDVVWLFLFLCIYVWGRGAETMAHAAH

SEQ ID NO: 10395 - protein, 133 aa, BradyrhizobiumColbertium
MNDTAGTSPSETTVLQSAMRGLACKCPRCGQGKLYAGFLTLAPACDRCGLDYAFIDTGDGPAIFIIMLAGAIVVGCALVVEVKYQPPFWLHAALWLPLILATTLLPLRAMKSLLIALQFHHKAAPGRLVDRAK

SEQ ID NO: 10396 - protein, 250 aa, BradyrhizobiumColbertium
MNEAARKGRVAGFALFTLFLTAVCVALGVWQLQRRTAKHELIAALTERLAAAPVALPLPVLWSGLNPARDEFRRVSFTATYAPLPDAMVYSAGSAVRKDASGPGTWAFLPARLPSGETVVIDAGFIENTMQDRDVEDRAVKKLVTGEPVTLTGYLRFPEAPGWLTPGENRAKRLWFVRDHLAMASALGWGAVAPFYVDLEQPAPANGIPRPGPLVVNLKDDHLQYAITWFTLAGAVLIAFAVWARGRRRS

SEQ ID NO: 10397 - protein, 125 aa, BradyrhizobiumColbertium
MSDFDQMGIVVDWVDACRKGDLMTLLGLYADDAQAECTCNGTQRYSGRSELEAYWQPRLSTFSAAGFGLEEIHPAPDGVDLEYSVAGALRIHVSFRFSPEGKIRSTLCEPALQNVRDGCWCRLAS

SEQ ID NO: 10398 - protein, 444 aa, BradyrhizobiumColbertium
MWQRLSFRTQLFLPLGASFLAVLILGGVLLQIFATGQLAEEREPGRRSIQAIATALNNTLRASDNPRQTLDAFVHSLDTSSDIQFRALGAGPTPSPKDDSRKSHGVPQWFIRLLAIPEIDAASPVMIDGQRVGDIVFLSDMSADLFEKWIGFLAFTGLVAVLMALTGTIAYVLSGSALRPMQDLGEGLTRIRQGDYTRPIPVRGPPEIRQGCEEANALAATLAQLSRDNRDLMHRLVSLQDDERRDLARELHDELGPLLFSIRAGTIALVEASPPVGNLGNPAQDLLQSVEALQQTNRRILDRLRPLYIEELGLSTSVQTLLRNFRKQAPHIVLTDTIDPDLNVIEGPSAQTVYRVTQEALTNVLRHAKAGSAHVQAIVTGETVVIEISDDGAGFPAGNVFGRGLTGMQERVRALSGSLSLLRMNERTYVRCRLPAKASRDPAS

SEQ ID NO: 10399 - protein, 214 aa, BradyrhizobiumColbertium
MQDTAKLATRVLIVDDHPVVLSGCRTLFASDQSIRIDEATDAKSGHRAYVSKRPDVTVIDISLPDVSGFELMRRIRKDDPAAKIIMFSMNDDPAFVVRAVELGAQGYVSKGDDPRLLLKAVRKVVAGDNFISPQLAEAVTFSGAAIKANPASQMTPRELEILRLLGRGDKIVEVAEALGISYKTVANTTSLLKQKLGAKNHSDLIRIAVEIGMN

SEQ ID NO: 10400 - protein, 472 aa, BradyrhizobiumColbertium
MTRYISTRGEAPELGFCDVMLTGLARDGGLYVPTTWPQLPTETIAAFFGRPYWEVAVDVIRPFAGGEITDVELGRMANEAYATFRHPAVVPLRQMSPHQFVLELFHGPTLAFKDVAMQLISRLMDHVLAKRGQRTTIVVATSGDTGGAAVEAFAGLENVDLIVLFPHGRISEVQRRMMTTTGAANVHALAVEGNFDDCQALVKAMFNNHRFRDATSLSGVNSINWARIVAQVVYYFTSAVAVGAPARAVDFVVPTGNFGDIFAGYVAKRMGLPVRTLRIAANVNDILARTLKTGIYEVREVHATASPSMDIQISSNFERLLFEAGRRDAAGVRRLMESLKQSGRFVLPDATLAAIREEFDAGRADETETAAAIRAAWREAGELVDPHTAVALAVADRDTTDTRVPSIVLSTAHPAKFPDAVEAACGQRPQLPAWLDGLMTKSEHMRVMKNDQAEIERFVLSVSRAAKQGVAG

SEQ ID NO: 10401 - protein, 429 aa, BradyrhizobiumColbertium
MSVEISKLASGLTVVTDEMPHLETAALGVWAGVGGRDEKPNEHGISHLLEHMAFKGTTKRSSREIVEEIEAVGGDLNAGTSTETTSYYARVLKADVPLALDVLADILANPAFEPDELEREKNVIVQEIGAAQDTPDDVVFEHLNELCYPDQPMGRSLLGTAKTLRAFNRDMLQGYLSTHYRGPDMVVAAAGAVDHKEVVAEVEKRFASFEGTPGPKPQTAQFGKGGTKVVHRELEQAHLTLALEGVPQTDPSLFSLQVFTNILGGGMSSRLFQEVREKRALCYSIYSFHAPYTDTGFFGLYTGTDPADAPEMMEVVVDIMNDSVETLTEAEIARAKAQMKAGLLMALESCSSRAEQLARHVLAYGRPQTAQELVTRIDAVSIESTRDAARALLSRSRPAVVALGSGRGLDTAVSFAEGLTRARAKARLH

SEQ ID NO: 10402 - protein, 195 aa, BradyrhizobiumColbertium
MALFRLPSSGPAALAPRGNGLLLRAPQMSDFLQWAHLRETSRDYLTPWEPIWPSDDLTRSGFRRRLRRYSEDIAADRSYPFLVFRELDGALVGGITLANVRRGIVQAGTIGYWVGQPYAHRGYMTSALRVLLPTLFGELNLHRVEAACIPTNAPSIRVLEKCGFSREGLARRYLCINGVWQDHLLFGLLHEDFRG

SEQ ID NO: 10403 - protein, 217 aa, BradyrhizobiumColbertium
MVKELRSSRNASRRGTAVALMLSAALASVSPAAAQSLTDRFKSLFGGKSDESAQPTPAPAPGQPAEEDDLDCPQVTVRSGASTYAVGASGKQAVGNDIRFQATITKMARECARNGGDITARIGIQGRVIAGPAGAPATVEVPLRVAVVQGGIGEKVIASKAYRTTVSMSEGGSVPFTFVAEDLAYPMPSPAVADNYIFYVGFDPQALSPEPKGRKKK

SEQ ID NO: 10404 - protein, 161 aa, BradyrhizobiumColbertium
MFFTPEFWVAVAFVILMVIFGYVGVFKTAMSALDHRAARIKAELDEAARLKQEAAKVLADYKARTASAEREAADIIANANAEAERIAAEAKAKMEDFVARRTKTAEGKIALAEAQALADVRAAAAEAAVQAASAILSQSVRGQVADDLLAKGINEVRQKLN

SEQ ID NO: 10405 - protein, 186 aa, BradyrhizobiumColbertium
MAESHGGATGTGAHTEADGGHHGGGFPPFESSTFASQLVSLAIAFVALYLIVSRLALPRVGGAIEARQNKIEGDLAEAQKLKDQSEAALKAYEGELAAARARAQAIGNESREKANAQADAERKTLEQQLAAKLAEAEKTIASTRATAMSNVRGIAADAAGTIVQQLTGVVPDAASVNAAVDASLKG

SEQ ID NO: 10406 - protein, 76 aa, BradyrhizobiumColbertium
MDPQAAKFLGAGIACIGMGGAGIGVAFIFGNYLSAAMRNPAAAQGQFGNLIFGFAVTEALGIFSLLIALLLLFVPL

SEQ ID NO: 10407 - protein, 274 aa, BradyrhizobiumColbertium
MPLAGTAGRPTLIGRLVRQTRDAARMKIDPIHQFNVEPLFTIGRIGDHTIAFTNASLYMFVAVGIIALLLLTSGKQLVPGRLQSVSELSYEFVASMIRSTAGADGMRFFPLIFSLFMFICVSNLVGIVPYTFTVTSHLIVTAALALLVFFTVLIYGLYKNGLKFLKVFVPSGVPGYILPLVMAIEVLSFFLRPVSHSVRLFANMLAGHIALKVFAGFVAMLGASLGVVGWIGGVMPLALAVALTALELLVAFLQAYVFAILTCIYLNDAIHPGH

SEQ ID NO: 10408 - protein, 65 aa, BradyrhizobiumColbertium
MALGFRLSSELIAGVAVGAGIGWGFDHLLSTSPFGFIVFLLLGFAAGVVNVVRTAGAGQNRRGGS

SEQ ID NO: 10409 - protein, 171 aa, BradyrhizobiumColbertium
MRPATSSTTSWLAVVAAVFVVSGSPVAAQSAPDGENGRYSMTPIPEGVLRLDTRTGTVATCTRSGAGWACYAVPDERTALDAEIGRLQAEVERLKGQLAAGPTVSGKIDEALPKSDPLKKAEPKVAEGERKIEIPLPSDQDVDRVMSFLERAWRRLIDMANRVQKDVSGKI

SEQ ID NO: 10410 - protein, 157 aa, BradyrhizobiumColbertium
MTSAKSVTRSAASSVQASTIASSLLTVQTPGRGFSDLTGEAAKFVAEVHAGEGALTLFVRHTSASLTIQENADPSVLVDLTTVLSRLAPEDGGWTHDAEGPDDMPAHIKAMLTQTSLHVPVLNGRLALGTWQAIYLIEHRSRPHRREIVLQFIGSLQ

SEQ ID NO: 10411 - protein, 541 aa, BradyrhizobiumColbertium
MTKDERFVILASSLGTVFEWYDFYLYGSLAGIIGAQFFSDYPPATRDIFALLAFAAGFLVRPFGAIVFGRVGDIVGRKYTFLVTILIMGLSTFIVGLLPNAATIGIAAPIILIVLRLAQGLALGGEYGGAATYVAEHAPNGKRGYYTSFIQTTATLGLFLSLLVILFTRTATGEAEFAKWGWRIPFLVSVVLLGISVWIRLRLNESPIFQKMKEEGKGSKAPLTEAFGNWQNGKLVLLALLGGVMGQGVVWYTGQFYALFFLQSILKVDGYTANLLVAWSLLLGTGFFIVFGMLSDKIGRKPIILGGCLIAALTFFPIFKMITTNANPALEKAIEQVKVEVVADQAGCGDLFNPVGTRVFTAPCDTARAFLSQSSVKYSTTPAPAGSGVKVMVNGKEVPYTSAKDSNPAVLAAVQAAGYPKAGDAGIVKMSHPFDVFRPQVAAVVGLLFVLVLFVTMVYGPIAAMLVELFPTRIRYTSMSLPYHIGNGWFGGLLPATAFAIVASTGDIYAGLWYPIIFASITVVIGFLFLPETKDVDIKAN

SEQ ID NO: 10412 - protein, 226 aa, BradyrhizobiumColbertium
MNAPSTHLVIADDHPLFRDALRQAVAGVLASARIDEAGSFEDLTKLLEQTSDVDLILLDLSMPGISGFSGLIYLRAQYPAIPVVIVSASDDSATIRRSLDFGASGFIPKRFGVETLRDAILKVMEGDVWVPADTDLSAAADPEMTRLRDRLVTLTPQQVRVLMMLSEGLLNKQIAYELGVSEATIKAHVSAILQKLGVESRTQAVIAAAKIAGGQWKQGSADGMSR

SEQ ID NO: 10413 - protein, 946 aa, BradyrhizobiumColbertium
MTEPAGTTTGTLSFGPFSVRPHERLVMRDGVAVPLGAKAFDTLLALMSRPNEVVSKWELMAIVWPGITVEESNLRFHVAALRKALGDGKDGARYIATLSGRGYCFVAPISQAQLPAARRSAPRAELPPVKLPNRLQRMVGRDEALAAISEKLLTARFVTVAGPGGVGKTAVAVALAHDLLTTFSDAAHFVDLAALSDPHLVITSILLMLGLPAEAEDPLPALLAHLRDKRMLLILDNCEHVIAAAAPLAAEIFHAAPNVHILATSREALRVEGEQVYRLAPLAVPPDGAGVTIAAAQVYPALQLFLERAAASGAQITLDDANAVIIAGICRKLDGMALAIELAAGRVEAYGLEQTAALLDERLNLLWQGQRTAPPRQKTLQATLDWSYRLLSDLERLVLRRLAVFAGHFTIDAALEVVPDERVDRTRLFDAVDSLVAKSMVAPRPIGAMMRYRLLDTTRAYLLEIEPADAALAARHATFYRRWLEQAGTTWAAVPSADERAAHFSALHNVRAALEWCFGAEGDFDIGIALAAAAAPIFLAMSLLIECRRWSERALLAIAPSSRGSAEEMHIQAALGLTLMFTRGGSEAARSALNRSLAIAAARGDAPNQLQLLGRMHIFHERIGRFEAALGYAQQSLAVARSLGDAGSIALSRSLMGVSLHLAGEHRDALKMLEVAWQGPGTERISTVHGFDHRNRAGITLARELWLQGRPAEALQLAQQTIAEAAQMEHPITLCIALIWAVSISLWGGDLDAAEESIDLFIAHARSRSMGPYLVVGRGVKGELAIRRGNAAHGIQTINACLRELHGAGYELLTTTFNIALVQGLVALGQFEQGAILIDDAIRLVKQSGDHLYMPELLRMKGMTLLSLPRPGGEQAEDQLMQSLALSRRKGATAWELRTAIDLARLFAERGQREEAKRLLQSSLKGFADGSETADIRAANGLLTTL

SEQ ID NO: 10414 - protein, 109 aa, BradyrhizobiumColbertium
MDVKLSPPGGAGIGTNPEQLFAAGWSACFEGAMEIAARKRKIELPRKCAVDAEIDLMLDEGAYSLRALLNVSLPGLDREIASGIVDDAHRTCPYSKAVRGNVDVTIALI

SEQ ID NO: 10415 - protein, 343 aa, BradyrhizobiumColbertium
MKQTINQQRRSFLGIAAGTVAAGLGVIEFARAETEARSSSASNASFSTIKQVDAGVLNVGYAEVGPSNGPVAILLHGWPYDIHAFVDVAPILAKAGYRVIIPYLRGYGTTRFLSGETPRNGEPAAMAADIIAVMDKLDIKKAVVAGFDWGARTADIIAALWPERCRALVSVSGYLISSQAAGNAPLPPSAELQWWYQFYFATERGRAGYEKYTHDFAKLIWRLASPQWKFDDATFARSAAALDNKDHVAITIHNYRWRLGLAQGEAKYEHLEKKLAGAPVIDVPTITMEGDANGAPHPDPSAYAKKFSGRYEFRLITGGIGHNLPQEAPQAFAKAVIDVDGAW

SEQ ID NO: 10416 - protein, 186 aa, BradyrhizobiumColbertium
MTSFETENKKRSYATAITLAVLLLVIVLTCVPCLVSIALAAEPAQNAAEASPIFGVTIPSDYRQWELIAPAEEAAPLDELRAVVGNQTALEAYQAGKLPFPDGTILVKRAWKRKKSPEFASATIPGAATTVQVMVKDSKTYAATGGWGFGRFVDGKPVDEAQHRTCFACHEARAKGRDYVFTRLAP

SEQ ID NO: 10417 - protein, 1167 aa, BradyrhizobiumColbertium
MLHDWGVIAVAFGYIGFLFLVASHGDRRSPARRASGLIYPLSLAIYCTSWTFFGSVGFATRTSTDFLAIYVGPILMIGLGAGVLRRMIQLAKAHNITSIADFIGARYGKSQAVAATVAGIAIIGSVPYIALQLKAVASSLETILTEDQAFSHIPLVGDVALMVTLAMAAFAVLFGTRQTDATEHQHGLMLAVATESIIKLVAFLAAGIFVTFWMFSPHELIERAMKTPEAVRTINYSPSIGNFLTMTLLSLCAIMLLPRQFHVSVVENSSDAEVGRARWLFPLYLVAINLFVIPIAIAGLVTFPFGAADPDMYVLALPMEGGADLLSVVIFVGGLSAATAMVIVECVALSIMVSNDLVVPLVLQRRPEGRAGGADFSDFLLRSRRLAIFAIMVMAYFYYRALGSTQLAAIGLLSFAAIAQLAPSFFGGLLWRRATARGAIGGMLVGFAVWLYTLFMPSFMDSSTSGIMLLQHGPFGIEALRPQALFGADLPPLMHGVIWSLSLNILTYVLLSLARQPSSIELLQADLFVPNTLAPISPSFRRWRTSVTVQDIQTTVAQYLGPERARHSFEAFSARRNVRLEPGAPADFELLQHAEHLIASSIGAASSRLVMSLLLRKRTVSAKAALKLLDDSHAALHFNREILQTALNHVRQGIAVFDADLQLICSNRQFGDLLNVPPHLIQFGTPLREILEFIGVGDPEDPFERDAALERRLAAYTTDSEPYLERLPERHMVIEVLTNHMPGGGFVITFTDVTPSFEAAEALERANATLEKRVRDRTEELTRLNSELALAKSAAEDASISKTRFLAAASHDILQPLNAARLYVTSLVERQHNGEETRLVENIDESLQAIEEILGALLDISRLDAGAMTTSISSFKMADLMRSLEIEFAPIARAKGLELTFVPCSLPVESDRLLLRRLLQNLISNAIKYTPRGRVLVGCRRRGAALKICVYDTGVGIPPVKRGEIFKEFHRLEQGARIARGLGLGLSIVERLARVLNHGIAIDANASGGSVFLVTVPTAKAITHTAAVTSATPLARTPISGALIVCIENDAAILDGMRTLLMAWDAEVIAVADPEGAIAAIEAAGKRVTGLLVDYHLDRGNGIAAIREIRRRFGDGIPAILITADRSPAVQVAAREERVAVLNKPVKPASLRALLGQWRTQQMVAAE

SEQ ID NO: 10418 - protein, 419 aa, BradyrhizobiumColbertium
MGQVPLQVSPMDYNQFFDSALDRLHTERRYRVFADLERTAGRFPHAVWHSPRGKRDVVIWCSNDYLGMGQHPKVVGAMVETATRVGTGAGGTRNIAGTHHPLVQLEAELADLHGKEAALLFTSGYVSNQTGIPTIAKLIPNCLILSDELNHNSMIEGIRQSGCERVVFRHNDLAHLEELLKAAGPDRPKLIVCESLYSMDGDVAPLAKICDLAEKYGAMTYVDEVHAVGMYGPRGGGIAERDGVMHRIDILEGTLAKAFGCLGGYIAANGQIIDAVRSYAPGFIFTTALPPAVCSAATAAIRHLKTSSWERERHQDRAARVKAILNAAGLPVMSSDTHIVPLFVGDPEKCKQASDLLLEEHGIYIQPINYPTVAKGTERLRITPSPYHDDGLIDQLAEALLQVWDRLGLPLRAKSLAAE

SEQ ID NO: 10419 - protein, 84 aa, BradyrhizobiumColbertium
MRQHTFEARRAGILIAADGAGLLIWINRLALLQPRTGFLRGGQGCRGHFVYGALAVHDWRTGHTDAAAPAGSASAAHSRERTPR

SEQ ID NO: 10420 - protein, 139 aa, BradyrhizobiumColbertium
MILNGPNLNMLGIREPHIYGTTTLTEVNTSCEQAAAMLGLKLAFHQSNHEGVLVDLIQSARQDADAIVINPAGLSFTSVSIMDAIKTFEGPVLEVHISNIHARDEYHRHSKISFVATGVICGLGPFGYIAALHAIANMK

SEQ ID NO: 10421 - protein, 51 aa, BradyrhizobiumColbertium
MSPISLANAAAAGDLGYVVLDADLGGQDSGELLQQIRSLEGTVGARLVFEH

SEQ ID NO: 10422 - protein, 122 aa, BradyrhizobiumColbertium
MAARPESAVTPAQAGLLFILGKQDGVLMGEAGAALDLGPGGISGLVDRTAAAKLIERRADREDGRAWRIWLTPKGRAALAQAKAGAAEVNAALTEGFTAAEIDIVARWLTSIPHKFPRGADE

SEQ ID NO: 10423 - protein, 256 aa, BradyrhizobiumColbertium
MTEHVRIDNSGGILTLTLARPDKKNALTDAMYGKLGDAIESAEFDPSARVILIRGEGDMFTAGNDVGEFAAVAAGKSEGSRNVVRFIQSLARCTRPLVAAVQGRAVGVGTTMLLHCDLVVLADNAQLSTPFVNLALVPEAASSLLMPARIGHARAYEMFALGETVPAKSALEWGLANRVVPLERLDAEALALAQRLARQPAGALTATKRLMRNGEALVAQMQAEGEQFAQRLRTAEAREAFTAFAERRPPDFTKVA

SEQ ID NO: 10424 - protein, 81 aa, BradyrhizobiumColbertium
MTAIAAAVEQQRAATTEISRNFQQAAQGTREVTDTIGSVARLNQETGNAGTVLSESVKKMSADADRLRVAVEGFLGAVKTA

SEQ ID NO: 10425 - protein, 312 aa, BradyrhizobiumColbertium
MPVTPHKAPRPYRGVFPVAPTIFDERGELDLEGQRRCIDFMIDAGSHGVCILANFSEQFVLTDAEREAVMHAVLEHVAGRVPVIVTTTHFSSAVCAARSKQAEAAGAAMVMVMPPYHGATFRVPEKGIIEFFKVLSGAIDIPIMIQDAPVAGTPLSVELLARLARDFSNIRYFKIEVAGAAAKLRSLIEAGGKDIEGPWDGEEAITLLADLDAGATGAMTGGGYADGIRQIVDPYFAGDREKAKAAYERWLPLINYENRQCGLIACKVMMQAGGIIKSDAVRHPLQPLHPAMRAGLLELAKERDALALRWGK

SEQ ID NO: 10426 - protein, 232 aa, BradyrhizobiumColbertium
MTGLPRYAIYFAAGRNSALSRFGAELLGYDACTGNELAFPADALQLAADWSDVTADPRKYGFHATLKAPMVLASGKTEVELMAACAAFAGRSRPRPVIRPIVDSISGFIAVIPAEPVDALQQLAADCVRDFDPFRAALTAEDRARRRPEKLSQRQRDYLDRWGYPYVMEEFRFHMTLTGRLDVERRGPILEMLRGRFAGLKLESLMIDRIALFRQDDAKARFRVIGEWLLAE

SEQ ID NO: 10427 - protein, 397 aa, BradyrhizobiumColbertium
MTDIVLESGRALIGTEFVETSLLVSGTDIAQVDASRGRARLALDARDLLVLPGIVDLHGDAFERQMMPRAGVNFPIDVALADSDRQAISNGITTVFHATTCSWEPGLRSADNARGLLEAIERQRPQFAADTRFHLRHETYNLDAEAEISQWLADGRVDLFAFNDHMDGTVADMAKPRKRNRMVERTCLSIDEFDRLVERVVSRADAVPASVSRLAAVARAAGVRMLSHDDATPAMRRHFRELGAHIAEFPINEETARAAADAGDAIVYGAPNVVRGGSHTGWTRASDMIAKGLCSVLASDYYYPAQLLAAFRLAADGVLPLAKAWDLVSAGPARATGLADRGMLAEGCRADILLVDGSMALRPRLIAVISGGKLVHLSDATRLLTAAAAPRQAIVAA

SEQ ID NO: 10428 - protein, 222 aa, BradyrhizobiumColbertium
MAKILSVQPTIDPSAVLHETRLGAYTEVGARTILHEVAMGDYSYVVNDSQITYTTVGKFCSIAAMTRINPGNHPMHRATQAHFTYRSSAYFEGESDDAEFFEWRRQHHIHIGHDVWIGHGAVVLPGRNIGTGAVIAAGAIVTKDVPAYTIVAGNPARIVRRRFSEEIAGRLARLAWWDWDHDKLRRALPDFRKLGIEDFLATYEAQASPLTNSPAGKRSAIA

SEQ ID NO: 10429 - protein, 269 aa, BradyrhizobiumColbertium
MLVVDGLTCRFGTKAAVDDTSFQVSPGGFVGVIGRSGAGKSTLLRSINRLVTPTEGRILFDGVDVTALRGKELRQWRARSAMIFQQFNLVGRLDVLTNVLMGRLATMPAWRSLSQIWPEQDKALAMSALEQFDIASLAAQRADQLSGGQQQRVAIARALVQQPDIILADEPIASLDPRNTKVVMDALLRINKHFGITVLCNLHSLDLARSYCDRLIGMAAGRVVFDGAPSMLTDQVARELYDLEANEVMGGAPAAAPEGVPALGSAAAA

SEQ ID NO: 10430 - protein, 309 aa, BradyrhizobiumColbertium
MITRRLVLAGAAALAFTTSASAEDWRKKYPEITLAVVPAENASGVTERFTPFINYLSKELGTKVTLRVTNDYAAVIEGQRAGNIHIGYYGPAAFARARLTGVKTDAFAIEVNADGSKGYYSVFYVLAKSPYQKIEDLKGKNLGLVDPNSTSGNNMPRFKLNQMGVDPEAYFSKVVFTGSHENAVLALAQGTVDVAANWWNAEDDSNLTRMLNKGMVKNADGAPMKKEDFRVIVKSDMIINSPVAYLSDLPDDMKTAIKKAFLDAAQKDPEAFKKLSDGKNKPWDPVTNEEYNKTIELIKFVDHLRKKAS

SEQ ID NO: 10431 - protein, 294 aa, BradyrhizobiumColbertium
MTIAVSILPEQQLTVLNAVYRKAVARKRLRLLLGTVLFIAALLVAAVGAEVNLRTLFTHFGNFVSYFDRILTLDTGQRVWTDLGEWFWGWRKWLKLLAETLLVSYVGTLIGAILAFGLNFFAAANTAPARWLLFVVRRLLEFARTVPSIVFALIFVIAFGLGPMAGVLAIAIHSTGALGKLFSEIVENADMRPVEGVRSTGASWLSCMRFAVLPQVIAGYASYALLRFEINVREASVMGFVGAGGIGQELIVAIRKFYYSDVSAILLTIIVTVFLIDIGTGWLRGRLFGSEART

SEQ ID NO: 10432 - protein, 282 aa, BradyrhizobiumColbertium
MSRHPEVDTVQLRARHPNVFNRPASARLATPAMLAAALALLVFGLVDLDFSPSRFVAGVNQLGWITMMMIPPDPGSSLPLYLKALGETLSIALLGTTLAALFALPVSLLAARNIVPSGFFRFPVRRFLDSIRGVDTLIWALVWINVVGLGPFAGVLAIAVSDFGAFGKLFSEAIEAADQKEVEGIRASGGSALHEIRFGLMPQVLPVIAGQVLYYIESNTRSATIIGIVGAGGIGLQLAEQIRVLEWQKVSFLILMILIAVAAIDFISGKLRFAIIGRRPVV

SEQ ID NO: 10433 - protein, 242 aa, BradyrhizobiumColbertium
MSMQDTASSGVALWRLVADGIERGIADGRFAAGDKLPGEVEIAEAYRVNRHTVRRALAALAERGLVRAERGSGTYVEAQKLAYPLRSRTRFSEIVGAGGREPHGRLIEASDDIATRELARELGLKTGAPLVRIEAIRLADRTPICVSTTWLSAELFPDAGAVFAATHSMTKLLAHYGVRDYRRGATRITAGIVDATDAVRLDLALGRPILVVDATDHDLAGKALLTKHSRFAAERVEFLVES

SEQ ID NO: 10434 - protein, 154 aa, BradyrhizobiumColbertium
MEQVTQHNNQQAQRRAAMAVLAHAEAGEIAARLRNLALPAHQDLRAPENGLVMLRGRVGGDGAPFNLGEATVSRAAVRLATGEIGFGYTLGRDGEKARLIALCDALVQSREFGSALERDVIAPLRDQLMIKRQRAAEETAATKVDFYTMVRGEG

SEQ ID NO: 10435 - protein, 207 aa, BradyrhizobiumColbertium
MRGEIMTTIAELPPGFVDKVLSAQSTFRSVMDAMARPGSVRRIVPGAGTPGPMMRGTAAIALTLFDHDTPLWLDARMAESSDVVKWLKFHTGAPVVQDTSIAGFALIGDGAALPSLERFALGTSEYPDRSTTVILQVDSLDAGRGFELRGPGIDGVATLKASITPYDLFERLHVNEALFPRGIDVVLVADDAVVAIPRTTRVVSKES

SEQ ID NO: 10436 - protein, 367 aa, BradyrhizobiumColbertium
MYVAVKGGERAIENAHRLLAHKRRGDQGVPEVTLAQISEQLGLAVDRVMSEGSLYDRELAALAIKQARGDLIEAIFLVRAFRATMPRFGSSEPVDTGTMRVRRRVSATFKDIPGGQILGPTFDYTHRLLDPLLAEGLAPEAPATADAHTAPTPRVTDILGRDGLIECSPPADDGASVGDLTREPLNFPADRDLRLQNLARGDEGFLLAMGYSTQRGYGRNHPFVGEIRFGEVEVELFAEDAGFAVPLGSIELTECQMVNQFKGSATEAPCFTRGYGLAFGQSERKTMSMALVDRALRARELGEEVRAPAQDEEFVMSHSDNVQATGFVEHLKLPHYVDFQSELGLLRKLRQEFADASTPDAMKEAAE

SEQ ID NO: 10437 - protein, 294 aa, BradyrhizobiumColbertium
MNAPAYNFAYLDEQTKRMIRRAILKAIAIPGYQVPFASREMPMPYGWGTGGVQVTAAILGPEDVLKVIDQGSDDTTNAISIRKFFAKTAGVATTTATNEATVIQTRHRIPETALHENQVLVYQVPIPEPLRFLEPRETETRRMHALAEYGLMHVKLYEDIARFGHIATAYAYPVKVNARYVMDPSPTPKFDNPKMDNCPALQLFGAGREKRIYAIPPYTQVVSLDFEDHPFEPYRFNAPCALCGAENSYLDEIVTDDKGGRMFVCSDTDYCEGRQATGHHGSLSAAPYKEKAHG

SEQ ID NO: 10438 - protein, 265 aa, BradyrhizobiumColbertium
MVDQAALESDQPLLTAKSLGKSFGRIAACRDVSFALYPGEVLAIVGESGSGKSTLLQMLSGQLAPSAGHVSYRMRDGVTRDLTTLGEAERRFLFRTDWGFVHQDPAQGLRMAVSAGANVGERLMAVGWNHYGRIRDTASDWLSRVEIDVARIDDAPRTYSGGMRQRLQIARNLVTEPRLVFMDEPTGGLDVSVQARLLDLVRSLVAELHLAVIIVTHDLAVARLLSHRVMVMKGGRVIETGLTDQVLDDPREPYTQLLVSSILPP

SEQ ID NO: 10439 - protein, 232 aa, BradyrhizobiumColbertium
MTAMIDVANAQKTFTMHLQGGIELPVVRGVTFHVNPGECVVLSGPSGAGKSSILKMIFGNYRCDSGRIGIRHRGVVIDLATAEPRQILNVRRATIGYVSQFLRAVPRVATIDVVAEPLIAGGMTRAEAQQRAGALLQRLNIPERLWQLPPATFSGGEQQRVNIARGFISDLPILLLDEPTASLDAANRAVVVELVAAKKRQGVAMVAIVHDDEIRHLIADRIVDVTSFAAAA

SEQ ID NO: 10440 - protein, 385 aa, BradyrhizobiumColbertium
MNAKPKEAVIGNARIVLGDGVIEQGWLALADGRIAEIGEGRAPVGAEDAGGDLIMPGLVELHTDHLEAHYVPRPKVFWNPVAAVVSYDGQLATSGITTVFDSLRVWREDGAEEVDGRAGVLAAAITTAREASLLRADHFLHLRCEIPMPSVVEEAKELIDRPDVKLMSLMDHTPGQRQFRDEVKLRDYYRGKGGGKTDAELDELFAKRFEYQKQYAAANMRQIVALAHKYNIPLASHDDTTEENVADAVRDRVSVAEFPTTLEAARGLHQAGIDILMGAPNVVRGGSHSGNIAAVDLAREGLLDILSSDYIPSSLLMAALQLPEHVPAISLPAAVRTVTKAPAEAVGLTDRGEVAIGKRADLIRVHVAGHIPVVRSVWREGSRVA

SEQ ID NO: 10441 - protein, 198 aa, BradyrhizobiumColbertium
MSEMVATARDEAGAIGPGRLVLVVGPSGAGKDTLLRLAQAACIDDPDIVFPRRVVTRESSDAEDNIAVSPDEFRRAREQGDFAVYWDAHGHSYALPLDINDDIRAGRTVVVNVSRTVIAALRRAYVNVVVVAITAPPDVLVQRLAARARQSDGNIVERLSRSVGDVPAQADVTILNSGSADYHSRQLVRAIRNECWQE

SEQ ID NO: 10442 - protein, 203 aa, BradyrhizobiumColbertium
MTVIETVEQLEEIYGPTNDASTVKVADHVTPLYRIFIEKAPFAALATIGPEGIDCSPRGDLPGFVRIHDPRTLMLPDRRGNNRVDSLRNIVRDPRVSLMFLIPGSGNAVRANGRAYLSIDPELLASFKVEGKAPRSVMVMNVEEIYFQCARAIVRSDLWNPDKRVDPKMLPTPGQILAEMSENKVGGAEYDRIWPERAAATMW

SEQ ID NO: 10443 - protein, 243 aa, BradyrhizobiumColbertium
MSGTLKGRTALVTGGSRGIGAAVCRAFAEAGAAVAINCRERIEEAGQLAREIGKQRGRAIVVTADVSQREQVAAMVEDVTAELGPIDILINNAGIAIPRGIDDLTEEDFDRTILVNLKSAFLCTQAVLPSMRARKWGRIVNISSGAARGAGSIGPHYNASKAGMEGLTRGYAARLVKESITVNAVAPSLIETDMMRDQPQLVSRIPLGRFGTPEEVAKAVMLLVDNAYMTGQTVALSGGMAFN

SEQ ID NO: 10444 - protein, 167 aa, BradyrhizobiumColbertium
MPRQEVVRKARRDKRVGKSASTQAGEFVKDQIDRIRKGKHGARSTKQAIAIGLSEARRAGVDLPPPRKGRTKKSTRRSAKYAYEVGQGKRTPKRRPKVSRAVANVLKKEPRSTASRSALSKQGKRAASRRTAASRSAAARKASRTKGARSRSAAAKKAARTRARRRG

SEQ ID NO: 10445 - protein, 260 aa, BradyrhizobiumColbertium
MKLSVNGTEVFAATGGRDFDKSLPAVVFIHGAGFDRSTWALHTRWFAHHGFGVLAPDLPGHGRSAGPSLGSIAEMADWTAALLDAAGASKAHLIGHSMGSLISLETAARHPEKVSALSLIGTAATMTVGPDLLKEAEANSQDANDMVSIWGLGFRAELGGSLAPGLWMHGSAQAVLKACEPGVLFRDLSACNSYTNALQAAASVKVPTTLILGERDMMTPAKAGKALAAAIPHAKTVIVPGAGHMIMAERPDELLAALRS

SEQ ID NO: 10446 - protein, 431 aa, BradyrhizobiumColbertium
MPAPKPPAFETLSLHAGQHPDPVTGARAVPIYQTTSYVFQDSDHAAALFNLERAGHIYTRISNPTTGVLEERIAALEGGVGAICTASGMAALHLAIATLLNAGDHIVASSSLYGGTINLLAHTLPRFGITTTFVKPRDLDAFRAAIKPNTKLVIGETIGNPGLEVLDIPKVAAIAHEAKIPLLIDNTFATPYLSRPIELGADIVMHSATKWIGGHGIAIGGAIVDGGRFDWRASGKFGVLTEPYGGYHGIVFDEQFGTAAFIMRARTEGLRDFGACLSPTNAFQLLQGIETLPVRMDRHMQNTHLVLEALKSNKAVDWVLHPSLETHTDYQLAKQLLPRGAGSIISFGIKGGRPAGRKFIESLRMVSHLANVGDAKTLVIHPASTTHQQMDAEQLKAAGIGEELVRLSVGIETASDIIDDLAQALRISQKV

SEQ ID NO: 10447 - protein, 267 aa, BradyrhizobiumColbertium
MDKANPRRPARNSASEPRSGAQAIRRALAVLRILAAGREAGVPLAEVVQATGLTRPTVHRIVHVLIEEGIVERNERSGHYAIGNQVPELALARPRPSRLLIAANPSLQRASSEIGDTLFLTVRTGNDTLCVDRRIGIYPIQVLSIEVGARRPLGVSSAGVAILAAMPAQDARRIVAANEKRFEAYKTDIATVLGEVTAARRLGYGRREIGLVQGTKSISTWIKTPDGRPAAAMTVSAVRTRLGPRREQEVAEVLLREARIIEQAIGG

SEQ ID NO: 10448 - protein, 321 aa, BradyrhizobiumColbertium
MRLIWIAIAAVTAMLAGPASGQEWPARNVKLIVPYPAGGNVDSAARIVADKLQEKLGQPFVIENKAGAGGMIAGEAFAKSAPDGYTLFVGANGPVLFATEINKRDAYNWKKDFLPISTISMTPLVLEVHPSVQATTLKEFLDLAKREPGKLTMASPGPGTTNHLLSELMQSNLGLQWVTAHYRGNAPAINDLLGGQVQFAFDQLTVSLQHIKAGLFRALAVTSPHRLKSLPDVPTFAELGYKEFDGQTFTGLFAPAGTPAPIVDKLHETLVAILKDPAVIDKFEKLGGEATPMTPAEFKAYLEREDAKWIPVVRKANIRAD

SEQ ID NO: 10449 - protein, 205 aa, BradyrhizobiumColbertium
MRIDPTELGAERIYRLMTGIVVPRPIAWVTSLSSKGVLNLAPFSAFTFVSQKPPMLAISVGRKGANYKDTGHNILDTEEYVIHIADTPLMNAVHDSSVEHPPEISEVEHLGLETLPCDLVKVRRLAAAPIAMECRFRQCLEFGEAKSRLIVGEVVMFHLRDGLVNDGKVETKALDPIARIGGPRYARLGEIVTLNTVFQTPKSKD

SEQ ID NO: 10450 - protein, 286 aa, BradyrhizobiumColbertium
MRLLSYLLDGEPRYGAAVEGGVVDLTKRIGRDFCDLKALIAANALGDAQEAVAGQKPDYALDKLVLLPPVLAPEKLWCIGVNYAERNAEYKDNSDLPKYPSLFVRSMSSMTGSGQPLEKPKVSDQLDYEGELVIVIGQGGRHIPREKAWSHIFGMTLCNEGTIRDWLRHGKFNVTQGKNFDRSGSIGPWIVTADELDPRGPHDIVTRVNGEVRQQDTTERLMFPFDLLISYLSTFATLKPGDMIVTGTPTGAGARFDPPRWLKAGDVVEVESSRIGVLRNTVAAEQ

SEQ ID NO: 10451 - protein, 267 aa, BradyrhizobiumColbertium
MLDAATIERLAARLDEAERTKTLIPMFSKEYPDFSIEDAYAVQRAWTKLQLGRGRIIKGHKIGLTSKAMQNAVGISEPDYGVLFADMFYADATPVPFDRFHAPRIEVELAFVLKAPLRGPDCTIFDVLNATDYVTPALEILETRMHRVDPETGKTRKVMDTISDNAANAALVLGGRPIRPMDADLRWIGALLFRNGEVEETGLAAGVLNHPANGIAWLANRLAPHDEHLAAGEVVLAGSFIRPVDIRRGDTFHADYGAFGSVSCQFV

SEQ ID NO: 10452 - protein, 131 aa, BradyrhizobiumColbertium
MSAHTRRRSIHIGGFKHVNPIPNACRIGNLVMSGVILGRDPATNTMPESLDAQCANMFAHMKATVEAAGGTTDDIIKMTVWLKDRANRDPVNVEWLKMFPDEHSRPARHALPMDNMDGGALVQCDFTAVID

SEQ ID NO: 10453 - protein, 291 aa, BradyrhizobiumColbertium
MPTYLPFDPNPRRPGKAPPPKTVDSQFHVLGPIERYPERPGAAYRMPTATWEAALRMHKALGIERGIIVQTTTYGADHAVVLDGLAAMGPNYRGCANALVFAEASDSYLAKLDDAGVRGARFSFRQELGAVLSDADFARAIARIRELGWYVKIQPEKDGIMSSVAKYEDLDVPVLIDHMARPDPEAGKNDPNLRKMLELLGKGNFWVMLSLGEKTSKTGAPYDDVIPIARAYIEAAPDRCVWASDWPHPVSVKQPPNDADLLELMYRYAPDQAELEKILVHNPAKLFGFAD

SEQ ID NO: 10454 - protein, 334 aa, BradyrhizobiumColbertium
MIPFSILDLAPIRQGGDAAQAFRNSLDLAQHAEKWGYKRFWLAEHHNMTGIASAATSVVIGHVAGGTKTIRVGSGGIMLPNHSPLVIAEQFGTLESLYPGRIDLGLGRAPGTDQFTARALRRDLATTSENFPHDVLELQALLGDVQPNQTIRAVPGMGTKVPLWILGSSTFGAQLASMLGLPFAFASHFAPQMMMPALREYRARFEPSAQLDKPHAMIGVNVFAADSEVEAQRMFSSLQQQFINLRRGTPGPLPPPVDDMDALWSPAEKAGVAQALSCSAVGSPAVVEEKLRALIAETGADELMTTGQIYDHAARLRSFEIAAEVRDRLAKQPM

SEQ ID NO: 10455 - protein, 167 aa, BradyrhizobiumColbertium
MTTVAINRRSLLAAGGSVLATGVLTSGVSGLLLPARAAGLAPTETMSGGANNYRKGAPVVERIGKGGFWMSGTVRRAGDGAPLAGQRIQIWAHTVEGQEHEPQSHGATLTDKDGKFRLEMPQIIPVFGQPHGHLAYDSGEFKTVFLRPVMRSAKETSLEAHFVLQPA

SEQ ID NO: 10456 - protein, 204 aa, BradyrhizobiumColbertium
MVLIWAALALAIGVPIAAAAGSELLAWRGPIYILAGFAGIVALGLVLLQPLLIGGYLPGLSAYRGRRAHHWIGGALVVAVVIHVAGLWFTSPPDMIDALTYASPTPFSPFGVTAMWAIFVVALLASLRRWLGLRLRTWRFIHMPLAIVIVTGSVVHCLLIEGTMETISKAALCVLVLTATAKVMIDLQVWRKRRTLRGESPAQQ

SEQ ID NO: 10457 - protein, 158 aa, BradyrhizobiumColbertium
MTLTAPDLKAFLLATPFFGGLSDGSLDLLISMLAERRFEAGDTVVAEGEPGRSMFIVKSGRLAVSKRTSAGRVIPLSVLQPGDFFGEMTLIEMQNRSATVVAEAPTVLYELTAKNLYACYKTDIHAYVIVLQNINRELCRRLRRADNRLTSRQAGNDN

SEQ ID NO: 10458 - protein, 47 aa, BradyrhizobiumColbertium
MVLAADDEPEAPTVFAFFLIVTGIVLLLSSLVAFGFHRNSLHSMALL

SEQ ID NO: 10459 - protein, 116 aa, BradyrhizobiumColbertium
MIKRSLPYEGLLHEIVEHNGVLYLGGIVPEDTGLDMAGQTDDVLRQLKTLLEGAGSDLSGVLQVTIFMADLADKAAFNQVWKRYFTADHLPARAAIGVADLGPGVRLELTAIAARR

SEQ ID NO: 10460 - protein, 65 aa, BradyrhizobiumColbertium
MTDQVMTDQDDKSVGQARASRDDRLKSALRENLKRRKVQARERAAMTGALENDDGSLDEGTAGET

SEQ ID NO: 10461 - protein, 571 aa, BradyrhizobiumColbertium
MVAIGQDEPQRTEGDVLMSRFTRPEQTFPNLTPAEIERIRQFGEIRTYADDAFLFETGKPGPGMFVVLKGHVAITQRDGLGHVTPVIDQGPGQFVAELSQLSGHPALVDGRAEGEVETLLLPPDRLRALLVAEAELGERIMRALILRRVNLIQGGVGGPVLFGPSNSAGVVRLQGFLTRNGQPHHLLDPERDRDAAELITRYSPQPEDWPLVVTADGAVLRNPDETELARAIGMIGGPKGDRIYDVAVVGCGPAGLATAVYAASEGLSVAVLDTRAFGGQAGASARIENYLGFPTGISGQALTARAFTQAQKFGADIMIPVTVKSLDCTRKDGAFSVALEGSDPLRSRSVVVASGARYRRPDIANLDKFEERGVWYWASPVEARLCAGEEVALVGAGNSAGQAAVFLSGHAKRVLMIIRGGGLGASMSRYLIERIEATPNIELMFNTEITALEGDEASLLRRIRWKSRLSDDEDSADIRNLFLFVGADPATNWLDGCGVTLDRGGFVVTGAQSEQNQGKLVAPLETSVPGVYAVGDVRSGSVKRVGGAIGEGAQVVASLHGYLGDAAKPAL

SEQ ID NO: 10462 - protein, 132 aa, BradyrhizobiumColbertium
MHLGRSWFETALTRLLTMRIYQQKTQREDQMAEVVVLYKTPKDAAAFDKHYAETHIPLAKKLPGLKKYAVSKGPVSSPAGPSGIHLVAVLTFDSVADIQAAFGSPEGKATGADVPKFASGGADILIFDTKEV

SEQ ID NO: 10463 - protein, 169 aa, BradyrhizobiumColbertium
MVLGLSLPALTLIHVVISLIAIVAGLVVMFGLLGSKPMPGLTAIFLLFTILTSATGFLFPFKELLPSHIIGIISLVLLAVACVALYGMKLKGVWRPVYIVTAMISLYFNVFVLVIQSFLKVPALAALAPAVAPAPPSGPVFAVVQGIVLVFFVVLTIGAWRRFRPMAFA

SEQ ID NO: 10464 - protein, 285 aa, BradyrhizobiumColbertium
MQLIFIERETSMPTITTKDGVEIFYKDWGSGQPIVFSHGWPLSSDDWDAQMMYFVTRGYRVIAHDRRGHGRSAQVADGHDMDHYADDLAALTAHLDLNNAIHVGHSTGGGEVVHYIARHGESRVAKAAILSAVPPLMVQTAANPGGLPKSVFDDFQAQLAAGRSAFYRDIAAGPFYGYNRPGVKPLEAVIQNWWRQGMMGSAKAHYDGIVAFSQTDFTEDLKKINVPVLVMHGDDDQIVPYADSAPLSAKLLKKGILKTYKGFPHGMPTTHAETINADLLAFFKE

SEQ ID NO: 10465 - protein, 312 aa, BradyrhizobiumColbertium
MIDWTTAGIPTLGGMTAVVTGATGGLGYETAMALAGAGAIVILTGRNDAKGLQAIEGICERFPDALIAYEHLDLASLASIADFARRFAADNERLDLLVNNAGVMAVPKRQQTEDGFEMQLGINYLGHYALTARLLPQLRRAIAPRVVNLSSLAHRAGAINFEDLQGKHCYRPWRAYCQSKLAMLMFALELQRRSVAAGWGLMSLAAHPGYARTDLIANGPGANTFQGRVGRLLQPLISQSAAEGALPTLFAATSPDAEPGGYYGPSGFCELKGIPGPARIMPQAEDLAVAAMLWDASATLTGLSFDEIAAAA

SEQ ID NO: 10466 - protein, 216 aa, BradyrhizobiumColbertium
MIFGATGMVGQGVLRECLVDPGIDHVLVVGRSPTGVRNAKLTEIIHDDFLNYSAIEGRLTGYDACFFCLGVSSIGMSEERYRHLTYDLTLAAATMLARLNPRMIFTYVTGAGTDSTEQGSRMWARIKGKTENDLLKLPFKAAYMFRPAAIQPLHGARSKTAWVQAVYAVSGPLWSVLRRISPRLVTSTEQIGRAMIRVAREGYPRKVLEVEDINSL

SEQ ID NO: 10467 - protein, 147 aa, BradyrhizobiumColbertium
MSPQLKLIALDADDLAVISTHVQDARVQTSDIIWRQSEKRLVVGMSRLDWEQTLEGEAEPRRLVAALRFDRVLACKSRNIDLAAPDKVLDLVGIEFHPQDGRHEEPSGSALLLFAEGGAIRLDVECLECELTDLGADALGTGPGIEE

SEQ ID NO: 10468 - protein, 431 aa, BradyrhizobiumColbertium
MPVRLDRSSDDFDQRFAAFLGAKREASADVEAAARVIVDDVAKRGDAALLEATAKFDRLKLDAGGLRVSAAQIEDAVKACEAATLDALKLARDRIETYHRRQLPKDERFTDPLGVELGWRYTAIESAGLYVPGGTAAYPSSVLMNAVPAKVAGVSRLVMVVPSPDGKLNPLVLAAAHLGGVTEIYRVGGAQAIAALAHGTATIAPVAKIVGPGNAYVAAAKRLVFGKVGIDMIAGPSEVLVIADDTGNADWIAADLLAQAEHDASAQSILITDSARLAADVEKAVEAQLKTLPRAAIAGASWAEFGAVILVKNLGEAIPLADAIAAEHLEIMTDDPDALAAKIRNAGAVFLGPHTPEAIGDYVGGSNHVLPTARSARFSSGLSVHDFIKRTSILKCGPDQLRALGPAAMTLGKAEGLDAHSRSIGLRLNLS

SEQ ID NO: 10469 - protein, 165 aa, BradyrhizobiumColbertium
MTKPPVQDDSTNRIVGVTLDEESIGRSGPDIEHERAIAIYDLIEQNLFAPEGAEGKGPFTLHIGITGNRLMFDIRREDGTPVVAHLLSLTPFRRIVKDYFMICDSYYQAIRTATPDKIEAIDMGRRGIHDEGSRTLQERLKGKVRVDFETSRRLFTLITVLHWKG

SEQ ID NO: 10470 - protein, 155 aa, BradyrhizobiumColbertium
MAAPSRASNPQSVLFACAMNSVRSPMAASLLLHMFPQGLYVKSAGTRKGELDPFAVAVMAELGQDISAHKPQTFEELEDWEGLNFDLIITLSPEAHHKALELTRTLAADVEYWPTQDPTTIEGSREQKLAAYREVCDQLLMRIRRRFAKTGAASG

SEQ ID NO: 10471 - protein, 209 aa, BradyrhizobiumColbertium
MLGRPKFVLASGSPRRLSLLNQAGIEPDALRPADVDETPRRGELPRACANRLARAKADAALKSVQLDDELRGAFILAADTVVAVGRRILPKANLVDEAAQCLRLLSGRNHRVYTAICLVTPREAFRQRLVETRVRFKRLSEDDIQAYIGSGEWRGKAGGYAVQGIAGSFVVKMVGSYTNVVGLPLYETTALLGGEGFPIRFGWLNTTAV

SEQ ID NO: 10472 - protein, 60 aa, BradyrhizobiumColbertium
MNDQAEKPATPRKACPICGKPQSEKTRPFCSSRCRDVDLNRWLKGSYVIPGRDDDVDEEE

SEQ ID NO: 10473 - protein, 429 aa, BradyrhizobiumColbertium
MDELSDTKIRNATKADKEYAIADGQGLSIVVRPNGTKLWLYRYRFGGKRKNMSFGTFPGVGLKAARDKRHDAEKLLDQGRDPVAVREAKRQEDEKLKHTFRVVGEEWATTKLEKENKAKATIKRERWNLAQLNREIGDRPLCEIAPPELLTAFRRVEARGRYYTVGRLRSTASRVFQFGVGASYCSSDPTRDLKHALTKAPKGNPRPALTDPDDVGDLMRRVEVYDAKNGGLVRYALKLIALTMVRPGELRLAEWTEFDEKNRIWLIPAEKMKMRDDHEVPLSRQALAILAELRPLTGRGRYLFSHDNDVPMSDNTINKALRIMGYDTGPGGDHCAHGFRSSASTLLNEEGAFDGDVVEAQLAHETDEKKRRRRDEVVRRQLAKGDKNKIRGIYNRAAYWNERVRLMQHWANRLDHLRKGIAVPLRRSA

SEQ ID NO: 10474 - protein, 464 aa, BradyrhizobiumColbertium
MTREADRSQRQQKSARVGAAIIRGSNPPLRRAWDANAPIRNLFSILKESPMTRRDQREGQTSSVFPMNIVGWARSFAPGTASLAAGALALLAVGLFGWRAGLGPRQILEFGGAVLVLGFAGAVLATLVGTRRHTTLQSNALSWIVVVFIAIVLTLLLLAAFTPLLPQGSIFLARTLGWAELLPVSDHLRPVANDVHLESLGDLVAPISNSKDAISRVKAFNDRGTLRIADGGRLIASNNDPRTIAVHTLELDNGEIVTNGASLTIEVVDLKSNGGRLVSFDPNNSASNGANALKVGKTTLIVHGSISGQLKVDLAGQGGSNGDNGQPGAAGADGGAGANASSGVGCERGAERGRDGQPGHPGAAGSPGGRGGDGGSLIVNARDPAAARSAIDFSAPGGLGGQGGNGGPGGPGGRGGSGGGPRGFCSGGAPNGVSGPQGPTGPNGANGQTGRDGNLVVEPIPTNF

SEQ ID NO: 10475 - protein, 184 aa, BradyrhizobiumColbertium
MDDEATHLTPGEVRRIISRLRGPDLVRLAVLARVWATGLRQHDADDLLNAALDRVLSGRRPWPIDVPLPAFLSQVMRSIASQWRQENRREPLKEDETGEVFEEEIQSPAACYEMSDLISRMRQALATDPPALGIFEHMLADSDREDAQAALGMNATQYDTARRRMVRQLFEAFHAGWNHEPKRH

SEQ ID NO: 10476 - protein, 1072 aa, BradyrhizobiumColbertium
MSPSVTDDRTLALLAEGVLDASPEDIVRVAVANGVDVAALETKVRAMIAARMAAAELSERVSFSVGETVALRSDPKRVGVVTSITPSNRETRYGVFIDGRVETLYASQLLPADIAPAAIGATVNELNARLTALQLAAPSLANLYSLQAGRIDFISYQFRPVLKFIRADRPRLLVADEVGVGKTIEAGLLLRELQARRPLRSVLIVCSKALVVEEKWHREMRRFDEEFVALSSTDLRHCLDQTDLDGEWPERYARAILPFSLVNENLVHGFPTRRGRARSKGLVTLDTPPRFDLLIVDEAHNARNTDTNLYHGLRLLADNAEAVVLLTATPVQLGTGDLFSLLNLLRPDLVIDRPTFERMAAPNSEINAAVAAIRAGRARWQQEALDHLSRAAATDWGRVMLGPSPEYRAVTAAIRETRDDDGRVRLIHRSEALHSFASMISRTRRRDIGAFTTRKPRTEAVPFTLEQQAVHDAILEVQRAVYQRTHGSGPLGFLMTTIRRQAASSLQGLVPFLETILTRRLSEIERVEIDDEAMDALDAGVDAIKNDIAAVLAQARLLPEGDPKLDRLLSIVAEKGRMANRRLLVFSAFRHTLNYLETALRRQGIRVGLIHGDIVDDDRRALRRAFALAPTDLDAVDVLLSSEVGSEGLDFQFCDALVNYDIPWNPMRIEQRIGRIDRYGQASETVAIYNLVTPGTVDFDIYERCLLRIGIFERAIGGSEAILGEIATRLQQVAEDFSLTDGERSARLQQLADNEIRQIAETEALEEREAELFGVRISRRIDDEIARASSHWLEPAALERLVSLHLERTLEVGRTPISGQGPIKTLRLSAEARRRLVPSRARGVRPSLAERDWEAWLRGDQQMLGLTFDQEAANADRKLAFITPVHPLTQAAARALVGDEEVHVSLAAPASGLALGAHPFAIYQWQLVGLKEDAILVPVVADIDVAHAIMELLLAARDTTSAVPPTASMLEALDSWHHELWLARRAAHIAETAEIARFRRNSLDVSHRARMAVLEEQLSLASEERIRRMRTAQIARAAADHQEALANLARDEERADILARRVAAGVIELEAD

SEQ ID NO: 10477 - protein, 1024 aa, BradyrhizobiumColbertium
MLSFESWFDELRQVNADLLAAAKKAKADKFLRRSAVEKYAEPTHFIFELLQNADDQEAKKVQFKLLPHRAEFLHWGRPFKRDDVERITRLGDSDKSNEVHKIGSFGIGFKSVFAVTERPEVYCQLNGRPFAFAIEELIVPVALAPAARQGEETLFLLPYSKKQSVDRSSEAAAQLKKTGPEVLMFLNHIEELVWEDDAGNGERYRCVRGADGITVFERTALGAGKKQPDATGYRVFRRPVTLPDGKPSEVCIAFQLNARGKAVGESGPAKLWVYFETEEQIGFRFRVHGPFKLTDNRANIMRSEPFNQQLIGELSSLAASALTELRDEKRLVRETLNALPIPADEIAESWTELGDSIWRMLREEKMLPTAAEAYADPPSLWQGTQDLRAVLEDEDLTVIASREKSWTVSAGQRNGRIDRLLSHVGVEELTLDGLLKQLESVAQRVDRLESWLAAHDIAWLQRLYLLLNGIKGYQVSRLAYVPIVRTADRNYVCASEVRFAPVDESADREIEVRGVKLVAPGLLAGRKQVRDEVTAFLRRIGVKDVDEEDYIRALVAEHYQPGGCVADMKAHLRHIERFAVWLTAHPFKVVLFQDASLFLAEGSDKLHKGEALYLDKPFHETGLSAVFGPQGPLANTKKPLAKRYRGTKGVLDFARALGVKQHLRPASVSTSNHPERGALWADYYRYGARWGNSTNVDWGIPDLERLLATPDAAVSLCLWRSLQAFDRSVFFAKFRHAESYPVREKPASFVYHLRSFAWIPSTKGGFRKPADITEEELPGEFDTDDRTGWLEMLGLGNNAKRKAAEYQQQREAVLRAGIPDEFAERFQDLSEEEKRSVLEAGFQELATSTSSQPTFPEREASNPERRASRMAERARDAPPKTYEARERSVRTSDRDARKLAEPYLVDLYTNADDEMVCQACHLAMPFNLPDGSPYFEAPEVLSEAPVELVENHLALCPTCCAKWHHARATSDANIIAALKSAHAPQISVTLAGEPTVIRFVQVHLEDLRTIISVTVDGAIPVNSK

SEQ ID NO: 10478 - protein, 536 aa, BradyrhizobiumColbertium
MSDIVIGSRILDVLTTGMYPDALDAIREYIQNSFDAIRRAERAHILEPNFGEIVITIDPEKREVAIRDNGIGLPISEARSSLLSIGASKKKIGDDAGFRGIGRLAGLAYCERLSFTTASKDEAVQTELTFDAAAIRQSISPTATEAIETATELLTRLTKHRQVDRKPGQPFFEVRLVGVDPKACQFLNAEDVRTYLRQVAPVEFHMQSFVYGNSKINAFLKEHGARKIVNLTLMHNGRPDKINKPYKTYHEAGNRTNKRVEITDIETYVDPSPSPLWIAWLSKAHDLVGTINSEEVRGIRFRANNIQVGDHRTFARIFDKIGKTTSRFNGWFSGEVHILDPRIIPNSRRDFFEDNEAWRQAEHTLIEWAKDLQKRAHQKSSDRNRSVELIEQDADEFIDDIERTTLEGFASDSQRVHTLHDIDEREKQIEKAISAGRPETENETLRRKKEEVSNLRAKAARPKSLIDESELNRHERRILRLVMNAVHSVCGPELAKKTAEEVNKRLKDKIQRRPVASQQKQNDDNAEEATGQPGSP

SEQ ID NO: 10479 - protein, 551 aa, BradyrhizobiumColbertium
MAGTIGRVVATEKSPSTTNKVEFWIEKDVVIKPFDVVMIRHIKDSTTYAIITELKYLTDSGGYLSDWVSSDFGDVQSTPRNERIGTTIAEAEILSNDKDFEMPIRNGAPVEWADAEGVRRSLGLSSLRQPIPAGWFTMSNGEEIIVDFEANYVIGPEGAHLNIAGISGLATKTSYAMFLCSALQQRRSEDVSLVIFNVKGFDLLSIDEEAKPADLSETDKRNWEKCRLTATPFSNVTYFYPYSDVQSQAYNQSKLPREVHRRQIESNKCFHYIYPIEYGRKRLSLLLTDVEDDTHTMESCSDDIAEGQTFGNWEALRQDLRNRTQTGGGGGRQASITVQSWRKFFRLIKTRTKNDIFSEEAASRQTERRQRPTSDILKFIGPGKVVVVDIEPLPDYLQTLVVGDVVEQIINAKLGGGDDQQDEQPDLGRVVIFADELNKYAPNKGGGSLTEKLLEITERGRSLGIVLFGAEQFRSGVHDRVIGNCATNVFGRTSAVEIRKASDYGMLNSTQKASLSRLPQGTLMVQHPVFTSAVVKVNFPRPAYAQPKGGK

SEQ ID NO: 10480 - protein, 501 aa, BradyrhizobiumColbertium
MCRPLFSTEQLGSHPRCDALLSVKQSSYIANQRLTSDQPVGTRATINCNPPGIAASAIATTFPNFYSTLAVRDARFCLFKLGYCRYEGAIRPKEACYRKNRQRGSLSLPVILSAIADSPAAFGTRLHMPQKTVSDVMQDVFEGSRFKCLPYEKRNLDQDPDSEYREYDSRIRGRMFENPESNTISTVPTTGVDEKVPTILTYFMDGSRRVFRFSDVILPDGRYYPVLAGQVGVAVLKRADDGSVGPMHKHLRYENMLVFPDTLEQTDRNALKAELANRKLEFILATYATGQSGSGQNEDYISIGTKKILDSMHDFELGAVRRMMDDRDLRDDAMLVVDGSLQFRREVLRRNDFPITQLANVVGISKSFTPSQPVIGARGSKHLGTFLQNLEYGQRTPVFKAGHDEFEDVLGVWYLRIRPRRMMTNPLAGIIKVEVLANGDEQENGLDRDRVDHLSALILSERNVTPYGTDSRWANHIYPIYLTELFLKSGFLSDVYFKGLL

SEQ ID NO: 10481 - protein, 419 aa, BradyrhizobiumColbertium
MEEPKFLRLFRHLINLRTDKLPDNLCLPPVALDVADAEMVARTIGKVSALRSWATTWVFQIEHAPPILWSNGDFFDDFVEKRLNAAFRNLKEKADPLNFLHAGFNDSDRPLQYPIAQGLEYYLFTNVCCDLGEYALSRFSETAHRIFYEVLGIPRDRHPTFGIGTPQTAFNQDEAAIKEFAVGLLNMPSSYYLVAREGRISIVPTTEHGWFDASTDANAVSRVNERRLATVATSSLPNFDQRMAELETLINSPSTKEADLQEFFRVYPQFLFALDERYCEIKPHVCLFDQRRNRLVPDFMARIESEHIWDVIELKRPQHAFVGDTKDLERLSAFAARGIAQLLEYRDFFASRSNRARVSNSFGSAPYEPALVLVIGRGRARDPLHWTAATPGFPSVKVVSYDYLFQRAQECRAYLSGVQ

SEQ ID NO: 10482 - protein, 364 aa, BradyrhizobiumColbertium
MTETNGGANQDTDATNGVVDRPPPANQGQQATANPQGGDAGPPPPPNRDPNGNAALETPAQRAARQLPDLVRQGERTVDNLKRLFAVVFATSFAIAGGSVIAKLKEVLLQQISSPPAWLWALNIEMIVVFLVTAAVFYHQSVKFLDIRYARLPLAQAHPWGFAMDYIQLVLTAAPFFLMANSLGLDLTHKVGYLWFFVSYVSLLALGLILLIVSQIRHSGAVRHGIWGEQIPEQEVQREALLRAYWMVMNGAILLILLGTFWYVSRGGTCPANPRDGTLPWMLYFFGVVAMARDYLDFRWAWPFLYPIGDDNPTSQLLQPLRWMQSRRVHRNSIWLGIVLIGADVYLLFLLKFWDFAKWTAACG

SEQ ID NO: 10483 - protein, 537 aa, BradyrhizobiumColbertium
MPNKRILLIEPGYKNKYPPIGLMKIAQYHRGKSDTVVFVKGVDDRSVLLRHWDRVYVTTLFSFEYAKISEAIDFAVEVVHGQTQRVFVGGIAASLMHGRFLSETRWRGIRFIKGLLDKPPAIALGLDEYDGDFYAGDMSGTPIEDLIPDYDILKQVSYEYPVRDAYFAYASRGCIRKCHFCGVPKLEGAQRDATPLTEFVKAVDAMYGQRRDLLLMDNNIVASARFKEIIAEIRDLGFAPGAKLAKGDRSVQRRVDFNQGVDARILCKDRMYLRELSSICLSPLRIAFDHLGLKGPYETAIRYSHEFGMNDLSNYMLYNFHDSPLDLFERMHLNVRLNEELGIRIYSFPMRYQPTDLPDRSHVGEKWNRYILRSVQIVLQATQGVVSGEPDFFKAAFGSTADEFEAILLRPHHMIFNRRWFEFYEGRAEFDDYLSTIGKLSATERSELIEFLCGRMPGRYKQDLSSLSGSVLKAARFYVPLERERELEIRRLQRERRDASPDIRLSPGEIVEDAGLEEQEFTAPPITVRRRSKEIVA

SEQ ID NO: 10484 - protein, 495 aa, BradyrhizobiumColbertium
MKLNAKPDAPVRPVSPDDVRVGKDVIEILTSGMYVSPLSVYREYVQNSADSIDQVEGGAGVPSGRVALDIDHAARSVVIRDDGGGIPADKVGDVLLAVGGSRKRGTAARGFRGVGRLSGLAYCRQIEFVTKAKGADRISRVVWDCRKLRELVSGNNGSDDLRTVMAGAVSISTESVARDEPSFFEVRMSDVARLRSDLLLNERLIADYLAQVAPVPFSPEFSFASRIDDELRKRLKLSRLQLSVNGQAVTRPHRDELLAGSVDKSSRIKEIEFFELADVDGEVGAIGWLAHHDYVRSLSANLGVRGLRARVGDLQVGESNLFEESYKETRFNSWTIGEIHMLDRRIVPNARRDNFEANHHYANVLVQIGPVAARISQRCRQASLSRTALQVVDNLIQQIEDRLKQKRPRIERAELSRLKAAAVRATAKASKIEDEDDQRKSLARLAKLQKKLSGLTPRRGPATVAVSEVASLIAKFVTSREQREKLVAALGKLVD

SEQ ID NO: 10485 - protein, 613 aa, BradyrhizobiumColbertium
MKLDPLVRDYRAYLDELAGVVDSAATRFYLDTSLLLWLVRLGATARQEFLTWCQARSVKVPVWSAHEFHHHIVENTLGTNVKKLLAETQKKVDEFVRLAAERADEGICRDKGYAGRESFVSDVEQAFVKFREFAKVVGDDAGYGAAAQEVIDFINAHVLASDLAPIVETLGEVGEFRYEHRIPPGFRDNKDENRFGDAVIWEEIQRDVKASNPTVPVDVVFISRDDKTDWVSAARTVAVDDKRRKANRDQDLDVIRPHPLLVHEFSAVSSNGRIYILQPGFLASVVDYASRTTGSRNSVATWIAAAHRPDLLSELAGAGLAQQAVTRPENTAQAASPDVQQAPPTGAAEPEPTLRDIMGSDVSGDVAAYAQALPRDQERTIRDAQDELVSGNGSPIKFGRLLAELALEGRAEVSDRILAIVEGLKSRVNPTSLNRFVLAIAASTYFDKYAELLKRPRQELRSIVVAFESDDAYRSTFVNLRSFLEEKGAELPYMPGSGRQKMPFKFEFLDGSSSPQIIRQVRVGDQTAFIDSVAEASDRNLTKLLGKSASEGCSGKEIRMLIAAQYFIPPDLLSDQLDKKKYSWLAGTGLVPIDTTSEGGLSATDDDEDIDRE

SEQ ID NO: 10486 - protein, 519 aa, BradyrhizobiumColbertium
MTMPIPHIGAFVLETLTLGMYGEPRHTLREYVQNSFDGIRAAQRTRFLTERGQVTISIGEDEITIRDNGIGVPTSQAWKTLTSIGASKKDRQRDAGFRGIGRLAGMAYCDELIFRTTFPGEAETSTLTFDCDALLKAMNPDEGGDVELSGLLSRSIRMTTTADESQKDQHFFEVTLKGLSKAPEILKNADEVRDYLAETVPVDFHPDWERRKAIEDRYRDNFGASLETIDVFVKVNDSAEQIFKHYGESYEHAKGEMELESIEYFSGSGNRFWAWVGTMSESAAVTDWRTRGLRVRVRNIQVDGTEISESLFSRVKPSYGRFSTYYVGEIYIDPESVIPNARRDGFEETRNWLDIRSELITSVCQPLAARAYSASQLGQLDVDKVVGEINDLIERGNAIADSTKSSYDQVVGLMNSAKRLRKRAASALKIVDDLDASAVGEGQPGLQKSVALQDAAKSVETVETQARMLVGRFLGEDDKLTALKARLREEILQEVLDVVNAFVDPATFQKIKRQLLKSK

SEQ ID NO: 10487 - protein, 369 aa, BradyrhizobiumColbertium
MNPPDHEQNTAETRQRRIIHIDMDAFYASVEQRDNPDLRGKPVAVGGSRERGVVAAASYEARKFGVRSAMPSVTAKRQCPDLIFVKPRFEVYKEFSRQIRSIFAEHTEIIEPLSLDEAYLDVTENIQRITIATEIATMIRAEILSETGLTASAGISYNKFLAKLASDQRKPNGQFVITPKMGPSFVEDLAVGKFHGIGPATSAKMNGLGIFIGRDMRKQTLEFMTANFGKAGTYYYWISRGIDERPVRANRVRKSVGAETTFSQDLADYEALAAELQPLVEKVWRHCETTGARGRTATLKVKFSDFELITRSKSVGLIDTVSALSGLALELLKQLMPPKKAIRLIGISVSGFADVEPEDQLPLLFDDQE

SEQ ID NO: 10488 - protein, 63 aa, BradyrhizobiumColbertium
MIEQKKIAKTPREHFMQAAADELARFVRKEIAFQKADRDERAMKLRLPISFGNRATGFNRARE

SEQ ID NO: 10489 - protein, 87 aa, BradyrhizobiumColbertium
MLMTRERRSAIRTLRGWAISVLQEAGAIRECEEHGWMQDRADPHARERAFDIARQDPPAGVSSQAAAIAIAEVLDSIGDSCPECPAE

SEQ ID NO: 10490 - protein, 690 aa, BradyrhizobiumColbertium
MLASTATSYLETLNPEQRRAVEHGVSGNNHVGTPLLVIAGAGSGKTNTLAHRVAHLIVRGADPRRILLMTFSRRAASEMAKRVERIARKVLGANAGIMTDALSWAGTFHGIGARLLREYAEQIGLNPAFTIHDREDSADLVNLVRHERGLSKTESRFPTKGTCLSIYSRCVNAESELEHVLGASYPWCSGWATELKELFAAYVEAKQKNNVLDYDDLLLYWAQMMSDAAIADDIGGRFDHVLVDEYQDTNRLQSSVLLALKPGGRGLTVVGDDAQSIYSFRAATVRNILDFPEQFSPKAEIITLDRNYRSTQPILSAANGVIELARERFTKNLWTERTSSAKPRLVAVRDEADQARYIVERILETREEGTLLKQQAVLLRTSSHSGPLEVELTRRNIPFVKFGGLKFLDAAHVKDMLALLRFVENPRDRVAGFRVLHLLPGVGPASAQRVLDQMAEASDPLGALCTLPSPPRAGEDWATFIDAVGNLRYSEWPSVLERARLWYDPHLDRIHEDAEVRRADLIQLEQIAGGYPSRERFLTELTLDPPDATSDQAGVPLLDEDYLILSTIHSAKGQEWKSVYVLNVVDGCMPSDLGAGTSAELEEERRLLYVVMTRAKDDLHLVVPQRFFTHGQHAQGDRHVYASRTRFIPEKLLGLFERTNWPLAPTGAAARSPAQGPRIDIGARMRGMWR

SEQ ID NO: 10491 - protein, 220 aa, BradyrhizobiumColbertium
MCNLYSITTNQAAIAGLFRRMNQYVGNLPPMTGVFPDYPAPVVRNVGDAEEMVLMRWGMPPPPRTGGPPVTNIRNTSSPHWRGWLKPENRCLVPANSFAEYAPETNPETKKKDVVWFALDESRPLFCFAGIWTEFKGDRGTKSKPIPGPHLVYGFLTTAPNAIVAPIHSKAMPVILTTEEERDAWMRAPWDEAKALQRPLPDHALQIVMRGADKEDKVAA

SEQ ID NO: 10492 - protein, 98 aa, BradyrhizobiumColbertium
MKHQDKLSFITDDQAEHVGADMAIQFMLMTLFQLVSEMADDPRGFRADVHKELADLVATYKLPPMPADAEQKIRAAARKILDGIMLRSFEPNGVRKAS

SEQ ID NO: 10493 - protein, 68 aa, BradyrhizobiumColbertium
MSSVSQPNEQDDGLETAVDQAIAVCDGDPRAAVRALIVANNLLESEIAELKKAVSHAYMRGRFRTYTG

SEQ ID NO: 10494 - protein, 164 aa, BradyrhizobiumColbertium
MVKDANGVILAWLYCRDDSQRYSFGVSKLSSDEARRIGKAIARIPEFMMPRQGFYPRGAGPRWRADRPYHVALEDRYIREHWDEIYALCRLNSLPFNGTGEVIQNDGVWRVYEFAWQMDAILFWERFEGRWLRGTEFHYPERPENLPSLKPLQNWPKFNPRNLR

SEQ ID NO: 10495 - protein, 65 aa, BradyrhizobiumColbertium
MIATAHELPTSGYALEVDGRLKAEFATRDGAEMGAVELKKRFPMLQIKIYDAQTKTREEVLFPQA

SEQ ID NO: 10496 - protein, 218 aa, BradyrhizobiumColbertium
MSADGPDWARLFRIACSLIRQVNSEQLIIDSWSFGGGTAMMLQVGHRESHDVDIFLPDAQLLSFLDPKLHDFEFEIRPSDYGGDGTGFLKLAFEGLGEIDFIVAHDVTDIPTTRQTIEGEEVDLETVAEIIAKKIHYRGATIKPRDIFDIAAAARHDRDSIIKALKHHKDDVTKTLSAIERLKPDFVNVTIAELAIKDSFKPIIGTALGEATELLKSI

SEQ ID NO: 10497 - protein, 95 aa, BradyrhizobiumColbertium
MYFETVKVMGKFPASVLTTVNAPYSKKLDAPTLAHCLTHPEAAKAWPGQMSAFFGEVAPELQKAFAGAFHISETELVTAAKTFAQFSGESYPLAA

SEQ ID NO: 10498 - protein, 397 aa, BradyrhizobiumColbertium
MNMQILDARRDASGGYRVDVSRGERVGRVSSEWFSRPADQRYLSLNELASTVRDRTDRSRTRVVESALIHVEANRTDPERLALMLPGSDKPVAPTHWSFGQLASQVGAPAAYLRQLPAALAGINLQYGLTADRAEQIKTLETDDGRVELRAVTSPDYGRIFDHELVEAVQRIAGNGTGDTRWKVPGVLDWSTRIYNPRVDISKSTTTLYASDRDVFLFLVDDLNPIEAGRLPDGSPDLYFRGFYCWNSEVGAKTLGMASFYLRAVCQNRNLWGVEDFEEIIIRHSKYASSRFAHEAAPALLNFANSSPMPFVNGIKAARERIVAHSDEDRTEFLRRRGFSKADTAKVIETVLAEEGRPPESIFDFVQGITAVARDRPHQDARLDMEAKAKKLLDRAA

SEQ ID NO: 10499 - protein, 711 aa, BradyrhizobiumColbertium
MAKAVQKIKMSSSRDIPFHKLVLSQSNVRRTKSGISIEDLAEDIARRKLLQSLNVRPILDADGQETDMWEVPAGGRRYRALELLVKQKRLAKTAPIPCVVGEAGGGISAEEDSLAENVHRVALHPLDQFRAFQTLREQCKSEEEIAAIFFVSVGVVKQRLRLAAVSPKLLDVYADDGMSLEQLMAFSVTDDHARQEQVWENVNRSGYDEPYQIRRVLTERAVQASDKRARFVGLTAYEAAGGNVLRDLFEEDGGGWLEDIALLERLVAEKLRSEAETIAAENWKWIEVAPSFPYGHDHGLRRLEGEPADLTIDEQVSLDALQAEYTALQEKYEDADEIPDEADTRLGELEEAIAAFEDRPHIFDAAAMPHAGAFVSIDTDGTVQVVRGYVRREDELAFVAALVRPDPEAGSATPGSDDGDQPVPPVQGSVISMAGQVSPDEEEDDAIRPLPDRLVIELTAHRTLALQDAVAAQPHVAMTALLQKLCLDAFYRTYGPGCIEAGVRHVQLSIQAPELKDSASAKSIAARYEGWRADMPADEAALWDWLVALDDSSRLALLAHCVSFGVNALFEKADRHGGPGITTHGLQRRLDQADRLARAVGLDMAESGWRPTVDNYLGRVTKGRILDAVREARGESSAQLIDHLKKSEMAKEAERLLEGTGWLPEPLRIAAVASPSENPDSAAEPLPEFLSGDEESTEGVESEQPQAVAAE

SEQ ID NO: 10500 - protein, 171 aa, BradyrhizobiumColbertium
MADYYSPAVIQQTIPEADMTPLERLLLSYVFDAERDGDGWYFFSDLGPADMTVIERAALEAAQAASELDVDNTANAFVRKHLAGIENDELQDTHLDIDLSETSWQLILQDIVRRSSTLKYVSAVSSFTCSRMRADGFGGAVVVISADTILGKSTNDLLEEFIDQVSPCTDG

SEQ ID NO: 10501 - protein, 102 aa, BradyrhizobiumColbertium
MCRVLNKHHAGIPAGAVYIGRGSKWGNPFRIGGDGDRAAVIAKYERWLANQHHLLRALDELRGRDLVCFCAPRACHGDLLLRLANATREVRVTWWRAMEAAA

SEQ ID NO: 10502 - protein, 123 aa, BradyrhizobiumColbertium
MSKTYREFDFRKSVAHHAEAKRLFHSRARSQLRRIAAALGLEPGSYDLRSNQAGVAVSGEITLHGDHLYVQVSQSAMGHHSGVLFRTCKGRKDYVGGPNNFASLDLLNRPDELAHWIRGVCHI

SEQ ID NO: 10503 - protein, 55 aa, BradyrhizobiumColbertium
MDPRGVPYLMSSAAAQPLSRRGQAVTVIAAARESADGHEPGVMPSDGFRQTRRSD

SEQ ID NO: 10504 - protein, 91 aa, BradyrhizobiumColbertium
MMLDCRYAAGWHPLLVLTVGDTLEQAREEIADHPDLLRLVADGCARVGDKWEPYYGELLEARCWAINLAKNYAIDEGITFVLLNDEHDSNM

SEQ ID NO: 10505 - protein, 1444 aa, BradyrhizobiumColbertium
MTESLVSGASAAPLSMRATAAVASAIVSAARQLLTELEQGRRIDAAVLRNAMQAAFGGSDATGVWDWKAAYDACEAATVLFLRRHGAAMRARSASPAAMLSMLMRIASLLPTQTRRSEESQFLQQFSTPIGLAYVSSVAAAMTPADVVLEPSAGTGHLAVFAEFDGASLVLNEIAESRAGILGQIFPAVSTTHFDAAHIDDYLDARIVPSVVLMNPPFSATVHVDRAMADAALRHVGSALARLREGGRLVAITGANVAPDNPVWTDSFKRLQEQSRVVFSAAIDGAVYAKHGTTVDTRLTVIDRVPADDAASLPASAGIARDLPTLLDWVIRGVPARRAITGTPTAAVPAIASPATPRTVRAYVARRQPATAAPASDLVAAEVAYEAVDWTPTDASKITDALYESYALQSVRIPGAQAHPTRLVQSAAMASVAPPKPSYRPHLPARVLADGILSDAQLESVIYTGEAHSEFLAGSWTVDATFDVVAAAREDADNAVRFRRGWFLGDGTGAGKGRQVAGILLDNWLKGRRRAVWISKSDKLIEDAQRDWSAFGAERLLVTPLSRFRQGTPIRLGEGVLFTTYATLRTDDRGEKLSRVGQIVEWLGSDFDGVIVFDESHAMQNAVGGKGERGDQAASQQGRAGLRLQHALPNARVVYVSATGATTVHNLAYAQRLGLWGGEDFPFSTRAEFVEAIEEGGVAAMEVLARDLKALGLYAARSLSYEGVEYELVEHQLTAEQVRIYDAYAGAFGIIHNNLDAAMRAANITGETGTLNAQAKSAARSAFESAKQRFFGHLLTSMKTPSLICSIERDLDAGHAAVIQIVSTGEALMERRLAEIPTEEWGDVQVDITPREYVLDYLAHSFPVQLYEPFTDSEGDLSSRPVYRDGQPVESRDAVKRRDRLIEKLASLPPVAGALDQIVQRFGTDMVAEVTGRSRRVVRKRNQLMVENRAASANLAETAAFMDDAKRILVFSDAGGTGRSYHAELSARNRRLRVHYLLEPGWKADAAIQGLGRTNRTNQAQPPLFRPIATNVKAEKRFLSTIARRLDTLGAITRGQRQTGGQGMFRPEDNLESHYGRDALRQLYLLLVRGKVEGCSLGAFEDATGLKLMDANGIKDELPPITTFLNRLLALTIDLQNVLFAAFEQLLSARIEGAITSGTYDAGLETLLAESFVVTDRRAIYTHPGTGAETRLLTIIERRRNRPVTLEEAFDRLTDSSAIPLINDRSGRAALQVPAPSFMLDDGEIERRVRLIRPMEHNSLSSKMMAESHWAEVDRERFSAAWQAELHDVPEFSESTIHVVAGLLLPIWKRLPDESTRVYRLQTDAGERVIGRKVSPAWVATVLAGDAPALTPDAAFAALLEGRTVLSLAEGLQLRRVRVMGRHRIELSGFNDTMRDRLRTYGLFSEIISWKLRMFVPTDEGGVEVLAKVLEHYPIERIAEREAA

SEQ ID NO: 10506 - protein, 355 aa, BradyrhizobiumColbertium
MRRDASELAHRLAREAGAVCRHYLSNGKRKGRYWLVGDVHNTLGRSMFVRLQNSPKGLAGKWTDAATGEHGDLLDVIRHSLGLCDFREVAEEARRFLKLPRTESEPVPQRPPARSVVAAGSQEAARRLFAISGPIEGTMVETYLRGRGISRVHHGGSLRFHPRCYYRPDDHLPTETWPAMIACVTDLDGQITGVHRTWLDPDGFDRIRLGKAPIDTPRRAMGDLLGNAVRFGAADDDVIVAGEGIETMLSLRCALPTLPMAAALSANHLAAMLLSSSLRRLYIARDADAAGDMVQAVLLQRAQTAGIEAIPLSPRLGDFNEDLHIFGLDTLRAALRIQLAPEDVSRFLLLPAPVA

SEQ ID NO: 10507 - protein, 326 aa, BradyrhizobiumColbertium
MIATKAAMDAADPAKGPHPMTDRDDIDLQHTASPTDLVLNELQLFGYRPFDDQPDPRPLPEGKMIAGAVADIFDALVATLNDTRLEPDLPDLLWSTVNLFHRATDRIERELDNNEQGQRKSQREQNGSEVRSVELERLTAEGITLIERRNCLELFREQAIELFEVHTGSAWRPRSGSLVNHRTLTAAMIDSRDFLAAKRRTETEVMLPAGPKVALTGGLDFNDHQLIWDRLDKVHAKHPDMVLIHGGSPKGAELIASKWATNRKVPQIAFKPDWTKHAKAAPFKRNDAMLELLPIGVMHFPGTGIQDNLADKAKRFGIAVWKFGGA

SEQ ID NO: 10508 - protein, 159 aa, BradyrhizobiumColbertium
MIALGLLLNAAGLGVICWLMFTLAVYILPFFVALNAGFWAYHSGAGVLGTPIVAIAVGGLTLAIAQIAFAMTQSLTLRAIIAAVFALPATLAGYHLALAMAHFGVPSPVWQQVFACLGAVFIGGTAWTRLTILTEPQPPDSGTAVASDPQAVLAAVHRK

SEQ ID NO: 10509 - protein, 178 aa, BradyrhizobiumColbertium
MEASHAQAQTVTADPGAWRSMSYANLQVPSPATATYIDIWKDAIDENNRHYEQRGDRRFAGANAPANEAHFVIWSSRRSVVFSVLDTASQCEAKTAFPAVGATVKLCPMRIAIYEGLQVRTMDGGKACFLELDKPSPTDATASGSYASYDVARRALKTGLIVNHVAVDGCSFDVPIPR

SEQ ID NO: 10510 - protein, 180 aa, BradyrhizobiumColbertium
MTRKRLFALLPLIATLAGCAAREEPPIIPAGPDALYVPERVVPGRLEYAPDRSTFAPILTERFAYPTQPEANAAYLRLIAAAQPGPAYPASVWLFGCKPGALDAQTARIARYHGPVVHCATDFLDRGGRRLRRGTANFYYDNHIWSMQPVYPPRTSVAWRNRESSPKDFWWWLPGRPRYE

SEQ ID NO: 10511 - protein, 196 aa, BradyrhizobiumColbertium
MPLREARVLAAAALAACTALPCHAQNGGDPASLYQPKLAAQLPPLRVEVIDGIRFRDIETKTIFRLYGIDACASDQIATLGRQPWPCGTMVRAWLVTATLNTWLACAVIRDEPGERVARCATAAHRDLSADMLREGVAVLAPATDGEPVIGDYAAAEQQARKAYRGLWSSAFQMPWDWRAARKAATNVAVQAEATP

SEQ ID NO: 10512 - protein, 113 aa, BradyrhizobiumColbertium
MRTTNLFILRGRVGQAPKAFNKAAKVSVATDRAWTDGKGERREETDWVTVTILNEKAAEWVLANVAKGDAVYAECRVADGSYKGKDGETVYTTDIIANAFHKLDLGSRDDAAA

SEQ ID NO: 10513 - protein, 196 aa, BradyrhizobiumColbertium
MARARLITFALLSALAATPVLAQVTSSGWFPVPPDAAFDTGDSWSNAGTTYRLYGVQSCLRGTSFTNAHGIKRDCGEASLAMLVALIRDLRPQCYEAAELPQTRTAFVFCVAVRTEGAGKGSRIDLGTALIATGFAFAALKPDGSPVHAPYLEAQHVAQKSRTGLWAFPDLPDPNTIILRAIRQASPSAAATPPPQ

SEQ ID NO: 10514 - protein, 166 aa, BradyrhizobiumColbertium
MKRAAPTLMIGMALLGLVPMRAAHAQDASFGCKVLLCAAASAPSWSGIPYCVPVMQDLFRRLAHGGSWPTCPEGNASGLGYEPYQPCPAGMTAAQGGSDGNGGLTPAANGNLCVDFTKPRQTCFGGHDGCTTEYPTSSRALRSDPYYVDISTANGAQRFYFSLQGY

SEQ ID NO: 10515 - protein, 101 aa, BradyrhizobiumColbertium
MKTSFARVTLAGSLLLVTAADAFAQSTGGTLQPVQSTLQQLVSTLTGPIATALATLAVIACGLFAWSGRLTWGIAGSVIFGIVLVFGSAQIVQFFQSAVGQ

SEQ ID NO: 10516 - protein, 98 aa, BradyrhizobiumColbertium
MTEDELEDPLITPLVKALTRAPTLMGVPYMYFMFNGVVSSICFLVSHNLFMLLVAIPLHLFGYVMTLRDDRIFEILFVKSTKCPPRSRSFWAADSYSV

SEQ ID NO: 10517 - protein, 803 aa, BradyrhizobiumColbertium
MVARALLDELTYGAVSRRERPVASHVPYTRHVDDHIIRTRDGLVLTIFKLDGYSFETSDISEVNARLLGRNDIVRTLANSRFALVSHIVRREVQPRIDSTFDNAFCAELDERYNAALSKRRMFVNDLYLTIVRRPLQGQAGTFDMMLTKLLGRKDEAGESVARQTALNELRDVATAVRESLAAYGVRQLGVVNRDGVWFSEPLEFLVQLLNGGLSRPMHLPRMDLADALAMKRVFFGRNAIEIKGAGPADTRFGAMVSIREYPAQTGPGSFDNLLRVPHEFIATQSFAIVDRPEAAKQIDRVSRQVDMSDEAGSVIAEHLDDARDELLGSEAIYGEHHMTVMCLGRDLAEVGAAVTAVGAALTDRSVIWVREDLNCEPAFWSQLPGNFAYIARKGVISSKNFAGFTSLHNYPSGRPSDNHWGPAISVFETTSQTAYYYNHHVRDIGNFTVVGPTGSGKTVFLSFIAAQTQRIVPRPKLVFVDKDRGAEIFIRALGGQYETLVPGEPTGFNPLSLPDTAANREFLYQLFAFMLRPANGGDLTASEEQVIRNAIAAALSAGPEGRTLKAFSTLLRGRIRAGEGDLLARLESWMRPDQRGWLFNNEEDQFSISSVFGFDMTRVLDDPVIRTAALMYIFHRTEELLTGDPVMIFLDEGWRLLDDDVFAFFIRDKLKTIRKQNGIIGFGTQSAADIVRSKASNTLIEQTSTNIFFPNPKADDESYKQAFRLSGREVNWIRSTAAESRSFLIKHGRDSVVARLNLAGMPDLIKVLSGRTETVAELDAIRAKVGDDPAAWLPIFLGRSEP

SEQ ID NO: 10518 - protein, 278 aa, BradyrhizobiumColbertium
MKLSAILAVLLVVGATPAFANIPVNDAAQLTQKSDTASTTIKLVPVTTQRKEANSGVKCAVTTGKKASITNPAVQPQAGAGAQSIQSYGPDLPLSKDATAQGAALNSQTLFQSSGDVVGGLDASRSTITAAKSGFQTATGQVGTAQTVMAALDMNSAARLQNNLVWNNVIGSANLWVTAINALNLAQTSDMSRAAMGMRATASPPTTTQGPACPAGTIGAGTPSDPCRSPSTCQTTPPGATPDPACVSARYVDTNNNVLFFLAQIQNAANAAATLTGR

SEQ ID NO: 10519 - protein, 217 aa, BradyrhizobiumColbertium
MAQVPVIDNANLAKAQQIATDTKSILTADQQIMQFTQKTLQAVTGDRTSQAQGSLAQMALGSGFSMAQAPSLGSVISGGALSFAGMGAGSQNIVSTLINGLQLVQTITGLANGQTHAVDTAYKNSVNVAATLSGLINSTQSAVQTRSQAFTQGGQQIGSAQDLKGSVDQNTQVQIQTGQTVNELNGVVNNAAAAANQANLDRIAAESSAARAMKFTQ

SEQ ID NO: 10520 - protein, 62 aa, BradyrhizobiumColbertium
MSPRVIAVAIVVALVLGFAAGRAYFSSGHPSAANNPSTATQDDAAAAASRAMTFTQPKAPAK

SEQ ID NO: 10521 - protein, 64 aa, BradyrhizobiumColbertium
MTITLRCCILCLLAVALAGCAYKPLKAPCSPDEGGTPLAYTDTPSHQVPAAFTALDSCGPMRPI

SEQ ID NO: 10522 - protein, 238 aa, BradyrhizobiumColbertium
MSDATASEPKRIDPRYYADGATWEHDIARRNRNSRALAWIVAAVMSVVAVVALGVLALLVPLKTYEPYMVVVDKTTGFVEVKRPMAEGALTQDEAVTMFNVVRYIKARETYDPRALKDNFDLAQLLATGDAARELTEIYSPANPNNPVKLHGTNSEIAVNIKSVTFPNNRTALVRFSTDEKTATNVVTRNWVSLVRFRYSGAPMRNEWRFDNPLGFQVLEYRRDQESAPSPGTAGAQQ

SEQ ID NO: 10523 - protein, 267 aa, BradyrhizobiumColbertium
MIARILGTALALCLATAPAFAEALPRPGRTDSRVRDVSYNKDNVTAIDASYGTSTMIQLQSDEKIETLALGDSVAWKVEPNRKGDIIFVKPIEKNAQSNLNVVTDKRIYVFLLRSNTRPAGNQIYAVRFRFPEDETNAKLLAEAKERAANPNLASLNIANANSNYGYKGSSANKPVAVFDDGTKTWFRFEGETPAIYIVDADRNESLVNFRTEGPYVVVDKVSPQWTLRNGQESTCIFNRRLTNVHEPNGLEPYAPQRVGMAANGGG

SEQ ID NO: 10524 - protein, 392 aa, BradyrhizobiumColbertium
MTTPDKEEFTTTQFPAPSLSAPRPQTNQGTIVIPKAPDVPPPPPVPPPVTIQPPAAPEPPLTLNPPNDDEARRLAELERQRKEEEERRKWERLRAPQVISDNAAATAGSVNPDSNGSSNATQPDDDPNRRFLASVSAAGVDTARATKNPRIDALVAQGTMIRGVLETAVQSDLPGMVRAVVTENVWSFDGRRILIPAGTRLVGEYKSGITQGQTRVFVVWTRLLRSDGVSVQLGSNGTDDLGRAGNAGFVDNHYVERFGAAIMLSVVGGAAQFLSAYGQNNNNIGNGTIITTTDPVTGAITQTQTGVNQNQLSLQARQIAAQNVSQTLTNIAQEALRNSINIPPTIYLDQGTRIIVFVRRDLDFSAFYPDPVKEALQEIRRERAGQKPDGLH

SEQ ID NO: 10525 - protein, 351 aa, BradyrhizobiumColbertium
MNAPARSLTVFIDRALEPVRPWLEDDQVVEICANGPGEVWVERFGQAAMERHVVDQLTEQAIRHLAERVAGHSGQSVNEEHPLLSAALPTGERFQGVIPPATTGGGGFAIRKQVIKEMRLDDYRKLGSFKQVETAGEGALSDIDRQLCEHLDAGRIEEFIRLAVVNRYSILLSGGTSSGKTTFLNAILKEVPEDERIITIEDTREVKPIQKNYLPLVASKGDQGEARVTVEMLLQASLRLRPDRIFLGEIRGSEAYSFLRAINTGHPGSITTVHADSPAGAFEQLALMVMQAGLGLRREEIVAYIKSVLPIVIQQTKVGGWRGTSAIHFSRMAEWRQEREAGSSHGTHRRL

SEQ ID NO: 10526 - protein, 726 aa, BradyrhizobiumColbertium
MARIVVFRLGVALICAVAFCLLWSLAYEIAVGWRWAPTRFPSEGATRWALLRMQNADRSAGFFLVAWQHFYERILYAPTRIETLIRGAYAAGGVVALGIAGLIFGIVNRRQMPYGAARFGTLMEAAKQGLTKKQGIILGTLNGATIRSDEPAHILVVGPSRSGKGTGFVLPNGYLWQGSAVFFDPKRENFDALANHRKAIGNKVFMFSPGSPDTHRYNPLDFVRRDERMATDCLVVASFVIPEKADDTWAGAGRLLLSSLIGYVLASPLTKGAEHMRTVARMTTTGKDISTVLRAIVKTERSHLPTWVIDSFNQYIALEPETRNSAVFNVNMAMSLWNNGLISAATETSDFDIRELRRTPMTIFIGCTIAELSIFRPLIRILFQQIHDLLMEKIPGADEPHQVLLMLDEFYHVGRMDSLISKITISAGYGFRMAIVMQDIAQLDELYGRSTRITTVSGSQIKLFIQINDLDTSEFVSEMLGETTQVYKTPVMRPGQGIFAPRVWTPHYTPRPLRSPLELREMSARLSILMVKNSPSFELTKIRHYLDKPYRALYEAAKGSPPSLPRLKEWQDEELSGAIAPRSDTETITAEEPAPPKSTAAKKAVSQPARRKAPARRKKEPAAAGATESAPRPEQEPPRPLELGPQRTTLRPPARTISLGAAPTPPTGENCDVREILAAATDGQDDEFDSMMKVLRAESTPKVRAAAEALRSLNQSFGDDAPRAPD

SEQ ID NO: 10527 - protein, 268 aa, BradyrhizobiumColbertium
MNIKGKRVLITGGSSGIGFALAQALVAKGASVVVSGRREAALATAVAELGRTGAAVSSVAADVSTPAGRDATLKHAISALGGLDILINNAGGVRAGRLENTPEEELQAMIEVDLVAPILLTREALPALRQSGDAMIVNVASGIALIGAPFYATYAATKAGLARFGEALRRELKGEGIHVLTAYPGGTDTPMMQSNRAGPELGFSREPASAVADAIVDGIEANAFEVVRGGEARAQMIALNRDNPGAVDERFLGMKAALEDAVKDHSAL

SEQ ID NO: 10528 - protein, 292 aa, BradyrhizobiumColbertium
MTSSSDYTPPKIWTWTKPSGGAFANINRPISGATHDKDLPIGKHPLQLYSLGTPNGVKITIMLEELLALGHSGAEYDAWLIKISEGDQFGSGFVAVNPNSKIPALIDRSGAAPIRVFESGSILLYLAEKFDAFLPKDLPTRTETLNWLFWQMGSAPYLGGGFGHFYAYAPSKIEYAIDRFAMEVKRQLDVLDRRLADSDYLAGQEYTIADIAVFPWYGGLAKGWQYGAAEFLSVQDYKHVQRWADAILARPAVKRGRMVNRMAGAPSEQLRERHDAADFDTRTQDKIEEVKQ

SEQ ID NO: 10529 - protein, 234 aa, BradyrhizobiumColbertium
MIRFYFHPTPNPAKVALFLEEAGLPYEAVPVDTSKGEQHSPSFRAINPNGKVPAIIDTEGPGGKEARVFDSTAILIYLAEKTGKFLGKPEDRPELLSWSLFLASGLGPFSGQAVHFQFAAPEGLDYAVNRYRREAERHYQVLNDHLEGRTYIVGDDYTIADISAWGWLDRASRVLKGAEDPLGPYPNLKRLFQTVDARPAVARARAVGKNHTFKTVNDDETKRSLFPSNYPPAA

SEQ ID NO: 10530 - protein, 285 aa, BradyrhizobiumColbertium
MIIFSGWFVATRFSVTRELRIWDITALRFGIGALLLAPTIMRGSSRLPWAAWRQGFVFAMLWGVPFVLLVALGLRLTSAAEAASIAPTIMPVFAGVFAFVFMRQSQGPMRWIGYAAILAGLACLLSAAALNRGAPDPVGVAALVGAGGLWAAYTLIFRASGLTATQAAALICIWSAALFLPVYLFFGLSRFALASWSELLLQIIYQGVLMSGVAIFSFNRAVSQLGPSAATAIIALLPAVVAMLAIPVLAETPTLAEGLSIAVIVIGVLLASRPAPSPVHSSVQT

SEQ ID NO: 10531 - protein, 217 aa, BradyrhizobiumColbertium
MGLKQELDAFKAQFVQTAPAGRFALYTAKIEELRQSFARDNAITEGDIAPDFSLPDAKGGSVTLSALLAQGPTVITFYRGGWCPYCNIQLRAYQAILPQIAAAGASLVAISPQAPDRTLSTAETNALTFHVLSDLENRVARSFGLVYSLPEEIRAALRSVNKALPEINGDDSWELPVPSTYVVTGNGRVTLAHIDVDYTQRLEPEEILAALRSRKAA

SEQ ID NO: 10532 - protein, 191 aa, BradyrhizobiumColbertium
MLDAAMECFWNRGYEATSMRDLVDKTGITGASLYNAFGDKRAIYQRALDRYVEGSVAARLARCEELPPLEAIVAFFDDIVSRSVEDRSRKGCMLVNAALDVAPHDDEFQRIVAEVMTRIELFFRDCVQKGQEQGAITSTMSAEELGRHLLGVLLGVRVLARVRPDRILLEGVVRPAIELLDIGSSPRHRDH

SEQ ID NO: 10533 - protein, 444 aa, BradyrhizobiumColbertium
MRSPQLDKPSTQRVVIVGAGFAGLAAAKQLGGSGFDVTVVDRHNYHLFQPLLYQVATAGLSPADIASPIRSILSRYKNIRVVLANVSGVSIDEGTVIAEERQIPYDVLILATGAQHAYFGHDEWSVHAPGLKRVDDATYLRRRILVAFERAESEVDEARRQALLTFVVVGGGPTGVEMAGAIAELARKALAADFRHIDPRNARIILVQAAPRLLPTFPEPLSERAKFALERLGVDVRLNQSVTSCDGEGVRLGEVPIEAATIVWAAGVMASPAGRWLQAEADNAGRVRVGEDLTLPGHPEIFVIGDTANCIGNDGRPLPGVAPVAKQQGEFVGQLLKARAAGRTLPRFRYRDFGAMATIGRKSAVAQLGPIRLHGLPAWLLWSAAHIYYLIGFRNRITVVLNWAWNYVTFQRGTRLITGLSGSRVEDMAAPAPMEPDGVGNLNR

SEQ ID NO: 10534 - protein, 211 aa, BradyrhizobiumColbertium
MKTDEFINTLTSDLRPQRSLHWVLLCGLLCGALLAALAFAVFLGFRSDILSALTSIRFLFKFVVTLTLAITGTYATLSLARPDSAGNHRSWSLLITPVILVGAVAVELMVLPSRSWEDNLVGHNATHCLTVIPLLSAGPLLCIFAALRRGAPSEPGLTGAVAGLAASGIGATFYAANCTDDSPLFVVAWYPLAVLIVAGVAYFIGARALRW

SEQ ID NO: 10535 - protein, 147 aa, BradyrhizobiumColbertium
MACRRCRIVGVAETEAEDIVQEVLLTIHLKRTTWDPSRPIRPWIAAITRNKFVDALRRRGRHVIVPIDDFLEILGEEEKDDGLSAREMDRLLSQLKTQQRAIVQSVSIEGNSIRDTAAQLKMSEGAVRVALHRALKMLASLYRSHEA

SEQ ID NO: 10536 - protein, 220 aa, BradyrhizobiumColbertium
METAAKFGFTSIFAGRVPAVHPPLSPEAVAGNVLVSTMPKDWSLRYLERGYLFRDPIVQLLRSKWYPFTWAHAYDLGAERADVEMIRGEASEFGLREGYVVPIGLLGGVQLAFSFGANSMDVSPDELGTLAFATNIAAGQLLELTASRSNQGEARLALVTARERDCLAWAAEGKTDWEIAAILGISVSTVRKHLASTREKLEAVNKYHAVALGIRSGLLR

SEQ ID NO: 10537 - protein, 121 aa, BradyrhizobiumColbertium
MKIISTQQHAILDYITVLIFVLAPTILGISGAPAVVSYILAVVHLTMTVLTDMPLSLVRLVPLKLHALVEAIVGPVLIIGALALLPATTARWFYIAMGVIIVGVWLLSSYESSNEGGATPR

SEQ ID NO: 10538 - protein, 174 aa, BradyrhizobiumColbertium
MMRLGRASFYNAFGSKHELFIETLDLYLETLTAHFESLLAAEDNAESALVSLVDGILAIAKPTDDLWRGCFIGNTALELGAADPKVAERLKIGIASVRSLFERALSLPLRPSRLLSEDSRRLRALQCTASLQGLLVLAKSGLPAVELQAMRDALINTALQSPDASTRAGRGKGK

SEQ ID NO: 10539 - protein, 239 aa, BradyrhizobiumColbertium
MFGTLGLAFLAGCVSVLSPCVIPLLPVVLGAAVAQHRLAPIALAFGLALSFTAVGIFVATIGFTLGIDGGVFRNAGAIVLALVGGLLLLPALQTRLAVAAGPAGNWVDQHFGGFSSQGISGQFGVGLLLGFVWAPCVGPTLGAASLLAARGENLGAVAVTMAAFGIGSSVPLIALGLLSRETVLRLRSGLLGAGKNAKYGMGLLFIAMAVAILTGADHRLETVLVDWSPSWLTAFTTRF

SEQ ID NO: 10540 - protein, 131 aa, BradyrhizobiumColbertium
MNVVRSLKLAIFASTALIYALPALAFDARPFDGKAFEAAQASGKPVLLEITAPWCPTCRAQKPILEKLGAEQKFAPIVAFTIDFDSQKDLLRKFNVRAQSTLISFKGKQEVARSTGETTEAAIEDQLDKSI

SEQ ID NO: 10541 - protein, 324 aa, BradyrhizobiumColbertium
MKAVGAATALLLSTPAFAGWEPTKPVEIVVAAGAGGASDQMARMMQAAIQKNNLMKQPMVVSLKGGASGAEALMYMKSSEGDPNKVLIAYSLIYMLPLSAKIPFNWRELTPVSVVALDQFVLWDNSAGPKTVKEFVAAAKAASSPFKMGGTGSKREDHVLTVFLEQKTGAKFSYLPYKSGGEAATQLVGNHTQANVNNPSENLEVWRAGQVRPLCVFDKERISYTSKVTDTQSWADIPTCKEEGVDVQYLMLRAMFLPGKVTPEQQAFYVDLFHKVTQTAEYKEYMEKQALKPIFLTGKDMVQFLEEDDALNKSLMTQAGFVAK

SEQ ID NO: 10542 - protein, 264 aa, BradyrhizobiumColbertium
MNAPTTNEDLLYSVQDGIARITFNRPQARNAMTFAMYDRMADICLEINADRSIKALILTGAGDKAFASGTDISQFRAFKTAQDALDYEARIDRVLGTLEQCRVPVIAAIAGACTGGGAGIAACCDLRIGTETTRMGFPIARTLGNCLSMSNISRVVALVGPARTKDLIFKARLVEAQEALALGLLNEVVPDVETLQRRADDTAKLVASHAPLTLEATKEAVRRIRRTLSREEGEDLILKAYMSEDFREGMDAFLNKRAPVWKGR

SEQ ID NO: 10543 - protein, 399 aa, BradyrhizobiumColbertium
MTVHTGRHFLQIPGPTNVPDRVLRAMDMPTLDHRGPEFAELGFAVLAAMQRVFRTKQPVIIFPSSGTGAWEAAMVNVFSPGDKVLMCETGQFAVLWRGIADKFKLDVDFIPSDWRHGADLAEIETRLAADKQHAIKAVCVVHNETSTGCVTPPLEVRKLLDRIKHPALLMVDTISGLGSMEYEHDAWGIDVSVAGSQKGLMLPPGLGFNAISEKALSVAKANPGMRSYWDWQEVINFNKLGTFPYTPATNLLYGLREAVKMLEEEGLENVWSRHKRHSAATRAAVKVWGLETQCADPAAHSPALTGVRVPEGHDADAFRKVVLENFDMSLGTGLNKVKGKVFRIGHIGHFNDLMLMGTLAGVEMGLDLAKIPHRSGGVLAAMDVLKGRDVLPMTKAQVA

SEQ ID NO: 10544 - protein, 1011 aa, BradyrhizobiumColbertium
MPANKRKWTMAAEVAGKLPKSAQKDGLAARLAREITGDVLFDPYSRGRYATDASFYQIMPAGVVVPRSMDEALRALAIARDQGLKVTPRGGGTSQCGQTVNDGLVIDLSKHLNRILSLDVEGQTCVVEPGIVLDELNRQLKRHGLWFPVDVSTASRATIGGMAGNNSCGGRSLRYGTMRDNTLSIEAALADGTLSRFGEVSRDLSLVEVMDSTRALFRDMLDLGAREAEEISARFPKVQRRVGGYNLDALVPRNAPNNMAHLLVGSEGTLAFTTKVELKLWPVIRNKALGVCHFGSFYEAMDAAQHLVKLKPIAVELVDRTMIALGRDIAMFAPVISAAIKGDPDAVLVVEFAEEDQADNLVRLKQLGELMGDLGFGWNNDTRKWGGVVEIVEPALQSGIADFRAAGLNVMMSMKQEGKPVSFVEDCAVPLPHLADYTARLNEVFAKHGTSGTMYAHASEGCLHVRPVLNLKLDKDVKAMRAIAEEAFALVREYKGSHSGEHGDGLVRSEFHESMFGERLVADFKYVKQRFDPEGVLNPGKIVDAPRMDDRSLFRFKPDYRVSELRTELDWSAYPGADGGFQGAVEMCNNNGACRKLEGGVMCPSYRATHNEKDVTRGRANTLRLAISGQLGPDALSSDEMMETLKLCVSCKACRHECPTGVDMAKMKIEVLAARARSHGLTLRDRLVAYLPRYAGLASRFAPLANLRNNSPLLRRLLERIAGISARRALPAFRSDVFASPADSVGPEGGREVVLFADTFNRIYERENLDAALRVLTAGGYRVHLPKQASGTRPLCCGRTFLSAGLVSEARAELDRLVTAFAPFAARGVPIVGLEPSCLLTLRDELASLRKDDQAKAVGAHALTFEEFLVQEAGAGRLQLPLGTIANKAIVHGHCHQKSFDAFKPVEQVLRLVPGLKVETIESSCCGMAGAFGYGADTYDASIEMAELSLLPAVRRADQTTLVVADGTSCRHQIHDGTGREALHVARVLAMSLDRAETHSTSQAAKEASND

SEQ ID NO: 10545 - protein, 142 aa, BradyrhizobiumColbertium
MTDLTLDTARKILDAAFAKAGELKLKPLVVTILDARGVLKLAAAQDGTSLMRAEIAHGKAYGALAMGMGSRALFQRAQEQAYFIDAVNTIARGALVPVPGGVLIMDGATLLGAVGVSGDTSDNDEACAVAGIEAAGLKANAG

SEQ ID NO: 10546 - protein, 131 aa, BradyrhizobiumColbertium
MFAAKAAMADILGCGVHLVSPGMMRRIRGSQSKAGESPLEWLARIAIIDTVAGNISADEPVIVRHSGIMGGKPVFRGTRVSPGPVFALLADTSIDEFVRAKYPSLERDEITTALQQACRLLERNAPWVEQG

SEQ ID NO: 10547 - protein, 39 aa, BradyrhizobiumColbertium
MTVVNICLVDAPADCSPASQTFAINNGPQRALRRPASAS

SEQ ID NO: 10548 - protein, 508 aa, BradyrhizobiumColbertium
MENAVSTGAAADSADCDERLKGVPRLLRYAMLVTDGSQHVIERLIAEIHELCPQLPHTVAWAVARTLDSALELAAELDHRAVAQDQPNLRSLADCVRLLSLPTPHGSDYIEEHRRVGKALVQAFYASARHVEQELCCDLEGFTFGWAALPACTGMLSRRASAATNAAYLGRRIAEQRVTAAKAAVRRKLAEEHRKKREAEEQETAATLQVTPAATAEAIPAGHVIVAHLEKSEMMNPKLKEILKPLAHVINTPLPLVEAPPLLRVRNALAFEFPYALNVIDFALADLVGRATVRLRPLLLVGDPGAGKSRFARRLGEILGVSVWREDASRSDGAVFGGTDRRWDSVEPCHPFLAIARGKIGNPLVLIDELEKAGTRSDYGRLWDCLLGFLEVETSARYPDPALQTTLDVSQVSYVATANSIEPLPSPIRDRFRVVMFPKPSADDLDALLPAVLDDLARERGLDAAWVPPLDGVERAAIGQSWRGGSMRRLRRMVEAVLRERDQRAARN

SEQ ID NO: 10549 - protein, 203 aa, BradyrhizobiumColbertium
MRDTTDAQTPNDFFISAKTTTAIPVRHPTVRDALIQASLDPQVRSIDYVASAQVASAQVALDAVVLQREHGRYVLDIVPARRVLDLDEGGLALIAWDELKLEPLEVTAEELSREPRRSNANLVWTYSGVAVPVGVRLRIQQVLLEEGPMALGQLLKALDGEGEPAVAVMALACANLVCLDLFSQPLSPTTLVRLCVQAGTHGL

SEQ ID NO: 10550 - protein, 264 aa, BradyrhizobiumColbertium
MELTRGWDLPAPDARPRFDVLVVAGDLIPRMERGVRWLHERVPDRPVIYVPGNHEFYGADIDRTVEKARAAAAGTNIHVLQHDYVRIGDVTFAGATMWTDFDLFGDADRAMFLAGERMNDFRKIRIGGYARRFRPPHALIRHQQARAFFESQMRGPRPGRLVVISHHAPHPGAPSPLSDPPRPDEILSAAYRSDLTALMRPAANDGRGTLKPADLWIYGHTHASDDTVIGATRVVSNAKGYGPWPPQQRAWDNRSFDPKLTIEI

SEQ ID NO: 10551 - protein, 297 aa, BradyrhizobiumColbertium
MMARDERDWRGELVRAYPDLFHPAGDPPPARTLPDVADGWRDLLERVCARMQAALQPGETIRIIQIDKKSGSLRVYWRGDVTPQTAARLHEAIALAKARSTCTCESCGAEGQLCFVGSVYMIRCAAHVQGELIPTPPGRENVHLVRVSMADGYRIVARRYDRLADRFADEDPEVRETRRPETTVTADWRVDLMQAHPKLFAIVQAKPQASFGYPSCRSGWRDVLDQLCRRIEAALAHNETFKFVRIGTKLGLLWIKWEGEVSGESRAKIEDAISLAVQRASWTCDICGLEGSVAAAC

SEQ ID NO: 10552 - protein, 66 aa, BradyrhizobiumColbertium
MAEQGKPAKAGKTAVPQPRRNFFATLDAELIKSIKRVALEDDTSASEILEEAARDWLERRKKSPKR

SEQ ID NO: 10553 - protein, 215 aa, BradyrhizobiumColbertium
MSNSTAMPGHEPRQDGEARLRGRLGEGGAPIESTAPAGGAATHPGADHDGRMLDVSSPIVRALVEISPLRWWRSMPADAFRAAEYLAVRSTLEEVTRLIEGAEVEPALQGDAEAAIALARSLMPIKRLGGIKTDIAMTALLSLALEGEPRCALVLAHVIDRAEHDAQKADQLCGSWLAFRFGRSASCGGFSPAETALLKTLRAFDALRPGREGRA

SEQ ID NO: 10554 - protein, 310 aa, BradyrhizobiumColbertium
MKFPNETIPMVQPCTHTIYRPFGGVEDYRQIHDPAGRLAVTAFPLSMARSLAATCELWSACYVIAGRDEAYIGESNRAVRCVAEHAAAASNIFGAEAYLLHAQEPHVLPWSARLRLAHRLNELAKEAGLVTLANTVEPRGLPCPGEHAAALERLVADGRRLLFDAGCRIFNANLVRQLPAEAEFDDNQAVNAVVETGLPMAPPAEGELEFDYCCIWARGHHDREGFVVRAGSEVRNIETPSLRQNIKKLRADLLATGVVVPIAGIKDRLRFQVDWRFFSAAVAAKFVAGAHVAGTKWVRPRTPGPIAGAE

SEQ ID NO: 10555 - protein, 49 aa, BradyrhizobiumColbertium
MQLAWHDPQRSRTPGLASSMRGIASAGHGPRPIHATPSRRMTSGLATRA

SEQ ID NO: 10556 - protein, 629 aa, BradyrhizobiumColbertium
MAVRLDVECVEASDGEPNPHAHSWLSQRVLKPHGFGPKERIEWSRLFLYDDGRYVRALIGGRLTLGCAILGIDAYVDPRRNKAKGEGSPEKRRPRWMFRASNEGRKVEAIEQLAKGRELKKKGEATKQDPEPEEGSVIVTNAAMYSVPKKRSGELREKFADAAQKAGYEVYARSGSNALALHGTSVTFAGGKFRIAATGRSEDAAIVARFARELNWPALVVKGGARLADLVAIEAAKEHVFMVNRAPRGPARDLIARAFYSEMKDDIARHDLLGIAAGFYAKFEANQAAPQVAEALDAALQVDVGCDLQMPAKPVVPNTAPARWSNVAEPASVAVPTATSENEKHVTVGWDDVRRAAAFSSEAIAPTSGDRSEARRPSRVGGPSNPPRSPADLRVPSTAPIEASEVGALASAVAPIASPGNGSRRVATDGDVRRATASSSETIARASGHRREASRLPRLGVASNSPSRSPAGPRALSTAPLRPSEVAGLASTVAAIATSGNDSPHEAAGADARRTAGSSSEPLGGFEMPLQADSWKVKPDPIRSGRDALALEVGFKRQRQIHEELDEFLRRKTGQSPGLRREGAASPRNAKLQQPTRPPQPIPQWPAEIPGLNDEAVETEEPDYQAPRF

SEQ ID NO: 10557 - protein, 51 aa, BradyrhizobiumColbertium
MRVVCNLTGDEGRFGGAEALHPQRLAAGVIWLRSIQVVVLTGCDRQAEGLC

SEQ ID NO: 10558 - protein, 119 aa, BradyrhizobiumColbertium
MVVSKANPAWTVQSIDEGQNSDDGLKAKLRFFNLVPGCAAILKIADGPTIFEQSPFASVRSRAINPVSARLEGSCGEGSASLTLPQLRAGDHYSVFLRKESQRLRLTGGLDETEPHRER

SEQ ID NO: 10559 - protein, 459 aa, BradyrhizobiumColbertium
MVFVSDSFVFLFLPLFLTVYAVVSARLRNATILLFSLVFYGWWRFDFLPLLIAIASWSWATGLWIVRSSGRERQLALTAAIVAPLASLIWFKYANLLVETASVLGAPVEHWTAIPLPIGLSFFVFGAISYSVDVFRKTVAAEPSFVNYATYQAMFGHLVAGPVVRYQSVAERLSSRTFHLSEFTEGWRRFMLGFAQKVLLGDTLAPLVDAGYALPNPSVADVALTVTAYTLHLYFDFAGYSSMAIGLGLMVGLKFPENFDNPYLSRSITEFWRRWHISLSSWLRDYLYIPLGGNRVGKVRSYFNLLITMALGGLWHGASWTFLVWGIWHGLGLIVARLWNVAGAPPIPTFISHLLTLAFVMVGWLLFRAQDWQAAQTMLSGLLGFHGLALSSPMAAAARPTELLTVCIGLLAVYAPTLPPSRLRAYIARPPFELALLLWLCALWTIQSRTVIPFLYFQF

SEQ ID NO: 10560 - protein, 350 aa, BradyrhizobiumColbertium
MLRVVLVLAVIFSGLVSVLIRGHGSLGEVLKTTTLNDLADGRFAQRIDKAVLGAVPRSTDLDGLVSGIEYRLLGDAGPQVRAGCGDWLFTMEELRAERHAGANMALRAELLRGLAHAVRQSGTRLIIVPVPDKAAQVEDRLCGITAAQSRLRDQFWNELGRMEGAVVVDLRDNWPRPGYWKTDTHWDQTGARFAAERIAQAVAHTLEPAPETVKLIEGTTRQRTGDLARLSGLTDAPRVLAPQPEQERELKADISRSGGLLDDTPEPSIILAGSSFSMNSGFFEYFQNSLAREVAQVSWPGGGFAGALLELLETRSGSLEKAKVVIWEWPMRSLTFPPSEAEKNFLRRIR

SEQ ID NO: 10561 - protein, 326 aa, BradyrhizobiumColbertium
MAQSVTRLMVITAAALLASAPLTSVATARDAVIEGKSNWLFAGWESLTVARPDAERSSIELISEVGQLLAQKNVKLIVAIVPLKPRYYESLLPDGSKLSDIVRQRYDRELTGLRTAGVAAPDLRDALKTVIADKKEVFYRTDFHWTTFAAEASADLVASAITADGPLPGKAGSGAQLGEWMNDRHLGDLAANFLPPDRKRAIGPEAYVIRGPAKPAVGLLDEDPAPVAVVGNSFVQPYFGFPQRLSSKIDRPVALKWNPGDVGPWATLLQFLRSAEFRTSPIRYLVWQFNEAQVQNGPDAVGEWASQSISSRVEWRMKVSDALKNR

SEQ ID NO: 10562 - protein, 761 aa, BradyrhizobiumColbertium
MAALATFSSNQELESRQSSIRQRLAQQPAGEGYKALERGDPKAAVRAARKAVEYGPDVMSYRLLLLAAQLADDNLVGAAETASEAIKLDSGNYVPLVWRAYISQKLGNRTLAVADFNAALAVPDLTDAEKKQIRLIASDAALASGDARAVQILLQPYAKTDPSVVTRIGDADAAAEGKATLKGDGRLMPMPVQDCRDTPYGSVCSLQAPLVQSIATPIDKKAEGMEAAGKAYEAARAKNYSVAIEQAKKAVADTPEIASTRLLLINLQLTAGRPAEAEATASRAIAEGVVDAEIYAQRGFARSRIGHDKGAMADWETALARGLPGDQIRNVRLALVDTALKAKDPQRALRSLPRVGLDYDFTIRRAYAYQALSRKEEALRDFRSAERLSVTNVQRDGAIQAQINTLLELDRKPEARAIFDAAIARGQLKSIRGADVAYIGVAVGNDKVALELFDRAKANGALPPRATIDAGYTAMRQFLNPKAIAYLMEGIDAKADGRINIDDQKLFETRRTVADLTRVWGINSSISYGKVGSAPNPFLTINSPASTYTSQFGSELYYRPEAFGNRNGALFEVFGRLFETLYDEAGGPTRLRTTQGMAGARWKPFSDHNLVFEVDKLFRLGNAARDDTLLRAAYSYTVGTDLRAIDTHWPTWYIYAEVDRFFQKTQLIGLFEGRFGHSFRLDPISRNLVFFPHAVVAASYDDSFAVRDAFSAGVGSSIRYWFGETKYLAPPSYWELTLQYRFRLAGDRRAEGIFAQTSINY

SEQ ID NO: 10563 - protein, 45 aa, BradyrhizobiumColbertium
MANVILSDVGHNFRRILAWLRALLCLFLATLIAAISDRSPLQSAS

SEQ ID NO: 10564 - protein, 40 aa, BradyrhizobiumColbertium
MNSKLASRLTFRDPITFATSSGRGRATPDGLLRHAVRRFA

SEQ ID NO: 10565 - protein, 508 aa, BradyrhizobiumColbertium
MPILRQWAERHPEKIAARVAFSKDILTYGELDRRANGVTQILVWMGLTVGDGVAIMLDNDLTYFELLWGARRHGVYYTPVSTHLQPDEAAYIVRDSGAKIFFVAARFADTVRALKANNTNRCAIFVIGGSDDGSFDYAAELSRFDRMIEIGDGPVGKDFFYSSGTTGKPKGIKQPLFSSVRQAQASGDWVRSNFNFAQDTVYLSPAPLYHGAPLRFTMRTLESGGTAVIMTKFAAEPALAAIARYRVTHSQWVPTMFFRLLALSAEIRARYDLSSHRFAIHAAAPCPPVLKEQMIEWWGPIVWEYYAGSERNGATCISTAEWLAHRGSVGRACVGTIHILDEAQNELGPGQIGDVYFDGPQFVYHNDPEKTARSRNALGWSTIGDVGYVDEEGYLYLTDRRSHMIISGGVNIYPAEIEHRLALHPQVADVAVFGIPNPEYGEEVKAVVQLKNPSQASPALAQDLIAFCRAELSHVKCPRSIDFELELPRQENGKLFKHVLKQRYLQPA

SEQ ID NO: 10566 - protein, 354 aa, BradyrhizobiumColbertium
MSGTSQARSRSAQTPPRSAIDTGYVGLVLSGAREAGLDINRLLRRAGIANGQLDRPGTRLPQEQFARMIATLTRQTRDELWLLCSRPIKPGTFRMMCRLLIRCTNLREAIRIGCQFYHLVVDDFAVRLAEGEHDASVYVTDRIDQPNRRRMVNGAILLFTYGLMCWLVGRRLPLITVHYVFSEEPFSSELEPFYRAPMLFDQPRTEIRFDAELLHLPIMPDEERLRRFLASMPNALLVRYRDDSSVAERVRAILRRNLKRPMSLEDVAETLAVSPQTLRRRLIEEEQCGFQELKDRVRRDIATHMLKKSRLPLEEIALSLGFSELSTFHRAFRRWTGLTPGEFRERHAAAADAR

SEQ ID NO: 10567 - protein, 291 aa, BradyrhizobiumColbertium
MNYPDVLTIQDRYQVKTPRPFAPGGEVAGLVSAVGPGVTAFSVGDRVAARTGTGGMAELVAVAVDRCIPIPDGMSLADGAVMQFTFETAYYALHTRARLQAGETVLVLGAGGGVGIAAVQVARNLGARVVAAASSEEKLAFACQHGAAEGVSYPVEMPKQRSEVALRLKAAVGPNGADVIIDPVGGWLAEAAIRSVAEGGRYLVLGFAAGIPSLPLNLPLLKNCDVLGINWRTFTLSEDPRIVANRRQLQDWYEQGLLSPGITAEFSLREGGEAIRRLACRQSVGKIVVVI

SEQ ID NO: 10568 - protein, 271 aa, BradyrhizobiumColbertium
MDKAFTKGLRLLEALALSEQPRGVTDLASELKLTKSNVHRLLMTLQSQGYVRQIPPHSTYELTTKIWALGSHVIHRMDLINIARPAMTKLAEITGETIHLSVLEDTDVVYVDKIESAHHIRAHTSVGMRAPAFTMATGKAMLAHMPDDYLERFRPHLKRYTETTRTTIEELREDIELARTQGYSSVLHGEWREGIAACACAILGRSGELVGAIGVSGPDTRIKRKQIKEYSVHVMEAARAIGAALGYSNRPAAHPAPRSDSMPSHQPRRTP

SEQ ID NO: 10569 - protein, 376 aa, BradyrhizobiumColbertium
MTQINFNWRKEKMLGMKRWRLTASVLASALFIAMGTGLAQAQSNVVIMQDPGGGYGDALRKVMYDPFEKETGIKVVTVQEARSGPRIKAQAEAGKAQWDLTFIFDQETKLLGDCCLADIDYSKLSDAAKQTLAAMPDNLKRKKGVALQVIGVGLVYNKDKYKGANVPTTWADFWDVKKFPGRRCMPAWPRFVFEAALMADGVEKSKLYPIDMERALKKVKEIKPHIAKWWTTSAQPPQLLLDGEADMCMAYTGSMSKLALEGAPIELTFNQGFVYYDFFSIPKGAPNYDNALKLLSWRLDPKRAAQLTSTFPVALPSQVVFEAATDKKLARYWANNPDNVSKAIEWSPDYWGAPSPAGNSTNEEYGQEKLNALLAQ

SEQ ID NO: 10570 - protein, 596 aa, BradyrhizobiumColbertium
MTSASLGALAGRPGTLDLVRRLKDPALLLLPALAFLAFIYLLPLIDLIRISVSGPSWSSYFERVFAIPLYWDSLVRTMQISVTVAGLCLLFGYPTALLIHRSRGIAQVLIATAIVLPYFIAILIRTYAWMVLLGRNGPVNKLLVSIGILSEPVQLLFNRGTVLLGMTAVLLPLMVLTIYSSVARLDQSLTRAALASGAGPIAAFWRVLLPLTLPGMGAGFLLVFVAAIGFFITPTLLGGPGDQMFAMHITQQADSVTSEGFLQALGVVLLTITLAVVAVAGRFLGFEFIWGGRKLTEATPRTTDRPAADVGRRSLSATAADFVGWPLLRLFGRLPASFGTWTVRLVGGLVIAILILPIIVVMIISFSSASYLTFPPPGFSFRWYEQFFSDSNWMRAFWTSLVVAAMSAGIAIVLGASAALGIVRSSIRGKSAIMLLLVSPIIVPPVVLGLSLYSLFLRFDLVGSVFGLAAAHAIGGLPLVVVILSASLQGVDTRLEQAAAVHGASSLTVFRLVTLPAIMPGLAAATFFAFLHSFDELVLTLFLSSAELKTLPLMLWGDINYRLNPVLAVVSTLEVLLVVAGLVLARPVLATSRKAT

SEQ ID NO: 10571 - protein, 384 aa, BradyrhizobiumColbertium
MGEPAAQRAMRSGDANVRTLPTGRLRDRDAIGSSISVREAVKTYGSFHAVDRISIDIEPGEFITLLGPSGSGKTTLLNLVAGFQSLDSGEILVDGKPVHNVPTHKRGFGMVFQSYALFPNMTVSQNVAFPLRMAGVDRATAERRVAETLEIMRLTEHAAKSPSQMSGGQQQRVAIARAIVRRPKVVLMDEPLSALDRRLREQIQIEIRDLHQTIGSTILFVTHDQGEALTMSDRIAVLNAGKIVQIGRPLDIYRHPTDRFVASFVGESNLIEAEILQKRGSTLTMKNRAGYVFSAESRDTIDVGRATVLVRPERIAVSNEPAANSTPVSVTSAIFLGEILRIEAQMDGGDPLLIRCTDMADRPLPAVGDRLHVSWGAADCWVLA

SEQ ID NO: 10572 - protein, 268 aa, BradyrhizobiumColbertium
MLSEPRAMAKHIEPGMRVALPVDYAGVSMAMTRPMIEHGAGDLDLVCVPTGGLQVDQLIGAGLVRTVETSAVSLGEAGGAPRFNAAVKDGAVRLKDATCPAIHAGLVAAQKGSPFMPLRGLIGTDLLRHRDDWRVVDNPLADGGDPIVLIPAIKPDVTIFHVPMADRFGNVWIGRRRELAAMAYASRTVLVTVERIVEENLLADEMSAAGVLPALYVTAVARAPKGAWPYGLWGEYPADSAEIARYAKAARTAEGFSAYMAQAQMEPA

SEQ ID NO: 10573 - protein, 252 aa, BradyrhizobiumColbertium
MADVLPREVLICTIARLLDGVRHVAVGASSPIPAAGAMLLRALKEAGGAVGPRISILGSVEHNFFTNGSAELFDCAGQGRIDAFFLGGGQIDGFGNVNLVGAGDYPRSSVRWPGSFGSAYLYFVVPRVILFREEHTPRVFVEHVDFISAPGVSAEGVFRSGGPVALLTGKGLFRFDKTRPGFELESIHPGHDLAEIKQATGFQFKHDAEPRQTPLPDGSTLELLRGRVFDELAETYPEFAAQIRRDLVAVDA

SEQ ID NO: 10574 - protein, 770 aa, BradyrhizobiumColbertium
MSRIKRVPHCSHWGAYTILVEDNRIVGVEPFEHDPAPSPIIHSVAEWANPDRRVLRPMVRSGWLDKREKSDRRGRGRDKFVAVSWDEATTLVADEVRRVAGTFGNASIFAGSYGWTNSGRLHHASSLLKRMLNLVGGFTRHVDTYSIAAGPVILRHTLGSDDACGGRANTLDTIAQHTETLVVFGALSPRTAQNEAGGIGSHRLETYLRKIVERGVKIIHVSPLRDDLPDWVDAEWWPIRPNTDAALMLGLAGEIVKAGRHDTDFLARCTSGADRFLRYLEGQADGGRKDAAWAAGICGLDAGQIAELASRLVDTRSMLTVSWSLQRAHHGEQPFWAALGLASVVGQIGLPGGGVGYGYGSLGGVGAPINVGKSPAISQLARPIDSFIPVARISDMLLNPGASFSYEGETRSYPDTRLVYWAGGNPYHHHQDLNRLSEAWTRPETIIVQDPMFTATAQRADIVLPATTSIERNDIAGNRRSDFILAMKKAIEPLGEARSDFEIFNEIAAKLGMADRFNEGRDEMGWVRHLYEACRSDASQRFGFAMPDFDAFWEAGYARCPVKTEHTFLADFRNEPEAHALKTESGKIVLGSETLARLDYADCRPHPAWIEPAEWLGNAADAGQMHLISHQPAGRLHSQLETGASSRAMKRNGREQARLHPDDAAALGIDDGQTIRIWNGRGECLATAEITDKVRQGVLVLPTGAWFTPTGNSGLEIAGNPNVLTLDIGTSQFGQGCSAHTSLVRVEPYAADQRDAFGAYQESLVALAAV

SEQ ID NO: 10575 - protein, 189 aa, BradyrhizobiumColbertium
MSAPAISRFPVPDIATLPTDIRSRIEAVQEKSGFVPNVFLILAHRPDEFRAFFAYHDALMDKPGPITKAEREMIVVATSSANQCQYCVVAHGAILRVRAKNPQIADQIAANYRKADITARQRAMLDFAMKVSARAYEVDDSDIQDLKAHGFTEEDVWDIAAIAAFFGMSNRLANVTSMRPNDEFFSMGR

SEQ ID NO: 10576 - protein, 219 aa, BradyrhizobiumColbertium
MTLRAPPPLERPLDVLTGTDGGIELRESGKPLATAHAARVDVPDVPRVSYETAENAVGRTPYDEQSHNLPGCFVCGPARSHGDGLRIFAGPLEAGAVPGKPVVFAASWVPHGSLSGEDGHVAPEFLWAALDCPTGYCSVGARHLGLNGDETALLGRMAARIDRRPRPGDRCVVVAWPTGRAGRKLFAESALLDAEQEVLATARATWLLVDRQVQLGASA

SEQ ID NO: 10577 - protein, 230 aa, BradyrhizobiumColbertium
MSGREAEFELRQSIIDACREMAAQGINQGTSGNISVRTDGGILLTPSGLPYDRMKPEDIVAMNWDGSWTASAGNVPSTEWRFHLDILRSKQEVGAVVHAHPIFCTIIAIMNRSIPAIHYMIAAAGGNDIPCAPYAQYGTAELSQAALNALRYRRACLLAHHGLIAIGPNLRKALWLAVEVEVLAKQYHGCLQLGSPPLLPDEEIDSILKRWGQYGLRDNDGKPETRHPSS

SEQ ID NO: 10578 - protein, 320 aa, BradyrhizobiumColbertium
MAHTHDVSVCGTYILDILGVPVTEIPPGGGRLLIEEIRLAVAGTAGGTVVPCARLGLKALAVGAVGSDEKADWMLNALEREGIDISLMERMADSPTSATILPIRPDGSRPVMHARGASARWRIAPETQKAACRSKVLHLGGVGSLLAMDGAPSVALLRDAKAAGCMTTLDLIQARRETLALVEPLLPYVDFFMPSIDETNAMVGTDDPAACARFFIEKGAGACAISLGADGSFVMTRDGRQFSVPAFEVAVRDTSGCGDSYTGGFIAGLVRDWDLLDCARLATATAAIVATGLGSGANLVSFEETVKAMNTFPVRKSARA

SEQ ID NO: 10579 - protein, 248 aa, BradyrhizobiumColbertium
MARHAIVTGASRGIGRAIAIGLAKRGYDLALTDIAAQEKVLLETVAEIKEIGGRCIPVLGDVSAIGDCRRAVAEAVGGFGHIDVLVNNAGILRLATIDELTTDTWDQTFAVNTRGVFQMTQAVVGHMKERKYGRIVNIASLAARTGGPGQSHYAASKSAVVGFTRVSSMEFGGHGITVNAVCPGIIVTEMGMNNLRDPERVAYFEKVTDLHRLGQPEDVVGPVAFFASDDSAFVTGQALNVDGGIFYS

SEQ ID NO: 10580 - protein, 204 aa, BradyrhizobiumColbertium
MTMPIDFHDIDPNRVAAILYRPQDDVDALLAEFAQNLGRSGGRIGGVVQRNVKDGADCQVGMQAIDLMTGAEISICQPLGSGAMACRLDAAGLAEAAVAVTRAIAADVDLVVINKFSKQEAAGEGLRDELACAIAAGIPVLTAVPEKCLDAWNDFTGGIGTTLLCERAAIEGWWQELSSRLKQARTAHAPADAPAALLADHHVG

SEQ ID NO: 10581 - protein, 95 aa, BradyrhizobiumColbertium
MLGFAHTVGEFGLVLMIGGNIPDRTKVLSVALFDCVETSRWREASMLAGLMVIFAFAVILTMAIADKWAARGAACCCRYSISATTWPRSSASPII

SEQ ID NO: 10582 - protein, 253 aa, BradyrhizobiumColbertium
MCEAEHRSPGAALEQGAPILQARGSAPDLLWSWKVAQTLIEIWSGVASEARVIIAAARAVAPEIAVACTRKNVPGTKRFAAAAVKAGGAVMHRLGQSETVLVFPEHRAFLGELPLFQAVQRLRRAAPEKKLVIEVKTADAALAAAVAGFDVIQAEKFSPTEIAALVKRMASMAYTRARPIVAAAGGVNAANAAAYAEAGADVLVTSSPYLAKPRDVEVRIAATVESSRPAWTGRDASVPASRHAREPEGRVEL

SEQ ID NO: 10583 - protein, 453 aa, BradyrhizobiumColbertium
MGSKPVIGTSVCKWTVSYFALAVVWLLLAEVLMVAGFGFPHSDIGGPDTLVIVHMVCVGWLSTALCGALFQFVPVLVAKPLYAERWTPLALALLTLGLIVLLAGFLALGGHLNGPSWLLPLGAGLLVAGFALVVANLGMTLWSARPLPAAARFTAVGLACICVTAAFGGTFSLVLSGTGVGALWPDLLPSGVSIHAIAGLGGWLTFTAMGVSYRLLAMFMLAPDGDAELGRLAWRSGAAALAVVVVGGVLALWRATGLNLVLLLAGAAALLSLAAYGSDVFGLYRTRKRRALELNTRMSLLSLGNLVAAAILGAASAAAGSLQSHAGALAFLVAFGWLTGLVLANLYKIVPFLTWLETYGPVMGRAPTPRVQDLVAERRASKWFVLFFAGTWAAVFMLSIDSALGFRIAVALVTLATLGLCEELVRARRLADVAESLRLPLGATVPHLLVSRN

SEQ ID NO: 10584 - protein, 169 aa, BradyrhizobiumColbertium
MTDFIDVDVRPILRAGGEPFSIIMAALERLEPGEGLRLLAPFKPVPLFDVMASKGFAHRDAELEGGDWEILFKPHDGSLEAGEPAPVALSDDDWPEPAVRLDNRDLDPPEPMVRILASVERLAPGQTLSALLSREPVFLFRELTKRGHQWRGGFTPQRDAYQLTVKVLA

SEQ ID NO: 10585 - protein, 107 aa, BradyrhizobiumColbertium
MKADDDDVVARIRQSLKVVIDPELGHNIVDLGFVYDVSVDDGVAHITMTTTTRGCPATSFLKEGAANSARLVPGVEAVEVTMTFEPPWQPCMISPGVKASLGFAEVN

SEQ ID NO: 10586 - protein, 40 aa, BradyrhizobiumColbertium
MIRRDGFDELVAFRTWAGPDLLPVPAIGYEPLAIEAPTSE

SEQ ID NO: 10587 - protein, 105 aa, BradyrhizobiumColbertium
MTCANLLGEAGVLHESHIGSLRLLPQDCDMVAVVQAFRDVLDGRDDVDCGNRRIAAAYPGVPFSYGFLRAEPGHVYRLDRAEPAQGATWQAGTLLPEVTAALCDD

SEQ ID NO: 10588 - protein, 285 aa, BradyrhizobiumColbertium
MTDYPKPPYPSQQQPMPGSTRAMQPRPDHGEESYKGAGRLAGKKAIITGGDSGIGRAVAIAYAREGADIVISYLNEDEDAAEVKALVERERRKVVLIPGDIRNPEHCRAIVRRAVEELGGIDILVNNAAHQATFKDIADISDEEWQLTFETNIHAMFYLTKAAVPHMRPGAAIVNTASVNSDMPNPSLLAYATTKGAIQNFTGGLAQMLAEKGIRVNAVAPGPIWTPLIPSTMSEERVKNFGKQVPMQRAGQPAELATAYVMLADPLSSYTSGATLAVTGGKPFI

SEQ ID NO: 10589 - protein, 171 aa, BradyrhizobiumColbertium
MGFFTKDIKSMEDLLLHVLQDIYYAEQQILKALPKMIDKATNKDLVAGLKAHLDETNKQVERLDKVFAKLGKEPSGTNCPAIDGLIKEADETAGEIEDKAVLDAAIVANAQAVEHYEMCRYGTLIAWAEELGHDDIVRFLTTNLNEEKAANTKLNTVALRKGVNAKASNAA

SEQ ID NO: 10590 - protein, 60 aa, BradyrhizobiumColbertium
MDHFASLLGRAALDVWGDIPRDIQEALFETAMKGREAEREDLARLLHERHPRTLHPDRPG

SEQ ID NO: 10591 - protein, 773 aa, BradyrhizobiumColbertium
MDDTIGFPDPGLDLSDGFKPHTSHWGAFSARQGAAGLEVRAYAGDPDPNGIIDNFPGALRHQARIAQPAIRRGWLERGPGPDDRRGRDDFVSVSWEKALDLLGDELGRIRDTRGPGAVFGGSYGWSSAGRFHHAQSQVHRFLNIAMGGYVRSVNSYSSGASSVLLPQILAGYEDITKRNVTWEQIATDTDIVLAFGGMALKNSMVAGGSISKHVERGAMAAARRRGCEFVLVSPLRDDLPVEAGAEWIACVPGTDTALMLGVVHTLVSEGLHDQAFLDRYTEGWPVFLRYLTGESDGQPKHAEWAGAICGVEAEAIRNLARRLAGKRALITVSHSLQRAEHGEQPVWMGMVLAAALGQIGLPGGGYGYSLGAIGYYGRRVNDVPAPTLGQGRNGVADFIPVARIADMLLNPGSTYRYNGETRSYPDIRLVYWAGGNPFHHHQDINRLRKAFAQVDTFVVHELGWTATARHADIVLPATMTLEREDIGYSTNDPLMIAMHRIAEPFGLARDDYDIFADLAERLGAREPFTEGRTSRQWLKHLYEPTRASLAKRGLEAPSFEEFWARGSLVVPQQPDDGGRLRRFREDPINHALPTPSGRIEIFSAKIASHGDADCPGHPVWLEKTDMPRPEAPCFLVANQPATRLHSQLDFGGHSLAAKHRGREVARMNPIDANARGIKDGDIIRLFNERGACLAAVHLTDGIAPGVVQLPTGAWYDPMDPEDEAPLCVHGNPNVLTRDIGTSSLAQGCTGQLTTVEVERFIGNLPPIRAFDPV

SEQ ID NO: 10592 - protein, 140 aa, BradyrhizobiumColbertium
MIRKATAVWKGTGRDGTGHLTSESGVLAQTPYSFKTRFENEKGTNPEELIAAAHAGCFTMALAFGLQMAGFTPEELSTEAAVTLEPEGKGFKISKSALTLRAKVPNLDEAGFAKIAGEAEKNCPVSKVLNAAITLDAKLG

SEQ ID NO: 10593 - protein, 156 aa, BradyrhizobiumColbertium
MQDLIRKQPGVVSTRVGYTGGHVKNATYRNHEGHAEAIEIMFDPARTSFRTMLEFFFQIHDPTTLNRQGNDLGTSYRSAIFYTSEEQKRIAEDTIADVEASGLWPGKVVTEVAPAREFWEAEPEHQDYLERYPDGYTCHFIRPGWKLPRRAAALGG

SEQ ID NO: 10594 - protein, 384 aa, BradyrhizobiumColbertium
MSSADRPATRLATRLAFLVAGFGIACWAPLVPFAKARLAVDDGVLGLLLLSLGIGSVLAMLLTGILSARYGSRPIIIAGGLGLTLVLPLLAMAGSPTTLALALFAFGAALGSIDVAMNIHAVEVERAAGRPLMSGFHALFSIGGFAGSALMTALLSLQLRALVCTLICSVLMLIAMLVTWPRLLRSVSVQEGPLFVLPHGSVLLLALLGAVTFLVEGAMLDWGALLLIGAGLVTEAQGGAGYIVFSIAMTTGRLGGDAVVARIGDRATLLWGSLIAIAGFVILLTAPFAAAAIGGFLLIGLGASNLVPVLFRRAARQKVMPAGLAVAAVTTAGYAGVLIGPAGVGFIAQIGGLPLAFGLLAALMGLVTLSARIVTTSARQGTAT

SEQ ID NO: 10595 - protein, 441 aa, BradyrhizobiumColbertium
MSRSAEIVALFSLRRISGQIAALVLVSLVLIHILIAGYFLLSRPKMLTDRPVEQLELIVEIIDNTPKAQRAMVLDNIRRTYPALKLQLREGVSASPMPERSPLNVPSPLAGKVDLIRGATSDDNRLWFDLGNDDVLEATIGSPKMPAFVSGLWTSTLLFLVASVTLLGIWAGRALSSPLSAFARAAESFSLNQSSQPLPENGPEEIRSAARALNRMRERIGALMNDRTRMLAAISHDLRTPLTRLRLRSELIEDPAQRTQTVRDLDQMQSMLESVLSLLRSESPVKPTLVDVAALLEMVCEQFTDSGHAVSYSGPARAAFVLRPDEIVRAVSNLVHNATRFGTRVEVALSTSEDRLVIEVSDDGPGIPDERKAAMLEPFVRGEDARTMDETAGFGLGLSIAQAIVTAHGGTLELLDNAPTGLRVRLLLFGASRDNAGTSRT

SEQ ID NO: 10596 - protein, 262 aa, BradyrhizobiumColbertium
MTVVLRTRQTSSNRPTIGTPDASSIMTNGTPNILVVEDDRQTRDLILRYLGEHSFAVHAATNGREMDRQLSQNRIDLIVLDLMLPGEDGLSLCRRVRMESMTPIIILTAKGEDLDRILGLEMGADDYLPKPFNPRELLARIHAVLRRQASGLAAGPTATRLKFQGWIIDLRLRELRDPEGAQVPLTSAEFDLLQAFCERAGRILTRDNLLSMTRGRPGGNFGRSIDVLVSRVRRKLDRTQETSVIRTVRTGGYIFTPVVEEA

SEQ ID NO: 10597 - protein, 654 aa, BradyrhizobiumColbertium
MTDSIISLENVRREFTAGDTSVVALDGFSLDIRAGEMVAIIGSSGSGKSTLLNILGCLDRPTSGTYRVAGKDASKLDADALAALRREHFGFIFQRYHLLGDLSAAANVEIPAVYAGVNARERRIRANALLERLGVGARGGHRPNQLSGGQQQRVSIARALINGAEVILADEPTGALDRRSGEEVLKILKELHREGRTIIIVTHDADVAARAERIIELRDGRIVSDRRTETTAAAGPVAPAARTTTWDSRPGWSGALRRPREASRMALVAMAAHRLRAFLTMLGIIIGIAAVSSVVALGNASQRKVLSDISSLGTNTIEVFPGKDFGDARAAKIKTLVLGDARALARQSFIAGVTPTVSTSTTVRYRGNESNVLVNGVGESYFLVKGAKLAMGRLFDADAVRNIERQAVIDDNTRKTFFADDQTSGIGRVIWLGKVPCRIVGVIAQQQGGFGSNQNLSVYLPYTTVQAQFTGDRALRSILLRISDEISTNLAQDAVTTLLTQRHNTRDFVILNTDDIRRTITSTTQTLAFLVAAIAVISLVVGGIGVMNIMLVSVSERISEIGVRMAVGARRSDILQQFLVEAMLISSIGGIAGILIAVLLGTAVNIAVPDFQISYSPLSIGAAFLTSTGIGVTFGFFPARRAAFLDPVVALSRD

SEQ ID NO: 10598 - protein, 409 aa, BradyrhizobiumColbertium
MTDIITARRLKIAAALIVIVATAVLAATRFLGTSSKTQSYITAPVIVSDLREEVLASGTLKPARLTAVGAQVSGRITALNVRVGDTVKAGDVIAQIDPVTKQNDLRNSEAALKNYRAQKAEKEAALVLAEANLARQQATLAQRATSRSDFDSADSTVRQTRAQIAALEALIVGAEASVETARVNLDYTRITAPIDGTVLATVVQEGQTVNAVQSAPTIVVLGQLETMTVRAEISEADIVKVRPGQSLYFTILGDQDHRYEARLEQIEPAPESIKNDASFSSTTTSSSGSSSSSSSTSTAIYYIGVFNVPNKDYALRTYMTAEVHIITGDAKRVKVIPALAVMRKSDGRSTVRTLDASGEVSEREVKTGLNDRTMVEIRSGLSEGERVVTGEANEQIVSRGMPGGPPGGP

SEQ ID NO: 10599 - protein, 495 aa, BradyrhizobiumColbertium
MHAALSRAGSACAALLLGCTLAGCAVGPDYTGPPKLDMPREWSVKPGSRRQTATLDRWWLRLRDPVLNRLIEQAVEANPDVAKAKAVVREARATVQQTSAGLLPSVSGSASVTGNKTSAGSASAVVDTAPYTLHQAGFDSSWELDLFGGTQRNIEAAVRGQQSAEEDLRDSLVTLIGDVAAYYVDARGYQARIELARRTSVSQRDTEKLTRSKYEAGSGNAVDLAKATAQAASTEANVPTYRAALAADIHRLGILLGRPPDAVASLMARPMPVPAPRMPLPTGLPADLLISRPDVASAERKLAQATAQIGAAEADRYPAVSLTGSVGTSALRAGDLAKYSSVSWSVGPSVTVPVFDAGKRLATVRIAEAQRDQAFATFHSTLLTALEDVENALVSLSQERVRAAKLTEAAKNYREAAQLSRSLFETGSASFIDVLDAERSLYSAEDSLIQSKVSAAKDYISLAKALGGGWTDPVETSTPIIVDTNTGPHFRETVK

SEQ ID NO: 10600 - protein, 50 aa, BradyrhizobiumColbertium
MQQGPRRAMVLLCGWRGNRVGQVWLHRIGLRPIGLTAVRAVPMALGRKKE

SEQ ID NO: 10601 - protein, 128 aa, BradyrhizobiumColbertium
MDYLPMNALVATRTVLVALLLSSTLTAHAANTGKRDQQQTTQNAVYEYVPRGPNRSYQSGPRTRIYVSKRSWLDGGTEVLPGERKFTDYAFPPGASFARSNNNRPLDRQPLSPDADLGGLMQRIPISW

SEQ ID NO: 10602 - protein, 837 aa, BradyrhizobiumColbertium
MSVWRALLIVVAMSGVSIASSIPAVLLPQPASAQNVDTIVVEGNRRVDAETIRSYFRPAAGGRLDQPAVDEGIKALIGTGLFQDVKISRAGGRLVVSVVENAVIGRVAFEGNKKIKDEQLSAEIQSKPRGTFSRALVQSDTLRIAEIYRRSGRYDVRVTPEIIEQPNSRVDLIFTIEEGGKTPVKSVEFIGNSAFSASRLRDVIKTRESNLLSFLASNDIYDPDRVEADRDLIRRFYLKNGFADVQVVAALTEYDPEKKGFLVTFKIEEGRQYRVGSVDFRSSIPSFDAGSLHTYSRVNVGSLYNVEAIEKSTEEMQIEASRRGYAFAVVRPAGDRNFEAHTVSVVFNVDEGPRTYIERIDLRGNTRTRDYVIRREFDLSEGDAYNRALVDRAERRLKNLDFFKSVKIVTEPGSSSDRVILIVDMEEKSTGDFSVSGGYSTSDGALAEVSISERNLLGRGLYGKASVSYGQYSRGISLSFVEPYLLGYRIALGFDTYWKQQKSNSYTSYGVTTLGFSPRIGLALREDLSLQLRYSLYQQSITLASAYNNCNNNASNPSLAYNPTPAYIQSVLGGADPTNSTDSGVYGYGCYGDGESSLPVRKELANGAAWTSALGYTLNYNTLDNTRNPTDGLLVDFKQDFAGVGGDVTYLKTALDTKYYTPLVSDIVSVIHLQGGLLSKLGNQDLRMLDHFQMGPNLVRGFASNGIGPRDITYRSLGASGDSLGGTKYWGASMELQMPFWFLPKEVGLKGAVYADAGSLWGYQGPTSWSATGEVNTKACPTCGLQYDDGNVVRSSVGVGLIWASPFGPLRFDYAVPITKGKYDTVQEFRFGGGTSF

SEQ ID NO: 10603 - protein, 411 aa, BradyrhizobiumColbertium
MLNMPDTRADGHRVLADLHALRAFGAYKTGVHKPTFSEPHKLSLEWLVQKLPEANLSAAVDGIGNVFGTSAKHGPKLLAGSHLESQNYAGWLDGPLGVVYALEAARVLNTDPSFNGAVEVAAWCDEEGHFGHFLGSRSYVGQVTDTEIDAARDRTSGRAMREALADMGLAGRPRETAEPGRHVGYLEAHIEQGDTLESGRLAIGVVTSIVGIWQYQINFVGEQNHAGTTRMAVRKDAGLALAKFCVAIDERFPTDCGPRTVWTTGRITLDPGAPSIIPGGAEMLFQMRDDDPAVIARLEQLLRTMADEASAIGPCTVTVTKLRTGAPAMMDAGFQDAIEAASKAVAGARSIRMPSGAGHDAQMLATVMPAGMLFVPSIGGISHHWTENTADADIVTGAEVFVDACRRILGG

SEQ ID NO: 10604 - protein, 261 aa, BradyrhizobiumColbertium
MTTLRIEQVSRTFPARHGNAPTKALEPTDLVIGNNDFVTILGPSGCGKSTLLRIVAGLDRPTSGRVTLDGREVTGPGADRGMVFQSYTLFPWLTVRENIAFGLRERGVAEAERNKVADAFIRQVGLSGFENHWPKQLSGGMQQRTAIARALANDPKILLLDEPFGALDNQTRALMQEMLLGIWERDQKTVLFVTHDIEEAIFLGSRVIVMSARPGRIKAEINVDLPHPRSYKIKTTPEFVQLKERLVEEIRAEALKVAEHA

SEQ ID NO: 10605 - protein, 257 aa, BradyrhizobiumColbertium
MRPLDPVTSRQRAAYGLAFFVLFVALWSWATFGGHVSKTFLANPLTMVQEGLELLTKHGFLFDIGMTIWRVVGGFALAAIIAVPLGVLMGAYKPVEAFLEPFVSFARYLPASAFIPLLILWAGIGELQKLLVIFIGSVFQVILMVAVTVGATRRDLVEAAYTLGAGDRGIIRRVLLPSSAPDIAEILRLVLGWAWTYVIVAELIGSSSGIGHMITDSQALLNTGQIIFGIIVIGLIGLVSDFLFKAFNAWLFPWKLA

SEQ ID NO: 10606 - protein, 314 aa, BradyrhizobiumColbertium
MRSSKVFATIIALAASTPALADGVKVGIGISGWTGFAPLTLAKEAGIFKKNGLDVTIKKIPQKDRHLAIASGDIQCAATTVETWISWNANGVATKQIFQLDKSYGADGMAVRNDVAAIKDLKGKTVAASAPGTSPYFALAWMLKKNGLSVKDVTVVNLEPAAAAQAFVSGQNDAAMTYEPYLSTVRAAPDKGKIIATTLDYPMVMDTFGCTPKFLTENPKAAKALADSYFEALEMIAKDQAKSYEIMGADVKQTGEQFGNSAKYLRWQDKAANQKFFAGDFLTFNKEAAELLLEIGIIKAVPKVEDLYDASFIK

SEQ ID NO: 10607 - protein, 241 aa, BradyrhizobiumColbertium
MSLVTDTDKPTLYKRIRADIEKRILTGEWPPGHRIPFEHELVARYGCSRMTVNKALSELAQADLIERRRRAGSFVRRPQHQSAVLKIADIRAEITALGRTYGYELIQRKLRTATSADRDRLGVSKAGKVVAIACRHSADNVPFAVEDRLIDLSSVPDAATADFSREPPGSWLLHHVPWTEAEHTISAIVADERAAEALDIAVGAPCLVIDRYTWRSARTITAVRLLYPGDSHRLVARFKGG

SEQ ID NO: 10608 - protein, 452 aa, BradyrhizobiumColbertium
MSRLHFASALLPSGWAHDVQVVITAGTIAEVMPGVAPAVGDERHAIALPGLASLHSHAFQRGMAGLAELRGDSTDTFWTWRETMYRFALAMTPDDVAAVATLLYVEMLEQGFTRVGEFHYLHHDRDGSPYADVAEMATKIAQAAEASGIALTLLPSFYAHGSFGGAAPHAGQRRFVCSVDQFAALMAASRKAVAALPGGNIGIAPHSLRAVTPDELTAIVPLADGGPVHIHAAEQVKEVQDCLAWSGRRPVQWLLEHAPVDQRWCLIHATHMTDQEISAFAETGAVAGLCPVTEASLGDGIFPAHEFLAAGGAFGVGTDSNVLVGVADELRQLEYGQRLQHRQRNVLSSGAGRSTGRTLFDHALAGGAQALAQTKAGLTPGAHADIVTLDTSHPSLAGRTGDAAIDGWIFAAGSGAIDCVWAGGRKVVEGGRHGLRQAARERFNATVRRLVA

SEQ ID NO: 10609 - protein, 404 aa, BradyrhizobiumColbertium
MAERFDRIWHNARLATMRADRPDLGEIELGVIAALGGRIVYAGAQADFPADADAIERIDCDGRWITPGLIDCHTHLVYGGNRAHEFELRLKGASYEEVARAGGGIVSTVAATRRASEADLIASALPRLDALIAEGVTTIEIKSGYGLDTETEMRQLAAARNLGRQRPVAIRTSFLGAHALPVEADGDKDRYIDLVCKEMLPAVARTGLADAVDAFMEGIAFSADQTARVFETARGLGLPVKLHADQLSNLGGAALAAKFSALSADHLEHTDEAGAAAMARSGTVAVLLPGAFYFIRETQKPPVETFREAGVHMALATDCNPGSSPLTSLLLAMNMGATLFRMTVAECIIGVTREGARALGVVDETGTLEAGKWCDLAIWDIERPAELVYRIGFNPLHRRVWRGQ

SEQ ID NO: 10610 - protein, 417 aa, BradyrhizobiumColbertium
MMALKIVSLGRGASGVRREVIKQLQDMLAQAVHPLVPQQGSVGASGDLAPLAHMAAVMIGEGQAIIDGKTVSGAEALKRAGLTPLTLGPKEGLALINGTQFSTAYAVSGVLRAFRLARAALVTGALSVDAAMASTAPFRPEIQALRGHAGQIAAAATLVALLDGSDIRLSHLEGDERVQDPYCLRCQPQVAGAALDLITQAARTLIVEANAVTDNPLVLVETGEIVSGGNFHAEPVAFAADAIALALSEIGAISERRIATLVDPALNFGLPPFLTPDPGLNSGFMIAEVTAAALYAENKQRALACSIDSTPTSANQEDHVSMAAHAARRLSDMADNLAAILGIELLVAAQGITLRAPHATSRPLAAVMTALREQVPALGADRYMAGDLARAAALIEADALPAIAITTLPSDPFPRLD

SEQ ID NO: 10611 - protein, 173 aa, BradyrhizobiumColbertium
MNRRLDNDRTIRAPRGSEISAKSWLTEAPLRMLMNNLDPDVAERPSELVVYGGIGRAARDWESFDRIAAALRKLEADQTLLVQSGKPVGVFRTHADAPRVLIANSNIVPHWATLDHFNELDRKGLMMYGQMTAGSWIYIGSQGIVQGTYETFVEVGRRHYGGSLAGNGFSPPA

SEQ ID NO: 10612 - protein, 370 aa, BradyrhizobiumColbertium
MAGASMLAVECQPSRIEMRLRTGYLDRQAASLDEALAIMADSAKTMKAVSVGLLGNAAEIFPELVRRGVKPDIVTDQTSAHDPINGYLPKGWTLAEWEAKRASDPKGVERASKTSMVEHVQAMLDFHALGIPTLDYGNNIRQMAQDMGLKNAFDFPGFVPAYIRPLFCRGVGPFRWAALSGDPEDIFRTDAKVKELMPDDKHLHNWLDMAKQRIKFQGLPARICWVGLGDRHRLGLAFNEMVARGELKAPIVIGRDHLDSGSVASPNRETEAMKDGSDAVSDWPLLNALLNCASGATWVSLHHGGGVGIGYSQHAGMVIVADGTPEAAERIERVLWNDPASGVMRHADAGYDIAIDCARDKGLDLPSMAS

SEQ ID NO: 10613 - protein, 241 aa, BradyrhizobiumColbertium
MRFIDEMARKAQRTAKRPVRKRTEAGSKSAPKRRNMRAADRERAIVEEAIRFFAEHGFEGQTRELAKRMGITHSAIYRHFPSKEALIERVYQEVYLSRWSPDWGAMIRERALPLEARLTRFYLDYVDRVFEYNWVRIFVFSGMKSFGITSRYLDIVRREIIEPAAAELRHELKLPGTEVHALSERETELFWGLHGRIFYLAIRKFIYATPIPSDLDAIVRDAVRTFMDGAKTTMPRLLESD

SEQ ID NO: 10614 - protein, 286 aa, BradyrhizobiumColbertium
MKARAFSYFRAATIDQALDAHARAGDDARFIAGGQSLVPALSLRLQAPRLLIDITHIDELRGVRREGGYLRIGALTRHCEMLTEASIAESAPLLHVAAPFVAHPAIRNRGTIGGSVALADPASEFPAMTLALDAEIEIVGPSGRRRVKADDFFIDLFETALQPGELIAAIHVPLFRADQRFAFDELARRRGDYALVGCGIMATCQGSRIEDIRISFFSVGNTPTRVKGAERALIGARLDVERIAAAQRALECDLAPPEGDEVPPAMRLHLARVLLGRLLGRLGEGA

SEQ ID NO: 10615 - protein, 173 aa, BradyrhizobiumColbertium
MSGFDETLLGEADETVRVRFVVNGRKVACEVAPRETLVDCLREKLELTGTHAGCEMGACGACLIQLDGRAVHSCLIFAVQADGARIDTIEGLSESGVIADLQAEFHRRNALQCGFCTPGMLVNAEELLSLVAQPSREQIRDALSGNYCRCTGYEAIIDAIYAVAKARSGGVTT

SEQ ID NO: 10616 - protein, 791 aa, BradyrhizobiumColbertium
MSAPLISLDRPNSYIGRSLPRPNAKRLLAGRGRYVSDLHLPRMLHAAFLRSPHAHAKIVSINTDAVRAVEGVHLVATGPDLAKICTPWIGTLDHFKGMTSSPQLPLPLDRVVWSGQAVVAVVAESRAIAEDALELIEVNYEELPVVVDVDGAREVGSPLVNPGSANNVCFRSQLDNGAVDDAFAKASHVVEEEFSFGRHTAVTLEPRAIVADYDPAAGMLTVHHATQTPYQFQDLYSRHYGIPEARVRVIATDIGGSFGMKLHVYHEDMAVVGLSILLGRPVKYVADRIESFVSDIHARDHRVRARMALDARGGILAMDVVDLTAIGAFSTYPRTSVVEGNQVIRLIGAPYCFRNYRATLEVIFQNKVQTSQYRAVGHPIACAVTERLLDMAASKVGLDPFAIRAQNVIADDAYPHTSPTGYRFEALSHQACLKRLHEIMDYDSLRAEQADLRKRGVYRGIGIATFVEITNPSPAFYGVGGARISSQDGAIVSLTPSGEVRCLISVTEQGQGTESIIGQIVADQLGLAQERIKVITGDTEVTPHGGATWACRGAGIGGGTALQSARALKRNILEIAALVLQEQPSALDIVDGEVVDASTRNQRMPISEIARIVYFRSDTLPPGTQAQLTVSHHFAPQGYPFAFTNGIQGCLLEVDVETGFVKLLKHFIVEDCGRVINPMLVDEQLRGGIVQGLGAALFEECRYSETGQLVNGSLADYLVPMPMEMPDIVIAHVETPTADTELGAKGVGEAGTAAASACVLNAVNDALAPLGATINSIPITPARVLKALKRF

SEQ ID NO: 10617 - protein, 417 aa, BradyrhizobiumColbertium
MEEIMPKSGSTWKITRRAALAGLSASAALLAAPRLGRAADETIRIGFPTPLTGPFAAEARDQVKCAELAVKLVNDKGGVAGRKVELLVRDDKLNAGEAATRTLELIEKDKVHAVVGALSSAVQLAVNEVTRARGVIYVSISQSDTINEAKDFSKYTFHEALNPHMTTAAVARQTLKKGMKVAHLVADYAYGHEMLRGFKRAQAAIGADNVGEILHPFGAADYSTFMPRLMSMRPDVLCISNFGRDQANAIKQAVDFGVKQQMKIVVPVILHNQRLAVGPDVFEGVIGGANYYWGLEAQSKSAAAFNAAFKAANGGAIPTDYGAYGYSGVASLLLAMQAAGGTDTDKVVEALEKLKYDLTKGPQHYRKCDHQSVQSVLVLESKKKSAMTGESDLFAILASDAGSEDMLRSCSELGHAT

SEQ ID NO: 10618 - protein, 291 aa, BradyrhizobiumColbertium
MDLSLIIMQLLSGVALGAVLVITALGLTIVFGMLGVVNFAHGALFMVGAYAGLYLASLTGSFWWGLLLAPVLIGAFGMLIELVLIRRLYGRSIDDPLLLTFGLSYILVEGVRIVFGSDGIPFPTPPQLIGVVDLGIGFFPRYRLFVIVLVAVVLLALWLTLEKTRVGLIVRAGARDPTIMQVLGVDIGRVWLAIFGLGVGLAALGGVLAGPMRSVNPEMGSLVLAEAFVVTVIGGLGSIVGAVVAGLMVGISISMVALFAPEMATIVMFALMAVVLLIRPQGLFGVRGRTA

SEQ ID NO: 10619 - protein, 332 aa, BradyrhizobiumColbertium
MTHPSSGEAVAKPSPGGLGRVLDQRVLLSIAVLALLPWLLPSKALAVNVLIYGVVVMGYNLLFGYTGLLSFGQAAFFGAGAYFTGIAIGRYGVPWFAAVPAAVLLSTCLAAAIGLVSTRTRGIYFSMVTLALAQLVYYVALQAASFTGGENGLRGFTVDRISLLGFQVNFLDPVNKYYVLMAFAALAMWFQSRILNSPFGAVIEAIRENEQRARACGYDVERSKLVVFMLSGAISSLGGCMLALHLSIVPLDILHYQTSGMIVMMVLLGGARSFFGPFVGAASFLILEDVISLWTPHWQIFVGAIFVLFVLFLPRGIWGTLLDAMGSGKARR

SEQ ID NO: 10620 - protein, 251 aa, BradyrhizobiumColbertium
MSGELLRAEGIGKRFGGFVALEGITLSFAAGQLTSIIGPNGAGKSTFFNILSGVLTPSSGKLHFRGRELNGLPQHRFVHQGISRSYQITNIFPDLSVHENVRVAAQALIVSYDILRNRAQLVELGARADAALDAVGLLTRRSELARFLSHGQQRALEIAIALVSEPELLLLDEPTAGMGPEETKDMVALLERLADKRTVLLVEHKMKMVLGLSKRVVVLHHGRLLADGAPDEIRSNPEVRRVYLGQSEGYG

SEQ ID NO: 10621 - protein, 239 aa, BradyrhizobiumColbertium
MAETAFLQVDDLHAWYGASHILHGITLHVDPGEVVALVGRNGAGKTTTLRAMIGLMPKATGRVRFAGRELLPLRAHQRFHLGLAYVPEERRIVPGLTVRENLRLGLVAVGSDIEERAAIDEIAETFPRLKERLDQEGVTLSGGEQQMLAIARALIAKPKMILLDEPSEGIMPVLVEEMGVLFRRLRDEGKTLLLVEQNVEWALRLADRAVIIDQGEVVHQSSAAALLADRDIQERYCAV

SEQ ID NO: 10622 - protein, 669 aa, BradyrhizobiumColbertium
MPIIDLKSYLAAAMRLFRVPADNPDLTRAQFDAFSKQIPLLYFILISNTIAVAYTYVNVAPDWLTIIVPSVLTVLAGLRTFWWLRQRHLVRSDGDILRNLRTTNWLTLPIGAGFTAWSFALYPYGDPFAKSQVAFYMAVTVIGCIFSLMHLRSAALIVTLIVDVPYVLFFFATGEPTLKAIAVNNLLVSGAMVTVLFIYYRDFADLVASRKSLLAQQAATQALSDENFRLANLDSLTELPNRRRFFAELSSAFADAERRKVRVAVGIIDLDGFKPVNDNYGHSVGDRVLIEAGQRIREVCEGFGPQRVEFARLGGDEFGLVVCGDPDDADLMRLGERIGGQVRLPYQLDTAHTGLSCSIGFASFPDSATTSEALYECADYSLYHAKRHLRGRTVIFSSALEAEIRSRGVIENLLRTADFSSEMDLVFQPIVDAMSEHTAGFEVLARWRSARLGLVSPADFIPAAERIGLIRPLTQALLVRALATARTWPDHIRLSFNLSAHDVCAAEGILPLISIVEKSGLAPHRIDFEITETAVTFDFVRAQQSIASLKAMGCGVSLDDFGTGYSSLSHVHRLPLDKIKVDRSFVSDINENPVSHKIIKSLTGLCDDMEIACVVEGVETRAQLDSLRRLGCDFIQGYYFAKPMPAEAIGAYLAKEDRRLEANGAKVVA

SEQ ID NO: 10623 - protein, 39 aa, BradyrhizobiumColbertium
MAKCFGHNFACRSYGLLTMAASTAQGGSAHAITKAGTSA

SEQ ID NO: 10624 - protein, 383 aa, BradyrhizobiumColbertium
MLSRLISLLRRIPAVDWAFARLRPSPHSGNIEVAPTDRDASPAIIEDTTSTDAAPIPEVSSAPVRDADFATEAPVPEKDAAASVVAEKPFTDICVSDVSSSDRATEIETPATTPVAAEVLASSAEAENEPTAVSDLAIAADDEAPAGNCAEVDSVLAEEIVASSADGATASTILPDVILEAVSSPEVSTDFESVVVETMPVLLVEADSVAVEANPDSEPVLIVEIAQTSASDVPLTTAIAPETNEPARVGEIEPAPAHEPPAPEMRNAPKVRARPAEPTDRTALIRQRWAETGIRMWNPRLHGTGEAALNIQGSIGLLPPAAGETMPRYDKLEFKMLGGQIVCEGVIVEAPAQPGNRSFTRLVEPRNTERVREPTRERQAVLA

SEQ ID NO: 10625 - protein, 49 aa, BradyrhizobiumColbertium
MTTGRSSNMQNEASDSKGAQSPSAGGSNANNMGSQAGGSAGSGGAGAGK

SEQ ID NO: 10626 - protein, 49 aa, BradyrhizobiumColbertium
MIFFIGLSLITSPDNPLAPTTFLPTRASPLHQLSLLPKVGVPVLNASGY

SEQ ID NO: 10627 - protein, 269 aa, BradyrhizobiumColbertium
MRKLATVGAVLLWSTIAFAQDRTITVASTTSTEQSGLFGHLLPLFAKAEGISVKVVAVGTGQALDIGRRGDADVVFVHDRPAEDKFMSEGQGVKRFDVMYNDFVIVGPKSDPARITGSKDVVDALRKIAAAKAPFISRGDKSGTHAAELRLWKEAGVDLNSGKDSWYREIGQGMGPALNMASSSNAYVLSDRGTWLSFKNRGELAILTEGDKRLFNQYGVMLVNPEKHPNVKAKDGKAFIDWLVSPKGQDAIAGYKVGGEQLFFPNASH

SEQ ID NO: 10628 - protein, 232 aa, BradyrhizobiumColbertium
MNDFARSIGAAFTLIGNADAELLGIVALSVRVSLTASIVALLIGAPFGALLAITHFRGRQVVIVLTNALLGLPPVVVGLVLYLLLSRSGPLGAAGLLFTPAAMVIAQTLLATPIVVALVHRPASLLWAEYGDLARIDGLSALRSMALLFALGRTSLLTAFLAAFGRAIAEVGAIIIVGGNIRGFTRTMTTAIALETSKGDLPLALGLGLILLALSVAVSTVAFVLVGRVREK

SEQ ID NO: 10629 - protein, 61 aa, BradyrhizobiumColbertium
MIVATAAARTGAVAVRECAWTARPAAEVDRSCQGGLPRTKDFAMDVTRITGIEPAQQRQAG

SEQ ID NO: 10630 - protein, 283 aa, BradyrhizobiumColbertium
MIQTVGIIGAGTMGNGIAQVCAAAGLSVVMVDISDAAVNRGLSTVGGSLERLVKKEKMSAAEREATLKRITGTTDRAKLSDCDLVIEAATENEELKVKILKDLCATLSPRTLVATNTSSISITKLAAATDRPDRFIGMHFFNPVPVMALLELIRGLQTSDDTHAKALDFAKRVGKVAITAKNSPGFAVNRILCPMINEAIFALQEGIATAEEIDAGMKLGCNHPIGPLALADLVGLDTMLSVMEVFYRGFNDPKYRPAPLLREMVDAGHLGRKTGQGFYTYSA

SEQ ID NO: 10631 - protein, 154 aa, BradyrhizobiumColbertium
MSDRLKAEREAAAARRSLLTQDAIERTGITEEMIGELVTRFYGRVREDALLGPVFAVVQNWDEHLAKLRDFWSSVVLMSGRYHGSPMRAHLPLSLAGDHFDRWLDLFEQTAREVCPPTAAALFIDKARRIADSFEMASATVAGRIASPRHVLRS

SEQ ID NO: 10632 - protein, 217 aa, BradyrhizobiumColbertium
MSRASCNVNSPLPGNIAEADADARTGQTRRTLLLGALATSACLGCSPQVRAGEDPPGSDERPRKGDLLVFSEGDNEGKLITAADVPAGGPPVHAWPKDPNTSVVRSASRLNEILIIRLDPAELDEKTRARAVDGIIAYSAICSHAGCPVTAWVKSDVGDKEVFKCMCHNSEYDPRSGAQVVFGPAPRRLAALPLALADGSLSVAGNFMGKVGGAQPG

SEQ ID NO: 10633 - protein, 574 aa, BradyrhizobiumColbertium
MTRKQWLLSGIVAFTCLASTAAMSGPIENYSPVTAQRLENPEPSNWMLYRRTYDGHGYSPLDQINTSNVKNLTPVWTFATGVVEGHQAPPIVNNGAMFVTTPMGQVIALNAKTGDEYWRYKRQLPDDLFQLHPTNRGVGLWEDKLFLATTDDHVVALEAKTGKVVWDTKVQDYRKGQYMTLMPLIVDGKVIVGGSGGEFGVRGYIAAFDAKDGKELWRTYTIPGEGEPGHDTWQGDDWKNGGGSAWMTGNYDKETRTIYWGVGNAAPWPGETHPGDNLYTASVLALDPDTGKIKAYHQYHQNDSWDWDEVEAPMLIDLQRNGRTIKSLVHPGRDAIFWVLERTPTKINYVAGWPFVFTDVWKGIDETGKPIVDPAHKPVIGKRVEFCPSLWGGKDWPSAAYSQRTGLVYVPANENFCGGFTGEKVPLKPGELWLGTKPEDIGLKTKPGADHFGELQAWDPSTGKKVWQHNFPKSQLFGSVTATAGDLVFVGGTNDRNFRAFHAKTGELLWEQKTNSGIVGMPVSYEIDGTQYIAIQSGWGVDAQRIQDALVTNNIGIEANVPQGGVVWVFALKK

SEQ ID NO: 10634 - protein, 85 aa, BradyrhizobiumColbertium
MINISKALAVSLASAFLLTASGALAQSNTAPPATAPRPTGPDQNSLPNANAPPASTNQTTGQHNPDPKIREMNQKEKDKVERMGK

SEQ ID NO: 10635 - protein, 770 aa, BradyrhizobiumColbertium
MNFIDNPRKLRGFERQIKVEKISRRSILKGLGVTGGFVLAAPVISRQALAYETGAGKMPHGVVVDPRVFVSVAPDGIVTIIGHRSEMGTGVRTSLPLIVAEEMEADWSRVKVQQAHGDEVKFGNQDTDGSRSTRHYLMPMRQIGASARTMLEQAAAKRWGVPATEVKAVNHEVVHSASGRKLGFGELAADAAKESVPSIEGLKLKNPKDFRYLGKGQVGIVDLHDITTGKALYGADVRLPGMKYAVIARPPVTGGKLVSFEPDAALKVPGVEKVMQVRGWPWPSKFQPLGGVAVIARNTGAAIKGRDALKLVWDDGPNGKYDSVAYRKELEEASRKPGLVLRKEGDADATLKGADKVIVGEYYIPHLAHVAMEPPVAVADVKGDKAEIWAPVQSPGGTREDVAKTLGIPVGNVTVNVTLLGGGFGRKSKCDFALEAALLSKELGAPVKVQWTREDDIHNGFLHTVSVERIEAGLDKSGKVVAWRHRSVAPSIASTFAAGTVHQAPFEVGMGLVDMPFEIANISCENPEAAAHTRIGWFRSVSNIPRAFAVQSMVGEIAQATGRDQKDMLLELIGSSRMVKPNVKDLWNYGEPYDSYPIDTARLRKVVELVAEKGDWGRKVPKGHGLGIAVHRSFVSYIATIVEVAVDDKGKLTVPRVDTAIDCGTYVNPERIASQIEGAAIMGLSLAKFGEITFKDGKVQQKNFDDFQVVRMDDSPVVTNVYIVPADPDTPPSGVGEPGVPPFAPALINAIFAATGKRIRALPIGKQLEA

SEQ ID NO: 10636 - protein, 152 aa, BradyrhizobiumColbertium
MIMIKVKINGQEQSWDGDPDLPLLWFLRDEAGLTGTKYGCGQALCGSCTVIVDKQAVRACITSVNDVAGREVTTIEGLHPNGDHPVQKAWRQVNVPQCGFCQAGQIMQAAALLMENPKPSHDQIREAMSGNICRCGCYQRIENAVHLASTGV

SEQ ID NO: 10637 - protein, 51 aa, BradyrhizobiumColbertium
MRQSQICKPIDIDPLAYLTDVLTKIVKGHPNRDIDQLLPWAYRTQSLKAVA

SEQ ID NO: 10638 - protein, 57 aa, BradyrhizobiumColbertium
MAKAEVEVITSEQRRRHWSRVDKERIVAAALQPGATILGVARAFGGKRRLQATALRD

SEQ ID NO: 10639 - protein, 47 aa, BradyrhizobiumColbertium
MHYAVPQSAHTMIIQFRPGAHGVGLRQKIEWQFERQKFDAFDTRLAR

SEQ ID NO: 10640 - protein, 93 aa, BradyrhizobiumColbertium
MACQFGCGSKGKLANYVASGDCNARNVKDGNGVSVCTYLLRGAGYDVSCFTGQQSNVCVQTPTGPGDFPTSTGIASNPPSASTASIIVGPTEI

SEQ ID NO: 10641 - protein, 58 aa, BradyrhizobiumColbertium
MTIIGRTLQKALFAGRSDEVVFWALVHAHYRGGNLCAEVEEQLNGFSRFILRDPTELN

SEQ ID NO: 10642 - protein, 76 aa, BradyrhizobiumColbertium
MANRVDTVSAVIDWRLMVIAMQLRFFVRPLGFPTRMGRDEVVALRMSFNRETLAALHDARGCTHSVLNDASWPTAA

SEQ ID NO: 10643 - protein, 562 aa, BradyrhizobiumColbertium
MEGVMIGPEVGSCGVAAYTRKPVLVTDISADPKWTKYCAFPTSLGLKACWSAPVIDDGEPIGALAVFFPEARGPCDDELAVFASCVDLCAIAMRRHERALERERRASVDALTALPNRAAFNIALKSLACDDPGSWGLFVVDLDNLKIVNDTFGHRAGDGLLQTASARIAAAVSPDVTFRLGGDEFAVVIRRPEALADLDETAHRILEALRAPADCDGNAIVPSGTIGGAVVSTGDESAEAVYKNADFALYHAKETGRGGFVRFWPGIDTRIVNRQATIKDVSAALGEGRIDAHYQPVMRLDTREIVGVEALCRLRKPNGEIVPAARFRDATSDARVAVELTSRMLDVVARDVRHWIDLGIPFQHVGVNVSTADFYSGDLLSKLEASFGRVGVPLSHIIIEVSENVSIGCRNGDVDRVVERLRASGIRVALDDFGTGHASLTHLLNVPVDAIKIDQTFVARLKRHDASLAIVQGIIDIARKLDIRVIAEGIETEAQAEQLVSMGCRLGQGFLFSAAVDRDSMTEMLLQRAQGMAEFIPMFYEQPPGSEQIFDAVTETELARSA

SEQ ID NO: 10644 - protein, 95 aa, BradyrhizobiumColbertium
MAALLRAPGLILARNGNVLSCREVTKDIAKIAIDDPPAFFLRFSQVLLFLVFCAGNPIRPTSRTGRHVNHAFPRDKGIHVNLVGLDGSPFELFPR

SEQ ID NO: 10645 - protein, 192 aa, BradyrhizobiumColbertium
MKPRPGSATWRYLTSERALLDDVVAHATAADCLREGPHGSMWAAHRSANGALTGWEERGSAWRGFATDGAKELFRLGPASAERICVTEAAIDAMSLAAIEVLRADTLYVSTGGGWSPLTDEALRRIAARGGVTVVAATDNNRQGDIYAERIRAIAAETGAGYVRSRPRGDDWNEDLKTLLARFSAHRLAALA

SEQ ID NO: 10646 - protein, 301 aa, BradyrhizobiumColbertium
MSKATILVTGATGLHGGVGGYTARFLREAGATVRALVRTRDHRSEALDKLGIETVVGDFMNLQSLRDALKDVDRALFCYPMRPGLLEAAINMAIAARDAKLRILVDLSLIPAREGSPSDEAREHWLASQMFDMAGLNVAHLMGGFFYENLEFLAGSDMVARGVLEAPFGDGDTPLSWVAGEDIARFAASVLQNPDAYVGTTRYVTGPEALTFRQVAAIVSDVFETPVRYESDISIEAWADRLSKHPFGNARLVKHASVLAQAFGKTKVSFGQVTDEVFNASGVKPITLKEFLLGNRALFST

SEQ ID NO: 10647 - protein, 288 aa, BradyrhizobiumColbertium
MSEPGFAVYREGPIAEIVLCRPQAANSLTEDFWIRFPEAIRELDQAGSVRAAIIRGEGANFSSGIDVELLERFLGGDDDVEPGRFRASLRLMLLRMHEVMSAMEQARFPIIAAIHGTCIGGALDLVCACDLRLAATGAYFSIQEIQMGMVADLGVLQRLSALIPPGIVRELAMTGRRMPAEEAHRFGFANAMASDADGTVAAARALADDIASKSPLAIWGTKEILNDFDRRRIEDGLRYTAAWNTGMFMPEDVQRSVAAARKRAKASYRDLLDVDYPAVPRQRTTVKE

SEQ ID NO: 10648 - protein, 136 aa, BradyrhizobiumColbertium
MLVVREAFAGTTLFDEFVAYTGATPQVISERLKRLVEAGIFETRAKDKGRGSEYVMTEMGRDLHPIISTIIVFGDKWLSDGKGPPQVTRHVGCGCVTAPRLACSECSEFVSPANLTREPSPAMQRYRARMLTAASK

SEQ ID NO: 10649 - protein, 225 aa, BradyrhizobiumColbertium
MPLFTIETTYRLPVYRHRTYEADSLEAACRLAVDDEGWGDAEEDVDSSGETYVTGAWDGRDCAYSGPALAVPSHFDETVQRKADHFEILLGLVKVLRGAADGKHSAYWIGRAGSAIAKAEAILAGSRDPASDVSMPRPHILVSFDESEVRSTIGEIIAGDETLAMFSADSIGDDDIHTACVAAVAAADFAEERGSVLFKAAIAAIRSVWRAPDWGERRREMEREE

SEQ ID NO: 10650 - protein, 200 aa, BradyrhizobiumColbertium
MTRSSIRKVYQGAADRRQMFRMFDRHKERPNRTDDDATALYAGEWFEIGTAEHDYMFEILPPLWMRGDMFAMREFLTGSVTSVFFELKIDGRVRYFHAYCDLGDRQSPERMRAAIIERESRPVRAMTREERLEHIWSSTHDPYRGYADWRFPAAERGKRIVIVYGQDGRHDFRLLDRLTDADIAVKLPVHLRYLPDAIAA

SEQ ID NO: 10651 - protein, 132 aa, BradyrhizobiumColbertium
MFTFSVTAIHAVITRGRIDARMNGGFRNPHYGLAPGKDEKPGVWLVGDEGVYIMSNGKLADGQRSFVIYAEECDPKTNPDYWHYKRQYFGGDDGIDFLDAELLVRSIEALASATHLTIEMTDDSMAITPIRR

SEQ ID NO: 10652 - protein, 348 aa, BradyrhizobiumColbertium
MTTTPLASIGIDIGKEVFHVVGFGTDGKIAFRRKIKRLALLEVFKRLPPSIVGMEACLSAHFVSRALRQLGHQPRIIPAIYVKPFVKGQKNDYNDAEAIAEAALRPNLRVVREKTQDQLDLQALHRVRSRLVSRRTATINQIRAFLIEQGIAVRTGAMALRNSLLAILENRQDEISPRMRDLIVGLYEDWIHLDERIATLAGEIDQIGEKEANCQRLMSVPGIGPLISTAVVAAIGTGEAFERGRDFGAWLGLVPRQYSTGGRSILGRISKRGSKYLRTLFIQAANVILMRPHNWDRFSFGAWLQNAAPRLHRNKLATALANKLARIAWSILRNEKTFDATHYEVIAI

SEQ ID NO: 10653 - protein, 65 aa, BradyrhizobiumColbertium
MTGVSSLSNGDYYFRGRITRGSLSSSNSSNVSVTIAVASHAVELEGSTDLIELEGTTDNIQLEAA

SEQ ID NO: 10654 - protein, 3016 aa, BradyrhizobiumColbertium
MKFRDNIAAIETLKTIERENRRATPAEQRTLARYVGWGGLANAFRDTEGNLKADWKDRGEQLESLLTKDELAAARRSTRNAHYTSRTVVDAMWEAARHLGFKGGLALELSSGTGNFLGLVPDEIAGNTRFVAVEFDSITARIAKALYPQDTVLHSGLHKLPLPEGEAVLNIGNPPFGSESLRFQYKPELNGLSIHNQFFLAGLDALQPGGLQILVVSRYLMDAQDTRAREMLAKKAKLLGAIRLPDTAFKENARTEVVTDILFLQRHTAAEEEYAAEQFENAKDERKVSDIPDWVKTTTVRDPLGGEPMVVNSYFAKKPNMVMGKLERSGTMREKGEVNVTLAKGADLGAMLRKAIQTLPRNVLDLHQEVMDATLKRYQTMGESLEIALAGHEIGHVEQTDGKLYQISERETPTGGYEPVKREVTPDSPWSRQLLMDSEGRWYTLEPKVDAKGAKVKSGARNVYERSYFEGNVVPAAMRLGKAKYDKLKALVNLRDLTKRQLTLEAEDAPAAEMEGNRKKLADAYQAFVGSNGYLNDQGNLRLLNDLPDGALVLALETGYRAPVTHAKAARTGEAAKPASAKPAPIMSRRVVPKYEPATRADTPQDALSISLSEVGHADMDRIAELLGKTREEAIEELTAGDKPLLYKDPETGAYETANGYLSGNVVRKLKAAEAAGLTKNVEALQKVQPERWSAENISAMPGANWIPPQVYADFATHMLGVPAKVHYSQVTNSFNLYVDDYSREKADQWGTADVPADAILRGILNSRVPKVIREDGEGRKYVDQEATALVSLKAKEIENEFADWVFADSARRNLLTDIYNEKFNTRVNRQHDGSHLALPGKVPDEVIKLRRHQKNAVWRGIYERFMLLDHVVGAGKTFTAIARVMERRRMGLSRKPMIVVPNHLVDQWTADVYRLYPGAKVLAAGKNQFEKKGRRRLFAKIATGDWDVVIVPHSSFGFIGISPETESRFLEEELRLAQEAVQEAQDQAAADGIGGRSKPFTVKEAERLVTTIESRLDSLKKAGRDNMLTFEQMGVDDLTVDEAHEFKNLFYSSRLTGVRGMGDKSGSQKAFDLYNKVRVLRDSPNGTVTFMTGTPISNSAVEMYTMMRYLSAQDLKDLGIEHFDAWRSQYVSATAKFEPTEAGGLKEVTRLGRNWSNMRALMELYYSFTDAVSQEDINKWYAEDNNGARFPVPKVKTGGRKEVVVKPTEAQSAMLRGIVAGFNGLPNISDPYERNAERLKLMDRARKVSLDARAADPTVQSDEAGGKLDQIADKISDIYDRTQADAGTQLVFIDRSVPAAKSDKKVIKDYDDLIARRDAALAAGDEARYRDLVEQLEKFDANEIETLRAAQRGGWNAYDQLKANLTARGIPADEIRFVQEANNDAEKKALFDAVNDGTVRVLIGSTPRMGAGTNVQERLVALHHGDVTWKPSDIEQREGRIIRQGNKLLEKYGADNFEVDILAYVTERTVDAKMWDLNATKLKMINGIRKYDGAFNMEFEDEDSVGMAEIAALASGDPLLLERVKLIAEIDKLELLERAHRRKMFGIDDAIYDLERAQKNYPGMIEAGKAKAAAIQSAIDTVRRDAASRTVEVEGKSYSTRLDANNAVEAAIEAAKAGDENARYAISINGQRVTNREMAQALLNEAIGDPVPIEAVIDGDVVRSRTSFGQIVARKATELLHQTSRDTKKPVRIGKMLGYNLELGVYPDAHRISLALTDNGATIVDVEQAYSHDAKGFVPQSGRALIDKLEGEIDYEASFTGKRLQDKLNEAETRLPSLREERGKPFPKAEELKGLRDRLEEVIKTLDQRTKDAESGRGLPEEVASVARVTSEVGRTARLSPERRANLEQALTDVVRKITGPSVAVRFVAEHPINMPAGWGSFGQDKVTAAGSYIPARALITVALADPAYPLEQVLDTTFHEAFHALEDKILTEQEMDVLKREDARLREIVKRAYGFTDEQIGEIAGFEIRAMAFEYYASRRAKGLEPQGLHIGIRRAFERLLDLFRRVRNALNGLGYRNASDIFEAAYEGAYADRRAAVTDNVTVQANVRPQGNLNRFESYEPLPERWQDWWKRPDLNWRDRAWGMLDAAFLRANRALGDRYVDMRRLQAAVELTGRQVNEGVNMALAATLFEGRTEKRLKDYWIKLWKPALDFAYSQGITREDLHRYLYARHAPERNAHIADINPMMPEGGSGMTDAEAQEIMDAFAAAGKLEALEQVAQRIDGIVRKIRSMMVDDQLEHEETIGQWEQAYQHYVPLRGFESGDEDMAQDLQVSRTGKGFDVRGPETKQALGRSSKADDILTNLFLMGERTIIRGEQNRVGRTAMRFMQSNPQPSLYEVSRSERVLTDGRIETTTENELDLLEGERPVTVRRINRDTGLVETVTRVASGWANDSFAVKVGGHTYYIRIKHQGLLTALKNVGIQRLPWLIQAHSWLTRQFSAFRTARNPDFFVPNLFRDVQDAAYTLGAEQRTSLVKNFALNIGTLRTYVAAFMGELMEKDGALGDLARRKFADKRGAQLYEDWKKHGGQIAFMGINDLDSARREIEAAFHETEEGYAATVAKAPYRLARSILKAIEFFNGAIEAGTRLAVYDAGLKAGMTKNKAAELSKESTTNFNRKGIYSPFINAFYAFFNARVQGGAKIIRLLRNSKMARRAAIWLVVGGFATTLWNLAISPDDEDKKPEYMRRKYWERERYFIFYFPGAKDPIRIPMGYGLQVFWMLGENLAMASQGRITPAQAAANYLSTIVSAFSPVQAEGSATDPGTWLRYIMPSMEMPLLELGTNEDWRRKPIHPKFGKKGEPHSEQYFSTTSPYAIDVAQFLNKVSGGNAFKPGAVDMYPGDLQYIWNFAAGGLGQTTNRTTTLFKNWLEGVPTPPNQVPILRHFVGANVEQATGEAYYEARDEVQRGMAQVRKAMKAPAASDDAAATIEEGGNRYGLRQGKRRGTVGSDAETIFRNADKQLKGLRALEQATRQDKTMDSKARAEAIAGLRQEMREVQEQARKAYREIKKREPSF

SEQ ID NO: 10655 - protein, 114 aa, BradyrhizobiumColbertium
MARRSQPMSVPELKALARKHWTEFLPKKVAELRAQGTLDEELQGAATLAQAEIEQLKSRGYQESEAREVALPKFILLTPEPVEDEQARELAAKEAEYQKHPPVPTDPEENLPVR

SEQ ID NO: 10656 - protein, 1348 aa, BradyrhizobiumColbertium
MAFEDLIVGGDGADEPTAIVSPDLIATRNERKGLTDVSARARQPVDFGTDDEVIGPAPRAKASKQTDFGADDEVIGSAPIKNPPMPRARPAEAPGLIQPTQPMPDVQPLDNAPFRAPSSGMDTNMLTGEEAYAERQASIAGAEAGVAEAQARLDAAKARSASIADGSTRALRRGTTGDLQRQQIQAEIDAATENLAQAQQALSAAERAAPPTQTKLRDAASRFAGAVGTAIPDVVGGIARPIDAGLDAVGLDGGTGIAEKMREISRKVGRENQPDPVREEELSAALGQGGGSAIGFIVTGAIGKAMKIPAAFASGGAGAAQNAEQYYREADDMGAPAYKKALAYAVGAGIGGTEAIGLGRIADELDKKTGGGLKRYFGLVMKEMGEEGLQEAGQQLLDNLAKFGLYGKDPGDITAGVAQGALVGMILGGGMAGTLGLGNLTAGRDRAAREGVPTPEQAPITPEEIIRQILGESPVPPPTAAPAVNAKTQEEIAGSLQPDQPASVTAPSQTAQSPAEEINPQPSNVSALQAETAPEEITPPATVAPAKTASDEDAALLRGYGYDSQQIADMSPAQIAAEVAAAKEAGTEPVFGEGDAVVGSRAEPVKVETPDDLERAAGHVNTSPTEAQKEAGTYAKGHVKWNGLDITIETPKGAERSGKGADGQPWSVTMPGHYGYVRRTVGKDGDQVDVTFGNDPKSTRAFVIDQFNPATGRFDEHKLFVGYPDLESATAAYDLSFSDGSGPQRRKAVSELSVDQLKDWLRNGEKKKAYSEDVSRSGQNADVQALAQREGSVSQPQEPVLSQLRGTGDHAPSGVGEQLPGVSGSGRAAAEPAAYAGSEGERQGLRAGQRPLGDQAGAGAEHAQDSAADVSGQDAVGSRMGARDRVASQDSDAKAGSRTERGRSAVDKKAPSRSATSQPASLLQFIASKGGLRPDPELTAIGLSGSHRVNVPGRNGRFPVVRAMGESLDLMREAAEEAGYFRGTGEATSTPREFLDAIDNELRGQRRLPEGQEAEPSKRETERLEEENANRDALLTQNRAEIEAMLEAYGVPAGMTNEADLRLAAEIMADEGLDPDAALERAAIRNLENDPDIPQETVYDAFDFGAFDAVQPEPTPEDERGAEAESAAGVRPGEEGRADEPVEHVSGAREDREGPGQGEAREEAERAAQPGEEVPERVAPVTERTEAGEQTVLPGAEKESQGKQAQRKADQPLKPKAAQKPADEGLFGDDSRQTDLLDLKPTQQARESGPSASDDLDLDSIIDQAIDKYAPEEKPAPKKRTASKAAKSAAKNTAMGLAEVAKGLDALFSPKGKLGAGPSFDEETYARPSPSSWRAWRISRRPVATSRQ

SEQ ID NO: 10657 - protein, 349 aa, BradyrhizobiumColbertium
MDLTDLISPNNYVGQNFPLGMESADGGDDPLAKLRELLGGMSDNGALPVNEQPTRGMLPPDEAPTDISARTRQPLSVPLPTPRPADAPQGMLASPADITAFAPTDIQRAQMGRPPIPQTTADLVSAITGRTQQGPTVNKLLASLGGGLSTVTGNTAGGAFARAMGGGLKAGNEADKTNSDDAVKHLKAAIEAQQLGDKQAYTKALTSYYQVLTKQKNEQENVAAAGPKPPRAIDGRLIFDKAERAIQNSNRAIDGDFRLKPEERAQKKAQEAARIYKGFGLNPDGTMPAGSSAPAPSAPASKKAGNPGEIAFNGDGTQAAPYEPRTKDDYDQIESGSYYIVNGQLRRKK

SEQ ID NO: 10658 - protein, 380 aa, BradyrhizobiumColbertium
MGCFGDMEATKQQTTSLPGYLQTAAQTNVSNATNVASRPFQAYTGEMTAPLTQNQQDAFGLIKSIAGTSNPYLSDIENLYKTFSSTTGVTPASILGGDKNVGNTTIQDYMSPYIAAALQPALDDLARTGTAQRKSLDASATMDGAFGDARSGVALANQLRDEAKTRTGVVGQGYQSAFDRAASLRQSDIAADTDAQKTNLNLMLQRAISGGKALSDLDAATVDRGLKTAGALADAGKVEQQTNQAADTAKMAEFLRGQGWDQQQISWLTSVLAGTPRETTTTVSEPNNSGWGALGSIGSTLLSAIISDRRLKTDISVIGATLDGLPIYRFKYIGSDEWQIGLMAQDVEEVNPAAVIEVNGVKAIDLRLATQAAADMGADV

SEQ ID NO: 10659 - protein, 145 aa, BradyrhizobiumColbertium
MSDQDAIEIHKLLMMMGQEVAVAPVDPIVVMEDIYALINTEGKGAFLMAVKGTELVGVMGLENTRYRYSREYCIREVYLFVHPDHRNGDVLGALLNEARAIADMVDKELYVTIANPNRRRGKTEKVAALLRYQPVGSIYAMHPRN

SEQ ID NO: 10660 - protein, 41 aa, BradyrhizobiumColbertium
MGPLPASLQITVVFTALEAARQARSTVAPQRQRPAVQDVKV

SEQ ID NO: 10661 - protein, 50 aa, BradyrhizobiumColbertium
MRVATPAVTAETAAPPAPIEYEIEAPGVTVIFVCRLQPPPPPPLVLKKPT

SEQ ID NO: 10662 - protein, 239 aa, BradyrhizobiumColbertium
MRVLALGQPLNDSPEEFKRWVQEALREIERASNEHGGEGDEAVSNSAGTAVPLVDSGSGAVGTSARWAHEDHVHPVDTDTAAEGAAAAIAAALGTADPLMDGTASPGASTTKLSREDHVHPSDTSRLATAGGQNVTGGFTLTPYDAGNMGSGTFTFNPVNGNYQYAGNNGAVQIQVPASDCAMDILITNGASAGAITFAAGFTVNSNIGEPFTTTNGHKFILSIRRINGVSTYVNKALQ

SEQ ID NO: 10663 - protein, 594 aa, BradyrhizobiumColbertium
MLPMADGEFEPVPLTPPPGIVKTESDRVEEGRWVDTQWMRFVKGRPQKMGGWLKQTTAIASGTLRTMHAWRDLSSIEYVAGGTYRKLYVYERDWTQHDITPLDASGTLTDPFSTTDGSSIVTVTHAAHGRNTSDVVNFSGASAVGGVTIDGQYEVITAVSGSYTINAGTNASSTAGPGGGSVDYDYEIPIGVELGIYGLGYGAGPYGTGTYGTERAFSTIFIEPRIWSMDHFGRILLAAYNGGSLYKFDPADVPAFGRATVVADAPTDIRYMFVTEERFVFALCDGMRVDWASQNDYTLWTPANDNTANTRTLAEGTKLIAGASLGNHVSCVWSDFALYIFQYTGTNAIFSSRLAGRNCGLVSPSAKVTVNGIAYWMGQTNFYLYNGAVAFIPNVEDIRAYVFDRLNAEQAYLCWAQYVAKYNEVIWFYIALGDTQPSYYALLCLNDYSWAAGAMVRTSGTAFSHGDTRPYMAGDDGHIYLHEEGVDGDGEAVLASIRLAPSSLMKGAQIFNIDGMVADFEDQSGDITVTFEGWDRLRKPTVDSQTITITEDDDLVDLRLEGRYISLEMTTDAVGGYFRFGKPDVLISSNGTRR

SEQ ID NO: 10664 - protein, 44 aa, BradyrhizobiumColbertium
MRIFFGITGVGLLIWLGAVYLLPEPKMECLNWLEGKCIKMRSAK

SEQ ID NO: 10665 - protein, 331 aa, BradyrhizobiumColbertium
MPFDTNSALLGLLMQATGSNNNTWGDNLNNFVFAYLEQAIAGYVTKTVTGGAATLTAAQHRAGMIEFTGTLTSNSTVTVDNISKRWRIFNNTDGAYVLLMKTASGTAIEIPQGTHKDVVCDGNDILYREDENEVGNFVLHGGTTAPPGTLACSGGTFVRADHPNLYDKIGTTWGAGNGVTTAGLPNLTDTNRFLRAAGGSLAVGTYQASLVGAHTHTASATTTLGGSTASDGSHTHTATSTDAGHSHTNGAASLAGSNNNNGGGGGAFGAVVGTVSVTGTGFASITTTVTSGGAHTHSLAGGTATTTVTVDANVGAETRPESAAVLVCIKI

SEQ ID NO: 10666 - protein, 208 aa, BradyrhizobiumColbertium
MNYTTLVADKTTPGSIKRFVNYSQLDAEQILEEAQALIFQTLRVREMRVEFDNIAMSPGDFYAPLPDGFLDPIALKDVTNNLDLKLRPESNIVSARTYDAGSLIESIPQRYAIYDEKLQFECAYESAATLNLVGFEKPALLSGSNTTNFLTNRLPHLLRVACLAQAYDFMSNQTKYQNNLTMLSALIDKTNAESDLSYRDVTFEVEIG

SEQ ID NO: 10667 - protein, 119 aa, BradyrhizobiumColbertium
MRIGIDGTKYYAHRLAWLYMTGEWPDEQIDHRDTNRANNRWGNLRLATNQQNAINMKRPKDNTSGAKGVLWSKQSGKWVARLVVNGRQLHGGFFDTVEEASAAYVRLAKMHFEEFARAA

SEQ ID NO: 10668 - protein, 154 aa, BradyrhizobiumColbertium
MTGPKLKLDRSRAFATCHGEGLTHAFEQDGLPFDHQGELAMSMVKTPAQKALVEKKLRRLTKLEAGAPSSDPDLQEPPTPPEADDDEGGDDTAMNFEAWLKDEVQYPQHEVFKEARRRFNKVFTNYKALAEFLVYDEQVLGPDEVPTKLGPRSA

SEQ ID NO: 10669 - protein, 59 aa, BradyrhizobiumColbertium
MKNESNSTIERSKVARGTIVTGHGRDDSSMSVPKAKEAKGGVNNLAHSLSGASAVQDVK

SEQ ID NO: 10670 - protein, 61 aa, BradyrhizobiumColbertium
MYGNKYPTQLKPLRPVDRVNDDMTGNAGVDGFTRLSTADRETGYRPPVGEQATAWPRYVED

SEQ ID NO: 10671 - protein, 160 aa, BradyrhizobiumColbertium
MITYDNPKKETYVFPSSAFGATTESRTFKGPKGKKGLVRDIRTYLTADAVGTTSVPEINVGSAASTAGGTLYTEYARHRLGTSATAGNTASGSPYRARALCEAGANNRGGAALTLSDFTNHIKLETDFIPADTAFVITRVAGVGGVPAGTGITEVEIDWF

SEQ ID NO: 10672 - protein, 330 aa, BradyrhizobiumColbertium
MAGQLWSVAAEGGYLYSDELSDTIRQQLQPLCKFRQLCDAQDAVDKGLHRGSRFYWDVFSNVSTQGRRLSETGPIPQTGFTVSQKSLTVTEAGNSVPYTGLLQAMAKHDVVSIIDKTLKDDAKKYFDIEAFLQFKNTMLRAGPQSGNSTTAITLDTNGTCSTTNNVALGTGHVKAIVDTMKERNIPTARGDDYGCITHVTTLRTFKNSLESINQYTETGLSHIYSGEVGRYEGTRFIEQNFIPKGGAADSTTFDPWSSTADAWNNGLSSWAFFFGADRVAEAQCIPEEIRASIPSDFGRSKAIAWYYLGGFGIVHDDATNSRIVMWDSAA

SEQ ID NO: 10673 - protein, 399 aa, BradyrhizobiumColbertium
MTTDTNQPPKPEDHIEVINQDIDTTGADHSLNPAPVDDNPRPPEPPKPEILDQDPRAAIAARFKKLREDKEPPVETTGDFVDPSQVYGQAGKVEEPPPAPAPEPPPAQPAKRRLKVNGEEREYTDEEVTALAQKAAAADDYLEQAKERLAESKRVLETTRVHVSRQNPAEEPAPTATETDDGNDGQQNPADPLKEAIEQIQYGDPDKAKEVLGKTIAEVATAAVKQVSWEDRVRQDVETDLAAHNDFVKKNEDLAQDPRAAKLIRAELLDGYAEDLRKIGVPDDKIPTDSTQLANLHRGHKLRGAQVRSVAKLLEDAGNSVREFAKIGAPRQETAPQRPTNPNPERVQVNLNRDDRRRAIPQQPQRANVQPAQTNSAPASQMDSRKAAVERAKAARGQV

SEQ ID NO: 10674 - protein, 126 aa, BradyrhizobiumColbertium
MDQSALYKLALRRDVELSAKVEVELTSRLRSEPLLVVLNAAKESAAEALAALVWVDAADQAEVRRLQNEVRRFDDLVKWLYELLIAGPEAERQLNDLQMQEARGLVIDEETAAQLGLPTNGATDDD

SEQ ID NO: 10675 - protein, 108 aa, BradyrhizobiumColbertium
MYRLLLAAALLCASVSTAYAETCIASWYGRESGPRTASGERFNPDGMTCAHKTRPFGSVVTVTHLGTGRSIQCRINDRGPFVRGRCIDLAQGAARALGMGGTARVEVR

SEQ ID NO: 10676 - protein, 107 aa, BradyrhizobiumColbertium
MTIEFAAISAVAGVAGFGLAFATFWLTFGSRIATAETKAANAELIAKDATDKVAILQSAFSLYREQIAREYIHREAMREVEDRLTAAIDRLTERLDRVLEPRAAAAK

SEQ ID NO: 10677 - protein, 54 aa, BradyrhizobiumColbertium
MADPLDDGRITQQTDPKLAVGEYRVALGTANDNLAATRTCQQGQRARVAKGSAK

SEQ ID NO: 10678 - protein, 150 aa, BradyrhizobiumColbertium
MTDLFWDIATSGPALGVIAWIVVSAFVVSRPLKFIERIWPQAYAYAKAAALIHTIAAALLFFLIGFRVADERAEREAMKNELAWKNSQIETAEATAEHAQRLKAEAEQKAAEAKGKLDGFRSKYGDNPAAICAFTPDDLEWLRALRSPSR

SEQ ID NO: 10679 - protein, 283 aa, BradyrhizobiumColbertium
MARWPHDDPASLAAFYGDPANDEPGKQLVPVVPPFQMYYDGKPIKAIRFHRKAADALKAALDEIWEACGRDQATVDRLRISHYSGAYNPRYVRGYEPGNPQGRPPRWSNHAYGAAIDLDAAHNGFGAGKGTMPQFVVDAFKRQGALWGGDYKGRTDPMHFEFCSRDGAAQPVPPPVKPKPQPPKAEPIEPPHAGGEQEPPPAEEPVSPPATAPASPGFFRRVRNWVTGAASTFGLGGLGMLTDWQFAALLLGFALLCVGVAFCVALWLFGKQNVADWVARNIA

SEQ ID NO: 10680 - protein, 767 aa, BradyrhizobiumColbertium
MTTVIETPPGEDGFEKPDNLFARAEKAALSPAGGAPAAQEEQKKDVDWLNLVSQAETQGGQFMLNQIKDAWDRSYKAFHNQHFSGSKYLSASYKGRSKLFRPKTRGAVRKANAAAAAALFSTVNTINCSAGNENDPVQKANADLMQHLINYRTDRTSGKAAIPWFRIAIGAHQDTLIMSACLSKQYWKLELKEKVTQQPLRDEATGEPMLGEDGQPLMQTVRTFSPSVDRPDVKLIALENVIIDPAADWTDPVQSAAYFIVKYPMRIDEIRKMQQDPRNPWNEVPEATLLSAVTDQKLQASGTRASREGGQDRMDQAATGGGDFRVIWVYEVFMRYQGQDICFYSAGSRAYLTDPKPVEEVYPEQDGERPYVLGTGALESHRIFPMSHVEAWQPLQQEINDLANLRLDQVKQNVSPITFVKRGRQVDLSALQRRGPNSVILRTDADDIEFAQTPEVPSSAYAEMERLNVDFDDQAGQFNSGTVQTNRSLNETVGGMNLISASANSVQEFDLRTWVETWVEPVMGQLVRLEQYYESDKTILGLCADKAQLFQKYGVSEITDELLMEQVTLRIDAGMGASNPQTKLGNFATALKVIAPVWQNHPDVVAGRKVPNLEELTNEAFSLSGYRDGGKRFIKDGTPQQPNPAVAAEADKLKSEAEKNRSTAVVNQAKAQEIDARMKMDFAELVHGQRMDRAQLVNQVRTERENMQRDRVNDDRQQRNTEADREMRQREAELKNKPAEQPSGDLISELTALLQRYGANNGSMAAR

SEQ ID NO: 10681 - protein, 141 aa, BradyrhizobiumColbertium
MDTDNILLRRELADRTHGQHNVELQARYERKGLLPEEEDTHAQWDLMVAKAITRVLLSQYRGHFWVVECDSAQGIAWISIPVLLGQWKYVFHLSEDITPAMIIRAGGEILERFNLPRSNLDVASFIAARKMAVKNGGTPPA

SEQ ID NO: 10682 - protein, 91 aa, BradyrhizobiumColbertium
MPPRQGASLQGDTTGIRSAEEVDISSTDATFTNVTRGLYVGVTGDVVVQFANDADNATVTLKGLVAGVWHPVQVQKVVRTGTTATDILAGY

SEQ ID NO: 10683 - protein, 196 aa, BradyrhizobiumColbertium
MAQTTLVAPDSHTKLPTTRDENAEAGNSYKRTVEAIDAMFTELYGNETTRAAAEAAETTIKFVDVTITSAELLALNATPKTILAAPGAGLANVLVDVVAYKAAGTAYAGIAAGEDLSIKYTDSSGLEVAQIETTGFLDQATAQTRYAKAFNAASGISSITPVANAVLVMMLLTSEITTGNSDLKLRVYYRTIPTTL

SEQ ID NO: 10684 - protein, 114 aa, BradyrhizobiumColbertium
MTAGTPRSGRPYPYQRPASTAAGQKLDRFLTEAIDDLGAKKMPEGKPTSLADAMQAIKAAADTVRSQALAKAEQMRADIETNGALALRKMDAIHQEAMNELNAVLGNERAGDQG

SEQ ID NO: 10685 - protein, 56 aa, BradyrhizobiumColbertium
MTRYSPPTNINVPWKVAVLKRDPDYEREARDQVEFRFSNGREFRHNPANRGPYAED

SEQ ID NO: 10686 - protein, 591 aa, BradyrhizobiumColbertium
MRRELRGTRYLTAANDALARAILEDLPYFDYDETVRWYSTIVPKLDLKGRALLGVNDRYFLLTGLCRRVDALHPWLFERCREVEAAPDGYIDLWARFHYKSTIITFAGGIQEILTDPNIKIAIFSHSKPIARAFLTQIMQEFERNDYLKQVYPDVLWDDPRKEAPIWGLDRGIVVKRRSNPKESTVEAHGLVDGQPTSRHYDLHIYDDMVTRESVTNPEMIRKTTEAWELADNLGSHEGVRKWMPGTRYSFADTYGVVLERRVLKARKHPATIDGTLKGQPVFLSQARWEEIKNTQRSTVSAQMLQNPVAGNEAMFKSEMFRPYTVRPTIMNIYIMVDPSKGRTKTSDRTAMAVIGVDVAGNKYLLDGVRHRMNLSERWATLKKLYTKWRDAIGTQVIIVGYERYGAQTEDEVIKDWQERDGVAFELVELNWPREGGHSKRDRVERLEPDMRVGRFYLPGIVYHPEIGGIDGKALWSVWTEEDAKKAEAKGETPGYNIGQIVYRPLLGALREHRAMEATGQNYRIVQPIKLIDEDRNIYDLTRAFMEEAMFFPFSPKDDLIDAASRIYDLSPKPAIQYETASLEPVAYPDA

SEQ ID NO: 10687 - protein, 243 aa, BradyrhizobiumColbertium
MSEKKIATPDIARATWEEMIDPSVRRVEAKLKAAGYATPSYRTINKWQQEAEAAGRPWKTTKAAASAKDKMKKVRKALDDATPALTGDPRSKAEDVVNAAFKALPPPDEEAPRAEAEKPDPEMDGARERLKAIRDAIAGDPTDEQLLSMAAKQTLKTAIIIEAVLGEMAPSLIATQPEAVGKLQLAVAESLAAAGEPYDRIGRARELAMKTISSGGGQAEVIPPQGSADPLADALAAFKRNAA

SEQ ID NO: 10688 - protein, 100 aa, BradyrhizobiumColbertium
MNRPANADASINARLSDSLPELIEQISNELTTLDKHLDQAIGIADHLHGSPPPAPENALGLTAVPSDPDGLLGKLRMRLERLRDLNSGFSRELGRISTAL

SEQ ID NO: 10689 - protein, 79 aa, BradyrhizobiumColbertium
MIRKPFPFPVGGTLIRAWTPERIAREIAVANVGIKAALRAGDMDEANTLISRKVGLRVCAGEIKVSLRPPPPQVLGALK

SEQ ID NO: 10690 - protein, 102 aa, BradyrhizobiumColbertium
MIEPTNGRIVWYTPYKNELLSPYGMVVQRDKDGNVIPLAAQICAVWGPRMVNLLVTDANGKQFAATSRTLLQDDDVGNEYGGFAQWMPYQKGQAAKAEAAKS

SEQ ID NO: 10691 - protein, 38 aa, BradyrhizobiumColbertium
MPSIEEIIGVACILTGFGLFLLAFSRAGGREGEPFEFE

SEQ ID NO: 10692 - protein, 76 aa, BradyrhizobiumColbertium
MKPTHNYTGHVTFDLTEGKIHRVTGEDGKTRIIALFPKTWERGATQAMSAVNGQEVKMRPYRVTEWEEIELRPVNE

SEQ ID NO: 10693 - protein, 64 aa, BradyrhizobiumColbertium
MTLRYGPCHGGPYDKRNIAHHGDVRRIAFYRNSGRPLPALVDSDDPEVEFGEYRWSGKAWLWVG

SEQ ID NO: 10694 - protein, 75 aa, BradyrhizobiumColbertium
MTRNAMTLPTCRTCRFMLPMEGDASSGFCHRVPPVDRSEGDTLRSMYPIVGLDKPGCGEHQRKPFFSVPKGWLRA

SEQ ID NO: 10695 - protein, 279 aa, BradyrhizobiumColbertium
MLAIVKKPRGAKAPADRYPSGDKKPGMAPTVFFRIREYGGRLGIDPRLSTVLGRMGCFRELSEAEVDAGFRIAEVYGRYEHLKGIPRRTAASPSYERGFGAKDLMLDRLSPDELKRHKKAVRRAEKAFDQVQNWIGNQYALIERVCVLNEEPGPVNKGMLAAVLHEVAIQMGLISETKATPKPKAPTKDDGALLAEAAVDALVQWFFNTAASKPTHFSLVSNPDWKASRGITGSDGRYHHTIPVPLRGLTAEQMDAKLRLACAVAGMLEIADAETGEVA

SEQ ID NO: 10696 - protein, 125 aa, BradyrhizobiumColbertium
MRDEAAAAARAMAPSRPTKPKEVDPPPPTEAERERVKLSVQTFKDAVNPINAAQEAARKARQNEIDVERAQREEHTRRMEYIVQGFEPPTKNGKTMSIALARAIGMQLTKRAPAPPPKCEFSPEE

SEQ ID NO: 10697 - protein, 290 aa, BradyrhizobiumColbertium
MSRPWFPFYVGDYIKDTARLTTEAHGAYLLLMLDYWTTGAPPDDDEVLATIARMPVKRWASKIRPALVCFFEIENGVWRHKRIEEEIAHSAEVGKSSSNKAKAAAEARWGKKRSKREASSDDAPSIPDDMPRNAQSQSQSQETLPAGESDARPAAREGIARMVPIDWQPSQANLQAARDAGLSDEEAEAQAARFRKYNRARGTKFTDLDEAWAAWVLLAKPAEKPASVDSQTPAVPPDWDNIASFWVRTGRWQRGHGPEPGMGGCRCPPEILEKHGIDPATGMVKRKGAA

SEQ ID NO: 10698 - protein, 44 aa, BradyrhizobiumColbertium
MRTWQIEVRCIDLLQQTIGRVAARGDPGHYGELDGTIGAAQVVG

SEQ ID NO: 10699 - protein, 45 aa, BradyrhizobiumColbertium
MFRSALELGVTRSVQAVQAAALPVAVDDVWHSIDRCRSLPRPRLG

SEQ ID NO: 10700 - protein, 384 aa, BradyrhizobiumColbertium
MGMVPQMADVWEQRRDDHGYNYARVADVAGGLGAITKVVRLGLQSSVLATGALLVIQGEATGGIMIASSILLARALAPVELAIANWKGFVAARQSWSRLRIFLLRSPQKRPSIRLPPPLREISVDFVSLAAPGGERLLLRDINFSLSAGQVLAVVGPSGAGKSSLARALVGVWQAMRGRIRLDGAPLDQWSPDQLGRHIGYLPQDVELFEGTVAQNISRFSASANSEAIISAATAAGVHNLICSLPDGYDTNIGPRGTSLSAGQRQRVALARALFGDPFLVVLDEPNSSLDADGEAALLEGIRRGREKGMAFVIMAHRQSILAAVDRILVLGAGQMRAFGARDEVLKALRQGVEPADRAEQLPQNARTLAPQSGASLRITRVGT

SEQ ID NO: 10701 - protein, 333 aa, BradyrhizobiumColbertium
MELYARQARLTAERDALGTVEQPSSLRGFSDAARAAEVLAGERRLFELRQTARAGQKAQLREKIGQITEQIQGLTEQIAGKKQETELISRELVGVRELWAKNLIPIQRVTALERDAARIKGEHGQLVASTAEAKGKMSEIGLQIIQVDQDLRSEVAKELRETEGKVGELVEKRVSAQDQLNRIDIRAPQSGMVHQLSVHTVGGVISPGEQLMLIVPQADVLVVEAKIAPKDIDEIRLQQSAVLRFTAFNQRTTPEVHGTVTLVGADEITDDKSGKSYFKIQITPSSEELVRLKQEKLVPGMPVEAFVQTTSRTALSYFAKPITDQVTRAFREQ

SEQ ID NO: 10702 - protein, 48 aa, BradyrhizobiumColbertium
MMAGPYAHAKRPLRILRRRLGRKRRPRPIRKDLEGRIATRWRHGLQIR

SEQ ID NO: 10703 - protein, 106 aa, BradyrhizobiumColbertium
MGKAIAYLLNHWDGLTLFLDDGRVEMDTNPVENQIRPLILTRKNSLFAGHDEGGRSWARIASLIATCKINSVEPYAWMKATLEAIATSHPQSRIDELLPWSFARTS

SEQ ID NO: 10704 - protein, 256 aa, BradyrhizobiumColbertium
MASAEDDNEEDRSPKLRLVSTNPNARADRQIELAKSEVQNALAQFAAALLRTIAGNDTEAVYLIRRLALVVEAINKFEKQADRGMSAAELQEALCLPQAEMDYAADDDWRSRRWRREDGFDDIVKGALRLAAHKLLGEDPAFGGMHSERVIERGIKTLEELRRPPPPARPRSRQTKNLAGSWDDLHLDASAAKPKRRFGERLGSAPKASVQRSTRRRAEFDEDDLKELRKAIKAKDNKRIAELTAKIGRPPSKGLK

SEQ ID NO: 10705 - protein, 151 aa, BradyrhizobiumColbertium
MTSLNRERQAGKSFALLKPLEVMSFRYEKKSQQDVDDEKETFDAIRAQSDLFSKQVVRSYIPCPYLFKYRYRTDDGLREGTCQDWEIEATFHKWSRLYGESKALSEMQRVFGEELPKKGMLLAMGTHSLHPDTWLINGVVRQDDIRQQSMF

SEQ ID NO: 10706 - protein, 397 aa, BradyrhizobiumColbertium
MTMNATIESTPGPDTLSQRLTVVLAAACGMVAANIYYAQPLIAPISAALGLSHAAAGLIVTMTQIGYGTGLLLIVPLGDLVENRALICAVIMLGAAALLAAAFATHALPFLLAALFIGVGSVAVQIIIPYAAHLAPEAIRGRVVGNVSTGLMLGIMLARPVSSFITAALSWHAVFFCSAALMIVLAAVLWMTLPKRRPLARMHYGELLLSMPQLVRATPLLRRRALYQASLFGAFTLFWTVAPLQLAGEFGFTQRGIALFALAGVAGVFAAPIAGRLADSGHSRIATLVAMLLAAAGFLATYIGVPGSMLNLACLVVAAIAIDIGVQGNVVLGFRAIFALGHEHRSRLNGLYMATFFAAGAAGSGVGAFAFAQGGWMLASAIGLALPVAGLLYAATE

SEQ ID NO: 10707 - protein, 41 aa, BradyrhizobiumColbertium
MVAGLLRGRNVREKVYCGFVTALSAEGFSPPLLTPSATQMP

SEQ ID NO: 10708 - protein, 65 aa, BradyrhizobiumColbertium
MNGHAILENVRRYRGIASLYRQTAAFRPGQSWSLLEQARDWEARALSELEAYFATRSDCAASLAA

SEQ ID NO: 10709 - protein, 47 aa, BradyrhizobiumColbertium
MLATRGSTSSSRRPGHAMTTFNRIFTTERLLQIIVVLMATLAMKLMS

SEQ ID NO: 10710 - protein, 325 aa, BradyrhizobiumColbertium
MSLKEFSYNGPGHAAAQLRHLTIRQLRSLAALSLKGSVTAASSHLGLTQPAVTQQLRQLQDLAGLPLVQRTGDGMLLTDAGKEVLALAERVEAAIADCQGALDLLAGRTGGTVHLGAVSTAKYFVPHAIAAFSKRYPKIEIKLTIGNREEIREAMHGYDLDFAVMGRPPADVTVDVRQLGRNPHIIVARKGHWLEKDSGLSLTDLVHETFLTREPGSGTRTLMEGMFQKSDLEPVIGMEMSSNETIKQAVIAGLGIAFISAHTVAHELAEGRLVVLDVAGLPIVRQWYVIRRSDKVLLPPAQAMFDFLGSEGSNYLPDVPELGGR

SEQ ID NO: 10711 - protein, 345 aa, BradyrhizobiumColbertium
MIGQLRLDDHLQRYSETVPHALAVAGAVDAIAAAAIEIADLIASGDLADASGLTTGRNSDGDLQRDLDVQADAILRRRLGRLPIAALASEEMREAQIVDRQGRICIAIDPLDGSSNIDINMTVGTIFSILPAPDDLSLAFHQRGSAQLAAGFVTYGPQTSLVLTLGEGVDIFTLDRKAGCFRLARSGVQISEACDEFAINASNRRHWDPPVRAFIDECLAGVEGPANHDFNMRWIGSLVAEAYRILTRGGVFLYPADARAGYGDGRLRLTYEAHPMAMIIEQAGGSATTGRERILELSAQSLHQRVPLIMGSSNGVRRVEELHCDPLLVASVSAPLFARRGFFRL

SEQ ID NO: 10712 - protein, 291 aa, BradyrhizobiumColbertium
MSRKHPIISITGSSGAGTTSVKKTFEQIFFREKVNAAYIEGDAFHRYDRAEMRAQMAKEAERGNKHFSHFSPETNLFEELERAFRDYGETGTAVTRHYVHDAEESALHGAAPGTFTEWKRLPENSDLLFYEGLHGAVVTDKVNVARYADLKIGVVPVINLEWIQKLHRDRSARGYSTEAVTDTILRRMPDYIHYICPQFTETDINFQRVPTVDTSNPFVARWIPTPDESMVVIRFKNPRGIDFPYLLSMLPQSWMSRANSIVCPGAKLDLAMQLILTPLIMQLIERKRSLK

SEQ ID NO: 10713 - protein, 672 aa, BradyrhizobiumColbertium
MNISVHAEADLYAVAHNDLANAVRFLAIDAIETSQSGHPGLPMGMADVATVLFSRFLKFDSAHPNWPDRDRFVLSAGHGSMLLYALLHLTGGDVSLDDIKAFRQWGSKTPGHPEYGHTAGVETTTGPLGQGIATAVGMALAERMANARHGDGLVDHFTYVIAGDGCLMEGISQEAISLAGHLQLGRLIVLFDDNGISIDGPTSLATSDDQLARFAASGWSVRRIDGHDPEAIAQAIAEERETEKPSLIACRTIIGYGAPDRQGTEKAHGAPLGTEQTAAARRALGWDYQPFVVPIPILKAWRMIGQRGQVDRLAWLDRYECATPEQRDLFVEGRAVALPAAYALAAAKLRERFASERPKLATRQASQQVLDGIAGTIPGLVGGSADLTHSNLTHARAQAPVNSGAFAGDYIHYGIREHGMAAAMNGLALHGGFIPYGGTFLAFSDYSRPAIRLAALMRLRVIHVMTHDSIGLGEDGPTHQPVEHLAALRVIPNLLVFRPADAVETLEAWDCALSAEHRPSVLCLSRQALPTFRSDARGKNRVARGAYLVVSPDGGRDVTLMATGSEVSIALDAARLLATEHIRAAVVSAPCFALFEEQPEDYRATVLGTAPRVGIEAAVQGDWSRWIGMEGEFVGMRGFGASAPAAVLYREFGITPQSIAEAARRAIARKSQ

SEQ ID NO: 10714 - protein, 361 aa, BradyrhizobiumColbertium
MARITLRQLLDHAASHGYAVPAFNINNMEQGIAIMQAAAEVDAPVIMQASRGARSYAGDLMLSHMIDALERTYPDIPLCMHQDHGNDEATCASAIAHGFTSVMMDGSLKADAKTAADYDYNVAITRRVVDLAHWVGASVEGELGVLGSLEQGGGEQEDGHGVEGTVGHDQLLTDPDQAVDFVRATKVDALAIAMGTSHGAYKFSRKPDGDILAMRVVEEIHRRLPNTHLVMHGSSSVPQPLQDMFNQFGGEMPQTWGVPVEEIVRGIRSGVRKVNIDTDCRLAMTAVFRKVASEARSEFDPRKFLKPAMDAMRELCRERFEQFGTAGHASRIKVVPMSEMARRYRAGELDPRGDARESVAA

SEQ ID NO: 10715 - protein, 486 aa, BradyrhizobiumColbertium
MNAHAGTVRGKERYRSGVMEYKRMGYWEPDYTPKDTDVIALFRVTPQEGVDPIEASAAVAGESSTATWTVVWTDRLTAAEKYRAKCYRVDPVPGSPGSYFAYIAYDLDLFEPGSIANLSASIIGNVFGFKPLKALRLEDMRFPVAYVKTFQGPATGIVVERERLDKFGRPLLGATVKPKLGLSGRNYGRVVYEALKGGLDFTKDDENINSQPFMHWRDRFLYCMEAVNRAQAASGEVKGTYLNVTAGTMEDMYERAEFAKELGSVIVMIDLVIGYTAIQSMARWARRNDMILHLHRAGHSTYTRQKSHGVSFRVIAKWMRLAGVDHIHAGTVVGKLEGDPNTTRGYYDVCREDFNPTKLEHGLFFDQSWASLNKMMPVASGGIHAGQMHQLLDLLGEDVVLQFGGGTIGHPMGIAAGATANRVALEAMILARNEGRDYVHEGPEILAKAAQTCTPLKAALEVWKDVTFNYQSTDTPDFVPTALETV

SEQ ID NO: 10716 - protein, 135 aa, BradyrhizobiumColbertium
MKMTQGCFSFLPDLTDQQITSQVQYCLANGWAVNIEFTDDPHPRNTYWEMWGLPMFDLQDAAGVMMELAECRKVYSDRYIRISGFDSSHGWESVRISFLVNRPKQEAEFELVRQEVGGRAVRYTTVRKPAAQAAT

SEQ ID NO: 10717 - protein, 310 aa, BradyrhizobiumColbertium
MLDVPDATTTEPGETHFDLRKEAEAAGITDTLQQLDQELIGLKPVKSRVRQIASLLLIERVRQRAGLASAPPTLHMSFTGNPGTGKTTVALRMAKILHGLGFVRRGQVISVTRDDLVGQYIGHTAPKTKEILKKAMGGVLFIDEAYYLHRPDNERDYGQEAIEILLQVMENQREDLVVILAGYGERMTSFFASNPGFRSRIAHHIEFPDYAGAELLVIAELMLKERGYRFSAAAREAFEKYIALRRTQPFFSNARSIRNAVDRIRLRQADRLVSDLDRMLDVADLETIDAMDVLASRVFSGGADARSAEP

SEQ ID NO: 10718 - protein, 248 aa, BradyrhizobiumColbertium
MTGEIIIAPSILAADFSRLGEEISAIDAAGADWIHCDVMDGHFVPNISFGANVIKAIRPHTEKIFDVHLMIAPTDPYLEAFAQAGADIITVHAEAGPHLDRSLQAIRAIGKKAGVSLCPATPESAIAYALDRVDLVLVMTVNPGFGGQSFLEPQLEKIERIKTMIGDRPIRLEVDGGITPDNAAVVAAAGADVLVAGSAVFRGKGVAEYGANIQAIRLAAERGRIPKRQDNAAQRMRVSDGGRSGRPA

SEQ ID NO: 10719 - protein, 70 aa, BradyrhizobiumColbertium
MENVRRYRALASLCRQQAAYRPLQNWELLGQAEHFEHLADIELKAYFDACNVSQDEDTPAAATWEAPVAA

SEQ ID NO: 10720 - protein, 278 aa, BradyrhizobiumColbertium
MYKDILVHIPTERPMRPAIEGSISLAAHLNAHLDAVAVGYVTTSVAYVMEGGAAVAAVFELERERAVERAEAALAVFKTEAANAGISYACHPLGAIPADAAESLGEMARLHDLSIVLQPDPAQGSFDNDVPSEILFQAGGPVLFLPYTFRGAFKANRIGICWDGSRLAARAVRDAAPFLARATEIVVITINEPDAGSGEASASGLARHLGRRGLSTRIVGLSATRADIQPTILSLAADESLDLLVMGGYGHSRLQERILGGVTRAMLEAMTVPTLMTH

SEQ ID NO: 10721 - protein, 515 aa, BradyrhizobiumColbertium
MNDRVNSDTTTSRKILRPRRLALLGTVAALGVAALSIAPGTSPFGMNSFIAPAQAAEAAATPPSFGDLVSKVKPAVISVRVRIDRDNDKSAMLQQNRMDSDEDTPFDQFSRQFGFRFPGGMNGMPRQRHQMITGEGSGFFISADGYAVTNNHVVDHAESVQVTMDDGTTYKAKVVGTDPKTDLALIKVDGRRDFPFVKFSDQKPRIGDWVVAVGNPFGLGGTVTAGIVSASGRDIGNGPYDDFIQIDAPINKGNSGGPAFDMNGNVIGVNTAIFSPSGGSVGIGFDIPASTAKLVVAQLKDKGAVTRGWLGVQVQPVTSDIADSLGLKEARGAIVDNPQDGSPAAKAGIEAGDVITAVNGTAIKDSRDLARTIATLAPGTSVKLEVFRKGDSKTVTLALGELPNERQAKENRNSDERRGQPNAGTPRLGLSLAPAGDVQGAGQSGVVVTEVDPQGPAAQRGIQTGDVILNVGGKAVASVGDVRSELAQAKSSGKRSVLLQVRSAEATRFVAVPLA

SEQ ID NO: 10722 - protein, 120 aa, BradyrhizobiumColbertium
MDRLKFSLWSTLLVAPLVLSGGNAFGRDDGRYANSPLKPWFDSLRSRLGPCCSDADGFAVADPDWESHNGRYRVRLDGQWIEVPDDAVITEPNRAGRTMVWPVKTAFGVSIRCFMPGSMM

SEQ ID NO: 10723 - protein, 104 aa, BradyrhizobiumColbertium
MARKAKKRYSRSSGSDVASEMRRYKKGTAKSGRGGRGGRVKSRKQAIAIGLSKARKKGKKVPKKASKRTSAKKTSKNTSRKTSKKSSRKSSRKSSKRKSSTRSR

SEQ ID NO: 10724 - protein, 64 aa, BradyrhizobiumColbertium
MPVQGKYDARVFLSEQMTRAQGLKLKRLSEEAYQPAQYSRDLSFSEAAQRIRALEAEIELANSF

SEQ ID NO: 10725 - protein, 59 aa, BradyrhizobiumColbertium
MADVEVSVRDLVERDRDCTEKALAQMDLRRRINLLIGEWKAAGGTDVLPDIRDRVRGRA

SEQ ID NO: 10726 - protein, 83 aa, BradyrhizobiumColbertium
MRRRHQLISATGLIKLLTHTMMGAALGLTFTLTLVLSNPAVANLLNNGGSQAIVVVALTLVMTFAIGATLTGVVFILTEDKEP

SEQ ID NO: 10727 - protein, 73 aa, BradyrhizobiumColbertium
MGKVVFLYRSLAYRNAAADILRKARKLPNGAERSAARRYARALRDLARTEAWLEGRVAREPRTVRRMTSAASG

SEQ ID NO: 10728 - protein, 496 aa, BradyrhizobiumColbertium
MDQDKVNILLVDDQPAKLLAYEVILKDLGENLVIASSGREALEVLLKTEIAVILVDVCMPELDGFELAAMIREHPRFQKTAMIFISAIQVSDMDRLRGYEMGAVDYVPVPVVPEVLRAKIKVFAELYRKTRELERLNHDLEDRVRARTAELERSTAKLRESEQRRSMAIAAGKMGSWDWDWVSGDWMWDEGQYRIFGVDAESFEVNPANVQALLHPDDVDQLRRAIAEFSKGTRAYETEFRIVRPDGEVRWCVGTAAATVDESGRVVRVSGVTVDITERKRAEERQNLLAREVDHRAKNALALAQSIVRLTRADEVKAYVNAVEGRINALARVHTILSLSSWQGAELSKLIDEELAPYSLGGQIRLAGPEVQLLPTTAQTLALALHELFTNSAKYGALSTRSGRLSIAWQIEDELLTLSWEESGGPLVMTPKSRGFGTRSLLASVESQLGGQAQFDWRAEGLLCRLEVPLTRKASATTAPGKFDAAGAAELQRASG

SEQ ID NO: 10729 - protein, 1352 aa, BradyrhizobiumColbertium
MPGVAGTWKDLTDNVNFMASNLTAQVRNIAEVATAIAGGDLSKKITVDVRGEILLLKDTLNTMVEQLRSFAAEVTRVAREVGTEGRLGGQANVPGVAGTWKDLTDSVNSMAGNLTAQVRNIAEVATAIAGGDLSRKITVDVRGEILQLKDTLNTMVDQLNRFAGEVTRVAREVGTEGRLGGQAVVPGVGGTWKDLTDNVNLLAANLTTQVRNIAEVTTAVARGDLSRKITVDVKGEILELKNTINTMVDQLNGFAGEVTRVAREVGTEGKLGGQAQVPGVAGTWKDLTDTVNLMAANLTEQVRGIVKVVTAVANGDLKQNLTMKSRGEVAALADTINNMTETLATFADQVTSVAREVGVEGRLGGQANVPGAAGTWKDLTGNVNLLAANLTSQVRAIAEVATAVTKGDLTRSIQVDARGEVAELKDNINTMITNLRLTTDVNTEQDWLKTNLAKFTNMLQGQRDLTTVGRMLLTELSPLVNAHTGVIYQVENENDPQLLLLASYASDGVYPYQPVLQFGEGLIGQCALDKRPRVVSDIPADVVPINSALFRVAPKNLVVLPVLFEGQVKAVIELASLVSFTTSQMTFLEQLTDSIGIVLNSIEATMQTEGLLKQSQQLAGELQTQQRELQQTNDQLEQKAQQLAERNVEVERKNQEIEQARRALEEKATELALTSKYKSEFLANMSHELRTPLNSILILGQQLTDNPDGNLSAKQVEFARTIHGAGTDLLNLISDILDLSKIESGTVTVDAEEILTANLLETVGRPFRHEADNRNLSFKIDVDPNLPRSIVTDSKRLQQVLKNLLSNAFKFTAEGEVRLKVAGAIGGWGTDHPVLNSAPAVIAFEVSDTGIGIPLEKQKLIFEAFQQADAGTSRKYGGTGLGLAISRELASLLGGEIHLRSTPGKGSSFTLYLPLKYSGPTLAPRSAPAPQQYSQTPALQPPAPEQRVIEQLPDDRLNLEPGDSILLIVEDDPHYARVLVDLARDKGFRVLVAARGGEALELAKQYQPTAVSLDVFLPDMLGWTVLSQLKHNPLTRHIPVQIITLDEDRQHALARGAFSFVNKPTTPEGISAALTQIKEYARPRRKRLLIVEDNEAEQLSIRELLHHDDIEIVTTDTGAGALSTLRMHPCDCVVLDLRLPDMSGFEVLDQIRNDETLSNIPVVVFTGRELSAEEDAELHTMARSIVVKGVESPERLLDETALFLHRVITELPVEKQRMLEKLNSSDEDLIGKTALLVDDDARNIFALSSVLERRGMKVLTATTGSEAVTLVESNPEIAIVLMDIMMPQMDGYQTIGVIRENPAFARLPIIALTAKAMKGDREKCLEAGASDYLAKPVNTDQLLLAIRMWLHR

SEQ ID NO: 10730 - protein, 86 aa, BradyrhizobiumColbertium
MMVFAAGSALAQGGGPSGRGAVTGDPAASSANPRADTPTTGTATRSNPSGSGTSSSGGKDDNGDAGRDKMLEGDRTAQPQRHPNDK

SEQ ID NO: 10731 - protein, 170 aa, BradyrhizobiumColbertium
MRVLAAIILAFIHTATLAESTGERKPGDRPPTAIEVISGLYSFSRFQQGLLENTDLKGNAEVKNLAALRAEEAVKRDKRLKGVQEAIGAELHVGKVESPTASLVEPEMSDGPTYVRSFYAAQIPEYESIIILLERYLKAPDHAALAAFAREQLPILRVQARDAERTMADR

SEQ ID NO: 10732 - protein, 65 aa, BradyrhizobiumColbertium
MKQSDIFRDNADNCLQLAERADGQPAHKRYSRMADAWAALANEQDWLDGEIPPVPAHAPAPNRDM

SEQ ID NO: 10733 - protein, 44 aa, BradyrhizobiumColbertium
MAPRLVLLSLMLAFGVSVAFATVTTVRQVHLENASGEEVHPVRS

SEQ ID NO: 10734 - protein, 67 aa, BradyrhizobiumColbertium
MAHSDQGIVKDKRGEEQPRDKERAQSVHKTDPKGSPSREATRDPKLSDDSKTPGSGAMPDGSSDATG

SEQ ID NO: 10735 - protein, 84 aa, BradyrhizobiumColbertium
MITMNDVRAERLQVMLSPEELAAIDDFRFRHRMPTRAAAVRELLNLGLAAVGVDASAGVKSSNFGVLGRGPDGHTHRDPEDAAD

SEQ ID NO: 10736 - protein, 296 aa, BradyrhizobiumColbertium
MSEQALIDPVSRFPKPPFKKQTQPWPGLAGKMEPRPDHGETTYKGSGRLAGRKALITGGDSGMGRAAAIAYAREGADVAINYLSAEEPDAQEVIALIKKERRTGLAIPGDLTDEAFCKQLVDQAVQGLGGIDIVVCNAARQQARASILDVSSEDFDATMKTNIYAPFWIIKAALPHLKPGSCIIGTTSEQAYDPSPDLYDYAQTKAATMNYVKSLAKQLASKGIRVNGVAPGPIWTPLQVSGGATMEKLEKFGGMTPLGRPGQPVELASIYVQLAAADASYATGQVYGSAGGSGQP

SEQ ID NO: 10737 - protein, 66 aa, BradyrhizobiumColbertium
MFPFAVDASEAAASVALAAWTTCRRDKEVLLEFDIMLSARIETQCAETVVVARVGTPGVPASFSNA

SEQ ID NO: 10738 - protein, 183 aa, BradyrhizobiumColbertium
MKRTIIALACMILAGPALAQSLGEKTGVNSALGVAPSTPDFVKQVAISDMFEIESSKLAEQKGNAQEKSFAKQMVTDHTKTSTELKGLVSDGKVQATLPTTLDSAHQSKLDKLKNATGKDFSSDYDSYQVSAHEDAVSLFERYANGGDNAALKGWAGKTLPALKHHLEMAKELGKAPSVGQSK

SEQ ID NO: 10739 - protein, 75 aa, BradyrhizobiumColbertium
MSDFRDIQHGVNDPVGGLDVKRQVNDNRTPHERAQHHADVRADATPTPTEPFLPERLRRKATDPINPRSGRKPTD

SEQ ID NO: 10740 - protein, 595 aa, BradyrhizobiumColbertium
MSQTVSDFIVQRLHQWGVRHIFGYPGNGINGVFGAMNRADGKLNFVQARHEEMAAFMATAYAKFSGEIGVCIATSGPGASHLVTGLYDALLDHQPVLAIVGQQSRNALGGHYQQEIDLLSMFKDVAGAYVMQASSPAQVRHLIDRAVRIALARRAPTVIILPNDLQEEPYEDPPRAHGTLHSGIGYSAPSVMPREADLDRAADILNGGKKVAMLVGAGALGATDEVIAVADRLSAGCAKALLGKAALPDDLPWVTGSIGLLGTEPSYDMMMECDTLLVVGSAFPYAEFLPKEGSARGVQIDIDASMMSIRFPMEVGLVGDAAETLRALLPRLEPKSDGAWRQRIENDVAKWWTTLDDRAHQPATPVNPQLVTWELSPRLPDRAIITSDSGSCANWFARDLKMRRGMTASLSGGLASMGAAVPYALAAKYAHPERPVIALVGDGAMQMNNMAELITAAKYWRSWRDPRFIVCVFNNEDLNQVTWEQRIINGDPKFEASQRIPDVSYSRFAELVGLRGIFVDDPQQIGSAWDQALASDMPVVLEVKTDPEVPPLPPHITLQQAKNFSLAVLKGDPNESAMIKGAARQVLESILPGKQ

SEQ ID NO: 10741 - protein, 124 aa, BradyrhizobiumColbertium
MLNQDELDRSETGRLIGSDKVEGTSVYGADRNRIGSIERVMIDKITGKVSYAVLSFGGFLGMGNDHYPLPWQSLKYDTELGGYITAITAKDLESAPKYGEKAEWNWGDDAAVRGINTYYGVPFA

SEQ ID NO: 10742 - protein, 154 aa, BradyrhizobiumColbertium
MRWDTLEEETCSLARTVAVIGDRWTLLILRECFLRVRRFEAFQSSLQITRHLLSERLKKLVRFGILRRVPYSDAPKRYEYILTQKGLDLYPIIMAMVHWGDAHMGDERGRPLLHEHKTCGKLFDPVMVCSECGEALHAKQVHVHAGPARREAGR

SEQ ID NO: 10743 - protein, 245 aa, BradyrhizobiumColbertium
MPKRNATAAVIGAGDFIGSEIAKKFAAEGFSIYAGRRNGDKLAPLVKAIEAAGGEIHARSLDARKEEEITAFLNDADQRAPLDVCIFNVGANVNFPILDTTERVFRKVWEMACYSGFLAGREAARLMLPRGGGNIFFTGATASLRGGSGFAAFASAKFGLRAVAQAMARELGPKNIHVAHLIIDSGVDTEWVRQRRLEALGPNALDNPDLLMPPSSVADAYWQLYQQPKSAWTFEMEIRPFGEKW

SEQ ID NO: 10744 - protein, 333 aa, BradyrhizobiumColbertium
MKTAITELFGIEHPIIQGGMHFVGFAELAAAVSNAGGLGIITGLTQKTPELLAKEIARCRDMTDKPFGVNLTFLPTFSAPPYPEYIAAIVEGGIKAVETAGRSPEQYMPALKAAGIKVIHKCTSVRHSLKAERIGCDAVSVDGFECGGHPGEDDIPNMILLPRAAEELKIPFVASGGMADGRSLVAALSLGAAGMNMGTRFIATKEAPVHQNVKNALVAATELDTRLIMRSLRNTERVMKNANVDRLIEIEREKGDKLTIDDIHDQVAGVYPKIMLDGQMDAGAWSCGMVAGLIHDIPSCKELIDRIMSEAETIIRSRLMGFLDGTGAARKVA

SEQ ID NO: 10745 - protein, 139 aa, BradyrhizobiumColbertium
MVLKSVLAAIAFALVITGGGIARADGYKPEEYLGLDLSKAVLSPKRLGPETRFAPVALEARDGNEAQARAEPVGVPKKVAAERVRVAEPKATQARGGQARGAARAKLARRHGNPLDAQAMDTRIQTWPCRSGGICNWKR

SEQ ID NO: 10746 - protein, 521 aa, BradyrhizobiumColbertium
MASPRASRAWTRRQFLVRSAFSLPIASLATPSISRAADRPQILGGIQSGDVSDGSAVIWGRAGRPARMQVEWSTVESFKSIIASASGDALPDADFTSKLLLTDLPPGQDIFYRLRFDDIATGLGGESRIGHFRTAPAASQSISFLWSGDTAGQGWGIDASRGGYRSYRTMLDNRPDFFVHSGDHIYADCAILPEQKLPNGEIWRNIVTEEKSEVAQTLAQFRGNYKYNHLDEHFRAFHAEVPMFAQWDDHEVTNDWSPTGSYDGTGYDDDGTPRLVARARRAFFDFMPIRDIGSRQGRVYRKIAYGPLLDVFIIDMRSYRDDTWNKGDDHRGWILGAEQLAWLKRELSASGATWRVIAADLPIGLISLDAVALGDGPPDRREHEIADLLSSIKRAGIRNIVWLTADMHYTAAHYYDPNKAQFQDFEPFWEFVSGPLHAGSWSPGELDDTFGPVPMYQHGCSAEQGENLAPCFGLQFFGRVDIDGTTGVMTVTLKDVDNRDLWSVDLLPQLQMRPAVVAKHS

SEQ ID NO: 10747 - protein, 78 aa, BradyrhizobiumColbertium
MKKLGYVAAALGMLVVAGPTLASAETVVIKRGHHHHHGPYGARAEYRMHQHDRSWHRHHRGDRVVVIKRSHRRHHHHH

SEQ ID NO: 10748 - protein, 150 aa, BradyrhizobiumColbertium
MMRNLGRGIAAAVLWAAFTSMAGAETLAATLKQWGLLGSWAVDCGVRPDREKGALLTYEIRKDGRVMYRRNFGDAKDENEVVSATVNGEGLLKVMVFFPSLRQTREFGLLLLKDGSLRAIYNRNERGEYTIKDGKYVASGAPTPVQQRCD

SEQ ID NO: 10749 - protein, 89 aa, BradyrhizobiumColbertium
MLNQVMDFAGEVLPGSCAVPPYSEAAFLTELGDRLRSSRMRCDLSRRELARRSGISERYIAQIEAGKGNVSIVLLLRLASAIHGSQPQA

SEQ ID NO: 10750 - protein, 287 aa, BradyrhizobiumColbertium
MTAMGQLVLAAKVTHVPSLMLSETPGSPLRAAREPAVSSLRELGRRAKERGVSCFVVFDTHWLSNFGYHINANARHRGSFTSHEAPQMIQDLRYDLPGDTNLAEAIANRAGDAGLNVIAHQVPSLGLEYGTIVPMHYMNPDGFAKVVSVASPLFTSFEESRILGEATRRAIDASDERVAVLASGSLSHRLWPNKKLGPEAWTSVTSEFNRQVDLRVLELWQSSRYREFLDMLPDYATKCNGEGGMADTIMLFAALGWHDYHGTAEQLCDYFPSSGSGQVNVEFHVEA

SEQ ID NO: 10751 - protein, 410 aa, BradyrhizobiumColbertium
MTSSFDFASLFPAGLPAPSARWTGLAKYSFVGGNNDSEQVPLDDLIEATNAVLRREGRSLATYGLAHGPQGYLPLREFLVTKLKRDAGISCTVDDLLIVSGSLQALDLVNATLLTRGDTVIFEQESYQGSLTRLARLGVNVVGIPLDKDGMRMDVLAMTLADLKSRGIRPKYIYTIPTVQNPTGSIMPESRRAELVRLATEYGVPIFEDDCYADLVWSGQRPPAIYAMSPNGGVIHIGSFSKSIAPALRVGFVVAPWEVMSRMLALKTDAGSGALEQMVLAAYCKPHFASHVPALTKALRTKLDTLMEALNEQFGTAAEFEEPKGGIFLWVKLPDQVDTLKLYQAALAAGVSINPGPEWSTNKGQSSSRLRLCFASPTHQQIREGIAVLAEVCRKEFGVPARSANVEKRA

SEQ ID NO: 10752 - protein, 175 aa, BradyrhizobiumColbertium
MRKGLVAAMLLGPLAFAVPAAAQSKVNIEQNFADSLTALPKEDLAVSGGFYVPAYSSVAMSQGKLRVDFSVTLSVHNASETQPLVVKRIAYFDTAGKQVENYLKAPVALRPLATVSIFIPTDDVRGGTGANFLVDWAATGEIAEPVVEALMVGGIANAHYAFISQGRPTRTAGKK

SEQ ID NO: 10753 - protein, 576 aa, BradyrhizobiumColbertium
MHELIRDITLSILFAWMLGLLAHFSRQPLILAYLIAGFCIGPFGAGWVHSQESISVISELGLIFMLFMIGLEIDLKKIVRAGRVILFAAGSQLLGGCLLGLLFFVGIGLSLGSGHFDAVYLCVACALSSTVIIVKVLYEKRELDTLPGRITLGVLVLQDIFAILFLAVQPSLANLQVSVILLSIGRVAVLVAATLLVSRYVLPRVFHQIARRPELILLGALAWCFLVAETAYRLSLSREMGALIAGVSLSTFPYALDVTAKVTTLRDFFITLFFVALGMTIPVPGLSVISLALMIAAFTVVSRLVTTFTPLYLMKQGLRASLLPALNLAQISEFSLVVIQTGVADHHIAAETANAASFAFVVLAVLSTFVMTRSDEITRWAIGPLKRIGLRDLDHGNGHAEEGHEGGHGEARRIVILGFFRAASALLAEIERQTPVLLEQITVVDFNPNVYQTLLSRGLHVIYGDISNVDTLLHAGIGKSEMIILSVPDSLLKGATNEKLVRHVRALNPTALIVATADLLADVAPLYEAGASYVTVTRLSDAHELFTVIEAAQAGLLADKRAELDQRLGERREVLP

SEQ ID NO: 10754 - protein, 358 aa, BradyrhizobiumColbertium
MPDSVQEVLQAFARVELVVVTDDEDREGEGDLIVAASLCTAEKMAFIIRHTSGIVCAPVTTEDARRLRLDPMVAHNDSAHTTAFTVSIDYKPDGGTGISAEERASCCRALANPNVGANDFARPGHIFPLIAKDGGVLLRSGHTEAAVDLCKLSGLPPVGVISELMNDDGSVMKGEQVARFAAEHKLKHVTIADMIAYRQAREKLIERVSTFVTESPIGPLQGYAYRSPFDSIAHVAFVYNGVGDGKNVLTRFHKPNIVKDTFTGHKRMAAVLEHFKKSGRGVLVYLRDGAAGVPVAPLPDESSTEADRNRQWREVGVGAQILRDLGVTSIRHLTSSVHDYKGLSGFGIEIVANEQLES

SEQ ID NO: 10755 - protein, 404 aa, BradyrhizobiumColbertium
MSVRPQAKDKPAAASFQWDDPFLLDEQLTEDERMVRDTARAYAQDKLLPRVSKAYLEEKTDREIFNEMGELGLIGITLPEEYGCANASYVAYGLVAREIERVDSGYRSMNSVQSSLVMYPIYAYGDENQRKKYLPKLASGEWVGCFGLTEPDAGSDPAGMKTRAEKVSDGYRLTGSKMWISNAPIADVFVVWAKSAAHDNQIRGFVLEKGMKGLSAPKIGGKLSLRASITGEVVMDGVVVPEDALLPNVSGLKGPFGCLNRARYGISWGALGAAEDCMHRARQYTLDRKQFGKPLAATQLVQKKLADMETEIALGLQASLRVGRLMDEGKFAPEMISIVKRNNCGKALDIARTARDMHGGNGISIEYHVMRHVHNLETVNTYEGTHDVHALILGRAITGIQAFF

SEQ ID NO: 10756 - protein, 305 aa, BradyrhizobiumColbertium
MSDNDDVPFNRDFPLKPGVVEEVRPGVRRVLCNNPSPFTFTGTVSYIVGKGNVAIIDPGPDDEGHAAALLDAVRGETVSHIFVTHTHRDHSPNAVRIKQATGAPVYAEGPHRASRPRFESEKHNPESGADRDFAPDVSLAHGDVVEGDGWQLEAVATPGHTANHLAFAWAERKFNFVGDHVMGWSTSIVAPPDGSMIDYMDSLDRLAARDEDLYFSGHGPEISEGPRFARFLIRHRKAREASILHRLAKGETDIPTMVRAIYIGIDPRLTTAAGYSVLAHLEDLVARGVVATEGDPVIGGTYRMA

SEQ ID NO: 10757 - protein, 284 aa, BradyrhizobiumColbertium
MARRFSAPYQSEPVSSLAIWARNLAVFAVVAVVVSIIIVRFDFLEPKPALATFLGGLAIAGVSILFGLAGFAAIWQNGSRGMARILLAFLIDGAILAYPAYLGLQYRKLPPIYDITTDPIDPPRFDALARLRTGDGTNTAVYAGLYSAEQQRRFYPEVEPVELEISVDRAYAIALQLVHKRKWIVIDERAPQPPRRIGRIEAVARTPIMGFREDVSIRVVADGDDSRVDIRSASRNFDSDLGSNAARVKQFIDDLNAAADADALKPVKKTPIAPPKTPAKTVKK

SEQ ID NO: 10758 - protein, 542 aa, BradyrhizobiumColbertium
MLGLMQDWPLLCHRIIEHAARIHGKQEVVTRSVEGPIHRTNYAEIHKRALKVSQMLERGGIKLGDRVATIAWNTWRHLEVWYGIMGIGAICHTVNPRLFPEQIAWIINHAQDRIVMTDITFVPILEKIADKLPSVERYIVLTDKAHMPETTLKNVVAYEDWIAEADGKFKWKEFDENTAAAMCYTSGTTGDPKGVLYSHRSNVLHALMANNVDALGTSASETMLPVVPLFHANSWGIAFSAPSQGTKLVMPGAKLDGASVYELLSTEKVTHTAGVPTVWLMLLQHMAANNLKLPDLKMVICGGSAMPRSMIKAFLDMGSNVRHAWGMTEMSPIGSVAALKPPFQNATGEARLDVLQMQGYAPFAVQMKITDDAGKELPWDGKTFGRLKVSGPAVAKAYYRVDTNILDEEGFFDTGDVSTIDEDGYMRITDRSKDVIKSGGEWISSIDLENLAVGHPAVAEAAVIGVFHPKWDERPLLIVQLKQGQQATREDILKFMEGKIAKWWMPDDVAFVEGIPHTATGKILKTALRDQFKDYRFPNAAA

SEQ ID NO: 10759 - protein, 40 aa, BradyrhizobiumColbertium
MFDDPVAEQGPILHQTKHSDVPPRSRWARVRSQRWAKELS

SEQ ID NO: 10760 - protein, 276 aa, BradyrhizobiumColbertium
MPPPAAEEKPSPDQPGADKPAEVASPPQKQASPCRLALTEDIAIAPSIPDIRGPGACGGEDLVRLEAVVLPDKRKVTVKPAAILRCTMASAIADWLRKDVVPLASSLGSPVNELDNFDSFECRGRNRVAGATLSEHGKANAIDIRGIKLANGQSIGLTARTLSREVRERVLHSVCARFSTVLGPGSDWYHEDHIHLDLAQRRNDYRICQWNVWDPLPQVAPLLPAERPEEAPPREVAARPEANEGTDDEAEKSHAPKNKSEPEKARASKPATKKRR

SEQ ID NO: 10761 - protein, 228 aa, BradyrhizobiumColbertium
MSSLKFTFGILAAGLLLSGCMQATRYEATDTKAFKPKDKELLAKVKYENTPVAEPFRRAIVEFHRKEAPGSIVVDSDNHYLYYVLEGGKAIRYGITVGEEAMAWSGIAKVGSKTEWPAWHPTPSEISRLGVPTYVAPGPDNPMGSRALYLYSGGKDTLFRIHGTNQPEYIGASISSGCIRLTNEDAIDLYDRVKVGTLVVVLEPKHGDSPHNSRLALGSSQTGQAASY

SEQ ID NO: 10762 - protein, 325 aa, BradyrhizobiumColbertium
MFSVFVPSESALKKAVIEDLAAVPESAVWIDLVNPSAAEDKAVERLAGIAIPTREDMQEIEISSRLYMENGARYMTATLMCHSDTDMPRTTPVTFILGDHRLVTVRYDLPKPFALVEAKLARSCTPAVTGEMVLMELLDAVIDRCADILERCGADIDQVSHDIFEPESERHGQAKRYSQILISIGRKGDLTSKVRESLVSIGRVVTFLSAVVEGVKWSKDMREQLKTMQRDVASLTDHASYLSNKITFVLDAMLGVVNLEQNNIIKLFSVMAVVLMPPTLIASVYGMNFRVMPELEWVHGYPMALVMMLIAAIVPYWIFKWKKWL

SEQ ID NO: 10763 - protein, 39 aa, BradyrhizobiumColbertium
MLNAVEQSSSFSPSSSGAPQCRHMRADIDGALPLVRTWR

SEQ ID NO: 10764 - protein, 250 aa, BradyrhizobiumColbertium
MPHSSNAPRRTLLLTGASRGIGHATVIRFSSAGWRVITCSRHPFPEDCPWDAGPEDHIQVDLGNPADTTRAISEIRDRLEGGTLHALVNNAAISPKGPGGTRLGSVDTDLDTWTHVFHVNFFAPIMMARGLIEELKAAKGSVVNVTSIAGSRVHPFAGAAYATSKAALASLTREMASDFGRVGVRVNAIAPGEIDTSILSPGTEKIVEQQIPMHRLGTPDEVAKIIYVLCTETSSYVNGAEIHINGGQHV

SEQ ID NO: 10765 - protein, 213 aa, BradyrhizobiumColbertium
MTDTTSMKHQTPLTSGDFTAADEPFALFEAWLNEAIKSEPNDPNAMALATVDSDGLPDVRMVLMKGFDTEGFVFYSHIASQKGRELAANPKAALLFHWKSLRRQVRIRGNVTPVTDTEADAYFATRPKQAQIGAWASKQSQELESRFAFEQAIAKVAAKYVIGDVPRPPGWSGWRITPLRIEFWHDRPFRLHDRIEFRRDAAGQKWSKTRMYP

SEQ ID NO: 10766 - protein, 135 aa, BradyrhizobiumColbertium
MTVVLVGLGAGGCSFSRNEQSAYAKVDDSDLTGSIARPAKDASPTETDLAFTRNAASDVLSKGDKDSSQHWENPETGARGSVTPIAQSYAAEDGRKCRDFLASYVNGSTESWLQGAGCQSGRGRWEIHTLKPWRS

SEQ ID NO: 10767 - protein, 320 aa, BradyrhizobiumColbertium
MRDPYEVLGVPRSASAAAIKSAYRKLAKKHHPDSNKGDPKAAERFAEINSANEILGDEDKRKQFDRGEIDADGKPRFQGFPGGGGPRGRAGPGGFESYTFRSGGAGGPGGGAFEDILNSMFGGGMRGARPGAGGGAQFDFDTGGIGLDLDVNVAMSVSLEESVKGGEKRVRLPTGKELNVKIPAGVSEGQQIRLRGQGESAQGHPPGDLLITINIAPHPFFKVEGADLRIDLPVTLYEAVLGGKVRVPTLGNAVELSVPKNTSSGRTFRLKGKGLPKAGGTGDLFVTVRIMLPDGNDAELEALMEKWRDQDPYNPRSGLG

SEQ ID NO: 10768 - protein, 286 aa, BradyrhizobiumColbertium
MRKVRSQPAEGASEVELRTIFWAAEPETSNMNDRRIAVTEDELHAYVDGELPVERRPDVEAWLAAHPDEAERVQSWRTMAEMLHARYDGIAHEPVPARLELERLERRPRQWLYGAAAAALVAFVAGGTAGWVAHGAANAPSTFQSLTADALDAHRLYVVEVRHPVEVGGNERDHLQAWLTRRCGWTVLAPNLEASGLKLVGGRLLPGPNGPASFLMYEGTSGERYTIYTAKTDNGATQMRYAKADKDGALFWAERGVGYVVSGGNDRDRLTKVAQAVYDQAEKNGS

SEQ ID NO: 10769 - protein, 162 aa, BradyrhizobiumColbertium
MNAFRQNVEAMIPALRRYARALTRDADTADDLVQDTLVRALRSERLFLGGDVRSWLYTILTNLNKNRRRSLARRPQFMPLTENNPDASGTEAEGRDIEKALATLVEEQRSVLLLVMLEGMSYREVADIQGVPIGTVMSRLARARAHVKASLEGERPVLRRVK

SEQ ID NO: 10770 - protein, 271 aa, BradyrhizobiumColbertium
MAQNSGLMQGKRGVILGVANNRSIAWGIAKACHAAGAELAFTYQGDALKKRVEPLAAEIGGLVLGHCDVTDAATIDAAFAVLKEKWGKIDFLVHAIAYGEQLDGRYVDTTQENFSKSMLISCYSFTAVAQRAEKLMTDGGSLITLSYYGAEKWMPHYNVMGVAKAALEASVRYLAADLGEKNIRVNAISAGPIKTLAASGIGDFRYILKWNEYNAPMRRNVSTEDVGGSALYLLSDLSRGVTGEVHHVDSGYHVLGMKRPDAPDISLGGKD

SEQ ID NO: 10771 - protein, 199 aa, BradyrhizobiumColbertium
MAVPTIYFLRHGETEWNALGRLQGTKDVPLNARGRSQAVHAAGVLADLFKRDGKDSAALPYVSSPLGRARQTMELARGKLELPPADYSLDDRLREIGYGIWEGLTLAESEASDPDVYAKRLADKWTVAPAGGETYAAVQLRMLDWYESLLVDTVAVAHGGTCRALMVALGLEPPAGAAELFIEQGAVYVFRDGRLEKFS

SEQ ID NO: 10772 - protein, 362 aa, BradyrhizobiumColbertium
MSFNTFGHMFRVTTFGESHGVAIGCVVDGCPPMIPLTEADIQKDLDRRRPGQSRFTTQRQEPDQVKILSGVMAHPETGEQVTTGTPIGLLIENTDQRSKDYSEIKDKFRPGHADFTYEAKNGLRDYRGGGRSSARETATRVAAGAIARKVLPDVRVRGALVQMGPYKIDRAKWDWDEIANNPFFCPDKDKAAFFETYLDGIRKNGSSIGAVIEVVAEGVPAGLGAPIYAKLDSDLAAAMMSINAVKGVEIGAGFGAAELTGEENADEMRTGNDGTRFLSNHAGGVLGGISTGQPVVVRFAVKPTSSILQPRLTVDRQGADTEIFTKGRHDPCVGIRAVPVGEAMMACVLADHFLRDRGQVGR

SEQ ID NO: 10773 - protein, 404 aa, BradyrhizobiumColbertium
MNSSELRRVCDWLIDGAWSAAEPAEMIADFCERLVAAGLPLWRFGIFIRTLHPEIFGRNFIWRRGQEVEIGAVDFEILDTPEFARSPLRVVFEQGIEVRGRPSDPDSKRFPFLEDMRAEGATDYVAVPMPFLDGSVHATSWITQQPGGFSDGDIAAIRSIIAPLARVSEIISLRRTAEMLLDTYVGNRAGARILGGQIRRGHNDTMQAAIWLSDLRGFTALSDRLPPETVVTILNHYFDCQVAAIRGHGGEVLKFMGDGLLAVFPIDEYVGDAADVCAGVLEAARESRASVEALAIPVGDAVERFRFGVALHVGNILYGNIGGGNRLDFTCIGPAVNLAARLEKITGRLGRTVVASEGFANVCRHDWLELGEFPIAGFSKAQRVYGLADETYAQAAEPIPPARS

SEQ ID NO: 10774 - protein, 101 aa, BradyrhizobiumColbertium
MNDTVSKPKTKTKTKVERPRLHKVILINDDYTPREFVTMVLKAEFRMTEDQAYKVMITAHKLGACVVAVFTKDVAETKATRATDAGRAKGYPLLFTTEPEE

SEQ ID NO: 10775 - protein, 127 aa, BradyrhizobiumColbertium
MNIQFILAVAAGGALGAVMRYLAAIGSGRAFGTDFPWGTLIINVTGSFLIGIFAALFATRWNLPQTVRIFLTVGICGGYTTFSTFSLDTWYLIERGQTLASAAYMIASVALSVGALIAAMQLVRALP

SEQ ID NO: 10776 - protein, 400 aa, BradyrhizobiumColbertium
MTTPNAARTSLPRGIWVLGFVSMLMDISSEMIHALLPLYLVTVLGTSTLTVGFIEGIAEATASITKIFSGALSDWLGRRKLLAAFGYGLAAFTKPLFPLAPSVGWLVAARFIDRVGKGIRGAPRDALIADIAPIGLRGASFGLRQSLDTIGAFLGPLVAIALMWWTADNFTIVFWVAVLPAFLSFGLITFGVNEPDPDPSRVPVKNPLNLAAMRQLGAVYWRVVAVGIVFTLARFSEAFLILRAQSIGLDVMWVPAVLVLMNVAYALSAYPAGILSDRINRTGLLALGLVLLAGADLALALLPSLAGLALGVVLWGLHMGLTQGLLSALVADAAPPSLRGTAFGYFNLFTGLALLAASVIAGALWDAFGPQGTFLAGLGFALVSLVGLLAVGNGLAARNR

SEQ ID NO: 10777 - protein, 73 aa, BradyrhizobiumColbertium
MKTCELGAKLPSSCRGRAAGTPQATSRPWARMRATGHDESRDRAPGPLVRHDFHARVAHTDGDGVPRQPPGGR

SEQ ID NO: 10778 - protein, 286 aa, BradyrhizobiumColbertium
MRLLFSIGAVLVAGMFAGGDVAGIAAPGPKFGAPRNHPQRLAADKDVQVDVELILAVDVSYSMDMDELAMQREGYAQAIQSKEFLQALKLGPNGRIAVTYFEWAASSDQKIIIPWRLVDGPETADAVAAEIMKTPIRRASRTSISGAINFAMPLFDEDPYRGLRRVIDISGDGPNNNGGPVTVARDAALEKGIVINGLPIMVKEPSYSTMDIDNLDFYYEDCVIGGPGSFVITIKERDKFKEAIRTKLLMEVAGRTPERPVMRVADKEPRVNCLIGEKIWSDRWGR

SEQ ID NO: 10779 - protein, 211 aa, BradyrhizobiumColbertium
MSIVTSSTNQISPANERMYRQSALVGDWKGNWVGNNQPVSFKVVNIRGARAQVEYTHNGRTERGFGEVKGTLITFGGVTVGTKDGKNMVLLFSVGGVGKQTANLEKQAPPASDSRLMGSWGGYSSDNGKSASFKVLAVNGKEAQVSVTTDGVTRQGTGYVYKNVIMFGQTQIATDDGQNGKVIYQVGTKSFMVPVTKYPPADSSSSVDKTA

SEQ ID NO: 10780 - protein, 55 aa, BradyrhizobiumColbertium
MRGTARPSARDPTFDRAFQSNLATRRDGDFMQACTILRQVDQELKALTQPRRTPP

SEQ ID NO: 10781 - protein, 200 aa, BradyrhizobiumColbertium
MFNFANQCGLAALLALLCLNGSSADAQVAPLRYWIPGGPFGLGGGASQSSDTYGNFSSFNTGEAGWRTNYADGFFVGSERGNLGLSGFNQAGSAGSFSALSYDSTQFGYNTKTAGGMPVTFFAGFNTLKFGNGIGSSLAPLTSSAAPGYGGFAGVEFNPTSNLSLSFGVGYTQQQSGRMDSDINSSMLPGESPALGGLRR

SEQ ID NO: 10782 - protein, 357 aa, BradyrhizobiumColbertium
MHRRRFITAALGLSAAGTGTSAAAAASTYDEAAKTSRAPLQSTPRDRELVRFATLAANSHNTQPWTFSIRGNVIAIAPDFKRRCPAVDPDDHHLFVSLGCAAENLILAASTLGWHADLALDGDRIVITLEEASPAASTLAAAIPIRQCTRAAFDGKPAAPETLRRLEGACRESNVTAILMTDRAAIAGVTDYVLQGNSAQMRDKAFMRELVHWIRFNEAEALATMDGLYAPASGNPSLPSWLARPLLNLFFTESGENKKYREQLESSAGVVVLAADGSDRSHWIAVGRACQRFGLQATALGLKYAFINQPVEVASLRSQFAVSLGLGERRPYIVMRFGTGPDLPKSLRRPPERVMQS

SEQ ID NO: 10783 - protein, 845 aa, BradyrhizobiumColbertium
MASTTGSAISRLLLSAIAGTCMAIIACGPAKAACTPAAGNGISALCTGVTAGGYGGFGFSNLNVTVDDGASLSGGVAFNTGSLINRGTVTSGGSAAGLNAGTVVNEGTLAGSIGIDAGTATVTNRGSIAGTGIGITTAGGNLTLDNFGTVTGFFGIFADGAAISNAGVINGVGDTSIDVAVRLSLVNTATGAINGHTAAITAPLAEISNAGSITSATATAIDVVTLSSLVNSGLVSGVTAAIHGTTATIGNSGAIVASAGPAIDLAGSLTLTSSGLIRGSSDGIKASTATLANSGTITGSAGRAIRLTGAGDITNSGSISGGSYGIESFGTVRLSNSGTIFGGFAALAISNAVIENSGSILSNSVAIDSGNTRINNSGTITGEVIAITSNQLALFNGGTISVKASGASTIYASSADITNAGVIAAADTASLALSLGASTDTLTSRPGSRIIGLIDLGGGADRVNFRGGNFHYTFNSLAGATVSSAAPYVVSGSQVVTFDSTPFGATDRNLLAFISAVSSALPDADASPTSDSLVHAAPSGPKRDVREAFAAITPQGPTAVYADGTSVWARGFAGERDQPASGALLHSTSRFQGGLIGGDWQANSNLRVGAFIGGGAMQTSEDFNLATTNADIVFGGAFARGTFGATFLDMMLQLGHVDQRGSRLISNNLVAGGIETATASNSGTYAIPELALGHRIGLGRTGGTVWTLTPVGRVRYLAGRLGGFSESGVTANATVGGYTLSGLEERGELKLSATTRIERAAWLNGSLRTGVVGLQRLGDPTVNLTLLGQSLPFVLPGANDVWGLFGGAGLDVTLGPASLFVAGEYLKLSDSSVAYSGRGGLRIAF

SEQ ID NO: 10784 - protein, 415 aa, BradyrhizobiumColbertium
MVERVRIDHVGHRGDGVCLDAGEAIYVPYTLGGETVEVDHVLGHHPDRRKLLAVDVASPERIEPFCPHFGVCGGCAIQHWATEPYRAWKRKIVVETLAQAGIDCEVASLIDAHGAGRRRITLHGRFGTHDILKVGFSATSSHEVIPIHRCPILDPALDGALDAAWALAEPLTSKMPVTKPLDIQVTATANGLDVDVRGSGPLPTPLVTTLSRVAEQHRLARLTRHGELVLQRLPPTVTMGRAEVTLPPGSFLQATVAGEEALAALVAERIGKAKEVLDLFCGVGPFALRLAEKARVTAYDSDAGAIAALVKAARTPGLKPIKAEPRDLFRRPLVPQELCDFDAVVFDPPRQGAQAQALKLAASKVPVVVAVSCNVATFSRDARLLIDGGYRLKSVVPVDQFRHTPHVELVAKFER

SEQ ID NO: 10785 - protein, 244 aa, BradyrhizobiumColbertium
MPPARKRADILLVERGLFESRARARAAIEAGLVIADDKQVSKPSETIAEDAVIQAEPAHPFVSRGGVKLAGALERYPIEIEDHVCLDVGASTGGFTEVLLANGASLVFAIDVGTSQLHPSLRDHPKIVSMEETDIRSYEGKRLPARPDVVVIDVSFISLKTVLPVALSLAAAPMNLLALIKPQFEADRKHNKKGIIRDTAVHREICDDIAAFAASLGCTDIEVFPSPITGGDGNIEFFLGARRG

SEQ ID NO: 10786 - protein, 184 aa, BradyrhizobiumColbertium
MNIYLAGPDVFLPDAIEIGRQKAAICAAHGLTGLYPLDNAIDLTASDASRQIFRGNVAMMDAADAIIANLTPFRGPGADPGTVYELGYMAGTGKFCLAYSNEDAAYADRAGRFTDVTAEDGRLVDAQGLTVEDFGLVDNLMMIHALELHGCPLVTPSKRPVDIWHDLAAFEACVRMAAARLIAT

SEQ ID NO: 10787 - protein, 642 aa, BradyrhizobiumColbertium
MNAYSKTPLLDTIRTPEDLRKLKVEQIRQVADELRQETIDAVSVTGGHFGAGLGVVELTTAIHYVFDTPRDRLIWDVGHQAYPHKILTGRRDRIRTLRTGGGLSGFTKRSESDYDPFGAAHSSTSISAGLGMAVARDLSGGKNNVIAVIGDGAMSAGMAYEAMNNAGAMNSRLIVILNDNDMSIAPPVGAMSAYLSRLYSGKTYRTLRDAAKQINKRLPKIIANRANRVEEYSRGFMMDGGTLFEELGFYYVGPIDGHNLDHLLPVLKNVRDMETGPILVHVVTQKGKGYGPAEASADKYHAVVKFDVATGTQAKAKPNAPAYQNVFGQSLVKEAQKDDKIVAITAAMPSGTGVDIFNKAFPDRTFDVGIAEQHAVTFAAGLATEGYKPFCAIYSTFLQRGYDQIVHDVAIQSLPVRFAIDRAGLVGADGATHAGSFDNAYLGCLPNMVIMAAADEAELVHMVATQVAIDDRPSSLRYPRGEGRGVEMPDVGVPLEIGKGRMIRQGSKIALLSFGTRLAECEKAADELAAHGLSTSIADARFMKPLDTELVLKLARDHEILITIEEGSIGGFGSHVAQYLTDQGVLDTGMVKFRSMVLPDVFQDHDTPAAMYARAGLDAKGIVAKVFEALGKDVKTETVKLA

SEQ ID NO: 10788 - protein, 83 aa, BradyrhizobiumColbertium
MAENTQVDVSRLTFERAIEELETIVKRLEDGKVPLEESVTIYERGEALKRRCEELLRQAEARVDKITTDASGQATGTAPLDVQ

SEQ ID NO: 10789 - protein, 309 aa, BradyrhizobiumColbertium
MSTLLLSHKACLDHVTPPGHPERPDRLRAVEEALSHERFQFLAREEAPEGDLDLVTLCHNEHYVTELRHIAPTSGQVYIDGDTSMSAGTWEAVMRGVGGAVAATEAVMAGEHRNAFVAVRPPGHHAEISKPMGFCFFDNVAIAARHAQRKYGIKRAAIVDFDVHHGNGTQDIFWSDPTVMYCSTHQMPLFPGTGATSERGDHDTIVNAPLASEDGGPEFRSAFENLILPQLQKFSPELLIISAGFDAHYRDPLASLNLRAEDYAWVTRKLMDLADKTAGGRVVSVLEGGYDLQGLKESVTAHVGALMGA

SEQ ID NO: 10790 - protein, 553 aa, BradyrhizobiumColbertium
MRYSVLLSALALTLTFALPASAQTAEPVELRVLAINDFHGNLRPPPGGIRIDDPEDRTRKVMVAAGGAEYLATLVKQLREGHRNTIFVAAGDLIGASPFLSAMFHDEPSIESLSMMGLAISSVGNHEFDEGKTELLRMQNGGCHPVDGCQGPHPFTGAKFRYLAASTIETSTGKSVLPPYEIREFDGIPIAFIGLTLKETAGIVSPAGIAGLEFRDEAETVNALVPQLKARGVEAIVVLIHQGGEPAGDYNECPAITGPIVEIVKRFDRAVDVVVSGHTHQAYVCDIDGRLVTSGDKYGTLVTAIDLKLDPATRDIVGTKAENVIVANASLARDPEQTALIDAYDRLSAPIANRPAGSVTQTLSRVPNDAGESALGGIIADAQLAATRDTKDGGAVIALTNPGGVRTDIAPKENGAITFGDVFASQPFRNRLVTMTLTGSQLKDLLEQQWLDPKRPRILQVSNGFSYTWDASKPFGQRVISEKMTLNGRPIEPGSDYRVTLNDYLAVGGDGFTVAKQGTAPRYGGYDADALFAFFRANGPIGPLPPTRILRVN

SEQ ID NO: 10791 - protein, 249 aa, BradyrhizobiumColbertium
MLMRMRAQTAAARTICYATAVAIDVSTRAKDAKVRADAAARAALLTPMAKAYSTDIGNEVAYLGVQVHGGMGFIEETGAAQHYRDARITAIYEGTNGIQAIDLVTRKLAANGGASVWALLDELSATVSQVEASNDPGFGTTGAKLREAIDALTRTSKWLLERVASAPNEALAGATPYLQQFGSTLGGCLLASEALAAKADGNADAARHVALARFFAENIAVQAGALERTVTESAESVASADAVLLGVSG

SEQ ID NO: 10792 - protein, 2091 aa, BradyrhizobiumColbertium
MTAIAVVGIGCRLPGHIGSPAAFWSALLAGSDLVTDIPQQRWNADDYYVPVAGLPGSSVSRWGAFLDDPSGFDHRFFGIGEPEALAMDPQHRLLLEVTWEAAEHSGRDPRCLCGTDAGVFFGLSHQDYMQVTRDAGALGQAYAFTGTPFSMASGRVAHAMGLTGPAITMDTACSSSLVAVHAARRSLLARECHIAFAGGAMLMFSPATYASASGLGMLSPTGRCHAFDERADGFVRAEGCGVVMLKLLIDALRDNDRVLAVIRGSAVNQDGRTHNILAPSRAAQVAVIDRALSEAQVDPSSVGMIEAHGTGTPVGDTEEFHSLSTQYGRQAPCALGSLKSNLGHAESAAGVLGLIKTTLALAHGVVPRSLHFHRLPAHLQTIETRLFVPTDTAPWPSTGADGLRRAAVSSYGMSGTNVHVVLEQAPQAADSPLPLESRRTGERPWLFPISSTSPAALRASAGRLASWLDATAGSHGPSDVARTLACRRGHRPVRHALIAKTLDDLTGQLHGLAGDASIDAEWVDDNGRGPVFVFSGHGSQWDTMGAALLDVDAVFADVIAAIEPLIQAVSGFSVTDTLRQPGQLSGIERVQPAIFAVQVAMAASLKAQGVAPSAVIGHSMGEVSAAVVAGALSLEDGVKVICHRAMLCQTLAGSGAMAVVGLAPAAVREDLARRLVNDVEVAVLAAPASTVVGGSVEAVQRLVAAWQAEGLFAREVAVDVASHTFHVEPILAQLSERLAGVTANKPQTPMYSTVLLDPRESPVCDGAYWVDNLRHSVRFRPAVHAVLEDGHRVFVELSPHPIVTRAVLENAAAMDFAVRALPSMTRAEPMRNGLLDLVGAIYVAGAAIDFGAMYPDGPLLDLPLPAWTHYPLFLAPAVPTAGAHHLLSTHPLLNVHRTLHEEPERHIWSSEVGLNAHPWLADHRVNEVPLLPGAGFCEMALAAARMAFGTSLVEVQAMTFDHALRLEPSMPVVCTAVLDRPGELNFRLESRADSGAQVHARARLFAGASADSAPAYDIAALRAAHAGPVAADEVWRWFDSQRIQFGPSFRALGTSLALSADGASLFADLRLPASLRTGARGYTVHPVLLDACFQSVGAFAQVVSGTNGRPLLPLSVRSLRLHHPDADAAHCITRFVAMDALHVEVDIDLLDASGRVLLSVDGLAMGSGAAGQHADAVACNSRLLDVVWEPWDIPRAKVQPGDGAWLLLDADDSGHQLTMRLEGSLREQGFKTLILSSAGAGKGGMWREQIEDVLHQHRPAAVAVVLPRSREPASPDAGRANISSLLHVTKALMECERRPRLFVITCMAQRVLPDDTVQLAHAGVRGCLRAVGAEFPALHPTQIDVDLRADLSLIQRQLLSGSKEDETALRGASAYVARLQRSPLGHADRRMVDRDAARDGLRLEIRVPGDLQTLEMAAFERRAPDAGEVEVAVHATSVNFADVLVALGRYPTVGGRAQDLGLDFAGIVTAVGPGLSPFRVGDRVAGLCCGGAWATYVTCDARLLAAIPRTLTDAEAAAILATTATAWYGLKDLARIGPGDKVLIHSATGGVGQAAVAIARAAGAEIFATAGSEARRELLRANGIGHVYDSRTVAFAEQIRQDTAGYGVDIVLNSLTGASQRAGLELLAPGGRFIEIGKKDIYGGTWVELSPFKRNLSFFAVDLAQMCMTAPARVQALLSRVMRLAGEERRILPDIAAYPLADAARAIRVVSGAGHIGKLVLSVPRTGHYRVAEVPKRFTPFKSDGAYIVTGGLGGLGLLIADAMSAAGAGRVILNARSRPTDAAASVLAGMRARGTEVEVISADIAAPSTARRLVEAATATGLSLRGVLHGAAVVADGILPSVTEERLYRNWAPKVDGAWHLHQATLKRQLDWFCCFSSLAALFGSPGQSAYAAANSWLDTFTQWRRAQGLPSSAIAWAAWADVGAGAHLSARGDVRMIDPRDGAYAFETLLRHDRGYAAYVDLGGAPWLTSLSARSPFAVALSQAPAVADDPARRLRAELRRAPLDERPALLRRLIIEHLGVILRRTVNPDRSFFDYGLDSLGTLQLLVALESDTGVRLRAVEVTTVRALADTLSKAMRELQPAGADAGD

SEQ ID NO: 10793 - protein, 392 aa, BradyrhizobiumColbertium
MVTAHLRRHDTYHSWFEERGKAIVRHVLTDPAAIQMECSTLGEVSAKDWQKHIIATPTPFAWDCFRFGILQRTNGFTCFASIDHLHGDATVIAFLMTEIRLAYRAVLDGETPLQLGRPGSYLDYCTSQRQRAAVTTLSDPEVEQWIAFLHRNSGRMPSFALPLGVMEDRYQAEYVHIDIFDDDAMAAFESACHASGARAIGGLLACAALTEREMTGRSRYSVVTPTTTRISPQAFRTTGWCVGVVPIDFEVQELTFSELALIAQRNFDERLCLANVPIELVLELAAGLPAVRSVATGGVMLSYMDANVPPLSAHIAREWHEANGRVYINQGMAAQVALWLFRTQRGLSLTVAYPANATARASMHRYVKAFAGACRRAADAVMATQAHVGLSL

SEQ ID NO: 10794 - protein, 447 aa, BradyrhizobiumColbertium
MSPPFLSFTDQAIYLAHVSLGQHAVIQVLWRYLRPVDLDALTRFRDNLAHGHLARLIRPALLPFARHQWVSAPPPSSALAVVEAPLAPEQLQAWADAQVALPLDPVRGPAWRLTIQTFTDNSTVVSLVVSHCIADGLTIAAAVNEAVRGERRPAAYPAGAVLSALRAATTLGAELQRIVRDAPATLQALAELARTAYTSRATSRTAALNQASADGRPVVFPSAFMRVPTSVWDARAKSLGANRITLLAAITAAFAQTLGRVRDEEVTLLIPVNQREGSSHTGGNGVALATLKLRVDELRGGLHSLQRRLLATLLRTRREPNRLATLLPLVPFVPRRAASAANHAALGALADLPVTCSNLGDLPKDVLQIDGGAADRVCFRGIDRPIPRCAIEARQGVATVFAGAVPGFLNLSFVAYQPGVVTEAQHLRALVERLFADCELVGESFDA

SEQ ID NO: 10795 - protein, 462 aa, BradyrhizobiumColbertium
MLETSTPGAPAYTRHRLAWLDQLAYELFRATGRSQLMQCLWLYDRDVNLAALLRTRERFAALSFNRLIEPSPLPWGRPRWVKPAVTAIPLEQSADPLPRSRLLHWANQHARAPIDPVIGPAVRMAIQPFDDGSTAVSLVGSHLLLDGLGAVRAIAAAVNGIGLPSPYAIAGARGRLSGCVSDAWQVLADAPRTVAALARIAHANWYKSAVPVSRSAAAVAEAGHEPSTIVELPAVVVTVESDAWLVCQQRLGGSSNTLLPGFVASLASRLGRRRLSDGAISLLVPINRRRGLDDERALAIDFHTMNVAPAGLDTSLRPVNASLEALVRGARKSQTGPLASFLPAIAWMPRSAAKTLVDRLFNYAGELPASCSDVGMLPDGLARIDGAPCRQVLTRAVDVNVTRQDLERSQGHLVVVASRYGQTISLCIEACQLGPTQTTPDELRLLVSRTLADFGLDAIIDA

SEQ ID NO: 10796 - protein, 457 aa, BradyrhizobiumColbertium
MSHSSANKLYRRCSGATDPGADDVLCYMDQGSFVGLRALGRGPALHLTWLYPHALDEAAVREFNERLTRGLLGRLLQRSPLPWGRHRWVANPVSGPVTWFRDPLPDERLPHLRRELLDLPLDPEHGPGWRLAVQPLEGGGCALMMLVSHTIADTQATSQAIADAVAGRCLDHGFPAPSWRWSPVMLACDSVESLRTLPDVSRALVALLRGAHKRRAGVSRSSARSSRNRLEPAVDVPLVWVVMDAAASKRRTSDLGVASNTLIMAFTARLALRMGRVDASGRVKLVLPVSDRRSSDRRGNALRSITVMVDPDACRNDPRALQRDMKAALASLIRHGDDLSPVLPLIPYVPLWLARHLERAALGADLPVGCSLAGELPLDVHRPCGEASLLQIAPLERYTAAELERLGGLLFILCHRVGERLFATVSGYAKDRVTTRAELAPIVRDALADMGLCGALS

SEQ ID NO: 10797 - protein, 388 aa, BradyrhizobiumColbertium
MPLLLAYSLRNLYVRKLTNLLTAAGMALVVFVYAAVLMLDSGLKQTLVATGEETNVIFVRRSAEVEIQSLIDRRQARIIESQPEVVMGAEGAPVVSKEAAVLIAQPRRKTKQASNLLIRGVGPAALAVRPRLRLVEGRMFRLGSDEIIIGRALAGRFEDIEIGSSLKFAHREWKIVGRFDAGGSGFDSEIWADSEQLMQSFRRDFFSSVTVRLADSSGFDALKARLEADPRLTIEAKRERVFYEEQSRLLSGFIQLLGITLSAMFSLGAVIGATITMYAAVASRMMEVGVLRALGFRRSRILGAFLVEALLLALVGWVVGLLFASLMTQVKITTLNWTSLSELAFQFVLTPGIVLRSLVFALVMGLLGGFLPAVRAARMNIVDALRVA

SEQ ID NO: 10798 - protein, 386 aa, BradyrhizobiumColbertium
MSQWLTLVARNVLRQRLRTSLTLVGLVVSILAFGVLQTVVKTWYAGVDGAVPSRLLTRNAVSFTLPLPQAYYKRIGAVEGVRHVTYMTWFGGVYKDPKNFFPQFAIDAASYFDIFPEILVSDEVRRAFLRDRRGAIVGRRLAKRFGFRPGDVVQLRGTLFPGNWEFVICGVFDGRDAKTDTSQLFFRWDYLNETLRVRSKAQADQVGFFAVDVGSINRVAEVSQAIDEVFRNSRAETLTETERAFQIGFVKQTEAILISIRVVSFVVIFIILAVMANTMAMTARERLREYATLKAIGFSPGYVARLILGESVAIALVGGAIAIGLTPPVASRLAELSATLFPSLIVSVNTVLLQALSALAVGVLAAVLPMRQAARVSIVNGLRALG

SEQ ID NO: 10799 - protein, 241 aa, BradyrhizobiumColbertium
MLRVSDVPTGEDVLIALSDVSKSYRRGAQIVPVLSKLTFDIRRKEFLALMGPSGSGKSTLLNLIAGIDSPDHGSITVAGEDITLLPEADLADWRAANVGFIFQFYNLMPVLTALENVELPLTLTGLKRRERRDRAQLALSLVGLSDRVKHLPSELSGGQQQRVAIARAIVTDPTMLVADEPTGDLDRQSAEEVLEIMQRLNRDMGKTIVMVTHDRRAAARAKRIMHLEKGDLSYLVEQRLE

SEQ ID NO: 10800 - protein, 441 aa, BradyrhizobiumColbertium
MPGLPLPKRDIFFKFALHCPEIHDETMNLHTPPSDGLPAASDLSALAIDRSADSRRRRQLRRILVRVLVVAMLVGIGVATWMWRRHTQIAVETAAVYSVYPSQALTLLNATGYVVAQRKASVASKATGRLEWLGVLEGSKVHEGEVIARLESSDTQAMRDQAAANVQVAYANLAQGQAELTQAEIAFKRSAALGEKNIISDSMRESAEARLAKARAAFAGYEAAIAAAQANLRASEVAVGQTLIRAPFDGVVLTRHANVGDTITPFSQAVDTKGAVVTIADMDSLEVEADVAESSYLSIHVGQAVEIQLDAIPGERFEGVVNRMVPTVDRAKASTLVKIRFVHRDARMLPDMSAKVAFLEREVAESERKPVLAVPMAAVFEVGGQQHLYVIENGKARLRRVDLGAKVGDQIEVRDLKAGTRVVVRPLEDLVDGHAVKQATK

SEQ ID NO: 10801 - protein, 44 aa, BradyrhizobiumColbertium
MRPFRASALVGIKAAVAMTATVASALNFRKVRMIDFLPIVNAGR

SEQ ID NO: 10802 - protein, 228 aa, BradyrhizobiumColbertium
MQAQDVMIAPVVTVGANATVRQVARILLERRISAVPVVDSDNNILGIVSEGDLLHRTESGTERSYGWWLQILTGDAEMAADYVKSHSAKVTDIMTRDVVTAAPETPLSDIAMLLERRQIKRVPIVNKQGQLVGIVSRTNLLQAVASAKPKLEISLPDATIRKRFLEEIKKQPWAHTFNLNATVQNGIIDIWGSAPSAAERKAIRVAAEAIPGVVLVNDHLIETPAFVY

SEQ ID NO: 10803 - protein, 273 aa, BradyrhizobiumColbertium
MSLASVMVYVDPEQQDEGQIAVAEAVANGFGAALLGVSAIATDPPFVAEGVIIEQTTADDLERMRATLSAKEAWFRRIVRLPSDKVEWRWTIGFPTEFLVEQSRAADLVVVRRSRPKTKSSHYLDAPGAMLRLGRPILSVPDGVTRLSGDRIVVGWKDSREARLAVRDALPLLTRASEVTITEVCTSSEQDAARDRLRDVAGYLGRHGVSCRHEVRVHTAEPDAGYLVRLAADVGADLIVTGGYGHSRLGEWVFGGMTQSLLQDAPVCLLMSH

SEQ ID NO: 10804 - protein, 806 aa, BradyrhizobiumColbertium
MDAPSYIRWFRDIRLADVPLVGGKTASLGELYSVLTPQGVKVPNGFALTAAAFRDALTEAGAWDKLGPLLAGIDKRRIADLARRAAAARAIVYAATDRDDLRQQVAQAYRQLEQEYGRNVAVAVRSSATAEDLPTASFAGQHDSFLNIRGADGLMEACRRCFASLFTDRAISYRIDKGFDHFKVALSVAVMKMVRSDLAASGVTFTLDTETGFRDVVFVTGVYGLGENIVQGAVDPDEFYVHKPTFNAGFRSVLSRRLGSKAKRMVYGRGRNATRNVATAARERQQFCINDNEVLTLAECALLVEKHYSQKAGKPTPMDVEWAKDGKDGSLYIIQARPETVASRRTPEALESYVLKARGTALAEGRAVGEKIAAGRIRLISNERDLRKFRPGEVLVATATSPDWEPVMKLAAAIVTDHGGRTCHAAIIARELGVPAVVGTGNFSKKAKTGTAVTVSCAEGDIGHVFEGTLPYEVERTATESVRKPRTEIMVNLGNPEIAFKSASLPSDGVGLARMEFIINQHIGIHPMALACPGKVTSARDRRKIKLLTARHKKPSEFFVERLSEGVGTIAAAFYPRPVIVRLSDFKTNEYANLLGGADFEPREETPMLGFRGAARYAHPAYAQGFALECAAMKRVREAMGLTNLKIMIPFCRRVEEARKVIAAMADHGLKRGDGGLEIYMMCEIPNNVILIDQFAQLFDGFSIGSNDLTQLTLGVDRDSEIVAFDFDERDPGMLQMLSMAVLGAKRNRRHVGICGEAPANYPEIAKYLAELGIDSISVNPSSVLRTIETVGAAESDSGGRRRAAG

SEQ ID NO: 10805 - protein, 375 aa, BradyrhizobiumColbertium
MEPDQSASSLERSRFWQSASGFWRGVPAWRVWALCALLVSVVVLQLYVQFRFNYWNRDFFDALESRDPARLRGQALLLVPLCLGSVALAVTSVWGRMTVQRKWREWLTGKVIDYWVEDDRYARLAAVQSEQQIPEYRIAEDVRIATDAPIDLALGLVSALLSAVIFIQILWTVGGDIALPVGSHSVRIPGYLVIGVALYSGIVTTAMTLVGAPLTRLVQIKNQAEAELITAAHELRDIGEGAAPRDRRSEVCRDVRSALRATIDQWRRLCWQLMRTTIVSHGNTLLAPIIGLVLCAPKFLSGAMTLGELTQAAAAFTLVQASFNWVVDNYARIADWRSSLERVGGLLLSLDRLNRETPPQQAESPMLPTGSVKLP

SEQ ID NO: 10806 - protein, 313 aa, BradyrhizobiumColbertium
MTEILTITPNPAVDVSTSVDRIIPVAKLRGIGQRRDPGGGGINVARVVKRLGGNATALYPVGGLTGDLLRQLLDKEGIESLTFPIAGETRQDFFVREISTSQPYRFILPGPPLAENEWQTCLAMLSALQPFPSFVVASGSLPAGVPDDFYARVARIVKRREAKMILDTSGPALVAAVAEGIELVKPNLREMRELVGHEPSDAAEWEAAAKTLVRSGKAAIVALTMGHLGAALVTSRQVLRAKPLAITPVGAVGAGDSFLGALVYGLASGAGLERCFRQAVAAGAAALLNPGTELCRPDDVKRLAEQVILSTAI

SEQ ID NO: 10807 - protein, 464 aa, BradyrhizobiumColbertium
MPAADSFLWGVSTSSFQIEGASHLDGRGDSIWDSYCRQQGRIKNGDTGDVACDHYHRYPEDIALMRDIGVGAYRFSISWPRVLPRGRGAANQAGLDFYDGLVDALLAAGIEPWACLYHWDLPQALQDLGGWQNRDIAGWFADYAALLARRLGDRVKRFATFNEPCVFTLFGYGLGWNAPGIADRGALHQAIHHVNLSHGRAIDVLRQSVANASLGAIHNRQPCYPATTREEDVAATWRFAPYWNDAFPYPQHLAHYPLELAEAIEPYIKPGDMAQIARPVDWFGLNHYSPHYIRADANLIGAGFGAPPVEVRRTAIGWPIVPDAFRDTLLDIHHRFRLPIYVLENGTAADDKLDEAGRVQDPARIAYLDAYTRAMQEAIRAGADVKGYFVWSLLDNFEWTSGYSQRFGLVHVDFATQKRTLKASAHWYADLIRTARTSRIAADRAERDTMTERAGAAAATAVSD

SEQ ID NO: 10808 - protein, 233 aa, BradyrhizobiumColbertium
MMAIFAAVAALGAGAPAARAADVSAALSDLMTRLQLQHAKLWFAGKFSNWSLASYEIQHIEGNLAASGKLLPDPSRLGPAKDHLQAVSLAIQQKDVPAFTKAYSDLTNECNSCHRASGYASITIQVPVRPPVTNQLFVDQVAEGRALAHASCGTCHVVEDAAKESPAFRPPAASLLAIVNRPSFSAEGMRLFLISGHRRLGPEQAMPNPRLADYQIDEIVAYLEALRAGLPPR

SEQ ID NO: 10809 - protein, 252 aa, BradyrhizobiumColbertium
MRAHQIMSRRVIAIRPEASIADAIKVMLTHHISGLPVTDSAGNLVGIICESDFLRRAELETEHTRNRLLTVLLGADRVAREFVKEHGRKVEQVMTRDPATAKEDTPLEEIADLMERRNLNHVPVMRDERIVGIITRSDFLSAIAGPLTGAPGYSEDDSQIRRSVLAAMAGMPWQPVGLNVSVRDGKVTLRGVVKGDNPRRAAIVACENVSGVRGVDDRLCLQSDSPAPEDDYGGGDFVSLQAEPSTVDDEPL

SEQ ID NO: 10810 - protein, 518 aa, BradyrhizobiumColbertium
MIRLLAISTALVLATTSLAAAQQPAAQAPAQQARPAQPPILARPNIIMIMADDVGITNVGAYSHGMMVPTPNIDRIAKEGVLFTDHYAEPSCTPGRAAFITGQMPIRTGLTTVSSPGSMIGIDERDPTLAEVLKPLGYRTGQFGKNHLGDRNEHLPTVRGFDQFFGNLYHLNTEDEPEDLDWPKDKAFNDKYRPRGVLDCVAMPQDNPAPADPRFGSWGRQRCTDTGPLTRKRMETVDDEFLSRTLAFMDEAVKAREPFFVWHAPSRMHIYTNLRPESRLLAQPFSSGDDIYGSGMIELDQQVGAILKKLDDLGLRENTIVMFTSDNGAMAAWWPDGGTTPFRSEKATTWEGGVRVPMLIRWPAAIKPASVSNGIQNHMDLFTTLSRAAGVVDVRKDLLESHKVKIDGIDNLAHWRGEAPSNRQVHIMYNEKEMTALRFGPWKTHFKTRNGFFDPFVESALVFNLRMDPFEQRDGHRSNLLAMRKAYLGNMIRDILAEHYQSMEQFPPRQEGGTLRPR

SEQ ID NO: 10811 - protein, 270 aa, BradyrhizobiumColbertium
MGSDKHFPEERPQRVVSVDGFWIDRHEVTNAQFAAFVAATGYITVAERPVDPALYPSAPPHLLLPGGMVFHAPAALGSAEDFRQWWRYTPGANWQHPQGPGSSIDDRMNHPVVQVTHEDAAAYARWAGRDLPTEAEWEFAARGGLDGAEYVWGDEKTPSGVWQANVWQGRFPVSNQLLDGFEGTAPVGCFEVNGYGLFDMAGNVWELTADDYRDARGFQRGMKVVKGGSHLCADNYCFRYRPSARQPAALDSGSSHIGFRTVLRKGGDHT

SEQ ID NO: 10812 - protein, 354 aa, BradyrhizobiumColbertium
MLVEKAYGGVRTRNPADQLNFEISAGQQPYGIGTGMIVWQGAGNGFERGAVSLLPRLSWENTAIARVTLGGWKAEAFHLDPNELKSADTETRLVGGVLEYAWGAGSRVGGAYVKVQNSTAPYPIPTFPLIIPNGRDGTETWYGYGRIEGTAIGLPAAWIRGELALQRNDRIDMRANAWYGEIGNRFASLPMTPALSYGYASFSGDNPSTRTYERFDPLFYGNGLENWWFGASSAYTFLNSNVNYHRVTLNLVATQQDFLKFQFIHTRANELNSPLQFGQGARLNVVNGNLLLTTGVAHHDLADEIYAEWTHVCTPQIATTMWGSVGVPGRGITSLPGINSETWLSAGFIVSLKY

SEQ ID NO: 10813 - protein, 52 aa, BradyrhizobiumColbertium
MTNEAIKALMVFAMYGILELALYFSATIKPSKQAARATAGRAANPDFTGSED

SEQ ID NO: 10814 - protein, 64 aa, BradyrhizobiumColbertium
MNHSIYTAEKATHLKVVAAGLLAGIAIVAATLSVRFAESELSPLSARHVHQAHLVQTPTEMAQR

SEQ ID NO: 10815 - protein, 62 aa, BradyrhizobiumColbertium
MAAMLGWFVRILFAIAAPITALFAARDALNFGLIQTIVTMLLVTALVGLIAAFTGRDRQAPR

SEQ ID NO: 10816 - protein, 147 aa, BradyrhizobiumColbertium
MTKQVVSVQEDTDLAELVDLMEETDIKRVPVLRGKAPVGIVTRTNLLQAVASLLHEIPDPTADDEHVRERITRAVKATDWRPIGFEVNVRNGVVHLHGLVTTDEARQAAIVAAENTAGVKEVHDHLCFVDTYTGLYVESPEDMKAAG

SEQ ID NO: 10817 - protein, 77 aa, BradyrhizobiumColbertium
MRAHHIMTKDLVAVTPHTTIEEAAKIMLRMHISGLPVVDDAGNLVGVVSESDFLRRSEIGTGRRHAAWLKFFMGPGR

SEQ ID NO: 10818 - protein, 173 aa, BradyrhizobiumColbertium
MATETKLPVTKTSTAPAATGEAWQPFQALRNEIDQIFDDFGNGFWKRPFRSLARLERDLSKNFNAPAVDVAESEKAYEITAELPGLDEKNIEVKLANGGLTIKGEKKEETEEKKKDYYVSERRYGSFERYFALPDGVNSDKIEATFKNGVLKVVLPKTEEAQKPAKTINVKAA

SEQ ID NO: 10819 - protein, 72 aa, BradyrhizobiumColbertium
MPYRSNNDLPAGVRHHLPPHALDIYREAFNHAFASHAGDLRQEEIAHRTAWAAVKRSYVKLGDEWVPRRPGW

SEQ ID NO: 10820 - protein, 540 aa, BradyrhizobiumColbertium
MAHKQVLFHSAAREKVLRGASLLADAVRVTLGPKSKSVLIQKSWGAPIVCNDGVTIAKEFDLKDAEENLGAQVLRQAAEKTGDVVGDGTSTSTILAQAILSDGVRNVVAGASAIDLKRGLDRGTQAAIAALHAMAKPVQTRAEKVQVATISAHNDIAIGELVADAIEKVGGDGVISVEESKTTETLLDVVEGMKFDRGFLSPYFVTDADRMEAVLQDPYVLLCDHKIGALRDLVPLLEQVAKSGRSLLIIAEDIEGEALATLIVNQLRGVLKACAVKAPGFGDRRKAMLEDIAILTGAQVISAEIGLKLESATLQQLGRAARVVADKENTTLIGSGGDRARIEARLAQIRVEIEKTTSDYDREKLEERLAKLSGGVAVIRVGAPTEAEMKAKKEALDDAISSTKAAVAEGIVPGGGLALLRTVAAVAKEEAACEGDERTGVQILKRALEAPARQIAENSATDGGVVVARMLGSEGSFGFDAARKVYVDLVEAGIVDPVKVVRTALENAVSVASVLLLTEATMTEIPEPKRDRLPEPDMAM

SEQ ID NO: 10821 - protein, 424 aa, BradyrhizobiumColbertium
MVEQTLSLPKQEHKDRPWVASVWSGILARKWLVLAVLVLLALGAWQGVRVLFGPSVVVDQVVRGRLVETVVASGHVETPYRVEIGSQITGTVAEVLVQEGEKVTKGQSLISLEARELKAAVIQAQGAVAQAEARIRQLEELTLPSAKEALTQAQATLLNAQQTYDRTAQLERNGYATKAALDDAQKTLDVARAVKRAAEFQVYTASPGGSDYVMAQTQLNQARANLDTAESRLGYATIAAPRDGVLITRSVERGTVAQPGKALLVLAPSGDLQLVLQIDERNLGKLALGQSALASADAYPDRRFAAKLSYIHPGIDISRATVQVKLTVADPPEELRQDMTVSVDIEVAAKDDAKVLPVRSVHDILSGQPWVLTIEGGRAVKRPVKLGLRGNSNIEIAAGLEAGDVAIPQSSGMVPGQRVRAVLP

SEQ ID NO: 10822 - protein, 408 aa, BradyrhizobiumColbertium
MNRWLPFEWIAAVRFLREGRLQTIFIIGGISIGVGVIVFMSAMLAGMEANFIRRVLTSQPQIQLLTPDQVARPLRNAAGVIEDAVVQRPSQRVISIDQWPKIRAQMLAMPEITAVSPTITGSALAIRGDASRAVTLTGIEPDTYFNIVKVPDYIVAGSARLTSEDIIIGTELAKNLGATVGDKLNLQAASSANRVLTISGLVDFGNKSANQRVAFIALRTGQSLLGMIGGVTTIDLTIKDIYAAETIARRIQAATAVEADSWIATNAQFFTAVQAQIYTNTLIRVFVGLSVAFGIAAVLIVSVIQRSKEIGILRAMGTSRGQILRVFLLQGGLLGFVGSLFGAAMGALALIYWHAVARQADGSEFFPLILERRLFIYTAVLATVTGLLAATAPALRAAKLDPVVAIRG

SEQ ID NO: 10823 - protein, 228 aa, BradyrhizobiumColbertium
MADAILKLEGVRKAYNVGLPTETEVLHGIDLELDHGEFLALIGPSGSGKSTLLNIVGLLDRPTSGRLLIKGRDTALLGDDELTHLRGHTIGFVFQHHLLISAFTARENIMMPMLADRGFPSAEIAARADHLLAEVGLEKFGDNLANNMSGGQQQRVAVARALAMNPDLVLADEPTGNLDTKSADAVFELMRRVNRESGTSFLLVTHNLDLARRCDRIIQVVDGRIAQH

SEQ ID NO: 10824 - protein, 50 aa, BradyrhizobiumColbertium
MGNGAFCLIQVNTTTITLSCKHPQLREELRRISTVAPALNAAQSGRRPPG

SEQ ID NO: 10825 - protein, 614 aa, BradyrhizobiumColbertium
MESDQGSRKQAMFMAAILAGGMLLAMLQFGLSTYSSVETIPYSQFEQLLAQDRIAEVTVGSDTIQGKLKEPLPSGKSAFVTARVDMALADKLAIKGVSVTGIPGAGALQTLLSWIFPVIAFFLIWFWIGRRMGGGQGLGGLMAIGKSRAKVYVEKDVKVTFADVAGVDEAKFELQEVVSFLKDPTSYGRLGAHVPKGILLVGPPGTGKTLLARAVAGEAGVPFFSISGSEFVEMFVGVGAARVRDLFEQARKAAPCIIFVDELDALGRSRGPLSFGGYDEKEQTLNQLLSELDGFDPSAGVILLAATNRPEILDPALLRAGRFDRQVLVDRPDKNGRVAILKVHVRKIQMGKDVDLDKVAGLTTGFTGADLANLINEAAIAATRRSGEEVTFDDFVTAIERIVAGIEKKSRVLSKDERRRVAYHEMGHALVAASLPGVDPVQKVSIIPRGIGALGYTIQRPTEDRFLLTIEELKNRIAVLMGGRASERLIFDGAISTGAADDLQRATEVAIEMVTKYGMDETVGQRTYAPKPQAFLGAAQDKIVGAAEATGREIDLAVRNLIEEGDRRARDILQRRRADLDAGVELLITNETVTSEQFAPLLGKRSEESKPVAA

SEQ ID NO: 10826 - protein, 126 aa, BradyrhizobiumColbertium
MTRIFQERLKILEVQKQLLCLSPFWRSESETIAQGRDVLHALASGCGPMFEELELLQILSQPVLFGDEQLGDCASAVRHEVGVVQQRDVVVDIRSNDVPMHGALPPAFAGKYYHYMGGLRRWSLSR

SEQ ID NO: 10827 - protein, 72 aa, BradyrhizobiumColbertium
MLTYYFDMKDGVPVRDRSGLELVSDGAAIAHSKSLAEKVRREKPTGHPELQIVVIDESGREVHREQIYPSAV

SEQ ID NO: 10828 - protein, 873 aa, BradyrhizobiumColbertium
MSRINPRIERRLTFAWSSCQIGALPMTEQSIPAKALAAEFWQTPKDELCRTLGSGPDGLTQTEASRRLAVFGANRADASQSRSALRKLGHRLWNPLIAMLLAAAIVSGLSGDIGSFAIIAAVLSLSITLDIVQEHRAERTAEALRESVAIQADVIRDGREVTMSVTALVPGDVVKLRIGDLIPADGVVLDAQELQVNEALMTGEPFPAFKTAAPCSAALPADATNALFAGTSTVGGSGKMLVVRTGGRTRFGAIASAMAASAPPTALEEGVQRLGLLILRLTLFLTLFVLMAHLVAQRPAMESFLFAVALAVGLTPELLPMVMTVTLARGALRMAERKVIVKRLSAIHDLGAMDTLCVDKTGTLTEARITLEAHIDPQDRSSDRVLDFARLNSTFQTGVRSSLDDAILSASRDGPDGWVRLSEVPFDFERRCLSVLVTRHDEHMLIAKGAPESILARCVAVEIDGLTHPLDAAWQQKMADIQARYARDGFRLLAVAVRSIPAGQQTIAVGDETGLTMIGFCVFADPPKQDAASAIEALTSLGVTIKILSGDHDAVVSHVARTVGLPSGRVMTGAEISELTDAALAARVDDVDLFARIDPDQKRRIIAALRHRNHVVGFMGDGVNDAPAIHAAHVGISVTGATEVARAAADLILLAPDLSVLAAGVREGRRTFANILKYVRMGTSSNFGNMLSMALASIVLPFLPLLPLQILLNNLIYDLSEIGIPFDEVDPEDVARPETWDMRSILRFSIVMGIASSLFDAITFVVLLGVFEADATLFRTGWFVESIFTQILVIFVIRSRRLPWRANRPHNILIATSVGALFAGLALAFGPWRGLFGFTALSGGIVAAIVAIAAAYLISANVAKRLAISEPDA

SEQ ID NO: 10829 - protein, 161 aa, BradyrhizobiumColbertium
MTLTKWYVVLAMSAGAVTSAIAQSDFPASPSAKQEAPRLVEVMGMAQIEHLKLWYAGKAKNWDLAAYELRQLTNSLAEAAIFYPAVPVSNVTTMKEPLLAVADAIATGDERKFAASMRVLTDGCNACHTSMGRGFIAITVPAGGQPPANQIFSPPAASRKK

SEQ ID NO: 10830 - protein, 77 aa, BradyrhizobiumColbertium
MQIGLLNSARSLSRGQIPVKVTKPIASIIRGKSRTDTPPADEDDDRQLSPSAERRQVVEEYADNLRKIIRRLLGKLN

SEQ ID NO: 10831 - protein, 92 aa, BradyrhizobiumColbertium
MLADIHTDDLAAAVRYALETTRATTVCPFHDDVIVRIGDDAAESHAFERAKRIVKSDGTKWDKEALRGELSRQLGAAADGRCPKCDPKASRP

SEQ ID NO: 10832 - protein, 226 aa, BradyrhizobiumColbertium
MLTTALDVNQPLRPKTAQASRVADSFAALAGLIASEFSYQKDEEIFGEDEPAEYVYQVVSGSVRTYKLLSDGRRQIGSFHLPGDVFGLESGATHRLAAEAIVDTTVRLVKRTALEKAATTDVQVARKLWSMTAAELNHAENHMLLLGRKNAMEKVAAFLLEMDRRLAGAGMLALPMCRRDIGDYLGLTLETISRALSQLHSEGILGFSGARQIVLRNRQHLRDMNI

SEQ ID NO: 10833 - protein, 103 aa, BradyrhizobiumColbertium
MSKIIGLLSAVCCIIGSTAPSLGADPLSGKDIAKRWCATCHLIESGQASASDQAPPFTYLAKTPDFDQNRLAFLLLVPHPNMPNMSLNRAEVADLAEYIRSLK

SEQ ID NO: 10834 - protein, 83 aa, BradyrhizobiumColbertium
MERNIIFKCPRTGMNVQHWLPGTMADAAATHVSVRCPACASLHFVNIATGEMLSEGVGQRRHRRSSDDPQSRVPRQALVSTDG

SEQ ID NO: 10835 - protein, 85 aa, BradyrhizobiumColbertium
MVGHGMMGQGMKGRGKMGGDRMEPPVVFRIVFALMDADGDGSVSSPEFQAAHERIFKAMDSSKDGKLTLEEMMVFMHSKSNVPQQ

SEQ ID NO: 10836 - protein, 763 aa, BradyrhizobiumColbertium
MSFDRVLRWSLVAIAIAGLTAGTLARAAGRPDLADFAWALGTVPVIAGLAISIVTDLLRGRVGVDAIALLSMSAALALGQPLAGAVVALMYSGGNVLEEIAVARAERDLRSLVDRAPRLAHRKSSERIEDVPIEDVAVGEELLVRAGEIVPVDGIVGSAFATIDESAVTGEPIPVEKTRGSAVLSGSLNAGETFQLTVTAVAGESTYAGIVRMVTAAQTAKAPFVRLADRYALIFLPVTLVIAYVAWHISGDLTRSLAVLVAATPCPLILAAPVAFIAGVAQAARRGILVKGGGALEALARAHTVLFDKTGTLTIGGARLLSVEVAPGEDPDEVLRLGASLEQASHHVVAKAVVAAAVQHGLELAPPEHVRETMGSGLSGVIDGRQVTAGSREMFRSHIEPSSWELRAIRRASWRSALIVFVAVDGRMTGALLLADELRADTPRAIRLLRDAGIARMVMVTGDRAATAQAIGAALDLDAVLADRVPSDKVEAVRSEQRLHPTIMVGDGINDAPALAVADVGVALGARGASASSEAADVVILTDRLDRVGEAIMISQRARRIAMQSIFAGMGLSLVAMIAATVGWLDPVPAAIVQEVIDVAVILNALRALAPSLARSGPRITAEQGRTLHHDHQALFKDLDRLRQIVDALDDVMPESAAAMIGEAHRLVQSSVVAHEREDEDSVYPKLTKVLRDRHGLSAMSRAHREILHLARLLARIAEDLPSEKIDRYLVRDAQRVIEAIETLVRMHTAQEEDIYEAVVSPA

SEQ ID NO: 10837 - protein, 450 aa, BradyrhizobiumColbertium
MQNLKRAFWGSLAVLVLLWLVAEPQPLGPGPFFPLRQRMVQLSGILAMGCMSMAMVLALRPRWPEAWLGGLDKMYRLHKWFGIAALATAIVHWLWASGPKWAVGLGLLARPERGPRPAIGNSVEAFLAGLRGPAEGLGEWAFYGTVVLIALALIQAFPYRLFYKTHRLLAIAYLVLVFHAVALMKFSYWMSPLGGIVGALLVGGTWAAAVALMRRIGAGRQVKGRITSLKYYPGVRAIETEIEVPHGWPGHRPGQFAFATSDISEGAHPYTIASCWSAEYPRITFITKELGDHTSRLREMLRVGQEVKVEGPYGCFTFDDDCSRQIWIGAGIGVTPFVARMKQMTLRKDAPNCSVTQPVDLFHATADVDEEALGKLAADARSANVRLHVLVDARDGRLTGERIREAVPEWRKASVWFCGPTAFGEALRRDFSAHGFPVEQRFHQELFAMR

SEQ ID NO: 10838 - protein, 104 aa, BradyrhizobiumColbertium
MHFRPLHDRVLVRRIDAEEKTTGGIIIPDTAKEKPQQGEVIAVGPGGRNEQGQLVPLDIKVGDRVLFGKWSGTEVKIDGEELLIMKESDLLGVAEQAGTLKKAA

SEQ ID NO: 10839 - protein, 159 aa, BradyrhizobiumColbertium
MGGATEVEVKERKDRVDDALHATRAAVEEGILPGGGVALLRALKALDGVKTANADQKAGVDIVRRAIQVPARQIVQNAGEDGSVVVGKLLEHETYTWGFNAATGEYQDMVQAGVIDPAKVVRTALQDAASVASLLITTEALVADKPKKTEAASAPAMDF

SEQ ID NO: 10840 - protein, 111 aa, BradyrhizobiumColbertium
MIKDRAFSARGETTQKTLRRFAALAVGAGLSLVPFAALGAESPGSAARTADAFERLALPPIPYLETMPWSSWERGGPTMKVDTLLSPILGPSGIRLDLTPPDRSGPEPAMS

SEQ ID NO: 10841 - protein, 77 aa, BradyrhizobiumColbertium
MDDYRDLVSAALALFCAGVMLVAGHLLLEWHAGHAAPGTGVDAPRSEGAPAPLISNGSSPDRKVIELPAEIRRKRAA

SEQ ID NO: 10842 - protein, 612 aa, BradyrhizobiumColbertium
MNKNVRFNLGYALAAIFAVFLIQYLISAANQIAVIPYSEYQQLLRQGKVDAVGISDRTLQGTLKEPLPGGQKQFVTTRVDQDVAQELEKYNVRFTGQIESTFLRDLLSWVMPVLLFFGLWWYIGQRMAQGGIGGGLMAIGKSKAKVYVESNTGVTFADVAGVDEAKDELREVVDFLKNPTDYGRLGGRMPKGVLLVGPPGTGKTLLAKAVAGEARVPFFSISGSEFVEMFVGVGAARVRDLFQQAHQKAPAIIFIDELDALGRARGIGPFAGGHDEKEQTLNQLLVELDGFDSRSGLVILAATNRPEILDPALLRAGRFDRQVLVDRPDKKGRIEILKVHMKKVRVAEGVDADAVAALTPGFTGADLANLVNEAALLATRRAADAVSMSDFNNAVERMIAGLEKRNRLLNAKEREIVAYHEMGHALVALSLPGTDPVHKVSIIPRGVGALGYTIQRPIEDRFLMTKEELENKMAVLLGGRAAELIVFGHLSTGAADDLRRVTDIARSMVTRYGMSERLGSVAYERDPGNFLASADRPYPTRERDYAEETAAAVDQEVKAIVDQVFQRTQGILSTRRPILDRAAKKLLEKETLEQGDIDALIREMPQEGLRAI

SEQ ID NO: 10843 - protein, 94 aa, BradyrhizobiumColbertium
MRKLALAIAAAATLLIGTVAPASAHWRGHHHHHWGGPGIGPAVALGLFTGALAAAAAPPVYYAPVYGPPRYYYGPGYYRTVRYYPAAYPYWYPW

SEQ ID NO: 10844 - protein, 164 aa, BradyrhizobiumColbertium
MTGHSGEARGREATGRRTAQDGRALDLQQYFPYRLARLAEQVSLAVAEVYSERFALTRQEWRVLAILGARPDIPTKEIGPLTTLDKMQVSRAVQGLEARGIVSRKHHADDRRELIVSLTPAGRALYRKIVPFALAREAELLAVLTTEEAKVLDRVMHKLSAALG

SEQ ID NO: 10845 - protein, 180 aa, BradyrhizobiumColbertium
MKIEKIHHVAYRCVDAKATVEFYKKVMNMDLLGAIAEDRVPSTKAPDPYMHIFLDAGNGNILAFFELPNSPPMGRDPNTPDWTQHIAFQVKDLAELEEAKARAEAAGLDVVGVTDHTIFKSIYFRDPSGHRLEIAAWTATPEQIDRMKSVAHEMVEEWSRTKRPPRHTAWMHEKEFADAH

SEQ ID NO: 10846 - protein, 544 aa, BradyrhizobiumColbertium
MSYIYPKFGYRRSQEQADCVVKRHPIVVIGAGPIGLTAALDCAARGQPVVVLDDNDTVSIGSRAVCYAKRPLEIWDRLGCAAPMVERGVSWNVGKVFFRDQLSYQFDLLPEADHQWPAMINLQQYHLEEMLVARCRANPLIELRWKHRLISLRQAADHATLAVETPDGIFSMEAQWVIACDGANSDVRKMVGAEFTGQFFQDRFLIADVAMKADFPTERWFWFDPPFHPGQSVLLHRQADNIWRIDFQLGWEANPEEEKRPERVIPRIRAMLGADTEFTLEWISVYQFACRRIDNFRQGRVLFAGDAAHQVSPFGARGANTGVQDIDNLAWKLAMVLRGEASEALLDSYHEERAYAADDNILNSTRATDFITPKTKPSRYFRDAVLELARHHGFARPLVNSGRLSTPTPYVTSSLNTEDHDAVTGGMRPGTNAADAPILMDGKPAWFLHCLGDGFTVVAFGEVSDRIEIAAGPFAAKLVVVGRDIEDPTGLLAQRYGASPGTTYLFRPDQYVAARWSSFDEAKIARAMLRASGHDTADRTELAA

SEQ ID NO: 10847 - protein, 64 aa, BradyrhizobiumColbertium
MMLNLSPNIADPDDFYAELINSQRDLDEEQALRMNARLILLLANHIGDRQVLTEAIGCARTGGV

SEQ ID NO: 10848 - protein, 388 aa, BradyrhizobiumColbertium
MRVLDFGRYIAGPYCATLLAEFGAEVIRVEKRDGSEDRFVAPVGENGEGALFLQINRNKKCITLDPMKPEGQDVMRRLIATADVVVANLPPQTLRAMKLDYDSLKAIKPDIILTTATAFGGPGPWSDRVGFDGIGQVMSGAVYMTGAGDPPYRAAVNWVDFGTALHCAFGTLAALIERGKSGRGQIVEGALLATALSFTNATLIEQAVINVNRVPTGNLGQTSAPADIYRTRDGWVLCQVTGHPLFKRWTRLMGEEELWLNDPRFADDISRGNNGRIISERMARWCAERTTQEAVDALGEAMIPTGPVLSPQQALDHPHVRAAGFMQEVDYPGLPKQAPVARAAVRLSETPGEIASRPPTLGEHTDLVLAALGYDKAEVAALRQGGII

SEQ ID NO: 10849 - protein, 240 aa, BradyrhizobiumColbertium
MARVLIGTSGWHYASWRGPFFPEGVTLKEQLRYYAGQFDTTELNGVFYRTPTPEAVKGWREQTGRDFVFAWKASRFITHWKRLSDRSVNSLELLEDRISHLGGKAGPILFQLPPQFEANADRLASFFKLLSRKRRYSFEFRHPSWYQPRILRMLADENISLCLSDHHDAPAPWKRTADFVYVRGHGPGGRYHGHYTKATLAQWAKRIKSWKRQGCDVYVYFDNDQKSAAPADAKALKQLL

SEQ ID NO: 10850 - protein, 81 aa, BradyrhizobiumColbertium
MSLINAGPEPMYALFEGDKQIGDPFPTEKEVWEAALIEGIVTDVPVADEEGGRLLPDGYHVERLEETFEPRPDWKLPREIS

SEQ ID NO: 10851 - protein, 382 aa, BradyrhizobiumColbertium
MTPELHQKLTQWRRHLHAHPELSLQERNTAAFVQDKLTELGIPFEAGIGGHGIVATLTRGHAQRRVGLRADMDALPITEDTGLPYASETSGVMHACGHDGHTASLLGAAALLAADTSWSGAVDFIFQPAEEGFGGSRAMVAAGLFDRFPMERIFGFHNWPGLAAGTVAVHDGVVMASGGRITITIEGHAGHAGMPHLTRDPVVAAGHLIVALQSIVSRGVDPLDTAVLSLCTIEGGTAPNQIAGRVTIRGTLRYHREEVKDAILDGIERSCAGIATSFGVKVTPEIVWGVGVVINTPAEAELARIAAEKVQAPVRRDLAPSMAGEDFAHYLQQRPGAFVWIGNGPLRDGAELHGPRYDFNDAILPVASGWMAEVAKAALASN

SEQ ID NO: 10852 - protein, 362 aa, BradyrhizobiumColbertium
MPRIADIETGFYRIPLPVTLSDSTHGEITAFELITCRIRDADGAEGVGYTYTVGRNGGATADILRREIPPLVEGREAEDTEAIWHHVWWALHYGGRGGPAVLALSALDIALWDLKARRAKLPLYQLLGGFDARVPCYAGGIDLDLSVDALLKQTDGNLANGFRAIKMKVGRPDLKTDVAKVAAMRQHLGDGFPLMADANMKWTVEEAIRAARALVPYDLTWLEEPIIPDDVAGHARVLQAGGVPIAAGENLRSLWEFKNYIANGAVSYPEPDVTNCGGVSAFMKIARLAEAFNLPVTSHGAHDITVHLLAACPNRSYLEAHGFGLDRYIEHPLVLQDGLALAPDRHGHGINFDWAGLAKLAG

SEQ ID NO: 10853 - protein, 401 aa, BradyrhizobiumColbertium
MPVDTKAATDRLMRFLSVEGVTGQEAAIGRELTAALKEAGVPAKAIRLDDANTRIPVPTETGNLIVDLPGRGALHNQPRIMFMTHMDTVPLCAGAKPKKSGRKIVNEARTALGGDNRCGCGVLVTLAAELAKQKLDHPPITLLFCVREESGLYGARHVKLDELGSPVMAFNYDGGSASNVVIGAVGADRWSVEIFGRASHAGVAPERGISATMIMALALADVKAGGWFGKVVKGKGASAKMGTSNVGPVTGGEGRPAGDATNVVTDYVHVRGESRSHDGKFFKEITKAYKAAFEKAAKKVTNAQGKSGKVKFKAETDYYPFRMKDSQPVIKRAVEAVSAVGGTPNVRTANGGLDANWMVRHGIPTVTFGAGQNEAHTVDEWINLDEYDRACALALQLATMR

SEQ ID NO: 10854 - protein, 414 aa, BradyrhizobiumColbertium
MTKAAHDAGHATRALIFALVALACGHMLSTLLRTIPAVSLDLMAADFDIEPQALASLTSIYPFAFAAAQIPVGAAMDRFGVRPVSLSLLAGTVFGAMASGFATGPSSFAVGQLLLGIATSGMLMCPMTLAAKQLSAARFGLWSGAILSIGNIGMLLSSSPLAFVVDAYGWRAGFWIAAIGGVAVAAAVFALVPHQPAEHKDESSPLAQMMEVLRLGLSRPLRGLIALALVSLATSLVLRGLWGGPWLMDVKGLSRVEAGNQLGAFTLAMIVGPLFIGMIDRRLGRRRALVAGSHLAGALLLALMALGAPHYAVSVLFGVPVMPPQYDLVLFVLIGLATSAQPLLFGMSRQLVDAQTAGKALAAVNLAFFLGAALMQSVTGAVAALAGLPAVLLFMAAMLALGVVIFLAYTAPTP

SEQ ID NO: 10855 - protein, 43 aa, BradyrhizobiumColbertium
MRYELTDNEWFAIVPMLPNKPRGMPRLNERRPAEKHSQRSDLL

SEQ ID NO: 10856 - protein, 601 aa, BradyrhizobiumColbertium
MRKVLLATCLGSAAALAAGGASANDELIKMSQNPKDWVMPAGDYANTRYSKLNQITAQNVGKLQVAWTFSTGVLRGHEGGPLIIGNMMYVHTPFPNKVYAMDLSQENKIVWKYEPKQDPNVIPVMCCDTVNRGLAYGDGKIILHQADTNLVALDAKTGQVAWSATNGNPAKGETGTSSALVVKDKVMVGISGGEFGVQCHLTAYDLKSGKQVWRAYSEGPDDQIKVDPAKTMSLGKPVGPDSSLKTWQGDQWKIGGGCTWGWISYDPALNLVYYGSGNPSTWNPKQRPGDNKWSMTIFARDADTGMAKWVYQMTPHDEWDYDGVNEMILTDQQINGQNRKLLTHFDRNGLAYTMDRETGELLVAEKYDPKVNWTSGVDMDKNSPTYGRPKVVAQYSTEHGGEDKNTKGICPAALGTKDQQPAAYSPDTQLFYVPTNHVCMDYEPFKVSYTAGQPYVGATLSMYPPPGESHMGNFIAWDNKTGKIVWSNKEQFSVWSGALATAGGVVFYGTLEGYLKAVDAKSGKELYKFKTPSGIIGNVTTYENNGKQYIAVLSGVGGWAGIGLAAGLTDPTAGLGAVGGYAALSNYTALGGTLTVFSLPN

SEQ ID NO: 10857 - protein, 322 aa, BradyrhizobiumColbertium
MSDTIHTLSTTGMTPKRQIQSWIDGLTSLCGHFEVDPLEASSLEGRIDYTSVSRLKLCQIEVSQHRIAHTLARAKANEHPYIKIHFQTYGVSYFEQEGRHIEINPGDIIAYDVSCPHSIISPAFTRHDVVIVPKALLRDRGFPSQRMPACKLSSKTGTGRIAHDFVHATFDEAAKLSANSAVGVADSLIDLLLLPLREADTMFDRVGPEAMYVRAQFFIREHLRDPDLCIDQISAELGCSKRYLHMLFSERGTTVSDYIWQARLQNCRQELEAHAGKTITDVAFSWGFSSSSHFSRVFRKYFGVVPSSIHKAQQGTANSGGH

SEQ ID NO: 10858 - protein, 71 aa, BradyrhizobiumColbertium
MIGIIGMAPLLLGMIVALATWGGRRFMRRVDNQLSARDAGDANAARRLRRLHWSVMPGYAVLLVALVATPA

SEQ ID NO: 10859 - protein, 333 aa, BradyrhizobiumColbertium
MSTKLDRRHFIAAGTTALAMPFAARNAWAQGTSQGAWPARQIRMICSYPAGGQTDLLARAYGEFISKQVGKTVVIENKPGASGAIGTAEVARAEPDGHTILCSISTTYIMNRVVMKNPGYDMDKDLTLVSVIPGAGLLLVANPKTGVKTLEDFVAFARKSGKVNFGTYSAGSAPHMTVNELNKQYGLNIEPVHYRGEAPMWTGMLEGTLDAAMGSYTAAQSVLQSDRGTVFAVHSKKVDAIPAIKTLPEQGATSKFFTVSGFTGWAVPKATPQPVVDRIAELCVAANNDPKVKEVLSTFVLEPAIGFKETNALYQRELPIWIESAKSLGLEPA

SEQ ID NO: 10860 - protein, 309 aa, BradyrhizobiumColbertium
MRRWLVAWSIAAVLAAAPRAAYAAEDPLKICLDEDRPPLSVHQKGKPDAGFDVLLAQAVAERLRRPLTILWFESKLDEDASPQLEANALLSDGRCALVGGYALTTDSLVKPGMKTARLPGFAGATREDRRRRVELGALAPSQPYVYSPMTVALGPKAKGRKIGGIGDLAGLRLAIESGSLGDAILMTFDKGRLIDSITHLVPGRDDLLGAVQRGDYDATLIDLARLDAHRAAHPDTSVTASGYYYPIGANRGYVGLASDPALIDAVNKALTELAAEGKIAEFGKQAGLTYLPPREPAILGDVWTKIIQR

SEQ ID NO: 10861 - protein, 117 aa, BradyrhizobiumColbertium
MLKVMSHKTAAVIAAVAVLSVALAATVRADDAAANSMQAQIDHGKSTYASKCSHCHGPNLMNSGTITPDLRAIPDDKTRFITTVKNGKNNKMPPWGDILTDDEIGNLWAFVSSRRKP

SEQ ID NO: 10862 - protein, 554 aa, BradyrhizobiumColbertium
MKRFAMAAGLVMLASTCANAQTTEQLVKGATDTSNVLNYGMGYHLQRFSTLNQINKDTVKNLVPIWNYSFNDDRSEESQPIVYQGVIYVTTHNATMAVDAKTGKQIWKSKIEYPAETPRIVCCGIINRGVAIHEGKLFRTTLDAHLIAIDAKNGKELWRQKAADIKEGYSMTVAPLVAEGVVITGVSGAEFGTRGFIDGWDPATGKHLWRTHSIPSPDEPGGDTWKGDTWKLGGGSTWITGSYDPELKTVYWGTGNPGPFNAAVRPGDNLYTCSVLAMDPKTGKIKWHYQFSPNNPFDYDAVAEMVLADMNVGGKPTKVLMNANRNGFFYVIDRTDGKLLAANPYVKVNWATGVDMKTGRPIETDVAKDAREGKKVTVYPSILGGKNWEPMSFNPQTGLAYANTLNFGGKYKAEPVTFKQGEWYLGMDLTDPWEFGDGPRGHLKAIDPMTGKSKWEAPSDIPRFSGVLSTAGGVVFSGALTGEFEAFDADTGKKLWQFQTGSGIEGQPVTWQQDGVQYVAVTSGYGGVYSLFSGDERLAKVPPGGSLWVFAVKQ

SEQ ID NO: 10863 - protein, 130 aa, BradyrhizobiumColbertium
MTSIRPFSLALTIALLSGPAHAASGSAVKMFDTDNDGTLDMAEVRKAASALFTKLDPDRDGTLDARELRGRLSAKELAAADPDRDGTLTLDEYLSVVEQRFNAANPDKDGTLDAKELNARPGRALLRLMR

SEQ ID NO: 10864 - protein, 40 aa, BradyrhizobiumColbertium
MRRAMSRSLLGETRMAWKAPKIVEVPVGMEINMYACASRK

SEQ ID NO: 10865 - protein, 289 aa, BradyrhizobiumColbertium
MGGRACKFWTVVGCVIALTPARTSAEEGFDTEHIFGFMIGSDVGNVGEREFQTQTTGRLGKGGGTYRALEHEVEIEVVPLPNFRIEVGGTASLHDITGVPDLDDRRQFNFQGASLDLRYRLLNRERAPFGLTIAAELHGGRIEETSGAKGRMYGTEFALAFDRDLIPNFAIAALNLIYQAEWAHFEVAGASDRGSTIGAAIAGLVRVRPNVLLGGEMRYFRQYEGVGLGEFSGQALFVGPTAYFQLSERSRLTMSWSMQAWGRPAGSGTNLDLANFERHQARLVFGINF

SEQ ID NO: 10866 - protein, 57 aa, BradyrhizobiumColbertium
MLSPATCEEKHLIFQYSGSPRQCAMAAPPYIAQWVGEHPKWQAVRWRCEYPRPNDRA

SEQ ID NO: 10867 - protein, 117 aa, BradyrhizobiumColbertium
MRRRLIAIGILVVAMPGAVLAQAKGKGIRLWNLTTETISGFQLSPAGKTDWGPNQCLNDKDKEVDHDERLRIVGVEPGRYDAKVSYPSSRQCIVRDIEIRADAVFSIADKDLKDCTK

SEQ ID NO: 10868 - protein, 236 aa, BradyrhizobiumColbertium
MRLEVDIKGKTFRSAAGGIQEVLAPVKFALQSGEVGVLIGPSGCGKSTMLRIILGLDPEFSGGVARPPQARIGMVFQEPRLLPWRSVEQNVRLAAPGVADAKLAELFRILELEAHRDHFPGELSLGLARRGPAPRAFAVEPDLLVLDEPLASLDDALASRLRDEIATLVASRPVMTLLVTHSLDDAIRLGDRLFFLSPRPARIMREVPITIPRAERSEADLGRIKGELARLQLESK

SEQ ID NO: 10869 - protein, 245 aa, BradyrhizobiumColbertium
MLRLLSFALLLGTWWTAALFVGGAKLPAPPAVLHVMIAEASSGALFLHLGATLARVALAFTLAMSIGSAIGYLMGRVKLADRLGDPWLILLLNLPALVVIVLAYIWAGLTEAAAIAAIAINKLPTAIVTLREGARALDRSLDEMARVFAMPRWRAFRHVVLPQLAPYIAASARSGLSLVWKIVLVAELLGRPNGVGFEIGVAFQLFDTPRLLAYSLTFAAVVLVIETLLVQPFETRANRWRPRAA

SEQ ID NO: 10870 - protein, 343 aa, BradyrhizobiumColbertium
MRIVLKSTLSEETAHKVMRASGRTFALAVTLALTLAAPGRAADAIRLAVQKTGTFSWELAAIRAAGLDKEADLSLEVTELASTEAGKIAMRAGSADIILSDWLWVSRERALGAKLTFYPYSSALGAVMVPPNSPIKTLADLKGRKLAVAGGAIDKSWLLLQARMKQDGVDLKSAATIVYGAPPLIAAKALDGEMDASLNFWNFCAQLEAKGFHRLAGIEDILPKLGAEGAVSAVGYVFDEGWAAKHREAVARFIAMTRKAKELLATSDAAWDKVAPLTGTTDPTLLKAYRDRYRDGIPRRSIADEEKDARVLYRVLAEIGGRDLVGPAAELDPGTFYHAVPGD

SEQ ID NO: 10871 - protein, 119 aa, BradyrhizobiumColbertium
MNLAGQLRPIVAALIVLAASASMARASEANDYPTSARAEYVYGCMKANGETRAAIEQCSCSIDVVASIVPYERYVMAETALSMSQVRGNLGVQFRTSEQANSAVNDLRRAQAEAEVRCF

SEQ ID NO: 10872 - protein, 259 aa, BradyrhizobiumColbertium
MLGISFAAPVRAEEAPDPWPGLVQDIFSNRPMNDGSAVIGIEMPYRAEDAAIVPVTLRSKLSPGDARRIRSITLVIDRNPAPMAAKFELGPDANVSEISTRVRVNNYTDVHAVAELSDGQLYVSKTYVKASGGCSAPAVKNVEEARNRLGQMRYRQFAREDAPASRVREAQIMIGHPNNSGLQMDQVTQLYIPAFFINQLKLTQGDSPVLSMEGGISISEDPNLRFTYVSNGAKRFRAEAKDTGGHVFRNEWDIDKPGT

SEQ ID NO: 10873 - protein, 280 aa, BradyrhizobiumColbertium
MSEVAPGIFVHSGIIALMSRENEGDIANVGFIVGEEAVAVIDTGGSLREGEALLAAVRAKTPKPIRYVVNTHGHPDHVFGNAAFAAGSTTFVGHHKLPQALATRGPFYLENFRRIMGSELIDPVKIITPTLLVSNTMTLDLGSRRLSLRAWPTGHSDADLTVFDETTRTLFAGDLVFLRHVPVMDGSIRGWLDALKSLEAIPALRVVPGHGPVSGWPAALRDEGRYLSTLLSDVRRLNKNGEPIRAAADKAAASERPHWLLFDDYNARNATAAFSEIEWE

SEQ ID NO: 10874 - protein, 41 aa, BradyrhizobiumColbertium
MPQFREPVALRCNKEANAKLSNDGASSVAWITFNDNEEEAR

SEQ ID NO: 10875 - protein, 294 aa, BradyrhizobiumColbertium
MTRAGRHRRWLFSLWIVIASCALGDGAIAQTSDTGDLSFELVDPKVLRVCADPRNLPFSNEKGEGFENKLAECLAEKLQKKLDYVFFPQATGFVRMTLGAHRCDVIMGFPQGDDLVQGTNPYYRTAYALVAKAGSGLENVDVLEDPKLKGKRIGIVAGTPPATNMALAGLMGSAKPYQLMIDTRFDNSAKAMIDDLAAGKIDAGVLWGPMAGYYAKMAGSSLHVTPLVKETTGPKLVYRIGMGVRPADQNWKRQLNKLIQDNQGEINKILLDFGVPLLDESNRPLGAEPLKKTP

SEQ ID NO: 10876 - protein, 185 aa, BradyrhizobiumColbertium
MRQHLAVALLATALAGQAFGQQPEPFEPEGYRADNYRAPVPATLAGARVLTTAEAEAIWRARRGTFIDVMPRPPKPKNLPKGTVWRDAPRKNIPGSIWLPDTGYGALPPAMDDYLQRGLARASRGDKAALLVIYCMADCWMSWNAAKRALAYGYSNVAWYPDGTDGWERAMLPTEEAQPEPRPDQ

SEQ ID NO: 10877 - protein, 100 aa, BradyrhizobiumColbertium
MGTTKFIFAGAAALSMLASSAFAEDMTGMIMRIDRLNGTISIQQTQKGTVGAGAGSAGALQEYKAKDAAMLEAVHAGDRVSYTATETNGTGTLTKLQKQK

SEQ ID NO: 10878 - protein, 202 aa, BradyrhizobiumColbertium
MKVWVLAAITMMLSATAALAADPRYPDWPCTQAKVPEISLAAVWAGPPLDDVQNKWKDDAEVSALVAKLSARKTPLDEAEKSVKELLAASGSDKAAKAKLLFAGLFDTLNAQRSQVMNGLERVSRKQREAADKIREDALQLQALQGATPRDEAKVEALSNELIWKTRIFEDRHKVVRFVCEVPTTIDQRLFALGRLIQQEME

SEQ ID NO: 10879 - protein, 282 aa, BradyrhizobiumColbertium
MSSITARDTPRGFSVQEYLTCLTGIVWREGLRFLHQRERFVSALVRPLVWLFIFAAGFRQVLGISIIPPYETYILYEVYIAPGLIAMIQLFNGMQSSLSMVYDREMGNMRTLLVSPLPRGFLLFCKLLAGTAVSLLQVYAFLLIAWLWDITPPAAGYLTVLPALILSGLMLGSLGMLISSGIKQLENFAGVMNFVIFPMFFASSALYPLWRVQEGSPYLYYLCEVNPFTHAVELIRFALYGQINWISLAVVAACTIVFMIGAILAYDPSRGLARRGPAGGEG

SEQ ID NO: 10880 - protein, 256 aa, BradyrhizobiumColbertium
MPRPDAAALPALSIEGVSHSYGPRRALTDVSFDVQPASFTALLGLNGAGKSTLFSLVTRLFGIQSGRVSIFGHDISKTPGEALRLLGVVFQPRTLDLDLSLTQNLLYHAALHGISRREAAARSAELLGRIGLEERAGSKVRDLSGGQMRRLEIARALLHRPRLLLLDEPTVGLDVKARADIISHVRQLVAEQSIGVLWATHLFDEIMPGDDLVVLHQGKVLARGPMSRVVAEAGAQDVNTAFMRLTGAQTMPGGGT

SEQ ID NO: 10881 - protein, 322 aa, BradyrhizobiumColbertium
MLRMWRVGLLSAMALVAAPAHAFIAYVSNEKSNTVSVIDTETWTVTKTIKVGQRPRGIDLTRDGKFVMVAVGDDDTIQVIDAKTQTVVDSLPSGPDPELFAQDAAGKTLYVANENDNTVTVIDLEKRARLGDIQVGVEPEGMTISPDGNTLINTSETTNMAHFIDTATRQIVANVLVDARPRFAEYKHDSSEVWVSSEIGGTVSIIDPKKHEVIGKVTFEIPGLRKEAIQPVGIGMTRDDKTAFVALGPANRIAVVDVATRKVTKYLLVGQRVWHVAFTPDEKYLLTTNGVSNDVSVIDVAAQKVIKTIQVGELPWGVAIAP

SEQ ID NO: 10882 - protein, 393 aa, BradyrhizobiumColbertium
MIRWLVGLIGLGVAATSALAADPVTIGVGYLGIAGTRSTLSLAEQPAENDGLAGARLAIEDNNTTGKFLNQRFTLEERRVKEGEDPVQAATALADKNGFVIADLPADALLKVSDALRERGTLLFNVGAIDERLREADCRANVIHTAPTRAMLADALGQYLVWKKWSRWLLVVGSHNEDRLFADALRRTATRFGAKIVQERTFEDKGGARRTDSGVTLIQRQIPVFTQQAPAYDVLIAADESEVFGAYLPYRTWDPRPVAGSAGLVPRSWDAAQDQWGAIQIQNRFFKLNSRRMTALDMQAWTAVRMIGEGTSRTNSGDIKKVTDFIKGPDFSVAAFKGTRLTLRDWNLQLRQPILLVDGRMVVSVSPQEGFLHQVSELDTLGYDRPESKCKLK

SEQ ID NO: 10883 - protein, 190 aa, BradyrhizobiumColbertium
MTNLSGHATPHFVLARARTGITIVRALIGFAALLLTGSVALADPPKLAVFDFELIDTSLPGEFYGAKPEQARLERISEQLRKELAESGRFQLLDIAPVRDAARRANLQACGGCDLKLARQLGADLEITGLVQKVSNLIISLNVYLRDVKTGNMITVASADMRGNTDEAWTRTMSYLIRNRLLAPNYGRPE

SEQ ID NO: 10884 - protein, 283 aa, BradyrhizobiumColbertium
MGMTIQTVSTNKSHGGVQGVYRHASQATGTDMVFSVYVPPHAAGAKLPVVWYLSGLTCTHANVTEKGEFRKACAELGLIFVAPDTSPRGPDVPGDANNAYDFGLGAGFYVDATQEPFARNYRMWSYVTDELPKLVAENFPVDAKRQSVMGHSMGGHGALTVTLRNPHRYRAASAFAPIVAPSQVPWGIKALTGYLGPNKDAWRNHDTVALIEDGARFSGFLVDYGDADNFLKEQLKPELLQEACTKTNIPLTLRRQAGYDHSYYFISTFMSDHLHWHAARLTA

SEQ ID NO: 10885 - protein, 206 aa, BradyrhizobiumColbertium
MRILIVDDHPIVASGCRAVLADEGEIEILEAADAEDGECVFIVERPDLCIIDINLPTVSGFELARRILERAPEARIIMFSMNDDPAFAARAIECGAKGYVSKTGDPDDLVEAIRAVSGGGTYLPTAIARSIAFAGPTLAQSPLSKLNAREMEILRLLSAGKSLSEIAWLVQSSYKTVANTSSIMRQKLGVKTSVELVRLAIDSGVA

SEQ ID NO: 10886 - protein, 452 aa, BradyrhizobiumColbertium
MWQNLSLRGRINLLLALLLALGLAVNIGRQVAEAGPRVQAEDQSVIRLAREFIEMIVADLNEAPEPDARLNQIARDLSRLRHVSITLRDAGGHSLTPPRLDADADTRAPPAWFVGLVHPEQTAVSVPVSIQGKPGSLVITSHPDDEIAEIWDGIVTQLEVGSVIALALFFLMMNVVGRALAPLQSLAEAMGKLERGHYEARVTPGGAPELAAICTKLNHLAATLGEAVEDKRRLAERAVSLQDIERKEIARELHDEFGPYLFSLRAHASALAKLADGRDPSADAVRKHGSAMLEQINALQQFNRRVLERLRPVGLAELGLRKALESLSRLWRQSHPEVAIETMISPALGPTGETADLTIYRIVQEALTNVFRHAGATSVNVVIEPAEQMANDGRGCARVRVSDNGRGMEPDQKLGFGLVGMRERIMALGGTLNVVSGDGGLTVEALIPTASS

SEQ ID NO: 10887 - protein, 132 aa, BradyrhizobiumColbertium
MPMFGRWMASILAAAMVSGSALAASRGDPVKKFDTDNDGTLDHIEVRKAAMALFARLDPDLDGTLDMRELRGRLTGKEIAAADPDHDGTLSVNEYLAVVSQRSDAADPDHDGTLDRTELKAPAGRALLQLLQ

SEQ ID NO: 10888 - protein, 212 aa, BradyrhizobiumColbertium
MSPILVVDDHPIIAEACRVVLGDVEDVVAARDVPSGYQAFLEHRPGVVILDLSFPGEALGGVDLLHRMSSDAPLARVLVFSMHADASIVASAIKAGAIGYLLKDSPPDELPKAVRQVRLGHRYVDERINLRGVPLPDHVDSGKAAMLTRRERETLSLLGQGNSYSAIAEELDITPRAVARLVKQARTKLGLRRTSDLLRRAHELAGNADSSN

SEQ ID NO: 10889 - protein, 588 aa, BradyrhizobiumColbertium
MHAIDARTGKRIWTFDPEVNRELGYRGCCDVVNRGVALYKGKVFVAAYDGRLIALDAATGKKVWERDTLIDHEHSYTITGAPRVFNGKVVIGQGGAEYGARGYVTAYDSDSGNQLWRWFTVPGDPSKPFEDESMEKAAKTWDPAGKYWLNGGGGTPWDTITFDPDLNLVYIGTGNGSPWNRNVRSPAGGDNLYLASIVALNADTGKYVWHYQETPGDHWDYTSTQPMILADISIDGAPRKVILHAPKNGFFFVIDRTNGKFISAKNFVDVNWATGYDANGRPIEVPAARGEAAYDSIPGPYGAHNWHPMSFNPQTGLVYLPAQNVPLNLIPEKNFKQNAATPGKFGGATGWNVGFVLNGEPPKSLPFGRLIAWDPVKQKEAWRVEYPSPWNGGTLTTAGNLVFQGTADGRFVAYDAKTGKTLWETPTGTGVVAAASTYMLDGVQYVSIAVGWGGVYGMAQRATERQSPGTVYTFALNGKAPLPEFVKYQTEGLLQGVKYDPKDVPEGTALYVAACATCHGVPGVDKGGNVRNLGYVPAEEIANLKSIVFKGPFRDKGMPDFTGKLTEADVVKIQAFIQGTADAIRPKK

SEQ ID NO: 10890 - protein, 814 aa, BradyrhizobiumColbertium
MGVRSLVIISISTGMVVATEAVAAPDEQTNVQNLPPVEVTAPAPAAPRVVPSRPVARIGAPASAAPRTRLYVFPTSPGIGRGLDVDKVPSAINAVDASQIKRTNSLNVTDALRDNIPGVNISEVTGNPFAPDVEFRGFVASPVVGTPQGLAVYQNGVRINEAFSDAVNWDLIPTAAIRSVTLVTNNPAFGLNALGGAINLQMKNGFTYHGAELDVMGGSFGRIQGSAQWGKQVDQNYAVYGALEGLRDNGFRNFSQSTVRRFYGDIGYRAGDSEFHVNMGLAKNNFGASATVPAELLDKYWGATYTTPQTITNRVGYLNLTGKVDATPTWTFEGTAYARRFEQNIVDGNPTDVEECAADAGLLCFGDDTSAAYGGGGVQLANPFAPGTILGAIDRGSIRSSTFGVSGQATNTDQLFGHDNRFVVGSTYDAGISRYNASSEIGSMGENYVVSGSGVFLGPTPAADPVAGPVSLRTVNQYNGLYAMDTFNVTNAFAITGGGRFNAARISLEDQLGTALNGYHTFTRFNPIIGGTYRITPELTAYAGYSEANRVPTPLELGCADPTRPCLIAAFLVADPPLKQVVSKTVEAGFRGTKELNIGTLGWKVGGFRATNHDDIMAVPVVGRTGFGYFSNVGRTRRQGLEAEVNIKSPTLQFQASYSFVDARFLDPLELGSESPFADDTTETIQVRPGNQIPAVPRHRVKVGVDYAVTDVWKVGGNALFVSSQHLVGDESNQFEKLPSYTVFNLHTSYQVAKNVQLYGRVDNVFDKRYVTYGQFFDRDALPNFTNGGSDFLDPRSLSPARPRAFYAGMRVTF

SEQ ID NO: 10891 - protein, 92 aa, BradyrhizobiumColbertium
MISAKKALIARPEPIRPVFPQLGFELLDDAVKQTRRERIGHFPLQMPIARDPELLLSQLVLCHRTGPPTNRRAGRQVVSLKFSDHSSWFLIG

SEQ ID NO: 10892 - protein, 135 aa, BradyrhizobiumColbertium
MLKDGTYAAWYNTPLDQGTGIVHVADGQIWGRDSLMTYRGSCTVDGDRFTAIVSAKRHTEGRATVFGVEDELTLDIEGRCPGKIASYTATAHQVPGVILHGTLILTEQQPPAGERTERVAALDLGRLPRLPRRLR

SEQ ID NO: 10893 - protein, 487 aa, BradyrhizobiumColbertium
MTDKVSRRRFAKIAGLSAAGMTGAIDAAKAKPARPPRGGGGFPPGFIWGTATSSYQVEGAVNEDGRGASIWDKFARIPGKIEDGTTGDRANEHYHRYKEDIALIKALGCRAYRFSVAWPRLFPEGDGKPNPKGIDFYNRLVDELLKNGIEPWLTLYHWDLPQSLQDRFGGWRSTDTCKIFGDYAAYVAKHLTDRVKNVFTLNESGRFVYFGYGIGIDAPGLKLPQAEVNQIRHNSALAHGIAVQAVRAHGRRGTRVGPAENIDACVPAIDTPENVRAAEIALREMNAGYLNVIVTGRYTDAFLKFAGPDAPKFTDAELKIISSPVDFLGLNIYAPQNYVVASDQGAGFMPLPIPKSFPHMNSDWLRVGPETIYWVPKLAAKIWKTDAIYISENGTSGDDVVTPDGKIYDTDRIMYLRNYLAQLQRATAEGVPVRGYFLWSLMDNFEWVYGLNKRFGLYHVNFDTQVRTPKLSASFYRNVIANNSAGA

SEQ ID NO: 10894 - protein, 410 aa, BradyrhizobiumColbertium
MADALIIDACRTPRGIGKTGKGALSGIHPQQLGATVLRALADRTGINTADVDDIVWGCSAQVATQSGDLGRMSALDAGYDVRASAVTLDRFCGSGITSVNMAASSIMAGAEDLVIAGGCEMMSMEGRRGSGPMMMDNGNLRLRALHPQSHQGVCADAIATMEGISRRDVDALGLESQKRAAHAMANGYFKKSLVPVYREDGSLALDHEEYPRPQTTMEGLSSLKPAFPAIADYALDDKGTTYRGLILQEYPELKIDFVHHAGNSSGVVDGAAAILLASPAYAKAHGLKPRARVVAMANMGDSPTLMLNAPVPATRKVLAKAGLTTDDIDLFEINEAFAVVAEKYIRDLKLDRAKVNVNGGSIALGHPIGATGSILIGTVLDELERRDLKRGLVTMCAAGGMAPAIIIERV

SEQ ID NO: 10895 - protein, 100 aa, BradyrhizobiumColbertium
MPTQMSKSQLIEKIATATELSKRDVKNVMETLTDVGHKELKKNGLFLVPGFAKFVVIKKPATKARKGTNPFTGEEMMFKAKPARKIVRARPVKAAKDAVG

SEQ ID NO: 10896 - protein, 54 aa, BradyrhizobiumColbertium
MKAMPKLLDRAKKSQTTQRVRELLDRAVDRLRDALAGAQPRLQPVPVRVKRRKG

SEQ ID NO: 10897 - protein, 795 aa, BradyrhizobiumColbertium
MATEQMNTNEQTNNDVKIPDDALIIVPVREMVLFPGAIAPITIGRAKSIAAAQQALREQRPVGIVLQRSPETNDPGPDDLYRVATIANIVRYITAPDGTHHIVCQGVQRARILDFLPGTPFLAARFQQIPEPTTISPEIEARALNLQRQAIEAIELLPQAPPELAAMFQGTSAPGALADLATSFMDIKPQDKQEVLETIDLALRVEKVSKHLAERLEVLRISNEIGQKTKASFDERQREAILREQMATIQRQLGEGDGKQAEVTELTAAIAKANMPPEAEAHAKKELRRYERMPEAAGEAGMVRTYLDWLIELPWALPEEKPIDIKEARAILDADHFGLEKIKSRIIEYLAVRKLAPQGKAPILCFVGPPGVGKTSLGQSIARAMNRPFVRVSLGGVHDEAEIRGHRRTYIGALPGNIIQGIKKAGARNCVMMLDEIDKMGRGVQGDPSAAMLEVLDPEQNGTFRDNYLGVPFDLSRVVFIATANMLDQIPGPLLDRMELISLAGYTEDEKLEIAQRYLVRRQLEANGLSAEQAEIEPEALKLIVKGYTREAGVRNLEREIGKVFRHAAVQVAEGTAAKVVVTAKDIATVLGQPRFEGEIALRTSVPGVATGLAWTPVGGDILFIEATRVPGKGGLILTGQLGDVMRESVQAAMTLVKSRASQLGIDPQLFEKSDIHVHVPAGATPKDGPSAGVAMFTALTSLLTNRTVRSDTAMTGEISLRGLVLPVGGIKEKVVAAAAAGLKRVMLPARNKRDYDDIPKSARDNLEFIWLERVDEAIAAALEPGEAQVDEAAE

SEQ ID NO: 10898 - protein, 127 aa, BradyrhizobiumColbertium
MQPKNPLDWMLSEALDSLTRADRLRQQFGRQEACWEPPIDVLETERELLILVALPGVNPDNVETVIHDGVLVISGQRTLPPELRNARIHRLELPQGRFERRIALPLGRYAISRFVMDGCVALRLAKS

SEQ ID NO: 10899 - protein, 193 aa, BradyrhizobiumColbertium
MAKRAKKRTTKKSAAKKTAARRPRQAPKMLSDLFLETLKDIYFAENKIIKTLPKMAKAAQSKELAAAFNKHLRETQGQVKRLDQIFKMLGKPARGKPCEAINGITDEGAEIMKEFKGAPALDAGLLAAAQAVEHYEISRYGTLRTWAEELGMQDAARLLQETLDEEEATDHALTELATSVINLEAEEEYRAAA

SEQ ID NO: 10900 - protein, 68 aa, BradyrhizobiumColbertium
MSDSGVSMLLGHASAQMLWLWFIGAFVLGGVLVYGVMKAGHLRRSERARLDRATEERQRQEDPYKRPT

SEQ ID NO: 10901 - protein, 395 aa, BradyrhizobiumColbertium
MHRYRFGIEEEYFLVSRQSAAPRSELPKPYMAAAQKRLGERLTTEILQSQIEVATPPLTSSGDARAELARYRSVLTEVGKEHGVGIIAAGTHPLAQPQQQRMTRKRRYSKVISDLGMVGLGNPISGLHVHVEVPEPDLRVEIMHRLVPFLPLLLALSTSSPFWCGYPTGLLGYRNAANDALPRTGFPEMFRNLAEYETYVKTLVDAGIVPNATYVWWALRPSLQHPTLELRITDCCTATADSVAIAALFRALVRHAVHHPDLNATHSAVHRALVEENRWRAQRYGTDGTYIDLVSFEPISFRSWLDSVIAMLAPHIAHLGIEDDIQHLKSIPKRGTSAHLQLEYFRSLRKFGRSPREAIGDVTKWLRTSTEAGDFTARGGEPKTPPARQPLADLV

SEQ ID NO: 10902 - protein, 297 aa, BradyrhizobiumColbertium
MALRLGTNVRELKAAIHQFGSAADAVAYGLQQWRHSASRRQWQARSGSPQVGILSDSMVARGEQLASVALICVKAVGLVAGAVPRILPVAPEADVDAYLDGLDGLFVGGGQTNVHPSRYGRIADEARDGPFDEFRDEVALRLIPRALARGIPALFICRGIQELNVAFGGTLAKEPDDLPEDKRHGTPEADNEDARYRLRQKVTLRKGGVLQDICGADSITVNSLHSFLIADLAPGLVAEAVAEDGSIEAVSVEGASDFAVGTLFHPDYWASSDHASARILTAFGDAVRRHAKAQGAA

SEQ ID NO: 10903 - protein, 208 aa, BradyrhizobiumColbertium
MIDFSLSAFVTLLLVIDPVGLVPAFLAATAGLPDKAKRTIALRAPLIAASILVVIALVGNWLLRELGIGIPAFQIAGGLLLFGVSYQMIFGDRPHREAREADKATAEHVSDVAVFPLAIPMMAGPGAIATTLLLSGDAGYGPRLAIIIAVVLCVCLICMLCFLSASLIARTLGRTGNAVLSRVLGMLLAAYSVQFVINGIAAVRTSLP

SEQ ID NO: 10904 - protein, 217 aa, BradyrhizobiumColbertium
MSMTADELAKKQAIIDACRRMNALGINQGTSGNISVRHVDGLLVTPTSVPYDAMTPDQIVFMAMDGTHAPHQKPSSEWRFHRDILKSRPDVNAVVHAHPTYCTILAIMGMEIPPVHYMIAAAGGESIRCASYATFGTAELSDHAVRALEGRLACLLDHHGMIAMGKTLDKAMWLAVEVETLARQYHGCLQSGRPPLLPSDEIERVRRRMAGYGLSEG

SEQ ID NO: 10905 - protein, 595 aa, BradyrhizobiumColbertium
MFVRIRHLVDGKGTSRTMVRLRALLRSNEFYLIPLALVIGTLAGAVVTLMAGIAQIAHVVIYGIPIDVHLSAHASVSPWAALIAPAVGGLSLGIMEWLRRRMKISNAVDPIEANALRGGNLSMRDSVVVAGQTLISNGCGASVGLEAGYTQIGSGIASVIGKFFNLRRNDLRLMVGCGAAAAIAAAFGAPITGAFYACELIVGVYAVGSAAPILAASLAGALTAQWLGGAPYSLEIPKVSAVGVEQYLALIGLALITSGVGIAVMRSSPMFERLFAWLPVWFRPVIGGLIVGGFAIVTPQVLAAGHGAMVLDLFQEMTIGLIALIIALKVTACLISLASGFRGGLFFASLFVGSLIGKFFAAVLLLISPNFAIDPLVAMLTGMATLGVAIVGGPLTMSFLVLEMTRNVDVTAVVLAGCIVTSICVRFMFGHSFSTWRLHLRGETIRSANDVGWLRNLTVERLMRSDVGKVPSTTTIAATRREFALGSRPGIVIVNNADEYVGLVTLPDLFSSDLDTIADEIQVIELARLTDIVLIPEMNVKSAMAVFDEAEAEMRAVVDSTDSRKVVGFLTESFARRRYVEEIDKATRGVLGALS

SEQ ID NO: 10906 - protein, 83 aa, BradyrhizobiumColbertium
MIAVRKLPARYAPIVMPFVLSILMTAVVSVISTLRSLGATPAFLATWPGAWALSWLVAFPTLLVVLPLVRRIVACLVAAPPSR

SEQ ID NO: 10907 - protein, 128 aa, BradyrhizobiumColbertium
MISAAGRNTVVAAFASLALIAASASPSAAASSGTPAKAAAASQPTSDVTDFGAARRRHYHRRGPNAAGLAFMGMAAGIIGGAIAESRRREYYENRYHYGYGPRPYYGGPGYYGGGPYYYDPGYRYAPY

SEQ ID NO: 10908 - protein, 137 aa, BradyrhizobiumColbertium
MNGDQLKLVFDETAKSSLSITGVTYNSKGLGLAALTSGVDFIDNAATNKVSTNLNTASSTLRSEASALGSNLTIVQVRQDFNKNLINVLQTGSSNLTLADTNVEAANSQALSTRQSIAVSALSLANQSQQSVLQLLR

SEQ ID NO: 10909 - protein, 125 aa, BradyrhizobiumColbertium
MVCSAWLAIDFALSISFCSEVRPVLAACSTCTPLAMPSSRLLMSLARLSSDCAVKKLVGLSRAELTLLPVDRRFCVVARRSAVDWRESRFWRTDAERTIPDITLTLLVYASSFDRFGSSDRTSVP

SEQ ID NO: 10910 - protein, 115 aa, BradyrhizobiumColbertium
MTYNSKGLGLASLTVGVDFIDNAAANRVLTNLNAASSTLRSQASSLGSNLSVVQVRQDFNKSLINVLQTGSSNLTLADTNVEAANSQALSTRQSIAVSALSLANTSQQSVLQLLR

SEQ ID NO: 10911 - protein, 243 aa, BradyrhizobiumColbertium
MGPGCHRPHRHRRQRQFDHLHGDGGCAHRHRQRPAERDRPGERRQERDDQRRRCDHRRQRCGWSRRHASGGIVHHGRPGDAEELDRRRSERDRKGRLPQGARSDGCNGRWQCQRHRGPVDHRRFARYPCQGRLDAEHRRPHHHLQERANAAIGDERDVRRRQRQHRDRRQRQLDGLHSERDADRSAQRHRPRDRRQDRKHLQRRGDAVDHFGPDPVVGQQQRSARAVHRRQCRSLDHRHRQCA

SEQ ID NO: 10912 - protein, 122 aa, BradyrhizobiumColbertium
MSNSAASAYARVATTTASPRDIEAQTLLKAANKLQDAINSADPFSEQTTQALMFNRKLWTIFLSEAMRDTNPQPIDVRQKIANISVFVLSQTAALQMSPQFDHFRPLIEINRNIAAGLSGRP

SEQ ID NO: 10913 - protein, 118 aa, BradyrhizobiumColbertium
MSTDFSIRPVGIPAPAQIVTTSNAAANEAVQTDLPVSKTVAAADTSAPVRNDLPHENVSRQVVFDQAAASFVFQVVNEKTDAVVNQFPDEAMLRRRAYFHALDRQSEPARPLSTDVSA

SEQ ID NO: 10914 - protein, 165 aa, BradyrhizobiumColbertium
MNHFNASRQPMQAQRPTAAAGSTEARKVAENLMDAMSALLGLIERETELVRAGKVREAMTLESKKQELSRNYVGAVGQLKANQAQLAKSAPELLSTLHRHHDAFRAMLQVNLTVLATAHAVSESVVRGVNAEIQKRNVPNTYTAAGRSATPGPRHITPLAVSRSL

SEQ ID NO: 10915 - protein, 122 aa, BradyrhizobiumColbertium
MQASAINTPRLPNASAFSVESRNGRPDFELAAALQKVSPQQQAKAQKIATDFEAMFLNSMFSQMTSGLKGEGPFGDTPGTGVWRSMLTEQYSKNFAQAGGVGVATDVYRTLILQQAKTIRTA

SEQ ID NO: 10916 - protein, 363 aa, BradyrhizobiumColbertium
MACAALSALTLSVTPAAATSRIKDLANIEGVRQNQLIGYGLVVGLNGTGDTLNNIPFTKQSLQAMLERMGVNIRGATIRTGNVAAVMVTGNLPAFATQGTRMDVTVSALGDAKNLQGGTLLVTPLLGADGNVYAVAQGSLAISGFQAEGEAAKIVRGVPTVGRIANGAIIEREIEFALNRLPNVRLALRNADFTTAKRIAAAVNDYLGVKAAEPIDPSTVQLSVPPEFKGNVVAFLTEIEQLQVEPDLAAKIIIDERSGIIVMGRDVRVATVAVAQGNLTVTISESPQVSQPNPLSRGRTVVAPRSSVTVTEDGKKLALVKDGVSLQQLVDGLNGLGIGPRDMISILQAIKAAGAIEADIEVM

SEQ ID NO: 10917 - protein, 137 aa, BradyrhizobiumColbertium
MRIYGPNGTTLGTPASQTRRIGSGTFALPDTSSAQETRSAAAPKATANIDALLALQGVDEDPIERRKRSVARGRTALDVLDDLKIGLLSGNLDGSTVMRLRDAAANLKSSSGDPGLDAVLAEIELRVEVELAKAGQA

SEQ ID NO: 10918 - protein, 124 aa, BradyrhizobiumColbertium
MMKPDVYAANCPTRQILDRVGDKWAVLILLLLREEPMRFNQLRRTIEGISQKMLSQVLKSLERDGLIKRHAIATVPVTVEYSITQLGLTLAAAVDPLRDWAEQNLKDVLAAQRRYDAQQKEEAA

SEQ ID NO: 10919 - protein, 203 aa, BradyrhizobiumColbertium
MNIAIAGASGRAGSEITKELSRRGHAVTAIARNPEKIAALPNVTPIKGDVLDQDGLAKLWAGHDVAVSSIHFLASDALKLIGAAKDSKVGRYLVVGGAGSLEVAPGVKLVATPNFPAQYKAEAEAGSTFLDLLRQEKDLNWTFISPSALFVEGERTGKFRLGTDQLLADANGKSWITFADYAIALADEIERPAHPKQRFTVGY

SEQ ID NO: 10920 - protein, 121 aa, BradyrhizobiumColbertium
MNDRQKEYFRLKLLAWKDEILKESKLTLQALQEENVNHPDLADRASSETDRAIELRARDRQRKLIAKIDAALQRIEDNTYGYCEETGEPISLKRLEARPIATLSVEAQERHEKREKVYRDE

SEQ ID NO: 10921 - protein, 259 aa, BradyrhizobiumColbertium
MDRILEAAKAIALARRNHAPLAALEHPPADEAEGYQVQRALHDLLLPHVGPLVGYKIGCTSQVMQEYIGIPHPCGGGVFQKGVHDSGAKLAASSYVRVGVECEIAVRLKRDLAAGEAPFTAEWVGEAVEAYQPAIEIVDDRYVKWETMGAPTLIADDFFAAGCVLGPSVPRSSVPDLKAVKGRAIVNGEEVSHGTGADVLGHPHNALAWLANHLAAEGKGLHAGQLVLTGSLVKTLWLKAGDKVRMELEGLGTVEAEFT

SEQ ID NO: 10922 - protein, 237 aa, BradyrhizobiumColbertium
MLLATCALASGCSSIDRLSQIGEQPKLSAIDNPTTQPGYKPVQMPMPKPEVASYNPNSLWRNGSRAFFKDQRARQVGDLLTVTVNITDKANLSNETQRSRTSKEDSGVTDFIGSQTVTQPLKVLPGRLLTTDSTSSADGKGSVNRQEALQTNVAAVVTQVLPNGNLVVEGKQEIRVNFEIRELVVAGIVRPEDIQSDNTIDSSKIAQARIAYGGRGQIMDVQQPRYGQQVMDVLLPF

SEQ ID NO: 10923 - protein, 376 aa, BradyrhizobiumColbertium
MIRATLATISALLALTSPAAAADDFIAAPTLRASVTVTSDVVRIGDLIENAGSAASIPVYRSPDLGTTGTLTATQVLSVLRAKQVIGVMTGDVKEVQVTRLARTLASKDVENAVAAALERRFGLGDAANITVTFDRSVAEMRLDASNTGALLPAATRYDARSGRFDIAFEIANDSNPAPTKLRFTGTAIETVEVAVLTRDVDRAELLKSSDLSLERRPKAEVTGEPASRDRSVGMELRRAMRAGTPIRAADVVRPNFVVRDQAVTIIYQMPGLYLTTRGKATESGAEGDTVSVLNLQSKRTLTGVVTARGQVTVQGASQSAPMAPAVEQSSSLKRDEMPAAAALAQSVVQAPANPAQVAQAQIPQARLSQAPAKSE

SEQ ID NO: 10924 - protein, 262 aa, BradyrhizobiumColbertium
MQALHTAATGMAAQELNVQVISNNIANLRTTGFKKQTAAFQDLIYEHVRRVGAQSSDQGTILPVGVDIGGGVKTVGTPRSMTQGTLSQTGNDLDLAISGDGFFKILMPDGTYQYTRDGTFQMDNQGRVVTAQGNPVQPTITIPNNASGISVSEQGQVSVTLPGSSTSSIIGQIGVTRFINKAGLQPVGNNQFIETPSSGPPQDGTANSEGYGKITQGSLEQANIDVVSEMSDLIAAQRAYEMNAKVISAADQMMQSTTALFR

SEQ ID NO: 10925 - protein, 253 aa, BradyrhizobiumColbertium
MQNALLIGLSRQMTLERQMAVIANNVANSNTSGFKADHSLFEEHLNSNAREDRFIGRDRLVSYVQDRGTFRDISQGPLEPSNNPLDLAIDGNAYFVVQANGAERFTRDGKFSLNSTGQLVTSDGNLVLGTAGPITFQPTDHDINVAPDGTVTVLEGTARTDSIRGKIRMASFDDPAKLTKLGANLYDVGSAVPQADAKSNVRQGYVEKSNVNAVGEMGRMVEVMRSYAAIANLLQQQSDLHKSAIDKLADVPA

SEQ ID NO: 10926 - protein, 165 aa, BradyrhizobiumColbertium
MAENEEGGAAAEGAEAAPPKNKLKLIIMAVGLLAVLGGGAATWFFFFRHGEAEHHAEAAPPPKPPAFVDVPDLMVNLAGSPGERVQYLRLKIVLELKEEKQIEAIKPTMPRVTDIFQTYVRELRPSDLNGSAGIFRLKEELTKRVNAAVAPIQVSAVLFKEVVVQ

SEQ ID NO: 10927 - protein, 400 aa, BradyrhizobiumColbertium
MAGNDQVDQDAIAAQWEASLDSEDPAEAAKAAAENELSETMALQWAAMVEDGSRDLGTGKNSGERVLSQEEIDNLLGFTVGDVTLDDHSGIRAIIDSAMVSYERLPMLEIVFDRLVRLMTTSLRNFTSDNVEVSLDRITSVRFGDYMNSIPLPAVLTVFKAEEWENFGMATVDSNLIYSMIDVLLGGRRGTSQLRIEGRPYTTIETELVKRLVEVVLSDAEQAFRPLSPVTFTIDRLETNPRFAAISRPANAAILVRLRIDMEDRGGNIELLLPYATIEPIRGVLLQMFMGEKFGRDPVWEGHFATEIVQAEIAVDAVLYEADIPLKQLMRLKVGDTLPLDMRADANVTVRCGDVTLTEGRMGRVGDRVAIRVTKPLRKPSTTLAMFEKVDEQNKMMEAP

SEQ ID NO: 10928 - protein, 142 aa, BradyrhizobiumColbertium
MAIETLVAILLMLTIVYCVMLNKRLTRLKADEHSLKAVIGELITATEIAERAIGGLKLAVRDVNENLGSQLAAATQMSDQLYKQLGEADNVVRRLSKIASAARPVTNPETVAAPAAKPSSAKAVAAAAEAFSERRRSNGLAA

SEQ ID NO: 10929 - protein, 254 aa, BradyrhizobiumColbertium
MKSFRNIRVIPVVLVAIAGLATLKVAGLAINGGYVFEYKPSQGKKSWAEENLNFPTGREDPDITGSTHGAPKEAPKPAAPETKMEGGTVVKIDEGQPQVSASERAVLERLQARRQEIEARQREIDIRESLLKSAEKRIENKVEEMKAVETRISATQAEQKAAEAQRMKGLVTMYEGMKPKDAARVFDRLEMGVLIEIASAIAPRKMSDILGLMSSEAAERLTVEMARRANGGGEQSASAGELPKIDGRPTQKPN

SEQ ID NO: 10930 - protein, 1245 aa, BradyrhizobiumColbertium
MTAEPEEMPPMAREAAAGFVSRARAVARGLSRHFRRATVLTTCVLIGLAQPARAADPIRGEATFSASGGFARLVIKLGEDVPSEVTTAGSILVIRFDRPVDVPVDRVPEGAPDYVNSARRDPDGGAIRLSLARRVTVNTMNAGERTFVDLLPEGWKGPPPSLPLDVVKELAERARVAERALGPQRAAAEAKKRPQIRVRASVQPTFVRFVFEMPDGVGVSSVLNEQKLTLVFNANLNFDLADAVVAAPPNVASIKQKADIDQTNVEIALIGDSDVHSFRDEKNYVVDVSFQPDKGKMAATPEAAIAQMKPGGRTAVPAAPPEKKETEREIAPPTSETIAREAKIDVKPGVKPELPAAMPPAEAPKPAPATQAAQAVEGPKEAPKPAQPVPEAAPARPVMTEAPREAVKDAAREPVRETAKAAAEIAPAPQPAIAAVDARRDSDGLRVTFPIQVATPAAAFRRGDTVWLVFDSPKPIDVEAIRTKGGAMIGEAGRIPLEKGQAVRIRLTRPLVYSLTSEEVGKETNWLLTLADKIQATPLPLMMSRNITDPALANIAIPFANPGMLHKLTDPDAGDMLYVVTAQRPVRGFIKRQDLVDLSLLESAHGIAIRPNSDEIGVEVGADKVILGKKGGLTLSPVDISAERAPTAVRPVFSPEGWRKGQSENFWDRQNELMMAISAVEPALRSLPRLDLAQFYMSRAMYHEAKAVTELMLADPLNKEESGALIMHAIASILIGRPAQGLKDLANPVIGNSHDSQLWKALAYARQGKWADAREKFKNVEFAIASLPLDIQRIVTMDAMRASLEVKDYAGASKRRSELEVVGVPPEAGPGFAVLRGRLAEALGHDKDALDDYQLAVASSDRPAAAEAKQLEIALRQKRDEIGKDEALRELETLSMTWRGDAIEVRTLQMLSQMYAESGRYRDALTAARTATRLQPNAEASRQAQDLASNLFTQLFLGPKGDELPPVEALGMFYEFRELTPIGRRGDELIRRLADRLASIDLLDQAAELLQYQVDHRLEGAARAQVAARLAMIYLANRKPDMAITALRASRISDLSGELRQQRLLLEARAQSDVGRHDLALDIVSNVSGREVLRLRSDIFWAARRWREAAEQIELYYGERFRDFKPLNAVEKSDIIRAAVGYALADDSIGLSRFREKYAPLMSESADRLAFDIASKPAAASSAEFAEIAKLAASVDTLDGFLREMKQRFPDATARAPGSPQVKDESDHTGSLPTIPVVRQIKMTR

SEQ ID NO: 10931 - protein, 252 aa, BradyrhizobiumColbertium
MRLPTLPRRVLFLSVLFGAASLAGFAHAQDISINLGGGAGGGVTERAIQLIALLTVLSIAPSILIMMTSFTRIVVVLSLLRTAMGTATAPPNSVIIALAMFLTFFVMGPVLQKSYDEGIRPLVANQIGVEDALQRASVPLRGFMQKNVREKDLKLFLDLSGEPAPATPDDLALRILVPAFMISELKRAFEIGFLLFLPFLIIDLVVASVLMSMGMMMLPPATISLPFKLIFFVLVDGWSLVAGSLVQSYGGG

SEQ ID NO: 10932 - protein, 319 aa, BradyrhizobiumColbertium
MQGSPITFIVAFIVVLALIGVAAWLVRRFAGSRIGANTQRGRMPRLAVIDAAAVDGRRRLVLVRRDNVEHLLMIGGPTDIVVEPNIVRAAPSRDQLPQRPNAAEPPRLAPMPDAGGWADEAPRPELLDHPEPQMPEPPPRPARPSFADEVRRPAPTLAERRSEPSLGSFAPEPIAPRPEREPRPEPLPPRVSRSEPPVMPRPPRGSEPMKMPPVRAERAAAPPPPVPQAPPVPPPGTPSSAEQNLAEMAQRLEAALRRPAGETVAPPVAPEPPAAPPRTARSEPAAPPAPPPKPAAEKTSFENLEDEMASLLGRPKPSS

SEQ ID NO: 10933 - protein, 103 aa, BradyrhizobiumColbertium
MHTCPRQMALFSCPWSDTQPPANDAPNCDLLTSHGKFCRPQLLITHESLDPKRLLGLCTHRQTDGLIPVWERKITGGRMRVPFGDTGPGYLNQLLTIHAANSA

SEQ ID NO: 10934 - protein, 134 aa, BradyrhizobiumColbertium
MSINDIPELSALRTKMQWHQERQRVLSENVSNSDTPKFRPRDLVEPKFDKSGTVAGSMGPLALTRTSSSHMAPSGAASAFDQNRNAGFETRPAGNAVNLEEEMMKAASNQMDYAAATSLYSKSLRLLKTAIGKG

SEQ ID NO: 10935 - protein, 141 aa, BradyrhizobiumColbertium
MANDSSDFARSMAIATSGLRAQAGRMRVISENIANADSTAQTAGGDPYRRKVPTFSSALDRTLDAQVVTLGRIKPDQSSFRVKYEPNNPAADASGNVKYPNVNSVVEMTDMRDAQRSYEANLNIITATRRMIQRTLDILKS

SEQ ID NO: 10936 - protein, 102 aa, BradyrhizobiumColbertium
MASPTVAANAYASLARVLENSGAGKGSEPSGQSFASLLKDAVGSVMESGRKSDAQTVAMAAGKANVMDVVTAVADTDVAVSTLVSVRDRVIAAYEDIMKMPI

SEQ ID NO: 10937 - protein, 94 aa, BradyrhizobiumColbertium
MNKGICQMTGPETLDVARDAIWTIVIVSSPLMVVGLVVGVIVSLFQALTQIQEQTLIYVPKILAIFATMLLALPFMADSMHAHMMRISSRIIGG

SEQ ID NO: 10938 - protein, 258 aa, BradyrhizobiumColbertium
MRIDVSLLPALAASFMLAFARVGAMVMLLPGLGETNIPTRIKLSIALLLTLIILPLHRNAYQVDMGSLAPLLVLMLHEIAIGIVLGATARVTLSALQVAGSVIAQQMGLGFVTSVDPTQGQQGVLVGNFLTMLGITLLFATDSHHLVIAALNDSYTIFSPGETVSSGDVASLATRAFAAAFRLGLQLSGPFLVFGLVFNIGLGVLARLMPQMQVYFVGVPLSIFAGFLVLAVVLSAMMGTYLDYFIGVMHQMMPLRPR

SEQ ID NO: 10939 - protein, 359 aa, BradyrhizobiumColbertium
MSDDKDPESQTEDPTQKRLDDALERGDVAKSQEINTWFMMAGGTLVVSTFSGSVGSGLLTPMRNLLANAWMIKTDGKALLVLMQQIEYAVLAAIGVPLLMLVLAAIAGNMLQHRLVWSSESLTPKLSKISPGAGFKRIFGKQAAANFLKGIGKLIALSVVMTMILWPERHRLEAMVRLDPAAMLGASTSMTIHLLGSVVAALAIIAIADYFFQYRTWFQRQKMSLQEIKEEFKQSEGDPHIKGKIRQLRQQRAKKRMMAAVPKASVIITNPTHYSVALSYERGMSAPICVAKGVDNLAFKIREIAREHDIPIVENVPLARALYATVEIDQEIPTEHYHAVAEVIGYVMRLKRGFSAGRG

SEQ ID NO: 10940 - protein, 73 aa, BradyrhizobiumColbertium
MVGLGGHSRAGAACRQRINALRGAWGPPCLNRTLRCKGSRGETYADSQITAISGAFRVFYPRPALNPRFSRMT

SEQ ID NO: 10941 - protein, 861 aa, BradyrhizobiumColbertium
MTAETDHDLTREPVAAAEPSPRSGSIALVLLVAAGLVAVAVGLMTLGRAQAQPYILGILAVLAMVGLFNLFAFAAGIIRFADRNLDDPVIRRISDHAFDGLAVTDARGHVVYSNAAYLTLTGATGPQDVRPVERVFIGNPDVSEAVFRLLKAAREGKRQQEEVRISGLDGSQGRWLRMRVRPLGSAKREAKYAVWSIADITRDRERQEDVFQELQHAIEYLDHAPCGFFSVNPAGELAYVNATLANWLDYDLAEIGSGGLKLTDIVSGDGASLLTSIVAVPGEVKTEVFDIDLRMRSGKTMPVRLYHKLAFGADGAPGPSRTLVISRARDERSDPDRAAEVRFMRFFDHTPMAIATVDRAGNVVRANARYAKLGQALGLDNASKSIFRAVNARDRHLLIAAINQAAEGQADIAPVEVALEGTKERWGQFFVTPVDSAENEAEAAIVHMLETTERRALENQINQSQKMETVGQLAGGIAHDFNNVLSAIMMANDFLLNAHKPTDPSFQDIMQIKQNATRAATLVRQLLAFSRRQTLRPQVLDLGDALSDLTMLLRRLIGEKVKLDLVHGRDLWPVKVDVSQFEQVIVNLAVNARDAMPDGGKLIIRTANVTTEDAAKLAYKGMPAADYVRIEVADTGTGIPADIRDKIFEPFFSTKEVGKGTGLGLSTVYGIVKQTGGFIYVDSEPGQGTSFHIFLPRHHAEADLHAEQPAATVSASIGAGKEAAPAAVEAKPRTDLTGQGTILLVEDEEGLRALNARGLRSRGYTVVEAENGVEAMEMLEEQGGAIDLVVSDVVMPEMDGPTLLKAMREKNPDIKFIFVSGYAEDAFEKSLPEGQQFDFLPKPFTLSQLVAAVKETMTKQG

SEQ ID NO: 10942 - protein, 337 aa, BradyrhizobiumColbertium
MTFSLRSRNLFNAIAVVLALALPTALTISSADARAGGGMSSGSRGSRSYSAPPSTTTAPGSASQFNRTYTQPGAGMKSAANAPARGGLFGRAGGFMGGLAAGFLGAGLLGMLFGGGLFGGLGGLSSILGLMIQIALVVLVVRLAMSWWQRRHAPREAYANADAGAGPGPQTNQRSGLGGGLAGGLGGGLGGGLGGFGFGANNAPLEIKPDDYEAFERLLGEIQTAWSNEDVAKLHTLATPEMVSYFEQDLAQNRARNVVNKVTDVKLLQGDLAEAWREGETDYATVALRFALTDKTVDRNTGAVVAGSEQPGEATEVWTFARRPGSGWELSAIQQTN

SEQ ID NO: 10943 - protein, 235 aa, BradyrhizobiumColbertium
MKYELYYWPEIQGRGEYVRLALEEAGVAYVDVARGPRGPSAMMKMMDAHKGTPPFAPPFLKAGKLVIGQTANILLYLGARHGLAPKTEAGRLWVHQLQLTITDLVVEIHDTHHPLGPSLYYEDQKAPAKKRTAEFWSERVPKYLGYFEQLLADSGGAYVTGRRPTYVDLSLFQIVAGLRYAFPKRMTAFERDIPGLVGLHDRIAARPNIKAYLQSDRRIAFNEQGIFRRYRELDG

SEQ ID NO: 10944 - protein, 57 aa, BradyrhizobiumColbertium
MKVSTVAPPPIAIVVPNYDTTKQQDDQAKAKDTDPVYKPQPPAPLPPGQGTRIDQLA

SEQ ID NO: 10945 - protein, 157 aa, BradyrhizobiumColbertium
MTLKLNVRGAILVAAAITGLVALASPARADRCDDSAKELANQVDRLKVNFRAANVVYMTHPAAKELSVGCRGDKYSIELYAKGDRKPKPEFYALVGSMAAIVFTVTKDDTTTGATRCLKRMGLLRGDKVTMRYRRLNMECTRTKSDASIAITRGKDE

SEQ ID NO: 10946 - protein, 551 aa, BradyrhizobiumColbertium
MNAPTAFPDQSKPVPPYKHTPLFPLGKDETPYKKISSEGVRVEKVLGKDMLVVSREALRALSEAAFGDINHYLRPGHLKQLRAILEDGEASPNDKFVALDFLKNANIAAGGVLPMCQDTGTAIIMGKKGCNVITDGDDEAALSEGARDAYLRRNLRYSQVAPLSMYEEKNTANNMPAQCEIYAEGDDAYKFMFMAKGGGSANKSFLFQATPSVLTKDRLLAFLKEKILTLGTAACPPYHLAIVIGGTSAELCMKTVKLASARYLDALPTHGSPDGNAFRDVEMEKEIHKMTQSLGVGAQFGGKYFCHDVRVIRMPRHGASLPIGLGVSCSADRQVLGKITKDGVYLEELEHNPAQYLPQVEQTLGGEVVKIDLNQPMKDILATFSKYPIKTRVSMTGTMIVARDSAHAKLRERLEKGEPLPDYFKNHPVYYAGPAKTPEGYASGAFGPTTAGRMDSFVDQFQAAGGSMVMVAKGNRAPAVREACKKYGGFYLGSIGGAAANLAEHCIKKVEVLEYPELGMEAIWRIEVVDFPAFIIIDDKGNDFFKELNLG

SEQ ID NO: 10947 - protein, 306 aa, BradyrhizobiumColbertium
MRVLRLIAAALLCVATQAARADDSEPAWRASALAMVPAGYVAGLAYRTDGSTGYLAVYPATANDPKTPASVFAGRQALVVTLTPDATRAVSADLKPRAEPDPDNDEADFAKLHAELAAKRASLPDGTEPCSLGAWSIDKDPNGLNVRAEPSTTGRVLGTLPPPYRLKLGGAENTPDGGWLTEFSIIGFKNGWFLIEGARPPGQDYEDEKRYPRSAPKPYAGRGWVASNKVGANYANGATRAGGLFQAPFIDAKWTPAQRELGGPIDGDGGPKRLMACSGFWGLVESHDGVRGWWRALCSNQVTNCS

SEQ ID NO: 10948 - protein, 98 aa, BradyrhizobiumColbertium
MAVDGNWNLTMTTPMGERQATLSLKAAGGTLTGTQGAEGNTAEIFDGTVSGDNVSWKVSIDKPMPLTLEFTGTVSGDSISGEMGIGPMGSFPFTGARA

SEQ ID NO: 10949 - protein, 186 aa, BradyrhizobiumColbertium
MTMKDVFARLASDLLSVIIFLAVYLVTDNVILATAVAIAGAFAQVIYARLKGQPLHYMTYASLALVVVLGGITLLTNDPRFMLAKPSIAHFAIGAIMLKRGWMLRYMPPAIVETVPEYVTIAGYAWAALMFVIGVGMLAVAATGDLKLWAFYLMVVAGGAKILAFAVQYFVLRLIVTNRRRAAARA

SEQ ID NO: 10950 - protein, 45 aa, BradyrhizobiumColbertium
MRRPDRRALFLMAVPKPALLGLGPAFRWVLRRLSPLAASRLSSQK

SEQ ID NO: 10951 - protein, 87 aa, BradyrhizobiumColbertium
MHMLSITADILAVLALAGAALAILTMRLRRRSLTFFEGGVLLATCLLVAAALPIMSRLPWADLVDEMTDHLVAALHILEIAYVVLTL

SEQ ID NO: 10952 - protein, 465 aa, BradyrhizobiumColbertium
MQHDAIVERHDNVAPIPFEADAPFLRVIGELPRELNGTLCRNGPNPQFDSPGAHWFVGDGMLHAFHLENGRASYRNRWVRTPKWLAEHDAGRALFGGFGRKLPDAPADLTDGGVANTNIIFHAGKLLALEEAHLPTEIEPGTLATRGYYNYQARVAGSFTAHPKIDPITGELVFFGYNAAGPLTPALSYGSIDASGKATRFERFEAPYASMVHDFIVTENHVLFPILPITGSMARAMKGQPPYAWEPDKGAYVGVMKRSGTTKDIVWFRAEACYVFHVMNAWEDGQRIVADVMQFEEAPLFPHPDGRPTDPQKSRARHCRWTFDLSGNTDRFQQTYLDDLTGEFPRIDDRRAGLKSRHGWYACANPKLPMFGALSGIVHVDGNGRRLGHYLLPAGDTISEPVFVERSKDAAEGDGWLLAVVWRARENRSDLAVFNATDIEAGPAALVQLGHRVPDGFHGNWVGAQ

SEQ ID NO: 10953 - protein, 242 aa, BradyrhizobiumColbertium
MGKTDTKSEPARSSRTSRSTTSAAASRPRRRTTGAKTETPYHHGALREALLQAAERVLERDGLAGLTLRAVAREAGVSHAAPTHHFGDLTGLLSELAAVGFRQFNAAMAASCDAATTPLERALARPKAYVAYAQAHPGMYGIMFRTERLDYSRPSLHEAAEASFAGLANAIGMMRQEQISGDALTLNQGAAIARAWSMVHGFTMLLLDGRLEDILARLPEGTTAERLLEAMLTAPVTPKLPV

SEQ ID NO: 10954 - protein, 64 aa, BradyrhizobiumColbertium
MLVVTRLPPGPVCHVAYVDAVANPTANELARKAADDFARSFTCGKDEVKVIGTSGRAVELATMR

SEQ ID NO: 10955 - protein, 105 aa, BradyrhizobiumColbertium
MIRITTPLLVTLLLCAGLGCANAQAIGSSYYTSTAPKDCRQVGQPSDLDGSTTRVCPGKGGLVVLIAEDDLREVVSVGRNRKQAAEEPAANVWFAPFNSSESTIE

SEQ ID NO: 10956 - protein, 201 aa, BradyrhizobiumColbertium
MGSSSLVRVSVLLIMPATTSNKPYRVGRSKTGLGLFATKPIKKGTRIIRYFGPILDSRIPEQDEIENKYLFELNGRWTIDGSVRKNLARYINHSCRPNAESDVRPRERKVYIRAIKNIEPGEEINYDYGTDYFKAYLKPIGCRCDSCERKRKKLRAEARAERAKVKARAERKAKKAGPKSATAKKKVNGKHFAGKAGRARS

SEQ ID NO: 10957 - protein, 132 aa, BradyrhizobiumColbertium
MIEASTFLRRALLADAIFSGVAALGFTFGASAFARLFNLPDMLLLEAGLFLIAYTGLVGWLASRASVARALVLLVVIGNAAWTVGSIALLLSGAVSPNLAGELMVVAQAIATGVFAELQYVGLRRSASAAAA

SEQ ID NO: 10958 - protein, 76 aa, BradyrhizobiumColbertium
MIALLLYRTVADHVLPWALAFGTRMLARSLNMPEPLVHSTGDYVVAQVIAFEHGVGRSLCPLRLARLLRAWWRGRL

SEQ ID NO: 10959 - protein, 272 aa, BradyrhizobiumColbertium
MNAHASTARTERSQPVHIGDHLREWRQRRRMSQLDLAGEAEISARHLSFVETGRAAPSREIVLRLAERLDVPLRERNVLLVAAGYAPAFPQRTLEDPALKSARQAIDLVLKAHEPNPALAVDRHWNLVSANRMVAPLLDGIPQHLLGQPLNVLRLAFHPQALAARTVNLAEWCGHLLERLHRQCEATADPELIKLYNDLRSYPIPARSAPLSSDNVAIPFKLRHGGEILSFFSTTMVFGTPVDITLSELALETFFPADERTAERLKQMAAMT

SEQ ID NO: 10960 - protein, 221 aa, BradyrhizobiumColbertium
MSTLKPLQIDVVSDVVCPWCYIGKHRIESALALVPDVPVKLSFRPFFLNPWVPREGISREAYLTQKFGSVEAYKGIAGRVVAAASEEGLVYKPELVARQPNTTDCHRLILWAEAIGKAPEMKQRLMELYFRDGGDLTDVNVLVRAAADVGLDADDVRQRLATDADVARVSADAQEAAEKGISGVPTYVFAQKYAVSGAQDPNLLARAIRQVSAEINAEAAE

SEQ ID NO: 10961 - protein, 389 aa, BradyrhizobiumColbertium
MVDIAQQAAIHPASASNAGAARAPVPLTTIDPGQWRALAQRAIEPNAYYLPAWEFAVSASARGRAEASALSAFDASSTRLIGLMPVISLWRARKIPLPALVSAHPYGTLCSPLIDRDLPIEAAASLLQQAREAGAHALVLTDVALDGAAMNALRQILSRTGLKPRILSCYVRASLDAAQEGETLLREALGSRKLKELRRQRHRLEEHGPVMFEVARKPDEIRPALEAFLQLEASGWKGRRGTALVQHAGDATFIRRAVPALAETAQCEVVTLRAGTTPVAAGIVLRHQDRAFFFKLGIDERFARHSPGVQLTLDLTRHLCADPAISSADSTANADHPMINPIWRGRFAIGDVLIPLRRHDPMVALIHGALSAHGAVYATARRMVRLLRK

SEQ ID NO: 10962 - protein, 479 aa, BradyrhizobiumColbertium
MTDDTFIEGPLYEKRRKVYPQSVHGPFRRIKWAILCITLGTYYLLPFVRWDRGPGLPDQAVLIDFPHRRFYFFFIELWPQEVYYFTGLLILAAMTLFLMNAVAGRLWCGYMCPQTVWTDLFYAVERWVEGDRRERMQGDKHYWTFTHLRKVALKHFLWIMIAWWTGGAWVLYFADAPTLVKELATFQAPFLAYLWIGILTATTYVFAGHAREQMCIYMCPWPRIQAALTDEWALNVTYRRDRGEPRMSVKKADAARAHGAPAGDCVDCHQCINVCPTGVDIRNGIQLGCIQCGLCIDACDNVMREIGRPQGLIGYDTDINMQRRRDGKPPIYRIIRPRTVIYAAVIAIVGSIMLYTLATRATMDVNVLHDRNPLFVQLADGGVRNDYTVRILNKGAQRSFTLEVSGLPGATIRVAGIEAAPGGKPVIEVGQDQTREVRMSLHVGPADLPKTSRDIEIAIAETAGGGRASARDHFVPGDQ

SEQ ID NO: 10963 - protein, 67 aa, BradyrhizobiumColbertium
MNVDKAVLAFAGCVVLLGLALGTYVNAYWYLLTAFAGLNMLQAAFTGFCPAAIIFKKLGLGSGCAFS

SEQ ID NO: 10964 - protein, 147 aa, BradyrhizobiumColbertium
MSTTRQIVCGSCGRINRLPAERAPQGARCGACHQPMFTGHPVEVDEEAFSRHVANNDIPVLVDVWAPWCGPCRAMAPMFERAAQQLEPKVRLLKLNSDNAPSLSSRLNISGIPTLLLMRGGREIARHSGAMDARSIVAWTEAGLTRS

SEQ ID NO: 10965 - protein, 428 aa, BradyrhizobiumColbertium
MAEVVVIGAGLSGTLMAYELLPQLRKEDRLSVIAQGSVYHFVPSNPWVAVGWRKREEIEIDLADIMKRKGVRLLTQGARRVHPTENSVELGDGTSINYDYLVVATGPELAFDEIPGLGPQGHTQSICHVDHAAHAREAFEKLAANPGPVVIGAVQGASCFGPAYEFLFILETELRRRKLRDRVPMTFVTSEPYIGHLGLDGVGDTKGLLESEMREKHIKWITNARVDNVAPGLMSVEEFADDGTSRKAHELPFAYSMMLPAFRGVEAVRGIEKLTNPRGFVIVDKHQQNPTYPNVFAVGVCVAIAPVGATPVPVGVPKTGFMIESMVTATAMNIGALLRGKAPTAQPTWNAICLADFGDSGVAFLAQPQIPPRNVNWSSKGEWVHLAKVAFEKYFLRKMRRGESEPFYERFVLDKLNIAKLKEVRTGT

SEQ ID NO: 10966 - protein, 106 aa, BradyrhizobiumColbertium
MKMNAEIMERAADQASELLKALANRHRLLLICQLIDGERSVGELAEFLNLRDSTVSQHLALLRKDGLVSARREAQTIFYSIASEPARKVLKTLFQAFCAPKSARTR

SEQ ID NO: 10967 - protein, 325 aa, BradyrhizobiumColbertium
MLAAFAAIGLPATLASAAETLVVTQQSIADEKAVFATVESVSVVPARGRIGGTVVQLKVREGDRVAAGQAIATIGDDKLVLQMKSLDAQIEALQAQANQAQLDFSRTEGLVERGILPRIKLDEQRTALNVAENGLRAKTAERAVINEQLNQGQVLAPADGRVLKRLITVGSVVLAGDPIVTVAQQNFKLRLRVPERHARFLKAGDRIRVDGAEFVGEVAKSGVIDLVYPQIEEGRVIADATVEGLGEYFVGDRLRVWISGGTRAAFVIPSSYVTTRFGIDYVRLQKDKGTIDVPVQRGRELPTPALPDGLEILSGISAGDQLVLP

SEQ ID NO: 10968 - protein, 1073 aa, BradyrhizobiumColbertium
MNLGLSGRLTRATIASPLTPLFLLASLVVGLIAVVIIPREEEPQISVPMVDIRVNADGLRGPDAVELVSKPLESIVKGIDGVEHVYSQTEDDRVMVTARFLVGTKFEDAILRVHEKIRANMDRIPVGIPEPLIVGRGINDVAVTVLTLSPKPEAASRWTDKDLYELADKLRSELMKVDDIGLTYISGGAAQQIRVEPDPEKLSLFGITLQQLVAKVKDANRSFLAGQVHDAGTVRSVAAGQTLSGIPDIGLLLITSRDGRPVYVKDVASVVVGPSTIEHRVWTESRDTAGQWARTPAVSLALAKRAGANAVVVSENIAHRLQELKARLIPEDVQVTVTRDYGETANEKANELLFHLALATISIVVLIAIAIGWREALVTFVVIPTTILLTMFAANLMGYTINRVSLFALIFSIGILVDDAIVVVENIARHWAMRDGRPRLQATIEAVAEVGNPTIVATLTVVAALLPMLFVSGLMGPYMAPIPANASAAMLFSFFVAMVVAPWLMLKLAPKGDTAPAHAEHDEGRLGRLYRRFAAPIVRSKRSAWLFLLGVGIATLLSMTLFATKSVTVKLLPFDNKSEIAVVVDLPERASLEATERTLFGAAEIARQLPEVTSVQSYAGTPAPFNFNGLVRHYYLRERPELGEVQVNLAPRGERKRASHEIALELREKLKALGPPPGTSIKVVEVPPGPPVLSTLLAEVYGPDATTRRAVTAELKKIFAEVPFIVDIDDSIGEKRPRLRLSIDQDRLEFFGVEQRDVYDTIQTLFGGTSIGYSHRGEDRNPIEIAVRLGKRDLVWDEALASTPVPANTLPGSKTVVELGQVVKATVEEGSPTIFRRDGRFADMVMAELAGRFEAPLYGMLAVADRVEAHDWGKLPKPAISLHGQPSDESRPTLLWDGEWEITWVTFRDMGAAFGAAILGIYVLVVAQFRSFRLPLVILTPIPLTLIGILIGHWLLGAPFTATSMIGFIALAGIIVRNSILLVDFIRHSGAGGKSLRDVVLEAGAVRFKPILLTALAAMIGAATILLDPIFQGLAISLLFGLASSTLLTVLVIPAIYIALRAPREAPTTAKSS

SEQ ID NO: 10969 - protein, 118 aa, BradyrhizobiumColbertium
MDKNYVDITRNISANLKKLRSDIPDTMKGFAALAQAATRDGALDKKTKELIALALGVAAHCDGCIGFHTEALVKLGATREEIEETLGMTVYMGGGPSLMYAADAIAAYEQFQQQSAAL

SEQ ID NO: 10970 - protein, 109 aa, BradyrhizobiumColbertium
MRTFTIALLAGVGALAAASSAKASDIYTTSEYTNPDLVQQVRMVCDDDGRCYRKRSGSRVIVRDSYNYMPRDRYYERRTYHRHRHDGPRAGVGIRAPGVSVGVGVGDRW

SEQ ID NO: 10971 - protein, 134 aa, BradyrhizobiumColbertium
MLRIIAHAALFAGALALGACGFADSRAPVPEFMRMKEPEQPPPETPPDVKRVVREQIDVVFLPTSYPREVHVAPPHRELRGLGWTACVRAQLTSATGAPLGAQTYLVSINGGKVVDRRRAEADDICGTETYEPI

SEQ ID NO: 10972 - protein, 74 aa, BradyrhizobiumColbertium
MRILVIAAAALALAAGSAEAQGRRQPNDGAKPADHAPKVDEKAYKAALERIPEPKDKYDPWGGARPSDPAKKSR

SEQ ID NO: 10973 - protein, 676 aa, BradyrhizobiumColbertium
MRARQLFAAPFAAFVLFAASPCFAWQSWGGDVGGSRFSSLRQITPDNVGQLVRAFEYRTGDLTARPPEVVRRTKFQATPLFVEDSLIFCSPFNEVIALDPGTGVQKWRFDPKIAVNQRPANRHVCRGVTYWVDDTAPPEAACRSRIFMGTNDVRLIALDAKTGIPCADFGNGGEVKLEIGMPLDWPGEFQVTSPPAVGRGVVVVGSAIGDNRRVDAPSGMVRAFDARNGQPRWTFDPLKRDGIEAGHANVWAPMSVDDARGLVFLPTSSPSPDFWGGKRPGSNEHANSVVALRIATGELVWAFQTVHHDVWDYDLAAQPTLTRIDTGEGQRDVVIQPTKQGFVFVLDRDTGKPVWPVEERPVPQGGAEGEALSPTQPFPTHVPALTSQTISPDDALSLMPGIGRSSCERQFAEARNEGLFTPPSRQGTLVFPFTGGGVNWGSAAFDPVNQILYANTSRAVHLIKLIPRAEAAGFNPPPGHDFGQQRGAPFAMSRALVTSPLGLLCNKPPWGEMVAVDVRAGKILWRATVGTTEDLAPLGVPLPWGAPLVNGLAVTAGGLVFTGAMDAYLRAFDGRSGKELWQGRLPVPGVANPMTYFWKGEQYVAIGAGGHSEAGTSIGDSLVAFRLARPGEGPTLWSRTIDRPGGRFLAASSVIGIGIVVLAIASLRWRRRGKQS

SEQ ID NO: 10974 - protein, 93 aa, BradyrhizobiumColbertium
MHYFTLINMDRRGMIEKRSAQRHRVFKGGTITFENSGISCTVRNMSADGAAIDLDASVMLPPSFTLAIVRDGFVRHCRTVWRNDRRIGLAFVQ

SEQ ID NO: 10975 - protein, 97 aa, BradyrhizobiumColbertium
MKILLSILFAAAFSLSSMPAHAVKWDLATMSCKQFLESGEDNIQVVLTWMDGWYKGDEDNAIIDTDEFIDNAKKFGAYCAKNPNASIVTAADEILGK

SEQ ID NO: 10976 - protein, 154 aa, BradyrhizobiumColbertium
MQMQPQAEFGIADARRILGEVFAPWVQDLNLAVERIEHAQPADLPDWQPGALLRMPFSERLCRHGGVVCGQALMALADTAMVIAILAANRGYRPMTTVDQTTHFMRAVSSSDVLADARVVRLGRIMSFGRVTLLSAADSKPVAMVSSAFAMLPG

SEQ ID NO: 10977 - protein, 103 aa, BradyrhizobiumColbertium
MIKEWMMKLFRLAAVLAVLAGPAYAQMPNLNLLQDAPSKTPEEKAAEAERDRAYKETLKKIPDSKGSNDPWGGMRSDPPKQPAPKASAATSAPKKTKSGTAAN

SEQ ID NO: 10978 - protein, 84 aa, BradyrhizobiumColbertium
MADRPRDLAERMARRRKLVGKPGQMAGDGYLRETFTLPRAAARERAQAFFARYPKAGYMSAVETWRELPGGDIEFTMRRLPSAD

SEQ ID NO: 10979 - protein, 85 aa, BradyrhizobiumColbertium
MLGIPRRYSHFVFGIIQSGLTSLIAAGIASFPAASPMSFVRHWMVSWLIAWATMLPIVLLAAPAIRAFSLRLTQGERDPRVGREA

SEQ ID NO: 10980 - protein, 38 aa, BradyrhizobiumColbertium
MARRERGGVMDNVERSFAAATAVGFVVLVIGLVLLAVL

SEQ ID NO: 10981 - protein, 195 aa, BradyrhizobiumColbertium
MLLMARIRVRDKRLRGSSAIKAMYPICSMFAICSFADLGGRPRSTFDAPQRRADEMPSEFRSDGTEPFRGLRPSLVMDRNSGDHDHDGNHARRCHVAPSAARGGARGDGEVRATGERVPQEGSPGACRRAPPSPERGQDSLRSKDPASELAIAGLEGRNEGLRYLNTMFKPLADQANCRAAYCAWGCFAVLTDRM

SEQ ID NO: 10982 - protein, 362 aa, BradyrhizobiumColbertium
MSATALRIVEGSSMDKSKALAAALSQIERQFGKGSVMKLGKNDRSMDIEAVSSGSLGLDIALGIGGLPKGRVVEIYGPESSGKTTLALHTVAEAQKKGGICAFIDAEHALDPVYARKLGVNIDELLISQPDTGEQALEICDTLVRSGAVDVLVVDSVAALVPKAELEGEMGDALPGLQARLMSQALRKLTASINKSNTMVIFINQIRMKIGVMYGSPETTTGGNALKFYASVRLDIRRIGAIKERDEVVGNTTRVKVVKNKLAPPFKQIEFDIMYGEGVSKMGEILDLGVKAGIVEKSGAWFSYDSQRLGQGRENAKAFLKGNPDITAKIETAIRQNSGLIAEQILAGTPERDADGEEPAEE

SEQ ID NO: 10983 - protein, 265 aa, BradyrhizobiumColbertium
MGPLATGRQGSQIIAGEFCEPYDEIEFWFGANPRDQLQLVWLLDHLGSFPVLAQKFGVRLLDSDLIFGPDYDFAEGERHIPIGNFGAKEFEIARLAWLSYRAPTPEACIDLLHRDLGALLVLRPALLQLLAELPSPLTGLGATEMRFLEMLDWFANTNPLFHLRSLRGTYVWGEVEPGYLLEGLALGPKPAVAGLGEELRAIDLGNLGARHKVYLRSRSSLTEFGKAVLAHQEDFSRHNPIDRWWGGTHLTNDRLWRYGPVLTKR

SEQ ID NO: 10984 - protein, 95 aa, BradyrhizobiumColbertium
MAGLADLVIAIERLLVWGSLPSTAELNAFLAPHTMHPSGLHWLDDTPSWRLESSGLRGRGLIELLSEYDSVERWMEPEARCAIDLALAARPLRQR

SEQ ID NO: 10985 - protein, 216 aa, BradyrhizobiumColbertium
MSKLVMRSLDIAVSGLSPAGLAKLNPPMVKLTQDHVELAGRAWRAYRAPTPQAWFGLLETDLRLLPQLERCVVALLEELPNVSSGLGATETRILELIAPGGVQPFDVFPGHQKPNERRVFDYWEVGALLDGLARCPVPAVSGLEEGQFTLDMHEDALLLVRYKQSRLSLMDLGRAVLAGEDFRHHNPIRRWWGGTLLVSDRLWRWDRKGRLLIAPG

SEQ ID NO: 10986 - protein, 324 aa, BradyrhizobiumColbertium
MSHLILATNDRAEDVLRQSGLANVALGFCPRFVWRKLPSDEQLLMGLERRSEKHRNSGDHWLDDVCSGALDGFSTRDIGFFELCAKFDSIDIWVDPQPNDQLVLVWLLDLLRPYKEITTKLSLVHADDTISNYDPESVAKWRLPAFKVTENHLATASRAWRAYRADTPQTCFDLLMTDLMILPRLRSALIAVLEELPDSVTGLGATEMDLLDSVNGGQTDPRLVEDARWLRDVFDENDAYDALLELGAYSAPPLLLGDPAFDNEDRYFGRSEWKLTLTELGRSLLAREDDMWRHNRIYRWWGGTELTNEKLWRWDRKSRLLVAP

SEQ ID NO: 10987 - protein, 955 aa, BradyrhizobiumColbertium
MTAHRKTNGDTAASFVRRHIGPSARDVTAMLETVSAKSVDALMAETLPASIRQAAPLDLGKPLSETEAIAHMTELARRNQVFTSLIGQGYSGTILPAVIQRNILENPAWYTAYTPYQPEISQGRLEALLNFQTMICDLTGLDVANASLLDEATAAAEAMALAERHSPVKAKAFFVDKDVHPQTLAVMRTRAEPLGWQLIVGDPLTDLDKADVLGALLQYPGSSGALRDLRPAIATLKAKGALAIVAADLLALTLLASPGELGADIAIGSAQRFGVPMGYGGPHAAYMAVRDALKRSLPGRIVGLSVDSRGAPAYRLALQTREQHIRREKATSNICTAQVLLAVIASMYAVYHGPEGLIQIARTVHRRTAVLASGLRKLGFAPQSDNFFDTLSVDAGAKRAEIVARAASERINLGVSDSALRIALDETTTPATVEAVWRAFGGTLAYAEIDAETREALPDDLKRTTAFLTHPVFHAHRSETEMLRYMRKLSDRDLALDRAMIPLGSCTMKLNATTEMMPLTWPEFASLHPFVPREQAAGYHALFARLEKWLCDITGYDAISLQPNSGAQGEYAGLLAIRGYHAARGQGHRRICLIPSSAHGTNPASAAMVGMDVVVVSCEKNGDVDVNDLRAKAEKHSNDLAAVMITYPSTHGVFEEHIREICDIVHAHGGQVYLDGANLNAQVGLSRPGDYGADVSHLNLHKTFCIPHGGGGPGMGPIGVKAHLAPFLPGHPVTNAEAPVGPVSAAPFGSASILTISYIYILMMGGEGLKRATEIAILNANYIAARLDPHFPVLYKNAKGRVAHECIVDPRPLKTTSGVTVDDIAKRLIDYGFHAPTMSFPVPGTLMIEPTESESKAELDRFCDAMIAIRKEIAEVEAGRFKIEASPLRHAPHTVHDIADDDWNRAYTRSEGCFPAGTSRTDKYWSPVGRVDNVYGDRNLVCSCPPVSDYAEAAE

SEQ ID NO: 10988 - protein, 122 aa, BradyrhizobiumColbertium
MTTTLYTSDHEWLAIDGDIATVGITDYAQQQLGDVVFVELPKVGRALKKAEAAAVVESVKAASDVYAPVTGEVLEANEALAAEPALVNSDAQGKAWFFKIRIADKGELGGLMDEAAYKAHTA

SEQ ID NO: 10989 - protein, 363 aa, BradyrhizobiumColbertium
MSLGGKMVPFAGYDMPVQYPAGVLKEHLHTRSKAGLFDVSHMGQIALRPKSGKVEDAARALERLVPQDIVAIPPGRQRYAQFTNADGGILDDLMVANFGDHLFLVVNAACKEPDEAHLRAHLSGDCVIDSLADRALIALQGPKAESALAKLCAAAPAMTFMDAGPHEVAGIKCFVSRSGYTGEDGFEISVPAADAERLARTLLDDPDVLPIGLGARDSLRLEAGLCLYGHDIDTATTPVEAALEWSVQKSRRSGGARAGGFPGAERILAHFDQGASRRRVGLRAEGRAPVREGALLFANDAGGEPIGKVTSGGFGPSLNAPVAMGYVPVGLAALGTKLFAEVRGQRLPVQVAAMPFVKNTYKR

SEQ ID NO: 10990 - protein, 894 aa, BradyrhizobiumColbertium
MNMSGVNEIRSTFLNFFAENGHEIVPSSPLVPRNDPTLMFTNAGMVQFKNVFTGVEKRPYQRATTSQKCVRAGGKHNDLDNVGYTARHLTFFEMLGNFSFGDYFKERAIELAWKLITTEFGLKKDKLLVTVYHTDDEAAGLWKKIAGFSEDRIIRIPTSDNFWAMGDTGPCGPCSEIFIDRGEHIWGGPPGSPEEDGDRFLEFWNLVFMQYEQVTKEERVGLPRPSIDTGMGLERMACILQGVESVFETDLFRNLIDATSSALGTGPNEQTVASFRVIADHLRSSAFLVSDGVLPSNEGRGYVLRRIMRRAMRHAQLLGAKEPLMHRLVWALVREMGQAYPELMRAEKLIEETLRLEETRFRRTLTRGLAILDEKSAGLKKGDMFDGDVAFTLYDTYGFPLDLTQDALKSRGIGVDQAAFTDAMERQKAKARESWKGSGEAASEAIWFPLREKLGATEFLGYETESAEGVVSALVKDGAEVASLKAGETGAIVLNQTPFYAESGGQVGDTGVLSGEGGIKIRVTDTQKKLGDLIVHIGTVESGEVKLGTALQLEVDHARRSTIRAHHSATHIIHEALRQVLGDHIAQRGSMVAPDRLRFDFVHPKPITAEELSRVEDIANDVVLENDEVTTRIMGVDEAREAGARALFGEKYGDEVRVVSMGRTARERGANALGWSVELCGGTHVKRTGDIGLITLTGESAVASGVRRIEALTGNYARRHANDTISLAKTAANELRTSLDDVPSRIAALMEERKKLERELSDARKKLAMGGGASAGNGAASGVREVGDVKLMARAVEGIEMKDLKSLADDGKKQIGSGVVAIVGVTEDGKAGVVVGVTQDLTARFNAVNLVRIASEALGGKGGGGRPDMAQAGGPDGAKASEALSAIEKAMASA

SEQ ID NO: 10991 - protein, 386 aa, BradyrhizobiumColbertium
MEHDPLAYSAGARFIQIIIGIIVLNVAAMVLASVPELDDRFGKLFAGITILSVVVFALEYAARLWTVAGHTQRDGSALSDRVGYALSALGIIDLMAFLPAAIVLATGEHATLAALGVLPFFKLIRYSPAMRSLLAAVHAERRALIGCIVILVGAVLTFASLLYAIERDVQPDKLGTIPQAMWWAIVTLGTVGYGDVVPVTPLGKFVSTFAIIAGLAMIALPVAIISTAFAEEVKRRDFVVTWGMLARVPLFSHLSAAEIADIMRLLRARTIEQGEVLVRRGDVALSMYFITAGEVEIALPSQQVRLADGTFFGEIALLHKTKRSGTVTATRKTRLLVLDAQDFHALIARMPTLADHVHTTAKARLADTGDLALAELAQAENEGTGR

SEQ ID NO: 10992 - protein, 418 aa, BradyrhizobiumColbertium
MARHERRSQEAFPIMAKIKVSNPVVELDGDEMTRIIWQYIKDKLINPFLDVELLYFDLGMEYRDHTNDQVTIDAAEAIKKVGVGVKCATITPDEARVKEFNLKQMWKSPNGTIRNILGGVIFREPIICKNVPRLVPGWTKPIIIGRHAYGDQYRATDIKFPGKGTLSLKFVGEDGTVIEKEVFKAPGAGVAMEMYNLDDSIIDFARASFNYGLLRNYPVYLSTKNTILKVYDGRFKDIFQEIFDKEFKKDFDAKGLTYEHRLIDDMVASALKWSGGYVWACKNYDGDVQSDTVAQGYGSLGLMTSVLLTPDGKTVEAEAAHGTVTRHYREHQKGKETSTNSIASIFAWTRGLAHRAKLDNNAELAKFANTLEKVCVDTVESGYMTKDLALLVGADQRWLSTTGFLDKVAENLTKELAA

SEQ ID NO: 10993 - protein, 84 aa, BradyrhizobiumColbertium
MGTALVARHGNIRRLLASPRGGRKPRDHALLAHPASAGGERPAAHSRAGLAFPARFKSRIQVVISLENFVRTGKRQAGHGEGPP

SEQ ID NO: 10994 - protein, 402 aa, BradyrhizobiumColbertium
MSGTDKSKAGLSLDGPIVILVEPQLGENIGMAARAMGNFALGALRIVNPRDGWPNIAAQRAAAGADHILEKVELFDTVEQAVADLDLLFATTARPHDQAKPVVGPEAAASEIAGHVAGGGKAGILFGRERWGLTNEEVGLSNRIITFPVNPGFASLNLAQAVLLVGYEWFKRATSGALPHAMPERSERASQHQMQAFFDNLVRELDKVEFLRPAEKRDTMLVNLRNIFTRMEPTKQDMHTLHGVVMAIAEGRKGPAKGGVLDGEQATRLRALLAEHGQGGGMPDSGSTVRGLARLLRRNPTDAERLLWQALTRDRRFAGQFKRQTPVGRHIPDFVSFPHRIAIELVNPGESEAIAADRASRRAWLEARDYRVLDIRAADVERDLEAELVRLQEMMAGHSDIP

SEQ ID NO: 10995 - protein, 479 aa, BradyrhizobiumColbertium
MSISRRQALAAFGAAVSALAISRAARAEFDGPVVRALEGGEDFWLAQDAYIYGYPLVTMEMTRRVMTNVAAVEGTRGPMGQFVKLRKYPDASFKDVTAPNADTLYTTAWIDVGDEPWVLSMPDMKDRYFLFPMLDGWTNVFQVPGKRTTGTRAQTYAITGPGWKGVLPAGVKEYRSPTSMVWILGRIYCTGTQEDYAAVHALQDQFKLVPLSAYGKSYTPPAGKVDASIDMKTAVREQVNRLDAVAYFNLLAQLMKRNPPAAADAAEVARFAKIGLVPGKDFDAGKFDAAFAKRVPQVAFDRIMLQFKVNKAIRNINGWAFDAEAGVYGTNYLNRALVTAIGLGANRIQDACYPTSQKDADGKEYVGSNKYVMRFARGQLPPVGGFWSLTMYDENYFFVANPINRQSISAREKLKANPDGSVDLYIQKDNPGPDKESNWLPAPAGKFVLMLRMYWPNEKSPSIINGTWKPPPVRRVTSS

SEQ ID NO: 10996 - protein, 216 aa, BradyrhizobiumColbertium
MAKTSSKKNSNSPHAVASDDESARGRLLSAASHLFCKNGINATGIDAIIEEAGTAKTTLYKLFGSKTNLVNAVLESEGKQWREWFIGAMEQGGGDAQAKLARIFPALKSWFAEERFYGCPFINAVGEHDKDAKQFRNIALKHKKIVLGHIEKLAGEFGSTEPAVLAHQLGLIIDGAIVAAMISRDPGVADTAALTAGPLLGQSKPKKKRAEQLEAV

SEQ ID NO: 10997 - protein, 180 aa, BradyrhizobiumColbertium
MTAVVQKTVLTGCLAPIDKNGLEQLIANGKANPKVIKTLKCKTVAEGKFRHANYIRNLPPYIVDEPPGLLGDDTAPNPSEASLAALGSCLAVGLHANAVHRGWIVNKLELELEGDLNITAVWGTGDTSDKPVGFTDVRVKVDMECEGISPDEINALVAHVKKWSPVANTFTRPVNLEVGI

SEQ ID NO: 10998 - protein, 370 aa, BradyrhizobiumColbertium
MGSLALSRADVLDQPAPSIPDEVARIAREQLAPLAAGIDDGSVYPAEVLRKFGAVGAFGNHVPHEGSADLRCAIQAMAAVGEVCGSTAFMKWCQDTLVWYAANSTNAKLAKRFGDAFSTGRVLGGTGLSNPMKSFFGIEKLKLKGRKVEGGYIVRGVLPWVSNLGPDHYFGTIFEREDEPGLVMFLADCSDPAITLTPCKPFLAMDGTGTYGVQFRDVFVPDDLILADPAGPFVKKIRAGFILLQAGMALGLIKDCISIMDEVDIPLGHINRYLPQQPVHFRDLAAELEAETMALARDPYNEEDAYWRKVIALRLRAGDASVAAAHAAMLHCGARGYLKSHRAQRRLREAYFVAIVTPATKQLRKMLAES

SEQ ID NO: 10999 - protein, 292 aa, BradyrhizobiumColbertium
MTDVLISASELADLLKLEPCVVIDTRNPDAYAAGHLPNAVNVHDIFTYLATSTPEGISELKTKFADAFGAAGLSGKETAVGYEQSMNSGFGQSCRGYYLLTMLGYPKVKVLHGGFDAWAAAGLPVTKDVPTPVKASFPIVPEAGEILIDAKTMLAAVGKPGVAILDVRDVDEWIGDSSSPYGKDFCPRKGRIPGAVWLEWYRMMKPTAEGPRFKSKDEILAECATVGITPSTPVYLYCFKGARASNTFLALKNAGVKDVRMYFGSWNEWSRDPSLPIEQGLPVAAQVTGKAA

SEQ ID NO: 11000 - protein, 467 aa, BradyrhizobiumColbertium
MTKGRNSMSTFDDPFDSDRNLQAGCVCGQHRSALEHEQAASALRCEPIESEDKRYEGVVASAVMRAMFPQDVARRAFLKSAGASTALAALSQFFPLKTATEVFAATGTPEKKDLKVGFIPITCATPIIMAAPLGFYAKHGLNVEVVKTAGWAVVRDKTINKEYDAAHMLAPMPIAISLGLGSNAIPFAVPAIENINGQGVTLAMKHKDKRDPKDWKGMKFAIPFDYSMHNYLLRYYLAEHGIDPDTDVQLRSVPPPEMVANLRADNIDGFLAPDNICQRAIYDGVGFMHILSKEIWDGHPCCSFAASREFITTAPNSFAALTRAIVDATAYASKAENRKQIAEAIAPANYINAPVTVLEQVLTGTYADGLGGVKTDAKRVDFDPFPWQSFAVWMLTQMKRWGQIKGEVDYKTIAEQVYLATDTKKLMTEMGLSPPASAYKSFAVMGKTFDPAKPEEYVASFKIRKGA

SEQ ID NO: 11001 - protein, 279 aa, BradyrhizobiumColbertium
MTSSLRLRAGLVSIVLLAAFLGIWHIATRSTGATTTMSPEYAKLMGLTATQGKSAMPGPLDVGAKLWEHLKRPFYDNGPNDKGLGIQLAYSIARVGTGYLLAVLVAIPLGFLIGMSPLLSKALDPFIQVLKPISPLAWMPLALYTIKDSSVSAIFVIFICSIWPMLLNTVFGVASVRKEWINVARTLEVGTIRRAFTVILPAAAPTILTGMRISIGIAWLVIVAAEMLVGGTGIGYFVWNEWNNLSITNVIIAILLIGVIGMLLDQILARFTRMVTFPE

SEQ ID NO: 11002 - protein, 307 aa, BradyrhizobiumColbertium
MSDKFISIEGIAKRYPGAGGATTTIFENLWLSMTRGEFACVIGHSGCGKTTVLNILARRIEAGEGAVIVDGQAISGTSLDRAVIFQSHALLPWRTVLGNVAYAVSSKWRNWDRAKVRAHAQTFIDLVGLSGSEHKRPSELSGGMKQRVGIARALSITPKMMLMDEPFSALDALTRGTLQDEVRRICLETGQTAFMITHDVDEAIYLADKIFLMTNGPGAVLAEVVENPLPRDRGRTDLHRHPLYYALRNHIIDFLVTRSKTFVAETPGHDPRNVPVVQIGKPGLSIAAGSDEPRQTWMSGTSPGLSA

SEQ ID NO: 11003 - protein, 162 aa, BradyrhizobiumColbertium
MKREDLTEKLLDIKREKGWSWKHICEKIGGYSEVLIVGAILGQMKLTKPQAANAGELFGLSKAEVAMLNEVPMRGTGTPMPPTDPLIYRFYEMVMVNGPAWKALIEEEFGDGIMSAIDFDMALERVANPKGDRVKITMSGKFLPYKYYGASGNVPEYGFKEG

SEQ ID NO: 11004 - protein, 50 aa, BradyrhizobiumColbertium
MLVMTASAMAQSLGQRAMVEQGGGALRQEGSVRVQTSINFFVAVPAGASE

SEQ ID NO: 11005 - protein, 51 aa, BradyrhizobiumColbertium
MAARECDLLREVIARDCRLESVNTSINRQLGPQQAEGFNINGSMAFQITLK

SEQ ID NO: 11006 - protein, 107 aa, BradyrhizobiumColbertium
MSEFDKRQEGFEKKFALDEEQKFKAEARRNRLLGLWAAEKLGITGDAATAYAKEVVAADFEEAGDADVLRKITADFAAKNVAVTEQAIRAKMSELLAVAAAEVKAGK

SEQ ID NO: 11007 - protein, 265 aa, BradyrhizobiumColbertium
MDFNKTRYIPMSRRRRIYEGKAKVLYEGPEPGTLIQHFKDDATAFNAKKHQVIEGKGVLNNRISEYLFQHLNDIGVPTHFIRRLNMREQLIREVEIVPLEVVVRNVAAGSLSQRLGIEEGTQLPRSIIEFYYKNDQLNDPMVSEEHITAFGWATPQEIDDIMALAIRVNDFLTGLFLGIGIRLVDFKMECGRLFENEMMRIIVADEISPDSCRLWDIKSNEKLDKDRFRRDLGGLLEAYTEVAKRLGILMENERPQGSGPVLVKS

SEQ ID NO: 11008 - protein, 79 aa, BradyrhizobiumColbertium
MKARVTVTLKTGILDPQGKAIEGALKSLGVDGVASVRQGKVFDIELAGADKAKAEAALKQAADKLLANTVIENYRVELL

SEQ ID NO: 11009 - protein, 233 aa, BradyrhizobiumColbertium
MKAAILVFPGINRERDMARALKLISGREPAMVWHAETALPAGTDLVVVPGGFSYGDYLRCGAIAARAPVMDAVRDYAAKGGLVLGVCNGFQILCESGLLPGVLMRNAGLKFICRDVHLRVERSDSPFTRGYNAGQVIRVPVAHGEGNYEADEETINRLEGEGRVLYRYCSAAGEVDDFNNINGAAHSIAGIVNDRGNVLGMMPHPENHVEDIMGCTDGRGLFAGLVQHLEKAA

SEQ ID NO: 11010 - protein, 319 aa, BradyrhizobiumColbertium
MPQSTSEAGRATGSASTPLPSVPGVRSWRDYALLLALACCWSSTYPLTKLALDTIPPITFISARSLIAAAFLFAILWMRGVRIPIDAKAWKLFATQQLINSTFPFLIITWSQQYVPASNTVVLASTTPIFAFLITSLITRHEPATLLKLAGAVLGLAGTTLIVGLDALHGLGSEIIAEIAILLATISFACATIFGLRLSDYDPMVVAAGSLLFGGMILLPPSLLIDQPWTLQPTPTAIVATIVMGIVSSALGLLLFYICLGRLGTLTTNAQGYLRIPIGVGLSVLLLGESVPSNLALGLLLVMAGVAAMTVPAERWKRR

SEQ ID NO: 11011 - protein, 159 aa, BradyrhizobiumColbertium
MHELTKSSPLRRPDLHVATEGEFEGWRTWIRDSFESHVGPFWHRIEADGSVRCAFRVEKKHLNGSGNVHGGCFMAFADYCLFAIATHELDGPAVTTNFACDFLDAAREGELVECVGEVSRAGGSLIFLRGRLTSGGRPLFTFSGTIKRVKRKPAPQPNA

SEQ ID NO: 11012 - protein, 200 aa, BradyrhizobiumColbertium
MKNEPKITPELVAAHGLKPDEYERILKLIGREPTFTELGIFSAMWNEHCSYKSSRIHLRGLPTKASWVIQGPGENAGVIDIGDGQAVVFKMESHNHPSYIEPYQGATTGVGGILRDVFTMGARPIACLNALSFGAPEHPKTRHLVSGVVAGVGGYGNSFGVPTVGGQVRSTPATTATSSSMRWRSVSPIPTRSSMRLPPA

SEQ ID NO: 11013 - protein, 536 aa, BradyrhizobiumColbertium
MNMPIVYLGSKTGRDGIHGASMASAEFDDNSEEKRPTVQVGDPFAEKLLLEACLEIMEKGCVIAIQDMGAAGLTCSAVEMGAKGDLGVDLDLDAVPTRETGMSAYEMMLSESQERMLMVLKPEKEKEAEAIFKKWGLDFAVVGYTTPSKRFVVKHGGDVMADLPIKELGDEAPVYDRPQVPSAALPVVHAREVPAPMGLGPALEKLIGTPDMCSKRWVWEQYDHVILGNTMQRPGGDAAVVRVQDGPKGLALTVDVTPRYCEADPFEGGKQAVAEAWRNITAVGGRPLAITDNLNFGNPERPEIMGQFVGCLKGISEACRTLDFPVVSGNVSLYNETNGRAILPTPSIGGVGLLDDFTKSASLAFKAEGEAILLIGETHGWLGQSVYLRDICGREEGAPPPVDLAAEKRNGDCVRGMIHAGTATAVHDLSDGGLLIALAEMAMASGIGAKLLAAPSALVPQAYWFGEDQARYLVTVPETEAGRVLAKMRGCEVPCVRIGTTGGDAIAIAGEAPVSIESLRTSHERWLPEYMGGKAA

SEQ ID NO: 11014 - protein, 396 aa, BradyrhizobiumColbertium
MITVSHSATMTAEAHAAPSIKARNLSLDRARTFLTLVVLLHHAVIPYTYFGHTDPKFFFGFDMIVLATDSFFMAMFFFLSGLFAWSSIARKGARSYLADRLLRLGLPFVICALTIIPLAYYAISLRHNPEIGFSQYWWDMVTKGPWPSGPIWFLWVLLGFDAVACILHRLSPNLLDPINRLSLHGRRRPAAFFAVMLAVTAAFYVPGLMYFGPSNWFELGPFSVQHGRVMLYASYFFFGAGIGVANMDRGLLAADGRMAKVSWDWMVLAIVPYCLLWVLIFIKREILGNPWPLPNWYEGLYAVCFAIFSVAIMFLILAFFQRFRQSGSAKLLDPMQADAYGMFLVHYPIALWLQYWLFDYDLPAIVKATIGFVLTVAFSWGLTRALRQIPGATKVL

SEQ ID NO: 11015 - protein, 57 aa, BradyrhizobiumColbertium
MTILKWALIFLLVSIVAGVLGFTGISAASADIARFLFYVFVAIFLVLLVLGLTIFRA

SEQ ID NO: 11016 - protein, 99 aa, BradyrhizobiumColbertium
MTAGDIVIAETSKALTLREAKYPAVQYVPREDTNMALLERTDRITHCPYKGDASYYSVTAGDKTLDNAIWTYETPFPAMAEITGHLAFYPDKVKIEEVG

SEQ ID NO: 11017 - protein, 44 aa, BradyrhizobiumColbertium
MMVMGWSGPGSFMISRLFDQSAARGTLSCLYPDGITDIVPEGVT

SEQ ID NO: 11018 - protein, 84 aa, BradyrhizobiumColbertium
MPMDAHDIEAMIKAAIPDAEVTIRDLAGDGDHYAATVISESFRGKSRVQQHQIVYQSLRGQMGGVLHALALQTGVPGGPGVSGT

SEQ ID NO: 11019 - protein, 397 aa, BradyrhizobiumColbertium
MAADNPRGAMFRVIVPSQHSRVAFVELFFDLVFVFAVTQISHTLLHHFTPLGAAHVVVLFLAVWWVWVFTAWVTNWLNPELTPVRLLLFLMMLGGLVLSTTIPTAFEGRGLWFAIAYAAMQVGRTAFWLFATPRHRTAVRHNAIRILTWLSISAVLWIAGGLSEGETRLWLWIAAVSWEYIAPAARFWVPKLGFSSVEAWAVEGGHMAERCGLFVIIALGEAIVVNGATFSELTWNADNILAFVSALVGAIAMWWIYFHKGAEAGSERISKSAESGRLARLAYTYLHTPIVAGIILTAVSDELVLKHPTGHSDIRTIASTIGGPLVFLVGTILFKLAIRGFLQLSHGVGIILLLALSWFAADLSPLWLSVATTMILIAVAVWESISLGSAMEEAEGS

SEQ ID NO: 11020 - protein, 323 aa, BradyrhizobiumColbertium
MNVHASALAEAHLPDEQTTAFAREAIADLSQQPKRLSPKFFYDATGSELFEAITRLPEYYPTRTELAILRERGGDIAKIIPEHAALVEFGAGATTKVRLLLDHCKFAAYVPVDISGDFLKAQASGLKRDFPALGIYPVAADFTTPFELPTQVASMPKVGFFPGSTIGNFEPDEAQSFLKSARKILGKGAQMIIGADLEKDERILFDAYNDAAGVTARFNLNVLVRINRELGGNFDLSAFTHRAIYNRERHRIEMHLISKKSQTVRLLGTSFSFRPGESIHTENSYKYSIDRFAALAQGAGWRVRESWTDAAKMFSVHALEAAD

SEQ ID NO: 11021 - protein, 49 aa, BradyrhizobiumColbertium
MHIHDTLLNALSGAHLSSDESEPRRRSDSDLLFEHDLFGTRFSGIMLYS

SEQ ID NO: 11022 - protein, 415 aa, BradyrhizobiumColbertium
MTKQASATAATQLSSPSSRPDDLAKRLEEAFLAVRNETERRAGPLSPEDQQIQSMPDASPTKWHRAHTTWFWEQFLLGKHAAGYRPFHPDFAFLFNSYYVSAGPRHARNRRGDITRPSAEEIGAYRKYVDAAVVEFFREAGEDKLGMIAPLVEVGLNHEQQHQELMLTDILHAFAQNPVYPAYEPDWCFPGAPRGGDDWLQLNEGIHTVGHVDDSFHFDNEKPAHRALVGPVKIARHLVSNAEWLNFMQDGGYRTATLWLMDGFAAASKEDWQAPGYWREVDGQWQVMTLAGLKPVDPNAPVCHISYYEADAFARWSGKHLPTEMEWEVAARTKQLDDAFGLVWQWTRSSYSPYPGYRAVEGALGEYNGKFMVNQLVLRGSSLATPQGHSRVSYRNFFYPHHRWQFTGLRLADYE

SEQ ID NO: 11023 - protein, 110 aa, BradyrhizobiumColbertium
MDMSIAEFIANEVKSNDVVLFMKGTPQFPQCGFSGQVVQILDHIGVGYKGLNVLESAELRNGIKEYSNWPTIPQLYVKGEFIGGCDIVREMFQAGELQQLLTEKGVVVAA

SEQ ID NO: 11024 - protein, 181 aa, BradyrhizobiumColbertium
MTRLARRIAGAELEVIVSDITTLSIDAIVNAANTSLLGGGGVDGAIHRAAGPELVAECRMLHGCRTGDAKITRGYRLKAAHVIHTVGPVWNGGTLGEDDLLASCYRRSMELCGKHQLTSVAFPAISTGIFRFPADRAAEIAVRTTVEALAAAPSVARVVFCCFAEPGAKLHAEAVARHSRP

SEQ ID NO: 11025 - protein, 355 aa, BradyrhizobiumColbertium
MLYTPPPIDPKAPPVRINLLSDTQTKPTAGMREAMARAEVGDEQVGDDPTVNALCERVADLLGKEAAVYMPSGTMCNVTATLVHCRPGDEILAHETAHIIAREGGAHAAIGGFQVTQLKGPDGQFTPETLRKALHPRTRYQPPQTVVSVEQTANIGGGTIWKKAALDEIVAIAKQHGLVTHMDGARLLNATVASGISPRDMTAGWDSAWIDFSKGLGAPIGGVLAGSRAFIDAVWQWKQRLGGSMRQAGICAAACIYALDHHVERLADDHANARALARGLSQISGIEVQEPETNLVFFKPDGAGIPGDKMVAALRQRGVTLAMMDGRIRACTHLDVNASQIEETIGYVREIVRGA

SEQ ID NO: 11026 - protein, 75 aa, BradyrhizobiumColbertium
MKRLLEEGFSKISGLPESEQDDLARTLLELAGIDQPPIQLTAAEEADLCEAEAEIARGELASADEVRAIWANHGL

SEQ ID NO: 11027 - protein, 205 aa, BradyrhizobiumColbertium
MTKRSEAKYKIDRRMGQNIWGRPKSPVNRREYGPGQHGQRRKGKLSDFGVQLRAKQKLKGYYANISERQFHGIYVEASRLKGDTGENLIGLLERRLDAVVYRAKFVSTIFAARQFINHGHIKVNGRKVNISSYQLKVGDVVEVKESSKQLAHVLEASQLPERDVPDYLEVDHGKMTAKYTRVPNLSDVPFPVQMEPHLVVEFYSR

SEQ ID NO: 11028 - protein, 255 aa, BradyrhizobiumColbertium
MRGTPKSISLRRRLICDLMHASMGVPFVSLSRSLNIRPLLEARACATAPAGWAAMFVKAFALVARDEPILRTVYVKWPWPALYELPKSVATVAIARVDEGEECVLPQRIAAPEALSLAAIDAEIRLGKTAPVGDVPMFRKIMRATRLPLPLRRLSWAIGLNFGRQRGNWFGSFGVSSVAAYGGGELHPITPGPFVVSYGLVEPDQTIRVVIRWDHRVTDAAPIARVLTRLEQVLNTEIAAELGAAVPKPVRAVRG

SEQ ID NO: 11029 - protein, 257 aa, BradyrhizobiumColbertium
MSVPAKPLNRLRQLWSEGRPAFGAIATIPSVQLVQIMARSLDWIIVDLEHGPIGLTEAHAMIAATTGTPCTPLVRIAANEPWLAKAPMDIGAFGINFPMITTPAEAEKAVRSVRYPPGGDRLWGPFHAPFRWGQSMPDYMASADDEMICMITIEHVDAVNRIDEIMATPGIDVAVIGPGDLATSINKRGRMDDPELLELVARAEAGILRSGVPIGGVARSADQANALIDRGYRAIALGFDWSLFQRGIMAAFDGIKR

SEQ ID NO: 11030 - protein, 265 aa, BradyrhizobiumColbertium
MTNSPTILVFDSGLGGLTVLREVVTARPDARFVYVADDAFFPYGHHSEDEIIGRVVPLMGELIGTHDPDLVVIACNTASTLVLSHLRAAYSVPFVGTVPAIKPACAQSRTRRVSVLGTKGTVKREYTKALIRDFAQGCEVTLVGSPELASLAEAALGGKPVSDGDILAELAPCFVGDAADASARTDTVVLACTHYPLLLDRLKRLAPWPVDWIDPAPAIARRVSDLLGPPSGGAAQSGAEMIFTSNRVHGLSATLTPFFGGRAVA

SEQ ID NO: 11031 - protein, 268 aa, BradyrhizobiumColbertium
MPSGSADVSSILDRILDAATDNLRIAKILVQMGLDPNDVTYDAIFNRLLEIFVQNITLANLFAAVGAGFFVATLLMRTMVPLRVANMIGCAFFTVFGALSANVATFLLYLLLLPINALRLRQMLKLVKKARHATEGDMSIEWLKPFMTERKYRRGDILFKLRDPAKEMFLTVTGKFLVKEINVEILPGSLMGELGFLTPDNRRTGTVECIEDGQVLTITYDRLLEIYFQDPQFGYYFLVLTSQRLLQNIDRLQKQLAAERAASTNRIA

SEQ ID NO: 11032 - protein, 360 aa, BradyrhizobiumColbertium
MTTPPRNRITRLIAAFAAVFAIALPSATLGADAQFDKMRAKIAAFVAEKMEKLGGSRIIYKVDTDGLREAIVTDLRDDVYRTLREGRIAFPGLAIRNGGVEVKIADPRGREQLTRKLASAAEGLPAYALTVTDGGDGLVRLAPTPAASAARLREFVEDSVAMIEQRLKDAGVKLANVEPDGTDRIRIFLPGVMEPDRVTAIFAKKVKVGFRLIDLSMSAEQAQSGTPPAGTEVLLGFKDKLPYLVAKDSTLEGEDISYAGPGFTSDTKEPIASFRFNGRGTRRFAHMTAENLGKPFAIVLDDKVISAPVIREPITGGSGQIAGNFTLDEANSIAMLLRAGSLPGRLGLVEQQVVQPAAKP

SEQ ID NO: 11033 - protein, 634 aa, BradyrhizobiumColbertium
MGIHALDRLIGNDYPDLSTDAEVRAFEQVPYADRVAAESTYDAIRLGAARNPDGAAIQFLQNADPADTPLVVTYGDFIARVTQAANMFHALGAEKDDVISFMLPLVPDAFVTLFGAEAAGIANPVNPLLEPHQIAEILEAANTKILVALGPMPGTDIWQKVEQIRPQLKHLKAIVQVFGGGDPAKGIFAFGDLIKQQPADRLVSGRQIRGSDIAAYFHTGGTTGTPKLVRHTHANQVYQAWALNLLLKARPGANLLFGMPLFHVGGSLTQVLLTLSSGGSLVVLSPSGWRNPNAVKNIWQLVARYRPEALSSVPTVLAATLAVPPGDAVISSLKYAAGGGSAIPVAVGSAIQEKLKLPVIEVYGMTETSSVHTLAYPSRPIRLGSVGLPMPYARVRIVQLDAEGRLIRDCKPDEIGVVIMAGPGVFSGYLNDEHNKGAFVDGVWVNSGDLGRLDADGYLWITGRAKDLVIRGGHNIDPAPIEEIMFRHPAVGFAAVVGQPDAYAGELPVGYVQLKPGAKVEPGELESWVRERTPERAAVPVQVIPIDPMPVTGVGKVFKPQLRWDAAERVFTKVLAPLVERGIDCKVKVGAHGSHGSIATVTLTGLPPDQQEAVAGEVHALLAPFVMRHEVVQA

SEQ ID NO: 11034 - protein, 728 aa, BradyrhizobiumColbertium
MAGLVLLLSAAIGLQIGTGGLAAYVALLCAGLVWLVASADRPTSTTVLNRAIESVPAGLCVFAPDLRVIASNQRYASIYGLTRADIKPGTRLRQIIEARKAKRGISERVIDAFDGFDGMATSVHELRDGRFISVSRHPMTGGGLIEVHRDVTSERLAEMRANETMQELIEKQYAIDQAVIVAITDVKGIINYVNDNFCTISGYSREELIGQNHRILKSGVHSKQLFRDMYRSLAGGHVWRGELCNRAKSGKLYWVDTVITPQLGPDGKPVAYMAIRVDITARKEAEAKLSFAAAHDSLTGLLNRCALFDQAGIGSEPDVQPDRLSVHLIDLDGFKRINDTFGHDVGDRLLEAVASRLRSLATDRDLVARLGGDEFAMIRRVGDGAAGAAVDLGRRIVDAMAAPFDIEGHQIDISASVGIVLCPEHGSNSADLLKKADLALYDVKAAGRRGHRLYQPAMLEAIKGEKVLEAELRRAISAQEFELHYQPILDVESRTVHTAEALVRWRHPVDGLVAPDRFIALAERTGLIQPLSEWIIQRACLDAASWPPHVQLAVNVSATQFKRGNLFDVVLQALLRSGLNPRRLQIEVTETVLLEQQSEQLQTFRRLKSIGATLVLDDFGTGFSSASYLTNFPFDKIKIDKSFIQGLPRRDCAAVIASAVVLAKGLGISVTAEGIETEPQLDHVRSMGIDFAQGYLFGRPVPYRQLKCATVFPDGPGRVLQTATAGAN

SEQ ID NO: 11035 - protein, 189 aa, BradyrhizobiumColbertium
MLTANQASPDIYVFCAGWGFRFLQMPNGRRQILGFLLPGDVLAGSLLHERLHFSVKALTAIQVSTMKRTEVHARIATNVRILWAAAECCANEAKAADDTIAALGQFSAEERIAHLFLQLMKRIASRNVIRDERYRIPLRQQHVADAVGLTPVHVSRVLTAFRERRVADLSNGVLEVFNLRELQRLGALN

SEQ ID NO: 11036 - protein, 451 aa, BradyrhizobiumColbertium
MTLAQTPNDENQDRDGRMRFMRVGTETGELLCEFWSVAEPALPAILDEFYRHVLSEPQLAALIGDDMRRLKTAQSSHWARLFNGRFDHDYMRGVRMIGLMHNKIGLEPRWYIGGYNFVLCRLLALAVRKYRWMPTRLASVLTALNTAVMLDIDIAISAYQEAMFAEKQKQQEAIAAAILDFDGRMKVVLERLGSSATGLQGVADVLSASAERSTRQSSVVAAGSEEASTNVQAVAASTEELASSIKEIGRQVSESTRMTGEAVDQAARSGAAIESLARAAQRIGDVVELINTIAAQTNLLALNATIEAARAGEAGRGFAVVASEVKALAEQTARATGEIGQQVLSIQEATTESVGIIRQIGETIAAVDEVATAIAAAVEQQGVATAEIAGNVQEAAQGTHDVSSNIGGVSQAARETGITASELLAASKELSGQTDVLRSEVEGFFAAIRAA

SEQ ID NO: 11037 - protein, 390 aa, BradyrhizobiumColbertium
MPIVNRVAALSDEMAAWRHDFHENPELLYEVHRTAGIVADKLREFGCDEVVTGVGRTGVVGVIRGRKSASGKTIGLRADMDALPIMETSGVPYASKVPGKMHACGHDGHTAMLLGAAKYLTETRNFDGTAIMIFQPAEEGGGGGKAMVEDGLMTRWNIQEVYGMHNMPGLPEGHFATTPGAMLASSDNIQITVHGKGGHAGAGPHKSVDSVLIGSQIVNALQSIVARNVDPLKSAVISITQFHSGTAFNIIPEIAELGGTVRTLDPEVRDLVERRIGEVADSVARAYGGSAETKYTRMYPVTMNHAREAGLAADVARDIVGADRVNDKFIPMMGAEDFSFMLEARPGAMVLVGMGDGNECHHPGYVFNDNILGHGASFWARLVETRMPAG

SEQ ID NO: 11038 - protein, 435 aa, BradyrhizobiumColbertium
MIPRYTRPEMASIWEPQTRFKIWFEIEAHAADALAELGTIPKEAARTVWAKAKDAVFDVARIDEIERETKHDVIAFLTHLAEIVGPEARFVHQGMTSSDVLDTCLNVQLTRAADLLLADLDKVLAALKKRAFEHKMTPTIGRSHGIHAEPVTFGLKLAYAYAEFTRAKERLIAARKEVATCAISGAVGTFAQIDPRVEEHVAKAMGLVPEPISTQVIPRDRHAMYFSTLGVIASSIERIAVEIRHMQRTEVLEAEEFFSEGQKGSSAMPHKRNPVLSENLTGLSRMVRAYVTPALENVVLWHERDISHSSAERMMGPDATVTLDFALVRLAGLIDKLLVYPANMQKNLDRLGGLVHSQRVRRALTQKGASREDAYKLVQRNAMPVWRGEGDFLQLLKKDTEVRKYLSDAEIEEQFDLGYHLKHVDTIFRRVFGES

SEQ ID NO: 11039 - protein, 41 aa, BradyrhizobiumColbertium
MDEWRLKTMTTEILNLTGVIGQWLNLLVARQIAAQAAKLPH

SEQ ID NO: 11040 - protein, 195 aa, BradyrhizobiumColbertium
MNEAVVLTPERILEVTEDVLRRYGLAKATVVDVARALDVSHGSVYRHFPSKASLREAVAKRWLDRIDAPLREIAGEQGPAPARLERWLRTLFAAKRSRVLDDPEMFDTYLTLAREACAAVKCHKDTMIDQIAAILIDGEKQGEFAVGDVKETARAIFDATVRFHHPAHADEWKDADLSARVDATLTLLLRGLKAG

SEQ ID NO: 11041 - protein, 63 aa, BradyrhizobiumColbertium
MLDQELTFHRLRKRSKDAVEIAVNAYPESPPVVPSAEPAFRTRRGSTISPPAHNGGVLHKARG

SEQ ID NO: 11042 - protein, 218 aa, BradyrhizobiumColbertium
MSEVAATGISVLLVDDHPIVRQGYRRVLESQGDLHVVAEADNAADAYGAFKAHDPDVVVLDISMPGASGLEAIRNIRARSPRARILVFTMHNEAVLVKAAFNAGASGFVTKSSEPSAVVTAIRNVARGERAMSDDIAHILAEDSLSAGSALDQLGEREIEILRQFAGGATTEQIAAHLNLSIKTVQNYHYLIKTKTGARTDAQLVRLAAACGLTRIWR

SEQ ID NO: 11043 - protein, 456 aa, BradyrhizobiumColbertium
MRLVLQLVARLLLIVVLCLGAATVWATFDAYRSVDRATAASAQRVAQALQALYWRELLLRSSRAREHLLPVPDWRTLETMKLISPGVCVEFQPAAAFEKPLCGQSEGLGKAPPHWFVAVVPTYLGSHAEVIRPISPRAAAAGTVVATPDATAAVSLAWEYIHNVIDVALLMAAAIALLASIAIARALAPARAIVTALQRMARGQYRTKLPRFRSMELAMIGSAVGELGGRLEEATEQRAALTRRLIEIRDDERRALARELHDEFGQNLSAILAFANTIETASTKDKNGTAIAQDARMISQATHHLMASLRDALGRLRNPLPEELGLEASLVNLVDSWRSHSAARPTIQLDLRGDLTDISGPAATTAYRVAQECLTNALRHGAAREISLRIERRAGQHDALLIRVEDDGGGDATRVAQSAGFGLTGIRERVTAAGGSLSILPARRGLSVAATIPLAA

SEQ ID NO: 11044 - protein, 256 aa, BradyrhizobiumColbertium
MSSMTIGSIAGTTTDPSERSALLFWMIFTGLSIFAVVLLWRFGLIHLMLTSDRTYISAVIAALYVITCGHCFLRTRAIAREGAAARRCRAVLAAPDGSKALDASAAVLPRGLVRDHIQSLVTKAAAQDYRPVDQTLLLRNLADRLRGSNGFGAFVSDTLMKLGLLGTIIGFIIMLAPIAGLDAADKVAMRSSMGGMSDGMAVAMYTTLAGLVGSILIRIQYYMLDAATQRVFSDAVVLTETYVTPVLERKGSGAPS

SEQ ID NO: 11045 - protein, 223 aa, BradyrhizobiumColbertium
MMDDFGLYPREEPFDPLGVMLFKALQVIAFLFFLALLAVSPDAKEGKIDSKAEFIITMDWPDNHPDDLDLFVQDPAGNIAWYRHREAGFLTLDRDDRGGANDFIIVNGKKIASPIREEIVTVRGIVAGEYTVNISHFQATTGEPVTASVKVQKLNPTAQVIFDNKLALSHTGDEKTAVRFRLDAEGKVINVDQRPKSLLETFRNVRANGADIDPKTGVRMRRE

SEQ ID NO: 11046 - protein, 201 aa, BradyrhizobiumColbertium
MSNLQTVVLSLSVAYAVIGALLLVVLVYARLHWSLKAVAVVVTSAFYVVSFTEMRGLLGWASSDRMPTAFKLLQARIVEPHSLEGDPGSIYLWVEALDDDNRPSGIPRAFRVPYDDRLAEKTHAAQNEIAAGHPQGGRAADFGGGDGSLIDMVREYVTPKTILETSGGDSSTGEFNAPPAGAQGAVFTPLPPPRMPPKDER

SEQ ID NO: 11047 - protein, 246 aa, BradyrhizobiumColbertium
MLLAVFSDIHANRQAFEACLKAARAKGAEQLVLLGDFVGYGADPEWVVDTTIELVAEGAVAVRGNHDQAVNSTAETMNAEAQIAIEWTRGRLDTAQRRFLAELPMMVEDEGLLFVHSEASHPQRWHYVRSTTDAAKSLIATSAHVTFCGHIHRPALYSMSVTAKMTSFVPKTDVPVQLLRGRQWLAVLGSVGQPRDGDPSAAFALFDTVSCQITYCRAPYDVAAAAGRIRDNGLPSWLADRLSQGR

SEQ ID NO: 11048 - protein, 479 aa, BradyrhizobiumColbertium
MPKPLVRSGAEIDGYTIGECVHAGGMATLWTVTHPGIDVPLLMKIPRVSEGEDPAAIVSFEMEMMILPRLAGPHVPACFGTGDFARQAYVVIERIPGATLYKRLPDLPLPYDEARQLVARIATALADLHRQNVIHHDIKPSSIMFRESGEAVLIDYGLSHHNHLPDLLQEEFRLPYGTAPYMAPERLLGVRDDPRSDLFSLGVLLYFFTTGVRPFGEGETLRAMRRRLWRDPHPPRKVRPDYPPWLQEVVLRCLEIEPVWRYPTASQLAFDLAHPDQVKLTARSERVKRDPLSVVWRRRFNQGAMAPRAKSDVAAQIASSPILAVALDAMEGAPELNEALRVTTERILATLPSARLACVNVLKLSRIAIDRSLDEEGSNKHIDRLVALRHWATPLKLDESRLSAHVLEAVDPAAAILEFAKANQVDHVIIGARQHSFRRMLLGSVSAKVAAEATCTVTVVRPPRLAGDVGGTDANEATG

SEQ ID NO: 11049 - protein, 199 aa, BradyrhizobiumColbertium
MDELRATLFSAGLRRLLAEALQDGEQVVWQGQPDGIARAAMWRFLWWIGCPWLLLTVIAVGNGWIDQATQPLAMIGVGMVAAPFVMLLQDLQTLYVITDRRALIVRTAWSRRTVTPTSFDAMDAVFEILDIGSGVGHLNFASGRSTRSPDTDYTGHYGFRFVRDAPRIRDILDDARTGKIRRPHLERTAGSTGVATRKA

SEQ ID NO: 11050 - protein, 233 aa, BradyrhizobiumColbertium
MTQAFAPRPLAIAPSILASDFSRLGEEVRAVDAAGADWIHLDVMDGHFVPNISYGPDVIKAMRPHTKKIFDAHLMISPCDPYLEAFAKAGCDHITVHAEAGPHLHRSLQAIRALGKKAGVSLNPATPISALEYVLDLVDLVLVMSVNPGFGGQAFIPSAIGKIRDIRAMTAGRPIDIEVDGGVGPDVAGALAAAGANAFVAGTSVFRGGTQDAYKANIAAIRHAALGARGEAI

SEQ ID NO: 11051 - protein, 41 aa, BradyrhizobiumColbertium
MGLRGRQCRGAALPVGGNFCRDRHQLPMFPKLQSVVDCGFH

SEQ ID NO: 11052 - protein, 262 aa, BradyrhizobiumColbertium
MLFALGAVSIALNAIQSLTNSKSSSAADKAGSAQGATNPFAIDGASSTSGGASSPVNSGRHPQISPETMNALFAAQSQSADGSASSNSTSPTSKGREAALKDLFSQIDADGDGKITKSEFEDALGAGGTNLAQADHVFAKMDANSDDSINLGEMTKALTSGRQGHQAQGADGSADASGGGSESSSKASRGSTSTTTTNADGSTTTTVTYADGFKMSTTVPGAHRGPMANGGGNSPYDWFGQMMQRQAQSGSATASSSMSISV

SEQ ID NO: 11053 - protein, 74 aa, BradyrhizobiumColbertium
MPSSVIRFFRYAPDTRELQVTFVTGRVYVYEDVPPEVAAAFREARSKGTFFNLHIRDRFAYREITHDYADQTES

SEQ ID NO: 11054 - protein, 352 aa, BradyrhizobiumColbertium
MSLRHRCAIADRKLLSVHEAVLKNLLTDIAGVRVGHAEDAKVASGATAVIFDSPAIAAIDVRGGGPGTREDALLDLANTVERVDAIALSGGSAFGLDAGGGVQAWLAEQGRGFRIREAVIPVVPGAIVFDLLNGGDKAWGRFSPYRDLGYAAAAAAGTDFALGSVGAGLGATTATFKGGIGSASAVTTNGLKVAAIMVVNAVGSVTIGNGPWFWAAPFEENGEFGGRGLPSAFTPDMLAMRIKGGPAASERENTTIGVVVTDAILSKAQAKRLAMIAQTGFARAIYPVHAPLDGDVLFAAATCEKPIEPLVELTELGMVAANVVARAIASGVYNATALPFPGALPAWKDRYD

SEQ ID NO: 11055 - protein, 148 aa, BradyrhizobiumColbertium
MKIYLPRSTGVQETEFEALQNAPIAGGDEKILIVEDDALVRQYVVTQVRSLGYTALEAANGAEALKIIDGDATIDLLFTDIIMPGNMNGRQLADEAARRRPNLKTLFTSGYTENAIVHHGRLDSGVLLLAKPYRKSELAKMLRTALAS

SEQ ID NO: 11056 - protein, 127 aa, BradyrhizobiumColbertium
MPRVLIIDDQKDVRAMIAIVLRVNHFEVVEAESGAAGLKAFAESACDAAIVDIFLGDASGADVIAALREHAPALPVVAVSGMTTLDFIDQSPSLANVVCLQKPFRPSDLLQALRNAQAATSALPAAV

SEQ ID NO: 11057 - protein, 372 aa, BradyrhizobiumColbertium
MKSLKLIGLAFGASLALSSAAFAQDVTVAVAGPMTGGESAFGRQMKNGAEMAVADINAAGGVNGKKLALSVEDDACDPKQARSIAEKIAGAKIPFVAGHYCSSSSIPASEAYADGNVLQITPASTNPLFTERKLWNVARVCGRDDQQGLIAAQYIAKNYKGKNIAILNDKTTYGKGLADETKKALNKAGVTEKMYESYNKGDKDFNAIVSRLKRDNIDLVYVGGYHQESGLILRQMRDQGLKTVLMAGDALADKEYASITGPAGEGTLFTFGPDPRNKPTAKKIVEAFKAKNIDPEGYTLYTYAAMQVWSQAAKKAGTTDAKKVMAAMKAGKWDTVIGPIEYDAKGDIKQIDYVVYKWDAKGGYAEISGNGT

SEQ ID NO: 11058 - protein, 245 aa, BradyrhizobiumColbertium
MTSVPLLAIRGLRAAYGKIEALKGVDFEINAGEIVALIGANGAGKSTLMMTIFGKPRARAGQILYEGRDITHVPTHEIAHLRIAQSPEGRRIFPRMSVAENLQMGADATDCTEAERETTLQRVFTLFPRLKERYAQRGGTLSGGEQQMLAIGRALMSRPRLLLLDEPSLGLAPLIARQIFDAIRTLNRQDGLTVLIVEQNANHALKLAHRGYVMVNGLITLAGTGTELLQRPEIRAAYLEGGRHG

SEQ ID NO: 11059 - protein, 277 aa, BradyrhizobiumColbertium
MSGDKILSVERLTMRFGGIVAVQDLSLSAERKKITALIGPNGAGKTTVFNCITGFYKPSAGAIRLTHDDGRVIALERLNDFRIAKQAKVARTFQNIRLFPGMTALENLMVAQHNALMRASGYTLLGLLGVPAYRDAEKRAIDLATDWLKRVNLLDRADDAAGNFAYGDQRRLEIARAMCTEPALLCLDEPAAGLNARESAALSELLLSIRDELGTSILLIEHDMSVVMEISDHVVVMDHGVKIAEGTPRDVRNDPKVIAAYLGADEDEAVAVMESPS

SEQ ID NO: 11060 - protein, 439 aa, BradyrhizobiumColbertium
MTIPSTNTAKPATGIPALLKTAFINALVALVLFSLMVGIRTEAGPDGQLTYWTRFGEVAALVAVVFGGSIVMELLRQWIGSTGAEKLVPPAVQSGISFIGRYLAPALLIFTLLVPVIFYDQRYILDLAILVLTYVMLGWGLNVVVGLAGLLDLGYVAFYAVGAYSYGLLATNFGWSFWICLPLAGILAAFWGVLLGFPVLRLRGDYLAIVTLAFGEIIRLVIINWQDLTGGPNGVSGIPRPSFFGIPLDNSDEGLAARLGIEYSATHRIVFLFYLILALALVTNWVTIRLRRLPVGRAWEALREDEVACRALGINTTTTKLTAFATGAMFGGFAGAFFATRQGFISPESFTFQESALVLAIVVLGGMGSQLGVALAALAMIGGFELFRGLESYRMLVFGMAMVLIMIWRPRGLVGHRAPTVYLTKAQAISSDLVKEGHG

SEQ ID NO: 11061 - protein, 305 aa, BradyrhizobiumColbertium
MDYFAQQLINGLVLGSIYGLIAIGYTMVYGIVGMINFAHGDVFMIGGFIALITFLILISLGLTAIPLILLVVLLVSMAITALYGWTIERIAYRPLRHSFRLAPMLSAIGMSFVLTNYSQVAQGARVKPIPPFITGGYTLHESQDGFVIQLSNIQIMVVITTIVLLAIFTWLVSRTRLGRDMRACEQDQTMAALLGVDVDRTISMTFVIGAALAAVAGLMYLLYYGLVDFFMGFVAGIKAFTAAVLGGIGSLPGAMLGGLAIGLIETFWSAYFSVEYKDVAAFSILIVVLIFMPTGLLGRPEVEKV

SEQ ID NO: 11062 - protein, 174 aa, BradyrhizobiumColbertium
MFRNWRIGSVNGALLAAYFIPVWSLVAFNIIVAPVHGLYERPSVAVALYLSDHLQMAGMDTVRAAWLLALGRVTVVAFFAIYLVLLCIPRIRRNGGSDEALGIALAIGSLISFASMVMASKVGEMAALRLHATELLLLLGAAIVVVIEKPAAASKTAEIAAPLGLEQAELLHNR

SEQ ID NO: 11063 - protein, 130 aa, BradyrhizobiumColbertium
MDDQKRRDAGMNVRRKVLGNAWVDKSIANRNAFNTDFQDLITRYAWGEIWTRPHFDERTRRVLVIGTMVALGQWDEFRLHVRAALAEGGFTPDDIKEILLQQAIYCGVPAANHAVKEASAIVQELGLLKT

SEQ ID NO: 11064 - protein, 260 aa, BradyrhizobiumColbertium
MPMIDADGCLLNVSVEGRDGGPTLMLSNSLGCTLQMWEPQMKALTQVFRVIRYDRRGHGKSNVPPGPYTMERFGRDVLAILDDLNIEKVHWCGLSMGGMVGQWLGANAPERMGKLVLANTSCYYPDPTNWHNRIKAVKEGGIAAVADAVIAGWLTQDFREREPEITAKMKSMLLASPVEGYLACCEALSTLDQRALLPKIKSPTLVIAGRHDAATPISAAELIRSNIPGASMTIIDAAHISNVEQPHAFTDAVVGFLTQR

SEQ ID NO: 11065 - protein, 451 aa, BradyrhizobiumColbertium
MSTSLSPLLAPMLSSAAMRAVCDDRSTLQNMLDFEAALARAEAATAVIPASAVGPIEAACNADCFDMAALADAATRSGNLAIPLVKMLTANVGRNDAEAARYVHWGATSQDVIDTATMLTLRAGIAALDADLSRAIKGFAALTRSHRNTPMVARTWLQHALPMPFGLKAAEYAASLARARCRLRRFSREGLALQFGGAAGTLAALGDKGLAVAERLAQELGLPLPEAPWHAHRDRIAEAASCLAILAGSCGKIARDVSLLMQTDVGEAFEPAGEGRGGSSTMPHKRNPVAAASALGAATMAPQLAATIFAAQVQDHERSAGPWHAEWPTLPQLMLVTSGALAAIVDIAEGLEVDAARMCSNLDATQGLIMAEAVTFALAETIGKSDAHHLIEAASKRAVAEKKHLREVLSADSQITTHLSPEKIASLFEPMAYQGASQALIDRLLDSLDLS

SEQ ID NO: 11066 - protein, 148 aa, BradyrhizobiumColbertium
MAMTMNGEVQLAAPREAVWAKLNDPEVLKACIPGCEELEKTDDGGFRATAKMKVGPVSARFKGKVTLSDLDPPNGYKISGEGEGGVAGFAKGGAVVKLAEKDGGTLLSYDVEAQIGGKLAQLGQRLINGTAKKLADEFFANFAKAVQG

SEQ ID NO: 11067 - protein, 161 aa, BradyrhizobiumColbertium
MAKISLIVNGNPVTANVDPRTLLVQFLRENLRLTGTHVGCDTSQCGACVVHLDGKAVKSCTTLAVMADGHEVKTIEGLAADGAPLHPMQEAFREHHGLQCGFCTPGMIMTAIDIVHRKGHELDDHTIREELEGNLCRCTGYQNIVASISAGAKAMAKSDLA

SEQ ID NO: 11068 - protein, 268 aa, BradyrhizobiumColbertium
MYEFKYHRPGTVRQAANLLVKNEDAKVIAGGHTLIPVMKQRLASPPHLVDLSHIEGLNAIEMKGRSLVIGATARHAEVANSAIVGEAIPALANLASQIGDPAVRHKGTIGGSLANNDPTADYPAAVLALGATIVTNKRRLKAEEFFQGLFTTALEADEIITKVMFPLPKKAAYIKFRNQASRYALVGVFVARRPSDVRVAVTGAGSEGVFRVTAFEEALKKRFASKALEGIAVPAEGLNSDIHGSAEYRAHLIGVLTRRAVDAANAKE

SEQ ID NO: 11069 - protein, 307 aa, BradyrhizobiumColbertium
MTSAANSSGALPASVDAMLELLTSRGYLAERSLATVTFLSLRMGRPLFLEGEAGVGKTEIAKVLSAALGRRLIRLQCYEGLDVSSAVYEWNSAAQMIAIRMAEAAGDTDRDQLSSDIFADRYLIKRPLLQAMEPDVAGPPVLLIDELDRADEAFEAYLLEILSDFQVTIPEFGTVKAPHPPIVIITSNRTREIHDALKRRCLYHWVDYPAAERELAIVKTRVPGISAKLSQQVVRFVQALRNQDFYKSPGVAETIDWATALSELDARSLTPQVVGDTLGALLKYQDDITRMQGDALQKVLKEATSEN

SEQ ID NO: 11070 - protein, 400 aa, BradyrhizobiumColbertium
MAINHLAPEQTEQFADNIVGFARALRAAGLPVGPGAVIDAMSALQAIDIGNRSDVFTTLEAIFVKRHEHALIFKQAFNLFFRASEEWKHMLDSVPLPDEAKKKPQAGSRRVQEAMSQPRMTETPQHQEQDLRLSVSDKEILQKKDFAQMSAAEIAEALRAVERMRLPQAELLTRRHRPDRRGLRLDLRRTLRASLRTGGDIIDIHRLGRIEKPAPIVALLDISGSMSEYTRLFLHFLHAITDARKRVSVFLFGTRLTNVSRALRQRDPDEALASCSASVEDWAGGTRISASLHNFNKLWARRVLSQGAIVLLISDGLEREADSKLAFEMDRLHRSCRRLIWLNPLLRFGGFEAKAQGIKMMLPHVDEFRPVHNLSSIQELITTLSQPLPPHHRSLIRSAA

SEQ ID NO: 11071 - protein, 107 aa, BradyrhizobiumColbertium
MLDRDEDILKAAEDWQKAGRGVALATVVETWGSAPRPAGSSLVINDEGTFLGSVSGGCVEGAVVTEAMDVIESGKPKMLEFGVADETAWNVGLSCGGTIRVFVEKVG

SEQ ID NO: 11072 - protein, 233 aa, BradyrhizobiumColbertium
MKLEILHELNAERAARRPVILVTDTDSGEQRLVKARDFAKDPLRAELEKQLRMGKSASVEAGGKKLFLNVYAPTAKLVIIGAVHISQALAPLARSLGYDVTVVDPRTAFASPERFPDIPLIAEWPDTALPPLNVDAYTAFVAVTHDPKIDDPALLHAFERNCFYIGALGSRKTHAKRADRLRAQGAKESDIARIHAPIGLAIGAVSPSEIAVSIMAEITAVLRLPPKEKEEAA

SEQ ID NO: 11073 - protein, 534 aa, BradyrhizobiumColbertium
MKFGPASPRDAIGGVTVHTLRQGPLVLKKGTTIGPAEAEALERASIKDIVVVRMEEGDVSEDIAAASIALAIGGEGIHVERAFTGRANLFAARPGVLVIDRAAVDRINNIDEAITFATLTPFKPVVEGEMVGTVKIIPFGVEGRLRDAAVQAAGKDVLKVAPYVIKRVGVVSTLLPGLSSKVIDKTLRVTAERLAPAGAGIIAERRVPHEEQALSAAIKELLGLGAELVIVFGASAIADRRDVIPAAVTGIGGEIEHFGMPVDPGNLLLIARAGEVPVLGAPGCARSPVENGFDWVLMRLLAGIKVTRSELMGMGVGGLLMEIVTRPQPRAKPETEGNSQVAAIVLAAGRSTRMGGPNKLLAELDGKKLVRLATEQALASKASEVIVVTGHQAELVEQALQGLKVKFVRNPEFAGGIASSVKAGMAAVPEACDGAVVCLGDMPLIDAGLIDRLIDSFAPDCGNLIVVPVSEGRRGNPVLWSRRFFKELMTLDGDVGARHLIAKHTEAVAEVPVDGESAFLDIDTPQALEAARRG

SEQ ID NO: 11074 - protein, 129 aa, BradyrhizobiumColbertium
MASNAVARRFAMFCVVLSVAVTGARYITEAHAAGAFAVGKCGAYGQAYDYDAEHEARAAAQKQCKGDCTTVTMKRACAAMSVDLTNPCGAYGYAVKPKISASLNAATRECYKYGGKECVIRAWACDAKG

SEQ ID NO: 11075 - protein, 136 aa, BradyrhizobiumColbertium
MQFDTKIAVVIRTDLQAWQKLNVASFLTSGIAAAFPECIGEAYEDASGTKYHALIGQPILIYGADGAALSRALDRALTRNVKPAVYTEDMFRTTHDAANREAVRAVARADLNLVGIAMRAERKVIDKIVDGLKFHS

SEQ ID NO: 11076 - protein, 341 aa, BradyrhizobiumColbertium
MPTMKAAVVRQFGKPLVIEDVPVPQPGPGEVLVKVKACGVCHTDLHAASGDWPVKPVPPFIPGHEAAGIVAAIGPGVKNLKVGDAVGVAWLHDACMSCEYCETGWETLCEHQHNTGYSVNGGFAEYVIASAAFAAKLPATVDFAAIAPILCAGVTTYKGLKETEAKPGEWVVISGVGGLGHVAVQYAKAMGLKVAAVDIAEDKLDLARETGADLAVNALAADAVDKVLEATGGGAHGVLVTAVSTPAFAQALKMVRRKGTVSLVGLPPGEFPTPIFDVVLKRITVRGSIVGTRRDLDEAIAFAADGKVKAEVAKVPLAQINEVFDRMKAGKIDGRMVLDFA

SEQ ID NO: 11077 - protein, 426 aa, BradyrhizobiumColbertium
MARTTKIVFLGASSASFGMSMFRDLFSTRDLAGSTLVLVGRNVDRLGRSTRLAKLLNEKSGAGYVVEATTDWRAALDGAEFVVHSTAIDRNRLWRLDFEIPRRFGIRHTLGENGGPGGLFFTLRTLPAVFDFVREMELRCPRATFINFSNPESRIILALGRYSGIRSVGLCHGIFLARDNVARILGMPESRVDVWGAGLNHFQCLTEIRDRETGADLYPLLREKERDFDPAFSPLTRKLLHAFGYWLGCGDSHVGEYLSFGWEAGEGGYNFDWDESERAKLTRLIDDVLAGRAEMPDWWSMPSGERAIGIIAAIVHNRKQLVESAVVHNRQVIPNLPADAAVEVPVEVDAAGIHPVSLGALPDAVAKLMTIQVQVQQMAVEAAMHASKEMALQALLLDPVVHSEKAARGLLEELWEINRPYIRPCI

SEQ ID NO: 11078 - protein, 137 aa, BradyrhizobiumColbertium
MEKSYTGGCACGAIRYSILGEPLFSNHCQCRDCQRESGSGHGSYATFARAGVTVTGEATHWDMVADSGNVKTRGFCAKCGVPVYMTFAAQPDVFTIRAASLDEPARYKPQAVTFAARGHDWDRLGPGLVKFEGMPPA

SEQ ID NO: 11079 - protein, 153 aa, BradyrhizobiumColbertium
MSTAALKAETKDIVIDDVFPHTAETIWRALTSAQLIARWLMQPTGFEAVEGNSFTFQTTPGGNWDGVIHCRVLEVVPNRRLVYSWKGGDERNTGYGAPLDTVVTWSLSPVEAGTRIRLVHAGFVLPRNESAYTVMSGGWKKVVRKLDEISGEE

SEQ ID NO: 11080 - protein, 111 aa, BradyrhizobiumColbertium
MIEAAQNPVTTVMRALADPTRRAVFERVFASKEISVAELTRGSGVTQGAISQHLKSLKQAGLVTERAEGRNVYYRAAPQGLEPLVNWMDHYGVFWRERFQNLRDFLKEIDP

SEQ ID NO: 11081 - protein, 182 aa, BradyrhizobiumColbertium
MDEFIARGFAATRLDDIAKRAGVAKGTIYLHFKDKESMFEELVRTVIVPVVTRLTTLPPPAGTVREVIETFAGNFLKEVIGTRRGDLVRLIVAEGPRFPSVADFYYREVVSRGIAAMRALIELGIARGEIRQKDLARYPQILVAPAMIAVIWQSLFARHAPLDAQEMLRVHLDLIFGERRTT

SEQ ID NO: 11082 - protein, 267 aa, BradyrhizobiumColbertium
MRSSQAVLRFALTLVVATALAACKEKRDPGFQGWVEADMIFVSPDEAGRITRLNVREGDEVKVGDPLYSVDDDLQRADLNQNKATLANAQQTYDRAASLSKTGSGTQANLDSAVSALRIAEARVATSETRMARRKGFAPVAGTIQQIYFREGEMVAAQRPVLSIMPPGNMKLRFFVPETELPKLAIGDTVRISCDNCAADLTAKIYFIATSAEYTPPVIYSLDERNKLVYLIQARPSRPDALRVGQPIDVYLNPKNSELKTPVADRR

SEQ ID NO: 11083 - protein, 310 aa, BradyrhizobiumColbertium
MSSGNDIAIDVKGLTKSFGGREVVHDLSMQVKRGSIYGFLGPNGSGKTTTIRILCGLLTPDSGEGTCLGYDIRRDAEKIKRRVGYMTQRFSLYQDLSVRENLEFVARLYGVTDARGAARDMIKRLGLTGREEQLAGELSGGWKQRLALGACTLPNPQLLLLDEPTAGVDPKARRDFWNEIHALAAEGLTVLVSTHYMDEAERCHEIAYIAYGYLLAHGTVEEVIAQSALATYTVTGEALNELAAALTGKPGIDMVAPFGTSLHVSGRDIAALEDSIAPWRERGGLRWQKSQPSLEDVFIELMGRSKDNFQ

SEQ ID NO: 11084 - protein, 387 aa, BradyrhizobiumColbertium
MSGVDAPDSARAMRERFGFLRRSYAMLVKEFIQLKRDRVSFAMIVMLPVMQLMLFGYAINTTPRNLPSAVLLQEDSDLARSILKALENTAYFRFLYEVHHVDDFDNLLKSGKVLFGVEIPRGFERAVRRGDKPALLVAADATDPVAASAAIGSLGMVVQTALKHDLYIGDPPEMPFEIRAHARYNPAAASSLNIVPGLVGTILTMTMLIFTALSVTREVERGTMESLLAMPIKPVEVMFGKIVPYVLVGFLQAFLIIGIGVGLFGVPVLGSLFLLALLSTLFITTNLSIGYTISTVVQNQLQAMQMSMMFFLPSILLSGFMFPFAGMPAWAQYLGECLPLTHYLRIVRAIMLKGASMENLRFDTLALAALMLLAMTIAVTRFRRTLD

SEQ ID NO: 11085 - protein, 436 aa, BradyrhizobiumColbertium
MMVRFASRKARQHAALSADFERELTREVLRTELLRVRALILTGCVMMLFLTAIYLIDPAVVNRVWRGTEGLVQVYGLLVGFILFEVWVHTQIRKNLRLDRDLPVVRRYIGTLIETSLPTVILILQIRTIGVAQALGFAVPLMYFIFVILSTLRLDFWLSTFTGFVAGAGLLAIGLYYNAESEAGEPLVYFHAVRSTIILICGVLAGAVGAQLRRQFAASIAAATARDRVTNLFGQHVSPQVVERLMAAGTSATGDLRRVAVMFVDFRGFTAGARSRTPQEVVDRLDGAFAVLVDILDRHGGIVNKFLGDGFLALFGAPLEASDAAQRAVAAGREMLTAMDRINAQSSWRLRIGIGIHFGEVVAGNIGSPRRKEYTVIGDTVNFASRLEALNKEFGSQLLISASVREALGDDGSDAVALGEVEVRGYERPVAVFQLG

SEQ ID NO: 11086 - protein, 54 aa, BradyrhizobiumColbertium
MQVAAATGRTGDSLQAGDVGRHAPKFGAIGAIGATAQGRVRRRQPAISKASYPS

SEQ ID NO: 11087 - protein, 304 aa, BradyrhizobiumColbertium
MLRRYVTVDVFTDRAFGGNQLAVVLDAGGLTTGQMQAIATEFNYSETTFVLPPRDRANDAEVRIFTPVRELPFAGHPNVGTAFVLATIAREPKPRLLFEERAGVVPVDIVREQGRVISTELTAPQPLARLAQLSAADVAACISLTADDIKTDHHAPQVVGVGTPFVVAEVRSREAVRRAKPDAAAFGRILPRDGAFSVYFYTRDVPAAEAPCERQARMFFPGASGLIEDPATGSATVAAAALFADLDSTRDGEFKLTIGQGFDMGRPSILLTRVRKQDGKIVSAHVGGSCVQMMEGTFKLAGEG

SEQ ID NO: 11088 - protein, 153 aa, BradyrhizobiumColbertium
MAKAKKLFTIGYEQTPPKAVLDELEHAGVKLVVDVRAVTSSRRPGFSKKQLSAGLDERGIAYVHLAALGTPKDGRLAARSGHYDVLEKIYSKHLKTPQAREEMDELSALVKKAGPVCLLCYERDHTHCHRQMIAEMIEERDGVTVKNLVGRQL

SEQ ID NO: 11089 - protein, 273 aa, BradyrhizobiumColbertium
MAKAKTASKKSGNIFIGIGGWTFEPWRGVFYPEKLAQAKELSYAASKLTSIEINGTYYGSQKPESFRKWASEVPDGFVFSVKGPRFATNRRVLAEAGDSIKRFYDSGVLELGDHLGPVLWQFAPTKKFDAGDFGKFLELLPRKLDGRALRHVVEVRHDSFCTPDFVALIREFETPVVFAEHGKYPAIADVAGDFVYARLQKGSDEIKTCYPPKQLDAWAERLQAWASGGEPDDLPKVDKARPKKEPRDVFAYVIHEGKVRAPHGAMELIARVS

SEQ ID NO: 11090 - protein, 124 aa, BradyrhizobiumColbertium
MLLVGAALVMMTSAAMTRSALADDDDAKSMQKLAQQSRDDYWHCLAREYSRESNQGLSERDFGRSVAGACPSERQYYRVTLLDYLTTQYPSIDAGAHLATANRAVEAAQKDIVTAYVKHRAPAK

SEQ ID NO: 11091 - protein, 67 aa, BradyrhizobiumColbertium
MSSESLGGILGAIVAVIVLAVAVVFGPIGQYGKPPKPAKVEPAPAAEPAAPAVPAPRGPIIREVPNQ

SEQ ID NO: 11092 - protein, 377 aa, BradyrhizobiumColbertium
MNEAIRPGADIPPQAQEGPELSVIVPTFNERDNVTVLYRRLEATLANIAWEVVFVDDNSPDGTWDVVRALSQRDSRVRCVRRIGRRGLSGACIEGILASSAPYVAVIDADLQHDETQLPKMLLLLASDQADLVVGSRYIEGYKSEGFNKQRAGASALATEFARKMLRVEIADPMSGFFMMRRDRFEQIAPKLSVHGFKILLDVVATAHGTLRTVEIPYTFGARQHGESKLDSMVALDFLGLVLAKLTNDIVSLRFILFAMVGGIGLVVHLTTLFIALRLFNAPFAEAQAAGAIVAMTSNFILNNFLTYRDQRLKGFALLRGLIAFYIVCSVGLLANVGVAFSVYDQEPIWWLAGMAGALMGVVWNYAMSGLFVWRKK

SEQ ID NO: 11093 - protein, 501 aa, BradyrhizobiumColbertium
MMGEADARIVRNTALLILALVGLRLVAAAFTPITFDEAYYWMWSKHLAGVYYDHPPMVAYVIRAGTMIAGDTELGVRLVSILLALPMSYAVYRSAAILFGGVRVAATSAILLNVTLLASVGTLIVTPDAPLLVASSFVLFFLAKVLETGRGAWWLAVGAAVGAALLSKYTAMFFGPAILIWLAVVPKLRRWFLSPWPYLGGLAALALFSPVLLWNADHQWVSFAKQLGRARIEDFRPVFIAELIPTQIAFATPLAFILGAMGLHALTWQRTGALASRVLIGTMFWTIVAYFVWHSLHARVEANWFAPVYPPFVIAAAAAANLAQWKPRQRRLVAFCRRWAAPVGIVMFAALIVQANTGWLSGYRRDATVRSVGVGWRELAAEIEAVRVRSGATCVLAQDYGTTGWLAFYLPPGTCVAQQTQRIRWVNMPEPDPSLLAGKLLYVDELRPDGHPALNDLFAQVTRIAQLQRKRGPLVVETYGIDLLEGAKGDVLDRSPPPEAR

SEQ ID NO: 11094 - protein, 634 aa, BradyrhizobiumColbertium
MQDDRMRRRRVQILVALVLTALWGAGIYAAHANGRLRFLDRLEATLTDWRTQVRGVQRPPDLVTIVAIDDTVVKRGGSYPLPRADLARVVDTIVQFKPKVIGIDLLLVDRSAAIGDATLANTLATGPMVLAAAAIFPSASETVAPDSEGPLAVLPQAERFLQPLPAFADHAEVGIVNVATGQSGSPLSVPMLFRTRDKVELSFPLRVAARALDEPLTVAPDHLRIGERVVPTDSDFALPITYYGPRRTIRTVSAQSIFDGTLDRAAIENRIVVIGASVAGGGDFYPTPFDSLMPGVEVVSTAITQLVAGDGIVRDRRVRIVDALTAILLPVLLVGLLAWRRSALGIMAAAAIMMAWAGLNLFTFTHGVWLNAATTLAAAVPPVLVFAGVQLWAGSRRTQYLAAKSRSLAQFQAPAVQEWLARDPDFLSKPVRQDAAVVFLDLSGFTGLSERSDPDELRNLLKAFHALIDRTAADCGGMITGFLGDGAMILFGLPRPMPDDAARALKCAIDLHRGVERWIASLPPPIAGQLGFKIGAHYGEIVASRLGESHQHLTATGDTVNVASRLMEVAAQNDARLALSDTLLDAADFEGTPDGILSGPLLARIRGRSAVVTVWFWRDPDGPGQVATTAETIV

SEQ ID NO: 11095 - protein, 174 aa, BradyrhizobiumColbertium
MKGIARAGLVALAGSFLLIGSATAQPAANAGCTATLSLAGTQTWRCDNGITIVAENGARFELKDANRDGRIDAVELSSKALLVDVPRKPRGTPFKVLTPQAIAAVRGTRWAVDVADIKTAVFVADGRVGVTRRTGGRGVVLGPGEGVDVEATGPLTVKTWGQPRVDALMARLGQ

SEQ ID NO: 11096 - protein, 129 aa, BradyrhizobiumColbertium
MQPALAAGWAVADPISKNEPARATRPARAIPFMPASVCVFGTAQRWDDTASYHTKRPPKVPRQQLFSCDGGVQNRCDQLSVTRRLAGSRAARDAHGPRSAAAVRPADVEPPASRNATELGSRPVRRSRK

SEQ ID NO: 11097 - protein, 45 aa, BradyrhizobiumColbertium
MRSDTRTHSPCVQDGVTQSPLEVPLVTIREQHLAEGRSVIKATFS

SEQ ID NO: 11098 - protein, 358 aa, BradyrhizobiumColbertium
MTTTSWLGAAAIGCVVMGAGWTIYSNILGASVYPTVGSIGYDEPVVRRAPKVVLRDAGEAIKDAFALLPDRLQVATPISREMFNERFAAAATQGVPSNAASAAPATQVAAAKDAPKQSVIAKVADALKPAAKGADKAADRAKRAPEAQLQLASADPAQIVPAPEAKPKSFADRAKAAVMSITAPRQSMVEKLWGKREPSGGLLAYASADASITASIAPKEQNPMLGGAPPYERDTAVYDITAKMVYLPDGTRLEAHSGLGANRDDPGSRRLRMRGVTPPHIYTLKPREALFHGVPALRLTPIGGESAIYGRDGLLAHTYMLGPNGDSNGCVSFKDYYAFLDAYRNKGIRKLAVLERVE

SEQ ID NO: 11099 - protein, 197 aa, BradyrhizobiumColbertium
MTAPKTLLELAGADLNPPKLHEACLVLVDIQNEYCAGPLALPDAQPAIAAAARLLARARESGAAIFHIAHKGRAGGLFDRETARGAIVDRLAPLASEPVIEKALPNAFAGTDLQTRLAATGLKNVVLAGFMTHMCVSSTARAALDLGLRTTIAADACATRDLPDGRGGTLDARTIHQVALAELSDRFAIIAQVDALT

SEQ ID NO: 11100 - protein, 279 aa, BradyrhizobiumColbertium
MNWDDLRIIAAVRDEGTYAGASARLRIDETTVGRRLARIQRDLGVPLFEAVDGLRRPTRHCEAVLEHVGAMAAHAAAIDRIKESQPGPVGRLRIASTNAIAEELLAPHASDFLRDHPGLTLQFLTASGNVKFSRWQADLAIRLRKPEKGDFTISKLGEVRLYFLEPADRSGIEPVACVYPDELDAIPEQQFLRSKRLKNARCITDNVRIIRTMIQSHLAIGVLPEYSCGLLLADRSLRATLLPRRRDVWLLVQNHLKRDPAARLTIEWVRQCFRDISQG

SEQ ID NO: 11101 - protein, 251 aa, BradyrhizobiumColbertium
MTTCQDTIRPPARRAAQSREWRAIVILILLIPVLWSPPFLFRYFLYQPFNIPSNSMAPALTVGDYVFAAKHAYGYGRYSVPFAPSWISGRVLAADPEYGDIVVFRSSKDTATDFVKRVVGLPGDRIQMRRGRLFLNDRPVTRVAQKKAQVGDTCGVDDDATAKLWRETLPNGASYVTLDCGDDDNLDNTSVFTVPAGHIFVLGDNRDNSTDSRMPGIGFVPMDNLVGKVTRIFWSLDEDGEPRFERLGKVE

SEQ ID NO: 11102 - protein, 169 aa, BradyrhizobiumColbertium
MIRVGGATEVEVKERKDRVDDAMHATRAAVEEGIVPGGGVALLRASEQLKGLRTKNDDQKTGVEIVRKALSAPARQIAINAGEDGSVIVGKILENKTYNYGFDSQTGEYADLVKKGIIDPTKVVRTAIQNAASVAALLITTEAMVAELPKKGGAGPAMPPGGGMGGMDF

SEQ ID NO: 11103 - protein, 104 aa, BradyrhizobiumColbertium
MKFRPLHDRVVVKRIDAEEKTAGGIIIPDTAKEKPSQGEVVAVGPGGRDESGKLIPIDLKVGDRVLFGKWSGTEVKIDGQDLLIMKESDVMGVLEVSESKKKAA

SEQ ID NO: 11104 - protein, 95 aa, BradyrhizobiumColbertium
MGLRVGGVSDDFRKQMLGYGLTTAQILYRMPDHPSLLQTYVWQNYDMFPKFPALKDFLAFWQEKLDGPLHSVTVAHSKLIKPAELRAVDGVFRLH

SEQ ID NO: 11105 - protein, 473 aa, BradyrhizobiumColbertium
MLQVKQIARAYSDCATALALASDSAQAHLVQGLCLAGLGRVDEALASFDRALDIQPDLQSAISSKIFTLDFAADATVEQHQQARQVWWERVGAKIASEAAGPYDNSCDPDRRLVLGYVSSDFNAHSAAFIFKPVLQHHDRARFEIVCYSCSSRVDATTREFEGMADRWRDAAQWTDDRLAAQIRADGVDILIDLSGHTRGNRLGVFARKPAPIQVHGWGHGTGTGLPTIEYLFSDPVAIPVAVRHLFVETVIDLPCFVTLAPLPAGIARAGAPALSNGFVTFGVFTRISKISDEAVDVWSRILERVPGSRLLIKDFALDDRLVRDNLLARFAACRLPAERVELLGATSRDEHLASFNRIDICLDTFPQNGGVSTWEALQMGVPVVAKLGNSLPGRAAGSILTALGLPDWVADCDQTYADIAAIRAFGIGDVSQLRRELPERIRDAAAGDPVSYARAVDDAYRAMWKRYCRDCA

SEQ ID NO: 11106 - protein, 188 aa, BradyrhizobiumColbertium
MGNSVGQRAFQNARLHKRQKGVVLPLLGHALELHKKGRLPEARAAYRELLQIAPTQFIALHMLGALESDAKNFQQAEALLSRAVAVDPRSAEAHMSLGIALNGLKRHDEARESYRKALALRPNYAAALANLGNASAALDLHQDAVESYDKALAIDGTLAEAHNGRGSALCRLRNYDEALASLDRALAI

SEQ ID NO: 11107 - protein, 175 aa, BradyrhizobiumColbertium
MAKHKASRPAMKTALKKRSGANVAARSSARKAVKAKPRTVAPKKPVRPKQRIAISHHREEDFKADGLRAYAKYRDLGIAAATHGLAQAHVIRLQGPCNPAEVSKLHFHDVEFQMVYVLKGWVKTYMDGQGETLMKEGSAWTQPPKIKHMILDYSDDVELLEVILPAEFKTVELKA

SEQ ID NO: 11108 - protein, 416 aa, BradyrhizobiumColbertium
MLRLQSALGIFALLLIAWVLSENRRAVSARQAAIGLVVTFVAAIVLLKLPVVAHAFGAINEAVGTISAASRAGSAFVFGYVGGGTLPFDLKVPGADFILAFQALPIVLVMSVLTTLLFYWRVLPPIVRGMAWLLERTLGVGGAVGLSTAANIFLGMVEAPLFVRPYLAQMTRSELFLVMTGGMAGIAGTVLVLYATLLAPLIPDAAAHFVIASVLGAPAAILVSLIMVPETSDKRTGGALQNPEMDVSGTMDAIVKGTTAGLDLLLNIVAMLLVLVALVYLVNAMLGLLPHLGGAPISLQRLLGLVMAPVCWLMGLPWDQAIAAGSLMGTKTVLNELIAYVDFSKLPPEALDPRSRLIMLYAMCGFANFASLGIMIGGLGVMAPERREEINALGLKSIVSGTLTTCLMGAVVGVLA

SEQ ID NO: 11109 - protein, 252 aa, BradyrhizobiumColbertium
MSEAKKIALVTGAGTGVGRAASLALMNTGFTVVLAGRRLDMLEETAKLGPAGKSLCVTADMTKPDSIAALFDKVKATYGRLDLLFNNAGRGAPAVNFEDLSLEQWQAVVNTNLTGPFLCTQHAFRIMKDQTPRGGRIINNGSISAHAPRPFSAAYTSTKHAVTGLTKASNLDGRMYDIAVGQVDIGNAATPMTDRMVNGPGVLQPDGTTKHEPRMDAKAVGDAVAYMASLPLDANVLTMTVMATKMPFVGRG

SEQ ID NO: 11110 - protein, 252 aa, BradyrhizobiumColbertium
MTYCCGILVRDGLVMIADTRTNAGLDNVSTFRKLHIFSKPGERIMAIASAGNLAISQSVLSTLTEGLEDPNTGEVETLMNAPTMFQAAQRIGRAIRAVHATEGPALKSEDVSFDVSFLFGGQIKGARMRLFMVYTAGNFIECTTDTPYLQIGEHKYGKPVLDRAMHYDVELYEALKTGLISMDSTMRSNLGVGLPIDVLVVRNDACEADLNHRIEAGEPYFHDLRSRWSAALRAAHQNIPRPPYKNDKEPKT

SEQ ID NO: 11111 - protein, 135 aa, BradyrhizobiumColbertium
MATVKLLSDDELSAEARAVFDDIRKVRKSDFVNNFWRALAHDPKTLRRTWESIKEVMAPGALDPKVKEMLYVAVSIAHGCSYCIHSHTAAARAKGMTEAEYGELLAIVGMAAETNRLVTALGVPVDQAFLVDGAD

SEQ ID NO: 11112 - protein, 282 aa, BradyrhizobiumColbertium
MRLRIQHTTTYRYEPPATSVIQILRMTPGSHDGQYVAEWQIDVSTDTKLDTHEDAFGNVTHVLSCGPVGDIRITAEGLVETHDTGGVLRGTDERFPAGMFLRSTDLTCVNPAMTAVARQLRSEAESDTLGFLHTLMTQIADHMTFDEDPTNSGTSAADAFALKRGVCQDYAHIFIACARAGGVPARFVSGHFLRADDAVHQEAGHAWAEAYVPDLGWVGFDPANSICATDAHVRVAIGLDYLGAAPVRGTRYGGGTETLAVTVKVEQAGRGGQSQSQSQRQS

SEQ ID NO: 11113 - protein, 314 aa, BradyrhizobiumColbertium
MLSRTAENLYWLARYVERAEYLARTIDATLRVTALPAAYIGKTNEWDSALLTAGVAAGFYQAYEEANEHNVVEYLSFSPNNPSSIRNCIEAARLNSRSVRTALTSEMWDTINSAWIELQAVWSKGTSTREDLAKFLRFVQETSLRFDGSAYRTMLRNDAYWFSRMGVHLERADNTARILDVKYHVLLPEEEHVGGPLDFYQWSSILRSVSALTAYHWVYRETLKPWLIADLLILNDTLPRSLASCYGNLVRNLDQIGVAYGRQGPAQRHARGIRNRLEHSNMNDIFQHGVHEFIQEFITDNSRLGEIITKQYLI

SEQ ID NO: 11114 - protein, 472 aa, BradyrhizobiumColbertium
MAAAFDEMNIPGGDLRPAYQELARWLKETPPEALEYRRQEAELLFRRIGITFAVYGDSESTERLIPFDVIPRIMSGKEWALLEKGLKQRVRALNMFLRDIYHGREILRAEIVPDDLIFQNPVFRPEMNGQQVPHDVYVHIAGIDIVRVDAEDFIVLEDNARTPSGVSYMLENREIMMRLFPDLFARHKVAPVERYPDELLAALRSVAPQGASGEPTVALLTPGVYNSAYYEHSFLADKLGIELVEGRDLIVKNNEVFMRTTEGLKRVDVIYRRVDDDFLDPLTFRPDSVLGVPGLMSAYAAGNITLANAVGTGIADDKAIYSYMPDIVKFYLGEEPILKNVPTWRCREPKDLAYVLDNLSELVVKEVHGSGGYGMLIGPAATKATIEAFRDKLKREPEGFIAQPTLALSTCPTCTESGLAPRHVDLRPFVLTGSKSTTIVPGGLTRVALKEGSLVVNSSQGGGTKDTWILDE

SEQ ID NO: 11115 - protein, 245 aa, BradyrhizobiumColbertium
MSDIVTAGILVIGDEILSGRTKDKNIGFIAEYLTNIGIDLKEVRVVSDDEADIIAALDALRHRYTYVFTTGGIGPTHDDITADAVAKAFGVRIDHHPEVVARFRERWSEQDLNEARLRMARIPDGAELIQSATILAPGFKIGNVIVMAGVPSIMQAMMDIVAPKLKSGVRMLSESVRANAREGDIGGPLRAIAAAHPDTIIGSYPFMDEEQKPNTNLVVRSRDPERLAAAMTAVKEMLAGLNVSR

SEQ ID NO: 11116 - protein, 175 aa, BradyrhizobiumColbertium
MAGEAPEPSAQERAGRPFPVSWDQFHRDCRALTWRLNEVGPFHAVIAITRGGLVPAAIVARELGLRVIDTVCIASYDHDKQGELQVLKGISDAVMKLGEGTGKGLLIVDDLVDTGKTGRLVREILPDAHFATVYAKPKGRPLVDTFITEVSQDTWIFFPWDTALSYHPPLRDGAA

SEQ ID NO: 11117 - protein, 220 aa, BradyrhizobiumColbertium
MVSSESPIRNSPFATRPLQNRVTPTGEIIATPHRGLFTGNRGIIHDPATKTLLNKRWSSPAWITCLCEFRGWRRPVMARRSWTELFFLDEATAFAAGHRPCFFCRRDDANRFRAAWERGNGASKVSAKAMDAQLHLERLHHGRKRLHALPVQLAELPDGAMVQQGEQSFLMTRGRPLLWSPAGYARVEYELEGPMLLTPPSTLRALNAGYQPALHPTALD

SEQ ID NO: 11118 - protein, 340 aa, BradyrhizobiumColbertium
MLFPTTIAGSLPKPEWLAEPNMLWAPWKSDGDELLRAKRDATLIWLKIQEDAGIDIVTEGEQARQHFVHGFLERIEGIDFAHKVEMGIRNDRYKAMVPQVVAPLRLKGRVHAFEARVARTHTRNKLKFTLPGPMTIIDTIADRYYGDRVKMAFAFAELLNEEAKALQADGVDLVQFDEPAFNVYMDEVNDWGIKALERAAQGLTCATAVHICYGYGIKANTDWKETLGSQWRQYEQIFPAIDASPIQQVAIECRNSKVPLDLLALLKTKIVQAGVIDVASDTVETAEDVVKVIDAVSQFVPKSNIIATTNCGMAPMRREIAEAKLMALGAGAALAREKLG

SEQ ID NO: 11119 - protein, 252 aa, BradyrhizobiumColbertium
MYADSSFKEKVAFVTGAASGIGAQVVRTLGELGARVAITDKDGEAAARVATELNKSGLDTLAIELDVADLIAVEAAVRSTVDRFGALHFAVNNAGIATPRGALADQTIDNWDHCVAVNLTGVFYCMRSEIPALLAAGGGAIVNVASVCGVIAVPGTSAYTATKHAVIGLTRTAALDYAEKGIRINAVAPGYVDTPLLASRPPQEREAIITRHPMGRLATAQEIADLIVFLLSERAGFITGSLHMADGGYTTR

SEQ ID NO: 11120 - protein, 40 aa, BradyrhizobiumColbertium
MKRPVQRTFFLSLRRVRDELKAGTTDFQEMRSNSRSTRPS

SEQ ID NO: 11121 - protein, 194 aa, BradyrhizobiumColbertium
MIERGIATRGFPRATSGVSPNGRLAASMMKNVAEALDAPGCLGSHELITALLDVYAVAMRRADDQTTRGIKSGLAPFIEQRVLNRIDDPDLDLTALAKLCGLSPRTLNRAFAPLGTSPMRWLWSRRLSLARDLLLSKRVANVTEASLLCGFKDVSHFSRAYRSAFGHTPSSVLREDAGQSEPDRTSTSTGPFIQ

SEQ ID NO: 11122 - protein, 165 aa, BradyrhizobiumColbertium
MAIAHHPEKIASRENPNRRACDIRDKAKLGCPLEGEEVVVSQARAFHLETSALLEALSLAESPGLIRVGGAGLLLVSDGRVLVDTQTFPEAAKAEARGTQKLKDARADTRQSTFMSSFALFVPRVRTGAYRTGKGSSRLHAYRRVKRLRVSTKSKPCVIAASALR

SEQ ID NO: 11123 - protein, 152 aa, BradyrhizobiumColbertium
MVMFCIGPTQFEKSGEEKDTLRNVRATREFVVQLVDDANKERMNLCLPEYGVEVDEMERAGFATAPSMRVQAPRIVDCPVQMECLVTDIRALGQTPYWMVVGEVVYVHYRSGIADSSFHVDMLALNPIGRLANPSMYARITDNFHMPPPAKE

SEQ ID NO: 11124 - protein, 578 aa, BradyrhizobiumColbertium
MSKLEQKGRVTESTICDLLVVGSGAAGMAAAITARTRGGLKVIVAEKEPVFGGTTALSGGYLWVPNNPLSQEAGVEDSVDAARTYIRHEAGNHFDEKRVDAFLRAGPRMVSFMRANSAVEFEAAPAFSDYHPDAPGALPGGRTILTKPVSATLLGSDLPKLRCPRPELTIFGLTVGSGKELWHFYRATRRVESFFYVAKRLVKHGIDLAVYGRSMLLTNGNALAARLFRTARDLDISIWLDSPAKRLIRDESGSVTGAIVQTPHGLRQVMASKGVVLACGGFSQDIARRQQIYAHKASLGEHHSAASPGNVGDGIRLGEAVGGRISEGYPNAGAWAPVSLVPRKDGSLGPFPHFIDRGKPGVIAVVRSGRRFVNEANSYHDFVQAMISACPKREAAEAFLVAGHWTVRRYGLGHVKPAPLSLRPSIESGYLIRGETISELATKAGIDAQGLQETILAWNADVVTGTDRQFAKGSTAYNRFHGDPEVRPNPCLAEIQGPFYAVRVVPGDIGTFSGLKTDEHARVLDFDGKPIRGLYAAGNDAASIFGGNYSGGGITLGPGMTFGFIAAEHAAGAGNADT

SEQ ID NO: 11125 - protein, 48 aa, BradyrhizobiumColbertium
MEKNPKCKGATLRGGVNMLEGKGPHLLVVVAGGWFKKIVMPTYPSGWR

SEQ ID NO: 11126 - protein, 382 aa, BradyrhizobiumColbertium
MLTRRVVLAASVAILSAASAKAEDKEIRIGALMAASGPVAFMGASEKNAFEMLVEQFNAKGGIAGYKIKPFVYDTEGNGTLAAQQFRRLVDSDKVSVVVGPSSTGESLAVRSIANEMKVPLISMAGADTVVVPPTPFVFKTPPGDRVVAAHILTFMKGRGINSFGLLYSGDGYGQAGAATVRLVAEKLGVKIAAAEEFGPRDTDMTPQVLKIRSSGADSLLIWSVNPGPTIILKNAAALGYNKPIFNSYGGATPALIEQAGAAANNTYVSSMRLLVPDSLPKDDPMHAVVTQLANDYKARFKAHVTTFVGHPTDALLLIEAALKKAQSTDRQKLAEAMASDISFPGANGMFRFTAENHNGLNEKSNSMVMLQVQNGKFVVVK

SEQ ID NO: 11127 - protein, 126 aa, BradyrhizobiumColbertium
MAALGFTIVYNATRIINFANGEFLMLGGVLLAGVAAVAKLPMPLGIATAIIGSGVIGWILQRCVLDVPRSSNPTAQVMLTIGAALALRGAVALAFGRDVTFVPEFGLLPLVLLGNVYVPSRDFGSS

SEQ ID NO: 11128 - protein, 104 aa, BradyrhizobiumColbertium
MAAIAMVLAGCIGGLAGAMLAPISSAFYENGTFLGLKGFAAAVAGGMGNPMGAVVGGLLIGLVESLTAGFVSSGFKDAVGFVLLLLVLTLRPNGLIGRAAVKRV

SEQ ID NO: 11129 - protein, 321 aa, BradyrhizobiumColbertium
MRIQTPSSKLSRDWRVLTGFALLLMAAELGISSQFLRSVIILSMIHAIAAVGLTLVVGYAGQISLGQGAFMGLGAYTLAVCLQREGLPILISLGAAVILPGLLGFMIARPILRLSGHNLALGTLALGAVFYVAAAQWHSITGGIDPGIVDLPNAGFAGLNHERVIFWTSILGICGAVAIGTSVVDGRFGRGLLVLRSSELVAQCMGFDTARAKSMIFAISASMSGLSGGLLALYLRSFNASAFGVNISIELLMMVIVGSLSTVWGAVFGAFVIIALPNLLEGFDQAKLLIYGLTMIAIMMFAPNGLGETLVRAVTLRRKPP

SEQ ID NO: 11130 - protein, 490 aa, BradyrhizobiumColbertium
MDISGICITRQSTLRDALDMLDRSGLGVLLLVEGDRKFERTVTDGDLRRLLLEGASLDQTLAIMPGRRSIVVPENGTRRDALGLMQKHTIDHLPVVNVSGRVVDLIERRGIDEQILLSTPHMGDAERDFVEEAFRTNWIAPLGPNVDAFEAEVAELIGVESAVALSSGTAAIHLALVLLGVSSGDCVFCSSLTFAASVNPIAYQNAVPVLIDSEPTSWNMSPIALERALEAARKNGRLPKAVIVVNLYGQSADMEPLGALCDRYGVPMVEDAAESLGAKYRGRHSGTFGRIGIYSFNGNKIITTSGGGMLVTSEMGLADRARFLATQARDPAPHYQHSVIGYNYRMSNILAGVGRGQLKVLDQRVQARREIFRRYSEAFSNESWIQLMPEPEWSFSTHWISAAFLAPDARIDGQLLVRHLADEFIEARPVWKPMHRQPIFAHAEYFFHGNCSVSDELFERGICLPSGSNLTMEQVDRVADAVLKIGRRLA

SEQ ID NO: 11131 - protein, 302 aa, BradyrhizobiumColbertium
MASNIGRMLIGVVDALKAIKPDIVLVLGDRGEMLAGALAAIHLNIPVAHIHGGERSGTVDEPVRHAISKLAHFHFVATCESRDRLIRMGEAADRVFVVGAPGLDDLAHIALTGRKELCQGVGFDPSRRVGLFVYHPVLQEIDRSAEYATRVIDAMLARRLQVIALRPNSDAGSGGVRSMLEARAAAGEVHLATHLPREEFLSWLAAADLLAGNSSAGIIEAASFGTPVVNVGSRQNLRQRNANVFDSSTDSDDLERAIGTALSSSRFDGTNVYGDGRAGAQIVALLSGIDLTGASLMKSNVY

SEQ ID NO: 11132 - protein, 343 aa, BradyrhizobiumColbertium
MKTFIIAEAGVNHNGDEAKAIALVEAAARSGADAVKFQTFSADKLTCKGAAKADYQRQATGDGDQHSMLKSLEISERLHQRLFSHCEKCGLEFMSTAFDEDALDFLVKLGIKRIKVPSGEITNLPFLRHMASKNLPLIVSTGMAELSEVEQAIDVIRDERAARRFGEPLAEVVTILHCTSNYPAENKDVNLRAMSTMARATGLPIGYSDHTIGFAASSGAVALGAIVIEKHFTLDRSLPGPDHKASLEPDQLAEFVRQIRDVEEAMGSDIKAPTPSELPVRDLVRRSVTAIRALDAGVRIARGDLTLMRPGTGIAPVDIEKVVGRKSARAIAAGETLIWSDLA

SEQ ID NO: 11133 - protein, 40 aa, BradyrhizobiumColbertium
MSSQSFGSNPVRLSVDIDRLARSIAEHTSSPVWKKRSLSF

SEQ ID NO: 11134 - protein, 41 aa, BradyrhizobiumColbertium
MRRRNTDDCFAVAHFNAREGIVPTRGLSHRRRWLQQGNETI

SEQ ID NO: 11135 - protein, 209 aa, BradyrhizobiumColbertium
MLDYGMCNMLNVARALEHVGADVVVTKDPKVAIAAERLVVPGVGAFSECMRAVNELGLGDAIRTFLGSERPMLGICVGMQILFEASEEFGETVGLGILPGRVRKISSTTRTGEPQRVPHIGWNHLIEPETGRSWDNTLLRPFASRAPAVYFVHSFAAQPARDSDRLADCDYGGHRISAMVKRNNVTATQFHPERSGIVGLGMLEEYLLQ

SEQ ID NO: 11136 - protein, 254 aa, BradyrhizobiumColbertium
MNNVRIIPRLDIKGKNLIKGVQLEGLRVIGDPQEFALKYYHDGADELVYMDIVASLYGRNNLSDIIRRAADRVFIPITVGGGIRSVDDARHILRSGADKVAINTAAVARPELITEIARHFGSQAMVLSIEAKQVAPGQWEAYTDNGRERTGLNVIDWARRGVEMGAGEVLLTSVDREGTRRGYDVELIRRVSEGVSVPVIASGGMGSINDFLQAAQQGRADGISMADVLHYNRLKISDIRASAYEAGLSVRQIQ

SEQ ID NO: 11137 - protein, 438 aa, BradyrhizobiumColbertium
MDRIPAPHDIDKSKFAADAVNLTTKFGLPKQVVYCRRCVISNQRPNSAVEYEHTKESKKKTIHFDAEGICDACRFAEKKNGSIDWEERERKLRTLLDQHRSRNGNYDCIVPGSGGKDSFYASHILRTKYGMHPLTVTWAPHIYTDWGWKNFQSWIHAGHDNLLMTPNGRVHRLLTRLAVDLLFHPFQAFMFGQKSLAPKMALLHKIPLVIYGENEAEYGNPIGDTETAKRDWSYFTSADQSNIYLGGVSIADLKSQFGVEHQDLLPYLPADPNEIERQKVEVHYLGYYLKWHPQSCYYYAVEHGGFQASPERTAGTYSKYNSIDDRIDDFHYYTTGVKFGIGRASYDASQEIRSGDIDRDEGVALVKRFDHEYPARFAEEIFRYLSIPAKEFPQASKMFEEPVMTEQYFHRLADNFRSPHLWKWGGNRWHLRHAVYDE

SEQ ID NO: 11138 - protein, 409 aa, BradyrhizobiumColbertium
MTGAFAGGCRSLYEAVQALPAGEVQPFFVAPRGTVHDFFGKIGEVIETWGVSQFDNTRYSYYRGLRWLVVLRELVFLPSTFLALRRAQQRWKQVDLIHINEITGVVPWLIARHLFKAPVIVHVRSVVRNDAASLRTRLMESLLRKADAVIAIDETVRASLPPPLRVDVIHNSFSLPARKKAEVGFADRLRLKPGSFKVGFVGNLLRVKGIFELIEAARLTREQGVDAEFIIVGSDAGRSGTLWSRFLNRLKLGQDVGSEVRAKIAEDGLESCVHMAGFTSDVAQAYACMDVLCFPSHYDAPGRPIFEAAFLCIPSIVAIARPSPDTLVDGVTGLAVPPRNPVALAKAIESLATDKERVSRMGAAAHQLALSNFLPERNSRELLAVYKRVLAQVAARKRTDQTPVSSPRS

SEQ ID NO: 11139 - protein, 368 aa, BradyrhizobiumColbertium
MAICTRCIMDTTDPEIAFDAEGVCNHCHRYEAVARHRLVPPVERKERLAQLVAELQRAGRGKRYDCVIGVSGGVDSTYVAWLMKDLGLRPLAVHLDNGWNSELAVANIEKTLKILGIDLYTHVIDWEEFRDLQTSFLRASTPDGEVPTDHAIWALLYQITAKHGLKHIITGTNVVSEAILPEKWGYGYFDWSYVRDVHRRFGRTRLSTYPHFSLIWLFYYIFVRRIRMVSILNFIDYNKQKAMDVLQQQLGWVYYGGKHYESIYTRFYQAYLLPRKFDIDKRKAHYSNLILSGQMSRAEALKAMQAPVYPADLLEEDRQYALKKLDLSEAEFAEIMASPRKTFLEYRNNHSLFKLAKKLVNSSRQLIG

SEQ ID NO: 11140 - protein, 252 aa, BradyrhizobiumColbertium
MRRTRVIPTLLLRGAGLVKTTTFRNPVYVGDPVNAIRIFNDKEVDELVLLDITASRTGRGPAFSTIENIASECFMPVAYGGGVNSVEHIRKILSCGVEKVVLNSVALRRPELVREAACEFGSQAITVSIDVKRKLFGGYQIYGEGGSRATGYDPVVYAKRMQELGAGELLVTSIDRDGTMKGYDADLISRVASGVSIPVIAAGGAGKVSDFTAAKQAGAAAVAAGAMFVFHGPYRAVLITYPSQAELSAALN

SEQ ID NO: 11141 - protein, 205 aa, BradyrhizobiumColbertium
MITIVNYGTSNLGSMRNMLKKVGAGCKIASVPQDLADATKIIVPGVGAFDAGMRKLQQSGMVAALNQKVLEERVPTLGVCLGMQLMTEGSEEGELPGLGWVQADARRFNQASQPDIKVPHMGWNEVTEVKPSALMVEFPPQPRFYFAHSYHVVCHKPEDVLLTFVYGAKTFTAAFQCENLLGAQFHPEKSHRFGMALLRNFVERF

SEQ ID NO: 11142 - protein, 412 aa, BradyrhizobiumColbertium
MSQLALAPRDLEFLGATMTSALRKFDERGWHDIYFDPVIDQISGGAKMLYADARGFNQNEKHAYRKPVFSDTSVVAVSAALGRLFPARPDRNFQRLSELIVADLKLTQFSAERIRLKFSVLRWRARLYRLVLQRLRPRCLLVPNSGQFALFLAANSLGIPFIEMQHGIFSNEHPDNLSSDVLTCDRQTLMLPDLLTVYGSYWMKILEHSALGRLGRIRAVGSPMIDVNRGLRQRSFVADPGKPVLTLTSQGIAAGRLADFVAEFLRLCPSQFELNIRLHPGYEAEATHYDAKFSEDPRVVLWRGNSKPDTYEMIATSDLHLSISSACHFEALGIGTPTAIVALPSHELVLGLAERGDAILIHSPQELADLVLSRGWGVVPAQTSHYYFQPEHVANLRAVLNECTSLRRGRVQ

SEQ ID NO: 11143 - protein, 37 aa, BradyrhizobiumColbertium
MQAKILKYERDLEAQHPPQRNPVSCHPERVIAALEIC

SEQ ID NO: 11144 - protein, 315 aa, BradyrhizobiumColbertium
MSEIKVAFVGAGYMAEEHMRAFDGLPGVVIAGIYSRTREKAERLASAYGTKVFDSIADLYRLTQADLVVVAVVELSMAEVAKACFAYPWTLLLEKPAGYDLADATRIRDDARSSGRRAYVALNRRAYSSTRRAAELLANDSSLRFIKVIDQQDQQAAVEINKHPELVARNFMFANSIHLIDYFRVLGRGEITHVDPVVPWSPQAPRVVLAKIIFASGDIGLYEGIWNGPGPWIVSVNTAVQRIEMRPLEQVSFQLRGTRTVTPLEIDADDTTFKPGLRYQAAQAVAAARGEPKNLVTIDDSWYSMQLVARIFGLV

SEQ ID NO: 11145 - protein, 231 aa, BradyrhizobiumColbertium
MIATCDAAGVKLAINHQMRFMEQYTDVKNLTNSPEFGGLRSMVVTASNFGLAMNASHYFEAFRYLTAEPLAEISAWFDPANVPNPRGAQYIDRSGQVRGVTASGVRLLIELGGDLGHGIEVVYACRNGQILVDELAGYVRGIHRRAEYRELPTTRYGMPADEFQRQIAQADVIGPTVALWRSLLAGGSYPDGSSGRHAVAALVAANLSGESGGRPIELERGLPRERIFAWA

SEQ ID NO: 11146 - protein, 445 aa, BradyrhizobiumColbertium
MGHRQVEQAALFYEFSLERHIRADHLLRSIDRFVDLEQIRQDLVVFYSRIGRPSIDPELMIRMLLIGYCFGIRSERRLCDEVHLNLAYRWFCRLGLDGAVPDHSTFSKNGHGRFRQSDPFRRVFESVLGRCIEERLVGGEGFAVDASLIKADANRQKGIEGDRGLPPEAAGRAILAVLDDAAFGAATEVTPKFVSPSDPAARWTGAHGGQAFFAYSTNYLIDVESAIIVDVEATTAIRQAEVLAAKRMIERSLKRFDLYPDRLLGDSGYGSAEMLAWLVYEHGIEPHVTVFDKSARTDGIFSRDDVTYDHAGDLYRCPSGKVLTTTGTLVNDGATMLYLASKHDCDRCALKSRCCPKQPSRRVPRSIYAGARDMARQIARSLEGRTSRRLRKKIEMLAHLKRILKLDRLRLRGPNGARDEFILAATVQNLRKMAKLIPIPTPRLA

SEQ ID NO: 11147 - protein, 201 aa, BradyrhizobiumColbertium
MTVGIARLKITLDDVKPVVLRRVDVPFDIKLDRLHLTIRAAMGWTNSHLYELRAGDVGWSTPYPDADWGVGEFLDARKARLTDILEDVGTKKLTYLYDFGDGWEHSIKVERLIDPEPGVLYPRLIEVSGRCPPEDCGGPWGYAELLEAIKDPTHERHAELTEWIGDDFDPDIDEAEWLTTEVEALAKKWSRKPEGKRAKRS

SEQ ID NO: 11148 - protein, 264 aa, BradyrhizobiumColbertium
MRDDRPFGGRAPPGALYYASRDRRQEHPTRHLQSFSGILQADAYSGYNELYDASRAQGPITPALCWAHARRQFFELADIAANARAGKNAAAISPIALEAVKRIDALFDIERGINGQSAEERLRVRKEQSAPLLTALEAWLREQRARLSNSSAVAKPIDYMLRRWERFARFTDDGRICLTNNAAERALRGFALGRKSWLFAGSERGADRAAIMATLIMTAKLNDVDPQAWLADVLARINDHAVHRLEELLPWSWASEIERRKLAV

SEQ ID NO: 11149 - protein, 59 aa, BradyrhizobiumColbertium
MVTIGLDISKSWFQIHWITADGEIIRKKLARGKVLDFFSRLPSCLVGLEALRQRSSLGS

SEQ ID NO: 11150 - protein, 197 aa, BradyrhizobiumColbertium
MALVDVDERIPQSARSALSILVDQIEDLELHIESHEKMILATAKDNEVCRRLMKVAGIGPFDATALAASVDHPQQFASARHFAAWLGLVPKQHSTGGRERLGGISKRGDGYIRKLLIHGARAAVHRVRIHQVTNTWITELLGRRPFNVVTVALAHKTARIAWAIMANGEEYRASINRAWLRLRGQSRVMATSRTGVG

SEQ ID NO: 11151 - protein, 220 aa, BradyrhizobiumColbertium
MELEELVTTASEDELAAQAAAAKTQNVRPFTRKRPVRKPWPDDIEHERVVIDAPTSCACCGGSRLAKIGEDVTETLEEIPRRFKVIETVREKFTCRDCEKISQPPAPFHATPRGFIGPQLLATILFDKFGMHIPLNRQSARFKAERIDLPLSTLADQVGHGTFAVMPLFHLIERHVLAAERLHGDDTTIRILAKSKCTTGRIWTYLWTVPALQGHLLCFG

SEQ ID NO: 11152 - protein, 84 aa, BradyrhizobiumColbertium
MFELLDPQLEMRDQRRVVRQLRPRTGSHRLGSQPRLTLGLQRRQGTRKVRWKIVRLRYHEAIESDQAPDSNAKRYPTRVGRWVS

SEQ ID NO: 11153 - protein, 86 aa, BradyrhizobiumColbertium
MQEVLRKDPLSGHLFVFRGRRSDLVKVIWHDGQGACLFTKRLERGKFIWPSVAGEAVTISPAQMSYLLSGIDWRNPQETQRPTRVG

SEQ ID NO: 11154 - protein, 71 aa, BradyrhizobiumColbertium
MESGSSPPQKLKDALQRFTVDVPVNPNATASAKFDLDDSSPRTLRRRRRRRLRRADRYRSRRRSDFDRNEN

SEQ ID NO: 11155 - protein, 119 aa, BradyrhizobiumColbertium
MKFALAHDKDQSMKRSRFSEEQIIGILKEHEAGVSVADLCRKHGVSDASIYKWKAKFAGMEVSEAKRLKTLEDENTRLKRLLADAMLDNAALKNLLGKNVWSAPSVQGFATSPTTIPVA

SEQ ID NO: 11156 - protein, 194 aa, BradyrhizobiumColbertium
MGQPGGYRWDGQAWLGGDINRFVVKSQGDGSRREGLDSAEVQLLYSRAVAPYTDLQAGIRYDFKPDPTRAYLTFGVQQLFPYWFEFDGALFVSNRGELLGRLEGSYDLLLTQQLVLQPRAELNFAAQNSQDIGVGAGLSNSELGLRLRYEFRREFAPYIGISYDQKLGNTAEYAKASGKDSGSTKFVVGLRSWF

SEQ ID NO: 11157 - protein, 638 aa, BradyrhizobiumColbertium
MNELSRRQLLRLASLSGAAGLASSALPSWAQSSPLHPPSRLSEVSGSNIELTLDRAVWPVDGKAGSAITINGTVPGPILHLKEGQRVRIAVTNRMDETASIHWHGMLVPFRMDGVPGVTFPGIPARSTFVYEFPVIQNGTYWYHSHSGFQEQVGLYGPIIIDPKGADPVRYDREYVVMLSDFSFLSPELIIQRLKQEGGVFNYQRQTVASLLAGRDQTLAERLQWAKMLMDPTDISDVTGAVYTFLINGHGPEDNWTGLFKPGERIRLRFINAGAQMVFNVRIPGLHMTVVAADGQMVRPVQVDEFQIGNAETYDVIVQPREDKAYTIVSEAVDRSGMGRATLAPRMGMTAPVPPLRERPLATMKDMGMDMSAMKMSDMKPSAASNNGMSGMSSMPGGAQISGRARKGMQQSAGMQGMPGMSGKPGMSSMSSSTPPGMAPPKPRGSDVMSGPEMDMRDPKNAPGVKMGPGVQTIAPMPQDRTGDPGMGLESVGHRVLTYRDLIALERNPDARTPTRALDIHLTGNMERFMWGFDGEKFSETTKPYTFRKRERVRVTLINDSMMLHPIHLHGHFFEVVNGAPESHKPRKHTVNVLPGGKVSFDITAEPGDWAFHCHMLYHMHAGMFQVFSVRPLSGDNA

SEQ ID NO: 11158 - protein, 519 aa, BradyrhizobiumColbertium
MLRPHRLIYALAFMAGAGLIANANAAEWADYATVSMTDPVTPKLTANRLCYTDGRDVACDGAAGLLSSSGSLVISTVAAGGLSVTGNTSLTNVNASGIARFIGVISDTNQTNLRLTAPGTAQIQNVGLSFYPTFDGSGSDNGPRRVADILAGFNGGAWGHQYLSFNVGDVNNDTGALTAERMRITANGSVGIGTSTPSTTLYVNGNTTLAGERTYLAGFDASHIHWLGINNGSGEPSNLFMGFVSLDGLTADRITMNPGGSASSLIVVSTGLVGINLSRDPVRSLEVSGTISATNLVVGGCTGCGGKGADRQVFTVSGTWTKPSGYSTNAMAYVQCWGGGGGGGRAGYSSWTGNGGGGGAYRDGWFLLSTLGATETVTIGAGGGVGTAGYGVGYAGGNSRFGSKLTAYGGGGGGSSSSSWTAAGQGGQLTAAGTNGGATGNPITTESVGGDGGQSSIIGAAGGASYFGGSTTPAGTSSMGGNGGGIGANGSAPGGGGGGAYATNGGYGAAGQCIVSVFN

SEQ ID NO: 11159 - protein, 39 aa, BradyrhizobiumColbertium
MLKLAAEGVAACTTIAAELERPGFPAVVTGASHGSAFMR

SEQ ID NO: 11160 - protein, 183 aa, BradyrhizobiumColbertium
MNAGIGGDKTDYNFGGVASGNVTSFGGFGGGQIGYNYQFAGNWVAGIEADIQGGSLKSEINASIPPVGLSGGTEMKWFGTVRGRLGYAFDRVLVYGTGGFAYGSEDTYLNAAPLLTFSRSADLTGWTAGGGVEYAVTNNVSVKTEYLYFEFDRNNIAAIGPTTIDNKVTAHTLKVGLNYAFGK

SEQ ID NO: 11161 - protein, 78 aa, BradyrhizobiumColbertium
MISGYARVSTNDQDTAAQVEQLMAAGAVKVFREKISGATAERPQLKKALASLDQAQSARSCDFGQLKERIANVQSRRS

SEQ ID NO: 11162 - protein, 138 aa, BradyrhizobiumColbertium
MQFLHAGDELVVLRLDRLGRSTRDVLNLVHELDEKGASLRVLEPEVTTAGSMGRMVITILGMVADMELKFIKDRQRAGIDAAKVDGIYKGRKKNVDDAEIRRRITAGSTKAAVARDLNISRMTVYRALEGQGPESAST

SEQ ID NO: 11163 - protein, 946 aa, BradyrhizobiumColbertium
MNGKPELARLGLAVQLKFFAAHGFFVQDHAAIPADGVLYLAEQLGLDVEAVNHYDFVGRTARRHYAEILQHLGFRRLKRVDREQLTSWISSELCPSGQSVSAMLEHVFLWCRDRRIYGPSRKELERLVRSQRQHHLDSWLSGVHDRLSASTVALLEASIADPEGQTGFNTMKGDAGQASLDNILGMTAKLAFIQKLDLPRDLLAATGKAWVEQIVRRVGGEKASEMRRHAPARQIGLYAVYLLSREAQLTDAMVDLLIETVHKIGTRSKRKVVGDIAKDIERVYGKERLLVEIASASIEEPSGRVCDVIFPIVGKDKLAAIVKESQAKGALDRRIYKVMRSSWANHYRRMLPDLLSVLEFRSNNTVWRPVLAALDWIRSKMDDGCRFVPVQDIPIDEVIPARWRSSVIDGDGRVNRISYELCVLTQLRDRIRSKEIWVVGADRYRNPDDDLPKDFEIRRDAYYSGLDLTPDARTFTSAIRSELEQELLLLNANIPDNDKVRLLWRGENRISITPFKPAPEPKGLNAIKGEIGGRWPMTGLLDVLKEAALDTGLLDAFETSASRVSLSKETLDRRLLLCLYALGTNAGIKRVAGATPDVSYEELLHVHRRFIHAPALREACARVANATLAIRNAAVWGDAGTACASDSTKFGAWDRNLMTEWHARYGGRGVMIYWHVEKRATCVYSQLKRCSSSEVASMIEGVLRHCTDMEIQRQYVDSHGQSAVGFAFCRLLGFELAPRLKAIARQKLAIPDTAMRARLPNLLPILSGAINWEEIEQQYDEMVKYAAAMQTRTADPEAILRRFARAEVMHPTYKALSELGRAVKTIFLCRYLRQETFRREIHEGLNVVENWNSANGFVFFGKGGEIATNRVDEQEISAFALHLLQASLVYVNTRMLQTVLVEPKWAGRMTPEDYRGLTPLIYSHVNPYGRFDLDLNSRIDFGRLAA

SEQ ID NO: 11164 - protein, 143 aa, BradyrhizobiumColbertium
MSDRVSGHRIRQFGRGCHKAFKLKPTTGRFGRGMKRGLITLGFQKGSAQIFEGAKRIVQSRFCIRDARIAQPLRILPGLAHYPVMGLDHRISNPRVPFHRTDRQNGETPVAGDVSQAIGKIPFTLAAQLRNPVGRQTIQNIGR

SEQ ID NO: 11165 - protein, 116 aa, BradyrhizobiumColbertium
MLTFALGTAAGDLAAEGLNLGYLQAGLVYGAVIAVIAFGYFGLKMNSILAFWLAYIVTRPMGASFGDLLSQPIGNGGLGLGTVITSAVFLTVIAGVIVYMTLSHEGEEAVPVERRV

SEQ ID NO: 11166 - protein, 232 aa, BradyrhizobiumColbertium
MRWEMQAMRVLVIEDDAETGSYLRRGLREQGHVVDIATNGRDGLFMATSEAYDILIVDRMLPHLDGLSVVKTARATGLKTPVLFLTTMSGVGDRVEGLEAGADDYLIKPFAFAELSARINALARRPPMAQVETVLKVADLEMDLISREVRRAGLDIDLQPREFRLLEYLMRNAGRVVTRTMLLESVWDFHFDPKTNIVETHISRLRSKIDRGFDTELIETVRGSGYILRARP

SEQ ID NO: 11167 - protein, 438 aa, BradyrhizobiumColbertium
MTSALEHQARDRMDAESSSLLAEYRRHGMEGLRSTIEERSSAAKRRLHYAIVNAEGHVLIGESYLAEFAATSTARPKIVPRSHGEDATDQILVESTALANGLTLVVADNLESVEDVEDVVLNGFFIALGLALVLGLAAGILFTRSLLKRVDHVSRTAEAIIAGDLSQRIALTGSGDDFDRLSATLNTMLDRIADLLESLRQVSSDIAHDLRTPLTHLRQRLESAKARACSPVDYQRAIDQAIENADQLLETFSALLRIAQIEAGARRASFRLVDLEEVMRTVADAYEPTIEDGGRALELQLADELPINGDRELLIQLFSNLMENALRHTPTKTRIVLRGFHSRGTVIAEVSDDGPGIPEPERDRVFRRFYRLERSRTTAGNGLGLSLVAAVTDLHQAVIELSDNKPGLKITLRFPDASSGTGAGRENGLAVSCVSHSE

SEQ ID NO: 11168 - protein, 353 aa, BradyrhizobiumColbertium
MPDLSQLLQQSSANAWLFVPSAILLGALHGLEPGHSKTIMAAFIVAVRGTVLQAALLGLSATISHTAIVWAIALAGLYFGQELSGERSEAYLQLASAVIIIGIAGWMVWRTRSEQNEEHDHHHHDEPHSVSLAGQSLSLQINEDDAPPRWRMRNDTGALPPAGGIRVTTIREDGAEQSFGFVAKYGYLESLDEIPEPHAFKARVALAGDTAEVLFDEHDHDHIDLGDEDDAHARAHAADIRTRFAGRTATTAQILLFGLTGGLIPCPAAITVLLLCIQLKQFTLGFLLVLCFGIGLAITMVSAGVLAALSLRHVERNWRGFSRFAHGAPYVSAALIVLVGLYTGWMGVHELVL

SEQ ID NO: 11169 - protein, 53 aa, BradyrhizobiumColbertium
MLVASVRGAVGGLTTELLEDHIRHHVVDPAHEKDPEKAKGAADLIEVVRTYLK

SEQ ID NO: 11170 - protein, 93 aa, BradyrhizobiumColbertium
MTKQHAHESHVRIVKRLKRAEGHLRRVIEMFDDGRSCLDLAQQLHAVEKAITEAKRTLIHDHVDNCLDVAANGGSSKPTKTVLAEFKAISRYL

SEQ ID NO: 11171 - protein, 405 aa, BradyrhizobiumColbertium
MSSRNSLWVLGLAAIVAAGAFAAWEPGAPALRKTVGVAAAGPPQPPRPQAEERKPIIRMDEERIALAKIEQTKAGPATIATRLSVPAVIAPDADRVAHVSVKLSGTVAELRKNIGDEIAKGEVLGALESREVADAKSEFMAARLSNDLQQDLTARDKSLWEGRAVPEQQYIKSRNAAAQTAMRLDIARQKLLALGIEESEIASISHAPEGALRLQNIRAPISGQVVERKVERGAAVGRDSLETELFVIIDLSRVWVEMTVNSSDLPAVREGQEVAVSVRGGSSVGTGKVIFVSPLLDKETRASRVVATLDNPDRLWRPGSFVTAAIAVESRQVPVVVPATAVQTVDGRKVVFVRMSEGFEKRDVVLGGRDDGMVEVTSGLAAGETIASSNTFPLKAELSKPGDED

SEQ ID NO: 11172 - protein, 1079 aa, BradyrhizobiumColbertium
MIARIVEFSVRRRWLVLLVVLVAAATGLWSLTKLPIDAVPDVTNVQVQVNAVAPALTPVEIEKQVTVALETALAGIPGLESTRSFSRNGFAQVTVVFVDGTNIYFARQLVAERINDAKSSLPPGVEVKMGPVSTGLGEIYWWAVEYEKPGATAPVRDGKPGWQSDGSYLTPEGERLTDDFRRTVYLRTVQDWIVRPQMKTVPGVAGADAIGGFVKQYQVQPDPAKLIAYGLSFKQVIDAIEANNASRGANYIEQNGEGYVVRAAGRVANVEDIRQIVASTRNGVPVRIKDVADVTIGKELRTGSASVNGREVVLGTALMLIGGNSRTVAAAADSKIKDISRALPPGIHARTVLNRTQLVDATILTVATNLAEGALLVIAVLLLMLGNFRAALITACVIPITMLLTATGMLRGHISANLMSLGALDFGLIVDGAVIICENSLRHLAERQVALGRTLTRDERLRTISDSAVEMIRPTVYGQLIIILVYVPLLAFTGVEGKTFEPMALTVMIALAMAFVVSLTFVPAATAITLTKSVRETENFLVRRLKEAYEPILSRSIASPGVVVASAAVLCAASLALFSRLGQEFTPTLDEKNIVMEVKRVPSTALAQSQAMQLEIEKVISKFPQVAFVFSRTGTPDLAADPMPPSASDTYIIVKPQREWPDPSMTKDDLIQAIEVEATKLPGNKVGFSQPIEMRFNELIAGVREDLGVKVFGDDFADMQRTAARIADVLRKIDGAENVKVEQTTGLPFLDIKIDKAEIARRGLNLADVQDLVETAIGGRAAGLVFEGDRRFQIVVRLNDALRGDISALENLPVPLPHSNPIAPAATVPLRAVASFEQTEGANQISRENGKRRVVATAEVRGRDIGSLVTEAQEKVAEGVKLSPGSYLAWGGQFENFSVARQRLAIVVPGCFAMIFLLLFGALGSARDALLVFSAVPLALTGGIAALWLRGMPFSISAAVGFIALSGVAVLNGLVMLTQIRSLIERGVAPVRAIRDGALTRFRPVVMTALVASLGFVPMALATGTGAEVQKPLATVVIGGLLTATVLTLVVLPALYARFTRRQQISSVLERSGMPRAAE

SEQ ID NO: 11173 - protein, 71 aa, BradyrhizobiumColbertium
MVAAGEPRFKIDDLGQGPLLPALARVKVAQASLATTKNLLKAGKGLSVAGSISTIDVDNSRYDGRLSMTHI

SEQ ID NO: 11174 - protein, 49 aa, BradyrhizobiumColbertium
MSFILYQLYRFSHTHSVWLLLITLLDVVVIWLTWHEYRHLQKHHAAIGP

SEQ ID NO: 11175 - protein, 54 aa, BradyrhizobiumColbertium
MSIPFQEKNLRLAFRISLTIKGVFALLEIFAGITAHFVSQQFLLSAILAITAKS

SEQ ID NO: 11176 - protein, 240 aa, BradyrhizobiumColbertium
MAAFLASLVEFVEALTIVLAVGIVRGWRPALVGTAAGTVLLAAMIALLGPLLGQIRIELLQLVIGFLLLLFGMRWLRKAILRAAGIIPLHDEIAAFSSEVIQLRSAGPMATIMLDPIAVGTTFKAVVLEGTEVVFIVLAVGAPGNALIPASVGAAAAGVLVIALGIVLHRPLSRVPENALKFAVGILISGFGIFWVGEGLGFEWPGRDLALIPMFALLLTTSLVGAQLARRATVPSGANK

SEQ ID NO: 11177 - protein, 53 aa, BradyrhizobiumColbertium
MAALYVAEVEGKSADEAAQQLSLVYGHFPYLLSKTNAMDKSFWEYVEAHRSSR

SEQ ID NO: 11178 - protein, 53 aa, BradyrhizobiumColbertium
MNTRSDSVTLSDGTTYSLPEGIETESVKVGEKVRIKFSSSHNQNRASSLVKAK

SEQ ID NO: 11179 - protein, 176 aa, BradyrhizobiumColbertium
MPGLAQGATPLPALENPIKSEKNPPGDIPDNQVFIDYQSPLGFTIKVPEGWARREASDSVVFSDKYNTIELTVAQRAGSIDLNNVKQKEVADLERSGKAVRVSRVKPTSLPSSSAIVVSYGSNSEPNAVTNKAVRLENERYFLWKDGKLVTLTLSAPFGADNADQWLLMAKSFRWR

SEQ ID NO: 11180 - protein, 220 aa, BradyrhizobiumColbertium
MTVLEAIDLYRFFHTRESETLALRGVSLWVDAGEMVALMGPSGSGKSTLLACLAGLDEPDGGHVELLGERLTRLPEAERAKRRAASVGVLMQSGNLFPTLSVGDNVKLPMLLARRKDPAWAEKLLRSVGIAERRGARPGQLSGGELARAGLAVALAARPRVLLADEPTGEVDAATEGFILDFLNEQRQAGTGILVATHSRPLADRADRIVQLRDGRVVDA

SEQ ID NO: 11181 - protein, 130 aa, BradyrhizobiumColbertium
MDDHAETLATLQRLREIGVQISMDDFGTGYSSLSYLQSFPFNKIKIDQSFVRGHQSETSKMAIVRAIATLGSSLGMSTTAEGVETEQQLATILANGCSDAQGYLISKPLKADAVNEFLNRPKALTCKAQS

SEQ ID NO: 11182 - protein, 47 aa, BradyrhizobiumColbertium
MSAIALYALERLLDIRQSALEDLREYAFVEDESAGDVDGAVVPLRNL

SEQ ID NO: 11183 - protein, 37 aa, BradyrhizobiumColbertium
MFGPISASTGFEAAKLEGDRILKIMREIAMDEEERAA

SEQ ID NO: 11184 - protein, 74 aa, BradyrhizobiumColbertium
MLHNNRGKKIADPVDARRKVAGRSIVHTGVIAAGDALLKDPVTRDKSGISFAAMAIRWRQPDCRKQRTPGAPTS

SEQ ID NO: 11185 - protein, 46 aa, BradyrhizobiumColbertium
MLLWARGDEPEDIARRFKLDLAIVQEAIEMHGHKFKRRKLRRRRIL

SEQ ID NO: 11186 - protein, 350 aa, BradyrhizobiumColbertium
MFLAVPFECRYEVEFIPYRGRKPRKQFFREMGASLILNQADPSEAKPAFRVTDTTFIGRHRFSEEILAWKGQLWWPLKWSYGSEEHVTEGDLLGELARLDEDVFRQHIRRRILEPPLPKRNEVPIQRLISDDFETTLRECRRKALSYLLICDGFAYVAGGEPIYVLSKYGVHVVAAAGPDRAARPRNQWIHCHLRTFDDPLEPIFSADQFEEAKRSLPLKYRRRRVPRIDVLEPRAIQVSLSTIRCDVLFRRLVHDVTYSNHYHPNDARLPDSYPGAAEFRERLFRAADGPLVGDELSRQRIALLRECLQFEPVRGTLRAGIEEFLINAGTAASLEELDPSDWAALASIA

SEQ ID NO: 11187 - protein, 633 aa, BradyrhizobiumColbertium
MPKIVKSPLTVIVVLLGFTLASFWSLIAWKAGQERAAAFAKAGAETQGLTHSLAQHASKSFNAVALALFGARQYIQHSDRSARASAEINDLLAQYARNIPQVREIGVLSETGDWMFSSFETIPPINNADREYFRYHQAHPEEAEARISDPLISRVVGRPTLLMTQRLSASDGSFAGVVFAAIDLSYFRSFYAGFEAERDRTITLMKTNGKVLVHRRDDQVGKDVGGSSLFGTRLKDSVTGLYSIVSPFDGRAKQFAYEALSDFPVVISVAVAEEAILEEWWKDRNFDLLLGGAVSTVLLGFAALLAAQFRKRASMARMLRERERGYRLLAENVEDVVTRIDAEGRRLYISPSVEKLLGWSAAEIISEGAYSNIHPAHSRLVEDLIRRLGPDNRTATCEYLTRRRDGNYVWVEAQLNFVEEPEERRPEIVGVIRDISKRKAAEEQLLEANEQLKALSETDTLTGIANRRCFDRALEAEFKRCQRSGSQLSVLFIDIDKFKAFNDCYGHSAGDECIRKVARALAASLKRPADLVARYGGEEFAILLPETTPAEAEAVAESVRLAVVDLAIPHEGNRHGCVTISVGIAGLEDDVRSSPASMLAAADGALYVAKEQGRNRVCAAAENPSLTLARQVG

SEQ ID NO: 11188 - protein, 426 aa, BradyrhizobiumColbertium
MLLRKAYRYRVYPDVAQKELFRRTLGCCRLVYNLCLEQKNEYLRRRKSLSKFDQIKELTALKEAFDFLYEVPHHPLQQAVYDVHAAFDNYFGGLKRQRELAMRGIKANPEDFPKWPTFHKRGRKESFRYPDPKQIKIEPDRIFLPKAGWVRIAIHRPIAGRIKNVTVSTIAGEWFVSAQTELEAVIPANSGPPVGIDLGSAQPIVLSDETVFGIPRATPAERRRLENAHRTVHRRKKGSKNREKAKLRLARLQAKAARRRRDAAHKATTTIAKNHGVVVIEDLKVKRMTKTGRGTSEAPGTLVRKRANENRALLDIAPRTIRTMLEYKCQWYGSTLVAVGPAHTSETCSACGVVDAEARITRARYVCGACGGDFDADVNAARNILARAISSTGGLPGMACGSSQTIGRTQEKDARESRSSALQGRE

SEQ ID NO: 11189 - protein, 118 aa, BradyrhizobiumColbertium
MRILVVEDDPLIREFVVDALREAGFLVIHAADGEEALACCARKAADVLVTDIRLPGKVDGWQIAERSREQNPRLSVIYATGFSPVPPRPVPDSVLLHKPFYPHDIVRVVREMTDEREE

SEQ ID NO: 11190 - protein, 39 aa, BradyrhizobiumColbertium
MKPKLPKVWAVPGAAWAIGRLTSEAVLCLGPADGPRISA

SEQ ID NO: 11191 - protein, 60 aa, BradyrhizobiumColbertium
MQDMVAQLEKLRTDSAECKLISDLATDPAKRELFARIAEHLAVLADEVERVIAEPPTGTD

SEQ ID NO: 11192 - protein, 66 aa, BradyrhizobiumColbertium
MFDAATTALLRSILEEVCRNVASGETGMRTHVASKILEAARQGEVAPERLREVGRDAVSRAPTMWL

SEQ ID NO: 11193 - protein, 137 aa, BradyrhizobiumColbertium
MNFQVTVLKILVSYPEGFAVMEDLKRDMAILATSGREWADRTKRLAARVPDLDIFSQGLVERESGGWKITPKGRAVLEFMEARPVTEPPHPASVAGAAAADAEPALLLGQPVDRAKRRRERRERRREARERARAKAS

SEQ ID NO: 11194 - protein, 151 aa, BradyrhizobiumColbertium
MKDRRKKKEGAAAHFFGQFATRTSQAAGRASTFVIAALVVLVWAVTGPLFGYSDTWQLVINTGTTIVTFLMVFLIQNSQNRDSAAMQVKLDELIRVGAARNSLVGIEHLTDEEIEDLRKKCESRAKAEKAANEHVETTGRRARRAAEQAAN

SEQ ID NO: 11195 - protein, 1063 aa, BradyrhizobiumColbertium
MLWGPDGIMLYNDAYSLFAGGRHPGLLGSRVREGWPEVADFNDNVMRVGLAGGTLSYKDQELTLFRSGQAEQVFMNLDYSPVPGDDGLPAAVLAIVVETTERVRSERLQDFRRGLKDRLRELSEPRDILGAVVDSLGTYLGANRVGYSEKRDSDDAVVILSCYARGVEPIEGLHKVGDFGSESNSRQRRGLVEVCSDVLTDPAQVHSTWAAIDTRAFVSVPLVRNGQFKASLFVNFREPHFWTDEEVALVEDVAIRTWEAVERTRAEDAAERARFEQAGLASTLNALIANAPIGFAFFDRQHRYTRINDVLANINGVPAAAHLGRRIEELLPVNARVVAPILEHVFATGEPVENLEVDGETPLSPGELRSWLTGFFPVFEKGEVAQVGATVVEITERKRAEENLRASEERLRLATEHAEIGFWDVDEVNQKLHWPPIVKAMFGISSDVPVSMQDFYEGLHPDDRDRTSVAYAAAADPDRRALYDVQYRTVGKEGGVIRWVAAKGRGVFDSNGRCQRVLGTATDITAKKAAEAALAASEARLRELNQTLELRVAEALAERKLLADIVDGTDIFVQVADRDFNWLAINKAASNEFARIFGVRRPHAGDNMLAMLEAQPEHRAAVKQVWARALAGEEFVEVDAFGEASLDRRYYEMRFRTLRDGGGRPIGAYQFVSDVTERLREQSRLKEAEAALSQAQKMEAVGQLTGGIAHDFNNLLGAVVGSFDLIRRRPDDTEKVRRYAEAGLQAAERGAKLTGQLLAFSRARGRLEIKPVRVSALVAGMRDLLVRTLGPMIHVQLDLQEDGAVLSDPTQLEMALLNLAINARDAMVSGGRLLIRTRTLSVSDQIGLEPGEYTELAVEDTGAGMPPEVVGRAFDPFFTTKEVGKGTGLGLSQVYGIARQAGGTVRIDSRVGEGTIVSILLRKTDAPVEESSGGEVETARWPEKSAKVLIVDDDPDLRRVLAASLEALGYLVVEARDGPQGLALVDEAEPDLIVVDFAMPGMNGAEVARIVRETRPGIPIVFASGYADTAAIERFASNSAVLRKPFRMDELQSVLTEVLRQRS

SEQ ID NO: 11196 - protein, 61 aa, BradyrhizobiumColbertium
MPDRALLLRQKLRRIRHLGQTWSLFQREGVQRARDAALDECGKAGKACRIIGAVCADGSGR

SEQ ID NO: 11197 - protein, 46 aa, BradyrhizobiumColbertium
MSVCDLIFEYFRDGAGSAPVLNAYISSAVECGSDAPQVDLAPYVKE

SEQ ID NO: 11198 - protein, 39 aa, BradyrhizobiumColbertium
MHVDAGRTADLLQAVFAIVAPQVGLVSISDVQVVRPERF

SEQ ID NO: 11199 - protein, 323 aa, BradyrhizobiumColbertium
MLALAVQNLVSPSVLFFGMGIGASLGRSDLSVPEAIARFLSLYLLISIGFRGGAEVAHQGLTLALVLTIAAGVVLSAGLPFIAYALLRYGARLDHINAAAVAGHYGSISAVTFVAVTGALTQFSMPYDGYMIAVAAAMETPAIFTALLIARSGHGRTKDGFSGGFLREIALNGSIVALLGAFTVGCITGERGMTSLKPFLLDAFPGFLCIFLLDMGLIAGRGLRDGWRSLTPAVAGFAWGMPLIGAASAALFAWLIALSAGSTAILMTLGASASYIAVPAAMRLALPAANPAIALTLSLGLTFPFNLIVGIPLYIAAAQMIAG

SEQ ID NO: 11200 - protein, 295 aa, BradyrhizobiumColbertium
MSQRSSLKKAMMMPRSRLNLDIDLVRSFVTIVSLGNFTRAARALGLQQSTISLQIRRLEQLVGGKLLERSPQSVALTAEGELFVDDARRMLDLNDEMVARMREPSIRGLVRLGAPEDFATRHLPDVLARFAHAYPQVDLEVTCDLTMNLIERFRKGAFDLALIKRERSFEISGTRVWREPLVWVTGGVDLRQGVLPLAVSPKPCVYRKRATEALDRAKRSWRVAYTCGSLAGTLAAVRARLGVTVLPKDMVPPDLHVVDGRPMPDLKDTEIAILERDRLPLPAQRLKDFVIKTLS

SEQ ID NO: 11201 - protein, 39 aa, BradyrhizobiumColbertium
MGAGSGSRRSDDGCRFTPWERRNWTEALTVAGFDTLDAA

SEQ ID NO: 11202 - protein, 39 aa, BradyrhizobiumColbertium
MKARPCEVVSNCRSRRHEGARELGDLAQSSRLAAAPSSP

SEQ ID NO: 11203 - protein, 124 aa, BradyrhizobiumColbertium
METTSQGRAFIDISRAAWDADGLDAMVAPCSAPLVYPVAVGVVAAMHAVPLAPTLHAFLHALVSNWISAASRLIPLGQTDSQRVLVKLEAAVSATANRALNATLDDLGSATFRADLASLRHETQ

SEQ ID NO: 11204 - protein, 146 aa, BradyrhizobiumColbertium
MGYLAAAYPWAKAAHVLFVIFLMSGLFMMPRFFVYHQETMLGSDEDKRWIERERRLRKVILNPSIAFVWLFGIFLTVQSGAWRFGWFHLKILVVLGLTGYYGWIVSYTKRLATGRRSLTNRQLRILNEIPSVAIVMIVIAVIVRPF

SEQ ID NO: 11205 - protein, 57 aa, BradyrhizobiumColbertium
MAILIPSLGFARFDSRGELRLAERLKDFLEEVVVWHNLPVGPLDRHPDFIMLRVSLP

SEQ ID NO: 11206 - protein, 163 aa, BradyrhizobiumColbertium
MLDWFMIGVTDFTIPVMVLAVAVRWWQREDRANERMLAVDAGLTFLFGLLINQFILLFVSRLRPYELGITHLIVARSSDPSFPSDHATAAMAIVAATLLQHRRLRALILAIPAALLMVSRIYVGTHYVSDVVGGMGTALLAAIVMRATVALRQPITEVIIRFP

SEQ ID NO: 11207 - protein, 82 aa, BradyrhizobiumColbertium
MEKRQADRRRTFKGGKIVFNHGRSIIDCTIKNLSQGGAALNVENTCGIPDEFILLVNADKARKACRAAWRTQTQIGVAFLEA

SEQ ID NO: 11208 - protein, 278 aa, BradyrhizobiumColbertium
MQERNAGRHAGQDFSSPSASIELQDFATKVPAVTLSFWVIKIAATTLGETGGDTVSMTLHWGYLASTALFLSILAVLVVLQTAAKRFHPFLYWATIIASTTAGTTMADFADRSLGIGYAGGSSILFACVIFTLGLWYWSQGSISVDTVNTPKVEAFYWAAITFSQTLGTALGDWTADSTGLGYEGGAIVFAAGLAVLAALYYRTTVSRVLLFWAAFILTRPLGATVGDFFDKPVSQGGLHLSRPIASAVIAVFIVACLLIFPQRAGRHPAGRLASDAV

SEQ ID NO: 11209 - protein, 171 aa, BradyrhizobiumColbertium
MQYGTTARVLHWLVVVLLLAQYSIGWLMPDIHRGEQPGIGMTLHASLGILILAAMLLRFAWRLAHPVAPESSLSTWQRLSSEMVHWSLYALVLATTLTGWLFASFRGWSVSFLFLTPLPMLGSVDATAARAIDGLHQAMEWTLLAFIVIHVSAALLHILLYRDGVVQRMLR

SEQ ID NO: 11210 - protein, 172 aa, BradyrhizobiumColbertium
MDARRLLDEGATLVDIREADEHAREKIPGARNLPLSKLDEADVGGITSRSSFIARAAPVPKPMRRGSPQNSMPLASPSSLMAGSTLGARLVPVVTDRRLPIELQRQVQIGAGSLVFAGTLLGLLASPWFFAVPALVGAGLMTAGLTGFCGMARILMRAPWNREVYGAPARAA

SEQ ID NO: 11211 - protein, 110 aa, BradyrhizobiumColbertium
MASATFDPETFEKQAVEVASILRALANERRLMILCRLFECGEDSVSSLAEAVGLSQSAFSQHLAKMRDEGLVTFRRESQTLWYRIADPRIEQLYATLHKLFCTPVKAKSR

SEQ ID NO: 11212 - protein, 53 aa, BradyrhizobiumColbertium
MREARDTKLSAPRLLLPSIQVNIRAGKFPSAEANGVRYLTIPVKLKGGAQTCV

SEQ ID NO: 11213 - protein, 437 aa, BradyrhizobiumColbertium
MRSLRLRLFAMLLAATGIVWLAAVVWIYVGSRDEVEHVLDTRLQEAARMVASLASGFDTLPGSSTPSPVQPLGSYERQLSCQIWSLDGRMVAKSSGAPDQQLSPAASGFSDRIIDGEPWRVFSVEDADHNLRVMVGDRVGLRERLVTDLIKGLMWPALLIAPLLGAAIWASVGQGLRPLRRMAQDLGAREPDDMRHVETERAPTEVRPLAVALNGLLSRVEAARRHEREVTAFAAHELRTPLAGLKTQAQVALAADDPKVVRGALEQIVTAVDRSARLVRQLLTIARLDSDTADAPLAPVAVGPILEEIVAATPRHERTTVTIDECVRTMTLNTNAECLQLALRNLHENAVQHTRGGRVAWTARGNALVIEDEGPGIPADELDQIGKRFFRGRLRSPIGSGLGLAIVKLALAKVGAKLTISNREGRSGTRSELTFDV

SEQ ID NO: 11214 - protein, 59 aa, BradyrhizobiumColbertium
MERPEQVRSRAELEERLYGWQEDVESNAVEVHIHNLRNKIGKDTIQTLRGVGYRMGTAR

SEQ ID NO: 11215 - protein, 162 aa, BradyrhizobiumColbertium
MGLASISLLIGSVLMIGSAGDDSLNATRILDRFVTRETGSEDPVRTIRSVAALDDELATARADEKPVMLDFSAEWCVECRGMDAVLRKPEVRARLQAFRMVRADVTAVDDASRALMKRFDIVGPPTILLFGTLGSVDPTVKIVGAVDADALLGKLSAATSAD

SEQ ID NO: 11216 - protein, 135 aa, BradyrhizobiumColbertium
MKTDGKIRLVYKDWPILTPDSIKGAQWALAAKYQNRYDAAHFAMMGIPGPKIPAERMREAIAKSDVDMDRLDADLKAHGDDITKLLRRNLAQADSLGLMGTPAYIVGQYRVTQALNYVGFKRVAADARARAAKNE

SEQ ID NO: 11217 - protein, 42 aa, BradyrhizobiumColbertium
MLESLRASGIDMEALQVDLRRHADVIDALLVRKSLSLAETPS

SEQ ID NO: 11218 - protein, 223 aa, BradyrhizobiumColbertium
MCAAAVLLPAALAGCVSDADIVPKAAAASYAPMSDPRYGAVSDGAYTVAAVPGGDLKTRYMRQLVDDPTGQPAGTVVVDPKNRFLYLVQEGGKALRYGVGVGKEGMAWSGTANVAMKREWPRWTPTTEMIAREPGKYAKWARGMEGGTQNPLGARALYLFKNGKDTLYRIHGTNEPWSIGQAMSSGCIRMMNQDVIDLYRRVPSGAKVVVLPTGGAETAASGG

SEQ ID NO: 11219 - protein, 127 aa, BradyrhizobiumColbertium
MSYYFSKTLDLPFAEAVDKTITALKARGFGVLTRIDVQSTLKEKIGADFRPYVILGACNPRMAHEALMAEDKIGTMLPCNVVVQEFDGKTEVAAVDPVASMQAIQNESLATIAEKVRGELRAAVEAI

SEQ ID NO: 11220 - protein, 63 aa, BradyrhizobiumColbertium
MSGRQNDASESGYSCISFDGSLDVPLPVELAQPVGNLVAVFGEKGDVRPHRALAATIIAPRRT

SEQ ID NO: 11221 - protein, 108 aa, BradyrhizobiumColbertium
MPQFDPELVSRMRSALEDAMTRVPSDVATVSTKAFLAECILKAAAQGHTSYADLVAAATDQIQALIRYCRELPTNHITKQEGTRPPLPTIFDKGDVRPGLRYEIGADA

SEQ ID NO: 11222 - protein, 527 aa, BradyrhizobiumColbertium
MAFASANGRPFKPSNLLQDDVMMSRRALLTGAALAGTGVVVAGSLWHDRAAPEPQLLRIPDLIDLRGMGQSASLKVQRGTTSFFPGRESRTLGYNGSYLGPTLRVHNGDDVEVAVTNALGDDTTVHWHGLLVPAEVDGGPHQLIRPGTTWRPVLPVRQPAATLFYHSHVHDRTAEQVYTGLAGVLLVTDDEENLLGLPSEYGVDDLPLVLQDRQFEDGRLVIPNGMITLMAGRRGDTMLVNGTVNPIARVPRQLVRLRFVNGSNARIFDLSFTDGRTFHWIASEGGLLELPVKLQSLSLAPGERAEVLVDFSDGRSVALQTAPDRNMPTMMRMVGGPRNFLRDLVDLDHERVLAFEPTETAGHRTKTTVPDRLVTRPNPDSSRAVRRRRFALNMGMGGMMAMMAGRGGMMEGGRGSGMAMAGINGRAFDMDRIDEKVRLGDFEIWEASGEMMAHPLHIHGVHFQVLSRGGAKPSVRDQGIRDTVLVEESVELLVQFTQPASKAAPFMYHCHILEHEDNGMMGQFTAA

SEQ ID NO: 11223 - protein, 81 aa, BradyrhizobiumColbertium
MISLFRTPEFAPFYLGLLASFVGGVGRQVSGLSSRACATKSGRNRLHETAAHRCFRDEEAAAHCRRAAVSSYQMTIFGIGL

SEQ ID NO: 11224 - protein, 350 aa, BradyrhizobiumColbertium
MVTVGFIEGIAEATASITKIFSGALSDRLGKRKLLAVVGYGLAAVTKPVFPLASTVDRLVAARFTDRVGKGIRGAPRDALIADIAPVHLRGASFGLRQSLDTAGGFTGPTLAIALMWWTADNFKAVFWFAVFPPFWRWRSSSSPSMSRRGRRGCARCAIRSAWPRSSVSARCTWWVVAVATVFTLARFSEAFLILRAQNVGLPIALVPAVLIVMNVFYALAAYPAGILSDRIDWTGLLALGLALLIAADLALAFLPTTSGIAVGTVLWGLHMGFTQGLLATLIADTSPPELRGTAYGFFNLLGGLAMLAASVIAGALWDAAGPSGTFVAGAGFALAGLLAVRGKNTRACL

SEQ ID NO: 11225 - protein, 73 aa, BradyrhizobiumColbertium
MLSDGAARFTKSQAGYEMAEASRQKYSVRDIPTGVWALGFVALLMDVSSEMIHAASGIPGDRARHFDGHGRFH

SEQ ID NO: 11226 - protein, 447 aa, BradyrhizobiumColbertium
MSAATGTLYWAMATNLNQEDRRILTNNLDNLRLLLKPQHGSGFLTEPAAPDASPADTQIYIRVLDRNGRLLVETPGMTQEIPPPSAETLETLPTGPPETRDIATRSKRSFKILTTRAPADARSPDAQYVQVAMDRGAEEKTLRRYRERLYLILVLAVVLSSLVGYAIARSAMRPVGGISKTAERIRSTTLHERIDTADLPTELLGLSSTFNHMLDRLQGSFDRISQFSDDVAHELRTPVNNLRGEIEVALTRARSNEDYRDILGSSLEECARISRIIESLLFLARADNAVGQLDVEEVNVRDEIASVKDFFEPSAAEKGIDFELGAPPALTARVDRTLFRQALSNLVSNAITHTDRGGRLRIKAQASKGALAVAVSDTGSGIPPADLPRVFERFYRVDKARTGSQHNVGLGLAVVRSIVVRHGGHVEIDSHLGEGTTVTMEFPRSCA

SEQ ID NO: 11227 - protein, 224 aa, BradyrhizobiumColbertium
MKILVIDDEEKSAAYLKKGLEENGFVVDVAHDGESGLFLARTGPYDLIILDVMLPVIDGWSVMTEIRRTQSDVRVLFLTARDGLQDRVKGLDLGADDYLVKPFAFSELLARTRSILRRSAKREQTILRLDDLEIDLNRGRATRAGKPLDLTPKEFLLLSLFLRRAGDVLSRTVIAEQVWDMNFDSDTNVVDVHIRRLRSKVDDPFDRKLLHTVRGIGYVLETRS

SEQ ID NO: 11228 - protein, 39 aa, BradyrhizobiumColbertium
MFASAGAPNVGRSHVQSALIESEVHLQDDDFVILASAPD

SEQ ID NO: 11229 - protein, 224 aa, BradyrhizobiumColbertium
MSPQYTIAFAALDNRGSFNVDRPRYSIGNSLSAKLSATPFEDRESGQKLTLGGGIDHTMDIHNGMLRLLTAVGQSGLGALPAEGDKLTVEDDVSYSFKAFGHPITLEAEGLLSNFSGSKTKIGGGYVMAQLSLFDTEIWGDLDLFVRHDVVNASAAGFGGSARHQAVRLGINYNPPPHFKKLINLHLEYAHNRIVGPAGMVFGPRDSDELMLEIRASLQLYQRH

SEQ ID NO: 11230 - protein, 467 aa, BradyrhizobiumColbertium
MWTAFAVPLTIVVAGCAQYRPEPFSAERHAAALEERSLHDPRLGEFVELGLPRQRKGGRAWELSSLTLAALYYHPDLDVSRAKLVSARAAVITAAQIPNPTLSASATYNATMTAPTPWTVGQIVGFLIETMGRREYRIGQAENLVEAAREDLATATWLVRGHVRAAFLNLWAAQRRLELNGRRAALQRQLVDLLQRRFSEGQASALDLTRERINLNQVSLAVRDAERQRAEARAQLATAVGVPLRALDAISLSFGAFERAPPFRLEAGELRREALVGRSDVQALLAEYAAMQTALQLEIAKQFPNVNVGPGYTFDQGANKYNLDLSFELLIFNQNQGPIAEADARRKDAAARFDALQAQIIGAIDTAVSSYRAINQTMTTADALVATGRRRQDEVSRSLQAGDVDRSTLVTAELEVAAIEISRFDVLVQQRQALGALEDALQHPIFEPRVRLFVSETNPRGPSGSGI

SEQ ID NO: 11231 - protein, 360 aa, BradyrhizobiumColbertium
MIESKPSKKRWRPLRRFLLVLVLAGVGGGILWGFVAGRMGGGLEAERERPIKAPLRVSLDNDEQVVTLDAEAQKHNGIETSPVAAAPYRERVRAYGTVVDLARLTDLSNSYQNAKSSLQAANARLAASRPAYERAQTLNKNEQIVSQATVQAAQATYGADVATQASAESQLRTLAATAQQEWGPVLGKALIEGSPTITRLIERQDFLLQVTLPPGVSIPTPPPTAAILTANGLRADIRFVSPATRTDPKIQGVSYFYIAAADSGVLPGMNVIAYLPSGATVEGAAIPEPAIVWWQDRAWVYRRSAPDKFTRVSIATDFPAPGGGYVVKGFPKDAQIVTRGAQALLSEEFRAQIQVGEDKK

SEQ ID NO: 11232 - protein, 1068 aa, BradyrhizobiumColbertium
MTGAPPSGPQAAVIGFAIRFRGIVIALACLLLAYGVYSLGRVKYDVFPEFAPPQVGIQTEAAGLTPEQVEILVTRPIETAINGVPGVQTLRSTSIQGLSVVTVFFDPSSDIYRDRQVVAERLAAAAQQLPVGVQPPSLTPLTSSTSTVLVAGLTSDSKSLMELRSIAEWTVRLRLLAVPGVANVAIFGGETRAIQIQVHPDKLILYDLGLNDVLTAARKATGVRGAGFIATKNQRIVFQTEGQSLQAAQIARTVLLSQNGSSVTLGNVADVRDAPEPAISGAAIGGRPGVILNVSEQYGANTVDVTTSVEAALEDLRPGLAASGISVQSDLFRPANFIHTATSNVRDSLIIGGVLVIAILFLFLFDMRTAAISCIAIPLSLLAGTIVLQVVGATLNTMTLGGLAISIGVVVDDAVIGVENIVRRLRENRRLPEPLSEARVILDACIEVRSAVVYATLAVILVVLPIMALSGLAGRLFAPLGFSYTLAVLASLLVALTVTPALSMALLAGRTAAAHDPPVVRWTRAAYENLLRGIAQQPRTVIAAAVAFTLVGCAALPFFGGGFIPELKEGHFIIHMSAVPGTSIDESLRIGARVADALRTLPSVRSVAQRVGRAEKVSDTWGPHYSEFEVDLKPLSGDEAEGAQAEIRKTLAGFLGVNFSVKTFLTERVEETLSGYTASVAVNIFGNDLDVLDRTAQEIARVLGGIPGATEVQVQSPPGLPQLTIRLRQPDLERWGFDAVEVLDLIRTAYQGDVVGQTYEGNQVFNVITILDPESRGSVTKVGDLPLRVTSSPGTASATARASSSGGGTYVLLKQIADIYEVAGRYQVLHQGGQRLQTVTANVAGRDVASFVQEARAAIGSKVRLPAGSYVTFAGAAEAQSQSQRDLLLNSLIAAVGIVLLLSIVTGNWRNLLLVLVNLPFALVGGVLAVFATGGLLSLGSLVGFVTVFGITLRNSILMVAHYEHLVEVEGMSWGPDTAIRGAADRVTPILMTSLVTALGVLPLAIGMGDPGREIEGPMAVVILGGLLTSMALNLLVLPTLALRFGRFEAEANEFATRQASPGPAPAE

SEQ ID NO: 11233 - protein, 252 aa, BradyrhizobiumColbertium
MGYELADYEWVGIKPMLPNKPRGVPRVNDRRVLNGIFWVLRSGAPWRDLPAAFGPYTTCYNRFVRWRRAGVWGRIMDALAAAHDAAVQMIDTSIVRVHQHGACTRNQCQSMGSSRGGLTSKIHAVVDSNGLPVRLALSPGEAHDVRLAGKLLSRLKSGSMLLADRGYDADWIRELAMKKGTWANIPPKRNRSDPICFSPYLYRARNRVERFFNKIKQCRRVATRYDKLAANYLAFVQLASIRLWLRLNESAS

SEQ ID NO: 11234 - protein, 49 aa, BradyrhizobiumColbertium
MILKESPGVGRHAQLLKPVFDLLHSMLDVPLPGIKPDYGEQCNIIISAK

SEQ ID NO: 11235 - protein, 1074 aa, BradyrhizobiumColbertium
MSAYARRFLENHVDFSVLGDLSDQDLRELGVVLGDRKKMLRAIRELHPPGKIAPTAIPAESPPDAAERRQLTVMFCDLVGSTALSTQLDPEDLRKIIGAYHRTCAAIVERHGGFVAKYMGDGVLVYFGYPQAHEHDAEHAVEAGLALVGAIAKLHTAAPGRLEVRVGIGTGLVVVGDLVGSGEAQERGVVGETPNLAARLQAVAQPGIVVIADATRRLLGDLFQLTSLGAQDLKGLAGPVHAWAVEGMNTIEGRFEALHGRGLGALVARENECASLQRSWSKARTSQGQVVLISGEAGIGKSRLVTAVMEQTAADAPTQLRYYCSPQHTNTALYPIIKQMERRANFTRNDDTKTKLDKLEAMLDHSSVSVVHKAVLADLLELAEDDRYPAESLTPAQRRQRTLEAIVQDIQSLAHFGPVLLIFEDLHWIDPTTLELLDQIIDAIAVLPAMLVATFRTEFVPRWSSTLHVTVMSIARLDPRDTEALVNDVIGAASLPAHVRQEIIDRADGIPLFVQEMTKAVLEAGTEARTVGAVPAAASPVPATLHASLMARLDRLGPAKEGAQLAAAIGREFSYALLSSIAPVAEPELGRSLDRLVAAGLLFRQGEPPEANYLFNHALVQEAAYGTLLREKRRVLHAALVQSIELDFADIADSQPEVLARHCTEAGLFEKAASVWSKAGRRSLSRSALVEAAEQLSRALDLIAALPETTGLRRERITLQIELANALIHTRGHAAPETRAAFAQARALVEQAETMGKETDDPLAPFAVLYGFWVASRMSFQADATRELAVQFQGLAEQRQAETPVVLGHLLMGISLVLAGHLTAGFAELDRVEALYDRARHRPFATRFGHDILVSALCWRALSNWALGRAEAAAADAAHALKEAREFGHAASLMYALSHVSLTLIHLGQLATVAVLADELVQLAEEKLSTFWKAYGMLLRGRGLSLEGKNHAAADLMEAGISAMRSTGATAYAPWYFSALAAAYAQSGRAEAGQRLAKDAIARISESGESWQEAEAYCIAAEVELALSPPNIAQAKAHFDRALVVARQQMAKPFELRVAEGLRSLSQSEANTRL

SEQ ID NO: 11236 - protein, 397 aa, BradyrhizobiumColbertium
MPHASDMQSSSMDIVGNAHPAARRRDLRLDLFRGLANWAIFLDHIPNNAVAWLTTKHYGFSDAADLFVFISGYTAALVYGRTMLERGFVPAAIRLLSRAWQLYVAHVLLFVTYVAAIGYIARTYEHSHLLDEFNVAQVIKNPLATLAHGLTLGFKPLNLDVLPLYIVLMAAFPPVLWVMTRRPDRTLAVSLVLYFASRHFGWNLPSFPSGVWYFNPFAWQLLFTLGAWAALGGAARCRSLIESNVALVLGLTYLALALVLTMAGRFDQFAHLLPDWLVLAVNPNDKTNLAPYRVIHLVVLAVLAVRILPADWRGFDSPFAKPLMACGQRSLEVFCTGIFLSVAGHILLEIEPDSFAFQMLVSAAGIGVMTGVAYYRSWARNLGGQSSAGSGTRGREA

SEQ ID NO: 11237 - protein, 37 aa, BradyrhizobiumColbertium
MTGERTGSATPLVAAAALDLRRDLAMALLSIGKESPV

SEQ ID NO: 11238 - protein, 60 aa, BradyrhizobiumColbertium
MFFEECVDIEVAVSVKELSPGVRSAFDAVNRLALGGIWIPLAAAAWAVSKFVRRNHPRAE

SEQ ID NO: 11239 - protein, 139 aa, BradyrhizobiumColbertium
MLKVFFGRARPMQFFANGVYGFDFFHVEAAWLSFPSGHVATVAALTAALFFLGSRAWRVAASLSAAVLVGRVVVGAHYPSDVLAGAACGVLGAYLVFRAFRVRRPWFPLHSTATDAMEGVVEQALAGNPRNAQSGNRRD

SEQ ID NO: 11240 - protein, 61 aa, BradyrhizobiumColbertium
MGTGSEGWSQPLSGAPLAGRTLESELLSLLLARGEQGLHLNSHAFGLEIDLLRAVIVLLGD

SEQ ID NO: 11241 - protein, 88 aa, BradyrhizobiumColbertium
MDRPHEGVVLPVDSAQSQSGSATAILAHKTSNGKTKDRQRLAPVTEQHYSRSQRIDLKAEGMALKALLAAYAKESRKFRDLRADRIAA

SEQ ID NO: 11242 - protein, 262 aa, BradyrhizobiumColbertium
MTIKADPTEFAGKRVLISGGSKGLGRATVDRFLVGGARVITAARGILEPVDGVAFVQADLTTAEGGEILAKAALEHMGGVDILAHVIGGSSSPGGGFAALTDDHWLAELNLNLLATVRLDRLLVPQMIERGTGTVVHVTSIQSVLPLPESTTGYAAAKAALRTYSKSLSRELGPKGVRVNAVSPGWIMTESSVDMLKRLQAANGGSIEEARQVVLDGLGGIPIGRAAEPYEVADLIAYLASDRAAAIHGAEFVIDGGTVRTV

SEQ ID NO: 11243 - protein, 109 aa, BradyrhizobiumColbertium
MSIELPKPIADYVEANAQLDVDGMLKPFAANAVVLDNGHRHEGRAEVRTLLEEAVVGAKAIFAPDTVCHEKGQVVVEGLAHGDFKGSPIRFTYGFTLENNAITALEITT

SEQ ID NO: 11244 - protein, 297 aa, BradyrhizobiumColbertium
MPKHGLIEFDAVLAIARRGSFRAAALELGLSTTALSNVIGKLERQLGVRLFNRTTRSVSLTDAGRKFVDHVGPAVKTLHDAMGAARSQQEIPSGTLRINAFATGAREVLGPLLLEFLRRYPHVHIDLVTEGRIVDIVAEGFDLGLRSADLVPSDMIAIPVGPPRSFAVVASPEYFKANGKPRVPPDLLRHSCLRIRLPNGALHRWQFEKEGQPVQIDVQGPITLDEASLSRITVLDHVGIGYFMESDVREDIEAGRLVRVLEDWTPLLAPLCLYYPSRRNPSAAFKALIDMARGAAS

SEQ ID NO: 11245 - protein, 309 aa, BradyrhizobiumColbertium
MTTDLNLVAVFIAVAEARSFRGAADRLGVTRSAVSQAIRRMEDRLGVALVQRTTRSVSLTEAGLRLHERVAPAVAEVEQAIDGARDRDAQPTGQLRLAVSSIAERFIRGPLLAEFTHANPGVQVDVTVTDEEFDIVAEGYDAGVRLGEVIEQDMVAVPVSGDQRQLVVAAPAYLERFGVPSHPRELSQHCCIGWRPAPHVAPYRWEFAEGGREFNVAVEPRITTNDMWVMVRTACAGGGLTFGMEETFRPYIERGELVPVLEEYCPFFPGFFLYFTDRRNLPPKLRSLIDHVRYRPGGKNQKSPTGHAR

SEQ ID NO: 11246 - protein, 353 aa, BradyrhizobiumColbertium
MTSLDQYRLLGRSGLRVSPLALGTMTFGTEWGWGADAGEARRIFDLYVERGGNFIDTSVNYTNGASERLVGQFARDKRDRLVLATKFTMARDPGNPNSGGNHRLNMVRSVEQSLRQLDTDRIDLLYLHAWDATTRPDEVMRGLDDLVRTGKVQYVGICNTPAWRISQLQTIADLRGWSPFVALQIEYNLVERTVEHELIPLAAALGLGVLPWSPLGGGVLTGKYSRADLKDSQERAVGTTRASVIASSGLLNERSLDAAETVRAIAWELGATSSQVAIAWTLANPAITAPVIGARTLEQAEDNFGAVGITMSPEQMARLDHATAPDPIFPGRFLRRPMVEQLIFGGAAVARRG

SEQ ID NO: 11247 - protein, 171 aa, BradyrhizobiumColbertium
MATLLNRALASCVYAIIVTASTLTTAAPCGQAKSVPEANKLIVTDAFDRWAAGGTTFFNDLLHEDVVWRIKGSGPSAGEFRGRDVFLDRAVRPFASRLSTPVRPTIVRIFADGDHVIAHWEGSGVARDGRPYANSYAWILLMQDGKAAEVTAYLDLAPYDDVLRRIPAPAQ

SEQ ID NO: 11248 - protein, 423 aa, BradyrhizobiumColbertium
MFDKTYRQRLDADLARWEADGVIAPAVAASIRNALPPLPAGINIAMVVAIVGGLLIAAAFLAFVAAHWTEIARLMRFAILLAGMVVTGVLGAWFATTGRNVLADLCAGIGAIIFGAGIALVGQMYHLGEDFAGGMLLWSVGAFAAAVLTGSRGALAVGLVSAGIWTCMRTYDAPDVLHLPFVAVWLIAAGLAFAWNSRVAAHLVALALLPWWIATSLRFEFDGAQPSFLLANGAALLFGAGLAIAAAPSPRALRLGSVLSIYGAFALAGVAALEVTTVDDIVRLRTATAPAQPPWAILCGAAGVMLALVSAALTRRTGEVLAACAIALVLVAAPLWPAEAAGEPWFAYAALLCAMLCLVVSGMLDEVRPRLIAGWLGIAAIIAGITWAVKGSLLRRSAFLAAAGVVAVVFATALGRALPRTER

SEQ ID NO: 11249 - protein, 204 aa, BradyrhizobiumColbertium
MTGLLASVTKFGQRMPKAVLFGAAVLLQSALLVLMVADRMQILREGVEVTLQTQPVDPRDLLRGDYVVLRYDISQLPAGSLKGKVADSRHPDVFVKLAPNADGIHQAVSVHAEPVAVTAPEVLIRGRVANYGGSCGDDRRRFCDKLPIKYGLESYFVPEGEGRKLEDARNQQKLRIVAAVLPSGRAAIKRLLLDGEPVYEEPLY

SEQ ID NO: 11250 - protein, 44 aa, BradyrhizobiumColbertium
MYVRAVAAAKEIVARRHGEADQQPEAEQDAAQPASVFDLFSGTK

SEQ ID NO: 11251 - protein, 535 aa, BradyrhizobiumColbertium
MYLRILATILIGGMMVDPVPLRPRVVEEQQKLATEISDRLSQELVIALVGPVGSGVSTSGRLLSEILTQHFKYDVAPIIGMSDIIRTEARRVDVTTPPQNPLNNYIEVMQAAGNRLRERFGNNYLAEKAVERIAKFRESRGGYRSEDGALIPGRRAYIIDSLKNAEELALLRQIYRDTLMLFGIFAPDDIRKKRLVDKGAEEKDVQAVLDRDQGEPATFGQMTRKIFVLSDFFICNDKKEEELKRRLHRYLEIVFDTNVHTPTKSESAMYEATAAMASSACMSRQVGASIISAKGELISVGWNDVPKFKGGLYVEDDQSIWDEAKRAIDDKDHRCFKWGSKICHNEVRRTKIGDRIAKLIRESGLLKAGTKVEDVRKILDGTEVDDLTEFSRSIHAEMESILAVAREGRHSLVGATMFTTTYPCHNCARHIVAAGISKVIYIEPYRKSLAIALHNDAITEDPEDRSKVVFQQYDGISPHLYLRLFRPSTPRKQDGHFARQPAEVALPVFRVPLDSPVEYEAKIIADLSAKEDTDH

SEQ ID NO: 11252 - protein, 119 aa, BradyrhizobiumColbertium
MDNASFIRKTFSVLGGLLIWAAYFGFVYVFNALACARSFHRLHLLGFSVVPLTILSGAAIAATGVLVLMFIALRAPDHVEDTRDSSADFLRHLAVGVALLSLLAIGWIGLPAVIVPPCG

SEQ ID NO: 11253 - protein, 859 aa, BradyrhizobiumColbertium
MTTTAEHPAIANSRETRSIGTDGFPNAVPRPEGELDELERIWAPPRGFHLISAVNNSYVGVWYVGASMLFFVLAGILALMMRTQLAVPESRLIGHALYNQLFTMHGTLMMFLFAVPAVEAMGVYLLPNLQAARDLPFPRLSAYAFWAYFVGGLAFFCSLFFGLAPDGGWFMYPPLTSYTFSSGINADFWLLGIGFIEISAIAGAIEIIVGVLKTRAPGQSLDKLPVYSWAMLIFALMIVFAFPAIIIATVLLELERAFHWPFFLAEKGGDPLLWQHLFWFFGHPEVYIIFLPAAGMVSMIVPAMAQAPLVAYRLVVLAVIGTGFLSFGLWVHHMFTTGLPALSVSFFSAASMAVSIPSGIQVFAWISTFALGTLQWKTPSYFILGFLFIFTLGGLTGVMVAMAPFDWQAHDTYFVVAHFHYVLIGGMVFPLFAAFYYWAPTISSKPLSERLGKTAFWLMFVGVNVTFFTMHLTGLMGMPRRTYTYIAAMGWGPLNMISTVGAFMIATGVLTFLIDLARNFRPFGASAGNPWNAGTLEWLPTGNYQTRSIPIVTSREPLWDQPNLAADVQEGRYYLPGAPTRSRETIVTSPIEARPQYVLRMPGPSWPPVLAALFTAAFFFGLTLKLYIPAFACGALATACVLWWLWDTDPGPDVPTVDIGGGLVLPAYVTGSVSHSWWAMIVLILVAATAFACLLFSYFYLWTVNPQLWPREPADLPDLAWPVASAVVYLLSGAGVFGASRLLTRVPSRSSAPVVFALVAATLLIPLPVAIEVLAHRSVGLSPSASSYGATVYAVVSWQGFFAAVLMVMGVYTAARSLTGRLSAERRVTFDNTQLLWQYTIVQGIVSLVIVHLFPRLLG

SEQ ID NO: 11254 - protein, 342 aa, BradyrhizobiumColbertium
MKALSSFAVLAAGAGVSGCTWMLPEESHGSRPSLMWLQSALITSGPNAEAIRTLSWVMFAGGAAIFLLVLTFTAHAVFGGTRRGWMSGHRFVIVFGVAMPIAVLTILLVYGLMLTDHSAARENPVARIEVVGERWWWRVNYLDPQGERQLASANEIRVPVGAPVEFILRSNDVIHSFWVPSLAGKLDMIPGRVNRYQFSAARPGVYRGQCAEYCGAQHALMAFYVVAVERENYPTWLADQRRPADDPVTELGVKGKDLFIATGCGACHTVRGTAASGQIGPDLTHFGSRRSIAAGSFPNNAGTVAGWIASAQHLKPGNLMPSFANLRGEELRAIAEYLEGLK

SEQ ID NO: 11255 - protein, 47 aa, BradyrhizobiumColbertium
MIPNEPTVLVAWLRDAPSLSQRTAMPRLPILYQEAVHIAAYLYTLRK

SEQ ID NO: 11256 - protein, 42 aa, BradyrhizobiumColbertium
MASPASDRRNELSAFCRISIHESALIKVGFLLSCLLKIGTAA

SEQ ID NO: 11257 - protein, 363 aa, BradyrhizobiumColbertium
MRKLLWGALISICAAVTAAFLFAWSGVYNIAASSGHLAVVGKFLQFGMQNSVETYAAGIEVPSLGPAHVEQGMLYFHSGCAPCHGAPGLSRNRVALGMLPQPPDLTRASNDWSGAQLFWIVKHGIKYTGMPAWAAPSRDDEVWALVAFLRRMPQIPAGEYRAATRLRDGESQGARTIANEGLIVGPFACGGCHGARGEGSSLGGVPRLAGQKTAYLEMALEDFAAGTRSSGMMEPPVANLDRQQRGELARYYSSINLDEVAEHNIGERIDEPRQLGAILAERGAPSRGIPACQACHGRDGRASDNTPQYPALAGQHTIYLTNQLRLFRAGKRGGRLAEVMSAAARGLTDEDIEGVAMYYNALR

SEQ ID NO: 11258 - protein, 181 aa, BradyrhizobiumColbertium
MFFGSWTDLVRILSVGATSYLALVVLLRISGKRTLTKLNAFDLVITVALGSTLATVLLNKSVTLSEGVLAMALLIFLQLAITWLSVRSEKVQRLVKAEPTLIIRDGSFLENALRRERVTHEEVLAALRSHGVTDVRRVAAAILETDGSVSVLSEGVAGKAANNTLQGVAIHHSTSESAAAP

SEQ ID NO: 11259 - protein, 331 aa, BradyrhizobiumColbertium
MDRRQFLGTTAGLALGTFAASAPAIAQAKTKVRVGYLHTVAVDGQIWTGMDRGSFEKQGLDLELRQFNTGLEIFQALIGGSLDVLSTGAVLSNFPARGQGKVFLINDIEVATAQLWVRGDQGIKSFEDLKGKRIATATGTTAHVFLDTALRANKVDPKEIELVNQTMPAAVTAFISGAVPAVALWVPFNVTVRDKVPGAVKLADASAYYPKAAIIGGWAAANDYYEPNKETLAKLIRGWADANDYIVANSTEAMEKLQKGHYSQTPLADINESFRAQKMFTSKDWKRMYSDGTVTNWLQQSTDFFMANAGIKDFTPASKYFDPSLYLKTIA

SEQ ID NO: 11260 - protein, 269 aa, BradyrhizobiumColbertium
MTKRAQFDRVSLSFDTAKGRLNVVEDVTYDINDGDFIAVIGPSGCGKTTMMSMLAGFQKPTTGNVLFDGRPVAGPGPERGVIFQEYGVFPWLTVKQNIAFGLTLNANHVATAERDAICDHYLGLMGLSDFANSYPKHLSGGMRQRLAIARAYAVKPQFLLMDEPFGALDAQTRSNMQNLLLKVLETEGKTVMLITHSVEEAIYLASRIVVVTARPARIKEIIDVPFAYPRDESIQERPEFAELRGHIRQLVMDEYRAQQAQMRPVSFSE

SEQ ID NO: 11261 - protein, 256 aa, BradyrhizobiumColbertium
MNGAGLRRLGLGLIPWIGAILLWYAVRWSGFVNVSLIPAPHQVAAKFFELLTREGLLIDIFVSTRRVFLGVALGILVAVPVGFLLGWYRPARTFADPMINFFRALPPIALIPLVIVYFGVDELAKLVILFYASFFSGVIVMYEGVSQITPLYIRVAQTLGANQAEIFRKVIIPLTVPHILTALRVALGVAWATLVASELIAAQRGLGAMIQNASTYFLLDVIYVGIICIGLIALIMDLILRKVTARLLVWQDRAIA

SEQ ID NO: 11262 - protein, 375 aa, BradyrhizobiumColbertium
MTPPPFTIRSVQAFGYRYPLTMPVITSFGRMNDRPAVFVRVEDTDGYVGWGEVWCNFPAPGAEHRVRLVNEVLAPALVGFHATEPSAAFEHLTQGTSVLALQSGEAGPFAQSIAGIDLAVWDLHARRQNLALWRLLGGAKQKIKVYASGINPIGSERTAEAALSRGYRALKLKIGFDPAGDRANLAALRRLVGEGLLAADVNQGWIIAQALELAPHLERFGLAWLEEPIRADRPREEWKQLHEIVRFPLAAGENIASRAGFAEVLREPVLGVVQPDIAKWGGLSACAGIARDILASGKMFCPHYLGAGIGLLASAHLLAGVGGDGLLEVDCNENPLRDRFCGPVLDARDGVIELGDEAGLGITPNLASIEEYRTV

SEQ ID NO: 11263 - protein, 171 aa, BradyrhizobiumColbertium
MPKPENFPIENIFVPTKQKKALNPATVAEIAESMLDIGQQTPISVRRDGDRLVLVEGLHRLEACKALGETTILGVVVTAEFADAKPLLAERPEVEAERLKMARLKQLRLEKEAAEASAAASRGAGATQASRTHPAKGARDNPKASPGRTVKSKPKSLSDWITQQKGSGGRY

SEQ ID NO: 11264 - protein, 187 aa, BradyrhizobiumColbertium
MELSGKKIAILATHGFEQSELEMPRDALKAAGATVEIISPQAGEIKGWDEKDWGRPVKVDKTLDQAKPADYDALVLPGGQINPDLLRVEPKALQFIKSVFDAKKVVAAVCHAPWLLIETGIAKGRRMTSYKSIKTDVANAGAKWEDSEVVVDQGLITSRNPGDLKAFSAKIIEEVREGRHTQRSNAA

SEQ ID NO: 11265 - protein, 37 aa, BradyrhizobiumColbertium
MRLQAAHSDERGSLLDLYMRAMESVAGAGEGGLRQPG

SEQ ID NO: 11266 - protein, 165 aa, BradyrhizobiumColbertium
MLNFQLPWHEIFAPTHSLIEMIVRGTIMYFGIFTLMRLILKRQTGGISIPDVLLVVLLADAAQNGMAGEYRSITEGLVLVATIIFWNLAIDWVGYHVPFVERLVQPPPLLLIKNGQVLRRHLRQELVTMDELLSKLREEGVDSPADVIEAYIEGDGNISVKKKEK

SEQ ID NO: 11267 - protein, 88 aa, BradyrhizobiumColbertium
MSDITIPGGKIRSFVERIENLDSEMQELSEQKKEVFAEAKGEGFDVKILKEIIKLRKEDKNERDERESLLDLYMRAMETATPEQAKAA

SEQ ID NO: 11268 - protein, 93 aa, BradyrhizobiumColbertium
MKTKTIAYALGTALVLGGLATSAAEARPRKAQVVRAPQERLIITAPVLRPTPWDYNIVPRYRYRPEDDKVDPYGPPLVPSYVRYQGWRWPYWW

SEQ ID NO: 11269 - protein, 97 aa, BradyrhizobiumColbertium
MIVHSRRAAPVLVCAKYLKRSDEGRDVRRALKSELKASKRDGIKPAKLVMTGCFGLCPKKSIVLASGASLARQEYLLVADRDQVPAALARLNGGRGK

SEQ ID NO: 11270 - protein, 220 aa, BradyrhizobiumColbertium
MAKQAKSKPKRKLKTYQTSLGFYDQAIAAPSMKAALEAWGASSNLFHQGVARETDDPDIVAATMAKPGVVLRRPVGSDGRFTESAELPTDLVESEARPGRKARKPAKKPAKKPAKTAKKTSREEDDAAARKAAAAFEKEERRRESERRKEEAARARARARRDKAVAAAEAALDKARREHDAKAEAIEAERAALDARAEAEQERWDKQRLKLEQALRRAHQ

SEQ ID NO: 11271 - protein, 134 aa, BradyrhizobiumColbertium
MSFLLNIDVPDVGKATTFYTEAFGLTVGRRFGTDFVELNGWPAPVYLLTKQAGTPGAGGDRRRYERHWTPMHIDVVVDDVDAAVARAVGAGAILEAPARDAPYGRIAMLADPFGHGFCLLAFSGKGYDALLGSS

SEQ ID NO: 11272 - protein, 119 aa, BradyrhizobiumColbertium
MSHSVRISIGIIVLIVLSVLFLFSVVHTAAGAPRPASRMAAEGHRLAQAWCQSCHAIEPHMTDFFDEAPSFQAIADRRGTTALSLKVFWRTSHQNMPNIVISPEQADALSAYILSLRSR

SEQ ID NO: 11273 - protein, 45 aa, BradyrhizobiumColbertium
MNAILASGMIDAAAPARVELHQRHCATALLTQINLTGRCRPTLAR

SEQ ID NO: 11274 - protein, 57 aa, BradyrhizobiumColbertium
MNENRYYGVRVEGAKYGVGFGSALAIAISYTNNHSILWAIIHGILGWFYVIFVALFR

SEQ ID NO: 11275 - protein, 116 aa, BradyrhizobiumColbertium
MPDTMKCPACNSEHAYQDRDLWVCPECGHEWSGAADALADTAQDAGVRDANGNALADGDSVIVIKDLKIKGSSSVVKGGTKVRNIRLQDASDGHNIACKIDGIGAMNLKSEFVRKA

SEQ ID NO: 11276 - protein, 306 aa, BradyrhizobiumColbertium
MDQRTSGADALTQKNDAAPALLGVVCGLAAALFWAFGFAATRHGLKVGFTPVDLLVHRYVWSGIAFLPLVLRAGVSDLCGIGWSRGLVLMVLGGPVMSLISYAGFLFVPLGHGSVIQPSCATLGGLLLAALVLKERISASRLAGAIVIVGGLGVIGAESIGHIGAEGVQGDLIFVLAGLMFAGFGAMLRRWRVSAVSAALVINVLSLLLVPVYIATVGLAHVAAIGFTENAIQALAQGVLAGPAALYLYAVSVQRLGVARAAVFPACVPALTLLTGWLLLGEPPTMLQTAGLVTVLCGFYLAQRQS

SEQ ID NO: 11277 - protein, 84 aa, BradyrhizobiumColbertium
MNKKTLSIAAAVLTIAGGTAAVAAELPTYEAGGFPVSPLQVRVLGAAHVEQQVEAPATVASVHQAKVLSPRKVKTADVTTGAAR

SEQ ID NO: 11278 - protein, 67 aa, BradyrhizobiumColbertium
MTHPSLRPMDAFDPTEPAILHDRLSDTIITWTADQADDYRRASRPGADGTVAWRNYVFDGWGNVLGG

SEQ ID NO: 11279 - protein, 56 aa, BradyrhizobiumColbertium
MKLKCILAEFAADESGATAIEYGLVAAGIALAIIEVIHALGINLVAKLQSLATALK

SEQ ID NO: 11280 - protein, 430 aa, BradyrhizobiumColbertium
MNDRRSLLVAVSCPSAVLAGWLALSFSAYAPALIENSGANVAVVSPAKDISRLDLADVPRAATIEDGVALTAEIAAAITATPAPATTPQETAEAPAAAVKLASADPLLILPTDAAPVAQISPEAIVSEAAPAPEPVKLASADPTEIVTTDALSPAAIASGPVPPASKASPPADTVAVLDECFIMEACVDRYLWTLYQRTAKEDTMKVQERRAVTIKRKGKTVTVMRSFTKLVDQDFTWKDPKAAERAGMSMMDYVIGGMDKSFKLKLFRMMLAAEAAGLSPGITSAFRDDYRQSIASGLKAASDRSYHGGSARGGYGHGMAADIVSTQGNNRAQRWVSTEILWKWVDANGKAYGIGRPYLGRDPPHVGPIDGKEYISRRGTADRKEAANVKPKKTHTAARAKPPKAQAAREQKGPAKPQKSAQSGVKPAT

SEQ ID NO: 11281 - protein, 270 aa, BradyrhizobiumColbertium
MLVISIQSQVVHGHVGNSAAAYAIQAEGVNVAAVPTTLLSNHPRYPTLRGRVLETGLLADLLKGVEERGLVEEAAVLVTGYLGSPGNANVIADFVERALMRNAKLVYLCDPVIGDDGRVYVADGILDVVRHRLLPVAKLTMPNQFELELLAGLAIADAQDLRAACAAIARSGPIDVVATGCTLADTAEGRLETILCADGDLSRFATPRLPIRPYGTGDLLSGLIAAQLAKGETTEVAVQLAVETIFAVLVRTQEAGTAEMRLVPLPGRKP

SEQ ID NO: 11282 - protein, 114 aa, BradyrhizobiumColbertium
MTSAFNAYAALALAIVFEVTASAFLQQSAQFTRPWPTLAMVLFYVASFYALSVAIRVIPLSIAYAIWGGVGIILTATVSFVLFRQMLDAAAFVGIALIVSGVVVINLFSETAVH

SEQ ID NO: 11283 - protein, 55 aa, BradyrhizobiumColbertium
MVAERDNEKYSFDRESRLLIVAKAKVWASEGWRVVITDQDGKAYAPPEFDQLSAA

SEQ ID NO: 11284 - protein, 92 aa, BradyrhizobiumColbertium
MRQSQAETRRHNVAKRSMTKEVRQLTSLIAGLRKSLEGIQKERMSTKLSSPEMGFLDERRNNLLLTIAALDDRLSAVQGLINLGRPHIIRVH

SEQ ID NO: 11285 - protein, 637 aa, BradyrhizobiumColbertium
MQFHLNGFQPGDPEITDPAERVRSSGAAGAVPDEVDVLIVGCGPAGLTLAAQLAQFPDIKTCIVEQKPDRLLVGQADGIACRTMEMFHAYGFSERVLKEAYWVNETTFWKPDERTPEKITRSGRVQDVEDGLSEFPHVILNQARIHDCFLDVMRKSPAKLEPYYSRRVLDLQVDPAAHHAVTVRLERVDPANEGKVETIRARYVVGCDGARSTVRKAIGRELHGDSANHAWGVMDVLAVTDFPDIRFKSLIQSAKDGSLLIIPREGGYMVRIYVELAKLDVGERVASRNISAADVIAKAQRILKPHTLEVKEIAWWSVYEIGQRLTDKFDDVPQSAVDTRLPRIFIAGDACHTHSPKAGQGMNVSMQDAFNLGWKLAAVLRKQCAPGLLHSYSAERQAVAKELIDFDREWAGILASAARAGGADATKTQHYFVRHGRYTAGTATHYSPSILTGAASHQHLAQGLIVGKRFHSAPVIRLADAKPVHLGHAAQADGRFRIYAFSPAEDPAAAGSAIRALCDFLTEAGESPVRRYTPLGTDIDSVIDLRAVFQQDHRELAVAAMPPLLLPRKGRYGLIDYEKMFCPDLKGGHDVFAMRGIDRKVGCMVVVRPDQYVANVLPLDDYAGLASYFDRFMLMAN

SEQ ID NO: 11286 - protein, 154 aa, BradyrhizobiumColbertium
MKDNNDMPGHLARRFQQIAVAVFLAEVEDAGFDLTPVQYAALATIKANPGLDQVTLAGLIAYDRTTITGVIDRLVQKGLAERRPSSRDRRARELEITGEGRRTLRKITPAVESAQRIMLRGLSAKEGEELMRLLRKAIAAGNELSRAPLRDAQV

SEQ ID NO: 11287 - protein, 143 aa, BradyrhizobiumColbertium
MFRFLVGAAAIALSIGQAFAGGHGGGDPPPPKAEPAVAPAKVILTKQGAKLVDLNGMTLYYYERDTTGKSSSCNGKCTESWVPLAATADAKAVGDFTVINRDDGSKMWAYRYRPLYTSPADKAPGDANGNATTLQWRIARPEN

SEQ ID NO: 11288 - protein, 213 aa, BradyrhizobiumColbertium
MFVLFAIALLPLGGCMQTTLSPSTDASMTPRDRQLLAHAPYAKVNVPEQYLRHIVDYHRKEQPGTILVDTDARYLYFVLPDGKAMRYGVAVGEEAMAFSGVARVGRLAEWPDWVPTADIQARLGPYPPRVPGGPANPLGARGIYLYVGNKDTLYRIHGTNQPEYIGQAISSGCIRMRNEDIIDLYDRVKLNSMVVVLPPGQNAQAERGTRWRG

SEQ ID NO: 11289 - protein, 334 aa, BradyrhizobiumColbertium
MLATLNAKQIVDEIVKDTVKDNDPHDAVQISPEIVLASRPVNVSPALATEIAPRPEPKFAPEPKFVPEPPRAPEPTINVVYGKAAAAPPVDTAIRVTTSDGLVTRKRSAAGKWLRGAFVAFLFAGGSVAASIAWEQHGDTAKQILAEWKPVLASLMPSTSQTMPVAAVQADDGPAQAAVEQSVVPSASPLPTQAGVPPAAAQPDPAPLVQSMSNDLAAMAQQIDQLKANIAELKAGQEQMAREMAKPAAQGPAAAETKPVDSRARAAASPPQPSAQRVRKPKPPVTRTYSPTPLAPPPPPSQASAAPPPAAAVATTQAVADDDGPIVRPPMPLR

SEQ ID NO: 11290 - protein, 76 aa, BradyrhizobiumColbertium
MPYYYFDLVVGGEFRNQGGIILEDIEVASDRADQLACELSQVKPELQQKGCAVRVTDRDHNELYRTPLDPVPAWQR

SEQ ID NO: 11291 - protein, 261 aa, BradyrhizobiumColbertium
MSLFSTPFDPERDTALVTGAGNGIGRAIAQALVGEGVRTVFADVSAERVRAAIAACERPGLAVPWVGDLGRLEACDELLVAAHAALGEVTHLVHSASPPRRESDHLLAVDRKTWQEMHAVNLDAGFHLARELGKRLIAAKQPGSFLFLTSLHAGTPRNLAHYSTAKAAMAMLVKELAKTLGRYNIRVNALVPGAIAAGGFVADPALARHVPLGRLGAADDLAPMALTVLSNKLSGYVTGAAFVVDGGLSLTNWFEPPVLDI

SEQ ID NO: 11292 - protein, 130 aa, BradyrhizobiumColbertium
MRPGFLIAGLLLLAAPAVAGDAPPRSTYVTMVLQAFAAKVECPNTDLVYQDLVQRAQQMQLPDGTTERVRKAIAWMHTGGKMGEKQDDDLMVEVAVATQATDLDQRRLGMSGWCEAQKTNLAGLIRSKGG

SEQ ID NO: 11293 - protein, 82 aa, BradyrhizobiumColbertium
MRSIHFVFAGAIAAAALLTAPALARNSDAQRGEEKSTSSSCSAYQQAPDGSWEQLPCKEAGERGQPQTQHRSSSRGADRGER

SEQ ID NO: 11294 - protein, 61 aa, BradyrhizobiumColbertium
MMSEVQVHTIARQMLEQHGFAAIAKAAEQAQACEGRGDAEEAREWRHIADAMKIMRGPHQG

SEQ ID NO: 11295 - protein, 93 aa, BradyrhizobiumColbertium
MSMGLLRLLRGNKATAPVARERLQILLAHERGMRGQPDLLGVLREEILAVVSKHVTLDPTKVIVRLERGDEVSTLEVDIEVPNDFERKRAAVA

SEQ ID NO: 11296 - protein, 272 aa, BradyrhizobiumColbertium
MAKVLVVTSGKGGVGKTTTTAAALGAALAQRGDKVVVVDFDVGLRNLDLVMGAERRVVFDLINVVQGVAKLPQALIKDKRLENLWLLPASQTRDKDALTEEGVGKVIADLRSRFDWVICDSPAGIERGASMAMRFADEAVIVTNPEVSSVRDSDRIIGMLDSKTMRAEKGERVEKHILITRYDPARAARGEMLTIDDILEILATPLLGIIPESQDVLRASNVGTPVTLSNADGAPARAYIDAARRLCGETIAMQVPAERKGFMDRLLRRRAA

SEQ ID NO: 11297 - protein, 232 aa, BradyrhizobiumColbertium
MEAAVKPQRQMVRLRGRSYVAFVFTPTVPVQDWLHEIDATIARSPGFFAGRPVVIDLSSVELSQAGIGHLLTSLQDRNIRVLGIEGVEEGRLTPMMPPLLSGGRSCVVEPSAPKKADAKVEVKPTSLLLEHPVRSGQTVIFPDGDVTILGSVGSGAEVVAGGSIHVYGALRGRAMAGVNGHTSARIYCQKIEAELLAIDGFYQTADDIDEALRGRPAQAFLQGNTMRITALN

SEQ ID NO: 11298 - protein, 273 aa, BradyrhizobiumColbertium
MSIQSSIRRKTAPDIRARKHGEPVVMLTSYHAHTAALVDQHCDVILVGDSLGNVMHGFETTVPVTLDMMILQGAAVMRGSKRALVVVDMPFGSYEASKEQAFNSAVRIMKETQCGAVKLEGGVRMAETIAFLSGRGIPVMGHIGLTPQSINTLGSFRAQGRSEIDWGPIEDDAKAVADAGAFSVVVEAVAEPLARKITEAIAIPTIGIGASAACDGQVLVLEDMLGLSPRTPKFVRRYGDLGPAIEAAIERYAADVRSRAFPGPEHVYDMKKG

SEQ ID NO: 11299 - protein, 338 aa, BradyrhizobiumColbertium
MKRLQAAGSALVLALGLGVSAVPAQAGEAVNLILNWTPTADHSPYYYAKAQGWYEKAGIDLTIETGKGSGVSAAKVGSGGSPFGVADLATMLVAKSKGADTVAVMSVYANTGQTFYWLKSYGVNGVKDFAGHKIGNPPGDASRVMWPAFAKAAGLAPDSVGFVNVGPTAKIAALKSHTVDIISDFYNEHDLKVIEFGQDLGYLNWKDIGLNPYGNSLIVNGAYLQKKPKVVEDFVRVTQKAFAACVADVNPCLKALLDQVSGLDKANQERQWERIKFLMTDEFTTTKGLGWIDGERMKKDYELVQTYLGMEKPFDVTTAFTTKMLDPSIKMDASKVKK

SEQ ID NO: 11300 - protein, 215 aa, BradyrhizobiumColbertium
MPAKRSGDTAPQRRDPVATRKKLLTAARQEFARHGLAGARVDEIAERAGVNKQLVYHYFGDKDALYLAVLEWVYEDIREQERRLNLEGLPPEKAIRKLIEASFDHLAANPDFIVLLNDENRGGARHVRGSTRLEAMHSPLVRSVWHILNEGVRAGVFRKGIDPVQLYISIAGLSYFFFSNTPTLSAIFGKDLSSRTARRARRRHVADLVLHSLRP

SEQ ID NO: 11301 - protein, 256 aa, BradyrhizobiumColbertium
MAADRARAARSFAIVLIVHLAVLVLWQVAVDAFQVPKFILPSPLATVQTLGTSGYAWGANTLVTAIEILGGFALGAFVGVTLAVIFSWAPLLSLVLLPLFVTLNMIPKVALGPLFIVWFSYGIVPNILIAFSICFFPILLTTARGLREVEPDLLDLVKSLRGSRWTLFRKIQLPGSLPYIFSGMKVGAILAVAGAIVGEFIASERGLGYLMIQVQSSLDTPAMVMAVVLLTLLGVALYGLVLALERMFVVGDARQN

SEQ ID NO: 11302 - protein, 345 aa, BradyrhizobiumColbertium
MLLTRQTLPKTIPDIAALDELLCRPTQALIDDLEKVDGDIMILGVAGKMGPTLAGLAKAATPDRRVIGVARFSEPGVKDWLHARGVETINCDLMDERSIHALPKAPNIIFMAGRKFGAEGDLSLTWAMNAHVPALVAQAFPSSRIVAFSTGCIYPFVPVDGKGSTEDMAPNPPGEYAQSCVGRERMFEYFSRKFGTPGRLFRLNYAIDMRYGVLHDIATKVLTGTPIDVSLGHVNFIWQGDASSQALRCLAHCTTPTSPINVSGHEILAVRDLAQKFGARFGRAPVLTGKEEPTAWLTDTSRAVELFGLPVVDTEQLIAWTADWVSRAMPSLGKPTKYEVRDGRY

SEQ ID NO: 11303 - protein, 273 aa, BradyrhizobiumColbertium
MDATDGPPVIKLGEQDEIAGLALSTEAHWNQTEEDWRIFLRDGVVFGIRDGARLVATAALLPYSGNNAWISMVLVSGTHRRRGLATRLVDACMETARKSGLTSWLDATPDGAKVYGPLGFTPTLQLRRLKLVNPAPSSAPAPSAATIEALCALDRRAGGFDRTALLTAFAQRPGSRIVAANGCIALVRDGRTARHIGPLFADHAADALALVGAIAASETSPLLIDAVASQSQFLDGLTASGWTIERPFQRMRFGPATHAAKETPFAVAGPEFG

SEQ ID NO: 11304 - protein, 351 aa, BradyrhizobiumColbertium
MHHSQINSDIRKLIAEGTVLPAHPLALTAERQLDKTHQRALTRYYVDAGAGGLAVGVHTTQFAIRDVGLYRPVLELAAETAANWTKRPLALVAGLAGPTKQAVTEARTARDIGYHAGLLSLAAMKNASEDEIIAHCTSVAAEIPLVGFYLQPAVGGVILSSRFWQRFASIDNVIAIKIAPFNRYRTLDVLRGVAAAGALDRVALYTGNDDHILLDLVLPFDLRDNGVTTRTYFKGGLLGHWSVWTASAIKQFERCKAARHKDSVPADLLALDARVTDCNSAFFDVANNFHGCIAGCHEVLRRQGLMKGLWCLDPNEGLSPGQKEEIDRVTREHADLSDDAFVAANLDRWRA

SEQ ID NO: 11305 - protein, 257 aa, BradyrhizobiumColbertium
MSSAPFISLQGVRKVYRSGGTDFLAVSDVTMDVQEGELVSLVGPSGCGKTTVMKILAGLHGADGGTVKIGNASSPFDPTRDIGMVFQQALLLKWRTILDNVLLPAEIVGLPVKAARERARDLLNLVGLAGYEQKYPQQLSGGMQQRTAIARAFIHDPKLILMDEPFGALDALTREQMNLEMLKIWRQSGKTIIFVTHSIQEAVFLSSHCAVLTAGPAKMADYFAIDLPFPRDLPLKTTDAFGAYARRIYAKLGLGTA

SEQ ID NO: 11306 - protein, 38 aa, BradyrhizobiumColbertium
MLPDGFSDAQLRIVVRDFVAPRTDSGTALYAVPNPSFA

SEQ ID NO: 11307 - protein, 363 aa, BradyrhizobiumColbertium
MKRRTFLKGGAVAGATTLVAAPAIAQSMPEIKWRLTSSFPKSLDTIYGTAQTFAKYVAEATDNKFQIQTFAAGEIVPGLQALDAVSTASVEMAQTPLYFYIGKEPALAYATGAPFGMNHRHQESWWHFGGGADLTNEALKPFKAHAILCGNSGTQMGGWFRKEIKTVDDLKGLKFRIAGMGGHVLARLGVVPQQIAGGDIYPALEKGTIDAVEFVGPYDDEKLGFQKVAKYYYFPGWWEGGAMLHMIVNDEKWASLPKQYQAIVNQAGSAAGAWMLEKYDSVNPAALKRLIANGAELKAFPQPVLEACYNATQDHLNELAAKSALFKRTKESHDAYMKELLFYTQIAENFYDNYLLSKTRNKT

SEQ ID NO: 11308 - protein, 85 aa, BradyrhizobiumColbertium
MSDPSSSETPLRTTFKIKLNGDTLAIATVGQAYQFLTNFKSVEWMEFRSLHEDAVAALEGAAGNAMLAVQATNAVRALFVSAKLL

SEQ ID NO: 11309 - protein, 339 aa, BradyrhizobiumColbertium
MVSDAAHAERLLSRRRVGRAETILLSLAAVALALGAAAWVADIGDSSPLVSAALPPANAPSFEDRFASASGSPTPRELGLRVLERSTVNAVQLKLRDAKAMLAQKLQGDDWRSMLTDDDGSAEDERRSSHRADAIPMPRSRPVQADLAAQIASSQAYADTGSRADNRNFFERFTDKIKLASLTPGDGLFGKAPDLAALGYDSRTAVYDISAKAVYLPSGVTLEAHSGLGALMDDPQYVDRRMVGATPPATYDLKPREKPFHGVRALRMTPVEGTSALGRVGLLTHSYLLGPRGDSNGCVSIKDYDRFLKAYDNGEFNRLVVVPSLRGATTASQRASTDS

SEQ ID NO: 11310 - protein, 112 aa, BradyrhizobiumColbertium
MWFIFPQVAGLGFSAMSQRYAIGSRAEAKAYLAHPVLGARLIECTRLVLAVEGRTINAILGAPDDAKFRSSMTLFGAVSDEPIFDQAIARYFAGERDRATLEILSKLDRAPG

SEQ ID NO: 11311 - protein, 693 aa, BradyrhizobiumColbertium
MKIGTLLTSAIVSLSTVGGGLAVYVAVTKYQTMERISEAEGRLAIVRAVSDIPRYLNPERGFATNILYGPATVDPAQLSGHDKLRKQTDGARDKMNALRKELPGSLDDGNAIGTEIDAINSKFTALREAIDKAIAGPAEARKDAARKVVADNAVLNAGVTALLNEQVRRMAILNGDAFRQANYANIAMTLRDIGGLNASVHKNLVGGKKVATDAEKADVARMQGRSDQIVMALMELRGHPATPANVGAALEAMNSRYVEEFGRELKMVKDGAISGKYEHDVETYYAASQKGLGSIIGVRDALYDNAEHILADASSAARTSFTIALAGLVAVLIASVGLIVMVRRRVCAPIVTLTTRMSRLADGEVADSIPGAERSDEIGAMAAAVQVFKDNMIRADRLAAEKQAENDGKMRRAQALDELTRAFEAKVTELVGGLSRASATMESTAQSMTSTAAQTNSQAAVVAAASEQTSTNVQTVASATEELTSSIAEIGRQVAQSTEIAARAVDNARRTGDTARTLAEGAQKIGDVVTLIQSIAEQTNLLALNATIEAARAGDAGRGFAVVASEVKSLAGQTAKATTEISEQITAIQTASDETVAAIRNVAEVISEIDQIGTAIAAAIEEQGSATKEIARSVQEAARGTQEVNTNISGVQRAADDTGSAAREVLGAAEQLSTQSRDLAGQFDRFLSEVRAA

SEQ ID NO: 11312 - protein, 196 aa, BradyrhizobiumColbertium
MSNRILVLYGSYRSDRMGIRLANFVINRLRDRGDDVEFIDAKAIGLPMLDRMYKEYPKGSAPAEMEKLAAQIRDADGFIFVTGEYNWGIQPGLKNLTDHFLEEWFWRPAAIVSYSAGRLSGARAATAWHGTLSEMGMVVVSSTIGVGPIAQTLSAEGEPIGEGGKALERSFPRFADDLTWWIEAAKAQRARKAPPY

SEQ ID NO: 11313 - protein, 285 aa, BradyrhizobiumColbertium
MNFEFTPFVRKISAEQTILSLPGCDVNLTHAFPRVVDAQLVENCTAIGFTMDDLNVPIRFNGSQRARPVVVIGSSGAGYTTIEEVQRQIASVVFRPEVGGRGWPPTPSSFKIFEISADGLQRLRSVVREVLAEAAGSVEVPELSLKGAAMRESLLAAVDEALHSVVSARWTLAPNDGRSFRIFQEIRSLLSDLSQPIYSDEIAQKLGLSVRTMHDVVRRYRGMSLHRYLRLRRLWLVRRQLLAGAESVKAVALAFGFWHLSDFSRSYRHQFGETPSQTLERGRGR

SEQ ID NO: 11314 - protein, 381 aa, BradyrhizobiumColbertium
MIVKFISIQAAAMKANSPTDILVELEDAVAACPLDRCARILSGIVQLLTGSGDRSQELLAGVTDGVLLRLTDRVEAVALVQLSHALAELKAAPPQTLRRLASHDDPDVACPVLLKSPALSTSDLEAIATSRGRRQQLAIAARDLIEPPLTGALVKAGDRAVHLALIGNAGALFSDAGYAALLEKCAGDDELTKALALRPDTPDLVVRKLLSAAPDPNARRQPEALPVSRPEAAASIAPKLPCAADYANARPEIVALNRIGKLNDSTVNRFAIRGETANLFTALSVLSGAPIEIIERVMTDQDCEGLVMACRASRLNWQTTLAILGNRSGTRLSFAERERAQHIFETLLLSTSQWTVRWGEIAANAKGSSRENRGAKMGVRR

SEQ ID NO: 11315 - protein, 110 aa, BradyrhizobiumColbertium
MKFDGRKASRVRMDHRHPVNLMGSDGTWRRSCVLLDVSQTGAKVEVEGTLDVLQAKEFFMLLSSTGLAYRRCELVWIDGTTAGLHFITADGKRKPASGPAAAAQNSDHPK

SEQ ID NO: 11316 - protein, 372 aa, BradyrhizobiumColbertium
MQNARTISRPVDRNGIREGEAARPFVHVLADTSDKLAGVCSILEERFSVAGERLDAEAKLSQVPSAIVIRAELRDVDNIAAIKKRAGKLAKARKRIFLLEHASHVGVSQAYALGATTVLPGTINRIKLLSALSDPPARSSASASETAQSDDAVETAATAIASMFTAVTLGQPLDIDGTREAGRQIAERITEHGLSEWLTTVRRHHEGTYQHCLLVTGVAIDFGLSLGVRRPDLERLYSAAMFHDIGKAQIPLSLLDKPGRLDAQERALIETHPAAGYEFLKGHDKISPEILDAVRHHHEYLDGSGYPDALCADSIGDIVRMLTISDIFAALIEHRQYKPTMPRAEAYGILCGMTGKLEKALVTAFKQVALTR

SEQ ID NO: 11317 - protein, 314 aa, BradyrhizobiumColbertium
MEFEKLVQSRRSVRGFRKDPVPRAVIEAIIESAKRAPSSMNTQPWHVHVLTGSPLEELRRRNMEEMVGGAKVKRDIVSHGEYQGVHRTRQVDIAKKLFGAMGIARDDKPMRQDWVLRGFRQFDAPVSLVLTYDRVLDPGAVCHFDLGALCYGIVLAAWDRGLGSVINGQGIMRSDIVREVAKIPEDEVIMTCVATGYRTTALPRMPCARTASTTTSSCVTWVLPTSTSRRRLFSGRNFRCGAASGLLQSRRCRRNNVRSERFVAGARDLTCGGWLAWFGGSSARGCGVRSMMIRVFLSHPTSSAASFVAAGTRT

SEQ ID NO: 11318 - protein, 320 aa, BradyrhizobiumColbertium
MAAPLDPVIAQIIPLMPMRDPTVMTPQSARDSLRALAASRAAIPPPPVDSVQDIKVKGGAGPLDARVYRVGATPAPTVVFFHGGGWVAGDLETHDRQARNLAIETGAVVISVDYRRPPETRFPGAFEDAFAAVNDVFGRVAEFGGDARRLGVAGDSAGGNLAATTAIACRDAGIRLAAQLLVYPVTDVLGRYADPQENARYPSRAENAEGYFLTRATMEWFCGHYLADANHATDWRVSPLRAPSLAGVAPAIVTTAWFDPLRDEGAAYARALEAAGVRVKHHEGPGLIHGYFGMGDASDVARAEAQRARADFKALLIRGV

SEQ ID NO: 11319 - protein, 154 aa, BradyrhizobiumColbertium
MDATIAKGQQSADRHSHLVRPQDMEWQKTRFPGCEAKTLLFDRSSGLMTALMRFAPGSVLPDHEHVGIEQSWVIEGALVDKEGPAEGIACKAGEFIWREAGSRHAAWCPEGALILAIFQVPNKFFEADGRVVDAAGQDWDEIWGHTGAQRRSPS

SEQ ID NO: 11320 - protein, 82 aa, BradyrhizobiumColbertium
MMKRIFLAAIVASFAAGSALAQETCESKAVGKDGKPLAGAAKTSFLKKCKEDACAPKAVSADGKPLSGAAKNSFMKKCETGA

SEQ ID NO: 11321 - protein, 291 aa, BradyrhizobiumColbertium
MKQIRIGDITIDAVIEREGPWRRAQDFFPAYDESVFRRHLPTMEPEVFDATRGMIVITYQSFVVRTPRYTILVDTCTGEDKGHPPPFDFPGKERWRNELFALGISFEQIDYVFCTHLHIDHTGWNTTLRDGRWVPTFPNAKYVFHKGEYGAWEAEHAKGNDPPGTVFRDNCLPIVEAGQALLVDDDYALDDTVTLTPTPGHSPCHCCVNIVSRGQRAVVTGDLMHHQIQCREPEWSAKPDWDPKLSALSRRKFFASVVDTDTLILPIHFPAPTVGLIRPLEGAFDYRFKRE

SEQ ID NO: 11322 - protein, 39 aa, BradyrhizobiumColbertium
MMFAPFGESVANGLRVFKAPNPEPPMRRVPQINLKRRRR

SEQ ID NO: 11323 - protein, 321 aa, BradyrhizobiumColbertium
MTAAIVIAVAAAIYVNNTSLLASHQDDKPLLLAHRGMAQRFDERDLKNDTCTAARMLPPAHDYLENTLRSMRASFAAGADIVELDVHPTIDGEFAIFHDWTLDCRTDGIGVTRAQTMAKLKSLDIGYGYTADGGKTFPFRGKGIGMMPTLSEVFAAFPDKKLLINVKSRDPDEGERLAGVLNALPAERRRTIMVYGGDEPIDVIRRLAPDVRTISRAAIRSCLFRYIGYGWTGLVPKACRNALVLVPINVAPWLWGWPDRFLARMNGVDSAAFVLGPYSGGEFSTGVDTPELLARLPQSYSGGIWTNEIETVARLTGKSND

SEQ ID NO: 11324 - protein, 540 aa, BradyrhizobiumColbertium
MIRLDNVSKQAGHQILFIEASAALNKGEKIGLVGPNGAGKTTLFRMIAGEELPDEGQVSTDRGITIGYFNQDVGEMSGRSAVAEVMDGAGPVSEVAAELRELEAAMADPDKADQMDEIIARYGEVQHRFEELDGYALDGRAREALAGLGFSQEMMDGDVGKLSGGWKMRVALARILLMRPDVMLLDEPSNHLDIESLIWLEKFLRAYEGTLLMTSHDREFINRVISKVIEIDSGSLTTYTGDYEFYEQQRAQNEKQQQAQFERQQAMLAKEIKFIERFKARASHAAQVQSRVKKLDKIERVEPPRRRQSVAFDFLPAPRSGEDVVALKNVHKGYGSKRIYDGLDFMIRRRERWCVMGVNGAGKSTLLKLVAGASEPDEGTVALGGSVKMGYFAQHAMDLLDGERTVFQSLEDAFPTAGQGSLRALAGCFGFSGDDVEKRCRVLSGGEKARLVMAKMLFDPPNFLVLDEPTNHLDLATKEMLINALSDFEGTMLFVSHDRHFLSVLSNRVLELTPEGIHQYGGGYTEYVARTGQEAPGLRS

SEQ ID NO: 11325 - protein, 86 aa, BradyrhizobiumColbertium
MGMDTKEAAAMTEASGLTDDQGGIEQSSSLRSGSGGQSGAFDPQLRSPPADAAKRLADQLREITVKAPLRSLLIAFLAGAWIARRR

SEQ ID NO: 11326 - protein, 243 aa, BradyrhizobiumColbertium
MLIFLFLVFAPLTASAVRYFWLGDGRQNWQTADRSSAGLLTAAADHPAAVIRVFGARTVRWRSIFAIHTWIVVKEKDAATYTRYDYTAWGEPLRTNGFAPDGRWFGAAPEIIVAVDGERAEALIPKIRHVIENYRFRSYGDYSVWPGPNSNTFVQAALDSVPELRAVLPPTAIGKDFPYTGKWFGLTASGTGIFASLAGYVGLSIGWVEGVEINFFGAVLGLDIRRPALKLPGLGRLGVTPGA

SEQ ID NO: 11327 - protein, 52 aa, BradyrhizobiumColbertium
MSNDQRRSIPRSGKIVMPGLIDLHRHVYSCVSAIGIPADELVQFQVAADQLR

SEQ ID NO: 11328 - protein, 437 aa, BradyrhizobiumColbertium
MRSLRLRLFAILLAATGIVWVAAVVWIYVGSRDEVEHVLDTRLQEAARMVASLASGLDNLPGNSVPAAAQPLGSYERQLSCQIWSLDGRMVAKSSGAPDQQLSPAASGFSDRIIDGEPWRVFSVEDADHNLRVMVGDRVGLRERLVTDLIKGLMLPALLIAPLLGAAIWASVGQGLRPLRQMAQDLGTREPDDMRQVETERAPAEVRPLALALNGLLSRVEAARRHEREVTAFAAHELRTPLAGLKTQAQVALAADDPQVVRGALEQIVTAVDRSTRLVRQLLTIARLDSDAVNAPLAPVAVGPILEEIVAATPRHERTTVTIDAGVRTMVLNTNAECLQLALRNLHENAVQHTREGRVVWSAGKNAIAIEDEGPGIPPDELDQIGKRFFRGRLRSPIGSGLGLAIVKLALAKVGAKLTISNREGRRGTRSELTFDV

SEQ ID NO: 11329 - protein, 220 aa, BradyrhizobiumColbertium
MRILVVEDDPILSDGLRAGLSLTGATVDAVATCEDADNALSTTRYSAVVLDIMLPDGSGLDLLRRLRGRQDATPVLLLTARDSVGDKVSGLDSGADDYLAKPFDLDELAARLRAIVRREGGRAGPTMTYGAIVLSPADLSATVSGEPINLSRREFAILAALMERPEQVRSRAELEERLYGWQEDVESNAVEVHIHNLRNKIGRDAIQTLRGVGYRMGTVR

SEQ ID NO: 11330 - protein, 162 aa, BradyrhizobiumColbertium
MGMASFALLVGSVLMIGSADNDNPDATRILDQFVSRDTGPDPSVRTIRSVAALDHELAAARADERPVMLDFSADWCVECRVMDAVLRKPEVRKRLQDFRIVRADVTAVDDASRALMKRFGIVGPPTILLFGAHGSVDPTTKIIGAVDADALLGKLSAVASAD

SEQ ID NO: 11331 - protein, 227 aa, BradyrhizobiumColbertium
MMSHKRWAVAAALLLPMALAGCVSGSDIMPKAAAYASTSGSRYDAVSDGDYTIAAVPARDLKTRYMRQLVDDPTGESVGTVVVDPKNRFLYLVQEGGKALRYGVGVGRAGMAWSGTAKVAIKREWPSWTPTRHMIAREPNKYVKWARGMDGGTQNPLGARALYLFRNGKDTLYRIHGTNEPWSIGQAMSSGCIRMMNQDVIDLYRRVPSGTKVVVLPAAVESAAARE

SEQ ID NO: 11332 - protein, 127 aa, BradyrhizobiumColbertium
MSYYFAKKLDVPFAEGVDRAISALKGRGFGVLTRIDVQSTLKEKTGADFRPYVILGACNPKMAHEALMAEDKIGTMLPCNVIVQEVAGKTEVAAVDPVASMQAIQNESLRAIAEQVRRELRAAVEAI

SEQ ID NO: 11333 - protein, 152 aa, BradyrhizobiumColbertium
MTTTRNRVPLHSSESDNLRIKRTMQANVAYFAEHRDQIAGRLREIDEEWDIERAIEANAAVIGFAGIALAATNSRRWLALPALVTSFLFQHAIQGWCPPVPVLRKLGFRTSYEIEEERRALMALRGDFGHVAESADAALRASTGRTNATVPA

SEQ ID NO: 11334 - protein, 41 aa, BradyrhizobiumColbertium
MNGVLGPKQVSGAKRLELGPMLARSNSRDPTQAARTKPIAM

SEQ ID NO: 11335 - protein, 236 aa, BradyrhizobiumColbertium
MTLLDGLYKVEYGVNDGFGRSIMCLHDGKMLGGNSGFAHLGTYVERDGEIIAGVITERHNHDPNYKPLMGADVASIGARGRLYGNEIRLEGSSDTMPGARFWANLTRLDDEGLPPSGAVGPGGIANGLYGMKLSALDGIDAGLSGVMLLIDGRILGGDAFFYYLGSYSSADGRWKGEMLNQEHTPAKGENPVFGGLEVGIGFSGTCTEDSGELEGIALAGKRSLRLAASLKLMRRA

SEQ ID NO: 11336 - protein, 178 aa, BradyrhizobiumColbertium
MRLAQETPDAVGMTLEPASSKARPSGMNATPQAADDELSAIISSAARQPLLDAAYELWRQRHRLDTIAGRPTAEEIRFNRTLTPEQLSGKYRQDRDHAHEGPMFGYVKRAHPRADDQAIRQAIMTAVKFEDEYNKQFDWNGDFWNCVVRAVAQAGRKYPDYLETTYRDARNDLAYHMK

SEQ ID NO: 11337 - protein, 273 aa, BradyrhizobiumColbertium
MRTNLLAMIFALAVPVMAHAQSADLVLCDRIAADPSDPDKPADVKGVTEIAPSDVATAIKFCKQAAPSARRAMFALGRAHAANRQTGEAIAAWRKAAEKGSSAAMVELGVAYATGSGIAKDEGQARKLFEKAAQSGNPRGVSNLAALGGAGGAAPADPAQARALLGKAAETNAEAQYQLGLMLSEGSGGARDDAAARALFEKAAAQNHPGALERMGAFAQEGRGGAKDKEAAKAYYERAAALGDEDARKALERIRCPYAIKDKQGKLVTTLCF

SEQ ID NO: 11338 - protein, 344 aa, BradyrhizobiumColbertium
MTKYKLEYIWLDGYTPTPNLRGKTQIKEFASFPTLEQLPLWGFDGSSTMQAEGHSSDCVLKPVAVFPDGARTNGVLVMCEVMMPDGKTPHPSNKRATILDDPGAWFGFEQEYFFYKDGRPLGFPEYGYPAPQGPYYTGVGYKFVGDIARKIVEEHLDLCLAAGINHEGINAEVAKGQWEFQIFGKGSKTAADQMWMARYLMLRLTEKYGIDIEFHCKPLGDTDWNGSGMHANFSTAYMREVGGKEYFESLMAAFEKNLMDHIAVYGPDNDKRLTGKHETAPWNKFSYGVADRGASIRVPHSFVNNGYKGYLEDRRPNSQGDPYQIASQILKTIASVPTDKKAAA

SEQ ID NO: 11339 - protein, 67 aa, BradyrhizobiumColbertium
MMNNGLSHGSAKIYQFPAGGRAALAGRRYGDTRLPADHASPPSNVSICSDSWYHQDAVDEAKPKWDR

SEQ ID NO: 11340 - protein, 95 aa, BradyrhizobiumColbertium
MVVTMLVAGILAARRADAQTFQTYRCVDGTQFIIGLYDGDRRAFLQIDGEPVTLARRPAVSGIRYSGAGVTLRIPKAGPTTVKHLKRPVTACAVI

SEQ ID NO: 11341 - protein, 247 aa, BradyrhizobiumColbertium
MSDSPARHLALQGASNFRDLGGYPTTDGRITRWRHIFRSNHLGQLTAADIEIVRALGVRSAFDFRGLEERAAGLCALNEIMVHPLPIEPTVVAALRTELARGKLTAPVALELMRESYRNYVRHNTHCFRALFGHLLEDRAPLVIHCTAGKDRTGFASALILHALGVPDDVIAEDYLLTKRHYRRDVSTASDLPADVLEAIGSVDVSYLAAAFEAVGHEYGDLETYLRDGLKLGAAERSALKARYLQS

SEQ ID NO: 11342 - protein, 226 aa, BradyrhizobiumColbertium
MQDRVLIVTGARGALGKVVVEIAQSRGARVAGIDHAPSQESATLEGIEIGGIDLSDAAQAKTAVDAAARHFGRLDALINVAGGFAFETVGDGDIKTWQRMYALNVLTALNTSRAALPHLAASKAGRIVNIGATGALQAGSGMGPYAASKAGVHRLTEALADEWKGKVTVNAVLPSIIDTPANRADMPKADFSKWVTPQELAEVILFLASAAASGVTGALIPVGGRV

SEQ ID NO: 11343 - protein, 228 aa, BradyrhizobiumColbertium
METALYLPVKRFLEELGFTVKGEIGGCDLVGLSAGDPPVVVIGELKLAFNLELILQAVDRAPAGDEVWIAAKMSARGKGRENDARYRNLCRRLGFGMLGVTDRGQVEVLVKPPTAAPRREPKVRSRLVAEHQRRQGDPVLGGSTRAPIMTAYRQQALACASALAEGPKPVRELRERCPDAGKILLNNVYGWFDRTERGIYGLTEAGHAALKRWPQQRVGANAGPATLP

SEQ ID NO: 11344 - protein, 101 aa, BradyrhizobiumColbertium
MSADWNTKYGTRRVRHDPPTLDEAIFAAVGITDDQAQQAEIAAALMGMPLDVVQAEVKKQARTNSRLTATRVIAGEQGAQRSVVVERRVVRRFGNDKRTGT

SEQ ID NO: 11345 - protein, 201 aa, BradyrhizobiumColbertium
MVLEDTVRTAPGYVRTLIQQEELPLLRDHLLRLDAASRHDRFNGFLDDSFIERYAARCAEDGTVIVAYIVDGVVRGAAELHPPEGDCLPEVAFSVEASARRQGVGTVLFRRLIAEARWKGYKQLRITTGAENHAMRALARKFGAHLAFRHGESTGTIDLVKTPEAELADLAASPFTTGRALLSFNSTCWKLISSMYGNRAA

SEQ ID NO: 11346 - protein, 132 aa, BradyrhizobiumColbertium
MTPLEKLKAMKMPFAEFKGVEFIEAGKDRVVARMTVRPDLCTLHHTIHGGAVMALADSVGAAATVINLPEDAKGTTTLESKTNFIGGAKEGTTVIATATPVHRGRRTQVWTTRLETEDGKLVAVVTQTQLVL

SEQ ID NO: 11347 - protein, 50 aa, BradyrhizobiumColbertium
MPERGAATLRVRDTRLSAQRAYVSTAITSEVIALPRQAIHAARTTNWEEI

SEQ ID NO: 11348 - protein, 400 aa, BradyrhizobiumColbertium
MARLRVYDDTRALFHLPDGVIYLDGNSLGALPLGVAERVNRVITAEWGNELIRAWNTAGWYAQPRHLGDRIARLIGAAAGSVMVGDTLSLKVYQALAAGLDMNASRGVVLSDTGNFPTDLYMAEGLIATLGRGHQLRLVAPEAIEAALSEEIAVLYITEVDYRTGRRHDMAKLSAKAHALGIVTVWDLAHSAGALPVDLSGCAVDFAAGCTYKYLNAGPGAPAFLYVSPRHAESARAALSGWMGHAKPFAFELAYAAAGGVERMRVGTPPVLAMAALEASLDVWDRVDIAEVRARSLALGDLLISEVERRCPQLKLVTPRAHEHRGSQVSFAFEAGYAAMQALIARGVIGDFRAPDIMRFGITPLYIGEIEIVRAAEIIEEVIVDEVWRRPEYQVVNAVT

SEQ ID NO: 11349 - protein, 271 aa, BradyrhizobiumColbertium
MDRKAPVMTSSNYDPTSEGAETDFARRMSYGDYLALDAILGAQHPLSEAHDEMLFIIQHQTTELWMRLAIHELTAARRAISRDEVQPAMKMLARMSRIFEQLNAAWDVLRTMTPSEYTRFRSQLGQSSGFQSTQYRLIEFLLGNRNHAMLKPHAHDAETTKLLQAELATPSLYDEVLRLADRNGLRMPAAVLARDVRETHSFNEGVLQAWRIVYEAPETHWMLYELAEKLVDFEDYFRRWRFNHVTTVERVIGFKRGTGGTGGVSYLKRML

SEQ ID NO: 11350 - protein, 269 aa, BradyrhizobiumColbertium
MRDWDDAYANSAHVPGSDKLPALWAERAAAYRAGLKEFRSDIAYGAGERQKLDLILPDGDSKGLVVFVHGGYWMRFDKSAWTDLAGGARHHGWTVALPSYTLTPAARISDITAEIAAAITKAAALIPGPIRLAGHSAGGHLVTRMLCDDSRLEPAVYNRIAGTLSISGLHDLRPLLKTRMNETLRMTMEEATLESAALHLPRGHSPLTAWVGGGERPEFIRQSDLMANIWTGFDVPTRLVIDPGLNHFTVVDGLKDASSAITARLIGLD

SEQ ID NO: 11351 - protein, 439 aa, BradyrhizobiumColbertium
MRGIDDPNADWSCQMNAETQQRILDAVDSGFEAQLATTRDFVAIPSTRGAEGPCQDMIGDLLRERGYEVDDWHINVDDLKDLRGFGPIEHDFSKARSVVGTYRPQTNAGKSLILQGHCDVVPAGPLELWDTPPFSPVIKDGKMFGRGACDMKSGTIGALYALDAIKAAGLRPTARIHFQSVIEEESTGVGALSTLQRGYRADACFIPEPTGGKMVRSQVGVIWFRLRVKGHPTHVAFAGSGANAIMAAYHLIQALQKLEIEWNERAKADRHFKTLNHPINFNPGIIKGGDWASSVPAWCDVDCRIAVLPGWSIADHQKEITACVAAAARNHRFLANNPPEIEWSGFLSEGYELTDAAAPETAFGKAFNAVYGGAVEDLVFTALTDTRFYGLNHGIPSLCFGASGGEMHGFNEFVDLESLRKTTKAMALFIAEWCGVEKA

SEQ ID NO: 11352 - protein, 241 aa, BradyrhizobiumColbertium
MSQTETSDSYPTSARNQVKRRHDRGFYDHETVHRILDSSMLCHVSYVIDGQPYCTPTFFWREGTRLYWHGSSASRMLRNQSKGERVCLTVAHLDSLVLARCGFNHSADYRAVMAFGTAYLVTDPEEKDRAVIAMVDRFFPGRTASLRQSTTQEIKATSFIAMEIEEASAKIRAKGVADDDEDYALPIYAERIPVRTVLGPPEPCPRLLDGVSRPATLNGYREGRLLEDALRDAYFVEYPNG

SEQ ID NO: 11353 - protein, 447 aa, BradyrhizobiumColbertium
MIVSGLVKPGEALPPSRTLARQTGFRRNAVVTAYERLIADGFADATVGSGTFVAARIPARAAEANRPKVVVETPRQGAFALGCTHIDERALQRFRAFVGRRMRAFGSEHLHYGDPRGSRELRAAIADHLLSARGLRCDPDQIMLTSGTLHALRIVLSGILKSNDQVWCEDPGYPAARNTIAHCGYRAVPVPVDEHGMRVARGRIAAPAARAAYVTPSHQFPLGMQMSMPRRLELLEWARQTGAFVIEDDYDSEFRYDGAPLMSLAGIDRLQRVIYLGTFAKTLFPGLRIGYCALPERLVAVVTAARAALDRFPGTLMEGAVADMLNSGAFAANLRRVRKIYREARDVLAQTLEVASDGALSVPVPSQGLHLVARFDPSVALSVPAQAKRAANAEGWLLADTYSRAPPLPGFVLGFSGHAVPQLVASAERLARESRTALRRGRSAHRG

SEQ ID NO: 11354 - protein, 81 aa, BradyrhizobiumColbertium
MLLGRAVCLSLLIATTPVVTADAATVGREQDIGDLKLGQRVQVDDGTCPAGQVKEVRGARMTDKGVARTSTCVPRYGPKSK

SEQ ID NO: 11355 - protein, 120 aa, BradyrhizobiumColbertium
MLLRLCAAAFVFLLTIGSVQAQARAPSRLPDPRGEFVRQCAPHMLGRWEHPEEVCGCLHDHAAAAVEDRDLREALLRGISETGVPTIETDWVPASKQSEIGPTFTKIAKPTLQCMFDPAK

SEQ ID NO: 11356 - protein, 52 aa, BradyrhizobiumColbertium
MRALSFILAFGFVLAGPSLAGTPDGNLPGIGTFQYSGSPAATAKQVMVAARS

SEQ ID NO: 11357 - protein, 61 aa, BradyrhizobiumColbertium
MMAGNRATPRDADPGTDRGDQPPIRGSAGEMALQSSRGFEAAPQMFVRLTGSHLAKLRDRD

SEQ ID NO: 11358 - protein, 182 aa, BradyrhizobiumColbertium
MSSRFRILSGIRLKGLALFLLALTAPMASASAADEPDLIFRRSTVFKWMSPNDKLATYGIDDPEVEGVACHFTVPEKGGFKGWLGLAEEVSDISLACRQIGPIKFKNKMEQGDDMFRRRRSLFFKKMQIVRGCDAKRNVLVYMVYSDRLIEGSPKNSTSTVPIMPWGTADVNVQKCGEFFTQ

SEQ ID NO: 11359 - protein, 511 aa, BradyrhizobiumColbertium
MNSVSGSDSSAKQGRLWQIAIVTAAGVIGATSHADAAYYYWTDYSDGSYYARPDRYPEIPRQKPQKRGTASKKESIVEKEAGTKPQGPLIIVVSIDRQKVTVYDRSGMFAESPVSTGMKGHSTPMGVFSVIQKHKFHRSNLYSGAPMPYMQRITWSGVAMHAGALPGYPASHGCIRMPMSFAMKMWNWTRMGARVIVAPGQMSPQSFSHPLLASVRVPPQPTVSLEPQTNGDKIEKTVAESRPVETKTASADSVLDLRSSVGLVVMSDVTTGNTPAREAATPAKSAEAPDAAKPQSEGAVKPADDKVEAVKTGPGKTEAVGAATTPGAQATAPAPAASPDAKTDATRVTEPAPVSKPDAPKRAGQIAVFISRKDSKLYVRQNFAPLFEVPVTIAPSDRPLGTHVFTAEVDKADSNTLRWSVVSLPVSARSAARADDSRLARRRQGAVMPIAAKPVIAPDSPADALDRISVPADTMAKISEMLTSGGSIIVADQGISQGETGEGTDFIVRLY

SEQ ID NO: 11360 - protein, 189 aa, BradyrhizobiumColbertium
MMNRRTMLSATLASVLAPATRAFADGGMSRVSAYAFSFPALSGDDIRLAAFTGKPLLVVNTASLCGYTPQYAGLQELWDEFRDRGLTVIGVPSNDFGGQEPGGSNEITQKAHHQYGVTFPVTAKAVVIGAQAHPFYRWAAAARPKDAPRWNFHKYLIGRDGYIADVFPSAVEPPDTRIKTAIAKALAVS

SEQ ID NO: 11361 - protein, 341 aa, BradyrhizobiumColbertium
MRVAAGLILAGAMSMAMTGASWAQTPAAKQAGATQGAPAAMPGASAPPTGPAAAPATGAAPTGFVNPPPPKQAPQPARAACNTPGALGVARTVEIDTTGGPGFGFEHFKELDFLRDKEVVLTFDDGPWPRNTPAVLKALADECTTGIFFIIGKHATYEPEILKQVYAAGHTVGAHTWSHANLNNKKLNEAQRKDEIEKGFAAVKWALGGISPAPFFRFPALQHPPEMVTYLGNRNVASFSCDIDSFDFKASKPEKIVETVMKKLDTKGKGIILMHDFQKHTAEALPELLKRLKAGGYKVVAMRAKFPASTLPEYDQELLKDLKLPTVSQRPVNSVVTTVSE

SEQ ID NO: 11362 - protein, 182 aa, BradyrhizobiumColbertium
MSFRIEGYVIVSADGMLADADRVMPDSLKFEGDKLFFEQALDRAALIVHGRHSHEQQPNSPKRKRLILTRKIRDLTVDPEMPNATLWNPEHASFEAACAFADVASGTVAIIGGPVVFDMFMDRYDTFWLSEAPHVRLPGGEGCFVDVPERTPHEVLASHGMKPDAPYLLDAAHEVTVTPWRR

SEQ ID NO: 11363 - protein, 296 aa, BradyrhizobiumColbertium
MGPVLIGLSRASGQRFRRTAETIARSGVDHIILQLYVTGGFDGVAGDRPMQVGAGDICLFDLAQTLETRATPFENVTLVVPRPMFGTHLLRVDDLHGLVLPGSSVIARLLAGHLTALFEFAPRMTLDECQSVVEGTVSLVAACLRNEIERSDIDAGHPGAANPSLMRIRQYIEAGLASEDLSATSIADHFGLSRASLYRLFAPVGGIADYIRSRRLHRAFFDLANSGGRGLRISEVARRWQLGSDAHFARSFKAAYGITPRAAREAALLGLQRGTDATNSATISRWMREIAPPRAD

SEQ ID NO: 11364 - protein, 146 aa, BradyrhizobiumColbertium
MTFGRILFAVLFIYTGATKLFAIQATADFIATKLVVPDAVAPYAKQVEAATAMTTPQLLAIAIGALEILAGLMIALNFGARFFAMLLIIYVAVATVMFYDFWNMAAPDNAKMLVDALKNLSIIGALCMIIGYGRTTRPAEAAYGDV

SEQ ID NO: 11365 - protein, 769 aa, BradyrhizobiumColbertium
MSSYSDDLHQAALAYHRLPRPGKLEIQASKPLANQRDLALAYSPGVAAACTEIAKNPAEAATLTTRANLVAVVSNGTAVLGLGNIGPLASKPVMEGKAVLFKKFAGIDVFDIEIAADTIDRVVETVAALEPTFGGINLEDIRGPECFEIEARLKERMKIPVFHDDQHGTAIIVAAAITNGLRLNGKKLSEVKIVASGAGAAAIATLNLLVSMGAQRKNIWVCDIDGLVHEGRNTSMDRWKAVYAQKTDKRTLADVIGGADIFIGLSAPGVLKPEMAKAMGDKPLIMALANPVPEIMPEEARKARPDAMICTGRSDYPNQVNNVLCFPFIFRGALDVGATAINEEMKQAAVEAIAQLAREAPSDAVAQGFDTGETQGFGPGSLIPSPFDPRLILRIAPAVAKAAIESGVATRPITNFDEYTALLERFAFRSGLVMKPMFAKAKTQPVRVIYAEGEDERVLRATQVVLEENLARPILVGRPSVVEARINRFGLSIRAGKDFDLVNPEDDPRYRSYVQSYVEVAGRRGVTPDAARTVVRTNNTVIAALAVVRGEADAMLCGVEGRYMSHLRHVREIVGFSPGISDYAALALLITSKGAFFIADTQVRPNPSAEELAEIASLAAVHVQRFNIKPKIAFVSHSDFGSYDTESSRKMRRATQLLKEKHPEIEADGEMQGDTALSAAARRMVLPHSKLEGEANILIMPTLDTANVAYQMIKSLADALPVGPILIGPARPAHILTPSVTARGILNMTAVAVVEAQERAARQQPTLFT

SEQ ID NO: 11366 - protein, 81 aa, BradyrhizobiumColbertium
MSRLALPAFNQVPRPAATLRYSGSWKPDEARPAARWQHPNAIWSTDYPRRHCEPSGPRSARPDDRLREAIQTPSAEGFWIA

SEQ ID NO: 11367 - protein, 590 aa, BradyrhizobiumColbertium
MHRYRSHTCGALRESNIGETVRLSGWVHRVRDHGGVLFIDLRDHYGLTQCVVDPDSPAFSLAEKLRSEYVVRMDGKARRRPEGTDNDDLPTGKVEVYVSEIEVLGPAGDLPLPVFGDQEYPEDIRLKYRFLDLRREKLHQNIMTRVEIIKSMRRRMEGQGFFEFNTPILTASSPEGARDFLVPSRIHPGKFYALPQAPQQYKQLLMMSGFDRYFQIAPCFRDEDPRADRLPGEFYQLDVEMSFVTQEDVFAAMEPVITGVFEEFAKGKPVTKGWRRIPFAEALRKYGSDKPDLRNPIEMQDVSEHFRGSGFKVFARMLEDPKNQVWAIPAPGGGSRAFCDRMNSWAQGEGQPGLGYIMWREGGEGAGPLANNIGPERTAAIRAQLGVKEGDAAFFVAGDPDKFWKFSGLARNKVGEELNLTDKERFELAWIVDFPMYEYNEDDKKVDFSHNPFSMPQGGLDALKSQDPLTIKAFQYDITCNGYEIASGGIRNHVPEAMVKAFEIAGYGEQEVVERFGGMYRAFQYGAPPHGGMAAGVDRIVMLLCGTTNLREISLFPMNQQAMDLLMGAPSEATTKQLRELHIRVNLPQK

SEQ ID NO: 11368 - protein, 40 aa, BradyrhizobiumColbertium
MAKARTLISQKWQWRSKTGRSLGCRLGSRRVNPAATSDRP

SEQ ID NO: 11369 - protein, 509 aa, BradyrhizobiumColbertium
MAYQSPSLCHQAFQPYLKPMTVHFPFQNSYSALPDSFFARVAPTPVAAPRLIKLNRPLALQLGLDPDLLETSEGAEILAGKTVPAGAEPIAMAYAGHQFGHFVPQLGDGRAILLGEVIDRDGVRRDIQLKGSGPTPFSRRGDGRAALGPVLREYIVSEAMHALGIPTTRSLAAVVTGERVIRETALPGAVLTRVASSHIRVGTFQFFAVRRDTEAIRRLADHVIARHYPDLLHAERPYHALLAAVVERQANLIARWLLVGFIHGVMNTDNSSISGETIDYGPCAFMDAYNPAQVFSSIDEMGRYAYANQPRIGLWNLTRLAECLLPLFSDEQEKAVAEAQDILGAFSDTFSAAYQAGLRRKVGLFTERDGDEALIQDLLDAMAKNQADFTLTFRKLGDAAAGDAADSRAQFMEPAAFDEWAGRWRARLALEPQSAAERQAAMLAVNPMFIPRNHHVEAVIQAAVNDDDYAPFEELVKVLAKPFEDQPEYAAYADPPLPDQRVLQTFCGT

SEQ ID NO: 11370 - protein, 284 aa, BradyrhizobiumColbertium
MPFKFIHVTDTHLANPGSTLYGLDPRARLDAAIADINKHQSDAAFAVVTGDLTHWGEPESYVNFAEAMAALKIPYIAMVGNHDRRVTCLDALKAAPRDFNGFVQGTRTTEHGLFVFLDTLDETSHAGEMCERRLGWLASTLAAAPADMPFVVFMHHPPFPVGVHAMDEIGLKQSAEFAEVIAPYRSRIRHLFFGHVHRPIFGSFGKIPFSTLRGTNHQVWFELDQNAPHLASHEPPAYGVVLIDDENLVVHSHDFLDENLRFPFAPPAGMDGRDYALNFPGAVK

SEQ ID NO: 11371 - protein, 316 aa, BradyrhizobiumColbertium
MSLAEPAALPVATSAAPRPQVLKRLTSSFKASLPAYLLLLPSLVFLALFTYGAMGRVLIDALYQRTTPKAPVRFVGLDNISAVLADPAFTGAVVNNLIYAVGTTIPGIALALLFALALSRTHAVSSALRAALFLPVLIPMVAASALFLFIFLPNVGLLDYYIGRLLPVLPNWLGDPDIALTAIMIITVWKNAGYYMLFFLAGLQAVPEDVMGAAHLDGAGPYRRLRHIILPELKPTFLFVTVIATLNAVTQVDHVFVMTQGGPSNSTNLVLFYIYQQAVEHYDIGKASAATLLTLAVLMGLTALSFRTLANREGGA

SEQ ID NO: 11372 - protein, 289 aa, BradyrhizobiumColbertium
MKLFDRLFRDAPLATRGEITPKLGFALTVLLAIVWLIPFLWMGVATLRPPSDGINLMAELLPSLNPTLDNIRDAWEIGDFPRYTLNTTIICAGILLVQFVTITLAGFAFARLNFAGKTLIFYLFLMQLMLVPVLLIVPNLSLVAQLGLYDTLTGVMMPFFASAFGTFLMRQAFEAIPTELEDAALIDGAGLLQRIRHIYVPLSMPSFSAFAIISVTSHWNDFLWPLMVINSPDKRPLTVGLSVFTKTAEGTQAWGTIAAGTLMVIAPLLVTFLIFQKRFISSFVTSGIK

SEQ ID NO: 11373 - protein, 443 aa, BradyrhizobiumColbertium
MLFSRRLMLGLAIAGTMAGSLAVPAKAEGPTEIDLFFPVPVDGKLARDMGTLIKEFNETHRDVKATAVYTGSYDDTLIKTRAAIKAGKPPAAVIMSANFLLDMQIENELTNLDSLIAADGSTKEKFLGQFFPALHGNAVINRSVYGVPFHNSTPLLYINADKAKEAGLDPSKPPQTWAELTDWAKKLTKRDGDKVTQWGIAIPCAYDYCGWMMETLTMSNGGRYYNEEFGGEVYYDTPSMLGALTWWNDLVYKHKVHAPGATPGPAVSTSFISGNAAMMMLSTGSLTYVRDNAKFAYKVAFIPRNVRNAVPIGGASLIVPAGLEADKQKAAWTLIKWMTSPEKSGWWSRATGYFAPNMAAYKTPEMVDFLGKNPDAKTAVDQLDVAKPWFATYKTVPVRKTLEDEVMLVLNGKKQPKEALAAAQKAADETLKPYNAETSLKLP

SEQ ID NO: 11374 - protein, 87 aa, BradyrhizobiumColbertium
MTLAISRSAESAVMSRGSMRIRALQSGRNRCSPPTTYSYRTRCEDFRAHGSATTSTHMTTRASPRNSITNRSTAKPPETLLDLSGVC

SEQ ID NO: 11375 - protein, 382 aa, BradyrhizobiumColbertium
MDLITTTADLAAACSRLAKHPVITVDTEFLRETTYYPLLCVVQMASPEEAVVIDALAEGIDLKPFFELMGNEGVLKVFHAARQDIEIVWHQAGIIPHPVFDTQVAAMVLGYGDSIAYDALVEKVTGHRPDKTHRFTDWSRRPLTKEQMHYAVSDVTHLREVFAALDADLKKRRRSEWVSIEMEVLTSPRTYDFHPERAWERLKTRVRKPKDLAVLMEIAAWREQEAQSRDVPRGRVLRDEAVTDIATHAPTTLEKLAHLRSVPKGFEKSKWGADIIAAVERGLARDFSKLPKLEKPRNNSNGAAIVELLKVLLRMTAERHAVASKVIATVDDLEEIAADDEADVPALRGWRRELFGDAALKLKRGELALAIEKGRVIGVQRA

SEQ ID NO: 11376 - protein, 448 aa, BradyrhizobiumColbertium
MAYQLHPYTNARAHQQAGPLVIERGEGPYVFDAAGKRYFEAMAGLWSVGLGFNEKRLVEAAYKQMQALPFYHTFSAKSHGPSIDLAEKLVAIAPVTMSKVFFTNSGSEANDTVLKLIAYRSNSLGQPQRKKIISRMRAYHGVTIASASLTGLPNNHRSFDLPLPNILHTGSPHFYKDGAPGESEEAFATRRAEELDALIQKEGPDTIAAFFGEPVMGAGGVIVPPATYWDKIQAVLKKYDILLVADEVICGFGRTGKMFGCETYGIKPDAMVVSKQITSSYFPFSAIIMNDRMFEPIADESNKIGVLGHGFTAGGHPVGSAIALENLKIIEERGLVAHAAELGGYMQGRLRELTSHPLVGEVRGVGMIAAIELVLDKGRKSAASTPGAVGGIASRMLQERGVISRNMLDAIAICPPLITTKAQIDELIAAISGVLNDMKGEVAKLTPA

SEQ ID NO: 11377 - protein, 51 aa, BradyrhizobiumColbertium
MELIGHIPGLLRIGQHGHLRRSLKASPRRSSRRHHSMARTLAIATAQNLQR

SEQ ID NO: 11378 - protein, 56 aa, BradyrhizobiumColbertium
MSRGDELRELANDLSRAAERARRLGLRTTAYLLSMALVEVREAGAATDGGDDDGAA

SEQ ID NO: 11379 - protein, 187 aa, BradyrhizobiumColbertium
MLTSIHDDPPILICADLQVEYLTPGRRHVIFDGDAAMARCLELLMLWRSNLWPVMHLKRIAQAAWFNPASRLTDWIAETKPHPGEMTFEHPLPSAYSSARFVDHMSSIRAMRCVLIGFSLDETILATAVDGFHRSHRYQVVIDAVACRQPGTDDAAAYRNAVVNVIGNFATVQSSAELIRTSGAVAV

SEQ ID NO: 11380 - protein, 206 aa, BradyrhizobiumColbertium
MHGTRIPVAKPCSRAITIRLARDPNDLMLVTAIRSAVYLAEQDCPFEEEFDGNDMVAAHFIGFVGNEPAGCLRVRFFGDFARVERLAVRHQYRRSRVSFKLVQASVDYVKRKGFRKIYGQAQDRLVDFWAHFGAKPLGHNRKITFSDFSYTEMLLEIEPGPDAITLDSDPYVIIRPEGDWDRPGVLDASAGRAVTSPLRDLALADR

SEQ ID NO: 11381 - protein, 203 aa, BradyrhizobiumColbertium
MERGSFAARHDFDALPLSPDVDVRCAQFSEIATLSEMARRLVPGVQIGTVELARYFTLDPQSILTFSRKGKLVGGMAFLFLNDRGHDALLLDEICLTAPETRYLASANEDVAAIYIWAIAATGRGIAGLGKAAAHLRQIRFRGADCYAQPSTVAGRDIMRATGFAPVPSFQPDLWCYERPWHRQPMRMPGAMIQSRSFADARY

SEQ ID NO: 11382 - protein, 346 aa, BradyrhizobiumColbertium
MQQLLHRGAAMMQHREEALDASWDDLKLFLACAKYKSFRNAAEELGLTSTTLMRRIDRLEESIGCKLFLRDQSGLTLSDEGTAMIADVAHMERHAFNVFRRASRSSSDTSGTVRVAVTEGPGNFWILPRLIDFQKTYRKITVDLRCAMEQADVARLESDIAIQLEPPTNPDLIVAKLGRLHIYPFVSKEYQNLYGVPATLAELKNHRIIKQSAPQVDDGAYARVLGLNSLEGIVGIKTNSSVGVLYAVERGAGIGFLPTVSIALGAPLVAVDLGVSHHADLWLTYHKEFRSSERHKIVVDWLKKIFDARTYPCFRDEFIHPDALVPMMTAAREGFGLAGYVAATPT

SEQ ID NO: 11383 - protein, 385 aa, BradyrhizobiumColbertium
MRCAAQLSGTRQTIGLVRVPRIVAAIAMAFAVVVMMAAATPSFAQSPTPTPTPTPTPSPTPIPSPMSTNYDQSAGNSALNLGSGFLERLGNQASGGINRAFRTNPGGGGASASTEDPRYRTWFEGYGISVRTDAQGDFVGDKRKTVGGVAGFGARLAPGVNIGFSIDQSHTDIDVPLALQSATLDLTQLGFSGSADKGPWTWAFAVVHGFGKVHSSRDTGLGLATAGYRAAVDGALTEISYYWTKDQMRIVPKGALEYVRATSAAFQEAGGLAPLNVGSTALSRARVMIGAEVGRYFIIEQKVLDLSAYGKFVDNFYQDLGSVQVSLGAQSIIVPGIGESRYGMDAGASASLSLTNVARLYVNYDGKFRNELTSHQGTAGFEYKW

SEQ ID NO: 11384 - protein, 68 aa, BradyrhizobiumColbertium
MPQKGTVKWFNPTKGYGFIKPNGGDKDVFVHISAVERAGLSTLNENQVVEFDLVENRGKSSAENLKVS

SEQ ID NO: 11385 - protein, 222 aa, BradyrhizobiumColbertium
MTGAVMKRRVAILISGRGSNMAALIRAAAAADFPAEISLVISNKADAPGLERARASGVKTEVIESKPFGKDRAGFEKVLQAALDRHGIELICLGGFMRLFTAEFTKAWYGRMLNIHPSLLPSFPGLDPHGQALRAGVKLSGATVHFVIPETDAGPIVMQGAVPVGDHDTGDTLSERILEVEHRIYPEALRLLASGKVRIEGDVCKTAGSAASENFLIAPVVS

SEQ ID NO: 11386 - protein, 357 aa, BradyrhizobiumColbertium
MTDRKNGLTYADSGVDIDAGNRLVDLIKPMVRATARPGADAEIGGFGGLFDLKAAGFKDPVLVAATDGVGTKVKIAIETGLHGGIGVDLVAMSVNDLVVQGAEPLFFLDYFACGKLDPEAAAAIVAGVAEGCRESGCALIGGETAEMPGLYKDGDYDLGGFAVGAAERGTLLPRKDIAAGDAVIGLASSGVHSNGFSLVRKIVEQSGLSFAAQAPFAPVMTLGGALLTPTKLYVKSCLRAIRETGAVKGLAHITGGGFTDNIPRVLPKHLGVGIDLARLPVLPVFKWLAGQAGIAELEMLRTFNCGIGMIAIVEPDRVDQVVEVFTDAGETVAQLGTVIPAEGEHRVVYNGHLDLAL

SEQ ID NO: 11387 - protein, 180 aa, BradyrhizobiumColbertium
MSIPNIITLGRIMLVPIIVWAIVSSQMEVAFAVFLIAGVSDAVDGFLAKRFNMTSELGALLDPLADKALLVSIYMALGIWGAIPRWIVILVVSRDIMIVAAVIVSWLFDRPVEMKPSKVSKLNTVAQVAFAALVLAALAFGFKPAPYDMILMGLVTVFTLSSVSLYLVEWLRHMSTIEAK

SEQ ID NO: 11388 - protein, 225 aa, BradyrhizobiumColbertium
MAGRVHPRQLAFSLPHAESLSRDNFLEGPANAAGLGLIDSWPEWPNRIMWLAGPEGSGKSHLAAIWAEEAGARSTTANALTAAGVPGALATGALVVEDLRANDFDERALFHMMNLAREDGAYVLLTGREAPASLEIELRDLRSRLRAVPVVTLQPPDDQLFRGLIVKFCADRQLTVDESVVSYLATRLERSSAAARRAVELLDSEALRLGRPVTRALAAELLRDV

SEQ ID NO: 11389 - protein, 729 aa, BradyrhizobiumColbertium
MDSAQTVETKEKPPEAEGLPAIASSPERFINRELSWLHFNRRVLEESVNLNHPVLERVRFLSISANNLDEFFMVRVAGIKAQVREGIAERSPDGLTPSEQLALINRTVSQLASDQQAIWRDLRATLAEVGIVLVDGKEVTKAERTWVEDYFLNNVFPLLTPLAIDPAHPFPFIPSLGFTIALQLTRAADGKQMNALIRMPGKIDRFIRLPAEGTVRLISLEQATTLFINRLFPGYNLHGQGSFRIIRDSELEIEEEAEDLVRLFETALKRRRRGSVIRLEIDAKMPEQLRSFVQHALSAADDEVFLVDGVLAMNELSQLTRLDRPDLEFTPYVPRHPERVREHGGDIFAAIRQKDLIVHHPYESFDVVVQFLQQATRDPDVVAIKQTLYRTSNNSPIVRALAEAAEAGKSVTALIELKARFDEEANIRWARDLERAGVQVVYGFLELKTHAKLSMVVRREGGSLTTYVHTGTGNYHPVTARIYTDLSYFTSDPTIGRDAARVFNFITGYAAPSDLEKMAVSPLTLRKRIIEHIQGETAHARHGRHGAVWMKMNALVDPDIIDALYEASQAGVQVELVVRGICCLRPGIPGLSENIRVKSIIGRFLEHGRIYCFGMGQGLPSAKAAVYISSADMMPRNLDRRVEVLCPLQNPTVHQQVLEQIMVANLKDNEQSWQLLPDGSSTRMKTAKGEEPFNVHNYFMTNPSLSGRGKSLKESSPRRLTRRNERHQS

SEQ ID NO: 11390 - protein, 500 aa, BradyrhizobiumColbertium
MKQPRKRGSSVAVIDIGSNSVRLVVYEGLSRSLIPIFNEKTLCGLGREVQSTGLLAPDAVDKALTSLKRFRALCRVMQVGRVFAIATAACRDASNGPDFIAKAERICAVNIEILSGPREARLSALGVISGIHLPDGIVGDLGGGSLELIDVRRNSVRSGVTLPLGGLALQDLAHKSLKRADHIVREELDGVPQLTAGRGRTFYAVGGTWRALARIHIIQSGYPLQVMHGYSISAAEALDFSRRLRRLVAADMLADIEIVADARRPLLTYAALVLEHIIRVAKPKTIVFSTFGVREGLLHEKLSETERGKDGLICAAEELNQLLSRSAKHARELIAWTDRLVRVVKLRESEEDRRLRHTACLLSDIGWRVHPDHRGEQTLSLVVNGNFGSITHVQRAFVGLSVFYRYAGLSEENQPPATMQGLLPPAQLERARLLGAAFRVAHLISAARPGVLPATHFRSRGRNLTLVFEHRLGDLVADRVGSRFRQLARLIGRTGSIVRR

SEQ ID NO: 11391 - protein, 377 aa, BradyrhizobiumColbertium
MQLQHGIRLSVRARKAAVGALLALALSSWPSAPHAQAELKLSDAQARNLGVRLTHPVAVRTDLTLPYPVQIVIPTQQLRVVSAPMAGMVANLLVGRGDRVSAGQPLVTLESPSFVSQQRDYLHALAQEHLASQQLKRNMDLFEGKAVPQRVLEASQAEARQAALVVAERRQMLHLSGMSDEAILRLGQEAAISGTLTVNAPQTASVVEVTVSPGQRIEQSAPLIKLARLSPLWAEIAVPATNIRAIRTGAKVEITGYSTPGKVVLVSETIDPATQTILVRAEIPNDGELHPGQTTAARIGFLSAGESAWEIPYNGLVRRGEQTSVFVATAGGFRLVPVKLVAEDQDHVVISGHLTDQDEIAIGGISALRGILSGLGQ

SEQ ID NO: 11392 - protein, 1024 aa, BradyrhizobiumColbertium
MLRRLVAFALAQRLFVLLSVLLVVGAGAVLLPGLPIDAFPDVSPIQVKIIMKAPGLTPEEVEQRITVPVELELLGLPNKKILRSTTKYALADITVDFEDGTDIYWARNQVSERLSNIARDFPDGVSGGLAPITSPLGEMFMFTIDSPELSLAERRTLLDWVIRPALRTVPGVADVNSLGGYVRAFEIVPRNDALAARGISYDVFRRAIEANSRNDGAGRVNQGEDSALVRIEGSIRSIEDIKAIVVDTRDGVPILVNDVASVKIGTLTRYGAVTSDGNGETVEGLVLGLRGANAGQLVRDVRARLAELQPALPKTVSINVFYDRSRLVNRAVGTVVRALGEATVLVIVLLLLFLGNWRASLVIALSLPLAIVIALIVMRLVGMSANLMSLGGLAIAIGMLIDALVVVVENIVGHLGKQEPGKTVPLIHLVYRSVCEVLEPVASGVLIIIIVFIPLLTLQGLEGKLFIPVALAIIFALTGSLLLALTVVPVLTSYVLKSASHRDPMLVRAAQRVYAPALDWALNNERKVMAAAVIGLIAAGLAYTKLGKTFMPTMDEGDVIVSVETLPSVNLDESLAMNARLQKALLAVPDVAGIVARTGSDELGLDPMGPNQTDTFLVLKPAAERQTDDREALLQKLREVLTGFPGISLGFTQPIDMRVQEMISGVRGDVAVKIFGPDIARLNEAAAKLSAILSSIDGAEDVYTTLNEGAQYYTVAVNRMEAGRLGLTVDSIVNSLRTQIEGRTIGTALEEGRRTPILVRGSETTREAPTLLANLPLTLASGQHVALSQVARIQRVDGPVKIDREDGARMSVVRANIRGRDMVGFVEEARQKVAIELPLPNGYRLTWGGQFENQQRAAARLSIVVPIAIGLIFLLLFTTFGAIRQALLVLVNIPFALIGGVFALVLTGEYLSVPASVGFIALLGIAVLNGVVLVSYFNQLRAHGLSEDRIVVEGAMRRLRPVLMTASITALGLIPLLFASGPGSEVQRPLAIVVIGGLLSSTMLTLILLPILYRRYGGAPKVAK

SEQ ID NO: 11393 - protein, 103 aa, BradyrhizobiumColbertium
MTDQPVCLTLIVPDQLREELLDYLTDQTDLVSGFTAAPGAGHGAGVRLQTAAERVKGHADQTAVQIILARSDASNLLDRLRASFGGTKLVYWILPVTEFGTID

SEQ ID NO: 11394 - protein, 57 aa, BradyrhizobiumColbertium
MPSHCHSGVRRQSARRGLQPDGIRGLRDTNYWSGVASFSALAQGAPRTLLLSMATDF

SEQ ID NO: 11395 - protein, 286 aa, BradyrhizobiumColbertium
MGWLWQIFDPATIGAFFTQFRNEMAEPTFWIAVGKIIWINILLSGDNALVIALACRGLSPRHRLWGMIFGAGAAVMLRIIFTGIVASLMGLPYLKLAGGLALIVIAAKLLVPENEDEDDVESGAHLWHAIQIVVVADIVMSLDNVIAVAAAANGSVPLLILGLAISVPLIVAGAALIMALLAKLPVLVWAGAALLGWVAGEVIATDPGIAPKLHTLFDGPLGASLDGMLGALRIPPQFGHGGGGGEYFCAVLGVIVVLVVGFIWRRRSLMRTALESSEHHARASAE

SEQ ID NO: 11396 - protein, 140 aa, BradyrhizobiumColbertium
MAIERTFSIIKPDATERNLTGAVNAVIEKAGLRIVAQKRIRMTREQAETFYAVHKARPFFGELVDFMTSGPVVVQVLEGEGAIAKYREVMGATDPAKAAEGTVRKLYAKSIGENSVHGSDAPETAAIEIAQFFSGNEIVG

SEQ ID NO: 11397 - protein, 282 aa, BradyrhizobiumColbertium
MRSMRPCHRKAPRTQLVFPSMRLALALPQGVEELLEVRRKARLGSQTLLEPFAHGVANRAAGAPVDLFAVVGKKASHRGFRVLKVRTPYQVIASQLVSPTVGNGGHSRKNCMKRTLSVQGKAPARGAPGLLLEVPGGLRYLGKVLTVLVAAVDQPPAGSPRGRDQPAHIAAAITVGDGTSDIEARSAPAVAMVPAATPSAMPMSGCGGRRQCGTQRDRGDGGKRKFPPHGDLLKTAGAGPSRRRESRRNGPPDDQASVSMGRPYATKAEPNPDGGFRLGSSW

SEQ ID NO: 11398 - protein, 619 aa, BradyrhizobiumColbertium
MLLITDLSIRLAGRLLIDQSSVQITPGARVGLVGRNGTGKSTLFKVIRGELAAEHGSVTLPPRWRIGSLAQEAPNGPESLISVVLKADLERDALLTEAEHATDPHRIAEIQTRLVDIDAHSAPSRAAAILSGLGFSAADQLRPCAEFSGGWRMRVALAATLFAAPDLLLLDEPTNYLDLEGTLWLEDHLAHYPRTVIVISHDRDLLESSVDQILHLERGKLTLYKGTYSSFEEQRAARELLDAKAIKRQEAERARLQAFVDRFKAKASKARQAQSRVKMLERLKPITALVTEDVREISFPAPEKILSPPIIAVDNASVGYDPAMPVLNRVTLRIDNDDRIALLGANGNGKSTLVKLLAGRLAPFSGKVTRADKLSIAYFAQHQLDELNEDASAYDHVRKLMGDAPEAKVRARAGAIGFSGKAADTKVGKLSGGEKARLLLGLATFFGPNMIILDEPTNHLDIDSRAALAEAINEFPGAVIMVSHDRYLIEACADRLWIVADRTVTNYDGDLDEYRRLVLSARNAEAPRERSAANDKPQRPKSDNRGSLKKRIAEAETEIARVSEIIAKIDTALALPDIFTRDPKQAAQLSKARANAAEALARAEEQWLEASTQFDEAAG

SEQ ID NO: 11399 - protein, 174 aa, BradyrhizobiumColbertium
MRHQKLPGSLMITLAAVAPLVAGCSGGTDLLSKDAAWFQKPGRLFIKNISIESPPLTPDKPVGPEDLVSADGACPGMTPPPGPADANASTTAPAPMGGTVALGHTECDVVRGIGAPSTVNLSNDAAGRRVAVVTWATGPRAGIYTFTSGRLSSIEGNPEPQPVPRAAKPRKKSA

SEQ ID NO: 11400 - protein, 147 aa, BradyrhizobiumColbertium
MLFYHLQDMTVENVLPPLLEKSLERGWRVVVQSTSEERADALDAHLWTYRDDSFLPHATWRVNDAADQPIVLAIEGGNPNGANVRFLIDNAALPEDAQGYERMVLLFNGDDPDALAIARTVWTDCKARGFDVTYWQADERGRWQKRN

SEQ ID NO: 11401 - protein, 499 aa, BradyrhizobiumColbertium
MSDAIKVGFVPLSAAPRGIVVVFCDDGLKLGPATTKALGGANEIVKRAAAAAAFKGKSGAALDILAPEGVKATRLIVIGAGKATGLKANDFLKFGGVAASKLPAGASAMTIMAELPGGAMTSEQAVAIASGLRLRSYKFDRYKTRKKDGEEGGLRADISLAVGDAGAAKRAFVSAGHVIDGVIIARDLVNEPPNVLFPEEFARRAAQLRKLGVKVEVLDVKAMQKLGMGALLGVGQGSARPSRTVIMRWDGGKKGEAPVAFVGKGVCFDTGGISIKPAGSMEDMKGDMGGAACVVGLMHALAARKAKVNVVGAIGLVENMPDGNAQRPGDIVTSMSGQTIEIINTDAEGRLVLADVLWYVAKKVKPKFMVDLATLTGAIMVALGTERAGMFSNNDELADRLLTAGIESGEKVWRMPLGPEYDKLIDSQFADMKNTGGRHGGSITAAQFLQRFVDGTPWAHLDIAGTAMGAPKTDINQSWGSGYGVRLLDRLVSDHYERK

SEQ ID NO: 11402 - protein, 389 aa, BradyrhizobiumColbertium
MGSIDRYIFRTTLASFALVLVSLTGVIWITQALRGIDLMTSQGQTILTFLGITSLVIPALVLIISPIALMIAISHTLNKLATDSEIIVMNAAGFSPFRLFYPFFYATCVVALLVAFIAAYLAPDGMRRIKQWDAEITADVLTNILQPGRFAQLDKNLTIRIRERQPGGILAGIFIDDRRDPNERVSIVAEHGEIVKNETGSFLVLETGNLQRFEAGKRDPALVAFGRYGFDMSKFSGQGRDVTLGIRERYLWELFSPSEDDPVYKQIPGQFRSALHDSILAPVYPFVFAVLTFAFLGAPRTTRQSRNFSIGSSILAVFGLRMAGFACSVMAVKSPGAVLVQYAMVAGGIGIGLAMIIGGVVVEPPPGLMEAINRSNARIARLFGRPAAA

SEQ ID NO: 11403 - protein, 365 aa, BradyrhizobiumColbertium
MSMLTNTLGRYFAGRFVVAALGVFGGIFLLLVLVDYIEMVRKTSGLASASAIMVAETSLFRVPQLLEKLTPFCMLIGAMTCYLALSRRLELVVARAAGISAWQFIAPALGSALLIGVIATVAYNPMSANLRELSKRMEAELFGSAPGGGIQDASGFWLNQVTSDGQTIINAARSEQQGIRLTGLTLFRFDPDQHFKERVEAREATLEAGRWVFKGVRRFSLDAPPIDQASLEIPTTLTEAQVRNSFSTPETVSFWQLPSYIRSSESSGFATAGYRLQYQKLLAQPFLLAAMVMLAASVSLRFFRMGGVQKMVLSGVGAGFLLYVLSKVTEDLSKAELMHPIAAAWLPVVVGGLTGFLALLYLEDG

SEQ ID NO: 11404 - protein, 804 aa, BradyrhizobiumColbertium
MSVRRLLIAAVAAASLGGLIDVAAVTPSHAQYTYNPLPPRPKPPRAPNDNQMLVQATEVNYDYNNSRVSAVGNVQLFYNGTSVEADRVIYDQKTKRLHAEGNIRMTDADGKITYAEILDLSDDYRDGFVDSLRVDTADQTRMAASRADRSSGNYTVFENGVYTACAPCKDDPKKPPLWQVKGARIIHDQQEKMLYFETAQIEFFGVPLAYMPYFSTPDPTVKRKSGFLMPGYISGTDNTGYGVEVPYYWAIAPDMDATITPRFLSRQGVLMQGEFRQRLIDGAYQIRAYGINQLDPGAFAGLPGDRDFRGAIDTKGQFALNDKWVWGWDGVLMSDYYFFSDYRLYQYRDPLGSFLLLPTEALSQLYLTGVGNRSFFDARTMYWLSYSGNQSQVPIVYPVIDYSNVLNYPVFGGEFSYKTNFVNLSRDEAVFDPITTVANTNSLCTTASADPLARMPSQCLLRGFPGTYTRLTAEAQWRRSFTDPFGQIWTPFASLRADAINSSVSNQPGVSNYLPVGDTQAFRLMPTVGLEYRYPFINIQPWGSTTVEPIAQVIIRPNETYAGRLPNEDAQSLVFDASNLFSVDKFSGYDRVEGGGRANVGVQSTTQFDRGGAVKVLFGQSYHLFGLNSFAVQDTINTGLNSGLDKPRSDYVASASYSPNSTYTFSIRSRMDEQTWNVQRFEAEGRANFNRWSVSMLYGNYAPQPELGYLTRREGILTTGSLKVAANWVVSGSARWDLEANKINQYVLGAGYVDDCFVLAANYVTSYRYSAGTAPPTLSHAFMFQIGLRTLANSSTTSSSAGLQ

SEQ ID NO: 11405 - protein, 311 aa, BradyrhizobiumColbertium
MMIPLPVFRLLLAICAGLMLTGLPSPLRAQNIVVMVNGDPITDFDIEQRTKLTQLTTQKTPSRQEVINSLIDDKVKLKEGRKYGVDPGVSDINQSYEGMAQRMRITPEQLTKSLESKGVRPETLKGRMKAEMVWTSLVRGRYKERLQVGERDVAQAVQAQTGEKLQIEGTEYKMQPIVLIVPRGSSATFLETRKKEAEAYRARIGSCEEANSLFRSTPNATIRDTVTKTTAELPEPLRKVLDDTPIGHLTAPEMTKNGIEMVVLCSRKPTMIDTPKKREVREKMYQEKYEKTQKAYLEELRKAAMIEYRNR

SEQ ID NO: 11406 - protein, 341 aa, BradyrhizobiumColbertium
MAEPSSERPAKPLALTLGEPAGIGPDITIAAWLKRRELNLPAFYLLGDEDLIARRAKVLGANIRIAGVSPSDAASAFTDALPVVATGERASAEPGKPDTSSAPAALASIRQAVTDVRAGRAGAIVTNPIAKSVLYRAGFRHPGHTEFLAELAAENGRVPQPVMMLWSPQLAVVPVTIHVSIRDALGELTSELIVSTVRIVATALKARFGIAKPRIAVSGLNPHAGEDGSLGHEEQTVIAPALKVLRNDGIEVRGPLPADTMFHAAARQTYDCAVCMYHDQALIPVKTVAFDDAVNVTLGLPFVRTSPDHGTAFDIAGTAKANPASLIAALKLASRMAASQG

SEQ ID NO: 11407 - protein, 284 aa, BradyrhizobiumColbertium
MSAIDDLPPLREVIRQHALSARKSLGQNFLLDLNLTARIARAAAPLDEATIVEIGPGPGGLTRALLALGARRVIAIEHDERAIPALQDISTRYPGRLEIVHGDAMTFDPRPLLSGERTKIVANLPYNIATQLLINWLTVEPWPPWYEMMVLMFQREVGERIVAREDEEAYGRLGVLANWRCETKILFDISPSAFVPPPKVTSSVVRLVPRPEPLPCDRRLLEQVAAAAFGQRRKMLRQSLKPLGVDPARLAQAAGVDATRRAETIPIAGFVAMARELADIRSET

SEQ ID NO: 11408 - protein, 352 aa, BradyrhizobiumColbertium
MALMRRQSLVKFDAPLCETIVDTPKPQGREVLVRIERCGLCHSDLHIQDGYADLGGGKKLDTTRGMTLPFTLGHEIAGIVDEVGPDVPASLVGAKKAVFPWIGCGQCRDCANGDENLCVKQRFLGVSIDGGFATHVLVPDAKYLLDYDPLPVNQAATLMCSGVTAYGALKRLVDRPRQRNLLLIGLGGVGMMGLSFAQAMFKQPITVADLSPAARDTALKNGAAVAYDPAEPDVIKRILKETEGGFDEIVDFAGNEKSMAFAVAVAARGGKIVVSGLMGGQFTLPMVQWVYKRMTIEGFMVGTLAEAHELMALARAGKIKPTPMREEPMGDVQKWIDELRAGKVVGRIVLKN

SEQ ID NO: 11409 - protein, 78 aa, BradyrhizobiumColbertium
MSIRCTVESAFFIAWGCLEKSGELGPPDASANLLLDAIEAQLRTGERRDLMLANKAIDAYRAHAAQDRSLRDCEAHFG

SEQ ID NO: 11410 - protein, 238 aa, BradyrhizobiumColbertium
MTGRPQNDLLRQLNHQDFELLAPHLQPVEVETSHILHHAGDGMAAVHFPCGPTLVSFAVPVEDDREVESLLVGREGAVGIASGRTPSLAYSRIVVKLGGTLFRLPLRAFEQAQQRSATLQESFSRYADCQFAQLLQTAACNAAHSIEQRAAKWIISAQERVGGAEIPLTHEQLAGMLGVSRSYASRVIQMFKARRILATRRGAILILDAAALEARACSCNDWVKKHFDEVLGAAIAGG

SEQ ID NO: 11411 - protein, 239 aa, BradyrhizobiumColbertium
MLIRNLGEHTELAQEDIAEIRALTFTLRDFDPNEDFIRQGDEPEHSALVVSGMVARYHLLGSGRRQYLAFHLTGDLPDAQGLFIDQMDHGLSALGPATVAFIPHRELFVAFRRRPNFGLAVWRETLLDAAIFREAITNNSARSMQTRMAHLFCELFYRARAAQLVRGNRCPVPISLGQLGETLGMAIATVNRTLADLRRSGAMDLREGELVVLKWRELQRLGDFSPAYLHLKRQSSPRA

SEQ ID NO: 11412 - protein, 79 aa, BradyrhizobiumColbertium
MSPTTILERIRSLFPPRASEHLDSIGDAFENGMMKEPIRPMSDQELARAIREFRAAPASDWTIAKLSRRSVGASVPRDA

SEQ ID NO: 11413 - protein, 233 aa, BradyrhizobiumColbertium
MPYSKFIARLQAIEGLSEEERRQVAALPSALRQVADGEIVLRQGESASRCVFVVSGFLYQARIVGDRSQILAFHVPGDMPCLHTLLVSPMDADLVGLGPTIVGTVAHSQLKQLLDDSIHLTRAFWRETLIDAAISRQWIARLGAQAALPKVAHLICELAARLEVVGLVKDGCFQMPMTQRHVADACGLSIVHVNRTIQELRHRELIAWEGSEIELLQSDELRRLADFRPDYLS

SEQ ID NO: 11414 - protein, 95 aa, BradyrhizobiumColbertium
MANYSQMTTRRNHQRYEKGVKLSYGMSRPFASLPRCSARRRGGEPRFGYTIVFEPDFFIAPPGGIAKVRRPKTDPVMGSGGTLLSAWRTKPRGGG

SEQ ID NO: 11415 - protein, 365 aa, BradyrhizobiumColbertium
MSGSEHLDHLIGRIYEAGLVPSLWPEVLNEIGIAVGGNGGLLFAVRDGYVSGINSANHDQTMPLFLKEGWSERDPLLPRAAALNHAGFLVDGDLLSEHEIATNDVYCSFYRRHGIGYRAGTIIPIPSGDSIAIVMPRHQDNGPVPRDVVLFLDDLRPHLARASMTANRLGFERARAQADALQAIGLPGAILREGGRLLAANRLFEALMPSLFHDRAERLTLTDAAADGLFLAALATSSVAGSRIVKSIAIAAAMDRVPMVLHVIPVRGSARDIFTRATFMLVVTPVDRGAVPSAEVLQGLFDLTPAEAQVARRVAQAESLDALAAAIGVARETVRTQLKAVLSKTGLSRQQELVSLLAGKALRGD

SEQ ID NO: 11416 - protein, 39 aa, BradyrhizobiumColbertium
MVHCPIKAERRGKLGPPIYAPLPHSAWTTANRGLECEPR

SEQ ID NO: 11417 - protein, 219 aa, BradyrhizobiumColbertium
MTTGGHGIDGVERRGLMFVLSSPSGAGKTTLSRMLLEREPGLKMSVSATTREKRPGEVEGRDYFFVDKRKFEMMVEQGELLEWAIVFDNLYGTPRAPVEAALAAGQDVLFDIDWQGTQQLHQKASVDVVRVFILPPSAADLEKRLHSRAQDSDEVIRKRMSRASHEMSHWAEYDYIVINHDVDQAFAEVQSILKAERLKRERRIGLVGFVRSLQGQLQG

SEQ ID NO: 11418 - protein, 295 aa, BradyrhizobiumColbertium
MALSSMTGFARSHGASGPYTFEWELKSVNAKGFDLRVRLPQGFDELEAHAKKRAGELLSRGTVYANLNVKRTNAAASVRVNEDVLNAVLKAAALIAGKVDAVAPSIDGLLAIKGVVEVAEPEGDEEEDRAARAAAADAFDKALVELVEMRKREGTSLGQILTQRVDEIEQLAKKAEGSPGRKPEAIKARLAEQIAALLDTSDRFDSDRLMQEAILIATKADIREELDRIASHIAQARELIGRGGPIGRKLDFLAQEFHREVNTCCSKSNDIELTNTGLALKNVVEQFREQVQNLE

SEQ ID NO: 11419 - protein, 390 aa, BradyrhizobiumColbertium
MVVGNAIITLLLIAMLGAGGVYYYGRQVLEAPGPLQEDKIVNIPQRAGKRDIAETLNREGVTDVNPWVFIASVAALKASSDLKPGEYSFQKNASLRDVIATIVEGKVVQHAVTIPEGLTSEQIVARLSDNEIFTGSVRELPREGTLLPETYKFPRGTTREQVIQRMQQAHKRVLAEIWERRNQDIPIKTPEQLVTLASIVEKETGKPDERSRVAAVFVNRLKQRIKLQSDPTIIYGLVGGKGTLGRPIKRSEITQPSPYNTYVIEGLPPGPISNPGRASLEAAANPARTRDLYFVADGTGGHAFTETYDAHQKNVAKLRAIEKQIQNDTVEPAEEAQPPAAAAPGGAADAPTATTPARPNQQKRPPAARPANPAPARQGAVQSSPPVVQR

SEQ ID NO: 11420 - protein, 421 aa, BradyrhizobiumColbertium
MRRVVVTGLGMVSPLGCGVEPTWKRILNGESGARRIESFDVSDLQTKIACTVVRGDGTNDSFNPDKWMEPKDQRKVDDFIIFGMAAAGQALDDANWHPETEEDKCATGTMIGSGIGGLNGIAETAILLKERGPRRVSPFFIPGRLINLASGYVSIAHGLKGPNHSVVTACSTGAHAVGDAARLIALGDADVMVAGGAESPISRIGIAGFNAARALSTGFNETPEKASRPYDKDRDGFVMGEGAGVLVLEELDHARRRGARIYAEVIGYGLSGDAYHITSPSPDGDGGFRSMSAALKRAGLTASDLDYINAHGTSTPLGDEIELGAVERLLGNAASKVAMSSTKSSTGHLLGAAGAIEAIFAILAIRDNVVPPTINLDNPSVETAIDLVPHKAKQREVNVALSNSFGFGGTNASVIVRRLAS

SEQ ID NO: 11421 - protein, 79 aa, BradyrhizobiumColbertium
MSDIGERVKKIVVEHLGVEPEKVVDNASFIDDLGADSLDTVELVMAFEEEFGCEIPDDAAETILTVGDATKFLEKNAKS

SEQ ID NO: 11422 - protein, 245 aa, BradyrhizobiumColbertium
MFDLTGRKALVTGATGGIGGAIAQALHAQGATVAISGTRKEVLDELAGKLGERAHVLPCNLSKADEVEALVPAAEAAMGQVDILIANAGITRDNLFVQLRDEDWDEVINVNLTATFRLARAATKLMMRKRFGRIIAITSVVGVTGNPGQGNYTASKAGLIGMIKTLGAEYAKRGVTANCIAPGFIKTPMTDALNDKQRETILTKVPAARLGTPEDIAAAAVYLSSNEASYVTGQTIHVNGGMAMI

SEQ ID NO: 11423 - protein, 319 aa, BradyrhizobiumColbertium
MTAAFTFPGQGSQAVGMGKALADAFPVARAVFDEVDAALGEKLTAVIWDGPAETLQLTENAQPALMAVSIATLRVLEAEAGFSVGRDAAFVAGHSLGEYSALAAAGSLTVSDTARLLRTRGLAMQKAVPVGAGAMAALLGLDYEAAMEVAGEAAQGQVCQAANDNGGGQVVVSGDKTAVDRAVEIAKAKGAKRAMLLPVSAPFHCKLMQPAADAMAEALSKVAIKAPAAPLVSNVLASAINDPDEIRRRLVEQVTGTVRWRESVAYMAGRGVTHFFEIGAGKVLTGLVKRIADGAVGVAVGGPNDIAAAKDALAAAKQA

SEQ ID NO: 11424 - protein, 269 aa, BradyrhizobiumColbertium
MHDGAHGCLSADEKTNLALSQWFCAYPLFAETRSYRRYHLQHHARTQQEDDPDLVLSAPFPITKISYRRKFIRDITGQTGYQQRKAQLLNALGPKDWPWRQRAAHFWEKLGPQCVVNAIMLVALAAAGVWWAYPLLWLVPLLTWMMVITRIRNIAEHAVVPDSSDPLRNTRTTHANFLERLFIAPYYVNYHLEHHLLFYVPCYNLPKVHRLLSASRYAGRMEVQPNYAAVLRLATAKPNREDRPGQLVSSARRAQAGAEVDANQTAGGF

SEQ ID NO: 11425 - protein, 87 aa, BradyrhizobiumColbertium
MRTVMHQDRKAKLARADDGDGDDVGDRIGPPRNQSDRTNDQRPGVRNECDALLGDALAHVGQLIIGQEIPGTHAKRGHGLTLSVRIA

SEQ ID NO: 11426 - protein, 234 aa, BradyrhizobiumColbertium
MAETSAQEPLQAAGDPKHTARATRSAGRKMRSLLLDAASPLFRERGLSGTAITDIATAANAFPSQITYYFRTKEALFVECACRELLYLARATERTALQACSPQEYTRTLAETVTASDSVAFFAEALTLTRRRQDLAPLVERTIERLHGEGARAYASQVARHGWRSLRAPDESSRRFWAVAIGVILEGYAMGRSPEQLCAEMLRVLGEQAKSANDTGRLRLVEEPDASSNSNGEG

SEQ ID NO: 11427 - protein, 155 aa, BradyrhizobiumColbertium
MPLYEHVFLARQDASPQQVEELTAQMTGIVEGLGGKVTKTENWGVRSLTYRMNKNRKAHFVLLNIDAPSAAIAEIERQERISEDVIRYLSVRVEELEEGPSAMMRKADRDRERDDRGGGFRGEREGGFRGDREGGFRGDRGPRRPRDEAETTDGE

SEQ ID NO: 11428 - protein, 79 aa, BradyrhizobiumColbertium
MAEAGARRPFFRRRKSCPFTGANAPKIDYKDSKLLMRYVSERGKIVPSRITAVSAKKQRELARAIKRARFLGLLPYVIR

SEQ ID NO: 11429 - protein, 328 aa, BradyrhizobiumColbertium
MMAFALIALIAGAASALMFASIASGALISLALFYLAPLPLMVAAIGWGPLCASLGGIAAAIGLGALFGLPYCIAFAVTVALPAWWLGHLVLLGRQLGSAAPEGTTAGPPTEAKVEIEWYPVGRILLWIAGFATLTTMAALLTLGTDAETIIGTLRRGLMRLLRTTDPQTSGEASQLVDALVRIAPAAATIVAMMTLTLNLWLSAKVTATSGRLRRPWPDLMAAELPPMTLVALCIALAFSFTGGLLAIVAQIATAALLMAYALTGFAVLHTLTLALKGRTFWLSSAYAVVVVFGWPMIAVVILGLADSVFGFRERFLRSRQPPPLPTP

SEQ ID NO: 11430 - protein, 199 aa, BradyrhizobiumColbertium
MEVILLERVNKLGQMGEVVKVRDGYARNFLLKRGKALRATADNRAKYDGMKAELEARNLKAKGEASKVAEKIEGKNIIVIRQASEAGQLFGSVTVRDIVMAFETDGVHLDRPQVQLDAPIKTIGKHTVTVAVHPEVEVEITVTVARSQDEAERINRGEDISTRNEDRDAAAEAIAAAGEFFDPEAQQDEVEPAPAADEK

SEQ ID NO: 11431 - protein, 155 aa, BradyrhizobiumColbertium
MRAEADPEFAHISERIHANVGRQGFMNLVGAELSELSRGTCTIAVERRPELLQQHGFFHGGVTAFLVDNATTIAAATSRGQPALTAEYKLNLLSPAVGEKLICRARVIKPGRQVAVVAADVFCVKDGVEKHTATALASIAMLNEDVAGKTKSPAA

SEQ ID NO: 11432 - protein, 198 aa, BradyrhizobiumColbertium
MRTSVRDDLLAAGLMVFDRVGFEAATVAAIRTRARASNGSFFHAFGSKKELAGALLLEVLRHYHAAMLAALDPIPDAEQGIDRLIRAHLDWVVTSRREARYLFEISRGEWADDVRDAQRAQNARLAEGIERWRAPLVARGELLPMPPMMFISQLIGPAQIFCRAFLSGRDRTDPRNGVDTLIACANRALRPFDRIIKQ

SEQ ID NO: 11433 - protein, 310 aa, BradyrhizobiumColbertium
MSSRALSLATVLLLIGFAVADSVLAQPTNLEAGKTPSQLFAQTCNVCHKSPRGLLKSVAPGSLPGFLRQHYTTSSDMAGVLATYLISNGATDTRYQAKDGKKDGAAAGQSPEHQGRRQRSQEARPEGEGAAPAGDGPRPKRAARPPAEDGSQPEGQEAPEARKGKRRVKPGTQDAPKADAAAPATEDKKSEPKPETVKPDGAKVEPDSGKAAEKPAETKPESPRVEPRGSEPPALRSEPAPQVTPAAPAAAKPAEPAIPKPADEAASKPAAPAASSEPAAKPAQAEPAAPAAPPAAPAASSGPPAPPISR

SEQ ID NO: 11434 - protein, 416 aa, BradyrhizobiumColbertium
MDRLLRKFLSQFIRRGSMTVTCASGSKFTVGDGSGEPVAVRFVTADAERKVLVNPELGLGEAYMDGEFVVERGTIADALAILLDQPDLLPQWAKPWWHLRYLTRHLKQFNPRARARHNVAHHYDLDGRLYSLFLDADKQYSCAYFETPEMSLDDAQLAKKRHIAAKLLIRDGQRVLDIGSGWGGLGLYLAEIAGADVTGVTLSTEQLQVANARAAEKGLSGSARFLLQDYRDIDGTFDRIVSVGMLEHVGARFYDAYFQRCAELLDEDGIMLLHAIGRSQGPDSTNPWIAKYIFPGGYIPALSEVLPAIERAGLLVTDIEILRLHYAETLKAWRERFIARREEAVQLYDERFALMWEFYLAACEMTFRKQAMMNFQIQLTRRQGVVPMTREYLPREEALLRAREGATQPRLKLAGE

SEQ ID NO: 11435 - protein, 48 aa, BradyrhizobiumColbertium
MAAINPDSQCRLPASLRQFWCCRSGRIARLVFVPAGLGQPPARLPVPA

SEQ ID NO: 11436 - protein, 39 aa, BradyrhizobiumColbertium
MSKETRSSFDVQDDLRTDFALIVTGVGAAVVALVYLLLV

SEQ ID NO: 11437 - protein, 501 aa, BradyrhizobiumColbertium
MALTDSNVLKLAPDAGTPTYRSAPHNIEAEQSLLGAILVNNDAFYRVSDFLEPKHFFEPLHQTIFETAGSLIRMGKIATPVTLKTFLPADTDVGGMTIGQYLARLAAEATTIINAQDYGRTVYDLSLRRDLIGIGEDMVNVAYDAPVDFQPRAQIEDAERKLYELAESGRYDGGFQKFSQALTVAVDLAAKAFQRDGKLSGISTGLRDLDTKMGGLQASDLIIVAGRPGMGKTSLATNIAYNVAQAYVPELQADGTMKAANGGVIGFFSCEMSADQLATRIVAERTGIPSSHIRRGGISEADFEKIRQVSIELQSLPFYVDATGGLSIAQLMARARRLKRQKGLDLLGIDYIQLLAGSGKRASDSRVQEITEITTSLKALAKELNVPVIALSQLSRQVESRDDKRPQLSDLRESGSIEQDADVVLFVFREEYYLAMKEPRPGTEEHAKWQADMERTVGRAEVIIGKQRHGPTGTVELHFDASVTRFGDLAHDGQLPDRTDY

SEQ ID NO: 11438 - protein, 415 aa, BradyrhizobiumColbertium
MASDPKTNPQSGPLSAEANQAAALAAYGGVLTVDLDAIIANWRKLEKTAVPAECAAVIKADAYGCGAEQVSRALSQAGCKTFFVATIEEARKVRAAVPEPTIYVLGGYFQNTGEHYAKINCRPVIGDLNELAEWDVFCRRTGWNGGAAIHIDTGMNRLGLTLSEAQAIIPRINAGDHGITLVMSHLVAAEQLNSPVNARQLAAFRAIASEFSGVPAALANSSGIFLGAPFQFDMVRPGAALYGVNPTPEADNPMQQVVDLKARIVQIRTIERGETVGYGGTWTARRPTKLAIIAVGYADGYFRAASSNDGTRGAEVIVAGKRCPVAGRISMDLIAIDITDLPPNAVRRGHMVTLLGEGITVDELAHHFGTIGYEVLTSLGRRYARIYKGGNVEEPLVRLAAVTGEQPAAPQSLPS

SEQ ID NO: 11439 - protein, 72 aa, BradyrhizobiumColbertium
MSKSSFVAIALALAFSGGASAQSSDQRGACKADYDKFCAGIAPGGGIVACLNGKRDQLSAPCKAALDSRKKK

SEQ ID NO: 11440 - protein, 256 aa, BradyrhizobiumColbertium
MKIATFNINNINRRLPNLLAWMRIAKPDVVALQELKASDGEFPAAPIEKAGYGAVWRGQKTWNGVAILARNAEPVLTRDRLPGRPSDHEARYIEAAVRGVIVTSIYLPNGNPQPGPKFDYKLDWFARLKRHAKSLIKQDLPVVLAGDYNVAPTEIDIYPTRSWDMDALIQPKSRAAFASLVEQGWCDAIRELHPGKRIYTFWDYKRNRWPRDAGLRLDHLLLSPALAQRLAKAGVDKKIRGEDGASDHAPAWVVLR

SEQ ID NO: 11441 - protein, 268 aa, BradyrhizobiumColbertium
MICANRDHDAVTLTSLRSSVRDLYEGATPSGVRFRYALLAFDIVTVLFIIATSFVHPSEIIETLDVLFGVTLLADFSARLLVDRHPLRKFTQLATWADMVAIVSFLAPLAGEAAGFLRILRTLGLLRDYQMLVRLRIDSPFFRRNEDVVFAVTNLAVFIFVMTGLVYETQKFRNDQIRNYADALYFTVTALTTTGFGDITLPGTIGRLISVVIMIFGVTLFFNLARALLSPSKVRFPCPTCGLQRHDADAVHCKACGTILNIPDEGAV

SEQ ID NO: 11442 - protein, 241 aa, BradyrhizobiumColbertium
MAFLFVLSVGLAAGTVSGIVGTGSSIMLMPVLVYAYGPKEAVPIMAVASVMANFSRILAWWREVDWRACAAYSITGIPAAALGARTLLALPSHVVDLAIGTFLIAMVPVRHWLARHDLKAGLWHLLIGGAVIGYLTGIVVSTGPLSVPLFLFYGLSKGAFLATEAASSLGLYFAKSVTFERFGALTGDVFMKGLIAGSSLMSGAFIAKRFVLHLKPDVFRLVMDAIMIAAGLSMLWNAALP

SEQ ID NO: 11443 - protein, 689 aa, BradyrhizobiumColbertium
MRKDEAMTDPDCSEQAGTPRLRSVVHAMIWATVPVLLLVQLLASAGVEASSFWSQLRQIDARMARLAESRAALIAEPLWKMRYDQVTGVLNEILHDETIAAAAVYDDTGAAIARAIARPEGQAVAEVSRPIHYSNGNMAVQAGRISIAYSRATLYADAGSRLLLLLVVGLLATFATLIAMRISANIFIGRPLAAMMSAIQRSKDDGRAYPADVTSSNEFGQLARAFNAMQHTTSGALDRLGHMATHDPLTGLPNRRSLTERLAVASRNGGSPDTLVAFCFIDLDDFKGINDTFGHEAGDKFLVQISERLRNEVEAEDWVARLGGDEFVVIRPEVSNEASAHAFAQRVLNAISEPIRLHDKQVVPRASIGLAVRRADDPELSHLPTLADIALYHAKSKAPGTVAVLDEALQRDYRRRRDLELAIPAGFAERQFEVWYQSQVDLRTHEIVGLEALIRWRHPEHGVIGPGEFLPLIERSGNNARLTRYVLTDACWALQRLAAAGKPQIRIAINLPPSELADHSLAAELGATCARFDVSASSLELEITEGSLINNMASASETLHRLRRLGATIALDDFGTGYSSLAHLRRFPLDKVKIDKAFVREIPDSAEDKAIVGVIASLAGTLGLTLVVEGIERPEQAEAMREMGVRFGQGFLYQRPQPLEAVLQWLDRQAAEASCVLAESPSIAPEFAA

SEQ ID NO: 11444 - protein, 382 aa, BradyrhizobiumColbertium
MTRFLRVLLAAGMVCGVFASAGRSLAKPLDIVFVNPGKTGEVYWDMVAQTMQAAGRKLDARVEVLTSQRNYRTMQELGLGVVARPDKPDFLILSNEESAAVPILEAAEAAGVKTLLLSNTLIGEDAARLGPPRQKLKTWLGDITTDLRTAGARMANALIAAARAEKWQSSDGKIHILGIGGDEITPASIARNAGLKLAVDAAPDVVVDRLLFANWTQSEAERVTANYLGWASRKEIRPAGIWAGNDPMALGALRAVTAAGLVPGRNIQVVGLNWSDEALREVKAGRLLLTDGGHFLLGGWSIVLLRDYADGCDFAAVSPRVEVKTSAITRDNLASVGDLVRTRAFERIDFTRFQAKPGRCGQYDFSLDALISSLPLPEGAAN

SEQ ID NO: 11445 - protein, 481 aa, BradyrhizobiumColbertium
MAKSTLSFVCQNCGAAYNRWQGKCESCGEWNTLAEEDTSGSVPVSIRSKRKGRTFALESLSGKSPDAPRLSSGMTELDRVTGGGFVRGSVLLVGGDPGIGKSTLLTQATSLLARAGHRVVYISGEEAVAQVRLRAERLGLSDAPVQLAAETSVEDIVSTLSEGAVPRLIVIDSIQTMWTDTVESAPGTVTQVRASAQALIRFAKKTGAAIILVGHVTKDGQIAGPRVVEHMVDAVMSFEGEGSQQFRILRAVKNRFGPTDEIGVFEMTGLGLREVTNPSELFLSERDLGTPGTAVFAGIEGTRPVLVELQALVAPTSLGTPRRAVVGWDPSRLSMVLAVLEAHCGVKLSGHDVYLNVAGGLRIQEPAADLAAAAALVSSLVNAQLPTDAVYFGEISLSGVIRPVAQTPARLKEAAKLGFQRAVLPESARGESGGDAGLSLNAVNSLTTLVAEIAARGSRSGESNAPAEKNATPARFRRGEG

SEQ ID NO: 11446 - protein, 209 aa, BradyrhizobiumColbertium
MPVTILDLILLGVMLISGLLAMVRGFMREILSIAAWGAAAIVTLYSFSKLLPTAKAYFNNDTVASVVVVAGVFIGTLVVVSVITVRISDMILDSRIGALDRTLGFLFGLARGLLIVVVAFLFFTWLVPDKQRPDWVTGAKSRVVLQGTGDWLMALLPDDPENTILKRFKKNKPDDDQAESEQQPSGSGDGYSKSARDGMKKLIEKPAAR

SEQ ID NO: 11447 - protein, 507 aa, BradyrhizobiumColbertium
MRHPDQDAQLDLDPNAGPGPAPLEVQDDLEGDTLREECGVFGIYGHPDAAAITALGLHALQHRGQEAAGIVSYDGSRFHSERRLGLVGDTFSRREVIDRLPGNVAVGHVRYSTTGATILRNVQPLFAELNAGGLAVAHNGNLTNGLTLRRELVKHGAMMQSTTDTEVILHLVARSKRARFIERYIDALREIEGAYALVSLTNKKLVGARDPRGIRPLVLGELDGCPILTSETCALDIIGARFVRDIEPGEVIVFDENGQDIHKPFPPMAPRPCIFEYIYFSRPDSIVHGRSVYEVRKAFGAQLARESHVPIDVVVPVPDSGVPAAVGYSQYSGVPFELGIIRNHYVGRTFIQPTQAIRESGVRMKHSANRAAIEGKRIILIDDSLVRGTTSKKIVRMMRDAGATEVHFRLASPPILYPDYYGIDLPDRGGLLAATHSLEEMREIIGADSLAFLSIDGMYRAMGEPGRDPANPKFSDHCFTGAYPTHLTDQTQTEPQPRQLSLLAEAS

SEQ ID NO: 11448 - protein, 246 aa, BradyrhizobiumColbertium
MTKPLANRIALVTGASRGIGYATAIALAKAGAHIVATARTQGGLEELDDEIRKDGGSATLVPLNLTDSDGIARLGAGLHERYRKLDILVGNAGVLGPSSPIGHIELKTFNDVMAVNVSANFQLIRCMEPLLKQSDAGRAVFITSGAANKATAYVSPYAASKAALETLARAWAQETANSKLRVNLFNPGPVRTRMRATLMPGEDPETLDTPEQVAEFIVPMCAPDWTETGRFYDYKTRTLMSFRAPA

SEQ ID NO: 11449 - protein, 846 aa, BradyrhizobiumColbertium
MTNDNGSAPNSGMLSSGRHRRSFFAHLVDLYQKEVAFRGMTDFAVIGVVVLVFVSPPNKVVWPWSNGTTGQNSASVLQPSPSSAVNQSTTPQTTTAAGPVIPIPFQDVFKQPKLSLGFLFDIDDTAFNQSLPADREKLIAARFSIARQNSGEAIEILRSATPSDPNVMLLRGAAFILNDNADGNRTAELLWRQAVAGGNRQAYALLGRLLISGREGATNNATEGLRLIEAGAAAGDPQAMRFAGMGYLSGEFGRFDAFKGSEFFKRAADAGDGMAAGFYARLMADGIGVPAPDVKQAEAYLRRAANSGVTLAQYALGAWLQYQAAKGLVPDPKEGVEWLTKAYEKGNYIASLPNLSYIYFNGTAPPWNNPALGAQWIRKCSGFKMADCHTNTAYAYEVGLFGSVNLLMAYVHREIARQINPNVGDYAQKLFARLSTDEKEQAPKILNATLAALKAQPPVIGLQYKGMPPITPPVADIVGAPAIKQQPSPQANVSSGADARANKASQLTDQGKYKEAIPEATEALVEFPSNAVALFARARSYLELGEYDLALADYNVLIRQDARNAKYLNDRGLAYFRKGANFFDNALADYTLALSSTTSDAFKSVFHSNRGLIYRSRAQYDQALAEFNEAERLDPKNGGIYIDRGRVKLLQKKYDDAIVDFNRAIEMKPQSGDGYFYRGLTNANSIYDRQGDCSNSSGSSRATIGGSCSLPLDFDGALKDLKAAISRDSNNSEYHFQLGRLLAAAKNNDGALLAYSNSIKFRATSNGFLNRGNVYADMRQYSQAMSDYDEAIRLDSRNKYAWGGRASLFDRFGDKQRAISDFRYALSIDPSYTYAKEGLRRLGVRP

SEQ ID NO: 11450 - protein, 400 aa, BradyrhizobiumColbertium
MTGLNWVGRLGIVIALIVIEKASPALAWFLVVAAGLAATCYLLFKGNFLPRFIMDPLERLTRKRELVDTFESKTKKLAIIDDKTLASELKSKVIGQNGVVDSLATRLRQRLAARRPSKPIAVMCFAGAPGIGKTYLAKVLVEQLYGSAKHLHMIEMAQFDQAHAAATLFGSPKGYVGSNEPGQISKALRDIPNSIILLDEFEKAHRDIHKRFLSAWNDGFVTELSDGSKYPTNEAIFILTVNAGARRIAEYARDPSVTQDELNKFAKGALQDAQFAPEVLSRIDDVFAFRELAGLDIARVVALEMERKTKEYQLEIAGGGIDPDILYSAIDAFTQRKPEGGVREIARHIEDLIADGLIEAKAGGANLVEFVADGERVLVVPVDESLPAEKPTPAKTEPTG

SEQ ID NO: 11451 - protein, 39 aa, BradyrhizobiumColbertium
MTASACFISFFCNRAFWNARAPAPLLCKVFSPEDRPEKV

SEQ ID NO: 11452 - protein, 143 aa, BradyrhizobiumColbertium
MLRPWLVKDENEKLAKRAEACLMRVGVPPEWWDRLASDLPYGHQRRVEIARALAQDPQVLLLDEPAAGLNPSEAAELGRLIVSIGQDGLAVLLVEHDMRMVMSISSHIVVLNFGCKLAEGTPAQVSANKDVIAAYLGNPQEIV

SEQ ID NO: 11453 - protein, 242 aa, BradyrhizobiumColbertium
MIELLKIEDLIAGYGAIDVLHGLSLSVRGGEIMSIIGANGAGKSTLLNTISGFVRPKAGCIRYEGCSIVGQAPALIARAGIRHVPEGRRVFADMTVEDNLLLGGYGRPHEQTLKRVEEIYQLFPRLAERRKQAAGTMSGGEQQMLAIGRALAADPKVLMLDEPSMGLAPLIGIEIFRLILRLRDAYGLGILLVEQNAHAALRIADKACVLSLGRVVKRDAGSALLNDPGVVKAFLGGHADVA

SEQ ID NO: 11454 - protein, 65 aa, BradyrhizobiumColbertium
MAKSYWCRTYDHESELDPGLVPATFVHTHDYAGLISERFENTSDAELDCVRGHKTMKMALSLIKP

SEQ ID NO: 11455 - protein, 337 aa, BradyrhizobiumColbertium
MRAVIGHRFGGIGDLVYDDISSPAIEPGTIRISVRAAGVSFANLLFIAGKHQNRPTIPFVPGTEIGGIVSEIAPDVRSALNVGDRVCAGLPSGGFAEEAIVDAANVFRIPDSLSFEGSTLFPTIYATAYAGLKWRASLQSGETLLVHGAAGASGLAAIEVGRALGATVIATAGGERKIDAVKRYGANHAIDHRSGGFRDRVLDITGGRGADVVFDPVGGEVFDESLRCVAPLGRLIPMGFASGRIPQIPANIILVKNLTVIGLYWGFYMAWGKTKADAALREKVRILYEEMFELFEAGNLRAPIDSSLPLAQFAAAMRRVESREGIGKIVLVPNLRP

SEQ ID NO: 11456 - protein, 257 aa, BradyrhizobiumColbertium
MADRQKLLIENDGPITVITINRPGVRNALDSETAAALAKALRDFDQSEGQATAVLTGAGGHFCAGADLKELAAGYEYKPWAGDPDGPCHGVLSKPVIAAVAGYACAGGLGLALRCDLRVAEETATFAVLSRRWGIPMSDGTTVRLPRLIGAGRALDMLLTARKISGTEAVAIGLADRLVLTGQALSAAVELARQIAAFPQIAMRSDRMSAIRQWNLSEKDAIGLETELSVEARAKEAQAGAGRFASGAGRHGHVEKN

SEQ ID NO: 11457 - protein, 320 aa, BradyrhizobiumColbertium
MAELNDKGGILGRQLDLVVVNAGATDASAAVAAATAAGVDKVDVVVAMVTSSARKLVARELHKRRVPFVYTPQFEGGALDPGVVTVGETAEDLLRPGLSWLATEKHATRFFLLGNDYVWPLQSMVRACQLIGDMGCFVVGSAVVPFGVEDHEQLLSQISRARPHVVVSWMLGHEAVVFNRAFAAAGLSSRILRFSSAIDETILYAIGEACSADLYVASGYFSCLRSHNNAAFLERYHTYFGDTPPPINAFGESLYEGVHCIAGLVEAADSLHPSDLHRKVGRAAQERTARGFKNHIVAGAAHPIHLAVAEGHDFRVIARR

SEQ ID NO: 11458 - protein, 65 aa, BradyrhizobiumColbertium
MAMTEDLSFRRKPLTPEQRQARDAARRIEAEKAMRDHEAAQKAFYANKERLRAERLAREAAASKS

SEQ ID NO: 11459 - protein, 239 aa, BradyrhizobiumColbertium
MAPVRFMTWNVHGTFNLNPRFDLEGVCSIIRKWSPDVVALQEVDSRSRSDDPFAKLASVVGDHRVHAKSIVTKDGDYGQMLLSRFSFSSVPEIVDVSYQEREPRRAIATDLLTPAGDVRVVATHLGLSIHERYSQARALVSLVKPVRTVVLGDFNDWFWVRSVRRVLAQACPNRTQLRTFPSRLPLMRLDRIYATPDSRIGKVWTDGEARAYSDHLPVIAEIEIPQTEGAGHPDRSGPG

SEQ ID NO: 11460 - protein, 718 aa, BradyrhizobiumColbertium
MEPVACSRRLDANPSCEVHLLQTASTLIPGDTVWRRCEAARVAVLNDAAAYFAALRETLLEAQDVVYIIGWDIHSKTPLVGASGRADDGLPEQLGPFLRALVRRRPALRINILVWDFVSFYASEREWNSAAKFTADTDDRVRFHLDATLPFGSAQHQKIVCVDGSLAFVGGLDLTVRRWDTSDHRADNAMRCDPQRKRYPPFHDVQCLVDGDVAERLFELAEERWRAAGQQADERRVLKSARWPTNVPVETEHLPVGIARTDVVSPAGSTIREVERSFIAGIRSATNFVYIENQFTSATRMARELAEQMRRVPSLRALIVAPKLHSSWLESQAMQNGRGAFMDCFGETGVADRIRFVYPVSRSGNKEAAVMVHSKLMVVDDRILRIGSANLNNRSMGADSECDLIFEAATEEHRDFITSVRRRLIGHFCGLDEHAITQNEHRLFALLDEVSKARGPQTLRKVESSVLTSTLATLVQPVADPELPLHLERAASRMWSTKTLIGIASIAVALFGLAMAWSYTSLSDFADAGHLSTLLSAYSQSIWGPPLAVAAFVVGGLVVFPVLVLIAATAAALGPWLGFVTAMAGVLVSALILFAIGRVLGRERLQRLLGRRAARIQERVVGKGVVAVVVIRMLPVAPFSVVNVVAGASTLPLRDFILGTLLGSTPGILAMAVLGSQIAELARNASWSNMLLLALAFLGWLALCAGAQFVTTWLAGRR

SEQ ID NO: 11461 - protein, 98 aa, BradyrhizobiumColbertium
METTIIGEFDTRRGAELAVEHVVQECGVPRGDVFVQPAGDANTVGTRPAGPDVKAAPAPEGRQKLEGVIEVSVDFHGDAPEKIADALRSAGAKTVRTK

SEQ ID NO: 11462 - protein, 74 aa, BradyrhizobiumColbertium
MIECEQRASRGRVPEAARAAYLEVEDDGLAVSGDDQNRIIPNRSSSATVMKPEISSEPRHPSRFEKKKNMRCPP

SEQ ID NO: 11463 - protein, 202 aa, BradyrhizobiumColbertium
MSQQSSMHHYLNWAKERIDEMDAALASFEVKAGQAKVESKAKTDQFLFDLTKRRDEFQEMLKAKAQAGEAAWVEAKADLERQWNGFEAQVKAYFEGAGKQLEQQQATFKDIAAAQARAWREAADKIGEAAGKVAAARTGDIDAALKQMKSDASEAEARLQKLKQAGSESWSVMSAALAESRKAFDQANKAAWEALKGADTKS

SEQ ID NO: 11464 - protein, 326 aa, BradyrhizobiumColbertium
MSLDSDIIVDRRRIRRKLTFWRVMAALIAVAAIASFALIATPGARGTFASVGSIARVHIDGLIRSDSDRTQALERLENSQAAAVIVHINSPGGTTAGSEQLYDSLVRLKAKKPLVVVVEGLAASGGYITAIASDHIIAQQSSLVGSIGVLFQYPNVSELLKTIGVKVEEVKSSPLKAAPNGFEPTSPEARAALDALVKDSYAWFKGMVKERRGMDDTQLEKVADGRVFTGRQAIDLKLIDQIGDEKTAVTWLVEHKGVKKGLPVRDYKLQPLFGDLPFLKTAAAVMLEAIGLGSIAHQIGQTGLVQAVDRLGMDGMLALWQPAASN

SEQ ID NO: 11465 - protein, 101 aa, BradyrhizobiumColbertium
MIKSELVQRIAEHNPHLYQRDVENIVNAILEEIVAALARGDRVELRGFGAFSVKHRPARAGRNPRTGAHVPVDQKSVPFFKTGKEMRERLNRGHPDPGAAD

SEQ ID NO: 11466 - protein, 130 aa, BradyrhizobiumColbertium
MRKFLTALIVIPLGVILVAFAVANRHFVTVSFDPFISEDPSLSITLPLFLLLILVAAIGVFAGGSAVWFGQRRWRRAARRNDAEARAARAELAGLRAQATAAKPDSERLPVPSGVGLYGPIGRDKQRATL

SEQ ID NO: 11467 - protein, 223 aa, BradyrhizobiumColbertium
MSLLVKICGLSTRETLDVALDAGADMVGLVFFPPSPRHLSLELGRELGRQVKGRALKVALTVDADDATLDNIMDALSPDVLQLHGKESVARLRDIKQRFGRPVMKVVPVATAADLAVLPGYAAVADRILFDARAPKDATRPGGLGEPFDWHLLEKLDLKLPYMVSGGLRADNLAEALRVTRARGVDVSSGVESAPGVKDPEMIKAFIRAARASQDASQESSAR

SEQ ID NO: 11468 - protein, 404 aa, BradyrhizobiumColbertium
MNIAKPNSYRSGPDERGHFGIFGGRFVAETLMPLILDLEKAYSEAKADPAFQAEMNGYLKNYVGRPSPLYFAERLTEHLGGAKIYLKREELNHTGSHKVNNVLGQIMLARRMGKKRIIAETGAGQHGVATATLCARFGLECVVYMGAVDVERQQPNVIRMEMLGAKVMPVQSGTRTLKDAMNEALRDWVTNVHNTFYCIGTVAGPHPYPALVRDFQSIIGNETKAQMQEIEGRLPDSLIACIGGGSNAMGLFHPFLDDPAVEIFGVEAAGHGLTQLHAASIAGGRPGVLHGNRTYLLMDADGQIQDAHSISAGLDYPGIGPEHSWLHEVGRVTYLSATDDEALAAFQLLSKLEGIIPALEPAHAIAKVVELAPKRPRDHLMVVNLSGRGDKDVPQVGDILRGKK

SEQ ID NO: 11469 - protein, 278 aa, BradyrhizobiumColbertium
MTTRIDTRFAELAKQGRPAFVTFLMAGDPDPATSLEIIKALPKSGADVIEIGMPFTDPMADGPSIQAAGLRALKAGMTLKKTLELVRGFRKDDNATPIVLMGYYNPIYIYGVDKFLVDAKSAGVDGLIIVDLPPEEDDELCLPALKAGLNFIRLATPTTDDKRLPAVLANTSGFVYYVSITGITGAAAADSTAVSEAVARIKRHTRLPVCVGFGIRTPETARAIASHANGAVVGTALVDALKNSLDAEGRATARTVNAVAELTAALAQGVKGAQQAAE

SEQ ID NO: 11470 - protein, 313 aa, BradyrhizobiumColbertium
MNWLTNVVRPKIRNMLRRETPENLWIKCPDSGQLVFYKDVEANQFVIPGSNYHMRMGAVARLKSIFDNETWFDVALPEVTPDPLKFRDEKKYVDRIKDARARTNLNDAVKIGYGKLEGAAVVVAAQDFDFMGGSLGMAAGEAIVRGMELAVEKKSPFIMFAASGGARMQEGILSLMQMPRTTVAVQMLREAKLPYIVVLTNPTTGGVTASYAMLGDLHIAEPGALIGFAGARVIEQTIREKLPEGFQRAEYLKEHGMVDMVVHRHELRPTLARLCRLLTKAPAQDSASKPVQPVASPAQIVSAAETAPAAPHA

SEQ ID NO: 11471 - protein, 447 aa, BradyrhizobiumColbertium
MNASADSGKTPLHELIARLSALHQKRIDLGLERMHRLLERLGHPERQLPPVIHIAGTNGKGSTLAYLRATLEAAGLRVHAYTSPYLVRINECFRLGRVGGGVLVDDEALRVALEEVERVNAGEPATLFELKTAAAFLLFAQNPADVVLLEVGLGGRLDSTNVIDAPAACVITPVSMDHMDFLGDTLASIAGEKAAIIKRGVPVVCAEQMPEAMEVIEAQAKRMRAPLFAANESWHVNVERGRLVYSDDRGLMDLPAPRLFGRHQFANAGLAIATLRAVPGFKVNHAAFEAGIVGAEWPARMQRLASGELLSWGPQGSEIWLDGGHNAEGGRVAAAALGDLEERVSRPLVVIAGMMANKDAKGFLANFAGLTRHIIAVPIPDTENAMPVDRLADAARSLGMRVEPAPGIEAALRALAKLAYEAPPRILITGSLYLAGHVLAINGTPPA

SEQ ID NO: 11472 - protein, 246 aa, BradyrhizobiumColbertium
MRFAAIADIHGNYLALESVLADIRAQGISDIVNLGDMLSGPLDARRTIEVLMQLDAVHVLGNHDRYLIDRVPEKMGSWDRPAHAALDAAQLDWLRAQPMTRVFRDRVFLCHATPENDEVYWLDTVHPDGAVALSPLDRIEQFAGGITQSLILCAHTHLARAVRLRDGRVIVNPGSVGSPGFRDKHPFPHVVEAGTPHARYAVLELVDAAWQVTFRHIVYDHEAMAALARRNGQPELANALATGWIK

SEQ ID NO: 11473 - protein, 337 aa, BradyrhizobiumColbertium
MEARSVDEIPRGKEWQYEPKWDGFRCLLSRNGGNVDLRSKSGEDLARYFPEVVAAASGLKADHFTLDGELVVPHGKSFSFDALLQRIHPAASRVKRLSVETPALYLAFDLLATARDKGLAEKTLRERRPALDAFAESYLKDSIFRLSPATASYATARKWLAQSGGGSDGIIAKRTDLPYQAGNRDGMQKIKKFRSADCVIGGFRYATNRIAGRKVVGSLLLGLYDDGGLLHHVGFTSAIKAEAKPALTDRLEALIGEPGFTGNAPGGPSRWSTERSAKWCPLKPKLVLEVCYDHFSGERFRHGTSILRWRPDKAPRQCTFEQLKQKVADPMKLLKRP

SEQ ID NO: 11474 - protein, 106 aa, BradyrhizobiumColbertium
MAVGKVSDADFETEVLKANGPVVVDFWAEWCGPCRMIAPALDEIAGAMGDKVKIVKLNVDESPKTASKYGVMSIPTLMIFKGGEMASRQVGAAPKAKLQQWITSAV

SEQ ID NO: 11475 - protein, 1169 aa, BradyrhizobiumColbertium
MVKAPRPIPDEVRARQARASDPTASAFVSANAGSGKTHVLVQRVIRLLLSGVPPEKILCITFTKAAAANMAERVFTTLGHWVTLDDSALDAAIRAVGIPHPSAKLRRDARKLFACALETPGGLKVQTIHALCTRLLQQFPFEANVPARFAVIDERDQTDMMERANLKVLLEAARAPDSVTGRALLTAMASAADVTFKEVVREACLSRDHFMAWTDEAGNAEAAAAQMAAVLGADSGDRIEDVETEILDGPFLPRSRWDDIAAALEDGSKSDNDQAARLREAKVFSGSAQVDAYLCVFLTDEKLPRKAVLTKKLCDHNPSVARLFEAEVQRLAGLIEKRRAVTMRDRTAALLHIATAAAANYRREKQERGLLDYDDLIDKTLAMLNRVASGWVHYKLDRGVDHVLIDEAQDTSPRQWDIVAHIISEFTAGEGAREGLNRTIFAVGDEKQSIFSFQGAAPHEFDARRRELHRRFTAAGLKFDPVAFTYSFRSGATILHSVDHVFRDPQIYKSIHSVDIGHPLHNALADAGPSVIELWDLAEADERQDIEGWRAPFDGVAVTSPEVKLARRIMTEIKRLVESGTLTGHEGERRPLRYGDMLILVRRRGNAFDAVIQALKHAGVPVAGADRLKLTEHIAIIDLMNLADALLLPQDDLALAVALKSPLFGLDDDDLFTLAWDRKGSLRRALGEHAGTSEKFAAALRRLEACEIRAREETPFAFYAWLLGGDGGRARILRRLGHEANDALDEFLELALNYERKAPASLQGFMAWLRSADTEVKRDMEISRDEVRVMTVHGAKGLEASVVFMVDTTSSPADSQRLRLIHVPRGNGGKVVVWAGRKADDPKPVAEARKAMLEETEDEYRRLLYVAMTRAADRLIVGGCMPGNMKTVRKLSWYDLVNTGLAGSGLDKQVIETPLGKATRFARPEDVAALGTPAPSMHQTIALPDWLRTTAPRETIDDDPVRPSGQSAEEGRSVRSGESIQSRALALQRGTLVHRLLQSLPDIAVARRREAALGFMARNASDWPEADRTALADKVLALIAEPRFAAVFGPGSRAEVAIAGRLERPGRPPALVSGQIDRLVVRSDEVLIVDFKTNQAAPRSAAEAPPAYVRQLALYRAVLSQLYPQTPIRAVLLWTEALEYMEISAPALDAALASLHLGVSLLDPARGRS

SEQ ID NO: 11476 - protein, 1048 aa, BradyrhizobiumColbertium
MRVFSVPISVPFLRTVVSALLDGRLVEGFQARNEPARLADATLYLPTRRAMRVVREIFLDEMKADAVVLPRIVALGDIDEDELAFADEGEQFSGATPLDIPPRLGELERRLTLAQLVAAWAKGPVLSPLVVGGPASTLALAGDLARLIDDMVTRGVDWSTLDGLVPDNLDRYWQHSLEFLRIARIAWPSHLAEINRIEPAARRDLLIAAEARRLTAHPNGPVIAAGSTGSMPATAKFLHAVASLPHGAVVLPGLDTDLDDDAWRSIGGVRDALGKFAEHPASNHPQYAMHALLDRFGIKRSDVEILQPPAKGGRDLLASESMRPSAKTEVWHDRLKQPDVAARIAAGMTNLAVVEAPNPEMEALAIAIAMREARHLDKSAALVTPDRALARRVMAALTRWDLAFDDSGGDVLMETSAGVFARLAAEAATKGLEPPTLLAMLKHPLCRLGRAPGAWKAAIAGLELALLRGTRPPAGTAGLLREFRRFGEELAKLWRSEMSALHKAEPRARLKAEDLDRIQALIEVLQKALAPVESLPSSRSYDFAEIAHRHREVMIELSRDEQGIPFAFEDRDGLALANAFDDLLRGGTTSGLMVPLPDYPDVFQTAFSDRAVRRRDRPGARLQIYGPLESRLMQADRIIVGGLIEGVWPPAPRIDPWLSRPMRHELGLDLPERRIGLSAHDFAQLLGGDEVILTHSGKAGGAPAVASRFLHRLEAVAGDDLWMAAIRAGEKYVQFATALDQPAKVEPIKQPEPRPPRATRPTSMSVTAVEDWLRDPYTIYAKFILRLAALDPVDMPLSAADRGSAIHEALGEFTKTYAGRLPDDPARVLRAIGEKHFMPLMERPEARALWWPRFQRIARWFGEWETARRDAIETIAAETRGEISIALDNNRSFRLSAVADRIERRKGGSYAILDYKTGQPPSDKQVRVGLSPQLTLEAAILREGGFPDIDAGSSVSQLVYVRLSGNNPPGEERIVQLKINKGDEPIPPDTAAAEARAKLEALVRAFEDESQPYPSLTLPMWANRYGTYDDLARIKEWSAAGGLGIEEW

SEQ ID NO: 11477 - protein, 240 aa, BradyrhizobiumColbertium
MPVKPTKAMVLAAGFGLRMRPLTDKMPKPMVPVAGQPLLDHVLDKLGRAGVTEAVVNVHYLPDQIINHTASRQHPRVIISDERDQVLGTGGGVVKALPLLGHAPFFHVNSDTLWIDGVRPNLSRLAETFDPARMDILLLMAPTATSIGYSGRGDYGMLPDGALRKRKEKEVVPFVYAGAAILSPSIFAEAPGGEFSLTRMFDRANEQERLFGLRLDGVWMHVGTPDAVHAAEEAFLESVV

SEQ ID NO: 11478 - protein, 105 aa, BradyrhizobiumColbertium
MAVKTDQRGNSRVVFERGIPAQMMGIDGTWRRDCTMEDVSDSGAKLTIDGSVEGLHLKEFFLLLSSTGLAYRRCELAWVNGDQIGVNFLKVGDKKKKARSTAVGA

SEQ ID NO: 11479 - protein, 506 aa, BradyrhizobiumColbertium
MSKPITFSVALHNETATAQLMADLALLIGPGDVITLTGDLGAGKTAAARSLIRYLAGDEELEVPSPTFTLVQGYELPPFPVLHADLYRVEDGSELEEIGLSPLPDATLLLIEWPERAPSAMPEDRIDIALTHRPALGSNARAADITGHGRCAAQVARLKALREFLDASGYMDATRRRMAGDASTRSYARLLREGETVILMNFPQRPDGAALYNGKSYSAAVHLAENVRPFVAIAEGLRAQGISAPAIHHSDLDHGFLITEDFGSEGVIEGDPPRPIAERYEAATDVLATLHGKTLPATLPLADQTYAIPVFDTEALLVEIGLMPEWYLPDRNAPLSDEARSEFFTMWRELLVKPLSAPKTWVIRDYHSPNLIWLEDRTGIERVGVIDFQDTVLGPQSYDVVSLLQDARIDVPETVELTLLSRYIKARRAQDTGFDAAGFAELYAIMSAQRNTRLLGTFARLNRRDGKPHYLRHQPRIWTYLQRSLAHPALGTLRAWYLANVPPPQA

SEQ ID NO: 11480 - protein, 834 aa, BradyrhizobiumColbertium
MSGVIVSMRRTLLSCTSLARNGLVGGALAALLPAAPAQAADLIDTLSVMLDFNRQEIAVLATALALLGFSVMAAILLMRTRVRTANSEARLRARIGELQLQADRFGALLFAEPQILISWPAGDNRAQISGDISMVLPRDSSPQRVLAFGTWLPPEPAFQMDHAVDALRDRGDGFQLTLTTAHGHTLEAIGRAIGGQAIVRIRELSGLRRDLAETNLRYKALSDETEMLRGFAAAAPWPIWAKGENGALTYANPAYVRATEANSVTDAQERKLELLDSADRTAMERGLKDAANFTSRLPIVIGGERRIFDVRAVNVGRGSVGIAIDASEAEALSSALVRMAEAHRRTLDQLSSGVAVFDGQRRLAFYNDSYRRLWDLDRTFLDANPDDSSVLDQLRAARKLPEQPDFRAWKAKLHEAYRAVETAKDTWFLPDGRALSVVTTPNPEGGVTYLFDDVTESLDLARRFDGLIRVQRETLDSLAEGVAVFGSNGKAQLFNPAFVRMWKLSSDAMRDEPHIQTVEGWCHQLCDDPVVWRQIREAVTSIENRADVPLKLERKDGSVLDGMIRPLPDGATMLTFQDITDTENVERALRERNEALEAADQMKVDFVHHVSYELRSPLTTIIGFAHFLSDPSTGPLTPKQAEYLDYVTKSTNALLALTNNILDLATIDAGAMKLELGQVDVSKAIELAAEGIQDRLATDRIRLKVEIAPDVGSFTGDEKRVVQVLYNLLANAVGFSPQDSTVGISARRTEHSVVFTVTDSGPGIPADMKDKVFNWFESRSQGSRHRGAGLGLSLVRSFVELHGGKVRVDSTVGRGTVVICDFPTDQAAHRDAAE

SEQ ID NO: 11481 - protein, 152 aa, BradyrhizobiumColbertium
MSTTVTVELQRLAHAEGLPLPAYQTAEAAGLDLMAAVPENEPMTLAPGQYALVPTGLAIALPAGHEAQVRPRSGLAAKHGVTVLNSPGTIDADYRGEIKVILINHGAAPFVIKRGERIAQMVIAPAMQAALVPVATLSTTDRGAGGFGSTGR

SEQ ID NO: 11482 - protein, 502 aa, BradyrhizobiumColbertium
MHCNHVNDSIAIIPRWRGVMASLTIRKLDDAVKTYLRLRSAKNRRSVEEEVRVILRELIEGREEPLTPFAVPPAASAAPTPLRSGALPEASVTLIIGGGIAGYKSLDLIRRLKERRIEVRCVLTKAAQQFVTPLAVSALSHERVYTDLFDPQSEFDAGHIRLARDCDLIVVAPATADLMAKMANGHADDLASAILLATNRKVLLAPAMNPLMWSNAATRRNVAQLQRDGAVLIGPNSGEMAEAGEAGIGRMSEAIEIANAAERLLRPPVPKPLAGKRVLITAGPTHEAIDPVRYIANRSSGKQGFAIAAAAQAAGAEVILVSGPVDLDDPPGVTVKHVESARQMLEQVQAALPADVAIFAAAVADWRVANEGEQKLKKTAGSMPPLQLVENPDILATISKLTDRRPPLVIGFAAETEHLIDNAKAKFARKGCDWIVANDVSPATGVMGGDRNTVHLLSRKNDAKNGEIAVDSWPVMTKEQVAIELVAHIARSVTDKSREPAS

SEQ ID NO: 11483 - protein, 524 aa, BradyrhizobiumColbertium
MISAFTHIARLIRAAFVFAREGVFGSVDPSLVPPPGQLALKLARLVERRGTKHGPRIARALTRMGPAYLKLGQFLATRPDVVGVIMARDLESLQDRLPPFSQAEAEAAITTSLERPLTDIFASFGPPVAAASIAQVHRGEVLRDGVRRSVAIKVLRPNVATRFRRDLSDFFFVAHKAEAYSSEARRLRLIEVINTMSRSVAMEMDLRLEAAALSEMAENTRDDPDFRVPDVDWDRTTHNVLTMEWIDGIALNDHKRLAAAQVDLPDLGRKVIQSFLRHALRDGFFHADMHPGNLFLDDAGRLVAVDFGIMGRLGMKERRFLAEILLGFITRDYRRVAEVHFEAGYVPAHHSVENFAQAIRAIGEPIHNRTAEEISMARLLTLLLEVTGLFDMTTRPELILLQKTMVVVEGVARGFDPKLDIWKIADPVVREWIERNLGPIGRVQGALAGTGDIARVLMRLPEIAERSVKVLEQLETMTRDGIRLSPESIAAMGRSEGRKNRWRTVALWIIAATFIGILIAVRNL

SEQ ID NO: 11484 - protein, 253 aa, BradyrhizobiumColbertium
MDRPGETTHFGFRNVPLGDKQTLVNDVFHSVASRYDLMNDLMSGGLHRVWKDIMITALDPPRGDRPFALLDVAGGTGDIAFRAARAAGPGFHATVCDINSDMLAVGRERAAKQHLDTRVDFVEGNAEALGFADRSFDAYTIAFGIRNVPQIDLALREAYRVLKPGSRFLCLEFSTVEMPGLDKLYDLFSFKVIPPLGRMVTGPAESYQYLVESIRKFPRPAAFADMIREAGFARVSWQTLSGGIVALHSGWRL

SEQ ID NO: 11485 - protein, 293 aa, BradyrhizobiumColbertium
MPELPEVETVRRGLQPVMEGAKILAAEARRPDLRFPFQPDFVARLKGQVVTGLGRRAKYLMADLASGDVLLMHLGMSGSFRVIKPDNSLQPGEFHYPRGKDSAHDHVLFRMSSGADIVFNDPRRFGYMKVIARNALEDEPLLRGLGPEPLGNEFDAAMLARSCAGKTTSLKAALLDQRVVAGLGNIYVCEALHRSHLSPRRIAATLSTKKGEATDHAKRLVGAIHTVLNDAIKAGGSSLRDHRQTSGELGYFQHSFKVYDREGETCTTPRCGGTVKRFTQNGRSTFWCPKCQK

SEQ ID NO: 11486 - protein, 247 aa, BradyrhizobiumColbertium
MHTIVLATQKGGSGKSTLAIGLALAAKQAGFTVRLIETDPQGTLSNWQRRRNNDDVVVEPIYQAANIEPRLTMLADSGLELAIVDTAAGLSAATTAAIRHSDFCLIPARPTVADIEATVSTLNVARAWKRPYSFVLNQAPIRGQRIDNAANTLAEEAALDLADVLARPLIAIRNDHQDALAKGLAVSEFAPNGKSADEIRRLWRWIETRLELEAKTHLLIDQVMSAADGMLHLAADLAADETTTIAS

SEQ ID NO: 11487 - protein, 83 aa, BradyrhizobiumColbertium
MIADHHAAARDRRHLLAVKSGCRPVAPVSAHAACPSCFTAESTSYARLRVQYWYGLADIPNSATIALVDSDIRGPLWIGQGTS

SEQ ID NO: 11488 - protein, 534 aa, BradyrhizobiumColbertium
MVVSNHPLASSAGAEMLAAGGNAIDAAIATLFTLTVVEPMMVGIIGGGMAHIRLADGSHRFIDGQSTVPAAVRDTTYLSKPGSAHDVFDTVGNENLNGPKAVAVPGSLKAWCETLRRFGTMSLSDVMQPAIKHAARGYATTPYLHECISESADEMRKDRTIASIFLPDGEPLKVGERVVQAEYADTLLYIADHGEKALYEGALGDVLVDYMERAGGFIRRNDLTNYKTIERQPIRADYRGWTILGPPPPAASGVHIAQMLNILEGYDIGGLGFGTSEAIHHLAEVLKIAFADRAAASGDPDYVGVPVEKLTSKAYAEERRRAIDPARAQAWGAGVSQLEGAHTTHVTAADSFGNVVATTQTINSLFGAKIMIPGLGAIANNYMNLFDPRPGHALSLAPGKRVTTSMSPMMALNGGKLRYALGLPGGKRIFPSAMQALVNLIDHGMSLQEAVEAPRVWTEGNALEVEQTVPESVRVQLAALGHEVQPVSTVAGGMNGIAFQDDGTMIGAACWRADGTPIGISGGLAKSGIRFRLA

SEQ ID NO: 11489 - protein, 134 aa, BradyrhizobiumColbertium
MVKVALLTLNDANLTGNYSVLHAKMARPFRERFSAATLKQAFATFAGHHIDAIAGMPIISTEAPRIGDNGALLLRGHFETAPSQLSYALDYAVSEGEWKLIAIDVKVRSLQTNAGAADLVARAAADMAGSGAQK

SEQ ID NO: 11490 - protein, 473 aa, BradyrhizobiumColbertium
MFATNEMCFNGTAFNGLVGFVMRSMLAATLMFAAATGAHAQTTAPQVPGTKPKTVQTVPIQPPATQTPSGTADAMSKAERLALQSDLAWAGRYNGAITGDVSERMVNAIKEYQKAKGGKPTGALNPQERAALAEAARKKQESVGWKIVTEPTSGARLGIPTKLVPQQASDANGSKWTSPTGTVQVLLSRRKEVNPTSAKLADLEKEPSGRKIDYTVVKPDFFVLSGLQGLKKFYVRGTFKGDEVRTMTILYDQATENVVEPVVIAMSSAFNAFPSGPLAGPPPRKTVEYGTGVVVSDDGAIVTDRLVADGCLAITIAGHGRADRLAEDKQHDLALLHIYGARGLKPLSLAGGAAKTNVDVIGIADPQSQGGAAGVSSIKATLAPGPSGDSALSPPPSVGFSGSPAVDADGKFAGIALLKPAMVAGPATSVPASQAVMVSADAVRDFLKTRQITANGTSTDAKAAVVRVICVRK

SEQ ID NO: 11491 - protein, 267 aa, BradyrhizobiumColbertium
MLSPDELERYARHIVLRDVGGPGQAALKRAAVLVIGAGGLGAPALMYLAAAGIGTLGVVDDDVVSLSNLQRQVIHTTPDIGRHKVESAAERISALNPHVRFVGHATWLNADNALGLIGDYDLVLDGSDNFSTRYLVSDACFFAKRPLITAALGTFDGSLTTIRAHETNEQGEFNPTYRCLFPEPPPPGTVPACAEAGVMGALAGVLGSMMALEAIREIVGFGDGLVGRLLMIDARAMRFETLRYARDPANPLNGDGPVISDLSAHRT

SEQ ID NO: 11492 - protein, 186 aa, BradyrhizobiumColbertium
MGHLLGHHPQRRADRGGELLLSRVAPALRDVGDALDQVRGLREVAAGRLRINAPPPAVDLVLAPMVGPFLTAHPQVDLDIVSESGFVDIVSAGFDAGVRYGEHLAISTNMSLAMRAARDGVGIWATLDGYADEALKSGALVSLMEDWCEPFPGSFLYYPSRRQTPPALRAFIDFVADWRKRDKRGQ

SEQ ID NO: 11493 - protein, 333 aa, BradyrhizobiumColbertium
MSVKKKPLVVVTRKLPDSIETRMRELFDARINLEDTPMSAEQIAEAARTADVLVPTVTDHISAEVVNQPDCKLRLIANFGNGVDNIDVAAAHARGITVTNTPKVLTEDTADMTMALILAVPRRMIEGASILTEGKPWAGWSPTWMLGHRIGGKRLGIIGMGRIGQAVARRARAFGLQIHYHNRRPVAPVIAEELGATYWESLDQMLARMDIISVNCPHTPATYHLLSARRLKLIRKDAYIVNTARGEVTDEDTLIKLIEGGEIAGAGLDVYEHEPAVNPKLVRLAKAGKGTLLPHMGSATIEGRVEMGEKVIINIRTFLDAHKPPDRVLPSML

SEQ ID NO: 11494 - protein, 175 aa, BradyrhizobiumColbertium
MALGRFCSVMALVCTWLSASVSPSHSAKDTPQTASGLPVPRYVSLKSDHVNVRAGPTKDNDVAWVYTRAGLPVEITAEFENWRRVRDSEGAEGWVYHSLLSGRRTAVVTMKHKDEFAPIYDRPDPDSAVAAKLQAGVVTQVKKCAANWCRVIGNGFDGWIQQERLWGVYSDEQVN

SEQ ID NO: 11495 - protein, 163 aa, BradyrhizobiumColbertium
MNENTASHHDDDVHAAALLSGRQPALTGCPWHDVNEMLQSAGLRPTRQRMALGWLLFGKGARHLTAEMLYEEATLAKVPVSLATVYNTLNQLTDAGLLRQVSVDGTKTYFDTNVTTHHHYYLENSHELVDIEDPHLVLSKMPEVPEGYEISRIDMVVRLRKKR

SEQ ID NO: 11496 - protein, 46 aa, BradyrhizobiumColbertium
MPGAAGQRRLAAGQEGRGMDVVVVMGRGILVHFQISGTREQYLSVT

SEQ ID NO: 11497 - protein, 173 aa, BradyrhizobiumColbertium
MLNRRNGYEYEDLLACARGEMFGPGNAQLPLPPMLMFDRITEITDDGGEFGKGLVRAELDVKPDLWFFACHFKNDPVMPGCLGLDALWQMVGFYLGWVGGEGRGRALGLSELKFGGQVLTEARKVVYNVDIKRVMRSKLVLGIADGWLSVDGQIIYRAKDLKVGLFKQGTSLG

SEQ ID NO: 11498 - protein, 403 aa, BradyrhizobiumColbertium
MVTGMGIVSSIGNNTQEVLASLHEAKSGISRAEKYAELGFRSQVQGEPTLDPSTVVDRRAMRFLGQGAAWNHIAMEQAIQDSGLSPDEVSNIRTGIIMGSGGPSARTIVEAADITRSKGPKRVGPFAVPKAMSSTASATLATWFKIKGVNYSISSACATSNHCVGNAYETIQIGKQDVIFAGGCEELDWTLSVLFDAMGAMSSRYNDTPATASRPYDVNRDGFVIAGGAGVLVLEELEHAKARGARIYGEIVGYGATSDGHDMVAPSGEGAERCMRMAMSTVKTKVDYINPHATSTPAGDPPEIEAIRKVFGVGEKCPPISATKALTGHSLGATGVQEAIYSLLMMNNGFICESAHIQELDPVFADMPIVRKRIDNVKIGTVLSNSFGFGGTNATLVFSRLDV

SEQ ID NO: 11499 - protein, 266 aa, BradyrhizobiumColbertium
MDGLMKGKRGLIMGIANDHSIAWGMARTLHAHGAELAFTFQGEALGKRVKPLAEQLGVDLVLPCDVEDIASVDATFAALREKWGRLDFVIHAIGFADKNELKGRYADTSRENFSRTMVISCFSFTEVAKRAAELMTEGGSMITLTFGASERAMPNYNVMGVAKAALEASVRYLAADFGPRGIRVNAISAGPIRTLAGSGIGEARAMFAFMQKHSPLRRGVTLDDLGGSALYLLSDLSGGVTGEIHYVDSGYNIVLMPRPDDLKASE

SEQ ID NO: 11500 - protein, 662 aa, BradyrhizobiumColbertium
MVHAMCRASALAFVAGAMLLCGGSRALAQSTVWDSTLSNTNWYVPTAQLLAYAAPRTGFSNPIPIGDQTLWSLASATNGSFTGTSVAQLKIGPALLTDTSTIQGFVNTAGQITMLFTPTSGGTVTVGLGHMRTVGGVTSMEMQMITGDSVLVTHWAYMLPYDPATFTPPASQPVPANSVPQWEWTAGTPWRISSNSLFGTSAPGRFVITDYKNGYFWGAGIAPTGSSAANFTLLGSVTPEGSVLFNTLSRGTLASLYGAASGNASGAQMLVSTYDLSGNPTGGVAYLSLVRPYAETLQAQNSRVGLGAADMLYRLSATPLGWTGSMATGFTALDNLGGSGLVNSINQTLPVLTGAASQATYATQRAFQQAMTGRLDEVFGLNGAATRERNFWMKPLGGTLRQGSVDGVPGYHASGGGIAVGADAMISTRARLGGVFAYSHQSIAGSEDAVPNRLAVDSYQAGLYGAYALGQGVQVDGQLDGALNDNGESRSLTFINGKAGAGYRSYGGHAGVGVRKLMPIKPDLTVAPSLRLDYGQLRSPAYQEGGAGGFSLNVDSQIYRELTLTAGLKSAYRIAKQVYLTGDVGIGYNTLNQGLQIKSAFAGGGEAFVTNGLALSPWIYSTALGLAAADGKGLDLGIRYGVAATSSGLLQQSGLAVLKIKL

SEQ ID NO: 11501 - protein, 198 aa, BradyrhizobiumColbertium
MIKLYWSPRSRSFTTLWLMEESGLPYERVLTDISTGAQKAPDFLKINPMGKVPALTDGDAALGEAAAICAYIADRYPETKLAPAVTDPRRARYLQWLFFSPGCIEPAIIQIFTKIEIPTSTAAWGSATQVFDVLEAALEKGPWILGDEFSAADIAIGSGLNFAVRLFKMVQSRPAFDAYLARCMARPAFQRAEKIAAG

SEQ ID NO: 11502 - protein, 308 aa, BradyrhizobiumColbertium
MLNVTLRQLRYFDALARHGHFGRAAEACSISQPALSMQIKELEETLGGLLLERSARQVALTRFGEELAQRVRDILRSVDELGDFARASQDRFAGRLRIGMIPTIAPYLLPTITKNLTRMHPELDIRVRETMTPRLIQELVEGRLDTAIVALPVSEPSLTEVALFEEKFLLVRPSADEGTPAPSREMMREMRLLLLEEGHCFRDQALSFCNMQSAPPREMLDANSLSTLVQMVSAGIGVTLIPEMAVPVETRSASVSLARFRDPEPSRTIGMVWRKTSPLARQLLQISEVVCLSAGKVRAGHSVRSSRS

SEQ ID NO: 11503 - protein, 721 aa, BradyrhizobiumColbertium
MDDTSKCPFSGGKRTRSNRDWWPTQLDIEVLHKNSEKSDPMDEDFNYAKEFKSLDLNAVIKDLTALMTNSQEWWPADFGHYGGLMIRMAWHSAGTYRTTDGRGGAGAGQQRFAPLNSWPDNANLDKARRLLWPIKQKYGRKISWADLMVLAGNVALESMGFKTFGFAGGRVDVWEPEELYWGPEGTWLGDERYSGERQLSEPLGAVQMGLIYVNPEGPNGKPDPVAAAKDIRETFFRMAMNDEETVALIAGGHTFGKTHGAGDPSLVGPEPEAGALEDQGLGWKSKHASGLGGDSITSGLEVTWSQTPTKWSNHFFENLFKYEWELTKSPAGAQQWRAKNAEPSIPDAFDPSKKHVPTMLTTDLSLRFDPAYEKISRRFLEHPDQFADAFARAWFKLTHRDMGPIHRYLGPLVPKETLIWQDPIPAVDHELVGEQDIAALKSKILASGLTVPELVSTAWASASTFRGSDKRGGANGARIRLAPQKDWEVNEPAQLSKVLGKLEAIQKDFNASSGAKKVSLADLIVLGGTAAVEKAAKDAGVDVKVGFTPGRMDASQEQTDAASFAPLEPRADGFRNYIGKRHQFMQQEEALVDRAQLLRLTGPEMTVLVGGLRVLGANANGSKHGVLTSKVGTLSNDFFVNLLDMSTQWTPAADGSYEGRDRKTNAVKWTGTRVDLIFGAHSQLRAFAEVYAASDSKEKFVKDFAKAWTKVMNLDRYDLAA

SEQ ID NO: 11504 - protein, 243 aa, BradyrhizobiumColbertium
MSSISRRRLMFAASGLVAAAAAPRLVFAQAAMAPAGPFKLGPLSYPANALEPHIDAKTMEIHHDRHHQAFITNLNNFAKDNPQIAEKPVGEVLGNLGAVPDAIRTAVRNNMGGHANHTMFWQIMGPNGGKPDGALLAAIDSDLGGMEKLQTDFNAAGGRVFGSGWVFVTVSKEGKLAIETRPNQDNPMMDGKRALLGNDVWEHAYYLNYQNRRADYLKAWWNTLNWKVVGERYAAAKAGTLGV

SEQ ID NO: 11505 - protein, 720 aa, BradyrhizobiumColbertium
MFNKHSVEIDWGGRPLKLETGKIARQADGAVVATYGETVVLATVVAAKAPREGVDFLPLTVDYQEKTYAAGRIPGGYFKREGRPTEKETLVSRLIDRPIRPLFVDGWRNETQVIATVLSHDMENDPDIVALVASSAALTLSGAPFKGPIGAARVGFVNDEYVLNPTLDEMVDTQLDLVVAGTADAVLMVESEAKELNEDIMLGAVMFGHRHFQPVINAIIELAEKAAKEPREVTVIDNAALEKEMLGIIEQELRAAYAIPIKQERYAAVGKVKEKVIAHYFPEGQEPKYDKLRIAAVFKELEAKIVRWNILDTGKRIDGRDSKTVRNIVAEVGVLPRAHGSALFTRGETQAMVVTTLGTGEDEQYIDALSGTYKETFLLHYNFPPYSVGETGRLGGTKRREIGHGKLAWRAIHPVLPPHHEFPYTVRVVSEITESNGSSSMASVCGASLALMDAGVPLKRPTAGIAMGLILEDKRFAVLSDILGDEDHLGDMDFKVAGTEAGITSLQMDIKIEGITEEIMRVALGQAKEGRIHILGEMAKALTNARAELGEYAPRIETFKIPTDKIREVIGTGGKVIREIVEKTGAKVNIEDDGTVKVASSDGEAMKAAIKWIKSIASEPEVGQIYDGTVVKVMEFGAFVNFFGSKDGLVHISQLAANRVQKTSDVVKEGDKVKVKLLGFDDRGKTRLSMKVVDQTTGEDLEAKEKAAEGEKAPREAAGE

SEQ ID NO: 11506 - protein, 46 aa, BradyrhizobiumColbertium
MRVGCDPLTDLHPGMKSEHRGSVLAFVPTDSPAAIRRLGTTGKAPV

SEQ ID NO: 11507 - protein, 89 aa, BradyrhizobiumColbertium
MSIAAERKAEVIKTNATKAGDTGSPEVQVAILSERINNLTNHFKTHVKDNHSRRGLLKLVSTRRSLLDYLKKKDEARYKALLEKHNIRR

SEQ ID NO: 11508 - protein, 372 aa, BradyrhizobiumColbertium
MTMDPAHGTIDSNEADQRDVQTNDFADSGSNARPPQEPRRVNNDPRAKQQKGNQVRRDRRDVHGWVVLDKPIGMTSTQAVAVLKRLFNAKRAGHAGTLDPLASGGLPIALGEATKTVPFVMDGRKRYQFTVCWGEERDTDDIEGRVTATSDQRPTREAILALLPRFTGVIEQIPPRYSAIKVQGERAYDLARDGEVVELAPRPVEIHHLTLVDQPDNDRAVFEAECGKGTYVRALARDMGRILGTFGHICALRRTLVGPFGENDMIPLDQLEALCDRAASGEGSLADALLPVETALDDIPALAVTRADAARLHRGQAVLLRGRDAPTCSGTVYVTVAGRLLALAEVGNGEIIPKRVFNLTGLTASAGRNERN

SEQ ID NO: 11509 - protein, 144 aa, BradyrhizobiumColbertium
MPRHHQKKSSAAGGGSQRQLRVGEQVRHAMADILAQGNVHDADLEGHIITVPEVRMSPDLKLATVYVMPLGGRDTEIVIAALERNKKFLRGEVARRVNLKFAPDIRFRVDERFDEAERIEKLLRTPAVQKDLEQNPASDREEEQ

SEQ ID NO: 11510 - protein, 894 aa, BradyrhizobiumColbertium
MVDTKTPGDKKLSVPSKTLSLKPRVETGTVRQSFSHGRSKQVVVEKRGKRRIDGTPEPQGAEVAKPAPATPAAAPRPAPKAAPPRNAGSGVVLRTLTEDERSARASALADAKLREVEERRQAEEEAQRRAVREAAERAEREAAEARRKAEEERHRHEDEAKRKAETEAKKRFGEGEQPAAARPATAAPVTSAPRSAPSTARPAATTTARPTTTPQRPAGPAGRAPAIAAGPDEDDGPRQIRRGPGGAARPAAAPKTTHKPGPQKERGRLTVVTALNADEVRERSIASFRRRTQRLKGHASNEPKEKLIREVTIPEAITIQELANRMSERAVDVIRMLMKQGAMHKITDVIDADTAQLIAEELGHTVKRVAASDVEEGLFDTVDDSTDTETRSPVVTVMGHVDHGKTSLLDALRHANVVSGEAGGITQHIGAYQVVSPESGKKITFIDTPGHAAFTAMRARGAKVTDIVVLVVAADDGVMPQTVEAINHAKAARVPIIVAINKIDKPDAKPERVRTELLQHEVQVESFGGEVVDVEVSAKNKTNLDKLLEMIALQAEILDLKTNSQRPAEGTVIEAKLDRGRGPVATVLVQRGTLRVGDIIVAGAEMGRVRALISDQGETVQEAGPSVPVEVLGFNGPPEAGDRLAVVENEARARQVTSYRAHQKRENAAASISGMRGSLEQMMSQLKTAGRKEFPLIVKADVQGSLEAILGSLEKLGTDEVAARILHAGVGGISESDVTLAEGFNAAIIGFSVRANKEAAAAAKRNGIEIRYYNIIYDLVDDVKKAMSGLLAPTLRETMLGNAEILEIFNISKVGKVAGCRVTDGTVERGANVRLIRDNVVVHEGKLSTLKRFKDEVKEVQSGQECGMAFENYHDMRAGDVIECYRVETIQRSL

SEQ ID NO: 11511 - protein, 227 aa, BradyrhizobiumColbertium
MLASTDSELDHGPRTERSATMRMCAVSREVRPIDELIRFVVSPQGEVVPDLKRKLPGRGMWLTASRQVVAEAVRRHQFSKTFKRELRPPQTLSTDIEALLVRSVMEALGIAAKARQVLTGFGKVESALREGTVEVLIHASDGAADGIRKLDMLARQNAGNGGAKPQIPVITVLKSIELDLALTRSNVIHAALLAGPASKSFLSRSQMLVRYRMADDDKTAEKPGQDF

SEQ ID NO: 11512 - protein, 535 aa, BradyrhizobiumColbertium
MAVSANRLELLQIADAVAREKSIDRGIVIAAMEDAIAKAARARYGSETDVHAEIDPKKGELRLSRHMLVVDKVENPSNQISLVDAQRANPGAQVGDTIADTLPPLEYGRIAAQSAKQVIVQKVREAERDRQYQEFKDRIGDIVNGVVKRVEYGSVIVDLGRGEAIIRRDEMLPREVFRNGDRVRAYIFDVRRETRGPQIFLSRTHPQFMAKLFAQEVPEIYDGIVEIKAVARDPGSRAKIGVISRDSSVDPVGACVGMRGSRVQAVVNELQGEKIDIIPWSPDIATFVVNALAPAEVSKVVIDEDRERIEVVVPDTNNQLSLAIGRRGQNVRLASQLTGWDIDILTEQEESERRQADFENSTRVFMESLNVDEVVGQLLASEGFTSVEELAMVDVKELAGIEGFDEETAQELQNRAREYLEQQEAELEARRKELGVEDALKDVPGVTSKMLVKFGENDIKTVDDLAGCATDDLVGWTERKEGSEPTKHAGALDGIDISRDDAEAMIMQARVKAGWITEADLAKPEEAAAAEDQPA

SEQ ID NO: 11513 - protein, 232 aa, BradyrhizobiumColbertium
MVEPGVAARVSAVAAPVLQGMGYRLVRIRISGEAGCTVQIMAERPDGSMQIEDCEAISRALSPVLDVADPIDRAYRLEISSPGIDRPLVRRSDFERYAGHLVKIEMAVAHEGRKRFRGTLGPVEGDRVHLHRDDVKPGDEADILLTMEDIGEARLVLTDELIAESMRRGKAEERKMRRDLGLEPPAAPHAEISAKITKNTKPKKKPAPTNTKKHRLAAERARRGETEPDQGD

SEQ ID NO: 11514 - protein, 360 aa, BradyrhizobiumColbertium
MTVATSLIPGLDDIVRRGDPRRRGEIARAVAQLFLQDAEKLRPELVALFDNVLIDLVPHAELASRVDLAERFSRLNNAPPHLVNQLARENEISVAGPVLRRSPVLDDAALVEIARLKGQGHLLAMTERPALSPVVTDVLVERGDRDVVRRAASNAGAAFSPSSYSELIKRAAQDGVLTLKIGQRNDLSGEHLKQLLDGTLDVIRRRLSSVVNPARQAEIKRAMAAIEEAARPPGPRRDYSAAQRTVLALYREGHLGESALLGFAKANKYEESIAALSAMSGVRLSVLDRLIAGDRYDPILILGRVLNLGWPTVRALIRLWYGPQRAPADADIETARVNFTRLMPTTAERVVHFWRNRQTI

SEQ ID NO: 11515 - protein, 236 aa, BradyrhizobiumColbertium
MSERKSDPGRDDSERAFFGRRKGHKLRQHQAELIDHLLPHLALDINGEAPVDARAIFAPAADDVRLEIGFGGGEHLAAEAQNFPTTGFIGCEPYVNGMAKILAQIEAANIGNIRLFAGDAAELLAWLPKGALSRIDLIHPDPWPKRRHWKRRFVQDRTIAAMARVLKPGGEFRFVCDIDDYCAWTLSHLARSQDFVWLAERADDFRQPWPGYTMTRYGRKAAREGRKAAYLRFRRI

SEQ ID NO: 11516 - protein, 375 aa, BradyrhizobiumColbertium
MTSSNWFDSQTILDGIRRWVEIETPTESPEQVNELVSLVAEQYRGLPVTLERVAGVAGCGDHLVARTNWGQDRPGILVLSHLDTVHPVGFIERLPFKVEGDVAFGPGIYDMKGGAYIAHHAFGALCATGDRSPLGITHLFTSDEEIGSPTSRALIEKEGRKAKYVLVTEPARDGGKIVTGRKGVGRFQVHIKGVPAHAGSRPEDGRSAVRELGHVILALEGMNDPARGVTVNVGLVRGGTRPNVTPEEAYAEVDLRVVSLKDADEYVDRILALTAKTDGVTVRVAGGLNRPPYEKSNAGASLYEHARLLAREIGFELIDTHTGGGSDGNFTAAHTATLDGLGVDGKGAHTHFEQLYVSSLAPRARLLHRLYQTLR

SEQ ID NO: 11517 - protein, 39 aa, BradyrhizobiumColbertium
MVWESNQLELVMDASVPLNRIIEAEVHQCAVANDDIGQI

SEQ ID NO: 11518 - protein, 137 aa, BradyrhizobiumColbertium
MSKAPNPVDKYVGSRVRMRRIMLGMSQEKLGEALGLTFQQIQKYEKGTNRVGASRIQQIAEILQVPVSFLFEGGPSGVPGPEGFSEGASPSYVSDFLATSEGLALTKAFTRITDSKMRRSIVDLVEQIAAREGPDKR

SEQ ID NO: 11519 - protein, 537 aa, BradyrhizobiumColbertium
MSPLQRLRQIALAIILTWGWKRAVIAMAAGALSVLALAPFNLFPVLFITFPVMVWLIDGAGAGRHGGVPAAALTGYWFGLGYFVPGLYWIGYAFFVDADVFAWLTPFAVLGLPAYLSIFTAIGFALARLLWTKNATRVLALAASLTISEWLRGHALTGFPWNTFGYALSEPLPLAQTASLIGLWGMTFLTVAIFASPATLIDRTPDRRPQWRVPSAAVALLIVMSIFGAIRLSLHPTAMVSGAKLRLMQPNLQQDAKFNYAAKAEVMKKYLALSDRASGPQSTGVRDATILIWPESAFPFFLTREAGAMAQIADLLPKGTVLITGSVRAPDLPRGTPITRAYNSIYVIDHDGSVLAVYDKLHLVPFGEFLPYQALMEKLGFEQLTRVRGGFIPGTVRHALPVAGAPPALPLICYEAIFPGEVAGRNERPGWIVNLTNDGWFGISTGPYQHLEQSRMRAIELGLPLVRSANTGISAVIDPVGRTIASLGLGIEGILDANLPAALPPTVYARVGDAPAAMLVALAVIVAVRRRVAKRHT

SEQ ID NO: 11520 - protein, 371 aa, BradyrhizobiumColbertium
MPDSDPIQDNPRNTANLPVVVTQGEVMRPTADGWLLRAIRTLFGWKAGSVRDDLKVVLDATRPDDTGFSAVERTMLRNILGLHERRIADVMVHRADIVAVKQDIPLGELMDRFESAGHSRLVVYNETLDDPVGIVHIRDLLAFMTARARVSEVTKTKRKKPLPAGLDLRAVDLALPLHEARIIRKLLYVPPSMRAIDLLAQMQATRIHLALVVDEYGGSDGLVSIEDIVEQIVGEIDDEHDSDEPPSIVRLPDNAFIADARARLDDVRSVIGEDFLTGEAGEEVETLGGYLVSFVGRLPVRGEVISGPGTYEVEVLDADPRRVKRLRISTRKERPAPRAQRERSRREAAPDAGQPPAGETPTSPSDGTSQQ

SEQ ID NO: 11521 - protein, 162 aa, BradyrhizobiumColbertium
MTEVLVVADCWQREPDSEAVIQRAVAAAAESIHEDVADAEVAVMLTDDAGIRTLNSNWRGIDKPTNVLSFPALQQEGDRKPGDAPRMLGDIAIAYETMRREADEEHKPFDHHLSHLAVHGFLHLIGYDHENDDDAEEMEALETQILAHLGIPDPYADRAGTH

SEQ ID NO: 11522 - protein, 331 aa, BradyrhizobiumColbertium
MQVPPETQVVIDFDDNRAASALVGPYGQHLAQIERRLGVVVDSKGNHITIGGSRDGCDAARRVLEMLYAQAAKGQDLDQGEVEGAIRAVIAQGSLFEFDAKSAKSAFDSINLRKRPVRARTAAQDSYIRALKRHELVFGVGPAGTGKTWLAVAHAAQLFERKEVDRIILSRPAVEAGERLGFLPGDLREKVDPYLRPIYDALYDLMDARIVERALQTGEIEIAPLAFMRGRTLTNAAIILDEAQNTTSMQMKMFLTRLGENSRMIVTGDPSQIDLPNGQTSGLAEATRLLNGVEGIAQVHFRAEDVIRHELVARIVAAYEGPPQRPTTGQS

SEQ ID NO: 11523 - protein, 464 aa, BradyrhizobiumColbertium
MTPPRKLHIKSYGCQMNVYDAQRMVDTLAPEGFVETASAEDADLVILNTCHIREKASEKVYSELGRLRVAKDEAARAGRAMQIAVAGCVAQAEGEEIVRRAPAVDVVVGPQSYHHLPELLKRAGSEGRAIETEFPAADKFGFLAQPKPDAIRARGISAFVTVQEGCDKFCTFCVVPYTRGAEVSRPVAKIVDDVKRLADNGVRELTLIGQNVNAYHGEGPDGKTWPLGRLLEHLAAIPGIARLRYSTSHPRDVDDSLIAAHRDLDALMPFVHLPVQSGSDRILAAMNRKHTADDYRRVVDRFRAARQDIAFSSDFIVGFPGESEQDFLATLALVAQIGYAAAYSFKYSARPGTPAADMQETVSPAEMDQRLERLQELIDSQQSAFNKAAIGSTVDVLFERPARKEGQIVGRTAYLQPAHVMASPDIIGQILPVRIDRLERYSFLGELVTPRGAREHALSQATGA

SEQ ID NO: 11524 - protein, 226 aa, BradyrhizobiumColbertium
MPIDLIIFDCDGVLVDSEVISCRAHADVLTRHGYPITSEQVFERFLGRSTRQANLEIETELGRKLPEAYHGDLQDELFRSFGADLEAIRGIRDVLDVVTQAVCVASSGSHQRMRVSLGSTGLYERLAPNIFSASQVKNGKPAPDLFLLAASEMGVAPERCVVIEDSLAGIAGARAAGMTVFGFYGGSHCRPGYAETLREAGADLIFADMHQLPELVRRAGAKALAG

SEQ ID NO: 11525 - protein, 151 aa, BradyrhizobiumColbertium
MTALKPSSTSKASDIEARCAATGMRMTEQRRVIARVLAEAADHPDVEELYRRCVAVDDKISISTVYRTVKLFEDAGIIERHDFREGRARYEQMRDSHHDHLINLRDGKVIEFTSEEIEKLQAEIARKLGYKLVDHRLELYCVPLDDDKPTS

SEQ ID NO: 11526 - protein, 161 aa, BradyrhizobiumColbertium
MMGWLSEWWRGGSAVVEPATLRDAARLAQLHGASFARGWGEGEFESMISERNTLVHRLRLGGKTIGFAVSRVGADEAEILSIAVDAAYRGRGLSRTLLMTHLGHLAGRGVRTIFLEVEENNQPARRLYERAGFTVVGRRERYYKQPNGEQLNALLMRRDLS

SEQ ID NO: 11527 - protein, 231 aa, BradyrhizobiumColbertium
MLILAIDTALDACAAAVLDTETAELRAHESLPMKRGHAEALMPLIARVMQSAELGFTALDRIAVTTGPGSFTGLRVGISAARGLALASGKPAVGLTTLSAYAAAIVSQNKPAPVLSAIDARHDHVFFQIVAGDGSQLVRPGVASIDEAIAASQFGAPHLVGNAASILADRWPKDGPQPVAVDAQPAPDIGWIAWLGAAANPDTTPARPFYLKAPDAKPAAQKHLAAQAATS

SEQ ID NO: 11528 - protein, 189 aa, BradyrhizobiumColbertium
MFIQTEATPNPATLKFIPGRVVVDGNPMEFSSRESAARSPLAEKLFDVPGVTGVFYGSDFITVTKANGEWQQLKPAILGAIMEHYMSGAPLLADGTAQGDADLDDEDEFFDEADAETVDMIKDLIETRVRPAVANDGGDITFRGFKDGIVYLNMKGSCAGCPSSTATLQHGIQNLLKHFVPDVVEVRPM

SEQ ID NO: 11529 - protein, 164 aa, BradyrhizobiumColbertium
MTSKRLCYEPGHKPKCLVIVDDTAEWDRAVYYASRWAIRAGGGVVMLRIIEPEQQSQEWLGVADIMRAEAQEAAEAALDRAAGRANGIAAITPERVIREGAPMEQLLAVIDEDPDIAMLVLAANPGPEGPGPLVAMLAQAVGTFPIPVTIISGALSDQSVDLLS

SEQ ID NO: 11530 - protein, 350 aa, BradyrhizobiumColbertium
MPFVERVFSGVQPTGNLHLGNYLGAIVNFVKMQETHNCIYCVVDMHAITQGVDVWGGPAELTRNTREVTAAFIAAGIDPKKHIVFNQSQVSGHAELAWIFNCVARMGWLGRMTQFKEKAGKDRENASVGLFDYPVLMAADILLYRATHVPVGEDQKQHLELSRDIAQKFNNDFGDSIRAQGASDGLFFPLPEPLITGPATRVMSLRDGTKKMSKSDASDNSRINLTDDADTIAQKIRKAKTDPEPLPTEEKGLEARPEADNLVGIFAALSGRSKADVLRDFGGGQFSSFKNALAELCVTKLAPIAGEMKRLVADPGHIDAILNDGSDRARAIADETMKLSKDIVGFIRRR

SEQ ID NO: 11531 - protein, 510 aa, BradyrhizobiumColbertium
MIRSFLTVSTGTLASRLLGFARDSLIAALLGTGAVADAFLAAFQLVNVVRRLLSEGALNAALIPAWLRIRDHDGQRAAAAFAGRVLGTVSAALIAISIVIALLMPLVITVIAPGFLGSGTLDLAVANARLMLPYLAFAGPVTVLMGLLNAQGRFALTAFSPLLFNIALIAAIAVLLLDRADASFAAWILAASVGIAGLLQLLMLLSQRSARLATPLRASFDKEMRGFFAKAIPGMLASSGPQWLMVAGAIIASATPSAVSWLYFANRLIELPLGIVGVAMGTVLVPELTRAVRSGDRDAVAHAESRALELATGLTLPATLGLIVLAEPIVRLLFEHGAFGAQDSAATANALIWLALGLPAHVLIKALSPAFYARSDTMAPLLATAQGFVVTVVLALLLGHVFGASGIAASIAAGAWSSALALLRKGTSEFGFAVDASARTRLPRIALAAIAMGGLLWLTTGLVPAESQGFIKFVALGVQIAAGIAVYGLLLRILGVTSWHEAVGALKRPR

SEQ ID NO: 11532 - protein, 333 aa, BradyrhizobiumColbertium
MADVKYDVLGIGNALFDVLVRTDEAFLAKHGMTKGSMSLIDEARAAAIYKDMGPATEVSGGSAANTIVGIGSLGARAAYVGKVKDDQIGKLYVHDIRAAGVAFDTPAAKDGPATGCSYILVTGDGERTMNTYLGAAQDLSPADIDPAEIAAAGIVYLEGYLWDPKNAKDAFVKAAKIAHDAKRKVALTLSDSFCVDRYRDEFLSLMRNGTVDIVFANESELHSLYMTSDFDTALKQLRNDVNLGVVTRSEKGCMVVSVEDAVAAPAFPVDKVVDTTGAGDLFAAGFLYGLARNLAYKQCGELGALAAAEVIQHIGARPQVSLKELAEQRGLTA

SEQ ID NO: 11533 - protein, 568 aa, BradyrhizobiumColbertium
MADNLADKADSYVCGISDTSLLGDTIGRSLDHAVRRWGDREALVSPSHGVRWTWKEFAERVDALAAGFLALGLERGERIGIWSLNRPEWTLTQFAAAKAGLILVTINPAYRLSELEFALKKVGCAAIVTATAFKTSNYMEMLNTLLPELARAKPGHLQAARLPALRMVIQIGGPAAPGTIPFDNVARMSGAEHRQQLAALGAALQFDDPVNIQFTSGTTGSPKGVTLTHHNILNNGYFTGRAMRLTEQDRICIPVPLYHCFGMVMGNLASVTLGATMVYPGEGFDPLATLRAVEQEKCTALYGVPTMFIAELDHPEFKTFDLKSLRTGIMAGAPCPIEVMKRVNTEMNMREVTIAYGMTETSPVSFQSATDDPLERRVSTVGRIHPHVEVKVVDLEGKIVKRGERGELCTRGYSVMLGYWEEKEKTADVLDAHGWMHTGDLATIDDEGYCNIVGRIKDLVIRGGENLYPREIEEFLYRHPKIQDVQIFGVADTRYGEELCAWIRGRPGETLTAEEVRAFCDGQIAHNKIPRYVEFVEEFPMTVTGKIQKFVMRDAVEQRLGLKAAKTA

SEQ ID NO: 11534 - protein, 398 aa, BradyrhizobiumColbertium
MQSKADIDEILRQKSETKEIPGVVAIAASGNDVLYQGAFGKRDLSRPDAMTDDSVFWIASMTKAVTTAGAMQLVEQGKLSLDAPIGDVLPDLANPQVLEGFDANGEAKLRPAKGPITLRQLMTHTAGFCYNMWNGDLAVYLDKNGIPAITTCQNAALKTPIMTDPGTRWEYGTNIDFVGKAVEAASGKRLDAYLRDNLFNPLGMSNTAFKITDDMRKRLVGMHARGEDGQLAAIPFELEQEPEFHMGGGGLYSTAADYIRFTQMILNKGRGNGNQVLKAETVATMGQNHIGDLAMGKMTTAAPMYTNDVDLYPEQVKKWGLSFMINTAKTAEGRSAGSLAWAGLANTYYWIDPARDVTGVILMQLLPFADAKCLEAFAGFERGVYAGLDAAGSGQKAA

SEQ ID NO: 11535 - protein, 40 aa, BradyrhizobiumColbertium
MSALLCMAFLRFDYCWKQPIVLPDGRRGKRIYVPEPVAMS

SEQ ID NO: 11536 - protein, 106 aa, BradyrhizobiumColbertium
MISTWSEWKRYPRPGRGENLEAPISPGIYEVRVAGTGALYSFGAVDNLAQALSLLPVGSKSWFGRRDTSHVPDLEYRTCATSSKADAKAAAERMIGRRETYMSGAA

SEQ ID NO: 11537 - protein, 497 aa, BradyrhizobiumColbertium
MTQTAAARAPQATSNLRDRLKDPSLLKEACYIDGAWVGTPVFAVNNPATGVELAKVPQLGADDTTKAVEAAERAFPGWAKHTAKQRSNILRKWFELIIANREDLALILTSEQGKPLTEALGEVDIGAAYIEFFAEEARRVYGETIPTQRPDARLLAIKQPIGVCGAITPWNFPNSMITRKVSPALAAGCTVVLKPANETPLSALALAVLAEKAGIPKGVLNIITGDAPPIGKVLCEHPAVRFVGFTGSTAVGKILYQQAAVGVKRLGLELGGNAPFVVFDDADIDAAVEGAIVSKYRNMGQTCVCANRLYAQDKIYDEFVQKLSKKVASMKIGDGTESGVTQGPLINMKAVDKVERHIADAVKRGAKVVTGGKRSELGRSFFEPTVLADVKPDSLVSQEETFGPLAPVIRFKDEADVIAMCNASPFGLASYFYSRDLGRVWRVAEALESGMVGVNTGLITTEVAPFGGVKESGLGREGSRHGMEEYLEIKYVMMAGV

SEQ ID NO: 11538 - protein, 304 aa, BradyrhizobiumColbertium
MTTMLSSDLPLPKIGRGKVRDIYAVDDERLLLVTTDRISAFDVVMGETIPMKGAVLTQISAWWFNELEGVVPHHMISADTDEIIAAVPALKPHRAEILGRAMLCKRTTVFPIECVIRGYLSGSAWKEYAASGTLAGEKLKAGLVESEKLEPAIFSPATKAESGHDENITIAKMREVVGDEVAYTLESMTRAIYTLGEELAREQGIIIADTKFEFGRDRDDRIILIDEVMTPDSSRFWAVDTYKPGQPQASFDKQPLRDYLDAERRAGRWNGDAPPPPLPASVVEATSKRYLEAYRRVTGSELKI

SEQ ID NO: 11539 - protein, 305 aa, BradyrhizobiumColbertium
MSWQPSNDPVLGDPMSCDALDLVIVPRTRDLGDGFAVRRALPHGKRQMVGPFIFFDHFGPVQFVSGKGMDVRPHPHIGLATVTYLFDGAIMHRDSEGNVQEIAPGAMNLMTAGRGIAHSERTPDAQRASGQKMLGLQSWIALPAGSEEIAPSFQHYGAGDLPMITERDFTARVIAGSSFGITSPVSMVSPWFYAEVTALAGASVPLDPDHEERAIYVVDGEVEIANERYEGPRLLIFRPGDRITVKALKATRMMFLGGDALEGPRHVWWNFVSSSKERIEQAKQDWKTGRFAPVPQEHEFIPLPE

SEQ ID NO: 11540 - protein, 456 aa, BradyrhizobiumColbertium
MAFETATLAAYVSNLKYQDIPAEVLERAKVLTLDFLGSAIRARREAESTPSMLKMLEALALDTKGESTVFGDTKTWTPAVAALLNGALGHSLDFDDTHADSSLHPSAPVVPAAFAVGEMVGASGRDVLTAIVAGYEVCCRLGNALDPTSHYARGFHPTATAGTYGAAAAAGKLFGLSEKQLIAAFGVSGSQAAGSLQFLVNGAWNKRYQVGAAAMNGVIAATLARNDFVGATESIEGKHGLLAGYTDDAHPDKAVAELGKTYETMKIGVKPYPSCRYTHAAIDALIAMRREHNLTPDQVKRVEIGLHRNGITLTGDAATKRHPRSIVGGQFSMFFTGALALDQGSFGWDDYNRLGDAAIDALADKFDVVQDDRLEIGRTHPFGARVSITTDDGVHERLYADPSGEPTSFPDAQAMQQKFLTLARPVLNARAEKFADAIMTLERFDRVAQATELGRQ

SEQ ID NO: 11541 - protein, 370 aa, BradyrhizobiumColbertium
MALAGQLFDRIRARRTQLGLAIRVTVAATAAYAIATALHLLLPLWAVLTSLIVTQMSVGRSLKATRDYMLGTIGGAVYGGAIAILIPYSSEAGLLGLLVLSVAPLAFIAAINPSLSAATVTAVIVLLVPTMHHSDPLASAIDRVSEVAVGAVTGLLVSFLVLPSRAVRQIRASAAKLLELIADAFTELLAGLTRGRDNDALHRIQDGIGTAMVDLNAIGSEAERERAAHLSSGPDTGPLLRTILRLRHDVVMIGRATVVPLPIEVQTRLAGPLTEVSTVIARFLRSAASALREGAGAPPIHPVHVALQHYAEAVASVRQDGLIRGYPGDTAERFFALGFSLEQMHQNLCDLDRVVGEWSEAASKSARIAD

SEQ ID NO: 11542 - protein, 436 aa, BradyrhizobiumColbertium
MHLAKFFHRAPGDDDRELMLIPGSEPMVIGIRMNRDDEPGSDQYLREEFPDIAEAAAAFRRHAAELVAHGYVETHHTRYTLRNLLPDPQAKPDWQKGLDELMMLALSGPLAEQAKQLDLLKGTPAEHEPLYLWHAARRDYAAGDDPAGAVRLAEQAHNEIRARRASGQPHYAWSISENDLEERILELLCDAYLYADDADAALKTAEHLCRTAPNHEHILKRAEIVCGYFPERREEALDDAYQWSRFGGYEDIIAFPGYAEYESRRKAGSARSWRWRPGTPASEADVSAAQRALGVRLPDDYRDFLLTRGETELLVRLPESSSELRFYGPDELATQHRSLLDFIAYSEEVLEEACAHFRKQYGVSLKHLVPIAEPSQLSRCLLLHVEPGTRYGQCFQWDHDGAWELEQPQPSFDAALNALTEGIERRDATQLAFFDL

SEQ ID NO: 11543 - protein, 216 aa, BradyrhizobiumColbertium
MTLAVDLFFSFRSPYSYLALPKTQKLVEDYDLAVNLRPVYPLAVRVPGFFKKANPQFARYVVRDSIRVAEYEGIPFRFPRPDPIVQDMTTLEVAAEQPYIHRLTRLGAMAQLEGRSLAFTCAIARVLWDGSVAGWNEGDHLARAAEKAGFDLAAMDAAITADPDRYEQVIAENETDHAASGHWGVPTFVFENEPFFGQDRVDLLVWRMQSKGLTRR

SEQ ID NO: 11544 - protein, 162 aa, BradyrhizobiumColbertium
MNGTVREITPNVDVETVLAGAQFIDAFRVEIGAAALDAREACTRMVLHGPRWTDALLRLRNILVKPFGLRTSGEGAPAPHGLIGLFPVLSETPERLVAGFNDYHLDFRIVVDVAGSAADREVTSTTLVRTHNLLGRTYLMLIMPFHKLVVRSMMGRIVEPAR

SEQ ID NO: 11545 - protein, 466 aa, BradyrhizobiumColbertium
MTELLDTEQPGHARSDAPPNHLAEELAETLRLAVPLMLTQLGQIAMITTDLAMIGRLGEDAVAAAALAHTVYFVSFTFGLGLTSAVSPLAAQAFGAGDVRLIRRSLRVGLWVALLISLPMMASPLYGEQILLALGQAPQSAALAQRYLNGLAWGVAPALGFIALRGMMSAVNRPQAPLWITVAAIPINAALVYALIHGLFGLPELGLFGAGLATTLVNLGTFLAALAIAALREPFADYHPLARLWRIDWPLMRQLIAIGAPISFSLLLEYGLFSSAALLMGLISTTAIAAHQIALQVTAVLFMVPLGIGMAATVRVGHAFGRNDPAAVKRAGLVAAVLGLALVSALTIAIIIGRYQLGRLFFGGGAESAATVELTGTLLLVGASFFIADGLQTIMGGALRGINDTRMTLLFAAIGYWCIAFPIGWVLAFHTRLGAIGVWIGFSVGTFVYAGLLILRFRMLARRLAA

SEQ ID NO: 11546 - protein, 238 aa, BradyrhizobiumColbertium
MTFAALLIGSALTGAGAAAAADLRLPASPPPQAQAASAALLSWAGPYLGVQAGYLSGRTETSFPATGEFHFVDPKGATVGATAGFSAQWGRIVAGIEGDVNFVDARATVDTGFAPTPSVTQLQSAVNWNSHLRGRVGYAFGRTMLFASGGLAVAGVESKAFDNASGAVANWTDTRVGWSIGAGSEFRFAPNASARLEYLYDNYGSRTLGSQTVGAVSFTERASRLDTHTVRAGVYWRF

SEQ ID NO: 11547 - protein, 186 aa, BradyrhizobiumColbertium
MMEEPSDETLMSEVSAQRQHAFRILMRRHMPRALRVAERIVRDPAEADDIGQEAFMRVWTNAASFDPKVAKFTTWLYRIVLNLTFDRTRRRTFEPLEEAGEVPDTGPHAVERLIADEELSLLNRAMAGLSDRQRGAIALFHMEGLSGEEAAKAMNLSAKAFESLLGRARLALKANVRKIQDTGSYA

SEQ ID NO: 11548 - protein, 142 aa, BradyrhizobiumColbertium
MTPDQFRELAETWGGDVERWPAATREAARRFAASAEGAAVLAEQERLDRLLAVAPEIETTRADRSSFLVLQRLAAVPPQRRPAWHQRLLRWPALVPAASLACSVMVGVWLAGAMPYAHAPSDVLSVMSGVFDVYAIGYGSVP

SEQ ID NO: 11549 - protein, 133 aa, BradyrhizobiumColbertium
MLLSLCANVVLFTYVSVQWLLPGGFRPGAGVPIRMIERVAERLPAEDAEILWSIYRGKEAELLPLQSEYRLALIKAMKTAAQTNLDKAELEAAVKDARDKRVKIGDLVVATFVEMLERISPKGRRQLVGGYFR

SEQ ID NO: 11550 - protein, 87 aa, BradyrhizobiumColbertium
MSFSRRTAVYVRAALAAASLIALLVLFLSQASAEDARNEAKQACKADYSRLCAGTMPGGGRIRKCLSDNYGGLSAACKQALDARPPK

SEQ ID NO: 11551 - protein, 430 aa, BradyrhizobiumColbertium
MAPIQYIVEGGHRLSGSIEPSGNKNSALPIIAAALLTEHPVTLENVPRIRDTETLVELVRSVGASAEWSARNTLQIHAKSIRAADLDPELCVRIRASILLAGPLLARCGEVMLPPPGGDVIGRRRLDTHVLALEQLGAKVTATDRLEFRAPKLAGADVFLDEPSVTATENALVAAVAADGVTYLRNAASEPHVQDLANFLVALGARIEGIGTNTMIVHGPATLGEATYRIQPDHIEVGSLIGLAAVTRSPLRITRAGVEHLRSIRMGFERLGIICRVEGDDLIVPSNQTLKIQDDFGGHVPKLEDQPWPAFPADLMSIAIVTATQCEGVILMFEKMFESRMFFVDKLIAMGARIVLCDPHRAIIAGPSRLHGATMTSPDIRAGMAMLLAAVCAEGTSTINNADQIERGYERIEERLNALGAKIKRVPART

SEQ ID NO: 11552 - protein, 40 aa, BradyrhizobiumColbertium
MVLAVLLLGGYSGGNYRESSAGAIGAGGGSWPVREPRRGY

SEQ ID NO: 11553 - protein, 155 aa, BradyrhizobiumColbertium
MIASATPSSAAPSRRLGIIGSIVGVLALMAAVLPHWVVPIVFPPPPADKVIVDTGYRIKDRIVAKVKGVDYQAPRSDKSPGRSWSEIASVTAISLGLLAILLSVLSLIFREERLLAAVAAALGTGAIAIEISFFMIGALILIALLYVIGNIIGLF

SEQ ID NO: 11554 - protein, 811 aa, BradyrhizobiumColbertium
MTEPARQPLAENEPSTASEYGAESIRVLKGLDAVRKRPGMYIGDTDDGSGLHHMVYEVVDNAIDEALAGHATRVDVILNADNSVTVRDDGRGIPVDIHKGEGISAAEVIMTQLHAGGKFDQNSYKVSGGLHGVGVSVVNALSSKLMLRIWRDNKEHYIEFAHGDSVAPLKVVGDAPGKRGTEVTFLASTETFKNIEYDFATLEHRLRELAFLNSGVHIALSDMRHAVEKREEMHYSGGVEEFVKYLDRNKSPIVPAPIMVRAEANGIGVEAALWWNDSYHENVLCFTNNIPQRDGGTHLAGFRGALTRQVNGYAEANAKKEKIALTGDDCREGLTAVLSVKVPDPKFSSQTKDKLVSSEVRPVVENVLNEALQAWFEEHPSEAKMIVGKVIQAAAAREAARKARELTRKSPLSVSSLPGKLADCQEKDPAKSELFIVEGDSAGGSAKQGRNREFQAVLPLRGKILNVERVRPDKMLSSEQIGTLITALGTGISDEFSIEKLRYHKIIVMTDADVDGAHIRTLLLTFFYRQMRDIIDGGYLYIAQPPLYKVSRGKSEQYLKDERALEDYLIDAGLDDCVFIPGTGGDRTGRDLRALVDDARVVRSILRNLHSRYNRKVIEQAAITGVLNKAIYGDPEKAAAAAQYIASRLDNQAEEVERGWVGQYAEGQGFQFERTVRGVKEAAIIDDAFLGSAEARKLDEYTVKLQDVYARPGKLRRKDVEHMVYGPADLFEAVTDAGRKGITLQRYKGLGEMNPEQLWETTLDTEARSLLQVKVKEVDQADDIFTKLMGDVVEPRRDFIQEHSLSATIDI

SEQ ID NO: 11555 - protein, 100 aa, BradyrhizobiumColbertium
MSRDQQRALPHPPAGEGAGSEAAPQALRNLPFRRAESTFFDASGEPSNRAFCSAQKRLSKALKTGLKLLSDQGVAGGYFTLGAIHLSWHNSPANQRLLRR

SEQ ID NO: 11556 - protein, 719 aa, BradyrhizobiumColbertium
MPMIRRGTQVPARWLLLACGILAMAGASGPARGADEGIVDVHKLPRLEGATEDTSRADPHRVVYSVPTAVTVTSDAARKLLSAEGWVPYVYSLDEKSTSLSFKKGRQGLRVSFTQTRGRPDQSAVSYTPNRIYSNVPFPDGATELVFDETRPYLGCIAPGTLDATAAFFTREMATIGWRKLTLEAAARWPNADLGETVPNGVRVFYEHPGGDTTQFYKQKPVMLTLTRREDGRTNVEIRVAPFALPEVLEADDDMAGLPRPKPTRSARGLGSTNSNKREMSAAAMAELPAVLAFYRRELAARGWQEDGNAPLASGDEVAVRISSAEETGMLRLGRKYDFTMINVTAQVKESALAARARAKKEADARFLGDALSAAQQLIAADESRRKAQSASLSDAPLNALSDSKTPVPLPENAESVNFEGGNGRLEFSSASSVKALSTFYRSALKSSGWKEQPSVINQPNMAVMAFSKGGKSISMTVMQMGPKVNVRADGSGLVTEAAKAASSAEAQAKPSEPLKPDSESPLPVPTQRSSKSLGTSKIPGSDAPLRRELTASVPAPLDDVLAFYRAELSKLGWQEKTNGAAASAEHAQIEFTSPQGPAVLKLGRAKGETTVTLVQKNADAAAKADMMPKPGQARLMFGNMGPKEASLTINRQTVKIAAGAGGPQSPKGPILDLPPGKYQYALRVDGHPARTETLAVAAGEAWGLMVGPSGDVLPLQMY

SEQ ID NO: 11557 - protein, 247 aa, BradyrhizobiumColbertium
MAAVGRGAQAPARWQLVACGLALLASCLLAASAGAFVSNLPPLFSAALTRDPDARLPAPTRYSYRGIHTTVIPGIEAPLRTRLEARVPATLGDVLAFYRAELGKLGWQEQQDVAWVGTDHARLAFVSPIGPAALELARKDGGTAVQLVQKNSEVATRANVLPEPGRAKLVFSNIGEKEAVLTIDERSISRQAGANAVALDLPPGRYAYGVSVPGRPASTNMLDVAAGDTWELTVGRDGEPWPPLQLY

SEQ ID NO: 11558 - protein, 378 aa, BradyrhizobiumColbertium
MTPSRIHRLTLTHFRNYRAAGLETAADMVALVGPNGAGKTNCIEAISFLSPGRGLRRATLEDVADNQGDGSWAVSAQVEGALGLATLGTGIDAPRADTAVSRRCRIDREPVGSASAFGDHIRMVWLTPAMDGLFMGAASERRRFFDRLFLAIDSEHSSRINALERSLRSRNRLLETRNYDDHWCGAIERETAELAVAVAATRGQTAARLTGMLNARAQQSAFPSAQIALDGWMENALLTETATSVEDRYRQILRDNRPRDAIAGRTTDGPHLTDLQVVYAPKGMPARDASTGEQKALLIGLVLAHATLVAEMTGIVPLLLLDEVVAHLDPSRRAALFDELKKLGAQVWLTGADPVAFAEIGAGGEVFDVESGRVSARR

SEQ ID NO: 11559 - protein, 131 aa, BradyrhizobiumColbertium
MPNDPHHRPIANHLRQFAKNMRHEPTDAEAAMWRLLRDRRLSAYKFRRQVPIENYILDFVCFEKRLVIEIDGSQHADRSATQFETQHFPLKVSQSPATGTMTCCNSPLLCWRISLQSSARGKIPLTRRLTS

SEQ ID NO: 11560 - protein, 81 aa, BradyrhizobiumColbertium
MRGVVPSRRRLPLESNAMLVDAPSPPAGEGISAIGQDITRVRGPLAAPSMWRQPLTRRRFASAPSPAKGEGEGTAPQHLSE

SEQ ID NO: 11561 - protein, 372 aa, BradyrhizobiumColbertium
MKVTVERAQLLKSLGHVHRVVERRNTIPILGNVLVRAENAKLSLKATDLDLEVTETLPAETATAGSTTVPAHMFYDIVRKLPDGSQIVLEADGDRAVLAIRAGRSRFTLQTLPENDFPDLAAGDMSHSFSLAAKDVKRLIDRTQFAISTEETRYYLNGIYLHAAGTPKAATLRGVATDGHRLAQLDLVQPKGAEGMPGVIVPRKTVGEVQRLIEDTEAEMTIELSQAKIRFTIGNVVLTSKLIDGTFPDYGRVIPQNNDKELVVDKKDFENAVDRVSTISSERGRAVKLSLSAGKLVLSVTNPDSGSATEELEVEYASDALDIGFNSRYLLDIAAQIEGDVAVLKLADPGSPTLVQDRDDKSALYVLMPMRV

SEQ ID NO: 11562 - protein, 467 aa, BradyrhizobiumColbertium
MEQDRWSRVKGRLRSSVGEDVYTSWFARMDLEGVQDESVRLSVPTRFLKSWIQAHYAERVLSCWQAEMPEVHRIDLTVRSAVRPAAQPKETPAPIEARRAPTPELRSTATAPVSANHDALGGSPLDPRLTFASFVVGRSNTLAHAAARQVAEGRRGDPVMFNPLYIHAGVGLGKTHLLQAVTWAGNSGSERKVLYLTAEKFMYGFVAALKTQTALAFKEALRGIDVLVIDDLQFLQGKSTQAEFCHTLNALIDAGRQVVIAADRPPSDLESLDDRVRSRLAGGLVVEMGSLGEELRHGILKSRVAAARAHHATFEVPEEVLLYLARTITHNGRDLEGAINRLLAHSKLNNRPVTLEMAEHEVRDLVRPQEPKRIKIEDIQRVVARQYNVSRSDLLSSRRTANVVRPRQVAMYLAKTLTLRSLPEIGRRFGGRDHTTVLHAVRKIEALVSKDTALSEEVESLKRQLQE

SEQ ID NO: 11563 - protein, 88 aa, BradyrhizobiumColbertium
MANTTSAKKATRKIARRTAVNKSRRTQMRGAVRTVEEAIKSGDRAAAVKALATAEPALMRAAQRNIIHKNNASRKVSRLTAQIAKLAK

SEQ ID NO: 11564 - protein, 105 aa, BradyrhizobiumColbertium
MIRGFFRLIGLLLLAGGFIFMVYDGARWVADQTLQFTRFGQFWNDINQASQAAFRTWVEAKAPWLWTSVIRLVLDQPVFAVLGILGILLMILFRPRKPLIGYSRD

SEQ ID NO: 11565 - protein, 218 aa, BradyrhizobiumColbertium
MLFMRKTTALPSATEALPGRAQAIPTATTHFVNGAKLKPPHPAGLEQAVFGLGCFWGAERKFWELGDGVHVTAVGYAGGHTPNPTYEEVCSGRTAHTEVVLVVFDPNKISYDKLLKTFWESHNPTQGMRQGNDIGTQYRSAIYTYSDAQKKAAEESKALYQKALAAKGLGAITTDIAPAGAFYFAEDYHQQYLAKNPAGYCGLGGTGVSCPIGVGVSA

SEQ ID NO: 11566 - protein, 553 aa, BradyrhizobiumColbertium
MSRLPLVSRLGRQLARFAAAEQGNIAVIFAIALVPVLGFVGAAVDYSRVVQARTSLQVALDSAALMVSKDLTNGVISESQIEEKTKSYFSGLYTGRTGTVSTADIHASYTPKDSSGISNIVVTGSGTMPTDFMKIAGFPKLGYNVSSTAAWGNTRMRVAMVLDNTGSMAQNGKMAAMQAAAKDMIDTLSNYNKQTGDVYISIIPFSKDVNVGTTNVGASWINWTEWEAEPPILVNNKSSAFNSAVGGSDCPFTKSTHGFTCMDRPATLPGAKAAPYGKIPSTGTYAGYICPSVDSGNKRAGKAGIYYNGCYTTATGSGASCGSSTSCTCTGSGSGKICHLWRGDGTAATAAAAPDRSTWTGCVNDRDQDYDTKNSAPGSGGGTPSSQFYAEQWSGCLPATVFPMSNQWQTLKDQITAMVPSGNTNQAIGLAWGWQSISTTNQPISAPSKASNYVYKDYIVLLSDGLNTQNRWSTSQSSIDARQAILCQNIKADTANPVTIFTIQVNINNADAKSQVLQDCATNGNFQMITSASQTSDAFKNILTQISKLRVAR

SEQ ID NO: 11567 - protein, 53 aa, BradyrhizobiumColbertium
MLANNPAWPDYRERRSNKAARLRKAQRAGCAVAAIRFRGEFERLCHAAIDFQY

SEQ ID NO: 11568 - protein, 130 aa, BradyrhizobiumColbertium
MPQLTFSIDLPAPAAADAPRMSNDENRSGNPSGPNTSVITKVKPKTKRPNLYRVLILNDDYTPMEFVVHVLEKFFNKDVEAATKIMLHVHHHGIGECGVFTYEIAETKVTQVMDFARKHQHPLQCVMEKK

SEQ ID NO: 11569 - protein, 802 aa, BradyrhizobiumColbertium
MPTFSQSLEQSLHRALAIANERHHQYATLEHLLLSLIDDSDAAAVMRACSVDLDKLRTSLVNYLETEFENLVTDGADDAKPTAGFQRVIQRAVIHVQSSGREEVTGANVLIAIFAERESHAAYFLQEQDMTRYDAVNYISHGIAKRPGVSEARPVRGVDEETETKGNEDAKKKGEALETYCVNLNKKARDGKIDPVIGRNSEINRAIQVLCRRQKNNPLFVGEAGVGKTAIAEGLAKRIVDSEVPEVLAAATVFSLDMGTLLAGTRYRGDFEERLKQVLKELEAHPNAILFIDEIHTVIGAGATSGGAMDASNLLKPALASGTIRCMGSTTYKEYRQHFEKDRALVRRFQKIDINEPTVEDAIAILKGLKPYFEDYHRLKYTNEAIEAAVQLSSRYIHDRKLPDKAIDVIDESGAAQMLVAENKRKKTIGIKEIETTIASMARIPPKSVSKDDAEVLKHLEQTLKRTVFGQDRAIESLAASIKLARAGLREPEKPIGCYLFSGPTGVGKTEVAKQLAATLGVELLRFDMSEYMERHTVSRLIGAPPGYVGFDQGGLLTDGVDQHPHCVVLLDEIEKAHPDLYNVLLQIMDHGRLTDHNGKQVNFRNVILIMTTNAGAADLAKQAFGFTRTKREGDDHEAINRQFAPEFRNRLDAIVSFGHLSVEVIGTVVEKFVLQLEAQLGDRDVTIELSEPAKAWLVQHGYDEQMGARPMARVIQEHIKKPLADEVLFGKLKGGGHVRVVLVKDEADETKEKIGFEFVEGPVTPKQEKLPGARKRPSGKSKPGGPGGSKGPTSKGPLVKA

SEQ ID NO: 11570 - protein, 149 aa, BradyrhizobiumColbertium
MRSFGIVALSVMLGGCASVTRGTTENISIASTPSGVEAVVSGLEVPTTCTTPCAIVAKRSADITITFEKEGYQSQKVQLTKEVSGTGAAGFAGNLLAGGLIGMGVDAATGAATDHKPNPVIVTMQPSVPHAAPRAPRKPRPPREPQAGT

SEQ ID NO: 11571 - protein, 473 aa, BradyrhizobiumColbertium
MSSAPIEHADGLPQPQRNWAVLTIALGIIMAVVDSAIANVALPTIAADLDASPAFSIWIVNGYQLAITIALLPLASLGEVVGYRRVYLVGLVLFTLASAFCALADTLPMLTFARVIQGFGAAGIMSVNAALVRFTYPRSQLGRGIGLNALVVAFSAAVGPTLAAGILAVGSWPWLFAINVPLGAATLVLGLRSLPHTKPASRRFDWQSAGLSAITFGVGIAAIDSVGHGAPAITWLVQFAIALVAGALLIYRETHMTSPLLPLDLLRIPVFALSIATSIASFCGQMLAFVAIPFYLQSRFGYSAVHMGLLITPWPIAVAFAAPLAGRLVEHYPAGLLGGIGLTLFACGLAALAFLPASPTPFDVIWRMALAGAGFGLFQTPNNRTMIAAAPRERAGGASGMLGTARLLGQTTGAALVALLLGRYPVEGTRLALLAGVGFALCGAVLSMLRLSPAGARGAEHVRVQDDQRLRGD

SEQ ID NO: 11572 - protein, 112 aa, BradyrhizobiumColbertium
MNCLAPALLAVGVLWSTSSQALDAEQRRAEALLQQMCAQCHAVGRSGTSPNELAPPFRNLGENKLYDPDFLQRLQDGYSSIHRFMPTARFGRDDAEGVVSYLRAIQELRKPK

SEQ ID NO: 11573 - protein, 341 aa, BradyrhizobiumColbertium
MEHRRLGRSGLMVPALSLGTGTFGGVGRLAAWGATDATEARRLLDICLEAGVSMFDTANVYSLGESERVLGQAIKGRRDKVLISTKATFRFGDGPNDIGSSRQHLLAAVDGSLSRLGTDYIDLFQLHGFDAFTPPEEVLATLDVLVRAGKVRYVGVSNFSGWHLMKSLAVADRHGFPRYVANQTYYSLIGRDYEWELMPLGLDQGLGAVVWSPLGWGRLTGKIRRGQPKPEVSRLPKTAEFGPPVPDEHVYQVVDAIDEIAKETGKSVSQIALNWLLQRPTVSTLIIGARNETQLRENLGAVGWSLTKDQIAKLDAASKVTLPYPYWHQRVTFTERNPPAV

SEQ ID NO: 11574 - protein, 462 aa, BradyrhizobiumColbertium
MFSSANRKRSIVALEGSLTAPDQLTMLQARDEALAEYIEALTEGNFLAPGCKGEDRLSKAVANLAARLAEDASNKLDAIVDINVQSNETAISAARMLTACRDVDQRTQALAAASEEMVASVGQIRSNAEDAAANAAQMRAGAEQGMSTVRLASKAMERVEATANDASDKVLALSAASEEIGAIVGSIDAIARQTNLLALNATIEAARAGEAGRGFAVVASEVKGLSQQTGRATEDIRERIQRLRDEVDLIVTAMSDCKSAAAESKGVVTQLGEEMSNVENRTITLTGGMDEIASILNQQTDASREVAEGIAAIAQMTLANVEQIKKISSQLDVAQGIAGKQLQGISGLSFDNKIPRLAKADHVIWKKRLADMAIGRATLKADELADHHSCRLGKWYYGDGSLAMRNHRAFGPLEKPHALVHDHGKRAAKLFADGDLAGALREISLVEEASVDVLRLLDDLSR

SEQ ID NO: 11575 - protein, 56 aa, BradyrhizobiumColbertium
MVERPEVNLGTDTKQLVSFPIGILQTAGVWLRCCPRDAWRTTPRHLPSYRGRQGTS

SEQ ID NO: 11576 - protein, 318 aa, BradyrhizobiumColbertium
MPIQFTTDGSPGHRRLALWQNIVCDVFVGLDCKSDLGSAFHGSVTQASLGKAVCSEVCSDRQHVFRTPSRIARSDQDFVLIALGNRGNGAVVQDGRETVIHPGEFALYDTTRPYELKFKDVFTQSIFKVPREMLHRRLAGTEMLTAISFGAHAPLERLAYDFIFRLCQTADGMPPDTADALSEQAVDLLAMALSERLGRTSLPSSTHRSALLFRLKAQIRAHLADSNLSLAETAAALGISPRYVNHLLADEDTSFQRYVLAERLARCRRDLASPVLAHRHISEIAFAWGFNDLSHFGRVFRERFGMSPRDFRQSQLRH

SEQ ID NO: 11577 - protein, 338 aa, BradyrhizobiumColbertium
MGIEHPKYKVAVVQAAPAWLDLDASIDKSIGLIKEAADKGAKLIAFPEAFIPGYPWHIWMDSPAWAIGRGFVQRYFDNSLSYDSPQAERLRDAVRQAKLTAVIGLSERDGGSLYLAQWSIGPDGETIAKRRKLRPTHAERTVYGEGDGSDLAVHARPDIGRLGALCCWEHLQPLSKYAMYAQNEQVHVAAWPSFSLYDPFAPALGAEVNNAASRVYAVEGSCFVLAPCATVSQAMIDELCDRPDKHALLHAGGGFAAIYGPDGSQIGEKLAPDQEGLLIAEIDLGAIGVAKNAADPAGHYSRPDVTRLLLNKKRSQRVEQFALPVDTVEPTDIAAAAN

SEQ ID NO: 11578 - protein, 212 aa, BradyrhizobiumColbertium
MVTIFFDLDGTLTNPKPGITRSIQYALERLGVPVPNEDELTWCIGPPLLASLRKLTGTDELADRALLLYRERFSDIGLFENEAYSGIADTLTSLAATGQRMFVATSKPAVYATRIVDHFGLKPYFERVFGSELDGTRVDKRDLLRYAIEEIKINPAGAIMIGDRSHDVVGARSNGMTAIGVLYGYGSEAELRDAGAHHICAAHPELLGHCAA

SEQ ID NO: 11579 - protein, 317 aa, BradyrhizobiumColbertium
MRIALIIAVVCQTLMFTPVLAEETPPAAAPANAEETAKPTEKSEDARESDTRQSICLIVEAAARDNNLPLEFFARVIWQESRFQADAVGPMTRSGEHAQGIAQFMPGTASERGLLNPFNPVQALPKSAEFLNELRNQFCNLGLAAAAYNAGPRRVQEWLAGTGGMPEQTRNYVYAITGTSIDAWAKAGSTGKGPPSSPPTSCGDLMALLKRAPNPFVAELEQHVELAAAKSWGVQLAAGFDRNKALAMYSRAVTKLSAVIGERDPSLLSSVMRSRGTRAFYQVRIGADTRAEADDLCNRIRKAGGACFVLKNRGLPG

SEQ ID NO: 11580 - protein, 246 aa, BradyrhizobiumColbertium
MALPPLDSPQWNSPWLAFGWGLRSITQTILTIVLFVTYLGIGALAHDTHFSLIWALCSTLFVWAGPAQIILITTLGSGATIVQAAIAVTVSAIRLFPMVVSVLPLMRTPTTKRRELIFAAHLTAVTLWVECHRFLPQVPRERRIAFVHGLGCGLVSVCLVANTVGYVLAANLTQTLGAAILLLTPLSFLFSTARNSREIADVVALVLGIVLYPVAAKMNSGLDILVSGVLAGTIAYGVHWWRQVRS

SEQ ID NO: 11581 - protein, 116 aa, BradyrhizobiumColbertium
MSFAQAVGDWHALVVLFVAGVVPNQIWRMLGLWFGGGIDEGSELLVWVRAVATAILAGVIAQIVVQPPGALASVSDVLRYGAVAAGLVVFLLTRRSIFAGVVAGEVFMLAGKWWLG

SEQ ID NO: 11582 - protein, 163 aa, BradyrhizobiumColbertium
MVREQDLREGEVAIELPPAQDAGLVFIGRIRTPWTSRLETPRQGRQDGPICRLEIFEPFVPAIKGVDFYSNLEVLYWLDKSRRDIILQSPKNNEKTRGTFSLRSPVRPNPIGTSIVKLVGIEGNAILVRGLDCLDNTPLIDLKPDRCEFTPLAAPQTGDFETE

SEQ ID NO: 11583 - protein, 142 aa, BradyrhizobiumColbertium
MTAYDTNNIFAKILRGELPCHKVYEDEHVFAFLDIMPRVPGHTLVIPKAPARNILDIKPDDYAHVARGAHKIAAAAMKAFNADGITVQQFNEPAGGQVVFHLHMHVMPRHDGVAMLPPASRKEDDKLLQDHAAKLIAALKAG

SEQ ID NO: 11584 - protein, 413 aa, BradyrhizobiumColbertium
MASSDITLEAVPSIGEVSPEDWDACAGPGDKCKGHGAGISSAIPGDSLGLSRPAYNPFVSHAFLSAVERSGSATIRTGWGPRHLVAKVGGRVAGVVPCYLKSHSQGEYVFDRGWADAYERAGGRYYPKLQVSVPFTPATGPRLLVRNGVDRAQITEALASGLVALCGVTKASSVHVTFAREAEWKLLAEHGFLQRTDQQFHWHNEGFATFDDFLATLNSRHRKSIKRERRDALAAGITIHWLTGKDITEDAWDAFFDFYMETGSRKWGRPYLTREFFSLIGETMSEDVLLVMARRNDRWIAGAINFIGSDTLFGRNWGALEHHPFLHFEVCYYQAIDFAIKHGLKHVEAGAQGEHKIARGYLPRTTHSAHFIADPGLRRAIEDYLKRERAYVAEAGRELAEFGPFRKGADEAP

SEQ ID NO: 11585 - protein, 59 aa, BradyrhizobiumColbertium
MDGTASSVMSDDAIAPKIVHRSSDFKGLEPYACSASSAVRCSPVSPPQRYRVAACPEQE

SEQ ID NO: 11586 - protein, 248 aa, BradyrhizobiumColbertium
MRAPDWLTARPVAHRGLHDISRGIVENMPGAVQAAIAGNFSIEVDIQLSSDGEAMVHHDHALGRLTEATGDVISKTAAELKAVKFRDTAERMMSLSDLCAMVAGRVPLVIEVKSHFGGDRKLVKRMAEVLASYDGPAVGMSFDPDQVLALRQLLPSRPRGIVAQRTYEDEYWANLTPEQRDSMLYLRHGFQTQPHFVAFKVDHLPAPAPWIARNVFGCALLGWTVRTPEQRARVGRYADQMIFEGFVP

SEQ ID NO: 11587 - protein, 155 aa, BradyrhizobiumColbertium
MAGTVEQKLAEQGIKLHEAPTPVANYVPFVRTGNLLFVSGQVCFDPTGKLIAKGKLGAGVSIEDGAAAARGCAVNLLAQVKAALGDLDKVVRVVRLGGFINSAPDFLDGPKVLNGASDLMVAAFGDKGRHARTTVGVASLPADAAVEVEGVFEVA

SEQ ID NO: 11588 - protein, 292 aa, BradyrhizobiumColbertium
MSNLRFPQGTDMVHLFRTSLGVMALAAATFGPGCGALAANGPFLAHQALYDLSLVKSRSNSVNSARGRILYNFTGNACEGYTSEFRQVSELDSGEGKVTLSDLRSNSWEDAAGKSYRFKIETRMNEADAGRVDGSAERDGDQINVKLKLPAPKSFTLDGKIVFPTEQIQRIIAAAKEGKSLLELSVYDGSDDGQKVYNTLTVIGQPIPADRATSSDPSTADEHMKSLKRWPVTVSYFDRDAQQKEGEQTPVYAMAFELYENGVSRQLVLDYNDFVISGAMGKFDVKDSKPCN

SEQ ID NO: 11589 - protein, 133 aa, BradyrhizobiumColbertium
MPKLDHLCPSGLHNNPAYSHVVTASGARTIYISGQVSVDEEGRIVGEGDIAAQTTQVMQNLGHALKAANANYANIVKITTFVVNYKPELRPIIGKARSAFFEGMEPPASTLVGVSALAAPEWLIEIEAVAVAD

SEQ ID NO: 11590 - protein, 133 aa, BradyrhizobiumColbertium
MMIGERDLAALLKHIEPELRPGIFVFCRLSKSEGIPSALDPLLTFREQEGTTLVISQEAAERAGLRYQFVSRLITLTVHSALDAVGLLAAVTSRLAEAGISVNAVSAFYHDHLFVPVDRADEAMAVLLELANY

SEQ ID NO: 11591 - protein, 408 aa, BradyrhizobiumColbertium
MGVRRCSACGSPRLVRHAALASLTIAHIDCDAFYATVEKRDNPDIADKPVIIGGGKRGVVSAACYIARTYGVRSAMPMFKALEACPHATVIPPDMAKYVRVGREVRQAMQALTPLVEPLSIDEAFLDLSGTERVHGMIPAKVLARFVREIERDIGITVSVGLSCNKFLAKIASDLDKPRGFAALDQEEARLMLAEKPVGFIFGVGPATQERLVQRGFRVIADLQKADEIEMMRQFPSDGRRLWRLARGIDDRLVEPDRGAKTISSETTFETDIRDFPTLEKILWRLCEKTSSRLKSAELAGSTVTLKLKTADFRQRTRSQSIAAPTQLAAKMFAICREMLAKEIDGTAFRLMGAGVSALREGSASDDTDMLDRRAAHAERAVDSLRKKFGSAAVIRGIAYEGPEKAPE

SEQ ID NO: 11592 - protein, 103 aa, BradyrhizobiumColbertium
MKKPVHNPREVAEIVAIQALSFVASDPERLGLFLAETGVGPETLRNAASDPNFLLSVLDFVMRDDATVKAFASSAELHPTNVAGARQVLGDALGDSSWERDVP

SEQ ID NO: 11593 - protein, 121 aa, BradyrhizobiumColbertium
MAKTVLIVEDNELNMKLFRDLLEAHGYQTSGTSNGYEALDLVRKMRPDLVLMDIQLPQVSGLEVTRWIKDDPELRSIPVVAVTAFAMKGDEERIREGGCEAYLSKPISVGKFIETVRRFIG

SEQ ID NO: 11594 - protein, 457 aa, BradyrhizobiumColbertium
MSARILVVDDVPANVKLLEARLSAEYFDVMTASNGTEALAICHRAECDIILLDVMMPDMDGFEVCRRLKTDPATHHIPVVMVTALDSPADRNRGLEAGADDFLTKPVSDVVLIARVRSLTRLKMMTDELRMRAITSLEIGMQAPERSAVADTGKGGRILLVDDRESSYERLATILAAEHTIDVEPNPTEALFHAAEGNYDLLIVSLDLNNFDGLRLCSQARSLERTRHVPILAIADPENSTRLLRGLEIGVNDYLLRPIDKTELLARARTQIRRRRYTDHLRDNVQNSIEMAITDALTGLHNRRYMESHLATLAEQASIRGKPLALMILDIDYFKSINDNYGHDAGDDVLREFAVRVRKSIRGIDLACRYGGEEFVIVMPETDLHVAGMVAERLRRSIAGEPFAIHKGAKRIEVTISIGLTTLERKGEAVADVLKRADTALYRAKHDGRNRVVSQAA

SEQ ID NO: 11595 - protein, 193 aa, BradyrhizobiumColbertium
MKERILETADKLFYLQGIRAIGVDTIAAEIGISKRTLYNHFPSKDALIAAYLERRFVHARPSDKPPAEQILATFDSLERRFAAKDFRGCPFVNAVAELGPQDLAVKKIAIAFKESRRLWFRDRLSELGVANADALATQLVLLVDGSIAQDLVRDDPAMARAAKEAAKVLLRNAGVDVSDGAERPAASGKRAPR

SEQ ID NO: 11596 - protein, 412 aa, BradyrhizobiumColbertium
MPLLQVLRPTLPILIGASVMLTLSMGLRQSLGIFMQPLTHDIHISISDFTLALAVQNLAWGFLQPPAGALTVRYGFRPIMIVGALMYIAGLVLMATANGLVSIMIGAGVLIGTSMACTAAAIAMSVAARAVPETVRSTVLGIVSGAGSLGALLSAPIGQMLNEGFGWRVGLAGFVVMSLLMIPAAWYAGRVDKIPLPKPAAADLGDATAAIAAKTAFGNASFVVMTCAYLVCGMQLVFLTTHLPSYLAICGLDPMLSAQTLGMIGGFNVLGSLFFGWAGQRWNKLALLGAIYILRSLALAWYFTLPASPFSTLLFGAIMGFLWMGVGPLVAGAVAEMFGLRWQAMIQGLAFMSHQIGSFLGAYGGGLLYDALGSYTMAWRIGVALGLAGGIVQVAFALIRPSQPPAPVLRTA

SEQ ID NO: 11597 - protein, 661 aa, BradyrhizobiumColbertium
MRPVARQPFKPRTTEELMALLSAVATGILTVIIISMLYFGRDIFVPVALAILLSFVLAPLVGILQRIHVPRGLAVVSVVVVAFMLIFAIGSLLATQLTQLAGDLPRYQSTISDKIQAFRDTKAGRGTLERASDMLKDLSEELDKPKDAPSAPRTGVVPGSNASPPPVPVEVRQPDPGALESLRTLISPLIHPLATTGIIIIFVIFILIQREDLRNRFIRLAGSLDLQRTTAALDDAASRLSKLFLTQLILNGAFGVVIGTGLWFIGIPSAILWGILAAALRFVPYVGAVIAAAFPLALAVAIDPGWSMLLWTLALFLVVEPLVGHVIEPMVYGRSTGLSPVAVVASATFWTALWGPIGLVLATPLTICLVVLGRHVERLEFLDVMFGDRPALSPPEMFYQRMLAGDPTEAAEKAEGFLKERSLASYYDEVALKGLHLAQADVERNALDQERLMKIRDAVSEFVADLADQDDRPPPRSSSTTDAEASSAVEGIAENAANERLPYLRSETLPPDWQGEHPVLCVAGRPLIDEAAAIMLAQLSTEHGLAARVEGAASLSTTNVFRLDTTGVAIVCLVYLDARAAAHMRYSVRRLRRKLPKATIILGCWVNDIDQAAMELLRTGAKADLIATSIGEAVRLCIEATGITEQGHEAPGQDKPTTAAA

SEQ ID NO: 11598 - protein, 59 aa, BradyrhizobiumColbertium
MLYDALESYAMAWRIGVAIGLAVGIGPVAFGPWAHGGCAANASPGRLTIVITPLPLPSP

SEQ ID NO: 11599 - protein, 409 aa, BradyrhizobiumColbertium
MPLLDPLRFGAALGVAVFHQMFWSWAWVSIGVPGFERYVAADVLYPSAAPFTWFGWVGVEIFFVISGFVIANSAAQSSPGGFLLGRALRLYPAVWVCATATFLVLLLFGSGPVSEIIQPYIHAMLMVPKGVTGHWLDEVYWTLAAEIAFYGLVFCAMLTKRITLRHLAFGLTIYSALFNAVALAVLSCATPSDLPYLVILMFRVPCAAFLLTHGCFFALGIWLFILSNRQLTALEQVAVAVACLSGAAEIYFFASFLLTSIPAIADQSALVPIMVWAAAVLLIALAANRNRRFAGIASPEAPAYLRTLGLITYPLYLTHNVIGAAVIRALVDAGLDATSALWIALAMLILVCWFICAKIEPAVRSALMQILSRFGKLPQRHPVTRRPAFARGLRLPLPVSVKVKVAAAA

SEQ ID NO: 11600 - protein, 45 aa, BradyrhizobiumColbertium
MDQIHATIPFEILNPVEVLCEAGHTRFARQAPIMESRVSVAGSPQ

SEQ ID NO: 11601 - protein, 55 aa, BradyrhizobiumColbertium
MAKAVTIKVKLVSSADTGFYYVAKKNSRTMTDKLVKKKYDPVARKHVEFREAKIK

SEQ ID NO: 11602 - protein, 266 aa, BradyrhizobiumColbertium
MRDVESGLFFDPAKMHTLDHKGKYLKVRGPLNIARPVQGWPVIVQAGASEDGKQLAAETAEAVFTGGGSLADGQKLYADIKRRMEKAGRDPEHLKILPGAFVVVGDSVDEAREKRALLDSRVHYDSAIASLSVILGTDASGFDPDGPLPAIPETNASKSGRQRMVDLATREKLTVRQLAQRVGGYGGLSFVGTAKTIADQMEEWLVGRGSDGFNIMFPFLPAGLDDFVDKVVPELQRRGIFRKEYEGATLRENLGLPRPKNRFFEA

SEQ ID NO: 11603 - protein, 268 aa, BradyrhizobiumColbertium
MVFRLCKQQARKRVLGEDMTDISQAEEKTRVHEEKEADHHPYFRPRDAATLILVDRSGTTPKVLVGKRHDKVVFMPGKFVFPGGRVDKADYRVPCAAPITPELEANLAKGSPKTPASRAKSLAIAAIREACEETGLCLGRKAEGKVTKLEGPWRPFADAGLLPDPSSLFLIARAITPPGRVKRFDTRFFTADASAITHRVEGVIHADAELVELVWVELGSKPLADLHPMTRNVLNELDTRLATGPLRHDAPVPFFHFYGGKMQKDVLS

SEQ ID NO: 11604 - protein, 146 aa, BradyrhizobiumColbertium
MVMISTAPKIWTRETGLVEQRDLWTAMKRGFRGRCPRCGEGKLFRAFLKTADHCAKCELDFTPHRADDLPAYLVIVIVGHIVVPAILWIETNYSTPVWLSFAAYLPFTFIASLALLQPVKGAVVGLQWALRMHGFDENPPDGIPPV

SEQ ID NO: 11605 - protein, 787 aa, BradyrhizobiumColbertium
MKRKNDLGFPDRNAIVAFIKANPGKVGTRDIAREFGLKNADRAELRRMLRELADDGIIKKKRHKVSEPEALPPTLLADITGRDSDGELIASPAEWDEVESGEPPKILIEMPRKPKPGTAAGIGDRALLRVERSDETEGPAWRGRIIKVIDKAKSRILGVFRSLPEGGGRLVAVDKKFADRELNIAKTDTQGAQDGDLVSVDIVRSRGFGLASGRVKEKLGSVKSEKAISLIAIYAHDIPLQFSSAAEREAEAAEPANLKGREDWRDVPLITIDPPDAKDHDDAVHAQPDDDPNNKGGFIVNVAIADVSFYVRPGTALDRDALDRGNSVYFPDRVVPMLPERISNNLCSLVPGEPRGALAVRMVLGPDGRKRSHSFHRILMRSAAKLSYAQAQAAIDGKPDDTTGPLLDPILKPLYAAYACARRARDERDPLNLDLPERKILLKSDGTVDRVVVPERLDAHKLIEEFMILANVAAAEMLEKKSLPLIYRVHDEPTLEKVHALAEFLETLDVPFTKSGALRPTLFNRVLAQLEGHDYYPLVSEVVLRAQAQAEYSSENYGHFGLNLRRYAHFTSPIRRYADLVVHRALVRALGLGEGALPDSETPESLGEVAAHISLTERRAMKAERETVDRLIAHHLADRIGASFQGRVSGVTRAGLFVKLSETGADGLIPIRSLGTEYFNYDESRHALVGTRSGTMYQLGDVVDVRLVEAAPIAGALRFELLSSESEGGPRTRGSFRPQRKPSKAHPGRSPEKKRKPEKQKPAKGKKAKGNRAKRKNKSKGQKGKAW

SEQ ID NO: 11606 - protein, 912 aa, BradyrhizobiumColbertium
MNIVIVESPAKAKTINKYLGSSYEVLASFGHVRDLPAKNGSVDPDANFKMIWEVDPKAAGRLNEIAKSLKGADRLILATDPDREGEAISWHVLEVLKEKRALKDQKVERVVFNAITKQAVSDAMKHPRQIDGALVDAYMARRALDYLVGFTLSPVLWRKLPGARSAGRVQSVALRLVCDRELEIEKFVPREYWSLIATLLTPRGDAFEARLVGADGKKIQRLDIGTGAEAEDFKKALEAASYIVTAVDAKPARRNPQAPFTTSTLQQEASRKYGFAPAHTMRIAQRLYEGIDIGGETTGLITYMRTDGVQIDPSAITQARKVIGEDYGNAYVPDAPRQYQAKAKNAQEAHEAIRPTDLSRRPDSLNRRLDADQAKLYELIWKRTIASQMESAELERTTVDITAKAGSRTLELRATGQVVKFDGFLALYQEGRDDEEDEDSRRLPAMSPNDALKRQSLSVTQHFTEPPPRFSEASLVKRMEELGIGRPSTYASILQVLKDRGYVKLEKKRLHGEDKGRVVIAFLESFFSRYVEYDFTAALEEQLDRISNNEISWQQVLKDFWRDFIGAVDDIKDLRVAQVLDVLDEMLGPHIYPPRPDGGDVRQCPNCGTGRLNLKAGKFGAFVGCSNYPECRYTRQLAADGEATADRSLGQDPETGRDVWVKAGRFGPYIQLGEQKDYEEGEKPKRAGIPKGTSPSDVDLELALKLLSLPREIGKHPETGLPITAGLGRFGPFVKHDKTYASLEAGDEVFDIGLNRAVTLIAEKAAKGPSRRFGADPGKAIGDHPTLGTVTVKSGRYGPYVTAGGVNATIPAEFEKDAITLAQAIALIDERAAKGGGKTKAKKAAKPAKTKKAANGEDASPKPKKPAAKKAAAKTKSESTSKARAAVSSTAKTSPTKAAATKAPAKKSAGKN

SEQ ID NO: 11607 - protein, 47 aa, BradyrhizobiumColbertium
MAFIAEQTGALRELAERHKLAVLHYLLGMTKLEADEHMRLRTKRKLS

SEQ ID NO: 11608 - protein, 109 aa, BradyrhizobiumColbertium
MILSIPADQFRNDVRGLVIAACLIGGLILWFAIAGRSDRVIYRGVDKAWSEPGRVHLNTEPPGNYVIERNAEFDAMKIGCVYALNYDAGFGRQGHNPWKAVRSFTLVRC

SEQ ID NO: 11609 - protein, 159 aa, BradyrhizobiumColbertium
MVKRTSFEGDACPIARSLEALGDWWSLLIIREALFGVRRFGEFQSKLGMAKNILAARLRSLVEHGILATAPASDGSAYQEYVLTPKGRGTFPILVALRQWSEEYDDHPEEIATILVDREKGRPVKKLEMRAEDGRLLAPADTTIRPRQPSKGVSRSRSG

SEQ ID NO: 11610 - protein, 257 aa, BradyrhizobiumColbertium
MRLKNKAALITGGNSGIGLATAKLFVAEGAKVVITGRNKQTLEAAANELGSNALALAADATDIDATEAAIKQGAEKFGKFDILFANAGIAGGTPLGSAKPEVFEKIISTNLTGVFFTVQAALPHLNDNASIILNGSVISVLGIPGYSAYGAAKAGVRAMARVMASELSPRGIRVNVVAPGAIRTPIWGAATATPEAEKEFEKRIALTTPLGRIGETDHVAKTVLFLASDDSAHVQGQEIFVDGGAVASPSGAPIYRG

SEQ ID NO: 11611 - protein, 202 aa, BradyrhizobiumColbertium
MKLLHLDSSVLGPQSVSRQVSAAIVDRLRQATPSLEVVYRDLAHAPLAHLSGSHLAAAHGAPAPAELAPDLAASAVALEDFLAADIVVIGAPMYNFTIPSQLKAWIDRILVPGKTFKYGPTGPEGLAGGKRVIVAMSRGGFYGAETPNAAGEHLETYLRWVFGFLGINSVEFIPADGIQIDPDHREKALTGALQAATALRSA

SEQ ID NO: 11612 - protein, 120 aa, BradyrhizobiumColbertium
MPHPDHADCRGVASVLSRVGDKWSVFVIMMLSDGPKRFNELKRMINGISQRMLTLTLRGLERDGLVTRTIFPTIPPRVDYELTDLGRGLQQPVKALGEWAIEHQEQIAAARTRFDERNDR

SEQ ID NO: 11613 - protein, 372 aa, BradyrhizobiumColbertium
MDVINPSVELTEQERIDRLRLIRSDNVGPRTFRSLVDHFGTARAALERLPDLARRGGAQRSGRICSADEARAELAASRKFGIAWRAPGEDGYPTRLAMIDDAPPLLALRGDAKTLMRPTIAIVGSRNASGAGLKFAGQLARELGEAGFVVISGLARGVDQAAHRTSIESGTIAVLAGGHDCIYPPEHGDLLAAILDHAGAAISEMPLGHEPRARDFPRRNRLISGASLGVVVVEAAHRSGSLITARMAAEQGREVFAVPGSPLDPRAAGANDLIKQGATLVTEAADIINAVQPIMERPLMHPAGEPDSEPFESDPQGHDRDQITGLLSPAPISIDDLVRMSGASPAIVRTVLLELELAGKLERHGGGLVSLL

SEQ ID NO: 11614 - protein, 414 aa, BradyrhizobiumColbertium
MISLADLQRRIEAGELSPDAAIAQSHAAIEAKEKDIRAFVRHDKSAKAQGSGPLRGIAVGIKDIIDTADMPTEMGSEIYRGWQPRADAPVVMMLKRAGATIIGKTTTTAFASRDPTPTLNPHNLGHSPGGSSAGSAAAVGAGMIPLALGTQTGGSVIRPAAYCGTAAIKPSFRMLPTVGVKCYSWALDTVGLFGARAEDLARGLLAMTGRTEFSGIVAAKSPRIGVVRQEFAGAVEPAAEEGLQAAIKAAERAGASVQTIDLPEAVQEAWRIHPVIQDFEAHRALAWEFSERHDEIAPMLRASLDATVGLTPKEYDEARRISRRGRRELGEVFESVDVLLTYSAPGTAPAKELATTGDPRYNRLWTLMGNPCVNVPVLKAAGLPVGVQVIARFGNDPLALAVAWFLEEALAKSG

SEQ ID NO: 11615 - protein, 402 aa, BradyrhizobiumColbertium
MSEKIFGAQDGVGSLGGSGTAASRLLSSTNVWCDAPSPPAEPKPLPISPPASVPDSVAKAPVAVDVVTTAAPIVPMQPRSNQWPPRRLSLALQGGGTFAAFTWGVLERLLEETSIEIDTISGASAGAINALLLASGLAEGGREGARYRLNRFWVRLMHEASFRSLMLVGGFSPAGSSVAFGPTLRSGQFDPFDLDPLRQAVSRDINFSVLRDTRCPKLLIAATRIRDGRPQIFSNDAITADVVLASTCPPLVHCAVEIDGEAYWDGGFGGNPPLLRLVQETTTSDVLLVQVTPTRDTYVPITLAAIDRRLDQIAANAALNAEVAAIEWAQAHAAPLLRLSRIAAEDSVDGLAQRSSTDLGRGFIRLLHRSGREAAGRWLGQGADGSAPARTREAARAEPALV

SEQ ID NO: 11616 - protein, 198 aa, BradyrhizobiumColbertium
MALEAFLPVAFVIGYLLGSIPFGLILTKLAGTQDIRSIGSGSIGATNVLRTGRKSLAAGTLLFDALKGTVAVVIAGYIAGPNAAMVAGLGAFLGHLFPVWLKFKGGKGVAVYIGILLGLFWPGAVVFCLLWLATAFTTRYSSLSALVAAFITPMFLWWFGHLALSALAAVLTLLLFYAHRENIRRLQTGKESRIGEKA

SEQ ID NO: 11617 - protein, 435 aa, BradyrhizobiumColbertium
MPMLTDRRPILLANARIVDPSRDFDGIGDVLIADGTIRETRRGIGAAGVPEGTDIINCSGKIVAPGLIDMRAFVGEPGLSHRETFASASQAAATGGITTIICQPATSPVIDNSATVDFVMRRARDTAIVNIQPMAALTKGMHGEEMTEFGLLKAAGAVAFSDGDKSVTNAQVMRRALTYARDFDALIVHHTEDPNLVGEGVMNEGEFATRLGLMGIPNAAEAVMLERDLRLVALTGGRYHAASLTCIDSLDILQRARSAGLACSASVSINHLALNENDIGPYRSFLKLSPPLRTEDDRRALVAAISSGLLDVIMSDHNPQDVEVKRLPFAEAAPGAVGLETMLPAGLRLVHNGELELKTLIRAMSTRPAELLGLSGGTLRAGSPADVIVIDPDTPWVVDPAVLKSPCKNTPFDEARFTGRVVRTIVGGRTVYEHV

SEQ ID NO: 11618 - protein, 315 aa, BradyrhizobiumColbertium
MTSKSTFVLGHRHLLGIEGLSAADITGLLDLSEEYVELNRQVDKKRTVLRGRTQVNLFFEASTRTQSSFELAGKRLGADVMNMSVSSSSIRKGETLIDTAVTLNAMHPDILVVRHHASGAVELLARKVDGSVINAGDGAHEHPTQALLDALTIRRNKGRIEGLVVAICGDVLHSRVARSNIILLNTMGARVRVVGPSTLLPPGIERMGVEVARDMRAGLEGADIVMMLRLQRERMNGSFVPSSSEYFHYFGLDQKKLAYAKPDALVMHPGPMNRGVEIDSIVADGAQSLIREQVEMGVAVRMAVLEALARNLPNA

SEQ ID NO: 11619 - protein, 433 aa, BradyrhizobiumColbertium
MALVIGNDLYPNLPADRQLKKAANDATSVADALRSLGFEIVLGTNLGRQAMIDRLADFTARLEPGDTAAVFYAGHGVAIAGVNYLVPSDVPTVNEGAEARVRGASIAEPDVIAELQAKSVRVAFVVIDACRDNPFPRAAGRSIGNTRGLADSKPARGIFTLYSAGIGQTALDQLSSNDTAHNSVFTRVFVEQLKRPELHLGDLAVEVRERVAALALTASDGAGEPVPHDQTPAYYDQTLGGRIYLWASLSSERPVAGMLVKPQARPAVAERAAMRPPRPSAAGESCARSGFATYCVSSMLKPQFGNSYGVANLFDASTGTAWVEGASGSGIGEWITIEFEAPRRVKSIHVQNGYQKTPDIFAKNNRVRQIRLQFSGGESQTFTLDDKFSAQLLTLRSPVTAYWLQFVIDDVWAGNKYTDTAITKLLVNSDPVQ

SEQ ID NO: 11620 - protein, 257 aa, BradyrhizobiumColbertium
MIARKDITARAALVALLATFVLAPVRAQTLPGGFVYLRDIEPSIIQDIRYATSNNFVGRPLAGYGAGECVVKREVGLRLKAVQEELAAQNLSLKMFDCYRPARASLDMVKWSQNGHETAAERRYNPRIPKTELFRLGYIASRSQHSTGAALDLTLVDLKADNSAKYDPSKSYADCTAPAEVRAPEGSVDMGTGYDCTDVRGHTAAPSINPEQRAWRKRLVAAMARQGFVNYSKEWWHFSLPGAGGAAYDFPIQPRTR

SEQ ID NO: 11621 - protein, 547 aa, BradyrhizobiumColbertium
MTQPNFATHEVFNQSPPFEDVNLFTLDQPLVAAVKANGGAAAERELSAFGKEWGSAAMADRGRLANENTPKLRSFDAKGHRRDQVEFHPAYHELMAHSAHAGVHNSTWTADGRPADDAAEVIRAAKFYMAAQVETGHLCPITMTRASVGALAMQPDLLARVMPVLSTKSYDPGFAPWWGKRGMTLGMGMTEKQGGTDVRANMTRAVRDGNAYRITGHKWFMSAPMCDAFLVLAQADGGLTCFFMPRFAPDGSVNAIQFQRLKDKLGNRSNASSEVEFVGAHAERIGEEGKGIRTIIQMVQLTRQDCAIASVGLMRSGLAHALHHARHRSVFQKHLADQPLMQAVLSDMALHVEASTALVMRLCRAFDRTPRDAAEAAYMRLLTPAIKYWTCKSAPPFLYEAMECLGGNGYVEDGILARHYRESPVNAIWEGSGNVMCLDVLRALSREPDAAMTVLHALAAETKGLPGAGQAVAFIGKTFRRADGERVARLAVEKLALLAAAAALQAVSPHNAELFASTRLATNHASMYGAVELESADVRMLLERALP

SEQ ID NO: 11622 - protein, 254 aa, BradyrhizobiumColbertium
MDSLNPDHPPLTEAPVAPRVWKFWGTALWGLFIFVAMFVGQIGAVIVLAAQRGLPMDLASLQLVGREPQTLAFSVIMGLPATLLAVWLAIRIKRASFVDYLALHWPSWKQLLFGAIGLILIVVVWETMSRALGREATPGFMTDLLKSGRDKGAALLLLFAFSVAAPTSEEILARGFLYRGWSASFLRIPGAILLSSLVWTIVHLQYDMYFLAEVFAIGLWFGYMRYRANSLWLTIMLHALNNLTAVVLTMWLGS

SEQ ID NO: 11623 - protein, 307 aa, BradyrhizobiumColbertium
MAVVIAALLPVFILIVLGIVLKRSLMRLDTQWHGLELLTYFVLFPMLLIQTLVKADLSKVPVAGVGGALLLSALAMSLLCLALRPALSRLGVDGPAFTSIFQGATRWQTFVALSIAANLFGDVGLALASVAMVAIIPLVNVFSVSVLARYASPEKQSGRAIVITLVRNPLIWACIIGLTVNVTHLPLPRLWHEVADALGSSSLAIGLLVTGAGLHLEGLFRPSLGAAVGVVFKLLLMPALAMGLGFWFGLSGNSLAIVAICSAVPTSSSAYVLARQMGGDAPLLAQIITLQTIFAAITMPIAIGLAA

SEQ ID NO: 11624 - protein, 161 aa, BradyrhizobiumColbertium
MSALILPLVDAVTHWPARGALVGLDLGTKTIGVAVSDPDRRLATGVETIQRKQFKQDAARLLAIAAERKAAGFVLGLPINMDGSEGPRAQSTRAFARNLAGLTALPIGLWDERLSTAAVERELIGMDVSRAKRAEVIDEHAAMFILQGALDRLANLRPGAA

SEQ ID NO: 11625 - protein, 44 aa, BradyrhizobiumColbertium
MLTLFDLFAVAAMPITYALAECGHRFVLLFAPHAPPSSHRGGGT

SEQ ID NO: 11626 - protein, 738 aa, BradyrhizobiumColbertium
MLIKPSLIAGSERRFKQAEFSPDALNRKLGDGPIEMSVEKMRLRQRQLLAETHDMQAAEKGLERIIQGNDLDSINYLAKGTAAARSVCRIQLRDLKSNLLGYGSGFLIGPGLLLTNHHVFGKPADAANSIADFNYELDISGQERLPERFGFEPGRFFYTNDRLDFSVVAVAQTSLSGHEHLDDWGWLPLSGAPGKADPGEYLTIIQHPSGQMKQVCVRENKLLKYAGDFLWYNTDTTAGSSGSPAFNRFWQVVALHHSGVPRKDGQGRTLTKDGKVWKPSMDESSIDWIANEGIRVSAIVADLKVAVGSPPLIKPVLDEEEPPIRQESAKVRAPEAVPAFGANFWVEQSVDGTSLVVPVRVPLPILRKEIPFAPLAPVPGPAGADGGTANGSIHNGGKPLIAPPAGLLPHISPRNGLPMEAVHIDQSTLKSRPGYKANFLGTGKFSVPLPKIPAALKSRIAMLKGSSRQFELRYFNYSVVMNKQRRLAFFSCVNIDGAKQQDVGKREGDSWLRDPRIDDDAQIGDEFYRKQATFEADRTRNPFDRGHLVRRLDATWGDTVAAAKQHGDDSFHFTNCSPQFFSFNQGKQLWAGLEDYTRDVLLEGEEKGIVMNGPVFDGPDADGSDLPNPNGRPHKDPSFGGVQIPKYFWKIMIRRDEDGLKAAAFLMSQRKQVMEIDRIREADLLERMSEEDVSVFQVSIADLTKLTKLDFGNLADADSHEATSVGPRRIESYEDIRI

SEQ ID NO: 11627 - protein, 311 aa, BradyrhizobiumColbertium
MRNTLVLCCVVALSAISGTANAQDWTKSKWGPNDEIGSANYMTPELVVKAASLVKTGKTYALGMPVTSQTPAYPPRSYKITVVQPGQAGSSGLGPNKATYNDDILDSWVGVGSQLDGLGHLGIEHVYYNGNKLADFADPTGLKKLGIEKVPPMVTRGVLLDMAAYFKTDVVKEGTAFNVKEIEEAAKQQNVEIRQGDVVIFHTGWLSLVGKDDKRYSAGEPGLGVEGAKYLTGKGVVAVGADTWGLEVLPFESKNVFEVHQILLAMNGTYILENMDTAALARDKGYEFLFVLGQPRWTGGVQAMINPIAIR

SEQ ID NO: 11628 - protein, 296 aa, BradyrhizobiumColbertium
MELSDLQTFAAVARVGGITRAAEALNTVQSNVTQRVKALEAEIGTALFERHSRGMTLTGAGRRLLPYALKMAALAREAVLAARDDGEPSGPLSIGSMETTAAVRLPPLLADFHRRCPAVRLSLRTAPTADLVADVLDGTLNGAFVAGPITHADLTATIAFREELVLVSARRWASLAELRAGTPESGPTALVFRTGCTYRQRLEQIFVEFGWPSAARFELGTLDGMIGCVAADMGVTLLPRAVIECSAMSASISIHTLSPSHARVETLFIHRRAGHQTSALSGFVESLARDDEVIAA

SEQ ID NO: 11629 - protein, 341 aa, BradyrhizobiumColbertium
MPIATSLTRLLEIRHPILLAPMDIVAGSRLVSAVSRAGGFGILGGGYGERTWLKRETAKLADLRAPFGIGFITWSLARQPELLDIALGAKPSAIMLSFGDPAPFAPRIKSAGARLICQVQDEAMARQALEAGADILIAQGTEAGGHGASRTSIDLLPAIVDLAAGRVPVVAAGGIADGRGLAAMMMLGASGVLLGTRFYASQEADGAEEAKRRICAASSGSTLRGIIFDLSRNNVWPAPFTGRCLINDHARRWMGREVELMQNVAAVAAEYAAAKAAGNFDVAAVIAGEAVGLIHDIPPAAEIVDRIAVEVEQLLEGRRNSGASFPSPLVGEGGADAIRAG

SEQ ID NO: 11630 - protein, 358 aa, BradyrhizobiumColbertium
MWPDRRLIDLFKTEFPIVLAPMAGVMDAELVIAAAQGGALGSLPCAMISAEKAREQVGLIRQRVKAPVNMNFFCHTPVELTAEAEARWKQRLAGYYAEHGLDPAAPIAAADRAPFDAAFCEVVEELKPEVVSFHFGLPEPSLLKRVKAAGCRVVSSATTVKEAVWLEERGVDAVIAQGAEAGGHRGMFLTDKIAEQPGTFALVPQVVDAVKVPVIAAGGIADGRGIAAAFALGASGVQIGSAYLRCPESKVSAGGRKALAEARDDSTVITNVMTGRPARGVQNRLMREAGPVSPDAPPFPHAATALGPLKAAAEKQGRVDFTNLWAGQAVALGREVPAAELTRDLARSALARLKALAG

SEQ ID NO: 11631 - protein, 95 aa, BradyrhizobiumColbertium
MSVDAATVRRIAHLARIAVSEDDVPHLQGELNAMLAFVEQLSEVNVVGVEPMTSVTPMQMKKRQDVVNDGEIADDIVANAPATEGHFFLVPKVVE

SEQ ID NO: 11632 - protein, 70 aa, BradyrhizobiumColbertium
MCLLCDDEKAYQAYMNYLDKMERQGKAADPNVAVNAVLDELEAAANAAAKKDDPANDKTLSPFFCSPINK

SEQ ID NO: 11633 - protein, 491 aa, BradyrhizobiumColbertium
MTDLTSLTLAEARKGLAAKTFTSLELTDAHLSAIEAARVLNAFVMETPDKARAMAREADSKIAKGDAGPLAGIPLGIKDLFATRGVRTTACSKILGNFVPTYESTVTSQLWRDGAVMLGKLNNDEFAMGSSNETSCFGPVGNPWRRDGSNTTLVPGGSSGGSASAVAALLCMGATATDTGGSIRQPAAFTATVGIKPTYGRCSRWGIVAFASSLDQAGPIARSVRDAAMLLRSMAGHDPKDTTSVDIPVPDYETAIGRSVKGMKIGIPREYRLDGMPAEIEKLWQAGADWLRSAGAELVEVSLPHTKYALPAYYIVAPAEASSNLARYDGVRYGLREPAKNIIELYENTRAEGFGAEVKRRVMIGTYVLSAGYYDAYYLRAQKVRTLIKKDFEDCFAQGVDAILTPATPSAAFGIGEKGGADPVEMYLNDIFTVTVNMAGLPGIAVPAGKDAQGLPLGLQLIGRPFDEETLFSLGEVIEQAAGRFTPARWW

SEQ ID NO: 11634 - protein, 98 aa, BradyrhizobiumColbertium
MNVADFIASLDGAAPAQELSAPLVGLWWAAKGDWDRAHKIVQDDNGREAAWVHAYLHRVEGDLGNAGYWYRQAGQVAAKDSLEAEWERIAATLLGSRT

SEQ ID NO: 11635 - protein, 492 aa, BradyrhizobiumColbertium
MSTATHKLLKGATGDWEMVIGMEIHAQVTSNAKLFSGASTAFGGEPNSQVSLVDAAMPGMLPVINEECVRQAVRTGLGLNAKINLRSVFDRKNYFYPDSPQGYQISQYKSPVVGEGEVLVELDGGRSVTIGIERLHLEQDAGKLLHDRSPTMSNVDLNRCGVALMEIVSKPDIRDAEQAKAYVAKLRSILRYLGTCDGDMEKGSLRADVNVSVRKPGGPLGTRCEIKNMNSINFIGQAIEYEARRQIEILEDGGQIDQETRLYDPNKGETRSMRSKEEAHDYRYFPDPDLLPLEFSQAFVDELKAQLPELPDQKKTRFVADFGLSAYDASVLVAERESAVFYETVLDRLANRARDGKMAANWVINELFGRLNKEGRGITDSPVDAQQLAAIIDLIGEGTISGKIAKDLFEIVWQEGGDPRALVESRGMKQVTDLSAIEKVVDDIIAANPDKAAQVKDKPQSLGWFVGQVMKASGGKANPQSVNDLLKSKLGV

SEQ ID NO: 11636 - protein, 52 aa, BradyrhizobiumColbertium
MHSIPECTQRLKPSHTSEGNMAKKAKKAKKAKKAKSAVKKTAKKTRKVAKKK

SEQ ID NO: 11637 - protein, 50 aa, BradyrhizobiumColbertium
MGYRTTIRTVAERVQVLEAQHPISAKCSPKSFCSIASFRPNAVIALIQQH

SEQ ID NO: 11638 - protein, 413 aa, BradyrhizobiumColbertium
MLRRTKRKLPVTVLSGFLGAGKQTLLNELLLNRTGRRIAVIVNDMSAVNIDAALIKSGAAQLSRTDEALVELSNGCICCTLRGDLIDEVRKLATQRRFDNLVIEATGISEPLPIAAAFAYRDADGSSLDDIAYIDNMITVVDTAQIVRNFWSREFLNSSETVSPDDKRTIVELLVDQIEFADTIVLNKISSASIDQRHSAYSIVRGLNSDATILEADFARLDLRQLIDVNRFDNDRAHMHPLWKKELDGFRDHVPETEEYGISSFVYRARRPFDPTRLSEFLVSPWSGILRAKGFFWLASRPRWVGELSHCGALVRTTGRSWWWSAISKTLWPRDPLWRRELEATWDPRYGDRKQELVFIGTDVDPNELCKKLDLCLTDSWPSQMYSELVDEEDCFPIWLTKADLNNGASAPR

SEQ ID NO: 11639 - protein, 163 aa, BradyrhizobiumColbertium
MAVYQSMQRVRFSSEDGYKKFQVVFSNVRHHLKKLPGFLHLTWWVHPDDPHWYNEVSFWTSFEALKDWHMDTYHKHAKEWAVRTGAIMEDIIVNFEYKNARLIRVCPACAHISDTAFDVAQEQTALAQPCPKCGFIFPVMAETANSTAVFKDVAPAPVAIAAE

SEQ ID NO: 11640 - protein, 655 aa, BradyrhizobiumColbertium
MLSRGRRPNVGCFLIFTDLRPHLTTHLDLGRRSCLDICDGARVRPQGPRHERGETAKQPNNAARVRHGDGYLRRATHIPSVSISFGDCETCGLPGQGRPATIRFGDTVRLTAEAGRGTMWRAGDAPNGRFDGSRFESCSSQRCLSSEHHTTNRYDSERNSMHLLISIDRADGRPLQVQIYESIRTLILNGTLKAGKQLPSSRSLSEQLGIARNTVVLAYERLAAEDYINSRMKAGIFINDKLPDAAVLVGSGHSTFTSKGRRVRLGKNPTFTGRAPMLWMEERARPRFDFFVGRPHAKSFPTTFWRSATARHLAFAHGTPTQYGDPRGLSALREAIADHLRTTRGMEADADQVLITSGIQGALNLLARIFVNGPGETGVAVENPCYQGAAFLFSSYGANIHPVRVDDHGLIVSQLEGFLGSLVYVTPSHQFPTGCTLSLERRLRLLSWAYQTGSYIIEDDYDSDFRYDGPPLAALAGLDRRGHVIYLGTFSKSIGAGIRIGYAVLPRHLLDQAWIAKALLDHGAPWLEQAVVADFLKEGAFIRHLRRIRRSYMAARDALVDAIEHQFPGGVLSGRECGMHVMWTLPPNLPTASELHSLALSRGVGLYPLSKAAAHEYGKAQLRDRALVLGYTALSEGEIRDAIARVAVAIKNHAS

SEQ ID NO: 11641 - protein, 44 aa, BradyrhizobiumColbertium
MTSETDRKGEVAEDKVRTEEARLIAKEQAEDLRVVREKLRRKLH

SEQ ID NO: 11642 - protein, 829 aa, BradyrhizobiumColbertium
MSLDDPNLEPEYLLENEIDRLQARWSVSKRPVERLPAYEDVVLGDLGRVAEHLVILSVREGDWYVLSAGLTVPIWFGGRAKGQALSSLSPDCAGALRTIAADALTSFKPKIAQTHCARDGLVQRYRLLALPLRNRWGPEIVAVYVGLDGAKYSLVDAIFRSTEEGVIALAPVQGVDDEIDFQVVDLNSGAADMLGLALETIRWRKLGQGTHAFNTPELKRKLTRILDAGGRDTFEVSVVRNGTTLSLSVGLTSIGQLVCATLTDVSHLKRREESFRLLFDANPMPMMIFDIVGHAIRKVNDAATRQYGYAREELIGMRVERLLPENEQDDGIGVVEKCRESEESALNVTLVLADHRRIDALLFGRKIPFEDAEAYIVALVDITERKRSEARVAYLAHHDVLTGLPNRACFNSDLLGRLEMQEPPSARIAMIAIDLDLFKEVNDTLGHSAGDRVLQIVAHRLRSGLTSREIVARLGGDEFAVIVDDFPDEDGLKRLCSELLESLRQPYDVDGKEIVIGASLGVAVFPRDGKTAEELSKKADLALYRAKAEGRGSLRFYDEELEVGVRTRRAMESGLRKALQAGEFELHYQPLIDVRGNTLLGFEALLRWRRNEALVPPGDFIPLAEETGLINSIGEWVVSEACSEASKWPTSIGIAVNLSPVQFRDRNLVPSIVGALERSGLAPSRLELEITESVLLGETDANFSSLKKLKAAGIRISMDDFGTGYSSLKYLRLFPFDKLKADRSFVQDAVDSGDSRAILQTVASLGRSLRITTLAEGVETKRQLMIVKKAGFDAAQGYLFSPPVRAGEVPGLLEKLRSGAEVKSPKKVA

SEQ ID NO: 11643 - protein, 37 aa, BradyrhizobiumColbertium
MVSGLGLTILSPPLGKRTREHYPGWDRSVTKDYPKGD

SEQ ID NO: 11644 - protein, 308 aa, BradyrhizobiumColbertium
MRDFSDEARAAKVLAGERRLFELRQASRAGQKAQLREKIGQITEQIQGLNEQIAGKKQEVELINRELVGVRELWAKSLIPIQRMTALERDAARIKGEHGQLMASTAEAKGKVSEIQLQIIQVDQDLRSEVAKELRETEGKIGELVEKRVAAQDQLNRIDIRSPQSGIVHQLSVHTIGGVISPGEQLMLIVPQADVLVVEARIAPKDIDEIRLRQPAILRFTAFNQRTTPEVGGTVTLVGADEINDEKSGKSYFKVQITPSPEDLDRLKHEKLVPGMPVEAFVQTASRTALSYFAKPISDQLTRAFREQ

SEQ ID NO: 11645 - protein, 598 aa, BradyrhizobiumColbertium
MSAQDSSLASGRSDDKETSRPQLGPALVGIAFLSALVSVLYLTGSLYMLEVYDRVLPSRSIPTLIGLSAIVAGLYIFQGFFDLMRSRLLVRLAAVVDLALRRKVYEAVVQAPLRRASRGEGLQPLRDLDQIRSFLSSPGPATLFDLPWVPVYVLLCFAFHFWIGMVASIGAILLLALTLATELLSRRPTQRSASAAAAAMDLAGATLRNAEVLRALGMVPRMADLWEQRRDAHGGNYARVADVAGGLGAITKVIRLGLQSGVLATGAWLVVQGEATGGIMIASSILLARALAPVELAIANWKGFVAARQSWSRLRAFLLRSPQKHPTVMLPPPSRQISVESVSLAAPGGERLLLRDVNFSLSAGQVLAVVGPSGAGKSSLARALVGVWEAIRGRIRLDGAPLDQWLPEQLGRHIGYLPQDVELFEGSVAQNISRFLPDAPSGSVISAAAAAGVHDLICSLPDGYDTEIGPRGTSLSAGQRQRIALARALFGDPFLVVLDEPNSSLDADGEAALLEAIRRGREKGIAFVIMAHRQTVLAVVDLILVLGAGQMRAFGARDEVLKALRQADPSDKAEHLPQGTRALTPQSGASLRITRVGT

SEQ ID NO: 11646 - protein, 439 aa, BradyrhizobiumColbertium
MNVAFGRGGNDQLSGSSKDDDLIGGAGNDFLTGGMGADHLVGGAGNDRLMGGDQADMLMGGPGNDILNEGPGHGDLEGGPGNDILTGGLGADAFVISPDSGNDIIKDFRAGPGMFDHIAVMNLEPEQLRFEDTKGGVLISWDTSKGDGSVLLEGVYKNDLAQDDFMFTDERHLLNPVDENAHRVTAEHLGTTGGNEAGPGPTGATTSPSFNSAFDDNNVKFGSDAQNDTLLGTAKNDFYFGLAGNDYLSGGAGDNHLDGGAGNDSLVGGPGQDDLRGGDGNDKLYGGAMGDSLMGGAGNDYLSGGAGHDMLDGGMGNDIYNGGAGADAFIVAHGSGNDVVIGGFDPGPGAFDHIAFTDIMPNEVTVADSASNHGDAHTGVLVAWGDGSIFLEGLAKSQMAQDDFMFNAVEGGAFVPDSQISTEGSRMLFQNGHPDWPMA

SEQ ID NO: 11647 - protein, 134 aa, BradyrhizobiumColbertium
MKKLGQFAFAATLLVVGSLPAVAQQAQTTPSGGSMQGMSDKNMNPFQKDAMSAMDKMNKSMMQGMMDADPEMAWMKGMAAHHQGAIDMSEALLKNTKDGETAKEARKTIQQNEKDLKELQAKMKKEDKKEDKKG

SEQ ID NO: 11648 - protein, 178 aa, BradyrhizobiumColbertium
MFITSGTYDIGADTPHWALTRQIMELTRERSIAARTASLTSPDLSDEQGILKGAGQYAAMCANCHSEPGKPDTELGEGLYPKPPSLSETSLDAKAIFWVTKHGIKMTGMPAWGRSHDDATIWNIVAFVVKLKGMSSAQYQEIIAKAPPDDDMENMPNMRQQNTPKSSSEANKPAGHQH

SEQ ID NO: 11649 - protein, 250 aa, BradyrhizobiumColbertium
MTEHAAGRRTIGASISGWLKSAVFRVRVGAARLIYNRILLSMVTDVEWCSRLYPLLDSDFGEQVLIVGPQSFAAALSFARRHPDVCFVAVEPHESRRYARSARRRDLNNVNLIEVPANAELPFTDEAFDTIVCNFALHSLVPVNKIALLRGLTPLLRQGGRLHVVELVRPAASREAKMLGFAAVLWGTEAVAPHFDDTWRSCLSLAGLRALAPDRSFSIVAGRISVVVASRKRPGSKSIRDPKREPKDKD

SEQ ID NO: 11650 - protein, 398 aa, BradyrhizobiumColbertium
MNYMTKITTPEDHGPATKTPARDGRDLRLDLFRGLANWAIFLDHIPNNAVAWLTTRNYGFSDAADLFVFISGYTAALAYSKPMRRDGFWAGAVKLMRRVWQIYVAHILLFVVYVAAIGWVAQTYRHSHLLDEFNVAGLIANPIGYLTAGLLLKFKPLNMDVLPLYIVLMAFFPVVLRAILALPNATLLCSLGLYFLAPLLGWNLPAWPEGVWYFNPFAWQLLFVLGAWSALGGATQAGWLLTSPAALGVCILYLVFALIVALPQNLGMQSSALASVSNGLAIDDKTNLAPSRLLHFMALAILTVHLVPRRSRWLGSPVLRPMLLCGRHSLEVFCVGIFLSFVGHFLLELISDSLPMQLAVSIGGIAILIAVAWLRSWSPKDSRNPSGPDPSSADARRQ

SEQ ID NO: 11651 - protein, 320 aa, BradyrhizobiumColbertium
MIDTFDLSGEAMREMAAVKPSQVTYVASKDAKGDQLLQPRVENGIKVFDIEASVIRWNILPEVAAEAYAYNRQVPGPRLQLTEGDHVRINVRNLLPEGTTIHCHGLIVPNEMDGPAKITQDPVPPGCSFTYEFEVGQSGTYFYHSHDHPDRQQALGLYGALLISPKDPSMEVEADQDYTIQLQEWLKREWLTYPAMLMEGALPNYFTINGKAYPSTDTITMKVGETIKLRFIGTNNNFVHPMHVHGGPFEVVAVDGVNLKDSARYQADTVNVGPGQRYDVVWTARRPGKWLVHCHIPHHTANNNVEQHGGGGSTLVLDVR

SEQ ID NO: 11652 - protein, 146 aa, BradyrhizobiumColbertium
MNAMMAGMAPTMSLLMMGRDMRAMDPLELIFWAVMSLGVMVGFATAYPFNVWMVKKKIKHGLMTERDDGRQGSGQRHEGHGGAAAPSAGHGQQGAGHQMASEATTPQLAALAGVTAFLFQEWLSPVSRSIFGSARATSTAPSCLPV

SEQ ID NO: 11653 - protein, 263 aa, BradyrhizobiumColbertium
MAPRELLVRLNEDALFAMPFCDAYWSRLLNCSYDYEREIEAFLSAACQDHYTLLDCGANFGYWSVLATSRPFGAQQAIAIEASSSNAERLKRNAELNGNRFRYLHAALGGRSGEIVRVAGAKHEKFATVPLTQSEPGCVETVSLDGLAEAGLIDASGPLVIKLDVEGVEIEALRGGQGLLKTDCVVICEEHGSDRTHAVSRYLAEETSLKRYIFDEENGVFMQLEELDGLARIKKHPWVGYNVFATASKRWRERLLSARWTSK

SEQ ID NO: 11654 - protein, 101 aa, BradyrhizobiumColbertium
MKPNKFAITALALSLAWSSTGALAQTAMVNGEVKKIDEAAGKITLKHGPIKNLDMDDDGMTMVFRVKDSSMLKQVKVGDKVQFEAERASGGITITKMQKAK

SEQ ID NO: 11655 - protein, 104 aa, BradyrhizobiumColbertium
MDLIKVEKMKLLQIAVIFASIVASKAAFAQNAMVKGEVKNIDEAAGKITLKHGAIKNLEMDAMTMVLRVSDPGMLKNLKIGDKVKFEAERGQQGVTITKMHKSK

SEQ ID NO: 11656 - protein, 161 aa, BradyrhizobiumColbertium
MKHTTLSLIAFAALTSISTIAWAGAGPKGHSHDDSFSAGEPGDPQKPARVVQITMGETDGKMMFMPMKIEVKKGEQLKFVLRNNGELDHELVLATTAENLKHAEAMKKTPDMEHDDPNAKRLAPKKADEMVWKFTKSGEFEYSCLIPGHRESGMVGTVTVK

SEQ ID NO: 11657 - protein, 89 aa, BradyrhizobiumColbertium
MPDNTLMMMTGSGQFGPIEMGGMFTVMKIREDLARDDYADPGPYKYPAGTVSYEVDAPSQQPVRRDKPAGAAKEGDMKAMKGMKGMKGM

SEQ ID NO: 11658 - protein, 481 aa, BradyrhizobiumColbertium
MLTRSNPMHVRRAMPILSAVAGALLLSGCAAFSPDAGMSVVADVAQQTIKKDVVAIRSAEDAEWANNAVRRLLRRGLTVDSAVQIALLNNRGLQAAYNELAIAEADLVQDSLPPNPTFSISRIAGDGAVEIERQIVGDILALATLPFRSEIARQRFQAAQLRAAEETLRLAAEVRRAYYRALAANELVGLFTDAKSTAEATAQLALKLGETGAMNKLDQAREQAFYAETAAELATLRQEAISSRERLARLLGLWNGDLGFHLPGKLPILPARPFSLPFIEVDAVTHRLDLQIARIELAALAKSLALTNASRFITVLDAAGIDRKTRDPDGTPFRERGFDVQFQIPIFDGGEVRVRRALATYNEAFNLLTERAVNVRSEAREAYRIYRSSYDIAGHYQREVLPLRNIISDEMQLRFSSMQVDIFTVLQEARQRLVAMRAAIEAKREFWLAKAELQTVVNGGGGGEARRQTRPSITQANAATN

SEQ ID NO: 11659 - protein, 138 aa, BradyrhizobiumColbertium
MATEILTEKAIAVARIHEGFLVDFAEETAAARTLLLATGVVNHRPDMSAQVHRDAVAAGLIRYCPVCDGFEAKGQKIVVLGKGPHGVREAVFLRTYSQDVTLISASAMNECSSRQLAAAGVSLIEQPIARLTIDQGKF

SEQ ID NO: 11660 - protein, 94 aa, BradyrhizobiumColbertium
MIETASAARLSFDTLYPALGSSSNTDLLRSLGASLSSQGCILVDSHQMTDVSGLYAAGDVVQGLDQISVACGQAAIAATAIHNRLRKLDGLGDP

SEQ ID NO: 11661 - protein, 84 aa, BradyrhizobiumColbertium
MDEKRDEFRSRVLKAATISFGNGGVISCVIRNLSPRGAALDVESSLDIPDEFKLILDREEEHYHCRLIWRKAKRIGVRFRSGPE

SEQ ID NO: 11662 - protein, 87 aa, BradyrhizobiumColbertium
MTGPEVMASAEEALFTVVLVSAPLMVVGTITGVLVSLLQALTQIQEQTLIYVPKIVATFLTLVVALPFMADLSHQHFLRMTARILAP

SEQ ID NO: 11663 - protein, 52 aa, BradyrhizobiumColbertium
MHHMSGMKGHKMTGHKMSGMSEHKSGMSGMGDNDKMPGMSGDHGKMKGMKGM

SEQ ID NO: 11664 - protein, 50 aa, BradyrhizobiumColbertium
MKRVAIATAAMFLASVVSTQAMTPAPARVLKSGAEVTQIKKKRKCITCPE

SEQ ID NO: 11665 - protein, 839 aa, BradyrhizobiumColbertium
MRAIAAVHPIDGPSDNNSGKRVSAVAGLIAVASFSGSAEAQQTSLPPVTVDAPVERPRALASKPSPEQVRARNALRRAAQRNQPAAAPLPFPNAGGLAPDRNPYADPIAPYKVDRLQASGKFPEPLLNTPKTVTVLSKEVLEDKNATTLKQAILSTAGVTLGTGEGGNAFGDRFFIRGFDARNDIFIDGVRDPGVSVRENFFTEQVEILRGPGSSFAGRGTTGGAINIVTKQATTEKSFYNMDTTFGTDKTKRVVLDVNQVISPSFAVRAGGLFQDAGVAGRDFVSDDRGGGFVAAKWTPTDAVKVTAGYIHTDLHGLPDFGVPYYRPSTASTAGGPFPDFGSNRNNWYGFVNRDFFQVKQDIASINTEVQVAPDLLVSNKTRASQSLLNYIGTLPEAPVIANPLSASTLTANPQSRYQVTNVLVNQTEATYKFATEGWHHTALAGVEVSQETAKIDKYTGLSSEALGGAPASGSVPGVSVFNPQYTFLPFGTPSLAGFPTRLGIDTTSAYLLDTANFNDLVILNGGVRYDDYNIKVNGYGTVNGVANVFGQQEQRYGLPNFNLGMVLKPMPIASVYAAYATSSNPVGSEFDGTSAQYGGLAPTLNGNANQIFGPEKNRAIEIGTKWELFDRHLLLTAAVFQTEKENARESRNITPATATTSCPYPTGSTGAVSCISAGAAYRIRGIDLEAGGKITDKWSVFGGLVLMQSEVTKSLIPPGNTILYASNVGLPLANVAHQSFSLLTKYQLTDVWELGGQAVYRSKIYGGTFLAANQGTSLPSYWRFDAFAEAKVNKNWTVKLFVNNIFDKRYYDALYQSAAPFALQAPGRAAYLVVSARY

SEQ ID NO: 11666 - protein, 38 aa, BradyrhizobiumColbertium
MTTTVPGSIPTLQRPTIKRATVIIATILRRGIIEPLLM

SEQ ID NO: 11667 - protein, 884 aa, BradyrhizobiumColbertium
MPSAPQREKGQSKPLVLITGASGFIGKAVVRRLADDYRLIGLDRAGPPDPPCPAHAIDFDVSSSEQVKTALASVRSRFGRQIASVLHLAAYFDLSGEPSPLYDRITVEGTRRLIEALQEFEVGQFIFASSMLVHEATDSPEKTINEDSPIKPSWAYPESKVRTEDLLRKEHGKIPVVLLRIAGVYDDLAHNPFLAEQISRIYEHRLSAHVYPGMLCAGQSFVHVDDLTEAVARLIAHRNRLPRELPLLVGETEALGYAEVQNIVGQVLHKEHWTTLRMPQEMASIGAWLADNVLGEKEFIRPWMIAQANAHYPLDTTRARKLLEWEPHHSLRRTLPKIVASLKSNPTSWYKSNKLDAARVAWYGSGTGSPAEDISGPAEPQQTSSPSRRQGHVGHCTQNGSRTTEASRGHHADHMQMMEEDARRTRWAHFANVGLGFWLAASPAIYDALANNSVGPRVFEVTLERRLPPVEWRADMLMTSDVVSGLLIAIFGALSLSRKTAWFAQWANTLVGIWLLFAPLLFWSPSAAQYNNDMLVGTLVIAFAVLVPMMPGMSMAAMMDRKVVPPGWTYCPSTGAQRLPIAAMGLTGLLIARMLTAYQLGHVDHVWEPFFSGDLADPRNGTEEIITSSVSKAWPIPDAGLGAVSYTLEIVMAVMGGRDRWRTMPWMVTFFGILVIPLGVISIYFIIIQPIVIGTWSTPALIAALAMLIMIPFALDEVIAMGQFLYWAFCQGKPVLRTFLQGDAIERGAEDDHDTLSSVRAFWSDTIKGTTAPWNLVCAMGIGGLLMLSRLLFGASGSAANSDHLIGALVLTIAIIATAEVARPLRFVNILFGCWLIAAPWLLRGATWHSAIVDVAFGIALIMTSLPRGVRSREHYASWDRYIV

SEQ ID NO: 11668 - protein, 96 aa, BradyrhizobiumColbertium
MQRKNSDAITPRFERPADGYEILVTWPDFREGHHDQEIWYANVSDQAEAVRLVQQACGALNDAKIEILAPAAEAFLANHGVRAGEVKRATSRFSGA

SEQ ID NO: 11669 - protein, 253 aa, BradyrhizobiumColbertium
MPEAVASPVIAELRERIARLEGTTGRARKVLPFGVSDIDRRLPGGGLALGSLHEVAGGGNGAVDGAAAALFAAGVTARTKGKVLWVVTRRDLFMPAIAQAGLHPDRLIHVEAGDEKALLACMEEGLRHGGLGAVVGETARLSMTASRRLQLAAEGSGTLGIALRRWRRQTEAADFGLPTASITRWRVSVLPSAPLPVPGLARARWLLELIRCRAGESADFEVEACDDKGRIALPSEVANGSPQKEIGRRIASA

SEQ ID NO: 11670 - protein, 67 aa, BradyrhizobiumColbertium
MPRTRIRAGDDQPWAINRAGQSGAVLDSFALPVVKFFQMRCIHHGPLGFRLRINGRPQAHGCSQTNL

SEQ ID NO: 11671 - protein, 122 aa, BradyrhizobiumColbertium
MAVRGLGCPVRFRLTAGQKGDAPQAAALIEGLPAEVVMADTAYDADHLRQAIAAKGAIAVIPNNPSRALKHPLDKDLYAQRHLVECCFSKLKQFRRVATRFEKTARNYRAVITLAAIVLWMR

SEQ ID NO: 11672 - protein, 124 aa, BradyrhizobiumColbertium
MMERLVLSDAAWERMAPLIIGRPDQKGSTGRDNRMFVEGVLWIVRTGSPWRDLPEAFGDWNSVFRRFSRWSIKGVWWRIFEAMSDDPDFEYLIVDSTIVRAHQHAAGAKKGGLKIRRSAARAAA

SEQ ID NO: 11673 - protein, 301 aa, BradyrhizobiumColbertium
MRRDLLDGVVAFLRVAERQSFTAAAAELGVSSQAVSQTIRQLEARVGVALLARTTRSVSLTEAGRRFLAEAKPGAESIAKAFHAASAMGDRPMGHLRVNVPRIALSGLIEPLLPSFRAAHPDVTVEIFVEDRLANIVADGSDAGVRLGEIVDADMVAVRLTPPERMTVVGSPEYLARHGRPNTPVDLRGHDCINFRNTARGDLYRWEFEGDGGDIEVAVSGSVVVNDSGLVVASAAMGLGLGYTLTSVAAPLVGLGALEPVLEAFCPETPGFFLYFPSRAQVLPKLRAFIDHARHVLEARA

SEQ ID NO: 11674 - protein, 317 aa, BradyrhizobiumColbertium
MTEAPNSRRNFIRATLAAGATAAAAGITSSAEAQENSSSSKLFAGKAVLVTGAARGIGRAMAEAFADAGASVALLDIADPSAYRTAQGYRVANMAELDAAVTSVGRLGGRTMKLVADVRDHAQMERAMAQTADTFGGLDVVLANAGFVSWHPFEDGKPAQWREVIDTNVHGVWNTMHASIPHLRRRGGGKIIATSSIGGRFGVPGNGAYTSSKWAVIGMVKQAAAELGKYNIAVNAIAPGPVDTPMYRSQGQKESIGARTDADQDARVRPALPYGGRAVQEPREIADAALFLASDAARAITGVSLDVALGFNSSYTA

SEQ ID NO: 11675 - protein, 50 aa, BradyrhizobiumColbertium
MAKSTDEAKPAASTTSVTLCLGSAFSLALDALAHEQRSGGSAIVILNAQK

SEQ ID NO: 11676 - protein, 42 aa, BradyrhizobiumColbertium
MTIMTPQWIALHTAGLCAAVFRVADGRAVIEAALKQRCDIAD

SEQ ID NO: 11677 - protein, 42 aa, BradyrhizobiumColbertium
MTIEDALKYEGREGERPLREEAHRGAARFASGLGRGGDFSSI

SEQ ID NO: 11678 - protein, 49 aa, BradyrhizobiumColbertium
MIAFARARLAGYKVPKSIRVVEEIPKSAVGKILRRALRDEFWAGKERKI

SEQ ID NO: 11679 - protein, 37 aa, BradyrhizobiumColbertium
MGNRFQSSFGLAQTLPDVIKRRMGIAESPRSVPSGAL

SEQ ID NO: 11680 - protein, 391 aa, BradyrhizobiumColbertium
MRSLTRLIESDADLLSAQLKELRTRAFPPAAEKELRKFTSGEAAKLIGVTDAYIRQLSIAGDVPETEKNARGRRLFTLEQIHEVRRTLARTKPNYLPTRRAGDHLQVIAVTNFKGGSGKTTTAAHVAQYFAMRGFRTLAIDLDPQASLSALFGLQPEFDLQDNDTLYGAIRYDDQQRPLSDIIRTTYFAGLDIVPGNLELQEFEHDTPRVLAERRRGSDRMFFSRIATALASVEDRYDVVILDCPPSLGFLTLSALCAARSVLVTIHPQMLDVASMSQFLHMTSSLLDVVEQAGGDADYDFFRYAITRYEPSDGPQGQIVGLMRSLFGERVLTTPILKSTAIADAGLTKQTLYEIGRENFTRSTYDRAIEALDTVHVEIENLVLESWGRAT

SEQ ID NO: 11681 - protein, 219 aa, BradyrhizobiumColbertium
MRASPRPRRRKSKRAVTRDILDKLAATCATDRLADTRDLAILLVAFASGGRRRSEVARLRVEQLGEEQDVPLDPRDPNSPTLPCISVQLGRTKTADADDEGRVFVVGPPVEALREWLFRADIQTGPVFRAIDRWEAIEERALTPQSINLIVKRRCAMAELDPREFTAHGLRSGFLTEAARQGIGLPEAMQQSQHRSVQQASSYYNEAQRARGRAARLGV

SEQ ID NO: 11682 - protein, 409 aa, BradyrhizobiumColbertium
MAAIRAPFRGADGHPGELPSLHSPRRQFRHVADLDVRIHRLLHEGDDIGGRYPGRAEPRGNVGGTQIRRLHALQRSGVALIVGIECGGSLGRLQPVADGTRQISVSGLPGPIGRITEDRAAEFGNDIVAIPMQKLRDVVDVDATARVENDSERIGGAGDHRRRRRRDHALCEDRTRLRGVGLEIIVLDGSDEPAIGVVQERLDVRAAMRLAHLAGFLVLRHGDRGEVDRTEVADEIRPGDAQPDLRLLPRPVELLRFQQLTHGVPDRDQLPDDPDMLLGDAVCAAALADLDRGGHAAEDLHQATRRVEEIAALANVTLRRQTRLGLIGVIFPIRFDHVRLAVVDGLRKEIDCSGECGAEVLAVAGATCVGFAERTGDGRMGAEYEFRMSCEPSIDVDGAFVVSCRTDLV

SEQ ID NO: 11683 - protein, 85 aa, BradyrhizobiumColbertium
MAKETFRILRRGGVFYVADYDRPTSREERIVLNLAAQISSRIAVQSHVDGTWGKHFKKAGFTGAKLQSSHSVRIGRVAMLSFRKP

SEQ ID NO: 11684 - protein, 40 aa, BradyrhizobiumColbertium
MKGEYAHRAVEAAGVNRKGHNGRCVDERNILNVLFFDRSL

SEQ ID NO: 11685 - protein, 47 aa, BradyrhizobiumColbertium
MNRSASEIAVAALPRPNAKRRSPRFGDINSNKGSCHDVSRSIAAANR

SEQ ID NO: 11686 - protein, 176 aa, BradyrhizobiumColbertium
METKQVEGSQTPAPDDLLQRLSWEVKQIHGCLSEVQKCWAAGLGVTVAQWNILMAISHLADEEGVRVSVVSDKLAVDGSFVTAQSQLLESKGLIRRKPSATDRRVVLLALSSNARWQIENLSGSMNAANAYVANNASGKAHRLLAELEELKSVLKRAKLLTASDALRHWPRGRDTA

SEQ ID NO: 11687 - protein, 244 aa, BradyrhizobiumColbertium
MSDKTVIGLSRLITLQQQLDKVARNVANQTTTGFKREGLQFREYLTKAKEADDIPSAPMRSLVAATGYTDFSGGPLKATGNGTDVAVVGDGFFVIRTAAGDRYTRNGAFTLDKEGRVVTLSGDIVLTATGPLQVPPRDGPVSIGADGTISTARGPIGRLRLVKFEDNAKLRAEGNTLFSSELPANEVPPAQIRLATGALEGANVNAVHEMSSLVAATRAYDQVANTILREDDKNELRKLAGEDL

SEQ ID NO: 11688 - protein, 124 aa, BradyrhizobiumColbertium
MKPAAFILAVLLSVVPAHAQHSHGSKGPNGGVLADAAGVHIEFLPSGNAVTFNVLNEDNKPVSTKGYTASALIVNGDDRETIVLSPSGENVLKGETKKPITASTAITLMIKTDTGKSGQAKYKG

SEQ ID NO: 11689 - protein, 1082 aa, BradyrhizobiumColbertium
MSTEQGPIGDRKHGVITAIIAFSIRQRWLVLFAVLAVGAIGAWNFTRLPIDAVPDITNVQVQINVSAAGYSPLEVEQRITFPVETGMGGLPNLQYTRSLSRYGLSQVTVVFADGTNIYFARQLVNERLQQVKDLLPNGIEMAMGPISTGLGEIFMFAVEAKKAAKNPDGSEISPIDLRTIQDWIIKPQLRTVPGVVEVNTIGGFERQFHVLPDPTKLMAYRLNFRDVMTALASNNANVGAGYIERNGEQYLVRTPGQVGDASDIRNIVIGAREGIPVRIGDIAEVIEGRELRTGSATLNGRETVVGTAMLLIGENSRTVAQRVSAKLDEIAKSLPDGVVARALYDRTRLVEATIATVEKNLLEGAILVIVILLLILGNFRAAVATALVIPLSMLITVTGMVENKVSANLMSLGAIDFGIIIDGAVIIVENCLRLLAEEQHRRGRILSREERFDTILAGAGEVVQPSLFGTLIIAVVYLPVLTLTGVEGKMFTPMALTVLMALGGAAILSMTFVPAAVAILVTGKVTEKENWFMRGARFAYVPLLDASIRNRHMVALAAGALVIVSGIAASRMGGEFIPSLDEGDVATHAMRIPGTSLTQAVDMQIKLEEAIRRVPEVREVFSKIGTAEVATDPMPPNVADTYIMLKPHAQWPDPSMTKAQLVSKIEKVVAEVPGNNYEFTQPIQMRFNELISGVRSDVGVKIFGDDLNTLLQVAGQVQSVLQGVQGAADVKTEQVSGLPVLTVKLNRQALARQGLSISDVQGIVEIAVGGKSAGLVFEGDRRFEIIVRLPEHLRSDMEAIRNLPIPLPVREGQAGAIKAAWGNSPLGQVRYVPLSSVAEIDAAPGPNQISRENGKRRIVVTANVRGRDLGSFVADAQRRITDGVKVPAGYWITYGGQFEQLVSATKRLTIVVPIALLLIFVLLFMSLGTFADAALVFSGVPLALTGGIAALLLRDIPLSISAGIGFIALSGVAVLNGLVIIAFIQKLRSEGRPVVEAVREGALTRLRPVLMTALVASLGFVPMAIATGAGAEVQRPLATVVIGGIVSSTILTLLVLPALYTLFRREAVTTKSTSATAQGETA

SEQ ID NO: 11690 - protein, 317 aa, BradyrhizobiumColbertium
MKRLFANSVLATIALAAIGFFLLNLPQQSSGKQSEAGHGHEEGGHADGVEMSDDKLRSSDIELLVAAPGVLRDSLLLNGILQPNQEALVQVTPRFPGVVREIKASVGHRVEKNDLLAKIESNQSLTTYEIRAPLAGTVIDRQISLGEYASEQKAAFTIADISTVWVDLSVYRRDLKRVREGDKVVIDVGDGGKPIEARLTYISPVGSADTQSALARTSVPNEGTRLRPGMFVTARLMLSDKSAPIVVKSTAVQSFENRNVVFVRNGLKFEVREVELGARDREHVEVQFGLEEGDLYVGRNSFIVKAEIAKGTAAHEH

SEQ ID NO: 11691 - protein, 116 aa, BradyrhizobiumColbertium
MPIAATSNALLRRLRDLLVLLLAFGHLSAAVLHSAHIDHVAITGSTETVFSTAGLGSTTGGDSVLTERHCHGCFSVSPARATAAWSLAAAVTKPVAMPTKRLTGTSSALDTPPPKA

SEQ ID NO: 11692 - protein, 137 aa, BradyrhizobiumColbertium
MATEIHPQAPHKLPFFLPGADGSDVLLVVMGVFLVGVIFSVGVLYWKLHSLPERMAHKSQKLQFEFVAVLGLISLFTGMHAFWIAGLLLALIDIPDFGTPLRGIAGSVERIADAKSEAAETTGLSPTLRNDPERRVG

SEQ ID NO: 11693 - protein, 114 aa, BradyrhizobiumColbertium
MGRGAQIAVLYGNPAKPGLFVVRVKLPANFKLPVHSHPDERVRTIIAGTYYSAIGDSVDSTKLVAFPQGTFSHVPPRVWQFAETKNEEVVFQVTGIGPTGIDYLNSSDDPRMAQ

SEQ ID NO: 11694 - protein, 167 aa, BradyrhizobiumColbertium
MDAFGALNYLRTRSDVRPDSIAILGQSYGGMAMMFTITAASLPTAVSPEKDFRAAIALYPNCPPVADKDPKWQPRQPMLLLMGEADTATPAGPCKDMIARAREAGSPPIEAHFYPDTVHAFDHPNLPLAPMTSQRRPDGSAPMMGSNPEARADAIGRVNRFLASELK

SEQ ID NO: 11695 - protein, 80 aa, BradyrhizobiumColbertium
MTLQIRDSRARELAKKLAEKRKVTMTDAVIQALEGEWRREAEKEPLAARVRRIADDLAAHAGPNRRTMSKYEIDAMWGHS

SEQ ID NO: 11696 - protein, 137 aa, BradyrhizobiumColbertium
MGPFLMFIDTSVIVALLAGEPEADRFAHAIASSKARFTSGLVVLEASMRLSTMLDLDPVLVETRIQALFEEAGISIVPINGSIATKAVAAFASFGKGRGHPAQLNLADCMSYACAQAYRVPLLFKGSDFARTDIPVA

SEQ ID NO: 11697 - protein, 70 aa, BradyrhizobiumColbertium
MLQAARDIRKVALWLGHADIRTTESYLRMDPSEKLEAVEAVVPPAPRRGRFKAPDALIASLLEKAPLPSG

SEQ ID NO: 11698 - protein, 82 aa, BradyrhizobiumColbertium
MLHLCFAGGLRVSEWVGLTLENVTLQPTPSILVFGKGRRETQPSALERNRTRPARVACGARKAAGDGAVHQRPRVGDDPRRL

SEQ ID NO: 11699 - protein, 250 aa, BradyrhizobiumColbertium
MHVMEQTSAKDTRALETVRALAFDVQGTCVDFYQPILRMGEAVNRAKGLDIDWTALSSDWRDLYRMALDQVIAGQRPWLRVDRIYREALDTLLERRGLSGVFTTGERDELNQIWTRLDPWPDSIEGLTRLRRCFVTSTLSNAGMAAVVAVVKHAGLPFDVVLTAELAHSYKPASAVYQLAVDYLGCRPDEILMVACHKYDLRAARAFGMRTAFVARSLEFGPSANPDTAPESWFDLYVDSFVGLARALGA

SEQ ID NO: 11700 - protein, 71 aa, BradyrhizobiumColbertium
MVWLQKIGDMKKGGIVDQDCPKQRLFGLDIVRHHPMLLNLRQFQPVCRLGHCRRAGSSVRHNRIGTPLPEG

SEQ ID NO: 11701 - protein, 249 aa, BradyrhizobiumColbertium
MVSEWRANLVRQVVLPRPISVQVQGKLVTFDVARTAIVIVDMQNDFCHPKGWLAHVGVDVAPARRPIAPLRRLLPILRGSSVPIIWLNWGNRPDRLNLSPSLLHVYNPSGGGIGLGDALPGSGAKVLERGSWSAAIVDELPVAKTDIHVAKYRMSGFQDTELDSILRNLGVTTLMFAGVNADQCVLCTLQDANFRGYDCLLLEDCAATTSPDYCMAATLYNVNQCFGFVVRSEAIAAELAQRPSMSERS

SEQ ID NO: 11702 - protein, 139 aa, BradyrhizobiumColbertium
MSFSVAELTRAKAFRISPRDTNYFAVLFDQVTDRIGNIFVIEIFKPGGATPPNEHASAHEFFHVLHGVGVARCDGKSLPIKKGDSLLLHPGSEHVIENTGPGKLYTLTVMTPNEGFSELIRSGEPVELDAEDIRVLQGL

SEQ ID NO: 11703 - protein, 300 aa, BradyrhizobiumColbertium
MLHSRLLNYIDEVARTGSIRKAADRLNVAASAISRQILALETQLGTPIFQRLPKKLILTAAGEVLIGHVRQTLKELTRTQVKIEELKGLRRGEITVAMMSGLASNLVPGTVKEFRVANPRVKLNLTLFNTGAEIQLAVASGEADLGIGFDFGKDSNLKVLARGVGRLGAVMSPSHPLAKRPSIRLSDCTDYPLVIADSTSAIRPYLDAAFARVAIDLHPAIETNSIEIMRHAVSLNDGITFLTPFDVESERRAGRLAYVTIRELSHDAQALMLIGHVRGTSAIASVLAEMLKAMIRDVAS

SEQ ID NO: 11704 - protein, 275 aa, BradyrhizobiumColbertium
MKLKSHWWWDLSAEDFRHLDMSRIVAVLPVGAVEQHGPHLPVRVDTAILDGIMQHAVARMADDFPALILPTMSIGKSNEHSTFPGTLTLSAETLGRLWYEVCESIHRAGVRKVVFVNSHGGQPQVVEIVCRELRVRLGMLAVSSQWSRFTDLSDLFTATERKHGIHAGEIETSAMLYLHPGLVDMTFAEDFRSLSQTLETECEILMPESHAVGFGWQMQDINPKGACGNAALADDKRGRQAIDRAANRLIKLISEVDNYPLSRIRTTADFTPSTK

SEQ ID NO: 11705 - protein, 561 aa, BradyrhizobiumColbertium
MSAKSFRVPVLPPKIETLTLKDGTRLDADVYRPATPGPYPVLLQRQAYSRRIACSICYAHPAWYASHGYVVVVQDVRGRGTSEGTFRPGETEVEDGAETVEWAARLDGANGDVAMYGFSYQAYNQLLAAAGDCPSLKALAPAMGPWNPADWAYENGALQMKHMIGWGIQITAEAARRASDDDAFSALQAGGINLPFNGPVAAMPQLLQKYRHYSHVMDWLETPADSPYWDQISPVTHVEAIRARRLPMLFVGGWFDPFLPATVESFRALASSSEDTRLIVGPWIHFPWTRKVGAVDFGPEAQRNVDIDHIRFFDHILKGLPSEADNGRIEFFDMGLKTWRRYQDLPSSTHVLFLDGTGRTSLDPHDGALGPRQPTQDSVDHIVHDPWRPAPTVGGYYGVPTGPVDRRVADERGDVLTFTTEALEHAIEVVGEPEVELDLSCDRPSFDLSCILSLVTSDERVLQISSGYAHYRVAKPGLYRLKLAVTCVTLKNGDRLRLSIAGADYPAYPVNPGTGEDPVSVPKTHAVVTTIALWHGPSRPSLLRLPVGMYSEIGSAGSQAG

SEQ ID NO: 11706 - protein, 48 aa, BradyrhizobiumColbertium
MTCRHDADEFIVTDSFDIEIVMRQIIHRDAERNIASSQHLDNVDHWCD

SEQ ID NO: 11707 - protein, 141 aa, BradyrhizobiumColbertium
MPTGHRLAERAAVRFSDIQEETLISYRADTLPAHLLAGAAEAEEVSFSPSIEIDVSITALSFVRDGLGIAIVDGLVPWEQFPGVVSRPFAPQILVPIAILTNKERPLSAIHELMRDYLRTAWSTRAGLRSGGKIVSGTIET

SEQ ID NO: 11708 - protein, 642 aa, BradyrhizobiumColbertium
MAHTLQRTAHSAFVKETEDFTVMLMNRKGDTFAVPMDLGATWYPGLTYGRAIAMIDSYKPGDVGFTNDPYACYVATHAPDTHLWKPIFHEGEIVAWTGGHIHNTDMGGAVPASLSRSLTEIHQEGIRFPPMKLLHEGVFDEQILKIMATNVRKPDLNIGDIKALVGALNTGERKVLAMVKKFGPDAFLEGVEVLLDHAEAQARDTLRSMPDGTWEFVDYADEDSVEANPCRLKLKLTIRGDEAILDFTGSDPQLASSLNVPSGGDPHHTILLVGIYYVLYTLNPKIFLNTGLTRPFTCIVPQGSVLNPVYPAAVGMRSLTCARLRSVIFGAFSQVLPDRMPAAPAGNNCIVNVMTTDERTHRTIIAAVNPVVGGSGGMPHRDGTNGSGGDAAYLRNTPIEITETEAPVEFVRYGLVQDSGGAGRWRGGLATEMAFRVFAPDSRVTARNRDRSFFRPWGVLGGQAAGLSDMVVNPGLPGERRLGNIDTTILQPGDVLEIRSAGGGGRGAPRDRESWRVARDVARGYVSAEAAERDYGVIIRDHKVDEPATAALRKSGKSPTAHFQFGPERDGYEKIWTSEAYDLLTTILASLPIHWRFFAKTEIFRRMEGRSGAQGVERALEQVMERFPAMPRPTRFASEAAQ

SEQ ID NO: 11709 - protein, 253 aa, BradyrhizobiumColbertium
MPAAKKLKGNTASNSHAGTEDVIVASKGRPDVTRKGVEMIGDYRTDALREALGRAPIEDDTLMALLILAFAGQNVSVTTGSGGTYYGHSRLAKHAAALFDADGKLVFDMDGLRVAARAMLIDVFSCRENATNSGIVARVAGATIGADEFLPTMGTEEFLSCLSRPALESACKDTPVLPRQRVKDTRAALVEHFKDGRFVHPAALFAPDAAKLAEWQTSSKREPEDADDVEDERDGMADGPSDEDTEAFREAAE

SEQ ID NO: 11710 - protein, 62 aa, BradyrhizobiumColbertium
MSAHTIIDDAQLGSIIPRSDRDAVEERRFFVPFDESKCGRLGFVIVSDRRAVDGASVRGGTS

SEQ ID NO: 11711 - protein, 137 aa, BradyrhizobiumColbertium
MSASPDLLIDLSRMEEARRQIQRQLDMIDRLITRRMTAMIPQLKPKHTCYRRGKPPNRNAFLERYRAKLAAITAEHQPEVDALYRKLARQDRAIAAFCHRHGLDQGNLHSIAAAGESTHDCTGAEVPSRGQKECDRG

SEQ ID NO: 11712 - protein, 40 aa, BradyrhizobiumColbertium
MIAMNLATRFHTAFPVGQPGRHWRVSGLDFTRPDPPAAVA

SEQ ID NO: 11713 - protein, 223 aa, BradyrhizobiumColbertium
MQLPERGFNIARQRHGIRSRLLHHADDDGRLAVVPGVAPLGARCKIDRRDLLQQDRLLVAVGNDSVSEIFDPPGDSNVADQVFAAVLVNKATAAVGAELCDRPLDLVMVDAERLHCRDVWRHAVLADLAADGYDLGDAGNGKELRSDDEVGDLAHVHGRRRAIAGQRDQHDLAHDRRHRPHLGIDRSRQLFADQRQPLRDELPGPVDVDTPVEFDVDDRQTDA

SEQ ID NO: 11714 - protein, 568 aa, BradyrhizobiumColbertium
MLINRRCPKGRLGILGLAGLGLVASLFFGLSSALGHEGHDHGEADKPAVVSSAYPRVAARSELYEVVGILKDGKLSVFIDDATTNEPVSDAALQITLGESEPVNAENVGKGVYSAGIPSGTPSGSVEVIFSITASKGNDLLVDSLVPVRAAVARPTEQKHEHGPLFSSRTAIAASVLAAAGFGLLFAYWRQRGRSVAASICAVMAGAFVILAAIVFGEGPTNATRPNPPEAPALSDAPRRLQDGTVFAAKPTQRLLDVRTAAAEPRTIRPAVTLIGRVMAAPDRSSIVQSIYGGRVVPGSDGIPRIGQSVRKGDLLIQIEPSLPIADRTTILEKVGEIEQLMAVTENKLGRLRPLADRGAVPQGQVNDLESELEGLRARRETVRNSRTDFEELRAPTDGIITSAKVVPGQVIQPQDVLFQIADPRSLWVEALAYDDIGSKQPEAATAMSPSGQQIALTFVGTSRTLRQHAAVVQFAIPEPPTGLNIGQPLNVMVQTGTPVAGLIFPREAVVRSGNGETIVWLHSGPERFEPKPVRVLPVDAARVIVAAGLNEGERIVVRGTDLINQIR

SEQ ID NO: 11715 - protein, 54 aa, BradyrhizobiumColbertium
MAWDMFGTSIASPHFIHLPSSFEVLGAIELPLARALVGMSPEALVRPPSTFSIA

SEQ ID NO: 11716 - protein, 325 aa, BradyrhizobiumColbertium
MTDRTMTDRARRIALLGAPIDMGASQRGTLMGPAALRTAGLATLLESLDFDVVDCGDLSVAELRDLADKPPQNANHYREIQRWTRALSRRGYEIATTGALPIFLGGDHTLSMGSVNAMARHWQERGRELFVLWLDAHADYNTPETTITANMHGMSAAFLCGEPGLEGLLGDEPRASIGPDKLDLFGARSIDKLEKELMRSRRIRIVDMRQIDEFGVAVLIRRVIERVKASNGVLHVSFDVDFLDPCVAPGVGTTVPGGATYREAHLIMELLHDSGVVGSVDIVELNPFLDERGRTARTAVELIGSLFGQQITDRPTPSNAIAPGE

SEQ ID NO: 11717 - protein, 73 aa, BradyrhizobiumColbertium
MAERAIDTAADVSRTIGEVAGGLHAAVGSVTSAVEESRKPGGALATVAAITREAPLASLFVAFLFGVAVARRR

SEQ ID NO: 11718 - protein, 376 aa, BradyrhizobiumColbertium
MLRAVAERLRSEVDGKAIVARLSGDEFAIAIDCLEAGEQIAEFAERIAQAFQAPLSAGKRQHRVGISVGVAVYPEGGQNADDLLSNGHLALSRAKATRRGSHVIFETAIRQELENRLTLESELALAADRGEFELFYQPQVRLIDGSLVGAEALIRWRHPVRGYVSPAEFMPVVNTSALSERIANWVMETACRQARAWELSGNNVRVAINLSPSQLQSGDLAHSVAALLETTGLTPSLLEIEVTEDILLHDERRVLDLFKRIQNLGVRALFDDFGTGYASLSYLKKFPLDGLKIDRSFVFGLLANSDDAAIVGSTIGLSKQLGLTVVAEGIENKATADFLVSMGCEEGQGYFFGRPMPAEAFEKQFLAVQIEAISAA

SEQ ID NO: 11719 - protein, 64 aa, BradyrhizobiumColbertium
MPEHVIDLLEAIQAEHEQCDTAGPPLRRTDQIGEGHMQHGPVGKTGQRVVLGQVSDTFSFAFAN

SEQ ID NO: 11720 - protein, 481 aa, BradyrhizobiumColbertium
MKRYRPHILVVIALAIVLSTGWHGSLRNALTDLRFAWQSRDASGKIVVVAIDAPSIDQIGVWPWPRRLHAELLRRLEAAGAQDIAFDVDFSTPSDSASDEAFARALREVGGSTILPSFKQPTQNGGPAHVNRPLKSFSNQSWPAVVNVAVETDGLVRRYPFDEKIGDAFMPSMAVVLAGQDANRRRPFLIDFSIRAASIPAVSYVDVLRGDAATLGKLKDKKVVIGATALELGDRFSVPNGKIISGPVLQALAAESILQNRMLRWTSNIGMILGLGAVCLLMVYSWRRFALSSRVAILIGAGVTVELAAAFVQARWPLVIDTSLLHIAVIVYLTAIALDEIDFRSLLGRIAESRFHRIAMSLGDGLVCTDGEHRITVWNPGASAIFGYMPAEIIGRRFDTLCAVPTDGDARPSMLDDARQALLVPGGAVVVEFEGRRKNGETFPVEASFSGWQGTDGFQYGVILRDISVRKREAERIRYLA

SEQ ID NO: 11721 - protein, 401 aa, BradyrhizobiumColbertium
MRCAFAAALILATVSGASAADGGAWSVSKASGEVWVATSGAQQVSLKQEEALKPGDTIRTGRNGRVLLVRGEETMLISPNSVVGLPAEQKEGLSTTIIQQAGSILLEVQKRNVKHFEVETPYLAAVVKGTRFSVTVAAGSTKVGVLRGQVQVSDFRTGQIAQVMPGQAATVFEHGKPGLSLSGAGTFSPIEQGKPRAPTIERVPVPKSGLSAPRNAANGHAIHALGPVDKSTKAAGAPKASGQASEGHAPKPGVVRISNSLGEVKLNVHKVTRGLAHGGGVPGQVRNANASTDNPTVWSDGKTNPAASNSAAASGVGNTNATIAATTAGASSDAPRANNGNGGGNGNNGNNGNNGNGGNNGNSGNGGNSGHGNNGATGNGRGNSGNGGNSGHGNAYGHNRR

SEQ ID NO: 11722 - protein, 573 aa, BradyrhizobiumColbertium
MTWHLLSVLGLLAPIFAGALQASAQQANQPGFDPRQPEKYFDNQTEQESLGRPPVRLPSVGQPTPGGDAKPQFVLRGIDVIGAHAISRDRIAAVYQTYLAKKVSQANLAAIAGAISELYREAGFHLSRAIVPPQDIADGRVRIQIIEGAIVQAELKGDGAEQFGVRPMLGPILAEQPSRLATLERQLFLINGRPGVRITDTALEEIGGTTGRFRLIVYLKTWHVFSSFGLDNLGSSSVGPWQTYATGAFNSYLTPGDTLSVNLSTIANDPRELGFARMSYDAPVGVDGLRLGASVLYSAVRPGDARRLDSDITTTEAFELRASTVPLQSQSSTLTLTAAMTFSNVSEHDLYGPWYNDHIRTASLTADYRLQDGFGGTNFATASFRQGLDIFGASHFDDDLLSRAGASSNFSVLSLWFTRHQTLNDAWSIKVSAASQTASRPLFTSQQFYLGGAAFGRGYGAAEISGDNGLAGTIELRFDQKLNFRYWTGYQLYAFGDAGAVWNHGYRLSDGLSLTSAGAGVRFFLPDDLHADLGVAVPLSYRAPDNERRSPRFLFTLSSAFRLCPERGKAGCL

SEQ ID NO: 11723 - protein, 53 aa, BradyrhizobiumColbertium
MSHYTASLDTKSLGLAAARVPAFVRHLYRSTRKLFRSVIARIDLSQFPGSCCG

SEQ ID NO: 11724 - protein, 58 aa, BradyrhizobiumColbertium
MTARAPAPGKVGAVIGVSGQGGRTDARDYANQEANPSYVPGHGQSFYVRSRLPRSTAA

SEQ ID NO: 11725 - protein, 61 aa, BradyrhizobiumColbertium
MANGQTQASADVPSFPSVARRQDFSPERLAFFLLDPHPKMPNFPLSRAEAADIAAYIASLR

SEQ ID NO: 11726 - protein, 113 aa, BradyrhizobiumColbertium
MIEPKLEVPAELRDLAEKTIDQAEKAFGMFFEAASKSMSSVPGAGTEVSKQALAFTEQNMKSAFEHARKLVHATDLQEAMRIQSDFLRSQFTSAGDHMRQMTGSLMQPGKDKS

SEQ ID NO: 11727 - protein, 61 aa, BradyrhizobiumColbertium
MKDLNFAAELHLKLGVPASGTVESLRLLRAFLKLAPRQRFEVIKLVEDLATEEALPEHPLS

SEQ ID NO: 11728 - protein, 118 aa, BradyrhizobiumColbertium
MLSRCDLIKGAAVALLTLSVQGAWAQETKMNLFKIVTVKDEIVVGLSAEELQALGGNDASAVARALAQKGDLTVWQYNVRRGPNGELQQAPTAKIGLLANASLRVEPYTTPYRILPHP

SEQ ID NO: 11729 - protein, 191 aa, BradyrhizobiumColbertium
MARARRNKSYKLAQIYDRRSREVPFNAELAEVEVDNPLALDSGEKILAMRSIRSDPLGRLHAHHQIDEAQYRGGRAFQNDWERAERGPQAVDTTREYVDGTSTREPVTESQRKAVLRLNRVERELGTDGAALVHDVLVLGLTMDQIGQRRAVRTQRWNDYFGRRFRECLDRLALIYGFATEAGTLRPDRRR

SEQ ID NO: 11730 - protein, 177 aa, BradyrhizobiumColbertium
MEPGHWPSEHSDALRDYFLKGMSYAEIGRQLNARFGTAYTRSAVVGRAKRLGLVLPEWMTSPSIAPSWPGEASPLAPRRVALPNLNLPPKSAMKPAQRVKLRCVGVQPRLIPLVELEPADCHYPYGGDKDGEEIAFCGHPRQPASSYCAPHARLTRRSGTPSARVAGRVVLRLVGVP

SEQ ID NO: 11731 - protein, 197 aa, BradyrhizobiumColbertium
MIERGLEKTGKSKGGLAAAMGVRPGAVSEILGGERLVKASEIIPIMEYLELNLAPIMGRVGAGAVIEPDYEQVPPEGLGDVTLPFPIMEETIAFEIVGDSMLPKYESGDVIVVYKDQRHPLSSFYGEEAVVRLKTGERYLKTIERGKSPSVVNLTSFNAKPIVGVKLDWVGEICLSMPKGQLERLRAKSARPRKKGK

SEQ ID NO: 11732 - protein, 116 aa, BradyrhizobiumColbertium
MTIDKIPVSDNTLPRYDHGARQDRFMQYFVVMIDYGRRGREAVVDPEITRREVISRIASGEYQNISFIHEILENAVEDVTEAMLTEAALPQIPPEDIDLQAIDLDHTRDLRKHERS

SEQ ID NO: 11733 - protein, 324 aa, BradyrhizobiumColbertium
MTHAIRFHKTGGPEVLVWEEVSVGKPGPGEARIRHTAVGLNFVDIYNRSGLYPAQLPSGLGSEAAGIVEEVGPDVTDLKPGDRVAYGASPLGAYSEARLIPADRLLKLPDGVDDKTAAAMMLKGLTTQYLIRQTYRVKAGDTILLHAAAGGVGLILSQWAKHLGATVIGTVSSDEKAKLAKAHGCDHVIIYTREDFVKRVDEITGGKKVPVVYDSVGKDTFLKSLDCLAPLGVAALFGQSSGVVEPLNLGLLAQKGSLYVTRPTLFTYAAKRESLVAMANELFDVVKSGAVKIEVHQTYPLKEAAKAHADLAARKTTGSTVLLV

SEQ ID NO: 11734 - protein, 66 aa, BradyrhizobiumColbertium
MPAYVQHHQDVEVPPVNCPACMGFLPMYVREVEPHWGLARIDFVYECADCGAEVRQTIRKPEQLRH

SEQ ID NO: 11735 - protein, 315 aa, BradyrhizobiumColbertium
MADQKPSTSIEAVESGLAAQGYIASRQIATAVYLSQQIEKPILVEGPAGVGKTELAKAIAAWRGMKMIRLQCYEGLDEAKALYEWKYAKQLLYTQILKDKLGEVLGGAQTLHAALDQLHDFGDVFFSKEFVEPRPLLQALEQPGGCVLLIDEIDKSDAEFESLLLEILSDFQVTIPELGTVSAITPPTVILTSNSERDLGDALKRRCLHLHIGFPEQRLEERIVESRVPGISQALRRQMVGFIHEIRSLDLKKLPSVSETIDWARVLVLLQASELDSEIVKDTLNVLLKYEADIEAATPQVTTFIAKAARSNVFG

SEQ ID NO: 11736 - protein, 458 aa, BradyrhizobiumColbertium
MRENLHRFFRAARGAGVHVSPAESIDAMRAVAQVGLSDRAILRDALLLTLAKSQDEKLALGDCFDLFFSQPEPRQDQPEADNDDTSPDADQSPPSDAPGDAGEGQPSQGLGPLAQMLLSQDRNAIAAAIASASGAASLSDIRYSTQRGIFSSRILDAMGLQRLRDDLDELTATNPALAERLRAALDGLREAVRDTVSQGLALYAREEAENLRNEILRNAPLARIERRQVAEMRALIRQIARRLRERYSKPRKRQRRGHLDVRRTLRRNAAWGGIPFLTAWKRKHRDRPKIVALCDVSGSVAQVSDFFLLLIHSLHEVVDDVRSFAFSSHLIEVSEILESKSPEEAMSEIMSKVGFGSSDYGSSLVDFEKEFMSTLTPRTTVIVLGDARSNNLDPRADILRRISERSKRLVWLNPEGRLAWGFGDSEMPRYATFCSVVRQCATAQQLERAVSDIVATYQ

SEQ ID NO: 11737 - protein, 60 aa, BradyrhizobiumColbertium
MNKLVEIRSQEFLCRERAALDSERRVFWLAQAQEWEQRALDEIAYHFRECNLAQAERNAA

SEQ ID NO: 11738 - protein, 73 aa, BradyrhizobiumColbertium
MSNDVDFDLTPDQWDALRTLRNATSSGRLSKAYLIESLVKLGLVDVNDGVPSMTPTGRKVLVRGSCRLLDLAA

SEQ ID NO: 11739 - protein, 400 aa, BradyrhizobiumColbertium
MESAFSLTEAFLVTGAPHASAYYPRDFAWFYPDVLDPETILDAQDAVRRARLLDKSVRLLLDAVRAGVVTTTIVPAGRGRYLGVNYFSRPSDTLLGILAGLQQMISAEERKPSYLAMSQCAHAGRLLLAEYGADLKRAILQLASELEPFDDGGTRSLLCDVNAPRSAATDTRAERKRFVTNASVYTTFVWGVQLGIVGENELKRLLGRDLVQYKRDLLRLFGKDGYIRHSLEDRTTSPASSVALDFVGVHRGFWTMSDASERALFAATADLIIAEPRFRIPSTFHFLVSADNPRNKMIHKIAAPAYQGRSSWPTFNVEFADRMLDYDEFTGRDTYRACAQGILKDIRTATEVHGGYQELISEQGLKYRTWAYKGAVAHSWFPRFLSVWRRAYGTPLLRWD

SEQ ID NO: 11740 - protein, 434 aa, BradyrhizobiumColbertium
MGAVSAVQSASLGEVIVRRINDLAAISEEGGSLTRIYLTTELREAADLILSWMREAGMSARLDGIGNVCGRYEGDQPGAPCLMLGSHYDTVRDAGKWDGPLGVITAISCVADLNRRGKRLPFAIEVVGFADEEGVRFASTLLGSRAVAGTFDENVLNTRDRDGVSMRDALVQFGLDPDRIGAAARTRGELLAYIELHIEQGPVLEAQNLPVGVVTAIAGATRLAARLTGMAGHAGTVPMPLRRDALAGAAECIGAIEQFCRTDEGGLVGTVGHIQAKPGATNVIPGQVSFTIDMRAPTDGHRKRAVTEIVRQIEAIAKRRRLALQLDVTHENRTAPCAPWLQQQIAQAIEAEGFSVFELPSGAGHDGMAMIDIADVGMIFVRCRGGISHHPDEHVELADADAGARVLLRVIENFRPQEGRRQAEEAPAEAARSS

SEQ ID NO: 11741 - protein, 295 aa, BradyrhizobiumColbertium
MSQISLADLNGASRDDFVAALAGVVECSPWLAGQLAAKRPFTGINQLHAALIAAIQSAEPDVQLSLIRAHPDLASKTQPAAGLTAETADEQNRAGLDRLSEPEYAAFGRANNAYRVKFGFPYIVCLRRHTRDSVLRDCETRLLNIAKTETRRAIEEIGRIAALRLDQLVIADDKLKVHGRLSTLVLDNQIGKPAPGIPVELVELATLGENRVIARAVTNADGRTDQPLIGGRPLPIGRYELRFSVARYYAERNVPQSDPPFLDEIPLRFAVSEPEGQYHVPLLVTPWSYSTYRGS

SEQ ID NO: 11742 - protein, 311 aa, BradyrhizobiumColbertium
MTEPRYPRDLRGYGRNPPHPQWPGNARVAVQFVVNFEEGGENNILHGDRASEAFLSDVLGAQPWPGQRHANIESMFEYGSRAGFWRLWRMFNERKWPTTVFGVATALKRNPEIVAAMKESGWDIASHSLKWIEHKDMTEAQERAEITEAIRVHTEATGSRPLGWYTGRSSINTNRLLMEEGGFLYLCDSYADDLPYWVRGPGGKQLFIPYTLDANDMRFINPQGFAEGEQFFTYLKDAFDVLYAEGQTAPKMMSVGLHCRLAGRPGRAAGLIRFLDYIGKHERVWVPTRLQIAQHWHDKHAHLAADAFEIG

SEQ ID NO: 11743 - protein, 148 aa, BradyrhizobiumColbertium
MGPLALIQRDEMSKLVIRAGDFTFDARFEEELAPKTVAAFRNALPFESHIIHVRWSGEGVWMPLGDLDFGVGYENHTSYPAPGQIILYPGGISETEILLAYGGVHFASKMGQLAGNHFITLTSGLENLATLGKSVLWKGAQPIRFEEV

SEQ ID NO: 11744 - protein, 65 aa, BradyrhizobiumColbertium
MAEQIIDFFEPIKVDTKYCNPLTLCASGINFSIHLGIEVITVRQRRKGIMMREISNVALGFSART

SEQ ID NO: 11745 - protein, 102 aa, BradyrhizobiumColbertium
MFDVISILARIDASGKQIDSSHPTSRSADNPVMRAKLSLTVATISPSQTTSPSIAALARLRHPVCLNLYASTVAQVERNAGQRENDNNEAGEPDGSGQPIGW

SEQ ID NO: 11746 - protein, 40 aa, BradyrhizobiumColbertium
MAMKCVAQIPKPVDMADTASQTLRRSPVDPREWRSKVIAA

SEQ ID NO: 11747 - protein, 103 aa, BradyrhizobiumColbertium
MSPGEGLLVAWNSYHDHIGKIAKRIFRETLVVATTILDRCCHHSHVLTIRGDSYRLGAKPRAASSSRRPPVLALQSAPPPSGPSLAETTFNRDHKPDGGGSSS

SEQ ID NO: 11748 - protein, 232 aa, BradyrhizobiumColbertium
MGRRARTKEYLDLELADLPPELRWREWMGRVEAVIFASPEPVAREVLARVIGRDCNLELIIDDIRRELCDRPYELVSVAGGWQHRTRKNFGDAIRTAIGSSEDKSLSQAENLILACIAYYQPITRSELSQFFGKEVSRDTIARLRGLEFIAAGPRSPQPGAPYTYVTTKAFLSHFGLETLRDLPDMEMLEEAGLLSKDKLLAGELPDPIGEVNEDDLDDDGAVGPIPKDREL

SEQ ID NO: 11749 - protein, 72 aa, BradyrhizobiumColbertium
MRRAARLLAAAPKLRGKDADMMVALLLMEDAQPAGAGKIASDRSARRLFERLVALGAVRELTGRPTFRLYGL

SEQ ID NO: 11750 - protein, 268 aa, BradyrhizobiumColbertium
MPTRFSRTSSAFALAIAIATPSGDSAFAGSSVGGVGGATEFTQLLNNGQLIQLAGQSAQQINNQITQITQLAQQLENQLKIYTNMLQNTAQLPSHVWGQVENDLKQLQNIVNQGQAMSFSMGNIDDVLKQRFQSYSQFKTNLPNGSSFASTYQTWSTTNRDTISGTLQAAGLTSQQFATENSTMSQLKTASESADGQMKALQVGHEIAAQEVAQIQKLRGLIAQQTTMMATWYQSSQASKDLAQARREQFFNTTPPATSGGQTMEPRW

SEQ ID NO: 11751 - protein, 118 aa, BradyrhizobiumColbertium
MTPDAVVQKKYIDRTYALLRTSDPATQKINDWFRSNSPFETAKTTTIAIEVNNIVALSNQSYQIDWTEFERDRKGKETGEHRFRGIATVTLTPPQDEQTIRLNPIGLYLRDLDWTAQL

SEQ ID NO: 11752 - protein, 206 aa, BradyrhizobiumColbertium
MCSPLEVCDIELQAGEVVRDVLVGDTVRWKVEPATSGAVGGQAIHLIVKPSEPALVTSMVVTTSRRTYHIQLKSSPTQYMARVGFEYPEEVGSKLADINARLGSDRNSGSGVPAEQLNFGYSISGSASWRPTRVYSDGVKTYIQFPSSLAGQDAPVLFVVSGGQNRIVNYRLKDDMMVVDYQIETAILVSGVGFWNQDKVTIRRGS

SEQ ID NO: 11753 - protein, 148 aa, BradyrhizobiumColbertium
MGFSINRIIFSCLLGLSLAGCASIGGGGVVASSAPPDLSGAAAAAIAGDLVTKFAEQVKPSSGTIILKPDGTPFGQALETSLKSWGYAVATDQKTGAEKAIPLAYVIQTYEGQVLARLSTASVDLGRTYTTTAAGASPASPLSVMQRS

SEQ ID NO: 11754 - protein, 434 aa, BradyrhizobiumColbertium
MAQSLKLGSGPAGEEGTRIRRLNRLPIIVAIALVIVFFAVIFYGLTSRGLYFRRDAGIDTASANPASNYADQLKKGISNGIIGDQRDAQTFQPEPQQVEKAATNPFAGRQQTDARSGAHLEPEELWRARLDREAHEQYLRERQRQRMARVQASDAAYDSPLSVSLGKLQSAGATTNDAVATSKSASQVGLGGGTQDLYATALRAGLGLQNIDPNGQRAKEDFFNADLKKIGYLPNKVVSPTSAYELKRGSVVPATLITGINSDLPGRITAQVSQNVYDSATGHLLLIPQGAKLLGRYDSKVSFGQSRVLVVWTDIIFPNGSTLQIGTMAGTDAEGYGGFTDQVDNHYFQVFGSAIMIAAIGAGIDMAMPASSPYGYRQTPTDAARNSFVESFGRVAEQTISKNLNVQPTLEIRPGYVFNVLVDQDMVFPGAYRG

SEQ ID NO: 11755 - protein, 315 aa, BradyrhizobiumColbertium
MTRAFTAEGPAYTQLLAGLLVLALTIFGSAIWLARVLFSWSRKIAVLEEALGKSENSSVDLPRLPRTGERELDRLVDALNQTGDRLALERRRAGTAERMAAVGRLSAGLAHEIRNPIAAMRLKAENALAASDDARKKTALEAILKQVARLDTLLRNLLQMTQAGEPKWMDVELASFLQGTIEPHQELAAANGLSLETGTLAPNNPLPRFDPSQLQRALDNLILNAIQNTPAGGRIVVDALRQQDKLLLTVTDSGAGVSEEMRERLFEPFATARSEGTGLGLAIVREIARAHGGEARLAPTERGARFEIEVPWQTS

SEQ ID NO: 11756 - protein, 145 aa, BradyrhizobiumColbertium
MANVLIVDDDPALREGLAEALSDLGHTPQTASSGREGLAALSETVDAVLLDLNMPGMDGIEVLRRIRSQESSPAVVVLTAFASAENTIEAMRLGAFDHLTKPIGRDELRTLMERLPSRLRPVTTAGKGSLDTLIGPPRPSPACVS

SEQ ID NO: 11757 - protein, 57 aa, BradyrhizobiumColbertium
MIARARARAVASSGDPDITQRIYELIISEFTAVQLREAARQADEPQSAEKAGGTHAN

SEQ ID NO: 11758 - protein, 253 aa, BradyrhizobiumColbertium
MRIESVIAYDADLIRRFDGFRAGLLLINELDLGEVESAVPQIVLSDDQDVAEMASIKAWRNVYRQMGANPTKTRNAAEALIRRFKKDGSLPTINPVVDACNHAAVLHGVPIAAVDISTMPLPLLVKQAAGTEVFFDISGNESTLSSEEVTYLDERGEPHARYWNHKQSGASAVNRTSRRVLITIEAMHEEADTSVRMAMDDVVRLLKAHGVRLTASNFHTWLYDGNSGTFDMLPVVDGSEGVERLQQGAGLAE

SEQ ID NO: 11759 - protein, 122 aa, BradyrhizobiumColbertium
MTDKTSVHSDMSALKQSTVRINLPEMSWDKWVKPGADGRVKLARAFGKRVRILELPEGFDEQNWCDKGHQGFVLEGEFTISFETGDEFTCKQNDAFVIPDNSRPSSPARAASMVAFNASGFI

SEQ ID NO: 11760 - protein, 48 aa, BradyrhizobiumColbertium
MDLTDRVVRGIAFASEKHSRSIFLAPCDVCRGDFAYAWPVRRLAAMSR

SEQ ID NO: 11761 - protein, 520 aa, BradyrhizobiumColbertium
MTSGFARSARRLDESLEPTRHPSDKIIHTSAPNATARSAAATIEPFRTRSPSRNTERFVGAETTSHLRLTAIDPSMLQGAVASSIGGPALVMRVFLPFAIGYYLSYLFRTINALIAAPLTLEIGLDAGELGLLTSVYFLTFAAAQIPIGILLDRYGPRQIQSALLIAAAVGAALFAVADNLPVLLVGRALLGLGVAASLTAGLKALVLWFPKERLPFLNGLMVMLGGLGAVTASSPAHFLLDWMGWRQLFALLAVVTAGCSTLIYLLVPPTASTTPAGGGKVVVSLKEIYTNPHFWRLAPLSATSVGTAWALQGLWASQWLTDVDGLDRAAMVQHLVVMAVALSLGALLLGVLADRLRRYGIGTEVVLGAVGLLFIATQSAIILRCPISSYVLWAAVACVGAATVLSYAILATYFPKELAGRANAALNVFHIGGAFVLQSATGIVLEQWMPTAGHYPEIAYQTAFVLNLVVQTAAWIWFLVSWMITPSTSTRKDQIAADQEAEKPVGSHRQGRPGHSFRI

SEQ ID NO: 11762 - protein, 330 aa, BradyrhizobiumColbertium
MEYQHYRFSVAPMMDWTDRHCRVFHRHLSRRALLYTEMLTTGAVIHGDGKRLLGFDPCEHPVALQLGGSDPRDLAEAARIGEAFGYDEINLNVGCPSDRVKDGRFGACLMAEPELVARCVAAMKSTVAIPVTVKCRIGIDDQDPEAALDALAHAVVASGCDTLIVHARKAWLNGLSPKENRDIPPLDYDRVYRLKRAMPNVPVIINGGISCLEEAKGHLDHVDGVMLGRAAYQEPWRLLSVDGEIFGETAPHASMQEALEAMMPYIDQQLARGTRLHAITRHFVGAFHAVPGARAFRRHLAEQGVKPGAGLEVLRDAIARIGARVPVEAA

SEQ ID NO: 11763 - protein, 184 aa, BradyrhizobiumColbertium
MIRFLLVFVLLAGTAGAVVAYGDAGQIARASHKVSHIFRAQAAAPAPAVQIPRGQGGEFALRAKINGVTAPMVIDTGATSVVLTWETAKAIGLPLEMLEYDVDLETAGGRTKAARLTLDRLSVGQLVEKSVPALVVPRGQMKTNLLGMSFLDRLESWGVRADTLMLTGYPELQRSPRRSRTAVN

SEQ ID NO: 11764 - protein, 56 aa, BradyrhizobiumColbertium
MIDPKTKLCFGCGRTLPEIARWHAMESAERLATMALLPARMAEAGLTPTGGSPKRI

SEQ ID NO: 11765 - protein, 531 aa, BradyrhizobiumColbertium
MSNPAEKPEVVQLPAEPVSAPSASSRRAAAQRVREARDKLTSTSGTRPAFDAEMLRQYAQTRLSASYVVMLLVVATGVLFGLWMQPIPAAAWTVGMLCIHAAMIRSCRRFLSEPASPTATRAWRTRFVVIDLLYGLCWMAILIHPVLDMVTESLMMFLMLLVIAVSSMLAANLPIAALAATAPVAVAMALSLAMTGSLDNYILAALALAAEGYFVLLAHRLHSSTFATLEARAEKDALIGELEQAKAISDEARHRAEAANVAKSRFLAQMSHELRTPLNAILGFSEVMKSEIFGAHAVPVYKEYSADIHNSGVHLLNLINEILDLSRIEAGRYELNEEAVSLVGIVADCHHLMKLRASSRGITIHEVFEQGMPRLWADERAIRQVVLNLLSNSIKFTPQGGEIWLKAGWTASGGQYLSVKDSGSGIPEDEIPVVLASFGQGSNSIKSAEQGAGLGLPIAKNLIDLHGGTFTLKSKLRIGTEVIVTFPPERVMSALAPLSDDAPPLQPESSPLPDEKRRPRHKPIMSAGTGS

SEQ ID NO: 11766 - protein, 502 aa, BradyrhizobiumColbertium
MIAAILVVACVGLALERRRGHPEVARRGIYRRLSRLITSPLIVAILILTASPSQTLAASLDGASIGPQWALPFAGMLLSIAIFPLAAPHFWEHHQGKIAAMWAALIVLPLAIWYGPLPTIQALAHTALLEYVPFILLLLALFTVAGGIVVRGNLHGSPVLNTLLLALGTLIASVIGTTGASMVMIRPVIRANDDRRHNAHVVIFFIFLVSNIGGSLSPLGDPPLFLGFLRGVDFFWTTTHLFPQTTFAAWILLVLFFCIDAYLYRKEGRVKPDPTPDNPLRISGGLNFALMGVIITAILLSAKLDLGGFEVLGTHLQLQNLLRDAVMIGVVFASLAVTSKEDHDANGFSWGPIVEVAKLFAGIFITIIPVLAILNAGKSGAFASVVNMVTNADGTPNNAAYFWLTGVLSSFLDNAPTYLVFFELAGGDAKQLMTNGAVTLAAISAGAVFMGANSYIGNAPNFMVYAIARAGGVAMPGFFGYMAWTSVLLLPVFALVTLVFFK

SEQ ID NO: 11767 - protein, 290 aa, BradyrhizobiumColbertium
MAKVAFLGLGVMGFPMAGHLVKKGGHEVTVYNRTAAKAKEWADKFGGKTAPTPKAAAEGQDFVMCCVGNDNDLRAVTIGPDGAFAGMRKGATFVDHTTASAEVARELDAAATKAGFKFVDAPVSGGQAGAENGVLTVMCGGAEDAYSGAEPIITGAYARMCKLLGPAGSGQLTKMVNQICIAGLVQGLSEGIHFAKKSGLDVAAVIETISKGAAQSWQMENRYKTMNEGKYDFGFAVEWMRKDLSIAIAEARRNGANLPVTALVDQFYSEVEKMGGKRWDTSSLLARLQR

SEQ ID NO: 11768 - protein, 145 aa, BradyrhizobiumColbertium
MGGVSVGVLDHFNIRTRNLAETVRFYEDVLGLEKGARPNFAFPGAWMYSEGKPVVHLVDISPTAEPQKPDSGVVHHVAFVSRGFDGMKQRLASKGMKFEARQVPGGELWQIFVHDPNGVMIELNYEAAREQGGAPIEKADDIGRQ

SEQ ID NO: 11769 - protein, 378 aa, BradyrhizobiumColbertium
MSVTQQQVLDSLTRVKSPRGVALTHANVLSAISAADGKVFFSINVDAAEARAWESVRAEAEAAVRAIPGVTTVMVALTAERKPGSAPPPPPQPSRGTPGVQPAHAHKPPQGGQSPMARQSEIPGVAAVIAVASGKGGVGKSTTALNLALGLRDLGLKVGLLDADIYGPSVPRLTGLRDKPELNEERKMIPLRRFGLAIMSIGFLVEEETAMIWRGPMVMSAVTQMLRDVEWGKLDVLVVDMPPGTGDAQLTLAQNVPLKGAVIVSTPQDLSLIDARRGLAMFKKVNVPVLGIVENMSYFQCPHCGTRSDIFGHGGARHEAEKLGVPFLGEIPLHMAIRATSDAGNPVVDSEPDGPHAAIYRAIAGRVRDQLKGVIAVA

SEQ ID NO: 11770 - protein, 362 aa, BradyrhizobiumColbertium
MKRRDFLKVSAAGAAATAVASPAIAQSSPEVKWRLTSSFPKSLDTIYGGAEQVAKYVAEMTDNKFQIQVFAAGEIVPGLQALDATTNGTVDMCHTVSYYYVGKDPTFAIFASVPFGLNARQQNSWLYQGGGNELANEFFKKSNVIGFPCGNTGTQMGGWFRKEIKTVADLSGLKMRIGGIAGQVLQKVGVVPQQLAGGDIYPALEKGTIDAAEWVGPYDDEKLGFAKVAKYYYYPGFWEGGPTVHAFANLDKFNALPKNYQAILTNATAHANTWMAARYDMQNPAALKRLVAGGTQLRPFTNEVLEACLKSTNELWAEISGKNAEFKKAIDAMQAYRSDEYLWWQVAEYTYDSFMIRSRTRG

SEQ ID NO: 11771 - protein, 362 aa, BradyrhizobiumColbertium
MKRRDFIKVTGLGAAGAATLAAPAIAQSLPEIKWRMPTSWPKSLDTLFGGAEMMCKMVAEATDNKFQIQIFAAGEIVPGLQVLDAVQNGTCEIGHTASYYYFGKDPTFTFGSAVPFGPNMRINQAWYMLGGGRDVLNEFYKSYNVISLLAGNTGCQMGGWFRKEVNTPEDLKGMKFRIGGFAGRVLQKLGVVPQQLAGGDIYPALEKGTIDAAEWVGPYDDEKLGFYKIAPHYYYPGWWEGGPMLMAFVNLDKWNALPKYYQSVLEQAGHYANNYMMARYDNANPLALRKLLAGGTKLHAFSPSIMDACHKAAKELHAEVAATNPNFKKVHDSLAKFTSDGYSWFQVAEVGYDIFMARRSQS

SEQ ID NO: 11772 - protein, 69 aa, BradyrhizobiumColbertium
MLAAMTEVHSVPPRRADLCAGGRVEHPRIRINLERRWIGHGCCQSTIRKVAQRLIGKIMQSDKLKLDRL

SEQ ID NO: 11773 - protein, 69 aa, BradyrhizobiumColbertium
MPYFPPNENQDFRVCKVLADIFCAILIGTFSVAFFGWLGGLVAFVIVEASLLALDWLIPTKDDAAGVVR

SEQ ID NO: 11774 - protein, 224 aa, BradyrhizobiumColbertium
MRLLIVEDNVELSRLVAGGLAAAGYQSDIVGSAAEAREAVSSVGYAAMILDLGLPDGDGMSVLRELRLEMEPLPVLVLTARGGLQDRVTGLRSGADDYLSKPFAMEELVARLEAILRRPGQLLGRSLNLANLVYDTESRQIFVDDQPRIISAREASVLEILLRRQGRVVPKKNVEDHIFGLDGEVASNAVEVYVSRLRKQLAEHGAKVAIHTVRGVGYLMTEER

SEQ ID NO: 11775 - protein, 461 aa, BradyrhizobiumColbertium
MPAGGYVRSLAFKSLISRIVFLHIVAVAVVAIFLPLVLFWLLNSEIDQLHRDAMRAQAEVLAERVVAQPDGTLSFNLPDSLKGLYSDAYGRYQFDIRDADGRLLFSSHRRSAATALSRFSETISGASVTREVAGKTVRIQVAEDLAHRDVIIDDIVSNFFRRVGWITIPILLVLLAIDIIIFRRAIAPLWKASQEASNIGPARTDIRLPTAQIPSEIMPLVTAVNQALDRLEGGFRVQRQFTADAAHQLRTPLAILRTRIETLGDRVARRALHADIEAMSRIVAQLLEIAELDTLVLDPGETADLRAVCAEVVGSIAPLAIAQNKDIALKGADSPVLIHGNSEMLQRAIFNLAENAIKFTAVHTSVEIEVHDDGSVLVRDYGPGVPEADRELIFQRFWRADRRRSDGAGLGLSIVRAVADDHAATIAVTNLPGGGAEFTVRFRLADQTVSSPSPGGEGSRA

SEQ ID NO: 11776 - protein, 551 aa, BradyrhizobiumColbertium
MTAFIIANMAPIMFVSLVVMLLLGYPAAFSLGAVGLFFAIIGVELGQFHPDFLQALPERVYGVMNNDTLLAIPFFTFMGLVLERSGMAEDLLDTIGQLFGTIRGGLAYAVIFVGALLAATTGVVAASVISMGLISLPIMLRYGYDRRVAAGVIAASGTLAQIIPPSLVLIVMADQLGKSVGDMYEGAFIPGLVLAGLYAGYAFLVSMIFPAAAPGLPKEAIGFREDNGDRGLVSLGFLFLASCVFGWFMMRNSTVHGADYVVLSMFYGIIFAFAIAVLNWAVDKLTGFRFLSKMAQQTTFVMVPPLFLIFLVLGTIFIGIATPTEGGAMGAAGALLLGAAKRRLSWDLIRQATESTAKLSAFVVFILVGARIFSLTFYGVNGHVWVEHLLTSLPGGQVGFLIFVNVLVFILAFFLDFFELAFIVIPLLGPAAEKLGIDLIWFGVILGVNMQTSFMHPPFGFALFYLRSVAPKERYTDRITGKRMDPVTTGQIYWGAVPFVVIQIIMVGLVIAFPAMVMHYKGVQTNIDPSTIKIEVPQIELPPLDFGPPQK

SEQ ID NO: 11777 - protein, 193 aa, BradyrhizobiumColbertium
MQALLKLSSRIDAFTRWTGKRIAWLIVLAVIISAVNAIIRKTFDTSSNSWLELQWVLFSIVFLLCAPWTLLDNEHIRIDIVNNTLPKKARNVIDLVGHVFFLMPICIIMIITGVPFFLRSFEINEQSGNAGGLPQWPAKALIMIGFAFLLVQGISELIKRIAVMRGLIPDPHESQVSALEAEVEHLVEAIEKK

SEQ ID NO: 11778 - protein, 339 aa, BradyrhizobiumColbertium
MNGSAALSSPMTDPFGRTISYLRVSVTDRCDLRCFYCMSEDMTFLPKADLLTLEELDRLCTAFIAKGVKKLRLTGGEPLVRRNVMTLVRSLSRHLSSGALNELTLTTNGTQLARHARELADCGVRRINVSLDTLDPGKFREITRWGEIDKVLEGIEAARAAGLGVKINAVALKNLNEDELPSLMRWAHGKGMGLTLIEVMPMGEIGSGRIDQYLPLSLVRARLAQQFTLTDLAESTGGPARYVSVAETGGKLGFITPMTHNFCESCNRVRITCTGTLHTCLGHEDASDLRKPLRASSDDLLLADAIDRAIGLKPKGHDFIIDRRHDRPSVSRHMSVTGG

SEQ ID NO: 11779 - protein, 230 aa, BradyrhizobiumColbertium
MTSPHTIVFDLDGTLVDTAPDLITALNYVLDREGLPPVPMASARNMIGAGARKLIERGLEAEGRTVTPADMDRMTADFIAYYADHIAVESRPFEGLEAALDHFAAQGHRLAVCTNKLEWLSRRLLDQLDLSGRFAAICGADTFGVQKPDPTIFRQTVARAGGEMKASIMVGDAGTDVGVARRAGVPVIGVSFGYTDVPIADLKPDRLIHHMRDLPEAVTSLTTTKLAASH

SEQ ID NO: 11780 - protein, 53 aa, BradyrhizobiumColbertium
MFTSAPAPEFVSRRQRPLSAAYVASFFWREQAYKVILWARPLRRSGRPDSAWS

SEQ ID NO: 11781 - protein, 237 aa, BradyrhizobiumColbertium
MDQLKRQAAARALEAVRDGMQLGLGTGSTAKHFVELLGERVAAGLKVVGVPTSEATRADAERCGVPLTTLDEIDHLDLTVDGADEIDAELNLIKGGGGALLREKIVAAASDRMIVIADDSKWVPTLGKFPLPVEVIPFGLGATRRAIEKAFAECGLSGQMAVRKDKDGHVFVTDGGHWIVDAQLGSIVDPPGLAKALSAIPGVVEHGLFIGLASSAVLAGGEGIRVIERRKPKGDQE

SEQ ID NO: 11782 - protein, 181 aa, BradyrhizobiumColbertium
MKNVLKLLPAATLAVGLAVSAAPAVAQQPAQPKAAAAPAQPKASPAAIAAAKEILQMKNATAMYAGAVPGVVEKTKIALIQQNLNYQKELNEVAPVVAQQLAGRQNEIGEGMAQIYASEFTEQELKDLATFYKSPLGKKLIEAEPRAIGLSMAFMNSWAQNFSETVMGAFRAEMRKRGKEI

SEQ ID NO: 11783 - protein, 462 aa, BradyrhizobiumColbertium
MAEFDVDLFVIGGGSGGVRAARIAAGYGARVMIAEEYRMGGTCVIRGCVPKKLFVIGSHFRQELEDAAGFGWTVPPASFDWPTLIANKDKEIARLEAAYTANVEKSGAQIVKSRAVIEDKHTVRLIENDRKITAKYILIATGGAPNHGAAIPGIEHVISSNEAFHIEKLPKRIVIQGGGYIALEFAGIFAGFGSDVTVIYRGDNILRGFDEDVRVHVRSEMEKQGITILTGCTVTKVDRHGEEFTTHLSNGSSVASDQVMFAIGRHPNVANLGLENAGVAINPANGGIAVDHFSRSSVDSIYAIGDVTHRFNLTPVAIREGHAFADTVFGKREVRVDHANIATAVFSQPEVGTVGLTETEARAQFSHVDIYKTTFRPIKATMSGRDTRVLMKLVVDGATDRVLGCHIVGDAAAEITQAVAIAVKMKATKADFDATIALHPTAAEELVTMRTPTARHVRQATG

SEQ ID NO: 11784 - protein, 379 aa, BradyrhizobiumColbertium
MNVHAAGDLKFTGLTHPNGARLRLSEQDFVAIDRDRDAKFEATYRPQALYNRANEGFHANNETFLLHEVATNLPIYRADTGPTDFHLHLPPGGFQLVLVTSGAFTFDYDGRFYNVGPGAVMLQSAIVHRQLFYTWSGLSTEENLKTPQTVVPDPISMGFSGKFLEAFITDPTTFPNPTIVGPDQIDEAETPRVAWRHPLHDRPAGAGFWLQDPLALDALYKPLGESSIKSAMPVHVRDIGIEIPSGHLVTGHVIATDPRGQSLLPKSTSVAADATFFARGEVVIYRVIRGTAEFQRKGGGSFELCAGDVVTAGKDSISLAGVGENTQILRLGLLKGVNELRSWTPTQRDEIDGLAGQIITQRDLRPLRTEGEPVGYLYG

SEQ ID NO: 11785 - protein, 73 aa, BradyrhizobiumColbertium
MAFLNSTIVEKGVNRITFCTGCGHALVPMLTTEGRAEPSCLWCEGFDARALDMAKWAESPFGKPEPARRQSLD

SEQ ID NO: 11786 - protein, 409 aa, BradyrhizobiumColbertium
MPFASDVLKRLRLDSSDGKQHVVIRSAGGGGKVTEYSFGIEEEYFLADRRSFEVAIETPNELFESANWSTGGQAMREMLQSQLEVATNVHVDVNDAREELRFLRREVAGVAAQYGFVIMACGTHPAAVWRMSQPSPKPRYEEMIEDLRSIGHRNMMCGMHVHVQLPDPEKRMAVMRAMLPHLPLFIALSASSPFWNSHKTGLKGYRLAAYSELPRTGLPELFEGKQDFDDYVGALQRSGVIPDESHIWWAMRPSMRHPTLELRAPDTCTFIDDAVAIASLYRCLTRHLYLRPHLSKEVTAVERAIAVENKWRAQRYGTDCIFASTAGPVTISELLTRVIDDVGEDAAALNCAAEVEHCRTIVERGSSAEFQLRTYRESGEDITAVSRWIATSTLSGTSLPAQRSAPAPS

SEQ ID NO: 11787 - protein, 275 aa, BradyrhizobiumColbertium
MCRWIAYRGETTSFEPYVTEPEHSLVAQSIRSLQSTAGSNGDGFGLGWYGEHPEPGLYRETRPAWSDENLRYLCRHLRSHLFFAHVRAATGTAVTRQNCHPFACGHWLFMHNGFVGSWNRLRRKVEALIPDAYYPSRLGTTDSEAVFLAMMGAGLEEDPLGATRRVLQALFSFVNEGQLRERLRFTSAIANGRDLYAFRVAVNDDANTLYFREDGDQVVVVSEPFDREEDWAEVPPNHALIARASESVKIVPFDATICSGTGQEPAVTRRIIARR

SEQ ID NO: 11788 - protein, 155 aa, BradyrhizobiumColbertium
MSDAKTSHPVEITEPPGQNEQAAAALVIVGALVAVADRRVSSVERDEVISFIRDRKLAPHVSDERLYAMFDELAERLEEPDFANVVIDTLRPVSDLPLSTHLVELSERVAAADEDVDPHEMQAIKLLRLLTLVLPRAKPLVPSAAGAEPQPALKE

SEQ ID NO: 11789 - protein, 119 aa, BradyrhizobiumColbertium
MSAALDERTDTKSATSQMAGGDPRLDKLVDRLPPRMGDTVTYLLKPSSRWLRIPSGTLLIAGGVLSILPLLGVWMLPLGLALLAEDVPSLRSSRAKVLDWIERKKPHWLDPSASGNDEK

SEQ ID NO: 11790 - protein, 212 aa, BradyrhizobiumColbertium
MTEFITAEALTALFQVVLIDLVLAGDNAVVIGLAAAGLAPDQRRRAIIVGIAAATALRILFAGVATQLLQVIGLLLAGGVLLLWVCWKMWRELREQATHAEQLAFSNGGGGDAAPAQRKTFGQAAMQIIAADVSMSLDNVLAVAGAAREHPYIMAFGLLLSVALMGVAADLLGRLLQKQRWVAYVGLAIILYVAFEMIYRGTLELAPVIASL

SEQ ID NO: 11791 - protein, 181 aa, BradyrhizobiumColbertium
MPPRLGLLAQLIFGSRWLQFPLYIGLIVAQGVYVLLFLKELWHLVAHSFEATEQQIMLVVLGLIDVVMISNLLIMVIVGGYETFVSRLNLTGHPDEPEWLSHVNASVLKIKLAMAIIGISSISLLRTFIEAGNLGTARANFTESAVMWQVLIHMTFIVSAIGIAWVDRLSDSGHRQEAGHH

SEQ ID NO: 11792 - protein, 102 aa, BradyrhizobiumColbertium
MEPICILPATGQGINMSILREIVASVAGVYALLFVCDALFGVGEARFDDAYYRASFYAPRPQEFRFAGDTPPAVRVSDAFAQFAPGEAKPNRRYSSLTTIIR

SEQ ID NO: 11793 - protein, 298 aa, BradyrhizobiumColbertium
MDAALDDVFIDEISFPATDGYALTGTLFLPRGAKRHAVLINSATAVPRKIYRGFASYLAHRGCAVLTYDYRGIGDSRLPAMVGYNRPKSLVGFKASMSDWAALDVTAAVSWMRERYNSLPLAYVGHSFGGQALGLIANNTEISRAAFVASQAATWRLMTAPEKYRVFAFMNLIGVPLAHALGYAPGWAGIGEDLPKGVFLQWAEWVSSPRYLFDSRLPELENFARFKGELRALCFSDDPWATRPSVELLARGFTAVTPEVLTVQPSDVGAKAIGHFGFFRPAHRDTLWRGVAEWIQGE

SEQ ID NO: 11794 - protein, 462 aa, BradyrhizobiumColbertium
MSERWTPESWRSKPVLQVPDYPDAKALADVEAQLATFPPLVFAGEARNLKKALGRVAAGEAFLLQGGDCAESFAEHGANNIRDFFRVLLQMAVVLTYAGAVPVVKVGRVAGQFAKPRSSPTEKVNGVELPSYRGDIVNDIAFTKEARVPDPQRQLMAYRQSAATLNLLRAFATGGYANLGSVHQWMLGFLKDSPQSRRYKELADRISDALNFMRACGLDLEAHPELRATDFYTSHEALLLGYEQAMTRVDSTTGDWYATSGHMLWIGDRTRQLDHGHVEYFRGIKNPIGLKCGPSLKADELLKLIDVLNPDNEPGRLTLIGRFGSDKIGEHLPSMVRAVKREGRVVVWSCDPMHGNTITSTSGYKTRPFDRILSEVKSFFAIHAAEGTHAGGVHLEMTGQDVTECLGGARAITDEDLNDRYHTVCDPRLNAEQSIDMAFLVAELLKQERVGKAQPMPAAAGL

SEQ ID NO: 11795 - protein, 117 aa, BradyrhizobiumColbertium
MLRIWKATINSRNGLAFAFQSEQAVREEIFALLLSVPLAWFIGATAMRTVELVCSVAFVLTVELLNTAIEKLADRLTMDHDKQIGRVKDMGSAAVGVALLMAGAFWIFAIVERLGFV

SEQ ID NO: 11796 - protein, 585 aa, BradyrhizobiumColbertium
MTERLDTFAVTLAQLNPTMGDIEGNAAKVRAARARAAADKADLVLFPELFIAGYPPEDLVQKPAFQAACRAAIESLARETADGGPAMLVGTPWLEEGRLYNACALLDGGRIASLRFKCNLPNYGVFDEKRLFSQGPAAGPVTVRGVRIGVPICEDIWLEESEDYENVVETLAETGAEIIVVPNGSPYARDKNDVRLSVAVARVTESGLPLVYLNQVCGQDELVFDGASFALNGDLSLAAQLPAFEENVVTLRFTRSGDDWRCTGPMAELPEGDKADYAACVLGLRDYVVKNGFPGVLLGISGGIDSALCAAIAVDALGADQVHGVMLPYRYTAPHSIADAGELAGHLGIRYEVLPIAEAVNGFETILSDIFKNMPPDITEENLQARTRGTLLMAITNKTGLMVVTTGNKSEMSVGYATLYGDMNGGFNPIKDIYKTQVFRLAALRNSWKPEGALGPAGEVIPPDIITRPPSAELRENQRDEDSLPPYDVLDAILERLVEREQPLDQIIAAGFDRGVVTRIDHLLNVAEYKRRQAAPGVKVTARNFGRDRRYPITNRFRDKGEALAAPDETLVSRGSRASIDAFEG

SEQ ID NO: 11797 - protein, 401 aa, BradyrhizobiumColbertium
MGRDLARMADMPEFLSLSRARFLLACTVLLSTIVLATGAFAQAGPPGPPPQPGQNGLGPNPMCVRLEGQLAALDRGGGDPAREEQIRRYQDSQAKQQAELDRVTMQAKRMGCDSSGFFSLFNGQSAQCGPVNSQIQQMRANLDQITASLERLRAGSGGFSPERDSQRRSVLTALAQNNCGPQYANAAQPQGGGNFLSNLFGGNNAGNPQAMPPSDLGPQSGTFRTVCVRTCDGAYFPISFATVPARFPDDEKTCKALCPAAEAVLYTHRNPGEDMNSAVSIGGQPYTALPTAFKFRSEFNPSCSCKAAGQTWADALKSADDKAAAEQQGDIIVTEESARKMQQQRLNKGTPANARKGATPAPTTASAPAAPPPADTGAPASGSENKPIRSVGPTFLPQQQK

SEQ ID NO: 11798 - protein, 96 aa, BradyrhizobiumColbertium
MRSLLALIFSASVLAISCASAETRLFIIADRFDQCLAKGDKCGASAARTYCQSRDFAQASSYRRVDPDEITGSVPKSGANCSHGHCDEYVAITCQR

SEQ ID NO: 11799 - protein, 460 aa, BradyrhizobiumColbertium
MELRLYDTLSREKRTFLPLDANNVRMYVCGPTVYDFAHIGNARPVIVFDVLFRLLRHIYGEAHVKYVRNITDVDDKINDRAARDFPGLPLNEAIRKVTEQTGRQFHADVDALGCLRPTVEPRATEHIGEMREIIERLIAGGFAYVAEDHVLFSPQAMNAANSSLPRYGALSKRSLDEMIAGARVDVAPYKRDATDFVLWKPSKPGEPSWPSPAGIKAEGRPGWHVECSAMAWKHLGEHFDIHGGGIDLVFPHHENEVAQSCCAFHRERMANYWMHNGFLQVESEKMSKSLGNFITIHELLADWPGEVLRLNMLKTHYRSPIDWTMKSLEESAKTLDDWYRLAADAAPGKPAASVIEPLLDDLNTPLAIAALHGLRGNDVSALAGSLRLLGFLSESAAQWEGRKQQASGVDANEVERLIAERTAARSRKDFGESDRIRDLLAAMGVAIKDSKEGTTWEIAR

SEQ ID NO: 11800 - protein, 42 aa, BradyrhizobiumColbertium
MGDRTMKRPDTPFPRHWLYYIALKIALLAGAVALVLKLYGMW

SEQ ID NO: 11801 - protein, 163 aa, BradyrhizobiumColbertium
MAQAHPKPGLRPFLPADVPVLAAIFAASIAELTGDDYSEAQQEAWMAAAEDEEFGKRLAADLTLIATLEGSPVGFASLRGNDHIHMLYVHPAVAGQGIATMLVDALEKLAGGRGAQSLSVDASDTAQGFFAKRGYTAQQRNSVTINDEWLANTTMKKALGAGQ

SEQ ID NO: 11802 - protein, 532 aa, BradyrhizobiumColbertium
MSKERLYLFDTTLRDGAQTNGVDFTLADKQVIAAMLDDLGIDYVEGGYPGANPLDSKFFATKPKLNHARFAAFGMTRRAGRSVSNDPGVAGLLEAKADAICFVAKSSAYQVRVALETTKEENLASIRDSVAAAKAAGREVMLDCEHFFDGYKEDPGFALACAKAAYEAGARWVVLCDTNGGTMPDEVEAIVREVTTHIPGDHVGIHAHNDTEQAVANSLAAVRAGARQIQGTLNGLGERCGNANLCSLIPTLKLKKGFAESFEIGVTTEKLATLVKVSRTLDDMLNRAPNRHAPYVGESAFVTKTGIHASAVLKDPQTYEHVLPELVGNHRKVLVSDQAGRSNVIAELDRAGIAYDKSDPKLTRLVEELKEREAQGYAYESANASFELLARRTLGKVPQYFEVEQFDVNVEQRYNALGERVTVALAVVKVDVAGEHLISAAEGNGPVNALDVALRKDLGKYQKYIEGLRLIDYRVRILNGGTGAVTRVLIESEDENGDRWTTVGVSPNIIDASFQALMDSVIYKLVKSGAPA

SEQ ID NO: 11803 - protein, 125 aa, BradyrhizobiumColbertium
MIDHISVGVSDLDRAAKFYEATLAALGLSRLVTRPRTIGFGKTYPEFWINLREGMARVAPESGVHICLRAKTTSEVDAFHAAALSAGGASDGSPGVRPHDRVRYYAAFVLDPDGNRIEAVTFPQE

SEQ ID NO: 11804 - protein, 204 aa, BradyrhizobiumColbertium
MVSMSTIKTVCVYCGSGPGTNPNFIEAAKALGKALAESKIRLVYGGGSLGLMGAVATSVLDHGGTVTGIIPDFLRMRENALTRVQEMVVTPDMHERKRLMFERSDAFVALPGGLGTLEELVEQLTWQQLGRHAKPVLLANVDGFWEPLFSLVAHMRETQFIRAGLSVDILKADKIEEIIPRLRAAAAQIPDSEQDLAPDVARRL

SEQ ID NO: 11805 - protein, 626 aa, BradyrhizobiumColbertium
MGTLAHLWPYIWPGDRVDLKMRVVWSLVLLLAAKLITLAVPFSFKWATDALTGANTAPVAADNWHLWVIASPLLLTASYGVMRILMAVLTQWRDGIFARVAMHAVRKLATLTFIHMHELSLRFHLERKTGGLTRVLERGREGIEVIVRMVILQLIPTIVEVSLLLAVLLWQFDWRYVVATLITVTLYMYYTYIATEWRIGIRRKMNDSDTEANTKAIDSLLNYETVKYFSAEAREAQRYDKSVERYEEASVRTYTSLAVLNTGQAVIFTLGLTATMLMCAMGVRNGTNTVGDFVLVNAMMIQLYQPLNFMGMVYREIKQAIIDIEKMFSVLGREAEIKDAPDAKPLVISAGTVRFEDVRFAYEPSRPILKGISFEVPAGKTIAIVGPSGAGKSTISRLLFRLYDVSGGKILIDGQDIRDVTQASLRASIGMVPQDTVLFNDTIRYNIRYGRWDASDAEVEEAARLAQIDHFIRMAPKGYETQVGERGLKLSGGEKQRVAIARTVLKAPPILVLDEATSALDTHTEHEIQGALDRVAKNRTSLVIAHRLSTIVGADEIIVLDQGRIAERGTHAKLLAQGGLYASMWNRQREAEAAREKLARMADSSEAPNRQPPPVDDVLTRPAAVE

SEQ ID NO: 11806 - protein, 232 aa, BradyrhizobiumColbertium
MSILDSIQRQIPPIHKEGYPFIGGFALASLLLFWLWSPLGWIGTILTVWCALFFRDPVRVTPVREGLVVSPADGRVSMITMALPPAELGLGDRPLPRISVFMSVFNCHVNRAPVAGRVDRIAYRPGLFINAELDKASEDNERNSLVITTPTARIGVVQIAGLVAKRIVCFVKEGQSIGAGERFGLIRFGSRLDVYLPVGTKALVSEGQTAIAGETILADLAGDDPSRVYRTN

SEQ ID NO: 11807 - protein, 293 aa, BradyrhizobiumColbertium
MTPYDFKYPDARRRRFRPIPVRMLVPNVITLLAICAGLTSIRLSIEGRMSLAVYAIVFAAALDGIDGRIARMIKGQSKFGAELDSLADFVNFGVAPGLMLYFWQLHELGNAGWIAAMVFAISGGLRLARFNATMDDPNKPAFAANFFTGVPAPAGAITVLLPIYIAFLDLGRTPVAVTAAYTLLIAFLMVSRLPVFSGKTKRMRVPPELVLPAFVAVIVFIALLIAYPWHVLSIGTVLYLLCLPLGYKSYRDQARALQAAAPAEGEVSSPPSAPTLSNLSEPPQDDDRPGRLH

SEQ ID NO: 11808 - protein, 239 aa, BradyrhizobiumColbertium
MTDTATGPLPASVLEALGRYDTPTICNAMEIVAPERRLIGYTTKQLVCPFPDLPPIVGYARTVTIRSVLKSSLPAEEQSKRRIQYYEYVGTGHGPRISVIQDIDGPDVGYGAFWGEVQSNVHKALGCLGVITDGSIRDIPQWAPGFQALAGSIGPSHAWVHAENFGGEVRVAGMTVRSDDLIHADQHGAIVIPLEVAAKLPEAAELCGRRETPILEIARSPDFSLEKLKAALKRSAEIH

SEQ ID NO: 11809 - protein, 97 aa, BradyrhizobiumColbertium
MLTLFSVLTALPAVLALHLLEPELVLPVFSLVLFAEAAFAVILARLIPIPDNADSITLLDLAGGFTLIGCAAAMFGEPDQAVLFLTEQGDPRPASRP

SEQ ID NO: 11810 - protein, 257 aa, BradyrhizobiumColbertium
MDIATLVGLVAGATLVSTLILMGGSFGMFYDIHAVIVIFGGSFAATMIRFPLSAMIHGVPLGAKFAFTLSRLSAHDLVDELARIAEIARKQGPVGLEKVETDEPFLAKGIRYVADGYDLDFIRDNLERDRDNFLMHLDEGSKIYRAVGDCAPAFGMIGTLLGMVQMFSNMSDPSKLGPFMATALLATLYGAVVANLICLPIADKLHGKLLDEETNRTLIIDGILMIRDSKSPTLVREMLLAYLPEKHRHTEGEPVPA

SEQ ID NO: 11811 - protein, 276 aa, BradyrhizobiumColbertium
MAKKKRGDAHGGGHGWFVTFADLMALLLAFFVMLVAFSTQDANKLKIVAGSMREAFGVQTEARYSGIVESDGLPTRPRLKNVDHIQPEDSSNTPTPDQEDREKTSGAKIKVDRNFALAAASLRQALQDMPELTEMSKHIMFEETKQGLNLEIVDQDGRSMFADGSKVPYDRTRRLVEKLAIPLKATPLRVSITGHTAAGFVPTRSDYGAFDLSADRANAVRQILEREGLPPSHIFAVSGKADTQPLFPDDPSLAANRRVTITLMREDPPLPPNLKP

SEQ ID NO: 11812 - protein, 633 aa, BradyrhizobiumColbertium
MTASITSTETQDGQPVKTGFWALTLGSIGVVFGDIGTSPLYAFHEAVKGAAHGEPVSRVIVLGVLSLILWALLIVVTAKYVLLLLRADNNGEGGTLSLMALGQRALGRRSWVLLALGVVGASMFIGDSMITPAISVLSAVQGLKLATPALEHYVVPLTVLILVLLFAVQSKGTALVASAFGPVMVVWFAVIAVMGAVHIADDPTVLAAINPYYAVQFVLSHGIIGLVTLGAVFLAVTGGEALYADLGHFGRKPIQSAWMFFVLPALLINYFGQGALVLSDPSAIEHSFYRMVPDSLVLPLVGLATAATVIASQAVITGAYSLVYQAVQLGLLPRFEVRYTSESHAGQIYLPRVNRLLLIGVMLLVLLFHTPSNLASAYGIAVSTTMVVDGIMGFVVIWKLWNWRAATAAAVIVPFVIVDLSFFSANLLKLLDGAWVPLLFGVVMAGTIWTWRKGSGILIQKTRRIEVPLDDLVGSLEKRPPHIVKGTAVFLTSDPAFVPTALLHNLKHNKVLHEHNVILTIETAHTPRVDLSERFRMEKISDKFSKVRLRFGYMEQPNVPKALAIARKQGWQFDIMSTSFFVSRRSLKASAQSGMPLWQDHLFIALSRSANDATDYFQIPTGRVVEVGTQVTI

SEQ ID NO: 11813 - protein, 629 aa, BradyrhizobiumColbertium
MANGHGEAHTTARFGALTLGSIGVVYGDIGTSPLYAFREAVMAASGAEGLPTPAAVLGVLSLILWALIIVVTLKYVVILLRADNNGEGGTLALMALAQRAVGTGGGTIVLLGIISGALFYGDAVITPALSVLSAIEGMKDVTLTFEPYIVPLTIVILVCLFAVQSRGTARVAAFFGPIMCVWFAVIAAAAVHPIIQQPQVLLALNPLHAVSFMLHHGIIGFVTLGAVFLAVTGAEALYADLGHFGKRPIQFAWLSIVLPSLALNYLGQGALVLSDPGAIVSPFFQLFPQGFFRGSMVVLAIAATVIASQAVITGAYSLTRQAIQLGLLPRFEIRHTSEAHSGQIFIPRINQLLLVAVVLLVLLFRSSSALASAYGISVTGTMVVTAMMGFVVIWKGWRWPPLAAGVLIAPFLFLDLTFLTANLLKVFEGGWMPLALGALMVILMYTWRRGSRLLFEKSRKLEFPLADLVAMLEKRPPQRVPGTAVFLTSDPLSAPTALMHSLKHYKVLHEKNVILTIETAQTPRIDPADRVRLEQISPTFSKVTLKFGFMESPNVPKALAIARKLGWQFDIMSTSFFLSRRALKPAAHSDMPRWQDRLFISLSRSANDATDYFQIPSGRVVEVGTQVAI

SEQ ID NO: 11814 - protein, 108 aa, BradyrhizobiumColbertium
MANQVQDLTPDEVSKGVAEGRYLLVDVREPNEVQAEAYPFGVVVPLSTFDPKAIPDPAGKEVVFACRSGKRSVTASLAAQAAGLPYDRHLAGGMLAWKAAGLPTRLGG

SEQ ID NO: 11815 - protein, 392 aa, BradyrhizobiumColbertium
MSKSSSLNKVFADLPVTIFEAMSQAARDNEAINLGQGFPDDPGPEDIRRAAAEASLNGYNQYPSMMGLPELRQAIATHYGHWHGLKLDPMSEVMVTSGGTEALTSAILAVVQPGDEVVCFQPVYDSYLPIIRQAGGIPRLVRLEPPHWRLNEDMLKSVFNSKTKAVLFNNPLNPSAVVYPREDLELLARYCQEFDVIAICDEVWEHVTFDEHKHIPLITIPGMRERTIKVGSAGKIFSLTGWKIGFVCAAPPLLRVAAKVHQFLTFTTAPNLQVAVAYGLGKSDDYFLSMRKDLTRSRDRLTKGLESLGFPVLKSQGTYFLTVDLSPLGLNESDTEFCWRIVKDYKVAAIPVSAFYEQDPVTSVVRFCFAKKDQTLDTALERLSDAVRGRKR

SEQ ID NO: 11816 - protein, 372 aa, BradyrhizobiumColbertium
MTKVGRSGFRLGLAITAAVSFLSQAAAAEERVVNFYNWSNYIAPGVLEAFTKETGIKVVYDTFDANETLETRLMAGKSGYDVVVPTAYFLQRQIKANIFQKLDKSKLPNLANAWPMVTKHLATYDPGNVYAANYMWGTTGIGYNVAKVKQILGPDAKIDSWDIVFKPENLAKFKDCGVHLLDSADDIFPAALNWLGLDPNSTKQADLEKAAEAVAKVRPSVRKFHSSEYLSALATGEICFVVGWSGDIMQARARAAEAKNSSGVEIGYAIPKEGAQMFFDNLAIPADAKNVNEAYELINYLYRPEVAAKNADFLSYASGNLASQKLVDPKILNDKNIYPDEATLSKLFVITAREPATQRIINRLWTKVKTGR

SEQ ID NO: 11817 - protein, 310 aa, BradyrhizobiumColbertium
MALLTASTKARAREAAKSLGGSLIGAATVGLLRTTRYFDPVKTSDFFARVVKTIGPRLREHRIGRANLAAAFPEKSPEEIEQILMGVWDNLGRVGAEFAHMDKVWDYDRDHPENSRIELSPRSIELFDRIRDDGKPALIFAAHLANWELPALAAVAHGLETAILYRRPNIASADRIIQEMRQVNMGTLIPAGRDAPLRLAQALKDGKHVAMLIDQYLTGGVEVTFFGRKTRANPMLARLLRQVECPIHGVRIIRLPGGRFRGELTEEVKPVRDAEGRIDIQGTTQAITSVVESWVREHPEQWLWLHRRWR

SEQ ID NO: 11818 - protein, 425 aa, BradyrhizobiumColbertium
MTAPRDKLGRPVVVVTGMGIMTSLGAGKADNWAKLVAGESGIRTITRFPVDGLKTTMAGTVDFVSVDPFSSTALSERMAELVTQEALEQSGIGAKADFPGPLFLAVAPVEVEWPQRRELGRAVGQQDITYDDLLRISGGGKYSAYHHRFMFGSVAAYLAETFGTKGSPISLSTACASGATSIQLGVEAIRRGETDAALCVATDGTVNPEAMVRFSLLSALSTQNDPPQAASRPFSKNRDGFVMAEGAGALVLESYEAATARGAKILGVIAGCGELTDSFHRTRSSPDGKPIIGCMNKTLADAGMTPDQIDHINAHGTATPENDKMEYNTTSAVFGELLRKIPVTSNKSMVGHTISAAGAVEAIFSLLTLEHQRIPPTINYDTPDPTILFDVVGNKARDARVTAVMSNSFGFGGQNASLILTREPA

SEQ ID NO: 11819 - protein, 401 aa, BradyrhizobiumColbertium
MTDTSVSKPGQTEVWITGIGLATSLGEGLDANWAALQEKRINVDEKGFAPYIVHPLMPVSFDSQIPKKGDQRQMEAWQRIGTYAAGLALDSAGIKGNKDILSKIDMVVAAGGGERDLNVDTGILTAEAKGANAPGFLNERLMSDLRPTLFLAQLSNLLAGNIAIVHGLGGTSRTFMGEEVAGADAARIALARIASGESDIALVGGSHNGERKDLLVLYEFGDFNLKDKFAPVWARKDHPGFALGSAGAFLVLESKAHAEARGAKPFAKLSSVVADLAKRKQPGDMAATLEKLWTQLPKRDGKGAIISGATGAEPATSEERNFLKNHAEFPVRSTGTMFGHAMETQFPLGIALAALSISRGALFPPHDSTGTEIEMQGAPTQIVVVGAGHWRGEGMALVEAV

SEQ ID NO: 11820 - protein, 156 aa, BradyrhizobiumColbertium
MQLEYFHMIDRIVDLKVDEKTIVVEAQVPKESTVFEGHFPGYPLMPGVLLIESMAQASGWLQLGVFKFERMPILAAVKEAKVRGSVFPGDLMSIEASLTHEGSGYAMTEAKIKVGGKLRANSALTFTLIPFPNADMRSHMDAIAKRVGFPQQAVSP

SEQ ID NO: 11821 - protein, 95 aa, BradyrhizobiumColbertium
MSSTFDQVATIIAETCDIPRDTITPDSHAIDDLGIDSLDFLDIAFAIDKQFGIKLPLEKWTQEVNDGKATTEQYFVLKNLCARIDELVAAKGASA

SEQ ID NO: 11822 - protein, 113 aa, BradyrhizobiumColbertium
MNNQRPISSDDEHRVLQFRPRTAPSRPAQRGSGTVQPLRIAPERLDLSRYEQPRAEPDNFRQRMLANIAALAFTIALTAIGIWLAVSIADLRRTQDCVLMGRRDCIKITTPHI

SEQ ID NO: 11823 - protein, 207 aa, BradyrhizobiumColbertium
MTNTREPRVHPVPIMSLRPTQMTVGLREVREKRKRWREHDNKEQADLLGKHMIPVVFGPDKRYYVIDHHHLGRALHDEGVKEVLVTIVGDLRMVEREAFWGVMDNRRWVYPYDAKGERRSFRDLPKSLADLKDDPFRSLAGELRRMGGFAKDTTPFSEFLWADFLRRRLSRKAVDADFDKALEIAMAAARSKDAIYLPGWCGPEDED

SEQ ID NO: 11824 - protein, 47 aa, BradyrhizobiumColbertium
MRRLIFVIAVLAVASAGISASFAAVHHARTLTFAERFAPALEAMAKR

SEQ ID NO: 11825 - protein, 55 aa, BradyrhizobiumColbertium
MSIIFRLLFIIAGAVTALFVARDALNFTIIQTFVAILLVTAIVGVGSLWSLRRKT

SEQ ID NO: 11826 - protein, 811 aa, BradyrhizobiumColbertium
MLREPMLALLLCGGLVYLLLGDLREALLLLVFGAISVVITIVQETRTERVLEALRELTSPRALVVRDGERRRIAGREVVRGDLLVLSEGDRVPADAMLVSARDLAVDESLLTGESVPVRKQLAKMPPAEAASTDHRPGGDDQPFVYSGSLVVRGEGLAEVEATGPRSEIGKIGLSLHGLRPEPPRLQQQTARLVRLCFLGGVAISLAAVLLYGMLRGDWLQALLGGIAIGMSMLPEEFAVVLTVFMAMGAWRISKARVLTRRAAAIEVLGSATVLCTDKTGTLTQNRMSVAELRLRDGVNMRAGSSQAAPVRTEFFELARCSVLASSPEPFDPMEKALHAFVHAGLPQDDEAADARTLVRSYGLRPELLAMTQVWRWSHQKGLVAAAKGAPEAIAHLCKLDGADQEAMRDAVAVMAKNGLRVLGVAAATYHGEDLPPSQEGFAFRFIGLVGLADPLRPGVPEAVGECRSAGIRVVMITGDYPATAMAIAGQAGLHVNEVVTGEQIKLADDGELDALVRNVNVFARVLPEQKLRIVQALKRCGEIVAMTGDGVNDAPSLKAAHIGIAMGGRGTDVAREASSIVLLDDDFSSIVASIRLGRRIYDNLRKAMAFIFAVHVPIAGLALLPLVFGLPLVLGPVHIAFLELIIDPVCSLVFEAEREERDVMQRPPRRADAELFSWPLIGWSVLQGAMAFALIAAIFVGAIRSGLPPDEARTIAFITLVVCVIALVLVNRSFSASFLSAFFRPNPALLWIFLSIAFVLATALFWPPASGLFRFGPLHLVDLMITLGAGLLVLTALELLKPLWGRRLRF

SEQ ID NO: 11827 - protein, 167 aa, BradyrhizobiumColbertium
MTELDWPEILLRLGSATLAGSAIGLNRDLHGKPIGLKTLGIVGLSTATVVLLAVAFAEPGGITDAASRVIQGILTGIGFLGAGVIVHESDRFRVRGLTSAACTFLAACVGIACGAGQWKIVLVALAFTFVLLTIGRRVERWLHRALGGKEDPQRTETLPQTDSRGSG

SEQ ID NO: 11828 - protein, 193 aa, BradyrhizobiumColbertium
MTKTAPQRFPAPALDTLPDDIRTRLLAVQEKSGFVPNVFLTLAYRPDEFRAFFAYHDALMEKDGGLTKAEREMIVVATSAANQCQYCVIAHGAILRIRAKNPLIADQVAVNYRKADITPRQKAMLDFAMKVSTEAQRISDDDFAALAPHGFSNDDIWDIAAISAFFALSNRLANFTGMRPNDEFYLMGRLPKT

SEQ ID NO: 11829 - protein, 555 aa, BradyrhizobiumColbertium
MPISEVRATVGRFVSIRCASSVIVAMITEVSCENLSSSDGYIAIASVDLLGEILNAADKAKFQRGVTNYPTIGDAVDLITSQELRTIYAPTGSDQINVGFLQQDRSVVAYVDVEEMLSKHFAVLGSTGVGKSTGVSLLLNEILKARPNLRIFLLDVHNEYGRCFGDRALVLNPRNLKLPFWLFNFEEIVDVLFGGRAGVPEELDILAEVIPLAKGVYTQYQNADRIGLKRIDPKQIGYTVDTPVPYRLVDLLSLIDERMGKLENRSSRIIYHKLISRIEAVRNDPRYAFMFDNANVGGDTMAEVISHLFRLPANGKPMTVMQLAGFPAEVIDSVVSVLCRMAFDFGLWSDGVSPLLFVCEEAHRYASADRNIGFGPTRKAVSRIAKEGRKYGVYLGLITQRPAELDATIISQCNTLFTMRLANDRDQALLRAAVSDAAANLLSFVPSLGTREVLAFGEGVALPTRLRFKEVPPHQLPRGEATISSVPSVTSGHDMHFVSAVLERWRGATSQRDVPNDPVFSAPPAKTMSSVEAPMLQPSMGLDPDRFSLLKKPLR

SEQ ID NO: 11830 - protein, 322 aa, BradyrhizobiumColbertium
MQPEPILDLANLGHMELLTPKPDESLKFFVDVMGMTVSGQKGESVYLRGWDDYERYSLKLTASKTSGMGHMALRARSQQALERRVAALKGSGFDIGWIDGDMGQGPTFRCRDPDGHIVELYYETEWYQAPPELKPALKNQAQRFPARGVNVRRLDHLNCLAVDIKANREFFENYLGCRLTEQIVLNDGREAAMWLTMSNKSYDFAYSLDHSGVPGRFHHVTYALDSREEILRAADIFLENGVHIETGPHKHAIQQTFFLYVYEPGGNRVEVANAGARLILAPDWKPIVWTEEERKKGQAWGLKTIESFHTHGTPPVEVEKHA

SEQ ID NO: 11831 - protein, 1174 aa, BradyrhizobiumColbertium
MASPVSNGAERPSGSLVVARTVDEVTSETFVRITADGSVTAYNGHVDLGTGIRTALGQIVAEELDVSFARVVIVLGDTSVVPNQGATIASETIQITAVPLRRAAAQARHFLIARAAERLELPAADLRIEDGLVRGRDNRSISYGELIGDETIRLELADDVQVKPADDYSIVGQSVPRVDLPAKATGELTFVHDIRVPGMLHGRVVRPPYAGVDAGPFVGTSLLAVDESSVRGIPGLVAVVRIGDFVGVVAEREEQAIRAAEQLKVSWKPTPTLTDLADVETALRANPSTPRTLIDKGDVDQAIAGAAKPMQRTYVWPYQMHASIGPSCAVADFQEGNIRVWSGTQNPHVLRGDLALLIERPESEIEVIRLEAAGCYGRNCADDVTADALLLSRAVGRPVRVQLTREQEHAWEPKGTAQLIDVNGGLDAGGGIAGYDLATRYPSNAAPTLALLLTGRISPEPAVLQMGDRTAIPPYDYDHMRVVAHDMPPIVRASWIRGVSALPNTFAHESYIDEAATEAGVDPIEYRLRYLKDPRAIDLVHAVAERAGWKPRPVREEKDGEVVHGRGFAYALYVHSKFPGYGAAWSAWVADVAVNKTTGDVSVTRVVAGQDSGLMINPDGVRHQIQGNVIQSTSRALMEEVSFERGAVAAREWGAYPIIPFPDVPKIDVLMLPRQDQPPLGVGESASVPSAAAIANAIFDATGVRFREPPFTPERILKGLHGDRPATPQALPAPAAPPPSRIWTNPFAKRAGVFAAVAALCTAAIGIGAALLPGRAIAPISRPDASVYSAATIARGQQLAALGNCAECHTSLGGAVNAGGRALETPFGTIYATNITPDVETGIGAWSYPAFERAMRDGLHRDGRQLYPAFPYTHFAKTSDADMQALYAYLMAQPSVRATPPANALKFPFNLRPLLAGWNALFHRTREFKPDPAKSEAWNRGAYLIEGLGHCSACHSPRNALGAEQREAYLAGGFAEGWEAPPLTSLSHAPIPWSEDELFAYLRTGHSRYHGVAAGPMAPIVKDLKALPDQDIRAMAVYLNSFNDRAMGTQDALAAKLESGTQVAVAASPGARLYQGACAVCHEVGGLPLFGTRPSLALNSNLHSRTADNLVQVILHGIVEPVSSDLGYMPAFRNSMSDTQVEELVTFLRRQFAPDKPAWTNVRETIARLRSSAH

SEQ ID NO: 11832 - protein, 160 aa, BradyrhizobiumColbertium
MTQASIRLTVNGRIHEVTAERQTPLLYVLRNELALNGPKYGCGLGECGTCTVLIDGAAARSCVIPVSGCEGRDIVTLEGLGTRERPDLVQQAFIDEQAAQCGYCLNGMIMTTKALLAINPRPTEQEALAALRYNLCRCGTHVEILRAVMRASGQIVEAAD

SEQ ID NO: 11833 - protein, 490 aa, BradyrhizobiumColbertium
MSASDMVTETTSAVIDKIRCDACPVMCYIKPGAAGACDRYANHDGKLVRVDPHVILERTVSHGGKLVPFSRTEDWDGKIVHEPSTFVTAIGAGTTYPDYKPAPFIVSAEVDGVDMVTVVTEGIFSYCGVKVKIDTDRYLGPETATVRAQGEAVGHVTTSEYGSQMLSLGGVHHLTGGSKKEGRITCDTLMDLANCKAVELTIDGGATVVVQAGQPPIVNGVKEERMRVGCGSATIGMFAKQWHGKVDEVVVVDDHITGVLSEHQAGKLLDIADTGIKMKGRRSTPGRYFQVADPGTGWGGTDISDPLSILGPFDPKEAKPGLTMLMVSTTGEHSSYYVLDDALRPVETEMPADLKFSVERIQENCEPALCTVLFMAGAGGSLRAGVTDNPVRLTRSVKDALTRVTSGGAPVYVWPGGGITYMVDVTQMPSGAFGYVPTPALVAPIEFTLKLSDYAALGGHMDYVKPLAEVQNGDDIRQLPWHHPIPGRRT

SEQ ID NO: 11834 - protein, 298 aa, BradyrhizobiumColbertium
MMRRPQIALLSDGRRLHLQDGPIDLIAEARGAAGEVRSAYEAAVHRFTGLLDELCAELADLRMAAADRTSLQGVVARRMHSAVAPYAADCFITPMAAVAGSVAEEILAAMLRAATLDRAYVNNGGDIALHLGGGESFSVGFMDRPDRDGVMRTMRIEADDPVRGIATSGRRGRSFSLGIADAVTVLAATASRADAAATVIANAVDLPGHRAVIRRPANELQPDSDLGPRLVTRDVGELSHDDVAVALESGAECARQLFDRGLIEGAVLQLCGDMLVIGPKDIERQGSLPRQPENAVHV

SEQ ID NO: 11835 - protein, 194 aa, BradyrhizobiumColbertium
MSAIIRKIVTVVEETQMEMGRQVSPPTRRAAAIAVIENPFAGKYVEDLSPLIAIGEELGELLSKRAVAALGIDGAKAQSYGKAAAVGENGELEHAAAILHPKMGAPVRKVLGKGAALIPSSKKRSGPGTTLDIPLGHKDAAFVRSHFDGMEVQINDAPRANEIMVAVAVTDSGRPLPRVGGLTVAEIKGEDGLR

SEQ ID NO: 11836 - protein, 400 aa, BradyrhizobiumColbertium
MRARNIIVGAAFAFLAGGMAHSALAQDIKIGEINSYSLLPAFTEPYRKGWQLAVEEVNAAGGINGKKLVVISKDDGGKPADAQTAANELVSSEGVAMLAGTFLSNIGLAVSDFANQKKVFFLAAEPLTDAITWSKGNKYTFRLRPSNYMQAAMLVEAAAKLPAKRWATIAPNYEYGQSAVAVFKKLMSEKRPDIQWVDEQWPPQGKIDAGPVVQAVAAANPEAILNVTFGADLVKFVREGNTRGLFKGREVVSFLTGEPEYLDPLKDETPEGWIVTGYPWYSIKTPEHDAFLKAYQAKYNDYPRLGSIVGYQTIKAAAAILAKAGSTDPEKMIAAAEGLSMPSPFGEITFRKIDHQSTLGAFVGKTALKDGKGVMVDSAYKKGGDYLPSDAEVAKLRPKD

SEQ ID NO: 11837 - protein, 629 aa, BradyrhizobiumColbertium
MAFYVVQFLTGLASAASLFLVASGLSIIFGVTRIVNFAHGAFYMIGAYIAFSLTERLSGAFGFWGGILLAALAVAVIGVIVEMVLLRRIYHAPELFQLLATFGLTLMVEDLVVLIWGPDDLVGRRAPGFRGAIDFFGQNVPTYDLFLIVLGPVVLGILWLLFQRTRWGVLVRAATQDRDMVAALGVNQKWLFTSVFAVGVFLAALGGALQIPRDAVHHAMDLRIIVEVFVVVVIGGLGSIVGAFVAAVLVSELNAFGILIFPKISIILVFLVMAVVLIVRPWGLFGKPEAAARKTPGLTVNPWRPLTSNERLMALAALVVAATLPLFAGNYLLTVGSEIAIFVIFAVSLHFLMSVGGLASFGHAAYFGLGAYGIAFLAKMAGLPMIVCLLLGPLLGCMGAAVFGFFAVQLSGVYFAMLTLAFAQIVWSIAFQWVEVTGGDNGILGLWPSSWAASPSHFYWLALGVAALVTVALRAMVFSPFGYALRATRDSLLRSEAIGIDAKRIQWTAFVIAGTTAGIGGALFAYLKGSVFPDNLGISLSVDALVMVLLGGVETVSGAVIGAIVYKALNIWLVSQTDLSKLVLGGFIVLIVVVFPKGIVGMLEMLAQRRRKASPPGSPLLAKPIESAE

SEQ ID NO: 11838 - protein, 263 aa, BradyrhizobiumColbertium
MNVAPPLLAVEGLTKSYGGIHAVRGVSFSLRAGEILALIGPNGAGKSTCFDMLNGQNIPDSGHVRLFGEEITGRKPREVWRLGVGRTFQITATFATMTVRENVQVALISHGKQLFNLFGSAPKFDRGEAGRLLELVGMGGYADRPCGELAYGDLKRLELAVALANQPKLLLMDEPTAGMAPRERVDLMRLTASIAREKSIGVLFTEHDMDVVFEHADRIIVLNRGTLIAEGTPAEVRGNPQVQAVYLGEGLVYDARHREGASA

SEQ ID NO: 11839 - protein, 234 aa, BradyrhizobiumColbertium
MKLTVQDLNSHYGPAHILFDVGFEVGEGEVVALLGRNGAGKSTTFRSIVGLVAQRSGRITFEGKDVSAKPTHEIVREGLGYVPEERRIFTDLTVEENLEVGRQPRRPNAPHWTREKLFALFPNLGEMKNRPGGRMSGGEQQMLTIARTLMGNPSLVLLDEPSEGLSPKIVEQMVDAILTMKKEGVSIVVSEQNLHFARLISDRAYIIERGRICFGGTMAELDARPDIRDAHLSL

SEQ ID NO: 11840 - protein, 151 aa, BradyrhizobiumColbertium
MARSVTAKKSVKPARPPYVLDEQVGFILRQVWQRHSSIFARDIGTNLTPTQWAALSKLAETGPCSQNQLGRLTAMDVATIKGVIDRLTARGLTETSQDPDDGRRLLVSLTRAGQQLAEKLAPNALAISRETLAPLEPKERDTLMALLNKLR

SEQ ID NO: 11841 - protein, 129 aa, BradyrhizobiumColbertium
MRAANWLAMALCLGASLAGACGPVLAAQAYEGFWASTKKDCRDDDSPNRMSIEGGNRLYWYETRCLASRITADGKLSWKMRLACEGEGEKFRSSPRVSIAADGRLVMDNGPVGRAKRQTYVRCELPKRR

SEQ ID NO: 11842 - protein, 398 aa, BradyrhizobiumColbertium
MAHDAPQATGPSKLVIRNIGLILSGALEKPILDGDTIVAENGKITAIGRYKDVNTEGATTIVDAQGTTVAPGLIDSHVHPVAGDWTPRQNQINWIDSYLHGGVTTMISAGEVHMPGRPRDVVGLKAMAVFAQRAFWTLRPGGVKVHAGAPVIECEMVEEDFKEMAANGVKLLGEVGLGGVKDGPTARKMVGWARKYGIQSTIHTGGPSIPGSGLIDKDVVLEADTDVVGHINGGHTALPDDQIRCICEGCKRGLELVHNGNERSALFTLRTAREMGDLHRVILGTDAPAGSGVQPLGILRMVSMLSSLGELPAEIAFCLATGNTARMRQLDCGLIEVGRSADFVIMDKAQHSPGKNILESVQLGDLPGIGMTIIDGIVRTQRSRNTPPAGKVPEVVAK

SEQ ID NO: 11843 - protein, 257 aa, BradyrhizobiumColbertium
MSNFNQESVLSVHHWTDTLFSFKTTRSPTFRFRNGEFTMIGLKVGEKPLLRAYSVASANYEETLEFFSIKVPDGPLTSRLQHLKEGDEIIVSRKATGTLVIDNLEEGRNLYLIGTGTGLAPFLSVIKDPETYERFEKVVLLHGCRHVKELAYGEMITETLPKDELIGEYIRNQLIYYPTVTRDPFRNRGRITDLITSGKLFDDIGLPVLEAARDRVMICGSPALVADTRVLLGERGFVEGNHGEPAQFVVEKAFAER

SEQ ID NO: 11844 - protein, 107 aa, BradyrhizobiumColbertium
MVADSDSNIAWHRVQLKKNRAELKALETARFTMGEIASSKRNGQTQKSIAELKRKILQSERVVADHDKRTRRPLATDLQSLSNGSWSHWDAYTQQQRKTGQRSPGRG

SEQ ID NO: 11845 - protein, 404 aa, BradyrhizobiumColbertium
MRIDFTSEAYLREPPKAIAKLRMSGPVVATRFPLIGDVWISTTHDATAQILKDSATFTLRREDGDVAGLRWWMPRYVRTIANNMLTMDEPDHKRLRSIVDEAFRRRAIVAMEPRIRAIADTLADELFAAGSPADLVQRYARILPLAVISELLGLPLADRPKFIAWANAMSSLTNVFGFFRLLFAFRKMRAYLERQLQIARAEGGEGLIAELIQVEREGGQISPDEMVSMVFLLLAAGSETTTHLISGSAYELLRNSGLRDWLEQDWSRIGLAVEEFLRFVSPVQFSKPRYVRRDVEIEGVRLKRGDRVMVMLAAANMDPAMHERPERLDLERKPNRHISFGTGIHFCLGHQLARIETACALEALFVRWPKLGLAVDPAGVRWRKRPGLRAVAMLPVTAESRGTR

SEQ ID NO: 11846 - protein, 61 aa, BradyrhizobiumColbertium
MASKMPPVPPDNQSRKGTGDSKQMSADQLPQGQQRAQNPDQQGQQGNIQQNTTNQGYQQDR

SEQ ID NO: 11847 - protein, 75 aa, BradyrhizobiumColbertium
MTNKQPKLYAPSEKDLRENPMIGGSKGATMAGASAEDLEDALGANTIEGDVENDVNAAGGIDKDVARSGSHRRRR

SEQ ID NO: 11848 - protein, 87 aa, BradyrhizobiumColbertium
MQGNKTHEQQLRILERKSDVPDQRELDQAIGRNPRDDSVHHANRQARQSEFPVSRGGLNQESDHNKHNDPGQSGHKPPRPTTAQEKH

SEQ ID NO: 11849 - protein, 66 aa, BradyrhizobiumColbertium
MHGKGDGTGALTDVPKEMIGDNMVLSNRDKKQHSDIRGMDGKTIQTEQYQDHSANRLDDEPGTDQT

SEQ ID NO: 11850 - protein, 392 aa, BradyrhizobiumColbertium
MSSLGAIVTQAIVHHYGRDAFLQRLSHPFWFQSFGAVMGMDWHSSGITTSVIGALKRGLGPLQDELGIYVCGGRGQHSRKTPDELMQLGNRVGFDGAKLTRASRLVAKVDSAAVQDGFDLYLHGFFVTADGKWTVVQQGMNGDKRQARRYHWHSEALKSFVDTPHSAIDGPQQGEIVNLTDHRADISRAAQLDLLGGLGPDRIVSEFERLIGTEPKPAQATLPHLIMPAHHDVRPKDVFARRLHGTLAAAAERGPVDFPELLLTPGVGARTVRSLAMVAEVVHGAPYRFKDPARFSLAHGGKDRHPYPVPIKVYDETIRVLKRAIQNARLGREEEIQAIKRLDDQARRLERTAQGPSVDAFIVGERAVSPDLDGRSVFGWERDLAATKKRTG

SEQ ID NO: 11851 - protein, 45 aa, BradyrhizobiumColbertium
MERKIGAAGTSSHGRLKLAPRRRLRQWNAALHETGERSQPLGVER

SEQ ID NO: 11852 - protein, 374 aa, BradyrhizobiumColbertium
MADIDTMFGWIPSWFVGLSLVVGAVLLALVAYRVARWLLKRAFGTRLPILSVFIDRTAGPAQMALCLAAVALVLPLAPLDDAIRTPLTRLFVVAFIALIGWISIRIVDMSAARYLQNFRVVTENFIARKHVTQVRVFKRVTDTIIVVITVSTALMTFDSVRQYGVSLFASAGAAGIIVGLAARPLLSNLIAGLQIAITQPIRIEDAVIIENEWGWVEDIASTYVVIRLWDWRRMVVPLSYFIEKPFQNWTRDTASLIGVIALHVDYRADVARIRQWLEEVVKKSKLWDGEVVNLQVVDADARTIELRALVSARNAPQSWDLRCEIREKLVAFIRDEMPEALPRERAILIPSGDDDADYLRRPAPPETMRARPDN

SEQ ID NO: 11853 - protein, 236 aa, BradyrhizobiumColbertium
MMRKPTSKETSRKPNMREAILVAAEELFATNGFNAVSVRDIAQAAGANPGSVTYHFKTKDGLLLEIYRRHCAPMNLRRSELLAAAKRVRDLQDRLEAIVRAYVVPAFTSGSDLAGGGARFTRLRAVMSAEGNEVARKIIAQTFDDTSHAFIDAVHESLPHIPRTDIVWRSHFLLGALYYSLVTPERVSRLSRGEADGSDAASAIEQLVQASVAAFQAPSLDQAAPARRRPAVANKT

SEQ ID NO: 11854 - protein, 294 aa, BradyrhizobiumColbertium
MTMMYTPTIPPPDPNTRTPKFGLPKLSCDAHCHIFGPGTKYPYAPDRSYTPPDAPLEDFRALHAKLGVERAVIVNATVHGTDNRVALDAVARSDGAYRAVANIDDTITERGLRELHEGGFRGCRFNFVRHLGSVPERGVFDRVIAMAAPLGWHVDLHFDAIDLPEYADMLARLPLRYTIDHMGRVQASEGLGQVPFRTLIELMQRDEKCWIKICGAERVSSAGPPFTDAVPFARKIIETAPDRVIWGTDWPHPNVKAMPNDGDLVDLIPMFAPEPELQQKILVDNPARLFEFKA

SEQ ID NO: 11855 - protein, 237 aa, BradyrhizobiumColbertium
MKTGLVITAHPGDFVWRAGGAIALHAKKGYRMKIVCLSFGERGESQFAWKEKGATLDSVKAGRKDEAERAAKLLGAEIEFFDCGDYPLRLTEAHFDRMVDIYRELNPSFVLTHALEDPYNFDHPNAAHFAQETRVVAQAMGHKPGAQYKYSAPPVFLFEPHQPEQCNYKPDLLLKIDEVWKEKYEAFQILAAQKHLWGYYERVALNRGIQGSRNTGVPMTYGEAYQRLFPTVAEELA

SEQ ID NO: 11856 - protein, 227 aa, BradyrhizobiumColbertium
MKPVVVRNIKRADPAGMAEYGVSTVHEAYERLGLMKPYLRPVWPGAAIAGPAVTVLAQPGDNWMIHVAVEQCRKGDILVVGCTTDNTDGMFGELLATSLRARGVQGLIIDAGCRDVRALHEMRFPVWSRAVSAKGTVKATLGSVNVPVVCAGVSVDPGDIVVADDDGVVVVPKRYAAEVAEKAGKRNAEEGRKRKRLASGELGLDMYNMREALEKAGLVYVDNSGDV

SEQ ID NO: 11857 - protein, 289 aa, BradyrhizobiumColbertium
MDRLKLKAVLGGHAHVKAAKSGALRSDLFDLEFIEYTPTNTAFKPMVREQAFDVCEMAIVTYLMAKAHGKALVLLPATMLGRFQHSYALYNPAQGTLGPSALEGKRVGIRSFTTTTGAWIRGILANDYGVNLDNIRWVTFEDPHVAEYVDTAERAPKDKKILQMLLDGELDAVLGETSDDPRLKALFPDPAAEAAKWYARRGVVPVNHLVVVTEGLAKSRPDVVAGVYDLLKRSKEQTGPAATPDLIPFGIEANRQPLELIIDYAFQQALIPRRYAVEELFDETIRGMN

SEQ ID NO: 11858 - protein, 104 aa, BradyrhizobiumColbertium
MFSAFRSIDHSAQIRTPTDAAEKRLDGIGHVLSDLDIAAIKTQDDVNRALWTLDAASKCVRAVLAEFRTQPATEQLVRKSRNLIDLIERARDEVVSFQARAILS

SEQ ID NO: 11859 - protein, 413 aa, BradyrhizobiumColbertium
MTAQAPFDLIFRNALLRSSAAPADIGVKSGRIAAIAPRLACEAVEVDLGGHLTLPGFVDTHIHLDKACLLGRCGHDHGSVSEAIRAVAGMKKNFTVDDVYARGAKVLERAIVHGTTRMRTHVEIDPRIGLRGFEAVKALKDAYAWAIALELCVFPQEGLTNDPGAEELLIQALRNGGEAIGGCPYMDTEPHAHLARIFDLAEEFDVDVDLHLDFDLDPSWWHLDEVCRQTERRNYGGRVAIGHATKLSALPPERMKAAAVQLARAGVAVTVLPATDLYLMGREATHNAPRGLTLAHKLAADGVVCSVATNNVLNPFTPFGDASLLRMANFYANVAHASVSDFDICLDLVTELPARLMNLRDYGIEVGNPADLIVLDTTDGRFAIAELPDILMGFKSGRQTFARQRPTLLSPKN

SEQ ID NO: 11860 - protein, 138 aa, BradyrhizobiumColbertium
MSVAANTERPMTDAEIVEAYLTASMIPDPDAAAAYMKPGTLITFTGGREFDHPRGPTGFNAKRYRWVKKKMERFDVCPGANETVVYSIGTLYGEWMDGTPFEGNRYVDRFVVRGGQIVKMDVWNDSAERILVQRGIEA

SEQ ID NO: 11861 - protein, 252 aa, BradyrhizobiumColbertium
MPARASSKTSEASDKVSVICRALRRAIIEQALEPGAKLPEDALGERFGVSRTIARHALGQLAAEGLVELRRNRIAVVATPSWQEARDAFDIRIELERLVVRQLAGKLTRAQIAELNAHVDAEDRARGGTDAVSIRLATEFHILLAHMTNSPILVRYVSEVAYRCCLTLSLYSRPHSTECAINEHRAIIAALAKGDEAKVMELMHHHLDSVANRALVAPTPQRGRDLLDILAPYADEVTSDRVVKLPKIARRG

SEQ ID NO: 11862 - protein, 258 aa, BradyrhizobiumColbertium
MTFGRGDRAVPALSKTTLKIADGEFVALVGPSGCGKSTILRLVSGLVQPSSGVVIVGGREVAARAVRVGMAFQNPTMLPWMTIERNIMLPLKIVEPFRSNFRRLRKTAFRDKANALLEQVGLKGFGGRYPWQLSGGMLQRANLCRALIHEPRMLLLDEPFGALDQFTREELWAILQNLWMTHKPTVLLVTHDLREAGFLASRICVMSARPGRILDDSRVDFARPRTVAMTFEPDFVALNQKLRAFIEDARSAAQQGAG

SEQ ID NO: 11863 - protein, 258 aa, BradyrhizobiumColbertium
MFGIDVRQKAWSAGLIVLFFVAWELFCLMTGMSDLVLPRPSQVFTTLIDRFPVLWPHIVQTLATTMFGFVLGVALGVALGAIIGVSKTAYDTCYPLLIGFSSIPKVAVVPIFVLWFGSGTVPAVLTALSICFFPIVVNIATGLATTEPELEDVLKALGASKFDILWNVGLPRTMPFFFASLKVAISYAFVGAVLSETVASNRGIGNVMMTASSNFNVPLVFAGLFVLAGLGVALYVVFSLIEGQVTGWATRKNDVIAT

SEQ ID NO: 11864 - protein, 341 aa, BradyrhizobiumColbertium
MLRKATAALLGLALSTGAVMAQETTIKFTLGWKTQGSDAAFFYAKDNGFFKEEGLNVVIDQGEGSGATVTRIMSGAYDAGFGDVNAIIQNASTKPQEAPVMVYMMWNQPPFAIVAKKSSGINTIKDFEGRTLGGAQGTPTTRLLPVFTRKNGLDGEKIKISNMAPNLQEPMLIKGDIDAALVFNITSYFNLVLNRQDPDKDFKWFSFGEYGLDLYSNGVMVSRKLITSNPKAVAGLVRAINKGAIAIAKDQNAGMKAALNYDNLINADVEKRRLQYSFEKLIVSPEMKEIGIGDIKDDRMTRAIGIVVEGYQLARAPTPAEVFSREFLPPRAERELVYTAN

SEQ ID NO: 11865 - protein, 477 aa, BradyrhizobiumColbertium
MATEISATSLFRGSDRDIGENVVLRHDGGVITEIVEGAGRDPRSFLIPAFVNAHDHARATASSFGAVGMPLESWILRTALGTPVDPYLTAASALARSAKAGCAAMMVHYTRPSGTMPLVDEAKAIAKAASDVGIRIAFALAVRDQNPIVYGDAEPVLSGLTRDDRKTIDDLFVRPPVSPKAYIELTDAIAAAIGSPMVDVQLGPAGVQWCSKPLLEAVAENSARTGRRIHMHLLETVYQRAWADQHFPDMVRWLRDIGFLSERLTLAHCIHARPDELEMIASSGARIVTNFSSNMHLRSGLAPIAAAHECGCAIAVGVDGLALDEDDDILREMRLVQMVHGGLGFKATWTPAELFSIAIRNGRRATGAPGNGELVVGNPADYVVIDLDRLDRDQIMPVDPMALLFARGNASLVKDVVVAGKAIVREGTCTGVDLPAIEREFRDLYRANVGKLTNFQRMWPRLSERLGGWFEQQLTCQ

SEQ ID NO: 11866 - protein, 403 aa, BradyrhizobiumColbertium
MLYPMSPKVVELKRKLESFMDRHIYPNEERFYREAEELGPWKVYPVVEELKPLARAEGLWNLFLPESSHGAGLTNLEYAPLCEVMGRSHLAPEVFNCSAPDTGNMEVLERYGTEKDKERWLKPLLAGEIRSCFAMTEPAVASSDATNIESSIVRDGDHYVINGRKWYTTNATDPRCKICIFMGKTDPDNPDRHKQQSMILVPLETPGIEVKRPLPVFGFYGVPDRASEVVFTNVRVPKENMLLGEGRGFEIAQGRLGPGRIHHCMRLIGLAERTLEKMCRRVRSRVAFGKPVSEQTVTQERIAEARIMIEQARLLTLNAAHAMDTVGNKVAKAEIAMIKVAVPNMACQIIDWAIQAHGGGGTSNDFGLTQAYATARLLRLADGPDEVHRNQIARLELKKYSNA

SEQ ID NO: 11867 - protein, 75 aa, BradyrhizobiumColbertium
MAELIFERLAGADIAYARNDQPGVLDHQIDRKDGAAYFFFGRGHELERPASGILGFRGDTYVGRQTISQSYDVRH

SEQ ID NO: 11868 - protein, 190 aa, BradyrhizobiumColbertium
MLTGSVVPGKLEFEIASLAGVAMFSALQRLIGVVVQQLDDQNSMMSPPALRELEEAIIVQLIYAARHNFSAALEREFRDTDSAAVRRVEDYIEANWNSQVTIEDLVAVAGVSARTLFRTFERARGRSPMAHVKMIRLERARLLLSGPDHQTSVTGIAFACGFSNLGQFARDYQVTFGELPSVTLRKSKAR

SEQ ID NO: 11869 - protein, 124 aa, BradyrhizobiumColbertium
MSFGNNAGPIRLNYDGLGTARRDPVAAQRHLKTGVVNFREMRRYGGTAACEAERDVRQLDEVGVNLQDRWISQLQQASAIDLGERTLELGGLPRANSWMAVQRMLSRSRSDGFAIGKKGQGFQH

SEQ ID NO: 11870 - protein, 226 aa, BradyrhizobiumColbertium
MIDAVDLARDERSIRNAIKNFTASSGFDRYAYIHVHADDVTAFTDYPVGWQNLYFERHYATIDPVVTTAKRGMRMFAWSAEDHNVRKSSREIKQFYSEAIDFGIRSGISIPIRTSYGRTAMITLASDRQKIEAPAWDPMQAALALSYVHTHLSLASVSLKTGDVTLSTQEATSLSWSSHGKSMNVIAELLGIRPRTVQFYLDNARDKLGASTLQQAVRIAMEKKLI

SEQ ID NO: 11871 - protein, 69 aa, BradyrhizobiumColbertium
MIAHPKFGHCLVYVVQQLPGRNLGHVTQTIDHFVQDKQTRAVFCIGMLMDTLKLCPALRTTVVIDLRGD

SEQ ID NO: 11872 - protein, 44 aa, BradyrhizobiumColbertium
MAHSAEKVFDISIELGSGRFIVVVRCHDFHMRLVRGTPPLTIIP

SEQ ID NO: 11873 - protein, 67 aa, BradyrhizobiumColbertium
MFDQPDPGALPPQKGASDGRNQPVKADDAQKPASAADSAELPGKPPDDPNKAGIRIDLTGIGVGKPK

SEQ ID NO: 11874 - protein, 112 aa, BradyrhizobiumColbertium
MAWILAVEHFGIDWARPAVAAPRTDTLTATFPICGSARRVTCVVDGDTFWLDSVKIRVADIDAPELRPPCCETERARGESAKYRLQELLNSGAFSLVSGVRDEDRYGRKLRR

SEQ ID NO: 11875 - protein, 133 aa, BradyrhizobiumColbertium
MPNRIPLDPKLPKTFDTTPNEARSKAQLDQWWDRPYGITLPDGRIEVRCLNGGAWDRSTHLGVAENYDAACALAEEKQAEWLKFRERPCTCLDVGQILVIRQPQRPDEAPQQLAAFPTVEEATEYLRVNFPGA

SEQ ID NO: 11876 - protein, 449 aa, BradyrhizobiumColbertium
MPSRIADYVASDASVRVVDAFVDGLELSGLGFVRAVAASTGRPGYDPRDLLKLYVWGYFNEVRSSRRLERSCRRDVEAMWLLRRLAPDFKTIADFRRDNGPAIIGACRAFVLVCRDAGLFAARLVALDGSKFRAAASPKKVIGRREIAEEQARLDSRIAAYLSGLDEADTREADDEPGAVPAALAALRVRRAELARMAGKLETQERDMLVEGEEDARPMRGGSGHKPPCYNVQTAVDADTGLIVHHDVTDEPTDRRQLHPMASATRESLDLDTLTVVADKGFDNGEHASACERDGIVACVPSQRSINNQGDGTLFDRTAFIYEPEADTFTCPAGRTLVRKQLHRKKRNVTYASQGCSGCVLKPRCTTAERRFVKRHLDDDALNRMDARATPEMMKARRCAVEHPFGTIKRMTAGGRFLTRNLKGTRTEMALSVLAYNILRAINIKTAAA

SEQ ID NO: 11877 - protein, 337 aa, BradyrhizobiumColbertium
MPEAAEALVLDLYDRLPAVRITDLLLEVDDATGFTDAFTNVRTGSPCKDRIGLLNVLLAEGLNLGLSKMAEATNTHDYLQLSRLSRWHIESDAINRALAMVIEAQSRLPMARFWGAGVTASSDGQFFPAARQGEAMNLINAKYGSEPGLKAYTHISDQFGPFATQNIPATVSEAPYILDGLLMNETGRNIKEQYADTGGFTDHVFAVTSLLAFRFIPRIRDLPSKRLYLFEPAAASKELRGLIGGKIREGLIVQNWPDILRAVATMAAGIMPPSQLLKKFAAYGRAEPAGRHHHLLEHQAPRAGCHTAPTRRIRQSIRSPGAHLASRMGTHPPHRRV

SEQ ID NO: 11878 - protein, 97 aa, BradyrhizobiumColbertium
MVVFLLSLTGIPPLFGFVGKVLLFGAAIEAGYLWLAVIGILNSVLALAVYLRIVVPMYQARDGEAVRAEVALPLLVVLGATALVTALMGLFAGVFPG

SEQ ID NO: 11879 - protein, 42 aa, BradyrhizobiumColbertium
MPDLDRGEMLAIVPLLVLIILIGVAPSWLLNMIDVTMRALQL

SEQ ID NO: 11880 - protein, 166 aa, BradyrhizobiumColbertium
MILGLAAALSGLVLGWFIQPARLMGPVLPMAQRGFAVAGGMDGLVLRPSLAFAAACEGFERRLLASQLGLVRILSLGTASSAERSDKRLYAATLQVGRMNLRLGDGAENTDTHGIDGLIFGLVARTIAAGRRLRLLQSGLIHRELALTVMGIAVIAAVLLILPMSS

SEQ ID NO: 11881 - protein, 463 aa, BradyrhizobiumColbertium
MTMLALTLLAPLLAGLVALALRRAPEAIALAGVGLGFLAAMAVLAGAIAGNAVQMVLPGLPQMPLRLVATPLTAIVSAMVATVAAFVVVYAVGYMRSDPERPRFFGILLLFVAAMQALVLAGDWITVLAAWELIGFSSYLLIGFWHGRDGVPNAAIRAFLYTRSADLGLYLGIFVLIGWAGTSEISATLAISGTPALVAGLLLLIGAMGKSAQVPLQDWLQRAMAGPTPVSALLHSATLVAAGAILLIRVAPMLPSGALLAVGLVGGITAVVTGLIALAERDLKRLLAASTSSQYGLMLLAIGAGVPAAALLHLIAHAAIKSTLFLGAGVFQHDRDGTDMEAVAGAGRTRPLILAAFGIAALALAGIPPLAGFFSKDAIIAAALAAPGAIWLAPLALAGTVLTGAYMARALRVLWGGEAQPVSGKGMGWMSAGMAVLTALAAGVWVAFAPLGNLLGAELPTEG

SEQ ID NO: 11882 - protein, 167 aa, BradyrhizobiumColbertium
MIFLAFFGGAAMWFGVVVFRTHSMVRSALALLFSQTAIGAMFLVMQAEFLGVLQIMMMATEMSVMAIFMVMFMMDPGGLGKMDMTHQKRLSLWAGGIGLLAALLLVWLPDWGPVALSVPGAHEQAADLGRELLGRSMFIFQSAGLTILTAMIAATMVAIVPNAEQRK

SEQ ID NO: 11883 - protein, 168 aa, BradyrhizobiumColbertium
MLIVMPITAVAMRAESLSTVEIVASQAQLWNVLYQPMGFVLFVVAAMGLAWLPPLDLPDATGELAGGVEAEYTGVRLAVLRLARMVIILALAGATVTFYLGGWLGPWLPAWAWSAIKILAVAAAMLSVGRYMPRIREARYLALSWKLGISLALANVFVVGVIALVVPI

SEQ ID NO: 11884 - protein, 161 aa, BradyrhizobiumColbertium
MMPIKVFISHKKEDTEQAGAIAAHLTANGLFVYLDVIDAQLGKSGPDLADYIRAQMEKCTQLLAVISAQTQASWWVPWEIGVATEKERFLASFVSGNATVPEFLQKWPYLRTRADLDAYVRESKRAELLVENRVQKGDRLTARAQGFRSFHTSLKASLGQP

SEQ ID NO: 11885 - protein, 108 aa, BradyrhizobiumColbertium
MAATKVVFVAFAIEDVKQRDLLKGQSLHPRAPYEFIDMSVKETYDSGWKDKVRTRIRRSDGVIVLVSKNSTSSTGQKWEIACAKEEGKKIRGIWAYSDDRTEIQGVST

SEQ ID NO: 11886 - protein, 331 aa, BradyrhizobiumColbertium
MRKALIVGVDYYHDLTPLSGCVSDADAVAGVLARNADGTTNFTTPKVLTATGAHNLITRRALRDAIEALFADPSEIALLYFAGHGYVDTTGGYLCASDCRDGDDGLALSDVMTFAKASKAANKIIILDSCHGGIAGNQAGKGGLAEIGEGMTLLTASTENQYSYEGGNGAPGVFTNLLVDALNGAAANLVGDVTPGSVYAHIDQSLGPWGGQRPVFKTNVRSFVSLRKATPPIALEELLQLAIHFPQPGFKFQLDPSYEPERSQEKRDDPAIPPPDPIRNAIFKVLQNYVRVNLVRPVDAPHMWHAAMESKSCELTVLGEHYRRLVADKLI

SEQ ID NO: 11887 - protein, 99 aa, BradyrhizobiumColbertium
MSDKQFTVSFASLIEELAALEHRRWAHWQRYVHEKGERRPDGSVVLPAELVARWERLINTPYEELTNEEKDSDREQVQKYLPILKRWLQRVRGENEGNA

SEQ ID NO: 11888 - protein, 459 aa, BradyrhizobiumColbertium
MPESFKCFRDPLLSLYQSAVTEIAKKIDKGAAAAPRSRAGLQRSMVSTLPGIAADIAEREYSRATGGVAPASPAGPSARELSKSGIAEVCAEWGWRYMKALAASDANAIQQLENEFTAGTCDPAWFSTLVEYRRFFENGKRKPIPYVPAPAVGPKTIEIKANSRIALMGDWGTGAIPAIEVLQRIADEHPDILLHLGDIYYSGTAAECQSNFIDPIDSILRKDKALPVFSLSGNHDMYCGGVGFYDLITKLNPAPFTQPASFFCLRSADEKWQLLAMDTGLHDDNPAAVAGALTYLEEDELDWHCDRIREFSGRTILLSHHQLFSAFSPIGAADPQGKRSAVNPLLLKAFQQMTATKAIAAWFWGHEHTLSIYQPFAGLERGRCVGHGAVPVSVIDEIYKPVSGLTETPALIDQSRLATRGGVYNHGYALLSLEADLCRAEYYQSTAKGRELMYSESFR

SEQ ID NO: 11889 - protein, 129 aa, BradyrhizobiumColbertium
MIGFIEAMFELLVQGHDMVRLRDWFESPANKAGLSASWLKFQTGSSDPSTLLRRALGDQLALHRANTSRKHGALRWIQELVRPRYPLLKCFALKEGKVGRNFELKSLDKGRRVDPLHIGSPGPMIQSRR

SEQ ID NO: 11890 - protein, 104 aa, BradyrhizobiumColbertium
MPKRRDAILDGTAPSWENHISAFPESIPPSLPTEFRRARNIALAHAGIKRPKLNMSDFYDRFHKFLHIFYKDAQSWWGREADEFPDLEEITTFSLMISQKPPTS

SEQ ID NO: 11891 - protein, 481 aa, BradyrhizobiumColbertium
MTTAATTIRPGTMHEIICPHCDKAFKVDESGYADILKQVRDADFAEQLHERLELAERDKQSAVELAKAQVSSDLQKTTAAKDAEIQDLKSKLEGSGVAQKLAVAEALSAVEKERDRLANALAESEREKKAASELADALLASEQHKIAAAKEKEIQELKAKLQAVELEKKLAVTEAVGAIEKERDELKNGIKQVQLEKQLSEQSLKDKYETQIKDRDDAIERLKDMKARLSTKMVGETLEQHCETEFNRVRSMAFPRAYFEKDNDARTGSKGDYIFRDSDDAGTEIISIMFEMKNESDKTATKGKNEDFLKELDRDRTEKGCEYAILVSLLEPDNELYNAGIVDVFHRYSKMYVIRPQFFLPMITLLRNAAISSLKYKTELALVKAQNVDITQFESQLETFKAAFSKNYDLASRHFQTAIAEIDKSIDHLQKTKDALIGADRNLRLANDKAQDVTIKKLTRGNPTMAAKFAELKSPPAEAAE

SEQ ID NO: 11892 - protein, 103 aa, BradyrhizobiumColbertium
MKPNVSVEIDSLTLLMQCVSEGMGATIKPMSALHEADETLGKWRALSISDAPITRTNYLYSLSAELMTDAARAVLGETREVARELIEGRKWKGVQLIERREAA

SEQ ID NO: 11893 - protein, 83 aa, BradyrhizobiumColbertium
MMIEGQPVFRRDDAARGALKQRFPDFVFKLGDLLAQRRLGDEKAAGCFGETSTFNDLSEIAKLTKVHGSLIPEAPRVGYTARL

SEQ ID NO: 11894 - protein, 484 aa, BradyrhizobiumColbertium
MVTIGAQRLSTRELPACRLLIAGKWQSGASEVDVLDKFHNRPAMVAQLPSAEQVGVCVEAAFSAFKANALSPYERGAILDRAAARLEARADQLVEVLRQEAGFPRRDALGEVQRCAATFRLSAEEARRLSGDMIPLESAAGQVGRIGFTLRMPLGVVCAITPFNAPLNTVAHKVCPALAAGNAVILKPSLHTPMTSCIMAECLLEAGLPPGLLSVLHGDAEVAQWLINEKNIHFYAFTGSTQVGRAIQQRVGLRRTQMELGSIAHCILCNDADLNVALPKVINASYRKAGQVCTSIQVLLIDRSLVDKVEHRLAELVAALPFGDPANENTVVGPVISEAAAVRVESWIVQAVKSGARLLVGGGRSGSVVHPALLADVSKATPLGCQEVFGPVLTVAPFDSFDEAIERVNATPYGLATGIFTQHIGNALEAARKLQVGGVHINETPSSRVDLMPYGGSKDSGFGREGPYYAIREMSEERMVTILA

SEQ ID NO: 11895 - protein, 596 aa, BradyrhizobiumColbertium
MSKMKGGEVIAEYLVKQKVPFIFGVCGHGNVGILDALYQVRDKISLISPRHEQAAGHMADAYFRVKHSPVATLTSTGPGSANIVMPLITALSDSSAFMAITANVPTSQANRGPFQELYAHNQADFAQVMRPVVKRTFQPTRVDMLPLALRQGFDTMVTGRPGPVNLDIPYNVFQEEDDVELPAPSHVHGGHRPNASPADIAKALDLLSASRKPVFFVGQGTTLSEASPEITALQQKYGIPVITSPNGMGLVPSGDPLTLGFIGRNGAYPANQAGRFADLVICIGTRFDDRSSSSWHPGYSWNFPETKLIQADIDPAELGRNYPPTLGVIADAKTFAAQLLDGMAERKDIRRENFEPWRAEVAGWQAEWDAFVRPHFKDVTTPIRPEYVVDALTDILPDDVILSLDSGVHHNWFMQFWKPRRAQSMLNSWGYSSMGFGVCGVLGAHLAAPDRTCVAVVGDGGFMMAPHVVATAVEYSLPCIWIVWNNFAWGAIRDIQYGMFGGRELGTAFYKGNQGPGGERYNPDFAAWARACGADGYTVTRSEDLRGVVETAIKNRRPCVIDLHVDAEVRPPSTGTWQLPPVPYKEPVFGKPQRLI

SEQ ID NO: 11896 - protein, 411 aa, BradyrhizobiumColbertium
MGWMDSACRKLLARLTTAAIASLAAATGASAQTDDPIRIGMIYSKQGPGSSIGQFLERGSELAVEQAGGKVLGRKIEVIWLDESDPQGSQQNMQRLVDENKVVAVVGGNYSSNALAMMSVANRAKIPLILPGAAASEITGKSCSRYVFRTQATVPVQTSGLMPYIASIGKKVYFLTASYAFGQDILRSSRALLGKTGLTEAGSDEVPINTADYSSYILKIRQAKPDAIIGGLVGGDFSTFLKQWNEMGMKEKIPYGAIAVTDTDFWDVGPQASSGIYIKPWYYNNPKNTAAEKAMTEAFQKKYGQPPSDKTWSGWIAMRALLESIEAAKSTKAQDIIVALEKWKNTEGLLPYYFREWDHQMVRPAVIVQVKKNITDKWDFFEVLKDTSATAEETEKAFGTKEEIGCNMPAL

SEQ ID NO: 11897 - protein, 289 aa, BradyrhizobiumColbertium
MTDIIISQVANGLVLGFLYVLIAVGLSITFGLLGVINFAHGAFFALGAYVSWQLFRWFGWGAVALAPIVVAAIGMATEFLLIRRLYGREPLLSLIVTFALALLIEALIRATWGADGKPFNPPPPLAGIVELGPLLITKYRVAVLAATSTALLGLWAFLSWTPYGRILRAGSRDPEMVELLGIKLPRVLTAVFGLGCGLAAIAGLLAAPLWTVSPSMAANAVMPAFVIVAIGGLGSLRGAVVAGLAVGVVTALTIQFWPAASTASMYVLMFAIMLLRPRGLFGERWERFE

SEQ ID NO: 11898 - protein, 857 aa, BradyrhizobiumColbertium
MKGALLGRVSRHPIAIIAAVLLVASAIALGIGMPVARVTQIAIYTLYAAGVNFLIGYLGLVPFGASFFFGTAGYAVALIGTRLLGGNELGDVLVAAGFSMLLALTVGAVILRRRGLYFSLLTLACSQIAFEIAFKWTDVTGGENGIQDVARPLFTSALEFHWFALVVVLGMLWLLWRIAHSPFGRMMQALRDNEERVASLGYNTYQTKLVALVIAGGAIGIAGGLMVLLLQGAYANNLSWQHAGDPVLMAALGGVHHFLGPLWGSIIFIVLEDRLSALTENWWLFFAPIIIAFALLSHEGVQGIFQRLVRRDRWTLTRDGISPRPAKIVPYTPAAAKGSGDGGAPILQVRNLSKRFGNIVTQNDISLEMSRTGLHSLIGPNGAGKTTFFNLLTGRYKPDSGEILFEGGSINSLPPYKRARLGIARSFQILSVFPNLTAFENVRVAVQASNRTYFSLWADAHASESVNARVWGLLEAVGLTERAAELCVSLSHGEKRLLEIAVSLAIDAKLLLLDEPLAGLAESDRRIVGELIRRLAQSHAVLLIEHDIDRVLAMSDRITVLHQGRLIADGKPAEVARHPEVVAAYLGDAHPVQESGQVVVLPTRKGGAAVPADQAPLLELKGISAGYGGSTVLENVDLAVHKGEVVALLGRNGVGKTTLLRAVTGVLHPSEGQMSFEGRDISKLRPSDINRLGISLVAEGRRLFPNLTVQENLRLAARPGGASMEEIFDLFPKVGARIRSRGETLSGGEQQMVAIARALMVPSRLILLDEPFEGLAPAVVQEVRDAVGRLSTRASMVIVEHHAESVLAMADRAYVLVNGRVAYGGAASTLAMDKAQCERLLGVVQADEVGQRTPATM

SEQ ID NO: 11899 - protein, 140 aa, BradyrhizobiumColbertium
MTIVAPAPNAFADAEKKKYAVTRNLAELQWIQYPGHFNQALSKAIVTPETTGSRFFDHRISTYEAGAHVESHVHKVQEQIYHVLAGEGVLVVDGERRVVRSNDVTFIPPGVVHEFHNTGIDPLVFLVITSPPTDEEPEPR

SEQ ID NO: 11900 - protein, 317 aa, BradyrhizobiumColbertium
MSKKILVTGGCGWLGGAIVRALLDRGDTVVAADIAVSPAMTALAASNSRLSAEAVDFGEWHQVVRLFEKHPVDAVVHTAAIVGVVFAADAPIKTLRVNVEGSINVFEAMRLRKVRRVVHISTEETYGDFQAPRIDEDHPQKPASVYGLTKLAAEHYGRVYSRDHGLECINVRTCWVYGPHLPRLRLPRTFIEAALRGEPYHQTEGANLAVDQVFIDDTVDGTLLALDKEKHRFDAYNIATGEAPTLRDTADAVNEAIPGARITVGDSGVYRHGGVVPTAVKGALDISRARAELGYEPKYDIKKGIAATIAATRASLR

SEQ ID NO: 11901 - protein, 236 aa, BradyrhizobiumColbertium
MTKPSPVVLIFGGSRGIGAACCSAFENAGWQVASTYAADAPAKPVGRAYKVDIRDAKGVADVFERVTADFGVAPIAVVANAGINRPPRPMADFPLADFQELVDVNIVGAFNVLSEAARRVPKGGSIVALTTSMTGLGIPGGGPYTATKAAVESLVRSMSKELAGREVRVNAVAPGPVDTDLFRAGKTEEAKQRSAAMSPLNRIGRAEEIAEVVLFASSQNASWITGQIIRPNGGMI

SEQ ID NO: 11902 - protein, 564 aa, BradyrhizobiumColbertium
MADAWDAIVIGAGAAGLTAACTAAAAGKSVLVLEQADVVGGTTAISGGMVWLPVNHKMAEAGQPDSIEAARTYLSVTVPGKRRDKLETFLARADDALRDLEATTSLRFQPVPTYPDYYPDLPGGTAGGRVLEPVPFDGRQLGRAFGLVRDPLPEFTLFGGMMVSRKDIPHFRRAMKSLPSTLRVTRLLLDYFLQRLKARRGTSLYLGNALVARLLRSALDLKVEIRTGVGVESLELGPDGRVSLVVAQDAQGRSTRLVARRGIILATGGISHQPEIRRNYVPEAAGTLTATVKSGPQPRGAVLASALGASLSSSTREGAFWVPASTFVRADGSAGVFPHTVTDRAKPGLIAVDCNGQRFVNEALSYHEFVRAQLSHANSAIPAWLICDCGFLWKYGLGKIKPFSTSIKGDIASGYLIEAASLADLAKQIGVPVAALDETVRNFNVGAEKGEDPEFGRGGDVYQRSLGDADVKPNPCVGPIKQAPFYAVKVVPADLGMSAGIVTDASTRVLRPDGTAIPGLYACGNDMASVMEGAYPGPGITLGPALVFGWIAGKEAVKAHQDAR

SEQ ID NO: 11903 - protein, 582 aa, BradyrhizobiumColbertium
MNPTAGKTSATGEQMASTTADTYSPSRDDFAAMLDESFAGGNLQESSVIKGKVVAIEKDMAVIDVGLKTEGRVALREFSGPGRESDLKVGDEVEVFLDRIENALGEAVLSRDKARREESWGKLEKAFQNNEKVNGVIFNQVKGGFTVDLDGAVAFLPRSQVDIRPIRDVAPLMNNSQPFQILKMDRRRGNIVVSRRTVLEETRAEQRQELVQNLEEGQVIDGVVKNITDYGAFVDLGGIDGLLHVTDIAWRRVNHPTEVLSIGQTVKVKIIKINHETHRISLGMKQLLDDPWQGIEAKYPLGARFTGRVTNITDYGAFVELEPGIEGLIHVSEMSWTKKNMHPGKIVSTSQEVDVQVLEVDSVKRRISLGLKQTMRNPWEVFVESHPTGSVVEGEVKNKTEFGLFLGLEGDVDGMVHLSDLDWKLPGEQVIDNYKKGDMVKAVVLDVDVEKERISLGIKQLEGDPFAEPGDVKKGAVVTCEVLEVKESGIEVKIAGTDFTTFIKRSELARDRNDQRAERFAVGEKVDARVIQFDKKARKVQVSIKALEVAEEKEAIAQYGSSDSGATLGDILGTALKNRDSK

SEQ ID NO: 11904 - protein, 212 aa, BradyrhizobiumColbertium
MIIAIDGPAASGKGTLGKRLAQHYGYRHLDTGVIYRAVAYALMQSGHALNDEAAAVQAALQLDPEKFGNPALKTQKAGEGASIVSAIPRVREVLVNFQRQFAADPPGAVLDGRDIGTVICPHADVKIFVVADPKVRARRRTMEARARGEEADEAAVLADIIQRDERDKNRPIAPLKPAPDAYLLDNSQLDIEGGVRAAIDIIEAVRAGRSRG

SEQ ID NO: 11905 - protein, 422 aa, BradyrhizobiumColbertium
MPGDKSISHRALILGALAVGETRISGLLEGEDVLNTAKSMQSLGARVERTGDFAWKVNGVGVGGFAQPKAALDFGNSGTGCRLVMGAVAGCPISAVFDGDASLRSRPMRRILDPLEKMGAKVIAGGEGGRLPLTLQGARDPLPIVYKTPVASAQIKSAVLLAGLAAPGTTTVVETEASRDHTELMLKHFGADITSTREGPHGRRITLVGQPELYGASVVVPADPSSAAFPVVAALIVEGSDVVLPDVMTNPLRTGLFTTLREMGASIEESEVRGDAGEPMARLRVRASKLRGVEVPPERAPSMIDEYLVLAVAASFAEGTTIMRGLQELRVKESDRLEATADMLRVNGVKVEVAGDDLIVEGRGHVPGGGVVATHMDHRIAMSALVMGCASDRPVSVDDTAFIATSFPDFIPMMRSLGAEFS

SEQ ID NO: 11906 - protein, 135 aa, BradyrhizobiumColbertium
MAKSELGTKRICPTTGKKFYDLNKNPVISPYTGEVVPIAPIAPARSSRGAEARNMAQDTTPEPAEAEELVSLEEADAEENTGKVKAIVPESEDDIEVDETLDDDDDDDSTFIADEEEGDEDVTDIIGDVGGDEET

SEQ ID NO: 11907 - protein, 153 aa, BradyrhizobiumColbertium
MARKHSAADAPLRLDNQICFAVYSAAHAFNRVYKPLLDRLGLTYPQYLVMLVLWERDDVPVKEIGERLFLDSGTLTPLLKRLEAAHLVKRTRSREDERQVLISLTPQGQALKEKARAVPQSILAASNCSVSELVAMKDEIVALRDRLNAVIEE

SEQ ID NO: 11908 - protein, 141 aa, BradyrhizobiumColbertium
MSVNVLYKTSAKATGGRDGHAATLDGALDVKLTTPKELGGGGGAGNNPEQLFAAGYAACFIGAMKFVASQGGPKVPADASVTSTVGIGPRSEGGFGLDIDLAVSLPGLARAEAEALVQKAHQVCPYSNATRGNVDVRLTVV

SEQ ID NO: 11909 - protein, 406 aa, BradyrhizobiumColbertium
MSSEAAGSEAAPGAMSGLRVIDLTRVLGGPYCTQILADHGADVIKVEPPAGDEVRDWGPPFHEEDAAYFIGINRNKRSIGLDLASEGGRAVLLKMLETADVLIENFKPGTLEKWGIGNETLRDKFPRLVHCRICGFGADGPRGGNPGYDAIIQAMTGMIAATGSPESGPMRIGVPLVDIGTGLYAAIGILMALSERQRSGKGQFLETTLYETGLAIMHPHTANYFMHGKPPSLTGNEHPNLVPYAIFPTKTDNIFIGVGNDGTFRKLCKEIGKPELGTDPRFARNKDRIANREALRAELAAVFSQHEAEPLCDRLLAAGLPAGPVQKIDQALTNPHTIYRGDIIEKDWYKGVASPIRLDRSKPSLRRLPPKFSQHSREVLGEFGYSKAEIDAMVAKGTVCGPERKR

SEQ ID NO: 11910 - protein, 438 aa, BradyrhizobiumColbertium
MALRHFGAAAAVALTVGFGASPALAVTEIQWWHAMTGANNDVIVKLANDFNASQGDFKVIPTYKGNYADTMNAGIAAFRAGNAPHIMQVFEVGTATMMAATGAVKPVYKLMAETGEKFDPKAYLPAITGYYSTSKGEMLSFPFNSSSTVMWVNLDALKKANVEIPKTWPEVFDAAKKLKAAGHATCGFSNSWVTWVNLEQLSAWHNVPLSTKANGLDGFDTVLSFNGPLQVKHLENLVELQKDKTYDYAGRTNTGEGRFTSGECPLYLTSSAFFGNVKAQAKFAFTAVPMPYYPDVKGAPQNSIIGGASLWIMGGKSAEEYKGVAKFLTFLSDTDRQVYIHKSSGYLPITKAAYEKAKAEGFYKDQPYLETPLLELTNKEPTENSRGLRLGNMVQLRDVWSEEIEQALAGKKTAKQALDSAVERGNTMLRQFEKTAVK

SEQ ID NO: 11911 - protein, 293 aa, BradyrhizobiumColbertium
MQKQAIFQSKLLPYALVAPQLAIVLVFFYWPALQAMIQSFLLQDAFGLSTSFVWFENYIDLFKEPAYFEAILRTFFFSFAIAVSSLSFALLLAVMADKPLRGSMLYRTLLIWPYAVAPPVVGVLWIFMLHPSLGVLSRYLRALGVDWNPLLDGDQAAALIILAAAWKQISYNFLFFLAGLQSIPKSVLEAAAIDGARPMRRFWTVTFPLLSPTIFFLLVVNIVYAFFDTFGIIDTMTRGGPGKSTETLVYKVYTDGLLGGNLGSSAAQSVILMIMVIVLTGIQFRFVERKVTY

SEQ ID NO: 11912 - protein, 282 aa, BradyrhizobiumColbertium
MVEEEGFRRYIAHIILWIGIAIVAFPVYLAIIASSQDNAVIANGQMSLLPGGHFFETYYQTIFVGTSGSTREPVGNMMLNSLVMALLIAIGKIAISIISAYAIVYFRFPFRMAIFWLIFITLMLPVEVRIYPTYKIVADLHMLDSYAGLSLPLIASATATLLFRQFFMTVPDELLEASRIDGAGPFRFFWDTLLPLSRTNMAALFVILFILGWNQYLWPLLITTRDDMQTIQIGIRKMITTTDALTEWPIVMATAVLAMLPPVFVVVVMQKLFVRGLVETEK

SEQ ID NO: 11913 - protein, 272 aa, BradyrhizobiumColbertium
MSVYNNMAYGLRNRGMAEAEIKTRVEEAARVLELSAMLDRKPRQLSGGQRQRVAMGRAIVRQPKVFLFDEPLSNLDAKLRIAMRVEIRRLQRRLNTTSIYVTHDQLEAMTLADILVVMNGGQVEQVGNPLAIYEKPATTFVASFIGAPPMNLMSTRPEEIRSQLAGSAAADAGVLGIRPEDFVITDQTPDGGVALPLTVEAIERVGAETFVYGSREQEEKHVAATPGELPPGEIIVRIPGTEAPAIGARIRVAARPAKLHLFSGDGRKRLEA

SEQ ID NO: 11914 - protein, 141 aa, BradyrhizobiumColbertium
MSRVPTLSSPFLLGFDEIERVLDRVVKGADGYPPYNIERCDRTDGQPERLRITLAVAGFTRDQLDVTIEENQLVIRGRQQDDKTRQYIHRGIAARHFQRTFVLAEGMLVLGADLKNGLLSIDLARPEPERIVKTIAINEHE

SEQ ID NO: 11915 - protein, 90 aa, BradyrhizobiumColbertium
MSEGHVAFEYEAKNVSPETLATLGEGHIAYVKQIRSEDVPGLFPEAPKIAPGLKLFALHAADGTPIMLTDSREAAVANAWSNELQAVSVH

SEQ ID NO: 11916 - protein, 153 aa, BradyrhizobiumColbertium
MPITDLVAPEAILPALKVNSKKQALQELAAKAAELTGQNERSVFEVLLQREKLGTTAVGYGVAIPHGKLPKLEKIFGLFARLDRPIDFEAMDGQPVDLVFLLLAPEGAGADHLKALARIARLLRDQDIAKKLRASRDAQAIYSVLALPPATAA

SEQ ID NO: 11917 - protein, 201 aa, BradyrhizobiumColbertium
MTLRVSGKSISVGEALRGRVAERTEEVLRKYFDGNYSGHITLSKDGFGFRTDCALHLDSGITLEADSNAPDAYASADQALVMIERRLRRYKNRLKDRSARKAHAASEAMAALDATSYVLEAPGEDEEEVTGYSPVIIAEQTTSLKRLSVSEAVMELDLSGAPCLVFQHGSSGRVNIIYRRADGNVGWIDPPEAKVDGKSDG

SEQ ID NO: 11918 - protein, 545 aa, BradyrhizobiumColbertium
MALTQRLEFRQSQSLVMTPQLMQAIKLLQLSNLDLTTFVEEELERNPLLERASDEGPAGESPAEVGSYGDSEGGQGDGHGDGPGEDGFGGSGDGFEPGQEEWMSKDLGTRAEIEQTLDTGLDNVFSEEPAEAAARTAQDAAPTTYTEWGGGASGDEDYNLEAFVAAETTLSDHLAEQLSVAFAAPAQRMIGQYLIDLVDEAGYLPPDLGQAAERLGASQQDVEAVLAVLQKFDPPGVCARSLSECLAIQLRELDRYDPAMQALVEHLDLLAKRDIASLRKLCGVDDEDIADMIGEIRRLNPKPGMKFGSARLQTMVPDVYVRPGPDGGWHVELNSDTLPRVLVNQTYYSELSKKIGKDGDKSYFTDALQNATWLVRALDQRARTILKVATEIVRQQDGFFTHGVAHLRPLNLKAVADAIQMHESTVSRVTANKYMATNRGTFELKYFFTASIASADGGEAHSAEAVRHHIKQLIDSEEPSAILSDDTIVERLRASGIDIARRTVAKYREAMRIPSSVQRRRDKQSALGNVLSTALSDRSRNTEPA

SEQ ID NO: 11919 - protein, 331 aa, BradyrhizobiumColbertium
MVDLFSMFRRRPAKRGRPGFARQDITALGDSVGGLVPSPVRDAPPIARDQPMRAPDPFQGDYQVEPPRPQAVHPLRSAAASNGGGPQLLKRPGFLAVHGVKKSFGSRQVVRGVSIYVRRGEAVGLLGPNGAGKTTVFYMITGLIKADHGAIELDGHDVTKLPMYQRARLGIGYLPQEASIFRGLTVEQNIRAVLEVVEPSRKKREQQLDSLLDEFNITRLRKSPSIALSGGERRRVEIARALATRPNYMLLDEPFAGIDPIAVGDIQDLVRHLTNRGIGVLITDHNVRETLGLTDRAYIVYAGEILTEGTPDEIVADPDVRRLYLGEEFRL

SEQ ID NO: 11920 - protein, 239 aa, BradyrhizobiumColbertium
MTRILSRGAGKRCGISGAAALAAGLALLVTGAAVAQSTMQGVPNAMQGFSQNRDQPIQIEAASLEMRDKKKEATFAGNVKVVQGDTTMTSKTLVVFYDSGGGEKPAAPQPAAKGAKSAPMQSATPGPGGSSSIKRLEARGNVVVTQKDQVVTGETAVFDTRTNLITMLGGVVLTQCKNVLRGDRLMVDMTTGVSRVESDSGRVQALLPQGGGSDCGPAGQSAKPGAAPPLQLPGASKQK

SEQ ID NO: 11921 - protein, 244 aa, BradyrhizobiumColbertium
MNSAQNPTYDAALAAKFASAARHSRLVRILRVAVPGAVLLSMAVIVGVSIFNPFRMLMPKLPLDSGNLVVSGTKITMESPHLAGFTPDQRPYELWAKTATQDITDPDHVDLSDVRAKVLMEDQSTLLLDARTGRFDNKQQQLELRKDIFLRTSAGYEARLNSAFVDMGKGTVSSDERVDVKLTNGTLTADRLRITEGGELIRFEGNVVMHLEKLDDPAAAQPAPADPPPPAKPRTPQNKAASSR

SEQ ID NO: 11922 - protein, 204 aa, BradyrhizobiumColbertium
MTVRLHRGDLPDLSRYTGAVAIDTETMGLNPHRDRLCVVQLSPGDGSADVVQIPKGHTDAPNLKALLADPAVTKIFHFARFDVAVLYQTFGVMTGPIYCTKIASRLTRTYTDRHGLKDLVREVLNIDLSKQQQSSDWGSDNLTEPQLAYAASDVLHLHGLRERLDTMLVREGRSKLAQACFDFLPTRALLDLQGWSEEDIFAHS

SEQ ID NO: 11923 - protein, 440 aa, BradyrhizobiumColbertium
MEQPARHYDPGVSEPAASPAADRTLVIDLEGALLRSELLMEALLSSPGRMLARFGAGGRAGMAALTDVLARAEIDYAHLPYDSDVLNRALAARARGEKIYLVADRFAGHAAGIATHLGFDGIVTPAELAAGGLPFDRAAIERIERRGTPRPGLKTWAKALRVYQYAKNTLVFVPVITAHQLNFQTLGYALLAFLAFSACASGAYLMNDLLDLAADRQHPTKRHRALAAGELPISSALAAIPVLWLLAVGASLCISPLFLAVLGAYLATTIAYSLVLKRKMLVDIVTLAALYTLRIVAGAVGVGVVLSEWLLIFSLFVFTSLALIKRFSELSMRESAGLADPSNRDYRITDLHVIAAMAAASAMNAVTVFSLYVSSSAVTPLYSRPWMLWLLTPLLLYWFGRALMMAHRREMPDDPILYAFRDGPSRIAVAAMICIMLAAI

SEQ ID NO: 11924 - protein, 423 aa, BradyrhizobiumColbertium
MTEQTLAAPVDDPQQRQRGFSRYQMLLIALLAFTQFTIILDFIIMSPLGAILMPALDITAGQFGVAVSAYAFSAGLSGILAAGFADRFDRKRLLLFFYVGFTLGTALCAAAQNYHVLLLGRIVTGLFGGVIGAVVLAIITDLFPLHQRGRVMGFIQTAFAASQVLGIPAGLFLANYWNWHVCFVAIVALSIAAIAIIAFAMEPVDAHLKLKQDRNPFHHLVATIGQPRYTLAFLVTTLLATGGYMLMPFSSAYTVHNLGIDIAHLPTIYLVSGLFSIVTGPLVGRASDAFGKYPTFVFGCAMTVVMVLIYTNLGHVSLATAILVNVLMFVGIFSRMIPSQAVMSAIPDASQRGSFSAASASLQQLSGGIGAVLAGAIIAQAPDGALIHFDRIGYVVVATTIITLVAMYFVQKAVAEQTGKLVV

SEQ ID NO: 11925 - protein, 98 aa, BradyrhizobiumColbertium
MVGPQTAGNGVVAIDAHTIRSDVDWHHGLARPNDDMLRLVMPSCGGLRGNARTDEEAKAQDARSQDTRSQDAPSRDAAHCTYSDESAELPTGSTGCIS

SEQ ID NO: 11926 - protein, 287 aa, BradyrhizobiumColbertium
MAVRRPELAGHLQPLGRVGQIHSVQANLRYPASVQAALRDSHVAINLVGVLTEGGAQTFDAVQARGAETVAKAAAAAGAQLVHVSAIGADAESPSRYARAKAAGETAALAAVPSATIFRPSVIFGPEDQFTNRFAALARMSPVLPLIGGETKMQPVYVGDVATAIADAVDGKTKAGGTYELGGPEVLTMREIIQTILEITDRERMLIPLPFGLARFKAAFLQFAPGAFKLTPDQVTLLERDNVVSEAAKAAGLTLEGLGITPDSLEAIAPQYLWRFRAAGQFQRKSA

SEQ ID NO: 11927 - protein, 246 aa, BradyrhizobiumColbertium
MTSRKTVLVLGGSSDIGRAAARAFAKAGYDVVLAGRDVAALDPDAADLRARYDIDVGLARFDVLDTASFDAFAGSLSALPDVVISIVGLLGVQQNAESDLAHATAIMRSNYEGPSLILGLFAEKFLARGSGTLVGVSSVAGDRGRASNYVYGSAKAGFSAFLSGLRARSSRGGVHVVTVKPGFVRTRMTEGMKLIGPLTVEASVVGDAILQAVERKTDVVYVSGKWRLVMLIIKTLPEAVFKKLKF

SEQ ID NO: 11928 - protein, 441 aa, BradyrhizobiumColbertium
MTLVSGWGRFPVVDSEVLRPRSFGAVGEAVSAGSIARGNGRAYGDAAIGALRTVTMTGFDRVRSFDPASGRIRLEAGVLLSDLIDTFGPRGFLPFVVPGTRFVSIGGAIAADVHGKNHHCEGGFGRYVDSILLRTGQGETIEASREQNSDAFFATIGGMGLTGIILEATLRLRQVETGWIWERVISASDLDAAMRALEMSDSATYSVAWIDCAARGRDLGRSLIYLGEQAARDELPAGAAAFPVDKDPGLGVPVDLPSMTLNRFSIRAFNELYYRMGARRAGGGRVVSLYPYFFPLDSLKDWNRIYGKRGFLQHQCVVPETGARDVLGDLLDRVARRGDASFLAVLKRLGQGDGILSFPLPGYTLALDFPLRGDILNFLDEIDRLVVAAGGRLYLAKDARQSRATFAAGYPALSRFNAIRKSLDPAGNIRSKLSQRLFDEV

SEQ ID NO: 11929 - protein, 261 aa, BradyrhizobiumColbertium
MILGIIEGVTEFLPVSSTGHLLLAERFFHLGEGAFWDSFTVLIQLGAILAIVGLYFRKLWDVAIGLFTGDAYARRFVIGVLVAFLPAVIVGLVAGKYIKSLLFNPWVICFTLIVGGAVLLWVDKLDLKPREHDATKFPLLTYLYIGIAQCVAMIPGVSRSGASIVAAMLLGADKRAAAEFSFFLAIPTMIGAFAYDFYKSRAEMTMDHINIVAIGFVVSFITAIIVVKTFLTYVTRHGFVVFAWWRVIVGTLGLIALALGR

SEQ ID NO: 11930 - protein, 230 aa, BradyrhizobiumColbertium
MFTLYHHPFCPHSRFVRLIAGEYGFDLKLIEERSWERREAFLLLNAAGTTPVVVDDEQPPIPGAAIIAEYVDEAYGAEMGPKRLMPETLAGRVEVRRLMAWFNEKFFEEVSHPLVTERIYKRFMSEENGGGPPSADVMRAAKANVRYHLAYIGWLAQTRNFLAGDRLTYADLAAAAHLSAIDYLGDVPWSEDDAAKAWYARVKSRPSFRPLLSEWLAGVPASRTYVDLDF

SEQ ID NO: 11931 - protein, 331 aa, BradyrhizobiumColbertium
MDWLAAQPERRVDPRGLWSDVRSVIMLGVNYGPDRDPLAVLRQRTRAAISVYAQGDDYHDLIKKRLKALARWLVATAPSEVKVFVDTAAVMEKPLAQAAHLGWQGKHTNLVSREFGSWLFLGAIYTTLELPRDDAEIDHCGSCRACLDICPTAAFPAPYKLDARRCISYLTIENKGPIPREFRKAIGNRIYGCDDCLAACPWNKFAREGREAKLAARDELRAPALAELARLDEGAFRALFTKSPVKRIGRDRFLRNVLIATGNSGDVSLADEARRLLDDENPLVRGAAVWALRQLVAREEFEVLRLHALELEHDESVREEWQAESTAGSSP

SEQ ID NO: 11932 - protein, 293 aa, BradyrhizobiumColbertium
MASRKHCRLLAMRIVDLDFPIHSRNLARMTNMPFFTRDGDTFHPTEVANGPWDPTSLHGRVIIGLLGFVIEERHSGPEFVPARLTVDMFRLPTIDKPIEVTTRLVRDGLRIRVVEAEFFSGGVGMARASCQLLRKTQNPEGNVWSPPNWDAPKPAEIPKPTDPRLGMNGKWATRPIIGHMGSLGPRRLWMSEVRELVAGVPMTPFVHVATGADFASPFANAGDKGLGYINSDVTIYLHRLPVTEWIGFEVVNHHATDGVAIGECWLYDEQGPIGTATVAALAQRKPMANPSKR

SEQ ID NO: 11933 - protein, 155 aa, BradyrhizobiumColbertium
MTTTALLRAFCDAVEQRNGRAFAELFTEDGVYHDVFYGAFEGREKIAAMIDDWFYRTATDFRWDMHHPVTDGTTLYARYTFSYKSTLPEANGARAMFEGVAIMTLRDGKIASYHEVANTAPAFVDLKFAPERIAKIVAKQGAELKARPEMQRHLG

SEQ ID NO: 11934 - protein, 347 aa, BradyrhizobiumColbertium
MRGILATPGHADDIDTLLLFRKRPKRPMSASGCVVAARPVQFKPHSQSKRSMTDIIPDAVLDFIDVGEGPCTRRIAVRSRRGQGPGLFWLGGFKSDMQGSKALALDAWARDHGRAMVRFDYSGHGESGGDFVDGTIGRWLEDSVAVFERFCEGPQVLIGSSMGGWMALLLAREIKKRPAKASLAGLVLIAPAPDFTEELMWKTFPPAVKKEIETKGVWLRPSEYDDGSPYPITRNLIEEGRNHLVLGSAIDLGCPVRILQGARDPDVPWQHAFALTHRLPADDVVLTMIQDGDHRLSRPQDIARILAAVAEIGGDKPPERMCFDERSCPLPKGERAQKHKKKHWEAS

SEQ ID NO: 11935 - protein, 201 aa, BradyrhizobiumColbertium
MLAGKRIFLQDSRFLHNFGEPPIRRPNKAPPAASKDGPRINDDIRNAQIQLIDQTGENKGTVETVLAIRMAQEVGMDLVEISPNASPPVCKIMDYGKYKYSAQKKAAEARKRQKTVEIKEIKLRPMIDDHDYDVKMRAMQRFFEEGDKVKITLRYRGREMAHQEIGTKLLDKIKTDVAELAKVEQDARFEGRQVVMVLAPR

SEQ ID NO: 11936 - protein, 134 aa, BradyrhizobiumColbertium
MAHFPQSISSLPTLGRPRRLALLAVLAAAALPSTADARVRGYDGIWNVTFATTRGNCSSGYSVPFTVTGSRVSSAGGGRVSGRVNRSGAVAVQVSVGASHASGGGRLGGMNGTGSWKGVISGDQCSGIWQATRT

SEQ ID NO: 11937 - protein, 66 aa, BradyrhizobiumColbertium
MPKLKTKSGAKKRFKVTATGKVMHAQRGKRHGMIKRTKKQIRQLRGTRVLFKTDGDNVKKYFLPNA

SEQ ID NO: 11938 - protein, 119 aa, BradyrhizobiumColbertium
MSRVKRGVTAHAKHKKVYKAAKGFYGRRKNTIRAAKPAVEKAMQYAFRDRKRKKRTFRALWIQRINAAVRPFGLTYSRFIDGMAKSGITVDRKVLSDLAVREPAAFQAIAEKAKAALAA

SEQ ID NO: 11939 - protein, 360 aa, BradyrhizobiumColbertium
MTDLVQLQAQIIADIAAAADEAALEAVRVAALGKKGSISALLATLGKMSPDERKTQGAAINQAKDEVTTALAARRDVLKSAALDARLAAETVDVTLPLRDAPAEAGRIHPLSQVWDELTTIFADMGFSVAEGPDIETDDYNFTKLNFPEGHPAREMHDTFFFHPKEDGSRMLLRTHTSPVQVRTMLSQKPPIRVICPGRTYRIDSDATHTPQFHQVEGLVIDKSSHLGHLKWILHEFCKAFFEVDHINMRFRPSFFPFTEPSLEVDIQCRRDKGEIRFGEGEDWLEILGCGMVHPNVLRACGIDPDEYQGFAWGMGIDRIAMLKYGIADLRQLFDSDVRWLGHYGFRPLEVPTLAGGLSS

SEQ ID NO: 11940 - protein, 151 aa, BradyrhizobiumColbertium
MSERQRSKAKQLRRAMSHDETLLWRYLKANRMDGVGIRRQTPIGNYIADFVCFSSKLIIELDGESHDFEERQKKDERRDAFFAAEGFQVLRFTNDQVMTNLEGVVEAIRQAASAGARGSPPSLTLPHKGGEYTDIDQDQFLDTDKSQGAQP

SEQ ID NO: 11941 - protein, 802 aa, BradyrhizobiumColbertium
MKFTLSWLKDHLDTDEPLEKLADKLTMIGLEVENIEDKAKALKPFTIARVISAEQHPNADRLRICMVDTGDGGAPVQVVCGAPNARAGLVSVFSPPGTYIPGKDITLGVGTIRGVESRGMLCSAAELQISNDHDGIMELPADAPIGAGYAEWAALGDPVVEINLTPNRQDCTGVHGIARDLAAADMGKFKDPTIKPIKGEFPCPVKVTVEDATLCPGFALRLVRGVKNGPSPEWLQKRLTAIGLRPINALVDITNFMTFDRARPLHVFDAKKVKGNLVVRRAREGESLLALDGRTYNLDPSICVIADEHGVESLAGIMGGEASGCDEDTTDVLIESALWNEINIAQTGRKLGINSDARYRFERGVDPAFMVPGIELATKLVMEMCGGAPSETVVVGKAFGDDRLIEFPITEVKRLSGIEVPQAEMKRILTHLGFMMAGPGPVVKVAVPSWRSDVHGKADIVEEIVRIFGVDKVPMTPFERGDDARKPVLTPLQLRTRRARRALASRGMVEAVTWSFIAKPAAELFGGGQRALEVANPIASDLSDMRPTLLAGLIAAAQANADRGFGDVALFEVGQLFKGDRPQDQFMAASGVRRGLASSEGLGRHWSGSAQADVFDAKADALAVLAASGAPTQALQIVAGGPGWLHPGRSGTIQIGPQNVLGYFGEMHPRALETLGADGPLMVFEVILDRIPEAKKKPTRAKPLIELSAFQPVSRDFAFIVDRSVKAGDIVRAAQGIDKKLITGVNVFDVYEGKGIDEGKKSIAIAVTLQPREKTLTDQEIEAVGAKIVAEVTKKTGGTLRA

SEQ ID NO: 11942 - protein, 256 aa, BradyrhizobiumColbertium
MSLADFLPTDVSFAIAMALCAVAFVSGTARGFSGFGSALIFMPLASSIAAPRLVAALLLVIDFVAAAPLLPDAWRKADRKATAVIVLGALIGVPVGTYFLSVLEPVTTRWIISCFVAALLLLLLSGWRYRGKDHAWLSVGIGGLSGFCSGLAQTGGPPIVGYWLGRPIPPIVARANIVLFFGASDFFSMVSYAATGLISRESLVLSLIVGPIYALGVAFGASLFGRASEKVFRGICYALIAMAVIAGLPVLDGILR

SEQ ID NO: 11943 - protein, 462 aa, BradyrhizobiumColbertium
MTITRRGFLVASAGFAALPVLRATAAPLPREADIVVIGAGAAGIAAARRIMATGRKVVVLEAASQVGGRCVTDSTTFDTPFERGARWMYNPDTNPMIRLARSVGLDVLPAPSGQKMRIGRRNARAGETEQFLAALVRANRAIDEAARAKLDTSCASVLPKDLGDWAGAAEFMLGASFAGKDLKELSAIDKGRAQDRNAAIACRQGLGTLITKLGEQVPVALATPASRIAWSSRDVSVETQAGKIGARAAIVTVSTNVLTSGAIRFAPDIPKRTLDAASKLGLGSYDRIVLQLPGNPLGLSRDDILVEQSNSTRTALLFANIGGSSLCSIDVGGSFGRDLSQQGESAMVAFSKEWITKLFGSEAAAAVQKTSATRWNASPYVMGAMSAASPGGQLSRKILSEPVGNVFLAGEATHETLWGTVDGAWESGERAAEAALRKIGALKSEPADVPTQSTKKRRAPRR

SEQ ID NO: 11944 - protein, 325 aa, BradyrhizobiumColbertium
MGTVLDSVGKLIATYLSKEVPGYEPFTPSDPEHLRGVIEPGDVLLVEGNNRISGIIKYLTQSTWSHAALYVGPVAGAEEPDGEPHVLIEANIGEGVTSAPLSKYFPYHTRVCRPVGLSYEDRTTVCRYAINRIGFGYDTKNIVDLMRYLFPLPVPQRWRRRMIAIGSGDPTKIICSALIAQAFDAVRYPILPKITKAGSRSARREILHIRDSSLYMPRDFDISPYFEVVKPTIVHGFDYTALHWADKQKPLEEVAGSFSVFPETFVAPPLVPEASDEEASAQIPAEEVSAQLAETGTTFSAHFVQLSEHATYRARRRGDVCEVAA

SEQ ID NO: 11945 - protein, 91 aa, BradyrhizobiumColbertium
MRKDIKASVGKRLGRIEGQVRGLSKMVEEDRYCIDIVTQISAVRAALRRVEEEILKDHVAHCVEHAIASGDKADQREKIAELMAVIGRAER

SEQ ID NO: 11946 - protein, 753 aa, BradyrhizobiumColbertium
MTVDPATSKHRFEHHGETFHFCSAGCRTKFAADPAKYLAKERAPEPEMPAGTIYTCPMHPEIRQVGPGSCPICGMALEPEVASLETGPNPELADMTRRFWIGGLLSLPPVVLEMGGHLAGPHSWIDPTLSNWIQLVFATPVVLWAGWPFFVRGWQSLLTRNLNMFTLIAMGTGVAYVYSLIGTLAPQIFPATFRGHEGAVAVYFEAAAVITVLVLLGQVLELRARDATSGAIKALLQLAPKTARRVDADGSEHEVEIDTLHAGESLRVRPGEKVPVDGTILEGRSSLDESLVTGESMPVTKETGARVIAGTLNQSGSFIMRADKVGRETLLSQIVQMVADAQRSRAPIQRLADQVSGWFVPTVIVVALAAFGAWAWFGPEPRLAFGLVAAVSVLIIACPCALGLATPMSIMVGVGRGAQGGVLIKNAEALERMEKIDTLVVDKTGTLTEGKPKVVATVPAAGFAEDDILRLAASVERASEHPLADAIVRAAKEKQISIGQVEQFDSPTGKGATGKVDGKTIVLGNAKYLTSIGIDTKSLDAEAERLRGDGATVINMAVDGRLAGLFAIADPVKASTPEALKALAAEGIKVIMLTGDNRTTAQAVARRLGIAEVEAEVLPDQKSAVVTKLQKAGRSVAMAGDGVNDAPALAAAEVGIAMGTGTDVAMESAGVTLLKGDLTGIVRARKLSQATMSNIRQNLFFAFIYNAAGIPIAAGVLYPAFGLLLSPIIAAAAMALSSVSVVGNALRLRTTRL

SEQ ID NO: 11947 - protein, 150 aa, BradyrhizobiumColbertium
MQRITITIEDDLLAEIDAAAEARGYQNRSEIIRDLARAGLQQSSEDTAQTGPCVAGLVYVYDHAARDLSKRLVQEFHGHHDLALATLHVHLDDNNCMEMTALKGSADEVRHFADHIIAERGVRYGRVVMIPTGEGKPTKGRKHGHGHRHE

SEQ ID NO: 11948 - protein, 243 aa, BradyrhizobiumColbertium
MLDAAVKALSQMISPPMRSILWRSIGLALVLITVLAIGLQRLLSWFATHGAVWLEGLLGAGWHSSIEILSWIVSIAAGFGVVFGGVFLMPAITSLVASLFVDDVADIVEREHYPAERPGVALPFSQAILEGIKTAFLTILIYLVALPLVLFAGAGFLIFFLAAAWLLGREYFELAAMRFRPPEEAKAMRRDNAATIFTAGLFIAAFVSIPIVNLATPIFGMALMVHMHKRLSGPRPELIEPAR

SEQ ID NO: 11949 - protein, 260 aa, BradyrhizobiumColbertium
MLIIHQYIPIMAKITRKPVTRKAAVPKKKAKAVVAKPNAPARKTLKAIRRWTPAEVHEAFSRFRKANPEPKGELEHVNPFTLLVAVVLSAQATDAGVNKATRALFEVADTPQKMVDLGEERLREYIKTIGLYRTKAKNVIALSAKLLSEFGGQVPRTRAEIESLPGAGRKTANVVLNMAFGEHTMAVDTHVFRVGNRTGLAPGRTPLEVELGLEKVIPAEFMLHAHHWLILHGRYTCLARKPRCEVCLINDLCRWPEKTV

SEQ ID NO: 11950 - protein, 160 aa, BradyrhizobiumColbertium
MQIFSALLTPHRSLNRTGFLAVMLFLSVVSFVTGLAFLMMGAWPVFGFFGLDVLVIWWAFKANFRAARAREEIVVTPSELRVRRVSHRGQVAEWTFNPLWVRLDQEVDEEYGIEHLYLVSRGHQIQIARFLGPEEKASFYKGLVEALNAARRGPTYNPIT

SEQ ID NO: 11951 - protein, 288 aa, BradyrhizobiumColbertium
MARPGTQNAALRDYDSVRRAIAFISANWRAQPTIEAMADAAGVTPDELHHLFRRWASITPKAFMQALTLDHAKNLLRDSASILDAALDSGLSGPGRLHDLFVTHEAMSPGEWKNGGAGLTLRYGFHPSPFGTAIVIATDRGLSGLAFADHGEEKIALADMTRRWPNATYVEDHDGTAQLATRIFDPKLWRPDQPLRVVLIGTDFEVRVWETLLKIPMGRAVSYSDIACNIKSPKASRAVGAAVGKNPVSFVVPCHRALGKSGTLTGYHWGITRKQAMLGWEAGQLGMQ

SEQ ID NO: 11952 - protein, 207 aa, BradyrhizobiumColbertium
MSERLLVLVRHGQSEWNLKNLFTGWKDPDLTELGVNEAKEAGRKLKAQGLVFDVAFTSVLTRAQHTLDLILDELGQKGLPITKNLALNERDYGDLSGLNKDDARKKWGEEQVLIWRRSYDVPPPGGESLKDTLARALPYYVQEILPGVLNGKRTLVAAHGNSLRALIMVLEKLSPEGILKRELATGVPIIYRLNADSTVASKLDLAG

SEQ ID NO: 11953 - protein, 271 aa, BradyrhizobiumColbertium
MSDMRLIVAGAGGRMGRALVRAIAESKGAVLAGALEAPGSELLGKDAGVLAGLPANGIKLSADLWAMSREADGILDFTIPAATIANVAIAAERGIVHVIGTTGLSGSDNAVIKSVTNRAVVVQSGNMSLGVNLLAAVVKRVAKALDQNFDIEIVETHHRMKVDAPSGTALMLGQAAASGRGVTLDDHSERGRDGITGARRPGNIGFASLRGGTVAGDHSVTFLGPFERLTLSHQAEDRMLFAHGALKAALWAHGKQPGHYSMADVLGLSDI

SEQ ID NO: 11954 - protein, 103 aa, BradyrhizobiumColbertium
MAKGYWIGRVDVSNDEGYKPYAVANGPIFKKWGGRFVVRAGKFTTVEGASRTRNVVIEFPDYETALACYNSPEYQANIKVRQPHSVADLIIIEGYDGPQPQDG

SEQ ID NO: 11955 - protein, 236 aa, BradyrhizobiumColbertium
MRPAEIVPKDRLIVALDLPSVDAAEAMIAKLGDSVSFYKIGYQLAYAGGLPLIGKLANRGKKVFADLKMHDIGNTVTRGVESVAKLGATFVTVHAYPQTMKGAVEGRGGAALKILAVTVLTSYNDDDLHAAGYRLSVSELVEARAQQAQVLGVDGLVSSPEEVGSLRKIVGHQMSLVTPGIRPAGAASGDQKRIMTPGRAITAGADYLVVGRPVVEAADPKAAAEAIQEEIAEALG

SEQ ID NO: 11956 - protein, 205 aa, BradyrhizobiumColbertium
MRGVLVSPNAWDWMSAPKILIIPGSLRTGSHNAKLAAVAAYEFAQAGVDVTRISLADFPLPIYDGDLQAKSGVPKHAINLKRMIGAHHGVLFVTPEYNASVPPLLKNAIDWVSRVHELHEARGEVFRNRVFALAGASQSRLGAARALQALRLILSSCQANVIASQLTLAFADQAYDDMDRLKNENDIAALKELVRQLIDVSQRMM

SEQ ID NO: 11957 - protein, 199 aa, BradyrhizobiumColbertium
MPLPSSARALKKPRLDDEVRFLRSWIEKPLHMGAVMPSGKLLARTMAHYVDVDSDAPVVELGPGTGAITSALIERGVDQKRLVLVEYNPGFCALLRDRYPQAKVVQGDAYRLRDTLWNVLSAPAGAVVSGLPLVTKPMLTRLRLIRDAFAALAPGAPFIQFTYAVVPPIPKSLPGVSTEASERIWMNLPPARVWVYRKD

SEQ ID NO: 11958 - protein, 378 aa, BradyrhizobiumColbertium
MSTSTKRCYYETLEVERDADEGKLKSSFRKLAMKFHPDRNPGDETSEVKFKEINEAYEVLKDKDKRAAYDRYGHAAFEQGGGFGGAAGFGAGFASSFSDIFEDLFGMAGQRGRGGRERGADLRYNMEITLEEAFGGKTAQIEIPVSVTCEACSGTGAKAGTKPKTCSTCGGAGRVRQSQGFFTLERTCPGCQGRGQMIEDACPSCAGQGRVTRERTLSVNIPQGVEDGTRIRLAGEGEAGVRGGPPGDLYIFLSLAQHQFFQRDGADLHCRVPISMVTAALGGEFEVPTIEKSKTKVKVPPGTQSGRRFRIASKGMPVLRSRQMGDMYVQVVVETPQNLTKKQQELLAEFEKLSSGNTQPESEGFFAKVKDFFGNRAN

SEQ ID NO: 11959 - protein, 633 aa, BradyrhizobiumColbertium
MGKVIGIDLGTTNSCVAVMDGKNAKVIENSEGMRTTPSIVAVTDDGERLVGQPAKRQAVTNPERTFFAVKRLIGRRYDDPMVEKDKKLVPYKIVKASNGDAWVEADGQTYSPSQVSAFILQKMKETAEAHLGQKVDQAVITVPAYFNDAQRQATKDAGKIAGLEVLRIINEPTAAALAYGLDKTKAGTIAVYDLGGGTFDISILEIGDGVFEVKSTNGDTFLGGEDFDMRLVGYLADEFQKEQGINLRNDKLALQRLKEAAEKAKIELSSTTQTEINLPFITADQTGPKHLTMKLTRAKFEALVDDLIQKTVEPCRKALKDAGVTAGEIGEVVLVGGMSRMPKVQEVVKQLFGKEPHKGVNPDEVVAIGAAIQAGVLQGDVKDVLLLDVTPLSLGIETLGGVFTRIIDRNTTIPTKKSQVFSTAEDNQNAVTIRVFQGEREMAADNKMLGQFDLMGIPPAPRGMPQIEVTFDIDANGIVNVSAKDKATGKEQQIRIQASGGLSEADIEKMVKDAEANAEADKKRREAVTAKNEADGLVHSTEKALAEHGSKVAESERRAIEDAVSDLKEALKGDDAEAIKAKTQTLAQASMKLGEAMYKQQAEADAKKDAAQDDVVDAEFTEVDDDKNNKKSA

SEQ ID NO: 11960 - protein, 313 aa, BradyrhizobiumColbertium
MKLIRPLAALALLAATAFPAFAADAVFPPGLRLGMVPLIGLSTAKSFPGFESEDGSVKVLITELPPAAYGEVASAFNSGPAGVNGVKQDKIETPAGLAYFTTESGKAGDTPVKRYSMIVPGAGFSGYVAVQIPENATKIYTDEAVRQMFASTVTRRQVSAEEQIALMPFKITDLADFKDIRTLAPGSSIILADGDESIGYESKPFMILGVIGATPQQPDDRARFAQEAALQIPGVRESRITMSEPIRINGQQGFETRIDGVSGKDKIPVTVVQWIRFSSGGASLRIIASAPREQWLPAFTRFRAVRDGIQPKG

SEQ ID NO: 11961 - protein, 205 aa, BradyrhizobiumColbertium
MTEQDRQPQDTTAATGEPVVSKPYIMPDDPEPGSVETLQKEAAEARDRMLRTLAEMENLRKRTSKEVADARLYGITGFARDVLDIADNLQRALDAVPAEARANADAGLKGLIEGVELTERSLHSALEKHGVKKLDPQGQKFDPNFHQAMFEVPDASVPSGTVVQIMQAGYTIGERVLRPALVGVAKGGAKAAPAANNNESSGAPN

SEQ ID NO: 11962 - protein, 130 aa, BradyrhizobiumColbertium
MISAGIASWSGGENEDRQLIVRGHANLLEDLHALEDLERVRLLFDDLETKRGVIDLLGRAETAEGVRIFIGSENKLFSLSGSSTIISPYRDAAGHIVGVLGVIGPTRLNYARVIPTVDYAARIVSRLLGG

SEQ ID NO: 11963 - protein, 181 aa, BradyrhizobiumColbertium
MLQPRIGFWRQHDGCGAGQARQPHQGLVQRRLDRLRLADGGELALDRLPLGLVEVADLHQGVDEEAQPQFRRQPAGGGVGRIDQAELFQIGHDVADRGRRQRHGDQAGNIARAHRLAGREIAFDNLTKDVAGTLVELGKACARRDQMDRIVMGHRRQLLSGARNLSIRTASDKRGVCGLQG

SEQ ID NO: 11964 - protein, 237 aa, BradyrhizobiumColbertium
MRPSRRAPDELRPVTLERGVVKYAEGSCLVKFGDTHVLVTATLEDRLPPWLKGQGRGWVTAEYGMLPRATSERTRREASAGKQSGRTVEIQRLIGRSLRTIINLEALGERQITVDCDVLQADGGTRTASITGAWVALADCINWMKARNMVKANVLRDNVAAISCGIYNGTPVLDLDYAEDSEAETDANFVMTGDGRIIEVQGTAEREPFTEAELLALMALARKGVARLVDLQKLAVA

SEQ ID NO: 11965 - protein, 211 aa, BradyrhizobiumColbertium
MHRRITDKLVIATHNPGKLAEMKELLAPYGIAAVSAGELGLTEPEETGNDFRSNAAIALIAAAQATKLPAFADDSGIVVDALDGAPGIYSARWAGPSKDFNAAMAQIERLLQERGATTPDKRTAHFVSALCVAWPDDHLEEVEARVDGTLIWPPRGNAGFGYDPMFLPDGHTRTFGEMTRIEKHGLPPLGLGLSHRARAFVKLAEICLEPR

SEQ ID NO: 11966 - protein, 404 aa, BradyrhizobiumColbertium
MSRARAFSSEVDTGSRQENASKQGSEAFGVYVHWPFCLSKCPYCDFNSHVRHAAIDEARFASAFAREIATTAERAPGRQVTSIFLGGGTPSLMQPATVGAVLDAIGKHWTVASDVEVTLEANPTSVEATRFAGYRSAGVNRVSLGVQALDDASLKALGRMHSAREALDAVAIARRSFDRYSFDLIYARPDQTPAMWADELRLAIDEAAEHLSLYQLTIEEGTPFFGLHKAGKLKTPDEAVARALYDVTQETCDKLGLPAYEISNHARRGAECRHNLVYWRGEEYAGIGPGAHGRLDIEGVRHAIATEKRPEAWLMRVETGGHGIVTDELLNSEERADEFLLMGLRLAEGIDPERYKALSGRPLDPKRIALLREEGAITVDPTGRLRVTSSGFPVLDAVVADLAA

SEQ ID NO: 11967 - protein, 383 aa, BradyrhizobiumColbertium
MLGAPVLSACAGVQQSLSQFSNPFSSSAPPAQPAGPQQQATTAGTGGVKVGLILPLSAAGNAGLAAQSMRNAAEMALAEFQNPNIQLLIKDDNGSPQGAQAGAQQAVDEGAEIILGPLFAQSVPAVAQVARTRGISVIAFSTDSSIAGRGVYLLSFLPESDVNRIIEYSASIGKRSVAVLVPDNAYGNVVEAAVKAAVPRRGGRIVAFERYGADRANPARTVAQQLGSADALFIADDGDAVVTVADAMTAAGANLRNIQLLGTGLWDNPRVYASPALQGGLYAAPDPAGFRAFSGRYRTKYGAEPIRTATLAYDAVALVAALARTQGTTRFSSDVLTNPSGFAGIDGLFRFRADGTNERGLAVMKVTQGGGVAVAGSPKSFGA

SEQ ID NO: 11968 - protein, 316 aa, BradyrhizobiumColbertium
MRANPAPINTSEAQDAAPRGFSIDAHRLTASKAAPGLHLVATPIGNLGDITLRALQTLAGVDVIFCEDTRITRRLTERYAIAAQLKQYHEHNAEAARPKILEALAAGGSVALVSDAGTPLISDPGFKLVREVCAAGHAVHALPGPSSVLAALSVAALPTDRFFFEGFLPAKSAARRARLAELARIDATLVMFESGNRMQATLTDLAEIMGEREAAVCRELTKLHEEVRRAPLAEFARQADAPETRGEFVLVIGPPAADAEVLASDALDDLLREQLAAHTVKDAVAHAVALSGRPRREVYARALELAKDLRGGDGED

SEQ ID NO: 11969 - protein, 133 aa, BradyrhizobiumColbertium
MAKTENPREPKVASPERVAAFRTGISAESRAAAYLMAKGYRILAKRYRTPHGEIDIVARRRNLIAFVEVKARASLDDAAFAVTPRQQQRIIDAAQGWLVAHPEHAEFELRFDAMLIAPRSLPRHVLAAFDAST

SEQ ID NO: 11970 - protein, 314 aa, BradyrhizobiumColbertium
MKLNVAVQMDPIARINIKGDSTFALLLEAQKRGHGLSYYTPDKLSMVGDELVAPVQLLTVRDEPGNHFTLGEPRREALNGFDVVLLRQDPPFDLAYITSTHFLERIHPKTLVVNDPASVRNAPEKLFVMNFPQLMPPTLISRDLDEINAFRDRHGAVVMKPLHGHGGAAVFRVMPQDMNFGSLFDMFSVTFKEPWVIQQFIPEVKHGDKRIILVDGEFAGAVNRVPATDDLRSNMVRGGAAQETELTPREREICATLGPALRQRGLLFVGIDVINGNLTEINVTSPTGIRAIARLGGPDVAAKIWDVIEHKRKK

SEQ ID NO: 11971 - protein, 271 aa, BradyrhizobiumColbertium
MNTARIVVLVIALGAGGVAAYLASGYQNAPAPVLSVAEKLPTVEVLVAKNDIQLGQAVKPDDLQWQAWPAATASSAFIRRDSRPEAQTQIAGSIARVPLMQGEPIREQKLVRAEGSGFMAAILPSGMRAVSTEISAETGAGGFILPNDRVDIVLTRRLKNPDGDNGPTGGNDLVLSEVILTNIRVLAIDQAPKEKDGQNAVVGKTVTLELRPDQVATLSAARQGGTLTLALRSIVDANAVDGTPEDQAIRRTGGVNVIRYGVQARQLTSQK

SEQ ID NO: 11972 - protein, 496 aa, BradyrhizobiumColbertium
MRIRGKRARSFLAGTVLMLGLLAASDVVRAADAPVGDQAPMQASDLGLSPVATVAPARTRFLSLGVGKSVVIDLPREVKDVLVADPKIANAVIRSAQRAYIIGGQVGQTNVVFFTADGQQVASYDIAVKRDLNGMRTALRQSLPGVQIEGVGDSVMLTGSVSSPVEAQQAGDVAAKLVGGSDKVVNNIVVRGRDQVMLKVVVGEVRRDIVKQLGVDLSASLNAGTAVGNFNNSNPFSVAGGPIVGSNGLGLAGVSKGVATVSATMRAMESAGVMRTLAEPSLTAISGESATFIAGGEFPIPAGYSCDPVTHVCTTQISYKKFGISLNFTPVVLSEGRISLRVMTEVSELSNTNSITLTQAVSATSSNSITIPSIQTRRAETTLEIPSGGSMAMAGLIQQQTKQAINGLPGIDQVPIIGALFRSRDFVNNETELMVIVTPYVVRAVAQKELSRPDDGFAPASDAQTALLGRMNRLYGVARRVDPINGAPDDFGFIID

SEQ ID NO: 11973 - protein, 243 aa, BradyrhizobiumColbertium
MMTTSADRRRNRRIALALTALSVMLGACNTTEIVTQTVPTDYRQRHPIAVQEGKKSIVIFVGKARGGLSAAQHSDVAGIAREWLHEGTGSIVVDVPVDTANSRAAAATFQEIRSVLTSAGVPSRAVVQHPYRPEDPGLLPTIRLSYSKIKAVAGPCGLWPEDIGPNILDPGYNENRPYFNLGCASQRNLAAMIDNPADLEQPRGETPAYTARRNIAFERYRKGTPIATPSPDADKAKLSDTGK

SEQ ID NO: 11974 - protein, 428 aa, BradyrhizobiumColbertium
MTGIHDDADDPRHPEEHIAPVPRISVQAFCETEQTLAAVTAAGQDRRLAKAHLTAQEGGLAAAIEVYESMPTPNVIVIESDGTRDILEGLDDLAGVCDPGTRVVVIGNPNDTAPYRELVRRGVNDYVVGPVETLDVVRSICSLFSASEAIITGRVIAVVGAKGGVGASTVAHNVAWTIARDLSLDSVVIDLDLAFGTAGLDYNQDPVQGIANAVLSQDRPDTALMERLLAKCTDRLSLLAAPATLDRVYDFGAEAFDAVFDTLRMTTPCIVLDVPHQWSGWTRRALVNADDIVIVAEPDLANLRNTKNMLSVLKAARPNDRPPLYCLNQVGMPKRAEIEVKAFAKTMESQPIAVIPFDSKLFSTAANNGQMIAEVAKNHRTTLLFQNMANRLAGRGEVKKPKRSLLEPLLKKLKGRPGRGSAPHRKAS

SEQ ID NO: 11975 - protein, 257 aa, BradyrhizobiumColbertium
MSKRPSPALASARFLLPAFLVLVLGGCQTNGIEDVTGALGAKSETAARSDAKPELDALRERYRAKPSDPGVALAYGKALRDTGQRAQAVAVLEQAVLAHPNNKALLAGYGRALADSGNFQRAFDVLGRAHAPEDPDWRILSAQGAALDQLGRNEEAQQYYAAALKIVPDEPTVLSNLGLSYMLQNNLAKAEQVLGRAYQRNQSDVRVRANLALVLGLQGREAEAEILVKADLPPDQAAAKVTALRQLLAKKQQRADR

SEQ ID NO: 11976 - protein, 70 aa, BradyrhizobiumColbertium
MCSRLAKIHFGAGSLPRDCTITDISDGGVKVVAEFLEVPPQFTIIFAPDYSRQCRLRWRIGCEFGAEFVD

SEQ ID NO: 11977 - protein, 278 aa, BradyrhizobiumColbertium
MRSISRVTDVSLNTVTKLLVDAGSACAAFHDATVRNVKSERIQCDEIWSFAYAKAKNVASAKAAPIGSGDVWTWTAIDADSKLILTWLVGDRDASAANAFIADLKPRLANRVQLTTDGHKAYLHAVSQEFGPDGVDYGMLVKLYGSDPQPQKRYSPAKLIGIDKDLILGSPDVAHISTSYVERQNLTMRMSMRRFTRLTNAFSKKVENHYHALSLYFVWYNFVKAHKSLKGATPAMAAGLVSDRMTMTDIVQLIDLREGPPKKRGPYKKRDQAAEISN

SEQ ID NO: 11978 - protein, 73 aa, BradyrhizobiumColbertium
MPKGPKGEKRHADTVQNAMLIGRIATGEVEDTPSKAPNRAKGGAVGGKARAGALSPERRSEIGKKAAQKRWES

SEQ ID NO: 11979 - protein, 512 aa, BradyrhizobiumColbertium
MVQRVSTVAFEGIEARAVDVQVQVAPGLPAFAIVGLPDKAVSEARERVRAALIASGLALPARRIIVNLAPADLPKEGSHYDLPIALGLMAAIGAIPPDALAGFTVLGELGLDGSIAPVAGVLPAAIGANSREEGLICPAACGSEAAWASPDIQIIAASSLIQIANHFKGTQVLSRPSPKVHEAAASTLDLRDIKGQESAKRALEIAAAGGHHLLMIGAPGAGKSMLAARLPSILPPLSPGELLEVSMIASVAGEIEGGALTARRPFRSPHHSASMAALTGGGMRAKPGEISLAHQGVLFLDELPEFDPRVLDSLRQPLENGEVAVSRANHRVTYPARFMLVAAMNPCRCGNAFEPGYACKRGRIDRCTGDYQARISGPLMDRIDLRIEVPAVTAADLILPPPAEGSAEVAARVAAARDIQLARYADAGLPHIRTNAEAPASVLEEIARPDAQGQKLLRDAAETMRLSARGYHRVLRVARTLADLDHSDKIGRLHLAEALSYRALAEDVRQMA

SEQ ID NO: 11980 - protein, 154 aa, BradyrhizobiumColbertium
MLRFKFLASVVPLLAAAVFARAEIGSVSHPCIALGETTVELTPLFWTAGVHVAFTDDPARATVRVRITDDADTADFTVVDGLGSEPDSCQANPSTRLVSIAAQPVDGGQVIYLSSEGPADYRIYVRSKTFSQREAAALIVGARGGQRHLQAASL

SEQ ID NO: 11981 - protein, 749 aa, BradyrhizobiumColbertium
MAMGRTFRIKVRMRRFRRQHPRLAFAIRSFLIFSATFGGAYGFVSGSRSENAGYDPHAFAIGASFLFALACLGLATLSIRLRFVNKRLRTLAAHNEALIDRNWELKEAEERARSLFEQQGDLIVLRDTSGRITFANEAYCALAGQARSALVGTRFDFDVLEQGDSARESNGTRIHDQKIATPLGARWIAWREGYVRADAGQPAELQSVGRDVTDRTESERALSDARDQADAANRAKSRFLAMASHEIRTPLNGIIGMGGLLLDTNLTPEQATYARAVKTSGEALMALIEELLDYSKIEAGKLDLDQRPFGLSSLVEEITELLAPRAQAKSLEIAAYVDERLPLEVVGDAARLRQVLLNLAGNAIKFTASGGVALIVEPGIWPNEISFLVRDTGIGIAAEAQQRIFREFEQADERVARTYGGTGLGLSISERIVKRMGGRITLESEPGKGSTFEVAVPLPSSQANAAQTAFPSPDLSGKSILLVAAGIEASLIARRLERWGGQTCMVADAAVAEALLPERSWHAVLIDREIGPAIADRLGEAARAHALQRLVLLTPSSRHDKLSPAFTGFLVKPLRAASLAARLALTAEVASPDLAPEPPASSAGIAPAKGLAILVAEDNEINALLMRSLLTKLGHRVVIAINGETALESWLAASSAGTPYDLVLMDIQMPQLDGIEATKRIRAQEAATGGHQTPILALTANTLVEDRYACFEAGMNGFLIKPLDREKLEEALAGLAASRPVAVPSPAGT

SEQ ID NO: 11982 - protein, 209 aa, BradyrhizobiumColbertium
MNVLCRLALIALFAGISQHAAADTPELISSLKQGGYVLIFRHTATDDTQKDVYPFKFDDMSAQRQLSDKGRDMARQIGTAIKDLAIPVGDVYTSRLNRAVEAGKLISGREVKPVDALTDSSNASASGMANPTGTNAKAGQAVRQLVDAPPKPGTNTFLVTHKTNIADAFGKEAGNVQEGEAFVYKASDSGPAGFAGRIKIVDWTAKPGQ

SEQ ID NO: 11983 - protein, 362 aa, BradyrhizobiumColbertium
MTSDRKAGDHVRTSEDRSFLILLAAISVAFGWVLWPFSGALLWATLLAIIFAPLYRRVLETLPGRDNLAALFTVIVVIVMVLIPVAIVVASLVDQGAELYQRIQSGEISFAHPLQQLKSALPGWAASLSDRLVGIDFSALRERLSGLVVPAGQQLAGHALNIGQLTVEFVASLLVMLYLLFFLLRDGEELNARIRDALPLRPGHTNEILDAFTLAVRGTIKGIVLVALIQGALGGLIFWLLGLTAPLLAGALMALVSLLPVLGSALVWVPVALYLLVSGAVTKGLILLAFGTFVIGLADNFLRPILVGQSIQMPSYVVLLATLGGLASFGANGFVIGPLVAAMFLTAWHIYVGSKVPQEARK

SEQ ID NO: 11984 - protein, 114 aa, BradyrhizobiumColbertium
MVDRLRSAAGQLEAPTCPDCHVEMKWFRSELLADEPTPVIAHLFVCPHCKRAAQADTIFRGSQAPPDKLSAPRFIANATSFRIGRIPNPAGAERPFAPRNDGHFRASCGTFEPT

SEQ ID NO: 11985 - protein, 318 aa, BradyrhizobiumColbertium
MDIRAPEQQYNPYRVYTREQWARLRDDTPMTLEPGEFDRLRSLHDRLDLQEVEDIYLPLSRLLSIYVDAMQRLYYAERQFLNIRDRKVPYIIGVAGSVAVGKSTTARVLQALLARWSPRPKVELITTDGFLYPNAVLERHGMMQKKGFPESYDLPLLLSFLSDIKAGRRHVRAPVYSHLTYDIVPNQWAEIDQPDILIVEGVNVLQTGKLPRDGKAVPVVSDFFDFSVYIDADEVALRQWYIKRFLALRDPAFTDPKSYFNRYALLSDEEATATAIAIWERTNLANLEDNILPTRPRATLILKKGADHTVESVALRRL

SEQ ID NO: 11986 - protein, 107 aa, BradyrhizobiumColbertium
MQRFTIHDLAETIDARAASGGEASYTRKLLDKGAEHCAKKFGEEAVETVIAAVENDRAHLIAESADLLYHFLVLLKARGIKLEEVEAALEKRTSMSGLEEKASRKGG

SEQ ID NO: 11987 - protein, 257 aa, BradyrhizobiumColbertium
MFKVRVIPCLDVKDGRVVKGVNFVDLRDAGDPVEAAIAYDAAGADELTFLDITATHENRGIMLDVVRRTAEACFMPVTVGGGVREVNDIKTLLRAGADKVSINSAAVSRREFVKEAAEKFGEQCVVVAIDAKRVKRPGGDRWEIFTHGGRNSTGIDAVEYAQEVVSLGAGEILLTSMDRDGTRQGFDIPLTRAIADSVPVPVIASGGVGNLDHLVDGIRDGHATAVLAASIFHFGEFTIREAKEHMARRGLPMRLDA

SEQ ID NO: 11988 - protein, 245 aa, BradyrhizobiumColbertium
MILFPAIDLKNGQCVRLEQGDMARATVFNLNPAAQAQSFVEQGFEYLHVVDLDGAFAGKPVNAQAVEAMLKTIKIPVQLGGGIRDLKTVEAWLDKGITRVIIGTAAVRDPELVKSAAKKFPGRVAVGLDARDGKVAVEGWAETSQVTVLEIAQRFEDAGVAAIIFTDIARDGLLKGLNLDATIALADAISIPVIASGGLASIEDVKAMLMPRAKKLAGAIAGRALYDGRLDPAAALALIRDARAA

SEQ ID NO: 11989 - protein, 216 aa, BradyrhizobiumColbertium
MSVAIIDYGSGNLHSAAKAFERAARSLENPQKVFVTSDPDQAYEADRLVLPGVGAFADCRRGLDAVNGMVEAINEAVRVKARPFFGICVGMQLMASRGKEHVITEGLNWIGGDVEKIRPRDESLKIPHMGWNTLEVLQEHPVLNKLPLGPKGQHAYFVHSYHLNAASEADVLARADYGGPVTAIVGKDTAIGTQFHPEKSQRFGLALISNFLRWKP

SEQ ID NO: 11990 - protein, 176 aa, BradyrhizobiumColbertium
MPVYTVHAPSPGGADLRATDKFVFVRDGFHFWAMIFGPFWLLWNRLWLALIGWVLFTAAFSAGLSSLGIGRSSIVFANLVVALLMGFEASSLRRWTLSRGKWRQLDVVIADNGDTAERRFFERWSQKQHGIVNDQWAVDRGGPPPTRSTPGQQFSNPPPIPAGGIIGLFPEPGGSR

SEQ ID NO: 11991 - protein, 197 aa, BradyrhizobiumColbertium
MRTATIKRKTKETDIEVTVNLDGTGVANIATGIGFFDHMLDLLARHSRIDLTVKAVGDLHIDHHHTTEDTGIALGQAVKQALGNMAGITRYAGVHMPMDETLTRVVIDISGRPFLVFKADFPRDKIGEFDTELVREWFQAFAINAGVTLHVETLYGDNSHHIAESCFKGLARALRTAVAIDPKAAGEIPSTKGSLGG

SEQ ID NO: 11992 - protein, 186 aa, BradyrhizobiumColbertium
MQASQNSSPVWHGTTILTVRKGGRVVVGGDGQVSIGQTVIKSNAKKVRKLGKGDVIGGFAGATADAFTLFERLESKLEQYPGQLTRAAVELAKDWRTDRYLRRLEAMMIVADKDVSLVLTGTGDVLEPEAGVMAIGSGGNYALAAARALLDTDKDAETIVRRSLDIAADICVYTNRNLTIESLATG

SEQ ID NO: 11993 - protein, 160 aa, BradyrhizobiumColbertium
MIQSYTFRPMTLADMPLIRRWLDAQHVAEWWHDPETLEFIGGDLDHPDLAQFIVSHNDRPLAYLQCYQLGEWHVSFGPHPAGTRGLDQFIGEADMLGCGHGSAFIRAFIDHLFARDVPRIVIDPSPSNTRAIRAYEKAGFVPKHEIVTPDGPALLMIRDP

SEQ ID NO: 11994 - protein, 205 aa, BradyrhizobiumColbertium
MTLAASPAARTAFPPLAWVGIALLLLALQASILLLMGRVPICTCGTIKLWHGVVNSSENSQHVADWYTFSHVLHGFLFYGLTWLLFVRLPFLPLSWPVRLIIAMLIEGAWEIVENSPFIIERYRAGTISLDYYGDSIVNSVSDNLAMILGFLAARALPASATVLLGLAFEMVLALHIRDNLTLNILMLVHPIEAVKQWQSGPPII

SEQ ID NO: 11995 - protein, 434 aa, BradyrhizobiumColbertium
MTDFSPREIVSELDRFIVGQGDAKRAVSIALRNRWRRQQLTGSLREEVLPKNILMIGPTGVGKTEIARRLAKLANAPFLKVEATKFTEVGYVGRDVEQIIRDLVEVAIAQVRERKRKDVQARAQLAAEERVLDALVGANASSATRESFRKKLRAGELNDKEIEIETQSSGGGMPMFEIPGMPGAQMGAISIGDIFGKLGGRSKTRRLTVESSHEILVNEESDKLLDTEQLTLEAISAVENNGIVFLDEIDKICARDGRVGGDVSREGVQRDLLPLIEGTTVSTKHGAVKTDHILFIASGAFHVAKPSDLLPELQGRLPIRVELQALTRDDMRRILTEPEASLIKQYVALMQTEGVTLDITDAAIDALADVAVAVNSTVENIGARRLQTVMERVLDEISFTAPDRSGETVKVDADFVQRHVGDLAKNADLSRFIL

SEQ ID NO: 11996 - protein, 374 aa, BradyrhizobiumColbertium
MTVPIVQNPWRLLLAINAAVIVGVFIHKIQLPPYVPYIHLLVDYHFGFIKRALIGAVVALFTDKVPVWLVFALGGATWLVTLGLYAKLFQKTFGFTAGTLPLFVFTAGSPFFLKNFMHTLGHFDIFGCALAIVLLLMPAGSLLFVATAALFSIVLVLIHHIHLLMYVPAIVTIVVIRHYLACGCNRRNVAFGATALAVASALFFAAQFLGTMPVPEADFVGYLKTRMVDPSRTDLLQFSYIWYQPLAKEIADTWGRLPHNILGVPVFALLIWLHTPLWRYLARLIGALASETHRRLVVAALIGIGLAYVVMFAMVFDYSRWISNWAVCMFLILHAVKMLPAKQEAALIPAEDRKTSIFGVIITLIPRVGIIRPF

SEQ ID NO: 11997 - protein, 196 aa, BradyrhizobiumColbertium
MKRSSRPPALEPRPSPRRRALSEEDRELWDLVAKQVKPLKKHRAAKAHAAPRAELPPTAPAKRSASSPRSVAAAPAPRLPKPSVPPLAPIGKRERTRLSRGRSEIEARLDLHGMTQMRAHRALSGFLHRAHHDGLTFVLVITGKGRSGGESGVLRRQVPEWLSLPEFRAFVVGFEQAAIGHGGEGALYVRIRRARI

SEQ ID NO: 11998 - protein, 513 aa, BradyrhizobiumColbertium
MAPEARIKIFLKTSATALCAGAVALSAFSLGAEAARRHHRSHHHHHHHHLPRMPAAPPRALPYPQLPLPLEIPGAQYLPLAWTDVKGWDDDNHLAAYKTFRASCRPINAQNGAAEPKALGNSLSEPCRAAKTLDLADDGKAKTFFEENFAPVRISRLGEPDGFVTGYYEPVLEGSRTQTDVYNVPVYRRPSNLFVRGYKQDSLSLPNKGPVYRKIGRRKLVPYYDRGEIEDGKIAGRGLEIAWLKDPTDLLFAQIQGSARIRFDDGSSVRLNYDAYNGYPYTAVGRILIERGIIPKEEMSMQKIREWMAQNPDGAKELRRANRAYIFFREVNLSDKDEAVGAQGIPLTAGRSIAVDKALHVYGTPFFIEGELPIESDRAKTPFRRLMIAQDTGSAIIGPARADLFFGAGAEAGRISGRLRHPMQFVMLVPKSLDPAPRAAKLPVPDPRPSEKIAKLFPQTLPAKAATPAAAGSQDKNETVAIAGPVPLPVPRPAIESAPEPRRPVKNRPHRQQ

SEQ ID NO: 11999 - protein, 235 aa, BradyrhizobiumColbertium
MDIYTIIFLALAVFIFLRLRSVLGQRTGNERPPFDRTAARNALGGAQDNNVVTMPGKVIDQAPLAPTAEPTPPADRWKGLAEPGTALAQGLDAIVERDSSFDPRHFISGARGAYEMIVLAFANGDRRALRDLLSPDVYESFDAAIKEREKNEQKTETRFVSIDKAELVGAEMRDRTAQLTVRFVSQMISATRDKAGNIVDGSADTVADITDIWTFARDTSSRDPNWKLVGTGSAN

SEQ ID NO: 12000 - protein, 161 aa, BradyrhizobiumColbertium
MTNGNGTPPEAAQAPQLNVLAQYTKDLSFENPNAPSSLQQQNQPPQINIQINVSANNLSEQEFEVTLSIEGKAEAAAKVMFSFELAYAGVFRIANVPKENLHPLVMIECPRLLFPFAREIIATAVRDGGFPPLMLDPVDFVGLYRQNMERQMAAQGQAGQA

SEQ ID NO: 12001 - protein, 240 aa, BradyrhizobiumColbertium
MREIVLDTETTGLDPLRGDRLVEIGCVEIFNRMPTGQSFHVYINPERDMPAEAFAVHGLSSEFLATKPLFHEIADEFLEFIGDAPLVIHNASFDIAFINAELDRIKRAAIPRERLVDTLLLARRKHPGVSNRLDDLCSRYAIDNSHRTKHGALLDAELLAEVYVDLVGARQSQLLLAAEGEEIRVASAGDAPRRQRLVPLAPRITEAEREAHRAFIATLGDKAIWNEYLPAPAAAVAAQA

SEQ ID NO: 12002 - protein, 199 aa, BradyrhizobiumColbertium
MRILGLTGSIGMGKSTTAKLFAEAGVPVYDADAAVHQLYEGEAAPAIEAAFPGTTANGKVDRQKLSARVVHDPAAIKQLEQIVHPMLGASRQKFFADAETANAPVVVLDIPLLFETGGEKRVDAVVVVSTSPELQRQRVLARGTMDEAKLDAIIAKQMPDAEKRKRADFVVDSSHGLEPVRAQIAHILAEVVKMPQRRA

SEQ ID NO: 12003 - protein, 202 aa, BradyrhizobiumColbertium
MGLWRGTSPLILASQSSARKMLLGNAGLEFKAITADIDERGIQAASRLSNPREIGLLLAGEKAKAVSAGHPGSYVIGADQTLALGTRLFNKPSGRAQALAQLRDLAGKTHELNAAVAVARDGTIVFEDVSVARMSMREMTDAELSAYLDAAGDAVTTSVGAYQLESLGIHLFERIEGDHFTILGLPLLSLLAFLRRERLVAV

SEQ ID NO: 12004 - protein, 279 aa, BradyrhizobiumColbertium
MPTSNNYFHLHLVSDSTGETLITVARAVAAQYANVTPVEHVYPLVRSQKQLDRVLDEIEEAPGIVLFTLLEKDLVSRLEDKCKEINVPSLSIIGPVMQLFEAYLGAATTGRVGAQHVLNAEYFKRIDALNYTMIHDDGQHVEGLDEADVVLVGVSRTSKTPTSIYLANRGIRTANVPLVPGIPVPSQLETLTRPLVVSLHATPERLIQIRQNRLLSMGADSGSDTYTDKQSVTEEVAFARKLSAKHDWPLLDVTRRSIEETAAAIMKLYSDRQRNRPSE

SEQ ID NO: 12005 - protein, 85 aa, BradyrhizobiumColbertium
MVCGFLWSLTPRKGVCDTRGGTTANFLHTAAHRNKFGALPRWKRDCADNSLDKLPTGGSKVLSPTGLSEIAGAIRDMWMDVKKHA

SEQ ID NO: 12006 - protein, 144 aa, BradyrhizobiumColbertium
MFEDVYLWIKALHVIAVIAWMAGMLYLPRLFVYHCEAEIGSKQSETFKIMERRLLKAIINPAMIVTWLAGLYLAWSGHWFSFGWLHVKLALVLALSAVHGFFSRWLKDFAADRRPRSQKFYRIINEVPTVLMIFIVIMVIVKPF

SEQ ID NO: 12007 - protein, 421 aa, BradyrhizobiumColbertium
MREIKLQDLKSKTPAELVSFAEENGVENASTMRKQELLFAILKQLSLAETDIVGEGVVEVLSDGFGFLRSPDANYLPGPDDIYVSPSQIRRFGLRTGDTIEGHIRSPKEGERYFALLKVNTLNFEDPEKAKHKVNFDNLTPLFPNQRFRMEIDDPTRKDLSARVIDIVAPIGKGQRALIVAPPRTGKTVLMQNIAHSITHNHPECYLIVLLIDERPEEVTDMQRSVKGEVVSSTFDEPAVRHVQVAEMVIEKAKRLVEHGRDVVILLDSITRLGRAYNTVVPSSGKVLTGGVDANALQRPKRFFGAARNIEEGGSLTIIATALVDTGSRMDEVIFEEFKGTGNSELILDRKVSDKRTFPAIDISRSGTRKEELITDPQVLKKMYVLRRILNPMGTMDAIDFLLDKLRSTKSNSEFFDSMNT

SEQ ID NO: 12008 - protein, 452 aa, BradyrhizobiumColbertium
MHPRDQTIFALSSGRAPSAIAVVRVSGAQAGSVLTTLAGNPPPPRQASRRLLRGGSGQPIDDAVVLWFPGPASATGEDVAEFHVHGGRAVLAALLGEICKIPNTRAAEPGEFTRRAFENGKLDLTEAEGLDDLIHADTDRQRRQALRQLQGLLGNRARDWRERIIEASALIEAGIDFSDEGDVPAELRAPAVKAIKALHDEIAEVLAAQGHSERLREGLVVAIAGEPNVGKSTLINQLARREVAIVSPYAGTTRDVIEVQLDLDGYPVTVIDTAGIRETDDPVEQEGVRRARARAADADLVLWLVEGGRAGDPDAMRPLRRSGADDPSSGGAVWIVRNKIDLGRNQGAIAPGEFAISASRGDGIAELVEALVKFAARFFGMSEGALVTRARQRDLLQQALDSLHRSLDLVEHGEELAAEELRAAAFALGRLLGRVDVEDVLGAIFQKFCIGK

SEQ ID NO: 12009 - protein, 171 aa, BradyrhizobiumColbertium
MRYQSGQGAHPGRSGRSFTAGVAAANHDDVETCSLCSHRGLLAQGRKSGKRKLEAAVSRETRATRVADVFAKTTPCTVEGASGNPVFHVKRKRASLRAQRSNPDPPILRTEKLDCFLAKAARNDEHRGVNGALPMPPRPVDLLKSIADHILVFHVKQSRPGWQDDGVPPST

SEQ ID NO: 12010 - protein, 595 aa, BradyrhizobiumColbertium
MTALVTHRFSTVGAMSCNPAIGGLGKGHLVREVDALDGLMGRVGDAGGIQFRVLNRRKGPAVRGPRAQADRKLYAAAMQAAILETEGLSVIEGEADELITADGRVTGLRLADGRELRAGAVVVTTGTFLRGLIHLGEKNWPAGRVGEAPAMGLSGSFERAGFTLGRLKTGTPPRLDGTTIDWSAVEMQPGDDPPEPFSVMTERITTPQIQCGITRTTAVTHEVIRANVHRSPMYSGQIKSSGPRYCPSIEDKIVRFGDRDGHQIFLEPEGLDDSTVYPNGISTSLPEEVQLAILASIPGLERVKMVRPGYAIEYDHIDPRELDPTLQTKRLRGLFLAGQINGTTGYEEAAGQGIVAGLNAALSASGAALTVFDRADGYLGVMIDDLVTRGISEPYRMFTSRAEYRLTLRADNADQRLTEKGIALGCVGRARTRHHRTKMDALNAARALSKSLTITPNEAIKHGLSLNRDGQRRSAFELMAYPEIGWSQVRAIWPELAAVDPVIATHLEIDAKYDVYLERQSADVEAFRRDEGLVLSEVDYQMVPGLSNEVRGKLEKARPFTVGQAGRIDGMTPAALGILAAYLRREARKNSKAIA

SEQ ID NO: 12011 - protein, 257 aa, BradyrhizobiumColbertium
MKQRGPGGERPLSRRPTAGEGAGGHAEPGPPRPKIEKASANDRSLDAIIAADKVAALKLAPVSHETEVRLDRYIALLREWQSKTNLIAPSTLPNLWTRHIADSLQLVDLAPTARRWADLGSGGGFPGVVLACVMAGKPGASVHLVERIAKKAAFLREAIRVTTSPGVVHLAEIGDNVDRITGPVDCVTARALAPLHQLIGFAEPLMRKGAKALFPKGQDVEAELTEATKYWSIQPKLHPSRTGDGWIVELTSAERQG

SEQ ID NO: 12012 - protein, 289 aa, BradyrhizobiumColbertium
MSVIDEPGQEQSAQDKAAEVPHGHPRILALANQKGGVGKTTTAINLGTALAAIGERVLIVDLDPQGNASTGLGIDRRNRSLSTYDVLVGEAALREAVVSTAVPRLHIAPSTMDLSGLELELGTTPGRAFKLRDAIGALNNNVSPDADYTYVLIDCPPSLNLLTVNAMAASDAILVPLQCEFFALEGLSQLLQTVEQVRSTLNPNLSIHGIVLTMFDSRNNLSNQVVADVRQFMGEKVYKTMIPRNVRISEAPSYGKPVLVYDLKCVGSEAYLRLATEVIQRERELRTTH

SEQ ID NO: 12013 - protein, 295 aa, BradyrhizobiumColbertium
MADEARSRLGRGLASLIGDVGGEAQHVDRPRAQRKVPIEFIKPNPRNPRRTFSDTELKELSDSIKQHGVIQPIVVRPVKGVHDRYEIIAGERRWRASQMAGLHEVPIVPVDISDSDALEFAIIENVQREDLNPMEEAQGYHALANEFKRSQEDIAKVVGKSRSHVANMMRLTKLPAEVQAFIATGELTAGHARALIGVPDPLAAAKRIVEEGLNVRQAEALAHEEGVPERKPQKARASGGKEKDPDTIDLEKRVSDALGLKVTVNHRDPGGSVQINYRNLDQLDEVMKRLAKGAL

SEQ ID NO: 12014 - protein, 347 aa, BradyrhizobiumColbertium
MTIWTMVALRGKEIDAFLARPDAGRPIILLYGPDAGLVRERADALIASAVDDPNDPFSLVKLDGDELSAEPSRLVDEAMTVPLFGGRRAIRVRAGSRSFASGIETLAEMSVRDCRIVIEAGELRPESPLRKTCEKAKTAVAIGCYPDTERDLARLMEDELRIANLRIAQDARAALMSFLGGDRQASRNELRKLTLYAHGKGEVTLEDVMAVVADASELKLDPIVDGAFAGRPDIVESEFAKAMIAGTYPGVIISAAQRQAAWLHKSALAIADGTPASAVLDGGFPRLHFSRKPAVETALRNFTPARLAAIIEQLATAALDTRRQSTLAAAIAQRALMAIAANAKRRG

SEQ ID NO: 12015 - protein, 172 aa, BradyrhizobiumColbertium
MLAVAALAALTAGCFQPMYAERNDGTPGLREKLMGVELPPINKPNASREARVGVEIRNALAFKLYGTATGMPPTHRLDIRFTTTRSSLIVSATTGLPTSENLGIDAQYNLVEVVTGKSVMSGSTFSRVSYDMPGSYQRFSRTRAVRDAEDRAANEIAENITTRLASFFTAGT

SEQ ID NO: 12016 - protein, 874 aa, BradyrhizobiumColbertium
MTSERYNARDAEPRWQRLWDEQKIFVSKNDDPRPKYYVLEMFPYPSGRIHIGHVRNYTLGDVLARFMRAKGFNVLHPMGWDAFGLPAENAAIERKVAPKAWTYDNIAAMKKQLRSIGLSLDWSREIATCDPSYYKHQQKMFLDFLRAGLAEREKRKVNWDPVDMTVLANEQVIDGRGWRSGAVVEQREMNQWVFKITKYSQELLSALDGLDRWPDKVRLMQRNWIGRSEGLLIRFALDAATTPAGESELKIFTTRPDTLFGAKFMAISADHPLAQAAAAKNPELAEFIAEIKKIGTAQEIIDTAEKQGFDTGIRAVHPFDPSWKLPVYVANFVLMEYGTGAIFGCPAHDQRDLDFVNKYDLGNTPVVCPEGQDPKSFVITDTAYDGDGRMINSRFLDGMTIEQAKEEVARRLETELRGNAPVGERQVNFRLRDWGISRQRYWGCPIPVIHCPKCDVVPVPDADLPVKLPDDATFDKPGNALDHHPTWKHVTCLKCGGKAQRETDTMDTFVDSSWYFARFTDPWNENAPTTPAVANRMLPVDQYIGGVEHAILHLLYSRFFTRAMKATGHIALDEPFAGMFTQGMVVHETYQKADGSYVQPAEVKVEVGGNGRRATLLATGEDIQIGPIEKMSKSKKNTVDPDDIIETYGADVARWFMLSDSPPDRDVIWSDERVQGASRFVQRLWRLVNDCVALAKAAPAARPASFGPDATALRKAAHGALDKVTTGIERLHFNVCLAHIREFTNAFSEVLQRPGQPAPDLAWAIGEASQILVQLFSPMMPHLAEECWQVLGQKGLVSEANWPKIERDLLVEDSVTLVVQVNGKKRGEVTVATLAQNPEIEAAVLALDAVKLALDGKPVRKVIIVPKRIVNVVG

SEQ ID NO: 12017 - protein, 358 aa, BradyrhizobiumColbertium
MRLDKTAIPQMYSSFDDPDYDYAASIAGRAMRSMAEQRIAPTPANFAVWFQYFAGGHDDLRNAIDLLIDHNRPFDARTNKDLFETYVANQVSAAVVDTSERLQALMGAAKEFLATAIADNHSQMQAISEVADQGRAGVDPKLLVAQLMNELARAATRATRLEAGFAEKTRELDVIRDSLSRSEQRARTDMLTGLANRRALDEFLRKAQATAEWGEPLCVLMLDIDHFKSFNDNFGHGVGDQVLRLMAKVLREKVREQDLPARYGGEELIAVLPDADLAACAEIAERIRRAIAEATITRRSTGEILPSISVSIGAAQYRVGEAISDLIERCDRALYLAKSSGRNRVVTEIEVERAGAAG

SEQ ID NO: 12018 - protein, 567 aa, BradyrhizobiumColbertium
MASVSLNRKRAKLKQVLGIRARLALLAVILVAPLMFDRIRSLEDTRTRQIAQAAAEFTTVARHSADAQREVISSVETILKSEAFIRASVGGISKSCDVLRASLPSSLPWIRTLLIAGQDGRIQCATNNMYVGLDLSDRPYFQQAQQTGRFILSDFIMSRPVLSPTVMAVYPVSAFSGVPDAVVLATVNLDWMSKVMSNLGGRPGITAVLVDSAGTVLAAPADQRSAVGRPLDNMPLMSAIADKALRSDQDEGSLSFLAADGSRRAVSYIRIAGTNARLITSIDEDKVSAAVSRDIRTAYLQFAFVVVFVLLGALIAAEKLVIKPIEMLVDMAKRLGEGDLSARAARNRLPAEFVPLARAFNAMAAQLSQRERELIASNDRLTVMASIDMLSGLANRRGFQSRLDFEWMRAQQYGSELALLMIDVDHFKLFNDTYGHLEGDSCLTRLGESLSGIAADTMGFAARYGGEEFCLLLPNTDVMRAVEIGEQVRAAVLKLCLPHITSNHMIVTVSIGVAATKPNESLRPGDLIEAADAALYAAKHRGRNNVVEHGVQAIETGTTEVIFAASA

SEQ ID NO: 12019 - protein, 229 aa, BradyrhizobiumColbertium
MTEANTAPVTGHSPNALAAVEAEIARACKDAGRDRASVTLIAVSKTFVADAITPVIAAGQRVFGENRVQEAKGKWPALTSVYPDIVLHLIGPLQSNKAKEAVALFDAIHSVDRPSICQALAKEIESQNKHPQLFVQINTGEELQKAGVAPDEADAFLASCRDTYGLTISGLMCIPPVDEPPAGHFALTAKIAARNGLKNLSMGMSADFATAIMLGATHVRVGSAIFGHR

SEQ ID NO: 12020 - protein, 261 aa, BradyrhizobiumColbertium
MLDKDQIDAASELLVRHWRDGTKLDALETRLRPQSRAEGYAIQAALERRSSGTLFGWKIAATSEAGQKHINVTGPLAGRIMSDTVIADGGTASMKGNEMRVGEPEFAFRMGRDLPPRATPYSADEVLAAVETLHPAIEIPDSRFADFVSAGEAQLIADNACAHLFVLGAPTIANWRAMDLVAERPQIALRGERHIGHGRNVLGDPRIALAWLANELRGLGITLRAGEVVTTGTCHPPLPIQGGDHFAADFGVLGKVSVGFV

SEQ ID NO: 12021 - protein, 149 aa, BradyrhizobiumColbertium
MTIPVALGRGGILANKREGDGGTPRGSFRPRRLWWRGDRHSRPQTFLPTRMITAADAWCEDPGDRHYNQSIRLGEGQGGDRLKRADHLYDFIVEIDHNTRPRVAGRGSAVFLHLARDNFGPTAGCVSMTKSAMLQLLRRLGPRTRIIIG

SEQ ID NO: 12022 - protein, 228 aa, BradyrhizobiumColbertium
MPNARKILIVDDDTDLRDTLVEQLSLHEEFEASAVDTGAKGASAAKANSPDLVLMDVGLPDTDGREVVRSLRKGGFKAPIIMLTGHDTDSDTILGLESGANDYVAKPFRFAVLLARIRAQLRQHEASEDAVFSVGPYSFRPGSKMLTAANARKVRLTEKETAILRFLYRAGQMPVSRETLLQEVWGYNSGVTTHTLETHIYRLRQKIEKDAANPEILVTEAGGYKLVP

SEQ ID NO: 12023 - protein, 147 aa, BradyrhizobiumColbertium
MSIDDDVALLERVPTLRLLGDASLRMLAIGSEQRDFVRGDVLFNLGDDADAGFVVQRGAFRVEDGAGAEMIAGPGALIGELALVVPMKRPSSAIALEHASVIRIARSLFQRVLESDPAAAVRLRDEFAVRSSQIASDILMAGAKLTS

SEQ ID NO: 12024 - protein, 271 aa, BradyrhizobiumColbertium
MRLSLTTWNINSVRLRIDLVAKFLKSARPEVLCLQETKCIDDAFPLKRFKRLGYEHVALNGQKGYHGVAIVSKIPFETKDIRTFCDKVDSRHISVSFGEKAGIAKPLVLHNFYVPAGGDIPDPALNEKFDHKLRFLDEMKACEPLHPRGEDRHILVGDLNVAPHENDVWSHKQLLKVVSHTPVETEKLKAALEAGEWVDVARERIPMSEKVYKWGSYRSPDWTVGDRGRRLDHIWVSRALKDSVQDFRILRDARSWDRPSDHVPVTVTLDL

SEQ ID NO: 12025 - protein, 303 aa, BradyrhizobiumColbertium
MRRGASEHHFTQNRYLLLPEITLKGRPAIQDEALIRHPDIRYAAFIAARSARVAGVLLVTAAMVTGASFAQTVPVPKPAPKGREGAPAGGGPTVTGAMQTPPNPVIPDPRRNVPSSIFQTFDANQKAQAAKVSAYLSSLQTLVGNFVQVGPDGSKTQGEFYIQKPGKVRFEYDAPSPIDIVADGSSLVVRDRKLATQDVYPLSQTPLRFLLSDRIDLMKDTNVVNVSADDVYVSVTIEEKQALVGTSRLLLMFGAKDGQLKQWTVTDPQGYDTTIAVYNLDSSKKLDPGMFKIDFTNYGPSPG

SEQ ID NO: 12026 - protein, 823 aa, BradyrhizobiumColbertium
MSAIERVIPLVGHLPPSIREGLARRMRELTGLGLIALAGVASAALMTWSVQDPSLSHATSRPIRNILGYAGAIGADLAMQILGLGAIMLVLTVAVWGWRMMTHRPFDREALRLGSWILCTVIAAGFASCWRHGGAWPLPTGLGGVVGDALVRAPAVIFGPAGTIYRIVLGTILFVAMTATFLIACGLGARERDEELSAIEDEDKPLDEDEESDRGSVSLGWLFHALMSTKARLGWLLGAAYRSLVSSGPKTKATQFSRQEPNLGGGRAAPSISPQSEDEDTEDEHEEEEGEEEEEEQPAARAPRKKAAPKTAAKKSSDKFDLPSVSMLAAPKAGDRQPLSKAELEANSRSLEGVLQDFGVRGEIVKANPGPVVTLYELEPAPGIKSSRVIGLADDIARSMSALSARVAVVPGRNAIGIELPNAHREKVYLRELLVAKEATDTVAKLPLCLGKTIGGDPVIIDLARTPHMLIAGTTGSGKSVAINTMILSLVYRLRPDQCRLIMVDPKMLELSVYDGIPHLLTPVVTDPKKAVVALKWAVREMEERYKNMAKLGVRNIDGYNTRLLELKAKGEEPTRTVHTGFDKETGKAIYEEEKLSLDPLPYIVIIVDEMADLMMVAGKDIEGAVQRLAQMARAAGLHVILATQRPSVDVITGTIKANFPTRIAFQVTSKIDSRTILGEMGAEQLLGQGDMLYMAGGGRISRVHGPFASDEEVEKVVRHLKTQGQPEYLEAVTAEEPTEDEDGAVFDATGMGGDGGGDLFQQAVAIVKRDRKASTSYIQRRLQIGYNRAASLMERMELEGIVGPANHAGKREILVEEEDSHM

SEQ ID NO: 12027 - protein, 404 aa, BradyrhizobiumColbertium
MVMTASSRAPQASGSSDSERSPFVRLNELLAPHQPGKPLISLAVGEPQHPVPDFVGPVLAKHIADFGRYPANKGTDPFRKAAGAWLSSRFKLPRPLDPEDEILVLNGSREGLFLAAIAAARYVGPRPGKPAILMPNPFYPVYGAGALAAACEPVHLPTTVENGFLPDLDAIDETTLARTVAIYLASPANPQGSVAKPDYFRRLKQLADRYGFVILSDECYSEIYTREAPGSALECAGPDYTRVVAFQSLSKRSNLPGLRVGFAAGDKRFIGMFLELRNIAAPQVPVPLQHVATVAYGDEAHVEENRRLYRIKFDLADQIIGNRYGYRRPDAGFCVWLNTSAVGDDVSVTLRLFKEAGVRVVPGSYLARVQPDGFNPGAGYIRLALVQDGETTAQALHRLVETLG

SEQ ID NO: 12028 - protein, 482 aa, BradyrhizobiumColbertium
MTFKRPHGAGLAALAVGLFAATAAYAEPTVNKGDNAWMMTSTVLVLLMTIPGLALFYGGLVRSKNMLSVLMQVFYTVCVVTVIWAVYGYSLTFTGGSDFIGGFSKAFMMGVTPETKAATFSVDTNITELIYVCFQMTFAAITPALIVGAFAERMKFAAIALFVPLWVTLVYFPIAHMVWYWQGPDLIQDAAKALAAATDAAAKTAAQAKLDELNADAGWIFKMGAIDFAGGTVVHINAGIAGLVGALLIGKRVGYGKELMAPHSLTMSMIGASLLWVGWFGFNAGSNLEASGGAALAMTNSFVATAAAALSWMFAEWIVKGHPSVLGVISGAVAGLVAVTPAAGFSGIMGAIVLGLVAGVVCLFFCTVVKNALGYDDSLDVFGVHCVGGIVGAIGTGILVNPALGGAGIIDYSAIPPKVADYDFATQMLAQIKAVVTTLVWSGIGSAILYKVVDVIVGLRTNIESEREGLDITEHTERAYNM

SEQ ID NO: 12029 - protein, 108 aa, BradyrhizobiumColbertium
MAIIKPFKLEEVRDALTAIGVHGLTVTEVKGYGRQKGHTEIYRGAEYAVSFLPKIKIEVAVASDQVDKTIDAITSAAKTGQIGDGKIFVINLDHAVRIRTGEADAAAL

SEQ ID NO: 12030 - protein, 433 aa, BradyrhizobiumColbertium
MAGYLRRAAAMAAGIGFASAATSSAYAAGSEINTADTAWMIVATALVLMMTIPGLALFYSGMVRKKNVLATMAQSLAAVALISILWVAFGYSLCFVGDGPWIGTLDRWFLAGMTMDSVNPAAKTIPESLFMLYQMTFAIITVALVAGSVADRMRFSAYLLFSVAWFIFVYIPLAHWVWGGGFLASMGVLDFAGGLVVHLSAGTGGLVAAKVLGRRHGYGTENLSPFDLSLAVMGTGLLWVGWFGFNGGSALAANSRAVMAITATHLAACAGALTWAVIEWSTRRKPSVLGMISGAVAGLGTITPASGFVAPWHGIVIGIVAGAVCYWACTWLKHRFNYDDSLDVFGVHGIGGLTGTLLGGVFATSAIGGTAGLLEGNPQQLLIQLYGVAVTLVWSAGVSFILLKLVGLFVPLRVSREQELEGLDISQHGEALQ

SEQ ID NO: 12031 - protein, 112 aa, BradyrhizobiumColbertium
MKLVVAIIKPFKLDEVRQALTAIGIHGMTVTEVKGYGRQKGHTEIYRGAEYVVNFLPKLRIEIAVASDLADKAVSVITATARTGQIGDGKIFVTPIDHALRIRTGETDSDAL

SEQ ID NO: 12032 - protein, 300 aa, BradyrhizobiumColbertium
MASWFYASEGKQQGPFPEGQFRDLIAQGVVRPDTLVWTEGMAGWQKAAEIPGLIGGGGAPPMMPGGPPMMGSGGYAGAGGYGGPGGASLAVDFGILEFTWRTLALVIGSFFIIPVPWLFVWYTQWIVSCVKVPGRPNLSFTGNAMTLVPWFFGFIVLAIAIGYIGSEILSNLLFIVQIVLYWLLIKWMIANLASNGQPLGLSFTGSIWAYIGWNLLFAISIITIIGWAWVAAAQMRWFCRSIEGTRREIVFKGSGLDILWRGIVAVILCSLIIPIPWVYRWIMNWFASQTELVARGSVTA

SEQ ID NO: 12033 - protein, 287 aa, BradyrhizobiumColbertium
MSKSLIDLIAILELEQLEVNLFRGNSPKTSWQRVFGGQVIGQAMVAACRTVEGRLPHSLHCYFILPGDPQIPIIYQVERLRDGKSYSTRRVTAIQHGNAIFSIMVSFHTEEESAFDHQDTMPDVPPPEKLTAEEVAKQPMFKEMPEFIRRYYESDRPIELRPVELGRYFGQKIDDGRIHVWIKTAATLPDDPALHMCALAYASDFSLLDAIMARYGRTLFDKRMMPASLDHAMWFHRPFRADEWLLYAQDSPSARGGRGLTRGSIFKPDGTLVASVAQEGSVRERKS

SEQ ID NO: 12034 - protein, 63 aa, BradyrhizobiumColbertium
MLADLSWAKQCGETRAASPSFRHSGVATREPGIQRLSARDSGFIAIAMPRNDEISKAPSCPKA

SEQ ID NO: 12035 - protein, 406 aa, BradyrhizobiumColbertium
MSVQGSIVIGGGAFAGLALALALRQGLGPEIPVIVADPALGARPSRDPRATAIVAACRRLFEVIGAWDAVRGEAQPILDMVVTDSRLEDATRPVFLNFAGDVAPGEPFAHMVENRRLIDALVARAEAEGIDLRATTVASYDARSEGIDVTLGDGSVIAASLLVAADGARSKLRERAGIATHGWEYDQSGIVVTVGHERDHEGRAEEHFLPAGPFAILPLSGRRSSLVWTERRAEAARIVALSDEEFHAELERRFGLHLGEVKALDKPRAFPLSYFVARSFIAERLALVGDAAHVIHPIAGQGLNMGLKDVAALAEVVVDAARLGMDIGGADVLERYQRWRRFDTMAMGVATNSLNFLFSNESTLLRTVRDIGLGLVDRAPPLKNLFIRQAAGLTGEVPRLLKGEAL

SEQ ID NO: 12036 - protein, 65 aa, BradyrhizobiumColbertium
MNAATERPEASVDPKLLEILVCPLTKGPLEFDSAKQELISRSAKLAYPIRDGIPIMLPEEARKID

SEQ ID NO: 12037 - protein, 225 aa, BradyrhizobiumColbertium
MPINIEYRGPADLPEIIPVFPLPGALLLPRGQMPLNIFEPRYLAMVDDSFRDGHRLIGMIQPDVAHTPKNSDKPALFRVGCVGRITQLAESGDGRYILELTGVSRFKVVEELEVLTPYRQCKVDFFAFVDDFTARMGEDDVDREALLAVLADFLKANNLKVDWEGVESAPNEALVNALAMMSPYGPAEKQAMLEAPDLKTRAEILIAVTEMDLAKKRTSGDPPLQ

SEQ ID NO: 12038 - protein, 307 aa, BradyrhizobiumColbertium
MTIIDQGNGAAGPVAADLIKDTTTQAFVKDVIEESKRQPVLIDFWAEWCGPCKQLTPVLEKAVKAAKGKVKLVKMNIDHHPAIPGQMGLQSIPAVIAFVNGQPADGFMGAVPESQVNAFIERLTKGVTAPGEVNVAEIVQEAEAVLAEGDAAAAAQIYAEALQHESTNIAALAGLAKCYAVSGAMEQAKQTLAMVPESKRNDPAVKAVQTAIDLAEQAKSLGPVAELEQKVAANPLDHQARFDLATALNAQGNRAAATEQLLEIIKRDRKWNDDGARKQLVQFFEAWGGTDDATVEGRKRLSTILFS

SEQ ID NO: 12039 - protein, 69 aa, BradyrhizobiumColbertium
MFVDTTPRHKLADLTKLPNLNHMKFVAHLSVDKSAGMVKPHARDPEHISFWMYASYEPEKAVIKIEPLS

SEQ ID NO: 12040 - protein, 47 aa, BradyrhizobiumColbertium
MGIDKVDELYAVCDSNTLVFSKVVLSIFRRANELYLYYAEGRVQAAD

SEQ ID NO: 12041 - protein, 891 aa, BradyrhizobiumColbertium
MPPLADPESSAFDRFEIPANAWSAFSLTREDRQNLQEDQVSALRGHWAINAPRLAPRIAHLGRWFQRVADQPAAIWWAAFQHGLHPDIQRQIVYSSERAEPTSAPLVRKAWRYLINSWRTRNRDASDEYYQWVAQVKAEGWTPEAVRALGVILRPVVKVDRPFNSSPRPPNAVERLGDLMHLDVTYPVHDEGLTIPDSFLPAVIKTFRDNLELGAALEEELGGYGLHSLLSIEKEEGEETSEREYKHGINSPLFRYFDLLQALLKVDALAAKSEIGSWRGSTGPIAAHLIIWSLNDKRLVPRNEIADVLRIVSREEFWNSAHQRDLLLALSARWSEMPTRTKQSIERRILQGRKRWPRESGNDFKESRAHAILNRIHYLHSKQCVFTFDIDAVSRTLQADAPQWKPEWAKGAAFSMGMRTGWVKTDTRSDELQDKPLSEILDVAASLSGRAQDRFFVERDPFAGLCDTKPVRAFGALNAALRDGKFRDEFWREFLNHTSSRQEKVRFSVLIACRLARLPDESLSKILNAASDWMLRVHKNLLPDHREILNDLWGRLVPLLARPDAERDRGGARAQSVDWATEALNSPVGYLAQLLLTDSVIGKLDRNDRMPDWWKIRADELLSLPKDHRRHALAILCHNLVWLFARDEAWVISSLLPCIQRQDADSDAFWAGFFWGARIPQPPLFKLIKPALLRLAHRQSETRRKHAEILAGMILAGWGARVDDGDARAVSDAELTHTLQEADDEFREQLLWHLQNWTKRADEKWREDAFNLLKRVWPKQISLKTPRISAKLAELAFAQGSRFPLFVDCILPLLVPTDQDYINLPIERHDNERLVEKYPESVLSLLDAILGENARHWPYGVSDILDRVEKSKPELLADVRMIKLKRVRSTT

SEQ ID NO: 12042 - protein, 168 aa, BradyrhizobiumColbertium
MRHVQSTISSLMQFASNSLDPRAFAALGDTVQETLLAALDSVLVQEEMVRARPRSFEQHRKVVARLEDLVRALPSQPLYSDDLAGGVGVSVRTLQTAVNTVHGMSLHQYLRLKRLWLVRCQLTSGFSGLSVKTVAQSNGFWHMGEFSQLYKDAFGETARETIAHANGK

SEQ ID NO: 12043 - protein, 43 aa, BradyrhizobiumColbertium
MKCRGDRDREANTGGARLSLNLPGKAAVQKQAATRKHKGGAFG

SEQ ID NO: 12044 - protein, 342 aa, BradyrhizobiumColbertium
MPTGADDLALVAALTQTFPGFTFSVASVDDHYWRDTRSVMDGDGTRVANYRPWMEAELAKDNGNIAALWKRLRETDYRITEWCGNSVFAVAPTGPGVADYVQIALGREVEWCAGPIVNPSYRPWGKEELFDPSWIAHEGLTESNVVTGPTYRLLKRAGSSVVHLRSFLARRARLERENREAKRQEMERRLVREVTRDRTIETPFLQLVPGWFDHVPRENRFFQDWDESSAASERVYAHWALDIYDYDHKGTREIGFVTRPLRTPAEKLCAGEESVHILMDRIDAIDREIGVPFGWFFLMTHGNWVTPEVGEAIAQGLREHRVVLPDRDARVLLRWADRSYGF

SEQ ID NO: 12045 - protein, 193 aa, BradyrhizobiumColbertium
MLIWYPEVEPRDGSYVRPAVRIESGAKSALDPNHPATIRPYVSDDVDNLDLVFTGVTTIDAERTFWDKVVIAHGLRRWFERRGELRQEGQRVSRHFYDLHCLFGSNVGKRALADGALGEDCVRHARMFFDRRDYDLASALTGSFALVPTVAMVEALQRDYANTKAMIFGEAPGFDDILKSIAEIERIANKFAP

SEQ ID NO: 12046 - protein, 142 aa, BradyrhizobiumColbertium
MARSVKTPRRKPRLRTELSELDERRLQEAVALFGLPKAEVVRRLIRASVQAGPALSAENTRAVVALASQVRMVGRNLAQVLKAIHRGQAVRIEDTEPVWRGLHDIVSAINDELTEMTVAYGSKLRREAKLTLPADLAESEPA

SEQ ID NO: 12047 - protein, 91 aa, BradyrhizobiumColbertium
MPAVPAAIRSKKEASGERQREAKSRGRDQNPFEPYGERSSSRPYALRLPDAIDLVVRQMAAEQRTHPLRIVDKILYDGLKRLGRLPPPAGD

SEQ ID NO: 12048 - protein, 397 aa, BradyrhizobiumColbertium
MQELGQIPLSPFGSRALSPGVLKINSMVRACAAGTPAQKWKVFRDISAARAALGVPDRALIVLNALLSFHPYAVLTAGSADLVVFPSNRHLSLRSHGMAASTLRRHLAALVDHGLILRRDSPNGKRFARKSADGDVEIAYGFDLAPIVARAAEFDRLARRIEEEARLARNLRQRFTVLRRDVVKMIAAGVEAGIAIDWPGTHGKYQAIVSRVPRTPAAEALEPIINELQELANDILAVLNAHLCEPAAAPPPAPSDAEADGNASPRLLTFHPTASTDPDHNRRTDRPETIPLRVVLDACPDIIDYARGEIRSYRELLTTAALVRPLLGISPSAWEEAGQVMGEMQASIVVAAILQRGVAIKNPGGYLRNLTRRAAAGEFSIWPMLLALSATRLKKAT

SEQ ID NO: 12049 - protein, 110 aa, BradyrhizobiumColbertium
MLNEMLAIRLQQLEIENGGMEAFLPKTGLARGTYYTILRGIGNPTLRTMERIASSLNMTVFELLGFEVSDAKRALQKSGVDYDELASAIAKKNRADRTLARQTRSKKLPI

SEQ ID NO: 12050 - protein, 105 aa, BradyrhizobiumColbertium
MQACTEIAEYAKGGISNWRDFLATAAVVRPMLGISPSAWEEAQIVMGEVQAAVVVACILERSAAINSAGGYLRGLTTRAAAGEFSLGPILMAQINSKLRDQKRRA

SEQ ID NO: 12051 - protein, 62 aa, BradyrhizobiumColbertium
MERIAAGLNMTVFELLGFEVSDAKRALQKSGVDYDELASAIAKKNRADRAVARQARSKKLPI

SEQ ID NO: 12052 - protein, 411 aa, BradyrhizobiumColbertium
MEPYQSTTPFGRRSLSLAHVATQIVASSRPPEKVVHKWKIFKTICTARARIGVSERSLSVLNALLTFHPETALSGEDDLVVFPSNQQLALRAHGMPASTLRRHLAALVDAGLIIRRDSPNGKRYARKGRGGEIELAFGFELSPLVVRAEEFEILAAEIEADARALKLVRERITICRRDIAKMIATGIEEGVPTRRAGQGPADWQEIHKGFRAIIDAIPRTATCAELEPIAETLSQLADDILNLLRTHIKAEILSANESHSGRHIQNSNPDSLIDLEPSLREGGGARAEPEQQTPRMPEGSYPLGMVMQACTEISEYATGGISNWRDFLATAAVVRPMLGISPSAWEEAQRVMGEVQAAIVVACILERSATINSAGGYLRGLTTRAAAGEFSLGPILMAQINSKLRDMKRRA

SEQ ID NO: 12053 - protein, 339 aa, BradyrhizobiumColbertium
MARKISFDLPENEERIPQEAPASSNASKVRPLLGLDRPLKQPGALGAISQTLGGMSEKVKRADELEKRLVEGQTIVDLEPSLVDDSFVPDRMEASPADEAAFRELIREHGQNSPILVRPHPDNPDRFQVAFGHRRLRAARALGINVRAVVRALSDEELVVAQGQENSGRTDLTFIERARFAARLEERKFSRETIMAALNVDKAALSRLIAIATRVPAEVIDAIGAAPSFGRVRWQELTDLLDGDDNRRRAVAHVKTPGFSDLESDKRFESIAAALREVASRARAETWSAHDGTHAAKVMRSGKKTTLTFDDRVTPQFGDFVRERLQSLYDEYKKADLDR

SEQ ID NO: 12054 - protein, 279 aa, BradyrhizobiumColbertium
MNFKGGSGKTTTAAHLAEYLAFRGYRVLAIDLDPQASLSALFGLQPELDVADNDTIYGAIRYDDQRREMAEIVRATYIPTLHLIPGQLELMEFEHETPKALMTREGRDSMFFSRIGEALAQVSDAYDVVVIDCPPQLGFLTLSALCAATAVLITVHPQMLDVMSMSQFLNMTAGLLDVVANAGAATEYDWMRYLVTRYEPSDGPQTKLVGWMRSILGGRVLTHPMVKSTAIADAGLTKHTLYEVDRQQFTRQTYDRAVESLDLVNGEIEALIKQVWKRA

SEQ ID NO: 12055 - protein, 204 aa, BradyrhizobiumColbertium
MTRDILDRLLATCQTDRLADTRDLAILLLAFASGGRRRSEVARLRVEQLSDEPGVPLDPNDRNSPLLPCVSIQLGRTKTGDADDEGRVFLVGPPVDALREWLTRADIHKGPIFRAIDRWEALEERALTPQSINLIVKRRCGLAELDPREFAAHGLRAGYLTEASRQGIALQEAMQQSQHRSVQQAAGYYNEAERAQGRAARLGL

SEQ ID NO: 12056 - protein, 305 aa, BradyrhizobiumColbertium
MIRSDGTRVGELRPWMMAELAKDGGDIRALWTRLKETDLQITEWRGNSAFVFAPTGTGVADYIQIALGREIEWRAGPVVNPDYRPWGEEELLDPSWPRHEGLPDTDRLAGPIYRLLDRAGGAFVHVRSFLDRCGRIERDKREAKRPELERRVIREVGPDGTRETPFLQAVPDWFDFVPRELRFFRDWEASSARSQLVFAHWALDVRDYTHKGEREVGFIPRPLKIPRERLQMTPETSVHQLMDRIEAIDRELALPFGWFFLMTHGHWVEPDVGLAIADGLKAQRVRLPDPDAAVLLRWSERTYGF

SEQ ID NO: 12057 - protein, 213 aa, BradyrhizobiumColbertium
MKEGLGAKASMIVREEAYDTSEPAIDERVVKLKAAGADIFISFTSQKFAAQGIKKAAEINWHPMHIISNVSASVGGVLEPAGVEISQGILSATYMKDGSDPQWNADEGMKKFYSFLAQYEPKANKLDAGVVYGYAAAQTMMKVLQMCGDDLTRENVMRQAASLKDFEPDTLLPGIKINTAPDDFAPIEQLQMMRFKGRKWELFGDVISSEIGH

SEQ ID NO: 12058 - protein, 105 aa, BradyrhizobiumColbertium
MVLEACPDIVDYARGEIRSYRDLLTTAAIVRPMLGISPSAWEEAGITMGETQAAIVVSAILQRGVAIKNPGGYLRNLTRRAAAGQFSMWPMLMALSAGRLKKATA

SEQ ID NO: 12059 - protein, 155 aa, BradyrhizobiumColbertium
MRFQDIEDAIGKLLELDDDWIEDFCRRRARNARDDGLIFPVQCEPVDREIRLDSGCYHFHDVAPQDRETLPTIAQEPRLFLDLARYPVKLTRARDDRPKIEAVSEFDAAIDGFSREAFTVRAIAAQDQTMIDKGGQVAPKRRGRHPMRTQRKISV

SEQ ID NO: 12060 - protein, 245 aa, BradyrhizobiumColbertium
MNYSEYIVYIDESGDHGLTNINPDHPVFALAFCVVEKAKYIEKIVPAFQRFKFDFWGHDSIVLHGHEIRKATGDFNILLNPNTRASFIDRVTQLIGDAEFTLIAAVIDKAKHVKKYSDPADPYSIALGFCMERLQRFLIDKGQANVQTHLQVECRGKTEDAKLELEFRRICDGQNAVGKMQNLEIRFMDKKHNSTGLQLADLVAHPIGRHVIKPDQPNRAYDALKSKFRASPNGKIEGYGLKIFP

SEQ ID NO: 12061 - protein, 365 aa, BradyrhizobiumColbertium
MFNHRHYVPILKWKMGEYQALSRLAGPVKDRITPLLEIPPVGFDFETQRNKESADDHLGDFGKRLKSKWQARPCFVDLKHLPAATRCAGGRHCVEVLFETARAEGCAAIPVVSFANDAAFLAAVATVSRQDRRGVCLRLSLPDFDRHNLQADIENLLRPMADGYGECDLVIDLGTPTYVPIAIMVTIMQTLMARVPMLNQWRTVTIAGTSYPNSVANIAAPYQLLPRHEWQAYRAFIATIGHETRIPTFGDYAVAHPDLVELDMRMIKPFAKLRYTITDHWHVARGTPVRTHGFGQYQQMCATLVALPYFSGRAFSAGDAYIADCAAGTVTTGNLSTWVWVSTNRHLTKVVDDLASAHALSVAAE

SEQ ID NO: 12062 - protein, 50 aa, BradyrhizobiumColbertium
MQVAIYDGDIDPAGAMTQAQLVEHQSVGVAVMLFQHLSVQSLSDIPISHD

SEQ ID NO: 12063 - protein, 66 aa, BradyrhizobiumColbertium
MDMTKRVISVRLSDERLKQLDEVCSRLGMNRSQVIDAALRLVPEVMSGKAELHYDPERFKRSGQTE

SEQ ID NO: 12064 - protein, 274 aa, BradyrhizobiumColbertium
MRILFVGDVVGRSGREAVAEYLPGMVKDWSLDLVVVNGENSAGGFGITEAIYQEFLEAGADAVTLGNHSWDQREALVFIERADRLVRPANYPRGTPGRGAALVETKNGKHALVVNALGRVFMTPFDDPFAALERELGACPLGVAADAIVVDFHCEASSEKQGIGFFCDGRASLVVGTHTHVPTADHQILAGGTAYMTDAGMTGDYDSIIGMQKEEPLRRFTSGIPSARFEPAAGAATLSGVAVETDDATGLALKIAPVRMGGRLEPATPKFWLS

SEQ ID NO: 12065 - protein, 198 aa, BradyrhizobiumColbertium
MSASKAELRAKALARRDALSEKKRAAAAAKLARRGLPFELLPGSIVSGYSPIRSEIDPMPLLKKLAEQGAKLALPCVTARGQSLIFRIFHPSDRLMLGPLGIPEPSPAAAEVIPDIMLTPLAAFDRLGHRIGYGAGHYDFTFAHMRKAKHIIGIGLAFAAQEIEAVPALSHDVALDYVLTESDVFDFRSSDVAHSLRG

SEQ ID NO: 12066 - protein, 127 aa, BradyrhizobiumColbertium
MSHINVTINGRQYRMACEEGQEVRLLKLAETLETRIQSLRGKFGEIGDARLTVMAALTVCDELIDTSNRVRTLEQELTELRDFRNAAVERARMTQTAVVNALNAAAERIEKSTQVLNRTVGGGIAIG

SEQ ID NO: 12067 - protein, 106 aa, BradyrhizobiumColbertium
MNDRVSNSSAMTESSAVEIEIATRRLTAALDALESAVERRRDADRDENELAARIQALGADRSRLADELDGALVKARKLERTNREISDRLDSAIVTIRSVLDTGEDG

SEQ ID NO: 12068 - protein, 661 aa, BradyrhizobiumColbertium
MTQVDHTRMANAIRGLSMDAVEKAKSGHPGLPMGAADIATVLFTQFLKFDINATDWPDRDRFVLSAGHGSMLLYSLLHLLGSPEMTIDQLKDFRQLGSLTPGHPEHGHTKGIETTTGPLGQGISTAVGMALAEKMLAAEFGKKIVDHHTYVLASDGDLMEGVSQEAIAMAGHWKLNKLIVLYDDNGISIDGPTSIADSVDQVKRFKSAGWAAEKIDGHDQAAIADAITRAKKSSKPTLIACRTTIGFGAPTKAGTSKVHGEALGADELKGAKEKLGISLEPFSVPDDVLKAWRAAGSRGAAARQEWEARLAELGSRKRAEFERRLRHERPASLAKALRAYKKELLEKPMTAATRKSSEAVIEVIAGAMPMEFLAGSADLTGSNNNKAKSATAFSAKTPKGRFIHYGIREHGMAAAMNGIFLHGGFAPNGATFLVFTDYARPAMRLAALMGAGVVYVMTHDSIGLGEDGPTHQPVEHLSALRAIPNMRVFRPCDAMEVAECWELALNRVDGPTVLALTRQNLPQLRTSAPNDNPCQHGAYELVAAQGEAKATLFASGSEVEMAVAAQKQLAERGIPTRVVSVPSLELLLAQPKERRDAIIGNAPIKVAIEAAVRWGWDAVIGQDGEFVGMHSFGASAPLNKIFQHFGITAEAAVNAVLKRIS

SEQ ID NO: 12069 - protein, 335 aa, BradyrhizobiumColbertium
MAVRVGINGFGRIGRNVLRAIAESGRKDIEVVGINDLGPVETNAHLLRFDSVHGRFPGTVTVDGDSINLGSGKIKVTSERDPSKLPWKDLGVDIALECTGIFTSKDKASAHLTAGAKRVLVSAPADGADATIVYGVNHETLTKDHLVVSNGSCTTNCLAPVAKVLNDLVGIETGFMTTIHAYTGDQPTLDTLHKDLYRGRAAAMSMIPTSTGAAKAIGLVLPELKGKLDGVAIRVPTPNVSVVDLKIVAKRATDAKEINAAMKRASEQQLKGILGYTSAPNVSIDFNHDPHSSTFHEDQTKVQNGTLVRVMSWYDNEWGFSNRMADTAVAMAKVI

SEQ ID NO: 12070 - protein, 398 aa, BradyrhizobiumColbertium
MTNTFRTLDDVDVTGKRVLLRVDLNVPMENGRVTDATRLERVAPTITEIAGKGGRVILLAHFGRPKGRDAKDSLKPVAEALARVVKKPVAFAEDCIGEPAAKAVASLKDGDILCLENTRFHKEEEKNDSAFVAELAKLGDIWVNDAFSAAHRAHASTEGLGHKLPAYAGRTMQAELDALEKALGSPTKPVIAIIGGAKVSTKIDLLENLVTKVDALVIGGGMANTFLHAQGVAVGKSLAEKDLAATALRIMEKADAANCAIILPVDAVVAYHFAANAPSHAYGLDAIPADGMILDVGPQSIARVHAAIDDAATLVWNGPLGAFEMQPFDRGTVAAAKHAAERTKAKKLISIAGGGDTVAALNQAHVAGDFTYVSTAGGAFLEWMEGKPLPGVEVLRIK

SEQ ID NO: 12071 - protein, 355 aa, BradyrhizobiumColbertium
MARITLRQLLDHAAENDYGVPAFNINNMEQALAIMDAANQVDAPVIIQASRGARSYANDVMLKHMMDAVTEIYPHIPVCVHLDHGNEPATCMTAIQAGFTSVMMDGSLKADGKTPGDWEYNVGVTKTVTDMAHLGGISVEGELGVLGSLETGMGDKEDGHGAEGKLSHDQLLTNPDEAVKFVRETKVDALAIAMGTSHGAYKFTRKPDGDILAMNVIEEIHRKLPNTHLVMHGSSSVPQELQDIINAYGGKMKPTWGVPVAEIQRGIKNGVRKINIDTDNRMAMTGQIRKVLKDSPEEFDPRKYLKPAMEAMTKLCKQRLQEFNTAGQASKIKKVLTTAEMAKRYAKGELDPRVA

SEQ ID NO: 12072 - protein, 346 aa, BradyrhizobiumColbertium
MNLTELNKIATAMVAPGKGILAADESSGTIKKRFDAIGVESTEENRRDYREMLFRAKDAMSQYISGVILYDETIWQNAKDGTPLVKLIEQSGAIPGIKVDEGTQALPMCPGETVTVGLDRLAERLKKYHERGARFAKWRAVIDIGSGTDGRGIPSMTAISVNAHALARYAALCQAAQIVPIVEPEVLMDGDHDIERCYEVTQRVLNKTFQELRVQRVALEGMVLKPNMAIAGKKCPKQASVEEVAEKTIRLLKSCVPAAVPGIAFLSGGQSDEEATAHLNAMHRLGPLPWGLTFSYGRALQAAPQKAWSGKAENVAAGQRAFSHRARMNGLASTGEWQSSLEQKAA

SEQ ID NO: 12073 - protein, 209 aa, BradyrhizobiumColbertium
MVDDPAALVAELPGLLASADVAAVLLRLQETDQRTMISRVKALAPPVQKAGAALLVDGHPDIVARGGADGAHLTGLAALEEAAPSLKPDRIAGVGGLATRHDSMSAGEMGADYVLFGEPDENGQRPSSQAIAERLDWWAELFEPPCVGFAVSLEEAYDFAASGADFVLVDFIWTDPRGPKAALIEVDAAIKKAHATATASQNPAGQEHG

SEQ ID NO: 12074 - protein, 354 aa, BradyrhizobiumColbertium
MKLPCITLLATLLLTAPAVAQLQIAPPATTPSAPAEKHKAKPPAPAKKKEAAPAPKPSASPSPKPAATVIPAPPPDDPNVDLVYGAYQRGQYKTAFELATARAQAGDPKAMTMLGELYSNAMGIRRDYAKAAEWYKRAADAGDREAMFALAMLRISGRGGTVDKNEAVRLMASAAKLGEPKAAYNLALLYLDGQTLPQDVRRSAELLRQAADAGLPEAQYALATFYKEGTGVPKDPERAVRLLQAASLADNVDAEVEYAIAMFNGTGTPKNQPAAVALLRKASRQGSAIAQNRLAWVLINGAGTPVDKVEGFKWHLVAKTAGKGDPELDKQLSDLPAEERAKAEAAAKKWLGTK

SEQ ID NO: 12075 - protein, 724 aa, BradyrhizobiumColbertium
MVEASIKKVLTTLVEAVVLVFVVMFLFLQNIRYTIIPTIVVPVALLGACTTLLLAGYSINMLSMFGMVLAVGILVDDAIVVVENVERIMAEEGLPPKEATRKAMSQITGAIIGITLVLMAVFVPMAFFPGSVGIIYRQFSVTMVAAIGFSAFLALSLTPALCATLLKPVAKGHAHSSNFVFGWFNRVLEATRFRYEGTVGFSLKRTGRLMLVYAALLVGLSWAFVSLPGGFLPVDDQGFITTDVQTPSDSSYARTEAVIEKVEKYLAARPGVKDVTFLTGFSFSGQGMNTAQAFITLKDWSERGPQDSAAAIVNDVNRDLGSSIRDAKIAALQPPPIDNLGNSSGFSFRLQDRGQKGYPALMRAADQLIAEANASPVLQKVYIEGLPEAGVVNLMVDREKAGAFGVTFEDINNTISTNLGSNYINDFPNRGRMQRVVVQADARDRMRTEDILNYNVKNSRGQLVPFSSFATVEWARGPTQIAGFNYYPAVRISGEARPGFTSGDAIAEMEQLADRLPRGFGYEWTGQSLQEKLSGSQAPFLLALSVFVVFLCLAALYESWTIPLAVLLTVPLGIVGAVTAAMLRGLPNDVYFTVGLITIIGLAAKDAILIIEFAKDLRKEGKPLVEATIEACRLRFRPILMTGLAFICGVLPMAIAHGAGGASQQALGSVVMGGMIAVVILALLMVPVFFVSVQRVLGGDREPATANEGKKAYGGPPARAHTSH

SEQ ID NO: 12076 - protein, 322 aa, BradyrhizobiumColbertium
MPSFFIDRPIFAWVVALFICLIGAIAVPLLPIAQYPIIAPPSISISTSYPGASPENLYNSVTRLIEEELNGASGILNFESTSDSLGQVEIIANFQPGTDTNDASVEVQNRIKRVEARLPRAVMQQGILIEEASSAVLQIITLSSTDGSLDEVGLGDFMIRNVLGEIRRIPGVGRATLYSTERSLRVWVDPAKLVGYGLTADDVNKAIAAQNAQVASGSIGAEPSTSNQRTSALVLVKGQLSSPDEFGAIILRANADGSTVRLRDVARVEVGGLSYQFNTRLNGKPTAGLSVLMSPTGNALATASAVEAKMKELSRFFPANIT

SEQ ID NO: 12077 - protein, 398 aa, BradyrhizobiumColbertium
MSGLRARSACVALMLAALTPLLGACDESSSAISAAQPVAPDVSVVVVKPQPRSVVRELPGRIAPTRVSDVRPRVSGIVVARLFRQGSEVKAGDPLYRIDPRPFEVEVMANEAALAKAEAALMQARQQAHRIATLTKDRAAPEAENEKAIAAERQAHAEVEGRKAELARAKLNLDYATVRAPIDGVVGAALVSEGALAVQNETNLATIQQLDPIYADFTQSVNELNQLRRSFETGDLERIASDTAKVRLVLDDNTIYSLEGKLLFSDAKVDAHTGQVTLRGEFPNPKRELLPGMYVRVRIEQGLDSDAIAVPQQAVQRNGGGGSEVFVVKDDNHIAVQAVRTGSVQDGLWFVTEGLKAGDKVVVEGFQKFAAGDKVQPQPWSEVGATADNRHAQQQVTR

SEQ ID NO: 12078 - protein, 349 aa, BradyrhizobiumColbertium
MTASSTFWGRMSVVSAIIGTAERVPLPDVVMRAAIQRLCSRTAMRLAGHDAAADAAFAGRMMLRPIAEQPEAGRNDVPVALSAEVLGPNRKYSCGFYKTTATTLQEAEEEALRQTVEHAGLADGQTILELGCGWGSLSLWMARQFPHAKVTAVATSQAQRAYVEEQAEQRGLLNLRVVAADMNVFAPNGQFDRIVSVETFERMMNWRKLLTRLRSWLAPDGRFLMHIATHRTGSDLFDRSDRDGGIAQHVFTGGLMPSHHLVRQFDDIFAIEKEWCWSGTHYQRTANDWLANFDARRGAIEVCLRRVYGEETARLMRRWRWFLLATSGLFGYAGGTEWGISHYRMKAAD

SEQ ID NO: 12079 - protein, 328 aa, BradyrhizobiumColbertium
MDIEYTKLSSPSVFLVRMLVFLVLCALVSVVLYKQIIQAFFANPGLNALIGAVLFIGIVLAFRQVIRLYPEVSWVNNFRIADPGLAPARHPKLLAPMAAILGGERSGRMTITQTTMRHLLDSIATRLDEARDISRYMTGLLVFLGLLGTFWGLIETVGSVGKVIDGLKVGGDSGALFDTLKEGLAAPLGGMGISFSSSLFGLAGSLVLGFLDLQSSQAQNRFYTDLEDWLATTVREYGGSEVPAASGGGVASGELQAAVERLRSVLEEGSGSRGTTAAMASLAEAIQALVSHMRTEQQMIREWADGQGEQNREIRRLLERIARQPEKS

SEQ ID NO: 12080 - protein, 342 aa, BradyrhizobiumColbertium
MALARARRSEGGLNYWPGFVDALSTLVLSIVFLLSVFLVVQFFLSQEVTGKDKALEQLNAKIAQLNELLSLEKLGKLTLDDQVSQLKAGLASAESERDRIKGLYDGLAAAGNDAQGKTAELGKALDSEKAVSARALAQIEVLNQQISALRRQLAALEEALDASEKRDKESQNRIADLGSRLNVALAQRVQELSRYRSEFFGRLRAILGNRPDIRIVGDRFVFQSEVFFDTGQAMLLPEGRAELDTLAAALIELDKKIPSEIPWVLRVDGHTDVRPVSGANFKSNWDLSAARSISVVQYLISLGVPAQRLVAAGFGEFQPLDPGNSEEAYKRNRRIELKLTER

SEQ ID NO: 12081 - protein, 160 aa, BradyrhizobiumColbertium
MDGRVKPGHDESIPMIQLRPYRSEDEAAAIDLWHRTWQQAYPQIDFAARLEWWRGRWRKDLVPKAAIVVAELDGALIGFVTIDGEGYLDQLVVDPVHWGTDAARLLVDEAKRLSASGVTLLVNKDNARAIRFYERNGFAHAGDDVNPTSGRPVLKMEWKP

SEQ ID NO: 12082 - protein, 613 aa, BradyrhizobiumColbertium
MERLDDQYVDRPEMNVADTPSIEDELIEQPAKGRAKLRPLLALAPYVSRYRGRAALAFVALTVAALTTLLVPIAVRRMIDFGLTPEGIELINSYFSVMLAVVAVLALASAARYYLVMTIGERIVADLRRDVFGHLLSLSPAFFDSARSGELISRLTADTTQLKSAVGASVSIALRNLMMFLGAAAMMVITSPKLSGFVLLAIPLIVLPLVAFGRWVRRLSRNAQDTLADASAYAGELVGAIRTVQAYTSEQFAQKRFGGEVEQAYEAARTSTQARAVLTAIIIFIVFASVVAILWIGSHDVLSGAITPGRLGQFVLYAVFAAAGLGQLSEVWGEVSAASGAAERLFEILHVKPEITAPAAPLALPVPARGEVGFEQVSFAYPARRDVKVLDAVSFTVRPGEKVAIVGPSGAGKSTIFHLLLRFYDPRSGTISLDGVPVKSADPRDFRARIALVPQESVVFAASARENIRFGRPDATDAEVERAAELAHAAEFIRRLPEGFETALGERGVTLSGGQRQRIAIARAILRDAPLLLLDEATSALDAESETLVQTALEELMRHRTTLVIAHRLATVLSCDRILVMDQGKIVEQGTHAELVAANGLYARLARLQFEGA

SEQ ID NO: 12083 - protein, 56 aa, BradyrhizobiumColbertium
MSLRGKPRFNRPAQLVLPDFVRYRAAQIRHSLATQEGAGAPRNCHESRDSSRLSYD

SEQ ID NO: 12084 - protein, 60 aa, BradyrhizobiumColbertium
MTDGTEYLTRSTWGKEGDTLNLDIDPKSHPAWTGGSAQIMDRGGRVSRFQKKFSGFLKKD

SEQ ID NO: 12085 - protein, 169 aa, BradyrhizobiumColbertium
MERLQADGALVQLSERFTNSAAFGNLFREGMDLVEETAAYLDGAGRIEAKALDRAVSLTYATESMRLTTRLMQLASWLLLHRAVKEGEMTLSQANREKTKVKLTAADPGPADTIEKLPSQLQDLIHRSMSLQTRVRRLDSTIHTPPTEHAAIGNPLVPQLNALKAAFER

SEQ ID NO: 12086 - protein, 63 aa, BradyrhizobiumColbertium
MPIEDDDRPRKKISHEIGQDLSLLSVEELTERVMLLKTEIARLEEAAAKKRASRDAANSIFKS

SEQ ID NO: 12087 - protein, 332 aa, BradyrhizobiumColbertium
MDKLPAQMTVVAISKPGGPEVLVPEQRALPQPGPDEILVKVEAAGVNRPDVAQRSGAYPPPPGASDLPGLEIAGEVVAVGSNAKRHKIGDKVMSLVAGGGYAQYCIAQDAQAMSVPPALSIKEAGALPETLMTVWHNVFERGGLKAGETLLIHGGSSGIGTMAIQLAKAFGAKVFVTVGSQDKIDACLKLGADRAINYKTEDFVAVVKAETNNVGVNLILDMVAGDYVDRNYDAAAVDGRIVQIATLNGPKVSVNIAKVMVKRLTHTGSTLRPRSNADKAAMVAAIEEKVMPLLREGRIKPVMDSTFPLEKAADAHRRMETSAHIGKIVLEV

SEQ ID NO: 12088 - protein, 958 aa, BradyrhizobiumColbertium
MRLIRCLAPIALGLMILVAAYPARALDAVSVRSDAPAIDLTGVLEHQRSDADRIQVSTAPGTDGIVRRIEVRAREGGQNWVVFALANNTDDQLDRLIVAPHYRIVSSGLLWPDLGLSRIATITPSIGDRPERQESATADVFRITLDPGAVVTFVAELRTDKLPQLYLWEPEAYKDKVNSFTLYQGIVIGISGLLALVLTILFVVKGSIMFPAAAALAWAVLVYIGVDFGFWGKVLDMSNNAERIWRAAGEAILAATLLVFLFAYLNLSRWHVRYSHITIGWLAFLGSLVALALFDPAVASGIARISLVLIAFAGFALIVYLSTHGFDRAVLLIPTWFLLVVWVAAAGMTVAGSVTNDIVGPALLGGLVLIVMLIGFTVMQHAFAGGGATTGIVSDIERRALALAGSGDLIWDWDVSADKVFTSPETEALLGLKRGTLEGPAASWLEVLHPLDQDRFRAALDSVLDQRRGRLVQDFRLRTPDGHFMWFALKARPVVGSDGEVSRVVGTLTDVTELRNAEERLLHDSVHDNLTGLPNRKLFMDRLGAVANFAKTMPTLRPTLMVIDLDRFKQVNDSVGIAVGDSILLTLARRLTRILKPQDTLARMAGDQFGLILLSEQDPARITAFAETIRKTIRAPIAFNDREIFLTASIGLALSDPQVQLTDEIIKDAELAMYHSKRIGGDRIDVYKPAMRARKTDRLTLESELRRAIERQEITILYQPIVRLEDRSIAGFEALARWDHPKLGRMAPSEFITIAEETGLIVDLGMFVLDQTAKQLSIWQRAMRSRDPIFASVNVSSRQLLRHDLIHDIRTVLSRSSVARGTLKLELTESLVMENPEHAAQMLTRIRELGTGLSLDDFGTGHSSLAYLQRFPFDTIKIDQSFVRTTSRGTRPVILKSIIALAHDLGMDVVAEGAETDSDAVELYQMGCEYAQGFAFGEPMDADAAMRLLTEVRLEAAS

SEQ ID NO: 12089 - protein, 82 aa, BradyrhizobiumColbertium
MILRWLGGILGAALIGLGMLSALAFEFRYWRWRDCFNELGRCYDPVSQDVYLEQAGLVWGGLAVVSLLLGLGLLMSLRRRQS

SEQ ID NO: 12090 - protein, 86 aa, BradyrhizobiumColbertium
MNDYLALRDYLLRQKQEEFVLSFEQIEEIIGAALPRAAQRASWWDSLRSPDIQMPQREACLAAGFVATRMPDGESVRFRKQKSKKR

SEQ ID NO: 12091 - protein, 498 aa, BradyrhizobiumColbertium
MLSGWRDVMARQPWRISAKLLIISSVVTVIGFSAICVNVMLDMRRGEEALARQTLENLATTIESDVNRNVEIYDLSLKAVASNMLLPELATVSKTIRHLILFDHATTAKHFGAIQVFDAEGRLTIDASTLDPLAENRSEEDYFRVHRDNPGAGLFISRPMLFRGAYSIVLSRRISDTDGGFLGVVAGSIRFSYFHELFERLNLDPEDTITVLKRDRTIMMRRPFDLDIIGTNLNDRRTWRADNLRAGDSYSGQGPVDPTPRLYVRSGGSGPLFVVAGKPLAAVFELWQKEAYRIGAVVLALALFVLASTLVLAREIGRRAEAERKLEEMATTDALTGLKNRRKFDSVIDTEWRRAMRQKVPIALLMIDADHFKAYNDTFGHQAGDQVLVGIAICISDSVSRAGDCAARYGGEEFAVLLPNMSATNAFKVAETIRLKVQGWSDDQAMSTVSCGIASLVPDAGMDWPVLVAAADKALYAAKAGGRNQSVVASLPQLSLVA

SEQ ID NO: 12092 - protein, 291 aa, BradyrhizobiumColbertium
MKIRKAVFPVAGLGTRVLPATKAMPKEMLTIVDKPLIQYVYDEAREAGIEHFVFVTGRNKNVIEDHFDRMFELDTTLAARGKKAEQDILAQNQPEAGAVSFTRQQAPLGLGHAVWCARDIVGNEPFAVVLPDELVLNTPGCLKQMIEMAASLGEKSNLVAVEAVPDHLTHQYGICGVGKRNGKMFEVDGMVEKPAKGTAPSNLSITGRYILQPEIFKILETQERGAGGEIQLTDAMIGLAKSQKFYGVEFEGERHDCGSKPGFLRANIAYGMKRPELRDGLIAEMKKYLGQ

SEQ ID NO: 12093 - protein, 458 aa, BradyrhizobiumColbertium
MAARAGFVAGATMIAAALLLPASAHAQAQNGLSNLFGGIFSGPNPAPSQAAPSPGGSQTGPLPWSGEDGASGHPLMTAAAIREAAGNFSNCVAAMWPDAARRGITQDNFQRFTAGLSPDLRIMDLMDSQPEFTKSIWNYLDILVNDNRLAKGREILATYKAQFDATERATGVDRYIIASIWGIESNYSTQMGDRSVLQSTATLACVGRRQAYFKDEFLSALEILNRGDLRPEQLRGSWAGAFGPTQFMPTAFKRFAVDGDGDGRRDVVDNPADLIASTANNLKKDGWQSGQTWGYEVVVPRGFNYMLADRSKAMPIAHWEKLGLKRATGQPFPHPSQKAYLLAPAGAQGPGFLMLQNYRVIMKYNPAEAYALAIGHFADRLRGGQPFVQPWPRQERELSRTERLELQQLLAQRGFYKGTPDGQFGGQTREALRHFQASIGAPADGFASSDMLDRLRGR

SEQ ID NO: 12094 - protein, 575 aa, BradyrhizobiumColbertium
MSKKSLFKALTETGPLIALGTALAILVSIAAPASAQFFNFPGFGGPPQRAAPPPPRGGGGGGGWFGGDFFAPFQQPPPQAPRQDFSRAPAPAKRDTIPEKNVLVIGDAMADWLAYGLEDAYVEQPDMGVIRKHRTNSGLIKYQPRGEPSDWAAAAKGILETERPDVIVVMLGLNDRAAIREPAADKPDKATEKDKEKDKKHDRAARAKQPAKPGETKPGAESAAKPDDKPADADLPQDDADNADTPAAAPEKTARNPNGLYEFRDDRWVELYGKKIEELANILKSKGVPVLWVGLPAVRGPKGTADTLFLNSLYREGAAKAGITYVDVWDGFVDEAGRFLQKGPDFEGQIRQLRSSDGVYFTKAGARKLAHFVEREITRLLAGRSGPIALPSEPATPDTSAEPGKPAPRPLAGPIVPLVAASISTDQLLGGPGTRPAAVDALAAKTMVKGEPLAAPAGRADDYAWPRREVGREQAKGDAPMAATTPEGGPAQGPPGAAAAVAPPKLAPKKPPMPPQQPQQQPAQASPSFRDFFGFGSPQPPPRQFAPPPGLRNPAQSPPIPRPPGNVGRSAEMFR

SEQ ID NO: 12095 - protein, 122 aa, BradyrhizobiumColbertium
MDTDRIVGSAKEFAGRAEGAVGDMAGDAKTQASGKAREAAGTVQNLYGQAKDAVRDATDTAASYAKDAYENSGDTFRDGSKAIAQKVQDNPLGALLVAGGIGFALALLMSRPARRPPQRWRY

SEQ ID NO: 12096 - protein, 259 aa, BradyrhizobiumColbertium
MSDFKELSRSVKGLTVLVTGAASGMGRATARVFAAEGANVAVTDYDEQGAHALAREIAASGASARAWKLDVADGGEIKKVVGDIAAHFGALDIIVNNAGISVRVAIDDEAYEDAWARSIAVMLTAHPRIIRAALPHLRKSKSPRIVNIASTEALGATALHSPYSAAKGGVASLTRSLAVELGREGITVNCICPGPIRTAITDRISEEHKTIYAKRRTALGRYGDPEEVAHMTLNLCLPAASFLTGAVIPVDGGLMARNA

SEQ ID NO: 12097 - protein, 245 aa, BradyrhizobiumColbertium
MANELDFSGKQVLVIGGSSGIGNGIAQAFRARGAQVAVCGTRARATEYSAEEGSDLTGLAYDQLDVSNAGAIETFRPPFDKLDVLVLAQGAVLYRRGEFEMAGFRKVVEVNLMSLMACATRFHSMLRDSKGSLIIVSSTAAYHSTMGNPAYNASKTGAVGLTRTLGEAWAEDGIRVNGIAPGLVDTKMTKVTTDNPKRLEGALARIPLRRLGTPADMAGAALFLASPLSSYIIGQTLVVDGGLIL

SEQ ID NO: 12098 - protein, 265 aa, BradyrhizobiumColbertium
MFLALLMSAAWAAPAPQPVDIPIASGILHAQLYKPEGAGPFPTVIALHGCGGLGGHSDPVLPRYRAWAERLLKVGNAVLLPDSYGSRELGPQCRVKEMHVKARRDRVTDIAASRAWLMKQSWVARDRVSLIGWANGANALLWAVRPQSAARDLSPDFRAAVAFYPDCRISAGLGWSTRVPTLVLIGAADDVSPPPACRQMVDGARGRSALARIVVYPGADHDFDRASMPLHAGSSDAAAPERGHLGMDAKARAASQKDVAQWLAR

SEQ ID NO: 12099 - protein, 74 aa, BradyrhizobiumColbertium
MLNKFGPSGHGEAQVQYLDGDFRVISPGTFVRCAITGTRIPLDELKYWSVDLQEAYATPAAVLQRHFPGAQKQS

SEQ ID NO: 12100 - protein, 306 aa, BradyrhizobiumColbertium
MLRQGVDAGIPVICVGNYHVGGAGKTPTVLALTKLLRELGETPVVLSRGYGGRLEGPVMVDGARHTAAEVGDEPLMMARDVAVVVARDRLDGVALAKSRGATVILMDDGFQNPRLLKDVSLIVIDSERGLGNGEVFPAGPLRAPLKAQLSRTDALVLIGGGNAANEVAAEVAKRNKPELRARLKPDATSLAQLIGKRVFAFAGIGDPDRFFRTLRASGIDVAHTRAFADHHMFSIDELAALAAEARREQLTLVTTEKDLARLRGGAGVPDDIVPFAVRLDFDDPAALRRLISDHLYKARERRFSRP

SEQ ID NO: 12101 - protein, 438 aa, BradyrhizobiumColbertium
MPKSLPIALPMTLRMYRRLATGLVPLAPALIKRRLKQGKEDPARVGERRGLSRDVRPHGPLVWIHGASVGEVLAAAALIERLRDLNLRILLTSGTVTSAAVVAKRFPPDVIHQYVPYDSPRYVARFLDHWKPSLALFIESDLWPNLILAGAARRVPMVLINGRMSPRSFPRWRRMHGTISALLSRFDICLAQSKTDAERFAALGGRDVVTTGNLKLDVPAPPADPAKLERLAAMTRGRPIIVAASTHPGEDEMLVAAHRSLSGFFPQLLTVIVPRHPDRGSSIAGLITASGLKPSLRSREELPTATTDIYVADTMGELGLFYRLSGVVFMGGSLVRHGGQNPIEAIKLGAAVVHGPHVFNFSDVYEALDSSGGARQADTQEALVKQLGLLLGEPTVREKVQRAGGNVVEQLGGALDRTMIALEPYLLQLRIEMGAANA

SEQ ID NO: 12102 - protein, 116 aa, BradyrhizobiumColbertium
MVRTLQAGCNVALTADVPKRSRVAGLGIIMLARESGRPIMPFAMATSRFVRLKNWDRTTINLPFGRGALVGIKEIHVPPDADAATMEALRQELEDTLNEATRRAYAQLGRPGPEDA

SEQ ID NO: 12103 - protein, 135 aa, BradyrhizobiumColbertium
MKKLLRNTLRSSWFQRAVGVLAAEYLRLVWRTNKFTIDPADVYGRVEPQLPAIFAFWHGQHFLTPFIKNQDKASYRAKVLISRHRDGEFNAIAAERLGIGTIRGSGDHGGAFHRKGGVALSRKWCGRFRPVVMSR

SEQ ID NO: 12104 - protein, 80 aa, BradyrhizobiumColbertium
MPDSAPQQLLHLVIGGELVDLEHNTFKNLDDVDIVGLYPNYAAAHAAWRAKAQSTVDNAQMRYFIVHLHRLLDPNQEPAR

SEQ ID NO: 12105 - protein, 272 aa, BradyrhizobiumColbertium
MADVDAHVLDPKILTRDAALLKDTVREAGALAHSMFRTELRRWTKGASSPVSEADIAVNDLLEARLRTATPDYGWLSEESADDAARLSRRLTWIVDPIDGTRNYLGGHDEWCVSVALVEDASPVLAAVFAPASDEFFFAVRGQGTTLNDEPVSATAGSELDFARVAGPKPLVERLKPSLGDIKLHRRIGSLALRLCRVAHGALDAAFAGGNSHDWDLAAADLIVQEADGRMSDLSGEPILYNRREVAHGVLVAAGRDRHAGIVAHFRNRPLA

SEQ ID NO: 12106 - protein, 467 aa, BradyrhizobiumColbertium
MNSSPSSTPSTQKTSQANRDLFDQSALSDLAQRLVEAARRAGADAADAVAVRGVSQGVEVRDGRVEESERSEGDDVGLRVLVGQRQAVVSTNDVSGDAVTKLAERAVAMARVAPDDKYVGLADPALLARDFPDLDLLDPDLPTTAELERRALAAEAAALGVKGVTKSGGASASAGIGGMVLVTSTGFHGSYLRSSQGISATAISGEGTSMERDYDFTSAPHGADLLSPEVVGRSAGERTVARYNPRKVETCKVPVVFDPRVAGSLVGHLVGAINGASIARKTSFLKDKLGQQLFAKNIRIVDDPLRRRGLRSQTFDAEGVAVKRAALVDEGVLTTWLLDCATARELGLTTTGHAHRGVSSSPSPGPYNLHLEPGTPTPAELISDIKQGFYVTDLIGSGVNGVTGDYSRGASGFWIKNGEITYPVSEVTIAGHLFEIFKSMQPANNLEFRYGINAPTVRIEGLTLGGR

SEQ ID NO: 12107 - protein, 172 aa, BradyrhizobiumColbertium
MRRQTATCGIAPAGSSRFLRLDPLSLPVRFDAHDPRADGYTRQIELHRERVVLRRAVRGMQMAINVRVADFTGVALRGNDEARTLVLVHRDPSLSIPLLVGADADEIAEAWAIWSELFALPQLDEGARKPAARRRRANAIRARRPKFLMRRRAGIARELSVHRGEREIIARN

SEQ ID NO: 12108 - protein, 310 aa, BradyrhizobiumColbertium
MSDSSARVADSTGNWVDTIAPHWSRPYLRLSRFDRPIGSWLLLMPCWWSAALAAGMAHDVRDLPLTILLFFIGAFVMRGAGCTWNDITDRDLDDKVERTRSRPLPSGQVTTRQALVFMVAQALIGLVVLLQFNRFAILTGIASLLIVAIYPFMKRITWWPQIVLGLAFSWGALMGFAVTFGRIDLTALVLYAGAISWVIGYDTIYAHQDAEDDSLIGIKSTARLFGAHTHQALILFYGLAVMLIGVALASGDAGWPAWLGLAAFAVHLASQIMRLRIDDPELCLRLFKSNRDAGLLLFAGLLADAVMQAA

SEQ ID NO: 12109 - protein, 220 aa, BradyrhizobiumColbertium
MIRHLMVPIIAALVSVGASGAYAQSAFPAPLPNQAAANSPFPPVNGSAPTASVGAAPQSSFPVNGAAPIGGPGAFSAAPPTQAGPGDDCMKAFAPLREEAEKRGKLIKAASDRRAPPDEACKLIRNFSQAEVKMIKYIEANAAKCGIPPQIGAQMKDGHKNTEAMATKVCNVAQQMQQQQARPAGPSLSEVLGSGSAPEANASRKGGSTFDTLNGNVLTR

SEQ ID NO: 12110 - protein, 251 aa, BradyrhizobiumColbertium
MPSHDFRAPRLFVDAPLVQDARVPLDRDQSNYLGNVLRLAAGAAVLAFNGRDGEWQAAIEGRKRPDALVILQQTRPQDRLADLTYVFAPLKHARLDYMVQKAIEMGAAALRPVLTRFTQASRVNTERMRANVVEAAEQCGILSIAAVAEPVPLERFLSQRPAGRLLIFCDEAAEVQDPVQSLQGARDAAEGIDVLIGPEGGFAEEERALLLRQPKILRLALGPRIMRADTAAVAALALVQAVLGDWRGGSG

SEQ ID NO: 12111 - protein, 315 aa, BradyrhizobiumColbertium
MSFQGLKPSSSLELRAYDIDHFGETERYAGASSMPLSVGTTAIMRARLSLPSLTLSLVRTFPRIIRGYQLTSAAAFVVPMDNVTSARINGQPMGSSIVILKGTSDCVVYEPEGRLMAVVYFAPPQREPWAQLTDGYHLVNPASEVLVSLRRLISVTLEIAAHDPDFLNQPMSLTAVEQSLLGTMEAALCTGVSGGPVSSATEGYRRIVGEMERLIRQDLTVWHKTTELANQVGVSVRTLQSATRAICGMSPHRYSRILRLWSVRKQLRSGPARRSVKACAIAHGFRHLSEFAASYRAAFGELPSETLHRAMRETI

SEQ ID NO: 12112 - protein, 168 aa, BradyrhizobiumColbertium
MRNASDIIRTVSRHTLAYMLFSMSELFRHYDEFDPLDLLIVHAVLNANVIHVMNDPVLDEKFSSIHAVEPDVIKQGVSRAALSRFLSLPLETVRRRVTGLKRRKILEETKAGLIVTEQNAFRFGNNHELQKTNMLLLMKLLRDLKRAGINGPDDLRASKSATSAKKAK

SEQ ID NO: 12113 - protein, 109 aa, BradyrhizobiumColbertium
MFGVSVEPIAAMTLVREHASKRFGSAIGLKVAMKEMAMNEDVLLSARQFEALRLIKTFLRLTTPRRRQRVLELAEHLAEEAESTATGSAFAATDASSADPARDVPVPTE

SEQ ID NO: 12114 - protein, 382 aa, BradyrhizobiumColbertium
MTATATSNAAGSAWAETLLLSFAQAGYVRAEPAILQPAELFLDLSGEDIRKSLYLTTDLSGAELCLRPDLTIPVARDYLASGRAGQPAGFSYLGPVFRYRSGQPSEFLHAGIESFARQDRAAADAEMLALALEATAAFGVRDVEIRTGDVALFNALLDALDLYPVWRRRLVKDFNRKVSLEQDLERLAAATTATRSEYQGVLAALAGSDRKAALAFVTDLMSIAGTTNVGGRTTAEIADRFLEQSTLKGGALPREAIVVLKRFLGVSGNPDDAIAELRALTADAKLDLDAAIDQFESRVGFMAARGIDVKQTRFSTAFGRGLDYYTGFEFELHHRGNGAEPLIAGGRYDGLMTQLGSAEPIPAVGFSVWVDALTKIGRKVGA

SEQ ID NO: 12115 - protein, 325 aa, BradyrhizobiumColbertium
MSAPFVLAVPSKGRLQENAEAFFARAGLKLSKAGGARDYRGTIAGLDNVEVAYLSASEIASQLSRGFAHLGVTGEDLVRETIADADRRVSLIEGLGFGYADVVVAVPQAWIDVRTMADLDDVTTGFREQHHMRMRVATKFVNLTRTFFQTHGITDYRIVESAGATEGAPAAGSAELIVDITTTGATLAANGLRVLDDGVILRSQANLVASKDADWSPQARETARVILDHIAARARANKYREVRTRFRQCDAALLGEAHSRFGVEAPFGGPTSSGMLTLHCPPGQLYALATFLREHGAETVSVGSLDYVFDRENPLFAKLEAFLGR

SEQ ID NO: 12116 - protein, 353 aa, BradyrhizobiumColbertium
MTLGSDVSGMTTTAASAAAKGLSIVIPVYNEAAGLSALHQRICDLAKTLRQRYRLSCEVVYVDDGSKDATLAIARSLPADAIDVQVVSLSRNFGKEAALMAGLDHARLGAVMFMDGDGQHPPALVEQLVRHWIDDGYDVVYTAKAHRDNEPFLRRVAVHGFYALINWGARQKIPEDAGDFRLLSPRAVAALRQLPERNRFFKGLASWIGFRQIRVDYEPAARAHGVTTFNAASLLGLSIEGLTSFSVAPLRFASLFGVILAGGAFLFGLSILWEVLTTGKQVPGYPSLVIGLMTIGGVQLIMIGIVGEYIGKILSELKARPIYFVAEHSEKHSEADKAQDASSRDAASRTAAE

SEQ ID NO: 12117 - protein, 281 aa, BradyrhizobiumColbertium
MSAAADLRRIWLCADDYGISPGVNRGIRDLIERGRLNATSVMMVGPAIARSDVEALQSAAETSPRCAIGLHVTLSAPFRPLTMHFRPLDGDMFMPFPKLLRAGLLRRLDREFVRNEVKSQLAAFMDAFGRAPDFVDGHQHVQLYPQVRDGFVDAVVEAVPNAWVRQGGRDLPLRQRLASPKALVLDSLSAQFRRRAGNAGLSFNPGFAGAYDFTRAADFGALMRQFLEGLPDGGLVMCHPGFVDDVLASLDPMTDVREREHAYLAGDAFPRLLADSKVTLG

SEQ ID NO: 12118 - protein, 269 aa, BradyrhizobiumColbertium
MTPQERQLVDDLFDRLSKLENAPRDPDAVAAISDGLRKAPGAVYALVQTTLLQDEALKRAHNRIQELESAQAPDPAQSGGFLDTMRDTLFGGAPSRGSVPNVPPREQRPTWNSGQAMQQAQPGYGAPYGQGPGQGFGAPPAGGGGGSFLGTAAAAAAGVVGGSLLLSSIRGMMGGSHQQGFGDSNALGDRSAGGSPWGGGGDQSGGSLARDAGLNDIGSNRDSRQGLFDQASNDDRHNDNNQSYDDHDDNMDMADDGDFGDDDGGSDYA

SEQ ID NO: 12119 - protein, 275 aa, BradyrhizobiumColbertium
MFKKMSVALLGSACTFIAGVNEAGAFDNSVPNDPPAVLYAPRVPPAPVRVASNSNLGGGFIEFLFGDGPGRGPAYAPERPVYQQQPAYYDQRRLPPMGEPQMQGEYQQGAIQQGALQQDAVDPRQRPFDPKFEKQLVDYNGKESPGTIVVDTPNKFLYLVEGNGRAMRYGIGVGRPGFTWSGVKSITAKREWPAWTPPAEMLARRPDLPRHMEGGPDNPLGARAMYLGSTLYRIHGSNEPWTIGTNVSSGCIRMRNEDVIDLYGRVSVGTKVVVL

SEQ ID NO: 12120 - protein, 261 aa, BradyrhizobiumColbertium
MAVHRKRFRVEDIVAGEMPVLDVTEEVLPMHSEIMAELRAIRAQMAKGLAAAPLSGSAAMAAIDASTAHELAEARAMLDTYRAQIEQCEKLKVELDLIHDAIDRTKREIATLHGKSFDGGEMAKVNGELGAVVGGTEQATQQILEAAESIDQAASAMSKVDSADQQKRLADDIQERVISIFEACNFQDLTGQRISKVMNTMKFIEQHINAMMDIWGGVDAIKAHVPAQVDNRSDDEKLLNGPKLAGDVGHASQDDIDALFD

SEQ ID NO: 12121 - protein, 173 aa, BradyrhizobiumColbertium
MISSAHARTVANLAAASCLALLLGACGGGFNLPSLTSSPPPPEAEPGVAPEMPATIRADEIVGRWGLASFQNPADRARTEAAARAQCKNPYVITAGSSGGVIMHLADQATPQELRLKGSPSGKNYIGPAGPTPGDQDREIISFDGRVLITRFIDKDAATRYGNMVYVRCAPRA

SEQ ID NO: 12122 - protein, 98 aa, BradyrhizobiumColbertium
MAKSKFRPLHDRVVVKRIDAEEKTKGGIIIPDTAKEKPSQGEIVAVGPGGRDETGKLIPIDLKVGDRVLFGKWSGTEVKIDNEELLIMKESDIMGVLA

SEQ ID NO: 12123 - protein, 85 aa, BradyrhizobiumColbertium
MRGAPNDFSMTTLRPFGPSVTLTALARMSTPRSMRSRASPENLTSLAAISQSLVFVMCLAASSSSLPGLTRQSIMLRNVLDARVV

SEQ ID NO: 12124 - protein, 433 aa, BradyrhizobiumColbertium
MNPMDLKRGIDSAVAAVIKDIEKRAKPVASSSEVAQVGTISANGDAAIGKMIAQAMQKVGNEGVITVEENKSLETEVDIVEGMKFDRGYLSPYFVTNPEKMTAEFEDAYILLHEKKLSGLQAMLPVLEAVVQSGKPLVIIAEDVEGEALATLVVNRLRGGLKVAAVKAPGFGDRRKAMLEDIAILTGGQLISEELGIKLENVTVKMLGRAKKVVIDKENTTIVNGAGKKPDIEARVGQIKAQIEETTSDYDREKLQERLAKLAGGVAVIRVGGATEIEVKEKKDRVEDALNATRAAVQEGIVPGGGVALLRAKKAVGRLTNANDDVQAGINIVLKALEAPIRQISENAGVEGSIVVGKILENKSETFGFDAQNEDYVDMVEKGIIDPAKVVRTALQDASSVAGLLVTTEAMVAETPKKDAPPAMPAGGGMGGF

SEQ ID NO: 12125 - protein, 403 aa, BradyrhizobiumColbertium
MRALLVCSTAVVAALLAVWPDRAPAQMKLSPKATAPGGTETRYFTSIDGLMDGNADVILKETRQGKNVTAAVLDVCYPIARNSDRKDRFVVNLQVAGQTLTGTTQSLGEKSPVSVKLTRKQSGDTFEFRGQISIGQAVTEVTSPDNSDLSEREFLDNQTSDDGITSQPKDFTDVSPEAIAVRVKLDAATDFLKSLKGQEVEVTLASLSVGCDALRAGEQTINMSVDPERAGALLAKFKAMPGVTAAGWTAGMTEMDRTIRFPAADWREGDKINKARLATAVANVLSRTLAAKPVSQDFDPATGKLKLVFKRPNQDFPALELTDTIEVAGLVSPDKPGSTDKLMLWIGSPATTTADESGGAKLNLSDDASLDEEGDLPEDNGSIEALARELKGQHWDADKSVWK

SEQ ID NO: 12126 - protein, 45 aa, BradyrhizobiumColbertium
MFVDLAAAANFDSHLLLPGPFATGYAVFSRPGQDKRILSPVLLTA

SEQ ID NO: 12127 - protein, 387 aa, BradyrhizobiumColbertium
MIATERPPEKIVHKWKIFHAICTARPRLGVSERALSVLNALLTFHPETALTGEDDLIVFPSNNQLSRRAHGMPASTLRRHLAVLVDAGLIVRRDSPNGKRYARKDDAGEIELAFGFDLSPLVVRSEEFESLAADIEAEARALKLVRERITLCRRDIAKMIATGIEEGVPTRRAGQGPADWQEVHAAFRAMVAQIPRTATRQELEPIADELSQLADDVLNLLEAHIKSKNPSANESHSERHIQNSNTDALIDLEPSLQEGWTAGAEPKPQPSRVAEGSYPLGMILGACPDIVDYAKGGISNWRDFLATAAVVRSMLGISPSAWEEAQTVLGEMQAAVVVACILQRGTTIRSAGGYLRGLTRKAEVGEFSLGPILMSQINSQRHEKRRA

SEQ ID NO: 12128 - protein, 315 aa, BradyrhizobiumColbertium
MPGALPRVSSGSVRSLKDTFSGVEKENEELRERIASGAMILEIDPSLIDPSPLADRFRDQDDSSFEALKQSIAQRGQEVPILVREHPEAKGRYQSAYGHRRVRATRELGISVKAILRALSDEALVVAQGLENAPREDLSFIERATFAMHIEDAGHSRSIVQDALSIDRAEASKLLAVARSVPTDVVQAIGKAPKVGRGRWQSFADLVKDAAALKRVRAAIAEPKFAERETDARFLAAYTAASRASSAGTSKPSEEKPVFSASGDKIAHVRHAERELKLTLDKNVSATFAAFLVDQLPTLFDAFSKTSGGQEASEA

SEQ ID NO: 12129 - protein, 404 aa, BradyrhizobiumColbertium
MAILAEDSVTMSETASARISRHAGILSGQLRSLATTLFPPSASKSLRSFTSGEVARIAGVSDGYLRQLSLDGLGPTPTTGIGGRRSYTLAQIHELRGYLATARPREALEFLPRRRPGDKLQIITVANFKGGSAKTTTALYLSQYLALAGFRVLAIDLDPQASLSAMFGYQPEFDIGANETLYGAIRYDEHRRPLREIIRPTYFDGIGLVPGNLELMEFEHTTPRAMVERRERGHDLFFRRVASAIDQVADDYDVVVIDCPPQLGYLTMGALNAATAMLVTIHPQMVDVASMSQFLLMTSDLMSVIEEAGGRLDHDFIRYVITRHDPNDVPEAQIVALLRTLFGSDVLQATVWKSTAIANAGLTKQSLYELERGAVGRGAYDRALESVDAVNAEIAQLLKKVWGR

SEQ ID NO: 12130 - protein, 161 aa, BradyrhizobiumColbertium
MEKLVNAHGGCRFLWLAFCECHPPAFRAHFPIKTMPSSGRGSGRRTTSSRLLNSSARGSTRAGRRASAAGRHRLLSADNIHLLGRPRLLLSADNSLCGVPYGITSPAIETPRPGSDSLRRARLELEGSRWYLGHLVARRRDWIRPQGEVEPLTTVPVKVLA

SEQ ID NO: 12131 - protein, 81 aa, BradyrhizobiumColbertium
MAFHIKNPETDALARRVAALKKIGLTEAVHTALAHELEREQGRPSLVDLGVQFCRDLRAKGNPQSGKPADKAFRDGLYEDS

SEQ ID NO: 12132 - protein, 131 aa, BradyrhizobiumColbertium
MFIDASALAAMLTNEDEARELLARVQQSTTRLTSPLAVWEAAIAIACVLDLPIAAAAEAVESYLALMEIKTVNVAPETARIALEAYDRYGKGRHPARLNFGDCFAYACARNLGEPLMFKGADFPQTDIEAA

SEQ ID NO: 12133 - protein, 399 aa, BradyrhizobiumColbertium
MTEAKAVLASVSLVPIKVIRTLLPTYKIPDPLPWAQLAGPLAAAEDAVARFDERLAKSPIRDGAISRTHFTDACASLWLDGELVHLDDLVLHDAGMDVRTPTHELTRAHAVLRARRRIAEAKPEWALSAPGLSSLRGRGEREQETSNRKEGEGGFEIDEAPEREEVGLELPLGVRETDPHLAAAFDAVDAANARAERRLAAETRFRPERDSLIYDPDWDEEERLDHWRDVVDQTRGLPPTLAGAIAADAWGEIEPLEHTPWLGRLLAAALLRDRGKTRSHLPCLHAGLKSIPRERRRPRDAAARLVVQLEAMTAAAESGRKDHDRWLMTRNLLARKLAGRRTTSKLPALLDYVLTRPIVSAGMIAAELGITPRAAQNLVAELGLREATGRGRYRAWGVL

SEQ ID NO: 12134 - protein, 397 aa, BradyrhizobiumColbertium
MNENLALSFVLLIIERMPHSAAQTSEIRTSESSAPHGSPAAAVDLSAADTSAEIQGGLPSPLPAAESGLPVHLERLADRARDYVEAASSANTRRAYASDWRHFSTWCRRQAVELFPPDAQVVGLYITACASGTATGDKRPNSVSTIERRLSSLAWNYAQRGQPLDRQDRHIASVMAGIRNTHAAPPRQKEAVLPEDLIAMLETLDRGALRGLRDRAMLLLGFTGGLRRSEIVGLDCGRDQTEDGRGWVEILDKGVLVTLRGKTGWRQVEIGRGSADATCPVVALATWLKFARIGHGPLFRRVRGEGKDVGPDRLNDQEVARLVKRAALAAGVRGDLPEGEREQKFAGHSLRAGLASSAEVEERYVQKQLGHASAEMTRRYQRRRDRFRVNLTKAAGL

SEQ ID NO: 12135 - protein, 313 aa, BradyrhizobiumColbertium
MAARARITHDPPPVFPVFPGWARLPASTQAVQDPDFLAGAALAALHPIACHEHLLRMLWRQRLALSCAAVLARQEGRTEDEAALRDHWYLRRETDDPGPAGRILKAWRWLGESSAMPPDNWAVSLGALLAHRFDDGLLDTVAFARDQIKGQGSAVAAAAAVAATSLRFRPDCRPLALWLADAVLAHKLGWRAPVPLLAAHLQRGDLRLATAHVDGDSPWRTACDLAYARGGAVAADLYSDLSRRAEKLLKVAPQLRGKDADMTVAILLGEDAQAARTGKAASDRSSRRLFERLIALGGVRELTGRPTFRLYGL

SEQ ID NO: 12136 - protein, 234 aa, BradyrhizobiumColbertium
MGWRPRSPEALDVELADLPPDLRWRTWVGRVEAVIFASPEPVTREVLARVVGRDCNIDLLIDDIRDELRGRPYELVCVAGGFQHRTRKNFADAIRFATGLGAETKPLSDSENLILMCIAYFQPITRGELGQLFGKEVSRDTIGHLRALGFIAAGPRSPQPGAPYSYVTTKGFLSHYGFDTLRDLPDMEALEDAGLLSKDKLLAGTIPVLAADENEDIAGDEGGSGDEAEIMDDG

SEQ ID NO: 12137 - protein, 194 aa, BradyrhizobiumColbertium
MRRIKCEGCGRLVPGFAVVEYGSMEVGYKRLCHRCFNSEAATAAGLTDFEHVEFDPIRLKDTDGKFHEFHFTRFLFGTGVALNAFELRKGVPAGYRFQVIAGPEEDPLAMLGRLIEKMQRGLAVKHLEDSEYGLQIGQAGVVRGCITWDDGQHGRLPLLVIDGREISWDEFGRCLMTFEGFQFKFEIRDKSDEL

SEQ ID NO: 12138 - protein, 350 aa, BradyrhizobiumColbertium
MSAAATCARFAVEIRERYLDIARDRWPISIDPKPDELLSSWLHRVGQANGISPRSFAGVLGVGGAMWSARFDLRIPRAIAVLLSDRTEISPEALTTMAMSDWVLAPLLLPLRENANRNRSTWLQYCPLCLGEDESPYFRRQWRLASRISCFVHGCGLRDRCPACRSAIAVFDQRDLVPQHFCVRCGFDLRTARKVSVKGGARRLERAIADIFRVELARSPTTESSTAVRDVVSRVLRASAATDDSLAMSLTSLASMARIRWFEQLAGEPLDWLVADKDAAVTHRRWSILAAGGQDRLVACFADFLDKCQARPRSRRLIRRGAGGIGLADLLAAYRRVAGDRSSSKLHRDL

SEQ ID NO: 12139 - protein, 291 aa, BradyrhizobiumColbertium
MDHLLEHVRSYLDRSLDERIAYIQAPRWIGHRVAMQAHERLAELLARPAALRTRGLMLVGPYANGKTMMAERFAVEHLRAAEQQRVWVVQTREGAGLAHFYGSILQALRAPTSNRRDVGRKAEQIDYLFDRLKPRILIFDEFHNVLRGRTRDVEAVLAFLRRIGRQFDISPVLIGEVAVYDVINQTSEMASRFDLHAAPRWQYDEEFLTLLDSLEAALPLARSSDLSDEKLAREIFRLSEGLIGEIVAVVTAAAIAAVRSGAERITKSDLGQLCYVPLSQRRRAPVRDYLL

SEQ ID NO: 12140 - protein, 536 aa, BradyrhizobiumColbertium
MDADETWSAARRTARELDRVLDGSGPRQVVIDRAAAELRLSTRQVYNLLARYRADRRVTSLLPDGERTRKRRLRQDIEEIIATTLREQWLVLEAPPLAPVVAEIRARCEEAGLAAPSYVSVARRVPGLFSPEEIARKRSANPKHLHRLKPRPGYIHAARPLDACQIDHTPTDINFVEVIEGSGTFVGRAYLTIVTDVATRCILGFCLTLEKPSALSVALCLAQAMCPKEGWLAARGIPDGWPMFGRPRLLVTDSAKEFKGHAFQRGCEDYGIDIRYRDRGRVHQGGVVERLLGKLNAVLATQPGSTGRSVADRDEYPAERRARLSFADLERCITLAVIDHNLQENAKRVKVPATEWERQARDLPRFNDDPMRILLAFMPRTERRISPQGVSMFALDYYSPWLGALVPQRDRLGKLEVRYEPRDISHVYIRDSETREFRSVERRDGMLAPMTRWEHEVDRMHRRATNARSNVDKVALRRRIAGIANGPKPSKAELRNAARRIHAAEAPKPYDAMRPATPAPAEHPVRHKRRLPVEDW

SEQ ID NO: 12141 - protein, 46 aa, BradyrhizobiumColbertium
MSPRNPAVADRAFGQPFVEPGQRILGRRQRPGNLCRFYLPISNRKK

SEQ ID NO: 12142 - protein, 98 aa, BradyrhizobiumColbertium
MKLVWSRFALSDRDGIFSYIEAENPRAAVHVDEQIANAARRLLDFPDSGRPGRVAGTRELVIPRTSYVAAYLVDGDTVRILRVLHGAQMWPDELTNDD

SEQ ID NO: 12143 - protein, 102 aa, BradyrhizobiumColbertium
MASNALVQTRIDADVKEKATAVLENMGLTVSDAVRILLTRTANEGMLPLELVSNSQAYDSWFREKVRQALADTRPDIDDSEVEAHFAQRRTAALRKAPEQER

SEQ ID NO: 12144 - protein, 48 aa, BradyrhizobiumColbertium
MFYKSMTTFADHRLWQDVDHVPARGMTLYVKFQADIVTEFTVMSFKEK

SEQ ID NO: 12145 - protein, 142 aa, BradyrhizobiumColbertium
MAVSKTDLPQTMISPETGETLRRGVRPFVVTYKGKSITVELPGYYPEDGAEGVHVGDDMAVTDAALRGLKEEIDGIPSPGTIRRVREKLKLSQREAGGLLKVGENAFDKYERGLVEPSGPTSQLLRLLDQHPELIEELRERA

SEQ ID NO: 12146 - protein, 83 aa, BradyrhizobiumColbertium
MTVTPLGAISRLEHALDDFEGERDRFRQRLADARRRLASYQSRDGGDFAFGGELAEKRRQLSEIEKALAADIEGAGEPKALAA

SEQ ID NO: 12147 - protein, 95 aa, BradyrhizobiumColbertium
MPPLRLRLRGDRGRLRRPTDAIERGSASLTDGAAQMSHDLALAQSNAFELARTLMVPVTLFQVDGEYGVMPSDELDDADVLVVYEYDPYLAGSAH

SEQ ID NO: 12148 - protein, 625 aa, BradyrhizobiumColbertium
MTSEVQDQTGTSSFLDALRYAQGRTPEGAAVILAITVALSIWLASRYAEQADWIRHTLEVQSQIFRIWSSLQDIEIRQRNFVLTGEDQDLTPFVEADKRITRQIDDLAQFVADNPIQVSAINAIRPLVTDRIAFAQNTVQVRQRGDVEGARKLVSEGRGLQLMEDLRKRFDGMQDEETGLLAARTAALHSTINWLLAAIALGILTTVYVLTAWITTARRNARKLAQANQILRKTIAEREAAEQQIRQMQKMEAIGQLTGGIAHDFNNMLAVIISGISLARRRLAAGRDGVDGFLASSVEGAQKAAALVARLLAFSRQQTLSPRPIDANRFVAGMSELISRALGESIRMETILGGGLWTTYADHSQLETAILNLSVNARDAMPEGGRLTLETANCHLDDRYSRLHPGVPPGQYVLIAVTDTGTGMPPEVAAKAFDPFYTTKEVGKGTGLGLSQVFGFVKQSGGHVKIYSEPGEGTTIKIYLPRFLGQAEAAKETVETQEFRGTETILVVEDDPAVLDLTVASLRELGYEVLQGRNAKDGLNVLAAHQDIALMVTDIVMPDLNGRKLADQALQLMPDLKILFMTGFTKNAVVHNGVLDSGVHFLAKPFTIDELSRKVREAIETTTKR

SEQ ID NO: 12149 - protein, 326 aa, BradyrhizobiumColbertium
MDYVKFGSTGLEVSRLVLGCMSFGDATRGTHAWTLDEEGSRALIRQALEAGINFLDTANSYSGGTSEEIVGRAIRDFARRDEIVLATKVFNRMRPGPNGSGLSRRAIFNEIDASLTRLGTDYVDLYQIHRWDDRTPIEETMEALHDVVKAGKARYIGASSMASWQFAKAIYTARLHGWTPFVSMQNHLNLLYREEEREMLPFCRDQGVAVIPWSPLARGRLARAWDESSARQETDVFGRSLYSDADPQIVDAVGAIAAARNVSRALVALAWVLQKPGVTAPIVGATKPQHLTDALDALPLRLTEEEVKTLEGPYSPRQVVGFSLPR

SEQ ID NO: 12150 - protein, 594 aa, BradyrhizobiumColbertium
MTRKPAAAEVSAAASDVDVGTPVAMLSVLRFVTSYWGRRAGLFVTGVCASLLGTAFDLALPWASAALVDDIAAGRSSGDNVWRSWAIFIAMFLGFALSRNVGHRLWIPVAARNMEEMANETFAKVQALPSSWHASAFAGGVVRRISRAMWGYDNVTDALTIRVGPALLVLGGLAVMLMLRSFLAGMIALAAVVLFTVLNLILTARYVRPANQFSNELDAAMNATLADALSGNAVVKSFACEAGELERFAADTARWRASAMRTWTRFVDLGIIQNLVLLVLQAGMTGMMVEAWLAGAASPGDVAFAITAFILMSGYLRNLGDNVRELLKGLDDTADALRFAWASGEPTNDTAPDLLVTRGGIEFQGVGFAYAETGSPVFTDLDVSIKPGESVAITGESGSGKSTLIKLLHRLYPVGAGRILIDGQDIAEVSLSSLRRAVAVAPQEPMLFHRSVRDNIAYGRPGATLEEIRHVARIACADGFIARLPAGYDTVVGERGVALSGGERQRVALARALLAQAPILVLDEATSALDRDTEAEVLTNLASVADRQTRIIIAHRPASIASAGRVLKIIDGRSTTDMDPDTSGRRPIALSGRV

SEQ ID NO: 12151 - protein, 318 aa, BradyrhizobiumColbertium
MLRQDQFEGLAVFVAVAQASGFSAAAVRLGISPSAVSQAVRNLEERLGFPLFNRTTRSVSLTEAGQRYFDRILPCIEELSAATEELDENADQPSGLLRLNVPRAAYMIILQPALPAFHERYPKISVEIVIENALVDIVGKGFDAGIRFGDLLEKDMIALRIGPPISAHMIASPAYLNKRGMPDHPRDLQNHDCIQFRHVTTGQIERWAFAKDGETVEMVPNGHLIINDSEALVQSALDGLGIAYMINGYIERFLERGELVRVLADWSPRFDDLHLYYPDRRRVPAKLRVFIDFLRSMRIQGGSSALLHPAAQRDRASA

SEQ ID NO: 12152 - protein, 59 aa, BradyrhizobiumColbertium
MEQKGNGFQATVTFPDGVSMSSAETYPSIAEAMAAAARKVLETPERLAALDQSTEAGNS

SEQ ID NO: 12153 - protein, 346 aa, BradyrhizobiumColbertium
MDAFYASVEQRDNPELRGKPVAVGGSAARGVVAAASYEARAFGVRSALPSITAKRRCPDLIFVPPRFDVYRAVSAQIREIFAEHTDLIEPLSLDEAYLDVSENKQAIPIATEIAMQIRARIKEVTGLNASAGVSYCKFLAKMASDLNKPNGQAVITPRMGPAFVEALAVKKFHGVGPATAAKMERLGILTGADLKAQSLPFLRQHFGKAGTWYYAIARGIDERPVQPDRPRKSIGAEDTFTDDIFDLAAARAEVPPLAAKVWRHCEAKNLRGRTVTLKVKFSDFQQITRSRTVSTAAASASDIENIAQSLLEPLFPSEKGIRLIGVTVSSFDEEQTVSDEQLRLLI

SEQ ID NO: 12154 - protein, 280 aa, BradyrhizobiumColbertium
MGVEVRERRLIEHDLRNAVANNMMSLVYQPQQDIQSGNITGFEALLRWKHPTRGEISPATFIPIAEDTGVILPIGDWVLRTACAEAAGWARPLSIAVNVSPVQLYNPEFAQDVHRVLLETGLSPRRLEIEITETALIRDLNLALSTLRRLKALGVRIAMDDFGTGYSSLSNLRAFPFDKIKIDRSFIRSVDANDQAATIVRAVLGIGRGLGLPVLAEGVETTSELQFLKEALCDEVQGYLLGRPTAIDAFHNITHGDVEALVVDSSSAFQTLQKRPAYLS

SEQ ID NO: 12155 - protein, 235 aa, BradyrhizobiumColbertium
MPIGGHRFEGILPPIVGAPTFTIRKRASRLFNLEDYVSQGVMTASQLGVIRNAISSRLNIVVSGGTGSGKTTLANAVIAAIVQDAPEHRLIILEDTAEIQCAAENAVALHTSDTVDMARLLKSTMRLRPDRIIVGEVRDGAALTLLKAWNTGHPGGITTIHANSAASALRRLEQLTAEVSQQPMREVIGEAVDVIVSIERTDRGRRVRDVLHVESFSAGQYQTQSYTRKEARHVA

SEQ ID NO: 12156 - protein, 120 aa, BradyrhizobiumColbertium
MLIVGATGLVLALLVLDPAFASSSGGNLPWESPLQQIQQSITGPVAGFIALAAVAVAGGMLIFGGELNDFARRLMYVVLVAGILLGATQIVALFGSSGASIGEVTGAAPTAGRAEDLGNG

SEQ ID NO: 12157 - protein, 82 aa, BradyrhizobiumColbertium
MAEPQLSVRSARARDLAHRLARRENRSIADVVERALEAYAERVAGREPPTAFYARLKADADADIDLEAVIREGRRPHAGPEL

SEQ ID NO: 12158 - protein, 441 aa, BradyrhizobiumColbertium
MTEYLSTTPFGRRPMTLAMISSQLAANDRTNAGIVHKWHVFQHIKEARQALGATDRALTILHALLSFHPEIALEPDSELIVWPSNEQLMARANGMPPTTLRRHLAVLVDCGLIIRRDSPNGKRYARKGRGGEIEQAYGFDLAPMVARAEEYKSLAEAVQAEKKAFRVVKERLTLLRRDIVKMIEAGLQEDVPADWKRFQRNYQEIVGQIPRTAARQLLESIVGRLEELWREIRELLETFAKTQNPDANESHFGRHIQNSNPDLPSESESSSAKKDEAGGKTSTVDNLRSLPKRELPLGIVLDACPNMRWLVKGGEIRHWRDLIAAAEIARPMLGISPSAWREAREVLGDQQAAITLAAIHQKSDQISSAGGYLRSLTDRARDGKFSVWPMIMALLRAKLDAAKPSVAQSEGDSADFEPQKPQRGLQPSDQLRAILAKRPKP

SEQ ID NO: 12159 - protein, 434 aa, BradyrhizobiumColbertium
MLRIGDILKSSKFLTTDIGDASLAQQVRRAFVVVLWRLRAMVRAYGEPKPLGADPLQALTILAADLKRRAAQLSADTQSDDYKRLKSEYLELKERAALAPLLPDIKAHIARLKEIESINTALKSIAKKPITDKNKELSDRMVTDALRGRFAREIGKLKLSRMPVELRKEKDRQAVSYFRVALVENPTAKVGEIFSEGEHRCVALAAFLAELVTAQRYSGIVFDDPMSSLDHIHRNAVASRLVEEAEHRQVIVFTHDLVFLYELRREAEKANRPIAFRNVRRRQDKPGHIENELPDKAKSGLEMCNALRSSLKSAKPTFDKLTDTQRTTFCKGTIGQLRDAWEQAISDYVRPVLERFDNKVKPTSIFKLGILTEDDVKSVMEAQSRLSEDLHSSAQALNPEALSLDDLLSEVKALEEWIQSIRDRQKNAVKPALN

SEQ ID NO: 12160 - protein, 58 aa, BradyrhizobiumColbertium
MLVMRAVGKVLWGGAAIAVPLAMYGAAMASTQAGIAQFIPLGAVGIGLLLMGALLHAR

SEQ ID NO: 12161 - protein, 377 aa, BradyrhizobiumColbertium
MSANPIASLAIGMASLFGLLLGGLLAFTTIRAIDRPLAHANEVLGAIAQGKFDSRVFVERDDEVGTALRNIQALQAKLGFDLESKRDMEERAAVQRKADMHKLAGDFEAAVGDIIDTVASAATELEAAAGTLTHTADSTQQLSVSVAAASEEASTNVQSVASATEELSSSVNEISRQVQESARVAQEAVAQANKTNERVSALSQSAGRIGDVVELINNIAGQTNLLALNATIEAARAGEAGRGFAVVAAEVKALAEQTAKATGEIGHQIDGIQTATEESVRAIKEITDTIARLSEISSTIAAAVEEQGAATKEISRNVQQAAHGTQEVSSNITDVQRGASETGSASSQVLSAAQSMSGDSNRLKLEVSRFLNSVRAA

SEQ ID NO: 12162 - protein, 356 aa, BradyrhizobiumColbertium
MTDALKPSEQARIALVTGGSGFVGGRLISHLLSHGWQVRALARSASSEAQVKALGATPVRGALDNEQALRMAMQGCEIVFHAAAHFKLWGKRELFDRTNVEGTRVVVNAAAATASVRRVVAVSAAAVVMGDPEPMSNADESLPLQVRAFSPYASSKAEGERVLLAASGVRPGLETIALRPPFVWGGNMPTLDHMVQTVKAGRWQWVAGGTQAISSCHVDNLCSALILAADRGRGGEAYFVADSEQSTLKSFISSLLATRGVSPPDKSVPFAMAWTMAGLMGAAWRILRLGGEPPITRQMLRLIGKPFTISTAKAQAELGYAPQITMTEGLAAMRQGEASLASLAGHRGDLRAVAVS

SEQ ID NO: 12163 - protein, 205 aa, BradyrhizobiumColbertium
MPSSPSSDDNSFREQILETARAQVRRHGEAKTNVVDIARALGTSHTTIYRHFRSKADIFDALVVEMMRDEEEMARQFVEARGSFAERLEGMVLALHARKRERFTADAEVYGLYRRIVEERPEIIAAYAKAMTSLVGRILTDAKKRGEIRVDDVEAAAGVVRDAVTVFVHPVHVAAAVAANLPSEKMARNVVRTICAGFKAGAKLT

SEQ ID NO: 12164 - protein, 181 aa, BradyrhizobiumColbertium
MQLIFIYGQVASGKLTIARHLASRTGIALFHNHLVVDAVGSVFPFGTEAFSRLREQFWMAVFEEAAKEKRSLIFTFAPEPTVAGDFPVRVKELVERNGGEVIFVALHLEQAEQERRLVDDNRAAFGKMRDLSLLRALRPQFDACMVSMPQPAVTLDVNNLKPSQSAEAISRLISVNPERET

SEQ ID NO: 12165 - protein, 62 aa, BradyrhizobiumColbertium
MDDERKSSRAGQQAAEGLREAASKEEAKNESRMGHDLAKGADRFEERSKSSDGKSAEEKQEG

SEQ ID NO: 12166 - protein, 254 aa, BradyrhizobiumColbertium
MTEKPQPGAPALEKGLDLLEALAGAARGMSQKQLAERVGRSVSEIFRMLVALERRGYVARDPATGEYTLTLKLFRIASQFPPTERLLKAALPVMEQLASRVQLSCHLTVLHGEQFMVIARIEPEWLMGWSVKVGAVFPLTQQYASAKVLAAFQLEGRREELAQVIATNDRISTKKALAALDRISAEGGNFSNDDGYTRILAYSCPIVEASGRAVAAMTVPLVRQDQIPASEAGTIAAELRNAARIVSEKIGGVS

SEQ ID NO: 12167 - protein, 152 aa, BradyrhizobiumColbertium
MLTDHVEALRAAFRETRQRHPFTIDAIVILPDHLHTVWTLPEGDADFAMRWQLIKSTFSRGLAHNERISQSRLAKRERGIWQRRYWEHTIRDDVDFARHVDYVHINPVKHGLVNRVRDWAPSSFHRHVRLGNYPVDWASDQLDHGRDYGERG

SEQ ID NO: 12168 - protein, 170 aa, BradyrhizobiumColbertium
MKEEHAFDQKALIEIVSAKPQNFAWFLGAGASRSAGLPSATDLLWDLKRHYYCREENQEITRQDIQNDAVRHRIQSFMESRGFPAEWADNEYEAYFEKLFGKEVLEVGVEHEPLVSVRRGVRDNRKVPLKAVCQSALTSGAGLFQLNMNVQKKISQLCLNHLQARLGGRD

SEQ ID NO: 12169 - protein, 427 aa, BradyrhizobiumColbertium
MHILLLGSGGREHALAWKIAASPLVTKFWCAPGNAGIAREAECVALDVADHAAVIDFCRQNKVELVVVGPETPLAAGIVDDLAASGIKAFGPSRAAAQLESSKGFTKALCTEFGIPTGAYKRFTNADDARAYVQSQGAPIVVKADGLAAGKGVVVAKTVREAEDAIAMMFEGAFGEAGAEVVIEEFLPGREISFFALCDGETAIPLASAQDHKRVFDHDVGPNTGGMGAYSPTPLVTPAVHDAIMAKIILPTVAGMKQRGTPFRGVLYAGIMLTTQGPKLFEFNVRFGDPECQVLMLRMMSDIVPAFLAACDGQLKNFDLRWHPDSALTVVMAAKGYPGDYRKGTRIAGLEEAAKVETVEIFHAGTVAKDGAILANGGRVLNVCALGKTVTEAQARAYQAVDRIDWPDGFCRRDIGWQAVEAEKAQG

SEQ ID NO: 12170 - protein, 300 aa, BradyrhizobiumColbertium
MSDLVDLYPGFAAEWIDTSFGRIFARVGGKGPPLLLLHGFSETHVMWHRVAPDLAEAFTLIIADLPGYGWSDMPTSDALHMPYSKRAMARAMVEAMERLGHVHFGLAGHDRGGRVAYRLALDHPGRLSKLAVLDILPTYDYWERMNRASALKIYHWTFLAQPAPLPETLIASNGEFFLRFKMASQTRSKTLDAIDPRALEHYIAPFRDPSRVHAMCEDYRAGAYFDYDLDKADFEAGKKITIPMLALWGNAGIAQAAATPLDTWKQWATNVDGMPVDSGHFLTEENPQVTAKALLEFFSG

SEQ ID NO: 12171 - protein, 142 aa, BradyrhizobiumColbertium
MDLALQAAENAGQSGEVPIGCVVVRNQEVIATGANRTLTDHDPTAHAEIVALREAAKKIGSERLVDCDLYVTLEPCTMCAGAISFARVRRLYYGAADPKGGAVESGVRFFASPTCHHVPDVYSGVGESEAARLLKEFFRERR

SEQ ID NO: 12172 - protein, 662 aa, BradyrhizobiumColbertium
MPRDSDKDNDSRGRRGPAKGRSGKPRGPEKKFAKRGFEGKGDRDSRPPPRGDRDSRPFRRREEGDAPRRDFSDRPRVKRDDRGGEGRGERSFKPRGDRPFSDRGSRDGEKRPFKPRGDRPSHSRDDRPPRSRDRDDARPAGRSSERKFGDKRPYAPRGDRPERKFDGERKFSRGGDRGDRPRDRGERGDSKPWQKRDDRPHGDRPRKSFGRDFGGRDRGEEKPWRQRPDRPDGGRGEDRPRFSKRRDEGDDRPRFSRPREERSGDDRPHFKRPREGRPEGRTDWQEHPRNEGRFRDRPRRDNEDDGRIFEKRPAFGGRGAYRERDRDFEGRPRREDAPKPKKAGERIAKALARAGLASRRDAEEMVTQGRVTVNGRVINSPALDITKNDVVMVDGKPLPERERTRLFLYHKPRGLMTTHDDPEGRPTVFENLPEGLPRLISVGRLDFNTEGLLLLTNDGGLARTLELPDTGWLRRYRVRAHGDVTQAQLDELKNGIEIEGVKYGPIEATLERDQGANVWLVFAIREGKNREVRNVCAHLGLEVNRLIRVSYGPFQLGEIPEGQVEEVRSRVLREQLGDKVIEKSGAEFDVPAKPATREDDGSKKPASKRAVINDRKGRRVLVQRTGSEEARERNEMEAGGYGPPRRPKRGYHGKRDLTPRED

SEQ ID NO: 12173 - protein, 185 aa, BradyrhizobiumColbertium
MRVVGGRLKGRNLASPSSRDIRPTADRLRESVFNILVHAYDNPIEDARVLDLFAGTGALGIEAASRGARFTLFVDNGAEARALLRNNVEALGLGGVTKVYRRDATDLGPAHPVEPFSLVFLDPPYGKGFAEKALASLRDGGWLTPGALLVVEESKAAQVVPPEGFEELERRAYDDTEFVFLRRTG

SEQ ID NO: 12174 - protein, 604 aa, BradyrhizobiumColbertium
MPVRQLPEQVVNRIAAGEVVERPASVVKELVENAIDAGASRIDVFTDGGGRRRIGITDDGSGMTAKDLALAVERHATSKLDDEDLLQIRTLGFRGEALPSIGSVARLSITTRHASEPHAWALTVEGGTKSEIMPAALAHGTRVEVGDLFYATPARLKFLKTDRTEAEAIREVVRRLAMARPDIAFTLAGEERAPVTWAAALPGTAGRLTRLGDILGAEFRSHAIEVHAEREGVVVAGYAAAPALTKANALGQYLFVNGRPVRDKLILGAVRAAYSDYLPRDRHPVLALFVTLDPREVDANVHPAKTEVRFRNAGLVRALIVHGLKEALAREGRRTAANSGESALSSFRPAFTPQRPASWDWRASPSAPVAPLPSFEGAAAPAFAERAQAAFDVGAPSADVRIEPQPAGDLVDRPLGAARTQIHETYIVSQTRDGLIIVDQHAAHERIVYERLKASLAANGVQRQILLIPEIVEMDEATVERLLERSAELASFGLAIESFGPGAVAVRETPSLLGKTNAGGLLRDLSEHMAEWDEALPLERRLMHVAATMACHGSVRAGRRLRPEEMNALLREMEDTPNSGQCNHGRPTYVELKLSDVEKLFGRR

SEQ ID NO: 12175 - protein, 138 aa, BradyrhizobiumColbertium
MLRISRNLVIDEDDIEIGFVRASGPGGQNVNKVATSAQLRFDTRKLTLPEDAAIRLARLAGQRMTKDGVIVIQAQRFRTQERNRQDAIDRLTEMLREAMIRPTPRRATRPTFASKQRRLEGKKRRSDVKAGRGRSFED

SEQ ID NO: 12176 - protein, 463 aa, BradyrhizobiumColbertium
MTHHFLRARCFRGTRHAAHSFVIGAALALAAVSPSQAAAKIQHLISPGGIEAWFVQDATVPLIAMEYSFAGGSAQDPKDKPGVANLVGSLLDEGSGDLDSKTFRERLDRRAIELSFNATRDTLRGSLRMLRDNKDEAFDLLRSALTSPHFNPADVERIRSQVISGLRRETTNPTSLASRKFLEVAFGDHPYSRQTNGNLDSVPTITVADMKDYVGRVIAKDGLKIAVVGDVDPATLGKLLDHTFGSLPAKANLTPVPDVEAANPPQRAFVTLDVPQTVITFGGPGVKRSDPNFMAAYVVNHILGGGGLSSRLYREVREKRGLAYSVFESLLWMEHSAIFIGNTGTRADRAGDTIDAIEKEVRRIAEEGPTQKELDEAKSYLKGSQMLALDTSSKLAQALLQYQQDKLPIDYIEKRNAIVDAVTLDDAKAAAKRLWGQGLLTVVVGRTPQAAVQPAAAPTTKSN

SEQ ID NO: 12177 - protein, 242 aa, BradyrhizobiumColbertium
MIAGDVDAAEIRPLVERNFGSIPAQPAIPARRVRPQEPDPTAPRTVTLADPRVEQPNMRRYYLVPSATTAAAGESAALDVLAQLIGSGSNSYLYRALVVDKPLAVSASASYSSISLDPTQFAISAAPKPGVSFAEVEQAVDDVIASVAQNPIRAEDLERVKTQLIAEAIYAQDNQAVLARWYGGALTTGLSIEDIRSWPDRIRAVTAEQVRAVAQKWLEKKRSVTGYLIKDTATAKREEKRS

SEQ ID NO: 12178 - protein, 97 aa, BradyrhizobiumColbertium
MRGFQGGRPSIYTMTDAIRGVATPALIICGDEDDPCVGPSLFLKKHLPAAGLAMFPKSGHVLNLEEPALFNESVARFVTLVEAGRWPARDPRSLAAH

SEQ ID NO: 12179 - protein, 218 aa, BradyrhizobiumColbertium
MQEVLPLNGVTSGAAGQYRVDHLLVAEMVKPGSKVLDVGCGEGDLLQLLETRGIDGRGIELSREGVNRCVAKGLAVVQGDADTDLVNYPDDAFDYVILSQTLQATRQPRVVLENLLRIGRRAIVSFPNFGFWKMRLQLLIGGHMPRTENLPATWYDTANIHFCTIKDFVELCDEINVKMERSVALDLYGRPVPLNLPWWVWNMFGEQAVFLLSRGAGK

SEQ ID NO: 12180 - protein, 381 aa, BradyrhizobiumColbertium
MDHPSSQVAHFGAEQPLRLDCGVDLTPFQIAYQTYGELNADRSNAVLICHALTGDQHVANVHPVTGKPGWWETLVGPGRPIDPKHYFIICSNVIGGCMGSTGPASINPVTGKVWGLDFPVITIPDMVRAQAMLIDRLGIETLFAVVGGSMGGMQVLQWTAAYPARVFSALAIACSTRHSAQNIAFHELGRQAVMADPDWHGGGYADRGIHPHRGLAVARMAAHITYLSDAALHRKFGRRMQDRDLPTFSFDADFQVESYLRYQGSSFVERFDANSYLYLTRAMDYFDIAADHGGVLAKAFAGIKTRFCVVSFTSDWLFPTSESRALVHALNASSARVSFAEIETDRGHDAFLLDVPEFFDISRAFLQSAGKARGLTGRKDG

SEQ ID NO: 12181 - protein, 40 aa, BradyrhizobiumColbertium
MRPFVGADRRTGYRLDANHHRPRLRLPSDRRWNQAMKNPA

SEQ ID NO: 12182 - protein, 281 aa, BradyrhizobiumColbertium
MSQRPPAPPSLQELRKEIDAIDESMHRLLMQRGDIIDRLIQVKQTQEVGSAFRPAREADMMRHLVQRHRGILPLDTVESIWRVIISTFTYVQAPFSVHADISASEPAMRDSARFHFGFTVPYVAHFSAQAAVEAAAKSKGDLALVSATSSRTPWWLELEADGAPKIIARLPFVERADHPAALPVFTISRVADSALVTEVETFSVRVSGWNAEVARALSPLAEIVAVPDTAFDGAALLVSVTSATSIDKIKAALIEAGASVRSTALVGSHATRYTVPPTGTK

SEQ ID NO: 12183 - protein, 365 aa, BradyrhizobiumColbertium
MSRPVPNPGILDIAPYTPGKSPVPEPGRKVFKLSANETPFGPSPKAIEAFKRVADHLEDYPEGTSRVLREAIGRSFGLDPNRIICGAGSDEILNLLAHTYLSHGDEAISTTHGFLVYPIATMAVGAKNVVAQESNLTADVDAILKAVTPRTKLVWLANPNNPTGTYLPFDEVKRLRAGLPSHVLLVLDAAYCDYVSRNDYEMGIELVATTENTVVTHTFSKIHGLAALRIGWMFGPEHIIDAVNRIRGPFNVSTPAMYAAVAAIEDTAHQAMSKQFTETWRNWLTEEIGKLGLKVTPSVANFVLIHFPTDKGRTADDADAFLTRRGLVLRALKNYGLPHALRMTIGTEEANRLVVEGLRDFMAGK

SEQ ID NO: 12184 - protein, 310 aa, BradyrhizobiumColbertium
MSEQAHFQRVALIGFGLIGGSIARAAKLQGLASEIVTTARSEKTRARVAELGIVDQVVATNAEAVKDADLVILCIPVGACGAVAQEIAAHLKPGAIVSDVGSVKGAVVRDMVPHLPKGIHFVPAHPVAGTEHSGPDSGFAELFINRWCILTPPEDTDAAATEHLRAFWAAMGAKVEIMTPDHHDLVLAITSHLPHLIAYTIVGTADELAQVTESEVIKFSAGGFRDFTRIAASDPTMWRDVFLANKEAVLEMLGTFTEDLAKLTRAIRRGDGEALFDHFTRTRAIRRGIVEIGQDSAAPDFGRLAALKKP

SEQ ID NO: 12185 - protein, 394 aa, BradyrhizobiumColbertium
MSNMTVATGRRSRWGLFIAPVFVLILAVAWSGFWFYAASQAEIAADAWRAQEAKSGRIYDCAKRSIAGFPFRFEVQCSGASVALVSQNASKTPFTAKLDNILVVAQVYDPKRVIAEFSAPATLTDGITQNTFAVNWSKGRASVAGLPAVPDRASIVFDDPSLNRLDGSVQVPLARARQVELHGRLAEGSKPDHPVIETVLHVAQGSIQGVHPLLAEPFEADTRAKITGLSDLTPKPWPQRFREIQAAGGHIEIVQSRIQQGEMIAVAAGKLGLSPNGRLDGELQMTVTGLERVIPALGIEKMLEEGVPQATLDRLAPGVKSQDLNNLFGALDRAVPGLGKVIKQNANAGVAAGINSIGTESTLEGKKARSFPLKFVDGAVLLGPVKVGQIPPLY

SEQ ID NO: 12186 - protein, 209 aa, BradyrhizobiumColbertium
MVLVAVPEMSEITVPSVTTAKGDLWVFGYGSLMWRPGFEFEERVPARLVGEHRALCVYSFVHRGTPEKPGLVLGLDRGGACRGIAFRVAEKNRADVVAYLRAREQVTSVYREVMRSVWLENDARQRVSALAYVVDRGHVQYAGRLSLAEQHRHVLQGHGQSGANRDYLTATVKAIEAEGFRDAQLHQLALMLHGDALHVPAPTGDRESR

SEQ ID NO: 12187 - protein, 257 aa, BradyrhizobiumColbertium
MFLIFLRSLVFNVLFYAVLVCLAIVALPTFALPPRAMLTVAEWWAKTTLFLMRVVCNIKVEFRGVEKIPKGPLLIVAKHQSFWETFVLPGFFHRPIFILKRQLMQIPVFGQFLVKTGMIAIDRNAGVKALLDMTRRAREAVRSGKQLVIFPEGTRRAPGAAPDYKTGFAQIYSSCGVPCLPIALNSGLFWPRRTFMRYPGTLVVEFLDPLPAGLPKDEFLSRVQTAIEDATGRLVEAGRKEQEQLIGSAPSYAPTGG

SEQ ID NO: 12188 - protein, 234 aa, BradyrhizobiumColbertium
MTSPTDDRSPKLPRGWLRAAIVSTIALAFVAAAAGFLAFLSQLRGVETVPDRKADGIVVLTGGSSRVSDAMELLAAGYGRRLLISGVHPTSTASDISRTLPENQSFMTCCVDLDRTALTTRGNAAEARRWAEGRRFRSLIVVTSNYHMPRALVEFSHAMPQTTLIPFAVVGEKWREEPWWTSGSTLRLLLSEYVKYIAAELRVRLEDLGIDLWPEISEQPAGQQPKRPATAQAN

SEQ ID NO: 12189 - protein, 322 aa, BradyrhizobiumColbertium
MSRTDERGVLVDLGQERPQLPAKARNMSPIVPRASIHGRALVAVVAIMSFLASMATGTVLLVSASAAEWQSDVASEITIQVRPQAGRDLDRDTAAVTEAMRTQAGIVEVKPFTREESGRLLEPWLGTGLSMDDLPVPRMIIARVQPGTPLDLGALRALVTQVAPGASVDDHRAWIERMRSMTNATVLAGLGILALVIIATIISVSFATRGAMAANRPIVEVLHFVGAGDRYIANHFLRHFLRLGLEGGLIGGGAAMLVFGFSESVAGWFSGTPVGDQFAALLGTFSLRPSGYIVLAVQAVLIGAITAAAARQTLFATLNDVD

SEQ ID NO: 12190 - protein, 219 aa, BradyrhizobiumColbertium
MVRFENVGLRYGLGPEILRDLSFQIPAHSFQFLTGPSGAGKTSLLRLLFLSHRPTRGLVNLFGHDISQLGKDEIADLRKRIGIVLQDFRLLDHMTTYENVALPFRVMGRSESSYRKEVIDLLRWVGLGDRMDALPPILSGGEKQRAAIARAVISRPQLLLADEPTGSVDPTLGRRLLRLFIELNKSGTAVIIATHDIGLMDQYEARRLVLHQGRLHVYE

SEQ ID NO: 12191 - protein, 284 aa, BradyrhizobiumColbertium
MTSYAIKLASLGANGRAVRCSRCKETWIAHPEDAVEEASVPAMAAAGRADEQSDLAEQWNSYARDDGVADAPVVDSPSIASDWPDEAAREAEDEWSAAARQAEAEVVGAQHQSWFSGLFRRRGARVSRPVATAAPPRSYFGLPTACAAMGALVLALVIWRGDVVRLLPQTAAFYKMVGLEVNLRSLAFKDVKLSSETVDGKQVLVIEGVIVGQGKKPLDIPRLRFAVRDAQGAEIYAWNTVLEQTVLRPGERAFFRSRLASPPPEGRNIDVRFFNRRDIAGGSV

SEQ ID NO: 12192 - protein, 124 aa, BradyrhizobiumColbertium
MPKILIADDEDSMRTLVARAIAMDGHETVTAQDGAEALEILTREHGAFDLLLTDIQMPVMDGIALALSAARDFPDLTILLMTGFADQRERASNLNALVHDVVTKPFSVADIRTAVADALAVKKR

SEQ ID NO: 12193 - protein, 886 aa, BradyrhizobiumColbertium
MNGVTPDPSDPIRNSDALSRLKLAQALDRATYAIAWERAWPNVARLLTVVGLFLVVSWAGLWLAVPFLARAIGLGLFAAVALAALFPLSRFRWPSREEALARLDRGSGIRHRPATTLTDTLTSQDPVAQALWQAQRERTLASLKRIHAGLPHPRLALHDPWALRALVMVMLVATFFAAGDERAMRLGAAFNWNGVLAPTNVRVDAWVTPPLYTGKPPVILSAANKEAAALPASGPLAVPAGSTLIVRSSGGSLDVAVSGGLKEVAPTEASPQGTNERHFAISGDGTAHVRAPSGQPQWAFAATPDRAPTIALAKDPERQARGALQLSYKIEDDYGVTGAEAKFALRSTDAPDDTKDPAKDAPKAAGDGDTRTAARPLFQPPRFPLALPNARTRNAVGQSVKDLSEDPYAGAEVALTLTAKDEAGNEATSEAFNMRLPERLFTKPVARALIEQRRILALDANKNSDVYAALDALMIAPEMFTPEPGQYLGLHSVARQLEAARTDDALREVVASLWALAVTIEDGKISDVEKALRAAQDALKQALERGASDEEIKKLTQDLRQALNDFMRQLAEQLRNNNDPQQLARPLDPNTKVLRQQDLQNMIDRMERLSRSGDKDAAKQLLDQLQQMLEGLQMAQPGQAGESDMEQALNELGDMIRKQQQLRDKTFKQGQDSRRERSRGKQQQGDQSMSELQQDQQGLRDRLKKLQDELAKRGLGQKGEKGQKGQQGQKGQQGDQGQPGQNGDQDGDQGDDDGGLDAADGAMGDAGSKLGEGNADGAVDSQGKALDAMRKGAQKMAEAMQQGDGDGQGDGPGQRAGRQQSGGNQTDPLGRPLHGREYGDDYTVKIPGEIDTQRVRRILEELRRRLGDPSRPQIELDYIERLLKEF

SEQ ID NO: 12194 - protein, 127 aa, BradyrhizobiumColbertium
MDKKMHDKGLEVRKAVLGEAYVNNALKNVDDFNRPFQEMLNEYCWGTVWGREELPRKTRSMLNIAMIAILNRQHEFRAHLKGALTNGVTRDEIREILMQVAIYGGMPAAVDSFRIAREVFAEIDGKA

SEQ ID NO: 12195 - protein, 302 aa, BradyrhizobiumColbertium
MDIGFIGLGNMGFPMARRLIEAGHRLVVFDTRKEIMDKLVVRGATPATSPKDVADQVETVMASLPSLQASLEVATGANGVIEGRRAKRFVDLSTVGSAMAAKIHGLLAKRNIVQIDCPVSGGVGGAEKGTLAVMVSGPRAEFELLKPALDVIGKVFFIGEKPGAAQTMKLANNFLSATAIVATSEAVVMGVKAGLDPAVMIDVINAGSGMNTASRDKFPRAVLPRTFDFGFATGLMVKDVRLALEEMKQLGLSMEVADAVGRLWETVISTEGAESDFTAAIKPIEKKAGVVVGGAKGGLAGK

SEQ ID NO: 12196 - protein, 421 aa, BradyrhizobiumColbertium
MNHFDYRNGVLHAEAVNLSELAATVGTPFYCYSTATLERHYRVFADAFAGEKVLVCYAMKANSNQSVLRTLAKLGAGADVVSGGELKRALAAGIPASKIVFSGVGKTEEELRAALAADILCLNVESEPELELLSRLATETGKTARISLRVNPDVDAGTHAKISTGKSENKFGIPIVHAREVYARAAKLPGIEVTGADVHIGSQITDLSGMETAFRILSEFVQTLRADGHNISHVDFGGGLGIPYDMDGEVPPAPDAYAAMVKRVSHNLGCTLMFEPGRMIVGNAGILVTKVIYVKHGDGKNFVIIDAAMNDLIRPTLYEAYHDILPVKQPAKGAATIKADVVGPVCETGDYLALDRTLPTPKAGDLLAIMTAGAYGAVQAGTYNTRPLVPEVLVKGDQYAVVRPRVEVEQLIAMDKPAPWL

SEQ ID NO: 12197 - protein, 94 aa, BradyrhizobiumColbertium
MTSKFRPAGSGWAIIVLSLTALALAGCGRKGPLDLPPTASTAGGAAPTDTETEAQRTPSVFNPTYGADAAPAAGRGRKKPFILDPLLDEPPGKR

SEQ ID NO: 12198 - protein, 465 aa, BradyrhizobiumColbertium
MSNKMWGGRFSERPDEIMEEINVSIDVDRHLFAQDIAASKAHAAMLADQGIITASDAKNIGKGLDTILSEIGKGGFEFKRALEDIHMNVESRLSELIGPAAGRLHTARSRNDQVATDFRLFVRDVIDETDAALAAFQQALVERALEHAATVMPGFTHLQTAQPVTFGHHLLAYVEMAARDRGRFQDARKRLNESPLGAAALAGTSFPIDRHATAKALLFDRPMANSLDAVSDRDFVLETLSAAAICAVHMSRFAEEIVIWTSPLVGLIRLSDKFTTGSSIMPQKRNPDAAELVRAKTGRVIGALNGLLIVMKGLPLAYQKDMQEDKQGAMEGFAALSLAIRAMTGMVHDLVPDEAKMKAAAGEGYATATDLADWLVRTLKMPFREAHHVTGRIVAKAAEGGVALHELPLKEMQAIEPRITKDVLGVLSVESSVKSRTSFGGTAPKNVAAQAKAWAKRLEKERKRG

SEQ ID NO: 12199 - protein, 221 aa, BradyrhizobiumColbertium
MLDKTPSATRRIPLIVAAVTVVGLAGFAALYGFGLSRVPSGDPTCKPAVATAQKIAPLAHGELAALTMASAPLKLPDLAFEDADGKPKKLSDFRGKTLLVNLWATWCVPCRKEMPALDELQGKLSGPNFEVVAINIDTRDPDKPKTFLKEANLVRLAYFSDQKAKVFQDLKAVGRALGMPTSVLVDPQGCEIATIAGPAEWASEDALKLIRAATGKAAASL

SEQ ID NO: 12200 - protein, 59 aa, BradyrhizobiumColbertium
MVSTMLAAQQGALQSNIAATLTKQNMDMEKSTVLTLMGAGQPSLANVGPGVGGNLNVTA

SEQ ID NO: 12201 - protein, 302 aa, BradyrhizobiumColbertium
MRAVPVDDIMAAEIKKVGVIGAGQMGNGIAHVAALAGFDVMLNDVSADRLKSGMATINGNLARQVSKKVVTEEAKTKALARISPAEKLDDLADCDLVIETAVEKEEVKRKIFHELCAVLKPEAIIASDTSSISITRLAAATDRPERFIGIHFMNPVPLMELVELIRGIATDDSTFETAKEFVGKLGKQVAVSEDFPAFIVNRILLPMINEAIYTLYEGVGNVEAIDAAMKLGAHHPMGPLELADFIGLDTCLSIMQVLHEGLADSKYRPCPLLVKYVEAGWLGRKTQRGFYDYRGAKPVPTR

SEQ ID NO: 12202 - protein, 314 aa, BradyrhizobiumColbertium
MTTLLIAEHDNASLKDATNKALTAAAALGADVEVLVAGQNAKAAADAAAKLAGVKKVLLADGDLYAHDLAEPLAALVVSLASGYDAIVAPATSRFKNVMPRIAALLDVMQVSEIIKVVAPDTFERPIYAGNAIQTVKSKDAKKVITVRTSTFAAAGEGGSAPVENVAAAADPGLSTFVGEEVAKSDRPELTSAKIIVSGGRAMQSRENFAKYIEPLADKLGAGVGASRAAVDAGYAPNDWEVGQTGKVVAPELYVAVGISGAIQHLAGMKDSKVIVAINKDEDAPIFQVADYGLVADLYQAVPELTAELGKLGK

SEQ ID NO: 12203 - protein, 249 aa, BradyrhizobiumColbertium
MKVLVPVKRVVDYNVKVRVKGDGSGVELANVKMSMNPFDEIAVEEALRLKEAGKATEVVVVSIGPAQASETIRTGLAMGADRGILVKAEGNVEPLAVAKILKKVAEEEQPGLIILGKQAIDDDSNQTGQMLAALLGWSQATFASKLEVEGSDFKVTREVDGGLQTVKLKGPAIVTTDLRLNEPRYASLPNIMKAKKKPIAEKTVADYGVDVAARLEILKTTEPAGRKAGVKVKDVAELVSKLKNEAGVL

SEQ ID NO: 12204 - protein, 190 aa, BradyrhizobiumColbertium
MVVLNRIYTKTGDDGTTALGTGERRPKYDLRIEAYGTVDETNAVIGVVRLHTRDMPELDAMLGRIQNDLFDLGADLAVPEREGKAERLRVVASQVERLERDIDKLNDKLAPLTSFVLPGGTPAAAHLHVARTICRRAERVIVELAARPAETVNAAGIHYMNRLSDFLFVASRAANGNGAGDVLWVPGQNR

SEQ ID NO: 12205 - protein, 64 aa, BradyrhizobiumColbertium
MASLLSTFILPAAAGAVALVLLLGLINMMRGGSPNTSQKLMRWRVLLQFVAIIIAMAAVWAMGR

SEQ ID NO: 12206 - protein, 297 aa, BradyrhizobiumColbertium
MKAIRYIYAVVMDAFYTFLADDGWAIASHIALSTLMALFPFLIVLTSLAGFFGSKELADQAASLMLQVWPKQVADSISGEVHDVLTTTRTGLLTIGAALSVYFASNGVEALRVALNRAYAVVEMRSWYWLRLESIAYTLIAAFTALAMAFLIVLGPLIIEAARRHIPLFVESNESILTWLRYGITISALVLALFILHAWLPAGRRSFLQIMPGIIFTVVASLISGIVFGQYLARFANNYVTMYAGLASVIIALVFLYFIAAIFVYGGELNAAIIKSRLPHGVSLQAAQSLKPGETQA

SEQ ID NO: 12207 - protein, 304 aa, BradyrhizobiumColbertium
MDGRVKPGHDEIHLMAQPVFRFAPSPNGLLHLGHAYSALLNFDRAQETGGRMLLRIEDIDATRCRPDYETAIYEDLDWLGIAWETPVRRQSEHLADYRAALEKLSALGLVYPAFESRAEIARLIAAREVEGPWPRDPDGAPLYPGAARSLSADERSQLIASGAPYALRLDMPAACRRAARLSWNELGEGPAGEYGIVAARPEAWGDVILARKETPTSYHLSVVVDDALQGVSEIVRGRDLFYATAVHRLLQVLLGLPEPAYRHHRLIRDEAGRKLSKSSRSTGLRALRAAGVTPARIRQLMGLD

SEQ ID NO: 12208 - protein, 231 aa, BradyrhizobiumColbertium
MDARVKPAQHEPNTMTIHLETQSDLEEAVHALIKRDPRLKPILEIAGMPALRRREPGFTGLAHIVCGQQLSTASAAAIWGRLSAAFDPFDHDAVRRARTDRLGRLGLSAAKIKTLKHLAREIAAERLNLDVLAEEDADAAHHTLIALPGIGPWTADVYLLFCLGHGDAWPAGDLAVQEGIRIGLGLKARPTEKQMAPLAEPWRPLRGAAAHLWWSYYRAVKKREGVLAGSG

SEQ ID NO: 12209 - protein, 295 aa, BradyrhizobiumColbertium
MDWDLCKTFVAVADTGSFTAAARRLHTSHPTVSRKIAALEAQLGTRLVARAADGLALTADGRTLREHAEAMAAAALRAETAVAAGGHRARGIVKLSIGATLASHWLMPRLPTFLRAHDHIQLEIITHPFPASVRRREADVVLRPVDSGEENLVGRKIGRLGTGFYASRDYAAGRSLPERRGDWKEHSVIGFADQASNVQLARWSDVVTQQARVVMRCSSQGDMLAAVRAGIGISALSCFVAETYSDLVRVAPQKLASIADLWLLAHPDLVELPAVRAVVDFVAECARADRARLRG

SEQ ID NO: 12210 - protein, 324 aa, BradyrhizobiumColbertium
MALPTLLKDSLELPVVGSPLFIVSGPELVIAQCKAGVVGSFPALNARPVEKLDEWLSRIEDELGEYRSRNPGKKVAPYAVNQICHASNDRLMKDMEICVKHKAPIIITSLRPPAEIVEAAHSYGGLVFHDVINVKHARKAAEQGVDGLILVCAGAGGHAGTLSPFALVREVKQWFGGAILLSGAISYGFGIASALTLGADLAYMGTRFIATQEANADDAYKSALTRHAAHDIVYTNLFTGVHGNYLGPSIAAAGLDPDNLPAADKSKMNFGSGGNMKSKAWRDIWGSGQGIGQIVDAPPVAELVERMKGEFDQARRDFLMRVSA

SEQ ID NO: 12211 - protein, 394 aa, BradyrhizobiumColbertium
MKQAAALIGLSLLTLGASGAHAEGAGEIRIGQTLPYSGPASGFGTIGRTQEAFFEKINAEGGINGRKVKFITLDDAYSPPKTVEQTRKLVEQDEVLMMFGSLGTATNSAVQRYLNGKKVPQLFVLSGATKWADPQKYPWTMPGMAAYESEGVVYAKHVLRTKPGAKIAILSQNDDFGRDYVAGFKRALGDKANSMIVAEATYETSAPTISSQLSALKASGADVLFGVVLGKFTSQMIKGVAELGWKPELFFVPTSASSISFLEPAGLDNAVGLISSSNQKDTMDPQWADDPGVKEYFAFMKQYMPAADLSNSNYAAGYHYATLLMTVLKACKDDFSRDNIMRQAASLKDVQLPLLLPGITVATGPDDYLPFQQLRLRRFNGKSWVGFGDVLDDR

SEQ ID NO: 12212 - protein, 517 aa, BradyrhizobiumColbertium
MIISGDRRISYSEIQARIRRAASGFRALGLAEGAPVAMMLRNDFALFEVVAASAALGSPVVPINWHLKAEEVRYILADSGANILVCHADLLPQIRSGLPPDFRLLVVETPPELKATFAVPAALAQVPSGMTDWDRWREDHPESQEPPRRAAAMIYTSGTTGMPKGVRRMPMQPDQAAASERVGAITYGIKPREGQVVLINGPMYHSAPHSYGMMAFRNGCTIVLQPRFEAEELLALIERHRVTHIHMVPTMFVRLLRLPDTVRRRYDLSSLRFVVHGAAPGPPEVKKAMIDWWGPVINEYFGSTETGIPVWHSAEEALKKPGTVGRAIEGGIIRIFRDDGSQCGAGEVGEIYMRQRAVPDFDYHGKAQARAEAGRDGLVSVGDVGYLDEDGYLFLCDRKRDMVISGGVNIYPAEIENVLIGMHGVRDCAVFGIPDAEYGERLCACIEPERGVQLSAAAVQAFLRERLANFKVPKEVQFLDAMPREATGKIFKRKLRDPYWADWKPDGPEPAAPKSRA

SEQ ID NO: 12213 - protein, 590 aa, BradyrhizobiumColbertium
MLDKTKDIYVSAQSWLDEFERALGKPDAALKRLFLADGFWRDVLALSWNLQTIAGADPITRELAARAPKAAPTNFRIAPNRAPPRWVTRAGTNTIEAIFDFETAIGRGSGIVRLVPDPADGDRLKAWTLLTALDELKGYEEQLGTSRPRGQAYSRDFRGPNWLDLRNASRDYADRDPAVLVVGGGQAGLAIAARLKQLKVDTLIVDREARIGDNWRKRYHALTLHNQVQVNHLPYMPFPPNWPTYIPKDKLANWFEAYVDAMELNFWTGTEFEGGAYEEAKGHWTVRLRRADGSRRTMHPRHVIMATGVSGIANIPDIPTLSNFKGTLVHSSRYEDGENWTGKRAIVIGTGNSGHDIAQDLYSSGAEVTLVQRSPTLVTNIEPSAQLAYATYNEGTLEDNDLIAASMPTPLAKKTHVMLTEQSKELDKELLECLARVGFKLDFGEAGTGWQFKYLTRGGGYYFNVGCSNLILEGKIRLKQFSDIDSFVAEGARMKDGSTIAADLIVLSTGYKPQEYLVRKLFGDGVADRVGPIWGFGDGFELRNMYARTKQPGLWFIAGSLAQCRINSKYLALQIKAIEEGILGREEGTA

SEQ ID NO: 12214 - protein, 324 aa, BradyrhizobiumColbertium
MPAILGAGEHRYRVVEDFAKLPDGWQLTDVASVAVDSKDRIYVFNRGAHPMVVLDREGNFLRSWGEGLFSRAHGLHIDADDHLYCTDDGDHTVRKCTAEGKVLLTIGIPAKPAPFMSGEPFHRCTHTALSPKGEIYVSDGYGNARVHKFTPDGKLIKSWGEPGTDPGQFNIVHNIATDADGWVYVADRENHRVQVFNGEGKYETQWNNLHRPCALCCYGGRSPTFVIGELGPGLSINRNVPNLGPRLSIVDAKGNRIARLGGEEGPGLASGKFLAPHGIALDSKGDIYVGEVGVTNWQSSFPDEKMPAAVRTTRCLQKLERVRE

SEQ ID NO: 12215 - protein, 174 aa, BradyrhizobiumColbertium
MLVLNADFRPLSYYPLSLWSWQDAIKAVFLDRVNIVAHYDQAVHSPTLQMQLPSVVSLKSFVKPTTHPAFTRFNVFLRDRFACQYCGSPEDLTFDHIIPRSKGGQTTWENVVAACSPCNLRKGNLTPAQAKMFPRQSAFAPTVHQLHRNGRLFPPNYLHDSWLDYLYWDTELDP

SEQ ID NO: 12216 - protein, 293 aa, BradyrhizobiumColbertium
MDTARRDRTIGSLCLGVTACGWALNWPLMKLLLQQWPPLFARGLAGVCASLILAALVLSRKESFAVPREAVPRLLFATFTNVFAWMGLGTVAMKYVSVSEGALLAYTMPIWAMLFAWPVLNTRPAPRDIFGLVLGVAGVTLLLSGNGLAFSADKLLGIVLALLCAILFALGNVLNRKPLPMPPLVVVVWQVGLGCATMLILGVVFEHPDITAITPLGLGCFAYMTLVPMGLCYVTWFETLRRLPPTTASTGMLIVPVIGVISAAIILGEPLGYREWTAMALTLGGVTLALQRG

SEQ ID NO: 12217 - protein, 73 aa, BradyrhizobiumColbertium
MPAAEKDHVYKILDLVGSSETSIEDAIKNAIGRASKTVREMKWFEVVQTRGHIENGTVGHFQVTLRVGFTLEE

SEQ ID NO: 12218 - protein, 326 aa, BradyrhizobiumColbertium
MGTGVNAQLRLKALHHLDVPWLPSQIEQREGRIVRQGNQHDEVDIFAYATEGSLDAQMWQNNERKARFIAAALSGDTSIRRLEDMGESQANQFAMAKAIASGDPRLMQKAGLEADIARLERLRAAHIDDQHAVRRQIRDAERDIEYSTRRIGEIAQDIARRRPTAGDAFTMTVTGDTHGERKLAGRALLKEILTLVQLQQEGESAIASIGGFDVEYCGERFGRDGYRYTTMLQRTGADYEIELPVTVTPLGAIARLENALDDFEGERERMSQRLADARRRLASYASRDGGEFAFASELADKRRQLAEVEKALAEDDGRGGEMAAAA

SEQ ID NO: 12219 - protein, 434 aa, BradyrhizobiumColbertium
MALALPVRQIKKLRLLANVLPAMLDHMAKGDMPNEQQLRTIAAASLDEQKEVWKKHKPSKGDPQVSWWSVAQGLQKTRMFARHASFGDDLAQAYGIQWVEDLFAPADEDSRYTTNVEGFLGAQQEWMTANLPKKGVIAETTNWGEVKLPPKAERVYGKPTKSDCTAMYLDREGRVQSVHYRMPEAKKPKGGKDAGGADNAPDDVGDVSKPRPDVTRKGVEMIGDYRTDALREALGRAPIEDDALMALLILAFAGQNVSVTTGSGGVYYGHRRLAKNAAVLFDADGKLAFDMDTLRVAARTMLVDVFSCRENATNSGIVARIAGEMIGADAFLPNMGTEDFLSCLSRPALEGSCNDTPVLPRQRVKDTRAALVEHYKEGHFVHPSALFAPDPAKLSDWLSSRAATADEDEADEDIADIGEGGFEEDAEAFREAAE

SEQ ID NO: 12220 - protein, 158 aa, BradyrhizobiumColbertium
MSAHTIFDNAPIGSIVAWSDGTPQPPARFNKKLAAWQTSNSRGRLIRKQRARGVGNLSLSACFTLHEADHGAGGVIAIRIHRTFSLDSSLTFTIVERPAIGLVRVFDRAGDDAELVYLATHETDAREWLTRHGYPRAVLHEVTADEVGADIVEGRTAA

SEQ ID NO: 12221 - protein, 268 aa, BradyrhizobiumColbertium
MPVALVGDTAFAMAMARDDRHYLVTAWRLSRAMDEWTRADFYGHSGELADEAAFRARVLENAEHQRERKMLGRVEEYSRAHTPWGTSQGATIYAEGVTSHSTAGHGGFKLSAERNRKVHRMLRSAGGWYEEDAEWAIVAITFPHLFTAFERRCAERTIKDSWPDAWETIFGTILMPGESHEKDRRAFEAAHVHDWIVISAITSKHVVGFAEVIATPGGKRGVGTEERRFLVPSDEYRVGRFGFVIDPARHDVYGGESDFIGWQPGRAA

SEQ ID NO: 12222 - protein, 136 aa, BradyrhizobiumColbertium
MTPSDLLHRMEEAQRQTQRQLDIIDRQITRRMTALIPSLGRKQSGYRRGKPPDPGAFLERYRATLAALTAERQPEIDALARKFARQVHAIEALRQRLGIEDGRSSARHERIDTTMHHHDAGPASALWPETSSSISR

SEQ ID NO: 12223 - protein, 270 aa, BradyrhizobiumColbertium
MPRRVAAGAADLGTAGPRAARGLKALLARKPALLDPAAPDPEAPVIPPVSVDRTRREDRQEPIRAFRRTEGKEVLMTKAARTQRQPAKVVQLRKSTTLEMVRLACPDAAQATLISESFGLPVLDSDGIRELHQRMIVETADSLSEGLGERAMQIHLQRIVGAYVGSAHGAGQFYSRAVTEARDATAKASNDLRDEDLDGPVGFDSTAQRKREFAADMALQSHALRMAAEGAVAAYEHVVGERWKPFERQVENPGHTLDRKAAAMQLAAFG

SEQ ID NO: 12224 - protein, 291 aa, BradyrhizobiumColbertium
MDRRNGVAMGATSKRRFRKMTEKMEGSRADVYARITDRIVADLEKGVRPWIQPWSAGHAGRRITRPLRHNGEPYSGMNVLLLWSEALARGFTSPTWMTFKQAIELDAHVRKGESGATVIYASRFTRTETDGNGGEVERDIPFLKTYSVFNVEQIAGLPDHFYRQPAPTIDPIQRIDHADRFFANTGSVIRHGGARAFYAPSTDHIQMPPFESFRDAASYVAVLSHEHVHWTADSRRVGRDLSRYAKDRSERAREELVAEIGSALMCADLGIVPELEPRPDHASYVESWLTL

SEQ ID NO: 12225 - protein, 334 aa, BradyrhizobiumColbertium
MTRNNHFPHLMRAFFYEWLVEQRNASIHTVRSYRDAWRLFLRFVAKRAGKKVAMITLADLTAREVIAFLGHAEHERGGTIGTRNCRLAAIRSFFNFVATRDPGSIAQCVEILNIPIKRAPVSEPCYLDPMEVTAILAQPDRSTLEGMRDHALLSFLYNSGARIQEALDLCPDAIRFDSPSCVRLTGKGRKERICPLWPETMMLLRKLLERQPRAPDQRLFVNRYGQPLSASGVRFKLAAYVKAAAETTPTLRDKHVTPHAFRHATAVHLISAGVDVTVIRSWLGHVSLDTTNHYARANLETKRKALEKVGAPEAPSRQPSWKRDTSVLAWLDML

SEQ ID NO: 12226 - protein, 454 aa, BradyrhizobiumColbertium
MTIWPDPERKLIARYIAGLDLRTKNSPIYYRQALNIFQDVAERHAKLDKDMLVAWLHVSPGRWATTTRLHRTRIIDRFLDHLEEIGAIERNPVAALREACNIKQCMPVWRALASSDPDSALAELYQPRPFGSVLGKMMAEHVTLMRNRGYKYTAQAVRLWRLDRFLQLNPELQDQPLEVMLEHWSAAKTTRNHPNECEKLKRVLAKILRHKDPSLPPRRPDPSPEKEVARHWRKPHIYTPADVRRMLDIARSYPSPRAPLRPSSIYTMLLLSYCAGLRRSELARLDLGDVDFQGGTITIRQTKFHKTRILPLPDSVLDELRSYTQARRRAGGSLDPRSGLFWHEQRGDRYTKEAVAWLLVDVIRRAGLKPPRGRTGPRLHDLRHSMVVNRILEWYEAGINPQDRLPFLATYLGHRDINSTLVYITVTQDLLHHANERFRVLGVPCLNIGPEGRA

SEQ ID NO: 12227 - protein, 410 aa, BradyrhizobiumColbertium
MLNVDNELIAELRIVLTKQRYSPVVIGNYCAYARGFVEYLAQQNIEVTDVTEAQVAQYLQHAIAMFGQRHGRTPARDWHSIPRSGIHALLRLAQGQWPSAPKATCAADTLRFAICDGYETWLREERGLAAASIDALMWEGRNFLVWQFDRHGPDSLMTMTVSDIDRYMDTRSPHQTRRSVKDVAERLRSMLRYLHRTGRVAIDLSPHVIAPLLYAYEGVPSILTPDQVAAVLQASGEDKTPVGLRDHAILQLLATYGLRSGEICNLRIEDIDWRAESIRIRHTKTQACSFLPLMAPVGEAVLAYLQAGRPVTDAREIFVRTRAPYRKLGLLASMVRQRLAAAGVTPSGKNGSHIFRHARAVEMLRAAVPRKVIGDLLGHRSTESTAPYLKLATEDLRAIALEVPGREMPS

SEQ ID NO: 12228 - protein, 41 aa, BradyrhizobiumColbertium
MQKRGGALRMCGGLENRSLVALQDLQLSAAAHNEKESGCTA

SEQ ID NO: 12229 - protein, 60 aa, BradyrhizobiumColbertium
MNVRSGRRADFAVVTTVHRNGNQKSSLGLLRREAKSLRPALEEKKQRVLLLPIPFLGAAG

SEQ ID NO: 12230 - protein, 45 aa, BradyrhizobiumColbertium
MTLVHTVRRQRQAHNPAVDGRRSLLDEAALDKTIYEANRAGVRQT

SEQ ID NO: 12231 - protein, 92 aa, BradyrhizobiumColbertium
MCLALTTDGMHQRHKLLALRSAALATLFDQVTAEDLAAFERVAETIAGSLPENALTALTTCRFCDERHCTDCPMEVFGTLEPAGGPVTGLRS

SEQ ID NO: 12232 - protein, 173 aa, BradyrhizobiumColbertium
MAIQTNRFRLQIAERGVGSLSLLALLRWALVVIFLWFGGMKFTAYEAEGIAPFIAHSPLMSWLHILFGIRGASYVIGVLELSTAAALIAGAINPVFSALGAAMSTITYLITITFFISTPGVAEPTAGGFPAISAAPGQFLLKDLVLLAASLCLLSASVQGPWLKAENSQNGNL

SEQ ID NO: 12233 - protein, 160 aa, BradyrhizobiumColbertium
MKGWLLDTNVVSALINPRGAPSVKTWASAQDEETFYISVLTLAEYDKGIHNLPADHEDRPRYIASRDALAERFGPRVLSLDDDSVRRWGRLSGEVKRTSGHPPPVIDALLAASAIEHDLYLVTRNVKDTKPTGATVYDPWNDDMKMFPLSPRVGRRPPAT

SEQ ID NO: 12234 - protein, 100 aa, BradyrhizobiumColbertium
MAKRAEVTKTKRPVRRRLAGRWKLEDAKARFSEVVRHAREEGPQRVSVRGHDAVVVMSVEEFERLTPGKPRAPFVEFMESLHLGGLDLDREADRGRDVEL

SEQ ID NO: 12235 - protein, 213 aa, BradyrhizobiumColbertium
MRTEALVKTLSEDLKPVRPRSFRRDAVILGVVAILEFAAFAGAGFMRPDLSHAMHMPSFWWKLASMGAIAISGAAVALFSSDPTKSPKAGLRWLAIAVALIFASGWLIDALEGGFSELVRRLDWQMGLQCTWKMVTLSVPLVVALGVLIQRGAPTDRFGTSLAAALGSAGWGAFIFVFACPSDDVLYIAVWYSVGCAIVTVIGRLILARLVRW

SEQ ID NO: 12236 - protein, 699 aa, BradyrhizobiumColbertium
MADVVDRPQAAPAEKSRPIDTPSIWHAGEMALQETVGVRRAMERQGAQVIRDHLIDQHRLFFPLLPSIIIGAVDENGDVWSTMREGPAGFLSVADNKTLEIAATVDVSDPAEAGLSDGCSVGLLGIQLGTRRRNRLNGVVRGRGANGFSVGVRESYGNCPQYIQLRNYSFEPAPASRPSRQESAELSDVHRAMIAAADTFFVASYVDRDGSRHVDVSHRGGKPGFVRVNKDGSLTIPDFAGNLYFNTLGNILVSGRAGLCFPDFESGSLLQITGKAEVLLDSPEIALFQGAERLWRVYPERVVYRAGALALRWTKVEGGESPNSLMTGSWDEVRDQQAASKEASSWRRFRVARRVRESTTVSSFFLEPADGEVLLRHKAGQYLPIRVHIGDQDAPAIRNYTISAAPSDGCYRISVKREGAISSFLHDRCDVGTIIEARAPEGSFGLRPAGKRPSVLVAAGIGITPMIAMLRHRLFERQRTRSAKQTWLFYSSRSVSEQPFDRELHAIATNSTDWLRVVRLLSNTQGAMAARDYELGGRLTAEVIKDALPSLNCDFYLCGPPGFMQDMYDGLRAFGVSDDQLFAEAFGPAAFRRHGTEALPPLPSASTKPVSVVFSKSGTEALWEPESGTLLELAERAGLTPDFSCRSGSCGTCRAMVSQGEVTYENRPGYETRDQEALLCCAFPAERPADDRRPLVIEL

SEQ ID NO: 12237 - protein, 206 aa, BradyrhizobiumColbertium
MKLYYLSLSGHSHRARLFLSILGADVEQIELGGGDLRTAEFLRMNPFGQVPVLVDGDAVIADSNAILVYLAKKFDRKDWLPESAVEAAAVQKWLSVAANEIANGPCAARLITVFKASFDPEDTIAKAHKVLRLVEQALAGRDWIAAKGPTIADIALYSYTSHAPEGNVDLSDYSNIRSWLARVEALPGFLPFAETPVGLRASAANG

SEQ ID NO: 12238 - protein, 336 aa, BradyrhizobiumColbertium
MDRIEAMTLLVATVEKGSLSAAGRALGVPLATVSRKVSDLEAHLRTKLLNRSNRRLTLTDAGEAYVAASKRILQQINEAERAAAGEYIAPRGDLVVTAPIVFGRLHMVPPIAAFLEAYPEVDVRLALADRVTNLMEEHIDAALRISLLPDSTLLATKVGEIRRVVCGSPAYFDKHGTPAKPADLSELSCITFEGQSNPQSWNFGTAKAPVVVPVHSRLIATTAEASIDAAKLGAGVTRVLSYQVEDAVRKGELVTILEDFEPPPIPVSLVYRGGGMIPLKLRAFLDFMTPRLRASLSQAKSRSAKPQGRPEENEADTAPAASTGPRKSRKAADQSA

SEQ ID NO: 12239 - protein, 154 aa, BradyrhizobiumColbertium
MTRPPLPPFSRESAVEKVRLAEDGWNGRNPEKVSLAYTQDTVWRNRAEFVNGRSEVVAFLTRKWAKELDYRLIKELWAFSENRIAVRYAYEWHDDSGNWFRSYGNENWEFAPDGLMHRRFACINDLPIAEADRKFHWPLGRRPDDHPSLSELGL

SEQ ID NO: 12240 - protein, 263 aa, BradyrhizobiumColbertium
MPLVRNADAVLHYDVVGEGEPLLILPGLAMDIGPWRPLASMLVGFKIVLIDNRDAGGSSTTAQQYALSDMSADVRAVLDDLGLEQVSILGHSLGGQIAQEFALRDPNRVRKLILANSWARTDQYLANKFETWRILKRHLPDAHFREVMTFNLSHPDVLASAPLHAITALTNPLFHDQSADAFCRGANAASQADTLDRLTGLVSPTLVISGERDVVLPAPYSDELTNAIPKATRIRLETAGHAAPWEASEIFVNEVRSFLKRPA

SEQ ID NO: 12241 - protein, 208 aa, BradyrhizobiumColbertium
MAGLGVKVALAARSTAKLKQLDDEIGAKVFSADASDRASVEALFRDVDATIGEPDVVVFNASARAPGPVAEIDPVAVEKALAISAYGGFLAVHHAARRMVKHGKGAILLTGASASVKGFPRSSAFAMGKFALRGLAQSAARELGPMGIHVAHFVIDGAVRSASRSDPQDNPDSTLSADAIAQTYIDILRQHRSAWSFEVEVRPWVEKF

SEQ ID NO: 12242 - protein, 183 aa, BradyrhizobiumColbertium
MSRIAIPASVDAAPAASRPFLDAVNKQLGSVPNLFRLVATSPASLEGYLGLFGALGKGQLPAPTRERIALAVAQINGCDYCLSAHTYLGKNLAKLDDAEITANRNGASNDPKADAAVKFAATVTRERGHVNDAALQSVRAAGYDDAQILEIVLHVALNTLTNYVNEVAKTDVDFPVVHARDAA

SEQ ID NO: 12243 - protein, 101 aa, BradyrhizobiumColbertium
MSAKSTISSLIIAGAVSSALASIAMAAPLTKAEEQAAVSAHKVKCYGVALKGQNDCAAGPGTTCQGTSNVDFQGNAWKFVQGGTCESIAVPGGKHGSLKPI

SEQ ID NO: 12244 - protein, 307 aa, BradyrhizobiumColbertium
MTSNNNQNAENVASALRFPNHSIAGQAGTSFKHEHLPAIMADGKPKGFFEVHAENYMGAGGPPHRALEAIRQDNPVSLHGVCMSIGGPQPLDREHLGRFRSLVERYQPALVSEHLAWSTHENTFFNDLLPLPYTNETLSRVCEHIDEVQQAIGRPILLENPSTYVTFRESTMSETDFIRTIARRTGCGLLLDVNNVFVSATNHGFSALDYLSDFPLAKVGEIHLAGHAEQADDEGERLLIDSHDGPVADAVWKLYEIVIQKCGPVPTLIEWDSNIPDWPVLKAEATAAQQILDRYIGFSSLDKSHAA

SEQ ID NO: 12245 - protein, 268 aa, BradyrhizobiumColbertium
MQLSHLPRQDMRQRQTYADAFSPALIDPDHQTPDVVAGPNGKAAVKRYNVYRNNVTVSLIDSLAAIYPAVQRITGIEFFRAMARFHVRATPPTSPLLFEYGRDFPAFIESYEYAQAMPWLADTARIERAWLDAYHAADAVPLAPERLAAVPPERLADLTFVSHPATQVVRSRYAALTIFSANRGTESTGQIDPTQSEDALITRAENDVEVRHLPEGGAVFLTALLAGQSLGHAAAAALEEVPDFDLGASISGVLAAGAFIAAEFGEES

SEQ ID NO: 12246 - protein, 179 aa, BradyrhizobiumColbertium
MTVLDQSAASRGKLRGVADIVDRASMLVQTVAQPSLAQLLLRVAIAVPFWKSGILKWDGFLQLSDTAVTLFSDEFMLHLPGGPYPFPAPTLMAFLSGCGEITFPVLLVLGFGTRFAALGLLFMTVIVELTVPDGWPIHITWAAMALAIMAWGPGRISVDYAIRRFLGLPTTFRRDSRPA

SEQ ID NO: 12247 - protein, 293 aa, BradyrhizobiumColbertium
MTTPTILITGATGRTGRFAVEFLRKDGAHVRALAHHDGPKADQLRALGAEVVIGDLLSLNDVTSALDGIQSAYFCYPIVPRLIDATSFFAVAAAEKGVKAIVNMSQISARRDANSHAAQEHWVAERIFDWSGTPTTHLRPTFFAEWLTIMLDPTVLRSTGAVKMPMGDGRHAPIAAEDQGRLIAAILQNPAPHAGKTYTLHGPVQMNHYEIAAAMGKALGRDLHYEPITFDEFAEGRLASIRANPHVVQHLREVTLDYQNGIFEGEDGIIREVTGVAPMTVETFVEKNRAHFA

SEQ ID NO: 12248 - protein, 167 aa, BradyrhizobiumColbertium
MKGKKTELAPAQCAVARALDVVGDWWSLLIVREALFGRNRFSEFQKNIGLAKNILSVRLKKLVQYDVLVMEPDTEAATSHRYILTERGHRLALVIAALWQWGEENCFQSEGFDLGLADRETGELLAKLELKTLSGRSLDGGRLELAVRTRTDAEKLKVMALKDSAPA

SEQ ID NO: 12249 - protein, 75 aa, BradyrhizobiumColbertium
MLEETSHHIAIGLEYLPAIARRLYHSRELGEPFDFLTWFEFAPEHAASFERLVSRLRESAEWRYVDREVDIRLSR

SEQ ID NO: 12250 - protein, 227 aa, BradyrhizobiumColbertium
MTGDSPIIFAQANGTAVRYVAYEPSAPKSQGILVLKESPIARLEDLKGKRIAVQRGSNCHFLTVAALKRAQLKLSDVKFEYMIAPDGRVALEGRNVDAYAVWDPLMTATIAGGARQLIDGTDLSNNRFYYSATPELGENRALLTALVEEIGAAGQWINNNRREAASILSPATGLSTAIWVQALEHSTFGAKWIEQEPLVEQQRIADSFVEIGLLPKPVRVSDIALLS

SEQ ID NO: 12251 - protein, 294 aa, BradyrhizobiumColbertium
MAATVDRISGGRLDVNVVSGGSPPELAADGVFATHDERYQLTGEFIDIWCRLLAGETVTMKGKHLEVRDARLLFPAVQRPHPRLFNGGSSAASHSFTAEKCDVYMTWGEPPRMAEEKIRDVQRRAAAYGRKLQVGMRLHVVVRETESKAWEAADDLIKYLDDETIARAQAAFAAQDSVGQQRMTSLHGGRRDQLVVSPNLWAGVGLVRGGAGTAIVGDPKTVAARLVEYQQIGVDTFILSGYPHLEEAYRFAELVFPLLPLKPPESQVAIGRDGGNSLREPVGEVIAHVAFPGR

SEQ ID NO: 12252 - protein, 1091 aa, BradyrhizobiumColbertium
MVFARDLRMSGPRYAELQVTSHFSFLRGASSCEELFAQAAIMGIEALGIVDRNSLAGVVRAFEAAKTTGIRLVVGCRLDLADGMSLLVYPTDRPAYARLCRLLSLGKARAGKAKCHIEWPDLAAYAQGLIAVLVPDNADETCAMQLRRLRDVFGDRAYMALTLRRRPNDQLRLWELANMATAARVATVVTNDVLFDQPSRQILQDIVTAIRHNVTIDELGHRRERFADRYLKPPAEMHRLFGRYPEALARTVEIMDRSTFRLDELAYQYPEERSDPSLSPQQTLEKLTWEGAAERYPEGLPSKVRRNLEHELRLIEKLKYAPYFLTVNSIVRFARSKGILCQGRGSAANSSVCYVLGVTSIDPDRNDLLFERFVSEERREPPDIDVDFEHERREEVIQWVYETYGRERAALCSTVIRYRAKGAIRDVGKAMGLPEDLTKTLSSQVWGWSEGVEAKHAESVNLNMGDRRLRLALELAHQLVGTPRHLSQHPGGFVLTRDRLDELVPIEPAAMEDRQVIEWDKDDVDALKMMKVDVLALGMLSCMRRAFDLLAGHKDIRLDLATIPPEDPRTYAMIRRADTLGTFQIESRAQMAMLPRIKPRTFYDLVIEVAIVRPGPIQGDMVHPYLRRREGKEDVVYPKPELEAVLGKTLGVPLFQEQAMRVAIECAGFTAGEADQLRRAMATFKHTGGVSQFGQKLIQGMVDNGYERDFAERTFRQLEGFGSYGFPESHAASFALIAYASSWMKCWHPDVFCCALLNAQPMGFYAPAQIVRDAQAHGVEILPVCVNESRWDCTLEPRDADDGRLAVRLGLRMVKGLGNAEAARLVACRAGLPYASVDDLWRRAAIPAAALVELAEADAFRPWIGLARREALWAIRALRDEPLPLFAAAAAREAAPVPEQDEPVVSLRPMTAGSEVVEDYSHVGLTLRQHPISFLREDLARRRVRTCAEAIASRDRKWVDVAGLVLVRQRPGSAKGVMFMTIEDETGVANVVIWEKIFEKFRRTVLGAGMIGIRGQIQREGEVVHVVARDLFDLSAELASIGARDTGFPLPHGRGDEFHRGSPAPDPREPANLAHRPGHFSDLTVKTRNFR

SEQ ID NO: 12253 - protein, 359 aa, BradyrhizobiumColbertium
MTQIRFCKSSDGVRIAYTQGGQGPAMIEVATWLNHVEYDWKSPIWNARLAELTRNYTLTRYDGRGCGLSEQNPPHLTFDDLVADLEAVVDASGLKRFILLGCCQGAPVAMAYAARHPERVSHLVLYGAYARGKLTHNPLPQDVDEAETMLKLVELGWGRDNPAFRQVFSALLIPDSRPEQYSWFMDMQRMTISPQNVVHLMRTHNRIDVSDMLSDIRSPTLVMHARNDRRVPFADGHTVAHSIPNAEFVPLESNNHLLLEHQPAWRQFLDETARFVRADRRAESGETPFLELTAREREVLDLIARGLGNLQIAKSLTLSEKTVRNHINSIFGKLGTLNRAQAIVRAREAGLGSRGFSRN

SEQ ID NO: 12254 - protein, 268 aa, BradyrhizobiumColbertium
MTVTKTAPAGSASVQGDLWGSRPRDYAEVQEPTFLPLYESVLARPEVAKAGSILDIGCGAGLAAQVFSRAIGRVAGVDATAPFIEIALRRVPGGEFHVVEMEALPYEDDSFDVVTGFNAFQYAASPVNALREARRVVKTNGIIIIAVWGLPETCEAAGHLKALGSLMPPPPHGAPGPFALSDESKLKTLASEAGLTPGVVVDVSCPWIYPDLETALRGMLSAGPAERAVRASSFERARDAVAAAIERYRTASSGYRLNNTFRYLVARS

SEQ ID NO: 12255 - protein, 441 aa, BradyrhizobiumColbertium
MSDIDLPPTHYALSGEVSIAYQVMGNGAIDIIMVPGLFSHVEFMHELPGYTAFLRRLSRFARIVSFDKRGQGLSDRMSGAPSLEQRMDDVRAVMDEIGSRCAIIFGFSEGCPMSILFAATYPDRVSHLILVGGFSRAADRMSDDLWQPRLEQIIKSFGSGAMIKTVIPSQLHSAAAVSQFAKLERLSSSPGALRTLLALNRQIDVSSILPTLQIPTLVVHRKTDAQVPVALGRKLGQKIPGAKYVEYAEGDHCYWLGEVEALYGDIEEFVTGRREAASMDLERVLATVLFTDIVGSTRNAAEMGDQTWRRLLDCHDELAKQMVAKHRGTLIKNTGDGILATFDGPGRAVRCAIAVVSASKRIGLTLRAGLHTGEIEIRGRDVGGIAVHVAARVMANSKADEVLVSRVVTDLVAGAGLKFSDRGSHELKGIPDRWDLFAASI

SEQ ID NO: 12256 - protein, 39 aa, BradyrhizobiumColbertium
MILLRAANLALQGRVEARLWFSIYCFTIASGAPPQKAAK

SEQ ID NO: 12257 - protein, 465 aa, BradyrhizobiumColbertium
MRTNGIGRAMGIIEVKVPDLADPSNLDHCGMAILVSPRVALTCAHVVNAAIPRKPEAEDRPSPDIRITLFFPMVPGGQIRLARVVRWRKMGRYPLDDMALLELDEPAPAAAGVAVLASIAERGRSGILSLFGVRSGYAVGEHVEARFLGQSTAAWRQITVAQGKPLEPGFSGAGIWDEAHQATIGMAVRRQGAGEVAYFLPAEALIEFAGDIPHEVRDLPSNFSSTFTIAATLFFAAVLVHFLADRIRQFPRFLSLGFGNEILAAFWGLHLTAFLMPLMLWYLLSFAKAYREHPWWMRVPQFGFLGTPPRPSSSRFAAVATLVLLVAIPLYLNGHFLRRLHSNEMKVYIEARAQGYDPEQLVAAGESCGKGRAAGYCTHPGAGLYSLVPPGAPGKGGYLENYYQIGDLDRAVPGSVTFFPIVQPLVLWLLTALCVGLSALLVRRVIRPERRLDDVPASPVICNNP

SEQ ID NO: 12258 - protein, 381 aa, BradyrhizobiumColbertium
MRVGVEHAVVRDGLRDKREIETVAPPMPMSLIEPLSCEPAAVEDLLLKSRQAGVAWGLGAMGVDPDKFDGAGVSIAVIDTGIQRSHPAFAHIPQEAILEADFTGKPGGDKGAGKAADGRGHGTHCAATICGGTVDGIRIGVAPKIDRLLIAKAIGGDRGSAALIEALDWAVAEKVDVISMSLGFDFVGYRDALIGKKVHEKTATSMALTAFRDNIRVFDAWMETLRTRRKQGYDPLVIAACGNESGRPGYIVEKASPSEAESVIAVGAIGEDFAVAPFSNIHPKFVGPGVDILSAGIRQNLTVMSGTSMACPHIAGLAALYWQAARTSGSVADSARVLRMMENSAERNFAPFQSQPLADVGMGMPRAPERPQPSVRSRGPS

SEQ ID NO: 12259 - protein, 359 aa, BradyrhizobiumColbertium
MAGPTHLTVEDLDDGDVAEIGRDPRANVSPVMPTKLVRPLDLGDDDADDVWGIAAVGADKCGYTGKGVRIAVLDTGIEEKHPAFRGVHFTTCDFTGTGIDDREGHGTHCAGTIFGREISGKRIGVAPGVETAFIGKVLRDDGSGTSDMIFTGLRWAIEQKCDVISLSLGLDFPGQVDSLVADGWPLDLAASMAIEDYRKHSAMFEALMGLARVKVSFGGSPLIVAASGNESRRNQNPMYRMATSLPGVVSDISVGAVERASSLFRVGYFSNAYPTVVAPGVKIVSAALGGGLKTLSGTSMACPHVAGVAALWAEKLHRDGETVSAEVLFSHITARARRDVFAPKPDEADVGRGLVTAPG

SEQ ID NO: 12260 - protein, 212 aa, BradyrhizobiumColbertium
MSALGREKIIERLRARDLAVAPLLSDQIGAASIDLRMGNVVLIVRARGSSHVDPAAAKSLEQISAHARQTDLAQKHERYELPFRSRFLLHPGSLALVPTLEWVSLPTDLIGAVTARSTWAREGLSIATATLIEPGYQGIVTLELANLGEIPLALYPGLQIAQIAFSHVDGDALRPNKSQFDLSFEPRQGTIANPSEFAFLPDGPRSGPSQVR

SEQ ID NO: 12261 - protein, 428 aa, BradyrhizobiumColbertium
MLLALNETLRHDYGPARSLDYFNECKTRLAAIQQSIKNNPSMRGKDIADNMRSLSEIGSRISLIERSHLGEFSWPFAEGIRDIAETLFAEEQLDGSFVKPIMHTIAEGMGYHIVDEVPVAGSQRLVVVAFPRQFKHHVLLHSLFGHELGHTAFQSTGPGGVLRSQVLSALKDKTPLQDTIQATQWIRSAAGPSSTSYSFSEISLHNWCIEIACDLFGLMLFGPSFAAAHRAILEPLNSSPGDAFVQSFTHPSFPVRRRIISRAMEALGWHAPISAPSDGALHEAETALLNYAIDDADGRWAELFAPDQISEIAARLRNSFGSHTEFIFDRPDRNMLADLVRQLTLCRPPISYEIDERGIASNASVPMKHGLYAGWCFWFGRDRLQADVAASNPLLRKMSFLEINRLCEYALLQQRAIEMTDLAGAEKQ

SEQ ID NO: 12262 - protein, 147 aa, BradyrhizobiumColbertium
MPIMAAHDERDARGPARLIAVTAKQCIEEAKATSTEVPALNNVFRLLEAYRSHRFVGFEFEPRSSRGPEALTLLPSSDRHVLELRDAIGQAIEAVYGSADTDAAIKSVEGVLRSVAYPAMQTSDKEERDRASRFLGAFIDHLYPAAT

SEQ ID NO: 12263 - protein, 170 aa, BradyrhizobiumColbertium
MPISRPAINAFTPKMASAIVGMSVHMLNYLAREGYLLPTYPQSRRRKPARGRPRYYSYRDLVIAKIVQRLLDGGLELSRLKDGIRKLGRHPAWQASNQQKTLRSLATDGHNLYLLDDQGRLTDITRQGQLAFLFVLDVASAQDEVRRKMDKEQLGSFSLVNRPIRFARPT

SEQ ID NO: 12264 - protein, 41 aa, BradyrhizobiumColbertium
MWPGGIKISVFVVPSTSTNWNVPRRSSTPSISGTVARGQQW

SEQ ID NO: 12265 - protein, 63 aa, BradyrhizobiumColbertium
MLDEGQFITDPTRGITVELIFALLLRPARHRSPIGGPVRGHRQPQQFRPLARSTIADLARPFR

SEQ ID NO: 12266 - protein, 42 aa, BradyrhizobiumColbertium
MTADRTTNWGSMPRWSEQQCEDQFDGDAARGIRDELPFVQHD

SEQ ID NO: 12267 - protein, 131 aa, BradyrhizobiumColbertium
MRMELAPFGIRVVVIEPGAIRTEWGETRIAVCWIVRGQVPTRPGPGGTAGFLARADRAGFGSPPGVVADAIVKAAKAKRPRTRYAVGGGAPVILGLRRLLSDRQFDSLMWSQSQAARNDAVANELQAPQHS

SEQ ID NO: 12268 - protein, 42 aa, BradyrhizobiumColbertium
MRQACLRNKLGDNRVQLTTPERVEQVAREKLEAVREALGGRV

SEQ ID NO: 12269 - protein, 186 aa, BradyrhizobiumColbertium
MCEWKGGEAKYFDLFVDGSINRAAAWSYPQLTGNVEVIAGRVAFWKDVTVGWNGPGPAPTPPRIEAKTPNVAKALGASDVIWRPSGLPDFAFPGGAATFEGYLIPSLRLLVDVLATPPEHDRAERIADARARGETVSAWNRAHLDDRYGYIAVWGSATPNAQALEVISQGGVLLALDDESIVLGMT

SEQ ID NO: 12270 - protein, 41 aa, BradyrhizobiumColbertium
MFKAIWNSAELACSDDVIEVEGRLYFPTKSLRHDLLAAAPD

SEQ ID NO: 12271 - protein, 301 aa, BradyrhizobiumColbertium
MDRFDAIRTLLAAVDGGSLSAASRSLGMPLPTVSRKVSELESHLGTQMVVRTSRKLLLTDAGQAFVEASRRILAELDEAERAASGEYQTPRGDLLVTAPIAFGKLHILPVVLEFLRAYPEVNVRLVLADTVVDLIDNHVDVAARLGRLPDSGLIALRVGEVRWITVASPDYLALRGEPAVPMDLANHDCLAFEGLQTLRTWTFAAGPGNGPVAIRPRLGVNTADALIEAAASGLGVARMTSYQAAGALREGRLVEILRAYVGEPMPVHLVHTGPPLLPLKLRAFLDFATPRLRESLRLLPT

SEQ ID NO: 12272 - protein, 183 aa, BradyrhizobiumColbertium
MPRIPTPADVTAAPEAAQPLLNAVNAQLGVVPNMFRLIANSPQTLEGFLGLSGALGKGGLTVATRNRIALAVAEANGCGYCLSAHSYLGKNLAKLDDAEMSANRSGASNDPKADAAVRFAVKLVRERGHVGEADVSAVKAAGYSDGQVLEIIAHVALNTFTNYVNEALKTDIDFPAVEARKAA

SEQ ID NO: 12273 - protein, 283 aa, BradyrhizobiumColbertium
MTTYKFVTVSGRQVFYREAGDPAAQTIVLLHGFPTSSHMFRDLIPLLADRFHVIAPDYIGFGQSDAPSVGDFDYSFDNLTAHVAGLIEQLGLTSYILYMQDYGGPVGFRLFTQGPDKVAGFVIQNTNAYMAGIGEMPAQIFLPLWDKRDANSEAAARGFLAAETTKFQYQVGAKNVDAISPDNWTHDQTLLDRPGHDAAHLNLLENYKTNVALYDSWHAAFRQHQPKTLIVWGKNDPFFIPAGAAAYLTDLPQARLVWLDAGHFVLDENAAEVAAEIKATFAA

SEQ ID NO: 12274 - protein, 287 aa, BradyrhizobiumColbertium
MSKTILITGAASGFGRDTAETLAAAGHIVYASMRDVGGRNAEAAATLRGKGIKVVELDVADDASVERGVAQVLADTGHIDVLVNNAGLASAGVSEAFTADQAKVLFITNVVGVIRTTKAVLPAMRAARDGLIVNIGSILGRVTFPFFGIYGATKFAVEALSDSYRYELSQLGVDVALVQPSAYPTNMYASIQQPADAAVGEAYGEIGAIPGKMFETFMGLFQSQNAPNPHDVAEAIATLVATPRGSRPARTVVGQSFGADAVNDATAPVQHGVVEALGLGSLATIAA

SEQ ID NO: 12275 - protein, 131 aa, BradyrhizobiumColbertium
MTAPLDLVRAFYSAIAGGDVPGIVALLHPDLEWTEAEGFPYYSGTWRQPGDVVEKLLVPLMRDWDDFAAVADDFIVEGDRVVSIGAYSGVAKATGRAMRAAFAHVWRVADGKLKRFDMYTDTLLVDRALKP

SEQ ID NO: 12276 - protein, 114 aa, BradyrhizobiumColbertium
MCEHVVSATLARFGRIDALVNIAGAVPQGDLFHPSDSDWAEGLSLKFDAARRLTLYAWDATYASVTTTRPSGYVARPDYRVDLLRRPNRVTASVGGREIASSDRAILVDERIMR

SEQ ID NO: 12277 - protein, 49 aa, BradyrhizobiumColbertium
MGAPSSDVAFTPAVKAVQERRGSRDLYRPMEERGGFRTAIDERMLEALS

SEQ ID NO: 12278 - protein, 91 aa, BradyrhizobiumColbertium
MDYAQRRRVKICGRARVVEGDVALNALLMPKGYEARAEATILFEIAAWDLNCPQHIPQKFDAEDVAVALGARDARIAELEAELASLKGPTA

SEQ ID NO: 12279 - protein, 148 aa, BradyrhizobiumColbertium
MSRRPPPQFTDATAAEKARLAEDAWNSRDPGRVALAYTEDSRWRNRAEFITGRAEIKAFLRRKWARELDYRLIKEVWTHAGNRIAVRFAYEYCDDSGSWFRAYGNANWEFSADGLMARVLPASTSIRSPRWTAFFGGRSVGGLMIIPV

SEQ ID NO: 12280 - protein, 162 aa, BradyrhizobiumColbertium
MVRQVLSVAQSGELVDGGVWANNPIGVASVEAIGKLNWPADKLKILSIGTINDVKAPPRRKGKLPMVTSMARLFMAGQSHSAIGTAKIVTGDVHQRQAIWRIDHTAALGRYTLDNAGRIAEMKNRGFTEAREQLPILRRHFFAEQAPAFRPFHSQAGERRCR

SEQ ID NO: 12281 - protein, 409 aa, BradyrhizobiumColbertium
MTDVRTADVGIEFLERLLDRTERNPDRSRPASGAPNYDKLLTAQQLSRFHDQMVAAERFGAIEVRWDKRERSHLIERITVCDPELLARHLGRPTAPMTALRVRDELLPVAATGEPWVTTLLDDMTARWARNEAAYRLTAGQTDAAKEFFALLASISREEARGLDARTFSNKATNDTKAFDRHASRLAAVLGVRIGQPGAAADVVWAHIGLERFSHPVNLRGPVAVEGAGERLVDGRAKPFASIHPEMISQLSVLETPTAILTIENYASFNRQVREIEDGSLVVYTGGFPAAGVVDLLAKILTVVPAEVPFLHWGDVDAGGVRIFRYLEENLPRGPRPHLMTKELAEKSGQPADADSSLASVARSDSAIRELADWLAFGSGVRHLEQEALDPESLSITTGLPWSGGRVEG

SEQ ID NO: 12282 - protein, 1166 aa, BradyrhizobiumColbertium
MIELRRIILVDWYLFRAQQVDMRGMTAIIGPNGAGKSAIIDAVQTVLSGASMASIRFNPSAQSNVRSKRTLRDYCLGVVSLDEKGERSEPTRQHAYTYIVLVFEDLDDGSAVSLGVTFSAAASRSDESCEARFIAKGAVTKEDILVSVGDDEVETLHWHAVRNALRARGVEVDDAFSSATDFVAESLRALSPAGFPLDPRRFQKAFRNALLLKPVDNPTDFVRNYVLDVQPLQVDRLRRGIEHWRSLTRRIEELKAQSASLAGILRIVARAIENERVIVVTSWQIARLEWEKFRREARRQEKGLTQLRSAARDAEIEATGAAARHAMLEADHKTVELSIRTSDGEQLAQMYESDRNLTLGQRGNAMLPVKEIEGLVGSIRKAVDLNLLVGRDDLLHALLAAVVVARGRASLSEWDKALPEDWKDSASHLDAALMAIDQDRFEAARKTFSDAHFQARLATQSLQNRIDLIDSNLKRMDQGLSPIGAGTRDLIRQLESHGIEATPLCEVVEIRDDKWRMAAEAVLGRSREALIVEPSRAVRALEIFREGGEHSFRDAEVINTTKTDNTRPAEKGSLAQIISTDNRHARAFLNYRIGHLMLVEAMDRMVAAENAVTPDLMMQSGRTVRRLQKPRYLKLGRATQDQMRQQLQAERQQLLQQLAESAGAVRRSEDEARLFETMFAQFQAIRSANLTCVDCGAALVAFDRKLDEIGKNIEDARRNRDPKLVSELERLGAEVKIASRLKTEKQDASSRAQSARDRAEGAYEDYIQKNRDTACAGRRDRARQMREGFPQSTAMREYRSAVAAMATETIPDRIAGLSADREARSTGRRSSLMREMTNTMNKHCQDFHVVMPFTAEEATLAAVDQWAAADKERLDAHELVQYEEQCRNAATEMTSAFRDDLLHRLDDAFMGIKNTLNELNRHLKDRQFHGRDYYSFKALDAPTHVDLIDLVGESRKPEFNLPLFGDRSEDANTPMMRAVRQIEEILANPEARTEEIEDPRKYFNFELYIQDANGKIRSSLTSRAGTGSGGEGQLPFYIAIGASLAATYQNRRTGESGLSLAIFDEAFNRLDTKAIGQCSEFMRDLGLQVMLATPDEKRHVFMEVVDTVVNVNRLGNQVMIDTEFLTNKAREAIVAADPYRKGFDAFKSDLIAAEKAAAVPQDQAAE

SEQ ID NO: 12283 - protein, 422 aa, BradyrhizobiumColbertium
MTYRFVHAADIHLDSPLRSLALRHSELAELIGNATRRAFVRVIDLCLDEQVDALLIAGDLYDGDQTSMKTARFLAEQLRRLDQAGIRVFIIRGNHDALSKITKELVLPDSVKIFGGRGEAIAIDRAPGRVPVVVHGLSFAQPHAPESLLGRYRPVVDGAVNIGIMHTSLGGAPGHDLYAPCSPADLQASGFHYWALGHVHKRSATEGTCAIVMPGMPQGRDINEAGPKSVTLVTISDDRSIHLEERVTSVAQFERVSVDATGMDDWRELVSAVTRALENQRAAARAEHLVARVRVTGATPLAWRIRRDGDLLKTEADDRASVIGSCWVEQLEIACRPGEQRSETSGDPLRELHRLIEDDVLDSAAFQNELAGIAEEIRAQLPQECRDIFGKDEASFREAVAQLARDGAEGVMARLEAPGEGA

SEQ ID NO: 12284 - protein, 578 aa, BradyrhizobiumColbertium
MAALLRYRPSAVSFIVHATPPAARYITFDIAKRSGGVRTIDAPNDRLKGLQRSLSKLLYECLREIEAKDPRRNKLSHAFRPGASIISNAKTHHRRRYVLNLDLKDFFPAFNFGRVRGFFLKSEHFRLAEPVATLLAQIACKDGKLPQGSPCSPVITELMTHFLDIRLVKLAARHKCTYTRYADDITISTNQREFPSALAELDGAEWKLGEELVSRINDAGFEVNDAKTRMQLRGSRQMVTGLTVNEKANVAQTYYKRVRATAHRFLTTGAYELNGVACNSVPRLEGMINHIYHVRERQIDIAIANEGNKEKQHKLHAERTKMKNEWPSAIRVVYYELIFFKSFINPPRPLIICEGPTDPVYLKSAIRRLAAAHPLLASVVGGKPELRVNFFKYSDQARDFLQLRGGSGDLLRFLISWKDAFNRYEFRPAEHPVIVLIDNDDGAKEIFSYLNNKKNYGLDIAWDKHDLFFHLHGPLYLVKTPALGANLMSCPEDFFEPAVLAEKLDGKSFNKENKINPATEYGKAVFATRVVRPRAGSINFAGFTPLLERIEAVIRDYAARKAAAAAPVPAIAAAAPTP

SEQ ID NO: 12285 - protein, 382 aa, BradyrhizobiumColbertium
MIGQNRLVIAAAGSGKTTYLVEEALKIRDQRVLITTYTESNEAEIRQKFFDVVGHVPSNVVIMTWFSLLITHGVKPFQGAVFEFLVKGMALVQAQSAIRYTNSRGIAVTWPEGDIANHFFDRRGQVFSDKLSKLVIRCNEQSGGAVVDRLSRVFPHVFIDEVQDLAGYDLDIIEALARSPVRLLMVGDPRQVTYLTHNERRFAKYADGGIADFLRSLPKKLKIEIDEVSLNRSHRNSEAICAVSSRLFPGFAATQACECASCRRPLPASAGVFILRIADYDHYLATVRPVQLRDKVTSRGVDPSSQAVNFGESKGRGFDHVVILPTDPMKQWLADPDSKLAAQSRAKFYVALTRARYSVAIAMDWRSASLPAGFSLYQVPAI

SEQ ID NO: 12286 - protein, 544 aa, BradyrhizobiumColbertium
MKIAKVKITNFKCYEETFSLALNDALNVIVGGNESGKTTILEAIHLGLTGMLNGRPLKNDLTSYLFNLAAQQKYVASLKTGSPLPPPAITIELFFSGDSSELAELEGDGNSEKIKASGVIYRVEFDEENYKGPYEALVAAGELTSIPVEYYAATMRSFARKGITSRNIPIKSALIDSSSARLQNGSDVYVSRIIRDVLEETERASISQAHRKLKEAFVEDKNLKLINDRITKAAKISQKSVSISVDLSSQTAWESSLMTYIDFIPFQYIGKGEQCVIKTKLALSTKKNAEATAILLEEPENHLSHARLNELIADLTAQHGEKQIIISTHSSFVANKLGLDHLIVLREGKVVRISELQASDFFKKLAGYDTLRLALAKKAILVEGDSDELVVQRAYMDANGGRLPIQDGIDVISVGTAFLRFLELALALKIPAAVVTDNDGDTAAVQKKYAAFDGQPSIRICFDPDVDTGGLTVKEKPFNYNTLEPKILKANGREALNKMLGTAAKTDDELHLHMRANKTDCALAIFSSKTAITYPDYITRAIAP

SEQ ID NO: 12287 - protein, 220 aa, BradyrhizobiumColbertium
MGRRARAKTDLDLDLADLPPELRWREWMGRVEAVIFASPAPVTREVLSRVVGRDCNLDLIIDDIQDELRGRPYELVSVAGGWQYRTRKNFGDTIRTAIGGGADKSLSQAENLILACIAYYQPITRSELSQFFGKEVSRDTIGHLRGLGFIAAGPRSPQPGAPYTYVTTNGFLSHFGFNTLRDLPDMEALEDAGLLSKEKLLAGDIPIAPGGLVDEDDRLD

SEQ ID NO: 12288 - protein, 279 aa, BradyrhizobiumColbertium
MFSAGAALAAIHPIARSEHPLGSLWRHRLSLSNAAVLARHGGRTEDEAALRDAWYLRRDGDDPGPGGRILKAWRHLGERSAMASKDWTLRLSALFEVRFSDALEDVVAQADKLMTGQGNAVAAAAEIAAASLRFVPQSEPLALWLADMMLAQRLKWPMAVPLIASQIRRGDLRVAVKSNVADEAWPRACAQAYARAAASAADLYVELARRADRLLAAAPKLRGKDADTMVAILIMEDAQPAGAGKTASDRSMRRLFERLVALGAVRELTGRPTFRLYGL

SEQ ID NO: 12289 - protein, 284 aa, BradyrhizobiumColbertium
MFPPDPQVVGLYITACASGKATGDKKPNSVSTIERRLSSLTWNYAQRGQALDRKDRHIATVMAGIRNTHASPPLQKEAILPEDLIAMLETFDRGTLRGLRDRAMLLLGFAGGLRRSEIVGLDVARDQTEDGRGWVEAFDKGVLVTLRGKTGWREVEVGRGSSDATCPVVALQTWLKLARIAHGPLFRRVTGQGKAVGSERLNDQEVARLVKRVALAAGVRGDLSEGEREQKFAGHSLRAGLASSAEVDERYVQKQLGHASAEMTRKYQRRRDRFRVNLTKASGL

SEQ ID NO: 12290 - protein, 64 aa, BradyrhizobiumColbertium
MVSELAFDGFPKFIWSVDMEGEVYEAKTDPMTTGVYHGYRLEEEDDMRDNVKAIWKQRCQPAGR

SEQ ID NO: 12291 - protein, 63 aa, BradyrhizobiumColbertium
MNLIQRKRNIRRASAIVNYGLINACDLSKLAAGNWLFAQPLLFAQRTSRRCTNSVGWYLPTDT

SEQ ID NO: 12292 - protein, 109 aa, BradyrhizobiumColbertium
MLQILRTSNRNIEGSAASLAEAIAEIRDCRPILQSIARHLESVPRGVERTIDALPTNERRRAIEAQRSASAFAAFSTATIDQQDRGGRHDMANVSDARPSRHSHGEAAI

SEQ ID NO: 12293 - protein, 698 aa, BradyrhizobiumColbertium
MNLRIGTILPLIISGLTVIAVASSGLAAYKAFNRRQEAQTFLEVNQVSRMLLRSAGDWAVERGLTNTRLRSPDAASSESLAEIVNARATADQAFRDAEQRLRAFPAMKAAEQSLDEAQAAFQTFESLRARVQDNLARPASGRMPDVVESFMPTITSLIDVAATRLRLTLESLTAPPTSALAQLVGLRHMAAQMAENAGRERGLVGGIIGARSKFTVDNRRIAATARGQIELAWQTIAAVRQRPDLSAEMIQAIDGVEKNYFGGYSSLRDAVFAAGDSGEYKVAASDYFTQATAAVRSILRLADAIGNAADQEAAREAADSTSNLIVDGTILLASIVLTLISFWIAFRRIVRPLSGLTGAMEELARGDFAVILPGLGRKDEIGEMAQAVEAFKIKAESKAREEAEAKIRQDQAVMQQRKDDMIRLADAFESAVGEIVETVSSASTELEAAAGALTATAGHAQELTTMVAEASEEACRNVQSVASATEQLNSSVDEIGRQVRASARLTSDTVNQARVTNDRVSGLSTAAARIGSVVELISTIAGQTNLLALNATIEAARAGEAGRGFAVVASEVKALAEQTAKATDEISQQISSIQDATGEAVRAIQEISGNIEKLSGTSSVIAAAVEQQGAATQEISRNIQEAAEGTHQVSVTISDVRHGASETGSASSQLLAAAQSLSTDSNRLKLEVRKFLETVRAA

SEQ ID NO: 12294 - protein, 84 aa, BradyrhizobiumColbertium
MTFPPQHRTKLHSTNPIERLNGEIKRRIEIISILPGEDAIVRLIDAILLEQNEEWAVQRARYMTLEIIAPLSDDPTVSLPAIAS

SEQ ID NO: 12295 - protein, 542 aa, BradyrhizobiumColbertium
MPTPFRPTKASGNEQNVYWIRKKVPKRYRALVGKTEVWRSLKTTDRRTANARIAVASVELEREWELLALEARRRPKAPKVGLSHQDLFAIQRETHVRIRDAHIAEPGTGFAALRWLALTENDDDPGAEEALDHWAREVLTRELGGSPDEAQVEKLKPLLAEARKGAYGDVFRASKGDYKESAKLGELPKTRTKPKVDIMEAFELYCSQPRIKGGLDGPTAKRWRPVIERFIEWIKHRDLARVTPQDAVRWRDYMISQGIAPKAVRDVWLAAPRSVATHMLNALRLEINPFAGIKVEGVKAWKEDDERGFDPEQALKILSATVATPSHLMSAEMRAARRWVPWICAYTGARVNEITSLLPSDVQQILGHWCFVLRPEITKGKRLRRVPVHKHLLDQKFMVYVEARRKLGKPLFYDPVRARGGKGANPQWHKVAERLGEWVRDSLKITDVQPNHGWRHLWREIVRGTKMKPELCDYMCGHESKSGTGARYGKRKVPVLAKELALFPRFKVPALNRPPTPLKRTRRSPQQIAAYKAERAARRTAS

SEQ ID NO: 12296 - protein, 51 aa, BradyrhizobiumColbertium
MNHLCTDVVYRRSSGKTRKVLSDQKDSRFTGVFGTAGGEGGTLPRACENPR

SEQ ID NO: 12297 - protein, 425 aa, BradyrhizobiumColbertium
MVHALGTPKRHPQSGIYLFRKRVPERLKDFIGKSEIKFSLQTRDPVVARIRNLEEMARLARAWSEIGGSVVDGTRHAAICVDCKTAGSGAAAAAALAAGALPPPSAPAATATANTPVALRPIFESYAKEAELAPSTVKRWSPVLDRLIGHLGHDDAAAITRADIVAWKDALLDGDMSNVTVRDVYVAAVKATLQYAVDQGRLAENPAAGVKVRVREAPVERDKGFDGKEAETILSATLRKPSDKISVEMAAARRWVPWICAYTGARVNEITPLTRRDFVLRDGIWMIRIRAENNKGRKFREVPLHSHLIEQGLLDYVKTRGSRPLFYDPRRSRGGKDSNPHHKKVGERLAEWVRSLGIDDRVAPNHGWRHRFSSIARVVAMPEDVRNIVQGHAGTKVADRYGETWPLVALREIEKLPRYAVERET

SEQ ID NO: 12298 - protein, 132 aa, BradyrhizobiumColbertium
MHYSIAKKKHLPPFLSKAHYGISYNYLCGSLVCRAYPNHFVGDLEIVIDARTKELQTKNKFDGYLETRLVGHCAHEHSLSITHGESHLYPGLQAVDFLSWSLFRKYEHGDSQFADLMTKNLAHRDDWQSTKK

SEQ ID NO: 12299 - protein, 520 aa, BradyrhizobiumColbertium
MDAAAGAGSRRQDKREEKKRLGRDKARAEAAWEKYDREVEARWAQLRQGRIRGLSLVQIQALAGDIYRRWLNGYHPARFHAGISAGVALGLMEEIDGEQPRQVTKPIDDDAALESLHGYHVDAVLAARGLIVNSHARWHLIQAAQRAAKHACRAALKKINGDLRPDPDENLYPAWPDPETTTLSGLCASWVRARPTAKPDTHAAFKACIDKFIAFVGHDEVAKVSADDIRGWIRYLKEKQGLSDVRIKDGYFAAIKTVFNSARKHGLISTNPCDTVNPDGEPLPRTREKDLRDSEIYAILKASLTPNAQVCEDVANTRRWVPWLIAYSGARVAEITRLESKHIIFEAGVWGIDIQRSKNGRPRIVPVHRHLIEQGFLEFVRSREGLPLFFGKEKLKEAKLTIHKTRAEGLAEWAREVAGIEPGTVAPNHGWRHRFKTECRRVGMDREVRLYIQGHAFKMEGEKYGFFPIGITAAWMELFPSYVVSGKSLHVERPAGNDVIARAIALLQRERTPLDKPKAA

SEQ ID NO: 12300 - protein, 558 aa, BradyrhizobiumColbertium
MDLVYLDPPFNSNATYSLLFKEPTGEAAKAQAEAFRDTWEWSEAAAESYDDVMRASGDIALALKGMKSYIGQNAVMAYLAMMAARLLELRDVLKDTGSLYLHCDPTASHYLKILLDAIFGHENFRNEIVWKRTGSHNSAKRFGPVHDVIFYYTKSAAATWNTLRQDYTDEYKKKFGKVDAATGEAFQDVALTGPGTRTGPSGTAWRGFNPTEQGRHWQPASYLYSKYEQVTGGNLADFDFLDRLDELDRVGLIYWPKNDGFPRYKQFLSDAPGVPLKDVWTDIDAINSQAQERLGYPTQKPLSLLERIIRASSNPGDVVLDPFCGCGATVEAAERLGRQWIGIDVTHYAITLIEARLRAKHAEAKFKVFGRPEDLAGARDLARRDKHQFQWWAAWRVGAQTYREEKMGADRGIDGNILFKNGPYGDGRIIISVKGGENVGVQMVRDLRGVIEREEAEMGIFVCLAEPTAAMLKEARDSGYVAKSVHGRLPRIQILTVENMLAGHMPKMPPLPVPERKLTPSLKRKDKDQLELLLPFAGEKIVPAKGVIVDPRFVGLAG

SEQ ID NO: 12301 - protein, 202 aa, BradyrhizobiumColbertium
MNYRLTLSPEAAAAKAGFSKASAYRIEGDLRLPSQKKAPRGRRRSDPLAPYWDAEIIPILKAAPGICVIGVLDELRRRHPDLNPNIRRTLERRRVGSIELDEIWGYVGKKQKPSSVTRSATRAISTRSLRLAPRQSCHSSYRTGKRDSENTDLFTQDLRERVLGEPEISTDGFLPYQNAIRDAFRGKAHHGVIVKTYSVTCL

SEQ ID NO: 12302 - protein, 139 aa, BradyrhizobiumColbertium
MNFQVTVLKILVAYPDGFAVIADLKRDMAILATSGRDWADRTRRLAARVPGLDIWSQGLVERISGGWRLTSKGREVLEFMEARPSPETIQVAAANETTLPVAEQTPVPLLRQPSDRAKRRRERCERRREARERARANAS

SEQ ID NO: 12303 - protein, 66 aa, BradyrhizobiumColbertium
MFDTATSALLRAVLDEVCESVSAREIGARTQVASKILEAATRGEVSPEQLRQLGREALSHAPTMWR

SEQ ID NO: 12304 - protein, 194 aa, BradyrhizobiumColbertium
MGRLIAFIMARETGRQNLRVMDALSIEQGDRILDVGCGHGRSLTELASRAATGRIVGVGPSELMGEIAARRNCAHVEADRVSVVLASVESLPFPDDSFDKVLCVHVRYFWKDLDRCLRETARVLKPGGCLGLSFRTNADLAAVASFPPEIYRFPALAEVAAALERADLDLAAASDSTNEPVLLLAEKRRVQVAK

SEQ ID NO: 12305 - protein, 114 aa, BradyrhizobiumColbertium
MEHVQALRDAFWQALQDRFGDRVVLNGHAHRLANTLNVSFVGKIGADILAQLGDVAASTGSACHSGRIELSPVLAAMGVPERIGRGAIRFSLGRTTTSDEIDHVVTRLAEIVSA

SEQ ID NO: 12306 - protein, 186 aa, BradyrhizobiumColbertium
MFTSGGSEANNLAIKGTFFAPNRQGAHIVTSAIEHPAVLAPCRFLERFGASTTHVPVDRTGRVDPDNVRRAITPQTTLISIMHANNEIGTIQPIQEIGEIAREHGIPFHTDAAQSVGKISTKVTELGVDLLSIAGHKLYAPKGVGALYVRGGLELEPLIHGAGHELGRRAGTESALLAVGLGAAAA

SEQ ID NO: 12307 - protein, 117 aa, BradyrhizobiumColbertium
MQILLILNDAPYGTERTYNGLRLALALAKSDPEITVTVFLMADAVVAAKSGQKTPDGYYNVERMLKGVLAGKGQVLLCGTCMDARGLTDAEILSGMRRSTMAELATATVSADKVLVF

SEQ ID NO: 12308 - protein, 72 aa, BradyrhizobiumColbertium
MIFGPLFMILFLAVLVALAVSLARWLGGPWPGIYPPHQLPPARTPLDILKERFARGEIDKAEFEDRRRVLGE

SEQ ID NO: 12309 - protein, 429 aa, BradyrhizobiumColbertium
MSEAASAPQGSPSVRLGLRENWPEFALLVLINAFVGGMVGIERTVVPLIGAEEFKMGSTTLVVSFIVSFGVVKACANLVSGQLADAWGRKSVLVLGWLVGLPVPFMIIWAPSWEWVIAANALLGINQGLAWSMTVIMKIDLVGPKSRGLAVGLNEFAGYLAVGVTAYLTGYLASEYGLRPAPIYLGVAYAVLGAALSILLVRDTREHVRLETAAHARQASPLSFREIFVLTSFRDRNLFAASQAGLVNNLNDGMSWGIFPLFFASFGLAVDRIGILKAVYPATWGILQVATGPLSDRWGRKGLIVGGMWVQAAGLFLTGATSHFEWWLAGSLLLGLGTAMVYPSLIAAVSDASHPSWRARSLSVYRFWRDLGYAIGALSAGIIADLFGMSWAIGAIAALTFISGAVVAVFMRERAGSVDLAQKAGRPAE

SEQ ID NO: 12310 - protein, 246 aa, BradyrhizobiumColbertium
MILRQFLHSDPVGISYLFGCGGKATCAVVDPVGDIQPYLQAADNAGMRIHFVIDTHVHADHLSAGRALADAAGASYVLSSNASVSFPFKAVGDGDALPLGNITATVLHTPGHTPEHICILVTDRTRADEPWFVLTGHTLMVGDLGRTELAASAEEGAKQLFRSVSKLKDLPDYVEVLPGAYAGSVCGRRLSGKPWSTIGFEKRHNQAFMIEDEVEFVRFMVAEIPPAPPEAAKIRAANSGITAAAA

SEQ ID NO: 12311 - protein, 222 aa, BradyrhizobiumColbertium
MSSTGPKHAIYENLAEVAQALGHAHRLELLEHLAQGVRSVEELSARAHLTFANTSRHLQILRRARLVETERRGKHVLYRLAGEAEVVALTKALGRVGERNIAEIGRVVTDYFHARDALEPVSRDDLVARLHDDLVTVLDVRPGDEFALGHLPGALNIPLAELERRLGELPKGREVIAYCRGPYCVLSFEAVAALRTRGYCVRRLEDGYPEWKAAGLPVESLA

SEQ ID NO: 12312 - protein, 248 aa, BradyrhizobiumColbertium
MFRPEALLREARRQRQLPLVAVPEICVLDPDGDVVRHLKRNGAGRIHEGWACYHTELLAFDLDGIGEVGMVGCAVGAPFAVLVAEQLFASGCRLLVSVTSAGQITPTGPTPYFVLIDRALRDEGTSYHYLPGSIFAEAPDAPLLARVEQAGRALPGITLHRGATWTTDAPYRETEAAISRARDLGTLAVEMEAAALYAFSAASGRPIVCFAHVTNAMAQTEGDFEKGEADGAEATLAVVAAAARGWRK

SEQ ID NO: 12313 - protein, 69 aa, BradyrhizobiumColbertium
MTLSDRVKSTMEVVLEETCRELPNGGDHEIRKVIAEQLLAAAEAGHTTLDELRAAALRAFPSAAKITRQ

SEQ ID NO: 12314 - protein, 47 aa, BradyrhizobiumColbertium
MRNEPEDAVLQDGEFVIENVKVQTLQIGDVAGLMKGEDLSPCISNDF

SEQ ID NO: 12315 - protein, 43 aa, BradyrhizobiumColbertium
MIKELRSKGLLEIERGEISILDLEGLRQVADFNPLYLHLDPAL

SEQ ID NO: 12316 - protein, 84 aa, BradyrhizobiumColbertium
MLGSDNRPLLACIMLIACDLLDSKALPSERPDYVIRISAFRCGKIPQGGPFHSADDAVNAIEHGETASGYAASNSPDESGTRGI

SEQ ID NO: 12317 - protein, 197 aa, BradyrhizobiumColbertium
MSEREGVVVGISGASGAAIGMRIVERLADNTRCAVHLVVSPAAERTLAEEVGTEALAHLRSLAFRCYPHDEIGASIASGSCPVRGMIVAPCSIRTLSAIACGQLDNLLVRAADVQLKERRRLVLLVRESPLHLGHLRAMTQVTEIGAIVAPPLPAFYLKPASLAEAVDQIACRAINLLDLPGVSAPAQAWTGQAARP

SEQ ID NO: 12318 - protein, 521 aa, BradyrhizobiumColbertium
MKIIPGICRSFGGVHLQRDLPRFRDLSDFLRFIEARGQLRRIREKISVVHEITEIHRRVLSANGPALLFEQPVKADGTPSDIPLITNLFGTVERVAWGMGIAPHRLNELGALMAELRAPRPPRGLRDAFDKIPLARAALATRPRTRGAAAVQERAAMGADIDLGKLPVQICWPGEPAPLITWPLVITVPPNSVAADQEENVGVYRMQVLGRDRAIIRWLAHRGGARHHQQWKAAGRDMPVAVVIGADPATILAAVLPLPETMSELRFAGILRGERPRLTPCLTVPIAVPAAAEIVIEGFVSATETAPEGPYGDHTGYYNSVEAFPVMRVTALTTRQQPLYLSTFTGRPPDEPSRIGEALNQLFVPLVRQQFPEIIDCYLPPEACSYRIAIASIKKRYPGQARRLMLGLWSMLPQFSYTKLLIMVDDDIDIRDWRAVMWAVSTRSDSSHDLVTISDTPIDYLDFASPKPGLGGKLGIDATTKIPPETDRLWGEPLAMDPSVIARIDAMWEHLGLAAPAREPA

SEQ ID NO: 12319 - protein, 157 aa, BradyrhizobiumColbertium
MRPLPLKPLQLALAGFLQRILRRNPAMFDRLGAHTHARFGIKPTDLPFAFVVEARPGGLTVVRDLPRDLDARISATLANLLALLEGRVDGDALMFSRGLVIEGDVEAVLALRNAIDDAQLDLVTELSALFGPLGAPARRALEMARGGLLRGSRRPVR

SEQ ID NO: 12320 - protein, 325 aa, BradyrhizobiumColbertium
MELICPAGTPAALKSAIEAGADAVYCGFNDETNARNFPGLNFSRDELRKGIALAHGSGARILVAINTFPRAGSVELWHGAVDDAVSAGADALILADIGLMDYTARRHPNQRLHVSVQAAAANPDAIAYYVETFGARRVVLPRVLSVPEIGEITRASPCETEVFVFGGLCVMAEGRCSLSSYATGNSPNMQGVCSPPSHVAYEQGPQGTTSRLGGFTINRFEPTEPIGYPTLCKGRFTTEHGTGYIFEDPVSLDATALLKGLRDAGVTALKIEGRQRGRAYVESVVRHFRAALEALESGREAEIAGLKPFTEGQASTVGAYRKTWR

SEQ ID NO: 12321 - protein, 307 aa, BradyrhizobiumColbertium
MQLSLGPVLYNWAPNRWRDFYFRIADEAPVDVVSVGEIVCSKRAPFFDDHLPAVIGRLRRAGKQVLLGSLILVSQRRERRQTEELAGTEEGLVEVNDLTCLKALGGRAHAIGPFVNIYNEATASFHAAQGATRICLPSELPLPSIGTIAAALPDVAIEVFAFGRAPLAISARCYHARMHKLAKDNCRFVCERDPDGLALKTLEQQDFLTVNGVQTLSYTCTNLLGDIGALRTAAVSSLRLSPQHCDMIAVARTFRDVVEGRDDAERGTRRLAELYPNVPFSNGFLHGAAGVSYQPHSASEARFVTGT

SEQ ID NO: 12322 - protein, 54 aa, BradyrhizobiumColbertium
MAMIWTRTSVSGAAISTAGNPKPATISASAANSHAVATAKQLMVYSETLPPIII

SEQ ID NO: 12323 - protein, 99 aa, BradyrhizobiumColbertium
MFMLSPDVDPRRSRATLYASAGTLGLALAGGLAAIAVQARLEGVLSLAGVSCVATVALYGRDVVALYRNRKRRTLELNTTMALYALGGLAGSVPDLRLH

SEQ ID NO: 12324 - protein, 110 aa, BradyrhizobiumColbertium
MLAKLYKIVAFLTWLETYGPVTGRVPTQRVQDLVVGARAARYFVGYFVWVWVATVLLLAGRTQPYRIAPLGMMAATMGIVHELLRVRRLADVTKSVRLPQGARLPRLLHS

SEQ ID NO: 12325 - protein, 45 aa, BradyrhizobiumColbertium
MVRILAAAEQLGPGETLTALIGREPVFLFPQLEKRGYNWLGRLPA

SEQ ID NO: 12326 - protein, 49 aa, BradyrhizobiumColbertium
MMTDEIKSRHRARTLIALEGGMISPGESGAARIGILVASDRASRGEYED

SEQ ID NO: 12327 - protein, 207 aa, BradyrhizobiumColbertium
MRAIAIDANEQGGSQSLLDEMHQLRARVFAGRLGWQVNIEHGRERDEYDALDPTYILALTDRGQVAGCARLLPTTGPTMLARTFPQLLAGGTLAASPRTVESSRFCVDTSGEGRGSRFLHEATLTMFAGIIEWSMSNGYDEIATATDVRFERILQRAGWPMTRLGGVELIGETMSVAGTLPANQVSFDRVYPPSYRSDLTRVRRVAA

SEQ ID NO: 12328 - protein, 344 aa, BradyrhizobiumColbertium
MIEPLQHALWLGRLLAAALLRERGKSRAHLPCLHDGLKAIPRERRRPRDAAGRLGVQLEAIAAAADAGLRDHDRWLTARTLLARKLAGRRSTSRLPALLDYVLTRPIASAGMIAAELKITPRAAQDLVGELGLRPVPRLYRYIGPGSEAMALLHIPLNQIEEQHILELVATRAPETNIIEYKRETYGNSLRDDLEFLADVSSLANTSGGDLIIGIAATQGIPEAPVPFTGDVDGEINRLESRARAGLQPRISLESRAVPVQGGHILVLRVARSYNPPHRIIRENSNRFWARSTAGKYEPNVDQLRELFTLAPRIADQTREFRTNRLIRIASGDAPVTLMLSLSI

SEQ ID NO: 12329 - protein, 153 aa, BradyrhizobiumColbertium
MRWLEPRRYAVRLHIADQLRNRRPGPLQVICFDRGEDYLFPLIVQYAVPLWSPTFTIDQRQDGPAGAEQLDQPVCCRLTKIERSREFRHISGRCAVRIALQKAADRIPPSARFIPKYVLNLVWKWIAHSRLARKTIANLILTLSDKVQVGLSN

SEQ ID NO: 12330 - protein, 405 aa, BradyrhizobiumColbertium
MARLEDIDLQQRARRRGEQKIVKATTPVPGTFGASRPLEMVQIDHTKADVFVVDEETRQPVGRPWLTLAMDVCSRMVTGFYLTMDAPSRLSTSLCLLHSVFDKSAWLREREITEPWPVAGLPDTVHVDNGADFRSRAFKRGCQDAGIAIEWRPPGEPRFGGHIERLIGTQMGRLHLLPGTTFSNEQDLGDYDSKRHAALTLHELERYIALDIVGSYHHSIHGGLGRPPIAVWRDHEGEIPLRLPQDRMRFWLTFLPEQERTLRPTGVHLFGLRYWSAALSADVGRSDRRLLVKFDPRDMARIFVRRPSGNFVEARYADLTLPSITLHEAVTARRTLLAKGRREVDTRAIVRTAIAQRELLETATRKTAAARRGTTSSKSKVDDRGWGSLRGVDSSKPVPFVEDAD

SEQ ID NO: 12331 - protein, 293 aa, BradyrhizobiumColbertium
MNDEISHLTAGAVALLSESDERRIRAIRSRRWVLYPRAKQALDRLSALLDHPRGTRMPSVAIYGDSGMGKTMIMKRFRDKHPPSFNPLTGTLKTPVLAMEMTSRPGERRFYAELLTLLGAPQRPRADIAQMEQAALRIMEAIGVQVLVIDEVHNILAGTYREQRIVLNTLRFLSNRLQISLVCFGVNEAREAIGGDVQLARRFEQFTLSRWAANEQFENLVASILRNTPLRRPSVLTAKSLRRMLQITEGITANIFHMINVLAIEAVESGREHITDEMVENWEPEFDAEAAFA

SEQ ID NO: 12332 - protein, 105 aa, BradyrhizobiumColbertium
MLLILGNDMIEIGDDCAENSEPPKVFFTRRWPRYPAHQQKPGDFRWRSPGVNAAFGFIVEQVLTTKSRNAISLEKGGEFALAGTPGLVSTQRARDAPSEQLASQD

SEQ ID NO: 12333 - protein, 107 aa, BradyrhizobiumColbertium
MRRITWPPPREKDLWRFRVLGAIIPDLDHIIAEYQEHLPTPAKPILPLHLRPALLAGVAIIERAGPEMLRMLRSHMMGDNRVRFTDAAENIIARARRSRASSQMQLI

SEQ ID NO: 12334 - protein, 51 aa, BradyrhizobiumColbertium
MTAGPHVKTIDGFDDPAPEQLHIRTFNIRGAIAIRHRKKAVEVDLKPLGLP

SEQ ID NO: 12335 - protein, 101 aa, BradyrhizobiumColbertium
MTDIADQAFTFDLAMKLAQGHILHDEERSAFIFPGNTTVTKDRGRLSCTCDDFLNRIACRHIAAVAIKFDMNGAGKAADLAKVHLDGLQQRLAAFWQAVPY

SEQ ID NO: 12336 - protein, 137 aa, BradyrhizobiumColbertium
MKAGWTVLPNVIFERQRALGLDAIDINIILHIASYWWTAEGKPFPSKRTIAAAMDIEPRTVQRRIAAMEAARLIRREERRSSANGSQTNVYHLDGLIAAAKPYALEKIQERDEKIQAKAARASRKGKPKLSVVKGGA

SEQ ID NO: 12337 - protein, 303 aa, BradyrhizobiumColbertium
MKANKANAQVLFPFLIADDFLGAVDKLECRYVIDFQPRDLLKAKAFKQPFEHLEQTVLPARKEAAKKERARNKEALDDDPEAKVNKHHENFLKRWWLMSYPREDLMRTLAPLSRYIVCARVTHRPIFEFVSTAIHPNDALSVFALEDDYSFGILQSGIHWEWFINRCSTLKADFRYTSDTVFDSFPWPQQPTTEAVRLVAKRAVEVRRLRSHLRAKHELSLRELYRAIEGPGEHALKKAHKALDDAVRDAYGMSKKADVLEALLELNEAVASAEADGKPVVGPGIPPSAKKLKDLVTTDKLTV

SEQ ID NO: 12338 - protein, 430 aa, BradyrhizobiumColbertium
MANVVVVGAQWGDEGKGKIVDWLSEQADIVVRFQGGHNAGHTLVINGKTYKLALLPSGVLRDQKLSVIGNGVVFDPTAFLDEVTKLRAQGVAVSPDNLRVAENVTLILPLHRELDAHRESASAATAIGTTRRGIGPAYEDKVGRRAIRLMDLADLDTLPHKIDRLLAHHNALRRGLNLPEFDGKEILKELTALAPQLLPYAETVWRLLDIKRREGKRMLFEGAQGALLDVDHGTYPYVTSSNTVAAQAATGAGLGPGAVGYVLGLCKAYTTRVGQGPFPTEQDNEIGRKIGERGREFGTNTGRPRRCGWFDAVLVRQAVRTCGINGLALTKLDILDGFDTIEVCTGYKLDGKEIDHFPAGEGAQSRVEPIYETIEGWKEPTASARSWADLPAQAIKYVRRIEELVGCPVALLSTSPEREDTILVQNPFEA

SEQ ID NO: 12339 - protein, 310 aa, BradyrhizobiumColbertium
MSATGQSTGSESSGHHWIANQPYLLLSITALCWAGNAIVGRLAAGHIPPVTLSFLRWFFAFLLVLPFAWKHLVQDWPAIRGKLGLMVTLSITGIGAFNTLQYWALEHTQALNTLLLQSAAPLLVALWSLAILGIRLTAAQAFGVLLSMCGVLTILLHGDFTTLSNIEFNKGDLIFIVALVIFALYSVLTLKRPPMHGLSFLAFTFGVGAACLIPLEIWELSARPVMKLDGPNLLTLFYVAVFPSALAYLCFNRGVRLIGANRAAPFFHVVPVFGSVMAMVFLGEHPQIFHFVGFALVLAGVFVASRKQTT

SEQ ID NO: 12340 - protein, 129 aa, BradyrhizobiumColbertium
MLNIEGLERLDPSAPVVMLNLMRFHARSRDGNGSGWDAYLRYSAITVPMIRARGGTLLWTGEAKTVALGPHAGNAWDFVALVHYPSVSAFLDMMTSEAYEREADPHRVNGCAEHVIIATSEAYSKFKVK

SEQ ID NO: 12341 - protein, 324 aa, BradyrhizobiumColbertium
MSRRRSGASSHPTPMTTASPAPPASNPANWLNNQPYLLLSLTSLFWAGNIVLARHVGAHVPPLTVTTIRWYGVFLILLPFAWQHLKRDWPALRKSLPLMLFLSLVGFAFNNAISYWAMQYTEALNALLIQSAGPLFVALWSLVLFGVRLTGAQLGGIAISLFGVLIIILRGDLAALASISFNRGDIMFASSLVAFGIYSAFIPRRPKIHQLSFLSFTTCCGATMLLPTAIWETASGHVLHFDGKTLATLGYILIFPSTLAYLFFNRGVALIGPNRAAPFFHLVPVFGSAMAILLLGEKLQPFHLIGYALVLAGVVLASRQGSAR

SEQ ID NO: 12342 - protein, 325 aa, BradyrhizobiumColbertium
MISTLIRNLRTVGVAALCLAAASTAQADNYPSRNITLVLPFAAGSGTDTTTRLISQHLSQALGVGIVIENKAGANGMLAATYVAKAAPDGYTLLVTTNTTHSANPYLLKSLTYDPVKDFTPIARTGDLPFMLVINPEVPAKTVGELVAYGKANPGKLSYASGSSSAIVSGATFAHNAGLDLLHVPYKSSPPALNDVMGGRVSMMFVDILTGLPHVNGNALRALAVTTKDRSPLAPHLPSMQEAGVPDFDISSWQGYFGPAGMPKEIVTRLNTEIRKIIENPEIKAKLATLGMDAFSGTPEQLEAFVKDQLVLWEKLITNAKIEKQ

SEQ ID NO: 12343 - protein, 561 aa, BradyrhizobiumColbertium
MKLSNLKIAPKLGILVGVTLFGLCVSGVLAGYLMKQEMVNARIDQAKSIVDMGRNYAMALKKRVDAGELTKDAALADLRRYGNAMTYDNGSGYLFGTSYDGITQLAPDPKQIGMNRMDVVTNGRKLSMELMNGVKANGSILLYYDYVKPGQKTLIRKIGYAVAVPGFDMYIGTGAYLDDIDAKMGPVYWLLGFAMLGIMIVAGSVAWLLGRSISRPLAMLGARMKDLADGKLDGDIPGVGRGDEVGAMAATVQIFKDNAVRIRDLEKTEADAQERAAAERRKAMEEIANDFERSVNGIVRSVSSAAAGMQTTAQSMTATASDASSRAATVGAASQKASGNVGTVAAAAEELSSSVAEISRQVTRSTEVASRAVNDAERTNATVQELSTGAEKIGEVVKLIHSIAAQTNLLALNATIEAARAGESGRGFAVVASEVKALANQTAKTTEEISAQVAAMQTSTSDAVAAIGGITQTIAEMSEITAGISASIEQQGEATREIARNIQSVAAGSSEINAHIGSVTSAAEATGSAASDVLSNARELDNQSGALRSAVDNFLAKVRAA

SEQ ID NO: 12344 - protein, 347 aa, BradyrhizobiumColbertium
MPKYRVVTPKGASFTVAGSDYSYEREALDPIDAEIVEAPADEAGFIAAAKNADAIYAKGIPITKSIIDALESCKVITLGSVGVDSVDVKAATARGIPVTNIPDTFIEEVADHAMMLLLAGFRRLVEQDRMVRDGRWAEGRPALLKIPRLMGQTLGFISFGRVARAVAKRAAPFGLRMMAYDPFIQETLMYDHGVIPATLNEVLSQSDFVSMHAPARPEVHHMLTEKHFRQMKKGSIFINTGRGATVDEESLIKALQEGWIAHAALDVLEKEPPSHNNPLLGMENVTLTAHVASASARFDEARKRRVGYELSLVLQGMWPVSCVNPSVLQNTALRRWQPVSMDRGPNS

SEQ ID NO: 12345 - protein, 449 aa, BradyrhizobiumColbertium
MRNDITRRDALALGLSAATLAATGAAAQPAQSTIKAADVAAPKREIEKGATLRMLRPVRFVQADEDVFRANAAKFTKETGVEVKVDFVGWEDINQQTAVTANSGAGPDIIIGFSDAPHIYIDKLIELTDVADYVGKKYGGWLPLAQRYGKKNKSNAWIGLPFGATAGPLIYRKSILQSVGFDKVPEDHAGILDLCQKLHKAGKPAGFALGNAKGDGNGFANWALWSHNGSLLDEEGNVVINSKETIAALNWVKKLYPTFIAGTPSWNDVSNNRAYSSQEISLTANGVSLYFSLKNDPATKAIADDSEHQLLPKGLAKISPMAGLTLNAMVFKHSQYPNAAKAFLQYMLEKDQYEPWLNANSGYWSQPLAAYAEAAVWSQDPKVKLFKDTMNSPYYDGYKGPISTATGAVSADYVLIQMFSAVATGTATPEAAAAEAEQRCKRYFRRQNR

SEQ ID NO: 12346 - protein, 299 aa, BradyrhizobiumColbertium
MRLFDYKPFLIVMCLAPAIGLLTVFLTYPLGLGIWLAFTDTTIGRSGIYVGIENFQYLLTDSLWWNAVFYSVLYTAVATFGKFALGFWLALLLNNHFPFKSILRAIILLPWIVPTVLSALAFWWIYDPQFSIISYLLVDVLHWRDSNVDFLGSPWPARFSLIAANIWRGIPFVAISLLAGLQTISPSLYEAAMLDGASAWQRFRYITFPMMMPILAIVMTFSIIFTFTDFQLVYAITRGGPGNSTHLLATLAFQRGIAGGELGEGAAIAVSMIPFLVFATLFSYFGLARRKWQQGESND

SEQ ID NO: 12347 - protein, 299 aa, BradyrhizobiumColbertium
MTDSAVQPAVADAKAAPDTMAWDSGLRRLMMIYLPLGCFVLILLFPFYWMAITSFKPNAELMNYKDHNPFWISSPTLAHIKHLLFNTAYPHWLWTTMLVAIGSTTLSLVASTLAAYAIERLRFRGSPYVGLGIYLAYLVPPSILFIPLATVVVQFGLFDSPMALILVYPTFLVPFCTWLLIGYFKSIPYELEECALVDGATRLQILRRITLPLAVPGLISAGIFSFTLSWNEFIYALAFIQSGANKTVPVAILTELVTGDVYQWGALMAGSLLGSLPVAIFYSLFVDYYVSSLTGAVKE

SEQ ID NO: 12348 - protein, 451 aa, BradyrhizobiumColbertium
MRATFLSTVATIILTASSALAQSEGEFPAKLAGHVVMPAETFIDAPADAPADLKSAGKYTSGKRVEALGTVMGKSYERPTGVSLPFKGQPLQGHSGIKTMPDGTFWVITDNGMGARANSPDSMLYLNRYKMDWASGKIERLETIFLHDPDKKVPFRILHEDTQKRYLTGSDFDTEGFQILGDTFWIGDEFGPYILKADKTGKILGVFDTVADGKPVRSPDNWAVGTPAAPGATYTNVNLRRSKGYEGFASSKDGKFLYGLLEGPLWDGDKKDWEKVDGREAARILEFDVAAQKFTGRHWQYVFEQNGNAIGDFNMIDQASGLIIERDNGEGTSDKACPQGKRGENCFPDLAKFKRIYKIELTDANIGKPVRKIGYIDLMKIKDPDKKARKPLNDGVYTFPFFTIENVDRVDGTHIIVGNDNNLPFSSSRDPNKADDNEFVLLEVADFLKAK

SEQ ID NO: 12349 - protein, 276 aa, BradyrhizobiumColbertium
MAASAFVLHEPLGEREGTRWGGSAVVIVVLHVAAALLAMSWLKSQPEQGVSLPAIMIDMSPVTSAPQPTLDDVAPGPVMQEADASPPEAVKQQAVEETIAPTPPQEAPEVVAPPEQKLEPTPAKPEPARIVPVEKPALEKPKVIRREAKKPSNATPAPRTSAPPRAEREAPMASAMSAGATASAIASYNQRVRAHLMRFHQYPSAGGGQRGVARLSFTISRSGQVTSSRLGGSSGVAAFDAQAMSMLRHAAPFPPFPDEIRNGSMSFAIPVEFTVR

SEQ ID NO: 12350 - protein, 146 aa, BradyrhizobiumColbertium
MAVKLGASKLGSRGDRSDLDLSHEINVTPFIDVMLVLLIIFMVAAPLATVDIGVDLPATAAQPAPRPDKPVFVTVKPDLSIAVGEDFVGRDTLSASLDAATKGRKDERIYLRADKAVSYGDLMEVMNSLRNAGYLKVALVGLDGRS

SEQ ID NO: 12351 - protein, 258 aa, BradyrhizobiumColbertium
MQSILRLRHVILTIVLALAPAPAFAIDEALLPRNLSPWGMFVGADIVVKVVMVGLAIASLATWTVWLAKTIELRRKGSLALQRTRALEGNMTLAEASARAGDARDAVAQLIRSCAREAELSGGILDDGLQERVALRLERVEAAMSRQIARGTGVLATIGAVAPFVGLFGTVWGIMNAFIGISESHTTSLAVVAPGIAEALLATALGLVAAIPAVVIYNHLVRGIANYRALLADASAQLMLLVSRQRDHGHFRLARAAE

SEQ ID NO: 12352 - protein, 171 aa, BradyrhizobiumColbertium
MLSTDLADLKAYMADNPGAVIEDVARERSVTPRAVIEALPPSMVRMGGGEHFAAVMQDIAQWGEVTLIVHTDDAIFEFTGGIPAGEIGRGYFNLMQPKGLHGHLRHERCAAVAFVERPFMGKTSAFVAFVNADGGIMFKVFVGRDETRALRADQLVRFRQLADQIAAAPAA

SEQ ID NO: 12353 - protein, 111 aa, BradyrhizobiumColbertium
MFIAMNRFQVKPGQEAAFETVWRTRESYLGGMAGFVEFHLLKGPVAEDHTLYSSHTVWVDKAAFEAWTRSEEFRRAHARADNKTGESLYLGHPKFEGFKVIMTERKASAAA

SEQ ID NO: 12354 - protein, 764 aa, BradyrhizobiumColbertium
MVSIAAVMAEGSLAQTASRPAEDGSSERPKQAKRKPQVAQQATPEVMNARAQVGAAAPVQVLDTITVAATKTKERAIDALAPVSSISLDQIQGIQPNRLSGIFYAVPGVSFQERGDDPATVVNIRGLQDFGRVAVVVDGARQNYQRTGHNANGSFFLDPELIGGVDVVRGPTANIYGSGAIGGLVSFRTKDINDVLRPGERWGVDLSGSYGSNNNRGLGSVFGGVRATPDVDIFGGAVYRTQGNYKDGNGTEIGNTGNQVESGLMKLTVRPALGHEVKFGAVFQDFQYDVGQFNRGPVATAAQRALYQGSSVYASDTKNYTGTVTWNYSLPSDNLFDWHMSLYGNRVDNDQTKTYHYSTSGAAYCGAGNFGNNISGCVGDTRGYVLNTYGIDVNNTTRFNVGDWRNAVTWGVDAFQDDVITTDSRGNSNITTPSGIRTVSGGFMQLKQNYSNWFEAVSAVRYDRYDLDSGNTHAGGDRFSPKITLGVTPVPGFQPYVSYAEGYRAPSITETVISGAHATGGGPAFFPCPDGTVGLFCFLPNPNLRPEVGKNKEVGFNLKFDNIFSANDSFRGKINLFRNDVSDYIDLVASAPTPVPPFGSFSQYYQYQNIANARIQGFEAETMYDAGSWFIGVAGHYIQGKNVATNIGLATITPRKVVTTGGVRLLDRTLILTAQWASFGANNDVPAGYLPSTGYELVNLYLTYNATRDIVFTASIDNLLNQYYRPYAIPGSSTDGTSQNDVLWSSPGPGRVYKAGMKIHFGGA

SEQ ID NO: 12355 - protein, 41 aa, BradyrhizobiumColbertium
MRGSRIDSRELFAAEREIIIAHGDDSYRLRLTSQNKLILTK

SEQ ID NO: 12356 - protein, 316 aa, BradyrhizobiumColbertium
MAFCRTLASVALSCTFALVSGAHAAGIIVHDARNRDIAVNDFARTVSIGGAITEILYALGLENRLVGVDTTSLYPPAALHDKPNVGYMRQISAEGVLGLNPTLILAIQGSGPRETMEILEAAKVPLVLVPETFSEDGLIEKIKLVGHAMGVDERAECLSAAVAADLAQLRALRAKVTKPVRVMFVMSLQNGRAMVAGHKTAADEIIQLAGAANAVDDYDGYKIIGDEAIVAAKPDVVLSIERGKDSLQAEAIYAHPGFALTPVAANKSFVSMDGLYLLGFGPRTAAAARDLSVKLYPALADRGTFTSALSAANCRQ

SEQ ID NO: 12357 - protein, 332 aa, BradyrhizobiumColbertium
MVLLLAAIVALTVGAAGIPLSRLPAALGIAGENTAMTARDQLVLWSIRIPRIAATAMIGGLLAAAGAIMQGLFRNPLADPALVGVSSGGALAAASAIVFTDSRFGEAVRFLQTELLPLAAFAGSLATTAILYGISSRSGRTSIAVFLLAGVAITAIANAGIGLLVFIADDRQLRDITFWMLGSMSGATWTKAAVLAPVLVIGLAACALIARGLDLLVLGEADAFHGGVDVERLKRISIVMVSAMTGVAVSISGVIGFVGIVVPHLLRLVIGPAHRLLLPASVLLGAVLMVGADTLARTIVAPAEMPIGILTAAVGAPVFLFILLRQRGLTAL

SEQ ID NO: 12358 - protein, 271 aa, BradyrhizobiumColbertium
MTVVIEARHLSKRAGRATLLDGASLTVAEGEMVAIIGPNGAGKSTLLRLLSGDLRPSAGEVRLMQRDIGSFTPRELAARRAMLSQHINVTFPFTVEEVVLMGAGERSLRDAAPLVDAALDEVGLAHFRERQLPTLSGGEQQRAHFARVLVQLACGEAEHGPGLLLLDEPTSSLDLRHQIDLVEAARRRAAAGTAVIAILHDLNLAIRFADRLVVLAGGKLAADGPRAEIVTRETIRDIFEIDAVVHQDGGGVPFVLPQSMRAAPHLSLRER

SEQ ID NO: 12359 - protein, 559 aa, BradyrhizobiumColbertium
MRITAKWLATTSLVLVTFAVASGSWAANVDTNSAIDTVTVYPDGATVTRVISLDLVSGDSTLVVRDFPLSLDPSSLRVEGEAGAKLTIGTIDARPPKAAPPVNLPELDKRIEALKDQRADLQGAIESAAARRKFAQHFAETSPAGLGDKGEARPITEWRAAFAAVGEEVAIADTTIREATRKQRELDRQIAQLEAERSAKPPNKLEVRIDVASAAPTKATLRVTYTVRSARWTPLYDARLDTGAKDRKPQLELVRRAEVTQSTGEDWSNVTLGVSTVRISRGGSAPELNSLVAQYPQVPKPLALGTASDLARPAPMTRQAQSPSMAKIAEAAESRERADEQQAVAEIGDFQATFKIPGRVSLGAAEGAKSLRIASMNVPADLAVRAAPVLDPTAFLEASFKQTDDTTLLPGKVAIYRDGIFVGRGKITASARDDIVRLGFGADEKVKIQRAVLKRNEGSAGLLVTTSKTDERSFRTTIRNGHDFPIKVAIEDQLPVSENEDIVVEMLPSSTQPTATNIRDKRGVLEWSFDAKPGEIKDINFAWRIRWPKDKSVVIVPAG

SEQ ID NO: 12360 - protein, 403 aa, BradyrhizobiumColbertium
MAGARSRNFAGWPLFANSFRPFFLLAAIQAALSILAWLPMFYGELSVSSAFAPRDWHIHEMLYGFLPAVITGFLFTAIPNWTGRLPIQGTPLGVLLAVWLAGRVVVTVSANTGWTFALLVDAAFLALVVAAATREIIAGGNWRNLPVVGLVLALLAGNIAFHVEAHYAGAADVSIRVGISVVVLLIALIGGRIIPSFTRNWLVKFNPGRLPVPFGRFDGAVIGCSALALITWIVAPLNAVTGILMALVGGLHVVRLARWAGDRTSRERLLVILHVGYSFVPLGFVLNAIAGFGELPPSAGIHAWMAGAAGTMTLAVMTRASLGHTGQALTASPAIQGIYAAIVIAALTRVAAVMWPAHGDALLQIAACGWIVAFLGFAIAFGPLLAGRPRRALAVMGVPSPAR

SEQ ID NO: 12361 - protein, 236 aa, BradyrhizobiumColbertium
MAKVDTSLVAHLPLFAGVTPDALDEILREARSARYPKNTAIFEQGADAQSFFLLLHGHVRAAKTTPTGEQIVVRYVGPGETFGLAMAIGAARYPATAMAVDDSVVLIWPTSAWPRLVERFPALAANTLQTVGARLQESHTRILEMSTKQVEQRVAHALLRLAKQSGKKLDHGIEIDFPISRQDIAQMTGTTLHTVSRILSGWESQGLVESGRQRIILREPHKIVVLAERSADSGAA

SEQ ID NO: 12362 - protein, 65 aa, BradyrhizobiumColbertium
MSFGFDDLVDDIMQTAPHTIRVFLAFRMACVGCPIATFHTVDDACREHGIDREKFLAALSDCVPA

SEQ ID NO: 12363 - protein, 450 aa, BradyrhizobiumColbertium
MRADLAAIYGEERLPRYTSYPTAPHFTSAIGPETYARWLAELPAGASASLYLHVPFCREMCWYCGCHTQIVRRDELIVGYQRTLLREIGLAAETIGRRIKVEHIHFGGGTPTIMAPEAFAELMAVMRQKFFVLPSAEIAVEIDPRTLTADMVEAMRLSGVNRASLGVQSFDPVVQRAINRVQSFEQTAAVVEMLRRAGIEGINFDLIYGLPHQTVASCLDTVRRSLALAPDRFSVFGYAHVPDFKKHQRMINAAVLPDGLARHDQACAIANALKEAGYVQIGLDHFARPGDSMAVAYEQRTLRRNFQGYTTDTSETLLGFGASAIGHLPQGYVQNEVQIGAYAQSIAAGRLATAKGYGLTDDDRLRADIIERIMCEFSADLGDICARHGAEPGAMLKSAARLKPLISDGVVRLDGDRLAVAKDSRFLVRSVAAAFDAHLDPGKQLHSRAV

SEQ ID NO: 12364 - protein, 66 aa, BradyrhizobiumColbertium
MRLFALELILSLLDVRGHIPRFDDFRPAPATPATAGIVRALAAAIAVFAVLSLAIWGTVWLAVQLI

SEQ ID NO: 12365 - protein, 374 aa, BradyrhizobiumColbertium
MFTRRAALISAAATALMLAAPAFAASDLKLPRQKVELVAPPFVHAHEQATTQGPKIVEFKMTVEEKKVVIDEKGTTFQAMTFNGSMPGPLMVVHEGDYVELTLVNPATNSMPHNIDFHSATGALGGGELTLINPGEQVVLRWKATKTGVFVYHCAPGGPMIPWHVVSGMNGAVMVLPRDGLNDGKGRALKYDKVYYIGEQDMYVPRDEKGNFKSYDSPGEAFTETEEVMKKLIPTHVVFNGKVGALTGKNALTAKVGENVLIVHSQANRDSRPHLIGGHGDYVWETGKFGNAPEVGLETWFIRGGSAGAALYKFQQPGIYAYVTHNLIEAADLGATAHFKVEGKWNDDLMTQVKAPAEIPPQTQGALQTGRKIN

SEQ ID NO: 12366 - protein, 292 aa, BradyrhizobiumColbertium
MLIAFKLKLVLACAAGLAGPLAVAPLMSEMKTHAAQEEPAIVEVAAGSFLYREAGDFTRGGQQAEAPLRTLRFDRPLHIMREQVSSADFQLCVRDGACRALGRDVVIAPDRPAVQVNWYDAEAYAGWLSRKTGKHYRLPSDEEWAFGAGSRFKDDGVPVDASDPSKRWISRYERESERDASDTAAHPFGKFGLNEHGLEGVSGNVWEWTSTCFVRSRVDEAGNAIRPTVNCGVRVAEGAHRAYVTDFVRDARAGGCAQGVPPANLGFRLVREQTSWLVSVSKRLSKAWPARS

SEQ ID NO: 12367 - protein, 342 aa, BradyrhizobiumColbertium
MINLRVLAASAAVLSLTSAFVSKAAADNGAVNVYTYRETKLIQPLFDAFSKDTGIKVNVVSASSGLEQRMKAEGANSPADVLLTVDIGRIDEAVQAGVTQPIKSEVVDKVVPAQYRDPDGHWAGISMRARVIYASKDRVKQDKITYEELADPKWKGKICIRSGQHIYNNALFAAYTAKHGEAKTEEWLRGVKANLAQKPSGGDREAARDVAAGKCDIGIGNTYYWALMMNNDPEKKPWAEATRVILPTFEGGGTHVNLSGVLLAKHAPNKANAIKLIEWLVSEQAQQMYADQNYEYPVRAGVAVNSTIAGYGKLGPDPLPIAKIAANRKAAASLVDKVGFDN

SEQ ID NO: 12368 - protein, 543 aa, BradyrhizobiumColbertium
MHAATATAIAVAAAILVAAPVISIVSLALQPASDVWHDLINYVLPAALLDTALLLIGVGALTLLIGAGTAWVMSRHDFPGRGMLLWLMPLPLAIPTYLAAYVYADLFEPLGLVHRTLAIWLPLGDALGLLPNLRSLPGAIFVIGLVLYPYVYLSARATFQVQSAEFAEAATTLGAGRWTILWRVSLPMARPALAVGVALVALETLNDIGASEYLGIRTLTVSIFTTWLNRGSLAGAAQLACLMLAIVAGLIAMERYGRRNANIEFSAESPHVRQRTPLSGARAWTAFAVCLLPALIGFIVPLLYLAHQALGRGLLANFDPLLWRHTFHSFAFAALATAMALILALATTIAHRFRPDPLRYVAMSIAQTGYALPGLVIALGLLTPVLAVDNALSAVATWTGFSLPGLLLVGSGTAVVIAYTIRFLAVPVGMIKAGFDSIPRDYDESARTVGAGQAVMLRQIYLPLLRPAMLGAIIIMFVDCLKELPATLLLRPLNVETLSTSIYQFASRGNFEDGALAALLIIAASIGPVAWLTRFSEVPSGPA

SEQ ID NO: 12369 - protein, 216 aa, BradyrhizobiumColbertium
MAWTREQMAARAAKELRDGYYVNLGIGIPTLVSNYIPDGMDVSLQSENGMLGMGPFPYEGEEDPDLINAGKQTVSELPSTSYFSSADSFGMIRGGHMDLSILGAMQVAQNGDLANWMIPGKMVKGMGGAMDLVAGVKRVIVVMEHSAKDGPKLLKQCNLPLTGERVVDMVVTDLAVFTIDKHGSGGMALIELADGVSLDEVKAKTEAEFRVALKNT

SEQ ID NO: 12370 - protein, 245 aa, BradyrhizobiumColbertium
MNKVYPDAKSALEGILKDNMMIMSGGFGLCGIAEELSDAIRESGVKGLTVVSNNAGVDGIGLSRLLETRQIKKMISSYVGENKLFAQQFLAGELELEFNPQGTLAERIRAGGAGIPAFYTKTGVGTLIAEGKEVKEFDGEKYLMERGLFADLAIVHAWKGDTAGNLIYRKTARNFNPMMATAAKITVAEVEHLVPAGELNPDHIHTPGIFVKRIVEVGTAKKRIEFRNTRPRPTTAPAAGTGVEI

SEQ ID NO: 12371 - protein, 642 aa, BradyrhizobiumColbertium
MAQGMKRLGTPIAALLGMALIALIATSWLINRDALRKAVEAQIRNVTGLELSVAGTIDISVLPASYISFRDVGLKGGGTSTPALQVDVLTANLRLLPLLLQRFEIADLTLLRPRIHVSLKPDGESNWTPFIQTIARTMKPGAENQVSFSEIRIQDGVLDYVDVATQATDKLEDIDLSLAWPSISRSFAATGQFDWRGERVDGSISFSDFVAALSGDRSGLKARIASPPLKLAFDGSVANRTSPMMEGTLTVDSPSLRNALRWTGQPQPGSGGFGRFALKARANVVGPSIALTNVNVELDGNAAEGVMTYANNGRQTLQATLAADALDFTPYISTFRLLASGARDWNRQLFDLNGLSTTDLDMRLSAAKLTVGPTKLGRTAIGANLRNGTLALSVGEAQVYGGIAKGSFGIARSDTVADIKAQFQFTDVDLQACATELFGLNKLSGRGNINVSLLASGSSPFGLVQSLDGSATITGHDGAIAGFNAEQLLKRLERRPLSGGGNFRNGSTPYNNLTIAVKFSDGIATAEDIRVEGPATRITLTGTASVPTREYDMKGVASLNSASGFELPFVVQGPWDDPLIFPDPESLIRRSPASAPLLDMLKERKAGDAVRSAIERITGSGKRPAPAESPTAENSKENAKSN

SEQ ID NO: 12372 - protein, 451 aa, BradyrhizobiumColbertium
MAVAAVGLFAATAPAFAQQKTITVWWGKGFYRSEDDALIETIKKFEAKTGIKVELSQYAIQDMIPKTVAALDAGTVPDVAYSDSYDVQAQGKWAYEGKLEDLTDIMEPIKGRFVQNTLDASILYNDVAKKKAYYGFPLKQQSMHVQIWNDMLEKAGFKQSDIPNDWAGYWTFWCDKVQPAIRKATGQRVYAVGQPMGVESTDSFQSFYTFMDAYHVKLVDDDGKLLVDDPKVRDGLIKAMKDYTDTYIKGCTPPSSTTWKDPDNNVAFHNKTIVMTHNFTISIAAKWFEDSQNQALTQEQRDAGKKAYEQDIITASFPKAPDGSTIKYRSDVKTGLVFTAAKNKAEAKQFISFLLQEENVRPYIEGALGRWFPVTKESQESPFWQADKHRKAVYAQFKGGTAAFDFTKNWKFTILNNENVWAKAMNRVVSEKVPVDKAVDELIARIKQVAG

SEQ ID NO: 12373 - protein, 290 aa, BradyrhizobiumColbertium
MAITLSGDQAMPGPPLSSRLTPAQVWGIILLAPYLLVFLAFVVYPVCYGLWLARAPSNYVALYNDPIFARAAVNTLIFLVIGINIKMLIALFLSGFFAQQRTWIKWLSVIFILPWAVPSIPTILSVRFMLNPEWGMINHYIFSLTGDDGPNWLNDPTVALTMAIAVHIWKSLPFWTLILITGRLAISHDLFEAAEVDGASWWQKFRYITWPSMQTLYITCTLLSMIWTLGDFNSVYLLTGGGPADLTHVLATLGIRYLRLDQLSLAMASIVCAMPFVLPLVYFMMKRLSR

SEQ ID NO: 12374 - protein, 288 aa, BradyrhizobiumColbertium
MKLPGVSEFSWRDVATEARLLLIGIPVFLWTMIPIYHMFLFAISPKEDAFSGKLWPDHPTLHNFQIVFKQQHYFLRDFYIQFWNSTVIAVSVGVLTLVIATSAAFAISRLKVPGGRTVLNLALFTYFIPAAFLAVPMYRTMGNYGLLNNHWSLILAMVTIASPYAIWVLKQASDKLPVELDEAAVMDGATTLQIFRLVYLPLMMPSLVAIGTYAVLLAWNEYLYAFLLLSNDREITLPVALGNFLAADDSPWELLMTTGFIYALPPAAVYYAFRRYMVGGLTAGAVKS

SEQ ID NO: 12375 - protein, 270 aa, BradyrhizobiumColbertium
MRKAPRLSRFNIASLALGLAFLYLPILILVIYSFNDSRLVTVWGGWSLRWYHEFFNDRAMIEAAWMSLRVAVSSATIATLLGTLAAVALSRGERFRGRTLFSGMLYAPLVMPEVITGLSLLLLFVALNAERGFWTVTIAHTTLTMCFVTVVVQSRLGSLDRSLEEAAMDLGCDPVRAVLSVTLPLIAPAIVAGWMLAFTLSLDDLVIASFTTGPGSATLPIRIYSEVRLGVKPEINAICTLAIALIAVVIVLASLASKLSSSRGESAAPL

SEQ ID NO: 12376 - protein, 304 aa, BradyrhizobiumColbertium
MSSRRIFARPARFAAIAPYVWMVLFFLVPFAFVLKISLSQTAIAQPPYEPVFDLTAGWDALTSAFAALSIDNFKLLISDDIYVFAYVRSLTVAIIATAALLLIGYPIAYGMARLPKRWQAVAMVLVIVPFWTSFLIRIYAWINILQHDGLLNQILLALHLVSQPVVWLSTDTAMYIGIVYSYLPFMILPLYATLAKMEPALEEAAADLGAPPWQVFWLVTFPLSLPGVGAGVLLCVIPIVGEFVIPDLLAGSNALMIGQTLWLEFFTNKDWPVASAAAIVLLVMLLVPLLLYERLQKQQLEQGR

SEQ ID NO: 12377 - protein, 390 aa, BradyrhizobiumColbertium
MAEELSGTNIAAEAAGADAFPAAEQGLLRIEGVAKTFGTFRAVDGVSLDIKAGEFFALLGPSGCGKTTLLRMLAGFETPDEGRILLGGKDIAQALPHERPVNMMFQNYALFPHLSVRDNIAFGLKRAGMARADIATRVAEMVALVKLEGLEKRKPDQLSGGQRQRVALARALARRPQLLLLDEPLAALDKKLRENTQAELMELQRRLGMTFIVVTHDQEEAMTMASRIGVMKAGKLVQVAKPRELYEVPRSRWIAEFVGDINLFDGESKLRDGHRLVIGTRDAGALVVAEPREPVGAGKLAVAIRPEKVKLSRRGPASEAGHQLAINRLDGVIADICYLGGTTTYKVKLDSGGVLQASVANNARLDVDAYSLNQHVVAWFGPDDCMVLTS

SEQ ID NO: 12378 - protein, 491 aa, BradyrhizobiumColbertium
MADYDLAIIGGGLNGVGLARDAAGRGLRVILFEQGDLGGAASSATPRLIHGDLSVLERRGFWRVHRALAERRTWLRIAPHLVRPMRFVIPAHSDQRPPWLLRAGLFLYDSLAGRGGLPGSATLDITHHPVGNALKRPFGTAFEYSDCVVDDSRLVVLTALDAAERGATIRAGARCVRADCADIWRLAVVDRGHRRTITTRALANTTGGWTSMVAEMVLRQPQPAATAMQMSQIIVPRLFDSDNVYVFQNGDGRLIFASSYEREFTLIGTVTHDFTGDPAIVAVSRAEIGYLCEAASRYFRAHIAPADVVRTVSGVNMRPVSASRGDGTTLFHARRRKAPLLTMFGGDVTTSRLRAEEAVTRLTPFYPMSPPWTAGAALPGGDFAWDRFDTEVEFARDRWRFLSEPQAQRLVAAYGSRLSAVLGEARTRDELGPNFGPELTGAEVRYLMTREWARFPEDILWRRSKLGLTMTAADRDALAAFMAGNDSSRTG

SEQ ID NO: 12379 - protein, 888 aa, BradyrhizobiumColbertium
MGSTLPIAVQALTCLAGAVAPARAFALSDSFPAPSDFAKLEPNVIWEALIAAIVVCSFLAAIGLWILSSLRRSRRLQLRRNAFISSAMNNLNQGVVMTDAQRRIIFCNDRYLEIYGLTRSDIRPNMNGHDLLELRRRRGVLDAASDDEFYEKAASANGLITELPDGRAILVKFFVLPNGGSVATHLDVSEQRKLSRQLASTTQFLESVLDHVPACVAAKNIEDGRYIFANTAYERFWGFSRDHVVGKKARELFAPVSADSIDAADRAALNSPDGQFRNEFEVERGGERRMVASIRIAVRNEGNRPGFLLLVFEDITDRRSLSQELESTKKFLELVVDNIPVALIVEQVKDGRYLLANRSAETILNRRREEATGLTASDIFNAKEAKLIIARDEAAIKKRGMITEEHPISTKDGLRLFLTRRATVLSDAGEPQYLIKTHEDVTDRRQTESRMAHMAYHDGLTDLPNRAAFLQALMQMIEACEGTGEEFAVLCVDLDGLKEVNDVFGHALGDKLLIEVARRLEDSARGGLVARLSGDEFGLIIDGKQPEAGLALAQQIGEAVAKDFQIDGRPVRAGITTGISVFPHNGTDGASLLANAGAALFRAKQKSRGTISLYQPEMDQQIRDRRVLHQDLSMAVKNGELSLAFQPQGAAGHSVGESEIMGFEALARWQHPVRGQVSPAEFIPIAEESGLIVEMGEWILREACREAASWPKPLQVAVNLSPAQFMHGDVVGLVHSILLETGLAPGRLELEITEGVLIEDFDRGLALLRRLKALGVRISMDDFGSGYSSLSYLQAFPFDKIKIDRAFIINLGRNPQSAAIVRAVIDLGHGLDMSIIAEGVETVDQLAFLAREGCDGVQGYLLGKPLPIGKYAGLVGRADAVELALKTG

SEQ ID NO: 12380 - protein, 367 aa, BradyrhizobiumColbertium
MDRVDCVVVGAGVVGLAVARKLAQSGREVIVLEEAEAIGTITSSRNSEVIHAGIYYRAGSWMARMCVAGKHALYRYCAERGIPHRNCGKLIVATSQKETEKLQSIKAHAEANGVLDMQLLTGEVARALEPALACDAALLSPSTGIIDSHAYMLSLRGEAEDAGAAFAFHTPLIRAKAAGGIIEIEAGGDAPMTLQCDLLVNAAGLSATTVARNIDGMPMDRIPPAYLAKGNYFSCNAKAPFSRLIYPVPEPGGLGVHLTLDMAGQARFGPDVEWIETINYEVDPSRAERFYPAIRKYWPTLPDGALMPSYSGIRPKIVPPAVASQDFLMQGPPDHGVAGLINLFGIESPGLTSSLAIADHVAELATV

SEQ ID NO: 12381 - protein, 59 aa, BradyrhizobiumColbertium
MTIQAHLVELERKHKLLENELHEALVHLSTDDLQIVELKRRKLMVKDQIERLKHSDTLH

SEQ ID NO: 12382 - protein, 40 aa, BradyrhizobiumColbertium
MDALWKLSSLRSVIASDLRLRPPVSRKIFLQGAAEVAQPH

SEQ ID NO: 12383 - protein, 68 aa, BradyrhizobiumColbertium
MTNEDERELEAELTRLQQEHRDLDAAIDALHQSPAPDLLRLQRLKKRKLLLRDRIAFIEDQITPDIIA

SEQ ID NO: 12384 - protein, 72 aa, BradyrhizobiumColbertium
MSATPLLDNTHYEQACDQAIAMCDGNLRSTIKALIMANEYLETELEELQAAVAAGCIPETSRSKMRSKSSAA

SEQ ID NO: 12385 - protein, 83 aa, BradyrhizobiumColbertium
MSDVTYYVAMPFLIDDDGSPVAGAAEECQSSTAALRRAEILARGPGHIGAIAFSRSGDPMTGEFGDATLLRKFGNVPEDLATL

SEQ ID NO: 12386 - protein, 209 aa, BradyrhizobiumColbertium
MKPSRRNAPADDAAKDNLRATIRDLRTKLKEAQRRVAELEAAADTDFLLEIPNRRGFERELARAIAYMKRYRASGALIVLDVDRLKPINDSFGHAAGDEVLKAIVATLTRQIRASDVVGRLGGDEFGLLLWNLSETDAKAKAAAFEQAIDELSFVFRGQSVAAGASAGVALLGPHADAGRALEEADAAMYVRKARRRHEPRIRLVGSEL

SEQ ID NO: 12387 - protein, 39 aa, BradyrhizobiumColbertium
MDRPALVFRPALAFAALALFGFFMGILLNEGLRGFTKTG

SEQ ID NO: 12388 - protein, 162 aa, BradyrhizobiumColbertium
MTAPIAIIMGSQSDWDTMRHAADTLEALGIAADTRVVSAHRTPDRLFAFAKGAKAAGYKVIIAGAGGAAHLPGMAAALTELPVFGVPVESKTLKGLDSLYSIVQMPAGIPVGTLAIGKAGAINAALLAAAVLALSDPALSDRLAAWRKAQTDAVAERPEDKA

SEQ ID NO: 12389 - protein, 362 aa, BradyrhizobiumColbertium
MKLKPGDTVGILGGGQLGRMLAMAAARLGLRCQVFSPDPDSPAFDVVLNATCAEYADVEALELFASDVDVITYEFENVPAAAAMVLDARRPVLPNRKILETTQDRLAEKDFVTHLGIGTAAYADVTSVSSLREAIARIGLPAVLKTRRFGYDGKGQAIIREGDDIAKVWTSLATKSAILEAFVPYEREISVIAARSATGQVECFDVTENEHRDHILKISRAPAPIPDALAEEARSIAGKIAGALDYVGVLAVEMFVLANGTGPKVLVNEIAPRVHNSGHWTLDGASVSQFEQHIRAIAGWPLGKPVRHGDVVTMTNLIGDEINDYEKWLTVPGATVHIYGKGAPRPGRKMGHVTEVRPSASK

SEQ ID NO: 12390 - protein, 240 aa, BradyrhizobiumColbertium
MDIKKYAAEGIGTFWLTFAGCGSAVIAAGFPQVGIGLIGVSLAFGLSVVTMAYAIGHISGCHLNPAVTVGLAAGGRFPAGQVLPYVIAQVAGAIVAAWLLYVIASGAPGFDVGKGFASNGYDAHSPGQYSMVVCFLTEVVMTMMFLFIIMGATHGRAPAGFAPLAIGLALVMIHLVSIPVTNTSVNPARSTGPALFVGGWALSQLWLFWIAPLIGGALGGVVYRWLSEEPTGIVAGVKAA

SEQ ID NO: 12391 - protein, 98 aa, BradyrhizobiumColbertium
MQVLVRDNNVDQALKALKKKMQREGIFREMKLRGHYEKPSEKKAREKAEAVRRARKLARKKLQREGLLPMKPKPVFGAGPGGDRGGRSGPGAGPRGPR

SEQ ID NO: 12392 - protein, 187 aa, BradyrhizobiumColbertium
MCGCSFDLGSLLPEKDKPQEAPKTAAPAESAVSAGNVAEAQAHTAKAQSLAKSGETAAALDEFNRAVGLDPYNAQAFYGRALIYQGKNQHDFAIADFSAASGLNPQKAEPLLGRAISYLALGKVKEAAADLDEASEADPHNAQVWTTRGQVYERLGDKAKAAASYAKAVALRPRDDAARSGLARVGG

SEQ ID NO: 12393 - protein, 306 aa, BradyrhizobiumColbertium
MLKYLAKISMDIFPSVLATIIGAYIVNHYINAKPAADAPAAMVAPADAGHNGKPADTANLPAPGAKAKGISEKSVTDKAAADHQPAAEPKGAEKAAEKAPDVAPTETGPRAKPSAREKVIAKSAPAVPAAPMVEANSAPAAAAPAATPDANDLVRAAIERLRKSPEGRSEAKSPETRTSETKPAERPAEPAVREAVRTPEAPRVVSMEPATVRPLPPPITVSTPSPEIYGNGGSNPPYTASISNEDPNRVTPPADIPVPVIAPPLDLRADAGASMPRPKKTNVADEMLSGMKSMFNAVLPKSATPD

SEQ ID NO: 12394 - protein, 60 aa, BradyrhizobiumColbertium
MDYVIVPVVAGEMTIVSPNGERGKAQLSAGKSYFRKAGVQHDVLNETSTEIVFLEIELKP

SEQ ID NO: 12395 - protein, 56 aa, BradyrhizobiumColbertium
MRVMFRDVEIGAAWQRTSKDNNTVYHSVKLDDPSFPAPIYANLVAVDDGYALVWSR

SEQ ID NO: 12396 - protein, 67 aa, BradyrhizobiumColbertium
MEGVFQAIADAAASGAETSIVGFGKFKVKDTPAREGRNPSTGATIAIAASKKLTFTPAKAIKEALNA

SEQ ID NO: 12397 - protein, 45 aa, BradyrhizobiumColbertium
MPVEVKVPMVAIVVSIQFSGPPIAASMAGDRPEAIDPHPEGAGTQ

SEQ ID NO: 12398 - protein, 39 aa, BradyrhizobiumColbertium
MCAASGDRVVSSVKVSMVAIVVFLGRFFWHTHVVLDWHV

SEQ ID NO: 12399 - protein, 91 aa, BradyrhizobiumColbertium
MITTIPNRVKFQKRAGLSGYVAELGSCFLCADLGISPELEPRPDHASYLASWLEVLSSEKRFIFSAAAHAQRAVAYLHDQQPKAAEVEEAA

SEQ ID NO: 12400 - protein, 301 aa, BradyrhizobiumColbertium
MSYTSSSADRADVYTRITAEIVAAIEAGAGEWRMPWHHDGTAITRPQNVSSGNRYRGVNVLALWIAAQAHGYADGLWGTYRQWLAIGAQVRKGERGTTVVLWKQAKPAANDDADDGDDDVRRRVFARAFTVFNVAQVDGYEPQVIEELPEIDRLTHVGEFIDALKIPIITGNYNAHYRIDIDTIFMPDYAAFTSPAAHAGTLIHEAAHATGAKHRLDRNFQERFKRDWLPIEEATAELTASFILADLGVAHHPRPDHAAYVASWLRLLKDDPRAIFTAASKAQQAADWMHAQQPRTEEMAA

SEQ ID NO: 12401 - protein, 721 aa, BradyrhizobiumColbertium
MSKVALAPLPQDLHDRPVLASAALKQGFDRSCLSRYGDASWDLGPAVFRENARRCHVTVHFGSVEDIGTREAIRELLYARLNVDLPGHRKKLPPVCVRQIFNRARRFFEFVRGELSAVDLSRIDQQLLDRYARHLQTGCSRRPVIVGHLLEVPVDLYAFRDHLPSGGLRFQPWSGRAPARVAGYRHVRENRTPRMPEEVIAPLLAWSIRYVTEFAPDILAARDELDRLETHCAKLVQSDQALDRKQRRARQRRRLMDYFERRRREERGVPIWGTAHNGATMRLPDTGDVSPPVNSHLLHLHIGIDARAESRMHIQLASGAPDLIDAAIRQLGVETGGMDTCISLLPETGLPWRPRFDAKTLAQEERMLQSAAYILCAYLTGMRDCEVQAMQRGCLAISRSEDGLIMRHRVRSVAYKGKSSHGEAADWVTIEPVAKAIGVLERLSFQAASARGLTTLWPVLAAKSVCKDHLSAEIVRQLNLYRDHLNELFGTINEPVIPNSSEGKPWRITTRQFRRTIAWHIANRPFGTIAGMIQYKHASVAAFEGYAGSSKSGFRAEVENQRALGQLDDLLVYFDERQVGSTLSGPAAPRISKALDAAAVELSPLPVIIADRARLRTMLASLARTLHVGVLADCFFDPGTALCLKQATNADNNKMPLTVLCQPTRCPNACITARHRPAWARSADEARAVLKEKRLSSLQRSALQQDLARIEAVLDDIDRSN

SEQ ID NO: 12402 - protein, 594 aa, BradyrhizobiumColbertium
MRGRPRKGTSVRFVPADGVVPAHAGDQVIGLRFNIEARHGGIVEVDLTSLSPRALAIAFAGAVRRQAELGGALGARCTIMQHITAYHKFFAYLRAHSHATKPADLRAQDIDGFEASLEAGGMTPIHRHTVLAKAILALRSIDADQPGLLDDKLRHRLSYTSAQSAGRSQPRDAYSPFVARQLRDAARADIGKIFRRIGRPLDEAIDSNLRSAVADVEARIAAEGKIDHSDLAFKRLYFMRLRRGLPVSSFSEDVHNRHHLLATDLPPLLTFLSLETGLEIECCKTLTIDCLQSPESGTIEISYIKRRARGAEQKRLRVRDGGLGTPGGLIRKLIEVTSFTRRFLPVESLWVYHYKGRGQLRSGIDHPHQLVDNWVAGHGIVDDDRRPLHLVLSRLRKTHKALWYLKTEGHMARFAVGHTPEIAARHYADIPSLRPLHEATVAEAFTDVVASAGPIVLSPDSESLWREGVDAPVQNNNIPALLDGDQDVWLAACAGFQNSPFAEAGSPCPQPFWGCLECRNAVITARKLPAILAFLDFIEGERAGLSAADWSIKFGRAHARITQQVLPVFSERLIAQARSEATQQSLYLPPEVRP

SEQ ID NO: 12403 - protein, 438 aa, BradyrhizobiumColbertium
MILRDGALYDPDLDRFFRDLPLNGVRSRHSLRAYGYDVLVWVRFLSEACGKSVWQGDRRDVLAYHRVRRRTEAGQRISAASWNRAVACLDRLYRWGVREGLLPEAPFTHRSVWRQGYGGRRAQITARNDAYEPAARRADVSFVTLDDYRVFWDVGLRGLMPDGGARPGARDRNGIRNALFSDLVVTTGLRLEEASFLFASDLAAVDRRTARQVWLDLPDALTKGDRGRQILLSGRLLEQARAYIAVERAHAVTKFRQRSGWRSYERPIFVHRERSASRLRLLDGSDVVLDLLSPEERSRTIVCDDDGTAGEPAVLWLTEVGLPVQPNSWEVIFARASERCRSLSFSVNITPHQLRHTFAVHMLAMLIQQRIRDAALPAGPIEGYRQILGDPLQQVQRLLGHASLATTYIYLDHIASRADTVDAAVEELLALLPSERSL

SEQ ID NO: 12404 - protein, 241 aa, BradyrhizobiumColbertium
MNRNGEKTRGDLYARITDRIVAELERGVRPWVQPWATANMAGHITRPLRHNGQPYTGINVVLLWSEAVARGFSSPIWMTFKQASELGAHVRKGETGSTVGYASRFTKTETDAHGDEVERDIPFLKAYTVFCVDQIDGLPEHYYGRPAAVASTIERNASADAFFANTGAIVRHGGSLAFYAPSSDHIQMPTIESFRDTASYVAVRAHETVHWTAPAHRVNRDLSRYSKDRSERAREELIALS

SEQ ID NO: 12405 - protein, 195 aa, BradyrhizobiumColbertium
MTKPARSSRASARVIPLRKGTTLEMVRLACPDSAQAQRISESFGLAILDSDGIRDLHERLIIETADALKDGLSERAMQIHLQRIVGAYVGSAHGAGQFYTRAVTEARDATAKLANDGRDEDLDGPVGFDSQAQRKREFAADMGVQSHALRMAAEGAVAAYEKVVGETWKPFERPVDNTTDTVGRKAAKAQMSAFD

SEQ ID NO: 12406 - protein, 137 aa, BradyrhizobiumColbertium
MKASSERLAQLSRMEEARRQTQRQLDMIDRQIIRRMTALIPQLGRKRSAYRGGKPPDPSAFLERYRSNLAAITAERQPEIDALSRKLARQDVAIETLRARCAPEFRPAHDDPERAHRKDECRSSADCRPGKRHGAAA

SEQ ID NO: 12407 - protein, 131 aa, BradyrhizobiumColbertium
MAITFPHLFTGYERRCAERTIKDSWPDAWEVIFGIVLQPGESREKDRRAFEKEHTDNWIVVSAITSDQQPGFVEVVATPGGRRGAGTEERRFLIPSDEYRIGRFGFVVDETRHPVYSGPSSFIGWQGRTPP

SEQ ID NO: 12408 - protein, 158 aa, BradyrhizobiumColbertium
MSAQLIYDLVPLGAIIRFSDGTPRPPERHRKKLAAWEHRNSGGRLIRKQAEHRVGNTIIAATITLHAGDCGGGGVVVLRVHRSFSVDSDLRFVVTERPRIGAVRVLNRPGEDAELVYLGSSRADAECWLQSHGYPDAVLDEVTADSRAADVMEGRTAV

SEQ ID NO: 12409 - protein, 561 aa, BradyrhizobiumColbertium
MQLIKIDPRALNENPDRMRQTKSTPQADALLLATIKAVGIVQPPVITPQTGGGNGYVINAGHRRVKQAIAAGLEEIDVLVDEAANDNGAMRSMIENIAREALNPVDQWRAIERLVALGWTEEAIGVALTLPVRQIRKLRLLANVLPIMLDHMAKGDMPDERQLRTIASASHDEQKEVWKKHKPSKADPQVSWGSVAQALTKVRMYARHASFGDDLAQAYGIQWIEDLFAPADEDSRYTTDVEAFLGAQQEWMTNNLPKRGIIAETTNWGEVKLPPKAERVYGKPSKSDCTAMYLDRDGRVQSVHYRMPAAKKSKDKGAAAGTDAADESTAVSKPRPDVTRKGVEIIGDFRTDALHEALARAPVEDDALMALLILAFAGQNVSVDSGSGGTYYGNRRIARHAATLFDQDGKLVLDMDTLRVAARSVLIEVLSCRENRTDSGIVARVAGEVVGADNFLPNMGTDDFLSCLSRAALEGSCKDTSVLPRQKVKDTRAALVEHFKEGRLVHPAALFAPDKVNLLAWLAKNAVAAADEADDEVEEPDAGDEDDGEALGDEAFREAAE

SEQ ID NO: 12410 - protein, 232 aa, BradyrhizobiumColbertium
MAKAIASGDQRLMLKAGLEADIARLERLRAAHIDDQHAVRRQIRDAERDIAFCTSRIAEVGKDIERLVPTAGDAFAATVAGKRYVERKEAGRALMKEILTLVQLQQEGDTIIAWIGGFDLAYSGERYGRDGYRYSTSLIRTGAGHEIELPVTVTPLGAISRLEHALDDFEGERERYRQRLADARRRLASYRSREDGEFAFAADLAEKRRQLADVEQALATDVEGTGGSAIAA

SEQ ID NO: 12411 - protein, 350 aa, BradyrhizobiumColbertium
MGDDDRVPRRGRGARQEAVPLVLGEVGLIGDEDAGTGIERQELARRLRQAVPRNDKHGLGDQPEPALLHDRGRHRHRLAGADGVGKIGRSRGDDAPDAALLMFVEHEGARGARQFQMRSVEGARHDVVEAVIVDPRQPVGPIRIGPDPILKGGLDLRELLLRRLGVDDVEDPTFAVAVFDGVEDLRDGGVERIREKLAGVPPFRAPFRRASSHPAELPGLHGPRRQFRHVVNPDLRAHRFLNEGHDICGGNPRRAKARGDVRGSEVGRLHLLQRPDVALIGRIERCRGLRRRKLRPDRAGQIGVRRLPRAVGRIAEDGAAEVGDDVVRVAVHELRDMAGIDMAALVEYDG

SEQ ID NO: 12412 - protein, 50 aa, BradyrhizobiumColbertium
MGARHRPPARAATDGTALRELMSGPAPGRVLKCDARREAGLPRGGEGRSG

SEQ ID NO: 12413 - protein, 201 aa, BradyrhizobiumColbertium
MHTSPSIRKVFEGVATRHEMHRLFNRHRGDPAMAEGVGQHLFAGEWFEVNEREHDYMLEILPPLFMRADMFAMREFMTGSVTSIFFALAIDGRRRWFHGYCDLSDRLSPERMKAAIIERESRPVRAMTRDERLEHIWSSTHDDYRGYAGERWPLAMRGRRTVLVYTGQSGTVLKLLDDLTEAEIAAKLPVQFRHLPATVAA

SEQ ID NO: 12414 - protein, 155 aa, BradyrhizobiumColbertium
MKQAVASDRLREGPQGSMWAAHIDSAGALTGWEERGPAWRGFATNGGKKLFRFGPGESERICITEAAIDAMSLAAIEALRPDTLYVSTGGGWSPATDDAIRGLAERASAWLVAATDNNRQGDIYADRVRVVAADARARYDRLRPCAGDWNEDLRA

SEQ ID NO: 12415 - protein, 94 aa, BradyrhizobiumColbertium
MLAVVGIYRLPVPDVFAAIVAGKIIKYLAYAYIAVRFPNAIRSLADHAVPWSRFSTARLQTWLVAGKATIRRIRVWTTTTTQKHGIRNGEGNIG

SEQ ID NO: 12416 - protein, 418 aa, BradyrhizobiumColbertium
MADEISGRSSAWTLQIAPQRVWEAITVRSVLPKSQRDVRLDLFRGLANWLIFLGHIPDSVLAWFTTRNYGFSDGADLFVLISGYTATFVFGKMMMERGFVIGATRLLRRVWQLYVAHLLIFIFYLTAVHYLAHKFDDPHLMDQFNVAPLMNFPVETLSQGLMLKFKPLNLDVLPLYIVLMAAFPIVLWFMLRWRNAVMIGSIGLYLAARHYGWNFASYPAGAWYFNPFAWQLLFVLGAWLALGGATATRVLLHSRLLFVLSICFVLFALALSLGERIPELRPFIPDAIAGLFIPNDKTNLAPYRVIHLGSLVFIVVSLIPIDWPGLKWPIFRPLIRCGQQSLPVFCVGLFLSFIAHFMLAFGSEGVLAQLLMGAAGLWIMTIIAYYRTWSKDVDKSLSSGGKLAKSEAGRSREPRAEG

SEQ ID NO: 12417 - protein, 137 aa, BradyrhizobiumColbertium
MITSELTFSEQTQAAILHGLHWTASAIELLGVVVIVGGVVGATVWSLREMRHRQFADAFRSYRANLGRGILLGLEFLIAADIIGMIAIVPSFDRLGVLALIIVIRTFLSFSLQIEIEGRLPWQRHTGGDDDADRAGL

SEQ ID NO: 12418 - protein, 93 aa, BradyrhizobiumColbertium
MVLGVGLVAAAAGIAAPAITYWTSIVAGEHQGEQLGRWTAVTSLAQALGSAAAGLMVSQGSDQSFFVFSAITALVGTLLALPLSGRLTASKTD

SEQ ID NO: 12419 - protein, 343 aa, BradyrhizobiumColbertium
MKKVGLVAAVLAINAGSAVAADMSVKAAKAPPPPAFEAWDFAFGAALMSDYVFRGITQSNHKPSVAAYFEPRYNVTKDVQLYIGAGGASISFPNRAAAEIDIYGGIRPTFGIFAFDFGVWGYLYPGGTCYNAFAFPGSGIPGSEAGCVANADPVTLGLPINGNFAKRNASFYEGYAKVNVTLNDQFQIGANNYYTPNMMNLGAWGNYASITAKWTAPSSTFGTSGIGMYVSGEFGRQWLGTSDRFYGTQIPGQIYQFGIPEPSYNTWNIGVGFTYKVFTLDLRYSDTNLSKGACNAYTSDFTASVTSPANVSLINPGGFGSNWCGATGIAKLSADLTAITNLK

SEQ ID NO: 12420 - protein, 95 aa, BradyrhizobiumColbertium
MITPEFLVSGRARSPVHTIRRLRRNNLDQAEAFAQFFARLRLLHSSKSSGASQTTEPSSARMKGSTTNGSKPSRVASSMAASLFGKRSQRSRARE

SEQ ID NO: 12421 - protein, 519 aa, BradyrhizobiumColbertium
MKAYFIGGGIGSLAGAAFLIRDGAMSGSEITIYENLSTFGGSLDGAQLPDGSYSLRGGRMLTTDHYECTWDLLSTIPSLEHPGQTVRDETVAFNLKHRAHSKARLVDRNRFKVDVSTMGFTMRDREELVRLAMASEDELGNSRITDWLSPAFFQTNFWYMWQTTFAFQPWHSAVELKRYLHRFMNEFPRIETLGGVKRTIYNQYDAIVRPVEAWLKDHGVRFVSDGRVTDIDVADEGGKVRVKGLTIDRKGAKLVATVEAHDLVFFQNGSMTDASSLGSMTSPAEPRTKADSEGWVLWEKIAAGRPEFGNPAVFNSSIPESYWASFTVTCRDRSFFQQMEAFSGNAAGTGGLVTFKDSNWLMSIVLYHQPHFVGQPSDVAVFWGYALHPDRIGNFVAKPMSECGGAEILRELCGHLNFDYAVFRRATCIPCRMPYITSMFMPRLRSDRPLPVPPTSKNLAFISQFVEIPDEVVFTVEHSVRAAQTAVYQLLGIERPIPPITRHDRSIGVLIHSLEKAFA

SEQ ID NO: 12422 - protein, 122 aa, BradyrhizobiumColbertium
MRLSRTILALVTALSVAMLPMAGAANSGSMAHEVASQEMAVVSSDVPEAMDDCCADQIKANPCDQPSDQCSLAFCASQSGTIADVTSFPFDFPIVTGNPLPIPVEQVVALHSGSPPFRPPRV

SEQ ID NO: 12423 - protein, 86 aa, BradyrhizobiumColbertium
MAVRLTNRATGKPVPDAVIIRTRVDMAPDGMAEMESPVSPLPAKEPGVYAFKTDLPMAGRYQLSVAAKVQGEAETVIGKVVIKASK

SEQ ID NO: 12424 - protein, 476 aa, BradyrhizobiumColbertium
MNKLVITLAASVGLGAAGFWLSQQPHMRAQTYVASAIAAERSVLYYRDPSSAPFWSAGPKKDSQGRDYLPVYDDEEPSLDQPAPKPQAAQAGRKILYYRNPMGLPDTSPVPKTDPMGMAYVPVYEGDDVDDGLVKLSTGKIQRTGVKSEPAERRAIRTLVRAPGTIQLDERRVSVIAMRAESFLQKVADVTTGTRVAKGEHLMEVYSPAVASAAAQYISTIDSPVTNGIGSYGRGSRQRLTNLDVPEPAIVAMEKSRTVPVTIQWSAPRDGILLERNAIEGMRAQPGDVLFRIADISVVWALADVAERDLGSITVGQPVAVRARSFPGREFGGKISVIYPQVNRETRTARVRIELANADLALLPDMYVDAEIGTATGTAAVAVPDSSVLDTGSRQAVFIDKGEGRFEPRTVKLGRRGDGYVEVKEGVSEGEAIVTSANFLIDSESNLKAALKGFAEAATPEATGASSGAKHVGGHQ

SEQ ID NO: 12425 - protein, 276 aa, BradyrhizobiumColbertium
MQRLVHLGDQAVNGEARAPLLLRLEIDDSLEHFGRCRIGRGRRASCLAVDRGDFRKRADDPVLHLHQFGGLGHRDARQRRRHVKQRAFVQRRHEFCAELSCGPDRHRQDPDRKQDHEHLRAQHRLDDRTVDPDQVAVDRVLMLRNDPSPNEDHHQRRDQRHRQQCGGGHGEGLGEGQRAEQPSLLRFQGEDRHERYGDDQETEEQRRPHLRCRVDQDLNARLAWPRPLQMLVGVLDHDNGRIDHRADRDRDAAEAHDVGAQAQKLHRAERHQYPDR

SEQ ID NO: 12426 - protein, 439 aa, BradyrhizobiumColbertium
MNRELDLAGFELHPQRGAVLAEVHARPFTRLVAPVTVLRFAFLNEGEGAAADRQKFVLFCTSHGQATPDAGAKHHQVTIDGIQLRWEQHSEFSTFTWILSNPGASPRGFGEIGDEAAALIRSLPQSGQLLVAVKLEVEPTSVALERAQQLFERGSLAIAAVRSGPAVVASDFRTDEQGFVRILVCNDGLSPGRLGALVQRVLEIETYRTLALLGLPAALELAPSVDHIGRRLVEVLEEMQRAEGLKLNNHLLGELTALAASLERGAAGSSFRFGASRAYYDIVQARLAVIEGGEVAGYPTWSSFLARRMAPAMRTCATMEDRQADLSIKLARAADLLRTRVDVELEEQNRDLLRSMNERTRLQLRLQSTVEGLSVAAIGYYVVSLFGYVAKGAHDGGLHVEPSLATAIFVPVAVAVIWIVTRNIRRRHLKHDEMPGVHD

SEQ ID NO: 12427 - protein, 338 aa, BradyrhizobiumColbertium
MRPSDGMTNVLWLQGASCGGCTMSILESGASGWFDELRQFGVNLLWHPSVSEETGEEALEVLQSVLDGRVRLDLLLLEGSVARGPHDTGRFNMLAGTNRSVYSWMLDLAPRADYVIAVGSCAAYGGVPAAGSNPTDAVGLQFEGSESGGALGAAFRSRLGLPVINVAGCAPHPGWMMETILALTTKDLAATDLDGYGRPKFIANHLAHHGCSRNEFYEFKASAETMSERGCLMEHLGCKATQAVGDCNQRSWNGGGSCTKGGYACIACTSPGFEGAQNFLETAKLAGIPVGLPTDMPKAWFVALAALSKSATPRRVGWNATADHVVVPPGGSAAKRSS

SEQ ID NO: 12428 - protein, 479 aa, BradyrhizobiumColbertium
MTRITIGPFNRVEGDLEVRLDVESGRVVRAEVTAPLYRGFEQILEGRPPLDALALAPRICGICSVSQSVAAAAALRDAMAIEAAPNGLLATNIAHAAENAADHLTHFYIFFMPDFAREAYAAHDWHEATRERFAATRGSAARDALPARARLLEIMGIIAGKWPHSLAFQPGGTTRAIDLGERVRLLSIATAFRSFLERVVFADALENVLAIATADELDRWRDGRGGDFAHFLRLADRLALTGLGKGSGLMMSYGAYHGPDGELFPRGLFGPRAAIEPLPLAQITEDVSHAWMRESSADPAHSRTVPDPDKPAGYSWCKAPRLSGQPIEVGAIARQTVAGQALITDLVSISGTNVRNRVIARLIETARIALAIEQWTRALRLSEPFCHGGREVPNGSYVGLVEAARGSLGHWMAVRDGKIERYQIIAPTTWNFSPRDSFDIGGPLEQALVGTDVGDAGARAVAIQHIVRSFDPCMVCTAH

SEQ ID NO: 12429 - protein, 363 aa, BradyrhizobiumColbertium
MGAATETFYSVIRRQGITRRSFHKFCSLTATSLGLGPLAASRIANALETKPRVPVIWMHGLECTCCSESFIRSAHPLVKDAVLSMISLDYDDTIMAAAGHQAEAILEETRAKHKGQYILAVEGNPPLNEGGMFCIDGGKPFVEKLKMMAEDAMAIIAWGACASWGCVQAAKPNPTQATPIDKVITNKPIIKVPGCPPIAEVMTGVVTFITTFGKLPELDRQGRPKMFYSQRIHDKCYRRPHFDAGQFVEEWDDEAARKGYCLYKMGCKGPTTYNACSTVRWNGGVSFPIQSGHGCIGCSEDGFWDKGSFYDRLTSIKQFGIEKNADQIGMVAAGAVGAAVAAHAAVTAVKRLATKREDADHNS

SEQ ID NO: 12430 - protein, 596 aa, BradyrhizobiumColbertium
MGIQTPNGFNLDNSGKRIVVDPVTRIEGHMRVEVNVDADNVIRNAVSTGTMWRGIEVILKNRDPRDAWAFTERICGVCTGTHALTSVRAVENALGITIPENANSIRNLMQLALQVHDHVVHFYHLHALDWVDVVSALSADPRATSTLAQSISSWPLSSPGYFKDLQTRLKKFVESGQLGPFKNGYWGSKAYKLPPEANLMAVAHYLEALDFQKEIVKIHTVFGGKNPHPNWLVGGVPCPINVDGTGAVGAINMERLNLISSIIDQLIQFNEQVYLPDVAAIGSFYKDWLYGGGLSGQSVLSYGDVPEHANDYSDKSLKLPRGAIINGNLSEVFPVDHANPNEIQEFVVHSWYKYPDETKGLHPWDGITEPNYVLGANAKGTKTAIEQLDEGGKYSWIKAPRWKGHAMEVGPLARWVVGYAQNKAEFKDPVDKFLKDLNLPTSALFSTLGRTAARALESVWAGRQMRYFQDKLIANIKAGDSSTANVDKWKPESWPKEAKGVGFTEAPRGALAHWIKIKDTKIDNYQCVVPTTWNGSPRDPKGNIGAFEASLLNTPMVNPEQPLEILRTIHSFDPCLACSTHVMSPDGQELAKIKVR

SEQ ID NO: 12431 - protein, 247 aa, BradyrhizobiumColbertium
MMDAIAPASDGRPDLAAIAADASGERAVGRPTVYVYEAPVRICHWVNAFSILVLMVTGYFIGSPLPTVAGEASDHFVMGYIRFAHFAAGQVLAVFFLTRILWAFVGNHHSRQIFYIPVHRKQFWKEVLHEIRWYAFLEREPKMYVGHNPLAQTAMFTGFTLFVAFMIVTGFALYSEGMGIDSWQYKLFGWVFAIWPNSQDVHTWHHLGMWALVVFVTVHIYAAIREDIMSRQSIISSMISGERQFRD

SEQ ID NO: 12432 - protein, 192 aa, BradyrhizobiumColbertium
MPTSSQDNRILVLGIGNILWADEGFGVRTVEEFHRRYDVPDNVTILDGGTQGLYLVNYLEEADRLIVFDAIDYGLAPGQLKLVRDDEVPRFTGAKKMSLHQTGFQEVISAADLLGRCPKHLVLIGCQPLDLEDWGGPLTAPVRGQIAPAIDLACQILAEWGGEVRPRREPLPASERLLGNDIDHLNYEMRPA

SEQ ID NO: 12433 - protein, 98 aa, BradyrhizobiumColbertium
MCLGLPMTIVETDGMSALCEFRGEQRRVSLLLLSSPPVGAHVLVYIDTAIRLLDEEEARLIGAAIDGLGAALDGEDCDRFFADLIGREPQLPAHLRSE

SEQ ID NO: 12434 - protein, 144 aa, BradyrhizobiumColbertium
MGKQDLARHGLPEVDAATIDPFLGGADGAGAIAVLLSAGDPNRFPEAIDVAVVLPELIGAFGDRLRGAVIARDAERALGERFGIRVQPTLVFVAKGETLGLIAKIQDWSVYIDRITKLIDRPRGQNAAVAVTIVPQHRARGVTL

SEQ ID NO: 12435 - protein, 287 aa, BradyrhizobiumColbertium
MKVGFWDAPDGAEQPVSVFPIGEESLNASHGSLTAAGALAKLATLDSAELAKSCPNAVALLSKIAAAVAAQKADAPTQLFRLANLNELESKLVADVLGEGEVGGVVALPDGSLAQIQESVLAGIWRVRLETDATSEYLEIGAIPEIVRRAAADLTSADFEIGQAPEGAMNVLPVLAEIRERALAWRPGIRSQIINFTLLPMSPVDMSFLQDTIRNGPIQLVSRGYGTCRVLSTGIRNVWSVQFFNAMDTIILDTLEVGGVPTVALAADEDFEDSAERLQEIIEAYFK

SEQ ID NO: 12436 - protein, 69 aa, BradyrhizobiumColbertium
MTAFENFGVRQDVAEATRLECGICWTVYDPADGDEVAQIAPGTPFAALPDEWHCPNCDAPKSKFMAIES

SEQ ID NO: 12437 - protein, 168 aa, BradyrhizobiumColbertium
MTASAPRPDVDAVAWGELLAESYREIGERAMRDLPIYNEALGVEAVGFRRFNGTIVGVMVTPWFMNVVMPPSAVRDGPAATMRIRFPAGDIEFTLSEVGQVGRIASCSLFSPMFQFADMAAARATAKAALAELMLPADSEEAVRRREPATTPIDRRNFLRGALTERRG

SEQ ID NO: 12438 - protein, 362 aa, BradyrhizobiumColbertium
MSLAFRNEIDITVWLAGAEIADVAIQPRSRPPLTRLFAGKPAQSLLPVLPRLFSLCSVAHQMAFLSAVEAAQGQEVTEATARRRVTPVVVERLTELLRGLFVGPFALNGTSAAAVRAVLQASTVLGSASEAVSDPLRGEVLAQIKAALAALGMTGEGQALAPGSALAAYVERGGGEGLSPPAVEQSFLTAADDLEVVTRLLADGATYSDAPELCGRIPETGVWARRARREPVPPAAGTAARLKARIAEISRLCAWLEGVDRDAGDGAIASYRLGAGKGAAAVECARGRLYHAVSLDDGDRIVRFEFLAPTEWNFHARGPLVRSLKGAMLSAGRRGQDTVRALIGSFDPCVGFNLSFRETGHA

SEQ ID NO: 12439 - protein, 113 aa, BradyrhizobiumColbertium
MHEMALCEGIIGIVEEEARKRCFAKVNVVCLEIGALSHVAPEAMKFCFEAVAAQTIARGARLEIVETPGRAWCMACSKSVEIKQRYEPCPSCGGYQLQVTGGEEMRVRELEVD

SEQ ID NO: 12440 - protein, 229 aa, BradyrhizobiumColbertium
MSSERIIQVERDILGKNDRLAAENRARFRADEVLVFNLVSSPGAGKTSLLVRAVSELKESFPIGVIEGDQQTSNDAERIRATGVPAIQVNTGKGCHLDAAMVGQAYDRLPWLNGGILFIENVGNLVCPAAFDLGEACKIVVFSTTEGEDKPLKYPDMFAAASLMLINKIDLAPVLDFDLAKTVEYARRVNPGIEVMTVSARTGEGFATFHAWIRKRARATKPAAMSAAE

SEQ ID NO: 12441 - protein, 751 aa, BradyrhizobiumColbertium
MGGEVTALGGRRLRLHVRGAVQGVGFRPYVYGLAARYRLGGFVANDPHGVVIEVEGERAADFVTALPLEKPPLARIDEISVHPVGAVASTEFCIRASEQGRVSTRIVADAATCKECLRELFDPTSRFYRYPFINCTHCGPRYTIAERLPYDRPTTAMKGFAMCRACADDYVDPNSRRFHAEAIACAQCGPRLSHEIADIADAIAGGSIVAIKGLGGYQLLCDARDEDVVRRLRQRKQRDRKPFAVMVGSVDAVAEIAEADITELALLQTSPRPIVLMTSRHRLAPAIAPGLSRLGVVLPVAPLHHLILDALNSTHPRTGEAWAIVATSANPGGEPLLIDNRQAERRLADIADLIVTHDRDIVSRADDSVAAVVAGRTQFIRRARGYVPEPVRLACSVPAILAVGGALKSTVTITRGNEAFVSQHIGDLDTAEGIGFFEETVHHLLSTLDVEPVVVAHDLHPNMASTRFAEAMGKPLIAVQHHHAHAGSVMAEHGVAGPALALVLDGFGRGSDGGSWGGELLASDGARVRRLGHLAPMKMPGGDRAAREPWRMGASALHGLGRGDAIATRFCAQPQAARLSAMLDQPGVPTTTSAGRMFDAAAGLLGLCEIQSYEGEAAMKLEAHVRTPRIAKDGWIIESGVVSLSPLFARLAAGTIDPVEGAELFHGTLAAACVDWISRAAGATGITTVALSGGCFLNRVLSVEIERGCKAIGLSPLLPRQMPPNDGGLSLGQAWIAALTFLERQGLEGTV

SEQ ID NO: 12442 - protein, 78 aa, BradyrhizobiumColbertium
MCLAIPAEVTKILPDEMAIVSIDGVSKEISVALIEDLAVGDYVIIHVGYALTKIDPDEARRTLELLCELSAEAHGAAS

SEQ ID NO: 12443 - protein, 380 aa, BradyrhizobiumColbertium
MKYADEFRDKAIALGLAKTIEAETDPGRPYRFMEFCGGHTHAISRYGLEDLLPKNVRMIHGPGCPVCVLPAGRIDMAIRLAERPEVILCVYGDLMRVPGSQGASLLKAKARGADIRMVYSTIDAVRIAEENAGSEIVFFAIGFETTTPPTAVMIRLAEKKQLENFSVFCNHVLTPPAMQNILESPDIRKIGRIEIDGFVGPAHVSTIIGTAPYEFFAEEFGKPVVIAGFEPLDMMQAILMLVRQVNENRHEVENQYSRAVTRDGNLRAKEEVSDIFELRDQFEWRGLGQVPYSGLKLKRTYAKYDAEVRFGMSELRVDDNPACECGAILRGVKKPVDCKLFGTVCTPETPMGSCMVSSEGACAAHWTYGRFRDHQQRRAS

SEQ ID NO: 12444 - protein, 346 aa, BradyrhizobiumColbertium
MRAYQRKLDIKNGCVDLSHGSGGRAMAQLISGLFHEAFGNEWLARGNDQSAFDVGDGRMVMTTDGYVVSPLFFPGGDIGSLAVHGTVNDIAMAGARPLYLSASFIIEEGFRFCDLKTIAESMGEAARVAGVHIITGDTKVVERGKADGLFISTAGVGVVPDGLDLSAENARVGDRVLISGTLGDHGVAIMSKRQNLTFETEIVSDSAPLNDLVAEMVEAGGRGIRLMRDPTRGGLAATLNEIAHQSGLGFHLIEEQIPVKPGVAAACELLGLDPLHVANEGKLVAIVAPDVAGAVLAAMRGHRLGRDAADIGEAVADDHHFVQMATSFGGGRIVDWLSGEQLPRIC

SEQ ID NO: 12445 - protein, 566 aa, BradyrhizobiumColbertium
MRILLLSHSFNSLTQRLHVELRERGHEISVELDIHPDVTRESVALYQPDLVIAPFLKRAIPEDVWRNVRCLVVHPGPPGDRGPAALDWAILEGATEWGVTVLQADREFDAGPVWTFRGFPMRRATKSSIYRREVTTGAVEAVLEAIDAIEAGRPTPQPMHVGDPRIRVRGPCRRSDRAIDWQHDTTETVLRKINSADGTPGLVDSLFLQDVRLFDAHEAREISGVPGTVVAQCDGALARATVDGAIWIGHVRQLAPKSLKRSAAKVFAEQAAQLPRRPGCGYAPIQYRERGEVGELQFSFYNGAMATGDCEALLDAYRAALARPTRALLLTGGCDYWSNGIHLAEIEAADSAADESWRNINAIDDLARAIIETTDRLVISVIRGNAGAGGVFLSLAADEVWASDQVVLNPHYKDMGNLFGSEYWTYLLPRRAGAENSERITQCRLPVGVAEAQRLGIVDRVLVSGGCGRESLEELAAAAASDRGFAARLADKKRRRAADEAEKSLQAYRDDELRRMRLNFYGFDPSYHVARYNFIHKVPKSRTPLTIAGHRSRRAAGRPRGMAVPS

SEQ ID NO: 12446 - protein, 484 aa, BradyrhizobiumColbertium
MSIQGTILVVDDEVRSQEALRRVLRDDFEVLCAGNAADAEKLLEGEIVHAILCDQRMPHESGVSFLKRVRELWPDPVRMIISGYSDSEDIIAGLNEAGIYQYITKPWQPDRLVDIVKEAVQLYRLQKETETAGVDVKATPGHIKKVVSVKRGVAKQLYDFDRIVHSPDSPMHKVIELGKRAADYDISVLITGESGTGKELLARAIHYGSARAGKAFVVENCGALPDELLESELFGCKKGAFTGAYQDRIGLFEVADGGTIFLDEIGETSPAFQVKLLRVLQESEIRPLGAQRVRKVDVRVVAATNRDLEAEVDAGRFRRDLYYRLAAFPVHMPALRERPMDIPLIAQGVLSSVKTSFNRPGLRFAAAALDAFASYHWPGNVRELQNEIQRMAVLADADELQAPSLLGRRNGRQPGAAIHGRLNGSATLKDKVEDLEKSVIIGCLERYEGNISRVASELGLSRVGLRNKLSRYDLRKNGKGDASS

SEQ ID NO: 12447 - protein, 455 aa, BradyrhizobiumColbertium
MAKATHPPDAGETEPLLKLIAGRGAIELDHEREGAWIEVIRKMDEVYSDLLRYEVDLEHKNAELEEAQAFVTNVIESVSDILIVCDARGLVQQVNSAFQHTLGCSAADIVGKNIADVIDAPDKAKLVPLLKPRSASDVVDGELRFSGAGGRSDLFAINGSPRHDHRGRFIGVVLTGRPIGELRRAYEELHKAHHELQRAQRQLVEQEKMASLGRLVAGVAHELNNPISFVYGNVHTLMRYRTAIVTYLDAVHGKSGEGDLSAQRRSLRIDEILEDFGPLIEGTMEGAIRISEIVKNLRRLSFSKLGEVERVDIERLINTAVLWAVRTKQVRIDLQIEIEPGLWISGNEGQLHQVIVNLVENAIDAMRGTESPRLVVSAARQGDEILFRISDNGPGIDQDHIGHIFEPFFTTKRVGEGTGLGLWISYGIVREHGGELLAGHEPGGGATFSFALPAA

SEQ ID NO: 12448 - protein, 354 aa, BradyrhizobiumColbertium
MTLQTRIHASRRSPTALVAGGAGFIGSHLCDALLQRGNTVICVDNLFTGTTDNIRPLLNHPNFRFIEHDVRDPIEIEGDIDRIYSLACPASPRHYQTDPVGTMKTCVLGSINLLELARQKGARILQASTSEVYGDPEVHPQPESYLGNVNPIGPRACYDEGKRAAETLMFDYHRQHGTEIKVARIFNTYGPRMLENDGRVVSNFIVQALRGEPITIYGQGTQTRSFCFVDDLVRGLQLLMESPASVTGPCNLGNPHEVTIEAIARKVLECTESTSPLRFEALPKDDPKRRKPVIDTAEKILGWRPRVALKDGLQATIAYFALRIAAESPALVPAIAQRKIRHAARDRLTMSQQS

SEQ ID NO: 12449 - protein, 274 aa, BradyrhizobiumColbertium
MTTHARGVTAFYDIDTPVTLARLEQGLDYLSPAMIPRFDLYLSFTGGPVPGMIEQSYGSPLARVLYCSADPEVYTPKQAQPEWALGYLGTYSEDRQPVLDELLLAPARTLASEQFVVAGAQYPANIAWPANVSRIEHLSPKQHPAFYAAQRFTLNATRADMKALGFSPSVRLFEAAACGTPVISDRWAGIETIFAPSKEILLAANPRDVVQILRDMPEEQRRTIARNARRRVLADHTPDHRARQLETYYAEASARRRRKAAPLPVVRPMQVAQL

SEQ ID NO: 12450 - protein, 362 aa, BradyrhizobiumColbertium
MNICFFGSSLVSSYWNGAATYYRGMLKEIAALGHDVTFYEPDAFERQAHRDIGDPEWARVVVYPATPDGWRHSLDAAAKSADMLVKASGVGVFDLELENAVAELPTRLTRIYWDVDAPATLEAMEIDAQHHLRRAIPSYDMVLTYGGGDGVVSAYRSMGARDCVPIYNALDPATHFPAPSNPRFACDLSLLANRLPDREKRVEHFFLDVARRLPERSFVLGGSGWDDKDAPGNLRKVGHVGTADHNAFFGSGLATLNVNRDSMARYGFSPPTRVFEAIGAGACLITDQWAGIDHFLEPDREVLVAADGAAVAEHLAALDPERARSIARRARARILSQHTYRQRAHQFNDLFVARSSRIEAAE

SEQ ID NO: 12451 - protein, 376 aa, BradyrhizobiumColbertium
MKCVLFYHAFTSCWNNGNAHFLRGYARELHALGHEVVVFEPIDGWSRLNAMREGGSHAMEEIPTLFAGIDIRRYDASLDLERALDGADLVIVHEWNPPDLIAQIGRRRAQGAPFTLLFHDTHHRAVSAPEELAQFDLDGFDGVLAFGEVLRQIYLKLGWADRAFTWHEAADVALYHPLPQVERADDLVWIGNWGDGERSAELNEFLVGPVAELKLRASLHGVRYSDDALLTIRSAGIRYGGWLPAHWVPLAFAGAHTTIHVPRGPYVRLLPGIPTIRVFEALACGIPLVSAPWSDAEGLFPDGAYLSVADGAQMTRALRSLRGDREMSAAMVNTGLETIRERHTCRHRAEQLVGIVADIRGSGLQSQSQHDIGAVA

SEQ ID NO: 12452 - protein, 369 aa, BradyrhizobiumColbertium
MSPGADIRIMMTTDTVGGVWTYSCALAGSLAAAGADVTLVTLGPRARIDQRQMLRGTRVNLVETDLALEWQDPEGQNVSEARRVLTKLEARLKPGIVHLNSFREATFAWHAPTVLVAHSCVNSWALACHDTSWLGEPRWRRYSERVAAALDAAQAWVCPSQAFHEDMTAIYSPRSRGAVIWNGITPRDPTGRKQDLIFSAGRLWDRAKNVEALAAAAPGLDWPVEIAGPVDARLSTAVTRLGELPHEAMAARLQHAAIFVSPALYEPFGLAVLEAAAAGCALVLSDIPTFRELWREAALFFDPTDRDALHQTLADLCADDAARARLQRAAYEQSLTYSLMRMTSAYLGLYQDLIASSGKTAPSQIEVRA

SEQ ID NO: 12453 - protein, 428 aa, BradyrhizobiumColbertium
MTRVALINPNWDFTGSIYFGCRSPHLPLELGISERHLKAAGHKTLLLDAHMFDLSLHEIEAELRAFRPDQIVITTAPTYLFWRCAPPELRVPQQLALAVRDLAPTLIAVGPHGSTTPKAAFKKLGVDIVVMGECEGSLLRLANGERDFPGLCFLDGRSLRVNGGPQAVAFSDQPALHWPDEMIRRHHHHHHRFEAEPIAPGAEVEASRGCPYNCTFCAKENFRNAYRKRPPAVVLDEIDRLRTHGIEYVYFIDEIFLPNRELLEGLTARGLKFGVQTRIDLWKPDMLALLGRAGCVSIEAGIESLTVEGRAALAKNCKMTTDQLADRLVEARRHVPFVQANLIEVPEDDDPIVQRWRRTMQDAGVWANDPVPLYPYPGSPDYRKLWGEPDDFAWERAHRHYLAMFDQFSDVQNDRPAPLDSLELQVAS

SEQ ID NO: 12454 - protein, 345 aa, BradyrhizobiumColbertium
MLVTGGCGFIGCNLADRLADRGDRVLVLDNLARAGVRENAQWLKSRHGDRITIAVADIRDPIPVIDAVREARAVLHLAAQVAVTDSVSDPAADFEINARGTLNVLEAVRLHNSAAPVIFASTNKVYGRLIEDSEIALRGRRYTPVSDLLSGGISESAPLDFYSPYGCSKGTADQYVHDYSRVFGLQTAVMRMSCIYGPRQFGTEDQGWIAHFLLSAIRGNPLTIYGDGKQVRDALHVSDAVNAWLAALDHIALARGRVFNLGGGPANAVSLLELIDRITELTGRTVTYRFADWRPGDQPWYVTDTQALTAALGWTPQVSLAEGLRSLHTWLDSRFGSQDRSEALA

SEQ ID NO: 12455 - protein, 370 aa, BradyrhizobiumColbertium
MTRVLITGGAGFIGSHTADVLLAAGYDVRLLDNLSPQVHGGNRQRPAYLADDAELVVGDVTDALAVEQALRGADMVLHLASAVGVGQSMYDIEPYVRTNELGTAVLLQALAKRPAARLVVASSMSIYGEGLYRDGSGTVVACDERPIEQLRQGEWELRDSAGDPLDPIPTPETKQPSLSSIYALNKYAQERMCLITGKAYGFPTVGLRFFNVFGPRQALSNPYTGVLAIFAARLLNGRPPLVFEDGMQRRDFVHVHDVARACRMALEADHSQDVFNVGSGQSRTILSVAEDLAQVMGRRDIAPEITRKYRAGDIRHCFADIGKARDLLGFEPHVAFKDGLEELAEYLADQIADDQAERATRELVQRGLVA

SEQ ID NO: 12456 - protein, 401 aa, BradyrhizobiumColbertium
MRALILVMDSVGIGAAPDADNYGDEGADTVGHIADACMAGDGDSTQREGPLRLPNLVALGLGQACRLATGRVPPGLDGRLEHARYGCASEISRGKDTPSGHWEIAGVPVTFEWGYFPKVRPCFPRDLVENLCERAGLPGILGDCHASGTDIIAEFGERHMRSGEPICYTSADSVFQIAAHEETFGLDRLYELCTVARRLVDPLNIGRVIARPFIGSNAHNFKRTSHRRDFAVPPPERTILDLAESCGRDIVTIGKIDDIFAHRGTGRNLRGDGNAELFDAMLDGLASLAEGGLLFANFVDFDTLYGHRRDVAGYAAALEAFDARLPELLGRLRDDDLLIITADHGCDPTWSGTDHTREQVPILAWTAQSIAPIGQRAGFADIGASVARHLDLPAPAHGAHF

SEQ ID NO: 12457 - protein, 315 aa, BradyrhizobiumColbertium
MIEAAKIWNEPNNKSHWDILIDPDWAMFADLALAAGKAIRSAHPTLPRVLGGISPIDPSFMRNMQARGVLDHVDAVAVHGFPLDWNLWQIGEWPAKIDEIKAVTSLPVWVTEVGVSSFGAEEVQAWGLSRTAELLIGRAPRIHWYSLYDLPSAWEATTRHKEAEGSSYYRHFHMGLLREDGTPKAAAELFGQYAADMGLCQWFHYEDHRLEDAVRWMRRLGVRHLRTGLSWADSFRPNALDWFDRQMDALAEFEVTVTFCFTPEHRGLEPHHTSPPHDVNEFAEFCAQMVDRYCAKTGLSSSLAASLLREPTCVP

SEQ ID NO: 12458 - protein, 255 aa, BradyrhizobiumColbertium
MTRGALSREEIRQRVDALGPWFHNLDLKGVPTAPSHFLGDYPNVKWQRFSGIIPDRLEGKTVLDIGCNAGFYAMEMKRRGAERVLGLDTDEEYLAQARFAAEVNGLRIEFRRMSAYDVGQLREKFDLVIFMGVLYHLRHPLLALDLIHEHVAGDLLLFQSMQRGDGRIDTIKENYDFWTTDQFDSSGYPKLHFIEHKYADDPTNWWVPNRACVEAMLRSAGFAIAAHPEEEVYLCKRTARPQADGPVYPSREANR

SEQ ID NO: 12459 - protein, 266 aa, BradyrhizobiumColbertium
MWGIVPAAGRGSRIQPLAFSKELLPVGSRRDDGTDRPCAVSEYLLERLILGGADKICFVISPGKSDILEYFGDHYGTAELAYVVQPDASGLCDAVFRARTVVGQHEDVMVGLPDTVWFPKAALQSLPEADLSFLLFPVEHPEFFDAVVLDGDRVSEIQVKQPNATSRWIWGAFRMSARGFRELQALWNARERRDEYFGTLVNAYLSAGGRGIGVKAGESYVDVGTIDGYRTAMALLAETAEGRSKLRARASSEGVRPVPANNGAIA

SEQ ID NO: 12460 - protein, 367 aa, BradyrhizobiumColbertium
MRIVIFGLTISSSWGNGHATLWRGLCKHLARSGHSVVFFERDVPYYAGARDLYELPGGELRLYSSWDDAWQNASADIREADVAIVTSYCPDAIAATDLILTEGRAVPVFYDLDTPVTLAKLRAGEAVPYIGPRGLSDFNLVLSFTGGPRITEEFRDRLGARDTRPLYGHVDTDVHRPVAPQPHYRADLSYLGTYSEDRQRTLETLFVAPARARRDLRFLIGGAQYPNDFPWSPNIYFVRHLPPSEHAPFFASSRLTLNVTRRAMAEMGWCPSGRLFEAAACGAPLVSDDWPGIADFFAPGEDILIASDEQDVLAALAMTDAELRRMSLRAYERTMDQHTSDKRARELIVLLEQMASKRVCRQQPEEA

SEQ ID NO: 12461 - protein, 198 aa, BradyrhizobiumColbertium
MARLIHLVRHGHHALLGRFLCGRMKGIELDDIGCGEMARCAEAVAPRPTLIQSSPQRRCMQSACILAAHFGLPVEIVPALDELDYGEWTGRSFDDLAPDPRWSRWNRRRSTSRPPGGESMRSLQNRTVAHLEQLRSDGSPDIVVAVSHAEPIRAALLYYSRMPLDDFLSIEIDSASISTLRADGGGMKIIGINQRVPA

SEQ ID NO: 12462 - protein, 366 aa, BradyrhizobiumColbertium
MHSRLQDRRRVRVGLVGVGNCASSFVQGLTYYRNAKSNEPVPGLMNADLGGYHISDIQIASAFDVNASKVGRDVADAIFAPPNNTHRFSDVAPTGVIVQRGPVLDGIGHYLADDIPIADVPEADVSEVLAMSRTDVLVSYLPVGSQRASEWYAARAIEAGCGYVNCIPVFIASNPEWRRRFEEAGLPIVGDDIKSQVGATILHRVLANLFRERGVRLDRTYQLNVGGNTDFKNMLERERLASKKISKTQAVTSQFDVPMEPDNIHVGPSDHVPWLTDRKLAFIRLEGTTFGGVPLSAEVKLEVWDSPNSAGVVIDAVRCAKLAMDRGQAGALTGPSSYFMKSPPQQFTDEEAGRRTRAFIDDKAYA

SEQ ID NO: 12463 - protein, 94 aa, BradyrhizobiumColbertium
MTKAENSEAHQTTDHGVIRKWAEERGGKPATVKATEEDGHAGILRIDFDPPDEGLDRISWDEFFDKFDEAGIAFLHQDKTKDGKLSRFHKFVRH

SEQ ID NO: 12464 - protein, 306 aa, BradyrhizobiumColbertium
MASDWVQAIRAGDFARAWAINDRDLLEVTPPPKHTGPRHLQRIWRGEDLKNKHVLVRCYHGLGDTIQFLRFIRPLRQIARSVTLWCQPELLPLVESAPGIDRAFPLHDGVPEVDFEVDIEIMEVPHAIRARRDQVEVGASYLALPPTVVPPLREEQNLAVGLVWKVGEWDKRREVPAALLSGLAVPGVTLYSVQRGASPEELAAIGALEIRTPDIATLGHRLRQLDLLVCVDTMVAHLAGALGCETWVLLHAECDWRWPQSGAHSFWYPSLRLFHQKKPGDWGTVTSEVRCALRSRLEVGQARVAR

SEQ ID NO: 12465 - protein, 589 aa, BradyrhizobiumColbertium
MQDSDTTSSMPSLSRVTDDIWIVDDKPISAAGLQLPVRMTVIRLSNGDLVLHSPVRHSPALRQELERLGTIKYLLAPNIAHWMFVPGWQRELPQAATFAARGLGARKQVRAAGLRIDRELGDTTPEEWTAELETVSVNAPMFSEVELFDRRSRTLVLTDLVQNLDAHRLSASNEAAANLLGIAKPDGRAPVYLRLLLRLGGGAARAAAERLVRLAPERVIFAHGDWFETQGTARLRRSLRWLLPEGVLGSEQGQMIGTRVVITGASSGIGRAAALAFARNGASVVLAARRGEVLMRLAGECEALGARALAVPTDVTDAQAVERLARTAQDAFGGIDVWINNAGTGVFGAYQDADIALHRRTIEVNLLGTMHGAYAVLPIFLRQNRGVLINNISLGGWAPTPFAAAYTASKFGLRGFTASLRQELRTHPDIHVCGVFPAIVDTPGFVHGANTSGRRLDPGPLLYQSEDVAETFVRLVRAPRDEVAVGWPARAGQLAYAVAPGITENVLGAVFRWLLSRARPAPVSEGTLIEAGPQGTSLDGGWLAGKKMLPAGVVSAGLVVLGVAACLALAASTAGRASASRARLRRRRA

SEQ ID NO: 12466 - protein, 61 aa, BradyrhizobiumColbertium
MQDVQWHPTDFLTILVRDEDIEVTPLELGPLPEQALCNLLGDIQGVDVIRQLGTSFVYNGF

SEQ ID NO: 12467 - protein, 156 aa, BradyrhizobiumColbertium
MTLRIGVIADTHGLLRPEAVHCLAGVSHIIHAGDIGSQAVMDGLCRIAPVTAIRGNVDRDAWAEAFPETLTLGLGGRRFYVLHDLKQLSIDPAELGIDVVVSGHSHRVRIETAEDVLYLNPGSAGKRRFALPITLATLDIERSGPLRPVIHDLDRT

SEQ ID NO: 12468 - protein, 57 aa, BradyrhizobiumColbertium
MSKMPPVPEEQRSNKGPGADPATEVEERVPGRENFDTQGRHGNIKQNTTNQGYQQDR

SEQ ID NO: 12469 - protein, 53 aa, BradyrhizobiumColbertium
MGRPGNPAGGVNIGRIDGTVTPGPSLDGDDQIRSETSRDSDVGRKIRSICKGC

SEQ ID NO: 12470 - protein, 169 aa, BradyrhizobiumColbertium
MHDKRSDSFPTSAGVLLGLGLGGFFDGIVFHQLLQWHHMVSGWYPLNSIENITLNTTWDGIFHSATYVLLLAGLYLMWQRARGSELRWSSWQCLGAILLGWGIFNLVEGVIDHQILKLHRVNETVPDEQRIFWDIGFLLWGAAMVIMGAAMARAGKREGADAGGSLQAR

SEQ ID NO: 12471 - protein, 54 aa, BradyrhizobiumColbertium
MREAAYRLVRSTPPVLVYTIFLLLLVLATAPALRVFLFGLSVDDLLQLRCFAPA

SEQ ID NO: 12472 - protein, 260 aa, BradyrhizobiumColbertium
MEFRLPKSSRIEQGRLWPKPGGTSLREFHVYRWNPDDGRNPRLDTYFVDQTDCGPMVLDGLIWIKNNIDSTLTFRRSCREGVCGSCSMNIAGQNTLACTKSMNEDIQEGEPLRVLPLPHQPVVKDLVPDLTNFYAQLALIEPWLQTASPTPQKEWRQSHEDRAKLDGLYECILCACCSTSCPSYWWNSERFLGPAALIQAARWINDSRDEATGDRLDMLEDPFRIYRCHTILNCAKACPKGLNPGEAISALRLKMVERKF

SEQ ID NO: 12473 - protein, 145 aa, BradyrhizobiumColbertium
MGKKQFAALPFRLDKSELRVLLITTRRKRRWSVPKGSPMRNKEPHLTAALEAYEEAGLIGVIATRAVGSFKHRKGKGDRKRTLNVAVFPMQVHGRERWWPEKGEREAIWVSPKRAARMVHKAELRRLIARFAAQTEEGASSPLDG

SEQ ID NO: 12474 - protein, 286 aa, BradyrhizobiumColbertium
MEQRTTGLASEQEAPHEVLAAAIKRRRAILFVGAGVSMAVGLPSWQSLIDHLLDDLGLERNVIDGMHGGYQMLAEYYRLKRGAIGPLRSWLDRNWRVDPERIAASELHRMIVQLDFPVIYTTNYDRNLETAFDVLRKPYAKISNAKEIASADPGVTHIIKFHGDFDDDASLVLTETDFLNRLSFNSPLDIRFRADALGSTLLFIGYSMSDPNIRLLLHRIWQIWDGSRHNQDRPKSFVFVTQRNPVQEAVLANWGITTIAPPEGIAADEGVKQLLGEICRHLDHDI

SEQ ID NO: 12475 - protein, 326 aa, BradyrhizobiumColbertium
MAAAERPLTAITFSGGLGLGAYHGGVFEAFTSLTLPLDWVTGSSAGAITAALIAGSPSADRLRNLRSYWHAPSNPAAAPNAGRHTLAWLSSINTRVLGHSGFFHPRLPLPASHFGGLYDLGPTRERLRRLIDFERLNGGDPRITICATDVESGDAVLFDSALERIEMDHILASCGFVPEFAPVRIADRWLGDGGFSLNAPFDPVLENAGPLHLYVIDLFPRDGKVPDGLEAAAERKSDLTFSNQTFQRLGYALEARQLRAELQDLDYDDKVYLLSYRPGREEAGPEKSFDLSETAMAQRWRAGLLDMQHAGRLAPVKNGICSVRRP

SEQ ID NO: 12476 - protein, 76 aa, BradyrhizobiumColbertium
MKHRLLAVALVIAGGFASSNAAFAQDRYCLQGRIWGYPGNCQFASYAQCMATASGTNAYCGINPRYAHARRYRGYR

SEQ ID NO: 12477 - protein, 398 aa, BradyrhizobiumColbertium
MPEQSPSLRNFTINFGPQHPAAHGVLRLVLELDGEVVERVDPHIGLLHRGTEKLIEAKTYLQAIPYFDRLDYVAPLTQEHAFCLAIERLIGIEVPRRGQLIRVLYHEISRILSHLLNVTTQAMDVGALTPPLWGFEEREKLMVFYERASGSRMHANYYRPGGVHQDLPPKLIDDIEAWCDPFLKVVDDLDRLLSLNRIFKGRNVDIGRVTLEQAWAWGFSGVMVRGSGAAWDLRKAQPYDCYAEMDFDVPIGRNGDCYDRYLIRMEEMRQSVRIMKQCIEKLKSPDGGGPVLVQDNKIAPPRRGEMKRSMEALIHHFKLYTEGFHVPAGEIYVAVEAPKGEFGVFLVSDGTNRAYKCKIRSPGFAHLQAMDFLCRGHLLADVSAILGSLDIVFGEVDR

SEQ ID NO: 12478 - protein, 728 aa, BradyrhizobiumColbertium
MRRTRITEGRPFPLGATWDGLGVNFALFSAHATTVELCLFDDAGETELERIELPEYTDEVWHGYLPSARPGTVYGYRVHGPYEPDAGHRFNPNKLVLDPYAKQLVGQLRWGPELFGYQLDHADKDLSYDERDSAPLMQKCRVIDPAFTWGTARKLEVPWERTIVYEMHVKGFTQLHPLVPEAERGTFSGLAHSEVPAYLRSLGITSAELLPIHAFVDDSYLVEKGLRNYWGYNSIAFFAPDPRYLKATSASEFKAMVNQFHAHGIEVILDVVYNHTAEGNELGPTLSFKGIDNASYYRLLPDQKRYYINDTGTGNTVNLSHQRVLQLVADSLRYWATEMRVDGFRFDLATILAREPYGFDEGGGFLDACRQDPVLSSVKLIAEPWDIGPGGYQVGQFPPGWAEWNDKFRDTVRAFWKGDPGTLADFAKRVSGSGDLFNKRGRRPWASVNFVTAHDGFNLNDLVSYNDKHNEANGEDNRDGHSNNHSWNCGVEGPTDDPEIIALRERQKRNLLATMLLSHGTPMLLAGDEFGHTQNGNNNAYAQDNETTWLNWMGITANGRSLREFTRKLIATRKAFPILYRSRFLVGSHNEELDVKDVTWLSPSGEEMTTEQWHDGNAKCFGMLLDGRAQETGVKRRGSDATMLLVYNAHHDVVNFTLPEVADGRSWLGLIDTNRPDAPMAEFEFGHDYAVTARSLVVFGLANDSIATRRLRQGLGALLDVADTPLAD

SEQ ID NO: 12479 - protein, 88 aa, BradyrhizobiumColbertium
MRRSKPQAVRNKLDLADRAQVRLVKKRLGLSDMELAAIVGRIGNSISAISKEAAQRPKVLNKPSEAVIAATVAGEQATTELAAAAPTS

SEQ ID NO: 12480 - protein, 609 aa, BradyrhizobiumColbertium
MDQRLGTAEQGRRHGPQIIDHGVSFNLWAPTARSVELLEIGQPPRRMPRDEHGWYQLLSETARAGTRYQFRINEDLVVPDPASLFQPDDVGAPSEVIDAAALRDPVLYPGRPWAEAVIYELHVGTFSEEGTYAGVEQKLPYLRDLGITAIELMPLNDVPGRHNWGYDGVLLNAPNARYGRPEDLKRLLRAAHALDIMVYLDVVYNHFGPQLNYLHLYAENFFNARHSTGWGPAVNLEGDDGAFVRGFLVENALMWLRDYGFDGLRFDAVHALKDDSERHFLIELAETLRSQLAGRRVHLMLENEANQAHLLERSHGRARYYDAQWGDDFHNALHVLLTGEDEGYYRAFADKPLEHLARSLTEGFAYQGEVFPLHEEPRGEPSAHLPPEATIFFAQNHDQVGNRAFGERLSRLVGAEKLEQALALVLLSPHIPMLFMGEEAAAETPFLFFADWTGEAAELTREGRRKEFSHFKAFATPETRAKIPDPCDERTFRASKLDWTSIDQSPAGARFRALTAQLLMIRREKIVPLIKRGVVSAQRELLGSDSRMGGLDVRWQTGRGDVLQIVANFADRELPVPPLVEGESLWRLHPLEAKALMPGDLIVRIGRKG

SEQ ID NO: 12481 - protein, 41 aa, BradyrhizobiumColbertium
MGLFSESFVFDPRSVHRLSEKIMREQRPKRAMAIYDDIAAL

SEQ ID NO: 12482 - protein, 331 aa, BradyrhizobiumColbertium
MNKHARAHAVRPEIMVEDLMIPSDTVGISLHLRNKRPAALKTFSAERTILIMHGATYSSESLFDTPLCGLSFLDHLAGHGYDVFAVDVRGYGGSTRPPEMDAPPEASEPLVRTEVGVRDLASAVEYILKHRGITRLNLVAMSWGGSVAGAYTAANNDKVVKLALVAPLWLLKGPAPIDAGGRLGGYRNVPVLDFRERWLSAAPEAARSRLIPADGFERWANTSLATDPQGSSQAPPVMRAVNGPILDIREYWAAGKALYSASDIRVPVLLVHAEWDQDVPIASAQDFFLSLKHTPYRRWVEIGEGTHMVLLERNRMQAFDAISQFLGEDYS

SEQ ID NO: 12483 - protein, 311 aa, BradyrhizobiumColbertium
MTQATSTYRLGDATITRIDELRLAAFKFDALYPDGELQALERHRERLEAGSFDAATGTFIQSIHSWLVRTPDHTILIDTATGNDKNRPEIPPLHRLNQPFLARLAAAGVTPEQVNYVLLTHVHADHVGWNTRLVDGRWTPSFPKATYIFSGIEQAYGESLATGTEPTGAARPDPVLGPALRKPADRVYDDSVRPVIDAGLARLIPVDGDEVLEGISFIPTPGHSIDHASIRLVSGGEQALFAGDVMHHPLQVYEPSLNSCFCEFPEAALRSRAFVLEDAAERGATIFTTHFAQSSAGRISRTGERFIWKFV

SEQ ID NO: 12484 - protein, 314 aa, BradyrhizobiumColbertium
MLDAERGRPRPADDSDLAEIDLGLLLALEALLHERNVTRAASRLNIGQPALSARLNRLRQVFADPLFVPATSGRGVVPTARAVELQTELAAVLGKLRRMLEGPAVFDPARSQRTFVVAIHENPAVTLAPGLVARFAAKAERARLALVHPTRDVVDQLERGEIDLLVTGADRAHGELMQRPLFEDSFLSAQRKGHPHGNGLLDLDSFCALDHLLISADGGGFSGLVDDALAALGRSRRVAVSIQTYALAPIILAHSDCICTLPRRFLMRFAHELDLRPPPLDLPPARIVALWHPRNQDDKGHAWLRECLYQAAAA

SEQ ID NO: 12485 - protein, 131 aa, BradyrhizobiumColbertium
MKRAIMILATAALASTLTVGAAAAHGGGGGHGGFGGGSHSFGGGGFGGGHMGFGGGAHFGGIGHAGGFGGGRLGGTHFGIGHVASGGLGFRQHAFHRYGHYRPGYGFYGYYPDCYDWYELHPGVPLPLSCS

SEQ ID NO: 12486 - protein, 81 aa, BradyrhizobiumColbertium
MITSKLLPMGLIAAALIGGPVMAREHHAGMRKSAMESDTVASSAPTYQGGHACMPAPRIGAFATAPWTGNDVPCEPGTGAF

SEQ ID NO: 12487 - protein, 56 aa, BradyrhizobiumColbertium
MVMTMARRILVLLTPLSAGAAAFLNINSVLLASPQHHLVMQRVANRRRSRHRALGA

SEQ ID NO: 12488 - protein, 226 aa, BradyrhizobiumColbertium
MTRILLIEDDTETAEAIVAELAERSFEVHWAPNGVEGLDRARTSHPDAMIVDRMLPGMDGLTVIEALRNDQIKTPVLVLSALGAVDDRVRGLRMGGDDYLTKPFAIVELIARIEALLRRPMDSRETILLAGPLELDLIERTARRGEREIDLLPREFRLLEYMMRRSDQLLTRAMLLEEVWNYKFVPATTNLIDVHMGRLRHKVDAPGEVQLIHNVRGSGFILRARE

SEQ ID NO: 12489 - protein, 521 aa, BradyrhizobiumColbertium
MAMRHIQFIRSNTFLWALAVAATLALFVAGLFAFVYQKLDNYLIARSDRMITTQINFMSDLPHGRRVRAVADHLQQDSRHVHYVGLFSAAGTRLAGNIDRVPSGLALDGTVQGARLNPLEAAAGRGPIVRIVGRRLDDGDVLVVARNVDETREISSVVGQALALGVLPAFCLCVLAGAWLSARAQKRVEVVNQRVQRIVAGELRERLPEGNADDPFARLARIVNSMLDEMETMINALSGVGNDIAHDLRTPLTRARLALERGRTHAVTLEQLQEVTDKAIAGIDQSLAIVTALLRLAEIENSSRTAGFGNVVLDEILHEVCDVYEPIAEDKGVALGVVIDRSVQVWGDRDLLFEAIANLADNAVKFAPPGGQVELELKLDDGRALVRVSDTGPGINEQEREAVLRRFYRSDKIRNTPGVGLGLSLVAAIIKLHGFRLIIGPAPGGRIEIVADAAREGKTRCIPISDLRSRKREVDRTIRGRLDVGTCRMSETEFRCVTSSLVAGATASLLGSVNRLGMWEQ

SEQ ID NO: 12490 - protein, 328 aa, BradyrhizobiumColbertium
MQTSHEIQRHDSVAAPSLSAPVPFLRAYAMSIKRYELLERDQEQQLARRWQETRDERAANALVTSHLRIAARVARGYKGYGLPLVDLIAEANLGLVIAASRFEPDRGARFSTYAVPWIKATIHAYILRSWSLVKIGTTAAQKKLFFRLRGEMRKAMGGAMARLTPEVATVIADRLEVTAREVMEMESRLNGDMSLNARVGGEENGAEWETLLVDDAVDAETILADREQTDNRSSALRAALGALTARERHVLESRRLADRPVTLDQLGLELSISSERVRQIEIRAFAKVRRAVILAARDATRREALPPAARDARLDGIRRSRLRELAAP

SEQ ID NO: 12491 - protein, 1060 aa, BradyrhizobiumColbertium
MGIVRFALRFPHTFYVLAALILFLGGIAIRSMPTDVFPEIRIPVVTVIWSYTGLSTPEMEQRVSTYSQYSISANVSGIKNVEAQTLNGLSIQKIYFQPDVNLDLAISQIVSATNAIRALMPPGIQPPIIVQFNASSVPVLQLSLESNSLNEQQLYDFGIYRVRQQLAPVPGVTLPTPAGGKYRQIMVDIDPNKLLSRGLTPLDIVNAVNTQNLTLPTGTAKIGDTQYTVRTNATPASIEDLNMIPVKFVNGATIFLKDVAQVRDGSQVQQNIVREDGHRAVLLSVIKNGNASTLAVVNGVKKALESLRESAPAGLKIKELFDQSVFVTHSVSGVLREGAIAAGLTALMILMFLGSWRSTLVVLISIPLAMLSSLVVLYFLGETLNTMTLGGLALAVGILVDDSTVTIENTYRLWTEDGMPLPDATLHGAAEIAMPTLVSTLAISCVFTSVVFLEGPAKYLFTPLGLAVVFAMLASYGLSRTLTPITIGLLLKSERRHGKGEAPSGIFARASAAFERGFDRLRNGYSELLLTLLQRRAIAPVVAVLVLALGATMFVYVGRDFYPLIDGGQIQLHVRAPAGTRIEKTEAIFQAVEDKIREVIPERDRSLIVDNIGLPARAYNLAFTDGSTIGGNDGTILVSLKDGHQPTADYVSKLRQVLPSAFPEDTFYFQAADIVTQILNFGLPAQIDVRTVGYGANNLAVAKELQKSLSTIPGVVDAHLQQEVDAPAFYADIDRTRAAQLGLNASTVATNINVSLSSSAQVSPNFWTDPASGIPYYLAVQTPEYRANSLNALGNTPVSASPAASGQTVPGLLSNVATFKRGTVPTNSNQANVQPVFDIYASVQGRDLGSVAADINKVTSALQKQLQPGNSIQVLGQIQSMHQSFRDLGIGLLFAAILVYLLMVVNYQNFGDPFVVILALPATFCGIVTMLFITGTTLNVPSLMGAIMAVGVASANSILLVTFARDEQLKGHSAFQAALSAGRTRIRPVLMTAAAMIVGMIPMAIGGPGEEQNAALARAVIGGLLFATPTTLLIVPYLFAMLRKRNDGQPHHGVFEEQPQ

SEQ ID NO: 12492 - protein, 374 aa, BradyrhizobiumColbertium
MLAGGLGVGGWRHYQAAREAAALAEQVRTAVPDVRVAVVRPSGDIMKITLPATTTAFEAANIFARTSGYIEKRYVDIGAHVKKGDLLADITAPELDQQIAQAQATLAQNQATLQQTQASRELADVTNARDSNLVKQGWLTAQQGDNDRLTLRAQQAAVGVAQSNIAAQEAQIRVLQQEKAYQRVVAPFDGVITQRNVDNGSLVQAGSTFMFTLMHSKVIRTQVFVPQDEAFGVTPGIDADIRVPEIPGRTFPGKVTRIATALQPGSRTLLTEIDVPNPDGLLNPGIYCTVELSIPRKTPSMIIPSDALVFDENGLHVVLVRNGTVHLQQVSIARDFGTTVEVREGVQPGDQVVLNPAVSLAEGSKVTVRKVVVS

SEQ ID NO: 12493 - protein, 125 aa, BradyrhizobiumColbertium
MELPLSPMTGNVGAALPGVDKPGFVAIGGSGIGDGDGGAQTTTVPGDVGSEASGTGASVVSGAFGSVVAEKGPGLFNGEITIAPGTVGRPIAVLPVMATCALLGEPASSNEVSNVAKMVLTIPSP

SEQ ID NO: 12494 - protein, 90 aa, BradyrhizobiumColbertium
MPGGQVTSAASLPLSIPQVPTSRAPGTISVDLMDVGGTGLDPNSIVPSPNSSACMEGVSMNLASPATVLPANATGAAPTPGVSPILPPGC

SEQ ID NO: 12495 - protein, 962 aa, BradyrhizobiumColbertium
MSSSPANRTFTFGNWLIDCQRRELRHDNVAVPIGSRAFELLEKLADSAGLLVTKDELIGTVWSGQVVEDNTLQVHISAIRKALGKDRDLLRTVSGRGYTLAGSWRSGHPDHGAATTISAPSSSFSSNLPNMRAPLIGREDCLTELVDILSAYRAVTLVGPGGIGKTKLAIELARHVASSFGESVALIELASLQDPALAIAATARALKLALNDKNVSSASIAEAIGTRRLLLVLDNCEHVIDVAAQIASAVLRNCPNVTVLATSREGLRIDGEYVAAIPPLSVPGPDILDPDLLLRESAVQLFVARTRALRASFVPDPSDLPKIAAVCRRLDGIPLALEFAAARVANLGVDAVLTRLDRRFELLSSGRRDQLPRHQTLRATLDWSYDLLSSEEQRLLCRLAVFPAGFTLDAAIAVADDDLTRSDVIETLFNLVGKSLVALDPSFEGRWRLLETTRAYALEKLARAGLVAQVTRRQASFLRQLVTPLGDTSPTSDDVSRLAQEIENVHVALDWAFAPDGDAALGVELTAGFVPVWMQLLSFVECSSRIEHALAHLGPELTSDPRLKAQLHVALGFALLNTTGSADRMKAALNIGLVLAEEMSDLELQLKAVWTLWSYNLNSGQYDAAKSVGERYLEIALRTENPANETVGRRLIGAAAHFYGAQEDARRELTLSLDHEAHGLEDGPHQMWFLLNQSVLAKAMLARVLLLQGQVVQSRALAAECLQEAEREKDKLAIAYALRNAVCPIALMTHDLAAADQAISALLELVTREGIAFWTSWTSCLKGQLLVLEGQYDNGIALLRSGLKARAENGWLMRNPEFLGSLAEGLLATGETAPALAAVEEALNIARQGRQLWCLADLLRIKAEILLVDAPLDLSRPELLCAEGLSVAREQQCRFYELKIAAAWARIMAGSDRKQTALDLVGPITAMFDREVDLPALAFARGLVASPATARGGGRSASCTCH

SEQ ID NO: 12496 - protein, 97 aa, BradyrhizobiumColbertium
MSVFKTMIAAALISTATISSASATWSFADQEPAAFASMYPDRDVLNRGALTPAGRIGLERPGGAAPVFGARHPTSINGIVDGATDGQPAYAADHAHP

SEQ ID NO: 12497 - protein, 65 aa, BradyrhizobiumColbertium
MSTARGGALGTSAAAPGTNSLGIALPSSEGDGHAMKRPLLGTDAAIDKEDARLEKMLEGAICRGC

SEQ ID NO: 12498 - protein, 952 aa, BradyrhizobiumColbertium
MPIMAETGQRPVYTCSEWEIDLARRELRSLGDVVPLGGRAFEILAELVQAEGDLVTKNDLVERVWRGVFVEESALRVHIAAIRRALGSGRDMLATEVGRGYRLQGTWQIRQMNAPLQSVASEQLRSTNIPSASFDLIGRATAIAHLWELLSAYRVVSLVGPGGIGKTALVLEAARKPPPGFAADRLMVELASLSNPKMVCSAVAGVLGVKLEGEDISPGAVARAIGARQLLLIIDNCEHVVEAVAQLADAIVSRCPGTTIVATSREALRIDGEHVYRVPPLGVPPESRLGCGGAFAYTAVELFVTRARALGSNFALDEENLEAVASICRRLDGIPLAIEFAAARTVMLSPAKIAVLLDDRFKFLTTGRRTALPRQQTLRATLDWSYDLLPEVEARILRPLGVFAGEFSLEAAIAVAGEDMSEVTRRLANLVAKSLVLVDIGGDHAHYRLLDTTRAYALEKLRSRGELAGAAQRLAEYYRGFFARTEADSEQPQSEWLTFYGRHIDNVRSSLDWALSPAGDAQIGAALTVAAVPLWMQLSLFAECRERTDLALARLEGSAANAPQLRMQLLAARGWSLMHGIGRAGEAGLAWAETLGLAEQLGDDDYLLRSLWGLCIDRFNNGEFRKALGLARRFADIVAGSRNSVDRMMAERLLATSMHYLGDQRLARRHIDRALARLYDLTTKPQVFRSRFDLRASAYCVQARILWLLGCVDQALSVVDRNLEEGRTSGHALTFCSLLGEDACPVAFFAGDLTLAERYYAMLIEQTERHPVRLWNVWARAFRGMVMARGGDLEGGLSLLRKALGMAGEARFLPRFLLPLGELAACLGEAGEVSQGLATAEEALALCEAREEGWYVAELWRIKGELLLRSGAHHSVAAAEQAFDQALVVARGQGALFWELRTTISLARLRIGQGRSAEAWHILDSVYGKFTEGFEISDLRRARTMMAQLSAW

SEQ ID NO: 12499 - protein, 877 aa, BradyrhizobiumColbertium
MRVHIAALRKALGVGNAGVRYLSTVSGRGYCFVGSISEPDEVQPEPSSLPDVHNLPARPRQMVGRERTIREISERLRVQRFVTVVGPGGIGKTTAVVSVGYTLLAEFAGQVRFVSLGETCDAALMPAVAAASLGLPARSNDPSTDLATLLRGKRMLLILDCCEHVIDAAAALADRLFQEAPELHILATSRELLRVESEHVYRLLPLASPPEKAILTAASALAYPAVELFVERATSTGSEFALTDANASDVGNVCRRLDGIPLAIELTAGHVGAYGVGAMLRLLDKQFNMLWEGRRTALPRHRTLRATIEWSYNLLPGAEREVLNRLSVFVGSFTLDAAQAIAATAKDDGAIPAIIDSLVTKSILASSADRQSTRYRLPDATRAYAEERLAADTDADEVAWRHANYFLALLEDTDGTASDGFSTAADQFGNIRSALVWCFSDRGNRGIGVALTAAAIPLFFKLSLLAECEHWAARALEALDETAESAKHSLVLYAALGSARTLTGQLDDLAMICLNRALALAEKNGDLSGQVRLINRLHLLQLLTGKFDDGLTTARRGERVALESGDPGALSRMRVALGISCHYLGNLAASRAYIEAAMSRPDANADVDGEPTLDYPGRAPITLARNLWLQGYPDRAMETVRKAVSDARTMNHPTMLCRALLWAFDVFYWNEELDSYEDSIDTLLAESRTHKLATLHIAAEAMKGIALLARGADSGLPLLEGSVEKLQDHRFGAVAGLSVPLAAALAAADRGDAALETINRAIAQARRCSFLLEMPDMLRVKAEALIRKATPDVLLAEQTLEHSLELARQQGALGYELRTAIAFAKLRQRQGRHRDAEELLAPVYARFTEGFGARSLKTASDLLIELRFSRSDKLAVH

SEQ ID NO: 12500 - protein, 293 aa, BradyrhizobiumColbertium
MSKVIVVTGAGNNIGRSICEELAQAGHTVYVSMREAGDLSEPGSGRTGPQAAELRTIDFDISSAASVTAAIAGVIAEHERLDVIVHNARQVLYGPTEAFTPEQLAELYEINVLSAQRLNRAALPQLRKQGQGLMIWITSSCASGVAVPFLGAYASSKAAIDTLALAYAGELARWGIETSIVVPSALGPGHYVRSGRPTDTARAEEYADGPTGDVTETALAGLAQFSPRDRAPQDVARAIVDVVNMPLGRRPLRVHFDPDDDGAAAIDAIAGRARAELLRRIGLEDFFSPVIIG

SEQ ID NO: 12501 - protein, 334 aa, BradyrhizobiumColbertium
MIAAVVGGGAAAFAYTAGWLSPGRLTPERMIEALTPSGITPLGHRRNHAKGICFTGTFEANGNGVELSRAKVFLQGRYPALGRFNLGTPNPNAVDATVRVRGLGLQIAADGEVWRMAMINPPFFAVSTPQAFHDLLIASGKKDPDAMKAFIQANPEFGRFSAWAKAAPWTASYAEESYHGLNSFIFTNAKGGNHAVRWSLLPAAQPVPISQADLEKRAPDYLEQEIAERVRTAGPLRWTMVTTVADPGDPTADPSKAWPETRRKIEVGTLIVQRIEPERDGPCRDINFDPTVLPEGIRVSDDPFPAARSSVYRRSYDLRAAEAKDYPRTGAAKP

SEQ ID NO: 12502 - protein, 187 aa, BradyrhizobiumColbertium
MIKASHRFTLVQRLLHWLMAACILAMLFIGAGMVSTVAPEYLPLILIHKTLGVTLLGLVLIRLALRLYYGVPSLPDDLPRAVKLGARSSHLLLYGFMIVMPLLGLGMLWTASYPVVLYGGIQIPALLPQSDHAHTLFWNAHVYLGFAFFALVLLHLAAGLFHAWVRRDGVFGTMSLARVRDRTTDGE

SEQ ID NO: 12503 - protein, 166 aa, BradyrhizobiumColbertium
MTKVELQTPTDLGANVNRDVPAALRALLADVFALYLKTRNFHWHVSGRHFRDYHLLFDEQAEQIFSMTDDIAERARKIGGTTLRSIGHIAREQRILDNDADYVDPQDMLAELRSDNQQLTREMRRIHDLCDEYGDVATASLLENWIDETERRIWFLYETGRTGPTS

SEQ ID NO: 12504 - protein, 275 aa, BradyrhizobiumColbertium
MMTASTFTRHQEIAWRGGQIRSTSRLVAEETALALTYNGSTHAVMMGTPGDLEDFGIGFSLTEGIVERASEIKSIEILPNELGVEVRMWLDGDRAASLATRRRAISGPVGCGLCGIESLEQACRPPSQVASRNIVFHARDLLGAMQALSPLQVLNQQTRSVHAAAFWHPRTGIGLVREDVGRHNALDKLIGAMAREGRPAVDGAVLLTSRVSVEMVQKAARIGAPVVVAVSAPTALAIRTAEEAGITLLAIARDDGYGVFTHARRVLLPDEAAAR

SEQ ID NO: 12505 - protein, 38 aa, BradyrhizobiumColbertium
MSWRKALIVFPLGLLYFAIGFRVFKSKFLWERPRTGRK

SEQ ID NO: 12506 - protein, 415 aa, BradyrhizobiumColbertium
MFSRRELLAMSAAGAAMVGSGAQGATFGNPDEPPQGAINAKNASSLSDHGPQNPALGKQFPSAQTPPATDVGGLPMNWASFNNAPRRIQNGGWARQVTVADFALSKEISGVNMRLSAGGIRELHWHQAAEWAIMTYGGCRITVLDVQGRPYVADLKAGDLWYFPSGAPHSLQGLGPDGCEFVICFDDGHANEFNTLLVTDWFAHTPPEVLSKNFGVPAETFAKIPLHNLWIFQGTLPGDLATDRAFIAEHAEAPPYPFVYPLASSAPLKESAAGSIRVADSSNFKVATTVAAALVTMPPGAVREMHWHPNADEWQYYIKGKARMTVFDTGPNIRTTDFSAGDIGYIPRNLGHYVENVGDTDVQFIGVFRAPRYEEVSLSNWLAHTPPRLVAQHLNIDEKLIAQWPDNSPGVMPKT

SEQ ID NO: 12507 - protein, 778 aa, BradyrhizobiumColbertium
MGSPYSEISSMKRKSVRPYREPAGGWGALKALSEALLVQRVPIKGAVTLSRMNQPQGFDCPGCAWPDPKHTSSFEFCENGGKAIAWEATSKRCTREFFAAHTVSELATWSDYDLEMVGRLTHPMAYDAASDRYLPVEWSDAFDMIGRELRALPDPNMAEFYTSGRTSNEAAFLYQLFVREYGTNNFPDCSNMCHEATSVGLPQSLGVGKGTVLLEDFDKADCIFIFGQNPGTNSPRMMTSLRNASRRGASIISFNPFRERALERFQAPQSAVEMITLTSTKISSKLFQVRVGGDVAVLKGIMKILVELDDAARAAEQPEILDWNFIKGHTTGIEALIDDLKRTQWPDIERQSGLTREDMACAAEAYRKSERAILVYGMGITQHQRGVDNVQQIANLALLRGNVGREGAGVCPVRGHSNVQGDRTVGITEVPKPDFLERLEHHFGFKPPSEPGHNVVTALEAMIRGEVKVFFAMGGNFAAAIPDRRATQAALRKLDLTVHVSTKLNRSHLIHGRAALILPCLGRTEIDVQATGPQSITVEDSMSMVHASGGRNTPASEHLLSEVAIVAGVAKATLGDRTVVEWDGFVDDYDRIRDAIEAVFPIFQDYNARIRVPGGFHLTSTARERIWATSSGKANFLVFEGCGEDPKQCDPDFLWLSTIRSHDQYNTTLYSMSDRYRGVFGQRDVVFLSEYEMKKRGFAEGDRVDLITESTDGVERVVRNFRVVGHSFPAGCCAAYYPEANPLVPLYARDPMSFTPSFKGVPIRLVRSSDVATATERL

SEQ ID NO: 12508 - protein, 469 aa, BradyrhizobiumColbertium
MLPTETKQNRVLLWAWGSVALALLSLACFLLEYDFTVIAVAAFLAASLTLVAAAMDIAARNRAIAELERSEQRYRQLFSRMPIAFRQLDASRLVALFRKLRAEGVEDLGAYFDSHPDFLKTCMEALSFQEANERAIQMFGRSSDQYIGRSMVDTWKERPDTFRRAMESRFRGETHFEEETRMVTWDNRILDVLFTTARVGPIDDLELSLVGTIDISQRVRAEERLRQVQAEFAHAARISVLGELTASIAHEVNQPLSAITTNAAAGLRWLDRPNPDLAELRKVIENTATDARRAASVVARVHGMAARKTPERIFLSFDDVVREALLFLRHEMESRDVAVQHRPDPAAPLVLGDRTQLQQVIVNLAINAVQAMTQAGTENRRIVITTISLDTKTLCCSMEDNGPGIDPEHVGRLFESFFTTKDSGMGMGLPICRSIVEAHGGRIHAEGKGAQGGARFWFTLPISEPVGST

SEQ ID NO: 12509 - protein, 1047 aa, BradyrhizobiumColbertium
MNISAPFILRPIATALLMAGLLLLGLAAYPLLPVGALPNVNYPTIQISAQLPGADPGTIASSLATPLEQQLSQIPGITQLTSSSALGVAQLTVQFELSRTVDSAAVDVLAAINAASPFLPPNIPYPPTIRKVNPAETPIMLIALTSDSLPLTTVDAYAENILLPKISQVPGVGLVGIGGQQKPAIRIRVNPQALAARGIGLEDVRNVIAGANVDLPKGTLNSPRVTYTLNTNDQLLKPSTYEDLIIAYRNGSPVRLRDVGTAIEAPENDLLAGWYGKDPAIILAVQRVPGANVIETVDRVKALLPQLQASVPPAIKVTIAADRTATIRAAVSDVQFTLMLTVALVVMVIFLFLRNFWATVIPAITVPLALIGTFAVLYVLGYSLDNLSLMALSIAVGFVVDDAVVVIENIVRHLEQGMTPMDAALKGSSEIGFTIASITFSLIAVFIPLFLMGGYVGKLFQEFAITITASLLLSLIISLTLTPMMCARLLKDSSRKKHGRLYLLFERGFDALLALYTRGLRIVLRHRFLTLLVMLSTIALTGFLYVIIPKGFFPQQDTGQIVGITEAAQDISFPAMSERQQAIVGVLTKDPAIQSVASYIGPGGPTATLNQGRIFIVLKPKPERKANADQIINRLRPRLAHIQGITLYMQAAQDITIGARLSKTQYQYTLRDADSNELSHWSAIFLKKLRALDIITDVASDQANAGPRLQVTVNREIASSFGILPTTIDNVLDDAFGQRIVSTMFTSLNQYHVVMEVDPKFQYGPEALKDIYLNSASGQQVPLSTLVHSVIEPAPILINHQSLFPSVTISFNLRPGAALGDAVAAVQKIEKETGKPASLSTSFQGNAQAFQSSLSGTPLLIGAALIVIYIILGVLYESLIHPITILSTLPSAGIGALLLLLAVHMDLSVIAIIGIILLIGIVKKNGIMLVDFALEVERRQRLSPEEAIYQACTLRFRPILMTTMAALLGGVPLMLGTGTGAELRQPLGYTIVGGLMLSQILTLYTTPVVYLYLDKLGSWLTGPKSVASEAPGTSPAGGAKGLTRESV

SEQ ID NO: 12510 - protein, 391 aa, BradyrhizobiumColbertium
MKRSFTVALIVLAAIGAGAGLWFFADRKPVVAAAPVPVPAAVPVVATTVRGKDVPIYLRGIGTVIAYNTDVVRSQIQGQIVKIAFTEGQAVKAGDLLAQIDPRPYKAQIEQLTANRDRDQAQLANAEANLSRYNQLGDKGYATPQLIDTQTAQVAQLKAAVKADQAQIDQANVQLSYTRLTSAIPGITGVRQIDVGNVIHPTDPNGLVVVAQIEPISLLFTLPQTDLPSIQEHAAKGTLKVIAYSQDNKMKLDEGRLLLVNNEIAGTTGTVQLKAEFPNHEHRLWPGQLVNARLLLEMRKDALTVAGSAVQQGPHGSYVYVVSADQTVTLRPVHVAQISDGQALIDQGLESGDVVVVDGQYRLTEGSHVHELHGKAAREADLQSAVQDAIP

SEQ ID NO: 12511 - protein, 41 aa, BradyrhizobiumColbertium
MGATELGGAGISPSVPVPNPVPADGAMSINGTPLIGGAGNP

SEQ ID NO: 12512 - protein, 104 aa, BradyrhizobiumColbertium
MAPNGIPTRPTVIGEDESGGAAALPAHALDELPDSPPPSNNAPGEAEFADVGQFDMPCAGLSGEVPGVAISVDPSGMPTGRVDCGLSGDVASMPGEGCIPGTIV

SEQ ID NO: 12513 - protein, 79 aa, BradyrhizobiumColbertium
MQLDRVIEKDAGSYGWQPESLSALRGHQPTPRSLAEAESGDGFDFTAALDSLDRARAADHVGDMRACRRELARARSILR

SEQ ID NO: 12514 - protein, 261 aa, BradyrhizobiumColbertium
MKPRRASLAFAVTLSLFATVDTARAEPLKNIVLVHGAWVDASGWKPVYEILTKEGFHVTMVQEPETSFADDVKATKRILDLQNGPTLLVGHSYGGSIITEAGVHPSVVGLVYVAAHAPDVGEDESALGKKTPSVLGKTEGVIKITPDEFTYLDPVQFPKLFAPDLPRDRAEFVARSQVPAAAQVFSTPLTAAAWKTTPSWGIVAGSDQIINPDLERWYYDRAKSHTTVIPGASHSVYESHPKEVAAVITRAARSIDQQAAR

SEQ ID NO: 12515 - protein, 287 aa, BradyrhizobiumColbertium
MISRWTSTQAAVGREEATTPTDRYFFAIALKTTRLKLTRGAQTIFDGIMPAGTLYVGAPSKSLCAHFHASCDFLHFHVPAKCLPLSPTGEHPVTPEELNDMVLLRDPFAAQLAKALTEHGHPVDRDFARCIAQTLAMHVARREAPRTKVNALPKWRLRRIEDYVRTHFDQCISLSDLAGVAGLSRMHFAAQFRAATGYRPREYLLHQRVEQAKSLLLNSETSLAQVALAVGFCTQAHFSTVFKRITGNTPARWRCSSRNAQASSAPAGDDPASGRKAVPHLLPYALS

SEQ ID NO: 12516 - protein, 126 aa, BradyrhizobiumColbertium
MAKTPVIAIVDDDEGVRTSLASLVRSLGYEAHAYESGVDFLRQPPGNDPECMIADVQMPVMTGDEMQAKLVASGRRFPIIFMTAFPSETVRQRVMAAGAHCYIGKPSSGDEIIRCLEEALAGAGPQ

SEQ ID NO: 12517 - protein, 223 aa, BradyrhizobiumColbertium
MTRPSQAHPPATSSSSVVIIVDDDAGIRASLDSLFRSVGLETRLFGSPAELLGGTLPDGPGCIVLDVRLPGVSGLDLQGQLTRQGINYPIVFMTGHGDIPMSVRAMKAGAVDFLSKPFRDQDMLDAVTTALERDAQHRAEAAAKEDIRAQYETLTAREREVMGHVTAGLMNKQVAGLIGLSEITVKIHRGNVMRKMGAKSLADLVRKAEALGLSQTRRTTDQT

SEQ ID NO: 12518 - protein, 658 aa, BradyrhizobiumColbertium
MLSARSNRGINAAGMMRTKLATMTTPDRATHSSTSRVGLRFWSAFLALAVFLVDVLTPLEGAIAVLYVVAILLAARTNRRNDILVAACGCAMLTIAAYLLSHDLHHIASPALRAVVSLAAIAITTLLALQNHAATNRLAAQARLLNLSHDMIFVRDHAGVISFWNKAAEQTYGWPAEDALGRSADELLQTTYPDRRETIERVLLETGRWEGRVKQRTRAGATLTVDARWALQHDHLGKPVGVLETHTDVTDRVAAHSALVQSEQRYRRMFNASRIGVVEEDWTDVRATLGALDTGGAELRDHLARHPDVVRSARRLARIIDVNPAMQRMAGADGASAFIANVDKLLSENDRSFVGALLAFTEGEPFYEGETEIVRLDGRKVPVLFTISFPADPDGDRNVLAFVIDITERRQAQDALLAAQADLAHAARVATLGEISASIAHEVNQPLAAIVTSGEAGLRWLRRDVPDLREVATTMGHVVAQGRRASEIVARIRSFLKKAPPQQDELQIDEIIEEATALVAREFAKDDVALAMEMEPGLPPIRGDRIQLQQVLVNLLINAAQAMSSQSGSRLVTLRTGTVDGESLAITVQDSGPGISPNDLPRLFDPFFTTKHGGMGMGLAICRTTAEAHGGQLSAESIPGSGATFRLTLPFSKHHASP

SEQ ID NO: 12519 - protein, 258 aa, BradyrhizobiumColbertium
MSLQLSRPLTTKDHAIGSIDISSLGGRSRPSGYCDQAGCEGTTLPRGHLDVALAIEAPDAQRSESRPRDLIDPVLRQLSDALAATEALHHPHSAILADALRLAILTHRASAQAVTQRREAEPDVEEREGRARRTVRSLQKWRLKRVMQYVDENLGAKITLEHLAAVAGLSRMHFAAQFRAAVGMRPHEYLLKCRIERAQELLKQGDVSLVDTALTVGFQTQAHFTTVFKRFVGDTPYQWRSAYLAQFMPLPRAGAMLS

SEQ ID NO: 12520 - protein, 72 aa, BradyrhizobiumColbertium
MSEIGIQLLMLPLAGIHMTPVHNEVTCWLEIARALGNSYRLATSGLSLGALYGRLIFTFCRATLTVSRDCTY

SEQ ID NO: 12521 - protein, 206 aa, BradyrhizobiumColbertium
MKFVFIAKHRAVWPVAWLCEALGVSRSGFHAWLNRSPSARSRSDKELGGKVKASFLASDRTYGARRVWRDVLADGADCGLHRIERLMRLQGLRARPRRRRLPKDSGDRQLESVPANLLDRRFFAERPNQKWIADFTYLWTAEGWLYVAAVIDLFSRRVVGWSMSAAMTAQLVTDALLMAVWRRGKPDALLHHSDQAVSIRAISSSD

SEQ ID NO: 12522 - protein, 81 aa, BradyrhizobiumColbertium
MADHGIVCSMSRSGNVWDNAAMESFFSSLKTERTESKTYRTRDEARADVFDHIERFYNATRRHSTISCLSPVEFERKVGLA

SEQ ID NO: 12523 - protein, 130 aa, BradyrhizobiumColbertium
MSVPIPIFDQNQGNILSAQQNLAKTRAEREANRNTLIVVAGRAYDNVQGSLRELAILRDSGIPKAQAASNEIEQGYGAGRFSLLEVLDAQANVTQARLREQEALQNYHVAVATIEGLVGNPFALARESAR

SEQ ID NO: 12524 - protein, 160 aa, BradyrhizobiumColbertium
MADLSTIWVDLSIYRQDLRRVRIGDEVLIDPDDGAGDIKGKISYLAPVGASETQTAVARVVLSNPDGRLRPGLFVTARLILAERKVAVAVRTGAIQTFENKSVVFVREGDDKLEARPVELGDSDQKFVEVRAGISAGERYVAENSFVVKAEMGKGEAEHD

SEQ ID NO: 12525 - protein, 172 aa, BradyrhizobiumColbertium
MALLLVLLLLFMSFGSIADALLVFSGVPLALTGGVLALLLRGIPLSISAGVGFIALSGVAVLNGLVIIAFIERLRHEGKSVLEAVHEGAVTRLRPVLMTALVASLGFVPMAIATGAGAEVQRPLATVVIGGIISSTILTLLVLPALYVLFRKDSAPAPKPDNVDGAAVGSHA

SEQ ID NO: 12526 - protein, 448 aa, BradyrhizobiumColbertium
MFAGTVNGEALLRIKVSASAQDNTIARVVKLVEEAQESKAPTERFIDRFSRYYTPSVVVVATIVAILPPLVWTGASWREWIYKGLAILLIGCPCALVISTPAAIAASLASGARRGLLLKGGAVLERLRDVTVACFDKTGTLTAGKPKVTDVVGFGHGEVEILSVAASLERGSSHPLALAILQAASDKSARPQHVEDFVNLAGEGVRAVLGGRTVFLGSPAAAERIAPLAEDQRKLVEALNEGGKTVSVLVVNGEIAGCIAMRDELRSDAVAALRRLANGGGRSVMLTGDNPRTAAALARDLGIDHRAQMMPEDKQRTVEAYKNQGEVVLKVGDGINDAPALAAADIGVAMGGGTDVALETADAAVLHGRVADVPAMIELSRRTMGVIRQNISIALGLKAVFLVTTIAGITGLWPAILADTGATVLVTMNALRLLSIPGRGRAGEGAST

SEQ ID NO: 12527 - protein, 331 aa, BradyrhizobiumColbertium
MAFVYARTARAKGFLAAALGILGRAWQLYVAYILLFVFYVVTIGYVAQRYGHAHLLDEFNIRLLIRDPVEFLKHGLLLEYKPLNLDVLPLYIALMIAFPPLLWVLMRWPNVALAISAGVYVAAQVWGWNLRAYPAGHWYFNPFAWQFLFVIGAWVAVGGATAARTLIYSRTTLAAACLFLLFAAIVTLAARTGHAEMVPEPVRSLFIPNNKTHLAPYRVVHFLALAIVVSRLIPKEAPFLSAPWLRPLRLCGERSLEVFCVGVFLAFVAYFAIDLVSDSLAFQIVVSVTGIGIMIAFAYFKTWTRAFRAASGRKAPEREPIRQPRLAQRER

SEQ ID NO: 12528 - protein, 82 aa, BradyrhizobiumColbertium
MMASLIEEAEAINWYEQRMSVEKDKKAKAIMANAQKEEFKHFGMNLEFLLRRKKEWREELKGILFTQGDIVKLGEKAEKAVD

SEQ ID NO: 12529 - protein, 79 aa, BradyrhizobiumColbertium
MERRGDQRRRVLKKGSIEFGSSAIDCSIRNLSDRGAMLEVESPLGIPRGFTLVVPADGTRRACRVAWVKEKRLGVEFEE

SEQ ID NO: 12530 - protein, 157 aa, BradyrhizobiumColbertium
MALGSILSLIAAIGAAEGRGSIASERPYAAEHIDLLPVDIRHGLARLERPCGGKAAATHYFSTTIDAGGLHFRSLHFENFACERREAICRAERCLHEVYLERGGRSRRVFSAYVDDMKLINAGGTVALELEGGRPAILRWNGRTFAPVHSFGKGQER

SEQ ID NO: 12531 - protein, 91 aa, BradyrhizobiumColbertium
MLVQTLVFSIVLLLLLLKTEGDPASALLFGFITFMFVYVLYLVRLLEQPFAKGHGSVDDVSFFLLDELERNLRRTLEDPDGGAQNTTTTGD

SEQ ID NO: 12532 - protein, 276 aa, BradyrhizobiumColbertium
MTATYMIAEVIGGLVTGSLALLADAAHMLTDVGGLALALLAIRFAAREATPQRTFGYLRMEVLSALANAVVLLLLTVYILYEAYQRFLSPPEVLSGPMLIVAAIGLAVNLVSMWLLSSGSSESLNVKGAYFEVLSDMLGSIGVIVAALLMMWKGWALADPIIGAGIGLFIVPRTWSLLSQVTHILMEGTPPNVDTGAIEKKLLAIPGTVAVHDLHVWTVTSGFDAMSCHLLVTDMSAGREALREARNLMKAEYGIEHTTIQIEDEAMRAEETVLHV

SEQ ID NO: 12533 - protein, 209 aa, BradyrhizobiumColbertium
MFLLVATGAIGWESILRLYEPEPVAGLTVMVVAAIGIVVNGATAMLFASGRKGDINIQGAFLHMAGDAAVSAGVVASAALILWTGWLWLDPGMSLVICAVILWSTWSLLRGSVAMSLSAAPAGTDMEAVRSFLLQRPGVAKIHDLHIWPISTTETAITCHLVMPTGHPGDDFLMESARLLRTEHKIGHATLQIETDENNACALAPDDVV

SEQ ID NO: 12534 - protein, 72 aa, BradyrhizobiumColbertium
MDRVREDAGSGVGAEAERRLCEADFFVGEFLSHRQQKADGRRMLRTVVDRCRPVDIIFAAAQAELRDDKEAK

SEQ ID NO: 12535 - protein, 76 aa, BradyrhizobiumColbertium
MDVVRRESEKEDAESRRMSKVQRVFFVVGLLTLIALSSGSIGIVLYRAFPDSNWVTLVAPLGAAAAVVALRKLFAA

SEQ ID NO: 12536 - protein, 80 aa, BradyrhizobiumColbertium
MPDTSQIKEHMDVISSDKKTVGKVDHLEGSDKIKLTKQSSPDGDHHHFIPVSWIDHVDQHVHLTKSGDEVTAHWQHEGRK

SEQ ID NO: 12537 - protein, 626 aa, BradyrhizobiumColbertium
MSLNSALASAMSGLRANQAALSIVSSNVANSQTPGYVAQTPNQIEVTTGDFGSTAMTTGVSRELDTYVLNQLRTETGGSGYADQMASILKQLQNVYGTPGNSGTLETALNNFTTSLQALSTSAGSSSAQRVALGAAQALAQQLNVTTKGIQSLRSNVEQDLGTSAQQANAAMQKVADINTKLQGLSANDPSAATLMDQRDQAINTLSKYVDLRVTTDGSNQANIYTTTGIQLVGAGLASQFTFSSAGALSATSLYNIDPTRSGVGALNVKLPNGSMIDVVANNVVSSGQMAADLKLRDQTLVQAQNQIDQLAAAMSSALSDKTTAGSTVSGPPAGFDLELAGAQPGNTVNITYTDTATNTQRQITLVNVTDPAALPLQNATNANPLRIGLNFSGGMGAIASALNTALSGTNLSFAAAPSPATATTLRVTGDSTGLTKVSSSSSTMTISSLTSGNPQIPLFTDGGQALYTGAISASGSQMTGLAGRIAVNTQLASDPSKLSVYNTSPVTPAGDTTRSDYLYSQLTTAVYSYSPQTGLGSSGQPFTGSISSYLQQFLSVQGNAATQAIQLQQGQNVVVSTLQAKFNSTSSVNLDSEMSNLIQLQNAYAANAKIMSVIQEMMDVLIKAQ

SEQ ID NO: 12538 - protein, 71 aa, BradyrhizobiumColbertium
MKKLGLLVFGLAISFALPARAETVIVKKGGHHGGYGARAEMRGHYGAGMYRGMRTHGNRTVVIKRGHGHRY

SEQ ID NO: 12539 - protein, 660 aa, BradyrhizobiumColbertium
MKKVIIGMILAAGPAAEGLSADLGEVRPGQAVDWSGPFVGGHFAYGVGSSQYAFGAPGLAPSSGSIDLTNSLNAFKGTGSYALGLSAGYNHVLPSRMVVGVEGDLTFPNTISGTAAVGTAQRPATLKETVLTSGTLRARLGYAPGPWLFYATGGFAWSYDQATLDGPPGDKIGFTRLGSAWGAGAEVALSANWSARFEYLYTDFGAKEKGFGGTQRLSSDLAVQTARLGLNYRFGQNGQKVLEDGLTPFETDQFSIHGQTTYLQQYAAPFRSPYTGTNSLIPNQTRQTWDVTLYAGFRPWAGGEFWVNPEIDQGFGLSSTLGVAGFPSGEAYKVGSAAPYARIPRAFFRQTFDLGGETKKVDADINQFAGTQSADRLVLTVGKFAVTDVFDTNKYAHDPRKDFMNWSIVDTGTFDYAADAWGFTYGAAVEWYKGNWTFRGGLFDLSTVPNSTELDPTFSQFQWIGEIEHRHEIWGKPGKVAVTGFLTRGRMGRFDDAVALAQATGTAADTALVRRYQSRAGISVNLEQEVTKDLGVFARAGVADGSKESYEFTDIDATVAAGLSLAGSSWNRPNDTFGFAGVVNGISQARRTYLDAGGLGILVGDGRLPNAGPEKIIETYYSFPLWSWRATLDYQLVVNPAYNRDRGPASIFGVRVRSQF

SEQ ID NO: 12540 - protein, 262 aa, BradyrhizobiumColbertium
MIDLHAHLDLYPDPVATADECRARDLFVLSVTTTPSAWAGTAALARGAAKIRTALGLHPQLAHERRGELQLFDELLPESRYVGEIGLDGGPELKATWETQRHVFDEILRMCGAVGGRIMTIHSRRAAGPVLDALASRSDAGVAVLHWFSGTRRELKRAVDQGCWFSVGPAMLAGERGRGLVAEMPRDRILTETDGPFAQVEGRSLFPWDVAKAEPILADLWAVDEGEVRGQLLTNLKRLTTRIAPERGSAPGRGSSGVGCAG

SEQ ID NO: 12541 - protein, 422 aa, BradyrhizobiumColbertium
MLCAPAEVRRLKEKGTLRVVLYGQPGADDRGSAGAAVRNDIRRARLAPNRRAWDLLSIAMSVMAADAAGRRSLSPDGWTREFEMEVAVAEPAFWNKSADLLADALTFLTTDRWRFRFIAGGAAPQPPAEVFRPPEGSVVLLSGGLDSLSGAIDLAASGQRPVAISKTVRGDGEKQIRFASLIGGGLRHFQLNDNAAVPGTEDTSQRARSIIFLAFGVLVATALKPYRPGGNLPLYVCENGFIAINPPLTGSRIGSLSTRTAHPYFLSRFQDVLDAANLGVSIHTPYGYTTKGEMLKTCADQDLLRTLAANSTSCGRFQRYNYRHCGRCVPCQVRRAAFLAWGEDDPTDYVYEHLGRDDPDHAGFDDVRSVGMALAASKGAGFDDWLGGALAWQGIEQRDALKDMLRRGLAELGALHAKYGVK

SEQ ID NO: 12542 - protein, 210 aa, BradyrhizobiumColbertium
MGNFARSGDGRDLRRGLGHYVRNGYGGSNFATQRFGGTAQTAGSLGHALYSTAQGDANAPVDAAALAGRSTEEIASAIIEAVRPIDGTQDAEAERASIHDAMSELLTEYPDADLLDLSDPEREFVIEKFTAIDVARRFELDVGKTLLERAPTATVALARLKQMRSYIAETVAASFRKLKEQGRRLTAGRVARVVQAALRETFEVFEGYEE

SEQ ID NO: 12543 - protein, 56 aa, BradyrhizobiumColbertium
MEGIKLLAALALLLRADLGGPAEREGDGILERGLTFDLAANIADDPAQRKRSFVPI

SEQ ID NO: 12544 - protein, 870 aa, BradyrhizobiumColbertium
MASGGIKESGSVVLITGASGFIGRGIIGRLGRQYTLVGLDRAGPPHPPSPANVIDFDLTSEESVKAGLNELQRRFGKRIASVVHLAAYYDISGDPNPLYERVTVEGTHRLIDALQSFQVEQFVFASTMLVYKATDRPDAKIREDSPIEPSWAYPESKVRTETVLRERHGHIPVVMLRIAGVYDDLGHSPFIAEQVSRIYEHRATAHIYPGMLCAGQSFLHLDDLANAIARLIERRDRLPTELPLLVGEPDAIGYAEVQNIIGEALHGEDWTTIRVPETLALAGSWLQTEVLGDDQFIKPWMVEQSSAHYVLDISRARQLLDWQPRHSLRQTLPKIIDALRRDPTAWYKANKLNPALVAWYGQRPAPAQSGNEKKDAHGAAQASAPPHHGTDHATRSGHDHMSKMKDEERRTRWAHYANVGLGLWLAASPLVYDAMRADSINTNVLVVSLDRDLPSLEWRTSLLLASDVISGLLIACFGALSLSSRTAWWAQWAAAAVGLWLLFAPLLFWSPSAAQYNNDLLVGALVISFAVLVPMMPGMSMAGMMDPKVIPPGWTYCPSTGAQRLPIAAMGLIGLIIARVLTAYQLGHVDHVWEPFFSGNPNDPRNGTEEIITSTVSKAWPIPDAGLGAVAYTLEILMAVMGGRDRWRTMPWMVTFFGILVIPLGVISIYFIIIQPIVIGTWSTPALIAALAMLIMIPFALDEVIAMGQFLYWSSCRGKPLIRTFFRGDAVDAGAEDRSDGLASWGAFWTDTMRGVCVPWNLAGCMAIAVFLMFSRLIFGTTNAMANSDHLMGALTLTVAIIATAEVARILRLLIVLFGAWLIAAPWILDGATRTASWSSVFLGVALAILSLRRGKRTREHYAGWDRFVI

SEQ ID NO: 12545 - protein, 639 aa, BradyrhizobiumColbertium
MNELSRRHLLRLASLSGAAGLASSALPSWAQSGPFHPASRLSEVSGSSIDLTLDRAAWPINGKAGSAITINGTVPGPILRLKEGQRVRIAVTNRMDEAASIHWHGMLVPFRMDGVPGVTFPGIPARSTFVYEFPVVQSGTYWYHSHSGFQEQVGLYGPIVIDPKGVDPVQYDREYVVMLSDFSFLSPEMIIQRLKQEGGVFNYQRQTVASLLAGRDQTLAERLQWAKMLMDPTDISDVTGAIYTFLINGYGPEDNWTGLFRRGERIRLRFINAGAQMVFNVRIPGLHMTVVAADGQMVRPVRVDEFQIGNAETYDVTVQPMDDKAYTIVSEAVDRSGMGRATLAPRLGMTAPVPPLRERPLATMKDMGMDMSSMDMGDMDKSTGSNSSGMSGMSGMSKGVQTGAQAKQGMQQSGGMQGMSGMSGKSGMARMSSSTPPGMAPQKPRGSDLMSGPEMDMRDPKNAPGVKMGPGVQTIAPMPQDRTGDPGMGLESVGHRVLTYRDLIALERNPDPRTPTRALDIHLTGNMQKFMWGFDGEKFSETTKPYTFRKRERVRVTLINDSMMLHPIHLHGHFFEVVNGAPENHRPRKHTVNVLPGGKVSFDITAEPGDWAFHCHMLYHMHAGMFQVFSVRPLTGDNA

SEQ ID NO: 12546 - protein, 309 aa, BradyrhizobiumColbertium
MPGMSMPANKPAAAVAPKKKSAAKGAASAKTSPNSQGAQDGSMSGMQMPGMKTKGKNAAPAAASIPHSPPPPPPPDHAADYYYDPAQMAEARRELRQEQGGGVYSKVFFNIAEFQLGQPGGYRWDGQAWLGGDINRFVVKSQGDGSRREGLDSAEVQLLYSRAVAPYTDVQAGIRYDFKPDPSRAYLTLGVQQLFPYWFEFEGALFVSNKGELLARLEGSYDLLLTQQLVLQPRAELNFAAQNSQDIGVGAGLSNAELGLRLRYEFRREFAPYIGVSYDQKLGNTAAYARSSGKDSGSTRFVVGLRSWF

SEQ ID NO: 12547 - protein, 72 aa, BradyrhizobiumColbertium
MLQTAPNHMASISSGAGPSQNAKSGYQTRPAGNQVSLEEEMMKSAQNQMDYAAATSLYSKSLNLLKTAIGKR

SEQ ID NO: 12548 - protein, 122 aa, BradyrhizobiumColbertium
MWQLLAPAEKPKSYIVDVTEPELSFAGREGKALFDTNCAPCHGLKAAGTDHGPPLVHDIYNPGHHADAAFVFAAQNGVRQHHWSYGNMPPQPQVSAQQIMSIVQYVRELQVANGIRFRSHRM

SEQ ID NO: 12549 - protein, 171 aa, BradyrhizobiumColbertium
MKPKEGTSPASSKPAQRKQDALKRLTWEIISINFSIEKLHRIRARALNISGPQWKILLAISDHEDANDGIPVNVVAKTLHVDASFVTTQSKKLENMGFLSRKPCPADARVMRLALSKASVQQLASVAEQEIALSEFIFQDFCEKELSEFSIKLASIKKRLDKARLKLALEF

SEQ ID NO: 12550 - protein, 492 aa, BradyrhizobiumColbertium
MKCRVTTASLRTMIIRALSISAAAALTLNPVLTPVIADDYRPAAQVSAADGQMNARFLSLGIGKSIVIDLPRDIKDVLVADPKIANAVVRSSQRAYIIGAAVGQTNIVFFDSAGQQIASYDIAVKRDLNGARAALKQILPNSDIQIDGLGEGVVLTGTAQSPIEAQQANDIAARIAGGADKVVNSVVVRGRDQVMLKVTVAEVARNIIKQLGIDLSANLNYGTAVVNFAHSNPFTAYGRNLVDGNNLTTKFGATPSVQTVLRAMESAGVLRTLAEPNLTAISGESATFIAGGEFPVPAGYACDPTTRVCTTQISFKKFGISLNFTPVVMTEGRISLRVMTEVSDLSNENAITLSQAVSSTSVNSLTVPAIKTRRVETSLEIPSGGAIAMAGLIQQQTKQAASGLPGLMQLPILGSLFRSRDFVNNTTELIVIVAPYIVRAVAQKDLSRPDDGFAAPSDAQAELLGNINRIYGVPRRTEPARKYGGSYGFIVD

SEQ ID NO: 12551 - protein, 42 aa, BradyrhizobiumColbertium
MALRSISEANAKEPASDEPTRKRGESISIIRFGVPSQMTAQK

SEQ ID NO: 12552 - protein, 173 aa, BradyrhizobiumColbertium
MPLWRARASVSVCSGVTSSRTVRAGDGADVRRQHRSPDAAEVGLNLLLVADVSPRIKEARAIAPSLGVSDGRSVRRMKVALAVTAGQVCHGTSSGLTGWPGADGVLGDEDVNDGKLYDRAAGGGADLSEQPARRAASPAPVAATRITVRALPISLYNHAASSSQLSSHLSKYG

SEQ ID NO: 12553 - protein, 49 aa, BradyrhizobiumColbertium
MILQFQASRGANDSLAKRRARLMRMAVVAATSEALTVQLPSRSGKSARA

SEQ ID NO: 12554 - protein, 621 aa, BradyrhizobiumColbertium
MGLNSALASAMSGLRANQAALSIVSSNVANSQTPGYVAQTPNQIEVTTGDFGSSVITTGVSRELDRYVQDQLRTETGGAGYADQMANILKQLQSVYGNPGGSGTLESGLNKLTSALQALSTSAGAQSAQTVAISAAQALAQQLNVSTKGIQSLRSNVEQDLGISAQQANAAMTQIAAINGKLQGLALNDPSAATLMDQRDQAINTLSKYVDVRVVTDASNQANIFTTTGIQLVGADLASQFAFSSRGALNAIALYDPNPAKSGVGALNVKLPNGSSIDVVANNVVSSGQIAADIKLRDQTLVQAQTQIDQLAAAIASALSDQTAAGKAVTGPPAGFDVNLSGALPGNTVNLTYTDKTSNTQRQITLVNVTDPAALPLQNAGNANPLKVGVDFSGGMTSILATLNSVFGGTPLTFATSGATLQIRDDGTGSAAVNSASLTKTISSLASGNPQLPLFTDGGALYTGAITAAGSQMTGLAGRIQVNAAVLSDPTKMSIYSTSPQTPAGDTTRSDYLYSQLTNAVFSYSPQTGLGSTGQPFTGSVSRYLQQFLSVQSNASTQATQLQQGQSVVVSTLQAKFNSTSSVNLDAEMSNLIQLQNAYAANARIMSVVQTMMDTLIKAQA

SEQ ID NO: 12555 - protein, 420 aa, BradyrhizobiumColbertium
MIANQTEATYKFTDNAGFKHTALGGFEYDRERSSIDRYLGLSSEALPGGFSGNGSLAGVSVFYPQFTNLPFGVPFGLSGLPTKIAIDTKSIYVIDSANYNDLLILNGGVRYDDYNIKVNGYGTVNGVANVFGQQEQHTGMPNFNLGLTLKPLPNGSVYAAYATSSNPVGAEFDGTSIQYGGLAPVLNGNPPQIFGPEKNRAIEIGTKWELFDRHALLTAALFQTEKENARESRNITAATATAACPYPAGTTGTVSCLSAGAAYRIRGIDLGLGGNITDKWSVMAGLVLMQSEVTKSNIPPANTTLYATNVGRPLANVAHQSLSLLSKYQVTDVWELGGQAVYRSKVYGGTFLAANQGTSIPSYWRFDAFAEAKINQNWKLKVHVNNIFDKRYYDALYQSAAPFVFQAPGRAAYLVISARY

SEQ ID NO: 12556 - protein, 687 aa, BradyrhizobiumColbertium
MNHRTSRGTFGRETGIIDLGHEPPLSVDGSEAAVIDRRRVSVQWFSGTILTGLCGAALIGGAVFASLDGEMTFAKVPERVEGALRGAFGAADRAATLHKSDRLPPPSESTASRNIVRVSTVARVGSRDVMRVRPFVRIAGNLSMTTSDLSAKIPPFNAQRLLTDVGSDPKTASDDPNNPEAVEPDAEVSFVTKDLSAVLPKAKISAVVALDDILMRVRDAANWRGNGGVRYASLANATADISGATGPSDIKMAYATETSSSDPYAGFETRVVPENVTLLPKTKEQITGGNPNGERVHMVKKGDSVAGVLRDLGATAEEIKAITATLGPRGRDGGLKEGEKLRILMAPASPGARLQPYRVVIANETMVEAIAALSDLGKYVAVDVSSMNTVADAAANASSDDDSDDDGSGVRLYQSIYETAMRNKVPMPVIEDMIKIYSYDVDFQRKVQPGDSFDVFYAGEDEGVTSSEKNEVLFASLTVGGETKKYYRYQSPDDGVVDYYDETGKSAKKFLVRKPVNNAIMRSGFGGRRHPILGYVKMHTGVDWSTSYGTPIFASGNGMIEKAGPEGGYGKYIRIKHANGYETAYGHMSAFAKGMEPGKKVRQGQVIGFVGSSGLSTGPHVHYEILVNGRFVDPMRVKLPRGRSLEGPMLASFEKERDRLEGMMSGRGSAIARMSDATGGPLQVTNR

SEQ ID NO: 12557 - protein, 539 aa, BradyrhizobiumColbertium
MKNGLACAAVVAALFSATTASADGWEVTRLVPGSAFHGVHGLAVDKAGHLFAGSVAGAALYEVDIASGSAKVAIPAPVGMADDIAFAPDGTMAWTGFLAGELYARKGDGRIKKLASGLPGINSLAFRKDGRLYATTVFLGDTLYEIDVEGIKPPRQIMEKMGGLNGFEFGPDDKLYGPLWFKGQVAKVDVDKAELTVVAEGFKVPAAVNFDSRGNLFVIDTALGQLVRVDPKSGAKATVAQLKPSLDNLAIDGRDRIYVSNMADNGIQEIDPATGQAKQIIIGRLALPGGIGVTSENGKDTIHVADVFAYRTVDGATGEVTEKTRMHAAGRTLEYPMSATAKGNDVILSSWFTGTVQVIDGKTGATRDMLHGFKAPHDAVVLADGSILVAELGTKSLVKVSGEHGKDRVTLIGDLEGPVGLVRGAGDEVYVTEAFAGTVSRIDGNGKKALVAKELKMPEGIARTSDGQLIVAEVGAKRLIAIAPESGKITEIAANLPIGLTGAPGGLPTHIPTGVAVGATGAIYFSSDVENAIYKAVKK

SEQ ID NO: 12558 - protein, 88 aa, BradyrhizobiumColbertium
MTRLSRDDVVKAVDRADDVTIAQIIGTGATAEELAEAQAWLANDEPMINDLRPLAQGRVRELVDILSELEEDDEEAGPAKAGSAPAAG

SEQ ID NO: 12559 - protein, 879 aa, BradyrhizobiumColbertium
MNIEKYTERSRGFIQSAQSLAMREGHQQFSTLHVLKVLLDDNEGLAAGLIDRAGGNSRAILKATEDALGKVPKVSGGGAGQIYLAPELARTFDAAEKAGEKAGDSFVTVERLLLGLTLEKTSEAGTILNKGGVTPQNLNAAIEALRKGRTADSATAENAYDALKKYARDLTQAARDGKLDPVIGRDEEIRRTIQVLSRRTKNNPVLIGEPGVGKTAIAEGLALRIVNGDVPESLKDKKLLSLDLGALIAGAKYRGEFEERLKAVLQEVTGSEGTFILFIDEMHTLIGAGKGDGAMDASNLLKPALARGELHCIGATTLDEYQKHVEKDAALARRFQPIFVSEPSVEDTISILRGLKDKYEQHHGVRITDSALVAATTLSNRYITDRFLPDKAIDLMDEAAARLKMQVDSKPEELDSLDREIIRLKIEQEALKKESDLGSKSRLQTLEKDLAELEEKSAALTARWSAEKSKLSDAQKLKAELDGLRVELANAQRRGEFQKAGELAYGRIPQLEKQLADIEAKENSGEMMEEAVTANHIAQVVSRWTGVPVDKMLEGEKEKLLKMEEQLGQRVVGQAEAVRAVATAVRRSRAGLQDPNRPTGSFMFLGPTGVGKTELTKALAEYLFNDETAMVRLDMSEYMEKHSVSRLIGAPPGYVGYDEGGALTEAVRRRPYQVVLFDEIEKAHPDVFNVLLQVLDDGRLTDGQGRTVDFRNTLIIMTSNLGSEYLVNQPEGEDTSAVREQVMGMVRGHFRPEFLNRVDEIILFHRLQRSEMGRIVEIQFTRLQKLLTDRKIVLTLDAAGRDWLAAKGWDPAYGARPLKRVIQRYLQDPLAEMILAGDVRDGDSVAISSEGNVLTFNGKAPQTAEIAQFEAPVAKRKLN

SEQ ID NO: 12560 - protein, 262 aa, BradyrhizobiumColbertium
MIDSHIAEITDLYRYPIKGLTPERLSRVPLRVGKTLPADRRYAIENGPSGFDPDAPQWKPKIQFLMLARNERLAELHTRFDDASHVLTISRDGRIVASGDLETAAGRAAIEAYFSENFQPELKGPPKVLSGRDHSFSDVARKVVSIINLDSVRAIENMLDGVAVHPLRFRANLYVKGWPAWSELDLVGRTLAVGQARLQVVKRIVRCPATNVDPETAKRDLEIPPTLSRHLGHMDCGIYAEVIADGDIGVGDAVAVEEPKLV

SEQ ID NO: 12561 - protein, 214 aa, BradyrhizobiumColbertium
MVELFAFRLSRCVVALALFFAAVAAFVSPASARPLHRHSAERHSHVHHARHHHHRHHARSSRFARSAAQLQASGFDNTQASYDPNANAGGAGMNGGFGGGSGLVSEARRYLGGNPTGRGRLWCARFMNMVLQQTGHQGTGSDMASSFARYGTRVSGPQVGAIAVMSRGRRGGHVGIITGIDAQGNPIMISGNSGNRVREAPVSRGRIYAYVMPN

SEQ ID NO: 12562 - protein, 43 aa, BradyrhizobiumColbertium
MKASAENDPEIMKDPRNNLLHDPTRIDLLFTMSENTHLAVYPD

SEQ ID NO: 12563 - protein, 491 aa, BradyrhizobiumColbertium
MDTLPNEGFRPVDLCGYTEAGQVRFASIWERTTTPEWVARHGMTAGEYQQQFNHWATHGFILHRVSGYLDGGQTRYAALWSRGPDLTWQARHGIDAAQHQTEFNALVNRGYRLVKGNGYPEGGTVHYASIWHKPFLSDRDETTIRQAVQNFMTAHNVPGVSIAMTRNGALMFARAFGNSDSAGTPVLPSHLFRIASVSKPITSMAVFRAIEAGLLALTDRVFGQGGILGTQFGTLPYPDQRVTQITVQHLLEHTSGWSGAQDPMFGQPSATHADLIGQMVGLTLANNPGAIFDYLNFGYCVLGRVLEQVSGLSYADFVRQRVLAPCGVTDMHIAGDTLAQRRSNEVTYTQQGTFNPYALPVARMDAHGGWIANPTDLLRIALRFDGFPSRPDLLQSTTVATMATATTAPAAGGGAANYAKGWAVNSAGNWWHLGDFAGTISELVRTSDGFCWAILANTRNDAQLNAMRAAIDNLGWTIKNGITDWPAGDAI

SEQ ID NO: 12564 - protein, 46 aa, BradyrhizobiumColbertium
MMKCADIMSNRPRIAKHDLKVNVPDGTDIDATLDDGAPQWEDRWEE

SEQ ID NO: 12565 - protein, 130 aa, BradyrhizobiumColbertium
MLAIAIVNLAPAIAATPKGPVASPALQKEFDGFMEKFRAALSANDSAAVAGMTQLPFMNDNAIRDAAQFRTKIYPTSFTAKNRACIQRGKAFYDRDQQNNDYYSVFCGQLIFLFTKTPAGFLFTDIGAND

SEQ ID NO: 12566 - protein, 45 aa, BradyrhizobiumColbertium
MADRGARRGHLRSARDGASISTVVADNEVQIRDPYATALVGRDAE

SEQ ID NO: 12567 - protein, 378 aa, BradyrhizobiumColbertium
MSLPPAQIGAPLSEIDTPALIIDLDAFERNLETMAAAVGKLGVRLRPHAKTHKSPIIAAKQIARGAVGMCCQKVAEAEVLVAGGVSDVLVSNEVVGLRKLERLAALARHARISVCVDDAIMVEQLSHAAERAGSQIEVLVEIDVGAGRCGVRPGPAAATLARQVAASRFLSFGGLQAYHGSAQHLRTPEERRAAIAGAANATAETLRVLKDAGFQCRTIGGAGTGTFELEGASGIWNELQAGSYIFMDADYAKNLADGAHNANLFEHALFVIATVMSTGAGERAVIDAGHKALSNDSGFPVVLGRPDLRYHRPSDEHGLLDFDSASSRLALGDKVTLIPGHCEPTVNLYDWYVGVRGFHTPNARVEALWPIAARGAVT

SEQ ID NO: 12568 - protein, 466 aa, BradyrhizobiumColbertium
MDTGSNRTLAERLIDQLADRIGGLGVELADIAGNVQEVANRVANQSERFHHLQKTAETMVSANHDIANASQAVQTTTSAAVGEIAQSRSAVDNAVSHISELVAAVERIEARLSAVGSALAQVAKVSGSIEAIAKQTNLLALNATIEAARAGNAGRGFAVVASEVKNLAEATRQATHQISDTVRDLDGQIEGLIGESSDASQRAKTAGEGAQAISGIISRVQQGFASVEAEIDSVARAATSNLGHCDTVISELNELAKGVDLSSRDLKHADERVAKLLDTSEGLIALIADSGVETSDTPLIRTVVETAKRISTEFEAAIDRGEITLDQLMDETYREIPGTDPKQYLTSYVEFTDRVLPAIQDPIQKSDPRIVYCVAWARSGYLPTHNPNYRLPQGKDPVWNNANCRNRRLFTDRTVKKVAGSTKPFLLQTYRRDMGGGQFVLMKDLSSPIMIRGRHWGAFRMGFRQG

SEQ ID NO: 12569 - protein, 581 aa, BradyrhizobiumColbertium
MAFGLFRKRLPEMPAPLAAPEAALSAPHSEPAPTEGDSAREILELLELELGGMIRQLERAANSVAGGAEATAATLAAIRDRTDALTGRTNAAQSTASTFADAADKFTQSAQGIGAQVRQAGKLADEASTAAQEARANVDRLRESSAAIGNVVNLIAQIARQTTLLALNSTIEAARAGAAGKGFAVVATEVKALAVQTQSATEEITKKIDALQRDAAGSADAVHRISQAIEAIRPVFDTVNGAVAEQNATTSEVSGNAASASEFIISVGESAAEIDAATKAAETHGENVASAGKAVTTFAQKLKSRCAVLLRQSEHADRRKTERLPCHLKFETTRGVMPVYEIAMDGVLIGGADAGRLAPQATIEGSLEDIGTCRLRVVEQSKAGARAQFVNANAALSEKIEDKLWSIHEENTEFVTRAMEAGNALTKIFEQAVARGEVKMEDLFDVDYVEIAGTNPQQYRTKYLDWADRALPPFQETFLAKDPRMAFCAMVDRNGFLPVHNRIYSHPQRPGDVAWNTANSRNRRMFNDPAGLAAARNLRSYLVQSYARDMGNGNTVMMREIDVPIRVQGRHWGGFRTAYKL

SEQ ID NO: 12570 - protein, 248 aa, BradyrhizobiumColbertium
MAGHSQFKNIMHRKGRQDAQKSKIFGKLAREITVAAKLGTPDPAMNPRLRAAVIAARQENMPKDNIERAIKKAIGSDGENYDEIRYEGYGPGGVAVIVEALTDNRNRAASDIRSFFTKSGGNLGETGSVSFMFDRTGIIEYDRSVASDDAMLDAAIEAGADDVVSGESGHEIYASTEGYRDVAKALEAKFGEPRKAALIWKPQNTVAVDDETGEKLLKLMDLLNEHDDVQNVYANFEVSDALMAKMGG

SEQ ID NO: 12571 - protein, 175 aa, BradyrhizobiumColbertium
MTALPIRGPVRIIGIDPGLRRTGWGVIEAEGNRLIYVACGSVEPPDDLPLASRLLAIHEGLAAVLSSHEPMEAAVEQTFVNKDGVATLKLGQARGVAMLAPAMFGISVAEYAPNQVKKTVVGAGHADKQQIAMMLKILLPKAEPPSADAADALAIAITHAHHRQSTALRLKVAGI

SEQ ID NO: 12572 - protein, 213 aa, BradyrhizobiumColbertium
MYCDRGPEMIGKLKGLIDSYGEDFVILDVGGVGYQVHCSSRTLQHLPSPGEAAVLSIETYVREDQIKLFGFRTDHEREWFRLLQTVQGVGAKVALAVLGTLAPADLANAIALRDKAAVARTPGVGPKVAERIVTELKDKAPAFANVDPAVVHLAGAVDDQRAPRPVADAISALVNLGYGQPQAAAAIASASRSAGENAETAQLIRLGLKELAK

SEQ ID NO: 12573 - protein, 352 aa, BradyrhizobiumColbertium
MSDPKASRMVSPERRSDDVGDTALRPQSLSDFVGQQQARKNLSIFIEAARKRGEALDHVLFVGPPGLGKTTLAQIVAKELGVGFRATSGPVIAKAGDLAALLTNLEERDVLFIDEIHRLSPAVEEVLYPAMEDFQLDLIIGEGPAARSVKIELSKFTLVGATTRAGLLTNPLRDRFGIPVRLNFYTIEELESIVSRGARVLNVGMSADGANEIARRARGTPRIAGRLLRRVRDFASAANADTIDRTIADHALSALEVDAAGLDAMDRRYLTTIALNYGGGPVGVETMAAALSEPRDAIEDIIEPYLIQCGYLQRTPRGRLLTSHAFRHLGLAEPNRDPAQFGLFGTDQADED

SEQ ID NO: 12574 - protein, 289 aa, BradyrhizobiumColbertium
MGLTDDTGVLELIAAAPQLRTPDETEAFLDPMPISELASMWCALQRVSRRDQAGSIWALKLYFDHLPHRRPQQALDLVLEVLKTEADKPTVMQLNDKFLLSLLYAHGEVVIARIEHEAAHNDRLRWLLGGVHVAPDDPLMSRIAELADSEAWQADYAAQRTPREPLDCASMPTAALARAWVEQYSKSDRDQDDNLFAIMDFERDLREDDPDRMIDLILEILKIEANPVLLSLLAAGPLEDVISAGTIDRIEREARVNERFRDLLGGVWYYRAPEELKTRLDALIGESRW

SEQ ID NO: 12575 - protein, 340 aa, BradyrhizobiumColbertium
MCRPLHADADGLHGRTPIPLQSDRIETLHQKRASMITRRHLIRSIGGLSALGISTAAYGVGVEPMLRLRVTRYHPTPRQWPADLPLKIAVIADLHACDPWMPLDRVEAIVDRTNALRADLIVLLGDYVAGLHQVTRLIPCSEWARVLAGLKAPLGVHAVMGNHDYWDDRAVQRAGQGTTIAHRALEAAGIPVYENDVVRLTKNGRPFWLAGLGDQLAFLPARRFRTMARFGADDLTATLAKVTDDAPIILLAHEPHIAPRVPSRVALQLSGHTHGGQVRLLGWSPAVPPQHGVRLAYGHVRLKCDVIISGGLGCSILPLRFGVPPEIVEVTLGRAGHLVS

SEQ ID NO: 12576 - protein, 149 aa, BradyrhizobiumColbertium
MTAHLDGEIRDGRHHMQVRVYYEDTDFSGIVYHANYLRYMERGRTNHLRLMGAEQQALFEQTETEGAGFAFVVRSMHLDFLKPARMDDVLDIVTWPVAVKGASIMLAQEVRRGGDVLVKAEVRVAFISGGRAQPIPKSIRMLMKADLIS

SEQ ID NO: 12577 - protein, 155 aa, BradyrhizobiumColbertium
MSRPPLPPFTKETAAQKARMAEDAWNSRDPVRVSLAYTEDSRWRNRSEVFQGREAIVAFLTRKWEKEQDYRLIKDLWAFDGNRIAVRFQYEWHDAGGQWYRSYGNEQWEFDEHGLMRRREASINDIAIAENDRRFHWPTPGPRPADVPGLGADPF

SEQ ID NO: 12578 - protein, 239 aa, BradyrhizobiumColbertium
MARITIIETGLVPREHRERHGSFPDMFARMIRAEDPTATVDVVSIPNGDALPDPRELEAILITGAAAGVYDGLDWIAPLEDFVRRAYADKTPMVGVCFGHQLIAQALGGTVRKSDKGWGIGRHVYQVLPENGVLDGETVAIPCSHQDQVIEPPNDALTILRSDFTPHAGLLYANGTTLTVQPHPEFDVEFAQVCCDMRDGKAPEDVVATARQSLQQPMESAKLGGAITRFLARKSIPSS

SEQ ID NO: 12579 - protein, 313 aa, BradyrhizobiumColbertium
MIGSEMVRINSRQVEAFRATMLTGSVTEAAKLMVVTQPAVSRLLRDFQALLKMELFERRGTGLVPTAAAMALYTEVERSFVGLERISAAAEEIRGRRTGSLRIAALPALANGYLPRLAGHFLMERPNLNLAFFGVISPIVVDWVLNNQCDIGFAEVPIAHSGLPSLRLPALARVAVMPAGHRLAEKDVLEPRDFEGETFISLSAGSSSRHLVDQVFHRNDVRRVLRVETTLSEIMCGMVSSGLGVSICDPFTAQEFATRGVVVRRFLPRIDFEFSAVFPAQRSPSPVALDLVETMRKALLEFEDNPARDFAHG

SEQ ID NO: 12580 - protein, 161 aa, BradyrhizobiumColbertium
MKTLRLLTAVSIAALVAVPSVASAQQKTLYVAGYGGSFEKTIRDEVIPAFEKENGVKVEYVAGNSTDTLAKLQAQKGNQQIDVAIVDDGPMYQAIQLGFCGKLDGLPADLYDTARFKDDRAVAIGIVATGLMYNTKVFKEKGWAPPTSWNDLKDTKSPSSS

SEQ ID NO: 12581 - protein, 196 aa, BradyrhizobiumColbertium
MERPEGHEIAKQLVIPPINNTYGLEALVMLSKMNGGGETNVDPGFKIFKEQINPNVLAYEPSPGKMTELFQSGQAVIAVWGTGRVQSFANTGFPVDFVYPKEGAATLLTTACPINKPNASPVAASFVKMLLDPKIQLVMLKDYGYGPVLKSLVIPPELGKMAPIGERASKLYNPDWTVINEKREEWTKRWNREVER

SEQ ID NO: 12582 - protein, 346 aa, BradyrhizobiumColbertium
MAYLELDRVAKQFGAQTVVDDFSLSVGKGEFISFLGPSGCGKTTTLQMIAGFLDPTRGAIRLEGKDLTAIPPARRGLGIVFQSYALFPHMTAAENVAFGLEMRKVPRNERAERVRAALAMVGLAGYEDRHPRRMSGGQQQRVALARALVIKPSVLLLDEPLSNLDAKLREEMQIELRQIQRTVGTTTILVTHDQNEAMSLSDRIVVMSQGKIEQIGTPQETYEKPASAFVSQFLGKTNDFAATIDRTAAPARLVVGSWAVPAPAGFNGAVTVSVRPERIGFGDAGLTARIVTRIFQGNHWLFQCDSECGPAIVIRQNDGKAQPAEGDAVRLTWRPEDMSARARESA

SEQ ID NO: 12583 - protein, 291 aa, BradyrhizobiumColbertium
MSGVAEERGARAPWALTAPALMLFVGVLLIPLAMTVMLSFHDWGQYKGIEPVFILKNWYEIAADPYYAEMFWRTFRIAILTTLLTALLGAPEAYILNRMSGRWKSFFLLVILGPLLISVVARTLGWALLFGGNNGLVNKLLMSLGVMRSPIPFMFTETGMVVALAHVMMPFMVLSVWAALQRLDPQIENAAMSLGAGPVTIIRRIIMPQIMPGVLSGAIIVFSLSASAFATPAIIGGRRLKVAATLAYDEFLNTLNWPLGAAVATLLLFALVLIVVGSNALIERRYAEVFR

SEQ ID NO: 12584 - protein, 268 aa, BradyrhizobiumColbertium
MRRNGPLALIFHTIFVIIMLAPILVVCLVAFTPEGYLSLPTNGFSLRWFRAIANYPEFIHAFWVSLGLGALSSLVALLFAVPAALAIARYRFRGRDALAALFLSPLMIPHVVLGIAFLRFFTSAGLGGSFAALIIAHVIIVFPFALRLTLAAATGMDRTVEMAAVSLGAGGWTLFRRVTLPLILPGVISGWALAFIQSFDDLTMTVFLAAPGTETLPVRMFLYIQDNIDPLVTSVSACVIAITMSALILLDRFYGLDRVLAGKGDTGR

SEQ ID NO: 12585 - protein, 378 aa, BradyrhizobiumColbertium
MSGEYDVAVVGGGLLGSAIAWGLGRLGKKVAVLDEGDITKRASRATFALVWVQSKGLGMPAYTVWTVRAAEAWSRLASELKQQTGLDVCLQQNGGFHLTLGEEEFGQRSELVRRMHNQVGAADYKMEMLSASEVKKSLPLIGPEVSGGSYCPLDGHVNSLRTFRAFHTGFKAFGIDYLPERPVSAISRSGGEFRLTTPKGELRAARIVLAAGNANQALAPMVGLFAPMGPTRGQIVVTERTMPFLPHPLTTIRQTDEGTVMIGDSKEDELDDRALKHSISAVMTDRAQRMFPHLSRLNVVRSWAGIRVMPQDGFPIYDQSETHPGAFVACCHSGVTLASNHAFEVARMVAQGALEPELVGAFSASRFGGAGAANNSGY

SEQ ID NO: 12586 - protein, 98 aa, BradyrhizobiumColbertium
MFRRSEHDQRPPVQIFVDGVAVAARQGDTVSAALLASDVDARRSTAVSGAPRLPYCMMGVCFDCLVTIDGVGNRQGCLVPVADGMQVEIQKGKREIGK

SEQ ID NO: 12587 - protein, 472 aa, BradyrhizobiumColbertium
MTLAPKREDYDVVVIGAGPAGLAAAATAAEAGLSTLLLDENMGPGGQVFRAISSTPVTDRNQLGADYWVGADLVQVLRASSAEVIHRATVWSLDRNLEIAASIGGASAFVKANRVIIASGALERPFPIAGWTLPGVMTAGAAQTMLKSSALVPNGRTVIAGQGPLLWLLAAQILRLGGRIDRILDTTERGNYLAALPHAFAFLTSPYFAKGLAMMREVKAKVQVVSGVTELSASGDGQLASVSYVAGRRRETVPADLLLLHQGVVPNVNLAMAAGVEHRWDDLQLCWSPVLDANGNSSVAGIAIAGDGAGIGGANAAVVRGRIAARAAVEALAPASAAKLVPMAQLRTDLAKAERGRVFLDTLFRPARQFRIPSGDTVVCRCEEVTAKDILDAVAIGATGPNQLKAYRRTGMGPCQGRLCGLTVTELMAQARGKTPQEIGYYRLRAPVKPITLAELAAVPKTEADVKAVVRG

SEQ ID NO: 12588 - protein, 375 aa, BradyrhizobiumColbertium
MDAIVVGGGIHGCSTALHLCLAGMKPMLIEKDYAGRHASGVNAGGVRQLARHIPEIPLSIRSMGIWEKVAELVDDDCSFESHGQVLVAENEEELAVCRARVAELNGLGFTHEELIDAAELRRLVPAVAETCPGGVVSRRDGAANPAQTTTAFRRKAERLGATVREGVAANNIRYRDGLWHVEVGSDTFAAPVLVNAAGAWAGKIAADLGEPVPVETVAPMLMITSRVPHFIDPVVILRGRKLSFKQFVNGTVLIGGGHLATPYQDRNETVLDWKSLATSAQTVFELFPVMRSATIVRAWAGIEAKMKDDIPVFGPSSRHQGLYHQFGFSLHGFQLGPGAGAVMAELIVNGGTQTRVSDLGIDRFHPSTLQNKRTS

SEQ ID NO: 12589 - protein, 115 aa, BradyrhizobiumColbertium
MSITRSIRTPIMHRAVEANGFVFLGGTIADDTSVSMGEQTRNILGKISGYLQEAGTDKSRVVSASIFVTDLSKKKEMDAAWTEFFGDNLPTRATVGVADLGGGALIEVVVTALKG

SEQ ID NO: 12590 - protein, 537 aa, BradyrhizobiumColbertium
MPASIILSNLSLSTPDGRSLLAGIDLTFGAERTGLVGRNGVGKTTLLAAISGDHLPQSGRVLINGTIGLLRQDVQLPAGATVADLFGVRSAVELLRRAERGDASIDDMAAIDWTLEGRLEIALARLGFDLSPDTELSCLSGGQITRVRLAALLFAQPDFLLLDEPTNNLDLDGRKAVIDFLATWRGGAIVVSHDRNLLEAMNAIVELTSLGATRYGGNWSHYQVQKALELAAVRQDLAHAEKSLSEIDEKAQEAAERKARKDVGGRKKRAKGDMPRILAGARKDRSEDSGGKTVQIGERRRAQALESVDAARRRVEILQPLSIRLAATGLPAAREVVWLDSVSAGYRTEQPVLRGLSFTMVGPERVALTGPNGSGKTTLLKVIAGELPPIAGTVRVRPDFAFFDQKVSLLDPALSILENFGRLNPAAGDNACHAALARFMFRANAALQPAGSLSGGQMFRAGLACVLGGAAPPSLLILDEPTNHLDIESVEAVEAGLRAYDGALLVVSHDEAFLQAIGITRRLDLIASMPRANGRIT

SEQ ID NO: 12591 - protein, 119 aa, BradyrhizobiumColbertium
MMRMMPKNIFAPCRSKSAASARARQTRLRFPIEEMPHQGAEDHRGIIILISAMKPSPIGFTATALGIGIANEEVERDRDQDLDAEDLVPGLMLAEDGWLDRDACRIVGSETYRCLICMM

SEQ ID NO: 12592 - protein, 466 aa, BradyrhizobiumColbertium
MMVVAEATITFLPVSTKIEHWAAIGGNMSKATGSDEHVQGYFPRWKLKTSGVIMPEERLSWGQTIVSSLQHCVAMSGSTIIAPLLMGFDPNIAVLFSGIGTLIFFVIVAGRVPSYLGSSFAFIAVVIAATGYAGQGPNPNLSVALGGIVGAGVLYGVISLIVMWSGVGWIERLLPPAVTGAVVAAIGLNLAPVAVKAVSAGAFDTWIGLATVLIIGVVAVAAQGLWRRLPIIVGAIGGYLLYWLFTNGLGLGKPIDFAQVSAAPWFGLPNFTTPTFQADAIFLIAPVAVILVAENLGHIKAVGAMTGRSLDAYLGRALFADSLATIVAAFGGGTGVTTYAENIGVMAATKVYSTLLFAFAAVVSILLGFSPKFGALILSIPGPVIGGLSIVLFGLIAAMAGRIWVENRVDFADPANLITVAVALIAGAGDLTLRFGAFTIGGIGTATFGAIILYQVLTSPMARRLG

SEQ ID NO: 12593 - protein, 278 aa, BradyrhizobiumColbertium
MQQTDRRTSFPSRLVGQHALVTGASQGIGRAVAVRLAQEGAAVAINYFGSPEGADETLALARAGSAARGHEGLDHVIVKADVGSEQEIAAMFETILARWKRLDCLVNNAGFQRESPSEALDVETYRRIIDVNLNGAVLCAQKALAHFVARGGGGSIINCSSVHEIIPKPGYLAYSISKGGMANLTRTLALEFAGRGIRVNAVGPGAIDTPINAAWTGDPQKREVVTSHIPMGRVGTPEEIAAVFAFLASDDASYITGQTINACGGLTLFPEFRENWAS

SEQ ID NO: 12594 - protein, 599 aa, BradyrhizobiumColbertium
MSTTININAYSDALVVLGTAGVVVPIVRHWGINPVLGYLGAGAILGPLGLGSLVQQMPFLYWFTVTDAHNVEGIANLGIVFLLFLIGLELSFRRLLTMRRLVFGLGGLQVVVTSALIFGAALLSGQNSDTAVILGASLALSSTAIVLELLSSERRLATTAGRASFSVLLAQDLAVVPILVFVSLLAADSGGSVVAHISSAILKATVAVVSLILIGRLLMRPLFQMVAGTHSTELFVAATLFVIVGAGLAAHQAGLSMALGAFVAGLMLAETEYGKAIEATVEPFKGLLLGIFFFTVGMAIDFRVFMREPGWLLAAVIGILVGKAIVLIVLGRLFRLSWPAAIEMAFLLGPVGEFAFVSLGMAAAGGMIEPSVSGFAVAVTAVTMALIPLMGMLGRRLAAKLSSERAPDPELAVRPPADRAQAIVVGYGRVGKVVCSLLTSHGLNYIAVDHEAVAVARDRRDGHKVYFGDATEPGFLEACGLMQTTGVIITIQSRPAIDAVVERIRAVRPDVLIVSRARDADHARHLYAIGATDAVPETIEASLQLSEAALVGLGVAVGHAIASVHEKRDEFRLTLQQAARVAGHEKARPLDLAGRGPPR

SEQ ID NO: 12595 - protein, 273 aa, BradyrhizobiumColbertium
MTKASLADSPLQDFIGRHERLFVLTGAGCSTNSGIPDYRDVHGNWKRTQPVNFQSFMSDEPTRRRYWARSLIGWRRFGQARPNDAHHALARLEANGRCGMLLTQNVDRLHQSAGHRQVIDLHGRLDLVRCMGCGRKMQREEFQHALGRANAAWLTLDAADAPDGDADLEHEDFSSFEVPACDACGGILKPDVVFFGENVPRDIVATAKDHLARADAMLVVGSSLMVYSGFRFVQAAAQRNIPIAAVNLGRTRADDLLTLKVEERCEAALAFLL

SEQ ID NO: 12596 - protein, 694 aa, BradyrhizobiumColbertium
MLEGAEVRLAVDIGGTFTDIVLDVGQDRKTRKVLTTPQRPEQAVLDGMRLILADARAHISDIDVFIHGTTLATNAIIERRGAKTALIATEGFRDVLDIGTESRYDQYDLSIEKPKPLAPRSLRFTVPERIDAHGAVRLPLDEAAVRALAPKLGELGVESVAIAFLHSYANPEHERRAAAIIGDEIPGISVTLSSAVCPEIREYERTSTAVANAYVQPLIDGYLARMAEALQVEQFRGAIYLVTSGGGVTSIETARRFPVRLVESGPAGGAIFAAQIAARLGESKVLSFDMGGTTAKICLIEKYQPETSRVFEVDRAARFLKGSGLPVRIPVIEMVEIGAGGGSIAHVDAMKRVTVGPESASSEPGPACYGRGGQRPAVTDADVALGMIDPDAFAAGTIKLDPELSKQALLRDVGEPLGLSAETAAYAVHEVVCENMASAARVHAVERGAVVGQHTLIAFGGAAPLHAARVAEKIGVSRVIVPSNAGVGSAVGFLAAPIAYELVRSRHVRLDDFDTEAVSDLLQEMVTEARALVEPGAAGAPVRERRAAFMRYVGQGHEISVELPNRRLTSADLAGLRRNFEADYSAMFERPIPGAAIEVLSWSVLATTEARNPPAIASVARKPAAKASGSRKFFDGRAGEVIEIPLYRREDMVPGATIAGPAVIAEDETSTFVSTSFDAHIDGAGSIVMERKAA

SEQ ID NO: 12597 - protein, 552 aa, BradyrhizobiumColbertium
MSKASGASLIDLQIMWHRLIAVVEEQAQVLLRTAFSPIVRECGDLSAGVFDLKGRMLAQAVTGTPGHVNSMAESVKHFIAHFPLQTMKEGDAYITNDPWMGTGHLNDFVVTTPCFKDGKPVALFSCTSHLMDIGGIGFGPDATDVFMEGLYIPMLKLIDEGVVNETLMAMIRTNTRLPIDTEGDTYSLAGCNDVGCERLVEMMTEFGIDTLDELGDHICERSREAVLAEIAKLPKGSWRNTMVVDGYDAPVTLAATLTISDEGIHVDFDGTSAASKFGINVPLSYTTAYTVFGLGCVVASQIPNNAGSLSPLTVSAPAGAILNAPKPAPVASRHVIGQMLPDVVFGCLRQIIPERVPAEGTSCLWNLNVRGQTRSGAGGNYGFSMAVTSNGGTGARFGKDGLSATAYPSGVRGTPVEIAETQTPLIFWRKELRPDSGGAGRTRGGLGQIIEVASGVDAPFDILAAFDRIDHPPRGRDGGGDGEAGYVGLKSGKKLRGKGFQQVPPDDRLVVLTPGGAGIGDPRERDRAAVNEDVASGLVSSENAVKVYGYAR

SEQ ID NO: 12598 - protein, 333 aa, BradyrhizobiumColbertium
MITRRNFTAGAATLLAASHMSTRAPAASVSWDMSTVWPDGNFHTQNAMAFAEEVKKQSGGAVAIVVKAGGQLGFKGPEHLRAVRDGLVPLADVLNIQQVGDEPFMGVESIPFLCGSVEELKVLHKYVRPEYEKIAARNNQKILYIVPWPTQYLHLKAKVADVEGLKNIKIRVPDKNAVEMLNAIGMAAVMIPWGETIPALASGAVAGVSTSSVSGVDGKFWEFLKYVYPTNHVWSSQMLTVNLDAWKALSGDQQKLVADIAAKMEPGFWANSLKADVDSLNRLKEGGMEVVPVSQAMMADIRAKTAPQLDAFLKRVPAADKPVRAYLAEMKRG

SEQ ID NO: 12599 - protein, 197 aa, BradyrhizobiumColbertium
MASVSTEAPQSLNAAAPAPLRILLDGIDRLGRLDGWIGGFCLLMLTLLMLCEVATRFLSNFLPFFPPSISIAWEYSSYLMAASFTFGAAMTLRVGGHIRVVLLVKNAPAPVQRALEILAAAAGFAFMAFLTYAMARFAFAAYTRGQVSTSSDTPLWFPQAVVTFGMLLLTLQFLARAIQAALGLPLEDHRMKASPVE

SEQ ID NO: 12600 - protein, 434 aa, BradyrhizobiumColbertium
MTIEVLALFAILFALLACGVWIGLTLALTATLLLAMFRSIPLEKLLPQYAWNILTTQELLALPLFILMGELLFRTRLSRSLFQGLAPWAGLLPGRLLHVNVIGCTIFAAISGSSAATTQVIGRMSLNELLRRGYSRDIAIGSLAGAGTLGFLIPPSNIMIIYGVLGDVSILKLFTAGVLPGFLLAATFMAWVMLHSSLNPAMVPEAEARLSQVPWGERFVALKDLAPALFLIACVLGSMYGGLATPSEAAAVGVLGAGLVAWAQGAMSQQVIRDVLIGSVVTCSMIALIVLGASILGNAAAFLGIPQSVAAFVKALGLSPFMLIVALIVFYLVLGCFLDGFSMIVMTLPIVLPIVKGAGFDEVWFGVFLVLAVEMAQITPPVGFNLFVIQGLTDNSLAYIARVTMPFLIIMVGFVLLMTLWPGIVTVLPRVLYG

SEQ ID NO: 12601 - protein, 214 aa, BradyrhizobiumColbertium
MDLYFSPLACSMATRVALYEAGAEANYLEVDPPTKTVLSNGSDFRAVNPIGLVPTLRTDDGLVLTENAAILQYVADRFPQSGLGAAVGLERTRLHQWLCFIGTELHKGLFVPLLDSKAPHEAKAYALEKNLSRLDYLDKYLKGREFLLDHFSVADAYLVTVINWTVATPPIELAKWPNLKAYHERLRQRPSIARAIAEEFEMYKAELARKKAAA

SEQ ID NO: 12602 - protein, 214 aa, BradyrhizobiumColbertium
MVQKSKPPAAASQPKRRGRPRSYEPDTALGKALDLFRKQGFTATSLDDLSAATGMNRPSLYGAFGDKRELYIKSYQRYRDEAGAAIGAIFREEMPLRQRLERIYAAALDIYLSGDTGPRGCFTVVTAASEAVGDPEIRAMVLDGLTGLDKAFASCFRRAKDKGELPESADPFALAQIASATIHTIAIRSRARVPRKELEAIVKGAIDVMIGTKG

SEQ ID NO: 12603 - protein, 321 aa, BradyrhizobiumColbertium
MTPGTLAVLINSTQQNWLPERWKARFETVCGDRRVVLLPDAGLDPAEVHYAAVWKPAPGALGAFPNLRAIFNLGAGVDALMADKSLPEVPLVRVAVPDLTNRMTEYVVLHVLMHHRQELYLRECQRARRWEPRYQWSASAITVGVMGLGTLGADAADVLRRLGFRVAGWSRSPRTIDGIECFHGAAGMDAFLRTTDILVCLLPLTPDTHGILNRDVFAKLNRNSPLGAPVLINAGRGGLQNEADLLACLDDGTLGAASLDVFVQEPQPVDSRFWTHPKVVLTPHNAADTDADAISAYVAEQIARFEAGGALENVVDRARGY

SEQ ID NO: 12604 - protein, 122 aa, BradyrhizobiumColbertium
MLYAILCYHDEDFVGSWSKDQDEAVMKKLAVVQEKLTKQGRLGPVARLLPTTAAATLRKEDPPLVLDGPYAETKEQLLGFYIVDCKNLDDALDVARELGAANPGGAYEVRPVGVFRPGGNLT

SEQ ID NO: 12605 - protein, 427 aa, BradyrhizobiumColbertium
MSEADTAWIETALTSARPQAVGALLRYFRDLDTAEEAFQNACLRALKTWPQNGPPRDPAAWLIMVGRNVAIDEVRRARKQQPLPEDDQAISDLDDAEGALAERLDGSHYRDDILRLMFICCHPQLPATQQIALALRIVSGLTVKQIARAFLVSEAAMEQRITRAKAKVAEAGTPFETPGAVERSERLAGVAAMIYLIFNEGYSAGGDTAEIRKPLCEEAIRLARLLLRLFPSEPEIMGLTALILLQHARSAARFAADGSLILLDDQDRSLWNGTMIAEGLALIDKAMRHHRSGPYQIQAAIAALHARASTPEETDWAQIDLLYGALEVVQPSPVVTLNRAVAVSKVRGAQAALDLIEPLATKLANYFHFYGVRGAFLMQLGRNAEARVAFDRAIALANTSAEAAHIRMHLDRLIRDSQSKKESAKAK

SEQ ID NO: 12606 - protein, 179 aa, BradyrhizobiumColbertium
MLKVFSIIAIVLAVGVAAVLVFALTKPDTFRVERSLAVKAPADAIYPQVADFHRWTAWSPYESRDPAMKRTFGGPAGGKGATYAWDGNNNVGAGRMEILEASGPSKLRIKLDFERPFEGHNTAEFTFVPQGDATLVTWAMYGPAPFLSKLMQVFINMDSMIGKDFEAGLASLKKLTEKH

SEQ ID NO: 12607 - protein, 137 aa, BradyrhizobiumColbertium
MLNPYLFYQDTCEAAFTYYAKVLGGKIEAMMRSSEAPPEVPAAPGREKMIMHARMSLPDGGVLMASDAPAEHFQKPQGFSISLTVTDPADGERKFNALADGGSVTMPFSKTFWARGFGMCVDKFGIPWMVNCPAEGM

SEQ ID NO: 12608 - protein, 52 aa, BradyrhizobiumColbertium
MLGTLRPYSEAWWAVHDEIQAENDRQLGSKLVICPRCVHSSPLREDVTGSVR

SEQ ID NO: 12609 - protein, 162 aa, BradyrhizobiumColbertium
MVELRLRLTHLQERAGGFMRRITCLKALMLASAIAATPAAAEIRIIQSPGGQVGPFLDLFEKVRDSGERVVIDGPCLSACTLVLSIVPGERICVTKRAVLGFHAARSVDRRGRFYAEPEASVAVLAAYPGPVRDWISRRGGLSSRLLLLKGRDLAAIYPRCR

SEQ ID NO: 12610 - protein, 262 aa, BradyrhizobiumColbertium
MPQAPHKVALVTGAARGIGLATAKKFLAEGWRVALLDIEGELLSRAVAEIGQGEATLALTCDVSDAAALSDAMGEIEGRFGRLDALVNNAGIAVFAPLMETSEADWRSVLDVNLTGPFLCTKAAVPLMREGHGGAIVNVTSISAVRASTLRSAYGTSKAGLAHLTKQLAVELASLNIRVNAVAPGPVDTAMAKQVHTKEIRADYHDAIPLNRYGLEEELAEAIYFLSSASASYITGQILAVDGGFDAAGIGLPTLRGQRRNG

SEQ ID NO: 12611 - protein, 554 aa, BradyrhizobiumColbertium
MFNFQSKKVRHAIAEVEALNRSQAVIEFDLDGTILDANENLLKMSGYTLAEIKGKHHSMFVSPAERESACYRDFWASLNRGEFQTTQYKRFGKGGKEVWVHASYAPLRDESGKVVSFIKFATDITAYKIKTMEDSGKIAAINRAQAVIEFNMDGTIITANENFLNAMGYSLDEIKGKHHSVFVTPEDRASPAYAAFWAKLNRGEYEAAEYKRLGKGGKEIWIIATYNPILDENGKPFKVVKFATDVTAQKMRAADNDGQLAAIQKSQAVIEFNMDGTIRTANENFLKAIGYSLAEIKGQHHSMFVEPNERTSAAYRQFWETLNRGEYQAAEYKRIAKGGREVWIQASYNPILDLNGRPYKVVKYATDITAQAIGRKKADNARGLIDAVAAGSEQMSASIREISETMAKSRETSKVATARVESADSQAQKLATAAQAMSGIVEMISGITSQINLLALNATIESARAGEAGRGFAVVASEVKNLASQAKQATDTITSEIDALNVISGDVAGSLTAIKAAIAGVNEFIASTAAAVEEQSIVTADMSANMQRASAELA

SEQ ID NO: 12612 - protein, 134 aa, BradyrhizobiumColbertium
MRFMMLMIPLGYESAPPDVQLDPERVAAMMRYNEALKDAGVLITLDGLHPPSMGARVSFATGVPVVTDGPFAEAKEVLGGYWMIEVASREEAIAWATKCPATPNEIIEIRQVQEMSDFPPDVQAAAAGLDGLKA

SEQ ID NO: 12613 - protein, 121 aa, BradyrhizobiumColbertium
MSTGHTFLAVYLGSMSGEKMKAWHARPEAERKAMEREGMAAWHRWVEKHKDVIVEMGGPLGKTRRIDANGITEVSNALTGFTVVRAASQEEAARLFENHPHFAIFPGEAIEIMPVLPVPQM

SEQ ID NO: 12614 - protein, 246 aa, BradyrhizobiumColbertium
MSWRKEQRRAERGYHHGNLKEALLQAALGLIAEKGAAGFTFADAARMAGVSAAAPYRHFRDRDELLSSIAQRGFEQFEARLGAAWDDGRPDTVTAFERVGKAYLAFAREEPAFYNAMFESGVPVDVNPALQAASERAFNIIRAAAERLAALTPPGTPRPPAMMMALHIWSMAHGVASLFSRGDAARRKLPMSPDELLEAEVLIYLRGLGFPTDRRPAGKSAEPPPVPPEASSGSGLPPGGPWGKPK

SEQ ID NO: 12615 - protein, 163 aa, BradyrhizobiumColbertium
MAYTADVNRWRGPSDQYQRYDRPRMLDTPWHPGWIAVTILGFIIWWPIGLALLFFTLGSRRMSCWSHPDRWQNKMEKMQYKMDRMRDRMERRGFGFGFGPPSSGNRAFDEYRAETLQRLEEEQREFKDFLTRLRHAKDKEEFDQFMAQHKTRPTPPPTDQQQG

SEQ ID NO: 12616 - protein, 255 aa, BradyrhizobiumColbertium
MAQVATLASDAVWQAIRGEAQRATIADPVFGRALAGAILTHNDFAAALADLIGQRLGGAGAERTRFTSFASDAFRGEADLIEAAGRDLQAVSRSDPAAAGLLQPLLHYKGYLALQAWRVSNWLWRHDHRDAALLFQNEASNVLQVSIHPAASIGSAVYLDHATGIVIGAGAVIGDDVTILQNVSIGRSSELPARSPRIGCGVYIGAGASILGDISIGAHAKIGAGTLVSKDVPAGCTAVGNPARLTNCPEPASAA

SEQ ID NO: 12617 - protein, 172 aa, BradyrhizobiumColbertium
MSINPKTTAAVGDHPLHPMLIPFPVACLVGAPITDLAFIGTDDAFWARAAMWLIGAGIVMALVAAAAGFVDFFGEPRIRSLNDAWYHMVGNLAAVVLALVNFYLRYAQGAEAAIKPWGVVLSLIVVGILLFTGWKGWEMVYRHHVAVLDAPGQTSSEPVTPHHGGEGRRRAA

SEQ ID NO: 12618 - protein, 238 aa, BradyrhizobiumColbertium
MNPADVAQSALPVAASADVSLIALFWQAHWIVKAVMLGLLACSVWVWAIAIDKIFLYARTRRSMDRFEQAFWSGESIEELYRTLSAKPTHSMAACFVAAMREWKRSFESHARSVAGLQMRIDKVMNVSIAREVERLERRLLVLATVGSAGPFVGLFGTVWGIMSSFQSIAASKNTSLAVVAPGIAEALFATAVGLIAAIPATIFYNKFTSEVNRQAQRLEGFADEFSAILSRQIDERG

SEQ ID NO: 12619 - protein, 150 aa, BradyrhizobiumColbertium
MGMNVASSSGGGGRRGRRKPVVAEINVTPMVDVMLVLLIIFMVSAPMLTVGVPLDLPQTQAKSIENSDQKPIQLSVDIKGKVFINDSEIAINELVPKLKAITDARGGLEERIYLRADKKADYGTVAKVMGQLSGAGFKKLALVTEADQGS

SEQ ID NO: 12620 - protein, 319 aa, BradyrhizobiumColbertium
MKVNVDKTLVASIALHVLVLGWGLLTFSSKAYIAPEESLPVDIISTDQLAQMMAGQKTGKKEEPKPKVEKIAEAKPEEDAVGKVTEKKELIKTNSQPEPPPKPAEKPVEKKPEPPKPVAEAKPKEEPKPQEKKPDPAKEDPIAELQKKLETKKPPPKPVEQKVAAVHPQQQPKPKERTFDPAQIQRDLDKRAATRHELAGSALNASASLGAATGTAASNVATWRGAFQGAVKRCFTPTYNGQDADQYEADIDIPMKIDGSLASEPIVVAVRGPSRSIAQAIAESAKRAIVQCQVYSFMPKQQYESWKLIPMTFGLKDML

SEQ ID NO: 12621 - protein, 463 aa, BradyrhizobiumColbertium
MTSEQKNFAMNDVRSINRRRFMTLAGSGLAMLGGGRVFAQGQDGRIRIDPTAFQPIPIAITNFLPGSPSDGEVGNGVTQVITNNLKRSGLFAPIDQAAFIERISNMDVAPQFQNWKTINAQALVTGRMTRQPDGRLKAEFRLWDVVSGQQLTGQQYFTSPEYWRRIAHIISDQIYERMTGEKGYFDSRVVFVDETGPKERRVKRLAMMDQDGANVRYLTRGSDLVLTPRFSPNSQEITYMEFGQGDPKVYLYNIETGQREIVGNFPGMTFAPRFSPDGQRVIMSLQQGGNSNLFVMDLRSRSTTRLTDTPAIDTSPSYSPDGTRICFESDRGGRSQIYVMAAGGGQAQRISFSKDDTNASYSTPVWSPKGDYIAFTRQGGGQFAIGVMKPDGSGERLLTSGFHNEGPTFSPNGRVLMFFRDPGGNGGPSLYTVDISGRNELKVPTPGFASDPAWSPLLSSTSG

SEQ ID NO: 12622 - protein, 776 aa, BradyrhizobiumColbertium
MQFASQSGEQGQASPTISAALTDSLFEAPGTVLTGIVFSAFSASLTALKTGQMLLWGFVPLLILAGAIRAFDLSRYQAQKSVLSAEQAARWQKRYQIGALIQAAVIGLWCSTTLMSNDDAIAHMIALSVTTGIVAGGAGRAYGRQSIFRLQATLIFGPAVIALALHRTPYYVAMSVVCAAFLFSVMRLSGNLHKIFLRAVVAREREAALAGQFDTALNNMPHGLCMFRIDGQLAVMNHRFAAMMSLPDDLAQNGTTARDVVAACVEARSISAASGQAIIADIENAHAKEIITTDPDPQRNRSLSWTVQPMADGGAVVLLEDITERRTAEARISHMARFDDLTALPNRVSFRDEIEHLLAVSHDAEQLSALLFIDLDQFKQVNDTLGHPCGDQLLCAVANRLREMLRPEDFVARFGGDEFVVFQQNLNAPEDAAALARRIVERLSERYRIDNHLVEIGASVGIALTSPEGTSADTLLKNADMALYRAKADGRGTYCFFRDEMAATVEARRILELDLRKALANEEFELFYQPLVNLKSGKITTCEALLRWNHPVRGTVSPVDIIPVAEDMGLIVDLGRWILRRACMECMKWPEGVSVAVNFSPQQFHQRDVLSEIRYALEVSGLPAHRLEIEITESSLLRNTQLTHDILSQLHALGVRISLDDFGTGYSSLSYLHNFPMQKVKIDRSFLEGIDSDRPLTLLRGVARLSADLGMSVVVEGIETNEQLELINADGTVTEAQGYLFSRPVPAVRIRQLLNASYGVRGGNDQAVAASARSIA

SEQ ID NO: 12623 - protein, 243 aa, BradyrhizobiumColbertium
MKSGAEPQTALLPRGAALFERLDYRLIETPEDKDRLHLMRYRAYLQAGLIPPSESQRVTDRFDDAPNVWNFGVYVDNELCSSVRIHVLTSEWRMSYTTEVFGDVLHPRLDRGEVFIDPCRFVADPEMQQRFPELPYLTVRLPFVACEHFNADVGLSMVRTDHQAFYRRVFLSETLTEPRSFPGWPTKKAVLMASDYPKVRDRILTRFPIMRSSAFERRMLFERSTQRIAPARPIRLAGAAAQA

SEQ ID NO: 12624 - protein, 158 aa, BradyrhizobiumColbertium
MRILQGLKLAAVLAVALSMGACANKNAATDAMANAATPGSQQDFVVNVGDRVFFESDQTDLTPQAIVTLEKQAQWLQSYPRYSFTIEGHADERGTREYNIALGARRAQSVRSFLASRGIDPNRMRTISYGKERPVAVCNDISCWSQNRRAVTVLNASS

SEQ ID NO: 12625 - protein, 347 aa, BradyrhizobiumColbertium
MATVALLSLCSPAFAQSIFAQSDDGDAELRIERLENRLRQLTGQNEELQYRNRQLEERLRALEGGAQAAPGQAPNVAAMPPAQIAPGQIAPGQAAPGHRQPPVQPNYEQPQIASPAPIIQEQPAPGAPGTRRRGDAFDPNQNPNAPGAPRALGGGQQPMPAGAPSGTPGGRNAGEPLDLANTSPRYQQGVPSAAQPGYPPAQSGYPAPAGGAGLTTLPPSATPRDEFDLGIGYMQRKDYALAEQTMKNFTQRFPSDPLIGDAQYWLGESYFQRQQYRDSAEAFLAVTTKYEKSAKAPDALLRLGQSLAALKEKEAACAAFGEVGRKYPRASAGVKAAVDREQKRVKC

SEQ ID NO: 12626 - protein, 351 aa, BradyrhizobiumColbertium
MSDDDNSPISAREARRLFAGLKAAPALVLAVSGGPDSVALMWLAARWQRSLARGPQLTVVTVDHGLRPEAAREAREVKRLAAELGLPHRTARWRGAKPKTGLPAAAREARYRLLAEAARAAGASHVLTAHTRDDQAETLLMRLLRGSGLAGLSAMAPLSERDGIVLARPLLDVPKSQLIATLRRAKVGFVDDPTNRDTAFTRPRLRALLPLLAAEGGDSRNLARLAARLARANAAVEVLADGAERFLRLRDRGDAPQAGVRSFEASAFAALPEEVRLRLLLRAIDALGHEGPAELGKVETLVSALDEAMAASLRARAGRPALKQTLAGALISLAGGRIHIAPAPARRRTGR

SEQ ID NO: 12627 - protein, 52 aa, BradyrhizobiumColbertium
MRGNPKESSSLDGYNLGAVPVAAKRTRWDYLSHPRAIPAEIMAPYGGFFRPG

SEQ ID NO: 12628 - protein, 640 aa, BradyrhizobiumColbertium
MNANLRNFALWVIIVLLLLALFTLFQNPGQRASSQDIAFSQLLSEVDRGNVRDVVIQGPDIHGTFTNGSSFQTYAPNDPTLVKRLYDSKVQITAKPPGDNVPWFVSLLVSWLPFIALIGVWIFLSRQMQGGAGKAMGFGKSRAKMLTEAHGRVTFEDVAGVDEAKQDLQEIVEFLRDPGKFQRLGGRIPRGVLLVGPPGTGKTLIARAVAGEANVPFFTISGSDFVEMFVGVGASRVRDMFEQAKKNAPCIIFIDEIDAVGRHRGAGLGGGNDEREQTLNQLLVEMDGFEANEGVILIAATNRPDVLDPALLRPGRFDRQVVVPNPDVVGREQILKVHVRKVPLAPDINLKTIARGTPGFSGADLMNLVNEAALTAARRNKRMVTQAEFEEAKDKVMMGAERKSLVMTEEEKLLTAYHEGGHAIVGLNVPATDPIHKATIIPRGRALGMVMQLPERDKLSMSLEQMTSRLAIMMGGRVAEELIFGREKVTSGAASDIEQATRLARMMVTRWGLSEELGTVSYGENQDEVFLGMSVSRTQNASEATVQKIDSEIKRLVEEGYKEATRILTEKRADLEALAKGLLEFETLTGEEIVDLLKGKKPNRESVLEPTAPRASAVPPAGKSRPRPDPDPGLEPQPQA

SEQ ID NO: 12629 - protein, 45 aa, BradyrhizobiumColbertium
MKNAAGTPRFLLCERAFAPASGWLLPAMRAPPKQSASVPAVAVRA

SEQ ID NO: 12630 - protein, 279 aa, BradyrhizobiumColbertium
MAFKDILLTLASYPEPTPVSVIDDAVSVAAVLDAHIAAISCEVHAEVRASLLGDAILDIPALVAREAAKSRENAKALLAAFEASAAKSGVRHETIFEQCATATEAALLADYARLRDLTIMAVPDSHDRWYAEEVIFESGRPTLILPAAPRSRPFQLDAVCVAWDFSRTAARAVSDALPLLESAGSVRVVTVTNEKALDSKHSGEELAKNLARHGIEVVCDEIDAAGKGIDEVLTSYVFSHGIDVLVMGAYGTPRWREFVLGGATRGLLSKPPVPILFSH

SEQ ID NO: 12631 - protein, 410 aa, BradyrhizobiumColbertium
MQEAASLGSTRLIRSLTLTHAVLYGLGVTIGAGIYVLVGAAAARSGMHAPLAFLAAAVVMGVTAGSFAELGTRWPVAASEAAYVQAAFHRKWLSGATGLLVVAAATISGATITVGSAGYIGVFLPLPATWIIAGVVLAMGAVACLSAVQSIGFAGLMTVVEIGGLVLIVGAGLFQGDALVSRLPELLAPLSDKAAWTGIAQTSLLAVFAFIGFEHLVNISEEMKNPSRTLPWALFITLGVTAFLYMTVVWVAVVAVPPAELAHSSAPLALVFQRLTGLPLSVLSVIAIVATVNGIIVHMLMIGRVLYGLADQGSLPAFLARVNARSGAPMVATLFGVGAILILALGIPLTGLAEWTSRLTLGAFVLVNLALLRIKTRESEPPAGVFVVPIWVPIAGLLTSAALLLIDLLG

SEQ ID NO: 12632 - protein, 601 aa, BradyrhizobiumColbertium
MSSLVLPTEQGSDAAPNPAIVLTTAWAAIVMALGFPAIKTGVLDSLSTDDLMRLVEVRDLLAGQGWFDLIQYRLDPPGLAMHWSRVVDAPLALLIALFRPLLGQHASEALVLVAWPSMLMAVALWLSATIASQASTPADRPWLHFAAVLVTALSIPALIHFRAGAIDHHSVQIVLLLGFMLSITNLEHSAARAALAGGLAALSLAIGLEMLPAIAVASAAVMGLLIWKGAEARRSACAFGAGLSASSLLLALLLLPINSLTRPVCDAFGGPVLLLSAGGGAALLAVAGVSHLGRSIWTRLGSAAFAGALLLGAFSRSYPNCVASPYAQVDPLLVSFWLDRVSETMPVTELARVQPQKLLGYYAFPFLTLGLCLAATIRNRPQTRFLWIVSTFTLAALFGVSLWELRGAAAANIVAAPLSVMAISVLRTRAATDWGLVRAALLVSPATLGGVGFAVWPVLAGGTSSHEIATPERNVSCQTISNAAPLAALTPGRVMAPIDSGPSILAATGHFVFAGPYHRNNDGNLAMVHAMTATPQAARAILTSRKVDYIITCNGSADQEDLVRIAPEGLAARLGRDEAPDYLERVETVSRAGMTVWRVRK

SEQ ID NO: 12633 - protein, 500 aa, BradyrhizobiumColbertium
MSLSLANSIAVQDRARALVPLCAGAGAYLFFLFLGDTLLSDSDSFWQIKIGQWILDHSAMPTNDFYSFTRAGAPWISTSWLSQVAFAFSQAQWGWAGPVILTAVAFALAIAIFVYLLDVQIEAPRAVLFAMLAVLLSLHHVLARPHILALPVMVAWVGLLMATADRRGAPSWHLLPLMALWANLHGGFVLGLALIGPISLEAVEHAEKGRRLALFMRWVLFGIAALIASCFTPYGWRTLQGATNILSLGELLSLIFEWMPANFATFTPFEGALLALIAFGYYRGLVLSAPRIFLILFLTWSALTHVRSIEAFAFLIPLVLAKPLGAMFPRAVPEAVGADRWPAHYVTALGALMIVAASWTSTSLYMGHHRFTFTMTQTPVAAVDLLEQRKAQRIFNAYQFGGYLISRNIPVFVDGRAELYGEKFVMDFFKATEGKKPELLPRLLDEYKIDATLLVADAPGPQILDQLKGWKRIYADDIAVVHVREDGQSAGGRSMPAASN

SEQ ID NO: 12634 - protein, 54 aa, BradyrhizobiumColbertium
MKNLVARFLKDESGATAIEYGLIAAGIALAIITVVNNLGTTLNTKFTSISTSLK

SEQ ID NO: 12635 - protein, 328 aa, BradyrhizobiumColbertium
MQFHALTPMLDTDSRTAWQLFHLNWLPILGMGILLALGLRATGLRLEPVAYGVALAIATLLLVLAYGYRIAKGELADPKLVFSLGTIGQVILTCAIVGPLSYVAGKLNWPLEDQALLAIDRTLGLDPEPIARYVNNHPWLARTLASGYGLIKFPLLGVPIVLALTARYVRLQLFMLAMSLALAVTIAEIAIVPAIGTYYALQLPAAHLPEINTTVYAGQLRDILALRDGSLRELRLFSLSGIVSFPSFHAASAVLYIWALWPVRGIGGIAAALSLLMIAATPVMGAHYIVDVLAGIALAMASIWAAKLYLGRSRAVRGSATPASSAAC

SEQ ID NO: 12636 - protein, 226 aa, BradyrhizobiumColbertium
MVYRRTHQVVKRLAARRSAILAAAREAAAEGGMAAVQIAPVAVRANVAAGTVYRYFPSKADLISELIAEVSRDELAAIRRAADAAPGPSSALAAAVTTVAVHTLSQRRLAWGILAEPVDVDVSASRLASRREIAGEIAGRIDAAVRAGHLPAQDTALAATALLGALHEALVGPLAPDNLDDPVKMRDAVQTVTLLALRAVGVMDARARGLVVQQTLLPTTKALVGA

SEQ ID NO: 12637 - protein, 457 aa, BradyrhizobiumColbertium
MIRRLFEAGADLFRINMSHTSHDKMRELVATIRNVESSYGRPIGILVDLQGPKLRLGAFAEGAVQLQNGQTFTLDSDKTPGDATRVHLPHPEILAALRPGHALLLDDGKVRLIAEETSKEHAVTRVVVGGRMSDRKGVSLPDTDLPVSAMTPKDRADLEAALVTGVDWIALSFVQRADDVLEAKKMIRGRAAVMAKIEKPQAIDRLADIIEASDALMVARGDLGVELPLERVPSLQKQMTRMARRAGKPVVVATQMLESMIQSPVPTRAEVSDVATAVYEGADAIMLSAESAAGKFPVEAVSTMNRIGEEVERDPTYRSVITAQRPAPESTAGDAIADAARQIAETLDLPALICWTSSGSTAVRVARERPKPPIVAITPNITAGRRLAVVWGVHCVVAEDARDQDDMVGRAGQIAFRDGFVRAGQRVIIVAGVPLGIPGTTNMVRIASVGPEGDANM

SEQ ID NO: 12638 - protein, 224 aa, BradyrhizobiumColbertium
MGFFERLKTAASAEWRAYTEHPFTNGLADGSLPEAAFRHYLVQDYLFLIEFARAYALAVYKSPRLADMREAASGLSAILDVEMNLHVKLCAEWGLSPSDLEQAPPAAEMLAYTRYVLDAGMRGDLLALKVALAPCVIGYAEIATRLASHPAADALSNGYRVWIAEYAGAPYQEVAARARAHMEHLADLYATPAREAELIAIFKEATRLEADFWEMAWRAGQAVA

SEQ ID NO: 12639 - protein, 314 aa, BradyrhizobiumColbertium
MATLLIVAPVFALIAAGYASVLFRFVSESAHKGISEFAFSIAIPALLFRTIVVSEFPDVSPYRMWGAYYGALAITWIAAMAVSALLRRQRGGSEDGVVCAIGSVYGNIVMLGIPLVLSALGNEAAGPMALILSVNTPLLWLCGTLQMEFVSRRQAGSPLAIVWPVIADLARNPLMLAIGFGVIWRFTGLGLTPVVDRTIELLAQAGAPTALIALGINLFRFEVKGEKPSILVMCALKLAAMPVAAFVLARLLDLPPIAAGVIVLFAAMPTGANAYIFAVQYQRLVNPVSGAVALGTLLAAVTLPVVVWVVTGVR

SEQ ID NO: 12640 - protein, 307 aa, BradyrhizobiumColbertium
MAVLRPSRAYLAVPAHRARLVAKAAASSADAVFMDLEDAVPPAEKGAALAEAAGALSSLDWGSKHVTVRLNVVDSPFIANEIRALAALPRLDAVIVPKAERAGDIAAIAGQLRAAAPDRAEPVALELLIETALGLVNVDALAAAHSSVASLHLGVGDFAASLGARTSDVGISPDGYRHVGSAQSGYASAPLDLFAYPMMRLLVAARAFGLRAIDGPCGAFRDTRLTEASAQKAAAMGFDGKQVIHPDQIAPTLRAFTPSAEELAQARRVVEAMESAEANGQGAVTLDGKMIDYANVRMARRIIALGS

SEQ ID NO: 12641 - protein, 388 aa, BradyrhizobiumColbertium
MDGNEAELPLAGVTVVSLEQAIAAPLASRHLADWGARVIKIERPGSGDFCRDYDHVMNGMSSQFVWTNRSKESLAIDIKSPEGRKVLDALLPRADVFIQNLAPGAAERLGLDAASLLRRHPRLIACDVSGYGTGGPYSDKKAYDLLVQCEAGVLAINGTEAEPAKVGLSVVDIATGMYILNGVLMALFRRERTGKGTAFQASLFDSITDWMSYPAFYTESTGRPLPRTGAKHATIAPYGPFRVGDGNTIFFGIQNDREWRSLCRIVLGDAALADDPRFRINPLRMQNRDELQAHIEQRFASMTSEEVLRLLDEAAIANAHLNSVEAFLKHEQLHARGRVRSVGSPNGPLMSFLPALTLPGVTPRMDPVPDVGEHNAAILAELGLARET

SEQ ID NO: 12642 - protein, 39 aa, BradyrhizobiumColbertium
MPAQLLTQRRRTSRPPTRFLMVPSCPCFARQVKFGFEKS

SEQ ID NO: 12643 - protein, 113 aa, BradyrhizobiumColbertium
MPAFRFKTSLAVASFSLALAVLALPRAGFAYTQEEQQACTPDAMRLCNEFIPNVDAITACMIKKKAQLSPQCRVFFRPGPEPRQLRAGKPTQIAPKAAKKSAKPAPKKKASQG

SEQ ID NO: 12644 - protein, 225 aa, BradyrhizobiumColbertium
MNVIVFASRKGGSGKSTLAAHLAAQIKASKQVMLVDADPQGSLTLWHKLRGTNEPPIKAAVNSVSGIVSAAKRDGFEWVLIDTPPNLSAVVDDAIRNATMVIIPARPGVFDVNAVQETIQMCRAARKPYAVVLNGAPAKRDDAESPIVTIAREALAKFRAPVWGGQITNRSDLLMALSHGEGAREYQAESRAAQEIARLWAAIERSVKAIRGTASASGAMHKQAA

SEQ ID NO: 12645 - protein, 42 aa, BradyrhizobiumColbertium
MASHYDAGQQGFTTEDILWATGIWSVILTLSPVIVFYMLMVA

SEQ ID NO: 12646 - protein, 49 aa, BradyrhizobiumColbertium
MRHRIQPTAARQFAPADLLQGILVVSSFGFWAVMLGLIPVLLFRVWQVG

SEQ ID NO: 12647 - protein, 302 aa, BradyrhizobiumColbertium
MTGLEDHLHGLWLPLVTPFQGGALDERSLRRLTRHYSAQAVDGFILGATSGEGMTLREAEFERLVATVREEMAASGRTLPVCLGLSGADTSRLKERLDETADWPIDGYLIASPYYVRPSQRGLLAHFEALADHAAWPIALYNIPYRCAVSITNQTLLRLAEHRNIVGLKDCGASREQSIALLRDRPKDFRVLTGEDANYFEALCDGADGGIVLSAHVETATFASIDAELKRGDHDAAQARWQEVAELTRLLFAEPSPAPAKYWLWRCGLIDSPEVRLPMVEVSSELAASIDREIERRTKVAA

SEQ ID NO: 12648 - protein, 297 aa, BradyrhizobiumColbertium
MDWDKLKVFHAAAEAGSFTHAGEQLGLSQSAVSRQVSALEQELSVSLFHRHARGLILTEQGDLLFRTAHDVFMQLQAARAKLTDSRERPSGDLKITTTPGVGINWLIPRLGEFTGLYPEIRISLIVTDEELDLSMREADVAIRTRKPTQPDLIQRKLFAMGFHAYCSPEYIKRFGTPRTLEELDSHRIITLSDGNFAPHLQNRNWLVEAGRNGSGPREAYFRVNNILGLVRACQQGLGIAALPDYLVEEQSKLVQLFGESDSIQLDTYFVYPEELKTVARVQVFRDFVVSKAQRWPS

SEQ ID NO: 12649 - protein, 321 aa, BradyrhizobiumColbertium
MSAPVHAKVVIIGSGPAGYTAAIYAARAMLEPVLIQGLQTGGQLTITTDVENYPGFADVIQGPWLMEQMEKQALHVGTRIVSDLVTRLETAQRPFRLTCDSGDVYLADAVILATGAQARWLGLPSEAKFQGGGVSACATCDGFFYRGKEVIVVGGGNTAVEEALYLTNHASQVTIVHRRDHFRAERILQERLFKHPKIKVIWDSAVDEICGTENPNKVTHVRLKNVKTGALTDVKADGVFIAIGHAPATELVKDQVKLKPSGYVEVAPNSTATSVPGLFAAGDVADETYRQAVTAAGLGCMAALEAERFLALRASERAAAE

SEQ ID NO: 12650 - protein, 178 aa, BradyrhizobiumColbertium
MRISTNPPDTSANARSSNHVSRNLDEIDLKILAEIQADGRITNVELAKRVGISPPPCLRRVRALEEEGYIHGYRGLLDARKLGFDVTVFAAVHLSSQAEADLRAFEDFVRAEPLVRECWMLSGEVDFILKCVAPDMATFQDFVTHLTAAPHVRNVRTSLVLHNSKYEAAVPLEVKRRR

SEQ ID NO: 12651 - protein, 157 aa, BradyrhizobiumColbertium
MEKVPMTQAGFVALGEELKRRQSEDRPRIIEHIAEARSHGDLSENAEYHAAKEEQSHNEGRIAELEDKLARADIIDISKLSGDTIKFGATVTLVDEDTEKKTVWQIVGEVEADAKKGRISITSPLARALIGKKKGASVEVNTPGGAKAYEITKVEWR

SEQ ID NO: 12652 - protein, 1154 aa, BradyrhizobiumColbertium
MPKRTDISTILIIGAGPIVIGQACEFDYSGTQAVKTLKEEGYRIVLVNSNPATIMTDPELADATYIEPITPEIVAKIIEKERHVIPGGFALLPTMGGQTALNCALSLRRQGTLEKFDVEMIGATADAIDKAEDRQLFREAMTKIGLETPKSRLANASELKKSFRDKYQAARAKASGAELEELDRQWVLGESERRKRYQEYALGQAMMALSEIGLPAIIRPSFTMGGTGGGIAYNKEEFLDIIERGLDASPTNEVLIEESVLGWKEYEMEVVRDKNDNCIIVCSIENLDPMGVHTGDSITVAPALTLTDKEYQIMRDASLAVLREIGVETGGSNVQFGVNPEDGRMVVIEMNPRVSRSSALASKATGFPIAKVAAKLAVGYTLDEIANDITGGATPASFEPTIDYVVTKVPRFAFEKFPGASTTLTTSMKSVGEVMAIGRTFQESLQKALRGLETGLTGLDEIEIEGLGRDDDKNAIRAALGTPTPNRILQVAQAMRLGWSNEDIFKSCKIDPWFLGEMRGIVDMEEKVRKKGLPNNAFGMRTLKAMGFSDARLAVLAETTEAEVTAKRHALGVRPVYKRIDTCAAEFASPTAYMYSTYEAPFAGALADESTPSDKKKVIILGGGPNRIGQGIEFDYCCCHACFALHDAGYESIMVNCNPETVSTDYDTADRLYFEPLTAEDVLEIIAKERSKGTLHGVIVQFGGQTPLKLARALEAAEVPILGTSPDAIDLAEDRDRFKRVLDKLRLKQPKNGIAYSVEQARLVSADLGLPLVVRPSYVLGGRAMQIIREENQLNDYLLGTLPELVPADVKARYPNDKTGQINTVLGKNPLLFDRYLSDATEIDVDCLCDGKDTFIVGIMEHIEEAGIHSGDSACSLPPHSLEPDMIEELERQTRELALGLDVVGLMNVQYAIKDGEIYVLEVNPRASRTVPFVAKVIGTPVAKIAARIMAGEKLADFKLKKAKLNHVGVKESVFPFARFPGVDTVLGPEMRSTGEVMGIDRSFAVAFAKSQLGGGTRVPRKGTVFVSVRESDKTRIAEAVRELHSLGFKVLATSGTQRFLTDQGIPTEKVNKVLEGRPHIVDAITNGDVQLVFNTTEGPQALADSRSLRRAALLHKVPYYTTLSGAVAAAQGIRAYLGGDLEVRTLQSYFSET

SEQ ID NO: 12653 - protein, 233 aa, BradyrhizobiumColbertium
MDDWIDYYDSTHTIYVSKLHRDLHFQIIARDIIGYIPSPEAVVLDYACGEALSASQVAAACGQLILAEPAPGVRGRLIARFAPNTKIRVRSLDDVRKMPDQSIDLVVMNSVAQYMTPAELDAALLNIRRILKPSGKLVLGDILQPNVGMVRDVAALLGFGLRHGFLKDALIGLISTALSDYRQLRSKIGLQRYSEDEITAKLKAAGFATQRAHSNIGHNRWRMTFIARPPLVR

SEQ ID NO: 12654 - protein, 157 aa, BradyrhizobiumColbertium
MLSAFALGVRRCAVNLPRPNRKVSREQNQQQDLARSRYPHRSVVRRCQKGFGGAQRASGRRVRAVSEDQEFPLARQRPAFPRLPSAAGRAVRPDLRHHRRACRARPQDRRHHAEVDRPDRKAPDHQGQQRGLRPAARDAARTDAGQQADGSGDAQSA

SEQ ID NO: 12655 - protein, 345 aa, BradyrhizobiumColbertium
MRGFRDITADANDLGGAAAQASRAARRTYANVPSPSPEFDRLEPSLESRAGESEAPYSYDESIEEAERYAPQPPSPRARVAPERDVKKRVRTSSAFPFKSAIAVGIVLILVGAGILWGRQLVQVVNGFFKPSATQVVEAPTPAQPQSKPKIPDRVGQPSADQPVAPVAQKVVLYDEDPSDPKGKQYVGSVVWRLEPIKASGNQKPDVAVRADIEIPDRKFKMTMSFRRNTDSSLPASHTAELTFILPPDFPGGSVSNVPGILMKSNEQARGTPLAGLAVKVTDGFFLVGLSNVDADRARNIQLLKERSWFDVPLVYSNQRRAIIAIEKGAPGERAFNDAFAQWGD

SEQ ID NO: 12656 - protein, 91 aa, BradyrhizobiumColbertium
MTRNQTIASLFAFAVTSLALQTSPGLAFTSEAQQMCSGDAMRLCSSEIPDIPRITACMVRNKSQVSPGCRAVMDREHAAAAASRKREASAR

SEQ ID NO: 12657 - protein, 75 aa, BradyrhizobiumColbertium
MLHDEELSILRDISQSIAFADDRQGKMGQLIADGYVMKDGDLFELTAKGVTAVEEHAALGMSDAEQANASSDRLI

SEQ ID NO: 12658 - protein, 79 aa, BradyrhizobiumColbertium
MARKLLLATIALAALGLSDAPAFAQGHMGTPQEQKACSRDAQRFCRKNLGNDLAVQGCLQANRAKLSKSCSKVFQSHGM

SEQ ID NO: 12659 - protein, 141 aa, BradyrhizobiumColbertium
MKRYLVFALVGPFVGGFLLLLTTTYQSGYWTQTNLGEVGKLFAVFFKTLQYSYLFGFLPALMIGAIDDILIHIRRIGPVLRMLLVGLFAFALASFTYSSRGPDSGAVQFILYGLVGFVPAVISSWLVHRYVEEPEAAAAPT

SEQ ID NO: 12660 - protein, 183 aa, BradyrhizobiumColbertium
MEAMTMSDDDILAPRRAPSGSSSRTTSFGKEARGPIIDQEGHEIRPETLEQGFREFRFEFGQGNPFGNLTREQRIARLEAIAKLLDVAFILPGTNIRYGIDGLIGLIPVVGDIITTAISLWLVREARALGAPWHITARMLGNVALDGAVGLIPFAGDAFDVMFRANMRNVRLLQRWLEKQPRM

SEQ ID NO: 12661 - protein, 97 aa, BradyrhizobiumColbertium
MRPLRPFNFNTSAELFPAAIRKKKRAGFTYRRFGTAAEAVQFAMEQLPTDSLNGAYLQVEEARFDQNGIRSLYESDAFPLPRRPKPAPAAETDADAA

SEQ ID NO: 12662 - protein, 54 aa, BradyrhizobiumColbertium
MTLGTILIILVIIYLIGGLSGRFGGYGYGLGHSGMGIGGVVLVVLIVLLLLGKL

SEQ ID NO: 12663 - protein, 139 aa, BradyrhizobiumColbertium
MPDTKTKITDDKVIKSEEQWRRELTPMQYAVLREKATERPFSGEYEHEHRAGTYVCAGCGNVLFESDAKFDSGCGWPSFTQPAVESHIDEERDTSHGMIRTEVLCSKCSGHLGHVFPDGPGPTGLRYCINSAALKLEPK

SEQ ID NO: 12664 - protein, 234 aa, BradyrhizobiumColbertium
MRRPALAFLLAATTALTLALAVPSRAAEEAVVIPPPAMDAAPASGIQTAVLAGGCFWGVQGVFQHTAGVLNAISGYAGGTKATADYQSVSSGRTGHAEAVEIKYDPKKISYGKILQIYFSVVHDPTQLNRQGPDVGPQYRSAIFVSSDEQKKVAEAYIAQLNGAKVFKKPIVTKVGALEAFYPAEAYHQDYLTLHPNQPYIAYNDIPKVENLKKLFADNYIEKPTLVNAGKATN

SEQ ID NO: 12665 - protein, 399 aa, BradyrhizobiumColbertium
MRVSKERLDKLAATFYAVFNEGNILPAPFPDKFAARNDVELRRIVTFTRIPETGERVEVSGLLAVPAGARGALPLVSWQHGTILSFDEVPSNLLRLDDQKYELRDNVDSIETLFNIQRFAGNGYAVVAADYVGKGPYRRGRSEAYAVKGATVQCCLDVLSAGQRELRTLGLRQSSLFLNGWSQGALNTQWLKQEMQRRDIKVRAAAAESPFNNLAESFHYWSNPAAYIPASESSYPMPPAWITPCIIVLLGSYRRYYGLNDLFKTAIKPQYRAFAEKYWTDYSLDGEIAKSIPPAGDFLTDGFFDRFTNDTNSKFMRRLGDNGTTFWDYDSPIKFYYGMADEALPPRLVQPAIVAGGHFADGVPVKGASHRGTFLASLYGESTVLNGSPTAFDWFNTLL

SEQ ID NO: 12666 - protein, 77 aa, BradyrhizobiumColbertium
MRSCCACSHNVPLRCRSQADTLKSLARGECTSARLPFAGGFAVSMSAATGGSFLPGCRYAHPGCSITPPRSAASRRA

SEQ ID NO: 12667 - protein, 388 aa, BradyrhizobiumColbertium
MVSFREAANRRFLLKTDMPTFTPHQDAALKAVGDWLKAKPGRGGTPPVFRLFGFAGTGKTTLARHIAEGVDGEVKFAAFTGKAALVMRNKGCDDASTIHSLIYRARESGEEQPSFELWDDAPASKAKLIVIDECSMVDAELGRDLMSFDCPLLVLGDPAQLPPIQGGGFFTNSEPDAMLTEVHRQAQDDPIVRMSMDVREGRELDIGRYGESEVVSRKELDPDRVMGADQILVGRNNTRRAYNMRVRQRQNIEDQFPVAGDKLVCLRNNRKKGLFNGGLWRVKSRNTSRSKSRILSMRLMPDEDFGHKVTKVSVRADCFEGGIEQIAWEQRKPYDEFDYGYVLTVHKSQGSQWDDVVLFDESFAFQESRARWLYTGITRAAKRLSVVV

SEQ ID NO: 12668 - protein, 363 aa, BradyrhizobiumColbertium
MMQQTNSIIDELEDAVRNGSSAKRIETLRRVTDLFLDQGQRLSDDQVEVFDHVLSHLVTRVESRVRAELGDRLAPLDYAPAGVLERLAWDDEIAVAGKVLTESNRLSTPTLVEIAKAKGQDHLFAISGRADLPEVVTDVLVERGERKVIRRLAVNTTARFSEDGYGGMIAHAEADETLAESLGLRIDLPIKYLRDLLQRATEAVRARLATIAPPELQAEIKRILAAITSKAAPPEPKRDFSLAEAAVKRMKGLNELNDAAIARFAETRRFDEVAAALGLLNNSAPTELMAKVLEGPRADLVLIPCKSAGLGWPTVERILCNRPAKYRIDEATLKLAGTDFAKLSPATAERTLRFWQLHDRIDK

SEQ ID NO: 12669 - protein, 217 aa, BradyrhizobiumColbertium
MTTTADDPNAGLNARRSFLARSRDFALELWRVLTRPSSVFALGTLVLAGFVAGVIFWGGFNTALELTNTEKFCTGCHEMKDNVYAELKSTVHFTNRSGVRATCPDCHVPHNWTDKIARKMQASKEVWGKIFGTIDTREKFQDHRLELAAHEWARFKANDSLECRNCHSADSMDVTKQSPRASVAHQRFLFTKEKTCIDCHKGIAHQLPDMRGVPGWQ

SEQ ID NO: 12670 - protein, 156 aa, BradyrhizobiumColbertium
MMKRSAIILLAFAIAAGTSSLTAQTVTSGLRGPTPLNDEGPAPPMLPNRNTSEKEVRNYPEQPPVIPHTIDGYQVDLNGNKCLSCHARARTAESQAPMVSITHFMDRDGQFLASVSPRRFFCTECHVPQSTATPPVSNDFIDIDTLLSRATPGGRR

SEQ ID NO: 12671 - protein, 837 aa, BradyrhizobiumColbertium
MTSPKLDRRQMLKLEAAAIAAAAAGMPAPALAANLVAERNASEMKWDKAACRFCGTGCSVMVATKDNRVVATHGDTKAEVNRGLNCVKGYFLSKIMYGHDRLTQPMLRKTNGKYDKNGEFTPVSWTEAFDIMEQKWKEAIKKRGPNGVAMFGSGQWTIWEGYAASKLFKAGFRTNNIDPNARHCMASAVAGMMRTFGIDEPPGCYDDIEATDAFVLWGSNMAEMHPILWTRLTDRRLSAPHVRVAVLSTFEHRSFDLADIGMVFKPQTDLYILNAIANHIIKTGRVNKDFVAKHTVFKRGQTDIGYGLRPEHPLQKKATGAAKPNDATDMSYDEFVKFVSEYTLEKAAEMSGVPLNRLTALAELYADPKTKVVSFWTMGFNQHTRGVWCNNLVYNIHLLTGKISAPGNSPFSLTGQPSACGTAREVGTFPHRLPADMVVTNKAHRDHAEHIWQLPEGTIPDKNGAHAVLQSRMLKDGLINAYWVQVNNNLQAGPNINEETYPGFRNPDNFIVVSDAYPSVTALAADLILPTAMWVEKEGAYGNAERRTQFWHQLVSAPGESKSDLWQLMEFSKRFKIAEVWPEELIAKKPEYRGKTLFDVLFRNGQVDKFPVSDIEPGYANDESKAFGFYVHKGLFEEYAQFGRGHGHDLAPFDTYHRERGLRWPVVNGQETKWRFREGSDPYVKQGTEVQFYGHADGKARIFALPYEPPAESPDKEYPYWLSTGRVLEHWHSGTMTRRVPELYKAFPEAVCFMHPDDAQEAKLRRGDEVKVVSRRGFIRARVETRGRDRPPRGLVFVPWFDESKLINKVTLDATDPISLQTDFKKCAVRIERVNMS

SEQ ID NO: 12672 - protein, 104 aa, BradyrhizobiumColbertium
MAHATLNRRALITGRVLSADRVIAPPGAEITSIIVQARPERLADVEAEITALPGCEIHGRDPRGKLVIVTEAPDSGSLGTLLNTIQSLQHVYSAVLVFHAIETA

SEQ ID NO: 12673 - protein, 61 aa, BradyrhizobiumColbertium
MSAPDDAMSRVRRKRMEIFAFLFLTAIVMPVLAVGTVGTYGLGVWIYQMMAGPPGPPPSPR

SEQ ID NO: 12674 - protein, 39 aa, BradyrhizobiumColbertium
MREAVLSTHSQFRPMGDDPSFGAGRRSRLTIDPNQRAVG

SEQ ID NO: 12675 - protein, 397 aa, BradyrhizobiumColbertium
MKFGIFYELQLPRPWVAGDELRLYQNALSQMELADKLGYDHAWVVEHHFLEEYSHSPSPESFLAAASQRTRNIRLGHGILQLTTNHPARVAERVAVLDLLSNGRCEFGMGESASITELEPFGRDMETKKEVFEEAVAAIFPMFKDAGSEHHGKYFDIPLRNVVPKPVQKPHPPLWMACSQLPTIERAGRHGFGALGFQFVSADAAHAWVHAYYNAMTKRLHKLADYEINPNMALVSFFMCAKTDEEARARADGATFFQFALRFYGAAQNRQRPAPYTVNMWDEYNKWKRDNPEAQEAALRGGLIGSPETIRRKLKRFQSSHIDQVILLNQAGKNSHEHICESLELFGREVMPEFQNDPAQAEWKRGVMSGEIQLEEIDTQAFTDRYGRLAINVARAG

SEQ ID NO: 12676 - protein, 39 aa, BradyrhizobiumColbertium
MHEMAPSKGTTIDVPAERICAAGLANLRCVRSNKSMSRR

SEQ ID NO: 12677 - protein, 156 aa, BradyrhizobiumColbertium
MHKGFMLILASILIDVLPVSHAAAVEMEPGLWQLTTRIERDGVGTTRPRSGRCVTADQARAARTASALDIGTGFKTALGSSPSQESCKLSDAKNDKNLMTWRLLCTGGTSAEREFTARFDNPRHYVTVTTTRVTTGSKTVTIVTTTEAQHKGECPR

SEQ ID NO: 12678 - protein, 707 aa, BradyrhizobiumColbertium
MLPILFALTVLLSASPVRAGCNFEDMVAAFKQAVATTIECEPVCKNQYECYAVAVLAAALTFDVKQGVDVSPICVDIPAKVEDLMAKLAPFLSQQDMADLSQYASYISDALQFVRCACKTKDLNIANESSFGQCVNDVAEAVGCEPIVIAGFTVHYDCLPGNPAARAFDAIEAWTCKHLSLGCEDSDYVEANYNYSCPSGQQSDRNGNCVPCESIANATVGNNGECACKSGYSEDAFWLYLPGYSDAKMKVLESCTFSCNAPFVYSGGFCQCPFGTQSDYAGGCKACGATERYVPFKVQGGVLTEGRCEACPLCTQPSANKLTCNPPCNNAAGEIFEKGKCVACPSNSKSVYFSGSCGQCEACAFGQKVSADHKSCIPACAPGQIMGGLMLGKDQMSDPTATQCQTCPDNTAPSYESPDSSKGVCLPCPDGTYSKAGATRCFDLNCAPGSYQDPDNPHACKSCPPTQIYIPTEKKSVTGPSPGQGGMQVVPGHCGCGENQVLQGEVCVCAKGATKVPLPGAPGTVFACACPAGAHFDAASGACACPAGATLNAAKNACICPTGQRLEGGKCVAPSLQHLPLKDCSTLGPNYINDPKNPAACMRCPGGSVANAERNVCIAAGRPTGPAIVPMLPGRTARPPLRCRPGLVPNAAGTACIRLPAPPRVAPPGPRFAPPAARPAPPAGVRRPAPVREAPMRLRPGAAAPRN

SEQ ID NO: 12679 - protein, 275 aa, BradyrhizobiumColbertium
MQRREVGTVMTRWKRMLAVWPVLCAALFGAPAAAETTRAEIEAVVKDYLDAHPEDVQRIVKDYLKDHPEILRDALTELITKRAPAAARPAPADRKAAIDGNAAALFNSPRQVVLGKPDGRVTLVEFFDYNCGYCRRALSDTLVLLQEDRDLRIVLKELPILGAASTEAAGVAVAVRMQDRTGEKYLAFHRRLLGGRGPADRASALAAAREEGLDMARLERDLSSEEVRLTLEENAALARAVGIKGTPAYVIGDTVVAGAIGAAGLKEKIAAERSR

SEQ ID NO: 12680 - protein, 159 aa, BradyrhizobiumColbertium
MLYFLVKMAHIIGAAVLLGTGAGIAFFMLVAHLRGDPREIAGVARTVVLADFLFTASAVILQPITGTWLAWSSGYSLGDGWIAASIALYLVTGAFWLPVVWMQMQMRDLAVAAVASNSELPARYHQLFRLWFAFGFPAFAAVLIIFWLMIARPAIPYWD

SEQ ID NO: 12681 - protein, 424 aa, BradyrhizobiumColbertium
MRILLVGGTGLIGSAIHAKLSAEGHDCILVSRHPAAARDRRHITLDITQATDPSKWKGLLSGVDAVINAAGALQGQDMQGVHVAGSAALYAACESAGVRRVILFSAIGSNVDAPSAFSRSKRDGEAALMARDLDWVVLRPSVVVGRPAYGGSALLRGLAALPVLPVMPETAAIQPVHLDDVVETVLFFLQPGAPSRIALDLAGPRQIAFSDAVALFRAWLRWRPAYRLHLPSWLASAAYRAGDVAQVLGWRTPINATAQAEMRRGAAGDPEPWRQMTGLRPRDLEVALAREPASVQERWFARLYALKPLIFGVFGLFWIATGIISLSAGWNIGMSLLREGGLQENAAALTVTAGALADIAIGLAILWRPLSRYGLWAALIISLSYAVIGTALVPRLWADPLGPMLKIWPVIMLNLVAMAIREDR

SEQ ID NO: 12682 - protein, 67 aa, BradyrhizobiumColbertium
MLGPNVLSPEELSLLGATYDLVVDSLPSRMRTPRNRRQVALNLLYLTRRGERDPLELELGAAAGLTC

SEQ ID NO: 12683 - protein, 124 aa, BradyrhizobiumColbertium
MFNRQTTAMLRLVLDEVCADLGKYEKAVRAHVARPLHRRSNGPPHRTEQIPSENVIMQDRTKKRRRVKQTQSLTERLLASATLAKSRAQGMAPGHDRDLLLQKAREAEAAVALESWIRGPSSPR

SEQ ID NO: 12684 - protein, 273 aa, BradyrhizobiumColbertium
MLLECAAKLKEEAMRSRGRGSCSGLAEGDVAPAVLAIGRPDFPKVLIDTLRRQAGVGHCMVFALSRAGAASCMLDAGSIAIGGDLGAAYAGQFHEFDPNRDALFEGEGNAPIMLPAFAPRMYGARYRKIFFQDSGIVDKCATAIWVSGTCFYVNFYRIAAQGRFSAAQRERLETMAPAIAASVARHFQHSAAPERSLAEMFATCAPLAGLTPRERDVCRRILEGFSSEAISNELGISLHSTLTYRKRAYERLGISSQSELFAIVLRLLAPRLN

SEQ ID NO: 12685 - protein, 82 aa, BradyrhizobiumColbertium
MSEFEGLSDHFILRMYEFIRNEVQADALAGTRLVGLPARRRADHLFREIERRGLFCRPIEWPEHLADSSCEPADWSLQRIAN

SEQ ID NO: 12686 - protein, 55 aa, BradyrhizobiumColbertium
MLDRTDQHALLKADRRNASGYALALAFFGAVGIVMTAWIAAIVWVSWHLIAWIFQ

SEQ ID NO: 12687 - protein, 45 aa, BradyrhizobiumColbertium
MGANETTDGLSETEEAVRAAAEDEEESLDLEEPVFDRADSMPKII

SEQ ID NO: 12688 - protein, 87 aa, BradyrhizobiumColbertium
MTDDLEQRIRDRAHRMWCDEGQPEGKADVHWELARMAIAFEDAKPAMQRPVISDTVEPVEAWANQGEFPTLTDQGEQHIPGEMADPD

SEQ ID NO: 12689 - protein, 115 aa, BradyrhizobiumColbertium
MQILVVEDEDLIRDVVVDILESQGHEVLQAESGERALQLCAEVTPDLIFTDVKLPGPLSGWDVAIRCRESHPGIPVIYSTGHTHSAPRPVSGSIMLHKPYRLERLLESIQTLTGR

SEQ ID NO: 12690 - protein, 388 aa, BradyrhizobiumColbertium
MSTAPRIDIDPAAFWADPYPMLARMRKEAPIAFVPQLGSTLLTSRDDISISEKQIDVFSSHQPAGLMNRLMGHNMMRKDGEAHLVERRAMFPTVSPKTVKAHWTAQFQAHADRILDHLEPGRIDFMRDFALPFSGECLKSITGLTNIGYQDIDAWSQGMIEGIANYAGDPEVEARCHAATSGIDAAIDDILPVMRKHPDQSILGVLLASGMPMESVRANVKLAISGGQNEPRKAIAGTVWALLTHPEQLDLVLRGEVSWLQAFEEYARWISPIGMSPRRIAKPWIIRDVSFELDERVFLMFGSANRDEKHFERADAFDVRRDTSKSVAFGAGPHFCAGAFASRAMIADVALPTVFARSSRIEIADDEPVRIGGWAFRGLQNLPVTWRH

SEQ ID NO: 12691 - protein, 71 aa, BradyrhizobiumColbertium
MGLFSRSWFGPALVTFDATAAPACWRGQDVAVNQDVDAARIADVGVPARSLPRHLIAARVGERLAFFPSSL

SEQ ID NO: 12692 - protein, 51 aa, BradyrhizobiumColbertium
MKRVATWAFYAIGAIAIAYLALYAYAMFSGSPIVPGDPIHIFRKPDAPSYS

SEQ ID NO: 12693 - protein, 382 aa, BradyrhizobiumColbertium
MSEAQVTNWLASQRQAMIDLLRDVVNIDSGSYDKEGVDAVGARFERHFAEHGIPCRRESHDTFGDAIHAEVAKPGSNEKPVLLMGHRDTVFGKGEAGRRPFTIRDGRAYGPGVADMKSGLVMNVFVATAFHKFGGNPHPIKVLITSDEEIGSPSSRPVIEREGRAARAVFNSEPGRPTGNVVTGRKGGIFMHMAITGKAAHSGAKFAAGVSAIGELAHKIVQIHALTDLDKGITLNVGLVSGGQSVNTTAPYAEGQIDLRYVDPADRAKVMAAIETIVATSYLPGTSATLTIKGEFVPVVQSAESKALFENYQAAARDVGLTTLQGEFSGGCADSGFTAAVGTPTICGLGPVGGLAHTPEEYLEVESIVPRAQALALAILRG

SEQ ID NO: 12694 - protein, 461 aa, BradyrhizobiumColbertium
MRLLIVGTLKGQLTTATKIAMENGATVTHAEDNEQAMRVLRGGKGADLLLVDVALDIRDLVLRLEAEHIHAPIVACGITNDARAAVAAIHAGAKEYIPLPPDPELIAAVLAAVANDSRELVYRDEAMAKVIKLAQQIAGSDASVMITGESGTGKEVLARYVHTRSARAKRPFISINCAAIPEHLLESELFGHEKGAFTGAVARRIGKFEEATGGTLLLDEISEMDVRLQSKLLRAIQERVIDRVGGTRPVPVDIRIIATSNRNLAEAVREGTFREDLLFRLNVVNLKIPPLRERPADILELAQHFVKKYAEANGVPLRPISAEARRVLTANRWQGNVRELENTMHRAVLMAQGDEIGPDAIITPDGDRLDLAKTPPAVAHATMAAEQVTRALVGRTVADVERDLILETLKHCLGNRTHAANILGISIRTLRNKLNEYADGGIPIPPAGTPGEYPRMPMVGA

SEQ ID NO: 12695 - protein, 116 aa, BradyrhizobiumColbertium
MSDTEGQVPLPDLNGPMPPGGTDVGYNEDEYAARAAADLEAVFDVPVQVSAVLGRSKMDVGELLKLGPGTVLELDRRVGEAIDIYVNNKLVARGEVVLVEDKLGVTMTEIIKAERG

SEQ ID NO: 12696 - protein, 207 aa, BradyrhizobiumColbertium
MAAPAKFLFDTDFAAPERTTREKAATAAEIAQKVAEAEARAYQEGFAAGQREAKAESDRRVALAMEEINIGIRGLASGISNIETKMETEAVEVAVAVARKLCADLVAAEPLGEVIALVKDCFSHLVATPHLVVRINDALYDAAREKIERLAKQSGFEGRLVILAEPEIASGDCRIEWADGGVVLERGAIMAKIDEMVGRYIASRRGN

SEQ ID NO: 12697 - protein, 364 aa, BradyrhizobiumColbertium
MAASLQNANSNDITSVISTLGQRAGSRAGGPRTEGLTGPKRAAILMLALGEQYGGKIWSLLDDDEVRQLSLEMSTLGTVEVETVEDMLLEFVSRMSASGALMGNFDATERLLQQYLPPERVNGIMDEIRGPAGRNMWEKLSNVQEEVLANYLKNEYPQTIAVVLSKLKSEHAARVLSILPEELALDVVNRMLKMEAVQKEVIESVEKTLRTEFMSNLSQTRRRDAHEVMAEIFNNFDRQTETRFITSLEEDNRESAERIKALMFTFDDLVKLDSGSAQTLMRNVDKDKLGVALKSANEDVRNFFFGNMSSRAAKMLQDDMAAMGPVRLRDVDEAQALLVNLAKDLAAKGEIMLTKNRADDELVY

SEQ ID NO: 12698 - protein, 537 aa, BradyrhizobiumColbertium
MQGLADFLKSIGAARFGAMIAVTAALIGFFAFVIMRVTTPQMTTLFTDLSVEDSSSIIKDLERQGIQFEIRNEGSIIMVPKDKVTRLRMKLAEGGLPKGGGVGYEVFDKSDALGTTSFVQNINHLRALEGELARTIRAIDRIQAARVHLVLPERPLFAREAPEPSASIVVRVRGSLEAQQIRAVRHLVASAVNGLKPQRVSIVDEAGQLLADGAATDPEQAVGDERRISFEKRMRKQVEDIVSSVVGSGRARVQLSADFDFNKVTQTSDKFDPEGRVLRSSQTREEQSMTADNNGQVTVNNELPGNQQNNGVAPKDQSKKTEETNNYEISRTTKTEVTEAGRVNRISVAVLVDGIYTKNDKGELAYQDRTKEQLDRIAALVRSAIGFDQKRGDQVEVVNLRFADAPSTAPIGEPGGLLGMLQFTKDDVMYFVELGVMMLLGLVVLFLVIRPLVKRILASDEVAAAISGVLTGPAASEEAAPAAGQPLLPSGAASAIDVATVQGQVHAQSVHRVGELAERNPNETVAIVRQWLSESAK

SEQ ID NO: 12699 - protein, 72 aa, BradyrhizobiumColbertium
MTIADLPAPGTKRWVIRRKAEVVAAVRGGLLSLEEACSRYTLTVDEFLSWQFSIDQHGLAGLRTTRIQQYRQ

SEQ ID NO: 12700 - protein, 235 aa, BradyrhizobiumColbertium
MTTTNAATAPSVVSGTTDIPKSSSNSSMSSTTGSTLAGNFQTFLTLLTTQLQNQNPLDPLDTNQFTQQLVQFAGVEQQLKTNESLAQLVSLQQTTQATQALGFVGKTALVDGSTATMTNSSAVWHLNVPTDSTVEISIANSSGQTVFNGKYTAAAGTDIPFTWNGMGNDGTQWPDGKYTISATGKDVANNNVGIAAQVQGVVSSVDLTQSPPLLTIDGASYTMSQVKSIIATSSY

SEQ ID NO: 12701 - protein, 521 aa, BradyrhizobiumColbertium
MQVPSAQQKPARSQGPKDASANDSFGSLVDSNTQAINNNAQAQDPAPRRSESKSSSPSSDRSARDTSSTDQPSQSKAGEDVDTTVPAKNEKSEATSDPAKDAGKAKDKSETSDAKPADKSEETDADKTDGTPVTGADAGAAATADATQTALPDPGIIVAAPAVPVDPNAAANQASDAASPLSIAAAGLAASASTAAQIAGTKTDTAKTSDQSAKVAGAEVDADTTATLGEAATGTDEAATTDAKANGGLIAVSQGTPKTSFKDAVAAQAQTDVSNIGQDSGTANAATTQAPAASAAHAEGVKPQADGGAIEAKAGAADRTADLAHGAPATHAHAGTQAAVTPTDSGAQAASAVQAPLTNNTSAATASTATLTATAATATAVPISGVPIEIAAAIRAGRSRFDISLDPAELGRIDVRINVDRNGQVTSHLTVEKPETLQMLRQDAPQLQRALDDAGFKTGSNGLSFSLRDQNSSGQNSGQNNDHGGNARRLIISEDEAVAAAPVGRGYGRMLGSSSGVDIRV

SEQ ID NO: 12702 - protein, 393 aa, BradyrhizobiumColbertium
MLNSLDLEGRPEDTRVVVAMSGGVDSSTTAALLKAEGYDVVGITLQLYDHGAATHRKGACCAGQDIHDARDVAAKLGIPHYVLDYEDRFRESVIDNFADSYALGETPVPCIECNRSVKFRDLLKTARELGAHALATGHYVASRRLDDGSRALVCAADSDRDQSYFLFATTREQLDFLRFPLGDMTKPQTRELARRFGLAVADKHDSQDICFVPTGRYTDIITRLRPNAMDPGDIVDLDGRVLGRHNGIANFTVGQRRGLGIASGSPLFVVRLDAAHRRVVVGPRDALKMHRISLRDVNWIGDGDIDCAIGGGLEMFVRVRSTRSPQPAWLRGGNGRYEVELVAGEEGVSPGQACVFYDAPSGQARVLGGGFIQSAAAKVGDATSRPLVEAVRG

SEQ ID NO: 12703 - protein, 212 aa, BradyrhizobiumColbertium
MAADISRAGVEKAYGRWAPVYDLVFGKVFDAGRQSTIAEADRIGGRVLDVGVGTGLSLSDYARTTKVCGVDISEPMLRKAQARVRALRLSNVEVLSVMDAKNLAFPDDFFDAVVAQYVITAVPDPEGTLDEFVRVLRPGGELILVNHIGAESGPRKLFELAFAPIARRLGWRPEFPWARLANWAARHGGVTLTERRPMPPMGHFSLIRYRKA

SEQ ID NO: 12704 - protein, 424 aa, BradyrhizobiumColbertium
MTLALGCIADDYTGASDLANTLTRAGLRTVQTIGVPADDLALPEVDAVVISLKSRSIEAGLAVSRSRAADKWLRGRGASHVLFKICSTFDSTDAGNIGPVMDALRADCGETVVLVTPAFPETGRTVYQGNLFVGAVPLNESPLKDHPLNPMHDSNLVRVLACQSRTQIGLVDLAIVTRGAEAVRARLAALAGQGIGAAIVDAVFDRDLETIGLVAAGHRLSVGASGIGLGLARALVSTGKVKATATSDAGAPVGGAAVCLAGSCSQATLQQIASAERIMPVLRLDPDRIITQADEVQHALDWARPRLAEGPVLIASSSAPDQVAALQARHGRDAAGHAIEQAMADIAENLVKSGVRRLVVAGGETSGAVVDRLGIPGFLVGAEIAAGVPVLRAVGTEAGGMLLALKSGNFGGPDFFAAALRLMR

SEQ ID NO: 12705 - protein, 260 aa, BradyrhizobiumColbertium
MPRFAANLSMMFTELPFLDRFDAAAQAGFTAVEFLFPYEHPAEVVGERLRRNGLTQALFNLPPGDWNAGEKGFAALPSRFNDLKASLETALPYAKATGVKRLHLMAGIANRGERVAIEAFYKSVAWAAEFFAPHGIDIVIEPINARNVPGYFLNDFGFARDLIQELRLPNLKLQFDIYHCQIIHGDVTMRLREMMPIIGHIQIASIPSRNEPDGEELNYPFLFEELDRLGYAGFVGCEYNPRGKTTDGLGWFKPYAGVKP

SEQ ID NO: 12706 - protein, 305 aa, BradyrhizobiumColbertium
MSASTPQTKRIAVVGLGSMGFGMATSLKRAGHAVTGCDVSAEAVSRFVKDGGAGAKTPAEAAGEADIVVSVVVNAVQTETILFGKDGAAETMPKDSVFVSSATMDPDVARRLAKQLEATGRHYLDAPISGGAQRAAQGELTILASGSPAAFAKARPALDAMAAKLYELGDAAGQGAAFKMINQLLAGVHIAAASEAMAFAAKQGLDIRKVYEVITASAGNSWMFENRMPHVLDGDYTPRSAVEIFVKDLGIIQDMARSARFPVPVSAAALQMFLMTSAAGMGRDDDASVARMYARVTGVKLPGDK

SEQ ID NO: 12707 - protein, 224 aa, BradyrhizobiumColbertium
MTAISNDTRLREDICRFGRSLFERGLTPGSSGNISVRLDSGGWLVTPTNASLGFLDPAKLSRLDDQGRLVSGDAPTKEVPLHTALYDTRGSAQAIVHLHSTHSVALSMLPEINPRAALPPMTAYYLMKCGATALVPYYRPGDPAVADAIKGLAGKYSSVLLANHGPVVAGDTLEAAVFATEELEETAKLYLLLRGMNPRYLSPEQVSDLVKVFGVALPEHGHGH

SEQ ID NO: 12708 - protein, 234 aa, BradyrhizobiumColbertium
MLSVREVTTAYQGLVAISAVSIEVEKGEIVCVAGANGAGKSTLLKSIAGAERPRSGTVTFDGKRIDGMAQHHVTAAGIAYVPENRRLFPRLSVRDNLRLGSYLYRGEANREEPLDLVFTLFPRLSERLEQRAETLSGGEQQMLAIGRALMTRPRLLMLDEPSQGIMPKLVDEIFQAVKRIRDAGMTVLIVEQRMAECLEIADRAYILQTGRVLMQGAASEIKGNPDVRKAYLGL

SEQ ID NO: 12709 - protein, 243 aa, BradyrhizobiumColbertium
MSALLETRGVWQRFGGLVANSDVSISVGRGEIVGLIGPNGAGKSTLFNLIAGVLPPTQGSIWFDGEDVTNLPAAQRCQRGIGRTFQVVKSFETMTVIDNVIVGALVRNTVMKEARRKAREVLEFTGLAARADVLASDLVPAEKRRLEVARALATGPKLLLLDEVLTGLTPTEAQTGVALVRKVRDAGITVLMVEHVMEIVMPLVDRAIVLDLGKVLVEGKPADVVRDPKVIKAYLGDRHAVGA

SEQ ID NO: 12710 - protein, 327 aa, BradyrhizobiumColbertium
MDKDFTARRRRDLIIAALLALIAALTPLFVKDVVVQNILILTLMYAGLSQSWNILSGYCGQISLGHALYFGLGAYTTELLFTKFGVLPWFGMLAGGVVSALIAMGLGYPFFRLRGHYFVIATIVIAEIGLLLFHNWEWAGAAMGITIPIRGDSWLKFQFLRTKLPYFYFALALCCLAWFVTWWLENSKWGFWWRAVKDNPEAAESLGVDVFNSKMGAAAVSAFLVAVGGSFYAQFVSYIDPESVMGFQFSLLMALPAVLGGIGTLWGPVLGAAILIPLTELTRFKFGGSGRGIDLIVYGTLIVLISLALPRGLLSLFSRPKRTGAVR

SEQ ID NO: 12711 - protein, 277 aa, BradyrhizobiumColbertium
MGLLYGLIAVGLALIFGLMDVTNFAHGEFLMIAMYLSFFLFAFFAIDPLLSAPLVAAALFIFGAVVYLLLVRFAMRAKANAGMVQIFTTFGLAIVMRGLAQYFFTPDYRSIPQSWLGGKTISIAGIFLPEPQLVGALVSIAAFAGLYIFIHRTDFGRAIEATREDPGAVALVGIDKNRVFAFGWGLGAALVGLAGAIMAVFFYIYPDVGASFALIAYVTVALGGFGSVFGAFAGGIIVGLVEAVTALVLPPSLKSVGIYSVYLLVVFIRPRGLFGSI

SEQ ID NO: 12712 - protein, 414 aa, BradyrhizobiumColbertium
MTITRRDVLLGAAATAALVPLAARAQTSEVVIGVIYPFSGGSAQQGVDAQKAYETALEVINKDSAFDLPLAKGEGLPGLGGAKVRLVFADHQADPQKGRAEAERLITQEKVCAIIGTYQSAVAVTVSQICERYQVPFVSADNSSPSLHRRGLKYYFRAAPHDEMYSAAMFDFFDAMKKKGTKIDTLSLFHEDTIFGTDSGNAQAKIAGERGYKIVTDIKYRANSPSLSAEVQQLKTANADVLMPSSYTTDGILLVKTMAELGYKPNAIVAQDAGFSEKALYDAVGDKLEGVISRGTFSLDLAQKRPMVGKINDMFKAKSGKDFNDLTSRQFMGLIILADAINRAKSIDGEKIRDALAATDIPGDQTIMPWKRVKFDEMGQNNDADPVLLQYVGGKFVTIFPPQAAIAEAIWPMK

SEQ ID NO: 12713 - protein, 267 aa, BradyrhizobiumColbertium
MAAQQTETPDTLPSRKARLAYREGLVASTAGVASGFVQGNLAILPADYAGAFHRFCQLNPKPCPIIGMSDVGSPFIPALGADLDIRTDVPRYRVWRDGEVVDEPTDVTKYWRDDLVTFVLGCSFSFEEALLDEGMPIRHIERNVRVPMYRTNIACSEASPFAGPMVVSMRPFKPADAIRAVQITSRYPAVHGAPVHLGHPHLIGIKDIAKPDYGDPVPVADDEIPVFWACGVTPQSVINAAKLPFAITHSPGLMLVTDLKNKSLAVI

SEQ ID NO: 12714 - protein, 305 aa, BradyrhizobiumColbertium
MLDFRSIETFLWVVKLGSFRGAAQRLNTTQPAISQRIAQLEREMGVKLLNRDHRVASPTPSGRQMMVYAEKLIGLRAQMMAEIGDRSAMRGVMRLGVAETIVHTWLPRLVKSVNEVYPNLSLEIEVDITPNLTARLLAQEIELAFVVGPLSASGVHNRVLADYPIGFLASPSLGLGKGPVTPTDLARFPIITFPRKTKPYEVVREVFDRPELPPIRLHASASLATVIHMAVEGLGIAVIPDAIVENELADGRLQLLDTDLAIAPLTFTASWLASPDVVAVERVAELAKQIAQSSLAVDAPAQAGH

SEQ ID NO: 12715 - protein, 416 aa, BradyrhizobiumColbertium
MSRAATNLQIDSARLWGSIHETAQFGATAKGGVRRLTLSAEDKQVRDWFRKACEDAGLEVHVDALGSQFGLRKGRDMSKLPVGIGSHLDTQPTGGKYDGILGTLGALEVIRTLNDAGIETEAPICVVNWTNEEGSRFAPAMMASAAYVGDFTTDDILSRKDAEGTSVGQALDSIGYRGDNPVGFQKLGCFVELHIEQGPILEAEGKTIGVVDSGQGVLWYDGKISGFESHAGSTPMPLRRDALATLSEIVLAMEAIAKKHGPNAVGTIGEAVIANPSRNVIPGEIAFTMDCRSADGAIMDALDRDLRAAIAEIAARRKVEVKIDLVWRKPPTHFDPKLIAAVENAAKTLGYSSRRITSGAGHDACNLNTVMPAAMVFVPCKDGISHNELEDATQADCAAGTNVLMHTVLAIAGVAS

SEQ ID NO: 12716 - protein, 303 aa, BradyrhizobiumColbertium
MRGVFVDANEALAVIMERLEKPGDPKVRIHRAPDIKPEQYPEILDGAEIAIVDHTALPTDVAKKCTGLKHVVFLGTGARSYMNPEELAELGISVHLIKGYGDTAVAESAIALMWASARVIAMMDREMRAGNWLREDGMQLTGKTLGLIGFGGIAAEVARIATGSGMKVIAWNRSPKSYPGVEFTDLDTVLARSDVVSLHLLLNDETRGMITREKILAMKRGVILINTARAAVVDEAAMIEALKSGHIRHAGLDVFNVEPLPADHPLTKLPNVTLSAHSAFRTPEASENLIHAAWEHCRRIVKG

SEQ ID NO: 12717 - protein, 357 aa, BradyrhizobiumColbertium
MADYRTIKAEPLTNAIRAIVKAGGSSDREAELVSTNLVEANLKGHDSHGVGMIPRYVQSVTNGGLAVNQHVKIVLDTGPLLTLDGLTGYGQVIGHEAMELAAERAKRNGVCLVGLSNAHHIGRIGHWAEQCIDHGLVSIHFVNVISRPIVAPWGGSDARHGTNPFCVGIPRRGKDPIVLDFATSRIAQGKTRVAHNKGVELEPGTIIDNEGKPTVNPRYTVIPPHGAILPFGEHKGSGLALVCEILGGALSGGQVVKGPSDGKYNVLNGMLSIVIDPNKLGTGENLAREVEGFVAWHTASPPAPGVDKVRIAGEPERETKRKRLAEGIPVDPTTWQEILEAGKKFGLDQAAIEGILG

SEQ ID NO: 12718 - protein, 357 aa, BradyrhizobiumColbertium
MSKKQYRIAVIPGDGIGKEVMPEGLRVLEAAAKKHGVSVHFDHFDFSSWDYYEKHGQMMPDDWKEKIGKHDAIYFGAVGWPAKIPDHVSLWGSLIKFRREFDQYVNLRPVRLMPGVPSPLAGRKPGDIDFWVVRENTEGEYSSVGGRMFPDTDREFVTQQTVMTRTGVDRILKFAFELAQSRPKKHLTSATKSNGISITMPYWDERVEAMAKKFPGVKWDKYHIDILTANFVLHPDWFDVVVGSNLFGDILSDLGPACTGTIGIAPSGNINPEGNFPSVFEPVHGSAPDIAGQGIANPIGMIWSGAMMLEHLGEKEAGKSIVDAIERTLAERTLRTKDLGGNADTTACGKAVADMVD

SEQ ID NO: 12719 - protein, 258 aa, BradyrhizobiumColbertium
MDLHLRGKRVLITGASKGIGAAAAEAFAEEGANLLLAARSGDQLKVLAERLRSAHQIDAATSIVDLRKGEDVERLAKEAADIDVLVNNAGDIPGGSIDKLDEATWRHAWELKVFGYINLTRYIYAQMKAKGGGVIINDIGAAGEKFDANYICGSAGNAALMALTRALGSKSLADNIRVVGINPGPVGTDRHVTRLKTRARDQFGDESRYKEFQKSLPLGRPAHAREIGDLMAFLGSDRSGYTSGVIYTVDGGISAGWG

SEQ ID NO: 12720 - protein, 472 aa, BradyrhizobiumColbertium
MSQDLIRETACTVVDKLRSGDVSPLELLDVLETRIKEVDGKVNALPILCFDRARDNAKALMRKPAGARGLLSGLPLPIKDLTDVAGVLNTQGSPIFKDNVPAKSDLMVENLEANGAVVYAKSNTPEFGAGANTFNEVFGATLNPWDTTKSAAGSSGGAAVALATGMAWLAQGSDMGGSLRNPAAFCGVVGMRPSIGRVAHTPKSGIDRNLGVVGPMARNVDDLALLLDAMSGDYADDPLSLPAPATSFLSAAQAGKRPKRIAYSPDLGITPVDPEVKAITRKAAERFAEAGAIVEEAHPDWREAHECFHVLRAFDFAITKANLLRTKRDLLKPEVIWNIEEGLKLTVEQLGRAEAQRVDMTARAVEFFKNYDLLLVPTTIVPPFPIEHRYVAECAGKRFDNYVEWLGIVYAVTLACCPSLSLPCGFTQSGLPVGVQVVGAPRADAQVIAGAKVLEDILGLRGTTPIDPKVKN

SEQ ID NO: 12721 - protein, 216 aa, BradyrhizobiumColbertium
MTTAPRVALIHALKHSIAPIEAAFAKAWPEARLMNLLDDSLSADLACEGALTDAMTGRFLALGHYATATAADAILFTCSAFGPCIEAVARAHASIPVLKPNEAMIERAVTMGKRIGLLSTFPPTLASMPPEFPASVQIVPKLAEGALAALDCGDRAAHDRLLAEASRDLRDCDVIALAQFSIAAAAPLVAEATGRPVVTTPDSAVDKLMRLLKAKA

SEQ ID NO: 12722 - protein, 215 aa, BradyrhizobiumColbertium
MRSQLARKPDKTYHHGDLRDALIKAALREAEQGGAEAISIKALAKKLGVSQPAPYRHFADREALIAAITAEAFRQFSALLREAMAKQSKQSKLLRLALTTLDFGLRRNGIYRLMFASRTVSCAAKGSELHEATRETFALVIEALEAPAVGYLRERQALKIWAALHGVVMLAEQGLFTGEAAHATREELVEDFVNETKAALTVAIRDARRRTKAGA

SEQ ID NO: 12723 - protein, 80 aa, BradyrhizobiumColbertium
MGPAHTTKEAAMAERLKVHVNPDKCQGHARCKALAPELFDLDEYGNAHEAGDGIVPPGLEDKAWLAKSNCPEIAIDVIEE

SEQ ID NO: 12724 - protein, 406 aa, BradyrhizobiumColbertium
MSDVNQPAAHPPVTDWVHDFDHTDPQWTEDPFPIWDQLRATSPVVHTKRFLGCYLPTTYEAVREIANDTEHFSSRRIIVRDVRPEVARNAAPPITSDPPEHKPAKQLLLPPFTPDAMKKLEPRVRAICNELIDEFIADGKVDAAARYSKYIPVRAIAHMLGIPESDSDLFIKWIHMILELGIKDESKLLQAVQEMTAYFSGHIEARKNKPTDDLISYLTNARGKDGNPLEDSHVLGSLRLLLIAGIDTTWSAIGSSLWHLAKTPSDRERLIAEPGLIPTAVEELLRAYSPVTMAREVVKETTISGCPVKSGNMVLLSFPAANRDPKMFPDADKVVIDRRENRHAAFGLGIHRCVGSNLARMEMQVALEEWLKRIPDFRLDPAGTVTWSQGTVRGPRQLPFLLGKAM

SEQ ID NO: 12725 - protein, 220 aa, BradyrhizobiumColbertium
MADDKAPPDSKLTRTKEKWAREGRFLTGKVTRPEAQRLPPGQHLTKDWPVLDLGIVPPVSRERWRLDVYGAIETPVFWSFDEFIAQKQARFTSDIHCVTTWSRYDNEWKGLATRELLAACQPREDARFVVLHSYDGYTTNLALEDFAAEDALLAHSWSGQPLTEEHGGPVRLVVPHLYFWKSAKWLQAIEFLTEDAPGFWEVRGYHNRGDPWTEQRYSND

SEQ ID NO: 12726 - protein, 407 aa, BradyrhizobiumColbertium
MPTERFQFTGEGGHQLSAALELPDGEPAAFALFAHCFTCGKDTLAAKRISVALAAKGIAVLRFDFTGLGSSEGDFANSTFSSNVADLLRAADHLRSVRRAPSILVGHSLGGAAILAAAGQIPEAKAVVTIAAPSDPAHVTGLFKEHIDNIRAHGEVEVSLAGRPFRIRREFLDDIAERELMKNVTSLHKALLVMHSPVDDTVGIDNATKIFIAAKHSKSFVSLDHADHLLTKPADALYTADVIAAWASRYIDTAKPAKTMDLAEVPRQVVVQETRKSKFNQIITVGPHHLVADEPVAAGGADAGPGPYDFLLAGLGACTSMTMRLYADRKSLPLDRVTVTLKHSKIYAKDCAECETRDGMLDQIERGITMDGALDAEQRKKLMEIADKCPVHRTLTSEIRIVTKAID

SEQ ID NO: 12727 - protein, 482 aa, BradyrhizobiumColbertium
MPVLEDVISALVDLKRTDDAGLVTQLTSQLRDLIASGRLGKGRALPSSRRLAGDLGVSRNTVTHAYEQLAAEGYIEASHGRRPVVTVDGGGRRIGAGAAVARERSGKPQLSPWASSLKQTDWPMSYQASLRPLRPGHGDFREFPDEVWARCLRRNAVRAARRELGPVNRTRLREVLADYLATSRGVRATADQIMILPSAQAALTLIATTVVTPGDDVWVEDPGYPGAAAAFRAYGARVSGIRLDEQGMQRMPGLAAPKLIFMTPSHQHPTGRLMSLSRRTEFLGLSRPGKTWIVEDDYDGEFHYDSRPVPALQGLDAHGRVFYVGTFSKAMTSDIRLGYLVAPPALANTLEIAQRHIGLIASSHIQEALAEFIADGHFLAHLRRMRRLYHARRDHLVEELERQLGGMLSIEVPPGGIQLVARLKRGRTDQAAAKRLVAAGVETRALSSLALGRPRDHGLLLGFAAWQECEISAAVRTMASCF

SEQ ID NO: 12728 - protein, 317 aa, BradyrhizobiumColbertium
MLSGEVNCFKDSEMNSLSSRAAVGLFLIVVLAWGVNWSMTKQLVQFVPPLWTAAIRSWIALVGLITILGLSKNLVIPERRDIPVILSVALLHMTLFSTLVAAGLRFLPASKGIVLGYTTPLWVALAAPVLGKEALTAPKLAGALLGLIGLAVILNPSSIDWTNAGVLLGAAMVILAAISWAANIIYIRAHRWIASPLQLLLWQVLVATAVLSALAMIIDGLPHVEWSWRLVSLFLYSGLIGTALAYWAMSMVNKSISALTTSLGTTATPLVGIASAAVLLSEPIDTSLAIAAGLIVTGIGLATLGDRLLRGQATARG

SEQ ID NO: 12729 - protein, 351 aa, BradyrhizobiumColbertium
MESVQLVILFGIVIGLMYGAVGLLSGFCLMSSMRGWLAEGDGRLVRSYALAIAVAIAASQFLAGGGMVDLNKSIYLQTSFSPAVLFLGGLLFGYGMVLSNGCGSRALVLLGRGNLRSFVVVIVLAIAAQMTLKGLIAPARIALVQASQTTVSANSLPSVLVMLGLSESLSRALAAAATVVALILFAFAHPAFRRSPGQIAAGVIVGLLVAGGWYVTGYLGADDFNPVPVTSLTFIAPIADTLQYAMLSTGLTLNFGVATVVGVFGGSFATALATGRFKLEGYSSPRHMVRSGSGAALMGIGGVMAFGCSIGQGLTGLSTLALGSFIAFAGILLGTTAGLRGALRAHPLAVA

SEQ ID NO: 12730 - protein, 321 aa, BradyrhizobiumColbertium
MRLNAKAENAAALSPVVERRTLTRGPCDLLIEVKAAAVNPSDVKAATGLMPYAVFPRTPGRDYAGVVIDGPAGTVGREVFGSSGDLGIRRDGTHASHLVVEADAVVEKPMSVSWEEAAGIGVPFVTAMEGFRRAGVPNSGETVLVMGVNGKVGQAAVQIATWKGARVIGVVRKAEAYEGHANAAVEVIDASTTDVAPRVRELTGGKGADIVFNTVGDPYFQAAHKSLGLRGRQILIAAIDRIVQFNILEFYRGQHTYVGIDTLGLSSAATGAVLRDLGPGFAGGHLKPFPINANAVYPLESAKEAYVAVAGSSRDRVILKP

SEQ ID NO: 12731 - protein, 443 aa, BradyrhizobiumColbertium
MALTRLKEGATTYSAEMDAYERASRDEIMALQKQRLAWSLKHAYDNVTHYRNAFDKAGVHPSDFRELSDLAKFPFTAKTDLRDNYPFDMFAVPREKLVRVHASSGTTGKPIVVGYTQRDIDTWSEVMARSIRAAGGRTGMIIHNAYGYGLFTGGLGVHYGAEKLGCTVVPISGGMTERQVQLINDFRPDIITVTPSYMLAILDEFKRQKLDPRQCSLKVGIFGAEPWTNAMRGEIEDAFDMDATDIYGLSEVIGPGVAQECIETKDGLHIWEDHFYPEVIDPESGAVLPDGEKGEVVFTSLTKEAFPVIRYRTRDLTRLLPGTARPGMRRMEKVTGRSDDMIILRGVNLFPTQIEEVLLATDWCGGHFILELTREGRMDELTIIAEARPESWDGRGLLDHADRISTHIKNTIGISSKVQVVAPATLERSLGKAKRLYDKRPKD

SEQ ID NO: 12732 - protein, 149 aa, BradyrhizobiumColbertium
MNVKAALSPEDIARACADAMWAEDDASKGLGMEIVEIGPGFATLAMTVRPDMVNGQRIAHGGFIFTLADSAFAFACNSHNERVVAAQGQITFIKPGRLDDRLIANAREVTRGGRSGIYDVRVTVGDTVIAEFRGHSRVVPGTWLPTQDQ

SEQ ID NO: 12733 - protein, 360 aa, BradyrhizobiumColbertium
MSAAAPRFHRLAVNDLRREASNAISMTFAIPDELADDYAFTPGQYLTLRTSLDGEEVRRSYSICSGPDDGEIRIAVKKVDGGAFSSWAADELKCGDQLDVMTPTGRFGVVPPAERARIHVGFAAGSGITPILSIVKGVLAREPDSRFFLFYGNRTTDNIMFLEALEELKDRFIDRLSIFHVISGEEQDIPILHGRLDGEKVRVLLRSLVPAEDVDHVFICGPLGMSEEIEATCRNLGITDERIHVERFVSEFGGKPRPKKAVAPDAPPKAIASLIIDGKHRDVPVAEDEAILDAALRAGLDLPFACKGGMCSTCRAKLVEGEALMDLNYSLEPWELKAGFVLTCQAKPSSERVVVDYDHV

SEQ ID NO: 12734 - protein, 167 aa, BradyrhizobiumColbertium
MVTMLERDSELRRRAWDAAASVVDPEIPVLTIADLGVLRDVLLDGDRVEVAITPTYSGCPAMNMIALEIELALERAGFRHPKVRTVLSPAWTTDWMSEDGRRKLRAYGIAPPQASSSRRALFGAQAVACPQCGSDQTELLSEFGSTSCKALWRCKSCREPFDYFKCH

SEQ ID NO: 12735 - protein, 258 aa, BradyrhizobiumColbertium
MAVANIQVSETPLVLYVLRRADDALILGHRLSEWCGHAPMLEEDMALSNIALDLIGQARELYSYAAKVEGKDNDEDKLAYLRDVRQYRNLLLVEQPNGDFAQTLVRQLFYSGFADLYWRAMMGSGDATLAAIAAKSEKESAYHLRHASEWIIRLGDGTEESHRRAQAAIDQLWAFTGEMFAVDDGERHLIDAGVAIDPASLRGRWFAALSDVVGEATLELPQNDWMQQGGRSGRHSEHLGHLLSELQSMQRTFPGLTW

SEQ ID NO: 12736 - protein, 95 aa, BradyrhizobiumColbertium
MATPNTPLWEVFIRSRNGLAHKHVGSLHASDTTMALQAARDIYTRRGEGLSIWVVPSSAITASDPAEKGMMFEPAESKIYRHPTFYEVPEEVGHM

SEQ ID NO: 12737 - protein, 330 aa, BradyrhizobiumColbertium
MYTQALNTAESDDRALEDAAKAAQFQARIDAEERIEPNDWMPAAYRKTLTRQISQHAHSEIVGMLPEGNWITRAPTLRRKAALLAKVQDECGHGLYLYAAAETLGASREELVDAMLAGKAKYSSIFNYPTLTWADIGTIGWLVDGAAIMNQIPLCRCSYGPYARAMIRVCKEESFHQRQGYEIMLTLCRGSDEQKAMAQDALNRWWWPVLMMFGPPDAASQHSDTSTRWKIKRFSNDELRQKFVDATVPQAQYLGLSIPDPGMIQDADGHWRYSQIDWTEFKQVLAGNGPCNRDRMAARRKAHEDGAWVREAAAAYAAKRGQRQSAQAAE

SEQ ID NO: 12738 - protein, 287 aa, BradyrhizobiumColbertium
MAHPLSRIIDQLKREPSRTGSIVITVFGDAIVPRGGSVWLGTLLEFFEGLDIDSGVVRTAMSRLAADGWLTREKVGRNSFYRLAEKGRQTFEAATRHIYDPPPSEWTGRFELLLIGNGEDRDASREALRNAGFGSPLPGVWVAPSGVLVPDEAAGAIRLEVSAEDDSGRRLLSASWPLQRTADAYLKFMKTFKPLRAALARGTDLSEPDAFTARILLIHYYRRVVLRDPLLPESLLPADWPGRAARELCGEIYRGLLAPSEQWLDGHGTNEKGPLPAARKLLERRFA

SEQ ID NO: 12739 - protein, 241 aa, BradyrhizobiumColbertium
MFLEGRAIHEFGAFLSALPLLSLAPSGDGHPVLVLPGLVASDGSTRALRTFLTSKGYAVSGWGQGRNYGLRPGVQDAMVDLVHELSDTHGRKISLVGWSLGGLYARQLAKMAPDRVRQVITLGSPFAGHPRSTNAWRVYEWASGRKSDEVDPQFGGELAVPPPVPTTAIFSRTDGVCAWQGCMEKAGAQTESIEVESSHCGMGHHPAVVYAVADRLAQKEGQWRPFDRSGWRSLAYPDPHR

SEQ ID NO: 12740 - protein, 52 aa, BradyrhizobiumColbertium
MDRAPFQKHQGTGRRTQRLGGSGHQWSLERIAGRITGWKNRKRRMNSNSPAS

SEQ ID NO: 12741 - protein, 428 aa, BradyrhizobiumColbertium
MIQPATSSFVTPGDAERAAELRRVKALATLVLVSTLALFVVAKWLLPVHPVFGFIAAFAEAATIGGLADWYAVVALFKRPLGLPIPHTAIIQSNQARIADKLGEFIEVHFLEAGPVEAKLKEIDFGSFVADWLRDRKCSDDLARFALRLLPEAFSATESSGLMTFIIRRMSSQLQAIDLAPLAAGTLRGFVAERRHQILFDDLLRVMHETLNQKDTMAMIREKVRAELPTLLRLYRADKFLVNKIVASATAFFNEVRSDPEHPFRGEFDRMVLGFVDRLGTDQAYIDRIDGLKRDLLARPELADLARTIWANTRSFIERSASGETQVLQHHLAGMFVAAGEALAGDAELRGEINKGLVTVLRSFVADQKRGVSSFISDQVKAWNMKQLISLIEINIGRDLQYIRFNGSLIGGLAGLALYSVESLLRWL

SEQ ID NO: 12742 - protein, 151 aa, BradyrhizobiumColbertium
MTTETNAAFDSFKDAFKNIQNLEVPEAAREFVKKTANTAKDRAAEVFAGSERVTAAVENAVTESVTEAGKISRNIQQAIYEDAEAFFSGIDKLASAKSFSEAVEIQSGLLRARGEAFVSRAKATADYFGQLAANGAKSAQDNFAKVYNKTA

SEQ ID NO: 12743 - protein, 197 aa, BradyrhizobiumColbertium
MSEQRSYPRHVKTDAGDVEIRLMSPADEAAVLAFGKSLPTHDLLFLPRNISEPKVLSAWVKEIERGAIQSLLAVREGRVVGCGTLVRDPHSWSPHVGEIRMVVSPEVRGKGVGKALSQETFALAFGAGLEKLSVQMTVDQQAAIALFESLGFKAEALLRDHVRDVGGKTHDIVVLGHNIAQVQAQLEAYGLPGAVQQ

SEQ ID NO: 12744 - protein, 360 aa, BradyrhizobiumColbertium
MNATAGLDFAAIPERIQSEVQRAIMRSIKGVEYFSTSGPTLGSTPKDVLHSRGTMSLYHYRPMSDEIYRVPVLIVMATTNRGYILDLVPGQSFIEFLLRRGYDVYMLDWSAPRPEEKSLRMDDYVLDFIPDCVRRVQADSGEQDVSVIGYCFGGVLSLLYGSIHKGGPMKNLICFTTPIDFREMKLFSNFSDRRYFDVDRLVDSVGNVPPEMILSSFEMLRPASRTASQIQLWENIWNDEFVKSYRMFDRWATDTLPLAGEYFRAITKDLMWDNKLFNDTMSVGGRAAKLEDIKVPILHAVAEHDHIVPYEAAKHLIAKIGSTDKEEVILKGGHVSLVAGANAVKRLWPKLDSWLGKRST

SEQ ID NO: 12745 - protein, 126 aa, BradyrhizobiumColbertium
MTDKITDPVALWQKMVGEMEKGFNSFATKAMETPEFSQTVNRAGGVAAGAQKQFGDLMEKYLLSMNLPSREQMTGIAERLQSIEGQLGEIKSMISQMSANSGAQQPGAAPRPPRTKRPPSEGGGRE

SEQ ID NO: 12746 - protein, 304 aa, BradyrhizobiumColbertium
MTAHQPPQTVRANGIDICYEIFGNDNAEPLLLIMGLGAQMIHWDDAFCEQLAARGFRVIRFDNRDIGKSSHLTGGKRLTPLELLKLRLFRIPVAATYKLIDMAKDTIGLMDALGIKSAHLVGASMGGMIAQEVTLSFPHRVRSLTSIMSTTGNPRVPPPTREAAAMLMAPPPRSKEEFIVRFGQTWKVLRAGHFPEEEALDPGRAERVFARGLNPAGVGRQLRAVLASGSRKERLHAVKAPTLVIHGTVDPLVRPEGGKDTAASIPNAKLLMIEGMGHALPMRFWPQIIDAIDEHAHSAAAQAA

SEQ ID NO: 12747 - protein, 224 aa, BradyrhizobiumColbertium
MIPWEKIDTAKIPGSDEELRLMRRGKEFSIKLGTNELMNNRLSGSEAALATLAAKQIEHTAKPVVLIGGLGMGFTLRAALAVLGSKARIVVSELVPAVVSWARGPMAEVFGDSLDDPRVTIREIDVAEIIRAKRSAFDAILLDVDNGPEGLTRKGNDALYSASGLGTAKNALRPGGVLAVWSSGPNPAFTRRLRTAGFAVNEVNVRATGRGGGARHVIWIAKKS

SEQ ID NO: 12748 - protein, 1078 aa, BradyrhizobiumColbertium
MSSTNRLDPIPHPPTKPVVGNMLSLDSAAPVQHLTRLAKELGPIFWLDMMGSPIVVVSGHDLVDELSDEKRFDKTVRGALRRVRAVGGDGLFTADTKEPNWSKAHNILLQPFGNRAMQSYHGSMVDIAEQLVNKWARLNADDEIDVVHDMTALTLDTIGLCGFDYRFNSFYRRDYHPFVESLVRSLETIMMTRGLPFEQLWMQKRRKTLAEDVAFMNKMVDEIIAERRKSSDGIDDKKDMLAAMMTGVDRATGEQLDDVNIRYQINTFLIAGHETTSGLLSYTLYALLKHPDILKKAYDEVDRVFGPDVNAKPSYQQVTQLTYITQILKEALRLWPPAPAYGISPLQDETIGGGKYKLRKGTFTTILVTALHRDPPVWGPNPDAFDPENFSREAEAKRPINAWKPFGNGQRACIGRGFAMHEAALALGMILQRFKLIDHQRYQMHLKETLTIKPEGFKIKVRPRADRERGAYGGPAAVASSTPKAQRQATTRPGHNTPMLVLYGSNLGTAEELATRMADLAEINGFAVHLGPLDDYVGKLPQEGGVLIICASYNGAPPDNATQFVKWLGSDLSKDAFAGVRYAVFGCGNSDWAATYQSVPRFIDGQLSAHGARAVYPRGEGDARSDLDGQFQKWFPAAAEVATKEFGIDWNFTRTAEDDPLYAIEPVAVTAVNTIVAQGGAVAMKVLVNDELQNKSGPNPSERSTRHIEVELPSTVTYRVGDHLSVVPRNDPTLVDSIARRFGFLPADQIRLHVAEGRRAQLPVGEAVSVGRLLSEFVELQQVATRKQIQIMAEHTRCPVTKPKLLAFVGEEAEPLERYRSEVLARRKSVFDLLLEYPACELPFHVYLEMLSLLAPRYYSISSSPSVDPARCSVTVGVVEGPAASGRGIYKGICSNYLANRRAGDVIYATVRETKAGFRLPDDSSVPIIMIGPGTGLAPFRGFLQERAARKARGDVLGPAMLFFGCRHPDQDFLYAEELKALAAAGITELFTAFSRADGPKSYVQHVLATQKEKVWSLIQQGAIIYVCGDGGKMEPGVKAALVAIHREKSGSDAAAGARWIDEMGAKNRYVLDVWAGG

SEQ ID NO: 12749 - protein, 331 aa, BradyrhizobiumColbertium
MIEMPPLKFAQTNGIRMGYYEAGPADDKPPIVLCHGWPELAFSWRHQIKALSEAGLRVIAPDQRGYGATDRPEPVEAYDMEHLTGDLVGLLDHLEIEKAIFVGHDWGGFVVWQMPLRHPTRVAGVVGVNTPHWDRAPMDPIALFRQRFGDQMYIVQFQDPAREPDRIFGSRVEQTFDAFMRKPLPRPAAKPDEPPVAGVGASSKTNLAFPQMIAAYDAKVDPRTPILSAEEKKVFVDTFTKTGFTGGINWYRNFTRNWERSKGLDHHIHVPSLMIMAENDAVLPPSAADGMENLIGDLEKYLVKDSGHWTQQEKPEEVSAKLIEWRRRRFG

SEQ ID NO: 12750 - protein, 516 aa, BradyrhizobiumColbertium
MADGKKLSSLDASFLYLETPEMPMHVGSMAIFRLPDDYKGDFFEDFKAMIVSRLHIAPILKARLEKAPLDIDHPSWVEDDQFDIDRHIFRASLPQPRDRATLERIVGWMHAKLLNRARPLWEFYVFEGMKDNEVGLYSKMHHAAIDGGAGAALTNMIYDISPIPRKVAPPSAGSKPGQEPRDIAANLLDSYQQLFSQPLDASQAAKNLQLPRTGKSDIGSILFDNAMYQIESAVRFAGNIPTVLKSMSDVLGKVADPKSRESLASMVSPPTMLNKTISSERSFAGVSISLSRSKALAKLAGGKLNDVVLALASGVVRRYLLQHGTLPAKSLTAAVPISLREEGNTEANNQVFGMICSIATNIEDPKARLEAIIAQSTKSKEMSHPLRALMPQVSNISMLGAPIMVQILALLYSRSNLSDVLPPAANITVSNVPGPRQTLYAAGAELLHIFPVSISTHGQALNITVQSYRDQLDFGFIVGANIIPHVQVMCDMLPEEFAALETAYAPPAAEIKGAAE

SEQ ID NO: 12751 - protein, 266 aa, BradyrhizobiumColbertium
MSSGRNGAPESGRLRAPGLGLLLAEARGLFELNASLLLSPLLMRAPRGDGHPVLALPGFLASDLSMAPMRRYLRELGYEAHAWRMGRNLGGLARMRDSLRALLTQTHAASGRKVSLVGWSLGGVFARDLALWAPDMVRYVITLGSPFANDVRATNATWLYELLSGERVEDFAEAREAIAGDLPVPTTSIYSRADGVVNWRTCLLRASERAENIEVHWASHIGLGVNPAALWAVADRLAQPEGQFRPFDRAGPFAIAYAPPEQAVLA

SEQ ID NO: 12752 - protein, 85 aa, BradyrhizobiumColbertium
MKVNIEIDCTPLEARQFFGLPDVAPMQTAVMDKLQQQVLTNIEKVSPESLLQSWFTFDPKMTERFQDMFAAMAGLGGTRSADKKK

SEQ ID NO: 12753 - protein, 586 aa, BradyrhizobiumColbertium
MPGHAVNIAAQRRNFGAFLAGMALARVENSGQHALKSRPNKPKITGTAVWRGSRMSVGRTLYAATFAGALAFLSAAPALSQTLRYANQGDLKSLDPYTLNESTTHAHLGHVYQGLTARDKDLKIIPALAERWETPEPTRWRFYLRKGVKFHNGNPFTADDVLFSADRVRKKGSNMQTRLAADVKVVKVDDYTVDFVLPSPNPILHSSWDVWYIMNKKWAEENNVVDPTPVAATTPSYASLHENGTGPFIVESHQPGVKTVFKANPNYWGKVEGNLKEIIFTPIASDATRVAALLSGEVDVIEPVPVQDIARIDSSPNAQVLKGPELRTIFIGFDQTRDELLYSNIKGKNPFKDVRVREAFYKAIDIELIKTRVMRGLSTPSALMIAPELFALSKEFTRPKFDPDGAKKLLTEAGYPDGFEVTMDCPNDRYVNDAAICQAVVGMLARIGVKISLLAQPKAQYFAKVLKQGNYQTSFYLLGWTPSTMDSHNVLYDIMGCRDDAKSSRGEANLGGYCNKDFDAITDKVLVEPDTAKRNQLIKQAYEIGNKDWSYIPLHQQALAWGVSKKVKLPQRADNQVLLYWATKQE

SEQ ID NO: 12754 - protein, 326 aa, BradyrhizobiumColbertium
MLAFTLRRAIQAIGVMFAVGIIAFSMFRFAGDPVNQIVSIDTPAAEREAVRKSLGLDDPVPVQFVRYFADAAQFKFGVSYQFRQPVSALLMERMPATLELAICATVFAMVLGILMGVYSALRRDTFLAKLFQAVSLIGISLPTFLIGILLIYLFAVTLGWLPSFGRGEVVRLGWWTTGLLTLSGLKALIMPSITLGLFQMTLIMRLVRAEMLEVLRTDYIRFARARGLTTRAIHFGHALKNTLIPVITVAGLQFGSVIAFSIITETVFQWPGMGLLFVQAVQNVDIPIMAAYLLMVSLIFVTINLVVDILYTVVDPRLRSTVGRAA

SEQ ID NO: 12755 - protein, 322 aa, BradyrhizobiumColbertium
MSDAVVSKSDRQGTQPARTHGWFGRALDSDLFYSFRRSKLTMVAAAITVLFFLLAIFASALAVQNPFDPAQLQLMNSRISPLWTADGQSPFLLGTDEQGRDVFSAILYGMRISLAVGVAGVIFAGVLGIALGLIAGYFGGAVDGVIMRIADVQLTFPAILIALLVNGIAKSILGNRLDATSMLTVLVISIGLSFWVGYARTVRSSVMVEKNKDYVAAAQLIGLPAPKIMLRHVLPNTMGPILVIATINLALAIITEATLSFLGVGLPDTMPSLGTLIRIGNNYLFAGEWWIVAFPGLALAALILSINLLGDWLRDALNPKLR

SEQ ID NO: 12756 - protein, 328 aa, BradyrhizobiumColbertium
MTEPVLSVRNLKVEFASRRGTLRAIDGVSFDIAKGEVLGVVGESGAGKSVTGLSVIGLIDPPGRIAGGEIRLAGLRIDNLPPEELRRVRGKRIGMIFQDPLTSLNPLYRVGDQIVETIRTHLNLSGTAARRRAIDLLAEVGIPAPEKRIDGYPHEFSGGMRQRVVIALAICAEPELIIADEPTTALDVSVQAQIISLIKRLGRDHGTAVMLVTHDMGVIAETSDRVAVMYAGRIAEIGPVQDVVKNPLHPYAKGLMGAIPTLAGEDKRLVQIPGSMPRLSAIPPGCSFNPRCAFAFDRCRVDRPDPLPRGAQSVACHLYDDAAAESVA

SEQ ID NO: 12757 - protein, 329 aa, BradyrhizobiumColbertium
MSAPFVQATDLRRVFDVSKPWLNRVLEGGHLEYLKAVDHVTFDIRKGETFALVGESGSGKTTVARMVVGLLPPSSGDVLIDGVSMTDPRQAPARRKLRRRIQMIFQDPYASLNPRFRVDAIISEPIRAFGLILGERDIQARVGELLNLVGLHPDDRLKYPHEFSGGQRQRIAIARALASDAEFIVCDEPTSALDVSVQAQILNLMRDLQDKFGLTYMFISHNLAVVRHMASRVGVMYLGRIVEIAEGRELFARPRMPYTKMLLGAVPDLAMSGRQRVPVKGEIPNPINPPPGCAFNPRCPLAFDLCRRETPELIDGAACHAVNTAPVPA

SEQ ID NO: 12758 - protein, 601 aa, BradyrhizobiumColbertium
MGSNINPDPFTTRPEIEGTFGVVATTHWIATAVGMGILEKGGNAFDAGVAAAFTLQVVEPHLNGPGGDVPIIVHDVKRGRTEVICGQGPAPARATIAHYRSEGLDMVPGTGLLAACVPGTFESWMMLLRDYGTMRVRDVLEPAIAYARDGYPLVERACATIQMVEQLFRKHWPTSAAVYLPNGEVPKPGTLFTNKTLAATYDRILREAESGGAGRDAEIERARKAWSQGFVAEAIDKFCRTQEVMDVSGSPHRGVLSADDMARWQPTVEAPLTYEYGRYTVCKAGVWSQGPVTLQQLALLKGFDLDGLDPTGPEFIHLQIECAKLAFADREKFYGDPKFTEIPISTLLSDIYNDERRKLVTDKASLDFIPGSVEGFGGMVKLRRAEGQREAVGALGAGEPTVGRFGEVRGDTVHFDIIDKDGNMVSSTPSGGWLQSSPIIPELGFCLGSRAQMFWLEEGHPAALAPGKRPRTTLSPTMALRDGEPYLAWGSPGGDQQDQWITQFFLRHVHCNLNLQEAIDAPAWHSEHFPISFWPRTARPGVLVVENRVPKATIENLRERGHIVEIGPDWSEGRLTAASRVGPRRRAAANPRGMQGYAAGR

SEQ ID NO: 12759 - protein, 236 aa, BradyrhizobiumColbertium
MTWSIIARDPATGQFGIAVATRFFAVGARVPYIAAGVGAIATQAFVNPYYGIDGVRLLREGLNAHDVLGSLLATDDGRESRQVHIMDASGEIAAHTGHDCVGWCGHIAGSGFSIAGNMLAGADVLDETAKTYIANDSLPFPRRLLAAMRAGEAAGGDKRGKQSAALLIHGEEEWPALDIRADDHPDPLGELERLERVSHELWVHFRASMPTRQNPAGNTDRSVIEASIAAARIRQS

SEQ ID NO: 12760 - protein, 248 aa, BradyrhizobiumColbertium
MTREFSAGNYRFIPSVFQYSAGAAADEGYEIQRVRFDRLVPLAEGFALAAKFIQEAGRPLTAFCACELRSPAAFSEEGFRAFNLHYVKTLSEWGIFDGTTNPVARSNVCPEIDPPSEPSFYAFSFTRPTRSNAPSFVIAGGAEAREGSGTYVERTVRYRDLSPEGLREKVRFTTTSQMENRMAAFGFGWKDTTGVQAYSVHDFHHALVDELVRRGALRSGLTWHFARPPVVDLEYEMDCRRVMREVVI

SEQ ID NO: 12761 - protein, 416 aa, BradyrhizobiumColbertium
MTATILFVDDEPDLEALVLQKFRKQVRDGQLALIFARDGLEALESLERNPHVDMVVSDINMPRMDGLSLLAKLQEAEDKKSTIIVSAYGDMSNIRIAMNRGAFDFLTKPIDFADLETTIEKTIRHVEMLREVRRRQMEAERAHAALSRHFSPQLAKRLAASGEGEGVEVQWRDIATIFTDITGFTSLVESAPPETLGELLNEYVGGMTEIVFTHEGTVAKIIGDAIQVLFNAPGDQPDYATRAVACAHDLDAWAQSFCVRQKARGVNFGTTRIGIHAGPALVGNFGGNRFFDYTAYGDTINTAARLEAANKHLGTRICVSASVANGAANFHGRPVGDLMLRGRSEPLRAFEPLRQTEFEAPATAQYSEAFGKMEAGDAAAMPAFAALVGMHADDPLASFHLKRLLNGAKGIRMQLE

SEQ ID NO: 12762 - protein, 129 aa, BradyrhizobiumColbertium
MNVYILVVDDEPDVEALFRQQFRRDLRAGRFQMEFALSAPEALKRAAEVRDPSLILILSDINMPGMSGLDMLPKVRAAHPDVPVIMITAYGDAETRRKAIERGAVGLLTKPIDFALLRQEIDTRLEQAA

SEQ ID NO: 12763 - protein, 684 aa, BradyrhizobiumColbertium
MSLSLHPDSPQAGTLASAAPSQAGQGETGRGIRIRLFTKYVALFVAVVAIALLVNGLFEVFFYYREHKAALIRVQHEQAESAAAKIGHFVKEIESQLGWTTQLPWSGGSIEQRRFDALRLLRQVPAITELAQVDSTGKERLRVSRLAMDALDSGIDLSSDPKFTEAVVHKVYYGPVYFRRESEPYMTLALAGARKDAGVSIAEVNLKLIWDVVSQIKVGARGHAYVVGPEGRLIAHPDISLVLRNSDMSGLPQVRSALAAGGRMPDELEEGRNIQGQKVLTASAPIQPLHWTMFVELPVEEAYASLYASLQRLAIVLLAASIFAVLAGIFLARRLVGPIQALRSGAERIGGGDFSQRISIRTGDELEGLADQFNDMGARLQESYADLENKVEQRTAELRRSLDDLRTAQNRLIQSEKLASLGQLTAGIAHEIKNPLNFVNNFSAISTELIDELNETLRSAPLDGKAKEEVEELTGMLKGNLEKVVQHGKRADSIVRNMLLHSREGSGEHRAADINAIVEESINLAYHGARAEKPDFNVTIQRAFDPAAGMIDVYPQEITRVLLNLIANGFYATAKRKESAGDGFEPTLSATTKNCGNAVEIRIRDNGTGIPPEVKEKMFNPFFTTKPAGEGTGLGLSMSHDIIVKQHGGTIDVNTEPGVFTEFIITLPRAIATGPTTGTPGGKS

SEQ ID NO: 12764 - protein, 1031 aa, BradyrhizobiumColbertium
MAFTDIFIKRPVLSVVVSLLILLIGLRAAMVLPIRQYPKLSNTVINITTVYPGASADLIQGFITTPIEQAVASAEGVDYITSSSVLGTSTIQVYIKLNFDPNQALTEVLAKTNSVKYLIPKESNDPIVTKTTGQTTAVMYLGFSSEELSGSAISDYLTRVVQPVLSTVDGVASADILGGQTFAMRLWLDPVKMAGRNVSPTDVAAAIQANNFQSAAGQTKGYLIVSNVSTNTGLTNVDQFKKMIVKAKDGGFVRMEDIATVELAAQSTDASVAFNGEHAIFIGVQATPQGNPLTLVKGVRALFPELERNLPPSMKMKVAYDSTKFIQSSIDEVEKTLGEAVIIVIVVIFLFLASLRSVIIPVVTIPLSMIGVCTLMLALGFSFNLLTLLAMVLAIGLVVDDAIVVVENIHRHLEEGKTPVQASLQGAREIVGPVISMTITLAAVYAPIGFLGGLTGSLFREFAFTLAGSVIVSGVIALTLSPMMCSVLLKNTEEGRFAKLVNRVFGAMTRWYGRKLDRSLDYKAITGLFAVTILGLVGFLYMHTSKELAPEEDQGIVFAVTKAPKYANIDYLDFYGEKLDKEFAKFPETDLRFVLNGINGPQGGIAGMLLKPWDERKRSAIQLKPLVQAELSKIEGVQAFAFNLPPLPGGPGGLPIQMVINSTAGFQTVYEQMEKLKEAARNSGMFIVSDSDLAYNQPNVKVTIDRTKAQDLGVNMQNLGATLAVLLGGNYINRFNLEGRSYQVIPQVPRAKRLSPESLGGYYVTTNTGQQLPLSTLVSIETKTDPNSLTHFNQLNSATFSAVPMPGVTVGAAVDFLEGEAKKLPQGFSHDYLADSRQYVQEGNQLAITFGFALIIIFLVLAAQFESLRDPLVIMISVPMAIVGALIPLFFGAATMNIYTQVGLLTLVGLITKHGILMVEFANELQINERLDRRSAIEMSARIRLRPILMTTAAMVTGLIPLLTATGAGAASRFSIGLVVVAGMSIGTLFTLFVLPAVYVVLATDHRAAADSERNKQINDLDLGSKALRPT

SEQ ID NO: 12765 - protein, 400 aa, BradyrhizobiumColbertium
MHDMNVVAEHKISGEPIDSKAPKRPVRPVLWFIIVGTLLAALVGGLVWFNYFRGQMIKQFFASNKPPPTAVSAAEAKSEVVPNLLTAVGSLVAVHQVDVSADVNGRVTEIKFQPGTRVEAGTPLVQLFDAPEQGDLANYKAQATVAQLSLDRAKQLAARQFGPQATVDTAQAAYDQALAGIAKTEALISQKLVRAPFSGDLGVRKVEVGQYLTAGTAIVSLTDLSQLWANFTVTEKDSGSLKVGQAVRLKVDAYPGRTFEGKITTIEPQISTDTRNIRVQATIANPEKILKPGMFVTTTVVLPEKPAVITVPETAVDYTLYGDSVFVITEKKEDDGKTSLSAVRTFVQTGSRVEGRVEIVKGLKAGDKVVAVGQLKLQSGAPVSISTDPAPPIPAQPPRY

SEQ ID NO: 12766 - protein, 220 aa, BradyrhizobiumColbertium
MILGAAKRCFARHGYTGTTTKSVAAAAAISEALLFKHFPSKAALYAEILSDECEADPAFMELLEREPSTATLVELIRGMVEHFLQIADGPDQEEAQRLRLMATSHLEDGEFARLLYAKIETLIGAVFVASLERAIASGDARPCDGDPLNLFWFAHHSVMTAALTRLPAKPCLAYGKANDLERQLCEFLLRGIGLNDAAIASHLGRDQASDAGEAAIAESA

SEQ ID NO: 12767 - protein, 196 aa, BradyrhizobiumColbertium
MSKANLLDRRQVVSTLLADRRDVVAIGGLGASTNDMCAVGDHARNFYLWGGMGGAAMIGLGLALAQPKLPVLVITGDGEMLMGMGSLATIGLQKPCNLSIVVLDNEAYGETGGQTSHTSAAADLVGIARACGIADSRAVTTMAEVEAFAKAVHDVSAGPRFANVKIDSANLERILPSRDGTYIVNRIRGDLGFQPI

SEQ ID NO: 12768 - protein, 180 aa, BradyrhizobiumColbertium
MHARTDAADTTPSWPDDIFATLQRFDVRQVPYVPDAGHSKLIQRVLDSSTMRGIPLTTEEEGVALLAGAWTGGQRGVLLMQSSGVGNCINMLSLIPILRFPFLTLVTMRGEWGEFNPWQVPMGSTTQGVFELSGVKVLRASNAAEVPAVLEAAAAQAYNALTPTAVLLSQRLIGAKVFTK

SEQ ID NO: 12769 - protein, 410 aa, BradyrhizobiumColbertium
MNADAKALAASFDLEKLTPEFYDNPYPTYRALRENEPVKRLRNGTVFLTRYDDLVTTYKNTKAFSSDKKREFAPKYGDTPLYEHHTTSLVFNDPPSHTRVRRLIMGALSPRAIASMEADLIKLVDRLLDAIAAKGSCELIEDFAASIPIEVIGNLLDVPHDERGPLRDWSLAILGALEPVVSPEAAARGNKAVTDFLAYLETLVARRRQKPGNPERDVLTRLIHGEGSGEENGERLTEKELLHNCIFLLNAGHETTTNLIGNGLVALDRHPDQKQRLIDNPDMIKTAVEEMLRYESSNQLGNRMTTERVELGGVMLEAGTSVTLCIGAANRDPTQFPDPESFDIARTPNRHLAFATGAHQCAGMALARLEGAIAISRFLARFPNYAVSGPPVRGGRVRFRGFLSVPCSIG

SEQ ID NO: 12770 - protein, 287 aa, BradyrhizobiumColbertium
MRDFSSDHRWLSLNTATVRKQGDILAIIDACAKHGIRAIDPWRDQVAAVGLERATRAVRDAGLELSGYCRGGMFTSDASRCGEVRDDNRRCVDEAEALGAPCIVLVVGGLPQYSRPGSEASKDLVAARGQVEEALAEMLDYARQAKLPLAIEPLHPAYAADRACVNTTKQALDICDRLDPGRTGMLGVALDVYHIWWDPELMGQIARAGKDRLLAFHVCDWLVPTKDILNDRGMMGDGVIDIKSVRQAVEAQGFAGYSEIEIFSNEWWAKPMDEVLRTCIARHRTAV

SEQ ID NO: 12771 - protein, 396 aa, BradyrhizobiumColbertium
MNKPVQPMSSLSLKLPKADRSIETYRLAASRTFPAKLEGPLNRIAFSAVHTVADPFADNDPWLSVAVDWDKTVAFREHVWDLGLGVAEAMDTAQRGMGLDWPTSLELITRSVGAAKRRNALVFSGAGTDHLAVEDAKTIDDVIRAYEEQVSAVEKVGGRIILMASRALAKLGRNADDYAKVYDRVLSQVREPVIIHWLGDMFDPALTGYWGTKDLDKAMDAAVAIINGNAAKVDGVKVSLLDKQREIDMRRRLDKRIRMYTGDDFNYAELIAGDEQGFSHALLGIFDAIAPAASYALSRLAAGDEAGFHDVLGPTVPLSRHIFKAPTRFYKTGVVFMAYLNGHQDHFTMVGGQESTRSTLHLAELFRLADKAGLLANPELATQRMKTVLATHGIES

SEQ ID NO: 12772 - protein, 38 aa, BradyrhizobiumColbertium
MSTNPSLRAKRSNPVSIRGNSLDCFVASLAMTGRGLKS

SEQ ID NO: 12773 - protein, 383 aa, BradyrhizobiumColbertium
MTTQRLGLIMNGVTGRMGLNQHLIRSIVAIRDQGGVRLKNGDRVMPDPILVGRSADKVEALARRYNITRWTTDLDAALADKNDTMFFDAATTQARPGLLTQAINAGKHVYCEKPIATNFEEALEVVKLANAKGIKHGTVQDKLFLPGLKKIAFLRDSGFFGRILSVRGEFGYWVFEGGWQEAQRPSWNYRSEDGGGIILDMVCHWRYVLDNLFGNVQSVSCIGNTDIPERYDEQGKKYKATADDSAYATFQLEGGVIAHINMSWVTRVYRDDLVTFQVDGTHGSAVAGLTDCMIQARQATPRPVWNPDEKRLHDFYGDWQKLPDNVTYDNGFREQWEMFIRHVYEDAPYKFTLLEGAKGVQLAECALKSWKERRWIDVAPIKA

SEQ ID NO: 12774 - protein, 480 aa, BradyrhizobiumColbertium
MDARDKPGYDELHRTMSVRLKLRDIAFFERPVPFARPFRFGAITISATPQLFVRVELEVEGRGTAVGASAELLVPKWFDKRPELSPAQTVEGLRESLEIARGLYLASAGYQTAFDLHASCIGDQVATCANKNIPPLAAAYGPAEIDKAILDALLRAAETNFFEGMAGNIAGIDARLSPDLAKLDIARFLSGRVPLQRVAIRHTVGLDDAIEGEGGVADPRENAGARYFKLKLSGDPAADTARLARIGKELDTLGRDYRVTLDANEQYADFAALQALMDRLDHDAALRPIATRLLYIEQPMPRDITRQSPLGALAARGFIIDEADDSYDAFPTARALGYRGISSKSCKGIYKSIVNATRAAKWSAESETFYVTGEDLTCQAGLAVQQDLALGAFLGVTHAERNGHHYVDGFGETPAAEAAAFAAAHPDLYADAGQGIRLKIHDGDLLTGSLHATGFATSVHPDWPALCPLEQPGSSQEHLA

SEQ ID NO: 12775 - protein, 276 aa, BradyrhizobiumColbertium
MSETAQPAAHLRLVSGRAAGDASGIKLSGVSKTYRTRDGDVPSLRPLDFHINDGEFFVVVGPSGCGKSTLLKLISGLLPPTTGEILVEGEKVTTPHGNVGIVFQNALLLPWRNILKNVMLPIDMKRLPRDKYLPRAKELLKLVGLEGFEKKLPWQLSGGMQQRASICRALVHDPRIMLMDEPFGALDALTRERMNVELMRIQRETGKTVLLITHSIPEAVFLADRVLVMTERPGAIAAIYDVPLPRPRSLDAMADPVFTELVQRIRKHFFSQGALD

SEQ ID NO: 12776 - protein, 330 aa, BradyrhizobiumColbertium
MKRLIGAVSAALMAFTAMPAHAADKVVLMLNWYVYGEHAPFYYGKAKGIYAAEGIDIEIQEGRGSAATTQAVAAKTADFGYVDVPTMMRAAIKGAPVVATGVLLQTSPMSAMGFADKNIRKPEDIKGKTVAITPADSMTQIWPLFLKKTGLKESDFKTVAGDGQTKLNAVINGQADLLLGYVMDQSMKIKDATGKDVYPIKFADYGINMVSSGIIANADYVKANADLVRRFMSATTKAVEAAEKEPKAAAQAILDANPKGGKIDTLTQGFELTIPLYRTAETKSKRPFQVSDQNMTDTVNLMVEYGGLDAKAKENPKAFYTNDYLPKSGS

SEQ ID NO: 12777 - protein, 269 aa, BradyrhizobiumColbertium
MAELKPQNAVSKLLNAAWVRPFLFLVFIVVAWDLAIRLFRIPAYQIPSPLDVVAVLRTEWPELLRQAWPTTYATVCGFLLSALFGIPVAMLIAGSKTVESYVYPLLVFSQSVPKIAIAPLFVVWFGFGIIPKVISAFLLGFFPVVVSAVQGFKSVDPDMVDLARAMQGSRFQVFRAVNLPHALPAIFSGLKVSVTLAVVGAVVGEFVGSNSGIGYVMQRSIGTFDLPTMFAALVILALLGVVLFWIVDRIEKLVIPWHVSQREDVIFAS

SEQ ID NO: 12778 - protein, 235 aa, BradyrhizobiumColbertium
MTKPKRTQKWQRDPEGMRLRILEAAKQEFSAHGLAGARVDRIAAKAGANKRMLYYHVGNKDELYLAVLEGAYDKIRSEERGLDLEHLDPPEAIRRLIEFTWNYFLRNPEFLSLLQTENLARAKHLKKSTKVKSMHSPFVEMIRTVVRRGVDSGDFQVAVDPVQLYISIAALSFFYLSNSATLSVIFGRDLLDKKAKDERLAHMVGLVLAALTGRSAALFEIAKAPKSRSAVAQTV

SEQ ID NO: 12779 - protein, 282 aa, BradyrhizobiumColbertium
MITGLDHIVVLVSDIGAAKAAYQTLLARAPAWQNSGEGADRVLFTLDNMTIELMAPSGFSVTADRMRALLDDQEGIIASLCFRVADVGKMHRRLERVALQPDPVTEVESSDAGSGAVLHWKRTRAATELTRGVRMFFLELAEERPKSVATDIAPIDALDHVVVTTEDSDRAAALYGARLGLDLALDRSHQDWGQLMFFRCGDLIVEVVRRPVAGGDAAHDRLWGVSWRVADIDATRARLIAAGLDVSEVRNGRKPGTRIMTVRSGTCGIQTVLLERSPKPVK

SEQ ID NO: 12780 - protein, 297 aa, BradyrhizobiumColbertium
MQALFIGQTYIDVVFITDHMPTGDEKHVASDYAVSFGGNAVTAAFCCAKLGIVPDLIATAANDWLGRMFQDMCAKYGISLHGRKVNQSSLSFIMPKDGKRAIVRCRDDEHIHPFPILNLGGCRALHVDGHQPDAAIHYAKVCREAGILTSLDGGGLRTNTHELLEFIDVAIVAERLCEQMDLTPEKMLDYLKGRGCKIGGVTMGEKGLLWYDETGTVQVMPAMPIPRERVIDTNGAGDVFHGAYVYSYLAHPGKSWREHFDFARAASTFKIQRLGNEAGLPTLVDIAKVRHEFEVRV

SEQ ID NO: 12781 - protein, 302 aa, BradyrhizobiumColbertium
MGRVFVAGSINMDVVVTADRHPKVGETVAGQQVLYFPGGKGANQAVAASRLGARTTLIGRLGKDSFGAELKAFLDEQGIDLGYVVETAEAHTGTAIITVAEADNTIVVIPGANGLVAADDVNVVPLLKGDVAVSQFEIPLPAIAAFFQRARGAGATTLLNPAPAQAMPRELLALVDILVLNETELGVLAGSELSESDAAARIIEVARKLQARKDQTICVTLGKRGVLALAGREEIAVPGRAVKALDTTGAGDCFVGALAAQLADDVPLRAALTFANAAASISVQRMGAGPSMPTAEEVAAVL

SEQ ID NO: 12782 - protein, 406 aa, BradyrhizobiumColbertium
MTGGPVIIVGAGHGGYQVAASLRQAGFSARICLINDESHLPYQRPPLSKAYIKGSAGPESLMFRPEKFYQDQNIELIAGRAVSIDRAGRRVHLASGDTLPYGHLVLATGARNRLLDLPNANLPDVKYLRILDDSEALRQIMPTKKRAVIIGAGFIGLEFASTARIKGLEVDVLELAPRVMARAVTAEVSEYFQERHREAGIRIHLGVQATAIEAEGGKVTGVSLSDGRHLPADLVLVGVGVLPNIELAAEAGLPVAAGIIVDEYLSTADPDISAIGDCALFASPRFGGSLRLESVQNATDHARCLAARLTGDRKPYDSHPWFWSDQGDDKLQIAGLTTGYDRVVLRGNPANKAFSAFCYKGDKLLGIESINRAGDHMFGRRLQAMDRSITPEQAADESFDLKSALA

SEQ ID NO: 12783 - protein, 264 aa, BradyrhizobiumColbertium
MPAPVSKPDDPALLRIDGPIATITLNRPAAYNAINLAIAQKLEQLAAYIEGDDSIRVVVLEGEGRAFSAGGDLQTIGAAAEAGTVTPVVGELLKHYHAFIEIVRRMPKLSLSSVHGSAAGAGMGLAFVTDLCIAADDAKFTPAYAKIGVSPDGGSTVGIVGTVGSRRALQIFLAEDNFTAQQAYEWGLVAKTVPAADLKAATRQFAERLAQNPPAAIAGTKQLVYQAATTPVKQQLDAEEHKIIMAMNTDPFRAAVKKFTSKGK

SEQ ID NO: 12784 - protein, 572 aa, BradyrhizobiumColbertium
MTSGLRKGLTSYGDAGFSLFLRKAFIKAMGYSDDALERPIVGITNTYSDYNPCHGNVPQIIEAAKRGVMLSGAMPFVFPTISIAESFAHPTSMYLRNLMAMDTEEMIRAQPMDAAIVIGGCDKTLPAQVMAAISADLPTVVIPVGPMVVGHHKGEVLGACTDCRRLWAKYRAGEMDDAEIEAVNGRLAPSVGTCMVMGTASTMACMIEAMGLSLPMSATIPAPHAERFRLAEASGKVAAAMAKAKGPKPSELLTPSSFKNAQVVLQAIGGSTNGLIHLTAMAHRSPHRIDLEVFDQIGREVPVLVDLKPSGEHYMEHFHHAGGVPKLLAQLGDLVDLDAKTITGQTLRDVAANAEDVPGQDAIRPRDNPIKKEGGLAVLHGNLAPRGAVIKQSAATPKLLQHTGRAVVFESVEDMTLRVDDPDLDVTADDVLVLRNAGPKGAPGMPEAGYLPIPKKLARNGTKDMVRISDARMSGTAFGTIVLHITPESAVGGPLALVENGDMIRLDVARRSIELLVDAVELERRRAALMPAAAPEEARRGYAWLFNETILQADEGCDFDFMQRAGPGAAKR

SEQ ID NO: 12785 - protein, 324 aa, BradyrhizobiumColbertium
MDVVLRKSSFRGAMSAATIVAGHLASCVSASADEGARGLANAPPSLAAGVDKLTGGLPSAHAEIDTEHIFGFSMGSDIGKPGEIEVEFENVGAFGKRSGTYAAWANLNQVKYTVSDNFRIAPGFALSGQHINGVPGLTDHRDLAFSGAALELRYKLVDRAVAPFGLTLHAQPGWSRIDDASGVHIAQYGAEFAALFDRELIKDRLFAAFNVWYGTGGTREISTNLWRHDSEMQLQTAISYAVQPELLLGLGIRYARAYDGGALNRFIGDAVFAGPTFSYTISKEVGISGTWQMQVAGGAVGDNRSLNLEQFERHQALLRLNLHF

SEQ ID NO: 12786 - protein, 310 aa, BradyrhizobiumColbertium
MDRLESMSVVLAVAEAGSLSAAARRQKMPLATVSRKVSELEEHLQTKLFHRSSRVLVPTDAGRSYIAAAKRILADLTEAERVAAGEYTTPRGDLSITTLVALGRLCLQPILAEFLAAFPEVDVQLILQDRTLNLLDEHIDVALRVGDLADSGLIAVRVGEIHRVACASPAYLKLRGMPKSPDDLCAHDCISYPPLQSPSTWRFKRGQTEYAVPVRSRFIASNLESAVDAARAGIGITVAFSYLASDALKSGALVALLQDFQPPPQPVSFVYSPSRFMPAKLRAFLDFAVPRLKTRLADMPGNVALRRPRT

SEQ ID NO: 12787 - protein, 270 aa, BradyrhizobiumColbertium
MTQPRKGTALITGASTGIGAIYADRLAKRGHDLILVARNRQRLASLARRLSNESGRKVETVEADLTSPAGLRRVEQLVGTNGDISVLVNNAGVGASAPLIESDIDKMEDMIRLNVSALTRLTYAAVPGFVARRHGTIINIASIVAIAPELLNGVYGGSKAFVLAFTQSLVHELAGKGIRVQAVLPGATATEFWDVAGTPVHQLPAEIVMSADDLVDAALAGLDLGEVVTIPALADKSEWDRHESARLAMTNRLSSAIPAPRYNLHTHVNA

SEQ ID NO: 12788 - protein, 176 aa, BradyrhizobiumColbertium
MSRIISHSSTSSIALRTISWREQSERLLAYAEPISRIGLYASLALIYAWFGGMKFTDYEAQGLVPLVENSPLLRWFYTLFSVRGFSTFLGFVELSIGLLIALRLSSPTYSAAGGLLSAGLFVTTLSFMVSTPGVVVPELGAPAITVAPGQFLLKDVGLLAASFWVFTDSLKAVIRR

SEQ ID NO: 12789 - protein, 148 aa, BradyrhizobiumColbertium
MKVPFIFGAAFAAIAIAGATPSAAHGIGETVTPHFEQSIPNIPGKSVVALVVNYAPGGASPSHVHAKSAFIFGYVLSGAIESQVNDGPRRVYRAGESFYEPPGSRHPVSRNASRSKPASLLAVFVVDSSEKDLTSTVRQNQHQGEKHE

SEQ ID NO: 12790 - protein, 150 aa, BradyrhizobiumColbertium
MSKRLDYNQIAPAGIKALGGVYGYLLQSRLSATLIELVYLRISQINNCAYCLDMHTRDLLKKGEKVEKIALLQAWREAGNLFDERERAALAWAETVTRVAETGVPDEAYQAARAAFEERELVDLTIAISLMNAYNRMAISFRATPAAAAG

SEQ ID NO: 12791 - protein, 130 aa, BradyrhizobiumColbertium
MVAAALIAATSLASLSARSEEPRLGDIKRTHLMKEALSAPGREVIQVRVDFPPGVAAVRHSHPGEELVYLIEGELEYQLDGRPPMILKAGDVLLIPHGVHHAVKNVGSGNAAELATYIVETGKPLLTLGR

SEQ ID NO: 12792 - protein, 274 aa, BradyrhizobiumColbertium
MPRILMTGASGGIGTRLRQLLPPIYPDLLLSDITPPADLGANERFKMADLADLAQCEAMCEGVDGILHFGGYSVEGTWDQIHQANIVGCYNLFEAAYRKGVKRVVFASSNHAVGFYPRHHKIGTDVTARPDSRYGVSKVFGEAVGALYADKHGLKVTCLRIGNFGDMPLDQRRLSIWLKPDDLVQLCRIGLEHPDIHFEVFYGASFNERAWWDNHRAYEFGYRPTGRAEDFCEHAMAEQAKLKPDPVGDYFQGGTFCSMEFDADPSRVIDWNKR

SEQ ID NO: 12793 - protein, 322 aa, BradyrhizobiumColbertium
MKDASSHHEGWRPATHYPDPAIEALDPRFEKYWLKLSAVERLTTGLRWAEGPVWFGDGRYLLCSDIPNQRILKWEEETGAVSVFRKPSNFANGNTRDRQGRLITCEHGGRRVVRTEYDGSITVLMDSFDGKRLNSPNDVVVKSDGSIWFTDPTFGLLGNYEGYKAESEIDANVYRLDPVSGKATIVAEGVLGPNGLCFSPDEKILYVVESRGVPNRKILAYDVSADGTAISNKRVHIDAGPGTPDGMRCDIDGNLWCGWGMGDPELDGVVVFAPDGVMIGRIALPERCANVCFGGLKRNRLFMAASQSIYALYVNTQGALGG

SEQ ID NO: 12794 - protein, 476 aa, BradyrhizobiumColbertium
MVNRMQFYIDGAWVDPVVKKSTAVINPATEEAMYEVALGSKADVDKAVAAAKRAFATFSQTSREDRVALLSKIIEIYKGRLKEIGAAVSDEMGAPLPMAEKLQAGAGLGHLMTTLDVLKNYHFEEPVGTAMVLREPIGVVGMITPWNWPLNQIACKVAPALAAGCTMILKPSEFTPTSALIFAEILHEAGVPKGVFNLVNGLGPEVGAAMSEHPDIDMISFTGSTRAGIDVAKRAAPTVKRVSQELGGKSPNVILEGADLQKAVTGGVMHMFNNSGQSCNAPSRMIVPASKMKEVAAIAKAVADKTKAGDPRAEGTTIGPVVNRGQWDKIQGLIKKGIDEGATLVAGGPGLPEGVNKGFYVRPTIFADVTPDMTIAREEIFGPVLTIIGAKDEADAVKIANDTPYGLAGYVYGPSVEDAKRVGRQIRAGNVNLQGQPNDRTAPFGGYKQSGNGREWGKFGLEDFLEVKAVAGFNAA

SEQ ID NO: 12795 - protein, 787 aa, BradyrhizobiumColbertium
MPVDPARLEILTALSRKALWLSSWTIHHANHIRANADGLKVGGHQASSASLATIMSALYFHVLRPEDRVAVKPHASPVFHAIQYLFGRQSREKLENFRGFKGAQSYPSRTKDVDDVDFSTGSVGLGVAQTLFSSLVQDYVKAHGWMKDRREGRMIALVGDAEMDEGNIFEALAEGWKHGLRNTWWVVDYNRQSLDAVVREGLWEKFENMFRNFGWDVVIVKYGRLMREAFAEPGGEALKRWIDNCPNALYAALCFQGGAAFRKHLHDEIGDQGPITKLIDKRSDEELLALMSNLGGHDMASMLEAFDSIDHDRPVCFIAYTIKGVGLPFQGHKDNHAGLMTVAQMEKYRESQNIRPGHEWDKFEGLAQEAAELEAFLARVPFNQDGRRLSAPVVEVPQQLAFKPSAQMSTQQGFGLVLNEIARSDSELARRIVTTSPDVTVSTNLGPWVNRRGLFARAEKADLFRSEKIPSTYNWDASPKGQHLELGIAEMNLFIMLSALGLSHQINGERLLPVGTLYDPFIERGLDALNYSCYQDARFMVAATPSGVTLAPEGGAHQSIATPLIGMAQDGLASFEPAFVDELAAIMAFGFEHMQRDPGEGGSVYLRLSTRSIEQPQRIMTPELRQGITDGAYWLRKPGPNAEVVIAYTGAVAPEAIEATGFIGESRRDAGLLAITSADRLHAGWTAARKLRRDRRGVQHLSHIERLLAPLPRDCGIVSVIDGHPAALGWLGSVRGHRVEALGVEQFGQTGSIADLYRHYGIDANAIIDAAESLTTGAPVLHRKMAV

SEQ ID NO: 12796 - protein, 153 aa, BradyrhizobiumColbertium
MHELDAIDRKILSYLQNDSRMTMQELAEKVGLSVSPCHRRVKLLEERGVISRYVATVDQKALGLHVSVFISIKLARQKEEDLNRFARAISKWDEVLECYLMTGNRDYLLRVVAADLASYETFLKTKLTRLDGIASIESSFALSQVKYSIALPV

SEQ ID NO: 12797 - protein, 57 aa, BradyrhizobiumColbertium
MIRALLERYPVDIDASFMIGDKQSDLASAQAAGIAGYLFNGTNLHTFIVPLLSGPVS

SEQ ID NO: 12798 - protein, 75 aa, BradyrhizobiumColbertium
MVDMSTSNQWAELAATYLRTREAHGQHEAAKADLKALMPEDAKEATGHGIKAKRSKSGAISFEAQATQGPHASVQ

SEQ ID NO: 12799 - protein, 140 aa, BradyrhizobiumColbertium
MDQIVAAYLKQIGRERPVKPLERLAANTYGASVADAMIAKMLTPENLTAVLSKGAISVGGVDANMQRLTDIDTAKVFDILKRVRPTKPVELQILVGEAENEGSVSLHFEGNGWKLSGIQLPNAAVQVLAQNLVRNPGRNG

SEQ ID NO: 12800 - protein, 45 aa, BradyrhizobiumColbertium
MQSSSKAIIDATKKRAEKLLSKGKDVDFKERFGWSPTAAQRTFGT

SEQ ID NO: 12801 - protein, 74 aa, BradyrhizobiumColbertium
MIKAAGARLWYLPPYSPDLNPIEQAFSKIKHWMRQAQKRTIEDTWRHIGHLVQDIQPRECANYFATAGYASIKM

SEQ ID NO: 12802 - protein, 63 aa, BradyrhizobiumColbertium
MAKKAKKQSARGRKQDRARVAGGQDYEVQYEAKKTRKSASAVKKAVKKVGSSRKKVERRLRSK

SEQ ID NO: 12803 - protein, 246 aa, BradyrhizobiumColbertium
MCNLYSITTNQAAISALFRVVNQYVGNLAPMPRVFPDYKAPIVRTGAEGRELATARWGMPSSSKALMDATKKRAEKQQAKGKTVDFKELLRMEPDSGTTNIRNVKSKHWARWLGVENRCVVPFNSFSEFNKAEGGDIWFALDESRPLLCFAGLWTSWTSVRKVKEGETTNDLFAFLTTEANAEVGAIHPKAMPVILTTPEEVETWMNAPAEEALKLQRPLPDGTLQIIARGVKEDPATEMDHPLTG

SEQ ID NO: 12804 - protein, 254 aa, BradyrhizobiumColbertium
MLKRDVSEADTVTVINDMLSDICGYDKYLHVTSQYAIRGTYVDLAVKFDDEIRFIIEVKAIGIDLKDAHVKQAIDYAANEGIEWVVLTNGAHWRIYKVHFGQPIEKILVCELDAIGASAKSPEALECFGNLSREGFSKGTMAEFLLHKQVTNKFTVAAVLQTDFILEVLRREIRRMSSGVKVEVDYLKTLLREEVIKRDLVDSDEAKAALLNIKRLQRAATRKKAAPKAADEEAPIVAPVEDASASLPRAVATP

SEQ ID NO: 12805 - protein, 487 aa, BradyrhizobiumColbertium
MTIISLKKDWTLGERLGAGGFGQVFAAESPDGSKAAIKLVPKAPGASRELLFVDLKDARGIVPILDSGEQDEHWVLVMPRASKSLRDHLTSSRAIGTTDATSILIDIASALAELDGRVVHRDLKPENVLYLDGRWCLSDFGISRYAEATTAPDTQKHSLSPPYAAPERWRAERATSAADVYALGVMAFEMLCGNKPFPGPHIEDYREQHLHNEPPPIDAGTSVLKAIITEALFKAPGARPSPSNLLTRLTRSQQQRSAGLGKLSEAHLGEVAKQSEAARQASAARSAAEQRADLFRGASALINGLYAELSDAILEAAPSARNGKDGKRKGQTISLGTAQLELVPVFNTPLNPWEWRDAPAFDVVAQAGVILRVPRDRYDFEGRSHSLWYCDAFEAGRFEWIETAFMVSPLMGRNTTMRPFMADPGIEAAKALWAGMAEFQLAWPMEPVESEAFIERWAGWLADAAQGRLHAPSTMPEKPISQNWRRK

SEQ ID NO: 12806 - protein, 41 aa, BradyrhizobiumColbertium
MQLAFVCYRVCSDIIKCRTKNGCGVLYLKRRQSEVLKAGLE

SEQ ID NO: 12807 - protein, 52 aa, BradyrhizobiumColbertium
MEVRRNSSKGWITFHSPNVWPARKDRHKEIASKAQIDRDLTNLALIEQRIDE

SEQ ID NO: 12808 - protein, 424 aa, BradyrhizobiumColbertium
MTTHPNDPSLRSFIDVDPASDFPIQNLPYGVFSTAANPTPRAGVAIGDCVLDLWTLEQESRLDVGPLGVFSEASLNRFMALGPKVWSKARARISELLRHDNPELRDNEELRKQALVPMRDAKLHMPFAVSGYTDFYSSKEHATNVGVMFRGKDNALQPNWLHMPIAYNGRASTVVVSGTKVKRPRGQLKPPNVELPSFAPCKRLDFELEMGVVIGQSSPMGGMLSEQQAEEMIFGFVLLNDWSARDIQQWEYVPLGPFLAKAFATSISPWVVTREALEPFRLKGPEQEPVPLDYLKQTKPQNYDVELDVSLRAAGANAPASISRTNFKYMYWSSVQQLMHHASSGCAMNVGDLLGSGTISGPEKNQRGSLLEISWNGTEPVELPGGVKRSFLEDGDSLVMRGWCQGEGYRVGFGEVEGTILSAE

SEQ ID NO: 12809 - protein, 123 aa, BradyrhizobiumColbertium
MAFARRGRSAMIQLDVRRFDMALQLRPNCEYCDRDLPPNATDARICSYECTFCADCVETKLFNVCPNCGGGFAPRPIRPTQEWRPGVCTTKQAPSDKRVHLKYSVEDIAAHCARVKDVPPERR

SEQ ID NO: 12810 - protein, 159 aa, BradyrhizobiumColbertium
MISVDVFDLKILGALQDDGRLTNQELAEVAGLSASQCSRRRMRLEEAKVIAGYHADLSSEALGFGVIAFIQVGLATHSPDNSKRFRALVNRIDEIQEAYSLTGDADYVLKAVLRDLKGLSNLVNDVLMPHQSVAHVRSSIVLDRLKESSKLPLREIGAG

SEQ ID NO: 12811 - protein, 372 aa, BradyrhizobiumColbertium
MGPFPHDAPPAAISADNPMGTDGFEFVEYAHPNPEELHALFKLMGYAPVARHRTKKITVYRQGDINYLVNEEPGTHGHDFVAAHGPCAPSMAFRVVDARAAYDRAISLGAEPADLSSAQKTLDVPAIRGIGGSLLYLIDHYGAKGSAYDAEFEWLGARDPRPAGAGLFYLDHLTHNVHRGRMDVWAGFYEKLFNFRQIRFFDIEGRASGLFSRALTSPDGKIRIPINEDAGDAGQIEEYLKTYRGEGIQHIACGCRDIYRTIEGLREAGLPFMPSPPDTYFERIDARLPQHGEDIARLKKNGILIDGEGVVDGGQTKVLLQIFSANAIGPIFFEFIQRKGDDGFGEGNFKALFESIEEDQIRRGVLKVGTAA

SEQ ID NO: 12812 - protein, 370 aa, BradyrhizobiumColbertium
MLDKSAPTSSVRTSGPLSGFRIVEFAGIGPGPFACMMLADMGADVVTLDRIGAKKSTKSVAGRGRKVIELDLKDKAAIAQVLDLLASADALVEGFRPGVMERLGLGPDVVLARNPKLVYGRMTGWGQEGPLANAAGHDINYISITGALAAIGPKEAPVPPLNLVGDFGGGALYLVVGVLAALLEAEKSGNGQVVDAAMCDGAASLMSFFFDMTAMGRWTEGRNQNFLDGGAHFYGVYECACGHFVSIGSIEPQFYALLREHAGLTDADFDAQMDPKAWPALKEKLKAVFKSKTREDWCKIMEGTDICFAPVLTMSEATRHPHMVARNVFVERHGVKQPAPAPRFSRTPSAVREPEAAEIGAVTAAWKAAK

SEQ ID NO: 12813 - protein, 266 aa, BradyrhizobiumColbertium
MYQTTYHRASSVDEAASLFAKGSDAKFLAGGQTLLPVMKQRLASPSDVIDLGRIKELQGVELSGDVLTIKAATTYYDIMQNPDVKKAIPAISYLTSVLGDPAVRYRGTIGGSIANNDPAADFPAALVALGATVKTNKRSISADDFFKGLFTTALEDGEIITAVSFPVPAKAGYEKMRHPASRFALTGVFVAQTKSGEVRVAATGASQNGVMRVPAIEAALKANWSPSAIDSVTISANGLLADIHGTAEYRANLVKVMAQRAVAAAR

SEQ ID NO: 12814 - protein, 780 aa, BradyrhizobiumColbertium
MGVEGIGARVVRKEDKRFITGKGRYVDDIKLTGMTHAYFVRSPHAHAKVKKIDSSAALKMPGVVAVLTGQQLVDDKVGNLICGWAITSKDGSPMKMGAWPAMAPETVRFVGQAVAVVIAESKNLARDAAEAVVVDYEELPAVADMRAAIKPGAPQLHPEAPGNQVYDWVIGDESATDAAFAKAANVVKLDVTNNRLAPNAMEPRAAIADYDPAEEHFTLYTTSQNPHVARLVLSAFYNIAPEHKLRVIAPDVGGGFGSKIFIYPEEMVALWASKKVERPVKWTGDRSEAFLTDAHGRDHITHAEMAFDANNKITGLKVKTYANFGAYMSLFSSSVPTYLYATLLSGQYNIPAIHAEVIGVYTNTTPVDAYRGAGRPEASYLIERLMETAARQLNVDPAQLRRTNFITQFPHQTPVIMAYDTGDFNASLDAAMKAIDYAGFPARKAKAKADGKLRGIGLSCYIEACGIAPSKAVGSLGAGVGLWESAEVRVNPVGTIEILTGSHSHGQGHETTFCQLVAERLGIPISQVSIVHGDTDKVQFGMGTYGSRSAAVGLTAILKAMEKMESKAKKIAAHALEASEADIVIENGEFKVTGTDKAIALPMVALAAYTAHNLPEGMEPGLKESAFYDPTNFTFPAGAYICELEVDPGTGKTSFINFVAADDFGRLINPMIVEGQVHGGLAQGIGQALLEHAIYDANGQPVTASFMDYAMPRADDLPSFNLSHTTTLCPGNPLGIKGCGEAGAIGASAAVINAITDAIGKNNLEMPATPDRVWRTIHAA

SEQ ID NO: 12815 - protein, 161 aa, BradyrhizobiumColbertium
MSTVKLTVNGKAVAVDVEDRTLLVQLLRDHLNLTGTHVGCDTSQCGACVVHMDGKAVKSCTMLAGQADGASITTIEGIAKGDELHPMQAAFRDNHGLQCGYCTPGMIMSAIDIVHRHGGQLDEATVRQELEGNICRCTGYHNIVKAVLDAAGRMKVSQAAE

SEQ ID NO: 12816 - protein, 679 aa, BradyrhizobiumColbertium
MSGRIASPSKRTLFPTLRFRAKIILGFAAVLAISAGSMAFSYFGFERVAFGVGSYRSSVSEADLARNIDRELLAYRSAAKYFVVTGKEDDAKAALDAEGSLKNAIDEAVKGVKNPARQESLAKLAKEFSNFSSTFGRILQAKRDSALLVQNQLGRNANLLKYKLDDIGNNASDSEAQAIEFGTKQVNAQFQTASAAATNFVLTSDQTIATSALARLKFVENSLGAIYSMDDKVVAGLKDAKALLGAYREALEKLIANAKLVDDLVTAMNGSAGAILQGATTMKSDLVAEQRRLDSESEATIGQTEQLVLMLAVGGTLVGVVLAFLLGTGISRPMIAMCKAMRELAAGNFDVVLPGLGRKDEIGEMAGAVEEFKVQAVAKAERDAAASEAQNREQAASRRAELIRFADDFESAVGAIVSNVSASAVQLESAASTLTRTAETTQSLSSQVAGVSEQASSNMQSVATATEELSASVEEIGRQVRDSSRIAEAAVVQAKETDGRIGKLSHAAQQIGEVVKLITAIAEQTNLLALNATIEAARAGEAGRGFAVVASEVKSLASQTAKATDEISSHIAGMQGATAESVAAIKEIGATIGQISSISTSIASAVEQQGAATQEIARSVQTVAQGTQTAATDIGEVNRGAAETGSASEEVLNSAKPLSSESTRLRAELDRFMATIRAA

SEQ ID NO: 12817 - protein, 526 aa, BradyrhizobiumColbertium
MAGRMPHSHDRIDPVHVTWDGAASIDQTQQPMELQQSPALNYAPVVPAATAADRIVETSIPSRLDALPWSGFHTRVVLALGITWILDGLEVTLAGALSGALKQSNSLHFSNLDLGIANSAYLAGAVLGALGFGWLTDRIGRKKLFFITLALYLSATAATALSWDVASYALFRFLTGAGIGGEYTAINSTIQELVPARYRGWTDLVINGSFWIGAAMGAVAAIVLLDPAVIDPDLGWRLAYLIGAALGLVVLLMRMWIPESPRWLMIHGRPDEAHAIVGDIERSVIGHNQDTSGGRFTKIRLRMRDHTPIAEVLHTLFSLYRQRALVGLVLMSAQAFFYNAIFFTFALVLTDFYGIRSDHVGWYLLPFAAGNFLGPLLLGRLFDTLGRRTMIMFTYGASGLLLALSGYLFSIGVLSAQGQTIAWMVIFFFASPAASAAYLTVSETFPLEVRALAIAVFYAVGTGIGGVIGPALFGALIDTGSRNSVFAGYLLGAALMIVAAIVAGRYAVAAERKSLEQIARPLAFME

SEQ ID NO: 12818 - protein, 272 aa, BradyrhizobiumColbertium
MKSELADMAMDQKRTIPDGDAPDAVPVPHALVPHLDELAILLDIDGTLLDLMPTPREVWVPPGLSETLKHLTERTSGALALVSGRSLNDIDLIFAPDVFRAVAGHGAEMRLSADNEAEAVHAPPLDKELKRRLAALAKLSPGILLEDKGYSLALHYRLAPHAEKAIYEAVSLVRAELPNAPIEVLPGKFVCEIKHSGFTKATGVCELMKHEPFKGRRPIFIGDDVTDETVFAIMPDMDGLAFSVGRRAMGVNGHFDAPADVRAFLARLLDPR

SEQ ID NO: 12819 - protein, 487 aa, BradyrhizobiumColbertium
MNLVVVSNRVARGKPNEPMTGGLAAALLPVVEHSGAIWVGSSGRVRDGHQKEPFAEIEALGTGAIATLDLPAAHYGGYYEGFANSALWPALHSRSDLIRVSRDDYVSYREVNAFMARALMRFRKPQTAFWVQDYHFLALGAELRDLGVDDPIGFFLHTPWPVTTVMQGVPNHRELVTAMLAYDLLGFQTEEDRQNFLGYVGGELGLAIEDGVAISQQGRTRCEVFPIGIDAEKFAAYAAKSVSHPDVSRLRRSLNGERLAIGVDRLDYSKGLLNRISAFDRLWTEHPQFARGISLLQIANPSRGGIEAYGNLQNEVARLVSDVNGRHGEVDWTPIRYLNKGFSQAVLAGLYRTAQIGVVTPLHDGMNLVAKEYVAAQNPADPGVLVLSKFAGAANELDAALLVNPHDIDGMARAIAVAASMPLTERKMRWDAMMKKLRCHTIQQWSADFVAKLEKCRTEKAAVAPLAAQPPQALRWLKSAISGVRLI

SEQ ID NO: 12820 - protein, 113 aa, BradyrhizobiumColbertium
MPVSKTMAALGLILTLGSVLAVPAAAQVCSRQGADVSCDDGRRGMLSGDAILWPDGTRSSSTPHQSVIIGNKSSVHVGPGVFVGQGKGVVPLDNPNAPNKRQCAILDGVSYCY

SEQ ID NO: 12821 - protein, 372 aa, BradyrhizobiumColbertium
MVIRAMVRPILALAAALATALAPVICLGESSKPLPAKATRELPAELLALLEQKKMPKYSPIVVRIFKEEAELEVWKQDATGRFQILKTYPICRWSGDLGPKLYEGDRQAPEGFYTITPELMNPNSNFYLSINLGYPNAFDKAHKRNGSFLMIHGDCWSSGCYAMTDEQISEIYSLARDSFLGGRPSFQVQAYPFRLTPANLARHRNSPNLTFWKMLKVGNDHFETTRLEPKVDVCDRRYVFDAQPPPSSRHPLAFSANEKCPPFVVNPEIARAAWQKQHADERAYAQLVEDNVPAAPIYSGLDGGMNKAFHARFPGRVTLAKVMPYASYLPQLPPIPWTDRDGSLTSKWFGSSFAGSVVCDAAAGGSPSGRC

SEQ ID NO: 12822 - protein, 74 aa, BradyrhizobiumColbertium
MNRELREFRRLERVCLEQAALSTMDLTRSGLLKVADDCRIAAETIEAQLPRGPFAEAVQALKLALGAKTRSWRH

SEQ ID NO: 12823 - protein, 318 aa, BradyrhizobiumColbertium
MSSTRMIKANGIELFIREAGQGPLVVLCHGWPELSYSWRHQIPALAAAGFHVVAPDMRGYGQSAAPPDAAAYSIFDTVGDIVGLVQALGEREAMVVGHDWGAPVAWHAALFRPDIFTAVAGLSVPPPFRGRGKPLDLLRQGGITNFYWQYFQTPGVAEAELERDVASTMRIVLGGRGLADPSAAMFVQEGKGFLGHAGAEEPLPGWLSEADLAYFTESFRKSGFRGGLNWYRNIDRNWELTAPWQDAQIYQPSLFIAGSKDAVITGLIGAKRVNELERVLPNLRRKLIIEGAGHWVQQERPDEVNTALVQFLKASAAQ

SEQ ID NO: 12824 - protein, 414 aa, BradyrhizobiumColbertium
MLRCNRFTAGTLARGLIAAALIAGMAWGGAVLAANQSVQGAKKADDVGFDGDAPTAILIEASSGSVLFEKNADELRAPSSMMKLMTAEVVFNAIKKGDIKLTDEYRISENAWRRGGAPSGGSTMFAAINSKVSVNDLLHGAIIQSGNDACIALAEAMAGNERIFAADFMTKRARELGLTRSTFANSNGLPDPGNKMTVRELAMLARHIILDFPEFYKLFGEKEFTWNKIRQQNRNPLLNSMEGADGLKTGYTKEGGYGMVGSAVQNGTRLIVVVNGLDDSDDRASEAKKMLEWGFRNFETRTLFAAEQPVGYAKVFGGESRSVKLVAKTPVKVMVHKNGSDKLIARIVYSGPVRAPIEPGQRVGVVKVWRSGNVAVETPVYAAEAIGTGSTMRRAIDGASELVIGMFRAGAEKL

SEQ ID NO: 12825 - protein, 228 aa, BradyrhizobiumColbertium
MAEGSLQRPSGRGRFITFEGGEGTGKSTQIKKLADRLKAAKLRIRVTREPGGSPGAEIMRHLVLSGMGKLLGPEAETLLFAAARDDHVRTVIQPALSQGVWVLCDRFADSTRAYQGSLGRVPDGLINAMQRVTIGDLKPDLTIVLDLPVEIGLQRAAARRGSGTPDRFEAEKLSFHQGLREAYRKIAAEDPARCVLIDANSDPDTVAARVWTALRERLLPTPASVVSA

SEQ ID NO: 12826 - protein, 348 aa, BradyrhizobiumColbertium
MSPRQAERETAVTHPRETSLLFGHREAEAALLSAYRSGRIPHAWLIGGPQGIGKATLAYRMARFVLAHSQPLAPAVQRAEDLAIDPDDAVARQVAAGSHGGLLTLERTANDRGVMRTVITVDETRETIAFFGSTAAAEGWRVCIVDTVDELNPNAANALLKILEEPPQRSLFLLVSHAPARVLATIQSRCRKLRLRPLATDDVIGAASSVANIDPSDAALREAAEASEGSVARALALLGGDALKLQQRTAALLARLPQVDPRELHTLGDSLGTSDRVALAAFVDGIDRWIAERLHADDVNANQNLPRLARLAEVWEKIVRAARDTETYNLERKPLVFSVFGWLADATR

SEQ ID NO: 12827 - protein, 685 aa, BradyrhizobiumColbertium
MRSGFPRGSCANQQSNSGSFPDFEKPVKEFVVATRARKTVKSKSGKKAAKKAVKKATKKAVRGRTRKTAKSAKKAAKSKTAHAKKSAARTARKAGKKAARKQLAAKKTVKRAAKRAAGAPAKKVARTVRGTAPAVIVKPASAVTPPKAAKPKISTPKVPRAPKPAAPVATPSRDNVFYVTTAIAYPNGSPHIGHAYEAIATDVLARFARLDGKDVFFLTGTDEHGQKMVQTAAGEGMSAAALATRNAGRFREMDERLNVSFDRFIRTTEEQHHRSSQEIWRRMEANGDIYADTYAGWYSVRDEAYYAEDETRLNDDGVRLGPQGTPVEWVEEKSYFFRLSAYEDKLLKLYADHPDFIGPDSRKNEVVSFVKSGLRDLSISRTTFDWGVKVPGDEEHVMYVWVDALTNYITGVGFPDEQDANWRYWPADVHIIGKDIIRFHAVYWPAFLMSAGIPLPKRVYAHGFLFNRGEKMSKSVGNVVDPFNLAEQYGVDQLRYFFLREVPFGQDGNYNHEAIVARINADLANDLGNLAQRSLSMIAKQLGGVLPEPGEFSDNDKAILAMADGMVATSREAMATQQIHQWLNAVWAVVAEANRYFAGEAPWALAKTDPVRQRTVLYVTAEVVRQIAILAQPAMPTASGLLLDSLGIPADERNFAMLGGAKRIAPGSILPAPTPAFPRYVEPAA

SEQ ID NO: 12828 - protein, 258 aa, BradyrhizobiumColbertium
MLVDSHCHLDFPDFAEDLDGIVSRARAAGIVRMVTISTRVRRLKDLLAIADRYDDVYCSVGTHPHNADEEDGIAPDELVALTEHPKVVALGEAGLDYFYDNGSPEAQARGFRTHIAAARATGLPLVIHTREADEDCARILEEESAKGSFRAVLHCYTGGRELALKAVSLGLYVGFTGILTFKKSEALRTLAAELPSDRILVETDSPYLAPGKFRGKRNEPAYVVEVAKVLAETRGVSLDEISRQTTENFFRLFSKVKA

SEQ ID NO: 12829 - protein, 265 aa, BradyrhizobiumColbertium
MTLTLTILGCGSSAGVPRPALGWGACDPNNPKNRRRRCSLLVERISEHGTTRILIDTSPDLREQLLSTNVDHIDAVFLTHEHADQTHGMDDLRSVVMHMRRRIPTYFNQSTAKDILSRFSYCFISPEGSDYPPILTRHSIEAGESQTILGKGGAVTMTAFLVQHGNIPALGYRIGDAAYTPDLNDIPRESWGALENLDLWIVDGLRYTSHVSHFSINDALSWIERFKPKRAVITNMTADVDYEVIRQSLPAGVVPAYDGLRLETH

SEQ ID NO: 12830 - protein, 182 aa, BradyrhizobiumColbertium
MRRALDLLYLGAGYAAGVFLVAIFAIMMAMSVGRQFAINIPAGDDFASWCMAAMAFLGLAHTFKRGEMIRVGLLLERLHGRTKQIAEILALGIATAFILYFTRYAVQMTYDSWRFNDVAQGVVALPLWIPQLGFAGGLAILSIALIDELVNVAGGNRPSYEKGSPDETPDEFIERISQGGGG

SEQ ID NO: 12831 - protein, 437 aa, BradyrhizobiumColbertium
MANLGMIELAFVLLGVMILLLGSGVWIAVSLGLVGFVAMALTTSLPLGAVLATTTWSASSSWTLAALPLFIWMGEILFRTKLSEEMFRGLSPWVQWLPGRLTHVNVIGCGIFAAVSGSSAATCATIGKIALPELDKRGYDKSLSLGSLAGAGTLGLLIPPSIPMVVYAVTANVSVLQVFLGGFLPGVLVMVLYSGYIIIWSLLNPNKVPPRDPPMPFRQKLRESAKLAPCLLLILAVFLSLVLGFATATECAAWGVTGALLLAWWSGTLTRKNFLESIMSATRLTCMIMLILAGAAYTTAAMAYTGIPAALATWVQGQQLTPSMLALYLSIMYIILGCLIDGISMIVLTAVIVLPMVRQAGLDLVWFGVYLIIHVEMAQITPPVGFNLFVLQNMSGRDTFTVARATFPFFVLLLAAVFIITEYPQIVMFLPKLAFPD

SEQ ID NO: 12832 - protein, 325 aa, BradyrhizobiumColbertium
MMSRLVRASLIAGAMLAATPALAQTKWNLPAAYPADNPHSENLVAFAKDVEAATSGKLQITVHPGASLFKAPDIKRAVVTGQAQMGEVLLSIHENEDPLFGVDVVPFLATSFPDAMKLYQASKPAIAKKLDAQGLKLLFVVPWAPQGVYVNKPLAAIEDMKGLKWRAYNVGTARIGELVGAQSVTIQAAELPQALATGVVNSFMSSGGTGYDVKAWESLKYFYDVQAWIPKDYTFVNKAAFEALDKATQEAILKAAATAETRGWKAWQDKSTWYLDQLKAKGMTVEPPSPALKSGFQKIGEQLTADWLKKAGADGQAIVDAYKKM

SEQ ID NO: 12833 - protein, 549 aa, BradyrhizobiumColbertium
MSERQNPYNVGLDKTPANYVPLSPLSFLARSAAVYPDHVSTVYEGRSFTWAQTADRCKRFASWLSSKGIGVGDTVAAMLPNIPAMNEAHFAVPMTGAVLNALNIRLDAPSIAFQLDHGGAKIILVDPEFSGVISDALAQMSGPKPLVVDVDDAAFKGGKRIGEIEYEAAVVQGDPNFTAIPPRDEWDAIALGYTSGTTGNPKGVVTHHRGAYLNAVSNILAGNLGQHPVYLWTLPMFHCNGWCFPWTIAAAAGVNVCLRKVEPTKIFELIKQHGVTHMCGAPIVYNTLINAPDAPKGNAVRRLVGLIAGAAPPVAVLEGAESIGIKLTHVYGLTEVYGPASVCAEQPGWDELAPAERARMKRRQGVPYPLQESVTVINPQTMQEVPRDGETIGEVMFRGNIVMKGYLKNEKATKEAFEGGWFHTGDLGVLDEHGYVIIKDRSKDIIISGGENISSVEVEDILYKHPAVLFAAVVAKPDPKWGEVPCAFVELKDGAHATEADIIAFCRSHMSGFKTPKAVVFGPIPKTSTGKIQKFLLRNEVGSAQAISS

SEQ ID NO: 12834 - protein, 629 aa, BradyrhizobiumColbertium
MAHVGIEMTELAGEAAAQSPRRPSLLASAERMLGLVVEIPAAILVVAEIVILFAGVVARYGFHRPLIWSDELASILFLWLAMLGAAVAFRRSEHMRMTAIVASARPAMRAYLDLVATSAALAFLLLIVWPACDYAYEESYITTPALQISNMWRAAALPVGIGLMAAFALLRLLRSADYRMVAAALVTVAAVIGLFWLSEPLLRPLGNLNLVIFFVGVAGFCVFAGVPIAFGFGLAIFGYLALTTRTPVMVLVGRMDEGMSHLILLSVPLFVFLGVLIEMTGMARAMVAFLASLLGHVRGGLHYVLVGAMYLVSGISGAKAADMAAVAPVLFPEMKERGAKPGDLVALLAATGAQTETIPPSLVLITIGSVTGVSIAALFTGGLLPGVVLAITLCMLVWWRYRHEDMSHVRRATASEIGRTFIVALPALALPFVIRYAVVEGIATATEVSTIGIVYGALVGLLVYRRFDWRRIFPMLVETASLSGAILLIIGTATGMAWGLTQSGFSRSLASAMTGLPGGAATFIAVSILAFTILGSVLEGIPAIVLFGPLLFPIARAVGVHEVHYAMIIILAMGIGLFAPPFGVGYYAACAIGRVDPAEGIRPIWGYLLALLVGLIIVAIFPWISIGFL

SEQ ID NO: 12835 - protein, 339 aa, BradyrhizobiumColbertium
MSFSRRTLLKASAATAVLGGIGAPHVARAQSAEFTYKYANNLPDTHPLNVRAREMAAAIKSETNGKFDLQIFPNNQLGSDTDMLSQIRSGGVEFFTLSGLILSTLVPAASINGIGFAFPDYDTVWKAMDGDLGAHVRGEIKKAGLEVMDKIWDNGFRQTTSSTKPITGPDDLKGFKIRVPVSPLWTSMFKAFDAAPASINFSEVYSALQTKIVEGQENPLAIISTAKLYEVQKYCSLTNHMWDGFWFLANRRAWEKLPQDVRTVVAKNINAAAVKEREDTAKLNASLQQELAGKGLTFNQPAVAPFRDKLRTAGFYAEWKGKYGEQAWGLLEKAVGKLS

SEQ ID NO: 12836 - protein, 48 aa, BradyrhizobiumColbertium
MENRAVVVPQLPSTCPLSLDDLLDPEFDPGAATQLLSAAIQSVAKHGI

SEQ ID NO: 12837 - protein, 294 aa, BradyrhizobiumColbertium
MGVGEDFQKFKDNYQITTELITSISYRYKRITRQLNTDFWNTNSETAHSLYVGSYGRDTAARGLSDLDIGFILPNAVYHQYNAHQGNGQSALLQSVKRSIQKTYRTSESFGDGQVVVISFDDNLTFEVLPAFENQNSDSWTYPNANNGGSWKVCNPRAEIAAIDTRNALTNKNLKYLGRMMRVWARHCAVPISGILIDTLAYQFIETYPHRDKSFLYHDFMARDFFDYLAKQNQNQTVWRAPGSGSHVHRKGVFEFKARSAYLRATEAIQYNDDNHQWSRRQKWKDVFGSLYPG

SEQ ID NO: 12838 - protein, 169 aa, BradyrhizobiumColbertium
MAEGYAARLTHIKLGQIVLSALTTGGAVGVIFDRNSVFYPYATALLAISLLILNSYVKDIDPGEAAQKHREAASDIWNIREAYLSLLADIRDASISLAELRRRRDELQAQLHKIYRIAPHTDARAYGKAQDALKNKEDLTFTDAEIDAFLPAPLKRGANTDLIKSETNS

SEQ ID NO: 12839 - protein, 168 aa, BradyrhizobiumColbertium
MRGLALNDFIDHASDLFVEINNLHPFREGNGRAQRLFLSALAENAGHELAFDVVTKERMIDISVAGIDGDVSGAKRLFQEISDPRRVKALRKALSFLQKSHSVPWNDLYVATTTAGRAYAGVLVGIAGNDYMMRVSGNPQEWIAIGDADDLPENSSGGDTIVLTAKRF

SEQ ID NO: 12840 - protein, 193 aa, BradyrhizobiumColbertium
MVATALKTHVVAPEERSSAKGLLDLLAEAGGGGIGQVKLVFEPILGRKSTVVVPDGLVDVIKDLAGLIEGSRQISLFADDPEVTPEQASDLLGISRPTVVQRIKQGDLNARMVGAHHRIRMSDLIAFRQNEAEKAKTEFEARSKAARFAVANTVIEGGHVLPETEELMNEWVRGEIDDDELIEQGLKRFGPGA

SEQ ID NO: 12841 - protein, 544 aa, BradyrhizobiumColbertium
MRLRNLEKYKTGGSGNNLTLGIPLPKTPDGRVYRYSPNEDAHPRLFLLGDRVSDFTLPETLTSRMTHAPGTPGTVCPYSGVLDDDENFTHPDDLAAAKEIVAHAFHADAAAAIHGMFDDLARKNAGNKFFKITTGARPSPKPAPRFARNDLLRELVCDECGRDYGVYAISLFCPDCGAPNIHLHFAREIALVREQVELAGQVGSERHELAYRMMGNAHEDVLTAFEATLKTVYLYKATTRPPDVAATKPVANDFQNIERGRKRFAEFDFDPFGTLTADALAVLTLNIQKRHVIGHNLGVADAKFAEHAAEARLGETVPLVGDDILQFAAIGQLVIDGLDGWLAAGEAPPPTKVRLSIPLIAPPAKKKSELKIGELGPLAIRIGLWVSEQSQKGFDCFIPEQDLIEAFPESNIDDLAFAVAELESDGYLKTSSMISTRLPRMFTTAELFITFDPHTGQSTPETDVVALVDLALGKSGTGTVDAEELHAASGWPLRRFNPPFAYLVSQIDDRRVLHGGTEDYPSRGFLMTDGDRVTLQRFAARLRR

SEQ ID NO: 12842 - protein, 295 aa, BradyrhizobiumColbertium
MIDISKLFDPYSRQARLFPGLLTLFPIILTAIAWFPRLVTSSWGATLVTIATSCGLLYGLSVLSRSRGKKVEKRLLAEWGGWPSTIWLRHREEHLPPPVLARYHAFFAKNVPLFVTPSAEQERADPKAADAMYASGVKWLQERCRGKAYPLVEKENAEYGFRRNLRGLKPIGVAACLAALLISVLTVVWRYDNIIPAVSSFSMSSLLTALAAIKPAAIGAICVDLVALTAWFTVVRDDWVRDAGDQFARALLACCDTLEVPAAAQPAAASSAKRTRRAATGENRSRRARSEGEES

SEQ ID NO: 12843 - protein, 770 aa, BradyrhizobiumColbertium
MAAISAADDIPIPVRRALRLIEAHPSVKRVTAERIEGSDAVRAMVEIRTELPNAWRAAGESPSGVRAVEPVTFIFTAGYPLGAPLIRLRTDFNRSHPHIQPSRNGSPPEPCLVAGSPREVLRVRGIGGLFEQLVDWLDKAAMAQLIDPEHGWEPVRRDGIDDVIVADPTWLTGLPTREGGCSVFPAWYYAYREATLSTYRIGIPRAAPVPLGPRFAGEWRYAPVGDDGQTGNAHALIAWSGKLPTGRPFVADRYLPETVTTIDELLKRAAELGCREFLEPKLGILQERVSQSKLKEKQPIAVILLARRPFEVIGTTSPIEICPYVVELRGGEALSSGSGKLVRTATHRDEVSPELLRRAAGDDGQALRPWTLLGCGSIGSKLAVHLARSGRGPAALIDDGILQPHNFARYATLPSDTKVESFWSIPKAHYLAEALATLKQPTVPHVVDVVARAFDDQSITPLVARDSFAVVNTTGSASVREALVLPGVTIDRPRVVEACMLGIGSVGLMSVEGPAANPSATDLICEAYRLIHSDPTLRNEVFNTKAEAIAIGQGCAAITMPLSDGRLSSFAAPMSEHIRRLQRDGLPETGEVLVGSLAADGLNQIWHRKDIRPRIVVGDGTDSVVRLSPEVDDTIRREVAARRGSETGGIIVGRYSDVANVFHVVGTMPAPPDSKFSRDEFVLGTEGLRPMLEDLIEGSGGALYALGTWHNHLVPSGPSGKDVKTAALLSIRQYFPLLMLIHTPAGYVHFTAEALSGAASSHSAVVKVAR

SEQ ID NO: 12844 - protein, 385 aa, BradyrhizobiumColbertium
MGMAVKASLFKVDNGDMVLFETESGRRILTDINIREAADDEDDDTPNVGKQLRNKLDRDDKGRLFVDGFLNTHPDADHIRGLVKHFHLGDPSTWVKADDKIIIREMWSSPIVFRRAKAKDEDHVLCADAEAWRDEARRRANRFKKERTAEDGNRILILGEDVDGKTDDLTEILVKVDEVFSKICGVRDTSFEARLLAPMPADDEAEEEVLTKNNSSVIMRLDLKVSKVTRGRFLLGGDAEVAIWDRIWERNKKWPERLQYDVLIAPHHCSWHSLSYDSWSEKGEKAKVSEPARSALGQPLDGALIVASSKTIKDDKNDPPCIRAKREYIDILDPVKGEFKCVADSPGDDPLAIEVTSAGPRIKRAAVAVSVAAGTGIGSQPLAHG

SEQ ID NO: 12845 - protein, 529 aa, BradyrhizobiumColbertium
MNRFKMSKNIVVYSDGTGQDGGARPEQRISNIYKMYRVSRDHADTAIDPSRQVVFYDAGLGTDIGATALTAPVRFVQKMLGSIAGDGIKRNIADCYEFIINHYEDGDRIFLFGFSRGAYTVRSLANLLMLCGVPKKTPSGPLMRYRKAVKDIAWEAVDTVLEHGAGHPREQFEAERLELARRFQTKYGSGDGLDANAAAYFVGVFDTVAALGASGPRRRMIQAGLTLGVAALAFFASLVPAAIIGALTAIVSEAGLLWGFIVPAWLVTHLAMLIAVIWFWKRQRTVNLKTIYDFPNKGDPPRSHTAEWTGKNFDRLLSKHVRFARSANAIDETRKDFARVGWGGTEPSVHPATPGVPRLIQLWFAGNHSDIGGSYPEPESRLSDIALAWMCEQATSIPDGLITGPIYVDGIRMPKTDDNGPALNVFPGANGVQHCEIAGMRDTLDAYAASLPKWRWLQNLVGTRNWEVEVREINHQAPVHPTVRTRFDLPEVRQCAGVGAYRPNALASHDDFKRYYPQVESTAQSTGSA

SEQ ID NO: 12846 - protein, 181 aa, BradyrhizobiumColbertium
MVALADIKADLPDWPDDVVDQWLLKLANQEGMGWPPPVPFNGHRWQYVIVKPVSWWKKVTWTKESRDCSFDELSLNSRKIMNSMFEALVLGIENGYGGDNSKKRFESCVSYLAVKGQFPRVPVTMPIETGLSILDGNHRVYSLTFLQSVPEPELKKQAITRPSVIHDVWAAKHADGEVLDS

SEQ ID NO: 12847 - protein, 208 aa, BradyrhizobiumColbertium
MAEDRGIRTLDDLLRVVRALAFEFNTDNVFVVGSQAILASMPDAPEPARASPEIDAFPENARIWELEENAKSPGDDPNVASEHIDGLFGESSQFHRTHGFYIDGVDETTAKLPAGWQVRAIKVRTEVAGRSVYGIAPAPEDLIASKLARLDDRDKQFVEAIHAQRPLDLDLVERRIHETNLDPALQQRAIAYIRSLRPEKKPEAPKLP

SEQ ID NO: 12848 - protein, 128 aa, BradyrhizobiumColbertium
MGDGLNEGIVGDTAKLMMHRLIVRMLRRDPSLVEKAKLAHERQASQFAGWPFVREWQELLALPPKELASKLISRDREMVRLRNTSPFWLAEGVDFGDYHARVRLRKAARRIVKRSLSAQPDFLVPGGP

SEQ ID NO: 12849 - protein, 626 aa, BradyrhizobiumColbertium
MWPDNETERDFLNFSGVAETVAEIIVQAKGRPISIGVSGAWGIGKSSMIKLTRSAIAARKDESGKKAADKYVFVEFNAWLYQGYDDARAALMDVIADKLAKEAESRQTALDKVASLAKRVKWLRAAKLAATSAASIYFGVPPVGAVGEIFELAKKVWSEGVGKETGEAAKKAAADAAQEGGELLNPKEETSPPKEIQALRDAFEQALEELGITLVVLIDDLDRCLPETTISTLEAIRLFLFLKNTAFVIAADNDMIKHAVRKHFVGVSDDLLVTNYFDKLIQVPIRVPQLGTQEVRAYMMLLFVDNSELSDDDKEKIRAGMIGQLKRTWQGKKVDRAFVQSLGVKLPEHLVGQFDTAERLASLMTTASGILGNPRLIKRFLNALSIRMTISKAQGVGVDEAVLAKLLLFERIGDTAAYAELVKNVSASGEGKPTFLQEWEDAATAGGDLDLKAPWNAPFVKEWLALSPPLHDHDLRGALYVGREQAPLITPEDRLSSEAAELLTALLEHPDMAHQLKDRLTRVSRIEVTVMMDRLLERARKEQDWGVPPILNACIALADADPPQGARLAAFLADRPSQQIQPNIVPKIGDRPWSRSVLDAWNSSPDVSRPVKTAIRKTREHGNVAI

SEQ ID NO: 12850 - protein, 101 aa, BradyrhizobiumColbertium
MGRRRAGRQRMSTGHIRNTHAMSASPRCGARTRGGFACSAPAIRGKFRCRMHGGARGSGAPRGNRNAETHGAFTQEGIAERRAIRALISDAETLLAKIASD

SEQ ID NO: 12851 - protein, 211 aa, BradyrhizobiumColbertium
MTTALQPLNTSPLAASDGSSPAANPRVKLYKRRIAISHPDPQAGERLLAEALGAADRDALHGMLRQLVKASAVGQKPDEANLAFMISTIRSIAPKDSIEAMLVSQMVSVHMAAMRCACRLACTDDLPQQEGVTRALTRLARTFAAQVEALNRHRNSDESAITVQNLSVQDGGRAIVGNLTQHAHLIGTNPDAASRAAGDPEWAGAGQAASA

SEQ ID NO: 12852 - protein, 327 aa, BradyrhizobiumColbertium
MQRTARVLAVIAGLCALVLATEAPAQKYPSRPVKIMVGFSAGGPVDVVARIVGDRLSNKLGQPFVVENRAGANGMIAAEGVARADADGYTILACNSSTITLNKTLFKDIRYDPQADFAPLTTVVSAPLVLVVNPENPKTANVKTVADLVAAAKAAPGALAYGSGGNGNLAHLAMELLSQKAGIKMIHVPYRGGSAAEVGVLAQEVLAVFDPLSAVPLVKAGKLRALAVSSAERLPALPDVPTVAEAGYPGFDISFWVGFFMPKATPAPILETLHREILAAAKDPTAQEKLGSQGVVSVLSQTEYAAKIAKETKELAEVVTAANIKAE

SEQ ID NO: 12853 - protein, 152 aa, BradyrhizobiumColbertium
MPSKSAGIIAYRKRGKLEVLLVHPGGPFWRSKDLGAWSIPKGEYADDEDAEVAARREFAEELGLEPSAPLIALGEIRQRGGKLVTAFAAELDVDVRSVRSNTFEMEWPPRSGRRQAFPEVDRAEWFALDAAREKINAGQRPLLDRLEQLIGG

SEQ ID NO: 12854 - protein, 306 aa, BradyrhizobiumColbertium
MRPRSVDVAANPAPDTAVLKNNHASPLVPVVELFLASVQAIDVANARAAYEETPAPPRANEPGAEEPVSPTEKLCHALREAAESSGIPVPFFARLIWQESRFKPNEVSHAGAQGVAQFMPGTAAEVGLDDPFDPMKALPASAKFLRKLRDDFGNLGLAAAAYNAGPGRVQKWLAREGQLPRETRDYVRIITGTQAEDWTERAEALAIRIDLPREAPCEGIGSLSKAKDVAWVPVNLTTSVASIIRKAEQVAARSTTNRARKRFATQLRNNAAAQRKGRSMIAARAAGKSAKARAVRFASGERPSGS

SEQ ID NO: 12855 - protein, 344 aa, BradyrhizobiumColbertium
MMRWMLGVVMSLWLISPVLAGNLDAKAVNDAPRPVKEPSADKLNPAVVKLQVLLDRAQFSPGEIDGKLGENAQKALKAFAEQNGIAFDKAISQELWDKLTLASEAPVLLDYKIDDADLKGPFIKKLPAKLDDMKSLEALGYTSPLEGLAEKFHMSADLLRALNPGKAFDKIGETIVVANVPARRELPRMVRLEVDKENGTLKAFDASGALLAFYPASIGSPDRPTPSGTLKVTGAHENPTYRYNPDYRFKNVKSKRPFDIKPGPNNPVGAYWIGLSAQGYGIHGTAEPDRVSKSASHGCVRLTNWDARVIGENVKRGTPVVFLEPPTGTSSTRQGSPVQKRASN

SEQ ID NO: 12856 - protein, 91 aa, BradyrhizobiumColbertium
MFKEGSPIAYDAPAELKKWPSLNGERQKDRGPPYLVYNGTLAECVRELMGKPVKGISLYDIMTRPQPAFDQAVLSPGDAAEIAMRKDFPKD

SEQ ID NO: 12857 - protein, 285 aa, BradyrhizobiumColbertium
MALKNVIGIDHAVVMVKDLDKAAENYRQLGFTVSPRGTHSVHMGTGNYTIMFDPDYMELLGVLAATELNAPARAFLDKHGEGIERIAFTAVDSAAGAEEIRARGLEPIGPTDFERPVTLPDGTVSAAKFRTFLWPTAEAPGGVRIFACQHKTRETVWIPELIKHANAAKRIKQTLIATPDPAKEAAHLGRLIDRTPTADADGAVTVPSGGDRADFVYLTLQQLGKRYPGVPLAGLSERGGAALVLISGDLAATERALGSAAVRSGDAICVPPARANGTLLAFVSG

SEQ ID NO: 12858 - protein, 442 aa, BradyrhizobiumColbertium
MKNRIWSIAICAELLVAAGAQAEPALQGKDAYGDWRADKPGTVRLIRPQDLVKPGATRSVASSARVVPRPRDASPQVPAGFKVELFAEGLRAPRIIRVAPNGDVFVAETRTGNIRVLRPGEGGKVATNEVFASGLRQPFGIAFFPSGDNPQWVYIANTDSVVRFPYQAGDLKARGKAETIVSSLPHDGGHSTRDIVFTPDNKRMLVSVGSLSNVAEGMGTPPGGLEAWSKAQPLGATWASETERAAVLAFSPDGKERKIYATGIRNCVGLAIQPQTGQPWCSNNERDGLGDDLVPDYVTSVKEGAFYGWPWFYIGNNEDPRHAGARPDLKDNVTVPDVLIQPHSASLAMTFYQGTQFPPEYQGDAFAAQHGSWNRSKRTGYKVIRIRMKDGKPTGEYEDFVTGFVVSDTEVWGRPVGVAVAKDGSLLVSEDGNGTIWRVSRQ

SEQ ID NO: 12859 - protein, 266 aa, BradyrhizobiumColbertium
MRLKDKVAIVVGAGQSPGEGMGNGRATALTFAREGAKVFCVDHHLDSAQETVAMITAREGTATAFKADVTKAADINAMVADAQTRWGRIDVLHNNVGVSLAGGDAELLQLTEEAFDRVVAINLKSCILAAKEVIPIMRAQRSGAIINISSMAAITTYPYVAYKATKSAMIAFTEQLAYQNAEYGIRANVILPGLMNTPMAVDTRAREWSKTRAEVEAERDSKVPLRRKMGTGWDVANAALFLASDEANFITGVTLPVDGGASVRRG

SEQ ID NO: 12860 - protein, 277 aa, BradyrhizobiumColbertium
MNLLDPQGPVAAGNSTILVDSVFIMLVIVVPTIFAILGFAFWFRASNPRARYRPGFVYSGRIEMVVWAIPALTVILLGGVAWIGSHQLDPAAPVPGTGSPVRIQAVSLDWKWLFIYPDQRIATVNTLTVPAGAELKFQLTSSSVMNTFFIPQLGSMIYTMNGMVTKLNLRADNEGKLQGLSAHFSGDGFPDMMFDVNVVSPLAFPEWVATAAKTDAVLNENSYRKLMQQGIEKDRPVYRLEDPRLFELIATQHIPPGPGPERISDAGRPHSGGHDAR

SEQ ID NO: 12861 - protein, 666 aa, BradyrhizobiumColbertium
MLGKLDWSAIPLDQPIPLIAGAVVLVAILGVLTWVVVKGHLSYLWNEWITSVDHKRIGVMYVLLASVMLLRGGSDAIMMRIQQAVAYQSQGYLPPEHYNQIFSAHGTIMIFFVAMPFVIGLMNLIVPLQLGVRDVAFPTLNSVGFWLTASGALLVNISLVVGEFARTGWLAFPPLSELSYSPGVGVDYYAWSLQISGIGTLVAGINLVTTVLKLRTKGMNYLRMPMFCWTTLASNLLIVAAFPILTATLAMLLLDRYLGFHFFTNEAGGNVMMFMNLIWAWGHPEVYILVLPAFGIFSEVVSTFSGKALFGYRSMVLATMAICVISFMVWLHHFFTMGAGPNVNAIFGIASMIIAVPTGVKIYNWLFTMYGGRIRFATPMLWAVGFMVTFIIGGLTGVLLAVPPADFILHNSMFLVAHFHNVIIGGVLFGAFAGFEYWFPKAFGFRLNERWGRAAFWFTFLGFFITFMPLYIVGMLGMTRRMQHYDVAAWRPWMIVAAVGVAVLTIGVICQIVQLVVSIRNREALRDRTGDPWDGRSLEWATSSPPPVFNFAFNPDVRGEDAYWHMKARAKQQSPERDGPEYQDIEMPRNSPTGFVCAFFATIMGFALIWHIWWMVIVGGLGAWATFVVFAWRDHDEYVIPAEEVAVIDRVNLEQRRGLVSMAEVG

SEQ ID NO: 12862 - protein, 213 aa, BradyrhizobiumColbertium
MSITATAGHAHTDPHQIGVLIEHPGPAPKRIVTAYGFWIFLLSDIVMFSCFFAAHAVLAGQTAGGPRGSEIFEPSYVAIETVCLLLSSFTCGMASIAADVRNRLWFHVSMAITCALGLVFLVLEFREFADLIARGYGPSRSAFLTSFFSLVGCHGLHVSAGLLWLLTMMAQVFAKGFRADILRRMTCFALFWHALDIVWVAVFSVVYLLGSAP

SEQ ID NO: 12863 - protein, 128 aa, BradyrhizobiumColbertium
MSDQTHGMGRNDLAPGEEEQHSVGARILGYVVGLVLALLLTATSFFIAGTDLVWQPSIPVALIVLAIAQMGVHLVFFLHITTGPDNTNNVLALAFGLLVVFLVIGGTIWIMANLNANMPPMDHILRMQ

SEQ ID NO: 12864 - protein, 262 aa, BradyrhizobiumColbertium
MSFQNFFADARAFALALFFTSSGFLASSGPVSALTGAATVRDGNSVQIGDVTYRLDGIDAPELDQICIDDHADSWTCGIEARDQLTKLINKRTVRCDDVGPEKSFGKRHRAICTAEGDKASLNEQLIKLGFALAREPIKANVKQAAAEAKAAAAGIWKGCFVAPQDFRAGKKDGALLGTACRPDRDKEIRAVLFPEELIMPPGCSIKGKLAVRARVTGNVGIYHLRGCPSYPATTNPDRWFCSEDDAQAAGFRKAYNCRRPR

SEQ ID NO: 12865 - protein, 532 aa, BradyrhizobiumColbertium
MKDPVDVLIIGAGASGAAVAWSLAETKMHILCMEQGGWMNPAEYPSTGRDWEAKFYGEWSSSPNVRGRPEDYPINDDNSPIKVVNYNAVGGSTVMYTAHWPRLHPSDFKVKTLDGVADDWPIDYDALTPFFEENDRMMGTSGLSGDPLSPLTHPPMPQQPLGLSGAIIAKAMNKLGWHWWPSDTTVATMDYEGRARCINLGHCTPACAQGAKSSTDITYWPHAIRAGVELRTHCRVREITTDENGMASGVVYYDKDGVEQFQPAHVVIIACNGVGTPRLLLNSASGRFPNGLANSSGLVGKNLMFHPYAQIYGFVKEPTDSNRAPPTCLWSKEFYDTDLSRGFVRGYAIQFGRGAGPVFEAVASEQKGILPWGADHHGVFRRLNGHRLAVSAICEDLPEEHNRVTLDPVLKDSHGIPAPKIDYTISENSRKMMEHGLARGREILEAAGATDICINNPIPWGGWHLLGTARMGTDPQRSVVNEWGRSHDVKNLFIVDGSIFVTSGGVNPTSTIQALTLYIADQMKQRLANLFD

SEQ ID NO: 12866 - protein, 149 aa, BradyrhizobiumColbertium
MSADTLLTRRQRDDLRTVAAMIIPASDEYKVPGADDPAIQADMLATLGRDTKLVAAALDHLARLAGAPLAELDAARRDAVAQEFRKQGGAAAATLVRVVLQCYYRDDRVLRSLGLELRAPFPRGHVLPDGDWSLLDPVKARGGSLRRAP

SEQ ID NO: 12867 - protein, 339 aa, BradyrhizobiumColbertium
MLDFTSDIIDDASSSRTTPSAPVDDGPLLDAYSSAVIDVTDRVGPAVVRVETGPKVPNGRERGGLGSGIVISPDGLVLTNSHVVGSSKEIRLRDVEGHAGDAQVLGVDPDTDLALLRANGVRHLPYAALGNSKTLRRGQLVVAIGNPLGFESTVTAGVVSALGRSIRSVSGRTIEDVIQTDAALNPGNSGGPLVSSNAEVIGINTAIINGAQGICFAVASNTAQFVLSEIIRHGYVRRAYIGVAGQTAPIPRRHAVLAGVENKMGALLMQIEPDGPAAKASLLPGDVVIRLDGVEINGVDDLIRVLDRDRIGRRLAMDVLRLGRLRAIDIDPIERKPAR

SEQ ID NO: 12868 - protein, 1158 aa, BradyrhizobiumColbertium
MTLLQVELDDKYRLESKRIFLSGTQALVRLPMLQRERDRLQGINTGGFISGYRGSPLGMYDHALWRAKAHLQQHDIAFVPGLNEDLAATAVWGSQQVGLFPGAKVDGVFGIWYGKGPGVDRSVDALKHANAAGTSRNGGVLALAGDDHGCQSSTLAHQSEQVFAAALIPVINPATLQDYLDLGLYGFALSRFSGCWVGFKAISETVESSASIYSDPERIQIRLPDDFEMPPGGLSIRWPDPPLEAEKRLFGPKMAAVQAFARANQLDRIVLDSKPARLGIVATGKAYLDLRQALADLGITDKDAQDLGLRIYKVAMTWPLEESGAKRFAEGLQDVLVVEEKRGFIEDQLMRILYNVDASRRPTVTGKRDERGAPLLPSEGELTPTIVASALVARLRKLGHHSPVLEQRLARLEAFDHPVTTSAPIKLARTPFFCSGCPHNTSTRVPEGSRAMAGIGCHGMALSMPTRRTDLISHMGAEGVNWIGQSPFTTETHIFQNLGDGTYTHSGLLALRAASAAGINITYKILYNDAVAMTGGQPAEGAFNVAQIAHQVWAEGVKRLAIVSDDPSKYPQGNYFPQGATIHHRRELDAVQRELRDIKGLTVIIYDQTCAAEKRRRRKRGLYPDPAKRAFINELVCEGCGDCSQASNCVSVQPLETEFGRKRQIDQSNCNKDFSCVEGFCPSFVTVHGGTLKRMKTSAVDSGQLFADLPLPPARELDGPYNILVTGIGGTGVITIGALLGMAAHVDGRGCSALDFTGLSQKNGAVMSHVRIAPRPEDISAVRITTGGADVILGCDMIVSAGPSALSRAERGVTKAYINADLLPTASFVQNPDLDFEMGTMQTVLRDAIGDKNLDIIDATGIAAALMGDSIATNPFMLGFAFQKGAFPLSLEALLRAIEINGAAIEMNKLAFTWGRLAAHDMSRVRSVLQFKSRASAPTKSLDDIITTRAEFLTSYQDKAYANRYLTAVAKVRKAESAVSPAATELTEAVAKNLFKLMSYKDEYEVARLYTDGSFANKVSEKFEGDFALKYHLAPPIFARRDKTTGRLQKQEFGSWMIHAFRVLAKLKFLRGGPFDPFGRTEERRTERKLVADYLSMIDQRIAGLKAEQLPLLTRLARVPESIRGFGHIKESNIKLAAAETARLEAELENSRFAAAAE

SEQ ID NO: 12869 - protein, 317 aa, BradyrhizobiumColbertium
MTVNAFDAEITDTAEALIGPWRKPRQMLQAQIYDAHASIHDDATAQKLGFKGGTIEGPTHFSQFAPLGERLWGRAWFETGCLSAHYRSVCYEGEEVQAMLSKPLSGTSQCQIQMVKRDGTEVLRGTASVGDAPVATALETRLGELKPLTDPVILRDVKVAKTGKRQSVRMAFEQNMGDLYPFSLRQKLAVITENSPYYSGTENPWGKPIIPMEMLSVLFQYRSKDDPLPAKGPAVGLFADQEIRLVKGPLFVDEEYEVEREVVALSGSRRTESAWVKTRVFDKANAVVATMLLNMATLKDSYAPYEEEYRQLYGAGH

SEQ ID NO: 12870 - protein, 237 aa, BradyrhizobiumColbertium
MLNSPEPTRGVISAEPEPIELDWSKSALLIIDMQRDFLEPGGFGETLGNDVSQLSRAVKPIGAVLTAARDAGMLVIHTREGHLPDLSDAPRAKIERGAPSLRIGDAGPMGRILIRGEAGHDIIPELYPLDSEIVIDKPGKGAFHATELGEVLERYGIENLLVCGVTTEVCVNTTVREANDRGYRCVVISDGCASYFPEFHAMGLKMIKAQGGIFGWVASSAAVLEAMTSSTTLGATS

SEQ ID NO: 12871 - protein, 555 aa, BradyrhizobiumColbertium
MSTLTGTTGKSEIDASGFKPALWTSGDWNALFGFGTNILVNMLVLTGLLRFVLKMPDSLVFGGILPALGLMMCLSTFYYAYLAYRLAQKTGRNDVCALPSGVSVPHMFIVTFVIMLPITLKTGDPLKGWSAGLVWVFFQSFILMIGGFIAPFIRRITPRAALLGTLAGVSVTFISMRPALEMYMTPQIGLICFAIILVSWFGGVKYWRGIPAGLVAIAVGMIIAWGSNLFGLGLGGMSIAGVGAAFANFGFSVPIPALGYVFSGFEFLGIILVTAIPFGIYDLVEAMDNVESAEAAGDDYPTTRVLTADGVVSLIGCLMGNPFINAVYIGHPGWKAMGGRIGYSAATGIMVVVLSWFGIISVLLALVPVVAISPILLYIGMLIGAQAFQTTPVKHAPAIVLALTPHLAAWAKLQIDTMLGSTMTAAATVGGLAADKADAVKAAAIAALPQQGVFYHGLEVMGGGSILGGLILGAIGVFIIERDFEKASAFALVGAILTYFGFMHGEAVGIGGGFGVTPAVALAYAVMAAGLFAAGKLGTSEHYVAHPEMTAAPAE

SEQ ID NO: 12872 - protein, 259 aa, BradyrhizobiumColbertium
MSLRRAIAAATLFAAAPALLAGEIPPDARRSGYAFMGLETRAMQDDDTSNPGMLFVLDGEALWTKKTGVADKACADCHGDARSSMKGIAARYPAFDKALARPVALDQRINLCRTNHQQATPLPHESRDLLALSAFVAHQSRGTPISVGEDPQVKPFIDRGRALFTQRQGQLNLACTNCHDDNFDKRLAGAPITQGQPTGYPLYRLEWQTLGSLERRLRSCMTGVRAQAYDYGSPELVALELYLKSRAHGLPMETPAVRP

SEQ ID NO: 12873 - protein, 105 aa, BradyrhizobiumColbertium
MAALINVPAKARRGDIIEIRTLTSHIMETGFRHTVDGKLVPRDIITTFACRYNGTEVFRADLFPAIAANPYLSFFTVAKESGKLDFEWVGDNGYSSTASASIIVE

SEQ ID NO: 12874 - protein, 155 aa, BradyrhizobiumColbertium
MPTTRRRFLSLAGSVTAAGTIPIVTLRPVEATPAMLTAAIRNVVGEAQLRTGKVKLDIPPLVENGNTVPMTVSVASPMTADDHVKSIHIFNEKNPQPNIGNFYLGPSSGRAQVSTRIRLADTQKVVAIARLSDDTFWQTAADVVVTLAACTEEMN

SEQ ID NO: 12875 - protein, 96 aa, BradyrhizobiumColbertium
MLARATTCILCHSGPFPETRFQGDLAPDLAGSGNRWTESQLRLRLVDASRLNSDTIMPSYYRKDGLVRVGRNFAGKPILSAAEIEDIVAFLATLRD

SEQ ID NO: 12876 - protein, 423 aa, BradyrhizobiumColbertium
MNAPVTRRNAVLGIAVAATSLAAPSILRAQPAGRIVVVGGGFGGAACARALKRADPKLVVTLIEPNETFISCPFSNEVIAGLREIEAQQFGYGRLAAEGIAVVVQAAKMIDPHKRIVTTSDGAALTYDRLILSPGIDFHLDALPGYDDAASKTMPHAWKAGAQTLLLRRQLEAMADGGTVAIAIPANPSRCPPAPYERASLIAHYLKTKKPRSKVLILDAKDSFSQQRLFEKAWKELYGDMIERVALSQGGRVTSVDPATRTIVTEFGNYTPDVANVIPPQRAGRIAGIAGAADATGWCPIDPVTFESKLVPNVHVIGDACLGGGVPKSASAASSQGKACANAIVGLLAGRKPEAPRLTGVCYSTVAPGYGFSLAGNYQPRGDIFAEVEGGATSPVEAPRELRARESAEAERWFQTITAETFG

SEQ ID NO: 12877 - protein, 728 aa, BradyrhizobiumColbertium
MNKHVSPRMNRRAFVIGSATLGAGLAIGLDIPFGGPAVVRAADGSPEIGAWVVVRPDDTVVIRVARSEMGQGSLTGLAQLVAEELECDWTKVTTEYPTPGQSVARKRVWGDFSTGGSRGIRSSQDYVRKGGATARVMLIQAAADAWKVPASECTVSSSVITHTPSGRTTTYGKVAEAAAKLAPPPDVKLKDPKDWKLIGKGVKRLDTVDKTTGAMIYGADVKLPGMLNAAIKDCPVFGGKLKSFDEARIAGMKGVKKVVKVGDTAVAVVADTWWHAKTALDALPIAWDEGDNAKVSSASIAKWLAEGLEDSQPAYVGNKNGDAKAAIASAAKKVEAVYSYPYQNHATMEPMNATALYTADKCEVWCGTQNGEAAFAAVLEASGLPAEKCDVHKVMPGGGFGRRGQTDYVRQAVMIAKQIPGTPIKLLWSREEDMAQGRYHPISQCKMTGALDANNNLVALHYRLSGQSILFSLRPEALQSGMDPIAFQGVAQSGEAAFGYSVPNLLIEHAMRNPHVPPGFWRGVNVNQNAIYMECFMDELAHAAGQDPLEFRRKLMGNHPKHLAVLNAVAEKIGWDTPAPQGVYRGIAQVMGYGSYVAGAAEISVTDGSKIKVHRIVASTDPGYVVNPAQVERQIAGSFVYGLSALFYGGCTVKDGRIEQTNFDTYNSMRISEMPKVESVMVPSGGFWGGVGEPTIGVAAPAVLNAYFAATGKRIRSVPLRDQNITFA

SEQ ID NO: 12878 - protein, 149 aa, BradyrhizobiumColbertium
MANLTINGKTFTLDVEPDTPLLWAIRENAGLTGTKYGCGIAQCGACTVHLDGVAMRSCGISVSEAEGKKITTIEGLASRDSLHKVQEAWIAQDVPQCGYCQSGMIMAVAALLNEKPKPTDADIDEAITNICRCGTFQQVREAIHMIASA

SEQ ID NO: 12879 - protein, 539 aa, BradyrhizobiumColbertium
MNVPSPCNVLMLYPLFSAESFWTFGESCKVMGVKRPAAPLGLITVAAMLPKSWTVRLIDCNTAPFGEEDLAWADVVFTGGMMPQQADTLRLIEVCRAAGKPVVVGGPDPTSSPHLYERADFRVLGEAESVIDDFIAAWESGARSGTFTAPKFQADVTKTPVPRFDLLKFEDYLYLGVQYSRGCPFTCEFCDIIELYGRVPRTKTIEQMFVELETLYQMGYRGHLDFVDDNFIGNKKSLRQFLPQLAEWQRTHGYPFEFSTEASVNLADDPELLDLMGAANFFGIFVGIESPDPATLIAMRKKQNTRRNIAESIHKIYAAGMLVTAGFIVGFDNEKVSMAEAMIEFIEEAAIPVAMVGLLYALPNTQLTRRLEREGRLHAGHDVAPTIGADQCTAGINFDPVRPLRDILMDYKRVLEHVYSPAAYAGRVDRLMTLLDRSRQRSELAEGDIRSKLGAMETVHKVVTALPEARGPLWQTFMNCAKRDTSSARIAVQMIAAYAHLGPFSRKVIAAIDERLAALDGHVPNPIVAAGPAEERHLA

SEQ ID NO: 12880 - protein, 728 aa, BradyrhizobiumColbertium
MVTKVVRWSIALIVLAALVLTYLPSYITDSIYKNVEDITDGEMPATVTAFQSGPDVVSTIGGSGEGLNCSLPPWANILFDSEGDSRQKRHLVLQRFRQACVFHDLCYRHGLATYGYNQNDCDRILQNAAFRLCVYIRNGSHDSGAARCQSDSKLVLAGVSLGGYEAYRGWDRSTYFEFDSDPSRSNGFQVSRVVGHPFKAIVPAKYAGDPDQVILMFENLRSNLAVTCITCAEVPILDWTTDPNAVSAELRSVGVTRLPDVLLRRVPMLTETMPVWLPPRRRHAAPHLLVDGTGRDHLIWMSRNNSENSVSCIVGADAARLLTNTSPIRDLCSVDAGPSLTRVEIDMFASSPLPMEVPGSPDIIYATSISPQKTREHDLSFCSRSASRKVEGTGDDRSKCVTFTEAEVRDGAGLGAFQNFPLVRRGQQIYFARDLAQRTDSPLTAAWQRAFGNTFSPDGALLVIDVAPPPVDRGPLSAKLKKIVRFDIDDRFDPMMPITRKVDDLRFLSLEATKSSVHLRMIDFAKDNPSVGNVQLMMSNGEVDLDRSWAQRPMLVVETRDARPKTRLVFSRGEIAAEPGKPLSATTEALTLQTLVFERDAAAPSNTPFVKSAGAACRIVYEFEPDRTDWPCYRAFDPERTMRASPATRMRASQMLVGRFIQGEGHGIAFPDLCLKSEPIVLKPQGSTFVPLSETAGWKGPPRFQRTITCEPLDAASVVSHPITQKAP

SEQ ID NO: 12881 - protein, 462 aa, BradyrhizobiumColbertium
MTITLPAAAREPDQPTADGLPTGQRRWAIAAIFTALAMASLDTAIANIALPAIAADLRVTPEQSIWVVNVYQIALVATLLPLGALGEIVGHQRIYLGGLILFTVASLFCSVAWSLDSLLVARTLQGLGASGIMSVNTALVRHVYPGRMQGRGFGHNALVVATAFTVGPSVASAILAFGPWPWLFAVNIPFGLIAICIGFAMLPKTPRAGHGFDLLGAVLAAACLGLFITGIGSAAHNLSPTVVGAELIAALVLGFILTRRHADHPAPMLPIDLFSRPMFALSAATAVCAFAVQGLAFVSLPFYFEDVLGRSQVETGFFMTPWPLVVGIMAPIAGRLSDRHAVGLLGGIGLVLLGVGMALLAMLPPNPAIPDIIWRMVICGMGFGFFQAPNMKAVMSSAPPHRSGSASGIVATARLTGQTTGAALAAACFALAGHGGATLALALGAGFAALGSVMSFLRLAVK

SEQ ID NO: 12882 - protein, 248 aa, BradyrhizobiumColbertium
MQDQKVVVVTGGTSGIGRAAALRFAKQGYRVLITGRRAGLIEETMLQHPDIAGMTADAASADDAQRTVAKALDKWGRLDALVNNAGAGAILSLADVTADRITDISAVNVLGPSLLASAALPHLKATRGTIVNVSSTFGHKAAARLSHYAASKAAVEHLTRCWALELAPFGIRVNAVAPGPTQTGALTGMMGLSAQQAAVVEEQERVSIPLGRRGAPDDVAEWIVQLAGPASAWVTGQVIAIDGGLGLA

SEQ ID NO: 12883 - protein, 303 aa, BradyrhizobiumColbertium
MNLHNISIASKPEELVPSRYAVRIGDIDVLVISDGVLPLPTAMLAHNAEPAARASWLKDMFLPPDAFDWALNAVMVRSGDQTILIDAGLGSDPDLHLPRAGQLIKRLEAAGIDLASVTDLVLTHMHMDHVGGLLVEGVKERLRKDLRIHVAAAEVKFWESPDFTYTNMPRGFPDALRAAAKQFVGMYGSQIRQFDEQHEVAPGVVARRTGGHTPGHSVVRVASAGEALTFAGDAVFAVGFDQPDWHNGFEHDPEEAARVRIHLLRELAESGELLVATHMPFPSVGHVAAAGDAFRWVPVFWDY

SEQ ID NO: 12884 - protein, 401 aa, BradyrhizobiumColbertium
MRIVIIGAGFAGMYAALSAARLRDIQGAPPDELEIALVAPEPTLVVRPRLYEPNPETLTAPLQDVLEAIDVVYVRGHAEAIDTRSKIVEVAAAQGARKKLSYDRLVVATGSRLFRPNVPGLAEHGFSVDQLDDAIALDRHLHGLSNRPASLARNTVVVAGGGFTGIEAATEVPSRLHKILGKDARLRVVIVDRNETIAPDMGAGPRPIIEEALQKLGIETRLGVGVASLDKSGVTLSSGERIECETAIWAAGMRAAPLTAQIPAERDQFGRLLVDRDLRVPSVSGVFATGDAARAACDDVGNYALMSCQHATRMGAFAGNNAAAELLGVPTRSYHQKAYVTCLDLGEAGALFTRGWERTVAMVGDVAKKTKQEINTVWIYPPKAERAAALASADPERVTAL

SEQ ID NO: 12885 - protein, 289 aa, BradyrhizobiumColbertium
MEIAALSTGRNDGTGSVTTSDGAKIFYKDWGPKSAQPIVFHHGWPLSADDWDAQMLFFLGKGFRVIAHDRRGHGRSSHVGDGHDMDHYAADVAALVQQLDLRNAIHVGHSTGGGEAARYVARHGRDRVAKLVLIGAVPPLMLKTESNPGGLPLKVFDGLRGRLAANRPQFYHEFASGPFYGYNRPGAEPSQATIWNWWRQGMMGSAKAHYDGIKAFSETDFSEDLKSIAVPTLVLHGSDDQIVPVADSAPLSARLLKHSTLKIYDLLPHGCCTTHPDIVNGDLLRFVTA

SEQ ID NO: 12886 - protein, 316 aa, BradyrhizobiumColbertium
MSKVVLRESANDILAAPRGQRDVALVGDRSVAGEEMARVLRTAPFRMALDSSGAGIAHWKHDPLHDVVEPMSHHVIMAYNGTVQRMERRSGRSIAIGTFRPGVVIVIPEGSTSRWDIPKPVDVVQLYLPQTTLKRVADEAATGSPTELLERTAHPDPVTSRLLLSAADVLEGHEALDTLFRQQLMDLLATRLLAAHTGSPSAIAPTRGGLSPKTLLRAIERLRSDSDADVSLAALAADAGLSRFHFCRAFKDSTGLSPHAWLRQHRLEQAMNMLRDTDASVVSIAATLGYSSQTAFAAAFRKLTGESPSDWRRRAR

SEQ ID NO: 12887 - protein, 51 aa, BradyrhizobiumColbertium
MDSGSEGNPSRFDAADLRVLGGAEICVFPIAAVFCLILLCGHEERAVRVRL

SEQ ID NO: 12888 - protein, 309 aa, BradyrhizobiumColbertium
MTRTGAYGERLAEFLRLEEAPPTLTTGSLRSTKIAVTETRHDSPVPGLSGSFAAEDAYLVSLKLRDYPECEIWEQGRHIKKADVHAGTTYLYDLKVDPRYLINKPFHSLHFYVPRSALDGLADQSGARRIDTLDCSPIGHDDAIVRHIGASLREGLRRPDEANQLFVDHIMLALAAHVAQAYGGFRNKVESSRGALASWQLARACDKLEADLSGKLPLEAIAAELGLSVSHFSRAFRAATGLPPHRWLLHHRVRTAKRLMSEPGPSLSEVAISAGFANQSHFTRVFSAIAGISPGAWRHDVLGTASRER

SEQ ID NO: 12889 - protein, 91 aa, BradyrhizobiumColbertium
MRRILDWFFRNRETGAITIAQWPNLVLWIVIVAGILLWIWPSAGKASLALTIVVKGGLIIWGADEIIRGVNPWRRCLGAAVVLYELMTLLP

SEQ ID NO: 12890 - protein, 143 aa, BradyrhizobiumColbertium
MAKKPLADTSREMAGIDIAILSTHAENGEIANRPMSNSGDVAYAGTSYYFTYEQARTGSDIQRNPKAALGFSSEAGLFSKGIYLAVEGSAELIRDKTAFQQHWTSDLDKWFDHGIDTPGLVLITVRANRMAYWKGREEGEVEL

SEQ ID NO: 12891 - protein, 578 aa, BradyrhizobiumColbertium
MSGWTRWVPGIETLRHYESDWLRNDVFAGLVLATMLVPVGIAYAVASGLPGIHGLYATIVALLAYAVFGPSRIIVLGPDSALAAVILGVIAPLSGGDPVRAAMLAAMMALVSGAVLIVAGIARLGFVTELLSKPIRYGYMNGIALTVLISQLPRLLGFSIESEGPLRGLWAITIGISGGKMNWAAFTIGLGTLMVILLLKDSKRLPGILIAVVAATLVVALFDLGSGHGVEVLGPLPQGLPAFSIPRIGYSDLIPVLTGGCAIALVSFADTSVLSRTYAARFGDKVDPNQEMVGLGAANLATGLFQGFPISSSSSRTPIAEAAGARTQLASIVGALVIAFLLLFAPNLLQHLPHAALAAVVISAAISLIEISDLKRIYRIQRWEFWLTVLCFVGVTVLGPIPGIGLAIAVAIAEFLWDGWRPHSAILGRAHGVKGYHDITRYPDARLIPGLVLFRWDAPLFFANAEFFKERILAAVATSPTPVRWLVVAAEPVTSVDVTACDTVAELNEALRARGIELCFAELKDPVKDKLKRFGLYAQVGEAHFFPTIGSAVSSYLDTNNVAWRDWEDEVEVGRNIG

SEQ ID NO: 12892 - protein, 267 aa, BradyrhizobiumColbertium
MRETRKKKARAMVWDPQQYLKFAGHRLRPAVDLLMRIPDFAPRAIADLGAGAGNVTKLIKERWPDARVVGVEGSAEMVDAGRKAAPDVEWSHQDLGHWRPAGQYDLIFSNAALHWLPNHAALFPSVMEKVRPGGMLAVQMPRNFTAPSHVLIGETALNGPWRSKVEHLVTPPPVEGPSFYHDLLAPMSANIDIWETEYLQVLEGENPVKEWTKGTWLTRYLDVLQGEEKAAFEAAYGARVAEAYPKNAAGQTLFPFRRLFMIAQRKG

SEQ ID NO: 12893 - protein, 333 aa, BradyrhizobiumColbertium
MRKLLVAVAAAAVLLTPGIAAAQSPIVIKFSHVVANDTPKGKGALRFKELAEKYTDGKVKVEVYPNSTLYKDKEEIEALQLGSVQMLAPSTAKFAPLGIKEFEALDLPWLFKDDQTYSNAMKGTIGKWLFQKLEAKGIIGLAYWDNGFHMLSANRPLAKPTDFQGLKFRISGSKVADQYLRIMGSIPQIMAFSEVYQALQTGVVDGCENTASNYLTQKFYEVQKDITVSYHAHLQYAVIVNSKFWSGLPPDIRAQLEKAMAEATDYTNSIARQENEDALAEIKKTGKTNLHYLTDADRKAWQEAMQPTYKWAKGRVGQEVLDLVAKELDVKMN

SEQ ID NO: 12894 - protein, 677 aa, BradyrhizobiumColbertium
MLRALNRVLNHLEEWLIATMIAAATSLIFVAVLHRYGAGLSIDIAKWAEARNLAFLAVPARAVFVWLAALDLSWAQELCIYMFIWMAKFGAAYGVRTGIHVGVDVLVNLLPGGSRRRVITFGLLCGALFTAIVGYFGAAFVSHMWQSGQQSNDLEAPMWMVYLTIPLGSALMCFRFLQVAWSFYRTGELPHHDMAGVEGVEADPVHPAPVTHSQVVRDERSPLGWILMLLPVLIVALCFAHAAHVITLPQGLRVFIVFALLLSLMLTGMPISIALGLTVLSFMFTLTDVRTESVALKLFTGIENFEIMAIPFFILAGNFLTHGGVARRMITFATSLVGHWYGGLALSGVVACALFAAISGSSPATVVAIGSVILPAMVAQGFPKRFGAGVITTSGSLGILIPPSIPMVLYAVSTNSSVGKLFIAGIVPGLALASLLGATTFYRAWRNDYPRMRKATFLERLDAFRKSIWGILLIVIVIGGIYSGLFTPTEAAAVSAVYAFIVAVFIYKDLKLRDVPRVLLSSANLSAMLLYIITNAVLFSFLMTYENVPQALAQWMIDQGLGWIGFLLLVNVLLLMAGNVMEPSSIILIMAPILFPVAVKLGIDPIHFGILMTVNMEVGLCHPPVGLNLYVASGIAKMGITELTVAVWPWLLTMLGFLVVVTYWPGLSLWLPRLLGM

SEQ ID NO: 12895 - protein, 278 aa, BradyrhizobiumColbertium
MFFNRMESGPASISDAVHLEVITGLHGTMMPTILAAACQAMVGAITTYETGDMMTAGLTVAGVVVAVVRLAEIFAFRRRLAAPPRLGRAEAVHWERRYIAGTVVTAFVLGVFAARSIVLGDALCSVMAIGIGFGFGAGVVARLALRPVAALLDLAAIAAPAAIVSFMQPDLRHVGLGLLILMYVVASFEMVRLSFNASISQITLKRQFEQLARSDPMTGVSNRSVLARDLPVMLSAGINCRPYAGSRPFQGSQRSVRPPCRRCAAEAGCRTAQGAGRS

SEQ ID NO: 12896 - protein, 104 aa, BradyrhizobiumColbertium
MIRMGGDEFVLVQRAASDAEAMARRIVQSIGRPYEVDGQVIDLGASVGVAVAPDDGRTAEALLSRSDKALYQAKQNRGGYVVASELRMADNPTASREPVEGVAA

SEQ ID NO: 12897 - protein, 661 aa, BradyrhizobiumColbertium
MAIDRKMRLDAVHQAGRSNMTESSSEPKDASPSVIAQHDAMLNALPFSDTRDFDDAARGFLGTIEHATITTPQGRTVWSLKPYGFLSAEEAPPTVNPSLWRQSRLNMHHGLFEVVPGVYQVRGLDIANMTLIEGDSGVIVVDTLTSIEGARAALDLYFKHRGGRPVAAIIFTHTHVDHWGGARGVLQEDALATGSVPIIAPNLFMEHAVSENIIAGPAMLRRAQYQFGPLLAKGVRGQVDCGLGKSMAAGSAGLLRPTDLIMATGDTRVIDGVAFEFQMAPNSEAPAEMHFCVPRYKLLNLAENCTHNFHNLLPFRGADVRDALAWSKYLGEALQLWDGKAEAMCGQHHWPVWGRERIGTMIRQQRDLYKFAHDQTIRLMNHGLNAAEIAETIQLPKSLEGAWHGRGYYGHIRHNVKAIYQKYLGWYDANPVNLDPLPPVESGRKYVEYMGGADAILARARTDFDKGEFRFVAQALGHLVFAEPGNAAARALLADTLEQLGYAAESGTWRNAYLFGAQELREGMPKVPARPPMPRETLAALRTSQLWDVLAIRLNGPKAEGKHIVLNWSFSDTGETFVLNLENCALTYTEGVQAENADASFTLARATLDEVVAKLTSFPEAVAAGKVKLAGNPMKLAELMGLMDEFPRMFEIVEPKRAVVM

SEQ ID NO: 12898 - protein, 356 aa, BradyrhizobiumColbertium
MRIAQVAPLTEAVPPKLYGGTERVVHWLTEELVALGHDVTLFASGDSQTSAKLDALWPKALRLDGSVRDPNALHMVLLERVRQKCDDEEFDFLHFHLDYYPWSLFHRQPTPFVTTLHGRLDLPEHQPVFNTFSKMPVISISNAQRRPVPQANWVTTIHHGLPENLLTPKPARQEYLAVLGRIAPEKGVDRAIKIATHCGIPLKIAAKVDRADQDYYDELIRPMIENNPLVEFIGEISDHEKSDFLSGALGLLLPIDWPEPFGLVMIESMACGTPVVAFNRGSVPEIIDEGLTGFIVEDVISAAGVVNRLPQLDRTAIRRQFETRFTARRMALDYLAAYRSLTEAQTPRIKLVSSAE

SEQ ID NO: 12899 - protein, 113 aa, BradyrhizobiumColbertium
MNVEAPACTAPAMPDGGTFPHLRSSFLRSLHVRHVCRPSRCCHFIFSYRPHPHVVIAKPGNPGEEIDVQSIGNKQNEKPANGATVIWISFLDTRAGHLPLSCAIFGCEWHRIW

SEQ ID NO: 12900 - protein, 567 aa, BradyrhizobiumColbertium
MRMASHLVILTAVVGAVACSVGTQYGVKSLVDALSAGPSQGGGVWLAFILLMSLIAADNFLWRIASWTASFTFVRVTGDLRRDIFRHLTGHAPSYFSDRMPGMLTSRITATSNAVFTVENMFVWNVLPPCIATIAAIALIGTVSPYMALGLTVIAGGMVIAMFRLAAAGKPLHDDFADKAAAVDGEMIDVISNMPLVRAFCGIGHEHERFDATVNRELTARSRSLRYLEKLRLLHAAITVLLTIALMAWAITLWQKGQATTGDVVLVCTLGISILSATRDLAVALVDVTQHVARLTEAIATLLVPHELRDHPEAEPLVKSGAAIAFNNVTFGYPGADKIFERFSLRLQPGQRVGLVGQSGGGKSTLFTLLQRFYDVDEGNITIDGQDISKVTQLSLREAISVVPQDISLFHRSIRENIRYGRPNATDDEVLRAAIAARCDFVESLPGGLDTMVGDRGVKMSGGQRQRIAIARAFLKDAPILLLDEATAALDSESEEAIREALSRLMRGRNVIAIAHRLATLRNFDRVVVLRHGKIIEDGSPERLMQGHGPYRELVTQEMSRLAQAAA

SEQ ID NO: 12901 - protein, 734 aa, BradyrhizobiumColbertium
MSAETVAQFASVTRTSEQVAEQPFYIPMTGPSARPRRSLKHDDTFIVLDSHGDIGASAGGPDGLFHHDTRYLARLELVLDDLQPLLLGSNLRDDNSALTVDLTNPDIYREGSLVLQKDLLHIVRTIFLWRGRAYQRIGVQNHAERRTSFNLTLLFGNDFADLFEVRGERRPRRGIGTSRLVGPTDVLFEYRGLDDAERTTGLHFDPRPTRLSADAATWELDLEPHQAKSLFVAVSCNRPGTERPVRFFPGLLAHRREMRRSTMGAASIETSNNIFNEVLCQAMADLNMLMTETPQGRYPYAGIPWYSTTFGRDGLITALQMLWVDPRIAKGVLRRLAHFQAKAIDPRADAAPGKILHEMRGGEMASLGEVPFAHYYGSVDSTALFVLLAGSYFERTGDEATLIELWPAIEAGLAWVDGAGDPDQDGFVEYQRATEKGLANQGWKDSYDAIFHADGRLAEGNIALAEVQGYVFAAKQLAARCALRLGKPDRMRKLDTEARELAERFEKAFWCDELGTYALALDGEKRPCKVRTSNAGQVLFSGMVREDRARLVAADLMGPHFFSGWGIRTVAQGEVRYNPMSYHDGSIWPHDNALIALGLARYGLKHSVALVFKGLFDAATYMDLRRLPELFCGFRREKRRGPTLYPVACAPQAWASATPFTLLEAALGLEFDVARREIRLRNPHLPAFLNEVILRDLRLGESSVDLRVGRHGDDVALEVMRTRGHIQVSIVLAR

SEQ ID NO: 12902 - protein, 173 aa, BradyrhizobiumColbertium
MRAIGASILGAAMVMALAAAPSRAAEDPPAGRNEAAVPPAAQPPVSTVPVTPKDAAPPPSVTIIGASEAHGVLGRDVRSAAGEDMGRIVDVIVDRTGHVRAAAIDFGGFLGVGSRKIVVDWNALRFGKIANKKDSITLELTKAQVAAAPEYKEDTPIVVLGASGSLQPLQAIQ

SEQ ID NO: 12903 - protein, 428 aa, BradyrhizobiumColbertium
MLLLRKPNHADRDRGVEQDHVAAPPAASLPAPSRQSLRGLDWFIFFLADVQTGFGPFIAVYLTTQKWTQIEIGLVLSIGGIVALIGQMPGGAIIDAAKSERLVAALAIMTIGACALAYAAMPIFPVVVAAATLHAAASCVLGPAIAAISLGLVGPFAIGERLGRNARFASLGSGIAAAVMGTVGYLLSSRAVFLVTFLLVIPTLIALSRIRENEVDIRRCHGEMPPEAADRADTNIWHLIRQRPLIVFAVSVMLLQLANAAMMPLMASALTARSSQWATVLVAACIIVPQAIVALLSPTVGRQAQVWGRRPLLLIGFGALVIRGLLFATVRDPYLLVLVQVFDGLTAAVFAVMIPLIVADVAFGSGHFNLAQGIVGTATGIGASLSTVLGGYVSDKFGNATAFIGLSGVAATGLLLILLVMPETRRTA

SEQ ID NO: 12904 - protein, 232 aa, BradyrhizobiumColbertium
MLTQTIKTQASNTQIGGKIAPANPVTDQFGAITGHVGLVATEFSYGKDEEIYGEDEAAEYVYQVVTGAVRSYKLLSDGRRQIGAFHLPGDVFGLESGATHRLAAEAIIDTTVRLVKRASLEKAAGTDVQVARKLWAMTASELRHAEDHMLLLGRKTAMERVATFLLEMDRRLAVAGMMALPMCRRDIGDYLGLTLETVSRALSQLHAQGILGFSGARQIVLRNRQRLHNLDA

SEQ ID NO: 12905 - protein, 118 aa, BradyrhizobiumColbertium
MVDDDAAVLGSLRFLLETDGFAVRTFRSGTALLNVSGAPGPDCYVIDYKMPDINGIELTGRLRKSDRDAPVILITGYPDENISARAATAGIKDVVLKPLLDENLVKCIRHAIKDRPSA

SEQ ID NO: 12906 - protein, 205 aa, BradyrhizobiumColbertium
MTTKGNVYVIDDDAAMRDSLNFLLDSAGFAVTLFDDALAFLEALPGLDFGCVVSDVRMPGLDGIELLKRMKAQQSPFPIVIMTGHGDVPLAVEAMKLGAVDFLEKPFDDDRLTAMIDSAIRQAEPAAKNEAVAQDIAARVASLSPRERQVMEGLIAGLSNKLIAREYDISPRTIEVYRANVMTKMQANSLSELVRLAMRAGMLKD

SEQ ID NO: 12907 - protein, 479 aa, BradyrhizobiumColbertium
MGTWDLNLQTRELEWSEVAKRLFGLGRDQAVNYDLFLSLLEPGDRDHLLKAIGRTSEGGGELDLSFKVAGGSGNGQWIRARAGVIRDSSGTPRHLTGIFLDINEEKELEEALRSQENHLRSILETVPDAMIVIDSRGIMQLFSSAAERLFGYSRQEAIGRNVSILMPEPDQSRHDSYLDRYLRTNDPHIIGIGRIVTGKRRDGTTFPMHLSVGQTQRAGEPYFTGFVRDLTEHQQTQARLQELQSELVHVSRLTAMGEMASALAHELNQPLAAISNYMKGSRRLLAGSSDPNTPKIESALDRAAEQAQRAGQIIRRLRDFVSRGESEKRVESLSKLIEEAGALGLAGAREQNVQLRFSLDPDADLVLADRVQIQQVLVNLFRNALEAMAQSPRRELIVANTRVGDGMIEVEVSDTGIGFREDVIPNLFQTFFTTKDTGMGVGLSISRSIIEAHGGRMWAESNAAGGATFRFTLPATDES

SEQ ID NO: 12908 - protein, 277 aa, BradyrhizobiumColbertium
MTYATVMVSLALDQSNEARLQVAGELAERFEAAIIGVAAAQFAPPLYFADGAEAQGLIDEGEASVKRRLASLEAQFRAAVKNRGGHVEWRSALDFPARFVLAQARCADIIVSGGQSPAFSDAFSLVSPKDLVMQAGRPLLVVPDRTNWLDLRNVLVAWKDTPEARRAVTSALPMLRKARDVTILEIPEQGDDRSAVMAGVTDVAAWLGRHGVTATARVSEAAGREAPAAQLERVAGDVGAGLIVAGAYGHSRFRELILGGVTQHLVTQTARNVLLSH

SEQ ID NO: 12909 - protein, 141 aa, BradyrhizobiumColbertium
MYKFLEQTVDGFMTRNVKTVQRSLDLFHLSEMFETDDFNSYPVEDDGQVVGIVTKFDILKCFAFTPSQMLPRYDDLMSRKIGDVMTPEFIYVSPDTRLTRVLQIMVEHRIRSIIVLDSAQKLVGIIAREDVIAALKASAGD

SEQ ID NO: 12910 - protein, 549 aa, BradyrhizobiumColbertium
MSQPSISKSMTIGESGLAVVFAVTAFFCVIASAKALDAPFAFHAALSAAASVAAVFVIVNRYFERPAALPPQEINGRPNYNMGPIKFSAFMAVFWGIAGFLVGLIIASQLAWPALNFDLPWTSFGRLRPLHTSAVIFAFGGNVLIATSFYVVQKSCRARLAGDLAPWFVVVGYNFFILIAGTGYLLGVTQSKEYAEPEWYADLWLTIVWVVYLLVFLATIFKRKEPHIFVANWFYLAFIVTIAVLHLGNNPALPVSVFGSKSYVAWGGIQDAMFQWWYGHNAVGFFLTAGFLAIMYYFVPKRAERPIYSYRLSIVHFWALIFLYIWAGPHHLHYTALPDWTQTLGMTFSIMLWMPSWGGMINGLMTLSGAWDKLRTDPVLRMLVVSVAFYGMSTFEGPMMSIKVVNSLSHYTDWTIGHVHSGALGWVGFVSFGALYCLVPWAWNRKGLYSLKLVNWHFWVATLGIVLYISAMWVSGILQGLMWRAYTSLGFLEYSFIETVEAMHPFYIIRAAGGGLFLIGSLIMAYNLWMTVRVGEAEVQMPVALQPAE

SEQ ID NO: 12911 - protein, 244 aa, BradyrhizobiumColbertium
MSFWTRHQVFEKNSIILVVGILLVVAIGGLVEITPLFYLKSTIEKVDGVRPYTPLELAGRNIYVREGCYLCHSQMVRPLRDEVERYGHFSLAAESMYDHPFQWGSKRTGPDLARVGAKYSDDWHVTHLTNPRAIVPQSVMPGYPFLSKTEVDPDAIAGDMRALKTVGVPYSDEQIANAAADLKAQADPDNAGSDAFTKRYAKAVVRNFDGKTGTPTEMDALVAYLQMLGTLVDFKIYNEKANLR

SEQ ID NO: 12912 - protein, 54 aa, BradyrhizobiumColbertium
MKAILTVHNLASDLVATIWTPVFVAIFLAIIAYAFWPRNKAAFDKAAHLPLREE

SEQ ID NO: 12913 - protein, 291 aa, BradyrhizobiumColbertium
MTDHSSDIDSLSGKSTTGHEWDGIKELNTPLPRWWVITFYLTILWSIGYWIVYPAWPLISSNTIGVFGYSSRADVAVELANLEKIRGDKMAALGTASLADIEKDPALLALARAKGKTVFGDNCAPCHGTGATGSKGYPNLNDDEWLWGGSLDQIMQTIQFGVRSGHAKSHEGQMLAFGKDGVLKPDEIVTVANYVRSLSGLSTRNGYDAAKGEKIFAENCAACHGDAGKGNPELGAPNLTDKIWLYGSDEASLVETISQGRAGVMPAWEGRLDPATIKAMAVYVHSLGGGK

SEQ ID NO: 12914 - protein, 488 aa, BradyrhizobiumColbertium
MNKTVNPNELKPADDTGPLYAARKKVYPQSVSGTFRRIKWTLMAICLGVYYFLPFVRWNRGLGAPSQAVLIDLPNSRFYFFFIELWPQEVYYFTGLLIVAAVALFLMNSVGGRIWCGYLCPQTVWTDLFYAVERLVEGDRRERMKKDKSSDPLKLERISEIVLKHSIWLMIAWWTGGAWVLYFTDAPTLVKELVTFQAPMIAYIWIGILTATTYVLAGFMREQVCTYMCPWPRIQAALTDEWALNVTYRYDRGEKRTSVKKAAELRALGQQVGDCVDCYQCVAVCPTGIDIRNGPQLECIQCGLCIDACDNVMAKIGRPKRLIGYDNDINIHRRQEGKAPIYRIVRPRTIVYSAIIVAIGGFMTYTLATRSLLDVNVLHDRNPIAVKLSDGSIRNAYTVRLLNKSGYDRVIAIDANGPANATIHVIGVDSVTPDRPMIVIPRDSTSELRLLVTAPAENNPEKSIPVRFLVTDIGLGEVASATDNFVSP

SEQ ID NO: 12915 - protein, 161 aa, BradyrhizobiumColbertium
MASKPLTGTKVFLMLVAFFGVVIGANFTMMKLAIATLPGTDVDSPYAAGLVYDREISAAQDQAARKWKVNAHIERRSDGGASVQIEARDAGGQPISGLKFGGRLERPTDKRADLAVELTESGIGLYRGSAADVAPGQWDLVIEGEARGTRVFLSRNRVILN

SEQ ID NO: 12916 - protein, 729 aa, BradyrhizobiumColbertium
MHITRDFSHYVRSAGEGVQHIDLAVEGVHCAGCMAKIERGLSAIPDVTLARVNLTDRRVALEWKAGTLDPGRFIDRLEELGYKAYPFETESAEAAEVAESRFLLRCLGVAAFATMNVMMLSIPVWSGNVSDMLPEQRDFFHWLSALIALPAAAYAGQPFFRSAWRALSAKTTNMDVPISIGVILALGMSVVETINHAEHAYFDAAIMLLTFLLVGRFLDQNMRRRTRAVAGNLAALKAETAAKFVGPDEISQVPVAAINAGDIVLLRPGERCAVDGTVIEGRSEIDQSLITGETLYVTAEQGTPVYAGSMNISGTLRVRVSAASEATLLAEITRLLDNALQARSRYMRLADRASRLYAPVVHATALLTILGWVIAGASWHDAIVTGVAVLIITCPCALGLAIPTVQTVASGAMFKAGVLLNAGDAIERLAEADHVIFDKTGTLTLPDLEVINAADIPADVFDLAGRLALSSHHPVAAAVAQAAGAKSPIVGAVEESGQGVRASVDGVELRLGRPSFCGAGALVGGATVDPEASIVAFSKGSEKFILSVRQGLRPDARAAIAALKARNMGIEILSGDREPAVKAAANALGIPEWRAGVTPADKIARIEELKQRGAKVLMVGDGMNDAPSLAAAHISMSPISAAHLSQATADLVFLGRPLAPVVAAIDASRKALHLMRQNLWLAIGYNVLAVPVAISGVVTPLIAAAAMSGSSILVMLNSLRARSASREIV

SEQ ID NO: 12917 - protein, 55 aa, BradyrhizobiumColbertium
MEILVILVPLALMLGGAGLVAFLWSLRSGQYDDLDGAAWRAIADDEPPQEAPAKR

SEQ ID NO: 12918 - protein, 400 aa, BradyrhizobiumColbertium
MIDLSAPIKPGAMTMEAHPPGFALRSIVIGLTAFLTVVDLFATQAILPSLTRHYGVTPAAMGFAVNASTFGMALAGLVVGIFSPHIDRRTGILLSLAFLAIPTSLLASAPNLAVFTALRVAQGLCMASAFALTLAHLGEQCSAMDAGSAFAAYITGNVASNLVGRLISAALADGLGLAWNFYVFAGLNLAGALLVYFTIKRVPPMHAMRPAGSPLAAMIAHWRNPRLRAAYGIGFCILFAFIGTFTFVNFVLVRPPLSLGMMDLGLVYFVFLPSIVTTLLAGKVAARLGTRPTIWSALAVAGLGLPLMLAQHLGTVLAGMVLVGVGTFFAQAAATGFIGQAAADNRGLASGTYLACYFCGGLVGTAVLGRLFDAFGWQACVAGVGVALALAAVLTFALKR

SEQ ID NO: 12919 - protein, 159 aa, BradyrhizobiumColbertium
MSRHLTASRVVWTGVAVLGALTFATPVFAGECPAGKIKPNAQQMVDHKAVGVTDVTLGAIDLGKQPARIEGRELRFRKLTIAPGGIVPWHSHDDRPALIFVQQGEIVEYASNCVDPIVHKAGDIRPEVYGTSHWWKNLGKETVILYVGDVRKDPNDHHM

SEQ ID NO: 12920 - protein, 94 aa, BradyrhizobiumColbertium
MTQFSKTLIATAAFAVIATAAFSQAAWDFKPGMAYVYGGPGKMSAMAMAPAEKNHEAMMKHAKKVPDNTVFFMDNGTLYSASGRLDPTGNFYVN

SEQ ID NO: 12921 - protein, 238 aa, BradyrhizobiumColbertium
MTSLSPADAEQLRLAFQRCRDMDGTLNEQLRAYADASRKVFPAYGEAVDRLVMRLSGNGGGETAPRRGDPMPSFMLPDEGGHLVSLPSLLRSGPVAVMFFRGHWCPYCRLNVRAVVQALDRIKAFGAQVVAIMPETQEYTRQLKAESRAPFPMLTDLDNGYALSLNLAIWLGVEIQQLLSYQDMAKFHGNDGWLLPIPAVFVVGRDGIVKARFVDPDFRKRMEIDDLIEALESASREN

SEQ ID NO: 12922 - protein, 295 aa, BradyrhizobiumColbertium
MEMHQVRYFLAVAQLLNFTRAAEECNVTQPSLTRAIKQLEAELGGDLFRRERPAAQLTELGQRMHPLLKQCYDAAAGARSLASSFKSGEIGALRIALTHAIDLGLLIPHLNEIKRQFNRLEFRFLRGTSREVGDFLKKGEAELGIAAEIDEAWDRLDVWPLFTESFELVVGNGHRLAGRSSIDLDDLRSEQLLNRTFCEHARRISVSLREHGIDIEHGPEVSNERDLIELVEADMGVAMMPHTSPVPDRLTRAVVAGLDARRTVNLYGVAGRQRTAVGNAVMRMLRGADWRQIAG

SEQ ID NO: 12923 - protein, 274 aa, BradyrhizobiumColbertium
MNMPLEPQTQQPGRALAGKVALVTGSTSGIGLGIARALAAAGADVVLNGLGIASEIGRAREQIAAEFGIKASYSPADMTKPKSIAEMVAAIIAQSGRLDILVNNAGIQHVAPLDQFPVEKWDQILAINLTSAFHTTRLALPAMRRSGFGRIINVASAHGLVGSPFKSAYVAAKHGIVGLTKVTALETAEEGITCNAVCPGYVSTPLVESQIEAQAKAHGISRDQVIRDVLLAQQPNKRFATVEELGALTVFLSTDAAASITGIALPVDGGWTAH

SEQ ID NO: 12924 - protein, 382 aa, BradyrhizobiumColbertium
MDDMQNDMQSKVTDLPGQVVLVLQGGGALGSYQAGVYQALHEAGIEPDWVIGTSIGAINASLIAGNRPEHRLARLREFWKRMEQQPVWDWRAAFPGFNEKLAYWSTVTHGIHGFFRPNPLAHAGDSYPLGADHAGYYSTAPLEKTLSELVDFDLANRCAPRLTVGAAHVGTSEMRYFDSRDGELTVKHVMASGALPPAFPAVRIDGELYWDGGILSNTPTEAVFDDNPRRNSLIFSVHLWNPVGPEPTTMAEVLNRHKDVQYSSRIASQIVRQQQAHRLRHVINQLAARLPESERSDPAVRELASYGCPTRMHVVRLLAPQLERETHTKDIDFSPSGITRRWHAGYAHTKSVLARKPWIGEFDPLAGVVLHEHMDEMPMAAE

SEQ ID NO: 12925 - protein, 316 aa, BradyrhizobiumColbertium
MVSASDLESALDRVRANAAGPVAGVFGPDTVTWRIDREAVIFLGAGRALLMQLAHPWVAAAIAEHSKTFADPIGRFHRTFDIVFAMVFGSLDRALLASRQLHRRHDMILGEMPETVGPFAAGSRYRANDIPSLRWVHATLVETALMAHDLVLQPLPGEERERYWAESRMFGALFGLTGDDLPADWSGFAAYTGAMVESDTLTVSPAAREIATQIFMGARPWLRPSRWYRAITARMLPERLRAGFGFELDAREIRSADNALRWIRRVYPKLPDRLRYVGPYQEAQARLRGEMQPDWMTRCLNRAWIGRPRMDVRGKG

SEQ ID NO: 12926 - protein, 462 aa, BradyrhizobiumColbertium
MDDFVRVGGLGAVSAALPRALRSFADIRIMLPGYRDIIEQLTHIQIVGRCPAFAEMPACSLGRAATKDGMPVYVLLCSQLYDRPGNPYGDESGRDWPDNDIRFARFASAAAELAMGTLDKNWAADLIHANDWPASLVPAYLAWRGAKLPSILTIHNLAYQGLFPKDSLRRIGAPESSFHIDGVEFYDQVSFLKAGLVYASHLTTVSGTYAREITTAEFGCGLEGLLRLRSDAAELTGILNGIDESWDPRSCAQLAQQFGAGDWAGKRANADYVRKQFGLAVSRGPMFGIVARLVHQKGIDLVLSAADEIVDAGGQIVVTGSGEPALEQALIDAHRRRPDAIGVAIGFNDAQARRIFAGSDFTLMPSRFEPCGLSQMYAQRFGSLPIGHQTGGLAETISDGETGFLFSKPSRESFLGGVRRAFSAFMAHDQLDAMRRSAMGRSFSWSISAGSYSALYRKLASV

SEQ ID NO: 12927 - protein, 398 aa, BradyrhizobiumColbertium
MQLADKHEGTTTKAFAGLRVLDFSTTIAGPHCTRMLADMGAEVIKIETEGGETMRTRPPLRQGCSTVFGQLNVGKKSVVLDLKSEDGRETVRRLAATADILVENFRPGVMHRLRLDYDRLRTVNPRLIYCSISGYGQTGPSAELPAYAPVIHAASGYDMAHLAYQPGRNRPDYCGIYHADVVTGTYGFGAIASALYQRSVTGLGQHIDVSMLESMLSLTVIELQSSQFAVKPPPRPMFGPTETASGYVMITVASEKTFQGLMAVIGRPEWISDPRFATYAARRENWADLMDGVEIWSRQLKTDACLAALGAAGVPASAYRTVAEALADPQLAHRQALSEVRDEGGSFRVLNLPFRMSGADTAPGKMIAVLGEHTDALRNEIGIASDTSIPPGKTAATN

SEQ ID NO: 12928 - protein, 549 aa, BradyrhizobiumColbertium
MRRSDFCSFLLRWRAFVVNLALKSFNDPKHRTSDPGGTMTNIAAAARKRAPLLLVAAFALAAPAQAQKPGGSITVGQELEIAGFDPLKVGVYDTSTFTAAAAIFDTLTTLNEKGEAAPKLAVSWTHSADYKTWTFKLRQGVTFHDGTPFNARAFKENFDRQKDPANKCRCAFYISNVKEVLAPDDDTIVYNLTDPSVNLPAVITIQSQNNVVHSPTAWKTKGDDYNRNPVGTGPYILKSWTAGDRMVLEKNPNYWDKGRPYLDRIILKPLPDAQSRFASLQSGEADIIWDDENDADNIMRAQKDPKLTVHTYKGSGAAVYAFNTKVAPFDDVRVRQALVMAIDRPKMSQAISNGLSRPASNPYGDGSWVKCKDDGALPFDVEKAKALIKDYGKPVEFKMLVTATPRGRMIGQVLQQFWKRVGANMEIEQVDQATIPSRAFTRQFQLTPWRIVDLADPDPQMYANFRSGSPLALAGYSNPELDKLLDHARVTAELGQRTEDYCAISRLINKEAIWFWTFQNTYYALSSTRLKGFPKIYNGVIDVSTTWLE

SEQ ID NO: 12929 - protein, 316 aa, BradyrhizobiumColbertium
MLNFVVRRLLAMLPVLLAVSLLTFLIASLLPGDLALVILGDQATPENVAALRRDMGLDQPLWWRYLSWLGQVMQGDLGRSFRTGQTVLQAVAERIPVSLQLMLMAEFIGLLIGVPLAIVCAARAGGAFDRFMTGGAFAMLSMPSFLTAILLIYLFAVELRWLPATGYVPFTEAPLANLRFFVLPALTLALAEWPGIMRVLRSDMIATLQEDYIALAKAKGLKPARILFVHALKPSSLTLVTVTGINIGRLLGGTLIVESIFALPGIGRLLVGAIYTRDLVILQGVVLLVACGFVIVNFIVDMLYAVLDPRIRHGHA

SEQ ID NO: 12930 - protein, 289 aa, BradyrhizobiumColbertium
MATLELSVQDEVASAPVRGNKFGFLFWVAGGWLAIILSLAILAPVLPLQNPVDMDMLERRATFSSEHWLGTDGLGRDELARLIFGARVSLTVGLIAPMIGLVIGGALGLVAGYFRGRFETVVVGSMDVLLAFPPLIFALAVTAYLGQSVPNLTVILGVLGIPAFMRVARAATLTLARREFVIAAEALGASHARILLRELLPNVILPLLAFFLLGVAVTIVVEGALSFLGLGVPPPMPSWGSMIGEGRESLDVAPRLAFLPAAALFLTVLAFNLVGDTLRALTDPRQGAL

SEQ ID NO: 12931 - protein, 330 aa, BradyrhizobiumColbertium
MSAPLLTIENVAVDLPTPRGNLRAVDHVNLSLEGGRTLGIVGESGCGKTMLSRAVLQLLPKKAKLAGRVIFDGQDLVRLDAERLRRLRGRDLAVVFQDPMTSLNPVLTIGTQLMETIQEHLELDAPVAKKRSIELLAAVGIPAPEQRLAQYPHQCSGGMRQRIAIAIALSCEPKLLIADEPTTALDVTIQAQILDLLAREQRRRHMAMIIITHDLGVVAGRADEVAVMYAGRVVERAPTSALFKRMHMPYTEALLAAIPKLDTAPHTPLPAISGRPPDPTRPLKGCSFAPRCRYAAGRCHEAKPELMDAETPGHRYACFHPIRMAEGIGA

SEQ ID NO: 12932 - protein, 323 aa, BradyrhizobiumColbertium
MMQLAVRPEPLLEVNNLVVEYGLGNKTVHAVSGVSLQVARGETLGLVGESGCGKSTLGRAVLQLRRAKSGRVLFDGEDLTAMEGEALRKMRRRVQLIFQDPIASLNPRRRIGDIVAEPLIIAGIKDAAERKRRVHEVLSAVGLDPDLVAGRLPHEFSGGQCQRICIARSLVLNPEFIVCDEPVSALDVSIRAQILNLLEEMKVRFGLTLLFIAHDLAVVKAVSDRVAVMYLGRLCEVGPSEQLFARPAHPYTGLLLQAIPVPDPDVRPAESVATGEPPSPIAPPSGCRFRTRCPRADQRCSAEIPELREVVPGQFAACHHPLA

SEQ ID NO: 12933 - protein, 355 aa, BradyrhizobiumColbertium
MKSFKVADFKAPLKEFDEATPQPSGTQVLIKVKAAGVCHSDLHIWEGGYDLGHGRKPLSLKDRGINLPLTMGHETVGEILAFSPDVKPTDQGDLKLGDVGLVYPWIGCGKCATCLAGDENMCLTPRSLGVYCDGGYADHMLVPHPRYLLNLKGLDPATTAPYACSGVTTYSALKKVEQHFDTPIVMFGAGGLGLMALSLLKAMGGKGAIMVDIDVKKREAAEKAGALATVDPKAPDALEQLAKKAGGPIRAVIDLVGNAATTQLGFDCLTKGGKLVIVGLFGGGATWALPLIPIKAITIQGSYVGNLRETQELLDLVRTKKVPPIPVTTAPLAKANDALLQLQQGAVVGRTVLTP

SEQ ID NO: 12934 - protein, 359 aa, BradyrhizobiumColbertium
MSANNAFHIAVLAGDGIGPEVMAPALEVLRKVEQKSGLSFRFTEAPAGANNYLATGKSMPDSTIKLCEEADAILLGACGLPSVRYPDNTEIAPQIELRFIFDLYAGVRPARLIPGVPSPIVGADQRGIDLVVIRESTEGLFASMGKGVVTHEDARETMVITRRTSERLFEFSFRLAERRKARGRPGALTCVDKANVFKAFAFFRGIFDEIAKKHPEVKTDRLYVDACSAMLVKRPWDFDVMVMENMFGDIVSDITASLIGGLGMAPSADIGDEYAVFQPCHGTAPDIMGQGKANPTGMILSAAMMLDWLADKHGLESAAEAGETIERAVDQIYAGGIKPMEFGGSNGTADITKAVLAAL

SEQ ID NO: 12935 - protein, 93 aa, BradyrhizobiumColbertium
MTLKFAVLGLAAVGGVALASGQALAAMPNGIPQADKIASGPPAEVEQVRWVCNPWGRCWWRPNYYRAYGYYGGPRFYGPRPWRWRHHHHWRRW

SEQ ID NO: 12936 - protein, 273 aa, BradyrhizobiumColbertium
MPDMFSTTGMPYADGRILQHAAGGVGVITFNNPDKRNAMSLEMWEGFGMALTALRDDDDVRVVILRGAGGKAFVSGADISQFEKARHNAAASEEYARRSAAQRALLADYPKPTIACIDGYCLGGGMQVAMLADIRLASHGSQFGIPAAKLGIAYGYDGLRHLVSLVGPSWARLLMYTGMRIDAAEALRIGLVERVFPVDELWGETMMIAETVSQNAPLAIKAAKITITQVLEDESRRDMEAVKAIGNACMDSEDFREGRQAFMEKRKPQFRGR

SEQ ID NO: 12937 - protein, 78 aa, BradyrhizobiumColbertium
MRRRRRHGQPGQGRAACIRPCFGCMREARRRWRLTANKKERPGRPETDPAQGHGRRHISSGLVQSSRAPLTRWIERRP

SEQ ID NO: 12938 - protein, 130 aa, BradyrhizobiumColbertium
MKAAAKRMKQRSAGKPDIELGKRIRLRRVEMKISQAELGEKLGVSFQQVQKYEKGVNRVGAARLQQIASALDVPVTFFYDGDNKAREVESLLFLDSAFSLRLLRAYSKIKDQTVQRQLVSLMESIAANES

SEQ ID NO: 12939 - protein, 349 aa, BradyrhizobiumColbertium
MHSLAERGVPPAERPKTNLSGLSDWDAARIFLEVVRCGSFRSAAERLSLSINAVRRRIDGFERQTGTTLFTRDVHGTHLTDEGALVVSAVERMEAATFDVLRASDSMANALSGEVRVAVTEGLGTFWLAPRLVEFQQAYPKILVDLHCAMRSADVSRHEADVAIHLSRPSALDIKLVRLGRMHLMFWASEKYIAKHGAPRSAAELIKHRLVLQFADELAAKETFESFFPGVPERDLLVMKTNVSSANYWAVANGAGIGVFPSYAIALGGKLIPLEVELNRPLDIWLSYHPGSGRIPRVRHMIDWLIDAFNPARFPWFKEEFVHPHEFKDSYMGEPLTQLFGGFSTEEQR

SEQ ID NO: 12940 - protein, 56 aa, BradyrhizobiumColbertium
MLSIVILDVRMKLKGIDGADLKALCDEMLRSAASEPPTPSKQTQDQPRRPLLRVVK

SEQ ID NO: 12941 - protein, 243 aa, BradyrhizobiumColbertium
MQNVSIPAALIAGLVSFLSPCVLPLVPPYLVYLTGATIEHVESDEPAEASKRAILLSALLFVLGFSTVFVALGASASLVGGLIRAWSAELSILAGIVIIIMGLHFLGLTRIGLLMREGRLPIPRPVGLWGAYIMGLAFAFGWTPCIGPILAAILSIAAAEATVAKGAGLLAVYSAGLGIPFLIAALMIEQFSALFARMKGHLVNIERAMGVLMVITGIGFLTGAVSNVSIWLLETFPALQTIG

SEQ ID NO: 12942 - protein, 347 aa, BradyrhizobiumColbertium
MLLGLALLAGLVPASAQTLTKLKAGMVTGIDQIGLPIALERGFFEKYGLDVTIARPYATGVDALNALQAGESEIVQVGVPMIGAVLRGMDLVALGNYSGNATKAGSDATMAIVAREGSGIVKGDLSTLKGKKIAASFGTINHLYILATLEKAGLKPDDVTLVNTPPPDMTVALLAKGIDAFSGWDPWPIVAGKDVPGAVEIIRGGDVISYIGFNVALRPWVQANGETIEKFLAAVSEADQWMRKNPKLAAQVATRWIPGLKQEVAETAMQFNIQQADRRLSANNYRALWSAEDRLSRLGILKSTFDVNAHIEPKHILKVMKDRPELFADLPPIPEAAAITPGYVFKP

SEQ ID NO: 12943 - protein, 110 aa, BradyrhizobiumColbertium
MSIASEALRSPKLRIALGAIAAWALFQLWLTIAAPAKISPELKGTSEKVNVQIELPFTPERFHVLAFQQYGRVSGTDEHSIELRGVKRTDLNAVARPYWVTAVGPIKEGG

SEQ ID NO: 12944 - protein, 252 aa, BradyrhizobiumColbertium
MKTLSLRNLGKTYFDPYAGAHVTAVHDVSLDVEPGEFISVVGPSGCGKTTILNMIAGFIPYSKGDILLDGKPVHGPGPERGVVFQSFALFPWKTVLDNVGFGPKMRGVPKAERDRIAREYLALAGLSHAAHRYPNELSGGMQQRVGVVRALANNPDVLLMDEPFASVDAQTRMTLQEELTRIWQERKPTVIFITHDVPEAVFLANRVVVLSKGRVLDQIAVDLPRPRVWDELVKDDQFKQLSARVLQMVRAA

SEQ ID NO: 12945 - protein, 268 aa, BradyrhizobiumColbertium
MNLMLQIWAGYARLTRRWPGFAAIIPFIPVLALWTAVSEAGLFPRAFFPGPADVLRAFVTLTYKGILPDYLQDSLIRLATGAAVCMALGIPLGILIGTSRWAHRICWPVLLFFQAIGDIAWLPILLIWFGFGLTTMTFVIVYTVLFPVVLNTVLGVGSVPRDLSRAALSLGASRARVLWEVTLPAALPNIITGLRNGLGYGWRALIAVEMIVGTSGIGFMMFDARRAGSTVEIILGMIILGLLWYIVDAWILAPLERATGQRWGLVTS

SEQ ID NO: 12946 - protein, 273 aa, BradyrhizobiumColbertium
MQVTGSVKGRSSRLIRSVSSLAGAAMFVAPLIALVAIWAIVVPLFNVNPRVFPSVGAVGTAALDSIRDGTLFAHVAASLLRVGLGTLIGIATAVPLGIAMGVSPTVAAFLTPLFRFFSVLAGIAWIPIATLWFGYGFGAIVFVIFNAVFFVVAYNTLLGVRTIPHSLRNAAASLGAGRWTLLTEVLVPGALPNIVTGIRTGLGFAWRGLIAAEMIATNVGLGYMLFVARDFYRTEVIVFGMIVIGVLWLLIDRLLLVPLERATIERWGMVRRA

SEQ ID NO: 12947 - protein, 273 aa, BradyrhizobiumColbertium
MARARPSPVDKLIKPGRIRAVLTTLGREIAQDLIPVGTTLPPEPELETRFGVGRGVVREAIKTLAAKGLVSVRPRHGTQVLPRHEWSLLDRDVLSWLVGQDEPDRDLLLAIQEVRSIIEPAAAALAAERATKNDRWRIDTALAAMQTAKDQASALAADKAFHLAILDATHNPVLQGFRGAIDTILSTVFTVAVVSPGGWFRDNLPNHVAAARAIESGNPEKARAAMERLLGYTRLKLSNRKTVIAAASRRAGGPNQRVTRTSGVKRKRKAHGA

SEQ ID NO: 12948 - protein, 490 aa, BradyrhizobiumColbertium
MVAGTMLPLIVFAVGLAYSNYRQDRSEATRRVLETVRSMRLVLDSEVQRMTGGLQVLALSNSLQSGDFAAFRRLAAEFTGQYGDDSVLLVADRSGDQLFSSVTPGAANLPARNNREIVERVFARKAPQYSDLFVGSTKKQPIVTVEVPVLRNGEVAYALSFSPPIALFQRLVEQQRPNDQWTVSLLDTKARVFARTPNPVDTFGKQASGALYDAMSRTPEAALSTISLDGVPLSSAFTKSQLTGWTVVAGIAESSLIAPLWRNVAITSLIGGILLLVGLTFAVRMAATIARGEMLHNLLIEELNHRVKNTLALMQAIAVQTFRSASRDERIKFEGRLGALAEAHNLLSQEKWAGSELRDVIARALQPFLLSNPDRIRMAGPPVPLSPRLAVVLSMIVHEIATNAAKYGALSNETGRVTLNWEIIADAPKPRLRLIWTESGGPPVTAPVQRGFGSRLIERSARDQLGGEATVDFLPRGVVCTVICTLDEAP

SEQ ID NO: 12949 - protein, 332 aa, BradyrhizobiumColbertium
MKRRSFLAGIGATSAAATIGMPSILRAQGAITLNGAVQFNDDHAFNRALIRFEELVKKYYGKPVNFTLHKNSSLGLEKQYFEYMSQGKAVDYGIVSPAHMSTFAKAAPFIDAPFVFKGIEHMNKVVEANILAPIADEVAAKAEVVLIGYAGGGIRNIFANKPLKNLADLKGLKVRVQGAPIWSKTFAAVGMSPTVIAYNEIYNAIQNGVISAGENEAAGVEAMKFYEVAPHLNLTQHAVSIRPICFSVKTLKALPKDLQDAIMKAGKEAGDYGRQLESSEEVVKLDALEKAGKLKRVPFEERDAMKKLADPVMATYAKEIGAEGIFEKINVV

SEQ ID NO: 12950 - protein, 171 aa, BradyrhizobiumColbertium
MSEMHVPSTPSLWRRLTAAYAKLLEFLLAVCVGVLVVPVTLQIISRYTPFIPSYIWTEEMARFLFIWTIMIGAMVGIREAQHFEVDVWPDLSRRSEAAVRIIARVGVLALALVFVWAGIEFTRFAWNRTSELADLPLWLIHLAWPVAGVTWIVFAGEQMVDELRVLFGAGR

SEQ ID NO: 12951 - protein, 439 aa, BradyrhizobiumColbertium
MNGTVLSAGQAAMVLFGVFVGLLIVRVPVAFALGLACVPILLIEPRLSLMMLAQETFNAYNSFILLAVPFFLLTANLMSIGGITDRLVALSRSMVGHWPGSLAQINVVLSVFFAGISGSSTADAASQSKIFIDAQTKEGYDLSFSIAITAASAVLAVVIPPSILMIVWGGLISTSIAAMYLAGIVPGLLIAGAQMATVHVYAVRRGYPTYPKSGWVEMRCAIWRSIPALMTPFIIVGGILLGWFTATESACVAVLYSVVLSAFFYRETGIRELYRALLDTGRLAGVALFCVGTASAFGWLLAYYRIPQELLANVSTWGMGAVAAGFFIAFCFLVVGCFLDAIPAIIIVGTVLEPLAKSVDLHPVQFAIISIISLAFGLVTPPYGLCLMIACSIAGVRLRYALKDTVIMLIPMLLVLAAVIVWPSVSLFLPRLIVPEMLK

SEQ ID NO: 12952 - protein, 424 aa, BradyrhizobiumColbertium
MLAPTPASPESVGMSKAALDRVDAHLKSRYIDAGRFPGTQLLVYRRGKVAHSSVQGFADVERKVPVKDDTIYRIYSMTKPLTSVAFMMLVEEGLVAIDEPVAKYIPEWKDLGVFVAGTYPAFLTRPPSRPMLIVDLLRHTSGLTYGFQQRSNVDAAYRTEKIGEVEKSGTLQTMIESLAKIPLEFSPGEAWNYSVSTDVLGYLVGKISGMPFEQFLKQRILDPLGMTDTDFHVPASKAHRFAACYSADPGGGMTFHAGQRREGLTLQDDPTTSSFLSPPSFISGGGGLCSTVADYLTFCRSLLNGGELGGVRLIGPKTLALMTSNHIPGGRSLPEVSRSLFSEAAYNGIGFGLGFAVTMRPAETLIAGSPGEYNWGGAATTSFWIDPAEELITIFMTQVLPSSAYPIRRELRSMVYAAITESNL

SEQ ID NO: 12953 - protein, 305 aa, BradyrhizobiumColbertium
MTQFNETELTEAVVRSFDQTPDRRAKFLLQELVKSLHDYVSKTGLTFEEWEYAIDFLTRTGQKCTDTRQEFILLSDVLGVSMLVDAVNHRDRDGATETTVLGPFYVGEHKVTAHGTDISPNNQTGEKMFVQSRVTDLEGKPLAGVPVDVWHADDDGFYDSQKPNYDEVGASARARFITDDDGRFFFRTILPCSYPIPTDGPVGEMIVQTKRHPMRPAHVHFLVNAKGHEPLITHVFIGGDKYLDSDVVFGVKNDLIANVEPRNDPEMPDGTKANGQWHLMTYEFHLKPGGGMAPKPLGTKAIEPA

SEQ ID NO: 12954 - protein, 581 aa, BradyrhizobiumColbertium
MPVMTMTRGLLISVGQHSDKGRKPVNQDFHGVLIPEEPLLSLKGIAAVLADGISSSTVSQIASESAVKSFLMDYYCTSESWTVKTSARRVLDATNSWLHAQTRKSQYAYDRDKGYVCTLSAIVIKATTAHIFHVGDCRIYRVAGKALEQLTDDHRIIVSSEQTYLGRALGINPQLEIDYQTVEVQAGDTFLLATDGAYEFVDARFVTSAINEHAGDLGAAARTIVEEAYRRGSDDNITVQVLRVDAVPQREPADILSQNSQLPLPPLPEPRAIFDGYRIVREIHGSSRSHIYLAVDVETDEPVALKLPSIDLRDNALYLKRFLMEEWIARRIDSPNVLKPLSRSKRRSYLYVATEFVEGQTLKQWMTDNPRPDLETVRRLIEQIAAGLRAFHRMEMLHQDLRPDNILIDKTGTAKIIDFGSVRVAGVAEAAPCEEADEILGTVQYTAPEYFLGQGGSPRSDMFSLAVICYQMLTGKLPYGTQVARIRRKADVRRLQYRPADDDRNVPAWVDGALKRALHPDPYKRHEDLSEFVHELRTPNPAYLDTRITPLLERNPLMFWKVTSAALACAVIVLLALLHSG

SEQ ID NO: 12955 - protein, 279 aa, BradyrhizobiumColbertium
MSYLAPSEFVTKMVDAGESKIFMSTRDTIIRAYMAGAILALAAWFAVTITVNTGQPLIGALLFPVGFVMLYLLGFDLLTGVFVLSPLALIDKRPGVTFGGVLRNWGLVFVGNFAGAFTVAFMMAFVTTFGFTQAPDKVGAAIGNIGEGRTLGYAAHGVAGMATLFMRGMLCNWMVSTGVVGAMISTSVPGKVIAMWMPILVFFYMVFEHSVVNMFLFPSGLLLGAKFSIMDYLIWNEIPTVLGNLVGGLAFTGMTLYATHVMTLPKRQAGKATRPRVAA

SEQ ID NO: 12956 - protein, 439 aa, BradyrhizobiumColbertium
MTKRTRRPSETTGLSRRQLLKATGSTAALLAAAKLSFPAGAFAQDAGPEVKGAKLGFIALTDATPLFVAKEKGFFAKYGMPDVEVQKQASWGTTRDNLVLGSEGNGIDGAHILTPMPYLISAGKVTQKNQPTPMYILARLNLNGQCISVAKEYADLKIGVDTAPFRPALEKKKSSGKAVKAAMTFPGGTHDLWIRYWLAAGGIDPDKDIETIVVPPAQMVANMKVGTMDCFCVCEPWNLQLIHQNIGYTAITTGELWDKHPEKSFGMRAAWVDKYPKAAKALLMAVMEAQQWAEKMENREEAAVICAKRQWINCPVDDITDRMKGKFDYGTGRVVDNSPQQMRFWKDHASYPFQSHDLWFMTEDIRWGKYDAGFDSKALIAKVNREDLWKDAAKTLGVAAADIPTSTSRGKETFFDGKVFDPENPAAYLKSLAIKRVEV

SEQ ID NO: 12957 - protein, 298 aa, BradyrhizobiumColbertium
MNMTATKIEVETATPAATAAPVVALMPKRPPRTEAYARMVRETAVRVIPPLVVIALLTLIWELVCRRAGSALPPPSKVFKDTKELILDPFFDNGGIDKGLFWHLSASLQRVAFGYSLSAIAGIALGVLVGQSVWAMRGLDPLFQVLRTIPPLAWLPLSLAAFRDGQPSAIFVIFITSIWPIIINTAVGIRNIPQDYRNVAAVVQLNPLEFFAKIMIPAAAPYIFTGLRIGIGLSWLAIVAAEMLIGGVGIGFFIWDAWNSSHISEIILALFYVGIIGFVLDRLIAGLGKVVTRGTAQN

SEQ ID NO: 12958 - protein, 264 aa, BradyrhizobiumColbertium
MTAYLKLDHIDKVFTRGAATTEVLKDINLTIEEGEYVSIIGHSGCGKSTLLNIIAGLTRATTGGVLLENREVNSPGPDRAVVFQNHSLLPWLTVYENVKLGVDKVFAKTKSRAERDAWVMHNLSLVQMAHARDKRPSEISGGMKQRVGIARALAMEPKVLLLDEPFGALDALTRAHLQDSVMALHQKLGNTILMITHDVDEAVLLSDRIVMMTNGPSARIGEVLDVPLARPRKRLELATNAAYLKCRQRVLEFLYERHRFVEAA

SEQ ID NO: 12959 - protein, 156 aa, BradyrhizobiumColbertium
MARTKADRNRQENIMTPEQVTLIQQSFSKVAPISEQAAVLFYDRLFEVAPSVRAMFPEDMTEQRKKLMGMLAAVVGGLSNLESILPAASALAKRHVDYGAKAEHYPVVGATLLWTLEKGLGEAWTPELAKAWTDAYGVLSGYMISEAYGAQAQAAE

SEQ ID NO: 12960 - protein, 405 aa, BradyrhizobiumColbertium
MSEPLVIVGNGMAAARLVDELAKTALGRYAVAVIGEEPRLAYNRVLLSSVLAGETGSHEIELRPAEWWRNRGVTVRYGYRVTEVDLGRRELKIAGEESMEYSKLVLATGSTPLRLNVPGADLAGVHTFRDTRDVDLLLTLAAARKRVVVVGGGLLGLEAAYGLAKAGAPVTLLHLMDRLMERQLDGPAADLLKTLVERKGIRILLNASTAGIHGDGRVEAIELADGSRIEADAVIFAAGIKPNVALAKEAGIAVNRGVVVNDVMRTSSSDVFALGECAEHRGICYGLVEPAYEQARVLARHLAGRPAAYEGSVISTNLKVSGVSLFSAGDFMGGEGSESLVLSDRSRGTYKKLVIADGRLTGAVLIGDTADALWYLELIRNRDKVAAIRTGMMFGRALALPSKAA

SEQ ID NO: 12961 - protein, 901 aa, BradyrhizobiumColbertium
MTAINPNLRTIRTTCPYCGVGCGVLATPDGKGGAAIAGDPEHPANFGRLCSKGSALGETIDLQGRLLYPMIRCKGVLERVAWSDALDHVAHRMQHIVARDGADAVGFYLSGQLLTEDYYVANKLMKGFVGTANVDTNSRLCMSSSVAGHRRAFGADTVPGCYEDLDQADLLVFVGSNAAWCHPVLFQRMLKNRQERGARMIVIDPRRTDTAGDVDLFLGLKPGTDTALFSGLFVHLADCGALDRAYIAQNTSGYDDALARARNIAGSVTATALATGLSEQDVAAFFKMFRDTEKVVTLYSQGVNQSAQGTDKVNSILNCHLATGRIGKPGASPFSLTGQPNAMGGREVGGLANMLAAHMGFTPPDIDRVRRFWKAPRIATHEGLKAVQLFEAINRGEVKALWVMGTNPAVSLPDADMARDALKKLELFVVSENVLCNDTVAAGPHVLLPALAWGEKSGTVTNSERRISRQRAFLPAPGEARPDWWILSETARRLGFGDSFNYKSAADIFREHAALSAFENNGNRDFDIGALTSLSDEAFDALQPVQWPVRGGGDPVERFFAQGGFFTNDGRGRFVAPEVPALRGETGPSRPLRLNTGRIRDQWHTMTRTGLSPRLGAHLPEPFVEINPDDAGKYGIAHDGYARITTDYGQCILKAVVSERQQRGTLFVPIHWSAMNASHGRVGALVHSFTDPFSGQPESKATPAAIAPYEFVFRGFALSRKQLELPSNLLWTRVTVSGGFGYLFADNGDLSRWPAWVGTVAGEDVAEYRDIGGGVYRAASFAGDRIETCLFVGPAHDAGDWEVVKGAFAADHVTDEQRRMLLSGKSSEGAASTGPIVCACFGVGRGTICDAIVAGACTAAEIGAKLKAGTNCGSCIPELKRLIAATDAAPAKETKLANVAG

SEQ ID NO: 12962 - protein, 43 aa, BradyrhizobiumColbertium
MRYGQPLCRASPKGMLLRPEHDIVAFAQRIHAVIASAAKQSRP

SEQ ID NO: 12963 - protein, 279 aa, BradyrhizobiumColbertium
MNTNPFGKTGVNVSVIGQGTWYLDHGDRKRAIAALQRGLDLGMTHIDTAEMYGDAELVIADAIAGRRDEVFLVSKVLPSNASRRGTIAACERSLKRLRTDRLDCYLLHWRGSYPLEDTVAAFEELVKSGKIKSWGVSNFDADDLDEILDVAGEGRIACNQVLYHLKERAIEHAVIPWCERHGVAVVSYSPFGHDDFPASSSKGGAVLARIAEARRATPRQIALGFLTRATTVFAIPKASSAEHAAENAAAGDLVLTKDEIDALDAAFPRGPKPRGLPML

SEQ ID NO: 12964 - protein, 350 aa, BradyrhizobiumColbertium
MNAAHLSFFTTVLDSHFARVPAVTPPPAAAARLDTIPMPVPEKKQETRRAPARVDHPFRGIALVLLSTIFLGCSDVTAKYLSTSLPSIEITWIRFLTFTLLFTPVMLPATPLYAMRTRRPGLHVMRGAALLGSSLFFITGLGFLPIAEASATGFVAPLFVTALSIVFLGEKVGMRRWLATALGLIGVLIILRPGTSAFHPAASFPLISAACWAGTLILTRMMSGREAVVTTMAYSSLTGLVILTALVPFVWVTPSWTAIALGIFIGVASTAGQWIVVLAYRYGDASVLAPFSYTQLLWVSILGYFIFGEVPDVFTITGAAFIVASGLYIAHRERVRRAQLLVLEERSPNA

SEQ ID NO: 12965 - protein, 359 aa, BradyrhizobiumColbertium
MRAAIFRNGEIVVDRMAEPKPGNGQVLVKTLACGICGSDLHARQHAHRMVDMARKVGRKPMDLSRDVVFGHEFCCEIVGYGPGSERRLKPGTRVCSLPALVTPEGIQGIGYSNDNAGGYAEAMLLSEALLLEVPNGLAPEHAALTEPLAVGVHAVAKADISGGEVPLVIGCGPVGLAVIAALKLRGLHPIVAADYSPARRALAAKLGADVVVDPRVSQPYATWAEHAQMSEAEKAARSPFRAMLPALKPAIIFECVGVPGLLQQVFEGAPRDARIVVVGVCMETDKSEPMLGIMKELNVQYVLGYTPEEFAASLRLIAEGQVDAAAMVTAEVGLDGVAKAFADLANPEMHTKIIVQPWR

SEQ ID NO: 12966 - protein, 541 aa, BradyrhizobiumColbertium
MQGLMMDMPLLISGLIQYAADYHGEAEIVAREIEGDIHRYTYADAHPRIKRMALTLKRLGMKPGDRVGTLAWNTHRHFEMFYAAPGMGYVLHTVNPRLFPEQLVYIINHAEDRLLFIDRATLPLVEAIAPQLKTIESYVVMSSRERMPETKLANVHCYEELLEREDDSGFAWPLFDEKSASTICYTSGTTGNPKGVIYSHRAAILQTMTCCNFDFLPGHIEGVREVMMPMAPLFHGNGWNMPFTAPYTGSKLVLPGRNYEPDKLYELLEGEKVTLSAGVPSFWLILLDWLGRTGNKFTTLRATLSSGSAPPRAMVEKLKREYNIDYIQAWGMTEALGCSMPGLRPGSEHLSEKEKFDRRQVSGRACFGTALRIVDDAGNELPRDGKTVGHLRARGPWVASGYMKLNEGLDRDGWLITGDMAVIDPQGHVTLTDRSKDVIKSGGEWISSIQLEDIALSHPDVLQAAVVAISHEKWQERPLLLVVRKKGATVDGKTLLDHMRPKIASWWMPDAVEFLDEFPMTGTGKVLKSALRERFKEYRVT

SEQ ID NO: 12967 - protein, 617 aa, BradyrhizobiumColbertium
MSAERRKTGTSGASTVDVSALRARYRDERDRRLRAEGKAQYIEVTGEFGRYLDDPWADPGFARDAVSEATEVLIVGGGFGGLLCGARLREAGIDDFRIVEKAADFGGTWYWNRYPGAACDTESYIYLPLLEETGYMPVRKYARAPEIYEHSRRIGRHFGLYQRALFQTVISRMTWQEREARWLVETDRGDRIRARFVILAGGPLSRPKLPGIPGIETFKGHSFHTSRWDYGYTGGSADGDLTGLADKRVGIIGTGATAVQCVPYLGRSAKELYVFQRTPSAIGVRDDRPTDQAWAQSLKPGWQRERMDNFTAVISGEPFERDLVQDGWTGLLGEILLAPRRQQQPVTSMEEALKVIEQADYRKMEEIRARVDAVVKDEATAAALKPWYKAFCKRPCFHDEYLDTFNRSNVHLVDTGGHGVERITENAVVAGGKAHELDCLIYASGFEVGTDYARRMGFEVYGRDGMSLSERWQDGVKTLHGFYSRGFPNCFLIVTVQAGQSANFPHIIDEQSQHIAYVIKQARERKVRTLEPTLAAENAWVEEVVKAALGRQTYLAECTPGYYNNEGVFDPIAARNSQYWRGPVAFLRLLDKWRKEGNLEGLELSHDQVMESPPSTG

SEQ ID NO: 12968 - protein, 272 aa, BradyrhizobiumColbertium
MIRGRVVAGAVLGAMTLLGFLASVAEAAQCGSSPAGFETWKREFGAEAQAKGIGPTALSALMQTNYASATIAADRGQRSFSLTLDQFLAKRGAATIVAKGRQLKQSQAALFASIQQRYGVPPGPLLAIWGMETGFGSQRGNQNMLSSIATLAYDCRRPEFFTDQLYAALKLIDRGTLSASTRGSMHGEVGQTQFMPKSILAYGTGNLEVAANALNSTANFLKAHGWKAGAGYQPGEPNFAAIEAWNAAGVYQKAIALMGRQIDEGGGAAALR

SEQ ID NO: 12969 - protein, 73 aa, BradyrhizobiumColbertium
MATQIVMDQTGDTRHEFDPGNAEALARAERRFRELTGAGFTAALRTGPGEVTRIRSFDPTAQETLFYPRLVGG

SEQ ID NO: 12970 - protein, 140 aa, BradyrhizobiumColbertium
MILAVWLRAPARARLHALRELYRRFFGENTPDARGRRLLAEWLSPKQRAQFEEHRYFDVVGCDTGRTYRIHYGTAANVHEIDCDGRPTTGWCFVPSGFLVPGDVMLAQKIALETDERNALALANRFPPATHSEHFYRRPF

SEQ ID NO: 12971 - protein, 155 aa, BradyrhizobiumColbertium
MRGKIMTQVEWFDDLTVGMRFKSPECLVTEADIKRFAIEFDPQPMHLDHEAAKATLFKGLAASGWHTAAIAMNLAIQARPFGPHPLIGAGVDGLRWTMPVRPNDRLHLVGEVMSLTPSKSKPQGIALVKWTMFNQNGEEVYTFTPIAIVPRRDSR

SEQ ID NO: 12972 - protein, 1062 aa, BradyrhizobiumColbertium
MNLSKFFIDRPIFAGVLSVLIFLAGLISLFAMPISEYPDVVPPSVVVRATYPGANPKVIAETVATPIEEQINGVENMLYMSSQATTDGAMTLTVTFRLGTDPDKATQLVQNRVQQAEPRLPAVVRQLGIITKKSSPDLTMVVHLLSPNGRYDMTYLRNYAVLNVKDRLARIDGVGDVQIYGAGDYSMRVWVDPQKAAEHGLTASDIVRAIQAQNVEAAAGVVGSSPNVKGIDLQLSVNAEGRLSNEEQFGDIVVKTGTRGEVVRLRDVARIELGASEYGLRSLLDNKQAVALPIFQAPGSNALQISDNVRATMAEIKKNMPEGVSFQIVYDPTQFVRSSIEAVIHTLLEAIALVVLVVILFLQTWRASIIPLLAVPVSIVGTFAVMHVFGFSINALSLFGLVLAIGIVVDDAIVVVENVERNIESGLSPRDATYQAMREVSGPIIAIAMVLIAVFVPLAFISGLTGQFYKQFALTIAISTVISAINSLTLSPALSALLLKGHNDPKDRLTLIMEKSLGWFFRGFNKAFTRSSENYSGSVGKVISRKSAVMGLYVVLVGLTAFLFQQVPGGFVPGQDKQYLVGFARLPDGASLDRSEEVIRKMSDIALTQPGVESSVAFPGLSISGFTNSSNAGIVFSTLKPFDERKDPSLSGPAIAAELNKKYAGIQEAFIAMFPPPPVNGLGTIGGFKLQIEDRAGLGYDALNEATNAFMAAMQKAPEIAGVFSSFQVNVPQLFADIDRTKALQLGVPVTEVFNTLQIYLGSYYVNDFNKFGRTYSVRVQADAPFRARADDIRQLKVRSSSGDMVPLSALLTIRQSAGPERAIRYNGFLSSDINAAAAPGFSSGQAQEAATRIAAEVLPPGFAFEWTDLTYQEFIAGNSGIWVFPLAILLVFLVLAALYESLTLPLSIIMIVPMGLLAAMFGVWISKGDNNVFTQIGLIVLVGLSAKNAILIVEFARELEFAGRTPIRAAIEASRLRLRPILMTSMAFIMGVLPLVLSTGAGSEMRRAMGVAVFSGMIGVTVFGLFLTPVFYVLLRTVTGMKPLTHHGSQTSAAPVQGLAE

SEQ ID NO: 12973 - protein, 413 aa, BradyrhizobiumColbertium
MPPSQHTSRTGRFRRLLAGVAIVGALAAAGSIATGRYFHAAQATAPAAAAEQAVSVTVATIEPRRTVLWDDFSGRLEAIQRVELRPRVAGAIMSANFTEGALVKAGDVLFKIDPAPYAAEVDKAAAQLEAAKARVVFTQSELERGAQLVGNAVVTRRDYDQRENANREAIANVKAAEATLQTAKLNLDYTEVRAPVDGRVGKIEVTVGNLVAAGTASPVLTSLVSVNPIYASFDADEEVVLRALNSIADASGRRGKLDQIPVEMTTSGGLSAKGHIQLIDNQVNGQSGTIRVRAVFRNDDGRLIPGQFARVRMGQPKQQALVMIDERAIGTDQDKKFVMAVGDDNRAVYRLVTLGGSVDGLRIVTSGLKSGERIVVNGLQRVRPGALLKTEVAAMGARGQQASNHSKQDVVQR

SEQ ID NO: 12974 - protein, 201 aa, BradyrhizobiumColbertium
MGMGRPREFDAEKALDQAMEVFWRHGYEGATIAQLTEAMGINPPSLYACFGNKEGLLKAALDRYTKLRNIWMDEVVAAPTARAVAERMLMGIAEKQTDPANPPGCLLVQGGVACGTGSENVPFELAARRAQNEEQLRERFIRAKAEGDLKPSCDPAALARYVSAVSVGMGVMASSGADREALRQVASVAVQAVEAQSERAR

SEQ ID NO: 12975 - protein, 301 aa, BradyrhizobiumColbertium
MTFDLTFLGTSASVPSAERNHPALLVEAAGKRVLIDCGEGTQRQLLRSGAGFRRLDRILLTHAHLDHVLGIPGLFSTLGLRQASDAMTIHGGQGTLDIVIRMLAGLWGVGRAPIAVQFEGLAEGQVLACGEFTIDCFPVRHRDTDSFGFVFQIPPRRHLRPDRLVALGVPDGPLRGELAAGRPVVLGGRTIDPGDVQGPPSGGRKLVVIGDTETTEGLSQYAANADMLVIEATFLERDASTARNYGHLTAAEAASFAAANNIGQLVLTHMSGRYQDEEILAEAAKIFPNTRIAADFDRVVV

SEQ ID NO: 12976 - protein, 334 aa, BradyrhizobiumColbertium
MSAIDRCGLYEVVPAGFDLLKASPAELDRYGIPQKPDVITEPELFEFWTELVSAPFAAKQPTFASIHPPSLGGALQSMLNWSGALISTPWPQQIVFAAGAWNVPHVRRPSVSALGTPADDPKSLVWVGLDGRNGTLPNVSLPQIGTGHWPDRKPNHFAWWDWWHNARPDEATTESAAPAKPQAITVIDNLLIETGHKILAGLAVQVSGDILYFIKNQRTGEFRSFLAPPPSGEIEPLGSSAEWVMERPTDPESGALFPLPDYGAVDFSYCVARAADGAVGSGRMMTLADNALLIEMRETFANPDRTVIVSRPALRQEHAEAPIGVRCTFQDPVA

SEQ ID NO: 12977 - protein, 325 aa, BradyrhizobiumColbertium
MAGGYGGYGGYGGYGGYGGYGGYGGYGGYGGNAGGSGGAMFSDRVDRPFITERDVAGARFDAGGFGMKLWSTRWYAWVVMSDLASRADWLDRLGGFALLGAGPTPWAGAIEDDISALRNMAVHERAAALGDIVSEADEFISKFLHLVSATPTTHPATSRMLIVADALTALITMHYKAHFNRPRPTQVVPGLMSPIQHGGHASFPSGHATQAHVFAALLTKVIPPSLGFPAPAPGAAGRTTIGKSLGALADRVARNREIAGLHYRSDTVAGVKLAGAIIDRILLDRTYLPKFTKLVDNARDEWQHTGVFDEGKEAGISVGEKNVRD

SEQ ID NO: 12978 - protein, 759 aa, BradyrhizobiumColbertium
MLASRISIIPQPLAISRPKMYDSGIAAAPAGCIPELTGHWLRRPSEPAFCVLPSLATRTRPSYTVLDTIDQGWDEMSGVNGDKAVGKGGANRLTLKIIGAFSASVDGQEVGLGRKAQALLGYMILSSSRQLPRSKLVGLLWSEKDDVLAKGSLRQSLSQIQRELRALGCSHFHADQIHVALDVEHVTCDLVEIISDAERGMVHPLLLARERLTDDILDDLESVDPAFSEWLAETRTLIHERLIHALTRLLPDESDAVVTPTAEAAAKAIHRLDSENERAIRVLIRSHLASGSIGAALAIYARLWRQLEDAYDIEPHKLTQDLIAGVRQQQPEAVARPVPFSMAAPAVASNGSDVSRPSIAVLPFRALTPALEPQFTIGVVDSVVQALSGLKELFVISRGSTMIPVSQTPDLRAIGRDLNAQYLLHGSIQRAGDQIRISTELVATETVEVVRVDRLSGTAADVFDLQDRIAVEVIRSLAPQVRDRELHRAMQKRPDDLDAYQLALVGYDQMFSPDYTTFVTARTNFERAHVLSPNWAPPLSYSAIWHMQRVARGWSANALNERDTARALAERALERNSEDPLANAVGGYTLSQCKHDHVGALGQLDRAIEITPNLALAFAYRAAVHVRCENYDDALRDATVNLRLSPRDRHAWFAEMILAQAYFAMQDLASAVEHARRVATQLPNNQVNLRVLVAALVESGRLHEAQTFARPLMPEGELDLKWISTSPWPKPTLARVEAALSRLAAALRHGNSQSDTDKS

SEQ ID NO: 12979 - protein, 106 aa, BradyrhizobiumColbertium
MTVLLRNTFRAWIDCVPGAPPKLIMIGDVRVPANGWQARLTRRSPQGINPKILILDVNAQEPSGEARQEITTIPLRYEESPPQDEYGQVMIANGKGEIVVHVGRTH

SEQ ID NO: 12980 - protein, 120 aa, BradyrhizobiumColbertium
MPYVDGFILAVPKDKIEAYKALATTACALWMEHGALDYVECIGDDVPYGELTSFPRAVMAKDDEVVVFAWIVYRDRESRDAINKKVMEDPRMKFEGMPFDGKRMIYGGFTTLLRANDVVG

SEQ ID NO: 12981 - protein, 186 aa, BradyrhizobiumColbertium
MPIQFKFVALAAALLSAGAAHAQQGAKKNAAPPVAQPAPAPTQAQAEGTPGQPGWIVRCTSASREAPLECAMEQNAVLTKTGQTVVLINIRIAPDTRTPIALLQLPLGLNLPVGAKLQVDEGKTFDLQIQTCENRGCYASTPVAPDLLAALRSGKQLKVSFQNMAKETIAIPMPLVDFAAAYDKIK

SEQ ID NO: 12982 - protein, 1046 aa, BradyrhizobiumColbertium
MMGGGISAPFIRYPIGTSLLMAGILFVGLVAYPLLPVAPLPQVDFPTIQVTANLPGGSPETMASSVAQPLERQFAQIPGIAQMTSTSYLGTASITIQFDLNRSIDAAANDVQSAINAAGGQLPKNLPSPPTYRKVNPADAPILILSATSDTLPLTTVSDTADTQLAQQISQISGVAQVFIGGQQKPAIRIQIDPAKLVAKGLSLEDVRSQIAITTVDSPKGNIDGERRAYTIYANDQLTDAKEWNDVIVAYRNGGPLRIRDIGQAIRGPEDAKQAAWANGKRGVFLVVFKQPGANVIETVDRIKATLPRLVAAIPSAIKVELMSDRTQTIRASVDDVQFTLLLTVFLVVMVIFIFLRSFWATVIPAVTVPLALLGACAMMWVAGYTLDNLSLMALTIAVGFVVDDAIVMLENISRYVEQGESPMAAAYRGAKEIGFTIVSISISLVAVLIPLLLMGGIIGRLFREFAVVLAMTIFVSMFVSLTLTPMMASRFLRAHGEVKHGRIFQWSERGFEALLRGYAYVLDIALSWRRTTLAVFFATLALSIYLFVLIPKGFFPQQDNGLITAASEASQDISFKEMQRKQEALGQIVLSDPDVAAVASVIGGSGRAGNNGALYITLKPRNEREASAQQIIARLRPQFDKVEGARLYMQASQDVRLGGRPTRTQFEFTLQDADLAELNEWAPKILAKMQTLPELRDVASDQQTQGTTVQLKINRDTAARYGIQPQLIDDTLYDAFGQRQVTQYFTQLNTYKVILEVLPELQGDLETLNKLYLKSPLTGDQVPLSTFATWTTDPVRPLSISHQGQFPSITISFNLAQGVALGQATEAVQRAMAELGAPPTLNSSFQGTAQAFQQSLGTVPLLILAALVVVYLILGILYESYIHPITILSTLPSAGVGALAILMAAGFDFSLIALIGIILLIGIVKKNGIMMVDFAIAAERDEHKTPEESIRQAALLRFRPIMMTTMAALLGGVPLMLGHGTGAEIRQPLGYAMVGGLIVSQALTLFTTPVVYLYLDKLNNWFSTWGRSGDGDETLEHGSVKEAAE

SEQ ID NO: 12983 - protein, 390 aa, BradyrhizobiumColbertium
MKKSRPILWLLIIAAVASAGYYAWQKFGSSQAGKTQAAEKGAPRPSAVPVSVAAVQKTDFPVYLTGLGTVQGFNTVQVRSRVDGQIIKLEFKEGQIVKQGELLVSIDPRPYQAALDQAKAKKAQDEASLANANLELQRAMRLGEFATAQRVDTQRSTVAQLTAQIAADEAAIANAQTQLDYTQIKAPITGIAGLRQVDIGNIVNASTQTGIVTISQVEPISVIFTAPQDQLPYISEGQKAGALKVIAFTTDGKNMLAEGKLAVINNQVDTTSGTIRLKAVFDNKDHVLWPGQSVSTRLLVRTLKDATVVPDEAVQRSTNGLYAYSVNQDNKAELHKIKVSYAMAGQSVIEEGLSPGQQVIVGGQFKVQPGSLVSTTVASSDRAESKVRQE

SEQ ID NO: 12984 - protein, 79 aa, BradyrhizobiumColbertium
MDELNGKLIACQILITGLIARVANEQRDPLRFLTDFRDEIKAVVNGVHIAGMDNTDRVRAVAQKTVDELFSLMKPPSSD

SEQ ID NO: 12985 - protein, 798 aa, BradyrhizobiumColbertium
MGQVVAPKSLRSVAAFDSLDERFVGVSGKKVSAVASLIAVASVSSGAQAQQSDLPPVTVDAPVERPRPTASRPSPEQIRARNALRRAAQRQQAQQTAPATPSGAPDGNPYADPAAPYKVDHVQASGKFPEKMLNTPKSITVLSKEVLEDKNATTLKEIGRSTAGVTLGSGEGGNAFGDRFFIRGFDARNDVFIDGIRDPAVSIRENFFTEQIEILRGPASSYAGRGTAGGAINIVTKQAGDVNFKRMDTEFGTDQTKRVTLDVNQVIDPTFSVRTGGLFQDANVAGRNYVTDNRWGSFISTKYTPTSDIKITTNYVHTDLSGYPDFGVPYYKQGNVPVTSAGIPRENWYGFLNRDFQTARQDFGTGTIEYKVNEAITLTSKVRGEHSLLNYIGTLPQNPNTTNPNPLLWTTTASAQSRYQTVDVWANQNEATFKLDTGGVKHTAVFGVEYSNENVSIDRYAGLASELSGSAFTSNGAVQNVNLYSPQYTNIPFGTPSLTGNPTRYGVNTTSVYVMDTANWQDTIIVNGGVRYDGYSQSSSTNAAYLKQNADLVNYNVGAVYKPMPIGSLYAAYATSANPFGSELDATGTDYGGVPPNTAVLLGPERNKAIELGTKWELADRHLLVTGALFQTTKDNARETVNGLLTSGAAYRIQGIDIEAEGKITDRWSIFGGLVLMQSKVTQSGVASNIGLQLANIAHQSFSMLTKYKFDGGWELGGQAVYRSKVYGGTFAANTNELPSYWRFDAFVEKKIDQNWTMKFYAQNLTNKLYYDSFYRSNVPFVAVAPGRAFYVVTTAKF

SEQ ID NO: 12986 - protein, 229 aa, BradyrhizobiumColbertium
MLTCLPGVLSKDDVADFRRIMDASEWEDGRSTAGAQSAMVKRNEQLPADGEVARKLGNRIISALTSNPRFIAAAIPLQIFPPLFNRYAASSGHHFGLHVDNAIRGDRLTGLRIRTDLSVTLFLAEPEEYDGGELVIEDTYGSHEVKLPAGDCVLYPSTSLHLVTPVTRGTRVASFFWLQSMIRDDQARSMIFDLDTAIQALVERLGRDDPETVKLTGIYHNLIRYWAEV

SEQ ID NO: 12987 - protein, 319 aa, BradyrhizobiumColbertium
MKTMTSRASLAAAAMLAVAWLASPVSAQTQTPPSPATQQTAAPPAASPAPAAAPSAVARSETAPAASAAPPVVTTPAPAKSESAAGVAPAMKELSPWMMFMSADIIVKAVMIGLAFASLMTWTVFIAKSIELSVASTKLRSALKKIGDARSLSEAQMALGAKEGILPSFLAAALREARMSAGLSSDAGIKERAASSFSEIVRAEQRRIRIGMGVLATIGSTSPFVGLFGTVWGIMNSFIGISKSQTTNLAVVAPGIAEALLATAIGLVAAIPAVIIYNHFSRVTKGYLELVSRASGAAGRLLSRDLDRSHGSVHSRAAE

SEQ ID NO: 12988 - protein, 152 aa, BradyrhizobiumColbertium
MGVSLADNDGEDDDFSETHDINVTPFIDVMLVLLIIFMVAAPLSTVDLPIDLPTSSATPQKKPDKPTYLSIKPDLTLAIGENPVHRAELIGTLDGLSDMSKDKYVFLRADRSVPYGELMGVMELLRSGGYTRVKLVALEGAPGAPAAGPAQP

SEQ ID NO: 12989 - protein, 257 aa, BradyrhizobiumColbertium
MAAMAALALHLGGAALALAHLRVDDDGDGLGAVGAEFAVEMASPKAPETDLPPGPDSEAMQEQQALPEQKAETKETELPKDQAQEVEDPDRVVTENDAKKPSEDDPKIQAVETPAAEASPKSVATARQTLEEDAREAEKAMAPVIGIGKDILKLTADWNRKISAHLTLHKVNPEGKVPNNQKVKVSFAINRKGNVLSVDVVESSGDAAYDAAAISIVRKSDPIPQPPAGLTDDRFERTVDIIFTPPDAKKKRRTQRQ

SEQ ID NO: 12990 - protein, 146 aa, BradyrhizobiumColbertium
MVKAADMLIARRADTRARADFATWKMMAKLNGSSALPPEAQEFLASYKNLLAQMSEGEATEATIGAIYKAYYAEMGGAGTPPDVRPRPPETAADNVTAFRRPAPKQKKSASFAASAFAGPQKRPLPVALIFACLVVVYVGIRLYWR

SEQ ID NO: 12991 - protein, 226 aa, BradyrhizobiumColbertium
MNISFYDLSVWVLPLVLAITFHEAAHAFVADRLGDNTASQLGRVSFNPIKHIDPFGTVILPAMLLFAHSPFLFGYAKPVPVNFRKLNNPRLDMVWVALAGPATNILLALATALAFHALPLVPASAAKWVADNLKNALIINAVLAVFNMMPIPPLDGGRVAVGLLPRPLAVPLARLEPFGMLILISLLILLPLAGSQFGLNLDVISAILRTLTGYVIQAVLFLTGNA

SEQ ID NO: 12992 - protein, 152 aa, BradyrhizobiumColbertium
MPARLGEAYDLVIAMHPEGHGDGELLRRERPVWAAGASYPVAAPHDILPVALYPPGCLFRQWAIEALDAAARPWRLAFVSRTLAAVVAIAAQGLAITVVKVGTLPPRLRVLRDSLPPLPTADIRLHRARNLSRPAALLADHLQRAISEFGAI

SEQ ID NO: 12993 - protein, 130 aa, BradyrhizobiumColbertium
MTAADLDPDLLKAFLAVAEHRSFTRAATILNRTQSAVSVQIKRLEDRLDVRLFHRTRSGVALSAAGQELLVYAKRLLDLNAEAVDALRPRRREAVVRLGAMDDYGTIVIPPLLAYFARSYPEIRVEIDTG

SEQ ID NO: 12994 - protein, 303 aa, BradyrhizobiumColbertium
MAEILGVFAAVLSSALGGTSIGATRYLVGSIDPLAIGSFRFGIGFLLLLPLALLRADHWPKREDWAAAVGLGILFFALFPILFNASLIFTTAPRGALALSTLSLLSLVIGAALGAEALTWRKSVGVVIATFGVAVALLSDLTSAPSGAWRGDLLMTAAALCMALYGIWSKPLIRRSSSIAFTTISMAAGAACLILLSCVRGSFAPVANFGAPQWLAALYLGGFGAALTFHLWAFALERTTPTRVAISVTVNPITASLVGAWLLNEPLRWNLAAGIVAVFAGIWISTTTGRRDRPGGASASHQT

SEQ ID NO: 12995 - protein, 139 aa, BradyrhizobiumColbertium
MGAQPIKVIMIREGGCLCGAVRFKAEGEPLNVRICHCRICQKAMGSPYFARAQFDQRALSVEGETARYASSENIDRVFCKHCGTRLFAWRRNGTLAGVALATFDDRNAFAPTEHIWVSEKLTWVKVDDGLVQYPGTIPT

SEQ ID NO: 12996 - protein, 248 aa, BradyrhizobiumColbertium
MNKIDLDGRVAIVTGGAQGFGRAITERFVASGAKVAIWDFESTLAEKTASEVGGETKVFKVDVTDTQAVDQARDATLAAFGKIDILVNNAGIAGVNKPVWETDLEEWRKVLRINLDGPFIVSKAIVPVMLKQKYGRIVNIASIAGKEGNPNAAHYSASKAGLIALTKSLGKELAAHDILVNAVTPAAAKTAIFDQMTQQHIDFMLSKIPKGRFVLVEELAAMVAWLASEDCAFSTGAVFDISGGRATY

SEQ ID NO: 12997 - protein, 243 aa, BradyrhizobiumColbertium
MADRLKGKRAVVTAAAAGIGRACAIAFAREGATVIATDINEAGIATLTKEGITEVAKLDVRNTAEVNAFAKRVGRIDILLNAAGFVHHGTILDCSEEDFDFSFDLNVKSMHRTIKAFLPEMLAGGGGSIVNISSCAALRPPANRYVYSASKAAVSLLTRAVALDFITKGIRCNSICPGTVETPSMLDRAAAQGPQGKEMFISRQKMGRLGTAEEIAAMAVYLGSDESAFTTGVDLVVDGGYML

SEQ ID NO: 12998 - protein, 609 aa, BradyrhizobiumColbertium
MTKKPTNGHAAGSNGSRRHLRSQEWFNNPHNPGMTALYMERYLNYGLTRAELQSGKPIIGIAQTGNDLSPCNRHHIELAHRVREGIREAGGIAMEFPTHPIQETGKRPTAALDRNLAYLGLVEILYGYPLDGVVLTTGCDKTTPACMMAAATVNLPAIVLSGGPMLNGWHAGERTGSGTIVWKSRERLAAGEIDYEEFMEIVASSAPSVGHCNTMGTASTMNGLAEALGFSLPGCAAIPAPYRERGQIAYETGKRIVEMVWEDLKPSDILTRKAFENCIVINSAIGGSTNAPIHINALARHIGVELSIEDWQKVGHDVPLLVNMQPAGFYLGEEFHRAGGVPAVVRELMKHKRIHEDAVTVNGRGIGENCRNAPAPDNDVIWAYDKPLVKDAGFLVLKGNLFDSAIMKTSVISKEFRDRYLSNPKDPNAFEGRAIVFEGPEDYHERIDDPALDIDEHCVLFIRGTGPIGYPGGAEVVNMQPPAALIKRGILSLPCIGDGRQSGTSGSPSILNASPEAAANGGLAILKTGDTVRIDLNKGSANILISDEELKKRHAELKASGGFKHPPNQTPWQEIYRNTVGQQSTGACMELATRYQNVAGTFGVARDNH

SEQ ID NO: 12999 - protein, 56 aa, BradyrhizobiumColbertium
MPIGWLLCHWFLLQCKRTGVRLTVAACAMPNGASDDLPSRWRGRFLISAILVVATW

SEQ ID NO: 13000 - protein, 55 aa, BradyrhizobiumColbertium
MHRRHLAPSSKVHDASKRRDRLVFSDFTERSPILAGDIVGSLCGFGNLSLVSRCW

SEQ ID NO: 13001 - protein, 355 aa, BradyrhizobiumColbertium
MSSVQIRDVRKSFGNFEVLHGVTIPIEDGQFVVLVGPSGCGKSTLLRMLAGLENITSGTISIGDRVVNNVQPKERDIAMVFQNYALYPHMTVADNMGFSLKLRNASADEINKRVKRAAEILALSPLLDRYPRQLSGGQRQRVAMGRAIVRDPQVFLFDEPLSNLDAKLRVAMRTEIKELHQRLKTTTVYVTHDQIEAMTMADKIVVMHDGIVEQMGTPLELYDKPDNQFVAGFIGSPAMNFLKGHVRVNGVATFEGPNGVKLPLKTAPTASDGRPAVYGVRPEHFTIADDGAEAEIIVVEPTGSETQVFAKVGGEQVVAVFRERHQFNPGDKIRLKPDPALVHLFDDATGKRLNA

SEQ ID NO: 13002 - protein, 439 aa, BradyrhizobiumColbertium
MQDFTRRTLLQGGTALAATGMLTGPALFDFARAWAQSAPWKAEPGAKLTVMRWKRFVPAEDDAFNAMVAAFKAATGTEMNVFSESFEDVQPKASVAANTGSGLDLAWGLHTLPQLFPTKVLKMNDVADYLGKKYGGWTDAAAKTCKQGNDWLGIPVATNGGYMTYRKSALDKAGFKEFPKDFPGFLEMCKALKANNTPAGFALGHASGDGNSWLHWVLWGHGAYTVDQNDKIVINSPETAKALEYCKALYESFIPGTASWNDSSNNKAFLAGELYCTANGISIYVAAKTDASKKELAADTYHALWPVGPVGKPTELQLALPILAFNFTKYPNAAKAFVAFMLEKENYEKWLDGAQGYLTQTLNAYESAPIWTADPKNAVFAQASKRTLPASGIGTVGEKAATAIADFIVVDMFANYCTGTKDAKGAMAEAERQLKRIYR

SEQ ID NO: 13003 - protein, 317 aa, BradyrhizobiumColbertium
MADVAIPRAKPQLSEDSAWIQLKHNRNWLGFWFMVPAMAFLIFFLAYPLGLGIWLSFTDTRIGRVGQFVATENYEWLWDDSIFWLSVFNTLLYTFVASAFKFGIGLYLALLLNEHMPFKAMLRAMVLIPFIVPTVLSALAFWWIFDSQFSIISWSLKQLGLISQNINFLGDTTWARICVIFANVWRGVPFVAITLLAGLQTVSPSLYEAATLDGASRWQMFRHITYPLLTPIIAVVMTFSVLFTFTDFQLIWAMTRGGPVNATHLMATLSYQRAIIAGQLGEGAAISSAMIPFLLAAIMVSWFGLQRRKWQQGENND

SEQ ID NO: 13004 - protein, 311 aa, BradyrhizobiumColbertium
MTDLPTRSIDLKATLSASSPTAAKDDHSEGMSYLQSVPRRMVTLYLPLTIIVVVLLFPFYWMALTSVKPDEQLLDLDKYNPFWTWNPTFKHFHKLLFESYYPHWLWNTMYVAVCATVLSIFASVLAAYAIVRLRYKGANLVGGLIFLAYLVPPSILFIPLATVVFQYGLFDSPLALILTYPTILIPFSTWLLMGYFKTIPFELEECALIDGASRWQILVKIVLPLAIPGLISAFIFCFTLCWNEFIYALTFLQSTSNKTVPVAIVNEFVDGDIYRWGSLMAGALAGSLPLVILYAFFVEHYVSAMTGAVKE

SEQ ID NO: 13005 - protein, 328 aa, BradyrhizobiumColbertium
MHILVLGAAGMVGRKLCERLLRDGRLGKSDITKLTMHDVVEPKKPENAGFPVETISGDFAVPGAAEKLVAGRPDVIFHLAAIVSGEAELDFDKGYRINLDGTRMLLDAIRLAGGGYKPRVVFTSSIAVFGAPFPDAIGDEFFHTPLLSYGTQKAIGELLLADYSRRGFLDGIGIRLPTICIRPGLPNKAASGFFSNILREPLAGKEAILPVSEDVRHWHATPRSAVGFLLHAGTMDLAAVGPRRNLTMPGLSATVGEQIAALKRVAGEKVAARIKREPDPFIVGIVGGWPRNFDPKRARELGFTTAEKNFDDIIRIHIEDELGGNFVP

SEQ ID NO: 13006 - protein, 322 aa, BradyrhizobiumColbertium
MASVACIGECMVELRQAQGGASAGQGGGLYSRGFGGDTLNTAVYLARLDIKVDYFTALGDDGLSDEMVAAWNAEGVGTRRVVRLAGKLPGLYMIQTDAKGERQFFHWRDSAAARQLMSLPETDEILNSLMSYDVVYLSAITLSIYDAPGRERLLAAIKRARLLGTRFVFDTNFRARGWPDRDVAREVFAAALATADIVLTSTEDLLALYPGESDDQLMARIPSPELVFRLAEPVSLLRFPGGTSEVPAEPMTKPVVDTTAAGDSFAAAYIAARLGGSDPVEAAQAGHRLAGVVICYPGAIIPGYAMPPKKRHRPAPSRQATK

SEQ ID NO: 13007 - protein, 216 aa, BradyrhizobiumColbertium
MTTSAQQNHLVALFKAATVIPVLTIERIQDAVPLARALVAGGVRTLEVTLRTPVAIEAARAMMAEVPEAVVGIGTILNPADFTRVEKLGVAFGISPGLTPDLLKVATDSSLPFAPGIATASELMMALSYGFDVAKFFPAEQAGGIKGLRALGGPFPNLRFCPTGGIGEANAATWLAEPNVVAVGGSWLCPPAEIRAGNWAGITAICERTVKALKAA

SEQ ID NO: 13008 - protein, 389 aa, BradyrhizobiumColbertium
MTASIVGWAHTPFGKFDTETVESLVVRVANEALADAGVSAGDVDEIVLGHFNAGFSPQDFTASLVLQADPKLRFKPATRVENACATGSAAVHQGLRAIAAGAAKIVLVVGVEQMTRTPGPEIGKNLLKASYLPEDGDTVGGFAGVFGKIASSYFQKYGDQSDALALIAAKNHKNGVANPFAQMRKDFGFDFCRAESEKNPYVAGPLKRTDCSLVSDGAAALVLADPETAKTMNKSIGFRATAHAQDFLPMSKRDILQFEGCTVAWQRALEKAGVTLSDLSFVETHDCFTVAELIEYEAMGLTPKGQGARAIKEGWTLKDGKLPVNPSGGLKAKGHPIGATGVSMHVMTAMQLAGQAPEGMQLKNAKLGGIFNMGGAAVANYVSVLEPLK

SEQ ID NO: 13009 - protein, 68 aa, BradyrhizobiumColbertium
MSTDYEDSLSMDALNDRIAILEDNIRQLIEQAAAASGEQSESRIADRITQQNDELDRLLKIRESRQKK

SEQ ID NO: 13010 - protein, 402 aa, BradyrhizobiumColbertium
MGPLKGVRVIDMTTVLMGPYATQMLGDYGADVVKVESLEGDVTRLIGPMRHAGMGPVFLNTNRSKRSICLDLKKPAGREAVLRLLKDADVLVYNVRPQAMARLQLGYDVVSAINPRLVYAGVFGFGQDGPYAAKPAYDDLIQGATALPALMAQTGDGVPRYVPNALVDRIVGLTAVGAICASLVHRDRTGRGQRLDIPMFETMAGFVMGDHMGGLTFEPPLDKGGYARHLSRDRRPYKTSDGYLSVIVYNDKQWENFFKATKRDDLRADPKFATFAGRAANIDVVYAELARIFETRTTAEWIELLTKADVPVMPMHDLASMLHDEHLEATNFFPVVNHPTEGEIRSMKVTATWSETEAEPSRLAPRLNEHGAEILREIGYSADEIAAMVRDGVTRSAPEEER

SEQ ID NO: 13011 - protein, 378 aa, BradyrhizobiumColbertium
MSFITGVGLTPFGKHEGSSSLDLMSKAAQAALDDAGLKRSDIDGILCGYSTVSPHIMLATVFAEHFGIRPAYAHAVQVGGATGLAMTMLAHHLVESGIVRHVLVVAGENRLTGQSRDASVQALAQVGHPDYEVPLGPTIPAYYGLVANRYMHEYGVTEEDLAQFAVLMRSHACTHPGAQFHDPITVADVMASKPVAMPLKLLDCCPVSDGGAAFVISRERTGQAGVRIRGCAQAHTHQHVTAAPALSELGAEISIARAKDAAGLAISDVRYAAIYDSFTITLAMLLEDLGLAGRGEAAARVRSGHFGRDGAMPLNTHGGLLSYGHCGVGGAMAHLVEAHLQMTGRAADRQVRDASIALLHGDGGVLSSHVSMFLERVR

SEQ ID NO: 13012 - protein, 118 aa, BradyrhizobiumColbertium
MSERLTDWTKGEEAITYQTCISCGHVQYFHRAFCAACGASGPRAQRASGKGRVYATSLVCRAATSETRAHVPYNILLVDCAEGFRMMAHGDDDLAIGDSVTASFKPFAGRLVPFFTRS

SEQ ID NO: 13013 - protein, 175 aa, BradyrhizobiumColbertium
MARIDYSDPSKASDRTRELLGKNRNANIFRMMAHSPSYLEQYCRLGGAIRHKGELDPIVRELAITRTGILCEAPYEVVAHKRIGKNVGVTDEQNEALENWQAASCFDEVQRAALAFTDEIVKLRKPTDATFKAIASKLTPAALVELQLSVGFYIMTSKFLETFEIDLQPVTEVVG

SEQ ID NO: 13014 - protein, 100 aa, BradyrhizobiumColbertium
MTIDEYVAWAASIAKVDEHPSNERLSYLGLGLAGEAGEVADHVKKLLRDGWLDQAGLVNELGDVIYYWACLCAATGQQPSEVLKASAARINRRLSEAASR

SEQ ID NO: 13015 - protein, 615 aa, BradyrhizobiumColbertium
MKPQSPLAAAWTRSKPPLLRFLDHCLSEFSAETSGSVADYIPELSKADPACFGISLATLDGHVYEVGDSRVPFTIQSMSKPFVFALALDLLGAGRVESAIGVEPSGDPFNSIRLNSENHPFNPMVNAGAIACTGLIYDSRGTEAFEQIRAALSRFAGRDLAVDEAVYASESQTGDRNRAIGYLLKTNAVISDSVAGVLDVYFRQCAVLVTARDIAVMAATLANRGINPVTGEQVLTPYAISRTLSVMTSSGMYDYAGEWIYRIGIPAKSGVGGGILAALPARLGLGSYSPKLDKHGNSVRGIKVCEALSSHYDLHMLNRSDDARNAVIADYNIGKSPSRRVRRPQEREILAAHEQEVRIIELVGTLSLSAVDYVSRRLAGRPRPQFVIFDLHRVTSTTRAGARLIAEAFEELAALNVTVVLSGVRRASKEWDTLREWTAELKNVRDFYLLDTAIEWAEDQIVYRYGGSIDFHETTELAEQPLLTGLSEEELTDLASLCTIRAYPSGAKILAAGDPADTLCFLRSGAVHVTLPDGIRLATLTAGMAFGEMALLEPTRSADVSADLAATTYEVPLKDFQRFRKQHPRASECIMRNLAQLLADRLIVANAKVDILTST

SEQ ID NO: 13016 - protein, 690 aa, BradyrhizobiumColbertium
MSVSISTAPQDEAKRVVFDDPHGAAGNMQEAEVTRVRTLRGLWRWALVGATAATILLCINQQFSLRFFIGYTQLNTEYFYLLIALMLPFTFLIFPGAERAPLDRIPWYDLVLFVATFAAALMLMTNVRKAAEAGWEFGGAPTSVIAAGLVMWAMLMEALRRTGGWSLLLSVFPFTVYPLFAEAGWLGPFRGTQSTLEQATAYHVLSGESLLGIPIQAFADTVIGFLVFGTALMMTGAGKFFINLSFALCGTFRGGAAKVCIFASGLLGMMSGSIISNVLTAGTMTIPVMKKSGFRASYAAAIEACASTGAVLAPPVMGATAFVIAQFLNVSYAEVALAAVIPAVLYYIGLFMQVDAYAARHNLKGIPRSELPRIMDTIKDGWYYVFVIALLIVMLLYFKRESHAPFYATALLLVLNQFFSKDTRWTFATIGRFLEVNGRTFVELAGILAGCGLLIGAFSMTGVVSSLANDLLHIAGDNAFLLLAMCALTSLILGLGLTTTACYIFLAILVAPALEKLGLNRMAVHMFIFYWGMLSSITPPVAIASFAAAGIAGSPAMKTGWESMWVGSIIYFLPFFFVLNPALVLQGPNPYLAALGLMGLAAFGTLFICGGIQGYQPFVGNLRAAGALEWPIRVLLVIGGFVVATPGGGIMPLSQMQVTLLGLGILLPTILIALLLVRRQPEVPDGLRAP

SEQ ID NO: 13017 - protein, 392 aa, BradyrhizobiumColbertium
MEGNMLRGLFMLAPAVVAGISFASTRCSFAEDIKLPATLTFTAYDTGTAGFNIAVGVGKMMKDKYGTDVRVLPAGNDVARLAPLRAKRAASAAMGSGTYFAQEGVFEFGSKEWGPQPLQILLSSVDCNCGSLGVAADTGVKELKDLKGKRVGFVVGSPALNQNSLAVLAFAGLTQKDVKVVEFASYGAMWKGLINNDVDAAFGTTITGPAKEAETSPRGLIWPPLPAKDKEGWARMQKVGSFFFPQLATCGAGISPEKPVELGNYPYPIFVAYASQPADQVYAMTKAMIVNYDAYKDSAPGAGGLAADRQTKNWVVPVHPGAVKALKEAGQWSDTQEAHNNKLIKRQEVLAAAWADYGKSSPPSDDKPFLDGWMKARAAALAKAGMPNGFEE

SEQ ID NO: 13018 - protein, 55 aa, BradyrhizobiumColbertium
MQVGGTVADGDDVVIVEAMKMEIPVPSPASGTITSLLVKLDDVVAEGQAIAIVTR

SEQ ID NO: 13019 - protein, 299 aa, BradyrhizobiumColbertium
MVSRAFDVLRCFEGHDSRLGNLEISNRCGLPRSTVSRLTHTLTRMGQLVYLPRDQKYRIGPSAVAMSASMMKGAQLRSMIRQRLQEVAEQLPGTVGFVVPDRFHLVYLQFARSPSALGLHEGTGSRIAMASTAAGAAYTAALSPEVGDAFIAEMEREAPEAAKILRPRIEANRQSLRERGYVVACGLWSPHINGLAVPIWSPQYQTFVVITIGLLAAMYDEQRLHAEVAPLMLELGRSLGSLMEGAEGDAFNNRISRKPVAMAVHNNNKPINSEGMNELEAGTRRARPARSLRAGDGRR

SEQ ID NO: 13020 - protein, 500 aa, BradyrhizobiumColbertium
MGGVDKVKRQHDQGRLTVRERIDKLIDKGSFHEIGAVSGIGEYDSSGELQKLTPANCVFGRARVDGRTVVVVGDDFTVRGGSADASISAKPLMAEEMAHDFRLPIVRIIEGSGGGGSVKTIETKGAANLPGGIGGTRWYRFTTENLSRVPVVALGLGSVAGLGAARLAASHYSIITRKSAMFVAGPPVVKALGQDLTKEELGGADIQTRAGAVDHAVDTEEEAFACARRFLSYLPSSVYELPPTLPCTDNPERGDEALMNAVPRNRKQVYKVRPIIESVVDKGSFFEVAKNFGKPIIVGLARLEGRAVMVLASDSFHYGGSWTADACQKVVRWVDFAETFHLPIVYLMDCPGFMIGLDAEKAATIRHGVRAMAAVNQTTVPWCTVILRNAFGVAGVVHQPADRFSIRYAWPSAYWGSLPLEGGIEAAYRADIDAAEDKAAKLKEIEDRLNKLRSPFRSAEKFWVEEIIDPRKTRSLLCEFARLAEPLRKAGPPENFSIRP

SEQ ID NO: 13021 - protein, 424 aa, BradyrhizobiumColbertium
MYDFIIVGGGSAGSVLAHRLSARSANKVLLCEAGQDTPPGNEPAEIRDSYPGTAYFDPRFHWTELKVTTQVISHNNPNEARPPLRKYEQARVLGGGSSINGQMANRGAPTDYDEWQARGAEGWSWNDVLPFFKKVERDLDFDGPYHGKDGRIPVRRIPRAHWTQHSEAFAQAFQQAGHQFVPDQNGEFVDGFFPVTHSNQAEQRVSAAMGYLDRDTRKRTNLTISTNTQVRELLFEGTRCVGVKALVDGREQEFRGREIILSSGAIHSPAHLLRAGIGPVGHLKDMGIPVLMGLPGVGQRLMDHPSISLSSFVRRGARMNEHTRRHMQLGLRYSSGLPGVPKGDMFVVVLSKSAWHAVGAQIGSLLTFVNKTYSETGQVKLASRDPSAEPIVEFNLLSDRRDLDRLMSGFRKMAAVQMSEWSGR

SEQ ID NO: 13022 - protein, 145 aa, BradyrhizobiumColbertium
MVRKVTDKPFPASYTDRVRKIGVVNTTNKILTTIAAALMDGPAALRHYMIDNFVVEGFTFDQVMSDDEALEAFVRKATIGVWHASCSCRMGRADDPMAVVDTEGRVKGIQGLRVVDASIFPVVPCANTNFPVLMSAEKIAAAIMQ

SEQ ID NO: 13023 - protein, 68 aa, BradyrhizobiumColbertium
MNLASNWLRFPRTSPAPGMVAARRGHVFVLEQHLGGDMWMAYDANSGGRATRLHARSLRGYTIVNPRA

SEQ ID NO: 13024 - protein, 491 aa, BradyrhizobiumColbertium
MPAAFLSSDPIIPTTPLTSEMRDALRAIVGEKGLIEDEHGKQPFVTDWRGLLVGGAGAVVRPGSTEEVSKVVRLCHEHGIAIVPQGGNTGLMGGATPWPAHTGIVLSLGRMNRVLDVDPVGYSMTVEAGCVLQTLQETAAEHDRFLPLSLGAQGSCMIGGNLSTNAGGVQVLRYGNARNLVLGLEVVLPNGEVWDGLRALKKDNTGYDLKHLFMGAEGTLGIITKAVLKLWPAPKDVCTSWLAIRDPRAALEILSEAHAASEDNVGSCELMSRSAVDMVLRHIPGTQDPLKAETPWYLLLEWSSARARRDGMEGMSEKLEQFLADQLGAGRVLDAAIAHTVGQSRNMWRIREGVAEASRAEGPGLSYDISVAISRIPEFIDKGTRAVLDILPTIRPYPLGHIGDGNLHFSFMGPGGMDQKTLNQYKGAITRAVNDLVTSLGGSISAEHGIGIDKLDELSRYRPKTELDIMRAIKRALDPQNIMNPGKVLRL

SEQ ID NO: 13025 - protein, 162 aa, BradyrhizobiumColbertium
MKFSAAHMGVGAACLVLVGISPLRAEPVFDGLAGAWSGVGTMKPSDGPREKVRCKVAYDVTRPGRSLTLNLRCASDAYKMVLSANIEQSGTELSGNWFESEYRQGGKVYGTNKDGLIEARIEGNTVAALVTIQTKSNRQSFLMEAPGSWMSEVAIELNKDSK

SEQ ID NO: 13026 - protein, 429 aa, BradyrhizobiumColbertium
MISNWLAAELSRRNIHYGWVMVGVTFLAALISAGTVGAPGVFIVPLQKEFGWSTAEISSALSIRFILFGLMAPFAAALLNRYGLRNITLIAQLIVVCALVLSLGMTEVWQLIALWGVVIGIGTGMTALVLGATIATRWFAARRGLVVGIMTASVATGQLVFLPLLASLTERYGWRLALGLVCVMLGVSALAVLLAMCDRPSDVGLRPFGDEGTEPLPAPPVSHGSITGVALGTLRDASRSTAFWILFATFFVCGASTNGLVQVHLIPMCLDFGIPQVQAASLLAAMGIFDFIGTILSGWLSDRYDNRWLLFWYYGLRGLSLIFLPFSDFSFYGLSVFAMFYGLDWIATVPPTVRLTAQKFGPERANLVFGWIFAGHQLGAGTAAFGAGFSRTVYESYLPAFFIAGALCVFAALIVLALARQPKPQPVMA

SEQ ID NO: 13027 - protein, 398 aa, BradyrhizobiumColbertium
MAEAADPVVIVSAARTPLGRFMGELSPLPAHKLGSHVIGAALERARLAPEKVDEVFMGCVLPAGQGQAPARQAARAAGLPDSTGATTVNKVCGSGMKATMLAHDIIRAGSAEIVVSGGMESMSNAPYLLAKARGGYRVGHDRIIDHMMMDGLEDAYETGRSMGDFGEATAEAYQFTRKDQDAYAMETLGRARKAVEGGAFKAEIAPITLAEKAGPRVIANDEHPLKVDPAKIPGLKPAFRANGTITPAASSANADGAAALVLTKRSLADRSGLPALAEIKGHATHSQEPQWFTTAPIPAIRKLLDKVGWTASDVDLFEINEAFAVVAMAAQRDLGIPRDKLNINGGACALGHPIGATGARLIVTLLHALEAQNLRRGIAALCIGGGEATAIAVERLAR

SEQ ID NO: 13028 - protein, 50 aa, BradyrhizobiumColbertium
MVRMRFGRSVLAVIVRLVRNCAGAGNPVFPEAARLDPRNRGAWMPRFRGA

SEQ ID NO: 13029 - protein, 256 aa, BradyrhizobiumColbertium
MEMLNNHCGVTRDERGIVHVTICNAGPLNILGSPVTEAVREGLQQLASDRSIRVVVLRGQSEKSMIGGADIKEMAKLDQKSAEAFISRLRDLCEAVRQFPAPVIARMPGWCLGGGLEVAAACDFRIAAHDAHFGMPEVRVGIPSVIHAALLPRLIGWARARWLVMTAENIDASTALAWGLVDKVAAPGELDAEIERTVKALLECGPEALRSQKALLRRWEELPLTESVNLSVKVFGESFLTDEPTRLMGAFVNRKR

SEQ ID NO: 13030 - protein, 175 aa, BradyrhizobiumColbertium
MTDIDQFKLFSPAQRRERVVDWQVPAPVARAAMTLSGMDAMRAIRDGRLPPPPFAKLIGFTMAAVEPGRIVMELEPREDLENTIGLLHGATAAALLDTAMGCAISTRLEAGQSSVTLDLKMTFLRPLSVRSGLISAEGRVIKLGRQTSYTEGFVRDGKEALAVHATATFSMIGAA

SEQ ID NO: 13031 - protein, 205 aa, BradyrhizobiumColbertium
MRYSPEHKQETHDRIVRKASVRLREKGAHGIGVADLMKEAGLTHGGFYAHFDSREALVIEAFGYAMDRSMEHWRKITGEVSPEKRLALIAEAYLSALHRDNPGHGCSIPALGAEIARESPKTRKAFAGKLEEMIERLADCVPNQPRKAARKQAIATLATMAGTMLLARIAGSGELSDEVLKAGRDSVLEGAKREPKVGAAKKAKT

SEQ ID NO: 13032 - protein, 302 aa, BradyrhizobiumColbertium
MPDQGAIDWDDFRFVLAIVRGGSVSAAAKQLGVDHATVIRRVDRLEKHLSAKLFDRRKTGYLLTEAGQRVADSAEAMESTIVANQEQVGGSVARLTGTVRIGAPDGFGTAFLAPRLAPFADRYPDLDLQLVATARLFSLSKREADIAISLTMPKEGRIVGRKLLDYRLGLYAAPGYLDRFPEITSRQDLTQHRFVGYIEELLFTPELDYLPQVSPRISARFRSANLIAQLNATLSGFGIAVLPQFMASDYPQLVPVLPEEISITRTFWMLMHADSKDLARIRAVADYIGEIVERERALFSGR

SEQ ID NO: 13033 - protein, 498 aa, BradyrhizobiumColbertium
MRSIGHFIGGKEVKGTSGRTADVFEPMTGDVQAKVALASKAEVRAAVENARAAQPEWAATNPQRRARVMMKFLELIQRDYDKLAELLAREHGKTVPDAKGDIQRGLEVVEFACGIPHLMKGEYTEGAGPGIDIYSMRQPLGVVAGITPFNFPAMIPMWKFAPAIACGNAFILKPSERDPGVPMKLAELMIEAGLPAGILNVVNGDKEAVDAILDDPDIKAIGFVGSTPIAQYIYERAAQTGKRCQCFGGAKNHAIVMPDADMDQAVDALIGAGYGSAGERCMAVSVAVPVGKSTADRLMEKLIPRVESLKIGTSIDPSADYGPLVTREAVEKVKSYIDIGIKEGATLAVDGRGFKMQGYENGFYLGGSLFDNVTKDMRIYKEEIFGPVLSVVRAHDYKEALALPSEHDYGNGVAIFTRDGDAARDFAAKVNVGMVGINVPIPVPIAYYTFGGWKKSGFGDLNQHGPDSIRFYTKTKTVTSRWPSGVKEGAEFSIPLMK

SEQ ID NO: 13034 - protein, 381 aa, BradyrhizobiumColbertium
MQFALNEDQIAVRDMALAFAAEKIAPHTLRWDEEKHFPVEVMREAATLGMGGIYIRDDVGGSGMTRFDAALIFEALATGCPTTSAFISIHNMASWMIDAFGSDTQRHQWLPKLCAMELIASYCLTEPGAGSDAAALRTRAVRDGDHYVLNGQKQFISGAGGTDLLVAMVRTGGDGPGGISTLVIDGKTPGVSFGANERKMGWNAQPTRAVMFENARVPVANRLSEEGMGFKIAMAGLDGGRLNITACSLGGAQTALDKARSYMKERKAFGKRLDEFQALQFRLADMAIELEAARTFLWRAAAALDRKDPDATMLCAMAKRFGTDVGFEVANHALQLHGGYGYLSEYGIEKIVRDLRVHQILEGTNEIMRLIVARKLIEGAR

SEQ ID NO: 13035 - protein, 337 aa, BradyrhizobiumColbertium
MIRLNRPKALNAMTLEMSIGIDAALDRFESDPEVGLIILEGAGERGLCAGGDIRGLWESSREGGDLGARFWRQEYVMNARIAKYPKPYVAFMDGLVMGGGVGLSGHASHRVVTDRTKLAMPEVGLGFFPDVGGTWLLSRSPGEIGTYFGLTGQTMNGPDAIHARFADAVVPVAKWPELREALAKVRQGATAADVTRLIDGFATGETAGPVAAKQATIDALFGFDRMEDIFAALARDGSEFAMATLKTLNEKSPRGMVVTLKLLRLARAASSLEDCLVREYRAALEVFRSDDFREGVRAAVIDKDRNPSWSPPRIEDVTPEMLAPYLAEIGADELRFN

SEQ ID NO: 13036 - protein, 212 aa, BradyrhizobiumColbertium
MATIAFIGLGNMGGPMAANLVKAGHKVVAFDLVEASRNQAKADGASVAESASGAVKGAEVVVTMLPAGKHVLGVWNEVVPAMTKGALIIDSSTIDVESARAAHALAAKHGVLSVDAPVSGGTGGAKGATLTFMCGGEEKAFAAAKPVLENMGKKIVHCGGAGAGQAAKICNNMILGVSMIAVARLLPWARSLAFRIRRCSMSPRPRQASAGR

SEQ ID NO: 13037 - protein, 78 aa, BradyrhizobiumColbertium
MPGPVPTSPANNDYKPGFASALMVKDLTLAQDAAKAAGAATPLGKHAQEIYQSFDAAGQGGVDFSGIIKHVRSLAGKV

SEQ ID NO: 13038 - protein, 572 aa, BradyrhizobiumColbertium
MTTFQEARAFLLKHRTDYEAAVKGFRWPDPAPFNWALDWFDADLAANPDSKDRAALWIVDAAQDKQTKLSFAALSKRSNQVANFLRAQGLRRGDHLLLLLGNVVPLWETMLAAMKLGVVVIPATTLLTANELRDRLDRGKAKAVVAAEDQVAKFASLGTENVVRIVVGAAPDGWLTYDEAAKAAESFTPDGPTNADDPMLLYFTSGTTAKPKLVRHSQRSYPVGHLSTMYWIGLKPGDIHLNISSPGWAKHAWSCFFAPWNAGATVFVVNQPRFDAKALLATIGRCGVTTLCAPPTVWRLFIQENLASFKVALREVCGAGEPLNPEVIDQVRAAWGLTIRDGYGQTETTALAGNSPGQKIKVGSMGRPLPGYRVQISDADGNPAKEGEVTLMLGADRPAGLMQGYQGDDGKLSGAEGELYRSGDVVFEDDEGYLTFVGRADDVFKSSDYRISPFELESVLLEHELVAEAAVVPSPDPIRLAIPKAFVLLTSGTERSPETALSIFKHLHTRLAPFKRIRRLEIVTELPKTISGKIRRVQLRRLERDNDRDDPLRGREFREEDFPELSKIRGES

SEQ ID NO: 13039 - protein, 159 aa, BradyrhizobiumColbertium
MNEVWKKPPITLEAYQAMVGKEIGVSSWHLIDQPRIDTYADVIEDHQFIHVDPERAKRETAFGTTIAHGFLTMSLLSIMSYEVMPVIAGTTMGVNYGFDKLRFISPVRAGKRVRGRFVLAEAKLRKPNELQSRTNVTVEIEGEDKPALVADWLGLIYFA

SEQ ID NO: 13040 - protein, 305 aa, BradyrhizobiumColbertium
MAIRFDGRVAIVTGAGNGLGKAHALGLASRGAKVVVNDFGGARDGTGGSLSPAEAVVEEIRKAGGTAMADGADVSNFEQVTAMVERATKEWGSVDLLCANAGILRDKSFGKMEVADFQKVLDVHLVGTFYCCKAAWAGMRDRNYGRIVLTTSSSGLYGNFGQANYGAAKSGMVGLMNVLAEEGRKNNIRVNIISPTAATRMTEELLPPQALQLMKPNAITPAVEYMLSEDAPTRTIMGAGAGSFAVIKILESEGINLPESEWTPDAVAAHFAEISDMSKARALTGAFEQTQKYVAQAAARAGIKL

SEQ ID NO: 13041 - protein, 420 aa, BradyrhizobiumColbertium
MTSPDNHVAIIGAGPAGLMAAEVLAQGGIRVTVYDAMPSAGRKFLMAGRGGLNLTHSEPLPQFMARYREAAPKLHAAIAAFPPDALRTWSEALGEPTFIGTSGRVFPKAFKASPLLRAWLRRLDAAGVRFAFRHRWIGWDDEGRLAFQTIDGTKAVTADATVLALGGASWPRLGSDGGWASILADRGIAISPLRPANSGFTVSWSDVFRARFEGQPLKGIALSFGLHRLRGEAVVTQSGIEGGVIYALSAELREAIAVKHEAVLHVALRPDIDQLELARRLSAPRGKQSLSNFLRKAVQLSPVAVGLLQEATINAGQSLSTMSPERLAEFINAVPIKLTGVAPIARAISSAGGISFDELDADYMIRKLPGVFAAGEMLDWEAPTGGYLLQSSFATGAAAGRGALEWLKRYLPSLRASSSQ

SEQ ID NO: 13042 - protein, 359 aa, BradyrhizobiumColbertium
MTTSLAAKIAREYGTPCAVIDLDRVERNIARIQKACDDAGVANRPHIKTHKNPTIAKMQVAAGAKGITCQKLGEAEIMANAGIDDILISYNLLGEEKMARLAALQTKAKMTVAADNSTVVAGLPKAAATSGRTLSVVVECDTGRKRAGVETPAEAIALAREIAGSKGLEFAGFMLYPTETGWAEAQKFYDEALAGVRAHGLDAKIVSTGGTPNLKNLGKLKGGTEHRFGTYIYNDRMQVAAGVASWDDCALHIYSTVVSRAAPERGILDAGSKTLTTDTGGLDGHGLILEHPEAKIAKFAEEHGFLDLSRSNTRPNVGDVVRIVPNHVCVVVNMMDEVVMVRGEEIIGTLPVAARGKLR

SEQ ID NO: 13043 - protein, 603 aa, BradyrhizobiumColbertium
MAPPLIQLKDIRLTFGGTPLLSGVELNVAPSERVCLIGRNGSGKSTLLKIAAGLVEPDGGTRFVQPGATVRYLPQEPDFGEHETTLAYVESGLAPGDDQHQARYLLEQLGLTGEENPHNLSGGEARRAALAYVLAPSPDILLLDEPTNHLDLSTIEWLEQELDSRRSALVIISHDRRFLTNLSRSTAWLDRGKIKQIDRGFASFEAWRDEVLAEEERDQHKLDRKIVDEEHWLRHGVSGRRKRNVKRLANLHALRDQRRNYRGTAGSANLAAAEAEQSGKLVIEAKGISKTYGERKIVDNFSTRIQRGDRLGIIGPNGAGKTTLVNLLTGAMQPDSGTVRLGANLEMATLDQHRESLDPKSTLAEALTGGRGDHIMVGGKPKHVVGYMKDFLFAQEQRGTPLEVLSGGERGRLMLARALAKPSNLLVLDEPTNDLDLETLDVLEEMLGDYDGTVILISHDRDFLDRVVTSVIAPEGNGRWIEYAGGYSDMLVQRGADLKRETAKAQPVAEKKEERPAAPASAPKRKLSFNEKHALETLPKKMETLQADIARLQRVLDDPNLYAKDRKTFDDTSAAIAKAHEELSAAEERWLELEMLREEIEQA

SEQ ID NO: 13044 - protein, 163 aa, BradyrhizobiumColbertium
MSDTPTRIYVDADACPVKDEIYRVALRHGVPVSVVAGNFIRVPQDPSIERIAAGAGMDAADDWIAERARPGDIVVTSDIPLASRCVKAGADVIAPNGKPFTEESIGMTLAVRNLMTDLRSAGEVTGGPRSFAPRDRSAFLSALDQTLRRIARRRADATATSRG

SEQ ID NO: 13045 - protein, 266 aa, BradyrhizobiumColbertium
MPNRLETYRVEAYNTAKQSENKMHDDTVARRFGFSGGLVPGVDVFAYMMHVPTVRWGRDFLSRGLIEARFIKPVYDGETADVDAMEHNDLLTIEVFSRTELCATGTASLPAAAPAVSLSDYVAVPAVAERTPVSPATFETGKWFGTTPRRWAGQDAADYLADIREFDPIFAREGLGHPGLIQRVMNRVLVDNTILGPWIHVGSRMQLLSAARVGDEISARAKVTANYEKKGHRFVEFDALVVANGTTPLAHCQHTAIYQPREQAAA

SEQ ID NO: 13046 - protein, 798 aa, BradyrhizobiumColbertium
MPVFQVNSMQEHTKSTTLENAIALQKYGVGQPVRRKEDDTLVRGKGRYTDDFNLPGQAYAVVVRSTHAHGVIRGIGIEAAKAMPGVLGVWTGKDLDAAGYGPFTCGLPLKSRDGSPLRQTNRQPLATDKVRFVGDPVAFVVAETLAQARDAAEAVELDIEPLPAVTDPEEASRPGAPQLYDHIPNNVALDYHYGDTEKVNAAFASAAHVTKLDIENTRVAVVSMEPRVGLASYDKKTERYTLQVPTQGVAGNRTNLAKNLKVPNEKVRILTANVGGSFGMKNINYPEYMCILYAAKTLGRPVKWLDERSTAFLSDSHGRAQKIHAELALDADGHFLAAKLSGYGNLGAYITGVAPGPLSLNTGKNFSSVYRTPLMAVDIKVVLTNTTLMGAYRGAGRPEANYYMERLIDRAADEMGIDRLALRKRNFIKPNQIPFAASSGVTYDSGDFQAVFNKALEISDHENFAKRKKESRKAGKLRGIAVGSYLEVTAPPSPELGKIVFDADGTVQLITGTLDYGQGHATPFAQVLSAQLGVPFDSIKLVQGDSDIVHTGNGTGGSRSIMASGQAIVGAAKLVIEKGKRAAAHMLEASEADIEFADGRFTIAGTDRSIDIMELAKKLHDGKVPEGVPDTLDVDHTSEPIASAFPNGCHVAEVEIDPETGVVQIVRYSAVNDFGTVINPMLVAGQLHGGVVQGIGQALMEHVRYDESGQPITGSLMDYALPRAEDVPNMTVGDHPVPATTNPLGSKGCGEAGCAGSLSTVVNAVIDALSEYGIKHIDMPLTPERVWRAIQEAKAKAA

SEQ ID NO: 13047 - protein, 357 aa, BradyrhizobiumColbertium
MNDHTRLGDGHGPHGELEGSMAAVALATKPSIPAQAAGTGVYAALDLGTNNCRLLIACPTQDGFRVVDSFSRIIRLGEGVSATGCISEAAIERAIAALSICRDKINLRKARRLRLIATEACRAASNAEGFRSRVAAETGIELEVIDRETEAALAVLGCSPLIDPRGRGAILFDIGGGSTELVRIERDPADPEPRIKAWMSIPYGVVTLAEQFGGRDVTPGIYAAMEQEVASHVAPFAEEHGRELADMHLLGTSGTVTTLAGIHLNLARYDRRRIDSIWMNDADITATISKLLGMSYEERAANSCISVERADLVLAGCAILDAIRRAFPLPRLRVADRGLREGMLVEMMREDGALRSW

SEQ ID NO: 13048 - protein, 228 aa, BradyrhizobiumColbertium
MAKDTTGRLHVQVKTGGKRKLSSKLWLERQLNDPYVAKAKAAGYRSRAAFKLLEIDDKYRLLKPGMAVVDLGAAPGGWSQIAAKRVGSTEGKGKVVAIDLLEMPEIPGVDFAQLDFMDNDAPDKLTAMLGGKADVVMSDMAANTTGHRKTDQLRIVGLVETAAAFARDVLKPGGTFLAKTFQSGADADLLAQLKRDFAAVRHVKPAASRQDSSERYVLATGFRGGETA

SEQ ID NO: 13049 - protein, 496 aa, BradyrhizobiumColbertium
MVDKQRVIPLIVATALFMENMDSTVIATSLPAIAADIGTSPLTLKLAITSYLLSLAVFIPASGWTADRFGARMVFAIAVGVFMVGSVGCALSTSVTDFVFARILQGMGGAMMTPVGRLVLLRSVDKSALVNAMAWVTVPALIGPVIGPPLGGFITTYASWHWIFLINIPIGLLGIFMALRYIDPIKSEEREPFDLYGMVLAGIGLAGIAFGLSVAGLNLLPWSTVAALIAGGAISMTLYVIHARRTGSPVLDFSLLRLPTLRAAVLGGFLFRLGIGALPFLLPLLMQIGFGLSPFHSGLVTFASSLGAMGMKTLAARIIRTFGFRNLMTVNAIISAFFLGVCALFTVTTPLLIIMVILVVGGFFRSLEFTAINTVAYAEVETAQMSRATTLVSVNQQLAVSAGVALGAACVETTMWFSHVSELNATVFAPAFVVVALASAASSWFFWQMPADAGHEISGRKAVEIASRKGAGKGAEKAAVKAASEDTQDVRDQRLG

SEQ ID NO: 13050 - protein, 497 aa, BradyrhizobiumColbertium
MATVQLQGIREAFTFDDVLLKPGLSDVMPGEVDIRSRVTRAIPLNIPIMASAMDTVTEARMAIAMAQSGGLGVIHRNFDPEGQAAQVRQVKRYESGMVVNPLTISPDATLEDALKLMSDHGISGIPVVTGAGKSTPGKLVGILTNRDVRFATNRQQKISELMTHENLVTVRENVSQDEARRMLHQHRIEKLLVVDDQYRCVGLITVKDMEKAVAHPLACKDAQGRLRVAAATTVGDSGFERTERLIDAGVDLVVVDTAHGHSRHVLHAVNRIKRLSNSVQVVAGNVATTEGAQALIDAGADCIKVGIGPGSICTTRIVAGVGVPQLTAIMDAVEAAKKADIPVIADGGIKFSGDLAKALAAGADIAMVGSLLAGTDETPGEVFLWQGRSYKAYRGMGSVGAMARGSADRYFQQDIKDTLKLVPEGIEGQVPYKGAVGHVMHQLAGGLRAAMGYVGARDMKELHEKAQFVRITGAGLRESHVHDVTITRESPNYPGGG

SEQ ID NO: 13051 - protein, 154 aa, BradyrhizobiumColbertium
MTSLRQQIGQMGLAATKSMAWKVTAALASFPVLIFAIGPVLSAWFADDTPNLGEAAHYLAGFALLFLPTWIALFLSHPCVLFIYLLNFLAFVTSLLCLAGITVNSWVSLDGQALWAVLATPVALIWSLMNSKRPDAAKLNDSAPPIPSHGVASA

SEQ ID NO: 13052 - protein, 340 aa, BradyrhizobiumColbertium
MSQGKRIVLAARPVGEPKPSDFRLEEFAVPTPGPGEVLLRTIWLSLDPYMRGRMSEGPSYAAPVPVGGVMEGEAVSEVAASNNPDFAVGDIVRIRSGWQTHAISNGKGLIKVDPKLGPISTSIGVLGMPGMTAYTGLLDIGKPQPGETVVVAGASGAVGSAVGQIARIKGARAVGIAGGKDKCDYVVKELGFDACIDHRDPDLAAKLKDACPKGIDVYFENVGGAVFEAVFPLLNPFARVPVCGLIAHYNDTEAKPPKWAASLMRATLTKRLTFRGFIVSDFAARHGDFLRDMSTWVREGKVKYKEFVTEGLESAPGAFIGLLKGANFGKQLVRVGPDKA

SEQ ID NO: 13053 - protein, 97 aa, BradyrhizobiumColbertium
MFEISIFCVILLAAGYWATMFIMGRRDDVIHGRFVHTEEEGDFTPAAMPAPPPFPKRPVKAAQSAGIQPVGTEAKPVNSEALQSLLAAIQQDLKSVA

SEQ ID NO: 13054 - protein, 279 aa, BradyrhizobiumColbertium
MPEFRLTQISDTHLGRRFPGLIANFEAIGDHIDAGRPDLVVNTGDVSFDGPTSRDDVEFAKGLHDALPVSCRYLPGNHDIGDNPTTIGPAPKPPVNEAHRGQFCEIIGEDHWSFEACGWRFIGLNSLVMNSGLPFEAQQFDWLASEISRTNGGPVALFLHKPLFLNQPDDPETPETSIRYVPQPARARLIEMFGKVDLRLVASGHVHQRRDFTWRHTRHVWAPSAGFVINDKRQDRIAVKEVGLVEYRFQPDSLEVRHVRAAGQRDVDIEELLAQMGEQ

SEQ ID NO: 13055 - protein, 204 aa, BradyrhizobiumColbertium
MNTLSSLFTASASGQLGILMSALSGIATALAVALAMTVYFRLSYRTWRDVARHGLAAFAALALFAFAAYDMRHAALAYLGLNPSKPAIEFEIRMPREMLAAVTDSQIELHTDRNQTLALVDGVRDLADGRAVLRGAVALNHRTADRVLVVNLPGKGTFEFRLRLPAQPHRSEQFGPWHLADRIASPLAGAVAPQDGYTIRYRVL

SEQ ID NO: 13056 - protein, 140 aa, BradyrhizobiumColbertium
MSVQMVLLPVFVQVALTFALLIGMVMARRKTLVAGETKIRDIALGEPNWPKGATQIANCCRNQFELPVLFYVLIALALPLRRADLFIVLMSWVFVVTRFAHAGVFVSSNDLGRRSTVWLAGVLVLLAMWIYFALKLLLLI

SEQ ID NO: 13057 - protein, 433 aa, BradyrhizobiumColbertium
MTPAARLSAAIELIDTIERDRVPAAKALKEWGTAHRFAGSGDRAAIAGLVWDVLRRYASSAFLMDSDTARARLIGMLRLERNMDTATMAALFDGSRFAPAPLTEAEQAALASRSLKDAPSAIAGDYPEWLDPHLAKVFGETRAAEAAAMASRAPLDLRVNTLKSNRDKVLRALAHLHAKPTPWSATGVRIELSADARNPGIQAEEDFIKGAIEVQDEGSQLAAQLTAAKPGEQVIDLCAGAGGKTLALAALIQGKGRLIATDRDKRQLAPIHERLSRAGVHNADVRTPKGEADPLADIRGTADLVVIDAPCTGTGTWRRNPDAKWRMRPGALEIRLRDQAEVLERAVPLVKAGGRIAYITCSVLSEENGEQVRAFTARHPEFAVVPPEQTASVLWDKAEAFGEAALKSTEGWLMTSRRTGTDGFFVSVLRKIG

SEQ ID NO: 13058 - protein, 67 aa, BradyrhizobiumColbertium
MGTVKWFNTQKGYGFIQPDDGQKDVFVHISAVERAGLSTLNEGQKVSFDIVADRRSGKSSADNLRVG

SEQ ID NO: 13059 - protein, 110 aa, BradyrhizobiumColbertium
MKLPTSPFTVTDWSKIDVTTHPGESGEAKWRTLTIGDLRVRMVEYSPGYVADHWCDRGHVLYVLKGDLDSELRDGRKFKLTAGMSYQVSDFGDAAHRSSTATGATLFIVD

SEQ ID NO: 13060 - protein, 123 aa, BradyrhizobiumColbertium
MPQHHPPSMLAALGRTWVEAWNARDLEREHALYDEAAVMTSDRIPAMGFDASGTVRGKEALRAYWGKALGLLPELHFSLIDLFVSPDSVVVFYANERGKKICEYLRVNDAGLIVQGSANHLVH

SEQ ID NO: 13061 - protein, 551 aa, BradyrhizobiumColbertium
MGARSRAVAARAAPAYLLAMTAAQNDRSASTPSVASAHDKILIVDFGSQVTQLIARRVREDGVYCEIVPFNKAEAAFDEMKPKAVILSGGPESVHEAGSPRAPQSIFDSGVPVMGICYGQMTMAAQLGGEVEGGHHREFGRADVEVKADSQLFADVWSSGSKNQVWMSHGDRITKMPPGFSVAGTSPNAPFAIIQDERRKYYGLMFHPEVVHTPDGAKLIRNFVRKIAGLTGDWTMRAFREEEIAKIRAQVGKGRVICGLSGGVDSAVAAVLIHEAIGDQLTCVFVDHGLMRLNEAEQVVDLFRHHYNIPLVHVDASKQFLGELEGVTDPEAKRKTIGRLFIEVFEAEAKKIGGADFLAQGTLYPDVIESVSFTGGPSVTIKSHHNVGGLPERMNMKLVEPLRELFKDEVRKLGRELGLPEIFVGRHPFPGPGLAIRCPGEITRDKLDILRKADAVYIDQIRKHGLYDEIWQAFAVLLPVKTVGVMGDGRTYDYVVGLRAVTSTDGMTADFYQFDMKFLGETATRIINEVKGVNRVVYDVTSKPPGTIEWE

SEQ ID NO: 13062 - protein, 435 aa, BradyrhizobiumColbertium
MQVSSFAPEPYILILTGAGLLIALVAWLPLALKRLPLSLPIVCIGIGAAIFSLPAVSLRPLPLNYPDFTERFTEFVVIIALMGAGLKLDRPFSWRKWSVTWRLLAITMPIGILAITALGGWMLGLPWIAALLLAASLAPTDPVLASDVQVGPPKTGEEDEVRFGLTSEAGLNDGFAFPFVNLAIALGLAMATGEPWAGQWLLHNVLWEIGAGLIGGWLIGRLFGWLTFHVPADTKLSRTGDGLIAIAATFVSYGVTELIHCYGFLAVFVTALTLRRSHRDHEFNRQMHDITEQVERLAMMVLLLLFGGALVSGLLRPLELVDVAAAAAILLVIRPIGGLIALAGFKARFSEKMTLAFFGIRGVGSFYYLAYGLNHMELTVGERLWAIVGLVALLSILLHGLTVTPVMRQLDRSQGRDPDADDAAPPPNVQRPASA

SEQ ID NO: 13063 - protein, 474 aa, BradyrhizobiumColbertium
MDLARFQFAFTVVWHFLFPAFTIGLASYLAVLEGLWLWTGRGAYLDTYRYWLKIFAVAFAMGVVSGIVMSYQFGTNWSVFADKTSPVLGPLLGYEVLTAFFLEAGFLGVMLFGLGRVGPRLHFVATCFVAGGTLLSAFWILAANSWMQTPTGHGTGPDGQFIPESWLAIIFNPSFPYRFAHTVTAAYLTTAMIVGAVGAWHLLRDRMNERARIMFSMAMWMAAIVAPMQLLIGDLHGVNSYHHQPVKVAAMEGHFETERRASSILFGMPDAEAGVTRGQIAIPGFASLYLTHSLDGEVKGLKAFPKDTWPTNIPLVFWAFRIMVGLGILMIVLGMASLVLRWRDGLYDTPWLHRFAVAMGPSGLIAVTAGWTVTEAGRQPFTVYGLLRTADSVAPIAAPAVAASLAAFVVVYFVVFGAGIAYLFHLFRQTPEAGEHGPPQGQPVRTAGITPAPALIAGAPATHRAESRQAGIRP

SEQ ID NO: 13064 - protein, 336 aa, BradyrhizobiumColbertium
MSIDLTLIWALLIATAVLLYVMMDGFDLGVGILFPAEVARADRDVMVNSVAPVWDGNETWLVLGGGGLFAVFPLAYATIFPALYMPLILMLLALVFRGVAFEMRFRARTPAGETWWDRAFSWGSFAAAFLQGVCLGAIVQGIRVEGRAYAGGWWDWLTPFSVLTGIALVVGYGLLGACWLVWKTDGALQARCRNYARVLGFATLGFIAVISVMMVIQSPAFRERWLTLPNMLYAAPVPVLVALLAWRFHRALGKGEDVVPFLCALGFFVLSYIGLGISMWPMIVPPSITIWLAATHPSSQLFLLVGAAVLVPVILVYTGYVYWIFRGKVRHGEGYH

SEQ ID NO: 13065 - protein, 39 aa, BradyrhizobiumColbertium
MLRVSRTWRQLLWFVALWAAGVITLLAIAMPIRWLLKTG

SEQ ID NO: 13066 - protein, 48 aa, BradyrhizobiumColbertium
MALVKAAARNASRKDRCEAAECSDDPLGKPVHRHTERDQRKHAGQPIE

SEQ ID NO: 13067 - protein, 386 aa, BradyrhizobiumColbertium
MIRLSALSSTRLRIALVIVLGLIFAALQLTANVAPSPESTSAWQHDGRLHVFFHPDCPHCHRAIEFLRTQPRVDFVLHDVSNSANETLFLAIARQHAIPEHELGVPLFVRGSRYLLGFESAEKTGRDLLALVADETAIARPEDAARKISLPWLGDIDPVGYSLPTLGILMGLADGFNPCAMWVLVYLISLIAGIKDYGKIWWLVGSFVLASGVLYFLFMTAWLNTFLVVGHIRPLTQIVGLVAIGIGIDHLYELAVTRGVTVCDVGNTEQRQQTMQRIRKIVAAPVGLVSLLLIVGLAFTVNAIEFACSAALPAIYTHMLALADLSTGAYYAYIGLYVTFFMLDDLVIFGLAAFTVQKVIDTRYAALSRGAGGVVLIGLGLWMLAR

SEQ ID NO: 13068 - protein, 355 aa, BradyrhizobiumColbertium
MKSPALSRIFSASLAAVIAIAPSLSLACTRLVYLGANNQVVTARSMDWRFEMPTNLWIFPRGMARSGEVGPNSLKWKSKFGSVVASAYDVSTSDGMNEAGLVANVLWLTESEYPKFGPGKPGLSIAAWAQYVLDNFATVQDAVAVLETDPFMIVTDNVPGQKLLATLHLSLSDATGDSAIIEYVNGRPVIHHGRKYQVMTNSPVFEQQLALNEYWKEIGGTVMLPGTNRAADRFARASFYVNAVPKDENPDRALASVFSVIRNVSVPFGISTPDQPNISSTRWRTVADHQRKLYFFESVLTPNTFWVDLKTIDFSPEKGRVKKLDLGPQQSRIFAGDATANFQEAEPFKFLGLPM

SEQ ID NO: 13069 - protein, 347 aa, BradyrhizobiumColbertium
MKKIRIFGRVVCIALTLTSAAADACTRFVYETGNKTYIVARSMDWMEDPRTDLWAFPQGMARDGGVGRGSVSWTSKYGSVVASFYNIATVEGMNTAGLVANTLYLVETDYGDAKASGKPLMSVGAWTQYALDNFATVAEAVEALSREPFAIVAPALPDGNAAGGHLSLADASGDSAIFEYVKGKLVIHHNRSYTVMTNSPPFDQQLAISTYWKNIDGLSFLPGTINSSDRFVRASWALQYAPKEKDNRLAVATSFSMIRAISVPLGLAEAGKPNIAGTIWRSVSDIQAKRYYFESSYNPSIFWVDLAKLDLAAGSKPRRLDLTSRPIYAGEVSDKFAPAEPFKFLSQ

SEQ ID NO: 13070 - protein, 419 aa, BradyrhizobiumColbertium
MPVATAASQPPATAVETDPEALGWMRGFPPSPDRTITFQDGSFRSFPELRWAWSNIRQLVPTVNVWRGAGPASVLPRDDHDIGTVASTTMDGRPMTFAKMLEETYADGIAVLHRGTLIYERYFGALKPHKPHIGMSVTKSFTGVLAGMLVAEGKIDPQAPVTDYVPELKASAFGDARVHEVMDMTTGLLYTEVYTDKNSDVWGLRRANGMAPIPPDYDGPTTIFDFLIAQKKQGEHGKAFAYKTVNTDVLAWICRRVSGMSLSDLLSERIWQPMGAEEDAHYHVDRIGTESGGGGLSTTLRDLARFGETMRNHGRFNGRQIVPPRVVEDIARGGDPEKFKPAGYTTLPGASYRNQWWVTHNEHGAYMARGVYGQGIYIDPKAEMVIARYASHPMAGNAANDPLTLPAYMALAKALMAGG

SEQ ID NO: 13071 - protein, 114 aa, BradyrhizobiumColbertium
MKVRKFALAGASLERSPGQDGDIFAGNVIDQRHGGPITIGFGRYAPNQNLDETMKVDDVMIVLEGKLSVTSDGNTVTAGPGEIVHMPKGETVTIRSHEQGAVTAYVTYPHWQEA

SEQ ID NO: 13072 - protein, 107 aa, BradyrhizobiumColbertium
MTLEHTAIIGDHWDQFGPGAVGIGWDLALAGLERYLATGASVDHETAEAWMVSPEGKDFMTTSGESWRAAHVAGGVDPATAKERSDRTIAFYRGETPPDITHPGTGS

SEQ ID NO: 13073 - protein, 120 aa, BradyrhizobiumColbertium
MHAFEVLADPVRRRILELLAPGEMASGEVVEAIGAEFGITQAAVSQHLKVLRESGFATVRAEAQRRLYSVDAAGLRAVDSWIGQFRTFWEPKLDALATEIARGKRERRTAPMTKRGGKRA

SEQ ID NO: 13074 - protein, 169 aa, BradyrhizobiumColbertium
MTIRPVLRYPDRRLASPARPVTDFDDALRELALDLLDTMRAAPGIGITAPHIGVPLRVVVLELDAEAGPQTYVNPEITWRSPEMILHREGSVSMPGINDEVQRHARVRISYQDLDGNMHAEESEGLRAVCHQHEIDQLDGMFWIQRLSRLKRERLIKKFEKMSRSSQAG

SEQ ID NO: 13075 - protein, 194 aa, BradyrhizobiumColbertium
MSNVSSTANDILACARTLIIAGGYNGFSYADIADVVGIRKPSIHHHFASKVDLVRTLVSRYREEAQAGLAALERNVADPGEQLRSYIAYWEVCIKDATAPFCVCALLASELPILPEEVAVEVRAHFRALASWLTSAMERGKRQGRLQLASTARIEAESFMATVHGAMLSARAYGDPKMFGTITRPLLDRLSSRH

SEQ ID NO: 13076 - protein, 190 aa, BradyrhizobiumColbertium
MRAHELTSDTADQWLKQYYFLRAAFSVGWVVLALAIAPSSAVIAATLLVAYPAWDAAANYLDALSNGGLNQNRTQGLNVLVSLATTIAVILALQVSMNWVLGIFGAWAILSGLLQLGTALRRWKLFGAQWAMVLSGGQSALAGGFFIFQASMPAIPSISNVAGYAAVGALYFLVSAVWLTVTDWRRRAAT

SEQ ID NO: 13077 - protein, 59 aa, BradyrhizobiumColbertium
MTYGVSNVQGLDRPLTRRAKHRHKCHIPPILISSTTPIVTTAGPFDGRFPHRDVTPYAA

SEQ ID NO: 13078 - protein, 405 aa, BradyrhizobiumColbertium
MTSSNYRWVIVAAGGLLGCVAVGGMFSLPVFLQPIAKDTGWSVTGISSAMTVGFLAMAFTSMAWGTLTDRFGPLPVVLTGSIVLTLSLLAASHATSLIVFQIVFGLLVGASCAAIFAPMMATVTGWFDTNRSLAVSLVSAGMGMAPMTMSPLAAWLVSGHDWRTSMQIIALVVGAIMIPVSFLVRRPPALAQAAVAPGEGAAQAEMSMGDALRSPQFLILLATNFFCCATHSGPIIHTVSYAVSCGIPLVAAVTIYSIEGFAGLGGRIAFGLMGDRFGAKRVLVSGLLLQAFGALAYVFANQLATFYAVGAIFGFIYAGTMPLYAVLIRENFPLRMMGTVIGGTAMAGSLGMATGPLAGGLIYDAFSSYAWLYIASWAMGLGAFLMAMTFRPFAKPQGEVAPAPA

SEQ ID NO: 13079 - protein, 128 aa, BradyrhizobiumColbertium
MTTDELAEFYRDYIACLNRRDWPALRQFVHEDVAHNARPLGLPGYRAMLERDIREIPDLQFHIEMLISAPPRIAARLKFDCAPVGTFLGLAVNGKRVSFCENVFYEFRDGKIRQVWSVIDKLAIEAQL

SEQ ID NO: 13080 - protein, 290 aa, BradyrhizobiumColbertium
MLDPVSRVRRFNRAVTSAVGALDTSFLGRGRPLGAARVLNAIGHGRSDVAEIRDYLALDSGLMSRLLRSLEDEGLIETAAHEDDARRRVAKLTRAGRREFAAYEALSNAQAEGLLAQHSQREALLAAMDLIASALTRERVALDEVDPRSEQARYCLGEYYAELGRRFSQGFDVSLSRDPDAKDMRRPRGTFIVAMSDTLPIGCVGLKGTDHGYAEIKRLWVAPAARGLRLGRRLMDAAEDAARELGIGLLRLDTNSALPEAGQLYRSTGWREIPRFNDDPYPDLFFEKRL

SEQ ID NO: 13081 - protein, 554 aa, BradyrhizobiumColbertium
MSGQERKVKGSDLFVAALENEGVDKIFGIPGEENLDLVESLRTSKIELILTRHEQAAAFMAATHGRLTGKPGVCLSTLGPGALNLSTGAAYAHLGAMPMILITGQKPIMSSRQARFQIVDVVATMKPLTKLSRQIVSASSIPTVVRDAFRVAMEERPGPVHLELPEDIAGDEVPPAPVIPVHPIEIPVAHHVALDRAAELILAAKRPLVMMGAATSRPRSTHGIASFVQRTGIPFFTTQMGKGTVPGGTNLYMGTAALSERDYVHDAIDAADVIVAIGHDPIEKPPFIMGPAGPKVIHVSYTPASVELVYFPDAEVVGDVGPSLELLADRIEGRLPQAAALLPLREEILKHLADRATEARWPPTPQRIVHDIRRVIPENGIVALDNGMYKIWFARNYRTRVANTLLLDNALATMGAGLPSAMMAAMLYPDRRVLAIAGDGGFMMNSQEMETAVRLKLNLVVLVLEDNAYGMIRWKQAVDRFADYGMTFRNPDFVVYGKAYGAKGHRIESIDRFGPTLEEAFQEGGVHLVSIPVDYSENVRVLVDELRAHEKAKA

SEQ ID NO: 13082 - protein, 104 aa, BradyrhizobiumColbertium
MGVDVHGRDATKAAKRAVSDAIRHSSLGFFRMIGKTANDMFVDVTIAVPNPEAVDKEAVAKELPYGTVTVTAVKGGLEIPSATEAANDPILIANAAVIVSFDKD

SEQ ID NO: 13083 - protein, 230 aa, BradyrhizobiumColbertium
MSDTDLALLDRPIWSALTTSQRHLAEGGPRALRYPVDMTPFADMADMSAESFAALGDLLSGSQVAALFTPEPVEVPAGFKVVLADTGEQMIGSPADSPLRDAEIVTLGAADVPAMMALTELTKPGPFARRTHELGTFLGIRSGGELVAMTGERMKPGKFVEMTAVCVHPDYRGRGYAQALLAAVARRIEARGEIPFLHVFSSNTSAIALYERQGMWIRRRLHVTALMKQA

SEQ ID NO: 13084 - protein, 395 aa, BradyrhizobiumColbertium
MDARTPDFSAARTAMQRYVDQEIIPGASWAVLRGREVLDQQCVGFADREANTALRPDHIFRAFSNTKIFVTCAIMLLVEEGGIGLDDPVEKVLPQLGNRKVLKQGAASLSDVEPATSPITIRKLLTHTSGLSYGIFDPGTVLFKGYNDARVLNPLTPLSDLIDKLADLPLSYHPGTAWEYSVATDVLGRVVEVVSGQPLDVFLKARIFDPLGMIDTGFHVPEAQQGRLVALYNGADVLDPMKPGLTRADNLPFPQAYRRPFPRLSGGGGLVSTLPDMLALVRALLPGSDALLKPATLRLMMTNQLGAGQTIRFATLGPIPGKGFGLGGAVTFAPTPFDPPNSTGEFQWGGLAGTHWWICPEANTAGVLMAQRYMGFWNPFFFEFKRLAYQAVGAN

SEQ ID NO: 13085 - protein, 190 aa, BradyrhizobiumColbertium
MVDEDSELGRRYIAAMQLAGRYAYAGREWVVERVRQIIGGSVTETVHNHHNYAWRETHDGKDLWVVRKGATPAFPGQKGFVGGSMGDDAVILEGVDSPEARASLYSTVHGAGRLFGRREAKRRFSRAEMDQWLNERGVTLIGADLDESPMAYRRLPDVLAQHAGTVKVLHTLRPFAVAMAGEGEFDPWKD

SEQ ID NO: 13086 - protein, 257 aa, BradyrhizobiumColbertium
MRRPDPYMERARELCLAAGVDPDSRVGEGRGQPAWCLYKDAARKEHLAREANATADSIAEFRTQDARFQNAPLKVFGPHEDATIAQMRNCMAVGNVVSGVICADGHLGYAQPVGGVIAYEKQISISGVGFDIGCGNMAARLDTRFADIAQIAPTIIRDVAKVISFGVGRANAERAEHELFDDGDAWRESDGGLPQESGEPARHCRIGQPLCRPHARRGRLRLDRRPFRKPRSRAHLRDALPQGCRRQGRHERSAGRG

SEQ ID NO: 13087 - protein, 441 aa, BradyrhizobiumColbertium
MVRLNKIVRAFTREGARARRFTPEMELKRALMNCLLWEDQFYEDGVAIADRIKALVPKVAPAKVAELAIEAREVMKLRHAPLLVIREMARSEKHRGLVADTLARVIQRPDEMTELLAIYWADALGPMQQRKRQPVSAQVKKGLARALTKFDAYQLAKWDRDGAVRIRDVLFLVHAKPKDAGQAKVWKQFVDGELASPDTWEVSLSAGKNKRETFERLIAERKLGGLALLRNLRLMQNALVPRETIAGAIEAMRTDRLLPYRFITAARYAPDFEPELEAAMLKSVKDHVRLPGRTRLLIDVSGSMFATLSAQSEMTRAEAACGLAILAREICDEVEIFTFSNEVVKVPPRRGFALRDAIINSQPHGGTYLGKAVTEIDRKGDRLIVFTDEQSHDQVPEPRARGTMVNVASYQHGVGHGAWTRVNGFSEAVVAWIAASETALN

SEQ ID NO: 13088 - protein, 222 aa, BradyrhizobiumColbertium
MTSNFLGLDGFRFGWVSAWIDDRGDHGFDYSPGLTRLLAMRHARAMIDMPIGLKSSGYRACDLRARELVGPAVFLGARRDLWTFPDMAAANRHYWAHEGEGRGISVQLWNIRDKLREVDDAMTPTRQATIGEAHPELIFWNLAGQVRLAKKTSAQGLEQRISLLEQRGFTRLPKWLKLRHGTGIARDDLIDACACAVAARDSRQRVGGKEFDPRGLRMEINY

SEQ ID NO: 13089 - protein, 77 aa, BradyrhizobiumColbertium
MLARCRQMNIEKRALLDHAKRCRRVANNLAHDAAARRLRAMAETYEARAARLDDESDSLDPSRNGRRHFGAEIDREN

SEQ ID NO: 13090 - protein, 48 aa, BradyrhizobiumColbertium
MYDVRQWATAMLAISFTAMLLVTGRWFIDYRLQHETRTPVVASATVPL

SEQ ID NO: 13091 - protein, 198 aa, BradyrhizobiumColbertium
MLEEIGLPYEVHLVDFGKDDQKTAEFLSLNPNGKIPAILDPDGPGGRPLPLFESGAILQYLAEKTGKLLPVDAVRRYQTIQWVHFQMGGIGPMFGQVGFFHKFAGKDFEDKRPRDRYVAEAKRLLGVMETHLSIRQWFMDDDYTIADISMLGWVRNLIGFYGAGDLVEFSQFKTVGAWLERGLARPAVQRGLSIPQRP

SEQ ID NO: 13092 - protein, 123 aa, BradyrhizobiumColbertium
MHVTHDPAAAASPTIDFNSFLAVDVRVGTIVDAKPFPEARKPAWRLWIDFGPVIGVRKSSAQITENHPLDSLVGQQVAAVVNFPPRQIGPVVSEVLTLGFPDANGKVVLVQPSKPVPNGGRLF

SEQ ID NO: 13093 - protein, 119 aa, BradyrhizobiumColbertium
MPNIIYGIKNCDTMKKARAWLDAHGVPYEFHDYKAAGVEKDRLERWSGKVGWETLLNRAGTTFKKLPDSDKDGLTEKKALALMLAQPSIIKRPVLEVGGKLLVGFKPEIYAKEVGGKAR

SEQ ID NO: 13094 - protein, 215 aa, BradyrhizobiumColbertium
MDFAGAAPSVVKSIRQRDLLNTWLRLYARQQIAPAIWEYQPARLEEELSDLIYYTVDFSAPTPRLIIQSEGTRISRAYGHTGKGVPLDDYIGPQLAPLVMPIYHQCVARGLPVYSVADVEDIYGRNVAYERLLLPFQTDGKVCHVIASVKTFCEDGGFEIKNLMRGNDALPRPKMRAVIDRELFHRAPGRISPAEVVELSDQPDSGIVTEIIELN

SEQ ID NO: 13095 - protein, 251 aa, BradyrhizobiumColbertium
MADEFILETEGLTKEFAGFFAVRDVALKVRRGSIHALIGPNGAGKTTCFNLLTKFLKPSAGKILYKGQDITAMAPADVARMGLVRSFQISAVFPHLTALENVRVALQRQHGSSFDFWRSKSVLNRFNDRARELLNDVGLSEFANTPAVEMPYGRKRALEIATTLALDPEMMLLDEPMAGMGHEDIDKIAALIKRISAKYTILMVEHNLSVVANLSDIITVLTRGQVLAQGHYSELTKDERVKEAYLGAGHA

SEQ ID NO: 13096 - protein, 248 aa, BradyrhizobiumColbertium
MPDTAIAEAPAMATTGGNILQVRNLEAWYGESHILHGINFDVNAGEVVTLLGRNGAGKTTTLKSIMGIIGKRSGSVKFNDQEIIRATSDKIARMGIAFCPEERGIFSSLDVRENLMLPPVVREGGLPLDQIFELFPNLKERLGSQGTKLSGGEQQMLAIARILRTGASFLMLDEPTEGLAPVIIQQIGHTIARLKKEGFTILLVEQNFRFASTVADRYYVVEHGKIIDGFSNAELAANMDKLHTYLGV

SEQ ID NO: 13097 - protein, 407 aa, BradyrhizobiumColbertium
MKTMSIASLLLTTALAVAVTGAAFAQDKTVKIGALSDQSGLYADLGGPGSTLAAQMAVEDSGLAAKGWKIDIISGDHQNKPDIGTAIARQWFDVDKVDVIVDVPNSGVALAVNNVIKEKNGVYINSGAATSDLSNAQCSPNTVHWTYDTYMLAHTTGQALVKAGGDSWFFLTADYAFGAALERDTSAVVTANGGKVVGGVKHPLNTPDFSSFLLQAQSSKAKIIGLANAGGDTTNTIKQAAEFGIGKGGQKLAALLLFLTDVKAIGLETAQGLNFTETFYWDMNDQTRAFSKRFAARMKNNAPPTMVQAGVYAGVRHYLKALEALGGNPHDGVKIVQKMKSMPTEDDLFGKGEIQPNGRTIHNAYLFEVKKPSESKGPWDFYKLVGTVPGDQAFTPLSESKCALLKK

SEQ ID NO: 13098 - protein, 278 aa, BradyrhizobiumColbertium
MGLINGSFYALLSLGLAVIFGMLNIINFAHGALYMMGAFVAYFLLNLGGINYWWALLLAPIIVGIFGMILERTMLQWLTGLDHLYGLLLTFGIALIVQGVFQNYFGSSGLPYAIPDQLKGGMNLGFMFLPIYRGWVVVFSLVVCLATWFLIEKTQLGAYLRAATENPTLVRAFGINVPRMITLTYGLGVGLAALAGVLSAPINQVRPLMGADLIIVVFAVVVIGGMGSIMGSIITGFALGVIEGLTKYFYPEASNTVVFVLMVLVLLVKPTGLTGRAA

SEQ ID NO: 13099 - protein, 322 aa, BradyrhizobiumColbertium
MTTLTDDTLPATPRAMRDEMTVFVVMALLLAAVPFTGVYPFFVMQALCFALLACAFNLLIGYGGLLSFGHAMFLGTAGYCSAHALKVWALPPELGILVGVAAAFVLSIVTGYISIRRQGIYFSMITLALSQLLYFIYLQAPFTHGEDGIQGIPQGRMFGLLDLSQPTVLYYVVLVGFLAGFLLIFRIINSPFGEVLKAIRENEPRAISLGYRTDQYKFLAFVLSGTLAGLAGALKVFVAQNASLTDVHWSMSGEVVLMTLVGGLGTIFGPVVGAFVIIAMQQYLAGFGQWVTVIQGVIFVTCVLTFRRGVVGEIAHYFRRSL

SEQ ID NO: 13100 - protein, 214 aa, BradyrhizobiumColbertium
MMRWFRAFLPREERFFDLFDRHAQTVIQGAIALQGMLNGGQETPVYCQRVNQFENEADNITREVLTAVRRTFITPFDRGDIKNLITSLDDAIDQMQQTAKAVMLFEVRSFEPPMREIGALLIECANLVGRALPLMQSIGPNVAMLTAITEELGKLEGRVDDLHDIGLKELFLKHREGNAMDFIVGAEIYDHLEKVADRFDDVANEINSIVIEQV

SEQ ID NO: 13101 - protein, 330 aa, BradyrhizobiumColbertium
MAFPVLVGLIAVALLFDFLNGLHDAANSIATIVSTRVLRPQFAVFWAAFFNFIAFLVFGLHVAQTIGTGIIDPAVVDAQVIFAALVGAIVWNLVTWALGIPSSSSHALIGGLVGGGMAKAGISAAVWSGLSKTVLAIVLSPLVGFLLAMLLVAVVSWASVRSTPFAVDRAFRILQFASASLYSLGHGGNDAQKTMGIIAVLLYSQGHLGSEFSVPFWVVLSCQAAMALGTLMGGWRIVRTMGLRITKLTPMQGFCAETGGAATLFMATYLGVPVSTTHTITGAIVGVGAARRVSAVRWNVASSIVYAWVITIPASAIVAALTWWVVQLVK

SEQ ID NO: 13102 - protein, 104 aa, BradyrhizobiumColbertium
MAWSILFVAGLLEIVWAIGLKYTEGFTRLVPSVITLAAMAGSVILLGLALRSLPVGTAYAVWTGIGAVGTAALGIFLFGEPASALRLASIGLIVAGIIGLKLVT

SEQ ID NO: 13103 - protein, 540 aa, BradyrhizobiumColbertium
MSDIATPTAESPARSPLAAEVARRRTFAIISHPDAGKTTLTEKLLLFGGAINLAGQVKAKGERRNTRSDWMKIERERGISVVTSVMTFEFEGLVFNLLDTPGHEDFSEDTYRTLTAVDSAVMVIDAAKGIEARTRKLFEVCRLRDIPIITFINKMDRESRDVFELLDEIEKTLALDTTPMTWPVGRGRDFLGTYDVINGGVRLLEGGGAKTGAAQQIAIEELAKLSANLDVSAVKDELELVTEASKPFELEAFREGHLTPVYFGSALRNFGVGDLLEGLGRFAPEPRAQDSDQRKVEATDPRMSAFVFKIQANMDPNHRDRIAFARLCSGKLSRGMKAKLVRTGKSMPLSSPQFFFAQDRSVADEAFAGDVVGIPNHGTLRIGDTLTEGEDFNFVGVPSFAPEIVRRVRLTDAMKAKKLKEALQQMSEEGVVQVFRPRDGAPALVGVVGALQLDVLKARLEAEYSLPVEFEVSEFQLARWVSSEDRKKLDTFIAANTSSIADDVDGDPVYLARNEFYLGYTKERAEGIEFSNVKDVKKKG

SEQ ID NO: 13104 - protein, 192 aa, BradyrhizobiumColbertium
MWRGIVVFLLLTISTIAADAQRRQINPIPFAHEPCSVLDGRPCTPSYCSPLESGPCIPEIGYPYGQNLQLTIQSVPSEADRVKYRKPDHDLDTIGDLFAELRSCWSPPADNAREGMQMAVRFSFNKVGGLVGPPRLTFATAGVPAATRTIYLDAINASLNACLPLKFTSGLGGALAGRPIAIRYVDNRKLGH

SEQ ID NO: 13105 - protein, 254 aa, BradyrhizobiumColbertium
MGLLVMILGLVLFFGIHVFTTKREARAQAIARLGEGTYKILYSLISLAGLALIIWGYAHYRATGWIDVWYPPKAMKHITLALMLPAVILVVASYLRGRIYATLKHPMLAGIKLWAAAHLLANGDLGSIILFGSFLGWAVFDRITLKHRADSGAPPIPVGGVSNDLIRGRGRHRGLSRTGLRVPSGRDRRSRDRGLAGQHKTQPGCPCAEADKSNKPRALRWIGRNLRSRRCVSRRALAIGWCRHFRIGLRASGR

SEQ ID NO: 13106 - protein, 496 aa, BradyrhizobiumColbertium
MIAEARDRNADGEALICANVRLSWQQAVEQSARIAAGFRRLGLQRGDRVAILLGNRMEFPLLLFAAAHEGLVTVLLSTRQQKPEIAYVLADCGAKILIHEAALAERLPDAQDVPAVIHRIAVDDDPAGSRFAVLADNAPAPAPVEVNEEDTAMILYTSGTTGKPKGAMLAHCNIVHSSMVFVSCLQLTQADRSIAAVPLGHVTGVVANITTMVRCGGALIIMPEFKASDYLKLAARERVTYTVMVPAMYNLCLLHPDFDGYDLSSWRIGGFGGAPMPVATIEKLKAKIPGLKLMNCYGATETTSPSTIMPGELTESHIDSVGLPCPGARIVAMGPDGRELPPGEIGELWIQSASVIKGYWNNAKATVESFTGGFWHSGDLGSVDAEGFVRVFDRQKDMINRGGLKIYSAEVESVLAGHPAVVESAIVAKACPVLGERVHAVVVTRMPVADTDLRTWCAERLSDYKVPETLAITTEPLPRNANGKVLKRQLRELLGS

SEQ ID NO: 13107 - protein, 217 aa, BradyrhizobiumColbertium
MSELLNEVDEELRREQLKKLWDKYSIYFIALMVLVVAAVGGWRGYQYLEAKKAAEAGAAFEKAVELSEQDKHADAEKAFTELAAKAPSGYRTLARLRAAAEAANRDPQAAAKMYDDIAADRSIGGEWQDLAKIRAAGLVLDSASYADMQQRLEGSAAPKSTFRHSAREMLALSAWRNNDMTAARKWLDAIGEDGETPPGLRSRAEALQALLPPVAKS

SEQ ID NO: 13108 - protein, 175 aa, BradyrhizobiumColbertium
MRRTPRLIAAAVLIAFTGVLGGCSSFDPSDMLDFLDTKKKLPGDRKPVFPEGVPGLEQGVPRELYKGAQQQPDPNAPAVAALPAEPPPEPAQGAKAAKSRQPAAAEAPAGEIDGEAQPEAAPPTAAPPPKHKIVRRRTTAPPPDQPVQQAQPAQPPQQQTQSVFPAPLPSGSFSR

SEQ ID NO: 13109 - protein, 460 aa, BradyrhizobiumColbertium
MSFTIAIIGRPNVGKSTLFNRLVGQKLALVDDLPGVTRDRREGEARLGDLEFTIIDTAGLDEGVKGSLTARMQEQTETAIGQADALFFVIDARIGLTPTDRAFADFARKANKPVLLIANKSEGKHGDAGAMEAFALGLGDPIQISAEHGEGMGELYDALAKLMPEPVEENDDEDDAPISEEEAATRPIRVAIVGRPNAGKSTLINHLLGEERLLTSPEAGTTRDSIAVEVNWRGRDFRVFDTAGLRRRSRIEEKLEKLSVADALRAVRFAEVVVLMMDTQNRFEEQDLRIADLIEREGRAVVLAVNKWDLMETKGGGAISSLRRDADHWLPQLKGVPIVAVSGLMGEGIDRLMQAIQDAYAVWNRRVPTAALNRWFEQAIQANPPPAVSGRRLKLNYITQNKARPPSFVLFCSRADAVPQSYLRYLTNSMRETFDLPGTPVRITLREKANPFAHKRKRPS

SEQ ID NO: 13110 - protein, 417 aa, BradyrhizobiumColbertium
MSDGAGEAVAASAAPARRGVVAFIFVTILLDMLALGVIMPILPKLIESFVDNDTAHAARLFGLFGTAWALMQFVFSPLLGALSDRFGRRPVVLLSNFGLAADYVLMAFAPSLVWLFIGRVISGITSASISTAFAYISDVTPPERRAAVFGRIGAAFGAGFILGPALGGLLGDVDPRLPFWASAALSFANALYGLFVLPESLAPDKRAPFRWRSANPVGALHLLRSNAALAALSIVNFIAQVAHVVLPSTFVLYATYRYGWDSRTVGLTLAMVGICAMVVQGLAIGPIVRVLGERNALLLGLCCGALGFVILGAAPTGPLSWLGIPVLSLWGISGAASQSLMTRLVAPHQQGQLQGATASVQSVSQLVGPFLFTLTFSYFIGAGAPLHLPGAPFLLAAALMVVCVAIAVRTLGATKNA

SEQ ID NO: 13111 - protein, 48 aa, BradyrhizobiumColbertium
MLQPFRPRTTGWRLGLIVDALAAAHDAAVRMIDTSIACAHQQGARIAI

SEQ ID NO: 13112 - protein, 122 aa, BradyrhizobiumColbertium
MEFASADAVRGATEVQRSMAEQTAVPQDQRIEFRMGIHVGDIILDNNDIFGDGVNIAARLESLAEPGGVCISDDTYRQIRGKVDIACDDLGPQNLKNIADAMRAWRLQLTNRASSMAHPVRA

SEQ ID NO: 13113 - protein, 387 aa, BradyrhizobiumColbertium
MLPFQNMSGDPEQEYFADGMVEDIITALSRFNSLFVIARNSSFTYKGKAVDIKRVGRELGVRYVLEGSVRKAGGRVRITGQLIDAASGAHLWADGIDGELTDVFELQDRITTSVVSSIAPKIEQAEIERVRQNPTNVPDSYDSYLQGLALASRGQGAEARSLFKRAIEQDPLYAAAHAMAAYIYLVDQAQYGAIADAGMRADAAALANAALKLANQDAFVLARSAQALTYLGLEYDRGASLVEQAIALNPNLSVAWLARCWVSVMRADAERGIESFEKVMRLSPLDPLKPFFVAGVAHCHWFQGRFEEGCELAKEAIQIRPHLQPFASYIVNSVALGDLPEARKAARRLLEFDPSFRMSGAAAIFLIRSAEYREKFLGALRTAGLPD

SEQ ID NO: 13114 - protein, 58 aa, BradyrhizobiumColbertium
MEKTELPPEDFPLMLDGNALVTQDGTKVADAQSVRLAEDIAQRLNENAARKREDRWAL

SEQ ID NO: 13115 - protein, 197 aa, BradyrhizobiumColbertium
MKKFTIAAIAVLSIAGSGAVYAQYHRPWTEHVRHMRMNPEDRAALVDARIAAVHAGLKLNADQEKLWPPVETAVREFAKLRIDRANARMNAGPNDADKPEDPIARLRQRAEDMGASSAALKKIADAADPLYKTLDEGQKRRLAVLTRHRGPFGGGEDGPRHRHFMERGMDRMMGHGMDHFHHHRFDRDEGRDREGRL

SEQ ID NO: 13116 - protein, 334 aa, BradyrhizobiumColbertium
MRTFAIAASIAALALGLTGPASAQSPIIIKFSHVVATDTPKGKGAEKFKELAEKYTGGKVKVEVYPNSTLYKDKEELEALQLGSVQMLAPSNSKFGPLGIREFEVFDLPYILPDLKTLRKVTEGPLGTRLLKLLDAKGITGLAYWDNGFKQMSANKKLVTPADYQGLKFRIQSSRVIQAQFKALSSLPQVMAFSEVYQALQTGVVDGQENTWSNIYTQKMHEVQKYITETNHGYIGYVVIVNKKFWDDLPADIRDQLSKAMKEATAFSNAQSQKENDDALAEIKKSGKSEIIKLTPEQDEAMRKAMEPVYKDAASRVGQPLIDEFLKEAKGTTN

SEQ ID NO: 13117 - protein, 520 aa, BradyrhizobiumColbertium
MATQNKSEKDRVIIFDTTLRDGEQCPGATMTFEEKLEVAELLDDMGVDVIEAGFPITSEGDFQAVSEIARRSKNAVIAGLSRAHPADIDRCAEAVKFAKRGRVHTVIATSPLHMRVKLNKTPEQVIETSVAMVARARNQIDDVEWSAEDGTRSEMDFLCRIVEAVIKAGATTVNIPDTVGYTVPEEYTHFMRTLIERVPNSDKAVFSVHCHNDLGMAVANSLAGIVGGARQVECTINGIGERAGNAALEEIVMAINVRNDKFPYWNKIDTTQLTRASKVVSAATSFPVQYNKAIVGRNAFAHESGIHQDGVLKDASTYEIMRPEMVGLKQSSLVLGKHSGRHAFVHKLEEMGYKLGPNQLEDAFTRMKALADRKKDIYDEDIEALVDEEMAASHDRIKLTSLTVIAGTHGPQRATMKLDVDGQIKIEEAEGNGPVDAVFNCIKRLVPHEAKLELYQVHAVTEGTDAQAEVSVRLAQDGRSMTARAADPDTLVASAKAYLGALNKIVMKRQRDTVTTAAAS

SEQ ID NO: 13118 - protein, 411 aa, BradyrhizobiumColbertium
MTRQEARDQEQRDQDAALSRRTLVRGLAISAATIAGAGAALAQTGPAAPPSTITNPPRDFGPRGAPTTYFWDPDIIAVDPSFNDLAQPNTAIKRLYTGLLWAEGPAWSAQGRYLLWSDIPNNRQMRWSEDDGRVSVFRSPSNNSNGNSFDFQGRQLSCEHLTRRVTRYEHDGTATVLADSYQGKRLNSPNDIAAHPDGSYWFTDPPYGGQLYEGEPDVAGGPSNTAGKLNPRIGQPAGFVPGRRELPTNCYRIDPSGRVDLVVTEDQVPDPNGLCFSPDYKKLYIASTGKGPGDTGPGGKGEIFVFDVGSDNKLSNLKRFSDCVIDGVKCGPDGLRCDVNGNLWASSNAGRAVGYSGVTVWSPEGKLLGRIRLPEVCGNVCFGGPKRNRLFMAASQSLYAVYTATQGAGPG

SEQ ID NO: 13119 - protein, 45 aa, BradyrhizobiumColbertium
MRDASDDNIPALEIGDAPAKDAGALLFTDYVAQPGPAPCVAVYTA

SEQ ID NO: 13120 - protein, 436 aa, BradyrhizobiumColbertium
MPTSRRQLLKTSAAAAAALSLDWTRAQAQAETLRIGLIYDLTGPFAAGGSVASSIGAQIAIDLVNEQGGVSGKYKVAPVAADSQSKPDVAINEAERLINQEKIDILNGVYASSHAVPLAAKVEQQKKILWITTAVSTAVFKDKNLQYVFRAQIHSDQYGQAFASFINEHAKAKLGMDPKEVKVALIHEDGPYGVGVASADEAYAKQAGIPVVLREGYSASAPDLSVLVTKIKRAKADVISHAGYNPDITLFLRQARESGLRFKMLFGAGAGYSQLDKLRATFGADIDNFCNIDPVPAQLLDPAKLAPGMGDLIKTMVSRYQAKTGATDVPPHCSMGFNQTWVLLNNVLPVAKEKYGSFEPEAIRKAALDVDIPAGGTIQGYGVKFFPPGTPLSGQNERSTPVVMQNAGEHISVVWPTNIRTQDPVFPLPKGSTYAA

SEQ ID NO: 13121 - protein, 389 aa, BradyrhizobiumColbertium
MARIRVGLVGCGFVSELHMHAFRRVYGVRVEVAAVAARGDRVLQFADRHNIARVYRNFADVIADADLDVIDICTPPNLHTGMIVGAMQAGKHVICEKPFAGYFGREGDKQPIGKHVPKALMYERVLEEMDATRAAIERTGRLFMYAEDWIYAPAVTKTAEIIRATKDKILFMKGEESHSGSHAAHAAQWAMTGGGSLIRMGCHPLSAVLYLKQVEAQARGENIRVASVTCDVGNVTAGLKPEERTYIKANPVDVEDWGTLTATFSDGTKATVFSGDMIMGGVRNLIETYTSGGSLFANITPNTHLMSYQTSEEKLASVYITEKVDRKTGWQYVCLEEEWTRGYLQEIQDFMECVATGRQPLSDLALAYETIKVNYAGYWAAEEGRRVVL

SEQ ID NO: 13122 - protein, 149 aa, BradyrhizobiumColbertium
MRIWKTAIACSLAGVVMAAQIGQATAGPMPTNVATMKAAAGDNVTPVHWRGGGWGFALGGLAAGAIIGGAIASGAPYGYYGGPYYGGYGYPGYGYGYAPAYYGYGYGPGYAYPRYYRPYRPYYSYGYYRPYRAYHRPYRVYHRHHYRHW

SEQ ID NO: 13123 - protein, 420 aa, BradyrhizobiumColbertium
MSAARPEPLARQALAFVLAGGRGSRLLELTDRRAKPAVYFGGKSRIIDFALSNAVNSGIRRIAVATQYKAHSLIRHLQMGWNFFRPERNESFDILPASQRVSENMWYVGTADAVYQNIDIIESHACRFIVVLAGDHIYKMDYEVMLRQHVESGADVTVGCLEMPRTESSGFGIMHVDENGWIHEFLEKPKDPPPMPGKPDVSLASMGIYVFDAKFLFDQLKRDAEDPNSNHDFGKDIIPYLVKNGRAMAHQYSTSCVRTGSDLRAYWRDVGTVDAYWAANIDLTDVVPELDLFDRAWPIWSYAEITPPAKFVHDEESRRGQAVSSLVSGGCIISGASLRRSLLFTGVRVNSYANVENAVIMPYVNVGRGARLKNVVIDRGVEIPEGLVVGEDPELDAKRFRATEQGISLITQPMLDRLNK

SEQ ID NO: 13124 - protein, 484 aa, BradyrhizobiumColbertium
MTPVRVLAVASEVYPIVKTGGLADVAGALPVALKAHGVEMRTLMPGYPDVMRLLAGAEELRRWPDYFGGPGRLLAGSHDGLDLFVLDVPHLYARPGNPYVTSENIDWPDNGVRFAALSRIAADIGHGLVPAFVPDVVHAHDWQAGLAPAYLHYDNRPRPGTVMTIHNMAYQGKFAPELIGAVGLPWSSFNVNELEYFGGISFLKAGLQFADRITTVSPTYAREIQTDEGGMGFGGLLRARAGVLSGILNGIDVSVWNPQTDPHIAYRFGTEDLTFRAANKAVLQQQFNLDSSDEAPLLGVISRLSWQKGLDLLLEAIPTILREGMQLALLGSGDRDLQDRYQAAARANPGRIGVVIGYDEILAHLIQAGADALVVPSRFEPCGLTQLCALRYGAVPIVSRVGGLEDTIVDIGEADASGHDATGFKFGPVTADALAGTLRKANIAFHDKLTWRRLQRSGLATDVSWRNRAGDYAALYRSLMAARA

SEQ ID NO: 13125 - protein, 90 aa, BradyrhizobiumColbertium
MEPDMDPFAIKLLGFAAATCTTVAYAPQFIKVWKTRSARDISLGMFLVMVLGLALWLVYGLLSGDAPLVAANAVTMLLAGGILFMKLKYG

SEQ ID NO: 13126 - protein, 242 aa, BradyrhizobiumColbertium
MQYAKTAEAFARLPQLLPARPKAVLVITGHWEADAFTVSTSAHPPMVYDYYGFPEHTYHLKYPAPGKPELAAEVKALLTRAGFDCREDPGQGFDHGTFVPLGLMYPNADMPIVLLSLKSSYDPAEHIGAGQAIASLRDEGILIVGSGLTYHNMRGFNRPESTQVSYDFEAYLNEAIGNPDAARRNAMLADWESAPGARLAHPREDHLLPLMVAAGAAGNDAGRRVFVDEVAHVAMASYVFGG

SEQ ID NO: 13127 - protein, 58 aa, BradyrhizobiumColbertium
MRQEESRRSRHGACLVSNGRVPTHATGGEHRQAGMVSKPLTIWRPKSGRGRSSRPEDE

SEQ ID NO: 13128 - protein, 59 aa, BradyrhizobiumColbertium
MRKFALGDVVNSDKGRRGVVRAAFKSRDGQQFYAVEKDGAIDYLEEDRLSPAPRVELAA

SEQ ID NO: 13129 - protein, 468 aa, BradyrhizobiumColbertium
MAQPVGQFPFALTREGQMLGAVEGEVASFKGLAYAAPPVGALRWGPPQPTSESSEMHTAYDHGASCLQAALPESREDCLTLNVFRPFGLDGPFPVMVFIHGGDFVSGTANEPLFDGAKLAQAGLIVVTVNYRLGALGWLAHPGLSDSGGNYGLMDQIAALHWVRDNIAAFGGDPDNVTLFGSDAGATSIALLMLSAQSRDLFQKAILQSVPGRARLRTAHEAEAVGRQFAAALGPDTDLRAAEPQRLLAAERRLLEKSPRSFGPTIDGRLVTEDLAPGFAAGHQSRIPLIIGSNEVEADSGSESGIKEALASSGIASGELRKLYPDLATASDLSARLYTDMAFSEPVRLLARLHAAGGAPTFRYRFAYVPEARRGYPDADRGRELQFIFGAEGVPGAGILSRRDREVASRMRGYWINFARSGDPNGPDLPRWDTAGGDRLLLITNDRIASGDDPLAERLDRLANESRK

SEQ ID NO: 13130 - protein, 58 aa, BradyrhizobiumColbertium
MDVVLEETCRQLPHGGDHDSRRFIAERLIEAAQAGHTTLGELGIIARRALAELIGKGS

SEQ ID NO: 13131 - protein, 894 aa, BradyrhizobiumColbertium
MPDAMVATRASDERGTAQQVDVAVVGAGFSGLYLLHRLRKAGFSAVGLDEADDVGGTWYWNRYPGARCDIQTIDYSYTFDPELDRAWTWSEKYATQPEILRYLGFVADRYDLRRDIRFKTKVTEARWDDASERWLITTDNGAPVSCRHYVMATGCLSAPKPPEIDGVKDFKGEVYFTGRWPHDGVNLAGKRVAVIGTGSSAIQSIPLIAEQAAHLTVFQRTPNFALPAHNGPAPADRMSLLQGDRAAYREQARQSMAGVPYPQQTVVSWQLSDAERRERFERAWAAGDLVHILTQLWADQAVDLDGNKIVQDLIREKIRAAVRDPETAAALMPDDHPFGAKRPCLETNYYATYNRPNVTLVNLRQEPIKAITAGGITTARRSVDLDVIVFATGFDAMTGAIRAVHPITGRGGKSLSDVWAQGPQTYLGLTVEGFPNFFMITGPGSPSVLSNMAVSIEQHVDWVVDRLASLRDAGFTTIEPTETAQAGWGRHMADCSMLTLHRLANTWYTGANVPGKVQGLMPYTGGVGPYRSICDEVVSRGMLGFKLTGPGGAVQCNDGEVVRLQPDVRLVLNLLASLNLPPIESMGAEGARAFVNEFNKSRPAGRPIGDIVDGTLPVADGALPYRVYKPATPGPHPVVVYFHGGGWVLGDEQSDEPFCRDMVRRTGMMFVSVGYRHAPEHRFPTAAEDGYAATRWIAEHAAELGGSTCPVLVAGWSAGGNIAAVTCQLARDRGGPAIAGQLLVCPVTDCSFDRPSYNDNATGYFLTRSLMYWFWDLYCSPADRIDPRVSPLRGKVAGLPPAFVVTCEFDPLRDEGVAYAEAMEAASVPVEQLKARGHFHSSFAMVDVVITGAPGRAQMARALRRFAGLPPELSQDENSKSHTSPGLRIAAAAS

SEQ ID NO: 13132 - protein, 90 aa, BradyrhizobiumColbertium
MGGVVGDSKVDFGAPATLHKWPSLANQRRPDREPYEVIEGTLDDCISAFMAKPAATRHLYEIRTVAQPPLVTEILMPEHIIELSRLREFL

SEQ ID NO: 13133 - protein, 101 aa, BradyrhizobiumColbertium
MLEAGVPIPVVPYGADQTLFVVIDRLDRSTEVRVERSDLEATIGELVAGCFNDPIKVISFNTLEHWMKDISSDVAGEIKARCDIDGVTLPDYLSDFVENHS

SEQ ID NO: 13134 - protein, 78 aa, BradyrhizobiumColbertium
MSIIRLGSALRFSIWFYFLRSMRLSHPPSFQSAELLFCSGVMTVFEEEDIMGLGRGALLWMLGVPLPIVLLLALFWNN

SEQ ID NO: 13135 - protein, 51 aa, BradyrhizobiumColbertium
MNTIKYLEDQAARAERLAKRITDTSTIEKLLTFAGERRREIEAIAGKHRSA

SEQ ID NO: 13136 - protein, 180 aa, BradyrhizobiumColbertium
MSCIARTESARISVATSCRLLLAIAGAASLAACAQAPVGRQKADLAATGRHAAVERPHRVAALHPRPISRARAPADDAKQAASHGVASFYSDTQTASGEKFDRNELTAAHPTLPFGTKLRVTDTSSGRFVTVRVNDRGPYVRGRVVDVSPSAAEALGMVDKGITNVRLEVVQLGATSRGR

SEQ ID NO: 13137 - protein, 332 aa, BradyrhizobiumColbertium
MTGEAYDSFVDEFIQAARKTFPGVLIQFEDFANHSAFKLLHKYRDEACVFNDDIQGTAAVALAGLFSALRISGGKLKDQRILFLGAGEAATGIADLVVSAMMAEGASEADALRRNWLVDSRGLVVGGRDGLSGHKLRYAHAGQAPIADFLTAIKTLKPTAIIGVAAVGGAFTPEVLKTMAELNEQPIVFALSNPTSKAECSAEDAYRYTEGRALFACGSPYDPVKLNGRSFVPRQGNNSYIFPGVGLGVIASGSRLVTDEMFMAAAHALADCVGKDDLAQGSLYPALPRIREVSIRIAAAVADVAYQRGLADGPAPNDVKALVQSQMYEPHY

SEQ ID NO: 13138 - protein, 207 aa, BradyrhizobiumColbertium
MGEFVNRPARVVARSTSSNPPQGMTLLRDPLLNKGTAFTEAERERLGLRGLLPPCVLTMETQAQRVLTNLRTLPTDLEKYVALNALHDRNEALFFRVVVDHIDEIQPIIYTPTVGLACQKYGLIFQRPRGMFISSRDRGQIADILKNWPYQAKLIVVTDGERILGLGDLGANGMGIPVGKLSLYSACAGVHPEACLPIVLDVGTNNE

SEQ ID NO: 13139 - protein, 278 aa, BradyrhizobiumColbertium
MVTIGLAVFVAAAIWEASNALLDRQINTLSRDGHYARAARLRTFQPMLRTALLCLIATVVGLTALSEIGVNVAPLLAGAGIVGIAIGFGSQKLVQDLITGLFLLLENTVQVGDNVSVSGLSGVVENVSIRTIRLRAGDGAIHIVPFSAVTTITNASRGAGNASVSVNVAYKEDTDRAGQILKDIVDEMRREPDFRALIRGDLELWGVDKVDGAMVSIVGQIRCTDAGRWPVQREFNRRMKLRFQQNGIEVASATQTILMHVVPPMDSAAHLTPRRAAG

SEQ ID NO: 13140 - protein, 493 aa, BradyrhizobiumColbertium
MAHKLAAALFAALFLTIPSLSDARAEPPAAANSTVTLSADEAKRALETLQDDKKRGQMIDTLRAIANASGPQLSAPEPKSPIPLAADGLGAQLLLTVSEEIGAISSEIASVARTLTHFPAFYYWIMRTANDPAAHNLLLEIAWKLALVFGSAFCAEWAIVRLIRRPVAFLEARVPQSPRLPVQVLPIADPPSSVTAVTPAPELQKRRHNLARMWQVVVRLPLVLGRLALELIPVFTFAGVATALLGTEIGEPTTVRLVILAVINAYAFSRGLICMVRALAGPFGLLPVRAETAAYIEIGARRIVGVGVSGIAFANVALLLGLHRAGYAALLRMAMLVVHLFVVIIILQCRRQVAEAIRAPAERQGIAARLRNRVAGGWHYLAIALDIALWAVWALNIRNGYSLLLQYFVGTIAVALVTRVVTMVTLSLIDRGFRITPDILQRFPGLEIRANRYLPLLRKIMSGVIAFIGFVAVLEVWGVDAIVWFYGGRSAAG

SEQ ID NO: 13141 - protein, 41 aa, BradyrhizobiumColbertium
MTAETVSSVETLPSGMIGEAVPSRNETERVFKCDLKAFDPA

SEQ ID NO: 13142 - protein, 316 aa, BradyrhizobiumColbertium
MSKKPSRSLAQELDRYITPFRYDGSGKFHLKDHKTDEKGDLDKEKALAILDANKQRLIEFQEKLYAQDRWSLLIVFQAMDAGGKDSAIKAIFEGINPQGCEVHAFKAPSSKELDHDFLWRHMIALPERGRIGIFNRSHYEECLVTRVHPEILAKEKLPPKLVTKNIWKERFEDISAFERYLCRNGTVVLKFFLNVSKEEQRERFLERLENPAKQWKFSMDDIRERALWPRYQAVYQDIVRHTATQHAPWYVVPADHKWFARVVIGSVINAALEKLDLRFPRADKASLEEFEQVRKALEKEERKGNMEKPRKQPHAQ

SEQ ID NO: 13143 - protein, 339 aa, BradyrhizobiumColbertium
MIGQGRLAAWGIGLAALVALPFVYRDPYHLHILVLILIWSFAYTSWSMMGRFGLVSLGHGGFMGIGAYVTALLWNHLGLSPWIGIPISMVAAGVLALIVGYPCFRFRITGHYFVLVTLALSGIVLQVITATRDYTGGSLGYTPNRTSGNKLLALQFDDKTTWYLIALGVWLFGIVVWHWVDRSMARYALEAISEDEDAAAAAGVDVTAEKLKITLLSALMTALAGAIYCQYQMFITPDTVSGIAVSLQMVFAAIVGGLFVSLGPTVGAIITILLAESLRIGFGTKAVGWDNLVYGVLLVLFIIFLPKGILGSLLDRLKPQRKVPRAHEQEAVQIARPGT

SEQ ID NO: 13144 - protein, 296 aa, BradyrhizobiumColbertium
MKGMQAFLEVFDIYLLEAVINGILLGGVLALLALGLNLIFGVIDVTWICYAELVMIGMYGMYFMVQYYGVSYFVAAPLTILLVAVLGAALHYLVIAPLLTAPPINQLLATGGVLFVLQSFATVAFGIDFRNLGIRLPVLAFGDMNFSYARLLSFAAALVGMVAVYLFMTRTFTGTAIRAISQDRQIMALMGVDTRRIYLITSALGGALAGLAACLLVLQYDVHPFVGLSFGPITFLICVLGGLGNFIGGFIAAFVFAEIISLGGLFSDLEWGYVLAFAFFIVMMFIRPAGLLARRR

SEQ ID NO: 13145 - protein, 234 aa, BradyrhizobiumColbertium
MLELRGVNAGYGTFQALFDVDLDVRAGEAVGVIGPNGAGKTTLMRVISGLIRPSRGSIKMEGIDLIATPSHKIVSLGIAHVPENRRLFPQLSVDDNLKMGAFMKEARGHYAERLEAVFDLFPRLKERRHQMAGTMSGGEQQMCAIGRAMMSNPKLLLLDEPSAGLAPVVVQQVFELVKRIRASGLTVLIVEQNVQQVLKVVDRAYLIEAGTIRASGSAAEMLASDTVKEAYLGV

SEQ ID NO: 13146 - protein, 255 aa, BradyrhizobiumColbertium
MLEVNGLVKRFGGFTAVNNVSFKVEQGEILGLIGPNGSGKSTIFNMLSGTLAPTSGSILFAGHEIAGLAPHRIINSGIGRTFQIPRPFRRLTIFENVALAGFYGQGRHSRAKAEEAAERSLAMVGLPTDRHASVDGLGAAGLKKLELAKALATAPKLLLADESLGGLDEAEMDQAADMLRNIRDELGITIIWVEHIMGVLMRVVDRVMVLDHGEKISEGLPSAVAGDPRVIEVYLGTDAETTQAAAAEARRRAGG

SEQ ID NO: 13147 - protein, 436 aa, BradyrhizobiumColbertium
MRLRMAARLVRGLFVAIAATGLAVSAEAQEKKLKIGVIYDLTGPLAGGGSELQYTGARIMLDQYSAKDVEGYKIEAIYADAQSKPDVAINEAIRLIEQEKVDMLLGFFSSAQCVPVAARVEQLKKFMWITTCISSAVLENKNYKYVFRPQASGDQFGLMTMDFIAQNTKEKFGKDPKDLRIAIIHEDGAYGVDVAKGNEAGAKKAGFNIVLREGYSATAPDLSALVTKLKRAKPDVIFHTGYNPDITLLLRQAREQGLKFGALVGHGAGYGVYEKLKEGLGADVNYVFNTDPISIWLANQKSMDPKLPPIIKAVGEEFDKRKPGIAIRSAHVGMAASNTYLFLTDVLPRAIKKYGGIDPDSLRKAALDTDIPEGGTMLGFGVKFHGEGSPMAGQNERSFPVVIQYVDDKSYVVWPKSQAQREAVLPLPKGTTYSNQ

SEQ ID NO: 13148 - protein, 234 aa, BradyrhizobiumColbertium
MTSPVIHRVATLDLAVRPIAWSFAEERRTEIATHFAEKQRERPKIWNGRVLLGRDPVFAGDHFAATYFETDFASFLAWRDWGFPGPAVFNGFGMGALRASDGAFIMGEMAPHTANAGRIYFPSGTPDLDDVRDGVLDIPGSVIRELGEETGLTTTDYRIEPGWHCVVTGPTIAMLQVINLDMPGDEARARIEANLAREAEPELSAIHLVRATSDLRPSMPRFVTAFVEQQFAAR

SEQ ID NO: 13149 - protein, 341 aa, BradyrhizobiumColbertium
MKKTIARLAGVLLALTLTTALAAAQSKVTIAIGGGSCLCYLPTVLAKQLGEYEKAGLNVELVDLKGGSDALKAVLGGSADVVSGYFDHCVNLAAKKQELQSFVVYDRYPGLVLVVAPSRTNEIKSVKDLAGKKVGVSAPGSSTDFFLKYMLKKNGLDPTNVAVIGVGLGATAVAAMQQGQIDAAVMLDPSVTVLQGNHKDLRILSDTRTQKDTIETFGGEYPGGALYSTAAWINGHEKEAQALTNAILATLAWIHSHSPEEIMAKMPEETVGKNKDLYLAALKNTIPMYSETGKMDPKGAEAVLAVFSVGSPEVANAKIDLSKTFTNRFVDQAKKTTGNAK

SEQ ID NO: 13150 - protein, 262 aa, BradyrhizobiumColbertium
MSRATLLALQILVAVIGIVLWQVLTTVPLFGKILLPPFFFSNPFDVFSQIVKWFSTGVIWKHLGITLAESILAFVIGSVGGVLVGFWFARQPLVAAVFDPYVKMVNALPRVVLAPIFALWLGLGIWSKVALGVTLVFFIVFFNVYQGVKEVSRTVLDNGRMLGMSERQLMQHVYWPSALSWMFSSLHTSVGFAVVGAVVGEYLGSAAGLGYLIQQAEGIFDVAGVFAGMFVLSAFVILIDFGVTLVERRLLVWRPTAADGRG

SEQ ID NO: 13151 - protein, 266 aa, BradyrhizobiumColbertium
MALEDAKVAFRLGDGRVYTAVEQAHLTVDQGEFVAIVGPTGCGKSTLLNVAAGLLKPAAGSVRIFDRPLAGLNRDAGYLFQADALFPWKTALDNVAIGLEIKGTPRAEALPRAQKWLTSVGLGAFGGRYPHMLSGGQRKRVALAQVLIRDPKILLMDEPFGPLDAQTRQVMGNLLLDLWNADRKAVLFVTHDLEEAIALADRVVIMSAGPSSRIIGDWRVSLPRPRDIFEVRLDKEFHALHREIWSVLKDEVMKGYAQSTNAAEAV

SEQ ID NO: 13152 - protein, 260 aa, BradyrhizobiumColbertium
MPAKLAISYRHVVKCFGRLKAVDDVSLDIAEGEFMVIVGGSGSGKTTLLRLANRLIEADGGNITVEGRNVSNVDPVALRRRIGYVFQSGGLFPHLSVADNIGITPKLLGMPTANISARVDELLELVQLDRAAHRDRLPEALSGGQRQRVGVARALAARPRIVLMDEPFGALDPLTRDALGDDYRSLHRKLGLTSVMITHDMTEAILLADRIAVMRAGKLLAQGTPKELTKSGDAYVTELLRTPRRQVERLNALLPESGCA

SEQ ID NO: 13153 - protein, 519 aa, BradyrhizobiumColbertium
MSLLADPRWGEALAHLPDYLGNHVRVSLAALALGLVVSLPLAILTRNRPAPRGMLLAFASIVQTVPGLAMLALFYPLLLAAASVTLAWFGVSFSAFGFLPTMLALALYSMLPVLRNGITGLNGIDPALIEAAKGVGMTARQSLLMVELPLALPVMMAGIRTAAVWVIGTATLSTPIGQTSLGNYIFAGLQTQNWVFVLFGCFASALLALAVDQLLGLIERGLRHRNRLRAALGCVGIAALVAATLVPAMGRSSQGYVVGAKTFAEQYVLSALLKDRLQVAGLSATVRSGLGSSVIFEALKAGDIDLYVDYSGTLWANQLHRADIRPRTELLAELKTALARDKITLLGELGFENAYALVMPRQRADSLGIRTIADLAAHAPSMSIAGDYEFFSRPEWAALQKAYGLSFRAQRQMQPDFMYAAIASGEVDVIAGYTSDGLIAKYDLTTLDDPRQAIPPYDAILLLAPKRAGDERLQAALKPLLGKIGIATMREANLRASGNDANSSPDAVAKWLWETVKQR

SEQ ID NO: 13154 - protein, 59 aa, BradyrhizobiumColbertium
MGDGEAALGHDNSGWRNRPSIDKALIGRLMHRKIEFAAEWSPADRRTPRCVELVAYWEE

SEQ ID NO: 13155 - protein, 351 aa, BradyrhizobiumColbertium
MMIALARPLRPTKEEHQKRYGAGKMKKPTRRLFMTGAAALLCPPFGMAHAQTAWPARPLRIVVPYPPGGQTDGIARAFGDYLARLVGKPVIVENRAGAGGVIGVAEAKRAEPDGTTILCTISSSLIQNRITVKDLPYDPERDFIYLTMVSGAGGPVVAAKKTGATNLREFIEYANKAGSLNWGSYGVGSTPHVLIETIAKQYGIRFQVIQYRGEAPMWNDIAGQTLDGAAGSYAAAAPVIQAGTGNLIGVVGSRLPPYPDTPTMTEQGAIGDFYELRAFTTFAVPVGTPKEIVEQLSPMLIQAGSDPKVQQMLNNFLLSSPADFETTNRIFKRDSDVMLRILRDLGVKPSE

SEQ ID NO: 13156 - protein, 42 aa, BradyrhizobiumColbertium
MIDQWALDYAATARLPSMTPRVIQRKEIAPASSSGASDPNDS

SEQ ID NO: 13157 - protein, 573 aa, BradyrhizobiumColbertium
MSLMASAPNPGPSATTAALASVAALGIWRLLAVAAPHLAALALMYETETDFGSRLSFALAWGILNFFWIAVLRRPALSGALSLTMVVVLMLLSRLKHDVVQMTVNFIDLMMIDRDSVAFLFTIFPNLRWSVILAGLVTLPLMYALWWLDPFRIRRLPALACKLACLAALVGYSLYHPDEAWRGYYDDGYLSKFFRSGVTAVSDFVQYGLMEAAAANSERLNMPLVDACHPAGRRPNIIMIHDESSFDIRAAQGIKVPQGYGSHFKSWDGKQRSFLAETNGGPSWFTEYNVLAGLSSRSFGRFAYFVTRIASNRVERGLPLALRRCGYDTLSLYPAHGGFMGARSFQMTTGIHRFLDSKDLGAKDVEPDSFFYDKALQLMGQQPPNKPLFTFIYLGANHFPWEMRFRPDLLPNWRPPGNVPSIDEYLRRQAMSAEQYKAFVAGLKNKFPGEPFLIVRYGDHQPEFAPQILEPGLGDGALGKKLDNYDPRLYATYYAIDSVNFEPVKSPVVMDTIDGPYLPLVIQEAAGIPLDPSFAEQKEIMLRCKGIFYSCKDGAEARRLNRLLIDAGMIRGL

SEQ ID NO: 13158 - protein, 215 aa, BradyrhizobiumColbertium
MPVRQPSRPSAGRTATRPYHHGDLRRVLIEAALQLAAEGAEVSVREAARRAAVSPGAPFRHFPTRDALMAAVAEEAQRRFRAEIEAALAEVRTAGPLARFRAFGLAYLCWAMCNPAHFEIISTGRYFAHGSSPELTRDNAELIALTEQMLADAAAQGLVRAADIKRIQIAGRALVYGFARMNLDGHLPRWGIAPHEIEQMAEAVLDLFIVGIAKT

SEQ ID NO: 13159 - protein, 206 aa, BradyrhizobiumColbertium
MSQRRSWIEGWRLLTALSLSLIALSVWIASMRQFEVEGVRTVISFTARSSLLLFCLAFSAAAVARLWPNVWARWQRRNRRYLGLSFAVSHGIHAVAIVVFAKMDPAGFAEATSAVSYVFGGIGYAFIIAMSVTSLDRTAALIGPRAWRALHLVGSYYLWFQFMVSFGKRVPTMPLYAAFLLPLLIAMTLRMIATARHPSGRTAAAG

SEQ ID NO: 13160 - protein, 282 aa, BradyrhizobiumColbertium
MRSVVVTGASTGIGWAIAKLLIGRGYRVFGSVRKQVDADRLRDELGAGFAPLLFDVTEEAAVLAAARTVREALGGETLAGLVNNAGIAVAGPVLELSADDFRRQMDVNVIGPVLATQAFGPLLGADPSLKGSKGRIVMINSVAGKNGNPLLAPYSTSKHAIEGLSESLRRELMLFGIDVVIVAPGAVKTPIWSKAEQVDLSIYKNSPYLPALNKVMAVMMELGAKGLPAERIAEIVLEALTAASPKVRYQITPDPMRHLIAAVLPKRTLDRIIAKRLGLREQ

SEQ ID NO: 13161 - protein, 37 aa, BradyrhizobiumColbertium
MRVQMKSRLPAAEDADVLVFGSSQANRQKRRAIKNVV

SEQ ID NO: 13162 - protein, 339 aa, BradyrhizobiumColbertium
MRVYYDRDADLNLIKGKKVAIVGYGSQGHAHALNLKDSGVKEVAIALRKGSASAKKAENAGFKVMEVAEAAKWADLVMMLTPDELQGDIYREHLHDNMKKGAALVFAHGLNVHFNLLDPRADLDVLMIAPKGPGHTVRSEYQRGGGVPCLIAIAKDVSGNAHDLGLSYASAIGGGRAGIIETTFKEECETDLFGEQVVLCGGLVELIKGGYETLVEAGYAPEMAYFECLHEVKLIVDLIYEGGIANMNYSISNTAEYGEYVTGPRIITEETKKEMRKVLADIQGGKFARDWMLENKVNQTSFKATRAKLAAHPIEEVGAKLRDMMPWIKKGALVDKTKN

SEQ ID NO: 13163 - protein, 87 aa, BradyrhizobiumColbertium
MFQWINAKGWVIVIGTTTAYAAIAQFPLNIAIQTLISLIVGTVSTVVWALFGTALRPVLTSERLVRGFNILMAILLLASLYPVFMDA

SEQ ID NO: 13164 - protein, 123 aa, BradyrhizobiumColbertium
MSQSLFYAFLIFMVVMYFTPGPNNIMLLSSGLTYGFRRTIPHIVGIVIGFAFMVAAVGLGLGTVFLAYPILQTVLKYAGAAYLIYLAAVIAMSGPARPGEEEGRGPMTFGARPCSSGSTPKAG

SEQ ID NO: 13165 - protein, 291 aa, BradyrhizobiumColbertium
MKPADILIAILVAIIWGLAFVASRIALDEFSPELMTAMRFAIAAIPCLFIPKPKVAWSLLLAISSTLFLGQFLSQAYGIAHGVPVGLTSVVVQSQALFTIGFAALAFGERPTPVQTLGIVIAAAGLLMICATVGYDFSVGAFAVLMIAPICFAVGNLLLRGARGAPMFDLFAWLCLTAAVPLFALTLVVDGPMPTVRALTQMSLTGLICLLAIGAISTSIAYWLWGRLLRDYPAAQVVPFALLVPFVGSAASSIVFGERFGPLRLAGMLTVIGGIAVMVLAQRPQVLSKAA

SEQ ID NO: 13166 - protein, 231 aa, BradyrhizobiumColbertium
MLARDWYYNERNRMGIEPAVASIYDSHEDADLRARAALKMLGVQRGWRIADIGCGNGVLATEAALMGAEVDAIDISPAMLALAEIYARDRKAPVRTQSAGLLSFAYRPETYDLIVSEFTLHHLPDFWKAVAISRIYRALKPGASFYLRDIVYTAMPDAIERDVEQWADFQIKNHDFSRESVVAHMRDEYSTFGWVMERMLIDVGFTLVSADYHAPMHGTYLLRKPKAGEQG

SEQ ID NO: 13167 - protein, 180 aa, BradyrhizobiumColbertium
MNQPASAYFIEERHDPNETHTLSVLVQNEPGVLARVIGLFSGRGYNIESLTVSETEAQKHLSRITIVTTGTPMVIEQIKHQLDRMIPVYRVVDMTLTKRSIERELAMVKVRGQGEHRVEALRLADAFRARVIDATTESFVFEITGNTDKINQFIDLMRPLGLVEVSRTGVAAIGRGPEGM

SEQ ID NO: 13168 - protein, 591 aa, BradyrhizobiumColbertium
MSDKSHDPNQMTGAAMIVRALIDHGVTDIFGYPGGAVLPIYDEIFQQSEVQHILVRHEQGAGHAAEGYARSTGKPGVALVTSGPGATNMVTPLTDALMDSIPLVCISGQVPTHLIGNDAFQECDTVGITRPCTKHNWLVRDVNDLAKVLHEAFYVATSGRPGPVLVDVPKDVQFATGTYHPPRKSDVHRSYAPRLKGDASQIRKAVSLLASAKRPVIYSGGGVINSGPEATRLLRELVEVTGFPITSTLMGLGAYPASGKNWLGMLGMHGTYEANMTMHDCDVMLCVGARFDDRITGRVDAFSPGSKKIHIDIDPSSINKNIRVDVPIIGDCGNVLGDILQVFKAEAKKPDIKSWWQQIAQWRARNSLYYKKSNDVILPQHAIQSLFEATRGKDTYITTEVGQHQMWAAQFYGFEEPHRWMTSGGLGTMGYGLPAAVGVQVAHPDSLVIDIAGDASVQMTMQEMSTAVQYELPIKIFILNNQYMGMVRQWQQLLHGNRLSHSYSEALPDFVKLADAYGCVGLQVHKPADLDGAIHEMISVKRPVLFDCRVAALENCFPMIPSGKAHNEMLLPEQANDEATARAFAGGKALV

SEQ ID NO: 13169 - protein, 42 aa, BradyrhizobiumColbertium
MSAASFVSGSANKKGPEEGPCTPPVFWMAASHPRRCAWVRRR

SEQ ID NO: 13170 - protein, 303 aa, BradyrhizobiumColbertium
MLIAGPTASGKSALALELAHATGGIVINADSMQVYRDLRIITARPTEDEEARAPHRLYGHVDAAVNFSAGAWVADAAQALEQARIEGRLPIFIGGTGLYFRALTAGLSVVPPIPAEVREDVRARLERNGVEALHAELAVRDPLAAERLKLRDRTRIARALEVIEATGRSLLDWHREGQPPLLPKDSFRAVFLAPERNELYARIDARFDAMLGAGALGEVERLAARHLDPLLPAMKAHGVPSLIRHLRGELSLGEAAAIGRADTRHYAKRQFTWFRHQLPEFEWVRPEEARGWLAATVAEGATG

SEQ ID NO: 13171 - protein, 301 aa, BradyrhizobiumColbertium
MSLVATLICNPDNPALDSTIVDGARAVLPQAAPAHWLFDGVAVDIPFGADSNLGGDRHAIEQRLRELRGDLPIDIVLQPVGVRRKKLFLADMDSTMIGQECIDELADFVGVKAHVAAITERAMRGEIEFEPALRERVALLKGLPAGAVDEVLAKRITLTPGGRELVATMRANGAYTCLVSGGFTLFTSAVAAKLGFQENRANELVVRDGKFTGEVKEPILGRAAKLATLVDLIESFDLDDIDSVVVGDGANDLAMIQAAGLGVAYHAKPAVAAAAAARIDHGDLTALLYAQGYRRDEFVEA

SEQ ID NO: 13172 - protein, 487 aa, BradyrhizobiumColbertium
MRIGLAALAVGAFSMFGTPADARGPDGIADVAEKVIDAVVNISTSQNVEAKGGGSNSMPQLPPGSPFEEFFDDFFKNRRGPGGGSKGGENSAPRKTNSLGSGFIIDTSGVVVTNNHVIADADEIHVILNDGTKIKAELVGVDKKTDLAVLKIKPTKPLVAVKFGDSDKLRLGDWVVAIGNPFSLGGTVTAGIVSAKNRDISSGPYDSYIQTDASINRGNSGGPLFNLDGDVVGVNTLIISPSGGSIGIGFAVPSKTVVGVVDQLRQFGELRRGWLGVRIQSVTDEIAESLNIKPARGALVAGVDDKGPAKPAGIEPGDVVVKFDGKDVKDPKDLSRVVADTAVGKEVDVVIIRKGQEETKKVTLGRLQEPDKVQAAVKTEGPAPEKPVTQKALGLDLAALSKDLRTRYKIKDSVKGVVVTNVDANSDAAEKRLSAGDVIVEVAQEAVSSGADIQKRVDQLKKDGKKSVLLLVSNGEGELRFVALSVQ

SEQ ID NO: 13173 - protein, 68 aa, BradyrhizobiumColbertium
MRSIAFADFLIGLGILFVLEGLMFAASPNWMRKAMKSVITTPDNILRAVGIGSAVAGLVLIWVIRRPI

SEQ ID NO: 13174 - protein, 298 aa, BradyrhizobiumColbertium
MRSPVTGIVTLLGLLLVVIVGYMSLFTVQQTEQTIVLQFGRPVDVVTAPGLHFKAPWNSVINIDKRILDLENPSQEAIASDQKRLVVDAFARYRIENALRFYQSIGSIQAANVQLTTLLNAALRRVLGEVTFINVVRDDREKLMQRIRDQLDREAEGYGIEVVDVRIRRADLPEQNSQAVYQRMKTEREREAAEFRAQGGQKAQEIRSKADREATVIIAEANSQAEQTRGAGDAERNRLFAEAYSKDADFFAFYRSMTAYENGLRSNDTRFLLRPESDFFRYFSNPSGRMAPETLAKP

SEQ ID NO: 13175 - protein, 361 aa, BradyrhizobiumColbertium
MPWKNQGGGPWGSGPKGPWGSGPQPVGPRPPDLEDLLRRGQDRLQQIMPGGYFSGIGITLIILLIAAFWLLSGFFRVQSEELGVVLRFGKHVRTVQPGLNYHLPYPIETVLLPKALRVNTISIGMTLIEDPARRGRSVRDVPEESLMLTGDENIVDVDFTVLWRIKPDGVGDFLFNIQNPEGTVKAVAESAMREVIGRSQIQPILTGARNVTEQNVHELIQKTLDSYGAGIQISQVQMQKVDPPAQVIDAFRDVQAARANQEQLQNEAQTYANQVIPQARGRAAQILQAAEGYKEQAVAEAKGQSARFLNVYEEYKKAPDVTRERIYLETMERVLGGADSSFLTAAAPRARASCPICPSAN

SEQ ID NO: 13176 - protein, 169 aa, BradyrhizobiumColbertium
MEIVFVVAIAENGVIGAGNAIPWRLKSDMAHFKALTIGKPGIMGRKTFESLRRPLPGRTNIVITRDAAYRAAGAIVTTSVAAADAVARGDALRRSVTEVAVIGGAEIYRQWLDRADRLEITEVHARPDGDTHFDIDKAKWNEIVRIRHPAGPDDSVDFSYVTYRRRSGH

SEQ ID NO: 13177 - protein, 161 aa, BradyrhizobiumColbertium
MSLNIRRVRQGEAGLVLAFIRELAEYEKLSHEVEATEADIADALFGERPQLYCAIAEWNGEPVGFAVWFANFSTFSGRHGIYLEDLYVRPSHRGRGLGKALLVYLARECVENGWSRLQWAVLDWNAPSIAFYKSLGAVMMDDWTLCRVTGPALTRLAGSTS

SEQ ID NO: 13178 - protein, 264 aa, BradyrhizobiumColbertium
MHQYQDLLERILSDGVEKTDRTGTGTLSVFGHQMRFNLSTGFPMLTTKRLPLKAIVHELLWFLKGDTNIKYLRDNGVTIWDEWADANGDLGPVYGHQWRSWPAPDGRSIDQIANVVDMIKRNPDSRRLIVSAWNPAEVDKMALPPCHCLFQFYVANGKLSCQLYQRSADVFLGVPFNIASYSLLTMMVAQVTGLKPGDFVHSFGDAHLYSNHLEQAKLQLTRAPRALPVMRINPEVKDIFSFRFEDFELVGYDPHPHIKAEVAV

SEQ ID NO: 13179 - protein, 326 aa, BradyrhizobiumColbertium
MTFVRALTGACAAALASLATFTATAEAQTFPTRSITMIVPFAAGGPTDVISRIVSGHMAQPLGQSIIIENVVGAGGTTATTRAARAANDGYTLITGHMGTHAASVPLYPKLAYHPEKDFEPIALLAGTPILILARKDFPPKDLKEFVTYVKANAEKVNAAHAGVGSVSHVSCELLHSILDIKPVGVPFNGTGPAMNALVAGQVDYMCDQIVNAVPQINAGTIKAYAIATAERNPSLPNVPTTAEAGLPAFQAQAWNAMFAPKGTSPAIVASLNAAAVKALDDETVKKRLLELGSVIPGPKDRTPEALAALVKNEIAKWSPVLKPTN

SEQ ID NO: 13180 - protein, 504 aa, BradyrhizobiumColbertium
MDIFANLAHGFAVAFSPINLLMCLIGALVGTLVGVLPGIGTIATVAMLLPITFGLPPVGALIMLAGIYYGAQYGGSTTSILVNIPGEATSVVTAIDGHQMAKQGRAGPALAIAAIGSFFAGCVATVLIAVLGAPLTKLALAFGPAEYFSLMVLGLIFAVVLAKGSVLKAIAMIVLGLLLSMVGSDIETGASRMAFNIPELADGLGFATVAMGVFGFAEIIRNLDAGAELNRDLVQQKITGLMPTKQDLVDSTPAILRGTVLGSILGILPGGGATIASFGAYTLEKKLAKIPSRFGRGAIEGVAGPESANNAAAQTSFIPLLTLGIPPNAVMALMVGAMTIHGIVPGPQVMQKQPDLVWGMIASMWIGNLMLIIINLPLVGIWVRLLRVPYRLMFPSIVIFCAIGIYSVNNAPVDVILAGVFGLVGYWLIKHDFEPAPLLLGMVLGPLMEENLRRALLISRGDWSVFLTRPLSAVLLAVAASLLVLTVLPALRAKRDEVFTESEN

SEQ ID NO: 13181 - protein, 253 aa, BradyrhizobiumColbertium
MADTMGHSATAIRNTKVALGFCLLAIAPQIFELIWSIGTIFGWGAGRGPATVVTSHATALIVGAPSALFGSFGGGTKKMSSEVLLALIYSYPLFAVAILTLLMTIRSAQDYVGGVVLMAVALFALYASSDLQGMRGFSFGAGTAPRMFGGLLVALSAGIALTGLLTDGPAMAHYSWRGPLFVVAAILFFALSIRSLGLVVTAFTSFMIAATGSQETRWLEAVIVGACLTVGCAILFPYVLGLPMPMYPRFLIQ

SEQ ID NO: 13182 - protein, 176 aa, BradyrhizobiumColbertium
MNGQSPIWSLISTFGLMSLFAVGGAAAAVPEMHRIAVEVNHWMTDRQFTDAYAIAQLSPGPNVLIVTLIGYAVAGIPGALAATLAMCLPTALLAYYVSRLLNRPRESRWPGVIQAALVPLSIGLMAASALILAQSAERTIAALLLTTMVAVIASISRINPLWLLLAGGLLGFAGIV

SEQ ID NO: 13183 - protein, 208 aa, BradyrhizobiumColbertium
MARPSFYASDMSSDSAPAPQQPDLAAAPPGLAALFLAFAGMSLAGFGGVLVFARRAIVEQHRWMTADEFNETFALCHFLPGPNIVNLSMVFGSRLRGIAGGVAAFAGLLLPPTLIMMVLAIAYAHFGDLEVLRRILAGISCAAIGLLIAVVLRMMTPLLKRTDPLPVILMLGVFLAVGVLRLPLQAVLLVAIPVSVGVTYFLRRKVAA

SEQ ID NO: 13184 - protein, 172 aa, BradyrhizobiumColbertium
MATDHIRYDVLARDALRGVLRKVLTDAAAHGLPGEHHFFITFVSKAEGVKLSPRLLAQYPDEMTIILQHQFWDLTVLEDRFEVGLSFGGIPERLVVLFSAIKSFLDPSVKFGLQFDTSDVAEVAPDNLPAAPAPSAVAVPAPATEKAEAADEPTPPNQGGAEVVRLDRFRKK

SEQ ID NO: 13185 - protein, 410 aa, BradyrhizobiumColbertium
MVKASRSRTARSATRIETDSFGPVEVPVDRYWGAQTERSRQNFRIGTDRMPISLIHALGIVKLAAAQSNLELGLLDRRRANAIIRAAREVIEGRLDDHFPLVVWQTGSGTQSNMNLNEVIANRANELLGGELGAKKPVHPNDHVNMSQSSNDSFPTAMHIAAASRINADLVPALGELLRALRKKEKQFSKIVKIGRTHTQDATPLTLGQEFSGYAAQVESGIARLKVAVRDLYPLAQGGTAVGTGLNSKPRFARLFAKHAAAITKLPFTSATNKFEALASNDAYVLAHGAINSVATGLFKIANDIRLLGSGPRSGLGELILPENEPGSSIMPGKVNPTQCEAMTMVCCQVFGNHTAITVAGSQGHFELNVYKPVLAYNCCTRSACWRMPHVPSPNIASAASAPTKSASRS

SEQ ID NO: 13186 - protein, 62 aa, BradyrhizobiumColbertium
MERSLMLVTALAPKIGYDNAAKVAKTAHANGSTLKEEALRLGFVSADEFDRLVRPEKMTSPG

SEQ ID NO: 13187 - protein, 62 aa, BradyrhizobiumColbertium
MGNVINLNRFRKRAEREASAKQADANRAKFGRTKAKRSAEEKRADQAKEHLDQHRIDREEQP

SEQ ID NO: 13188 - protein, 83 aa, BradyrhizobiumColbertium
MKSPVVKRSIVVAGHKTSVSLEEAFWNGMKEISGLRNMTLSELVGEIDSNRQQGNLSSAIRLFVLDYFKSRAMAAQPDKVPAQ

SEQ ID NO: 13189 - protein, 91 aa, BradyrhizobiumColbertium
MTDTADTRSHMPLGLAQRGYTGVIQHLSAKEAGSALSDVELESRLIELGFVEGARVEVLHEGLVGRDPIAVRVDNITIAVRRREAMAIIVA

SEQ ID NO: 13190 - protein, 619 aa, BradyrhizobiumColbertium
MLHLALVGTPNSGKTSLFNALTGSRQKVANYPGVTVERKEGFFVTPLGRQVSLVDLPGTYSLRGRSPDEEITRDFVLGKASGETMPDLVLCVADSTNLRLTIRLLLELKRTGRPMILVLNMFDIASRRGITVDVERLAKELGVPVVTSIAVRKGGTADLLKLTDETAAKLAAEPRESSWRALSVSELRATQREADRIIADCVSLPASPDTWTARIDAIVLHPVGGLIVLALILFVMFQAVFAWAQPLMELLNSGFEALGELVQATLPAGLLQSFLQNGVISGVGSVIVFLPQIIIIFLFILLLEDFGYMARAAFLMDRIMGGAGLHGRAFIPLLSSFACAIPGIMATRVIDNKRDRLTTILIAPLMTCSARIPVYTLIISAFIPARDVWGFINLQGLVMFGLYAAGIISALVVSFLIKFFMLLDYAPAPFMLELPDYKMPRLKSIAIGIYTRAKMFLVRAGTTIFSMMVLIWFLASFPQPPAGSTEPAIDFSLAAMIGKALEPLLAPVGFNWQIAVALIPGMAAREVAVAALGTVYAIEGGKEAADQIGHVLATKWSLATALSMLAWYIFAPQCASTLAVIRRETGSWTWMGVTFTYMLVLAYAASLVTYNVAVALGAG

SEQ ID NO: 13191 - protein, 188 aa, BradyrhizobiumColbertium
MSRSARIDCSMNDDTPRKRRSVAINHFATSRLTAEQLREDHLADLVALHRDAEVSRYLGGVRTPEVTKAYLAANMAHWNQHGFGLWTLRTKDGAFAGRAGIRHIVMENVDEVEIFYAFKGEFWGRGFASEIATALTGIGLSQLALPSLIGIVNVGNGASRRVLEKSNYLLERITSHHGEEVAIYRIPQ

SEQ ID NO: 13192 - protein, 504 aa, BradyrhizobiumColbertium
MTGQSAAAPGSDLKDLPRVSTGSEGLDDILGGGLDANRMYLYEGRPGTGKTTIALQFLLRGVRDGERVLYISLSETKSELTVVAERHGWSLDGVDIFELVPPETTLDPERELTVFHPAEMELSETTGLIFKEVERINPSRVVLDSLSELRLLAQNPLRYRRQVLALKHFFTNRNCTIVLLDDLSSSQDDLQLHSIAHGVVMLEQLAIDYGAERRRLRVIKMRGIRFRGGYHDFTIMQGGLRIFPRLVAAEHHRSFEGDTVSSGNAELDRLLGGGLERGTNALLLGSAGVGKSSVALTYAIAAAARGEHAVFFAFDEGRGTIEARARTLGLPLDKHLASGKIRFQQIDPAELSPGEFAAGLRRSVEVDNARVIIIDSLNGYLNAMPDERFLILQMHELLSYLAQQGVFTILILAQHGLVGPMDTPVDLSYLSDAVVMLRYFEFAGTVRRALSVVKKRSGSHEHGIREFRLGSSGIKVGPPLHEFSGIFSGNPRYTGTVLPEGPGE

SEQ ID NO: 13193 - protein, 568 aa, BradyrhizobiumColbertium
MTADRDHRVLVFAPIGRDGPASAELLRSANLNAINCRDLPELVSEMAAGVGTVFLAEEGLFGKDTEPLAQWIASQPPWSDLPFVVLTSHREQPAVVAWRRSIVELLRNVSLLERPVQPITLTSAIQSATRARRRQYEIRALLEAREQTAQELEKLVIERTRALEEANEQLRLEIKERARVEETLRQAQKIEAIGQLTGGVAHDFNNLLMVISGGLDMIDRQTDPNRRRRLMDGMIQAAQRGASLTKQLLAFSRRQKLRPQPVDVAAQIGGMRELLDRSLRGDVHVEFDFPEQLWPVEVDPGELELVVLNLAVNARDAMPNGGTIVVRGENLPDLNEDQISGDYVRLSVIDTGVGMPPEILSRVFEPFFTTKDVGKGSGLGLAQVHGFARQSRGTVRIRSEVGRGTSIELYLPRSFDAPSSERHLIDLTRVRPKKSNQGQVLLVEDDDEVAALVSEMLGQLGYEVTRASSAAAALGALADGRRIDLIFSDIMMPGGMNGVELAREIKNRRSDIPILLTSGYAEASVSDAESAGIEILPKPYHIDELAAALAAAKSNLRRDAESKRSSSR

SEQ ID NO: 13194 - protein, 80 aa, BradyrhizobiumColbertium
MLPQFGTAVRKKNPGNAVNADLGGAAPDKSSVDAAWLVLEAANDLGDHAAVDACRRVIDAELNGTAARSSDIDLVLGYFR

SEQ ID NO: 13195 - protein, 375 aa, BradyrhizobiumColbertium
MIEMDGAKSLLQDLDDAIARGTDESRAKALWHATDILITGRYSDDEISTFGEVIGRLADEIEVAARAQLSEMMSAYDHAPLNVIEKLALDDEIEVAGPVLRDSTRIDEKMLVESALTKSQSHLLAISQRKSIGEAVTDVLVKRGNQEVVTSVAKNEGARFSGSGLLHMVRRAEGDSILAEQLGLRKDVPRHIFQQLISKASEDVRRRLETERPEMMAQIQSSVTEVTGDLQSKFGPSSRSYFVAKRVVTTQYRQGNLNQDSISNYARQHRFDEVQIGLSLLSSLPVDVIERALMDRNREMILVLCKALDFSWDTTMSLLFLGAKDHLITARDLQDNERDFGRLKIETSRSILKFYQSRKTGAGADAGRQPELQVH

SEQ ID NO: 13196 - protein, 655 aa, BradyrhizobiumColbertium
MARHRAFGGRHGGRSRLGRARAGRLAFHRERHLQSGLARHRAAPSHRPHRPARCRQSLDAGIERHRLLRRRALARGLGAGRRQLQRRWGALPVSHLLRSQRRRQGHASASQHRSRRACHSRRPRRGARLRQPAAEIRRRADARRAGDQEARRGGADALEARDQAQSRSGRRQIRPDRCELRHRGRGAEIWGRRRSQVRRLAAAANGAVGAAGRCRQADRQDRCRSAARHAGAARRAGGDPAGADPGSDRVQCRPDHAWRPSASEHRGRACDRRTILDLPAARTARARDDAALAQWRSSRRRQLQRPAQRGVLRPRRAGGLAPGPQRNQSPQQPAAAARGRRHDRRQSSRHRQAEGRYRRRRRGGTYRLRADRREPGLADRCGPEGRPSRPRCRRKLRARAGGAARRVAGRGEALARYRPRDLRRSGAAAVRSQARLQPRIADAGAVALRPGQRRDHGGERQLRPHQGHRQARAEILGQFAARADRADRAVCAGAARAHRCPPVIVRRDPSQARSQPRQQRRACGPQQCPRRARSRRTSAQGQCDADRTDAGGRHWRRRPRPPAEQRLHAGLESVGAAGRCAAGAARARSHGGGRRGRRADRGPAERRLAPSGAVERKVQRRRAGRRCARQRRSVGTERQREPAPAQRQSGAAARH

SEQ ID NO: 13197 - protein, 409 aa, BradyrhizobiumColbertium
MNEQVQPAGGPLFNPLSPDFIRDPYPHYDRLRTLDPIHVTPFGQFVASRHAEVSLVLRDKRFGKDFVDRTTRRYGPEIMKEPVFRSMSYWMLQADPPDHTRLRGLVVKAFTARRVEDMRPRIQQIVDQTIDAVIDRGHMDLIEDFAFRLPVTIICDMLGIPEEHRETFYKSSRDGGRLLDPVPLSPEEISQGNAGNLMAQMYFQQLFELRRKNPGDDLITQLVQAEEDGNKLTNEELTANIILLFGAGHETTVNLIGNGLLALHRNPDQLALLKARPDLMEGAIEEFLRYDSSVQMTGRVALEDFDDLGGVRIPKGETVLCLLGSANRDPAVYPDRPDRLDVTRQNVRPLSFGGGIHFCLGAQLARIEAEIAIATLLRRLPDLRIDDVENPEWRPTFVLRGLKRLPASW

SEQ ID NO: 13198 - protein, 200 aa, BradyrhizobiumColbertium
MRTRPTRDDTRDKLFEAAARVFEADGIGGASIEAIAAAAGFTRGAFYSNFGSKDELIIAMLEDHVEQSIRRNMDILAQHDNLDDFIAALKTMDRSRQDPLGRSPLLHMEMILFVARAEKRRPELAKRLRARRKLVADIIEATLKSNGRNSSVNPPWMASIVLALEDGFRLHRLIDPETTPADSFLRAITDLRRRTGLASD

SEQ ID NO: 13199 - protein, 108 aa, BradyrhizobiumColbertium
MPYLVSGTNEYGSSNLGRGTATVALRLAEKLLREGYMDVRVCTPRGRVLQPNEFDELKPARESDMAKGQQRGNREAKKPKKDKAKVIAAAPSRKEAAWQPDFGPAKKK

SEQ ID NO: 13200 - protein, 43 aa, BradyrhizobiumColbertium
MLPPKASQEHSMSRVRISEWIVPPVIVPLFLLLLVCAAAVFNG

SEQ ID NO: 13201 - protein, 88 aa, BradyrhizobiumColbertium
MTIRSRRETVIFRHPFQIRGIERILPAGAYEVVTDEETIDGLTFPAYRRIATMITVPAEGARGAMERLSIGSVDLANAQAADASMTHE

SEQ ID NO: 13202 - protein, 85 aa, BradyrhizobiumColbertium
MAAQKATDLRRALAEVEAHVRELREREADLEHRMMTVPAASWPEAAVKARHLLNLYAASLPAEDTRHRALVSALFDDFARLAGEG

SEQ ID NO: 13203 - protein, 92 aa, BradyrhizobiumColbertium
MTLTSGRFIGHEYDRMIVRFSMHDGAREIPCAISTSAMDNLERGPQVKPEQREAQFTRLRARIEACAANKYRATEFEGTPPGIVLRGIDFKP

SEQ ID NO: 13204 - protein, 91 aa, BradyrhizobiumColbertium
MHVLVRDNNVEQALRVLKKKMQREGVFREMKQRRSYEKPSERKTREKSEAIRRARKLARKQAIREGLLPAPPKKKPFERKPPLPEIKSKSE

SEQ ID NO: 13205 - protein, 69 aa, BradyrhizobiumColbertium
MTTGTVKWFNGQKGFGFIQPNDGGNDVFVHISAVERAGLAGLGEGQQVTFEIKTDKMRGKSSAENLSLA

SEQ ID NO: 13206 - protein, 80 aa, BradyrhizobiumColbertium
MSTKKSAEPSPTSIARSDRKRLAAEEGARALADVERQGIEVRKNMARLREARQAKESADEALRLALPPPTPKKRLRKPAR

SEQ ID NO: 13207 - protein, 70 aa, BradyrhizobiumColbertium
MPRLKPDHGTITFFLASGANRQMCRLATTFNTQKQAFSYLQKHRTEFERMARARMASGELEDGIVVLSML

SEQ ID NO: 13208 - protein, 78 aa, BradyrhizobiumColbertium
MSQFYFDIWDGEALAVDEEGLDLASRRAAEIEAALSLADIAKQLEPFASSDGVAINVRDAGGPVLSATFVRERVRLVN

SEQ ID NO: 13209 - protein, 61 aa, BradyrhizobiumColbertium
MKRHSQSRAAIEANNVFRQAAAKPATDYEKAEQAFQANRERLKAERLAREAERRGQSERTS

SEQ ID NO: 13210 - protein, 69 aa, BradyrhizobiumColbertium
MELGLAFHAEPDRQKQRARKMAADAIDGMGDTTTTVEGRAVRKRDLLDGPKEFGRVRIDRSKRNKRVRE

SEQ ID NO: 13211 - protein, 862 aa, BradyrhizobiumColbertium
MMTASDCLVTEAPDVLRAALERADDGIVIIDGARRITHFNAAAERIWKLARAEALGLGAAILDLRCLQADAVAELRDEISLTRRDGSRIRVAISVSCIDSGTGVHHVVFARDVTAEVERRARIALLDAVSDQTNRAVLVTDPELGIRYTNAAFTSLFGYSAAEAEGRRVTDLLAGPHTDRKAMMTIGRRLIKGGPGGEADILTYARDGEEIWVSARIDAFRDGKGRVKHIFALLQDITETKQLRSLQQLIMTALADEVPIGEIADRLCRRVEEIAPDVVCSLLHIDAAGLIHPLGGPSTPEDYSRALDGLAIGPNVGSCGTAAFYGEPVLATDLDTDPRWQPFKAMPLGVGLRACWSTPVKAKDGRVIATFAFYYRESRAPSNWHRRIVEACVNLGAFAIERKEARAEIARLAYHDILTGLPNRAQLRHLITTAIDACPTGGHVALAFLDVDHFKDVNDTLGHAAGDELLVQLAQRLREHIDPGDMLGRLGGDEFVILLPQRNAASAERVAAEITRALARPLRLGSKLMPMSASIGISLYPDHATDIDTLMQQADAAMYMAKQAGRSTHRIFNAEMNGLAEQRLALIAALRRATAEGALSLSYQPQIRSCDGAIHGVEALARWRDAVLGDVSPAKFIALAEECGLIEQIGMWSVREACRQMASWRRAGLNIPCVSVNLSPINFRNVTLAARLKDILAEYDLPPDALVLEITEGAFMQDGAAALETMNAIRELGVGLSVDDFGTGYSSLSRLAHLPIRELKIDRSFMRDIETDAGALAIATAVVRVGQGLGMTVVAEGVETEGQRKTLAELGCDIVQGFLYAPALPPVAFERWLIEHCAEQARTMLGRLDVAAVGHEAVKRTA

SEQ ID NO: 13212 - protein, 432 aa, BradyrhizobiumColbertium
MRLPFFYGWVVVAVTFVTMAIGVNARTAFSLFFPPIISEFGWERGVTAGAFSFGFVVSGVVSPLIGRLMDRAGPRAVMELGVVLMGGGLLLAPLTSAPWHLYVTIGVMVGAGSVCLGYSGQSLFLPNWFIRKRGFAIGIAFAGVGIGSVTLLPWVQHMIEQTGWRTACTAMGLLILVVLAPINLLLHKRPEDIGLSPDGDAAPAAGAAQPISNIVDPAWVGTDWTLKRAVATARFWWIALGYFCGLYIWYAVQVHQTKFLLDIGFSPGVAVWALGIVSLLGIPGQILLGHVSDRIGREWVWATSCAGFVICFAALIALKYLPALWLVYVMVFVQGALGYGLTSIMGAVVFEIFQGKHQGSIFGTIMLAALAGGAAGPWVTGLLHDRAGDYTLAFGIAIAMSGLSAFAIWQAAPRKVRAVAGRLHKLRGGVGT

SEQ ID NO: 13213 - protein, 809 aa, BradyrhizobiumColbertium
MGDRDQNDQDRRRSSGWWRAAPLLGLYRPALVAIGVGLLFSVAGAAAVARWEDRVNRIEFGNAAETQAIVMQNGMNEYISRLLALRTLFESTSDEVTRSEFETFSARLFERHPGMLRIAWLPRVSRKERADYEAAAIREGVSGYRIRSLQGESFATAPQSDEYFPVFYSTQPKTSPVYGMDYTTVPERRAVLERARDNDRVAGMRTRLFVPREGSRLPDVLVAIPVYAKGTSRDEIADRRRNLAGFVVGIFDLPLLIQSIRTTTGASSAVSMNVYPPFTPQIVSLEQTLPDYSSDATAPQSMPDVARIRHWSGTLRIGDSEWQVRAVPSAGGPLATSYDRAVAVLIVGMLLTLSLSTYLMLASRNSRRLSLANRRVLELAQTDILTGLPNRAFFLARLEEINMQLSVRGLPFSILMLDLDRFKNVNDSLGHAAGDALLRQVGQRLKSALRPKDVLARLGGDEFAIIQETGEDQRTCSTELAARIARLVSEPFLLPGHRVEIGTSIGIAIAPDHGSDQEQLLKKADLALYRSKSAGRNCFTIYDEAMSAELEARNTLEGDLRDAIAQCQLEVHYQPFVDALSGARRGFEALVRWRHPMRGLIPPDQFIALAEETGLIVPLGEFVLRRACEDAAGWPSDLRVAVNLSPIQFKEAELFGMICAALADSGLPPQRLEIEITESVLLERGAENHAFMERLKGIGIELALDDFGTGYSSLSYLTAFPFAKIKIDKSFIRNLTQQPRSSAIISAIVTLARGLGMSVTAEGVETREEFERLKALGVNFAQGYLFGRPQPIERIAIDAPVKRSRLDAA

SEQ ID NO: 13214 - protein, 388 aa, BradyrhizobiumColbertium
MHRFRSARSVVLTVVFLAATTLAASGDEAGVSEDAILFGQAAALEGPSSALGQRMRQGIVAAFTEVNAKGGVHGRKLQLISRDDGYDPDRSVAQTLRLIEDDKVFALIGAVGTPTAMATIPITSARNIPFIGPFSGAEFLRDLELPNVVNIRASYGAEAEAWIKHLTEDRHFTRIGIFYQDDSFGRDGLLGVKRALAKRGLELAAEGTFERNTRAVSGAWRMIKRAEPEAIVMVGTYGPCADFIKLAHRSGFYPTFVNISFVGANALATELGPEGEGVIVSQVVPSPWDRSLKLVADYQAAQRAFDPTLTPDFVSLEGYLSGRLVAAALEKAGPQPTRASLLRAINDVGRFDISGSTVTVGIRMIDAPPKVYLTVIQKDGTFRAVDRL

SEQ ID NO: 13215 - protein, 447 aa, BradyrhizobiumColbertium
MYKRQLVDDHFVGRGRPARLRRRLDHLALWRGIVDALLEGGRNTRIDRRRRRRARAGRCRRDGDRGRRRSGRHAIIAVLDAEQQPARSCREVAIVPVRKIGLERGARVDRRCTLPRQHLAPSLQHGAQARRAGVLRVEFDVGLIRLDGVLGDHELIGGHGWLAAQFLAPVLEAARAAGERHRGCAGKGGRVAAALAEEPEVGGQRRAFPGNLPAVGRLRHGDADALEHLLDRQIGLFRDRQHSRGVRAVDAVAVLGFGAGRGRIGDEGAGGAGLGVDDRKPVAGAAERGERIVAAGIQHEDARPRRQSAERVEHVVQPHALQRNVGLALGIEIHGNEIVLAVDLQAVAGIEHQGDRIGAAGTDLAGEVRDRRPHLVLRQIGGGRDGKAGVAEQLRHALGVVGGVGQLRHRPIGGLADHQREPRFGRGIGRNHQLREREKTGSKQKVG

SEQ ID NO: 13216 - protein, 586 aa, BradyrhizobiumColbertium
MQSANGELSVTFNGEIFNYIELRQAMIRRGHRFRTDSDTEVILKLYQERGGNCVTELNGDFAFAIWDKRQQRLMLARDRMGVRPLYYARRPDGLFFASEVKALLMVPGVRAELDPFALDQIFTFWFPLCPRTPFKGIFELPPAHVLVAESASISIRRYWQMHFADEMMDRRSEAAIAAELRELLTDATRIRLRSDVPVGAYLSGGLDSSIIAAVTRQIKQDKLRTFSVTFDAAEYDESAFQGEMADALGTEHVSVACRTDDIGKIFPDVIRTTERPILRTAPAPLFHLSGLVRAQGYKVVLTGEGADEVFAGYDIMKEAKIRRFCASQPQSRRRPLLLQRLYPYLPGLKGQSQKYLEAFFRARAEEVGDPLFSHLPRFRNTAGAKVFFSDELRRELGNYDALDELRAGLPPEFSDWHPLAQSQYLETAYLLPGYILSSQGDRVAMAHAVEGRFPFLDPRVVEFAARIPPRLKMKGLREKHILREAMGHLLPPAIGNRPKQPYRAPDAHSFVGANAQEYVKSIMSEHALANAGAFNPRAVAKLQQKCVAAANLGFRDNVAFVGILSTQLWHDAFVEQNLSHQNLNAA

SEQ ID NO: 13217 - protein, 86 aa, BradyrhizobiumColbertium
MPADVTTKIRDFIKDNFMLRDDRAELADAESLLDTGLIDSTGVLELVAFIETEFSIQMADSDIVPENLDSVETIVRYVDGRLGTTV

SEQ ID NO: 13218 - protein, 518 aa, BradyrhizobiumColbertium
MSIHRIEEYLSASARKFGDKVALVASGRRLTFAELEVLSDRIAAALNDGGIKRGDRVLIFMDNCWEAVVSIFAVLKAGAVFSPVNPSTKSEKLAYVARNCRAAAILTQGRLLPVVIEAVKSCEAVPLMMVANAGKGGLPDGYASFEAACETPRAPPRSGINLDLAMLIYTSGSTGFPKGVMMTHQNIEAAATSITTYLGNTSDDVILAVLPISFDYGLYQVLMAAKLGATLVLEKSFAFPQAILNRIAEEKVTGFPLVPTMAALLLQMKDLRPGEYATLRYITNTAAALPPAHIARLQELFPTTTLFSMYGLTECKRCTYLPPAELTRRPESVGIAILGTEAYIVGDDGFPLPFGSTGELIIRGPHVMKGYWENPSATAKALRPGPLPHEMVLYTGDLFRSDEEGFLYFVGRKDDIIKTRGEKVSPKEVENVLYALSGVREAAVVGVPDPVLGLAIKAVVALDTFAALSAADVIRHCARHLEDFMVPKLVEFRDQLPKSENGKIARRQIEAESLETTS

SEQ ID NO: 13219 - protein, 334 aa, BradyrhizobiumColbertium
MNEHVQTVEAGTPFSREALKLDPAREIEQISVGIREQVLKTLRKRGAIVGLSGGIDSSVTAALCARALGAKNVLAVLMPEKDSESDSLQLGRKVAETLGIHWVVEDIAPQLAAAGCYSRRDEFIRKVVPEFGDGWGCKVVLGGALAATGYNITSLVVRSPSGEMRKLRMPLDVYLGIIAATNMKQRTRKQIEYYHADRLNYAVSGTPNRLEYDQGFFVKNGDGAADFKPVAHLYKSQVYQLAEALDIPPDICSRPPTTDTWSLSQTQDEFYFALPYQEMDLCLFGLNHGIAMDAVAAAAELSIEQVKLVFRDIEHKRRATRYLHVPPLLIGDDK

SEQ ID NO: 13220 - protein, 50 aa, BradyrhizobiumColbertium
MRQMEEDLGTRLDWVAVDHFNTGHAHSHVAIRGKDDSGKDLIIRRTTPKG

SEQ ID NO: 13221 - protein, 698 aa, BradyrhizobiumColbertium
MDIWTCSDQPAMAVRCIGCGGEPARMGDGQCFCVWTHLTMNRRSLRTSAGLGLGMLVLPGASFAADLPLKAPALKAVYDWTGLYIGAHAGYSRGSSSFVLSDPAATVGSGQFSGMIGGVQASYNYRLASGLLFGVEGDLSFPNYITSNSIVSFLATPRAAATQQWDYSASVRGRVGYASGLWLFYATGGLAWMGERFFSTPAAGDGEKILHTRLGWIAGAGVEYGFAPHWSARLEYLYSRFENASVTFPSATHYTSSLDLQSVRVGLNRKIDLPGSPNYRPSASLDDTESNRWEIHGQTTYLPQGYPSFRALYSGPNSLSPAAQAKATWSNSLFLNARLWEGGEVYYNPELLQGFGLNDTVGAAGFPNGEAQKSNFPYPHYNTSRLFLRQTFGFGGEQEELPSGPGQLAGKVDVSRLTLQAGKFPVVDVFDGNAYAKDTRKDFMNWSLWAPGAFDYSADKVGLTYGVSAELNQKHWALRGGYFLMVAESNSNHFDTRAPERGQYVIELETRYSLFSQPGKLRTLGWLTSAYMGSFRETLDNPALNLDITQTRKGRTKYGYVINLEQAITDDLGLFARWSWNDGRTETMTFSDINGSLSGGLSIKGTKWGRPDDVIGIGGAVNAISRDFRDFLAVGGLGVLVGDGALNYRRERVLETYYSLALSKAFTLTADYQLIVNPAYNADRGPISIFSGRLHGEF

SEQ ID NO: 13222 - protein, 88 aa, BradyrhizobiumColbertium
MFISGRKRRVTPKIKRELRRRSVAEPVIGHLKSEHRMGRNYLWHRQGDVTNAVLAAAGYNFRRLIRWLALLLRQILVQFTARLQFNPG

SEQ ID NO: 13223 - protein, 175 aa, BradyrhizobiumColbertium
MAIDVALEAERMERKTEHRRIIELELQQAQYEASLAERRYAPCDPGNRLIAVQLEKSWEAVLRRVESCQTRLAAAQAADHDVILPDFVGLADDLNAAWNAPGVTTRARQQLLRALISDIIADVDETTREVILTIHWRGGQHSQLRVRKPKAGEHGCRTSEEALAVMRAMATRWLD

SEQ ID NO: 13224 - protein, 119 aa, BradyrhizobiumColbertium
MTANGPSSVEGNPEAIRKILATLLDNAIIYSKSDDSVEVRIVKTDGDCAIDAVDEGPGIVEDAIPFIYDRFFRAAAPGIEGTGLGLVIAKSTAEREGITLSHRNRSDRSGLIAAVAFAR

SEQ ID NO: 13225 - protein, 75 aa, BradyrhizobiumColbertium
MRGLRLLSIDIVRRSVDAREPLRPVGVPEEAAPLIVATDGFVARYQEALEAQRRFVADAAHEPRTPARRTSDPDG

SEQ ID NO: 13226 - protein, 112 aa, BradyrhizobiumColbertium
MLAIVGLAAAASTLALVSYEMNKFLDAQLQEIAVNVGPGDRSEAGPLLDSEDEDHLVVRIWDRSGKVVHRSGPEIDIPWEAQPGLSDVAAAGGDWRVYRWSHARQDVQVAQT

SEQ ID NO: 13227 - protein, 192 aa, BradyrhizobiumColbertium
MAERASTGRQFISNAKDCFCLALVASPRRASDEVLKAARASSVPPILVITARDQVEDMVAGLDLGADDYIIKLFELRILLARIRASTRRVSDRSNLLVSSKEITLDPSTYVVTFRGIESTLSTREFAVLYALMERPGTILSRSQIENRIYGWSEEVQSNAVDLAIHGLRKKYGKDIIRNIRGAGWMVTRAAS

SEQ ID NO: 13228 - protein, 57 aa, BradyrhizobiumColbertium
MRSNGRPLLRPRDQRLVRSARPEEIAELELRRGLDEARGEDLKYCFAFLVPIDAELN

SEQ ID NO: 13229 - protein, 113 aa, BradyrhizobiumColbertium
MLILTAATSGAEAQPATAKIVGLGATRCSQFSSDVQSNPAVRRDYLAWAQGYMSGILVGRPAGTDTGLDLNPPTFGLLTQLKFLEDHCAGNPSQDFSDAVEALYGRLRKEGRT

SEQ ID NO: 13230 - protein, 46 aa, BradyrhizobiumColbertium
MNWNTTQFDQKFPAPIKAAREVGRILKHIEFGAAVSPDYHEGSRSG

SEQ ID NO: 13231 - protein, 97 aa, BradyrhizobiumColbertium
MTRLYSRLGAAALGFGLVVGGLELQASPLSTVPISDGDAKLLKVQHHDPHYDRRHVRRQRHHSDRPLHQVVPPPVIDVIPHHNQPRPHHRRRHHEHH

SEQ ID NO: 13232 - protein, 609 aa, BradyrhizobiumColbertium
MRILGISAFYHDSAAALVEDGHIIAAAQEERFTRRKHDASFPRHAVRYCLEAAGAKLSEIDHVVFYDKPFLKFERLLETYIAFAPRGFRSFQIAIPLWLREKLFQKSLLRSKLRELDEDFASEKLLFAEHHLSHAASAFYPSPFEKAAVLTMDGVGEWATTSAAIGDGNRLEIFQEIHFPHSLGLLYSAVTSYIGFKVNSGEHKVMGLAPYGEPKYAQLVLDHLIDLKPDGSFRLDMSYFDYCTGLTMTNERFAKLFGQPERSPDQLLTPFHMDAAASIQAVLEEAVLRLTRSLASRTGARNLCLAGGVALNCVANGKVLRDGRFDRLWIQPAAGDAGGAVGAALAAFHQFKSGPRNIAATDGMSGAFLGPEFSQSEIERRLTACGARFAVLDEGDMIEATAKALSDQLAVGWFQGRMEFGPRSLGARSILGDPRSPTMQKNLNLKVKYRESFRPFAPAVLREDVADWFELDSDSPYMLIVADVTKDKRRAMSAEEQALFGIDKLNIARSEIPAVTHVDYSARIQTVSAETNPCFHRLLTRFKARTGCPVLVNTSFNVRGEPIVCAPEDAFRCFMGNELDLLVVGNCVLRKSEQNPDLKQDYSSAFDLD

SEQ ID NO: 13233 - protein, 50 aa, BradyrhizobiumColbertium
MMDFLAELWRFMRVRKKFWLLPILIMMVVFGGLGVLTKGSAVAPFIYTLF

SEQ ID NO: 13234 - protein, 76 aa, BradyrhizobiumColbertium
MLHPLNRLWMKFGLLLHKIINPIVMGVLFYGTILPTGLVVRLRGEDLLRLKREPDAESYWITRVPGPAPETMRDQF

SEQ ID NO: 13235 - protein, 381 aa, BradyrhizobiumColbertium
MKRWCRLLGQGALLFITWVAIFEIGLRLQQYFGPLVDLEMASVNLNWESDVLNHKPEPKNQNLCIYGDLTGFSYQRSYDANGVRIIDDRALLAGCRKAVSVLFLGDSFMEGYDDENTLPYHVAKYFKKELGVCLKTHNAGYTSYSPAIFVPQAKLLLPIVRPDYIVVDVDETDLYDDFARYRKLIVRNGRGQNVGVKASPIGHECSFGLMEAREHPLYLMRFVAKAWMSLVHMPAVIKKYRSDELVLFSYSQDHGADLEQKYSEALSSFRQNLQELADVLRDYAGDGSRVLFIFHPHLEHLKPDAEGRVWNNLVSSTVHKICIANNFLFFNATATLKQRFGSHPENFYWRQGDMHFSLNGLEEYSAAVAAFMASSMIKPKD

SEQ ID NO: 13236 - protein, 46 aa, BradyrhizobiumColbertium
MAGAQQGEPNFAAIEALNAAGGLSEGDRDHGPADRRRRHGGGAMGL

SEQ ID NO: 13237 - protein, 46 aa, BradyrhizobiumColbertium
MGAVGIAPLLPGGGIRNFIRNDAPLFVFGYAWRVVIGYAWRASALA

SEQ ID NO: 13238 - protein, 54 aa, BradyrhizobiumColbertium
MLVVGTIAKIHRAYLFMVSTISRTKNRASRRQSARHYPLPLRDPSSRRIIHMFD

SEQ ID NO: 13239 - protein, 45 aa, BradyrhizobiumColbertium
MSFQRNQTATAINRECAVSREALASLGLYDEIPLAIDGNIERVAS

SEQ ID NO: 13240 - protein, 41 aa, BradyrhizobiumColbertium
MQSTREMSRLAEITRTYEMVGRLLKSSQDADDINKLANVPE

SEQ ID NO: 13241 - protein, 67 aa, BradyrhizobiumColbertium
MAFSIILTMRMATRLRQGAEAAGLVTHLVSFPRAIQRGPIVGRIDLCLRVGLGRGPDRGLAMHLRTH

SEQ ID NO: 13242 - protein, 41 aa, BradyrhizobiumColbertium
MYGPTPRRKVGNRAFVGRDLLGALAGVRRSGNWKRERNCTK

SEQ ID NO: 13243 - protein, 181 aa, BradyrhizobiumColbertium
MEAFSGNKAGTGGLVTFKDSNWLMSVVLYHQPHFAGQPKNVQVFWGYALHPDRVGNFVAKPMSDCSGAEILNELCGHLNFDRTVFEDAICIPCRMPYITSMFMPRAKTDRPLPVPKNSVNLAFVSQFVEIPDDVVFTVEYSVRAAQMAVYQLMKIDRPIPGVTRHDKSPAVLLRTVEKAFA

SEQ ID NO: 13244 - protein, 275 aa, BradyrhizobiumColbertium
MVDPEARPDSQYVVVESTYGDRRHPQADPQSELDDIVNRTVRRGGTVVVPAFAVGRVQSLLFYFERLKAAGKLAHVPIFLDSPMAVNASEIFCHHRRDHKLSEPDCRSSCAVATYIRSVEDSKRLSAMTIPKVIISASGMATGGRVLHHLKRFVADPKSTVLFAGYQAKGTRGPAMMAGARAIRIHGEDIPVRAEVRNISALSAHADAEEIMAWLRTGKSAPSMTFITHGEPAASDALRSRIERELGWSATVPAQMEVAALSLPEPVSTAGAKRS

SEQ ID NO: 13245 - protein, 173 aa, BradyrhizobiumColbertium
MTIKLSFLGAAGTVTGSKYLLENGSQRLLIDCGLFQGERERREANWAQFPVDPASISAVMLTHAHLDHCGYLPVLVKGGFRGDVLCSEATADLCEILLRDAGHLQESDAHFANRHGFSRHKPALPLYTVEDAEAALRQLWTIPFHQTQTLPGGAQLRLLRAGHILGAASLQIE

SEQ ID NO: 13246 - protein, 97 aa, BradyrhizobiumColbertium
MNALARRGLAFIANRFRRTLLQQKLVLIAAPQCLAALVISNSRRDDAAEPALDGAFIAKRLGFLHRAKNDSMQNILGVGRISKPTDKVSSQTIIAPR

SEQ ID NO: 13247 - protein, 58 aa, BradyrhizobiumColbertium
MIRRIDLEAEDRLAAAAALGLTVNALTVRLHRARGQLRQRLLEMCRSCREDSFLRCGC

SEQ ID NO: 13248 - protein, 205 aa, BradyrhizobiumColbertium
MIGRAISNRALTYVVKQAHRSSFAPLLGAVSFAATVTMSLPVELIVVAGTLASRRAWVGIAVWAAAGSALAATGLYFAFHHLGWSLLAKSYPDLALTQAWRQATVFLSQYGTVAIFAVMALPLPVPKLALLAVAGIYRLPVLHVSLAIFSGKLIKYILYAYLALRFPGFFQRLAHRGHQSDAPQGVGLSRSEVPAHSRVRRKLIF

SEQ ID NO: 13249 - protein, 163 aa, BradyrhizobiumColbertium
MSNHFSKIAIPAAIAATIALSFGAALAQSQQTGTQPTQAQPGQSSGAATDQPNTGTNSMPMQGMEHGRMMRDQGQKMMHNGQSQTGNQPSTTQAQPGQPGTATDQQTTGTTSTPQGMEHGRMMRDQGQKMMQNEKNMEHGQMGTPPCGPGQTQTQTTQNSGCK

SEQ ID NO: 13250 - protein, 299 aa, BradyrhizobiumColbertium
MTDDNFSQRLLSDHGSHREAAAAGAAQSSASYILPALDQDFLLGDSMRGVRFLLEYAKAEEALRNWGVRSTIVVFGSARVRQNGQGRHADWYEQARQFGLIASQRGGALTDNGGVRDNVIATGGGPGLMEAANRGAHDAGAPSIGFNIRLPREQAPNGYSTPELTFQFHYFAMRKMHLAMRANALVAFPGGFGTFDELFEILTLRQTGKSPPIPIVLFDEKYWRAAVNFDALIASGTVDKSDCTLFRFAENAEEIWNKLLSCGLDVPGLSCAASRYRHLLDGQSPTSAATVARPSPRSE

SEQ ID NO: 13251 - protein, 325 aa, BradyrhizobiumColbertium
MEARNNHTTLLDHLRRQGVSRRDFLNWCAYTASILALPPSASQAIAQALATKPRPSVIWLSVQECTGCSESILRSFEPTLESLMFDQFSLDYHHVLQAAAGNAAEQARDRAIEQNFGKYVLVVDGGIPLDRDGYYSTTGGKSGRDLVRGAAKGAALIIAVGTCATYGGIPAASPNPTGAGGVHDALRELIDAKDVAAPIINVPGCPPIPEVMTGVVVYFLTYGKPPDLDNLGRPLPFFGRTVHDDCPRLPFFNQGLFAKSFDDEGAQKGFCLKDLGCKGPTTFNACTTVKWNQKTSFPMFSGHGCLGCAQPKFWDREGGFYGKLF

SEQ ID NO: 13252 - protein, 597 aa, BradyrhizobiumColbertium
MASSSKKAGEKSTAAAKTAPGSQPRRLIVDPVTRIEGHLRIEAETDAQGVITRASSSGTMVRGIELILKGRDPRDAWAFTQRFCGVCTVVHSIASIRAVEYALGYVIPENAQLIRNLMIAAQYVHDHVMHFYHLHALDWVDVVSALKADPAATSRLQMSLSPWPNNSPAYFGGVQQKLKGFVEGGQLGIFANGYWGHPEYKLPPEVNLLAVAHYLEALAWQRDVVKIHAIFGGKNPHPNFVVGGVPCAISETSHATAVNAENLRLVGQVISKMREFVDQVYLPDTLAIAGFYKDWTTRGEGVGNFLSYGEFPTGVGAAERATLQFPAGVIINRDLSKIQPVDFEDPTEIQEFVAHSWYSYSAGKQVGLHPYDGETKLDYTGPKPPYEQLDIDQSYSWIKSPRWKGLPVEVGPLARVLILYASGEVRTRGLVDHSLGRLGLPISALFSTLGRVAARTIETKLIADMMPGMYDALMANITRGDLRTFDDVLFDPTTWPKKTRGVGMMEAPRGALAHWLTIEEGRIGNYQAVVPSTWNAGPRDAAGREGPYEAALRGHKLQDASRPLEILRTIHSFDPCLACAVHVVDPNGEELVRVKVL

SEQ ID NO: 13253 - protein, 47 aa, BradyrhizobiumColbertium
MRLVRADPQAATFDAIVVDQVAIAIPRAGEDRGHLPTKQSQDEYGDR

SEQ ID NO: 13254 - protein, 96 aa, BradyrhizobiumColbertium
MAALHDAVGITTAQEPAWLDLLDAAARALQRPSGPAEAATKDPVTLLKVHELQSSKHVASMRAVGLALARLNANLSDQQRQRLVEGLRPILASIPP

SEQ ID NO: 13255 - protein, 80 aa, BradyrhizobiumColbertium
MCLAIPMRVDRIDGFLAQCSVKGVSREVNLFLLQDQDVSVGDHVLVHLGYAIQLIDEREAKSTWEVFDAMLAAGDSHSHA

SEQ ID NO: 13256 - protein, 141 aa, BradyrhizobiumColbertium
MHELSVCWALISEVERLAQEAGEDSIAHIAIRVGELSGTDPGLLLRAFEVARSGTKAEHAYLTIELCDPRVKCTECGLENVTRPNRLLCAFCGSFRVKVIGGDELSSAAVEFAATGFPGTSDPPVAGGPGKLNTEREAPHV

SEQ ID NO: 13257 - protein, 268 aa, BradyrhizobiumColbertium
MCSHCGCAANNKHRLHLPHRGSEDGAIASVHGLAHEEGVIRNILAANDRIASHNRQHFDESGLLAINLMSSPGSGKTSLLEATIDALGPELGFAVIEGDLETENDAARIRAKGVPALQITTGGACHLDATMVHHGLHELDLNGVDVLFIENVGNLVCPASFDLGAHCNVTLLSATEGDDKPAKYPIIFRKSDLVMLTKSDLLPYLDNFQVDRAAATLKASGYDGPLLRTSAAKSADVGEWLAWLRQRLADHRAGLFLNPTTSVEAGEA

SEQ ID NO: 13258 - protein, 377 aa, BradyrhizobiumColbertium
MSSPARIWLDRIKDLPLDRPVRILNVCGGHERTIATSGIRSLLPPAVQLIPGPGCPVCVCPEEDVFHAIQLSLTNSVILVAFGDMLRVPVNGPKAQPRSLEQAIALGADVRPIASPSEAAAIARENPRKTVVFFVAGFETTLAPVAALIAMGLPPNLKLLISGRLTWPAVAMLLQSEEPGFDALIAPGHVATVMGPEEWEFVVRGHHMPTAIAGFTADALLAATYSTLRQRLEGRYFLDNCYPKSVRPGGNAVARRYLTETLEVTDAAWRGIGVIPRSGFRLRPEYADHDARIEFPLDEATERPRRGEMPPGCDCARVILGKVLPTDCRLYGSGCAPESPIGPCMVSDEGACQVWWTAGYRSGRHAFGGGGAVRAAR

SEQ ID NO: 13259 - protein, 141 aa, BradyrhizobiumColbertium
MIRYLRDWPQPSANLAIVDGGTLSFNLLPIIETAGRLIVIDAAMIGDEAGAVRCLVGDELDAFLGTSKHTAHEIGLKELFDMARMEDLLPRRRALIGIHPQCIDWGEGLSDRVATAVPLAAGLVLRLARKWICADQVSVPG

SEQ ID NO: 13260 - protein, 767 aa, BradyrhizobiumColbertium
MDLRRSGLGARMNRNETIETRSETRLFEIVGRVQGVGFRPFVKRLADAHEIVGWVKNEASHVSVLASGEPDALDRFAAGLIAQRPPLARPMIRSVSPRPPADCCEFSILESKPGSTRDAELPPDLFLCDDCLAEIDDPSERRYRYPFTNCTQCGPRYTIITALPYDRPNTSMAGFELCRNCRHEFENQQDRRFHAQPLACPECGPKLVFRKANGEEISGSGQALAAAVEALSYGLTLAVRGIGGYHLICDATNETAVLRLRNRKGRPDKPLAVMVPGGNNRHRFARTIADLDEIEEAALCDPVRPIVLVRRRADAPIAAAVAPGLGEVGLMLPYSPLHHLILSEFAGVLVATSGNISGEPVITDPDEAEKRLARCCDAFLHHDRPIQRPADDPVWRVMGGRARSIRLGRGSAPITLHNSYRAADAVLACGGQLKATVALGLGDRVVVSPHIGDMGSLRSQTTLEQVADDLQRLYATDATCILHDAHPDFTTTRWALRQDVPTTGIQHHVAHASALAGEHGCREKMLVFTWDGLGLGSDGTLWGGETLFGSPGHWQRVGSLRPFRLIGGDRVALEPWRSAYTLALEAHHHWECVHTDAAAYRRAWAAGAGMMSSSVGRLFDAAAAMVGLIEHCSYDGQAPALVESMSDEVSIEPALPVRPEGKIRRIDWTPLVPMLVDSSLSVRERLGRFHGSLSATLVREALHHGAANRTNIIGLTGGVFQNKLLTEHAAAALTSHGFQVLLHERIPMNDGGLSYGQVVEFSARKAP

SEQ ID NO: 13261 - protein, 346 aa, BradyrhizobiumColbertium
MKPGDDKHCSRDLSRISLAHGNGGRRMRELIEGVFRRHLHNDLFDTNADAAILPMLPAGSFPALTSDGFTVDPLEFPGGDIGSLAINGTVNDLAVSGAEPLYIALNCFIEEGFERERLERLVASMAAAARASSVKVVTGDTKVLRNGEGGGLYLATTGLGFRNPAVALGLDQILPGDRIIVSGSIGDHGTAVLLARKQFGLSGTLQSDCASVLPLARCALMQPGIRFMRDPTRGGLASVAHEIVRSTAKSVRLLERKIPLRGEVQAVCDMLGYNPLYLACEGRIVAVADPPSAERLVQAWRDLPGGEDAAEIGVVGEDGPYVVLETELGGERLVEELDSDPLPRIC

SEQ ID NO: 13262 - protein, 464 aa, BradyrhizobiumColbertium
MSIARTSIRLLAVAVVAVCSVHAGAAQTLDQALAQAYRNNETLNAERANLRATDEEVPQALSGYRPRIEATADGGSRYLNEKGADGAQQSSTTTPRGVGVTATQSIFNGFQTANRLRAAENQVLAGREALRVMEQTVLVDAATAYMDVLRDAAILELQKRNLDLLGEQLNLVRNRQASGDLTTADVAQVEARLAAARTAVLAAQATYNSSRATFTRIIGSEPGKLTPGQPVDRFAPATLEAAIALARTQHPAVLAAMYGVDIALLQTKIAEGALYPMVTLEGSVKRRWDVMPDQNLIFPATSTDASIISRVVIPLYQGGSEYAKIRQSKEMTGQKRLSLEAVRKLARATVVQAWSTVAATRAQVDSAQAQVKAAEFALESVRREFGAGQRSTLELLTVQQELLNARIALVLTQRERVTSSYALLAAIGRLAPDVLGLPTESYDPSVHYHQVRDSWFGVRTPDGR

SEQ ID NO: 13263 - protein, 89 aa, BradyrhizobiumColbertium
MTGAEVIDAARDALMTVALVSAPLMIIGTIVGVLVSLLQALTQIQEQTLIYVPKIIATFLTLLIALPFMSDQSHRQFLRMMAQIMASAN

SEQ ID NO: 13264 - protein, 174 aa, BradyrhizobiumColbertium
MAFKFKEVFSSAQAALSADPAQALATFRAQSRLGDGVDSAVAIRQFSVQVDEPAGLGGQDTGPNPVEYILAALGSCQEITYRLYADALGIPLNGVSVQLSGRIDLRGLFDVEGDVRPGYQIIEAEVILDSPAPEAELARLKEIVDRHCPVLDILQNPTPVQLSLRADPLRSAAE

SEQ ID NO: 13265 - protein, 197 aa, BradyrhizobiumColbertium
MAYLETEVIAAHRHIRRRTVAYVLLGTLLASYLSYPYVTLYRLDRALEASDTRVVAEMIDWPSVRTQLKADVTTSLATQAYGASGPEAIGAAFALALSPYVFDPVADRVISPSGLIAWYSDARRSGRSSTLWEATSYAFFRAPTRFLVALRMNEPQYPNIEFEMKLTGLRWQVDHLVWPRARGIAVPGSGASGPTTE

SEQ ID NO: 13266 - protein, 241 aa, BradyrhizobiumColbertium
MVANVQAASDKLRDVAVDRARTFLMLMVLLHHSVIAYTYFGHTDAKSWIGFDIVVLATDSFFMATFFFLSGLFVWPSLAHKELQVFLRDRLFRLGLPFVIGVLTIIPIAYFAIELRRRPDASFLSFWWNTITVGPWPSGPIWFIWVLLAFDLAACFLFHLSPKLLDPINRLAVRGYRRPTEFFILVLAVTAVVYIPMRLYFGAGRWLRLDRSRCRPAAFYYILPTSSSGRAWAPRTSIAVC

SEQ ID NO: 13267 - protein, 154 aa, BradyrhizobiumColbertium
MGAANLDRGLLSADGRLAKSGRGWIVAALVPYCLLWVLIYVKLEILGNPVWLPDWYEASYGLFFVTFSAAILFAIFGYFLRFKRTGFSVLDWMQAHAYGMFLVHYPIVLWIQYWLFDFDVPAIAKALTAFVFTVLLSWGVTAALRTIPGAKRVL

SEQ ID NO: 13268 - protein, 164 aa, BradyrhizobiumColbertium
MSSTKNITEKRYSEAINRLTWEITAIYAYLEEIQRVWARALGISRSQWMILIAISDLDEGSGVPVKTVAEILHVNGSFVTTQSNLLEKIKLVRRRPCRMDGRVVRLFLSDRALKLLAREADRHQAVTDSVFTDFEEAGLNKLVAQLTLLERRLETAKLRVTLEL

SEQ ID NO: 13269 - protein, 37 aa, BradyrhizobiumColbertium
MVLLTCERVGDAQAEARISYLKTSVHTHTRSFLAVLE

SEQ ID NO: 13270 - protein, 40 aa, BradyrhizobiumColbertium
MALEALIDLRASVPTHAHRSDRKVFGVMARRGLMALRTDL

SEQ ID NO: 13271 - protein, 235 aa, BradyrhizobiumColbertium
MNQTERQIAEAVLSVILFLVPAFLFHTAPRFAGSLMGFVLGVAAATLMVSLLIYPLVKYTAWIKRWVTRIVSLRALLTFHVYAGVFGAFLAILHTGHKYQSQLGIALLVVMLIVVATGFVGRYYLPQTSLELKEAESHLGTLRATYNQAAEAVAERQVLEDAAAANISAPALQNVSMLQVVEGIADLEYAIGSREILKRVSMRWIVAHVVAAILMYTLLVLHIAGEIYYGLRWLS

SEQ ID NO: 13272 - protein, 593 aa, BradyrhizobiumColbertium
MGHGGMGGMGEMMGGRPRKEFYPSLMDMPSLTAEQRQRIESQARAELNTATEDIASAEAALRQANARADSAGAEQATSRLRDALNQAKSAATTLRALSEGKPPQQIALDWFRTQLNLPALTASHDAGLGLSWFHVVTMAVLATFTAAMILVYVLRLRRANALVQRLTSAPALATASGRVATPAPPSAPPPTTPPPAAPPPAASPGTPPSTRAGEAGASSSAVAAASPAAASSPWKGKLQVAGIFRETKDVKTFRLKNPDGGPIPFTFVPGQFLTYTAEIDGKLVRRSYTIASSAAQTAYVETTIKREEPGIFSDYMHDKIKQGDLIEVAAPFGAFTFRGQEADSVVLIGGGVGITPLMAAIRYLFDTAWRGDIFLVYGVQTTEHFIFRDELEYLQRRMPNLHVIATMARAEGTSWMGPQGHVTKELLTQSVPDIIKRRIHLCGPPGMMEAMKKLLATVGVPTEQVKTEAFGPARGAVPPPGVTQVVSSEPAAAAAGAPPAALAIGPATATIRFAKADKVVALPPDKTVLEVAESNGVSIDYACRVGVCGTCKTKLLEGQVTMEVDDALTPEDKSNNIILACQAKSVGNLVVEA

SEQ ID NO: 13273 - protein, 38 aa, BradyrhizobiumColbertium
MSDKLLQSHPIIELMQCNMLVNGTFALRRQTVNQSIQP

SEQ ID NO: 13274 - protein, 768 aa, BradyrhizobiumColbertium
MVGCSLGPARLWFTAGYGIINEVYWPRIDIPQIRDLGFIGADDQGFWVEVKRMGQYQLRSVAPGVPAYEITHSHSRFSLRLRITPDPLRDVLVIECRLESDDPALRIYVLVAPHLGATGYGNRAVIAEHRGRRFLSAERAPFAMALAAVDEHQQDALMRASAGYVGASDGWQDFAHNGRMAWEYPAAGPGNVALLAELRPFSVLALAFASSQGAAATLAVSSLMQPFDRVLDAQSADWSAWHRSCDECCARPVGAPAHLQDQFVTSVTVLRTHLDKTYPGAMVASLSVPWGDTGNERSGYHLVWPRDLVECATALLAFGGEAEARNTLRYLIATQNVEGHWQQNQWLGGEPYWRGVQLDEAAYPVLLAALLADRDALGGIEPHDMIRRALGYIARVGPSTEQDRWEENSGLNAFTLATCIAALVAGGSLLEPTARQWATALADFWNAHLEDWLTACGSDLAKQFAIAGYYVRTAPRSVLSEGQAALDELVPIRNRSDGVRMQASEQVSTDFLRLVRFGLRDAADPLVLDTLKVVDRLLRVETPSGSVWRRYNGDGYGEYDDGRPYDGAGRGRPWPLLAGERGHYAVSAGDDPLPMLETMAASASPGGMIPEQIWDASPVPERRLYPGRPTGSAMPLAWAHAEFVKLAVSRNHGRPFDRPEAVWKRYGGRKKMSPYAFWWPHAQIRSLAAGRRLVIALPRAGMVHCGVNGWREVRDLDALDSGLGFWVAELDTSGMNSGESIDFTIRWQEDGWERVDHCIDVVSAGEEV

SEQ ID NO: 13275 - protein, 254 aa, BradyrhizobiumColbertium
MNLSRRNNPLSAPAMTCRLAAVALVGVLSSQLVVTSVFAAPPSVRMAMMDDKEMGSMGGQSNNSMSGMGGMSGSPSGGYGGMSGASSGGMGGGCCMGSMGQAPGSGSAGASGMSMQTSLPGFPGSSHIYHVGATGFYLEYADKLGLSTQQRTGLNDVKQRALVDQSNQQRKIDEAEQALWLLTAADQPDAATVEVKIREVEKLKADQRLGFIRAVGEAAKLLTDDQRKMVLGMVPMPGSTAAPASASKPMNMGK

SEQ ID NO: 13276 - protein, 437 aa, BradyrhizobiumColbertium
MRVLLPGYRDVVSQLQAVEIVGRLPSCGDIPGCDLARSITGDLLPVYVLLCPQLFERDGGLYGDATGADWKDNDLRFARLGLAAAQIASGAGDPNWVPDLLHLNDWTSALAPAYLAWSGRSTPSVLTIHNLAHRGLFSRHRLDRLGIPQAAFDINGVEFCGDISFLKAGIFYASHITTVSSTYAREIVTPEHGCGLHGLLRGKLDQGRLTGIINGIDESWDPLTDPHLARPFSPDDWKGKDVNAQALRRTFGLAVSRGPLFAIVSRLVHQKGLDIAIEAIETIVRQGGQIVVTGKGESEVEQSLCQMAKRYPGKLGIKIGYEEKTARQMLAGSDFLLMPSRFEPCGLTQMYAQRFGSLPVAHRTGGLADTIQDGVTGLLFGDLSLGSFLGAIYRSLDIYHSPRRLREMRTAAMARPAGWNDAAANYANIYDSTLSVA

SEQ ID NO: 13277 - protein, 101 aa, BradyrhizobiumColbertium
MRDQLHAFASGQRRNDISQQTRNIARAMSGSQRAVDERATAVCPFRPDVVIRVGDDAAETHAFHRARNFAKSDGNGWNHGLLMREIARKLSDAAEGVCPRR

SEQ ID NO: 13278 - protein, 91 aa, BradyrhizobiumColbertium
MLFEANCAACHGLKAAGTDKGPPLVHEIYNPGHHSDAAFFFAAQRGVRQHHWPYGNMPPQPQVSEQQITSIVQYVRELQVANGIPYRPHRM

SEQ ID NO: 13279 - protein, 71 aa, BradyrhizobiumColbertium
MSEFDKRTQTNMNVVLEDVCRDLSKHGGDHESRKYIAEHLIEAASAGKTTLGDLEAIARRALLDLTKRKSA

SEQ ID NO: 13280 - protein, 224 aa, BradyrhizobiumColbertium
MSDAAPAYGLWSLVIVNAAIFIFFAYTFFKPQTPRDWRSFSAFSAFLVALFAEMYGFPLTIYFFSGWLQSRFPDIDWFSHDAGHLLEMMFGWKANPHAGPFHILSFVFIGGGFILISAAWKVLYDAQRARSLATTGPYSYVRHPQYVGFILVMFGFLLQWPTILTLAMFPVLTVMYVRLARTEEQDARREFGDAYVRYAAEVPGFIPKLSRILGQESRGGYRHG

SEQ ID NO: 13281 - protein, 59 aa, BradyrhizobiumColbertium
MTFRRTRSGEYFPSPRRFSSFTAVPAGAETLSDALVNAYQSNPQLNAARARQRATDENV

SEQ ID NO: 13282 - protein, 52 aa, BradyrhizobiumColbertium
MVSSTLLTLIVIPAIFGLIKGFGLPLSEPGGPQRPVRLQATTKRVRIPEPAE

SEQ ID NO: 13283 - protein, 143 aa, BradyrhizobiumColbertium
MRPSTGNFAAGPAARPGGGSFVGGLASRPGVAPSYSGSRHVATGGNWHGGGGRHWHRHHRRGGFWPGFAAGAAIGGIGSYAYYGSGYGYYDDPYYYGYYDEPSVAVVQDGGGDSVAYCSRRFKSYDPASGTYLGYDGKRHPCP

SEQ ID NO: 13284 - protein, 140 aa, BradyrhizobiumColbertium
MPRVLVVDDDPMVGATIEVLLQRQGFDVTLADGGETGLAALESQVFDVMLVDIFMPHMRGFESIRIFHERAPTTPLIAMSGYAFASSASPSPDFLRMALELGATRCLRKPFTPEALLTTIRECLAGAGESAQPKDKKEAP

SEQ ID NO: 13285 - protein, 746 aa, BradyrhizobiumColbertium
MIPTQRVILGAGLAILLIITAASIALDVKSRSDAARVNHTIQVQKKISDLRVLLRRAESAARGFELYRTPGFNDEFRTVQARIAPALAELKRDVRDNPDHVALLEGTEPLALRRIEIAATAMRLRAENDEAGIAALISKAEGRGLMDTVMGNLDRLGAQEERLLTERTQDSRRTGIVLLGIDVAGALLILLLVALVLRESRRATGELQSSLAQTQAAKAALEAAVAERTEHLVTAHDELRLSVNVLQSTFRSMAEAVLVIDAEGTVLLSNPAAERMLLHRTGMSVSNLRALSDVFHGDGVTPLKTDELPSARVLRGEHFEELEMIVRPHSGNPTRHLMISGRPMRDGQGNVSGAVLVYHDATTSRETERQLHQSQKLDAVGKLTGGVAHDFNNMLTVISGNTETLVEGLKDQPELQRTARLIDDAAERCAELIQHLLAFARKQPLEPRNVEINAAIADIAKLLRPTLGEQIQIETVLEQGTMKTHIDPSRLTNAVLNMAINARDAMPNGGKLLLETHRVVLDEAYAQANADVTPGPYVMLAVSDTGTGMPPEVQQKAFEPFFTTKEVGKGSGLGLSMVYGFVKQSGGHIKIYSEEGHGTTIKLYLPPGEGAADAAAPVTPAAEGGAETIFVVEDDNLVRNFVTTQLQSLGYKTVAVPDGRSALDLIDAGQAFDLLFTDVVIPGGMSGRELAEEVARRRPGVKVLYTSGYTDNAIVHHGKLDDGVMLLTKPYRRNQLAEMIRKALGN

SEQ ID NO: 13286 - protein, 299 aa, BradyrhizobiumColbertium
MHDSTRRDARPRIAPAGLMFLAITSIGWGFNWPVTKFLLAELPPLTLRGVTGVLGAVLLALFAVMRRQSLRVDGATWPRLLTAAVLNVTGWMVLMGLALLWLPASEAALIAYTMPVWASIIAWPVLGERPTVLRTLGLVLAFAGLASIMGGNGIAASAEKAPGIIMVLVGAFGFALGTVLSKKYPIHLPPITAAAWQIGIGCLPISIVGLLVETTDLGKVTPLGWWLLVYSTVVQFCIAYVSWFAALARLPASVAAIGTMAVPVIGVVASAVALGEPLGAGQIAALVFTLAAVVLATRG

SEQ ID NO: 13287 - protein, 1256 aa, BradyrhizobiumColbertium
MRIERRHTSAGQSPYAGIEFRLTTSEIRNPDGSVVFKLDNVEVPSEWSQVASDVLAQKYFRKAGVAARLKKVEEESVPSFLWRSVPDTEALAALPEKERYVSELSAKQVFDRLAGCWTYWGWKGGYFTSDDDAQAFYDELRYMLAMQMVAPNSPQWFNTGLHWAYGIDGPGQGHYYVDPFTGKLTKSKSAYEHPQPHACFIQGVGDDLVNEGGIMDLWVREARLFKYGSGTGSNFSRLRGEGEKLSGGGRSSGLMSFLKIGDRAAGAIKSGGTTRRAAKMVVVDVDHPDIETYIDWKVKEEQKVAALVTGSKINQKHLKAVLKACVNCEGSGDDCFDPEKNPALRREIKLARRSLVPDNYIKRVIQFAKQGYKDIAFDTYDTDWDSEAYLTVSGQNSNNSVSLKDDFLRAVETDGDWNLTARTSRKVTKTLKARDLWEKIGYAAWASADPGLHFNTTMNDWHTCKASGDIRASNPCSEYMFLDDTACNLASANLLTFYNTTTKRFDVEGYEHLCRLWTLVLEISVMMAQFPSKAIAELSYEFRTLGLGYANIGGLLMTMGLPYDSKEGRALCGALTAVMTGITYKTSAEIASELGTFPGYKKNAPHMLRVIRNHRRAAHGQSNGYEALSVNPVPLDLVSCPQADIVSRAQAAWDAALELGEKHGYRNAQTTVIAPTGTIGLVMDCDTTGIEPDFALVKFKKLAGGGYFKIINRAVPAALRTLGYREAEIAEIEAYAVGHGSLANAPGINVTTLKAKGFTDEAIAKVEKALPTAFDIKFAFNKWTFGEDFIREQLGIGAEAIAAPGFDLLQAVGFTKREIEAANVHICGAMTVEGAPHLKAEHYPVFDCANPCGKIGKRYLSVESHIRMMAAAQPFISGAISKTINMPNDATVEDCKSAYMLSWKLALKANALYRDGSKLSQPLNSQLISDDEDEDDAVEALHEKPMAARATHVAEKVVEKLVERIIVMREREKMPDRRKGYTQKAVVGGHKVYLRTGEYDDGRLGEIFIDMHKEGAALRSFINNFAIAVSLGLQYGVPLDEYVDAFTFTRFEPAGPVQGNDSIKYATSILDYVFRELAVSYLSRFDLAHVDPNETGFDALGKGVDEGKEPDDDGGHHATKLVSRGLTRSRTDNLFVMRGGSAAVSQGSDSAPSGGSKVTAMASHGASARVGDALEGAVALKQEVQHDLSPTEKLEQLQWSKAGSAATAVPSKAERRAEAKAKGYEGEMCSECGNFTLVRNGTCMKCDTCGSTTGCS

SEQ ID NO: 13288 - protein, 41 aa, BradyrhizobiumColbertium
MQALLKARIRLQVQSNIAKVGVPVNLEESAMLSGSLSRGIL

SEQ ID NO: 13289 - protein, 332 aa, BradyrhizobiumColbertium
MYTPMTREQRRLAETMRSTTLEFAALSRSRDEFGGGMQWLKVKKFEYLTRYRRDPLTGEQKAASIGRRSPETEGIYDRFIKERAELDRQIAALRPTIAEQTRMARALRLTRAPEEVGAVARAIGMSGLIDHVTIIGEAAIYAYECEMAALLPREMLPEGGMDLLVAGVHPTDVINELVGVLRRAKIEVQRAKLSADKAAVELRTEEGLSLRLYTASTLGGLIDQYAESSAYGAEAVQWGLDLPVMHSMLVDRNGRAAAVAVLDPRAYCMLRFMALDVEEMSLIRREVSTELNAAVVKLVHERWTEPFIEEHVQSIGPLHDLLEDGFPSAPRM

SEQ ID NO: 13290 - protein, 472 aa, BradyrhizobiumColbertium
MLRPGSSTGGADPAKTGAFQINRDGASARGAHRPIPKRTRSKTRPRRARDAGRQCGMVKVFQPNADRIAKLGFASVAHVPVIFDSRQRYCREYNRYLRERAELDWRPAAGFHDRPRPRTLKTIADHLTNWIRWCESKDVAWQKATYDHVLVYQDEQHSGIWSASGERLAASTSNGRADNATHFLTWAADRGLRGEFKVNLTVQQKRIGGRMRTVTVRPGRLKEPLGESQIDTFRLPQPVEVRDWLAAVRRCRGYAKYLVCRFILETGVRLGEAEAFPVADWPSVEKIEEAAFRRDVFVPANLTRGTKGGRPRTIRVPIELAREIRVWIDGPRNKYVFALYKRDGKRTDNLFVSDAPGFIGIPILRHTIGDCFAKVTPRPKVWSPHKGRHAFACFFILYALEAEARAHKSTPAGMGVNWVHNRGSEWLKMLQRQFGHVDEVTTQIYLKWLATALNLAETANGWHRFLAGDEER

SEQ ID NO: 13291 - protein, 651 aa, BradyrhizobiumColbertium
MNVVPFNAGSLKLTIKAQSGIVYDVDLSEFSVGGKLENVLPKSKHIWAGDFSGRPLFALEIAERFRIERPEPVASKKVRHVFRGIFRFLDAVETKHGAPVTCIADMTDAHGPMMLEWIASGNSLEYRSAKGEIDALRRFRGLPPLFWSARAADNVSTTEPVNREAVRHLYNAFKHEARCIKRMFKEGELLAAAGRDPRSDTRVSAQWTVRENRAWIIKELTQQHLLDKQELKDVGAYWGMVQPGRKGPDYLAPGMTERGREGVVGALRWFYPSYQDTAVFLWLFLLGTGWNLSTALGLDVSEDDAWCQAHPHREQFTVIHAFKARADRHQFTLSMTEPEWHPYQIVREMIKRTKILRATVSHRLELARKDHALSPTLAKSGKIAELEALVRSPWLYHTVNKIGEVSAFNNADSSHLNLIARTVAAGLIERHPSLEKIATSDARDAWIGFAYVQSGYHVLLTQLASQHSNIRTLKHYLKSKRYREFSEKQVRKVQDTVFAEISTGGVVDPTRLRLLVANGTITAEQERRLQDFRQRTRLGLGCLDPTNPPRQIAPDHKSGALCRVQRCTGCQHGVVFKESLGPLARACAELIHIQRTIPYAAWSGSSLEDELASIEETLKGFDQTEVAAAIQEWSHKLQTGEVKAHDTYPIY

SEQ ID NO: 13292 - protein, 675 aa, BradyrhizobiumColbertium
MTRIRSIDPAERAQEWRIKTLPTLGNYSELAAKPWEELREYEIFEGCRLGDEELVVPEDWVPPTSVSRLSKRTVCPSDAGVPADPSAAERRDEAIRRALLALWLPRMTDTGVRKYKPGPWIDAANLLLRLAKWQFNNVPTEDGSVFGGFTITNILQEVLPALAPREKGRDAIRALFRILVDAGIRGRISDWPRLYADGDFANGNDDPTIERNRHGRAAPAPVEKTEQRNWQPFSDTFVTEFIRRALWVHANLADQLLPLWAELREITASEAARGRSTSHPSVIALRNAAIERVRWVDAAGRPITQLPFEIARRDGVSDQWPPRNASDINRMVSTVQAMNFGMIDFCTGARASELAAAEDNENQGSDDRLHSVTYKLIDQIGGKKRDWPLHPAAVRAIEVQQKICQVVRPPGQTHLWVILGDGDKLGNRLLNLTEPLVQAVDHLGLSGLTGRDRAHVHRWRHTVARLVALSVVGAPQVLLDLFGHRDLEMTLRYMLSEPRIIEDAMKVAKETSFVMAEKALAETIEGQAGGPAAMPLQAGLAAAGMQRGEKVFETSSLRETAEVLTFNGRYWSLVRPGVICTKGLGQAGPCTKERGAPDPGACRTTCDHRLETSRAKQGCEETLRALILEREQTTNEMVLANLDGQILANLKRWDDVRSRVLNEHPNIQSIWEAGQ

SEQ ID NO: 13293 - protein, 169 aa, BradyrhizobiumColbertium
MGKRRIAQAGAAYAKEKHLESKISVQETMQRIELEIDANGGIYPYNDGKLTVDELLRRSGKSAAYLQKNTPKIKELRHEVNAWIKRIKGQVATGAPSVRREVNARVKVANKQIDEIRQNYHEAELQLTRVTAELADATRKIGELEKRNTELLKQLAGKTVVSLKPEQRK

SEQ ID NO: 13294 - protein, 152 aa, BradyrhizobiumColbertium
MNPRSVVPSILEKLEPHLERLELAWSSQSERDRAPTLPLTSEGKVNVRQLVRDLGLRETLEQHFFRKPELAGPVNALAHAQGVKPIGSRLLDDVADAGVRKRLGRDADTISELRKALAEREALVVSLRDENARLKARLDLIEETGLVFRAPA

SEQ ID NO: 13295 - protein, 726 aa, BradyrhizobiumColbertium
MTDIVVDSIVSRRDFGTIFAGRLADGSSVRVKAANAAMLGMPSVGELWSVEGDLSDTQWGPQISASRAVRALPSGKLMVDYLASCVAGIGPARARRLWQHFEDRLPEALDTGDVAALAAVMDPDRPVLGPRLAAALVSSWKTMAGEARLVEWLAAVGVTELALARRVHALLGGDAPRALQANPYCLVPLLDWKRVDDLGLRLLNESGEADPVNHPHRLVGAADAVIKALVGSGSTAIARDDFRERLASKLGGPLSSRVLDHVVELAIERRAVIASPSGLLRAPGCALMEDAVVGQLRTMATEGPPNPLNRLLGDLGGQKAVLSQDQAEAVRRSLYAGFSCLRGGAGTGKTFVTRTICDLWERAGGQLLLAALAGKAALRLSRSTGRLARTIFRTLRELDEREAIESQLAGELDQTERAELETKLRELAHLTSDTLVILDEASMVDLPSLHGLLRRMPQGARLLLVGDERQLPPVGFGLLFHRFVDDPAATSTLTTVHRQAATTSIPGIAAQIRRREMPNLSTYVGPHVGVMLARASGRDEIADKVVSIWDELRDGRDVMIVTPVNDGPCGVSGLNRRLHDEYLRRKDLQELRGPLGDLFSPGEPLVHRRNCYKRGLFNGSMGIVRRIDRAERQLVAVFDDEEHVFASEDLVDLSLGYALTCHRAQGSEADYVIVALPQSRLLDPSWLYTAVTRARQQVIIVGQPETMKEALKRPYADKRRSVGLLW

SEQ ID NO: 13296 - protein, 58 aa, BradyrhizobiumColbertium
MPLKTTKFDVQDYLKTPDQQAAYLEAALESDDPSFIAVAIGDLAKAREVSKFSRSERN

SEQ ID NO: 13297 - protein, 40 aa, BradyrhizobiumColbertium
MSHKTPHNMVVTNTMILVVFDREETEILPNERIDYGVDEL

SEQ ID NO: 13298 - protein, 496 aa, BradyrhizobiumColbertium
MLDRGLKNKDIQFYFNRPERPVNSGRISTIRTGTYSNSKKIKAASADELEYFFASFARGGARRDGAESPNEQEVRQLFRKGDDTHWHLFRGESEEHECKQDFDPRRLTPVVRAIAALANNKGGYVFFGVGNNRCKVEGVGPAFSQTDIADIVNKVKAHLAPTPSIVAKGVIDFDGRAVGFLRVEKHPDRPVVVYRDGESLAEGDILYRYPGQSARIKFADLRAMLDERDRRAQVALAEAARTLANVGTANALILDTDKNTMNTNGRSIILDERLIDQIKFIKEGQFEEKSGAPTLKLVGEIRTVGVIGSPQKVISREAIFEKDILDAFISQEIVEGPENFIFAGLAQSRMWLPIFYFARMSGRTNSQIADDVEGRKIAQKGKKSILLERLRGQRTAHAKAVTQAARAVSRDIATGNLHAPKVLSDVGTFAHGVTAVTAINVPLGEVLIALLAARELAEKADDKNAFGAVCKAICRVDEIFFAEMKVPLQPRSGAGE

SEQ ID NO: 13299 - protein, 91 aa, BradyrhizobiumColbertium
MFEIYRRAKVEAKYPANIFLQMLTDRGGIDTAKFLINQPQPSDGYTHLYERGRLDLTVEAEVVDNEKWHSLFTSEEIDKARRRLAQYGYRS

SEQ ID NO: 13300 - protein, 104 aa, BradyrhizobiumColbertium
MSFGGARDDLSNRDRSALTFLAHFAIGHWLYLRRPNLTRSKPLSPREFDCLLWAAEGKTDWEISVILGISRSTVTKHIASAREKLDAVSKSHAIAIAMRLKILC

SEQ ID NO: 13301 - protein, 780 aa, BradyrhizobiumColbertium
MSRAAQIVWWLEQVEAARRAVAEARAERRRPRRPGALDEDVRARRARVAPLPKTPPAQDIIRGATITGEWDEERARSIPAASGGGGAGPGTAPLRGAPSPISGGFGASGTAMSSGGAGQGGPLGRARQLAAGYQPAVIKVVSYARGVTRATATGQYVQREDVPLETHDGRLLTNREAVADEIKAWSADFSKRAESQDVGAFRLKFEGVSDNAEGRAAYQKAIAAGFSGHRYAARVDVDDKGALEAHVVAAMAGSGKERFRIREAQAADRDHDARPRRLDSVSAAAVRARIEAASAIDGQAVLIRPGATSHGRDGVTYRLNKLIEKDAALDDRGKSLSNVADARVAAREWGPSLRSQSARDTMHLIISAKAGTDVAAFTDAARAFLHDRFADHKFMFGVHTDKESAGHIHAHAVITVKNESGQKIRPNRDTFAEWREVYAQHAQAQGLKIVATTAKERASSQSYGPKDRAIVEAADRPRPAREARDRAYAADPANQRLIDNARQRIRVARTNPIRLPMSAPDRKVVNESIVAWKAVTVEQPSNRMAKDMLERLLMAQTVGAILHTIGKRVELLSKEGDMPITSEQMVQDLRLMNEAVSRTSDLLDGETKQQFRETSARYLETLANRIDLQRMQERGVQQLAQAEVEAIVGVNADRLIERAQEIRIKEEFEATSDEYLASSAIDAERRQEGRGGIDQASQQELRAERAIVAGSQQSAAREAREAAAAAEAARSIAEHPAQPLPAALIQTDGLAKLRAEQEKIVRELEAEKPSLQSIKGQRLR

SEQ ID NO: 13302 - protein, 141 aa, BradyrhizobiumColbertium
MVRSARALRRKPRLRTELSDADEQRLQEAVALFGLPKAEVVRRLIRASVQAGPALSAENTRAVVELAQQVRMVGRNLAQVLRAIHRGQAVRIEDTEPVWRGLHEVVAAINDELTEMTVAYGSKLRREAKLTLHFVADEAAP

SEQ ID NO: 13303 - protein, 469 aa, BradyrhizobiumColbertium
MLGVFSITLGMGRRMRGSATCRSLAVAVALSSWFGGVCLAQQAPPAEGGTTLFQNVRIFDGKSTTLSAPSNVLVRGNKIETISLHPLAVDSLAEIRNIEGGGRTLMPGLIDNHWHAMLIRVTPVQSFGDVGYLNLVAGDEATHTLMRGFTTVRDVGGPVFGLKSAIDEGIIKGPRIYPSGAVITVTSGHGDFRQLIDLPRTIGGMLTRMEQTGGAMVADSPDEVRVRAREQLMQGASQIKLTAGGGVSSPFSPIDVTTFTEPEIRAAVEAAENWGTYVTAHAFTPAAIRGALAAGVKCIEHAFLMDEQTAKLIADRGVWLSMQPLPEELRLGFPVGSVQRAKADEVWPGIARSYELARKYKIKTAWGTDVLFSAALARQQGAILASLARWYTPAEALTMATSTNAELLALSGKRNPYPGKLGVVEQGALADLLLVDGNPLNDISLLADPVNNLKIIMKDGKIYKDTLTK

SEQ ID NO: 13304 - protein, 67 aa, BradyrhizobiumColbertium
MAIVVERPILLVKKLAGMLLLLFGLLLTAVGLSSESAGFTAIGIAFLVAGAISLALKIVRRNQSDPL

SEQ ID NO: 13305 - protein, 164 aa, BradyrhizobiumColbertium
MTPLRAGILAAVVTLVADQATKLWLLNVFDLARRGVVRVTPFFDLVLAWNIGISFGWLQSDNQAAQFALMAVKGIAVVALAVWMARSHTLLATIALGLIIGGAIGNGIDRLAYGAVVDFALFHIEIAGKTYNWYVFNLADVAIVAGVAALLYDSFLGVPAAKAP

SEQ ID NO: 13306 - protein, 1014 aa, BradyrhizobiumColbertium
MSEKPQKSQKSEAKDYSKTLFLPQTEFPMRAGLPQREPEILKRWYEIGLYEKLRESAKGRAKFVLHDGPPYANGNIHIGTALNKILKDLVTKSQQMLGFDSNYVPGWDCHGLPIEWKVEEEHYRKKGKQKPDFRDSAAMIDFRKECRAYATHWLGVQREEFKRLGVIGDWDHPYATMNYPAEAQIARELMKFAANGTLYRGSKPVMWSVVEKTALAEAEVEYEDHTSDTVWVKFPVTSPAHGALASASVVIWTTTPWTLPGNRAISFSPKIAYGLYKVTDAPADNWTKTGDLLILADALAEEVFKQARVTAYEKVRDVPGDTMDAIECAHPLKGVGGGYDFVVPLLPGDHVTDDTGTGFVHTAPGHGREDFDVWMAHARDLDARGITTAIPYTVDENGAYTDHAPGFVGKRVITDKGEKGDANEAVIKALVERGMLLARGRLKHQYPHSWRSKKPVIFRNTPQWFIAMDKPIVDAPGKAGAMDIATGGKTKSGDTLRARALHAISVTQWVPPSGENRINGMIEARPDWVISRQRAWGVPIAVFVREKGDGSAEILQDEAVNARIGEAFEKEGADAWYAKGARERFLGSRASEDWQKVDDILDVWFDSGSTHAFVLEDPVHFPGLSGIKRKVDGGTDTVMYLEGSDQHRGWFHSSLLESCGTRGRAPYDIVLTHGFTQAEDGRKMSKSLGNTIEPQSVIKESGADILRLWVASCDYTDDQRIGPEILKNTVETYRKLRNTVRWMLGTLHHYKPADAVAPDQMPELERLMLHELAVRAAAIGKAYREFDYKSVVAILSAFLNSELSAFYFDIRKDTLYCDPPSSATRKAALTTIDLLCASILKWLAPILSFTAEEAWRMYRPDAEPSVHLTLFPTDLEDLRDDELAAKWEAIRNVRRVVTGALELERAAKNIGSSLEASPVIYVADRGMLMTLFDTDLAEICITSNYEVREGEAPASAFRLDAVPGVAVVVEKAVGSKCARSWKISPTVGEDAEYPDVTPRDAKALREWKALGVSV

SEQ ID NO: 13307 - protein, 47 aa, BradyrhizobiumColbertium
MGLLRLFGHEADWLGRARKRMAMRNRGRNDEIPVLRRAFRLRRKPGR

SEQ ID NO: 13308 - protein, 323 aa, BradyrhizobiumColbertium
MVQPFTVIRDTTPDSAIPRGAVVAMGNFDGVHLGHRAVIAAALEMGRTHGRPALALTFEPHPRRFFSPNTPQFRLTDERAKLRLLAGTGLAGAVVMTFDKARAGTSAQDFIHHDLIGRLGVSGIAVGYDFHFGKGRVGSPSLLVNEAPRLGIEVDVQPHVDIDERPVSSSAIRIALAEGQLDEATTMLGAPWFITGEVIHGEKRGRDLGYPTANIRLDANCGLKHGIYAVRVGRGAERLDGVASFGRRPTFDNGAPLLEIFLFDFKGDLYGQLLDCAFIGFIREELKFDSLEALIRQMDDDSARARAMLAAAPDAFPRLGTVD

SEQ ID NO: 13309 - protein, 131 aa, BradyrhizobiumColbertium
MAVDLSMPVLVVDDYSTMIRIIRNLLKQLGFENIDDASDGSAALNKMRGKKYGLVISDWNMEPMTGYDLLREVRADPNLATTPFIMITAESKTENVIAAKKAGVNNYIVKPFNAATLKTKIEAVFPDMASA

SEQ ID NO: 13310 - protein, 284 aa, BradyrhizobiumColbertium
MTALHFAEGLRELVGGVDVVLSDIWGVVHNGLESFPEACEALHTYRSHGGTVILITNAPRPADSVQRQLRKLGVADETYDAIVSSGDLTRLYVAEHPGRKMFWLGPERDNSIYRGLDAVTAPLEEADYIVCTGLYDDETETAEDYRGMMLKARERKLTLVCANPDIVVERGDRLIYCAGAIAELYRELGGEVIFYGKPHRPIYERAMALAGERQGYQIDRKKVLAIGDSVRTDLTGAREFGIDCLFVTRGIHAEEFEGLDQLDPASVMELFGHPPKALMRELKW

SEQ ID NO: 13311 - protein, 491 aa, BradyrhizobiumColbertium
MIRISTIFIAICMVLVAASLGLVLYSVAGISGTQSAIVALTALTFLILYNAVSMRLRDRSDVGGQIADLSRGTADLARQVAEFGRRLAAIEGRIASSNAANSDRIQSVIGEINELGGLVRQLATTVATHEDLLAGNAPAPVSAPVTKPEPEAMIDLAAPLEEKPVAPPPLPAPPPRPAPVVQTQSANPVQTANGRNQTQLLATLRNAIDENRIDIFLQPMVTLPQRKVRFYEAVTRLRDERDQLIAAEEFISIAEASGLIGRIDNMVMLRCVQVLRRLMVRNKDVGVFCNVAVSTLGNSTTFAQCLDFLEANRALAPSLVLEFKQSTFRNLGPAETENLAALAQRGFRFSIDHVTDLRIEPRELADRGVRFIKVPAALLLDPRQASTSDIHPSDLSDLLGRFGIDLIAERIEGERAVVDLLDYDVRFGQGFLFAPPRPLRPEGASATAGTSPNQAKDIQGPNGSATPSAGATSSAPPPQRITGNAALARRI

SEQ ID NO: 13312 - protein, 40 aa, BradyrhizobiumColbertium
MISRPEPGRTRDVSVERRELRAIKLARDRIARCKAFAGPT

SEQ ID NO: 13313 - protein, 279 aa, BradyrhizobiumColbertium
MSTSAALKPAPTQPDLAALKQRQHGAWSSGDYAVVGTTLQIVGEQLCEAIDLRAGSKVLDVAAGNGNATLAAARRWCDVTSTDYVPALLKRGRERAVAEHLTVEFREADAEALPFANASYDVVLSTFGVMFTPDQDKAASELARVCRSGGKIGLASWTPQGFIGQLFRTIGQHLPPPAGVKSPALWGTAARLEEMFASQASEIAAEPRMFVFRYRSPDHWLEIFKTFYGPTLKAFAALDANGQAALNRDLLALLEEFNHADDGTIVVHSEYLEAVITKR

SEQ ID NO: 13314 - protein, 362 aa, BradyrhizobiumColbertium
MAATALFVLTAERYFKDFGLIRSGPPQEHRRGEANSPETQPAGAAMQPGRGRKAKSPFEIPWAGWKDIFWRTYQRIDEDRLLATAGGVVFFGLLAIFPAVTALVSSYGLFADPATISANLHTLATMLPEGSFQIVEEQVARVVSNGNATLGVTFLFGLLLAIWSANAGVKAILDALNVAYEEREKRSFVRLNMVSLAFTVGGIVALLLMVGAVVAFPLALNHLGLAPENKLIVALARWPLLFLILLVALAVLYRFAPSRDAPRWQWLSLGAVTAAILWIAGSALLSWYLSEFANYNATYGSLGAAIGLMMWMWMSVIVIMFGAELNSEIERQTLRDTTTGRPKPLGTRQAVSADTVGANAPF

SEQ ID NO: 13315 - protein, 195 aa, BradyrhizobiumColbertium
MLAPSGELLRAGMALKLNHLKRAAQSYMRDRTSQATGRATSYAIAAGLFAAAGLFAIATFFVGLIALYRWVAITYGQFWGFAVVGAVLLVLAAVCGGVAMAMMKRPTKPIVPLASRMRVAIASPRIPRGTVKQAVKEVATTIPLAPFAPGERGHGRTAWPVRANRPVQLGLMLAAVGLAGFTAARRRRRSQRLDA

SEQ ID NO: 13316 - protein, 324 aa, BradyrhizobiumColbertium
MDPILMAKVAKKTVRGRAAPKLAKVGPGELLTLLDFVRYAVSRFVEAKLAFAHGTTDPVAEAAFLVCEALHLTPDQFEGFAHARVTAAEGKTILDLIHRRVTTRKPAAYLVNKIYMRGLPFYVDERVIVPRSFIGELLDSHFGGEDNAGSLIDDPTAVGRVLDLCTGSGCLAILAAHHFPNAAVDAVDISKGALEVAARNVREYGLQHRISLYRGDLFAPLGDNRYDLIITNPPYVDAEGMAALPPECRAEPKIAFDGGADGLDVVRRILREAPDHLTPDGGLICEIGRGRELVDEAFPELPLLWLDTEDSEGEVFWIAAADLG

SEQ ID NO: 13317 - protein, 155 aa, BradyrhizobiumColbertium
MTCPVTIRIQEDDFDIAREIALLTRSRTDIGAVVSFSGICRSDEDGAKVAALTLEHYPGMAEEEIARHVGEATSRWPLNGVTVIHRVGRFMPGQNIVLVLTASQHRQAAFQAAEFLMDYLKTNAPFWKKEESATGTGWVEAHIRDDEAAARWTRS

SEQ ID NO: 13318 - protein, 83 aa, BradyrhizobiumColbertium
MKVKYFAWVRERVGKAEEIIEPPASVRTVEELIAWLSGQSEAYAYAFEKPKVIRAAIDHAHVKPDAAIAGAREIAFFPPMTGG

SEQ ID NO: 13319 - protein, 41 aa, BradyrhizobiumColbertium
MVPVVSMIGLALLWASAILTMYTGYDYFRAGIHHLIEEDEG

SEQ ID NO: 13320 - protein, 685 aa, BradyrhizobiumColbertium
MVHNSSDNRDDRARKSPQAAANDAPPEGLAAPDLDPATAGDDEDDSLLPDILEESGTVGEGPLASGHEAIERAVRLAPTSPGVYRMLNANADVLYVGKAKNVKKRLSSYARQSAPLPARILRMIAATVSVEIVSTTTETEALLLEANLIKQLRPRFNVQLRDDKSFPYILITGDHWAPQILKHRGAQTRPGRYFGPFASAGAVNRTITALQRAFLIRSCTDSFFESRTRPCLLHQIRRCAGPCTREIDFGGYSTLVREASDFLSGKSHAVKQELAGEMEKAAGELEFERAALYRDRLAALSAIQSQQGINPRTVEEADVFAIHQEGGFSCVEVFFFRTGQNWGNRAYFPRAEKTFTPEEVLGSFLAQFYDDKPPPRNILLSHKIEESELLANALSIKAGHKVEVTAPKRGEKKELVIHALTNAREALGRKLADTATQSRLLEAMAATLSLPHPPKRIEVYDNSHIQGTNAVGAMVVAGPDGFVKNQYRKFNIKSEGLTPGDDYAMMREVLERRFKRLINPPEEGVAKGKDDDFPQWPDLVIIDGGRGQLNAVREIFANLGLTQVSLMSVAKGPDRDAGRETLFMPEREAIKLEPRDPVLYFIQRLRDEAHRFVIGSHRKLRKKDIREAGLQEIPGIGPSRKRALLHHFGTLKEIERASIADLGKVPGVSAESARRIFEYFHPQPG

SEQ ID NO: 13321 - protein, 207 aa, BradyrhizobiumColbertium
MKRLVVGAAALVAAGWTASAPAADLNYGQRAPYTVNQPLNAYSWAGPYLGGNIGYEWGSVDNNPTKPSGFVGGVQAGYNFQNGPWVFGVEGDIQAAGADDTFAPWKFSNPWFGTLRGRAGYAFSNVLFYGTAGLAFGELRGQTFGWAESHTTAGWTIGAGAEVGLASNWSVKLEYLYIDLSTSQFAITGVSNGYSASVVRAGVNYHF

SEQ ID NO: 13322 - protein, 71 aa, BradyrhizobiumColbertium
MAMTGTVKFFNGERGYGFIKPDDGGRDVFVHITAVERAGLKDLAEGQRITFEVEPDKKGKGPKAVNLVILS

SEQ ID NO: 13323 - protein, 286 aa, BradyrhizobiumColbertium
MNYRHAFHAGNFADVIKHIVLARILTYLQDKPAAFRVIDTHAGAGLYDLDSDEARRSGEWLTGIARLMQARLSNETAALTKPYLDIVRAFNPKGELRAYPGSPLIARGLLRPQDRLVACELEPKARKALIDALRRDEQARVVDLDGWVALPAFVPPKERRGLVLIDPPFEAKDEFERLGETFSVAFAKWPTGIYVIWYPAKSRRATDTLAQTVARLAAAAKPPGKCLRLEFSVAPQADSKALTSAGLLIVNPPYTLQGELKTILPELEMPLGQGGAARFRLEVPRP

SEQ ID NO: 13324 - protein, 234 aa, BradyrhizobiumColbertium
MFHSRLHSFSRLVISLTLSMMLAAGLASFASDARAQDKRQNAPGEFDFYVLALSWSPSFCEEAAERGGRSQMQCGGRPYAFVVHGLWPQYESGFPEYCKRPAPRLNRNIVSSMLDLMPAPGLIFNEWDKHGTCSGLEGRSYFETIRKARAAIKIPADYLDLSQAKTVSPAEVEEAFVQANPGLSNAAISVTCNRTRLSEVRICLSKDLQFRACDEIERRACRRDQVTMPPIRGG

SEQ ID NO: 13325 - protein, 155 aa, BradyrhizobiumColbertium
MTMRAPSLKSLRFAAVLGLMFGALTLGEAKAANPLEMNFWLSGPRYDGTVADCDRALPTIATQFWEKESSFWNSPLKITGFSAVREVAFRPWQSDNIPRRYCAADAILNDGKVRKVHFSLIEDGGFAGYGNGVEWCVVGLDRNWAYNPACRAAKP

SEQ ID NO: 13326 - protein, 99 aa, BradyrhizobiumColbertium
MRIIAAAGLLASLVVPGMMASQSARADYVPPFKGNDTGGIIAYSMATQVDARQVAVDHCARYGKVVKFLAVQPYEGGYISFSCRWVPYGAAEQPIRTLY

SEQ ID NO: 13327 - protein, 176 aa, BradyrhizobiumColbertium
MTRKLALLGSLLCLVFSAGRASTDDLPVRKAGLWEMKLVTSGSPVPEMTMQHCTDETVDKEMSNNVSPMAKQICAKQEIKKTATGYVSDSECSVAGVSTTSHAEITGDFNSAYTMKTTSHAQGGVAGAAGRDTTMTLQAKWLGACKPDQKPGDIVMPGGFKMNVRDMDKLKALLPK

SEQ ID NO: 13328 - protein, 462 aa, BradyrhizobiumColbertium
MSTIDTGLTLLKSAAGRVSAANGWMGNAFKGWMPTGLYARALLIMIVPMVILQSVVAFVFMERHWNTVTRRLSAAVVQDIAALIDVYKGYPQDRDRDQIRRIAQQRLGLVVDFLPAGDMPPPGPKPFFSLLDQTLSVQLGRQIGRSFWIDTVGRSNLVEIRIQLDDAVMRVFAQRSAAYASNSEIFLFWMVGTSSILLIVAVLFLRNQIKPILRLADAAESFGKGREAPNFRPRGAREVRRAAVAFLEMKSRIERTMEQRTAMLAGVSHDLRTILTRFKLELALIGDSPELEGMRKDVDEMSMMLEDYLAFARGDTGEQSQPTDMAQALEELRSDAERHGHSATVAFHGLPVVTVKPASFKRCLANLVTNAARYGKNIAITGQRDHRYLTVTVDDDGPGIPAHLREEVFKPFLRLDNARNQDEGGTGLGLAIARDIARTHGGDITLGDSPMGGLRASVRIPV

SEQ ID NO: 13329 - protein, 241 aa, BradyrhizobiumColbertium
MPLAATLARPPVHPADDPPHLLLVDDDRRIRDLLSRFLASEGYRVTTAASAGDARSKLLGLHFDLLILDVMMPGETGFDLARFIRTSSSVPIVMLTARHEAEARIEGLQIGADDYVAKPFEPRELALRINNILKRAAPPPQAATVEKIAFGPYVYHLERGELRQGEEVIHLTDREREMLRILSETPGETVPRSALTGNGSVNERAVDVQINRLRRKIETDPANPLFLQAVRGIGYRLVASP

SEQ ID NO: 13330 - protein, 180 aa, BradyrhizobiumColbertium
MPDINFATSSPDAAVPRPAADDGGNLRWDIIELLFFAYRDFVGDPDQELEAFGFGRAHHRVMHFVYRYPGLKVADLLDVLRITKQSLGRVLKQLLDEGYIVQKTGDNDRRQRLLYATPKGEALVQKLAGLQTTRITRALAEMTPQDAETVKRFLRAMIDRDDPDKVLETIFASVNHDAKE

SEQ ID NO: 13331 - protein, 62 aa, BradyrhizobiumColbertium
MAALFWRPPCPLRARLALIGFCRIAASLVTAGFRGQHAAEDMLLRKAEVQYVLPKCRSTIAR

SEQ ID NO: 13332 - protein, 360 aa, BradyrhizobiumColbertium
MTMKFDIQPASNPTPEKDRVAKLVDPGFGRVFTDHMAIVRYNQAKGGWYEAKIEARANFQLDPAGAVLHYAQEIFEGLKAYKRDDGGVNLFRPDANARRFRDSADRMAMAQLPEDVFIEAVEQVVRIDRAWMPGGEGSLYLRPFMIASETFLGVKPSSEYIFAVIASPVGSYFKGGPAPVSIWVSENYTRAAVGGTGAVKCGGNYAASLRAQAEAMQHGCDQVVFLDAIERRYVEELGGMNVFFVFDDGSLSTPPLGTILPGITRDSIITLARDAGKTVREEPYSLEQWRKDAASGRLKEAFACGTAAVISPIGKVRSVSGDFEIGGGAAGPVAMGLRKQLVDIQYGRTNDPHNWIRKVF

SEQ ID NO: 13333 - protein, 174 aa, BradyrhizobiumColbertium
MATKLSQPIKWVVLAAITGVSVFGILTVGPTHEVVAQDRSPIVDVRTSDPEMNAAIVRARATLPTFWASYESPKPSEAGHSLKVRFSTRKGGEHIWIGEVKKQPDGTLTGLFANEPRDMPGKRAGDKVAFGEADISDWMFMRNGKIVGGETIKPTLKFLPKADADALRARLETP

SEQ ID NO: 13334 - protein, 504 aa, BradyrhizobiumColbertium
MAEKPKKPQKLKARLPRGLEDRDPSAIRATREMVERIRAVYELYGFEPVETPAMEYTDALGKFLPDQDRPNEGVFSFQDDDEQWISLRYDLTAPLARYVAENFDTLPKPYRSYRAGYVFRNEKPGPGRFRQFMQFDADTVGSATPAADAEICMMAADTMEALGIARGQYVVKVNNRKVLDGVLEAIGLAGDENAGRRLTVLRAIDKLDKFSADEVRKLLGPGRWDGGEEGKGDFTKGANLSAAEADVVLAITKPRDDWKEAIAAAETYLAKSEVGQAGVNELEEIARLVTASGYDADRIKIDPSVVRGLEYYTGPVYEVELLLDTKDEKGRPVRFGSVGGGGRYDGLVSRFRGEPVPATGFSIGVSRLQAALTLLGKLDTRPEFGPVVVTVFDRDRVADYQKMVASLRAAGIRAELYLGNPKNMGNQLKYADRRNSPCVIIQGSDEKARGEVQIKDLIEGAKAAAAIASNQEWRETRPAQFSCSEADLVAKVREVLARHDVSWG

SEQ ID NO: 13335 - protein, 67 aa, BradyrhizobiumColbertium
MPEITISMAEGRTDEQKAGMMRDITQALVKNLGVDAEAVVIQINEAPLRHKMKGGKTFVERAAAAKK

SEQ ID NO: 13336 - protein, 130 aa, BradyrhizobiumColbertium
MDARDFIKPGMSAERTLVVPTERTVGHFVPGMPMVYATPMMILEMEMTSGDAIRAALQPGWVTVGTEVDIRHLAAALVGATVRTTAKVVAVERRVIRFEVEAFEGTRKLGEGHHARGLVNVEMFNKRLGA

SEQ ID NO: 13337 - protein, 453 aa, BradyrhizobiumColbertium
MNLYAKLLERQAERRPIKIGLIGAGKFGAMYLHQVLRTPGVHLVGIADLSPSRARENLNRVGWRTEQFAAASLGDALKNGTTFLTDDWEALVKCEGIEVIAECTGNPVAAVEHCLGAFSAGKAVINVTVEADAFCGPILAQRARQAGVIYSLAYGDQPALACDLVDWARACGFPVVAAGRGHKWLPHYRESTPETVWDHWGLSAEQAARGGMNPKMFNAFLDGSKPAIESAAIANATGLKAPSHGLAFPPGSVDDIPTLMRPRSEGGILESKGQVEVVSCLTAEGRPIPNDIRKGVWVCFEGDSDYIRNCFQEYSVVTDPSGRYMSSYKKWHLIGLELGISVASIALRNEATGVATTFNADVAATAKKDLREGDTLDGEGGYTVFGKLTPASTSLEKGYLPLGLAHNVRLTKAVAKDACITWADVTIDERLPAVRLRKEQETSYSSPQARKVG

SEQ ID NO: 13338 - protein, 278 aa, BradyrhizobiumColbertium
MIAVADSSTLQNITGTILLAGAGKMGGAMLTGWLAGGLDPRRVAVVDPHIAPEIAALAAKGVVLNPDVKTAGPVETLVVAVKPQMFREARAKLKPFISDKTSVVSIMAGTTIASLDEVCGGAVVRAMPNTPAAIGRGITVAVAAKNVNAGQRAVADALLRATGSVEWVEDEALMDAVTAVSGSGPAYVFLLAEELARAGVEAGLPEALATKLARETVAGSGELLHRSELAASTLRQNVTSPGGTTAAALSVLMGEPGLRELMIRAIAAATKRSKELAK

SEQ ID NO: 13339 - protein, 180 aa, BradyrhizobiumColbertium
MRIKDNKKARGRDGMSLLEGAIDSRSHPLAVVEDIAASNNWPFERSGEDELTIVSKGQWTDYQLSFTWMGEIEALHLACAFDMKIPPARRGEVQRLVAAVNEQLWVGHFDLWTNTGMVMHRQALVLPGGLTASTAQCEAMLAGAIHACERYFPAFQFVVWAGKTTTQAMDAAMFDTVGEA

SEQ ID NO: 13340 - protein, 185 aa, BradyrhizobiumColbertium
MLQDPQAETSQTEPTQVPADLPPAPDHPRFAKPQRVAFVQACWHRDVVEEARIAFLKEAEARHLTHVDVFEVPGSFEIPLHAQVLAKTRRYTAIVAAGLVVDGGIYRHEFVADTVIKALMDVQLRTEVPVFSAVLTPQQFHETEVHYDFFRKHFAIKGVEVAAACAETLLGLERLRGQVAAGIVG

SEQ ID NO: 13341 - protein, 344 aa, BradyrhizobiumColbertium
MRRLRILVLMHPDFLPPDSSDGYTAQEINAWKTEYDVVSTLREAGHEVRPLGAQEEIKPVREAIEEFKPHVVFTLLEEFHSNVAYDQHIASYLELMRVPYTGCNPRGLILARGKDLSKTLVHHRRIAVPAFAVFPMRRKVKRPPRLALPLIVKSLNMDGSFGISQASIVDTDEKLAERVAFIHERSETAAIAEQFIEGRELYVGVLGNNRLRVLPVWELKFGNMGGRRSRHIATEKAKHDTDYQERVGIVDGPAKDLTPEVTARIQRAAKRIYQVLGLDGYARIDFRLSADGTPYFIEANPNPEIARNQEFATAAQHDGLQYPDLLHRILTLGISRAKAGVSLG

SEQ ID NO: 13342 - protein, 342 aa, BradyrhizobiumColbertium
MPRRKFAWEKLSDDALLKQRLRSLKVTVEGTWLEDCVGTLYEELEERGIRLRPHTWISSEWFSPGDVPGIAIPFYLAHPRLMKLEKKMMFDVEGGTWRECMAILRHEAGHALQHGYQLQRRRRWQQLFGPSSKRYPRYYRPNPASRRYVQHLRLWYAQSHPDEDFAETFAVWLRPRSNWRTRYAGWPALKKLEYVDELMGEIAGKRPQITTRERVDPLSRLSQTLEEHYKKKQAFYAFTPPKTYDRDLSRLFSADPRHHRSTPASTLIRRHRAQIRQLVARWTGENQLTLDAVLDDMISRCRDLDLRAVGPEQKLVLDFIVLVTAKTMHALFGPSRRKWIAL

SEQ ID NO: 13343 - protein, 317 aa, BradyrhizobiumColbertium
MSAKNGSIKLVAGNSNPALAQAIAQGLDLPLTKAVVRRFADMEIFVEIQENVRGSDAFIIQSTSFPANDHLMELLIITDALRRSSARRITAVLPYFGYARQDRKSGSRTPISAKLVANLITQAGVDRVMTLDLHAGQIQGFFDIPTDNLYAAPLMVRDIKERFDLSKVMVISPDVGGVARARGLAKRINTPLAIVDKRRERPGESEVMNVIGEVAGYTCILVDDIVDSGGTLVNAADALIAKGAKDVYAYITHGVLSGGAAARISGSKLKELVITDSILPTDAVTKAPNIRTLPIASLISDAIARTAAEESVSSLFD

SEQ ID NO: 13344 - protein, 205 aa, BradyrhizobiumColbertium
MRDASFTLRRAGSRALAVMLLAAATALGGCAGGGGGAANSYAMAPSGGSSATVAFESIDGPPPQVFDRMVGVLDSESKLRSLSVVSREGTAAYRVRSYLSAQVVRGKTVIAWVWDVYDANQQRALRLSGEEPTSAKGGRDAWAAADDLVLRKIAQAGFSGLSNMINGTPDAPGAAPALRGPAVASVIKDAPLSDMPTSALGYADQ

SEQ ID NO: 13345 - protein, 255 aa, BradyrhizobiumColbertium
MTLASSLLSAVPGLRHAFFTREGGVSSGIYAALNGGLGSNDDQNLGAENRRRMAEHVGVAPERFLSLHQVHSPDVLVADAPWPNGPRPKGDALVTKTPGIALGVSTADCGPVLFVDPNARVIGGAHAGWKGALTGVLEATISAMEKLGATRGDDAAAIGPMIRQESYEVGNEFVTRFIEADADNAMFFIPSVREGHAMFDLAGFVRKRLESAGILMIDDLGLDTYADERFFSYRRSVHRKEPDYGRHIHAIALET

SEQ ID NO: 13346 - protein, 372 aa, BradyrhizobiumColbertium
MTDSPLLNEIKALIKSSGPMPVWRYMELCLMHPRYGYYVSRDPLGREGDFTTAPEVSQMFGELLGLWTASVWKQMGSPQFLRLIELGPGRGTMMADALRALRVLPPLYQALHIHMVEVNPVLRERQSATLANVRNIAWHDSIDEVPEGPSIILANEYFDVLPIHQMIRHENGWHERVIEIDANGKLQFGAAPEPTPRFDVLLPPLVRAAPVGAVFEWRPDGEIMKLATRVRDQDGAALIIDYGHLRSDAGDTFQAIARHTFADPLKAPGQADVTAHVDFQALARAAEDVGARVHGPVTQGDFLKRIGIDTRAAALMQKATPEVATDISVALKRLTDTGRGGMGSMFKVLGISEPRLTGLAGLSDLDQAGEAS

SEQ ID NO: 13347 - protein, 285 aa, BradyrhizobiumColbertium
MEGAMPYLLIDFPAFKPIAIEIGPFAIRWYALAYICGIVFGWLYARSLLKNERLWGGPAPISLVQIDDFILWVTLGIILGGRTGYVLFYNLPFFIDHPAAIFRLWEGGMSFHGGFLGCVVAVMGFAYRNGIPILSLGDITTAVAPVGLLLGRIANFINGELWGRAADASLPWAMIFPNDPTQLARHPSQLYQAGLEGILLFTVLAVMIRLGALKRPGMILGAFILIYGLARIIGEHFREPDAQLGYLWGGLTMGMLLSIPMLIVGLILIVSAIRRGAPKPIETVS

SEQ ID NO: 13348 - protein, 87 aa, BradyrhizobiumColbertium
MTQTNNRFFDEIGRLMNDAAGAAQGVKREFDTVMRTQAEKFLRDMDLVKREEFEAVKDMARLAREENEALKARIAALEAKLGGTPTL

SEQ ID NO: 13349 - protein, 237 aa, BradyrhizobiumColbertium
MATTVKELKATARPKSGKGAARAERRAGRVPGVIYGNNQPPVTISIEDRELRQRILAGRFLTTLVDIDLDGKKHRVIPRDYHLDPVKDFPIHVDFMRLGEGATIRISVPLHVVKAETSPGVKRGGTVNIVAHAIELECGAENIPQFIEVDVGSLEIGHSLHLSDVKLPTGVKTLAREDATLVTIVPPSGYAEEQKAAAAAAAGGAPGAAAAPAAGAAAPAAAPAAAAKAPAGGDKKK

SEQ ID NO: 13350 - protein, 201 aa, BradyrhizobiumColbertium
MQLFVGLGNPGAKYARNRHNIGFMAVDEIARRHGFTPWRRRFQGETSEGTLGTERVILLKPATYMNESGRSVQEAASFFKIAAGDVSVFHDELELPPGKVRVKIGGGIAGHNGLRSISAHIGNDYRRVRLGIGHPGVKELVHGHVLSDFAKADSEWVATLCDAVAEHAPLIAKGTDATFANRVHLAMQAKGFLTKDENGKE

SEQ ID NO: 13351 - protein, 365 aa, BradyrhizobiumColbertium
MGFKCGIVGLPNVGKSTLFNALTETAAAQAANYPFCTIEPNVGEVAVPDPRLEKLAAIAKSGQIIPTRLTFVDIAGLVRGASKGEGLGNQFLANIREVDAIAHVVRCFEDSDITHVEGKIAPLADIETIETELMLADLDSLEKRVDNLTKKAKGNDKDAKEQLDLVNRTLVLLREGKPARLVERKAEEERAFSMLGLLSSKPVLYVCNVEEGSAATGNAFSRAVEEQAAKEGAVAVVISAKIESEIATISREERADFLETLGLEEAGLDRLIRAGYRLLDLITYFTVGPKEARAWTIHRGTKAPAAAGVIHTDFEKGFIRAETIAYEDYITFGGEAGARDAGKLRLEGKEYVVADGDVMHFRFNT

SEQ ID NO: 13352 - protein, 98 aa, BradyrhizobiumColbertium
MFSFSDLFQWDRFITPTIIKTFYWLVIALICLFGLSGIFSGLAAMAISPFGGFLVLLSSIASVVVGIVFSRIVAELILIVFRINEHLGAIRDQGGGMR

SEQ ID NO: 13353 - protein, 163 aa, BradyrhizobiumColbertium
MRPQSVIPAKLSKMTLTFEDFPPGRFGTFGPRHVTRDEILAFAAEFDPQPMHLDEEAAAKSMLRGLSGSGWHLCSLMMRMMADGFITRSASLGSPGVDEVRWLSPLRPGDDLMLDVDVVEARASKSRPELGIVKFKCTVRNAAGQALAEMTSPILIKRREGAV

SEQ ID NO: 13354 - protein, 160 aa, BradyrhizobiumColbertium
MRFFEDIAIGQRREIGTYTFTAEAIKTFAAKFDPQRFHLDEEEGKNSLFGGLAASGWHVGSACMGLLVADGQRLAREAASRGEEVAVWGPSPGFRDLRWIRPVLAGDTVAYVNVVIDKRTSASRPGWGILTARTTGTNQRGEEVYSITASAFVPMRGKSV

SEQ ID NO: 13355 - protein, 48 aa, BradyrhizobiumColbertium
MADRGALKFVGFIFATATLAVMLVAGMVVKGYADGAYTLEASTVDARR

SEQ ID NO: 13356 - protein, 45 aa, BradyrhizobiumColbertium
MESIRPDNTDPVALRPAPNQLGTIVLRFIGLLAVAIAVLAFVYSR

SEQ ID NO: 13357 - protein, 140 aa, BradyrhizobiumColbertium
MNAMRPEKIEATETEPVDTNLAAVTEVEAGIRDFVRNDIAYLRRPASTTTDAPPLDPSAEATVNNVNSLIQRVAGTSLAEIENLISELESLRDLLHAEGQRVQREISGYAQLSQAAMKSTRMIADNVAQWKRAADGLRNS

SEQ ID NO: 13358 - protein, 363 aa, BradyrhizobiumColbertium
MPSHLEARRRARAYRAARWFFFAAGRHIFATMDQHVRRGMAHGLNSIYNIERHVPGVAGRTMEFSTGFGWTRLPLLAAAFILSSTLTLSAQIIPPTAAAPDDEAEMEAAEAPSANDADVLKDIDVDKLDWSQLAVDAGTGIDPMAAKKRAQAAQEGLDWSSNSNANGSSAVTVKQSVFSFWDTRIGADLTVTNEPRTMSELLAQKAANGGSLPQSSGSAWAMATAPGAGTIWDKTAVEARVDPGAEHSKIGASLTKSVPLSGDTSLTLQNGYSVNQQGTTALPGIGGHITRNYQTDQIAKVTLNDSGTSITAGQTLSTTDDKWLRRFGAEQKLFDNVTVSGSVGETSQGTFNKSVAAGFKKSW

SEQ ID NO: 13359 - protein, 146 aa, BradyrhizobiumColbertium
MTEHSLWRFSRALHRAINDRHFDDVEALIDEDVDWALYGPIDMFPFLGARQGKEAVLEVIRQFADNFQVRRFDRESIMLGVDSAASMLRYSLTALDSNKPISLRVAQFAQFKAGRLVSMRVLIDTFDLVEQALGRAIHLPKMTSVG

SEQ ID NO: 13360 - protein, 169 aa, BradyrhizobiumColbertium
MSVREAARYRCGATGPMRTGGMTVEKLNRQRVVHLLDAFARGDIETALSCCTDDVDFLTHAPIDVLPHMVPRHGKDELRELWQTIWARYSEIRYRAPHILAEGDAVATYVQAHFRKRSNGRIVQFDMAVFYRFRGGLVAEIREIIDSYDLVQQVLEREIGPLITGARAD

SEQ ID NO: 13361 - protein, 72 aa, BradyrhizobiumColbertium
MTNPKEMPSAPALARRLACSRCGSEFSCDLSGNCWCAEEAAKLPMPIEGEDCLCRACLRKAAASRSPDGAQA

SEQ ID NO: 13362 - protein, 232 aa, BradyrhizobiumColbertium
MSLKLFELVGTDASRPFSPYCWRTRMALAHKGLAAETLPWRFTEKSALAPHGSEKVPVLLHDDKPVVDSWTIATYLEDNFPNRSSLFGGDGGRAMARMINAWGDIAIVGGIFPLIVADIPNNLAEIDAAYFRKSREARFGGKTLEEVMASRDTGVVAFRKSLEVMRQTLKKQPYLGGEAPNYADYIVFGGFQWARLVSPFKLLETDDPIHGWREKLLDAFDGMARKSPGFAV

SEQ ID NO: 13363 - protein, 76 aa, BradyrhizobiumColbertium
MSRGADPLVLDFVEWVAREPRAYVEVIATWKTSCPRLTIWEDAAERGYVTRETIAGVGLVIAVTECGEKLLRAHGR

SEQ ID NO: 13364 - protein, 254 aa, BradyrhizobiumColbertium
MTPIMIAALGLLMVATAFLSGLFGMAGGLILIGVLLALMPLPTAMVLHAITQMASNGWRAFLWRAHIRWRAVANYLAGCAVALAAWSLTRYVPDKPMALLLLGITPFMARLLPANIKPNPDRLWQGTVYGTMCMGLMLMTGVSGPLLDTFFLGGDFGRREKVATKAMCQLVSHFTKLIYFGGIIDQAASLDPVLAGVAIAASMLGTTLARRILEAMTDQQFMAWSNRLITTIACYYIAYGGWLLVRTPVLAAFD

SEQ ID NO: 13365 - protein, 316 aa, BradyrhizobiumColbertium
MRRLLFLNGIKAFEAAARTGSFAAAGLELSVSAAAVSRMVHLLEERLGVALFERKANRLVLTQAGRAYQGGLTPIFDALASLTAQVTAPASVRVLTIGVGHTFAMRWLIPRLSEFRSEEPDIEVRFTTGGAAVPFGEDLSCGIKLGTGDWPGLVAEPLFAGDLTPVCVPRLASGLKRPADLKGPSLIRVAHSPEDWPIWLKAANLARLNARGPEFQFYGQALQAAADGLGIAMGIRPYIDDDLAAGRLVAPFDLSVPKGMRWYLVYRSFQTEQRDFAAFRRWIMRAASEPAPRQADRPLRGAEPRPRAPRQKPGRL

SEQ ID NO: 13366 - protein, 74 aa, BradyrhizobiumColbertium
MTTLYDGFDIESFEAGKGLWHARIRRADFSPVAIDGVLFPAMEVGFAWPDRDAAIADAKHHIDRFRRRAEGDDE

SEQ ID NO: 13367 - protein, 75 aa, BradyrhizobiumColbertium
MSIIEFDAARPRIYARAVLSNCPECDGDLEVLRVMSGRAGCEYWAMRCTDCGGIHLDILEPNLPAGDNGGPLPAA

SEQ ID NO: 13368 - protein, 989 aa, BradyrhizobiumColbertium
MAKKPASSEKSGKSPRTKAPNSKAHRPDVQPIGPALAELLNPAINRGDAGLGSGTGLQPPPDNSRDRRAGGEAAAHRARASTPKEFPQDTARPMPLRPDPQPPGARASTEGFAEAPQANYGTAATIPTLDPELARQLGLPTEEDDAEALARPPRSKMEALGVKATADALEALIREGRPEFRKGDGSTKVWTPHRPPRPEKSEGGVRFEIKSSYEPKGDQPTAIAELVEGINRNDRSQVLLGVTGSGKTYTMAKVIEATQRPALILAPNKTLAAQLYGEFRNFFPDNAVEYFVSYYDYYQPEAYVPRTDTYIEKDSSINEQIDRMRHSATRALLERDDVIIVASVSCIYGIGSVETYTAMTFALKKGERIDQRQLIADLVALQYKRTQADFTRGTFRVRGDVIDIFPAHYEDRAWRVNLFGDTIETIEEFDPLTGHKQDELEFIKMYANSHYVTPRPTLVQAIKSIKSELKQRLDQLHDQGRLLEAQRLEQRTTFDLEMMEATGSCAGIENYSRYLTGRRPGEPPPTLFEYVPDNALIFADESHVTIPQIGAMFRGDFRRKATLAEYGFRLPSCMDNRPLRFEEWDMMRPQTIAVSATPGSWELNESGGVFVEQVIRPTGLIDPPVDIRPARTQVDDLVGEVRATAQAGYRSLITVLTKRMAEDLTEYLHEQGIRVRYMHSDIDTIERIEIIRDLRLGAFDALVGINLLREGLDIPECALVAILDADKEGFLRSETSLIQTIGRAARNVDGKVILYADQMTGSMERAIAETNRRREKQVEYNTAHGITPESVKKQIGDILNSVYERDHVLVEVGGHDMTDDVISIGHNFEAVLADLETRMREAAADLNFEEAARLRDEVKRLRATELAVVDDPTAKQRTVQGKAGAYAGTKKYGDAANLPVSAMKKKTVSSALKASGGGSGSRVHKPHLDEMHGPESLPYRETRALPAKPFGGNSRIIQPTDSRQSGPEFGPAPKSTGGQPGRRGGWKKR

SEQ ID NO: 13369 - protein, 128 aa, BradyrhizobiumColbertium
MAGIATARKSRLHNALEGLALTATLQSFPTFAAAAFLLKLCGERDLSGDPGVAIFVAVASFVHAMLAVTFGPSFPHLFRTVYDPKFFEAHLSLSDKITAWRTQPVASLQLVTIVLMLSVMAVVEASVG

SEQ ID NO: 13370 - protein, 107 aa, BradyrhizobiumColbertium
MYIAMNRFRVAKGSEAAFEQVWLSRDTHLDKVPGFVEFHLLRGPELEDHTLYASHTVWANHAAFEAWTKSEAFRAAHHKAGDNKPLYLGHPQFEGFEVVQTVGRGAK

SEQ ID NO: 13371 - protein, 313 aa, BradyrhizobiumColbertium
MEIRNLGASGLRVSAVGLGCNNFGQRTDLETSRKGIHRALDLGITLFDTADIYAGMGGSETVLGTVLGDRRKDIVLATKYAKPMATDGTKQGASRRYIMSAVEASLMRLKTDYIDLYQQHDYDPLTPMEESLRALDDLVRQGKVRYIGNSNFPAWRIAEAEFTARAMNVSRFVSCQDEYSLLVRDIEKDLLPAAQEYKLGLLPFFPLASGLLTGKYQRGAAAPADTRFAKAPALRDRYVTPRNEDMVEKLQAFAKARGHSMLELAFSWLAGRPQVSSVIAGATRVEQIEENVKAIAWKLSAEEMAEIDRITLG

SEQ ID NO: 13372 - protein, 166 aa, BradyrhizobiumColbertium
MKASSSCISDIAVTHMSLIIRAVTRQDYDQWLPLWDGYNAFYGRSGPTALAPEITRMTWQRFFDAYEPMHALVAEDDGRLLGLTHYLFHRSTTAIEPSCYLQDLFTLEAARGKGVGSALIHGVYERARLAGSPRVYWQTHETNLTAQRLYDKVAERSGFIVYRKVF

SEQ ID NO: 13373 - protein, 112 aa, BradyrhizobiumColbertium
MRLGWRAIYGPVLTAATLLLAVLLDRVVPTLPAPSAAPLLVCLVALAGASSGLASAMTSAVVAVIGATLIFLHHQSASGHGNADLARLGVLAIAAVATAGTTAIDRQCRHHV

SEQ ID NO: 13374 - protein, 48 aa, BradyrhizobiumColbertium
MVVVAITLTAAILVAASLLIIVGTRKGVGTSTLNAPTLQQPVKHAHMV

SEQ ID NO: 13375 - protein, 58 aa, BradyrhizobiumColbertium
MMRASGTAGFQGPSATVASSRLTHAVAASLAVAALSLCLIVTLTVLSTKATMAMGLPV

SEQ ID NO: 13376 - protein, 216 aa, BradyrhizobiumColbertium
MYKLYSMQRSGNSYKVRLALALLNLPYEAVEVDILRGESRTPDFLSKNPSGQVPLLEVGEDRYLAESNAILWYVAVGTPLAPENRIDRAEALQWMFFEQHALEPNIGAAYFWLSLVKGGRDLQTHSLEDWMERGYGALQVMENHLKTNAYFAARQLTVADIALYGYTHLADRCDFDLSTFPAIRDWLKRVEAAPGFVTMDWRPADIADPASIAAGV

SEQ ID NO: 13377 - protein, 400 aa, BradyrhizobiumColbertium
MSFLAAALDRVKPSATIAVTDKARALKAAGRNVIGLGAGEPDFDTPANIKLAAIHAIEAGKTKYTAVDGIPELKEAIIAKFQRENGVVYKPNQIIVGTGGKQVLYNALMATINPGDEVIIPAPYWVSYPEMVALAGGEPVPVVCTAATGFKLQAEALERAITPKTKWVILCSPSNPTGAAYTRSELKALTDVLVKHPHVWVMTDDMYEHLVYDDFQFTTVAQVEPGLYDRTLTVNGVSKAYCMTGWRIGYAGGPAHLIKAMATIQSQSTSNPCSIAQWASVEALNGPQEFIPANNKVFKERRDLVVSMLNQANGIECPRPEGAFYVYPSCAGTIGKKAPSGNVIANDEQFVTELLETEGVAVVQGSAFGLGPAFRISYATKTSDLEDACKRIQRFCGNLR

SEQ ID NO: 13378 - protein, 159 aa, BradyrhizobiumColbertium
MRRSLLLAGLTAASLVASVTSSGAQQRMARIGVLECRGGASVGFIVGSVTHLGCVLRADGLPDDRYVATIRKVGLDIGITQETALAWGVFAPVDRLGPGDLSGNYVGAQGSASIGVGLGGNVLVGGSNNSIALQPLSVQGQVGLNIAAGLESLELRPGR

SEQ ID NO: 13379 - protein, 68 aa, BradyrhizobiumColbertium
MERAHQCDAPWTRRFIDWGTSDVLSHSPPPSCGARPIIGSANADALPVPEIWQASNVAAVRRQLDRVL

SEQ ID NO: 13380 - protein, 651 aa, BradyrhizobiumColbertium
MARTGAIPRAGSVDAGTSVGDATPEARHHKMTVGLTAATTSFMGDSYTFLDCPGSVEFAHDMRAALPAVDAAIVVCEADEKKLPQLQIILRELEELKIPRFLFLNKIDRASQRIRETLAMLQPASRVPLVLRQIPIWKGELIEGFVDLALERAFVYREHKASEVVALEGGDLDREKEARFSMLEKLADHDDALMEQLLEDIQPPRDAVFDDLARELREGLICPVLLGAAVRENGVLRLMKALRHEAPGVAETAKRLGVPESKDALGYVFKTLHSQHGGKLSLTRLLAGRLDDGATLQSSSGGAGRISGILAVNGAYDTKRASAEAGDTVALAKLDTVKTGDTISNGKSPPAALITIEPTPPVLAISVAATDRKDDVKLGQALTRLHEEDPSLVVVQNAQTHDTVLWGQGEMHLRVAGERLRDRFGVKVTSHPPAIGYQETIRKPITQRGRHKKQSGGHGQFGDVVLDIKPLPRGEGFKFAEKVVGGAVPRNYIPAVEEGVVDGLARGPLGFPVTDVQVTLTDGSYHSVDSSDLAFRTAARIGLNEGLPQCQPVLLEPIHMVEIVCPTDATAKINAILSARRGQILGFDTREGWSGWDCVRAMMPEAEIGELIVELRSATAGAGSFTRQFDHMAEVTGRAADQIIAAHQHAA

SEQ ID NO: 13381 - protein, 90 aa, BradyrhizobiumColbertium
MITSFQMRAARALLGIDQKTLAELAGVSLPTIQRMEASTGNVRGVVETLIKVVEAFDRAGIELIGEQARSDSGGRGVRLKEPGPPRRIGA

SEQ ID NO: 13382 - protein, 580 aa, BradyrhizobiumColbertium
MSITTDQAAKLHQLRRPTFAELYLPKLVTVWREGYGVADFRADVFAGLTVAIVALPLSMAIAIASGVTPDRGLYTAVVGGFIASLLGGSRFQIGGPAGAFIVLVAATAERHGVDGVILATMMAGLFLVAAGLLRVGTYIKFIPYPVTVGFTAGIAVIIFASQLRDLSGITLAGKEPSEFVPKLVALAGGISTVNPSAVAVAFVSIAIIAALRRWRPSWPGILIAVVFAAVATAVLSLPVETIGSRFGGIPRELPSPALPAFSLEKARAVLPDAIAFALLAAIESLLSAVVADGMTGRRHRSNCELVAQGAANVGSALFGGICVTGLIARTATNIRAGARGPIAGMLHSVFLLLFMLIAAPLASYIPLAALASVLVVVAWTMAEKHEFATLLRSSWGDAVVLLATFLLTVFRDLTEGILVGFALGAVLFIHRMAEMTGIEERTPLVADDRPDDGNGERVPYDPALAVDRDVLVYRITGAFFFGAASAIGSVLDGIADQRKAFVVDFAAVPFLDSTAANVLGRVAAKAHRQGIRLFITGASPTVRRALLTHGVTPPRARYRTSLERAIADIKGRTADEAGAN

SEQ ID NO: 13383 - protein, 279 aa, BradyrhizobiumColbertium
MTAPKAPAACLIGWPAAHSRSPLIHHYWLRTLGIEGGYVIEAVPPEDLRDFVLRLPLRGFVGANVTIPHKEAVLALSTPDARAKAVGAANTLWFAEGELRSTNTDVEGFINNLDASAPGWDAAEEALVLGAGGSSRAVVFGLLERGIKRVHVANRTVARAETLAKQFGPDVRPLPWNAIGDVLPRARLLVNTTSLAMHGQPSLDIDVARLPQAAVVADLVYVPLATPLLAEARARGLSTADGLGMLLHQAVRGFELWFGRRPEVTAELRALVEADLTKS

SEQ ID NO: 13384 - protein, 208 aa, BradyrhizobiumColbertium
MSVQRATFTRPLIAVAMVAVSTYCAFAQRAPVPTRVRGTIESVNGDTMQVKSRSGEEVKLHLASDVNVSGITRISLADIKPGSFIGATTVPGPDGSQNAVEVHVFPESMRGTGEGSRPWDLKPNSSMTNATVAESVVGNDGHTLLVKYKDGEKKVFVPDNVPVVTFVPSDRSELKPGAKVIAFMKQLPDGSFETNRVSVGRDGLTPPM

SEQ ID NO: 13385 - protein, 378 aa, BradyrhizobiumColbertium
MKHITCIDDLRTLHKRRVPKAFFDYCDRGSYAEETLRANREDMQAIKFRQRILVDVSKRDTSTTILGEPSTMPLILAPVGLLGMQHGDGEIHACRAAQAAGIPFTQSTMSICSIEDIAASVEKPFWFQLYVMKDRGFIKELIQRAIAAKCSALVLTVDLQVIGQRHADIKNGMTVPPEWSLSKLLDFASKPAWVSGVLQGKRRTFGNIAGHVKNTEDLNRLAEWTASQFDTSLNWKDVEWVRSIWPGKLVIKGILDVEDAEEAAKTGAQALVVSNHGGRQLDGAPSSIEVLPEIADAVGDRMEIMFDGGIRSGQDVMRALALGAKSCMIGRAYAYGLGAGGQAGVAKAIDIIQKELLTTMGLCGVNRVDEIDDHIIAV

SEQ ID NO: 13386 - protein, 55 aa, BradyrhizobiumColbertium
MTRPHAGPSPEEIKEKQDLDEALEEGLEETFPGSDPVNVTQPPPSREDGHVKRSG

SEQ ID NO: 13387 - protein, 447 aa, BradyrhizobiumColbertium
MSRKYFGTDGIRGRANGLITPELALKVGQAAGLAFQRGDHRHRVVIGKDTRLSGYMIEYAMVAGFTSVGMDVLLVGPMPTPAVAMLTKSMRADLGVMISASHNLFEDNGIKLFGPQGFKLSDDVEKQIEQLLDEPIDKRLAQSASLGRARRIDGVHDRYIEFAKRTLPRDLSLDGLRVVIDCANGAAYKVVPEALWELGADVVPIGVEPDGFNINKDCGSTSPEALSKKVREMRADIGIALDGDADRVILVDERGHVVDGDQLLAVIAQSWKEDGRLSRPGIVATVMSNLGLERFLNGQGLDLVRTPVGDRYVLEQMLSGGYNLGGEQSGHIILSDYATTGDGFVAALQVLAVVQKLRRPVSEVCHRFDPLPQILKNVRHKGGKPLDDSDVKSAISDGEKRLNGHGRLLIRSSGTEPVIRVMGEGEDRILVEDVVDTIVSALGQAAA

SEQ ID NO: 13388 - protein, 416 aa, BradyrhizobiumColbertium
MNKPVVVSDETLTEPVVVSDVTPAAGKAAGPAYIVLAGISFSHFLNDTMQSLIASVYPILKDTYALDFAQIGMITLAFQFTASLLQPVVGHYTDKKAQPYSLAIGMASTFFGLLLLSAAQQYLVILVAAALVGLGSAVFHPESARIARLASGGRYGFAQSVFQLGGSFGTSMGPVLAALIVVPFGQGSIAWFSSIAFLAILILWRIGRWYAPQIKARTTAAVQSRPDAPSSRRVAVALAVLVALLFSKQLYVSSLSSYYIFYLMDRFGVSTQAAQIYLFIFLAANAVGAFLGGPLGDRFGRKIVIWISILGALPFTLALPYAGLVASAVLSVVIGLIISSTTSSIIVFAQELVPHRFGMISGVFFGVAFGIGGLGAAVLGKLADHTSIEFVYQVCAWLPAIGLLAVFLPKLPRHAR

SEQ ID NO: 13389 - protein, 258 aa, BradyrhizobiumColbertium
MAFAADMPIAAPPPMYAPPAPPADFGGWYLRGDIGMTNQSAKRIDSALPAGYTKSTEGLGFDSSPLFGLGVGYRFNNWFRADLIGQYRGKANLHGSDNVVGPGFVGVNNYSGSKSEWVVMANAYVDLGTWWCITPFIGAGVGGSYNKISGFRDDGVSYSPALNNSVAYFADNGKWNFAWAAHAGLAYKVNPGFTVELAYSYMNLGDAAPGNYRLFDNSASGPTSIKIKDITSHDIKLGVRWDLNSPPAYMPPPLVTKG

SEQ ID NO: 13390 - protein, 286 aa, BradyrhizobiumColbertium
MRRLVLAAAVLGTMSVAHAADMPDLPVLRGGFTEGLSKSSVNWDGFYVGGQFGFATSEMDFSRAPKSMTDFMLRDSILQAPVGGWSLLPKNHVQTTGFGAFVGRNWQYYDAVMGVEANYSYMNNLASTASDSMTRLIAGEEAPTNHVYTYNTTLGGGAALQLKDYVTFRGRVGWSGGDFMPYAFGGLAIGRADVSRFATVSYLKYDDFTDPNTGVTTRTTIGSATMTQSEQRVNSFIYGWTAGIGIEYALLDCVILRGEWEHVGFSSAKNISVNLNNFRVGAGYKF

SEQ ID NO: 13391 - protein, 196 aa, BradyrhizobiumColbertium
MKIYGDSNSGNCLKVKWVCDKLAVPYQWIEIDTRKGETRTPQFLKMNGAGQVPTVAFDDGRTLAQSNAIIRYLARDSALVPRDAFTAAKMDEWLFWEQYSHEPYIAVCRFLMVYLGKDVSELDPEKVKRGYAALDRMEQHLSGSRFFAGDEVSLADVSLLAYTRLAHEGGFDLGRYASVRRWIGEAEAFLGLSPAR

SEQ ID NO: 13392 - protein, 154 aa, BradyrhizobiumColbertium
MNADAIVIRSARREDVAAIVAMLADDHLGRARERVEDPLPASYYDAFARVERDPNLTLVVAEGAGRVVGCLQLAILPGISSQGGVRGLLEDVRVASDCRSRGIGERLVQWAVTEAKARGCNLVELLTHQTRVDAQRCYKRLGFTASHVGMTVRF

SEQ ID NO: 13393 - protein, 84 aa, BradyrhizobiumColbertium
MLRQLLTPSSVGSGISMPSYSMIKVGNGYVVQANDKCILKVGSRRKAAQLISDATDLLNALAVVEAPEIAPELPSLTREAPELP

SEQ ID NO: 13394 - protein, 390 aa, BradyrhizobiumColbertium
MTVAKPASRPNVPHFSSGPCAKRPGWNAQNLKDAALGRSHRAKIGKTKLKLAIDLTREVLEVPADYRIGIVPASDTGAVEMALWSLLGARPVTTLAWESFGEGWVSDIVKELKLKDVTKLSAAYGEIPDLSKVDPKSDVVFTWNGTTSGVRVPNADWISATREGLTICDATSAAFAQALDWPKLDVVTFSWQKALGGEAAHGMLILSPRAVERLETYKPAWPLPKIFRMTKGGKLNEGIFVGETINTPSMLCVEDYLDALNWAKSIGGLKALIARADANTKVLADWKAKTPWIDFLAKDASIRSNTSVCLKFTDPAITSLSDDAQADFSKKLVALVEKEGAGYDFAYYRDAPAGLRIWCGATVEARDVELLTQWIDWAFAETKAALAKAA

SEQ ID NO: 13395 - protein, 529 aa, BradyrhizobiumColbertium
MTKPKVLISDALSPAAVQIFKDRGIEVDFQPNLGKDKDKLAEIIGNYDGLAIRSATKATAKILEKATKLKVIGRAGIGVDNVEIPAATAKGIIVMNTPFGNSITTAEHAITLMLALAREIPQADASTQAGKWEKNRFMGVEITGKVLGVIGCGNIGSIVADRALGLRMKVIAFDPFLSPERAKDIGVEKVELDDLLKRADFITLHTPLTEKTKNIIDAAAIAKMKKGVRLINCARGGLVDEQAVVDALNSKHIAGAAFDVFVEEPATKNVLFGHPNVICTPHLGASTTEAQENVALQVAEQMSDYLLTGAISNAVNFPSITAEEAPKLKPFIALAEKLGSFAGQLTETGILKVEITYEGHVAEMKIKAITSAVLSGLLRPMLGEVNVVSAPVVAKERGMVVDEIVRAAQSDYESLITVAVTTERQERSVSGTVYADGKPRLVDIKGIRVDAEFGKSMIYVTNEDKPGFIGKFASLLGDAKINIATFHLGRVAPGSDAIALVEVDGAVPADLLAKVQALPQVKQAKALTF

SEQ ID NO: 13396 - protein, 395 aa, BradyrhizobiumColbertium
MSFATHLPPWLLRSAAASILLLMTGSTGAHAARANGTIAGNGFSSTILKVVSENGTSWTKIEGSTISLPVKVHITTPSYPIVNYKVRQLGHPEGMYFVNASPDKKHDDEVNFSTTYEGSTDFMTAAEKQAIIATCNKKLSEGKGIRESHNTFGSVGVELIASFLIPSNDVGPLPSGGLGTPHKHTANVAVPVKCEGKHGKADDVAAKEPNFSVKDIHLRFMTSAGHVTSPNPGAKCQVTHARVRVGTSKAGGVKFKLWTKIGNEPMQSQFVEAWSSFVSPGKYEAVFTKKISVSKTTSVQAMAEDKTNPIGQSTGWKQVSLDCTGAGGGGFADRPGTANPSDKRLPSRVFLGEAQPVPNAPPSRPRVGEARLPPMPQANAARAKDRFYPSKPHVN

SEQ ID NO: 13397 - protein, 322 aa, BradyrhizobiumColbertium
MVAVVPKSVCRYDFTNIMNDIQLNRVDLNLLPVFEAVLAEGNVARAAARLHVTPSAVSHGLGRLRQQFNDPLFLKTPKGVVPTERALQLADAIADVLARARRVVGTAEPFDPARSRRRFTVGAPDAIAAVMMPPLLKLVQREAPFIDMALRYVLREAAFAALDARTVDIAVVPIDDVPARYVSKIVFEDRFQIAVRRGHSFAAEPTLKRYCEMQHAIVSPAGDTRAYVDDVLASKGLSRRVAMTVPSFMLLMAVVAESDLIAALPKGLLDVHGARFGLLGIDSPLPMRSFQLRAIVPKVAMMDAGVEWLFGLLDNPPSKASA

SEQ ID NO: 13398 - protein, 390 aa, BradyrhizobiumColbertium
MREAVIVSYARTGLAKSGRGGFNITPPMSLAAHAIHHAVDRAGVEKDYVEDCYLGNCAHGAPNIGRQAALLAGLPKTTAGVSVNRFCSSGLQTIAMAANSIRSDGADCIVAGGVESISIPGGATPKESIDPELLKVAPDIFMAMIDTADIVAERYKLSREYQDEFSLESQRRMASAQQAGKFKDEIVPMKTKMKVVDKQTKAESIVDYVVDRDECNRPDTTLEGLAKLEPVKGPGKYVTAGNASQLSDGAAAVVLMEAKDAEKRGLKPLGRFVAWATAGCEPDEMGIGPVFAIPKLLKRTGLKIDDIDLWELNEAFASQCLYCRDKLGIDPAKYNVNGGSIAIGHPFGMTGARLTGHLLQEGARRKAKWGVVTMCIGGGQGGAGLFEIYH

SEQ ID NO: 13399 - protein, 1162 aa, BradyrhizobiumColbertium
MIRSDFQLRGVGDPRLAVHATSPLATWLWSTDGARVLWANPVGAKLFGAANSAALADRVFGPADSHRRQIARLARQLPAGGSVRLERLRGFGARLGTLMTCACARLDFADGSHAVLVTAIDPALRTMPLVERLHRLVAGAKVPMAAFAPDGLFVGASEAARTLLGFRDLFEAGLERARSDALREGRAATQIGIGQMVLQRVGRGADIGLVALIEPAANPAAARDAAPAAAPDVAHSQPAQPSHEIAPAAPSAAAPEPPPAPSAEAPSDIALFDAFAEPEDIAAPAETIAHAQPDSEAAAPVASAAPEAPVENIPIESTSTENTPVENRSAAIVSPQGESITGGMVEPSSGKPSSGQQEPPAPRQHPLRFLWQMDAEGRFVLLSDEFIGLIGPRTAAGFGRPWREIAADFALDPDGRVAQALQSQDTWAGITVSWPADGGERLPVELAGLPVYDEMRNFAGFRGFGVCRDLDALNRLEALRRFERLAAAPTQHGLSADVAGPATETETEAEPHMKPEAAAAPPPIKPAEPEPTSGPEAPETEAPEPELPKPELPEPTSDATSHPTDLDTHVETPPNVVPFRPPGDTRAPTLTPVENSAFNELARQLSERLERERETIAADASEPAAEIAAEPAAPEPEAPQAAAEWLSEPAPPPRGTSTRDRTLLDLLPSGILIYRLDRLLYANPAFLARMGYASVSALENAGGLDALYVEPGVSSASSTSQAGTPVTISATVATGEAPLATTDAHLHAIDWDGESAHALICALPQPTPIVAESVVTEAVVAESIVAEIAEPAAGEAEAEDLAAILDTTAEGIVMFDAEGNIHACNRSAEALFGYDGEALLQQNLMTLFAPESQQVVADYLQSLKSQDIASLLDHGREVLGREKKGGAIPLAMIMGRTRPDGPNFFAVFRDLSQAKKGESELTQARRLVDGAANAKADMLARISHEIRTPLNAIIGFAEVMISERFGTLGNERYGEYMKDIRASGERVIAIIDDLLELSRIETGQLDLNFADLNLNDLVEACVTVMQPQANRERIIIRTSLAHALPQVSADARAMRQITMNLISNSIRLASAGGQVIVSTALTDRGEIALRIRDTGHGLSEREVAAAMEPFRTPPPGDAADSSALSLSLTKALVEANRARFNIKNAGHGTLIEVVFAPVLAKA

SEQ ID NO: 13400 - protein, 144 aa, BradyrhizobiumColbertium
MTGATDPFSASIIPFEVPEQMRAFAEKGVSQARENYAKFKDAAETHNGTVEAVFTCASRGASEYTAKLVEFMKANSSAQLDFAQQLFGAKSPTEAMELWTGHARKQLETYQSQAKELAELTQRVAAETAEPIKASASKYYPPAA

SEQ ID NO: 13401 - protein, 135 aa, BradyrhizobiumColbertium
MKQFFLKFFTWWNGQTFGTQLWTRRYGELVGEDEQGNRYYRTRGGAIDPALGFERRWVIYNGYAEASRIPPSWHGWIHHVVDMPPTEINYQPREWEKPHQPNLTGTAKAYRPSGSTLASGRRPKATGDYQPWTPG

SEQ ID NO: 13402 - protein, 228 aa, BradyrhizobiumColbertium
MSSPLQIGLLVFPRVTQLDFTGPLQVFAMVPDAKLHLIWKRIEPVPSDSVMTLTPTTTFADCPQLDVICVPGGHGTNDLLNDEEVLDFLRRQADGAKYVTSVCTGSLALGAAGLLKGYRAATHWSAMDMLAEFGATPTKTRVCIDRNRITGGGVTAGIDFALTLVSIMVNRTMAEAIQLQMEYNPAPPFNSGSPDTAPAEVMALLGARGAQNQARRLEAVKRAAERVM

SEQ ID NO: 13403 - protein, 312 aa, BradyrhizobiumColbertium
MIGILIFPDFQLLDAAGPISAFEIAARCIGKAPLIRVLAAKPGLVRSSSGVEMMARDLKSASTITTLVVAGGTGVADAARCDATRAFVQRLARRGVRVASVCSGAYVLAEAGLLDGRRATTHWGRTRDFVSRFPKVKFEPDQIFTRDGNVWTSAGITAGIDLALAMITEDHGEEIARQTARQLVLYHRRSGGQSQFSSLLELKTPSGRFGPLLSWARENLDAPLTVEDLADRAGMSARHFARAFAAETGTTPSKAVERLRLEAARERVQSSREAIELVAETTGFRDPERMRRAFIRAFGQPPQALRRAARAG

SEQ ID NO: 13404 - protein, 84 aa, BradyrhizobiumColbertium
MKFVMILVLGSLAMGSAARADQPGPDWMPMEQVKSKVMESGYSQVTKLEADDGQWEGEGVKNGQKMEFHADPKTGAIVREKPDK

SEQ ID NO: 13405 - protein, 326 aa, BradyrhizobiumColbertium
MAAVAFIAVAVPPLGALLRPYVTEAIVLLLCISFMRVDFAALHGHLRRPALVVTATAWTMIGVPLIVGLITHAMGLTSHSPGLALALMLQGMASPMMASPALAALMGLDATLVLVTLVTSTALVPFTASLFAALFLDGMLSISPLTLGLKLLGILAASLLAATVTRWVFGAEAIQRAKRPIDGFNIIILFVFASAVMGDVAGALVSQPLFTMGLALLSFAIYFTLLAITALLFRRIGYERALALGLMVSQRNLGLMLAATAGALPPSTWLYFAMTQFPIHLAPYMLMPIARRLTADVDALNGTTKADARSFASHRRRGGTSVQDPG

SEQ ID NO: 13406 - protein, 315 aa, BradyrhizobiumColbertium
MPVVLDPDAAAVYKAFQEAGRPAYETLTAPEARAYYSQARFATNPDAPELARVAPLAIPAPHGVIPARLYVPKEPRQRDGLSPALVFFHGGGWVIGDLDSHDVVCRQLAVEGALIVISIDYRLAPEHKFPAAAEDAVAATQWVAGNARELGIDASRLSIGGDSAGGNLTAVVALAARDAGGPALAGQVLIYPATDFAMTHGSHSEPETSVLLTHSVIRWFRDHYLNSAADIHDWRASPARAQSLAGLPPAYVLTAGADPLRDEGDEYADRLRQAGVPVTTKHYPGQFHGFFTMGKLLAKANVAVGEIGAWLKGLG

SEQ ID NO: 13407 - protein, 339 aa, BradyrhizobiumColbertium
MSNKPDSLLKPREMFRTFTLTGLAALLAATALTVATPAQAQIGTIFSDPPPLRPPGSIPRGQLQQIPEDDEEVPELPPQGRVLPSRPMPLPPGRQGNVMPGPVESQPLAPPPGSTLAPPNQPPSAAITPSGPQGVPGQRQPQQKGAPGTVPQTPASLQPGDEVVTEPPAQKIANKKATFSGLDKITGRIINFDEEIGETVQFGALRVKTDACYTRPATEAANTDAFVEVDEITLQGEVKRIFSGWMFAASPGLHGVEHPIYDIWLTDCKEPQQTIATAAPDPAAKPAPPPPAQKKAAPKQAQQRAPQPLPPIQQQQPAPPPPPPPEQRPGLFGIPGFGR

SEQ ID NO: 13408 - protein, 212 aa, BradyrhizobiumColbertium
MLLRAYACGIFPMAESADDPTLFWVEPELRGVIPLDGFRVASRLARTVRSDSFRVTVNTAFKATIAGCAAPQAGREDTWINKRIRDLYGGLFELGHCHSVEAWQGDDLVGGLYGVSLGRAFFGESMFHTARDASKVALVHLVARLIYGGFELLDTQYVTEHLKSFGAVEISRRRYTALLDKALAGEPGDFLRLSAGEPIPGARALEIIASRQ

SEQ ID NO: 13409 - protein, 371 aa, BradyrhizobiumColbertium
MNQSTPTLLYIDDDDALARLVDRGLTRRGYRVVHAASGEEGLERIRRAGAQGSIEDSIDVVALDQYMPGLDGLETLEQIMAIPDAPPVVFVTASQDSSIAVTALKAGAADYLVKDVHGDFIPLLHVAADGALRQAELQRAREEAEAEIHASRDRYAALAAERELLLREVNHRVGNSLQIIASLLHLQASSAAQDEVKAALTNAMGRVAAVAQVHRRLYTSQDLKSVVLNQYLDSLLEDLRRSAEGNRMSRLTLKAEPIEIDPDRAVAVGIIVNELVMNAVKYAYPDGAGPIHVELISRGDDLQLSISDDGVGDNVKADPRSTGMGQRIVAAMASKLDATVERDPAHSGTRIVLKFGRVPAVPGKTSTAAAS

SEQ ID NO: 13410 - protein, 146 aa, BradyrhizobiumColbertium
MTQPVTIIMIEDDEGHARLIERNIRRSGVNNEIVSFANGTDAMLHLFGADGSGLVQKGNALLILLDLNLPDMTGIDILRQIKENKYLKASPVVVLTTTDDSQEIKRCYELGCNVYITKPVNYENFANAIRQLGLFFSVIQVPPAAT

SEQ ID NO: 13411 - protein, 508 aa, BradyrhizobiumColbertium
MTAEAQRRRAFWQVLLFSAGLLVLTAISAGSVYLVNKARQDAEWVVHTIEAQNQINALLLEIRRAESTARGYLLTQATDFKADHEKAVAAIIPALDRLTRLTGDNPAQRANIEKLSAAIETRLGQFAQEMDFISQGHPDKAAAVVREVGSTDTTAAIAKVATAMIREEERLFRLRTVNSDRSQTLAASMTGIGSGLVVVLALISIWLVRRSALARDEAEARLRDANVNLEAVVDERTADLREANNEIQRFAYIVSHDLRSPLVNIMGFTSELEELGGDIFRRISSLARARGDGTPPAPAGPGEIALEGADKQLSEDFSEALGFIKSSIAKMDRLISAILNLTREGRREFQPVKIDTRELIAAIVSTVAHQAAEARAEIHLEPLPDIVSDRLALEQIFSNLIDNAVKYLKPGVPGEIRISGRTKLGYAIFEISDNGRGIDPRDHQRIFDLFRRAGTQDKPGQGIGLAHVRALVRRLGGTMSVSSELNAGSTFTITLPIAWNVNNRNADR

SEQ ID NO: 13412 - protein, 452 aa, BradyrhizobiumColbertium
MFDKILIANRGEIALRILRACKELGIATVAVPSTADADAMHVRLSDESVCIGPPPSKDSYLNVPALLAACEITGADAVHPGYGFLSENARFAEILTEHNLHFIGPKAEHIRLMGDKIEAKKTAKRLGIPVVPGSEGAVGPNDDAMAIAREIGFPVLVKAAAGGGGRGMKVAHSEADLQLALSTAANEAKSAFGDASVYLEKYLQKPRHIEIQILGDGRGGAIHLGERDCSLQRRHQKVWEEGPSPVLAAAARARIGETCAKAMREMKYLGVGTIEFLYEDGEFYFIEMNTRIQVEHPVTESITDIDLVLEQIRIAAGGDLPAKQDEVQVIGHAIECRINAENPQTFRPSPGRILQYHPPGGLGVRIDSAVYQGYTIPSYYDSLVGKLIVHGKTRAECLMRLRRALDEMVVEGIETTLPLFRALVREADIINGDYHIHWLEQYLAGKMEPAQR

SEQ ID NO: 13413 - protein, 164 aa, BradyrhizobiumColbertium
MARQPDDKAAAKFSSEDSALVRELALLLDETSLTEIEIERAGLRLRVARNISVAATMPMPMAPAPAAVPVAASAAASAPAASDLSKHPGAVTSPMVGTAYWAPEPGAKPFIDVGTKVSVGQTLLIIEAMKTMNQIPSPRAGTVTQILVEDGQPVEYGEPLVIIE

SEQ ID NO: 13414 - protein, 155 aa, BradyrhizobiumColbertium
MAEPATDTILVLNGPNLNMLGTREPEKYGHATLADVEALCRDAAASFGLKADCRQSNREGELIDFIHEAHRRKMKGIIINAGGYSHTSIALHDALLAVQIPAVEVHVTNIHARESFRHHSYTARAAFASLCGFGIEGYRLAIQGLAAKLGIRPNA

SEQ ID NO: 13415 - protein, 269 aa, BradyrhizobiumColbertium
MLNRFMISVAAAALVAGTGLANAQGTMGRDSGGGAGGAQMQQSQPSGGGADRGGSMGRDSMSHDKGTVGQSGGSDTMKSGRASEDKSGATNKNAADDKSGTKGQRTDDRAQGQTDKSQQDKSKSMSQDTSKSGSKDQKDMKAEGSKSGASTNNAETRQGTGASTNQNAQGQGSSSTTVGQAGAAAKLSTEQRTQITSVIREQRVAPVTNVNFSISVGTRIPREGITLHSLPSRVVTIYPEWRSYKYVLVREEIVIINPDTYEIVAVLNV

SEQ ID NO: 13416 - protein, 43 aa, BradyrhizobiumColbertium
MNDFARSGQPSAKEKGRLFCRPSMFSVILQRAISKSPFRSVRC

SEQ ID NO: 13417 - protein, 255 aa, BradyrhizobiumColbertium
MLSLRLLAPALFALAMFGASAPASADSFSDAQRTDIEKIVKNYLVSHPEVLEEAMAELSKRQTAAETRKHEASIAQNADAIFNSPRQVVLGNKDGDVTFVEFFDYNCGYCKRAMGDMLDIMKSDPKLKVVLKEFPVLSQGSVEAAQVGVAVRMQDPTGKKYLDFHQRLLNGRGAADKARAIQAAKEAGLDTARIEKDIASPEVRATIEENFKLAEAMGMNGTPSYVIGKQIVIGAVGVEALKEKISIARCGKATC

SEQ ID NO: 13418 - protein, 466 aa, BradyrhizobiumColbertium
MLLQIALRRKASALTALVTAAAIALTPFSSARARAKGPPVLRDTETEQLLREYTRPILRVAGLEKQNIQMVIINDSSFNAFVADGRRIFVNWGAILQSETPNQIIGVLAHETGHLAGGHLSKLREQLAAAQTQMIIAMLLGAGAIAAGSAQRSGAGNNGLANAGAAAIAAPQEMIRRTLLSYQRQQEENADRAGVKFLTATQQSPRGMYETFKRFTSESLFAARGADPYLQSHPMPAERVAALQELASSSPYWTKKDDPALQLRHDMVRAKISAFMERPETVYRRYPQTNDSLPARYARAISTYLHGDLRSALAQIDALIQVQPNNPYFYEVRGQALLESGKPAEAIAPLRKAAQLSNNAPLIEMLLGQALVGTDNRAYTDDAVRILRAAVAREPEAALGYTQLAMAYGRKGDYAEADLASAQAAYLRGDNKTARELATRAKTRFAVGTPGWVKADDIVAAKPPRN

SEQ ID NO: 13419 - protein, 80 aa, BradyrhizobiumColbertium
MVKRSWSSSCVIGLAIGGGPDTRYALVSRALYEPYNAASLGRKRPVFRTGRSVRQRIAEIDARRDIEEPVGAMARALPPQ

SEQ ID NO: 13420 - protein, 370 aa, BradyrhizobiumColbertium
MVMDVMAAAARIEAAGGHVIHMEVGQPAAGAPSTAIAAAHAALEAGRIDYTSALGIPSLRERIARLYRDTYGCDLSAERIVVTTGSSGGFILAFLSMFEPGDRVAVTVPGYPPYRHILTALGCEPVLIETTNETRHALTGEALLAAHRKAPLKGVLVGSPANPTGTMMSREALAGLIAAAEDAGIRFVSDEIYHGLDYAFPAVTAAALTEHAIVINSFSKYFCMTGWRVGWMVVPEILVRPIERLQQNLSISVPALSQIAAEAAFDGAAEMEAIKHGYQENRRILSEGLPKAGLSKFLPADGAFYLYADVSDFTSDSFAFAKQMLEQARVAATPGVDFDPVHGRSFIRFSYARSPGEMREAVDRIADWLK

SEQ ID NO: 13421 - protein, 185 aa, BradyrhizobiumColbertium
MWPTRPGESVGALRAIVLVALGTALMALSAKVNLPLPYVPMTLQTLVVLMIGAAYGWRLGSATMIAYLAEGALGLPVFAGPVGGIAPLVGPTAGYLFGFVLAAFVTGWLAERGWDRSVLLLFAAMAVGHVAILAAGFGWLAFGLSLGAAKAWQVGIVPFIAASLVKNALGAALLPAARRIVERRG

SEQ ID NO: 13422 - protein, 410 aa, BradyrhizobiumColbertium
MNSAIVLGGGMIGVSAALHLQQRGWAVTLVDRREPGRETSYGNAGMIQAEAVRPYPMPRDFASLLKIATGRTNDVRYSLSSLHLHVEPLLRYWWHSAPKRHREAIEAWARLIAYATAEHDVLIREAHADNLIRRAGYRALFRDSASLNLALKAAEEDQREFGVNFRVLSGSELARAEPILRDDLPGAIHWLDTWTVSDPGALVTAYAELFERLGGRVVLGDARSLQQTATGWSVDTDQGRIDAPHAVVTLGPWSPDLLHKFGYRIPLVRKRGYHMHYSGGASLDLPLIDKTGGYAMGPMAKGIRITTGAELTGADALATPVQLASAEASARELIDLGKRVEPDPWFGTRPCTPDMLPVLGRAPRHPGLWMNFGHGHQGFTLGPATGRLLAEIMNGETPAVDPTPYRPERF

SEQ ID NO: 13423 - protein, 1052 aa, BradyrhizobiumColbertium
MPNKMLIDATHPEETRVVVVRGNRVEEFDFETAQRKQLRGNIYLAKVTRVEPSLQAAFVEYGGNRHGFLAFSEIHPDYYQIPVADRQALIEAEEQAHREAEEESENRSHGRRRSRHRNARRRGHGERVRSDIVEGLDAGADPVAQRVEGEPPHGEGTPHEGEHLHADAEHHGEHDAHHEHDHDNHHHDDEHHHGDVGNGHEHDHHDHDHADETPAPVAAVGAEPVLATEAVAEPQESHAFEAHVSETPASEAPTEALAEAVTSAAEPADAVYAAGESTEASQAEAAEAAGDDDDDDDDDDEEDEDGEEAEEEVVESVGGDDVLEEVPERTFRPRRQYKIQEVIKRRQVMLVQVVKEERGNKGAALTTYLSLAGRYAVLMPNTARGGGISRKITSAQDRSRLKEVVQDLDVPEGMGIILRTAGASRTKPEIKRDFEYLIRMWETVRDLTLKSQAPTLVYEEGSLIKRSLRDLYNKEIDEIQVAGEAGYREARDFMKMLMPANVGAVKQYRDGQPLFSRMGVESQLDAMFSPTVQLRSGGYIVINQTEALVSIDVNSGRSTREHHIEDTALKTNLEAAEEVARQLRLRDLAGLIVIDFIDMDEKRNNRAVERKLSDCLRQDRARIQVGRISHFGLLEMSRQRIRASVLESSTDPCPHCGGTGHVRSVSSVALQLLRGLEEILMKGATHNLVVRTRTDVALYVLNHKRGHLRDLENGFKVTLSVIADPGVSGPQAYVIDRGEQVHTLEAAKALLAAQAAASPPPQAEEAYDDEDGFDIETESEVETDETEGLADEQAAGESASEQDGQRRKRRRRRRGRGGQREGELREDTAPTLPEPAMIAGEAEDETEAEQDGEEGEEQAARGEQQGSDRRRRRGRRGGRRRRGGGEEGLAGSINDELGTGQPSEAADAVADFDGFSREAAPSIAQVEHAQAEHGQAEHIAEQTAEPQIAQPEPHLEAQIEVAAKPEPEPAPAAATAEEPADDKATRRRSTVREKVSFLSNGRSEPTAPVAQAAEQVAPPAPAAEPAPQAASETPAAPRRAGWWSRRFGGGGE

SEQ ID NO: 13424 - protein, 431 aa, BradyrhizobiumColbertium
MASRTNRRILLGGVLLCIAALPCADSSRLVAAESQQQPAHAAANFPVASAARLAGDGKHTRFILDIDQAVTFRAVTLADPYRVVVDVPQVNFRLPAGTGSGGRGLVKAFRYGLVMPGGSRIVFDLTGPAKIANSYVVEAANGQPARLVLELEEVDRTAFASSSQPESRPELRPAIAESPPAAAPSAPTPDAPQQKADGRPVVVIDPGHGGIDNGTQSSGESEKNLVLAFGLALRDKLEKAGKYRVVMTRDDDTFIPLGDRTKIARNLKAALFVSIHADALPRTEGDAQGATIYTLSDKASDAEAQRLADAENRADAIAGFNLAEEPTDVADILIDLTQRETRTFSNRFARLLMTEMKQTVRMHKHPLKSAGFRVLKAPDVPSVLVEIGYVSNKGDLEHLVSEGWRSRAVGSMAQAIDGFLTKRMATAGTSN

SEQ ID NO: 13425 - protein, 834 aa, BradyrhizobiumColbertium
MRLLVRFMGFLFAAGTVVFLVGVGAVAGLIWHFSKDLPDYSQLQDYEPPVMTRVHAVDGSLVGEYAKERRLYLPIQAVPKLVINAFLAAEDKNFYEHGGIDYTGMARAGLVYIQNYGSNRRPQGASTITQQVAKNFLLTNEVSFTRKIKEALLAMRIEKTYSKDKILELYLNEIYLGLGAYGIAAASLVYFDKSVNELTVAEASYLAALPKMPATLHPVRNRDRAIERRNYVVDRLLENGWIKQADADKARKEPLAVTSRSNGAHTFAGEYFAEEVRRDIFERYGEKKLYEGGLSVRTTLDPKIQVMARKTMVAGLVSYDEQQGYRGAISKLDISGDWGVRLAEIKSLSDISPWRMAVVLETSEQSARIGFQPGRELGGAVSKQRETGIVTVDGVRWARPLQGGTRGKTPTAVSQVLQPGDVIYADPLYKDGHPVEGQYRLRQIPEVSGAMVAMDPWTGRVLAMVGGFSFDQSQFNRATQAYRQPGSSFKPIVYSAALDNGYTPSTVVLDAPIEIDQGQGAGVWRPENFSSGKFQGPVTLRNALRQSLNTVTVRLAQDIGMPLIGEYARRFGVYDELPNYLSYALGAGETTAMRMVTAYSMLANGGRRVKPTLIDRIQDRYGHTIFKHDQRECRGCDAPGGWKNQPEPQLIDRREQVLDPMTAYQITELMEGVVQAGTATVIKDVGKPVAGKTGTTNEAKDAWFVGFSPDIAVAVYMGFDKPRPLGRGNAATGGHLAAPIVRDFLKLALADKPAVPFKVPAGIKLVRVVAKTGMRAGPGETGGTILEAFKPGTAPPDNYSVIGVADADGRGMPLSQQQQPDSGFLIRPGTGGLW

SEQ ID NO: 13426 - protein, 38 aa, BradyrhizobiumColbertium
MPPQQPDRLLDLFYQPFDFGAHVVLCLAESRVQFERGM

SEQ ID NO: 13427 - protein, 322 aa, BradyrhizobiumColbertium
MQERTSLEDALSGIGKVEQELEDDIGMIELGEAEGDEGVVAEAEAALKNLKKEVARRELEALLSGEADRFDSYLEIHAGAGGTESQDWAQMLLRMYTRWAENHGFKVEFLEESEGEEAGIKSATIQVSGHNAYGWLKTEAGVHRLVRISPFDSNARRHTSFSSVQVFPVIDDSIKIDIKESDVRVDTMRSGGAGGQHVNKTESAVRLTHIPTGVAVVCQAGRSQHKNRAQAWDMLRARLYEIELKKREEKAAADQAAKTDIGWGHQIRSYVLQPYQMVKDLRTGVQTSDTAGVLGGDLDEFMAATLAQRAFGTTTGEIEDVD

SEQ ID NO: 13428 - protein, 279 aa, BradyrhizobiumColbertium
MGHGMAGRYLDAGFTVTLWNRSKSKAEDLIARGAHWATSPEDAAIDADAVVTMVADDEASRAVWLGPKGAAKTAKAGTIAIECSTVSYDHAREMGRELNARGLIYIDCPVTGLPDAAAAGKLTLLAGADAADLERARPYLEPIGSTIRHFGPVGAGTVYKLINNLMGAIQIAGLAEGIAIAEQAGLDMNLVLESIQAGVAASPQVQRHSKRMVARDFSGATFTAALRHKDAAYAVKLAESLLADKPIVARAAVEAYAKAKAAMPDDDEGRMIELVSRRK

SEQ ID NO: 13429 - protein, 262 aa, BradyrhizobiumColbertium
MLINFTLAPLEKIIPWGQPGSYCLHWFGLTFGEYWIQAGEATLFEYSDHARAAGAERYCTYQVVRLYEDLMDMLPYILEPVPDALVPYISGDGAGILRSAHEAWCERADDVPDEDGLFDFADVAIMWVGKRRLDSSYLAPSANIAIWSDEEHVHIEWDNRDRQLGGSPAWSASLGSYRVSRGEFIEEMNSFHVRLMEQMAARIEQVASGQLRSEIQIDLAALAREHEQRTCSLDAALKIVPATDWQQVERAVGEILVARNGL

SEQ ID NO: 13430 - protein, 303 aa, BradyrhizobiumColbertium
MTINANRIDGRDWSLLAALSILWGGSFFFNGAALRELPPLTLVLLRVAFGAAILAPLLRMQGIGFPKSMAEWTPFVAIGLLNNVIPFSLIVIGQTFIPSGLASILNATTPMFTVIVMAMAGEETLQMRRIAGVALGIVGVVILRGWGIEARPGQGLGILLCLGGAFSYGLAALAARRLLKNSAPLGTATFQLMASTVMMAVVAGTVERPWQLPMPALATWLAVLGLATLSTALAYIVFFQIVRRSGASNVMLVTLLIPVTAILLGWLVLGEPISMRAIVGAIVIGSALLVIDGRAVGLLRRGA

SEQ ID NO: 13431 - protein, 451 aa, BradyrhizobiumColbertium
MSKSSAQYSQYPQHHPHDHGRAFQRRPAAAAAATAIPLPATDDAYTIVHAGKQVRFGPVVFWIVVGTVVLLGLWSAATATYFAFRDDVLTRLIARQAEMQYAYEDRIAELRARVDRTTSRQLLDQEQFDQKLDQIMKRQTALESRATALGAMPDVTGSIPRSAPQRGDATHTTPKPSPISDTVIFVAPPDREARLESRAPTVVAAPSSQFARNQSFENVLVRLTNSLDQVERRQMAALSAVEESMDSRMRRMRGVVSDLGLNLAHLEAAVPRTAMGGPFVPIKLTANAGPFEKQLHRINTTRAEMDRLNRTLALVPYRKPVIGEVEFTSGFGVRSDPFLGRPAMHTGLDFRAATGDPVRATAFGKVISAGWSGGYGRMVEVDHGNGLSTRYGHLSEINVKVGEIVKIGQVIGLVGSTGRSTGPHLHYETRIEGEAVDPQKFLRAGVRLSAG

SEQ ID NO: 13432 - protein, 229 aa, BradyrhizobiumColbertium
MSKKSRKKSSKTSSGSPTAKKKTAKTQASTQTRSAKTQRTPASKSTGTIAKAGSHKAASKQLNTSKSSPPPARAKSGLAEGQKAPGFSLPRDGGDTVTLADYAGRKLVLFFYPRADTPGCTREAIDFTRLAEAFSAAGTAVLGISADPLKAQEKFRDKHKLAIPLISDEKHEVLEAYGAWGEKSMYGKSFLGVLRTTILIGADGKVARIWRNIRVDGHADDVLEAARSL

SEQ ID NO: 13433 - protein, 1269 aa, BradyrhizobiumColbertium
MAAVPAQGASRPVDGCGPGGAHPYDGRLYQEAMARNTSPQDYNRNFDRRSGQYEPQEWDDAEWDPDQEAAAGHRARRLLARSGSGFHRFGDGFGSLRRWMGGGRWLKRLAVVVGAVLVIFVGCFGALWWRLGAGPINLDIATPWLAAAIEDNIGHGNTVEVGGTQIERAGRVRIAVRIRDIIVRDRDQAVVASAPKAEVKLSGAGLLMGRLRAESLNLVDAELAIRIAPDGTVTVSAGDTTKPLATGVASKKDAGLPPTFPRNGVPPPPFAAQPTSPEAPQASPQAAGQSGILQSLDWLDSLSMTGLDGQNLNEIGLKNGNLIVDDQQRGSKWSFENITLSLRRPSRGGIALSLGEEGARPWMLRATIGPAENGVRSVDIKADKVSTSNILLALRVKDLTYTADMPLTGELKGELGRDGVPTFFRGKIAVGAGNIIDTDTPDYPMGIDSAEINVEWDANRRVLVAPFKILSGANRLTLLAHLEPPNGTRNDWQLGFSGGSILLGGIDNEPPLVFNRIAIGFRFDTDHKRLLLTQADVSNGEIGVAGTGAIDYSGEPRLTLGFAGTPMSASALKRMWPTLIVPELREWVIERIERGTLQRIEIGVNSPTKNLPRKGPPIPDDGLSVNIVASGVAVRPVDGMPVVRDADLRARVTGRTATVNIGQGVADTPSGRKVTISDFVFEVPDMAPKPSPSRSRFRVDGPVPAAAEMLANDRLSDLSATVIDPNTSKGTFTANIQLGMPVKGELTKADTTYSVTADLNGFAAEKLVMNQKLEANSLKIIANNQGYQVKGDVKINGQAASLDYRKPAEGDADVRLQATLDDASRARLGFDLSPAVSGSLPIRLSGKIASGADQTTKLGVEADLTSVRLDNILPGWVKLPGKSAKASFKVVPTAQSTRFEDILIEGGGASIKGSLEVDANGDLMNANFPIYAPTDGDKASLRVERSQEGVIKGTMRGDVFDGRGFLKSAISGHSKEDKSKLKNVDFDIDVKLGAVAGFNGEAMRSVDAKMSKRNGAVKALTLSGKIGRDTPVAADLRGGRAQGSREVIYLQTNDAGALLRFTDTYTKAVGGQMVVAMEPPTSEPNTAREGLINVRDFTVKGEAQLERVAAGAPNGTGNGVSFNALRAEFTRQNGALTIRDGVVKGPMIGATIEGSIDYPGNQVCMSGTFVPMYGVNNIFGQIPLFGIFLGGGNNEGLIGVTYEVVGTPAAPVMRVNPISAMAPGLFRKIFEFNTGKQNSPFDEFPSQSNDGSTASTRQLSSGCSVSRRQ

SEQ ID NO: 13434 - protein, 564 aa, BradyrhizobiumColbertium
MNLLSHLKIRTKLASMVCLAALTVTAIIGVSSVLSKSRMMEDRVEQMRTAVELLYNYAQSLQDEVTAGKLTPAEAKSMFHQRGRRMSFNGGQGYPVVYNEDTSLVVNGANQQLEGKITGAKDSNGVLIADAIIKAGSETAQGGVTSYLYPRPGQTEPVRKTVFARKFAPWNVTISYGVYVDDIDADVRGLTLELAAIGGGLMLLMAALSWLIARDVLGALDRQKNRMQEISEGAIDKPVEETDRGDEIGRMAETLEVLRQTALTARTLEAEQVAIKARTEQEKRDALIALADRFDASVGQLVGLMASGSGELENTAKSMSSTAEGTNRRAAVVGSAATEASQRVQTVAAAAEELSSSITEISRQVAQSAEVTGRAVDSARRTDTIVRALSDGAQQIEHVAELISSIAAQTNLLALNATIEAARAGEAGRGFAVVASEVKSLASQTAEATREIGDKIAQIQGATKEAVDAIGGITATIEEVSRIATSIGAAIEEQGAATAEIARSVSQTAEATREVTTNIGVVSTAANETGNAAGMVLAAASSLSKQAEQLSGEVGTFLAGVRAA

SEQ ID NO: 13435 - protein, 69 aa, BradyrhizobiumColbertium
MTQQIHHSPYGMVVIARMGSMKFLPIMNVGMAGLPRGTAAAGLCATVQANLLLPAGGGRSGVENRHGPW

SEQ ID NO: 13436 - protein, 136 aa, BradyrhizobiumColbertium
MDFPYLTRFQPVLLSLFRFITGLLLFQYGVAKLFKFPAVPMFAKVELMSLYGAAGALELVLGALLMIGLFSRLSAFILSGEMDFAYFMGHMFRGETPVFLPLLNNGTLAILFCFACLYLSAAGGGPISADAAMGKK

SEQ ID NO: 13437 - protein, 39 aa, BradyrhizobiumColbertium
MNTFEKPRRVRINDRYCDVLSDMTKMSGRIDPKWLARRN

SEQ ID NO: 13438 - protein, 423 aa, BradyrhizobiumColbertium
MDQNAPKETTAEASKEQVGSTRQDAVRIALVVLCLCFALAVLGRGLSESFTVFLKPISEDLGWDRAQAVSIYSLTWLISGLTAPLVGRLFDHSGPRIVYALGLLLLGSAFLSASHAQALWQFQLSIGICVGIGVAFIGNVPNSILLGRWFGPRLPTAMAVVYSAMGGGVLALLPASQLLIDHLGWRETYQVYGLAALALLVPLLLLPWRLFAAGSPHVAKKSDPDFVDNGWTLVSAMRHHAFWALFSTFFFTAVGMYAIAAQIVAYLIDAGFPPLQAATAWGFSGVVLVFGMLGVSALDGLIGRRPSVLLSYAISILGIVLLWLLQYYPNVVLLTGFVVCFGSMMGSRGPLITATAMKIFRGKRVGTIFGTISIGSGLGSAFGSWSGGLIHDATHGYDLLLIFALASVVLGMIPFLVVPALRE

SEQ ID NO: 13439 - protein, 417 aa, BradyrhizobiumColbertium
MTAFKSDFLNTLQERGFIHQCSDFEGLDALAAKGEAIAYVGYDCTARSLHIGNYLTMMMLHWLQQSGNKPITLMGGGTTMVGDPSGKDETRAMRTIAEIEANKASIRGVFAKVLRYGEGKSDAIMLDNAEWLTKLNWIEMLRDVGRHFSVNRMLTMDSVRLRLEREQEMSFIEFNYMVCQAYDFVELARRTGCRLQMGGSDQWGNIIMGVDLGRRMGTHQLFALTTPLLTTASGAKMGKTAQGAVWLNADQFSPYDFWQYWRNTEDADVGKFLKLFTTLPMAEIRKLEALGGSEINEAKKVLATEATALLHGREAANEAAETARRTFEEGALAESLPTVEIPRGELDAGLGVLNAFVKAGLVASNGEARRQIKGGGLRVNDAPVADEKMALSADNLTPEGVIKLSFGKKNHVLIKPA

SEQ ID NO: 13440 - protein, 366 aa, BradyrhizobiumColbertium
MLTALGLMSGTSLDGVDVALIETDGKQVKAFGPSGYRPYSPAERNVLRQALSEAVHLQQRDARPGILAQAEQAVTGAHAEAVAAFLAQNRMRPEDIDIVGFHGQTVLHRPEKRLTVQIGDAPLLARAIHIPVMHDFRAADVEAGGQGAPLVPVYHRALAHSLGSEGPIVVVNVGGVSNITYIDGNDALIACDTGPGNALLDDFMYRTMNQAFDAEGKFAALGKVDEAWIARALELPFFAAAPPKSLDRNDFAALKLGAIEPADGAATLTAFTAAAIARVIPLLPRRPRSWIVCGGGARNLTMLRMLREQVGSARVEAAETLGWASDAIEAQAFGFLAVRGMKGLPLSYPTTTGVPMPVTGGVIARP

SEQ ID NO: 13441 - protein, 225 aa, BradyrhizobiumColbertium
MTVSLKLISHKLCPYVQRAVIALKEKGVPFERIDIDLADKPDWFLKLSPLGKVPVLVVTTGEGEVALFESNVICEYLEETQAGAKLHPADALKRAEHRAWMEFGSAILGDLWGLETTSDPATFEGKRQALVAKFRRVEAALGAGPYFAGRAFSLVDAVFAPVFRYFDLFDELTEHGIFQDAPKVRAWRTTLAQRPSVRSAVDADYPQLLRAFLVRHDAHLLKLAA

SEQ ID NO: 13442 - protein, 215 aa, BradyrhizobiumColbertium
MPEVIFTGPAGRLEGRYHPAKQKNAPIAMILHPHPQFHGTMNHQIVYQCYYAFAHRGFSVLRFNFRGVGRSQGSFDHGTGELSDAAAALDWAQTINPEARACWVAGFSFGAWIGMQLLMRRPEVEGFISIAPPANLYDFSFLAPCPSSGLIVHGEKDAVVPPKDVNTLVEKLKTQKGIVIDQQIIPGANHFFDAKLEPLMETITAYLDMRLANVR

SEQ ID NO: 13443 - protein, 379 aa, BradyrhizobiumColbertium
MLARVYLDWNATTPLRSEARAAILAAYDLIGNPSSVHAEGREARRLVEEARSALAGAVGAQPRNVVFTSAGTESNALALSPGLRGRSGGPVERLLVSAVEHASVLAGGRFPGDKIGLIPVTRSGVVDLDRLKIQLQDGPPALVSIMAANNETGALQPVAEAVSIVHAAGGLLHVDAIQALGKIPFDINTVGADLATFSAHKIGGPKGVGALVMAEGIGGLEPVLRGGGQELNRRAGTENVAGIAGFGAAVKAALQALAKDVERMASLRDLLENGLRGIAGATVFADDVARLPNTVLFTAPGLKAETAVIGFDLEGIAVSSGSACSSGRVQPSHVLSAMGYDPAVAQGAVRLSLGWSTQPEDINRALEAWRKLGNTLLKG

SEQ ID NO: 13444 - protein, 43 aa, BradyrhizobiumColbertium
MYGWHSILRSRFQGPRWIKLGRVLRYFTAESTGLEPFKPCFVA

SEQ ID NO: 13445 - protein, 498 aa, BradyrhizobiumColbertium
MPAVQETVERVKRIDVDHYRYGFETLIESDKAPKGLSEETVKFISEKKNEPAWMLQWRLEAYRRWLTMQEPTWARVDYPKIDFQDLYYYAAPKPKKTVSSLDEIDPEILKTYEKLGIPLREVAMLEGVEPKPGEEDPARRKIAVDAVFDSVSVATTFKAELKKAGVIFMPISEAIREHPELVQKYLGSVVPTSDNFYATLNSAVFSDGSFVYVPPGVRCPMELSTYFRINERNTGQFERTLIIADKGSYVSYLEGCTAPQRDENQLHAAVVELVALDDAEIKYSTVQNWYPGNSEGKGGIYNFVTKRGDCRGANSKISWTQVETGSAITWKYPSCILRGDNSRGEFYSIAISNGFQQVDSGTKMIHLGKNTSSRIISKGIAAGRSQNTYRGLVTAHRKATGARNFTACDSLLIGDKCGAHTVPYIEAKNSSATFEHEATTSKISEDVLFYCIQRGLSQEEAVGLVVNGFVKDVLQQLPMEFAVEAQKLISISLEGSVG

SEQ ID NO: 13446 - protein, 249 aa, BradyrhizobiumColbertium
MALLEVKDLKVRVEEREILHGLTLTVNEGEVHAIMGPNGSGKSTLSHVIAGKPGYEVTDGQILFKGEDLLEMEPDERAAKGVFLAFQYPVEIPGVATMNFLRTALNAQRKARGESEYSTPDFLKKVREVSKSLNIPQDMLKRGVNVGFSGGEKKRNEVLQMALFEPSLCILDEMDSGLDIDALRIAADGVNALRSPKRSMVVITHYQRLLNYIVPDVVHVMSRGRVVKSGGKELALELEASGYAQFEAA

SEQ ID NO: 13447 - protein, 434 aa, BradyrhizobiumColbertium
MNVAVAKTGGGRAVSDLFASAEGRLPGSPEVIAARREAFESYERLGLPHRRIEEWKYTDLRALVGEVLPLAAIPDAGALKRAAEAVKAHAIEGARKVVLVDGVFAADLSDVRALAPEAGFKTLRETLEKDAGLLKTASTDAVIALNAAMATDGVVLSIADGAQLSAPIQIIHIATAASASAFTRSRVAIGKGARATIVETFVAAEAKAYQVNDAVIVSVGDNADVAHIRLMDDAPDAVNITSQFITVGANTKLNLFSMTSGAAVSRLQGFITLAGEGSELSVNGVNLLKKTEHGDTTLVVDHAVPNCVSRETFRAVIDDRAHSVFQGRIIVRPDAQKTDGKMMTRALLLSDEAEADNKPELEIFADDVSCGHGATAGALDDSLLFYLKARGLPEKQAQALLIQAFVGEAIEQIADDGLREHVIGMAERWLERRS

SEQ ID NO: 13448 - protein, 415 aa, BradyrhizobiumColbertium
MSTHPAVKNGAYDVARVRQDFPALAMQVYGKNLVYLDNAASAQKPQSVLDRMTQAYTSEYANVHRGLHFLANAATEAYEGGRTKVAEFINAPRTEEVIFTRNATEAINLVASSWGGPNIKEGGEIVISIMEHHSNIVPWHFLRERQGAVIKWAPVDDEGNFLIDEFEKLLTAKTKLVAITQMSNALGTIVPVKDVVRIAHARGIPVLVDGSQGAVHLPVDVQDLGCDFYVFTGHKVYGPTGIGVLWAKYDHLVAMRPFNGGGEMIREVSRDVITYGDPPHKFEAGTPPIVEAVGLGAAIDYVNSIGKERIAAHEHDLTTYAQERLREINSLRLIGTARGKGPVISFELKGAHAHDVATVIDRQGIAVRAGTHCVMPLLERFNVTATCRASFGMYNTREEVDHLAQALLKARDLFA

SEQ ID NO: 13449 - protein, 112 aa, BradyrhizobiumColbertium
METQSALPPEETERLTNEIIAGLKTVFDPEIPADIYELGLIYKVEIKDDRSVNVLMTLTTPNCPAAGELPTMVENAVASVPGVGVVDVKVVWEPPWSPERMSDEARLVLNMW

SEQ ID NO: 13450 - protein, 133 aa, BradyrhizobiumColbertium
MTQVTPASSTPKPRRPRPQVMRLTDAAAQRITELTQRADSEIVGLRVGVKNGGCAGQSYTVEYAHEIRPTDEVVEDKGVKILVDPKAVLFLLGTEMDYKADKMQAQFVFNNPNQISACGCGESVELRPAKIDG

SEQ ID NO: 13451 - protein, 158 aa, BradyrhizobiumColbertium
MDREFLTDLFADFGPVTIRKMFSGYGISADGVNFALALRAGLFFRADEMTIPDFEAEGSKPFQYQTRARTVMVNSYWELPARLFDDSTELAQWARAALAAARRAKVKKQPKAKKAAAKKSAAKKRPTKNAAKTTAGPVDKATRAPRLAERKRKRRSRV

SEQ ID NO: 13452 - protein, 355 aa, BradyrhizobiumColbertium
MIKVLDEHERTMAFAEVALGQIRSLRQTAIPRNYEIWYVYATGYNAPLNKIINETLARSGKLTEADLEQIYETYLSHIKTTDRIDKVGARVIGEIDDVMKVLGDALGMTGAYDANLSGATEELSSAKSREQVKAIVEALLRSTSEMREANKALEDRLTLSKNEISNLQQSLEAIRAESLTDPLTGLGNRKYFDRMIGMAVQGALASGEPLSLLLFDIDHFKSFNDSYGHLTGDQVLRLVGLSLKQTIKGQDITARYGGEEFAVVLPNTTLRQALTVADHIRRAVMAKELKKKSTGEILGRVTISVGVSLLKEGDDTDALIERADACLYAAKRNGRNRVICESDPEYAAETHTRVA

SEQ ID NO: 13453 - protein, 506 aa, BradyrhizobiumColbertium
MSFSDLGLSEKVLAAVAATGYTTPTPIQEQAIPHVLARKDVLGIAQTGTGKTAAFVLPMLTILEKGRARARMPRTLILEPTRELAAQVKENFDRYGAGQKLNVALLIGGVSFGDQDAKLMRGVDVLIATPGRLLDHTERGGLLLTGVELLVIDEADRMLDMGFIPDIERICKLVPFTRQTLFFTATMPPEIRRITETFLHNPQKVEVSKPATTAVTVTQAQVPAGREAHEKRELLRRLLRDAKDLKNAIIFCNRKREVAIVHKSLQKHGFSVGALHGDMDQSARTAALEQFRRGELPLLVASDVAARGLDIPEVSHVFNFDVPHHADDYVHRIGRTGRAGRTGTAISIVTPLDQKSMAAIEKLIGQSIPRVEGDYEAPAEPSEASERPREQRGRERSRGGRGKPQRGRDRERSHEPREARGEARISSEPRHSSESRSSSESRQLAEPRHRSDDKRRADTRQQASTAHVPSIGRPEPRRQREVDTEPGDHSHLPAFLLRPVRSPAGA

SEQ ID NO: 13454 - protein, 323 aa, BradyrhizobiumColbertium
MFRWCTDEVEPRDRFDYWREVRAKGLFGVTAELARERRADFVGEFSLRQLGGASLVELKASPYSVERSTSDIAAAPGDAICVYQQLGSGGWFGGIRASAFSIANGSFATSHTNLPYRTAPLGAGGFHLRILKIPLSNIPAQDSRMRELAPRTFFDPALAPLLAACFADLGEIAGAATDAGSAVQTPLVQALGHLALMERGVVRPGSRRGQAALRTARLSQARRLIAHHLQDPNLAPAMVADLLGVSVRHLHMLFKTAEKSFSQTVTEERLEQSRRLMQEKPERLIADIAASCGFESLATYYRVFNAAYGMAPGDFRAGTTDRR

SEQ ID NO: 13455 - protein, 523 aa, BradyrhizobiumColbertium
MNCRSNGSAAGPSCNRNFAMTRRLFGILAAIGLAAGLSGLAGPAYAEKRVALVVGNNDYRNVPKLLKAVNDARTMGDTLKQLGFSVMVAENQSRQQFSETLLAFDKAIEHGDTAFFFYAGHGFEIAGQNYLLPTDVPAATEGQEELVRDASILADRIVERLQNKKARTSILVFDACRNNPFERKGTRAVAGGGGLAPMTQLPEGVFSVFSAGPRQTALDRLSNDDANPNSVFTRTFAKELLKPGENLVQVAQRTRRAVSEMAETVKHRQVPVYFDQMVDDVFLSGMAKDTAARSDDPPPQKLAALPPVSVPQLPKEETLNAPIASFSRHNGGWSVVFSFADPTLGISWRMAGKGDFRETGFIDTLDPRTRKRMPNPSIELPPDAQPGTIEVRYVDQSGDLQGPFPIRFDPEAALIRDQRKILDMTSTSWLSFREFNGLLVYYTHLVSYRCAIREVRIGIDTAVPNQVLKMPPCDMRDPSAISAGMPLYMKLAPSTQTVSVELTYRDGSVSEIKSFRSVNRSNN

SEQ ID NO: 13456 - protein, 71 aa, BradyrhizobiumColbertium
MTKFIIVVLLTTFPVLAQTTPVLTVPPPTDRERVQADRAKAAEDEKVAPITRPWDRDADGKRPWERKSAKP

SEQ ID NO: 13457 - protein, 119 aa, BradyrhizobiumColbertium
MRCRRSAASASISPCGTRSRPQNLLADNLQQGCLSEDELDAVRRRRERPVKMTQRMQVVVQNNIISGALQSGDRPLKVSPILRLVTALPWLRGMPASLLVLVARPEHVHSKAARFGAAI

SEQ ID NO: 13458 - protein, 255 aa, BradyrhizobiumColbertium
MRNKLIAAFACTTALVSTGAASAADLAARYTKAPAYVEPLFTWTGFYVGGHIGGAWTNQQFINNGTGAAFGDLIPGEGYRQRGSGIMGGAQIGYNWQANNYVFGIEGTISGLDNKGTVVNNVFGAADDVFSWRANVLATIVGRAGFAVQNNLFYIKGGYAGVNNRLSVTDTVGVATGSGGQTHWANGWTVGAGWEYGVTRNWIVGLEYNYAAFGSQTYQLGGTSGNYTFDAKPRDIQWAVVRASYKFDAPTISRY

SEQ ID NO: 13459 - protein, 256 aa, BradyrhizobiumColbertium
MTSSRFDLSGKVAIVTGGNGGIGLGMARGLADAGADIAVVGRNETKSAAAVADLRQRGVKAIAVSTDVTDMAAIAAMIDRVVKELGRIDILVNNAGMSIRKPPHELELDEWNKVIDTNLTSAFVCSKLAYPALKASGNGKVINIGSMMSIFGASFATAYAASKGGIVQYTRACANAWAPDNIQVNAILPGWIDTDLTRGARQQVSGLHERVLARTPAGRWGDIDDFAGIAVFLASPASNFVTGTAIPVDGGFSVMA

SEQ ID NO: 13460 - protein, 61 aa, BradyrhizobiumColbertium
MRRFLLVAGLLATAVGLLWIGQGTGTVPWPRSSFMVNQLQWAGYGAAMAGFGLVLIWQSNP

SEQ ID NO: 13461 - protein, 74 aa, BradyrhizobiumColbertium
MHSNRSFGVDTMAPPVPAGGGKGACPSKATRCLAISADGRLAKPGSRDAVLQSSVGRPAQTKKPRRCQGFDVRS

SEQ ID NO: 13462 - protein, 201 aa, BradyrhizobiumColbertium
MQTTVGAVPLTIDQRQGGSGWFGTVGAGYDWQFSGTWVAGVFADGQFGSIRGTVQDPIFGLTGHQKLETSWAAGVRLGWLVAPNVLSYVNGGYSGAHFCRTNFTNLAGTPAGIHLDGYDRHGWFIGGGVENSLNIFGITSPGWFMKTEYRSAFYNATTRDELFDAGNIPTGNSIRTNHWNQTISTSLVYRFNWTGPVVAKY

SEQ ID NO: 13463 - protein, 680 aa, BradyrhizobiumColbertium
MAKQLKPKAKDDFFGGDEPKPRAPKAAPRGSGGEADYTAADIEVLEGLEPVRRRPGMYIGGTDEKALHHLYAEVIDNSMDEALAGHATFIGVELSADGFLTVTDNGRGIPIDPHPKFPKKSALEVIMCTLHSGGKFDSKVYETSGGLHGVGISVVNALSSRLEVEVARGQKLHRMIFERGHPKGKLEDLGKVNNRRGTRVRFKPDTDIFGPKAAFKPQRLFKMTRSKAYLFGGVEIRWNCAPELLKGVEDVPAEATFHFPGGLKDYLAAAIHADTLVHPDIFSGKSGRNGAHGACEWAVAWTADADGFLSSYTNTVPTPDGGTHESGLRSALLRGLKDHAERVGQGKRAASVTSEDVMVGAAVMLSVFVREPEFQGQTKDRLATAEAQRIVEQAMKDPFDHWLSGNPNMANRLLDFVIDRAEERLRRRQEKETARKTAGKKLRLPGKLADCTDAGTEGSELFIVEGDSAGGSAKQARDRKTQAVLPLRGKILNVASAGKDKLTANAQLSDLVQAIGCGTLAQYREEDLRYQRIIIMTDADVDGAHIASLLITFFYRQMPRLIDEGHLFLAVPPLYKLTHGTKSVYARDDKHKDELIKTAFNANAKVEVNRFKGLGEMMPAQLKETTMDPAKRTLLKVVLLADDRDTTADSVERLMGTKAEARFAFISDKAEFASEELLDV

SEQ ID NO: 13464 - protein, 176 aa, BradyrhizobiumColbertium
MEQYAHALAEFVRVHQAWAAPVVFLLAFGESLAFVSLLVPAWGALVAIGALIGVSGISFFPVWIAGGLGAALGDWVSYWFGYRYKERVAQMWPLSLYPDLLPRGEAFVRNWGIPSIFIGRFFGPLRASVPLAAGIFEMPYWTFQAANFVSALIWSAVLLLFGDVLAKIMEWIWRVI

SEQ ID NO: 13465 - protein, 221 aa, BradyrhizobiumColbertium
MYTPPFFKQDRAVSLKFAEQRGFGTMCAFDGHKPVASPLPFYLTYAADGTPQAAFHLARHNPLVKLAGGDASWLLAVNGPDAYVSPDWYVSPDQVPTWLYQSVHLSGPVRLLSDEELSVQVDTLSDKFESRLLPKKPWTSGKMTAGRLEAMKKGIVGLVMMVEEVEGSFKLNQHKSDADYAAIADALGGGDADARQISQLMRQAKPQAFKADTNLLEGSTP

SEQ ID NO: 13466 - protein, 327 aa, BradyrhizobiumColbertium
MSLADTTKAPTTSAAKKPATVFVDGGSGTTGLGISERLKLQSDVEVKTIADDKRKDPAAKKALMEEVDLVILCLPDDAARETVALIDSMGPSGPKVLDASTAYRVAPDWAYGFPELTPDQAGMIKAARKVSNPGCYPTGAIALLRPIVDAGLLPQDYPITVNAVSGYSGGGKSMIASFEDGSAPAFELYGLGFEHKHLPEMQLYANLTRRPIFIPSVGNYRQGMLVSVPLQLDTLPGKPGGADLQTALAKRYAGSKYVKVMPLQNEATKSGRLEPEALNETNMLELYVFASDKYHQAVLVARLDNLGKGASGAAVQNMRLMLGLPEE

SEQ ID NO: 13467 - protein, 132 aa, BradyrhizobiumColbertium
MTRELFWLTLTVILTGVLWIPYIINRCQVRGLSGAMANPSRGDKPQAEWANRLMFAHDNAVENLVIFAPLVLILNAIDYSTKWTVLACAVYFWSRVAHMIVYALGIPVFRTLAFTVGFLAQAVLALAIFGVV

SEQ ID NO: 13468 - protein, 505 aa, BradyrhizobiumColbertium
MAGQDAEPAIAPSPRDKRFADPEWKSNQFFDFVMQFYLLTAKWAQELVRDAEGLDPHTRRKAEFYVQQVTNALSPSNFVLTNPEVLRETVASSGENLARGLTMLAEDIAAGKGMLKIRQSNPDNLVVGVNMATTPGKVIYQNEIMQLIQYAPTTEKVLRTPLLIVPPWINKFYILDLKPEKSYIKWCVDQGITVFVISWVNPDKRLGKKSWEDYMKEGPLTAMDVIEKVTGEMKVHTAGYCVGGTMLATTLAWLAEKRRQRVSSATFFAAQVDFTHAGDLLVFVDEEQISALEQDMKTAGVLEGSKMAMAFNMLRSNDLIWSYVVSNYLKGQQPSAFDLLHWNSDATRMTAANHSYYLRNCYLENRLSTGTMVLDNTLLDLSKVKVPVYNLATREDHIAPAESVLYGSQFFGGPVKYVLSGSGHIAGVVNPPASNKYQYWTNDNIKDVNIAQWMKGATEHKGSWWPDWRQWLGELDPEEVPARAVGSEAFPPIEDAPGSYVRVRA

SEQ ID NO: 13469 - protein, 219 aa, BradyrhizobiumColbertium
MAALKLAIGNKNYSSWSMRPWLALRANDIPFVETLIPLYTDDPADKEQILSFSRAGKVPVLVDGDITVWDSLAIIEYIAERYPEVKLWPDDVAARAHARSVCAEMHSGFAALRNECGMNLHRPIRPVALSADAKSNIARIEEIWRECRTRYGATGPFLFGRFGAADAMYAPVVHRFRTYAIEVAPDTKAYMETMMALPAFQEWTREGLAETLRIAKFED

SEQ ID NO: 13470 - protein, 63 aa, BradyrhizobiumColbertium
MKHKFPVGSRVLFTASNVARPAASGSYEGIRLLPTEGDDCQYRIKSSTEAFERVAKESQLALS

SEQ ID NO: 13471 - protein, 333 aa, BradyrhizobiumColbertium
MNWAWATSLEQIWISPAFPMWMTLAAAGFFGLILLITLMRADRSVANGALTVITLLSIAIAGAATVRVQGPEGQPAPAEARAQVAVTASLPALSCLDDLAGDAVAAGCEKALFGAPDAAAAAVSYTAARIDRLTALGDVATAEPGLTLDMKVLRKSLERDRYGLVAHVLITRDGCTPFDCAAFRSLTDQQHVAANMSSHLYDTLIARYAPAWNAPAAASGVPVTAALTGLPPSLPTGKPTNAEFPSASSTPPVSIMNPEPTATTRQAAPAASAAPAPRAPAPTSAHAAAPAAPAPAAAAKKPPAPKAARAPAPPVPLAPPPPTTAAPAAADNE

SEQ ID NO: 13472 - protein, 146 aa, BradyrhizobiumColbertium
MPLHLIKLAVGCDSVKELKEWVAERMQTAKKKGLPQHHIHITRMVPKRDAEILAGGSLYWVIKGEIAAREKIIGIEPFRDKDGIGRCRIVMQPKVISVSPRPMRPFQGWRYLTDDSVPADLGKSAAGSIAAMPEPMRRELRELGLL

SEQ ID NO: 13473 - protein, 242 aa, BradyrhizobiumColbertium
MSLVRLAKRRASRVVVSIFVNPTQFAPTEDFGAYPRTWKADIAKLAAEDVDIVWHPGVEAMYPEGFATRIVPEGPALAGLEDRFRPHFFGGVATVVGKLFTQCRPDVAIFGEKDFQQLRVVTQMARDLDLGVKVIGSRTVRERDGLAMSSRNVYLSPEERQTATVLYRAMKESAGRIRAGDSIAPAMAGGAEMIKAAGFALDYYELRHAQTLAPVTSRKDGPLRILVAAKLGSTRLIDNIAV

SEQ ID NO: 13474 - protein, 37 aa, BradyrhizobiumColbertium
MRHSIPRDIALSLGKWMDHRRKTATRFMMKPGALPFA

SEQ ID NO: 13475 - protein, 307 aa, BradyrhizobiumColbertium
MLLQASQGQSGSAHVVVLGNEKGGSGKSTTALHIAVALLKAGQRVATIDLDCRQQSFTRYIDNRAAWARRTKLDLELPVHRCIKLGETMQIAENENSEFQQFMEAVSAVESSFDFIVIDTPGTDSYLMRLAHSMADTLVTPINDSFLDFDVLGTVDPANYAVTGESHYAEMVRDVRRKRRQLDGATTDWIVVRNRLSMLGSRNKQLVAEGLKDLSLRLGFRYVDGFAERVVYREFFPRGLTALDEIDEATLGMRPNLGHLTAREEVTSLLRQLRLPLDERGRRRAANRAEWFSQVDQPLEVHDILGA

SEQ ID NO: 13476 - protein, 286 aa, BradyrhizobiumColbertium
MKRGIAVLVSVSALCGIAYFTASKWAIKHETVTFYDASRDNRPVPVYVAVRRDKEMQANAGMIKLPVAVINHGNTVKNTEYGFLANIFAARGYMVLSPQHDLPTDPPMVTKPGELYVCRLPQILRGVANIHLAMHEMKKVQPNADYDRVTMVGHSMGGDITMYFAKEYPDEVKRVVTLDNLRVPFVTAGKFKILSFRSQDPQFKTDAGVLPTDEECEKAGIQVVKTEFQHNDMRDTGPDVAKSSIQSMLDKFLSATDSDVAPVDTQSSPPKILEPGPVALMAPAKS

SEQ ID NO: 13477 - protein, 225 aa, BradyrhizobiumColbertium
MGTSTSEDIAAFVAKARALSPHAPGAKGRLIFALDATMSRQPTWDMACALQAEMFREAAALGSLDIRLVYYRGFSECRATGWISDSTKLAALMSKIDCRGGDTQIGKVLGEARREAVASGVRAVVFVGDAMEEEIGELCAKAGELGMLKVPVFMFQEGHDPIAEQTFREVARLTGGAWCRFDPGAAAQLRELLRAAAAYAAGGREALLQLAKSASGAAKLIGQMK

SEQ ID NO: 13478 - protein, 241 aa, BradyrhizobiumColbertium
MTLIAGAVAVITLYLLLQMFRSANPAALARVVKFGGGVLALAVAAFTGLRGELAVAIPLGIFGAGLLGWTPLANAGFGNVGGLFGGGATRPSGQASRVRSQFLDMRLDHDSGQLTGQIVAGPHAGRDLGEFDLAGLLELVPTFDGESVALLESYLDRRFPAWRQNAQSDAAGGQRRTAASGKMTAEEAYQILGLQPGASRDDISRAHKSLMKKLHPDQGGSTYLAARVNEAKDTLLRTHNG

SEQ ID NO: 13479 - protein, 618 aa, BradyrhizobiumColbertium
MLRKNLSSSRWARVGVFGLLTVTTAIILTTDAAEARRHRRHYTHHKVQRDVSESSSPKFASIIVDGNSGAVLQATSPDAIRHPASLTKIMTLYLLFERLESGKLKLDTEMPVSQHAADQDPTKLNLRAGQTIRVEDAIKGLVTRSANDAAVVIAEAIAGNENDFAQMMTRKARSLGMSRTVYRNANGLPNDEQVTTARDQATLGRAIQERFPRYYRYFATSTFNWRGQSIRNHNRLLGSVEGVDGIKTGYTRASGFNLVSSMRRGNRHLIGVVLGGRSGGSRDAIMRNLLAENLEKGATVHTVAAVTERNNADVSTIADASDTPRAAPQVQAVAAPASEAAPSRLAARLSTLAAATAAIPPAPSRSEAAKPEVRPTESKVEPAPLTNGVISSQPLSIIPGSSEPMKPVRVKTVQVKAGAVKVASAAPAQVAVQAAPPVTSTIPPRSEVAETSGAVVARADLINRPEPVSRPEAPKAEMVRAELPRQPAGFGTGNGILGVLPAATAAAPAPAAPKLASADPASHPVQMSTNSKPAVTHSGWIVQVGALESETEAQQRIDAARSSARGLLSRADPFTEPIVAKDNRKLYRARFAGLERDQAEAVCRTLKRAEISCITVRN

SEQ ID NO: 13480 - protein, 112 aa, BradyrhizobiumColbertium
MFKVEDFQNYGKEQFEQCVASATSVQHGLQAIASAYGDYTKKSFEDTKSFVEKLSGVKSLDKAMEAQTDFARSAYETFVAESQKIAGLYSDLAKQAFKPVETIVSKFTPAAN

SEQ ID NO: 13481 - protein, 100 aa, BradyrhizobiumColbertium
MISLINVFTVDPANQDRLLVLLTRATDEFVSRAPGFVSSTLHRSLDGTKVTMYAQWRSAEDYESMRQDPGPLPFLEEALTIAKFEPGIYEVVRSFSPIDR

SEQ ID NO: 13482 - protein, 727 aa, BradyrhizobiumColbertium
MSMPGNGQRDKGTLTAGLELIETLRGDAGAIMDFRAIPETDAAKKALTSRPIRLRHRGTLPDLWDKLKRLNNKGFAIYYTLNLSDGKGTKRANFRKVLALPLDLDTAPLPKKWLRGLEPHVIIETSPGKHQCIFIIEPTNDFVAAKQMVQRLAKAYGGDPSVCDVPRVLRMPGFKHQKGKPFVSRIIEARQYEQPHTMAALDEALPRLRRNETAPSDEPPEGFDTIGLEDVELMLKDADPAHIVPGNPEWEEVAMALHTLSNNDHDVKEFFLDWCQEDPNYAGQEHRDANELRWDSFTADKPGGRGAGTLRRRLLDNGISPENLNVIFGRATPDEDFEEDPALKWDFESVEDCPKNATVYRTDSGVRYQLASEVEPEPINWLWPNRVARGKLNFLAGPPDQGKSQITIDLIARVTTGVAWPDKSGEPAPGSVIVLAAEDDAGDTIVPRLKAAGADVSRVMIVQMMVKPLKGRPERMFNLANDLPGLAELIRTCNDVALVVIDPINSYMGAGGRNGTDTFKASEVRSVLSPLGHLAERHDVAVLFLSHLTKNSGGNAPLTRMLDSQAFTAIARCGWFVAPEMRDRKETARKFFVKGKSNIGAPVPGLTYEIEETTVTTAAGLVLKVPRIKWTGETEMSAGQVFRQMDNGGEQEKGSALEAAITFLEDELASGPKPSDKLKDRAEERGHSWRTVRRAAFEGIGVRSERSGFGKGSAYVWSLPGPEIDFG

SEQ ID NO: 13483 - protein, 163 aa, BradyrhizobiumColbertium
MKSFTQPFNPEYDTMYLDDYCESGSRHEGPVSAMRARVPESRVKYLCFRAWSPDETPENVPAEWKPWFDDQMAYQREAHDESLEVICRRYGSKTGKPADIPEANHAAAATYWRRWQARHEMRAAFELELYRIGYDELKAEEAAQKLADEREAAHDIANTFGFG

SEQ ID NO: 13484 - protein, 109 aa, BradyrhizobiumColbertium
MAPLKRAYLAALAARGREPADKAIQKYTNGARGQHSWRQVKEADVAKAIADLEQLTFKGDDGQAKTESRLQRMANAAYGRGERPKPACELDPVAIFERWNNPAPADRTK

SEQ ID NO: 13485 - protein, 315 aa, BradyrhizobiumColbertium
MPTEQITHFSSNPGSAVKAPIDNLPPTAQQIAKHEDDLVELEYAQYERKQQRAAEIRLEIARAQNEKRNNERAQIPSEEIDRAADETVAAKKLELSALDEDFEAKRRLQPGNQSQACKDFAQANVLRPLKSYNFKCELGDNLVAEHEACRAARAAKLDEAEAVRRAHVPASVIASAIDRVLPGASASIEHALRKLHTPNEFSSGRFSAPSLELPMLTIPNGAGGLSRLNDTATLIFAVFGTEIRERLKAMALAGHDAENAIPIADRPAMLKKIEAEILEIERKAEFIYRTGRARGINTGPRLAASPLAILDIEFA

SEQ ID NO: 13486 - protein, 52 aa, BradyrhizobiumColbertium
MGCVTCFVGANPIDDFLAVVAFAGIKSAGKAFLGSAAKAVDVLDARKTNISV

SEQ ID NO: 13487 - protein, 262 aa, BradyrhizobiumColbertium
MLSTIADYTRLTKDMGKSLTQVAKQPDVSRETDYFLSHIGNVKSIDDFLKDYRLYSYAMKAYGLSDMTYAKAFMRKVLTEGVTSKDAFANKLTDTRYRQFATAFNFAALGDKATQTAAATTGTATQYVTQTMEEKAGDQNEGLRLALYFTRKASTITTAYQILADKALTQVVQTALGLPATISSADIDAQAKMIASKIELTDFQDPAKITKFVQRFAAMWDATQARNDSSTNPALVLIAGAATSISMDTNVLTTLQNIKFNR

SEQ ID NO: 13488 - protein, 236 aa, BradyrhizobiumColbertium
MGLSAQVALEKRLQTIANNVANVNTAAFRTDVVKFETVLSKAGPTAVAFSSPGDNVISREMGNITESGNPLDVAVVGQGWIAFAGPNGTVYTRDGRLQIAPNGDLQTVSGFPVVDSGGAQITLDPNGGPISIARSGAITQDNNEIGTIGLFNIPADANLERYGNSGVTPDRPATAIADFSRDGFKQGYVEGSGANPMLELTRLIAASRAFDGTNSMIEGTESSLQNAIRALGEPGK

SEQ ID NO: 13489 - protein, 441 aa, BradyrhizobiumColbertium
MNALRQLEWALLELQQSTPLASVSGAISEIAPTHFRVSGLSRFVKLGELIGVNSAGKRQIGEVVRIDNDGIVAKPFDRQFGGGLGSVAYRMPPLSFAPDPSWKGRVINAVGAPLDGLGPLTQGSQAVSAEAEAPSAMKRARVHKPLRTGVRVIDLFAPICAGQRVGIFAGSGVGKSTLLAMLARSQGFDTVVLALVGERGREVREFIEDVLGPDRHRAVTIVSTGDESPMMRRLAPKTAMAVAEYFRDRGESVLLMVDSITRFAHAAREVALAAGEPAVARGYAPTVFTDLPRLLERAGPGEEGAGTITGIFSVLVDGDDHNEPIADTIRSTLDGHIVLSRHIADQARYPAVDVLASVSRLAHNVWDPEERELVSKLRAMIAKYEDTRDLRLMGGYQSGRDSGLDQAVDMVPRIYDAMRQGASAPPSADPFRELRDTLKGE

SEQ ID NO: 13490 - protein, 211 aa, BradyrhizobiumColbertium
MPLAREAVELLVQAARAWYFEGNQHGLRDREWMALRFLGRANRFSRTPSALAGFIGATRATASQIVKTLESKSFLVRKPSHEDKRSVVLHVTSQGEKCLSQHDPINHVVNAVAALGTDECIRLRDSLREILNHLDAAHQRLDASICRDCMFLAERSPSTGKGRTTAEFMCRLYRAPISLEETELLCTSFERTRDRPKIEQHLDRARVAGQG

SEQ ID NO: 13491 - protein, 354 aa, BradyrhizobiumColbertium
MARNILILGASYGSLLGTKLLMAGHNVTLVCRAKTAELINRDGTEVRIKLRDEAVHRAILSRDLPGKLDAVTPANVDLSRYDLVALAMQEPQYTNHTVRVLMVKIAAAKLPCLSIMNMPPLPYLKRIPALAGMDLEEAYTNAQVWERFEPGLVTLCSPDPQAFRPPEEAANVLHVGLPTNFKASIFADEKHNKLLRELEADIDAVTLDGHDVPVKLKVFDSLFVPLAKWSMLLTGNYRCITPNEPQSIRDAVHGDLKRSQTIYDHVDAIARRLGADPQDQVPFAKYAKAAESLLKPSSAARAVASGAPFIERVDLLVKLISHQLGMPNAEIDRTVETVDQKLNEKIVQGGSGAQ

SEQ ID NO: 13492 - protein, 40 aa, BradyrhizobiumColbertium
MLWRDRGARCLRRPDLVTPNRAVRLVAVTGLIWLQSFLIA

SEQ ID NO: 13493 - protein, 504 aa, BradyrhizobiumColbertium
MTVAIEMGQTTAGAAAAMDLEELLATRLLVQGNSGSGKSHLLRRLLEQSAPWVQQAIIDPEGDFVTLAERFGHLVIEAEDHTERGLQVAGERARLHRVSTVLNLEGLDAENQMRRAAAFLGGLFDVDRDHWYPMLVVVDEAQLFAPAVAGEVSDEARKLSLGAMTNLMCRGRKRGLAGIIATQRLAKLAKNVAAEASNFLMGRTFLDIDMARAADLLGMERRQAEAFRDLERGQFMALGPALSRRPLRLNIGPTETSPRNSTPRLMPLPEATLEDARAVILAAPPPDASRPQRRPAPDLLEQLRAARTAATAEIRPEVVEVPVSAEEFAQRRERVDRTLRAVLAEPDAGFRAIGVLYQEFVVRCRIEGLGAAVPDLNEFRRMLTHARAGLGTELAEDDAWQDVSLRASILPDDMQGVFMMIARAAKEGWPCPGDAAIARAYGSHSLRRAQRLLGYMEEQGLIVVQLDGGGRRIVTLVELAWATAPGDPNGDDLPVEEVQSAASL

SEQ ID NO: 13494 - protein, 85 aa, BradyrhizobiumColbertium
MAIDVDRMKHFIRKLASTIRILTCLGMARTFGHYQHSGWDGDINYARYSWRGREWIIPTGPAETRTEILDRMGPPSACLRKGGLL

SEQ ID NO: 13495 - protein, 77 aa, BradyrhizobiumColbertium
MIVIIPCPACHGEGRDIRYGVVYEPGCGHPHMGEVDHGMCTACEGRGDVEEEHPPRTLMDLEQEDFDIMEAACGHRR

SEQ ID NO: 13496 - protein, 105 aa, BradyrhizobiumColbertium
MSARRKPKPLPEPTAAQLDEAMLAFEKLRMRYRLEHYEDAPPHERFVVRVVPEMLAPKAIRTGAIVGAREATYTVHRFPDEASARRWREREIIRETIAAGMRAQP

SEQ ID NO: 13497 - protein, 69 aa, BradyrhizobiumColbertium
MNRRPLTPAMVGEAAARALAQGLDFNRHTTHYVAQYLVVYDKECQGADYTGAVSAVRLWQHEQRAGAES

SEQ ID NO: 13498 - protein, 82 aa, BradyrhizobiumColbertium
MSDPTAAELDAHAEAGNQLAGIVWPLLEQQKAGTVMNCVGNLVVLTFASINFDQPQHALEEFDNWTKYTREIIAATIRERLS

SEQ ID NO: 13499 - protein, 63 aa, BradyrhizobiumColbertium
MWILASLPFWLIGLGCLFLSLIAFGQLITKRLHKNTPGELFGIGLFFMIVAGIFLPIAAKVAS

SEQ ID NO: 13500 - protein, 127 aa, BradyrhizobiumColbertium
MHMIDPEDILKQVAAIKERAKPKMGGVDQDACNARLEHDISSHLFAWRAGESNRQTDPEHITEALVSLSTSHLAAHMFERVDPEHYVSFAMGVANDLLRNLVTLADSAPDERKEFSQVLHSKEMGVA

SEQ ID NO: 13501 - protein, 66 aa, BradyrhizobiumColbertium
MAEKTAAYLVWVQGLNGPCPQIWHDDGGRFVGPSDVRSLIRIPLPAGTKLDLEVLAELYPLTQEAA

SEQ ID NO: 13502 - protein, 64 aa, BradyrhizobiumColbertium
MAIFEAANEADRHRARMRKQRLARERDEILQLGRAARAAGLSVADIDAMAVPLSPEDERLMSHG

SEQ ID NO: 13503 - protein, 217 aa, BradyrhizobiumColbertium
MTFAIKPLNQGNRHLRGAFATCGHCGVLKTIRVNTFTGTPNDQTELEQQFVIKKLEEMGWLIGKKAEQHRCPGCYSAIKAKQARKNEENKVVTLPVKPAEPEAPRTMSRDDRRIVFEKLNEVYVDEKIGYGPGWTDAKVATDLGVPRAWVKQLRDEMFGPEGSNEEIRATINEAQTLLNEMKERCEVVRMHAEAFKALMDKAEQIDKRVRQIQQDLR

SEQ ID NO: 13504 - protein, 77 aa, BradyrhizobiumColbertium
MLTTEEEAKTKWCPEVRTGLTAGMAVNHHVNGDVDEETRCIGSGCMMWRWRQMLSADGMSVVDDPERRGFCGKAGRP

SEQ ID NO: 13505 - protein, 100 aa, BradyrhizobiumColbertium
MEEQQEHIVVGTTVRLRDIPGPLLRVIRMQNDQATCFWFSRHGEPCEEQFPVVLLMKCAPYVHRPREEGYGGVRGANTDDAAAERFERETAPVEAASADH

SEQ ID NO: 13506 - protein, 115 aa, BradyrhizobiumColbertium
MSQDSTIDVANFISEARAVIDKHIEEAGRIVHRLNSPPDEISPATNSDKLFAAILAFHTALVDWTIASEIRDDKLKASAMVDVGLRLFLDNVRDQFIAAEAEKRKPKPNIIGLRQ

SEQ ID NO: 13507 - protein, 131 aa, BradyrhizobiumColbertium
MTEQAQAEQATTERMKASFESANIGGQAIMRSALALSTIIDSQLDRPVKVDAIMASLKSLVTDIEVATYERIYKVREKAPNLPLEVIIEKAALLACDLSEEFGRKQANIMQLFIDEMEERIAAKEKAEAVS

SEQ ID NO: 13508 - protein, 87 aa, BradyrhizobiumColbertium
MISNTGTAPAGHGLVSASREEEFAAFNQLPPACRAALNDSTVKWSAMAVLRRFKVKGLDPSNPDHDTSIANELRAIDATRAADRSVQ

SEQ ID NO: 13509 - protein, 205 aa, BradyrhizobiumColbertium
MSWPFGDLQQGKYGAILADPPWHFDVWSLKSSGSRKTAVGGPSRHASKHYNTMDVQQMVRLPVLDLAAKDCVLFCWTTWPHLKAALWLISAWGFTYKTCAFDWMKADPYCLFADETTPDMGMGYWTRQNTEPCLLATRGKPKRIGADVRQGIIAPRREHSRKPDDIHGRIERLVGGPYVELFARRRVEGWDCWGNETTKFNEAAE

SEQ ID NO: 13510 - protein, 100 aa, BradyrhizobiumColbertium
MTDNPQMDLFSPRKEYPEDIPPEVCDLFERLALQVRSRGLERYSADALTHQIRWHFNIERGDREFKANNNWTSVLARWFLAKHPELPKFFETRERRKEAA

SEQ ID NO: 13511 - protein, 116 aa, BradyrhizobiumColbertium
MVRRCTNPNVKHFARYGGRGIRVCERWMIFENFLEDMGIRPDGRSIERDDNDGHYEPGNCSWANSKQQARNRRNTKFVLLHGERMSLTEAAERLEMSPHSLRAKIRRGHPVEGVVA

SEQ ID NO: 13512 - protein, 304 aa, BradyrhizobiumColbertium
MSEAVNGEAVDKIAILARSAAELQVASISVSGVGLPSSFPLAFDKRMNGAGLQSLRVEAEKWRIAPERKKGIAKLATLQSFIDLTNRHKDEHSVIFALADWPTPSLTAIINYNKSGETGEARFGDHRFVYPFPLTDEFKAWAGKDAQKMTQGEFAAFIEERVFELADPTPAEADQFEKILRTNFASPSRMMELSRGLQVNVESVAKSGVTLQSGEGEIQFVEEHRDQRGEKLIVPGLFMISLPAFIGGDPVRIPVRLRYRVSGGAISWFYQMYRWKEYLRERVISDLEIAAASTELNTFEGSPE

SEQ ID NO: 13513 - protein, 111 aa, BradyrhizobiumColbertium
MSSRLIRRFSEIIGLLDRDFEPKLDTAVRELVESLVDLPTEKGKGSITVTLDFEYEKGMFNLLPNVKVKLPEGQKFRRTPFWAHEGALSTQHPSQIDMFVRDSTKSMAQQG

SEQ ID NO: 13514 - protein, 75 aa, BradyrhizobiumColbertium
MPRDKENARRWRREHKRRLRAARRAMPLHRKLGIETIIVRVAILDDPRMGKRFDRQSRAYSHSHLYRESITLARV

SEQ ID NO: 13515 - protein, 162 aa, BradyrhizobiumColbertium
MTKLTADIVRTRLSYCRLTGEFRWRVRGHSIRPGKLAGTRTQHGYIQIKICNEIHLAHRLAWLHVTGEWPNSKIDHRDRDGTNNRFTNLREANTQQNKANSCCSAASTIGFKGVERSLDRYMARIKKDGVRYYLGTFDTPEEANAAYFRAAQELFGEFARAS

SEQ ID NO: 13516 - protein, 102 aa, BradyrhizobiumColbertium
MFRKRNLISAQLLAEARAWADELTAMEIRGPGDLEAAWRRLEARYSVPYSTFWSLRYRDDLKDIWASLHCLLRLAVEAERARRASQMARDNHISSILNGDVA

SEQ ID NO: 13517 - protein, 94 aa, BradyrhizobiumColbertium
MDVAAEITPIATFGEANAIEAEEDCWLVLGDVVEGIKDRCAAPRTDAPGRGNVLAFPGRADPEYVRRRAIEIEQFEDSFRRGRKWSRDNRPPRK

SEQ ID NO: 13518 - protein, 98 aa, BradyrhizobiumColbertium
MREWRKTHRLNDEAKMRDNARSYAGTYKRRGKLDPEPCMCCGSPDAEMHHPDHERPLVVVWMCRACHLSWHAFWRDVVLVAWQFWSARAKRDLRSDAA

SEQ ID NO: 13519 - protein, 85 aa, BradyrhizobiumColbertium
MEPEYNAGEMAIVEPSLPVVPGEVYIFYAERDGEARATIKKLRRPAADRWLVTQHNPPEGASKDFSLSRKEWSIVHRVTGKFARR

SEQ ID NO: 13520 - protein, 96 aa, BradyrhizobiumColbertium
MSNIPSTKPNVLTRSNLIDEETGEVNLWVLKGIARREAMKTWGAITPMSLRAALREAADLIPEMRCAWRQRHGLPIEISMVTSFAPDRDGVRRSAF

SEQ ID NO: 13521 - protein, 57 aa, BradyrhizobiumColbertium
MSETTRQREAVARLTTFCERLIRDGKLPGAVEAELRLHTNAACAAFNMAPVHEREPA

SEQ ID NO: 13522 - protein, 42 aa, BradyrhizobiumColbertium
MDIFVMGFALGAVAGALIVAAWMSDRAPSVQIDPTEHGGSPL

SEQ ID NO: 13523 - protein, 311 aa, BradyrhizobiumColbertium
MTVAELKKVNIVPDEWTWWRNALKGVFETIHADEPRTGYYRSRRKDKQSGQVTFHRVAYWYRPDGSLACQVDGKPVDDLRAREMWPYVSQRPITYEVFDAVSKGAPWPDINEAVAGHNQAPVADTIEAIQERIDDLAREAERMMKAGGATEQAIADQASDLANTFGELQNKIVDLHKKEKAPHLEAGRAVDKKWFGLRDRAEELKKRLKAVVVTPWLTQKAKEAEAAKVAAVTSGKSVDEAPQVRVTSGSSKRSTGLRTYYFAEITDKAALLESLKDHPRLVALLQEIADDAAKKQVALPGCVVKSEKRAA

SEQ ID NO: 13524 - protein, 391 aa, BradyrhizobiumColbertium
MNQMVAVEQPQAQQPRLPTLVAGAPIRPIVPQDFEGAWRIASAVCRAGMAPKGLDAPEKAMVAIMHGLEVGLTPMNALQSIAVVNGRPTVWGDGAIALARGSGLLEWMEEKFEGEEGTDAFKAVCTVKRKGEPKPVHGEFSIGDAKVSGLWTKRGRDGQPTPWQQYPKRMLKMRARAFALRDGFADVLKGLAIKEEVEDYQTVAHVAREEPPAPPAAQVTHQPVTQPQEDPPATPAEELVTTAAPAETVEWSEPEEAVTEPAEEQPPVPPMSAGASPTFTHTDAAADGKPVGTVESDFPGDKPQASAPDGGIPEFLRRKPEQKQEEPVTEPAEPDWLAALENALSGVESTDDLADVQAKYQTPYKGKVSKADYARSQTLVMEAFQRISEAE

SEQ ID NO: 13525 - protein, 153 aa, BradyrhizobiumColbertium
MAQRLANIAPVGSLLKGCRRETKTKPVKPKHGRVRDNAHLDAIRQLPCINPLCRRDPAGVAAHVRFACAETGKPATGMQVKPDDAWTLPLCPACHTDAPDAQHKGNEIAFYRRIGVDALKACTALYDASPNVEHMRAVVFTFHTFAMMESSNG

SEQ ID NO: 13526 - protein, 359 aa, BradyrhizobiumColbertium
MADNSKIEWTDATWNPVTGCSVLTPGCTNCYAMKLAGTRLRKHPSRAGLTKATNAGPVWNGKVRFNEEWLTQPLSWRKQRMVFVCAHGDLFHEDVPDAWLDRVFAVMALAPQHTFQALTKRAKRMREYCNQITAPGRQWAQIAHFGMQAQFPEEAIREAMDRLGKPLPNVWFGVSTERQQEADQRIPDLLATPAAVRFISAEPLLGPINLTQIMRRAADDDWTYCDNALTGFRAHKCGGWQDTKLDWVIAGGESGDGARPMHPDWVRSLRDQCAKTGVPFFFKQWGAWSQFYDRDRDDPDWRNVPQVDNQMGRGATRWHNLAGGIGFHGERLVAMRNVGKGAAGRLLDGLEHNGMPERA

SEQ ID NO: 13527 - protein, 156 aa, BradyrhizobiumColbertium
MATELLIRVEGTRLVGATAGDLELIDGLPQSKEFLARLTSANKRSVLQNRFYWRLLGLVIENQDHYRKAEQLHFWLKIKLGYVEQVEFHDNRMVTRVASTSFERMDSEDFKRYLDAAITVICEEIIPGMESARLVHEVEEHLGLSYNALWQGAKAA

SEQ ID NO: 13528 - protein, 89 aa, BradyrhizobiumColbertium
MTFVVQFIDSGREPTVAPNPAYPNGMDVDLRPEDKRTVLHAKCCYGVPYPAPRCGAYVVTCESCGLRVALTVAGRPDDPRTVTLPCKGN

SEQ ID NO: 13529 - protein, 128 aa, BradyrhizobiumColbertium
MSRGPLTFKQRDVTRALKGAVAADESVFIYFMRAGEFVKIGRSKQWKLRMREMQTGSPYTIVPLLVIVADAKTERELHRRFKADHFRGEWFHNSPKLNAFIKDNLFRCVAKSADDDLRGPVYNEWDYV

SEQ ID NO: 13530 - protein, 432 aa, BradyrhizobiumColbertium
MSTMGQDKIRYFLYLEGRWRWRPTKTMKAHGFSIVAMGKGGPGLDENGHPAASVEDKRRALELNAEWDAVRLGFEAPRKIDRPTFPEGSVGDAYVRVMALRAAERAQKGIVWTSEQKSRDDWPRAWKWLGPEFGDCDPKTIQPEHFLRIDKRTGQPAGLMVKIENTVSVTERHRTIKVWRALWRRMQALKYVGKDAEDPSKAVTNSAPDPRDAAWQRREVMILVQRAWRMGYYGLAACIAVGWDSMCSPVDVRSLTPAQARSDANGVWFELGRAKTGRAAAATLSPWSLALLTAYVKKLGVDIAPNAPIFRNRSGAPYSKDTLGDDFRDVREAIDKTDRRQLADMRRSGAIEGDAGGGSVTDQANKMANSVDTNKRLRKTYNPVNVAAVRRFDEARLIGARALEQKPDESVREPVLLTLFRNAAKKSDTAND

SEQ ID NO: 13531 - protein, 67 aa, BradyrhizobiumColbertium
MNHSIHSADRATHLKIVVVALVAGTLVAGFGIAARTHADYSQTAQSTQVIKAGKPVVVTSAATSEIR

SEQ ID NO: 13532 - protein, 43 aa, BradyrhizobiumColbertium
MRIRLRLGRRVTLFARTVRKMRLISDQRLKQRVSVARHPPSRR

SEQ ID NO: 13533 - protein, 76 aa, BradyrhizobiumColbertium
MTVTDGRFCAPLCADDCASDASGIKTQADAVASTADRSIPRLFNAPPQSCIYRHAVCPETACACDDAYVSAREFPN

SEQ ID NO: 13534 - protein, 460 aa, BradyrhizobiumColbertium
MLASASRTDTRGINFLPYQGTVTNAPFGKIPTSFFVGDPAVDKFTREQEMLGYQFERNLTDDLTFRQNARFAHIDLTYRGYIGNGWDNVNTATMGRYNWYAKNTANQANLDNQLEYRFNTGPVRHTMLFGVDLKGYQIDDYQSFNFGTVPSINVFNPVYGINVPLTGAPFRNFLITQKQAGTYLQDQMKLGNFTLVLSGRNDWVETTQEARDTGAALANNNDSRFSGRAGLIYNFDNGIAPYVSYATSYNPIIGLNAQNQLFRPETGQQAEIGVKVAPRGFDGYFTASVFDLKRQNVPTTDPVITTLQNQTGEVTSRGVELEAVANATRELKFIGAFTAYHLFTSKDLNPALVGVLPTNTPQLLVSGWADYTFKDGPLAGFGFGGGVRYVGSSWADTANTLEVPAVVLGDLALHYEWQNWRTALNVINLTDKVYVASCASASSCFYGDRRRVTASVSYKW

SEQ ID NO: 13535 - protein, 121 aa, BradyrhizobiumColbertium
MSGILQNYLPLVVFIGVAGLIGLVLLIAPFIVAFQQPDPEKLSAYECGFNAFDDARMKFDVRFYLVAILFIIFDLEVAFLFPWAVAFGKLGATGFWSMVVFLAVLTVGFAYEWKKGALEWD

SEQ ID NO: 13536 - protein, 195 aa, BradyrhizobiumColbertium
MGLNPVASTGPVVAPAPKGILDPSTGKPVGANDPFFLEVNSELSDKGFFVAATDDLITWARTGSLMWMTFGLACCAVEMMQVSMPRYDVERFGFAPRASPRQSDVMIVAGTLTNKMAPALRKVYDQMPEPRYVISMGSCANGGGYYHYSYSVVRGCDRIVPIDIYVPGCPPTAEALLYGVLLLQKKIRRTGTIER

SEQ ID NO: 13537 - protein, 203 aa, BradyrhizobiumColbertium
MDDAKLDALGQTIVSALPGAATGHSVAFNQLTVDIETSKIVEVVKYLRDDPNCRFVNITDITAVDYPDREKRFDVIYHFLSPTLNARIRLKAQADETTQVPSLIDVFPGADWFEREAYDLYGVFFVGHPDMRRILTDYGFEGHPLRKDFPLTGFVEVRYDDQEKRVVYEPVRLNQEFRKFDFLSPWEGADYPLPGDEKAGPKS

SEQ ID NO: 13538 - protein, 398 aa, BradyrhizobiumColbertium
MNEQPQNLRNFTINFGPQHPAAHGVLRLVLELDGEVVERVDPHIGLLHRGTEKLIEQKTYLQAIPYFDRLDYVAPMNQEHAFCLAAERLLGIEVPRRGQLIRMLYCEIGRILSHLLNVTTQAMDVGALTPPLWGFEEREKLMVFYERASGSRMHAAFFRVGGVHQDLPQKLVDDIEAWCDPFLKVVDDLDRLLTANRIFKQRNVDIGVVSLKEAWEWGFSGVMVRGSGAAWDLRKSQPYECYAEMDFDIPIGKNGDCYDRYLIRMEEMRQSVRIMKQCIQKLNEPDGKGPVVVADNKVAPPRRGEMKRSMEALIHHFKLYTEGVHVPAGEVYAAVEAPKGEFGVYLVADGTNKPYKCKIRAPGFAHLQAMHHICRGHLLADVSAILGSLDIVFGEVDR

SEQ ID NO: 13539 - protein, 186 aa, BradyrhizobiumColbertium
MALVTGSKISSHFSHMGYIACANLLRRTLPERNIAIRLNPDAVFEFPYGDGYWSKLLNRSYHYEDELELLFADSVDVDYTLLDCGANYGYWSVLVSSKPFGAHKAIAIEPSGQNYPKLANNARVNNDRFETMKCAIGSARGTARLSGTKHEASASLAIRPLAARRCRSSRSTTSSMTGRLRPVAST

SEQ ID NO: 13540 - protein, 81 aa, BradyrhizobiumColbertium
MCEEHGSDRSHAVSRYILEQTPLKLIVFDPRSRRMETVTELSILDRIKVSTHVGYNVFGTASAFWQDRIDALNAKTARRMQ

SEQ ID NO: 13541 - protein, 203 aa, BradyrhizobiumColbertium
MSVRRLAPKEVQPASFAFTEENLAFAKQQIAKYPAGRQASAVIAILWRAQEQNEGWVSEAAIRVIADMLDMPYIRVLEVATFYTMFQLAPVGKKAHVQVCGTTPCRLRGAEDLIHVCENRIHHEPFHLSKDGNFSWEEVECLGACVNAPMVLIGKDTYEDLTKESFGKVLDGFASGNPPKPGPQNGRQFSAPITGPTTLKETT

SEQ ID NO: 13542 - protein, 54 aa, BradyrhizobiumColbertium
MKKWGFVAMHAVVAATFMFLLQRFFMNASQETSLLWALFFAVCAAGLAYKQSIR

SEQ ID NO: 13543 - protein, 441 aa, BradyrhizobiumColbertium
MLEDKDRIFKNLYGLHDWGLEGARRRGAWDGTKNIIDKGRDWIINEMKASGLRGRGGAGFPTGLKWSFMPKESTDGRPSYLVVNADESEPGTCKDREILRHDPHLLVEGCLIASFAMNAHACYIYVLGEFIRERERLQAAIDQAYEAKLIGKDNVNGWPFDLYVAHGAGAYICGEETALLESLEGKKGQPRLKPPFPANVGLFGCPTTVNNVESIAVAPDILRRGAAWFAGIGRPNNVGTKLFCISGHVERPCNVEEAMGIPFRELVEKHCGGIRGGWDNLKAVIPGGSSVRMVPAEQIIDTPMDFDSLSKLRSGLGTAAVIVMDKSTDLIRAIARISYFYKHESCGQCTPCREGTGWMWRVLTRMAEGRAHKREIDMLLEVTKQIEGHTICALGDAAAWPIQGLITHFRHEIEARIDQYSHRADVDDIGVRDPVNMVAAE

SEQ ID NO: 13544 - protein, 691 aa, BradyrhizobiumColbertium
MTKLIIDGKEIDVPAEYTLLQACEAAGAEIPRFCYHERLSIAGNCRMCLVEVKGGPKPVASCAWGVRDCRPGPKGEPPEISTRSPMVKKAREGVMEFLLINHPLDCPICDQGGECDLQDQAMGYGVDTSRFAENKRAVEDKYLGALVKTSMNRCIQCTRCVRFSAEVAGAPEMGAIGRGEDMEITTYLEHALSSELQGNLVDICPVGALTSKPYAFAARPWELGKTQSIDVMDGLGSAIRVDTRGREVMRILPRINEAVNEEWISDKTRHVVDGLRTQRLDRPYIREAGKLRAATWPEAFAAIAAKAARTDGKRIGAIAGDLAGVEEMFALKDLLAKYGSGNLAVQGGDAFDPALGRGSYIFNPTLAGVEQADALLIIGANPRKEAAVFNARIRKRWRTGGFKVGVIGARPNLTYDYDHLGAGTDTLGELAAGKHSFMDVLKNAKNPIIMVGAGAAARHDGAAILAAAAKLALDVGAVKDGWNGFGVLHETASRVGALDIGFAATGGGLNAAQMTTFGTLDLLFLLGADEIKAPDGTFVVYIGTHGDRGAHRADVILPAAAYTEKSAIYVNTEGRVQMTGRAAFPPGEAREDWAIIRALSEALGRKLGYDSLAQLRQALFKAVPHLIRLDQIEAGSADQIKKLAGKGGTPEKAPFKPLIEDFYLTNPVARASAVMAECSRLASGHMLTAAE

SEQ ID NO: 13545 - protein, 355 aa, BradyrhizobiumColbertium
MEFFESAFWTGFLWPLIIMVAQSVLVLVVLLVAIAYILLADRKIWAAVQIRRGPNVVGPWGLLQSFADLLKFVLKEPIIPAGANKGVFLLAPLVSCVLALAAWAVIPTNLGWVIADINVGILFIFAISSLSIYGIIMAGWSSNSKYPFLAALRSAAQMVSYEVSIGFVIITVLLCAGTLNLTAVVEAQHTRGLASLIGLPQLTILNWYVWPLFPMFVVFYVSALAETNRPPFDLVEAESELVAGFMVEYGSTPYLLFMLGEYVAIVTMCAMATILFLGGWLPPVDLPPFNWVPGIIWFSLKLFFMFFLFAMAKAIVPRYRYDQLMRLGWKVFLPLSLAMVIVVAGVLQFAGIAPK

SEQ ID NO: 13546 - protein, 164 aa, BradyrhizobiumColbertium
MGININATARSLLLSEFVSAFFLAMRYFFQPKPTLNYPFEKGPISPRFRGEHALRRYPNGEERCIACKLCEAVCPAQAITIEAGPRRNDGTRRTVRYDIDMVKCIYCGLCQEACPVDAIVEGPNFEFATETREELYYDKAKLLANGDRWEREIAKAIELDAPYR

SEQ ID NO: 13547 - protein, 212 aa, BradyrhizobiumColbertium
MILPALFFYLFAGVCVASAVMVIVSRNPVHSVLYLILAFVNASGLFVLMGAEFLGMMLIVVYVGAVAVLFLFVIMMLDVDFLQLREGFIEYLPVGLVIGGIFLFELLLTVGFWVINPGVSKTITAAIPADVSNTEALGLVLYTKYIHYFQLSGMVLLVAMIGAIVLTLRHKASVKRQDINVQNARTPEMAMAMRKVAPGQGLSDADAAEWVK

SEQ ID NO: 13548 - protein, 102 aa, BradyrhizobiumColbertium
MTIGLGHYLAVGAILFTLGILGIFLNRKNIIVILMSIELILLAVNINLVAFSTFLGDIVGQVFALLVLTVAAAEAAIGLAILVVYFRNRGSIAVEDVNLMKG

SEQ ID NO: 13549 - protein, 700 aa, BradyrhizobiumColbertium
MVQAIVFLPLLGAILAGLIALFGAHARNPSGDEVEHHGDHGHAPAHASDTINQDASVIHETHHEPGDGHDDHGHGPAEPPAAGSRGAELITTTLLFVSAALSWMTLVDVGFMHHDYRIQLLPWIFSGDLQVWWTLRVDTLTAVMLVVVTTVSSLVHLYSIGYMDEDPNRPRFFGYLSLFTFAMLMLVTADNLVQLFFGWEGVGLASYLLIGFWYQKPSANAAAIKAFVVNRVGDFGFALGIFAVFMLVGSTDFETIFNAAPGLTGKTINFLGWHADALTLTCLLLFMGAMGKSAQFLLHTWLPDAMEGPTPVSALIHAATMVTAGVFMVARLSPLFELAPNAQAVVMFFGATTAFFAATIGLVQNDIKRIVAYSTCSQLGYMFVAMGAGAYSVGMFHLFTHAFFKALLFLGSGSVIYAMHHEQDIRNMGGLWKKIPYTYAVMVVGTLALTGFPLTAGYFSKDAIIEAAYASHNPFAVYGFLMTIVAAGLTSFYSWRLIFKTFHGEPHDEHHYEAAHEAPLWMLIPLGVLAVGSFVAGLPFKELFAGHGIEEFFRESLKMNPHIIEEMHHIPQTIAFLPTVMMVLGFLVSYLFYIRRPYLPVELANTQPMLYQFLLNKWYFDELYDIIFVRPAKWLGYQLWKKGDGFIIDGLGPDGVSARVLDVTRNVVKIQTGYLYHYAFAMLIGAAGLITWFMFGFGGQ

SEQ ID NO: 13550 - protein, 502 aa, BradyrhizobiumColbertium
MTTWPILSVTTFLPLVGALIVYLSRGDDEAAKRNSRWIALWTTLITFAVSVILVMRFDPANPDFQFVEKANWLATGITYHMGVDGISLPLVILTTAVMPFCIIASWKAITNRVREYMMAFLILETLMIGTFSALDLVLFYLFFEGGLIPMFLIIGVWGGPRRVYASFKFFLYTLLGSVLMLLAIMALYWNGGTTDIPTLMHTAVPRGLQTWAWLAFFASFAVKMPMWPVHTWLPDAHVEAPTAGSVVLAAILLKMGGYGFLRFSLPMFPLASHDFAPLVFTLSAIAIIYTSLVALMQEDMKKLIAYSSVAHMGFVTMGIFAGTMQGVAGGVFQMISHGIVSGALFLCVGVVYDRLHTREIAAYGGLVNRMPLYALTFMVFTMANVGLPGTSGFVGEFMTLLGTFKVSIPTAFFASFGVILSAAYALWLYRKVVFGALVKPSLANMKDLTFRECLTLFPMIALTILFGVYPKPVLDMSAASVQQLVNNYNSAVTAVKAAALLQ

SEQ ID NO: 13551 - protein, 478 aa, BradyrhizobiumColbertium
MNFVIAGYQLAPVLPELVLAVGAMALLMLGAFRGQGSTSTVTSLAVVLLIVVGALVYMQPAGKQVTFGGSFIVDDFARFMKILALIGSAVTLVLSTEFLSDPSRRIFEYAILVLLSTLGMMVLISAGDLISLYLGLELMSLALYVVAASNRDNAKSTEAGLKYFVLGALSSGMLLYGASLVYGFTGTVSFTGIAAAATVSNVGLVFGLVFLLVGLCFKVSAVPFHMWTPDVYEGAPTPVTAFFASAPKVAALAVFTRVTLTAFPGIVSQWQQILVFVSIASMALGSFAAIGQTNIKRLMAYSSIGHMGFALVGLASGTVEGAQGVLMYIVIYVAMTLGSFAIILAMKRNGQAVEQITDFAGLSRTNPLLAFMFAMLLFSLAGIPPLAGFFAKWYVFVAAIKANLFTLAVIGVLTSVVGAYYYLAIVKTMYFDEPAGQVDPVRIEVRTVLAVAGLFNLLFALFAGPVVSVASAAAKSLF

SEQ ID NO: 13552 - protein, 268 aa, BradyrhizobiumColbertium
MAFALGPRALSAGYKLAAFDRTGSTNTEAIERARAGERGPMWFVTSEQTAGRGRRQRAWIAPRGNLAASVLEVLDIAPAVAATIGFAAGLAQEAALEKVSLEAALRFGPDRPRYVLKWPNDVLAGGKKLVGIGLEAEAVGSGLAVVVGIGTNVVAAPEGTPTPAVSLAALGVQISAEELFSALSDAWVEFRGIWDNGRGFAEIRKLWLERAAGLGEKVSIHTGTMTLEGVFDTIDDTGCLIVRTPEGRLVPVAAGEVFFGPVASVGAA

SEQ ID NO: 13553 - protein, 556 aa, BradyrhizobiumColbertium
MARPEELVFAPLGGVGEIGMNLSIYGLGNRHQRAWLAVDLGVSFGDEEHLPGIDLIMPDIAFLEKERKNLMGLVLTHAHEDHFGAIIDLWPKLKCPIYATKFSAALFEAKCAAERNAPEIPVTVVPSGGRVDVGPFNVEFIPVAHSIPEAHALAIHTDAGIVLHTGDWKIDPTPTLGPPTDEKRLRELGEQGVLALIGDSTNAVRDGRSPSEADVARTIIELVKTAKGRVAVTTFASNVARIKAVADAAKAADREVVVVGRAMERVVQVARETGYLENVQNFRSPEVYGHLPQDKVLALCTGSQGEPRAALARIANDDHPEITLNRGDSVIFSSRTIPGNEKAVSSIVNNLVLQGVEIITDRDALVHVSGHPRREELRDLISWVKPQLLIPVHGEALHLHEHAKLARAAGVPRVLVCRNGDLVKLGPGDPGIVGEVPSGRLYKDGTILEDSKSRAVVERRRMAFSGCAFVAIAMTGQGELADEPEVDLVGIPEKNRSGETFDDLVFDAVMSTIEGLPRARRRDPDALAESVRRAVRAVINEHWGKKPPCLVHVLTV

SEQ ID NO: 13554 - protein, 134 aa, BradyrhizobiumColbertium
MLGRLNHVAIATRDAVKAAKIYGAAFGAEISEAVPLPEHGVTTVFATLPNTKIEFIEPLGESSPIAKFLERNADGGIHHVCYEVVDIIASRDTLVKEGARVLGDGVPKIGAHGKPVLFLHPKDFSGALVEIEQA

SEQ ID NO: 13555 - protein, 91 aa, BradyrhizobiumColbertium
MAIQISTALAIYFVIWWVALFVTLPFGVRSQHEDGVGAPGTDPGAPILTRMGRKLIWTTIISAIIYGVGVAAYHAGYLSIERLSKLMGMPF

SEQ ID NO: 13556 - protein, 117 aa, BradyrhizobiumColbertium
MTFQRIVVALLVLIVAGLGAVGYFEWKMAVQVRTLKAFVEGYVFNEAVMACEQAKSSTPFKWNGGKSTSVIGLNSVKTDKYSVYASYTLVADSVYCDYDPIKRKADIGSSFLERETF

SEQ ID NO: 13557 - protein, 78 aa, BradyrhizobiumColbertium
MASEAAADIIDLYQRKALDWIESRAQSSLFERAWLDRFRALLPPAGSVLDLGCGSAEPLAEYLIGLDHPVTGVLFGHD

SEQ ID NO: 13558 - protein, 124 aa, BradyrhizobiumColbertium
MIDASRRRFPEQEWIVADMRQLAMGRNFCGILAWDSFFHLCFDDQRRMFPIFRDHARPEAALMFTSGPARGEAIGALGGEPLYHASLDPAEYRSLLDRNGFRTVSYVIEDPDCGGHTIWLAQRI

SEQ ID NO: 13559 - protein, 87 aa, BradyrhizobiumColbertium
MSILWTIIIGFLAGVIAKFIMPGDNEPSGFILTTILGIVGAFVASYLGQALGWYRPGEGAGLIGAVVGAIIVLFVYGLFAGRQRRAI

SEQ ID NO: 13560 - protein, 143 aa, BradyrhizobiumColbertium
MTALLAMLAIAGYQNRDKLAELMKGAGGGGSSAGGQQPLGGMLGNLGGMLGAGGIGGLLNGGIGELLERFNQNGQGEVADSWVKPGPNKDISSQQLKEAVGSDVLEKLAQQTGLSQDDIVARLSRELPSAIDKYTPDGRLPEA

SEQ ID NO: 13561 - protein, 428 aa, BradyrhizobiumColbertium
MTGDRAGDYRILHEADLRDYLAGILELKALLGGDPSSWEITEVGDGNLNLVFIVKGARAGIAVKQALPYVRLVGESWPLPLSRAHYEYLALSRQAELAPGLVPSLLHHNEPLALTVMELLEPHIIMRKGLVAATQYPRFVDDITTFMAQTLFFTSDLALSAAEKKQGIAAFAGNHALCKITEDLIFTDPYRIAEQNRWTTPYLDGLAAELREDMDLHIAVSRLKLKFMASPEALLHGDLHTGSIMVTENETRVIDPEFAFYGPMGFDVGAVLANLLMAYFASSGHERAPGDRRAFETWLLETVEQVWNEFARKFLDLWRAGAEGDGYPVSLFAGEKGAARLEAERQAYMQRLFADTVGFAAAKVIRRIFGLAHNIDFELIEDPQARATCEARAVRLARAMMMETKAFPAIADVAGAARKLSDWMPELS

SEQ ID NO: 13562 - protein, 326 aa, BradyrhizobiumColbertium
MNWVARSWLALVLTLLSLSNSLGEASAQQFPPSQIKIVVPFPAGGTTDILARFIAQQLGEKLGVPTIVENRAGASGTIGSEMVAKSPADGSVLLIAATHHVINPSLFRKLPYDTQSAFSPVALVARAPNALVVSKDFPAKNVAELIAMAKKDPGKLSFGSSGIGGANHLSGELFKQMAGIDIVHIPYKGAAPAMNDLLGGHIPIMFDTLPTVLPAASAGNIRVLAVTSMTRAASLPDVPTLDEAGVKNFEATAWFGMYMPAADGSTAYSRMVEVMGDLLASPTIAEKFATQGVTPGTLAGTNFSRFVHAEINKWAAVVKAANVPLE

SEQ ID NO: 13563 - protein, 150 aa, BradyrhizobiumColbertium
MTTSFDTLSVGDTIDGPKFDVSRESIRLFCDGSLDYNPLHLDDDYMRNNFGKTNFGGIIMHGMNNFGLITRMLTDWAYPAGAIQRRLETRWLKPVKPGDTIQPVGVVKAKQTTQKSRWVLIDVLVRNQRAEHVAAGEAMVEFPLSDSIAA

SEQ ID NO: 13564 - protein, 158 aa, BradyrhizobiumColbertium
MTQAPTFETDFWKDANLRKVWDEIVPGEPRKTIPYKLTLEAIQLYCRSVGEDHPLYFDEAYARKTPYGGLIAPPSIHILLMFACTPNDDWMRTPGTINAGQSWSYNKPARPGDMITLHARALDKFIKRERLFVVHDNVFFNQHGEVICSGRGQTIRPA

SEQ ID NO: 13565 - protein, 256 aa, BradyrhizobiumColbertium
MPKESDGYVRAIERGFALIEALGRSPGRHTLSEAAAHAGLNRATARRMLSTLVTLKYCEADGRYFRLRPRALGLGLSYLNALPFWGFAQRALEDLRNDIGESCALAVLDESDIVYALRLPARRILSANLGIGSRLPAHLVSLGRVLLANLPLDERDRYLASTPLKSVTPRTITDAKRLAHELQLTRERGYAWVDGELDPAICGIAVPIRDQAGSVVAAVSINLISGTLTEAAAKKRYLVRLQKTAQDIRTQSLSPS

SEQ ID NO: 13566 - protein, 123 aa, BradyrhizobiumColbertium
MKPAGAVQLHLGVHGAVELRRLGLAEFRSAHPDIGLRVLQPAGLHELVEGKVDLLIGRGLSHHPGYRCDRIDGRSGLGDWLVAPEGAADCPEIVSFREWLRSLPADIPRPSQLRPRLVDVGRR

SEQ ID NO: 13567 - protein, 86 aa, BradyrhizobiumColbertium
MTYALPPLNALRAFEAAARHLSFKLAAHELHVTPAAVGQQVKALEARLGVSGSSGCTSSSSSPPQARLTCPEYPRAFATSRRRPRN

SEQ ID NO: 13568 - protein, 130 aa, BradyrhizobiumColbertium
MPAAHIVSHNPATVHAPAGGYSMGFEISQHRRLLFVSGQVPETSDGSVPEGFEAQCEQAWRNVIEVLAAAGLGVRHLVKVTTFLTDLGQVVPNRVVRRRMLAGHEPALTVMIAQTVDSKWLLEIEAIAAE

SEQ ID NO: 13569 - protein, 236 aa, BradyrhizobiumColbertium
MAEIHPFYQKHREAMEATMRGRLDIAEPMLRERTHLSDVHEIRREVMDEFGIVLTQMPYVGGAASRMSDFFMRLTGFMAISRVLRRHGVPVPVIGEIERETCAAQLLTEPEAERLALGRQFMSPENQVLLREQAARSTTESHEKEFPDDFVYDFVEPGPGDEFEFGIDYKACGFCKLATRHGDTEILPNICGLDFDAYATRGIRLERTRTLAGGASHCNFRFSRLASIREAEDTKG

SEQ ID NO: 13570 - protein, 341 aa, BradyrhizobiumColbertium
MSSETALATGPRARGLAPFLRSQMRNIAPFLTLICLFTFFAFASPSFATLDNLGNILTQVSITGIIAVGLTFVILCAEIDLSIAAIANVTGIAVAYFTLQESYVNIANVPLPGAVAILLSILLCALLGLVNALGLTVIGIPSFIMTLAMMQIAAGISALLVRGQIAYKVPSLITTLGSGSIGGIPWLVIIAALMLLGGHLVLTYTRFGRYVYMVGGNREAAEYSGLNVKLILGAVMVISAVCSGIGGMLGVAHFGSAQQNEFDTYLLDSIAAVVVGGTSLFGGRGGIGNTIVGLFVLGVLNNGLDHVNIDSFLKILIRGLILLAALIINVYAQRLREKAAE

SEQ ID NO: 13571 - protein, 500 aa, BradyrhizobiumColbertium
MPEGQQPILELQGITKSFGGVEALRGVDFALCPGEIQGLVGENGAGKSTLMKIIAGVHTEFSGRFLVDGRETHFRSARDAHAAGIAMVHQELSVAPDLTVAENVFLGNQPTNRLGLVQWRRMAREAGEQLARFGIDVDPMSRLGDLPIGLQQLIEIARVLFSGARIVILDEPTSALSPPEVERLFATLKRLREEGTSIVFISHFIEDILRVSDTVTVFRNGRKVAETASAATSKSALIEAMIGRGGEALEHSYADDLMLPRPSESAVILKAEQLSLGRSLNDVSFEARAGEVLGIYGFMGCGQQELSRILFGKLKPDGGTLAVEGTPKTFASTAAARRAGVALVPESRRDMLFHQEPVYKNISISILDRISSLLLKPGQERDIAKRQVEQLQIRPPVVGLDLGMLSGGNQQKVALAKWLTYPPKLLVLCEPTRGMDVGAKNDVINIVRDLRTKGLAIIVLSTEPETVLSLADRILVLKRGALVREFRNEPVSKDRLLEAA

SEQ ID NO: 13572 - protein, 340 aa, BradyrhizobiumColbertium
MSGTKDFSTTRRDLLQAAATAGAATALLGSMGITPALAAAVGRSEKPLKAAFSNAGLQATWCAQGKQAAEFWGKLFNVEVTWFDGQLDAVKQRAAIDNMASQKWDFVAIQAFGIGTLTQPVQKMIDAGTPVIDMDTLIAPLDQINVHSFLAPDNEFMGASVTQALCNAMGGKGKIIMTQGALGHTGAQGRAKGFNTVVKQFPGIEVLDTQPADWDVSKTARLWETYLTKYPQIDAAFFHNDDMALAAANIMKARGRTNILIGGVDAMPPAIQAVSEGRMFATVRNPSCRIHGGAIIAGVSAVVGGEKSGQGIPKNVVTDGPVVTKANAAGMQWMQDHFLI

SEQ ID NO: 13573 - protein, 85 aa, BradyrhizobiumColbertium
MCWLQRKAPGGSSGEVVDVGEQCVPALCDLARSFIAGKLAQRIPSKPAKSKMSSMLSASIAPFHRDRCPPCRNVGCASGCSSSGR

SEQ ID NO: 13574 - protein, 124 aa, BradyrhizobiumColbertium
MRARLQKFLPLVLLALVMQVLAPIAACLVAGQAVADPLSAAVICHSASEQGGPNDRTSAPTAHAGACALCCLAQANATLDSPTHEALAVPVRHAERVVWHPAHASAITAYEGSSAQARAPPQSS

SEQ ID NO: 13575 - protein, 801 aa, BradyrhizobiumColbertium
MLRIRAISRAGLPVLCGLVSSIGADALAQGASEPLPTVTVEAPQASRPKPAPRPSRLRSAAAGRAARPVAQNPTASAPAQNPAMSAGAAREGLNQSPAGQTATTIDRSQFDNRPAFSVSDVLRDSPGISIKQGNGPRDFGISIRGSNARNGFAIRNLVIFEDGFPVTQPDGLSRSDLIDPHAYAAIDVIRGPSSALYGNYATGGALNFRTRPGGTIDGVEYGVDGGSYGYLNNYLAAGKKVGNFEGSLFASDVRGDGYIGNSWFNTQTVNFLGTLKATLDDRFTVKIINNDLSARLPIRQSLNQYYLNPFQQGCATGATAAPGCGTVRLFNNGFNSTAGTDTETAVQAGLGRNDRRTIVGGRWEHDFDNTLTWRNQFVFDDRNITQPTGTTAAIGDFPSYNYMSDLTKRGEIFGLESTAFFGAFFNTLTASSDTRNVMPGGNATLGRLSSNLLSETTNYGVRAREELRLTTSLTAVAAVGWETTLLKGTNTAYAYSGPTGITTTTLTSADRQFQNAAPELALLYNLENEWLFRGRVATGYGTPQVSNLFVLPNGLSGNNTQLQAQKNLGYDLGFDWTPNNTLKLSATGFYEFFRNEIVSQATPAGSPNATYTFNAPRSEHRGVELAADWKFHPGWRFMAAYTHLDEVYTEYVESITNGAVFSFNRAGNKIPGISPNELTARIGYDEFVGPLTGLGGFVEVQWKDSFYMDNANLLKAPGYELVNVNVHYKADLVSDTVRSLTLFLEVRNVLDRTYVASANNIANTVTATGLQNPASVLANTTGSIYAGSPRTFVAGMKVAFR

SEQ ID NO: 13576 - protein, 403 aa, BradyrhizobiumColbertium
MIRTSLLALVALGLAVGTALAQMRAPPASGAACEEPTLRCATKVTSAFGPDGTLWLVWMAGGQISVASSQDTGRSFSPPTQVTTKRLNLDWGPDARPKIVVDRKGGIALTFSIFRDEAFNGQVLYTRSADGGKSFAELKPITANNESQRFEALALDQDGTVLAAWLDKRNRVSAKEAGRKYEGAALFFASSRDGGATYAEARLAHEGTCECCRLGLAFAAPGRPAVIFRNIFEGGVRDHAVMTFTAVSTPGEIRRVSNDDWQINACPHHGPSLTIGPNGTYHVAWYTNGKTRKGLFYAHSRDEGRTFSVPIALGRLDRSPTRPFVLSAPAGTVMVWKEFDGEKTSVQMTISRNDGQTWSPPKAIASTSDTSDHPLLVSNDKQTYLSWMTKADGYRLTAIEDQP

SEQ ID NO: 13577 - protein, 165 aa, BradyrhizobiumColbertium
MRFRFAGIASLNVLIASAAAFGASPALKPFERGTWQGVIRGHAGRPVLVHFWGVTCGPCKVELPLLGQFAKDHPDIDVVTVSADLVPNLPAATQSMLDKAGLSSTENFIFNDGFVERLRFEIDPAWQGDIPRTMLISRDGTITTIEGSAEIADLEKWSAQQFSKH

SEQ ID NO: 13578 - protein, 178 aa, BradyrhizobiumColbertium
MKTISKNVLLAAFALAISAAPALADDVKAGDLVISQAWSRATPGGAKVAGGYLVIENKGTAPDRLVSVSADIAGKSEIHEMAMDNGVMKMRALDKGLVIDPGKTVKLAPGGYHLMLQELKGPFKQGDKVPVMLQFEKAGNVAVSLDVQGVGAQSPGDAGHSGHMDMKKMPDHSGMKMK

SEQ ID NO: 13579 - protein, 439 aa, BradyrhizobiumColbertium
MRLSRFFLPILKENPKEAEIVSHRLMLRAGMIRQEAAGIYAWLPLGFRVLKKIEQIVREEQDRSGAIEVLMPTLQLADLWRESGRYDAYGPEMLRIADRHKRELLYGPTNEEMITEIFRAYVKSYKNLPLNLYHIQWKFRDEQRPRFGVMRGREFLMKDAYSFDLNEAAARVAYNKMFVAYLRTFARMGLKAIPMRAETGPIGGDLSHEFIVLAETGESGVFINRDVLDLPVPGEDVDYESDLTPIIKQWTSVYAATEDVHDAARFEREVPADKRVNTRGIEVGQIFYFGTKYSEPMKALVAGPDGVDVPIHGGSYGVGVSRLLGAIIEACHDDAGIKWPEAVAPFRVSILNLKQGDAAVDAASEKLYAELTAKGVDVLYDDTDQRAGAKFAAADLIGIPWQIMIGPKGLADGKVEIKRRSDGSRETMSPADAVARLVG

SEQ ID NO: 13580 - protein, 426 aa, BradyrhizobiumColbertium
MDETMTETVQTAPFAPFEWMLSARYLRARRKEGFISVIAGFSFLGIMLGVATLIIVMAVMNGFRKELLDKILGLNGHILVQPLESPLTDWKDVADRLSQVEGIRLAAPVVDGQALASSPWNASGVLVRGIRSDDLNNLTSIAKNIKQGSLEGFDEGQGVAIGRRLADQLSLHAGDSVTLVAPKGAVTPMGTTPRIKPYKIAAVFEIGMSEYDLGFVFMPLAEAQAYFNRSNDVTSIEVFTTNPDRIDAFRKAVTEAAGRPIFLVDWRQRNSTFFNALQVERNVMFLILTMIVLVAALNIVSGLIMLVKDKGSDIAILRTMGASQGSIMRIFLITGASIGVVGTLVGFCVGLVICLNIESIRQFLSWLTSTELFSPELYFLSKLPAEIDVGETTAVVIMALTLSFLATLYPSWRAARLDPVEALRYE

SEQ ID NO: 13581 - protein, 234 aa, BradyrhizobiumColbertium
MEQQQGAEDVPVIYLHEIKRQYLQGEVPLTILDGAKLALWAGQSVALVAPSGSGKSTLLHIAGLLEAPDSGEVYVSGAPTSQLPDIERTQLRRTDIGFVYQSHRLLPEFSALENVMLPQMIRGLRKSESVKRAKEILGYLGLGDRITHRPAELSGGEQQRVAIARAVANAPRVLFADEPTGNLDPGTAEHVFQALMQLVKATQVSMLIATHNMELAGRMDRRVSLSNGQVVELD

SEQ ID NO: 13582 - protein, 40 aa, BradyrhizobiumColbertium
MGDRFIGIDEIELRNSSNGERHAIFGEAGLVAEPRLTPGT

SEQ ID NO: 13583 - protein, 1049 aa, BradyrhizobiumColbertium
MTTATGVPSADRNAVLATLGDHIREIGNPDDLAYAAAELLGRSLNVSRAGYGTVDTSAETITIARDWNAPGILSLAGVLRFRDYGSYIEDLKRGETVICADAERDPRVGDRARALEAISARAFVNMPISEPDGVVALLYLNNAKPREWSPAELALIREVAERTRTAVERRRAETAVRENEARLLFLDALNKETAKTRDADSVMAVTTRMVGEHLGVSNCAYADMDPDQDGFTIRGDWAAPGAMHILGHYSLADFGKKAVRELGAGRPLIINDNLTEIAPEEAAAFQRIGIGSTICMPLVKEGRLTALMAIHHRGPYRWRQHELALLTEVTERSWAHIERVRSEQAAREAAERLVLANKAAGIGTWDYDPVNDVLRWDNRCKEVFGLSPDADVSYEGSFLRGIHPDDRERAHQAVSAALQPRSPGSYNIEYRTIGIEDGIERWIAATGHAIFSDDQATRFIGTVLDISAQKKTERHLRILNDTGASVARERDLGRIVQIVTDAGVELTGAQFGAFFYNVLAADGGSYMLYSLSGVPRSAFESFPMPRATGVFEPTFKGLGVVRSDDILKDPRYGKNTPHYGMPAGHLPVRSYLAVPVISRSGEVLGGLFFGHADVRKFQAEHEAALLGIAGHAATAIDNARLLTRLEALNAELEQRVADEIAERMKAEEQLRQSQKMEAVGQLTGGIAHDFNNMLAVILGSLNLAKRRLGKGEVNIDRFIEGAIDGANRAATLTQRLLAFSRQQPLAPEVVDVNKMVGGMSELLERSLGELVRLETVLAVGLWRVKADPAQLESALINLAVNARDAMPKGGRLTIETGNASIDRKYAREYALAPGQYVLIAVTDNGTGIAADVLGKVFDPFFTTKVVGKGTGLGLSQVYGFVRQSGGHVKIYSEIDVGTTVKIYLPRFAGEEAIPTPSQGVTHPGASLQSETILVVEDDERVRSISSESLRELGYTVVEAASANEAIRKIESGFIPDLLFTDVVMPDMTGAELATELSKRLPELKVLFTTGYTRNAIVHNGMLDAGKHLLSKPFAIEDLAAKVRQLLDEG

SEQ ID NO: 13584 - protein, 408 aa, BradyrhizobiumColbertium
MFARILLLVVSLLLPSTLGAQAAPAEQAGLASRLTIYLAKGSPNACGPGCDRWIAIEGEIDREAAARIRRFLAAVKDLQRPIYLHSPGGNVEQSYAIGRLLRSRRAIARIGRTIPTACAAGKQADAACLKIKNARGEVEAELTTQRAMCNSACGYLFLGATSREVAPDAVVAVHSSRLVLAFDGRPDPAAVAEYRRRRLLAADRDRAAFITAMGINRELDALIRTVKFESLHVLTRSELYGFGIDTRPLAETNWTLEKEARPFVRKMATTKKESASKFRTMELRLSCENSKGVPLTFASEVDETARGKSTILIAADTEKVTGGSPLRFGKYAVWRGNIDADMVNTILASRSLQVRETTQMPDDKTSNTKFEIDLTGLPSVWDRLRASCASPAAGPASLLPAMLRHTAP

SEQ ID NO: 13585 - protein, 279 aa, BradyrhizobiumColbertium
MCRGLSTGLLRHGYSNSVDRCYDDVTARGPLRNWNGNQMKKNLLLAAVSLVALSAAAPALAADLAARPYTKAPPAAIAAVYDWSGFYIGINGGGGSARTTWDLVGVGREGSHDASGGTVGGQIGYRMQSGQFVFGVEGQGNWADFSGDNVSLIFPANRNRTRMDAFGLITGQVGYAWNNVLLYVKGGAAVVSNKYELSAVGGPLLASTSDTRWGGTVGAGLEFGFAPNWSVGVEYNHIFLADKDVTFAGFAGTDRIRQDVDMGLVRLNYKFGGPMIARY

SEQ ID NO: 13586 - protein, 264 aa, BradyrhizobiumColbertium
MTENSDNWEPHERLAWQAKTPKKEREALDNAPLATLRAIPASSSAFMLTSDLAERYPRPQAAKGKAYARHKTLVDYANAVGAFIADLLAAVERDRSEGWLMCSHDKGDYTGQYVKWRMFDGVRTAWLEAGLIEHKPGYPGRLEFGNPGPSSGKLTRYRATPRLLEIAAGHGITPANVLEHFKFEFMMPSELIRLTKPPEPTPNTPRVAELRRDVAELNAFFAKQTLTHPKHPTIKHLGWIRIFHAYTKGYRWNKGGRLYSQPRL

SEQ ID NO: 13587 - protein, 41 aa, BradyrhizobiumColbertium
MLERWGVKALKAAIDKINYPGLDLSRVKPLRASHVARRGPK

SEQ ID NO: 13588 - protein, 60 aa, BradyrhizobiumColbertium
MTRGAVQQFRDLALNDRAHMATYVSEVVEALNESLAIAYGIDRELYASYVLARDQPDGPS

SEQ ID NO: 13589 - protein, 84 aa, BradyrhizobiumColbertium
MAAVTIRNLSEEAHRALKVRAAQHNRSTEAEMRAILEAAVRPEGRLRLGTALSEMSRKIGLTNADVEALEQGRDARPAEPMRFE

SEQ ID NO: 13590 - protein, 141 aa, BradyrhizobiumColbertium
MILLDTNVVSEAMKPDPHPSVRDWLDAQAAETLFLSSVAVAELLFGIGALPRGKRKDRLASALDGVLDLFATRILAFDTAAARRYADLAVKARALGKGFPTPDGYIAAIAAAHGCAVASRDTSAFNAAGLTVIDPWTVTSR

SEQ ID NO: 13591 - protein, 110 aa, BradyrhizobiumColbertium
MAVHKGFKALDTLPHVLTALHIADVSDVHIVRPADVPNANWLRPGIPGAGQQAFGDALLAKHKFVVIPSAVSNHSWNLIFDPTRAKGAYQQHLQEAFALDTRLHPSTSPP

SEQ ID NO: 13592 - protein, 160 aa, BradyrhizobiumColbertium
MTATAEKPAPKGPGNDLQKVADLLGGPRILSRRITSALDAHELLLDGLPGSALTHFVRHLLIIQTDSLEKAFGMSLRTFQRRKDAPDKPLSQEQSGRTWKFAEILAKATDVFGSQEEAEQWLERPAIGLDQRRPIDLLATPAGIELVEQYLTRLAYGVYA

SEQ ID NO: 13593 - protein, 81 aa, BradyrhizobiumColbertium
MMSVEEFRRLKTLAREEIPLEAIARQPTVFGHEPDDVLGYPEHDPVEAVHHMAKDAAAGINQDLVRREAERFAKHFVRGAK

SEQ ID NO: 13594 - protein, 191 aa, BradyrhizobiumColbertium
MDASPIVMLSAIERLDWLMEPCGTIWMTDMVMEEVARDPDSGKDPRSRWLAYTRSWIAANKFRIRRVETDTYRTYQLALDGWRAQGSDPERKPNSRDLGEASIIQTLKSFRGKVLPRQTIIVLMDESDGRDALKGTRRINLDVFGTRAFVEALYAHFGIAEAEHAWQAILKVITADESKDDDDPFIVRRAI

SEQ ID NO: 13595 - protein, 96 aa, BradyrhizobiumColbertium
MLEVRQTDTFASWLRALKDANAVARIAARIRRLELGNLGDVKPVGEGVSELRIDYGPGYRIYFIQQGNTVVILLCGGDKRTQNKDIRTAKRMAKEV

SEQ ID NO: 13596 - protein, 120 aa, BradyrhizobiumColbertium
MPLKTTKFDVQDYLKTPDQQAAYLEAALDSDDPSFIAVAIGDLAKARGVSKFSRETGLSREAIYKTFRVGGNPTLDTLSKATVVLGYKLALVPRSRTVGSSANSRPSDKRGTGAKAKKLA

SEQ ID NO: 13597 - protein, 39 aa, BradyrhizobiumColbertium
MPRFLKARYFIYISSYGLVLDSPGLFDICRLALAPQGER

SEQ ID NO: 13598 - protein, 292 aa, BradyrhizobiumColbertium
MNGESETILGGIITPERRNRIVLATKFTDAPEGDDPNAAGNHRKSMVQSIEASLRRLKTDRIDLYYVHSWDFTTRPDEVMRGLDDLVRQGKILYAGISDTPAWIISRSNELADLRGWTPFVANQIEYSLLERTPEREQLPMSRTLDLGVVAWSPLASGLLTGKYTRADGGSRRRLDTAPFKERDERNLKIARLVDTIADELGVASAQVALAWVRDQGVIPIVGATRTDQITSNLGYVDLTLTSEHLARMNEASRIELGFPHDFVESARGFVYGGMFHRIDRHREEGIRLSRS

SEQ ID NO: 13599 - protein, 100 aa, BradyrhizobiumColbertium
MDSKEELPIQGGARCSLALELGPQNIRVNAVAPGAVTITDFGRNNPPPTPEGIRTGNSNHGIGRMGTTMEIAKAMMWLIAPYASFVAGEVFAVNGASRVG

SEQ ID NO: 13600 - protein, 229 aa, BradyrhizobiumColbertium
MTRRARGRAFYFRSDVRDATQVERFVAVAVERHGALHIAYNNAGVVFGNGSLKGNAPLADISADFFDDVWLTNTRGVFLAMKHEIPLMLRNAPWGRFGLRGVIVNCASVSGHGGFAGIGSYSTSKHGVLGLTRCAALDYGARGIRVNSISPGGVNTPMRRASIEAQGGDPDQLPAPDIQYRTNTVEEMSDVVLYLAEGDAPSSILGTDIDVTMGMVTGPLTPPDPRKRG

SEQ ID NO: 13601 - protein, 221 aa, BradyrhizobiumColbertium
MVLRERLERISAETATQLPAEEMATMSAATDALRRSGILAGVLRPGERAPDFVLLDEGGEAISLADLRQKGPVVVSFYRGVWCPYCNADLQALEEVAPEISRLGAALVAISPQTPPNSRKAKRKDGLSFPILSDPGNEIAAAFGLRFTLEPAVQKLYRGYGVDLPSFNGDDSWTLPMPARFVVRADGAIAYAEADPDYTRRPEPSEVVAAVAELGGRPRDK

SEQ ID NO: 13602 - protein, 477 aa, BradyrhizobiumColbertium
MHTLPAAERTAGRRSPGEAITQVGRAVALAGVVLPLFWIGILKFSQTEIDALKPVLGGTPWLVWMYPVFGEAGASYLLGIVELVTAALFVASTWSSRAGVAAGSLGALTFVVTCSTMLALPVWEAAEGGFPWLNAVGSFLIKDVALLGVSSVVLGESLMRLRGGARTKAGSAVPLAVAAMVGSSACWGVATVMSKSALGHVPPFTLLALQLGVSVALLWIAVALSGQRAPLDADGRRAALSGVLEPGLAYAVGTSGLALTGAAHASLIAATEPLHVVLIAWVLFAVRPQRATLAAIFIAVPGVALVTASDPAGAENSLLGDGLIVLGTLFAAAYVVTTSRLSTKIAPLPLAALQQTIGLGFVVLLLLGALVLGIERLNLAAMPLSTWLLAGTSGVVQYALPFWLYLVGLRALPVGTAALFLALTPVFGAGGAVLFLGEHLSVLQVLGCGLVIGAVASAALRGGAKTVGAAPEKEQNA

SEQ ID NO: 13603 - protein, 184 aa, BradyrhizobiumColbertium
MTKHAHENVVGALALALADAMLRDAQAKAPELGPAAAALALLGHESGLTIERLRRALALSHPGAVRLVDRLSADGLVVREPSTRDRRAVALRLTADGEKICRNVIASRDGAIARALGALTEDELASFRGLAEKVLRRFVGDLDHAYSVCRLCDYDACGDCPVDDELRRRAAEKAASAQREPSSR

SEQ ID NO: 13604 - protein, 205 aa, BradyrhizobiumColbertium
MAARKQSTTKSDHARAQIIEGALQALEQTGVLRTTTRHIAAAAGVPLAALHYHFENKSALLVAVLEALNDRIAQRIRSVGTLESADLDTRISQLLHNSWRAISRTRSIQIVQYELTLYALREGAEWLAERQYDTYVRFYRDALMAGRHKSQNVSSANCTLLARFIFAGLDGLTLQELAQPSPERSKKSIDALISAAQSFAKELIG

SEQ ID NO: 13605 - protein, 385 aa, BradyrhizobiumColbertium
MDRRLFLSGVLLTAVSSKVAQARAATDRIKIGVLFALSGPAAFLGESQEKAFKMLVEEKNARGGLAGRKIEYVLYDTEGNGTKAIQQLRRLVDSDHVDVVFGPNTSAEALLVKPVVAELETPLLSFSGAVEMTVPPSPWVFQAVPNNRLAVQHFLGFLKRKNFRKIAFIASTDSFGQGGATMFKQLAPDYGLTIIAAEEFGLRDTDMTPQILKIKGLSPEAMVIWSINPGPSIILRNARAIGFDKAIFNSNGVASPQFIDQVGFAGEGTWLSAPRLLSPDSLPDSDPSKPVVTKLYQSYVAKWKKQPAAFAAIPHDALLVLESALGSVNGAVTRKNLRDAIESVTGVVGANGSYNFSSQNHMGLDDSSHPMVMMRIVNGTFVVEP

SEQ ID NO: 13606 - protein, 291 aa, BradyrhizobiumColbertium
MDALGQNLVSALVSGAIYGVAGLGFTVVYNATKVMNFAQGEFLMMGALISAFFVTSFGVYVVLAIVIATIATVLLGVTLDRWVIQLSRRKTPLNAVMITLGAAITFRGLAVVVIGRDVLFEPPFGGIPTITFGNVYVSSQGVWILLMLIVFSVGLSYMFSKTRIGMSMRAASDNPRAAMLCGIDTRWTSMLAFGLASATGAVAGAFVAPISSAFYESGLFFGLKGFASAMLGGLGYPVGAIMGGMLIGLVETLSAGYLTSVYKDAIALTVLILVLLVMPDGLFGRAQVKRV

SEQ ID NO: 13607 - protein, 86 aa, BradyrhizobiumColbertium
MVVKAELKAVLIAAGIVLLTFVLSPSDFHLTVLTVAALHGIAAVALSLDLVAQASFRSALPPFSVSERMALLLPCRTAFRRLQRWL

SEQ ID NO: 13608 - protein, 163 aa, BradyrhizobiumColbertium
MTLLLVCVIGFNLVHSARGRAMRALRSSEIATSCLGVDTVGVRVMVFSLSSALTGLAGGLYAFFMGSFAATAFEPGLSIDILMMVLIGSTSTLWGAVVGALAITILPNLLDGFDLYKLLVFGLTMMAVMVFFPDGLVQSAVDGVRNVVRKPSEDASIRNGSPP

SEQ ID NO: 13609 - protein, 258 aa, BradyrhizobiumColbertium
MSLVIDNLTKRFGGIAAVDGVSFLAPAGRITALIGPNGAGKTSVLNLISGTAFADCGQIELNGEDIRGWPAWARARKGLARTFQTPQLFEGMTVLETVMVGCHGRALSGLFSVLARTRRIAREEEMLRKEAERALDYAGVPSSLWRRIATELAYGIQRRIEIARAVAMNATTFLLDEPAAGLNPSETHELSGLLLRLKSDGRCMLLIEHDMQLVMRISDHVVVMNFGRKIAEGSSREVQTHPDVLQSYLGMESNDAQG

SEQ ID NO: 13610 - protein, 235 aa, BradyrhizobiumColbertium
MLRVDSLVVNYGVIAALKGVSLEVAQGEIVTLIGANGAGKSTLLNAISKVVDIRSGEVWLDGIPLHKLRGCVVASQGVVQVPEGRQVFKDMTVFENLAMGGYRRSRSENAEMYEKVFSMFPRLAERRKQLAGLMSGGEQQMLAIGRSLMARPRVLLLDEPSMGLAPLIVTDIFKVLKRLNDEGQAILLVEQNARAALKLARRAYVIANGEITHQGPASKLLDDPHVRTTYLGIEH

SEQ ID NO: 13611 - protein, 329 aa, BradyrhizobiumColbertium
MAPIRVVMFGLGTVGQEVARALLTKKGVQIVGAIDKGAAVGQDVGRVIGGSPLGVTVTSDASFMKQAKADVMIHSTSTKVKDVYEQVLPALNSGCNVITGGEEISSPYVYDKEYATKLDEVAKANNVRVLGTGFWPTWMDIDIPLLLSAGSRNVGYVRYSRKSDFRPYMNSVVAKHFGVGVTVSEFEKQKAAGVIVGHVGFEGSFERLSHYFGWNIDMIEKTVRPLYDDYGVSHAVETSAVAKEKGRIRAEMSLHAATRPDIESYDVIEIRGEPDIQMTISPAVGGPRPVANMLVNQIPFCLSSKPGVVMRPTVQAFAFGADCASLIHS

SEQ ID NO: 13612 - protein, 340 aa, BradyrhizobiumColbertium
MKVIWSDAQLAYEPHFYLIRGKVTSSYEVAGRAKMLLGACRQMGLTIADAPVAPREALERVHKPDYIEFLQHAAREWRAEGGTELLPTMYPTPEMLQDGTTIPKNVLGRAGWYVVGIGAPISEHTWTSVAAAADCAAEAARQVSNGIPVAYALTRPPGHHAYPARAGGHCFLNNAAIAAEELRAGGARKVGILDLDVHHGNGMQHIFYHRSDISTVSIHGDPSYQYPWFVGYADERGSGAGEGHNLNIPLGRDTRDDEWIAAISRGLEALQCCDVLVLALGFDTSKHEPLGFFGISDGAYAHAGALLSKARKPLVIVQEGGYCVDDLGRLLTNFVTGLKD

SEQ ID NO: 13613 - protein, 501 aa, BradyrhizobiumColbertium
MTVYRPTVAELQQAAIELGLILSLEDAASFHSLMQGQLDAYDLVDSMVAPLPEVAYPRPPGVRPHPKDNPFGAWAVKSRIQGAPEGKLKGKRVAIKDNVCVAGVPMMNGSSILEGYTPEIDATIVTRMLDEGAEILGKSVCEYYCASGGSHTSANGVVENPVVPGYNAGGSSSGSAALVMANIVDMATGGDQGGSIRIPASYCGAVGLKPTHGLVPYTGIFAVELTVDHAGPITRTVADNALMLEVIAGPDRLDPRQSGAVAQPYTHALDRGVAGLKVGVVTEGFGTPGAEAEVDARVREAADRLGEMGAHVHWLSVPLHAAGAAIWTPIFLEGATELMMRGNAYGTNMKGVFLESLLDAHSRWRDRANELSETLKLGILTGHYMSSRNRGRYYGKAQNLNRLLTADYDRALGQVDVLLMPTTPMAATRLPAPGASREEIIARAFEMVGNTAPTCLTGHPAISVPAGKTSDGRPIGAMLVARHLDEMTLYRAAAGLEACYR

SEQ ID NO: 13614 - protein, 37 aa, BradyrhizobiumColbertium
MSRSWLLSWILMIPIVLFAAPIIKRLTSLIVRKSEEH

SEQ ID NO: 13615 - protein, 358 aa, BradyrhizobiumColbertium
MTKYNILILGASYGSLLASKILFGGHSVRLICLPAEADLINAEGFRIRLPLRRGDTSVELDSRKLPGRVTASGTEGVDPRDYDLVGLAMQEPQYGSPGVRGLMKDIAASGVPCMSIMNMAPLPYMRRIPGLNSDALLPSFTDPEVWADFTPGRVTLCSPDPQAIRSPGQDVNVLQVTLPTNFKVARFDDERCNGMLRQLEHDIDSASLDMPEGPIELPVKLRFHESLFVPLAKWAMLMAGNYRSITDEGMCSVQDAVHANLEESRSIYNFVNEICVKIGAARADLVPFEKYAAAAASLSRPASAARAVNTGAVNIERADKLVRLVAAEKGMSHPILDAIVARVDRRLAANRARKAGAV

SEQ ID NO: 13616 - protein, 247 aa, BradyrhizobiumColbertium
MTIKAIVFDAYGTLYDIQSVAGVTNHAFPGYGELITQIWRIKQLEYTWLRSLMRRYEDFSVITRDSLTYTLKTLGLPYDEKLFETIMDKYVNLDLYPDAKPTLLGLKNYKLAILSNGSSDMLISLVRNTGLDAILDATISIDTKRIFKPSPEAYSLIEPRLNVKPSEVLFVSSNPWDAIGAQSAGLTVAWIERVTPQTIAENVAKGDCVAPLTLFRALRTQMDELGFVVHHRVASLEALENIVARHS

SEQ ID NO: 13617 - protein, 448 aa, BradyrhizobiumColbertium
MDGAFYALGPLVAFCTVLFLIAEPLRNSGKYTLGDVIRSRMQTRTSLLAAITGTVVVNFAYLMPQMAGAGVLVQLLTGIPYNLAVIFVGISMIIYVAFGGMLATTWVQIVKAVLMLGAGAIILMMALSFVHFNPLTLFSNVEAKYGTGFLAPGNYLKNPFDQISLGLGYVLGLAGLPHVMTRFYTVPDAQTARRSVVWVMFLAGAFFAATTLFGLAAADFVGHDAIRAADKGGNLSLPLLAQHLGGGKGSFGGELMLGFVAAVAVATILAVVSALTLSTSSTIAHDYYVNWLKGGKVDGKQEVLVARVTTVVIGFLAIALGILAQGVNVAVLVILAICVAASANFPVLVLSLFWRRFNSAGVVCGMLSGLTSSVILALIGPAMRGSEALWPLVNPTVVSMPLGFMGALLGSLLAGRDLDNERRFDRFLMQVHTGSSLDESSAARSPRP

SEQ ID NO: 13618 - protein, 104 aa, BradyrhizobiumColbertium
MSLGDAPAGVANADVRSLIAAKVRFLVPMTAIFMVSYIGLTVLAGFAKGWLTIKVAGPLNLGFALIFLNYLISWLLAVVYERIANHVFDPLAAEAVSSSYGPLS

SEQ ID NO: 13619 - protein, 307 aa, BradyrhizobiumColbertium
MLIIGVRDYGDRAVNLDIDCLRSFLVVAETMSFSRAADTVGRSQSTISQQIAKLEIQVGRPLLSRRKGRVLELTSEGDRLVQYARRILQLNDEACASLCEDLLTGFVRLGVPLDFFGRDFTVWLARFKAKHPMVGLEVEANQSEGLQKRSARGDFDLAFFKQEAGAKLGIVAQREQLVWVTGPNFALDELESIPLILFPEGCTYRRCAIASLREQKSKWHLSFVSPSFDCLKSAAIEGMGITVLARALVSPPLQIVRHARRLPQLPAIELAYSHGRRGNSRVVAELTNHLADSLAAAGTQPSPIAIL

SEQ ID NO: 13620 - protein, 43 aa, BradyrhizobiumColbertium
MYLPRFLQETTQMICASATGIARVSFEVFGPKLVRRHLADAHS

SEQ ID NO: 13621 - protein, 521 aa, BradyrhizobiumColbertium
MFAPHGLCLQWDPELLVVHIISDTVIALSYFSIPFALAYFVWKRRDVEFGWVFWAFATFIMACGISHVMSIYTLWVPAYGLEGVVKSITAIASIATAILLWPLVPKLLALPSPAQLRLAHAMLDAEAQQRREAEARLLQSQKMEAVGQLTGGIAHDFNNLLMVISGNLEIARRALGQHGQTGLKRASRAVESASDGAQRAATLTSRLLAFARKQPLDAKVVDLNSIIMGMAEFFQRTLGETVKLNTIFSVGLWRVETDPNLLEAAVLNIVVNARDAMPHGGTLTIETSNAFVDNDIARSIDDLQAGHYVVISVTDDGVGMEAETIERAFEPFFSTKQTGHGTGLGLSQVYGFCKQSGGIAKIYSKRGAGTTVKLYLPRSLHEREDEASVSNPLHPQIRGMGETILVVEDDEGVRRYVVETLTDLNYRIIEAKSAEEAVPVFEQNSREIALLLTDIVMPGRNGRQLSDVLCKQKPGLKVIFMTGYSRDAIVHNGRLDQGVELLQKPFTQAALAQKVRQLLGF

SEQ ID NO: 13622 - protein, 194 aa, BradyrhizobiumColbertium
MIFGRSDGVWLNEPEKWAAENDSLRIFTDKATDFWRETHYGFIRDNGHFLGFPTDDAFTAELRVQGNFRTLYDQAGIMVRIDGHHWVKAGVELSDGRAMLASVLTLGQSDWATAPYEHDPNDFWVRATVSNGVLRLQVSADGKSWPLMRLAAFPKASSYLVGPMACTPERAGLEVVFSKLRLSPPLGKDLHDLS

SEQ ID NO: 13623 - protein, 60 aa, BradyrhizobiumColbertium
MICSKESANGPRARRFNQWSAKQVCGYVETLWTLIVESTSSVPTSMPAVLNEAQIGIILL

SEQ ID NO: 13624 - protein, 405 aa, BradyrhizobiumColbertium
MNSMQQALACFGIAAAVVMANDDLMAQQPPLRIGILEDMSGPFSDLGGLGTVTAVRLAVEDFKGSLLGRQIEVLVADHQNKPDTGASLARKWFDVDDVQAIFGVTASNVVIPVQQLAKERKKTFAFAGAGADLTGRYCSLYSSGWNLDTFAAASVTARSLTRAGRKTWFTVAADYTFGHQLERDLTRFVGEAGGRMIGSVRTPLNSADFASFLLTAQASRSDVVALANGGRDLANLIKQAAEFGLGKQQTIAAPTLFITDIHALGLSNVQGLIHASGFYWDKDERSRAFAHRFMRRSGGVPPTEVQASMYSAALHYFKAAQIAGSLSGQSVAEQMRVLPVQDDVNPNAYLRRDGRLMKPIHALRVKDPAESRGPWDYAVVESTTSPEDAFRSAAEAGCVISDTPN

SEQ ID NO: 13625 - protein, 500 aa, BradyrhizobiumColbertium
MTYGDAAIAIDRFAGALIGEGISAGDRIAYLSRNDLDMALMFFGAARVGVVPVPLNLRLAPREWAEVMSDAGVKLLFVQDSFVPAIEELIAGVPSIQRCIVAGKSSCESWTTLHDWLSAHPSLGADHPIPRSEDVLCQMYTSGTTGRPKGVMITHANYDAAIGQIIRALERRPSIGATALVAMPFYHAGGLYMLAIATALGLIAIIHPEFNPRTVSDSLVEERIALALLVPAMINMMFQEVPDLPQRDWSALQSLMYGASPISIPLLERAVRTFGCDVYQCYGLTETTATLTVLGAACHRNALSGDADDMRRLASAGLPLPGTDVRVVDGNDRSLKPGLIGEVVARGPQIMAGYWGRNSETETALRNGWFHTGDAGRIDEAGYLFLEDRLKDIIVTGGENVSPSEIEKILIEHPAVAEAAVIGVPDDRFGEAPLACLVLNPGVAEPIPDELIAFCRGRIGNFKIPRRYVTMAVLPRNAAGKVLKRELRAPFWREQDRAIA

SEQ ID NO: 13626 - protein, 415 aa, BradyrhizobiumColbertium
MHDANTSLPAGTYSRAHDHAERYQLIGMTGSPYSIKMRAILRYRRLPFDWIVRFPQLEAEPPPVKPLVVPILRFPEDGSFHVDSTPLAQVLERRHPAARSIVPDDTALAFLADLIEDMADEWVTKIMFHFRWYYPDDVTYCQRWIASDIRPEAGSAERERIGTALATRQIERMPLVGCTPENKPVIEGSYQRLLGILNQSLEAGGAQYLFGSRPSLADFALYGQLQQLATDPVPAALMRTHAQSLVDWLRRLDDASGVDGKWWSRDEALTSPTLKGLLSIAGDTYLPFLAANARAIAAGQTSFSLDIAGQPYSQSVFKYQAKCLERVRQTYQDLSFRARYTRSPARGHGLSSVSCKLIEPSRDEHVGRAIPDLLRRTHSNAFLRQSTASCALPTERNFRSSRCASSDIWRRRDSY

SEQ ID NO: 13627 - protein, 285 aa, BradyrhizobiumColbertium
MSLSGKVLFITGASRGIGKAIALRAAADGAAIAIAAKTATHHPKLDGTIHSVAEEIERVGGRALPLQVDVRNADQVKIAVDKTFESFGGIDVLVCNASAIDLRGTLDTSLKRFDLMHAVNARGTFLCGQACIPYLKQAKNPHILAISPPLHFEDHWWADHLAWTWAKYGMSLCVRAWAEEFRSDGIAANALWPRKTIATAATAMLGGDEPFHDRCRRPEIMADAAHAILTRGSTACTGRFFLDEEALEEAGISNFARYADRPDSELYTDLLVDESNAVRWTPAHA

SEQ ID NO: 13628 - protein, 211 aa, BradyrhizobiumColbertium
MDTEALIRLLVADKILGLKPDTAVRLALAGGTMIAGITFFVGVGFRSDIADAAQSARFLAKFAVTVPTVIAATIALPRLAQPSAFVKRAGLALVISPLVLLLAVLVELTTVPSSLWVAKIIGSNASNCLTLIPMLSAGPLICFLVAMRAGAPIRPGLAGALAGLAASGIAATFYATNCTDDSALFVVTWYPLATTIVIAAGYTAGQKLLRW

SEQ ID NO: 13629 - protein, 308 aa, BradyrhizobiumColbertium
MIEALRTPEEQFSKLPSFDYVPRYLDDLPGYEGLRAAYIDEGPSEADTFFCLHGQPTWSYLYRRMIPVFLESGARVVAPDFFGFGRSDKPIDQGVYTFKFHRDFLLRLVERLDLQRITLVCQDWGGLLGLTLPVDTSFEPRLRRLLVMNTTIATGTPPSDGFLAWRAYCKAHPDLQIGKLMQRGTSHLSDGEIAAYDAPYPDARYKAGVRAFPEIVMTNPGMPGVSESVAAEKYWSTRWNGQTFMAIGATDPVLGLEVMEALRTKIRGCPPPLIVRNAGHFVQEWGENVASAALASFAQDAARVSSKT

SEQ ID NO: 13630 - protein, 75 aa, BradyrhizobiumColbertium
MRAYNVGSGTPRTVGDMAWALSKAKGGPDPQVTYGFRLGDVRHITADSSRLRKEMNWKPEVTFEDGMIEFAKAST

SEQ ID NO: 13631 - protein, 160 aa, BradyrhizobiumColbertium
MIALGLVLNTVGIGLFCWLILTLAVYALPFFVAVSAGVAAFHSGAGILGAPLVGIVAGGVTLAIGQTAFAIARFPILRAAIAAAFAFPAAIAGYHVVFAMSQLGMPSLAWREVFACLGAVFIGGTAWTRLAVLAEPRPLESGRVVPSASPAGLSAATHDG

SEQ ID NO: 13632 - protein, 307 aa, BradyrhizobiumColbertium
MTDHDDIEPPHAASATDHVLSELQLFGYRPFDDEPDPRPLPEGKMIAGAVADIFDALVATLSDTRLEPDLSDLLWSTVNLFHRAADRIDRHLDDNEQAQRKSQREQNGSEVRSVELERLTAEGITLIERRNCLELFRDQAIEHFELHTGSPWRPRSGSLVNHRTLTAAMIDSRDFIAAKRRAETEVLLPPGPKIALTGGLDFNDHTLIWDRLDKVHAKHPDMVLIHGGSPKGAELIASKWATNRKVPQIAFKPDWTKHAKAAPFKRNDAMLELVPIGVMHFPGTGIQDNLADKAKRLGIPVWKFGGA

SEQ ID NO: 13633 - protein, 353 aa, BradyrhizobiumColbertium
MARDASELAHCLAREAEAVCRYYLSNGRRQGRYWLVGDVHNTPGRSMFVRLQDSPKGPAGKWTDAATGEHGDLLDIVRESLGLPDFRAVAEEARRFLKLPRAKPEGASKPARPITAVGSQEAARRLFAISGPIEGTVVETYLHRRGIARVYHGGSLRFHPRCYYRPDEHLPTETWPAMIAAVTDLDGGITGVHRTWLDPDGFDRVRLGKAPVDTPRRAMGDLLGNAVRFGVADDDVLVAGEGIETMLSLRCVLPTLPMAAALSANHLSAMLLSSSLRRLYIARDADAAGDAVRAILTQRAAAAGIEAITLSPRLGDFNEDLYIFGLDALRTALRMQLVPEDVSRFLLLSTAVA

SEQ ID NO: 13634 - protein, 849 aa, BradyrhizobiumColbertium
MRQIVEWLGSDFDGVIVFDESHAMQNAVGGKGERGDQAASQQGRAGLRLQHALPNARVVYVSATGATTVHNLAYAQRLGLWGGEDFPFATRAEFVEAIEEGGVAAMEVLARDLKALGLYAARSLSYEGVEYELVEHQLTAEQVRIYDAYAGAFSIIHNNLEAAMRAANITGETGTLNGQAKSAARSAFESAKQRFFGHLLTSMKTPSLIRSIERDLDAGHAAVIQIVSTGEALMERRLAEIPTEEWGDVQVDITPREYVLDYLAHSFPVQLYEPFTDSEGNLCSRPVYRDGQPVESREAVVRRDSLIEKLASLSPVPGALDQIVQRFGTDMVAEVTGRSRRVIRKGQRLIVENRAASANLAETTAFMDDVKRILVFSDAGGTGRSYHAELSALNRRLRVHYLLEPGWKADAAIQGLGRTNRTNQAQPPLFRPVATDVKAEKRFLSTIARRLDTLGAITRGQRQTGGQGLFRPEDNLESQYGRDALRQLYMLLARGKVEGCSLERFEDATGLKLMDANGLKDELPPITTFLNRLLALTIQLQNILFTAFEQLLTARIEGAIASGTYDIGLETLRAESFVVTDRRTIYTHPVTGAETRLLTITQRQRNHPVSLDDALDRLSDQRAVPLINERSGRAAVQVPAPSFMLDDGEIERRVRLIRPMEQHSLPLKMMAESHWVEADRERFAAAWQVELAEVAEFTESTIHIVAGLLLPIWKRLPNESTRVYRLQTDAGERVIGRKVSAAWVANVLAVDEPKLATDKAFAALMEGRTVLELAEGLQLRRVRVMDAYRIELSGFNDAMRDRLRAYGLFGEIITWKLRMFVPTDTDGIEVLAKVLDHYPIERIAEREAA

SEQ ID NO: 13635 - protein, 523 aa, BradyrhizobiumColbertium
MTESLAGGAVAPLSIRATAVVASSVIRAARQLLTDLERSRRIDAAVLRGAMEAAFGASDATGVWNWKTAYNACEAATVLLLRRYGAVMRTKATSPAAMLPMLMRIASLLPTQTRRSVESESLQQFSTPIGLAFVASRAAAITPTDVVLEPSAGTGLLAILAELDGASLVLNEFAESRAGILAQLFPGASTTQFDAAHINDHLDAGIVPDVVLMNPPFSAAVHVDRQMREAALRHIGSALARLPEGGRLVTITGANVAPDNPAWTCSFKRLQEQGRVVFSAAIDGAVYAKHGTNVDTRLTVIDRVPADDVASFPVSPGIAPDLPTLLGWVQQHVPPRRPMAGTAAGVVPAIASPATPRTVRAYVAQRQSAAAVPAMPPVATEVAYEPVDWTPTDGGSITDSLYEAYTLQSIRIPGAQPHPTKLVQSAAMASVAPPEPSYRPHLPANVISDGILSDAQLESIIYAGEAHSAFLAAPGQSMRLLTSWRPRATTRKMPFAFAGAGSWAMALARGRAGRSPASCSTTG

SEQ ID NO: 13636 - protein, 705 aa, BradyrhizobiumColbertium
MACVVQKIKLSPSRDIPFNKLVLSQSNVRRVEAGVSIEQLAESIAQRTLLQSLSVRAVVDADGQETGMFEVPAGGRRYRALELLVKQKRMAKTQPVPCVIRDGGIAEDDSLAENDERVGLHPLDQFRAFKLLHDGGMSEEDIAARHFVSPAIVKQRLRLASVSPKLHDVYADDGMTLEQLMAFSVTSDQARQEQVWDNISRSGNDEPYQIRRMLTENTVRASDRRAQFIGLDAYEQAGGAVMRDLFAHDDGGWLQDVPLLDRLVTEKLKVEAETIAKEGWKWISVAVDFPYGHASGMRELEGKPVDLSPEEQATIDALNAEQAKLESDYQDADELPEEVDQRLGEIEQALMAFEDRPVLYDPTEIARAGVFISIDSEGRLSVDRGYVRPEDDVPATDADIEQSADPSSTGGQEAGACIRRAVIAVAGSAADADEDDEDAAKPLPDRLITELTAHRTLALRDALAESPAIAFQAVLHNFVLTAFYRFASSGSCLEIGLHTPTFPAQAPGLRESASAKAVEARHESWKARLPKSEKDLWDALTALDGGAQASLFAHCASFAVNALYEPANRYNQGRVSAHAVRTRLDQADVLARAVGLDMVQAGWRPTVDNYLGRVTKPRILEAVREARGESSAQLIDHLKKADMAKEAERLLDGSGWLPEPLRLVDPAASPAEEEGEAGPLPDFLADEEEGENAGDDDPQQLDAAE

SEQ ID NO: 13637 - protein, 316 aa, BradyrhizobiumColbertium
MSGHTARVRAGNDRTSLYTEITDKIIAELEAGRFPWVQPWGTASIKAPLAMPRNASTQRGYSGINVLILWGAVIEHGFSGQSWLTFRQALRLGGHVRKGERGTTVVYADRFTPDDERRRATEAGEEPGAIPFLKRFTVFNTDQCDGLPEDVAALVVPPPPGQIEPRAEALIAATGADFRIGGARAYYNTTGDFVQVPPPAAYFEPINWHRTVFHELGHWTGQASRLNRDHTGSFGSKSYAREELVAEMAGAFVCASLGIVPTVRHADYIGSWLEVLREDNRAVVRAASAASKAADFLLGFLPPAIDSVVGGSEEAA

SEQ ID NO: 13638 - protein, 308 aa, BradyrhizobiumColbertium
MEFFSRLPPALVAMEACGASHYWARELQSLGHEVVMIPPQYVKPYVQRGKSDAADAEAICEAASRPKLRKNFVPIKSPEQQGAQMVARVRNQFIGRRTQLANSIRGYAAEFGFTAPKGLSRLQQLLIDIQADATVPELTKELVDALATELTRVDDQIAKLDKKLMQLHRSNEMSRRLAAIPGVGPIGATLLSIKVVDARAFKSARNFAAWLGLTPKNHSTAGKNRLGVITRAGDGMLRTVLVAGATAVIADMRRRESRSWPWLKDIIARKPPKLVAIALANKLARIAWKLMVSGERYRPASNVMPMPT

SEQ ID NO: 13639 - protein, 60 aa, BradyrhizobiumColbertium
MVAANRELPASGYALEVDGRLKTEFATKDGARAGGEELKKRFPMLQIRIYDAQTNSREEI

SEQ ID NO: 13640 - protein, 54 aa, BradyrhizobiumColbertium
MFRVANAALTKFNNYFGDQFCDGITAINQAELAQGALISIGQNRYFIRAQRRIL

SEQ ID NO: 13641 - protein, 373 aa, BradyrhizobiumColbertium
MNVRYRVELSQAERDELTEMLGSGKNAARLSLRAQILLAADGGCRDEEIARTVSVSLSTVGRTRRRFVEGNLERALSEEPRPGAERKLTGKEEALLVATACAKPPAGCKRWTLTLLADTMVKLTDHNSLSGETVRRRLAENDLKPWRRDMWCIPHVDGEYVARMEDVLDLYAETQNPARPLVCFDETPIQLIGEVRQPVPAQPGQRERYDYEYRRNGTANLFVTFDPHRGWRNVKVTDRRAAVDYAHCMRDLVDVHYPDAACIRVVQDNLSIHKPGALYEAFAPAEARRILRRLEFHFTPKHASWLNMVECEITVLQRQCLGRRIDDPKRLRNEIAAWQKRRNKTRARIKWMFTTDKARTKLGRAYPATAKES

SEQ ID NO: 13642 - protein, 93 aa, BradyrhizobiumColbertium
MSQKSGARLTEKQGYYLAFIHTYAHMFGRPPAEADIQRHFRVSPPSVHQMIVTLERNGFIRRQPGVPRSIEILVPPETLPILEWLGIKTSKSL

SEQ ID NO: 13643 - protein, 68 aa, BradyrhizobiumColbertium
MSSVSQPNEHDNGLEAAVDQAIAVCDGDPRAAVRALIIANNLLESEIAELRNAVSHAYTRGRFRTYTG

SEQ ID NO: 13644 - protein, 98 aa, BradyrhizobiumColbertium
MKHQNTWSFITADQAEQMGADMAIQFMLMTLFQLLSEMADDPRGFRTDIHRELTDLVASQKLPPMPRDTERKVRAAAGKILDGIVMRSFEQNGVRKSS

SEQ ID NO: 13645 - protein, 98 aa, BradyrhizobiumColbertium
MPSSSKALMAATKKRAEELQAKGKTVDFNELLRMEPDNGTTNIRNVKSKHWTRWLGVENRCVVPFNSFSEFNKAEGGDIWFALDEPRPLACFAGIWIN

SEQ ID NO: 13646 - protein, 154 aa, BradyrhizobiumColbertium
MRKVKEGETTNDLYAFLTTEPNAEIGAVYPKAMPVILTTPEEVETWTTAPSDEALKAAAASTRRDAADRRPRCQGRPARVGGMTGKTSGRSSRQGHLCLGRVIRMRRRAGFALRPQARSARQCRIASAENGPPQEHEHSDTEGGTRDRMQRRDR

SEQ ID NO: 13647 - protein, 84 aa, BradyrhizobiumColbertium
MARWMVTVLVTKDKDQIGHEMYAVAINDAAQAIETVLKAAAGEAAVVNGRIDETWMRSARLKAVGILKILDNKADPLTSRVKRH

SEQ ID NO: 13648 - protein, 870 aa, BradyrhizobiumColbertium
MTAKPKLDAEELDQLEEAVKRDARIAAGTSPVWPALTKTHLKAGNKFAPVTVLGSIGPLRNIDRLAAGQPPIKFAINGITLIYGANGSGKSGYCRVAKKICHCLHDVTLRGNVFEPASADPREVTLTFRVDGEKARTVVWDDRNAPPPELGRISVFDSDAAGLYVDAERNIEFLPFELALLTNLAEAVRTLDGRFRAEEARLVKAHQAPLPQGYDKPTKISTMLARLKADEQLPDEASMRSFAVWEEKDEADLQAIKLELGSDPALVKRVKEAAKSAVDTFVADANAIFKALGNDGLAALKEARQKAAQSRDAAKAAASALAAESAVPQLGSDTWRQMLMYARDFAAEAFPTVEPPQLANANTCVLCHQPLDAQAQERLAAFDAYVEGRANADAEAAKKDFGERAKAILDLKIVGGQDIKDKLVNFVEASKPRQALVDRLDQFYTASQERHSLASLAIKAVDYASLGGLPDLDRIVIDDLVAEATVLAKEIDDLKPTPDQAAKRIQRQQKLDELEARKKFSADIETFVARRNSLELLVKTKACTTACSVAGITSLITRMRRKVLTTSLQNSLQDEIGALDLGHLPLKLSDRGEVGKSKVQIGLEAKQKVGKNSDILSEGEKRALALAGFLAELKEVGVRHGIVVDDPVSSLDHARMEAVAKRLVKEAKARRQVIIFTHNLFFHHAVFEEAKDMKVPLRQEWIAKHGDGRFGIIDDGQQPWVSMSVTKRLPIIDGLLKAKKPTYSEADEAERSFVTSIYTKMRETWEHTIEEVLFAGVVGRFRPNVATMQLRAAHVDKSDYETVYAGMTRCSKYSGHDQAAGVPADLPKFTEIEADFNKLNSYVVAANTRRKKLEDEGRNSEKSPMPADTL

SEQ ID NO: 13649 - protein, 54 aa, BradyrhizobiumColbertium
MKQPDLSKLLRGQFKLVSVEKLMRMLTAFDQDVEITVKPHRKRGEAGRITFIPA

SEQ ID NO: 13650 - protein, 48 aa, BradyrhizobiumColbertium
MVIERFPILSELFALLAQLLGFARDLGILAGKLFLKTLASLREEGGRQ

SEQ ID NO: 13651 - protein, 348 aa, BradyrhizobiumColbertium
MVAAEAKKAREAAAAELKAKADETAELRQALEANNLKLAEAQQAQAELMRKQRALDEEKRELDLTIEKRVQASVDQIHAKARQEADEAARLRVAEKDQTIESMTRTIEELKRKAEQGSQQSQGEVLELELEELLKSRFPMDVIEPVGKGELGADMIQQVNGQLGQPAGIILWETKRTKAWSDGWLAKLRDDQRRSGADVALIVSHTLPKHIEHFDLVDGIWVAHPRCALPVAVALRQALVDVSSSRLVQQGQQTKMEQVYHYLTGTKFKQRVEAVVEKFNDMRDDLDRERKFMGRQWAKRETQILAVVDSTVGMVGDLQAIAGKAMPEIPSLDVQLLEHDADTERKAG

SEQ ID NO: 13652 - protein, 657 aa, BradyrhizobiumColbertium
MSELAKGIEAFVAYAKTLKGDEKGEAQVFCDRLFQAFGHKGYKEAGAELEYRVKKASGKGTNFADLVWKPRLLIEMKKGSEKLHLHYQQAFDYWLNAVPNRPRYVVLCNFKEFWIYDFDKQLNEPVDIVRLEDLPNRYTALNFLFADNPDPLFGNDREEVSRIAAAKVAQLFRSMVARGVPREQAQRFVLQAVVAMFAEDIDMMPAGTTLRMVQDCLEHGQNSYDVFGGLFQQMNNKTAAKGGRYKGVPYFNGGLFATVAPVELTKKELELLGKKDEGAAWQNWAKINPAIFGTIFQQSMDKGERHAYGAHFTHEADIQRIVGPTIVRPWRERIDAAKTMTELLEIRKALLNFRVLDPACGSGNFLYVAYREMVRLEIRLMARLDKEFSWKTIQKQAQATSLISPRQFFGVDRDSFGVELTKVTLMLAKKLALNEAADVLERDQIELPLAEDDALPLDNLDGNILCRDALLSEWPEVDTIIGNPPYQSKNKAQQEFGRAYLNTIRGAFPDIDGRADYCVYWFRKAHDQLKPGQRAGLVGTNTIRQNYSRISGLDHIVKHDGTITEAVSTMPWSGDAVVHVSIVNWVKGEDDGKKRLYIQSGNDPAGGWDYKDLEEINTSLSFSTDVSQAERIKANAEKGGCYQGQTHGHKGFLLAVC

SEQ ID NO: 13653 - protein, 374 aa, BradyrhizobiumColbertium
MLFSRVATRTVLAVGLIASSSIAKAADEQAPAPAKVPVKANPIPEVPFFIVNDNRLTYSYQFTATDPGAFSTQPNGTINGTTAKQVYSFTHFDIWAYGTNFFNVDMLKSGHNDPASPCSPTGTLPFGPPGACAGATEFYAIERSTFGWNEIFDTKAFKIGPLRNISFEAGLDLGTANSYYAPTTNNVVAGLQFAFDLPYKGYFNVAPLVVDGLASHKSFLQCGLYSPGVPGVTCLADGNRVFPPTWRIETNYYMDLGFLPESMRYFAISGRASATGPKGDINTLPALSGVGRFSTASKIELNSEPIRLTFDASKAFWGPKYSHFVDVWVAYRYWHNKYGLDSNATPGTCTVAATGVSTNSCTEKSASAGVSMKF

SEQ ID NO: 13654 - protein, 328 aa, BradyrhizobiumColbertium
MLLYSPPKAATSIPVVDISDRTDAGKLKTAAAIQRACCETGFFYVAGHGVPSQLVRNQFDAAKSLFDLPIEQKMALHMKKSPASAGYEPVGGQVLDSQDDKDAKGPPDLKESFYSGAELPEADPWYQRRVRAFGHNQWPDLPGFREQNLAYRRAVSALGDRILALMALSLDLDERWFEAFYNVPSATLRMIKYPPQALGANFNQIGAGAHTDWGGITILAQDDVGGLEVRNADNEWITAPPAPETFIINLGDLMARWTNGTYNSNMHRVNNNTSHQDRYSIPFFYSPNPDAVIDAIPTCVTPDNPRRFATCTAAEHIGEMFRRSYSVV

SEQ ID NO: 13655 - protein, 566 aa, BradyrhizobiumColbertium
MSLADRLKPIDPVMQPGRQDSVRASRLRRRRRMLIFERLAAPVLGAALIIGWEIVARYSGISEFVLPRPSAIFARMITSYPLLLTHAGVTAIEVIGGFALAAVVGVGIALLIFYSRILEVALYPILIALQTIPKIALAPLIVLYFGYGWGPKVFLSFFISFFAVMVATVVGFKSLDQGYANLARSMGASERQIFLKIRLPAALPAIFGSLKVALTLAVIGAVLGEYVASERGLGYIQLQANSNFDTTLNFAAVASIALLGVGLYMLLLVAERVLITKRALRPMTAELPRPTAKDTSTDTTGVSVQLQKLSKNFESAAGEELSALGEINLRIEPGEFIAIVGPSGCGKSTLLSMLAGIDQPSTGSLRVDDDILTGPHPRAGAVFQVDYLLPWRTILDNVLLPIEIKGLDRRKYSLFAQKLLAQVGLNGFGSKLPFELSGGMRQRAAICRAIIQNPGLFLMDEPFGALDALTREQMISDLQALWMRLKNTVVFITHGIDEAIFLADRVIVLSPRPGRIDLEVKIDLPRPRKWADAHLHPQFHQAMVDIRNCFEKQGVLHVENPKQLSV

SEQ ID NO: 13656 - protein, 333 aa, BradyrhizobiumColbertium
MIPSGRKMKMLQRLIAGATALLMSSAVAYSSESVNVRYSWKLKGEYAAFYVAKEEGLFQEHGLDVSLGEGAGASAALGGLLQDKEDVVVLPAAFALTAISKGMPIKIVALYHPKTPLGILSFPDKPVRKPSDLEGKSFIVAPGDTVATYLPAFCKINNVDCEKISKVSVGIEARNSQFLSRNVDVIGTYLNVDAPLLEQQAKQSLITLNLADNGLTLPGLSIVTSDAKLSRESEKISEFLAALNRGIGVMKDNPGVATAELVKNWAAPPSNDVVEKQVIETAHAIPQVAGKPFGWIDPALLQKALDLLKGVGEIQEIKPLDSYYTNSLLARSK

SEQ ID NO: 13657 - protein, 317 aa, BradyrhizobiumColbertium
MGAAAASIDQAHGDDRRLRRGRVGGIGSITYGGLRDPGNILAARVVTVEEEPRVIELRGDAAQKVNRAYGTTGIITALEMPLAPAWKWIDVVVAFDDFLDAAAFGYEAALADGIVKKVLAPITWPLPSYFGALKPHCPDGKSVLLAMIAEPSLESFRSLLGRRGTITLEMPTDDSPSRIPLYEYCWNHTTLQVLKTDRSVTYLQCLYPHERVLEKVVEMRELFGDEVLQHLEFIRFGGRITCSSLPVIRYTDADRLNDIIRLHEERGVFIANPHVFTVEDGSRYKRADADQLGFKREVDPHGLLNPGKMRSFVSERP

SEQ ID NO: 13658 - protein, 40 aa, BradyrhizobiumColbertium
MHDLPPDRDEAIIPPEQRAKIEAELAAARDRQAVATKDAK

SEQ ID NO: 13659 - protein, 406 aa, BradyrhizobiumColbertium
MEEFYRIRRLPPYVFEQVNRAKAAARNAGADIIDLGMGNPDLPAPPHVLEKLKETLGKPRTDRYSASRGIPGLRRAQAVYYGRRFGVKLNPDTQVVATLGSKEGFANVAQAITAPGDVILCPNPSYPIHAFGFLMAGGVIRSVPSEPTPQFFEAAERAIIHSIPKPLALVVCYPSNPTAYVASLDFYKDLVAFAKKHEILILSDLAYAEVYFDESNPPPSVLQVPGAMDCTVEFTSMSKTYSMAGWRMGFAVGNERVIAALARVKSYLDYGAFTPVQVAATAALNGPDDCIKEMRDTYRKRRDALVESFGRAGWEIPPPEASMFAWVPLPEAFRSVGSMQFATLMVEKSGVAVSPGVGFGEHGEGYVRIALVENEQRIRQAARGVRRFLESGIETLHNVVPLANRR

SEQ ID NO: 13660 - protein, 417 aa, BradyrhizobiumColbertium
MIETQARVLAGRSGRGIRVVAVTARSKAKKRGIDLRGFEWAKDPIALATHPDVDCFVELMGGAGDPALSAVDAALSAGKSVVTANKALLAKHGVKLAKVAEKHGGALNFEAAVGAAIPVIKTLREGLAGTGIDRVYGILNGTCNYILTRMEQEGLSFAECLKDAQRLGYAEADPSFDVDGHDTAQKLAILASLAFGTKVAQSAVYVEGISSIAPEDLRAAADLGYRVKLLGVAVRTAKGIEQRVHPTMVPKSSSIAQVMGVTNAVTIDGEGIPPITLVGPGAGGAATASAVVADIADVARGIRANPFGRPISQLHDTKKAPMERHEGGYYIRLLARDFPGTAAAIATRLAEQKISIESIVQRHPNGGAAPANGKAAPVPVILITYATHEDAVRRALAAVQKDKVISGRPQVIRIEKN

SEQ ID NO: 13661 - protein, 333 aa, BradyrhizobiumColbertium
MSTHISVPPQALLERILTLEIVRVTERAAVSSARLRGHGNEKAADQAAVDAMRRELNKLPIQGTIVIGEGERDEAPMLYIGEQVGLKAGPEVDIAVDPLEGTTLCAKNMPGSIATMAMADGGTLLHAPDVYMQKLAIGPGYDRGVVDLDASPADNVRRLAKAKGVKPEGITVLVLDRPRHADIIASVRSTGAAVRLITDGDVAGVIHCADPDNTGVDMYLGTGGAPEGVLAAVALRCIGGQMQCRLILDSEEKRERAAKMGVNDPKMIYGIEDMARGDCLFAATGVTTGSLLSGVKFRKDGVIETETVVMRSVTGTVRYIKAEHRELAKFHLD

SEQ ID NO: 13662 - protein, 239 aa, BradyrhizobiumColbertium
MSDLSAVKALVFDVFGTVVDWRTSLITDFMWWAKGRGISADWTALVDGWRGMYMASMDDVRQHPERGYVMLDDLHRRSLDKLVEKFAIKGLTEADLDYLTKGWHRLHPWPDSVAGLTRLKTKFVISPLSNGNVALLTNMAKFAGLPWDLILSAELFEHYKPDPETYLGAARLLCLKPEEVMMVAAHNGDLAAAQKNGLKTAFVARPTEYGPLQKIDFEATGNWDIVAKDFGGIADRLGC

SEQ ID NO: 13663 - protein, 296 aa, BradyrhizobiumColbertium
MARAPKLGTQTPYWHRFVLGDAEVTVVSDGPLPLGDPSGTFTGVPKEEVKKMLSDNFLSPDNVVLEQNSPIVNTGDKLILFDTGMGSSKMFGASTGRQQKSMTEAGIKPGDIDAVVCSHAHIDHIGGIVDEGGKPLFPNAQIYIAQSDFDFWTDEGKLGSAAKDFVIHARKNLLPVRDRIVFFKDGQEFLPGVQAIAAPGHTVGHTIFMVSSAGKSFAFLGDLSHHSVLLLERPRMEFSYDSDPKQAAESRVKLLTMLATNKIPVMSYHFAWPGYGHVAKVGEGFRYYPEPMKMTL

SEQ ID NO: 13664 - protein, 119 aa, BradyrhizobiumColbertium
MPVGRLSTKLGRPRHRAAAEHGASTRPAPSASRDRRETSIVMRFLRFIFRNHLRVATGLEPAARCCAGLNKLASGIGSGLIAALKAGTEILAHGIRAVADVLAVRTIPWVGARQARFVS

SEQ ID NO: 13665 - protein, 358 aa, BradyrhizobiumColbertium
MSAALGLKTKPSATEPADDDSDVSALINRLTAEVNQIAVDKTKSIQQITNQMKMLALNALIESSRAGAQGAGFAVVAQEVRGVGQQVETIARELETQLTKRTGDLVASIERMSQRSRGERMVDLSLNAIELIDRNLYERTCDVRWWATDSAVVDCAASPSAAAVSHASQRLGVILGAYTVYLDLWLCDLDGNVIANGRADRFRVVGENVAHTKWFREAKGLRSGDDYVAGDVENQPLLGNAQVATYCASVRAGGQANGAPIGVLAIHFDWEPQARAIVQGVRVGDSDKARVLLVDSNFRVIAASDGQGILSERISLSLNGQRSGFYHDRTGTLVAFHATPGYETYRGLGWYGVIVCGA

SEQ ID NO: 13666 - protein, 632 aa, BradyrhizobiumColbertium
MTVRPRDRLDPSSNSLPPVMTPPATALPVEAPQAFLGVSRSLTDKLWRDRLDGRGAAQALAIVQRHQLPELLARVLAGRGVDIDAVPDFLDPTIRKLLPDPFTVTEMEAAAKRIADAAARTEKVAIFGDYDVDGATSAALLAWHLRHCGLDPLIHIPDRIFEGYGPNTEAVRALAAKGATLLVTVDCGTTSMEPLAEAKRLGMSVVVIDHHQCGLDLPEVDALVNPNRPDDLSGLGHLAAVGLVLVTLVAVNRELRQRGFWSNEMPEPDLLGMLHHVALGTVADVAPLIGLNRAFVAKGLIAMRRRDHVGHTALMDVARLNGPPEAWHLGFMLGPRVNAGGRIGRADLGVRLLLEGDSVEAARIAAELDRLNSERRVIEQAAEAQAEAEALASIGLEDKLAVIVTASEGWHPGVVGLVASRLKEKFARPAFAIALEPGGIGTGSGRSIAGVDLGKAVRQAVADGILLKGGGHAMAAGVTLRKEKLSEFRAYMEQALARDVAEARHVNELYIDGAVSARAVTPELATTLNRAGPFGSGNPEPVLALPAHQLVFADEVGQAHLRLRFKSGDGAIVNGIAFRSVGQKLGNALLANRGQQLHVAGSLSVDRYQGAERVQFRVVDVALPDQGPSVIR

SEQ ID NO: 13667 - protein, 269 aa, BradyrhizobiumColbertium
MAGQVEGKVALVTGGASGIGEAVVELFAREGATVIATDIDELRGPELARRVTQAGGKAIFLEQDVTSEERWMEVVAEIAKRYGRLDILVSNAGIGIAVPSIVDMTLSDWRKQNAINLDGVFLSVKHCLPLMRKTGGGSIIMMSSLAGLRGAPGLSAYSLTKGGVRLFAKSIAMECAAVGDGIRVNSVHPGIIDTPIWGKIPTGATGAGQNAPIDPEERARVVTPLGRAGQAAEIASGVLYLASDASRYVTGSELVIDGGMNAGGVPRRA

SEQ ID NO: 13668 - protein, 269 aa, BradyrhizobiumColbertium
MSFAMAHSLHASSPAPAPIRSNRPDLATDAIRTAREDLAACFRMAARNGFEEGICNHFSAVVPGHDDLFLVNPYGYAFRELTASKLLICDFHGNVLDGDGVPEATAFYIHAEMHKRLPRAKVAFHTHMPFATALSMTEGDPLIWAGQTALKFYGRTAVDRDYNGLALDNREGARIASAVGDADIVFMKHHGVMVLAPTIAEAWDDLYYLERAAEVQVLAMSTGRKVLPVDPAVAAETYRQMREGDAESARLHLVAIRRQLDAEEPQYRH

SEQ ID NO: 13669 - protein, 409 aa, BradyrhizobiumColbertium
MTQTDSCAQYTRRTLLKSALGATALLASADRALAAPAGFDEWRETFRVRATAKGISAATWQRAMGRVEPDMSVFRQMRNQPEFREEIWQYINRRVSDWRIINGKIALKNNEALFARIERDFGVERGTLLALWGVESAYGDPLVQQNHMRPVFPSLAALAWNEPRRKTYWETELINALRIVEKGWSTPEEMRGSWAGAMGHSQWMPEVWLNVGIDYDGDGRVSPFGKPDDALGSTAKYLVNRGKWHRGEHWGYEVRAPGNLSGRRTYAAWQAAGVTRADGRSFPQPNASAQMWTPVAGGPTFLLGPNFYSVKSYNPSMNYALAICHLGDRCLGAPPFIQPFPGSERALTLAEVQEMQTRLTKAGFDTGGTDGRVGNDTMKAVKDFQQRAGITPADGYGGLKVLAKLRQGL

SEQ ID NO: 13670 - protein, 99 aa, BradyrhizobiumColbertium
MSQSCIPSEGNEEEKMRKVLFAAAMATAIAAPAFAGEVGVHVGPVGAGVTVGQSPDYRVRERDRTTVIKEREPSSRTTVIKKEDEFGNRSKTVIHHDND

SEQ ID NO: 13671 - protein, 83 aa, BradyrhizobiumColbertium
MKIRAHAESHVVELDDGSQWQIFPGDLAATLSWKPETDLHLERSADRVSSHVLVNTADQSCVRVIAADETWPDGEVKNALKDG

SEQ ID NO: 13672 - protein, 171 aa, BradyrhizobiumColbertium
MTRKAKHVVRPGRKALEAGTVHVPAPGEGKRGEQGYLGYLLRQAHAAVRLKMERTLADLGVTSPQFAVLTMLNAYPGLSGADVARLTFLTPQTVGVIIRNLDRDGAIAMTPHPVHGRIQQWTLTLRGATLLKECRQRVLELEKRLARDLDRKAEAAIRHWLAAIATDLQEG

SEQ ID NO: 13673 - protein, 159 aa, BradyrhizobiumColbertium
MSHARSEYEDFKKIAPDAYDLVLALGQLAAKAGLDKQLLELVKLRASQINGCAFCVQHHILLSERIGVPADKLNLVAVWREAPIFSSRERAALAWAEALTCLPEGVSEEVYAEASREFSETELMYLTSAVASINVWNRFGAAYRWTPAKRPAVAAAAAS

SEQ ID NO: 13674 - protein, 167 aa, BradyrhizobiumColbertium
MSAISVSALPYPAPSRSTALAVVAGLACALAIGKALPVTIDSVSDALAPLCATAAESSPLDKIEPIGSYALPNVPGKRVTIVRVSYGPGGFSRPHRHAGSVTAYITKGEIRSQLGGGPVETFGVGQSFFEPPGSTHLVSANASMTEPAELIAVFVADEGAQLTTFLD

SEQ ID NO: 13675 - protein, 350 aa, BradyrhizobiumColbertium
MPGYARLSSRTTASSNEEGTGLMSVGLIGLLDDIAGIAKVAAASLDDVAGQAAKAGTKAAGVVIDDAAVTPNYVIGFASKRELPIVGKIALGSLRNKLLILLPVALLLGYFLPAAVTPLLMLGGAFLCYEGAEKVLEAVLPHHAHHHEAQLQPIALNARSVEDEKVASAIKTDFILSAEIMAITLAAIPAGSIWTQALVLALVGVFITVGVYGVVALIVKADDAGMALARYDGASVIGGAIRMLGRALVRGMPIFLAVLSTIGTAAMIWVGGGIILHGIEKYGPPAVGHTVHAATEAAAHLLPSVAGIIDWSVEAAISGVVGLLVGAIAIPVVEYGLSPAWKLLRRSEPA

SEQ ID NO: 13676 - protein, 532 aa, BradyrhizobiumColbertium
MGRKSLRFVSLLLALPLLVATPLAADEFRSPSLTALRVDWRAALDQLRIEINSRPQIAGEFIFAPRRSVPRYDPRAMPALVQLNAVSSRFFTGIARSPVPVLLPFDVAAYIEAQRSGAPVTLALSRYQADFNPVDMFHAGPAGYSATFSLEPGAGEGMPSRVFARPVEVQITGSALVYDIADPAGGKGEPVKPLATTYPDLRRFIREGYVRYAFTRFGAAYVVSIQCLDSVAKPRRLACKEAYPVAERFLRALRVAGGQRMRPLTDIASNVIDRPAARSPDFSYRPSGDIIPNTGYRKQGGHPDAMAYAQIRFPLEKAPAFVRSQSYGKRDKSGEGPTAYPWRDNFCEARSFEVWQCAGGYGHQGEDIRAADCPSPGEGREPCDPKQRAVVAVRDAIVIRGVRDQAATLQINSRTEHIRFRYMHMNPQAMNADGLVNGRLVSEGEKIGVVSNYLDRPAGTSLHLHFDVQVFTRDGWIWVSPYVTLVSAYERLIRARGREIGPDIAVTSQPVAHALPEDVIKPHRREGSSGDN

SEQ ID NO: 13677 - protein, 188 aa, BradyrhizobiumColbertium
MRVIASSIRKGNVIEQDGKLYVVVSAENIHPGKGTPVSQIEMRRISDGVKISERYKTTDQVEKATIEERNYTYLYEDGDGYHFMNPETYDQVQVSKDVVGDAAAYLQESMTVKLSMHDTNPVAIALPQRVTLEVVETEPVTKGQTASSSYKPAVLSNGVRTTVPPHITVGTRVVVMTEDGSYAERAKD

SEQ ID NO: 13678 - protein, 350 aa, BradyrhizobiumColbertium
MAGDKPLSPFWAPSRHLDRRPFLQARGAVTGALRGFFAEQGFTEVETSVLQVSPGNETHLHAPSTEIMRPDGSRASRYLRTSPEFACKKLLAAGETRIFEFARVFRDRERGDLHLPEFTMLEWYRADAPYDAIMADCIVVIARAAQATGIGSFSFRGRTADPFAEPELLTVAGAFERFAGIDLLSTIPGGEANRTALAAAAGAKVRVAEDDSWSDIFSKVLVEHVEPHLGQGRLTILFEYPSPEAALAQAKADDPRVAERFEVYACGVELANGFGELTDADEQRKRFTESMIEKQRRYGEAYPLDEDFLAAVAAMPEASGVALGFDRLVMLASGATRIDQVVWTPPADDR

SEQ ID NO: 13679 - protein, 364 aa, BradyrhizobiumColbertium
MTKANLARTLREPAELIAEGLAPAAALPALERVAARYAVAVTPDLAELIDASDPDDPIARQFVPTAAELDLKPGENADPIGDHPHSPVPGIVHRYPDRVLFKLVHVCAVYCRFCFRREMVGPGKENALSDSAYRAAIDYIRAHDEIWEVILTGGDPLMLSPRRMSEIMADLAAIQHVKIIRLHSRVPVAEPARISDEMVAALKVDGATTWIALHANHARELTGAARAACARLVDAGVPMVSQSVLLRGVNDNIVALSDLMRAFVECRIKPYYLHHGDLAPGTAHLRTTLAQGQDLMRQLRGRVSGLCQPDYVIDIPGGAGKSPVGPSYLLTTQNTALPADDAGAETRYRIVDYCGDVHLYPPET

SEQ ID NO: 13680 - protein, 84 aa, BradyrhizobiumColbertium
MKKIMLAASLVLLLGDGAMAQTGGSKGPTSGSGIPATVLPAPVGHRQPRAADVPSEKNLSNPNTPANKEDAELDRKIKSICRGC

SEQ ID NO: 13681 - protein, 361 aa, BradyrhizobiumColbertium
MLSTTDDLRIRELKELSTPEEVMREVPRTLTATRVVMAARNAIHAILSGQDDRLLVVVGPCSVHDPKAALDYAERLAKLREDLADQLEIVMRVYFEKPRTTVGWKGLINDPDLDGSFDINKGLRLARNVLSAVNNLGLPAGTEFLDMTTPQYIADLVSWAAIGARTTESQIHRELASGLSCPVGFKNGTDGNVRIAADAVKSASHPHHFMAVTKLGRSAIASTAGNEDCHIILRGGSKPNYDAASVAAACNDLTTSGVAPLVMVDASHANSSKKPENQPVVMADIAAQITGGESRIMGVMIESNLVAGRQDVVPGKPLTYGQSITDGCIDWPTTASALEQLADSVEIRHNIRRAGRHERSA

SEQ ID NO: 13682 - protein, 192 aa, BradyrhizobiumColbertium
MTSPEEFSRLQSAMNQAVKTHWKAFLFEGILLVVLGIAALILPPLASLATTIFLGWMFLIGGIGGLIATYWARSTPGFWWSLISAALAVLTGMLLLARPMQAVLTLTIVLGAYFLAEGVATIMYALEHRRELSGRWSWLLISGLVDIAISFMVITGLPSSADWAIGVLVGINLLFGGASLIGMALAARKDST

SEQ ID NO: 13683 - protein, 346 aa, BradyrhizobiumColbertium
MYLIEALPTVVGTAAIAPALLMLWLVIAAEERPGPPAQVWTAFLLGAASISLLGLARAPFAKMVAAPDDPWAALAMHSIFGVALPEEAVKVIAIVLISSTKRRTFANPMDTVVYGAAVGLGFAAYENLAYLVQHADMWRSLAALRSVLTVPFHGALGIIAGAYLTIARAGTALGANRHHRDWARLSSRLLIFAAPLALHSAFDFPLLTLQRMPDLDPTLRMWLGAASLLIGFGSIAFAIRLVRRVARHHAPRTDLARERLSQLRRMWALLLAGGGIGFLGLAFVLTSIHHWLTNPERNLTLALIPIGFVSILLGLALLIVTTAIYILGRNRIRTSADGFSSAPGGG

SEQ ID NO: 13684 - protein, 90 aa, BradyrhizobiumColbertium
MAVDKITVDKIKVGKITWDRVGRVTEPGRYIYTFGWLTITAGDLEIWRRYPQAAFTLLAQPSESLESVGEEFHLGAFDVAPDAPPPITTH

SEQ ID NO: 13685 - protein, 195 aa, BradyrhizobiumColbertium
MAVSGSYSLPRWYDCEGKLRSFACRTKRVSPFRMIVDVPVVGKVGERVTSYFQDFGEFQSTISATLKSGFLMELDMTRARRAWMSEKLTWLEKKQKDDSIRELRRDARFVPQVSHTVLTLADGSTHPCFIIDVSTAGVAVSSEHDPAVGTPLAVGACVGRVIRKFNHGFAVKFAEKQPRDDLVRLIVRAPMLKSA

SEQ ID NO: 13686 - protein, 221 aa, BradyrhizobiumColbertium
MEQRQTIPNDSSGAASPPPPWMHRAAAHPPDRRARMLEHMARARSLPQPQAAALRPTAKTPLAAGLAILGDACGYAILFGTITLLFQSHVPLYLGAFLFLADGKRIESLLGAIGLRFEPDAIGPDIVKGCAFWFAWIALLVSLRGSAPAWLAPWMPPAESWASIAVIILALAAFDAVAALAIRRAGARFGLAIRPDSLIWTTIKFAIVVGLLALLVLLGAV

SEQ ID NO: 13687 - protein, 84 aa, BradyrhizobiumColbertium
MPPPKKRAARKLLSQHAWITLDGGFAARHCLVQDISDSGARITLDEDASQLPGVIRMAFARDARTGRSCQVVWRRGKSAGVKFI

SEQ ID NO: 13688 - protein, 93 aa, BradyrhizobiumColbertium
MARPLRSGYKAAMRMPLLVLISLMATSAAAAESLRLPPAERPQAGKALPLKGTAGKAGAGSCASYGPRFVMVEGTGTCVKIGGAISIDTAVRR

SEQ ID NO: 13689 - protein, 55 aa, BradyrhizobiumColbertium
MPADLLRLDLIVPVLMYCALLWWIGRGMSWTARLATVAVTLVLIVIVLLVERGWR

SEQ ID NO: 13690 - protein, 212 aa, BradyrhizobiumColbertium
MPETKLTIWGRANSVNVQKVLWCCTELGLPFERIDAGMQYGKTREADYLAMNPNARIPTLVEGDFVLWESNSIMRYLCLAHGRGTPIYPEAPKQRASVDRWLDWTLSTVQPVDRPVFWGIVRTAPAERDMIQVQRDADAAAEVWAIANRLLTTRSFIDGDAFTLADIAIGCYARRWLGVEGITRPAQPHLTRWLSELGKRPGFAQFVAPPMS

SEQ ID NO: 13691 - protein, 63 aa, BradyrhizobiumColbertium
MRDAARLSCKKLRTWRSFHCKVQPDGQRPKNSHNRMITGIGTPIIHSNSPLAIASSSNCITGG

SEQ ID NO: 13692 - protein, 150 aa, BradyrhizobiumColbertium
MRYLHTMLRVSNLDVALKFYQDALGLKEVRRIENDKGRFTLVFLCSSDDLEALKTQPPTRGAPLVELTWNWDEEKYGEDRFFGHLAYEVDDIYATCEKLMKAGVTINRPPRDGNMAFVRSPDLHSIELLQKGDPKPPQEPWASMPNTGHW

SEQ ID NO: 13693 - protein, 51 aa, BradyrhizobiumColbertium
MTQSRLAEVMALTPQNIALCWKALARGDTATATARSVRAEAMRRMGQYYCM

SEQ ID NO: 13694 - protein, 85 aa, BradyrhizobiumColbertium
MEISDIQDFAIQARLAAVLGAAEFDRVFAGVRFAEVEGPLLYVYAKDEAAAAAIEDDFALLVADIAGHILKQNIDVVVVLPKVLQ

SEQ ID NO: 13695 - protein, 43 aa, BradyrhizobiumColbertium
MRKALAELNEDERHALLYVADLGTAACLSGLIVSIIKLVGDLL

SEQ ID NO: 13696 - protein, 50 aa, BradyrhizobiumColbertium
MTKVSLQHQADRAEALAAQTADGEIREALLKAAQEYRAQLESDDDKADLE

SEQ ID NO: 13697 - protein, 50 aa, BradyrhizobiumColbertium
MPYFVCARDGAGQIILKRDTKEAAEKKAAELRDMGYFEVEIVAKGVEKAA

SEQ ID NO: 13698 - protein, 63 aa, BradyrhizobiumColbertium
MADNTQKDPKDWVSGDDPMTGAQESYLKTLAEQAHQDPPAEDLSKAEASELIDKMRQKAGLEE

SEQ ID NO: 13699 - protein, 77 aa, BradyrhizobiumColbertium
MPDLDFLRREIERMRIQMGRQRKEILQLQRAGIGTASAQALLSRMEAKVESLCAERDALKAAQPRQTKGRVLGGRTW

SEQ ID NO: 13700 - protein, 74 aa, BradyrhizobiumColbertium
MSRRWFDDERDLSPFLTALEDVRRRATREGWCYAHVQAIIVAIDQYAEAATGNREYFLNKPVSIGESRKAADIP

SEQ ID NO: 13701 - protein, 355 aa, BradyrhizobiumColbertium
MIVYPLYLVELAELHPCTRHSSRDHCAAEYRSSDLAPGTDVWSSGSGNIPQPGVLSASVSSGAACGPAGCWLRSADASAGTTAAWFLSALHCFCLTVRTGASKGPMDCRASPLPSTAGDCAVVIVVAGADATFQIKDEAPDRGWPKLRRNGQAMPGLATSNWRHLDMARDLSRDQEREGTRKLMMWGSAVAAILFVGSGLWLAAPQMFGMTDYVGRPTTGADSSAPATTVGTGVPTQRDAISTAAKEDPAVNEDSSGGRARQIKQSSQPANLSEQQRQQLQSVLSTAQGPAVDRPNFEMMVGTSVPRQTETADLPAEVTQILNGFWGDQYLIAGKSLVIVDHHSRRVAAIIADVR

SEQ ID NO: 13702 - protein, 70 aa, BradyrhizobiumColbertium
MSDLEQAIRERAYQIWMESGGQDGHAETHWLEAQREILSASLGSVARVSTVSTEKPKTKSAGPRRKRRAA

SEQ ID NO: 13703 - protein, 54 aa, BradyrhizobiumColbertium
MLQGLLSAIVETLLTSVWNAVVRFLRLENAVELTTAIVGLSCIAIGLAAFFLDH

SEQ ID NO: 13704 - protein, 68 aa, BradyrhizobiumColbertium
MAARTYNHERWSEDDDRLLRSMCETGKSLTLMIVKLKRPIASIRSRAIELGINLPGTRIGLRRKPRTA

SEQ ID NO: 13705 - protein, 90 aa, BradyrhizobiumColbertium
MKKIMIATAALGLMCGSAFAQNQTGPAPQSNNMQKPGMNSTDKGSMNQGTTGMSNDGMSKGGMVRPDASGQGGSGPGSDQGGTKTRSNMK

SEQ ID NO: 13706 - protein, 100 aa, BradyrhizobiumColbertium
MLDFDELRELAADVRIFVDVAEDKAEALRAVIAAYDVVLAIFPTEEGMGLHVIKGGEILDGIAKSRTHAMYSHTAIAVPDLAHAEALKFLTRPVEQRIAA

SEQ ID NO: 13707 - protein, 163 aa, BradyrhizobiumColbertium
MKVAIVVAGLIVIAVVAFVAIQPSFLKPASLALVKKSDIFGFSPGMTFEETSKLVSQRRYLCRRGRSSPSLECEINGAKVSVDSDESDARHPIWRVNATLSNPGSQEAAVKSISDQYNAQAIKSREGWTWIVGRGFKLSYDGLALNLVDEAAEARLRKDEAKR

SEQ ID NO: 13708 - protein, 50 aa, BradyrhizobiumColbertium
MDSREQCLLETRSDRDGALLIHARSHEAMGLRAHRGRKRKHGFCEVPDLL

SEQ ID NO: 13709 - protein, 98 aa, BradyrhizobiumColbertium
MAKMTKTQLIDAIAEGTQLSKNDVKSVIEYMATVGYKELNESGEFVVPGFVKMSVVNKPATEARMGVNPFTKEPMQFAAKPASKSVKASPLKVAKDAV

SEQ ID NO: 13710 - protein, 45 aa, BradyrhizobiumColbertium
MTVEKQREVIRLWNELRKLEGPAAEELRIQILECFSAKDKTKRAA

SEQ ID NO: 13711 - protein, 66 aa, BradyrhizobiumColbertium
MTPFSETSFYQGDRHTYRRVAIVGALFCLAFVEISFSLRPPQAEDTRVAVKADRLLRTAGQVPRAN

SEQ ID NO: 13712 - protein, 41 aa, BradyrhizobiumColbertium
MPVWLEVLVNLSGYAGFVALATCGAGCADTSTDDRMCSKER

SEQ ID NO: 13713 - protein, 64 aa, BradyrhizobiumColbertium
MVPKSDDQHYEEIVRSFGVGTLRPPPTPMSDRELARAIAEFLKEQPSSKSVATLGRRLDPSSPL

SEQ ID NO: 13714 - protein, 95 aa, BradyrhizobiumColbertium
MKKTLAVLATMAAVGVTAVAAPSPAEARGRGIGPGLAFGLAAGAITAGAVAASRPHGYYGPRYGYYGGPSYYYGPGPHAYYGGGPYHRHHHWRHW

SEQ ID NO: 13715 - protein, 54 aa, BradyrhizobiumColbertium
MTEDEERKEREREEIAARVAAFRATQEKFKRERDEYFVSTLENARKVERPSLWP

SEQ ID NO: 13716 - protein, 253 aa, BradyrhizobiumColbertium
MIALDLQSGVERLGDMIAESRIIVPFTGAGISTECGIPDFRSPGGIWTRNRPIPFDEFVASLEARNESWRRRFAMEEVFAAAKPGRGHRALASLYRAGKVPAVITQNIDNLHQASGFAGEHVVELHGNTTYARCIGCGQAYPLDWVRRRFDDDGAAPNCTACDEPVKTATISFGQMMPDDEMQRATALSQACDLFIAIGSSLVVWPAAGFPMMAKRAGARLVIINREPTEQDDIADLVIRHDIGETLGPFVGN

SEQ ID NO: 13717 - protein, 57 aa, BradyrhizobiumColbertium
MQPATSAALESRVFKRMFSIRRDANLSTQKITLSVARHRQKRDSPEPMNSLHSRESN

SEQ ID NO: 13718 - protein, 197 aa, BradyrhizobiumColbertium
MTPGEHGGAGRDSGLSPFSGLGETSANLVEVHGVIKWFDASKGYGFIVPDNGWPDVLLHVTVLRRDGFQTAYEGARIVVECIQRAKGYQAFRVVSMDESTAIHPAQMLPPRTHVTVTPTSGLERAQVKWFNRLRGFGFLTCGEGTPDIFVHMETLRRFGMTELRPGQYVLVRFGPGSKGMMAAEIHPETGSPGLQSH

SEQ ID NO: 13719 - protein, 160 aa, BradyrhizobiumColbertium
MNSDRKAIWSAAKGWLAAILVIIGCAAAAPAGAATFQPLEIVTKNGVQVFSVEMATTEDERRTGLMYRKELADGKGMLFDFNPEQEISMWMKNTYVSLDMIFIRADGRILRIAENTEPLSTKIISSRGPARAVLEVVAGTAQKYGIRPGDRVGHPLFGSK

SEQ ID NO: 13720 - protein, 53 aa, BradyrhizobiumColbertium
MSQIDRTEKLSNVPETGSSLLPLLGLGVAVIAMLGWICTLAWGAWRLVDWLLF

SEQ ID NO: 13721 - protein, 135 aa, BradyrhizobiumColbertium
METSLTMVLAEPPPPDPELPPAACEDDSDEVDEATSVDEAADVEDAADDDGVAVEADVVTAAVVDTIALIDMETSLEGDLGQSAGCAPDPCFTHTSRKAGAALRKNRPGRSTSSDGATKRSAVRCRFFPAISGSP

SEQ ID NO: 13722 - protein, 60 aa, BradyrhizobiumColbertium
MTIDGVTTTTITYSDGTTEVETSASTQGSPSGQTYNAQGALGTNAQNASGSASSATSQSA

SEQ ID NO: 13723 - protein, 64 aa, BradyrhizobiumColbertium
MPFDRNLKTVGSRSSWTEIWHLWTVIVPRRSINGQFVVGKVWRRHDGRDWIYKKFTEFDGEEAA

SEQ ID NO: 13724 - protein, 141 aa, BradyrhizobiumColbertium
MPTHFHAVVWIDHSQARIFHLGLSGSDEVTLHPQLATRHLHHKANSIGSGHAAPDKAFYTDVTKALAEAGEILIIGPASAKTELASHIRASAPDLAKRIVAVEAADHPSDAEIIAYAKRHFKLPLPRVQAPGSAAGERHTR

SEQ ID NO: 13725 - protein, 40 aa, BradyrhizobiumColbertium
MCLGLVREEAAGVDAAAHVAATLSRPAPPLLTHVNQVRPG

SEQ ID NO: 13726 - protein, 391 aa, BradyrhizobiumColbertium
MAFLNITATLPEKGRDLRLDLFRGIANWAIFLDHIPDNVVNWITTRNYGFSDAADLFVFISGYTASFVYARMMLERGFIVGATRLTKRVWQLYVAHIILFVIYIASISYLALRFGDSEMINEFNVAGLVDNATETLRQGLFLRFKPLNLDVLPLYIVLMGLFPPVLWLMLRKPDLTMILSIVLWLTARHYGLNLTAYPAGQWYFNPYCWQVLFVFGAWCAMGGARRSMTLINSPITLWVCLGYLLFALVMTMAGRFPTFGAMFPEWLFSAFNPNDKTNLAPYRFLHFVVIVILVIRFVPKEWPGLEWRIFDPLIVCGQQSLAVFCVGVFLSFVGHFELTMSSGSLLAQIFVSVAGIAIMTTVAYYISWSKKQDKPLKPPPSKPGAAAAKAA

SEQ ID NO: 13727 - protein, 50 aa, BradyrhizobiumColbertium
MTIPLARVPGGPGITDQFPVGVSILSPRFPPTATVTHRNRTKRPRGPDQP

SEQ ID NO: 13728 - protein, 101 aa, BradyrhizobiumColbertium
MTARIFKPAKNAMQSGRSKTREWQLDYEPEQPRSVEPLMGWTSSADMKQQITLRFHSKEEAIAYCERKGIAYQVIEPKESIRRPVAYADNFSFRRGEPWTH

SEQ ID NO: 13729 - protein, 163 aa, BradyrhizobiumColbertium
MAGRDQLDGIDLKILSELQQDGRVRNNELALRVGVSAPNCLRRLKSLFSRGVIRAVRAVIDERLLGYEVTSFVSIQLGSQAQPVLEAFEGSIAAIPRIQQCWRISGDTDYLLKCVAPSVESMRQQLLHFAAMPNVKNVRSFPVLGVAKDVPLPLQEVSAAPAG

SEQ ID NO: 13730 - protein, 99 aa, BradyrhizobiumColbertium
MTSISNTFVASAATLFASALLTMTAPAATQAEEYCITNGAQAAHGCGYPTMEACRAATAGIGGICSQSGGAKTANDAFALQPKQSRSRKLRPGGQTNSN

SEQ ID NO: 13731 - protein, 37 aa, BradyrhizobiumColbertium
MATLRSATHVGAADTEQLSQIALACASAIAAAKFARA

SEQ ID NO: 13732 - protein, 471 aa, BradyrhizobiumColbertium
MKLFGYLPETLFKPLSGPKKHVYARLLMRLYERVYSARILETPLREEVVKQIEIGLSEFGIGSMGDLSEGDPDEDQTTSQAHYLAYYRLRDTGWLTEETEKWRTYVDMNPDAFMVMGAITDFGNSRVRVAGAVVDVKNNLEAAYREPETMAQGLANAHDTASRFARSMRRILAGMREIEDRILGNPNAAAILRTFFQDFVDGLLIADYKQLKTSNNPYRHRRMIASLAGDMLADAERLGKIARAYMDQGVMAEGATMATAEERVVAELEKIKSVFEDVGPFMDKIEDFRDRLERRIRTTVHYMDVMGEGSAERIVRLIEQLAKIGSEDVEVRPRSPDVGLPITSLALYTPPPPKAPPERTRFKVPKQDPYLRAYVQATTEFDRMVRMSDQRLLGFARRQMQGRDAVSSVEIAIESIPDLFAYRALPNLAAVGRSVRLGEFTITLEEGRTANDWIDVTAFRIERTGTTADAA

SEQ ID NO: 13733 - protein, 66 aa, BradyrhizobiumColbertium
MVGKKKGAKKGKRTPIGDRIQFLTMMHPNVIADIKQVANEEHRAAWDILEQAAREFLKRRKAKRTL

SEQ ID NO: 13734 - protein, 42 aa, BradyrhizobiumColbertium
MAGRLSEPAGAVRLEQEYFGEIQDVKVTKDMLDRARHIVNQK

SEQ ID NO: 13735 - protein, 82 aa, BradyrhizobiumColbertium
MADVTYYLAPPFVFSDDGLAAGEATECLSANAAVMRAEALSRKPGHAGAVAFSRTGDPSSGDFSDATLIRNVGEVPDDLSTL

SEQ ID NO: 13736 - protein, 175 aa, BradyrhizobiumColbertium
MTSSSREEITLNTIALCKLAQAYGIPVVLSTVAVDMGVNEGTIPEIRAALPGVKEIDRTGVNAWEDEDFRKAVQDTGRRKVVIGALWTEVCLAFPTLDMLAEGYEVYPVADAVGGISPAAHERAFDRMIQAGARPITAISFGCEIMRNWAREDSDKLREVMRWYFPQHRRLHKPA

SEQ ID NO: 13737 - protein, 342 aa, BradyrhizobiumColbertium
MSEFLFGPKILNAINSSVTRAKSGPIDLAVAYWGRGMADELNLFKTAAPVRILCDLNSGFCDPEELKRLLGRKNTMIKTRNGLHSKVYLGQKTVVVGSANASSRGLKNLSDLEAAISDVASVAAAREWFDGLWDDEESLDVDEEILKAAPPPQASLTFLKLLTKAPVLLADLNIHFLAFIEPSLRRSNREYDDTWTAIKALRPPVYSGAEIRHYGDDHPFYIDHGNSWTLPSGAFVVSFWLYADTAKSAEIGGVYRVKKIDDLNGKRIVFGQLVHDTNRIFSFSFPSNERRTVERLVDHCVRQRREAEKLNESLHHAIEISANELALVMPSALEAGKRKNGS

SEQ ID NO: 13738 - protein, 197 aa, BradyrhizobiumColbertium
MRLANSGSSRNTQASSRTSKVGRPSNRLAAAPAETSPDEGTFLDYLRLHSFDAPGGTLLRAFAQAGLRRGMDLAPELSGFGYRVSRDRGETPEEAEAHFLENRAQMLGEHGVDEFIRAAEFLFKFGRRKSMNRKRSSYGLKHDAERETGDYVANGISSPPRWRLASPPSGPTSVRRTPTSTSRQDDLRGWQRRRRLP

SEQ ID NO: 13739 - protein, 323 aa, BradyrhizobiumColbertium
MPTLEDAIKFYEENYDMLGSWMLSPGEKIMLGDKENRVCRFCGKTTPEVQFRKDAHAVSEMLGNKSLFTAYECDTCNGDFGKGIEQDLGNWSKPMRTMARIRGKSGVPTLKRGGDTGWRIECDDARTFKIKDYETDPVTAIDEEKKSISFKLKRDPYTPVGVMKAFVKMGLTLLPAEELPNFRQALAWIKDKDHSRRFANDLPVFYAFQPGPMPNDFIAAIVLRLKDGVTGLPYAFFVLGYGNEVFQFVLPTEKDKGIDGKRMDLMTFPTPGSPDPLRFPVTGRAVLNLGGAEVIKGETYSITMGFDAINWTKPDGTPSAAPS

SEQ ID NO: 13740 - protein, 356 aa, BradyrhizobiumColbertium
MDVDSFNIEIKDEDGFLGDRASRGAFREILERWRKPLRKSGEDPFGKEQTENISKKTLDDIMVGDDVEASAVVHSAIEDFAQELAYVTRRFLKTKAWAKTERIVVGGGFRDSRLGELAIARTEIILKSEDFKIDLQPIRHHPDEAGLVGALHLAPSWIFEAHDSIIAVDIGGTNIRCGLVETGWKKAKDLSKAKVVTSELWRHADDEPTREGAVKRLTKMLKGLITEAETEGYKLAPFIGIACPGVINADGSIEKGAQNLPGNWESSKFNLPASLIEGIPAIGEHDTAILMHNDGVVQGLSEVPFMQDVDRWGVLTIGTGLGNARFTNRRKENGKDKDRDSAENGKKKTKDSKKDD

SEQ ID NO: 13741 - protein, 90 aa, BradyrhizobiumColbertium
MVGDARRLDQLVCCHDSPCPHEDLRDNGEGTRWLRPRRRFRSSRSNGANPSNPWLFPGVFLDSRRPAAISPTAGAGRFSRRLLLRGFSMG

SEQ ID NO: 13742 - protein, 128 aa, BradyrhizobiumColbertium
MFAVIKTGGKQYRVVPDDVLEVGKIEGEVGSIVQLNEVLVVGGDTPVLGVPTVEGASVAVEVLDHKRGPKVIAFKKRRRKNSRRKRGYRDEITVLRVSEILTDGAKPTKGPRPKKEKVAKEPAAEAAE

SEQ ID NO: 13743 - protein, 89 aa, BradyrhizobiumColbertium
MAHKKAGGSSRNGRDSKGKRLGIKAFGGEVVTPGNIIARQRGTTWHPGLNVGMGTDHTLFAKIEGRVAFQAKANGRTFVSVLPIAEAAE

SEQ ID NO: 13744 - protein, 197 aa, BradyrhizobiumColbertium
MLQDFSSVTLREARPDVVATERLTLRRPTLADVRTIARLANDRRVAENTRRLPHPYSQDDAADFIRATAELGSETVFLIEHDNGPVGMVGIDCSTPGNAELGYWLGVEHWGRGFATEAARGAIDFFFEEFEDEHLYAGARVTNPASRKVLEKCGFQWSGVQLHRFLALGSSTPVDCFRLSRGVWASLKSWSSARRVR

SEQ ID NO: 13745 - protein, 304 aa, BradyrhizobiumColbertium
MPLFKSLSAYDDRSARLAGIALMVLSIFMFSFGDAMGKFLVGTYSVGQLLFLRACAALLLLSPLIWTQRHQFLHLERPGLQMVRVVLSTLEVAAFFLATVYLPLADVITYYLAGPIFVTAMSAIFLGEKVGWRRWTAILIGFCGVLIALRPSAQTVSLPALIALGGSLSFATLMLITRSLRKTPDIVMASSQFVGTFSLGAVLSAFNWVPPTPGSLVFFAAAGLVSVTALFCVNRSLKLAPASVVVPYQYSMIVWAVIFGFVVFGDVPSIATLVGAAIIIGAGFYIFLRERDLGRETADVNPPA

SEQ ID NO: 13746 - protein, 164 aa, BradyrhizobiumColbertium
MVQRMTDFDPTQHRMIPTQRWFEDFVLGERFVLPSRTQTSAVFAAFQTASGDTHPVHYDVEYCRSRGMPHLLAHGFQTLIHTAPGAGLFPFMVEDSLVGFLEQSSRFLKPVYADDTIYPALEVTELVPGRTTGAVTLRSTVFNQRKELVLEGMQKFLIRRRPAG

SEQ ID NO: 13747 - protein, 346 aa, BradyrhizobiumColbertium
MKFLDEAKVYIRSGDGGNGCVAFRREKFIEFGGPSGGNGGRGGNVIVEVADGLNTLIDYRYQQHFKAQKGENGSGSDRHGANGKNIVLKVPVGTQIFDEDRETLIHDFTKVGEKFVLAEGGNGGFGNAHFKSSTNRAPRNANPGQPGEERWIWLRLKLIADAGLVGLPNAGKSTFLSKVSAAKPKIADYPFTTLHPQLGVVNADGREFVLADIPGLIEGAHEGAGLGDRFLGHVERCRVLLHLVDATCEHAGKAYKTVRKELDAYGGQLTDKIEIVALNKIDAVEPEELKKQKERLKRAAKKTPLLLSGVTGQGVKEALRALAEVIGESPVSAKAKSAAEAEPWSA

SEQ ID NO: 13748 - protein, 544 aa, BradyrhizobiumColbertium
MARAKNVLWIMCDQLRYDYLGCTGHPTLKTPNIDAMAQRGVLFTKAYVQSPICGPSRMSFYTGRYMRSHGSHWNGWPLRVGEPTLGDHLKKIGVRNVLVGKTHMAPDLEGMKALGIPPESIIGVHVAECGFEPYERDDGLHPTGRPRPKYDEYLRSQGFEATNPWEHWANSGAAEDGSLQNGWLLVHADKAARVPDEHSETPYMTRRAMDFISEAEADGRPWCLHLSYIKPHWPYIAPEPYASMYSTGDVIPAIRSERERQNPHPVFGAYMDMRYSRNMARDDAREKVIPTYMGLITQIDDQMGVLMKFLEAHGLLETTMIVFTSDHGDYLGDHWMGEKDLFHEQSAKIPLIIVDPSQEADATRGTRSDALVEAIDLAPTFVDYFGGKVPGHILEGHSLLPLLRGPTPSDWRKVAFSEYDYAMQDVRLKLNQPIERCRLFMVFDGRWKYIHASGFRPMLYDLDTDPQEYVDRGDDPECAGVIARLQAELFDWALHPSGHITTPREKIAAYADNQLQVKGGILIGIWDDKELAAIKDGIAQRAKM

SEQ ID NO: 13749 - protein, 321 aa, BradyrhizobiumColbertium
MDRRKFMAGCLGLPLLARAGDAQAQAGLTKIIFPFAAGAGGDTLCRLIAQEMAPLLQRTVVVENRTGGDGLIGIKAVKGASPDGSMVLVTTGPTMYLLPMVEKTPSFDTAKDFMPVSLLARFEFAVVIGPGVDAPDFKSFVAWLKAHPDKTSFGVPSNGTIPHFMGSKLEKDLGIPLTRVPYRGSAPILNDLVGGHISFGITTLADALPQHRAKGVKIIAVSSAERSPFAPDVPTLRQSGIDLVADAWYGMWLPAGSPPEFAGKIGAAASAALAKPEVKEKLTAIGLIPVGSAPEGLTKELAANIALWQPIVKATGYKIEN

SEQ ID NO: 13750 - protein, 373 aa, BradyrhizobiumColbertium
MASPELSQFRRIVVKVGSALLVDSDRGEVRASWLAALADDMAKLHKEGRDVLVVSSGSIALGRSRLKLPRGPLKLEESQAAAAVGQIALARIWSEVLGAHGIGAGQILVTLQDTEERRRYLNARSTIGKLLEWRAIPVINENDTVATTEIRYGDNDRLAARVATMASADLLVLLSDIDGLYDAPPKNNPNAKLIPVVESISSEIEAVAGDAESELSRGGMRTKVEAAKIATTGGTHMLIASGKIEHPLQAIADGGRCTWFLTPANPITSRKRWIAGSLEPKGTLTIDAGAVAALRAGASLLPAGVIKVEGQFARGDAVVVRGPDTSEIGRGLIAYDADDAERIKGRSSPDVMAILGISGRSEMIHRDDLVVGG

SEQ ID NO: 13751 - protein, 431 aa, BradyrhizobiumColbertium
MAAPLKAVDGNADLQALMSDLGTRARAAARVLALAPPEQKNRALEAMERAIRANATAILAANAEDVAEARASGNATSAFIDRLTLTPARVEGMAEGIGIVRGIADPIGVVTERWQRPNGMSIERVRVPLGVVGVIFESRPNVAADAGVLCLKAGNAVILRGGSDSFRSCRAIHDCLVQGLREAGLPEAAITLVPTRDRAAVGMMLSGLDGAIDVIVPRGGKSLVARVEQEARVPVFAHLEGVNHVYVDGSADLAMAKSIVLNAKMRRTGVCGAAETLLVDRAAAGKTLKPLVEMLLDAGCEVRGDEAVQKADARVKPASEEDWDTEYLDAIIAAKVVDGVDGAIAHIQNHGSHHTDAIVSQDEVAAKKFLSEVDSAIVLHNASTQFADGGEFGFGAEIGIATGRFHARGPVGAEQLTSFKYRVHGTGQTRP

SEQ ID NO: 13752 - protein, 208 aa, BradyrhizobiumColbertium
MPRFVAQAIPPHMPGMRIGLLGGSFNPPHQAHRAISQFALKRLQLDRVWWLVTPGNPLKENGTLHELGARMQAAREVADDPRIAVSCLESVIRTRYTIDTINTLRRRLPALRFVWIMGADNLAQFHRWQDWRRIAGQVPIAVIDRPPQSFRALGSPAAQALARYRLPEGKAALLADRPAPAWVFLTGLKLNLSSTGLRNPDGSWKGTK

SEQ ID NO: 13753 - protein, 44 aa, BradyrhizobiumColbertium
MSAGFGVRDTVKGMVPDRICIVQVDFHEASFDEVCFTQGCQADA

SEQ ID NO: 13754 - protein, 118 aa, BradyrhizobiumColbertium
MKAQPDADKTLSLILSRLEDMKAEETVTIDLRGKSAYSDYMIVTTGRVNRHVGAIAENVTKSLKENGIKNIHVEGLPNCDWVLIDSGDVIVHVFRPEVREFYNLERLYTQGPGAAKAI

SEQ ID NO: 13755 - protein, 182 aa, BradyrhizobiumColbertium
MRAPDARDLENTTLKASPLEDVMRVAVIAVGRLKQGPERELADRYFERFDDAGRKLGFRELSIHEIPESRARDTATRMAEEAAAISAHIPEKSILVALDERGQNLESTVFARHLSRWRDEGAGHTIFMIGGADGLSPELRRKAKLAIAFGSATWPHQMVRVMLLEQLYRAATILAGHPYHRA

SEQ ID NO: 13756 - protein, 452 aa, BradyrhizobiumColbertium
MTRATTSTFAETMRAPLLNLLLITSLAGASLAQAQTAAPPQTAAISPEAIKQREQELEAARARQKSAEEAQAKLKAEIAALGQDRSQLNQQLIETAANVRAVETKIDEAEARLGALNAREQQMRASLDSRRADIVEVLAALQRAGRRTPPALLVRPEDALQSLRTAMLLGAVVPELRGRAEKIAAELGELVALRKTIATERDQLASDRDKVRNDQTRLTALVDERQRQQAAREKDLDAEKSRAIMLSKQVGDLQGLITRMEQDLQSAAKAAEKAAEAARQAEAKAAASAKSGPAAFKDRSRTTPAIAFASAKGLLPLPVNGNKIRDFGGSDGVGGVQKGISLATRPGSQVTTPCDGWVVYAGPFRSYGQLLILNAGGGYHVLIAGMERISVNIGQFVLTGEPVATMGSTSQVASILATNASQPVLYVEFRKDGTPIDPGPWWATNEGEKVRG

SEQ ID NO: 13757 - protein, 453 aa, BradyrhizobiumColbertium
MMRKTSVILLSAATGAALTLFVTQPRAVFMGSSARAATADTYRQLNLFGDVFERVRSDYVEKPDDTKLIESAISGMLTGLDPHSSYMDAKSFRDMQVQTRGEFGGLGIEVTMEDGLIKVVSPIDDTPASRAGVMANDIITNLDDEAVQGLTLNQAVEKMRGPVNTKIKLKIIRKGQDNPIDVTLVRDNIRVRSVRARVEQDDIGYIRITTFNEQTTEGLKREIGNLTNQIGGDKLKGFIIDLRNNPGGLLEEAVTVSDSFLEKGEIVSTRGRNAEETQRRTAHAGDLTKGKPVIVLVNGGSASASEIVAGALQDHKRATIVGTRSFGKGSVQTIIPLGSGNGALRLTTARYYTPSGKSIQAKGIVPDIEVLQDVPDELKSRTDTKGEASLRGHLKNDGDEKTGSQSYVPPDAKDDKALKLAGDLLHGIKNSASAAPAPGSDNKATTDKPKAAN

SEQ ID NO: 13758 - protein, 407 aa, BradyrhizobiumColbertium
MTETADDLSAPLGQDKPRRKRRLRLPFTAMQLLAVLLGLFLVTFAGFAIFNKDPLGGEPMTRIAIKPTDKAADERPAAASHASDAKHDGKPNTKEVPKQAGEQKTITMIDGSTGARHDVVIGAGESGSDKGGTASAPPPVMAGINPKLLEKSRYGMIPVVADGLKPFNVYAADADRAKAATMPVVAIVIGGLGVGAAKTNDAIMRLPPAVTLAFTPYGADPGKLAERARAQRHEIFLQIPMEPYDFPDNDPGPQTLLTSLSADQNMDRLHWHLSRLQGYAGLANFMGARFIATEPAMQPIMREAAKRGLGFFDDGSSPRSIASQAAANQAMPFGKGDIAIDVVPTPTEIDRALNKLESTARERGIAVGTASALPVSIERIGAWTKTLSDRGILLVPLTTAMLKSKSS

SEQ ID NO: 13759 - protein, 167 aa, BradyrhizobiumColbertium
MARYEDLPYRTCVGVMLINPKGLVFIGRRAGGIEHVDDTHVWQMPQGGVDPGEDTWEAAKRELYEETSVRSVERLGEVPDWLIYDIPRTVAGRAWKGRYRGQRQKWYAVRFTGKDSEINVEHPGGGHKAEFVSWRWEPMKNLPELIIPFKRPVYERVVKEFSALAGQ

SEQ ID NO: 13760 - protein, 166 aa, BradyrhizobiumColbertium
MTNEKPYRPNVGIALFNTEGRVLIGHRFKGDGPEIILPGLDWQMPQGGVDEGENLRDAAMRELWEETSVVSADYLGETGWLTYEFPPYDGPQTHRLAKFRGQRQKWFALRFTGKDDEIDPLTPRNGQPAEFDDWRWERLDRVADIVVPFRREVYQAVAQQFAAFAN

SEQ ID NO: 13761 - protein, 135 aa, BradyrhizobiumColbertium
MATFHFDLVSPEKLAFSGEVDQVDIPGVEGDFGVLAGHAPLVAAIRPGILTVTTGGKHEKIIVLGGIAEVSENGLTVLADVATSLAELDRAQFAETIAEMEESLKEHEGDELDQAIERLDHFKSIQHQLNATAMH

SEQ ID NO: 13762 - protein, 477 aa, BradyrhizobiumColbertium
MAAQVGRVTQVIGAVVDVQFEGHLPAILNSLETKNGGNRLVLEVAQHLGESTVRTIAMDTTEGLVRGQEVTDTGAPIRVPVGEGTLGRIINVIGEPIDEAGPVKSEGLRAIHQEAPSYTDQSTEAEILVTGIKVVDLLAPYAKGGKIGLFGGAGVGKTVLIQELINNVAKAHGGYSVFAGVGERTREGNDLYHEFIESKVNADPHNPDPNVKSKCALVFGQMNEPPGARARVALTGLTIAEDFRDKGQDVLFFVDNIFRFTQAGSEVSALLGRIPSAVGYQPTLATDMGALQERITTTQKGSITSVQAIYVPADDLTDPAPATSFAHLDATTTLSRSIAEKGIYPAVDPLDSTSRMLSPLVVGEEHYAVARQVQQVLQRYKALQDIIAILGMDELSEEDKLTVARARKVERFMSQPFHVAEIFTGSPGKFVDLADTIKGFKGLVEGKYDHLPEAAFYMVGTIEEAVEKGKKLAAEAA

SEQ ID NO: 13763 - protein, 284 aa, BradyrhizobiumColbertium
MRVRIASTKATQKITKAMQMVAASKLRRAQTAAEAARPYADKMSAVISNIASAAVGSPGAPVLLAGTGRDQVHLLLVCTGERGLSGAFNSSIVRLARERALALMAQGKDVKFFCVGRKGYEQLRRQFDKQIVEHMDLRSVRQLGFVNAEEIAKKVLARFEAGEFDVCTLFYSRFKSVIAQIPTAQQVIPLVVEEGAAANPPSYEYEPEEDEILTRLLPRNLAVQIFRALLENNASFYGAQMSAMDNATRNAGEMIRKQTLVYNRTRQAQITKELIEIISGAEAV

SEQ ID NO: 13764 - protein, 509 aa, BradyrhizobiumColbertium
MDIRAAEISAILKDQIKNFGQEAEVSEVGQVLSVGDGIARVYGLDNVQAGEMVEFENGTRGMALNLETDNVGVVIFGADREIKEGQTVKRTRAIVDAPVGKGLLGRVVDALGNPIDGKGPIQAEKRMRVDVKAPGIIPRKSVNEPMATGLKAIDALIPIGRGQRELIIGDRQTGKTAIALDTILNQKPLNAQPDENIKLYCVYVAVGQKRSTVAQFVKVLEEQGALEYSIVVAATASDPAPMQYIAPFTGCTMGEYFRDNGMHAVIIYDDLSKQAVAYRQMSLLLRRPPGREAYPGDVFYLHSRLLERAAKLNKDMGSGSLTALPVIETQANDVSAYIPTNVISITDGQIFLETDLFFQGIRPAVNVGLSVSRVGSSAQTKATKKVAGKIKGELAQYREMAAFAQFGSDLDASTQRLLNRGARLTELLKQPQFSPLKMEEQVCVIWAGTNGYLDPLPINKVRAFEDGLLSLLRGKHVDILNAIRDTRDLTDETAAKLKSVVEGFAKSFA

SEQ ID NO: 13765 - protein, 176 aa, BradyrhizobiumColbertium
MSGRYATALFELARDQKVVDEVKADLDKFGALLNESADLKRLVRSPVFAADTQSRALSAVLAKAGIAGISANFLKVLTANRRLFAVADIIRDYRALVAKFKGETTADVTVAEALSDKNLDALKVALKSVTGKDVALNVKVDPSIIGGLVVKLGSRMVDGSLRTKLNSIKHAMKEAG

SEQ ID NO: 13766 - protein, 163 aa, BradyrhizobiumColbertium
MLSLKTLGSVTRPRTAIAFVAATLLVGGTATEASAKSRRHHHRHHAQTHTNATSDWRNANASMTPTSGTGRSFSGVASYYGNESGSRTASGQRFNQNAMTAAHRSLPFGTKLRVTHGSQSVIVTINDRGPFIRGRVLDLSTGAARAIGLTSRGVGRVTAEVIS

SEQ ID NO: 13767 - protein, 720 aa, BradyrhizobiumColbertium
MVDVLVPVALDQTYSYKVPRGMDLKAGDLVGVPLGPREVLAVVWGENANPDPRLHNRLKEVSEKLDIPPLKPELRSVVDWVANYTLSPRGMVLRMCLRMGENLGPERARAGVRLTGDPPKRLTPARQRVIALLSDRLLHAKSEAAREAGVSAGVIDGLVDEGTLTVEPMPPPPPPPAPDPEFGRPDFTPLQRTAVDTMRALAANGTFHVALLDGVTGSGKTEVYFEAVAEVIRRGKQALILMPEIALTGQFLDRFAQRFGVRPIEWHSELTPRTRARNWAAISGGTAPVVVGARSALFLPYADLGLIVVDEEHDQAYKQDEGVHYHARDMAVVRGHIARIPVVLASATPSVESEVNARKNRYQRIALPSRFGGQHMPHIEAIDLRREPPARGRFISPRLAGEMRVAIERREQALLFLNRRGYAPLTLCRACGHRFACTICDAWLVDHRFRQRLVCHHCGFSMPRPHICPNCSAEESLVAVGPGVERLQEEAAALFPEARTMVLSSDLITSIETMRSELTEIAEGRVDIIIGTQLVAKGHNFPRLNLVGVVDADLGLSNGDPRAAERTWQLLNQVIGRAGREQGRGVGYLQTHQPDHPVMKALVACDREAFYDSEIELREKTLYPPFGRLASLIISAGDRPSAEGFGRKLVTLAPRDERVVVLGPAEAPLAVIKGRYRFRILLKSARGFDLSDYLRTWLAVCPKPTGNLKLEVDVDPQSFL

SEQ ID NO: 13768 - protein, 321 aa, BradyrhizobiumColbertium
MSKAAAPQIELASADPSIAQEMARWLSHLGAERRLSPKTLEAYGRDLRQCLDFLSNHWGERVTLERFARLEATDVRAFMAMRRADDIAGRSLMRALAGLRSFGRFLEREGKGKVGALSAIRAPKVAKSLPKPLPMASAKRLADADERAGEERETWILARDAAVMALLYGSGLRISEALGLKRREVPRPGEGDVLVVTGKGNKTRMVPVLQNVLALVQEYVSMCPYPLPAEGPIFVGARGGPLSPRIIQLAMERLRGALGLPDSATPHALRHSFATHLLSRGGDLRAIQELLGHSSLSTTQIYTGIDSERLLEVYASAHPRR

SEQ ID NO: 13769 - protein, 196 aa, BradyrhizobiumColbertium
MGAHESMEHAEHAEHASGSNKKIALLIAVLALFLAISETLGKGAQTESISKNVEAANLWAFFQAKSIRRTVMLTAAEQGRLTLAGTADDAMKATVQKQIDDWTKTAQRYRSEPETGEGTEQLAAKAKHAEHARDEATAKYHHFELASAAFQIGIVLASATIITGMLALAYVSGVLTIAGLIMTALGLWWPHLLHLH

SEQ ID NO: 13770 - protein, 176 aa, BradyrhizobiumColbertium
MLRRLLQPVWVLLAIIFLIEAWLWDHLEPIVARVVAAIPLARFKQWLTERVNALSPAMTLIVFAVPVVPLFPLKLVGLWLLAHEYWTSAFFMIVFAKLVGVGVTAFVFDVTRAKLLEMHWFERIYVLVLKVRAKAAELVDPIKRRIRELIAGNGEGWSYRTLRMVQRFRRSVHQAR

SEQ ID NO: 13771 - protein, 466 aa, BradyrhizobiumColbertium
MATYDLVVIGTGPGGYVCAVRAAQLGMKVAVVEKNATLGGTCLNVGCMPSKALLHASEMFEEAGHSFAKMGVSVSAPKLDLPAMMNFKQQGIDGNVKGVEFLMKKNKIDVLKGTGKILGTGKVEVSADGKSQTIETKNIVIATGSDIARLQGIDIDEKRIVSSTGALSLDKVPGKLLIIGAGVIGLELGSVWHRLGAEVVVVEFLDRILPGMDGEIAKQFQRILEKQGFAFKLGAKVTAVDTSGKTLKATVEPAAGGTAETLEADVVLVCIGRVPYTEGLGLKEAGVALDARGRVQIDAHFATSVKGIYAIGDVVAGPMLAHKAEDEGVAVAEIIAGQAGHVNYDVIPGVVYTTPEVSSVGKTEEELKQAGVAYTVGKFPFTANGRSKVNQTTDGFVKILADAKTDRVLGVHIIGREAGEMIHEACVLMEFGGSAEDLARTCHAHPTRSEAVKEAALAVGKRAIHM

SEQ ID NO: 13772 - protein, 249 aa, BradyrhizobiumColbertium
MTDKVVVITGGSRGIGRATAIAAAARGYRVVVGYASNKQAADEVVAQIAASNGKAIAVKCDVAEESDILNLFKEADKFGTLGALVNNGGIVGKSGVRVDEMSAERIQRVMAVNVTGSILCAREAIKRMSTRHGGKGGVIVNLSSVAARLGAPNTYVDYAASKGAVDSFTVGLGHEVANEGIRVAAIRPGLIDTEIHAAGGEPDRAHRLAHMVPMKRVGTADEIANAIVWLISDEASYVTSAILDVSGGR

SEQ ID NO: 13773 - protein, 414 aa, BradyrhizobiumColbertium
MTEIRVPTLGESVTEATIGRWFKKAGDPVAVDEPLVELETDKVTIEVPAPSAGTLSEIIAADGATVAVGALLGQITEGAGAAKPAAAPAKPAAAPAPAAAAPAAAAAAPKAPPADAPLAPSVRKLSAETGIDASTVPGSGKDGRVTKGDMLAAIERAASAPTPVNQPAAAVQVRAPSPADDAAREERVKMTRLRQTIARRLKDVQNTAAMLTTFNEVDMTNVMALRAHYKDAFEKKHGAKLGFMGFFTKAVVQALKDIPAVNAEIDGTDLIYKNYYHIGVAVGTDKGLVVPVVRDCDHKSISDIEKSIADFGRRARDGQLKIDEMQGGTFTLTNGGIYGSLMSTPILNAPQSGILGMHKIQERPMVVGGKIEVRPMMYLALSYDHRVIDGKEAVTFLVRVKESLEDPARLVLDL

SEQ ID NO: 13774 - protein, 989 aa, BradyrhizobiumColbertium
MSRQDANAAFALSSFLQGTNATYIDEIYARYEKNPSSVDPEWQEFFKSLNDAPADISKNAEGPSWERDNWPLTPQDDLTSALDGNWAEVEKAVGAKIAARAQAKGSEKGADFSSADLLQATRDSVRALMLIRSYRMRGHFHAKLDPLGIEAPRNREELDPRTYGFTEADFDRKIFLDHVLGLEYGTLREITAICERTYCQTLGVEFMHISNAAQKAWIQERIEGPDKEISFTREGRRAILQKLVEAEGFEKFCDTKFTGTKRFGLDGGEALIPALEQIIKRGGNLGVKEIVLGMPHRGRLNVLTQVMGKAHRALFHEFKGGSANPDAVEGSGDVKYHLGASSDREFDGNRIHLSLTANPSHLEIVDPVVLGKVRAKQDQHGDPPDMRISVMPLLMHGDAAFAGQGVVAECFGLSDLKGYRTGGSVHFIVNNQIGFTTYPRYSRSSPYPSDVAKMIDAPIFHVNGDDPEAVVFAAKVATEFRQKFHKPVVIDMWCYRRYGHNEGDEPAFTQPVMYKRIAAHPSTLTLYSKRLIAEGVVTEGEVDKLKADWRARLDAEFEAGTSYKPNKADWLDGKWAGFKIADQEEDARRGVTGVDLPILKDIGRKITKVPDGFRVHRTIQRFLDNRAKAIESGNGIDWATGEALAFCSLLNENHHVRLSGQDSERGTFSQRHSVLIDQEDESRYTPFNHLGNEQGHYEVINSLLSEEAVLGFEYGYSLAEPNTLTLWEAQFGDFANGAQVVFDQFISSGERKWLRMSGLVCLLPHGYEGQGPEHSSARLERFLQMCAEDNIQVVYPTTPANYFHVLRRQLHREIRKPLIMMTPKSLLRHKRAVSRLEELAKGTTFHRILYDDAQMLPNEAIKLVPDEKIRRIVLCSGKVYYDLYEEREKRGIDDIYLMRIEQLYPVPLKALVAELSRFKKAEVVWCQEEPRNMGAWHFIEPYLEWVLNQVNGASRRPRYVGRAASAATATGLMSKHQAQLKAFLDEALS

SEQ ID NO: 13775 - protein, 294 aa, BradyrhizobiumColbertium
MSILIDKNTKVICQGFTGKNGTFHSEAAIAYGTKMVGGTSPGKGGSTHLGLPVFDTVREAREKTGADASVIYVPPPGAADAICEAIDAEIPLIVCITEGIPVLDMVRVKRSLLGSKSRLIGPNCPGVMTAGECKIGIMPANIFKTGSVGIVSRSGTLTYEAVFQTSQEGLGQTTAVGIGGDPVKGTEFIDVLEMLLADPKTESIIMIGEIGGSAEEDAAQFLKDEAKRGRKKPMVGFIAGVTAPPGRRMGHAGAIISGGKGDAGSKTEAMKSAGITVSPSPARLGHTLAEKLKG

SEQ ID NO: 13776 - protein, 163 aa, BradyrhizobiumColbertium
MALAAAVSAARAGADENEVLFNAVNDLCVNGSETVDGLAKRALKMPYDAFNYDSDNDGKYARQIGLRKLGSGGTILIVSASSRRAPVTECRFVSYADDMASLATRLRAAFDLPQPTAQSFDVSVITRGEKSISGRPMKFVLQYGLQDNKRSGAFTLTVSRGSN

SEQ ID NO: 13777 - protein, 159 aa, BradyrhizobiumColbertium
MAQDHLAASSPLPEHARLAAFAGEWDGEETVFPSRWTEGGPATSRVVARMDLNGFYLIQDSVQMRDGKQAFATHGIFTYDRDDRTYKLFWYDSLGYTPPSPASGGWVGKTLTLVRGSLRGNARHVYEIIDDNSYSMKIQFSPDAEGWADVLTGVYRRAH

SEQ ID NO: 13778 - protein, 398 aa, BradyrhizobiumColbertium
MNIHEYQAKALLNEFGVPISKGVPVLKAADAEAAAKALPGPVWVVKSQIHAGGRGKGKFKEASAGDKGGVRIAKSAAEVAEFAKQMLGATLVTVQTGPAGKQVNRLYIEDGSDIDKEFYLSILVDRETSRVSFVVSTEGGVNIEEVAHNTPEKIVTFSVDPATGIMGHHGRTVAKALNLSGDLAKQAEKLTAQLYAAFIAKDMAMLEINPLVVTKQGQLRVLDAKVSFDDNSLFRHPEVLALRDETEEDAKEIEASKYDLNYVTLDGNIGCMVNGAGLAMATMDIIKLYGMAPANFLDVGGSASKEKVAAAFKIITADPNVKGILVNIFGGIMKCDVIAEGVTAAVREVGLSVPLVVRLEGTNVELGKKIISESGLNVVPADNLDDAAQKIVKAVKGG

SEQ ID NO: 13779 - protein, 322 aa, BradyrhizobiumColbertium
MARDKIALIGSGQIGGTLAHLIGLKELGDVVMFDIAEGVPQGKALDIAQSSPVDGFDAHYTGANSYEALDNAKVCIVTAGVPRKPGMSRDDLLSINLKVMEQVGAGIRKYAPDAFVICITNPLDAMVWALQKASGLPHKKVVGMAGVLDSARFRYFLADEFNVSVEDVTAFVLGGHGDTMVPLVKYSTVAGIPLPDLVKMGWTSQARLDEIVDRTRNGGAEIVNLLKTGSAFYAPAASAIAMAESYLKDKKRVLPCAAYLNGEYSVKDMYVGVPVVIGAKGVERVVEIELAGKDREAFDKSVGAVQGLVDACKKIAPDLLGK

SEQ ID NO: 13780 - protein, 395 aa, BradyrhizobiumColbertium
MLSTPSSPFREAYQAEIASGAIEPDAAQAEVAEAYAALDQRLATYKPQRKQGLLARLFGGNDKDEAPRGLYIHGEVGRGKTMLMDLFFQHSSVEHKRRAHFHEFMAEAHERIYDYRQSIARGEIADGDVIALTANAIFEESWLLCFDEFHVTDIADAMILGRLFAKLFELGTVVVATSNVAPDDLYKGGLNRSLFLPFIKQITDHMDVARLDARTDFRLEKLQGVPMWLTPADSDADAALDRAWKRMSGGAKCRPRDISIKGRILHVPCSAHGVARFSFADLCEKPLGASDYLRLAHDYHTILVDHIPVMDLSQRNAAKRFITLIDALYDNAVKLMASADANPISLYLATEGNEANEFKRTASRLIEMSSESYLALAHGRKDSTASGSTKGLVET

SEQ ID NO: 13781 - protein, 178 aa, BradyrhizobiumColbertium
MPRLFTGLEIPAEIGQSLSNLRGGLPGARWIDPENYHVTLRFIGDIDGASANEIASLLFRVDRKPFEVKVQGLTSFGGRKPRAVVATIAPSKPLMELQAELERMMQRIGLDPEGRKFIPHVTLARLHDASDRDVADYLSLRGYFPSKAFMAERFVLFSSRASTGGGPYVVEDAYELCA

SEQ ID NO: 13782 - protein, 216 aa, BradyrhizobiumColbertium
MFMHIAVLMLALMTMAIAAPAQAQPPAKPIRLVVLGDSLSAGFGLAAQEAFPQKLKKALQTKGIEIDMINAGVSGDTTSGGRDRLDWSVPEGTDGVIVELGANDALRGIDPDLTRAALTDIIQRLKARKIAVMLCGMLAPPNYGADYAARFNSIYPELAKKFDVPLYPFFLEGVAADATLNQADGIHPTAAGIDIIVGRIMPAVEAFIGTIAEQRR

SEQ ID NO: 13783 - protein, 240 aa, BradyrhizobiumColbertium
MDTRIETSSLAATDADTIAISNVNLSLGTGAARVHILKDISLRVGRSEAIGLIGPSGSGKSTLLMVMAGVERPDSGEVVVSGTAFNALDEDALARFRGRQVGIVFQSFHLIPTMTALENVAVPLELAGNPDAAKRAAEELQSVGLGDRLHHYPTQLSGGEQQRVALARALAPDPAILVADEPTGNLDEATGKQIVDLLFSKHAERGMTLVLVTHDSSLAHRCDRVIRLRSGRIDTQSAPA

SEQ ID NO: 13784 - protein, 856 aa, BradyrhizobiumColbertium
MSTVAEPFAKPNGVALSLRYAMRELRGGLRGFYVFIACIALGVMAIAGVGSVSASLSEGLAREGRTLLGGDVSFVLFQREAKPEEIAFLRSRGTLSTAATLRGMARSADGKLALVEMKAVDDAYPMLGQLTLAPPLPMSDLLAERDGAFGAAADPALLTRLSLKAGDRVTIGAATFQIRSTVEAEPDKLAGGIGFGPRFLISEAGLRATGLIQPGSLVRWVYRVKLPDAANSERATEAFIADARNAAPQAGWEIRSRSNASPQLERNINRFTQFLTLVGLAALLVGGVGVANAVKSHIDRRLEVIAALKAVGATGRDVFGIYLAQVILLAGIGSVIGLALGAAMPFAIVGLFGKLLPLPVVPAMHVDELALSFVYGLLTALAFGLWPLGRVHDVPVAALFRDTISSEWHRPRLGYLVFMALVIALLIAVVIGLSFDKRIAAVFVASSVLVFALLRGIAALLMAIARRLPRSRLPMLRLAIANIHRPGALTPSVVLSLGLGLAVLVTITQIDGNLRRQFLAALPDQAPSFFFIDIPSAQAEQFDGYLRRIAPGAKVEDVPMLRGRIVAARGVRAEELKPTTDSEWVLQSDRGLTYTGELPKGSKVVEGEWWSADYSGPPLVSMEKKIADGLGLKLGDEIVVNVLGRDIPAKIGNLRTIDWQGLGINFVLVFSPNAFKGAPHTHIATLTEAGGNAVGDGRIIKEVADAYPMVTSVRVREVMETVGSVVTNLALAIRGASAVTLISAILVLGGALAAGHRHRVYDAVILKTLGATRLRLLGAYALEYLLIGLATAVFGVIAGSIAAWIIVTRLMTLSFVWQASSAAGVVAAALVVTVGLGLAGTLLALNKKPATVLRNL

SEQ ID NO: 13785 - protein, 43 aa, BradyrhizobiumColbertium
MTKCSGSPCGSGIARFLRLTTSARQDCGRGRHSAARGRLHRMC

SEQ ID NO: 13786 - protein, 263 aa, BradyrhizobiumColbertium
MSDLDRNYASPFGRAAGRVDAATVDAGLRAYMLRIYNYMSIGLAITGLAALGVYMAAVTDVATPDAVRVGKLFLTPFGYAMFVSPLKWLFMLAPLAMVFVISAGINRLAPSTAQILFWVFSALMGISLSSIFLVFTHTSIVRVFFITAATFGALSLYGYTTKRDLTGMGSFLFMGLIGVVLASLVNLFLASSMLQFIVSVVGVLVFSGLTAWDTQRLKNDYIYGYASAGGDIAERAAITGALSLYLNFINLFTLLLQLLGQRE

SEQ ID NO: 13787 - protein, 252 aa, BradyrhizobiumColbertium
MSGADRPPVALVTGGGGDIGRAIALRLARMSAAVAIVDRDEAAARSTAQLVEEGGARALAIRADVSRAQDTIAFVEATEARLGPIGIFANNAGIEGVVAPLHEYPDETFDRLLQVNVRGVFLGLKHVIARMMQRGTGAIINTASTSAIRGRAGLAGYVASKHAVIGLTRTAALDVAGTRIRVNAVLPGPVESRMIRELEGQAHDSAIALRRNVATAHGRPQDVANVVAFLASDEAAHVNGAAWVVDGGMTLA

SEQ ID NO: 13788 - protein, 413 aa, BradyrhizobiumColbertium
MAGRFRVSRRRLLAGAGGLALGMAGLGARAQETKPLRIGVLTDMSSLYADVTGPGSLLAAKMAVEDFQASGPRMTRPIEIISGDHMNKADLGANIAREWIDRQSVDVIVDAPNSAVALAVRNVVQQNNKTLLVSGASSSDLTGKSCSPNLVHWTYDTYALSSGVARAVVESGGKSWFLLTADYAFGHAMEGDIRNVVQKSSGKVLGAVRTPINTQDFSSFLLQAQSSKAEIIALINAGGDTINSIKQAVEFGIPQGGQRVVATVLYLSDVHSLGLKIAQGLQFTESFYWDLNDDTRAWTRRFAPRNNGRYPTALHAGAYATTLHYLKAVDALGASGDGKAVVEQMKKLPTDDPLFGKGSVRADGRKLHNMYLFEVKTPGDSKYPWDYYKLVKTIAPSEAWRPLADGGCEFLKS

SEQ ID NO: 13789 - protein, 267 aa, BradyrhizobiumColbertium
MTVATDPDDPRARMFGDYRLKPNSGVNPPYSPAYPVEWGCTLRTVEIMTRVAPGKVATLLADTPFEIASDRVAFRFMRSPGHSLAVHAGEMFDLMISVPVRYKGLFTETHIFMYCSDPMGICAGREVFGYTKKDAHYAFDEHPDGSITGWVRRRGIPLADFAFTPDPSAPVVRVVDGDELPAGEIHVRRLPHPERLGTAYADIAYRRTPLKYSRPLPGRASMTLHACAYDPIAELEPEILGAHFMVSDVYGGGFEVEDRRLIERLTP

SEQ ID NO: 13790 - protein, 49 aa, BradyrhizobiumColbertium
MFRRRHRQTIRHFGVAPDVKDFRRQAPIDSHWAGTRREDAHLTPGSFHI

SEQ ID NO: 13791 - protein, 540 aa, BradyrhizobiumColbertium
MPPAEQLLNAPEFTVSELSQSLKRTVEDAFGHVRVRGEISGFRGAHSSGHCYFALKDESAKIEAVIWKGVHGRMRFKPQEGLEVIATGKLTTYPGSSKYQIVIEALEPAGIGALMALMEERKKKLAAEGLFDEARKQLLPWLPEVIGVVTSPTGAVIRDILHRLEDRFPRRVLVWPVKVQGEGSAEQVAAAIRGFNALPEGGRIPRPDVLIVARGGGSLEDLWSFNEEIVVRAAAESMIPLISAVGHETDITLIDFVADKRAPTPTAAAEMAVPVRSELLIEVADLGRRTRAYWQRAQESRRSELRAAARALPAASDLLAIPRQRLDSAGASLPRCLKANTHAHFRRFTAAGAKLTLRVLHGQIAQADHRLTVCGERLGLSARSLLRQRRDRFAGLEVRLRASKLSNAQAQRNAIARQRERTHRLAERAGRALATLLHRLDTRVENSGKLLSALSYRSVLARGFALVRDEAGHPVHAADSIGPGARVEIEFADGRVGATADADRPPPAAKRAPAQPKPAAQETKPAPKRLAKPVDQGSLF

SEQ ID NO: 13792 - protein, 49 aa, BradyrhizobiumColbertium
MRNRIALFASALIAFTVAVFLFEAQAKAPHRAPGHCGFWTTIDAGLSCR

SEQ ID NO: 13793 - protein, 295 aa, BradyrhizobiumColbertium
MTIAIRQLHKHFVGEVSGLDLRKPLTADEARDIEAAMDKYAVLVFHDQDITDEQQMAFALNFGQREDARGGTVTKAKDYRLQSGLNDVSNLGKDGKPLAKDSRTHLFNLGNCLWHSDSSFRPIPAKFSLLSARVVNPKGGNTEFADMRAAYDALDDETKTEIEDLVCEHSLMYSRGSLGFTEYTDEEKEMFKPVLQRLVRTHPVHRRKSLYLSSHAGKVVGMSVPEGRLLLRDLNEHATQPEFVYVHKWKLHDLVMWDNRQTMHRVRRYDQSQPRDMRRATVAGTEPTVQQQAAE

SEQ ID NO: 13794 - protein, 214 aa, BradyrhizobiumColbertium
MAPTGKRTGESTRSAGLALSGSAGYLDGRLLIAMPVMGDSRFERSVIYLCAHSAEGAMGIIVNHPAGSIDFPELLQQLGIVKKGDSIKLPENAESMKVLRGGPVDTGRGFVLHSSDFYIENATLRIDDGVCLTATVDILRAIANGSGPKHAILALGYAGWAPGQLETEIQSNGWLHCDADADLIFGDDVDDKYTRALQKIGIDPGMLSNEAGHA

SEQ ID NO: 13795 - protein, 279 aa, BradyrhizobiumColbertium
MSSIVPLRAAIVATPILLASSLAFAAHADDASPWQRDGHSAVRLLAGSRSGAVLLGGIAFQLQPGWKTYWRMPGDSGVPPRFDFSKSENVEAVTVMWPAPLKFDDGAGGHSIGYRDQIVLPLRIVAKAADKPVTLRAEISYAVCEKLCIPVEASAELGFNSVASTEDANLRAALDTVPKPANIGDPNPLTIRDVKRDGPRNVVVDVVTPDRRNVNLFVEGPTPDWALPIPAPVQHSPPGVTRFAFELDGLPPGAKPDGAALKFTLVGPDKAYEFNTNLE

SEQ ID NO: 13796 - protein, 468 aa, BradyrhizobiumColbertium
MPQHAGCLWGLFDLAVMDAQPATTGQAGLIGRLRAKLTGGSNEASLTRRLAGTIFIIRVISAGLAYVSQVLLARWMGTSDYGIYVYVWTWVLLLGSMMDFGISASAPKIIPEYRASGEHALLRGFLSGSRWLTLAASMLVSLALAGIVKLLSAWMDPAEALPLYIGCMTLPAFVVANTQDGIARSHDWMQLGLMPQFIIRQALIIGITGSAFLLGYHLGAVAAMAASAAAVWIAMTGQMVVLNRKLADHIEPGPKAYDVGGWLAVSLPILLVESFYLLLSYTDVLVLQQFRPSEEVGVYFAVVKTLALVSFIHYAMSATTAHRFAEYHASGDKARLSAYVAHAINWTFWPSLAATIVLLGLGKPLLWLFGPQFTVGYDIMFVAAIGLVVRSAIGPVERLLNMLGQQKICALAYALAFLMNLVLCIALVPHYGGHGAAAATSISLTFETVLLFWIVRQRLGLHVLAFGK

SEQ ID NO: 13797 - protein, 274 aa, BradyrhizobiumColbertium
MFDPLYVASGFGVGLLVGMTGVGGGSLMTPLLILLFGVHPSTAVGTDLLYAAATKTAGSVVHGWSRSVHWPAVLRLACGSIPASALTLLVLWKLDLKSDAERSMVNLVLCFALLLTATSLIFRKSLMERYRRRLEQVDARATAIATVATGIVLGVLVSISSVGAGAVGVTVLLLLYPRLPMATIVGSDIAHAVPLTLVAGIGHWALGDVDWALMGVLLLGSLPGIVIGSYSATRVPETLLRLTLACVLFAVTGKIVFAELNLSTVFVTALAWTH

SEQ ID NO: 13798 - protein, 262 aa, BradyrhizobiumColbertium
MGSLSGKNAVVTGSTSGIGLAYARAFAGAGANVVINGFGAPEDIEKERAKIESEFGVKAIYSPADMTKPAEIAGMIALGEKTFGSVDILVNNAGIQFVSPIEEFPLEKWDQIIAINLSSAFHGIRAAVPGMKKRGWGRIINTASAHSLVASPFKSAYVSAKHGIAGLTKTVALEVATHKITCNCISPGYVWTPLVEKQIPDTMKARNLTREQVINDVLLDAQPTKEFVTSEQVAALALFLCSDDAAQITGSNLSIDGGWTAA

SEQ ID NO: 13799 - protein, 391 aa, BradyrhizobiumColbertium
MTDHSPEIATIPTNAQRVLVLQGGGALGSYQAGALQALCGYGFEPEWVAGISIGAVNAAIIAGNEGQTRVKRLKEFWEMVSAPVPWKPLGKSDQSRELFNSTSAALIATFGVPGFFTPRIPPAPLWPPGHPEAQSYYDTSPLKKTLEGLVDFDRINDLKTRLSVGAVGVTSGNFRYFDNFEFKKLGKIIGPEHIMASGALPPGFPSVIIDGEHYWDGGIASNTPLDYVLDTELERDMLIFQVDLFSARGDLPTSLLEAAEREKDIRYSSRTRMNTDKNKQLHNARRAVRDLISKLPDDLKNDPSVEFLAKVSRESTVTVVHLIYRSKNYESSSKDYDFSHVAMVEHWEAGVRDVHLSMRHKDWLERPQSGETMVTYDLTGDVTAPPAKRSE

SEQ ID NO: 13800 - protein, 167 aa, BradyrhizobiumColbertium
MRAAAAILITLLLAGCAGNETPVQQPSMYTDMAVPGSKLDVQAAAVMISQYRQNNGLGTVVIDPDLTRLAESQSNAMAAANKMDHDVRAPLARRLAAGGYPATVAVENISAGYHTLAEAFSGWRDSPPHRANMLKNGVTKLGIAASYAPGTKYKVFWTMILASTEPR

SEQ ID NO: 13801 - protein, 344 aa, BradyrhizobiumColbertium
MTIEVRNLVKTFGSFKALDGIDLKVDSGELVALLGPSGSGKTTLLRIVAGLDWPDSGEVFINGEDALAQGARERHVGFVFQHYALFRHMTVFENVAFGLRVQPRAVRKDEAAIRTRVKELLDLVQLDWLADRYPSQLSGGQRQRIALARALAIEPRILLLDEPFGALDAKVRKELREWLRSLHHEIHVTSIFVTHDQEEALEVANRVVVMDKGRIEQIGSPGDVYEYPATAFVHGFIGESIELPVQVEGGAVRLGGRPLRLAAEGLAPGASKLFVRRHDMLIGPPGSGAFEGAVRHVRNFGPVQRAEVALSGGETIEIDAPRDKELRVGDMIGLEPRRYRIFAG

SEQ ID NO: 13802 - protein, 51 aa, BradyrhizobiumColbertium
MPLLVEILYNEYQFAAAFAIASLLAMLAPITLIAKAVLERHLDEGQDASDH

SEQ ID NO: 13803 - protein, 67 aa, BradyrhizobiumColbertium
MIDGWQADVLTLTLACGIDAIARKGLTTTDWQKRLRRIRRPIRGTASIDPRRAPVTIVDEVVDRKAA

SEQ ID NO: 13804 - protein, 241 aa, BradyrhizobiumColbertium
MNAVAPQVSAVSSLPSADELDRALRDASPAEIVAAALKTVGRDKLALVSSFGTESATLLKVMADVDAAIPVIFLDTGWLFEETLAYRDTLIATLGLKDVRSVKPAEEVLSLDDPDRDLWFSDPDACCRIRKVEPLARALQPFSAWINGRKRFQGNARAEIPVVEDDGVRLKFNPFANVSRQEIEAIFVRARLPRHPLVASGFLSVGCMPCTSRTTEGEDARAGRWRGRAKTECGIHTMKAS

SEQ ID NO: 13805 - protein, 171 aa, BradyrhizobiumColbertium
MPLVSGGKITGDGFVKLAVDTPLPEGGDILVPAERFLAEADALLERSGKVGVIWPNNRDIAELVPYLGKVAAVALVFPTFRDGRAYSQARLLRERYNYRGELRATGQVLRDQFVFMLRAGFDAFEVKKQADAEAFMQTAKRYSVFYQPTGDGRITALHRRMQLRHSEGVGT

SEQ ID NO: 13806 - protein, 551 aa, BradyrhizobiumColbertium
MYAYDEIDRTLVNERVSEFRDQVKRRLSGELTEDEFKILRLQNGVYLQLHAYMFRVAIPYGTLATNQLRALAHVARKYDRGYGHFTTRQNIQFNWIKLAELPDALEDLAKVGIHAMQTSGNNMRNVTSDQWAGVAPGEIEDPRIWSELIRQHTTLHPEFSFLPRKFKIAITASDHDRAAIKIHDIGLRLIRNEKGETGFEVLVGGGLGRTPFIAKTIKHFVHGRDILSYIEAILRVYNQYGRRDNIYKARIKILVHELGIEKFSREVEEEWQQIRNSSLQIDDEVIEDIRSRFTYPAYEKLPHMPDELRQAAADPDFEAWRKNSVAPHKVQGYSIVTISLKPTGGPPGDATAKQMDALADLADQYSFGEIRVGHEQNLALPHVAKRDLPALWKALDKLGLATPNVNLITDIIACPGLDYCSLANARSIPIAQELTRRFANHELANLIGRLHINISGCINACGHHHVGHIGILGVEKNGEEVYQITIGGRADENATLGTLIGPGVKFDEVADVVEDVVEAYLALRERPEELFMDTVKRLGVEPFKERVYATR

SEQ ID NO: 13807 - protein, 105 aa, BradyrhizobiumColbertium
MTSPLEQKKIRIAGPSVVTANRTWDGIVVYRTAARAWSAELSEAAIVRNSEEAKALLAEAVADDVGAIGPYIAPVQIGADGRIVPGNLREQIRRTGVTIGQPAQV

SEQ ID NO: 13808 - protein, 474 aa, BradyrhizobiumColbertium
MRFLPVFLDLKAGPVVLIGAGELLRAKLRVLAAAGARIRVHAIDGNHDLGLNPEDAARVEIAAGDPLTADLSGVIAIVCAGAGDVGVAMSVRAKAAGLPVNVMDDLEHSSFIFPAIVDRGDVVVAVGTGGTSPVVARRVREKIEALLPARIGELAEFIGGFRKSINERIAEFPLRRRFWERVIDGPIGAAVLAGRRSEADASLKAIADPSEFARADKPEGSVALVGAGPGDPDLLTIKALRALQDADVVFHDELVSPEILDRIRRDTTRVAVGRRVGKPGIGQDAINKRMIEAAQSGQRVVRLKGGDPFVFGRGGEEVEALRAAGVAYSIIPGITAGLGGAADFEVPLTYRHEATRITFLTAHKARDAEAVDWSTLTDTKMTVVVYMGMTAAPAVRAGLFAAGRSPETPVGVFARVTRPDAQGAIGTLRDLPELVRRTQGGPAILIIGDVVRHAGSLRRQSPRQIISDLLDAAE

SEQ ID NO: 13809 - protein, 298 aa, BradyrhizobiumColbertium
MHLLKDDSAADRVSKPAPADPARAQEFSADVAPSMDHLDQLEAQSIYIFREAFARLKKIALLWSLGKDSNVMIWLARKAFFGKMPFPALHVDTGKKFPEMYRFRDHYGKEWDLDLRVEPCPPIDAVDPTLPPAARSAARKTEGLKMALAKYGFDGLIAGIRRDEEATRAKERVFSPRGLEGNWDVRDQPPEFWDHFNASPPQGAHLRIHPILHWTEADIWAYTKRENIPIIPLYLARNGKRYRSLGDQDITNPVASNASNIDEILIELEQTKVPERSGRALDHETEDAFERLRVAGYL

SEQ ID NO: 13810 - protein, 638 aa, BradyrhizobiumColbertium
MNMIVTTAPPSTPNGTTRPQVRIVIVGHVDHGKSTLVGRLLHETGSLPEGKLDMLKAVSARRGMPFEWSFLLDALQTERDQGITIDTTQIRFRTNSRDIVLIDAPGHAEFLRNMITGASQADGAVLIIDALEGVRDQTRRHGYLLHLLGVKQVAVVVNKMDRVDFSVNRFNAISDEISAHLNGLGVTPTAVIPISARDGDGVAERTDRIGWYKGPSVVEALDRLEPARALEALPLRLPVQAIYKFDDRRIVAGRIESGNLIAGDEIVIMPAGKIARIKSVESWPVTSVASRQGAGRSVGITLDRELFIERGDIVAHAGSAPRETRRLRARIFWLHDKPLARGDQLLVRCGPKESRATVVAIEKAIDPGELSSSENRVIGRNHVGEIDISLSSPIATDPYTENPRTGRLVIEVSGRIAGGGLVLSVDAGQRAVPVDIVPVESALRPDERSARYRHNGAVVWLTGLPASGKSTLAKALERRLFSHGGSPILLDGDTLRAGLNSDLGFSAADRSENIRRLAEVATHLARNGHIAIVAAVSPAREDRAAARRIADTAFREIHVATPAEVCEERDPKGHYKKARAGALASFTGIGNDYEKPDAAELVIDTSKRTVAEATDEVEHMLKTTGVLFDEVVDLAANI

SEQ ID NO: 13811 - protein, 40 aa, BradyrhizobiumColbertium
MAAFDPTAAKCAPGSGFRGPISPKKGAVRRPPRGCKNVKE

SEQ ID NO: 13812 - protein, 721 aa, BradyrhizobiumColbertium
MKRVDAHGLKIAPVLFDFIAKEAAPKTGIAPDAFWAGLAGIIKELGPKNRELLAFRETLQAKIDDWHRANKGKAFDLDAYTAFLKEIGYLVPEPATQNVETANVDEEIGKICGPQLVVPLTNARYALNAANARWGSLYDAFYGTDAIPHDASESGKGYNKARGDKVIAKAKAFLDNAVPLATGSHTDVTAYSVVAGQLAVKLKSGNATALKNAAQFAGFQGDAAAPSAVLLVNNGLHIEVKIDRSSAIGKDDPAGVADVIMEAAVSTILDMEDSVAAVDAEDKVLVYRNTLGLMNGTLSADFEKGGKTLTRSLNADRSYKTPDGKGELKLHGRSLLLMRNCGHHMFTDAVLDEKGEEVPEGLLDAAVSGLLAIHDLKGLSKVKNSRTGSAYIVKPKMHGPDEVSLTCEIFDRVEKMLGLPENTLKVGIMDEERRTTVNLKACIQRASKRIMFINTGFLDRTGDEIHTSMEAGPMIRKNEMKAQAWIKAYEDWNVDMGLACGLPGHAQIGKGMWAAPDKMADMLAQKLAHPQAGATTAWVPSPTAATLHALHYHQVNVIARQQELAKGGTRAKLSDILTIPVSKSNWAPDDVKQEIDNNCQGILGYVVRWIDQGVGCSKVPDIHDVGLMEDRATLRISSQHLANWLHQGVITEAQVMESLKRMAIVVDKQNAGDPIYKPMAPSFDGVAFKAACDLIFKGREQPNGYTEYILTARRREAKSLG

SEQ ID NO: 13813 - protein, 66 aa, BradyrhizobiumColbertium
MDWNRIEGNWKQFKGSAKEKWGKLTDDDLQLIEGRREQLEGRLQERYGKAKDQVRQDVDDWLKGLH

SEQ ID NO: 13814 - protein, 51 aa, BradyrhizobiumColbertium
MLVGVLVTFLVVILVLYLINMLPMDGRAKQIARVIVIIIGIVSLLKYLAVF

SEQ ID NO: 13815 - protein, 216 aa, BradyrhizobiumColbertium
MSRRLVGKTAGGAAILVAISAGLASAPSAQAQDFFSGLFGGFRMRPPPEIRMPFPHDDVPRYEAPRQRASYGGGMAYCVRGCDGRYFPAQGSDAESKAQSCKSFCPASETSLVYGGNIDDATTEKGKSYSDLPNAYRYRNEIVAGCTCNGKDPVGLASVKVEDDPTLRKGDIVAGANGLVVASRNANDRRGVAMNFSPLPDSVRARFRQVPVVAKE

SEQ ID NO: 13816 - protein, 277 aa, BradyrhizobiumColbertium
MEFVRQRITLMHTPTGQHMTTLLAVRSSFSPRAVAAFCFASALLAVPLDGASAQTFGYAPMQLHERMQLQDEGYTEGVANEAPRAADEDAQLPDRLRKQIVSFDRSEPAGTIVIDTNNTYLYYVLGNGRAIRYGVGVGREGFTWSGVQSVSRKAEWPDWHPPAAMIARQPYLPRFVAGGPGNPLGARAMYLGSSQYRIHGTNDPSTIGKFVSSGCIRMTNEDVIDLFSRVNVGAKVVVLPKSAPLMARGADPARKRPAVSALPSGRQALNITTSAVN

SEQ ID NO: 13817 - protein, 370 aa, BradyrhizobiumColbertium
MRVLPSERLISGSSESDPLPHSPAELPPVIRRTEFVAFALAGLLLIAIVTVLYVGRAFFLPVVMAFVIGTMLSPAAGFLERYRVPRSVGAVLIVIAVTAVVAFMVALIASPMMEWSTRLPELGAQLKDKLHVFDRPLALWREMQAMLGGSEGLPSFHIPKIDWVQPTIEFLSPTFTEFLLFFVTLILFIASWRDLRRAMIMTFSDHDARLRTLRILNEIEVHLGNYLLTVTLINVGVGVGTGIICALAGMPNPAGLGALAATLNFIPIIGPVAMFALLVVVGLIAFPTISGGLIAALAFGGLTFLEGHFVTPMIIGRRLALNALAVLLALAFWTWLWGPMGAFLSSPLLIVALILKEHLLPTDAPQLPQG

SEQ ID NO: 13818 - protein, 123 aa, BradyrhizobiumColbertium
MPTTDAEARMRDWTDKATRERLEKDVAAVKSDIAALTDQITDVLNSFANSTSKQARRGYRQARENVDSAMDDMSERGSAMMEAAHDAYGSIEETLEEAITQRPLATVGLALGIGFLIGAAWRR

SEQ ID NO: 13819 - protein, 151 aa, BradyrhizobiumColbertium
MLQRIIEGISASTGTTVRLTSLAAAAAFALLVTTSFLCAAAFISVLQTYGPVQACLAGAGIFFLLTLAAAGSYWGYKRELQKRAEIAAERAAKSAAQSMLADPMLLATGLQIVRAIGMKRLLPILAIGGVALGILASRAGVSDEVSAEPAE

SEQ ID NO: 13820 - protein, 380 aa, BradyrhizobiumColbertium
MKPSVKANLAAFQHDSRLYLTLGIANWSVFVDHIPNNVVNLLTLRNFGFSGAADLFVFVVGYGVAIIHGRMALERGYLVAATRIFRRVWRLYAAYVVLFVIYIDTIAYVASQSMAPEIIHHYNISGILEHPLRILIRGLVLQEEPLNLDLLQLMIPLMAFFPLALWGLLRRPNLTLAASVALYLAARWFDWNFRVSPDQEWTFNPLCWQMLMVLGGWFAVTGAPGRTLRDLPWLRMLAGSYLVFAMAVALLRHSPESSAYLPDLLLDTIAPTDKENLAPYRVLHFLALAFVATRLVPADHPGLRLKPLQAVIRCGEEWLAVFCVGVFLSFAGHLILITGPNLVLMQIAVSIIGFAAMTAVAYYVAWSKRQDLPAALRQQA

SEQ ID NO: 13821 - protein, 182 aa, BradyrhizobiumColbertium
METSNAILESAYALMASTGLAATTIDAVARHSSVSKMTIYKWWPSREALLIDAFLHHAAQMLPLPPASSGSPAARARRHAAAYAEALQGEFGKVQLAVVSECISKTGSAGLFYARYLQFRRDALVEMIAEGQKDGSILAGGLPEDLYDAIYGGLFYRYIFGIAPVTAAYARNLVDLVLRPKD

SEQ ID NO: 13822 - protein, 553 aa, BradyrhizobiumColbertium
MVRLGFIIGFIALLGVLLSGLAAYRVHDQELALDRIALARAIDVHASLVQDRLTERELLARVASGLFRAPSVIKSNMLEPLRSAIYAFKTDFVVAGWIARLKPDELTAAQAAIAGAGFPNPEIRGYDDKPINPADVTRPIDVLLDLEPRSDETKALPGRSYDQDPVRGAMLTRARVEKRSIASDPIPLLRGNGPIGIIVAAPVVPEGATEPAGFVTFSYELATLMLTNDDMSLFSVALRDPRKEGGELVANDQGVVSTRMAAADGRAPSATRTVSFGGRDWQLSYYANVNSVRRAEQTAIIVAAIGFAITAMVCGLFGYVAYNNLRLSREIQVRIGFERRLTAVIDELNHRVKNILAVIQSIVTRTLRHGSDIDIARELLIGRIHAMSNVVSLLSESQWQGVKLKGLFEARAIPHADRIAVNGPDIAVSARAAQSLSLLFFELASHSDEGLSLVGKHPHITANWTVTGEEGKEVFHFRWEEFNTSEATRRPDSDFGLILLDRVAPEALGGTAKRFFTDVSYVYELTAPMETVVDMTERDRTDKISAPVRPARS

SEQ ID NO: 13823 - protein, 207 aa, BradyrhizobiumColbertium
MSKSHGPLRVGVGGPVGSGKTALMDLLCKTMRERYDIAAITNDIYTKWDAEFLVRSGSLTPDRIAGVETGGCPHTAIREDASMNLAAVADMRAKFPGLDLVLIESGGDNLAATFSPELADITIYVIDVAAGDKIPSKGGPGITRSDLLVINKTDLAPHVGASLEKMETDARRMRGERPFVMTNLKKSVGLDRIVAFIEAKGGLQRPG

SEQ ID NO: 13824 - protein, 242 aa, BradyrhizobiumColbertium
MLMTTNEPVGAGGLAEEEAAALYRLMTWLSPAFPVGGFSYSSGLEWAVEAGDITDTAALADWLDVMLGDGSGFCDATFLVRAYRAAEAGNTTALNEIAELAAAFVPSRERQLETTSQGRAFIDIARAAWDADGLDAMIAACSTPLVYPVAVGVVAAMHGVPLGSTLHAFLHALVSNWISAASRLIPLGQTDSQRVLVKLEAAVAATANRALNAALDDIGSATFRADLASLRHETQYTRLFRS

SEQ ID NO: 13825 - protein, 210 aa, BradyrhizobiumColbertium
MIRATQVKGQHRFTEAPVDTVVLDFDDRHRRRMAMTGTRGLEFLLDLEHAVALRGGDALVLEDGRLVEVVAAPEPLLEIRGRDPHHLIRVGWHLGNRHLPTQIMAKALRIRRDHVIEEMVKGLGARVIEIEAPFDPEGGAYADAGHAHGHDDHAHHGHDHHDHGHDHHGHGHRHHDHAAHGHGHEHHHHHDEHCDHPDHHHGHTHAHDHK

SEQ ID NO: 13826 - protein, 99 aa, BradyrhizobiumColbertium
MIYVVATLTIKPETRAEFIAAATACIKETRKEPGNIAYDMHESVTDPSKMVFVEQWENAEALVPHRAMEHMKTFGRVAVKCFTAPPKIEVITPEKVETR

SEQ ID NO: 13827 - protein, 571 aa, BradyrhizobiumColbertium
MSVRIKRSVYADMFGPTTGDKVRLADTDLIIEVEKDFTTYGEEVKFGGGKVIRDGMGQSQVTNRQGAADTVITNALIVDHWGIVKADVAIKDGMISAIGKAGNPDIQPGVTIIIGPGTDVIAGEGKILTAGGFDSHIHFICPQQIEHALMSGVTSMLGGGTGPSHGTFATTCTPGPWHIARMIQSFDAFPVNLGISGKGNASRPAALVEMIKAGACALKLHEDWGTTPAAIDNCLSVADDHDIQVMIHTDTLNESGFVEDTIKAFKGRTIHAFHTEGAGGGHAPDIIKVAGLKNVLPSSTNPTRPFTRNTIDEHLDMLMVCHHLDPSIAEDLAFAESRIRKETIAAEDILHDLGALSMMSSDSQAMGRLGEVIIRTWQTADKMKKQRGSLPQDKGKDNDNFRVKRYIAKYTINPAIAHGVSKLIGSVEKGKLADLVLWSPAFFGVKPDCIVKGGSIVAAPMGDPNASIPTPQPVHYQPMFGAFGRARTASSVVFTSKAAVTGGLARKLGIEKKLYAVQNVRGRISKKSMIHNDATPNIEVDPETYEVRADGELLTCAPAEVLPMSQRYFMY

SEQ ID NO: 13828 - protein, 179 aa, BradyrhizobiumColbertium
MLSPIRLISEAAELAARRHNGMARKGRGNEPYINHLAEVANLLATATDGADAELVAAGWLHDTIEDTDTTREELARRFSERVASLVAECTDDMSLPKAMRRQKQIEDAPHKSPGAKLIKIADKISNTGARIQTDPTSEERDDLADYIDWATQVVAGCRGSNAWLDEKFDDAVKAAKAVL

SEQ ID NO: 13829 - protein, 101 aa, BradyrhizobiumColbertium
MIPGELFIQDGEIELNAGRKTVTLTVANTGDRPIQVGSHYHFFETNPALKFDRKKARGMRLDIAAGTAVRFEPGQTRDVQLVAVAGKKTIYGFRGDVMGKL

SEQ ID NO: 13830 - protein, 100 aa, BradyrhizobiumColbertium
MNLSPREKDKLLISMVAIVARRRLDRGVKLNHPEAIAIISDFILEGARDGRTVAELMQSGAQVLTRDQVMPGIPEMIHDIQVEATFPDGTKLVTVHEPIR

SEQ ID NO: 13831 - protein, 269 aa, BradyrhizobiumColbertium
MPGLFEANRARGAVRLDVHARDRVTRRGTLHESGSLRVRFPSPEDEGLSGVFVNTAGGVAGGDCFDIDIAAGGGTRLTLTTAAAEKIYRAPGEAAQLNIALRAAAGAHLAWLPQETILFDRARVHRRFDIALDEAASLLLCEIVVFGRTAMGERMQQGEFVDRWRLRRGGRLVFAETVRLDGDIGAKLARSAVANSGTAIGTALIVPGDETLVERIREASESFGGEVGISAWNGFAMARFCAQDAARLRADMMAVLARTGAVLPRLWLN

SEQ ID NO: 13832 - protein, 231 aa, BradyrhizobiumColbertium
MLEVKDINLFYGAAQALRGVSISAEPGKVTCVLGRNGVGKTSLLRAMVGQYPISSGAIVLDGSDITGLKPYERARRGIGFVPQGREIFPLLTVEENLKTGFGPLKREDKHIPDDVFSLFPVLQSMLGRRGGDLSGGQQQQLAIGRALVMRPKLLLLDEPTEGIQPSIIKDIGRAISYLRNLGNIAIVLVEQYLDFACELGDSFAVMDRGAVKFTCDRANLDASEISRQMAL

SEQ ID NO: 13833 - protein, 253 aa, BradyrhizobiumColbertium
MNVMDTRTTSAMLYLDGVHVSFDGFHAINNLSLTLEPGEMRAIIGPNGAGKTTMMDIITGKTKPDEGTVLFDGVTDLTRLDETRIAELGIGRKFQKPTVFESQTVHDNLLLALNVDHSVRGTLFWRGSKAETERIDKVLETIRLTEARNRLAGSLSHGQKQWLEIGMLLAKEPKLLLVDEPVAGMTDIETHLTAELLKEINKTHTVMVVEHDMTFVRELGVKVTCLHEGTVLAEGTIDQVSSNERVIEVYLGR

SEQ ID NO: 13834 - protein, 385 aa, BradyrhizobiumColbertium
MLTRSLDRGATIFLAIVAACGILIPLSNLLLPAGSFLQVPTYLVALWGKYVCYAILALSIDLIWGYCGILSLGHGAFFALGGYAMGMYLMRQIGTRGVYGNPILPDFMVFLNWQELPWYWYGFDMFWFAALMVLVVPGLLAFCFGWLAFRSRVTGVYLSIITQAMTYALLLAFFRNDFGFGGNNGLTDFKDILGFNVQAEGTRAALFALSCLALIIGFLICRAIVSSKLGKVLIAVRDAESRTRFLGYRVESYKLFVFTVSACMAGVAGALYVPQVGIINPSEFAPGNSIEAVIWVAVGGRGTLVGAALGAVVVNYAKTFFTSGVLAPYWLFMLGALFILVTLLLPRGIVGTFNAWRDSAREKRTAAAAASAAAEDGMVQPKMAE

SEQ ID NO: 13835 - protein, 531 aa, BradyrhizobiumColbertium
MSARLYSLALTLFLIAFALPALAGPFEDAVAKFANDDFSDTEEAIGVIAGSGNKLAFPIISALQDGRLMADPDSKKVYVTGADGKSIDAASGEAVASVPDSASAVRLNNRLRRSVDAAIGSLTLQSPDLGTRLQAAQSVFKSHEETALEAVDAALAKETNRSVKAALGEARAAILLFKPDASEVEKLEAVATLKARGDQDALALLTGMGDQPALVTKAAASAIASIQNSLAVWSMVQNAWYGLSLGSVLLLAAIGLAITFGVMGVINMAHGEMVMIGAYTTFVVQEVIRSSYPGLFDYSLLIAVPLAFLVAGAIGVLIERSIIRFLYGRPLETLLATWGLSLVLQQAVRTMFGPTNREVGNPSWMSGAFELGQITITYNRLWILLFTLAVFAILLAMLRYTALGLEMRAVTQNRRMAASMGIATSRVDALTFGLGSGIAGIAGVALSQIDNVSPNLGQSYIIDSFMVVVFGGVGNLWGTLVGAFTLGIANKFLEPVAGAVLGKIAILVLIILFIQKRPRGLFALKGRAVEA

SEQ ID NO: 13836 - protein, 442 aa, BradyrhizobiumColbertium
MFNKSTHDIAASFSRRGVLAATAGLVLGLASLTGAKAADDTIKVGVLHSLSGTMAISETTLKDTILFLIDEQNKKGGVLGKKLEAVVVDPASNWPLFAEKARELITKDKVSVVFGCWTSVSRKSVLPVFKELNSILFYPVQYEGEESERNVFYTGAAPNQQAIPAVDYLMKEEKVKRWVLAGTDYVYPRTTNKILEAYLKSKGVAQEDIMINYTPFGHSDWQTIVADIKKFGSAGKKTAVVSTINGDANVPFYKELGNQGIKAKDIPVVAFSVGEEELAGIDTKPLVGHLAAWNYFQSIKTKDGSNEKFIKDWQAYTKNPKRVTNDPMEAHVIGFNMWVKAVEKVKSTDPDKVIDALPGTEAPNLTGGVSKMLPNHHITKPVFIGEIKGNGQFDVVWKTPGLVPGDAWSKELDGSKDLIGDWVGKKCGNFNTKTNKCLGSGS

SEQ ID NO: 13837 - protein, 434 aa, BradyrhizobiumColbertium
MLSPTRELSGQILDSFNAYGRHIRLSSTLAIGGVPMGRQVRALMQGVDVLVATPGRLLDLVQSNGLKLGSVEFLVLDEADRMLDMGFINDIRKIVAKLPIKRQTLFFSATMPKDIAELADAMLRDPARVAVTPVSSTAERINQRILQVDFTAKPSFLAKLLKDEPVNRALVFTRTKHGADKVVKTLEKAGIPANAIHGNKSQNHRERTLAQFRTGEIRTLVATDIAARGIDVDGISHVINFDLPNVPETYVHRIGRTARAGAEGTAISLVAGGEELSYLRDIERLIRVALPREDHRTDAGRRDAGPAPSQQRQGRPGGRPGQRPQGARHGDGRRSDERHADGRHHGAGKQGDGRPGEGRHGEARHVDGRPGTGPNASKGSRRRRSGGKMHSSPVDRPEQRSAHSAGTPDGIQGVAFLRRESRPSSQPNRKPYSH

SEQ ID NO: 13838 - protein, 95 aa, BradyrhizobiumColbertium
MAKEELIQFEGLVTEILPDARYRVQLDAGHEIVAYTAGKMKKNRIKTLAGDRVTVEMSPYDLEKGRLIFRHKDERPSTAGGPPRPGQRGGQFRRR

SEQ ID NO: 13839 - protein, 70 aa, BradyrhizobiumColbertium
MSMGTVKWFNATKGFGFIQPDDGGQDVFVHISAVERAGLGSLREGQKISYEIVADRRSGKSAADNLRAAG

SEQ ID NO: 13840 - protein, 210 aa, BradyrhizobiumColbertium
MDLSGPMQTIANIWRNARCSMGEFVADKRALAATEFAVIVPLMLVMFFGTVEFSSAVAIDRKVTLIARTLSDLTSQSTKLYDADMQNTFTASISVVMPYDASLVKGTISQIYIDANSIATVQWSRAGTIASGATQATLATSARNAGDKVTSMIPPTLLIPSSYLILSEASYTYTPTVGYVLKSSITLSDLSYTRPRQVSCVPYNDIPSTC

SEQ ID NO: 13841 - protein, 193 aa, BradyrhizobiumColbertium
MPSHAPTRFTLRKALARFRGNRRGSAAVEFALVAPMFFGLLFAIIETALVFFSGQVLETIAQDSARAILTGQAQAQGGSVAACQTAPNAVTACDQTTFKAFVCSKIPALFDCSKLYVDVVSTSSFGTLNLTSYGNSCNFNPTGMQYNAGGSGQVVVVRLFYQWPLVVTGLGYNIGCSNKRLLVATAAFKNEPF

SEQ ID NO: 13842 - protein, 162 aa, BradyrhizobiumColbertium
MLRRHARVCLLVAAAALAWPAAGLAEPTVDTIAVNVDQAKLVRLPGKVATIVVGNPLIADVTLQPGGMIVVTGKGYGATNFIALDRGGEILVDRQIQVEGPSDRLVTVYRGVERESYSCAPLCQRRVTLGDSDTYFNNTMSQAGSLSSSASAGGAGAAAKPN

SEQ ID NO: 13843 - protein, 270 aa, BradyrhizobiumColbertium
MQVALMLGETIVKVIPVTMVLAAVFTVLEHFWACNPGAPWWRKREIITDICYWFFVPVFARTMRIGLLIVGAGVIFNIHDPDELIAFYDNGHGPLAQLPLWVQGLLFLVLSDFMLYWLHRVFHDGGFWKYHAIHHSSEEIGWISAARFHPVNLLLGTISVDVVLLMAGISPNVMIWVGPFTTFHSAFVHANLNWTFGPLKYVLATPVFHRWHHTSLEEGGDTNFAGTFPIWDVLFGTFRMPEGKLPQDYGKDEATMPKEIGGQLAYPFRH

SEQ ID NO: 13844 - protein, 54 aa, BradyrhizobiumColbertium
MKNLIARFAKDESGATAIEYGLIAAGIALAIITVVNSLGTTLNSKFTSISTSLK

SEQ ID NO: 13845 - protein, 48 aa, BradyrhizobiumColbertium
MALHKFRTDAAVAANEPRAAQAGSPAYWICLALLLATVALAARIAIFW

SEQ ID NO: 13846 - protein, 174 aa, BradyrhizobiumColbertium
MILDLARLLLFPALMAFAAASDLFTMTISNRVSLLLVAGFFVLAFAGGMAPYEMLSHVGAGAVLLVVAFTCFAMGWVGGGDAKVAASVALWFGFAHLTNFLLYASLFGGALTLLLLQFRQWPLPYGLAGQAWLARLHAKESGIPYGIALALSALMVYPETEWVKAIDLAHLALR

SEQ ID NO: 13847 - protein, 265 aa, BradyrhizobiumColbertium
MNRARIVVLTVAISAGGVAAYLASGTDNSAPPPLPAAQLPTVDVLVAKNDIGLGQTVKPEDVQWQTWPAATASATFIRRNERPEGVTQVAGSIARAPFIQGEPIRDQKLVKAENSGFMAAILPSGMRAISTEISPETGAGGFILPNDRVDVILTRRLKNPDQSSGAPDVVTSEIILANIRVLAIDQAPKEKDGQNAVIGKTVTLELTPSQTATLSAARQSGTLSLALRSIVDVKMSEITLDDSAQKQEGVSIIRYGIPSQAAKAR

SEQ ID NO: 13848 - protein, 405 aa, BradyrhizobiumColbertium
MVRSAQRAYIIGAAVGQTNIVFFDSAGQQIAAYDIAVKRDLNGARAALKQILPNSDIQIDGLGDGIILSGTAANPMEAQQANELAARLAGGVDKVVNSIVVRGRDQIMLKVTVAEVQRNIVKQLGIDLSANLNYGTSVVSFTNSNPFTAYGRNLVDGNNLTTKFGATPSVQATLRAMETAGVIRTLAEPNLTAISGESATFIAGGEFPVPAGYSCDPVTHVCTTQISFKKFGISLNFTPVVLSEGKISMRVMTEVSELSNENAITLSQAVTSTSVNSLTVPSIRTRRAETSLEIPSGGAMAMAGLIQQQTKQAVSGLPGLMQLPILGTLFRSRDFVNNATELVVIVTPYVVRAVAPKDLSRPDDGFAPPADPQAQLIGNINRLYGVPGRTEPAKNYRGTYGFITD

SEQ ID NO: 13849 - protein, 244 aa, BradyrhizobiumColbertium
MNTRRPQLRKRAIRLSGALVGMALVLGGCRHDEVVTASIPDDYKQRHPIAIEEQNRSIVVFVGHARGGLTAAQRADVMGVASTWLREGTGAIHIDVPSHTPNARPVADTMREIQAILAAAGVPPRGVSVRPYQPEDKRFLPPIRLTYSKIAAVAGPCGLWPEDIGPSMKNKRWFENKDYYNYGCAYQRNLAAMVDNPSDLEQPRPETPSYTPRRITGFEKYRRGTTTATTYPEADRAKLSDTGR

SEQ ID NO: 13850 - protein, 422 aa, BradyrhizobiumColbertium
MISYARQTHEEQPAAAPPPVEEHIAPAPRVSVQAFCETVETAAAVQSAGEDRRLGKAHLKIQIGGMAAAIEAYRSAPTPNVIVLESDGRSDLLSGLDQLATVCDAGTRVVVIGRINDVMLYRELVRRGVSDYVLAPVGAIDVVRSICNLFSAPEAKAVGRIIAVVGAKGGVGASTISHNVAWAIARDLAMDAVVADLDLAFGTAGLDYNQDPPQGIADAVFSPDRVDTAFIDRLLSKCTDHLSLLAAPATLDRVYDFGTDAFDAVFDTLRSTMPCIVLDVPHQWSGWTKRALIGADDILIVAAPDLANLRNTKNLFDLLKAARPNDRPPLYCLNQVGVPKRPEIAAAEFAKAIESQPIVSIPFEPQIFGSAANNGQMIAEISANHKSIEMFLQIAQRLTGRSETKKQKSSLLSPLIDKLRGK

SEQ ID NO: 13851 - protein, 489 aa, BradyrhizobiumColbertium
MFGKRSGTDIDFRAPKPGAVSPEPSQAPAPTVPRAPPPPAVASPPLAPAKAPPPPAMESRRSDNYYEVKATIFGALIEAIDLAQLAKLDSESAREEIRDIVNEIIAIKNIVMSIAEQEELLDDICNDVLGYGPLEPLLSRDDIADIMVNGANTVYIEVGGKIQRTGIRFRDNQQLLNICQRIVSQVGRRVDESSPICDARLADGSRVNAIVPPLSIDGPTLTIRKFKKDKLTLDQLVKFGAITPEGAEILQIIGRVRCNVLISGGTGSGKTTLLNCLTNYIEHDERVITCEDAAELQLQQPHVVRLETRPPNIEGEGQVTMRELVRNCLRMRPERIIVGEVRGPEAFDLLQAMNTGHDGSMGTLHANNPREALSRCESMITMGGFSLPSRTIREMICASIDVIIQAARLRDGSRRITHITEVMGMEGDTIITQDIFLYDMVGEDANGKIIGRHRSTGIGRPKFWERARYYGEEKRLAAALDAAEVAPKT

SEQ ID NO: 13852 - protein, 325 aa, BradyrhizobiumColbertium
MNMQVLALAFLATAAVGGIAWVFLYPLLSGERKAESRRASVARAEAPAARQAEKTQRSRREQVETTLKDLEARRAQEKSVPLSVRLSQAGLDWTPQKFWIVSAVVAGVFFAGALFAGGGLIGAAGLAFAGGFGLPRWALGFLKNRREAKFLAALPDAVDVIVRGIKAGLPLFESIKVVAADAPEPLRSEFLTIIETQAIGMPLGEACARLYERMPLPEANFFGIVVSIQQKSGGNLSEALGNLSKVLRDRKKMKEKIQAMSMEAKASAGIIGSLPPIVMFLVYLTTPQYISLLWTHPTGQLMLVGCVIWMSIGIMVMKKMINFDF

SEQ ID NO: 13853 - protein, 324 aa, BradyrhizobiumColbertium
MVEFLVSKLHDVRFMTMLLAAIAASATVYTLVMPLFAGEGLSKRMKAVASERERIRQRERERLHKSEKVSLRQTPKQLVSKVVEDFNLTKWLAQEAARDKLIMAGYRGQAPYITFLFARMVAPIVLLIGSVLYVFLIARLEQPMPIKIGICVGAAYLGLQAPMLFLKNAISKRQLSIKRAFPDALDLLLICIESGMSVEMAFRKVATEIVGQSIALSEEFTLTTAELSYLQDRKVAYENLARRTGLEGVKSVCLALQQAERYGTPLGQSLRVMAQENRDMRMNEAEKKAAALPPKLTVPMILFFLPVLFVVILGPTGIKISEMQ

SEQ ID NO: 13854 - protein, 246 aa, BradyrhizobiumColbertium
MSKLSEATGSVGPRAEAASADRAPADPARAVEAYGERYRANPKDADAALAYGQALRANGQRAQAAAVLEQATIANPGNKALLAQYGRALADNGNFKQAFDVLSKAHSPDNPDWRLLSVQGTALDQMGRHEEARSYYASALKIAPGDPGVLSNLGLSYMLSRELPKAEESLRQAYASPRASARVRQNLALVIGLQGRFAEAESIVKADLPPDEAAANVAYLKDMLRRGDSPRGAPKRTPIASLSQPD

SEQ ID NO: 13855 - protein, 500 aa, BradyrhizobiumColbertium
MDRSFVIAHISDLHLDGSGRQLASIETLTAAIREKMAGVADVPDRILLITGDLVDEPTPRALDEALAVIASFRQTGLFTDIQAVAGDHDVKRPSQRAGRHDAYDYLHLPRVAKNVYYRQAGLDLVLLDSNRASLMTLASGKVDEGTYRTTVADSARLSAELAGSVGSAGHADYAEPAENLVRVLALHHHPLPQATGEGKRFLGAPDEPLMYLAAPATFLEAATSLNVDLVLHGHRHVEGLTRYSIPDPRATGSESDEAFWRTIYVLCCPSSTGQAGDDAGFNLIHFGPAVRAGGTEHRFSITRYSRLRNDAAFRPLDSNLPDGVIGLPAGRDFTRDPAVQSTIDVASSVSLKRDQIAAITRRLFMRRSFYDEAEPDWPAALYTYVVSSQAWAGLEGKVARSRSKSVIDTLAAVRTLLSRLIEQSADVLGIDRAQLDELHGRGLINRDDFLRELPRLSCEGTDVRRRARQRQRLLRDLDQQVRALGLDLDLGGEVPPSSPP

SEQ ID NO: 13856 - protein, 111 aa, BradyrhizobiumColbertium
MQTDETSQSFAAAAISFAVKLPGSGARPHHYRILALLAGRWSSTSMTAPFMRGLIRQTSALTKSTTGLPRKSRSREAQPLQIARISRELALEEHGLRPLLAYRLWHYPRTF

SEQ ID NO: 13857 - protein, 470 aa, BradyrhizobiumColbertium
MHNPLDLTTPDPPMPSVFETSSTATPITFVTRSSWDRVAETLPPVQRQFATVSSFAGKPGSSLALPAPDGTIAQVLFGLEDEGARSRDLFRPGALPGLLPPGTYRFANAPHDTRLAALAFTLGCYRFARYRKADRPEVRLVPPDDVDPAEIERIADATMLARDLINTPSNDMGPEELAAAAQALATEFGASFTCTMGEELRTGFPLIHAVGMASSRAPRLIDIGWGDPEHPKVTLVGKGVCFDTGGLDLKPSSGMLIMKKDMGGAANVLALARMVMDAKLKVRLRVLIPAVENAVGGNAFRPLDIFTSRKGITVEIGNTDAEGRLVLADALALADEEKPDLLIDLGTLTGAARVALGPDLPPYYTNDETLAADVARCAVKENDPLWRMPLWPAYDSWLDSKTATITNAPSGGFAGSITCALFLQRFVEHAKSWLHVDIYGWTPSAKPARPEGGECQAARAIYALLSERYA

SEQ ID NO: 13858 - protein, 284 aa, BradyrhizobiumColbertium
MRDPGRDPRLTPARGDIAAKYLEGKVQADRFVTGEEFEVVDAIASLREQPSSSAMLMTEALRGERVTVYDRNGEGWAWGQLGGDGYVGWLPDAALMKPAAAPTHKVSALRTFAFPGPSIKLPPADTLVLGSRLTIVREEGVFSVTREGTFLPRTHLAPLDRRESDFVAVAERFVGTPYLWGGKSSLGIDCSGLVQVSLSSAGIGCPRDSDMQLAGLGRGLEPDERGSLVRGDLIFWKGHVAIVRDGSTMVHANAYHMATVIEPIEPAIARIRQAGSEVVAIKRL

SEQ ID NO: 13859 - protein, 406 aa, BradyrhizobiumColbertium
MLTQVGIPEPETRLKSYPHQLSGGQRQRVMIAMALANEPDLLIADEPTTALDVTVQAQILALLAEIRSRLGMSLLFITHDLGIVRRIADTVCVMKGGVIVEQGPLEQVFKAPKHPYTRDLLAAEPKPDPAPPQPNAPVVMSANDLKVWFPIKRGLMRKTVGHIKAVDGVSVAVRKGETLGVVGESGSGKTTLGLALLRLISSDGRIVFLGKDIQGLRFKEMRPFRRDMQIVFQDPFGSLSPRMSVADIIAEGLSVHQPQLSREEREVRVVKALEDVGLQPDTRYRYPHEFSGGQRQRISIARAIVLEPDFVVLDEPTSALDMLFQAQMVDLLRELQRKRELTYMFISHDLRVVASLASHLIVMRGGKVVEEGQAAELFKNPKTDYTRALFAAAFRLETAGNWAAAT

SEQ ID NO: 13860 - protein, 393 aa, BradyrhizobiumColbertium
MTLAAPRTPIETTAKSPLGGSVPITRKPFAPSPLNRRRWQNFKANRRGYWSFWIFISLFVISLFAELIANDRPFLIKFDGRLYWPAFVTYSETAFGGDFETAADYRDPYLQKLIKDKNGTIVWPLIRYSYDTHNLDLPTPAPSPPTWMLTEKQCRPVVEKKGLKSCRDLEYNWLGTDDQGRDVVARLIYGFRISVLFGLCLTIVSSVIGIAAGAVQGYFGGRVDLIFQRFIEIWTAIPSLYLLLILSSVLVPGFFVLLGILLLFSWVSLVGLVRAEFLRGRNFEYIQAARALGVSNPVIMFRHLLPNAMVATMTFLPFIVSSSVMTLTALDFLGFGLPPGSPSLGELLSQAKSNVQAPWLGFSGFFSVAIMLSLLIFIGEAVRDAFDPRKTFR

SEQ ID NO: 13861 - protein, 369 aa, BradyrhizobiumColbertium
MSAYIARRILLMIPTLLGILFVSFVVVQFAPGGPVERVIAQLSGADTGGTSRISGGSDFAQRAPGQVGAGGDAINSKYRGAQGLDPDFIKKLEAQFGFDKPAPERFALMVWNFARFDFGKSYFRDVSVIQLIKEKLPVSISLGIWLTLIPYLISIPLGIRKAMKDGTRLDTWTSTVLVLGYAIPGFLFAILLIILFAGGSFFNWFPLRGLTSDGWSDFPWYWKIVDYFWHLTLPLIAMGLGAFTTMTFLTKNSFLDEIRKQYVMTARAKGCSENRVLYGHVFRNAMLIVIAGFPGTFIHAFFSGSLLIETIFSLDGLGLLSFESVLNRDYPVVFGTLYIFSLVGLVINLISDLTYMWIDPRIDFEAREV

SEQ ID NO: 13862 - protein, 633 aa, BradyrhizobiumColbertium
MKDVSRMTQMSRRHVLALGVGGTLGASIGAPLRSARASETATETHGISAFGDLKYPADFRHFDYVNPAAPKGGTFSLIPSVRAYNQSYQTFNSLNAFILKGDGAQGMDMTFSPLMLRASDEPDAMYGLAAKSVQISPDKLVYRYTMRPEAKFHDGTKLTAHDAAFSLTTLKAKGHPLIIVQMRDFVSAEAIDDATLVVTFAKGRARDVPLYVAGLPIFSKAYYASRPFDESTLDIPLGSGPYKVGRFEVNRYIEFERVKDWWAADLPPCRGSYNFDVVRYEFYRDRDVAFEGFTGKSYLYREEFTSRLWATRYDFPAVKDGRVKMEVVPDDTPSGAQGWFINTRREKFKDPRVREALINAFDFEWTNKTIMYGAYARTVSPFQNSDLMAGDAPPSPEELKLLEPFRGKVPDDVFTAPFTPPVTDGSGQDRSLLRKAQQLLTEAGVAIKDGKRILPNGEVFRIEFLLDEPSFQPHHAPYIKNLATLGIEANVRLVDAVQYRARQDDFDFDMTIQRFSMSATPGDAMRSFFSSQVANTKGSYNLAGIANPAIDAMIEKIMAADSREELTVACRAFDRLFRAGRYWVPQWYNKTHRLAYWDQFGHPPKLPRYANGVGAPDIWWHEPAKAAKLEQAK

SEQ ID NO: 13863 - protein, 633 aa, BradyrhizobiumColbertium
MAITRRDLLLTGTAAAALPVLGSVAGVPAIGPAHAQSPSELPWRHALSLFGKVKYPADFKRFDYVNPDAPKGGIARQIAVGTFDNFNIVVSGVKGQVAGAVAFIYESLMTPSLDEVSTEYGALAEAVSHPDDFSFVIYRLRPQAKWHDGKPVTAEDVIFSLESFKKHHPMYSAYYSHVVKAEKVGERDVKFIFDAPGNRELPQIVGQLTVLPKHWWEGTDAQGRKRDVSATTLEVPLGSGPYRVKEFVAGRSIALERVKDYWGRDLPANVGRNNFDELRYEYFRDATVAIEAFKADQVDWRTENSAKNWATAYDFPAVTDKRVILEEFVNRSSGVMQAFVPNLRRAKFSDPRVRRALNYAFDFEEMNKQIFYGQYKRISSYFDGIEDLMATGLPQGKELEILETVRAQVPPEVFTTAYTNPVGGSPEAVRENLREALRLFKEAGYEVRERKLVDVKTGTQFSLELLNSDPSFERITLFYKPSLERLGIAVSVRTIDPTQYENRTREWDFDIVTNSWGESQSPGNEQREFWSSKTADIPGSRNIAGIKNPAIDKLIERVIYATDRDDLVAATKALDRVLLWNHYVVPQWTYNKVRTARWDRFGRPAELPRYGQSGFPFIWWYDADKAARIVKKS

SEQ ID NO: 13864 - protein, 184 aa, BradyrhizobiumColbertium
MDSFELNKILGAVFGTCLVLLVTSFTAQALFSPKMPEKPGFEIAVKQEAGPGKEGGAAAAPSEPIEKLLQTASVEKGAAAAKKCGACHTFEKGGPNRVGPNLFGVVGEPKGQGHGGFNFSAAMKAKGGNWTFDDLNKFLANPKGFIPGTAMGFAGIAKDSERADIIAYLNSMSEHPQPLPTASK

SEQ ID NO: 13865 - protein, 246 aa, BradyrhizobiumColbertium
MIDPRILVLIPARMAATRLPGKPLADIAGLPMIVHVLRRAEAAAIGRVAVATDTAEIASVVTAHGGEAVMTRTDHPSGSDRIHEAMQKLDPEGKAEIVVNLQGDFPTITVDNIREVLPPLQDSAVDIATLASQIHTEEEDLAPSVVKAIGTSVGGRRMRALYFTRATAPTGDGPRYHHIGLYAYRRAALERYVSLPPSPLELQEKLEQLRALEAGMRIDFTIVDTVPRGVDTPADLETARSILSNS

SEQ ID NO: 13866 - protein, 285 aa, BradyrhizobiumColbertium
MSKMKIAFQGESGANSHIAIVEAYPEAEPMPCATFEDALSAISSGEADLGMIPIENSVAGRVADIHHLLPASGLYIIGEWFLPVRHQLMAVKGTKLEDIRSVESHVHALGQCRRIIRKLGIKPIVHADTAGSARDISERKDKTVAAIASRLAAKIYGLDILAEDIEDEAHNTTRFVVLAREPKWATQGSSPLVTTFVFRVRNLPAALYKALGGFATNGVNMTKLESYMVDGNFFATQFYADVEGHPEDKGLAFAIEELKFFSREFRIVGVYPGHPFRATFSETQD

SEQ ID NO: 13867 - protein, 338 aa, BradyrhizobiumColbertium
MIPLSVLDLSVVTTGTKPAAALRNSIDLARHVDGLGYVRYWLAEHHNLASVASPAPDVMIGQIAAVTKHLRVGSGGVMLPNHAPLVVAERFKMLEALFPGRIDLGLGRAPGTDGATAYALRSRLDRREGDDFLERLHELILWETREFPAGHPYNTVVAMPDDTKLPPIWLLGSSDYSSELAAQVGMGFAFAHHFASHDAIDAMVHYRNRFQPSAWRATPHAILAVAVIAADTDEEAERLASSFDLNRLRRDRGQYLPLPSVEEAMAYPYTDSERASILRNRSRLFVGSPATVQKKLQPLIFASKPDELMVITAVYDHEARKKSYSLLAEAFGAAKSAA

SEQ ID NO: 13868 - protein, 303 aa, BradyrhizobiumColbertium
MTDVTTPVTANGHLKRPAISFEFFPPKTEEMERNLWETINRLAPLEPKFVSVTYGAGGSTRERTHSTIARILKETALLPAAHLTCVGAARGEIDEIVDRYHEVGVRHIVALRGDPVGGIGTPYSSHPDGYQSSAELVAGIKKRHGDIEISVSAYPEKHPEARDFDADIDTLKAKVDAGATRAITQVFFDNDLYFRYLDRVRARGIDIPIVPGIMPMHNFKQARNFVTRAGTTVPDWFAAKFEGLDDDAETRKLVAATVAAGQVQKLAKHGVDTFHFYTMNRADLVFAISHLLGIRAKSAQKAA

SEQ ID NO: 13869 - protein, 1281 aa, BradyrhizobiumColbertium
MTVTTSPKRTALLAAARERILVLDGAMGTMIQNLQLDEAAFRGERFKNFHRDLRGNNDLLILTQPQAIEDIHAAYLRAGADIVATNTFSTTSIAQADYDLTDIVYEMAREGARLAGNAARRVEAEDGKPRFVAGAIGPTNRTASISPDVSNPGYRAVTFDDLRKSYGEQIRGLIDGGVDLLLVETIFDTLNAKAALYAIAEITEELGIDMPVMVSGTITDKSGRLLSGQMPEAFWNSVRHAKPITIGFNCALGAEDLRAHIADIGRVADTLVCAYPNAGLPNEFGQYDETPEYMARLIAEFACDGLVNIVGGCCGTTPDHIAAIAAAVAPHKPRMVPEIEPRLRLSGLEPFVLTDAIPFVNVGERTNVTGSARFRKLITSGDYTAALQVAREQVENGAQIIDVNMDEGLLDSEAAMVTFLNLVAAEPDIARVPVMVDSSKFSVIEAGLKCVQGKPVVNSISMKEGEEKFILEAKIARRHGAAVVVMAFDEVGQADTFARKTEICKRAYDILVNKVGFPPEDIIFDPNIFAIATGIEEHNNYGVDFIEATRWIRQNLPGAHVSGGVSNLSFSFRGNEPVREAMHSVFLYHAIKAGMDMGIVNAGQMIVYDDIDPELRQTCEDVVLNRDPGASERLLALAEKFRGKKTESKEADLAWREWPVEKRLSHSLVHGITEFIEQDTEEARKKSSRPLDVIEGPLMAGMNVVGDLFGDGKMFLPQVVKSARVMKQAVAYLMPFMEEEKARNLANGIGTEGSSSAGKIVLATVKGDVHDIGKNIVGIVLQCNNFEVIDLGVMVPAAKIVETVKAEKADIVGLSGLITPSLDEMAFFAGELQREGLKLPLLIGGATTSRVHTAVKIDPSYRAGPVVHVNDASRAVGVASALLSPEKREAYAAEVRAEYAKISEAHLRAQADKKRLKLADARANRVPVDFAKSKPVKPTFLGIRSFDEYDLAELVPYIDWTPFFQTWELAGRFPAILDDAKVGEVARSLYDDARKMLDTIVREKWFRARATIGFWPANAQGDDIVLYADESRTRPIATLHTLRQQLEKREGRFNAALSDFIAPAGIPDYIGGFVVTAGIGEDAVADRFRSANDDYSSILCKALADRLAEAFAERMHARVRREFWAYAPDEALSSEELILEKYQGIRPAPGYPAQPDHTEKATLFELLDAETTAGVKLTESFAMWPGSSVSGLYFASPESYYFGVGKIERDQVEDYAARKGMSIAEAERWLAPVLNYIPSQQDKAFAATPANDEPSNDLASHPPGCTCAVHLVWQKKRAGVG

SEQ ID NO: 13870 - protein, 209 aa, BradyrhizobiumColbertium
MFLIGQYDSPFVRRVAIALKLYGISFEHRPWSTFGDADKIAPYNPLRRVPTLVLDDGEALIESTIILDYLDELVGPDQAMLPRGGADRRRHLRICALASGLGDKAVSLLYERVLRKEQLALWVERCQAQIADVLAVLEAERAGVTTPYWLGGRIGHADVAVACVVRFTREAHPQLFDAARYPALAAHAERCEALAPFQEIVQPLAPPKG

SEQ ID NO: 13871 - protein, 100 aa, BradyrhizobiumColbertium
MKFAVALRALANERRLQILEWLRDPRKHFREQADGDLVEDGVCGLLIAEKLGVSAPTVSEHMRVLTSAKLVRAKRIKQWTMYKRNETAIAAIKRSIQDGL

SEQ ID NO: 13872 - protein, 327 aa, BradyrhizobiumColbertium
MSTFPCGILDGIMTATMDITRERIAATEALIRPHIRRTPLLRADLSDFGLPAAPVTFKLEMLQHSGSFKARGAFANLLLRQVPQAGVVAASGGNHGAAVAYAAQRLGIPATIFVPDITSPAKAERIRTYGAKLVIAGSRYADALAASEAHVAQTGALAVHAYDQAETLLGQGSVGLELEQDAPRIDTLLVAVGGGGLIGGIAAWYAGRTRIVAVEPEQSPTLHAAFEAGAPVDAPAGGLAADSLAPRRVGGLMFPLARAHVERVVLVSDDAIRQAQAALWSHLRLVAEPGGAAAFAAVLSGRYRPSPTERVAVLVCGANTNAVHFDS

SEQ ID NO: 13873 - protein, 197 aa, BradyrhizobiumColbertium
MILPDGYSDVPAGKIAAIVTHLEMTAPPPRRDDPPGTWTLRKVDRPALPWYRDIFRRVGEDWLWFSRARMTDAELAAIIHAPGIEVYALVLDGRDEGLLELDFRQPGQCELTYFGVTAPLIGTGAARFLMNRALEIAWSRDVRRVWVHTCTLDHPSAVAFYQRSGFRAFRRQIEIADDPRLDGTVPRDAARHVPIIE

SEQ ID NO: 13874 - protein, 46 aa, BradyrhizobiumColbertium
MERSAIRDRCRDARATASVVIARSSCDEAIQTTSAERPWSASLRSQ

SEQ ID NO: 13875 - protein, 501 aa, BradyrhizobiumColbertium
MSFVLAIDQGTTSSRAIVFRGDISIAAKAQAEFPQHFPASGWVEHEPEDIWTSTVMVCREAIAQAGIGAKDIAAIGITNQRETTVVWDRATGQAVHRAIVWQDRRTADICARLKADGREPVISQKTGLIIDPYFSGTKVAWILDHVPGARARAARGELMFGTVDCYLLWRLTGGKVHATDATNASRTLLFNIHTGQWDDELLEIIGVPRSMLPEVKDSSARFGESTPDLFGGPIAISGIAGDQQAATIGQACFRPGMMKSTYGTGCFALLNTGTTPVVSKNKLLTTVAYQLDGKRTYALEGSIFVAGSAVQWLRDGLGIIKHAAETGPLADQSDSMQSVYLVPAFVGMGAPYWNPRVRGALFGLTRNTGPAELAHAALESVCYQTYDLWAAMRADWPSSETASVVLRVDGGMTASDWTMQRLADLLDAPVDRPVIQETTALGAAYLAGLNAGVYPEPTRFADNWRLEHRFKPNMSKATRERKLAGWARAVKGVLASDEGEG

SEQ ID NO: 13876 - protein, 452 aa, BradyrhizobiumColbertium
MTFTSYQFGVFVAVVFGAYYLPPLRRFQVQLLVAASVFFYGFGQPELLPLLLVAVLGTHICLVLAFENRTVWMPAGIVFNLGLLAFFKYKLLFVDAGAAALTGVAPLDFLLRLPLPIGISFFVFHNISLLVDLTREKRTVPLRDVFLYIIFFPQLVSGPITRAAQFMPQIVPKRINDVAFVEAAKWILVGYFFKLYVANNLNEMTSYMDFPLYETLRTQDRWLLVFLYSYQIYADFFGYSAIALGLGLLFGYRLPVNFNLPYISTSFSEFWTRWHISLSTWLRTYLYIPLGGNRHGVGRTYLNLMIVMTLGGLWHGASLSYALWGMAHGLLLVIERPFLKLIGNQSPAVRVIRMGIVFFCVTMLWIFFKLPNFDHALGYLQGMFIATDAPNPPKLFTNLALLYALPVIIQHIGIGALVDGRLRRWEPYLYGALAALAYLEAGPDSAFIYFQF

SEQ ID NO: 13877 - protein, 287 aa, BradyrhizobiumColbertium
MVKCACVAAALLLACGLATARFGSALQQPAVITRDGSLVTLNRYVREPTPDIVLVGSSVTWRLKEEYFSLPRVRNLALAGGSPVTGLEIVAGQASLPRVVLIETNILSREADRALTEAFSGGARADALLLRPVRTAVAAYETWNHAARDAVQARAGHDRLLSQPPDTFDSKIYLDRAREQMNDGDPTAPARANAVRIRRVIDDLQRRGSQVFLMHVPFAPEIEDTRLVRTTREIASEAFPDRALWLRVEPPMGELRWADGVHLDERSALIVVRVMESILAARDGTRR

SEQ ID NO: 13878 - protein, 257 aa, BradyrhizobiumColbertium
MKNTPFDLTGKVAVVTGSSRGIGRSSAELLARLGAKVVVSSRKADACKEVADGINAAGGDAIVIPCNIARKNEVEALIAGATKHYGKIDILVCNAAVNPYYGPLLDITDEAFDKIMGSNVKSNIWLSALAIPQMAERGNGSVIIISSIGGLRGSTVIGAYGISKAADFALCRSLAGEWGPKGVRVNCIAPGLVKTDFARALWEDEANLKRRTATTPLRRIGEPDEIAGAVAYLASDASSFMTGQTIVIDGGVTTAAV

SEQ ID NO: 13879 - protein, 380 aa, BradyrhizobiumColbertium
MDFDLNEEQRLLKESIDGLLTDSYDFEQRKKYMKEKGGWSKAVWLKLAEQGLLGLPFAEADGGFGGGGVETMIVMEALGKALVLEPYLATVVIGGGFLRHAGSDAQKAAHVPGIIDGSKTLAFAQLEKNSRYDLFDVSTTAKKKGDGWVIDGEKFVVLNGESADTLVVTARTKGDRRDRSGIGVFLVPGNAKGVGRKGYPTQDGLHAADITFTGVEVGADAVLGNPEDSLALIERVVDEARIALCAEAVGLMDESLKTTVEYIKTRKQFGVAIGSFQSLQHRASDMFVAAEQARSMSMFATMAGDFEDAKERTNAIAAAKVQIGKSAKFVGQQSIQLHGGIGMTMEARIGHYFKRLTMIENSFGDTDYHQRRVADAGGLI

SEQ ID NO: 13880 - protein, 396 aa, BradyrhizobiumColbertium
MDLAFTKEEQAFREEVRQFFRDNVPPETRRKMVEGRHLSKDEMVTWWRILNKKGWGVSHWPKEYGGTGWTAVQHYIFNEELQAHPAPQPLAFGVSMVGPVIYTFGNEEQKKKYLPRIANVDDWWCQGFSEPGSGSDLASLKTKAERRGDKWIINGQKTWTTLAQHADMIFCLCRTDNNAKKQMGISFIVFSMKSKGVTVRPIQTIDGGHEVNEVFFDDVEVPIENLIGEENKGWDYAKFLLGNERTGIARVGVSKERIRRIKDLASKVEAGGKPIIQDPAFREKLAACEIELKALELTQLRVVADEGKHGKGKPNPASSVLKIKGSEIQQTTTELLMEVIGPFAAPYDVHGDDGSNEAMDWTAQIAPSYFNNRKVSIYGGSNEIQRNIIAKAVLGL

SEQ ID NO: 13881 - protein, 395 aa, BradyrhizobiumColbertium
MTDAVIVSTARTPIGKAYRGALNATEGATLLGHAIGEAVARAKIDPKEVEDVVMGAALQQGATGGNIARKALLRAGLPVTVAGTTIDRQCASGLQAIALAARSVIFDGVEIAVGGGGESISLVQNDKMNGFHAQDPALLKIKGEVYMPMIDTAEVVAKRYGISRERQDEYSLESQRRTAAAQQGGRFKDEIAPITTQMAVTDKASGAVSMKEITLSQDEGPRPETTIEGLAGLKPVRGEGFTITAGNASQLSDGASASVIMSDKEASKRGLKPLGIFRGFVSAGCEPDEMGIGPVFAVPRLLKRHGLTVDDIGLWELNEAFAVQVLYCRDKLGIDPDKINVDGGAISVGHPYGMSGARLTGHALIEGRRRKAKYAVVTMCVGGGMGAAGLFEVLQ

SEQ ID NO: 13882 - protein, 564 aa, BradyrhizobiumColbertium
MMQRMTHPGEQFYPEGVRWDDAIVQGTLPDLLSKAAAEYGPRTALEFRDRPITYAELAAMAERAAAAFLRAGCGKNSSVALFLGNTPDHPVNFFGALKAGARVAHLSPLDGEIALTHKVSDSGSRLLVTSNLQALLPTALKFLEKGLIDRLVVCEDDHWGRIGTPQAAIPDDPRIVTFKAFVEGAAAPAEWPQVTAHDVALLQYTGGTTGLPKGAMLTHGNLTSAVSIYDVWGKPSRAARGEVIERVICVLPLFHIYALTVVLLSSLSRGHLISLHQRFDVEAVMRDIEIKRATYFPGVPTMWIAIAALPDLDKRDFSSLATIGSGGAPLPVEIASFFERKVGKKLKSGWGMTETCSPGTGHPPTGPDKPGSIGLMLPGIELDVVALDNPTKVLPPGEVGEIRIKGPNVTRGYWNKPEGSADAFIDGRFLTGDIGYMDEDGYFFLVDRKKDMIISGGFNVYPQMIEQAIYTIPGVHEVIVLGIPDQYRGEAAKAFIKLRPDARPFSLDELRAQLNGKLGKHELPAAVEFVDDLPRTPVGKLSRHELRQQQKPSQSSKTASGVRS

SEQ ID NO: 13883 - protein, 698 aa, BradyrhizobiumColbertium
MSEVVKLERHDEVGIVTVDSPPVNALSAAVRGGILECIKAAVADPAIKGIVLTCGGRTFIAGADITEFGKPPKPPALNDVLSEIENSPKPVVAAIHGTALGGGLEVALACHFRVAVKEAKLGLPEVKLGLLPGAGGTQRLPRAVGPELAVKMIVGGDPIGAAEALKNGLIEEIVEGPASGGEAFVRKILAEKRPLRRLRDDDSKLAAAKADRSIFTNAVAAMTKKSRGLEAPFAAADAVGYAIDLPFDEGLKKEREGFLKLVTSDQSKAQRYAFFAEREANKIAGVPEGTKPRPVNRVAILGAGTMGGGIAMSFANAGIPVTLIETGEEQLKRGMGVMQKNWEATAARGGIPADAPAKRMALIDGKVGIENVGDADLVIEAVFETMAVKKEVFAKLDQYAKQGAVLASNTSYLNIDEIAKSTKRPQDVLGMHFFSPANVMKLCEIVRADKTAPDALVTAVTIARKIAKVPAVVGVCDGFVGNRMLAQRGKQAEKLLFEGALPQQVDAVVTKFGMPMGPFAMGDLAGLDIGWRSRKDRGIKSEIADALCEAGRFGQKTGKGYYKYEAGSRAPLPDPEVEKLIDETLLRLGRKKRVVSDEEILERMMYPMINEGAKILEEGIAARPSDIDVVWLYGYGWPIYRGGPMFWADSVGLKHIADRLSFYAKETNDPSLEPAPLLKKLAAEGKTFASLAATSKAA

SEQ ID NO: 13884 - protein, 288 aa, BradyrhizobiumColbertium
MKRTGKKTATDRNFVVALSRGLDVLRAFHPNDGLLGNQEIAARTNLPKPTVSRLTYTLTKLGYLTPVPRFEKYQLAPAAMSLGYAALANLGVRHLSEPFREEVMRATGGAVAVGGRDRHSMIYFGQSRGSETVGVQLDVGSRVPIATSAMGRAYFWALDDADRAEVSRILREHYGSRWPKMRDGLERSGETVAKYGFAISVGDWHDDIGAAGVALRLNDGTGPYAFNCGAPAFRFTEERLINDIGPRLVAMVRNIEAALGGLMPHSKKDISKKLKSGGKVARVAEGIR

SEQ ID NO: 13885 - protein, 265 aa, BradyrhizobiumColbertium
MTQAQLAQGASPLLAVRDVSVVFGGIVALNGVSFDMHKGQILGLIGPNGAGKTTLFNCLSRLYQPSSGDILMDGVSILSRPPHRIAEIGIGRTFQNVALFPNLSVMDNVRVGAHAKTSSDIISDSLRLAWVRRSETSINRKVQEILAYLGLEDVAHTVVSGLPFGTQKRVELARALAADPKILLLDEPAGGLNHEEVYVLGDLIRKIRSERHMTVLLVEHHMGLVMSIADHVVALNFGKKLAEGTPAQVQADPDVIKAYLGSKDQ

SEQ ID NO: 13886 - protein, 237 aa, BradyrhizobiumColbertium
MTPLLNVKDLRAYYGQVQALHGLSFSLNEGSLTTLLGANGAGKTTTLRAICNMVRSTGGVEFEGKPLNNRSTESIVRFGIAHVPQGRGTFTNMTVEENLQLGAITRKDSAGIVSDIERMYAHFPVLKQRHTQQAGTLSGGEQQMLAVARALMLRPRLMLLDEPSFGLAPLVVRDLFGILGKINREDKVSILVVEQNAQLALELADQAYVIETGRIVMSGNAKDIANNEEIRKSYLGY

SEQ ID NO: 13887 - protein, 292 aa, BradyrhizobiumColbertium
MELFTNQVLAGIATGAIYACMALAVVMIYQAIDHLNFAQGEMAMFSTFISWQLMQWGVSYWAAFLMTLAFSFVAGIAIERILFKPLAKAPVLTNVAGFIALFAIINSSAGLIWDFTIKQYPTPFGSAPFLGSQLISTHQAGMIGVTVALLLALYFFFQYTRIGLAMRAAASVPESARLVGINTSWMIALGWGMATAIGSIAGMLIAPVVFLEPNMMGGVLIYGFAAAVLGGLSSPFGAVVGGFLVGVFENLAGTYIPGVGNELKLPIALALIVSVLVVKPAGLFGRQIVKRV

SEQ ID NO: 13888 - protein, 339 aa, BradyrhizobiumColbertium
MSAAEEAIAEGHEAVEAVPKRAMTLGTGTSLVVLAALLVVPMFVKNFIIFQMTMLLIYGLAVLALNILTGGSGQFSLGQSAFYAVGAYTSAVLMEHANINYALTIPVSAVICFGFGYLFGKPALRLSGIYLALATFALATAMPQLLKLNFLEHWTGGVQGLVVTKPDAPFGLPMSQDMWLYYFTLAVTVAIYIFSVNLLRSRSGRAFMAIRDNEIAASSMGVNVALYKTLAFGVSAGITGVAGSLGAIAVQFVAPDSYTITLAISLFLGMVVGGVGWLPGSFVGAAFIIFVPNMAESISKGLSGAVFGVLLFLVIYLVPHGARQVAIFGQQLVGKLRKN

SEQ ID NO: 13889 - protein, 73 aa, BradyrhizobiumColbertium
MKDGELLATSFKPSKSDIERLGGGQWLPVENEDTEPFDPAKHWRMKPLPLRLDSARGIVVRTYPVIAKCQEHA

SEQ ID NO: 13890 - protein, 246 aa, BradyrhizobiumColbertium
MEELVALVKPDIIAAPATLQAVEARKATSTIPIVCGALADAVHLGLIASEARPGGNVTGIEPYISGLPTKQIELALEITPTAGCVGLLTNMNDPKGPPQVGDLKAACQAKGLSVVEADANMPNDIPGALAALANGKADVIVVLQTNLLLVRSEQIGAIALSMRLPTVFGYREHVIHGGLVSYGVDLRWCYRRLGYFVDKILRGARPGDLPVEFPTAFWLAANLKTAKALGVIVPAGLLTRADELIE

SEQ ID NO: 13891 - protein, 91 aa, BradyrhizobiumColbertium
MLEDADCFLSNWDRAACDLGWTALDLFGVHAVAPGCRYDLMGLAMLLGGGTAFALTEETAALRRPSGSTLTYRRKPTSGAVLLCGGQHAIR

SEQ ID NO: 13892 - protein, 110 aa, BradyrhizobiumColbertium
MEQVRTFLLKDGMSRFIPAWEDNAPKGMQARDVAGFREQMGDGWDFYVTTTAWKEICAGLDPRRVAATLRQKGYIEGEGSHMAKSVRVPEYGKMRLYHIRSTFLEDANEA

SEQ ID NO: 13893 - protein, 610 aa, BradyrhizobiumColbertium
MAVRKRTPIDRRFATEATQTAAVDSIAPADTIIFVDAWGNPDQRFDSGQLAGLPVDLRDLLVEAFRAHCVAQQSATRQTTRRALRRFTCFVVDDGMIETASDLDTAALGRYVLWLKKQGASRAPRGAHAIAFDLLRPLLFWCRRNRRGRIAHDLEIPWNAFPGRRASQQPRRRLPSNQVKAILRACYEEIDEAWARFQYGQEVIRRPELPPKTLRGQGLDRWIWRIGRIDDGLMPDTTVLEAHGIKSSTLVQYWGGARTMAQYFHITTDTLVPFFLAIAIQTAANPEPLRHIRRDCLVPHPLDEHRVIVDWNKPKTGARLQKAQRRSFDRRRRYAAPNLIEMMLALTEPIIATAPPSEQDRLFLTRSIHKEHSRRSLRSRTGVIEHTVLRRAILRFIERANQRIDAWNTDHPDQLREPIADFAPALFRGSVATEHYRASGGDVLVAQSILNHASVATTETYLKSEETTRLQRQTIAHLQEQMINWVLGPERDTPPPAFGKLRATAPFGHDCLAPVAPGRDGVDRLCPQFGGCLACPGLVVPIDVGHLARILAAVDRLEEARKRLDPKRWSLLYAPSWRILTQDILPDFPANMHEPARKLATGMPLLPELE

SEQ ID NO: 13894 - protein, 64 aa, BradyrhizobiumColbertium
MLVRLQKQAATTPDLNPLKIVQVLLGHASIQSTAIYLRCVELHADTLAESLAYLYGELVPHGRS

SEQ ID NO: 13895 - protein, 82 aa, BradyrhizobiumColbertium
MPSHRMRKPVRGNARFVILASGGFLGLFQDEVALPVERFRASGDRLVVSGLTDQDIDNMQDWEDRLPNSSVLDDAQSVRIRK

SEQ ID NO: 13896 - protein, 519 aa, BradyrhizobiumColbertium
MTRCIRLRGAAAFVSNSLLVAVLAGCSDGGTDFDISQQIGPEPLLPKPSHSLLTNLKVAEVVGWSEGQTPAVAGGLKITAYASGLVHPRTIHTLPNGDVLVVQSRTPPGKPVARPKDLIRGWIMSYAQGGGGEQKKSNLITLLRDTNRDGEVDERRDLLTDLNSPFGVAWHDDTLYVAAADAILAYPYRLGDTNISAQPEVLTPLPGGPINHHWTKDLALSPDGRFLYVSVGSNSNVAERGLEAEKGRAAIWQVDRQTGASLVYASGLRNPNGLTFHPQTRELWAVVNERDELGPNLVPDYMTSVKQGAFYGWPWSYYGNHVDERVHPPRPDMVERAIAPDYALGSHVAALGMTFTLNSALPGEYRSGAFVGQHGSWNRNSFSGYKVVYVPFQNGTPAGKARDVVTGFLDGDQARGRPVGLGIDGTGALLVADDAGNKVWRVAAADGSSTPEPVGTDQITVGLAGGRGQSATGQQEATSSAGSPSDATPPQPRRRTSLPPYCHPARARERLRCSVNDGS

SEQ ID NO: 13897 - protein, 132 aa, BradyrhizobiumColbertium
MLAQFPNVCFTLTLLTDIVYWRTSYLMWQEFSSWLLLAGLVSGVLALVAGLIDFLFGSAVRAPKPAWPHAIGGVVVLALAFLNSLAHARDGWIAVVPWGLVLSVATIIAMVISNWLGRALVFHYGVGVRRHD

SEQ ID NO: 13898 - protein, 347 aa, BradyrhizobiumColbertium
MSYAPASDWIFLRRVLITLAVTTIAYIAWKLADLFILLFAAVLLSVLLGGLAAAVARYSRLPSGWALAVSCVSLAALAGILLSLFGAQIIGQISGVFDQLPGAINVAGATLGIADAFKQLQETLSNEGSGQLLSRAARVGYTALGVVSDLLLVTVVAVYLAADPSVYRRGAIKLFPSEQHDRIADALDISASALRLWFLGQLASMTLVGLLCGLAFWAIGLPSPVGLGAIAGATNFIPLIGPIIGALPAVLFALTQDLSVVLWTVSAVLVIQQLEGNVITPMIQKRAVELPPALILLGLSAFGALGGMLGVILATPLTVVVMVLVQKLWIRETLGENTTIPGERRSN

SEQ ID NO: 13899 - protein, 292 aa, BradyrhizobiumColbertium
MSDPANALVSVWSLCLASGNSVASATIWSAWSIAPAVTVPLILFGAFYAAGVFRRAAEPHDSGALSYEITAAATAMFLLAIAVVSPLCRLSAALASVHMVQHLVLVVLAPQLIVIAAPVRTVGAGLRGTTRTTSSNRRRELQWNRPLLAAGAYGFLIWFWHAPATYELALTSAGWHLLYLGSLVLVSLWFWTCVVRARSTGAAALALLLTMVHTGLLGALLTFAPRPLYPIMSGGAIAFGLSPIEDQQLAGLIMWVPMGLIYLLSALLVISRGLSAQSLGQSSATTGNADWK

SEQ ID NO: 13900 - protein, 87 aa, BradyrhizobiumColbertium
MGDVFGTNILTLGLVFLADLVYAGEPVLNQAGRFEAIAATLGIILTGIFLVGLLERANKTFLRMGYDALVALLTFAAGVMLLYFVQN

SEQ ID NO: 13901 - protein, 105 aa, BradyrhizobiumColbertium
MEHAAQVVDPFIFRLSIFVLAVFVGYFVVWSVTPALHTPLMSVTNAISSVIVVGALLAVGVGMVSSGSGWARGFGFVALIFACVNIFGGFLVTQRMLAMYKKKSK

SEQ ID NO: 13902 - protein, 375 aa, BradyrhizobiumColbertium
MKIAVAKEIDPSEPRVAASPDTVKKFKALGAEVAVEPGAGVKSGLPDSEFTAAGATVSADALKDADIIIKVKRPEASELSQYKRGALVIAIMDPYGNEAALKAMADAGVSAFAMELMPRITRAQVMDVLSSQANLAGYRAVIEGAEAFGRAFPMMMTAAGTVPAAKVFVMGVGVAGLQAIATARRLGAVVTATDVRPATKEQVESLGAKFLAVEDEEFKNAQTAGGYAKEMSKEYQAKQAALTAEHIKKQDIVITTALIPGRPAPKLVTAEMVKSMKPGSVLVDLAVERGGNVEGAKAGEVVDLDGIKIVGYTNVAGRVAASASSLYARNLFSFIETMVDKKEKALAVNWDDELVKATALTKDGAVIHPNFQPKV

SEQ ID NO: 13903 - protein, 50 aa, BradyrhizobiumColbertium
MADHSEVAYTTADGNDYVAHEQTYEGFIKLVKYGTVSVALIVILMAIFLT

SEQ ID NO: 13904 - protein, 655 aa, BradyrhizobiumColbertium
MTSRSKTALEKTALRKPATKKSVGKKSVTKASPSKPLLSKSSLSKSSLSKSSRSKSSPAKPASKTGKLPEWNLADLYSGIDAPEVARDLEKLDADCVAFETDYKGKLASGTANEDGGKWLAEAVRRYEAIEDLAGRLGSYAGLVHAGDSVDPAISKFYGDVSERLTAASTHLLFFALELNRVDDDILNRAMQAAELAYYRPWIEDLRKEKPYQLDDKLEQLFLEKAQTGYSAFNRLFDQTISSLRFKVGTKELAIEPTLNLLQDRDGAKRKSAAEALAKTFKANERTFALITNTLAKDKDISDRWRGFKDVADSRHLNNRVEREVVDALVASVRAAYPKLSHRYYALKAKWFGKKRLAYWDRNAPLPFAATDVIGWPDARNMVLTAYRGFSPQMADIAERFFTDRWIDAPVRPGKVPGAFSHPTTPSAHPYVLMNYQGKPRDVMTLAHELGHGVHQVLAAKNGALMAPTPLTLAETASVFGEMLTFKRLLAQTKSARQRQALLAGKVEDMINTVVRQIAFYSFERAVHTERKNGELTATRLGEIWLSVQGESLGPAIEIKAGYENYWMYIPHFIHSPFYVYAYAFGDCLVNSLYAVYENAAEGFAERYLDMLAAGGTKHYSELLRPFGLDAKDPKFWDGGLSVISGMIDDLEAIG

SEQ ID NO: 13905 - protein, 498 aa, BradyrhizobiumColbertium
MAASILIADDDAVARRLIENMVQKCGYETVVVDSGDAAVATLTAPDAPAIDAVILDLVMPGLDGMGVLAKIREAGLSIPVIVQTAHGGIDNVISAMRAGAADFVVKPVGVERLQVSLRNALNTSALKGELQRIRHSREGRLTFSDIITRAEAMTQVMRTAQKAANSAIPVLIEGESGVGKEMFARAIHGSGERKAKPFVAVNCGAIPDNLVESILFGHEKGAFTGATERHMGKFVEAHGGTLFLDEVSELPLTAQVKLLRALQEGAVEAVGGRKPVKVDVRIISATNRKLLERVKQGHFREDLFYRLHVLPLTIPSLRARREDIPHLLRHFLARFAAEENRPITGISGEAVAHLTQLDWPGNIRQLENAVYRAVVMSDGDQLDLDDFPLLASQPHATADIPTAPLMIEPIAAPSLVSGSEIPIVPLPAAGTLPMLTATGDVRPLEDMENEIIRFAISHYRGQMSEVARRLKIGRSTLYRKLDEAGVPGHGGKSGEETH

SEQ ID NO: 13906 - protein, 721 aa, BradyrhizobiumColbertium
MGFDRVLMTVAATFLAVSASAALAQDQARSSAAELAIEAAIPRPEPANVPPPTAADIKLDTTATLQDATKEPAKTEAAPSPEPKASDVATTPATEAPKNDTAKTEPAKTEPAKADTATTAPAPPAAAAAPAAEPVKAASSVPAADQPVADRLKDIIGAKTSRHFDRKNERAAVEKFYSARDFAPVWTQGGTLTAAAKGVVARLKDAASDGLNPSDYPVPDFAAATTPDTLADAELKLTSSMFDYARHAQSGRMHWSQASGDILYPEHPVDPNEVLAKVTTAADASAALESYNPPHKLYKELKAKLAELRGQGNGPVIEIAEGPALKYTPASKKRHEIVVEDPRVPQLRAKLGLAENAGDTRYDAAVAEAVRKFQSGAEMKATGILDDKTVKALNTPKRDKQIDVVLVNMERWRWLPRDLGAPALGDAYVILNIPDFTLKVMQRGQQVWTTRVVTGKPGKHATPLLTETMKYITVNPTWNVPPSIVYNEYLPALQQDPTVLQRMGLRLEQNRDGSVHISQPPGEANALGRIRFNFPNKFLVYQHDTPDKHLFAKEERAFSHGCMRVQNPDQYASVLLNIVMPNEKYTPERIRSMYGKSEIDLKFPTPIPVNITYQTAFVDDAGKLQFRKDIYGRDAAMINILKNSRGKDIENVVAHSQPSYSRPATTLPAGVAVANNGGGFNGSGFGSSGPNFFERLFGAPTPAAPPAPVGRRPQQQRVFTR

SEQ ID NO: 13907 - protein, 523 aa, BradyrhizobiumColbertium
MLSLSHAGVKAGSRIGLAAALLLAAAGSVHDAAALNETKTLSFHHTHSGEDLTVTFKRDGRYDEAALKQLNHFLRDWRTQEQTVMDRRLFDILWEVYRDVDGKQPIQIISSYRSPATNAMLRRRSSGVARSSQHMLGHAMDFYIPGVPLEQIRFAGLRLQRGGVGFYPTSGSPFVHLDTGSVRHWPRMTHDQLARVFPDGKTVHLPTDGVPLKNYELAKAEIERRGSGDDAGSKPNFFAALFKSKPAPAASSDEDDEGAPAPAAKPAAPTVVAAAAKPAEPVPTPRAKPQIAAALQLASADAQIVAPPKPKPAPVADKPATGKLETPADIINARGFWDDVPAAPQQATPAQVAALKARQALAAATDPHPTASVTNATLQALAYAPAASPVDRANVVAASAPIPRTARPAASRSVAQATEINTVVGKSIDGRVATATRLSAAKGESIWLKIVMLSPSASHAMSVTLMGELDTAALRGFFVKPHAVIAMGFADDPMPGLSCDSFSGSATAKLQTTSFVVRTASLR

SEQ ID NO: 13908 - protein, 90 aa, BradyrhizobiumColbertium
MATSAAVRDDEPATKFAKDQLKSIIERIERLEEEKKAISDDIRDVYAESKGNGYDVKALRTIVRLRKQDPNERAEAETILETYMQALGMI

SEQ ID NO: 13909 - protein, 101 aa, BradyrhizobiumColbertium
MPIDDKTRTELEAAAFRRLVDHLQARTDVQNIDLMNLAGFCRNCLSNWLKDAADAQGVALSKDESREAVYGMPYETWKSKYQGAATPEQLEAMKKVHPHGH

SEQ ID NO: 13910 - protein, 409 aa, BradyrhizobiumColbertium
MATTAPSSSLVAHDNDNSLRSSRGPTAAAQEPPGIKATPFVWRDPKTMPRRQFLYGHHLIRKFGSATFAGGGIGKSFLKITEAVAMATGRALLGVRPNERCRVWYWNGEDPLEEINRRIAAVCLYYNIRAEELEGWLFVDSGRDQEIIIASQTSTEGTKIAAPVVRSLIDTIHYNKIDVLMVDPFISCHRVTENDNGAIDMVAKKWTAIADETNAAIELVHHVRKTGGAEATVEDGRGAVALLGAVRSAQVLNKMTAEEGNRAGVENPRQYFSVETGKLNLSPPPDGKDWFHITPVHLGNGDGDLDPGDSVGVVVSWKWPNPLDGVTGADFDAAAAAIRAGNWRHDGQAKEWVGIPIARAMKLDISRKADKAKVNGLVKLWIGAGALEVYEELDEKRMKRKFVRVADAT

SEQ ID NO: 13911 - protein, 327 aa, BradyrhizobiumColbertium
MKLGYSPLPILPPDAPKAGAGKAPALSGWQKYCNEAPSSFFIAGHSRAPAVGVGVATGFGGLVAVDIDGYDSIIGPILSTLPPAIVVKIGRRGLTSFYRSIVPMKSRSYNDASGIRLLDFLSSGRQTVIPPSIHPDTGRSYYWWSDATLEDTALEALPVLTHEHRAAMEDVLRSFGWTVLERRKSCGGAVEQSVASPGDSDAASLFRAVNEAAMANLGAWVPHLGLQRCYPAGGGFKAVAEWRPSGTGRALHLRKPNLSFKSGGIVDFGDGSKGYTPIDVVMEARLVTNAEALVWLAPLVDVPLENPEEAALADRIIAAAAKKKEFM

SEQ ID NO: 13912 - protein, 67 aa, BradyrhizobiumColbertium
MTSEDFLFTEAEFADFVGKSVSWARLLRRQQRAPGHIKVGRTPMYPREAIAEWMHANTVRSGGKPSA

SEQ ID NO: 13913 - protein, 68 aa, BradyrhizobiumColbertium
MTKRLIKTAPLLEKLGGISRSTLDRTINAPDQNFPKPIYMGRTRFFDVDAIDAWLATRSNKHPDKRAA

SEQ ID NO: 13914 - protein, 153 aa, BradyrhizobiumColbertium
MAPLPSPQELELTELAGVFHATHNPAAAWLAFYLAKKHNLPVPEIVANEIERFAAEVSKPLVAAWNGDGRARITTKDITTAWGCGRGTKLAQALRLSRRAASIVGEYWEKITSGVRPTDALSALMDDHNLSDKAVEELLTAARKKRDMDTPTF

SEQ ID NO: 13915 - protein, 446 aa, BradyrhizobiumColbertium
MKKPLSAKAITNAEPKATRYALPDVGHPGLRVLIQPSGAKSFVYRFKRDNGQDVTLTLGPAAGPGALTLVQAREAAGDARRQRALGSDPADQKRAMRKAEAARIAAEEKEARRKDDIVERVLDRYYRDKVNAMKSAKELKRLLSKELTPWAKRRVDDIARADAIKLIDAIKDSGRPVLANRTRAAARTFFGWCIDKALIEDNPFERTKPVVVEEARERALSNADLRALSLALDRMDWTWRAFYRLLVLTGQRRDEVADMAWAELKDLDGPSPLWVLPARRTKNGREHVIPLSPAVVEILRAIPKVQVKAMVNGAERWEDSPLVLTTTGTTPISGFSKAKVHLDKAMMEVAREEAEKRGGDPVMIEPWRIHDLRRTMVSGMAALGVGVAVVEKVVNHVSGTFGGIVGVYQRHDYLAEKRHALNLWADHVASLIVERPSNVVSIKAGA

SEQ ID NO: 13916 - protein, 80 aa, BradyrhizobiumColbertium
MLTTLDETEHSIDVRKFVLSLLDLGLVGSNHAADLGALLLEHLNDELIGHAALKPKSAGRDQPRTWCRCSIIRKRHEAPT

SEQ ID NO: 13917 - protein, 48 aa, BradyrhizobiumColbertium
MILRKLGTYLGRVIRDIGRKIEGDGGLEAAFAKLLLLARRVRERACSG

SEQ ID NO: 13918 - protein, 82 aa, BradyrhizobiumColbertium
MTYRLASLMDKGVAPNTAAAVTKIFATESNSKCADAGIQIMGGAGLMMSSEMQMYFRDSRVGTIGGGTSEILRNVIAKSMLS

SEQ ID NO: 13919 - protein, 291 aa, BradyrhizobiumColbertium
MIIPFAAGGPTDALGRTFAKELGEVLGQTVVVENRTGAGGNIGTDAVAKSPPDGYTIGFGTNGPLAGNVTLFKSLPYDPTTAFAPITRIAFVSNLIAVHPALGVKTLSELIELIRREPNKHNFAHGGSGTTQHLGGELFKSMAQLQMSGVAYRGEGPALNDVIAGHVPIIFLSLATGIPIVQSGHLIALAVTSKDRIPALANIPTVAEAALPGYVATAWYALLAPAGTPQQIVEKLNAASRKAMESPGTKKLLDQAGAITAPTTPGELGEFIKSEISRWKPIIEMSGAKVD

SEQ ID NO: 13920 - protein, 185 aa, BradyrhizobiumColbertium
MWREDTFYSLLTSHATERPDAVALQDARQTLTWGELKRWTDGVAADLREYGLVGSDRVMMWLSNRIEAVVMFLACAREGIACNPSVHKTYTCAEVGDLLNTLSARALLTEDGWGTDRATVDYGWFLSGDLGVMDAKGNLRIEGRLKDLIIRGGHNIYPSHWLLSYLSRPCGQPTCVAHALLTTKK

SEQ ID NO: 13921 - protein, 52 aa, BradyrhizobiumColbertium
MAEARERRITTLNLDRKIYMVLVTPAGSREMLVLSETPGDALLSFIGSVDFS

SEQ ID NO: 13922 - protein, 501 aa, BradyrhizobiumColbertium
MPLKEFTFLDVYRRNAEFFPDRTAFVFEGQRITHREYLKRVERLAAGLAREGVKSGDRVAILSQNSLEMIDVIGAVARLGAILLPVNFRLNAEEIGYVLADGAPVLVVAGAEYQEIIAALKPSLPSVRSYFGIGKHTAPFAPLANLAASDASMSDVNFSADDGFVIIHTAAVGGRPRGALLSQANLLTAHSSLVQAWSLTERDVNLGVLPLFHVAGLGLMLTVQQAGGASVIASKFDPQQAVCDIAAERVTVMSEFAPMLAGLMDQAKGDELKTLRAVTGLDTPATIERFEKACPHAVFWAAFGQSETSGLATLSPYRNRPGSAGRPLFWRTITVVDSADKPRPTGQTGEIVVRGPTVFKGYWNNDADTAHTFRNGWHHTGDIGYFDADGYLWYAGRAPEKELIKTGGENVYPAEVENAILQHPDIADVVVIGVPDPQWSEAIKAICVRRTGANVTADELIDFVAGKIARYKKPKHIVFVDQLPRTAKGEIDRAAVKFDNS

SEQ ID NO: 13923 - protein, 254 aa, BradyrhizobiumColbertium
MRLGSVNYETKGKIAILTLDEPGKLNALSTGIREGILDGLKKVDADDNVRVAIITGNGDKAFCAGADISGFNFDPDKVRKFMIEALAVLAAPENCRKPVISAVNGIAFGGGFELAIASDFIIASDRARFAVPEIKLGLLPGFAIVRLHDMVGRAKAKEMSILGDPISADEAFRLGLVLRVVPHGDLLTDALAFAERIASKPKLAVQMAKSFYNRGLGGDEIRHAIDGFPLLFMHRDAQEGIAAFLEKREPKFES

SEQ ID NO: 13924 - protein, 260 aa, BradyrhizobiumColbertium
MSEKEILYDVKDYVATITINRPKTLNAFTGDNIVEMERLILEATADKTVGVIVLTGSGERAFCVGGDVNWEKDAGGKSGLEGLKFNFNRHIVECPKPVIARVNGYAIGGGHHIAYFCDFTIAAEHAIFGQNGPRVGSPAGGYIVSHSANVLGHKRARELWMLARRYTAKQALDWGLANSVVPMAELDVEVRKYCDELLALSPTCLKILKRSFYYHMAPIMERDMDDLVREVAPAYFTTQEQQEGANAFLEKRKPDFSAFR

SEQ ID NO: 13925 - protein, 264 aa, BradyrhizobiumColbertium
MDFNLKGKSVVVTGGGSNIGRAIVLGFAAEGANITVGDLDQAQAEKVAELARKNGAASIQVIKTDVTDFDQVNAMFKAATDKHGTVDVLVNNVGWDQLMFFTQTTPEFWDKIIKINYVGVLNCTKCALDIMIPKGAGAIVSISSDASRSGEPREAVYGGVKAAVNSFMKTIAKENGRYGIRCNVVCPGVTVPVDTEEVGANSMWTKPDSMFTAEQFEKVAKALPLRKLGRPNDIANAVVFLSSAAAGHVTGQVLSVSGGYTMIG

SEQ ID NO: 13926 - protein, 665 aa, BradyrhizobiumColbertium
MFKKILIANRGEIACRIARTCHRLGVAVAGIHSTADADALHVKMIGESIEIGGAAASDSYLRIDAVIAAAKATGAQAIHPGFGFLAENATFARAVEAAGLVFIGPTPDVIERLGDKASAKKEAEAADVPIVPGSKKPSEDAAEIARIVQEVGLPVMLKAAAGGGGKGMRAVSDLDGLANEIESAMREAKNSFGYPGLIVEKLVERGRHIEVQIAGDGKGNVLHLLERECSLQRRHQKLIEEAPAVNLAATLRDKMAADAVRLGKRLNYRGVGTVEFILSGDTYYFLEVNPRLQVEHPVTEMVTGIDIVEVMLRIAAGEGLPFTQNAVTCSGHAVEVRICAEDPADNFLPCTGDLAYVKFPADGVRVETGVESGSVVTPYYDSMLAKLIAHAETRNEALDKLERALDATSIFGITTNQGFLKRLLGLPATRSATFYTRLIDEQIDQLVDKAKNLDAGALALGAYFWMIRQRQPLARGPWQSREMTGWHMAAGGDGLSPIPILHLETAGASAEIRFAPLKADGSMIVGVNDEKLPVRLIPLKDDCFTAIVGARRETVRIYQENQTIFVHHRRGVHTLTAIPYLTYISAVAETSGELRAPMMGMILKVNVAVGDTIKAGDVAAVLESMKMELRINCETDGVVTAVNCRPGETVERNAVVVVVEPEQQP

SEQ ID NO: 13927 - protein, 535 aa, BradyrhizobiumColbertium
MALMKSDVSAASEEYRRNRDAYGLRIADLHERRAAAMVGGPERARLLHKERKQLLPRERIAALIDPGSPFLEFCQFAGEGMYDGVPPGGSIVTGVGMVSGRACMLIANDATVKGGTYYGITCKKHVRAQKFAWQHRLPCVTMVQSGGANLPDQPNIFPDDGQFGSIFYNQIRMSSEGIAQIAIVHGPSTAGGAYMPALCDETVIIRNQGAMFLGGPQLVYAATKEEVGVEALGGGEMHSRVSGVTDHLAESDSHAIAITRDIVANLGDIPMQRWNVAPPREPRFDPKDIYGLISTDPRIPTNNREIVARLVDGSEFHEFKPLYGETLITGFGRIMGFEIGILCNNGVLFSECALKATHFIDLCCKRNIPLLFMADVTGFMVGREAEEGGIAKHGAKMITAMASANVPKYTLIIGNSYGAGYLAMCGRAFKPHAMMMWPHGRSAIMGPDQAANTLAMVKDDIHKRDGTSWTDEEREAYRAPVRKTFEDFANAYNFARNTWCDMVIDPLETRHVMALLLDLAGRLPQQETDFGVFRM

SEQ ID NO: 13928 - protein, 387 aa, BradyrhizobiumColbertium
MDFDLTHEQRQIYEYGDMVAKQFDRKYWMECADKHVFPQALYSKVAEDGFVGTMVPEEYGGSGQGMVEMHLFLEGLSNNGIPLLNLVVGAAMSLGFIAKYGSEAQKLRYLPDACGGKTRFCFAITEPDAGTNTIRTSTIAKKRGNRFALSGQKTFITDADGADYALVVTRTTAHTEVQKKTDGFTLFVVDLKAKGVQKQYIPVSIPAPETQWQLFFDEVDLGPEDIVGEVDKGFGILFKSLNPERILVGSISCGLGRYALNRAVEYAKERRVFNNVPIGSYQGLQHPLASARTDVELASLMTLKAAWIFDQGREAGEFSNMAKLAAADAGIKAVDTALQCFGGNGFTKEYGIFDIYPLVRLLKTAPLNREMILNYIGEHVMGLPRSY

SEQ ID NO: 13929 - protein, 535 aa, BradyrhizobiumColbertium
MTAMKSAVATGSDEFKLNRAHYLARIADLQRRRAEANQGGSAKARALHKSRGQLLPRERIAALIDPGSPFLEFGHLAGEGMYDGVPPGATIITGVGQVCGRGCMLIANDATVKGGTLFGMTTKKHTRAQLFAWQHRLPCITLVQSGGGFLPDIANIFPDEGQAGSIMYNQVKMSAENIAQIAVVHGPSTAGGAYIPALCDEVVIVRDQGAMFLGSPQLVFAATGETIEIEPLGGAEMHSRISGVTDHIAENDSHALAIVRNIVANLGEPPRLRWTVEQGEPPCHAVEEIYGIVSANRRIPTDNREILARLIDGSRFQDFKHLHGETMLCGFARIHGFEVGILANNGVLFSESAVKGAHFIELCCKRDIPLLFLVDVSGFMVGSAVERQGIAKHGAKFMTAMACADVPKYTIITGGSYAAAYFAMLGRAFKPNATLMWPSAHAALMGPEQAATTLTMVRDNIHQREGSSWTDEEREEFKRPILRDFEAFADPYNYARHLWCDMVIEPAETREVMALLLDLAGRTPAKPTRFGVFRM

SEQ ID NO: 13930 - protein, 139 aa, BradyrhizobiumColbertium
MISSEDAMKKPVPTPDADSAALWRGLHDGVLLLQHCADCGHVQYYQQAMCRQCGGENLAHRPASGRGKVHSFSVVQRAPGPAFKTDLPYAVLLIDLEEGPRMISTYTGGKPEEVTFDMDVMLVCEKISEEVTLPRFRRA

SEQ ID NO: 13931 - protein, 396 aa, BradyrhizobiumColbertium
MLSIRKQTLRGKVAVIGIGMSPVGKVPGKSPLWLAADAAKKALADAGIGKNEIDGVLSSHAFASPFHRFSVAFSEYLGIQPTFSNTLQVSGATAATMFNIGAAAIHGGLAEVVLVVGGDSLLTGLTPDLALRSMTESRDQQYEMPFGIPVANTFAMTAHRHMKDFGTTPEQLAEVAVVQRRHAMRTPGAQQTSPITVDDVLSSAMVTTPYHKLDCSLISDGGAAFILTSAEHAKALGIKSPIYILGGGECYTHEHIFLMPSLTETGAVASSRKAYEMAGYGPKDMDVAGVYDCFTGTVIMMLEDLGFCPKGEGGRFVADGHMTYGGQIPSNTHGGLLSFAHSGMPGSLFHFHEVIAQLRGQCGERQVPGAELGLVHSLGAGFATNATTILGTENTL

SEQ ID NO: 13932 - protein, 239 aa, BradyrhizobiumColbertium
MNVEEAILTRRSVRRFLPKPVPEPVVRKIIEVSARAPSGHNIQPWKVYAIAGEVKDRLCADILKAAETEPDKHRPEYEYYPTEWHEPYIGRRRELGYDLYAKLGIARDDVAARTSQMNRNYLFFDAPVGLFVTMDRRLNTGSYIDMGMFLQNILLAARGHGLHTCGQAAFTWYHDIIRKHLSFDDTEILICGVALGYEDTTAPENKLVTRRVPVDTYAKFLGFSGGSTGVASARTTAGN

SEQ ID NO: 13933 - protein, 558 aa, BradyrhizobiumColbertium
MNSFEQMLEFKTDRERLQAYTFQLRPSSGAARARFGGFAVTDGHEKALTTRAGASPTIGELFRARALIHKSSVAIEYQGRQISYGQLLDRVHRATSMLASQDLRRGDRVALLSRNRPEYLEVELAAANLGVITACLNWRLSQRELAYCIDLVSPKLLIVEEELAGNLELSPIGDRKVIKIGPQYEHILQEQNGHALPIAAESEDGLVILYTSGTTGQPKGAVISHRAMIMRALVFSSELNISHHDTFVAWAPLFHMASPDHSLATLLRGGTVVVVDGFQIEPLLSALERHRIGWFVLIPGMIEAFIAGFKEQKTTVKGVGLCGAMADLVPPHVIAEVTDLLRAPYVNSFGSTETGLPPATRSLIPVGEIPASLAKQQSAFCDIKLVDSADKEVPIGAPGELAIRSPTLFSGYWKADDTNVRDFRGGWFHMGDVFRRNDDGSLDFVDRAKYMIKTGGENVYPAEIERVLMSDAGITEAAVVRVPDVKWGEVPVAFVSRRDTTVTEADLFALCRRDLAGYKCPRQFRFIDFSEFPRSTSGKVQRHELEARLAGERQRVNS

SEQ ID NO: 13934 - protein, 269 aa, BradyrhizobiumColbertium
MSNRYAAYTKLKLDYPSKRVLRLTFDRPETYNSVDAETHTQLTNIWRDINDDPDVNAVIVTGAGKAFSAGGDFELIKSILDNPVARMSTWKEAKDLVYNVINCNKPIISAINGVAVGAGLVVGILADISICGKSARIVDGHTRLGVAAGDVACIIWPLLCGLAKAKYYLLTCKPLSGEEAERIGLVSLCVEDADLQRIAIETAEELSSGAQSAIRWTKYALNNWLRVNGPLFDTSTALEILGFTGAEAREGLASHLEKRKPVFPQDCPL

SEQ ID NO: 13935 - protein, 539 aa, BradyrhizobiumColbertium
MGMDPILSDQRKQAMRAAGFWSDQTLLEFFSRHARNDPGRLAVVGYEAASNRRTALTYGELQQAAERTAANLLRLGVKPGEVVSYQLPNWWQFMALHLALLRIGAVTNPIMPIFRDREMEFMLTLAETRVLIVPQRFRDFDHAAMADRLKAKVPTLEHVVIIGSGDNQDFETVLNSPGKRVEAATAASADDVVQLLYTSGTTGEPKGVMHTGNTLLNSVRYFEDRVRLTANDVVLMASPMAHQTGFLVGLLLPLYLGGRVILQDIWNPAKAVDIVETERVTMTMASTPFLADLTAEAERRPEALRSLRTFVSAGAPIPRVLVRQATQNLCAHIVSGWGMTENGLVTTTKLDDPPEKVFETDGCPSQGMEVRIVDGGGKVLPHDEEGRLQARGPGTFVGYLKRPHLYAVDQDGWFETGDLARKDKDGYIRITGRTKDIVIRGGENVPVIEIEQLMYRHPAVREVAIVGVPDERLGERACACVVLREGALLTLADVMAYMAENAVAKNYWPERIEVLEALPKTPSGKVQKFRLREIVSSMK

SEQ ID NO: 13936 - protein, 655 aa, BradyrhizobiumColbertium
MNNPTSYAWTPPPELIATSNLTAFLRATGYDDYDHLASKAEADPAWLMEEVFKFCDVRFYRSYDQMLDLSRGQPWARWCVGGTTNIVLNCIDKHRSTPVWDQTFLVWEGEDKREQRALTYRELDRGVGRLAQGLRDLGVGKGDVVALYLPNLPETFIAFFAVLKLGAILMPLFSGFGPAPMQTRLNHGGAKAVITASGTWRRGAAAPLKSVLDVALESSPTVQHVIVVDREGLKIETPMRKGRDHWWHDIVIGKDGAIATAEMNAEDAAILLYTSGTTGEPKGCVWTHISFIGSMVTRDMIICADFKSSDRFFFLSDMGWMVGAMCACIPSFAGASLLIAEGTPDFPDTGRFWRLIQDHRVSYLGVSPTIVRSLMRYGTQDVERHDLSSLRMTASGGEAWTNAPWQWFFEHVCKRKLPIINISGGTEVGGCIFTGTPNHPMNPGSFSRPALGVGADIVDMSGKSLPPGEVGELVLRQASIGLTKSLWKADARYVESYWSTLPGLWVHGDFAMRGHDGLYYILGRSDDTIKISGKRTGPSELEGILIDTGKVSEAAVFGIPHPVKGSAIVCACVLMPGTNVESEIVNELSSAIVSGMGASYRPEKIIFVDDLPRTRNMKIMRRVLRAVFESKDPGDLSALANPEAVDRLREKLGAA

SEQ ID NO: 13937 - protein, 40 aa, BradyrhizobiumColbertium
MRTSAKPIAAGIPAARMAAVNNIAFGTQNAEGVLRISLAR

SEQ ID NO: 13938 - protein, 111 aa, BradyrhizobiumColbertium
MGTDLFIYHGYVALWLDRKMFKVTPAFNMELCERFGVRPLIFDGTADALFHEFDTSDHRHMEYVNDRGWFADAPIGKMLEDFRVAYPALVTLNTGGVLIDDAAFGAPQSGE

SEQ ID NO: 13939 - protein, 396 aa, BradyrhizobiumColbertium
MDYALSEQQQAFQETAKRFAKDKLGPHYQRRAREHRIDRAMLKQMGSLGLIGADLPEKYGGLGESSVTAGIIVEQIAYGDFNASYVQLLASLLGGMLAEHASPEIAQEWLPQVARGEKIIGLGLTEPRGGSDAANLILRAEKSGNGYRLNGEKTSMSFSDQCDAAVIFARTGKVEDGARGVSAFFVDLAQSGITRTHFDDIGTKPVGRGSVFFDDVFIPAECLMAEENKGFSKIMSGFDYSRALIGLECIGPAQASVDEAWQYSTERLAFERPIAQFQGVSFPLAEAETQLTMMRQLCYYTLSLRDRGLAHTAEAAMCKWYVPKVTCEIIHQCLLTHGHYGYTTDLPFHQRYLDVMGLQIGDGTAQIQKLVIAREKVGRVAVQYAKQPSELRQISK

SEQ ID NO: 13940 - protein, 688 aa, BradyrhizobiumColbertium
MLTPTSPGTSLYPHLLSSLKVGRTTLRNRMIMGSMHTRLDMEDNGVHKMAVFLAERAKGEIGLIITGGYAPNSAGLIEPGGPILTERAQARELRRITDAVHQHGGKVCMQVLHSGRYSKQRDCVGPSDIPTRINRFPPRAMTGAEIEQTISDYVRCALLAKEAGFDGIEIMGSEGYLINQFTVVRTNNRTDEWGGSEQNRHRLAVELVKRSRSATGDDFIIVYRISALDLVEGGATGEEIDRLAQRVEAAGADILNTGIGWHEARVPTIAYVIPRGAWRFAASRLKKAVRIPVVASNRINTPDTAEEILAAGDSDLISMARPMLADPHFARKVREGNAGKINICIACNQACLDLIFSERTASCLVNPRACRETEFEDGPAQTSRRIAVIGAGAGGLAAAAEASRRGHKVTLFEAADRIGGQLNLARAVPGKVEFDEMLSYYSGQIADGGVDLRLNSAPSVSDLKDARFDAVVVACGVHPRVPEIPGIKHPKVVFYNDLLSGKSHAGRRVAIIGAGGIGFDVAEYLCHSQPDEPPKSRAMDIREFQQEWNVDASLTKAGGLSGDPLAPKPSSREITMLQRKKTRPGLGLGVSTGWILRSSLEKRGVKIVGGVIYQRIDDQGLHFVAEGEPSTLAVDTIVVCAGQVSNRDMLTELLKTGIETHVIGGAKEASELDAMRAVEEGVRVAHAL

SEQ ID NO: 13941 - protein, 290 aa, BradyrhizobiumColbertium
MSSQSSQPSYGFSDDELSTIPTVYRPDLFTGQTIIVSGAGSGLGKAIAFLFARLGANLAICGRDAEKLAHVVPDLESLGARVFSRSLTIRDPDQVNEFVKDVWDHFGRVDVMINNAGGQFAQMAIDFKPKGWNAVIDTNLNGSWWMMQAAAREWIERGKTGNIVNIVALIWRGLPGMAHTAAARAGVIYASKTVAVEWAPHGIRVNCVAPGVNETTAFDRYVPEGSATYKEANPMKRHGDAWDIAEACVYLAAPSGKFITGETLSVDGGQQMWGDPWPAGRPKYFRIGQT

SEQ ID NO: 13942 - protein, 288 aa, BradyrhizobiumColbertium
MGLVMHESPSKTRFAPELLKGQVALVTGGGTGMGRATAIEMARCGARIAVLGRRIDPIESTAKVIRDAGGEAFAVSADIREPDLIERAMEKIKAEFGGLNILVNNAGGQFVTPARELSNKGFETVIRNNLIGSWQVTKAAADHFMLANGGSIVFVTACIRSGLGGFVHTAAARGGVTAMMRTLAYEWAEFGIRLNCVAPGTIKTEALGRYPIPPDDWVRLNRNVLGRMGSVEDISAAIIFLSSPLGQFVTGEDWYIDGGETLHLAHDARDMIDAVKFAKRERGDAGLS

SEQ ID NO: 13943 - protein, 261 aa, BradyrhizobiumColbertium
MSDNEPIRYSLEDGIATITIDRPARKNALSVEAMNGLTNAWERVERDSQARVVILTSADCGVFSAGLDLRQAAEIRARDGVDILTLMRDPMQTAMRTVSKPIIAAMTGSLMAGGMLLALKCDLRIGLRGTRAGITEVKMGRGSPWAVPLLWMLPQPVVMELVLTGETLPIERLAEYGFVNYLEETPDAVRARALQLARKIVEGAPLSVRAAKASVLAAMDLGCEKGLVEANRLHVEAYASLDAIEGPRAFAEKRKPVWQGK

SEQ ID NO: 13944 - protein, 390 aa, BradyrhizobiumColbertium
MSTHHVGTPKRSAYFREEHELLKAQIRRFVEEEIKPYALQWEQDGMVPRDVLRRMGELGFLGIRYSAEYGGSNMDTLATVVLAEELGRSTFSGVAITVLVHTDMASVHLYNAGSQALKDHFMPDVIAGKKIVAVGVTEPGAGSDVKGIRTTARREGDGYVLNGTKMFITNGVHADLYCIAAVSSPDARPSQRLSMFLVEKGTPGFRVGRDLDKQGWRSSDTAELLFEDCRIPATNLLGEEGRGFYGIMQNFQNERIVLGAMAMGEALAAIEITLDWVTQRQTFGAPLWSRQAIRHRLAMLAAKVEAGRQLVYCAAWLVTQGIDATKEVSMVKAYCGELVNEVMYTCLQFHGGMGYMRESTIERMSRDARVQSIGGGTTEVMLEEVAKRMR

SEQ ID NO: 13945 - protein, 123 aa, BradyrhizobiumColbertium
MNELGKGSHRNKISAAIKAHLVTLLQESDYTSANMRVYGQLPERIKKRHRPLRRAYGKYWDDMLADAQRAGEIRPEILIVPLRRFILGALNWTVEWFDARKSSSVQELASRTTLLIFNGILPR

SEQ ID NO: 13946 - protein, 74 aa, BradyrhizobiumColbertium
MRPLAKFVHTCLYRIEYTLQSKFEDFVQYRGFRIEVVVDAACLHSRLVSDLSKRSGGIALLSKKLCRDPKDKVS

SEQ ID NO: 13947 - protein, 411 aa, BradyrhizobiumColbertium
MSAIGFQLPEDVVAVRDGVMRFVEAEVLPRLERNHALFNDPRLTYAADGRYAPEVRALIREVRMASAAAGYYAMCAPAAIGGGGLGHLAYYVAWEAVYRRIGGHSILTPWVIAHWAFGPSAMLTQATPEAQARCLDAMITGRTSMCFGLSEPGAGSDASMIKTRAVGDGDGWRITGRKLWTTNSPTAEWCIVFAVTDPGKAQRKAGGISGFLVPTDTEGFEVESVVRLFGHPGGHEGALVLENIRVEPWQLVGALDDGFKLALYGVSLGRIYNSARAVGQGRWAIEKALGYVKQREAFGAKIAEYQGVSFPLARAATELHAAHLMGLNAAMLLDSGERAVKELSMAKAYAVQVGYRAVDQAIQAHGAMGLTNEVGLVHALQDLRIINIADGTNEILARTIAQRLLAGDIEL

SEQ ID NO: 13948 - protein, 867 aa, BradyrhizobiumColbertium
MIRGTCDEPTYPGRLRAVRISARLGTIARRCIARPRFTFSGQPETRTLILRATQGYGKSVVLAQNWLAFRAAGNNAAWVSLRDGYETEGALAEAIYGQLLDAASREGRAVPADLAELVATLWEEFGAERPANVICIDDIEHAPALLHALETFVLETPPNVRFAIAGDTRRGFARLGLESGVREVHARDLAFTLDDAETFLRAHPVANVTAQQMIAETQGWPALCHIMCRTELPVRPAVNWPETVTFLHEEIERRLSRRQLEFVENAAMIDPISAESYNYAYKSTNADALIREIDLDHLLFRPAENDSTLFSLHPVLRDYLQHRFLVRSAERKSYVLKRAAFWHWRRREFQKAVNLALRAGDHRWALGLSEDIMLDLALRQGEIEALREWLGRFPTRELRKHPIICLSYAWTMYFSQQADKAERLLGYLPAPRASSGAHPDRGWLQLVRAIGAATHDELELSERLCNDWISNFGDDNAVGKGAALTCLAFMLASEYRFDELKQALVMAHSVNSAAHQHYAFGWLYAAEIQAALARGDMRTALQLIDTARNDSDVQVTRTSFSSKLLIALELDVLFELGRLDIAEHSVAGLLDFVANYGVTDVFYGVSRVIATWHRANGNLRGAAALLERARALAGERALPRLGMLIELELAELALLSGARDIDYLLPRDSSEVLTGPHARPLRAQISLLRAMEAIPKGQHSLALRNAEAAAKIARSIGAGRLEVRALMCEAGAHAAAGALTPARRKAVNAFELIKQLGCYRTGLDTRDLLLALAPVSADAFVTFDFDGIAKPRPRTERPSFPLELTTLSVRQISVLRLARDGLSNKRIADQLLVSEDTVKWHMRRIFADLKARNRVQAISEAERRNLI

SEQ ID NO: 13949 - protein, 400 aa, BradyrhizobiumColbertium
MINTPDQSVSILGYIDRKRYLWMLSTLWPATPMIGLWLVAQTGWSIWYALVLIVWYAMVPLLDAMFGEDFNNPPEEAVEMLEKDRYYRVLTYLTVPIHYAALIVAAWWVSTHAMSWLEIITLALSLGIVNGLALNTGHELGHKKETFDRWLAKLVLAVAGYGHFFIEHNKGHHRDVATPMDPATSRMGESIYKFSTREIPGAFRRAWALEEERLSRRGKSVWSIENEILQPMLITFALYAGLLAFFGPLMLVFLPIQMAFGWWQLTSANYIEHYGLLREKLPNGRYEHQKPHHSWNSNHIVSNLILFHLQRHSDHHAHPTRSYQSLRDFKDLPTLPSGYPGMFFIALIPSWFRSAMDSRVVDWAHGDLSKIQIEDGKHALYERKFGTVGTDAKPGLVAAE

SEQ ID NO: 13950 - protein, 182 aa, BradyrhizobiumColbertium
MAKYQCPGCKYTYDETLGHPHEGFPAGTAWANVPDEWACPDCAVRDKVDFELIGEAPAATTPATQAVEFAGTARSAVPVTDTAVIEKPASPMSKPAARMAAVPQAAEALPPQLFSLQSEPGFAENKPFVKWVCITCGHIYDEALGDPSGGIAAGTRFEEIPEDWCCPECGATKKDYALCQET

SEQ ID NO: 13951 - protein, 499 aa, BradyrhizobiumColbertium
MLAKGIGPIRPAMEVIVNIHADPNDIPLVDTRSTVADVFAKQREAGWARRSDFDRKARIAALNRLREVLQRRETDIIAALYADFRKPESEVRLTEILPVLQEIAHTKRHLKGWMRSRRAAATLGVFGTRARIRPEPKGICLIIAPWNYPLNLAFGPLVSALAAGNSAIIKPSELTPATSTLIADIVAETFSPDLVAVVEGDAAVAQELLALPFDHIFFTGSPQVGKLVMEAAAKSLASVTLELGGKSPTIVGPTANLKKAARNIVWGKFANNGQTCIAPDHVFVHRDIAQEFNETVMAEIGRVYGKTPEVQKMTPDYCRIVNDRHFNRVAGLIEDARAKSARILLGGQTDAVQKFVAPTLISQITPEMAISREELFGPILPIIEYDDIDKVIDQINANPKPLALYVFDNSRAFAEDIITRTSSGAVGINLTVVHFLHPNLPFGGVNNSGIGAAHGVFGFRAFSHEKAVLQDRYSIVHMLFPPYTGFVKRLIRLVVKVLG

SEQ ID NO: 13952 - protein, 543 aa, BradyrhizobiumColbertium
MEQRSESHGTYDYIIVGAGSAGCVLANRLSADPAKRILLLEAGPRDKSALIHTPIGIALLANSKKLNWAFNTEPQQHLNARPLFWPRGKTLGGSSSINAMVYMRGHKADYDGWEVASGTSVWGWDRVRALFKRLENNQRFGNSEYHGTGGELFVSELQTVNPLSRSFVKAGRELQIQHNDDFNGERQEGVGLYQVTQNRGRRWSSAKAFLESALDRPNLEVITDARVTRVVMDGRRAIGVSYRRNNQNKQARLNPAGEVLLSGGAVNSPQILMLSGVGAAEELKEHGIPVLHDLPAVGKNLQDHLDITLMNAASSRQPIGVALSFPPRAVAGLFSYIFRRKGFLTSNVAESGGFVKSTPERDRPNLQFHFLPTYLNDHGRKITYGYGFTLHICDLLPKSRGRIGLKSPDPLDDPLIDPKYLDDPEDMKTMIAGVKIGRRIFDAPAMAVHSRREVLPGPAVQSDDEIAADIRKRAETIYHPVGTCRMGADPASVVDPQLRVRGIEGLRVIDASIMPTLVAGNTNAPTIMIAENAADMILGKIHI

SEQ ID NO: 13953 - protein, 169 aa, BradyrhizobiumColbertium
MLDCRFYHFRLPFSGFEHAHVVLGGESFVALAEGLQNALWSLGGVPEQHRSDSLSAAFRNLGADAKEDLTTRYEAFCGYYGMTPTRNNRGVSHENGSIESAHGHLKRALADALLLRASRDFDDLAAWRGFVDESVGRRLFIRTRLESHPPDRHISHGLTALLEIFCDTA

SEQ ID NO: 13954 - protein, 668 aa, BradyrhizobiumColbertium
MALSDRHLAAIDLTLVLGSCAVMAALMIGLAIGYFVDRSMLRPIELLTAAMERLRTGETPLARTSSAIERPETSADAYPGMEFLPEYEGRKHEIGALARTLRQFHERGLDVQFKSNLLNSAMANMSQGLCMYDADDRLVVCNSRFQDIYGLPAEAIEPGTPIHRVAEPECVGHDWECDLVEAYATIKAALARDERLLPEQRLADGRTISISAVPTENGGWVATFEDISERRAADARIAHMAHHDALTGLPNRVLFRLEAEQALKRARRGEQLAVIYLDLDGFKAVNDMLGHAIGDRLLVAVADRLRASMRDDAFVARLGGDEFAVVLAVGQPDDLAVLAQRIIETLSTPYDIGDHQLMIGASVGIAVAPTDGHDPDQLLKKADMALYRAKADGRGKYFFFEAWMDERMQARRALEVDLRKALAREEFEVFYQPLVNLQTNEVSSFEALLRWRHPVRGMVGPDNFIPLAEEIGLINEIGAWVLKQACSDAMGWPDHLKLAVNVSSLQFRSNRLSLDVVAALGHSGLPASRLEIEITETALLQDTEATIAVLYELRQLGLSIAMDDFGTGYSSLGYLRKFPFDKIKIDKSFTLGLPDRADSLAIVRAMMGLGVNLGMITTAEGVETEEQLAALRAEGCTEVQGYLFSPARPAGEIAALLSRMRGQTRVVA

SEQ ID NO: 13955 - protein, 138 aa, BradyrhizobiumColbertium
MLLAMAERRLGLADKLARMFPDRRDPTRVVHSLVDMFRARMFAICCGYEDADDLDHLRSDPAFKLACGRLPDSGRDLCSQPTLSRLENAPRLRDVIRLTYTLVDAWMDKAVTARPRGFGSLKYQNAGTEAGTATLGEV

SEQ ID NO: 13956 - protein, 147 aa, BradyrhizobiumColbertium
MTIVDDKAKIVYISPIHEAFFGLKAGEGNGRPVETVIDNTRLHEIVATGKAEVGKIQRMRGGDRVVSRIPIKRDGKVLGAIGRVRERPIRYLSRNGRGGVHQVPLALRFRRLLGLQKVHVAHHAAVVADASVLGHEVVDGASASAGP

SEQ ID NO: 13957 - protein, 82 aa, BradyrhizobiumColbertium
MQFDEFKACTTWWTKREDNDQAWKVQVKELLDAGCNLDRKNPRAKVDFEHLPPEQLADDILRKELRIAELMREIKAALGASA

SEQ ID NO: 13958 - protein, 392 aa, BradyrhizobiumColbertium
MNLSWQSVPLKQALKRVARFESREDINEYVFAGTYSFGRGVFVSERKLGATFKLPKVQRLRAGDFVYCKIMAWEGAFGIVPPEADDCVMSNAFVAYEADSSVVDPKFLDWYFRAPSNWQRIGRQSTGTNVRRQSLHPEQFEASEIPLPPLGEQRRIVARIEKLAARVQEAQQARLRAVNELSALHTKLLLSTFDSVSNSSTEIGAEFVVTTGGTPSRANSSYWGGSNAWVSSGEVAFRDIIDTREKITDLGLRESNAKIYPPGTVLLAMIGQGKTRGQCAILQCAAATNQNVAAIHVTKTIHSPRYVYWWLYANYRKSRSTETGTAQPALSADRVKRMLIPLPERNRQDQIASQLEALQSKFDAVKALQAQSAIELDALLPAVLDKAFKGEL

SEQ ID NO: 13959 - protein, 87 aa, BradyrhizobiumColbertium
MLASIVKNIERVMAAEYSRELSAKVYAGRCRFARLGYKPCGRVGYALVRELVDEEMQTRQAMKKGERKYILADHIRIRPGDPWKSLS

SEQ ID NO: 13960 - protein, 49 aa, BradyrhizobiumColbertium
MSVIALELNQKGLVSSTGAAWIRAAVGTVLRNESYIGNLIFNKSSDRRR

SEQ ID NO: 13961 - protein, 62 aa, BradyrhizobiumColbertium
MKNPPEQWIRREGCTEPIIDREVFFRVRKIIEERRVDLSEDEMLGPLRKALREGRLTPTNID

SEQ ID NO: 13962 - protein, 68 aa, BradyrhizobiumColbertium
MIAYKQYHIQRFEHGHKRWVARITRSDGQNIRTILPASEHPYLDTKPTASAEEAEELAKEGIDFGGIV

SEQ ID NO: 13963 - protein, 135 aa, BradyrhizobiumColbertium
MKKIAMSTLVAGTIGLSSVAATSPAEAHWRGWGPGIAGGLVAGAVIGGLASSAYGWGPGYGYAPGYYRAGYYGGPYAYDYGYDAPYRWGGGYTTTTYYTQPVSYGYRYRRVVRPAHAYYRGSYPVVRHRWNHHHW

SEQ ID NO: 13964 - protein, 103 aa, BradyrhizobiumColbertium
MAVAVDWLDAYRAGDLETIMELHADDAVVHCGCSGAQTITGREALRAYWIDRLQNFPAGTLDDLNPSDNGTVISYVTSTGVMSALLAFDAVGRIKLLDCSPLQ

SEQ ID NO: 13965 - protein, 1145 aa, BradyrhizobiumColbertium
MIVDRQPMVLQGLKSVLGTQQDFDVVASSSDGASCLEAIRKLAPDVALIGDALPDLTANEILAIAGAEKLSTRLVFFTESDAGLTAAIAAGTCSAISKYAAPVTMLRSLRLMAKSGVSLQQRDLSPVENAAEDGKIEKMLTLLTDRERQIARLVSEGMSNKEIARELNVSQGTVKVHLYNIFQKLEITNRTVLATIALLQRTSGLGALALAFLAFAIADELKASEANGISQADSHHAGEHALYEVWKKAILQRLILSQSDATPAFSDKDFSARANQVANPAAAMEALRAAEQFIVSKPWKDVDPVGSISPNLPGLLLRGINDTPAGDEPAPKHQFPPFASSPMSPQGGYGAFAAVAGALIFALQDPDQAKAHELDQGSIDTLLAIGGENATTSLAAITHVEGNHGGNSASDHLPHDAGRHSGSVTIASDIAQDSVQGQAGPDVPGHNVQEPVGLLDSDHDAGPAGFGRDQPMAGNVEHVVNHSPIESKSNATELVLDSTSGPGRLNLAAFGALAWLHLTAAPKSIPPHTLAWVYDSERNETIVYVNPTDRVLDVGDRSLVEVHLQGIVAVAEADFAQQTEGGVHAATLEQLEQALMPASTDETAVSASSGDASEDSLATADVWSALADDGFSFQFAAVRIGSGTAAKSGAATSGSADATEESTGPSGVSAYGSSTPPGHSAATPAAENFSAKNEPMNSNAGVPSTKQNDTAQPGFGTGAGIGGGNPEHTAAPGSTKAEMAQADSKPGNGVGHGNEPHSQAPDDPPKAAKTKGPGAEHGNSGHANSAKGSKAAEAAEPSVAPDDKAGRGHSQHGAEPSSAKAADAGITEAKSKPGKGVGNDHEHYSQALDSPRGAEKTAESGGIEHGHSGHSASAKGAEASKSGTGGGDTEHGHSQHPAEPGSAKAGAAEMAEVKLKPGNGTGNDHEHQSQAPDSPPGAAKTAESGEAEHGHSGRSASAKGSEAGKGDANAGDMEHGHSQHAAEPESAKAGALEIAEAKPKSGGGIGNDNGHPQDGSPGAVKTAEPSGAEHGNPSHSSSAKGADAGASIATNSTDQSNSQRDAHSGVAASESAPALGGIDQVFRFDDGAASSTLITLAEPDEVHKPHAALSQEDEVMPHALDEHGARDGHHGSHPGIPSAPHDLLI

SEQ ID NO: 13966 - protein, 93 aa, BradyrhizobiumColbertium
MTNRFASSISAALRHPGVIALIVAGVTIAAMLIVDHGPWSRAKTQPAHVAMYATTGEAARAAGAKVLPTNPKSSVEPARPGPKTSPTVNPVTP

SEQ ID NO: 13967 - protein, 404 aa, BradyrhizobiumColbertium
MTGSSKATNIEILACDAGWRNYHFVKLTTEDGIVGWSEFDEGFGSPGVGAAIQRLSARVIGQNVFQHERIFAELFAATRPAAGGVVAQALGAIENALLDAKAKSLGVPCYELLGGKIRDRVRVYWSHCATWRINHPSWYKPPIESLDGVKAMGREVREKKFTALKTNIFSYDEGRPTGWRPGFGSPFAPEINVDRKILRDLHMHLEAIRDGAGPDVDILLDCNFNAKTEGYLKILRTIADIDMFWVEIDSFNPEALGYIRRQSPHPISSCETLLSLREFLPYFHAQAMDVAIIDTPWNGVWQSMKIAAAAEAFEVNVAPHNFYGHLCSMMNAHFCAAVPNLRIMEIDIDRLSWDRELFTHEPDIRDGHLIVTDRPGWGTEPNEEALRAHPPKTSGGLLNYGRKS

SEQ ID NO: 13968 - protein, 428 aa, BradyrhizobiumColbertium
MRDGALTPTKSAPTLLQRLGPGLVTGAADDDPSGIATYSQAGAQFGYGLLWTVFLTTPFMIAIQLVSARIGRVTGKGLAANVMQLAPRWAVLALIAMLVTANTFNIAADIAAMAEALSLVIGGLNHEHALIFAAGSTLLQVFLPYRRYSPVLKFLTLALFAYVATAFTVEIPWSTALLAAVWPKANVSADYLMMVVAVLGTTISPYLFFWQASQEVEEMNQGKRDKPLRDLKRGGLRELDRIKMDTVCGMLLSNGIAFFIILTTASVLHAAGVTRINSATEAAEALRPLAGDFTFALFALGIIGTGLLAIPVLAGSAAYGVAEIFGWRATLEAKPDEAAGFYTIIAAATLIGFGLGFTGIDSIHMLVWSAVLNGIVAVPIMAMMMLIVSSSNIMGRFRARSWLIGLGWLGTALMGLAVLALLGSSLIG

SEQ ID NO: 13969 - protein, 61 aa, BradyrhizobiumColbertium
MYYVAAALLGLSGLFYSAGRHELGQFGADVCRYGSTFCDNPVLVFAGAALAAAWGMFVSVK

SEQ ID NO: 13970 - protein, 208 aa, BradyrhizobiumColbertium
MTTTISRLYDNYSDAERAVARLESAGVPHSDISLVANNSDNWYGSSSGKVDRDRDGTDDRVEGAGTGAGIGAGLGGTAGLLAGLGLLAIPGLGPVVAAGWLAATAAGAAAGAATGGIIGALTEAGVSKEDASRYAEGVRRGGTLVSARVPDQDRARLDALLHEKSVNLGERSATWQKAGWTDFDAASPPLSPEDIGRERELYGAGSRR

SEQ ID NO: 13971 - protein, 106 aa, BradyrhizobiumColbertium
MLRSAVLAATLLLLAVAPAGAQSQPAQSGPGNNAVNSADQNNSNAPVAGRNSFTEGQAKSRIEAAGYSNVSGLQKDNEGVWRGKADKAGTKADVSVDFQGNVNPAK

SEQ ID NO: 13972 - protein, 65 aa, BradyrhizobiumColbertium
MLDVRLVTTSLATLAALMTVAVAEPVKDKAAPVAQGAAEARPIRVILPAPWEPATGQREAVQSAK

SEQ ID NO: 13973 - protein, 75 aa, BradyrhizobiumColbertium
MNIKAIIAAAVLTSVAAPAFAQSFYVVQDVKTKKCTITESKPTTTETTVVSGDTVYKTRSEAEAGMKTVKVCTSN

SEQ ID NO: 13974 - protein, 63 aa, BradyrhizobiumColbertium
MQSRYPLLKKWTADEHERLKAMAEAGRRPDEIAAELNRSEAAVRVRAWQHGIALRLVTQKRGK

SEQ ID NO: 13975 - protein, 103 aa, BradyrhizobiumColbertium
MAAAVDWLDAYRAGDIESILGMYADHAAIHCACGGSKMSSDPDGRRAYWVHRLRNYPATGLDNLQPLEDAVVISYVARGGIVSASLTFDPCGQIAAHVCGPSH

SEQ ID NO: 13976 - protein, 237 aa, BradyrhizobiumColbertium
MAFQPIVDVAEHRVWGYEALVRGPNGESAHSVLSQLTDDQLYRFDQAARVMAIETAGRLFDDPQARLSINFMPNAVYEPRACIQQSLAAARRANFPATNLMFEFTENERMSDPRHVENIIGAYKALGFWTALDDFGAGYAGLCLLARLQPDLIKIDMELLRGIDASHPRQVIVSALAAIARELDITLLAEGVETEAELTALRAAGIRLFQGYYFARPGFMSLPRVAGFQPLEVSVAG

SEQ ID NO: 13977 - protein, 82 aa, BradyrhizobiumColbertium
MPGLAECQSLLRLLIARGDPKAIPLAEGAIDQFLNTAPASMRGRGLRVLQRDALDQHDVAVGVQRSFAETVDAYIERKLAEE

SEQ ID NO: 13978 - protein, 89 aa, BradyrhizobiumColbertium
MPRYYFDLRDDNGIALDEEGLELSGPRAVQAEAAKSAADVARDEMLSAQLTGARHEMAIEVRDACGPVMQVKFCFQIEDLKSRPSSRGH

SEQ ID NO: 13979 - protein, 75 aa, BradyrhizobiumColbertium
MTRQYRAYLVGEDGVFRSAEAFEAPSDSSALTFAQRFTRHGKVEVWQLGRKVAVLEPEQSLPPLRQPSRSAPARQ

SEQ ID NO: 13980 - protein, 66 aa, BradyrhizobiumColbertium
MLTRRRFKQTKTLTERLADEAARCRDEARALAPGHRREMLLRQARQDETAMQIEAWLRSPGLRAPT

SEQ ID NO: 13981 - protein, 284 aa, BradyrhizobiumColbertium
MRVFVCLKRRRVSMAHLPCSKGRERNSRSHHRPMQFACGDGSTLRFLRAQSHIIWQRRGDFFAALRLRMLSGLLILRRRRKATCTAKESTAMRVDRPLPVEHEQAEYMRFGSEAIASNEFGGFRQSLDVLLQSGVTREHRTQAVTGYPPPSEAPPSSSVPKRIGKRLLQQLAAFARDLAPRAVCSARTVRAASFIHGRPNSLGAGLGGWSRLLTLFLFCSSNLYYNLQVKSRSSGSPSIFCGVVHEKLASRFGPIEQASDAGHVGGCQGPSRPTSGVGNGDGEQ

SEQ ID NO: 13982 - protein, 235 aa, BradyrhizobiumColbertium
MATETANNEEKQPSQTNAPLIRCGDKLFAVMSMPAPIPQEPELWARAARTWPESEAVAKRHQGHMIVSLIGKSERPLTAARLTTAAIGALIEAVPECCGVVWAGRVARPADVWIEASRWSLAPYPDYPFRLWVDILPFRSGAKVGVITMGLSAFVDREIEFVSSKLALPALFDKVAGLSVYLIEHGKVVKDGDTIGASASERIAVRYKNSDLFGGMAVFCCTDSAEADSVRTRFA

SEQ ID NO: 13983 - protein, 150 aa, BradyrhizobiumColbertium
MFNKKKGRLPYDLELCYQWWLISDRAKAVFERLDPEAFVFVPCDVRKPQGIYDGPKYWLCDVARVLDALDESQSSLRIGIRNDVRYLDHGKKYYEIFTGDKLVFRDAAIGNAHIFRMAFADSAVICDQDFKDACTSAGLKRIWFHDVLKL

SEQ ID NO: 13984 - protein, 548 aa, BradyrhizobiumColbertium
MYSILFDHHIIPKQCRDHKAFRDIAKETFDFDSPANRIYLPADQKLAAQLNVSPHPGRHLATYSKSVCEALDQIETIDSPSERVAEIGILIDALRVGFVNGDLYTNLPIGRTPAEADAEIRRVLKDHKAYLAQYPDQLRAIRDLEQRGANAGLNHLIKWLPYLDNPERQKALNEVIARNPDVNLTSGNRDRDGTPWSKFEASDPSSGILRIPGSIPLDPRDSPQLPGYSSPSLAGLDEQEGFTGSDPRFTRALPPSPTPDPNEQRLGQLPPTTAAPADPLVLRSDPHSGTPDPYHENPLAGGTPVLRNALPWLAGAAAVGAAAPLIPAWLLTIGGTLALARAVNAQETDAAATMGDAIPSGGVLSAGAPAHNAVGDGLSAGNAAGTSGSSASSSTIWPRLGGAWSVDPEVPASTFADRFGNWVSTSGGTMPARDLPEGPPRPHAGSVAPENVRRLTRANASAASSVFSSGSAPVPFLPSTEFSEQSGSWSVPVADSRPAQMSRPTEAFAHEPSYLIQPPIFGVDGAGNPRNDTEEWFSRWIRFSFGPE

SEQ ID NO: 13985 - protein, 506 aa, BradyrhizobiumColbertium
MPVLLPTSRSRRRPRAERAITGHEVVIAGGGPAGLMLAAELALAHVDVAIVERRPDQAIVETRAGGLHARTIEILDQRGVAERFLREGQITQLAGFAWTRLDIGDLPTRHPYGLALRQSHIERILAGWVAELAVPVYRSREVTGFAQDETGVDVALSCGERLRADYLVGCDGGRSAVRKAAGIDFTGFPPTLSNLMAEVEMHDEPVLGLRHDALGFHGLSRTEHGRILVVVTEATLARGGEPTLRDLGAALAAVYGTDFGVRNPAWISRFTDAARQAESYRKGRVLLAGDAAHVHHSVGGQGLNLGVQDAVNLGWKLAQVVRGISPDGLLESYHAERHPVAARVLKHTMAQIALLRRGDDGRKAAREIVSDLLAMDEPRRRFGAMMSGLDIAYDLGEGHALLGRRMPDLDLVVDGRKQRLFTLLHGARGLLLNFGEVRGIDITPWADRIVAVDAEHDGAWQLPAIGAVPPPGAVLVRPDGHVAWVGDENSCGLAEALTTWFGAADA

SEQ ID NO: 13986 - protein, 64 aa, BradyrhizobiumColbertium
MTPRPVVRVEGSYAIAGGLKQVPRAPHIELGGGAFGFRAGRVDTSGKTPAEWHHRKSSAEPARK

SEQ ID NO: 13987 - protein, 114 aa, BradyrhizobiumColbertium
MSHTVLVVDDDPAVLGVIVDMLEDLGCEVISAHDGAHALERLEQNPDISILITDINMPGMDGHELAELARRARPELKMLQLSGREPRRGGLPMIRKPFSFEELADVMQRTTGIC

SEQ ID NO: 13988 - protein, 71 aa, BradyrhizobiumColbertium
MTSNSIPQETSRNLAGAGPRSEQKPRGEEARDERGIVKDSGENEDTGRDLAHGEGGAMDLPAKPGDLSKDD

SEQ ID NO: 13989 - protein, 57 aa, BradyrhizobiumColbertium
MGYCVALYFAKLLVWDKVLGLGSTDALAGFAAITANLVVSFYFAKRGFENVARIIKR

SEQ ID NO: 13990 - protein, 99 aa, BradyrhizobiumColbertium
MKMPENEIKAIVAEALAEHHRLQQENINAIVLKAVASVLASFGIEDDDRRELRADLQHLRRWRRSVEQAQSYTLKAVITMIATGLMGAVWLGVKVVLGK

SEQ ID NO: 13991 - protein, 46 aa, BradyrhizobiumColbertium
MSLHDDGDAALAVTSILADGFDPSTEFVLSMRPMTTSSIRCVNCIG

SEQ ID NO: 13992 - protein, 107 aa, BradyrhizobiumColbertium
MTFLNSATMPQFEIGAWWLAYHGDVAVAFAGIVPSTHVSNGGYFSRVGVLQRHWGMRPSAQMMRAVEARGSRMGWDSIVSDTTDKPVSANNFIQAGYRLFAPKTPWA

SEQ ID NO: 13993 - protein, 422 aa, BradyrhizobiumColbertium
MPTKPQLPERSPRGTAGPAALDGLLVVDFTRVVAGPACTQTLADFGAHVIKIENPDGGDDTRAYEHAEIGGESAAYLSLNRNKRGIALDLAIPEAREIALDLIRKADVVVENFSSGVMKKFGLDYQSVAPLNPRLVYCSISAYGRTGPFASRPGFDPITQAESGFMSLNGFADGPAVRTGPPIVDMATGMSACNAILLALLARDRLGRGQHVEVALFDVAMGMTGFYGMAYLINGENPGRFGNSPSGSPTVGVYEASDGPLYMACANDRLYRRLVVDVLNRPDLITDPQFATRKARSENKELLRAAIAEVFASYTLENWMAKMKRANIPVGYLRTVEEGFNAPEARERHRLNRIPHPTAEWVPNIEPPITMSLTGAIDPVAAPLLGEHTGQVLHDTLGYDESRIAEFAERGAFGAVKPPTSA

SEQ ID NO: 13994 - protein, 401 aa, BradyrhizobiumColbertium
MIQPTGSQAGGGAYASLIAKARALLPQLRERAAQTEELRRLPPETERDLHDSGLFRMLQPSRVGGAELDYVALVDCAELLGKADASVAWNLANLASHHWMLGMFEQKAQDLIWGRDPDTLIASSFIFPAGRATRVEGGYRLHGSWPFSSGVASCEWNMLASVVYSDDEADGIEYRIFLLPKGDYKVLDTWNVAGLRGTGSCDVEVREAFVADHMTVGVGDLSGGPTPGSSVNPNPLYALPVFSLFPYVLSGVALGNAQACLDDYTEVARHRISTYNRAKLSDFQSTQIKIAEASAKIDAARLIMRSACLDAMDDARRGHIPDMATKTRYRRDGSYSVNLCTDAVSMLFAASGARGLFTSGVLQRQFRDAHAINSHLAFNFDAAGTNYGRVALGLPSENLTL

SEQ ID NO: 13995 - protein, 187 aa, BradyrhizobiumColbertium
MNDLPKQPRAPDPANEFASDSSQIDPRDFRNALGTYATGVTIITAAAPDGKPYGLTCNSFASVSLNPPLVLWSLVVYSSSLTIFQNASHFTVNVLGASQQALANKFAKSSDDKFTGVAWTPGLGNAPVLAESVANFQCRSVNRYYGGDHVIFLGAVEAYTYNAKEPLLFARGAFGRFMADDERKKSS

SEQ ID NO: 13996 - protein, 114 aa, BradyrhizobiumColbertium
MAVLAEAARLAVNAGIDANRLPEALAGGFADSIPLQLFVPRMVQGIHSPPLGHIATMLKDLDTVADVAQATSTPVPMASLAGQLFRMAKAARGAEADALEIYKLSATEHPSKAS

SEQ ID NO: 13997 - protein, 113 aa, BradyrhizobiumColbertium
MPNIVHILEACRADFVDKNPELVKAYVRDITSGMKKALANREETLKVVSEVLKAPVPVLETYLLKDNDFGRDPGAAPNFPAIQKMLDIYAETGMLPKLDVAQFKHPSIVAPLQ

SEQ ID NO: 13998 - protein, 564 aa, BradyrhizobiumColbertium
MKKLRSRVTTDGLDRAPHRAFMRAMGLDDAAIARPMVGIVSMKGEQTPCNMTHDFQVAAAKTGIEEAGGTPREFSTVSVSDGISMNHEGMKFSLFSRELIADSIEAVVHGLAYDALIGYGGCDKTPPGVMMGMVRCNVPSIFIYGGSSLPGRIDGRTLTVLDSYEAVGSFMTGEIDGATLERIERACLPTIGACAGQFTANTMGMVSEAMGLTIPNVSMVPGVYSERAQISRRAGRLIMEMLERGGPLPRDMVTRKSLENGAAIVAATGGSTNAALHLPAIANEAGIAFTIDDVGEVFARTPLIGNFRPGGKYTAKDVYDIGGAAVIIRELIQSGHIDGNCLSITGRTLAEEYGAANAPDGEVVHAAGAPIMADGGVAVLKGNLCPDGAVIKVAGLKSLFFEGVARVFEDEEACVAAVRDRSYKAGEVLVIRNEGPVGGPGMREMLGVTALIYGQGMGEKVALITDGRFSGATRGMCIGYVSPEAFVGGPLALVRDGDNIRIDAANRRMDVLLEEQELAARRREWKQRPPRHRAGALAKYARLVGQAPGGAVTHEGPAEWPWFE

SEQ ID NO: 13999 - protein, 281 aa, BradyrhizobiumColbertium
MTIVPARSSEWVRPVAQQEPASAIIEIDRVSQVFQTSARKDHVALSDISLTIEEGAFVSILGPSGCGKSTLLYIVGGFVSPTSGAAKMKGQAITAPGPDRGPVFQEFALFPWKTVLGNVMYGPRQQGVRATEAEAQSRALIEMVGLKGYENFYPKELSGGMKQRVALARTLAYHPEVLLMDEPFGALDAHTRTRLQNDLLNIWERDRKTVLFVTHSVDEAVFLSDKVVMMSKSPGRIRQVIDIDLPRPRRRNELLLDPRYQKYVVDIERMFDESDEGGVSA

SEQ ID NO: 14000 - protein, 261 aa, BradyrhizobiumColbertium
MMSPAAVTKYAAPVLACIGLLAVWQVASLALKNDSFPTAIEAISAIPSILGDKESLINILASLRRMAMGFGAAVLVSIPLGLLMGRSAAIAAFFNPLLMVIYPVPKAALMPIIMLWLGVGDITKTLVIFLGVSLPVIYHSFEGAKAIEEKMLWSGVAMGLSPLQRLVRIVLPAALPEILTGCRTGLVLALITMITSEMIARQSGAGNILFNALDMGQYDTVFAMIIIVGAMGICLDAIFERVRARLVRWSEPQFDMPLSFS

SEQ ID NO: 14001 - protein, 255 aa, BradyrhizobiumColbertium
MMSRFLSPSVALGIAPIVMVIALWQGLVSFGFAPAVLLPPPGFVFGRLLQQLVTSTFQQEIAATLIRLFAGFAIAVVVGVSVGIAAAASPAINAVVRPIVRVLAPLPKVALYPALLLLLGFGHGSKITLVAADALFPILLSTYYGASTVEQKLIWSAMAAGTPRREILFKVVLPAAMPSILTGCRIGLVISCIVVFLAEMITSTDGLGHALVTAARTFQAVDMFVPLITISLLGLILNGLLGVLRSYLLRGFPEA

SEQ ID NO: 14002 - protein, 348 aa, BradyrhizobiumColbertium
MLADRIEAKWIDAFCEIFERCAVKAGDTAAILSETQSRALNVHLAELALLRMGARPFHVVMPTPRNRNIVPVRSTGASEAIQRLGPVITALQQAGFVVDCTIEGLMHAVETPEILKAGARILVISNEHPEALERMVPDSALEKRVRAAAKMLRGTKRMRVTSKAGTALDVDMVGASTVGVWGWTDKPGTLAHWPGGIVVSFPKSGTINGTLVMAPGDINLTFKRYLTSPVKMTLKDDYVVELEGDGTDAAMMRAYLAAWGDREAYAVSHVGFGMNPGARYEALSMYDQRDTNGTEIRAVSGNFLFSTGANEFAGRYTAGHFDLPMMGTTIELDGVAVVREGMLQDVFG

SEQ ID NO: 14003 - protein, 330 aa, BradyrhizobiumColbertium
MTNRINIACLGAGRMGRGIAVAFAYAGHRVTMIDIKARSAEEFAKLEADALGEVRKTFASLSKLGLLAEADVDLLIARVSVVAAGGSAAALSEAGMVFEGVPEVVELKREVLAAASRQVGPDPIIASTTSTILVDDLSGAIVNPRRFLNVHWLNPAYLIPLVEISPGKATDPAVIDEVKALLEGIGKVPVVCAATPGFIVPRIQALAMNEAARMVEEGVASAEEIDKAIRYGFGFRYAVLGLLEFIDWGGGDILYYASRYLEGALGSDRYRAPDVISRNMHEGRIGLRTGAGFLDYSGLDVDAYRAKRLQAMVDLLRHFGLARPPVLGSN

SEQ ID NO: 14004 - protein, 362 aa, BradyrhizobiumColbertium
MKIAVLGGGNGSFAAAGDFALSGHEVRLWRRDADQVAAQRAAGTRILVKDHNGRHDVEVALVTTDMAEAVDGTELILCPAPAFAQADIARLLAPHLRDGQVVFLPPATFGSMIFAKAAQDAGNRAKASFAETGTLPWLTRKHGPFEVAITIRAKRLPVGVFPLDQAPHALDVIGRAFPGVIEPCGDALSGALMNAGPIIHPPLIVMNAGPIEHFERWDIHKEGTQAAIRRVTDALDDERIAVREALGYGAPHFPLAHHYAKKGEIWMYGRGSHDRLTDSGDWRERIVLTEHRYMREDLRLGLSLLVSVAGLAGVATPLANAFLSIGGAICGEDFARGGRTLETLGLGNLSKAELQTLLRNGF

SEQ ID NO: 14005 - protein, 511 aa, BradyrhizobiumColbertium
MDLCSLIDRNAAFAPDKTAIAFEGERLSYAAFAARIERTATALKQEFGVGRGDRIAILSLNRPDYLVLLYACARLGAMLVPLNWRLAVAEQLFILSDAGAKVLVLEQAFSGVLAELGQTAPGKSVVGLDFAPPGGMTFEDLLAGSGGTGRNPHTDLSCPLLIVYTSGTTGRPKGAVLRQEALFWNGVMSQHMHNMTSDDHVLTVLPFFHVGGLNIQTTPALQLGATVTVHARFTPDAALAAIEQERPTLTVMVPAVIQAVSEHPAWATTDLSSLKAVATGSTIVPPHLIERFVARNVPVLQVYGSTETCPIAVYTRLGGDLSRAGSTGLAGLCCEAKVIDQAGNELPAGTPGEIAVRGPNVFFEYWGNEAATRDALHDGWYRTGDIGLCDADGYFWVRDRKKNMIISGGENVYPAEVERVLLEHPDVSECAVIGRPDPRWDEVPIAYVIARSGCRLEADDLRAHLQAQLARYKVPRDIVFVTDMPRTALGKVQHFLLKQLDAQSRGQGEAS

SEQ ID NO: 14006 - protein, 427 aa, BradyrhizobiumColbertium
MQVSKTLDTTNKVALDAPIFDPIAFRLSDEQAGIIARAREIGQTVFAGRAATYDREATFPTENYRDLHRVGLLGIAVPKKHGGLGANYQTYALAAAEIGRYCGATALTWNMHVCSTLWSGPLADDLDMDAETRAEHERRRAVHYKRIVADGAIYSQPFSEGGAAAAGGVAFGTEARPVAGGWIVNGKKIFASLSGHADYYGVLCTEIEEGEKASRRNTLYLAISAKSDGVSVVGDWDPLGMRGTVSRTLLFKDVFVPEDSALMPRGVYFQAAMRWPHMFLTLSPTYMGLAQAAYDFTVHYLRGEVPGMPPVKRRMYPTKQIAVAQMQIKLEQIKGIWFQAVTEACANPSKEQVLRAYAAQYSVMEGANELAALAIRTCGGQAMLRSLPLERIYRDSRCGSLMLPWTAELCLDRIGREALYEAGETDD

SEQ ID NO: 14007 - protein, 271 aa, BradyrhizobiumColbertium
MSQPVPMITKDGRFAYEAAGDPAAIPLIFLHGIGGAARAWRRQLATFSDRFRAIAWDMPGYGGSEPLASVSIAALAEALQRFIEQLDVSRPVLVGHSIGGMIVQRWLVESPKLARAVVLAQTSPAFGKADGDWQKSFIAARLGPLDRGETMKSLAPSLVKELVGDDPDPDGMELARECMGSVPEASYRAMMLALIGFDQRSTLGNISVPTLLLSGSKDNNAPAPMMAKTATYIPGAKYVELAGVGHLANLERPDAFDDALGGFLNSLASKA

SEQ ID NO: 14008 - protein, 253 aa, BradyrhizobiumColbertium
MSGLPHLPHALVTGGGRGIGRAIAASLVGAGATVTVLGRNAAVLEEAVNAGAAHFAAVADVSNETSMNAAIAAASAHKPIDILIANAGSAESAPFSKSDSALFARMMDVNFMGVVHAVRAVLPGMKDRPYGRIVAVASTAGLKGYAYVSAYAAAKHAVVGLVRSLALEMAGSKVTVNAVCPGFTDTDLVAGSIENIMKKTGRTREQAIAELAKHNPQGRLITPQEVADAVLWLCGEGAGAITGQAIAVAGGEI

SEQ ID NO: 14009 - protein, 290 aa, BradyrhizobiumColbertium
MCNAEQGIQGDRMSRPANPVTLPLADYSPQHFLLAVVDGVATVTLNRPERKNPLTFESYRELTDFFRACAFDDAVKCIVVTGAGGNFSSGGDVFEIIGPLVKMDTKGLTAFTRMTGDLVKAMRACPQPIVAAVEGICAGAGAIIAMASDMRLAASGAKVAFLFNKVGLAGCDMGACAILPRIIGQSRASELLYTGRFMTADEGERWGFFSRIVTPEQVLSQAQVLAKQIAEGPTFANTMTKRMLAMEWAMSVEEAIEAEAVAQALCMTTADFERAFEAFANKVKPVFRGD

SEQ ID NO: 14010 - protein, 783 aa, BradyrhizobiumColbertium
MKVAIIGGGPAGLYAAILLKKQRPSADITVYERNRPDDTFGFGVVFSDATLDNFEKHDLPSYRRITQEFAYWDDIAVHFRGTVHRVGGNGFCGCSRQKLLLILQERARELGVALHFEVDIDDETRFADADLILLADGINSRFREKYIEHFQPEVDVRANKFAWMGSTRPLDAFTFIFQETEWGPFIAHAYQYEAGHSTWIFETDPETFERAGLTGLDEAQSAARMADIFGWFLGGHKLLTNRSMWRNFPMIRSKRWVKDNMVLLGDAKASAHFSIGSGTKLAMEDAIALAEAMEKAPSIEAALEVYEHGRREEVEKTQHAADVSLVWFEHVDRFWDFDPVQFAFGVMTRSKAITYDNLKLRAPDFVAEVDKSFARQVRSSGFDVDTERPLVPLFQPFRLREMKLANRAVMSPMCMYSAKEGVPTDFHLVHYGSRAIGGAGLIFTEMTCVSRDARITPGCAGLWNDEQEAAWRRIVDFVHDNSAAKICLQLGHAGRKGATKLMWDGMDRPLEQGGWDIFSASPLPYFPDSQVPRELDRAGMDAVRDTFVAAAERGERCGFDMLELHCAHGYLLASFISPLTNTRTDQYGGSLENRLRFPLEGFEALRAAWPSHKPMSVRISATDWVDGGITGDDAVTIARAFAEAGVDLIDVSTGQTVRDAQPIYGRMFQTPFSDQVRNEARVATMCVGNITTADQANTILAAGRSDLVALGRPHLVDPFFTMKAAAWYGANDAFCPPQYLPGKDQIFRNSVRDRQDLEELRIKAKPKTRAELKAEATKPLAAE

SEQ ID NO: 14011 - protein, 416 aa, BradyrhizobiumColbertium
MKAIIVGGGIGGLTTALMFRSRGLDCEIYEQADTIRELGVGINTLPHAMRELAGLGLLQKLDDVAIRTDQLYYLNRHGQEVWREARGIEAGHDVPQFSIHRGRLQGVIHRAVEERLGREAIHTGCRLGAFTQDEGGVTAYFFDRAGAHVHTARGDILIGADGIHSRVRETLFPNEGPPCWNGLMLWRGARDWPLFLTGKSMIVAGGLNAKVVIYPIAEGSSPASRLTNWAVLVKVGEGNVPPPRKEDWSRPGRREELMPHVARFSVPYIDVKSLISATPEFYEYPTCDRDPLPYWSSGRVTLLGDAAHPMYPVGSNGASQAILDARCLADALVRAEHPRQALLEYEKKRLPMTAEIVRSNRRGGPEGVIDAVEQLAPDGFDNVDNVLSYSQREAIVRGYATKAGFAAVPGLAAVRA

SEQ ID NO: 14012 - protein, 151 aa, BradyrhizobiumColbertium
MKSEITGITRANEGIQGISWNILGQTYVPKSYAEHSFSWHATLPPGTFVPPHIHPDQDEYLYMLEGKLDFMLGDSESQASAGDLIRLGMGVPHGIFNKSEQTAKVLFWVSPSRKLFDLFWGLHNMKEQKPEDVVALAAEFNIHFLPPPPGG

SEQ ID NO: 14013 - protein, 405 aa, BradyrhizobiumColbertium
MRLAALADSHEGQIMKMKMTLAAATLLLGTAMTPALAQEKIKLGVIVTLSGPAAALGQQVRDGFALAVKDLGNKMGGRDVEVVVVDDELKPDAAVTKVKGLLEREKVDFVVGPIFSNILQAIHRPITESKTFLISPNAGPSTFAGKDCNPFFYVTSYQNDQVHEILGKVAQDRGYKRMYLMVPNYQAGKDSVAGFKLDYKGEIVEESYMPLNTLDFQPELSKISSQKPDALFTFMPGGLGVNLVKQYRQAGLADSIPVLSAFTVDESTLPAQQDAAVGMFGGANWAPNLDNPQNKKFVAAYEAAYNSVPGTYAFQAYDTAMLIDSAVRAVKGDLSNKDAVRAAIKKADFTSLRGAFKFNTNGYPIQDFYLTKVAKRPDGKFQTEIVQKVFENYGDRYAKDCKATN

SEQ ID NO: 14014 - protein, 46 aa, BradyrhizobiumColbertium
MTIGKRCEPHTQSKLMLTMAAAASKLKASSSRQAVCMQAARQSFEA

SEQ ID NO: 14015 - protein, 172 aa, BradyrhizobiumColbertium
MLAVSDCINMLDSETKAVETPEDHAEELRLWLRLLTCTTLIEGEVRGRLRQRFDVTLPRFDLMAQLDKAPDGMTLSDVSKRMMVSNGNVTGLVERLVESGHLDRRTSETDRRVQVIRLTKLGRSEFRRMAAEHETWIADLFADLTPKDVRELMRLLAKTKASAQKSAARRRP

SEQ ID NO: 14016 - protein, 563 aa, BradyrhizobiumColbertium
MANAAKVQVTGSHDGNAASAHVDTFARQHLPPRELWPEFIFTRPELRYPPRLNCVSYFLDRWVEQGHGDAPCVISPAVSYTYRELQALVNRIANVLVGKLGLVTGERVLLRSANSPMMVATYLAVIKAGGICVATMPLLRAKELSYPIQKAEITLALCDGKLADEMEKAKATAPDLKRVVYWGNGAADSLEALIADAGAEFAAVDTASDDICLIAFTSGTTGDPKGTMHFHRDMLAVCDGYARNILRAEQSDRFIGSAPLAFTFGFGGVLFPMHIGASFVVLEKTTPDDILNAIEQYKTTVCFTAPTAYRAMLGKLSGRDISSLRKCVSAGETLPKPTFDAWLKATGIKLMDGIGSTEMLHIFISATEDEIRPGATGKPVPGYEAKIVDDEGRDVPPGTMGRLAVRGPTGCRYLADERQRKYVQNGWNITGDTYLMDSDGYFWYQSRSDDMIVSAGYNIAGTDVEAALLTHPAVAECGVVGAPDEARGMIVKAYVIAAPGVTPDAQLTAELQEHVKREIAPYKYPRAIEFVTQLPKTETGKLKRFALRQLAQAAATSSGVAAE

SEQ ID NO: 14017 - protein, 151 aa, BradyrhizobiumColbertium
MTTPKGPQLAVLPTAAEDGTRKAQILQPSGWPMPKGYANGMAAEGRIVVTGGVIGWDAQERLADGFVAQVRQTLDNISAILAEAGARPEHLVRLTWYVVDMDEYLANLKELGRIYRDVFGAHYPAMALVQVGRLVEKAARVEIEATAVIPR

SEQ ID NO: 14018 - protein, 242 aa, BradyrhizobiumColbertium
MRAHQIMTRSVISVTPDTSIVEAANIMLKRHVSGLTVVDETGNLVGVVSEGDFIRRSEIGTGRKRGRWLRFILGPGKSASEFVHEHGRKVSEVMTDSPVTITEDTALAEIVELMERNNIKRLPVVRGDKVVGIVSRANLLQAVAGLAREVPDPTADDDHIRSRIIDTIEKSDWCPFGLNVIVCDGIVHLSGVITEEAARQAAIVAAENVEGVKKVHDHLCWVDTISGVYFNSPEDDELAKAS

SEQ ID NO: 14019 - protein, 98 aa, BradyrhizobiumColbertium
MKGTVKRIRLRSRRRIGGDWHTLVPFEAHRRGFRTSKGMGGSNLRDLLFGPWKYLDDAHSSSSCGLRFDVGSRIRRDLEYVLSCIKSGCGSSQLPNWH

SEQ ID NO: 14020 - protein, 587 aa, BradyrhizobiumColbertium
MSLERHERMPVSADPPPGSEPYPFDRAFHAMLARFTGGISPLALSLAWLDWSSHLAAAPQRQMEIYRNIVRDTGRLVDAAAHAMSPEQKPWAVIAPQQRDRRFSGPQWETPSFNLLAQAFLLAERWWRDAATGVRGVSHANEAIVEFSMRQMLDMLAPSNFAATNPKVLEKAFQSGGENFVFGWQNWCSDLLRLLSGSKLTDDGKFVVGKTVAVSPGKVVYRNDLIELIQYQPTTAQVRPEPILIVPAWIMKYYILDLSPQNSLVKYLTGQGFTVFAISWRNPDARDRDLAFDDYRKLGVMAALDVIGLIMPGRKTHALGYCLGGTLLSIAAAAMERDADNRLGTITLLAAQTDFTEAGELTLFISESQVAFLEDMMWQRGYLDTTQMAGAFQLLRSNELIWSRLSHDYLMGESAPPSDLMAWNADATRLPYRMHSEYLRKLFLDNDLAGGRYLVEGRSVSLSDIHAPMFVVGTVADHVAPWRSVYKIHYQVDADVTFLLTSGGHNAGIVAPPEDPDHFYQVLTKAADAPYVGADEWLKLAPRVEGSWWPEWTRWLAARSGPPCDPPPIGLGDAPDLPDAPGDYVHT

SEQ ID NO: 14021 - protein, 328 aa, BradyrhizobiumColbertium
MRARMLRPTTKATATTQAKPSARRKALPARLSPGMACDTAFRIIARRHLDAVLAQHDGTCRGDPDALHQIRIALTHLRTAIRFFSPMVDDTQRPNVWAELKWLNGQLGMVRDLDVAIERVVAESGDELAVVAELQHWNEKRAESHRLLARALQYARYRRLVEQVSTWIDSGPWATRRSKEAIRLRRRTLADHATERLAEWETTLLKKARKLKRLDVGKRHKLRLLNKRMTYSIESLADLFADGAATKQKSILKQLRKAQRSLGQLNDDARGQALAASLHGAGPNAGQRFHNRKREKKLLRAASVAYRQLDEATPFRSSDLAPSSEPEV

SEQ ID NO: 14022 - protein, 510 aa, BradyrhizobiumColbertium
MKDETAAQERIFQMLTDHPGVTRIDTHGASVFLDGKRALKIKRAVRFPFLDYSTLEKRKAACEEEIRINRPLAPQIYQGVVAITEDPDGSLQVGGPGRPIEYAVDMSRFDESRTLDHLAKAGPLDAKLASAAADAIVASHAAATPVDGQAWLSAIPALIDGNSDGLRAGGHFNTEEIQELGETSHEAFLRIRPLLAERGRRGFVRRCHGDLHLANIVLIDDRPVLFDAIEFDAQIATVDVLYDLAFTLMDLLQHAQPGAANIVLNRYLATTPADNLEALSALPLFMSVRAAIRAQVTLARLNRPHSDRRGILDEAQKYLDLAGKLIRPPGPRLIAVGGLSGTGKTVLAHALAPVIPPEPGAVVLRSDLVRKQMFGVEDTHRLPSSAYTAEITTRVYDTLARRARQVLTQGHSAIIDGVFAGEDERDAIAALARECNVPLNGLFLVADLATRQARIGSRRGDASDATQEVAALQEHYNIGHLGWATIDASGTQEQTLHNCRHAIAVSNEAI

SEQ ID NO: 14023 - protein, 327 aa, BradyrhizobiumColbertium
MHAMVLPAPRARLQMEERPDPLPGEGQVRVKISACGVCRTDLHLVDAELPDIRYPIVPGHEIVGRVDHVGLNVSTHALGDRVGIPWLGFTCGKCRFCRHGMENLCDAPLFTGYTRDGGYATHTIADARYAFPLGETAGDVEIAPLLCAGLIGWRSLVLAGPAERLGIYGFGAAGHIIAQVAVWQGRAVHAFTRRGDVAAQDLARRLGAVWAGASDEVPDEPLDAAIIYAPAGELVPAALRAVRKGGRVVCAGIHMTDIPSFPYDLLWQERQLVSVANLTRQDGLDFLKVAPQAGVRTETTEFPLDQANEVLSMLRNGQILGAAVLTP

SEQ ID NO: 14024 - protein, 50 aa, BradyrhizobiumColbertium
MIAMRPKQGAWCEIIIQHGGWPMTAFVTLSTTWKFEDEPGGNWKAPWLPK

SEQ ID NO: 14025 - protein, 897 aa, BradyrhizobiumColbertium
MSVYRLKNLLSPRSVALVGASARPASVGRAVLENIHKAEFKGQFGLVNPRHAEIGGIAAVKSLERLDFVPELVVITAPAGEIPGIVEQAGRRGSAGALIVSAGLGQGPGSLHEAASVAARKHGMRLIGPNCLGIMMPGVSLNASFAAHMPGAGSLALVSQSGAIAAGMVDWAAQRGVGFSGIVSIGDQIDVDIADLLDYFAMDHKTRAILLYIEAIKDARKFMSAARAAARVKPVVVVKSGRMAQGAKAAATHTGALAGADAVYDAAFRRAGVLRVSDLRELFDCAETLGRVESPTGKRLAILTNGGGIGVLAIDRLVELDGIPATISAEARRKLDAALPPTWSGANPVDIVGDADASRYAAALEVLLGDPDNDAVLVLNVQTAIASAAEIATTVTELVGKYRQQHRSWAKPVLAAWVGADQHIIQTLSDAGVPNYPTEDDAVRGFMHLVRHREVVEELSQVPPAMPDTFVPDAQGAREIVTAAIADGREWLEPVEIKHLLEAYDIAMVPTYAATDVEQAVAYAEDIFAQGGTVVLKIMSRDIIHKSDVGGVVLNLTTPEAVRGAATDILARAKKLRPEARIGGVIVQAMVVKAKARELILGLADDPTFGTVVVFGRGGTAVEIINDKALALPPLDLQLARDLIERTRVSRLLKAYRDVPAVKPDAVALVLVKLAQMAADIPEIREFDINPLLADETGVTAVDARVAVGPPQRKFVGSGPANFAVRAYPSQWERRLKLKDDWRIFVRPMRPEDEPTIHEFLRHVTPHDLRLRFFAPMKEFTHEFIARLTQLDYARAMAFIAFDEATGEMVGAVRLHSDSIYESGEYAILLRSDLKGRGLGWALMQLIIDYARSEGLKAISGDVLQENTVMLEMCRQLGFEVKPDPTEPDICDVKLKL

SEQ ID NO: 14026 - protein, 161 aa, BradyrhizobiumColbertium
MNTENVVRHLRVLWRTDRIIADIRLRHLLVGLGLRAFAALIAAFGLLMLELSAYFALVQIWSAIAAAAILGAVNFAIAAVLFVIAGRAPSGRDIELANEIHDTSIEALQLEARALQAQVSGAMHHPLSTVAPLLMPLIATIIKNLRTTTKASADAPSAGAR

SEQ ID NO: 14027 - protein, 91 aa, BradyrhizobiumColbertium
MFDSDRMGEELRALKLDVTRLLSSAGEEMFESSKERAEALADQIKAALTELGETVEQEHEQLQGLVAQRPITSLASAFALGVVVGFMLRRH

SEQ ID NO: 14028 - protein, 373 aa, BradyrhizobiumColbertium
MLLAAPSGDVLNLRPEGPWTAANVVTLETLSRSVGADVDRSRVVTLDMSGVSALDTLGAWVLEKLSRRATSSGRSAEFVGVADHFSGLMDEVRQVNRHTPAPTAAPNPVLARLGDLGKSTVGAREDITIFLQMLGALFMAIIGVLRRPRSLRLTSLVYQLYRIGWQAIPIVALITFLIGAIIAQQGFFHFRRFGAESYTVDMVGILVLRELGVLIVAIMVAGRSGSAYTAELGSMKMREEIDALSTMGLDPVDVLILPRVAALVIALPILTFIGSIAALYGGGLVAQFYGDMGPAIYIARLHEAISVTHFKVGILKAPFMALVIGIVACSEGLRVKGSAESLGRQTTTSVVKSIFLVIVLDGLFAVFFASIGM

SEQ ID NO: 14029 - protein, 138 aa, BradyrhizobiumColbertium
MDEIAIAKLEMVGLRPEDADKYPAELSGGMTKRVALARALALDPPILFLDEPTSGLDPIAAGDFDALIKTLQRTLGLTVFMVTHDLASLTTVCDRVAALADGKIVAIGPMRELLQSEHPWVRAYFHGKRSQMLQHEMR

SEQ ID NO: 14030 - protein, 367 aa, BradyrhizobiumColbertium
METRAPYVLIGSFVLAAILAVFGFVYWLNNTGGIGPRTNYHVQFQGPVPGLLVGAGVLFNGIRVGEVTQLGLAPDNPRFVNATIAVATATPVRADTKVGLEFQGLTGVPVVTLEGGVIVAKSGEPLTLIADAGAGQSMTQAARDALRRVDTVLQDNSGPLKDTIANFKTFSEGLARNTGKIDGILAGLEKMTGGGAPAQKITYDLRTPQNIGPADKTLSASLAIPEPTAVAMLQTQRMLFAPSGDRPDFADFLWADSIPKLVQARLIDSFENYDIAHAPLRTSDLGQADYQLLIDIRRFRIATEGDARVEIALSARIVDKGGKVVASRLVEASEKLDKVEPAASVAAFDAAFARVVKELIGWTVQAV

SEQ ID NO: 14031 - protein, 105 aa, BradyrhizobiumColbertium
MLQSALRHGLIGLLLITPALAAPTAEQRGKAFARANCARCHAIDRVSKSPLGTAPPLRSLHRRYPIDSLGEALAEGIYTGHDDMPAFELSPGQIHDLLSYLKTLE

SEQ ID NO: 14032 - protein, 237 aa, BradyrhizobiumColbertium
MKPSVVMIEPNGHFCDDCAVRGAAVCSSLNAAELREFEHLGRRVHFGAGDTVFSEEDITTSFYNVLEGVMRLYKLLPDGRRQIVGFALPGDFLGMNLSGRHNFSADAIGVVTVCQFAKALFTRFIEDRPQLLRRINELAIRELSQARDHMVLLGRRSADEKVATFLLGWRERQVAIKGLSDTVPLPMSRQDIADYLGLTIETVSRTFTKLERQGVIEIIHGGISLLDPARVEAMAAA

SEQ ID NO: 14033 - protein, 41 aa, BradyrhizobiumColbertium
MPADALLVTFVVVSIFVAFAAVLAWADRQTSSGRLDSNSKS

SEQ ID NO: 14034 - protein, 242 aa, BradyrhizobiumColbertium
MPQDKTGDPRQPAGNKLAVLRKHPIFADLEPEALDQLCRYAKHTTVKRGATIAAKGDPGNSLFAVIAGTVKISSSSPDGRNAILNLIGPGEIFGEIAVLDGAPRSADATANTNCELYVIDRRDFLPFVKSQPALAMKFIELLCARLRWTSQQVEQVILQNLPGRLASALLGLTEERKLDSGSGTLSITQQEISEMVGMTRESINKQLRAWAGRNWVRLEHGAIVVLDTDALRALAESGVDGT

SEQ ID NO: 14035 - protein, 249 aa, BradyrhizobiumColbertium
MALANDVTADPPGNHPTIQYIDHQQGLPRMLQFFDGLKAEDLPDGQGWAVEQVSLSTHNGTHLDAPWHFHPTMNRGERSWTIDEVPLEWCFQPGVKLDFRHLPDGYVVNAEDVENELKRIGHTLSPLEIVVVNTSAGAKFGQADYVSSGCGMGYEATMYLLQRGVRLTGTDGWSWDAPFVYTAKKYAEKRDAGLIWEGHKAGRHIGYCHLEKLHNLDQLPSTGFTIACFPVKIERASAGWTRAVAILDN

SEQ ID NO: 14036 - protein, 268 aa, BradyrhizobiumColbertium
MTDYRKLFDLTGKTAVVLGAASGIGKSSAEALAGLGARVICADRAFDAAEATAAGIRDKGGWAEAAACDAASAMDVNALAKTVMQKFSRLDIAVTTPGLNIRKTILDYTEEDLDRVLNLNVKGTVWFFQAFGRIMVEQKGGSIIACSSVRAVTIEPGLGVYGSTKAAIGLLVKGFASEVGHAGVRVNAVAPSIAETALTGPFKQRPDIYNLYAGHTVFNRWSSADEVAAAVAYLASDAASYVSGSTLFVDGGWTAVDGPPTGLTQLHK

SEQ ID NO: 14037 - protein, 57 aa, BradyrhizobiumColbertium
MLVHAPVRNTKIPASRAHLSGKPPVICSKRTRREFLLQPRRRLALPEAQPRAQHSPP

SEQ ID NO: 14038 - protein, 696 aa, BradyrhizobiumColbertium
MNQHAKIEIRHSTCPHDCPSACALDVEVIEGRSIGRVRGSKKQTYTAGVVCAKVARYAERIHHPERVTFPMRRTGAKGSGQFARISWDEALDEIAARFNAAEREFGAESIWPYYYAGTMGLVMRDGLNRLTHVKKYSRFYQTICANVARIGFAIGTGKIAGVDPREMAMSDLVVIWGTNPVNTQVNVMTHASRARKERGAKIAAVDIYDNETMKQADIKIILRPGTDGAFACGVMHVLFRDGYADRAYMDKYTDCPAELEAHLETRTPEWASAICGVPVSEIEAFAKAVGETRRAFFRFGYGFTRSRNGATQMHAALCIPAVTGAWQYEGGGAFFNNFALWHFNESIIEGHDAIDKTTRALDQSQIGRILTGDAEALHGRGPVKAMLIQNTNPMTVAPEQALVRQGFAREDLFVAVHEQFMTETAQMADIVLPATMFMEHDDLYYGGGHQHISVGPKLIDPPGECRSNHEVLQALAPRLGAKHPGFEMSPRELIDATLKLSNHGDIAGLEADIWRDLQPDFRTSHYLDGFAHADGKFHFKADWAHPPFGQTMGDYDKMPALPDHWAVIEHADQAHPFRLATSPSRSFLNTTFNETPSSQAREGRASVMIHPLDAAPLDIAYGDAVTLGNSRGETTLISTLFEGVRRGVLIAESVHPNKNHIGGRGINMLTGADTIAPIGGAAFHDNKVWLRKAVVA

SEQ ID NO: 14039 - protein, 260 aa, BradyrhizobiumColbertium
MSDTTAVITEKRGQAFWITINRPEKRNALNGDVIAGISKGYRDAHDDKDVRVIVLTGAGDKAFCAGADLQNSGAAFAMDYSKPNVDYADLLRLSQNATKPAIARVGGVCMAGGMGLLCMTDMAVAADHVVFGLPEVKVGVFPMQVLSLLQSIAPPRLVNEWALTGEPFDAKAAQAAGLLNYVVPAAELDAKVDWLIGRIVDKSPTAIRRGKYAMRAIASMSFDESIAYTESQIALLAMTEDAKEGLKAFSEKRKPSWSGR

SEQ ID NO: 14040 - protein, 113 aa, BradyrhizobiumColbertium
MGTKPDLSRVSERPDPESWADDELLTLAEAAELFWPKGPLRTASLRTAARDGQLAIAVIAGKFMTTKRALKEMATCSMMKRRSSAGTEPLSAKTLVRHLVEATERRHERTEIA

SEQ ID NO: 14041 - protein, 47 aa, BradyrhizobiumColbertium
MMHPDVIADIKQVAIDEHRAAWDVMEQAAREFLKRRQRARPITTWDG

SEQ ID NO: 14042 - protein, 122 aa, BradyrhizobiumColbertium
MSLGGALVKGVIVGLIVWVLGLFGVSKVSYLVLAIFAWMLSVARTHAVAELEGLGRFRIALGTEGMMQWRHEMMRRSLLGNLAFACLLGGFWPFAEAVASPSRDDWRTVIALMLGLVSSVLM

SEQ ID NO: 14043 - protein, 77 aa, BradyrhizobiumColbertium
MRTSTIYQVAIFVALAAGLSPARALTQDELVAKIQAAGYSQVTDVKSTAEGITAKAMKNGKPVTLVVDSSGQIKERN

SEQ ID NO: 14044 - protein, 300 aa, BradyrhizobiumColbertium
MKSKIWSLAVTGLALAYLSFVYMAHAQAIDWQKVDETLGRKAAVSDDVHRYGFPRSDLSVTLDGVTIKPSLALGGWVAFKPGHGGAMVMGDLVLLETEINPVMAKMIANGLEITAVHNHLLRASPATFYMHVAGHGDPLKLASAIHDAMAESKTPLTVAPPAGPAAAVDLDTAKLDQIIGVKGQANGGVYQFNVKRSDPITQDGIPLTPVGPMGVAIGINFQPSGGGKAAITGDFVLTGDEVNPVILALRTHGIEVTALHSHMLDEQPRLFFMHFWANDDAIRLAEGLRVALDKTASTKN

SEQ ID NO: 14045 - protein, 43 aa, BradyrhizobiumColbertium
MPERKHVPQVESAAMQLFDVVTGHRKPEGDGDVPAGASSKFKV

SEQ ID NO: 14046 - protein, 73 aa, BradyrhizobiumColbertium
MVFSEQKGKIMDREHVKGAADKAKGAIKEGAGKLTGDKDLQAEGKMDKAKGSAHNAAGDVKDAARDAADALKK

SEQ ID NO: 14047 - protein, 466 aa, BradyrhizobiumColbertium
MSSSAPVNGSADRRQRRLLILLAAGFVAFGAAAAGLFYILQPETLRIAVGPSGSEDHQVVQAMAEAFEQESRTVRILPITTAGAAESLALMGAGKAELAVGRSDLAMPADAQTLAVLRKNYVVLWSPSGRAGKDSKKKAAAKVGEIADLAGHKVGIIGKTGANVALLRTILEGSGVPVDKVATAQFGTEEIAKLAQDTTLDAYLAVGPLDSKITTAAIVATSRSRGAPKFLQVEASEAIALRHPRYEAEEIPGSVFNANPPWPEDKIDTISVNHLMLARKELSEAKAAAFYRQLFAVRDTITQRVAGAGRITKPETEKEAEPSVHRGAAAVINGTERTFLDKYSDYFWFALLLLSGIGSAVAWLRRYLNRDERDDNASYRNRLLAVVTEVRGAASEQDLLASQREVDAIIAETLKCYDEGAIEQEDMAAFGLVLNLFDHAVAERRAALQSGPMEARAAGPTIASRR

SEQ ID NO: 14048 - protein, 432 aa, BradyrhizobiumColbertium
MARRKTRKKPIENKDQDNFLQRLGPGLITGASDDDPSGIGTYSQAGAQLGFGIGWTMLITYPLMAATQEISGRIGRVTGHGIAGNVCRNFPAPVIWSMIVLLFVANTINVAADLGAMGDALRLLIGGPGTLYVVIFGAVSVIAQIFFQYERYVSILKWLTLVLFAYVIALFLLKVPWGEALRGLLIPKLQWNGPFLTTLVAILGTTISPYLFIWQSSQEAEEHQINPDKKPLKREPEKEDEEVKRIRIDTLVGMAVSNVIAVAIIMTTAATLHASGKTDIESSAQAAEALRPVAGAMAELIFALGIIGTGLLAIPVLAGSTAYAIGEGRKWPVGLSRKPKEAVAFYGVLALSVALGVGLNFTALDPIKALYWSAVINGILAAPIMTVMMLLVRRKSVMGDLLISGPVYWLGWIATAAMFLCIVGMACSMIWS

SEQ ID NO: 14049 - protein, 138 aa, BradyrhizobiumColbertium
MALLFFRNLAIISGFSHAASGGEENNMNQLLLTTALAALISTGALAQSTVVTTTGTGHAAAVQIEPEYRTKIRTYVTEHKVRPVQQKIVVGQLVPREVELEAVPADWGPSLTKYRYVYSGERVMLVDPSTRTVVQEID

SEQ ID NO: 14050 - protein, 139 aa, BradyrhizobiumColbertium
MPIIRYFVFVGGFLLALLFAADRYLPAPVEAAAVADPDRTIIRIKSARSLPEKIVFDTSQRAEVPMIAQADPIPEEPPREVREAMAAVPGAPSGEARKEAPARAAAVLTHPKRSAKLQKRTPDRRLAFERTDPFAGRWW

SEQ ID NO: 14051 - protein, 106 aa, BradyrhizobiumColbertium
MATEARPRAPTISADIAIFFMKDPSTWFERPDRNGKNGNGFAVPAASGQWMLGAGAASLESIELGPQQQALGWVQFMLRRESSRRPSLDVIALTLLNSPHSVSAVG

SEQ ID NO: 14052 - protein, 66 aa, BradyrhizobiumColbertium
MFDPGTTALLRAVFDEVCEDVSRHETAARTHVASRILEAATDGDTSPERLKQVGRAALHDAPTMWR

SEQ ID NO: 14053 - protein, 80 aa, BradyrhizobiumColbertium
MNFQVTVLKILVSYPGGFAVMTDLKRDMAILATSGRDWADRTKRLAARVPKLDIFSQGLVERLNGGWRITEKGRAVLEFM

SEQ ID NO: 14054 - protein, 69 aa, BradyrhizobiumColbertium
MVDDVVLKNATETAWNVYRARRPDVGARDSRRCLLERHLHRRWEERQSDTEELAAFGLAYLHRLPKDEC

SEQ ID NO: 14055 - protein, 38 aa, BradyrhizobiumColbertium
MLVARAAIGSTRPGWTPIAISFLISAIIVIVLRIAFGA

SEQ ID NO: 14056 - protein, 342 aa, BradyrhizobiumColbertium
MRIAQLAPLAESVPPKLYGGTEWVIAWLVDELVDRGHDVTLFASGDSATKAKLHAVWPRALRLGRKGVDPNAACALLIEAIGERARDFDVIHSHVDWLPLPVLSRTGVPFLTTMHGRLDLPGLPDVIGTFPKAPFVSISDNQRRPLPDAKWIATIPHGLPKDLFRPSYEAGAYLAFLGRLTAEKGPEAAIRIARAVQMPLRIAAKIPRAETTYFKKKLEPEIDGKSVQLIGEVDEIRKQPFLAGAAALLFPIDWPEPFGLVMIEAMACGTPVIAYRSGSVPEVVEDGVTGFIVDGEEQAIEAIKKVVRLDRRKVRARFEERFIASRMAREYEKRYRELVAGR

SEQ ID NO: 14057 - protein, 75 aa, BradyrhizobiumColbertium
MKKLIVCGALAAFVLGTQAASAAEFYIVRDATTKKCTVVDTKPTTTTTTVVGNGVYKTKTEAESAVKTTKVCTEQ

SEQ ID NO: 14058 - protein, 75 aa, BradyrhizobiumColbertium
MWTSTLGAAFGSESGNRGNWREIQAWNFLRRTGDAASRKGKRAERQATDFDAVVVPPAKLATARFQVIDRGKPAT

SEQ ID NO: 14059 - protein, 94 aa, BradyrhizobiumColbertium
MFVLDGELVCAWLEGVVVWPDGCLVCAWLVELFDAGACVVLMPPPELDDWPAAVWPVEDGECVWAEFVEGLLCADPDEEPGDVVGGDVVDVESC

SEQ ID NO: 14060 - protein, 49 aa, BradyrhizobiumColbertium
MPTDKEKFTLVSGCTFRCEIDALIRVRCWALMFTDAFTLVFDERSAVFC

SEQ ID NO: 14061 - protein, 158 aa, BradyrhizobiumColbertium
MGTVVPRDVRLQPLPPEVVEIVPQYRGYNFVLVKDEIVIVEPSTYKIVTVLPYSGRSTASAPTRSERRKVTFSDRDREVVRKHTKAHPVEREKRVTTGSSVRTEIRTGERVPEGVEIEAFPEEVYRDAPTLREYRYINRDSRTYIVEPHERRIIEEID

SEQ ID NO: 14062 - protein, 106 aa, BradyrhizobiumColbertium
MKTIALGLFAASLLGSAAIAAPLNPSALGSTEISSNMEQVRLVCNEYGRCFRTRGPRYVQRYYGGDDGYVVRRSYGYYGGPGSYDRGYGYYGGGPSIGFSFGTRSW

SEQ ID NO: 14063 - protein, 121 aa, BradyrhizobiumColbertium
MSILLVEDDPLIREFVVEALREAGYHVIHASTGEEALAWCKRRVPNVLVTDVRLPGQLDGWQVAERYREQDPELPVIYATGFSPVTPRPVPGSRIVKKPFHPEEIVRLVEEFGEMKGRNPS

SEQ ID NO: 14064 - protein, 38 aa, BradyrhizobiumColbertium
MCLASNGAKAGAFLASMALADEPVRWNGGSAGTAVRGK

SEQ ID NO: 14065 - protein, 291 aa, BradyrhizobiumColbertium
MLVCAVLQMALQRQTGAPGYFLLLPGVFLSGLIFDRGSGIFAAVIAVGVGAYVSYAGGIGLEFLTTNPLFAITAAGTATVAEFQRAELRRVMLADKKKALLLQEMAHRTKNNLAILGGMIRLEARHGSPELAAALEATARRLQVMAEVYDHLSVKQDSRSVNMRYFLNDVVEKVFQSLAPSGPVAFQVVCGDFFLPHNHALAIGMIANELVTNSLKYAFPDNRAGHVTVTLSNADEIELSVADDGVGLADDSAPGGLGSRIVQLLTQQFEGELTYERQDPGLCVRVRANPR

SEQ ID NO: 14066 - protein, 51 aa, BradyrhizobiumColbertium
MSNPDRPDDLPGRAIAAEIGERLGQMLRVDKELPPSLKSLLERLRVLERAS

SEQ ID NO: 14067 - protein, 128 aa, BradyrhizobiumColbertium
MTESLTILVAEDDYQIQEMVEEALTEAGFRPQILSSAEEAATVLKSGIYEFRARVTDVNLRGKTSGWDLARLVRERDPEFPVVYMTGMSADEWARLGVPKSILLTKPFAPAQLITAVSQLLNTGSAPL

SEQ ID NO: 14068 - protein, 56 aa, BradyrhizobiumColbertium
MSTVANLLAQKQQLLERLENDSGPNERDEVERLLAKIETALMVLESNDPVEEGGPL

SEQ ID NO: 14069 - protein, 155 aa, BradyrhizobiumColbertium
MRVTAPAIAFAFAVSASAISAQPVTWTTYSIPQTGTSVDFPSSIFTEEAGRPDGYGQHFRTADGRADITIQAAPNVASDSPAAFLAKKHPPPRIQYKRVTPRFFAVSSYKGDKVWYNRCNFAGQLVHCVLINYPASEEHDWDDIVTRISLSLRSK

SEQ ID NO: 14070 - protein, 78 aa, BradyrhizobiumColbertium
MIVTSASPLSFTLHLTDGRRIRTFAEAVAFVGSLSPEARSRKHWELSHRMLQRCLESPDFLHAATMSLRSALLMDGLS

SEQ ID NO: 14071 - protein, 160 aa, BradyrhizobiumColbertium
MSQYSLDVLRQRYVVEKRPLEASVEQILRADTRAGARAILASIDKRRFENRSEGQRLRKMLRFETPLWDSRLHAVAGVDEAGMSPLAGPVSAGAVILKPGTRIVGIDDSKKLDAAAREELAKEIKEKAESWCVAFVEVEEIDAINIYWAGIQAMQRAVRG

SEQ ID NO: 14072 - protein, 119 aa, BradyrhizobiumColbertium
MTPQHLLIDAKRLKEIDIPQQAIIKGDAKSASIAAASILAKVERDTVMRTLDILHPGYGFADHKGYPVPAHYEALARLGACAAHRGSFGPVRKVLGLPPLPPWPSASERAAGEQADRFV

SEQ ID NO: 14073 - protein, 315 aa, BradyrhizobiumColbertium
MARKSTLPPRLQPMLATLTDSPFDDLDWVFEDKFDGFRMVAEIRGGRVALYSRNGKIISHSDVEVAKALEGVKADAVIDGELVAIGKDGVSHFQLLQNALRHEAKLLYCAFDLMFADGEDRRALPLLERKKRLKAILPRHKLIAFSKHRGGKGTKFFAEAERRHLEGIMAKRADSPYASGHRTADWLKVKIAQRQEVVIAGFTAPRRTRPFFGALVLTVREDDAWRYIGHVGTGFSHQNLEELHGKLMKLKTPKSPFPAKVKDEQVTTWVRPTLVAEVKFAEWTSKGELRQPVYLGQRSDKKAKDVVREKSWSRE
